United States Patent Application Publication US 2014/0004565 A1 - sequence listing, part 32

SEQ ID NO: 700214 - RNA, 19 nt, Artificial Sequence
  Description of Artificial Sequence: Synthetic oligonucleotide
cccacguaauaguguucug

SEQ ID NO: 700215 - RNA, 19 nt, Artificial Sequence
  Description of Artificial Sequence: Synthetic oligonucleotide
gccuuauuccgaagaaugu

SEQ ID NO: 700216 - RNA, 19 nt, Artificial Sequence
  Description of Artificial Sequence: Synthetic oligonucleotide
caggaguguuuuagauaua

SEQ ID NO: 700217 - RNA, 19 nt, Artificial Sequence
  Description of Artificial Sequence: Synthetic oligonucleotide
caccuuugcucaggcucuc

SEQ ID NO: 700218 - RNA, 19 nt, Artificial Sequence
  Description of Artificial Sequence: Synthetic oligonucleotide
ccggcucgaaguucugcuc

SEQ ID NO: 700219 - RNA, 19 nt, Artificial Sequence
  Description of Artificial Sequence: Synthetic oligonucleotide
guauccgcugauacacuuu

SEQ ID NO: 700220 - RNA, 19 nt, Artificial Sequence
  Description of Artificial Sequence: Synthetic oligonucleotide
gggagcacucccucggaau

SEQ ID NO: 700221 - RNA, 19 nt, Artificial Sequence
  Description of Artificial Sequence: Synthetic oligonucleotide
cguuucaaggggauucaua

SEQ ID NO: 700222 - RNA, 19 nt, Artificial Sequence
  Description of Artificial Sequence: Synthetic oligonucleotide
ccacccuguauagaggcaa

SEQ ID NO: 700223 - RNA, 19 nt, Artificial Sequence
  Description of Artificial Sequence: Synthetic oligonucleotide
gauccccucguuggcacuu

SEQ ID NO: 700224 - RNA, 19 nt, Artificial Sequence
  Description of Artificial Sequence: Synthetic oligonucleotide
aggaagcuucggacguuuu

SEQ ID NO: 700225 - RNA, 19 nt, Artificial Sequence
  Description of Artificial Sequence: Synthetic oligonucleotide
cgugugaaagaaaucgauu

SEQ ID NO: 700226 - RNA, 19 nt, Artificial Sequence
  Description of Artificial Sequence: Synthetic oligonucleotide
gucuucuaaccggcucgaa

SEQ ID NO: 700227 - RNA, 19 nt, Artificial Sequence
  Description of Artificial Sequence: Synthetic oligonucleotide
gcacucccucagaaugccc

SEQ ID NO: 700228 - RNA, 19 nt, Artificial Sequence
  Description of Artificial Sequence: Synthetic oligonucleotide
cacccuguauagaggcaau

SEQ ID NO: 700229 - RNA, 19 nt, Artificial Sequence
  Description of Artificial Sequence: Synthetic oligonucleotide
ccaacacucucccuggauu

SEQ ID NO: 700230 - RNA, 19 nt, Artificial Sequence
  Description of Artificial Sequence: Synthetic oligonucleotide
gggagcacucccucagaau

SEQ ID NO: 700231 - RNA, 19 nt, Artificial Sequence
  Description of Artificial Sequence: Synthetic oligonucleotide
gggcaccgcauucccugca

SEQ ID NO: 700232 - RNA, 19 nt, Artificial Sequence
  Description of Artificial Sequence: Synthetic oligonucleotide
gugcuugaagggugcuauu

SEQ ID NO: 700233 - RNA, 19 nt, Artificial Sequence
  Description of Artificial Sequence: Synthetic oligonucleotide
gcauugcagcaggcuguaa

SEQ ID NO: 700234 - RNA, 19 nt, Artificial Sequence
  Description of Artificial Sequence: Synthetic oligonucleotide
gcguuucaaggggauucau

SEQ ID NO: 700235 - RNA, 19 nt, Artificial Sequence
  Description of Artificial Sequence: Synthetic oligonucleotide
ccccucguuggcacuucau

SEQ ID NO: 700236 - RNA, 19 nt, Artificial Sequence
  Description of Artificial Sequence: Synthetic oligonucleotide
aacuuaaucagaaauuggc

SEQ ID NO: 700237 - RNA, 19 nt, Artificial Sequence
  Description of Artificial Sequence: Synthetic oligonucleotide
ucuggaaccaccaugggag

SEQ ID NO: 700238 - RNA, 19 nt, Artificial Sequence
  Description of Artificial Sequence: Synthetic oligonucleotide
agucacaccaaccagggac

SEQ ID NO: 700239 - RNA, 19 nt, Artificial Sequence
  Description of Artificial Sequence: Synthetic oligonucleotide
aaggcaaauacguugucag

SEQ ID NO: 700240 - RNA, 19 nt, Artificial Sequence
  Description of Artificial Sequence: Synthetic oligonucleotide
acaauaaucuugucauucc

SEQ ID NO: 700241 - RNA, 19 nt, Artificial Sequence
  Description of Artificial Sequence: Synthetic oligonucleotide
aauaaucuugucauuccgc

SEQ ID NO: 700242 - RNA, 19 nt, Artificial Sequence
  Description of Artificial Sequence: Synthetic oligonucleotide
ucuuucaaggcaaauacgu

SEQ ID NO: 700243 - RNA, 19 nt, Artificial Sequence
  Description of Artificial Sequence: Synthetic oligonucleotide
uauaagguuuguucaaccg

SEQ ID NO: 700244 - RNA, 19 nt, Artificial Sequence
  Description of Artificial Sequence: Synthetic oligonucleotide
ucuugauagggucugagca

SEQ ID NO: 700245 - RNA, 19 nt, Artificial Sequence
  Description of Artificial Sequence: Synthetic oligonucleotide
gagagaaucauuccggaag

SEQ ID NO: 700246 - RNA, 19 nt, Artificial Sequence
  Description of Artificial Sequence: Synthetic oligonucleotide
auauaagguuuguucaacc

SEQ ID NO: 700247 - RNA, 19 nt, Artificial Sequence
  Description of Artificial Sequence: Synthetic oligonucleotide
uacacaacuuaauaaacug

SEQ ID NO: 700248 - RNA, 19 nt, Artificial Sequence
  Description of Artificial Sequence: Synthetic oligonucleotide
aaagcguuugaaaaguggg

SEQ ID NO: 700249 - RNA, 19 nt, Artificial Sequence
  Description of Artificial Sequence: Synthetic oligonucleotide
aucaccuuaaagcuguaac

SEQ ID NO: 700250 - RNA, 19 nt, Artificial Sequence
  Description of Artificial Sequence: Synthetic oligonucleotide
uuucaaggcaaauacguug

SEQ ID NO: 700251 - RNA, 19 nt, Artificial Sequence
  Description of Artificial Sequence: Synthetic oligonucleotide
uagaauaagugcuaauggc

SEQ ID NO: 700252 - RNA, 19 nt, Artificial Sequence
  Description of Artificial Sequence: Synthetic oligonucleotide
aaaggcauuguauuccucu

SEQ ID NO: 700253 - RNA, 19 nt, Artificial Sequence
  Description of Artificial Sequence: Synthetic oligonucleotide
auauucugccaacaaaggg

SEQ ID NO: 700254 - RNA, 19 nt, Artificial Sequence
  Description of Artificial Sequence: Synthetic oligonucleotide
guagauauaagguuuguuc

SEQ ID NO: 700255 - RNA, 19 nt, Artificial Sequence
  Description of Artificial Sequence: Synthetic oligonucleotide
acauucgcggaucacaggg

SEQ ID NO: 700256 - RNA, 19 nt, Artificial Sequence
  Description of Artificial Sequence: Synthetic oligonucleotide
aagaacgaugacuccagag

SEQ ID NO: 700257 - RNA, 19 nt, Artificial Sequence
  Description of Artificial Sequence: Synthetic oligonucleotide
ugugucaccgaccuuggag

SEQ ID NO: 700258 - RNA, 19 nt, Artificial Sequence
  Description of Artificial Sequence: Synthetic oligonucleotide
agaaaugauccacuucaac

SEQ ID NO: 700259 - RNA, 19 nt, Artificial Sequence
  Description of Artificial Sequence: Synthetic oligonucleotide
ucguuugguagaauaagcc

SEQ ID NO: 700260 - RNA, 19 nt, Artificial Sequence
  Description of Artificial Sequence: Synthetic oligonucleotide
caaggaagaacgaugacuc

SEQ ID NO: 700261 - RNA, 19 nt, Artificial Sequence
  Description of Artificial Sequence: Synthetic oligonucleotide
uucuuucaaggcaaauacg

SEQ ID NO: 700262 - RNA, 19 nt, Artificial Sequence
  Description of Artificial Sequence: Synthetic oligonucleotide
ucaccuuaaagcuguaacc

SEQ ID NO: 700263 - RNA, 19 nt, Artificial Sequence
  Description of Artificial Sequence: Synthetic oligonucleotide
uggguuuugagccauucca

SEQ ID NO: 700264 - RNA, 19 nt, Artificial Sequence
  Description of Artificial Sequence: Synthetic oligonucleotide
aaggaagaacgaugacucc

SEQ ID NO: 700265 - RNA, 19 nt, Artificial Sequence
  Description of Artificial Sequence: Synthetic oligonucleotide
uccucaagcgacauucgcg

SEQ ID NO: 700266 - RNA, 19 nt, Artificial Sequence
  Description of Artificial Sequence: Synthetic oligonucleotide
uugauuuugggguugugcu

SEQ ID NO: 700267 - RNA, 19 nt, Artificial Sequence
  Description of Artificial Sequence: Synthetic oligonucleotide
uguggaucuaccaccuggg

SEQ ID NO: 700268 - RNA, 19 nt, Artificial Sequence
  Description of Artificial Sequence: Synthetic oligonucleotide
uccuaaagcguuugaaaag

SEQ ID NO: 700269 - RNA, 19 nt, Artificial Sequence
  Description of Artificial Sequence: Synthetic oligonucleotide
guguaaguuuuauacacag

SEQ ID NO: 700270 - RNA, 19 nt, Artificial Sequence
  Description of Artificial Sequence: Synthetic oligonucleotide
caaaggguacucuaaguag

SEQ ID NO: 700271 - RNA, 19 nt, Artificial Sequence
  Description of Artificial Sequence: Synthetic oligonucleotide
uucaaggcaaauacguugu

SEQ ID NO: 700272 - RNA, 19 nt, Artificial Sequence
  Description of Artificial Sequence: Synthetic oligonucleotide
gguuuguucaaccgaaugg

SEQ ID NO: 700273 - RNA, 19 nt, Artificial Sequence
  Description of Artificial Sequence: Synthetic oligonucleotide
guugagagaaucauuccgg

SEQ ID NO: 700274 - RNA, 19 nt, Artificial Sequence
  Description of Artificial Sequence: Synthetic oligonucleotide
uuccuaaagcguuugaaaa

SEQ ID NO: 700275 - RNA, 19 nt, Artificial Sequence
  Description of Artificial Sequence: Synthetic oligonucleotide
agucaaacccagcuuacag

SEQ ID NO: 700276 - RNA, 19 nt, Artificial Sequence
  Description of Artificial Sequence: Synthetic oligonucleotide
uggaucuaccaccugggag

SEQ ID NO: 700277 - RNA, 19 nt, Artificial Sequence
  Description of Artificial Sequence: Synthetic oligonucleotide
auacguugucagcaaagac

SEQ ID NO: 700278 - RNA, 19 nt, Artificial Sequence
  Description of Artificial Sequence: Synthetic oligonucleotide
aaauacguugucagcaaag

SEQ ID NO: 700279 - RNA, 19 nt, Artificial Sequence
  Description of Artificial Sequence: Synthetic oligonucleotide
cuuuguuucgggaggagug

SEQ ID NO: 700280 - RNA, 19 nt, Artificial Sequence
  Description of Artificial Sequence: Synthetic oligonucleotide
uaaagcuguaaccuugauc

SEQ ID NO: 700281 - RNA, 19 nt, Artificial Sequence
  Description of Artificial Sequence: Synthetic oligonucleotide
aaaggaugugucaccgacc

SEQ ID NO: 700282 - RNA, 19 nt, Artificial Sequence
  Description of Artificial Sequence: Synthetic oligonucleotide
guagaugcagcgcuucugg

SEQ ID NO: 700283 - RNA, 19 nt, Artificial Sequence
  Description of Artificial Sequence: Synthetic oligonucleotide
aaauuuaagucaacaauuu

SEQ ID NO: 700284 - RNA, 19 nt, Artificial Sequence
  Description of Artificial Sequence: Synthetic oligonucleotide
aauacguugucagcaaaga

SEQ ID NO: 700285 - RNA, 19 nt, Artificial Sequence
  Description of Artificial Sequence: Synthetic oligonucleotide
aaaguaccuguugugcuuc

SEQ ID NO: 700286 - RNA, 19 nt, Artificial Sequence
  Description of Artificial Sequence: Synthetic oligonucleotide
cucauggugccaaagcgcc

SEQ ID NO: 700287 - RNA, 19 nt, Artificial Sequence
  Description of Artificial Sequence: Synthetic oligonucleotide
uguaaguuuuauacacaga

SEQ ID NO: 700288 - RNA, 19 nt, Artificial Sequence
  Description of Artificial Sequence: Synthetic oligonucleotide
aaauagcagauuugcuugu

SEQ ID NO: 700289 - RNA, 19 nt, Artificial Sequence
  Description of Artificial Sequence: Synthetic oligonucleotide
ucaaccgaauggcauauuc

SEQ ID NO: 700290 - RNA, 19 nt, Artificial Sequence
  Description of Artificial Sequence: Synthetic oligonucleotide
ggguacucuaaguagaugc

SEQ ID NO: 700291 - RNA, 19 nt, Artificial Sequence
  Description of Artificial Sequence: Synthetic oligonucleotide
aaccgaauggcauauucuu

SEQ ID NO: 700292 - RNA, 19 nt, Artificial Sequence
  Description of Artificial Sequence: Synthetic oligonucleotide
uuuguucaaccgaauggca

SEQ ID NO: 700293 - RNA, 19 nt, Artificial Sequence
  Description of Artificial Sequence: Synthetic oligonucleotide
aaggcauuguauuccucug

SEQ ID NO: 700294 - RNA, 19 nt, Artificial Sequence
  Description of Artificial Sequence: Synthetic oligonucleotide
ugcauaaucccaucaggac

SEQ ID NO: 700295 - RNA, 19 nt, Artificial Sequence
  Description of Artificial Sequence: Synthetic oligonucleotide
gauugccacauacucccgg

SEQ ID NO: 700296 - RNA, 19 nt, Artificial Sequence
  Description of Artificial Sequence: Synthetic oligonucleotide
ugucguuugguagaauaag

SEQ ID NO: 700297 - RNA, 19 nt, Artificial Sequence
  Description of Artificial Sequence: Synthetic oligonucleotide
aagaugguguugauuuugg

SEQ ID NO: 700298 - RNA, 19 nt, Artificial Sequence
  Description of Artificial Sequence: Synthetic oligonucleotide
agagaaucauuccggaagu

SEQ ID NO: 700299 - RNA, 19 nt, Artificial Sequence
  Description of Artificial Sequence: Synthetic oligonucleotide
uguccugagacaccaguga

SEQ ID NO: 700300 - RNA, 19 nt, Artificial Sequence
  Description of Artificial Sequence: Synthetic oligonucleotide
ggaacuuaaucagaaauug

SEQ ID NO: 700301 - RNA, 19 nt, Artificial Sequence
  Description of Artificial Sequence: Synthetic oligonucleotide
acaaaggguacucuaagua

SEQ ID NO: 700302 - RNA, 19 nt, Artificial Sequence
  Description of Artificial Sequence: Synthetic oligonucleotide
cagucuucaacugaggaac

SEQ ID NO: 700303 - RNA, 19 nt, Artificial Sequence
  Description of Artificial Sequence: Synthetic oligonucleotide
agacaucgggcaccaaacc

SEQ ID NO: 700304 - RNA, 19 nt, Artificial Sequence
  Description of Artificial Sequence: Synthetic oligonucleotide
aggcaaauacguugucagc

SEQ ID NO: 700305 - RNA, 19 nt, Artificial Sequence
  Description of Artificial Sequence: Synthetic oligonucleotide
ugggcccguagauauaagg

SEQ ID NO: 700306 - RNA, 19 nt, Artificial Sequence
  Description of Artificial Sequence: Synthetic oligonucleotide
gauauaagguuuguucaac

SEQ ID NO: 700307 - RNA, 19 nt, Artificial Sequence
  Description of Artificial Sequence: Synthetic oligonucleotide
agcuguaaccuugaucuac

SEQ ID NO: 700308 - RNA, 19 nt, Artificial Sequence
  Description of Artificial Sequence: Synthetic oligonucleotide
ucuucucuugauagggucu

SEQ ID NO: 700309 - RNA, 19 nt, Artificial Sequence
  Description of Artificial Sequence: Synthetic oligonucleotide
auagcugacaguacacaac

SEQ ID NO: 700310 - RNA, 19 nt, Artificial Sequence
  Description of Artificial Sequence: Synthetic oligonucleotide
ugucagauuuggccugugg

SEQ ID NO: 700311 - RNA, 19 nt, Artificial Sequence
  Description of Artificial Sequence: Synthetic oligonucleotide
ucugucguuugguagaaua

SEQ ID NO: 700312 - RNA, 19 nt, Artificial Sequence
  Description of Artificial Sequence: Synthetic oligonucleotide
agauauaagguuuguucaa

SEQ ID NO: 700313 - RNA, 19 nt, Artificial Sequence
  Description of Artificial Sequence: Synthetic oligonucleotide
ggauucaugguguacagca

SEQ ID NO: 700314 - RNA, 19 nt, Artificial Sequence
  Description of Artificial Sequence: Synthetic oligonucleotide
gucggaacaucuuggcugg

SEQ ID NO: 700315 - RNA, 19 nt, Artificial Sequence
  Description of Artificial Sequence: Synthetic oligonucleotide
uccauauacacagugucau

SEQ ID NO: 700316 - RNA, 19 nt, Artificial Sequence
  Description of Artificial Sequence: Synthetic oligonucleotide
uguguccugagacaccagu

SEQ ID NO: 700317 - RNA, 19 nt, Artificial Sequence
  Description of Artificial Sequence: Synthetic oligonucleotide
acuuaaucagaaauuggca

SEQ ID NO: 700318 - RNA, 19 nt, Artificial Sequence
  Description of Artificial Sequence: Synthetic oligonucleotide
auaaagcuugggcccaauc

SEQ ID NO: 700319 - RNA, 19 nt, Artificial Sequence
  Description of Artificial Sequence: Synthetic oligonucleotide
guugauuuugggguugugc

SEQ ID NO: 700320 - RNA, 19 nt, Artificial Sequence
  Description of Artificial Sequence: Synthetic oligonucleotide
uggaauggugugcaccuca

SEQ ID NO: 700321 - RNA, 19 nt, Artificial Sequence
  Description of Artificial Sequence: Synthetic oligonucleotide
uuguucaaccgaauggcau

SEQ ID NO: 700322 - RNA, 19 nt, Artificial Sequence
  Description of Artificial Sequence: Synthetic oligonucleotide
accacuaccuucugcuguc

SEQ ID NO: 700323 - RNA, 19 nt, Artificial Sequence
  Description of Artificial Sequence: Synthetic oligonucleotide
agcguuugaaaagugggug

SEQ ID NO: 700324 - RNA, 19 nt, Artificial Sequence
  Description of Artificial Sequence: Synthetic oligonucleotide
aacccugauucaggcagcc

SEQ ID NO: 700325 - RNA, 19 nt, Artificial Sequence
  Description of Artificial Sequence: Synthetic oligonucleotide
uguucaaccgaauggcaua

SEQ ID NO: 700326 - RNA, 19 nt, Artificial Sequence
  Description of Artificial Sequence: Synthetic oligonucleotide
aucucugucguuugguaga

SEQ ID NO: 700327 - RNA, 19 nt, Artificial Sequence
  Description of Artificial Sequence: Synthetic oligonucleotide
ugaagcggcaaaucuggcu

SEQ ID NO: 700328 - RNA, 19 nt, Artificial Sequence
  Description of Artificial Sequence: Synthetic oligonucleotide
ucuucccgaacaaggguug

SEQ ID NO: 700329 - RNA, 19 nt, Artificial Sequence
  Description of Artificial Sequence: Synthetic oligonucleotide
agauuuggccuguggaucu

SEQ ID NO: 700330 - RNA, 19 nt, Artificial Sequence
  Description of Artificial Sequence: Synthetic oligonucleotide
aauagcagauuugcuugug

SEQ ID NO: 700331 - RNA, 19 nt, Artificial Sequence
  Description of Artificial Sequence: Synthetic oligonucleotide
uugaaaagugggugcacgu

SEQ ID NO: 700332 - RNA, 19 nt, Artificial Sequence
  Description of Artificial Sequence: Synthetic oligonucleotide
ucaccgaccuuggagauga

SEQ ID NO: 700333 - RNA, 19 nt, Artificial Sequence
  Description of Artificial Sequence: Synthetic oligonucleotide
cccagcauagaauaagugc

SEQ ID NO: 700334 - RNA, 19 nt, Artificial Sequence
  Description of Artificial Sequence: Synthetic oligonucleotide
ggaagcuuuguuucgggag

SEQ ID NO: 700335 - RNA, 19 nt, Artificial Sequence
  Description of Artificial Sequence: Synthetic oligonucleotide
agagcgugcucguccauuc

SEQ ID NO: 700336 - RNA, 19 nt, Artificial Sequence
  Description of Artificial Sequence: Synthetic oligonucleotide
caaggguugcagucaaacc

SEQ ID NO: 700337 - RNA, 19 nt, Artificial Sequence
  Description of Artificial Sequence: Synthetic oligonucleotide
agaaucauuccggaaguca

SEQ ID NO: 700338 - RNA, 19 nt, Artificial Sequence
  Description of Artificial Sequence: Synthetic oligonucleotide
caaaucaguggcugccagg

SEQ ID NO: 700339 - RNA, 19 nt, Artificial Sequence
  Description of Artificial Sequence: Synthetic oligonucleotide
uaaacugcauaaucccauc

SEQ ID NO: 700340 - RNA, 19 nt, Artificial Sequence
  Description of Artificial Sequence: Synthetic oligonucleotide
augccagcuaguuuuguga

SEQ ID NO: 700341 - RNA, 19 nt, Artificial Sequence
  Description of Artificial Sequence: Synthetic oligonucleotide
cuaaagcguuugaaaagug

SEQ ID NO: 700342 - RNA, 19 nt, Artificial Sequence
  Description of Artificial Sequence: Synthetic oligonucleotide
uagcagauuugcuugugaa

SEQ ID NO: 700343 - RNA, 19 nt, Artificial Sequence
  Description of Artificial Sequence: Synthetic oligonucleotide
aagucauauucugccaaca

SEQ ID NO: 700344 - RNA, 19 nt, Artificial Sequence
  Description of Artificial Sequence: Synthetic oligonucleotide
auagcagauuugcuuguga

SEQ ID NO: 700345 - RNA, 19 nt, Artificial Sequence
  Description of Artificial Sequence: Synthetic oligonucleotide
gucauuccgccguucgugg

SEQ ID NO: 700346 - RNA, 19 nt, Artificial Sequence
  Description of Artificial Sequence: Synthetic oligonucleotide
gacauucgcggaucacagg

SEQ ID NO: 700347 - RNA, 19 nt, Artificial Sequence
  Description of Artificial Sequence: Synthetic oligonucleotide
acaucgggcaccaaaccuc

SEQ ID NO: 700348 - RNA, 19 nt, Artificial Sequence
  Description of Artificial Sequence: Synthetic oligonucleotide
ucaagcgacauucgcggau

SEQ ID NO: 700349 - RNA, 19 nt, Artificial Sequence
  Description of Artificial Sequence: Synthetic oligonucleotide
ugagagaaucauuccggaa

SEQ ID NO: 700350 - RNA, 19 nt, Artificial Sequence
  Description of Artificial Sequence: Synthetic oligonucleotide
aggaagaacgaugacucca

SEQ ID NO: 700351 - RNA, 19 nt, Artificial Sequence
  Description of Artificial Sequence: Synthetic oligonucleotide
aaaaggcauuguauuccuc

SEQ ID NO: 700352 - RNA, 19 nt, Artificial Sequence
  Description of Artificial Sequence: Synthetic oligonucleotide
ucaggaaauuuaagucaac

SEQ ID NO: 700353 - RNA, 19 nt, Artificial Sequence
  Description of Artificial Sequence: Synthetic oligonucleotide
aauggucgaccacaucuua

SEQ ID NO: 700354 - RNA, 19 nt, Artificial Sequence
  Description of Artificial Sequence: Synthetic oligonucleotide
agucauauucugccaacaa

SEQ ID NO: 700355 - RNA, 19 nt, Artificial Sequence
  Description of Artificial Sequence: Synthetic oligonucleotide
aucuagagccaaacucucc

SEQ ID NO: 700356 - RNA, 19 nt, Artificial Sequence
  Description of Artificial Sequence: Synthetic oligonucleotide
aaaagugggugcacgugcu

SEQ ID NO: 700357 - RNA, 19 nt, Artificial Sequence
  Description of Artificial Sequence: Synthetic oligonucleotide
cauacucccgguagaacuc

SEQ ID NO: 700358 - RNA, 19 nt, Artificial Sequence
  Description of Artificial Sequence: Synthetic oligonucleotide
gagacaucgggcaccaaac

SEQ ID NO: 700359 - RNA, 19 nt, Artificial Sequence
  Description of Artificial Sequence: Synthetic oligonucleotide
uuaagugguguaaguuuua

SEQ ID NO: 700360 - RNA, 19 nt, Artificial Sequence
  Description of Artificial Sequence: Synthetic oligonucleotide
ucgggcaccaaaccucggc

SEQ ID NO: 700361 - RNA, 19 nt, Artificial Sequence
  Description of Artificial Sequence: Synthetic oligonucleotide
aggacuccagucuuacuga

SEQ ID NO: 700362 - RNA, 19 nt, Artificial Sequence
  Description of Artificial Sequence: Synthetic oligonucleotide
caaccagggacuucccagc

SEQ ID NO: 700363 - RNA, 19 nt, Artificial Sequence
  Description of Artificial Sequence: Synthetic oligonucleotide
uggucgaccacaucuuaaa

SEQ ID NO: 700364 - RNA, 19 nt, Artificial Sequence
  Description of Artificial Sequence: Synthetic oligonucleotide
ccucaagcgacauucgcgg

SEQ ID NO: 700365 - RNA, 19 nt, Artificial Sequence
  Description of Artificial Sequence: Synthetic oligonucleotide
gucauauucugccaacaaa

SEQ ID NO: 700366 - RNA, 19 nt, Artificial Sequence
  Description of Artificial Sequence: Synthetic oligonucleotide
caggguggaacucucaaca

SEQ ID NO: 700367 - RNA, 19 nt, Artificial Sequence
  Description of Artificial Sequence: Synthetic oligonucleotide
ucaacaauuuugucaucuu

SEQ ID NO: 700368 - RNA, 19 nt, Artificial Sequence
  Description of Artificial Sequence: Synthetic oligonucleotide
gggugcacgugcuuggugg

SEQ ID NO: 700369 - RNA, 19 nt, Artificial Sequence
  Description of Artificial Sequence: Synthetic oligonucleotide
guggaacuuaaucagaaau

SEQ ID NO: 700370 - RNA, 19 nt, Artificial Sequence
  Description of Artificial Sequence: Synthetic oligonucleotide
aagugguguaaguuuuaua

SEQ ID NO: 700371 - RNA, 19 nt, Artificial Sequence
  Description of Artificial Sequence: Synthetic oligonucleotide
agcagauuugcuugugaaa

SEQ ID NO: 700372 - RNA, 19 nt, Artificial Sequence
  Description of Artificial Sequence: Synthetic oligonucleotide
gaugugggcccguagauau

SEQ ID NO: 700373 - RNA, 19 nt, Artificial Sequence
  Description of Artificial Sequence: Synthetic oligonucleotide
caaaccucggcacacugga

SEQ ID NO: 700374 - RNA, 19 nt, Artificial Sequence
  Description of Artificial Sequence: Synthetic oligonucleotide
cucuaaguagaugcagcgc

SEQ ID NO: 700375 - RNA, 19 nt, Artificial Sequence
  Description of Artificial Sequence: Synthetic oligonucleotide
uucaacccugauucaggca

SEQ ID NO: 700376 - RNA, 19 nt, Artificial Sequence
  Description of Artificial Sequence: Synthetic oligonucleotide
uugagccauuccaucacuc

SEQ ID NO: 700377 - RNA, 19 nt, Artificial Sequence
  Description of Artificial Sequence: Synthetic oligonucleotide
aaucagaaauuggcaggcu

SEQ ID NO: 700378 - RNA, 19 nt, Artificial Sequence
  Description of Artificial Sequence: Synthetic oligonucleotide
auaaucccaucaggacucc

SEQ ID NO: 700379 - RNA, 19 nt, Artificial Sequence
  Description of Artificial Sequence: Synthetic oligonucleotide
ucccgaacaaggguugcag

SEQ ID NO: 700380 - RNA, 19 nt, Artificial Sequence
  Description of Artificial Sequence: Synthetic oligonucleotide
cauagcugacaguacacaa

SEQ ID NO: 700381 - RNA, 19 nt, Artificial Sequence
  Description of Artificial Sequence: Synthetic oligonucleotide
cuuggcuggaauggugugc

SEQ ID NO: 700382 - RNA, 19 nt, Artificial Sequence
  Description of Artificial Sequence: Synthetic oligonucleotide
uaagugguguaaguuuuau

SEQ ID NO: 700383 - RNA, 19 nt, Artificial Sequence
  Description of Artificial Sequence: Synthetic oligonucleotide
gaucuagagccaaacucuc

SEQ ID NO: 700384 - RNA, 19 nt, Artificial Sequence
  Description of Artificial Sequence: Synthetic oligonucleotide
ugugggcccguagauauaa

SEQ ID NO: 700385 - RNA, 19 nt, Artificial Sequence
  Description of Artificial Sequence: Synthetic oligonucleotide
uccagagcgugcucgucca

SEQ ID NO: 700386 - RNA, 19 nt, Artificial Sequence
  Description of Artificial Sequence: Synthetic oligonucleotide
ggaagaacgaugacuccag

SEQ ID NO: 700387 - RNA, 19 nt, Artificial Sequence
  Description of Artificial Sequence: Synthetic oligonucleotide
uggcagaucaaaggaugug

SEQ ID NO: 700388 - RNA, 19 nt, Artificial Sequence
  Description of Artificial Sequence: Synthetic oligonucleotide
aagcuuuguuucgggagga

SEQ ID NO: 700389 - RNA, 19 nt, Artificial Sequence
  Description of Artificial Sequence: Synthetic oligonucleotide
aaggguacucuaaguagau

SEQ ID NO: 700390 - RNA, 19 nt, Artificial Sequence
  Description of Artificial Sequence: Synthetic oligonucleotide
agacugucugggucucuuc

SEQ ID NO: 700391 - RNA, 19 nt, Artificial Sequence
  Description of Artificial Sequence: Synthetic oligonucleotide
uucgcggaucacagggucu

SEQ ID NO: 700392 - RNA, 19 nt, Artificial Sequence
  Description of Artificial Sequence: Synthetic oligonucleotide
ugccagcuaguuuugugau

SEQ ID NO: 700393 - RNA, 19 nt, Artificial Sequence
  Description of Artificial Sequence: Synthetic oligonucleotide
gguggaagcuuuguuucgg

SEQ ID NO: 700394 - RNA, 19 nt, Artificial Sequence
  Description of Artificial Sequence: Synthetic oligonucleotide
cuugggcccaaucaggaaa

SEQ ID NO: 700395 - RNA, 19 nt, Artificial Sequence
  Description of Artificial Sequence: Synthetic oligonucleotide
gcguuugaaaagugggugc

SEQ ID NO: 700396 - RNA, 19 nt, Artificial Sequence
  Description of Artificial Sequence: Synthetic oligonucleotide
aaaccucggcacacuggac

SEQ ID NO: 700397 - RNA, 19 nt, Artificial Sequence
  Description of Artificial Sequence: Synthetic oligonucleotide
uccgaggugaagcggcaaa

SEQ ID NO: 700398 - RNA, 19 nt, Artificial Sequence
  Description of Artificial Sequence: Synthetic oligonucleotide
guuucgggaggagugguac

SEQ ID NO: 700399 - RNA, 19 nt, Artificial Sequence
  Description of Artificial Sequence: Synthetic oligonucleotide
gacaucgggcaccaaaccu

SEQ ID NO: 700400 - RNA, 19 nt, Artificial Sequence
  Description of Artificial Sequence: Synthetic oligonucleotide
uccaaaucaguggcugcca

SEQ ID NO: 700401 - RNA, 19 nt, Artificial Sequence
  Description of Artificial Sequence: Synthetic oligonucleotide
ugaauuuguugggauucau

SEQ ID NO: 700402 - RNA, 19 nt, Artificial Sequence
  Description of Artificial Sequence: Synthetic oligonucleotide
gguuuugagccauuccauc

SEQ ID NO: 700403 - RNA, 19 nt, Artificial Sequence
  Description of Artificial Sequence: Synthetic oligonucleotide
ccgaauggcauauucuuuc

SEQ ID NO: 700404 - RNA, 19 nt, Artificial Sequence
  Description of Artificial Sequence: Synthetic oligonucleotide
uuucgggaggagugguacu

SEQ ID NO: 700405 - RNA, 19 nt, Artificial Sequence
  Description of Artificial Sequence: Synthetic oligonucleotide
agaacucaggagacaucgg

SEQ ID NO: 700406 - RNA, 19 nt, Artificial Sequence
  Description of Artificial Sequence: Synthetic oligonucleotide
auuccucaagcgacauucg

SEQ ID NO: 700407 - RNA, 19 nt, Artificial Sequence
  Description of Artificial Sequence: Synthetic oligonucleotide
aagcgacauucgcggauca

SEQ ID NO: 700408 - RNA, 19 nt, Artificial Sequence
  Description of Artificial Sequence: Synthetic oligonucleotide
auuccgccguucguggaac

SEQ ID NO: 700409 - RNA, 19 nt, Artificial Sequence
  Description of Artificial Sequence: Synthetic oligonucleotide
ccaaucaggaaauuuaagu

SEQ ID NO: 700410 - RNA, 19 nt, Artificial Sequence
  Description of Artificial Sequence: Synthetic oligonucleotide
aggaccuuuugguggugug

SEQ ID NO: 700411 - RNA, 19 nt, Artificial Sequence
  Description of Artificial Sequence: Synthetic oligonucleotide
aaucauuccggaagucaua

SEQ ID NO: 700412 - RNA, 19 nt, Artificial Sequence
  Description of Artificial Sequence: Synthetic oligonucleotide
gaagaacgaugacuccaga

SEQ ID NO: 700413 - RNA, 19 nt, Artificial Sequence
  Description of Artificial Sequence: Synthetic oligonucleotide
cccugauucaggcagccag

SEQ ID NO: 700414 - RNA, 19 nt, Artificial Sequence
  Description of Artificial Sequence: Synthetic oligonucleotide
cacccgucggaacaucuug

SEQ ID NO: 700415 - RNA, 19 nt, Artificial Sequence
  Description of Artificial Sequence: Synthetic oligonucleotide
uucgggaggagugguacuc

SEQ ID NO: 700416 - RNA, 19 nt, Artificial Sequence
  Description of Artificial Sequence: Synthetic oligonucleotide
uucugccaacaaaggguac

SEQ ID NO: 700417 - RNA, 19 nt, Artificial Sequence
  Description of Artificial Sequence: Synthetic oligonucleotide
cagaaauuggcaggcucug

SEQ ID NO: 700418 - RNA, 19 nt, Artificial Sequence
  Description of Artificial Sequence: Synthetic oligonucleotide
cugucguuugguagaauaa

SEQ ID NO: 700419 - RNA, 19 nt, Artificial Sequence
  Description of Artificial Sequence: Synthetic oligonucleotide
cguucguggaacuuaauca

SEQ ID NO: 700420 - RNA, 19 nt, Artificial Sequence
  Description of Artificial Sequence: Synthetic oligonucleotide
ugucaccgaccuuggagau

SEQ ID NO: 700421 - RNA, 19 nt, Artificial Sequence
  Description of Artificial Sequence: Synthetic oligonucleotide
cccaaucaggaaauuuaag

SEQ ID NO: 700422 - RNA, 19 nt, Artificial Sequence
  Description of Artificial Sequence: Synthetic oligonucleotide
cagcuugacuuuccauagc

SEQ ID NO: 700423 - RNA, 19 nt, Artificial Sequence
  Description of Artificial Sequence: Synthetic oligonucleotide
ucauuccgccguucgugga

SEQ ID NO: 700424 - RNA, 19 nt, Artificial Sequence
  Description of Artificial Sequence: Synthetic oligonucleotide
gagaaugccagcucuucuu

SEQ ID NO: 700425 - RNA, 19 nt, Artificial Sequence
  Description of Artificial Sequence: Synthetic oligonucleotide
gaguacccgccccagucuc

SEQ ID NO: 700426 - RNA, 19 nt, Artificial Sequence
  Description of Artificial Sequence: Synthetic oligonucleotide
uggaaccaccaugggagga

SEQ ID NO: 700427 - RNA, 19 nt, Artificial Sequence
  Description of Artificial Sequence: Synthetic oligonucleotide
uguugauuuugggguugug

SEQ ID NO: 700428 - RNA, 19 nt, Artificial Sequence
  Description of Artificial Sequence: Synthetic oligonucleotide
acccgucggaacaucuugg

SEQ ID NO: 700429 - RNA, 19 nt, Artificial Sequence
  Description of Artificial Sequence: Synthetic oligonucleotide
ggacuccagucuuacugag

SEQ ID NO: 700430 - RNA, 19 nt, Artificial Sequence
  Description of Artificial Sequence: Synthetic oligonucleotide
gguguaaguuuuauacaca

SEQ ID NO: 700431 - RNA, 19 nt, Artificial Sequence
  Description of Artificial Sequence: Synthetic oligonucleotide
caagcgacauucgcggauc

SEQ ID NO: 700432 - RNA, 19 nt, Artificial Sequence
  Description of Artificial Sequence: Synthetic oligonucleotide
caccuuaaagcuguaaccu

SEQ ID NO: 700433 - RNA, 19 nt, Artificial Sequence
  Description of Artificial Sequence: Synthetic oligonucleotide
caaauacguugucagcaaa

SEQ ID NO: 700434 - RNA, 19 nt, Artificial Sequence
  Description of Artificial Sequence: Synthetic oligonucleotide
ucucugucguuugguagaa

SEQ ID NO: 700435 - RNA, 19 nt, Artificial Sequence
  Description of Artificial Sequence: Synthetic oligonucleotide
accgaccuuggagaugaag

SEQ ID NO: 700436 - RNA, 19 nt, Artificial Sequence
  Description of Artificial Sequence: Synthetic oligonucleotide
accaugggaggagaucuga

SEQ ID NO: 700437 - RNA, 19 nt, Artificial Sequence
  Description of Artificial Sequence: Synthetic oligonucleotide
gguacucuaaguagaugca

SEQ ID NO: 700438 - RNA, 19 nt, Artificial Sequence
  Description of Artificial Sequence: Synthetic oligonucleotide
ucgggaggagugguacucc

SEQ ID NO: 700439 - RNA, 19 nt, Artificial Sequence
  Description of Artificial Sequence: Synthetic oligonucleotide
aggguacucuaaguagaug

SEQ ID NO: 700440 - RNA, 19 nt, Artificial Sequence
  Description of Artificial Sequence: Synthetic oligonucleotide
ccgaacaaggguugcaguc

SEQ ID NO: 700441 - RNA, 19 nt, Artificial Sequence
  Description of Artificial Sequence: Synthetic oligonucleotide
uggcucggaguacccgccc

SEQ ID NO: 700442 - RNA, 19 nt, Artificial Sequence
  Description of Artificial Sequence: Synthetic oligonucleotide
auacucccgguagaacuca

SEQ ID NO: 700443 - RNA, 19 nt, Artificial Sequence
  Description of Artificial Sequence: Synthetic oligonucleotide
cuucccgaacaaggguugc

SEQ ID NO: 700444 - RNA, 19 nt, Artificial Sequence
  Description of Artificial Sequence: Synthetic oligonucleotide
cccguagauauaagguuug

SEQ ID NO: 700445 - RNA, 19 nt, Artificial Sequence
  Description of Artificial Sequence: Synthetic oligonucleotide
agcggcaaaucuggcuguc

SEQ ID NO: 700446 - RNA, 19 nt, Artificial Sequence
  Description of Artificial Sequence: Synthetic oligonucleotide
cguuugguagaauaagcca

SEQ ID NO: 700447 - RNA, 19 nt, Artificial Sequence
  Description of Artificial Sequence: Synthetic oligonucleotide
agucuucaacugaggaaca

SEQ ID NO: 700448 - RNA, 19 nt, Artificial Sequence
  Description of Artificial Sequence: Synthetic oligonucleotide
ccugccgucuggaaccacc

SEQ ID NO: 700449 - RNA, 19 nt, Artificial Sequence
  Description of Artificial Sequence: Synthetic oligonucleotide
agcuuuguuucgggaggag

SEQ ID NO: 700450 - RNA, 19 nt, Artificial Sequence
  Description of Artificial Sequence: Synthetic oligonucleotide
gcauccgaggugaagcggc

SEQ ID NO: 700451 - RNA, 19 nt, Artificial Sequence
  Description of Artificial Sequence: Synthetic oligonucleotide
ccguucguggaacuuaauc

SEQ ID NO: 700452 - RNA, 19 nt, Artificial Sequence
  Description of Artificial Sequence: Synthetic oligonucleotide
guagaacucaggagacauc

SEQ ID NO: 700453 - RNA, 19 nt, Artificial Sequence
  Description of Artificial Sequence: Synthetic oligonucleotide
caccaugggaggagaucug

SEQ ID NO: 700454 - RNA, 19 nt, Artificial Sequence
  Description of Artificial Sequence: Synthetic oligonucleotide
guggaucuaccaccuggga

SEQ ID NO: 700455 - RNA, 19 nt, Artificial Sequence
  Description of Artificial Sequence: Synthetic oligonucleotide
gcagaguugcccaggacca

SEQ ID NO: 700456 - RNA, 19 nt, Artificial Sequence
  Description of Artificial Sequence: Synthetic oligonucleotide
ucuugucauuccgccguuc

SEQ ID NO: 700457 - RNA, 19 nt, Artificial Sequence
  Description of Artificial Sequence: Synthetic oligonucleotide
cagauuugcuugugaaagu

SEQ ID NO: 700458 - RNA, 19 nt, Artificial Sequence
  Description of Artificial Sequence: Synthetic oligonucleotide
ggcaccaaaccucggcaca

SEQ ID NO: 700459 - RNA, 19 nt, Artificial Sequence
  Description of Artificial Sequence: Synthetic oligonucleotide
gguagaacucaggagacau

SEQ ID NO: 700460 - RNA, 19 nt, Artificial Sequence
  Description of Artificial Sequence: Synthetic oligonucleotide
auggucgaccacaucuuaa

SEQ ID NO: 700461 - RNA, 19 nt, Artificial Sequence
  Description of Artificial Sequence: Synthetic oligonucleotide
ccaaugggcuuguccuugg

SEQ ID NO: 700462 - RNA, 19 nt, Artificial Sequence
  Description of Artificial Sequence: Synthetic oligonucleotide
ggguggaacucucaacaaa

SEQ ID NO: 700463 - RNA, 19 nt, Artificial Sequence
  Description of Artificial Sequence: Synthetic oligonucleotide
uacccgccccagucucugg

SEQ ID NO: 700464 - RNA, 19 nt, Artificial Sequence
  Description of Artificial Sequence: Synthetic oligonucleotide
agcauuccucaagcgacau

SEQ ID NO: 700465 - RNA, 19 nt, Artificial Sequence
  Description of Artificial Sequence: Synthetic oligonucleotide
gccagaucuagagccaaac

SEQ ID NO: 700466 - RNA, 19 nt, Artificial Sequence
  Description of Artificial Sequence: Synthetic oligonucleotide
ucgcggaucacagggucuu

SEQ ID NO: 700467 - RNA, 19 nt, Artificial Sequence
  Description of Artificial Sequence: Synthetic oligonucleotide
cucaagcgacauucgcgga

SEQ ID NO: 700468 - RNA, 19 nt, Artificial Sequence
  Description of Artificial Sequence: Synthetic oligonucleotide
ggcagaucaaaggaugugu

SEQ ID NO: 700469 - RNA, 19 nt, Artificial Sequence
  Description of Artificial Sequence: Synthetic oligonucleotide
caccaaccagggacuuccc

SEQ ID NO: 700470 - RNA, 19 nt, Artificial Sequence
  Description of Artificial Sequence: Synthetic oligonucleotide
cauuccgccguucguggaa

SEQ ID NO: 700471 - RNA, 19 nt, Artificial Sequence
  Description of Artificial Sequence: Synthetic oligonucleotide
caaaucuggcugucaucaa

SEQ ID NO: 700472 - RNA, 19 nt, Artificial Sequence
  Description of Artificial Sequence: Synthetic oligonucleotide
cugccgucuggaaccacca

SEQ ID NO: 700473 - RNA, 19 nt, Artificial Sequence
  Description of Artificial Sequence: Synthetic oligonucleotide
cagaguugcccaggaccag

SEQ ID NO: 700474 - RNA, 19 nt, Artificial Sequence
  Description of Artificial Sequence: Synthetic oligonucleotide
gucaccgaccuuggagaug

SEQ ID NO: 700475 - RNA, 19 nt, Artificial Sequence
  Description of Artificial Sequence: Synthetic oligonucleotide
cucggaguacccgccccag

SEQ ID NO: 700476 - RNA, 19 nt, Artificial Sequence
  Description of Artificial Sequence: Synthetic oligonucleotide
gcgacauucgcggaucaca

SEQ ID NO: 700477 - RNA, 19 nt, Artificial Sequence
  Description of Artificial Sequence: Synthetic oligonucleotide
cccgucggaacaucuuggc

SEQ ID NO: 700478 - RNA, 19 nt, Artificial Sequence
  Description of Artificial Sequence: Synthetic oligonucleotide
cauccgaggugaagcggca

SEQ ID NO: 700479 - RNA, 19 nt, Artificial Sequence
  Description of Artificial Sequence: Synthetic oligonucleotide
guacccgccccagucucug

SEQ ID NO: 700480 - RNA, 19 nt, Artificial Sequence
  Description of Artificial Sequence: Synthetic oligonucleotide
cacuuccuaaagcguuuga

SEQ ID NO: 700481 - RNA, 19 nt, Artificial Sequence
  Description of Artificial Sequence: Synthetic oligonucleotide
ccuaaagcguuugaaaagu

SEQ ID NO: 700482 - RNA, 19 nt, Artificial Sequence
  Description of Artificial Sequence: Synthetic oligonucleotide
acgugcuugguggaagcuu

SEQ ID NO: 700483 - RNA, 19 nt, Artificial Sequence
  Description of Artificial Sequence: Synthetic oligonucleotide
aaccaccaugggaggagau

SEQ ID NO: 700484 - RNA, 19 nt, Artificial Sequence
  Description of Artificial Sequence: Synthetic oligonucleotide
uuccgccguucguggaacu

SEQ ID NO: 700485 - RNA, 19 nt, Artificial Sequence
  Description of Artificial Sequence: Synthetic oligonucleotide
ggagaaugccagcucuucu

SEQ ID NO: 700486 - RNA, 19 nt, Artificial Sequence
  Description of Artificial Sequence: Synthetic oligonucleotide
guucaaccgaauggcauau

SEQ ID NO: 700487 - RNA, 19 nt, Artificial Sequence
  Description of Artificial Sequence: Synthetic oligonucleotide
ggcucggaguacccgcccc

SEQ ID NO: 700488 - RNA, 19 nt, Artificial Sequence
  Description of Artificial Sequence: Synthetic oligonucleotide
caauggucgaccacaucuu

SEQ ID NO: 700489 - RNA, 19 nt, Artificial Sequence
  Description of Artificial Sequence: Synthetic oligonucleotide
uucaaccgaauggcauauu

SEQ ID NO: 700490 - RNA, 19 nt, Artificial Sequence
  Description of Artificial Sequence: Synthetic oligonucleotide
gcccaaucaggaaauuuaa

SEQ ID NO: 700491 - RNA, 19 nt, Artificial Sequence
  Description of Artificial Sequence: Synthetic oligonucleotide
gcaccaaaccucggcacac

SEQ ID NO: 700492 - RNA, 19 nt, Artificial Sequence
  Description of Artificial Sequence: Synthetic oligonucleotide
cauucgcggaucacagggu

SEQ ID NO: 700493 - RNA, 19 nt, Artificial Sequence
  Description of Artificial Sequence: Synthetic oligonucleotide
aguacccgccccagucucu

SEQ ID NO: 700494 - RNA, 19 nt, Artificial Sequence
  Description of Artificial Sequence: Synthetic oligonucleotide
ggcccguagauauaagguu

SEQ ID NO: 700495 - RNA, 19 nt, Artificial Sequence
  Description of Artificial Sequence: Synthetic oligonucleotide
ucggaacaucuuggcugga

SEQ ID NO: 700496 - RNA, 19 nt, Artificial Sequence
  Description of Artificial Sequence: Synthetic oligonucleotide
ggugccaaagcgccgggau

SEQ ID NO: 700497 - RNA, 19 nt, Artificial Sequence
  Description of Artificial Sequence: Synthetic oligonucleotide
uccgccguucguggaacuu

SEQ ID NO: 700498 - RNA, 19 nt, Artificial Sequence
  Description of Artificial Sequence: Synthetic oligonucleotide
gggcccguagauauaaggu

SEQ ID NO: 700499 - RNA, 19 nt, Artificial Sequence
  Description of Artificial Sequence: Synthetic oligonucleotide
cgaacaaggguugcaguca

SEQ ID NO: 700500 - RNA, 19 nt, Artificial Sequence
  Description of Artificial Sequence: Synthetic oligonucleotide
guguugauuuugggguugu

SEQ ID NO: 700501 - RNA, 19 nt, Artificial Sequence
  Description of Artificial Sequence: Synthetic oligonucleotide
gcucggaguacccgcccca

SEQ ID NO: 700502 - RNA, 19 nt, Artificial Sequence
  Description of Artificial Sequence: Synthetic oligonucleotide
ggguuuugagccauuccau

SEQ ID NO: 700503 - RNA, 19 nt, Artificial Sequence
  Description of Artificial Sequence: Synthetic oligonucleotide
ggcccagcauagaauaagu

SEQ ID NO: 700504 - RNA, 19 nt, Artificial Sequence
  Description of Artificial Sequence: Synthetic oligonucleotide
ccaccaugggaggagaucu

SEQ ID NO: 700505 - RNA, 19 nt, Artificial Sequence
  Description of Artificial Sequence: Synthetic oligonucleotide
ggaugugggcccguagaua

SEQ ID NO: 700506 - RNA, 19 nt, Artificial Sequence
  Description of Artificial Sequence: Synthetic oligonucleotide
gcccguagauauaagguuu

SEQ ID NO: 700507 - RNA, 19 nt, Artificial Sequence
  Description of Artificial Sequence: Synthetic oligonucleotide
gcgugcucguccauuccca

SEQ ID NO: 700508 - RNA, 19 nt, Artificial Sequence
  Description of Artificial Sequence: Synthetic oligonucleotide
gccaaagcgccgggaugcc

SEQ ID NO: 700509 - RNA, 19 nt, Artificial Sequence
  Description of Artificial Sequence: Synthetic oligonucleotide
gugcacgugcuugguggaa

SEQ ID NO: 700510 - RNA, 19 nt, Artificial Sequence
  Description of Artificial Sequence: Synthetic oligonucleotide
augugggcccguagauaua

SEQ ID NO: 700511 - RNA, 19 nt, Artificial Sequence
  Description of Artificial Sequence: Synthetic oligonucleotide
ggaauggugugcaccucau

SEQ ID NO: 700512 - RNA, 19 nt, Artificial Sequence
  Description of Artificial Sequence: Synthetic oligonucleotide
gcggcaaaucuggcuguca

SEQ ID NO: 700513 - RNA, 19 nt, Artificial Sequence
  Description of Artificial Sequence: Synthetic oligonucleotide
gcgccgggaugccuggcca

SEQ ID NO: 700514 - RNA, 19 nt, Artificial Sequence
  Description of Artificial Sequence: Synthetic oligonucleotide
cauaaagcuugggcccaau

SEQ ID NO: 700515 - RNA, 19 nt, Artificial Sequence
  Description of Artificial Sequence: Synthetic oligonucleotide
cacgugcuugguggaagcu

SEQ ID NO: 700516 - RNA, 19 nt, Artificial Sequence
  Description of Artificial Sequence: Synthetic oligonucleotide
ccaucaggacuccagucuu

SEQ ID NO: 700517 - RNA, 19 nt, Artificial Sequence
  Description of Artificial Sequence: Synthetic oligonucleotide
caccaaaccucggcacacu

SEQ ID NO: 700518 - RNA, 19 nt, Artificial Sequence
  Description of Artificial Sequence: Synthetic oligonucleotide
cccgaacaaggguugcagu

SEQ ID NO: 700519 - RNA, 19 nt, Artificial Sequence
  Description of Artificial Sequence: Synthetic oligonucleotide
cccagcuuacagugggccu

SEQ ID NO: 700520 - RNA, 19 nt, Artificial Sequence
  Description of Artificial Sequence: Synthetic oligonucleotide
cagagcgugcucguccauu

SEQ ID NO: 700521 - RNA, 19 nt, Artificial Sequence
  Description of Artificial Sequence: Synthetic oligonucleotide
ccgucggaacaucuuggcu

SEQ ID NO: 700522 - RNA, 19 nt, Artificial Sequence
  Description of Artificial Sequence: Synthetic oligonucleotide
cgccguucguggaacuuaa

SEQ ID NO: 700523 - RNA, 19 nt, Artificial Sequence
  Description of Artificial Sequence: Synthetic oligonucleotide
cguagauauaagguuuguu

SEQ ID NO: 700524 - RNA, 19 nt, Artificial Sequence
  Description of Artificial Sequence: Synthetic oligonucleotide
gcauuccucaagcgacauu

SEQ ID NO: 700525 - RNA, 19 nt, Artificial Sequence
  Description of Artificial Sequence: Synthetic oligonucleotide
gguguacagcaggauucuu

SEQ ID NO: 700526 - RNA, 19 nt, Artificial Sequence
  Description of Artificial Sequence: Synthetic oligonucleotide
ccguagauauaagguuugu

SEQ ID NO: 700527 - RNA, 19 nt, Artificial Sequence
  Description of Artificial Sequence: Synthetic oligonucleotide
gggaggagugguacuccau

SEQ ID NO: 700528 - RNA, 19 nt, Artificial Sequence
  Description of Artificial Sequence: Synthetic oligonucleotide
cgguagaacucaggagaca

SEQ ID NO: 700529 - RNA, 19 nt, Artificial Sequence
  Description of Artificial Sequence: Synthetic oligonucleotide
cggaacaucuuggcuggaa

SEQ ID NO: 700530 - RNA, 19 nt, Artificial Sequence
  Description of Artificial Sequence: Synthetic oligonucleotide
caccgaccuuggagaugaa

SEQ ID NO: 700531 - RNA, 19 nt, Artificial Sequence
  Description of Artificial Sequence: Synthetic oligonucleotide
cucugucguuugguagaau

SEQ ID NO: 700532 - RNA, 19 nt, Artificial Sequence
  Description of Artificial Sequence: Synthetic oligonucleotide
ccgccguucguggaacuua

SEQ ID NO: 700533 - RNA, 19 nt, Artificial Sequence
  Description of Artificial Sequence: Synthetic oligonucleotide
gcacccgucggaacaucuu

SEQ ID NO: 700534 - RNA, 19 nt, Artificial Sequence
  Description of Artificial Sequence: Synthetic oligonucleotide
gccguucguggaacuuaau

SEQ ID NO: 700535 - RNA, 19 nt, Artificial Sequence
  Description of Artificial Sequence: Synthetic oligonucleotide
ccucugcgaccaucccuuu

SEQ ID NO: 700536 - RNA, 19 nt, Artificial Sequence
  Description of Artificial Sequence: Synthetic oligonucleotide
ccgggaugccuggccagau

SEQ ID NO: 700537 - RNA, 19 nt, Artificial Sequence
  Description of Artificial Sequence: Synthetic oligonucleotide
cgccccagucucugggcuu

SEQ ID NO: 700538 - RNA, 19 nt, Artificial Sequence
  Description of Artificial Sequence: Synthetic oligonucleotide
uuuacuugcacccugaggg

SEQ ID NO: 700539 - RNA, 19 nt, Artificial Sequence
  Description of Artificial Sequence: Synthetic oligonucleotide
agaguuaaaaccccuggcc

SEQ ID NO: 700540 - RNA, 19 nt, Artificial Sequence
  Description of Artificial Sequence: Synthetic oligonucleotide
ucuagaaacaccauguccu

SEQ ID NO: 700541 - RNA, 19 nt, Artificial Sequence
  Description of Artificial Sequence: Synthetic oligonucleotide
uguugaugaaaguacagcc

SEQ ID NO: 700542 - RNA, 19 nt, Artificial Sequence
  Description of Artificial Sequence: Synthetic oligonucleotide
agcggauccagucacagcc

SEQ ID NO: 700543 - RNA, 19 nt, Artificial Sequence
  Description of Artificial Sequence: Synthetic oligonucleotide
cuguaagacaccaagcugg

SEQ ID NO: 700544 - RNA, 19 nt, Artificial Sequence
  Description of Artificial Sequence: Synthetic oligonucleotide
ggaacagucacucagggcg

SEQ ID NO: 700545 - RNA, 19 nt, Artificial Sequence
  Description of Artificial Sequence: Synthetic oligonucleotide
aguucugacagcuaggaug

SEQ ID NO: 700546 - RNA, 19 nt, Artificial Sequence
  Description of Artificial Sequence: Synthetic oligonucleotide
uugaugaaaguacagccag

SEQ ID NO: 700547 - RNA, 19 nt, Artificial Sequence
  Description of Artificial Sequence: Synthetic oligonucleotide
auaagggcuagucaguaac

SEQ ID NO: 700548 - RNA, 19 nt, Artificial Sequence
  Description of Artificial Sequence: Synthetic oligonucleotide
aaaaccccuggccuagucc

SEQ ID NO: 700549 - RNA, 19 nt, Artificial Sequence
  Description of Artificial Sequence: Synthetic oligonucleotide
auaaucuagaaacaccaug

SEQ ID NO: 700550 - RNA, 19 nt, Artificial Sequence
  Description of Artificial Sequence: Synthetic oligonucleotide
uuuguugaugaaaguacag

SEQ ID NO: 700551 - RNA, 19 nt, Artificial Sequence
  Description of Artificial Sequence: Synthetic oligonucleotide
gaugaaaguacagccaggg

SEQ ID NO: 700552 - RNA, 19 nt, Artificial Sequence
  Description of Artificial Sequence: Synthetic oligonucleotide
acaucucacagccaggccg

SEQ ID NO: 700553 - RNA, 19 nt, Artificial Sequence
  Description of Artificial Sequence: Synthetic oligonucleotide
aaagguacaguggccaaac

SEQ ID NO: 700554 - RNA, 19 nt, Artificial Sequence
  Description of Artificial Sequence: Synthetic oligonucleotide
ucgguauucagcaccaggc

SEQ ID NO: 700555 - RNA, 19 nt, Artificial Sequence
  Description of Artificial Sequence: Synthetic oligonucleotide
uuggucaauauugagggcc

SEQ ID NO: 700556 - RNA, 19 nt, Artificial Sequence
  Description of Artificial Sequence: Synthetic oligonucleotide
aaaccagaguuaaaacccc

SEQ ID NO: 700557 - RNA, 19 nt, Artificial Sequence
  Description of Artificial Sequence: Synthetic oligonucleotide
uaggugcugucaaugaagg

SEQ ID NO: 700558 - RNA, 19 nt, Artificial Sequence
  Description of Artificial Sequence: Synthetic oligonucleotide
ugucauaucaggacgcacu

SEQ ID NO: 700559 - RNA, 19 nt, Artificial Sequence
  Description of Artificial Sequence: Synthetic oligonucleotide
uaucaggacgcacugugag

SEQ ID NO: 700560 - RNA, 19 nt, Artificial Sequence
  Description of Artificial Sequence: Synthetic oligonucleotide
agcgauucagcccuagccg

SEQ ID NO: 700561 - RNA, 19 nt, Artificial Sequence
  Description of Artificial Sequence: Synthetic oligonucleotide
guaugaggcagguaucugg

SEQ ID NO: 700562 - RNA, 19 nt, Artificial Sequence
  Description of Artificial Sequence: Synthetic oligonucleotide
ugcacgacagcacaucuca

SEQ ID NO: 700563 - RNA, 19 nt, Artificial Sequence
  Description of Artificial Sequence: Synthetic oligonucleotide
aagaccucagguuuuacuu

SEQ ID NO: 700564 - RNA, 19 nt, Artificial Sequence
  Description of Artificial Sequence: Synthetic oligonucleotide
aagcuuaaagguacagugg

SEQ ID NO: 700565 - RNA, 19 nt, Artificial Sequence
  Description of Artificial Sequence: Synthetic oligonucleotide
gaucuggguccucagagag

SEQ ID NO: 700566 - RNA, 19 nt, Artificial Sequence
  Description of Artificial Sequence: Synthetic oligonucleotide
ucaaugaaggggcaggaua

SEQ ID NO: 700567 - RNA, 19 nt, Artificial Sequence
  Description of Artificial Sequence: Synthetic oligonucleotide
guaaggguaggguaucuag

SEQ ID NO: 700568 - RNA, 19 nt, Artificial Sequence
  Description of Artificial Sequence: Synthetic oligonucleotide
augaaaguacagccagggc

SEQ ID NO: 700569 - RNA, 19 nt, Artificial Sequence
  Description of Artificial Sequence: Synthetic oligonucleotide
uuguugaugaaaguacagc

SEQ ID NO: 700570 - RNA, 19 nt, Artificial Sequence
  Description of Artificial Sequence: Synthetic oligonucleotide
uagucaguaaccccgugga

SEQ ID NO: 700571 - RNA, 19 nt, Artificial Sequence
  Description of Artificial Sequence: Synthetic oligonucleotide
ucaauauugagggccacca

SEQ ID NO: 700572 - RNA, 19 nt, Artificial Sequence
  Description of Artificial Sequence: Synthetic oligonucleotide
cauaucaggacgcacugug

SEQ ID NO: 700573 - RNA, 19 nt, Artificial Sequence
  Description of Artificial Sequence: Synthetic oligonucleotide
uucucugcgaucgacacac

SEQ ID NO: 700574 - RNA, 19 nt, Artificial Sequence
  Description of Artificial Sequence: Synthetic oligonucleotide
uggguggaaagccauaauc

SEQ ID NO: 700575 - RNA, 19 nt, Artificial Sequence
  Description of Artificial Sequence: Synthetic oligonucleotide
uguaagacaccaagcuggc

SEQ ID NO: 700576 - RNA, 19 nt, Artificial Sequence
  Description of Artificial Sequence: Synthetic oligonucleotide
aaugcuaccucggggucac

SEQ ID NO: 700577 - RNA, 19 nt, Artificial Sequence
  Description of Artificial Sequence: Synthetic oligonucleotide
uggcaguucugacagcuag

SEQ ID NO: 700578 - RNA, 19 nt, Artificial Sequence
  Description of Artificial Sequence: Synthetic oligonucleotide
aagguacaguggccaaacc

SEQ ID NO: 700579 - RNA, 19 nt, Artificial Sequence
  Description of Artificial Sequence: Synthetic oligonucleotide
agggcuagucaguaacccc

SEQ ID NO: 700580 - RNA, 19 nt, Artificial Sequence
  Description of Artificial Sequence: Synthetic oligonucleotide
uaugaggcagguaucuggu

SEQ ID NO: 700581 - RNA, 19 nt, Artificial Sequence
  Description of Artificial Sequence: Synthetic oligonucleotide
ucaggacgcacugugagcc

SEQ ID NO: 700582 - RNA, 19 nt, Artificial Sequence
  Description of Artificial Sequence: Synthetic oligonucleotide
acgacagcacaucucacag

SEQ ID NO: 700583 - RNA, 19 nt, Artificial Sequence
  Description of Artificial Sequence: Synthetic oligonucleotide
auucugagcccgaagggcc

SEQ ID NO: 700584 - RNA, 19 nt, Artificial Sequence
  Description of Artificial Sequence: Synthetic oligonucleotide
ugauacucccugcaauuca

SEQ ID NO: 700585 - RNA, 19 nt, Artificial Sequence
  Description of Artificial Sequence: Synthetic oligonucleotide
uggccaagcuuaaagguac

SEQ ID NO: 700586 - RNA, 19 nt, Artificial Sequence
  Description of Artificial Sequence: Synthetic oligonucleotide
ucugcgaucgacacaccca

SEQ ID NO: 700587 - RNA, 19 nt, Artificial Sequence
  Description of Artificial Sequence: Synthetic oligonucleotide
ucugucgaacaccaugcga

SEQ ID NO: 700588 - RNA, 19 nt, Artificial Sequence
  Description of Artificial Sequence: Synthetic oligonucleotide
cucccugcaauucaugcgc

SEQ ID NO: 700589 - RNA, 19 nt, Artificial Sequence
  Description of Artificial Sequence: Synthetic oligonucleotide
uaagggcuagucaguaacc

SEQ ID NO: 700590 - RNA, 19 nt, Artificial Sequence
  Description of Artificial Sequence: Synthetic oligonucleotide
caucgggcugguaugaggc

SEQ ID NO: 700591 - RNA, 19 nt, Artificial Sequence
  Description of Artificial Sequence: Synthetic oligonucleotide
gaccucagguuuuacuugc

SEQ ID NO: 700592 - RNA, 19 nt, Artificial Sequence
  Description of Artificial Sequence: Synthetic oligonucleotide
cagugguagcucaaggugc

SEQ ID NO: 700593 - RNA, 19 nt, Artificial Sequence
  Description of Artificial Sequence: Synthetic oligonucleotide
caaagggugagggaucugg

SEQ ID NO: 700594 - RNA, 19 nt, Artificial Sequence
  Description of Artificial Sequence: Synthetic oligonucleotide
caccauguccuugagagag

SEQ ID NO: 700595 - RNA, 19 nt, Artificial Sequence
  Description of Artificial Sequence: Synthetic oligonucleotide
ucaucgggcugguaugagg

SEQ ID NO: 700596 - RNA, 19 nt, Artificial Sequence
  Description of Artificial Sequence: Synthetic oligonucleotide
agguacaguggccaaacca

SEQ ID NO: 700597 - RNA, 19 nt, Artificial Sequence
  Description of Artificial Sequence: Synthetic oligonucleotide
cacaauccggcacuguggg

SEQ ID NO: 700598 - RNA, 19 nt, Artificial Sequence
  Description of Artificial Sequence: Synthetic oligonucleotide
uucugucgaacaccaugcg

SEQ ID NO: 700599 - RNA, 19 nt, Artificial Sequence
  Description of Artificial Sequence: Synthetic oligonucleotide
cagaguuaaaaccccuggc

SEQ ID NO: 700600 - RNA, 19 nt, Artificial Sequence
  Description of Artificial Sequence: Synthetic oligonucleotide
ugcggguugagugaggugu

SEQ ID NO: 700601 - RNA, 19 nt, Artificial Sequence
  Description of Artificial Sequence: Synthetic oligonucleotide
guauucagcaccaggcucc

SEQ ID NO: 700602 - RNA, 19 nt, Artificial Sequence
  Description of Artificial Sequence: Synthetic oligonucleotide
ugcagugguagcucaaggu

SEQ ID NO: 700603 - RNA, 19 nt, Artificial Sequence
  Description of Artificial Sequence: Synthetic oligonucleotide
aggaaucccauugacccgg

SEQ ID NO: 700604 - RNA, 19 nt, Artificial Sequence
  Description of Artificial Sequence: Synthetic oligonucleotide
uggucaauauugagggcca

SEQ ID NO: 700605 - RNA, 19 nt, Artificial Sequence
  Description of Artificial Sequence: Synthetic oligonucleotide
ggccauaagggcuagucag

SEQ ID NO: 700606 - RNA, 19 nt, Artificial Sequence
  Description of Artificial Sequence: Synthetic oligonucleotide
cacaggacaggugaacucg

SEQ ID NO: 700607 - RNA, 19 nt, Artificial Sequence
  Description of Artificial Sequence: Synthetic oligonucleotide
agucugauguccuguguug

SEQ ID NO: 700608 - RNA, 19 nt, Artificial Sequence
  Description of Artificial Sequence: Synthetic oligonucleotide
guucugucgaacaccaugc

SEQ ID NO: 700609 - RNA, 19 nt, Artificial Sequence
  Description of Artificial Sequence: Synthetic oligonucleotide
uuaauugaggcugguggcu

SEQ ID NO: 700610 - RNA, 19 nt, Artificial Sequence
  Description of Artificial Sequence: Synthetic oligonucleotide
agagaggccacugucauau

SEQ ID NO: 700611 - RNA, 19 nt, Artificial Sequence
  Description of Artificial Sequence: Synthetic oligonucleotide
uguuuaauugaggcuggug

SEQ ID NO: 700612 - RNA, 19 nt, Artificial Sequence
  Description of Artificial Sequence: Synthetic oligonucleotide
ucacgcagcaccacggccu

SEQ ID NO: 700613 - RNA, 19 nt, Artificial Sequence
  Description of Artificial Sequence: Synthetic oligonucleotide
cuuaaagguacaguggcca

SEQ ID NO: 700614 - RNA, 19 nt, Artificial Sequence
  Description of Artificial Sequence: Synthetic oligonucleotide
cuugagagaggccacuguc

SEQ ID NO: 700615 - RNA, 19 nt, Artificial Sequence
  Description of Artificial Sequence: Synthetic oligonucleotide
cacugucauaucaggacgc

SEQ ID NO: 700616 - RNA, 19 nt, Artificial Sequence
  Description of Artificial Sequence: Synthetic oligonucleotide
uugacccgggagcacacag

SEQ ID NO: 700617 - RNA, 19 nt, Artificial Sequence
  Description of Artificial Sequence: Synthetic oligonucleotide
guuaaaaccccuggccuag

SEQ ID NO: 700618 - RNA, 19 nt, Artificial Sequence
  Description of Artificial Sequence: Synthetic oligonucleotide
gcaauucaugcgcucaugg

SEQ ID NO: 700619 - RNA, 19 nt, Artificial Sequence
  Description of Artificial Sequence: Synthetic oligonucleotide
uaggauggcaaggaauccc

SEQ ID NO: 700620 - RNA, 19 nt, Artificial Sequence
  Description of Artificial Sequence: Synthetic oligonucleotide
gucauaucaggacgcacug

SEQ ID NO: 700621 - RNA, 19 nt, Artificial Sequence
  Description of Artificial Sequence: Synthetic oligonucleotide
agaccucagguuuuacuug

SEQ ID NO: 700622 - RNA, 19 nt, Artificial Sequence
  Description of Artificial Sequence: Synthetic oligonucleotide
acacucacgcagcaccacg

SEQ ID NO: 700623 - RNA, 19 nt, Artificial Sequence
  Description of Artificial Sequence: Synthetic oligonucleotide
aaccccguggagcaacaug

SEQ ID NO: 700624 - RNA, 19 nt, Artificial Sequence
  Description of Artificial Sequence: Synthetic oligonucleotide
gguuuguugaugaaaguac

SEQ ID NO: 700625 - RNA, 19 nt, Artificial Sequence
  Description of Artificial Sequence: Synthetic oligonucleotide
caaauggugacagugugca

SEQ ID NO: 700626 - RNA, 19 nt, Artificial Sequence
  Description of Artificial Sequence: Synthetic oligonucleotide
ggugcugcgguucucugcg

SEQ ID NO: 700627 - RNA, 19 nt, Artificial Sequence
  Description of Artificial Sequence: Synthetic oligonucleotide
cucagggcggcucagaaca

SEQ ID NO: 700628 - RNA, 19 nt, Artificial Sequence
  Description of Artificial Sequence: Synthetic oligonucleotide
acucacgcagcaccacggc

SEQ ID NO: 700629 - RNA, 19 nt, Artificial Sequence
  Description of Artificial Sequence: Synthetic oligonucleotide
aguaaccccguggagcaac

SEQ ID NO: 700630 - RNA, 19 nt, Artificial Sequence
  Description of Artificial Sequence: Synthetic oligonucleotide
aguuaaaaccccuggccua

SEQ ID NO: 700631 - RNA, 19 nt, Artificial Sequence
  Description of Artificial Sequence: Synthetic oligonucleotide
acugaguagcacacagggc

SEQ ID NO: 700632 - RNA, 19 nt, Artificial Sequence
  Description of Artificial Sequence: Synthetic oligonucleotide
uguggguuuguugaugaaa

SEQ ID NO: 700633 - RNA, 19 nt, Artificial Sequence
  Description of Artificial Sequence: Synthetic oligonucleotide
guaguuccccuccugcugc

SEQ ID NO: 700634 - RNA, 19 nt, Artificial Sequence
  Description of Artificial Sequence: Synthetic oligonucleotide
ucuccguucugucgaacac

SEQ ID NO: 700635 - RNA, 19 nt, Artificial Sequence
  Description of Artificial Sequence: Synthetic oligonucleotide
agguuuuacuugcacccug

SEQ ID NO: 700636 - RNA, 19 nt, Artificial Sequence
  Description of Artificial Sequence: Synthetic oligonucleotide
uccugauacucccugcaau

SEQ ID NO: 700637 - RNA, 19 nt, Artificial Sequence
  Description of Artificial Sequence: Synthetic oligonucleotide
guaggcauccuccacgcuc

SEQ ID NO: 700638 - RNA, 19 nt, Artificial Sequence
  Description of Artificial Sequence: Synthetic oligonucleotide
uguucaucuccgccggcca

SEQ ID NO: 700639 - RNA, 19 nt, Artificial Sequence
  Description of Artificial Sequence: Synthetic oligonucleotide
caacauccgaagcugccgc

SEQ ID NO: 700640 - RNA, 19 nt, Artificial Sequence
  Description of Artificial Sequence: Synthetic oligonucleotide
cugcgaucgacacacccag

SEQ ID NO: 700641 - RNA, 19 nt, Artificial Sequence
  Description of Artificial Sequence: Synthetic oligonucleotide
agggccauaagggcuaguc

SEQ ID NO: 700642 - RNA, 19 nt, Artificial Sequence
  Description of Artificial Sequence: Synthetic oligonucleotide
ggagcaacaugacacuggc

SEQ ID NO: 700643 - RNA, 19 nt, Artificial Sequence
  Description of Artificial Sequence: Synthetic oligonucleotide
gaacagucacucagggcgg

SEQ ID NO: 700644 - RNA, 19 nt, Artificial Sequence
  Description of Artificial Sequence: Synthetic oligonucleotide
cuuggucaauauugagggc

SEQ ID NO: 700645 - RNA, 19 nt, Artificial Sequence
  Description of Artificial Sequence: Synthetic oligonucleotide
cuugccagggcacgaguag

SEQ ID NO: 700646 - RNA, 19 nt, Artificial Sequence
  Description of Artificial Sequence: Synthetic oligonucleotide
ugcaggguaagguccuuga

SEQ ID NO: 700647 - RNA, 19 nt, Artificial Sequence
  Description of Artificial Sequence: Synthetic oligonucleotide
uccucaucgggcugguaug

SEQ ID NO: 700648 - RNA, 19 nt, Artificial Sequence
  Description of Artificial Sequence: Synthetic oligonucleotide
ggugugcagacacucacgc

SEQ ID NO: 700649 - RNA, 19 nt, Artificial Sequence
  Description of Artificial Sequence: Synthetic oligonucleotide
agcguggacccuuggugac

SEQ ID NO: 700650 - RNA, 19 nt, Artificial Sequence
  Description of Artificial Sequence: Synthetic oligonucleotide
cacucacgcagcaccacgg

SEQ ID NO: 700651 - RNA, 19 nt, Artificial Sequence
  Description of Artificial Sequence: Synthetic oligonucleotide
ugguggcuaguaaggguag

SEQ ID NO: 700652 - RNA, 19 nt, Artificial Sequence
  Description of Artificial Sequence: Synthetic oligonucleotide
acucagggcggcucagaac

SEQ ID NO: 700653 - RNA, 19 nt, Artificial Sequence
  Description of Artificial Sequence: Synthetic oligonucleotide
ugguaugaggcagguaucu

SEQ ID NO: 700654 - RNA, 19 nt, Artificial Sequence
  Description of Artificial Sequence: Synthetic oligonucleotide
guggcuaguaaggguaggg

SEQ ID NO: 700655 - RNA, 19 nt, Artificial Sequence
  Description of Artificial Sequence: Synthetic oligonucleotide
cuaccucggggucaccugg

SEQ ID NO: 700656 - RNA, 19 nt, Artificial Sequence
  Description of Artificial Sequence: Synthetic oligonucleotide
aacauccgaagcugccgcu

SEQ ID NO: 700657 - RNA, 19 nt, Artificial Sequence
  Description of Artificial Sequence: Synthetic oligonucleotide
cucugcgaucgacacaccc

SEQ ID NO: 700658 - RNA, 19 nt, Artificial Sequence
  Description of Artificial Sequence: Synthetic oligonucleotide
gaaaugcuaccucgggguc

SEQ ID NO: 700659 - RNA, 19 nt, Artificial Sequence
  Description of Artificial Sequence: Synthetic oligonucleotide
gacaggagcgcucggaucu

SEQ ID NO: 700660 - RNA, 19 nt, Artificial Sequence
  Description of Artificial Sequence: Synthetic oligonucleotide
cagacggugcagcggaucc

SEQ ID NO: 700661 - RNA, 19 nt, Artificial Sequence
  Description of Artificial Sequence: Synthetic oligonucleotide
cugcgguucucugcgaucg

SEQ ID NO: 700662 - RNA, 19 nt, Artificial Sequence
  Description of Artificial Sequence: Synthetic oligonucleotide
agucaguaaccccguggag

SEQ ID NO: 700663 - RNA, 19 nt, Artificial Sequence
  Description of Artificial Sequence: Synthetic oligonucleotide
ggugaacucguugacauca

SEQ ID NO: 700664 - RNA, 19 nt, Artificial Sequence
  Description of Artificial Sequence: Synthetic oligonucleotide
uucggauggugcccugcag

SEQ ID NO: 700665 - RNA, 19 nt, Artificial Sequence
  Description of Artificial Sequence: Synthetic oligonucleotide
gggcuagucaguaaccccg

SEQ ID NO: 700666 - RNA, 19 nt, Artificial Sequence
  Description of Artificial Sequence: Synthetic oligonucleotide
cugguaguccucaggggac

SEQ ID NO: 700667 - RNA, 19 nt, Artificial Sequence
  Description of Artificial Sequence: Synthetic oligonucleotide
ugcugcgucuggcugcccc

SEQ ID NO: 700668 - RNA, 19 nt, Artificial Sequence
  Description of Artificial Sequence: Synthetic oligonucleotide
ccacugucauaucaggacg

SEQ ID NO: 700669 - RNA, 19 nt, Artificial Sequence
  Description of Artificial Sequence: Synthetic oligonucleotide
uacuugcacccugaggggc

SEQ ID NO: 700670 - RNA, 19 nt, Artificial Sequence
  Description of Artificial Sequence: Synthetic oligonucleotide
ugagggaucuggguccuca

SEQ ID NO: 700671 - RNA, 19 nt, Artificial Sequence
  Description of Artificial Sequence: Synthetic oligonucleotide
ggucuuggucaauauugag

SEQ ID NO: 700672 - RNA, 19 nt, Artificial Sequence
  Description of Artificial Sequence: Synthetic oligonucleotide
aaccagaguuaaaaccccu

SEQ ID NO: 700673 - RNA, 19 nt, Artificial Sequence
  Description of Artificial Sequence: Synthetic oligonucleotide
acaugacacuggcucagcu

SEQ ID NO: 700674 - RNA, 19 nt, Artificial Sequence
  Description of Artificial Sequence: Synthetic oligonucleotide
gcgauucagcccuagccgg

SEQ ID NO: 700675 - RNA, 19 nt, Artificial Sequence
  Description of Artificial Sequence: Synthetic oligonucleotide
ucgggcugguaugaggcag

SEQ ID NO: 700676 - RNA, 19 nt, Artificial Sequence
  Description of Artificial Sequence: Synthetic oligonucleotide
ugcaauucaugcgcucaug

SEQ ID NO: 700677 - RNA, 19 nt, Artificial Sequence
  Description of Artificial Sequence: Synthetic oligonucleotide
ugcgaucgacacacccagg

SEQ ID NO: 700678 - RNA, 19 nt, Artificial Sequence
  Description of Artificial Sequence: Synthetic oligonucleotide
gacccgggagcacacagga

SEQ ID NO: 700679 - RNA, 19 nt, Artificial Sequence
  Description of Artificial Sequence: Synthetic oligonucleotide
ugcucccgggaaaugcuac

SEQ ID NO: 700680 - RNA, 19 nt, Artificial Sequence
  Description of Artificial Sequence: Synthetic oligonucleotide
ggaaaugcuaccucggggu

SEQ ID NO: 700681 - RNA, 19 nt, Artificial Sequence
  Description of Artificial Sequence: Synthetic oligonucleotide
aggggaacagucacucagg

SEQ ID NO: 700682 - RNA, 19 nt, Artificial Sequence
  Description of Artificial Sequence: Synthetic oligonucleotide
caauucaugcgcucaugga

SEQ ID NO: 700683 - RNA, 19 nt, Artificial Sequence
  Description of Artificial Sequence: Synthetic oligonucleotide
cugacagcuaggauggcaa

SEQ ID NO: 700684 - RNA, 19 nt, Artificial Sequence
  Description of Artificial Sequence: Synthetic oligonucleotide
gauucagcccuagccggcc

SEQ ID NO: 700685 - RNA, 19 nt, Artificial Sequence
  Description of Artificial Sequence: Synthetic oligonucleotide
guaagguccuugaagccca

SEQ ID NO: 700686 - RNA, 19 nt, Artificial Sequence
  Description of Artificial Sequence: Synthetic oligonucleotide
acagucugauguccugugu

SEQ ID NO: 700687 - RNA, 19 nt, Artificial Sequence
  Description of Artificial Sequence: Synthetic oligonucleotide
cuguccaaccacccacugc

SEQ ID NO: 700688 - RNA, 19 nt, Artificial Sequence
  Description of Artificial Sequence: Synthetic oligonucleotide
gguaguuccccuccugcug

SEQ ID NO: 700689 - RNA, 19 nt, Artificial Sequence
  Description of Artificial Sequence: Synthetic oligonucleotide
ggacaggugaacucguuga

SEQ ID NO: 700690 - RNA, 19 nt, Artificial Sequence
  Description of Artificial Sequence: Synthetic oligonucleotide
cucacgcagcaccacggcc

SEQ ID NO: 700691 - RNA, 19 nt, Artificial Sequence
  Description of Artificial Sequence: Synthetic oligonucleotide
caauccggcacugugggca

SEQ ID NO: 700692 - RNA, 19 nt, Artificial Sequence
  Description of Artificial Sequence: Synthetic oligonucleotide
uugcacgacagcacaucuc

SEQ ID NO: 700693 - RNA, 19 nt, Artificial Sequence
  Description of Artificial Sequence: Synthetic oligonucleotide
ucguccugauacucccugc

SEQ ID NO: 700694 - RNA, 19 nt, Artificial Sequence
  Description of Artificial Sequence: Synthetic oligonucleotide
ugagccaaauggugacagu

SEQ ID NO: 700695 - RNA, 19 nt, Artificial Sequence
  Description of Artificial Sequence: Synthetic oligonucleotide
cuaguaaggguaggguauc

SEQ ID NO: 700696 - RNA, 19 nt, Artificial Sequence
  Description of Artificial Sequence: Synthetic oligonucleotide
cuguucaucuccgccggcc

SEQ ID NO: 700697 - RNA, 19 nt, Artificial Sequence
  Description of Artificial Sequence: Synthetic oligonucleotide
ugcgaaugcagggucuccu

SEQ ID NO: 700698 - RNA, 19 nt, Artificial Sequence
  Description of Artificial Sequence: Synthetic oligonucleotide
cugguggcuaguaagggua

SEQ ID NO: 700699 - RNA, 19 nt, Artificial Sequence
  Description of Artificial Sequence: Synthetic oligonucleotide
cucgugccagccucugucc

SEQ ID NO: 700700 - RNA, 19 nt, Artificial Sequence
  Description of Artificial Sequence: Synthetic oligonucleotide
uaauugaggcugguggcua

SEQ ID NO: 700701 - RNA, 19 nt, Artificial Sequence
  Description of Artificial Sequence: Synthetic oligonucleotide
cugguaugaggcagguauc

SEQ ID NO: 700702 - RNA, 19 nt, Artificial Sequence
  Description of Artificial Sequence: Synthetic oligonucleotide
cuccguucugucgaacacc

SEQ ID NO: 700703 - RNA, 19 nt, Artificial Sequence
  Description of Artificial Sequence: Synthetic oligonucleotide
ucggggucaccugggagag

SEQ ID NO: 700704 - RNA, 19 nt, Artificial Sequence
  Description of Artificial Sequence: Synthetic oligonucleotide
accagaguuaaaaccccug

SEQ ID NO: 700705 - RNA, 19 nt, Artificial Sequence
  Description of Artificial Sequence: Synthetic oligonucleotide
augcgaaugcagggucucc

SEQ ID NO: 700706 - RNA, 19 nt, Artificial Sequence
  Description of Artificial Sequence: Synthetic oligonucleotide
ggcaaggaaucccauugac

SEQ ID NO: 700707 - RNA, 19 nt, Artificial Sequence
  Description of Artificial Sequence: Synthetic oligonucleotide
ggcaggauaccucugccuc

SEQ ID NO: 700708 - RNA, 19 nt, Artificial Sequence
  Description of Artificial Sequence: Synthetic oligonucleotide
agggcacucagcgggcucg

SEQ ID NO: 700709 - RNA, 19 nt, Artificial Sequence
  Description of Artificial Sequence: Synthetic oligonucleotide
accgguggcgacucuggug

SEQ ID NO: 700710 - RNA, 19 nt, Artificial Sequence
  Description of Artificial Sequence: Synthetic oligonucleotide
cccgggaaaugcuaccucg

SEQ ID NO: 700711 - RNA, 19 nt, Artificial Sequence
  Description of Artificial Sequence: Synthetic oligonucleotide
agucacucagggcggcuca

SEQ ID NO: 700712 - RNA, 19 nt, Artificial Sequence
  Description of Artificial Sequence: Synthetic oligonucleotide
ucuccguugucugccgggc

SEQ ID NO: 700713 - RNA, 19 nt, Artificial Sequence
  Description of Artificial Sequence: Synthetic oligonucleotide
ccacaauccggcacugugg

SEQ ID NO: 700714 - RNA, 19 nt, Artificial Sequence
  Description of Artificial Sequence: Synthetic oligonucleotide
uuaggucagggcuguguuu

SEQ ID NO: 700715 - RNA, 19 nt, Artificial Sequence
  Description of Artificial Sequence: Synthetic oligonucleotide
ugucugccgggcagccacg

SEQ ID NO: 700716 - RNA, 19 nt, Artificial Sequence
  Description of Artificial Sequence: Synthetic oligonucleotide
ucccugcaauucaugcgcu

SEQ ID NO: 700717 - RNA, 19 nt, Artificial Sequence
  Description of Artificial Sequence: Synthetic oligonucleotide
gucuccguucugucgaaca

SEQ ID NO: 700718 - RNA, 19 nt, Artificial Sequence
  Description of Artificial Sequence: Synthetic oligonucleotide
acaguugacccgggagcac

SEQ ID NO: 700719 - RNA, 19 nt, Artificial Sequence
  Description of Artificial Sequence: Synthetic oligonucleotide
agcgcucggaucucccucu

SEQ ID NO: 700720 - RNA, 19 nt, Artificial Sequence
  Description of Artificial Sequence: Synthetic oligonucleotide
agcuaggauggcaaggaau

SEQ ID NO: 700721 - RNA, 19 nt, Artificial Sequence
  Description of Artificial Sequence: Synthetic oligonucleotide
cuggccaagcuuaaaggua

SEQ ID NO: 700722 - RNA, 19 nt, Artificial Sequence
  Description of Artificial Sequence: Synthetic oligonucleotide
gggcucgguauucagcacc

SEQ ID NO: 700723 - RNA, 19 nt, Artificial Sequence
  Description of Artificial Sequence: Synthetic oligonucleotide
agccaaauggugacagugu

SEQ ID NO: 700724 - RNA, 19 nt, Artificial Sequence
  Description of Artificial Sequence: Synthetic oligonucleotide
aguugacccgggagcacac

SEQ ID NO: 700725 - RNA, 19 nt, Artificial Sequence
  Description of Artificial Sequence: Synthetic oligonucleotide
gucaccugggagagggcgg

SEQ ID NO: 700726 - RNA, 19 nt, Artificial Sequence
  Description of Artificial Sequence: Synthetic oligonucleotide
uaguaaggguaggguaucu

SEQ ID NO: 700727 - RNA, 19 nt, Artificial Sequence
  Description of Artificial Sequence: Synthetic oligonucleotide
ugcagcggauccagucaca

SEQ ID NO: 700728 - RNA, 19 nt, Artificial Sequence
  Description of Artificial Sequence: Synthetic oligonucleotide
auccucaaagaagcaccag

SEQ ID NO: 700729 - RNA, 19 nt, Artificial Sequence
  Description of Artificial Sequence: Synthetic oligonucleotide
uucaucuccgccggccacu

SEQ ID NO: 700730 - RNA, 19 nt, Artificial Sequence
  Description of Artificial Sequence: Synthetic oligonucleotide
caucuccguugucugccgg

SEQ ID NO: 700731 - RNA, 19 nt, Artificial Sequence
  Description of Artificial Sequence: Synthetic oligonucleotide
uguuuccgcugcugguacu

SEQ ID NO: 700732 - RNA, 19 nt, Artificial Sequence
  Description of Artificial Sequence: Synthetic oligonucleotide
cguucugucgaacaccaug

SEQ ID NO: 700733 - RNA, 19 nt, Artificial Sequence
  Description of Artificial Sequence: Synthetic oligonucleotide
ugcugcgguucucugcgau

SEQ ID NO: 700734 - RNA, 19 nt, Artificial Sequence
  Description of Artificial Sequence: Synthetic oligonucleotide
ugguaguccucaggggaca

SEQ ID NO: 700735 - RNA, 19 nt, Artificial Sequence
  Description of Artificial Sequence: Synthetic oligonucleotide
ugcuaccucggggucaccu

SEQ ID NO: 700736 - RNA, 19 nt, Artificial Sequence
  Description of Artificial Sequence: Synthetic oligonucleotide
caggcgugcucgcucuucc

SEQ ID NO: 700737 - RNA, 19 nt, Artificial Sequence
  Description of Artificial Sequence: Synthetic oligonucleotide
gcuuaaagguacaguggcc

SEQ ID NO: 700738 - RNA, 19 nt, Artificial Sequence
  Description of Artificial Sequence: Synthetic oligonucleotide
aggccguguggguuuguug

SEQ ID NO: 700739 - RNA, 19 nt, Artificial Sequence
  Description of Artificial Sequence: Synthetic oligonucleotide
gcccaaaucuuccaacauc

SEQ ID NO: 700740 - RNA, 19 nt, Artificial Sequence
  Description of Artificial Sequence: Synthetic oligonucleotide
agggcccuuucccuggcca

SEQ ID NO: 700741 - RNA, 19 nt, Artificial Sequence
  Description of Artificial Sequence: Synthetic oligonucleotide
acauccgaagcugccgcug

SEQ ID NO: 700742 - RNA, 19 nt, Artificial Sequence
  Description of Artificial Sequence: Synthetic oligonucleotide
acgaguaggugcugucaau

SEQ ID NO: 700743 - RNA, 19 nt, Artificial Sequence
  Description of Artificial Sequence: Synthetic oligonucleotide
gggaacagucacucagggc

SEQ ID NO: 700744 - RNA, 19 nt, Artificial Sequence
  Description of Artificial Sequence: Synthetic oligonucleotide
cugucauaucaggacgcac

SEQ ID NO: 700745 - RNA, 19 nt, Artificial Sequence
  Description of Artificial Sequence: Synthetic oligonucleotide
ugguaggucucuggccuug

SEQ ID NO: 700746 - RNA, 19 nt, Artificial Sequence
  Description of Artificial Sequence: Synthetic oligonucleotide
cagcguggacccuugguga

SEQ ID NO: 700747 - RNA, 19 nt, Artificial Sequence
  Description of Artificial Sequence: Synthetic oligonucleotide
guaggguaucuagcucagg

SEQ ID NO: 700748 - RNA, 19 nt, Artificial Sequence
  Description of Artificial Sequence: Synthetic oligonucleotide
agcccuagccggccucgcg

SEQ ID NO: 700749 - RNA, 19 nt, Artificial Sequence
  Description of Artificial Sequence: Synthetic oligonucleotide
ucagcgggcucgguauuca

SEQ ID NO: 700750 - RNA, 19 nt, Artificial Sequence
  Description of Artificial Sequence: Synthetic oligonucleotide
ucgccgggcgccagcacug

SEQ ID NO: 700751 - RNA, 19 nt, Artificial Sequence
  Description of Artificial Sequence: Synthetic oligonucleotide
ccaacauccgaagcugccg

SEQ ID NO: 700752 - RNA, 19 nt, Artificial Sequence
  Description of Artificial Sequence: Synthetic oligonucleotide
acgcacugugagccaaaug

SEQ ID NO: 700753 - RNA, 19 nt, Artificial Sequence
  Description of Artificial Sequence: Synthetic oligonucleotide
uucagcccuagccggccuc

SEQ ID NO: 700754 - RNA, 19 nt, Artificial Sequence
  Description of Artificial Sequence: Synthetic oligonucleotide
gagcgcucggaucucccuc

SEQ ID NO: 700755 - RNA, 19 nt, Artificial Sequence
  Description of Artificial Sequence: Synthetic oligonucleotide
ccagcguggacccuuggug

SEQ ID NO: 700756 - RNA, 19 nt, Artificial Sequence
  Description of Artificial Sequence: Synthetic oligonucleotide
caaccacccacugcugcag

SEQ ID NO: 700757 - RNA, 19 nt, Artificial Sequence
  Description of Artificial Sequence: Synthetic oligonucleotide
ucagggcggcucagaacac

SEQ ID NO: 700758 - RNA, 19 nt, Artificial Sequence
  Description of Artificial Sequence: Synthetic oligonucleotide
cauaaucuagaaacaccau

SEQ ID NO: 700759 - RNA, 19 nt, Artificial Sequence
  Description of Artificial Sequence: Synthetic oligonucleotide
guucaucuccgccggccac

SEQ ID NO: 700760 - RNA, 19 nt, Artificial Sequence
  Description of Artificial Sequence: Synthetic oligonucleotide
ggcuaguaaggguagggua

SEQ ID NO: 700761 - RNA, 19 nt, Artificial Sequence
  Description of Artificial Sequence: Synthetic oligonucleotide
uuaaaaccccuggccuagu

SEQ ID NO: 700762 - RNA, 19 nt, Artificial Sequence
  Description of Artificial Sequence: Synthetic oligonucleotide
gauacucccugcaauucau

SEQ ID NO: 700763 - RNA, 19 nt, Artificial Sequence
  Description of Artificial Sequence: Synthetic oligonucleotide
aggccuuaggucagggcug

SEQ ID NO: 700764 - RNA, 19 nt, Artificial Sequence
  Description of Artificial Sequence: Synthetic oligonucleotide
aguaaggguaggguaucua

SEQ ID NO: 700765 - RNA, 19 nt, Artificial Sequence
  Description of Artificial Sequence: Synthetic oligonucleotide
cgcccauccccucagaaag

SEQ ID NO: 700766 - RNA, 19 nt, Artificial Sequence
  Description of Artificial Sequence: Synthetic oligonucleotide
ucaucuccgccggccacug

SEQ ID NO: 700767 - RNA, 19 nt, Artificial Sequence
  Description of Artificial Sequence: Synthetic oligonucleotide
aucuagcucagggccauaa

SEQ ID NO: 700768 - RNA, 19 nt, Artificial Sequence
  Description of Artificial Sequence: Synthetic oligonucleotide
ccgggaaaugcuaccucgg

SEQ ID NO: 700769 - RNA, 19 nt, Artificial Sequence
  Description of Artificial Sequence: Synthetic oligonucleotide
gacacucacgcagcaccac

SEQ ID NO: 700770 - RNA, 19 nt, Artificial Sequence
  Description of Artificial Sequence: Synthetic oligonucleotide
auacuucauagcagccugu

SEQ ID NO: 700771 - RNA, 19 nt, Artificial Sequence
  Description of Artificial Sequence: Synthetic oligonucleotide
gcuguuucggauggugccc

SEQ ID NO: 700772 - RNA, 19 nt, Artificial Sequence
  Description of Artificial Sequence: Synthetic oligonucleotide
auucagcccuagccggccu

SEQ ID NO: 700773 - RNA, 19 nt, Artificial Sequence
  Description of Artificial Sequence: Synthetic oligonucleotide
gcgggcucgguauucagca

SEQ ID NO: 700774 - RNA, 19 nt, Artificial Sequence
  Description of Artificial Sequence: Synthetic oligonucleotide
ugcgguucucugcgaucga

SEQ ID NO: 700775 - RNA, 19 nt, Artificial Sequence
  Description of Artificial Sequence: Synthetic oligonucleotide
gguaugaggcagguaucug

SEQ ID NO: 700776 - RNA, 19 nt, Artificial Sequence
  Description of Artificial Sequence: Synthetic oligonucleotide
ucucugcgaucgacacacc

SEQ ID NO: 700777 - RNA, 19 nt, Artificial Sequence
  Description of Artificial Sequence: Synthetic oligonucleotide
gguggcuaguaaggguagg

SEQ ID NO: 700778 - RNA, 19 nt, Artificial Sequence
  Description of Artificial Sequence: Synthetic oligonucleotide
cuugcacgacagcacaucu

SEQ ID NO: 700779 - RNA, 19 nt, Artificial Sequence
  Description of Artificial Sequence: Synthetic oligonucleotide
gguaucuagcucagggcca

SEQ ID NO: 700780 - RNA, 19 nt, Artificial Sequence
  Description of Artificial Sequence: Synthetic oligonucleotide
gaaucccauugacccggca

SEQ ID NO: 700781 - RNA, 19 nt, Artificial Sequence
  Description of Artificial Sequence: Synthetic oligonucleotide
ugagcccgaagggccaagu

SEQ ID NO: 700782 - RNA, 19 nt, Artificial Sequence
  Description of Artificial Sequence: Synthetic oligonucleotide
ucaugcgcucauggauggc

SEQ ID NO: 700783 - RNA, 19 nt, Artificial Sequence
  Description of Artificial Sequence: Synthetic oligonucleotide
agguaucugguaggucucu

SEQ ID NO: 700784 - RNA, 19 nt, Artificial Sequence
  Description of Artificial Sequence: Synthetic oligonucleotide
cucaucgggcugguaugag

SEQ ID NO: 700785 - RNA, 19 nt, Artificial Sequence
  Description of Artificial Sequence: Synthetic oligonucleotide
agggccaagucguccugau

SEQ ID NO: 700786 - RNA, 19 nt, Artificial Sequence
  Description of Artificial Sequence: Synthetic oligonucleotide
ggguugagugagguguugc

SEQ ID NO: 700787 - RNA, 19 nt, Artificial Sequence
  Description of Artificial Sequence: Synthetic oligonucleotide
gccacgucauucugagccc

SEQ ID NO: 700788 - RNA, 19 nt, Artificial Sequence
  Description of Artificial Sequence: Synthetic oligonucleotide
cccgggagcacacaggaca

SEQ ID NO: 700789 - RNA, 19 nt, Artificial Sequence
  Description of Artificial Sequence: Synthetic oligonucleotide
agcagcgauucagcccuag

SEQ ID NO: 700790 - RNA, 19 nt, Artificial Sequence
  Description of Artificial Sequence: Synthetic oligonucleotide
cagggcggcucagaacacc

SEQ ID NO: 700791 - RNA, 19 nt, Artificial Sequence
  Description of Artificial Sequence: Synthetic oligonucleotide
ugcuacacaugugggucuu

SEQ ID NO: 700792 - RNA, 19 nt, Artificial Sequence
  Description of Artificial Sequence: Synthetic oligonucleotide
caucucacagccaggccgu

SEQ ID NO: 700793 - RNA, 19 nt, Artificial Sequence
  Description of Artificial Sequence: Synthetic oligonucleotide
guccugauacucccugcaa

SEQ ID NO: 700794 - RNA, 19 nt, Artificial Sequence
  Description of Artificial Sequence: Synthetic oligonucleotide
agggcggcucagaacacca

SEQ ID NO: 700795 - RNA, 19 nt, Artificial Sequence
  Description of Artificial Sequence: Synthetic oligonucleotide
gcuaccucggggucaccug

SEQ ID NO: 700796 - RNA, 19 nt, Artificial Sequence
  Description of Artificial Sequence: Synthetic oligonucleotide
cauugacccggcagcggca

SEQ ID NO: 700797 - RNA, 19 nt, Artificial Sequence
  Description of Artificial Sequence: Synthetic oligonucleotide
ucgacacacccagguccag

SEQ ID NO: 700798 - RNA, 19 nt, Artificial Sequence
  Description of Artificial Sequence: Synthetic oligonucleotide
ugucuccguucugucgaac

SEQ ID NO: 700799 - RNA, 19 nt, Artificial Sequence
  Description of Artificial Sequence: Synthetic oligonucleotide
gggcuguguuuaauugagg

SEQ ID NO: 700800 - RNA, 19 nt, Artificial Sequence
  Description of Artificial Sequence: Synthetic oligonucleotide
gagagaggccacugucaua

SEQ ID NO: 700801 - RNA, 19 nt, Artificial Sequence
  Description of Artificial Sequence: Synthetic oligonucleotide
gagugagguguugcaggca

SEQ ID NO: 700802 - RNA, 19 nt, Artificial Sequence
  Description of Artificial Sequence: Synthetic oligonucleotide
cuuaggucagggcuguguu

SEQ ID NO: 700803 - RNA, 19 nt, Artificial Sequence
  Description of Artificial Sequence: Synthetic oligonucleotide
gcuaguaaggguaggguau

SEQ ID NO: 700804 - RNA, 19 nt, Artificial Sequence
  Description of Artificial Sequence: Synthetic oligonucleotide
ucugagcccgaagggccaa

SEQ ID NO: 700805 - RNA, 19 nt, Artificial Sequence
  Description of Artificial Sequence: Synthetic oligonucleotide
caguugacccgggagcaca

SEQ ID NO: 700806 - RNA, 19 nt, Artificial Sequence
  Description of Artificial Sequence: Synthetic oligonucleotide
cacgcagcaccacggccuc

SEQ ID NO: 700807 - RNA, 19 nt, Artificial Sequence
  Description of Artificial Sequence: Synthetic oligonucleotide
aguggccaaaccagaguua

SEQ ID NO: 700808 - RNA, 19 nt, Artificial Sequence
  Description of Artificial Sequence: Synthetic oligonucleotide
cugcggguugagugaggug

SEQ ID NO: 700809 - RNA, 19 nt, Artificial Sequence
  Description of Artificial Sequence: Synthetic oligonucleotide
gcagcgauucagcccuagc

SEQ ID NO: 700810 - RNA, 19 nt, Artificial Sequence
  Description of Artificial Sequence: Synthetic oligonucleotide
gcuagucaguaaccccgug

SEQ ID NO: 700811 - RNA, 19 nt, Artificial Sequence
  Description of Artificial Sequence: Synthetic oligonucleotide
ugggaaggaugggcuccag

SEQ ID NO: 700812 - RNA, 19 nt, Artificial Sequence
  Description of Artificial Sequence: Synthetic oligonucleotide
cgggaaaugcuaccucggg

SEQ ID NO: 700813 - RNA, 19 nt, Artificial Sequence
  Description of Artificial Sequence: Synthetic oligonucleotide
agcagacaguugacccggg

SEQ ID NO: 700814 - RNA, 19 nt, Artificial Sequence
  Description of Artificial Sequence: Synthetic oligonucleotide
agccaggccguguggguuu

SEQ ID NO: 700815 - RNA, 19 nt, Artificial Sequence
  Description of Artificial Sequence: Synthetic oligonucleotide
gucacucagggcggcucag

SEQ ID NO: 700816 - RNA, 19 nt, Artificial Sequence
  Description of Artificial Sequence: Synthetic oligonucleotide
aggacgcacugugagccaa

SEQ ID NO: 700817 - RNA, 19 nt, Artificial Sequence
  Description of Artificial Sequence: Synthetic oligonucleotide
cagcuugccagggcacgag

SEQ ID NO: 700818 - RNA, 19 nt, Artificial Sequence
  Description of Artificial Sequence: Synthetic oligonucleotide
gcuccugcggguugaguga

SEQ ID NO: 700819 - RNA, 19 nt, Artificial Sequence
  Description of Artificial Sequence: Synthetic oligonucleotide
cagucacucagggcggcuc

SEQ ID NO: 700820 - RNA, 19 nt, Artificial Sequence
  Description of Artificial Sequence: Synthetic oligonucleotide
cucagcgggcucgguauuc

SEQ ID NO: 700821 - RNA, 19 nt, Artificial Sequence
  Description of Artificial Sequence: Synthetic oligonucleotide
ccaccgguggcgacucugg

SEQ ID NO: 700822 - RNA, 19 nt, Artificial Sequence
  Description of Artificial Sequence: Synthetic oligonucleotide
gcgacucuggugcugcguc

SEQ ID NO: 700823 - RNA, 19 nt, Artificial Sequence
  Description of Artificial Sequence: Synthetic oligonucleotide
uggccucacccugcugcag

SEQ ID NO: 700824 - RNA, 19 nt, Artificial Sequence
  Description of Artificial Sequence: Synthetic oligonucleotide
aggcgugcucgcucuuccu

SEQ ID NO: 700825 - RNA, 19 nt, Artificial Sequence
  Description of Artificial Sequence: Synthetic oligonucleotide
gcgaucgacacacccaggu

SEQ ID NO: 700826 - RNA, 19 nt, Artificial Sequence
  Description of Artificial Sequence: Synthetic oligonucleotide
cuagccggccucgcgcgug

SEQ ID NO: 700827 - RNA, 19 nt, Artificial Sequence
  Description of Artificial Sequence: Synthetic oligonucleotide
ggcacgaguaggugcuguc

SEQ ID NO: 700828 - RNA, 19 nt, Artificial Sequence
  Description of Artificial Sequence: Synthetic oligonucleotide
acccgggagcacacaggac

SEQ ID NO: 700829 - RNA, 19 nt, Artificial Sequence
  Description of Artificial Sequence: Synthetic oligonucleotide
cacgucauucugagcccga

SEQ ID NO: 700830 - RNA, 19 nt, Artificial Sequence
  Description of Artificial Sequence: Synthetic oligonucleotide
gcccuagccggccucgcgc

SEQ ID NO: 700831 - RNA, 19 nt, Artificial Sequence
  Description of Artificial Sequence: Synthetic oligonucleotide
cacucagcgggcucgguau

SEQ ID NO: 700832 - RNA, 19 nt, Artificial Sequence
  Description of Artificial Sequence: Synthetic oligonucleotide
ccaagucguccugauacuc

SEQ ID NO: 700833 - RNA, 19 nt, Artificial Sequence
  Description of Artificial Sequence: Synthetic oligonucleotide
acgucauucugagcccgaa

SEQ ID NO: 700834 - RNA, 19 nt, Artificial Sequence
  Description of Artificial Sequence: Synthetic oligonucleotide
ccugcaauucaugcgcuca

SEQ ID NO: 700835 - RNA, 19 nt, Artificial Sequence
  Description of Artificial Sequence: Synthetic oligonucleotide
guaaccccguggagcaaca

SEQ ID NO: 700836 - RNA, 19 nt, Artificial Sequence
  Description of Artificial Sequence: Synthetic oligonucleotide
agucguccugauacucccu

SEQ ID NO: 700837 - RNA, 19 nt, Artificial Sequence
  Description of Artificial Sequence: Synthetic oligonucleotide
cugcuacacaugugggucu

SEQ ID NO: 700838 - RNA, 19 nt, Artificial Sequence
  Description of Artificial Sequence: Synthetic oligonucleotide
cgauucagcccuagccggc

SEQ ID NO: 700839 - RNA, 19 nt, Artificial Sequence
  Description of Artificial Sequence: Synthetic oligonucleotide
cacugcccgggcgaggcuc

SEQ ID NO: 700840 - RNA, 19 nt, Artificial Sequence
  Description of Artificial Sequence: Synthetic oligonucleotide
guaucuagcucagggccau

SEQ ID NO: 700841 - RNA, 19 nt, Artificial Sequence
  Description of Artificial Sequence: Synthetic oligonucleotide
ccuugcacgacagcacauc

SEQ ID NO: 700842 - RNA, 19 nt, Artificial Sequence
  Description of Artificial Sequence: Synthetic oligonucleotide
ggcucgguauucagcacca

SEQ ID NO: 700843 - RNA, 19 nt, Artificial Sequence
  Description of Artificial Sequence: Synthetic oligonucleotide
ccgaagggccaagucgucc

SEQ ID NO: 700844 - RNA, 19 nt, Artificial Sequence
  Description of Artificial Sequence: Synthetic oligonucleotide
aggcuggguggaaagccau

SEQ ID NO: 700845 - RNA, 19 nt, Artificial Sequence
  Description of Artificial Sequence: Synthetic oligonucleotide
gcugcgguucucugcgauc

SEQ ID NO: 700846 - RNA, 19 nt, Artificial Sequence
  Description of Artificial Sequence: Synthetic oligonucleotide
caauauugagggccaccau

SEQ ID NO: 700847 - RNA, 19 nt, Artificial Sequence
  Description of Artificial Sequence: Synthetic oligonucleotide
gguaggucucuggccuugc

SEQ ID NO: 700848 - RNA, 19 nt, Artificial Sequence
  Description of Artificial Sequence: Synthetic oligonucleotide
ggccuaguccugcuguuua

SEQ ID NO: 700849 - RNA, 19 nt, Artificial Sequence
  Description of Artificial Sequence: Synthetic oligonucleotide
uaaccccguggagcaacau

SEQ ID NO: 700850 - RNA, 19 nt, Artificial Sequence
  Description of Artificial Sequence: Synthetic oligonucleotide
cagcuaggauggcaaggaa

SEQ ID NO: 700851 - RNA, 19 nt, Artificial Sequence
  Description of Artificial Sequence: Synthetic oligonucleotide
caggacgcacugugagcca

SEQ ID NO: 700852 - RNA, 19 nt, Artificial Sequence
  Description of Artificial Sequence: Synthetic oligonucleotide
gggucuugcagugguagcu

SEQ ID NO: 700853 - RNA, 19 nt, Artificial Sequence
  Description of Artificial Sequence: Synthetic oligonucleotide
gcaggguaagguccuugaa

SEQ ID NO: 700854 - RNA, 19 nt, Artificial Sequence
  Description of Artificial Sequence: Synthetic oligonucleotide
gcacgaguaggugcuguca

SEQ ID NO: 700855 - RNA, 19 nt, Artificial Sequence
  Description of Artificial Sequence: Synthetic oligonucleotide
guugacccgggagcacaca

SEQ ID NO: 700856 - RNA, 19 nt, Artificial Sequence
  Description of Artificial Sequence: Synthetic oligonucleotide
uugcacccugaggggcacc

SEQ ID NO: 700857 - RNA, 19 nt, Artificial Sequence
  Description of Artificial Sequence: Synthetic oligonucleotide
cuccguugucugccgggca

SEQ ID NO: 700858 - RNA, 19 nt, Artificial Sequence
  Description of Artificial Sequence: Synthetic oligonucleotide
caucuccgccggccacugc

SEQ ID NO: 700859 - RNA, 19 nt, Artificial Sequence
  Description of Artificial Sequence: Synthetic oligonucleotide
uaucuagcucagggccaua

SEQ ID NO: 700860 - RNA, 19 nt, Artificial Sequence
  Description of Artificial Sequence: Synthetic oligonucleotide
cagguuuuacuugcacccu

SEQ ID NO: 700861 - RNA, 19 nt, Artificial Sequence
  Description of Artificial Sequence: Synthetic oligonucleotide
cugcucccgggaaaugcua

SEQ ID NO: 700862 - RNA, 19 nt, Artificial Sequence
  Description of Artificial Sequence: Synthetic oligonucleotide
cugucuccguucugucgaa

SEQ ID NO: 700863 - RNA, 19 nt, Artificial Sequence
  Description of Artificial Sequence: Synthetic oligonucleotide
cccauugacccggcagcgg

SEQ ID NO: 700864 - RNA, 19 nt, Artificial Sequence
  Description of Artificial Sequence: Synthetic oligonucleotide
guguuuaauugaggcuggu

SEQ ID NO: 700865 - RNA, 19 nt, Artificial Sequence
  Description of Artificial Sequence: Synthetic oligonucleotide
gcgcucauggauggccuug

SEQ ID NO: 700866 - RNA, 19 nt, Artificial Sequence
  Description of Artificial Sequence: Synthetic oligonucleotide
gcgguucucugcgaucgac

SEQ ID NO: 700867 - RNA, 19 nt, Artificial Sequence
  Description of Artificial Sequence: Synthetic oligonucleotide
cuguuucggauggugcccu

SEQ ID NO: 700868 - RNA, 19 nt, Artificial Sequence
  Description of Artificial Sequence: Synthetic oligonucleotide
cgaucgacacacccagguc

SEQ ID NO: 700869 - RNA, 19 nt, Artificial Sequence
  Description of Artificial Sequence: Synthetic oligonucleotide
cccugcaauucaugcgcuc

SEQ ID NO: 700870 - RNA, 19 nt, Artificial Sequence
  Description of Artificial Sequence: Synthetic oligonucleotide
cucgccgggcgccagcacu

SEQ ID NO: 700871 - RNA, 19 nt, Artificial Sequence
  Description of Artificial Sequence: Synthetic oligonucleotide
gggcaggauaccucugccu

SEQ ID NO: 700872 - RNA, 19 nt, Artificial Sequence
  Description of Artificial Sequence: Synthetic oligonucleotide
gcuacacaugugggucuug

SEQ ID NO: 700873 - RNA, 19 nt, Artificial Sequence
  Description of Artificial Sequence: Synthetic oligonucleotide
ggcgcugucuccguucugu

SEQ ID NO: 700874 - RNA, 19 nt, Artificial Sequence
  Description of Artificial Sequence: Synthetic oligonucleotide
gcgcccauccccucagaaa

SEQ ID NO: 700875 - RNA, 19 nt, Artificial Sequence
  Description of Artificial Sequence: Synthetic oligonucleotide
gcagacggugcagcggauc

SEQ ID NO: 700876 - RNA, 19 nt, Artificial Sequence
  Description of Artificial Sequence: Synthetic oligonucleotide
gcacucagcgggcucggua

SEQ ID NO: 700877 - RNA, 19 nt, Artificial Sequence
  Description of Artificial Sequence: Synthetic oligonucleotide
cuggguggaaagccauaau

SEQ ID NO: 700878 - RNA, 19 nt, Artificial Sequence
  Description of Artificial Sequence: Synthetic oligonucleotide
caguucugacagcuaggau

SEQ ID NO: 700879 - RNA, 19 nt, Artificial Sequence
  Description of Artificial Sequence: Synthetic oligonucleotide
ggcugcgcccauccccuca

SEQ ID NO: 700880 - RNA, 19 nt, Artificial Sequence
  Description of Artificial Sequence: Synthetic oligonucleotide
gugcugcgguucucugcga

SEQ ID NO: 700881 - RNA, 19 nt, Artificial Sequence
  Description of Artificial Sequence: Synthetic oligonucleotide
gcagcuugccagggcacga

SEQ ID NO: 700882 - RNA, 19 nt, Artificial Sequence
  Description of Artificial Sequence: Synthetic oligonucleotide
cagcccuagccggccucgc

SEQ ID NO: 700883 - RNA, 19 nt, Artificial Sequence
  Description of Artificial Sequence: Synthetic oligonucleotide
gugaacucguugacaucau

SEQ ID NO: 700884 - RNA, 19 nt, Artificial Sequence
  Description of Artificial Sequence: Synthetic oligonucleotide
ggagcgcucggaucucccu

SEQ ID NO: 700885 - RNA, 19 nt, Artificial Sequence
  Description of Artificial Sequence: Synthetic oligonucleotide
cgguucucugcgaucgaca

SEQ ID NO: 700886 - RNA, 19 nt, Artificial Sequence
  Description of Artificial Sequence: Synthetic oligonucleotide
cccgaagggccaagucguc

SEQ ID NO: 700887 - RNA, 19 nt, Artificial Sequence
  Description of Artificial Sequence: Synthetic oligonucleotide
ccucaucgggcugguauga

SEQ ID NO: 700888 - RNA, 19 nt, Artificial Sequence
  Description of Artificial Sequence: Synthetic oligonucleotide
ggcuagucaguaaccccgu

SEQ ID NO: 700889 - RNA, 19 nt, Artificial Sequence
  Description of Artificial Sequence: Synthetic oligonucleotide
ccuuaggucagggcugugu

SEQ ID NO: 700890 - RNA, 19 nt, Artificial Sequence
  Description of Artificial Sequence: Synthetic oligonucleotide
gggccaagucguccugaua

SEQ ID NO: 700891 - RNA, 19 nt, Artificial Sequence
  Description of Artificial Sequence: Synthetic oligonucleotide
gugagggaucuggguccuc

SEQ ID NO: 700892 - RNA, 19 nt, Artificial Sequence
  Description of Artificial Sequence: Synthetic oligonucleotide
cccgggcgaggcucagggc

SEQ ID NO: 700893 - RNA, 19 nt, Artificial Sequence
  Description of Artificial Sequence: Synthetic oligonucleotide
ccaggcgugcucgcucuuc

SEQ ID NO: 700894 - RNA, 19 nt, Artificial Sequence
  Description of Artificial Sequence: Synthetic oligonucleotide
ccagcccaccgguggcgac

SEQ ID NO: 700895 - RNA, 19 nt, Artificial Sequence
  Description of Artificial Sequence: Synthetic oligonucleotide
ggccuuaggucagggcugu

SEQ ID NO: 700896 - RNA, 19 nt, Artificial Sequence
  Description of Artificial Sequence: Synthetic oligonucleotide
cgguauucagcaccaggcu

SEQ ID NO: 700897 - RNA, 19 nt, Artificial Sequence
  Description of Artificial Sequence: Synthetic oligonucleotide
cugcccgggcgaggcucag

SEQ ID NO: 700898 - RNA, 19 nt, Artificial Sequence
  Description of Artificial Sequence: Synthetic oligonucleotide
caccgguggcgacucuggu

SEQ ID NO: 700899 - RNA, 19 nt, Artificial Sequence
  Description of Artificial Sequence: Synthetic oligonucleotide
ggacgcacugugagccaaa

SEQ ID NO: 700900 - RNA, 19 nt, Artificial Sequence
  Description of Artificial Sequence: Synthetic oligonucleotide
ccguggcugcaggguaagg

SEQ ID NO: 700901 - RNA, 19 nt, Artificial Sequence
  Description of Artificial Sequence: Synthetic oligonucleotide
gcgggaggacagcagcgau

SEQ ID NO: 700902 - RNA, 19 nt, Artificial Sequence
  Description of Artificial Sequence: Synthetic oligonucleotide
gcgcucggaucucccucuc

SEQ ID NO: 700903 - RNA, 19 nt, Artificial Sequence
  Description of Artificial Sequence: Synthetic oligonucleotide
cagcccaccgguggcgacu

SEQ ID NO: 700904 - RNA, 19 nt, Artificial Sequence
  Description of Artificial Sequence: Synthetic oligonucleotide
gggcacgaguaggugcugu

SEQ ID NO: 700905 - RNA, 19 nt, Artificial Sequence
  Description of Artificial Sequence: Synthetic oligonucleotide
cgggcgccagcacugagua

SEQ ID NO: 700906 - RNA, 19 nt, Artificial Sequence
  Description of Artificial Sequence: Synthetic oligonucleotide
gccagcccaccgguggcga

SEQ ID NO: 700907 - RNA, 19 nt, Artificial Sequence
  Description of Artificial Sequence: Synthetic oligonucleotide
gccuuaggucagggcugug

SEQ ID NO: 700908 - RNA, 19 nt, Artificial Sequence
  Description of Artificial Sequence: Synthetic oligonucleotide
gugcugcgucuggcugccc

SEQ ID NO: 700909 - RNA, 19 nt, Artificial Sequence
  Description of Artificial Sequence: Synthetic oligonucleotide
cccagcguggacccuuggu

SEQ ID NO: 700910 - RNA, 19 nt, Artificial Sequence
  Description of Artificial Sequence: Synthetic oligonucleotide
ggcugguaugaggcaggua

SEQ ID NO: 700911 - RNA, 19 nt, Artificial Sequence
  Description of Artificial Sequence: Synthetic oligonucleotide
gggcugguaugaggcaggu

SEQ ID NO: 700912 - RNA, 19 nt, Artificial Sequence
  Description of Artificial Sequence: Synthetic oligonucleotide
cagcagcgauucagcccua

SEQ ID NO: 700913 - RNA, 19 nt, Artificial Sequence
  Description of Artificial Sequence: Synthetic oligonucleotide
ccacggccucgccgggcgc

SEQ ID NO: 700914 - RNA, 19 nt, Artificial Sequence
  Description of Artificial Sequence: Synthetic oligonucleotide
gccccggcuccuggugggc

SEQ ID NO: 700915 - RNA, 19 nt, Artificial Sequence
  Description of Artificial Sequence: Synthetic oligonucleotide
gccuugcacgacagcacau

SEQ ID NO: 700916 - RNA, 19 nt, Artificial Sequence
  Description of Artificial Sequence: Synthetic oligonucleotide
gcggguugagugagguguu

SEQ ID NO: 700917 - RNA, 19 nt, Artificial Sequence
  Description of Artificial Sequence: Synthetic oligonucleotide
gcugcaggguaagguccuu

SEQ ID NO: 700918 - RNA, 19 nt, Artificial Sequence
  Description of Artificial Sequence: Synthetic oligonucleotide
ccuagccggccucgcgcgu

SEQ ID NO: 700919 - RNA, 19 nt, Artificial Sequence
  Description of Artificial Sequence: Synthetic oligonucleotide
ccguucugucgaacaccau

SEQ ID NO: 700920 - RNA, 19 nt, Artificial Sequence
  Description of Artificial Sequence: Synthetic oligonucleotide
gcccaccgguggcgacucu

SEQ ID NO: 700921 - RNA, 19 nt, Artificial Sequence
  Description of Artificial Sequence: Synthetic oligonucleotide
cgccgggcgccagcacuga

SEQ ID NO: 700922 - RNA, 19 nt, Artificial Sequence
  Description of Artificial Sequence: Synthetic oligonucleotide
ccaggccguguggguuugu

SEQ ID NO: 700923 - RNA, 19 nt, Artificial Sequence
  Description of Artificial Sequence: Synthetic oligonucleotide
uuuucaaccuaucagaaag

SEQ ID NO: 700924 - RNA, 19 nt, Artificial Sequence
  Description of Artificial Sequence: Synthetic oligonucleotide
uccacuaggagucagauag

SEQ ID NO: 700925 - RNA, 19 nt, Artificial Sequence
  Description of Artificial Sequence: Synthetic oligonucleotide
gaaauaaucaucaugccgg

SEQ ID NO: 700926 - RNA, 19 nt, Artificial Sequence
  Description of Artificial Sequence: Synthetic oligonucleotide
auagcaaggagccaaaagg

SEQ ID NO: 700927 - RNA, 19 nt, Artificial Sequence
  Description of Artificial Sequence: Synthetic oligonucleotide
uuugcuaugaggaauaaaa

SEQ ID NO: 700928 - RNA, 19 nt, Artificial Sequence
  Description of Artificial Sequence: Synthetic oligonucleotide
gauucagcccucuagaagg

SEQ ID NO: 700929 - RNA, 19 nt, Artificial Sequence
  Description of Artificial Sequence: Synthetic oligonucleotide
ugguacuuaacaaacuagg

SEQ ID NO: 700930 - RNA, 19 nt, Artificial Sequence
  Description of Artificial Sequence: Synthetic oligonucleotide
uacuuaacaaacuaggggu

SEQ ID NO: 700931 - RNA, 19 nt, Artificial Sequence
  Description of Artificial Sequence: Synthetic oligonucleotide
aaaagaagagcccaugcga

SEQ ID NO: 700932 - RNA, 19 nt, Artificial Sequence
  Description of Artificial Sequence: Synthetic oligonucleotide
ugaguuaucccacaauaag

SEQ ID NO: 700933 - RNA, 19 nt, Artificial Sequence
  Description of Artificial Sequence: Synthetic oligonucleotide
  modified_base (3)..(3): a, c, u, g, unknown or other
ucnccuuuugcuaugagga

SEQ ID NO: 700934 - RNA, 19 nt, Artificial Sequence
  Description of Artificial Sequence: Synthetic oligonucleotide
aagacaguccuuaagagag

SEQ ID NO: 700935 - RNA, 19 nt, Artificial Sequence
  Description of Artificial Sequence: Synthetic oligonucleotide
uaagucaaaguauguaccg

SEQ ID NO: 700936 - RNA, 19 nt, Artificial Sequence
  Description of Artificial Sequence: Synthetic oligonucleotide
uuaagagaggagaugagga

SEQ ID NO: 700937 - RNA, 19 nt, Artificial Sequence
  Description of Artificial Sequence: Synthetic oligonucleotide
guacuuaacaaacuagggg

SEQ ID NO: 700938 - RNA, 19 nt, Artificial Sequence
  Description of Artificial Sequence: Synthetic oligonucleotide
aaaggauucagcccucuag

SEQ ID NO: 700939 - RNA, 19 nt, Artificial Sequence
  Description of Artificial Sequence: Synthetic oligonucleotide
gaagugguauguuagcagg

SEQ ID NO: 700940 - RNA, 19 nt, Artificial Sequence
  Description of Artificial Sequence: Synthetic oligonucleotide
aagauugacaucgucauca

SEQ ID NO: 700941 - RNA, 19 nt, Artificial Sequence
  Description of Artificial Sequence: Synthetic oligonucleotide
cuaggagucagauagcaag

SEQ ID NO: 700942 - RNA, 19 nt, Artificial Sequence
  Description of Artificial Sequence: Synthetic oligonucleotide
ucuucaauccuguagggca

SEQ ID NO: 700943 - RNA, 19 nt, Artificial Sequence
  Description of Artificial Sequence: Synthetic oligonucleotide
aagggaauaccuaagagcu

SEQ ID NO: 700944 - RNA, 19 nt, Artificial Sequence
  Description of Artificial Sequence: Synthetic oligonucleotide
augcgaguaggccacaucc

SEQ ID NO: 700945 - RNA, 19 nt, Artificial Sequence
  Description of Artificial Sequence: Synthetic oligonucleotide
agucuuuagguucuucccc

SEQ ID NO: 700946 - RNA, 19 nt, Artificial Sequence
  Description of Artificial Sequence: Synthetic oligonucleotide
uuccauguuaaauggaaag

SEQ ID NO: 700947 - RNA, 19 nt, Artificial Sequence
  Description of Artificial Sequence: Synthetic oligonucleotide
  modified_base (4)..(4): a, c, u, g, unknown or other
uucnccuuuugcuaugagg

SEQ ID NO: 700948 - RNA, 19 nt, Artificial Sequence
  Description of Artificial Sequence: Synthetic oligonucleotide
aagagcuuccacuggcacc

SEQ ID NO: 700949 - RNA, 19 nt, Artificial Sequence
  Description of Artificial Sequence: Synthetic oligonucleotide
aagguuauguguuucucca

SEQ ID NO: 700950 - RNA, 19 nt, Artificial Sequence
  Description of Artificial Sequence: Synthetic oligonucleotide
aaagcaccguucucuaugg

SEQ ID NO: 700951 - RNA, 19 nt, Artificial Sequence
  Description of Artificial Sequence: Synthetic oligonucleotide
auuauugaggucccaugac

SEQ ID NO: 700952 - RNA, 19 nt, Artificial Sequence
  Description of Artificial Sequence: Synthetic oligonucleotide
acaauuuggaugcugagaa

SEQ ID NO: 700953 - RNA, 19 nt, Artificial Sequence
  Description of Artificial Sequence: Synthetic oligonucleotide
agucagauagcaaggagcc

SEQ ID NO: 700954 - RNA, 19 nt, Artificial Sequence
  Description of Artificial Sequence: Synthetic oligonucleotide
uucacuuaagucaggcucc

SEQ ID NO: 700955 - RNA, 19 nt, Artificial Sequence
  Description of Artificial Sequence: Synthetic oligonucleotide
ugaguagugucucaauggc

SEQ ID NO: 700956 - RNA, 19 nt, Artificial Sequence
  Description of Artificial Sequence: Synthetic oligonucleotide
cuugucacaagguaguuuc

SEQ ID NO: 700957 - RNA, 19 nt, Artificial Sequence
  Description of Artificial Sequence: Synthetic oligonucleotide
ugugaguagugucucaaug

SEQ ID NO: 700958 - RNA, 19 nt, Artificial Sequence
  Description of Artificial Sequence: Synthetic oligonucleotide
aguaaggggaguauuauag

SEQ ID NO: 700959 - RNA, 19 nt, Artificial Sequence
  Description of Artificial Sequence: Synthetic oligonucleotide
ugguuauugcaacagacaa

SEQ ID NO: 700960 - RNA, 19 nt, Artificial Sequence
  Description of Artificial Sequence: Synthetic oligonucleotide
gagccaaaaggauucagcc

SEQ ID NO: 700961 - RNA, 19 nt, Artificial Sequence
  Description of Artificial Sequence: Synthetic oligonucleotide
uuauugaggucccaugaca

SEQ ID NO: 700962 - RNA, 19 nt, Artificial Sequence
  Description of Artificial Sequence: Synthetic oligonucleotide
gugaguagugucucaaugg

SEQ ID NO: 700963 - RNA, 19 nt, Artificial Sequence
  Description of Artificial Sequence: Synthetic oligonucleotide
uuuaccugccuacuagugc

SEQ ID NO: 700964 - RNA, 19 nt, Artificial Sequence
  Description of Artificial Sequence: Synthetic oligonucleotide
uaggagucagauagcaagg

SEQ ID NO: 700965 - RNA, 19 nt, Artificial Sequence
  Description of Artificial Sequence: Synthetic oligonucleotide
aucccggugucucucaugc

SEQ ID NO: 700966 - RNA, 19 nt, Artificial Sequence
  Description of Artificial Sequence: Synthetic oligonucleotide
ugaaucucggcugccaugg

SEQ ID NO: 700967 - RNA, 19 nt, Artificial Sequence
  Description of Artificial Sequence: Synthetic oligonucleotide
aauucagucucuccccucu

SEQ ID NO: 700968 - RNA, 19 nt, Artificial Sequence
  Description of Artificial Sequence: Synthetic oligonucleotide
accuaucacaauuuggaug

SEQ ID NO: 700969 - RNA, 19 nt, Artificial Sequence
  Description of Artificial Sequence: Synthetic oligonucleotide
ucuguuacgcuucauuauc

SEQ ID NO: 700970 - RNA, 19 nt, Artificial Sequence
  Description of Artificial Sequence: Synthetic oligonucleotide
agaagugguauguuagcag

SEQ ID NO: 700971 - RNA, 19 nt, Artificial Sequence
  Description of Artificial Sequence: Synthetic oligonucleotide
auaaacugucaauauguga

SEQ ID NO: 700972 - RNA, 19 nt, Artificial Sequence
  Description of Artificial Sequence: Synthetic oligonucleotide
gacuuuaccugccuacuag

SEQ ID NO: 700973 - RNA, 19 nt, Artificial Sequence
  Description of Artificial Sequence: Synthetic oligonucleotide
gggaguauuauaguaaagg

SEQ ID NO: 700974 - RNA, 19 nt, Artificial Sequence
  Description of Artificial Sequence: Synthetic oligonucleotide
ucgucaucaaguuuauuac

SEQ ID NO: 700975 - RNA, 19 nt, Artificial Sequence
  Description of Artificial Sequence: Synthetic oligonucleotide
agucaaaguauguaccgug

SEQ ID NO: 700976 - RNA, 19 nt, Artificial Sequence
  Description of Artificial Sequence: Synthetic oligonucleotide
agcaaauggugguaacugg

SEQ ID NO: 700977 - RNA, 19 nt, Artificial Sequence
  Description of Artificial Sequence: Synthetic oligonucleotide
accuaucagaaagacaaac

SEQ ID NO: 700978 - RNA, 19 nt, Artificial Sequence
  Description of Artificial Sequence: Synthetic oligonucleotide
uccuuaagagaggagauga

SEQ ID NO: 700979 - RNA, 19 nt, Artificial Sequence
  Description of Artificial Sequence: Synthetic oligonucleotide
uguuccaaaggcaguaccu

SEQ ID NO: 700980 - RNA, 19 nt, Artificial Sequence
  Description of Artificial Sequence: Synthetic oligonucleotide
ugucaauaugugagaagag

SEQ ID NO: 700981 - RNA, 19 nt, Artificial Sequence
  Description of Artificial Sequence: Synthetic oligonucleotide
uuaccugccuacuagugcu

SEQ ID NO: 700982 - RNA, 19 nt, Artificial Sequence
  Description of Artificial Sequence: Synthetic oligonucleotide
uccauguuaaauggaaagc

SEQ ID NO: 700983 - RNA, 19 nt, Artificial Sequence
  Description of Artificial Sequence: Synthetic oligonucleotide
caaccuaucacaauuugga

SEQ ID NO: 700984 - RNA, 19 nt, Artificial Sequence
  Description of Artificial Sequence: Synthetic oligonucleotide
cacccuaugguauuccagg

SEQ ID NO: 700985 - RNA, 19 nt, Artificial Sequence
  Description of Artificial Sequence: Synthetic oligonucleotide
aguugaacaaagaaguggu

SEQ ID NO: 700986 - RNA, 19 nt, Artificial Sequence
  Description of Artificial Sequence: Synthetic oligonucleotide
ucaaccuaucagaaagaca

SEQ ID NO: 700987 - RNA, 19 nt, Artificial Sequence
  Description of Artificial Sequence: Synthetic oligonucleotide
cugguacuuaacaaacuag

SEQ ID NO: 700988 - RNA, 19 nt, Artificial Sequence
  Description of Artificial Sequence: Synthetic oligonucleotide
uauugaggucccaugacau

SEQ ID NO: 700989 - RNA, 19 nt, Artificial Sequence
  Description of Artificial Sequence: Synthetic oligonucleotide
uuagguucuuccccucggg

SEQ ID NO: 700990 - RNA, 19 nt, Artificial Sequence
  Description of Artificial Sequence: Synthetic oligonucleotide
gaggguauugccuggagga

SEQ ID NO: 700991 - RNA, 19 nt, Artificial Sequence
  Description of Artificial Sequence: Synthetic oligonucleotide
uaugaggaauaaaacuaaa

SEQ ID NO: 700992 - RNA, 19 nt, Artificial Sequence
  Description of Artificial Sequence: Synthetic oligonucleotide
cuaugccucacaaaccaag

SEQ ID NO: 700993 - RNA, 19 nt, Artificial Sequence
  Description of Artificial Sequence: Synthetic oligonucleotide
ucccaugacaucccuaugu

SEQ ID NO: 700994 - RNA, 19 nt, Artificial Sequence
  Description of Artificial Sequence: Synthetic oligonucleotide
guuagcaggguucucacca

SEQ ID NO: 700995 - RNA, 19 nt, Artificial Sequence
  Description of Artificial Sequence: Synthetic oligonucleotide
ucagauagcaaggagccaa

SEQ ID NO: 700996 - RNA, 19 nt, Artificial Sequence
  Description of Artificial Sequence: Synthetic oligonucleotide
auaccuaagagcugguuau

SEQ ID NO: 700997 - RNA, 19 nt, Artificial Sequence
  Description of Artificial Sequence: Synthetic oligonucleotide
  modified_base (17)..(17): a, c, u, g, unknown or other
uuccccucgggcaaacngg

SEQ ID NO: 700998 - RNA, 19 nt, Artificial Sequence
  Description of Artificial Sequence: Synthetic oligonucleotide
aauuuucaaccuaucagaa

SEQ ID NO: 700999 - RNA, 19 nt, Artificial Sequence
  Description of Artificial Sequence: Synthetic oligonucleotide
uuucaaccuaucagaaaga

SEQ ID NO: 701000 - RNA, 19 nt, Artificial Sequence
  Description of Artificial Sequence: Synthetic oligonucleotide
ugguauguuagcaggguuc

SEQ ID NO: 701001 - RNA, 19 nt, Artificial Sequence
  Description of Artificial Sequence: Synthetic oligonucleotide
agaggguauugccuggagg

SEQ ID NO: 701002 - RNA, 19 nt, Artificial Sequence
  Description of Artificial Sequence: Synthetic oligonucleotide
acugucaauaugugagaag

SEQ ID NO: 701003 - RNA, 19 nt, Artificial Sequence
  Description of Artificial Sequence: Synthetic oligonucleotide
ucacaugccaugucuuucc

SEQ ID NO: 701004 - RNA, 19 nt, Artificial Sequence
  Description of Artificial Sequence: Synthetic oligonucleotide
uguaauccccugcacuggc

SEQ ID NO: 701005 - RNA, 19 nt, Artificial Sequence
  Description of Artificial Sequence: Synthetic oligonucleotide
gaagguaaaggaguugaac

SEQ ID NO: 701006 - RNA, 19 nt, Artificial Sequence
  Description of Artificial Sequence: Synthetic oligonucleotide
agcaccguucucuauggag

SEQ ID NO: 701007 - RNA, 19 nt, Artificial Sequence
  Description of Artificial Sequence: Synthetic oligonucleotide
gacugaaggggucuaucag

SEQ ID NO: 701008 - RNA, 19 nt, Artificial Sequence
  Description of Artificial Sequence: Synthetic oligonucleotide
uaugccucacaaaccaagu

SEQ ID NO: 701009 - RNA, 19 nt, Artificial Sequence
  Description of Artificial Sequence: Synthetic oligonucleotide
caacagacaacugagccug

SEQ ID NO: 701010 - RNA, 19 nt, Artificial Sequence
  Description of Artificial Sequence: Synthetic oligonucleotide
ugagcugaguucacuuaag

SEQ ID NO: 701011 - RNA, 19 nt, Artificial Sequence
  Description of Artificial Sequence: Synthetic oligonucleotide
caaagcaccguucucuaug

SEQ ID NO: 701012 - RNA, 19 nt, Artificial Sequence
  Description of Artificial Sequence: Synthetic oligonucleotide
cucaccauugacugcuccg

SEQ ID NO: 701013 - RNA, 19 nt, Artificial Sequence
  Description of Artificial Sequence: Synthetic oligonucleotide
gaaggggucuaucagaagu

SEQ ID NO: 701014 - RNA, 19 nt, Artificial Sequence
  Description of Artificial Sequence: Synthetic oligonucleotide
aaccuaucacaauuuggau

SEQ ID NO: 701015 - RNA, 19 nt, Artificial Sequence
  Description of Artificial Sequence: Synthetic oligonucleotide
aagugguauguuagcaggg

SEQ ID NO: 701016 - RNA, 19 nt, Artificial Sequence
  Description of Artificial Sequence: Synthetic oligonucleotide
  modified_base (4)..(4): a, c, u, g, unknown or other
aacnggaggugugggauug

SEQ ID NO: 701017 - RNA, 19 nt, Artificial Sequence
  Description of Artificial Sequence: Synthetic oligonucleotide
acuuaacaaacuagggguc

SEQ ID NO: 701018 - RNA, 19 nt, Artificial Sequence
  Description of Artificial Sequence: Synthetic oligonucleotide
uagaaggccagggaaauaa

SEQ ID NO: 701019 - RNA, 19 nt, Artificial Sequence
  Description of Artificial Sequence: Synthetic oligonucleotide
gucaaaguauguaccgugg

SEQ ID NO: 701020 - RNA, 19 nt, Artificial Sequence
  Description of Artificial Sequence: Synthetic oligonucleotide
gauuccauguuaaauggaa

SEQ ID NO: 701021 - RNA, 19 nt, Artificial Sequence
  Description of Artificial Sequence: Synthetic oligonucleotide
uaucagaaguguucuggga

SEQ ID NO: 701022 - RNA, 19 nt, Artificial Sequence
  Description of Artificial Sequence: Synthetic oligonucleotide
uucaaccuaucagaaagac

SEQ ID NO: 701023 - RNA, 19 nt, Artificial Sequence
  Description of Artificial Sequence: Synthetic oligonucleotide
uguaccguggggauugcaa

SEQ ID NO: 701024 - RNA, 19 nt, Artificial Sequence
  Description of Artificial Sequence: Synthetic oligonucleotide
aaaggggccaggaagguaa

SEQ ID NO: 701025 - RNA, 19 nt, Artificial Sequence
  Description of Artificial Sequence: Synthetic oligonucleotide
aaguauguaccguggggau

SEQ ID NO: 701026 - RNA, 19 nt, Artificial Sequence
  Description of Artificial Sequence: Synthetic oligonucleotide
caucccuauguuccaaagg

SEQ ID NO: 701027 - RNA, 19 nt, Artificial Sequence
  Description of Artificial Sequence: Synthetic oligonucleotide
uacuagugcugaguuaucc

SEQ ID NO: 701028 - RNA, 19 nt, Artificial Sequence
  Description of Artificial Sequence: Synthetic oligonucleotide
aaccaagucucaucucaca

SEQ ID NO: 701029 - RNA, 19 nt, Artificial Sequence
  Description of Artificial Sequence: Synthetic oligonucleotide
ucauuggcgacucgagacu

SEQ ID NO: 701030 - RNA, 19 nt, Artificial Sequence
  Description of Artificial Sequence: Synthetic oligonucleotide
uccagugacccuaugccuc

SEQ ID NO: 701031 - RNA, 19 nt, Artificial Sequence
  Description of Artificial Sequence: Synthetic oligonucleotide
gucccguucuccuaucccg

SEQ ID NO: 701032 - RNA, 19 nt, Artificial Sequence
  Description of Artificial Sequence: Synthetic oligonucleotide
ugaguucacuuaagucagg

SEQ ID NO: 701033 - RNA, 19 nt, Artificial Sequence
  Description of Artificial Sequence: Synthetic oligonucleotide
aagucaaaguauguaccgu

SEQ ID NO: 701034 - RNA, 19 nt, Artificial Sequence
  Description of Artificial Sequence: Synthetic oligonucleotide
cauuauugaggucccauga

SEQ ID NO: 701035 - RNA, 19 nt, Artificial Sequence
  Description of Artificial Sequence: Synthetic oligonucleotide
caagcccaagcuuacauca

SEQ ID NO: 701036 - RNA, 19 nt, Artificial Sequence
  Description of Artificial Sequence: Synthetic oligonucleotide
agcaaccuaucacaauuug

SEQ ID NO: 701037 - RNA, 19 nt, Artificial Sequence
  Description of Artificial Sequence: Synthetic oligonucleotide
aaguaaggggaguauuaua

SEQ ID NO: 701038 - RNA, 19 nt, Artificial Sequence
  Description of Artificial Sequence: Synthetic oligonucleotide
cuuuaccugccuacuagug

SEQ ID NO: 701039 - RNA, 19 nt, Artificial Sequence
  Description of Artificial Sequence: Synthetic oligonucleotide
ucccacaauaagucaaagu

SEQ ID NO: 701040 - RNA, 19 nt, Artificial Sequence
  Description of Artificial Sequence: Synthetic oligonucleotide
guauguaccguggggauug

SEQ ID NO: 701041 - RNA, 19 nt, Artificial Sequence
  Description of Artificial Sequence: Synthetic oligonucleotide
aacaucacccuaugguauu

SEQ ID NO: 701042 - RNA, 19 nt, Artificial Sequence
  Description of Artificial Sequence: Synthetic oligonucleotide
acaccguaugacuuggccu

SEQ ID NO: 701043 - RNA, 19 nt, Artificial Sequence
  Description of Artificial Sequence: Synthetic oligonucleotide
agcagcaaauggugguaac

SEQ ID NO: 701044 - RNA, 19 nt, Artificial Sequence
  Description of Artificial Sequence: Synthetic oligonucleotide
gaguucacuuaagucaggc

SEQ ID NO: 701045 - RNA, 19 nt, Artificial Sequence
  Description of Artificial Sequence: Synthetic oligonucleotide
aguagugucucaauggcau

SEQ ID NO: 701046 - RNA, 19 nt, Artificial Sequence
  Description of Artificial Sequence: Synthetic oligonucleotide
acaucccuauguuccaaag

SEQ ID NO: 701047 - RNA, 19 nt, Artificial Sequence
  Description of Artificial Sequence: Synthetic oligonucleotide
caacugagccugaagcagc

SEQ ID NO: 701048 - RNA, 19 nt, Artificial Sequence
  Description of Artificial Sequence: Synthetic oligonucleotide
aagcaagucucggugccuc

SEQ ID NO: 701049 - RNA, 19 nt, Artificial Sequence
  Description of Artificial Sequence: Synthetic oligonucleotide
acuuuaccugccuacuagu

SEQ ID NO: 701050 - RNA, 19 nt, Artificial Sequence
  Description of Artificial Sequence: Synthetic oligonucleotide
aggggaguauuauaguaaa

SEQ ID NO: 701051 - RNA, 19 nt, Artificial Sequence
  Description of Artificial Sequence: Synthetic oligonucleotide
caccguaugacuuggccuc

SEQ ID NO: 701052 - RNA, 19 nt, Artificial Sequence
  Description of Artificial Sequence: Synthetic oligonucleotide
aaacucagguuuccucaga

SEQ ID NO: 701053 - RNA, 19 nt, Artificial Sequence
  Description of Artificial Sequence: Synthetic oligonucleotide
uuauugcaacagacaacug

SEQ ID NO: 701054 - RNA, 19 nt, Artificial Sequence
  Description of Artificial Sequence: Synthetic oligonucleotide
  modified_base (5)..(5): a, c, u, g, unknown or other
uuucnccuuuugcuaugag

SEQ ID NO: 701055 - RNA, 19 nt, Artificial Sequence
  Description of Artificial Sequence: Synthetic oligonucleotide
ugauaacugcaauggcugu

SEQ ID NO: 701056 - RNA, 19 nt, Artificial Sequence
  Description of Artificial Sequence: Synthetic oligonucleotide
uuugcuuccgaggggcaag

SEQ ID NO: 701057 - RNA, 19 nt, Artificial Sequence
  Description of Artificial Sequence: Synthetic oligonucleotide
guaccguggggauugcaag

SEQ ID NO: 701058 - RNA, 19 nt, Artificial Sequence
  Description of Artificial Sequence: Synthetic oligonucleotide
uagguucuuccccucgggc

SEQ ID NO: 701059 - RNA, 19 nt, Artificial Sequence
  Description of Artificial Sequence: Synthetic oligonucleotide
  modified_base (16)..(16): a, c, u, g, unknown or other
uccccucgggcaaacngga

SEQ ID NO: 701060 - RNA, 19 nt, Artificial Sequence
  Description of Artificial Sequence: Synthetic oligonucleotide
uggccucuaugccaugaag

SEQ ID NO: 701061 - RNA, 19 nt, Artificial Sequence
  Description of Artificial Sequence: Synthetic oligonucleotide
uagggguccucauuauuga

SEQ ID NO: 701062 - RNA, 19 nt, Artificial Sequence
  Description of Artificial Sequence: Synthetic oligonucleotide
uguuacgcuucauuaucuc

SEQ ID NO: 701063 - RNA, 19 nt, Artificial Sequence
  Description of Artificial Sequence: Synthetic oligonucleotide
cuuagaacucugagcugag

SEQ ID NO: 701064 - RNA, 19 nt, Artificial Sequence
  Description of Artificial Sequence: Synthetic oligonucleotide
gguuauguguuucuccaac

SEQ ID NO: 701065 - RNA, 19 nt, Artificial Sequence
  Description of Artificial Sequence: Synthetic oligonucleotide
caauaugugagaagagaaa

SEQ ID NO: 701066 - RNA, 19 nt, Artificial Sequence
  Description of Artificial Sequence: Synthetic oligonucleotide
aaauucagcuucacucacu

SEQ ID NO: 701067 - RNA, 19 nt, Artificial Sequence
  Description of Artificial Sequence: Synthetic oligonucleotide
ugaggucccaugacauccc

SEQ ID NO: 701068 - RNA, 19 nt, Artificial Sequence
  Description of Artificial Sequence: Synthetic oligonucleotide
ucuagaaggccagggaaau

SEQ ID NO: 701069 - RNA, 19 nt, Artificial Sequence
  Description of Artificial Sequence: Synthetic oligonucleotide
ggauucagcccucuagaag

SEQ ID NO: 701070 - RNA, 19 nt, Artificial Sequence
  Description of Artificial Sequence: Synthetic oligonucleotide
uaccguggggauugcaagc

SEQ ID NO: 701071 - RNA, 19 nt, Artificial Sequence
  Description of Artificial Sequence: Synthetic oligonucleotide
ugcucuguuacgcuucauu

SEQ ID NO: 701072 - RNA, 19 nt, Artificial Sequence
  Description of Artificial Sequence: Synthetic oligonucleotide
ucacaagguaguuucuguu

SEQ ID NO: 701073 - RNA, 19 nt, Artificial Sequence
  Description of Artificial Sequence: Synthetic oligonucleotide
gacccggcaacgcucauca

SEQ ID NO: 701074 - RNA, 19 nt, Artificial Sequence
  Description of Artificial Sequence: Synthetic oligonucleotide
aaaaggauucagcccucua

SEQ ID NO: 701075 - RNA, 19 nt, Artificial Sequence
  Description of Artificial Sequence: Synthetic oligonucleotide
ugaaggggucuaucagaag

SEQ ID NO: 701076 - RNA, 19 nt, Artificial Sequence
  Description of Artificial Sequence: Synthetic oligonucleotide
  modified_base (6)..(6): a, c, u, g, unknown or other
uuuucnccuuuugcuauga

SEQ ID NO: 701077 - RNA, 19 nt, Artificial Sequence
  Description of Artificial Sequence: Synthetic oligonucleotide
gcaacgcucaucauuggcg

SEQ ID NO: 701078 - RNA, 19 nt, Artificial Sequence
  Description of Artificial Sequence: Synthetic oligonucleotide
cuaggggcuggacauguug

SEQ ID NO: 701079 - RNA, 19 nt, Artificial Sequence
  Description of Artificial Sequence: Synthetic oligonucleotide
agcccaugcgaguaggcca

SEQ ID NO: 701080 - RNA, 19 nt, Artificial Sequence
  Description of Artificial Sequence: Synthetic oligonucleotide
  modified_base (5)..(5): a, c, u, g, unknown or other
aaacnggaggugugggauu

SEQ ID NO: 701081 - RNA, 19 nt, Artificial Sequence
  Description of Artificial Sequence: Synthetic oligonucleotide
uacgcuucauuaucucuuc

SEQ ID NO: 701082 - RNA, 19 nt, Artificial Sequence
  Description of Artificial Sequence: Synthetic oligonucleotide
gcuaugaggaauaaaacua

SEQ ID NO: 701083 - RNA, 19 nt, Artificial Sequence
  Description of Artificial Sequence: Synthetic oligonucleotide
uccccuaccccaucaaguc

SEQ ID NO: 701084 - RNA, 19 nt, Artificial Sequence
  Description of Artificial Sequence: Synthetic oligonucleotide
cuuccgaggggcaagucca

SEQ ID NO: 701085 - RNA, 19 nt, Artificial Sequence
  Description of Artificial Sequence: Synthetic oligonucleotide
gcaaccuaucacaauuugg

SEQ ID NO: 701086 - RNA, 19 nt, Artificial Sequence
  Description of Artificial Sequence: Synthetic oligonucleotide
ggcgacucgagacuguuug

SEQ ID NO: 701087 - RNA, 19 nt, Artificial Sequence
  Description of Artificial Sequence: Synthetic oligonucleotide
cauuggucugugcagaaaa

SEQ ID NO: 701088 - RNA, 19 nt, Artificial Sequence
  Description of Artificial Sequence: Synthetic oligonucleotide
agaaggaacaucacccuau

SEQ ID NO: 701089 - RNA, 19 nt, Artificial Sequence
  Description of Artificial Sequence: Synthetic oligonucleotide
gaguuaucccacaauaagu

SEQ ID NO: 701090 - RNA, 19 nt, Artificial Sequence
  Description of Artificial Sequence: Synthetic oligonucleotide
ucuccuaucccggugucuc

SEQ ID NO: 701091 - RNA, 19 nt, Artificial Sequence
  Description of Artificial Sequence: Synthetic oligonucleotide
cccuauguuccaaaggcag

SEQ ID NO: 701092 - RNA, 19 nt, Artificial Sequence
  Description of Artificial Sequence: Synthetic oligonucleotide
cucgagacuguuugauaac

SEQ ID NO: 701093 - RNA, 19 nt, Artificial Sequence
  Description of Artificial Sequence: Synthetic oligonucleotide
guaugacuuggccucuaug

SEQ ID NO: 701094 - RNA, 19 nt, Artificial Sequence
  Description of Artificial Sequence: Synthetic oligonucleotide
gaaauugcucuguuacgcu

SEQ ID NO: 701095 - RNA, 19 nt, Artificial Sequence
  Description of Artificial Sequence: Synthetic oligonucleotide
gagacuaggggcuggacau

SEQ ID NO: 701096 - RNA, 19 nt, Artificial Sequence
  Description of Artificial Sequence: Synthetic oligonucleotide
agugguauguuagcagggu

SEQ ID NO: 701097 - RNA, 19 nt, Artificial Sequence
  Description of Artificial Sequence: Synthetic oligonucleotide
ugccuacuagugcugaguu

SEQ ID NO: 701098 - RNA, 19 nt, Artificial Sequence
  Description of Artificial Sequence: Synthetic oligonucleotide
agaugaggacccggcaacg

SEQ ID NO: 701099 - RNA, 19 nt, Artificial Sequence
  Description of Artificial Sequence: Synthetic oligonucleotide
cugaguuaucccacaauaa

SEQ ID NO: 701100 - RNA, 19 nt, Artificial Sequence
  Description of Artificial Sequence: Synthetic oligonucleotide
cucacuguagaaggcggag

SEQ ID NO: 701101 - RNA, 19 nt, Artificial Sequence
  Description of Artificial Sequence: Synthetic oligonucleotide
aucacccuaugguauucca

SEQ ID NO: 701102 - RNA, 19 nt, Artificial Sequence
  Description of Artificial Sequence: Synthetic oligonucleotide
cucgggaccugcuugguga

SEQ ID NO: 701103 - RNA, 19 nt, Artificial Sequence
  Description of Artificial Sequence: Synthetic oligonucleotide
gaaaagcaauuccauuggu

SEQ ID NO: 701104 - RNA, 19 nt, Artificial Sequence
  Description of Artificial Sequence: Synthetic oligonucleotide
cugugcugguccuuagaac

SEQ ID NO: 701105 - RNA, 19 nt, Artificial Sequence
  Description of Artificial Sequence: Synthetic oligonucleotide
acccuaugguauuccagga

SEQ ID NO: 701106 - RNA, 19 nt, Artificial Sequence
  Description of Artificial Sequence: Synthetic oligonucleotide
cuguaauccccugcacugg

SEQ ID NO: 701107 - RNA, 19 nt, Artificial Sequence
  Description of Artificial Sequence: Synthetic oligonucleotide
cugaaucucggcugccaug

SEQ ID NO: 701108 - RNA, 19 nt, Artificial Sequence
  Description of Artificial Sequence: Synthetic oligonucleotide
gcaaauggugguaacuggc

SEQ ID NO: 701109 - RNA, 19 nt, Artificial Sequence
  Description of Artificial Sequence: Synthetic oligonucleotide
caccguucucuauggagac

SEQ ID NO: 701110 - RNA, 19 nt, Artificial Sequence
  Description of Artificial Sequence: Synthetic oligonucleotide
ugacaucgucaucaaguuu

SEQ ID NO: 701111 - RNA, 19 nt, Artificial Sequence
  Description of Artificial Sequence: Synthetic oligonucleotide
gcuuacaucaaaccugaaa

SEQ ID NO: 701112 - RNA, 19 nt, Artificial Sequence
  Description of Artificial Sequence: Synthetic oligonucleotide
caugccggucuucauuaug

SEQ ID NO: 701113 - RNA, 19 nt, Artificial Sequence
  Description of Artificial Sequence: Synthetic oligonucleotide
acccacaccguaugacuug

SEQ ID NO: 701114 - RNA, 19 nt, Artificial Sequence
  Description of Artificial Sequence: Synthetic oligonucleotide
caacgcucaucauuggcga

SEQ ID NO: 701115 - RNA, 19 nt, Artificial Sequence
  Description of Artificial Sequence: Synthetic oligonucleotide
gccucuaugccaugaagac

SEQ ID NO: 701116 - RNA, 19 nt, Artificial Sequence
  Description of Artificial Sequence: Synthetic oligonucleotide
augccggucuucauuauga

SEQ ID NO: 701117 - RNA, 19 nt, Artificial Sequence
  Description of Artificial Sequence: Synthetic oligonucleotide
cauccccuaccccaucaag

SEQ ID NO: 701118 - RNA, 19 nt, Artificial Sequence
  Description of Artificial Sequence: Synthetic oligonucleotide
ucacuuaagucaggcucca

SEQ ID NO: 701119 - RNA, 19 nt, Artificial Sequence
  Description of Artificial Sequence: Synthetic oligonucleotide
uaucccggugucucucaug

SEQ ID NO: 701120 - RNA, 19 nt, Artificial Sequence
  Description of Artificial Sequence: Synthetic oligonucleotide
aagcagcaaauggugguaa

SEQ ID NO: 701121 - RNA, 19 nt, Artificial Sequence
  Description of Artificial Sequence: Synthetic oligonucleotide
uuagcaggguucucaccau

SEQ ID NO: 701122 - RNA, 19 nt, Artificial Sequence
  Description of Artificial Sequence: Synthetic oligonucleotide
gaguagugucucaauggca

SEQ ID NO: 701123 - RNA, 19 nt, Artificial Sequence
  Description of Artificial Sequence: Synthetic oligonucleotide
guccuuaagagaggagaug

SEQ ID NO: 701124 - RNA, 19 nt, Artificial Sequence
  Description of Artificial Sequence: Synthetic oligonucleotide
cucaucauuggcgacucga

SEQ ID NO: 701125 - RNA, 19 nt, Artificial Sequence
  Description of Artificial Sequence: Synthetic oligonucleotide
ccggcaacgcucaucauug

SEQ ID NO: 701126 - RNA, 19 nt, Artificial Sequence
  Description of Artificial Sequence: Synthetic oligonucleotide
ugacccuaugccucacaaa

SEQ ID NO: 701127 - RNA, 19 nt, Artificial Sequence
  Description of Artificial Sequence: Synthetic oligonucleotide
cauuggcgacucgagacug

SEQ ID NO: 701128 - RNA, 19 nt, Artificial Sequence
  Description of Artificial Sequence: Synthetic oligonucleotide
ggaguugaacaaagaagug

SEQ ID NO: 701129 - RNA, 19 nt, Artificial Sequence
  Description of Artificial Sequence: Synthetic oligonucleotide
ggcaacgcucaucauuggc

SEQ ID NO: 701130 - RNA, 19 nt, Artificial Sequence
  Description of Artificial Sequence: Synthetic oligonucleotide
cugagcugaguucacuuaa

SEQ ID NO: 701131 - RNA, 19 nt, Artificial Sequence
  Description of Artificial Sequence: Synthetic oligonucleotide
cacuaggagucagauagca

SEQ ID NO: 701132 - RNA, 19 nt, Artificial Sequence
  Description of Artificial Sequence: Synthetic oligonucleotide
guaaggggaguauuauagu

SEQ ID NO: 701133 - RNA, 19 nt, Artificial Sequence
  Description of Artificial Sequence: Synthetic oligonucleotide
aggagccaaaaggauucag

SEQ ID NO: 701134 - RNA, 19 nt, Artificial Sequence
  Description of Artificial Sequence: Synthetic oligonucleotide
agguuuccucagacaaagc

SEQ ID NO: 701135 - RNA, 19 nt, Artificial Sequence
  Description of Artificial Sequence: Synthetic oligonucleotide
  modified_base (2)..(2): a, c, u, g, unknown or other
cnggaggugugggauuggg

SEQ ID NO: 701136 - RNA, 19 nt, Artificial Sequence
  Description of Artificial Sequence: Synthetic oligonucleotide
caauucagucucuccccuc

SEQ ID NO: 701137 - RNA, 19 nt, Artificial Sequence
  Description of Artificial Sequence: Synthetic oligonucleotide
caugucuuuccacauuaua

SEQ ID NO: 701138 - RNA, 19 nt, Artificial Sequence
  Description of Artificial Sequence: Synthetic oligonucleotide
uucaauccuguagggcaga

SEQ ID NO: 701139 - RNA, 19 nt, Artificial Sequence
  Description of Artificial Sequence: Synthetic oligonucleotide
cuggaccgaugucuuuucc

SEQ ID NO: 701140 - RNA, 19 nt, Artificial Sequence
  Description of Artificial Sequence: Synthetic oligonucleotide
auccccuaccccaucaagu

SEQ ID NO: 701141 - RNA, 19 nt, Artificial Sequence
  Description of Artificial Sequence: Synthetic oligonucleotide
uucagcccucuagaaggcc

SEQ ID NO: 701142 - RNA, 19 nt, Artificial Sequence
  Description of Artificial Sequence: Synthetic oligonucleotide
uaacaaacuagggguccuc

SEQ ID NO: 701143 - RNA, 19 nt, Artificial Sequence
  Description of Artificial Sequence: Synthetic oligonucleotide
gaagcagcaaaugguggua

SEQ ID NO: 701144 - RNA, 19 nt, Artificial Sequence
  Description of Artificial Sequence: Synthetic oligonucleotide
gggcagaggguauugccug

SEQ ID NO: 701145 - RNA, 19 nt, Artificial Sequence
  Description of Artificial Sequence: Synthetic oligonucleotide
uggggauugcaagcccaag

SEQ ID NO: 701146 - RNA, 19 nt, Artificial Sequence
  Description of Artificial Sequence: Synthetic oligonucleotide
gagcugaguucacuuaagu

SEQ ID NO: 701147 - RNA, 19 nt, Artificial Sequence
  Description of Artificial Sequence: Synthetic oligonucleotide
gccggucuucauuaugaag

SEQ ID NO: 701148 - RNA, 19 nt, Artificial Sequence
  Description of Artificial Sequence: Synthetic oligonucleotide
gcgaguaggccacauccug

SEQ ID NO: 701149 - RNA, 19 nt, Artificial Sequence
  Description of Artificial Sequence: Synthetic oligonucleotide
aaccuaucagaaagacaaa

SEQ ID NO: 701150 - RNA, 19 nt, Artificial Sequence
  Description of Artificial Sequence: Synthetic oligonucleotide
caugcgaguaggccacauc

SEQ ID NO: 701151 - RNA, 19 nt, Artificial Sequence
  Description of Artificial Sequence: Synthetic oligonucleotide
ggguauugccuggaggaag

SEQ ID NO: 701152 - RNA, 19 nt, Artificial Sequence
  Description of Artificial Sequence: Synthetic oligonucleotide
gaacaucacccuaugguau

SEQ ID NO: 701153 - RNA, 19 nt, Artificial Sequence
  Description of Artificial Sequence: Synthetic oligonucleotide
ggugguuauaggguguaga

SEQ ID NO: 701154 - RNA, 19 nt, Artificial Sequence
  Description of Artificial Sequence: Synthetic oligonucleotide
gugacccuaugccucacaa

SEQ ID NO: 701155 - RNA, 19 nt, Artificial Sequence
  Description of Artificial Sequence: Synthetic oligonucleotide
ugccggucuucauuaugaa

SEQ ID NO: 701156 - RNA, 19 nt, Artificial Sequence
  Description of Artificial Sequence: Synthetic oligonucleotide
gcucuguuacgcuucauua

SEQ ID NO: 701157 - RNA, 19 nt, Artificial Sequence
  Description of Artificial Sequence: Synthetic oligonucleotide
uggcacccacaccguauga

SEQ ID NO: 701158 - RNA, 19 nt, Artificial Sequence
  Description of Artificial Sequence: Synthetic oligonucleotide
uuccgaggggcaaguccac

SEQ ID NO: 701159 - RNA, 19 nt, Artificial Sequence
  Description of Artificial Sequence: Synthetic oligonucleotide
cuguuacgcuucauuaucu

SEQ ID NO: 701160 - RNA, 19 nt, Artificial Sequence
  Description of Artificial Sequence: Synthetic oligonucleotide
  modified_base (3)..(3): a, c, u, g, unknown or other
acnggaggugugggauugg

SEQ ID NO: 701161 - RNA, 19 nt, Artificial Sequence
  Description of Artificial Sequence: Synthetic oligonucleotide
ggucccguucuccuauccc

SEQ ID NO: 701162 - RNA, 19 nt, Artificial Sequence
  Description of Artificial Sequence: Synthetic oligonucleotide
gguaacuggcuuggcuagg

SEQ ID NO: 701163 - RNA, 19 nt, Artificial Sequence
  Description of Artificial Sequence: Synthetic oligonucleotide
gcaaccuucuggguuuugc

SEQ ID NO: 701164 - RNA, 19 nt, Artificial Sequence
  Description of Artificial Sequence: Synthetic oligonucleotide
ggccucuaugccaugaaga

SEQ ID NO: 701165 - RNA, 19 nt, Artificial Sequence
  Description of Artificial Sequence: Synthetic oligonucleotide
ugggauugggagggcugcc

SEQ ID NO: 701166 - RNA, 19 nt, Artificial Sequence
  Description of Artificial Sequence: Synthetic oligonucleotide
ccaagcuuacaucaaaccu

SEQ ID NO: 701167 - RNA, 19 nt, Artificial Sequence
  Description of Artificial Sequence: Synthetic oligonucleotide
gcaagcccaagcuuacauc

SEQ ID NO: 701168 - RNA, 19 nt, Artificial Sequence
  Description of Artificial Sequence: Synthetic oligonucleotide
cucuguuacgcuucauuau

SEQ ID NO: 701169 - RNA, 19 nt, Artificial Sequence
  Description of Artificial Sequence: Synthetic oligonucleotide
ggaaggauuccauguuaaa

SEQ ID NO: 701170 - RNA, 19 nt, Artificial Sequence
  Description of Artificial Sequence: Synthetic oligonucleotide
  modified_base (2)..(2): a, c, u, g, unknown or other
cnccuuuugcuaugaggaa

SEQ ID NO: 701171 - RNA, 19 nt, Artificial Sequence
  Description of Artificial Sequence: Synthetic oligonucleotide
uauguaccguggggauugc

SEQ ID NO: 701172 - RNA, 19 nt, Artificial Sequence
  Description of Artificial Sequence: Synthetic oligonucleotide
  modified_base (6)..(6): a, c, u, g, unknown or other
caaacnggaggugugggau

SEQ ID NO: 701173 - RNA, 19 nt, Artificial Sequence
  Description of Artificial Sequence: Synthetic oligonucleotide
cagauagcaaggagccaaa

SEQ ID NO: 701174 - RNA, 19 nt, Artificial Sequence
  Description of Artificial Sequence: Synthetic oligonucleotide
ccaugacaucccuauguuc

SEQ ID NO: 701175 - RNA, 19 nt, Artificial Sequence
  Description of Artificial Sequence: Synthetic oligonucleotide
ccuaugguauuccaggacu

SEQ ID NO: 701176 - RNA, 19 nt, Artificial Sequence
  Description of Artificial Sequence: Synthetic oligonucleotide
ccaaguaaggggaguauua

SEQ ID NO: 701177 - RNA, 19 nt, Artificial Sequence
  Description of Artificial Sequence: Synthetic oligonucleotide
cgaugucuuuuccuggaag

SEQ ID NO: 701178 - RNA, 19 nt, Artificial Sequence
  Description of Artificial Sequence: Synthetic oligonucleotide
gguauguuagcaggguucu

SEQ ID NO: 701179 - RNA, 19 nt, Artificial Sequence
  Description of Artificial Sequence: Synthetic oligonucleotide
aucucacaugccaugucuu

SEQ ID NO: 701180 - RNA, 19 nt, Artificial Sequence
  Description of Artificial Sequence: Synthetic oligonucleotide
gggccugaaucucggcugc

SEQ ID NO: 701181 - RNA, 19 nt, Artificial Sequence
  Description of Artificial Sequence: Synthetic oligonucleotide
auggagacuaggggcugga

SEQ ID NO: 701182 - RNA, 19 nt, Artificial Sequence
  Description of Artificial Sequence: Synthetic oligonucleotide
uccgaggggcaaguccacu

SEQ ID NO: 701183 - RNA, 19 nt, Artificial Sequence
  Description of Artificial Sequence: Synthetic oligonucleotide
ggauccaauucagucucuc

SEQ ID NO: 701184 - RNA, 19 nt, Artificial Sequence
  Description of Artificial Sequence: Synthetic oligonucleotide
cuccagugacccuaugccu

SEQ ID NO: 701185 - RNA, 19 nt, Artificial Sequence
  Description of Artificial Sequence: Synthetic oligonucleotide
gucagauagcaaggagcca

SEQ ID NO: 701186 - RNA, 19 nt, Artificial Sequence
  Description of Artificial Sequence: Synthetic oligonucleotide
  modified_base (19)..(19): a, c, u, g, unknown or other
ucuuccccucgggcaaacn

SEQ ID NO: 701187 - RNA, 19 nt, Artificial Sequence
  Description of Artificial Sequence: Synthetic oligonucleotide
cucauuauugaggucccau

SEQ ID NO: 701188 - RNA, 19 nt, Artificial Sequence
  Description of Artificial Sequence: Synthetic oligonucleotide
caaacuagggguccucauu

SEQ ID NO: 701189 - RNA, 19 nt, Artificial Sequence
  Description of Artificial Sequence: Synthetic oligonucleotide
guaacuggcuuggcuaggu

SEQ ID NO: 701190 - RNA, 19 nt, Artificial Sequence
  Description of Artificial Sequence: Synthetic oligonucleotide
gcccaagcuuacaucaaac

SEQ ID NO: 701191 - RNA, 19 nt, Artificial Sequence
  Description of Artificial Sequence: Synthetic oligonucleotide
accguaugacuuggccucu

SEQ ID NO: 701192 - RNA, 19 nt, Artificial Sequence
  Description of Artificial Sequence: Synthetic oligonucleotide
uggcgacucgagacuguuu

SEQ ID NO: 701193 - RNA, 19 nt, Artificial Sequence
  Description of Artificial Sequence: Synthetic oligonucleotide
ccaaaaggauucagcccuc

SEQ ID NO: 701194 - RNA, 19 nt, Artificial Sequence
  Description of Artificial Sequence: Synthetic oligonucleotide
gguauugccuggaggaagu

SEQ ID NO: 701195 - RNA, 19 nt, Artificial Sequence
  Description of Artificial Sequence: Synthetic oligonucleotide
guauguuagcaggguucuc

SEQ ID NO: 701196 - RNA, 19 nt, Artificial Sequence
  Description of Artificial Sequence: Synthetic oligonucleotide
auccuguagggcagagggu

SEQ ID NO: 701197 - RNA, 19 nt, Artificial Sequence
  Description of Artificial Sequence: Synthetic oligonucleotide
gaagcaagucucggugccu

SEQ ID NO: 701198 - RNA, 19 nt, Artificial Sequence
  Description of Artificial Sequence: Synthetic oligonucleotide
ccuacuagugcugaguuau

SEQ ID NO: 701199 - RNA, 19 nt, Artificial Sequence
  Description of Artificial Sequence: Synthetic oligonucleotide
uucuuccccucgggcaaac

SEQ ID NO: 701200 - RNA, 19 nt, Artificial Sequence
  Description of Artificial Sequence: Synthetic oligonucleotide
gugguauguuagcaggguu

SEQ ID NO: 701201 - RNA, 19 nt, Artificial Sequence
  Description of Artificial Sequence: Synthetic oligonucleotide
aagcaaccuucuggguuuu

SEQ ID NO: 701202 - RNA, 19 nt, Artificial Sequence
  Description of Artificial Sequence: Synthetic oligonucleotide
ccugccuacuagugcugag

SEQ ID NO: 701203 - RNA, 19 nt, Artificial Sequence
  Description of Artificial Sequence: Synthetic oligonucleotide
ggauugggagggcugccaa

SEQ ID NO: 701204 - RNA, 19 nt, Artificial Sequence
  Description of Artificial Sequence: Synthetic oligonucleotide
cugugacuuuaccugccua

SEQ ID NO: 701205 - RNA, 19 nt, Artificial Sequence
  Description of Artificial Sequence: Synthetic oligonucleotide
gaggucccaugacaucccu

SEQ ID NO: 701206 - RNA, 19 nt, Artificial Sequence
  Description of Artificial Sequence: Synthetic oligonucleotide
ggcuagguuuccaggagaa

SEQ ID NO: 701207 - RNA, 19 nt, Artificial Sequence
  Description of Artificial Sequence: Synthetic oligonucleotide
gagcaaccuaucacaauuu

SEQ ID NO: 701208 - RNA, 19 nt, Artificial Sequence
  Description of Artificial Sequence: Synthetic oligonucleotide
auguaccguggggauugca

SEQ ID NO: 701209 - RNA, 19 nt, Artificial Sequence
  Description of Artificial Sequence: Synthetic oligonucleotide
gcacccacaccguaugacu

SEQ ID NO: 701210 - RNA, 19 nt, Artificial Sequence
  Description of Artificial Sequence: Synthetic oligonucleotide
ugccggucccguucuccua

SEQ ID NO: 701211 - RNA, 19 nt, Artificial Sequence
  Description of Artificial Sequence: Synthetic oligonucleotide
agcaaccuucuggguuuug

SEQ ID NO: 701212 - RNA, 19 nt, Artificial Sequence
  Description of Artificial Sequence: Synthetic oligonucleotide
gccuugaccuuugagggcu

SEQ ID NO: 701213 - RNA, 19 nt, Artificial Sequence
  Description of Artificial Sequence: Synthetic oligonucleotide
gcccaugcgaguaggccac

SEQ ID NO: 701214 - RNA, 19 nt, Artificial Sequence
  Description of Artificial Sequence: Synthetic oligonucleotide
cugugaguagugucucaau

SEQ ID NO: 701215 - RNA, 19 nt, Artificial Sequence
  Description of Artificial Sequence: Synthetic oligonucleotide
cugccuacuagugcugagu

SEQ ID NO: 701216 - RNA, 19 nt, Artificial Sequence
  Description of Artificial Sequence: Synthetic oligonucleotide
cguucucuauggagacuag

SEQ ID NO: 701217 - RNA, 19 nt, Artificial Sequence
  Description of Artificial Sequence: Synthetic oligonucleotide
gcgacucgagacuguuuga

SEQ ID NO: 701218 - RNA, 19 nt, Artificial Sequence
  Description of Artificial Sequence: Synthetic oligonucleotide
cacccacaccguaugacuu

SEQ ID NO: 701219 - RNA, 19 nt, Artificial Sequence
  Description of Artificial Sequence: Synthetic oligonucleotide
  modified_base (13)..(13): a, c, u, g, unknown or other
ccucgggcaaacnggaggu

SEQ ID NO: 701220 - RNA, 19 nt, Artificial Sequence
  Description of Artificial Sequence: Synthetic oligonucleotide
ccguggggauugcaagccc

SEQ ID NO: 701221 - RNA, 19 nt, Artificial Sequence
  Description of Artificial Sequence: Synthetic oligonucleotide
guaauccccugcacuggcu

SEQ ID NO: 701222 - RNA, 19 nt, Artificial Sequence
  Description of Artificial Sequence: Synthetic oligonucleotide
gaaggcggagggccugaau

SEQ ID NO: 701223 - RNA, 19 nt, Artificial Sequence
  Description of Artificial Sequence: Synthetic oligonucleotide
ccguucucuauggagacua

SEQ ID NO: 701224 - RNA, 19 nt, Artificial Sequence
  Description of Artificial Sequence: Synthetic oligonucleotide
cagugacccuaugccucac

SEQ ID NO: 701225 - RNA, 19 nt, Artificial Sequence
  Description of Artificial Sequence: Synthetic oligonucleotide
ccccaucaagucuuuaggu

SEQ ID NO: 701226 - RNA, 19 nt, Artificial Sequence
  Description of Artificial Sequence: Synthetic oligonucleotide
cguggggauugcaagccca

SEQ ID NO: 701227 - RNA, 19 nt, Artificial Sequence
  Description of Artificial Sequence: Synthetic oligonucleotide
agcuuacaucaaaccugaa

SEQ ID NO: 701228 - RNA, 19 nt, Artificial Sequence
  Description of Artificial Sequence: Synthetic oligonucleotide
gccuacuagugcugaguua

SEQ ID NO: 701229 - RNA, 19 nt, Artificial Sequence
  Description of Artificial Sequence: Synthetic oligonucleotide
ccaauucagucucuccccu

SEQ ID NO: 701230 - RNA, 19 nt, Artificial Sequence
  Description of Artificial Sequence: Synthetic oligonucleotide
aggucccaugacaucccua

SEQ ID NO: 701231 - RNA, 19 nt, Artificial Sequence
  Description of Artificial Sequence: Synthetic oligonucleotide
gcuagguuuccaggagaaa

SEQ ID NO: 701232 - RNA, 19 nt, Artificial Sequence
  Description of Artificial Sequence: Synthetic oligonucleotide
cuccuaucccggugucucu

SEQ ID NO: 701233 - RNA, 19 nt, Artificial Sequence
  Description of Artificial Sequence: Synthetic oligonucleotide
aggacccggcaacgcucau

SEQ ID NO: 701234 - RNA, 19 nt, Artificial Sequence
  Description of Artificial Sequence: Synthetic oligonucleotide
ggacccggcaacgcucauc

SEQ ID NO: 701235 - RNA, 19 nt, Artificial Sequence
  Description of Artificial Sequence: Synthetic oligonucleotide
cggcaacgcucaucauugg

SEQ ID NO: 701236 - RNA, 19 nt, Artificial Sequence
  Description of Artificial Sequence: Synthetic oligonucleotide
acccggcaacgcucaucau

SEQ ID NO: 701237 - RNA, 19 nt, Artificial Sequence
  Description of Artificial Sequence: Synthetic oligonucleotide
cuaucccggugucucucau

SEQ ID NO: 701238 - RNA, 19 nt, Artificial Sequence
  Description of Artificial Sequence: Synthetic oligonucleotide
cgcucaucauuggcgacuc

SEQ ID NO: 701239 - RNA, 19 nt, Artificial Sequence
  Description of Artificial Sequence: Synthetic oligonucleotide
cuaccccaucaagucuuua

SEQ ID NO: 701240 - RNA, 19 nt, Artificial Sequence
  Description of Artificial Sequence: Synthetic oligonucleotide
cguucuccuaucccggugu

SEQ ID NO: 701241 - RNA, 19 nt, Artificial Sequence
  Description of Artificial Sequence: Synthetic oligonucleotide
ggcuacucccucagugacu

SEQ ID NO: 701242 - RNA, 19 nt, Artificial Sequence
  Description of Artificial Sequence: Synthetic oligonucleotide
guauugccuggaggaaguu

SEQ ID NO: 701243 - RNA, 19 nt, Artificial Sequence
  Description of Artificial Sequence: Synthetic oligonucleotide
ccaagccaucuucaauccu

SEQ ID NO: 701244 - RNA, 19 nt, Artificial Sequence
  Description of Artificial Sequence: Synthetic oligonucleotide
gccggucccguucuccuau

SEQ ID NO: 701245 - RNA, 19 nt, Artificial Sequence
  Description of Artificial Sequence: Synthetic oligonucleotide
cccggcaacgcucaucauu

SEQ ID NO: 701246 - RNA, 19 nt, Artificial Sequence
  Description of Artificial Sequence: Synthetic oligonucleotide
ccaugucuuuccacauuau

SEQ ID NO: 701247 - RNA, 19 nt, Artificial Sequence
  Description of Artificial Sequence: Synthetic oligonucleotide
ccggucccguucuccuauc

SEQ ID NO: 701248 - RNA, 19 nt, Artificial Sequence
  Description of Artificial Sequence: Synthetic oligonucleotide
cagcuaccacugugcuggu

SEQ ID NO: 701249 - RNA, 19 nt, Artificial Sequence
  Description of Artificial Sequence: Synthetic oligonucleotide
cguaugacuuggccucuau

SEQ ID NO: 701250 - RNA, 19 nt, Artificial Sequence
  Description of Artificial Sequence: Synthetic oligonucleotide
ccuaccccaucaagucuuu

SEQ ID NO: 701251 - RNA, 19 nt, Artificial Sequence
  Description of Artificial Sequence: Synthetic oligonucleotide
ccguaugacuuggccucua

SEQ ID NO: 701252 - RNA, 19 nt, Artificial Sequence
  Description of Artificial Sequence: Synthetic oligonucleotide
cccaugcgaguaggccaca

SEQ ID NO: 701253 - RNA, 19 nt, Artificial Sequence
  Description of Artificial Sequence: Synthetic oligonucleotide
ccaugcgaguaggccacau

SEQ ID NO: 701254 - RNA, 19 nt, Artificial Sequence
  Description of Artificial Sequence: Synthetic oligonucleotide
acaugaaccacucaaaguc

SEQ ID NO: 701255 - RNA, 19 nt, Artificial Sequence
  Description of Artificial Sequence: Synthetic oligonucleotide
ucugguacuaguaacauga

SEQ ID NO: 701256 - RNA, 19 nt, Artificial Sequence
  Description of Artificial Sequence: Synthetic oligonucleotide
aacuguguagucuuagacg

SEQ ID NO: 701257 - RNA, 19 nt, Artificial Sequence
  Description of Artificial Sequence: Synthetic oligonucleotide
ucgaacauaggcuuuggcg

SEQ ID NO: 701258 - RNA, 19 nt, Artificial Sequence
  Description of Artificial Sequence: Synthetic oligonucleotide
aaucguagccgguagguuc

SEQ ID NO: 701259 - RNA, 19 nt, Artificial Sequence
  Description of Artificial Sequence: Synthetic oligonucleotide
uaaggguagacugugacag

SEQ ID NO: 701260 - RNA, 19 nt, Artificial Sequence
  Description of Artificial Sequence: Synthetic oligonucleotide
aguaacaugaaccacucaa

SEQ ID NO: 701261 - RNA, 19 nt, Artificial Sequence
  Description of Artificial Sequence: Synthetic oligonucleotide
acuagagcaacuccuguac

SEQ ID NO: 701262 - RNA, 19 nt, Artificial Sequence
  Description of Artificial Sequence: Synthetic oligonucleotide
agauagagacagcagugcc

SEQ ID NO: 701263 - RNA, 19 nt, Artificial Sequence
  Description of Artificial Sequence: Synthetic oligonucleotide
agggccagaacuuaacucg

SEQ ID NO: 701264 - RNA, 19 nt, Artificial Sequence
  Description of Artificial Sequence: Synthetic oligonucleotide
acgaauaggguauccaggg

SEQ ID NO: 701265 - RNA, 19 nt, Artificial Sequence
  Description of Artificial Sequence: Synthetic oligonucleotide
aauguggcggcccucguag

SEQ ID NO: 701266 - RNA, 19 nt, Artificial Sequence
  Description of Artificial Sequence: Synthetic oligonucleotide
aacaugaaccacucaaagu

SEQ ID NO: 701267 - RNA, 19 nt, Artificial Sequence
  Description of Artificial Sequence: Synthetic oligonucleotide
uuaaaggagggcugggcgg

SEQ ID NO: 701268 - RNA, 19 nt, Artificial Sequence
  Description of Artificial Sequence: Synthetic oligonucleotide
ugcgguaccggucaguccc

SEQ ID NO: 701269 - RNA, 19 nt, Artificial Sequence
  Description of Artificial Sequence: Synthetic oligonucleotide
agcguagggagcuccagcc

SEQ ID NO: 701270 - RNA, 19 nt, Artificial Sequence
  Description of Artificial Sequence: Synthetic oligonucleotide
aauccauucagcagcagug

SEQ ID NO: 701271 - RNA, 19 nt, Artificial Sequence
  Description of Artificial Sequence: Synthetic oligonucleotide
uguaaggguagacugugac

SEQ ID NO: 701272 - RNA, 19 nt, Artificial Sequence
  Description of Artificial Sequence: Synthetic oligonucleotide
ggagguugcagccugacgg

SEQ ID NO: 701273 - RNA, 19 nt, Artificial Sequence
  Description of Artificial Sequence: Synthetic oligonucleotide
uaucuaggcaaccggagga

SEQ ID NO: 701274 - RNA, 19 nt, Artificial Sequence
  Description of Artificial Sequence: Synthetic oligonucleotide
auagcagggaggcagucuc

SEQ ID NO: 701275 - RNA, 19 nt, Artificial Sequence
  Description of Artificial Sequence: Synthetic oligonucleotide
uagucuuagacgauggcuc

SEQ ID NO: 701276 - RNA, 19 nt, Artificial Sequence
  Description of Artificial Sequence: Synthetic oligonucleotide
agauacugaguaucugugg

SEQ ID NO: 701277 - RNA, 19 nt, Artificial Sequence
  Description of Artificial Sequence: Synthetic oligonucleotide
cucauaggcacucacguug

SEQ ID NO: 701278 - RNA, 19 nt, Artificial Sequence
  Description of Artificial Sequence: Synthetic oligonucleotide
agugguaggugcccgaguc

SEQ ID NO: 701279 - RNA, 19 nt, Artificial Sequence
  Description of Artificial Sequence: Synthetic oligonucleotide
gaauaggguauccagggca

SEQ ID NO: 701280 - RNA, 19 nt, Artificial Sequence
  Description of Artificial Sequence: Synthetic oligonucleotide
gaagccgggucccagaccc

SEQ ID NO: 701281 - RNA, 19 nt, Artificial Sequence
  Description of Artificial Sequence: Synthetic oligonucleotide
uguugcauagcagggaggc

SEQ ID NO: 701282 - RNA, 19 nt, Artificial Sequence
  Description of Artificial Sequence: Synthetic oligonucleotide
cacgacuuccuguagagug

SEQ ID NO: 701283 - RNA, 19 nt, Artificial Sequence
  Description of Artificial Sequence: Synthetic oligonucleotide
uguacccaccaacaggggc

SEQ ID NO: 701284 - RNA, 19 nt, Artificial Sequence
  Description of Artificial Sequence: Synthetic oligonucleotide
cacgaauaggguauccagg

SEQ ID NO: 701285 - RNA, 19 nt, Artificial Sequence
  Description of Artificial Sequence: Synthetic oligonucleotide
aagucuugcugggaagggc

SEQ ID NO: 701286 - RNA, 19 nt, Artificial Sequence
  Description of Artificial Sequence: Synthetic oligonucleotide
auaaauuaaaggagggcug

SEQ ID NO: 701287 - RNA, 19 nt, Artificial Sequence
  Description of Artificial Sequence: Synthetic oligonucleotide
guaucuaggcaaccggagg

SEQ ID NO: 701288 - RNA, 19 nt, Artificial Sequence
  Description of Artificial Sequence: Synthetic oligonucleotide
agcaacacggagucucccc

SEQ ID NO: 701289 - RNA, 19 nt, Artificial Sequence
  Description of Artificial Sequence: Synthetic oligonucleotide
aacuaguuugaggacagga

SEQ ID NO: 701290 - RNA, 19 nt, Artificial Sequence
  Description of Artificial Sequence: Synthetic oligonucleotide
agaacuuaacucgcccucc

SEQ ID NO: 701291 - RNA, 19 nt, Artificial Sequence
  Description of Artificial Sequence: Synthetic oligonucleotide
uuagacgauggcucuuggg

SEQ ID NO: 701292 - RNA, 19 nt, Artificial Sequence
  Description of Artificial Sequence: Synthetic oligonucleotide
agcgauaggugccugcauc

SEQ ID NO: 701293 - RNA, 19 nt, Artificial Sequence
  Description of Artificial Sequence: Synthetic oligonucleotide
uccugaauccauucagcag

SEQ ID NO: 701294 - RNA, 19 nt, Artificial Sequence
  Description of Artificial Sequence: Synthetic oligonucleotide
cucacaugcacagggaggg

SEQ ID NO: 701295 - RNA, 19 nt, Artificial Sequence
  Description of Artificial Sequence: Synthetic oligonucleotide
uuuggcgaggcagcgauag

SEQ ID NO: 701296 - RNA, 19 nt, Artificial Sequence
  Description of Artificial Sequence: Synthetic oligonucleotide
uguguagucuuagacgaug

SEQ ID NO: 701297 - RNA, 19 nt, Artificial Sequence
  Description of Artificial Sequence: Synthetic oligonucleotide
aaacuggggugcuacagau

SEQ ID NO: 701298 - RNA, 19 nt, Artificial Sequence
  Description of Artificial Sequence: Synthetic oligonucleotide
aaacaccuauuuuauuaaa

SEQ ID NO: 701299 - RNA, 19 nt, Artificial Sequence
  Description of Artificial Sequence: Synthetic oligonucleotide
auacugaguaucuguggag

SEQ ID NO: 701300 - RNA, 19 nt, Artificial Sequence
  Description of Artificial Sequence: Synthetic oligonucleotide
uagacugugacagguccgg

SEQ ID NO: 701301 - RNA, 19 nt, Artificial Sequence
  Description of Artificial Sequence: Synthetic oligonucleotide
ugguaccagcuauaguccg

SEQ ID NO: 701302 - RNA, 19 nt, Artificial Sequence
  Description of Artificial Sequence: Synthetic oligonucleotide
acuuaacucgcccuccucu

SEQ ID NO: 701303 - RNA, 19 nt, Artificial Sequence
  Description of Artificial Sequence: Synthetic oligonucleotide
uuccacucuaggcagggac

SEQ ID NO: 701304 - RNA, 19 nt, Artificial Sequence
  Description of Artificial Sequence: Synthetic oligonucleotide
uccaaucguagccgguagg

SEQ ID NO: 701305 - RNA, 19 nt, Artificial Sequence
  Description of Artificial Sequence: Synthetic oligonucleotide
cuacagaucaccgcuuccg

SEQ ID NO: 701306 - RNA, 19 nt, Artificial Sequence
  Description of Artificial Sequence: Synthetic oligonucleotide
aggugaucguagcaaggac

SEQ ID NO: 701307 - RNA, 19 nt, Artificial Sequence
  Description of Artificial Sequence: Synthetic oligonucleotide
gaucguagcaaggacgcug

SEQ ID NO: 701308 - RNA, 19 nt, Artificial Sequence
  Description of Artificial Sequence: Synthetic oligonucleotide
ugaaccacucaaagucuug

SEQ ID NO: 701309 - RNA, 19 nt, Artificial Sequence
  Description of Artificial Sequence: Synthetic oligonucleotide
cugguaccagcuauagucc

SEQ ID NO: 701310 - RNA, 19 nt, Artificial Sequence
  Description of Artificial Sequence: Synthetic oligonucleotide
gaggguaucuaggcaaccg

SEQ ID NO: 701311 - RNA, 19 nt, Artificial Sequence
  Description of Artificial Sequence: Synthetic oligonucleotide
uugagcaacacggagucuc

SEQ ID NO: 701312 - RNA, 19 nt, Artificial Sequence
  Description of Artificial Sequence: Synthetic oligonucleotide
guuccaaggguuccccugg

SEQ ID NO: 701313 - RNA, 19 nt, Artificial Sequence
  Description of Artificial Sequence: Synthetic oligonucleotide
aauccgaugcucaccaggu

SEQ ID NO: 701314 - RNA, 19 nt, Artificial Sequence
  Description of Artificial Sequence: Synthetic oligonucleotide
ggugaucguagcaaggacg

SEQ ID NO: 701315 - RNA, 19 nt, Artificial Sequence
  Description of Artificial Sequence: Synthetic oligonucleotide
aguuccaaggguuccccug

SEQ ID NO: 701316 - RNA, 19 nt, Artificial Sequence
  Description of Artificial Sequence: Synthetic oligonucleotide
uccuacagcaugaguguga

SEQ ID NO: 701317 - RNA, 19 nt, Artificial Sequence
  Description of Artificial Sequence: Synthetic oligonucleotide
acacauugcauagcaguuc

SEQ ID NO: 701318 - RNA, 19 nt, Artificial Sequence
  Description of Artificial Sequence: Synthetic oligonucleotide
ugagcaacacggagucucc

SEQ ID NO: 701319 - RNA, 19 nt, Artificial Sequence
  Description of Artificial Sequence: Synthetic oligonucleotide
agaaacuggggugcuacag

SEQ ID NO: 701320 - RNA, 19 nt, Artificial Sequence
  Description of Artificial Sequence: Synthetic oligonucleotide
ugaaggcgagcaaucuuga

SEQ ID NO: 701321 - RNA, 19 nt, Artificial Sequence
  Description of Artificial Sequence: Synthetic oligonucleotide
aacacggagucuccccuca

SEQ ID NO: 701322 - RNA, 19 nt, Artificial Sequence
  Description of Artificial Sequence: Synthetic oligonucleotide
gugaucguagcaaggacgc

SEQ ID NO: 701323 - RNA, 19 nt, Artificial Sequence
  Description of Artificial Sequence: Synthetic oligonucleotide
ucugagcgcagucccacga

SEQ ID NO: 701324 - RNA, 19 nt, Artificial Sequence
  Description of Artificial Sequence: Synthetic oligonucleotide
ccagcuauaguccgcaugc

SEQ ID NO: 701325 - RNA, 19 nt, Artificial Sequence
  Description of Artificial Sequence: Synthetic oligonucleotide
gaaacuggggugcuacaga

SEQ ID NO: 701326 - RNA, 19 nt, Artificial Sequence
  Description of Artificial Sequence: Synthetic oligonucleotide
agucuuagacgauggcucu

SEQ ID NO: 701327 - RNA, 19 nt, Artificial Sequence
  Description of Artificial Sequence: Synthetic oligonucleotide
cagcaugccggccugcugg

SEQ ID NO: 701328 - RNA, 19 nt, Artificial Sequence
  Description of Artificial Sequence: Synthetic oligonucleotide
ggguguagcauucauaaaa

SEQ ID NO: 701329 - RNA, 19 nt, Artificial Sequence
  Description of Artificial Sequence: Synthetic oligonucleotide
cuagagcaacuccuguacc

SEQ ID NO: 701330 - RNA, 19 nt, Artificial Sequence
  Description of Artificial Sequence: Synthetic oligonucleotide
uuggucugagccaggcagc

SEQ ID NO: 701331 - RNA, 19 nt, Artificial Sequence
  Description of Artificial Sequence: Synthetic oligonucleotide
uguuuuggucugagccagg

SEQ ID NO: 701332 - RNA, 19 nt, Artificial Sequence
  Description of Artificial Sequence: Synthetic oligonucleotide
cugaguaucuguggagggg

SEQ ID NO: 701333 - RNA, 19 nt, Artificial Sequence
  Description of Artificial Sequence: Synthetic oligonucleotide
guguuuuggucugagccag

SEQ ID NO: 701334 - RNA, 19 nt, Artificial Sequence
  Description of Artificial Sequence: Synthetic oligonucleotide
guguagucuuagacgaugg

SEQ ID NO: 701335 - RNA, 19 nt, Artificial Sequence
  Description of Artificial Sequence: Synthetic oligonucleotide
guaccggucagucccuucc

SEQ ID NO: 701336 - RNA, 19 nt, Artificial Sequence
  Description of Artificial Sequence: Synthetic oligonucleotide
uauaugccuucauccucag

SEQ ID NO: 701337 - RNA, 19 nt, Artificial Sequence
  Description of Artificial Sequence: Synthetic oligonucleotide
aacucgcccuccucugguc

SEQ ID NO: 701338 - RNA, 19 nt, Artificial Sequence
  Description of Artificial Sequence: Synthetic oligonucleotide
gagguugcagccugacggc

SEQ ID NO: 701339 - RNA, 19 nt, Artificial Sequence
  Description of Artificial Sequence: Synthetic oligonucleotide
aucguagcaaggacgcugg

SEQ ID NO: 701340 - RNA, 19 nt, Artificial Sequence
  Description of Artificial Sequence: Synthetic oligonucleotide
cauccugacccacuccacc

SEQ ID NO: 701341 - RNA, 19 nt, Artificial Sequence
  Description of Artificial Sequence: Synthetic oligonucleotide
cagaacuuaacucgcccuc

SEQ ID NO: 701342 - RNA, 19 nt, Artificial Sequence
  Description of Artificial Sequence: Synthetic oligonucleotide
guugcccagauacugagua

SEQ ID NO: 701343 - RNA, 19 nt, Artificial Sequence
  Description of Artificial Sequence: Synthetic oligonucleotide
acgguaaagaggccccuug

SEQ ID NO: 701344 - RNA, 19 nt, Artificial Sequence
  Description of Artificial Sequence: Synthetic oligonucleotide
gaauccauucagcagcagu

SEQ ID NO: 701345 - RNA, 19 nt, Artificial Sequence
  Description of Artificial Sequence: Synthetic oligonucleotide
ugggaagggcccucauagg

SEQ ID NO: 701346 - RNA, 19 nt, Artificial Sequence
  Description of Artificial Sequence: Synthetic oligonucleotide
auacggacaggugugugug

SEQ ID NO: 701347 - RNA, 19 nt, Artificial Sequence
  Description of Artificial Sequence: Synthetic oligonucleotide
ugcuacagaucaccgcuuc

SEQ ID NO: 701348 - RNA, 19 nt, Artificial Sequence
  Description of Artificial Sequence: Synthetic oligonucleotide
ugagcgcagucccacgacu

SEQ ID NO: 701349 - RNA, 19 nt, Artificial Sequence
  Description of Artificial Sequence: Synthetic oligonucleotide
gagaacccgaggaaaggug

SEQ ID NO: 701350 - RNA, 19 nt, Artificial Sequence
  Description of Artificial Sequence: Synthetic oligonucleotide
ugcccagauacugaguauc

SEQ ID NO: 701351 - RNA, 19 nt, Artificial Sequence
  Description of Artificial Sequence: Synthetic oligonucleotide
acgacuuccuguagagugg

SEQ ID NO: 701352 - RNA, 19 nt, Artificial Sequence
  Description of Artificial Sequence: Synthetic oligonucleotide
auaugccuucauccucagg

SEQ ID NO: 701353 - RNA, 19 nt, Artificial Sequence
  Description of Artificial Sequence: Synthetic oligonucleotide
gcgaucuggacccaggaac

SEQ ID NO: 701354 - RNA, 19 nt, Artificial Sequence
  Description of Artificial Sequence: Synthetic oligonucleotide
cagagaacccgaggaaagg

SEQ ID NO: 701355 - RNA, 19 nt, Artificial Sequence
  Description of Artificial Sequence: Synthetic oligonucleotide
augcgguaccggucagucc

SEQ ID NO: 701356 - RNA, 19 nt, Artificial Sequence
  Description of Artificial Sequence: Synthetic oligonucleotide
uaacucgcccuccucuggu

SEQ ID NO: 701357 - RNA, 19 nt, Artificial Sequence
  Description of Artificial Sequence: Synthetic oligonucleotide
gacuagagcaacuccugua

SEQ ID NO: 701358 - RNA, 19 nt, Artificial Sequence
  Description of Artificial Sequence: Synthetic oligonucleotide
gaguacgcagcaugccggc

SEQ ID NO: 701359 - RNA, 19 nt, Artificial Sequence
  Description of Artificial Sequence: Synthetic oligonucleotide
gauacggacaggugugugu

SEQ ID NO: 701360 - RNA, 19 nt, Artificial Sequence
  Description of Artificial Sequence: Synthetic oligonucleotide
cacccaggcgcuuggggcg

SEQ ID NO: 701361 - RNA, 19 nt, Artificial Sequence
  Description of Artificial Sequence: Synthetic oligonucleotide
ugcgagccaugccacggcc

SEQ ID NO: 701362 - RNA, 19 nt, Artificial Sequence
  Description of Artificial Sequence: Synthetic oligonucleotide
acggccaugucugagcgca

SEQ ID NO: 701363 - RNA, 19 nt, Artificial Sequence
  Description of Artificial Sequence: Synthetic oligonucleotide
agaacccgaggaaaggugu

SEQ ID NO: 701364 - RNA, 19 nt, Artificial Sequence
  Description of Artificial Sequence: Synthetic oligonucleotide
caaacuguguagucuuaga

SEQ ID NO: 701365 - RNA, 19 nt, Artificial Sequence
  Description of Artificial Sequence: Synthetic oligonucleotide
cacaugcacagggaggggc

SEQ ID NO: 701366 - RNA, 19 nt, Artificial Sequence
  Description of Artificial Sequence: Synthetic oligonucleotide
agccuccaaucguagccgg

SEQ ID NO: 701367 - RNA, 19 nt, Artificial Sequence
  Description of Artificial Sequence: Synthetic oligonucleotide
gguaucuaggcaaccggag

SEQ ID NO: 701368 - RNA, 19 nt, Artificial Sequence
  Description of Artificial Sequence: Synthetic oligonucleotide
aguacgcagcaugccggcc

SEQ ID NO: 701369 - RNA, 19 nt, Artificial Sequence
  Description of Artificial Sequence: Synthetic oligonucleotide
ugcgaucuggacccaggaa

SEQ ID NO: 701370 - RNA, 19 nt, Artificial Sequence
  Description of Artificial Sequence: Synthetic oligonucleotide
agguugcagccugacggcc

SEQ ID NO: 701371 - RNA, 19 nt, Artificial Sequence
  Description of Artificial Sequence: Synthetic oligonucleotide
accacgcacagagauguug

SEQ ID NO: 701372 - RNA, 19 nt, Artificial Sequence
  Description of Artificial Sequence: Synthetic oligonucleotide
aucuaggcaaccggaggag

SEQ ID NO: 701373 - RNA, 19 nt, Artificial Sequence
  Description of Artificial Sequence: Synthetic oligonucleotide
cuccaaucguagccgguag

SEQ ID NO: 701374 - RNA, 19 nt, Artificial Sequence
  Description of Artificial Sequence: Synthetic oligonucleotide
gccgguagguucuggaugc

SEQ ID NO: 701375 - RNA, 19 nt, Artificial Sequence
  Description of Artificial Sequence: Synthetic oligonucleotide
uuccuacagcaugagugug

SEQ ID NO: 701376 - RNA, 19 nt, Artificial Sequence
  Description of Artificial Sequence: Synthetic oligonucleotide
guagucuuagacgauggcu

SEQ ID NO: 701377 - RNA, 19 nt, Artificial Sequence
  Description of Artificial Sequence: Synthetic oligonucleotide
aggaacuggccuuccuaca

SEQ ID NO: 701378 - RNA, 19 nt, Artificial Sequence
  Description of Artificial Sequence: Synthetic oligonucleotide
ugugacagguccggagcgc

SEQ ID NO: 701379 - RNA, 19 nt, Artificial Sequence
  Description of Artificial Sequence: Synthetic oligonucleotide
ucccucacaugcacaggga

SEQ ID NO: 701380 - RNA, 19 nt, Artificial Sequence
  Description of Artificial Sequence: Synthetic oligonucleotide
uagcaguuccaaggguucc

SEQ ID NO: 701381 - RNA, 19 nt, Artificial Sequence
  Description of Artificial Sequence: Synthetic oligonucleotide
gugacagguccggagcgcg

SEQ ID NO: 701382 - RNA, 19 nt, Artificial Sequence
  Description of Artificial Sequence: Synthetic oligonucleotide
agcaugccggccugcuggg

SEQ ID NO: 701383 - RNA, 19 nt, Artificial Sequence
  Description of Artificial Sequence: Synthetic oligonucleotide
agugccccugacacauugc

SEQ ID NO: 701384 - RNA, 19 nt, Artificial Sequence
  Description of Artificial Sequence: Synthetic oligonucleotide
ucacaugcacagggagggg

SEQ ID NO: 701385 - RNA, 19 nt, Artificial Sequence
  Description of Artificial Sequence: Synthetic oligonucleotide
caccaggucccacugucac

SEQ ID NO: 701386 - RNA, 19 nt, Artificial Sequence
  Description of Artificial Sequence: Synthetic oligonucleotide
cagcucaucuggaagaacu

SEQ ID NO: 701387 - RNA, 19 nt, Artificial Sequence
  Description of Artificial Sequence: Synthetic oligonucleotide
auguugcauagcagggagg

SEQ ID NO: 701388 - RNA, 19 nt, Artificial Sequence
  Description of Artificial Sequence: Synthetic oligonucleotide
ccaacaggggcacgaauag

SEQ ID NO: 701389 - RNA, 19 nt, Artificial Sequence
  Description of Artificial Sequence: Synthetic oligonucleotide
ccacgcacagagauguugc

SEQ ID NO: 701390 - RNA, 19 nt, Artificial Sequence
  Description of Artificial Sequence: Synthetic oligonucleotide
ugaauccauucagcagcag

SEQ ID NO: 701391 - RNA, 19 nt, Artificial Sequence
  Description of Artificial Sequence: Synthetic oligonucleotide
uauaguccgcaugcugcac

SEQ ID NO: 701392 - RNA, 19 nt, Artificial Sequence
  Description of Artificial Sequence: Synthetic oligonucleotide
guagccgguagguucugga

SEQ ID NO: 701393 - RNA, 19 nt, Artificial Sequence
  Description of Artificial Sequence: Synthetic oligonucleotide
ccgaguacgcagcaugccg

SEQ ID NO: 701394 - RNA, 19 nt, Artificial Sequence
  Description of Artificial Sequence: Synthetic oligonucleotide
uccgcagccucuucauaaa

SEQ ID NO: 701395 - RNA, 19 nt, Artificial Sequence
  Description of Artificial Sequence: Synthetic oligonucleotide
guaguugcccagauacuga

SEQ ID NO: 701396 - RNA, 19 nt, Artificial Sequence
  Description of Artificial Sequence: Synthetic oligonucleotide
ugcagugguaggugcccga

SEQ ID NO: 701397 - RNA, 19 nt, Artificial Sequence
  Description of Artificial Sequence: Synthetic oligonucleotide
acgauggcucuuggguccc

SEQ ID NO: 701398 - RNA, 19 nt, Artificial Sequence
  Description of Artificial Sequence: Synthetic oligonucleotide
cagugccccugacacauug

SEQ ID NO: 701399 - RNA, 19 nt, Artificial Sequence
  Description of Artificial Sequence: Synthetic oligonucleotide
accaacaggggcacgaaua

SEQ ID NO: 701400 - RNA, 19 nt, Artificial Sequence
  Description of Artificial Sequence: Synthetic oligonucleotide
cauagcaguuccaaggguu

SEQ ID NO: 701401 - RNA, 19 nt, Artificial Sequence
  Description of Artificial Sequence: Synthetic oligonucleotide
ugaaguagcuggggccucu

SEQ ID NO: 701402 - RNA, 19 nt, Artificial Sequence
  Description of Artificial Sequence: Synthetic oligonucleotide
caaccggaggaggagcggc

SEQ ID NO: 701403 - RNA, 19 nt, Artificial Sequence
  Description of Artificial Sequence: Synthetic oligonucleotide
aucguagccgguagguucu

SEQ ID NO: 701404 - RNA, 19 nt, Artificial Sequence
  Description of Artificial Sequence: Synthetic oligonucleotide
gagcgcuggcagcuucacg

SEQ ID NO: 701405 - RNA, 19 nt, Artificial Sequence
  Description of Artificial Sequence: Synthetic oligonucleotide
gucugagcgcagucccacg

SEQ ID NO: 701406 - RNA, 19 nt, Artificial Sequence
  Description of Artificial Sequence: Synthetic oligonucleotide
gaguggcccgccccacugg

SEQ ID NO: 701407 - RNA, 19 nt, Artificial Sequence
  Description of Artificial Sequence: Synthetic oligonucleotide
caugcacagggaggggccg

SEQ ID NO: 701408 - RNA, 19 nt, Artificial Sequence
  Description of Artificial Sequence: Synthetic oligonucleotide
gccaauccgaugcucacca

SEQ ID NO: 701409 - RNA, 19 nt, Artificial Sequence
  Description of Artificial Sequence: Synthetic oligonucleotide
acccgaggaaaggugugag

SEQ ID NO: 701410 - RNA, 19 nt, Artificial Sequence
  Description of Artificial Sequence: Synthetic oligonucleotide
acucgcccuccucuggucu

SEQ ID NO: 701411 - RNA, 19 nt, Artificial Sequence
  Description of Artificial Sequence: Synthetic oligonucleotide
caggugaucguagcaagga

SEQ ID NO: 701412 - RNA, 19 nt, Artificial Sequence
  Description of Artificial Sequence: Synthetic oligonucleotide
ggcuagucgaagccccggg

SEQ ID NO: 701413 - RNA, 19 nt, Artificial Sequence
  Description of Artificial Sequence: Synthetic oligonucleotide
gaccaaggacagagaaccc

SEQ ID NO: 701414 - RNA, 19 nt, Artificial Sequence
  Description of Artificial Sequence: Synthetic oligonucleotide
accacaccuucuucccuca

SEQ ID NO: 701415 - RNA, 19 nt, Artificial Sequence
  Description of Artificial Sequence: Synthetic oligonucleotide
ccggccacacgguaaagag

SEQ ID NO: 701416 - RNA, 19 nt, Artificial Sequence
  Description of Artificial Sequence: Synthetic oligonucleotide
cuggcgccagugacuagag

SEQ ID NO: 701417 - RNA, 19 nt, Artificial Sequence
  Description of Artificial Sequence: Synthetic oligonucleotide
ggggaggguaucuaggcaa

SEQ ID NO: 701418 - RNA, 19 nt, Artificial Sequence
  Description of Artificial Sequence: Synthetic oligonucleotide
cgaguacgcagcaugccgg

SEQ ID NO: 701419 - RNA, 19 nt, Artificial Sequence
  Description of Artificial Sequence: Synthetic oligonucleotide
ucguagcaaggacgcuggc

SEQ ID NO: 701420 - RNA, 19 nt, Artificial Sequence
  Description of Artificial Sequence: Synthetic oligonucleotide
gcuacagaucaccgcuucc

SEQ ID NO: 701421 - RNA, 19 nt, Artificial Sequence
  Description of Artificial Sequence: Synthetic oligonucleotide
uacggacaggugugugugu

SEQ ID NO: 701422 - RNA, 19 nt, Artificial Sequence
  Description of Artificial Sequence: Synthetic oligonucleotide
cucguagccagggcccagg

SEQ ID NO: 701423 - RNA, 19 nt, Artificial Sequence
  Description of Artificial Sequence: Synthetic oligonucleotide
ggcacucacguugcaagag

SEQ ID NO: 701424 - RNA, 19 nt, Artificial Sequence
  Description of Artificial Sequence: Synthetic oligonucleotide
ccuacagcaugagugugag

SEQ ID NO: 701425 - RNA, 19 nt, Artificial Sequence
  Description of Artificial Sequence: Synthetic oligonucleotide
cugagcgcagucccacgac

SEQ ID NO: 701426 - RNA, 19 nt, Artificial Sequence
  Description of Artificial Sequence: Synthetic oligonucleotide
gagcaacacggagucuccc

SEQ ID NO: 701427 - RNA, 19 nt, Artificial Sequence
  Description of Artificial Sequence: Synthetic oligonucleotide
gggagguugcagccugacg

SEQ ID NO: 701428 - RNA, 19 nt, Artificial Sequence
  Description of Artificial Sequence: Synthetic oligonucleotide
gcaggugaucguagcaagg

SEQ ID NO: 701429 - RNA, 19 nt, Artificial Sequence
  Description of Artificial Sequence: Synthetic oligonucleotide
gguaccagcuauaguccgc

SEQ ID NO: 701430 - RNA, 19 nt, Artificial Sequence
  Description of Artificial Sequence: Synthetic oligonucleotide
aggguauccagggcaugug

SEQ ID NO: 701431 - RNA, 19 nt, Artificial Sequence
  Description of Artificial Sequence: Synthetic oligonucleotide
ugaucguagcaaggacgcu

SEQ ID NO: 701432 - RNA, 19 nt, Artificial Sequence
  Description of Artificial Sequence: Synthetic oligonucleotide
uagagacagcagugccggc

SEQ ID NO: 701433 - RNA, 19 nt, Artificial Sequence
  Description of Artificial Sequence: Synthetic oligonucleotide
uggcggcuagucgaagccc

SEQ ID NO: 701434 - RNA, 19 nt, Artificial Sequence
  Description of Artificial Sequence: Synthetic oligonucleotide
caacacggagucuccccuc

SEQ ID NO: 701435 - RNA, 19 nt, Artificial Sequence
  Description of Artificial Sequence: Synthetic oligonucleotide
ggaggcagucucuccccgg

SEQ ID NO: 701436 - RNA, 19 nt, Artificial Sequence
  Description of Artificial Sequence: Synthetic oligonucleotide
ccgucaggauccugaaucc

SEQ ID NO: 701437 - RNA, 19 nt, Artificial Sequence
  Description of Artificial Sequence: Synthetic oligonucleotide
ucuccccgguacacaguac

SEQ ID NO: 701438 - RNA, 19 nt, Artificial Sequence
  Description of Artificial Sequence: Synthetic oligonucleotide
cacaugggccaggacugcc

SEQ ID NO: 701439 - RNA, 19 nt, Artificial Sequence
  Description of Artificial Sequence: Synthetic oligonucleotide
ggggcgcagugguauaugc

SEQ ID NO: 701440 - RNA, 19 nt, Artificial Sequence
  Description of Artificial Sequence: Synthetic oligonucleotide
ggcgcagugguauaugccu

SEQ ID NO: 701441 - RNA, 19 nt, Artificial Sequence
  Description of Artificial Sequence: Synthetic oligonucleotide
cugcgagccaugccacggc

SEQ ID NO: 701442 - RNA, 19 nt, Artificial Sequence
  Description of Artificial Sequence: Synthetic oligonucleotide
agguccggagcgcgcacug

SEQ ID NO: 701443 - RNA, 19 nt, Artificial Sequence
  Description of Artificial Sequence: Synthetic oligonucleotide
agcaaggacgcuggcgcca

SEQ ID NO: 701444 - RNA, 19 nt, Artificial Sequence
  Description of Artificial Sequence: Synthetic oligonucleotide
gcuggcggcuagucgaagc

SEQ ID NO: 701445 - RNA, 19 nt, Artificial Sequence
  Description of Artificial Sequence: Synthetic oligonucleotide
gcuagcuggcuggacaaug

SEQ ID NO: 701446 - RNA, 19 nt, Artificial Sequence
  Description of Artificial Sequence: Synthetic oligonucleotide
ccccugacacauugcauag

SEQ ID NO: 701447 - RNA, 19 nt, Artificial Sequence
  Description of Artificial Sequence: Synthetic oligonucleotide
aggauacggacaggugugu

SEQ ID NO: 701448 - RNA, 19 nt, Artificial Sequence
  Description of Artificial Sequence: Synthetic oligonucleotide
gacagguccggagcgcgca

SEQ ID NO: 701449 - RNA, 19 nt, Artificial Sequence
  Description of Artificial Sequence: Synthetic oligonucleotide
ggggugcuacagaucaccg

SEQ ID NO: 701450 - RNA, 19 nt, Artificial Sequence
  Description of Artificial Sequence: Synthetic oligonucleotide
gauggcucuugggucccac

SEQ ID NO: 701451 - RNA, 19 nt, Artificial Sequence
  Description of Artificial Sequence: Synthetic oligonucleotide
ugcccgccugguaccagcu

SEQ ID NO: 701452 - RNA, 19 nt, Artificial Sequence
  Description of Artificial Sequence: Synthetic oligonucleotide
cuagcuggcuggacaaugu

SEQ ID NO: 701453 - RNA, 19 nt, Artificial Sequence
  Description of Artificial Sequence: Synthetic oligonucleotide
acccaggcgcuuggggcgc

SEQ ID NO: 701454 - RNA, 19 nt, Artificial Sequence
  Description of Artificial Sequence: Synthetic oligonucleotide
acgcacagagauguugcau

SEQ ID NO: 701455 - RNA, 19 nt, Artificial Sequence
  Description of Artificial Sequence: Synthetic oligonucleotide
uggggcgcagugguauaug

SEQ ID NO: 701456 - RNA, 19 nt, Artificial Sequence
  Description of Artificial Sequence: Synthetic oligonucleotide
cacuggcgccucaggaaug

SEQ ID NO: 701457 - RNA, 19 nt, Artificial Sequence
  Description of Artificial Sequence: Synthetic oligonucleotide
cuggcccucgugcacuguc

SEQ ID NO: 701458 - RNA, 19 nt, Artificial Sequence
  Description of Artificial Sequence: Synthetic oligonucleotide
ggaugccacuuucuccaug

SEQ ID NO: 701459 - RNA, 19 nt, Artificial Sequence
  Description of Artificial Sequence: Synthetic oligonucleotide
cacgcacagagauguugca

SEQ ID NO: 701460 - RNA, 19 nt, Artificial Sequence
  Description of Artificial Sequence: Synthetic oligonucleotide
gucccacgacuuccuguag

SEQ ID NO: 701461 - RNA, 19 nt, Artificial Sequence
  Description of Artificial Sequence: Synthetic oligonucleotide
ggacagguguguguguuuc

SEQ ID NO: 701462 - RNA, 19 nt, Artificial Sequence
  Description of Artificial Sequence: Synthetic oligonucleotide
guacgcagcaugccggccu

SEQ ID NO: 701463 - RNA, 19 nt, Artificial Sequence
  Description of Artificial Sequence: Synthetic oligonucleotide
gcugcacccaggcgcuugg

SEQ ID NO: 701464 - RNA, 19 nt, Artificial Sequence
  Description of Artificial Sequence: Synthetic oligonucleotide
gcgagcaaucuugagcaac

SEQ ID NO: 701465 - RNA, 19 nt, Artificial Sequence
  Description of Artificial Sequence: Synthetic oligonucleotide
ggcagcgauaggugccugc

SEQ ID NO: 701466 - RNA, 19 nt, Artificial Sequence
  Description of Artificial Sequence: Synthetic oligonucleotide
gcacucacguugcaagaga

SEQ ID NO: 701467 - RNA, 19 nt, Artificial Sequence
  Description of Artificial Sequence: Synthetic oligonucleotide
uuggggcgcagugguauau

SEQ ID NO: 701468 - RNA, 19 nt, Artificial Sequence
  Description of Artificial Sequence: Synthetic oligonucleotide
agugccggccacacgguaa

SEQ ID NO: 701469 - RNA, 19 nt, Artificial Sequence
  Description of Artificial Sequence: Synthetic oligonucleotide
ggcgcuuggggcgcagugg

SEQ ID NO: 701470 - RNA, 19 nt, Artificial Sequence
  Description of Artificial Sequence: Synthetic oligonucleotide
ggcggcuagucgaagcccc

SEQ ID NO: 701471 - RNA, 19 nt, Artificial Sequence
  Description of Artificial Sequence: Synthetic oligonucleotide
acggacagguguguguguu

SEQ ID NO: 701472 - RNA, 19 nt, Artificial Sequence
  Description of Artificial Sequence: Synthetic oligonucleotide
cgaauaggguauccagggc

SEQ ID NO: 701473 - RNA, 19 nt, Artificial Sequence
  Description of Artificial Sequence: Synthetic oligonucleotide
ccugcgagccaugccacgg

SEQ ID NO: 701474 - RNA, 19 nt, Artificial Sequence
  Description of Artificial Sequence: Synthetic oligonucleotide
cucagcguagggagcucca

SEQ ID NO: 701475 - RNA, 19 nt, Artificial Sequence
  Description of Artificial Sequence: Synthetic oligonucleotide
ggauacggacaggugugug

SEQ ID NO: 701476 - RNA, 19 nt, Artificial Sequence
  Description of Artificial Sequence: Synthetic oligonucleotide
cgagcaaucuugagcaaca

SEQ ID NO: 701477 - RNA, 19 nt, Artificial Sequence
  Description of Artificial Sequence: Synthetic oligonucleotide
cucugcgaucuggacccag

SEQ ID NO: 701478 - RNA, 19 nt, Artificial Sequence
  Description of Artificial Sequence: Synthetic oligonucleotide
cacgaagccgggucccaga

SEQ ID NO: 701479 - RNA, 19 nt, Artificial Sequence
  Description of Artificial Sequence: Synthetic oligonucleotide
guguaaggguagacuguga

SEQ ID NO: 701480 - RNA, 19 nt, Artificial Sequence
  Description of Artificial Sequence: Synthetic oligonucleotide
gcuggcgccagugacuaga

SEQ ID NO: 701481 - RNA, 19 nt, Artificial Sequence
  Description of Artificial Sequence: Synthetic oligonucleotide
ccggucagucccuuccuug

SEQ ID NO: 701482 - RNA, 19 nt, Artificial Sequence
  Description of Artificial Sequence: Synthetic oligonucleotide
ggccaauccgaugcucacc

SEQ ID NO: 701483 - RNA, 19 nt, Artificial Sequence
  Description of Artificial Sequence: Synthetic oligonucleotide
gggaggguaucuaggcaac

SEQ ID NO: 701484 - RNA, 19 nt, Artificial Sequence
  Description of Artificial Sequence: Synthetic oligonucleotide
gacggccucggggcccugg

SEQ ID NO: 701485 - RNA, 19 nt, Artificial Sequence
  Description of Artificial Sequence: Synthetic oligonucleotide
ggaacgagcgcuggcagcu

SEQ ID NO: 701486 - RNA, 19 nt, Artificial Sequence
  Description of Artificial Sequence: Synthetic oligonucleotide
gggcgcagugguauaugcc

SEQ ID NO: 701487 - RNA, 19 nt, Artificial Sequence
  Description of Artificial Sequence: Synthetic oligonucleotide
cuacagcaugagugugaga

SEQ ID NO: 701488 - RNA, 19 nt, Artificial Sequence
  Description of Artificial Sequence: Synthetic oligonucleotide
gcuauccuuggugcugaug

SEQ ID NO: 701489 - RNA, 19 nt, Artificial Sequence
  Description of Artificial Sequence: Synthetic oligonucleotide
gcagcgauaggugccugca

SEQ ID NO: 701490 - RNA, 19 nt, Artificial Sequence
  Description of Artificial Sequence: Synthetic oligonucleotide
gcuuuggcgaggcagcgau

SEQ ID NO: 701491 - RNA, 19 nt, Artificial Sequence
  Description of Artificial Sequence: Synthetic oligonucleotide
ccucgaacauaggcuuugg

SEQ ID NO: 701492 - RNA, 19 nt, Artificial Sequence
  Description of Artificial Sequence: Synthetic oligonucleotide
caauguggcggcccucgua

SEQ ID NO: 701493 - RNA, 19 nt, Artificial Sequence
  Description of Artificial Sequence: Synthetic oligonucleotide
cugcaggagccaucuccca

SEQ ID NO: 701494 - RNA, 19 nt, Artificial Sequence
  Description of Artificial Sequence: Synthetic oligonucleotide
ucguagccgguagguucug

SEQ ID NO: 701495 - RNA, 19 nt, Artificial Sequence
  Description of Artificial Sequence: Synthetic oligonucleotide
ucgcccuccucuggucucu

SEQ ID NO: 701496 - RNA, 19 nt, Artificial Sequence
  Description of Artificial Sequence: Synthetic oligonucleotide
gcaacacggagucuccccu

SEQ ID NO: 701497 - RNA, 19 nt, Artificial Sequence
  Description of Artificial Sequence: Synthetic oligonucleotide
agcuggcggcuagucgaag

SEQ ID NO: 701498 - RNA, 19 nt, Artificial Sequence
  Description of Artificial Sequence: Synthetic oligonucleotide
ccgcagccucuucauaaag

SEQ ID NO: 701499 - RNA, 19 nt, Artificial Sequence
  Description of Artificial Sequence: Synthetic oligonucleotide
guggcccgccccacuggcg

SEQ ID NO: 701500 - RNA, 19 nt, Artificial Sequence
  Description of Artificial Sequence: Synthetic oligonucleotide
acgagcgcuggcagcuuca

SEQ ID NO: 701501 - RNA, 19 nt, Artificial Sequence
  Description of Artificial Sequence: Synthetic oligonucleotide
ccggacucccagcucugcc

SEQ ID NO: 701502 - RNA, 19 nt, Artificial Sequence
  Description of Artificial Sequence: Synthetic oligonucleotide
ucucugcgaucuggaccca

SEQ ID NO: 701503 - RNA, 19 nt, Artificial Sequence
  Description of Artificial Sequence: Synthetic oligonucleotide
gcggcccucguagccaggg

SEQ ID NO: 701504 - RNA, 19 nt, Artificial Sequence
  Description of Artificial Sequence: Synthetic oligonucleotide
gcgcgcacugcccgccugg

SEQ ID NO: 701505 - RNA, 19 nt, Artificial Sequence
  Description of Artificial Sequence: Synthetic oligonucleotide
gggcacgaauaggguaucc

SEQ ID NO: 701506 - RNA, 19 nt, Artificial Sequence
  Description of Artificial Sequence: Synthetic oligonucleotide
ggcagggacaggacaaaua

SEQ ID NO: 701507 - RNA, 19 nt, Artificial Sequence
  Description of Artificial Sequence: Synthetic oligonucleotide
aguccgcaugcugcaccca

SEQ ID NO: 701508 - RNA, 19 nt, Artificial Sequence
  Description of Artificial Sequence: Synthetic oligonucleotide
cucucagcguagggagcuc

SEQ ID NO: 701509 - RNA, 19 nt, Artificial Sequence
  Description of Artificial Sequence: Synthetic oligonucleotide
gcggcuagucgaagccccg

SEQ ID NO: 701510 - RNA, 19 nt, Artificial Sequence
  Description of Artificial Sequence: Synthetic oligonucleotide
gccgggaacgagcgcuggc

SEQ ID NO: 701511 - RNA, 19 nt, Artificial Sequence
  Description of Artificial Sequence: Synthetic oligonucleotide
cccugcgagccaugccacg

SEQ ID NO: 701512 - RNA, 19 nt, Artificial Sequence
  Description of Artificial Sequence: Synthetic oligonucleotide
cuguguagucuuagacgau

SEQ ID NO: 701513 - RNA, 19 nt, Artificial Sequence
  Description of Artificial Sequence: Synthetic oligonucleotide
ggucugagccaggcagccc

SEQ ID NO: 701514 - RNA, 19 nt, Artificial Sequence
  Description of Artificial Sequence: Synthetic oligonucleotide
agucuccccucaggcgcug

SEQ ID NO: 701515 - RNA, 19 nt, Artificial Sequence
  Description of Artificial Sequence: Synthetic oligonucleotide
ccuacaccuucugugucca

SEQ ID NO: 701516 - RNA, 19 nt, Artificial Sequence
  Description of Artificial Sequence: Synthetic oligonucleotide
cuuuggcgaggcagcgaua

SEQ ID NO: 701517 - RNA, 19 nt, Artificial Sequence
  Description of Artificial Sequence: Synthetic oligonucleotide
ccaccacgcacagagaugu

SEQ ID NO: 701518 - RNA, 19 nt, Artificial Sequence
  Description of Artificial Sequence: Synthetic oligonucleotide
acccucgaacauaggcuuu

SEQ ID NO: 701519 - RNA, 19 nt, Artificial Sequence
  Description of Artificial Sequence: Synthetic oligonucleotide
ccgcagcuuccacucuagg

SEQ ID NO: 701520 - RNA, 19 nt, Artificial Sequence
  Description of Artificial Sequence: Synthetic oligonucleotide
cgggaacgagcgcuggcag

SEQ ID NO: 701521 - RNA, 19 nt, Artificial Sequence
  Description of Artificial Sequence: Synthetic oligonucleotide
gccggccacacgguaaaga

SEQ ID NO: 701522 - RNA, 19 nt, Artificial Sequence
  Description of Artificial Sequence: Synthetic oligonucleotide
ggccgggaacgagcgcugg

SEQ ID NO: 701523 - RNA, 19 nt, Artificial Sequence
  Description of Artificial Sequence: Synthetic oligonucleotide
gguccggagcgcgcacugc

SEQ ID NO: 701524 - RNA, 19 nt, Artificial Sequence
  Description of Artificial Sequence: Synthetic oligonucleotide
gcccagauacugaguaucu

SEQ ID NO: 701525 - RNA, 19 nt, Artificial Sequence
  Description of Artificial Sequence: Synthetic oligonucleotide
caaucguagccgguagguu

SEQ ID NO: 701526 - RNA, 19 nt, Artificial Sequence
  Description of Artificial Sequence: Synthetic oligonucleotide
gcgcuuggggcgcaguggu

SEQ ID NO: 701527 - RNA, 19 nt, Artificial Sequence
  Description of Artificial Sequence: Synthetic oligonucleotide
ccgggaacgagcgcuggca

SEQ ID NO: 701528 - RNA, 19 nt, Artificial Sequence
  Description of Artificial Sequence: Synthetic oligonucleotide
ccuccaaucguagccggua

SEQ ID NO: 701529 - RNA, 19 nt, Artificial Sequence
  Description of Artificial Sequence: Synthetic oligonucleotide
cacugcccgccugguacca

SEQ ID NO: 701530 - RNA, 19 nt, Artificial Sequence
  Description of Artificial Sequence: Synthetic oligonucleotide
gccuuccuacagcaugagu

SEQ ID NO: 701531 - RNA, 19 nt, Artificial Sequence
  Description of Artificial Sequence: Synthetic oligonucleotide
cguagccgguagguucugg

SEQ ID NO: 701532 - RNA, 19 nt, Artificial Sequence
  Description of Artificial Sequence: Synthetic oligonucleotide
cagcuauaguccgcaugcu

SEQ ID NO: 701533 - RNA, 19 nt, Artificial Sequence
  Description of Artificial Sequence: Synthetic oligonucleotide
gccggacucccagcucugc

SEQ ID NO: 701534 - RNA, 19 nt, Artificial Sequence
  Description of Artificial Sequence: Synthetic oligonucleotide
ccgguagguucuggaugcc

SEQ ID NO: 701535 - RNA, 19 nt, Artificial Sequence
  Description of Artificial Sequence: Synthetic oligonucleotide
cggcuagucgaagccccgg

SEQ ID NO: 701536 - RNA, 19 nt, Artificial Sequence
  Description of Artificial Sequence: Synthetic oligonucleotide
gugcuacagaucaccgcuu

SEQ ID NO: 701537 - RNA, 19 nt, Artificial Sequence
  Description of Artificial Sequence: Synthetic oligonucleotide
ggccggacucccagcucug

SEQ ID NO: 701538 - RNA, 19 nt, Artificial Sequence
  Description of Artificial Sequence: Synthetic oligonucleotide
gagcgcgcacugcccgccu

SEQ ID NO: 701539 - RNA, 19 nt, Artificial Sequence
  Description of Artificial Sequence: Synthetic oligonucleotide
ccucugguacuaguaacau

SEQ ID NO: 701540 - RNA, 19 nt, Artificial Sequence
  Description of Artificial Sequence: Synthetic oligonucleotide
ccucauaggcacucacguu

SEQ ID NO: 701541 - RNA, 19 nt, Artificial Sequence
  Description of Artificial Sequence: Synthetic oligonucleotide
ccaggccggacucccagcu

SEQ ID NO: 701542 - RNA, 19 nt, Artificial Sequence
  Description of Artificial Sequence: Synthetic oligonucleotide
gcaauguggcggcccucgu

SEQ ID NO: 701543 - RNA, 19 nt, Artificial Sequence
  Description of Artificial Sequence: Synthetic oligonucleotide
gaacgagcgcuggcagcuu

SEQ ID NO: 701544 - RNA, 19 nt, Artificial Sequence
  Description of Artificial Sequence: Synthetic oligonucleotide
cccgccugguaccagcuau

SEQ ID NO: 701545 - RNA, 19 nt, Artificial Sequence
  Description of Artificial Sequence: Synthetic oligonucleotide
ugacggccucggggcccug

SEQ ID NO: 701546 - RNA, 19 nt, Artificial Sequence
  Description of Artificial Sequence: Synthetic oligonucleotide
cugacggccucggggcccu

SEQ ID NO: 701547 - RNA, 19 nt, Artificial Sequence
  Description of Artificial Sequence: Synthetic oligonucleotide
ccgccugguaccagcuaua

SEQ ID NO: 701548 - RNA, 19 nt, Artificial Sequence
  Description of Artificial Sequence: Synthetic oligonucleotide
ccagcccaccgaguacgca

SEQ ID NO: 701549 - RNA, 19 nt, Artificial Sequence
  Description of Artificial Sequence: Synthetic oligonucleotide
caaggacgcuggcgccagu

SEQ ID NO: 701550 - RNA, 19 nt, Artificial Sequence
  Description of Artificial Sequence: Synthetic oligonucleotide
gccuccaaucguagccggu

SEQ ID NO: 701551 - RNA, 19 nt, Artificial Sequence
  Description of Artificial Sequence: Synthetic oligonucleotide
caccacgcacagagauguu

SEQ ID NO: 701552 - RNA, 19 nt, Artificial Sequence
  Description of Artificial Sequence: Synthetic oligonucleotide
cgcagucccacgacuuccu

SEQ ID NO: 701553 - RNA, 19 nt, Artificial Sequence
  Description of Artificial Sequence: Synthetic oligonucleotide
ccacgacuuccuguagagu

SEQ ID NO: 701554 - RNA, 19 nt, Artificial Sequence
  Description of Artificial Sequence: Synthetic oligonucleotide
cgaggcccaaacacagcau

SEQ ID NO: 701555 - RNA, 19 nt, Artificial Sequence
  Description of Artificial Sequence: Synthetic oligonucleotide
cgcuggcgccagugacuag

SEQ ID NO: 701556 - RNA, 19 nt, Artificial Sequence
  Description of Artificial Sequence: Synthetic oligonucleotide
ccccaaccaccaugcggua

SEQ ID NO: 701557 - RNA, 19 nt, Artificial Sequence
  Description of Artificial Sequence: Synthetic oligonucleotide
gcccgccccacuggcgccu

SEQ ID NO: 701558 - RNA, 19 nt, Artificial Sequence
  Description of Artificial Sequence: Synthetic oligonucleotide
cgauggcucuuggguccca

SEQ ID NO: 701559 - RNA, 19 nt, Artificial Sequence
  Description of Artificial Sequence: Synthetic oligonucleotide
gcagugccccugacacauu

SEQ ID NO: 701560 - RNA, 19 nt, Artificial Sequence
  Description of Artificial Sequence: Synthetic oligonucleotide
cgcgcacugcccgccuggu

SEQ ID NO: 701561 - RNA, 19 nt, Artificial Sequence
  Description of Artificial Sequence: Synthetic oligonucleotide
guuaaauucacccaaagac

SEQ ID NO: 701562 - RNA, 19 nt, Artificial Sequence
  Description of Artificial Sequence: Synthetic oligonucleotide
gaucuuaucguucacuccg

SEQ ID NO: 701563 - RNA, 19 nt, Artificial Sequence
  Description of Artificial Sequence: Synthetic oligonucleotide
uauaaugcggguuaaauuc

SEQ ID NO: 701564 - RNA, 19 nt, Artificial Sequence
  Description of Artificial Sequence: Synthetic oligonucleotide
acagaauagccucagcucc

SEQ ID NO: 701565 - RNA, 19 nt, Artificial Sequence
  Description of Artificial Sequence: Synthetic oligonucleotide
aauuccgucaguuucuuug

SEQ ID NO: 701566 - RNA, 19 nt, Artificial Sequence
  Description of Artificial Sequence: Synthetic oligonucleotide
uggacuacuguucugauug

SEQ ID NO: 701567 - RNA, 19 nt, Artificial Sequence
  Description of Artificial Sequence: Synthetic oligonucleotide
aucguuaaagccuucacuc

SEQ ID NO: 701568 - RNA, 19 nt, Artificial Sequence
  Description of Artificial Sequence: Synthetic oligonucleotide
ucacauaccggacagagga

SEQ ID NO: 701569 - RNA, 19 nt, Artificial Sequence
  Description of Artificial Sequence: Synthetic oligonucleotide
ucuccaacuacacaguccc

SEQ ID NO: 701570 - RNA, 19 nt, Artificial Sequence
  Description of Artificial Sequence: Synthetic oligonucleotide
uacucaagcucuuaggucc

SEQ ID NO: 701571 - RNA, 19 nt, Artificial Sequence
  Description of Artificial Sequence: Synthetic oligonucleotide
uugucuuuaauuccgucag

SEQ ID NO: 701572 - RNA, 19 nt, Artificial Sequence
  Description of Artificial Sequence: Synthetic oligonucleotide
uggaauauugaccucucag

SEQ ID NO: 701573 - RNA, 19 nt, Artificial Sequence
  Description of Artificial Sequence: Synthetic oligonucleotide
aauguucggacaucagccg

SEQ ID NO: 701574 - RNA, 19 nt, Artificial Sequence
  Description of Artificial Sequence: Synthetic oligonucleotide
uggucuaucguuaaagccu

SEQ ID NO: 701575 - RNA, 19 nt, Artificial Sequence
  Description of Artificial Sequence: Synthetic oligonucleotide
uuaucguucacuccgggac

SEQ ID NO: 701576 - RNA, 19 nt, Artificial Sequence
  Description of Artificial Sequence: Synthetic oligonucleotide
augcggguuaaauucaccc

SEQ ID NO: 701577 - RNA, 19 nt, Artificial Sequence
  Description of Artificial Sequence: Synthetic oligonucleotide
caugcuaugauacaucguc

SEQ ID NO: 701578 - RNA, 19 nt, Artificial Sequence
  Description of Artificial Sequence: Synthetic oligonucleotide
caaggaagccaucagagag

SEQ ID NO: 701579 - RNA, 19 nt, Artificial Sequence
  Description of Artificial Sequence: Synthetic oligonucleotide
gaauguucggacaucagcc

SEQ ID NO: 701580 - RNA, 19 nt, Artificial Sequence
  Description of Artificial Sequence: Synthetic oligonucleotide
cucacggucacagugaacg

SEQ ID NO: 701581 - RNA, 19 nt, Artificial Sequence
  Description of Artificial Sequence: Synthetic oligonucleotide
uaugguauccagcugcugu

SEQ ID NO: 701582 - RNA, 19 nt, Artificial Sequence
  Description of Artificial Sequence: Synthetic oligonucleotide
acaacugccaccuggacgu

SEQ ID NO: 701583 - RNA, 19 nt, Artificial Sequence
  Description of Artificial Sequence: Synthetic oligonucleotide
aggaaacaugguaugaucc

SEQ ID NO: 701584 - RNA, 19 nt, Artificial Sequence
  Description of Artificial Sequence: Synthetic oligonucleotide
gaacuaacuacucaagcuc

SEQ ID NO: 701585 - RNA, 19 nt, Artificial Sequence
  Description of Artificial Sequence: Synthetic oligonucleotide
accaugcuaugauacaucg

SEQ ID NO: 701586 - RNA, 19 nt, Artificial Sequence
  Description of Artificial Sequence: Synthetic oligonucleotide
agcaagaccaguguggacg

SEQ ID NO: 701587 - RNA, 19 nt, Artificial Sequence
  Description of Artificial Sequence: Synthetic oligonucleotide
agaucuuaucguucacucc

SEQ ID NO: 701588 - RNA, 19 nt, Artificial Sequence
  Description of Artificial Sequence: Synthetic oligonucleotide
gaacuuugaacagagacca

SEQ ID NO: 701589 - RNA, 19 nt, Artificial Sequence
  Description of Artificial Sequence: Synthetic oligonucleotide
guaugauccauccuuguug

SEQ ID NO: 701590 - RNA, 19 nt, Artificial Sequence
  Description of Artificial Sequence: Synthetic oligonucleotide
ucccguacacuucauagcc

SEQ ID NO: 701591 - RNA, 19 nt, Artificial Sequence
  Description of Artificial Sequence: Synthetic oligonucleotide
uaucguuaaagccuucacu

SEQ ID NO: 701592 - RNA, 19 nt, Artificial Sequence
  Description of Artificial Sequence: Synthetic oligonucleotide
acuacucaagcucuuaggu

SEQ ID NO: 701593 - RNA, 19 nt, Artificial Sequence
  Description of Artificial Sequence: Synthetic oligonucleotide
aagaccaguguggacgacc

SEQ ID NO: 701594 - RNA, 19 nt, Artificial Sequence
  Description of Artificial Sequence: Synthetic oligonucleotide
agcuucgugacuuggguuc

SEQ ID NO: 701595 - RNA, 19 nt, Artificial Sequence
  Description of Artificial Sequence: Synthetic oligonucleotide
uugaaaagccccagacacg

SEQ ID NO: 701596 - RNA, 19 nt, Artificial Sequence
  Description of Artificial Sequence: Synthetic oligonucleotide
gauuucuaaguccgagccg

SEQ ID NO: 701597 - RNA, 19 nt, Artificial Sequence
  Description of Artificial Sequence: Synthetic oligonucleotide
uaagcagacuccucggugc

SEQ ID NO: 701598 - RNA, 19 nt, Artificial Sequence
  Description of Artificial Sequence: Synthetic oligonucleotide
  modified_base (4)..(4): a, c, u, g, unknown or other
uccnguuuuccugacaucu

SEQ ID NO: 701599 - RNA, 19 nt, Artificial Sequence
  Description of Artificial Sequence: Synthetic oligonucleotide
gauacaucgucuucuucug

SEQ ID NO: 701600 - RNA, 19 nt, Artificial Sequence
  Description of Artificial Sequence: Synthetic oligonucleotide
uuggaacuaacuacucaag

SEQ ID NO: 701601 - RNA, 19 nt, Artificial Sequence
  Description of Artificial Sequence: Synthetic oligonucleotide
uaucguucacuccgggacg

SEQ ID NO: 701602 - RNA, 19 nt, Artificial Sequence
  Description of Artificial Sequence: Synthetic oligonucleotide
auagccagguggucuaucg

SEQ ID NO: 701603 - RNA, 19 nt, Artificial Sequence
  Description of Artificial Sequence: Synthetic oligonucleotide
uccucugcacaucauaagu

SEQ ID NO: 701604 - RNA, 19 nt, Artificial Sequence
  Description of Artificial Sequence: Synthetic oligonucleotide
agucaugcuggcuucaugu

SEQ ID NO: 701605 - RNA, 19 nt, Artificial Sequence
  Description of Artificial Sequence: Synthetic oligonucleotide
acacagucccgacacaccg

SEQ ID NO: 701606 - RNA, 19 nt, Artificial Sequence
  Description of Artificial Sequence: Synthetic oligonucleotide
auguucggacaucagccgc

SEQ ID NO: 701607 - RNA, 19 nt, Artificial Sequence
  Description of Artificial Sequence: Synthetic oligonucleotide
agcaggguaaaugagguug

SEQ ID NO: 701608 - RNA, 19 nt, Artificial Sequence
  Description of Artificial Sequence: Synthetic oligonucleotide
auuccgucaguuucuuugg

SEQ ID NO: 701609 - RNA, 19 nt, Artificial Sequence
  Description of Artificial Sequence: Synthetic oligonucleotide
agcaucacauaccggacag

SEQ ID NO: 701610 - RNA, 19 nt, Artificial Sequence
  Description of Artificial Sequence: Synthetic oligonucleotide
cacggaaucuccaugcuug

SEQ ID NO: 701611 - RNA, 19 nt, Artificial Sequence
  Description of Artificial Sequence: Synthetic oligonucleotide
ucacagugaacggugagcc

SEQ ID NO: 701612 - RNA, 19 nt, Artificial Sequence
  Description of Artificial Sequence: Synthetic oligonucleotide
augguuuugaucugugcca

SEQ ID NO: 701613 - RNA, 19 nt, Artificial Sequence
  Description of Artificial Sequence: Synthetic oligonucleotide
guuuugaucugugccaggg

SEQ ID NO: 701614 - RNA, 19 nt, Artificial Sequence
  Description of Artificial Sequence: Synthetic oligonucleotide
gaacggugagcccugcacg

SEQ ID NO: 701615 - RNA, 19 nt, Artificial Sequence
  Description of Artificial Sequence: Synthetic oligonucleotide
ggauuucuaaguccgagcc

SEQ ID NO: 701616 - RNA, 19 nt, Artificial Sequence
  Description of Artificial Sequence: Synthetic oligonucleotide
uuuaccuggcugaacuugu

SEQ ID NO: 701617 - RNA, 19 nt, Artificial Sequence
  Description of Artificial Sequence: Synthetic oligonucleotide
cugagcaucacauaccgga

SEQ ID NO: 701618 - RNA, 19 nt, Artificial Sequence
  Description of Artificial Sequence: Synthetic oligonucleotide
uguuaauggucccguacac

SEQ ID NO: 701619 - RNA, 19 nt, Artificial Sequence
  Description of Artificial Sequence: Synthetic oligonucleotide
gaacuuguaccaaggaagc

SEQ ID NO: 701620 - RNA, 19 nt, Artificial Sequence
  Description of Artificial Sequence: Synthetic oligonucleotide
ucuuaucguucacuccggg

SEQ ID NO: 701621 - RNA, 19 nt, Artificial Sequence
  Description of Artificial Sequence: Synthetic oligonucleotide
auacaucgucuucuucugc

SEQ ID NO: 701622 - RNA, 19 nt, Artificial Sequence
  Description of Artificial Sequence: Synthetic oligonucleotide
gaugcguucgcaucgggga

SEQ ID NO: 701623 - RNA, 19 nt, Artificial Sequence
  Description of Artificial Sequence: Synthetic oligonucleotide
uuagguccucugcacauca

SEQ ID NO: 701624 - RNA, 19 nt, Artificial Sequence
  Description of Artificial Sequence: Synthetic oligonucleotide
uguucggacaucagccgcc

SEQ ID NO: 701625 - RNA, 19 nt, Artificial Sequence
  Description of Artificial Sequence: Synthetic oligonucleotide
cuucugccgccuaugagcc

SEQ ID NO: 701626 - RNA, 19 nt, Artificial Sequence
  Description of Artificial Sequence: Synthetic oligonucleotide
caucacauaccggacagag

SEQ ID NO: 701627 - RNA, 19 nt, Artificial Sequence
  Description of Artificial Sequence: Synthetic oligonucleotide
aguccuauaaugcggguua

SEQ ID NO: 701628 - RNA, 19 nt, Artificial Sequence
  Description of Artificial Sequence: Synthetic oligonucleotide
ucuaucguuaaagccuuca

SEQ ID NO: 701629 - RNA, 19 nt, Artificial Sequence
  Description of Artificial Sequence: Synthetic oligonucleotide
cauaccggacagaggaugc

SEQ ID NO: 701630 - RNA, 19 nt, Artificial Sequence
  Description of Artificial Sequence: Synthetic oligonucleotide
acccguaugguauccagcu

SEQ ID NO: 701631 - RNA, 19 nt, Artificial Sequence
  Description of Artificial Sequence: Synthetic oligonucleotide
aacggugagcccugcacgu

SEQ ID NO: 701632 - RNA, 19 nt, Artificial Sequence
  Description of Artificial Sequence: Synthetic oligonucleotide
acuuugugcagaaacccag

SEQ ID NO: 701633 - RNA, 19 nt, Artificial Sequence
  Description of Artificial Sequence: Synthetic oligonucleotide
aaguccgagccgcugguca

SEQ ID NO: 701634 - RNA, 19 nt, Artificial Sequence
  Description of Artificial Sequence: Synthetic oligonucleotide
uccaacuacacagucccga

SEQ ID NO: 701635 - RNA, 19 nt, Artificial Sequence
  Description of Artificial Sequence: Synthetic oligonucleotide
ugguuuugaucugugccag

SEQ ID NO: 701636 - RNA, 19 nt, Artificial Sequence
  Description of Artificial Sequence: Synthetic oligonucleotide
ucugauugggcugucuuuc

SEQ ID NO: 701637 - RNA, 19 nt, Artificial Sequence
  Description of Artificial Sequence: Synthetic oligonucleotide
uccuggaauauugaccucu

SEQ ID NO: 701638 - RNA, 19 nt, Artificial Sequence
  Description of Artificial Sequence: Synthetic oligonucleotide
uguccacuacugagaacgg

SEQ ID NO: 701639 - RNA, 19 nt, Artificial Sequence
  Description of Artificial Sequence: Synthetic oligonucleotide
cuaagcagacuccucggug

SEQ ID NO: 701640 - RNA, 19 nt, Artificial Sequence
  Description of Artificial Sequence: Synthetic oligonucleotide
cauaagucaugcuggcuuc

SEQ ID NO: 701641 - RNA, 19 nt, Artificial Sequence
  Description of Artificial Sequence: Synthetic oligonucleotide
aagucaugcuggcuucaug

SEQ ID NO: 701642 - RNA, 19 nt, Artificial Sequence
  Description of Artificial Sequence: Synthetic oligonucleotide
uacacuucauagccucggc

SEQ ID NO: 701643 - RNA, 19 nt, Artificial Sequence
  Description of Artificial Sequence: Synthetic oligonucleotide
gacuacuguucugauuggg

SEQ ID NO: 701644 - RNA, 19 nt, Artificial Sequence
  Description of Artificial Sequence: Synthetic oligonucleotide
cuacucaagcucuuagguc

SEQ ID NO: 701645 - RNA, 19 nt, Artificial Sequence
  Description of Artificial Sequence: Synthetic oligonucleotide
guauucaacuuuguucagc

SEQ ID NO: 701646 - RNA, 19 nt, Artificial Sequence
  Description of Artificial Sequence: Synthetic oligonucleotide
gguaguccuauaaugcggg

SEQ ID NO: 701647 - RNA, 19 nt, Artificial Sequence
  Description of Artificial Sequence: Synthetic oligonucleotide
cuaucguuaaagccuucac

SEQ ID NO: 701648 - RNA, 19 nt, Artificial Sequence
  Description of Artificial Sequence: Synthetic oligonucleotide
acagugaacggugagcccu

SEQ ID NO: 701649 - RNA, 19 nt, Artificial Sequence
  Description of Artificial Sequence: Synthetic oligonucleotide
agguggucuaucguuaaag

SEQ ID NO: 701650 - RNA, 19 nt, Artificial Sequence
  Description of Artificial Sequence: Synthetic oligonucleotide
cacacaauguagacuccag

SEQ ID NO: 701651 - RNA, 19 nt, Artificial Sequence
  Description of Artificial Sequence: Synthetic oligonucleotide
ucggacaucagccgccacu

SEQ ID NO: 701652 - RNA, 19 nt, Artificial Sequence
  Description of Artificial Sequence: Synthetic oligonucleotide
ugcuaugauacaucgucuu

SEQ ID NO: 701653 - RNA, 19 nt, Artificial Sequence
  Description of Artificial Sequence: Synthetic oligonucleotide
guacacuucauagccucgg

SEQ ID NO: 701654 - RNA, 19 nt, Artificial Sequence
  Description of Artificial Sequence: Synthetic oligonucleotide
uccaguccgcauaucugcc

SEQ ID NO: 701655 - RNA, 19 nt, Artificial Sequence
  Description of Artificial Sequence: Synthetic oligonucleotide
gguuaaauucacccaaaga

SEQ ID NO: 701656 - RNA, 19 nt, Artificial Sequence
  Description of Artificial Sequence: Synthetic oligonucleotide
agucccgacacaccggcug

SEQ ID NO: 701657 - RNA, 19 nt, Artificial Sequence
  Description of Artificial Sequence: Synthetic oligonucleotide
uuguuguccuggacuacug

SEQ ID NO: 701658 - RNA, 19 nt, Artificial Sequence
  Description of Artificial Sequence: Synthetic oligonucleotide
uuccaacccgacuguagcc

SEQ ID NO: 701659 - RNA, 19 nt, Artificial Sequence
  Description of Artificial Sequence: Synthetic oligonucleotide
cacgucuguacccaguauc

SEQ ID NO: 701660 - RNA, 19 nt, Artificial Sequence
  Description of Artificial Sequence: Synthetic oligonucleotide
gguggucuaucguuaaagc

SEQ ID NO: 701661 - RNA, 19 nt, Artificial Sequence
  Description of Artificial Sequence: Synthetic oligonucleotide
cuuuggaacuaacuacuca

SEQ ID NO: 701662 - RNA, 19 nt, Artificial Sequence
  Description of Artificial Sequence: Synthetic oligonucleotide
  modified_base (2)..(2): a, c, u, g, unknown or other
cnguuuuccugacaucuuc

SEQ ID NO: 701663 - RNA, 19 nt, Artificial Sequence
  Description of Artificial Sequence: Synthetic oligonucleotide
uacccaccuggcauggugc

SEQ ID NO: 701664 - RNA, 19 nt, Artificial Sequence
  Description of Artificial Sequence: Synthetic oligonucleotide
uucacuccgggacgggagc

SEQ ID NO: 701665 - RNA, 19 nt, Artificial Sequence
  Description of Artificial Sequence: Synthetic oligonucleotide
ucaugcuggcuucauguuu

SEQ ID NO: 701666 - RNA, 19 nt, Artificial Sequence
  Description of Artificial Sequence: Synthetic oligonucleotide
augcguucgcaucggggac

SEQ ID NO: 701667 - RNA, 19 nt, Artificial Sequence
  Description of Artificial Sequence: Synthetic oligonucleotide
ccgacuguagccuuucagg

SEQ ID NO: 701668 - RNA, 19 nt, Artificial Sequence
  Description of Artificial Sequence: Synthetic oligonucleotide
ucgugacuuggguuccugg

SEQ ID NO: 701669 - RNA, 19 nt, Artificial Sequence
  Description of Artificial Sequence: Synthetic oligonucleotide
ucugccgccuaugagccug

SEQ ID NO: 701670 - RNA, 19 nt, Artificial Sequence
  Description of Artificial Sequence: Synthetic oligonucleotide
cauagccucggcacuggcc

SEQ ID NO: 701671 - RNA, 19 nt, Artificial Sequence
  Description of Artificial Sequence: Synthetic oligonucleotide
ugaaacaccccuggaugug

SEQ ID NO: 701672 - RNA, 19 nt, Artificial Sequence
  Description of Artificial Sequence: Synthetic oligonucleotide
acauaccggacagaggaug

SEQ ID NO: 701673 - RNA, 19 nt, Artificial Sequence
  Description of Artificial Sequence: Synthetic oligonucleotide
cucgguguucuccaacuac

SEQ ID NO: 701674 - RNA, 19 nt, Artificial Sequence
  Description of Artificial Sequence: Synthetic oligonucleotide
agcgugcaguuuucuggcc

SEQ ID NO: 701675 - RNA, 19 nt, Artificial Sequence
  Description of Artificial Sequence: Synthetic oligonucleotide
cagcgugcaguuuucuggc

SEQ ID NO: 701676 - RNA, 19 nt, Artificial Sequence
  Description of Artificial Sequence: Synthetic oligonucleotide
acacuucauagccucggca

SEQ ID NO: 701677 - RNA, 19 nt, Artificial Sequence
  Description of Artificial Sequence: Synthetic oligonucleotide
aaauucacccaaagacaga

SEQ ID NO: 701678 - RNA, 19 nt, Artificial Sequence
  Description of Artificial Sequence: Synthetic oligonucleotide
gguguuaauggucccguac

SEQ ID NO: 701679 - RNA, 19 nt, Artificial Sequence
  Description of Artificial Sequence: Synthetic oligonucleotide
ggaacuaacuacucaagcu

SEQ ID NO: 701680 - RNA, 19 nt, Artificial Sequence
  Description of Artificial Sequence: Synthetic oligonucleotide
auaccggacagaggaugcc

SEQ ID NO: 701681 - RNA, 19 nt, Artificial Sequence
  Description of Artificial Sequence: Synthetic oligonucleotide
auaaugcggguuaaauuca

SEQ ID NO: 701682 - RNA, 19 nt, Artificial Sequence
  Description of Artificial Sequence: Synthetic oligonucleotide
ggguuaaauucacccaaag

SEQ ID NO: 701683 - RNA, 19 nt, Artificial Sequence
  Description of Artificial Sequence: Synthetic oligonucleotide
uccgucaguuucuuuggaa

SEQ ID NO: 701684 - RNA, 19 nt, Artificial Sequence
  Description of Artificial Sequence: Synthetic oligonucleotide
agccguucuaccaccacuc

SEQ ID NO: 701685 - RNA, 19 nt, Artificial Sequence
  Description of Artificial Sequence: Synthetic oligonucleotide
gaccaugagggcucucgug

SEQ ID NO: 701686 - RNA, 19 nt, Artificial Sequence
  Description of Artificial Sequence: Synthetic oligonucleotide
aagcuucgugacuuggguu

SEQ ID NO: 701687 - RNA, 19 nt, Artificial Sequence
  Description of Artificial Sequence: Synthetic oligonucleotide
ugguaugauccauccuugu

SEQ ID NO: 701688 - RNA, 19 nt, Artificial Sequence
  Description of Artificial Sequence: Synthetic oligonucleotide
uucgcaucggggacuuugu

SEQ ID NO: 701689 - RNA, 19 nt, Artificial Sequence
  Description of Artificial Sequence: Synthetic oligonucleotide
agaugcguucgcaucgggg

SEQ ID NO: 701690 - RNA, 19 nt, Artificial Sequence
  Description of Artificial Sequence: Synthetic oligonucleotide
guacccaccuggcauggug

SEQ ID NO: 701691 - RNA, 19 nt, Artificial Sequence
  Description of Artificial Sequence: Synthetic oligonucleotide
gauugggcugucuuucuua

SEQ ID NO: 701692 - RNA, 19 nt, Artificial Sequence
  Description of Artificial Sequence: Synthetic oligonucleotide
ggguaguccuauaaugcgg

SEQ ID NO: 701693 - RNA, 19 nt, Artificial Sequence
  Description of Artificial Sequence: Synthetic oligonucleotide
gacuuugugcagaaaccca

SEQ ID NO: 701694 - RNA, 19 nt, Artificial Sequence
  Description of Artificial Sequence: Synthetic oligonucleotide
aacccgacuguagccuuuc

SEQ ID NO: 701695 - RNA, 19 nt, Artificial Sequence
  Description of Artificial Sequence: Synthetic oligonucleotide
uccaacccgacuguagccu

SEQ ID NO: 701696 - RNA, 19 nt, Artificial Sequence
  Description of Artificial Sequence: Synthetic oligonucleotide
cuuaucguucacuccggga

SEQ ID NO: 701697 - RNA, 19 nt, Artificial Sequence
  Description of Artificial Sequence: Synthetic oligonucleotide
uucugauugggcugucuuu

SEQ ID NO: 701698 - RNA, 19 nt, Artificial Sequence
  Description of Artificial Sequence: Synthetic oligonucleotide
caguccgcauaucugccag

SEQ ID NO: 701699 - RNA, 19 nt, Artificial Sequence
  Description of Artificial Sequence: Synthetic oligonucleotide
agaacgguuccagcuuuuc

SEQ ID NO: 701700 - RNA, 19 nt, Artificial Sequence
  Description of Artificial Sequence: Synthetic oligonucleotide
ucgugcucucuggagaucu

SEQ ID NO: 701701 - RNA, 19 nt, Artificial Sequence
  Description of Artificial Sequence: Synthetic oligonucleotide
aucacauaccggacagagg

SEQ ID NO: 701702 - RNA, 19 nt, Artificial Sequence
  Description of Artificial Sequence: Synthetic oligonucleotide
cacauuuagcuggaucaac

SEQ ID NO: 701703 - RNA, 19 nt, Artificial Sequence
  Description of Artificial Sequence: Synthetic oligonucleotide
guucgcaucggggacuuug

SEQ ID NO: 701704 - RNA, 19 nt, Artificial Sequence
  Description of Artificial Sequence: Synthetic oligonucleotide
ccgccuaugagccuggcag

SEQ ID NO: 701705 - RNA, 19 nt, Artificial Sequence
  Description of Artificial Sequence: Synthetic oligonucleotide
uccgcauaucugccagcag

SEQ ID NO: 701706 - RNA, 19 nt, Artificial Sequence
  Description of Artificial Sequence: Synthetic oligonucleotide
aguccgagccgcuggucag

SEQ ID NO: 701707 - RNA, 19 nt, Artificial Sequence
  Description of Artificial Sequence: Synthetic oligonucleotide
caugcuggcuucauguuua

SEQ ID NO: 701708 - RNA, 19 nt, Artificial Sequence
  Description of Artificial Sequence: Synthetic oligonucleotide
cacagucccgacacaccgg

SEQ ID NO: 701709 - RNA, 19 nt, Artificial Sequence
  Description of Artificial Sequence: Synthetic oligonucleotide
cuggagccguucuaccacc

SEQ ID NO: 701710 - RNA, 19 nt, Artificial Sequence
  Description of Artificial Sequence: Synthetic oligonucleotide
  modified_base (11)..(11): a, c, u, g, unknown or other
agcggcuuccnguuuuccu

SEQ ID NO: 701711 - RNA, 19 nt, Artificial Sequence
  Description of Artificial Sequence: Synthetic oligonucleotide
guugucuguuucucucgug

SEQ ID NO: 701712 - RNA, 19 nt, Artificial Sequence
  Description of Artificial Sequence: Synthetic oligonucleotide
ugugagcgaugcuuucuuc

SEQ ID NO: 701713 - RNA, 19 nt, Artificial Sequence
  Description of Artificial Sequence: Synthetic oligonucleotide
guaagugcagucagauuuc

SEQ ID NO: 701714 - RNA, 19 nt, Artificial Sequence
  Description of Artificial Sequence: Synthetic oligonucleotide
ugaucugugccagggcuuc

SEQ ID NO: 701715 - RNA, 19 nt, Artificial Sequence
  Description of Artificial Sequence: Synthetic oligonucleotide
acgguccuaagcagacucc

SEQ ID NO: 701716 - RNA, 19 nt, Artificial Sequence
  Description of Artificial Sequence: Synthetic oligonucleotide
ccgcauaucugccagcagc

SEQ ID NO: 701717 - RNA, 19 nt, Artificial Sequence
  Description of Artificial Sequence: Synthetic oligonucleotide
acgucuguacccaguauca

SEQ ID NO: 701718 - RNA, 19 nt, Artificial Sequence
  Description of Artificial Sequence: Synthetic oligonucleotide
ugauugggcugucuuucuu

SEQ ID NO: 701719 - RNA, 19 nt, Artificial Sequence
  Description of Artificial Sequence: Synthetic oligonucleotide
gucccgacacaccggcugg

SEQ ID NO: 701720 - RNA, 19 nt, Artificial Sequence
  Description of Artificial Sequence: Synthetic oligonucleotide
gaaacaccccuggauguga

SEQ ID NO: 701721 - RNA, 19 nt, Artificial Sequence
  Description of Artificial Sequence: Synthetic oligonucleotide
ccucagagaauguucggac

SEQ ID NO: 701722 - RNA, 19 nt, Artificial Sequence
  Description of Artificial Sequence: Synthetic oligonucleotide
ugaccucucagagcuugug

SEQ ID NO: 701723 - RNA, 19 nt, Artificial Sequence
  Description of Artificial Sequence: Synthetic oligonucleotide
agaccaugagggcucucgu

SEQ ID NO: 701724 - RNA, 19 nt, Artificial Sequence
  Description of Artificial Sequence: Synthetic oligonucleotide
cuauaaugcggguuaaauu

SEQ ID NO: 701725 - RNA, 19 nt, Artificial Sequence
  Description of Artificial Sequence: Synthetic oligonucleotide
gacccguaugguauccagc

SEQ ID NO: 701726 - RNA, 19 nt, Artificial Sequence
  Description of Artificial Sequence: Synthetic oligonucleotide
uaccggacagaggaugcca

SEQ ID NO: 701727 - RNA, 19 nt, Artificial Sequence
  Description of Artificial Sequence: Synthetic oligonucleotide
augugagcgaugcuuucuu

SEQ ID NO: 701728 - RNA, 19 nt, Artificial Sequence
  Description of Artificial Sequence: Synthetic oligonucleotide
augcuaugauacaucgucu

SEQ ID NO: 701729 - RNA, 19 nt, Artificial Sequence
  Description of Artificial Sequence: Synthetic oligonucleotide
uaguccuauaaugcggguu

SEQ ID NO: 701730 - RNA, 19 nt, Artificial Sequence
  Description of Artificial Sequence: Synthetic oligonucleotide
ggacacauuuagcuggauc

SEQ ID NO: 701731 - RNA, 19 nt, Artificial Sequence
  Description of Artificial Sequence: Synthetic oligonucleotide
  modified_base (5)..(5): a, c, u, g, unknown or other
uuccnguuuuccugacauc

SEQ ID NO: 701732 - RNA, 19 nt, Artificial Sequence
  Description of Artificial Sequence: Synthetic oligonucleotide
agggcucucguguugccaa

SEQ ID NO: 701733 - RNA, 19 nt, Artificial Sequence
  Description of Artificial Sequence: Synthetic oligonucleotide
gguuuugaucugugccagg

SEQ ID NO: 701734 - RNA, 19 nt, Artificial Sequence
  Description of Artificial Sequence: Synthetic oligonucleotide
gcuaugauacaucgucuuc

SEQ ID NO: 701735 - RNA, 19 nt, Artificial Sequence
  Description of Artificial Sequence: Synthetic oligonucleotide
ucgcaucggggacuuugug

SEQ ID NO: 701736 - RNA, 19 nt, Artificial Sequence
  Description of Artificial Sequence: Synthetic oligonucleotide
cuccaacuacacagucccg

SEQ ID NO: 701737 - RNA, 19 nt, Artificial Sequence
  Description of Artificial Sequence: Synthetic oligonucleotide
gacgggagcuguauucaac

SEQ ID NO: 701738 - RNA, 19 nt, Artificial Sequence
  Description of Artificial Sequence: Synthetic oligonucleotide
cgaugcuuucuucucacgg

SEQ ID NO: 701739 - RNA, 19 nt, Artificial Sequence
  Description of Artificial Sequence: Synthetic oligonucleotide
gaaguuagagaaagcacuu

SEQ ID NO: 701740 - RNA, 19 nt, Artificial Sequence
  Description of Artificial Sequence: Synthetic oligonucleotide
ccgucaguuucuuuggaac

SEQ ID NO: 701741 - RNA, 19 nt, Artificial Sequence
  Description of Artificial Sequence: Synthetic oligonucleotide
agugaacggugagcccugc

SEQ ID NO: 701742 - RNA, 19 nt, Artificial Sequence
  Description of Artificial Sequence: Synthetic oligonucleotide
  modified_base (6)..(6): a, c, u, g, unknown or other
cuuccnguuuuccugacau

SEQ ID NO: 701743 - RNA, 19 nt, Artificial Sequence
  Description of Artificial Sequence: Synthetic oligonucleotide
uggacgaccuggguguccu

SEQ ID NO: 701744 - RNA, 19 nt, Artificial Sequence
  Description of Artificial Sequence: Synthetic oligonucleotide
cugcccaccuguguaagug

SEQ ID NO: 701745 - RNA, 19 nt, Artificial Sequence
  Description of Artificial Sequence: Synthetic oligonucleotide
acggaaucuccaugcuugu

SEQ ID NO: 701746 - RNA, 19 nt, Artificial Sequence
  Description of Artificial Sequence: Synthetic oligonucleotide
gacguccucgccuccccug

SEQ ID NO: 701747 - RNA, 19 nt, Artificial Sequence
  Description of Artificial Sequence: Synthetic oligonucleotide
ggacuacuguucugauugg

SEQ ID NO: 701748 - RNA, 19 nt, Artificial Sequence
  Description of Artificial Sequence: Synthetic oligonucleotide
acgaagggcagugagucuu

SEQ ID NO: 701749 - RNA, 19 nt, Artificial Sequence
  Description of Artificial Sequence: Synthetic oligonucleotide
auaagucaugcuggcuuca

SEQ ID NO: 701750 - RNA, 19 nt, Artificial Sequence
  Description of Artificial Sequence: Synthetic oligonucleotide
ccuccgcuggagcagaagg

SEQ ID NO: 701751 - RNA, 19 nt, Artificial Sequence
  Description of Artificial Sequence: Synthetic oligonucleotide
agaccaguguggacgaccu

SEQ ID NO: 701752 - RNA, 19 nt, Artificial Sequence
  Description of Artificial Sequence: Synthetic oligonucleotide
ggacccguaugguauccag

SEQ ID NO: 701753 - RNA, 19 nt, Artificial Sequence
  Description of Artificial Sequence: Synthetic oligonucleotide
uucgugacuuggguuccug

SEQ ID NO: 701754 - RNA, 19 nt, Artificial Sequence
  Description of Artificial Sequence: Synthetic oligonucleotide
ggugccaccgcaggcacag

SEQ ID NO: 701755 - RNA, 19 nt, Artificial Sequence
  Description of Artificial Sequence: Synthetic oligonucleotide
uccuauaaugcggguuaaa

SEQ ID NO: 701756 - RNA, 19 nt, Artificial Sequence
  Description of Artificial Sequence: Synthetic oligonucleotide
gaagggcagugagucuugc

SEQ ID NO: 701757 - RNA, 19 nt, Artificial Sequence
  Description of Artificial Sequence: Synthetic oligonucleotide
cuuagguccucugcacauc

SEQ ID NO: 701758 - RNA, 19 nt, Artificial Sequence
  Description of Artificial Sequence: Synthetic oligonucleotide
ucggggacuuugugcagaa

SEQ ID NO: 701759 - RNA, 19 nt, Artificial Sequence
  Description of Artificial Sequence: Synthetic oligonucleotide
ccucggauguccacuacug

SEQ ID NO: 701760 - RNA, 19 nt, Artificial Sequence
  Description of Artificial Sequence: Synthetic oligonucleotide
cagaugcguucgcaucggg

SEQ ID NO: 701761 - RNA, 19 nt, Artificial Sequence
  Description of Artificial Sequence: Synthetic oligonucleotide
ugcguucgcaucggggacu

SEQ ID NO: 701762 - RNA, 19 nt, Artificial Sequence
  Description of Artificial Sequence: Synthetic oligonucleotide
ccaacuacacagucccgac

SEQ ID NO: 701763 - RNA, 19 nt, Artificial Sequence
  Description of Artificial Sequence: Synthetic oligonucleotide
aucggggacuuugugcaga

SEQ ID NO: 701764 - RNA, 19 nt, Artificial Sequence
  Description of Artificial Sequence: Synthetic oligonucleotide
gucgcugcacaggucacac

SEQ ID NO: 701765 - RNA, 19 nt, Artificial Sequence
  Description of Artificial Sequence: Synthetic oligonucleotide
ccguacacuucauagccuc

SEQ ID NO: 701766 - RNA, 19 nt, Artificial Sequence
  Description of Artificial Sequence: Synthetic oligonucleotide
caacuacacagucccgaca

SEQ ID NO: 701767 - RNA, 19 nt, Artificial Sequence
  Description of Artificial Sequence: Synthetic oligonucleotide
ucggcacuggccugccuuc

SEQ ID NO: 701768 - RNA, 19 nt, Artificial Sequence
  Description of Artificial Sequence: Synthetic oligonucleotide
gaccucucagagcuugugu

SEQ ID NO: 701769 - RNA, 19 nt, Artificial Sequence
  Description of Artificial Sequence: Synthetic oligonucleotide
gcagacccacacaauguag

SEQ ID NO: 701770 - RNA, 19 nt, Artificial Sequence
  Description of Artificial Sequence: Synthetic oligonucleotide
cuggacccguaugguaucc

SEQ ID NO: 701771 - RNA, 19 nt, Artificial Sequence
  Description of Artificial Sequence: Synthetic oligonucleotide
guaggacacaggaugggcu

SEQ ID NO: 701772 - RNA, 19 nt, Artificial Sequence
  Description of Artificial Sequence: Synthetic oligonucleotide
cacgugcugcucucugaug

SEQ ID NO: 701773 - RNA, 19 nt, Artificial Sequence
  Description of Artificial Sequence: Synthetic oligonucleotide
ucguucacuccgggacggg

SEQ ID NO: 701774 - RNA, 19 nt, Artificial Sequence
  Description of Artificial Sequence: Synthetic oligonucleotide
gcgaugcuuucuucucacg

SEQ ID NO: 701775 - RNA, 19 nt, Artificial Sequence
  Description of Artificial Sequence: Synthetic oligonucleotide
cuaacuacucaagcucuua

SEQ ID NO: 701776 - RNA, 19 nt, Artificial Sequence
  Description of Artificial Sequence: Synthetic oligonucleotide
cagcaagaccaguguggac

SEQ ID NO: 701777 - RNA, 19 nt, Artificial Sequence
  Description of Artificial Sequence: Synthetic oligonucleotide
ggagcucccucacggaauc

SEQ ID NO: 701778 - RNA, 19 nt, Artificial Sequence
  Description of Artificial Sequence: Synthetic oligonucleotide
gcaagaccaguguggacga

SEQ ID NO: 701779 - RNA, 19 nt, Artificial Sequence
  Description of Artificial Sequence: Synthetic oligonucleotide
guccuggacuacuguucug

SEQ ID NO: 701780 - RNA, 19 nt, Artificial Sequence
  Description of Artificial Sequence: Synthetic oligonucleotide
cuuguuguccuggacuacu

SEQ ID NO: 701781 - RNA, 19 nt, Artificial Sequence
  Description of Artificial Sequence: Synthetic oligonucleotide
uggacccguaugguaucca

SEQ ID NO: 701782 - RNA, 19 nt, Artificial Sequence
  Description of Artificial Sequence: Synthetic oligonucleotide
ucacuccgggacgggagcu

SEQ ID NO: 701783 - RNA, 19 nt, Artificial Sequence
  Description of Artificial Sequence: Synthetic oligonucleotide
cguacacuucauagccucg

SEQ ID NO: 701784 - RNA, 19 nt, Artificial Sequence
  Description of Artificial Sequence: Synthetic oligonucleotide
guucugauugggcugucuu

SEQ ID NO: 701785 - RNA, 19 nt, Artificial Sequence
  Description of Artificial Sequence: Synthetic oligonucleotide
uucggacaucagccgccac

SEQ ID NO: 701786 - RNA, 19 nt, Artificial Sequence
  Description of Artificial Sequence: Synthetic oligonucleotide
ccuggaauauugaccucuc

SEQ ID NO: 701787 - RNA, 19 nt, Artificial Sequence
  Description of Artificial Sequence: Synthetic oligonucleotide
cucccucacggaaucucca

SEQ ID NO: 701788 - RNA, 19 nt, Artificial Sequence
  Description of Artificial Sequence: Synthetic oligonucleotide
cccgacuguagccuuucag

SEQ ID NO: 701789 - RNA, 19 nt, Artificial Sequence
  Description of Artificial Sequence: Synthetic oligonucleotide
uccgagccgcuggucagca

SEQ ID NO: 701790 - RNA, 19 nt, Artificial Sequence
  Description of Artificial Sequence: Synthetic oligonucleotide
ggaugugagcgaugcuuuc

SEQ ID NO: 701791 - RNA, 19 nt, Artificial Sequence
  Description of Artificial Sequence: Synthetic oligonucleotide
cauagccagguggucuauc

SEQ ID NO: 701792 - RNA, 19 nt, Artificial Sequence
  Description of Artificial Sequence: Synthetic oligonucleotide
  modified_base (7)..(7): a, c, u, g, unknown or other
gcuuccnguuuuccugaca

SEQ ID NO: 701793 - RNA, 19 nt, Artificial Sequence
  Description of Artificial Sequence: Synthetic oligonucleotide
uggugccaccgcaggcaca

SEQ ID NO: 701794 - RNA, 19 nt, Artificial Sequence
  Description of Artificial Sequence: Synthetic oligonucleotide
uccgggacgggagcuguau

SEQ ID NO: 701795 - RNA, 19 nt, Artificial Sequence
  Description of Artificial Sequence: Synthetic oligonucleotide
cugccgccuaugagccugg

SEQ ID NO: 701796 - RNA, 19 nt, Artificial Sequence
  Description of Artificial Sequence: Synthetic oligonucleotide
gugugcaagcaaggcaaga

SEQ ID NO: 701797 - RNA, 19 nt, Artificial Sequence
  Description of Artificial Sequence: Synthetic oligonucleotide
caggguaaaugagguuguc

SEQ ID NO: 701798 - RNA, 19 nt, Artificial Sequence
  Description of Artificial Sequence: Synthetic oligonucleotide
cagacuccucggugcacuc

SEQ ID NO: 701799 - RNA, 19 nt, Artificial Sequence
  Description of Artificial Sequence: Synthetic oligonucleotide
acacaccggcuggucacag

SEQ ID NO: 701800 - RNA, 19 nt, Artificial Sequence
  Description of Artificial Sequence: Synthetic oligonucleotide
uucugccgccuaugagccu

SEQ ID NO: 701801 - RNA, 19 nt, Artificial Sequence
  Description of Artificial Sequence: Synthetic oligonucleotide
gguaugauccauccuuguu

SEQ ID NO: 701802 - RNA, 19 nt, Artificial Sequence
  Description of Artificial Sequence: Synthetic oligonucleotide
guaguccuauaaugcgggu

SEQ ID NO: 701803 - RNA, 19 nt, Artificial Sequence
  Description of Artificial Sequence: Synthetic oligonucleotide
gggacaacugccaccugga

SEQ ID NO: 701804 - RNA, 19 nt, Artificial Sequence
  Description of Artificial Sequence: Synthetic oligonucleotide
gcucccucacggaaucucc

SEQ ID NO: 701805 - RNA, 19 nt, Artificial Sequence
  Description of Artificial Sequence: Synthetic oligonucleotide
acggugagcccugcacgug

SEQ ID NO: 701806 - RNA, 19 nt, Artificial Sequence
  Description of Artificial Sequence: Synthetic oligonucleotide
agagaccaugagggcucuc

SEQ ID NO: 701807 - RNA, 19 nt, Artificial Sequence
  Description of Artificial Sequence: Synthetic oligonucleotide
gguugucuguuucucucgu

SEQ ID NO: 701808 - RNA, 19 nt, Artificial Sequence
  Description of Artificial Sequence: Synthetic oligonucleotide
gcucucgguguucuccaac

SEQ ID NO: 701809 - RNA, 19 nt, Artificial Sequence
  Description of Artificial Sequence: Synthetic oligonucleotide
ccagaugcguucgcaucgg

SEQ ID NO: 701810 - RNA, 19 nt, Artificial Sequence
  Description of Artificial Sequence: Synthetic oligonucleotide
caccuggcauggugccacc

SEQ ID NO: 701811 - RNA, 19 nt, Artificial Sequence
  Description of Artificial Sequence: Synthetic oligonucleotide
cccucacggaaucuccaug

SEQ ID NO: 701812 - RNA, 19 nt, Artificial Sequence
  Description of Artificial Sequence: Synthetic oligonucleotide
acccgacuguagccuuuca

SEQ ID NO: 701813 - RNA, 19 nt, Artificial Sequence
  Description of Artificial Sequence: Synthetic oligonucleotide
ccugaggcauccuuacaaa

SEQ ID NO: 701814 - RNA, 19 nt, Artificial Sequence
  Description of Artificial Sequence: Synthetic oligonucleotide
guccuauaaugcggguuaa

SEQ ID NO: 701815 - RNA, 19 nt, Artificial Sequence
  Description of Artificial Sequence: Synthetic oligonucleotide
cuccgcuggagcagaaggu

SEQ ID NO: 701816 - RNA, 19 nt, Artificial Sequence
  Description of Artificial Sequence: Synthetic oligonucleotide
guagcccucagagaauguu

SEQ ID NO: 701817 - RNA, 19 nt, Artificial Sequence
  Description of Artificial Sequence: Synthetic oligonucleotide
guccgagccgcuggucagc

SEQ ID NO: 701818 - RNA, 19 nt, Artificial Sequence
  Description of Artificial Sequence: Synthetic oligonucleotide
caagaccaguguggacgac

SEQ ID NO: 701819 - RNA, 19 nt, Artificial Sequence
  Description of Artificial Sequence: Synthetic oligonucleotide
  modified_base (8)..(8): a, c, u, g, unknown or other
ggcuuccnguuuuccugac

SEQ ID NO: 701820 - RNA, 19 nt, Artificial Sequence
  Description of Artificial Sequence: Synthetic oligonucleotide
ucccgacacaccggcuggu

SEQ ID NO: 701821 - RNA, 19 nt, Artificial Sequence
  Description of Artificial Sequence: Synthetic oligonucleotide
gucaugcuggcuucauguu

SEQ ID NO: 701822 - RNA, 19 nt, Artificial Sequence
  Description of Artificial Sequence: Synthetic oligonucleotide
gacauguggugcacaccgu

SEQ ID NO: 701823 - RNA, 19 nt, Artificial Sequence
  Description of Artificial Sequence: Synthetic oligonucleotide
cacuccgggacgggagcug

SEQ ID NO: 701824 - RNA, 19 nt, Artificial Sequence
  Description of Artificial Sequence: Synthetic oligonucleotide
cacggucacagugaacggu

SEQ ID NO: 701825 - RNA, 19 nt, Artificial Sequence
  Description of Artificial Sequence: Synthetic oligonucleotide
gucuaucguuaaagccuuc

SEQ ID NO: 701826 - RNA, 19 nt, Artificial Sequence
  Description of Artificial Sequence: Synthetic oligonucleotide
aggacacauuuagcuggau

SEQ ID NO: 701827 - RNA, 19 nt, Artificial Sequence
  Description of Artificial Sequence: Synthetic oligonucleotide
ggucuaucguuaaagccuu

SEQ ID NO: 701828 - RNA, 19 nt, Artificial Sequence
  Description of Artificial Sequence: Synthetic oligonucleotide
cggugagcccugcacgugc

SEQ ID NO: 701829 - RNA, 19 nt, Artificial Sequence
  Description of Artificial Sequence: Synthetic oligonucleotide
ggugaguaggacacaggau

SEQ ID NO: 701830 - RNA, 19 nt, Artificial Sequence
  Description of Artificial Sequence: Synthetic oligonucleotide
gcccuggguaguccuauaa

SEQ ID NO: 701831 - RNA, 19 nt, Artificial Sequence
  Description of Artificial Sequence: Synthetic oligonucleotide
ggcacagcgugcaguuuuc

SEQ ID NO: 701832 - RNA, 19 nt, Artificial Sequence
  Description of Artificial Sequence: Synthetic oligonucleotide
cacauaccggacagaggau

SEQ ID NO: 701833 - RNA, 19 nt, Artificial Sequence
  Description of Artificial Sequence: Synthetic oligonucleotide
ggcuuuccaacccgacugu

SEQ ID NO: 701834 - RNA, 19 nt, Artificial Sequence
  Description of Artificial Sequence: Synthetic oligonucleotide
gcgugcaguuuucuggccu

SEQ ID NO: 701835 - RNA, 19 nt, Artificial Sequence
  Description of Artificial Sequence: Synthetic oligonucleotide
cugccagaugcguucgcau

SEQ ID NO: 701836 - RNA, 19 nt, Artificial Sequence
  Description of Artificial Sequence: Synthetic oligonucleotide
ccaguccgcauaucugcca

SEQ ID NO: 701837 - RNA, 19 nt, Artificial Sequence
  Description of Artificial Sequence: Synthetic oligonucleotide
ccuuguuguccuggacuac

SEQ ID NO: 701838 - RNA, 19 nt, Artificial Sequence
  Description of Artificial Sequence: Synthetic oligonucleotide
gacgaccuggguguccuuu

SEQ ID NO: 701839 - RNA, 19 nt, Artificial Sequence
  Description of Artificial Sequence: Synthetic oligonucleotide
ugccgccuaugagccuggc

SEQ ID NO: 701840 - RNA, 19 nt, Artificial Sequence
  Description of Artificial Sequence: Synthetic oligonucleotide
cgucuguacccaguaucag

SEQ ID NO: 701841 - RNA, 19 nt, Artificial Sequence
  Description of Artificial Sequence: Synthetic oligonucleotide
gcaucacauaccggacaga

SEQ ID NO: 701842 - RNA, 19 nt, Artificial Sequence
  Description of Artificial Sequence: Synthetic oligonucleotide
gccgccuaugagccuggca

SEQ ID NO: 701843 - RNA, 19 nt, Artificial Sequence
  Description of Artificial Sequence: Synthetic oligonucleotide
ccgacacaccggcugguca

SEQ ID NO: 701844 - RNA, 19 nt, Artificial Sequence
  Description of Artificial Sequence: Synthetic oligonucleotide
ccuaagcagacuccucggu

SEQ ID NO: 701845 - RNA, 19 nt, Artificial Sequence
  Description of Artificial Sequence: Synthetic oligonucleotide
gccuccgcuggagcagaag

SEQ ID NO: 701846 - RNA, 19 nt, Artificial Sequence
  Description of Artificial Sequence: Synthetic oligonucleotide
  modified_base (9)..(9): a, c, u, g, unknown or other
cggcuuccnguuuuccuga

SEQ ID NO: 701847 - RNA, 19 nt, Artificial Sequence
  Description of Artificial Sequence: Synthetic oligonucleotide
ccaugcuaugauacaucgu

SEQ ID NO: 701848 - RNA, 19 nt, Artificial Sequence
  Description of Artificial Sequence: Synthetic oligonucleotide
cccuaggagagaagcagau

SEQ ID NO: 701849 - RNA, 19 nt, Artificial Sequence
  Description of Artificial Sequence: Synthetic oligonucleotide
cguaugguauccagcugcu

SEQ ID NO: 701850 - RNA, 19 nt, Artificial Sequence
  Description of Artificial Sequence: Synthetic oligonucleotide
caacccgacuguagccuuu

SEQ ID NO: 701851 - RNA, 19 nt, Artificial Sequence
  Description of Artificial Sequence: Synthetic oligonucleotide
caccggcuggucacagagu

SEQ ID NO: 701852 - RNA, 19 nt, Artificial Sequence
  Description of Artificial Sequence: Synthetic oligonucleotide
  modified_base (3)..(3): a, c, u, g, unknown or other
ccnguuuuccugacaucuu

SEQ ID NO: 701853 - RNA, 19 nt, Artificial Sequence
  Description of Artificial Sequence: Synthetic oligonucleotide
cuucgugacuuggguuccu

SEQ ID NO: 701854 - RNA, 19 nt, Artificial Sequence
  Description of Artificial Sequence: Synthetic oligonucleotide
ccccucggauguccacuac

SEQ ID NO: 701855 - RNA, 19 nt, Artificial Sequence
  Description of Artificial Sequence: Synthetic oligonucleotide
  modified_base (15)..(15): a, c, u, g, unknown or other
cagaagcggcuuccnguuu

SEQ ID NO: 701856 - RNA, 19 nt, Artificial Sequence
  Description of Artificial Sequence: Synthetic oligonucleotide
cccgacacaccggcugguc

SEQ ID NO: 701857 - RNA, 19 nt, Artificial Sequence
  Description of Artificial Sequence: Synthetic oligonucleotide
cccuggguaguccuauaau

SEQ ID NO: 701858 - RNA, 19 nt, Artificial Sequence
  Description of Artificial Sequence: Synthetic oligonucleotide
ccgagccgcuggucagcag

SEQ ID NO: 701859 - RNA, 19 nt, Artificial Sequence
  Description of Artificial Sequence: Synthetic oligonucleotide
ccuggacuacuguucugau

SEQ ID NO: 701860 - RNA, 19 nt, Artificial Sequence
  Description of Artificial Sequence: Synthetic oligonucleotide
ggacguccucgccuccccu

SEQ ID NO: 701861 - RNA, 19 nt, Artificial Sequence
  Description of Artificial Sequence: Synthetic oligonucleotide
ggcccuggguaguccuaua

SEQ ID NO: 701862 - RNA, 19 nt, Artificial Sequence
  Description of Artificial Sequence: Synthetic oligonucleotide
gcacagcgugcaguuuucu

SEQ ID NO: 701863 - RNA, 19 nt, Artificial Sequence
  Description of Artificial Sequence: Synthetic oligonucleotide
ccaugagggcucucguguu

SEQ ID NO: 701864 - RNA, 19 nt, Artificial Sequence
  Description of Artificial Sequence: Synthetic oligonucleotide
ccaacccgacuguagccuu

SEQ ID NO: 701865 - RNA, 19 nt, Artificial Sequence
  Description of Artificial Sequence: Synthetic oligonucleotide
ccggacagaggaugccaau

SEQ ID NO: 701866 - RNA, 19 nt, Artificial Sequence
  Description of Artificial Sequence: Synthetic oligonucleotide
gguacccaccuggcauggu

SEQ ID NO: 701867 - RNA, 19 nt, Artificial Sequence
  Description of Artificial Sequence: Synthetic oligonucleotide
ccacgucuguacccaguau

SEQ ID NO: 701868 - RNA, 19 nt, Artificial Sequence
  Description of Artificial Sequence: Synthetic oligonucleotide
cgcaggcacagcgugcagu

SEQ ID NO: 701869 - RNA, 19 nt, Artificial Sequence
  Description of Artificial Sequence: Synthetic oligonucleotide
gcguucgcaucggggacuu

SEQ ID NO: 701870 - RNA, 19 nt, Artificial Sequence
  Description of Artificial Sequence: Synthetic oligonucleotide
cccagacacgaagggcagu

SEQ ID NO: 701871 - RNA, 19 nt, Artificial Sequence
  Description of Artificial Sequence: Synthetic oligonucleotide
ggccuccgcuggagcagaa

SEQ ID NO: 701872 - RNA, 19 nt, Artificial Sequence
  Description of Artificial Sequence: Synthetic oligonucleotide
ggacgaccuggguguccuu

SEQ ID NO: 701873 - RNA, 19 nt, Artificial Sequence
  Description of Artificial Sequence: Synthetic oligonucleotide
ccgggacgggagcuguauu

SEQ ID NO: 701874 - RNA, 19 nt, Artificial Sequence
  Description of Artificial Sequence: Synthetic oligonucleotide
cguucgcaucggggacuuu

SEQ ID NO: 701875 - RNA, 19 nt, Artificial Sequence
  Description of Artificial Sequence: Synthetic oligonucleotide
aaaagggcuguccauagcc

SEQ ID NO: 701876 - RNA, 19 nt, Artificial Sequence
  Description of Artificial Sequence: Synthetic oligonucleotide
acuaacuuagcucccaccc

SEQ ID NO: 701877 - RNA, 19 nt, Artificial Sequence
  Description of Artificial Sequence: Synthetic oligonucleotide
augaccuugaaccaaucac

SEQ ID NO: 701878 - RNA, 19 nt, Artificial Sequence
  Description of Artificial Sequence: Synthetic oligonucleotide
aggacagaguccuagcccc

SEQ ID NO: 701879 - RNA, 19 nt, Artificial Sequence
  Description of Artificial Sequence: Synthetic oligonucleotide
ucucugaggguauaaaacc

SEQ ID NO: 701880 - RNA, 19 nt, Artificial Sequence
  Description of Artificial Sequence: Synthetic oligonucleotide
caaaccguggaagagaagg

SEQ ID NO: 701881 - RNA, 19 nt, Artificial Sequence
  Description of Artificial Sequence: Synthetic oligonucleotide
agagagaugggccaccccg

SEQ ID NO: 701882 - RNA, 19 nt, Artificial Sequence
  Description of Artificial Sequence: Synthetic oligonucleotide
uuucccauccaagagaggc

SEQ ID NO: 701883 - RNA, 19 nt, Artificial Sequence
  Description of Artificial Sequence: Synthetic oligonucleotide
ugaccuugaaccaaucaca

SEQ ID NO: 701884 - RNA, 19 nt, Artificial Sequence
  Description of Artificial Sequence: Synthetic oligonucleotide
ugcgugucauagcaaaugg

SEQ ID NO: 701885 - RNA, 19 nt, Artificial Sequence
  Description of Artificial Sequence: Synthetic oligonucleotide
uguccacacguauagauga

SEQ ID NO: 701886 - RNA, 19 nt, Artificial Sequence
  Description of Artificial Sequence: Synthetic oligonucleotide
ugggucggcacgaaggucg

SEQ ID NO: 701887 - RNA, 19 nt, Artificial Sequence
  Description of Artificial Sequence: Synthetic oligonucleotide
ugaaugggcaccuuaggca

SEQ ID NO: 701888 - RNA, 19 nt, Artificial Sequence
  Description of Artificial Sequence: Synthetic oligonucleotide
uaacuuagcucccacccag

SEQ ID NO: 701889 - RNA, 19 nt, Artificial Sequence
  Description of Artificial Sequence: Synthetic oligonucleotide
cuugcgguccacuagggcc

SEQ ID NO: 701890 - RNA, 19 nt, Artificial Sequence
  Description of Artificial Sequence: Synthetic oligonucleotide
uccacugcgugucauagca

SEQ ID NO: 701891 - RNA, 19 nt, Artificial Sequence
  Description of Artificial Sequence: Synthetic oligonucleotide
aggaccuaggcuaagacuc

SEQ ID NO: 701892 - RNA, 19 nt, Artificial Sequence
  Description of Artificial Sequence: Synthetic oligonucleotide
aucucugaggguauaaaac

SEQ ID NO: 701893 - RNA, 19 nt, Artificial Sequence
  Description of Artificial Sequence: Synthetic oligonucleotide
aauggugcacucaucucac

SEQ ID NO: 701894 - RNA, 19 nt, Artificial Sequence
  Description of Artificial Sequence: Synthetic oligonucleotide
cauguguccacacguauag

SEQ ID NO: 701895 - RNA, 19 nt, Artificial Sequence
  Description of Artificial Sequence: Synthetic oligonucleotide
uuaccuagcaaccucccaa

SEQ ID NO: 701896 - RNA, 19 nt, Artificial Sequence
  Description of Artificial Sequence: Synthetic oligonucleotide
caacaguagaauuuuagga

SEQ ID NO: 701897 - RNA, 19 nt, Artificial Sequence
  Description of Artificial Sequence: Synthetic oligonucleotide
gaccgcgugaccuugauga

SEQ ID NO: 701898 - RNA, 19 nt, Artificial Sequence
  Description of Artificial Sequence: Synthetic oligonucleotide
ucggcguugaccaccaggc

SEQ ID NO: 701899 - RNA, 19 nt, Artificial Sequence
  Description of Artificial Sequence: Synthetic oligonucleotide
uggugggucggcacgaagg

SEQ ID NO: 701900 - RNA, 19 nt, Artificial Sequence
  Description of Artificial Sequence: Synthetic oligonucleotide
aguagcccaagagugaggg

SEQ ID NO: 701901 - RNA, 19 nt, Artificial Sequence
  Description of Artificial Sequence: Synthetic oligonucleotide
aguagaauuuuaggagccc

SEQ ID NO: 701902 - RNA, 19 nt, Artificial Sequence
  Description of Artificial Sequence: Synthetic oligonucleotide
guauagaugacugugucca

SEQ ID NO: 701903 - RNA, 19 nt, Artificial Sequence
  Description of Artificial Sequence: Synthetic oligonucleotide
cuuaguuggugcugggccg

SEQ ID NO: 701904 - RNA, 19 nt, Artificial Sequence
  Description of Artificial Sequence: Synthetic oligonucleotide
uccacuagggccucggggc

SEQ ID NO: 701905 - RNA, 19 nt, Artificial Sequence
  Description of Artificial Sequence: Synthetic oligonucleotide
cacguggugaccccgaagg

SEQ ID NO: 701906 - RNA, 19 nt, Artificial Sequence
  Description of Artificial Sequence: Synthetic oligonucleotide
uggaguuccaccucggggu

SEQ ID NO: 701907 - RNA, 19 nt, Artificial Sequence
  Description of Artificial Sequence: Synthetic oligonucleotide
uuugggacccugacaacag

SEQ ID NO: 701908 - RNA, 19 nt, Artificial Sequence
  Description of Artificial Sequence: Synthetic oligonucleotide
caguagaauuuuaggagcc

SEQ ID NO: 701909 - RNA, 19 nt, Artificial Sequence
  Description of Artificial Sequence: Synthetic oligonucleotide
uaggcuaagacuccacagu

SEQ ID NO: 701910 - RNA, 19 nt, Artificial Sequence
  Description of Artificial Sequence: Synthetic oligonucleotide
cugaaugggcaccuuaggc

SEQ ID NO: 701911 - RNA, 19 nt, Artificial Sequence
  Description of Artificial Sequence: Synthetic oligonucleotide
uucaaaccguggaagagaa

SEQ ID NO: 701912 - RNA, 19 nt, Artificial Sequence
  Description of Artificial Sequence: Synthetic oligonucleotide
cuaggcuaagacuccacag

SEQ ID NO: 701913 - RNA, 19 nt, Artificial Sequence
  Description of Artificial Sequence: Synthetic oligonucleotide
cuucuaaucagggaggguc

SEQ ID NO: 701914 - RNA, 19 nt, Artificial Sequence
  Description of Artificial Sequence: Synthetic oligonucleotide
uggugcacucaucucacag

SEQ ID NO: 701915 - RNA, 19 nt, Artificial Sequence
  Description of Artificial Sequence: Synthetic oligonucleotide
gccguugugacucaggugc

SEQ ID NO: 701916 - RNA, 19 nt, Artificial Sequence
  Description of Artificial Sequence: Synthetic oligonucleotide
uacucuacugccccuuacc

SEQ ID NO: 701917 - RNA, 19 nt, Artificial Sequence
  Description of Artificial Sequence: Synthetic oligonucleotide
cuaagacuccacaguaacc

SEQ ID NO: 701918 - RNA, 19 nt, Artificial Sequence
  Description of Artificial Sequence: Synthetic oligonucleotide
auccaagagaggcccgucc

SEQ ID NO: 701919 - RNA, 19 nt, Artificial Sequence
  Description of Artificial Sequence: Synthetic oligonucleotide
agcggcaccagugagauga

SEQ ID NO: 701920 - RNA, 19 nt, Artificial Sequence
  Description of Artificial Sequence: Synthetic oligonucleotide
ggaauuaacccacaaacaa

SEQ ID NO: 701921 - RNA, 19 nt, Artificial Sequence
  Description of Artificial Sequence: Synthetic oligonucleotide
aaaccguggaagagaaggg

SEQ ID NO: 701922 - RNA, 19 nt, Artificial Sequence
  Description of Artificial Sequence: Synthetic oligonucleotide
cagguuggaauuaacccac

SEQ ID NO: 701923 - RNA, 19 nt, Artificial Sequence
  Description of Artificial Sequence: Synthetic oligonucleotide
gauggucucggccacucgc

SEQ ID NO: 701924 - RNA, 19 nt, Artificial Sequence
  Description of Artificial Sequence: Synthetic oligonucleotide
ccaacaguagaauuuuagg

SEQ ID NO: 701925 - RNA, 19 nt, Artificial Sequence
  Description of Artificial Sequence: Synthetic oligonucleotide
uucuaaucagggagggucu

SEQ ID NO: 701926 - RNA, 19 nt, Artificial Sequence
  Description of Artificial Sequence: Synthetic oligonucleotide
cagccuauacugaaugggc

SEQ ID NO: 701927 - RNA, 19 nt, Artificial Sequence
  Description of Artificial Sequence: Synthetic oligonucleotide
cugaggguauaaaaccagc

SEQ ID NO: 701928 - RNA, 19 nt, Artificial Sequence
  Description of Artificial Sequence: Synthetic oligonucleotide
caaagcugcaugccggccg

SEQ ID NO: 701929 - RNA, 19 nt, Artificial Sequence
  Description of Artificial Sequence: Synthetic oligonucleotide
gucgccgcuaugcagaggc

SEQ ID NO: 701930 - RNA, 19 nt, Artificial Sequence
  Description of Artificial Sequence: Synthetic oligonucleotide
cuccuucuaaucagggagg

SEQ ID NO: 701931 - RNA, 19 nt, Artificial Sequence
  Description of Artificial Sequence: Synthetic oligonucleotide
uucccgaacgaguacagau

SEQ ID NO: 701932 - RNA, 19 nt, Artificial Sequence
  Description of Artificial Sequence: Synthetic oligonucleotide
guagaauuuuaggagcccc

SEQ ID NO: 701933 - RNA, 19 nt, Artificial Sequence
  Description of Artificial Sequence: Synthetic oligonucleotide
caguacguccuccuaagag

SEQ ID NO: 701934 - RNA, 19 nt, Artificial Sequence
  Description of Artificial Sequence: Synthetic oligonucleotide
acacuaacuuagcucccac

SEQ ID NO: 701935 - RNA, 19 nt, Artificial Sequence
  Description of Artificial Sequence: Synthetic oligonucleotide
uccacgcaaagcugcaugc

SEQ ID NO: 701936 - RNA, 19 nt, Artificial Sequence
  Description of Artificial Sequence: Synthetic oligonucleotide
aacccacaaacaaauaaau

SEQ ID NO: 701937 - RNA, 19 nt, Artificial Sequence
  Description of Artificial Sequence: Synthetic oligonucleotide
cacgcaaagcugcaugccg

SEQ ID NO: 701938 - RNA, 19 nt, Artificial Sequence
  Description of Artificial Sequence: Synthetic oligonucleotide
ucccgaacgaguacagaug

SEQ ID NO: 701939 - RNA, 19 nt, Artificial Sequence
  Description of Artificial Sequence: Synthetic oligonucleotide
uagcccaagagugagggac

SEQ ID NO: 701940 - RNA, 19 nt, Artificial Sequence
  Description of Artificial Sequence: Synthetic oligonucleotide
accccguucagccaugaug

SEQ ID NO: 701941 - RNA, 19 nt, Artificial Sequence
  Description of Artificial Sequence: Synthetic oligonucleotide
ucuucccgaacgaguacag

SEQ ID NO: 701942 - RNA, 19 nt, Artificial Sequence
  Description of Artificial Sequence: Synthetic oligonucleotide
gaugaccuugaaccaauca

SEQ ID NO: 701943 - RNA, 19 nt, Artificial Sequence
  Description of Artificial Sequence: Synthetic oligonucleotide
caaguuauggcgagggaga

SEQ ID NO: 701944 - RNA, 19 nt, Artificial Sequence
  Description of Artificial Sequence: Synthetic oligonucleotide
ccuccuucuaaucagggag

SEQ ID NO: 701945 - RNA, 19 nt, Artificial Sequence
  Description of Artificial Sequence: Synthetic oligonucleotide
caggaugucgccgcuaugc

SEQ ID NO: 701946 - RNA, 19 nt, Artificial Sequence
  Description of Artificial Sequence: Synthetic oligonucleotide
aguggcuacucuacugccc

SEQ ID NO: 701947 - RNA, 19 nt, Artificial Sequence
  Description of Artificial Sequence: Synthetic oligonucleotide
guggcuacucuacugcccc

SEQ ID NO: 701948 - RNA, 19 nt, Artificial Sequence
  Description of Artificial Sequence: Synthetic oligonucleotide
acacucccuuagcaggacc

SEQ ID NO: 701949 - RNA, 19 nt, Artificial Sequence
  Description of Artificial Sequence: Synthetic oligonucleotide
uccuaagagacaucccaaa

SEQ ID NO: 701950 - RNA, 19 nt, Artificial Sequence
  Description of Artificial Sequence: Synthetic oligonucleotide
gugcaaguuauggcgaggg

SEQ ID NO: 701951 - RNA, 19 nt, Artificial Sequence
  Description of Artificial Sequence: Synthetic oligonucleotide
gaugucgccgcuaugcaga

SEQ ID NO: 701952 - RNA, 19 nt, Artificial Sequence
  Description of Artificial Sequence: Synthetic oligonucleotide
ugagaugauuggugcaagu

SEQ ID NO: 701953 - RNA, 19 nt, Artificial Sequence
  Description of Artificial Sequence: Synthetic oligonucleotide
acucuacugccccuuaccu

SEQ ID NO: 701954 - RNA, 19 nt, Artificial Sequence
  Description of Artificial Sequence: Synthetic oligonucleotide
aacgaguacagaugaccuu

SEQ ID NO: 701955 - RNA, 19 nt, Artificial Sequence
  Description of Artificial Sequence: Synthetic oligonucleotide
ucgaggaccuaggaccugg

SEQ ID NO: 701956 - RNA, 19 nt, Artificial Sequence
  Description of Artificial Sequence: Synthetic oligonucleotide
aaccguggaagagaaggga

SEQ ID NO: 701957 - RNA, 19 nt, Artificial Sequence
  Description of Artificial Sequence: Synthetic oligonucleotide
uggugcaaguuauggcgag

SEQ ID NO: 701958 - RNA, 19 nt, Artificial Sequence
  Description of Artificial Sequence: Synthetic oligonucleotide
guaacccagaacaggcagg

SEQ ID NO: 701959 - RNA, 19 nt, Artificial Sequence
  Description of Artificial Sequence: Synthetic oligonucleotide
gucggcguugaccaccagg

SEQ ID NO: 701960 - RNA, 19 nt, Artificial Sequence
  Description of Artificial Sequence: Synthetic oligonucleotide
gaccuugaaccaaucacac

SEQ ID NO: 701961 - RNA, 19 nt, Artificial Sequence
  Description of Artificial Sequence: Synthetic oligonucleotide
ggaaaagggcuguccauag

SEQ ID NO: 701962 - RNA, 19 nt, Artificial Sequence
  Description of Artificial Sequence: Synthetic oligonucleotide
caugcagugugcagcugcc

SEQ ID NO: 701963 - RNA, 19 nt, Artificial Sequence
  Description of Artificial Sequence: Synthetic oligonucleotide
acucgcaccggccggcugg

SEQ ID NO: 701964 - RNA, 19 nt, Artificial Sequence
  Description of Artificial Sequence: Synthetic oligonucleotide
gaguggcuacucuacugcc

SEQ ID NO: 701965 - RNA, 19 nt, Artificial Sequence
  Description of Artificial Sequence: Synthetic oligonucleotide
guccacuagggccucgggg

SEQ ID NO: 701966 - RNA, 19 nt, Artificial Sequence
  Description of Artificial Sequence: Synthetic oligonucleotide
uaccuagcaaccucccaac

SEQ ID NO: 701967 - RNA, 19 nt, Artificial Sequence
  Description of Artificial Sequence: Synthetic oligonucleotide
gcaaguuauggcgagggag

SEQ ID NO: 701968 - RNA, 19 nt, Artificial Sequence
  Description of Artificial Sequence: Synthetic oligonucleotide
accagugagaugauuggug

SEQ ID NO: 701969 - RNA, 19 nt, Artificial Sequence
  Description of Artificial Sequence: Synthetic oligonucleotide
agugagaugauuggugcaa

SEQ ID NO: 701970 - RNA, 19 nt, Artificial Sequence
  Description of Artificial Sequence: Synthetic oligonucleotide
gaagacgagcgcgcgcucg

SEQ ID NO: 701971 - RNA, 19 nt, Artificial Sequence
  Description of Artificial Sequence: Synthetic oligonucleotide
ccagugagaugauuggugc

SEQ ID NO: 701972 - RNA, 19 nt, Artificial Sequence
  Description of Artificial Sequence: Synthetic oligonucleotide
ucaaaccguggaagagaag

SEQ ID NO: 701973 - RNA, 19 nt, Artificial Sequence
  Description of Artificial Sequence: Synthetic oligonucleotide
ugcgugauggcgccaugca

SEQ ID NO: 701974 - RNA, 19 nt, Artificial Sequence
  Description of Artificial Sequence: Synthetic oligonucleotide
ggaggacaggccuuagggg

SEQ ID NO: 701975 - RNA, 19 nt, Artificial Sequence
  Description of Artificial Sequence: Synthetic oligonucleotide
ucauagcaaauggugcacu

SEQ ID NO: 701976 - RNA, 19 nt, Artificial Sequence
  Description of Artificial Sequence: Synthetic oligonucleotide
aacuuagcucccacccagg

SEQ ID NO: 701977 - RNA, 19 nt, Artificial Sequence
  Description of Artificial Sequence: Synthetic oligonucleotide
guuagcaggacugcccaug

SEQ ID NO: 701978 - RNA, 19 nt, Artificial Sequence
  Description of Artificial Sequence: Synthetic oligonucleotide
gggaaggcuacauguuugg

SEQ ID NO: 701979 - RNA, 19 nt, Artificial Sequence
  Description of Artificial Sequence: Synthetic oligonucleotide
gaugauuggugcaaguuau

SEQ ID NO: 701980 - RNA, 19 nt, Artificial Sequence
  Description of Artificial Sequence: Synthetic oligonucleotide
ugcaaguuauggcgaggga

SEQ ID NO: 701981 - RNA, 19 nt, Artificial Sequence
  Description of Artificial Sequence: Synthetic oligonucleotide
acgaaggucgaggaccuag

SEQ ID NO: 701982 - RNA, 19 nt, Artificial Sequence
  Description of Artificial Sequence: Synthetic oligonucleotide
caaauggugcacucaucuc

SEQ ID NO: 701983 - RNA, 19 nt, Artificial Sequence
  Description of Artificial Sequence: Synthetic oligonucleotide
aggacagcgcgccggcucg

SEQ ID NO: 701984 - RNA, 19 nt, Artificial Sequence
  Description of Artificial Sequence: Synthetic oligonucleotide
aggcuaagacuccacagua

SEQ ID NO: 701985 - RNA, 19 nt, Artificial Sequence
  Description of Artificial Sequence: Synthetic oligonucleotide
guuauggcgagggagaggu

SEQ ID NO: 701986 - RNA, 19 nt, Artificial Sequence
  Description of Artificial Sequence: Synthetic oligonucleotide
aacuccuugcgguccacua

SEQ ID NO: 701987 - RNA, 19 nt, Artificial Sequence
  Description of Artificial Sequence: Synthetic oligonucleotide
ggcacgaaggucgaggacc

SEQ ID NO: 701988 - RNA, 19 nt, Artificial Sequence
  Description of Artificial Sequence: Synthetic oligonucleotide
gucggcacgaaggucgagg

SEQ ID NO: 701989 - RNA, 19 nt, Artificial Sequence
  Description of Artificial Sequence: Synthetic oligonucleotide
ggcguugaccaccaggccc

SEQ ID NO: 701990 - RNA, 19 nt, Artificial Sequence
  Description of Artificial Sequence: Synthetic oligonucleotide
ucccacgcugcccagggaa

SEQ ID NO: 701991 - RNA, 19 nt, Artificial Sequence
  Description of Artificial Sequence: Synthetic oligonucleotide
uagccccugucugucaagg

SEQ ID NO: 701992 - RNA, 19 nt, Artificial Sequence
  Description of Artificial Sequence: Synthetic oligonucleotide
ucggcacgaaggucgagga

SEQ ID NO: 701993 - RNA, 19 nt, Artificial Sequence
  Description of Artificial Sequence: Synthetic oligonucleotide
ucgagcaccgcccgaccgc

SEQ ID NO: 701994 - RNA, 19 nt, Artificial Sequence
  Description of Artificial Sequence: Synthetic oligonucleotide
uccacacguauagaugacu

SEQ ID NO: 701995 - RNA, 19 nt, Artificial Sequence
  Description of Artificial Sequence: Synthetic oligonucleotide
aguuauggcgagggagagg

SEQ ID NO: 701996 - RNA, 19 nt, Artificial Sequence
  Description of Artificial Sequence: Synthetic oligonucleotide
ugcccaugagccuguguca

SEQ ID NO: 701997 - RNA, 19 nt, Artificial Sequence
  Description of Artificial Sequence: Synthetic oligonucleotide
acgcaaagcugcaugccgg

SEQ ID NO: 701998 - RNA, 19 nt, Artificial Sequence
  Description of Artificial Sequence: Synthetic oligonucleotide
ugcacucaucucacaggug

SEQ ID NO: 701999 - RNA, 19 nt, Artificial Sequence
  Description of Artificial Sequence: Synthetic oligonucleotide
uuaguuggugcugggccga

SEQ ID NO: 702000 - RNA, 19 nt, Artificial Sequence
  Description of Artificial Sequence: Synthetic oligonucleotide
agccccugucugucaaggc

SEQ ID NO: 702001 - RNA, 19 nt, Artificial Sequence
  Description of Artificial Sequence: Synthetic oligonucleotide
cuaaucagggagggucucc

SEQ ID NO: 702002 - RNA, 19 nt, Artificial Sequence
  Description of Artificial Sequence: Synthetic oligonucleotide
cuuugggacccugacaaca

SEQ ID NO: 702003 - RNA, 19 nt, Artificial Sequence
  Description of Artificial Sequence: Synthetic oligonucleotide
accuugaaccaaucacacu

SEQ ID NO: 702004 - RNA, 19 nt, Artificial Sequence
  Description of Artificial Sequence: Synthetic oligonucleotide
uggugaagacgagcgcgcg

SEQ ID NO: 702005 - RNA, 19 nt, Artificial Sequence
  Description of Artificial Sequence: Synthetic oligonucleotide
acccuguuggcuucgcccu

SEQ ID NO: 702006 - RNA, 19 nt, Artificial Sequence
  Description of Artificial Sequence: Synthetic oligonucleotide
cuugaaccaaucacacuaa

SEQ ID NO: 702007 - RNA, 19 nt, Artificial Sequence
  Description of Artificial Sequence: Synthetic oligonucleotide
aucuucccgaacgaguaca

SEQ ID NO: 702008 - RNA, 19 nt, Artificial Sequence
  Description of Artificial Sequence: Synthetic oligonucleotide
gaaggucgaggaccuagga

SEQ ID NO: 702009 - RNA, 19 nt, Artificial Sequence
  Description of Artificial Sequence: Synthetic oligonucleotide
gucauagcaaauggugcac

SEQ ID NO: 702010 - RNA, 19 nt, Artificial Sequence
  Description of Artificial Sequence: Synthetic oligonucleotide
gagguuuggagggugaccu

SEQ ID NO: 702011 - RNA, 19 nt, Artificial Sequence
  Description of Artificial Sequence: Synthetic oligonucleotide
gaacgaguacagaugaccu

SEQ ID NO: 702012 - RNA, 19 nt, Artificial Sequence
  Description of Artificial Sequence: Synthetic oligonucleotide
gauucugaguggcuacucu

SEQ ID NO: 702013 - RNA, 19 nt, Artificial Sequence
  Description of Artificial Sequence: Synthetic oligonucleotide
guuggcuucgcccuuaguu

SEQ ID NO: 702014 - RNA, 19 nt, Artificial Sequence
  Description of Artificial Sequence: Synthetic oligonucleotide
cuucgcccuuaguuggugc

SEQ ID NO: 702015 - RNA, 19 nt, Artificial Sequence
  Description of Artificial Sequence: Synthetic oligonucleotide
aguuccaccucgggguuag

SEQ ID NO: 702016 - RNA, 19 nt, Artificial Sequence
  Description of Artificial Sequence: Synthetic oligonucleotide
gcugcgguaggucuugaug

SEQ ID NO: 702017 - RNA, 19 nt, Artificial Sequence
  Description of Artificial Sequence: Synthetic oligonucleotide
gugagaugauuggugcaag

SEQ ID NO: 702018 - RNA, 19 nt, Artificial Sequence
  Description of Artificial Sequence: Synthetic oligonucleotide
cucgagcaccgcccgaccg

SEQ ID NO: 702019 - RNA, 19 nt, Artificial Sequence
  Description of Artificial Sequence: Synthetic oligonucleotide
aggaugucgccgcuaugca

SEQ ID NO: 702020 - RNA, 19 nt, Artificial Sequence
  Description of Artificial Sequence: Synthetic oligonucleotide
gcaaauggugcacucaucu

SEQ ID NO: 702021 - RNA, 19 nt, Artificial Sequence
  Description of Artificial Sequence: Synthetic oligonucleotide
gcaugcagugugcagcugc

SEQ ID NO: 702022 - RNA, 19 nt, Artificial Sequence
  Description of Artificial Sequence: Synthetic oligonucleotide
acguccuccuaagagacau

SEQ ID NO: 702023 - RNA, 19 nt, Artificial Sequence
  Description of Artificial Sequence: Synthetic oligonucleotide
ccacacguauagaugacug

SEQ ID NO: 702024 - RNA, 19 nt, Artificial Sequence
  Description of Artificial Sequence: Synthetic oligonucleotide
uccgucggcguugaccacc

SEQ ID NO: 702025 - RNA, 19 nt, Artificial Sequence
  Description of Artificial Sequence: Synthetic oligonucleotide
caguagcccaagagugagg

SEQ ID NO: 702026 - RNA, 19 nt, Artificial Sequence
  Description of Artificial Sequence: Synthetic oligonucleotide
ccuagcaaccucccaacag

SEQ ID NO: 702027 - RNA, 19 nt, Artificial Sequence
  Description of Artificial Sequence: Synthetic oligonucleotide
cagaaaggcccaccucagc

SEQ ID NO: 702028 - RNA, 19 nt, Artificial Sequence
  Description of Artificial Sequence: Synthetic oligonucleotide
gagagagaugggccacccc

SEQ ID NO: 702029 - RNA, 19 nt, Artificial Sequence
  Description of Artificial Sequence: Synthetic oligonucleotide
cugcaugccggccggcgcg

SEQ ID NO: 702030 - RNA, 19 nt, Artificial Sequence
  Description of Artificial Sequence: Synthetic oligonucleotide
ucuaaucagggagggucuc

SEQ ID NO: 702031 - RNA, 19 nt, Artificial Sequence
  Description of Artificial Sequence: Synthetic oligonucleotide
gcaaccucccaacaguaga

SEQ ID NO: 702032 - RNA, 19 nt, Artificial Sequence
  Description of Artificial Sequence: Synthetic oligonucleotide
uacguccuccuaagagaca

SEQ ID NO: 702033 - RNA, 19 nt, Artificial Sequence
  Description of Artificial Sequence: Synthetic oligonucleotide
gaugcggaccugcgugaug

SEQ ID NO: 702034 - RNA, 19 nt, Artificial Sequence
  Description of Artificial Sequence: Synthetic oligonucleotide
ggcgaggucggaguggagg

SEQ ID NO: 702035 - RNA, 19 nt, Artificial Sequence
  Description of Artificial Sequence: Synthetic oligonucleotide
gaguggaggcaggugagca

SEQ ID NO: 702036 - RNA, 19 nt, Artificial Sequence
  Description of Artificial Sequence: Synthetic oligonucleotide
cacugcgugucauagcaaa

SEQ ID NO: 702037 - RNA, 19 nt, Artificial Sequence
  Description of Artificial Sequence: Synthetic oligonucleotide
ccaagagugagggacacuc

SEQ ID NO: 702038 - RNA, 19 nt, Artificial Sequence
  Description of Artificial Sequence: Synthetic oligonucleotide
cuacucuacugccccuuac

SEQ ID NO: 702039 - RNA, 19 nt, Artificial Sequence
  Description of Artificial Sequence: Synthetic oligonucleotide
ggaugucgccgcuaugcag

SEQ ID NO: 702040 - RNA, 19 nt, Artificial Sequence
  Description of Artificial Sequence: Synthetic oligonucleotide
gacaucagugguuucccau

SEQ ID NO: 702041 - RNA, 19 nt, Artificial Sequence
  Description of Artificial Sequence: Synthetic oligonucleotide
augucgccgcuaugcagag

SEQ ID NO: 702042 - RNA, 19 nt, Artificial Sequence
  Description of Artificial Sequence: Synthetic oligonucleotide
ugcgaggcguccacgcaaa

SEQ ID NO: 702043 - RNA, 19 nt, Artificial Sequence
  Description of Artificial Sequence: Synthetic oligonucleotide
cuuaccuagcaaccuccca

SEQ ID NO: 702044 - RNA, 19 nt, Artificial Sequence
  Description of Artificial Sequence: Synthetic oligonucleotide
cuccuaagagacaucccaa

SEQ ID NO: 702045 - RNA, 19 nt, Artificial Sequence
  Description of Artificial Sequence: Synthetic oligonucleotide
gcaguagcccaagagugag

SEQ ID NO: 702046 - RNA, 19 nt, Artificial Sequence
  Description of Artificial Sequence: Synthetic oligonucleotide
caaccucccaacaguagaa

SEQ ID NO: 702047 - RNA, 19 nt, Artificial Sequence
  Description of Artificial Sequence: Synthetic oligonucleotide
cagggcaugcagugugcag

SEQ ID NO: 702048 - RNA, 19 nt, Artificial Sequence
  Description of Artificial Sequence: Synthetic oligonucleotide
ccuccuaagagacauccca

SEQ ID NO: 702049 - RNA, 19 nt, Artificial Sequence
  Description of Artificial Sequence: Synthetic oligonucleotide
ccaggcacgcggcacaccg

SEQ ID NO: 702050 - RNA, 19 nt, Artificial Sequence
  Description of Artificial Sequence: Synthetic oligonucleotide
ugggcgaggucggagugga

SEQ ID NO: 702051 - RNA, 19 nt, Artificial Sequence
  Description of Artificial Sequence: Synthetic oligonucleotide
cauucucaaugccuuccca

SEQ ID NO: 702052 - RNA, 19 nt, Artificial Sequence
  Description of Artificial Sequence: Synthetic oligonucleotide
gccgaaaucugcagaagug

SEQ ID NO: 702053 - RNA, 19 nt, Artificial Sequence
  Description of Artificial Sequence: Synthetic oligonucleotide
accuaggcuaagacuccac

SEQ ID NO: 702054 - RNA, 19 nt, Artificial Sequence
  Description of Artificial Sequence: Synthetic oligonucleotide
gaucuugugcagccugucu

SEQ ID NO: 702055 - RNA, 19 nt, Artificial Sequence
  Description of Artificial Sequence: Synthetic oligonucleotide
ucgggguuagcaggacugc

SEQ ID NO: 702056 - RNA, 19 nt, Artificial Sequence
  Description of Artificial Sequence: Synthetic oligonucleotide
aggcgcaggccacaggaau

SEQ ID NO: 702057 - RNA, 19 nt, Artificial Sequence
  Description of Artificial Sequence: Synthetic oligonucleotide
caaucacacuaacuuagcu

SEQ ID NO: 702058 - RNA, 19 nt, Artificial Sequence
  Description of Artificial Sequence: Synthetic oligonucleotide
ggguauaaaaccagccguc

SEQ ID NO: 702059 - RNA, 19 nt, Artificial Sequence
  Description of Artificial Sequence: Synthetic oligonucleotide
cagugagaugauuggugca

SEQ ID NO: 702060 - RNA, 19 nt, Artificial Sequence
  Description of Artificial Sequence: Synthetic oligonucleotide
ggugcaaguuauggcgagg

SEQ ID NO: 702061 - RNA, 19 nt, Artificial Sequence
  Description of Artificial Sequence: Synthetic oligonucleotide
cugcgugauggcgccaugc

SEQ ID NO: 702062 - RNA, 19 nt, Artificial Sequence
  Description of Artificial Sequence: Synthetic oligonucleotide
cccaguacguccuccuaag

SEQ ID NO: 702063 - RNA, 19 nt, Artificial Sequence
  Description of Artificial Sequence: Synthetic oligonucleotide
guuucccauccaagagagg

SEQ ID NO: 702064 - RNA, 19 nt, Artificial Sequence
  Description of Artificial Sequence: Synthetic oligonucleotide
ccguccaccucuugggagg

SEQ ID NO: 702065 - RNA, 19 nt, Artificial Sequence
  Description of Artificial Sequence: Synthetic oligonucleotide
uucccaguacguccuccua

SEQ ID NO: 702066 - RNA, 19 nt, Artificial Sequence
  Description of Artificial Sequence: Synthetic oligonucleotide
agggucgcacguggugacc

SEQ ID NO: 702067 - RNA, 19 nt, Artificial Sequence
  Description of Artificial Sequence: Synthetic oligonucleotide
gcgaggucggaguggaggc

SEQ ID NO: 702068 - RNA, 19 nt, Artificial Sequence
  Description of Artificial Sequence: Synthetic oligonucleotide
gcuacauguuugguuuucc

SEQ ID NO: 702069 - RNA, 19 nt, Artificial Sequence
  Description of Artificial Sequence: Synthetic oligonucleotide
guccacugcgugucauagc

SEQ ID NO: 702070 - RNA, 19 nt, Artificial Sequence
  Description of Artificial Sequence: Synthetic oligonucleotide
gaggaccuaggaccuggga

SEQ ID NO: 702071 - RNA, 19 nt, Artificial Sequence
  Description of Artificial Sequence: Synthetic oligonucleotide
ucgcccuuaguuggugcug

SEQ ID NO: 702072 - RNA, 19 nt, Artificial Sequence
  Description of Artificial Sequence: Synthetic oligonucleotide
ucgcacguggugaccccga

SEQ ID NO: 702073 - RNA, 19 nt, Artificial Sequence
  Description of Artificial Sequence: Synthetic oligonucleotide
uucgggcggggcucugcag

SEQ ID NO: 702074 - RNA, 19 nt, Artificial Sequence
  Description of Artificial Sequence: Synthetic oligonucleotide
cacacuaacuuagcuccca

SEQ ID NO: 702075 - RNA, 19 nt, Artificial Sequence
  Description of Artificial Sequence: Synthetic oligonucleotide
cagggucgcacguggugac

SEQ ID NO: 702076 - RNA, 19 nt, Artificial Sequence
  Description of Artificial Sequence: Synthetic oligonucleotide
guggugggucggcacgaag

SEQ ID NO: 702077 - RNA, 19 nt, Artificial Sequence
  Description of Artificial Sequence: Synthetic oligonucleotide
cugcccaaggagggaagag

SEQ ID NO: 702078 - RNA, 19 nt, Artificial Sequence
  Description of Artificial Sequence: Synthetic oligonucleotide
caccaguagagcacccaga

SEQ ID NO: 702079 - RNA, 19 nt, Artificial Sequence
  Description of Artificial Sequence: Synthetic oligonucleotide
gucgcacguggugaccccg

SEQ ID NO: 702080 - RNA, 19 nt, Artificial Sequence
  Description of Artificial Sequence: Synthetic oligonucleotide
gacacucccuuagcaggac

SEQ ID NO: 702081 - RNA, 19 nt, Artificial Sequence
  Description of Artificial Sequence: Synthetic oligonucleotide
gcgccaugcaggcugaaga

SEQ ID NO: 702082 - RNA, 19 nt, Artificial Sequence
  Description of Artificial Sequence: Synthetic oligonucleotide
ggaccugcgugauggcgcc

SEQ ID NO: 702083 - RNA, 19 nt, Artificial Sequence
  Description of Artificial Sequence: Synthetic oligonucleotide
cguggaagagaagggaccc

SEQ ID NO: 702084 - RNA, 19 nt, Artificial Sequence
  Description of Artificial Sequence: Synthetic oligonucleotide
cacacguauagaugacugu

SEQ ID NO: 702085 - RNA, 19 nt, Artificial Sequence
  Description of Artificial Sequence: Synthetic oligonucleotide
gguauaaaaccagccgucu

SEQ ID NO: 702086 - RNA, 19 nt, Artificial Sequence
  Description of Artificial Sequence: Synthetic oligonucleotide
ucgccgcuaugcagaggcc

SEQ ID NO: 702087 - RNA, 19 nt, Artificial Sequence
  Description of Artificial Sequence: Synthetic oligonucleotide
cccgaacgaguacagauga

SEQ ID NO: 702088 - RNA, 19 nt, Artificial Sequence
  Description of Artificial Sequence: Synthetic oligonucleotide
cucuacugccccuuaccua

SEQ ID NO: 702089 - RNA, 19 nt, Artificial Sequence
  Description of Artificial Sequence: Synthetic oligonucleotide
uggcuacucuacugccccu

SEQ ID NO: 702090 - RNA, 19 nt, Artificial Sequence
  Description of Artificial Sequence: Synthetic oligonucleotide
ugucgccgcuaugcagagg

SEQ ID NO: 702091 - RNA, 19 nt, Artificial Sequence
  Description of Artificial Sequence: Synthetic oligonucleotide
ggaccuaggcuaagacucc

SEQ ID NO: 702092 - RNA, 19 nt, Artificial Sequence
  Description of Artificial Sequence: Synthetic oligonucleotide
guccacacguauagaugac

SEQ ID NO: 702093 - RNA, 19 nt, Artificial Sequence
  Description of Artificial Sequence: Synthetic oligonucleotide
gccccugucugucaaggca

SEQ ID NO: 702094 - RNA, 19 nt, Artificial Sequence
  Description of Artificial Sequence: Synthetic oligonucleotide
ggggccgucccaccaguag

SEQ ID NO: 702095 - RNA, 19 nt, Artificial Sequence
  Description of Artificial Sequence: Synthetic oligonucleotide
agccgucugagggccaaug

SEQ ID NO: 702096 - RNA, 19 nt, Artificial Sequence
  Description of Artificial Sequence: Synthetic oligonucleotide
caccucuugggaggccucc

SEQ ID NO: 702097 - RNA, 19 nt, Artificial Sequence
  Description of Artificial Sequence: Synthetic oligonucleotide
cacucuggguaaggaggag

SEQ ID NO: 702098 - RNA, 19 nt, Artificial Sequence
  Description of Artificial Sequence: Synthetic oligonucleotide
ggcuaggagcugcgguagg

SEQ ID NO: 702099 - RNA, 19 nt, Artificial Sequence
  Description of Artificial Sequence: Synthetic oligonucleotide
ccgcccagaacuccuugcg

SEQ ID NO: 702100 - RNA, 19 nt, Artificial Sequence
  Description of Artificial Sequence: Synthetic oligonucleotide
caggaaucacacucagagu

SEQ ID NO: 702101 - RNA, 19 nt, Artificial Sequence
  Description of Artificial Sequence: Synthetic oligonucleotide
accgcgugaccuugaugaa

SEQ ID NO: 702102 - RNA, 19 nt, Artificial Sequence
  Description of Artificial Sequence: Synthetic oligonucleotide
ggccgaaaucugcagaagu

SEQ ID NO: 702103 - RNA, 19 nt, Artificial Sequence
  Description of Artificial Sequence: Synthetic oligonucleotide
cagcgugccagggucgcac

SEQ ID NO: 702104 - RNA, 19 nt, Artificial Sequence
  Description of Artificial Sequence: Synthetic oligonucleotide
cauccaagagaggcccguc

SEQ ID NO: 702105 - RNA, 19 nt, Artificial Sequence
  Description of Artificial Sequence: Synthetic oligonucleotide
caccucgggguuagcagga

SEQ ID NO: 702106 - RNA, 19 nt, Artificial Sequence
  Description of Artificial Sequence: Synthetic oligonucleotide
agggacccuguuggcuucg

SEQ ID NO: 702107 - RNA, 19 nt, Artificial Sequence
  Description of Artificial Sequence: Synthetic oligonucleotide
caugccggccggcgcgccg

SEQ ID NO: 702108 - RNA, 19 nt, Artificial Sequence
  Description of Artificial Sequence: Synthetic oligonucleotide
guucgggcggggcucugca

SEQ ID NO: 702109 - RNA, 19 nt, Artificial Sequence
  Description of Artificial Sequence: Synthetic oligonucleotide
gaccuaggaccugggaucu

SEQ ID NO: 702110 - RNA, 19 nt, Artificial Sequence
  Description of Artificial Sequence: Synthetic oligonucleotide
cccugacaacagaaaggcc

SEQ ID NO: 702111 - RNA, 19 nt, Artificial Sequence
  Description of Artificial Sequence: Synthetic oligonucleotide
ggccgucccaccaguagag

SEQ ID NO: 702112 - RNA, 19 nt, Artificial Sequence
  Description of Artificial Sequence: Synthetic oligonucleotide
cggaccugcgugauggcgc

SEQ ID NO: 702113 - RNA, 19 nt, Artificial Sequence
  Description of Artificial Sequence: Synthetic oligonucleotide
gccgcagcgugccaggguc

SEQ ID NO: 702114 - RNA, 19 nt, Artificial Sequence
  Description of Artificial Sequence: Synthetic oligonucleotide
accucagccuauacugaau

SEQ ID NO: 702115 - RNA, 19 nt, Artificial Sequence
  Description of Artificial Sequence: Synthetic oligonucleotide
gggcuaggagcugcgguag

SEQ ID NO: 702116 - RNA, 19 nt, Artificial Sequence
  Description of Artificial Sequence: Synthetic oligonucleotide
agguuggaauuaacccaca

SEQ ID NO: 702117 - RNA, 19 nt, Artificial Sequence
  Description of Artificial Sequence: Synthetic oligonucleotide
gcgcaggccacaggaauag

SEQ ID NO: 702118 - RNA, 19 nt, Artificial Sequence
  Description of Artificial Sequence: Synthetic oligonucleotide
gccagggucgcacguggug

SEQ ID NO: 702119 - RNA, 19 nt, Artificial Sequence
  Description of Artificial Sequence: Synthetic oligonucleotide
cccguccaccucuugggag

SEQ ID NO: 702120 - RNA, 19 nt, Artificial Sequence
  Description of Artificial Sequence: Synthetic oligonucleotide
gggucgcacguggugaccc

SEQ ID NO: 702121 - RNA, 19 nt, Artificial Sequence
  Description of Artificial Sequence: Synthetic oligonucleotide
ggcuacauguuugguuuuc

SEQ ID NO: 702122 - RNA, 19 nt, Artificial Sequence
  Description of Artificial Sequence: Synthetic oligonucleotide
cgccaugcaggcugaagag

SEQ ID NO: 702123 - RNA, 19 nt, Artificial Sequence
  Description of Artificial Sequence: Synthetic oligonucleotide
cugcgaggcguccacgcaa

SEQ ID NO: 702124 - RNA, 19 nt, Artificial Sequence
  Description of Artificial Sequence: Synthetic oligonucleotide
guccuagccccugucuguc

SEQ ID NO: 702125 - RNA, 19 nt, Artificial Sequence
  Description of Artificial Sequence: Synthetic oligonucleotide
gagagaugggccaccccgu

SEQ ID NO: 702126 - RNA, 19 nt, Artificial Sequence
  Description of Artificial Sequence: Synthetic oligonucleotide
ggacacucccuuagcagga

SEQ ID NO: 702127 - RNA, 19 nt, Artificial Sequence
  Description of Artificial Sequence: Synthetic oligonucleotide
cgcgugaccuugaugaaga

SEQ ID NO: 702128 - RNA, 19 nt, Artificial Sequence
  Description of Artificial Sequence: Synthetic oligonucleotide
gggccgucccaccaguaga

SEQ ID NO: 702129 - RNA, 19 nt, Artificial Sequence
  Description of Artificial Sequence: Synthetic oligonucleotide
uggcgagggagagguccug

SEQ ID NO: 702130 - RNA, 19 nt, Artificial Sequence
  Description of Artificial Sequence: Synthetic oligonucleotide
accugcgugauggcgccau

SEQ ID NO: 702131 - RNA, 19 nt, Artificial Sequence
  Description of Artificial Sequence: Synthetic oligonucleotide
gaggcccguccaccucuug

SEQ ID NO: 702132 - RNA, 19 nt, Artificial Sequence
  Description of Artificial Sequence: Synthetic oligonucleotide
cuucccgaacgaguacaga

SEQ ID NO: 702133 - RNA, 19 nt, Artificial Sequence
  Description of Artificial Sequence: Synthetic oligonucleotide
gcccuuaguuggugcuggg

SEQ ID NO: 702134 - RNA, 19 nt, Artificial Sequence
  Description of Artificial Sequence: Synthetic oligonucleotide
ggugggucggcacgaaggu

SEQ ID NO: 702135 - RNA, 19 nt, Artificial Sequence
  Description of Artificial Sequence: Synthetic oligonucleotide
ggucgcacguggugacccc

SEQ ID NO: 702136 - RNA, 19 nt, Artificial Sequence
  Description of Artificial Sequence: Synthetic oligonucleotide
ccccacccuacugagggcc

SEQ ID NO: 702137 - RNA, 19 nt, Artificial Sequence
  Description of Artificial Sequence: Synthetic oligonucleotide
ccgaacgaguacagaugac

SEQ ID NO: 702138 - RNA, 19 nt, Artificial Sequence
  Description of Artificial Sequence: Synthetic oligonucleotide
gcgguaggucuugaugaug

SEQ ID NO: 702139 - RNA, 19 nt, Artificial Sequence
  Description of Artificial Sequence: Synthetic oligonucleotide
gcagugugcagcugcccaa

SEQ ID NO: 702140 - RNA, 19 nt, Artificial Sequence
  Description of Artificial Sequence: Synthetic oligonucleotide
ggcgccaugcaggcugaag

SEQ ID NO: 702141 - RNA, 19 nt, Artificial Sequence
  Description of Artificial Sequence: Synthetic oligonucleotide
gucgaggaccuaggaccug

SEQ ID NO: 702142 - RNA, 19 nt, Artificial Sequence
  Description of Artificial Sequence: Synthetic oligonucleotide
agcucuccgucggcguuga

SEQ ID NO: 702143 - RNA, 19 nt, Artificial Sequence
  Description of Artificial Sequence: Synthetic oligonucleotide
gugggucggcacgaagguc

SEQ ID NO: 702144 - RNA, 19 nt, Artificial Sequence
  Description of Artificial Sequence: Synthetic oligonucleotide
ccccgaaggacagcgcgcc

SEQ ID NO: 702145 - RNA, 19 nt, Artificial Sequence
  Description of Artificial Sequence: Synthetic oligonucleotide
ccgucccaccaguagagca

SEQ ID NO: 702146 - RNA, 19 nt, Artificial Sequence
  Description of Artificial Sequence: Synthetic oligonucleotide
ccgcgugaccuugaugaag

SEQ ID NO: 702147 - RNA, 19 nt, Artificial Sequence
  Description of Artificial Sequence: Synthetic oligonucleotide
aguggugggucggcacgaa

SEQ ID NO: 702148 - RNA, 19 nt, Artificial Sequence
  Description of Artificial Sequence: Synthetic oligonucleotide
gcuucgcccuuaguuggug

SEQ ID NO: 702149 - RNA, 19 nt, Artificial Sequence
  Description of Artificial Sequence: Synthetic oligonucleotide
ggggcugcgaggcguccac

SEQ ID NO: 702150 - RNA, 19 nt, Artificial Sequence
  Description of Artificial Sequence: Synthetic oligonucleotide
accggccggcuggugaaga

SEQ ID NO: 702151 - RNA, 19 nt, Artificial Sequence
  Description of Artificial Sequence: Synthetic oligonucleotide
acccuacugagggccccug

SEQ ID NO: 702152 - RNA, 19 nt, Artificial Sequence
  Description of Artificial Sequence: Synthetic oligonucleotide
aggggcugcgaggcgucca

SEQ ID NO: 702153 - RNA, 19 nt, Artificial Sequence
  Description of Artificial Sequence: Synthetic oligonucleotide
cccacccuacugagggccc

SEQ ID NO: 702154 - RNA, 19 nt, Artificial Sequence
  Description of Artificial Sequence: Synthetic oligonucleotide
cacucgcaccggccggcug

SEQ ID NO: 702155 - RNA, 19 nt, Artificial Sequence
  Description of Artificial Sequence: Synthetic oligonucleotide
gccggcgcgccguugugac

SEQ ID NO: 702156 - RNA, 19 nt, Artificial Sequence
  Description of Artificial Sequence: Synthetic oligonucleotide
cgcccuuaguuggugcugg

SEQ ID NO: 702157 - RNA, 19 nt, Artificial Sequence
  Description of Artificial Sequence: Synthetic oligonucleotide
ccggcucgagcaccgcccg

SEQ ID NO: 702158 - RNA, 19 nt, Artificial Sequence
  Description of Artificial Sequence: Synthetic oligonucleotide
gccgcuaugcagaggccca

SEQ ID NO: 702159 - RNA, 19 nt, Artificial Sequence
  Description of Artificial Sequence: Synthetic oligonucleotide
ggcacaccgcccagaacuc

SEQ ID NO: 702160 - RNA, 19 nt, Artificial Sequence
  Description of Artificial Sequence: Synthetic oligonucleotide
gcuacucuacugccccuua

SEQ ID NO: 702161 - RNA, 19 nt, Artificial Sequence
  Description of Artificial Sequence: Synthetic oligonucleotide
ggucgaggaccuaggaccu

SEQ ID NO: 702162 - RNA, 19 nt, Artificial Sequence
  Description of Artificial Sequence: Synthetic oligonucleotide
ccuuagggguggcugugga

SEQ ID NO: 702163 - RNA, 19 nt, Artificial Sequence
  Description of Artificial Sequence: Synthetic oligonucleotide
gcugcccaaggagggaaga

SEQ ID NO: 702164 - RNA, 19 nt, Artificial Sequence
  Description of Artificial Sequence: Synthetic oligonucleotide
cgccgcuaugcagaggccc

SEQ ID NO: 702165 - RNA, 19 nt, Artificial Sequence
  Description of Artificial Sequence: Synthetic oligonucleotide
ccgcagcgugccagggucg

SEQ ID NO: 702166 - RNA, 19 nt, Artificial Sequence
  Description of Artificial Sequence: Synthetic oligonucleotide
cccgaaggacagcgcgccg

SEQ ID NO: 702167 - RNA, 19 nt, Artificial Sequence
  Description of Artificial Sequence: Synthetic oligonucleotide
gcgagggagagguccugaa

SEQ ID NO: 702168 - RNA, 19 nt, Artificial Sequence
  Description of Artificial Sequence: Synthetic oligonucleotide
gcgaggcguccacgcaaag

SEQ ID NO: 702169 - RNA, 19 nt, Artificial Sequence
  Description of Artificial Sequence: Synthetic oligonucleotide
gccacucgcaccggccggc

SEQ ID NO: 702170 - RNA, 19 nt, Artificial Sequence
  Description of Artificial Sequence: Synthetic oligonucleotide
ccggccgcagcgugccagg

SEQ ID NO: 702171 - RNA, 19 nt, Artificial Sequence
  Description of Artificial Sequence: Synthetic oligonucleotide
ggcccaccucagccuauac

SEQ ID NO: 702172 - RNA, 19 nt, Artificial Sequence
  Description of Artificial Sequence: Synthetic oligonucleotide
ccaguacguccuccuaaga

SEQ ID NO: 702173 - RNA, 19 nt, Artificial Sequence
  Description of Artificial Sequence: Synthetic oligonucleotide
cgagcaccgcccgaccgcg

SEQ ID NO: 702174 - RNA, 19 nt, Artificial Sequence
  Description of Artificial Sequence: Synthetic oligonucleotide
ggcgagggagagguccuga

SEQ ID NO: 702175 - RNA, 19 nt, Artificial Sequence
  Description of Artificial Sequence: Synthetic oligonucleotide
gcgugucauagcaaauggu

SEQ ID NO: 702176 - RNA, 19 nt, Artificial Sequence
  Description of Artificial Sequence: Synthetic oligonucleotide
gcccaccucagccuauacu

SEQ ID NO: 702177 - RNA, 19 nt, Artificial Sequence
  Description of Artificial Sequence: Synthetic oligonucleotide
gcuaggagcugcgguaggu

SEQ ID NO: 702178 - RNA, 19 nt, Artificial Sequence
  Description of Artificial Sequence: Synthetic oligonucleotide
gcccguccaccucuuggga

SEQ ID NO: 702179 - RNA, 19 nt, Artificial Sequence
  Description of Artificial Sequence: Synthetic oligonucleotide
cgccguugugacucaggug

SEQ ID NO: 702180 - RNA, 19 nt, Artificial Sequence
  Description of Artificial Sequence: Synthetic oligonucleotide
gcaccggccggcuggugaa

SEQ ID NO: 702181 - RNA, 19 nt, Artificial Sequence
  Description of Artificial Sequence: Synthetic oligonucleotide
caccggccggcuggugaag

SEQ ID NO: 702182 - RNA, 19 nt, Artificial Sequence
  Description of Artificial Sequence: Synthetic oligonucleotide
gccgucccaccaguagagc

SEQ ID NO: 702183 - RNA, 19 nt, Artificial Sequence
  Description of Artificial Sequence: Synthetic oligonucleotide
ccacccuacugagggcccc

SEQ ID NO: 702184 - RNA, 19 nt, Artificial Sequence
  Description of Artificial Sequence: Synthetic oligonucleotide
guuccaccucgggguuagc

SEQ ID NO: 702185 - RNA, 19 nt, Artificial Sequence
  Description of Artificial Sequence: Synthetic oligonucleotide
ggucccuggcccacauguc

SEQ ID NO: 702186 - RNA, 19 nt, Artificial Sequence
  Description of Artificial Sequence: Synthetic oligonucleotide
gcacgaaggucgaggaccu

SEQ ID NO: 702187 - RNA, 19 nt, Artificial Sequence
  Description of Artificial Sequence: Synthetic oligonucleotide
cgcgccggcucgagcaccg

SEQ ID NO: 702188 - RNA, 19 nt, Artificial Sequence
  Description of Artificial Sequence: Synthetic oligonucleotide
ccaccucuugggaggccuc

SEQ ID NO: 702189 - RNA, 19 nt, Artificial Sequence
  Description of Artificial Sequence: Synthetic oligonucleotide
gguuagcaggacugcccau

SEQ ID NO: 702190 - RNA, 19 nt, Artificial Sequence
  Description of Artificial Sequence: Synthetic oligonucleotide
ccggccggcuggugaagac

SEQ ID NO: 702191 - RNA, 19 nt, Artificial Sequence
  Description of Artificial Sequence: Synthetic oligonucleotide
gaccugcgugauggcgcca

SEQ ID NO: 702192 - RNA, 19 nt, Artificial Sequence
  Description of Artificial Sequence: Synthetic oligonucleotide
cggcguugaccaccaggcc

SEQ ID NO: 702193 - RNA, 19 nt, Artificial Sequence
  Description of Artificial Sequence: Synthetic oligonucleotide
ggcacgcggcacaccgccc

SEQ ID NO: 702194 - RNA, 19 nt, Artificial Sequence
  Description of Artificial Sequence: Synthetic oligonucleotide
gcguccacgcaaagcugca

SEQ ID NO: 702195 - RNA, 19 nt, Artificial Sequence
  Description of Artificial Sequence: Synthetic oligonucleotide
ggccaccccguucagccau

SEQ ID NO: 702196 - RNA, 19 nt, Artificial Sequence
  Description of Artificial Sequence: Synthetic oligonucleotide
ccugcgugauggcgccaug

SEQ ID NO: 702197 - RNA, 19 nt, Artificial Sequence
  Description of Artificial Sequence: Synthetic oligonucleotide
accuaggaccugggaucuu

SEQ ID NO: 702198 - RNA, 19 nt, Artificial Sequence
  Description of Artificial Sequence: Synthetic oligonucleotide
ccgucggcguugaccacca

SEQ ID NO: 702199 - RNA, 19 nt, Artificial Sequence
  Description of Artificial Sequence: Synthetic oligonucleotide
ucgcaccggccggcuggug

SEQ ID NO: 702200 - RNA, 19 nt, Artificial Sequence
  Description of Artificial Sequence: Synthetic oligonucleotide
gggucggcacgaaggucga

SEQ ID NO: 702201 - RNA, 19 nt, Artificial Sequence
  Description of Artificial Sequence: Synthetic oligonucleotide
gccccuuaccuagcaaccu

SEQ ID NO: 702202 - RNA, 19 nt, Artificial Sequence
  Description of Artificial Sequence: Synthetic oligonucleotide
cgaccgcgugaccuugaug

SEQ ID NO: 702203 - RNA, 19 nt, Artificial Sequence
  Description of Artificial Sequence: Synthetic oligonucleotide
ccacugcgugucauagcaa

SEQ ID NO: 702204 - RNA, 19 nt, Artificial Sequence
  Description of Artificial Sequence: Synthetic oligonucleotide
gcccgaccgcgugaccuug

SEQ ID NO: 702205 - RNA, 19 nt, Artificial Sequence
  Description of Artificial Sequence: Synthetic oligonucleotide
cggcacgaaggucgaggac

SEQ ID NO: 702206 - RNA, 19 nt, Artificial Sequence
  Description of Artificial Sequence: Synthetic oligonucleotide
gccaccccguucagccaug

SEQ ID NO: 702207 - RNA, 19 nt, Artificial Sequence
  Description of Artificial Sequence: Synthetic oligonucleotide
gcgguccacuagggccucg

SEQ ID NO: 702208 - RNA, 19 nt, Artificial Sequence
  Description of Artificial Sequence: Synthetic oligonucleotide
ggcuacucuacugccccuu

SEQ ID NO: 702209 - RNA, 19 nt, Artificial Sequence
  Description of Artificial Sequence: Synthetic oligonucleotide
ccauccaagagaggcccgu

SEQ ID NO: 702210 - RNA, 19 nt, Artificial Sequence
  Description of Artificial Sequence: Synthetic oligonucleotide
cacccuacugagggccccu

SEQ ID NO: 702211 - RNA, 19 nt, Artificial Sequence
  Description of Artificial Sequence: Synthetic oligonucleotide
ggccggcgcgccguuguga

SEQ ID NO: 702212 - RNA, 19 nt, Artificial Sequence
  Description of Artificial Sequence: Synthetic oligonucleotide
cacgaaggucgaggaccua

SEQ ID NO: 702213 - RNA, 19 nt, Artificial Sequence
  Description of Artificial Sequence: Synthetic oligonucleotide
ggccgcagcgugccagggu

SEQ ID NO: 702214 - RNA, 19 nt, Artificial Sequence
  Description of Artificial Sequence: Synthetic oligonucleotide
gcgugaccuugaugaagau

SEQ ID NO: 702215 - RNA, 19 nt, Artificial Sequence
  Description of Artificial Sequence: Synthetic oligonucleotide
cccgaccgcgugaccuuga

SEQ ID NO: 702216 - RNA, 19 nt, Artificial Sequence
  Description of Artificial Sequence: Synthetic oligonucleotide
cucgcaccggccggcuggu

SEQ ID NO: 702217 - RNA, 19 nt, Artificial Sequence
  Description of Artificial Sequence: Synthetic oligonucleotide
cgcggcacaccgcccagaa

SEQ ID NO: 702218 - RNA, 19 nt, Artificial Sequence
  Description of Artificial Sequence: Synthetic oligonucleotide
cccuacugagggccccugu

SEQ ID NO: 702219 - RNA, 19 nt, Artificial Sequence
  Description of Artificial Sequence: Synthetic oligonucleotide
ccaccccguucagccauga

SEQ ID NO: 702220 - RNA, 19 nt, Artificial Sequence
  Description of Artificial Sequence: Synthetic oligonucleotide
ccgcccgaccgcgugaccu

SEQ ID NO: 702221 - RNA, 19 nt, Artificial Sequence
  Description of Artificial Sequence: Synthetic oligonucleotide
gggguucgggcggggcucu

SEQ ID NO: 702222 - RNA, 19 nt, Artificial Sequence
  Description of Artificial Sequence: Synthetic oligonucleotide
gccggccggcgcgccguug

SEQ ID NO: 702223 - RNA, 19 nt, Artificial Sequence
  Description of Artificial Sequence: Synthetic oligonucleotide
ccgaccgcgugaccuugau

SEQ ID NO: 702224 - RNA, 19 nt, Artificial Sequence
  Description of Artificial Sequence: Synthetic oligonucleotide
cagccgucugagggccaau

SEQ ID NO: 702225 - RNA, 19 nt, Artificial Sequence
  Description of Artificial Sequence: Synthetic oligonucleotide
cccuguuggcuucgcccuu

SEQ ID NO: 702226 - RNA, 19 nt, Artificial Sequence
  Description of Artificial Sequence: Synthetic oligonucleotide
cggcucgagcaccgcccga

SEQ ID NO: 702227 - RNA, 19 nt, Artificial Sequence
  Description of Artificial Sequence: Synthetic oligonucleotide
ccggcgcgccguugugacu

SEQ ID NO: 702228 - RNA, 19 nt, Artificial Sequence
  Description of Artificial Sequence: Synthetic oligonucleotide
cgcccgaccgcgugaccuu

SEQ ID NO: 702229 - RNA, 19 nt, Artificial Sequence
  Description of Artificial Sequence: Synthetic oligonucleotide
gaagcaaauacuuugaggc

SEQ ID NO: 702230 - RNA, 19 nt, Artificial Sequence
  Description of Artificial Sequence: Synthetic oligonucleotide
gacaauucgaaucaggacc

SEQ ID NO: 702231 - RNA, 19 nt, Artificial Sequence
  Description of Artificial Sequence: Synthetic oligonucleotide
agcacaaccacauggaucg

SEQ ID NO: 702232 - RNA, 19 nt, Artificial Sequence
  Description of Artificial Sequence: Synthetic oligonucleotide
cucgacauaguuaugaagg

SEQ ID NO: 702233 - RNA, 19 nt, Artificial Sequence
  Description of Artificial Sequence: Synthetic oligonucleotide
uuuaucuugaaaauggaau

SEQ ID NO: 702234 - RNA, 19 nt, Artificial Sequence
  Description of Artificial Sequence: Synthetic oligonucleotide
uguauuagagacuuucucc

SEQ ID NO: 702235 - RNA, 19 nt, Artificial Sequence
  Description of Artificial Sequence: Synthetic oligonucleotide
uggaggauaaguaauuccc

SEQ ID NO: 702236 - RNA, 19 nt, Artificial Sequence
  Description of Artificial Sequence: Synthetic oligonucleotide
auaguuaugaaggugguag

SEQ ID NO: 702237 - RNA, 19 nt, Artificial Sequence
  Description of Artificial Sequence: Synthetic oligonucleotide
  modified_base (2)..(2): a, c, u, g, unknown or other
gnuccaugaguagagaugg

SEQ ID NO: 702238 - RNA, 19 nt, Artificial Sequence
  Description of Artificial Sequence: Synthetic oligonucleotide
ugauagagauccuugagga

SEQ ID NO: 702239 - RNA, 19 nt, Artificial Sequence
  Description of Artificial Sequence: Synthetic oligonucleotide
aaagguaacagcugcuuca

SEQ ID NO: 702240 - RNA, 19 nt, Artificial Sequence
  Description of Artificial Sequence: Synthetic oligonucleotide
uguagagucguccgggugg

SEQ ID NO: 702241 - RNA, 19 nt, Artificial Sequence
  Description of Artificial Sequence: Synthetic oligonucleotide
auauguauuagagacuuuc

SEQ ID NO: 702242 - RNA, 19 nt, Artificial Sequence
  Description of Artificial Sequence: Synthetic oligonucleotide
uuccaaacgcaccacaugc

SEQ ID NO: 702243 - RNA, 19 nt, Artificial Sequence
  Description of Artificial Sequence: Synthetic oligonucleotide
aauaaguccagaaucugug

SEQ ID NO: 702244 - RNA, 19 nt, Artificial Sequence
  Description of Artificial Sequence: Synthetic oligonucleotide
ucaaccaagauuuccucag

SEQ ID NO: 702245 - RNA, 19 nt, Artificial Sequence
  Description of Artificial Sequence: Synthetic oligonucleotide
uguaaauauuugcucagac

SEQ ID NO: 702246 - RNA, 19 nt, Artificial Sequence
  Description of Artificial Sequence: Synthetic oligonucleotide
gaggauaaguaauucccgg

SEQ ID NO: 702247 - RNA, 19 nt, Artificial Sequence
  Description of Artificial Sequence: Synthetic oligonucleotide
uguguaaauauuugcucag

SEQ ID NO: 702248 - RNA, 19 nt, Artificial Sequence
  Description of Artificial Sequence: Synthetic oligonucleotide
ucaagcaucgaugcaaagg

SEQ ID NO: 702249 - RNA, 19 nt, Artificial Sequence
  Description of Artificial Sequence: Synthetic oligonucleotide
gaaccuggggaucauaugc

SEQ ID NO: 702250 - RNA, 19 nt, Artificial Sequence
  Description of Artificial Sequence: Synthetic oligonucleotide
aaaguccacuaccugagug

SEQ ID NO: 702251 - RNA, 19 nt, Artificial Sequence
  Description of Artificial Sequence: Synthetic oligonucleotide
uuagccacagcaaccaggc

SEQ ID NO: 702252 - RNA, 19 nt, Artificial Sequence
  Description of Artificial Sequence: Synthetic oligonucleotide
uuaucuugaaaauggaaua

SEQ ID NO: 702253 - RNA, 19 nt, Artificial Sequence
  Description of Artificial Sequence: Synthetic oligonucleotide
uggaauaaguccagaaucu

SEQ ID NO: 702254 - RNA, 19 nt, Artificial Sequence
  Description of Artificial Sequence: Synthetic oligonucleotide
gugauagagauccuugagg

SEQ ID NO: 702255 - RNA, 19 nt, Artificial Sequence
  Description of Artificial Sequence: Synthetic oligonucleotide
uacccaucgggaaagagug

SEQ ID NO: 702256 - RNA, 19 nt, Artificial Sequence
  Description of Artificial Sequence: Synthetic oligonucleotide
agaccauguccccuaaugc

SEQ ID NO: 702257 - RNA, 19 nt, Artificial Sequence
  Description of Artificial Sequence: Synthetic oligonucleotide
aguggccacucuuugaaac

SEQ ID NO: 702258 - RNA, 19 nt, Artificial Sequence
  Description of Artificial Sequence: Synthetic oligonucleotide
ugaauugcagauaaauaua

SEQ ID NO: 702259 - RNA, 19 nt, Artificial Sequence
  Description of Artificial Sequence: Synthetic oligonucleotide
aaaugccccggacuacugc

SEQ ID NO: 702260 - RNA, 19 nt, Artificial Sequence
  Description of Artificial Sequence: Synthetic oligonucleotide
uguuugggauuccacagug

SEQ ID NO: 702261 - RNA, 19 nt, Artificial Sequence
  Description of Artificial Sequence: Synthetic oligonucleotide
uguggucaagcaucgaugc

SEQ ID NO: 702262 - RNA, 19 nt, Artificial Sequence
  Description of Artificial Sequence: Synthetic oligonucleotide
ugugucuuuacaucuguac

SEQ ID NO: 702263 - RNA, 19 nt, Artificial Sequence
  Description of Artificial Sequence: Synthetic oligonucleotide
gaauugcagauaaauauac

SEQ ID NO: 702264 - RNA, 19 nt, Artificial Sequence
  Description of Artificial Sequence: Synthetic oligonucleotide
gaaucuuugcaaucaaguc

SEQ ID NO: 702265 - RNA, 19 nt, Artificial Sequence
  Description of Artificial Sequence: Synthetic oligonucleotide
uauguauuagagacuuucu

SEQ ID NO: 702266 - RNA, 19 nt, Artificial Sequence
  Description of Artificial Sequence: Synthetic oligonucleotide
auuuugagaccaugucccc

SEQ ID NO: 702267 - RNA, 19 nt, Artificial Sequence
  Description of Artificial Sequence: Synthetic oligonucleotide
guaauucccggacagcuag

SEQ ID NO: 702268 - RNA, 19 nt, Artificial Sequence
  Description of Artificial Sequence: Synthetic oligonucleotide
uauggaucaaugguucccg

SEQ ID NO: 702269 - RNA, 19 nt, Artificial Sequence
  Description of Artificial Sequence: Synthetic oligonucleotide
uuagagacuuucuccaaca

SEQ ID NO: 702270 - RNA, 19 nt, Artificial Sequence
  Description of Artificial Sequence: Synthetic oligonucleotide
uggggugugacaccuaagc

SEQ ID NO: 702271 - RNA, 19 nt, Artificial Sequence
  Description of Artificial Sequence: Synthetic oligonucleotide
uccccuaaugcucugacaa

SEQ ID NO: 702272 - RNA, 19 nt, Artificial Sequence
  Description of Artificial Sequence: Synthetic oligonucleotide
ucaacugaacagcuccucc

SEQ ID NO: 702273 - RNA, 19 nt, Artificial Sequence
  Description of Artificial Sequence: Synthetic oligonucleotide
agcaucgaugcaaaggagc

SEQ ID NO: 702274 - RNA, 19 nt, Artificial Sequence
  Description of Artificial Sequence: Synthetic oligonucleotide
aaguccacuaccugaguga

SEQ ID NO: 702275 - RNA, 19 nt, Artificial Sequence
  Description of Artificial Sequence: Synthetic oligonucleotide
uccacuaccugagugaugu

SEQ ID NO: 702276 - RNA, 19 nt, Artificial Sequence
  Description of Artificial Sequence: Synthetic oligonucleotide
uuggcuaagcugcuggccc

SEQ ID NO: 702277 - RNA, 19 nt, Artificial Sequence
  Description of Artificial Sequence: Synthetic oligonucleotide
ucaggauauguauuagaga

SEQ ID NO: 702278 - RNA, 19 nt, Artificial Sequence
  Description of Artificial Sequence: Synthetic oligonucleotide
aaagagugcguagggcagc

SEQ ID NO: 702279 - RNA, 19 nt, Artificial Sequence
  Description of Artificial Sequence: Synthetic oligonucleotide
uaugaaccaggucuauagc

SEQ ID NO: 702280 - RNA, 19 nt, Artificial Sequence
  Description of Artificial Sequence: Synthetic oligonucleotide
ugcugauaggagaacuucc

SEQ ID NO: 702281 - RNA, 19 nt, Artificial Sequence
  Description of Artificial Sequence: Synthetic oligonucleotide
gcauacuacaucuugaaca

SEQ ID NO: 702282 - RNA, 19 nt, Artificial Sequence
  Description of Artificial Sequence: Synthetic oligonucleotide
augaaccaggucuauagca

SEQ ID NO: 702283 - RNA, 19 nt, Artificial Sequence
  Description of Artificial Sequence: Synthetic oligonucleotide
aagaauaucuggagaagcu

SEQ ID NO: 702284 - RNA, 19 nt, Artificial Sequence
  Description of Artificial Sequence: Synthetic oligonucleotide
guucccgguauuuugagac

SEQ ID NO: 702285 - RNA, 19 nt, Artificial Sequence
  Description of Artificial Sequence: Synthetic oligonucleotide
gauaaguaauucccggaca

SEQ ID NO: 702286 - RNA, 19 nt, Artificial Sequence
  Description of Artificial Sequence: Synthetic oligonucleotide
agaaucuuugcaaucaagu

SEQ ID NO: 702287 - RNA, 19 nt, Artificial Sequence
  Description of Artificial Sequence: Synthetic oligonucleotide
aucgaugcaaaggagcuag

SEQ ID NO: 702288 - RNA, 19 nt, Artificial Sequence
  Description of Artificial Sequence: Synthetic oligonucleotide
uguguguagcaucuggauc

SEQ ID NO: 702289 - RNA, 19 nt, Artificial Sequence
  Description of Artificial Sequence: Synthetic oligonucleotide
ugacaauucgaaucaggac

SEQ ID NO: 702290 - RNA, 19 nt, Artificial Sequence
  Description of Artificial Sequence: Synthetic oligonucleotide
accaaccccauggacaugc

SEQ ID NO: 702291 - RNA, 19 nt, Artificial Sequence
  Description of Artificial Sequence: Synthetic oligonucleotide
agcucugcgcacuugaaca

SEQ ID NO: 702292 - RNA, 19 nt, Artificial Sequence
  Description of Artificial Sequence: Synthetic oligonucleotide
cauaucacucucuggaauc

SEQ ID NO: 702293 - RNA, 19 nt, Artificial Sequence
  Description of Artificial Sequence: Synthetic oligonucleotide
aaguagagccugguacugc

SEQ ID NO: 702294 - RNA, 19 nt, Artificial Sequence
  Description of Artificial Sequence: Synthetic oligonucleotide
uguugugugguuacauuuc

SEQ ID NO: 702295 - RNA, 19 nt, Artificial Sequence
  Description of Artificial Sequence: Synthetic oligonucleotide
acaccguugggucucauca

SEQ ID NO: 702296 - RNA, 19 nt, Artificial Sequence
  Description of Artificial Sequence: Synthetic oligonucleotide
ucacucgacauaguuauga

SEQ ID NO: 702297 - RNA, 19 nt, Artificial Sequence
  Description of Artificial Sequence: Synthetic oligonucleotide
acucgacauaguuaugaag

SEQ ID NO: 702298 - RNA, 19 nt, Artificial Sequence
  Description of Artificial Sequence: Synthetic oligonucleotide
uguauggaucaaugguucc

SEQ ID NO: 702299 - RNA, 19 nt, Artificial Sequence
  Description of Artificial Sequence: Synthetic oligonucleotide
gccacuaucguauuuggcc

SEQ ID NO: 702300 - RNA, 19 nt, Artificial Sequence
  Description of Artificial Sequence: Synthetic oligonucleotide
caauucggagaucaacugc

SEQ ID NO: 702301 - RNA, 19 nt, Artificial Sequence
  Description of Artificial Sequence: Synthetic oligonucleotide
caagcaucgaugcaaagga

SEQ ID NO: 702302 - RNA, 19 nt, Artificial Sequence
  Description of Artificial Sequence: Synthetic oligonucleotide
uggaucgcagcucugcgca

SEQ ID NO: 702303 - RNA, 19 nt, Artificial Sequence
  Description of Artificial Sequence: Synthetic oligonucleotide
agcgacuaaguucuuccuc

SEQ ID NO: 702304 - RNA, 19 nt, Artificial Sequence
  Description of Artificial Sequence: Synthetic oligonucleotide
auggaucgcagcucugcgc

SEQ ID NO: 702305 - RNA, 19 nt, Artificial Sequence
  Description of Artificial Sequence: Synthetic oligonucleotide
auguauggaucaaugguuc

SEQ ID NO: 702306 - RNA, 19 nt, Artificial Sequence
  Description of Artificial Sequence: Synthetic oligonucleotide
cugaauugcagauaaauau

SEQ ID NO: 702307 - RNA, 19 nt, Artificial Sequence
  Description of Artificial Sequence: Synthetic oligonucleotide
agauguagagucguccggg

SEQ ID NO: 702308 - RNA, 19 nt, Artificial Sequence
  Description of Artificial Sequence: Synthetic oligonucleotide
agaacagccagcaauugca

SEQ ID NO: 702309 - RNA, 19 nt, Artificial Sequence
  Description of Artificial Sequence: Synthetic oligonucleotide
ucgggaaagagugcguagg

SEQ ID NO: 702310 - RNA, 19 nt, Artificial Sequence
  Description of Artificial Sequence: Synthetic oligonucleotide
aggacugcaaaaucacaug

SEQ ID NO: 702311 - RNA, 19 nt, Artificial Sequence
  Description of Artificial Sequence: Synthetic oligonucleotide
aggauaaguaauucccgga

SEQ ID NO: 702312 - RNA, 19 nt, Artificial Sequence
  Description of Artificial Sequence: Synthetic oligonucleotide
gucuuuacaucuguacagg

SEQ ID NO: 702313 - RNA, 19 nt, Artificial Sequence
  Description of Artificial Sequence: Synthetic oligonucleotide
  modified_base (11)..(11): a, c, u, g, unknown or other
guggaaaaggnuccaugag

SEQ ID NO: 702314 - RNA, 19 nt, Artificial Sequence
  Description of Artificial Sequence: Synthetic oligonucleotide
ugacuucaacugaacagcu

SEQ ID NO: 702315 - RNA, 19 nt, Artificial Sequence
  Description of Artificial Sequence: Synthetic oligonucleotide
cuaguggcugguaaacuug

SEQ ID NO: 702316 - RNA, 19 nt, Artificial Sequence
  Description of Artificial Sequence: Synthetic oligonucleotide
ucgacauaguuaugaaggu

SEQ ID NO: 702317 - RNA, 19 nt, Artificial Sequence
  Description of Artificial Sequence: Synthetic oligonucleotide
aaggagcuagcaugggcug

SEQ ID NO: 702318 - RNA, 19 nt, Artificial Sequence
  Description of Artificial Sequence: Synthetic oligonucleotide
gauagagauccuugaggac

SEQ ID NO: 702319 - RNA, 19 nt, Artificial Sequence
  Description of Artificial Sequence: Synthetic oligonucleotide
gacgccggagccaagcugg

SEQ ID NO: 702320 - RNA, 19 nt, Artificial Sequence
  Description of Artificial Sequence: Synthetic oligonucleotide
uagcacaaccacauggauc

SEQ ID NO: 702321 - RNA, 19 nt, Artificial Sequence
  Description of Artificial Sequence: Synthetic oligonucleotide
cuauagcaggaccacaauc

SEQ ID NO: 702322 - RNA, 19 nt, Artificial Sequence
  Description of Artificial Sequence: Synthetic oligonucleotide
cagaaucuuugcaaucaag

SEQ ID NO: 702323 - RNA, 19 nt, Artificial Sequence
  Description of Artificial Sequence: Synthetic oligonucleotide
uuucacuccccgcaggaau

SEQ ID NO: 702324 - RNA, 19 nt, Artificial Sequence
  Description of Artificial Sequence: Synthetic oligonucleotide
acucuuugaaacugccgug

SEQ ID NO: 702325 - RNA, 19 nt, Artificial Sequence
  Description of Artificial Sequence: Synthetic oligonucleotide
ugacccaagaugucucuca

SEQ ID NO: 702326 - RNA, 19 nt, Artificial Sequence
  Description of Artificial Sequence: Synthetic oligonucleotide
aguagagccugguacugcu

SEQ ID NO: 702327 - RNA, 19 nt, Artificial Sequence
  Description of Artificial Sequence: Synthetic oligonucleotide
cugcucuaauuccagcagg

SEQ ID NO: 702328 - RNA, 19 nt, Artificial Sequence
  Description of Artificial Sequence: Synthetic oligonucleotide
cucuuugaaacugccgugc

SEQ ID NO: 702329 - RNA, 19 nt, Artificial Sequence
  Description of Artificial Sequence: Synthetic oligonucleotide
uuugagaccauguccccua

SEQ ID NO: 702330 - RNA, 19 nt, Artificial Sequence
  Description of Artificial Sequence: Synthetic oligonucleotide
cuuugaggccaguucuggg

SEQ ID NO: 702331 - RNA, 19 nt, Artificial Sequence
  Description of Artificial Sequence: Synthetic oligonucleotide
cuguggucaagcaucgaug

SEQ ID NO: 702332 - RNA, 19 nt, Artificial Sequence
  Description of Artificial Sequence: Synthetic oligonucleotide
uauuagagacuuucuccaa

SEQ ID NO: 702333 - RNA, 19 nt, Artificial Sequence
  Description of Artificial Sequence: Synthetic oligonucleotide
ggauaaguaauucccggac

SEQ ID NO: 702334 - RNA, 19 nt, Artificial Sequence
  Description of Artificial Sequence: Synthetic oligonucleotide
aauucccggacagcuagug

SEQ ID NO: 702335 - RNA, 19 nt, Artificial Sequence
  Description of Artificial Sequence: Synthetic oligonucleotide
ggggaucauaugcugauag

SEQ ID NO: 702336 - RNA, 19 nt, Artificial Sequence
  Description of Artificial Sequence: Synthetic oligonucleotide
uggucaagcaucgaugcaa

SEQ ID NO: 702337 - RNA, 19 nt, Artificial Sequence
  Description of Artificial Sequence: Synthetic oligonucleotide
gggugugacaccuaagcug

SEQ ID NO: 702338 - RNA, 19 nt, Artificial Sequence
  Description of Artificial Sequence: Synthetic oligonucleotide
aucuuugccacuaucguau

SEQ ID NO: 702339 - RNA, 19 nt, Artificial Sequence
  Description of Artificial Sequence: Synthetic oligonucleotide
guauggaucaaugguuccc

SEQ ID NO: 702340 - RNA, 19 nt, Artificial Sequence
  Description of Artificial Sequence: Synthetic oligonucleotide
auaugcugauaggagaacu

SEQ ID NO: 702341 - RNA, 19 nt, Artificial Sequence
  Description of Artificial Sequence: Synthetic oligonucleotide
uaguggcugguaaacuuga

SEQ ID NO: 702342 - RNA, 19 nt, Artificial Sequence
  Description of Artificial Sequence: Synthetic oligonucleotide
accuaagcugugucuuuac

SEQ ID NO: 702343 - RNA, 19 nt, Artificial Sequence
  Description of Artificial Sequence: Synthetic oligonucleotide
caucagguuccaaacgcac

SEQ ID NO: 702344 - RNA, 19 nt, Artificial Sequence
  Description of Artificial Sequence: Synthetic oligonucleotide
guucacucgacauaguuau

SEQ ID NO: 702345 - RNA, 19 nt, Artificial Sequence
  Description of Artificial Sequence: Synthetic oligonucleotide
  modified_base (4)..(4): a, c, u, g, unknown or other
aggnuccaugaguagagau

SEQ ID NO: 702346 - RNA, 19 nt, Artificial Sequence
  Description of Artificial Sequence: Synthetic oligonucleotide
acagacgccggagccaagc

SEQ ID NO: 702347 - RNA, 19 nt, Artificial Sequence
  Description of Artificial Sequence: Synthetic oligonucleotide
acuuucauucuggucuccg

SEQ ID NO: 702348 - RNA, 19 nt, Artificial Sequence
  Description of Artificial Sequence: Synthetic oligonucleotide
cauggaucgcagcucugcg

SEQ ID NO: 702349 - RNA, 19 nt, Artificial Sequence
  Description of Artificial Sequence: Synthetic oligonucleotide
aggugauagagauccuuga

SEQ ID NO: 702350 - RNA, 19 nt, Artificial Sequence
  Description of Artificial Sequence: Synthetic oligonucleotide
ggaggauaaguaauucccg

SEQ ID NO: 702351 - RNA, 19 nt, Artificial Sequence
  Description of Artificial Sequence: Synthetic oligonucleotide
aggucuauagcaggaccac

SEQ ID NO: 702352 - RNA, 19 nt, Artificial Sequence
  Description of Artificial Sequence: Synthetic oligonucleotide
aucgggaaagagugcguag

SEQ ID NO: 702353 - RNA, 19 nt, Artificial Sequence
  Description of Artificial Sequence: Synthetic oligonucleotide
ugcaaucaagucacauuuc

SEQ ID NO: 702354 - RNA, 19 nt, Artificial Sequence
  Description of Artificial Sequence: Synthetic oligonucleotide
uuccucaagggcucuugcc

SEQ ID NO: 702355 - RNA, 19 nt, Artificial Sequence
  Description of Artificial Sequence: Synthetic oligonucleotide
gacaucgcucagcaccucc

SEQ ID NO: 702356 - RNA, 19 nt, Artificial Sequence
  Description of Artificial Sequence: Synthetic oligonucleotide
cuucaacacagcgacuaag

SEQ ID NO: 702357 - RNA, 19 nt, Artificial Sequence
  Description of Artificial Sequence: Synthetic oligonucleotide
acuugacccaagaugucuc

SEQ ID NO: 702358 - RNA, 19 nt, Artificial Sequence
  Description of Artificial Sequence: Synthetic oligonucleotide
acuaucguauuuggccaac

SEQ ID NO: 702359 - RNA, 19 nt, Artificial Sequence
  Description of Artificial Sequence: Synthetic oligonucleotide
ugcgcacuugaacaucacu

SEQ ID NO: 702360 - RNA, 19 nt, Artificial Sequence
  Description of Artificial Sequence: Synthetic oligonucleotide
ggagggaacaggaaauucc

SEQ ID NO: 702361 - RNA, 19 nt, Artificial Sequence
  Description of Artificial Sequence: Synthetic oligonucleotide
caggucaaccaagauuucc

SEQ ID NO: 702362 - RNA, 19 nt, Artificial Sequence
  Description of Artificial Sequence: Synthetic oligonucleotide
uggaucuuucacuccccgc

SEQ ID NO: 702363 - RNA, 19 nt, Artificial Sequence
  Description of Artificial Sequence: Synthetic oligonucleotide
acuaccugagugaugugug

SEQ ID NO: 702364 - RNA, 19 nt, Artificial Sequence
  Description of Artificial Sequence: Synthetic oligonucleotide
cauucuggucuccggagug

SEQ ID NO: 702365 - RNA, 19 nt, Artificial Sequence
  Description of Artificial Sequence: Synthetic oligonucleotide
cuggaucuuucacuccccg

SEQ ID NO: 702366 - RNA, 19 nt, Artificial Sequence
  Description of Artificial Sequence: Synthetic oligonucleotide
ugccugaacaccguugggu

SEQ ID NO: 702367 - RNA, 19 nt, Artificial Sequence
  Description of Artificial Sequence: Synthetic oligonucleotide
ggaucuuucacuccccgca

SEQ ID NO: 702368 - RNA, 19 nt, Artificial Sequence
  Description of Artificial Sequence: Synthetic oligonucleotide
ucuacccaucgggaaagag

SEQ ID NO: 702369 - RNA, 19 nt, Artificial Sequence
  Description of Artificial Sequence: Synthetic oligonucleotide
ugguucccgguauuuugag

SEQ ID NO: 702370 - RNA, 19 nt, Artificial Sequence
  Description of Artificial Sequence: Synthetic oligonucleotide
ucccgguauuuugagacca

SEQ ID NO: 702371 - RNA, 19 nt, Artificial Sequence
  Description of Artificial Sequence: Synthetic oligonucleotide
cucggguuggaaccugggg

SEQ ID NO: 702372 - RNA, 19 nt, Artificial Sequence
  Description of Artificial Sequence: Synthetic oligonucleotide
uggcaauucggagaucaac

SEQ ID NO: 702373 - RNA, 19 nt, Artificial Sequence
  Description of Artificial Sequence: Synthetic oligonucleotide
agugauguguguaaauauu

SEQ ID NO: 702374 - RNA, 19 nt, Artificial Sequence
  Description of Artificial Sequence: Synthetic oligonucleotide
aagcaucgaugcaaaggag

SEQ ID NO: 702375 - RNA, 19 nt, Artificial Sequence
  Description of Artificial Sequence: Synthetic oligonucleotide
uucccgguauuuugagacc

SEQ ID NO: 702376 - RNA, 19 nt, Artificial Sequence
  Description of Artificial Sequence: Synthetic oligonucleotide
ugccgugcugucaauuuau

SEQ ID NO: 702377 - RNA, 19 nt, Artificial Sequence
  Description of Artificial Sequence: Synthetic oligonucleotide
gaauaaguccagaaucugu

SEQ ID NO: 702378 - RNA, 19 nt, Artificial Sequence
  Description of Artificial Sequence: Synthetic oligonucleotide
  modified_base (3)..(3): a, c, u, g, unknown or other
ggnuccaugaguagagaug

SEQ ID NO: 702379 - RNA, 19 nt, Artificial Sequence
  Description of Artificial Sequence: Synthetic oligonucleotide
ucguccggguggcaugggg

SEQ ID NO: 702380 - RNA, 19 nt, Artificial Sequence
  Description of Artificial Sequence: Synthetic oligonucleotide
gcaauucggagaucaacug

SEQ ID NO: 702381 - RNA, 19 nt, Artificial Sequence
  Description of Artificial Sequence: Synthetic oligonucleotide
ugcugcuacaaaguccacu

SEQ ID NO: 702382 - RNA, 19 nt, Artificial Sequence
  Description of Artificial Sequence: Synthetic oligonucleotide
uucacucgacauaguuaug

SEQ ID NO: 702383 - RNA, 19 nt, Artificial Sequence
  Description of Artificial Sequence: Synthetic oligonucleotide
aaccuggggaucauaugcu

SEQ ID NO: 702384 - RNA, 19 nt, Artificial Sequence
  Description of Artificial Sequence: Synthetic oligonucleotide
ggcaccauaucacucucug

SEQ ID NO: 702385 - RNA, 19 nt, Artificial Sequence
  Description of Artificial Sequence: Synthetic oligonucleotide
gcuagcaugggcugaagca

SEQ ID NO: 702386 - RNA, 19 nt, Artificial Sequence
  Description of Artificial Sequence: Synthetic oligonucleotide
cuccguugcuuucuggcug

SEQ ID NO: 702387 - RNA, 19 nt, Artificial Sequence
  Description of Artificial Sequence: Synthetic oligonucleotide
gcucugacaauucgaauca

SEQ ID NO: 702388 - RNA, 19 nt, Artificial Sequence
  Description of Artificial Sequence: Synthetic oligonucleotide
  modified_base (5)..(5): a, c, u, g, unknown or other
aaggnuccaugaguagaga

SEQ ID NO: 702389 - RNA, 19 nt, Artificial Sequence
  Description of Artificial Sequence: Synthetic oligonucleotide
cucaugaaccacggggccc

SEQ ID NO: 702390 - RNA, 19 nt, Artificial Sequence
  Description of Artificial Sequence: Synthetic oligonucleotide
ugggcguucacucgacaua

SEQ ID NO: 702391 - RNA, 19 nt, Artificial Sequence
  Description of Artificial Sequence: Synthetic oligonucleotide
uuucggagagcagcugccc

SEQ ID NO: 702392 - RNA, 19 nt, Artificial Sequence
  Description of Artificial Sequence: Synthetic oligonucleotide
uucaacugaacagcuccuc

SEQ ID NO: 702393 - RNA, 19 nt, Artificial Sequence
  Description of Artificial Sequence: Synthetic oligonucleotide
aaaaugccccggacuacug

SEQ ID NO: 702394 - RNA, 19 nt, Artificial Sequence
  Description of Artificial Sequence: Synthetic oligonucleotide
caagcuggggugugacacc

SEQ ID NO: 702395 - RNA, 19 nt, Artificial Sequence
  Description of Artificial Sequence: Synthetic oligonucleotide
aggauauguauuagagacu

SEQ ID NO: 702396 - RNA, 19 nt, Artificial Sequence
  Description of Artificial Sequence: Synthetic oligonucleotide
ggaauaaguccagaaucug

SEQ ID NO: 702397 - RNA, 19 nt, Artificial Sequence
  Description of Artificial Sequence: Synthetic oligonucleotide
uccuggcaccauaucacuc

SEQ ID NO: 702398 - RNA, 19 nt, Artificial Sequence
  Description of Artificial Sequence: Synthetic oligonucleotide
cuccccgcaggaauguaug

SEQ ID NO: 702399 - RNA, 19 nt, Artificial Sequence
  Description of Artificial Sequence: Synthetic oligonucleotide
ucgaugcaaaggagcuagc

SEQ ID NO: 702400 - RNA, 19 nt, Artificial Sequence
  Description of Artificial Sequence: Synthetic oligonucleotide
uaauucccggacagcuagu

SEQ ID NO: 702401 - RNA, 19 nt, Artificial Sequence
  Description of Artificial Sequence: Synthetic oligonucleotide
acugccgugcugucaauuu

SEQ ID NO: 702402 - RNA, 19 nt, Artificial Sequence
  Description of Artificial Sequence: Synthetic oligonucleotide
gagucguccggguggcaug

SEQ ID NO: 702403 - RNA, 19 nt, Artificial Sequence
  Description of Artificial Sequence: Synthetic oligonucleotide
aguggcugguaaacuugac

SEQ ID NO: 702404 - RNA, 19 nt, Artificial Sequence
  Description of Artificial Sequence: Synthetic oligonucleotide
ggucaggauauguauuaga

SEQ ID NO: 702405 - RNA, 19 nt, Artificial Sequence
  Description of Artificial Sequence: Synthetic oligonucleotide
ccaggcauacuacaucuug

SEQ ID NO: 702406 - RNA, 19 nt, Artificial Sequence
  Description of Artificial Sequence: Synthetic oligonucleotide
ggcauacuacaucuugaac

SEQ ID NO: 702407 - RNA, 19 nt, Artificial Sequence
  Description of Artificial Sequence: Synthetic oligonucleotide
agucguccggguggcaugg

SEQ ID NO: 702408 - RNA, 19 nt, Artificial Sequence
  Description of Artificial Sequence: Synthetic oligonucleotide
gcaaucaagucacauuucu

SEQ ID NO: 702409 - RNA, 19 nt, Artificial Sequence
  Description of Artificial Sequence: Synthetic oligonucleotide
cuacccaucgggaaagagu

SEQ ID NO: 702410 - RNA, 19 nt, Artificial Sequence
  Description of Artificial Sequence: Synthetic oligonucleotide
ggagugugcuuaucuuugc

SEQ ID NO: 702411 - RNA, 19 nt, Artificial Sequence
  Description of Artificial Sequence: Synthetic oligonucleotide
gcaccauaucacucucugg

SEQ ID NO: 702412 - RNA, 19 nt, Artificial Sequence
  Description of Artificial Sequence: Synthetic oligonucleotide
cccaucgggaaagagugcg

SEQ ID NO: 702413 - RNA, 19 nt, Artificial Sequence
  Description of Artificial Sequence: Synthetic oligonucleotide
ggaaccuggggaucauaug

SEQ ID NO: 702414 - RNA, 19 nt, Artificial Sequence
  Description of Artificial Sequence: Synthetic oligonucleotide
ccuaaugcucugacaauuc

SEQ ID NO: 702415 - RNA, 19 nt, Artificial Sequence
  Description of Artificial Sequence: Synthetic oligonucleotide
gggcguucacucgacauag

SEQ ID NO: 702416 - RNA, 19 nt, Artificial Sequence
  Description of Artificial Sequence: Synthetic oligonucleotide
ccacucuuugaaacugccg

SEQ ID NO: 702417 - RNA, 19 nt, Artificial Sequence
  Description of Artificial Sequence: Synthetic oligonucleotide
guagagucguccggguggc

SEQ ID NO: 702418 - RNA, 19 nt, Artificial Sequence
  Description of Artificial Sequence: Synthetic oligonucleotide
uugagaccauguccccuaa

SEQ ID NO: 702419 - RNA, 19 nt, Artificial Sequence
  Description of Artificial Sequence: Synthetic oligonucleotide
aguccacuaccugagugau

SEQ ID NO: 702420 - RNA, 19 nt, Artificial Sequence
  Description of Artificial Sequence: Synthetic oligonucleotide
gauguagagucguccgggu

SEQ ID NO: 702421 - RNA, 19 nt, Artificial Sequence
  Description of Artificial Sequence: Synthetic oligonucleotide
cugcuacaaaguccacuac

SEQ ID NO: 702422 - RNA, 19 nt, Artificial Sequence
  Description of Artificial Sequence: Synthetic oligonucleotide
ggaucaaugguucccggua

SEQ ID NO: 702423 - RNA, 19 nt, Artificial Sequence
  Description of Artificial Sequence: Synthetic oligonucleotide
aggacaucgcucagcaccu

SEQ ID NO: 702424 - RNA, 19 nt, Artificial Sequence
  Description of Artificial Sequence: Synthetic oligonucleotide
uaccugagugaugugugua

SEQ ID NO: 702425 - RNA, 19 nt, Artificial Sequence
  Description of Artificial Sequence: Synthetic oligonucleotide
cucaaggacccugcagcag

SEQ ID NO: 702426 - RNA, 19 nt, Artificial Sequence
  Description of Artificial Sequence: Synthetic oligonucleotide
cugccugaacaccguuggg

SEQ ID NO: 702427 - RNA, 19 nt, Artificial Sequence
  Description of Artificial Sequence: Synthetic oligonucleotide
cucugacaauucgaaucag

SEQ ID NO: 702428 - RNA, 19 nt, Artificial Sequence
  Description of Artificial Sequence: Synthetic oligonucleotide
uaguggccacucuuugaaa

SEQ ID NO: 702429 - RNA, 19 nt, Artificial Sequence
  Description of Artificial Sequence: Synthetic oligonucleotide
ugaggacaucgcucagcac

SEQ ID NO: 702430 - RNA, 19 nt, Artificial Sequence
  Description of Artificial Sequence: Synthetic oligonucleotide
ggugugacaccuaagcugu

SEQ ID NO: 702431 - RNA, 19 nt, Artificial Sequence
  Description of Artificial Sequence: Synthetic oligonucleotide
acccaucgggaaagagugc

SEQ ID NO: 702432 - RNA, 19 nt, Artificial Sequence
  Description of Artificial Sequence: Synthetic oligonucleotide
ccacuaucguauuuggcca

SEQ ID NO: 702433 - RNA, 19 nt, Artificial Sequence
  Description of Artificial Sequence: Synthetic oligonucleotide
agguguauggccacagcuu

SEQ ID NO: 702434 - RNA, 19 nt, Artificial Sequence
  Description of Artificial Sequence: Synthetic oligonucleotide
ggucuucuauaaguagagc

SEQ ID NO: 702435 - RNA, 19 nt, Artificial Sequence
  Description of Artificial Sequence: Synthetic oligonucleotide
ccugaauugcagauaaaua

SEQ ID NO: 702436 - RNA, 19 nt, Artificial Sequence
  Description of Artificial Sequence: Synthetic oligonucleotide
ggcaauucggagaucaacu

SEQ ID NO: 702437 - RNA, 19 nt, Artificial Sequence
  Description of Artificial Sequence: Synthetic oligonucleotide
cacucgacauaguuaugaa

SEQ ID NO: 702438 - RNA, 19 nt, Artificial Sequence
  Description of Artificial Sequence: Synthetic oligonucleotide
cuuggaugacagggucagg

SEQ ID NO: 702439 - RNA, 19 nt, Artificial Sequence
  Description of Artificial Sequence: Synthetic oligonucleotide
ccaagauuuccucagggua

SEQ ID NO: 702440 - RNA, 19 nt, Artificial Sequence
  Description of Artificial Sequence: Synthetic oligonucleotide
aacugccgugcugucaauu

SEQ ID NO: 702441 - RNA, 19 nt, Artificial Sequence
  Description of Artificial Sequence: Synthetic oligonucleotide
gcucuacccaucgggaaag

SEQ ID NO: 702442 - RNA, 19 nt, Artificial Sequence
  Description of Artificial Sequence: Synthetic oligonucleotide
gcuacaaaguccacuaccu

SEQ ID NO: 702443 - RNA, 19 nt, Artificial Sequence
  Description of Artificial Sequence: Synthetic oligonucleotide
gacaccuaagcugugucuu

SEQ ID NO: 702444 - RNA, 19 nt, Artificial Sequence
  Description of Artificial Sequence: Synthetic oligonucleotide
caugcucaguguuugggau

SEQ ID NO: 702445 - RNA, 19 nt, Artificial Sequence
  Description of Artificial Sequence: Synthetic oligonucleotide
cauguccccuaaugcucug

SEQ ID NO: 702446 - RNA, 19 nt, Artificial Sequence
  Description of Artificial Sequence: Synthetic oligonucleotide
uccuaugaaccaggucuau

SEQ ID NO: 702447 - RNA, 19 nt, Artificial Sequence
  Description of Artificial Sequence: Synthetic oligonucleotide
acacagacgccggagccaa

SEQ ID NO: 702448 - RNA, 19 nt, Artificial Sequence
  Description of Artificial Sequence: Synthetic oligonucleotide
gggucaggauauguauuag

SEQ ID NO: 702449 - RNA, 19 nt, Artificial Sequence
  Description of Artificial Sequence: Synthetic oligonucleotide
cacuaucguauuuggccaa

SEQ ID NO: 702450 - RNA, 19 nt, Artificial Sequence
  Description of Artificial Sequence: Synthetic oligonucleotide
ccgaagcaguagcacaacc

SEQ ID NO: 702451 - RNA, 19 nt, Artificial Sequence
  Description of Artificial Sequence: Synthetic oligonucleotide
auggacaugcucaguguuu

SEQ ID NO: 702452 - RNA, 19 nt, Artificial Sequence
  Description of Artificial Sequence: Synthetic oligonucleotide
auaucuggagaagcuucuu

SEQ ID NO: 702453 - RNA, 19 nt, Artificial Sequence
  Description of Artificial Sequence: Synthetic oligonucleotide
uaguagcucucuggggaaa

SEQ ID NO: 702454 - RNA, 19 nt, Artificial Sequence
  Description of Artificial Sequence: Synthetic oligonucleotide
guguuugggauuccacagu

SEQ ID NO: 702455 - RNA, 19 nt, Artificial Sequence
  Description of Artificial Sequence: Synthetic oligonucleotide
cucaguguuugggauucca

SEQ ID NO: 702456 - RNA, 19 nt, Artificial Sequence
  Description of Artificial Sequence: Synthetic oligonucleotide
cacaaccacauggaucgca

SEQ ID NO: 702457 - RNA, 19 nt, Artificial Sequence
  Description of Artificial Sequence: Synthetic oligonucleotide
ggacuacugccugaacacc

SEQ ID NO: 702458 - RNA, 19 nt, Artificial Sequence
  Description of Artificial Sequence: Synthetic oligonucleotide
guagcacaaccacauggau

SEQ ID NO: 702459 - RNA, 19 nt, Artificial Sequence
  Description of Artificial Sequence: Synthetic oligonucleotide
aggagcuagcaugggcuga

SEQ ID NO: 702460 - RNA, 19 nt, Artificial Sequence
  Description of Artificial Sequence: Synthetic oligonucleotide
cuaucguauuuggccaaca

SEQ ID NO: 702461 - RNA, 19 nt, Artificial Sequence
  Description of Artificial Sequence: Synthetic oligonucleotide
cucugcgcacuugaacauc

SEQ ID NO: 702462 - RNA, 19 nt, Artificial Sequence
  Description of Artificial Sequence: Synthetic oligonucleotide
caaaaugccccggacuacu

SEQ ID NO: 702463 - RNA, 19 nt, Artificial Sequence
  Description of Artificial Sequence: Synthetic oligonucleotide
gguucccgguauuuugaga

SEQ ID NO: 702464 - RNA, 19 nt, Artificial Sequence
  Description of Artificial Sequence: Synthetic oligonucleotide
cugcgcacuugaacaucac

SEQ ID NO: 702465 - RNA, 19 nt, Artificial Sequence
  Description of Artificial Sequence: Synthetic oligonucleotide
cuguguguagcaucuggau

SEQ ID NO: 702466 - RNA, 19 nt, Artificial Sequence
  Description of Artificial Sequence: Synthetic oligonucleotide
ccuggaggauaaguaauuc

SEQ ID NO: 702467 - RNA, 19 nt, Artificial Sequence
  Description of Artificial Sequence: Synthetic oligonucleotide
ccggacuacugccugaaca

SEQ ID NO: 702468 - RNA, 19 nt, Artificial Sequence
  Description of Artificial Sequence: Synthetic oligonucleotide
gguguauggccacagcuuu

SEQ ID NO: 702469 - RNA, 19 nt, Artificial Sequence
  Description of Artificial Sequence: Synthetic oligonucleotide
gagcuagcaugggcugaag

SEQ ID NO: 702470 - RNA, 19 nt, Artificial Sequence
  Description of Artificial Sequence: Synthetic oligonucleotide
gaacagcuccuccuagcau

SEQ ID NO: 702471 - RNA, 19 nt, Artificial Sequence
  Description of Artificial Sequence: Synthetic oligonucleotide
gcugucaauuuaucuugaa

SEQ ID NO: 702472 - RNA, 19 nt, Artificial Sequence
  Description of Artificial Sequence: Synthetic oligonucleotide
caugcuucagcaggugaua

SEQ ID NO: 702473 - RNA, 19 nt, Artificial Sequence
  Description of Artificial Sequence: Synthetic oligonucleotide
guccuaugaaccaggucua

SEQ ID NO: 702474 - RNA, 19 nt, Artificial Sequence
  Description of Artificial Sequence: Synthetic oligonucleotide
gcaucgaugcaaaggagcu

SEQ ID NO: 702475 - RNA, 19 nt, Artificial Sequence
  Description of Artificial Sequence: Synthetic oligonucleotide
cgacauaguuaugaaggug

SEQ ID NO: 702476 - RNA, 19 nt, Artificial Sequence
  Description of Artificial Sequence: Synthetic oligonucleotide
gcugauaggagaacuuccu

SEQ ID NO: 702477 - RNA, 19 nt, Artificial Sequence
  Description of Artificial Sequence: Synthetic oligonucleotide
aucgcagcucugcgcacuu

SEQ ID NO: 702478 - RNA, 19 nt, Artificial Sequence
  Description of Artificial Sequence: Synthetic oligonucleotide
cacacagacgccggagcca

SEQ ID NO: 702479 - RNA, 19 nt, Artificial Sequence
  Description of Artificial Sequence: Synthetic oligonucleotide
gcuaguggcugguaaacuu

SEQ ID NO: 702480 - RNA, 19 nt, Artificial Sequence
  Description of Artificial Sequence: Synthetic oligonucleotide
ugcuguggucaagcaucga

SEQ ID NO: 702481 - RNA, 19 nt, Artificial Sequence
  Description of Artificial Sequence: Synthetic oligonucleotide
ccuaagcugugucuuuaca

SEQ ID NO: 702482 - RNA, 19 nt, Artificial Sequence
  Description of Artificial Sequence: Synthetic oligonucleotide
cgacuaaguucuuccucag

SEQ ID NO: 702483 - RNA, 19 nt, Artificial Sequence
  Description of Artificial Sequence: Synthetic oligonucleotide
guagagccugguacugcuc

SEQ ID NO: 702484 - RNA, 19 nt, Artificial Sequence
  Description of Artificial Sequence: Synthetic oligonucleotide
gguacacaucugagagaag

SEQ ID NO: 702485 - RNA, 19 nt, Artificial Sequence
  Description of Artificial Sequence: Synthetic oligonucleotide
ggggugugacaccuaagcu

SEQ ID NO: 702486 - RNA, 19 nt, Artificial Sequence
  Description of Artificial Sequence: Synthetic oligonucleotide
gauauguauuagagacuuu

SEQ ID NO: 702487 - RNA, 19 nt, Artificial Sequence
  Description of Artificial Sequence: Synthetic oligonucleotide
guccacuaccugagugaug

SEQ ID NO: 702488 - RNA, 19 nt, Artificial Sequence
  Description of Artificial Sequence: Synthetic oligonucleotide
cuaggcucuguagacuccu

SEQ ID NO: 702489 - RNA, 19 nt, Artificial Sequence
  Description of Artificial Sequence: Synthetic oligonucleotide
uggucuccggagugugcuu

SEQ ID NO: 702490 - RNA, 19 nt, Artificial Sequence
  Description of Artificial Sequence: Synthetic oligonucleotide
caccguugggucucaucaa

SEQ ID NO: 702491 - RNA, 19 nt, Artificial Sequence
  Description of Artificial Sequence: Synthetic oligonucleotide
ggugguaguggccacucuu

SEQ ID NO: 702492 - RNA, 19 nt, Artificial Sequence
  Description of Artificial Sequence: Synthetic oligonucleotide
cugggcguucacucgacau

SEQ ID NO: 702493 - RNA, 19 nt, Artificial Sequence
  Description of Artificial Sequence: Synthetic oligonucleotide
cugccgugcugucaauuua

SEQ ID NO: 702494 - RNA, 19 nt, Artificial Sequence
  Description of Artificial Sequence: Synthetic oligonucleotide
gugcguagggcagcagcuc

SEQ ID NO: 702495 - RNA, 19 nt, Artificial Sequence
  Description of Artificial Sequence: Synthetic oligonucleotide
ucuagguggcuggcuuguu

SEQ ID NO: 702496 - RNA, 19 nt, Artificial Sequence
  Description of Artificial Sequence: Synthetic oligonucleotide
cacagacgccggagccaag

SEQ ID NO: 702497 - RNA, 19 nt, Artificial Sequence
  Description of Artificial Sequence: Synthetic oligonucleotide
cgugcugucaauuuaucuu

SEQ ID NO: 702498 - RNA, 19 nt, Artificial Sequence
  Description of Artificial Sequence: Synthetic oligonucleotide
caucgaugcaaaggagcua

SEQ ID NO: 702499 - RNA, 19 nt, Artificial Sequence
  Description of Artificial Sequence: Synthetic oligonucleotide
gugugacaccuaagcugug

SEQ ID NO: 702500 - RNA, 19 nt, Artificial Sequence
  Description of Artificial Sequence: Synthetic oligonucleotide
cagcgacuaaguucuuccu

SEQ ID NO: 702501 - RNA, 19 nt, Artificial Sequence
  Description of Artificial Sequence: Synthetic oligonucleotide
gccggagccaagcuggggu

SEQ ID NO: 702502 - RNA, 19 nt, Artificial Sequence
  Description of Artificial Sequence: Synthetic oligonucleotide
uagagucguccggguggca

SEQ ID NO: 702503 - RNA, 19 nt, Artificial Sequence
  Description of Artificial Sequence: Synthetic oligonucleotide
ccggagccaagcuggggug

SEQ ID NO: 702504 - RNA, 19 nt, Artificial Sequence
  Description of Artificial Sequence: Synthetic oligonucleotide
ggaucgcagcucugcgcac

SEQ ID NO: 702505 - RNA, 19 nt, Artificial Sequence
  Description of Artificial Sequence: Synthetic oligonucleotide
acgccggagccaagcuggg

SEQ ID NO: 702506 - RNA, 19 nt, Artificial Sequence
  Description of Artificial Sequence: Synthetic oligonucleotide
gcaggaauguauggaucaa

SEQ ID NO: 702507 - RNA, 19 nt, Artificial Sequence
  Description of Artificial Sequence: Synthetic oligonucleotide
gcguucacucgacauaguu

SEQ ID NO: 702508 - RNA, 19 nt, Artificial Sequence
  Description of Artificial Sequence: Synthetic oligonucleotide
gucguccggguggcauggg

SEQ ID NO: 702509 - RNA, 19 nt, Artificial Sequence
  Description of Artificial Sequence: Synthetic oligonucleotide
cagcucggguuggaaccug

SEQ ID NO: 702510 - RNA, 19 nt, Artificial Sequence
  Description of Artificial Sequence: Synthetic oligonucleotide
ccauaucacucucuggaau

SEQ ID NO: 702511 - RNA, 19 nt, Artificial Sequence
  Description of Artificial Sequence: Synthetic oligonucleotide
cgguauuuugagaccaugu

SEQ ID NO: 702512 - RNA, 19 nt, Artificial Sequence
  Description of Artificial Sequence: Synthetic oligonucleotide
ggggacaagaggccagaau

SEQ ID NO: 702513 - RNA, 19 nt, Artificial Sequence
  Description of Artificial Sequence: Synthetic oligonucleotide
cgaugcaaaggagcuagca

SEQ ID NO: 702514 - RNA, 19 nt, Artificial Sequence
  Description of Artificial Sequence: Synthetic oligonucleotide
cucuacccaucgggaaaga

SEQ ID NO: 702515 - RNA, 19 nt, Artificial Sequence
  Description of Artificial Sequence: Synthetic oligonucleotide
ggucuccggagugugcuua

SEQ ID NO: 702516 - RNA, 19 nt, Artificial Sequence
  Description of Artificial Sequence: Synthetic oligonucleotide
gcuuccguucuuggucuuc

SEQ ID NO: 702517 - RNA, 19 nt, Artificial Sequence
  Description of Artificial Sequence: Synthetic oligonucleotide
ccugaacaccguugggucu

SEQ ID NO: 702518 - RNA, 19 nt, Artificial Sequence
  Description of Artificial Sequence: Synthetic oligonucleotide
ccuaugaaccaggucuaua

SEQ ID NO: 702519 - RNA, 19 nt, Artificial Sequence
  Description of Artificial Sequence: Synthetic oligonucleotide
gcucugcgcacuugaacau

SEQ ID NO: 702520 - RNA, 19 nt, Artificial Sequence
  Description of Artificial Sequence: Synthetic oligonucleotide
gucuccggagugugcuuau

SEQ ID NO: 702521 - RNA, 19 nt, Artificial Sequence
  Description of Artificial Sequence: Synthetic oligonucleotide
ccaaacgcaccacaugcuu

SEQ ID NO: 702522 - RNA, 19 nt, Artificial Sequence
  Description of Artificial Sequence: Synthetic oligonucleotide
gcucaguguuugggauucc

SEQ ID NO: 702523 - RNA, 19 nt, Artificial Sequence
  Description of Artificial Sequence: Synthetic oligonucleotide
cccggacagcuaguggcug

SEQ ID NO: 702524 - RNA, 19 nt, Artificial Sequence
  Description of Artificial Sequence: Synthetic oligonucleotide
cccuaaugcucugacaauu

SEQ ID NO: 702525 - RNA, 19 nt, Artificial Sequence
  Description of Artificial Sequence: Synthetic oligonucleotide
ccggagugugcuuaucuuu

SEQ ID NO: 702526 - RNA, 19 nt, Artificial Sequence
  Description of Artificial Sequence: Synthetic oligonucleotide
gccccggacuacugccuga

SEQ ID NO: 702527 - RNA, 19 nt, Artificial Sequence
  Description of Artificial Sequence: Synthetic oligonucleotide
cccggacuacugccugaac

SEQ ID NO: 702528 - RNA, 19 nt, Artificial Sequence
  Description of Artificial Sequence: Synthetic oligonucleotide
cacuccccgcaggaaugua

SEQ ID NO: 702529 - RNA, 19 nt, Artificial Sequence
  Description of Artificial Sequence: Synthetic oligonucleotide
ccccuaaugcucugacaau

SEQ ID NO: 702530 - RNA, 19 nt, Artificial Sequence
  Description of Artificial Sequence: Synthetic oligonucleotide
ccagaaucugugggcagau

SEQ ID NO: 702531 - RNA, 19 nt, Artificial Sequence
  Description of Artificial Sequence: Synthetic oligonucleotide
gcuaagcugcuggcccugu

SEQ ID NO: 702532 - RNA, 19 nt, Artificial Sequence
  Description of Artificial Sequence: Synthetic oligonucleotide
cccgguauuuugagaccau

SEQ ID NO: 702533 - RNA, 19 nt, Artificial Sequence
  Description of Artificial Sequence: Synthetic oligonucleotide
ccccggacuacugccugaa

SEQ ID NO: 702534 - RNA, 19 nt, Artificial Sequence
  Description of Artificial Sequence: Synthetic oligonucleotide
aaaaucuugaaguugagca

SEQ ID NO: 702535 - RNA, 19 nt, Artificial Sequence
  Description of Artificial Sequence: Synthetic oligonucleotide
aaaacuauggguccucccc

SEQ ID NO: 702536 - RNA, 19 nt, Artificial Sequence
  Description of Artificial Sequence: Synthetic oligonucleotide
ugcaaugaaacuacaaugg

SEQ ID NO: 702537 - RNA, 19 nt, Artificial Sequence
  Description of Artificial Sequence: Synthetic oligonucleotide
agaucuuaaaaucguagcc

SEQ ID NO: 702538 - RNA, 19 nt, Artificial Sequence
  Description of Artificial Sequence: Synthetic oligonucleotide
gaugauguauguuagcucc

SEQ ID NO: 702539 - RNA, 19 nt, Artificial Sequence
  Description of Artificial Sequence: Synthetic oligonucleotide
uaaggguaaauucacugcg

SEQ ID NO: 702540 - RNA, 19 nt, Artificial Sequence
  Description of Artificial Sequence: Synthetic oligonucleotide
gaaacuacaaugguguugg

SEQ ID NO: 702541 - RNA, 19 nt, Artificial Sequence
  Description of Artificial Sequence: Synthetic oligonucleotide
aaugaaacuacaauggugu

SEQ ID NO: 702542 - RNA, 19 nt, Artificial Sequence
  Description of Artificial Sequence: Synthetic oligonucleotide
ucugcagcgacuuacaggc

SEQ ID NO: 702543 - RNA, 19 nt, Artificial Sequence
  Description of Artificial Sequence: Synthetic oligonucleotide
aaggcagucaaguucuaac

SEQ ID NO: 702544 - RNA, 19 nt, Artificial Sequence
  Description of Artificial Sequence: Synthetic oligonucleotide
aaugcgcuuggccauaagg

SEQ ID NO: 702545 - RNA, 19 nt, Artificial Sequence
  Description of Artificial Sequence: Synthetic oligonucleotide
aagauuguuagcuucucca

SEQ ID NO: 702546 - RNA, 19 nt, Artificial Sequence
  Description of Artificial Sequence: Synthetic oligonucleotide
uaaagucgagaaaacagcc

SEQ ID NO: 702547 - RNA, 19 nt, Artificial Sequence
  Description of Artificial Sequence: Synthetic oligonucleotide
gaucuguguucuuagaucc

SEQ ID NO: 702548 - RNA, 19 nt, Artificial Sequence
  Description of Artificial Sequence: Synthetic oligonucleotide
auaguuuuguuuccuugcc

SEQ ID NO: 702549 - RNA, 19 nt, Artificial Sequence
  Description of Artificial Sequence: Synthetic oligonucleotide
cuaaagucgagaaaacagc

SEQ ID NO: 702550 - RNA, 19 nt, Artificial Sequence
  Description of Artificial Sequence: Synthetic oligonucleotide
aaauucacugcguugucug

SEQ ID NO: 702551 - RNA, 19 nt, Artificial Sequence
  Description of Artificial Sequence: Synthetic oligonucleotide
aucaucgagucgcauaacc

SEQ ID NO: 702552 - RNA, 19 nt, Artificial Sequence
  Description of Artificial Sequence: Synthetic oligonucleotide
uuugacaggcuuucgagcc

SEQ ID NO: 702553 - RNA, 19 nt, Artificial Sequence
  Description of Artificial Sequence: Synthetic oligonucleotide
agaccuuugcaguuggccc

SEQ ID NO: 702554 - RNA, 19 nt, Artificial Sequence
  Description of Artificial Sequence: Synthetic oligonucleotide
uugcgcuuugccaagauug

SEQ ID NO: 702555 - RNA, 19 nt, Artificial Sequence
  Description of Artificial Sequence: Synthetic oligonucleotide
gaucuuaaaaucguagccc

SEQ ID NO: 702556 - RNA, 19 nt, Artificial Sequence
  Description of Artificial Sequence: Synthetic oligonucleotide
aacgauuguagacucgaug

SEQ ID NO: 702557 - RNA, 19 nt, Artificial Sequence
  Description of Artificial Sequence: Synthetic oligonucleotide
agcaguuccaaggaaaugg

SEQ ID NO: 702558 - RNA, 19 nt, Artificial Sequence
  Description of Artificial Sequence: Synthetic oligonucleotide
acuacaaugguguuggaau

SEQ ID NO: 702559 - RNA, 19 nt, Artificial Sequence
  Description of Artificial Sequence: Synthetic oligonucleotide
aggcagucaaguucuaacc

SEQ ID NO: 702560 - RNA, 19 nt, Artificial Sequence
  Description of Artificial Sequence: Synthetic oligonucleotide
acgauuguagacucgaugu

SEQ ID NO: 702561 - RNA, 19 nt, Artificial Sequence
  Description of Artificial Sequence: Synthetic oligonucleotide
aaucguagcccucugguau

SEQ ID NO: 702562 - RNA, 19 nt, Artificial Sequence
  Description of Artificial Sequence: Synthetic oligonucleotide
aaagccugguccugcggcc

SEQ ID NO: 702563 - RNA, 19 nt, Artificial Sequence
  Description of Artificial Sequence: Synthetic oligonucleotide
aagucgagaaaacagccaa

SEQ ID NO: 702564 - RNA, 19 nt, Artificial Sequence
  Description of Artificial Sequence: Synthetic oligonucleotide
agauccguagcguuuccgc

SEQ ID NO: 702565 - RNA, 19 nt, Artificial Sequence
  Description of Artificial Sequence: Synthetic oligonucleotide
agguuugcagcacauuugg

SEQ ID NO: 702566 - RNA, 19 nt, Artificial Sequence
  Description of Artificial Sequence: Synthetic oligonucleotide
auuguuagcuucuccagcu

SEQ ID NO: 702567 - RNA, 19 nt, Artificial Sequence
  Description of Artificial Sequence: Synthetic oligonucleotide
ucgucaaugagcugaagcu

SEQ ID NO: 702568 - RNA, 19 nt, Artificial Sequence
  Description of Artificial Sequence: Synthetic oligonucleotide
aauucacugcguugucugg

SEQ ID NO: 702569 - RNA, 19 nt, Artificial Sequence
  Description of Artificial Sequence: Synthetic oligonucleotide
uugaccaugagccaccgau

SEQ ID NO: 702570 - RNA, 19 nt, Artificial Sequence
  Description of Artificial Sequence: Synthetic oligonucleotide
aggcuuucgagcccaaggc

SEQ ID NO: 702571 - RNA, 19 nt, Artificial Sequence
  Description of Artificial Sequence: Synthetic oligonucleotide
caugucgauggccacaucc

SEQ ID NO: 702572 - RNA, 19 nt, Artificial Sequence
  Description of Artificial Sequence: Synthetic oligonucleotide
aaacccucuguggagugcc

SEQ ID NO: 702573 - RNA, 19 nt, Artificial Sequence
  Description of Artificial Sequence: Synthetic oligonucleotide
uguguucuuagauccguag

SEQ ID NO: 702574 - RNA, 19 nt, Artificial Sequence
  Description of Artificial Sequence: Synthetic oligonucleotide
ugaaugggcggccucaaca

SEQ ID NO: 702575 - RNA, 19 nt, Artificial Sequence
  Description of Artificial Sequence: Synthetic oligonucleotide
aauccagaaccaguguuuc

SEQ ID NO: 702576 - RNA, 19 nt, Artificial Sequence
  Description of Artificial Sequence: Synthetic oligonucleotide
gauuguuagcuucuccagc

SEQ ID NO: 702577 - RNA, 19 nt, Artificial Sequence
  Description of Artificial Sequence: Synthetic oligonucleotide
agucgcauaaccucggacu

SEQ ID NO: 702578 - RNA, 19 nt, Artificial Sequence
  Description of Artificial Sequence: Synthetic oligonucleotide
ucuccuacuggagacaacc

SEQ ID NO: 702579 - RNA, 19 nt, Artificial Sequence
  Description of Artificial Sequence: Synthetic oligonucleotide
ugaaacuacaaugguguug

SEQ ID NO: 702580 - RNA, 19 nt, Artificial Sequence
  Description of Artificial Sequence: Synthetic oligonucleotide
ccuaaagucgagaaaacag

SEQ ID NO: 702581 - RNA, 19 nt, Artificial Sequence
  Description of Artificial Sequence: Synthetic oligonucleotide
uaacccgaugguaaaguug

SEQ ID NO: 702582 - RNA, 19 nt, Artificial Sequence
  Description of Artificial Sequence: Synthetic oligonucleotide
gauugaaggaggguucagg

SEQ ID NO: 702583 - RNA, 19 nt, Artificial Sequence
  Description of Artificial Sequence: Synthetic oligonucleotide
ugcagcgacuuacaggcag

SEQ ID NO: 702584 - RNA, 19 nt, Artificial Sequence
  Description of Artificial Sequence: Synthetic oligonucleotide
ugaucuguguucuuagauc

SEQ ID NO: 702585 - RNA, 19 nt, Artificial Sequence
  Description of Artificial Sequence: Synthetic oligonucleotide
uuucccguauuugacaggc

SEQ ID NO: 702586 - RNA, 19 nt, Artificial Sequence
  Description of Artificial Sequence: Synthetic oligonucleotide
cucgucaaugagcugaagc

SEQ ID NO: 702587 - RNA, 19 nt, Artificial Sequence
  Description of Artificial Sequence: Synthetic oligonucleotide
ucagauugaaggaggguuc

SEQ ID NO: 702588 - RNA, 19 nt, Artificial Sequence
  Description of Artificial Sequence: Synthetic oligonucleotide
gcgacuuacaggcagacag

SEQ ID NO: 702589 - RNA, 19 nt, Artificial Sequence
  Description of Artificial Sequence: Synthetic oligonucleotide
gauccguagcguuuccgcg

SEQ ID NO: 702590 - RNA, 19 nt, Artificial Sequence
  Description of Artificial Sequence: Synthetic oligonucleotide
ucaucgagucgcauaaccu

SEQ ID NO: 702591 - RNA, 19 nt, Artificial Sequence
  Description of Artificial Sequence: Synthetic oligonucleotide
ucaacgauuguagacucga

SEQ ID NO: 702592 - RNA, 19 nt, Artificial Sequence
  Description of Artificial Sequence: Synthetic oligonucleotide
uuaaaaucguagcccucug

SEQ ID NO: 702593 - RNA, 19 nt, Artificial Sequence
  Description of Artificial Sequence: Synthetic oligonucleotide
ucugacggccaaagcaccg

SEQ ID NO: 702594 - RNA, 19 nt, Artificial Sequence
  Description of Artificial Sequence: Synthetic oligonucleotide
uguauguuagcuccucaau

SEQ ID NO: 702595 - RNA, 19 nt, Artificial Sequence
  Description of Artificial Sequence: Synthetic oligonucleotide
cauuggacauggaagccag

SEQ ID NO: 702596 - RNA, 19 nt, Artificial Sequence
  Description of Artificial Sequence: Synthetic oligonucleotide
guuggaaugugucugcaga

SEQ ID NO: 702597 - RNA, 19 nt, Artificial Sequence
  Description of Artificial Sequence: Synthetic oligonucleotide
uguagacucgauguucugc

SEQ ID NO: 702598 - RNA, 19 nt, Artificial Sequence
  Description of Artificial Sequence: Synthetic oligonucleotide
acugcguugucuggcagcc

SEQ ID NO: 702599 - RNA, 19 nt, Artificial Sequence
  Description of Artificial Sequence: Synthetic oligonucleotide
acauggugaagagaggaag

SEQ ID NO: 702600 - RNA, 19 nt, Artificial Sequence
  Description of Artificial Sequence: Synthetic oligonucleotide
agugccucagauugaagga

SEQ ID NO: 702601 - RNA, 19 nt, Artificial Sequence
  Description of Artificial Sequence: Synthetic oligonucleotide
auucacugcguugucuggc

SEQ ID NO: 702602 - RNA, 19 nt, Artificial Sequence
  Description of Artificial Sequence: Synthetic oligonucleotide
aaugggcggccucaacauc

SEQ ID NO: 702603 - RNA, 19 nt, Artificial Sequence
  Description of Artificial Sequence: Synthetic oligonucleotide
gauuguagacucgauguuc

SEQ ID NO: 702604 - RNA, 19 nt, Artificial Sequence
  Description of Artificial Sequence: Synthetic oligonucleotide
aggaucucugaaugggcgg

SEQ ID NO: 702605 - RNA, 19 nt, Artificial Sequence
  Description of Artificial Sequence: Synthetic oligonucleotide
cacccguagaucuugcagc

SEQ ID NO: 702606 - RNA, 19 nt, Artificial Sequence
  Description of Artificial Sequence: Synthetic oligonucleotide
uguauugcugagaucuuuu

SEQ ID NO: 702607 - RNA, 19 nt, Artificial Sequence
  Description of Artificial Sequence: Synthetic oligonucleotide
uggccauaaggguaaauuc

SEQ ID NO: 702608 - RNA, 19 nt, Artificial Sequence
  Description of Artificial Sequence: Synthetic oligonucleotide
ccaaccacccuauacaggc

SEQ ID NO: 702609 - RNA, 19 nt, Artificial Sequence
  Description of Artificial Sequence: Synthetic oligonucleotide
uaguuuuguuuccuugccu

SEQ ID NO: 702610 - RNA, 19 nt, Artificial Sequence
  Description of Artificial Sequence: Synthetic oligonucleotide
gcagucaaguucuaacccg

SEQ ID NO: 702611 - RNA, 19 nt, Artificial Sequence
  Description of Artificial Sequence: Synthetic oligonucleotide
auccguagcguuuccgcgg

SEQ ID NO: 702612 - RNA, 19 nt, Artificial Sequence
  Description of Artificial Sequence: Synthetic oligonucleotide
auaaccucggacugcugug

SEQ ID NO: 702613 - RNA, 19 nt, Artificial Sequence
  Description of Artificial Sequence: Synthetic oligonucleotide
caucaaagagggacuugcg

SEQ ID NO: 702614 - RNA, 19 nt, Artificial Sequence
  Description of Artificial Sequence: Synthetic oligonucleotide
cugguaagguuuuauaaaa

SEQ ID NO: 702615 - RNA, 19 nt, Artificial Sequence
  Description of Artificial Sequence: Synthetic oligonucleotide
cccuauacaggcucaaugg

SEQ ID NO: 702616 - RNA, 19 nt, Artificial Sequence
  Description of Artificial Sequence: Synthetic oligonucleotide
caucgagucgcauaaccuc

SEQ ID NO: 702617 - RNA, 19 nt, Artificial Sequence
  Description of Artificial Sequence: Synthetic oligonucleotide
agcucaacgauuguagacu

SEQ ID NO: 702618 - RNA, 19 nt, Artificial Sequence
  Description of Artificial Sequence: Synthetic oligonucleotide
uccguagcguuuccgcggg

SEQ ID NO: 702619 - RNA, 19 nt, Artificial Sequence
  Description of Artificial Sequence: Synthetic oligonucleotide
guagacucgauguucugca

SEQ ID NO: 702620 - RNA, 19 nt, Artificial Sequence
  Description of Artificial Sequence: Synthetic oligonucleotide
aucgagucgcauaaccucg

SEQ ID NO: 702621 - RNA, 19 nt, Artificial Sequence
  Description of Artificial Sequence: Synthetic oligonucleotide
ucuaacccgaugguaaagu

SEQ ID NO: 702622 - RNA, 19 nt, Artificial Sequence
  Description of Artificial Sequence: Synthetic oligonucleotide
ucgagucgcauaaccucgg

SEQ ID NO: 702623 - RNA, 19 nt, Artificial Sequence
  Description of Artificial Sequence: Synthetic oligonucleotide
ucuuagauccguagcguuu

SEQ ID NO: 702624 - RNA, 19 nt, Artificial Sequence
  Description of Artificial Sequence: Synthetic oligonucleotide
guauuugacaggcuuucga

SEQ ID NO: 702625 - RNA, 19 nt, Artificial Sequence
  Description of Artificial Sequence: Synthetic oligonucleotide
uccuacuggagacaaccuc

SEQ ID NO: 702626 - RNA, 19 nt, Artificial Sequence
  Description of Artificial Sequence: Synthetic oligonucleotide
ccuacuggagacaaccucc

SEQ ID NO: 702627 - RNA, 19 nt, Artificial Sequence
  Description of Artificial Sequence: Synthetic oligonucleotide
gcaacugaagggcucagag

SEQ ID NO: 702628 - RNA, 19 nt, Artificial Sequence
  Description of Artificial Sequence: Synthetic oligonucleotide
aaaucguagcccucuggua

SEQ ID NO: 702629 - RNA, 19 nt, Artificial Sequence
  Description of Artificial Sequence: Synthetic oligonucleotide
caaagccugguccugcggc

SEQ ID NO: 702630 - RNA, 19 nt, Artificial Sequence
  Description of Artificial Sequence: Synthetic oligonucleotide
caacugaagggcucagagc

SEQ ID NO: 702631 - RNA, 19 nt, Artificial Sequence
  Description of Artificial Sequence: Synthetic oligonucleotide
uuagcuccucaauuucuac

SEQ ID NO: 702632 - RNA, 19 nt, Artificial Sequence
  Description of Artificial Sequence: Synthetic oligonucleotide
uuuccgcgggaucaucgag

SEQ ID NO: 702633 - RNA, 19 nt, Artificial Sequence
  Description of Artificial Sequence: Synthetic oligonucleotide
acagccucguuccccaaag

SEQ ID NO: 702634 - RNA, 19 nt, Artificial Sequence
  Description of Artificial Sequence: Synthetic oligonucleotide
caugguaucugcccggcuc

SEQ ID NO: 702635 - RNA, 19 nt, Artificial Sequence
  Description of Artificial Sequence: Synthetic oligonucleotide
uuguucuagaauccaucau

SEQ ID NO: 702636 - RNA, 19 nt, Artificial Sequence
  Description of Artificial Sequence: Synthetic oligonucleotide
gucgcauaaccucggacug

SEQ ID NO: 702637 - RNA, 19 nt, Artificial Sequence
  Description of Artificial Sequence: Synthetic oligonucleotide
ggauaguuuuguuuccuug

SEQ ID NO: 702638 - RNA, 19 nt, Artificial Sequence
  Description of Artificial Sequence: Synthetic oligonucleotide
gaauccugcucgucaauga

SEQ ID NO: 702639 - RNA, 19 nt, Artificial Sequence
  Description of Artificial Sequence: Synthetic oligonucleotide
uaaccucggacugcugugg

SEQ ID NO: 702640 - RNA, 19 nt, Artificial Sequence
  Description of Artificial Sequence: Synthetic oligonucleotide
cucaacgauuguagacucg

SEQ ID NO: 702641 - RNA, 19 nt, Artificial Sequence
  Description of Artificial Sequence: Synthetic oligonucleotide
cagauugagucaccaguag

SEQ ID NO: 702642 - RNA, 19 nt, Artificial Sequence
  Description of Artificial Sequence: Synthetic oligonucleotide
cagcucaacgauuguagac

SEQ ID NO: 702643 - RNA, 19 nt, Artificial Sequence
  Description of Artificial Sequence: Synthetic oligonucleotide
guagccaaagucagguuug

SEQ ID NO: 702644 - RNA, 19 nt, Artificial Sequence
  Description of Artificial Sequence: Synthetic oligonucleotide
cuauugauguccuguuuga

SEQ ID NO: 702645 - RNA, 19 nt, Artificial Sequence
  Description of Artificial Sequence: Synthetic oligonucleotide
ugcgcuuugccaagauugu

SEQ ID NO: 702646 - RNA, 19 nt, Artificial Sequence
  Description of Artificial Sequence: Synthetic oligonucleotide
ugaauaguuuccuccuguu

SEQ ID NO: 702647 - RNA, 19 nt, Artificial Sequence
  Description of Artificial Sequence: Synthetic oligonucleotide
ggcagucaaguucuaaccc

SEQ ID NO: 702648 - RNA, 19 nt, Artificial Sequence
  Description of Artificial Sequence: Synthetic oligonucleotide
uuagauccguagcguuucc

SEQ ID NO: 702649 - RNA, 19 nt, Artificial Sequence
  Description of Artificial Sequence: Synthetic oligonucleotide
aaggguaaauucacugcgu

SEQ ID NO: 702650 - RNA, 19 nt, Artificial Sequence
  Description of Artificial Sequence: Synthetic oligonucleotide
cuuagauccguagcguuuc

SEQ ID NO: 702651 - RNA, 19 nt, Artificial Sequence
  Description of Artificial Sequence: Synthetic oligonucleotide
uucuaacccgaugguaaag

SEQ ID NO: 702652 - RNA, 19 nt, Artificial Sequence
  Description of Artificial Sequence: Synthetic oligonucleotide
gaucuugcagcccggccac

SEQ ID NO: 702653 - RNA, 19 nt, Artificial Sequence
  Description of Artificial Sequence: Synthetic oligonucleotide
ggaggugacugacuggaag

SEQ ID NO: 702654 - RNA, 19 nt, Artificial Sequence
  Description of Artificial Sequence: Synthetic oligonucleotide
uucugacggcucugcagcg

SEQ ID NO: 702655 - RNA, 19 nt, Artificial Sequence
  Description of Artificial Sequence: Synthetic oligonucleotide
agccucguuccccaaagcu

SEQ ID NO: 702656 - RNA, 19 nt, Artificial Sequence
  Description of Artificial Sequence: Synthetic oligonucleotide
aguguuucaagggccugag

SEQ ID NO: 702657 - RNA, 19 nt, Artificial Sequence
  Description of Artificial Sequence: Synthetic oligonucleotide
ugguauacgugacuuccuu

SEQ ID NO: 702658 - RNA, 19 nt, Artificial Sequence
  Description of Artificial Sequence: Synthetic oligonucleotide
gaccuuugcaguuggccca

SEQ ID NO: 702659 - RNA, 19 nt, Artificial Sequence
  Description of Artificial Sequence: Synthetic oligonucleotide
uucuuagauccguagcguu

SEQ ID NO: 702660 - RNA, 19 nt, Artificial Sequence
  Description of Artificial Sequence: Synthetic oligonucleotide
uagauccguagcguuuccg

SEQ ID NO: 702661 - RNA, 19 nt, Artificial Sequence
  Description of Artificial Sequence: Synthetic oligonucleotide
caacuuggcucugacggcc

SEQ ID NO: 702662 - RNA, 19 nt, Artificial Sequence
  Description of Artificial Sequence: Synthetic oligonucleotide
uuccgcgggaucaucgagu

SEQ ID NO: 702663 - RNA, 19 nt, Artificial Sequence
  Description of Artificial Sequence: Synthetic oligonucleotide
aggguaaauucacugcguu

SEQ ID NO: 702664 - RNA, 19 nt, Artificial Sequence
  Description of Artificial Sequence: Synthetic oligonucleotide
ggcccagaucuuaaaaucg

SEQ ID NO: 702665 - RNA, 19 nt, Artificial Sequence
  Description of Artificial Sequence: Synthetic oligonucleotide
uccccuugcugccaaaguu

SEQ ID NO: 702666 - RNA, 19 nt, Artificial Sequence
  Description of Artificial Sequence: Synthetic oligonucleotide
guauugcugagaucuuuuc

SEQ ID NO: 702667 - RNA, 19 nt, Artificial Sequence
  Description of Artificial Sequence: Synthetic oligonucleotide
cuugccucacucucaagga

SEQ ID NO: 702668 - RNA, 19 nt, Artificial Sequence
  Description of Artificial Sequence: Synthetic oligonucleotide
uggcagauugagucaccag

SEQ ID NO: 702669 - RNA, 19 nt, Artificial Sequence
  Description of Artificial Sequence: Synthetic oligonucleotide
gacauggaagccaguuuug

SEQ ID NO: 702670 - RNA, 19 nt, Artificial Sequence
  Description of Artificial Sequence: Synthetic oligonucleotide
cucugacggccaaagcacc

SEQ ID NO: 702671 - RNA, 19 nt, Artificial Sequence
  Description of Artificial Sequence: Synthetic oligonucleotide
ugacggccaaagcaccggc

SEQ ID NO: 702672 - RNA, 19 nt, Artificial Sequence
  Description of Artificial Sequence: Synthetic oligonucleotide
uagcguuuccgcgggauca

SEQ ID NO: 702673 - RNA, 19 nt, Artificial Sequence
  Description of Artificial Sequence: Synthetic oligonucleotide
caaggcgaagccuccucag

SEQ ID NO: 702674 - RNA, 19 nt, Artificial Sequence
  Description of Artificial Sequence: Synthetic oligonucleotide
gagucgcauaaccucggac

SEQ ID NO: 702675 - RNA, 19 nt, Artificial Sequence
  Description of Artificial Sequence: Synthetic oligonucleotide
uuguagacucgauguucug

SEQ ID NO: 702676 - RNA, 19 nt, Artificial Sequence
  Description of Artificial Sequence: Synthetic oligonucleotide
gacaaggguggggaaucgg

SEQ ID NO: 702677 - RNA, 19 nt, Artificial Sequence
  Description of Artificial Sequence: Synthetic oligonucleotide
ccuauacaggcucaauggc

SEQ ID NO: 702678 - RNA, 19 nt, Artificial Sequence
  Description of Artificial Sequence: Synthetic oligonucleotide
ugcuguaauugggaggaaa

SEQ ID NO: 702679 - RNA, 19 nt, Artificial Sequence
  Description of Artificial Sequence: Synthetic oligonucleotide
uucccgacgguuccucugu

SEQ ID NO: 702680 - RNA, 19 nt, Artificial Sequence
  Description of Artificial Sequence: Synthetic oligonucleotide
gguaaauucacugcguugu

SEQ ID NO: 702681 - RNA, 19 nt, Artificial Sequence
  Description of Artificial Sequence: Synthetic oligonucleotide
caugagccaccgauuggag

SEQ ID NO: 702682 - RNA, 19 nt, Artificial Sequence
  Description of Artificial Sequence: Synthetic oligonucleotide
caccgauuggaggugacug

SEQ ID NO: 702683 - RNA, 19 nt, Artificial Sequence
  Description of Artificial Sequence: Synthetic oligonucleotide
accgauuggaggugacuga

SEQ ID NO: 702684 - RNA, 19 nt, Artificial Sequence
  Description of Artificial Sequence: Synthetic oligonucleotide
ccuuucccguauuugacag

SEQ ID NO: 702685 - RNA, 19 nt, Artificial Sequence
  Description of Artificial Sequence: Synthetic oligonucleotide
ggguaaauucacugcguug

SEQ ID NO: 702686 - RNA, 19 nt, Artificial Sequence
  Description of Artificial Sequence: Synthetic oligonucleotide
uccgaucccggcaggacau

SEQ ID NO: 702687 - RNA, 19 nt, Artificial Sequence
  Description of Artificial Sequence: Synthetic oligonucleotide
ugcugccaaaguuaccuuu

SEQ ID NO: 702688 - RNA, 19 nt, Artificial Sequence
  Description of Artificial Sequence: Synthetic oligonucleotide
gaaggaggguucaggcaag

SEQ ID NO: 702689 - RNA, 19 nt, Artificial Sequence
  Description of Artificial Sequence: Synthetic oligonucleotide
gacacugguguccgggaga

SEQ ID NO: 702690 - RNA, 19 nt, Artificial Sequence
  Description of Artificial Sequence: Synthetic oligonucleotide
uugagagacccagguagac

SEQ ID NO: 702691 - RNA, 19 nt, Artificial Sequence
  Description of Artificial Sequence: Synthetic oligonucleotide
uauugauguccuguuugau

SEQ ID NO: 702692 - RNA, 19 nt, Artificial Sequence
  Description of Artificial Sequence: Synthetic oligonucleotide
cacugcguugucuggcagc

SEQ ID NO: 702693 - RNA, 19 nt, Artificial Sequence
  Description of Artificial Sequence: Synthetic oligonucleotide
cagucaaguucuaacccga

SEQ ID NO: 702694 - RNA, 19 nt, Artificial Sequence
  Description of Artificial Sequence: Synthetic oligonucleotide
aaccucggacugcugugga

SEQ ID NO: 702695 - RNA, 19 nt, Artificial Sequence
  Description of Artificial Sequence: Synthetic oligonucleotide
ugacaggcuuucgagccca

SEQ ID NO: 702696 - RNA, 19 nt, Artificial Sequence
  Description of Artificial Sequence: Synthetic oligonucleotide
uggagugccucagauugaa

SEQ ID NO: 702697 - RNA, 19 nt, Artificial Sequence
  Description of Artificial Sequence: Synthetic oligonucleotide
uccgcgggaucaucgaguc

SEQ ID NO: 702698 - RNA, 19 nt, Artificial Sequence
  Description of Artificial Sequence: Synthetic oligonucleotide
uagcaguuccaaggaaaug

SEQ ID NO: 702699 - RNA, 19 nt, Artificial Sequence
  Description of Artificial Sequence: Synthetic oligonucleotide
auguccuguuugaugaugu

SEQ ID NO: 702700 - RNA, 19 nt, Artificial Sequence
  Description of Artificial Sequence: Synthetic oligonucleotide
accggcuggggcccuaaag

SEQ ID NO: 702701 - RNA, 19 nt, Artificial Sequence
  Description of Artificial Sequence: Synthetic oligonucleotide
augaaacuacaaugguguu

SEQ ID NO: 702702 - RNA, 19 nt, Artificial Sequence
  Description of Artificial Sequence: Synthetic oligonucleotide
guugucuggcagcccguag

SEQ ID NO: 702703 - RNA, 19 nt, Artificial Sequence
  Description of Artificial Sequence: Synthetic oligonucleotide
gcuguaauugggaggaaac

SEQ ID NO: 702704 - RNA, 19 nt, Artificial Sequence
  Description of Artificial Sequence: Synthetic oligonucleotide
ugcucgucaaugagcugaa

SEQ ID NO: 702705 - RNA, 19 nt, Artificial Sequence
  Description of Artificial Sequence: Synthetic oligonucleotide
ugcaugguaucugcccggc

SEQ ID NO: 702706 - RNA, 19 nt, Artificial Sequence
  Description of Artificial Sequence: Synthetic oligonucleotide
ccucuguuguuucagguuc

SEQ ID NO: 702707 - RNA, 19 nt, Artificial Sequence
  Description of Artificial Sequence: Synthetic oligonucleotide
ggccauaaggguaaauuca

SEQ ID NO: 702708 - RNA, 19 nt, Artificial Sequence
  Description of Artificial Sequence: Synthetic oligonucleotide
aaaauggagcccagcucaa

SEQ ID NO: 702709 - RNA, 19 nt, Artificial Sequence
  Description of Artificial Sequence: Synthetic oligonucleotide
cugacggccaaagcaccgg

SEQ ID NO: 702710 - RNA, 19 nt, Artificial Sequence
  Description of Artificial Sequence: Synthetic oligonucleotide
aucaugucgauggccacau

SEQ ID NO: 702711 - RNA, 19 nt, Artificial Sequence
  Description of Artificial Sequence: Synthetic oligonucleotide
auccagaaccaguguuuca

SEQ ID NO: 702712 - RNA, 19 nt, Artificial Sequence
  Description of Artificial Sequence: Synthetic oligonucleotide
ggcccuaaagucgagaaaa

SEQ ID NO: 702713 - RNA, 19 nt, Artificial Sequence
  Description of Artificial Sequence: Synthetic oligonucleotide
ccccucaacuagcaaaucc

SEQ ID NO: 702714 - RNA, 19 nt, Artificial Sequence
  Description of Artificial Sequence: Synthetic oligonucleotide
gccauaaggguaaauucac

SEQ ID NO: 702715 - RNA, 19 nt, Artificial Sequence
  Description of Artificial Sequence: Synthetic oligonucleotide
caacauccagcugggcucc

SEQ ID NO: 702716 - RNA, 19 nt, Artificial Sequence
  Description of Artificial Sequence: Synthetic oligonucleotide
uuaucuccccuugcugcca

SEQ ID NO: 702717 - RNA, 19 nt, Artificial Sequence
  Description of Artificial Sequence: Synthetic oligonucleotide
uuguuagcuucuccagcuu

SEQ ID NO: 702718 - RNA, 19 nt, Artificial Sequence
  Description of Artificial Sequence: Synthetic oligonucleotide
cauaaccucggacugcugu

SEQ ID NO: 702719 - RNA, 19 nt, Artificial Sequence
  Description of Artificial Sequence: Synthetic oligonucleotide
ucucugaaugggcggccuc

SEQ ID NO: 702720 - RNA, 19 nt, Artificial Sequence
  Description of Artificial Sequence: Synthetic oligonucleotide
cugacggcucugcagcgac

SEQ ID NO: 702721 - RNA, 19 nt, Artificial Sequence
  Description of Artificial Sequence: Synthetic oligonucleotide
accucggacugcuguggag

SEQ ID NO: 702722 - RNA, 19 nt, Artificial Sequence
  Description of Artificial Sequence: Synthetic oligonucleotide
aggcugguaagguuuuaua

SEQ ID NO: 702723 - RNA, 19 nt, Artificial Sequence
  Description of Artificial Sequence: Synthetic oligonucleotide
gaaugggcggccucaacau

SEQ ID NO: 702724 - RNA, 19 nt, Artificial Sequence
  Description of Artificial Sequence: Synthetic oligonucleotide
ggaaauggccuuucuccca

SEQ ID NO: 702725 - RNA, 19 nt, Artificial Sequence
  Description of Artificial Sequence: Synthetic oligonucleotide
cugaauaguuuccuccugu

SEQ ID NO: 702726 - RNA, 19 nt, Artificial Sequence
  Description of Artificial Sequence: Synthetic oligonucleotide
guaucugcccggcucugga

SEQ ID NO: 702727 - RNA, 19 nt, Artificial Sequence
  Description of Artificial Sequence: Synthetic oligonucleotide
uagacucgauguucugcau

SEQ ID NO: 702728 - RNA, 19 nt, Artificial Sequence
  Description of Artificial Sequence: Synthetic oligonucleotide
cauggugucgggaggggaa

SEQ ID NO: 702729 - RNA, 19 nt, Artificial Sequence
  Description of Artificial Sequence: Synthetic oligonucleotide
guuuccgcgggaucaucga

SEQ ID NO: 702730 - RNA, 19 nt, Artificial Sequence
  Description of Artificial Sequence: Synthetic oligonucleotide
aucaauccucugaauaguu

SEQ ID NO: 702731 - RNA, 19 nt, Artificial Sequence
  Description of Artificial Sequence: Synthetic oligonucleotide
caaacccucuguggagugc

SEQ ID NO: 702732 - RNA, 19 nt, Artificial Sequence
  Description of Artificial Sequence: Synthetic oligonucleotide
agcccguagagcugguuua

SEQ ID NO: 702733 - RNA, 19 nt, Artificial Sequence
  Description of Artificial Sequence: Synthetic oligonucleotide
ggggcauuaucuccccuug

SEQ ID NO: 702734 - RNA, 19 nt, Artificial Sequence
  Description of Artificial Sequence: Synthetic oligonucleotide
uucccguauuugacaggcu

SEQ ID NO: 702735 - RNA, 19 nt, Artificial Sequence
  Description of Artificial Sequence: Synthetic oligonucleotide
ucugacggcucugcagcga

SEQ ID NO: 702736 - RNA, 19 nt, Artificial Sequence
  Description of Artificial Sequence: Synthetic oligonucleotide
aggguucaggcaaggaaga

SEQ ID NO: 702737 - RNA, 19 nt, Artificial Sequence
  Description of Artificial Sequence: Synthetic oligonucleotide
augauguauguuagcuccu

SEQ ID NO: 702738 - RNA, 19 nt, Artificial Sequence
  Description of Artificial Sequence: Synthetic oligonucleotide
ucccagcuacuuucacagc

SEQ ID NO: 702739 - RNA, 19 nt, Artificial Sequence
  Description of Artificial Sequence: Synthetic oligonucleotide
aucguagcccucugguaua

SEQ ID NO: 702740 - RNA, 19 nt, Artificial Sequence
  Description of Artificial Sequence: Synthetic oligonucleotide
cucaccucacauggugaag

SEQ ID NO: 702741 - RNA, 19 nt, Artificial Sequence
  Description of Artificial Sequence: Synthetic oligonucleotide
uggccccuaagcaggcuuc

SEQ ID NO: 702742 - RNA, 19 nt, Artificial Sequence
  Description of Artificial Sequence: Synthetic oligonucleotide
aaucgggacacuggccauu

SEQ ID NO: 702743 - RNA, 19 nt, Artificial Sequence
  Description of Artificial Sequence: Synthetic oligonucleotide
agacacccugaucuguguu

SEQ ID NO: 702744 - RNA, 19 nt, Artificial Sequence
  Description of Artificial Sequence: Synthetic oligonucleotide
guagcguuuccgcgggauc

SEQ ID NO: 702745 - RNA, 19 nt, Artificial Sequence
  Description of Artificial Sequence: Synthetic oligonucleotide
uagccaaagucagguuugu

SEQ ID NO: 702746 - RNA, 19 nt, Artificial Sequence
  Description of Artificial Sequence: Synthetic oligonucleotide
ccucaacuagcaaauccuc

SEQ ID NO: 702747 - RNA, 19 nt, Artificial Sequence
  Description of Artificial Sequence: Synthetic oligonucleotide
cucagauugaaggaggguu

SEQ ID NO: 702748 - RNA, 19 nt, Artificial Sequence
  Description of Artificial Sequence: Synthetic oligonucleotide
acuugcgcuuugccaagau

SEQ ID NO: 702749 - RNA, 19 nt, Artificial Sequence
  Description of Artificial Sequence: Synthetic oligonucleotide
gagaagggucagcuuccuc

SEQ ID NO: 702750 - RNA, 19 nt, Artificial Sequence
  Description of Artificial Sequence: Synthetic oligonucleotide
guccgaucccggcaggaca

SEQ ID NO: 702751 - RNA, 19 nt, Artificial Sequence
  Description of Artificial Sequence: Synthetic oligonucleotide
cagauugaaggaggguuca

SEQ ID NO: 702752 - RNA, 19 nt, Artificial Sequence
  Description of Artificial Sequence: Synthetic oligonucleotide
cacucucaaggaggcaaag

SEQ ID NO: 702753 - RNA, 19 nt, Artificial Sequence
  Description of Artificial Sequence: Synthetic oligonucleotide
aacuuggcucugacggcca

SEQ ID NO: 702754 - RNA, 19 nt, Artificial Sequence
  Description of Artificial Sequence: Synthetic oligonucleotide
ggacuugcgcuuugccaag

SEQ ID NO: 702755 - RNA, 19 nt, Artificial Sequence
  Description of Artificial Sequence: Synthetic oligonucleotide
guucuuagauccguagcgu

SEQ ID NO: 702756 - RNA, 19 nt, Artificial Sequence
  Description of Artificial Sequence: Synthetic oligonucleotide
gcuuucgagcccaaggcca

SEQ ID NO: 702757 - RNA, 19 nt, Artificial Sequence
  Description of Artificial Sequence: Synthetic oligonucleotide
agucgagaaaacagccaaa

SEQ ID NO: 702758 - RNA, 19 nt, Artificial Sequence
  Description of Artificial Sequence: Synthetic oligonucleotide
cgcgggaucaucgagucgc

SEQ ID NO: 702759 - RNA, 19 nt, Artificial Sequence
  Description of Artificial Sequence: Synthetic oligonucleotide
cguuuccgcgggaucaucg

SEQ ID NO: 702760 - RNA, 19 nt, Artificial Sequence
  Description of Artificial Sequence: Synthetic oligonucleotide
ucguagcccucugguauac

SEQ ID NO: 702761 - RNA, 19 nt, Artificial Sequence
  Description of Artificial Sequence: Synthetic oligonucleotide
aucucugaaugggcggccu

SEQ ID NO: 702762 - RNA, 19 nt, Artificial Sequence
  Description of Artificial Sequence: Synthetic oligonucleotide
caaguucuaacccgauggu

SEQ ID NO: 702763 - RNA, 19 nt, Artificial Sequence
  Description of Artificial Sequence: Synthetic oligonucleotide
ggcaaauguauugcugaga

SEQ ID NO: 702764 - RNA, 19 nt, Artificial Sequence
  Description of Artificial Sequence: Synthetic oligonucleotide
ggacucugcucccaaaacu

SEQ ID NO: 702765 - RNA, 19 nt, Artificial Sequence
  Description of Artificial Sequence: Synthetic oligonucleotide
ugacggcucugcagcgacu

SEQ ID NO: 702766 - RNA, 19 nt, Artificial Sequence
  Description of Artificial Sequence: Synthetic oligonucleotide
aggugacugacuggaagua

SEQ ID NO: 702767 - RNA, 19 nt, Artificial Sequence
  Description of Artificial Sequence: Synthetic oligonucleotide
cuccuggguccgaucccgg

SEQ ID NO: 702768 - RNA, 19 nt, Artificial Sequence
  Description of Artificial Sequence: Synthetic oligonucleotide
gggaucaucgagucgcaua

SEQ ID NO: 702769 - RNA, 19 nt, Artificial Sequence
  Description of Artificial Sequence: Synthetic oligonucleotide
gacagccucguuccccaaa

SEQ ID NO: 702770 - RNA, 19 nt, Artificial Sequence
  Description of Artificial Sequence: Synthetic oligonucleotide
guugcaggggacagaaccu

SEQ ID NO: 702771 - RNA, 19 nt, Artificial Sequence
  Description of Artificial Sequence: Synthetic oligonucleotide
cuacuggagacaaccuccu

SEQ ID NO: 702772 - RNA, 19 nt, Artificial Sequence
  Description of Artificial Sequence: Synthetic oligonucleotide
cagccucguuccccaaagc

SEQ ID NO: 702773 - RNA, 19 nt, Artificial Sequence
  Description of Artificial Sequence: Synthetic oligonucleotide
caaugcgcuuggccauaag

SEQ ID NO: 702774 - RNA, 19 nt, Artificial Sequence
  Description of Artificial Sequence: Synthetic oligonucleotide
agcgacuuacaggcagaca

SEQ ID NO: 702775 - RNA, 19 nt, Artificial Sequence
  Description of Artificial Sequence: Synthetic oligonucleotide
cagcgacuuacaggcagac

SEQ ID NO: 702776 - RNA, 19 nt, Artificial Sequence
  Description of Artificial Sequence: Synthetic oligonucleotide
agucaaguucuaacccgau

SEQ ID NO: 702777 - RNA, 19 nt, Artificial Sequence
  Description of Artificial Sequence: Synthetic oligonucleotide
uccaaugcgcuuggccaua

SEQ ID NO: 702778 - RNA, 19 nt, Artificial Sequence
  Description of Artificial Sequence: Synthetic oligonucleotide
ggggcccuaaagucgagaa

SEQ ID NO: 702779 - RNA, 19 nt, Artificial Sequence
  Description of Artificial Sequence: Synthetic oligonucleotide
accacccuauacaggcuca

SEQ ID NO: 702780 - RNA, 19 nt, Artificial Sequence
  Description of Artificial Sequence: Synthetic oligonucleotide
gcagauugagucaccagua

SEQ ID NO: 702781 - RNA, 19 nt, Artificial Sequence
  Description of Artificial Sequence: Synthetic oligonucleotide
gacgguuccucuguuguuu

SEQ ID NO: 702782 - RNA, 19 nt, Artificial Sequence
  Description of Artificial Sequence: Synthetic oligonucleotide
acuuggcucugacggccaa

SEQ ID NO: 702783 - RNA, 19 nt, Artificial Sequence
  Description of Artificial Sequence: Synthetic oligonucleotide
cugcagaugccggccacuc

SEQ ID NO: 702784 - RNA, 19 nt, Artificial Sequence
  Description of Artificial Sequence: Synthetic oligonucleotide
ccguauuugacaggcuuuc

SEQ ID NO: 702785 - RNA, 19 nt, Artificial Sequence
  Description of Artificial Sequence: Synthetic oligonucleotide
gaaucgggacacuggccau

SEQ ID NO: 702786 - RNA, 19 nt, Artificial Sequence
  Description of Artificial Sequence: Synthetic oligonucleotide
ccgauuggaggugacugac

SEQ ID NO: 702787 - RNA, 19 nt, Artificial Sequence
  Description of Artificial Sequence: Synthetic oligonucleotide
cuaacccgaugguaaaguu

SEQ ID NO: 702788 - RNA, 19 nt, Artificial Sequence
  Description of Artificial Sequence: Synthetic oligonucleotide
ccaaagccugguccugcgg

SEQ ID NO: 702789 - RNA, 19 nt, Artificial Sequence
  Description of Artificial Sequence: Synthetic oligonucleotide
cccucaacuagcaaauccu

SEQ ID NO: 702790 - RNA, 19 nt, Artificial Sequence
  Description of Artificial Sequence: Synthetic oligonucleotide
cugguauacgugacuuccu

SEQ ID NO: 702791 - RNA, 19 nt, Artificial Sequence
  Description of Artificial Sequence: Synthetic oligonucleotide
gagaacuguucccgacggu

SEQ ID NO: 702792 - RNA, 19 nt, Artificial Sequence
  Description of Artificial Sequence: Synthetic oligonucleotide
aacccucuguggagugccu

SEQ ID NO: 702793 - RNA, 19 nt, Artificial Sequence
  Description of Artificial Sequence: Synthetic oligonucleotide
gacuugcgcuuugccaaga

SEQ ID NO: 702794 - RNA, 19 nt, Artificial Sequence
  Description of Artificial Sequence: Synthetic oligonucleotide
gaggcugguaagguuuuau

SEQ ID NO: 702795 - RNA, 19 nt, Artificial Sequence
  Description of Artificial Sequence: Synthetic oligonucleotide
guaggacagaguggccaga

SEQ ID NO: 702796 - RNA, 19 nt, Artificial Sequence
  Description of Artificial Sequence: Synthetic oligonucleotide
cacggcgagaagggucagc

SEQ ID NO: 702797 - RNA, 19 nt, Artificial Sequence
  Description of Artificial Sequence: Synthetic oligonucleotide
gggccgacacugguguccg

SEQ ID NO: 702798 - RNA, 19 nt, Artificial Sequence
  Description of Artificial Sequence: Synthetic oligonucleotide
cccuaaagucgagaaaaca

SEQ ID NO: 702799 - RNA, 19 nt, Artificial Sequence
  Description of Artificial Sequence: Synthetic oligonucleotide
cuggccauucuuagcaguu

SEQ ID NO: 702800 - RNA, 19 nt, Artificial Sequence
  Description of Artificial Sequence: Synthetic oligonucleotide
cucuguggagugccucaga

SEQ ID NO: 702801 - RNA, 19 nt, Artificial Sequence
  Description of Artificial Sequence: Synthetic oligonucleotide
ggagugccucagauugaag

SEQ ID NO: 702802 - RNA, 19 nt, Artificial Sequence
  Description of Artificial Sequence: Synthetic oligonucleotide
agcguuuccgcgggaucau

SEQ ID NO: 702803 - RNA, 19 nt, Artificial Sequence
  Description of Artificial Sequence: Synthetic oligonucleotide
gcccuaaagucgagaaaac

SEQ ID NO: 702804 - RNA, 19 nt, Artificial Sequence
  Description of Artificial Sequence: Synthetic oligonucleotide
cuccuacuggagacaaccu

SEQ ID NO: 702805 - RNA, 19 nt, Artificial Sequence
  Description of Artificial Sequence: Synthetic oligonucleotide
gugucgggaggggaaggga

SEQ ID NO: 702806 - RNA, 19 nt, Artificial Sequence
  Description of Artificial Sequence: Synthetic oligonucleotide
agacccagguagacacccu

SEQ ID NO: 702807 - RNA, 19 nt, Artificial Sequence
  Description of Artificial Sequence: Synthetic oligonucleotide
gagcccaaggccacccgua

SEQ ID NO: 702808 - RNA, 19 nt, Artificial Sequence
  Description of Artificial Sequence: Synthetic oligonucleotide
cuugcccucccagaagggu

SEQ ID NO: 702809 - RNA, 19 nt, Artificial Sequence
  Description of Artificial Sequence: Synthetic oligonucleotide
ccaaggcgaagccuccuca

SEQ ID NO: 702810 - RNA, 19 nt, Artificial Sequence
  Description of Artificial Sequence: Synthetic oligonucleotide
ggcucgggacucugcuccc

SEQ ID NO: 702811 - RNA, 19 nt, Artificial Sequence
  Description of Artificial Sequence: Synthetic oligonucleotide
gggcccuaaagucgagaaa

SEQ ID NO: 702812 - RNA, 19 nt, Artificial Sequence
  Description of Artificial Sequence: Synthetic oligonucleotide
gaucccggcaggacauggu

SEQ ID NO: 702813 - RNA, 19 nt, Artificial Sequence
  Description of Artificial Sequence: Synthetic oligonucleotide
cugcguugucuggcagccc

SEQ ID NO: 702814 - RNA, 19 nt, Artificial Sequence
  Description of Artificial Sequence: Synthetic oligonucleotide
caacgauuguagacucgau

SEQ ID NO: 702815 - RNA, 19 nt, Artificial Sequence
  Description of Artificial Sequence: Synthetic oligonucleotide
cuugcgcuuugccaagauu

SEQ ID NO: 702816 - RNA, 19 nt, Artificial Sequence
  Description of Artificial Sequence: Synthetic oligonucleotide
gguccgaucccggcaggac

SEQ ID NO: 702817 - RNA, 19 nt, Artificial Sequence
  Description of Artificial Sequence: Synthetic oligonucleotide
ccucaccucacauggugaa

SEQ ID NO: 702818 - RNA, 19 nt, Artificial Sequence
  Description of Artificial Sequence: Synthetic oligonucleotide
gacggccaaagcaccggcu

SEQ ID NO: 702819 - RNA, 19 nt, Artificial Sequence
  Description of Artificial Sequence: Synthetic oligonucleotide
gcagcgacuuacaggcaga

SEQ ID NO: 702820 - RNA, 19 nt, Artificial Sequence
  Description of Artificial Sequence: Synthetic oligonucleotide
cccgacgguuccucuguug

SEQ ID NO: 702821 - RNA, 19 nt, Artificial Sequence
  Description of Artificial Sequence: Synthetic oligonucleotide
gggauaguuuuguuuccuu

SEQ ID NO: 702822 - RNA, 19 nt, Artificial Sequence
  Description of Artificial Sequence: Synthetic oligonucleotide
cugcagcgacuuacaggca

SEQ ID NO: 702823 - RNA, 19 nt, Artificial Sequence
  Description of Artificial Sequence: Synthetic oligonucleotide
ccuggguccgaucccggca

SEQ ID NO: 702824 - RNA, 19 nt, Artificial Sequence
  Description of Artificial Sequence: Synthetic oligonucleotide
guugagcaauuuguuuguu

SEQ ID NO: 702825 - RNA, 19 nt, Artificial Sequence
  Description of Artificial Sequence: Synthetic oligonucleotide
cgaucccggcaggacaugg

SEQ ID NO: 702826 - RNA, 19 nt, Artificial Sequence
  Description of Artificial Sequence: Synthetic oligonucleotide
ggcuauugauguccuguuu

SEQ ID NO: 702827 - RNA, 19 nt, Artificial Sequence
  Description of Artificial Sequence: Synthetic oligonucleotide
ccucguuccccaaagcuuu

SEQ ID NO: 702828 - RNA, 19 nt, Artificial Sequence
  Description of Artificial Sequence: Synthetic oligonucleotide
gccacccguagaucuugca

SEQ ID NO: 702829 - RNA, 19 nt, Artificial Sequence
  Description of Artificial Sequence: Synthetic oligonucleotide
gcucgucaaugagcugaag

SEQ ID NO: 702830 - RNA, 19 nt, Artificial Sequence
  Description of Artificial Sequence: Synthetic oligonucleotide
ccggcaggacauggugucg

SEQ ID NO: 702831 - RNA, 19 nt, Artificial Sequence
  Description of Artificial Sequence: Synthetic oligonucleotide
ccgacgguuccucuguugu

SEQ ID NO: 702832 - RNA, 19 nt, Artificial Sequence
  Description of Artificial Sequence: Synthetic oligonucleotide
ccggcuggggcccuaaagu

SEQ ID NO: 702833 - RNA, 19 nt, Artificial Sequence
  Description of Artificial Sequence: Synthetic oligonucleotide
ggccacccguagaucuugc

SEQ ID NO: 702834 - RNA, 19 nt, Artificial Sequence
  Description of Artificial Sequence: Synthetic oligonucleotide
ggccgacacugguguccgg

SEQ ID NO: 702835 - RNA, 19 nt, Artificial Sequence
  Description of Artificial Sequence: Synthetic oligonucleotide
ccgcgggaucaucgagucg

SEQ ID NO: 702836 - RNA, 19 nt, Artificial Sequence
  Description of Artificial Sequence: Synthetic oligonucleotide
ccgacacugguguccggga

SEQ ID NO: 702837 - RNA, 19 nt, Artificial Sequence
  Description of Artificial Sequence: Synthetic oligonucleotide
cuuggccauaaggguaaau

SEQ ID NO: 702838 - RNA, 19 nt, Artificial Sequence
  Description of Artificial Sequence: Synthetic oligonucleotide
gcccagcucaacgauugua

SEQ ID NO: 702839 - RNA, 19 nt, Artificial Sequence
  Description of Artificial Sequence: Synthetic oligonucleotide
gccucguuccccaaagcuu

SEQ ID NO: 702840 - RNA, 19 nt, Artificial Sequence
  Description of Artificial Sequence: Synthetic oligonucleotide
cguagcccucugguauacg

SEQ ID NO: 702841 - RNA, 19 nt, Artificial Sequence
  Description of Artificial Sequence: Synthetic oligonucleotide
ggguccgaucccggcagga

SEQ ID NO: 702842 - RNA, 19 nt, Artificial Sequence
  Description of Artificial Sequence: Synthetic oligonucleotide
ccucugguauacgugacuu

SEQ ID NO: 702843 - RNA, 19 nt, Artificial Sequence
  Description of Artificial Sequence: Synthetic oligonucleotide
cacccuauacaggcucaau

SEQ ID NO: 702844 - RNA, 19 nt, Artificial Sequence
  Description of Artificial Sequence: Synthetic oligonucleotide
gcgggaucaucgagucgca

SEQ ID NO: 702845 - RNA, 19 nt, Artificial Sequence
  Description of Artificial Sequence: Synthetic oligonucleotide
gcguuuccgcgggaucauc

SEQ ID NO: 702846 - RNA, 19 nt, Artificial Sequence
  Description of Artificial Sequence: Synthetic oligonucleotide
ccacccuauacaggcucaa

SEQ ID NO: 702847 - RNA, 19 nt, Artificial Sequence
  Description of Artificial Sequence: Synthetic oligonucleotide
ccacggcgagaagggucag

SEQ ID NO: 702848 - RNA, 19 nt, Artificial Sequence
  Description of Artificial Sequence: Synthetic oligonucleotide
ccgaucccggcaggacaug

SEQ ID NO: 702849 - RNA, 19 nt, Artificial Sequence
  Description of Artificial Sequence: Synthetic oligonucleotide
caccggcuggggcccuaaa

SEQ ID NO: 702850 - RNA, 19 nt, Artificial Sequence
  Description of Artificial Sequence: Synthetic oligonucleotide
gcgcuuugccaagauuguu

SEQ ID NO: 702851 - RNA, 19 nt, Artificial Sequence
  Description of Artificial Sequence: Synthetic oligonucleotide
ccaccgauuggaggugacu

SEQ ID NO: 702852 - RNA, 19 nt, Artificial Sequence
  Description of Artificial Sequence: Synthetic oligonucleotide
ccguagcguuuccgcggga

SEQ ID NO: 702853 - RNA, 19 nt, Artificial Sequence
  Description of Artificial Sequence: Synthetic oligonucleotide
cgggaucaucgagucgcau

SEQ ID NO: 702854 - RNA, 19 nt, Artificial Sequence
  Description of Artificial Sequence: Synthetic oligonucleotide
aaaggaugacauuuuaacc

SEQ ID NO: 702855 - RNA, 19 nt, Artificial Sequence
  Description of Artificial Sequence: Synthetic oligonucleotide
aaacagguaguuuaaaagg

SEQ ID NO: 702856 - RNA, 19 nt, Artificial Sequence
  Description of Artificial Sequence: Synthetic oligonucleotide
aaccgcauuauuuucuucc

SEQ ID NO: 702857 - RNA, 19 nt, Artificial Sequence
  Description of Artificial Sequence: Synthetic oligonucleotide
aaggaugacauuuuaaccu

SEQ ID NO: 702858 - RNA, 19 nt, Artificial Sequence
  Description of Artificial Sequence: Synthetic oligonucleotide
aaugauuuccgccaggcgu

SEQ ID NO: 702859 - RNA, 19 nt, Artificial Sequence
  Description of Artificial Sequence: Synthetic oligonucleotide
uuaaaaggguuucaaagga

SEQ ID NO: 702860 - RNA, 19 nt, Artificial Sequence
  Description of Artificial Sequence: Synthetic oligonucleotide
uuagaguucuguaucaccc

SEQ ID NO: 702861 - RNA, 19 nt, Artificial Sequence
  Description of Artificial Sequence: Synthetic oligonucleotide
aaguccuugcuauaagugg

SEQ ID NO: 702862 - RNA, 19 nt, Artificial Sequence
  Description of Artificial Sequence: Synthetic oligonucleotide
auguuauugagguggauac

SEQ ID NO: 702863 - RNA, 19 nt, Artificial Sequence
  Description of Artificial Sequence: Synthetic oligonucleotide
ucaacuuuugcggugacgg

SEQ ID NO: 702864 - RNA, 19 nt, Artificial Sequence
  Description of Artificial Sequence: Synthetic oligonucleotide
ugucucuaggugaugaacg

SEQ ID NO: 702865 - RNA, 19 nt, Artificial Sequence
  Description of Artificial Sequence: Synthetic oligonucleotide
caucacaucaccuuuggcc

SEQ ID NO: 702866 - RNA, 19 nt, Artificial Sequence
  Description of Artificial Sequence: Synthetic oligonucleotide
uaaccugaagaaaaggacc

SEQ ID NO: 702867 - RNA, 19 nt, Artificial Sequence
  Description of Artificial Sequence: Synthetic oligonucleotide
uuaaccugaagaaaaggac

SEQ ID NO: 702868 - RNA, 19 nt, Artificial Sequence
  Description of Artificial Sequence: Synthetic oligonucleotide
gaguauaggaagaaggcgg

SEQ ID NO: 702869 - RNA, 19 nt, Artificial Sequence
  Description of Artificial Sequence: Synthetic oligonucleotide
aacagguaguuuaaaaggg

SEQ ID NO: 702870 - RNA, 19 nt, Artificial Sequence
  Description of Artificial Sequence: Synthetic oligonucleotide
cuuguguguauccugagcc

SEQ ID NO: 702871 - RNA, 19 nt, Artificial Sequence
  Description of Artificial Sequence: Synthetic oligonucleotide
ugggauuucgagcagggag

SEQ ID NO: 702872 - RNA, 19 nt, Artificial Sequence
  Description of Artificial Sequence: Synthetic oligonucleotide
aaccgaaucuuggucaucc

SEQ ID NO: 702873 - RNA, 19 nt, Artificial Sequence
  Description of Artificial Sequence: Synthetic oligonucleotide
uauggauuuccuaucuucc

SEQ ID NO: 702874 - RNA, 19 nt, Artificial Sequence
  Description of Artificial Sequence: Synthetic oligonucleotide
agugguaauuugcuaaagg

SEQ ID NO: 702875 - RNA, 19 nt, Artificial Sequence
  Description of Artificial Sequence: Synthetic oligonucleotide
aguguaguaguacuccacg

SEQ ID NO: 702876 - RNA, 19 nt, Artificial Sequence
  Description of Artificial Sequence: Synthetic oligonucleotide
ugguucaacauccacaguc

SEQ ID NO: 702877 - RNA, 19 nt, Artificial Sequence
  Description of Artificial Sequence: Synthetic oligonucleotide
ugaugguuggccaacggcc

SEQ ID NO: 702878 - RNA, 19 nt, Artificial Sequence
  Description of Artificial Sequence: Synthetic oligonucleotide
ucagaauugguccccuccg

SEQ ID NO: 702879 - RNA, 19 nt, Artificial Sequence
  Description of Artificial Sequence: Synthetic oligonucleotide
uguaguaguacuccacgca

SEQ ID NO: 702880 - RNA, 19 nt, Artificial Sequence
  Description of Artificial Sequence: Synthetic oligonucleotide
auaggaagaaggcgguggc

SEQ ID NO: 702881 - RNA, 19 nt, Artificial Sequence
  Description of Artificial Sequence: Synthetic oligonucleotide
acauuuuaaccugacuggc

SEQ ID NO: 702882 - RNA, 19 nt, Artificial Sequence
  Description of Artificial Sequence: Synthetic oligonucleotide
uuuacugagcaguacccgc

SEQ ID NO: 702883 - RNA, 19 nt, Artificial Sequence
  Description of Artificial Sequence: Synthetic oligonucleotide
agaauugguccccuccgcc

SEQ ID NO: 702884 - RNA, 19 nt, Artificial Sequence
  Description of Artificial Sequence: Synthetic oligonucleotide
uuuuaaacagguaguuuaa

SEQ ID NO: 702885 - RNA, 19 nt, Artificial Sequence
  Description of Artificial Sequence: Synthetic oligonucleotide
cucuaggugaugaacgggg

SEQ ID NO: 702886 - RNA, 19 nt, Artificial Sequence
  Description of Artificial Sequence: Synthetic oligonucleotide
uuauggauuuccuaucuuc

SEQ ID NO: 702887 - RNA, 19 nt, Artificial Sequence
  Description of Artificial Sequence: Synthetic oligonucleotide
gaaagagccugaugguugg

SEQ ID NO: 702888 - RNA, 19 nt, Artificial Sequence
  Description of Artificial Sequence: Synthetic oligonucleotide
uucagaauugguccccucc

SEQ ID NO: 702889 - RNA, 19 nt, Artificial Sequence
  Description of Artificial Sequence: Synthetic oligonucleotide
ugagccacggucuuggacu

SEQ ID NO: 702890 - RNA, 19 nt, Artificial Sequence
  Description of Artificial Sequence: Synthetic oligonucleotide
caagagaagaucccgugcc

SEQ ID NO: 702891 - RNA, 19 nt, Artificial Sequence
  Description of Artificial Sequence: Synthetic oligonucleotide
cuuaaccugaagaaaagga

SEQ ID NO: 702892 - RNA, 19 nt, Artificial Sequence
  Description of Artificial Sequence: Synthetic oligonucleotide
uugacuggcuucaucagac

SEQ ID NO: 702893 - RNA, 19 nt, Artificial Sequence
  Description of Artificial Sequence: Synthetic oligonucleotide
uuggucauccaagagaaga

SEQ ID NO: 702894 - RNA, 19 nt, Artificial Sequence
  Description of Artificial Sequence: Synthetic oligonucleotide
ugcggugacggcuggaugg

SEQ ID NO: 702895 - RNA, 19 nt, Artificial Sequence
  Description of Artificial Sequence: Synthetic oligonucleotide
gaugcgugguucaacaucc

SEQ ID NO: 702896 - RNA, 19 nt, Artificial Sequence
  Description of Artificial Sequence: Synthetic oligonucleotide
aguccuugcuauaaguggc

SEQ ID NO: 702897 - RNA, 19 nt, Artificial Sequence
  Description of Artificial Sequence: Synthetic oligonucleotide
uuugaucuugaagaagacc

SEQ ID NO: 702898 - RNA, 19 nt, Artificial Sequence
  Description of Artificial Sequence: Synthetic oligonucleotide
ucccuuaaccugaagaaaa

SEQ ID NO: 702899 - RNA, 19 nt, Artificial Sequence
  Description of Artificial Sequence: Synthetic oligonucleotide
accaguguggccuugugug

SEQ ID NO: 702900 - RNA, 19 nt, Artificial Sequence
  Description of Artificial Sequence: Synthetic oligonucleotide
aaaguccuugcuauaagug

SEQ ID NO: 702901 - RNA, 19 nt, Artificial Sequence
  Description of Artificial Sequence: Synthetic oligonucleotide
uugagguggauaccacugg

SEQ ID NO: 702902 - RNA, 19 nt, Artificial Sequence
  Description of Artificial Sequence: Synthetic oligonucleotide
auuuccgccaggcgugucc

SEQ ID NO: 702903 - RNA, 19 nt, Artificial Sequence
  Description of Artificial Sequence: Synthetic oligonucleotide
uggaaucucaagccaaugu

SEQ ID NO: 702904 - RNA, 19 nt, Artificial Sequence
  Description of Artificial Sequence: Synthetic oligonucleotide
gucagaaccggcauagugg

SEQ ID NO: 702905 - RNA, 19 nt, Artificial Sequence
  Description of Artificial Sequence: Synthetic oligonucleotide
uccuugcaggggaagauag

SEQ ID NO: 702906 - RNA, 19 nt, Artificial Sequence
  Description of Artificial Sequence: Synthetic oligonucleotide
aauuugcuaaaggaugaca

SEQ ID NO: 702907 - RNA, 19 nt, Artificial Sequence
  Description of Artificial Sequence: Synthetic oligonucleotide
uggugaacucuuuacugag

SEQ ID NO: 702908 - RNA, 19 nt, Artificial Sequence
  Description of Artificial Sequence: Synthetic oligonucleotide
gaagguucuccacuuguug

SEQ ID NO: 702909 - RNA, 19 nt, Artificial Sequence
  Description of Artificial Sequence: Synthetic oligonucleotide
aacgcuuuauuaaacaguu

SEQ ID NO: 702910 - RNA, 19 nt, Artificial Sequence
  Description of Artificial Sequence: Synthetic oligonucleotide
uuccgugggauuucgagca

SEQ ID NO: 702911 - RNA, 19 nt, Artificial Sequence
  Description of Artificial Sequence: Synthetic oligonucleotide
aaucucaagccaauguuga

SEQ ID NO: 702912 - RNA, 19 nt, Artificial Sequence
  Description of Artificial Sequence: Synthetic oligonucleotide
uuuccgugggauuucgagc

SEQ ID NO: 702913 - RNA, 19 nt, Artificial Sequence
  Description of Artificial Sequence: Synthetic oligonucleotide
uuuugaucuugaagaagac

SEQ ID NO: 702914 - RNA, 19 nt, Artificial Sequence
  Description of Artificial Sequence: Synthetic oligonucleotide
ugcuauaaguggccaacgc

SEQ ID NO: 702915 - RNA, 19 nt, Artificial Sequence
  Description of Artificial Sequence: Synthetic oligonucleotide
uuaaacaguuuucuuucua

SEQ ID NO: 702916 - RNA, 19 nt, Artificial Sequence
  Description of Artificial Sequence: Synthetic oligonucleotide
ugugcauuccggcuuuuga

SEQ ID NO: 702917 - RNA, 19 nt, Artificial Sequence
  Description of Artificial Sequence: Synthetic oligonucleotide
cauagugguaauuugcuaa

SEQ ID NO: 702918 - RNA, 19 nt, Artificial Sequence
  Description of Artificial Sequence: Synthetic oligonucleotide
agauggugaacucuuuacu

SEQ ID NO: 702919 - RNA, 19 nt, Artificial Sequence
  Description of Artificial Sequence: Synthetic oligonucleotide
cugcuuggaaucucaagcc

SEQ ID NO: 702920 - RNA, 19 nt, Artificial Sequence
  Description of Artificial Sequence: Synthetic oligonucleotide
aauugguccccuccgccug

SEQ ID NO: 702921 - RNA, 19 nt, Artificial Sequence
  Description of Artificial Sequence: Synthetic oligonucleotide
ucgggucuuggucacuugg

SEQ ID NO: 702922 - RNA, 19 nt, Artificial Sequence
  Description of Artificial Sequence: Synthetic oligonucleotide
caaaaccgaaucuugguca

SEQ ID NO: 702923 - RNA, 19 nt, Artificial Sequence
  Description of Artificial Sequence: Synthetic oligonucleotide
ugaugcgugguucaacauc

SEQ ID NO: 702924 - RNA, 19 nt, Artificial Sequence
  Description of Artificial Sequence: Synthetic oligonucleotide
guaguaguacuccacgcac

SEQ ID NO: 702925 - RNA, 19 nt, Artificial Sequence
  Description of Artificial Sequence: Synthetic oligonucleotide
guuauugagguggauacca

SEQ ID NO: 702926 - RNA, 19 nt, Artificial Sequence
  Description of Artificial Sequence: Synthetic oligonucleotide
agcaccucgggucuugguc

SEQ ID NO: 702927 - RNA, 19 nt, Artificial Sequence
  Description of Artificial Sequence: Synthetic oligonucleotide
uuccugaccaacgaaggug

SEQ ID NO: 702928 - RNA, 19 nt, Artificial Sequence
  Description of Artificial Sequence: Synthetic oligonucleotide
caucgaugcugcuggagcg

SEQ ID NO: 702929 - RNA, 19 nt, Artificial Sequence
  Description of Artificial Sequence: Synthetic oligonucleotide
uccucuucacucgucaugc

SEQ ID NO: 702930 - RNA, 19 nt, Artificial Sequence
  Description of Artificial Sequence: Synthetic oligonucleotide
ucacucgucaugcagucau

SEQ ID NO: 702931 - RNA, 19 nt, Artificial Sequence
  Description of Artificial Sequence: Synthetic oligonucleotide
guuuccugaccaacgaagg

SEQ ID NO: 702932 - RNA, 19 nt, Artificial Sequence
  Description of Artificial Sequence: Synthetic oligonucleotide
auuugcuaaaggaugacau

SEQ ID NO: 702933 - RNA, 19 nt, Artificial Sequence
  Description of Artificial Sequence: Synthetic oligonucleotide
uuacugagcaguacccgcu

SEQ ID NO: 702934 - RNA, 19 nt, Artificial Sequence
  Description of Artificial Sequence: Synthetic oligonucleotide
aaauaaaguccuugcuaua

SEQ ID NO: 702935 - RNA, 19 nt, Artificial Sequence
  Description of Artificial Sequence: Synthetic oligonucleotide
ucugguacaggguggcccc

SEQ ID NO: 702936 - RNA, 19 nt, Artificial Sequence
  Description of Artificial Sequence: Synthetic oligonucleotide
agaguucuguaucacccug

SEQ ID NO: 702937 - RNA, 19 nt, Artificial Sequence
  Description of Artificial Sequence: Synthetic oligonucleotide
uccaaguguaguaguacuc

SEQ ID NO: 702938 - RNA, 19 nt, Artificial Sequence
  Description of Artificial Sequence: Synthetic oligonucleotide
ugaacacagccccacaguu

SEQ ID NO: 702939 - RNA, 19 nt, Artificial Sequence
  Description of Artificial Sequence: Synthetic oligonucleotide
gugaacucuuuacugagca

SEQ ID NO: 702940 - RNA, 19 nt, Artificial Sequence
  Description of Artificial Sequence: Synthetic oligonucleotide
guugaugcgugguucaaca

SEQ ID NO: 702941 - RNA, 19 nt, Artificial Sequence
  Description of Artificial Sequence: Synthetic oligonucleotide
cuugcuauaaguggccaac

SEQ ID NO: 702942 - RNA, 19 nt, Artificial Sequence
  Description of Artificial Sequence: Synthetic oligonucleotide
cuuuacugagcaguacccg

SEQ ID NO: 702943 - RNA, 19 nt, Artificial Sequence
  Description of Artificial Sequence: Synthetic oligonucleotide
ggaguauaggaagaaggcg

SEQ ID NO: 702944 - RNA, 19 nt, Artificial Sequence
  Description of Artificial Sequence: Synthetic oligonucleotide
guacuccacgcacugagcc

SEQ ID NO: 702945 - RNA, 19 nt, Artificial Sequence
  Description of Artificial Sequence: Synthetic oligonucleotide
caucagacucagcuggucc

SEQ ID NO: 702946 - RNA, 19 nt, Artificial Sequence
  Description of Artificial Sequence: Synthetic oligonucleotide
ccaguaguccucucgaugg

SEQ ID NO: 702947 - RNA, 19 nt, Artificial Sequence
  Description of Artificial Sequence: Synthetic oligonucleotide
uccacuugucagaaccggc

SEQ ID NO: 702948 - RNA, 19 nt, Artificial Sequence
  Description of Artificial Sequence: Synthetic oligonucleotide
agaucccgugcccaccacc

SEQ ID NO: 702949 - RNA, 19 nt, Artificial Sequence
  Description of Artificial Sequence: Synthetic oligonucleotide
gguggcgggaugaagagcg

SEQ ID NO: 702950 - RNA, 19 nt, Artificial Sequence
  Description of Artificial Sequence: Synthetic oligonucleotide
uucuagagauguccacuug

SEQ ID NO: 702951 - RNA, 19 nt, Artificial Sequence
  Description of Artificial Sequence: Synthetic oligonucleotide
uauaaguggccaacgcuuu

SEQ ID NO: 702952 - RNA, 19 nt, Artificial Sequence
  Description of Artificial Sequence: Synthetic oligonucleotide
cugaugguuggccaacggc

SEQ ID NO: 702953 - RNA, 19 nt, Artificial Sequence
  Description of Artificial Sequence: Synthetic oligonucleotide
uugcuauaaguggccaacg

SEQ ID NO: 702954 - RNA, 19 nt, Artificial Sequence
  Description of Artificial Sequence: Synthetic oligonucleotide
ugcauuccggcuuuugauc

SEQ ID NO: 702955 - RNA, 19 nt, Artificial Sequence
  Description of Artificial Sequence: Synthetic oligonucleotide
cugagugccaccuggcuuc

SEQ ID NO: 702956 - RNA, 19 nt, Artificial Sequence
  Description of Artificial Sequence: Synthetic oligonucleotide
uaguuuaaaaggguuucaa

SEQ ID NO: 702957 - RNA, 19 nt, Artificial Sequence
  Description of Artificial Sequence: Synthetic oligonucleotide
uaguaguacuccacgcacu

SEQ ID NO: 702958 - RNA, 19 nt, Artificial Sequence
  Description of Artificial Sequence: Synthetic oligonucleotide
gagauguccacuugucaga

SEQ ID NO: 702959 - RNA, 19 nt, Artificial Sequence
  Description of Artificial Sequence: Synthetic oligonucleotide
augacauuuuaaccugacu

SEQ ID NO: 702960 - RNA, 19 nt, Artificial Sequence
  Description of Artificial Sequence: Synthetic oligonucleotide
agagcccugagcccuggcg

SEQ ID NO: 702961 - RNA, 19 nt, Artificial Sequence
  Description of Artificial Sequence: Synthetic oligonucleotide
guguaguaguacuccacgc

SEQ ID NO: 702962 - RNA, 19 nt, Artificial Sequence
  Description of Artificial Sequence: Synthetic oligonucleotide
uccuaucuuccucuggguc

SEQ ID NO: 702963 - RNA, 19 nt, Artificial Sequence
  Description of Artificial Sequence: Synthetic oligonucleotide
aauucagaauugguccccu

SEQ ID NO: 702964 - RNA, 19 nt, Artificial Sequence
  Description of Artificial Sequence: Synthetic oligonucleotide
uuccccucccuuaaccuga

SEQ ID NO: 702965 - RNA, 19 nt, Artificial Sequence
  Description of Artificial Sequence: Synthetic oligonucleotide
guaguccucucgauggugg

SEQ ID NO: 702966 - RNA, 19 nt, Artificial Sequence
  Description of Artificial Sequence: Synthetic oligonucleotide
uaaccugacuggcuuccgc

SEQ ID NO: 702967 - RNA, 19 nt, Artificial Sequence
  Description of Artificial Sequence: Synthetic oligonucleotide
agaagaucccgugcccacc

SEQ ID NO: 702968 - RNA, 19 nt, Artificial Sequence
  Description of Artificial Sequence: Synthetic oligonucleotide
uagaguucuguaucacccu

SEQ ID NO: 702969 - RNA, 19 nt, Artificial Sequence
  Description of Artificial Sequence: Synthetic oligonucleotide
ugucuccucccuaaccgca

SEQ ID NO: 702970 - RNA, 19 nt, Artificial Sequence
  Description of Artificial Sequence: Synthetic oligonucleotide
gagguggauaccacugggg

SEQ ID NO: 702971 - RNA, 19 nt, Artificial Sequence
  Description of Artificial Sequence: Synthetic oligonucleotide
agaaccggcauagugguaa

SEQ ID NO: 702972 - RNA, 19 nt, Artificial Sequence
  Description of Artificial Sequence: Synthetic oligonucleotide
agcgcacucgaacagcaca

SEQ ID NO: 702973 - RNA, 19 nt, Artificial Sequence
  Description of Artificial Sequence: Synthetic oligonucleotide
aagauagugguggggucug

SEQ ID NO: 702974 - RNA, 19 nt, Artificial Sequence
  Description of Artificial Sequence: Synthetic oligonucleotide
ugcuaaaggaugacauuuu

SEQ ID NO: 702975 - RNA, 19 nt, Artificial Sequence
  Description of Artificial Sequence: Synthetic oligonucleotide
ucugagugccaccuggcuu

SEQ ID NO: 702976 - RNA, 19 nt, Artificial Sequence
  Description of Artificial Sequence: Synthetic oligonucleotide
uggccaacgcuuuauuaaa

SEQ ID NO: 702977 - RNA, 19 nt, Artificial Sequence
  Description of Artificial Sequence: Synthetic oligonucleotide
guucugggaucucugcuug

SEQ ID NO: 702978 - RNA, 19 nt, Artificial Sequence
  Description of Artificial Sequence: Synthetic oligonucleotide
agcauuuccaggguagcca

SEQ ID NO: 702979 - RNA, 19 nt, Artificial Sequence
  Description of Artificial Sequence: Synthetic oligonucleotide
ugaccggagaugaggacau

SEQ ID NO: 702980 - RNA, 19 nt, Artificial Sequence
  Description of Artificial Sequence: Synthetic oligonucleotide
cucugcuuggaaucucaag

SEQ ID NO: 702981 - RNA, 19 nt, Artificial Sequence
  Description of Artificial Sequence: Synthetic oligonucleotide
guauccugagccagggcgg

SEQ ID NO: 702982 - RNA, 19 nt, Artificial Sequence
  Description of Artificial Sequence: Synthetic oligonucleotide
accgcauuauuuucuucca

SEQ ID NO: 702983 - RNA, 19 nt, Artificial Sequence
  Description of Artificial Sequence: Synthetic oligonucleotide
ucuugaggggcuccucaac

SEQ ID NO: 702984 - RNA, 19 nt, Artificial Sequence
  Description of Artificial Sequence: Synthetic oligonucleotide
aagaucccgugcccaccac

SEQ ID NO: 702985 - RNA, 19 nt, Artificial Sequence
  Description of Artificial Sequence: Synthetic oligonucleotide
ccaacgcuuuauuaaacag

SEQ ID NO: 702986 - RNA, 19 nt, Artificial Sequence
  Description of Artificial Sequence: Synthetic oligonucleotide
ggguugggaguauaggaag

SEQ ID NO: 702987 - RNA, 19 nt, Artificial Sequence
  Description of Artificial Sequence: Synthetic oligonucleotide
gggaguauaggaagaaggc

SEQ ID NO: 702988 - RNA, 19 nt, Artificial Sequence
  Description of Artificial Sequence: Synthetic oligonucleotide
aguucuguaucacccugaa

SEQ ID NO: 702989 - RNA, 19 nt, Artificial Sequence
  Description of Artificial Sequence: Synthetic oligonucleotide
guggccaacgcuuuauuaa

SEQ ID NO: 702990 - RNA, 19 nt, Artificial Sequence
  Description of Artificial Sequence: Synthetic oligonucleotide
cuucacucgucaugcaguc

SEQ ID NO: 702991 - RNA, 19 nt, Artificial Sequence
  Description of Artificial Sequence: Synthetic oligonucleotide
ugcgugguucaacauccac

SEQ ID NO: 702992 - RNA, 19 nt, Artificial Sequence
  Description of Artificial Sequence: Synthetic oligonucleotide
augauuuccgccaggcgug

SEQ ID NO: 702993 - RNA, 19 nt, Artificial Sequence
  Description of Artificial Sequence: Synthetic oligonucleotide
gcaguacccgcucugagug

SEQ ID NO: 702994 - RNA, 19 nt, Artificial Sequence
  Description of Artificial Sequence: Synthetic oligonucleotide
cacaguugggcauuucaca

SEQ ID NO: 702995 - RNA, 19 nt, Artificial Sequence
  Description of Artificial Sequence: Synthetic oligonucleotide
uuggugccgccauggaugc

SEQ ID NO: 702996 - RNA, 19 nt, Artificial Sequence
  Description of Artificial Sequence: Synthetic oligonucleotide
caauguugaugcgugguuc

SEQ ID NO: 702997 - RNA, 19 nt, Artificial Sequence
  Description of Artificial Sequence: Synthetic oligonucleotide
uuaaccugacuggcuuccg

SEQ ID NO: 702998 - RNA, 19 nt, Artificial Sequence
  Description of Artificial Sequence: Synthetic oligonucleotide
uuuccgccaggcguguccg

SEQ ID NO: 702999 - RNA, 19 nt, Artificial Sequence
  Description of Artificial Sequence: Synthetic oligonucleotide
gaagaucccgugcccacca

SEQ ID NO: 703000 - RNA, 19 nt, Artificial Sequence
  Description of Artificial Sequence: Synthetic oligonucleotide
cagaauugguccccuccgc

SEQ ID NO: 703001 - RNA, 19 nt, Artificial Sequence
  Description of Artificial Sequence: Synthetic oligonucleotide
agccaauguugaugcgugg

SEQ ID NO: 703002 - RNA, 19 nt, Artificial Sequence
  Description of Artificial Sequence: Synthetic oligonucleotide
guccacuugucagaaccgg

SEQ ID NO: 703003 - RNA, 19 nt, Artificial Sequence
  Description of Artificial Sequence: Synthetic oligonucleotide
uggcagcgcacucgaacag

SEQ ID NO: 703004 - RNA, 19 nt, Artificial Sequence
  Description of Artificial Sequence: Synthetic oligonucleotide
caaguguaguaguacucca

SEQ ID NO: 703005 - RNA, 19 nt, Artificial Sequence
  Description of Artificial Sequence: Synthetic oligonucleotide
ccaacgaagguggaggccg

SEQ ID NO: 703006 - RNA, 19 nt, Artificial Sequence
  Description of Artificial Sequence: Synthetic oligonucleotide
uuccuaucuuccucugggu

SEQ ID NO: 703007 - RNA, 19 nt, Artificial Sequence
  Description of Artificial Sequence: Synthetic oligonucleotide
uguugaugcgugguucaac

SEQ ID NO: 703008 - RNA, 19 nt, Artificial Sequence
  Description of Artificial Sequence: Synthetic oligonucleotide
ggcgugaggggagugaggg

SEQ ID NO: 703009 - RNA, 19 nt, Artificial Sequence
  Description of Artificial Sequence: Synthetic oligonucleotide
cuauaaguggccaacgcuu

SEQ ID NO: 703010 - RNA, 19 nt, Artificial Sequence
  Description of Artificial Sequence: Synthetic oligonucleotide
aacggccugcauggguggc

SEQ ID NO: 703011 - RNA, 19 nt, Artificial Sequence
  Description of Artificial Sequence: Synthetic oligonucleotide
cauguuauugagguggaua

SEQ ID NO: 703012 - RNA, 19 nt, Artificial Sequence
  Description of Artificial Sequence: Synthetic oligonucleotide
accggagaugaggacauug

SEQ ID NO: 703013 - RNA, 19 nt, Artificial Sequence
  Description of Artificial Sequence: Synthetic oligonucleotide
ccaaguguaguaguacucc

SEQ ID NO: 703014 - RNA, 19 nt, Artificial Sequence
  Description of Artificial Sequence: Synthetic oligonucleotide
cucaacuuuugcggugacg

SEQ ID NO: 703015 - RNA, 19 nt, Artificial Sequence
  Description of Artificial Sequence: Synthetic oligonucleotide
aucgaugcugcuggagcgg

SEQ ID NO: 703016 - RNA, 19 nt, Artificial Sequence
  Description of Artificial Sequence: Synthetic oligonucleotide
aguggccaacgcuuuauua

SEQ ID NO: 703017 - RNA, 19 nt, Artificial Sequence
  Description of Artificial Sequence: Synthetic oligonucleotide
uaaguggccaacgcuuuau

SEQ ID NO: 703018 - RNA, 19 nt, Artificial Sequence
  Description of Artificial Sequence: Synthetic oligonucleotide
ugcggaggucccauguuau

SEQ ID NO: 703019 - RNA, 19 nt, Artificial Sequence
  Description of Artificial Sequence: Synthetic oligonucleotide
acuuuugcggugacggcug

SEQ ID NO: 703020 - RNA, 19 nt, Artificial Sequence
  Description of Artificial Sequence: Synthetic oligonucleotide
caacgcuuuauuaaacagu

SEQ ID NO: 703021 - RNA, 19 nt, Artificial Sequence
  Description of Artificial Sequence: Synthetic oligonucleotide
uccggugucuccucccuaa

SEQ ID NO: 703022 - RNA, 19 nt, Artificial Sequence
  Description of Artificial Sequence: Synthetic oligonucleotide
gcuuuugaucuugaagaag

SEQ ID NO: 703023 - RNA, 19 nt, Artificial Sequence
  Description of Artificial Sequence: Synthetic oligonucleotide
agagagugcaaagcaaauu

SEQ ID NO: 703024 - RNA, 19 nt, Artificial Sequence
  Description of Artificial Sequence: Synthetic oligonucleotide
uaguccucucgaugguggc

SEQ ID NO: 703025 - RNA, 19 nt, Artificial Sequence
  Description of Artificial Sequence: Synthetic oligonucleotide
uccacguccuugacuggcu

SEQ ID NO: 703026 - RNA, 19 nt, Artificial Sequence
  Description of Artificial Sequence: Synthetic oligonucleotide
cuuggucauccaagagaag

SEQ ID NO: 703027 - RNA, 19 nt, Artificial Sequence
  Description of Artificial Sequence: Synthetic oligonucleotide
uguccacguccuugacugg

SEQ ID NO: 703028 - RNA, 19 nt, Artificial Sequence
  Description of Artificial Sequence: Synthetic oligonucleotide
gaagauagugguggggucu

SEQ ID NO: 703029 - RNA, 19 nt, Artificial Sequence
  Description of Artificial Sequence: Synthetic oligonucleotide
ugcgggcauggccauucag

SEQ ID NO: 703030 - RNA, 19 nt, Artificial Sequence
  Description of Artificial Sequence: Synthetic oligonucleotide
cugaccaacgaagguggag

SEQ ID NO: 703031 - RNA, 19 nt, Artificial Sequence
  Description of Artificial Sequence: Synthetic oligonucleotide
gggaucucugcuuggaauc

SEQ ID NO: 703032 - RNA, 19 nt, Artificial Sequence
  Description of Artificial Sequence: Synthetic oligonucleotide
gacauugcugaagagcccu

SEQ ID NO: 703033 - RNA, 19 nt, Artificial Sequence
  Description of Artificial Sequence: Synthetic oligonucleotide
cuccucaacuuuugcggug

SEQ ID NO: 703034 - RNA, 19 nt, Artificial Sequence
  Description of Artificial Sequence: Synthetic oligonucleotide
cacggucuuggacuucacc

SEQ ID NO: 703035 - RNA, 19 nt, Artificial Sequence
  Description of Artificial Sequence: Synthetic oligonucleotide
ggugccgccauggaugcgg

SEQ ID NO: 703036 - RNA, 19 nt, Artificial Sequence
  Description of Artificial Sequence: Synthetic oligonucleotide
ugguguuuccgugggauuu

SEQ ID NO: 703037 - RNA, 19 nt, Artificial Sequence
  Description of Artificial Sequence: Synthetic oligonucleotide
ccaagagaagaucccgugc

SEQ ID NO: 703038 - RNA, 19 nt, Artificial Sequence
  Description of Artificial Sequence: Synthetic oligonucleotide
uccuugcuauaaguggcca

SEQ ID NO: 703039 - RNA, 19 nt, Artificial Sequence
  Description of Artificial Sequence: Synthetic oligonucleotide
auuccggcuuuugaucuug

SEQ ID NO: 703040 - RNA, 19 nt, Artificial Sequence
  Description of Artificial Sequence: Synthetic oligonucleotide
uccgugggauuucgagcag

SEQ ID NO: 703041 - RNA, 19 nt, Artificial Sequence
  Description of Artificial Sequence: Synthetic oligonucleotide
gugucucuaggugaugaac

SEQ ID NO: 703042 - RNA, 19 nt, Artificial Sequence
  Description of Artificial Sequence: Synthetic oligonucleotide
agcggcacagcagcacucg

SEQ ID NO: 703043 - RNA, 19 nt, Artificial Sequence
  Description of Artificial Sequence: Synthetic oligonucleotide
gugaccggagaugaggaca

SEQ ID NO: 703044 - RNA, 19 nt, Artificial Sequence
  Description of Artificial Sequence: Synthetic oligonucleotide
aucucaagccaauguugau

SEQ ID NO: 703045 - RNA, 19 nt, Artificial Sequence
  Description of Artificial Sequence: Synthetic oligonucleotide
aaguggccaacgcuuuauu

SEQ ID NO: 703046 - RNA, 19 nt, Artificial Sequence
  Description of Artificial Sequence: Synthetic oligonucleotide
uugcggugacggcuggaug

SEQ ID NO: 703047 - RNA, 19 nt, Artificial Sequence
  Description of Artificial Sequence: Synthetic oligonucleotide
uugaugcgugguucaacau

SEQ ID NO: 703048 - RNA, 19 nt, Artificial Sequence
  Description of Artificial Sequence: Synthetic oligonucleotide
gcucuggugacuugggcac

SEQ ID NO: 703049 - RNA, 19 nt, Artificial Sequence
  Description of Artificial Sequence: Synthetic oligonucleotide
caacggccugcaugggugg

SEQ ID NO: 703050 - RNA, 19 nt, Artificial Sequence
  Description of Artificial Sequence: Synthetic oligonucleotide
gaauugguccccuccgccu

SEQ ID NO: 703051 - RNA, 19 nt, Artificial Sequence
  Description of Artificial Sequence: Synthetic oligonucleotide
accggcauagugguaauuu

SEQ ID NO: 703052 - RNA, 19 nt, Artificial Sequence
  Description of Artificial Sequence: Synthetic oligonucleotide
auaaguggccaacgcuuua

SEQ ID NO: 703053 - RNA, 19 nt, Artificial Sequence
  Description of Artificial Sequence: Synthetic oligonucleotide
agguuuccugaccaacgaa

SEQ ID NO: 703054 - RNA, 19 nt, Artificial Sequence
  Description of Artificial Sequence: Synthetic oligonucleotide
cuuuugcggugacggcugg

SEQ ID NO: 703055 - RNA, 19 nt, Artificial Sequence
  Description of Artificial Sequence: Synthetic oligonucleotide
cugagccacggucuuggac

SEQ ID NO: 703056 - RNA, 19 nt, Artificial Sequence
  Description of Artificial Sequence: Synthetic oligonucleotide
cauuuuaaccugacuggcu

SEQ ID NO: 703057 - RNA, 19 nt, Artificial Sequence
  Description of Artificial Sequence: Synthetic oligonucleotide
gccaacgcuuuauuaaaca

SEQ ID NO: 703058 - RNA, 19 nt, Artificial Sequence
  Description of Artificial Sequence: Synthetic oligonucleotide
cuuucuagagauguccacu

SEQ ID NO: 703059 - RNA, 19 nt, Artificial Sequence
  Description of Artificial Sequence: Synthetic oligonucleotide
ggcuuagaguucuguauca

SEQ ID NO: 703060 - RNA, 19 nt, Artificial Sequence
  Description of Artificial Sequence: Synthetic oligonucleotide
ggcucuggugacuugggca

SEQ ID NO: 703061 - RNA, 19 nt, Artificial Sequence
  Description of Artificial Sequence: Synthetic oligonucleotide
ggccccuaacugcugaacc

SEQ ID NO: 703062 - RNA, 19 nt, Artificial Sequence
  Description of Artificial Sequence: Synthetic oligonucleotide
uauccugagccagggcgga

SEQ ID NO: 703063 - RNA, 19 nt, Artificial Sequence
  Description of Artificial Sequence: Synthetic oligonucleotide
cagcucgugggccgggucc

SEQ ID NO: 703064 - RNA, 19 nt, Artificial Sequence
  Description of Artificial Sequence: Synthetic oligonucleotide
gaguucuguaucacccuga

SEQ ID NO: 703065 - RNA, 19 nt, Artificial Sequence
  Description of Artificial Sequence: Synthetic oligonucleotide
ggaggucccauguuauuga

SEQ ID NO: 703066 - RNA, 19 nt, Artificial Sequence
  Description of Artificial Sequence: Synthetic oligonucleotide
augcggaggucccauguua

SEQ ID NO: 703067 - RNA, 19 nt, Artificial Sequence
  Description of Artificial Sequence: Synthetic oligonucleotide
ccuuguguguauccugagc

SEQ ID NO: 703068 - RNA, 19 nt, Artificial Sequence
  Description of Artificial Sequence: Synthetic oligonucleotide
uaucacccugaagcaaaac

SEQ ID NO: 703069 - RNA, 19 nt, Artificial Sequence
  Description of Artificial Sequence: Synthetic oligonucleotide
guugggaguauaggaagaa

SEQ ID NO: 703070 - RNA, 19 nt, Artificial Sequence
  Description of Artificial Sequence: Synthetic oligonucleotide
acggccugcauggguggcc

SEQ ID NO: 703071 - RNA, 19 nt, Artificial Sequence
  Description of Artificial Sequence: Synthetic oligonucleotide
cagguuuccugaccaacga

SEQ ID NO: 703072 - RNA, 19 nt, Artificial Sequence
  Description of Artificial Sequence: Synthetic oligonucleotide
ccaacggccugcaugggug

SEQ ID NO: 703073 - RNA, 19 nt, Artificial Sequence
  Description of Artificial Sequence: Synthetic oligonucleotide
guccacguccuugacuggc

SEQ ID NO: 703074 - RNA, 19 nt, Artificial Sequence
  Description of Artificial Sequence: Synthetic oligonucleotide
gcuauaaguggccaacgcu

SEQ ID NO: 703075 - RNA, 19 nt, Artificial Sequence
  Description of Artificial Sequence: Synthetic oligonucleotide
gccgugaccggagaugagg

SEQ ID NO: 703076 - RNA, 19 nt, Artificial Sequence
  Description of Artificial Sequence: Synthetic oligonucleotide
ccacaguugggcauuucac

SEQ ID NO: 703077 - RNA, 19 nt, Artificial Sequence
  Description of Artificial Sequence: Synthetic oligonucleotide
gggauuucgagcagggaga

SEQ ID NO: 703078 - RNA, 19 nt, Artificial Sequence
  Description of Artificial Sequence: Synthetic oligonucleotide
gucacauugcugccaucga

SEQ ID NO: 703079 - RNA, 19 nt, Artificial Sequence
  Description of Artificial Sequence: Synthetic oligonucleotide
cggcauagugguaauuugc

SEQ ID NO: 703080 - RNA, 19 nt, Artificial Sequence
  Description of Artificial Sequence: Synthetic oligonucleotide
gucccauguuauugaggug

SEQ ID NO: 703081 - RNA, 19 nt, Artificial Sequence
  Description of Artificial Sequence: Synthetic oligonucleotide
aacgaagguggaggccgug

SEQ ID NO: 703082 - RNA, 19 nt, Artificial Sequence
  Description of Artificial Sequence: Synthetic oligonucleotide
uucacucgucaugcaguca

SEQ ID NO: 703083 - RNA, 19 nt, Artificial Sequence
  Description of Artificial Sequence: Synthetic oligonucleotide
accgaaucuuggucaucca

SEQ ID NO: 703084 - RNA, 19 nt, Artificial Sequence
  Description of Artificial Sequence: Synthetic oligonucleotide
augugugcauuccggcuuu

SEQ ID NO: 703085 - RNA, 19 nt, Artificial Sequence
  Description of Artificial Sequence: Synthetic oligonucleotide
uuccggcuuuugaucuuga

SEQ ID NO: 703086 - RNA, 19 nt, Artificial Sequence
  Description of Artificial Sequence: Synthetic oligonucleotide
gcuaaaggaugacauuuua

SEQ ID NO: 703087 - RNA, 19 nt, Artificial Sequence
  Description of Artificial Sequence: Synthetic oligonucleotide
gauuucgagcagggagaug

SEQ ID NO: 703088 - RNA, 19 nt, Artificial Sequence
  Description of Artificial Sequence: Synthetic oligonucleotide
cucccuaaccgcauuauuu

SEQ ID NO: 703089 - RNA, 19 nt, Artificial Sequence
  Description of Artificial Sequence: Synthetic oligonucleotide
uccucucgaugguggcugc

SEQ ID NO: 703090 - RNA, 19 nt, Artificial Sequence
  Description of Artificial Sequence: Synthetic oligonucleotide
gaugguuggccaacggccu

SEQ ID NO: 703091 - RNA, 19 nt, Artificial Sequence
  Description of Artificial Sequence: Synthetic oligonucleotide
cauuccuugcaggggaaga

SEQ ID NO: 703092 - RNA, 19 nt, Artificial Sequence
  Description of Artificial Sequence: Synthetic oligonucleotide
ggggaagauaguggugggg

SEQ ID NO: 703093 - RNA, 19 nt, Artificial Sequence
  Description of Artificial Sequence: Synthetic oligonucleotide
caguacccgcucugagugc

SEQ ID NO: 703094 - RNA, 19 nt, Artificial Sequence
  Description of Artificial Sequence: Synthetic oligonucleotide
guguauccugagccagggc

SEQ ID NO: 703095 - RNA, 19 nt, Artificial Sequence
  Description of Artificial Sequence: Synthetic oligonucleotide
gcguggggagcgcagcugg

SEQ ID NO: 703096 - RNA, 19 nt, Artificial Sequence
  Description of Artificial Sequence: Synthetic oligonucleotide
cagguaguuuaaaaggguu

SEQ ID NO: 703097 - RNA, 19 nt, Artificial Sequence
  Description of Artificial Sequence: Synthetic oligonucleotide
guguccggugucuccuccc

SEQ ID NO: 703098 - RNA, 19 nt, Artificial Sequence
  Description of Artificial Sequence: Synthetic oligonucleotide
gagccugaugguuggccaa

SEQ ID NO: 703099 - RNA, 19 nt, Artificial Sequence
  Description of Artificial Sequence: Synthetic oligonucleotide
cuuggaaucucaagccaau

SEQ ID NO: 703100 - RNA, 19 nt, Artificial Sequence
  Description of Artificial Sequence: Synthetic oligonucleotide
ugauuuccgccaggcgugu

SEQ ID NO: 703101 - RNA, 19 nt, Artificial Sequence
  Description of Artificial Sequence: Synthetic oligonucleotide
uuuugcggugacggcugga

SEQ ID NO: 703102 - RNA, 19 nt, Artificial Sequence
  Description of Artificial Sequence: Synthetic oligonucleotide
cauggccccuaacugcuga

SEQ ID NO: 703103 - RNA, 19 nt, Artificial Sequence
  Description of Artificial Sequence: Synthetic oligonucleotide
ucuccucccuaaccgcauu

SEQ ID NO: 703104 - RNA, 19 nt, Artificial Sequence
  Description of Artificial Sequence: Synthetic oligonucleotide
aguccucucgaugguggcu

SEQ ID NO: 703105 - RNA, 19 nt, Artificial Sequence
  Description of Artificial Sequence: Synthetic oligonucleotide
cccaguaguccucucgaug

SEQ ID NO: 703106 - RNA, 19 nt, Artificial Sequence
  Description of Artificial Sequence: Synthetic oligonucleotide
ccucccuuaaccugaagaa

SEQ ID NO: 703107 - RNA, 19 nt, Artificial Sequence
  Description of Artificial Sequence: Synthetic oligonucleotide
gugcauuccggcuuuugau

SEQ ID NO: 703108 - RNA, 19 nt, Artificial Sequence
  Description of Artificial Sequence: Synthetic oligonucleotide
gaagagcggcucgggccgg

SEQ ID NO: 703109 - RNA, 19 nt, Artificial Sequence
  Description of Artificial Sequence: Synthetic oligonucleotide
acagcaccucgggucuugg

SEQ ID NO: 703110 - RNA, 19 nt, Artificial Sequence
  Description of Artificial Sequence: Synthetic oligonucleotide
uccucccuaaccgcauuau

SEQ ID NO: 703111 - RNA, 19 nt, Artificial Sequence
  Description of Artificial Sequence: Synthetic oligonucleotide
gguccccuccgccuggcag

SEQ ID NO: 703112 - RNA, 19 nt, Artificial Sequence
  Description of Artificial Sequence: Synthetic oligonucleotide
gguucuccacuuguugcug

SEQ ID NO: 703113 - RNA, 19 nt, Artificial Sequence
  Description of Artificial Sequence: Synthetic oligonucleotide
acgcacugagccacggucu

SEQ ID NO: 703114 - RNA, 19 nt, Artificial Sequence
  Description of Artificial Sequence: Synthetic oligonucleotide
cacucgucaugcagucauc

SEQ ID NO: 703115 - RNA, 19 nt, Artificial Sequence
  Description of Artificial Sequence: Synthetic oligonucleotide
acauugcugaagagcccug

SEQ ID NO: 703116 - RNA, 19 nt, Artificial Sequence
  Description of Artificial Sequence: Synthetic oligonucleotide
agcgcagcuggcucuggua

SEQ ID NO: 703117 - RNA, 19 nt, Artificial Sequence
  Description of Artificial Sequence: Synthetic oligonucleotide
cuaaccgcauuauuuucuu

SEQ ID NO: 703118 - RNA, 19 nt, Artificial Sequence
  Description of Artificial Sequence: Synthetic oligonucleotide
gagagagugcaaagcaaau

SEQ ID NO: 703119 - RNA, 19 nt, Artificial Sequence
  Description of Artificial Sequence: Synthetic oligonucleotide
uggccccuaacugcugaac

SEQ ID NO: 703120 - RNA, 19 nt, Artificial Sequence
  Description of Artificial Sequence: Synthetic oligonucleotide
gaucccgugcccaccaccu

SEQ ID NO: 703121 - RNA, 19 nt, Artificial Sequence
  Description of Artificial Sequence: Synthetic oligonucleotide
cauggccauucagugccug

SEQ ID NO: 703122 - RNA, 19 nt, Artificial Sequence
  Description of Artificial Sequence: Synthetic oligonucleotide
gcgguggcgggaugaagag

SEQ ID NO: 703123 - RNA, 19 nt, Artificial Sequence
  Description of Artificial Sequence: Synthetic oligonucleotide
gcgugguucaacauccaca

SEQ ID NO: 703124 - RNA, 19 nt, Artificial Sequence
  Description of Artificial Sequence: Synthetic oligonucleotide
uggaugcgggcauggccau

SEQ ID NO: 703125 - RNA, 19 nt, Artificial Sequence
  Description of Artificial Sequence: Synthetic oligonucleotide
gcgcacucgaacagcacag

SEQ ID NO: 703126 - RNA, 19 nt, Artificial Sequence
  Description of Artificial Sequence: Synthetic oligonucleotide
gcauuccggcuuuugaucu

SEQ ID NO: 703127 - RNA, 19 nt, Artificial Sequence
  Description of Artificial Sequence: Synthetic oligonucleotide
gccccuaacugcugaacca

SEQ ID NO: 703128 - RNA, 19 nt, Artificial Sequence
  Description of Artificial Sequence: Synthetic oligonucleotide
cgcucugagugccaccugg

SEQ ID NO: 703129 - RNA, 19 nt, Artificial Sequence
  Description of Artificial Sequence: Synthetic oligonucleotide
cugcuggagcggcacagca

SEQ ID NO: 703130 - RNA, 19 nt, Artificial Sequence
  Description of Artificial Sequence: Synthetic oligonucleotide
agaccuugccacauuccuu

SEQ ID NO: 703131 - RNA, 19 nt, Artificial Sequence
  Description of Artificial Sequence: Synthetic oligonucleotide
gggaagauagugguggggu

SEQ ID NO: 703132 - RNA, 19 nt, Artificial Sequence
  Description of Artificial Sequence: Synthetic oligonucleotide
cugcgaaagcugccuucug

SEQ ID NO: 703133 - RNA, 19 nt, Artificial Sequence
  Description of Artificial Sequence: Synthetic oligonucleotide
cccucccuuaaccugaaga

SEQ ID NO: 703134 - RNA, 19 nt, Artificial Sequence
  Description of Artificial Sequence: Synthetic oligonucleotide
ugccaccuggcuucugcuu

SEQ ID NO: 703135 - RNA, 19 nt, Artificial Sequence
  Description of Artificial Sequence: Synthetic oligonucleotide
guaguacuccacgcacuga

SEQ ID NO: 703136 - RNA, 19 nt, Artificial Sequence
  Description of Artificial Sequence: Synthetic oligonucleotide
cuguaucacccugaagcaa

SEQ ID NO: 703137 - RNA, 19 nt, Artificial Sequence
  Description of Artificial Sequence: Synthetic oligonucleotide
cgggcauggccauucagug

SEQ ID NO: 703138 - RNA, 19 nt, Artificial Sequence
  Description of Artificial Sequence: Synthetic oligonucleotide
cagcgcacucgaacagcac

SEQ ID NO: 703139 - RNA, 19 nt, Artificial Sequence
  Description of Artificial Sequence: Synthetic oligonucleotide
ggcgguggcgggaugaaga

SEQ ID NO: 703140 - RNA, 19 nt, Artificial Sequence
  Description of Artificial Sequence: Synthetic oligonucleotide
ugagugccaccuggcuucu

SEQ ID NO: 703141 - RNA, 19 nt, Artificial Sequence
  Description of Artificial Sequence: Synthetic oligonucleotide
aaccggcauagugguaauu

SEQ ID NO: 703142 - RNA, 19 nt, Artificial Sequence
  Description of Artificial Sequence: Synthetic oligonucleotide
guaucacccugaagcaaaa

SEQ ID NO: 703143 - RNA, 19 nt, Artificial Sequence
  Description of Artificial Sequence: Synthetic oligonucleotide
ggccaacgcuuuauuaaac

SEQ ID NO: 703144 - RNA, 19 nt, Artificial Sequence
  Description of Artificial Sequence: Synthetic oligonucleotide
cacauuccuugcaggggaa

SEQ ID NO: 703145 - RNA, 19 nt, Artificial Sequence
  Description of Artificial Sequence: Synthetic oligonucleotide
ugccugucgggagcugaac

SEQ ID NO: 703146 - RNA, 19 nt, Artificial Sequence
  Description of Artificial Sequence: Synthetic oligonucleotide
cucucgaugguggcugcca

SEQ ID NO: 703147 - RNA, 19 nt, Artificial Sequence
  Description of Artificial Sequence: Synthetic oligonucleotide
gaugcggaggucccauguu

SEQ ID NO: 703148 - RNA, 19 nt, Artificial Sequence
  Description of Artificial Sequence: Synthetic oligonucleotide
cccacaguugggcauuuca

SEQ ID NO: 703149 - RNA, 19 nt, Artificial Sequence
  Description of Artificial Sequence: Synthetic oligonucleotide
gccugucgggagcugaaca

SEQ ID NO: 703150 - RNA, 19 nt, Artificial Sequence
  Description of Artificial Sequence: Synthetic oligonucleotide
gguguuuccgugggauuuc

SEQ ID NO: 703151 - RNA, 19 nt, Artificial Sequence
  Description of Artificial Sequence: Synthetic oligonucleotide
cugggaucucugcuuggaa

SEQ ID NO: 703152 - RNA, 19 nt, Artificial Sequence
  Description of Artificial Sequence: Synthetic oligonucleotide
cagcacucguggcgugggc

SEQ ID NO: 703153 - RNA, 19 nt, Artificial Sequence
  Description of Artificial Sequence: Synthetic oligonucleotide
ggcuggaugguguuuccgu

SEQ ID NO: 703154 - RNA, 19 nt, Artificial Sequence
  Description of Artificial Sequence: Synthetic oligonucleotide
cugugagauggugaacucu

SEQ ID NO: 703155 - RNA, 19 nt, Artificial Sequence
  Description of Artificial Sequence: Synthetic oligonucleotide
gccugaugguuggccaacg

SEQ ID NO: 703156 - RNA, 19 nt, Artificial Sequence
  Description of Artificial Sequence: Synthetic oligonucleotide
aggaugcguggggagcgca

SEQ ID NO: 703157 - RNA, 19 nt, Artificial Sequence
  Description of Artificial Sequence: Synthetic oligonucleotide
acgcuuuauuaaacaguuu

SEQ ID NO: 703158 - RNA, 19 nt, Artificial Sequence
  Description of Artificial Sequence: Synthetic oligonucleotide
ggguuucaaaggagcagga

SEQ ID NO: 703159 - RNA, 19 nt, Artificial Sequence
  Description of Artificial Sequence: Synthetic oligonucleotide
cacugguggugcugugaga

SEQ ID NO: 703160 - RNA, 19 nt, Artificial Sequence
  Description of Artificial Sequence: Synthetic oligonucleotide
ggaugcggaggucccaugu

SEQ ID NO: 703161 - RNA, 19 nt, Artificial Sequence
  Description of Artificial Sequence: Synthetic oligonucleotide
gugggauuucgagcaggga

SEQ ID NO: 703162 - RNA, 19 nt, Artificial Sequence
  Description of Artificial Sequence: Synthetic oligonucleotide
augcgggcauggccauuca

SEQ ID NO: 703163 - RNA, 19 nt, Artificial Sequence
  Description of Artificial Sequence: Synthetic oligonucleotide
uggugccgccauggaugcg

SEQ ID NO: 703164 - RNA, 19 nt, Artificial Sequence
  Description of Artificial Sequence: Synthetic oligonucleotide
gcucugagugccaccuggc

SEQ ID NO: 703165 - RNA, 19 nt, Artificial Sequence
  Description of Artificial Sequence: Synthetic oligonucleotide
gccgccauggaugcgggca

SEQ ID NO: 703166 - RNA, 19 nt, Artificial Sequence
  Description of Artificial Sequence: Synthetic oligonucleotide
cggaggucccauguuauug

SEQ ID NO: 703167 - RNA, 19 nt, Artificial Sequence
  Description of Artificial Sequence: Synthetic oligonucleotide
guccagguuuccugaccaa

SEQ ID NO: 703168 - RNA, 19 nt, Artificial Sequence
  Description of Artificial Sequence: Synthetic oligonucleotide
acucguggcgugggcguga

SEQ ID NO: 703169 - RNA, 19 nt, Artificial Sequence
  Description of Artificial Sequence: Synthetic oligonucleotide
gauuuccgccaggcguguc

SEQ ID NO: 703170 - RNA, 19 nt, Artificial Sequence
  Description of Artificial Sequence: Synthetic oligonucleotide
gcagcgcacucgaacagca

SEQ ID NO: 703171 - RNA, 19 nt, Artificial Sequence
  Description of Artificial Sequence: Synthetic oligonucleotide
ccgugggauuucgagcagg

SEQ ID NO: 703172 - RNA, 19 nt, Artificial Sequence
  Description of Artificial Sequence: Synthetic oligonucleotide
gaaccggcauagugguaau

SEQ ID NO: 703173 - RNA, 19 nt, Artificial Sequence
  Description of Artificial Sequence: Synthetic oligonucleotide
cucugagugccaccuggcu

SEQ ID NO: 703174 - RNA, 19 nt, Artificial Sequence
  Description of Artificial Sequence: Synthetic oligonucleotide
cucguggcgugggcgugag

SEQ ID NO: 703175 - RNA, 19 nt, Artificial Sequence
  Description of Artificial Sequence: Synthetic oligonucleotide
gcuccucaacuuuugcggu

SEQ ID NO: 703176 - RNA, 19 nt, Artificial Sequence
  Description of Artificial Sequence: Synthetic oligonucleotide
ccgaggaugcguggggagc

SEQ ID NO: 703177 - RNA, 19 nt, Artificial Sequence
  Description of Artificial Sequence: Synthetic oligonucleotide
ggagcugaacacagcccca

SEQ ID NO: 703178 - RNA, 19 nt, Artificial Sequence
  Description of Artificial Sequence: Synthetic oligonucleotide
gugggcgugaggggaguga

SEQ ID NO: 703179 - RNA, 19 nt, Artificial Sequence
  Description of Artificial Sequence: Synthetic oligonucleotide
gcacucgaacagcacaggu

SEQ ID NO: 703180 - RNA, 19 nt, Artificial Sequence
  Description of Artificial Sequence: Synthetic oligonucleotide
ccgugaccggagaugagga

SEQ ID NO: 703181 - RNA, 19 nt, Artificial Sequence
  Description of Artificial Sequence: Synthetic oligonucleotide
agccccacaguugggcauu

SEQ ID NO: 703182 - RNA, 19 nt, Artificial Sequence
  Description of Artificial Sequence: Synthetic oligonucleotide
cccaccggcccaguagucc

SEQ ID NO: 703183 - RNA, 19 nt, Artificial Sequence
  Description of Artificial Sequence: Synthetic oligonucleotide
ccccgaguaagaggugggg

SEQ ID NO: 703184 - RNA, 19 nt, Artificial Sequence
  Description of Artificial Sequence: Synthetic oligonucleotide
ccuugcuauaaguggccaa

SEQ ID NO: 703185 - RNA, 19 nt, Artificial Sequence
  Description of Artificial Sequence: Synthetic oligonucleotide
cuccucccuaaccgcauua

SEQ ID NO: 703186 - RNA, 19 nt, Artificial Sequence
  Description of Artificial Sequence: Synthetic oligonucleotide
caccggcccaguaguccuc

SEQ ID NO: 703187 - RNA, 19 nt, Artificial Sequence
  Description of Artificial Sequence: Synthetic oligonucleotide
ugcugccgguggguuuuca

SEQ ID NO: 703188 - RNA, 19 nt, Artificial Sequence
  Description of Artificial Sequence: Synthetic oligonucleotide
gccaauguugaugcguggu

SEQ ID NO: 703189 - RNA, 19 nt, Artificial Sequence
  Description of Artificial Sequence: Synthetic oligonucleotide
caggcguguccggugucuc

SEQ ID NO: 703190 - RNA, 19 nt, Artificial Sequence
  Description of Artificial Sequence: Synthetic oligonucleotide
gguuggugccgccauggau

SEQ ID NO: 703191 - RNA, 19 nt, Artificial Sequence
  Description of Artificial Sequence: Synthetic oligonucleotide
ggugguccccgaggaugcg

SEQ ID NO: 703192 - RNA, 19 nt, Artificial Sequence
  Description of Artificial Sequence: Synthetic oligonucleotide
ggugccggaauuucuucuu

SEQ ID NO: 703193 - RNA, 19 nt, Artificial Sequence
  Description of Artificial Sequence: Synthetic oligonucleotide
gagccacggucuuggacuu

SEQ ID NO: 703194 - RNA, 19 nt, Artificial Sequence
  Description of Artificial Sequence: Synthetic oligonucleotide
cugcauggguggcccuuca

SEQ ID NO: 703195 - RNA, 19 nt, Artificial Sequence
  Description of Artificial Sequence: Synthetic oligonucleotide
ccggugccggaauuucuuc

SEQ ID NO: 703196 - RNA, 19 nt, Artificial Sequence
  Description of Artificial Sequence: Synthetic oligonucleotide
caguaguccucucgauggu

SEQ ID NO: 703197 - RNA, 19 nt, Artificial Sequence
  Description of Artificial Sequence: Synthetic oligonucleotide
cccuaacugcugaaccaca

SEQ ID NO: 703198 - RNA, 19 nt, Artificial Sequence
  Description of Artificial Sequence: Synthetic oligonucleotide
caacgaagguggaggccgu

SEQ ID NO: 703199 - RNA, 19 nt, Artificial Sequence
  Description of Artificial Sequence: Synthetic oligonucleotide
ccuggggugacugucacau

SEQ ID NO: 703200 - RNA, 19 nt, Artificial Sequence
  Description of Artificial Sequence: Synthetic oligonucleotide
cguguccggugucuccucc

SEQ ID NO: 703201 - RNA, 19 nt, Artificial Sequence
  Description of Artificial Sequence: Synthetic oligonucleotide
gcggagacaucuugcaguu

SEQ ID NO: 703202 - RNA, 19 nt, Artificial Sequence
  Description of Artificial Sequence: Synthetic oligonucleotide
ccgccuggcagcgcacucg

SEQ ID NO: 703203 - RNA, 19 nt, Artificial Sequence
  Description of Artificial Sequence: Synthetic oligonucleotide
ccucaacuuuugcggugac

SEQ ID NO: 703204 - RNA, 19 nt, Artificial Sequence
  Description of Artificial Sequence: Synthetic oligonucleotide
cagaaccggcauaguggua

SEQ ID NO: 703205 - RNA, 19 nt, Artificial Sequence
  Description of Artificial Sequence: Synthetic oligonucleotide
gcacugagccacggucuug

SEQ ID NO: 703206 - RNA, 19 nt, Artificial Sequence
  Description of Artificial Sequence: Synthetic oligonucleotide
cauuccggcuuuugaucuu

SEQ ID NO: 703207 - RNA, 19 nt, Artificial Sequence
  Description of Artificial Sequence: Synthetic oligonucleotide
ccgcauuauuuucuuccaa

SEQ ID NO: 703208 - RNA, 19 nt, Artificial Sequence
  Description of Artificial Sequence: Synthetic oligonucleotide
gugccugucgggagcugaa

SEQ ID NO: 703209 - RNA, 19 nt, Artificial Sequence
  Description of Artificial Sequence: Synthetic oligonucleotide
guggggagcgcagcuggcu

SEQ ID NO: 703210 - RNA, 19 nt, Artificial Sequence
  Description of Artificial Sequence: Synthetic oligonucleotide
accucgggucuuggucacu

SEQ ID NO: 703211 - RNA, 19 nt, Artificial Sequence
  Description of Artificial Sequence: Synthetic oligonucleotide
guacccgcucugagugcca

SEQ ID NO: 703212 - RNA, 19 nt, Artificial Sequence
  Description of Artificial Sequence: Synthetic oligonucleotide
cccugaagcaaaaccgaau

SEQ ID NO: 703213 - RNA, 19 nt, Artificial Sequence
  Description of Artificial Sequence: Synthetic oligonucleotide
gccaacggccugcaugggu

SEQ ID NO: 703214 - RNA, 19 nt, Artificial Sequence
  Description of Artificial Sequence: Synthetic oligonucleotide
gugagauggugaacucuuu

SEQ ID NO: 703215 - RNA, 19 nt, Artificial Sequence
  Description of Artificial Sequence: Synthetic oligonucleotide
uugcugccgguggguuuuc

SEQ ID NO: 703216 - RNA, 19 nt, Artificial Sequence
  Description of Artificial Sequence: Synthetic oligonucleotide
caucaccuuuggccucaaa

SEQ ID NO: 703217 - RNA, 19 nt, Artificial Sequence
  Description of Artificial Sequence: Synthetic oligonucleotide
ccucucgaugguggcugcc

SEQ ID NO: 703218 - RNA, 19 nt, Artificial Sequence
  Description of Artificial Sequence: Synthetic oligonucleotide
ggggagcgcagcuggcucu

SEQ ID NO: 703219 - RNA, 19 nt, Artificial Sequence
  Description of Artificial Sequence: Synthetic oligonucleotide
ccucuucacucgucaugca

SEQ ID NO: 703220 - RNA, 19 nt, Artificial Sequence
  Description of Artificial Sequence: Synthetic oligonucleotide
cuuccgcagcagcagcauu

SEQ ID NO: 703221 - RNA, 19 nt, Artificial Sequence
  Description of Artificial Sequence: Synthetic oligonucleotide
ccacggucuuggacuucac

SEQ ID NO: 703222 - RNA, 19 nt, Artificial Sequence
  Description of Artificial Sequence: Synthetic oligonucleotide
cuggcgcaccgggcucagc

SEQ ID NO: 703223 - RNA, 19 nt, Artificial Sequence
  Description of Artificial Sequence: Synthetic oligonucleotide
ccgccaggcguguccggug

SEQ ID NO: 703224 - RNA, 19 nt, Artificial Sequence
  Description of Artificial Sequence: Synthetic oligonucleotide
ccuugcaggggaagauagu

SEQ ID NO: 703225 - RNA, 19 nt, Artificial Sequence
  Description of Artificial Sequence: Synthetic oligonucleotide
gcguguccggugucuccuc

SEQ ID NO: 703226 - RNA, 19 nt, Artificial Sequence
  Description of Artificial Sequence: Synthetic oligonucleotide
ccaccggcccaguaguccu

SEQ ID NO: 703227 - RNA, 19 nt, Artificial Sequence
  Description of Artificial Sequence: Synthetic oligonucleotide
cagcaccucgggucuuggu

SEQ ID NO: 703228 - RNA, 19 nt, Artificial Sequence
  Description of Artificial Sequence: Synthetic oligonucleotide
guuggccaacggccugcau

SEQ ID NO: 703229 - RNA, 19 nt, Artificial Sequence
  Description of Artificial Sequence: Synthetic oligonucleotide
cugggccgugaccggagau

SEQ ID NO: 703230 - RNA, 19 nt, Artificial Sequence
  Description of Artificial Sequence: Synthetic oligonucleotide
cggaugcggaggucccaug

SEQ ID NO: 703231 - RNA, 19 nt, Artificial Sequence
  Description of Artificial Sequence: Synthetic oligonucleotide
gcccuggcgcaccgggcuc

SEQ ID NO: 703232 - RNA, 19 nt, Artificial Sequence
  Description of Artificial Sequence: Synthetic oligonucleotide
ccccucccuuaaccugaag

SEQ ID NO: 703233 - RNA, 19 nt, Artificial Sequence
  Description of Artificial Sequence: Synthetic oligonucleotide
ccugggccgugaccggaga

SEQ ID NO: 703234 - RNA, 19 nt, Artificial Sequence
  Description of Artificial Sequence: Synthetic oligonucleotide
gcggaggucccauguuauu

SEQ ID NO: 703235 - RNA, 19 nt, Artificial Sequence
  Description of Artificial Sequence: Synthetic oligonucleotide
gccggugccggaauuucuu

SEQ ID NO: 703236 - RNA, 19 nt, Artificial Sequence
  Description of Artificial Sequence: Synthetic oligonucleotide
gcggugacggcuggauggu

SEQ ID NO: 703237 - RNA, 19 nt, Artificial Sequence
  Description of Artificial Sequence: Synthetic oligonucleotide
cggugccggaauuucuucu

SEQ ID NO: 703238 - RNA, 19 nt, Artificial Sequence
  Description of Artificial Sequence: Synthetic oligonucleotide
ggccggugccggaauuucu

SEQ ID NO: 703239 - RNA, 19 nt, Artificial Sequence
  Description of Artificial Sequence: Synthetic oligonucleotide
gaccggagaugaggacauu

SEQ ID NO: 703240 - RNA, 19 nt, Artificial Sequence
  Description of Artificial Sequence: Synthetic oligonucleotide
cucgggccggugccggaau

SEQ ID NO: 703241 - RNA, 19 nt, Artificial Sequence
  Description of Artificial Sequence: Synthetic oligonucleotide
gcggaugcggaggucccau

SEQ ID NO: 703242 - RNA, 19 nt, Artificial Sequence
  Description of Artificial Sequence: Synthetic oligonucleotide
ccaggcguguccggugucu

SEQ ID NO: 703243 - RNA, 19 nt, Artificial Sequence
  Description of Artificial Sequence: Synthetic oligonucleotide
cggugacggcuggauggug

SEQ ID NO: 703244 - RNA, 19 nt, Artificial Sequence
  Description of Artificial Sequence: Synthetic oligonucleotide
ggccugcauggguggcccu

SEQ ID NO: 703245 - RNA, 19 nt, Artificial Sequence
  Description of Artificial Sequence: Synthetic oligonucleotide
cgcacugagccacggucuu

SEQ ID NO: 703246 - RNA, 19 nt, Artificial Sequence
  Description of Artificial Sequence: Synthetic oligonucleotide
ccguggcuucugugucucu

SEQ ID NO: 703247 - RNA, 19 nt, Artificial Sequence
  Description of Artificial Sequence: Synthetic oligonucleotide
aaguuuaauacccagaauc

SEQ ID NO: 703248 - RNA, 19 nt, Artificial Sequence
  Description of Artificial Sequence: Synthetic oligonucleotide
aauucgguaauacugacac

SEQ ID NO: 703249 - RNA, 19 nt, Artificial Sequence
  Description of Artificial Sequence: Synthetic oligonucleotide
agaaauuccuguuauaugc

SEQ ID NO: 703250 - RNA, 19 nt, Artificial Sequence
  Description of Artificial Sequence: Synthetic oligonucleotide
uuaucugucaaauaagugg

SEQ ID NO: 703251 - RNA, 19 nt, Artificial Sequence
  Description of Artificial Sequence: Synthetic oligonucleotide
uguuuuguggccuuaauag

SEQ ID NO: 703252 - RNA, 19 nt, Artificial Sequence
  Description of Artificial Sequence: Synthetic oligonucleotide
uuuagaaugggaauuauaa

SEQ ID NO: 703253 - RNA, 19 nt, Artificial Sequence
  Description of Artificial Sequence: Synthetic oligonucleotide
ugaacaguacagcugaugg

SEQ ID NO: 703254 - RNA, 19 nt, Artificial Sequence
  Description of Artificial Sequence: Synthetic oligonucleotide
uuuaaacccaugaagaaga

SEQ ID NO: 703255 - RNA, 19 nt, Artificial Sequence
  Description of Artificial Sequence: Synthetic oligonucleotide
cauaacaaguuuaauaccc

SEQ ID NO: 703256 - RNA, 19 nt, Artificial Sequence
  Description of Artificial Sequence: Synthetic oligonucleotide
agugaaugaaucuaaauca

SEQ ID NO: 703257 - RNA, 19 nt, Artificial Sequence
  Description of Artificial Sequence: Synthetic oligonucleotide
ugcauaacaaguuuaauac

SEQ ID NO: 703258 - RNA, 19 nt, Artificial Sequence
  Description of Artificial Sequence: Synthetic oligonucleotide
ucucgguuaaaccacaagg

SEQ ID NO: 703259 - RNA, 19 nt, Artificial Sequence
  Description of Artificial Sequence: Synthetic oligonucleotide
aauacugacacaauucuuc

SEQ ID NO: 703260 - RNA, 19 nt, Artificial Sequence
  Description of Artificial Sequence: Synthetic oligonucleotide
aguuacauuaccaaacucc

SEQ ID NO: 703261 - RNA, 19 nt, Artificial Sequence
  Description of Artificial Sequence: Synthetic oligonucleotide
ucuucuaaaagcauauacc

SEQ ID NO: 703262 - RNA, 19 nt, Artificial Sequence
  Description of Artificial Sequence: Synthetic oligonucleotide
aauggcuaguucuaguuuc

SEQ ID NO: 703263 - RNA, 19 nt, Artificial Sequence
  Description of Artificial Sequence: Synthetic oligonucleotide
aagcauauaccaauaaccc

SEQ ID NO: 703264 - RNA, 19 nt, Artificial Sequence
  Description of Artificial Sequence: Synthetic oligonucleotide
uguuauaugcugcauaaca

SEQ ID NO: 703265 - RNA, 19 nt, Artificial Sequence
  Description of Artificial Sequence: Synthetic oligonucleotide
aauaguuuguacaacuuag

SEQ ID NO: 703266 - RNA, 19 nt, Artificial Sequence
  Description of Artificial Sequence: Synthetic oligonucleotide
aagugauugagaaugaaag

SEQ ID NO: 703267 - RNA, 19 nt, Artificial Sequence
  Description of Artificial Sequence: Synthetic oligonucleotide
ucuaguuacauuaccaaac

SEQ ID NO: 703268 - RNA, 19 nt, Artificial Sequence
  Description of Artificial Sequence: Synthetic oligonucleotide
uaugagguagaguaaagcc

SEQ ID NO: 703269 - RNA, 19 nt, Artificial Sequence
  Description of Artificial Sequence: Synthetic oligonucleotide
aaaauucgguaauacugac

SEQ ID NO: 703270 - RNA, 19 nt, Artificial Sequence
  Description of Artificial Sequence: Synthetic oligonucleotide
aauucagcuugacauauug

SEQ ID NO: 703271 - RNA, 19 nt, Artificial Sequence
  Description of Artificial Sequence: Synthetic oligonucleotide
uauaugaucugaaaucaca

SEQ ID NO: 703272 - RNA, 19 nt, Artificial Sequence
  Description of Artificial Sequence: Synthetic oligonucleotide
aacaauccaaagaacuucc

SEQ ID NO: 703273 - RNA, 19 nt, Artificial Sequence
  Description of Artificial Sequence: Synthetic oligonucleotide
uuuauaugaucugaaauca

SEQ ID NO: 703274 - RNA, 19 nt, Artificial Sequence
  Description of Artificial Sequence: Synthetic oligonucleotide
auaaaauuaguguuuugug

SEQ ID NO: 703275 - RNA, 19 nt, Artificial Sequence
  Description of Artificial Sequence: Synthetic oligonucleotide
uacauuaccaaacucccca

SEQ ID NO: 703276 - RNA, 19 nt, Artificial Sequence
  Description of Artificial Sequence: Synthetic oligonucleotide
uauuacaugguacuauaca

SEQ ID NO: 703277 - RNA, 19 nt, Artificial Sequence
  Description of Artificial Sequence: Synthetic oligonucleotide
ugacaaaugagaagaacug

SEQ ID NO: 703278 - RNA, 19 nt, Artificial Sequence
  Description of Artificial Sequence: Synthetic oligonucleotide
aagguaaugcauucuucac

SEQ ID NO: 703279 - RNA, 19 nt, Artificial Sequence
  Description of Artificial Sequence: Synthetic oligonucleotide
cauuaugagguccacaaag

SEQ ID NO: 703280 - RNA, 19 nt, Artificial Sequence
  Description of Artificial Sequence: Synthetic oligonucleotide
auuaagcuguaauaaagug

SEQ ID NO: 703281 - RNA, 19 nt, Artificial Sequence
  Description of Artificial Sequence: Synthetic oligonucleotide
ugauugagaaugaaaggug

SEQ ID NO: 703282 - RNA, 19 nt, Artificial Sequence
  Description of Artificial Sequence: Synthetic oligonucleotide
ucagauacuauauaucuua

SEQ ID NO: 703283 - RNA, 19 nt, Artificial Sequence
  Description of Artificial Sequence: Synthetic oligonucleotide
ccagaaucaaaauauaagg

SEQ ID NO: 703284 - RNA, 19 nt, Artificial Sequence
  Description of Artificial Sequence: Synthetic oligonucleotide
aaggcaugaugaaagaagg

SEQ ID NO: 703285 - RNA, 19 nt, Artificial Sequence
  Description of Artificial Sequence: Synthetic oligonucleotide
uauaaggaagacuuuucug

SEQ ID NO: 703286 - RNA, 19 nt, Artificial Sequence
  Description of Artificial Sequence: Synthetic oligonucleotide
uuacugacaagaaaaccca

SEQ ID NO: 703287 - RNA, 19 nt, Artificial Sequence
  Description of Artificial Sequence: Synthetic oligonucleotide
ccuaagaccauuuugaaac

SEQ ID NO: 703288 - RNA, 19 nt, Artificial Sequence
  Description of Artificial Sequence: Synthetic oligonucleotide
uauaugcugcauaacaagu

SEQ ID NO: 703289 - RNA, 19 nt, Artificial Sequence
  Description of Artificial Sequence: Synthetic oligonucleotide
uguuucagauacuauauau

SEQ ID NO: 703290 - RNA, 19 nt, Artificial Sequence
  Description of Artificial Sequence: Synthetic oligonucleotide
auuacaugguacuauacaa

SEQ ID NO: 703291 - RNA, 19 nt, Artificial Sequence
  Description of Artificial Sequence: Synthetic oligonucleotide
uacccuaagaccauuuuga

SEQ ID NO: 703292 - RNA, 19 nt, Artificial Sequence
  Description of Artificial Sequence: Synthetic oligonucleotide
ugaggcaucaccaucacuu

SEQ ID NO: 703293 - RNA, 19 nt, Artificial Sequence
  Description of Artificial Sequence: Synthetic oligonucleotide
agaaaauuaagcuguaaua

SEQ ID NO: 703294 - RNA, 19 nt, Artificial Sequence
  Description of Artificial Sequence: Synthetic oligonucleotide
auauaauccucaauaaauc

SEQ ID NO: 703295 - RNA, 19 nt, Artificial Sequence
  Description of Artificial Sequence: Synthetic oligonucleotide
uccaguuuaacacugcaau

SEQ ID NO: 703296 - RNA, 19 nt, Artificial Sequence
  Description of Artificial Sequence: Synthetic oligonucleotide
aauaccaucagcaucugaa

SEQ ID NO: 703297 - RNA, 19 nt, Artificial Sequence
  Description of Artificial Sequence: Synthetic oligonucleotide
aauuaagcuguaauaaagu

SEQ ID NO: 703298 - RNA, 19 nt, Artificial Sequence
  Description of Artificial Sequence: Synthetic oligonucleotide
aaauuccuguuauaugcug

SEQ ID NO: 703299 - RNA, 19 nt, Artificial Sequence
  Description of Artificial Sequence: Synthetic oligonucleotide
ucauagagcauaauacagu

SEQ ID NO: 703300 - RNA, 19 nt, Artificial Sequence
  Description of Artificial Sequence: Synthetic oligonucleotide
gauaccaacggcccgacac

SEQ ID NO: 703301 - RNA, 19 nt, Artificial Sequence
  Description of Artificial Sequence: Synthetic oligonucleotide
ugaccguucucuuagaaaa

SEQ ID NO: 703302 - RNA, 19 nt, Artificial Sequence
  Description of Artificial Sequence: Synthetic oligonucleotide
uuguuagcagcccaauucc

SEQ ID NO: 703303 - RNA, 19 nt, Artificial Sequence
  Description of Artificial Sequence: Synthetic oligonucleotide
uuuguuuauaugaucugaa

SEQ ID NO: 703304 - RNA, 19 nt, Artificial Sequence
  Description of Artificial Sequence: Synthetic oligonucleotide
uucugcaaccacuugaaga

SEQ ID NO: 703305 - RNA, 19 nt, Artificial Sequence
  Description of Artificial Sequence: Synthetic oligonucleotide
uucagcuugacauauugaa

SEQ ID NO: 703306 - RNA, 19 nt, Artificial Sequence
  Description of Artificial Sequence: Synthetic oligonucleotide
agcuguaauaaagugauug

SEQ ID NO: 703307 - RNA, 19 nt, Artificial Sequence
  Description of Artificial Sequence: Synthetic oligonucleotide
uaacacugcaauuaucugu

SEQ ID NO: 703308 - RNA, 19 nt, Artificial Sequence
  Description of Artificial Sequence: Synthetic oligonucleotide
gauagcggaauucugagaa

SEQ ID NO: 703309 - RNA, 19 nt, Artificial Sequence
  Description of Artificial Sequence: Synthetic oligonucleotide
caugucaggaacuguaccc

SEQ ID NO: 703310 - RNA, 19 nt, Artificial Sequence
  Description of Artificial Sequence: Synthetic oligonucleotide
uuaugagguccacaaagug

SEQ ID NO: 703311 - RNA, 19 nt, Artificial Sequence
  Description of Artificial Sequence: Synthetic oligonucleotide
agcaucugaacacugucuc

SEQ ID NO: 703312 - RNA, 19 nt, Artificial Sequence
  Description of Artificial Sequence: Synthetic oligonucleotide
cuuauaagguaccgaaacc

SEQ ID NO: 703313 - RNA, 19 nt, Artificial Sequence
  Description of Artificial Sequence: Synthetic oligonucleotide
uauagcauuuagaacuuuc

SEQ ID NO: 703314 - RNA, 19 nt, Artificial Sequence
  Description of Artificial Sequence: Synthetic oligonucleotide
acuuaguacaucugaaggu

SEQ ID NO: 703315 - RNA, 19 nt, Artificial Sequence
  Description of Artificial Sequence: Synthetic oligonucleotide
uagagcucggauuuucagg

SEQ ID NO: 703316 - RNA, 19 nt, Artificial Sequence
  Description of Artificial Sequence: Synthetic oligonucleotide
ugaaucuaaaucauuuauu

SEQ ID NO: 703317 - RNA, 19 nt, Artificial Sequence
  Description of Artificial Sequence: Synthetic oligonucleotide
uucgguaauacugacacaa

SEQ ID NO: 703318 - RNA, 19 nt, Artificial Sequence
  Description of Artificial Sequence: Synthetic oligonucleotide
uguuucaaguuauuacaug

SEQ ID NO: 703319 - RNA, 19 nt, Artificial Sequence
  Description of Artificial Sequence: Synthetic oligonucleotide
ucgugugauacccuaagac

SEQ ID NO: 703320 - RNA, 19 nt, Artificial Sequence
  Description of Artificial Sequence: Synthetic oligonucleotide
acuuauuaaguuuaauaua

SEQ ID NO: 703321 - RNA, 19 nt, Artificial Sequence
  Description of Artificial Sequence: Synthetic oligonucleotide
aguaaaacuaggcauuuua

SEQ ID NO: 703322 - RNA, 19 nt, Artificial Sequence
  Description of Artificial Sequence: Synthetic oligonucleotide
accgaaaccaaacugguau

SEQ ID NO: 703323 - RNA, 19 nt, Artificial Sequence
  Description of Artificial Sequence: Synthetic oligonucleotide
guuacauuaccaaacuccc

SEQ ID NO: 703324 - RNA, 19 nt, Artificial Sequence
  Description of Artificial Sequence: Synthetic oligonucleotide
uaauaguuuguacaacuua

SEQ ID NO: 703325 - RNA, 19 nt, Artificial Sequence
  Description of Artificial Sequence: Synthetic oligonucleotide
aauacucgcaaaacuuuuc

SEQ ID NO: 703326 - RNA, 19 nt, Artificial Sequence
  Description of Artificial Sequence: Synthetic oligonucleotide
gcuaggaacaccaauaacc

SEQ ID NO: 703327 - RNA, 19 nt, Artificial Sequence
  Description of Artificial Sequence: Synthetic oligonucleotide
uuuuguggccuuaauaguu

SEQ ID NO: 703328 - RNA, 19 nt, Artificial Sequence
  Description of Artificial Sequence: Synthetic oligonucleotide
uugaugggugaacacacug

SEQ ID NO: 703329 - RNA, 19 nt, Artificial Sequence
  Description of Artificial Sequence: Synthetic oligonucleotide
ugucaaauaaguggaauaa

SEQ ID NO: 703330 - RNA, 19 nt, Artificial Sequence
  Description of Artificial Sequence: Synthetic oligonucleotide
uuagaacuuucauuuaaaa

SEQ ID NO: 703331 - RNA, 19 nt, Artificial Sequence
  Description of Artificial Sequence: Synthetic oligonucleotide
agcaauaucccaagacucc

SEQ ID NO: 703332 - RNA, 19 nt, Artificial Sequence
  Description of Artificial Sequence: Synthetic oligonucleotide
uuaacacugcaauuaucug

SEQ ID NO: 703333 - RNA, 19 nt, Artificial Sequence
  Description of Artificial Sequence: Synthetic oligonucleotide
acuguaccccuuuaaaaug

SEQ ID NO: 703334 - RNA, 19 nt, Artificial Sequence
  Description of Artificial Sequence: Synthetic oligonucleotide
uauaagguaccgaaaccaa

SEQ ID NO: 703335 - RNA, 19 nt, Artificial Sequence
  Description of Artificial Sequence: Synthetic oligonucleotide
uagcuuauaagguaccgaa

SEQ ID NO: 703336 - RNA, 19 nt, Artificial Sequence
  Description of Artificial Sequence: Synthetic oligonucleotide
ucagcuugacauauugaac

SEQ ID NO: 703337 - RNA, 19 nt, Artificial Sequence
  Description of Artificial Sequence: Synthetic oligonucleotide
uuucucucgguuaaaccac

SEQ ID NO: 703338 - RNA, 19 nt, Artificial Sequence
  Description of Artificial Sequence: Synthetic oligonucleotide
uuagcagcccaauuccaag

SEQ ID NO: 703339 - RNA, 19 nt, Artificial Sequence
  Description of Artificial Sequence: Synthetic oligonucleotide
uagcggaauucugagaagg

SEQ ID NO: 703340 - RNA, 19 nt, Artificial Sequence
  Description of Artificial Sequence: Synthetic oligonucleotide
accccuuuaaaauggcuag

SEQ ID NO: 703341 - RNA, 19 nt, Artificial Sequence
  Description of Artificial Sequence: Synthetic oligonucleotide
aaucuuugaugaccguucu

SEQ ID NO: 703342 - RNA, 19 nt, Artificial Sequence
  Description of Artificial Sequence: Synthetic oligonucleotide
uuaauaguuuguacaacuu

SEQ ID NO: 703343 - RNA, 19 nt, Artificial Sequence
  Description of Artificial Sequence: Synthetic oligonucleotide
ugaagugccuggaggauca

SEQ ID NO: 703344 - RNA, 19 nt, Artificial Sequence
  Description of Artificial Sequence: Synthetic oligonucleotide
uaguuuguacaacuuagua

SEQ ID NO: 703345 - RNA, 19 nt, Artificial Sequence
  Description of Artificial Sequence: Synthetic oligonucleotide
agaaugaaagguguaauau

SEQ ID NO: 703346 - RNA, 19 nt, Artificial Sequence
  Description of Artificial Sequence: Synthetic oligonucleotide
aggauuuaagaaaauuaag

SEQ ID NO: 703347 - RNA, 19 nt, Artificial Sequence
  Description of Artificial Sequence: Synthetic oligonucleotide
uuuuagaaugggaauuaua

SEQ ID NO: 703348 - RNA, 19 nt, Artificial Sequence
  Description of Artificial Sequence: Synthetic oligonucleotide
auuuguuuauaugaucuga

SEQ ID NO: 703349 - RNA, 19 nt, Artificial Sequence
  Description of Artificial Sequence: Synthetic oligonucleotide
uuacauuaccaaacucccc

SEQ ID NO: 703350 - RNA, 19 nt, Artificial Sequence
  Description of Artificial Sequence: Synthetic oligonucleotide
accaaacugguauggggac

SEQ ID NO: 703351 - RNA, 19 nt, Artificial Sequence
  Description of Artificial Sequence: Synthetic oligonucleotide
uggauauguacaucuccag

SEQ ID NO: 703352 - RNA, 19 nt, Artificial Sequence
  Description of Artificial Sequence: Synthetic oligonucleotide
agcauauaccaauaacccu

SEQ ID NO: 703353 - RNA, 19 nt, Artificial Sequence
  Description of Artificial Sequence: Synthetic oligonucleotide
auuuaaaaggcaugaugaa

SEQ ID NO: 703354 - RNA, 19 nt, Artificial Sequence
  Description of Artificial Sequence: Synthetic oligonucleotide
aaagugauugagaaugaaa

SEQ ID NO: 703355 - RNA, 19 nt, Artificial Sequence
  Description of Artificial Sequence: Synthetic oligonucleotide
aagcucaacugauccagug

SEQ ID NO: 703356 - RNA, 19 nt, Artificial Sequence
  Description of Artificial Sequence: Synthetic oligonucleotide
aguuuaauacccagaauca

SEQ ID NO: 703357 - RNA, 19 nt, Artificial Sequence
  Description of Artificial Sequence: Synthetic oligonucleotide
ggauauguacaucuccagg

SEQ ID NO: 703358 - RNA, 19 nt, Artificial Sequence
  Description of Artificial Sequence: Synthetic oligonucleotide
uuaguacaucugaaggugu

SEQ ID NO: 703359 - RNA, 19 nt, Artificial Sequence
  Description of Artificial Sequence: Synthetic oligonucleotide
uucuacuggaaaucaauua

SEQ ID NO: 703360 - RNA, 19 nt, Artificial Sequence
  Description of Artificial Sequence: Synthetic oligonucleotide
uuacuagucauagagcaua

SEQ ID NO: 703361 - RNA, 19 nt, Artificial Sequence
  Description of Artificial Sequence: Synthetic oligonucleotide
auacucgcaaaacuuuucu

SEQ ID NO: 703362 - RNA, 19 nt, Artificial Sequence
  Description of Artificial Sequence: Synthetic oligonucleotide
aaccacuugaagagauagc

SEQ ID NO: 703363 - RNA, 19 nt, Artificial Sequence
  Description of Artificial Sequence: Synthetic oligonucleotide
uaguacaucugaaggugug

SEQ ID NO: 703364 - RNA, 19 nt, Artificial Sequence
  Description of Artificial Sequence: Synthetic oligonucleotide
uuaguaugagguagaguaa

SEQ ID NO: 703365 - RNA, 19 nt, Artificial Sequence
  Description of Artificial Sequence: Synthetic oligonucleotide
gaacaguacagcugauggc

SEQ ID NO: 703366 - RNA, 19 nt, Artificial Sequence
  Description of Artificial Sequence: Synthetic oligonucleotide
uucuaauugcuguuuuggu

SEQ ID NO: 703367 - RNA, 19 nt, Artificial Sequence
  Description of Artificial Sequence: Synthetic oligonucleotide
gcuuauaagguaccgaaac

SEQ ID NO: 703368 - RNA, 19 nt, Artificial Sequence
  Description of Artificial Sequence: Synthetic oligonucleotide
uuuucucucuuagaugucu

SEQ ID NO: 703369 - RNA, 19 nt, Artificial Sequence
  Description of Artificial Sequence: Synthetic oligonucleotide
caagguaaugcauucuuca

SEQ ID NO: 703370 - RNA, 19 nt, Artificial Sequence
  Description of Artificial Sequence: Synthetic oligonucleotide
ugguuuuacugacaagaaa

SEQ ID NO: 703371 - RNA, 19 nt, Artificial Sequence
  Description of Artificial Sequence: Synthetic oligonucleotide
auaccaacggcccgacacg

SEQ ID NO: 703372 - RNA, 19 nt, Artificial Sequence
  Description of Artificial Sequence: Synthetic oligonucleotide
acugcaauuaucugucaaa

SEQ ID NO: 703373 - RNA, 19 nt, Artificial Sequence
  Description of Artificial Sequence: Synthetic oligonucleotide
auuaucugucaaauaagug

SEQ ID NO: 703374 - RNA, 19 nt, Artificial Sequence
  Description of Artificial Sequence: Synthetic oligonucleotide
uccccauagcuuauaaggu

SEQ ID NO: 703375 - RNA, 19 nt, Artificial Sequence
  Description of Artificial Sequence: Synthetic oligonucleotide
uucucgccaagccuggagc

SEQ ID NO: 703376 - RNA, 19 nt, Artificial Sequence
  Description of Artificial Sequence: Synthetic oligonucleotide
aaaugacugugugcacacc

SEQ ID NO: 703377 - RNA, 19 nt, Artificial Sequence
  Description of Artificial Sequence: Synthetic oligonucleotide
cauagcuuauaagguaccg

SEQ ID NO: 703378 - RNA, 19 nt, Artificial Sequence
  Description of Artificial Sequence: Synthetic oligonucleotide
cagcaauaucccaagacuc

SEQ ID NO: 703379 - RNA, 19 nt, Artificial Sequence
  Description of Artificial Sequence: Synthetic oligonucleotide
ugcugcauaacaaguuuaa

SEQ ID NO: 703380 - RNA, 19 nt, Artificial Sequence
  Description of Artificial Sequence: Synthetic oligonucleotide
aucuaguuacauuaccaaa

SEQ ID NO: 703381 - RNA, 19 nt, Artificial Sequence
  Description of Artificial Sequence: Synthetic oligonucleotide
ucucucuuagaugucuuug

SEQ ID NO: 703382 - RNA, 19 nt, Artificial Sequence
  Description of Artificial Sequence: Synthetic oligonucleotide
ggugugaugaaguggcucc

SEQ ID NO: 703383 - RNA, 19 nt, Artificial Sequence
  Description of Artificial Sequence: Synthetic oligonucleotide
aguguaggauuuaagaaaa

SEQ ID NO: 703384 - RNA, 19 nt, Artificial Sequence
  Description of Artificial Sequence: Synthetic oligonucleotide
ucuagagcucggauuuuca

SEQ ID NO: 703385 - RNA, 19 nt, Artificial Sequence
  Description of Artificial Sequence: Synthetic oligonucleotide
cacugauuacuagucauag

SEQ ID NO: 703386 - RNA, 19 nt, Artificial Sequence
  Description of Artificial Sequence: Synthetic oligonucleotide
augguacuauacaagacug

SEQ ID NO: 703387 - RNA, 19 nt, Artificial Sequence
  Description of Artificial Sequence: Synthetic oligonucleotide
uguuagcagcccaauucca

SEQ ID NO: 703388 - RNA, 19 nt, Artificial Sequence
  Description of Artificial Sequence: Synthetic oligonucleotide
cauagagcauaauacagua

SEQ ID NO: 703389 - RNA, 19 nt, Artificial Sequence
  Description of Artificial Sequence: Synthetic oligonucleotide
cugauuuacaaugcuuuug

SEQ ID NO: 703390 - RNA, 19 nt, Artificial Sequence
  Description of Artificial Sequence: Synthetic oligonucleotide
cuagucauagagcauaaua

SEQ ID NO: 703391 - RNA, 19 nt, Artificial Sequence
  Description of Artificial Sequence: Synthetic oligonucleotide
aguuauuacaugguacuau

SEQ ID NO: 703392 - RNA, 19 nt, Artificial Sequence
  Description of Artificial Sequence: Synthetic oligonucleotide
ucacagaauauaugcugac

SEQ ID NO: 703393 - RNA, 19 nt, Artificial Sequence
  Description of Artificial Sequence: Synthetic oligonucleotide
cuagagcucggauuuucag

SEQ ID NO: 703394 - RNA, 19 nt, Artificial Sequence
  Description of Artificial Sequence: Synthetic oligonucleotide
aaauucgguaauacugaca

SEQ ID NO: 703395 - RNA, 19 nt, Artificial Sequence
  Description of Artificial Sequence: Synthetic oligonucleotide
uccugcacuuaaaucuuug

SEQ ID NO: 703396 - RNA, 19 nt, Artificial Sequence
  Description of Artificial Sequence: Synthetic oligonucleotide
caacaauccaaagaacuuc

SEQ ID NO: 703397 - RNA, 19 nt, Artificial Sequence
  Description of Artificial Sequence: Synthetic oligonucleotide
uaguuacauuaccaaacuc

SEQ ID NO: 703398 - RNA, 19 nt, Artificial Sequence
  Description of Artificial Sequence: Synthetic oligonucleotide
agauacuauauaucuuaaa

SEQ ID NO: 703399 - RNA, 19 nt, Artificial Sequence
  Description of Artificial Sequence: Synthetic oligonucleotide
gaaccugcuaggaacacca

SEQ ID NO: 703400 - RNA, 19 nt, Artificial Sequence
  Description of Artificial Sequence: Synthetic oligonucleotide
agagauagcggaauucuga

SEQ ID NO: 703401 - RNA, 19 nt, Artificial Sequence
  Description of Artificial Sequence: Synthetic oligonucleotide
ucugucaaauaaguggaau

SEQ ID NO: 703402 - RNA, 19 nt, Artificial Sequence
  Description of Artificial Sequence: Synthetic oligonucleotide
gucuguaauuccaacaauc

SEQ ID NO: 703403 - RNA, 19 nt, Artificial Sequence
  Description of Artificial Sequence: Synthetic oligonucleotide
gcagccacgauaccaacgg

SEQ ID NO: 703404 - RNA, 19 nt, Artificial Sequence
  Description of Artificial Sequence: Synthetic oligonucleotide
caaguuauuacaugguacu

SEQ ID NO: 703405 - RNA, 19 nt, Artificial Sequence
  Description of Artificial Sequence: Synthetic oligonucleotide
uuugaugaccguucucuua

SEQ ID NO: 703406 - RNA, 19 nt, Artificial Sequence
  Description of Artificial Sequence: Synthetic oligonucleotide
acaauccaaagaacuuccc

SEQ ID NO: 703407 - RNA, 19 nt, Artificial Sequence
  Description of Artificial Sequence: Synthetic oligonucleotide
aaauacucgcaaaacuuuu

SEQ ID NO: 703408 - RNA, 19 nt, Artificial Sequence
  Description of Artificial Sequence: Synthetic oligonucleotide
uguuuucucucgguuaaac

SEQ ID NO: 703409 - RNA, 19 nt, Artificial Sequence
  Description of Artificial Sequence: Synthetic oligonucleotide
aaggacauuaugaggucca

SEQ ID NO: 703410 - RNA, 19 nt, Artificial Sequence
  Description of Artificial Sequence: Synthetic oligonucleotide
ugguacuauacaagacugu

SEQ ID NO: 703411 - RNA, 19 nt, Artificial Sequence
  Description of Artificial Sequence: Synthetic oligonucleotide
ugcuaggaacaccaauaac

SEQ ID NO: 703412 - RNA, 19 nt, Artificial Sequence
  Description of Artificial Sequence: Synthetic oligonucleotide
ugugauacccuaagaccau

SEQ ID NO: 703413 - RNA, 19 nt, Artificial Sequence
  Description of Artificial Sequence: Synthetic oligonucleotide
auagcggaauucugagaag

SEQ ID NO: 703414 - RNA, 19 nt, Artificial Sequence
  Description of Artificial Sequence: Synthetic oligonucleotide
uugguuacagcuggcuugc

SEQ ID NO: 703415 - RNA, 19 nt, Artificial Sequence
  Description of Artificial Sequence: Synthetic oligonucleotide
gugauugagaaugaaaggu

SEQ ID NO: 703416 - RNA, 19 nt, Artificial Sequence
  Description of Artificial Sequence: Synthetic oligonucleotide
aagagauagcggaauucug

SEQ ID NO: 703417 - RNA, 19 nt, Artificial Sequence
  Description of Artificial Sequence: Synthetic oligonucleotide
auaacaaguuuaauaccca

SEQ ID NO: 703418 - RNA, 19 nt, Artificial Sequence
  Description of Artificial Sequence: Synthetic oligonucleotide
acugauuacuagucauaga

SEQ ID NO: 703419 - RNA, 19 nt, Artificial Sequence
  Description of Artificial Sequence: Synthetic oligonucleotide
gcauaacaaguuuaauacc

SEQ ID NO: 703420 - RNA, 19 nt, Artificial Sequence
  Description of Artificial Sequence: Synthetic oligonucleotide
guaggagugacuccggaaa

SEQ ID NO: 703421 - RNA, 19 nt, Artificial Sequence
  Description of Artificial Sequence: Synthetic oligonucleotide
acaaagugaaugaaucuaa

SEQ ID NO: 703422 - RNA, 19 nt, Artificial Sequence
  Description of Artificial Sequence: Synthetic oligonucleotide
uggccuuaauaguuuguac

SEQ ID NO: 703423 - RNA, 19 nt, Artificial Sequence
  Description of Artificial Sequence: Synthetic oligonucleotide
gaguaaagccagcaauauc

SEQ ID NO: 703424 - RNA, 19 nt, Artificial Sequence
  Description of Artificial Sequence: Synthetic oligonucleotide
auagcuuauaagguaccga

SEQ ID NO: 703425 - RNA, 19 nt, Artificial Sequence
  Description of Artificial Sequence: Synthetic oligonucleotide
agcucaacugauccagugu

SEQ ID NO: 703426 - RNA, 19 nt, Artificial Sequence
  Description of Artificial Sequence: Synthetic oligonucleotide
gagaagaacuggcuucuga

SEQ ID NO: 703427 - RNA, 19 nt, Artificial Sequence
  Description of Artificial Sequence: Synthetic oligonucleotide
aauccucaauaaaucuuca

SEQ ID NO: 703428 - RNA, 19 nt, Artificial Sequence
  Description of Artificial Sequence: Synthetic oligonucleotide
uacuagucauagagcauaa

SEQ ID NO: 703429 - RNA, 19 nt, Artificial Sequence
  Description of Artificial Sequence: Synthetic oligonucleotide
uucucucgguuaaaccaca

SEQ ID NO: 703430 - RNA, 19 nt, Artificial Sequence
  Description of Artificial Sequence: Synthetic oligonucleotide
ggaucaugcaguugguuac

SEQ ID NO: 703431 - RNA, 19 nt, Artificial Sequence
  Description of Artificial Sequence: Synthetic oligonucleotide
caucuaguuacauuaccaa

SEQ ID NO: 703432 - RNA, 19 nt, Artificial Sequence
  Description of Artificial Sequence: Synthetic oligonucleotide
guagaguaaagccagcaau

SEQ ID NO: 703433 - RNA, 19 nt, Artificial Sequence
  Description of Artificial Sequence: Synthetic oligonucleotide
acuccccauagcuuauaag

SEQ ID NO: 703434 - RNA, 19 nt, Artificial Sequence
  Description of Artificial Sequence: Synthetic oligonucleotide
gacuccggaaaugacugug

SEQ ID NO: 703435 - RNA, 19 nt, Artificial Sequence
  Description of Artificial Sequence: Synthetic oligonucleotide
ugucacucuugauggguga

SEQ ID NO: 703436 - RNA, 19 nt, Artificial Sequence
  Description of Artificial Sequence: Synthetic oligonucleotide
aacuccccauagcuuauaa

SEQ ID NO: 703437 - RNA, 19 nt, Artificial Sequence
  Description of Artificial Sequence: Synthetic oligonucleotide
aaguuauuacaugguacua

SEQ ID NO: 703438 - RNA, 19 nt, Artificial Sequence
  Description of Artificial Sequence: Synthetic oligonucleotide
auaguuuguacaacuuagu

SEQ ID NO: 703439 - RNA, 19 nt, Artificial Sequence
  Description of Artificial Sequence: Synthetic oligonucleotide
aguuuuaguaugagguaga

SEQ ID NO: 703440 - RNA, 19 nt, Artificial Sequence
  Description of Artificial Sequence: Synthetic oligonucleotide
agauagcggaauucugaga

SEQ ID NO: 703441 - RNA, 19 nt, Artificial Sequence
  Description of Artificial Sequence: Synthetic oligonucleotide
augaccguucucuuagaaa

SEQ ID NO: 703442 - RNA, 19 nt, Artificial Sequence
  Description of Artificial Sequence: Synthetic oligonucleotide
ucggcagccacgauaccaa

SEQ ID NO: 703443 - RNA, 19 nt, Artificial Sequence
  Description of Artificial Sequence: Synthetic oligonucleotide
cugucaaauaaguggaaua

SEQ ID NO: 703444 - RNA, 19 nt, Artificial Sequence
  Description of Artificial Sequence: Synthetic oligonucleotide
agaacagaagaaccugcua

SEQ ID NO: 703445 - RNA, 19 nt, Artificial Sequence
  Description of Artificial Sequence: Synthetic oligonucleotide
ugcauggcccuuaaauauu

SEQ ID NO: 703446 - RNA, 19 nt, Artificial Sequence
  Description of Artificial Sequence: Synthetic oligonucleotide
gcacacugaaucuuugaug

SEQ ID NO: 703447 - RNA, 19 nt, Artificial Sequence
  Description of Artificial Sequence: Synthetic oligonucleotide
ugauacccuaagaccauuu

SEQ ID NO: 703448 - RNA, 19 nt, Artificial Sequence
  Description of Artificial Sequence: Synthetic oligonucleotide
ggugaacacacugggagcc

SEQ ID NO: 703449 - RNA, 19 nt, Artificial Sequence
  Description of Artificial Sequence: Synthetic oligonucleotide
cugaaaucacaguucugca

SEQ ID NO: 703450 - RNA, 19 nt, Artificial Sequence
  Description of Artificial Sequence: Synthetic oligonucleotide
aguugguuacagcuggcuu

SEQ ID NO: 703451 - RNA, 19 nt, Artificial Sequence
  Description of Artificial Sequence: Synthetic oligonucleotide
auauaccaauaacccuuug

SEQ ID NO: 703452 - RNA, 19 nt, Artificial Sequence
  Description of Artificial Sequence: Synthetic oligonucleotide
cucucgguuaaaccacaag

SEQ ID NO: 703453 - RNA, 19 nt, Artificial Sequence
  Description of Artificial Sequence: Synthetic oligonucleotide
cugucacucuugaugggug

SEQ ID NO: 703454 - RNA, 19 nt, Artificial Sequence
  Description of Artificial Sequence: Synthetic oligonucleotide
aaccugauuuacaaugcuu

SEQ ID NO: 703455 - RNA, 19 nt, Artificial Sequence
  Description of Artificial Sequence: Synthetic oligonucleotide
aaaccaugucaggaacugu

SEQ ID NO: 703456 - RNA, 19 nt, Artificial Sequence
  Description of Artificial Sequence: Synthetic oligonucleotide
cucgguuaaaccacaaggu

SEQ ID NO: 703457 - RNA, 19 nt, Artificial Sequence
  Description of Artificial Sequence: Synthetic oligonucleotide
gaugaccguucucuuagaa

SEQ ID NO: 703458 - RNA, 19 nt, Artificial Sequence
  Description of Artificial Sequence: Synthetic oligonucleotide
accaguaaaacuaggcauu

SEQ ID NO: 703459 - RNA, 19 nt, Artificial Sequence
  Description of Artificial Sequence: Synthetic oligonucleotide
cucgcaaaacuuuucugaa

SEQ ID NO: 703460 - RNA, 19 nt, Artificial Sequence
  Description of Artificial Sequence: Synthetic oligonucleotide
aucacuugaagugccugga

SEQ ID NO: 703461 - RNA, 19 nt, Artificial Sequence
  Description of Artificial Sequence: Synthetic oligonucleotide
aggacauuaugagguccac

SEQ ID NO: 703462 - RNA, 19 nt, Artificial Sequence
  Description of Artificial Sequence: Synthetic oligonucleotide
acauuaugagguccacaaa

SEQ ID NO: 703463 - RNA, 19 nt, Artificial Sequence
  Description of Artificial Sequence: Synthetic oligonucleotide
aguuguuagcagcccaauu

SEQ ID NO: 703464 - RNA, 19 nt, Artificial Sequence
  Description of Artificial Sequence: Synthetic oligonucleotide
acuuaacuacaaacauguc

SEQ ID NO: 703465 - RNA, 19 nt, Artificial Sequence
  Description of Artificial Sequence: Synthetic oligonucleotide
ucgguaauacugacacaau

SEQ ID NO: 703466 - RNA, 19 nt, Artificial Sequence
  Description of Artificial Sequence: Synthetic oligonucleotide
aguguuuuguggccuuaau

SEQ ID NO: 703467 - RNA, 19 nt, Artificial Sequence
  Description of Artificial Sequence: Synthetic oligonucleotide
ggcaccaguaaaacuaggc

SEQ ID NO: 703468 - RNA, 19 nt, Artificial Sequence
  Description of Artificial Sequence: Synthetic oligonucleotide
uucuagagcucggauuuuc

SEQ ID NO: 703469 - RNA, 19 nt, Artificial Sequence
  Description of Artificial Sequence: Synthetic oligonucleotide
uaauugcuguuuugguuuu

SEQ ID NO: 703470 - RNA, 19 nt, Artificial Sequence
  Description of Artificial Sequence: Synthetic oligonucleotide
auaacucggucguguaaaa

SEQ ID NO: 703471 - RNA, 19 nt, Artificial Sequence
  Description of Artificial Sequence: Synthetic oligonucleotide
cggaauucugagaaggagc

SEQ ID NO: 703472 - RNA, 19 nt, Artificial Sequence
  Description of Artificial Sequence: Synthetic oligonucleotide
gcucggauuuucaggaugg

SEQ ID NO: 703473 - RNA, 19 nt, Artificial Sequence
  Description of Artificial Sequence: Synthetic oligonucleotide
ggaauuauaaaagucugau

SEQ ID NO: 703474 - RNA, 19 nt, Artificial Sequence
  Description of Artificial Sequence: Synthetic oligonucleotide
auuacuagucauagagcau

SEQ ID NO: 703475 - RNA, 19 nt, Artificial Sequence
  Description of Artificial Sequence: Synthetic oligonucleotide
auaagguaccgaaaccaaa

SEQ ID NO: 703476 - RNA, 19 nt, Artificial Sequence
  Description of Artificial Sequence: Synthetic oligonucleotide
ccacuugaagagauagcgg

SEQ ID NO: 703477 - RNA, 19 nt, Artificial Sequence
  Description of Artificial Sequence: Synthetic oligonucleotide
gccagcaauaucccaagac

SEQ ID NO: 703478 - RNA, 19 nt, Artificial Sequence
  Description of Artificial Sequence: Synthetic oligonucleotide
agcggguggccucggcagc

SEQ ID NO: 703479 - RNA, 19 nt, Artificial Sequence
  Description of Artificial Sequence: Synthetic oligonucleotide
acccuaagaccauuuugaa

SEQ ID NO: 703480 - RNA, 19 nt, Artificial Sequence
  Description of Artificial Sequence: Synthetic oligonucleotide
accaauaaccaagcacacu

SEQ ID NO: 703481 - RNA, 19 nt, Artificial Sequence
  Description of Artificial Sequence: Synthetic oligonucleotide
uccauaacucggucgugua

SEQ ID NO: 703482 - RNA, 19 nt, Artificial Sequence
  Description of Artificial Sequence: Synthetic oligonucleotide
cagauacuauauaucuuaa

SEQ ID NO: 703483 - RNA, 19 nt, Artificial Sequence
  Description of Artificial Sequence: Synthetic oligonucleotide
ccaucuaguuacauuacca

SEQ ID NO: 703484 - RNA, 19 nt, Artificial Sequence
  Description of Artificial Sequence: Synthetic oligonucleotide
ucucucgguuaaaccacaa

SEQ ID NO: 703485 - RNA, 19 nt, Artificial Sequence
  Description of Artificial Sequence: Synthetic oligonucleotide
ugcauacauaaaaguuguu

SEQ ID NO: 703486 - RNA, 19 nt, Artificial Sequence
  Description of Artificial Sequence: Synthetic oligonucleotide
ugaugaccguucucuuaga

SEQ ID NO: 703487 - RNA, 19 nt, Artificial Sequence
  Description of Artificial Sequence: Synthetic oligonucleotide
caccaguaaaacuaggcau

SEQ ID NO: 703488 - RNA, 19 nt, Artificial Sequence
  Description of Artificial Sequence: Synthetic oligonucleotide
cauauugaacaaauaccau

SEQ ID NO: 703489 - RNA, 19 nt, Artificial Sequence
  Description of Artificial Sequence: Synthetic oligonucleotide
auucagcuugacauauuga

SEQ ID NO: 703490 - RNA, 19 nt, Artificial Sequence
  Description of Artificial Sequence: Synthetic oligonucleotide
uaccaacggcccgacacgc

SEQ ID NO: 703491 - RNA, 19 nt, Artificial Sequence
  Description of Artificial Sequence: Synthetic oligonucleotide
gggugaacacacugggagc

SEQ ID NO: 703492 - RNA, 19 nt, Artificial Sequence
  Description of Artificial Sequence: Synthetic oligonucleotide
gguagaguaaagccagcaa

SEQ ID NO: 703493 - RNA, 19 nt, Artificial Sequence
  Description of Artificial Sequence: Synthetic oligonucleotide
cuguuauaugcugcauaac

SEQ ID NO: 703494 - RNA, 19 nt, Artificial Sequence
  Description of Artificial Sequence: Synthetic oligonucleotide
ccauagcuuauaagguacc

SEQ ID NO: 703495 - RNA, 19 nt, Artificial Sequence
  Description of Artificial Sequence: Synthetic oligonucleotide
cucacugauuacuagucau

SEQ ID NO: 703496 - RNA, 19 nt, Artificial Sequence
  Description of Artificial Sequence: Synthetic oligonucleotide
auagagcauaauacaguau

SEQ ID NO: 703497 - RNA, 19 nt, Artificial Sequence
  Description of Artificial Sequence: Synthetic oligonucleotide
gacauguuuucucucgguu

SEQ ID NO: 703498 - RNA, 19 nt, Artificial Sequence
  Description of Artificial Sequence: Synthetic oligonucleotide
ccugaccuuguauuucuag

SEQ ID NO: 703499 - RNA, 19 nt, Artificial Sequence
  Description of Artificial Sequence: Synthetic oligonucleotide
ucaugaccaggagcgggug

SEQ ID NO: 703500 - RNA, 19 nt, Artificial Sequence
  Description of Artificial Sequence: Synthetic oligonucleotide
augcaguugguuacagcug

SEQ ID NO: 703501 - RNA, 19 nt, Artificial Sequence
  Description of Artificial Sequence: Synthetic oligonucleotide
ccaaaaguuuuaguaugag

SEQ ID NO: 703502 - RNA, 19 nt, Artificial Sequence
  Description of Artificial Sequence: Synthetic oligonucleotide
gcggaauucugagaaggag

SEQ ID NO: 703503 - RNA, 19 nt, Artificial Sequence
  Description of Artificial Sequence: Synthetic oligonucleotide
gggaauuauaaaagucuga

SEQ ID NO: 703504 - RNA, 19 nt, Artificial Sequence
  Description of Artificial Sequence: Synthetic oligonucleotide
acacugcaauuaucuguca

SEQ ID NO: 703505 - RNA, 19 nt, Artificial Sequence
  Description of Artificial Sequence: Synthetic oligonucleotide
cacucuugaugggugaaca

SEQ ID NO: 703506 - RNA, 19 nt, Artificial Sequence
  Description of Artificial Sequence: Synthetic oligonucleotide
acgauaccaacggcccgac

SEQ ID NO: 703507 - RNA, 19 nt, Artificial Sequence
  Description of Artificial Sequence: Synthetic oligonucleotide
ccggaaaugacugugugca

SEQ ID NO: 703508 - RNA, 19 nt, Artificial Sequence
  Description of Artificial Sequence: Synthetic oligonucleotide
gugaaugaaucuaaaucau

SEQ ID NO: 703509 - RNA, 19 nt, Artificial Sequence
  Description of Artificial Sequence: Synthetic oligonucleotide
gauacccuaagaccauuuu

SEQ ID NO: 703510 - RNA, 19 nt, Artificial Sequence
  Description of Artificial Sequence: Synthetic oligonucleotide
gcuugcauggcccuuaaau

SEQ ID NO: 703511 - RNA, 19 nt, Artificial Sequence
  Description of Artificial Sequence: Synthetic oligonucleotide
cacuccauaacucggucgu

SEQ ID NO: 703512 - RNA, 19 nt, Artificial Sequence
  Description of Artificial Sequence: Synthetic oligonucleotide
cacugcaauuaucugucaa

SEQ ID NO: 703513 - RNA, 19 nt, Artificial Sequence
  Description of Artificial Sequence: Synthetic oligonucleotide
agcuuauaagguaccgaaa

SEQ ID NO: 703514 - RNA, 19 nt, Artificial Sequence
  Description of Artificial Sequence: Synthetic oligonucleotide
ggagugacuccggaaauga

SEQ ID NO: 703515 - RNA, 19 nt, Artificial Sequence
  Description of Artificial Sequence: Synthetic oligonucleotide
ccaacggcccgacacgccg

SEQ ID NO: 703516 - RNA, 19 nt, Artificial Sequence
  Description of Artificial Sequence: Synthetic oligonucleotide
gccacgauaccaacggccc

SEQ ID NO: 703517 - RNA, 19 nt, Artificial Sequence
  Description of Artificial Sequence: Synthetic oligonucleotide
agcggaauucugagaagga

SEQ ID NO: 703518 - RNA, 19 nt, Artificial Sequence
  Description of Artificial Sequence: Synthetic oligonucleotide
cucggcagccacgauacca

SEQ ID NO: 703519 - RNA, 19 nt, Artificial Sequence
  Description of Artificial Sequence: Synthetic oligonucleotide
ggagccugaggcaucacca

SEQ ID NO: 703520 - RNA, 19 nt, Artificial Sequence
  Description of Artificial Sequence: Synthetic oligonucleotide
guggccuuaauaguuugua

SEQ ID NO: 703521 - RNA, 19 nt, Artificial Sequence
  Description of Artificial Sequence: Synthetic oligonucleotide
accaacggcccgacacgcc

SEQ ID NO: 703522 - RNA, 19 nt, Artificial Sequence
  Description of Artificial Sequence: Synthetic oligonucleotide
gguuaaaccacaagguaau

SEQ ID NO: 703523 - RNA, 19 nt, Artificial Sequence
  Description of Artificial Sequence: Synthetic oligonucleotide
cacgauaccaacggcccga

SEQ ID NO: 703524 - RNA, 19 nt, Artificial Sequence
  Description of Artificial Sequence: Synthetic oligonucleotide
acuagucauagagcauaau

SEQ ID NO: 703525 - RNA, 19 nt, Artificial Sequence
  Description of Artificial Sequence: Synthetic oligonucleotide
gaacuucccaaaagcucaa

SEQ ID NO: 703526 - RNA, 19 nt, Artificial Sequence
  Description of Artificial Sequence: Synthetic oligonucleotide
aaacuccccauagcuuaua

SEQ ID NO: 703527 - RNA, 19 nt, Artificial Sequence
  Description of Artificial Sequence: Synthetic oligonucleotide
cauauaccaauaacccuuu

SEQ ID NO: 703528 - RNA, 19 nt, Artificial Sequence
  Description of Artificial Sequence: Synthetic oligonucleotide
caaguuuaauacccagaau

SEQ ID NO: 703529 - RNA, 19 nt, Artificial Sequence
  Description of Artificial Sequence: Synthetic oligonucleotide
caguacagcugauggcaaa

SEQ ID NO: 703530 - RNA, 19 nt, Artificial Sequence
  Description of Artificial Sequence: Synthetic oligonucleotide
gccucggcagccacgauac

SEQ ID NO: 703531 - RNA, 19 nt, Artificial Sequence
  Description of Artificial Sequence: Synthetic oligonucleotide
ccacgauaccaacggcccg

SEQ ID NO: 703532 - RNA, 19 nt, Artificial Sequence
  Description of Artificial Sequence: Synthetic oligonucleotide
cuuuagguccagaguuuau

SEQ ID NO: 703533 - RNA, 19 nt, Artificial Sequence
  Description of Artificial Sequence: Synthetic oligonucleotide
cuccauaacucggucgugu

SEQ ID NO: 703534 - RNA, 19 nt, Artificial Sequence
  Description of Artificial Sequence: Synthetic oligonucleotide
aaccugcuaggaacaccaa

SEQ ID NO: 703535 - RNA, 19 nt, Artificial Sequence
  Description of Artificial Sequence: Synthetic oligonucleotide
ggagcggguggccucggca

SEQ ID NO: 703536 - RNA, 19 nt, Artificial Sequence
  Description of Artificial Sequence: Synthetic oligonucleotide
ccaacaauccaaagaacuu

SEQ ID NO: 703537 - RNA, 19 nt, Artificial Sequence
  Description of Artificial Sequence: Synthetic oligonucleotide
cugcaaccacuugaagaga

SEQ ID NO: 703538 - RNA, 19 nt, Artificial Sequence
  Description of Artificial Sequence: Synthetic oligonucleotide
gcuacagacaccugaccuu

SEQ ID NO: 703539 - RNA, 19 nt, Artificial Sequence
  Description of Artificial Sequence: Synthetic oligonucleotide
ccccauagcuuauaaggua

SEQ ID NO: 703540 - RNA, 19 nt, Artificial Sequence
  Description of Artificial Sequence: Synthetic oligonucleotide
gguuacagcuggcuugcau

SEQ ID NO: 703541 - RNA, 19 nt, Artificial Sequence
  Description of Artificial Sequence: Synthetic oligonucleotide
caguugguuacagcuggcu

SEQ ID NO: 703542 - RNA, 19 nt, Artificial Sequence
  Description of Artificial Sequence: Synthetic oligonucleotide
acacccgugggcacagcua

SEQ ID NO: 703543 - RNA, 19 nt, Artificial Sequence
  Description of Artificial Sequence: Synthetic oligonucleotide
ccauaacucggucguguaa

SEQ ID NO: 703544 - RNA, 19 nt, Artificial Sequence
  Description of Artificial Sequence: Synthetic oligonucleotide
ccaaacugguauggggaca

SEQ ID NO: 703545 - RNA, 19 nt, Artificial Sequence
  Description of Artificial Sequence: Synthetic oligonucleotide
cugaggcaucaccaucacu

SEQ ID NO: 703546 - RNA, 19 nt, Artificial Sequence
  Description of Artificial Sequence: Synthetic oligonucleotide
gaccaggagcggguggccu

SEQ ID NO: 703547 - RNA, 19 nt, Artificial Sequence
  Description of Artificial Sequence: Synthetic oligonucleotide
cauggcccuuaaauauuuu

SEQ ID NO: 703548 - RNA, 19 nt, Artificial Sequence
  Description of Artificial Sequence: Synthetic oligonucleotide
gcugcauaacaaguuuaau

SEQ ID NO: 703549 - RNA, 19 nt, Artificial Sequence
  Description of Artificial Sequence: Synthetic oligonucleotide
ccgacacgccgccgcaagc

SEQ ID NO: 703550 - RNA, 19 nt, Artificial Sequence
  Description of Artificial Sequence: Synthetic oligonucleotide
gugauacccuaagaccauu

SEQ ID NO: 703551 - RNA, 19 nt, Artificial Sequence
  Description of Artificial Sequence: Synthetic oligonucleotide
cuccugcacuuaaaucuuu

SEQ ID NO: 703552 - RNA, 19 nt, Artificial Sequence
  Description of Artificial Sequence: Synthetic oligonucleotide
ccgcaagcccuucucgcca

SEQ ID NO: 703553 - RNA, 19 nt, Artificial Sequence
  Description of Artificial Sequence: Synthetic oligonucleotide
cucgccaagccuggagccu

SEQ ID NO: 703554 - RNA, 19 nt, Artificial Sequence
  Description of Artificial Sequence: Synthetic oligonucleotide
ccaguaaaacuaggcauuu

SEQ ID NO: 703555 - RNA, 19 nt, Artificial Sequence
  Description of Artificial Sequence: Synthetic oligonucleotide
gccuggagccucggacgcc

SEQ ID NO: 703556 - RNA, 19 nt, Artificial Sequence
  Description of Artificial Sequence: Synthetic oligonucleotide
ggcccgacacgccgccgca

SEQ ID NO: 703557 - RNA, 19 nt, Artificial Sequence
  Description of Artificial Sequence: Synthetic oligonucleotide
ccucggcagccacgauacc

SEQ ID NO: 703558 - RNA, 19 nt, Artificial Sequence
  Description of Artificial Sequence: Synthetic oligonucleotide
ccacaagguaaugcauucu

SEQ ID NO: 703559 - RNA, 19 nt, Artificial Sequence
  Description of Artificial Sequence: Synthetic oligonucleotide
cgauaccaacggcccgaca

SEQ ID NO: 703560 - RNA, 19 nt, Artificial Sequence
  Description of Artificial Sequence: Synthetic oligonucleotide
gcccgacacgccgccgcaa

SEQ ID NO: 703561 - RNA, 19 nt, Artificial Sequence
  Description of Artificial Sequence: Synthetic oligonucleotide
ugaaguauaacugaaaagg

SEQ ID NO: 703562 - RNA, 19 nt, Artificial Sequence
  Description of Artificial Sequence: Synthetic oligonucleotide
aauucaguuuauuuugucc

SEQ ID NO: 703563 - RNA, 19 nt, Artificial Sequence
  Description of Artificial Sequence: Synthetic oligonucleotide
uuuaguaccagcauaguga

SEQ ID NO: 703564 - RNA, 19 nt, Artificial Sequence
  Description of Artificial Sequence: Synthetic oligonucleotide
uuuagaagaccaaagaagu

SEQ ID NO: 703565 - RNA, 19 nt, Artificial Sequence
  Description of Artificial Sequence: Synthetic oligonucleotide
aguguuaugguucuguuuc

SEQ ID NO: 703566 - RNA, 19 nt, Artificial Sequence
  Description of Artificial Sequence: Synthetic oligonucleotide
agaagcaaaguucaagagc

SEQ ID NO: 703567 - RNA, 19 nt, Artificial Sequence
  Description of Artificial Sequence: Synthetic oligonucleotide
aaauauaugugcccaacug

SEQ ID NO: 703568 - RNA, 19 nt, Artificial Sequence
  Description of Artificial Sequence: Synthetic oligonucleotide
agagauaugcauuugauaa

SEQ ID NO: 703569 - RNA, 19 nt, Artificial Sequence
  Description of Artificial Sequence: Synthetic oligonucleotide
acaguaacgauauagaaaa

SEQ ID NO: 703570 - RNA, 19 nt, Artificial Sequence
  Description of Artificial Sequence: Synthetic oligonucleotide
uccacaauaauugaguucc

SEQ ID NO: 703571 - RNA, 19 nt, Artificial Sequence
  Description of Artificial Sequence: Synthetic oligonucleotide
acacguagcaucuaggaac

SEQ ID NO: 703572 - RNA, 19 nt, Artificial Sequence
  Description of Artificial Sequence: Synthetic oligonucleotide
auaaguagcuuagucaucc

SEQ ID NO: 703573 - RNA, 19 nt, Artificial Sequence
  Description of Artificial Sequence: Synthetic oligonucleotide
agguuauacuuuuaguacc

SEQ ID NO: 703574 - RNA, 19 nt, Artificial Sequence
  Description of Artificial Sequence: Synthetic oligonucleotide
auaaaagaaucccaauggg

SEQ ID NO: 703575 - RNA, 19 nt, Artificial Sequence
  Description of Artificial Sequence: Synthetic oligonucleotide
auaauaaguagcuuaguca

SEQ ID NO: 703576 - RNA, 19 nt, Artificial Sequence
  Description of Artificial Sequence: Synthetic oligonucleotide
ucaggauugaaguauaacu

SEQ ID NO: 703577 - RNA, 19 nt, Artificial Sequence
  Description of Artificial Sequence: Synthetic oligonucleotide
ucuaucaaagaagaguagg

SEQ ID NO: 703578 - RNA, 19 nt, Artificial Sequence
  Description of Artificial Sequence: Synthetic oligonucleotide
aaagaagauaaugaacuag

SEQ ID NO: 703579 - RNA, 19 nt, Artificial Sequence
  Description of Artificial Sequence: Synthetic oligonucleotide
aauucuuauuccaccaggc

SEQ ID NO: 703580 - RNA, 19 nt, Artificial Sequence
  Description of Artificial Sequence: Synthetic oligonucleotide
ugguauaagaauuuuagua

SEQ ID NO: 703581 - RNA, 19 nt, Artificial Sequence
  Description of Artificial Sequence: Synthetic oligonucleotide
uauuguaaaggccuggccu

SEQ ID NO: 703582 - RNA, 19 nt, Artificial Sequence
  Description of Artificial Sequence: Synthetic oligonucleotide
aauucuaggaagcauguua

SEQ ID NO: 703583 - RNA, 19 nt, Artificial Sequence
  Description of Artificial Sequence: Synthetic oligonucleotide
caguauuaagauuugaaug

SEQ ID NO: 703584 - RNA, 19 nt, Artificial Sequence
  Description of Artificial Sequence: Synthetic oligonucleotide
aaauuggugauuagucucc

SEQ ID NO: 703585 - RNA, 19 nt, Artificial Sequence
  Description of Artificial Sequence: Synthetic oligonucleotide
uaauaaguagcuuagucau

SEQ ID NO: 703586 - RNA, 19 nt, Artificial Sequence
  Description of Artificial Sequence: Synthetic oligonucleotide
ucuaggaacaguacaagac

SEQ ID NO: 703587 - RNA, 19 nt, Artificial Sequence
  Description of Artificial Sequence: Synthetic oligonucleotide
uuuuaccucacacaaguac

SEQ ID NO: 703588 - RNA, 19 nt, Artificial Sequence
  Description of Artificial Sequence: Synthetic oligonucleotide
cuugaaagacugaagagac

SEQ ID NO: 703589 - RNA, 19 nt, Artificial Sequence
  Description of Artificial Sequence: Synthetic oligonucleotide
uaagaauuuuaguacaggu

SEQ ID NO: 703590 - RNA, 19 nt, Artificial Sequence
  Description of Artificial Sequence: Synthetic oligonucleotide
gaauucuuauuccaccagg

SEQ ID NO: 703591 - RNA, 19 nt, Artificial Sequence
  Description of Artificial Sequence: Synthetic oligonucleotide
cuaacauacacguagcauc

SEQ ID NO: 703592 - RNA, 19 nt, Artificial Sequence
  Description of Artificial Sequence: Synthetic oligonucleotide
cauuggcuaacacagauag

SEQ ID NO: 703593 - RNA, 19 nt, Artificial Sequence
  Description of Artificial Sequence: Synthetic oligonucleotide
aaguuuagaagaccaaaga

SEQ ID NO: 703594 - RNA, 19 nt, Artificial Sequence
  Description of Artificial Sequence: Synthetic oligonucleotide
cuuaaauugaggucucugc

SEQ ID NO: 703595 - RNA, 19 nt, Artificial Sequence
  Description of Artificial Sequence: Synthetic oligonucleotide
auuaagacauagucccugc

SEQ ID NO: 703596 - RNA, 19 nt, Artificial Sequence
  Description of Artificial Sequence: Synthetic oligonucleotide
uuugcaauaagggauaaaa

SEQ ID NO: 703597 - RNA, 19 nt, Artificial Sequence
  Description of Artificial Sequence: Synthetic oligonucleotide
ugucuaucaaagaagagua

SEQ ID NO: 703598 - RNA, 19 nt, Artificial Sequence
  Description of Artificial Sequence: Synthetic oligonucleotide
cuagcauucgacaguaacg

SEQ ID NO: 703599 - RNA, 19 nt, Artificial Sequence
  Description of Artificial Sequence: Synthetic oligonucleotide
uugaaguauaacugaaaag

SEQ ID NO: 703600 - RNA, 19 nt, Artificial Sequence
  Description of Artificial Sequence: Synthetic oligonucleotide
agcuuagucauccugaaga

SEQ ID NO: 703601 - RNA, 19 nt, Artificial Sequence
  Description of Artificial Sequence: Synthetic oligonucleotide
agagacuuaaauugagguc

SEQ ID NO: 703602 - RNA, 19 nt, Artificial Sequence
  Description of Artificial Sequence: Synthetic oligonucleotide
uucgacaguaacgauauag

SEQ ID NO: 703603 - RNA, 19 nt, Artificial Sequence
  Description of Artificial Sequence: Synthetic oligonucleotide
aaacuaagcucacaaacaa

SEQ ID NO: 703604 - RNA, 19 nt, Artificial Sequence
  Description of Artificial Sequence: Synthetic oligonucleotide
uacccauguacuuuuagag

SEQ ID NO: 703605 - RNA, 19 nt, Artificial Sequence
  Description of Artificial Sequence: Synthetic oligonucleotide
gagguuauacuuuuaguac

SEQ ID NO: 703606 - RNA, 19 nt, Artificial Sequence
  Description of Artificial Sequence: Synthetic oligonucleotide
gguauaagaauuuuaguac

SEQ ID NO: 703607 - RNA, 19 nt, Artificial Sequence
  Description of Artificial Sequence: Synthetic oligonucleotide
uucccuaauucccagacga

SEQ ID NO: 703608 - RNA, 19 nt, Artificial Sequence
  Description of Artificial Sequence: Synthetic oligonucleotide
uauuaagauuugaauguug

SEQ ID NO: 703609 - RNA, 19 nt, Artificial Sequence
  Description of Artificial Sequence: Synthetic oligonucleotide
ucuugaaagacugaagaga

SEQ ID NO: 703610 - RNA, 19 nt, Artificial Sequence
  Description of Artificial Sequence: Synthetic oligonucleotide
aacccugugcuuuaggugu

SEQ ID NO: 703611 - RNA, 19 nt, Artificial Sequence
  Description of Artificial Sequence: Synthetic oligonucleotide
ucaguauuaagauuugaau

SEQ ID NO: 703612 - RNA, 19 nt, Artificial Sequence
  Description of Artificial Sequence: Synthetic oligonucleotide
cuagacuucaguauuaaga

SEQ ID NO: 703613 - RNA, 19 nt, Artificial Sequence
  Description of Artificial Sequence: Synthetic oligonucleotide
uaugguuugguauaagaau

SEQ ID NO: 703614 - RNA, 19 nt, Artificial Sequence
  Description of Artificial Sequence: Synthetic oligonucleotide
ugaagcuucauaaggauuu

SEQ ID NO: 703615 - RNA, 19 nt, Artificial Sequence
  Description of Artificial Sequence: Synthetic oligonucleotide
auaagggauaaaagaaucc

SEQ ID NO: 703616 - RNA, 19 nt, Artificial Sequence
  Description of Artificial Sequence: Synthetic oligonucleotide
uccauuuacaccacggccu

SEQ ID NO: 703617 - RNA, 19 nt, Artificial Sequence
  Description of Artificial Sequence: Synthetic oligonucleotide
aagaagauaaugaacuaga

SEQ ID NO: 703618 - RNA, 19 nt, Artificial Sequence
  Description of Artificial Sequence: Synthetic oligonucleotide
gaaguuuagaagaccaaag

SEQ ID NO: 703619 - RNA, 19 nt, Artificial Sequence
  Description of Artificial Sequence: Synthetic oligonucleotide
acaauauaugguuugguau

SEQ ID NO: 703620 - RNA, 19 nt, Artificial Sequence
  Description of Artificial Sequence: Synthetic oligonucleotide
agagguuauacuuuuagua

SEQ ID NO: 703621 - RNA, 19 nt, Artificial Sequence
  Description of Artificial Sequence: Synthetic oligonucleotide
uuccauuuacaccacggcc

SEQ ID NO: 703622 - RNA, 19 nt, Artificial Sequence
  Description of Artificial Sequence: Synthetic oligonucleotide
uagacuucaguauuaagau

SEQ ID NO: 703623 - RNA, 19 nt, Artificial Sequence
  Description of Artificial Sequence: Synthetic oligonucleotide
uaaugaacuagacuucagu

SEQ ID NO: 703624 - RNA, 19 nt, Artificial Sequence
  Description of Artificial Sequence: Synthetic oligonucleotide
aauguugggucuugaaaga

SEQ ID NO: 703625 - RNA, 19 nt, Artificial Sequence
  Description of Artificial Sequence: Synthetic oligonucleotide
gguuugaagcuucauaagg

SEQ ID NO: 703626 - RNA, 19 nt, Artificial Sequence
  Description of Artificial Sequence: Synthetic oligonucleotide
aagacauagucccugcccu

SEQ ID NO: 703627 - RNA, 19 nt, Artificial Sequence
  Description of Artificial Sequence: Synthetic oligonucleotide
aaguauaacugaaaaggug

SEQ ID NO: 703628 - RNA, 19 nt, Artificial Sequence
  Description of Artificial Sequence: Synthetic oligonucleotide
aguaccagcauagugagga

SEQ ID NO: 703629 - RNA, 19 nt, Artificial Sequence
  Description of Artificial Sequence: Synthetic oligonucleotide
uuauacuuuuaguaccagc

SEQ ID NO: 703630 - RNA, 19 nt, Artificial Sequence
  Description of Artificial Sequence: Synthetic oligonucleotide
ugaacuagacuucaguauu

SEQ ID NO: 703631 - RNA, 19 nt, Artificial Sequence
  Description of Artificial Sequence: Synthetic oligonucleotide
aagacagagauaugcauuu

SEQ ID NO: 703632 - RNA, 19 nt, Artificial Sequence
  Description of Artificial Sequence: Synthetic oligonucleotide
aagagguuauacuuuuagu

SEQ ID NO: 703633 - RNA, 19 nt, Artificial Sequence
  Description of Artificial Sequence: Synthetic oligonucleotide
uaaucuccgagggagaugc

SEQ ID NO: 703634 - RNA, 19 nt, Artificial Sequence
  Description of Artificial Sequence: Synthetic oligonucleotide
aauuccaacugcacggccg

SEQ ID NO: 703635 - RNA, 19 nt, Artificial Sequence
  Description of Artificial Sequence: Synthetic oligonucleotide
acaauaauugaguucccca

SEQ ID NO: 703636 - RNA, 19 nt, Artificial Sequence
  Description of Artificial Sequence: Synthetic oligonucleotide
auaagaauuuuaguacagg

SEQ ID NO: 703637 - RNA, 19 nt, Artificial Sequence
  Description of Artificial Sequence: Synthetic oligonucleotide
guauaagaauuuuaguaca

SEQ ID NO: 703638 - RNA, 19 nt, Artificial Sequence
  Description of Artificial Sequence: Synthetic oligonucleotide
ggauaaaagaaucccaaug

SEQ ID NO: 703639 - RNA, 19 nt, Artificial Sequence
  Description of Artificial Sequence: Synthetic oligonucleotide
auucuaggaagcauguuac

SEQ ID NO: 703640 - RNA, 19 nt, Artificial Sequence
  Description of Artificial Sequence: Synthetic oligonucleotide
ucgacaguaacgauauaga

SEQ ID NO: 703641 - RNA, 19 nt, Artificial Sequence
  Description of Artificial Sequence: Synthetic oligonucleotide
gaguuccccaauaacaagg

SEQ ID NO: 703642 - RNA, 19 nt, Artificial Sequence
  Description of Artificial Sequence: Synthetic oligonucleotide
ggaguuaaaaucugucacg

SEQ ID NO: 703643 - RNA, 19 nt, Artificial Sequence
  Description of Artificial Sequence: Synthetic oligonucleotide
agcauuauuguaaaggccu

SEQ ID NO: 703644 - RNA, 19 nt, Artificial Sequence
  Description of Artificial Sequence: Synthetic oligonucleotide
aaacccugugcuuuaggug

SEQ ID NO: 703645 - RNA, 19 nt, Artificial Sequence
  Description of Artificial Sequence: Synthetic oligonucleotide
uuagauuggaauucaguuu

SEQ ID NO: 703646 - RNA, 19 nt, Artificial Sequence
  Description of Artificial Sequence: Synthetic oligonucleotide
aaauugaauccaacuggac

SEQ ID NO: 703647 - RNA, 19 nt, Artificial Sequence
  Description of Artificial Sequence: Synthetic oligonucleotide
ucuggaguuaaaaucuguc

SEQ ID NO: 703648 - RNA, 19 nt, Artificial Sequence
  Description of Artificial Sequence: Synthetic oligonucleotide
cucugcuagguaaaguggg

SEQ ID NO: 703649 - RNA, 19 nt, Artificial Sequence
  Description of Artificial Sequence: Synthetic oligonucleotide
aaucccaaugggcauuuca

SEQ ID NO: 703650 - RNA, 19 nt, Artificial Sequence
  Description of Artificial Sequence: Synthetic oligonucleotide
caugccaauagcuccagug

SEQ ID NO: 703651 - RNA, 19 nt, Artificial Sequence
  Description of Artificial Sequence: Synthetic oligonucleotide
gugggagcaagcuucagag

SEQ ID NO: 703652 - RNA, 19 nt, Artificial Sequence
  Description of Artificial Sequence: Synthetic oligonucleotide
aacuaacauacacguagca

SEQ ID NO: 703653 - RNA, 19 nt, Artificial Sequence
  Description of Artificial Sequence: Synthetic oligonucleotide
aacuaagcucacaaacaac

SEQ ID NO: 703654 - RNA, 19 nt, Artificial Sequence
  Description of Artificial Sequence: Synthetic oligonucleotide
auagucccugcccuuaagg

SEQ ID NO: 703655 - RNA, 19 nt, Artificial Sequence
  Description of Artificial Sequence: Synthetic oligonucleotide
uuuaggugugucuuuuaga

SEQ ID NO: 703656 - RNA, 19 nt, Artificial Sequence
  Description of Artificial Sequence: Synthetic oligonucleotide
acacuuuugcaauaaggga

SEQ ID NO: 703657 - RNA, 19 nt, Artificial Sequence
  Description of Artificial Sequence: Synthetic oligonucleotide
aauaaguagcuuagucauc

SEQ ID NO: 703658 - RNA, 19 nt, Artificial Sequence
  Description of Artificial Sequence: Synthetic oligonucleotide
guaauugggauccucaucu

SEQ ID NO: 703659 - RNA, 19 nt, Artificial Sequence
  Description of Artificial Sequence: Synthetic oligonucleotide
gaacucaccugucaaagga

SEQ ID NO: 703660 - RNA, 19 nt, Artificial Sequence
  Description of Artificial Sequence: Synthetic oligonucleotide
ucuguguuagucaguguac

SEQ ID NO: 703661 - RNA, 19 nt, Artificial Sequence
  Description of Artificial Sequence: Synthetic oligonucleotide
aaauaguccucaaaauaga

SEQ ID NO: 703662 - RNA, 19 nt, Artificial Sequence
  Description of Artificial Sequence: Synthetic oligonucleotide
cauacacguagcaucuagg

SEQ ID NO: 703663 - RNA, 19 nt, Artificial Sequence
  Description of Artificial Sequence: Synthetic oligonucleotide
ucuaggaagcauguuacac

SEQ ID NO: 703664 - RNA, 19 nt, Artificial Sequence
  Description of Artificial Sequence: Synthetic oligonucleotide
cacgcugucaaaagugucc

SEQ ID NO: 703665 - RNA, 19 nt, Artificial Sequence
  Description of Artificial Sequence: Synthetic oligonucleotide
uacuuuuaguaccagcaua

SEQ ID NO: 703666 - RNA, 19 nt, Artificial Sequence
  Description of Artificial Sequence: Synthetic oligonucleotide
aauugaggucucugcuagg

SEQ ID NO: 703667 - RNA, 19 nt, Artificial Sequence
  Description of Artificial Sequence: Synthetic oligonucleotide
augaacuagacuucaguau

SEQ ID NO: 703668 - RNA, 19 nt, Artificial Sequence
  Description of Artificial Sequence: Synthetic oligonucleotide
uagcauucgacaguaacga

SEQ ID NO: 703669 - RNA, 19 nt, Artificial Sequence
  Description of Artificial Sequence: Synthetic oligonucleotide
uguaauugggauccucauc

SEQ ID NO: 703670 - RNA, 19 nt, Artificial Sequence
  Description of Artificial Sequence: Synthetic oligonucleotide
aacacccugccuuacgcca

SEQ ID NO: 703671 - RNA, 19 nt, Artificial Sequence
  Description of Artificial Sequence: Synthetic oligonucleotide
aauauaugguuugguauaa

SEQ ID NO: 703672 - RNA, 19 nt, Artificial Sequence
  Description of Artificial Sequence: Synthetic oligonucleotide
agaacucaccugucaaagg

SEQ ID NO: 703673 - RNA, 19 nt, Artificial Sequence
  Description of Artificial Sequence: Synthetic oligonucleotide
gaagauaaugaacuagacu

SEQ ID NO: 703674 - RNA, 19 nt, Artificial Sequence
  Description of Artificial Sequence: Synthetic oligonucleotide
uguccucucugaaacuucc

SEQ ID NO: 703675 - RNA, 19 nt, Artificial Sequence
  Description of Artificial Sequence: Synthetic oligonucleotide
uaaggauuuaaagaagaua

SEQ ID NO: 703676 - RNA, 19 nt, Artificial Sequence
  Description of Artificial Sequence: Synthetic oligonucleotide
auauauuguaagucuaaua

SEQ ID NO: 703677 - RNA, 19 nt, Artificial Sequence
  Description of Artificial Sequence: Synthetic oligonucleotide
uuggcauguccauucaucu

SEQ ID NO: 703678 - RNA, 19 nt, Artificial Sequence
  Description of Artificial Sequence: Synthetic oligonucleotide
ugaguuccccaauaacaag

SEQ ID NO: 703679 - RNA, 19 nt, Artificial Sequence
  Description of Artificial Sequence: Synthetic oligonucleotide
ucccagacgacccuagaga

SEQ ID NO: 703680 - RNA, 19 nt, Artificial Sequence
  Description of Artificial Sequence: Synthetic oligonucleotide
uucucaugaaggaaacaaa

SEQ ID NO: 703681 - RNA, 19 nt, Artificial Sequence
  Description of Artificial Sequence: Synthetic oligonucleotide
gucgcucagccauagaagc

SEQ ID NO: 703682 - RNA, 19 nt, Artificial Sequence
  Description of Artificial Sequence: Synthetic oligonucleotide
aagaauuuuaguacagguu

SEQ ID NO: 703683 - RNA, 19 nt, Artificial Sequence
  Description of Artificial Sequence: Synthetic oligonucleotide
uuggugauuagucuccaua

SEQ ID NO: 703684 - RNA, 19 nt, Artificial Sequence
  Description of Artificial Sequence: Synthetic oligonucleotide
auuggcauguccauucauc

SEQ ID NO: 703685 - RNA, 19 nt, Artificial Sequence
  Description of Artificial Sequence: Synthetic oligonucleotide
cuuuuagauuggaauucag

SEQ ID NO: 703686 - RNA, 19 nt, Artificial Sequence
  Description of Artificial Sequence: Synthetic oligonucleotide
uggugauuagucuccauau

SEQ ID NO: 703687 - RNA, 19 nt, Artificial Sequence
  Description of Artificial Sequence: Synthetic oligonucleotide
ucugguacgccaucuuccc

SEQ ID NO: 703688 - RNA, 19 nt, Artificial Sequence
  Description of Artificial Sequence: Synthetic oligonucleotide
uacaccacggccuugucua

SEQ ID NO: 703689 - RNA, 19 nt, Artificial Sequence
  Description of Artificial Sequence: Synthetic oligonucleotide
uguguuagucaguguacca

SEQ ID NO: 703690 - RNA, 19 nt, Artificial Sequence
  Description of Artificial Sequence: Synthetic oligonucleotide
agauagaacucaccuguca

SEQ ID NO: 703691 - RNA, 19 nt, Artificial Sequence
  Description of Artificial Sequence: Synthetic oligonucleotide
guaccauuccguaaagugc

SEQ ID NO: 703692 - RNA, 19 nt, Artificial Sequence
  Description of Artificial Sequence: Synthetic oligonucleotide
aucuaggaacaguacaaga

SEQ ID NO: 703693 - RNA, 19 nt, Artificial Sequence
  Description of Artificial Sequence: Synthetic oligonucleotide
ggaagcauguuacacaaca

SEQ ID NO: 703694 - RNA, 19 nt, Artificial Sequence
  Description of Artificial Sequence: Synthetic oligonucleotide
auaacugaaaaggugugau

SEQ ID NO: 703695 - RNA, 19 nt, Artificial Sequence
  Description of Artificial Sequence: Synthetic oligonucleotide
ccuagagacaguguuaugg

SEQ ID NO: 703696 - RNA, 19 nt, Artificial Sequence
  Description of Artificial Sequence: Synthetic oligonucleotide
uccguaaagugcuucugga

SEQ ID NO: 703697 - RNA, 19 nt, Artificial Sequence
  Description of Artificial Sequence: Synthetic oligonucleotide
gacaguaacgauauagaaa

SEQ ID NO: 703698 - RNA, 19 nt, Artificial Sequence
  Description of Artificial Sequence: Synthetic oligonucleotide
cagguuugaagcuucauaa

SEQ ID NO: 703699 - RNA, 19 nt, Artificial Sequence
  Description of Artificial Sequence: Synthetic oligonucleotide
uguccgaccucggaaagag

SEQ ID NO: 703700 - RNA, 19 nt, Artificial Sequence
  Description of Artificial Sequence: Synthetic oligonucleotide
cuggaaguuuagaagacca

SEQ ID NO: 703701 - RNA, 19 nt, Artificial Sequence
  Description of Artificial Sequence: Synthetic oligonucleotide
aaauaagaaauuggugauu

SEQ ID NO: 703702 - RNA, 19 nt, Artificial Sequence
  Description of Artificial Sequence: Synthetic oligonucleotide
cauuauuguaaaggccugg

SEQ ID NO: 703703 - RNA, 19 nt, Artificial Sequence
  Description of Artificial Sequence: Synthetic oligonucleotide
uagguaaagugggagcaag

SEQ ID NO: 703704 - RNA, 19 nt, Artificial Sequence
  Description of Artificial Sequence: Synthetic oligonucleotide
aggugugaucaauuccaac

SEQ ID NO: 703705 - RNA, 19 nt, Artificial Sequence
  Description of Artificial Sequence: Synthetic oligonucleotide
uacacguagcaucuaggaa

SEQ ID NO: 703706 - RNA, 19 nt, Artificial Sequence
  Description of Artificial Sequence: Synthetic oligonucleotide
aguguucccuaauucccag

SEQ ID NO: 703707 - RNA, 19 nt, Artificial Sequence
  Description of Artificial Sequence: Synthetic oligonucleotide
caggcgguaguguaggcgc

SEQ ID NO: 703708 - RNA, 19 nt, Artificial Sequence
  Description of Artificial Sequence: Synthetic oligonucleotide
caauauaugguuugguaua

SEQ ID NO: 703709 - RNA, 19 nt, Artificial Sequence
  Description of Artificial Sequence: Synthetic oligonucleotide
aguagcuuagucauccuga

SEQ ID NO: 703710 - RNA, 19 nt, Artificial Sequence
  Description of Artificial Sequence: Synthetic oligonucleotide
agaagaccaaagaaguuca

SEQ ID NO: 703711 - RNA, 19 nt, Artificial Sequence
  Description of Artificial Sequence: Synthetic oligonucleotide
gucauccugaagaggagcg

SEQ ID NO: 703712 - RNA, 19 nt, Artificial Sequence
  Description of Artificial Sequence: Synthetic oligonucleotide
uugaagcuucauaaggauu

SEQ ID NO: 703713 - RNA, 19 nt, Artificial Sequence
  Description of Artificial Sequence: Synthetic oligonucleotide
gcuguguuacccuccaagg

SEQ ID NO: 703714 - RNA, 19 nt, Artificial Sequence
  Description of Artificial Sequence: Synthetic oligonucleotide
auuugauaaaggccaggaa

SEQ ID NO: 703715 - RNA, 19 nt, Artificial Sequence
  Description of Artificial Sequence: Synthetic oligonucleotide
uguuagucaguguaccauu

SEQ ID NO: 703716 - RNA, 19 nt, Artificial Sequence
  Description of Artificial Sequence: Synthetic oligonucleotide
ggacauagggguuccuucg

SEQ ID NO: 703717 - RNA, 19 nt, Artificial Sequence
  Description of Artificial Sequence: Synthetic oligonucleotide
auaugguuugguauaagaa

SEQ ID NO: 703718 - RNA, 19 nt, Artificial Sequence
  Description of Artificial Sequence: Synthetic oligonucleotide
agagcucaaguacccaugu

SEQ ID NO: 703719 - RNA, 19 nt, Artificial Sequence
  Description of Artificial Sequence: Synthetic oligonucleotide
auaugugcccaacugcaau

SEQ ID NO: 703720 - RNA, 19 nt, Artificial Sequence
  Description of Artificial Sequence: Synthetic oligonucleotide
gagucgcucagccauagaa

SEQ ID NO: 703721 - RNA, 19 nt, Artificial Sequence
  Description of Artificial Sequence: Synthetic oligonucleotide
guguaggcgcggcugaccg

SEQ ID NO: 703722 - RNA, 19 nt, Artificial Sequence
  Description of Artificial Sequence: Synthetic oligonucleotide
guuguaauugggauccuca

SEQ ID NO: 703723 - RNA, 19 nt, Artificial Sequence
  Description of Artificial Sequence: Synthetic oligonucleotide
agugaggaaccccuggcaa

SEQ ID NO: 703724 - RNA, 19 nt, Artificial Sequence
  Description of Artificial Sequence: Synthetic oligonucleotide
ucaguguaccauuccguaa

SEQ ID NO: 703725 - RNA, 19 nt, Artificial Sequence
  Description of Artificial Sequence: Synthetic oligonucleotide
acggccuugucuaucaaag

SEQ ID NO: 703726 - RNA, 19 nt, Artificial Sequence
  Description of Artificial Sequence: Synthetic oligonucleotide
cagaugggccucauaacug

SEQ ID NO: 703727 - RNA, 19 nt, Artificial Sequence
  Description of Artificial Sequence: Synthetic oligonucleotide
guacccauguacuuuuaga

SEQ ID NO: 703728 - RNA, 19 nt, Artificial Sequence
  Description of Artificial Sequence: Synthetic oligonucleotide
augguuugguauaagaauu

SEQ ID NO: 703729 - RNA, 19 nt, Artificial Sequence
  Description of Artificial Sequence: Synthetic oligonucleotide
uaugugcccaacugcaaua

SEQ ID NO: 703730 - RNA, 19 nt, Artificial Sequence
  Description of Artificial Sequence: Synthetic oligonucleotide
uugaauguugggucuugaa

SEQ ID NO: 703731 - RNA, 19 nt, Artificial Sequence
  Description of Artificial Sequence: Synthetic oligonucleotide
uaauugggauccucaucug

SEQ ID NO: 703732 - RNA, 19 nt, Artificial Sequence
  Description of Artificial Sequence: Synthetic oligonucleotide
aauuggugauuagucucca

SEQ ID NO: 703733 - RNA, 19 nt, Artificial Sequence
  Description of Artificial Sequence: Synthetic oligonucleotide
cauuugauaaaggccagga

SEQ ID NO: 703734 - RNA, 19 nt, Artificial Sequence
  Description of Artificial Sequence: Synthetic oligonucleotide
aauucccagacgacccuag

SEQ ID NO: 703735 - RNA, 19 nt, Artificial Sequence
  Description of Artificial Sequence: Synthetic oligonucleotide
cacuuuugcaauaagggau

SEQ ID NO: 703736 - RNA, 19 nt, Artificial Sequence
  Description of Artificial Sequence: Synthetic oligonucleotide
auacccagaagguccacaa

SEQ ID NO: 703737 - RNA, 19 nt, Artificial Sequence
  Description of Artificial Sequence: Synthetic oligonucleotide
aacuagacuucaguauuaa

SEQ ID NO: 703738 - RNA, 19 nt, Artificial Sequence
  Description of Artificial Sequence: Synthetic oligonucleotide
agcauagugaggaaccccu

SEQ ID NO: 703739 - RNA, 19 nt, Artificial Sequence
  Description of Artificial Sequence: Synthetic oligonucleotide
acagagcucaaguacccau

SEQ ID NO: 703740 - RNA, 19 nt, Artificial Sequence
  Description of Artificial Sequence: Synthetic oligonucleotide
gauaaaggccaggaacuga

SEQ ID NO: 703741 - RNA, 19 nt, Artificial Sequence
  Description of Artificial Sequence: Synthetic oligonucleotide
guuauacuuuuaguaccag

SEQ ID NO: 703742 - RNA, 19 nt, Artificial Sequence
  Description of Artificial Sequence: Synthetic oligonucleotide
gcuuagucauccugaagag

SEQ ID NO: 703743 - RNA, 19 nt, Artificial Sequence
  Description of Artificial Sequence: Synthetic oligonucleotide
ggauguuuuaccucacaca

SEQ ID NO: 703744 - RNA, 19 nt, Artificial Sequence
  Description of Artificial Sequence: Synthetic oligonucleotide
ucuccgagggagaugcaau

SEQ ID NO: 703745 - RNA, 19 nt, Artificial Sequence
  Description of Artificial Sequence: Synthetic oligonucleotide
uuugaauguugggucuuga

SEQ ID NO: 703746 - RNA, 19 nt, Artificial Sequence
  Description of Artificial Sequence: Synthetic oligonucleotide
aacaugccaauagcuccag

SEQ ID NO: 703747 - RNA, 19 nt, Artificial Sequence
  Description of Artificial Sequence: Synthetic oligonucleotide
guagcaucuaggaacagua

SEQ ID NO: 703748 - RNA, 19 nt, Artificial Sequence
  Description of Artificial Sequence: Synthetic oligonucleotide
acauauauuguaagucuaa

SEQ ID NO: 703749 - RNA, 19 nt, Artificial Sequence
  Description of Artificial Sequence: Synthetic oligonucleotide
gguuccuucggcuccacac

SEQ ID NO: 703750 - RNA, 19 nt, Artificial Sequence
  Description of Artificial Sequence: Synthetic oligonucleotide
gucuaucaaagaagaguag

SEQ ID NO: 703751 - RNA, 19 nt, Artificial Sequence
  Description of Artificial Sequence: Synthetic oligonucleotide
ucacgcugucaaaaguguc

SEQ ID NO: 703752 - RNA, 19 nt, Artificial Sequence
  Description of Artificial Sequence: Synthetic oligonucleotide
agucgcucagccauagaag

SEQ ID NO: 703753 - RNA, 19 nt, Artificial Sequence
  Description of Artificial Sequence: Synthetic oligonucleotide
cauucgacaguaacgauau

SEQ ID NO: 703754 - RNA, 19 nt, Artificial Sequence
  Description of Artificial Sequence: Synthetic oligonucleotide
ugcuguccgaccucggaaa

SEQ ID NO: 703755 - RNA, 19 nt, Artificial Sequence
  Description of Artificial Sequence: Synthetic oligonucleotide
agacuucaguauuaagauu

SEQ ID NO: 703756 - RNA, 19 nt, Artificial Sequence
  Description of Artificial Sequence: Synthetic oligonucleotide
auuugaauguugggucuug

SEQ ID NO: 703757 - RNA, 19 nt, Artificial Sequence
  Description of Artificial Sequence: Synthetic oligonucleotide
cucaucugguguaucaaaa

SEQ ID NO: 703758 - RNA, 19 nt, Artificial Sequence
  Description of Artificial Sequence: Synthetic oligonucleotide
aagaaucccaaugggcauu

SEQ ID NO: 703759 - RNA, 19 nt, Artificial Sequence
  Description of Artificial Sequence: Synthetic oligonucleotide
ucccuaauucccagacgac

SEQ ID NO: 703760 - RNA, 19 nt, Artificial Sequence
  Description of Artificial Sequence: Synthetic oligonucleotide
agcaaaguucaagagcuuu

SEQ ID NO: 703761 - RNA, 19 nt, Artificial Sequence
  Description of Artificial Sequence: Synthetic oligonucleotide
aaagugcuucuggaguuaa

SEQ ID NO: 703762 - RNA, 19 nt, Artificial Sequence
  Description of Artificial Sequence: Synthetic oligonucleotide
gguuauacuuuuaguacca

SEQ ID NO: 703763 - RNA, 19 nt, Artificial Sequence
  Description of Artificial Sequence: Synthetic oligonucleotide
guuagucaguguaccauuc

SEQ ID NO: 703764 - RNA, 19 nt, Artificial Sequence
  Description of Artificial Sequence: Synthetic oligonucleotide
ccgcucuucagguaguggg

SEQ ID NO: 703765 - RNA, 19 nt, Artificial Sequence
  Description of Artificial Sequence: Synthetic oligonucleotide
guguuacccuccaaggcgc

SEQ ID NO: 703766 - RNA, 19 nt, Artificial Sequence
  Description of Artificial Sequence: Synthetic oligonucleotide
acaguguuaugguucuguu

SEQ ID NO: 703767 - RNA, 19 nt, Artificial Sequence
  Description of Artificial Sequence: Synthetic oligonucleotide
gaaguggaagaaacaagua

SEQ ID NO: 703768 - RNA, 19 nt, Artificial Sequence
  Description of Artificial Sequence: Synthetic oligonucleotide
guacaagacaauauauggu

SEQ ID NO: 703769 - RNA, 19 nt, Artificial Sequence
  Description of Artificial Sequence: Synthetic oligonucleotide
guagcuuagucauccugaa

SEQ ID NO: 703770 - RNA, 19 nt, Artificial Sequence
  Description of Artificial Sequence: Synthetic oligonucleotide
cagagauaugcauuugaua

SEQ ID NO: 703771 - RNA, 19 nt, Artificial Sequence
  Description of Artificial Sequence: Synthetic oligonucleotide
gccuugucuaucaaagaag

SEQ ID NO: 703772 - RNA, 19 nt, Artificial Sequence
  Description of Artificial Sequence: Synthetic oligonucleotide
caugcggacauagggguuc

SEQ ID NO: 703773 - RNA, 19 nt, Artificial Sequence
  Description of Artificial Sequence: Synthetic oligonucleotide
gucaguguaccauuccgua

SEQ ID NO: 703774 - RNA, 19 nt, Artificial Sequence
  Description of Artificial Sequence: Synthetic oligonucleotide
ucauccugaagaggagcga

SEQ ID NO: 703775 - RNA, 19 nt, Artificial Sequence
  Description of Artificial Sequence: Synthetic oligonucleotide
gaccggcgggaucugcagg

SEQ ID NO: 703776 - RNA, 19 nt, Artificial Sequence
  Description of Artificial Sequence: Synthetic oligonucleotide
acccuagagacaguguuau

SEQ ID NO: 703777 - RNA, 19 nt, Artificial Sequence
  Description of Artificial Sequence: Synthetic oligonucleotide
uguuacccuccaaggcgcu

SEQ ID NO: 703778 - RNA, 19 nt, Artificial Sequence
  Description of Artificial Sequence: Synthetic oligonucleotide
accggcgggaucugcaggu

SEQ ID NO: 703779 - RNA, 19 nt, Artificial Sequence
  Description of Artificial Sequence: Synthetic oligonucleotide
agcgaagggcgggacauug

SEQ ID NO: 703780 - RNA, 19 nt, Artificial Sequence
  Description of Artificial Sequence: Synthetic oligonucleotide
cugcccuuaaggagcuuac

SEQ ID NO: 703781 - RNA, 19 nt, Artificial Sequence
  Description of Artificial Sequence: Synthetic oligonucleotide
gcuagguaaagugggagca

SEQ ID NO: 703782 - RNA, 19 nt, Artificial Sequence
  Description of Artificial Sequence: Synthetic oligonucleotide
aaggugugaucaauuccaa

SEQ ID NO: 703783 - RNA, 19 nt, Artificial Sequence
  Description of Artificial Sequence: Synthetic oligonucleotide
aggguaucuguuucuccau

SEQ ID NO: 703784 - RNA, 19 nt, Artificial Sequence
  Description of Artificial Sequence: Synthetic oligonucleotide
guaggcgcggcugaccggc

SEQ ID NO: 703785 - RNA, 19 nt, Artificial Sequence
  Description of Artificial Sequence: Synthetic oligonucleotide
gaacuagacuucaguauua

SEQ ID NO: 703786 - RNA, 19 nt, Artificial Sequence
  Description of Artificial Sequence: Synthetic oligonucleotide
caguguucccuaauuccca

SEQ ID NO: 703787 - RNA, 19 nt, Artificial Sequence
  Description of Artificial Sequence: Synthetic oligonucleotide
guaguguaggcgcggcuga

SEQ ID NO: 703788 - RNA, 19 nt, Artificial Sequence
  Description of Artificial Sequence: Synthetic oligonucleotide
accaaaacccugugcuuua

SEQ ID NO: 703789 - RNA, 19 nt, Artificial Sequence
  Description of Artificial Sequence: Synthetic oligonucleotide
cugcaauacccagaagguc

SEQ ID NO: 703790 - RNA, 19 nt, Artificial Sequence
  Description of Artificial Sequence: Synthetic oligonucleotide
agcauucgacaguaacgau

SEQ ID NO: 703791 - RNA, 19 nt, Artificial Sequence
  Description of Artificial Sequence: Synthetic oligonucleotide
guaaaggccuggccuaaaa

SEQ ID NO: 703792 - RNA, 19 nt, Artificial Sequence
  Description of Artificial Sequence: Synthetic oligonucleotide
ugaggacgcaggcgguagu

SEQ ID NO: 703793 - RNA, 19 nt, Artificial Sequence
  Description of Artificial Sequence: Synthetic oligonucleotide
ccaauagcuccaguguucc

SEQ ID NO: 703794 - RNA, 19 nt, Artificial Sequence
  Description of Artificial Sequence: Synthetic oligonucleotide
cccagacgacccuagagac

SEQ ID NO: 703795 - RNA, 19 nt, Artificial Sequence
  Description of Artificial Sequence: Synthetic oligonucleotide
cccuaauucccagacgacc

SEQ ID NO: 703796 - RNA, 19 nt, Artificial Sequence
  Description of Artificial Sequence: Synthetic oligonucleotide
uaauucccagacgacccua

SEQ ID NO: 703797 - RNA, 19 nt, Artificial Sequence
  Description of Artificial Sequence: Synthetic oligonucleotide
guaggaacacccugccuua

SEQ ID NO: 703798 - RNA, 19 nt, Artificial Sequence
  Description of Artificial Sequence: Synthetic oligonucleotide
auucagcacccaugugcca

SEQ ID NO: 703799 - RNA, 19 nt, Artificial Sequence
  Description of Artificial Sequence: Synthetic oligonucleotide
cauuccguaaagugcuucu

SEQ ID NO: 703800 - RNA, 19 nt, Artificial Sequence
  Description of Artificial Sequence: Synthetic oligonucleotide
aaaaccccaugagcaccca

SEQ ID NO: 703801 - RNA, 19 nt, Artificial Sequence
  Description of Artificial Sequence: Synthetic oligonucleotide
ugcccuuaaggagcuuaca

SEQ ID NO: 703802 - RNA, 19 nt, Artificial Sequence
  Description of Artificial Sequence: Synthetic oligonucleotide
gggucuugaaagacugaag

SEQ ID NO: 703803 - RNA, 19 nt, Artificial Sequence
  Description of Artificial Sequence: Synthetic oligonucleotide
agcacccaugugccaagca

SEQ ID NO: 703804 - RNA, 19 nt, Artificial Sequence
  Description of Artificial Sequence: Synthetic oligonucleotide
uucuagcauucgacaguaa

SEQ ID NO: 703805 - RNA, 19 nt, Artificial Sequence
  Description of Artificial Sequence: Synthetic oligonucleotide
caauuggcauguccauuca

SEQ ID NO: 703806 - RNA, 19 nt, Artificial Sequence
  Description of Artificial Sequence: Synthetic oligonucleotide
cauauauuguaagucuaau

SEQ ID NO: 703807 - RNA, 19 nt, Artificial Sequence
  Description of Artificial Sequence: Synthetic oligonucleotide
cagagucgcucagccauag

SEQ ID NO: 703808 - RNA, 19 nt, Artificial Sequence
  Description of Artificial Sequence: Synthetic oligonucleotide
aucuccgagggagaugcaa

SEQ ID NO: 703809 - RNA, 19 nt, Artificial Sequence
  Description of Artificial Sequence: Synthetic oligonucleotide
ccuuacgccacagagcuca

SEQ ID NO: 703810 - RNA, 19 nt, Artificial Sequence
  Description of Artificial Sequence: Synthetic oligonucleotide
uuccaacugcacggccgcg

SEQ ID NO: 703811 - RNA, 19 nt, Artificial Sequence
  Description of Artificial Sequence: Synthetic oligonucleotide
acgccacagagcucaagua

SEQ ID NO: 703812 - RNA, 19 nt, Artificial Sequence
  Description of Artificial Sequence: Synthetic oligonucleotide
ggcauguccauucaucuuu

SEQ ID NO: 703813 - RNA, 19 nt, Artificial Sequence
  Description of Artificial Sequence: Synthetic oligonucleotide
cauagggguuccuucggcu

SEQ ID NO: 703814 - RNA, 19 nt, Artificial Sequence
  Description of Artificial Sequence: Synthetic oligonucleotide
caaguacccauguacuuuu

SEQ ID NO: 703815 - RNA, 19 nt, Artificial Sequence
  Description of Artificial Sequence: Synthetic oligonucleotide
gacccuagagacaguguua

SEQ ID NO: 703816 - RNA, 19 nt, Artificial Sequence
  Description of Artificial Sequence: Synthetic oligonucleotide
uaggaacacccugccuuac

SEQ ID NO: 703817 - RNA, 19 nt, Artificial Sequence
  Description of Artificial Sequence: Synthetic oligonucleotide
cacugaguccuucucagau

SEQ ID NO: 703818 - RNA, 19 nt, Artificial Sequence
  Description of Artificial Sequence: Synthetic oligonucleotide
gcauucgacaguaacgaua

SEQ ID NO: 703819 - RNA, 19 nt, Artificial Sequence
  Description of Artificial Sequence: Synthetic oligonucleotide
agaggagcgaagggcggga

SEQ ID NO: 703820 - RNA, 19 nt, Artificial Sequence
  Description of Artificial Sequence: Synthetic oligonucleotide
gcuguccgaccucggaaag

SEQ ID NO: 703821 - RNA, 19 nt, Artificial Sequence
  Description of Artificial Sequence: Synthetic oligonucleotide
guguucccuaauucccaga

SEQ ID NO: 703822 - RNA, 19 nt, Artificial Sequence
  Description of Artificial Sequence: Synthetic oligonucleotide
agagucgcucagccauaga

SEQ ID NO: 703823 - RNA, 19 nt, Artificial Sequence
  Description of Artificial Sequence: Synthetic oligonucleotide
gguuguaauugggauccuc

SEQ ID NO: 703824 - RNA, 19 nt, Artificial Sequence
  Description of Artificial Sequence: Synthetic oligonucleotide
cugaccggcgggaucugca

SEQ ID NO: 703825 - RNA, 19 nt, Artificial Sequence
  Description of Artificial Sequence: Synthetic oligonucleotide
guguuagucaguguaccau

SEQ ID NO: 703826 - RNA, 19 nt, Artificial Sequence
  Description of Artificial Sequence: Synthetic oligonucleotide
ccacaauaauugaguuccc

SEQ ID NO: 703827 - RNA, 19 nt, Artificial Sequence
  Description of Artificial Sequence: Synthetic oligonucleotide
cuaauucccagacgacccu

SEQ ID NO: 703828 - RNA, 19 nt, Artificial Sequence
  Description of Artificial Sequence: Synthetic oligonucleotide
agggcgggacauuggcuaa

SEQ ID NO: 703829 - RNA, 19 nt, Artificial Sequence
  Description of Artificial Sequence: Synthetic oligonucleotide
uaguguaggcgcggcugac

SEQ ID NO: 703830 - RNA, 19 nt, Artificial Sequence
  Description of Artificial Sequence: Synthetic oligonucleotide
guuacccuccaaggcgcug

SEQ ID NO: 703831 - RNA, 19 nt, Artificial Sequence
  Description of Artificial Sequence: Synthetic oligonucleotide
aagugcuucuggaguuaaa

SEQ ID NO: 703832 - RNA, 19 nt, Artificial Sequence
  Description of Artificial Sequence: Synthetic oligonucleotide
uggccgcucuucagguagu

SEQ ID NO: 703833 - RNA, 19 nt, Artificial Sequence
  Description of Artificial Sequence: Synthetic oligonucleotide
aggcgguaguguaggcgcg

SEQ ID NO: 703834 - RNA, 19 nt, Artificial Sequence
  Description of Artificial Sequence: Synthetic oligonucleotide
gagcucaaguacccaugua

SEQ ID NO: 703835 - RNA, 19 nt, Artificial Sequence
  Description of Artificial Sequence: Synthetic oligonucleotide
cacggccuugucuaucaaa

SEQ ID NO: 703836 - RNA, 19 nt, Artificial Sequence
  Description of Artificial Sequence: Synthetic oligonucleotide
guuuuaccucacacaagua

SEQ ID NO: 703837 - RNA, 19 nt, Artificial Sequence
  Description of Artificial Sequence: Synthetic oligonucleotide
ccucauaacuggcacagcu

SEQ ID NO: 703838 - RNA, 19 nt, Artificial Sequence
  Description of Artificial Sequence: Synthetic oligonucleotide
agcucacaaacaacccaaa

SEQ ID NO: 703839 - RNA, 19 nt, Artificial Sequence
  Description of Artificial Sequence: Synthetic oligonucleotide
cugucacgcugucaaaagu

SEQ ID NO: 703840 - RNA, 19 nt, Artificial Sequence
  Description of Artificial Sequence: Synthetic oligonucleotide
cauguccauucaucuuuaa

SEQ ID NO: 703841 - RNA, 19 nt, Artificial Sequence
  Description of Artificial Sequence: Synthetic oligonucleotide
aaguacccauguacuuuua

SEQ ID NO: 703842 - RNA, 19 nt, Artificial Sequence
  Description of Artificial Sequence: Synthetic oligonucleotide
ccuggcaaacuguuggaaa

SEQ ID NO: 703843 - RNA, 19 nt, Artificial Sequence
  Description of Artificial Sequence: Synthetic oligonucleotide
gguccacaauaauugaguu

SEQ ID NO: 703844 - RNA, 19 nt, Artificial Sequence
  Description of Artificial Sequence: Synthetic oligonucleotide
cuuuuaguaccagcauagu

SEQ ID NO: 703845 - RNA, 19 nt, Artificial Sequence
  Description of Artificial Sequence: Synthetic oligonucleotide
acguagcaucuaggaacag

SEQ ID NO: 703846 - RNA, 19 nt, Artificial Sequence
  Description of Artificial Sequence: Synthetic oligonucleotide
ggcgguaguguaggcgcgg

SEQ ID NO: 703847 - RNA, 19 nt, Artificial Sequence
  Description of Artificial Sequence: Synthetic oligonucleotide
gggauccucaucuggugua

SEQ ID NO: 703848 - RNA, 19 nt, Artificial Sequence
  Description of Artificial Sequence: Synthetic oligonucleotide
aaucuccgagggagaugca

SEQ ID NO: 703849 - RNA, 19 nt, Artificial Sequence
  Description of Artificial Sequence: Synthetic oligonucleotide
acgacccuagagacagugu

SEQ ID NO: 703850 - RNA, 19 nt, Artificial Sequence
  Description of Artificial Sequence: Synthetic oligonucleotide
ggccgcgguggugaggacg

SEQ ID NO: 703851 - RNA, 19 nt, Artificial Sequence
  Description of Artificial Sequence: Synthetic oligonucleotide
gaagggcgggacauuggcu

SEQ ID NO: 703852 - RNA, 19 nt, Artificial Sequence
  Description of Artificial Sequence: Synthetic oligonucleotide
cacagagcucaaguaccca

SEQ ID NO: 703853 - RNA, 19 nt, Artificial Sequence
  Description of Artificial Sequence: Synthetic oligonucleotide
cggacauagggguuccuuc

SEQ ID NO: 703854 - RNA, 19 nt, Artificial Sequence
  Description of Artificial Sequence: Synthetic oligonucleotide
gaagaccaaagaaguucau

SEQ ID NO: 703855 - RNA, 19 nt, Artificial Sequence
  Description of Artificial Sequence: Synthetic oligonucleotide
caguguuaugguucuguuu

SEQ ID NO: 703856 - RNA, 19 nt, Artificial Sequence
  Description of Artificial Sequence: Synthetic oligonucleotide
ggugauuagucuccauauu

SEQ ID NO: 703857 - RNA, 19 nt, Artificial Sequence
  Description of Artificial Sequence: Synthetic oligonucleotide
gaaucccaaugggcauuuc

SEQ ID NO: 703858 - RNA, 19 nt, Artificial Sequence
  Description of Artificial Sequence: Synthetic oligonucleotide
gccgcucuucagguagugg

SEQ ID NO: 703859 - RNA, 19 nt, Artificial Sequence
  Description of Artificial Sequence: Synthetic oligonucleotide
gccgcgguggugaggacgc

SEQ ID NO: 703860 - RNA, 19 nt, Artificial Sequence
  Description of Artificial Sequence: Synthetic oligonucleotide
gcgaagggcgggacauugg

SEQ ID NO: 703861 - RNA, 19 nt, Artificial Sequence
  Description of Artificial Sequence: Synthetic oligonucleotide
uuauuccaccaggcugauu

SEQ ID NO: 703862 - RNA, 19 nt, Artificial Sequence
  Description of Artificial Sequence: Synthetic oligonucleotide
ccauuccguaaagugcuuc

SEQ ID NO: 703863 - RNA, 19 nt, Artificial Sequence
  Description of Artificial Sequence: Synthetic oligonucleotide
cuguccgaccucggaaaga

SEQ ID NO: 703864 - RNA, 19 nt, Artificial Sequence
  Description of Artificial Sequence: Synthetic oligonucleotide
cuguuucaagauccaggau

SEQ ID NO: 703865 - RNA, 19 nt, Artificial Sequence
  Description of Artificial Sequence: Synthetic oligonucleotide
cuuacgccacagagcucaa

SEQ ID NO: 703866 - RNA, 19 nt, Artificial Sequence
  Description of Artificial Sequence: Synthetic oligonucleotide
acccugccuuacgccacag

SEQ ID NO: 703867 - RNA, 19 nt, Artificial Sequence
  Description of Artificial Sequence: Synthetic oligonucleotide
cccuagagacaguguuaug

SEQ ID NO: 703868 - RNA, 19 nt, Artificial Sequence
  Description of Artificial Sequence: Synthetic oligonucleotide
accauuccguaaagugcuu

SEQ ID NO: 703869 - RNA, 19 nt, Artificial Sequence
  Description of Artificial Sequence: Synthetic oligonucleotide
cacccugccuuacgccaca

SEQ ID NO: 703870 - RNA, 19 nt, Artificial Sequence
  Description of Artificial Sequence: Synthetic oligonucleotide
ggcgggacauuggcuaaca

SEQ ID NO: 703871 - RNA, 19 nt, Artificial Sequence
  Description of Artificial Sequence: Synthetic oligonucleotide
cccuuaaggagcuuacauu

SEQ ID NO: 703872 - RNA, 19 nt, Artificial Sequence
  Description of Artificial Sequence: Synthetic oligonucleotide
gcgguaguguaggcgcggc

SEQ ID NO: 703873 - RNA, 19 nt, Artificial Sequence
  Description of Artificial Sequence: Synthetic oligonucleotide
ggccgcucuucagguagug

SEQ ID NO: 703874 - RNA, 19 nt, Artificial Sequence
  Description of Artificial Sequence: Synthetic oligonucleotide
ccgggaggcucugguacgc

SEQ ID NO: 703875 - RNA, 19 nt, Artificial Sequence
  Description of Artificial Sequence: Synthetic oligonucleotide
cagccgggaggcucuggua

SEQ ID NO: 703876 - RNA, 19 nt, Artificial Sequence
  Description of Artificial Sequence: Synthetic oligonucleotide
gggcgggacauuggcuaac

SEQ ID NO: 703877 - RNA, 19 nt, Artificial Sequence
  Description of Artificial Sequence: Synthetic oligonucleotide
gcggcugaccggcgggauc

SEQ ID NO: 703878 - RNA, 19 nt, Artificial Sequence
  Description of Artificial Sequence: Synthetic oligonucleotide
ggauccucaucugguguau

SEQ ID NO: 703879 - RNA, 19 nt, Artificial Sequence
  Description of Artificial Sequence: Synthetic oligonucleotide
cggccuugucuaucaaaga

SEQ ID NO: 703880 - RNA, 19 nt, Artificial Sequence
  Description of Artificial Sequence: Synthetic oligonucleotide
ccgaccucggaaagagccu

SEQ ID NO: 703881 - RNA, 19 nt, Artificial Sequence
  Description of Artificial Sequence: Synthetic oligonucleotide
ggcugaccggcgggaucug

SEQ ID NO: 703882 - RNA, 19 nt, Artificial Sequence
  Description of Artificial Sequence: Synthetic oligonucleotide
gccuuacgccacagagcuc

SEQ ID NO: 703883 - RNA, 19 nt, Artificial Sequence
  Description of Artificial Sequence: Synthetic oligonucleotide
cccaugugccaagcacagu

SEQ ID NO: 703884 - RNA, 19 nt, Artificial Sequence
  Description of Artificial Sequence: Synthetic oligonucleotide
cgguaguguaggcgcggcu

SEQ ID NO: 703885 - RNA, 19 nt, Artificial Sequence
  Description of Artificial Sequence: Synthetic oligonucleotide
ccggcgggaucugcaggua

SEQ ID NO: 703886 - RNA, 19 nt, Artificial Sequence
  Description of Artificial Sequence: Synthetic oligonucleotide
ccgcgguggugaggacgca

SEQ ID NO: 703887 - RNA, 19 nt, Artificial Sequence
  Description of Artificial Sequence: Synthetic oligonucleotide
cgcggcugaccggcgggau

SEQ ID NO: 703888 - RNA, 19 nt, Artificial Sequence
  Description of Artificial Sequence: Synthetic oligonucleotide
auuuauauaaacucuacgg

SEQ ID NO: 703889 - RNA, 19 nt, Artificial Sequence
  Description of Artificial Sequence: Synthetic oligonucleotide
aguauuaagagaaagaauc

SEQ ID NO: 703890 - RNA, 19 nt, Artificial Sequence
  Description of Artificial Sequence: Synthetic oligonucleotide
uauuuauauaaacucuacg

SEQ ID NO: 703891 - RNA, 19 nt, Artificial Sequence
  Description of Artificial Sequence: Synthetic oligonucleotide
uuuauauaaacucuacggu

SEQ ID NO: 703892 - RNA, 19 nt, Artificial Sequence
  Description of Artificial Sequence: Synthetic oligonucleotide
agaaguguugacuaugugg

SEQ ID NO: 703893 - RNA, 19 nt, Artificial Sequence
  Description of Artificial Sequence: Synthetic oligonucleotide
uguaaacccaaccuaaccc

SEQ ID NO: 703894 - RNA, 19 nt, Artificial Sequence
  Description of Artificial Sequence: Synthetic oligonucleotide
aaguauaucuagcagacau

SEQ ID NO: 703895 - RNA, 19 nt, Artificial Sequence
  Description of Artificial Sequence: Synthetic oligonucleotide
auguagacaaggcagcugc

SEQ ID NO: 703896 - RNA, 19 nt, Artificial Sequence
  Description of Artificial Sequence: Synthetic oligonucleotide
aaauugaccgaagagccac

SEQ ID NO: 703897 - RNA, 19 nt, Artificial Sequence
  Description of Artificial Sequence: Synthetic oligonucleotide
uucguuauuauauaucgcu

SEQ ID NO: 703898 - RNA, 19 nt, Artificial Sequence
  Description of Artificial Sequence: Synthetic oligonucleotide
aucuagcagacauucagcc

SEQ ID NO: 703899 - RNA, 19 nt, Artificial Sequence
  Description of Artificial Sequence: Synthetic oligonucleotide
uauauaaacucuacgguuc

SEQ ID NO: 703900 - RNA, 19 nt, Artificial Sequence
  Description of Artificial Sequence: Synthetic oligonucleotide
aacuuaaguauaucuagca

SEQ ID NO: 703901 - RNA, 19 nt, Artificial Sequence
  Description of Artificial Sequence: Synthetic oligonucleotide
uacguguuaaauuauuuca

SEQ ID NO: 703902 - RNA, 19 nt, Artificial Sequence
  Description of Artificial Sequence: Synthetic oligonucleotide
caaagcuuaaguaaguuuc

SEQ ID NO: 703903 - RNA, 19 nt, Artificial Sequence
  Description of Artificial Sequence: Synthetic oligonucleotide
ucuacgguucuuuaaaggc

SEQ ID NO: 703904 - RNA, 19 nt, Artificial Sequence
  Description of Artificial Sequence: Synthetic oligonucleotide
uugagugacaccucuaugc

SEQ ID NO: 703905 - RNA, 19 nt, Artificial Sequence
  Description of Artificial Sequence: Synthetic oligonucleotide
ucuauuugcaaugcuaucc

SEQ ID NO: 703906 - RNA, 19 nt, Artificial Sequence
  Description of Artificial Sequence: Synthetic oligonucleotide
gguucguuauuauauaucg

SEQ ID NO: 703907 - RNA, 19 nt, Artificial Sequence
  Description of Artificial Sequence: Synthetic oligonucleotide
uccauuuacgaacaaagaa

SEQ ID NO: 703908 - RNA, 19 nt, Artificial Sequence
  Description of Artificial Sequence: Synthetic oligonucleotide
uggauaauuuaacaucugc

SEQ ID NO: 703909 - RNA, 19 nt, Artificial Sequence
  Description of Artificial Sequence: Synthetic oligonucleotide
agaaauaguucugugaaag

SEQ ID NO: 703910 - RNA, 19 nt, Artificial Sequence
  Description of Artificial Sequence: Synthetic oligonucleotide
aacucuaaaacaggcugcc

SEQ ID NO: 703911 - RNA, 19 nt, Artificial Sequence
  Description of Artificial Sequence: Synthetic oligonucleotide
acgaauuggaucaucaucg

SEQ ID NO: 703912 - RNA, 19 nt, Artificial Sequence
  Description of Artificial Sequence: Synthetic oligonucleotide
aucgccuucauucaguaag

SEQ ID NO: 703913 - RNA, 19 nt, Artificial Sequence
  Description of Artificial Sequence: Synthetic oligonucleotide
ugugcuacguguuaaauua

SEQ ID NO: 703914 - RNA, 19 nt, Artificial Sequence
  Description of Artificial Sequence: Synthetic oligonucleotide
caaacucuaaaacaggcug

SEQ ID NO: 703915 - RNA, 19 nt, Artificial Sequence
  Description of Artificial Sequence: Synthetic oligonucleotide
uuaugguacucacauaggu

SEQ ID NO: 703916 - RNA, 19 nt, Artificial Sequence
  Description of Artificial Sequence: Synthetic oligonucleotide
ugcucuuugguuaagccac

SEQ ID NO: 703917 - RNA, 19 nt, Artificial Sequence
  Description of Artificial Sequence: Synthetic oligonucleotide
ugcaaucuaagccccaaag

SEQ ID NO: 703918 - RNA, 19 nt, Artificial Sequence
  Description of Artificial Sequence: Synthetic oligonucleotide
uuauauaucgcucguucuc

SEQ ID NO: 703919 - RNA, 19 nt, Artificial Sequence
  Description of Artificial Sequence: Synthetic oligonucleotide
ugugucauaugcaaucuaa

SEQ ID NO: 703920 - RNA, 19 nt, Artificial Sequence
  Description of Artificial Sequence: Synthetic oligonucleotide
aacuaaauuugagaaguca

SEQ ID NO: 703921 - RNA, 19 nt, Artificial Sequence
  Description of Artificial Sequence: Synthetic oligonucleotide
uuuaaccuggaucuuaauu

SEQ ID NO: 703922 - RNA, 19 nt, Artificial Sequence
  Description of Artificial Sequence: Synthetic oligonucleotide
aacucuacgguucuuuaaa

SEQ ID NO: 703923 - RNA, 19 nt, Artificial Sequence
  Description of Artificial Sequence: Synthetic oligonucleotide
aaugugaaauucauguaga

SEQ ID NO: 703924 - RNA, 19 nt, Artificial Sequence
  Description of Artificial Sequence: Synthetic oligonucleotide
aacgcugaccacuucuuug

SEQ ID NO: 703925 - RNA, 19 nt, Artificial Sequence
  Description of Artificial Sequence: Synthetic oligonucleotide
aauguuaacccugugucau

SEQ ID NO: 703926 - RNA, 19 nt, Artificial Sequence
  Description of Artificial Sequence: Synthetic oligonucleotide
acuuacaucuagcauuuca

SEQ ID NO: 703927 - RNA, 19 nt, Artificial Sequence
  Description of Artificial Sequence: Synthetic oligonucleotide
cauaugcaaucuaagcccc

SEQ ID NO: 703928 - RNA, 19 nt, Artificial Sequence
  Description of Artificial Sequence: Synthetic oligonucleotide
auuauauaucgcucguucu

SEQ ID NO: 703929 - RNA, 19 nt, Artificial Sequence
  Description of Artificial Sequence: Synthetic oligonucleotide
cacacuuuaccuaacucac

SEQ ID NO: 703930 - RNA, 19 nt, Artificial Sequence
  Description of Artificial Sequence: Synthetic oligonucleotide
agcugaaacuggaaaaccc

SEQ ID NO: 703931 - RNA, 19 nt, Artificial Sequence
  Description of Artificial Sequence: Synthetic oligonucleotide
guuacauaucugcauacac

SEQ ID NO: 703932 - RNA, 19 nt, Artificial Sequence
  Description of Artificial Sequence: Synthetic oligonucleotide
accucuaugccgaacagac

SEQ ID NO: 703933 - RNA, 19 nt, Artificial Sequence
  Description of Artificial Sequence: Synthetic oligonucleotide
uucuaugcauuucacuacu

SEQ ID NO: 703934 - RNA, 19 nt, Artificial Sequence
  Description of Artificial Sequence: Synthetic oligonucleotide
uauggguaaugucccagcc

SEQ ID NO: 703935 - RNA, 19 nt, Artificial Sequence
  Description of Artificial Sequence: Synthetic oligonucleotide
cacgcuucaguaaacaauc

SEQ ID NO: 703936 - RNA, 19 nt, Artificial Sequence
  Description of Artificial Sequence: Synthetic oligonucleotide
uagucgcugauacacacac

SEQ ID NO: 703937 - RNA, 19 nt, Artificial Sequence
  Description of Artificial Sequence: Synthetic oligonucleotide
uggguaaugucccagccuc

SEQ ID NO: 703938 - RNA, 19 nt, Artificial Sequence
  Description of Artificial Sequence: Synthetic oligonucleotide
cuacguguuaaauuauuuc

SEQ ID NO: 703939 - RNA, 19 nt, Artificial Sequence
  Description of Artificial Sequence: Synthetic oligonucleotide
aaagugcuuagcaugacaa

SEQ ID NO: 703940 - RNA, 19 nt, Artificial Sequence
  Description of Artificial Sequence: Synthetic oligonucleotide
uuguuugcagccccaaacu

SEQ ID NO: 703941 - RNA, 19 nt, Artificial Sequence
  Description of Artificial Sequence: Synthetic oligonucleotide
aauccugcccuagaucggg

SEQ ID NO: 703942 - RNA, 19 nt, Artificial Sequence
  Description of Artificial Sequence: Synthetic oligonucleotide
ugcaaacuauaauuugaca

SEQ ID NO: 703943 - RNA, 19 nt, Artificial Sequence
  Description of Artificial Sequence: Synthetic oligonucleotide
gaucgauacagugaaugug

SEQ ID NO: 703944 - RNA, 19 nt, Artificial Sequence
  Description of Artificial Sequence: Synthetic oligonucleotide
ucggguucuauuugcaaug

SEQ ID NO: 703945 - RNA, 19 nt, Artificial Sequence
  Description of Artificial Sequence: Synthetic oligonucleotide
ucguuauuauauaucgcuc

SEQ ID NO: 703946 - RNA, 19 nt, Artificial Sequence
  Description of Artificial Sequence: Synthetic oligonucleotide
cucaacuacacugucugcc

SEQ ID NO: 703947 - RNA, 19 nt, Artificial Sequence
  Description of Artificial Sequence: Synthetic oligonucleotide
acuagguucguuauuauau

SEQ ID NO: 703948 - RNA, 19 nt, Artificial Sequence
  Description of Artificial Sequence: Synthetic oligonucleotide
uaaugcauacuuuguauuu

SEQ ID NO: 703949 - RNA, 19 nt, Artificial Sequence
  Description of Artificial Sequence: Synthetic oligonucleotide
uagaucggguucuauuugc

SEQ ID NO: 703950 - RNA, 19 nt, Artificial Sequence
  Description of Artificial Sequence: Synthetic oligonucleotide
cuguaaacccaaccuaacc

SEQ ID NO: 703951 - RNA, 19 nt, Artificial Sequence
  Description of Artificial Sequence: Synthetic oligonucleotide
auauaaacucuacgguucu

SEQ ID NO: 703952 - RNA, 19 nt, Artificial Sequence
  Description of Artificial Sequence: Synthetic oligonucleotide
acuguuauucuugacacaa

SEQ ID NO: 703953 - RNA, 19 nt, Artificial Sequence
  Description of Artificial Sequence: Synthetic oligonucleotide
accgaagagccacagacga

SEQ ID NO: 703954 - RNA, 19 nt, Artificial Sequence
  Description of Artificial Sequence: Synthetic oligonucleotide
gacuauguggcuccaauaa

SEQ ID NO: 703955 - RNA, 19 nt, Artificial Sequence
  Description of Artificial Sequence: Synthetic oligonucleotide
aaagcuuaaguaaguuuca

SEQ ID NO: 703956 - RNA, 19 nt, Artificial Sequence
  Description of Artificial Sequence: Synthetic oligonucleotide
cauagucgcugauacacac

SEQ ID NO: 703957 - RNA, 19 nt, Artificial Sequence
  Description of Artificial Sequence: Synthetic oligonucleotide
uaugguacucacauagguu

SEQ ID NO: 703958 - RNA, 19 nt, Artificial Sequence
  Description of Artificial Sequence: Synthetic oligonucleotide
uauaucgcucguucucuag

SEQ ID NO: 703959 - RNA, 19 nt, Artificial Sequence
  Description of Artificial Sequence: Synthetic oligonucleotide
uaucccuaucucuaguuuc

SEQ ID NO: 703960 - RNA, 19 nt, Artificial Sequence
  Description of Artificial Sequence: Synthetic oligonucleotide
gcuccuaguagaaagauug

SEQ ID NO: 703961 - RNA, 19 nt, Artificial Sequence
  Description of Artificial Sequence: Synthetic oligonucleotide
ggucuagugugauugcugg

SEQ ID NO: 703962 - RNA, 19 nt, Artificial Sequence
  Description of Artificial Sequence: Synthetic oligonucleotide
uugucagacacgcuucagu

SEQ ID NO: 703963 - RNA, 19 nt, Artificial Sequence
  Description of Artificial Sequence: Synthetic oligonucleotide
gaucuuaauucacuuccuc

SEQ ID NO: 703964 - RNA, 19 nt, Artificial Sequence
  Description of Artificial Sequence: Synthetic oligonucleotide
aaccuacugcaguauuaag

SEQ ID NO: 703965 - RNA, 19 nt, Artificial Sequence
  Description of Artificial Sequence: Synthetic oligonucleotide
aaacucuacgguucuuuaa

SEQ ID NO: 703966 - RNA, 19 nt, Artificial Sequence
  Description of Artificial Sequence: Synthetic oligonucleotide
ucuauuccuauugccacca

SEQ ID NO: 703967 - RNA, 19 nt, Artificial Sequence
  Description of Artificial Sequence: Synthetic oligonucleotide
ucacauagguucgaacacc

SEQ ID NO: 703968 - RNA, 19 nt, Artificial Sequence
  Description of Artificial Sequence: Synthetic oligonucleotide
aaaccuacugcaguauuaa

SEQ ID NO: 703969 - RNA, 19 nt, Artificial Sequence
  Description of Artificial Sequence: Synthetic oligonucleotide
cguuauuauauaucgcucg

SEQ ID NO: 703970 - RNA, 19 nt, Artificial Sequence
  Description of Artificial Sequence: Synthetic oligonucleotide
gacaccucuaugccgaaca

SEQ ID NO: 703971 - RNA, 19 nt, Artificial Sequence
  Description of Artificial Sequence: Synthetic oligonucleotide
acucuacgguucuuuaaag

SEQ ID NO: 703972 - RNA, 19 nt, Artificial Sequence
  Description of Artificial Sequence: Synthetic oligonucleotide
ucuagugugauugcuggau

SEQ ID NO: 703973 - RNA, 19 nt, Artificial Sequence
  Description of Artificial Sequence: Synthetic oligonucleotide
agccccaaagcuuaaguaa

SEQ ID NO: 703974 - RNA, 19 nt, Artificial Sequence
  Description of Artificial Sequence: Synthetic oligonucleotide
agguucgaacaccugaccu

SEQ ID NO: 703975 - RNA, 19 nt, Artificial Sequence
  Description of Artificial Sequence: Synthetic oligonucleotide
guuaugguacucacauagg

SEQ ID NO: 703976 - RNA, 19 nt, Artificial Sequence
  Description of Artificial Sequence: Synthetic oligonucleotide
acaaaagugcuuagcauga

SEQ ID NO: 703977 - RNA, 19 nt, Artificial Sequence
  Description of Artificial Sequence: Synthetic oligonucleotide
ucgcucguucucuaguaag

SEQ ID NO: 703978 - RNA, 19 nt, Artificial Sequence
  Description of Artificial Sequence: Synthetic oligonucleotide
uagguucguuauuauauau

SEQ ID NO: 703979 - RNA, 19 nt, Artificial Sequence
  Description of Artificial Sequence: Synthetic oligonucleotide
uucguaacugccuucuauu

SEQ ID NO: 703980 - RNA, 19 nt, Artificial Sequence
  Description of Artificial Sequence: Synthetic oligonucleotide
agguucguuauuauauauc

SEQ ID NO: 703981 - RNA, 19 nt, Artificial Sequence
  Description of Artificial Sequence: Synthetic oligonucleotide
agcaaaaccuacugcagua

SEQ ID NO: 703982 - RNA, 19 nt, Artificial Sequence
  Description of Artificial Sequence: Synthetic oligonucleotide
aguauggguaaugucccag

SEQ ID NO: 703983 - RNA, 19 nt, Artificial Sequence
  Description of Artificial Sequence: Synthetic oligonucleotide
agauugucagacacgcuuc

SEQ ID NO: 703984 - RNA, 19 nt, Artificial Sequence
  Description of Artificial Sequence: Synthetic oligonucleotide
uagguucgaacaccugacc

SEQ ID NO: 703985 - RNA, 19 nt, Artificial Sequence
  Description of Artificial Sequence: Synthetic oligonucleotide
uggaaaaccccagcaaaac

SEQ ID NO: 703986 - RNA, 19 nt, Artificial Sequence
  Description of Artificial Sequence: Synthetic oligonucleotide
gacgaauccuccugacuug

SEQ ID NO: 703987 - RNA, 19 nt, Artificial Sequence
  Description of Artificial Sequence: Synthetic oligonucleotide
ucuaugccgaacagaccug

SEQ ID NO: 703988 - RNA, 19 nt, Artificial Sequence
  Description of Artificial Sequence: Synthetic oligonucleotide
aauccuccgaagaggaacu

SEQ ID NO: 703989 - RNA, 19 nt, Artificial Sequence
  Description of Artificial Sequence: Synthetic oligonucleotide
cuagaucggguucuauuug

SEQ ID NO: 703990 - RNA, 19 nt, Artificial Sequence
  Description of Artificial Sequence: Synthetic oligonucleotide
ugguuaccucaucacaagu

SEQ ID NO: 703991 - RNA, 19 nt, Artificial Sequence
  Description of Artificial Sequence: Synthetic oligonucleotide
aucggguucuauuugcaau

SEQ ID NO: 703992 - RNA, 19 nt, Artificial Sequence
  Description of Artificial Sequence: Synthetic oligonucleotide
acagacgauggcucaacca

SEQ ID NO: 703993 - RNA, 19 nt, Artificial Sequence
  Description of Artificial Sequence: Synthetic oligonucleotide
ucagccaaacagucuacaa

SEQ ID NO: 703994 - RNA, 19 nt, Artificial Sequence
  Description of Artificial Sequence: Synthetic oligonucleotide
guauggguaaugucccagc

SEQ ID NO: 703995 - RNA, 19 nt, Artificial Sequence
  Description of Artificial Sequence: Synthetic oligonucleotide
caguuacauaucugcauac

SEQ ID NO: 703996 - RNA, 19 nt, Artificial Sequence
  Description of Artificial Sequence: Synthetic oligonucleotide
guacagcucugguaaacgc

SEQ ID NO: 703997 - RNA, 19 nt, Artificial Sequence
  Description of Artificial Sequence: Synthetic oligonucleotide
gaucccgucauaucaccca

SEQ ID NO: 703998 - RNA, 19 nt, Artificial Sequence
  Description of Artificial Sequence: Synthetic oligonucleotide
auaucgcucguucucuagu

SEQ ID NO: 703999 - RNA, 19 nt, Artificial Sequence
  Description of Artificial Sequence: Synthetic oligonucleotide
gguucuagcaauauuaacu

SEQ ID NO: 704000 - RNA, 19 nt, Artificial Sequence
  Description of Artificial Sequence: Synthetic oligonucleotide
acuuuaccuaacucacugu

SEQ ID NO: 704001 - RNA, 19 nt, Artificial Sequence
  Description of Artificial Sequence: Synthetic oligonucleotide
auuccuauugccaccauuu

SEQ ID NO: 704002 - RNA, 19 nt, Artificial Sequence
  Description of Artificial Sequence: Synthetic oligonucleotide
ucguaacugccuucuauuc

SEQ ID NO: 704003 - RNA, 19 nt, Artificial Sequence
  Description of Artificial Sequence: Synthetic oligonucleotide
uauuccuauugccaccauu

SEQ ID NO: 704004 - RNA, 19 nt, Artificial Sequence
  Description of Artificial Sequence: Synthetic oligonucleotide
ucuuugguuaagccacgaa

SEQ ID NO: 704005 - RNA, 19 nt, Artificial Sequence
  Description of Artificial Sequence: Synthetic oligonucleotide
cccaaacucuaaaacaggc

SEQ ID NO: 704006 - RNA, 19 nt, Artificial Sequence
  Description of Artificial Sequence: Synthetic oligonucleotide
uacuguuauucuugacaca

SEQ ID NO: 704007 - RNA, 19 nt, Artificial Sequence
  Description of Artificial Sequence: Synthetic oligonucleotide
cuagugugauugcuggaug

SEQ ID NO: 704008 - RNA, 19 nt, Artificial Sequence
  Description of Artificial Sequence: Synthetic oligonucleotide
uaaacgcugaccacuucuu

SEQ ID NO: 704009 - RNA, 19 nt, Artificial Sequence
  Description of Artificial Sequence: Synthetic oligonucleotide
ucgaacaccugaccucucu

SEQ ID NO: 704010 - RNA, 19 nt, Artificial Sequence
  Description of Artificial Sequence: Synthetic oligonucleotide
agaucccgucauaucaccc

SEQ ID NO: 704011 - RNA, 19 nt, Artificial Sequence
  Description of Artificial Sequence: Synthetic oligonucleotide
gucaaccccguuuuguuca

SEQ ID NO: 704012 - RNA, 19 nt, Artificial Sequence
  Description of Artificial Sequence: Synthetic oligonucleotide
gauugucagacacgcuuca

SEQ ID NO: 704013 - RNA, 19 nt, Artificial Sequence
  Description of Artificial Sequence: Synthetic oligonucleotide
guuauuauauaucgcucgu

SEQ ID NO: 704014 - RNA, 19 nt, Artificial Sequence
  Description of Artificial Sequence: Synthetic oligonucleotide
ugcuacguguuaaauuauu

SEQ ID NO: 704015 - RNA, 19 nt, Artificial Sequence
  Description of Artificial Sequence: Synthetic oligonucleotide
uacuagguucguuauuaua

SEQ ID NO: 704016 - RNA, 19 nt, Artificial Sequence
  Description of Artificial Sequence: Synthetic oligonucleotide
auaucacccauuguuugca

SEQ ID NO: 704017 - RNA, 19 nt, Artificial Sequence
  Description of Artificial Sequence: Synthetic oligonucleotide
guucguuauuauauaucgc

SEQ ID NO: 704018 - RNA, 19 nt, Artificial Sequence
  Description of Artificial Sequence: Synthetic oligonucleotide
uacucacauagguucgaac

SEQ ID NO: 704019 - RNA, 19 nt, Artificial Sequence
  Description of Artificial Sequence: Synthetic oligonucleotide
agguacagcucugguaaac

SEQ ID NO: 704020 - RNA, 19 nt, Artificial Sequence
  Description of Artificial Sequence: Synthetic oligonucleotide
cuguuauucuugacacaag

SEQ ID NO: 704021 - RNA, 19 nt, Artificial Sequence
  Description of Artificial Sequence: Synthetic oligonucleotide
acgcugaccacuucuuuga

SEQ ID NO: 704022 - RNA, 19 nt, Artificial Sequence
  Description of Artificial Sequence: Synthetic oligonucleotide
ccauuuacgaacaaagaaa

SEQ ID NO: 704023 - RNA, 19 nt, Artificial Sequence
  Description of Artificial Sequence: Synthetic oligonucleotide
ugugaggaaccuccacccu

SEQ ID NO: 704024 - RNA, 19 nt, Artificial Sequence
  Description of Artificial Sequence: Synthetic oligonucleotide
cagaucccgucauaucacc

SEQ ID NO: 704025 - RNA, 19 nt, Artificial Sequence
  Description of Artificial Sequence: Synthetic oligonucleotide
uuauuauauaucgcucguu

SEQ ID NO: 704026 - RNA, 19 nt, Artificial Sequence
  Description of Artificial Sequence: Synthetic oligonucleotide
cugaccuguggcgaggcgg

SEQ ID NO: 704027 - RNA, 19 nt, Artificial Sequence
  Description of Artificial Sequence: Synthetic oligonucleotide
agcaaggcgcaguaugggu

SEQ ID NO: 704028 - RNA, 19 nt, Artificial Sequence
  Description of Artificial Sequence: Synthetic oligonucleotide
aaccccgagaaguguuugu

SEQ ID NO: 704029 - RNA, 19 nt, Artificial Sequence
  Description of Artificial Sequence: Synthetic oligonucleotide
ugucaaccccguuuuguuc

SEQ ID NO: 704030 - RNA, 19 nt, Artificial Sequence
  Description of Artificial Sequence: Synthetic oligonucleotide
aagcuuaaguaaguuucaa

SEQ ID NO: 704031 - RNA, 19 nt, Artificial Sequence
  Description of Artificial Sequence: Synthetic oligonucleotide
aaccuaaccccgagaagug

SEQ ID NO: 704032 - RNA, 19 nt, Artificial Sequence
  Description of Artificial Sequence: Synthetic oligonucleotide
aagaaauacuagguucguu

SEQ ID NO: 704033 - RNA, 19 nt, Artificial Sequence
  Description of Artificial Sequence: Synthetic oligonucleotide
acaccucuaugccgaacag

SEQ ID NO: 704034 - RNA, 19 nt, Artificial Sequence
  Description of Artificial Sequence: Synthetic oligonucleotide
ccguuuuguucauagcucc

SEQ ID NO: 704035 - RNA, 19 nt, Artificial Sequence
  Description of Artificial Sequence: Synthetic oligonucleotide
uaucgcucguucucuagua

SEQ ID NO: 704036 - RNA, 19 nt, Artificial Sequence
  Description of Artificial Sequence: Synthetic oligonucleotide
acguguuaaauuauuucaa

SEQ ID NO: 704037 - RNA, 19 nt, Artificial Sequence
  Description of Artificial Sequence: Synthetic oligonucleotide
caaguaacuuaaguauauc

SEQ ID NO: 704038 - RNA, 19 nt, Artificial Sequence
  Description of Artificial Sequence: Synthetic oligonucleotide
cucguucucuaguaaguca

SEQ ID NO: 704039 - RNA, 19 nt, Artificial Sequence
  Description of Artificial Sequence: Synthetic oligonucleotide
uuuuaaccuggaucuuaau

SEQ ID NO: 704040 - RNA, 19 nt, Artificial Sequence
  Description of Artificial Sequence: Synthetic oligonucleotide
cuuaauucacuuccucuua

SEQ ID NO: 704041 - RNA, 19 nt, Artificial Sequence
  Description of Artificial Sequence: Synthetic oligonucleotide
gacacgcuucaguaaacaa

SEQ ID NO: 704042 - RNA, 19 nt, Artificial Sequence
  Description of Artificial Sequence: Synthetic oligonucleotide
gauggcgcuguguggcagc

SEQ ID NO: 704043 - RNA, 19 nt, Artificial Sequence
  Description of Artificial Sequence: Synthetic oligonucleotide
ccuaacucacugucaaccc

SEQ ID NO: 704044 - RNA, 19 nt, Artificial Sequence
  Description of Artificial Sequence: Synthetic oligonucleotide
gcgaucgauacagugaaug

SEQ ID NO: 704045 - RNA, 19 nt, Artificial Sequence
  Description of Artificial Sequence: Synthetic oligonucleotide
ugaccagaucccgucauau

SEQ ID NO: 704046 - RNA, 19 nt, Artificial Sequence
  Description of Artificial Sequence: Synthetic oligonucleotide
auugucagacacgcuucag

SEQ ID NO: 704047 - RNA, 19 nt, Artificial Sequence
  Description of Artificial Sequence: Synthetic oligonucleotide
gguucgaacaccugaccuc

SEQ ID NO: 704048 - RNA, 19 nt, Artificial Sequence
  Description of Artificial Sequence: Synthetic oligonucleotide
ccucuuaaagaugaucuug

SEQ ID NO: 704049 - RNA, 19 nt, Artificial Sequence
  Description of Artificial Sequence: Synthetic oligonucleotide
cuagguucguuauuauaua

SEQ ID NO: 704050 - RNA, 19 nt, Artificial Sequence
  Description of Artificial Sequence: Synthetic oligonucleotide
caaccuaaccccgagaagu

SEQ ID NO: 704051 - RNA, 19 nt, Artificial Sequence
  Description of Artificial Sequence: Synthetic oligonucleotide
cacagacgauggcucaacc

SEQ ID NO: 704052 - RNA, 19 nt, Artificial Sequence
  Description of Artificial Sequence: Synthetic oligonucleotide
gaucggguucuauuugcaa

SEQ ID NO: 704053 - RNA, 19 nt, Artificial Sequence
  Description of Artificial Sequence: Synthetic oligonucleotide
aucuaagccccaaagcuua

SEQ ID NO: 704054 - RNA, 19 nt, Artificial Sequence
  Description of Artificial Sequence: Synthetic oligonucleotide
aucccuaucucuaguuucu

SEQ ID NO: 704055 - RNA, 19 nt, Artificial Sequence
  Description of Artificial Sequence: Synthetic oligonucleotide
aauugaccgaagagccaca

SEQ ID NO: 704056 - RNA, 19 nt, Artificial Sequence
  Description of Artificial Sequence: Synthetic oligonucleotide
ugcccuucguaacugccuu

SEQ ID NO: 704057 - RNA, 19 nt, Artificial Sequence
  Description of Artificial Sequence: Synthetic oligonucleotide
agacacgcuucaguaaaca

SEQ ID NO: 704058 - RNA, 19 nt, Artificial Sequence
  Description of Artificial Sequence: Synthetic oligonucleotide
aggucuagugugauugcug

SEQ ID NO: 704059 - RNA, 19 nt, Artificial Sequence
  Description of Artificial Sequence: Synthetic oligonucleotide
cacugcacacuuuaccuaa

SEQ ID NO: 704060 - RNA, 19 nt, Artificial Sequence
  Description of Artificial Sequence: Synthetic oligonucleotide
ggcauauaaacaguaccuc

SEQ ID NO: 704061 - RNA, 19 nt, Artificial Sequence
  Description of Artificial Sequence: Synthetic oligonucleotide
caagaaguguugacuaugu

SEQ ID NO: 704062 - RNA, 19 nt, Artificial Sequence
  Description of Artificial Sequence: Synthetic oligonucleotide
cuacgguucuuuaaaggcu

SEQ ID NO: 704063 - RNA, 19 nt, Artificial Sequence
  Description of Artificial Sequence: Synthetic oligonucleotide
aaugagcaaggcgcaguau

SEQ ID NO: 704064 - RNA, 19 nt, Artificial Sequence
  Description of Artificial Sequence: Synthetic oligonucleotide
gaagucaagcaugcuguaa

SEQ ID NO: 704065 - RNA, 19 nt, Artificial Sequence
  Description of Artificial Sequence: Synthetic oligonucleotide
ccugaccucucuaaaugag

SEQ ID NO: 704066 - RNA, 19 nt, Artificial Sequence
  Description of Artificial Sequence: Synthetic oligonucleotide
acugcacacuuuaccuaac

SEQ ID NO: 704067 - RNA, 19 nt, Artificial Sequence
  Description of Artificial Sequence: Synthetic oligonucleotide
cagcgaucgauacagugaa

SEQ ID NO: 704068 - RNA, 19 nt, Artificial Sequence
  Description of Artificial Sequence: Synthetic oligonucleotide
auauaucgcucguucucua

SEQ ID NO: 704069 - RNA, 19 nt, Artificial Sequence
  Description of Artificial Sequence: Synthetic oligonucleotide
agugugcuacguguuaaau

SEQ ID NO: 704070 - RNA, 19 nt, Artificial Sequence
  Description of Artificial Sequence: Synthetic oligonucleotide
cacaagucuugaguuggac

SEQ ID NO: 704071 - RNA, 19 nt, Artificial Sequence
  Description of Artificial Sequence: Synthetic oligonucleotide
gccccaaagcuuaaguaag

SEQ ID NO: 704072 - RNA, 19 nt, Artificial Sequence
  Description of Artificial Sequence: Synthetic oligonucleotide
aucccgucauaucacccau

SEQ ID NO: 704073 - RNA, 19 nt, Artificial Sequence
  Description of Artificial Sequence: Synthetic oligonucleotide
cagauugucagacacgcuu

SEQ ID NO: 704074 - RNA, 19 nt, Artificial Sequence
  Description of Artificial Sequence: Synthetic oligonucleotide
auuuacgaacaaagaaaua

SEQ ID NO: 704075 - RNA, 19 nt, Artificial Sequence
  Description of Artificial Sequence: Synthetic oligonucleotide
caggacgaauccuccugac

SEQ ID NO: 704076 - RNA, 19 nt, Artificial Sequence
  Description of Artificial Sequence: Synthetic oligonucleotide
aucgcucguucucuaguaa

SEQ ID NO: 704077 - RNA, 19 nt, Artificial Sequence
  Description of Artificial Sequence: Synthetic oligonucleotide
acgauggcucaaccaccuc

SEQ ID NO: 704078 - RNA, 19 nt, Artificial Sequence
  Description of Artificial Sequence: Synthetic oligonucleotide
acauagucgcugauacaca

SEQ ID NO: 704079 - RNA, 19 nt, Artificial Sequence
  Description of Artificial Sequence: Synthetic oligonucleotide
cccguuuuguucauagcuc

SEQ ID NO: 704080 - RNA, 19 nt, Artificial Sequence
  Description of Artificial Sequence: Synthetic oligonucleotide
auagucgcugauacacaca

SEQ ID NO: 704081 - RNA, 19 nt, Artificial Sequence
  Description of Artificial Sequence: Synthetic oligonucleotide
agaucggguucuauuugca

SEQ ID NO: 704082 - RNA, 19 nt, Artificial Sequence
  Description of Artificial Sequence: Synthetic oligonucleotide
caaggcgcaguauggguaa

SEQ ID NO: 704083 - RNA, 19 nt, Artificial Sequence
  Description of Artificial Sequence: Synthetic oligonucleotide
caaguaacucaagaagugu

SEQ ID NO: 704084 - RNA, 19 nt, Artificial Sequence
  Description of Artificial Sequence: Synthetic oligonucleotide
cccgucauaucacccauug

SEQ ID NO: 704085 - RNA, 19 nt, Artificial Sequence
  Description of Artificial Sequence: Synthetic oligonucleotide
cccuaucucuaguuucucc

SEQ ID NO: 704086 - RNA, 19 nt, Artificial Sequence
  Description of Artificial Sequence: Synthetic oligonucleotide
guucgaacaccugaccucu

SEQ ID NO: 704087 - RNA, 19 nt, Artificial Sequence
  Description of Artificial Sequence: Synthetic oligonucleotide
ccagcgaucgauacaguga

SEQ ID NO: 704088 - RNA, 19 nt, Artificial Sequence
  Description of Artificial Sequence: Synthetic oligonucleotide
gucuagugugauugcugga

SEQ ID NO: 704089 - RNA, 19 nt, Artificial Sequence
  Description of Artificial Sequence: Synthetic oligonucleotide
ucaaccccguuuuguucau

SEQ ID NO: 704090 - RNA, 19 nt, Artificial Sequence
  Description of Artificial Sequence: Synthetic oligonucleotide
ccacuguugcuuuccacug

SEQ ID NO: 704091 - RNA, 19 nt, Artificial Sequence
  Description of Artificial Sequence: Synthetic oligonucleotide
auaugcaaucuaagcccca

SEQ ID NO: 704092 - RNA, 19 nt, Artificial Sequence
  Description of Artificial Sequence: Synthetic oligonucleotide
accuaaccccgagaagugu

SEQ ID NO: 704093 - RNA, 19 nt, Artificial Sequence
  Description of Artificial Sequence: Synthetic oligonucleotide
uucgaacaccugaccucuc

SEQ ID NO: 704094 - RNA, 19 nt, Artificial Sequence
  Description of Artificial Sequence: Synthetic oligonucleotide
gguuaccucaucacaagua

SEQ ID NO: 704095 - RNA, 19 nt, Artificial Sequence
  Description of Artificial Sequence: Synthetic oligonucleotide
ucccuaucucuaguuucuc

SEQ ID NO: 704096 - RNA, 19 nt, Artificial Sequence
  Description of Artificial Sequence: Synthetic oligonucleotide
ccucuaugccgaacagacc

SEQ ID NO: 704097 - RNA, 19 nt, Artificial Sequence
  Description of Artificial Sequence: Synthetic oligonucleotide
uugcaggucuagugugauu

SEQ ID NO: 704098 - RNA, 19 nt, Artificial Sequence
  Description of Artificial Sequence: Synthetic oligonucleotide
ucccgucauaucacccauu

SEQ ID NO: 704099 - RNA, 19 nt, Artificial Sequence
  Description of Artificial Sequence: Synthetic oligonucleotide
accccgagaaguguuugua

SEQ ID NO: 704100 - RNA, 19 nt, Artificial Sequence
  Description of Artificial Sequence: Synthetic oligonucleotide
cuccgaagaggaacuguua

SEQ ID NO: 704101 - RNA, 19 nt, Artificial Sequence
  Description of Artificial Sequence: Synthetic oligonucleotide
cagugugcuacguguuaaa

SEQ ID NO: 704102 - RNA, 19 nt, Artificial Sequence
  Description of Artificial Sequence: Synthetic oligonucleotide
gguaaacgcugaccacuuc

SEQ ID NO: 704103 - RNA, 19 nt, Artificial Sequence
  Description of Artificial Sequence: Synthetic oligonucleotide
gguaaugucccagccucaa

SEQ ID NO: 704104 - RNA, 19 nt, Artificial Sequence
  Description of Artificial Sequence: Synthetic oligonucleotide
gguacucacauagguucga

SEQ ID NO: 704105 - RNA, 19 nt, Artificial Sequence
  Description of Artificial Sequence: Synthetic oligonucleotide
guacucacauagguucgaa

SEQ ID NO: 704106 - RNA, 19 nt, Artificial Sequence
  Description of Artificial Sequence: Synthetic oligonucleotide
aagccacgaauuggaucau

SEQ ID NO: 704107 - RNA, 19 nt, Artificial Sequence
  Description of Artificial Sequence: Synthetic oligonucleotide
gcucguucucuaguaaguc

SEQ ID NO: 704108 - RNA, 19 nt, Artificial Sequence
  Description of Artificial Sequence: Synthetic oligonucleotide
cucuccaaacccagucaua

SEQ ID NO: 704109 - RNA, 19 nt, Artificial Sequence
  Description of Artificial Sequence: Synthetic oligonucleotide
cuaucccuaucucuaguuu

SEQ ID NO: 704110 - RNA, 19 nt, Artificial Sequence
  Description of Artificial Sequence: Synthetic oligonucleotide
caccucuaugccgaacaga

SEQ ID NO: 704111 - RNA, 19 nt, Artificial Sequence
  Description of Artificial Sequence: Synthetic oligonucleotide
aaggcgcaguauggguaau

SEQ ID NO: 704112 - RNA, 19 nt, Artificial Sequence
  Description of Artificial Sequence: Synthetic oligonucleotide
caacuacacugucugcccu

SEQ ID NO: 704113 - RNA, 19 nt, Artificial Sequence
  Description of Artificial Sequence: Synthetic oligonucleotide
guuaagccacgaauuggau

SEQ ID NO: 704114 - RNA, 19 nt, Artificial Sequence
  Description of Artificial Sequence: Synthetic oligonucleotide
guugacuauguggcuccaa

SEQ ID NO: 704115 - RNA, 19 nt, Artificial Sequence
  Description of Artificial Sequence: Synthetic oligonucleotide
ccuagaucggguucuauuu

SEQ ID NO: 704116 - RNA, 19 nt, Artificial Sequence
  Description of Artificial Sequence: Synthetic oligonucleotide
ggauggcgcuguguggcag

SEQ ID NO: 704117 - RNA, 19 nt, Artificial Sequence
  Description of Artificial Sequence: Synthetic oligonucleotide
gcgaggcgggcucacuuac

SEQ ID NO: 704118 - RNA, 19 nt, Artificial Sequence
  Description of Artificial Sequence: Synthetic oligonucleotide
gcgcaguauggguaauguc

SEQ ID NO: 704119 - RNA, 19 nt, Artificial Sequence
  Description of Artificial Sequence: Synthetic oligonucleotide
gcuaucccuaucucuaguu

SEQ ID NO: 704120 - RNA, 19 nt, Artificial Sequence
  Description of Artificial Sequence: Synthetic oligonucleotide
ccaaagcuuaaguaaguuu

SEQ ID NO: 704121 - RNA, 19 nt, Artificial Sequence
  Description of Artificial Sequence: Synthetic oligonucleotide
cccgagaaguguuuguacu

SEQ ID NO: 704122 - RNA, 19 nt, Artificial Sequence
  Description of Artificial Sequence: Synthetic oligonucleotide
gcaaggcgcaguaugggua

SEQ ID NO: 704123 - RNA, 19 nt, Artificial Sequence
  Description of Artificial Sequence: Synthetic oligonucleotide
ccaggacgaauccuccuga

SEQ ID NO: 704124 - RNA, 19 nt, Artificial Sequence
  Description of Artificial Sequence: Synthetic oligonucleotide
caggucuagugugauugcu

SEQ ID NO: 704125 - RNA, 19 nt, Artificial Sequence
  Description of Artificial Sequence: Synthetic oligonucleotide
cggguucuauuugcaaugc

SEQ ID NO: 704126 - RNA, 19 nt, Artificial Sequence
  Description of Artificial Sequence: Synthetic oligonucleotide
agcgaucgauacagugaau

SEQ ID NO: 704127 - RNA, 19 nt, Artificial Sequence
  Description of Artificial Sequence: Synthetic oligonucleotide
cccauuguuugcagcccca

SEQ ID NO: 704128 - RNA, 19 nt, Artificial Sequence
  Description of Artificial Sequence: Synthetic oligonucleotide
cugcccuagaucggguucu

SEQ ID NO: 704129 - RNA, 19 nt, Artificial Sequence
  Description of Artificial Sequence: Synthetic oligonucleotide
ggguaaugucccagccuca

SEQ ID NO: 704130 - RNA, 19 nt, Artificial Sequence
  Description of Artificial Sequence: Synthetic oligonucleotide
cgaucgauacagugaaugu

SEQ ID NO: 704131 - RNA, 19 nt, Artificial Sequence
  Description of Artificial Sequence: Synthetic oligonucleotide
gugcuacguguuaaauuau

SEQ ID NO: 704132 - RNA, 19 nt, Artificial Sequence
  Description of Artificial Sequence: Synthetic oligonucleotide
gcccuucguaacugccuuc

SEQ ID NO: 704133 - RNA, 19 nt, Artificial Sequence
  Description of Artificial Sequence: Synthetic oligonucleotide
ccuaaccccgagaaguguu

SEQ ID NO: 704134 - RNA, 19 nt, Artificial Sequence
  Description of Artificial Sequence: Synthetic oligonucleotide
cccuagaucggguucuauu

SEQ ID NO: 704135 - RNA, 19 nt, Artificial Sequence
  Description of Artificial Sequence: Synthetic oligonucleotide
cgcucguucucuaguaagu

SEQ ID NO: 704136 - RNA, 19 nt, Artificial Sequence
  Description of Artificial Sequence: Synthetic oligonucleotide
cgaacaccugaccucucua

SEQ ID NO: 704137 - RNA, 19 nt, Artificial Sequence
  Description of Artificial Sequence: Synthetic oligonucleotide
caaccccguuuuguucaua

SEQ ID NO: 704138 - RNA, 19 nt, Artificial Sequence
  Description of Artificial Sequence: Synthetic oligonucleotide
ccgaagagccacagacgau

SEQ ID NO: 704139 - RNA, 19 nt, Artificial Sequence
  Description of Artificial Sequence: Synthetic oligonucleotide
aucgggacaauacucaggc

SEQ ID NO: 704140 - RNA, 19 nt, Artificial Sequence
  Description of Artificial Sequence: Synthetic oligonucleotide
auaaccuggggacagcugc

SEQ ID NO: 704141 - RNA, 19 nt, Artificial Sequence
  Description of Artificial Sequence: Synthetic oligonucleotide
ugugaugcgacucagugac

SEQ ID NO: 704142 - RNA, 19 nt, Artificial Sequence
  Description of Artificial Sequence: Synthetic oligonucleotide
gaauaauagugccaggugc

SEQ ID NO: 704143 - RNA, 19 nt, Artificial Sequence
  Description of Artificial Sequence: Synthetic oligonucleotide
cacaauaccgaugagagcc

SEQ ID NO: 704144 - RNA, 19 nt, Artificial Sequence
  Description of Artificial Sequence: Synthetic oligonucleotide
acaauacucaggcugcggc

SEQ ID NO: 704145 - RNA, 19 nt, Artificial Sequence
  Description of Artificial Sequence: Synthetic oligonucleotide
uagacaacgccaaaguggc

SEQ ID NO: 704146 - RNA, 19 nt, Artificial Sequence
  Description of Artificial Sequence: Synthetic oligonucleotide
accgaugagagccagaaug

SEQ ID NO: 704147 - RNA, 19 nt, Artificial Sequence
  Description of Artificial Sequence: Synthetic oligonucleotide
ucgagggugagaaaguucc

SEQ ID NO: 704148 - RNA, 19 nt, Artificial Sequence
  Description of Artificial Sequence: Synthetic oligonucleotide
auggggaaucaguacaucc

SEQ ID NO: 704149 - RNA, 19 nt, Artificial Sequence
  Description of Artificial Sequence: Synthetic oligonucleotide
guagacaacgccaaagugg

SEQ ID NO: 704150 - RNA, 19 nt, Artificial Sequence
  Description of Artificial Sequence: Synthetic oligonucleotide
cuagguucacauaaccugg

SEQ ID NO: 704151 - RNA, 19 nt, Artificial Sequence
  Description of Artificial Sequence: Synthetic oligonucleotide
augaaagagaagcccuucc

SEQ ID NO: 704152 - RNA, 19 nt, Artificial Sequence
  Description of Artificial Sequence: Synthetic oligonucleotide
ugaauggggacccuggcug

SEQ ID NO: 704153 - RNA, 19 nt, Artificial Sequence
  Description of Artificial Sequence: Synthetic oligonucleotide
ugaaucgggacaauacuca

SEQ ID NO: 704154 - RNA, 19 nt, Artificial Sequence
  Description of Artificial Sequence: Synthetic oligonucleotide
agauccuugagccgaauag

SEQ ID NO: 704155 - RNA, 19 nt, Artificial Sequence
  Description of Artificial Sequence: Synthetic oligonucleotide
acucagauucccucguugc

SEQ ID NO: 704156 - RNA, 19 nt, Artificial Sequence
  Description of Artificial Sequence: Synthetic oligonucleotide
agccgaauagacucugucc

SEQ ID NO: 704157 - RNA, 19 nt, Artificial Sequence
  Description of Artificial Sequence: Synthetic oligonucleotide
gaugucuaacacaaugggg

SEQ ID NO: 704158 - RNA, 19 nt, Artificial Sequence
  Description of Artificial Sequence: Synthetic oligonucleotide
ucaaaaggguugauauggg

SEQ ID NO: 704159 - RNA, 19 nt, Artificial Sequence
  Description of Artificial Sequence: Synthetic oligonucleotide
aagacuagagcaauggcca

SEQ ID NO: 704160 - RNA, 19 nt, Artificial Sequence
  Description of Artificial Sequence: Synthetic oligonucleotide
ugacagaaccacuuggccc

SEQ ID NO: 704161 - RNA, 19 nt, Artificial Sequence
  Description of Artificial Sequence: Synthetic oligonucleotide
guucggaccacauauucag

SEQ ID NO: 704162 - RNA, 19 nt, Artificial Sequence
  Description of Artificial Sequence: Synthetic oligonucleotide
ucguccagcaugcaguucc

SEQ ID NO: 704163 - RNA, 19 nt, Artificial Sequence
  Description of Artificial Sequence: Synthetic oligonucleotide
agcacaauaccgaugagag

SEQ ID NO: 704164 - RNA, 19 nt, Artificial Sequence
  Description of Artificial Sequence: Synthetic oligonucleotide
gacuuggucacuauggaug

SEQ ID NO: 704165 - RNA, 19 nt, Artificial Sequence
  Description of Artificial Sequence: Synthetic oligonucleotide
cacuuagcagauauagucc

SEQ ID NO: 704166 - RNA, 19 nt, Artificial Sequence
  Description of Artificial Sequence: Synthetic oligonucleotide
uugucuaggacgucucggg

SEQ ID NO: 704167 - RNA, 19 nt, Artificial Sequence
  Description of Artificial Sequence: Synthetic oligonucleotide
ggaguugaagacuagagca

SEQ ID NO: 704168 - RNA, 19 nt, Artificial Sequence
  Description of Artificial Sequence: Synthetic oligonucleotide
gaucucaccacccacgguc

SEQ ID NO: 704169 - RNA, 19 nt, Artificial Sequence
  Description of Artificial Sequence: Synthetic oligonucleotide
uccggaagcacauuuacau

SEQ ID NO: 704170 - RNA, 19 nt, Artificial Sequence
  Description of Artificial Sequence: Synthetic oligonucleotide
augucuaacacaauggggu

SEQ ID NO: 704171 - RNA, 19 nt, Artificial Sequence
  Description of Artificial Sequence: Synthetic oligonucleotide
cauauagggcagaagcacc

SEQ ID NO: 704172 - RNA, 19 nt, Artificial Sequence
  Description of Artificial Sequence: Synthetic oligonucleotide
uccauugaccagcacagcu

SEQ ID NO: 704173 - RNA, 19 nt, Artificial Sequence
  Description of Artificial Sequence: Synthetic oligonucleotide
agugaaucgggacaauacu

SEQ ID NO: 704174 - RNA, 19 nt, Artificial Sequence
  Description of Artificial Sequence: Synthetic oligonucleotide
auauagggcagaagcaccc

SEQ ID NO: 704175 - RNA, 19 nt, Artificial Sequence
  Description of Artificial Sequence: Synthetic oligonucleotide
gacagaaccacuuggccca

SEQ ID NO: 704176 - RNA, 19 nt, Artificial Sequence
  Description of Artificial Sequence: Synthetic oligonucleotide
cuccguggcgcauauaggg

SEQ ID NO: 704177 - RNA, 19 nt, Artificial Sequence
  Description of Artificial Sequence: Synthetic oligonucleotide
auaaggaggguacucugug

SEQ ID NO: 704178 - RNA, 19 nt, Artificial Sequence
  Description of Artificial Sequence: Synthetic oligonucleotide
uccgaucugcagaugaaug

SEQ ID NO: 704179 - RNA, 19 nt, Artificial Sequence
  Description of Artificial Sequence: Synthetic oligonucleotide
ugcucuaccuccaucacua

SEQ ID NO: 704180 - RNA, 19 nt, Artificial Sequence
  Description of Artificial Sequence: Synthetic oligonucleotide
acaguugucccaucccgac

SEQ ID NO: 704181 - RNA, 19 nt, Artificial Sequence
  Description of Artificial Sequence: Synthetic oligonucleotide
gcaagugaggucaaaaggg

SEQ ID NO: 704182 - RNA, 19 nt, Artificial Sequence
  Description of Artificial Sequence: Synthetic oligonucleotide
agguucggaccacauauuc

SEQ ID NO: 704183 - RNA, 19 nt, Artificial Sequence
  Description of Artificial Sequence: Synthetic oligonucleotide
gucuccguggcgcauauag

SEQ ID NO: 704184 - RNA, 19 nt, Artificial Sequence
  Description of Artificial Sequence: Synthetic oligonucleotide
gaaaugaagcaggucuccg

SEQ ID NO: 704185 - RNA, 19 nt, Artificial Sequence
  Description of Artificial Sequence: Synthetic oligonucleotide
uggggaaucaguacauccu

SEQ ID NO: 704186 - RNA, 19 nt, Artificial Sequence
  Description of Artificial Sequence: Synthetic oligonucleotide
caggcgacggcccugagcc

SEQ ID NO: 704187 - RNA, 19 nt, Artificial Sequence
  Description of Artificial Sequence: Synthetic oligonucleotide
cuacugagggcuuagguca

SEQ ID NO: 704188 - RNA, 19 nt, Artificial Sequence
  Description of Artificial Sequence: Synthetic oligonucleotide
cacggaauaauagugccag

SEQ ID NO: 704189 - RNA, 19 nt, Artificial Sequence
  Description of Artificial Sequence: Synthetic oligonucleotide
gccgaauagacucuguccg

SEQ ID NO: 704190 - RNA, 19 nt, Artificial Sequence
  Description of Artificial Sequence: Synthetic oligonucleotide
gaaucgggacaauacucag

SEQ ID NO: 704191 - RNA, 19 nt, Artificial Sequence
  Description of Artificial Sequence: Synthetic oligonucleotide
caaugggacaccauccuug

SEQ ID NO: 704192 - RNA, 19 nt, Artificial Sequence
  Description of Artificial Sequence: Synthetic oligonucleotide
agggcuuaggucaaguggg

SEQ ID NO: 704193 - RNA, 19 nt, Artificial Sequence
  Description of Artificial Sequence: Synthetic oligonucleotide
ucuaggacgucucgggcca

SEQ ID NO: 704194 - RNA, 19 nt, Artificial Sequence
  Description of Artificial Sequence: Synthetic oligonucleotide
aaucgggacaauacucagg

SEQ ID NO: 704195 - RNA, 19 nt, Artificial Sequence
  Description of Artificial Sequence: Synthetic oligonucleotide
uaguauuccuugucuagga

SEQ ID NO: 704196 - RNA, 19 nt, Artificial Sequence
  Description of Artificial Sequence: Synthetic oligonucleotide
ugaaaugaagcaggucucc

SEQ ID NO: 704197 - RNA, 19 nt, Artificial Sequence
  Description of Artificial Sequence: Synthetic oligonucleotide
uggaucgugacgugggagc

SEQ ID NO: 704198 - RNA, 19 nt, Artificial Sequence
  Description of Artificial Sequence: Synthetic oligonucleotide
guagugaaagguccaggag

SEQ ID NO: 704199 - RNA, 19 nt, Artificial Sequence
  Description of Artificial Sequence: Synthetic oligonucleotide
ucagauucccucguugccc

SEQ ID NO: 704200 - RNA, 19 nt, Artificial Sequence
  Description of Artificial Sequence: Synthetic oligonucleotide
aagcacccgaggaaggccc

SEQ ID NO: 704201 - RNA, 19 nt, Artificial Sequence
  Description of Artificial Sequence: Synthetic oligonucleotide
uggugaaucuguaggucug

SEQ ID NO: 704202 - RNA, 19 nt, Artificial Sequence
  Description of Artificial Sequence: Synthetic oligonucleotide
ucacggaauaauagugcca

SEQ ID NO: 704203 - RNA, 19 nt, Artificial Sequence
  Description of Artificial Sequence: Synthetic oligonucleotide
acuauggaugaccacucgu

SEQ ID NO: 704204 - RNA, 19 nt, Artificial Sequence
  Description of Artificial Sequence: Synthetic oligonucleotide
gaauagacucuguccgaag

SEQ ID NO: 704205 - RNA, 19 nt, Artificial Sequence
  Description of Artificial Sequence: Synthetic oligonucleotide
ucguucauggggaaucagu

SEQ ID NO: 704206 - RNA, 19 nt, Artificial Sequence
  Description of Artificial Sequence: Synthetic oligonucleotide
cugugaaugacucguccag

SEQ ID NO: 704207 - RNA, 19 nt, Artificial Sequence
  Description of Artificial Sequence: Synthetic oligonucleotide
uggucacuauggaugacca

SEQ ID NO: 704208 - RNA, 19 nt, Artificial Sequence
  Description of Artificial Sequence: Synthetic oligonucleotide
auagacucuguccgaagca

SEQ ID NO: 704209 - RNA, 19 nt, Artificial Sequence
  Description of Artificial Sequence: Synthetic oligonucleotide
gagcggaugaaaugaagca

SEQ ID NO: 704210 - RNA, 19 nt, Artificial Sequence
  Description of Artificial Sequence: Synthetic oligonucleotide
agaagcacccgaggaaggc

SEQ ID NO: 704211 - RNA, 19 nt, Artificial Sequence
  Description of Artificial Sequence: Synthetic oligonucleotide
uucggaccacauauucagg

SEQ ID NO: 704212 - RNA, 19 nt, Artificial Sequence
  Description of Artificial Sequence: Synthetic oligonucleotide
aagcccuucccgaacagag

SEQ ID NO: 704213 - RNA, 19 nt, Artificial Sequence
  Description of Artificial Sequence: Synthetic oligonucleotide
acugaguuccauugaccag

SEQ ID NO: 704214 - RNA, 19 nt, Artificial Sequence
  Description of Artificial Sequence: Synthetic oligonucleotide
ccuagguucacauaaccug

SEQ ID NO: 704215 - RNA, 19 nt, Artificial Sequence
  Description of Artificial Sequence: Synthetic oligonucleotide
gauauaguccccauggccu

SEQ ID NO: 704216 - RNA, 19 nt, Artificial Sequence
  Description of Artificial Sequence: Synthetic oligonucleotide
agcggaugaaaugaagcag

SEQ ID NO: 704217 - RNA, 19 nt, Artificial Sequence
  Description of Artificial Sequence: Synthetic oligonucleotide
cucuguccgaagcaguggg

SEQ ID NO: 704218 - RNA, 19 nt, Artificial Sequence
  Description of Artificial Sequence: Synthetic oligonucleotide
gguaugguggagcaccccg

SEQ ID NO: 704219 - RNA, 19 nt, Artificial Sequence
  Description of Artificial Sequence: Synthetic oligonucleotide
aggguacucugugaggccc

SEQ ID NO: 704220 - RNA, 19 nt, Artificial Sequence
  Description of Artificial Sequence: Synthetic oligonucleotide
ucuccguggcgcauauagg

SEQ ID NO: 704221 - RNA, 19 nt, Artificial Sequence
  Description of Artificial Sequence: Synthetic oligonucleotide
agcaccuccgaucugcaga

SEQ ID NO: 704222 - RNA, 19 nt, Artificial Sequence
  Description of Artificial Sequence: Synthetic oligonucleotide
gaugcugucggacacuaua

SEQ ID NO: 704223 - RNA, 19 nt, Artificial Sequence
  Description of Artificial Sequence: Synthetic oligonucleotide
acgugggagccacuguagc

SEQ ID NO: 704224 - RNA, 19 nt, Artificial Sequence
  Description of Artificial Sequence: Synthetic oligonucleotide
ggaauaauagugccaggug

SEQ ID NO: 704225 - RNA, 19 nt, Artificial Sequence
  Description of Artificial Sequence: Synthetic oligonucleotide
ugucuaggacgucucgggc

SEQ ID NO: 704226 - RNA, 19 nt, Artificial Sequence
  Description of Artificial Sequence: Synthetic oligonucleotide
auggaugaccacucguuca

SEQ ID NO: 704227 - RNA, 19 nt, Artificial Sequence
  Description of Artificial Sequence: Synthetic oligonucleotide
cuugucuaggacgucucgg

SEQ ID NO: 704228 - RNA, 19 nt, Artificial Sequence
  Description of Artificial Sequence: Synthetic oligonucleotide
acggcccugagccaggaag

SEQ ID NO: 704229 - RNA, 19 nt, Artificial Sequence
  Description of Artificial Sequence: Synthetic oligonucleotide
gguacagugaaucgggaca

SEQ ID NO: 704230 - RNA, 19 nt, Artificial Sequence
  Description of Artificial Sequence: Synthetic oligonucleotide
cacugguuccaugaaagag

SEQ ID NO: 704231 - RNA, 19 nt, Artificial Sequence
  Description of Artificial Sequence: Synthetic oligonucleotide
uauagggcagaagcacccg

SEQ ID NO: 704232 - RNA, 19 nt, Artificial Sequence
  Description of Artificial Sequence: Synthetic oligonucleotide
agcagauauaguccccaug

SEQ ID NO: 704233 - RNA, 19 nt, Artificial Sequence
  Description of Artificial Sequence: Synthetic oligonucleotide
ugguguaggccacgcauga

SEQ ID NO: 704234 - RNA, 19 nt, Artificial Sequence
  Description of Artificial Sequence: Synthetic oligonucleotide
ucauggggaaucaguacau

SEQ ID NO: 704235 - RNA, 19 nt, Artificial Sequence
  Description of Artificial Sequence: Synthetic oligonucleotide
cuucguggcucagaggucc

SEQ ID NO: 704236 - RNA, 19 nt, Artificial Sequence
  Description of Artificial Sequence: Synthetic oligonucleotide
ggacaguugucccaucccg

SEQ ID NO: 704237 - RNA, 19 nt, Artificial Sequence
  Description of Artificial Sequence: Synthetic oligonucleotide
ccugguacagugaaucggg

SEQ ID NO: 704238 - RNA, 19 nt, Artificial Sequence
  Description of Artificial Sequence: Synthetic oligonucleotide
ccuugagccgaauagacuc

SEQ ID NO: 704239 - RNA, 19 nt, Artificial Sequence
  Description of Artificial Sequence: Synthetic oligonucleotide
gacaauacucaggcugcgg

SEQ ID NO: 704240 - RNA, 19 nt, Artificial Sequence
  Description of Artificial Sequence: Synthetic oligonucleotide
ugucggacacuauaguauu

SEQ ID NO: 704241 - RNA, 19 nt, Artificial Sequence
  Description of Artificial Sequence: Synthetic oligonucleotide
cucagauucccucguugcc

SEQ ID NO: 704242 - RNA, 19 nt, Artificial Sequence
  Description of Artificial Sequence: Synthetic oligonucleotide
acgcacucagauucccucg

SEQ ID NO: 704243 - RNA, 19 nt, Artificial Sequence
  Description of Artificial Sequence: Synthetic oligonucleotide
agcucguguuggcagaucu

SEQ ID NO: 704244 - RNA, 19 nt, Artificial Sequence
  Description of Artificial Sequence: Synthetic oligonucleotide
gaggggagcggaugaaaug

SEQ ID NO: 704245 - RNA, 19 nt, Artificial Sequence
  Description of Artificial Sequence: Synthetic oligonucleotide
uucgagggugagaaaguuc

SEQ ID NO: 704246 - RNA, 19 nt, Artificial Sequence
  Description of Artificial Sequence: Synthetic oligonucleotide
auucuucguggcucagagg

SEQ ID NO: 704247 - RNA, 19 nt, Artificial Sequence
  Description of Artificial Sequence: Synthetic oligonucleotide
gcggaugaaaugaagcagg

SEQ ID NO: 704248 - RNA, 19 nt, Artificial Sequence
  Description of Artificial Sequence: Synthetic oligonucleotide
accuccgaucugcagauga

SEQ ID NO: 704249 - RNA, 19 nt, Artificial Sequence
  Description of Artificial Sequence: Synthetic oligonucleotide
ccaagccaaaccaaggcag

SEQ ID NO: 704250 - RNA, 19 nt, Artificial Sequence
  Description of Artificial Sequence: Synthetic oligonucleotide
acggaauaauagugccagg

SEQ ID NO: 704251 - RNA, 19 nt, Artificial Sequence
  Description of Artificial Sequence: Synthetic oligonucleotide
gcuuaggucaagugggcag

SEQ ID NO: 704252 - RNA, 19 nt, Artificial Sequence
  Description of Artificial Sequence: Synthetic oligonucleotide
gauccuugagccgaauaga

SEQ ID NO: 704253 - RNA, 19 nt, Artificial Sequence
  Description of Artificial Sequence: Synthetic oligonucleotide
agauuugguggugaaucug

SEQ ID NO: 704254 - RNA, 19 nt, Artificial Sequence
  Description of Artificial Sequence: Synthetic oligonucleotide
accccucgagguucggacc

SEQ ID NO: 704255 - RNA, 19 nt, Artificial Sequence
  Description of Artificial Sequence: Synthetic oligonucleotide
aggggagcggaugaaauga

SEQ ID NO: 704256 - RNA, 19 nt, Artificial Sequence
  Description of Artificial Sequence: Synthetic oligonucleotide
ggagcggaugaaaugaagc

SEQ ID NO: 704257 - RNA, 19 nt, Artificial Sequence
  Description of Artificial Sequence: Synthetic oligonucleotide
cacgagcaggaucaaggcc

SEQ ID NO: 704258 - RNA, 19 nt, Artificial Sequence
  Description of Artificial Sequence: Synthetic oligonucleotide
ugcugucggacacuauagu

SEQ ID NO: 704259 - RNA, 19 nt, Artificial Sequence
  Description of Artificial Sequence: Synthetic oligonucleotide
agguuuuaugcagcacugg

SEQ ID NO: 704260 - RNA, 19 nt, Artificial Sequence
  Description of Artificial Sequence: Synthetic oligonucleotide
aucgugacgugggagccac

SEQ ID NO: 704261 - RNA, 19 nt, Artificial Sequence
  Description of Artificial Sequence: Synthetic oligonucleotide
gaagcaagugaggucaaaa

SEQ ID NO: 704262 - RNA, 19 nt, Artificial Sequence
  Description of Artificial Sequence: Synthetic oligonucleotide
gugaaucgggacaauacuc

SEQ ID NO: 704263 - RNA, 19 nt, Artificial Sequence
  Description of Artificial Sequence: Synthetic oligonucleotide
uggccuucgagggugagaa

SEQ ID NO: 704264 - RNA, 19 nt, Artificial Sequence
  Description of Artificial Sequence: Synthetic oligonucleotide
cacggucacguucacacuc

SEQ ID NO: 704265 - RNA, 19 nt, Artificial Sequence
  Description of Artificial Sequence: Synthetic oligonucleotide
gacuagagcaauggccagc

SEQ ID NO: 704266 - RNA, 19 nt, Artificial Sequence
  Description of Artificial Sequence: Synthetic oligonucleotide
ccgaucugcagaugaaugg

SEQ ID NO: 704267 - RNA, 19 nt, Artificial Sequence
  Description of Artificial Sequence: Synthetic oligonucleotide
cacuauggaugaccacucg

SEQ ID NO: 704268 - RNA, 19 nt, Artificial Sequence
  Description of Artificial Sequence: Synthetic oligonucleotide
gagccgaauagacucuguc

SEQ ID NO: 704269 - RNA, 19 nt, Artificial Sequence
  Description of Artificial Sequence: Synthetic oligonucleotide
ugcacuguacuuuguucau

SEQ ID NO: 704270 - RNA, 19 nt, Artificial Sequence
  Description of Artificial Sequence: Synthetic oligonucleotide
cacguagugguccccgagc

SEQ ID NO: 704271 - RNA, 19 nt, Artificial Sequence
  Description of Artificial Sequence: Synthetic oligonucleotide
cacucagauucccucguug

SEQ ID NO: 704272 - RNA, 19 nt, Artificial Sequence
  Description of Artificial Sequence: Synthetic oligonucleotide
auagugccaggugccacac

SEQ ID NO: 704273 - RNA, 19 nt, Artificial Sequence
  Description of Artificial Sequence: Synthetic oligonucleotide
acacgucagauuugguggu

SEQ ID NO: 704274 - RNA, 19 nt, Artificial Sequence
  Description of Artificial Sequence: Synthetic oligonucleotide
agugugaagccagcugcuc

SEQ ID NO: 704275 - RNA, 19 nt, Artificial Sequence
  Description of Artificial Sequence: Synthetic oligonucleotide
gucacuauggaugaccacu

SEQ ID NO: 704276 - RNA, 19 nt, Artificial Sequence
  Description of Artificial Sequence: Synthetic oligonucleotide
cuggugccuacagacaggc

SEQ ID NO: 704277 - RNA, 19 nt, Artificial Sequence
  Description of Artificial Sequence: Synthetic oligonucleotide
uucguggcucagagguccg

SEQ ID NO: 704278 - RNA, 19 nt, Artificial Sequence
  Description of Artificial Sequence: Synthetic oligonucleotide
ucuguccgaagcaguggga

SEQ ID NO: 704279 - RNA, 19 nt, Artificial Sequence
  Description of Artificial Sequence: Synthetic oligonucleotide
gaggguacucugugaggcc

SEQ ID NO: 704280 - RNA, 19 nt, Artificial Sequence
  Description of Artificial Sequence: Synthetic oligonucleotide
aacgccaaaguggccuuug

SEQ ID NO: 704281 - RNA, 19 nt, Artificial Sequence
  Description of Artificial Sequence: Synthetic oligonucleotide
ugaugcgacucagugacuu

SEQ ID NO: 704282 - RNA, 19 nt, Artificial Sequence
  Description of Artificial Sequence: Synthetic oligonucleotide
auagggcagaagcacccga

SEQ ID NO: 704283 - RNA, 19 nt, Artificial Sequence
  Description of Artificial Sequence: Synthetic oligonucleotide
cacgcacucagauucccuc

SEQ ID NO: 704284 - RNA, 19 nt, Artificial Sequence
  Description of Artificial Sequence: Synthetic oligonucleotide
gacaacgccaaaguggccu

SEQ ID NO: 704285 - RNA, 19 nt, Artificial Sequence
  Description of Artificial Sequence: Synthetic oligonucleotide
augcugucggacacuauag

SEQ ID NO: 704286 - RNA, 19 nt, Artificial Sequence
  Description of Artificial Sequence: Synthetic oligonucleotide
gauuugguggugaaucugu

SEQ ID NO: 704287 - RNA, 19 nt, Artificial Sequence
  Description of Artificial Sequence: Synthetic oligonucleotide
uaccuccaucacuaggacu

SEQ ID NO: 704288 - RNA, 19 nt, Artificial Sequence
  Description of Artificial Sequence: Synthetic oligonucleotide
ccuacugagggcuuagguc

SEQ ID NO: 704289 - RNA, 19 nt, Artificial Sequence
  Description of Artificial Sequence: Synthetic oligonucleotide
caucccgacuaucugaaaa

SEQ ID NO: 704290 - RNA, 19 nt, Artificial Sequence
  Description of Artificial Sequence: Synthetic oligonucleotide
ugacugugaaugacucguc

SEQ ID NO: 704291 - RNA, 19 nt, Artificial Sequence
  Description of Artificial Sequence: Synthetic oligonucleotide
auauaguccccauggccua

SEQ ID NO: 704292 - RNA, 19 nt, Artificial Sequence
  Description of Artificial Sequence: Synthetic oligonucleotide
ugagccgaauagacucugu

SEQ ID NO: 704293 - RNA, 19 nt, Artificial Sequence
  Description of Artificial Sequence: Synthetic oligonucleotide
ucguugcccaccccucgag

SEQ ID NO: 704294 - RNA, 19 nt, Artificial Sequence
  Description of Artificial Sequence: Synthetic oligonucleotide
gcauauagggcagaagcac

SEQ ID NO: 704295 - RNA, 19 nt, Artificial Sequence
  Description of Artificial Sequence: Synthetic oligonucleotide
gcuaccugcaggccaaagc

SEQ ID NO: 704296 - RNA, 19 nt, Artificial Sequence
  Description of Artificial Sequence: Synthetic oligonucleotide
cauccuugccaaguugcag

SEQ ID NO: 704297 - RNA, 19 nt, Artificial Sequence
  Description of Artificial Sequence: Synthetic oligonucleotide
aauaccgaugagagccaga

SEQ ID NO: 704298 - RNA, 19 nt, Artificial Sequence
  Description of Artificial Sequence: Synthetic oligonucleotide
cacucguucauggggaauc

SEQ ID NO: 704299 - RNA, 19 nt, Artificial Sequence
  Description of Artificial Sequence: Synthetic oligonucleotide
cacacucacgcagucugcc

SEQ ID NO: 704300 - RNA, 19 nt, Artificial Sequence
  Description of Artificial Sequence: Synthetic oligonucleotide
caauacucaggcugcggca

SEQ ID NO: 704301 - RNA, 19 nt, Artificial Sequence
  Description of Artificial Sequence: Synthetic oligonucleotide
aagucagaugcuggccaug

SEQ ID NO: 704302 - RNA, 19 nt, Artificial Sequence
  Description of Artificial Sequence: Synthetic oligonucleotide
caccucagcaccuccgauc

SEQ ID NO: 704303 - RNA, 19 nt, Artificial Sequence
  Description of Artificial Sequence: Synthetic oligonucleotide
ucuucguggcucagagguc

SEQ ID NO: 704304 - RNA, 19 nt, Artificial Sequence
  Description of Artificial Sequence: Synthetic oligonucleotide
uccgggaguugaagacuag

SEQ ID NO: 704305 - RNA, 19 nt, Artificial Sequence
  Description of Artificial Sequence: Synthetic oligonucleotide
caccccucgagguucggac

SEQ ID NO: 704306 - RNA, 19 nt, Artificial Sequence
  Description of Artificial Sequence: Synthetic oligonucleotide
gaccacucguucaugggga

SEQ ID NO: 704307 - RNA, 19 nt, Artificial Sequence
  Description of Artificial Sequence: Synthetic oligonucleotide
aggcgaggacuguggcugc

SEQ ID NO: 704308 - RNA, 19 nt, Artificial Sequence
  Description of Artificial Sequence: Synthetic oligonucleotide
cuuaggucaagugggcaga

SEQ ID NO: 704309 - RNA, 19 nt, Artificial Sequence
  Description of Artificial Sequence: Synthetic oligonucleotide
cgggacaauacucaggcug

SEQ ID NO: 704310 - RNA, 19 nt, Artificial Sequence
  Description of Artificial Sequence: Synthetic oligonucleotide
agugggacaguugucccau

SEQ ID NO: 704311 - RNA, 19 nt, Artificial Sequence
  Description of Artificial Sequence: Synthetic oligonucleotide
cagcacaauaccgaugaga

SEQ ID NO: 704312 - RNA, 19 nt, Artificial Sequence
  Description of Artificial Sequence: Synthetic oligonucleotide
cugugaugcgacucaguga

SEQ ID NO: 704313 - RNA, 19 nt, Artificial Sequence
  Description of Artificial Sequence: Synthetic oligonucleotide
acucacgcagucugccaca

SEQ ID NO: 704314 - RNA, 19 nt, Artificial Sequence
  Description of Artificial Sequence: Synthetic oligonucleotide
gacaguugucccaucccga

SEQ ID NO: 704315 - RNA, 19 nt, Artificial Sequence
  Description of Artificial Sequence: Synthetic oligonucleotide
agauucccucguugcccac

SEQ ID NO: 704316 - RNA, 19 nt, Artificial Sequence
  Description of Artificial Sequence: Synthetic oligonucleotide
aaguggccuuugccaauga

SEQ ID NO: 704317 - RNA, 19 nt, Artificial Sequence
  Description of Artificial Sequence: Synthetic oligonucleotide
ucccguaggaaagcuucca

SEQ ID NO: 704318 - RNA, 19 nt, Artificial Sequence
  Description of Artificial Sequence: Synthetic oligonucleotide
cuuugccaaugacuugguc

SEQ ID NO: 704319 - RNA, 19 nt, Artificial Sequence
  Description of Artificial Sequence: Synthetic oligonucleotide
caauaccgaugagagccag

SEQ ID NO: 704320 - RNA, 19 nt, Artificial Sequence
  Description of Artificial Sequence: Synthetic oligonucleotide
ugcgacucagugacuuaau

SEQ ID NO: 704321 - RNA, 19 nt, Artificial Sequence
  Description of Artificial Sequence: Synthetic oligonucleotide
aggagcguccuguccagau

SEQ ID NO: 704322 - RNA, 19 nt, Artificial Sequence
  Description of Artificial Sequence: Synthetic oligonucleotide
uauaguccccauggccuac

SEQ ID NO: 704323 - RNA, 19 nt, Artificial Sequence
  Description of Artificial Sequence: Synthetic oligonucleotide
uagcagauauaguccccau

SEQ ID NO: 704324 - RNA, 19 nt, Artificial Sequence
  Description of Artificial Sequence: Synthetic oligonucleotide
agaucucaccacccacggu

SEQ ID NO: 704325 - RNA, 19 nt, Artificial Sequence
  Description of Artificial Sequence: Synthetic oligonucleotide
gggacaguugucccauccc

SEQ ID NO: 704326 - RNA, 19 nt, Artificial Sequence
  Description of Artificial Sequence: Synthetic oligonucleotide
ugcacguagugguccccga

SEQ ID NO: 704327 - RNA, 19 nt, Artificial Sequence
  Description of Artificial Sequence: Synthetic oligonucleotide
cuggcccugacagaaccac

SEQ ID NO: 704328 - RNA, 19 nt, Artificial Sequence
  Description of Artificial Sequence: Synthetic oligonucleotide
cagugggguuccucugagg

SEQ ID NO: 704329 - RNA, 19 nt, Artificial Sequence
  Description of Artificial Sequence: Synthetic oligonucleotide
gcgacucagugacuuaaug

SEQ ID NO: 704330 - RNA, 19 nt, Artificial Sequence
  Description of Artificial Sequence: Synthetic oligonucleotide
uggcccugacagaaccacu

SEQ ID NO: 704331 - RNA, 19 nt, Artificial Sequence
  Description of Artificial Sequence: Synthetic oligonucleotide
cugcacguagugguccccg

SEQ ID NO: 704332 - RNA, 19 nt, Artificial Sequence
  Description of Artificial Sequence: Synthetic oligonucleotide
cuucccgaacagagcugcc

SEQ ID NO: 704333 - RNA, 19 nt, Artificial Sequence
  Description of Artificial Sequence: Synthetic oligonucleotide
acaauaccgaugagagcca

SEQ ID NO: 704334 - RNA, 19 nt, Artificial Sequence
  Description of Artificial Sequence: Synthetic oligonucleotide
cuccggaagcacauuuaca

SEQ ID NO: 704335 - RNA, 19 nt, Artificial Sequence
  Description of Artificial Sequence: Synthetic oligonucleotide
acaacgccaaaguggccuu

SEQ ID NO: 704336 - RNA, 19 nt, Artificial Sequence
  Description of Artificial Sequence: Synthetic oligonucleotide
ugcuggccauggaucguga

SEQ ID NO: 704337 - RNA, 19 nt, Artificial Sequence
  Description of Artificial Sequence: Synthetic oligonucleotide
aggacgucucgggccagac

SEQ ID NO: 704338 - RNA, 19 nt, Artificial Sequence
  Description of Artificial Sequence: Synthetic oligonucleotide
agcccgugggccaaaguca

SEQ ID NO: 704339 - RNA, 19 nt, Artificial Sequence
  Description of Artificial Sequence: Synthetic oligonucleotide
acgucagauuuggugguga

SEQ ID NO: 704340 - RNA, 19 nt, Artificial Sequence
  Description of Artificial Sequence: Synthetic oligonucleotide
cccgacuaucugaaaauuc

SEQ ID NO: 704341 - RNA, 19 nt, Artificial Sequence
  Description of Artificial Sequence: Synthetic oligonucleotide
cauggggaaucaguacauc

SEQ ID NO: 704342 - RNA, 19 nt, Artificial Sequence
  Description of Artificial Sequence: Synthetic oligonucleotide
gcacaauaccgaugagagc

SEQ ID NO: 704343 - RNA, 19 nt, Artificial Sequence
  Description of Artificial Sequence: Synthetic oligonucleotide
ucacgcagucugccacagc

SEQ ID NO: 704344 - RNA, 19 nt, Artificial Sequence
  Description of Artificial Sequence: Synthetic oligonucleotide
uggccuacugagggcuuag

SEQ ID NO: 704345 - RNA, 19 nt, Artificial Sequence
  Description of Artificial Sequence: Synthetic oligonucleotide
gaugcgacucagugacuua

SEQ ID NO: 704346 - RNA, 19 nt, Artificial Sequence
  Description of Artificial Sequence: Synthetic oligonucleotide
cucacgcagucugccacag

SEQ ID NO: 704347 - RNA, 19 nt, Artificial Sequence
  Description of Artificial Sequence: Synthetic oligonucleotide
gucagguuuuaugcagcac

SEQ ID NO: 704348 - RNA, 19 nt, Artificial Sequence
  Description of Artificial Sequence: Synthetic oligonucleotide
ccuucccgaacagagcugc

SEQ ID NO: 704349 - RNA, 19 nt, Artificial Sequence
  Description of Artificial Sequence: Synthetic oligonucleotide
ccgacuaucugaaaauucu

SEQ ID NO: 704350 - RNA, 19 nt, Artificial Sequence
  Description of Artificial Sequence: Synthetic oligonucleotide
ggaucgugacgugggagcc

SEQ ID NO: 704351 - RNA, 19 nt, Artificial Sequence
  Description of Artificial Sequence: Synthetic oligonucleotide
cagauuugguggugaaucu

SEQ ID NO: 704352 - RNA, 19 nt, Artificial Sequence
  Description of Artificial Sequence: Synthetic oligonucleotide
acaguggaucugauucugu

SEQ ID NO: 704353 - RNA, 19 nt, Artificial Sequence
  Description of Artificial Sequence: Synthetic oligonucleotide
ggucaagugggcagaggug

SEQ ID NO: 704354 - RNA, 19 nt, Artificial Sequence
  Description of Artificial Sequence: Synthetic oligonucleotide
ggucacguucacacucacg

SEQ ID NO: 704355 - RNA, 19 nt, Artificial Sequence
  Description of Artificial Sequence: Synthetic oligonucleotide
accacucguucauggggaa

SEQ ID NO: 704356 - RNA, 19 nt, Artificial Sequence
  Description of Artificial Sequence: Synthetic oligonucleotide
cauggaucgugacguggga

SEQ ID NO: 704357 - RNA, 19 nt, Artificial Sequence
  Description of Artificial Sequence: Synthetic oligonucleotide
ggugggucgcgcugcuggg

SEQ ID NO: 704358 - RNA, 19 nt, Artificial Sequence
  Description of Artificial Sequence: Synthetic oligonucleotide
gguucggaccacauauuca

SEQ ID NO: 704359 - RNA, 19 nt, Artificial Sequence
  Description of Artificial Sequence: Synthetic oligonucleotide
gggagcggaugaaaugaag

SEQ ID NO: 704360 - RNA, 19 nt, Artificial Sequence
  Description of Artificial Sequence: Synthetic oligonucleotide
cuugagccgaauagacucu

SEQ ID NO: 704361 - RNA, 19 nt, Artificial Sequence
  Description of Artificial Sequence: Synthetic oligonucleotide
uuuccgucuccgggaguug

SEQ ID NO: 704362 - RNA, 19 nt, Artificial Sequence
  Description of Artificial Sequence: Synthetic oligonucleotide
gcucugauagaggccgggg

SEQ ID NO: 704363 - RNA, 19 nt, Artificial Sequence
  Description of Artificial Sequence: Synthetic oligonucleotide
uggcacaguggaucugauu

SEQ ID NO: 704364 - RNA, 19 nt, Artificial Sequence
  Description of Artificial Sequence: Synthetic oligonucleotide
cuccgggaguugaagacua

SEQ ID NO: 704365 - RNA, 19 nt, Artificial Sequence
  Description of Artificial Sequence: Synthetic oligonucleotide
gucggacacuauaguauuc

SEQ ID NO: 704366 - RNA, 19 nt, Artificial Sequence
  Description of Artificial Sequence: Synthetic oligonucleotide
caugguagacaacgccaaa

SEQ ID NO: 704367 - RNA, 19 nt, Artificial Sequence
  Description of Artificial Sequence: Synthetic oligonucleotide
caggugccacacugaaguc

SEQ ID NO: 704368 - RNA, 19 nt, Artificial Sequence
  Description of Artificial Sequence: Synthetic oligonucleotide
cacgucagauuugguggug

SEQ ID NO: 704369 - RNA, 19 nt, Artificial Sequence
  Description of Artificial Sequence: Synthetic oligonucleotide
ggucacuauggaugaccac

SEQ ID NO: 704370 - RNA, 19 nt, Artificial Sequence
  Description of Artificial Sequence: Synthetic oligonucleotide
gaucgugacgugggagcca

SEQ ID NO: 704371 - RNA, 19 nt, Artificial Sequence
  Description of Artificial Sequence: Synthetic oligonucleotide
caucuacacagaccugcaa

SEQ ID NO: 704372 - RNA, 19 nt, Artificial Sequence
  Description of Artificial Sequence: Synthetic oligonucleotide
cgccaagccaaaccaaggc

SEQ ID NO: 704373 - RNA, 19 nt, Artificial Sequence
  Description of Artificial Sequence: Synthetic oligonucleotide
cuugacaggcaggcgggca

SEQ ID NO: 704374 - RNA, 19 nt, Artificial Sequence
  Description of Artificial Sequence: Synthetic oligonucleotide
ggcucugauagaggccggg

SEQ ID NO: 704375 - RNA, 19 nt, Artificial Sequence
  Description of Artificial Sequence: Synthetic oligonucleotide
gcacguagugguccccgag

SEQ ID NO: 704376 - RNA, 19 nt, Artificial Sequence
  Description of Artificial Sequence: Synthetic oligonucleotide
cagcaccuccgaucugcag

SEQ ID NO: 704377 - RNA, 19 nt, Artificial Sequence
  Description of Artificial Sequence: Synthetic oligonucleotide
uggcgcauauagggcagaa

SEQ ID NO: 704378 - RNA, 19 nt, Artificial Sequence
  Description of Artificial Sequence: Synthetic oligonucleotide
ugccaaugacuuggucacu

SEQ ID NO: 704379 - RNA, 19 nt, Artificial Sequence
  Description of Artificial Sequence: Synthetic oligonucleotide
ggcgcauauagggcagaag

SEQ ID NO: 704380 - RNA, 19 nt, Artificial Sequence
  Description of Artificial Sequence: Synthetic oligonucleotide
ggugaaucuguaggucuga

SEQ ID NO: 704381 - RNA, 19 nt, Artificial Sequence
  Description of Artificial Sequence: Synthetic oligonucleotide
ggagcguccuguccagauc

SEQ ID NO: 704382 - RNA, 19 nt, Artificial Sequence
  Description of Artificial Sequence: Synthetic oligonucleotide
aggucuccguggcgcauau

SEQ ID NO: 704383 - RNA, 19 nt, Artificial Sequence
  Description of Artificial Sequence: Synthetic oligonucleotide
gagguccggaagccuagcu

SEQ ID NO: 704384 - RNA, 19 nt, Artificial Sequence
  Description of Artificial Sequence: Synthetic oligonucleotide
cucguugcccaccccucga

SEQ ID NO: 704385 - RNA, 19 nt, Artificial Sequence
  Description of Artificial Sequence: Synthetic oligonucleotide
ccccguguuagcagcuccc

SEQ ID NO: 704386 - RNA, 19 nt, Artificial Sequence
  Description of Artificial Sequence: Synthetic oligonucleotide
gggcuuaggucaagugggc

SEQ ID NO: 704387 - RNA, 19 nt, Artificial Sequence
  Description of Artificial Sequence: Synthetic oligonucleotide
cacgcaugagcagccccuc

SEQ ID NO: 704388 - RNA, 19 nt, Artificial Sequence
  Description of Artificial Sequence: Synthetic oligonucleotide
gcccgugggccaaagucag

SEQ ID NO: 704389 - RNA, 19 nt, Artificial Sequence
  Description of Artificial Sequence: Synthetic oligonucleotide
uagaggccggggccuugau

SEQ ID NO: 704390 - RNA, 19 nt, Artificial Sequence
  Description of Artificial Sequence: Synthetic oligonucleotide
gugacacauaaaaucuguu

SEQ ID NO: 704391 - RNA, 19 nt, Artificial Sequence
  Description of Artificial Sequence: Synthetic oligonucleotide
ccgaauagacucuguccga

SEQ ID NO: 704392 - RNA, 19 nt, Artificial Sequence
  Description of Artificial Sequence: Synthetic oligonucleotide
gagccauaaggaggguacu

SEQ ID NO: 704393 - RNA, 19 nt, Artificial Sequence
  Description of Artificial Sequence: Synthetic oligonucleotide
guaugguggagcaccccgu

SEQ ID NO: 704394 - RNA, 19 nt, Artificial Sequence
  Description of Artificial Sequence: Synthetic oligonucleotide
gguacucugugaggcccug

SEQ ID NO: 704395 - RNA, 19 nt, Artificial Sequence
  Description of Artificial Sequence: Synthetic oligonucleotide
cuaggacgucucgggccag

SEQ ID NO: 704396 - RNA, 19 nt, Artificial Sequence
  Description of Artificial Sequence: Synthetic oligonucleotide
gccauaaggaggguacucu

SEQ ID NO: 704397 - RNA, 19 nt, Artificial Sequence
  Description of Artificial Sequence: Synthetic oligonucleotide
ggcggcacugacgcuguug

SEQ ID NO: 704398 - RNA, 19 nt, Artificial Sequence
  Description of Artificial Sequence: Synthetic oligonucleotide
auggccuacugagggcuua

SEQ ID NO: 704399 - RNA, 19 nt, Artificial Sequence
  Description of Artificial Sequence: Synthetic oligonucleotide
cgagguucggaccacauau

SEQ ID NO: 704400 - RNA, 19 nt, Artificial Sequence
  Description of Artificial Sequence: Synthetic oligonucleotide
ccgaugagagccagaaugu

SEQ ID NO: 704401 - RNA, 19 nt, Artificial Sequence
  Description of Artificial Sequence: Synthetic oligonucleotide
ucgugacgugggagccacu

SEQ ID NO: 704402 - RNA, 19 nt, Artificial Sequence
  Description of Artificial Sequence: Synthetic oligonucleotide
gccuacugagggcuuaggu

SEQ ID NO: 704403 - RNA, 19 nt, Artificial Sequence
  Description of Artificial Sequence: Synthetic oligonucleotide
gcggcacugacgcuguugu

SEQ ID NO: 704404 - RNA, 19 nt, Artificial Sequence
  Description of Artificial Sequence: Synthetic oligonucleotide
cccaucccgacuaucugaa

SEQ ID NO: 704405 - RNA, 19 nt, Artificial Sequence
  Description of Artificial Sequence: Synthetic oligonucleotide
gguggagcaccccguguua

SEQ ID NO: 704406 - RNA, 19 nt, Artificial Sequence
  Description of Artificial Sequence: Synthetic oligonucleotide
ccguguuagcagcucccac

SEQ ID NO: 704407 - RNA, 19 nt, Artificial Sequence
  Description of Artificial Sequence: Synthetic oligonucleotide
cuggccuucgagggugaga

SEQ ID NO: 704408 - RNA, 19 nt, Artificial Sequence
  Description of Artificial Sequence: Synthetic oligonucleotide
aggucccggugcacaaacu

SEQ ID NO: 704409 - RNA, 19 nt, Artificial Sequence
  Description of Artificial Sequence: Synthetic oligonucleotide
agcacccgaggaaggcccu

SEQ ID NO: 704410 - RNA, 19 nt, Artificial Sequence
  Description of Artificial Sequence: Synthetic oligonucleotide
caguugucccaucccgacu

SEQ ID NO: 704411 - RNA, 19 nt, Artificial Sequence
  Description of Artificial Sequence: Synthetic oligonucleotide
agcguccuguccagauccu

SEQ ID NO: 704412 - RNA, 19 nt, Artificial Sequence
  Description of Artificial Sequence: Synthetic oligonucleotide
cuucgagggugagaaaguu

SEQ ID NO: 704413 - RNA, 19 nt, Artificial Sequence
  Description of Artificial Sequence: Synthetic oligonucleotide
cccacgcacucagauuccc

SEQ ID NO: 704414 - RNA, 19 nt, Artificial Sequence
  Description of Artificial Sequence: Synthetic oligonucleotide
cccuucccgaacagagcug

SEQ ID NO: 704415 - RNA, 19 nt, Artificial Sequence
  Description of Artificial Sequence: Synthetic oligonucleotide
ccccacgcacucagauucc

SEQ ID NO: 704416 - RNA, 19 nt, Artificial Sequence
  Description of Artificial Sequence: Synthetic oligonucleotide
caccccguguuagcagcuc

SEQ ID NO: 704417 - RNA, 19 nt, Artificial Sequence
  Description of Artificial Sequence: Synthetic oligonucleotide
gggucagccucccagcauu

SEQ ID NO: 704418 - RNA, 19 nt, Artificial Sequence
  Description of Artificial Sequence: Synthetic oligonucleotide
gagguucggaccacauauu

SEQ ID NO: 704419 - RNA, 19 nt, Artificial Sequence
  Description of Artificial Sequence: Synthetic oligonucleotide
cggaauaauagugccaggu

SEQ ID NO: 704420 - RNA, 19 nt, Artificial Sequence
  Description of Artificial Sequence: Synthetic oligonucleotide
cuccgaucugcagaugaau

SEQ ID NO: 704421 - RNA, 19 nt, Artificial Sequence
  Description of Artificial Sequence: Synthetic oligonucleotide
cccgugggccaaagucagg

SEQ ID NO: 704422 - RNA, 19 nt, Artificial Sequence
  Description of Artificial Sequence: Synthetic oligonucleotide
cccucguugcccaccccuc

SEQ ID NO: 704423 - RNA, 19 nt, Artificial Sequence
  Description of Artificial Sequence: Synthetic oligonucleotide
ccgucuccgggaguugaag

SEQ ID NO: 704424 - RNA, 19 nt, Artificial Sequence
  Description of Artificial Sequence: Synthetic oligonucleotide
ccuucgagggugagaaagu

SEQ ID NO: 704425 - RNA, 19 nt, Artificial Sequence
  Description of Artificial Sequence: Synthetic oligonucleotide
ggguuccucugaggggagc

SEQ ID NO: 704426 - RNA, 19 nt, Artificial Sequence
  Description of Artificial Sequence: Synthetic oligonucleotide
ccccucgagguucggacca

SEQ ID NO: 704427 - RNA, 19 nt, Artificial Sequence
  Description of Artificial Sequence: Synthetic oligonucleotide
cgaauagacucuguccgaa

SEQ ID NO: 704428 - RNA, 19 nt, Artificial Sequence
  Description of Artificial Sequence: Synthetic oligonucleotide
gggguuccucugaggggag

SEQ ID NO: 704429 - RNA, 19 nt, Artificial Sequence
  Description of Artificial Sequence: Synthetic oligonucleotide
ggggagcggaugaaaugaa

SEQ ID NO: 704430 - RNA, 19 nt, Artificial Sequence
  Description of Artificial Sequence: Synthetic oligonucleotide
ccgggaguugaagacuaga

SEQ ID NO: 704431 - RNA, 19 nt, Artificial Sequence
  Description of Artificial Sequence: Synthetic oligonucleotide
caccuccgaucugcagaug

SEQ ID NO: 704432 - RNA, 19 nt, Artificial Sequence
  Description of Artificial Sequence: Synthetic oligonucleotide
gccccucccguaggaaagc

SEQ ID NO: 704433 - RNA, 19 nt, Artificial Sequence
  Description of Artificial Sequence: Synthetic oligonucleotide
cuaccugcucuaccuccau

SEQ ID NO: 704434 - RNA, 19 nt, Artificial Sequence
  Description of Artificial Sequence: Synthetic oligonucleotide
ccacgcaugagcagccccu

SEQ ID NO: 704435 - RNA, 19 nt, Artificial Sequence
  Description of Artificial Sequence: Synthetic oligonucleotide
ggcccugacagaaccacuu

SEQ ID NO: 704436 - RNA, 19 nt, Artificial Sequence
  Description of Artificial Sequence: Synthetic oligonucleotide
ccccggagcucguguuggc

SEQ ID NO: 704437 - RNA, 19 nt, Artificial Sequence
  Description of Artificial Sequence: Synthetic oligonucleotide
gugaugcgacucagugacu

SEQ ID NO: 704438 - RNA, 19 nt, Artificial Sequence
  Description of Artificial Sequence: Synthetic oligonucleotide
cccguguuagcagcuccca

SEQ ID NO: 704439 - RNA, 19 nt, Artificial Sequence
  Description of Artificial Sequence: Synthetic oligonucleotide
gcaggcgggcauggcgaug

SEQ ID NO: 704440 - RNA, 19 nt, Artificial Sequence
  Description of Artificial Sequence: Synthetic oligonucleotide
cacccgaggaaggcccucu

SEQ ID NO: 704441 - RNA, 19 nt, Artificial Sequence
  Description of Artificial Sequence: Synthetic oligonucleotide
gcauggcgaugcugucgga

SEQ ID NO: 704442 - RNA, 19 nt, Artificial Sequence
  Description of Artificial Sequence: Synthetic oligonucleotide
cggagcucguguuggcaga

SEQ ID NO: 704443 - RNA, 19 nt, Artificial Sequence
  Description of Artificial Sequence: Synthetic oligonucleotide
cggacacuauaguauuccu

SEQ ID NO: 704444 - RNA, 19 nt, Artificial Sequence
  Description of Artificial Sequence: Synthetic oligonucleotide
gugggucgcgcugcugggu

SEQ ID NO: 704445 - RNA, 19 nt, Artificial Sequence
  Description of Artificial Sequence: Synthetic oligonucleotide
ccacagcgccaagccaaac

SEQ ID NO: 704446 - RNA, 19 nt, Artificial Sequence
  Description of Artificial Sequence: Synthetic oligonucleotide
ggcgaugcugucggacacu

SEQ ID NO: 704447 - RNA, 19 nt, Artificial Sequence
  Description of Artificial Sequence: Synthetic oligonucleotide
ccaucccgacuaucugaaa

SEQ ID NO: 704448 - RNA, 19 nt, Artificial Sequence
  Description of Artificial Sequence: Synthetic oligonucleotide
cccucgagguucggaccac

SEQ ID NO: 704449 - RNA, 19 nt, Artificial Sequence
  Description of Artificial Sequence: Synthetic oligonucleotide
ccacgcacucagauucccu

SEQ ID NO: 704450 - RNA, 19 nt, Artificial Sequence
  Description of Artificial Sequence: Synthetic oligonucleotide
gcacucagauucccucguu

SEQ ID NO: 704451 - RNA, 19 nt, Artificial Sequence
  Description of Artificial Sequence: Synthetic oligonucleotide
cguggcucagagguccgga

SEQ ID NO: 704452 - RNA, 19 nt, Artificial Sequence
  Description of Artificial Sequence: Synthetic oligonucleotide
cccagcccgugggccaaag

SEQ ID NO: 704453 - RNA, 19 nt, Artificial Sequence
  Description of Artificial Sequence: Synthetic oligonucleotide
ccggaagccuagcugcuuu

SEQ ID NO: 704454 - RNA, 19 nt, Artificial Sequence
  Description of Artificial Sequence: Synthetic oligonucleotide
gcccugccuggcccugaca

SEQ ID NO: 704455 - RNA, 19 nt, Artificial Sequence
  Description of Artificial Sequence: Synthetic oligonucleotide
caacgccaaaguggccuuu

SEQ ID NO: 704456 - RNA, 19 nt, Artificial Sequence
  Description of Artificial Sequence: Synthetic oligonucleotide
cccaccccucgagguucgg

SEQ ID NO: 704457 - RNA, 19 nt, Artificial Sequence
  Description of Artificial Sequence: Synthetic oligonucleotide
gcaccccguguuagcagcu

SEQ ID NO: 704458 - RNA, 19 nt, Artificial Sequence
  Description of Artificial Sequence: Synthetic oligonucleotide
gcaggucuccguggcgcau

SEQ ID NO: 704459 - RNA, 19 nt, Artificial Sequence
  Description of Artificial Sequence: Synthetic oligonucleotide
cccucccguaggaaagcuu

SEQ ID NO: 704460 - RNA, 19 nt, Artificial Sequence
  Description of Artificial Sequence: Synthetic oligonucleotide
ggucuccguggcgcauaua

SEQ ID NO: 704461 - RNA, 19 nt, Artificial Sequence
  Description of Artificial Sequence: Synthetic oligonucleotide
ccacucguucauggggaau

SEQ ID NO: 704462 - RNA, 19 nt, Artificial Sequence
  Description of Artificial Sequence: Synthetic oligonucleotide
agauuauucaauuauaggg

SEQ ID NO: 704463 - RNA, 19 nt, Artificial Sequence
  Description of Artificial Sequence: Synthetic oligonucleotide
aaacagacaaguuccagag

SEQ ID NO: 704464 - RNA, 19 nt, Artificial Sequence
  Description of Artificial Sequence: Synthetic oligonucleotide
uguguagcaaccaagagaa

SEQ ID NO: 704465 - RNA, 19 nt, Artificial Sequence
  Description of Artificial Sequence: Synthetic oligonucleotide
aaauugagagccugguggc

SEQ ID NO: 704466 - RNA, 19 nt, Artificial Sequence
  Description of Artificial Sequence: Synthetic oligonucleotide
aaaagggagacauauggcu

SEQ ID NO: 704467 - RNA, 19 nt, Artificial Sequence
  Description of Artificial Sequence: Synthetic oligonucleotide
agggacuugacaaagaacc

SEQ ID NO: 704468 - RNA, 19 nt, Artificial Sequence
  Description of Artificial Sequence: Synthetic oligonucleotide
aggugaaucaucuccaucg

SEQ ID NO: 704469 - RNA, 19 nt, Artificial Sequence
  Description of Artificial Sequence: Synthetic oligonucleotide
ucagaccugagcuugaggg

SEQ ID NO: 704470 - RNA, 19 nt, Artificial Sequence
  Description of Artificial Sequence: Synthetic oligonucleotide
uauucucaggcccagauga

SEQ ID NO: 704471 - RNA, 19 nt, Artificial Sequence
  Description of Artificial Sequence: Synthetic oligonucleotide
aucuacuauccacugagcc

SEQ ID NO: 704472 - RNA, 19 nt, Artificial Sequence
  Description of Artificial Sequence: Synthetic oligonucleotide
ugaaggaagguccagauua

SEQ ID NO: 704473 - RNA, 19 nt, Artificial Sequence
  Description of Artificial Sequence: Synthetic oligonucleotide
auaaacuucugauaggagu

SEQ ID NO: 704474 - RNA, 19 nt, Artificial Sequence
  Description of Artificial Sequence: Synthetic oligonucleotide
acugcuuagaagcagugag

SEQ ID NO: 704475 - RNA, 19 nt, Artificial Sequence
  Description of Artificial Sequence: Synthetic oligonucleotide
ugucacuccacucaacucc

SEQ ID NO: 704476 - RNA, 19 nt, Artificial Sequence
  Description of Artificial Sequence: Synthetic oligonucleotide
guaucuacuauccacugag

SEQ ID NO: 704477 - RNA, 19 nt, Artificial Sequence
  Description of Artificial Sequence: Synthetic oligonucleotide
agacaaguuccagagaugc

SEQ ID NO: 704478 - RNA, 19 nt, Artificial Sequence
  Description of Artificial Sequence: Synthetic oligonucleotide
gagaaaccugaacugagcg

SEQ ID NO: 704479 - RNA, 19 nt, Artificial Sequence
  Description of Artificial Sequence: Synthetic oligonucleotide
uauuauaggugggaggacg

SEQ ID NO: 704480 - RNA, 19 nt, Artificial Sequence
  Description of Artificial Sequence: Synthetic oligonucleotide
ugacauauugcaucacacg

SEQ ID NO: 704481 - RNA, 19 nt, Artificial Sequence
  Description of Artificial Sequence: Synthetic oligonucleotide
gggaauaaacuucugauag

SEQ ID NO: 704482 - RNA, 19 nt, Artificial Sequence
  Description of Artificial Sequence: Synthetic oligonucleotide
ugaaucaucuccaucgccu

SEQ ID NO: 704483 - RNA, 19 nt, Artificial Sequence
  Description of Artificial Sequence: Synthetic oligonucleotide
gauuauucaauuauaggga

SEQ ID NO: 704484 - RNA, 19 nt, Artificial Sequence
  Description of Artificial Sequence: Synthetic oligonucleotide
ucuacuauccacugagccc

SEQ ID NO: 704485 - RNA, 19 nt, Artificial Sequence
  Description of Artificial Sequence: Synthetic oligonucleotide
caauuauagggauuauggg

SEQ ID NO: 704486 - RNA, 19 nt, Artificial Sequence
  Description of Artificial Sequence: Synthetic oligonucleotide
uuaaggguauucuuugagc

SEQ ID NO: 704487 - RNA, 19 nt, Artificial Sequence
  Description of Artificial Sequence: Synthetic oligonucleotide
uguuuugcuggcaagggac

SEQ ID NO: 704488 - RNA, 19 nt, Artificial Sequence
  Description of Artificial Sequence: Synthetic oligonucleotide
uaaggguauucuuugagcu

SEQ ID NO: 704489 - RNA, 19 nt, Artificial Sequence
  Description of Artificial Sequence: Synthetic oligonucleotide
agugagacugccaaucucc

SEQ ID NO: 704490 - RNA, 19 nt, Artificial Sequence
  Description of Artificial Sequence: Synthetic oligonucleotide
gacauauugcaucacacga

SEQ ID NO: 704491 - RNA, 19 nt, Artificial Sequence
  Description of Artificial Sequence: Synthetic oligonucleotide
uccaacauggccccaaucu

SEQ ID NO: 704492 - RNA, 19 nt, Artificial Sequence
  Description of Artificial Sequence: Synthetic oligonucleotide
uauugcaucacacgacuca

SEQ ID NO: 704493 - RNA, 19 nt, Artificial Sequence
  Description of Artificial Sequence: Synthetic oligonucleotide
uguagcaaccaagagaaga

SEQ ID NO: 704494 - RNA, 19 nt, Artificial Sequence
  Description of Artificial Sequence: Synthetic oligonucleotide
aaugaccuggcucuuagaa

SEQ ID NO: 704495 - RNA, 19 nt, Artificial Sequence
  Description of Artificial Sequence: Synthetic oligonucleotide
uucaacaaggcccacuuuc

SEQ ID NO: 704496 - RNA, 19 nt, Artificial Sequence
  Description of Artificial Sequence: Synthetic oligonucleotide
uauucuuugagcuggcauc

SEQ ID NO: 704497 - RNA, 19 nt, Artificial Sequence
  Description of Artificial Sequence: Synthetic oligonucleotide
uacuguaucuacuauccac

SEQ ID NO: 704498 - RNA, 19 nt, Artificial Sequence
  Description of Artificial Sequence: Synthetic oligonucleotide
auuauagggauuaugggca

SEQ ID NO: 704499 - RNA, 19 nt, Artificial Sequence
  Description of Artificial Sequence: Synthetic oligonucleotide
uugacauauugcaucacac

SEQ ID NO: 704500 - RNA, 19 nt, Artificial Sequence
  Description of Artificial Sequence: Synthetic oligonucleotide
cacucaacuccaucgaugg

SEQ ID NO: 704501 - RNA, 19 nt, Artificial Sequence
  Description of Artificial Sequence: Synthetic oligonucleotide
agcuguagcaucucggcuc

SEQ ID NO: 704502 - RNA, 19 nt, Artificial Sequence
  Description of Artificial Sequence: Synthetic oligonucleotide
uugccauggugccagaaag

SEQ ID NO: 704503 - RNA, 19 nt, Artificial Sequence
  Description of Artificial Sequence: Synthetic oligonucleotide
auaggagucuucaucaggg

SEQ ID NO: 704504 - RNA, 19 nt, Artificial Sequence
  Description of Artificial Sequence: Synthetic oligonucleotide
aacugagcggaagacacuc

SEQ ID NO: 704505 - RNA, 19 nt, Artificial Sequence
  Description of Artificial Sequence: Synthetic oligonucleotide
aggggaaugaugaggaagc

SEQ ID NO: 704506 - RNA, 19 nt, Artificial Sequence
  Description of Artificial Sequence: Synthetic oligonucleotide
agaaaccugaacugagcgg

SEQ ID NO: 704507 - RNA, 19 nt, Artificial Sequence
  Description of Artificial Sequence: Synthetic oligonucleotide
cuuaaggguauucuuugag

SEQ ID NO: 704508 - RNA, 19 nt, Artificial Sequence
  Description of Artificial Sequence: Synthetic oligonucleotide
agcuauuauaggugggagg

SEQ ID NO: 704509 - RNA, 19 nt, Artificial Sequence
  Description of Artificial Sequence: Synthetic oligonucleotide
uuugggcuccccacaaugg

SEQ ID NO: 704510 - RNA, 19 nt, Artificial Sequence
  Description of Artificial Sequence: Synthetic oligonucleotide
aaggugcuacuguaucuac

SEQ ID NO: 704511 - RNA, 19 nt, Artificial Sequence
  Description of Artificial Sequence: Synthetic oligonucleotide
uucaauuauagggauuaug

SEQ ID NO: 704512 - RNA, 19 nt, Artificial Sequence
  Description of Artificial Sequence: Synthetic oligonucleotide
cuuagaauccaccuccuuc

SEQ ID NO: 704513 - RNA, 19 nt, Artificial Sequence
  Description of Artificial Sequence: Synthetic oligonucleotide
cacacgacucaccacaucc

SEQ ID NO: 704514 - RNA, 19 nt, Artificial Sequence
  Description of Artificial Sequence: Synthetic oligonucleotide
gaagagucccaccggaaag

SEQ ID NO: 704515 - RNA, 19 nt, Artificial Sequence
  Description of Artificial Sequence: Synthetic oligonucleotide
aauugagagccugguggcc

SEQ ID NO: 704516 - RNA, 19 nt, Artificial Sequence
  Description of Artificial Sequence: Synthetic oligonucleotide
aggguauucuuugagcugg

SEQ ID NO: 704517 - RNA, 19 nt, Artificial Sequence
  Description of Artificial Sequence: Synthetic oligonucleotide
gaaccuaggggaaugauga

SEQ ID NO: 704518 - RNA, 19 nt, Artificial Sequence
  Description of Artificial Sequence: Synthetic oligonucleotide
uucucaaccucuccugaag

SEQ ID NO: 704519 - RNA, 19 nt, Artificial Sequence
  Description of Artificial Sequence: Synthetic oligonucleotide
uuuaagaaaucaccaguuu

SEQ ID NO: 704520 - RNA, 19 nt, Artificial Sequence
  Description of Artificial Sequence: Synthetic oligonucleotide
auaugggcuauuugggcuc

SEQ ID NO: 704521 - RNA, 19 nt, Artificial Sequence
  Description of Artificial Sequence: Synthetic oligonucleotide
aauaaacuucugauaggag

SEQ ID NO: 704522 - RNA, 19 nt, Artificial Sequence
  Description of Artificial Sequence: Synthetic oligonucleotide
gaaucaaggaaggugcuac

SEQ ID NO: 704523 - RNA, 19 nt, Artificial Sequence
  Description of Artificial Sequence: Synthetic oligonucleotide
ucaacaaggcccacuuuca

SEQ ID NO: 704524 - RNA, 19 nt, Artificial Sequence
  Description of Artificial Sequence: Synthetic oligonucleotide
uguaucuacuauccacuga

SEQ ID NO: 704525 - RNA, 19 nt, Artificial Sequence
  Description of Artificial Sequence: Synthetic oligonucleotide
gcggaagacacucuuaagg

SEQ ID NO: 704526 - RNA, 19 nt, Artificial Sequence
  Description of Artificial Sequence: Synthetic oligonucleotide
guagcaaccaagagaagag

SEQ ID NO: 704527 - RNA, 19 nt, Artificial Sequence
  Description of Artificial Sequence: Synthetic oligonucleotide
aggaaggugcuacuguauc

SEQ ID NO: 704528 - RNA, 19 nt, Artificial Sequence
  Description of Artificial Sequence: Synthetic oligonucleotide
aaauauguuccaagugcag

SEQ ID NO: 704529 - RNA, 19 nt, Artificial Sequence
  Description of Artificial Sequence: Synthetic oligonucleotide
gaagauagugggcacuuuc

SEQ ID NO: 704530 - RNA, 19 nt, Artificial Sequence
  Description of Artificial Sequence: Synthetic oligonucleotide
auugcaucacacgacucac

SEQ ID NO: 704531 - RNA, 19 nt, Artificial Sequence
  Description of Artificial Sequence: Synthetic oligonucleotide
aagggacuugacaaagaac

SEQ ID NO: 704532 - RNA, 19 nt, Artificial Sequence
  Description of Artificial Sequence: Synthetic oligonucleotide
uccagauuauucaauuaua

SEQ ID NO: 704533 - RNA, 19 nt, Artificial Sequence
  Description of Artificial Sequence: Synthetic oligonucleotide
agaggaagugggaagacag

SEQ ID NO: 704534 - RNA, 19 nt, Artificial Sequence
  Description of Artificial Sequence: Synthetic oligonucleotide
agagucacagauaaugugu

SEQ ID NO: 704535 - RNA, 19 nt, Artificial Sequence
  Description of Artificial Sequence: Synthetic oligonucleotide
aacaccaauaaagggaaua

SEQ ID NO: 704536 - RNA, 19 nt, Artificial Sequence
  Description of Artificial Sequence: Synthetic oligonucleotide
uggagggugagucuucaac

SEQ ID NO: 704537 - RNA, 19 nt, Artificial Sequence
  Description of Artificial Sequence: Synthetic oligonucleotide
aggacuugaagagucuggg

SEQ ID NO: 704538 - RNA, 19 nt, Artificial Sequence
  Description of Artificial Sequence: Synthetic oligonucleotide
guuacccugccacagagga

SEQ ID NO: 704539 - RNA, 19 nt, Artificial Sequence
  Description of Artificial Sequence: Synthetic oligonucleotide
accggaaagugcuugacau

SEQ ID NO: 704540 - RNA, 19 nt, Artificial Sequence
  Description of Artificial Sequence: Synthetic oligonucleotide
cucaacuccaucgauggac

SEQ ID NO: 704541 - RNA, 19 nt, Artificial Sequence
  Description of Artificial Sequence: Synthetic oligonucleotide
ugauaggagucuucaucag

SEQ ID NO: 704542 - RNA, 19 nt, Artificial Sequence
  Description of Artificial Sequence: Synthetic oligonucleotide
ugggcuccccacaauggcg

SEQ ID NO: 704543 - RNA, 19 nt, Artificial Sequence
  Description of Artificial Sequence: Synthetic oligonucleotide
ugagguaggucugggaccc

SEQ ID NO: 704544 - RNA, 19 nt, Artificial Sequence
  Description of Artificial Sequence: Synthetic oligonucleotide
ucuuaaggguauucuuuga

SEQ ID NO: 704545 - RNA, 19 nt, Artificial Sequence
  Description of Artificial Sequence: Synthetic oligonucleotide
auuauaggugggaggacgg

SEQ ID NO: 704546 - RNA, 19 nt, Artificial Sequence
  Description of Artificial Sequence: Synthetic oligonucleotide
ugcuacuguaucuacuauc

SEQ ID NO: 704547 - RNA, 19 nt, Artificial Sequence
  Description of Artificial Sequence: Synthetic oligonucleotide
agaaccggaggauggagcu

SEQ ID NO: 704548 - RNA, 19 nt, Artificial Sequence
  Description of Artificial Sequence: Synthetic oligonucleotide
uuauucaauuauagggauu

SEQ ID NO: 704549 - RNA, 19 nt, Artificial Sequence
  Description of Artificial Sequence: Synthetic oligonucleotide
uguuacccugccacagagg

SEQ ID NO: 704550 - RNA, 19 nt, Artificial Sequence
  Description of Artificial Sequence: Synthetic oligonucleotide
aguuucgugccacacugcu

SEQ ID NO: 704551 - RNA, 19 nt, Artificial Sequence
  Description of Artificial Sequence: Synthetic oligonucleotide
gacuugaagagucuggggu

SEQ ID NO: 704552 - RNA, 19 nt, Artificial Sequence
  Description of Artificial Sequence: Synthetic oligonucleotide
aagugcaguuucgugccac

SEQ ID NO: 704553 - RNA, 19 nt, Artificial Sequence
  Description of Artificial Sequence: Synthetic oligonucleotide
uaucuacuauccacugagc

SEQ ID NO: 704554 - RNA, 19 nt, Artificial Sequence
  Description of Artificial Sequence: Synthetic oligonucleotide
uccuucgauccccagggug

SEQ ID NO: 704555 - RNA, 19 nt, Artificial Sequence
  Description of Artificial Sequence: Synthetic oligonucleotide
cuucccaccccacuuauuc

SEQ ID NO: 704556 - RNA, 19 nt, Artificial Sequence
  Description of Artificial Sequence: Synthetic oligonucleotide
gugagugaggugaaggaag

SEQ ID NO: 704557 - RNA, 19 nt, Artificial Sequence
  Description of Artificial Sequence: Synthetic oligonucleotide
acuguaucuacuauccacu

SEQ ID NO: 704558 - RNA, 19 nt, Artificial Sequence
  Description of Artificial Sequence: Synthetic oligonucleotide
augucacuccacucaacuc

SEQ ID NO: 704559 - RNA, 19 nt, Artificial Sequence
  Description of Artificial Sequence: Synthetic oligonucleotide
cucugagcgacugaacagg

SEQ ID NO: 704560 - RNA, 19 nt, Artificial Sequence
  Description of Artificial Sequence: Synthetic oligonucleotide
aguccgguguuuugcuggc

SEQ ID NO: 704561 - RNA, 19 nt, Artificial Sequence
  Description of Artificial Sequence: Synthetic oligonucleotide
aagauagugggcacuuucu

SEQ ID NO: 704562 - RNA, 19 nt, Artificial Sequence
  Description of Artificial Sequence: Synthetic oligonucleotide
caucgauggacacucucag

SEQ ID NO: 704563 - RNA, 19 nt, Artificial Sequence
  Description of Artificial Sequence: Synthetic oligonucleotide
aacagacaaguuccagaga

SEQ ID NO: 704564 - RNA, 19 nt, Artificial Sequence
  Description of Artificial Sequence: Synthetic oligonucleotide
cuugacaugagugggccac

SEQ ID NO: 704565 - RNA, 19 nt, Artificial Sequence
  Description of Artificial Sequence: Synthetic oligonucleotide
gggaacuuaugccugcagg

SEQ ID NO: 704566 - RNA, 19 nt, Artificial Sequence
  Description of Artificial Sequence: Synthetic oligonucleotide
uucuguuacccugccacag

SEQ ID NO: 704567 - RNA, 19 nt, Artificial Sequence
  Description of Artificial Sequence: Synthetic oligonucleotide
acaauggcgagggcgcugc

SEQ ID NO: 704568 - RNA, 19 nt, Artificial Sequence
  Description of Artificial Sequence: Synthetic oligonucleotide
ccccauaugggcuauuugg

SEQ ID NO: 704569 - RNA, 19 nt, Artificial Sequence
  Description of Artificial Sequence: Synthetic oligonucleotide
agcucagugagacugccaa

SEQ ID NO: 704570 - RNA, 19 nt, Artificial Sequence
  Description of Artificial Sequence: Synthetic oligonucleotide
agggaauaaacuucugaua

SEQ ID NO: 704571 - RNA, 19 nt, Artificial Sequence
  Description of Artificial Sequence: Synthetic oligonucleotide
gucauugccauggugccag

SEQ ID NO: 704572 - RNA, 19 nt, Artificial Sequence
  Description of Artificial Sequence: Synthetic oligonucleotide
uuauagggauuaugggcac

SEQ ID NO: 704573 - RNA, 19 nt, Artificial Sequence
  Description of Artificial Sequence: Synthetic oligonucleotide
aaccuaggggaaugaugag

SEQ ID NO: 704574 - RNA, 19 nt, Artificial Sequence
  Description of Artificial Sequence: Synthetic oligonucleotide
uugggcuccccacaauggc

SEQ ID NO: 704575 - RNA, 19 nt, Artificial Sequence
  Description of Artificial Sequence: Synthetic oligonucleotide
caugagugggccacugggc

SEQ ID NO: 704576 - RNA, 19 nt, Artificial Sequence
  Description of Artificial Sequence: Synthetic oligonucleotide
uauccacugagcccaagua

SEQ ID NO: 704577 - RNA, 19 nt, Artificial Sequence
  Description of Artificial Sequence: Synthetic oligonucleotide
ucuguuacccugccacaga

SEQ ID NO: 704578 - RNA, 19 nt, Artificial Sequence
  Description of Artificial Sequence: Synthetic oligonucleotide
agagcuauuauagguggga

SEQ ID NO: 704579 - RNA, 19 nt, Artificial Sequence
  Description of Artificial Sequence: Synthetic oligonucleotide
gaugucacuccacucaacu

SEQ ID NO: 704580 - RNA, 19 nt, Artificial Sequence
  Description of Artificial Sequence: Synthetic oligonucleotide
agaacaguagggagguggg

SEQ ID NO: 704581 - RNA, 19 nt, Artificial Sequence
  Description of Artificial Sequence: Synthetic oligonucleotide
ugcuugacaugagugggcc

SEQ ID NO: 704582 - RNA, 19 nt, Artificial Sequence
  Description of Artificial Sequence: Synthetic oligonucleotide
gacuugacaaagaaccgga

SEQ ID NO: 704583 - RNA, 19 nt, Artificial Sequence
  Description of Artificial Sequence: Synthetic oligonucleotide
gcuccauugacauauugca

SEQ ID NO: 704584 - RNA, 19 nt, Artificial Sequence
  Description of Artificial Sequence: Synthetic oligonucleotide
gaaggacuugaagagucug

SEQ ID NO: 704585 - RNA, 19 nt, Artificial Sequence
  Description of Artificial Sequence: Synthetic oligonucleotide
cuacuauccacugagccca

SEQ ID NO: 704586 - RNA, 19 nt, Artificial Sequence
  Description of Artificial Sequence: Synthetic oligonucleotide
gaagacacucuuaagggua

SEQ ID NO: 704587 - RNA, 19 nt, Artificial Sequence
  Description of Artificial Sequence: Synthetic oligonucleotide
gagcuauuauaggugggag

SEQ ID NO: 704588 - RNA, 19 nt, Artificial Sequence
  Description of Artificial Sequence: Synthetic oligonucleotide
gacaugagugggccacugg

SEQ ID NO: 704589 - RNA, 19 nt, Artificial Sequence
  Description of Artificial Sequence: Synthetic oligonucleotide
uaccucaugaagccacaga

SEQ ID NO: 704590 - RNA, 19 nt, Artificial Sequence
  Description of Artificial Sequence: Synthetic oligonucleotide
gggugagucuucaacaagg

SEQ ID NO: 704591 - RNA, 19 nt, Artificial Sequence
  Description of Artificial Sequence: Synthetic oligonucleotide
aaccggaggauggagcuca

SEQ ID NO: 704592 - RNA, 19 nt, Artificial Sequence
  Description of Artificial Sequence: Synthetic oligonucleotide
cugggccuagaacaguagg

SEQ ID NO: 704593 - RNA, 19 nt, Artificial Sequence
  Description of Artificial Sequence: Synthetic oligonucleotide
uggaaauugagagccuggu

SEQ ID NO: 704594 - RNA, 19 nt, Artificial Sequence
  Description of Artificial Sequence: Synthetic oligonucleotide
ucugagcgacugaacaggu

SEQ ID NO: 704595 - RNA, 19 nt, Artificial Sequence
  Description of Artificial Sequence: Synthetic oligonucleotide
acauauggcuggguaagag

SEQ ID NO: 704596 - RNA, 19 nt, Artificial Sequence
  Description of Artificial Sequence: Synthetic oligonucleotide
caacauggccccaaucuuc

SEQ ID NO: 704597 - RNA, 19 nt, Artificial Sequence
  Description of Artificial Sequence: Synthetic oligonucleotide
ggacuugacaaagaaccgg

SEQ ID NO: 704598 - RNA, 19 nt, Artificial Sequence
  Description of Artificial Sequence: Synthetic oligonucleotide
aagagucccaccggaaagu

SEQ ID NO: 704599 - RNA, 19 nt, Artificial Sequence
  Description of Artificial Sequence: Synthetic oligonucleotide
gugacaacagucauugcca

SEQ ID NO: 704600 - RNA, 19 nt, Artificial Sequence
  Description of Artificial Sequence: Synthetic oligonucleotide
agggugagucuucaacaag

SEQ ID NO: 704601 - RNA, 19 nt, Artificial Sequence
  Description of Artificial Sequence: Synthetic oligonucleotide
cagagcuauuauagguggg

SEQ ID NO: 704602 - RNA, 19 nt, Artificial Sequence
  Description of Artificial Sequence: Synthetic oligonucleotide
cuguaucuacuauccacug

SEQ ID NO: 704603 - RNA, 19 nt, Artificial Sequence
  Description of Artificial Sequence: Synthetic oligonucleotide
gcaguuucgugccacacug

SEQ ID NO: 704604 - RNA, 19 nt, Artificial Sequence
  Description of Artificial Sequence: Synthetic oligonucleotide
gcuauuauaggugggagga

SEQ ID NO: 704605 - RNA, 19 nt, Artificial Sequence
  Description of Artificial Sequence: Synthetic oligonucleotide
ucuccaucgccugcagugg

SEQ ID NO: 704606 - RNA, 19 nt, Artificial Sequence
  Description of Artificial Sequence: Synthetic oligonucleotide
caggacugggcauguagag

SEQ ID NO: 704607 - RNA, 19 nt, Artificial Sequence
  Description of Artificial Sequence: Synthetic oligonucleotide
aggcaggguguguagcaac

SEQ ID NO: 704608 - RNA, 19 nt, Artificial Sequence
  Description of Artificial Sequence: Synthetic oligonucleotide
gaggcaaagggaggaaggc

SEQ ID NO: 704609 - RNA, 19 nt, Artificial Sequence
  Description of Artificial Sequence: Synthetic oligonucleotide
gacucaccacauccagugg

SEQ ID NO: 704610 - RNA, 19 nt, Artificial Sequence
  Description of Artificial Sequence: Synthetic oligonucleotide
gauguggaggggcacagua

SEQ ID NO: 704611 - RNA, 19 nt, Artificial Sequence
  Description of Artificial Sequence: Synthetic oligonucleotide
guagcaucucggcucagac

SEQ ID NO: 704612 - RNA, 19 nt, Artificial Sequence
  Description of Artificial Sequence: Synthetic oligonucleotide
agaccugagcuugagggug

SEQ ID NO: 704613 - RNA, 19 nt, Artificial Sequence
  Description of Artificial Sequence: Synthetic oligonucleotide
acaccaauaaagggaauaa

SEQ ID NO: 704614 - RNA, 19 nt, Artificial Sequence
  Description of Artificial Sequence: Synthetic oligonucleotide
uccaucgauggacacucuc

SEQ ID NO: 704615 - RNA, 19 nt, Artificial Sequence
  Description of Artificial Sequence: Synthetic oligonucleotide
auagggauuaugggcacca

SEQ ID NO: 704616 - RNA, 19 nt, Artificial Sequence
  Description of Artificial Sequence: Synthetic oligonucleotide
cccacuuauucucaggccc

SEQ ID NO: 704617 - RNA, 19 nt, Artificial Sequence
  Description of Artificial Sequence: Synthetic oligonucleotide
augccagagggcauggagg

SEQ ID NO: 704618 - RNA, 19 nt, Artificial Sequence
  Description of Artificial Sequence: Synthetic oligonucleotide
cuccccacaauggcgaggg

SEQ ID NO: 704619 - RNA, 19 nt, Artificial Sequence
  Description of Artificial Sequence: Synthetic oligonucleotide
cagaguagggaaggggagg

SEQ ID NO: 704620 - RNA, 19 nt, Artificial Sequence
  Description of Artificial Sequence: Synthetic oligonucleotide
cccauaugggcuauuuggg

SEQ ID NO: 704621 - RNA, 19 nt, Artificial Sequence
  Description of Artificial Sequence: Synthetic oligonucleotide
uccccauaugggcuauuug

SEQ ID NO: 704622 - RNA, 19 nt, Artificial Sequence
  Description of Artificial Sequence: Synthetic oligonucleotide
augagaaccuaggggaaug

SEQ ID NO: 704623 - RNA, 19 nt, Artificial Sequence
  Description of Artificial Sequence: Synthetic oligonucleotide
gaacuuaugccugcagguc

SEQ ID NO: 704624 - RNA, 19 nt, Artificial Sequence
  Description of Artificial Sequence: Synthetic oligonucleotide
ccaagugcaguuucgugcc

SEQ ID NO: 704625 - RNA, 19 nt, Artificial Sequence
  Description of Artificial Sequence: Synthetic oligonucleotide
guggguaguccagagauga

SEQ ID NO: 704626 - RNA, 19 nt, Artificial Sequence
  Description of Artificial Sequence: Synthetic oligonucleotide
uccaucgccugcaguggag

SEQ ID NO: 704627 - RNA, 19 nt, Artificial Sequence
  Description of Artificial Sequence: Synthetic oligonucleotide
uccgguguuuugcuggcaa

SEQ ID NO: 704628 - RNA, 19 nt, Artificial Sequence
  Description of Artificial Sequence: Synthetic oligonucleotide
cauauugcaucacacgacu

SEQ ID NO: 704629 - RNA, 19 nt, Artificial Sequence
  Description of Artificial Sequence: Synthetic oligonucleotide
gaagaagaccugguggaga

SEQ ID NO: 704630 - RNA, 19 nt, Artificial Sequence
  Description of Artificial Sequence: Synthetic oligonucleotide
auauugcaucacacgacuc

SEQ ID NO: 704631 - RNA, 19 nt, Artificial Sequence
  Description of Artificial Sequence: Synthetic oligonucleotide
uggguaguccagagaugag

SEQ ID NO: 704632 - RNA, 19 nt, Artificial Sequence
  Description of Artificial Sequence: Synthetic oligonucleotide
acauggccccaaucuuccc

SEQ ID NO: 704633 - RNA, 19 nt, Artificial Sequence
  Description of Artificial Sequence: Synthetic oligonucleotide
auugagagccugguggcca

SEQ ID NO: 704634 - RNA, 19 nt, Artificial Sequence
  Description of Artificial Sequence: Synthetic oligonucleotide
uggucuguugcugcuuugc

SEQ ID NO: 704635 - RNA, 19 nt, Artificial Sequence
  Description of Artificial Sequence: Synthetic oligonucleotide
aggcagaacuacccagcuc

SEQ ID NO: 704636 - RNA, 19 nt, Artificial Sequence
  Description of Artificial Sequence: Synthetic oligonucleotide
gccacagagcuauuauagg

SEQ ID NO: 704637 - RNA, 19 nt, Artificial Sequence
  Description of Artificial Sequence: Synthetic oligonucleotide
agauagugggcacuuucuu

SEQ ID NO: 704638 - RNA, 19 nt, Artificial Sequence
  Description of Artificial Sequence: Synthetic oligonucleotide
ggcagaacuacccagcucu

SEQ ID NO: 704639 - RNA, 19 nt, Artificial Sequence
  Description of Artificial Sequence: Synthetic oligonucleotide
ggacuugaagagucugggg

SEQ ID NO: 704640 - RNA, 19 nt, Artificial Sequence
  Description of Artificial Sequence: Synthetic oligonucleotide
caggcgagaaaccugaacu

SEQ ID NO: 704641 - RNA, 19 nt, Artificial Sequence
  Description of Artificial Sequence: Synthetic oligonucleotide
ugaugucacuccacucaac

SEQ ID NO: 704642 - RNA, 19 nt, Artificial Sequence
  Description of Artificial Sequence: Synthetic oligonucleotide
guaaggcugaccacaggug

SEQ ID NO: 704643 - RNA, 19 nt, Artificial Sequence
  Description of Artificial Sequence: Synthetic oligonucleotide
acaguaaggcugaccacag

SEQ ID NO: 704644 - RNA, 19 nt, Artificial Sequence
  Description of Artificial Sequence: Synthetic oligonucleotide
ggcucugguaaagugcugg

SEQ ID NO: 704645 - RNA, 19 nt, Artificial Sequence
  Description of Artificial Sequence: Synthetic oligonucleotide
ggagggugagucuucaaca

SEQ ID NO: 704646 - RNA, 19 nt, Artificial Sequence
  Description of Artificial Sequence: Synthetic oligonucleotide
ggugaaucaucuccaucgc

SEQ ID NO: 704647 - RNA, 19 nt, Artificial Sequence
  Description of Artificial Sequence: Synthetic oligonucleotide
gacaaguuccagagaugcc

SEQ ID NO: 704648 - RNA, 19 nt, Artificial Sequence
  Description of Artificial Sequence: Synthetic oligonucleotide
cucagaccugagcuugagg

SEQ ID NO: 704649 - RNA, 19 nt, Artificial Sequence
  Description of Artificial Sequence: Synthetic oligonucleotide
ccuccuaccucaugaagcc

SEQ ID NO: 704650 - RNA, 19 nt, Artificial Sequence
  Description of Artificial Sequence: Synthetic oligonucleotide
ggugcguuguggcugcucc

SEQ ID NO: 704651 - RNA, 19 nt, Artificial Sequence
  Description of Artificial Sequence: Synthetic oligonucleotide
gugagacugccaaucuccg

SEQ ID NO: 704652 - RNA, 19 nt, Artificial Sequence
  Description of Artificial Sequence: Synthetic oligonucleotide
cagguagucuugcugccac

SEQ ID NO: 704653 - RNA, 19 nt, Artificial Sequence
  Description of Artificial Sequence: Synthetic oligonucleotide
aggguguguagcaaccaag

SEQ ID NO: 704654 - RNA, 19 nt, Artificial Sequence
  Description of Artificial Sequence: Synthetic oligonucleotide
caccagaaggcagaacuac

SEQ ID NO: 704655 - RNA, 19 nt, Artificial Sequence
  Description of Artificial Sequence: Synthetic oligonucleotide
ccauaugggcuauuugggc

SEQ ID NO: 704656 - RNA, 19 nt, Artificial Sequence
  Description of Artificial Sequence: Synthetic oligonucleotide
ugagaaccuaggggaauga

SEQ ID NO: 704657 - RNA, 19 nt, Artificial Sequence
  Description of Artificial Sequence: Synthetic oligonucleotide
ucguuuccagaaagagaac

SEQ ID NO: 704658 - RNA, 19 nt, Artificial Sequence
  Description of Artificial Sequence: Synthetic oligonucleotide
caucgccugcaguggaggg

SEQ ID NO: 704659 - RNA, 19 nt, Artificial Sequence
  Description of Artificial Sequence: Synthetic oligonucleotide
ggaaacagacaaguuccag

SEQ ID NO: 704660 - RNA, 19 nt, Artificial Sequence
  Description of Artificial Sequence: Synthetic oligonucleotide
gggacuugacaaagaaccg

SEQ ID NO: 704661 - RNA, 19 nt, Artificial Sequence
  Description of Artificial Sequence: Synthetic oligonucleotide
uaugggcuauuugggcucc

SEQ ID NO: 704662 - RNA, 19 nt, Artificial Sequence
  Description of Artificial Sequence: Synthetic oligonucleotide
aaggaaggugcuacuguau

SEQ ID NO: 704663 - RNA, 19 nt, Artificial Sequence
  Description of Artificial Sequence: Synthetic oligonucleotide
agugcaguuucgugccaca

SEQ ID NO: 704664 - RNA, 19 nt, Artificial Sequence
  Description of Artificial Sequence: Synthetic oligonucleotide
cagaacuacccagcucugg

SEQ ID NO: 704665 - RNA, 19 nt, Artificial Sequence
  Description of Artificial Sequence: Synthetic oligonucleotide
uauuugggcuccccacaau

SEQ ID NO: 704666 - RNA, 19 nt, Artificial Sequence
  Description of Artificial Sequence: Synthetic oligonucleotide
ucgccugcaguggagggug

SEQ ID NO: 704667 - RNA, 19 nt, Artificial Sequence
  Description of Artificial Sequence: Synthetic oligonucleotide
uguugcugcuuugcagagc

SEQ ID NO: 704668 - RNA, 19 nt, Artificial Sequence
  Description of Artificial Sequence: Synthetic oligonucleotide
cuauuauaggugggaggac

SEQ ID NO: 704669 - RNA, 19 nt, Artificial Sequence
  Description of Artificial Sequence: Synthetic oligonucleotide
guguuuugcuggcaaggga

SEQ ID NO: 704670 - RNA, 19 nt, Artificial Sequence
  Description of Artificial Sequence: Synthetic oligonucleotide
cuggccuuucccugccugc

SEQ ID NO: 704671 - RNA, 19 nt, Artificial Sequence
  Description of Artificial Sequence: Synthetic oligonucleotide
ggguaguccagagaugagc

SEQ ID NO: 704672 - RNA, 19 nt, Artificial Sequence
  Description of Artificial Sequence: Synthetic oligonucleotide
ggaacuuaugccugcaggu

SEQ ID NO: 704673 - RNA, 19 nt, Artificial Sequence
  Description of Artificial Sequence: Synthetic oligonucleotide
caguaaggcugaccacagg

SEQ ID NO: 704674 - RNA, 19 nt, Artificial Sequence
  Description of Artificial Sequence: Synthetic oligonucleotide
caguuucgugccacacugc

SEQ ID NO: 704675 - RNA, 19 nt, Artificial Sequence
  Description of Artificial Sequence: Synthetic oligonucleotide
agagucccaccggaaagug

SEQ ID NO: 704676 - RNA, 19 nt, Artificial Sequence
  Description of Artificial Sequence: Synthetic oligonucleotide
gagugggccacugggcagc

SEQ ID NO: 704677 - RNA, 19 nt, Artificial Sequence
  Description of Artificial Sequence: Synthetic oligonucleotide
cucggcucagaccugagcu

SEQ ID NO: 704678 - RNA, 19 nt, Artificial Sequence
  Description of Artificial Sequence: Synthetic oligonucleotide
gguagucuugcugccacug

SEQ ID NO: 704679 - RNA, 19 nt, Artificial Sequence
  Description of Artificial Sequence: Synthetic oligonucleotide
uucuuugagcuggcauccc

SEQ ID NO: 704680 - RNA, 19 nt, Artificial Sequence
  Description of Artificial Sequence: Synthetic oligonucleotide
cauauggcuggguaagagu

SEQ ID NO: 704681 - RNA, 19 nt, Artificial Sequence
  Description of Artificial Sequence: Synthetic oligonucleotide
cuaccucaugaagccacag

SEQ ID NO: 704682 - RNA, 19 nt, Artificial Sequence
  Description of Artificial Sequence: Synthetic oligonucleotide
cauugacauauugcaucac

SEQ ID NO: 704683 - RNA, 19 nt, Artificial Sequence
  Description of Artificial Sequence: Synthetic oligonucleotide
uagggauuaugggcaccag

SEQ ID NO: 704684 - RNA, 19 nt, Artificial Sequence
  Description of Artificial Sequence: Synthetic oligonucleotide
acucaacuccaucgaugga

SEQ ID NO: 704685 - RNA, 19 nt, Artificial Sequence
  Description of Artificial Sequence: Synthetic oligonucleotide
caacuccaucgauggacac

SEQ ID NO: 704686 - RNA, 19 nt, Artificial Sequence
  Description of Artificial Sequence: Synthetic oligonucleotide
cugaacugagcggaagaca

SEQ ID NO: 704687 - RNA, 19 nt, Artificial Sequence
  Description of Artificial Sequence: Synthetic oligonucleotide
gcgagaaaccugaacugag

SEQ ID NO: 704688 - RNA, 19 nt, Artificial Sequence
  Description of Artificial Sequence: Synthetic oligonucleotide
cuacuguaucuacuaucca

SEQ ID NO: 704689 - RNA, 19 nt, Artificial Sequence
  Description of Artificial Sequence: Synthetic oligonucleotide
ugggcuauuugggcucccc

SEQ ID NO: 704690 - RNA, 19 nt, Artificial Sequence
  Description of Artificial Sequence: Synthetic oligonucleotide
ucccucuugucaccuucuc

SEQ ID NO: 704691 - RNA, 19 nt, Artificial Sequence
  Description of Artificial Sequence: Synthetic oligonucleotide
gacauauggcuggguaaga

SEQ ID NO: 704692 - RNA, 19 nt, Artificial Sequence
  Description of Artificial Sequence: Synthetic oligonucleotide
gagucccaccggaaagugc

SEQ ID NO: 704693 - RNA, 19 nt, Artificial Sequence
  Description of Artificial Sequence: Synthetic oligonucleotide
acacugcuuagaagcagug

SEQ ID NO: 704694 - RNA, 19 nt, Artificial Sequence
  Description of Artificial Sequence: Synthetic oligonucleotide
gcgagggcgcugcucaugg

SEQ ID NO: 704695 - RNA, 19 nt, Artificial Sequence
  Description of Artificial Sequence: Synthetic oligonucleotide
cgagaaaccugaacugagc

SEQ ID NO: 704696 - RNA, 19 nt, Artificial Sequence
  Description of Artificial Sequence: Synthetic oligonucleotide
cugcuuugcagagcagaug

SEQ ID NO: 704697 - RNA, 19 nt, Artificial Sequence
  Description of Artificial Sequence: Synthetic oligonucleotide
ugcguuguggcugcuccau

SEQ ID NO: 704698 - RNA, 19 nt, Artificial Sequence
  Description of Artificial Sequence: Synthetic oligonucleotide
agcgacugaacaggucucu

SEQ ID NO: 704699 - RNA, 19 nt, Artificial Sequence
  Description of Artificial Sequence: Synthetic oligonucleotide
ggaagacacucuuaagggu

SEQ ID NO: 704700 - RNA, 19 nt, Artificial Sequence
  Description of Artificial Sequence: Synthetic oligonucleotide
agguagucuugcugccacu

SEQ ID NO: 704701 - RNA, 19 nt, Artificial Sequence
  Description of Artificial Sequence: Synthetic oligonucleotide
agugggccacugggcagcc

SEQ ID NO: 704702 - RNA, 19 nt, Artificial Sequence
  Description of Artificial Sequence: Synthetic oligonucleotide
aggugcuacuguaucuacu

SEQ ID NO: 704703 - RNA, 19 nt, Artificial Sequence
  Description of Artificial Sequence: Synthetic oligonucleotide
gcauguagaggcaggcccc

SEQ ID NO: 704704 - RNA, 19 nt, Artificial Sequence
  Description of Artificial Sequence: Synthetic oligonucleotide
gguccagauuauucaauua

SEQ ID NO: 704705 - RNA, 19 nt, Artificial Sequence
  Description of Artificial Sequence: Synthetic oligonucleotide
agagggaaacagacaaguu

SEQ ID NO: 704706 - RNA, 19 nt, Artificial Sequence
  Description of Artificial Sequence: Synthetic oligonucleotide
caccggaaagugcuugaca

SEQ ID NO: 704707 - RNA, 19 nt, Artificial Sequence
  Description of Artificial Sequence: Synthetic oligonucleotide
gcaggcgagaaaccugaac

SEQ ID NO: 704708 - RNA, 19 nt, Artificial Sequence
  Description of Artificial Sequence: Synthetic oligonucleotide
agaagaccugguggagaug

SEQ ID NO: 704709 - RNA, 19 nt, Artificial Sequence
  Description of Artificial Sequence: Synthetic oligonucleotide
acuauccacugagcccaag

SEQ ID NO: 704710 - RNA, 19 nt, Artificial Sequence
  Description of Artificial Sequence: Synthetic oligonucleotide
ggccccaaucuucccaccc

SEQ ID NO: 704711 - RNA, 19 nt, Artificial Sequence
  Description of Artificial Sequence: Synthetic oligonucleotide
uacuauccacugagcccaa

SEQ ID NO: 704712 - RNA, 19 nt, Artificial Sequence
  Description of Artificial Sequence: Synthetic oligonucleotide
agggcgcugcucauggaug

SEQ ID NO: 704713 - RNA, 19 nt, Artificial Sequence
  Description of Artificial Sequence: Synthetic oligonucleotide
ugauguggaggggcacagu

SEQ ID NO: 704714 - RNA, 19 nt, Artificial Sequence
  Description of Artificial Sequence: Synthetic oligonucleotide
acgacucaccacauccagu

SEQ ID NO: 704715 - RNA, 19 nt, Artificial Sequence
  Description of Artificial Sequence: Synthetic oligonucleotide
uggugauguggaggggcac

SEQ ID NO: 704716 - RNA, 19 nt, Artificial Sequence
  Description of Artificial Sequence: Synthetic oligonucleotide
ccccacuuauucucaggcc

SEQ ID NO: 704717 - RNA, 19 nt, Artificial Sequence
  Description of Artificial Sequence: Synthetic oligonucleotide
ucauugccauggugccaga

SEQ ID NO: 704718 - RNA, 19 nt, Artificial Sequence
  Description of Artificial Sequence: Synthetic oligonucleotide
ucgugccacacugcuuaga

SEQ ID NO: 704719 - RNA, 19 nt, Artificial Sequence
  Description of Artificial Sequence: Synthetic oligonucleotide
aggcagaaucaaggaaggu

SEQ ID NO: 704720 - RNA, 19 nt, Artificial Sequence
  Description of Artificial Sequence: Synthetic oligonucleotide
gauggagcucagugagacu

SEQ ID NO: 704721 - RNA, 19 nt, Artificial Sequence
  Description of Artificial Sequence: Synthetic oligonucleotide
cacauccccauaugggcua

SEQ ID NO: 704722 - RNA, 19 nt, Artificial Sequence
  Description of Artificial Sequence: Synthetic oligonucleotide
cuuaugccugcaggucaac

SEQ ID NO: 704723 - RNA, 19 nt, Artificial Sequence
  Description of Artificial Sequence: Synthetic oligonucleotide
caggguguguagcaaccaa

SEQ ID NO: 704724 - RNA, 19 nt, Artificial Sequence
  Description of Artificial Sequence: Synthetic oligonucleotide
gaaccggaggauggagcuc

SEQ ID NO: 704725 - RNA, 19 nt, Artificial Sequence
  Description of Artificial Sequence: Synthetic oligonucleotide
gacaguugggcugggcagu

SEQ ID NO: 704726 - RNA, 19 nt, Artificial Sequence
  Description of Artificial Sequence: Synthetic oligonucleotide
acugagcggaagacacucu

SEQ ID NO: 704727 - RNA, 19 nt, Artificial Sequence
  Description of Artificial Sequence: Synthetic oligonucleotide
guguagcaaccaagagaag

SEQ ID NO: 704728 - RNA, 19 nt, Artificial Sequence
  Description of Artificial Sequence: Synthetic oligonucleotide
gcccacuuucacaacacca

SEQ ID NO: 704729 - RNA, 19 nt, Artificial Sequence
  Description of Artificial Sequence: Synthetic oligonucleotide
auguagaggcaggccccag

SEQ ID NO: 704730 - RNA, 19 nt, Artificial Sequence
  Description of Artificial Sequence: Synthetic oligonucleotide
ggugauguggaggggcaca

SEQ ID NO: 704731 - RNA, 19 nt, Artificial Sequence
  Description of Artificial Sequence: Synthetic oligonucleotide
ccggaaagugcuugacaug

SEQ ID NO: 704732 - RNA, 19 nt, Artificial Sequence
  Description of Artificial Sequence: Synthetic oligonucleotide
gagcuggcaucccucuugu

SEQ ID NO: 704733 - RNA, 19 nt, Artificial Sequence
  Description of Artificial Sequence: Synthetic oligonucleotide
guuuugcuggcaagggacu

SEQ ID NO: 704734 - RNA, 19 nt, Artificial Sequence
  Description of Artificial Sequence: Synthetic oligonucleotide
cacagauaauguguaugcu

SEQ ID NO: 704735 - RNA, 19 nt, Artificial Sequence
  Description of Artificial Sequence: Synthetic oligonucleotide
ggacccauccauggcugag

SEQ ID NO: 704736 - RNA, 19 nt, Artificial Sequence
  Description of Artificial Sequence: Synthetic oligonucleotide
ccagccaguaguccaccug

SEQ ID NO: 704737 - RNA, 19 nt, Artificial Sequence
  Description of Artificial Sequence: Synthetic oligonucleotide
agguaggucugggacccau

SEQ ID NO: 704738 - RNA, 19 nt, Artificial Sequence
  Description of Artificial Sequence: Synthetic oligonucleotide
gggaaacagacaaguucca

SEQ ID NO: 704739 - RNA, 19 nt, Artificial Sequence
  Description of Artificial Sequence: Synthetic oligonucleotide
ccgguguuuugcuggcaag

SEQ ID NO: 704740 - RNA, 19 nt, Artificial Sequence
  Description of Artificial Sequence: Synthetic oligonucleotide
caaccaagagaagagccuu

SEQ ID NO: 704741 - RNA, 19 nt, Artificial Sequence
  Description of Artificial Sequence: Synthetic oligonucleotide
cugccacugaagaguccca

SEQ ID NO: 704742 - RNA, 19 nt, Artificial Sequence
  Description of Artificial Sequence: Synthetic oligonucleotide
gggcauguagaggcaggcc

SEQ ID NO: 704743 - RNA, 19 nt, Artificial Sequence
  Description of Artificial Sequence: Synthetic oligonucleotide
gaacaguagggaggugggu

SEQ ID NO: 704744 - RNA, 19 nt, Artificial Sequence
  Description of Artificial Sequence: Synthetic oligonucleotide
gugcguuguggcugcucca

SEQ ID NO: 704745 - RNA, 19 nt, Artificial Sequence
  Description of Artificial Sequence: Synthetic oligonucleotide
cugccuccuaccucaugaa

SEQ ID NO: 704746 - RNA, 19 nt, Artificial Sequence
  Description of Artificial Sequence: Synthetic oligonucleotide
ccuagaacaguagggaggu

SEQ ID NO: 704747 - RNA, 19 nt, Artificial Sequence
  Description of Artificial Sequence: Synthetic oligonucleotide
gcucagaccugagcuugag

SEQ ID NO: 704748 - RNA, 19 nt, Artificial Sequence
  Description of Artificial Sequence: Synthetic oligonucleotide
aucucggcucagaccugag

SEQ ID NO: 704749 - RNA, 19 nt, Artificial Sequence
  Description of Artificial Sequence: Synthetic oligonucleotide
caggugggugaggcagugc

SEQ ID NO: 704750 - RNA, 19 nt, Artificial Sequence
  Description of Artificial Sequence: Synthetic oligonucleotide
ccaguccgguguuuugcug

SEQ ID NO: 704751 - RNA, 19 nt, Artificial Sequence
  Description of Artificial Sequence: Synthetic oligonucleotide
agacacucuuaaggguauu

SEQ ID NO: 704752 - RNA, 19 nt, Artificial Sequence
  Description of Artificial Sequence: Synthetic oligonucleotide
gcuccccacaauggcgagg

SEQ ID NO: 704753 - RNA, 19 nt, Artificial Sequence
  Description of Artificial Sequence: Synthetic oligonucleotide
ggaagugggaagacagagu

SEQ ID NO: 704754 - RNA, 19 nt, Artificial Sequence
  Description of Artificial Sequence: Synthetic oligonucleotide
gugcuacuguaucuacuau

SEQ ID NO: 704755 - RNA, 19 nt, Artificial Sequence
  Description of Artificial Sequence: Synthetic oligonucleotide
cauggucuguugcugcuuu

SEQ ID NO: 704756 - RNA, 19 nt, Artificial Sequence
  Description of Artificial Sequence: Synthetic oligonucleotide
uggugcguuguggcugcuc

SEQ ID NO: 704757 - RNA, 19 nt, Artificial Sequence
  Description of Artificial Sequence: Synthetic oligonucleotide
gcagaacuacccagcucug

SEQ ID NO: 704758 - RNA, 19 nt, Artificial Sequence
  Description of Artificial Sequence: Synthetic oligonucleotide
agccaguaguccaccugaa

SEQ ID NO: 704759 - RNA, 19 nt, Artificial Sequence
  Description of Artificial Sequence: Synthetic oligonucleotide
ccuaccucaugaagccaca

SEQ ID NO: 704760 - RNA, 19 nt, Artificial Sequence
  Description of Artificial Sequence: Synthetic oligonucleotide
guggagggugagucuucaa

SEQ ID NO: 704761 - RNA, 19 nt, Artificial Sequence
  Description of Artificial Sequence: Synthetic oligonucleotide
gguggcccagccaguaguc

SEQ ID NO: 704762 - RNA, 19 nt, Artificial Sequence
  Description of Artificial Sequence: Synthetic oligonucleotide
cucaggcccagaugacacu

SEQ ID NO: 704763 - RNA, 19 nt, Artificial Sequence
  Description of Artificial Sequence: Synthetic oligonucleotide
gguaggucugggacccauc

SEQ ID NO: 704764 - RNA, 19 nt, Artificial Sequence
  Description of Artificial Sequence: Synthetic oligonucleotide
gcaugaggcaggcgagaaa

SEQ ID NO: 704765 - RNA, 19 nt, Artificial Sequence
  Description of Artificial Sequence: Synthetic oligonucleotide
gcaggguguguagcaacca

SEQ ID NO: 704766 - RNA, 19 nt, Artificial Sequence
  Description of Artificial Sequence: Synthetic oligonucleotide
aggcggcugaugcccucaa

SEQ ID NO: 704767 - RNA, 19 nt, Artificial Sequence
  Description of Artificial Sequence: Synthetic oligonucleotide
accggaggauggagcucag

SEQ ID NO: 704768 - RNA, 19 nt, Artificial Sequence
  Description of Artificial Sequence: Synthetic oligonucleotide
aggucucuccaggcagaau

SEQ ID NO: 704769 - RNA, 19 nt, Artificial Sequence
  Description of Artificial Sequence: Synthetic oligonucleotide
cccaccccacuuauucuca

SEQ ID NO: 704770 - RNA, 19 nt, Artificial Sequence
  Description of Artificial Sequence: Synthetic oligonucleotide
caacagucauugccauggu

SEQ ID NO: 704771 - RNA, 19 nt, Artificial Sequence
  Description of Artificial Sequence: Synthetic oligonucleotide
ggucucagguagucuugcu

SEQ ID NO: 704772 - RNA, 19 nt, Artificial Sequence
  Description of Artificial Sequence: Synthetic oligonucleotide
ggcgagggcgcugcucaug

SEQ ID NO: 704773 - RNA, 19 nt, Artificial Sequence
  Description of Artificial Sequence: Synthetic oligonucleotide
cuacccagcucugggccua

SEQ ID NO: 704774 - RNA, 19 nt, Artificial Sequence
  Description of Artificial Sequence: Synthetic oligonucleotide
guuucgugccacacugcuu

SEQ ID NO: 704775 - RNA, 19 nt, Artificial Sequence
  Description of Artificial Sequence: Synthetic oligonucleotide
gguaagagucacagauaau

SEQ ID NO: 704776 - RNA, 19 nt, Artificial Sequence
  Description of Artificial Sequence: Synthetic oligonucleotide
aggcagggucucagguagu

SEQ ID NO: 704777 - RNA, 19 nt, Artificial Sequence
  Description of Artificial Sequence: Synthetic oligonucleotide
gccaguccgguguuuugcu

SEQ ID NO: 704778 - RNA, 19 nt, Artificial Sequence
  Description of Artificial Sequence: Synthetic oligonucleotide
gagguaggucugggaccca

SEQ ID NO: 704779 - RNA, 19 nt, Artificial Sequence
  Description of Artificial Sequence: Synthetic oligonucleotide
ccaaucuucccaccccacu

SEQ ID NO: 704780 - RNA, 19 nt, Artificial Sequence
  Description of Artificial Sequence: Synthetic oligonucleotide
guccgguguuuugcuggca

SEQ ID NO: 704781 - RNA, 19 nt, Artificial Sequence
  Description of Artificial Sequence: Synthetic oligonucleotide
gccacuggaugagaaccua

SEQ ID NO: 704782 - RNA, 19 nt, Artificial Sequence
  Description of Artificial Sequence: Synthetic oligonucleotide
ccaacauggccccaaucuu

SEQ ID NO: 704783 - RNA, 19 nt, Artificial Sequence
  Description of Artificial Sequence: Synthetic oligonucleotide
gggcagugaagaaggacuu

SEQ ID NO: 704784 - RNA, 19 nt, Artificial Sequence
  Description of Artificial Sequence: Synthetic oligonucleotide
cccucuugucaccuucucu

SEQ ID NO: 704785 - RNA, 19 nt, Artificial Sequence
  Description of Artificial Sequence: Synthetic oligonucleotide
cuccuucgauccccagggu

SEQ ID NO: 704786 - RNA, 19 nt, Artificial Sequence
  Description of Artificial Sequence: Synthetic oligonucleotide
ccugagcuugaggguggug

SEQ ID NO: 704787 - RNA, 19 nt, Artificial Sequence
  Description of Artificial Sequence: Synthetic oligonucleotide
caauggcgagggcgcugcu

SEQ ID NO: 704788 - RNA, 19 nt, Artificial Sequence
  Description of Artificial Sequence: Synthetic oligonucleotide
gcccaaguauuuggccacu

SEQ ID NO: 704789 - RNA, 19 nt, Artificial Sequence
  Description of Artificial Sequence: Synthetic oligonucleotide
ccagccaguccgguguuuu

SEQ ID NO: 704790 - RNA, 19 nt, Artificial Sequence
  Description of Artificial Sequence: Synthetic oligonucleotide
cauccccauaugggcuauu

SEQ ID NO: 704791 - RNA, 19 nt, Artificial Sequence
  Description of Artificial Sequence: Synthetic oligonucleotide
ccggaggauggagcucagu

SEQ ID NO: 704792 - RNA, 19 nt, Artificial Sequence
  Description of Artificial Sequence: Synthetic oligonucleotide
aaucuuuucagucccaucc

SEQ ID NO: 704793 - RNA, 19 nt, Artificial Sequence
  Description of Artificial Sequence: Synthetic oligonucleotide
acuuagaaaacauggaagc

SEQ ID NO: 704794 - RNA, 19 nt, Artificial Sequence
  Description of Artificial Sequence: Synthetic oligonucleotide
aauaauuccuggaacaagc

SEQ ID NO: 704795 - RNA, 19 nt, Artificial Sequence
  Description of Artificial Sequence: Synthetic oligonucleotide
aaaugaucuauucugugag

SEQ ID NO: 704796 - RNA, 19 nt, Artificial Sequence
  Description of Artificial Sequence: Synthetic oligonucleotide
ucaauguuaauucucaacu

SEQ ID NO: 704797 - RNA, 19 nt, Artificial Sequence
  Description of Artificial Sequence: Synthetic oligonucleotide
aucucaauaaaauuuuaac

SEQ ID NO: 704798 - RNA, 19 nt, Artificial Sequence
  Description of Artificial Sequence: Synthetic oligonucleotide
acuaauguguauuauuuuc

SEQ ID NO: 704799 - RNA, 19 nt, Artificial Sequence
  Description of Artificial Sequence: Synthetic oligonucleotide
uuuaaacaaauucccagag

SEQ ID NO: 704800 - RNA, 19 nt, Artificial Sequence
  Description of Artificial Sequence: Synthetic oligonucleotide
uccuuuauuaaccauguga

SEQ ID NO: 704801 - RNA, 19 nt, Artificial Sequence
  Description of Artificial Sequence: Synthetic oligonucleotide
aaggggauagaauggacgg

SEQ ID NO: 704802 - RNA, 19 nt, Artificial Sequence
  Description of Artificial Sequence: Synthetic oligonucleotide
aacaaauucccagagucac

SEQ ID NO: 704803 - RNA, 19 nt, Artificial Sequence
  Description of Artificial Sequence: Synthetic oligonucleotide
uaaaauuuuaacguggcac

SEQ ID NO: 704804 - RNA, 19 nt, Artificial Sequence
  Description of Artificial Sequence: Synthetic oligonucleotide
auguguguagcuuuguugg

SEQ ID NO: 704805 - RNA, 19 nt, Artificial Sequence
  Description of Artificial Sequence: Synthetic oligonucleotide
aguaacaaaucaucuuccc

SEQ ID NO: 704806 - RNA, 19 nt, Artificial Sequence
  Description of Artificial Sequence: Synthetic oligonucleotide
uuuaacguggcacuuagaa

SEQ ID NO: 704807 - RNA, 19 nt, Artificial Sequence
  Description of Artificial Sequence: Synthetic oligonucleotide
ugaauuuucuagcaguaga

SEQ ID NO: 704808 - RNA, 19 nt, Artificial Sequence
  Description of Artificial Sequence: Synthetic oligonucleotide
uucaaaggggauagaaugg

SEQ ID NO: 704809 - RNA, 19 nt, Artificial Sequence
  Description of Artificial Sequence: Synthetic oligonucleotide
cauauagucaugcuagugc

SEQ ID NO: 704810 - RNA, 19 nt, Artificial Sequence
  Description of Artificial Sequence: Synthetic oligonucleotide
uccacuauaaauuuuccaa

SEQ ID NO: 704811 - RNA, 19 nt, Artificial Sequence
  Description of Artificial Sequence: Synthetic oligonucleotide
aggguuuacccuucuaucc

SEQ ID NO: 704812 - RNA, 19 nt, Artificial Sequence
  Description of Artificial Sequence: Synthetic oligonucleotide
aaggguuuacccuucuauc

SEQ ID NO: 704813 - RNA, 19 nt, Artificial Sequence
  Description of Artificial Sequence: Synthetic oligonucleotide
gauuaauaauuccuggaac

SEQ ID NO: 704814 - RNA, 19 nt, Artificial Sequence
  Description of Artificial Sequence: Synthetic oligonucleotide
aacguucagucucaagugg

SEQ ID NO: 704815 - RNA, 19 nt, Artificial Sequence
  Description of Artificial Sequence: Synthetic oligonucleotide
auauucauacuucauccag

SEQ ID NO: 704816 - RNA, 19 nt, Artificial Sequence
  Description of Artificial Sequence: Synthetic oligonucleotide
ugguaaaugcuauuaaaga

SEQ ID NO: 704817 - RNA, 19 nt, Artificial Sequence
  Description of Artificial Sequence: Synthetic oligonucleotide
uauaauaccgaaaguaauu

SEQ ID NO: 704818 - RNA, 19 nt, Artificial Sequence
  Description of Artificial Sequence: Synthetic oligonucleotide
uuuucagucccauccaaag

SEQ ID NO: 704819 - RNA, 19 nt, Artificial Sequence
  Description of Artificial Sequence: Synthetic oligonucleotide
uuaugugaaaauucccugc

SEQ ID NO: 704820 - RNA, 19 nt, Artificial Sequence
  Description of Artificial Sequence: Synthetic oligonucleotide
ugacgaacuuuuaaaagca

SEQ ID NO: 704821 - RNA, 19 nt, Artificial Sequence
  Description of Artificial Sequence: Synthetic oligonucleotide
aagucuagacuaguuuucc

SEQ ID NO: 704822 - RNA, 19 nt, Artificial Sequence
  Description of Artificial Sequence: Synthetic oligonucleotide
auaauaccgaaaguaauuc

SEQ ID NO: 704823 - RNA, 19 nt, Artificial Sequence
  Description of Artificial Sequence: Synthetic oligonucleotide
uaggacauuuguaacagac

SEQ ID NO: 704824 - RNA, 19 nt, Artificial Sequence
  Description of Artificial Sequence: Synthetic oligonucleotide
aauauuggaacaucugguu

SEQ ID NO: 704825 - RNA, 19 nt, Artificial Sequence
  Description of Artificial Sequence: Synthetic oligonucleotide
cacuuagaaaacauggaag

SEQ ID NO: 704826 - RNA, 19 nt, Artificial Sequence
  Description of Artificial Sequence: Synthetic oligonucleotide
ugaccguggauucugcacg

SEQ ID NO: 704827 - RNA, 19 nt, Artificial Sequence
  Description of Artificial Sequence: Synthetic oligonucleotide
aaauauuggaacaucuggu

SEQ ID NO: 704828 - RNA, 19 nt, Artificial Sequence
  Description of Artificial Sequence: Synthetic oligonucleotide
uuauaauaccgaaaguaau

SEQ ID NO: 704829 - RNA, 19 nt, Artificial Sequence
  Description of Artificial Sequence: Synthetic oligonucleotide
uauguguguagcuuuguug

SEQ ID NO: 704830 - RNA, 19 nt, Artificial Sequence
  Description of Artificial Sequence: Synthetic oligonucleotide
uccauauuguuuuauacua

SEQ ID NO: 704831 - RNA, 19 nt, Artificial Sequence
  Description of Artificial Sequence: Synthetic oligonucleotide
aaaggguuuacccuucuau

SEQ ID NO: 704832 - RNA, 19 nt, Artificial Sequence
  Description of Artificial Sequence: Synthetic oligonucleotide
guugacgaacuuuuaaaag

SEQ ID NO: 704833 - RNA, 19 nt, Artificial Sequence
  Description of Artificial Sequence: Synthetic oligonucleotide
agaacugagaucauauuuc

SEQ ID NO: 704834 - RNA, 19 nt, Artificial Sequence
  Description of Artificial Sequence: Synthetic oligonucleotide
ugguauggcuguaacacag

SEQ ID NO: 704835 - RNA, 19 nt, Artificial Sequence
  Description of Artificial Sequence: Synthetic oligonucleotide
auuuuaacguggcacuuag

SEQ ID NO: 704836 - RNA, 19 nt, Artificial Sequence
  Description of Artificial Sequence: Synthetic oligonucleotide
uauuggaacaucugguugu

SEQ ID NO: 704837 - RNA, 19 nt, Artificial Sequence
  Description of Artificial Sequence: Synthetic oligonucleotide
uaugugaaaauucccugcu

SEQ ID NO: 704838 - RNA, 19 nt, Artificial Sequence
  Description of Artificial Sequence: Synthetic oligonucleotide
accgacagcaaauuauuuc

SEQ ID NO: 704839 - RNA, 19 nt, Artificial Sequence
  Description of Artificial Sequence: Synthetic oligonucleotide
ucuaggacauuuguaacag

SEQ ID NO: 704840 - RNA, 19 nt, Artificial Sequence
  Description of Artificial Sequence: Synthetic oligonucleotide
aaagucuagacuaguuuuc

SEQ ID NO: 704841 - RNA, 19 nt, Artificial Sequence
  Description of Artificial Sequence: Synthetic oligonucleotide
caugcuagugcuacggucc

SEQ ID NO: 704842 - RNA, 19 nt, Artificial Sequence
  Description of Artificial Sequence: Synthetic oligonucleotide
uguguauuauuuucuaaaa

SEQ ID NO: 704843 - RNA, 19 nt, Artificial Sequence
  Description of Artificial Sequence: Synthetic oligonucleotide
aaagauuccuccaauaauu

SEQ ID NO: 704844 - RNA, 19 nt, Artificial Sequence
  Description of Artificial Sequence: Synthetic oligonucleotide
agacuaguuuuccauauug

SEQ ID NO: 704845 - RNA, 19 nt, Artificial Sequence
  Description of Artificial Sequence: Synthetic oligonucleotide
uuaaagucuagacuaguuu

SEQ ID NO: 704846 - RNA, 19 nt, Artificial Sequence
  Description of Artificial Sequence: Synthetic oligonucleotide
guuaugugaaaauucccug

SEQ ID NO: 704847 - RNA, 19 nt, Artificial Sequence
  Description of Artificial Sequence: Synthetic oligonucleotide
ugacauauagaugaccgug

SEQ ID NO: 704848 - RNA, 19 nt, Artificial Sequence
  Description of Artificial Sequence: Synthetic oligonucleotide
ugaaccgacagcaaauuau

SEQ ID NO: 704849 - RNA, 19 nt, Artificial Sequence
  Description of Artificial Sequence: Synthetic oligonucleotide
gguaucuugauacacugag

SEQ ID NO: 704850 - RNA, 19 nt, Artificial Sequence
  Description of Artificial Sequence: Synthetic oligonucleotide
auauagucaugcuagugcu

SEQ ID NO: 704851 - RNA, 19 nt, Artificial Sequence
  Description of Artificial Sequence: Synthetic oligonucleotide
ugugggauugccuugccca

SEQ ID NO: 704852 - RNA, 19 nt, Artificial Sequence
  Description of Artificial Sequence: Synthetic oligonucleotide
auagucaugcuagugcuac

SEQ ID NO: 704853 - RNA, 19 nt, Artificial Sequence
  Description of Artificial Sequence: Synthetic oligonucleotide
uuugaagaucacaucuuga

SEQ ID NO: 704854 - RNA, 19 nt, Artificial Sequence
  Description of Artificial Sequence: Synthetic oligonucleotide
augguuaaugaugcguucc

SEQ ID NO: 704855 - RNA, 19 nt, Artificial Sequence
  Description of Artificial Sequence: Synthetic oligonucleotide
ugauacacugagaauucca

SEQ ID NO: 704856 - RNA, 19 nt, Artificial Sequence
  Description of Artificial Sequence: Synthetic oligonucleotide
agugcuacggucccagccg

SEQ ID NO: 704857 - RNA, 19 nt, Artificial Sequence
  Description of Artificial Sequence: Synthetic oligonucleotide
gacauauagaugaccgugg

SEQ ID NO: 704858 - RNA, 19 nt, Artificial Sequence
  Description of Artificial Sequence: Synthetic oligonucleotide
ugaucuacagcaaucuuuu

SEQ ID NO: 704859 - RNA, 19 nt, Artificial Sequence
  Description of Artificial Sequence: Synthetic oligonucleotide
acauauacaggacgacuuc

SEQ ID NO: 704860 - RNA, 19 nt, Artificial Sequence
  Description of Artificial Sequence: Synthetic oligonucleotide
uuuccuguuagcugcauaa

SEQ ID NO: 704861 - RNA, 19 nt, Artificial Sequence
  Description of Artificial Sequence: Synthetic oligonucleotide
uuuaucaaugcccuuucuu

SEQ ID NO: 704862 - RNA, 19 nt, Artificial Sequence
  Description of Artificial Sequence: Synthetic oligonucleotide
agucgccucaucuucagag

SEQ ID NO: 704863 - RNA, 19 nt, Artificial Sequence
  Description of Artificial Sequence: Synthetic oligonucleotide
auuauaauaccgaaaguaa

SEQ ID NO: 704864 - RNA, 19 nt, Artificial Sequence
  Description of Artificial Sequence: Synthetic oligonucleotide
uaauucucaacuugcuaga

SEQ ID NO: 704865 - RNA, 19 nt, Artificial Sequence
  Description of Artificial Sequence: Synthetic oligonucleotide
ucugcuaaauccagaacau

SEQ ID NO: 704866 - RNA, 19 nt, Artificial Sequence
  Description of Artificial Sequence: Synthetic oligonucleotide
auaagauagaccaucugca

SEQ ID NO: 704867 - RNA, 19 nt, Artificial Sequence
  Description of Artificial Sequence: Synthetic oligonucleotide
cauagaaaagcaacguuca

SEQ ID NO: 704868 - RNA, 19 nt, Artificial Sequence
  Description of Artificial Sequence: Synthetic oligonucleotide
aguuaugugaaaauucccu

SEQ ID NO: 704869 - RNA, 19 nt, Artificial Sequence
  Description of Artificial Sequence: Synthetic oligonucleotide
aauaccgaaaguaauucua

SEQ ID NO: 704870 - RNA, 19 nt, Artificial Sequence
  Description of Artificial Sequence: Synthetic oligonucleotide
uauagaugaccguggauuc

SEQ ID NO: 704871 - RNA, 19 nt, Artificial Sequence
  Description of Artificial Sequence: Synthetic oligonucleotide
uguuguugaaaagauuccu

SEQ ID NO: 704872 - RNA, 19 nt, Artificial Sequence
  Description of Artificial Sequence: Synthetic oligonucleotide
ucauaagauagaccaucug

SEQ ID NO: 704873 - RNA, 19 nt, Artificial Sequence
  Description of Artificial Sequence: Synthetic oligonucleotide
cauuauaauaccgaaagua

SEQ ID NO: 704874 - RNA, 19 nt, Artificial Sequence
  Description of Artificial Sequence: Synthetic oligonucleotide
ucuucaaaggggauagaau

SEQ ID NO: 704875 - RNA, 19 nt, Artificial Sequence
  Description of Artificial Sequence: Synthetic oligonucleotide
agagguaagugguugucug

SEQ ID NO: 704876 - RNA, 19 nt, Artificial Sequence
  Description of Artificial Sequence: Synthetic oligonucleotide
uccaauaauuccacagagu

SEQ ID NO: 704877 - RNA, 19 nt, Artificial Sequence
  Description of Artificial Sequence: Synthetic oligonucleotide
aaccaugugagcggauuac

SEQ ID NO: 704878 - RNA, 19 nt, Artificial Sequence
  Description of Artificial Sequence: Synthetic oligonucleotide
agaauggacgggcuuguag

SEQ ID NO: 704879 - RNA, 19 nt, Artificial Sequence
  Description of Artificial Sequence: Synthetic oligonucleotide
auaccgaaaguaauucuac

SEQ ID NO: 704880 - RNA, 19 nt, Artificial Sequence
  Description of Artificial Sequence: Synthetic oligonucleotide
uauugacauauagaugacc

SEQ ID NO: 704881 - RNA, 19 nt, Artificial Sequence
  Description of Artificial Sequence: Synthetic oligonucleotide
cauuugcuauuuaucaaug

SEQ ID NO: 704882 - RNA, 19 nt, Artificial Sequence
  Description of Artificial Sequence: Synthetic oligonucleotide
auagaaaagcaacguucag

SEQ ID NO: 704883 - RNA, 19 nt, Artificial Sequence
  Description of Artificial Sequence: Synthetic oligonucleotide
uuauugacauauagaugac

SEQ ID NO: 704884 - RNA, 19 nt, Artificial Sequence
  Description of Artificial Sequence: Synthetic oligonucleotide
ccaauaauuccacagaguc

SEQ ID NO: 704885 - RNA, 19 nt, Artificial Sequence
  Description of Artificial Sequence: Synthetic oligonucleotide
gaugucaauguuaauucuc

SEQ ID NO: 704886 - RNA, 19 nt, Artificial Sequence
  Description of Artificial Sequence: Synthetic oligonucleotide
gaugcaaccauggucucug

SEQ ID NO: 704887 - RNA, 19 nt, Artificial Sequence
  Description of Artificial Sequence: Synthetic oligonucleotide
acccuucuauccucuaggc

SEQ ID NO: 704888 - RNA, 19 nt, Artificial Sequence
  Description of Artificial Sequence: Synthetic oligonucleotide
uuaacguggcacuuagaaa

SEQ ID NO: 704889 - RNA, 19 nt, Artificial Sequence
  Description of Artificial Sequence: Synthetic oligonucleotide
ugauauggcuucacauuca

SEQ ID NO: 704890 - RNA, 19 nt, Artificial Sequence
  Description of Artificial Sequence: Synthetic oligonucleotide
acauuauaauaccgaaagu

SEQ ID NO: 704891 - RNA, 19 nt, Artificial Sequence
  Description of Artificial Sequence: Synthetic oligonucleotide
uuccauguaacaugccugu

SEQ ID NO: 704892 - RNA, 19 nt, Artificial Sequence
  Description of Artificial Sequence: Synthetic oligonucleotide
acaacauauacaggacgac

SEQ ID NO: 704893 - RNA, 19 nt, Artificial Sequence
  Description of Artificial Sequence: Synthetic oligonucleotide
uccgagauguuccuuugcu

SEQ ID NO: 704894 - RNA, 19 nt, Artificial Sequence
  Description of Artificial Sequence: Synthetic oligonucleotide
agucaugcuagugcuacgg

SEQ ID NO: 704895 - RNA, 19 nt, Artificial Sequence
  Description of Artificial Sequence: Synthetic oligonucleotide
ucucaaguggccagcaguc

SEQ ID NO: 704896 - RNA, 19 nt, Artificial Sequence
  Description of Artificial Sequence: Synthetic oligonucleotide
uuuuaaagucuagacuagu

SEQ ID NO: 704897 - RNA, 19 nt, Artificial Sequence
  Description of Artificial Sequence: Synthetic oligonucleotide
uguguagcuuuguuggcac

SEQ ID NO: 704898 - RNA, 19 nt, Artificial Sequence
  Description of Artificial Sequence: Synthetic oligonucleotide
uggaacaucugguugugau

SEQ ID NO: 704899 - RNA, 19 nt, Artificial Sequence
  Description of Artificial Sequence: Synthetic oligonucleotide
guuaaugaugcguucccuc

SEQ ID NO: 704900 - RNA, 19 nt, Artificial Sequence
  Description of Artificial Sequence: Synthetic oligonucleotide
ccgacagcaaauuauuucc

SEQ ID NO: 704901 - RNA, 19 nt, Artificial Sequence
  Description of Artificial Sequence: Synthetic oligonucleotide
augugagcggauuacaguu

SEQ ID NO: 704902 - RNA, 19 nt, Artificial Sequence
  Description of Artificial Sequence: Synthetic oligonucleotide
ucuagacuaguuuuccaua

SEQ ID NO: 704903 - RNA, 19 nt, Artificial Sequence
  Description of Artificial Sequence: Synthetic oligonucleotide
aggauccaagucugaaccg

SEQ ID NO: 704904 - RNA, 19 nt, Artificial Sequence
  Description of Artificial Sequence: Synthetic oligonucleotide
agacauagaaaagcaacgu

SEQ ID NO: 704905 - RNA, 19 nt, Artificial Sequence
  Description of Artificial Sequence: Synthetic oligonucleotide
ugggugucggcugaaaucu

SEQ ID NO: 704906 - RNA, 19 nt, Artificial Sequence
  Description of Artificial Sequence: Synthetic oligonucleotide
uaccgaaaguaauucuaca

SEQ ID NO: 704907 - RNA, 19 nt, Artificial Sequence
  Description of Artificial Sequence: Synthetic oligonucleotide
ucacaagugcugccaaaug

SEQ ID NO: 704908 - RNA, 19 nt, Artificial Sequence
  Description of Artificial Sequence: Synthetic oligonucleotide
aagacgacacacauuugcu

SEQ ID NO: 704909 - RNA, 19 nt, Artificial Sequence
  Description of Artificial Sequence: Synthetic oligonucleotide
auaaauuuuccaauuccau

SEQ ID NO: 704910 - RNA, 19 nt, Artificial Sequence
  Description of Artificial Sequence: Synthetic oligonucleotide
auuccauguaacaugccug

SEQ ID NO: 704911 - RNA, 19 nt, Artificial Sequence
  Description of Artificial Sequence: Synthetic oligonucleotide
augcuagugcuacgguccc

SEQ ID NO: 704912 - RNA, 19 nt, Artificial Sequence
  Description of Artificial Sequence: Synthetic oligonucleotide
uucauauagucaugcuagu

SEQ ID NO: 704913 - RNA, 19 nt, Artificial Sequence
  Description of Artificial Sequence: Synthetic oligonucleotide
ucaugcuagugcuacgguc

SEQ ID NO: 704914 - RNA, 19 nt, Artificial Sequence
  Description of Artificial Sequence: Synthetic oligonucleotide
acguucagucucaaguggc

SEQ ID NO: 704915 - RNA, 19 nt, Artificial Sequence
  Description of Artificial Sequence: Synthetic oligonucleotide
ugcugguucauaagauaga

SEQ ID NO: 704916 - RNA, 19 nt, Artificial Sequence
  Description of Artificial Sequence: Synthetic oligonucleotide
aaagcaacguucagucuca

SEQ ID NO: 704917 - RNA, 19 nt, Artificial Sequence
  Description of Artificial Sequence: Synthetic oligonucleotide
cagcaaucuuuucaguccc

SEQ ID NO: 704918 - RNA, 19 nt, Artificial Sequence
  Description of Artificial Sequence: Synthetic oligonucleotide
gauaaaugaucuauucugu

SEQ ID NO: 704919 - RNA, 19 nt, Artificial Sequence
  Description of Artificial Sequence: Synthetic oligonucleotide
uguguguagcuuuguuggc

SEQ ID NO: 704920 - RNA, 19 nt, Artificial Sequence
  Description of Artificial Sequence: Synthetic oligonucleotide
agcaaauuauuuccacuau

SEQ ID NO: 704921 - RNA, 19 nt, Artificial Sequence
  Description of Artificial Sequence: Synthetic oligonucleotide
agucaguaacaaaucaucu

SEQ ID NO: 704922 - RNA, 19 nt, Artificial Sequence
  Description of Artificial Sequence: Synthetic oligonucleotide
gucaccaugagagaacuga

SEQ ID NO: 704923 - RNA, 19 nt, Artificial Sequence
  Description of Artificial Sequence: Synthetic oligonucleotide
uacuaauguguauuauuuu

SEQ ID NO: 704924 - RNA, 19 nt, Artificial Sequence
  Description of Artificial Sequence: Synthetic oligonucleotide
uagaugaccguggauucug

SEQ ID NO: 704925 - RNA, 19 nt, Artificial Sequence
  Description of Artificial Sequence: Synthetic oligonucleotide
augucaauguuaauucuca

SEQ ID NO: 704926 - RNA, 19 nt, Artificial Sequence
  Description of Artificial Sequence: Synthetic oligonucleotide
uagcuuuguuggcacaacu

SEQ ID NO: 704927 - RNA, 19 nt, Artificial Sequence
  Description of Artificial Sequence: Synthetic oligonucleotide
uguaggauccaagucugaa

SEQ ID NO: 704928 - RNA, 19 nt, Artificial Sequence
  Description of Artificial Sequence: Synthetic oligonucleotide
uugauacacugagaauucc

SEQ ID NO: 704929 - RNA, 19 nt, Artificial Sequence
  Description of Artificial Sequence: Synthetic oligonucleotide
augaucuauucugugagaa

SEQ ID NO: 704930 - RNA, 19 nt, Artificial Sequence
  Description of Artificial Sequence: Synthetic oligonucleotide
acaggacgacuucaguuug

SEQ ID NO: 704931 - RNA, 19 nt, Artificial Sequence
  Description of Artificial Sequence: Synthetic oligonucleotide
agucugaaccgacagcaaa

SEQ ID NO: 704932 - RNA, 19 nt, Artificial Sequence
  Description of Artificial Sequence: Synthetic oligonucleotide
gacgacuucaguuuguauu

SEQ ID NO: 704933 - RNA, 19 nt, Artificial Sequence
  Description of Artificial Sequence: Synthetic oligonucleotide
cuaggcucugcucuccgag

SEQ ID NO: 704934 - RNA, 19 nt, Artificial Sequence
  Description of Artificial Sequence: Synthetic oligonucleotide
cuggagucaguaacaaauc

SEQ ID NO: 704935 - RNA, 19 nt, Artificial Sequence
  Description of Artificial Sequence: Synthetic oligonucleotide
ucuugcagccuacucugaa

SEQ ID NO: 704936 - RNA, 19 nt, Artificial Sequence
  Description of Artificial Sequence: Synthetic oligonucleotide
acgaacuuuuaaaagcacu

SEQ ID NO: 704937 - RNA, 19 nt, Artificial Sequence
  Description of Artificial Sequence: Synthetic oligonucleotide
aauucucaacuugcuagaa

SEQ ID NO: 704938 - RNA, 19 nt, Artificial Sequence
  Description of Artificial Sequence: Synthetic oligonucleotide
ugccagaaaggcauguguu

SEQ ID NO: 704939 - RNA, 19 nt, Artificial Sequence
  Description of Artificial Sequence: Synthetic oligonucleotide
ggucaaauacugcugguuc

SEQ ID NO: 704940 - RNA, 19 nt, Artificial Sequence
  Description of Artificial Sequence: Synthetic oligonucleotide
uguagcuuuguuggcacaa

SEQ ID NO: 704941 - RNA, 19 nt, Artificial Sequence
  Description of Artificial Sequence: Synthetic oligonucleotide
uagucaugcuagugcuacg

SEQ ID NO: 704942 - RNA, 19 nt, Artificial Sequence
  Description of Artificial Sequence: Synthetic oligonucleotide
uuuuaacguggcacuuaga

SEQ ID NO: 704943 - RNA, 19 nt, Artificial Sequence
  Description of Artificial Sequence: Synthetic oligonucleotide
gagaacugaugggugucgg

SEQ ID NO: 704944 - RNA, 19 nt, Artificial Sequence
  Description of Artificial Sequence: Synthetic oligonucleotide
agucuagacuaguuuucca

SEQ ID NO: 704945 - RNA, 19 nt, Artificial Sequence
  Description of Artificial Sequence: Synthetic oligonucleotide
uaaccaugugagcggauua

SEQ ID NO: 704946 - RNA, 19 nt, Artificial Sequence
  Description of Artificial Sequence: Synthetic oligonucleotide
ucaaugcccuuucuuuaaa

SEQ ID NO: 704947 - RNA, 19 nt, Artificial Sequence
  Description of Artificial Sequence: Synthetic oligonucleotide
auucucaacuugcuagaaa

SEQ ID NO: 704948 - RNA, 19 nt, Artificial Sequence
  Description of Artificial Sequence: Synthetic oligonucleotide
uauagucaugcuagugcua

SEQ ID NO: 704949 - RNA, 19 nt, Artificial Sequence
  Description of Artificial Sequence: Synthetic oligonucleotide
ugcguucccucucugucac

SEQ ID NO: 704950 - RNA, 19 nt, Artificial Sequence
  Description of Artificial Sequence: Synthetic oligonucleotide
guaacaaaucaucuucccu

SEQ ID NO: 704951 - RNA, 19 nt, Artificial Sequence
  Description of Artificial Sequence: Synthetic oligonucleotide
gcgucuaacucuuucacca

SEQ ID NO: 704952 - RNA, 19 nt, Artificial Sequence
  Description of Artificial Sequence: Synthetic oligonucleotide
uuaaccaugugagcggauu

SEQ ID NO: 704953 - RNA, 19 nt, Artificial Sequence
  Description of Artificial Sequence: Synthetic oligonucleotide
agguaagugguugucugug

SEQ ID NO: 704954 - RNA, 19 nt, Artificial Sequence
  Description of Artificial Sequence: Synthetic oligonucleotide
cagccgaccgccauguuuc

SEQ ID NO: 704955 - RNA, 19 nt, Artificial Sequence
  Description of Artificial Sequence: Synthetic oligonucleotide
uguaagaaucaugguucac

SEQ ID NO: 704956 - RNA, 19 nt, Artificial Sequence
  Description of Artificial Sequence: Synthetic oligonucleotide
cagccuacucugaaucagc

SEQ ID NO: 704957 - RNA, 19 nt, Artificial Sequence
  Description of Artificial Sequence: Synthetic oligonucleotide
gacgaacuuuuaaaagcac

SEQ ID NO: 704958 - RNA, 19 nt, Artificial Sequence
  Description of Artificial Sequence: Synthetic oligonucleotide
uuuuccgauucagucgccu

SEQ ID NO: 704959 - RNA, 19 nt, Artificial Sequence
  Description of Artificial Sequence: Synthetic oligonucleotide
cuacggucccagccgaccg

SEQ ID NO: 704960 - RNA, 19 nt, Artificial Sequence
  Description of Artificial Sequence: Synthetic oligonucleotide
guugauauggcuucacauu

SEQ ID NO: 704961 - RNA, 19 nt, Artificial Sequence
  Description of Artificial Sequence: Synthetic oligonucleotide
cgaaaguaauucuacauca

SEQ ID NO: 704962 - RNA, 19 nt, Artificial Sequence
  Description of Artificial Sequence: Synthetic oligonucleotide
cuugaagggaaugcucuuc

SEQ ID NO: 704963 - RNA, 19 nt, Artificial Sequence
  Description of Artificial Sequence: Synthetic oligonucleotide
cauguaacaugccuguugu

SEQ ID NO: 704964 - RNA, 19 nt, Artificial Sequence
  Description of Artificial Sequence: Synthetic oligonucleotide
uagacuaguuuuccauauu

SEQ ID NO: 704965 - RNA, 19 nt, Artificial Sequence
  Description of Artificial Sequence: Synthetic oligonucleotide
uuuccgauucagucgccuc

SEQ ID NO: 704966 - RNA, 19 nt, Artificial Sequence
  Description of Artificial Sequence: Synthetic oligonucleotide
uauccucuaggcucugcuc

SEQ ID NO: 704967 - RNA, 19 nt, Artificial Sequence
  Description of Artificial Sequence: Synthetic oligonucleotide
ugugagcggauuacaguuu

SEQ ID NO: 704968 - RNA, 19 nt, Artificial Sequence
  Description of Artificial Sequence: Synthetic oligonucleotide
gcacuuagaaaacauggaa

SEQ ID NO: 704969 - RNA, 19 nt, Artificial Sequence
  Description of Artificial Sequence: Synthetic oligonucleotide
agacauuauaauaccgaaa

SEQ ID NO: 704970 - RNA, 19 nt, Artificial Sequence
  Description of Artificial Sequence: Synthetic oligonucleotide
aggggauagaauggacggg

SEQ ID NO: 704971 - RNA, 19 nt, Artificial Sequence
  Description of Artificial Sequence: Synthetic oligonucleotide
gaccguggauucugcacgc

SEQ ID NO: 704972 - RNA, 19 nt, Artificial Sequence
  Description of Artificial Sequence: Synthetic oligonucleotide
agguucucauauuuucuuu

SEQ ID NO: 704973 - RNA, 19 nt, Artificial Sequence
  Description of Artificial Sequence: Synthetic oligonucleotide
aaccuugggaaaggcgucu

SEQ ID NO: 704974 - RNA, 19 nt, Artificial Sequence
  Description of Artificial Sequence: Synthetic oligonucleotide
ccgaaaguaauucuacauc

SEQ ID NO: 704975 - RNA, 19 nt, Artificial Sequence
  Description of Artificial Sequence: Synthetic oligonucleotide
gauccaagucugaaccgac

SEQ ID NO: 704976 - RNA, 19 nt, Artificial Sequence
  Description of Artificial Sequence: Synthetic oligonucleotide
uuguaggauccaagucuga

SEQ ID NO: 704977 - RNA, 19 nt, Artificial Sequence
  Description of Artificial Sequence: Synthetic oligonucleotide
ggggauagaauggacgggc

SEQ ID NO: 704978 - RNA, 19 nt, Artificial Sequence
  Description of Artificial Sequence: Synthetic oligonucleotide
agaugaccguggauucugc

SEQ ID NO: 704979 - RNA, 19 nt, Artificial Sequence
  Description of Artificial Sequence: Synthetic oligonucleotide
aggacauuuguaacagaca

SEQ ID NO: 704980 - RNA, 19 nt, Artificial Sequence
  Description of Artificial Sequence: Synthetic oligonucleotide
guacuaauguguauuauuu

SEQ ID NO: 704981 - RNA, 19 nt, Artificial Sequence
  Description of Artificial Sequence: Synthetic oligonucleotide
guaacagacacaacauaua

SEQ ID NO: 704982 - RNA, 19 nt, Artificial Sequence
  Description of Artificial Sequence: Synthetic oligonucleotide
auccagguaucuugauaca

SEQ ID NO: 704983 - RNA, 19 nt, Artificial Sequence
  Description of Artificial Sequence: Synthetic oligonucleotide
gaggaugugggauugccuu

SEQ ID NO: 704984 - RNA, 19 nt, Artificial Sequence
  Description of Artificial Sequence: Synthetic oligonucleotide
gauauggcuucacauucau

SEQ ID NO: 704985 - RNA, 19 nt, Artificial Sequence
  Description of Artificial Sequence: Synthetic oligonucleotide
auagaugaccguggauucu

SEQ ID NO: 704986 - RNA, 19 nt, Artificial Sequence
  Description of Artificial Sequence: Synthetic oligonucleotide
ucuccacccaggagguacu

SEQ ID NO: 704987 - RNA, 19 nt, Artificial Sequence
  Description of Artificial Sequence: Synthetic oligonucleotide
caucagaauccagcccugg

SEQ ID NO: 704988 - RNA, 19 nt, Artificial Sequence
  Description of Artificial Sequence: Synthetic oligonucleotide
uacggucccagccgaccgc

SEQ ID NO: 704989 - RNA, 19 nt, Artificial Sequence
  Description of Artificial Sequence: Synthetic oligonucleotide
gucuagacuaguuuuccau

SEQ ID NO: 704990 - RNA, 19 nt, Artificial Sequence
  Description of Artificial Sequence: Synthetic oligonucleotide
aucugcagaugcaaccaug

SEQ ID NO: 704991 - RNA, 19 nt, Artificial Sequence
  Description of Artificial Sequence: Synthetic oligonucleotide
aguguguuuccagguucuc

SEQ ID NO: 704992 - RNA, 19 nt, Artificial Sequence
  Description of Artificial Sequence: Synthetic oligonucleotide
cacaagugcugccaaaugu

SEQ ID NO: 704993 - RNA, 19 nt, Artificial Sequence
  Description of Artificial Sequence: Synthetic oligonucleotide
gaacugaugggugucggcu

SEQ ID NO: 704994 - RNA, 19 nt, Artificial Sequence
  Description of Artificial Sequence: Synthetic oligonucleotide
ccaugugagcggauuacag

SEQ ID NO: 704995 - RNA, 19 nt, Artificial Sequence
  Description of Artificial Sequence: Synthetic oligonucleotide
gauucagucgccucaucuu

SEQ ID NO: 704996 - RNA, 19 nt, Artificial Sequence
  Description of Artificial Sequence: Synthetic oligonucleotide
gaaccuugggaaaggcguc

SEQ ID NO: 704997 - RNA, 19 nt, Artificial Sequence
  Description of Artificial Sequence: Synthetic oligonucleotide
cuccgagauguuccuuugc

SEQ ID NO: 704998 - RNA, 19 nt, Artificial Sequence
  Description of Artificial Sequence: Synthetic oligonucleotide
cuucccuugguggcagugc

SEQ ID NO: 704999 - RNA, 19 nt, Artificial Sequence
  Description of Artificial Sequence: Synthetic oligonucleotide
aaacugccagaaaggcaug

SEQ ID NO: 705000 - RNA, 19 nt, Artificial Sequence
  Description of Artificial Sequence: Synthetic oligonucleotide
agugccguugacgaacuuu

SEQ ID NO: 705001 - RNA, 19 nt, Artificial Sequence
  Description of Artificial Sequence: Synthetic oligonucleotide
guguguagcuuuguuggca

SEQ ID NO: 705002 - RNA, 19 nt, Artificial Sequence
  Description of Artificial Sequence: Synthetic oligonucleotide
agccgaccgccauguuucc

SEQ ID NO: 705003 - RNA, 19 nt, Artificial Sequence
  Description of Artificial Sequence: Synthetic oligonucleotide
gggauugccuugcccacag

SEQ ID NO: 705004 - RNA, 19 nt, Artificial Sequence
  Description of Artificial Sequence: Synthetic oligonucleotide
guggauucugcacgcaucu

SEQ ID NO: 705005 - RNA, 19 nt, Artificial Sequence
  Description of Artificial Sequence: Synthetic oligonucleotide
accaugugagcggauuaca

SEQ ID NO: 705006 - RNA, 19 nt, Artificial Sequence
  Description of Artificial Sequence: Synthetic oligonucleotide
cuauuuaucaaugcccuuu

SEQ ID NO: 705007 - RNA, 19 nt, Artificial Sequence
  Description of Artificial Sequence: Synthetic oligonucleotide
gugggauugccuugcccac

SEQ ID NO: 705008 - RNA, 19 nt, Artificial Sequence
  Description of Artificial Sequence: Synthetic oligonucleotide
aaccgacagcaaauuauuu

SEQ ID NO: 705009 - RNA, 19 nt, Artificial Sequence
  Description of Artificial Sequence: Synthetic oligonucleotide
gcuagugcuacggucccag

SEQ ID NO: 705010 - RNA, 19 nt, Artificial Sequence
  Description of Artificial Sequence: Synthetic oligonucleotide
gagguaagugguugucugu

SEQ ID NO: 705011 - RNA, 19 nt, Artificial Sequence
  Description of Artificial Sequence: Synthetic oligonucleotide
cuagugcuacggucccagc

SEQ ID NO: 705012 - RNA, 19 nt, Artificial Sequence
  Description of Artificial Sequence: Synthetic oligonucleotide
gggaaaggcgucuaacucu

SEQ ID NO: 705013 - RNA, 19 nt, Artificial Sequence
  Description of Artificial Sequence: Synthetic oligonucleotide
ugcacgcaucuggagucag

SEQ ID NO: 705014 - RNA, 19 nt, Artificial Sequence
  Description of Artificial Sequence: Synthetic oligonucleotide
cuaggacauuuguaacaga

SEQ ID NO: 705015 - RNA, 19 nt, Artificial Sequence
  Description of Artificial Sequence: Synthetic oligonucleotide
uuggaacaucugguuguga

SEQ ID NO: 705016 - RNA, 19 nt, Artificial Sequence
  Description of Artificial Sequence: Synthetic oligonucleotide
uggauucugcacgcaucug

SEQ ID NO: 705017 - RNA, 19 nt, Artificial Sequence
  Description of Artificial Sequence: Synthetic oligonucleotide
ggcagugccguugacgaac

SEQ ID NO: 705018 - RNA, 19 nt, Artificial Sequence
  Description of Artificial Sequence: Synthetic oligonucleotide
aagucugaaccgacagcaa

SEQ ID NO: 705019 - RNA, 19 nt, Artificial Sequence
  Description of Artificial Sequence: Synthetic oligonucleotide
gaaccgacagcaaauuauu

SEQ ID NO: 705020 - RNA, 19 nt, Artificial Sequence
  Description of Artificial Sequence: Synthetic oligonucleotide
agguaucuugauacacuga

SEQ ID NO: 705021 - RNA, 19 nt, Artificial Sequence
  Description of Artificial Sequence: Synthetic oligonucleotide
guucacaagugcugccaaa

SEQ ID NO: 705022 - RNA, 19 nt, Artificial Sequence
  Description of Artificial Sequence: Synthetic oligonucleotide
acguggcacuuagaaaaca

SEQ ID NO: 705023 - RNA, 19 nt, Artificial Sequence
  Description of Artificial Sequence: Synthetic oligonucleotide
acgcaucuggagucaguaa

SEQ ID NO: 705024 - RNA, 19 nt, Artificial Sequence
  Description of Artificial Sequence: Synthetic oligonucleotide
ucccagccgaccgccaugu

SEQ ID NO: 705025 - RNA, 19 nt, Artificial Sequence
  Description of Artificial Sequence: Synthetic oligonucleotide
ugccguugacgaacuuuua

SEQ ID NO: 705026 - RNA, 19 nt, Artificial Sequence
  Description of Artificial Sequence: Synthetic oligonucleotide
ugcuacggucccagccgac

SEQ ID NO: 705027 - RNA, 19 nt, Artificial Sequence
  Description of Artificial Sequence: Synthetic oligonucleotide
ggcgacggugaugucaaug

SEQ ID NO: 705028 - RNA, 19 nt, Artificial Sequence
  Description of Artificial Sequence: Synthetic oligonucleotide
gccuacucugaaucagcug

SEQ ID NO: 705029 - RNA, 19 nt, Artificial Sequence
  Description of Artificial Sequence: Synthetic oligonucleotide
aggacgacuucaguuugua

SEQ ID NO: 705030 - RNA, 19 nt, Artificial Sequence
  Description of Artificial Sequence: Synthetic oligonucleotide
cugaaccgacagcaaauua

SEQ ID NO: 705031 - RNA, 19 nt, Artificial Sequence
  Description of Artificial Sequence: Synthetic oligonucleotide
agcaaucuuuucaguccca

SEQ ID NO: 705032 - RNA, 19 nt, Artificial Sequence
  Description of Artificial Sequence: Synthetic oligonucleotide
guauguguguagcuuuguu

SEQ ID NO: 705033 - RNA, 19 nt, Artificial Sequence
  Description of Artificial Sequence: Synthetic oligonucleotide
ccguugacgaacuuuuaaa

SEQ ID NO: 705034 - RNA, 19 nt, Artificial Sequence
  Description of Artificial Sequence: Synthetic oligonucleotide
ccugaaaccucacugaauu

SEQ ID NO: 705035 - RNA, 19 nt, Artificial Sequence
  Description of Artificial Sequence: Synthetic oligonucleotide
ggagguacuaauguguauu

SEQ ID NO: 705036 - RNA, 19 nt, Artificial Sequence
  Description of Artificial Sequence: Synthetic oligonucleotide
cguugacgaacuuuuaaaa

SEQ ID NO: 705037 - RNA, 19 nt, Artificial Sequence
  Description of Artificial Sequence: Synthetic oligonucleotide
ugcuagugcuacgguccca

SEQ ID NO: 705038 - RNA, 19 nt, Artificial Sequence
  Description of Artificial Sequence: Synthetic oligonucleotide
gguucacaagugcugccaa

SEQ ID NO: 705039 - RNA, 19 nt, Artificial Sequence
  Description of Artificial Sequence: Synthetic oligonucleotide
ggacgggcuuguaggaucc

SEQ ID NO: 705040 - RNA, 19 nt, Artificial Sequence
  Description of Artificial Sequence: Synthetic oligonucleotide
gcgacggugaugucaaugu

SEQ ID NO: 705041 - RNA, 19 nt, Artificial Sequence
  Description of Artificial Sequence: Synthetic oligonucleotide
gggugaaaggucaaauacu

SEQ ID NO: 705042 - RNA, 19 nt, Artificial Sequence
  Description of Artificial Sequence: Synthetic oligonucleotide
gguugugaucuacagcaau

SEQ ID NO: 705043 - RNA, 19 nt, Artificial Sequence
  Description of Artificial Sequence: Synthetic oligonucleotide
gucugaaccgacagcaaau

SEQ ID NO: 705044 - RNA, 19 nt, Artificial Sequence
  Description of Artificial Sequence: Synthetic oligonucleotide
cacgcaucuggagucagua

SEQ ID NO: 705045 - RNA, 19 nt, Artificial Sequence
  Description of Artificial Sequence: Synthetic oligonucleotide
gugcuacggucccagccga

SEQ ID NO: 705046 - RNA, 19 nt, Artificial Sequence
  Description of Artificial Sequence: Synthetic oligonucleotide
cucaaguggccagcaguca

SEQ ID NO: 705047 - RNA, 19 nt, Artificial Sequence
  Description of Artificial Sequence: Synthetic oligonucleotide
gugagcggauuacaguuuu

SEQ ID NO: 705048 - RNA, 19 nt, Artificial Sequence
  Description of Artificial Sequence: Synthetic oligonucleotide
gcuacggucccagccgacc

SEQ ID NO: 705049 - RNA, 19 nt, Artificial Sequence
  Description of Artificial Sequence: Synthetic oligonucleotide
aagcaacguucagucucaa

SEQ ID NO: 705050 - RNA, 19 nt, Artificial Sequence
  Description of Artificial Sequence: Synthetic oligonucleotide
gggcuuguaggauccaagu

SEQ ID NO: 705051 - RNA, 19 nt, Artificial Sequence
  Description of Artificial Sequence: Synthetic oligonucleotide
ccacuauaaauuuuccaau

SEQ ID NO: 705052 - RNA, 19 nt, Artificial Sequence
  Description of Artificial Sequence: Synthetic oligonucleotide
ggcucugcucuccgagaug

SEQ ID NO: 705053 - RNA, 19 nt, Artificial Sequence
  Description of Artificial Sequence: Synthetic oligonucleotide
gguuaaugaugcguucccu

SEQ ID NO: 705054 - RNA, 19 nt, Artificial Sequence
  Description of Artificial Sequence: Synthetic oligonucleotide
ccgaccgccauguuuccca

SEQ ID NO: 705055 - RNA, 19 nt, Artificial Sequence
  Description of Artificial Sequence: Synthetic oligonucleotide
accguggauucugcacgca

SEQ ID NO: 705056 - RNA, 19 nt, Artificial Sequence
  Description of Artificial Sequence: Synthetic oligonucleotide
cugaaaccucacugaauuu

SEQ ID NO: 705057 - RNA, 19 nt, Artificial Sequence
  Description of Artificial Sequence: Synthetic oligonucleotide
ggauagaauggacgggcuu

SEQ ID NO: 705058 - RNA, 19 nt, Artificial Sequence
  Description of Artificial Sequence: Synthetic oligonucleotide
accuugggaaaggcgucua

SEQ ID NO: 705059 - RNA, 19 nt, Artificial Sequence
  Description of Artificial Sequence: Synthetic oligonucleotide
ggaaaggcgucuaacucuu

SEQ ID NO: 705060 - RNA, 19 nt, Artificial Sequence
  Description of Artificial Sequence: Synthetic oligonucleotide
ucauggcgacggugauguc

SEQ ID NO: 705061 - RNA, 19 nt, Artificial Sequence
  Description of Artificial Sequence: Synthetic oligonucleotide
ggcugccuuuccuguuagc

SEQ ID NO: 705062 - RNA, 19 nt, Artificial Sequence
  Description of Artificial Sequence: Synthetic oligonucleotide
caggacgacuucaguuugu

SEQ ID NO: 705063 - RNA, 19 nt, Artificial Sequence
  Description of Artificial Sequence: Synthetic oligonucleotide
caucugcagaugcaaccau

SEQ ID NO: 705064 - RNA, 19 nt, Artificial Sequence
  Description of Artificial Sequence: Synthetic oligonucleotide
cagucgccucaucuucaga

SEQ ID NO: 705065 - RNA, 19 nt, Artificial Sequence
  Description of Artificial Sequence: Synthetic oligonucleotide
gcuauuuaucaaugcccuu

SEQ ID NO: 705066 - RNA, 19 nt, Artificial Sequence
  Description of Artificial Sequence: Synthetic oligonucleotide
cugcacgcaucuggaguca

SEQ ID NO: 705067 - RNA, 19 nt, Artificial Sequence
  Description of Artificial Sequence: Synthetic oligonucleotide
gacgggcuuguaggaucca

SEQ ID NO: 705068 - RNA, 19 nt, Artificial Sequence
  Description of Artificial Sequence: Synthetic oligonucleotide
gcaaucuuuucagucccau

SEQ ID NO: 705069 - RNA, 19 nt, Artificial Sequence
  Description of Artificial Sequence: Synthetic oligonucleotide
uggcgacggugaugucaau

SEQ ID NO: 705070 - RNA, 19 nt, Artificial Sequence
  Description of Artificial Sequence: Synthetic oligonucleotide
ggacgacuucaguuuguau

SEQ ID NO: 705071 - RNA, 19 nt, Artificial Sequence
  Description of Artificial Sequence: Synthetic oligonucleotide
cgaccgccauguuucccag

SEQ ID NO: 705072 - RNA, 19 nt, Artificial Sequence
  Description of Artificial Sequence: Synthetic oligonucleotide
cgucuaacucuuucaccaa

SEQ ID NO: 705073 - RNA, 19 nt, Artificial Sequence
  Description of Artificial Sequence: Synthetic oligonucleotide
gccgaccgccauguuuccc

SEQ ID NO: 705074 - RNA, 19 nt, Artificial Sequence
  Description of Artificial Sequence: Synthetic oligonucleotide
cccuucuauccucuaggcu

SEQ ID NO: 705075 - RNA, 19 nt, Artificial Sequence
  Description of Artificial Sequence: Synthetic oligonucleotide
cagucccugcuuccuuuau

SEQ ID NO: 705076 - RNA, 19 nt, Artificial Sequence
  Description of Artificial Sequence: Synthetic oligonucleotide
gcguucccucucugucaca

SEQ ID NO: 705077 - RNA, 19 nt, Artificial Sequence
  Description of Artificial Sequence: Synthetic oligonucleotide
ggauugccuugcccacagu

SEQ ID NO: 705078 - RNA, 19 nt, Artificial Sequence
  Description of Artificial Sequence: Synthetic oligonucleotide
ccguggauucugcacgcau

SEQ ID NO: 705079 - RNA, 19 nt, Artificial Sequence
  Description of Artificial Sequence: Synthetic oligonucleotide
gcacgcaucuggagucagu

SEQ ID NO: 705080 - RNA, 19 nt, Artificial Sequence
  Description of Artificial Sequence: Synthetic oligonucleotide
gggugucggcugaaaucuu

SEQ ID NO: 705081 - RNA, 19 nt, Artificial Sequence
  Description of Artificial Sequence: Synthetic oligonucleotide
gcucuccgagauguuccuu

SEQ ID NO: 705082 - RNA, 19 nt, Artificial Sequence
  Description of Artificial Sequence: Synthetic oligonucleotide
aauuccuacacccagacuc

SEQ ID NO: 705083 - RNA, 19 nt, Artificial Sequence
  Description of Artificial Sequence: Synthetic oligonucleotide
ugaacuguuccucagaugc

SEQ ID NO: 705084 - RNA, 19 nt, Artificial Sequence
  Description of Artificial Sequence: Synthetic oligonucleotide
auguucaagaccuugaguc

SEQ ID NO: 705085 - RNA, 19 nt, Artificial Sequence
  Description of Artificial Sequence: Synthetic oligonucleotide
auaugguaggcacauaagc

SEQ ID NO: 705086 - RNA, 19 nt, Artificial Sequence
  Description of Artificial Sequence: Synthetic oligonucleotide
auaggaguaguaucuaugc

SEQ ID NO: 705087 - RNA, 19 nt, Artificial Sequence
  Description of Artificial Sequence: Synthetic oligonucleotide
aaaacaugggacaucgccc

SEQ ID NO: 705088 - RNA, 19 nt, Artificial Sequence
  Description of Artificial Sequence: Synthetic oligonucleotide
ucagauaucacgcuggcaa

SEQ ID NO: 705089 - RNA, 19 nt, Artificial Sequence
  Description of Artificial Sequence: Synthetic oligonucleotide
ugcuugaggagaaauaaag

SEQ ID NO: 705090 - RNA, 19 nt, Artificial Sequence
  Description of Artificial Sequence: Synthetic oligonucleotide
uguggauagaguuagggcu

SEQ ID NO: 705091 - RNA, 19 nt, Artificial Sequence
  Description of Artificial Sequence: Synthetic oligonucleotide
aauacggagccugaguucg

SEQ ID NO: 705092 - RNA, 19 nt, Artificial Sequence
  Description of Artificial Sequence: Synthetic oligonucleotide
agcuguaccucuuugcccc

SEQ ID NO: 705093 - RNA, 19 nt, Artificial Sequence
  Description of Artificial Sequence: Synthetic oligonucleotide
aagaccuugagucuugaca

SEQ ID NO: 705094 - RNA, 19 nt, Artificial Sequence
  Description of Artificial Sequence: Synthetic oligonucleotide
ugaauuuggucuuagcacu

SEQ ID NO: 705095 - RNA, 19 nt, Artificial Sequence
  Description of Artificial Sequence: Synthetic oligonucleotide
uaugguaggcacauaagcu

SEQ ID NO: 705096 - RNA, 19 nt, Artificial Sequence
  Description of Artificial Sequence: Synthetic oligonucleotide
gagggaaccaaguaacagg

SEQ ID NO: 705097 - RNA, 19 nt, Artificial Sequence
  Description of Artificial Sequence: Synthetic oligonucleotide
uaucuaugcccaauguagg

SEQ ID NO: 705098 - RNA, 19 nt, Artificial Sequence
  Description of Artificial Sequence: Synthetic oligonucleotide
agucaauggacacagguga

SEQ ID NO: 705099 - RNA, 19 nt, Artificial Sequence
  Description of Artificial Sequence: Synthetic oligonucleotide
uuuagaaauuacuggccag

SEQ ID NO: 705100 - RNA, 19 nt, Artificial Sequence
  Description of Artificial Sequence: Synthetic oligonucleotide
ugggacaucgcccaaguug

SEQ ID NO: 705101 - RNA, 19 nt, Artificial Sequence
  Description of Artificial Sequence: Synthetic oligonucleotide
aaauacggagccugaguuc

SEQ ID NO: 705102 - RNA, 19 nt, Artificial Sequence
  Description of Artificial Sequence: Synthetic oligonucleotide
uccccuaagcuucugacag

SEQ ID NO: 705103 - RNA, 19 nt, Artificial Sequence
  Description of Artificial Sequence: Synthetic oligonucleotide
ugagucaauggacacaggu

SEQ ID NO: 705104 - RNA, 19 nt, Artificial Sequence
  Description of Artificial Sequence: Synthetic oligonucleotide
ucuacagggaagcccaucc

SEQ ID NO: 705105 - RNA, 19 nt, Artificial Sequence
  Description of Artificial Sequence: Synthetic oligonucleotide
agaaaucagguaaaagccc

SEQ ID NO: 705106 - RNA, 19 nt, Artificial Sequence
  Description of Artificial Sequence: Synthetic oligonucleotide
gcagcugauaucuagagag

SEQ ID NO: 705107 - RNA, 19 nt, Artificial Sequence
  Description of Artificial Sequence: Synthetic oligonucleotide
augguaggcacauaagcuc

SEQ ID NO: 705108 - RNA, 19 nt, Artificial Sequence
  Description of Artificial Sequence: Synthetic oligonucleotide
ugauauugcgagcacucag

SEQ ID NO: 705109 - RNA, 19 nt, Artificial Sequence
  Description of Artificial Sequence: Synthetic oligonucleotide
agcgcucaaauuccgaugg

SEQ ID NO: 705110 - RNA, 19 nt, Artificial Sequence
  Description of Artificial Sequence: Synthetic oligonucleotide
auuauagaggccugccagg

SEQ ID NO: 705111 - RNA, 19 nt, Artificial Sequence
  Description of Artificial Sequence: Synthetic oligonucleotide
cauuauagaggccugccag

SEQ ID NO: 705112 - RNA, 19 nt, Artificial Sequence
  Description of Artificial Sequence: Synthetic oligonucleotide
aaacaugggacaucgccca

SEQ ID NO: 705113 - RNA, 19 nt, Artificial Sequence
  Description of Artificial Sequence: Synthetic oligonucleotide
uccucagauaucacgcugg

SEQ ID NO: 705114 - RNA, 19 nt, Artificial Sequence
  Description of Artificial Sequence: Synthetic oligonucleotide
agaggcacuagcuaccaag

SEQ ID NO: 705115 - RNA, 19 nt, Artificial Sequence
  Description of Artificial Sequence: Synthetic oligonucleotide
cuugggugacucuugaggc

SEQ ID NO: 705116 - RNA, 19 nt, Artificial Sequence
  Description of Artificial Sequence: Synthetic oligonucleotide
uuagcacucaccuugggua

SEQ ID NO: 705117 - RNA, 19 nt, Artificial Sequence
  Description of Artificial Sequence: Synthetic oligonucleotide
ugagccucaauuccuacac

SEQ ID NO: 705118 - RNA, 19 nt, Artificial Sequence
  Description of Artificial Sequence: Synthetic oligonucleotide
gauaucuagagagcagagg

SEQ ID NO: 705119 - RNA, 19 nt, Artificial Sequence
  Description of Artificial Sequence: Synthetic oligonucleotide
ugugauauugcgagcacuc

SEQ ID NO: 705120 - RNA, 19 nt, Artificial Sequence
  Description of Artificial Sequence: Synthetic oligonucleotide
agacagaaagcccaaggug

SEQ ID NO: 705121 - RNA, 19 nt, Artificial Sequence
  Description of Artificial Sequence: Synthetic oligonucleotide
accgcuuuucgccaccugc

SEQ ID NO: 705122 - RNA, 19 nt, Artificial Sequence
  Description of Artificial Sequence: Synthetic oligonucleotide
cuaguagcugagucaaugg

SEQ ID NO: 705123 - RNA, 19 nt, Artificial Sequence
  Description of Artificial Sequence: Synthetic oligonucleotide
agugcaagacagaggaucc

SEQ ID NO: 705124 - RNA, 19 nt, Artificial Sequence
  Description of Artificial Sequence: Synthetic oligonucleotide
agcgcauaggcaaauacgg

SEQ ID NO: 705125 - RNA, 19 nt, Artificial Sequence
  Description of Artificial Sequence: Synthetic oligonucleotide
gauaggaguaguaucuaug

SEQ ID NO: 705126 - RNA, 19 nt, Artificial Sequence
  Description of Artificial Sequence: Synthetic oligonucleotide
uccgauggagaaaucaggu

SEQ ID NO: 705127 - RNA, 19 nt, Artificial Sequence
  Description of Artificial Sequence: Synthetic oligonucleotide
uagaaauuacuggccagcg

SEQ ID NO: 705128 - RNA, 19 nt, Artificial Sequence
  Description of Artificial Sequence: Synthetic oligonucleotide
acaguauggagugcaagac

SEQ ID NO: 705129 - RNA, 19 nt, Artificial Sequence
  Description of Artificial Sequence: Synthetic oligonucleotide
agcguacaacaccagaaag

SEQ ID NO: 705130 - RNA, 19 nt, Artificial Sequence
  Description of Artificial Sequence: Synthetic oligonucleotide
cauaccaaucugugcaggg

SEQ ID NO: 705131 - RNA, 19 nt, Artificial Sequence
  Description of Artificial Sequence: Synthetic oligonucleotide
ggaccuaccacccucagug

SEQ ID NO: 705132 - RNA, 19 nt, Artificial Sequence
  Description of Artificial Sequence: Synthetic oligonucleotide
gacaguauggagugcaaga

SEQ ID NO: 705133 - RNA, 19 nt, Artificial Sequence
  Description of Artificial Sequence: Synthetic oligonucleotide
uuuaaucagaaggguguag

SEQ ID NO: 705134 - RNA, 19 nt, Artificial Sequence
  Description of Artificial Sequence: Synthetic oligonucleotide
auguagguugcagaggcac

SEQ ID NO: 705135 - RNA, 19 nt, Artificial Sequence
  Description of Artificial Sequence: Synthetic oligonucleotide
uguucaagaccuugagucu

SEQ ID NO: 705136 - RNA, 19 nt, Artificial Sequence
  Description of Artificial Sequence: Synthetic oligonucleotide
accauuauagaggccugcc

SEQ ID NO: 705137 - RNA, 19 nt, Artificial Sequence
  Description of Artificial Sequence: Synthetic oligonucleotide
guaguaucuaugcccaaug

SEQ ID NO: 705138 - RNA, 19 nt, Artificial Sequence
  Description of Artificial Sequence: Synthetic oligonucleotide
ggaguagugcaccugaggc

SEQ ID NO: 705139 - RNA, 19 nt, Artificial Sequence
  Description of Artificial Sequence: Synthetic oligonucleotide
aacgugguauccccacuag

SEQ ID NO: 705140 - RNA, 19 nt, Artificial Sequence
  Description of Artificial Sequence: Synthetic oligonucleotide
aaauguagccagggcuacc

SEQ ID NO: 705141 - RNA, 19 nt, Artificial Sequence
  Description of Artificial Sequence: Synthetic oligonucleotide
cagcgcauaggcaaauacg

SEQ ID NO: 705142 - RNA, 19 nt, Artificial Sequence
  Description of Artificial Sequence: Synthetic oligonucleotide
gauaugguaggcacauaag

SEQ ID NO: 705143 - RNA, 19 nt, Artificial Sequence
  Description of Artificial Sequence: Synthetic oligonucleotide
aagcgcucaaauuccgaug

SEQ ID NO: 705144 - RNA, 19 nt, Artificial Sequence
  Description of Artificial Sequence: Synthetic oligonucleotide
aacaggauaggaguaguau

SEQ ID NO: 705145 - RNA, 19 nt, Artificial Sequence
  Description of Artificial Sequence: Synthetic oligonucleotide
agggcuaccuuccgcacac

SEQ ID NO: 705146 - RNA, 19 nt, Artificial Sequence
  Description of Artificial Sequence: Synthetic oligonucleotide
uguccaacgugguaucccc

SEQ ID NO: 705147 - RNA, 19 nt, Artificial Sequence
  Description of Artificial Sequence: Synthetic oligonucleotide
aaauuacuggccagcguag

SEQ ID NO: 705148 - RNA, 19 nt, Artificial Sequence
  Description of Artificial Sequence: Synthetic oligonucleotide
aggaguagugcaccugagg

SEQ ID NO: 705149 - RNA, 19 nt, Artificial Sequence
  Description of Artificial Sequence: Synthetic oligonucleotide
uccggauacaggaguagug

SEQ ID NO: 705150 - RNA, 19 nt, Artificial Sequence
  Description of Artificial Sequence: Synthetic oligonucleotide
ugaaaugggcucacugaac

SEQ ID NO: 705151 - RNA, 19 nt, Artificial Sequence
  Description of Artificial Sequence: Synthetic oligonucleotide
gaguagugcaccugaggcc

SEQ ID NO: 705152 - RNA, 19 nt, Artificial Sequence
  Description of Artificial Sequence: Synthetic oligonucleotide
cauuuaaucagaagggugu

SEQ ID NO: 705153 - RNA, 19 nt, Artificial Sequence
  Description of Artificial Sequence: Synthetic oligonucleotide
ucggguagcucugugaugu

SEQ ID NO: 705154 - RNA, 19 nt, Artificial Sequence
  Description of Artificial Sequence: Synthetic oligonucleotide
aggccauaccaaucugugc

SEQ ID NO: 705155 - RNA, 19 nt, Artificial Sequence
  Description of Artificial Sequence: Synthetic oligonucleotide
agcgaugccacugaugucu

SEQ ID NO: 705156 - RNA, 19 nt, Artificial Sequence
  Description of Artificial Sequence: Synthetic oligonucleotide
aaacccaggccauaccaau

SEQ ID NO: 705157 - RNA, 19 nt, Artificial Sequence
  Description of Artificial Sequence: Synthetic oligonucleotide
ucuaggagggaaccaagua

SEQ ID NO: 705158 - RNA, 19 nt, Artificial Sequence
  Description of Artificial Sequence: Synthetic oligonucleotide
uuggguagugugaauacuu

SEQ ID NO: 705159 - RNA, 19 nt, Artificial Sequence
  Description of Artificial Sequence: Synthetic oligonucleotide
gcuugggugacucuugagg

SEQ ID NO: 705160 - RNA, 19 nt, Artificial Sequence
  Description of Artificial Sequence: Synthetic oligonucleotide
uaguaucuaugcccaaugu

SEQ ID NO: 705161 - RNA, 19 nt, Artificial Sequence
  Description of Artificial Sequence: Synthetic oligonucleotide
acagcaccucauuuaauca

SEQ ID NO: 705162 - RNA, 19 nt, Artificial Sequence
  Description of Artificial Sequence: Synthetic oligonucleotide
agcagaucgaggcucgaug

SEQ ID NO: 705163 - RNA, 19 nt, Artificial Sequence
  Description of Artificial Sequence: Synthetic oligonucleotide
agaaagggagucaucagca

SEQ ID NO: 705164 - RNA, 19 nt, Artificial Sequence
  Description of Artificial Sequence: Synthetic oligonucleotide
caaguaacaggauaggagu

SEQ ID NO: 705165 - RNA, 19 nt, Artificial Sequence
  Description of Artificial Sequence: Synthetic oligonucleotide
gaggcacuagcuaccaagg

SEQ ID NO: 705166 - RNA, 19 nt, Artificial Sequence
  Description of Artificial Sequence: Synthetic oligonucleotide
uucaagaccuugagucuug

SEQ ID NO: 705167 - RNA, 19 nt, Artificial Sequence
  Description of Artificial Sequence: Synthetic oligonucleotide
gugguauccccacuaguag

SEQ ID NO: 705168 - RNA, 19 nt, Artificial Sequence
  Description of Artificial Sequence: Synthetic oligonucleotide
aauggacacaggugagagu

SEQ ID NO: 705169 - RNA, 19 nt, Artificial Sequence
  Description of Artificial Sequence: Synthetic oligonucleotide
acaggaguagugcaccuga

SEQ ID NO: 705170 - RNA, 19 nt, Artificial Sequence
  Description of Artificial Sequence: Synthetic oligonucleotide
auuccgauggagaaaucag

SEQ ID NO: 705171 - RNA, 19 nt, Artificial Sequence
  Description of Artificial Sequence: Synthetic oligonucleotide
aucuaugcccaauguaggu

SEQ ID NO: 705172 - RNA, 19 nt, Artificial Sequence
  Description of Artificial Sequence: Synthetic oligonucleotide
acaucgcccaaguugguga

SEQ ID NO: 705173 - RNA, 19 nt, Artificial Sequence
  Description of Artificial Sequence: Synthetic oligonucleotide
cagcaccucauuuaaucag

SEQ ID NO: 705174 - RNA, 19 nt, Artificial Sequence
  Description of Artificial Sequence: Synthetic oligonucleotide
caauggacacaggugagag

SEQ ID NO: 705175 - RNA, 19 nt, Artificial Sequence
  Description of Artificial Sequence: Synthetic oligonucleotide
aggcaggcccuuuaaugac

SEQ ID NO: 705176 - RNA, 19 nt, Artificial Sequence
  Description of Artificial Sequence: Synthetic oligonucleotide
uagcacucaccuuggguag

SEQ ID NO: 705177 - RNA, 19 nt, Artificial Sequence
  Description of Artificial Sequence: Synthetic oligonucleotide
cacgacagccuucaugggc

SEQ ID NO: 705178 - RNA, 19 nt, Artificial Sequence
  Description of Artificial Sequence: Synthetic oligonucleotide
auaucacgcuggcaaaugu

SEQ ID NO: 705179 - RNA, 19 nt, Artificial Sequence
  Description of Artificial Sequence: Synthetic oligonucleotide
gcacauaagcuccaugugc

SEQ ID NO: 705180 - RNA, 19 nt, Artificial Sequence
  Description of Artificial Sequence: Synthetic oligonucleotide
ucaaauuccgauggagaaa

SEQ ID NO: 705181 - RNA, 19 nt, Artificial Sequence
  Description of Artificial Sequence: Synthetic oligonucleotide
ugagaguguggccucgggu

SEQ ID NO: 705182 - RNA, 19 nt, Artificial Sequence
  Description of Artificial Sequence: Synthetic oligonucleotide
agaucgaggcucgaugcgg

SEQ ID NO: 705183 - RNA, 19 nt, Artificial Sequence
  Description of Artificial Sequence: Synthetic oligonucleotide
ucuagagagcagaggggcu

SEQ ID NO: 705184 - RNA, 19 nt, Artificial Sequence
  Description of Artificial Sequence: Synthetic oligonucleotide
cgugugaagacacaggaag

SEQ ID NO: 705185 - RNA, 19 nt, Artificial Sequence
  Description of Artificial Sequence: Synthetic oligonucleotide
uaccuuccgcacacgacag

SEQ ID NO: 705186 - RNA, 19 nt, Artificial Sequence
  Description of Artificial Sequence: Synthetic oligonucleotide
acggccacgaccauccaac

SEQ ID NO: 705187 - RNA, 19 nt, Artificial Sequence
  Description of Artificial Sequence: Synthetic oligonucleotide
aaaucagguaaaagcccug

SEQ ID NO: 705188 - RNA, 19 nt, Artificial Sequence
  Description of Artificial Sequence: Synthetic oligonucleotide
ugcucagaccgcuuuucgc

SEQ ID NO: 705189 - RNA, 19 nt, Artificial Sequence
  Description of Artificial Sequence: Synthetic oligonucleotide
aacuguuccucagaugcaa

SEQ ID NO: 705190 - RNA, 19 nt, Artificial Sequence
  Description of Artificial Sequence: Synthetic oligonucleotide
ucaauggacacaggugaga

SEQ ID NO: 705191 - RNA, 19 nt, Artificial Sequence
  Description of Artificial Sequence: Synthetic oligonucleotide
ugcggcgcugcacaggugu

SEQ ID NO: 705192 - RNA, 19 nt, Artificial Sequence
  Description of Artificial Sequence: Synthetic oligonucleotide
gaaaucagguaaaagcccu

SEQ ID NO: 705193 - RNA, 19 nt, Artificial Sequence
  Description of Artificial Sequence: Synthetic oligonucleotide
ggccauaccaaucugugca

SEQ ID NO: 705194 - RNA, 19 nt, Artificial Sequence
  Description of Artificial Sequence: Synthetic oligonucleotide
cucagaugcaaugagcaca

SEQ ID NO: 705195 - RNA, 19 nt, Artificial Sequence
  Description of Artificial Sequence: Synthetic oligonucleotide
agggaaccaaguaacagga

SEQ ID NO: 705196 - RNA, 19 nt, Artificial Sequence
  Description of Artificial Sequence: Synthetic oligonucleotide
uaucacgcuggcaaaugua

SEQ ID NO: 705197 - RNA, 19 nt, Artificial Sequence
  Description of Artificial Sequence: Synthetic oligonucleotide
aagcgaugccacugauguc

SEQ ID NO: 705198 - RNA, 19 nt, Artificial Sequence
  Description of Artificial Sequence: Synthetic oligonucleotide
cuaccuuccgcacacgaca

SEQ ID NO: 705199 - RNA, 19 nt, Artificial Sequence
  Description of Artificial Sequence: Synthetic oligonucleotide
gcacuagcuaccaaggucc

SEQ ID NO: 705200 - RNA, 19 nt, Artificial Sequence
  Description of Artificial Sequence: Synthetic oligonucleotide
ugcccggugcaucagcugu

SEQ ID NO: 705201 - RNA, 19 nt, Artificial Sequence
  Description of Artificial Sequence: Synthetic oligonucleotide
aauuacuggccagcguagu

SEQ ID NO: 705202 - RNA, 19 nt, Artificial Sequence
  Description of Artificial Sequence: Synthetic oligonucleotide
uggaaccuccagcgcauag

SEQ ID NO: 705203 - RNA, 19 nt, Artificial Sequence
  Description of Artificial Sequence: Synthetic oligonucleotide
gcguacaacaccagaaagg

SEQ ID NO: 705204 - RNA, 19 nt, Artificial Sequence
  Description of Artificial Sequence: Synthetic oligonucleotide
uccaacgugguauccccac

SEQ ID NO: 705205 - RNA, 19 nt, Artificial Sequence
  Description of Artificial Sequence: Synthetic oligonucleotide
ggauaugguaggcacauaa

SEQ ID NO: 705206 - RNA, 19 nt, Artificial Sequence
  Description of Artificial Sequence: Synthetic oligonucleotide
cuaccaagguccagauagc

SEQ ID NO: 705207 - RNA, 19 nt, Artificial Sequence
  Description of Artificial Sequence: Synthetic oligonucleotide
gaugagccucaauuccuac

SEQ ID NO: 705208 - RNA, 19 nt, Artificial Sequence
  Description of Artificial Sequence: Synthetic oligonucleotide
auagaguuagggcuuccuu

SEQ ID NO: 705209 - RNA, 19 nt, Artificial Sequence
  Description of Artificial Sequence: Synthetic oligonucleotide
uaacaggauaggaguagua

SEQ ID NO: 705210 - RNA, 19 nt, Artificial Sequence
  Description of Artificial Sequence: Synthetic oligonucleotide
ggaaugacaccauuauaga

SEQ ID NO: 705211 - RNA, 19 nt, Artificial Sequence
  Description of Artificial Sequence: Synthetic oligonucleotide
gcucagaccgcuuuucgcc

SEQ ID NO: 705212 - RNA, 19 nt, Artificial Sequence
  Description of Artificial Sequence: Synthetic oligonucleotide
ccuacacccagacucagag

SEQ ID NO: 705213 - RNA, 19 nt, Artificial Sequence
  Description of Artificial Sequence: Synthetic oligonucleotide
gugaugucagcucgcuugc

SEQ ID NO: 705214 - RNA, 19 nt, Artificial Sequence
  Description of Artificial Sequence: Synthetic oligonucleotide
gguggguugcaucucgaag

SEQ ID NO: 705215 - RNA, 19 nt, Artificial Sequence
  Description of Artificial Sequence: Synthetic oligonucleotide
aguaguaucuaugcccaau

SEQ ID NO: 705216 - RNA, 19 nt, Artificial Sequence
  Description of Artificial Sequence: Synthetic oligonucleotide
caggauaggaguaguaucu

SEQ ID NO: 705217 - RNA, 19 nt, Artificial Sequence
  Description of Artificial Sequence: Synthetic oligonucleotide
gguagugugaauacuuuga

SEQ ID NO: 705218 - RNA, 19 nt, Artificial Sequence
  Description of Artificial Sequence: Synthetic oligonucleotide
uggguagugugaauacuuu

SEQ ID NO: 705219 - RNA, 19 nt, Artificial Sequence
  Description of Artificial Sequence: Synthetic oligonucleotide
gagguggcccucuaaaugu

SEQ ID NO: 705220 - RNA, 19 nt, Artificial Sequence
  Description of Artificial Sequence: Synthetic oligonucleotide
cagaucgaggcucgaugcg

SEQ ID NO: 705221 - RNA, 19 nt, Artificial Sequence
  Description of Artificial Sequence: Synthetic oligonucleotide
agaaagcccaagguggagu

SEQ ID NO: 705222 - RNA, 19 nt, Artificial Sequence
  Description of Artificial Sequence: Synthetic oligonucleotide
uggggaucuaggagggaac

SEQ ID NO: 705223 - RNA, 19 nt, Artificial Sequence
  Description of Artificial Sequence: Synthetic oligonucleotide
uuuucgccaccugcugugg

SEQ ID NO: 705224 - RNA, 19 nt, Artificial Sequence
  Description of Artificial Sequence: Synthetic oligonucleotide
ucagcucgcuugcugugga

SEQ ID NO: 705225 - RNA, 19 nt, Artificial Sequence
  Description of Artificial Sequence: Synthetic oligonucleotide
ugcgugguaaggccuggcu

SEQ ID NO: 705226 - RNA, 19 nt, Artificial Sequence
  Description of Artificial Sequence: Synthetic oligonucleotide
ugggugacucuugaggccu

SEQ ID NO: 705227 - RNA, 19 nt, Artificial Sequence
  Description of Artificial Sequence: Synthetic oligonucleotide
cuagcuaccaagguccaga

SEQ ID NO: 705228 - RNA, 19 nt, Artificial Sequence
  Description of Artificial Sequence: Synthetic oligonucleotide
gcagaucgaggcucgaugc

SEQ ID NO: 705229 - RNA, 19 nt, Artificial Sequence
  Description of Artificial Sequence: Synthetic oligonucleotide
gaauuuggucuuagcacuc

SEQ ID NO: 705230 - RNA, 19 nt, Artificial Sequence
  Description of Artificial Sequence: Synthetic oligonucleotide
auacaggaguagugcaccu

SEQ ID NO: 705231 - RNA, 19 nt, Artificial Sequence
  Description of Artificial Sequence: Synthetic oligonucleotide
ggcacuagcuaccaagguc

SEQ ID NO: 705232 - RNA, 19 nt, Artificial Sequence
  Description of Artificial Sequence: Synthetic oligonucleotide
aaauuccgauggagaaauc

SEQ ID NO: 705233 - RNA, 19 nt, Artificial Sequence
  Description of Artificial Sequence: Synthetic oligonucleotide
gaaggguguaggcccgggc

SEQ ID NO: 705234 - RNA, 19 nt, Artificial Sequence
  Description of Artificial Sequence: Synthetic oligonucleotide
caguggacggccacgacca

SEQ ID NO: 705235 - RNA, 19 nt, Artificial Sequence
  Description of Artificial Sequence: Synthetic oligonucleotide
agccugaguucgucccugc

SEQ ID NO: 705236 - RNA, 19 nt, Artificial Sequence
  Description of Artificial Sequence: Synthetic oligonucleotide
accuuccgcacacgacagc

SEQ ID NO: 705237 - RNA, 19 nt, Artificial Sequence
  Description of Artificial Sequence: Synthetic oligonucleotide
uuucgccaccugcuguggc

SEQ ID NO: 705238 - RNA, 19 nt, Artificial Sequence
  Description of Artificial Sequence: Synthetic oligonucleotide
aggugcccggugcaucagc

SEQ ID NO: 705239 - RNA, 19 nt, Artificial Sequence
  Description of Artificial Sequence: Synthetic oligonucleotide
aauguagguugcagaggca

SEQ ID NO: 705240 - RNA, 19 nt, Artificial Sequence
  Description of Artificial Sequence: Synthetic oligonucleotide
auuuaaucagaagggugua

SEQ ID NO: 705241 - RNA, 19 nt, Artificial Sequence
  Description of Artificial Sequence: Synthetic oligonucleotide
agcaccucauuuaaucaga

SEQ ID NO: 705242 - RNA, 19 nt, Artificial Sequence
  Description of Artificial Sequence: Synthetic oligonucleotide
gaucgaggcucgaugcggc

SEQ ID NO: 705243 - RNA, 19 nt, Artificial Sequence
  Description of Artificial Sequence: Synthetic oligonucleotide
ccuuuaaugacagccugag

SEQ ID NO: 705244 - RNA, 19 nt, Artificial Sequence
  Description of Artificial Sequence: Synthetic oligonucleotide
uccuacacccagacucaga

SEQ ID NO: 705245 - RNA, 19 nt, Artificial Sequence
  Description of Artificial Sequence: Synthetic oligonucleotide
gcaggucucagcauagucc

SEQ ID NO: 705246 - RNA, 19 nt, Artificial Sequence
  Description of Artificial Sequence: Synthetic oligonucleotide
uuccggauacaggaguagu

SEQ ID NO: 705247 - RNA, 19 nt, Artificial Sequence
  Description of Artificial Sequence: Synthetic oligonucleotide
aucgaggcucgaugcggcg

SEQ ID NO: 705248 - RNA, 19 nt, Artificial Sequence
  Description of Artificial Sequence: Synthetic oligonucleotide
cccucuaaauguucaagac

SEQ ID NO: 705249 - RNA, 19 nt, Artificial Sequence
  Description of Artificial Sequence: Synthetic oligonucleotide
ggcacauaagcuccaugug

SEQ ID NO: 705250 - RNA, 19 nt, Artificial Sequence
  Description of Artificial Sequence: Synthetic oligonucleotide
accaaucugugcagggcgg

SEQ ID NO: 705251 - RNA, 19 nt, Artificial Sequence
  Description of Artificial Sequence: Synthetic oligonucleotide
agguggagucuacagggaa

SEQ ID NO: 705252 - RNA, 19 nt, Artificial Sequence
  Description of Artificial Sequence: Synthetic oligonucleotide
acacgacagccuucauggg

SEQ ID NO: 705253 - RNA, 19 nt, Artificial Sequence
  Description of Artificial Sequence: Synthetic oligonucleotide
uugcaucucgaaggaaugu

SEQ ID NO: 705254 - RNA, 19 nt, Artificial Sequence
  Description of Artificial Sequence: Synthetic oligonucleotide
agcuugggugacucuugag

SEQ ID NO: 705255 - RNA, 19 nt, Artificial Sequence
  Description of Artificial Sequence: Synthetic oligonucleotide
caguauggagugcaagaca

SEQ ID NO: 705256 - RNA, 19 nt, Artificial Sequence
  Description of Artificial Sequence: Synthetic oligonucleotide
gcaguggacggccacgacc

SEQ ID NO: 705257 - RNA, 19 nt, Artificial Sequence
  Description of Artificial Sequence: Synthetic oligonucleotide
acaugggacaucgcccaag

SEQ ID NO: 705258 - RNA, 19 nt, Artificial Sequence
  Description of Artificial Sequence: Synthetic oligonucleotide
aacaugggacaucgcccaa

SEQ ID NO: 705259 - RNA, 19 nt, Artificial Sequence
  Description of Artificial Sequence: Synthetic oligonucleotide
gcuagguuggguccauagc

SEQ ID NO: 705260 - RNA, 19 nt, Artificial Sequence
  Description of Artificial Sequence: Synthetic oligonucleotide
cacugaugucuuccuuccg

SEQ ID NO: 705261 - RNA, 19 nt, Artificial Sequence
  Description of Artificial Sequence: Synthetic oligonucleotide
gaugcggcgcugcacaggu

SEQ ID NO: 705262 - RNA, 19 nt, Artificial Sequence
  Description of Artificial Sequence: Synthetic oligonucleotide
ucagaccgcuuuucgccac

SEQ ID NO: 705263 - RNA, 19 nt, Artificial Sequence
  Description of Artificial Sequence: Synthetic oligonucleotide
gucagcucgcuugcugugg

SEQ ID NO: 705264 - RNA, 19 nt, Artificial Sequence
  Description of Artificial Sequence: Synthetic oligonucleotide
caaauuccgauggagaaau

SEQ ID NO: 705265 - RNA, 19 nt, Artificial Sequence
  Description of Artificial Sequence: Synthetic oligonucleotide
aggcacuagcuaccaaggu

SEQ ID NO: 705266 - RNA, 19 nt, Artificial Sequence
  Description of Artificial Sequence: Synthetic oligonucleotide
acgugguauccccacuagu

SEQ ID NO: 705267 - RNA, 19 nt, Artificial Sequence
  Description of Artificial Sequence: Synthetic oligonucleotide
guguccaacgugguauccc

SEQ ID NO: 705268 - RNA, 19 nt, Artificial Sequence
  Description of Artificial Sequence: Synthetic oligonucleotide
caaauacggagccugaguu

SEQ ID NO: 705269 - RNA, 19 nt, Artificial Sequence
  Description of Artificial Sequence: Synthetic oligonucleotide
caccauuauagaggccugc

SEQ ID NO: 705270 - RNA, 19 nt, Artificial Sequence
  Description of Artificial Sequence: Synthetic oligonucleotide
aucuaggagggaaccaagu

SEQ ID NO: 705271 - RNA, 19 nt, Artificial Sequence
  Description of Artificial Sequence: Synthetic oligonucleotide
uagcuaccaagguccagau

SEQ ID NO: 705272 - RNA, 19 nt, Artificial Sequence
  Description of Artificial Sequence: Synthetic oligonucleotide
caagaccuugagucuugac

SEQ ID NO: 705273 - RNA, 19 nt, Artificial Sequence
  Description of Artificial Sequence: Synthetic oligonucleotide
agcaaaguagaggcagcgu

SEQ ID NO: 705274 - RNA, 19 nt, Artificial Sequence
  Description of Artificial Sequence: Synthetic oligonucleotide
uggagucuacagggaagcc

SEQ ID NO: 705275 - RNA, 19 nt, Artificial Sequence
  Description of Artificial Sequence: Synthetic oligonucleotide
aggaccuaccacccucagu

SEQ ID NO: 705276 - RNA, 19 nt, Artificial Sequence
  Description of Artificial Sequence: Synthetic oligonucleotide
ucgaugcggcgcugcacag

SEQ ID NO: 705277 - RNA, 19 nt, Artificial Sequence
  Description of Artificial Sequence: Synthetic oligonucleotide
acuagcuaccaagguccag

SEQ ID NO: 705278 - RNA, 19 nt, Artificial Sequence
  Description of Artificial Sequence: Synthetic oligonucleotide
ucauaacuguggguccccu

SEQ ID NO: 705279 - RNA, 19 nt, Artificial Sequence
  Description of Artificial Sequence: Synthetic oligonucleotide
ugaggccuauggcuggguu

SEQ ID NO: 705280 - RNA, 19 nt, Artificial Sequence
  Description of Artificial Sequence: Synthetic oligonucleotide
uggucuuagcacucaccuu

SEQ ID NO: 705281 - RNA, 19 nt, Artificial Sequence
  Description of Artificial Sequence: Synthetic oligonucleotide
ccuuggguagugugaauac

SEQ ID NO: 705282 - RNA, 19 nt, Artificial Sequence
  Description of Artificial Sequence: Synthetic oligonucleotide
caucagucagauggugaug

SEQ ID NO: 705283 - RNA, 19 nt, Artificial Sequence
  Description of Artificial Sequence: Synthetic oligonucleotide
ccggauacaggaguagugc

SEQ ID NO: 705284 - RNA, 19 nt, Artificial Sequence
  Description of Artificial Sequence: Synthetic oligonucleotide
gaacuguuccucagaugca

SEQ ID NO: 705285 - RNA, 19 nt, Artificial Sequence
  Description of Artificial Sequence: Synthetic oligonucleotide
auccccacuaguagcugag

SEQ ID NO: 705286 - RNA, 19 nt, Artificial Sequence
  Description of Artificial Sequence: Synthetic oligonucleotide
ucgaggcucgaugcggcgc

SEQ ID NO: 705287 - RNA, 19 nt, Artificial Sequence
  Description of Artificial Sequence: Synthetic oligonucleotide
auccccugugguguccaac

SEQ ID NO: 705288 - RNA, 19 nt, Artificial Sequence
  Description of Artificial Sequence: Synthetic oligonucleotide
uggccucaccccaggaaau

SEQ ID NO: 705289 - RNA, 19 nt, Artificial Sequence
  Description of Artificial Sequence: Synthetic oligonucleotide
cucagaccgcuuuucgcca

SEQ ID NO: 705290 - RNA, 19 nt, Artificial Sequence
  Description of Artificial Sequence: Synthetic oligonucleotide
cucggguagcucugugaug

SEQ ID NO: 705291 - RNA, 19 nt, Artificial Sequence
  Description of Artificial Sequence: Synthetic oligonucleotide
gauagaguuagggcuuccu

SEQ ID NO: 705292 - RNA, 19 nt, Artificial Sequence
  Description of Artificial Sequence: Synthetic oligonucleotide
acaccauuauagaggccug

SEQ ID NO: 705293 - RNA, 19 nt, Artificial Sequence
  Description of Artificial Sequence: Synthetic oligonucleotide
cagaaagcccaagguggag

SEQ ID NO: 705294 - RNA, 19 nt, Artificial Sequence
  Description of Artificial Sequence: Synthetic oligonucleotide
gaccccuagcugcccuggg

SEQ ID NO: 705295 - RNA, 19 nt, Artificial Sequence
  Description of Artificial Sequence: Synthetic oligonucleotide
ccacgaccauccaacacag

SEQ ID NO: 705296 - RNA, 19 nt, Artificial Sequence
  Description of Artificial Sequence: Synthetic oligonucleotide
agaccccuagcugcccugg

SEQ ID NO: 705297 - RNA, 19 nt, Artificial Sequence
  Description of Artificial Sequence: Synthetic oligonucleotide
gcucaaauuccgauggaga

SEQ ID NO: 705298 - RNA, 19 nt, Artificial Sequence
  Description of Artificial Sequence: Synthetic oligonucleotide
cagcguacaacaccagaaa

SEQ ID NO: 705299 - RNA, 19 nt, Artificial Sequence
  Description of Artificial Sequence: Synthetic oligonucleotide
gugauauugcgagcacuca

SEQ ID NO: 705300 - RNA, 19 nt, Artificial Sequence
  Description of Artificial Sequence: Synthetic oligonucleotide
cagauaucacgcuggcaaa

SEQ ID NO: 705301 - RNA, 19 nt, Artificial Sequence
  Description of Artificial Sequence: Synthetic oligonucleotide
gagccugaguucgucccug

SEQ ID NO: 705302 - RNA, 19 nt, Artificial Sequence
  Description of Artificial Sequence: Synthetic oligonucleotide
agcguaguccaggcauuag

SEQ ID NO: 705303 - RNA, 19 nt, Artificial Sequence
  Description of Artificial Sequence: Synthetic oligonucleotide
guaacaggauaggaguagu

SEQ ID NO: 705304 - RNA, 19 nt, Artificial Sequence
  Description of Artificial Sequence: Synthetic oligonucleotide
caaguaccaaaacugcuuu

SEQ ID NO: 705305 - RNA, 19 nt, Artificial Sequence
  Description of Artificial Sequence: Synthetic oligonucleotide
ggcaggaccuaccacccuc

SEQ ID NO: 705306 - RNA, 19 nt, Artificial Sequence
  Description of Artificial Sequence: Synthetic oligonucleotide
cagaccgcuuuucgccacc

SEQ ID NO: 705307 - RNA, 19 nt, Artificial Sequence
  Description of Artificial Sequence: Synthetic oligonucleotide
gauggaggcuugggaaaga

SEQ ID NO: 705308 - RNA, 19 nt, Artificial Sequence
  Description of Artificial Sequence: Synthetic oligonucleotide
ggggaucuaggagggaacc

SEQ ID NO: 705309 - RNA, 19 nt, Artificial Sequence
  Description of Artificial Sequence: Synthetic oligonucleotide
gaguaguaucuaugcccaa

SEQ ID NO: 705310 - RNA, 19 nt, Artificial Sequence
  Description of Artificial Sequence: Synthetic oligonucleotide
uacggagccugaguucguc

SEQ ID NO: 705311 - RNA, 19 nt, Artificial Sequence
  Description of Artificial Sequence: Synthetic oligonucleotide
ggcagcguacaacaccaga

SEQ ID NO: 705312 - RNA, 19 nt, Artificial Sequence
  Description of Artificial Sequence: Synthetic oligonucleotide
ggaagcgaugccacugaug

SEQ ID NO: 705313 - RNA, 19 nt, Artificial Sequence
  Description of Artificial Sequence: Synthetic oligonucleotide
ccucagauaucacgcuggc

SEQ ID NO: 705314 - RNA, 19 nt, Artificial Sequence
  Description of Artificial Sequence: Synthetic oligonucleotide
gacggccacgaccauccaa

SEQ ID NO: 705315 - RNA, 19 nt, Artificial Sequence
  Description of Artificial Sequence: Synthetic oligonucleotide
ucgucccugcccacauggu

SEQ ID NO: 705316 - RNA, 19 nt, Artificial Sequence
  Description of Artificial Sequence: Synthetic oligonucleotide
gcagcguacaacaccagaa

SEQ ID NO: 705317 - RNA, 19 nt, Artificial Sequence
  Description of Artificial Sequence: Synthetic oligonucleotide
caacgugguauccccacua

SEQ ID NO: 705318 - RNA, 19 nt, Artificial Sequence
  Description of Artificial Sequence: Synthetic oligonucleotide
cacgaccauccaacacagc

SEQ ID NO: 705319 - RNA, 19 nt, Artificial Sequence
  Description of Artificial Sequence: Synthetic oligonucleotide
gcaaauacggagccugagu

SEQ ID NO: 705320 - RNA, 19 nt, Artificial Sequence
  Description of Artificial Sequence: Synthetic oligonucleotide
ccacauggugggcccaugg

SEQ ID NO: 705321 - RNA, 19 nt, Artificial Sequence
  Description of Artificial Sequence: Synthetic oligonucleotide
gaccgcuuuucgccaccug

SEQ ID NO: 705322 - RNA, 19 nt, Artificial Sequence
  Description of Artificial Sequence: Synthetic oligonucleotide
ggggugggaagaccccuag

SEQ ID NO: 705323 - RNA, 19 nt, Artificial Sequence
  Description of Artificial Sequence: Synthetic oligonucleotide
ggugagaguguggccucgg

SEQ ID NO: 705324 - RNA, 19 nt, Artificial Sequence
  Description of Artificial Sequence: Synthetic oligonucleotide
cacuagcuaccaaggucca

SEQ ID NO: 705325 - RNA, 19 nt, Artificial Sequence
  Description of Artificial Sequence: Synthetic oligonucleotide
agagcaaacccaggccaua

SEQ ID NO: 705326 - RNA, 19 nt, Artificial Sequence
  Description of Artificial Sequence: Synthetic oligonucleotide
ccacccucagugacugucc

SEQ ID NO: 705327 - RNA, 19 nt, Artificial Sequence
  Description of Artificial Sequence: Synthetic oligonucleotide
agcacucaccuuggguagu

SEQ ID NO: 705328 - RNA, 19 nt, Artificial Sequence
  Description of Artificial Sequence: Synthetic oligonucleotide
caugggacaucgcccaagu

SEQ ID NO: 705329 - RNA, 19 nt, Artificial Sequence
  Description of Artificial Sequence: Synthetic oligonucleotide
guucaagaccuugagucuu

SEQ ID NO: 705330 - RNA, 19 nt, Artificial Sequence
  Description of Artificial Sequence: Synthetic oligonucleotide
cuuggguagugugaauacu

SEQ ID NO: 705331 - RNA, 19 nt, Artificial Sequence
  Description of Artificial Sequence: Synthetic oligonucleotide
gguguccaacgugguaucc

SEQ ID NO: 705332 - RNA, 19 nt, Artificial Sequence
  Description of Artificial Sequence: Synthetic oligonucleotide
guaccucuuugccccagua

SEQ ID NO: 705333 - RNA, 19 nt, Artificial Sequence
  Description of Artificial Sequence: Synthetic oligonucleotide
aggcaaauacggagccuga

SEQ ID NO: 705334 - RNA, 19 nt, Artificial Sequence
  Description of Artificial Sequence: Synthetic oligonucleotide
gucuacagggaagcccauc

SEQ ID NO: 705335 - RNA, 19 nt, Artificial Sequence
  Description of Artificial Sequence: Synthetic oligonucleotide
gugcccggugcaucagcug

SEQ ID NO: 705336 - RNA, 19 nt, Artificial Sequence
  Description of Artificial Sequence: Synthetic oligonucleotide
ccauuauagaggccugcca

SEQ ID NO: 705337 - RNA, 19 nt, Artificial Sequence
  Description of Artificial Sequence: Synthetic oligonucleotide
gcuaccuuccgcacacgac

SEQ ID NO: 705338 - RNA, 19 nt, Artificial Sequence
  Description of Artificial Sequence: Synthetic oligonucleotide
cgcucaaauuccgauggag

SEQ ID NO: 705339 - RNA, 19 nt, Artificial Sequence
  Description of Artificial Sequence: Synthetic oligonucleotide
ggccacgaccauccaacac

SEQ ID NO: 705340 - RNA, 19 nt, Artificial Sequence
  Description of Artificial Sequence: Synthetic oligonucleotide
cuguaccucuuugccccag

SEQ ID NO: 705341 - RNA, 19 nt, Artificial Sequence
  Description of Artificial Sequence: Synthetic oligonucleotide
cagggcuaccuuccgcaca

SEQ ID NO: 705342 - RNA, 19 nt, Artificial Sequence
  Description of Artificial Sequence: Synthetic oligonucleotide
guggauagaguuagggcuu

SEQ ID NO: 705343 - RNA, 19 nt, Artificial Sequence
  Description of Artificial Sequence: Synthetic oligonucleotide
augggacaucgcccaaguu

SEQ ID NO: 705344 - RNA, 19 nt, Artificial Sequence
  Description of Artificial Sequence: Synthetic oligonucleotide
cgugguauccccacuagua

SEQ ID NO: 705345 - RNA, 19 nt, Artificial Sequence
  Description of Artificial Sequence: Synthetic oligonucleotide
gggugggaagaccccuagc

SEQ ID NO: 705346 - RNA, 19 nt, Artificial Sequence
  Description of Artificial Sequence: Synthetic oligonucleotide
ggcaguagucagaagggcu

SEQ ID NO: 705347 - RNA, 19 nt, Artificial Sequence
  Description of Artificial Sequence: Synthetic oligonucleotide
gguugcagaggcacuagcu

SEQ ID NO: 705348 - RNA, 19 nt, Artificial Sequence
  Description of Artificial Sequence: Synthetic oligonucleotide
agaccgcuuuucgccaccu

SEQ ID NO: 705349 - RNA, 19 nt, Artificial Sequence
  Description of Artificial Sequence: Synthetic oligonucleotide
aggacaguauggagugcaa

SEQ ID NO: 705350 - RNA, 19 nt, Artificial Sequence
  Description of Artificial Sequence: Synthetic oligonucleotide
ggauagaguuagggcuucc

SEQ ID NO: 705351 - RNA, 19 nt, Artificial Sequence
  Description of Artificial Sequence: Synthetic oligonucleotide
gcaaguaccaaaacugcuu

SEQ ID NO: 705352 - RNA, 19 nt, Artificial Sequence
  Description of Artificial Sequence: Synthetic oligonucleotide
gccagcguaguccaggcau

SEQ ID NO: 705353 - RNA, 19 nt, Artificial Sequence
  Description of Artificial Sequence: Synthetic oligonucleotide
cuggguuggguggcauuuc

SEQ ID NO: 705354 - RNA, 19 nt, Artificial Sequence
  Description of Artificial Sequence: Synthetic oligonucleotide
ccccuaagcuucugacagc

SEQ ID NO: 705355 - RNA, 19 nt, Artificial Sequence
  Description of Artificial Sequence: Synthetic oligonucleotide
ggguagcucugugauguca

SEQ ID NO: 705356 - RNA, 19 nt, Artificial Sequence
  Description of Artificial Sequence: Synthetic oligonucleotide
cuggcucagcuugggugac

SEQ ID NO: 705357 - RNA, 19 nt, Artificial Sequence
  Description of Artificial Sequence: Synthetic oligonucleotide
gcuuuucgccaccugcugu

SEQ ID NO: 705358 - RNA, 19 nt, Artificial Sequence
  Description of Artificial Sequence: Synthetic oligonucleotide
gccucggguagcucuguga

SEQ ID NO: 705359 - RNA, 19 nt, Artificial Sequence
  Description of Artificial Sequence: Synthetic oligonucleotide
gcccaugguggguugcauc

SEQ ID NO: 705360 - RNA, 19 nt, Artificial Sequence
  Description of Artificial Sequence: Synthetic oligonucleotide
gcacucaccuuggguagug

SEQ ID NO: 705361 - RNA, 19 nt, Artificial Sequence
  Description of Artificial Sequence: Synthetic oligonucleotide
cggauacaggaguagugca

SEQ ID NO: 705362 - RNA, 19 nt, Artificial Sequence
  Description of Artificial Sequence: Synthetic oligonucleotide
ugcccacauggugggccca

SEQ ID NO: 705363 - RNA, 19 nt, Artificial Sequence
  Description of Artificial Sequence: Synthetic oligonucleotide
auacggagccugaguucgu

SEQ ID NO: 705364 - RNA, 19 nt, Artificial Sequence
  Description of Artificial Sequence: Synthetic oligonucleotide
guccaacgugguaucccca

SEQ ID NO: 705365 - RNA, 19 nt, Artificial Sequence
  Description of Artificial Sequence: Synthetic oligonucleotide
gcgcauaggcaaauacgga

SEQ ID NO: 705366 - RNA, 19 nt, Artificial Sequence
  Description of Artificial Sequence: Synthetic oligonucleotide
gcagaggcacuagcuacca

SEQ ID NO: 705367 - RNA, 19 nt, Artificial Sequence
  Description of Artificial Sequence: Synthetic oligonucleotide
ccgauggagaaaucaggua

SEQ ID NO: 705368 - RNA, 19 nt, Artificial Sequence
  Description of Artificial Sequence: Synthetic oligonucleotide
agguggcccucuaaauguu

SEQ ID NO: 705369 - RNA, 19 nt, Artificial Sequence
  Description of Artificial Sequence: Synthetic oligonucleotide
cugugacauccccuguggu

SEQ ID NO: 705370 - RNA, 19 nt, Artificial Sequence
  Description of Artificial Sequence: Synthetic oligonucleotide
ccucagugacuguccugug

SEQ ID NO: 705371 - RNA, 19 nt, Artificial Sequence
  Description of Artificial Sequence: Synthetic oligonucleotide
cgcuuuucgccaccugcug

SEQ ID NO: 705372 - RNA, 19 nt, Artificial Sequence
  Description of Artificial Sequence: Synthetic oligonucleotide
gcuguaccucuuugcccca

SEQ ID NO: 705373 - RNA, 19 nt, Artificial Sequence
  Description of Artificial Sequence: Synthetic oligonucleotide
cagccuucaugggcuguca

SEQ ID NO: 705374 - RNA, 19 nt, Artificial Sequence
  Description of Artificial Sequence: Synthetic oligonucleotide
ggagccugaguucgucccu

SEQ ID NO: 705375 - RNA, 19 nt, Artificial Sequence
  Description of Artificial Sequence: Synthetic oligonucleotide
ggccucaccccaggaaauc

SEQ ID NO: 705376 - RNA, 19 nt, Artificial Sequence
  Description of Artificial Sequence: Synthetic oligonucleotide
gcgugugaagacacaggaa

SEQ ID NO: 705377 - RNA, 19 nt, Artificial Sequence
  Description of Artificial Sequence: Synthetic oligonucleotide
gugauguuucuggucccau

SEQ ID NO: 705378 - RNA, 19 nt, Artificial Sequence
  Description of Artificial Sequence: Synthetic oligonucleotide
gcgcucaaauuccgaugga

SEQ ID NO: 705379 - RNA, 19 nt, Artificial Sequence
  Description of Artificial Sequence: Synthetic oligonucleotide
cccuaagcuucugacagcu

SEQ ID NO: 705380 - RNA, 19 nt, Artificial Sequence
  Description of Artificial Sequence: Synthetic oligonucleotide
ccucggguagcucugugau

SEQ ID NO: 705381 - RNA, 19 nt, Artificial Sequence
  Description of Artificial Sequence: Synthetic oligonucleotide
ccuccagcgcauaggcaaa

SEQ ID NO: 705382 - RNA, 19 nt, Artificial Sequence
  Description of Artificial Sequence: Synthetic oligonucleotide
gggcuaccuuccgcacacg

SEQ ID NO: 705383 - RNA, 19 nt, Artificial Sequence
  Description of Artificial Sequence: Synthetic oligonucleotide
ccgcuuuucgccaccugcu

SEQ ID NO: 705384 - RNA, 19 nt, Artificial Sequence
  Description of Artificial Sequence: Synthetic oligonucleotide
cccuuucauaacugugggu

SEQ ID NO: 705385 - RNA, 19 nt, Artificial Sequence
  Description of Artificial Sequence: Synthetic oligonucleotide
caccuuggguagugugaau

SEQ ID NO: 705386 - RNA, 19 nt, Artificial Sequence
  Description of Artificial Sequence: Synthetic oligonucleotide
ccaacgugguauccccacu

SEQ ID NO: 705387 - RNA, 19 nt, Artificial Sequence
  Description of Artificial Sequence: Synthetic oligonucleotide
gggaaccaaguaacaggau

SEQ ID NO: 705388 - RNA, 19 nt, Artificial Sequence
  Description of Artificial Sequence: Synthetic oligonucleotide
ggagugcaagacagaggau

SEQ ID NO: 705389 - RNA, 19 nt, Artificial Sequence
  Description of Artificial Sequence: Synthetic oligonucleotide
ggacggccacgaccaucca

SEQ ID NO: 705390 - RNA, 19 nt, Artificial Sequence
  Description of Artificial Sequence: Synthetic oligonucleotide
cuccagcgcauaggcaaau

SEQ ID NO: 705391 - RNA, 19 nt, Artificial Sequence
  Description of Artificial Sequence: Synthetic oligonucleotide
ggugacucuugaggccuau

SEQ ID NO: 705392 - RNA, 19 nt, Artificial Sequence
  Description of Artificial Sequence: Synthetic oligonucleotide
cagcucgcuugcuguggau

SEQ ID NO: 705393 - RNA, 19 nt, Artificial Sequence
  Description of Artificial Sequence: Synthetic oligonucleotide
ccagcguaguccaggcauu

SEQ ID NO: 705394 - RNA, 19 nt, Artificial Sequence
  Description of Artificial Sequence: Synthetic oligonucleotide
gcggcgcugcacagguguc

SEQ ID NO: 705395 - RNA, 19 nt, Artificial Sequence
  Description of Artificial Sequence: Synthetic oligonucleotide
ggacaucgcccaaguuggu

SEQ ID NO: 705396 - RNA, 19 nt, Artificial Sequence
  Description of Artificial Sequence: Synthetic oligonucleotide
cgaggcucgaugcggcgcu

SEQ ID NO: 705397 - RNA, 19 nt, Artificial Sequence
  Description of Artificial Sequence: Synthetic oligonucleotide
cggccacgaccauccaaca

SEQ ID NO: 705398 - RNA, 19 nt, Artificial Sequence
  Description of Artificial Sequence: Synthetic oligonucleotide
ggcccaugguggguugcau

SEQ ID NO: 705399 - RNA, 19 nt, Artificial Sequence
  Description of Artificial Sequence: Synthetic oligonucleotide
cgcacacgacagccuucau

SEQ ID NO: 705400 - RNA, 19 nt, Artificial Sequence
  Description of Artificial Sequence: Synthetic oligonucleotide
aauacuuuuagguaacugc

SEQ ID NO: 705401 - RNA, 19 nt, Artificial Sequence
  Description of Artificial Sequence: Synthetic oligonucleotide
aaugcuggcacguucaauc

SEQ ID NO: 705402 - RNA, 19 nt, Artificial Sequence
  Description of Artificial Sequence: Synthetic oligonucleotide
acuaguaaagcucuccugc

SEQ ID NO: 705403 - RNA, 19 nt, Artificial Sequence
  Description of Artificial Sequence: Synthetic oligonucleotide
agaguuguaaauugaagac

SEQ ID NO: 705404 - RNA, 19 nt, Artificial Sequence
  Description of Artificial Sequence: Synthetic oligonucleotide
aucuauauaagccucauca

SEQ ID NO: 705405 - RNA, 19 nt, Artificial Sequence
  Description of Artificial Sequence: Synthetic oligonucleotide
uauauaagccucaucaaug

SEQ ID NO: 705406 - RNA, 19 nt, Artificial Sequence
  Description of Artificial Sequence: Synthetic oligonucleotide
uaaagaagggcucaauucc

SEQ ID NO: 705407 - RNA, 19 nt, Artificial Sequence
  Description of Artificial Sequence: Synthetic oligonucleotide
uccgaaaugacucuguagc

SEQ ID NO: 705408 - RNA, 19 nt, Artificial Sequence
  Description of Artificial Sequence: Synthetic oligonucleotide
aaauugaagacucaagcau

SEQ ID NO: 705409 - RNA, 19 nt, Artificial Sequence
  Description of Artificial Sequence: Synthetic oligonucleotide
auauaagccucaucaaugc

SEQ ID NO: 705410 - RNA, 19 nt, Artificial Sequence
  Description of Artificial Sequence: Synthetic oligonucleotide
aaaacgcuuucauaaggcg

SEQ ID NO: 705411 - RNA, 19 nt, Artificial Sequence
  Description of Artificial Sequence: Synthetic oligonucleotide
aacacuagcuucccgguac

SEQ ID NO: 705412 - RNA, 19 nt, Artificial Sequence
  Description of Artificial Sequence: Synthetic oligonucleotide
aaaaugauagucugugugu

SEQ ID NO: 705413 - RNA, 19 nt, Artificial Sequence
  Description of Artificial Sequence: Synthetic oligonucleotide
aagacugcggauuuuacga

SEQ ID NO: 705414 - RNA, 19 nt, Artificial Sequence
  Description of Artificial Sequence: Synthetic oligonucleotide
aguauuacaauuccugaug

SEQ ID NO: 705415 - RNA, 19 nt, Artificial Sequence
  Description of Artificial Sequence: Synthetic oligonucleotide
uucaacacuagcuucccgg

SEQ ID NO: 705416 - RNA, 19 nt, Artificial Sequence
  Description of Artificial Sequence: Synthetic oligonucleotide
uuuacgaauuggcaucugg

SEQ ID NO: 705417 - RNA, 19 nt, Artificial Sequence
  Description of Artificial Sequence: Synthetic oligonucleotide
cuccaaugcaaaaugauag

SEQ ID NO: 705418 - RNA, 19 nt, Artificial Sequence
  Description of Artificial Sequence: Synthetic oligonucleotide
agcaaagugagacauuauc

SEQ ID NO: 705419 - RNA, 19 nt, Artificial Sequence
  Description of Artificial Sequence: Synthetic oligonucleotide
aaacgcacgagcuucauaa

SEQ ID NO: 705420 - RNA, 19 nt, Artificial Sequence
  Description of Artificial Sequence: Synthetic oligonucleotide
ugagauuugccguuguucc

SEQ ID NO: 705421 - RNA, 19 nt, Artificial Sequence
  Description of Artificial Sequence: Synthetic oligonucleotide
guauuacaauuccugaugg

SEQ ID NO: 705422 - RNA, 19 nt, Artificial Sequence
  Description of Artificial Sequence: Synthetic oligonucleotide
uuacaauuccugauggcag

SEQ ID NO: 705423 - RNA, 19 nt, Artificial Sequence
  Description of Artificial Sequence: Synthetic oligonucleotide
gauuuuacgaauuggcauc

SEQ ID NO: 705424 - RNA, 19 nt, Artificial Sequence
  Description of Artificial Sequence: Synthetic oligonucleotide
ucuuacuacagccaauacu

SEQ ID NO: 705425 - RNA, 19 nt, Artificial Sequence
  Description of Artificial Sequence: Synthetic oligonucleotide
agguuuauuccucaaauga

SEQ ID NO: 705426 - RNA, 19 nt, Artificial Sequence
  Description of Artificial Sequence: Synthetic oligonucleotide
guucuagugaccccaaacg

SEQ ID NO: 705427 - RNA, 19 nt, Artificial Sequence
  Description of Artificial Sequence: Synthetic oligonucleotide
aauuacuaagcugugucug

SEQ ID NO: 705428 - RNA, 19 nt, Artificial Sequence
  Description of Artificial Sequence: Synthetic oligonucleotide
agcauuaaugugucaacgg

SEQ ID NO: 705429 - RNA, 19 nt, Artificial Sequence
  Description of Artificial Sequence: Synthetic oligonucleotide
uuaugagcaucauauugag

SEQ ID NO: 705430 - RNA, 19 nt, Artificial Sequence
  Description of Artificial Sequence: Synthetic oligonucleotide
uuuuaugacagugucuccc

SEQ ID NO: 705431 - RNA, 19 nt, Artificial Sequence
  Description of Artificial Sequence: Synthetic oligonucleotide
uggacauaacuucuuagca

SEQ ID NO: 705432 - RNA, 19 nt, Artificial Sequence
  Description of Artificial Sequence: Synthetic oligonucleotide
ucaacaugauuuuaucucu

SEQ ID NO: 705433 - RNA, 19 nt, Artificial Sequence
  Description of Artificial Sequence: Synthetic oligonucleotide
aacgcuuucauaaggcggg

SEQ ID NO: 705434 - RNA, 19 nt, Artificial Sequence
  Description of Artificial Sequence: Synthetic oligonucleotide
uuuaaccuaauuuuguauu

SEQ ID NO: 705435 - RNA, 19 nt, Artificial Sequence
  Description of Artificial Sequence: Synthetic oligonucleotide
gaggggaccacucaguuug

SEQ ID NO: 705436 - RNA, 19 nt, Artificial Sequence
  Description of Artificial Sequence: Synthetic oligonucleotide
aaauuuaaccuaauuuugu

SEQ ID NO: 705437 - RNA, 19 nt, Artificial Sequence
  Description of Artificial Sequence: Synthetic oligonucleotide
gacauaacuucuuagcauc

SEQ ID NO: 705438 - RNA, 19 nt, Artificial Sequence
  Description of Artificial Sequence: Synthetic oligonucleotide
aauugaagacucaagcaug

SEQ ID NO: 705439 - RNA, 19 nt, Artificial Sequence
  Description of Artificial Sequence: Synthetic oligonucleotide
aucauguucaaucccucgg

SEQ ID NO: 705440 - RNA, 19 nt, Artificial Sequence
  Description of Artificial Sequence: Synthetic oligonucleotide
aaguauuacaauuccugau

SEQ ID NO: 705441 - RNA, 19 nt, Artificial Sequence
  Description of Artificial Sequence: Synthetic oligonucleotide
uuacgaauuggcaucuggc

SEQ ID NO: 705442 - RNA, 19 nt, Artificial Sequence
  Description of Artificial Sequence: Synthetic oligonucleotide
acaacuugagucauuacuc

SEQ ID NO: 705443 - RNA, 19 nt, Artificial Sequence
  Description of Artificial Sequence: Synthetic oligonucleotide
acugccuggguuuaacugg

SEQ ID NO: 705444 - RNA, 19 nt, Artificial Sequence
  Description of Artificial Sequence: Synthetic oligonucleotide
ugccaugaauccuaaggcg

SEQ ID NO: 705445 - RNA, 19 nt, Artificial Sequence
  Description of Artificial Sequence: Synthetic oligonucleotide
ucuagugaccccaaacgca

SEQ ID NO: 705446 - RNA, 19 nt, Artificial Sequence
  Description of Artificial Sequence: Synthetic oligonucleotide
agaaguauuacaauuccug

SEQ ID NO: 705447 - RNA, 19 nt, Artificial Sequence
  Description of Artificial Sequence: Synthetic oligonucleotide
uuuuagguaacugccuggg

SEQ ID NO: 705448 - RNA, 19 nt, Artificial Sequence
  Description of Artificial Sequence: Synthetic oligonucleotide
aaacgcuuucauaaggcgg

SEQ ID NO: 705449 - RNA, 19 nt, Artificial Sequence
  Description of Artificial Sequence: Synthetic oligonucleotide
uucuagugaccccaaacgc

SEQ ID NO: 705450 - RNA, 19 nt, Artificial Sequence
  Description of Artificial Sequence: Synthetic oligonucleotide
ugcaauaauuccaccaccu

SEQ ID NO: 705451 - RNA, 19 nt, Artificial Sequence
  Description of Artificial Sequence: Synthetic oligonucleotide
ggauucacgaacuugggcc

SEQ ID NO: 705452 - RNA, 19 nt, Artificial Sequence
  Description of Artificial Sequence: Synthetic oligonucleotide
cuggacauaacuucuuagc

SEQ ID NO: 705453 - RNA, 19 nt, Artificial Sequence
  Description of Artificial Sequence: Synthetic oligonucleotide
cuuaugagcaucauauuga

SEQ ID NO: 705454 - RNA, 19 nt, Artificial Sequence
  Description of Artificial Sequence: Synthetic oligonucleotide
aaucccucggcacauggca

SEQ ID NO: 705455 - RNA, 19 nt, Artificial Sequence
  Description of Artificial Sequence: Synthetic oligonucleotide
uguucuagugaccccaaac

SEQ ID NO: 705456 - RNA, 19 nt, Artificial Sequence
  Description of Artificial Sequence: Synthetic oligonucleotide
ucauguucaaucccucggc

SEQ ID NO: 705457 - RNA, 19 nt, Artificial Sequence
  Description of Artificial Sequence: Synthetic oligonucleotide
ugauuuguacuguacgacu

SEQ ID NO: 705458 - RNA, 19 nt, Artificial Sequence
  Description of Artificial Sequence: Synthetic oligonucleotide
cucaguugcccuuugggcc

SEQ ID NO: 705459 - RNA, 19 nt, Artificial Sequence
  Description of Artificial Sequence: Synthetic oligonucleotide
acuuuuagguaacugccug

SEQ ID NO: 705460 - RNA, 19 nt, Artificial Sequence
  Description of Artificial Sequence: Synthetic oligonucleotide
uggaucauguucaaucccu

SEQ ID NO: 705461 - RNA, 19 nt, Artificial Sequence
  Description of Artificial Sequence: Synthetic oligonucleotide
aggguacugacuccaaaac

SEQ ID NO: 705462 - RNA, 19 nt, Artificial Sequence
  Description of Artificial Sequence: Synthetic oligonucleotide
ucagaucuauauaagccuc

SEQ ID NO: 705463 - RNA, 19 nt, Artificial Sequence
  Description of Artificial Sequence: Synthetic oligonucleotide
auuuaaccuaauuuuguau

SEQ ID NO: 705464 - RNA, 19 nt, Artificial Sequence
  Description of Artificial Sequence: Synthetic oligonucleotide
cagaguuguaaauugaaga

SEQ ID NO: 705465 - RNA, 19 nt, Artificial Sequence
  Description of Artificial Sequence: Synthetic oligonucleotide
caucugcacacucaguugg

SEQ ID NO: 705466 - RNA, 19 nt, Artificial Sequence
  Description of Artificial Sequence: Synthetic oligonucleotide
uggcaugucccauacuggg

SEQ ID NO: 705467 - RNA, 19 nt, Artificial Sequence
  Description of Artificial Sequence: Synthetic oligonucleotide
gucugugcaagaugaaggg

SEQ ID NO: 705468 - RNA, 19 nt, Artificial Sequence
  Description of Artificial Sequence: Synthetic oligonucleotide
guuuugaaguacaaggcug

SEQ ID NO: 705469 - RNA, 19 nt, Artificial Sequence
  Description of Artificial Sequence: Synthetic oligonucleotide
uuaaccuaauuuuguauua

SEQ ID NO: 705470 - RNA, 19 nt, Artificial Sequence
  Description of Artificial Sequence: Synthetic oligonucleotide
aaguucuuacuacagccaa

SEQ ID NO: 705471 - RNA, 19 nt, Artificial Sequence
  Description of Artificial Sequence: Synthetic oligonucleotide
auccuaaggcguuuauuac

SEQ ID NO: 705472 - RNA, 19 nt, Artificial Sequence
  Description of Artificial Sequence: Synthetic oligonucleotide
caagacugcggauuuuacg

SEQ ID NO: 705473 - RNA, 19 nt, Artificial Sequence
  Description of Artificial Sequence: Synthetic oligonucleotide
ucaaucccucggcacaugg

SEQ ID NO: 705474 - RNA, 19 nt, Artificial Sequence
  Description of Artificial Sequence: Synthetic oligonucleotide
ugagguuagcuuucccacg

SEQ ID NO: 705475 - RNA, 19 nt, Artificial Sequence
  Description of Artificial Sequence: Synthetic oligonucleotide
cugggucuuaguuucagag

SEQ ID NO: 705476 - RNA, 19 nt, Artificial Sequence
  Description of Artificial Sequence: Synthetic oligonucleotide
guagcgagggcuugggugg

SEQ ID NO: 705477 - RNA, 19 nt, Artificial Sequence
  Description of Artificial Sequence: Synthetic oligonucleotide
gauuccagaaguauuacaa

SEQ ID NO: 705478 - RNA, 19 nt, Artificial Sequence
  Description of Artificial Sequence: Synthetic oligonucleotide
ggugacuugucugugaacg

SEQ ID NO: 705479 - RNA, 19 nt, Artificial Sequence
  Description of Artificial Sequence: Synthetic oligonucleotide
ucccauacugggacuaagg

SEQ ID NO: 705480 - RNA, 19 nt, Artificial Sequence
  Description of Artificial Sequence: Synthetic oligonucleotide
acuaaggagucacacuucu

SEQ ID NO: 705481 - RNA, 19 nt, Artificial Sequence
  Description of Artificial Sequence: Synthetic oligonucleotide
uguuccacuuggaacaaaa

SEQ ID NO: 705482 - RNA, 19 nt, Artificial Sequence
  Description of Artificial Sequence: Synthetic oligonucleotide
aaguuacuaguaaagcucu

SEQ ID NO: 705483 - RNA, 19 nt, Artificial Sequence
  Description of Artificial Sequence: Synthetic oligonucleotide
uguacucuaccccaaggau

SEQ ID NO: 705484 - RNA, 19 nt, Artificial Sequence
  Description of Artificial Sequence: Synthetic oligonucleotide
gggucuuaguuucagagcc

SEQ ID NO: 705485 - RNA, 19 nt, Artificial Sequence
  Description of Artificial Sequence: Synthetic oligonucleotide
uacgaauuggcaucuggcu

SEQ ID NO: 705486 - RNA, 19 nt, Artificial Sequence
  Description of Artificial Sequence: Synthetic oligonucleotide
uuuaugacagugucucccu

SEQ ID NO: 705487 - RNA, 19 nt, Artificial Sequence
  Description of Artificial Sequence: Synthetic oligonucleotide
uaaggcguuuauuacugga

SEQ ID NO: 705488 - RNA, 19 nt, Artificial Sequence
  Description of Artificial Sequence: Synthetic oligonucleotide
cuagugaccccaaacgcac

SEQ ID NO: 705489 - RNA, 19 nt, Artificial Sequence
  Description of Artificial Sequence: Synthetic oligonucleotide
cuucaauguacgugguggg

SEQ ID NO: 705490 - RNA, 19 nt, Artificial Sequence
  Description of Artificial Sequence: Synthetic oligonucleotide
acugggacuaaggagucac

SEQ ID NO: 705491 - RNA, 19 nt, Artificial Sequence
  Description of Artificial Sequence: Synthetic oligonucleotide
caucauauugagugagggc

SEQ ID NO: 705492 - RNA, 19 nt, Artificial Sequence
  Description of Artificial Sequence: Synthetic oligonucleotide
agucuggcgguucuucuac

SEQ ID NO: 705493 - RNA, 19 nt, Artificial Sequence
  Description of Artificial Sequence: Synthetic oligonucleotide
uguaccugaucccgaguag

SEQ ID NO: 705494 - RNA, 19 nt, Artificial Sequence
  Description of Artificial Sequence: Synthetic oligonucleotide
guuacuaguaaagcucucc

SEQ ID NO: 705495 - RNA, 19 nt, Artificial Sequence
  Description of Artificial Sequence: Synthetic oligonucleotide
ugugcaagaugaaggggca

SEQ ID NO: 705496 - RNA, 19 nt, Artificial Sequence
  Description of Artificial Sequence: Synthetic oligonucleotide
uccuaaggcguuuauuacu

SEQ ID NO: 705497 - RNA, 19 nt, Artificial Sequence
  Description of Artificial Sequence: Synthetic oligonucleotide
acagccaugauccauucuu

SEQ ID NO: 705498 - RNA, 19 nt, Artificial Sequence
  Description of Artificial Sequence: Synthetic oligonucleotide
acguuugucuccuuguaca

SEQ ID NO: 705499 - RNA, 19 nt, Artificial Sequence
  Description of Artificial Sequence: Synthetic oligonucleotide
agauuugccguuguuccac

SEQ ID NO: 705500 - RNA, 19 nt, Artificial Sequence
  Description of Artificial Sequence: Synthetic oligonucleotide
caucuuaugagcaucauau

SEQ ID NO: 705501 - RNA, 19 nt, Artificial Sequence
  Description of Artificial Sequence: Synthetic oligonucleotide
aacgcacgagcuucauaac

SEQ ID NO: 705502 - RNA, 19 nt, Artificial Sequence
  Description of Artificial Sequence: Synthetic oligonucleotide
uuauuacuggaagccaaag

SEQ ID NO: 705503 - RNA, 19 nt, Artificial Sequence
  Description of Artificial Sequence: Synthetic oligonucleotide
aggcguuuauuacuggaag

SEQ ID NO: 705504 - RNA, 19 nt, Artificial Sequence
  Description of Artificial Sequence: Synthetic oligonucleotide
uacucuaccccaaggauuu

SEQ ID NO: 705505 - RNA, 19 nt, Artificial Sequence
  Description of Artificial Sequence: Synthetic oligonucleotide
ucaaaugagauuugccguu

SEQ ID NO: 705506 - RNA, 19 nt, Artificial Sequence
  Description of Artificial Sequence: Synthetic oligonucleotide
acgggauucacgaacuugg

SEQ ID NO: 705507 - RNA, 19 nt, Artificial Sequence
  Description of Artificial Sequence: Synthetic oligonucleotide
aucgucugcccacauguuc

SEQ ID NO: 705508 - RNA, 19 nt, Artificial Sequence
  Description of Artificial Sequence: Synthetic oligonucleotide
acuguacgacugcacaagg

SEQ ID NO: 705509 - RNA, 19 nt, Artificial Sequence
  Description of Artificial Sequence: Synthetic oligonucleotide
uugcugucacuccagaauc

SEQ ID NO: 705510 - RNA, 19 nt, Artificial Sequence
  Description of Artificial Sequence: Synthetic oligonucleotide
aagaauuacuaagcugugu

SEQ ID NO: 705511 - RNA, 19 nt, Artificial Sequence
  Description of Artificial Sequence: Synthetic oligonucleotide
ugggacugacccaugugag

SEQ ID NO: 705512 - RNA, 19 nt, Artificial Sequence
  Description of Artificial Sequence: Synthetic oligonucleotide
accuuuccaugauuuguac

SEQ ID NO: 705513 - RNA, 19 nt, Artificial Sequence
  Description of Artificial Sequence: Synthetic oligonucleotide
uugagaaaucaacaugauu

SEQ ID NO: 705514 - RNA, 19 nt, Artificial Sequence
  Description of Artificial Sequence: Synthetic oligonucleotide
cacucaguuggaaaacagc

SEQ ID NO: 705515 - RNA, 19 nt, Artificial Sequence
  Description of Artificial Sequence: Synthetic oligonucleotide
ugcuaagacguuugucucc

SEQ ID NO: 705516 - RNA, 19 nt, Artificial Sequence
  Description of Artificial Sequence: Synthetic oligonucleotide
auuacucaagaagacggug

SEQ ID NO: 705517 - RNA, 19 nt, Artificial Sequence
  Description of Artificial Sequence: Synthetic oligonucleotide
uacuguacgacugcacaag

SEQ ID NO: 705518 - RNA, 19 nt, Artificial Sequence
  Description of Artificial Sequence: Synthetic oligonucleotide
ugggauuucuuuugccuug

SEQ ID NO: 705519 - RNA, 19 nt, Artificial Sequence
  Description of Artificial Sequence: Synthetic oligonucleotide
ggauuucaaugacagaggc

SEQ ID NO: 705520 - RNA, 19 nt, Artificial Sequence
  Description of Artificial Sequence: Synthetic oligonucleotide
auguacucuaccccaagga

SEQ ID NO: 705521 - RNA, 19 nt, Artificial Sequence
  Description of Artificial Sequence: Synthetic oligonucleotide
ugugaacguguugagaggu

SEQ ID NO: 705522 - RNA, 19 nt, Artificial Sequence
  Description of Artificial Sequence: Synthetic oligonucleotide
ucuugggauuucuuuugcc

SEQ ID NO: 705523 - RNA, 19 nt, Artificial Sequence
  Description of Artificial Sequence: Synthetic oligonucleotide
ucgucugcccacauguucu

SEQ ID NO: 705524 - RNA, 19 nt, Artificial Sequence
  Description of Artificial Sequence: Synthetic oligonucleotide
gaccacucaguuuggauuc

SEQ ID NO: 705525 - RNA, 19 nt, Artificial Sequence
  Description of Artificial Sequence: Synthetic oligonucleotide
agugagggcacagcaacgg

SEQ ID NO: 705526 - RNA, 19 nt, Artificial Sequence
  Description of Artificial Sequence: Synthetic oligonucleotide
ggccuuguaacuuuucaag

SEQ ID NO: 705527 - RNA, 19 nt, Artificial Sequence
  Description of Artificial Sequence: Synthetic oligonucleotide
uucauaacucacugcaaua

SEQ ID NO: 705528 - RNA, 19 nt, Artificial Sequence
  Description of Artificial Sequence: Synthetic oligonucleotide
cagcauuaaugugucaacg

SEQ ID NO: 705529 - RNA, 19 nt, Artificial Sequence
  Description of Artificial Sequence: Synthetic oligonucleotide
gcauuaaugugucaacggc

SEQ ID NO: 705530 - RNA, 19 nt, Artificial Sequence
  Description of Artificial Sequence: Synthetic oligonucleotide
uggcugacaacuugaguca

SEQ ID NO: 705531 - RNA, 19 nt, Artificial Sequence
  Description of Artificial Sequence: Synthetic oligonucleotide
uuguaccugaucccgagua

SEQ ID NO: 705532 - RNA, 19 nt, Artificial Sequence
  Description of Artificial Sequence: Synthetic oligonucleotide
cauuguaccugaucccgag

SEQ ID NO: 705533 - RNA, 19 nt, Artificial Sequence
  Description of Artificial Sequence: Synthetic oligonucleotide
aagagcauugugaggggag

SEQ ID NO: 705534 - RNA, 19 nt, Artificial Sequence
  Description of Artificial Sequence: Synthetic oligonucleotide
acuugagucauuacucaag

SEQ ID NO: 705535 - RNA, 19 nt, Artificial Sequence
  Description of Artificial Sequence: Synthetic oligonucleotide
guagcacaaaggaagagca

SEQ ID NO: 705536 - RNA, 19 nt, Artificial Sequence
  Description of Artificial Sequence: Synthetic oligonucleotide
ugguggguaacaagucugc

SEQ ID NO: 705537 - RNA, 19 nt, Artificial Sequence
  Description of Artificial Sequence: Synthetic oligonucleotide
gugagguuagcuuucccac

SEQ ID NO: 705538 - RNA, 19 nt, Artificial Sequence
  Description of Artificial Sequence: Synthetic oligonucleotide
cugcaauaauuccaccacc

SEQ ID NO: 705539 - RNA, 19 nt, Artificial Sequence
  Description of Artificial Sequence: Synthetic oligonucleotide
cuugagucauuacucaaga

SEQ ID NO: 705540 - RNA, 19 nt, Artificial Sequence
  Description of Artificial Sequence: Synthetic oligonucleotide
ugacagccaacugaguggc

SEQ ID NO: 705541 - RNA, 19 nt, Artificial Sequence
  Description of Artificial Sequence: Synthetic oligonucleotide
ugaacguguugagagguac

SEQ ID NO: 705542 - RNA, 19 nt, Artificial Sequence
  Description of Artificial Sequence: Synthetic oligonucleotide
acauaacuucuuagcaucg

SEQ ID NO: 705543 - RNA, 19 nt, Artificial Sequence
  Description of Artificial Sequence: Synthetic oligonucleotide
gacguuugucuccuuguac

SEQ ID NO: 705544 - RNA, 19 nt, Artificial Sequence
  Description of Artificial Sequence: Synthetic oligonucleotide
uuaugacagugucucccug

SEQ ID NO: 705545 - RNA, 19 nt, Artificial Sequence
  Description of Artificial Sequence: Synthetic oligonucleotide
acauuuugaucagcaacag

SEQ ID NO: 705546 - RNA, 19 nt, Artificial Sequence
  Description of Artificial Sequence: Synthetic oligonucleotide
ugaccccaaacgcacgagc

SEQ ID NO: 705547 - RNA, 19 nt, Artificial Sequence
  Description of Artificial Sequence: Synthetic oligonucleotide
cuggcaugucccauacugg

SEQ ID NO: 705548 - RNA, 19 nt, Artificial Sequence
  Description of Artificial Sequence: Synthetic oligonucleotide
ugcaccaguucccuggguc

SEQ ID NO: 705549 - RNA, 19 nt, Artificial Sequence
  Description of Artificial Sequence: Synthetic oligonucleotide
auacagccaugauccauuc

SEQ ID NO: 705550 - RNA, 19 nt, Artificial Sequence
  Description of Artificial Sequence: Synthetic oligonucleotide
acaagggaagucucuuuca

SEQ ID NO: 705551 - RNA, 19 nt, Artificial Sequence
  Description of Artificial Sequence: Synthetic oligonucleotide
uuuagguaacugccugggu

SEQ ID NO: 705552 - RNA, 19 nt, Artificial Sequence
  Description of Artificial Sequence: Synthetic oligonucleotide
cuggaucauguucaauccc

SEQ ID NO: 705553 - RNA, 19 nt, Artificial Sequence
  Description of Artificial Sequence: Synthetic oligonucleotide
uaaugugucaacggcuuaa

SEQ ID NO: 705554 - RNA, 19 nt, Artificial Sequence
  Description of Artificial Sequence: Synthetic oligonucleotide
aaaucccuccagaggguac

SEQ ID NO: 705555 - RNA, 19 nt, Artificial Sequence
  Description of Artificial Sequence: Synthetic oligonucleotide
aauguacgugguggguaac

SEQ ID NO: 705556 - RNA, 19 nt, Artificial Sequence
  Description of Artificial Sequence: Synthetic oligonucleotide
uacgacugcacaagguuua

SEQ ID NO: 705557 - RNA, 19 nt, Artificial Sequence
  Description of Artificial Sequence: Synthetic oligonucleotide
cuccgaaaugacucuguag

SEQ ID NO: 705558 - RNA, 19 nt, Artificial Sequence
  Description of Artificial Sequence: Synthetic oligonucleotide
aacggcgcagacugcuaag

SEQ ID NO: 705559 - RNA, 19 nt, Artificial Sequence
  Description of Artificial Sequence: Synthetic oligonucleotide
cucggcacauggcauacag

SEQ ID NO: 705560 - RNA, 19 nt, Artificial Sequence
  Description of Artificial Sequence: Synthetic oligonucleotide
gguagcacaaaggaagagc

SEQ ID NO: 705561 - RNA, 19 nt, Artificial Sequence
  Description of Artificial Sequence: Synthetic oligonucleotide
uuccucaaaugagauuugc

SEQ ID NO: 705562 - RNA, 19 nt, Artificial Sequence
  Description of Artificial Sequence: Synthetic oligonucleotide
aacguguugagagguacaa

SEQ ID NO: 705563 - RNA, 19 nt, Artificial Sequence
  Description of Artificial Sequence: Synthetic oligonucleotide
ccaaaacgcuuucauaagg

SEQ ID NO: 705564 - RNA, 19 nt, Artificial Sequence
  Description of Artificial Sequence: Synthetic oligonucleotide
caauacuuuuagguaacug

SEQ ID NO: 705565 - RNA, 19 nt, Artificial Sequence
  Description of Artificial Sequence: Synthetic oligonucleotide
auuuuacgaauuggcaucu

SEQ ID NO: 705566 - RNA, 19 nt, Artificial Sequence
  Description of Artificial Sequence: Synthetic oligonucleotide
ucuuaguuucagagccagc

SEQ ID NO: 705567 - RNA, 19 nt, Artificial Sequence
  Description of Artificial Sequence: Synthetic oligonucleotide
cauaaggcgggccaccauc

SEQ ID NO: 705568 - RNA, 19 nt, Artificial Sequence
  Description of Artificial Sequence: Synthetic oligonucleotide
aaugacucuguagcugaga

SEQ ID NO: 705569 - RNA, 19 nt, Artificial Sequence
  Description of Artificial Sequence: Synthetic oligonucleotide
acgaauacugacagccaac

SEQ ID NO: 705570 - RNA, 19 nt, Artificial Sequence
  Description of Artificial Sequence: Synthetic oligonucleotide
gaggguacugacuccaaaa

SEQ ID NO: 705571 - RNA, 19 nt, Artificial Sequence
  Description of Artificial Sequence: Synthetic oligonucleotide
gcaucauauugagugaggg

SEQ ID NO: 705572 - RNA, 19 nt, Artificial Sequence
  Description of Artificial Sequence: Synthetic oligonucleotide
gguagcgagggcuugggug

SEQ ID NO: 705573 - RNA, 19 nt, Artificial Sequence
  Description of Artificial Sequence: Synthetic oligonucleotide
gaauuacuaagcugugucu

SEQ ID NO: 705574 - RNA, 19 nt, Artificial Sequence
  Description of Artificial Sequence: Synthetic oligonucleotide
gucuuaguuucagagccag

SEQ ID NO: 705575 - RNA, 19 nt, Artificial Sequence
  Description of Artificial Sequence: Synthetic oligonucleotide
auuaaugugucaacggcuu

SEQ ID NO: 705576 - RNA, 19 nt, Artificial Sequence
  Description of Artificial Sequence: Synthetic oligonucleotide
ugagggcagcauuaaugug

SEQ ID NO: 705577 - RNA, 19 nt, Artificial Sequence
  Description of Artificial Sequence: Synthetic oligonucleotide
uuguacuguacgacugcac

SEQ ID NO: 705578 - RNA, 19 nt, Artificial Sequence
  Description of Artificial Sequence: Synthetic oligonucleotide
ggcgcagacugcuaagacg

SEQ ID NO: 705579 - RNA, 19 nt, Artificial Sequence
  Description of Artificial Sequence: Synthetic oligonucleotide
ucauuaucauuucggucuu

SEQ ID NO: 705580 - RNA, 19 nt, Artificial Sequence
  Description of Artificial Sequence: Synthetic oligonucleotide
cuucccgguacuuggugag

SEQ ID NO: 705581 - RNA, 19 nt, Artificial Sequence
  Description of Artificial Sequence: Synthetic oligonucleotide
ucaauguacguggugggua

SEQ ID NO: 705582 - RNA, 19 nt, Artificial Sequence
  Description of Artificial Sequence: Synthetic oligonucleotide
agcauugugaggggagggg

SEQ ID NO: 705583 - RNA, 19 nt, Artificial Sequence
  Description of Artificial Sequence: Synthetic oligonucleotide
ugggcaaagcugcaccagu

SEQ ID NO: 705584 - RNA, 19 nt, Artificial Sequence
  Description of Artificial Sequence: Synthetic oligonucleotide
gguuuggaaugguagcgag

SEQ ID NO: 705585 - RNA, 19 nt, Artificial Sequence
  Description of Artificial Sequence: Synthetic oligonucleotide
uuauuccucaaaugagauu

SEQ ID NO: 705586 - RNA, 19 nt, Artificial Sequence
  Description of Artificial Sequence: Synthetic oligonucleotide
agaucuggacauaacuucu

SEQ ID NO: 705587 - RNA, 19 nt, Artificial Sequence
  Description of Artificial Sequence: Synthetic oligonucleotide
ugggacuaaggagucacac

SEQ ID NO: 705588 - RNA, 19 nt, Artificial Sequence
  Description of Artificial Sequence: Synthetic oligonucleotide
caugugagaccagagucug

SEQ ID NO: 705589 - RNA, 19 nt, Artificial Sequence
  Description of Artificial Sequence: Synthetic oligonucleotide
ggcguuuauuacuggaagc

SEQ ID NO: 705590 - RNA, 19 nt, Artificial Sequence
  Description of Artificial Sequence: Synthetic oligonucleotide
cucaagcaugucuggacug

SEQ ID NO: 705591 - RNA, 19 nt, Artificial Sequence
  Description of Artificial Sequence: Synthetic oligonucleotide
uccuuucaccuuuuaugac

SEQ ID NO: 705592 - RNA, 19 nt, Artificial Sequence
  Description of Artificial Sequence: Synthetic oligonucleotide
ccuaaggcguuuauuacug

SEQ ID NO: 705593 - RNA, 19 nt, Artificial Sequence
  Description of Artificial Sequence: Synthetic oligonucleotide
acgcacgagcuucauaacu

SEQ ID NO: 705594 - RNA, 19 nt, Artificial Sequence
  Description of Artificial Sequence: Synthetic oligonucleotide
uuaaugugucaacggcuua

SEQ ID NO: 705595 - RNA, 19 nt, Artificial Sequence
  Description of Artificial Sequence: Synthetic oligonucleotide
aaggcguuuauuacuggaa

SEQ ID NO: 705596 - RNA, 19 nt, Artificial Sequence
  Description of Artificial Sequence: Synthetic oligonucleotide
aaugugucaacggcuuaaa

SEQ ID NO: 705597 - RNA, 19 nt, Artificial Sequence
  Description of Artificial Sequence: Synthetic oligonucleotide
agccguuuucccugggaag

SEQ ID NO: 705598 - RNA, 19 nt, Artificial Sequence
  Description of Artificial Sequence: Synthetic oligonucleotide
gcugguuuggaaugguagc

SEQ ID NO: 705599 - RNA, 19 nt, Artificial Sequence
  Description of Artificial Sequence: Synthetic oligonucleotide
aguucacccauguacucua

SEQ ID NO: 705600 - RNA, 19 nt, Artificial Sequence
  Description of Artificial Sequence: Synthetic oligonucleotide
uucaauguacguggugggu

SEQ ID NO: 705601 - RNA, 19 nt, Artificial Sequence
  Description of Artificial Sequence: Synthetic oligonucleotide
guacgugguggguaacaag

SEQ ID NO: 705602 - RNA, 19 nt, Artificial Sequence
  Description of Artificial Sequence: Synthetic oligonucleotide
ucuccgaaaugacucugua

SEQ ID NO: 705603 - RNA, 19 nt, Artificial Sequence
  Description of Artificial Sequence: Synthetic oligonucleotide
ugaauccuaaggcguuuau

SEQ ID NO: 705604 - RNA, 19 nt, Artificial Sequence
  Description of Artificial Sequence: Synthetic oligonucleotide
guaacaagucugcugagau

SEQ ID NO: 705605 - RNA, 19 nt, Artificial Sequence
  Description of Artificial Sequence: Synthetic oligonucleotide
cuauauaagccucaucaau

SEQ ID NO: 705606 - RNA, 19 nt, Artificial Sequence
  Description of Artificial Sequence: Synthetic oligonucleotide
ugguagcacaaaggaagag

SEQ ID NO: 705607 - RNA, 19 nt, Artificial Sequence
  Description of Artificial Sequence: Synthetic oligonucleotide
uucggucuuugguuagucu

SEQ ID NO: 705608 - RNA, 19 nt, Artificial Sequence
  Description of Artificial Sequence: Synthetic oligonucleotide
acagccaacugaguggcca

SEQ ID NO: 705609 - RNA, 19 nt, Artificial Sequence
  Description of Artificial Sequence: Synthetic oligonucleotide
acacucaguuggaaaacag

SEQ ID NO: 705610 - RNA, 19 nt, Artificial Sequence
  Description of Artificial Sequence: Synthetic oligonucleotide
uuagcaucgucugcccaca

SEQ ID NO: 705611 - RNA, 19 nt, Artificial Sequence
  Description of Artificial Sequence: Synthetic oligonucleotide
auuugguagcacaaaggaa

SEQ ID NO: 705612 - RNA, 19 nt, Artificial Sequence
  Description of Artificial Sequence: Synthetic oligonucleotide
cuaagcugugucugcugug

SEQ ID NO: 705613 - RNA, 19 nt, Artificial Sequence
  Description of Artificial Sequence: Synthetic oligonucleotide
acuacagccaauacuuuua

SEQ ID NO: 705614 - RNA, 19 nt, Artificial Sequence
  Description of Artificial Sequence: Synthetic oligonucleotide
cuggcacguucaaucacag

SEQ ID NO: 705615 - RNA, 19 nt, Artificial Sequence
  Description of Artificial Sequence: Synthetic oligonucleotide
auuguaccugaucccgagu

SEQ ID NO: 705616 - RNA, 19 nt, Artificial Sequence
  Description of Artificial Sequence: Synthetic oligonucleotide
agguuagcuuucccacggg

SEQ ID NO: 705617 - RNA, 19 nt, Artificial Sequence
  Description of Artificial Sequence: Synthetic oligonucleotide
aguuacuaguaaagcucuc

SEQ ID NO: 705618 - RNA, 19 nt, Artificial Sequence
  Description of Artificial Sequence: Synthetic oligonucleotide
uguacgugguggguaacaa

SEQ ID NO: 705619 - RNA, 19 nt, Artificial Sequence
  Description of Artificial Sequence: Synthetic oligonucleotide
ucucuccgaaaugacucug

SEQ ID NO: 705620 - RNA, 19 nt, Artificial Sequence
  Description of Artificial Sequence: Synthetic oligonucleotide
ggauuuuacgaauuggcau

SEQ ID NO: 705621 - RNA, 19 nt, Artificial Sequence
  Description of Artificial Sequence: Synthetic oligonucleotide
cagaucuauauaagccuca

SEQ ID NO: 705622 - RNA, 19 nt, Artificial Sequence
  Description of Artificial Sequence: Synthetic oligonucleotide
caaucccucggcacauggc

SEQ ID NO: 705623 - RNA, 19 nt, Artificial Sequence
  Description of Artificial Sequence: Synthetic oligonucleotide
ccuggguuuaacuggauca

SEQ ID NO: 705624 - RNA, 19 nt, Artificial Sequence
  Description of Artificial Sequence: Synthetic oligonucleotide
ucggggcagcccuucaaug

SEQ ID NO: 705625 - RNA, 19 nt, Artificial Sequence
  Description of Artificial Sequence: Synthetic oligonucleotide
guucuuacuacagccaaua

SEQ ID NO: 705626 - RNA, 19 nt, Artificial Sequence
  Description of Artificial Sequence: Synthetic oligonucleotide
agaucuauauaagccucau

SEQ ID NO: 705627 - RNA, 19 nt, Artificial Sequence
  Description of Artificial Sequence: Synthetic oligonucleotide
acugacuccaaaacgcuuu

SEQ ID NO: 705628 - RNA, 19 nt, Artificial Sequence
  Description of Artificial Sequence: Synthetic oligonucleotide
gccaguagaagaucuggac

SEQ ID NO: 705629 - RNA, 19 nt, Artificial Sequence
  Description of Artificial Sequence: Synthetic oligonucleotide
uucuacuguagggccucgg

SEQ ID NO: 705630 - RNA, 19 nt, Artificial Sequence
  Description of Artificial Sequence: Synthetic oligonucleotide
cauguucaaucccucggca

SEQ ID NO: 705631 - RNA, 19 nt, Artificial Sequence
  Description of Artificial Sequence: Synthetic oligonucleotide
uacagccaugauccauucu

SEQ ID NO: 705632 - RNA, 19 nt, Artificial Sequence
  Description of Artificial Sequence: Synthetic oligonucleotide
uuuuacgaauuggcaucug

SEQ ID NO: 705633 - RNA, 19 nt, Artificial Sequence
  Description of Artificial Sequence: Synthetic oligonucleotide
cugcggauuuuacgaauug

SEQ ID NO: 705634 - RNA, 19 nt, Artificial Sequence
  Description of Artificial Sequence: Synthetic oligonucleotide
cacgagcuucauaacucac

SEQ ID NO: 705635 - RNA, 19 nt, Artificial Sequence
  Description of Artificial Sequence: Synthetic oligonucleotide
ugaucccgaguagccagag

SEQ ID NO: 705636 - RNA, 19 nt, Artificial Sequence
  Description of Artificial Sequence: Synthetic oligonucleotide
agacugcggauuuuacgaa

SEQ ID NO: 705637 - RNA, 19 nt, Artificial Sequence
  Description of Artificial Sequence: Synthetic oligonucleotide
gacccaugugagaccagag

SEQ ID NO: 705638 - RNA, 19 nt, Artificial Sequence
  Description of Artificial Sequence: Synthetic oligonucleotide
caauguacgugguggguaa

SEQ ID NO: 705639 - RNA, 19 nt, Artificial Sequence
  Description of Artificial Sequence: Synthetic oligonucleotide
uggcgguucuucuacugua

SEQ ID NO: 705640 - RNA, 19 nt, Artificial Sequence
  Description of Artificial Sequence: Synthetic oligonucleotide
ccugaucccgaguagccag

SEQ ID NO: 705641 - RNA, 19 nt, Artificial Sequence
  Description of Artificial Sequence: Synthetic oligonucleotide
agacugcuaagacguuugu

SEQ ID NO: 705642 - RNA, 19 nt, Artificial Sequence
  Description of Artificial Sequence: Synthetic oligonucleotide
guaacugccuggguuuaac

SEQ ID NO: 705643 - RNA, 19 nt, Artificial Sequence
  Description of Artificial Sequence: Synthetic oligonucleotide
cagccaauacuuuuaggua

SEQ ID NO: 705644 - RNA, 19 nt, Artificial Sequence
  Description of Artificial Sequence: Synthetic oligonucleotide
gacuaaggagucacacuuc

SEQ ID NO: 705645 - RNA, 19 nt, Artificial Sequence
  Description of Artificial Sequence: Synthetic oligonucleotide
gaucccgaguagccagagc

SEQ ID NO: 705646 - RNA, 19 nt, Artificial Sequence
  Description of Artificial Sequence: Synthetic oligonucleotide
augguagcgagggcuuggg

SEQ ID NO: 705647 - RNA, 19 nt, Artificial Sequence
  Description of Artificial Sequence: Synthetic oligonucleotide
acgcuuucauaaggcgggc

SEQ ID NO: 705648 - RNA, 19 nt, Artificial Sequence
  Description of Artificial Sequence: Synthetic oligonucleotide
cugucauuaucauuucggu

SEQ ID NO: 705649 - RNA, 19 nt, Artificial Sequence
  Description of Artificial Sequence: Synthetic oligonucleotide
guccggcugguuuggaaug

SEQ ID NO: 705650 - RNA, 19 nt, Artificial Sequence
  Description of Artificial Sequence: Synthetic oligonucleotide
acgugguggguaacaaguc

SEQ ID NO: 705651 - RNA, 19 nt, Artificial Sequence
  Description of Artificial Sequence: Synthetic oligonucleotide
augugucaacggcuuaaaa

SEQ ID NO: 705652 - RNA, 19 nt, Artificial Sequence
  Description of Artificial Sequence: Synthetic oligonucleotide
ccguuguuccacuuggaac

SEQ ID NO: 705653 - RNA, 19 nt, Artificial Sequence
  Description of Artificial Sequence: Synthetic oligonucleotide
auucacgaacuugggccag

SEQ ID NO: 705654 - RNA, 19 nt, Artificial Sequence
  Description of Artificial Sequence: Synthetic oligonucleotide
ugacuccaaaacgcuuuca

SEQ ID NO: 705655 - RNA, 19 nt, Artificial Sequence
  Description of Artificial Sequence: Synthetic oligonucleotide
uggcacguucaaucacagc

SEQ ID NO: 705656 - RNA, 19 nt, Artificial Sequence
  Description of Artificial Sequence: Synthetic oligonucleotide
gcaaagugagacauuaucu

SEQ ID NO: 705657 - RNA, 19 nt, Artificial Sequence
  Description of Artificial Sequence: Synthetic oligonucleotide
acguguugagagguacaag

SEQ ID NO: 705658 - RNA, 19 nt, Artificial Sequence
  Description of Artificial Sequence: Synthetic oligonucleotide
ggacuaaggagucacacuu

SEQ ID NO: 705659 - RNA, 19 nt, Artificial Sequence
  Description of Artificial Sequence: Synthetic oligonucleotide
ugacucuguagcugagauu

SEQ ID NO: 705660 - RNA, 19 nt, Artificial Sequence
  Description of Artificial Sequence: Synthetic oligonucleotide
cagaaguauuacaauuccu

SEQ ID NO: 705661 - RNA, 19 nt, Artificial Sequence
  Description of Artificial Sequence: Synthetic oligonucleotide
gaacguguugagagguaca

SEQ ID NO: 705662 - RNA, 19 nt, Artificial Sequence
  Description of Artificial Sequence: Synthetic oligonucleotide
auguacgugguggguaaca

SEQ ID NO: 705663 - RNA, 19 nt, Artificial Sequence
  Description of Artificial Sequence: Synthetic oligonucleotide
agaaaucccuccagagggu

SEQ ID NO: 705664 - RNA, 19 nt, Artificial Sequence
  Description of Artificial Sequence: Synthetic oligonucleotide
aguucuuacuacagccaau

SEQ ID NO: 705665 - RNA, 19 nt, Artificial Sequence
  Description of Artificial Sequence: Synthetic oligonucleotide
ggacauaacuucuuagcau

SEQ ID NO: 705666 - RNA, 19 nt, Artificial Sequence
  Description of Artificial Sequence: Synthetic oligonucleotide
gguaacaagucugcugaga

SEQ ID NO: 705667 - RNA, 19 nt, Artificial Sequence
  Description of Artificial Sequence: Synthetic oligonucleotide
gaaaucccuccagagggua

SEQ ID NO: 705668 - RNA, 19 nt, Artificial Sequence
  Description of Artificial Sequence: Synthetic oligonucleotide
acugcggauuuuacgaauu

SEQ ID NO: 705669 - RNA, 19 nt, Artificial Sequence
  Description of Artificial Sequence: Synthetic oligonucleotide
cgguucuucuacuguaggg

SEQ ID NO: 705670 - RNA, 19 nt, Artificial Sequence
  Description of Artificial Sequence: Synthetic oligonucleotide
ugguagcgagggcuugggu

SEQ ID NO: 705671 - RNA, 19 nt, Artificial Sequence
  Description of Artificial Sequence: Synthetic oligonucleotide
uucaaucccucggcacaug

SEQ ID NO: 705672 - RNA, 19 nt, Artificial Sequence
  Description of Artificial Sequence: Synthetic oligonucleotide
gguuagucucuccucaagu

SEQ ID NO: 705673 - RNA, 19 nt, Artificial Sequence
  Description of Artificial Sequence: Synthetic oligonucleotide
aggagacauggcaggaaca

SEQ ID NO: 705674 - RNA, 19 nt, Artificial Sequence
  Description of Artificial Sequence: Synthetic oligonucleotide
uacugggacuaaggaguca

SEQ ID NO: 705675 - RNA, 19 nt, Artificial Sequence
  Description of Artificial Sequence: Synthetic oligonucleotide
gcuaacugcaagagccacc

SEQ ID NO: 705676 - RNA, 19 nt, Artificial Sequence
  Description of Artificial Sequence: Synthetic oligonucleotide
gacugcggauuuuacgaau

SEQ ID NO: 705677 - RNA, 19 nt, Artificial Sequence
  Description of Artificial Sequence: Synthetic oligonucleotide
gcaccuuuggcugacaacu

SEQ ID NO: 705678 - RNA, 19 nt, Artificial Sequence
  Description of Artificial Sequence: Synthetic oligonucleotide
uucacgaacuugggccagu

SEQ ID NO: 705679 - RNA, 19 nt, Artificial Sequence
  Description of Artificial Sequence: Synthetic oligonucleotide
ucccucggcacauggcaua

SEQ ID NO: 705680 - RNA, 19 nt, Artificial Sequence
  Description of Artificial Sequence: Synthetic oligonucleotide
auguucuagugaccccaaa

SEQ ID NO: 705681 - RNA, 19 nt, Artificial Sequence
  Description of Artificial Sequence: Synthetic oligonucleotide
cauaacucacugcaauaau

SEQ ID NO: 705682 - RNA, 19 nt, Artificial Sequence
  Description of Artificial Sequence: Synthetic oligonucleotide
uugcccuuugggccaccac

SEQ ID NO: 705683 - RNA, 19 nt, Artificial Sequence
  Description of Artificial Sequence: Synthetic oligonucleotide
auuugccguuguuccacuu

SEQ ID NO: 705684 - RNA, 19 nt, Artificial Sequence
  Description of Artificial Sequence: Synthetic oligonucleotide
cuucuguggaagggaagca

SEQ ID NO: 705685 - RNA, 19 nt, Artificial Sequence
  Description of Artificial Sequence: Synthetic oligonucleotide
caagguuccuuucaccuuu

SEQ ID NO: 705686 - RNA, 19 nt, Artificial Sequence
  Description of Artificial Sequence: Synthetic oligonucleotide
gugaccccaaacgcacgag

SEQ ID NO: 705687 - RNA, 19 nt, Artificial Sequence
  Description of Artificial Sequence: Synthetic oligonucleotide
ggcaccuuuggcugacaac

SEQ ID NO: 705688 - RNA, 19 nt, Artificial Sequence
  Description of Artificial Sequence: Synthetic oligonucleotide
gcacgagcuucauaacuca

SEQ ID NO: 705689 - RNA, 19 nt, Artificial Sequence
  Description of Artificial Sequence: Synthetic oligonucleotide
cgcacgagcuucauaacuc

SEQ ID NO: 705690 - RNA, 19 nt, Artificial Sequence
  Description of Artificial Sequence: Synthetic oligonucleotide
ggguuuaacuggaucaugu

SEQ ID NO: 705691 - RNA, 19 nt, Artificial Sequence
  Description of Artificial Sequence: Synthetic oligonucleotide
acggcgcagacugcuaaga

SEQ ID NO: 705692 - RNA, 19 nt, Artificial Sequence
  Description of Artificial Sequence: Synthetic oligonucleotide
guacugacuccaaaacgcu

SEQ ID NO: 705693 - RNA, 19 nt, Artificial Sequence
  Description of Artificial Sequence: Synthetic oligonucleotide
ccaagacugcggauuuuac

SEQ ID NO: 705694 - RNA, 19 nt, Artificial Sequence
  Description of Artificial Sequence: Synthetic oligonucleotide
uucccacgggauucacgaa

SEQ ID NO: 705695 - RNA, 19 nt, Artificial Sequence
  Description of Artificial Sequence: Synthetic oligonucleotide
gcuggcacguucaaucaca

SEQ ID NO: 705696 - RNA, 19 nt, Artificial Sequence
  Description of Artificial Sequence: Synthetic oligonucleotide
guuagcuuucccacgggau

SEQ ID NO: 705697 - RNA, 19 nt, Artificial Sequence
  Description of Artificial Sequence: Synthetic oligonucleotide
gggacugacccaugugaga

SEQ ID NO: 705698 - RNA, 19 nt, Artificial Sequence
  Description of Artificial Sequence: Synthetic oligonucleotide
cccaaggauuucaaugaca

SEQ ID NO: 705699 - RNA, 19 nt, Artificial Sequence
  Description of Artificial Sequence: Synthetic oligonucleotide
cugaucccgaguagccaga

SEQ ID NO: 705700 - RNA, 19 nt, Artificial Sequence
  Description of Artificial Sequence: Synthetic oligonucleotide
gugacuugucugugaacgu

SEQ ID NO: 705701 - RNA, 19 nt, Artificial Sequence
  Description of Artificial Sequence: Synthetic oligonucleotide
guacucuaccccaaggauu

SEQ ID NO: 705702 - RNA, 19 nt, Artificial Sequence
  Description of Artificial Sequence: Synthetic oligonucleotide
cuguacgacugcacaaggu

SEQ ID NO: 705703 - RNA, 19 nt, Artificial Sequence
  Description of Artificial Sequence: Synthetic oligonucleotide
gcucaucuuaugagcauca

SEQ ID NO: 705704 - RNA, 19 nt, Artificial Sequence
  Description of Artificial Sequence: Synthetic oligonucleotide
ggcuaacugcaagagccac

SEQ ID NO: 705705 - RNA, 19 nt, Artificial Sequence
  Description of Artificial Sequence: Synthetic oligonucleotide
cugggacuaaggagucaca

SEQ ID NO: 705706 - RNA, 19 nt, Artificial Sequence
  Description of Artificial Sequence: Synthetic oligonucleotide
cagcaaaugcauccuggcu

SEQ ID NO: 705707 - RNA, 19 nt, Artificial Sequence
  Description of Artificial Sequence: Synthetic oligonucleotide
gggacuaaggagucacacu

SEQ ID NO: 705708 - RNA, 19 nt, Artificial Sequence
  Description of Artificial Sequence: Synthetic oligonucleotide
caacggcgcagacugcuaa

SEQ ID NO: 705709 - RNA, 19 nt, Artificial Sequence
  Description of Artificial Sequence: Synthetic oligonucleotide
cucuccgaaaugacucugu

SEQ ID NO: 705710 - RNA, 19 nt, Artificial Sequence
  Description of Artificial Sequence: Synthetic oligonucleotide
aggggaccacucaguuugg

SEQ ID NO: 705711 - RNA, 19 nt, Artificial Sequence
  Description of Artificial Sequence: Synthetic oligonucleotide
guacaagggaagucucuuu

SEQ ID NO: 705712 - RNA, 19 nt, Artificial Sequence
  Description of Artificial Sequence: Synthetic oligonucleotide
uagcaucgucugcccacau

SEQ ID NO: 705713 - RNA, 19 nt, Artificial Sequence
  Description of Artificial Sequence: Synthetic oligonucleotide
gcgcagacugcuaagacgu

SEQ ID NO: 705714 - RNA, 19 nt, Artificial Sequence
  Description of Artificial Sequence: Synthetic oligonucleotide
acgacugcacaagguuuau

SEQ ID NO: 705715 - RNA, 19 nt, Artificial Sequence
  Description of Artificial Sequence: Synthetic oligonucleotide
caaacgcacgagcuucaua

SEQ ID NO: 705716 - RNA, 19 nt, Artificial Sequence
  Description of Artificial Sequence: Synthetic oligonucleotide
ccccaaggauuucaaugac

SEQ ID NO: 705717 - RNA, 19 nt, Artificial Sequence
  Description of Artificial Sequence: Synthetic oligonucleotide
gagauucagugaacugggu

SEQ ID NO: 705718 - RNA, 19 nt, Artificial Sequence
  Description of Artificial Sequence: Synthetic oligonucleotide
caacacuagcuucccggua

SEQ ID NO: 705719 - RNA, 19 nt, Artificial Sequence
  Description of Artificial Sequence: Synthetic oligonucleotide
cagcaacggcgcagacugc

SEQ ID NO: 705720 - RNA, 19 nt, Artificial Sequence
  Description of Artificial Sequence: Synthetic oligonucleotide
ccccaaacgcacgagcuuc

SEQ ID NO: 705721 - RNA, 19 nt, Artificial Sequence
  Description of Artificial Sequence: Synthetic oligonucleotide
cuggcgguucuucuacugu

SEQ ID NO: 705722 - RNA, 19 nt, Artificial Sequence
  Description of Artificial Sequence: Synthetic oligonucleotide
ggcaugucccauacuggga

SEQ ID NO: 705723 - RNA, 19 nt, Artificial Sequence
  Description of Artificial Sequence: Synthetic oligonucleotide
gcugagauaggcuggccuu

SEQ ID NO: 705724 - RNA, 19 nt, Artificial Sequence
  Description of Artificial Sequence: Synthetic oligonucleotide
ggccacccugucauuauca

SEQ ID NO: 705725 - RNA, 19 nt, Artificial Sequence
  Description of Artificial Sequence: Synthetic oligonucleotide
uagcgagggcuuggguggu

SEQ ID NO: 705726 - RNA, 19 nt, Artificial Sequence
  Description of Artificial Sequence: Synthetic oligonucleotide
guucaaucccucggcacau

SEQ ID NO: 705727 - RNA, 19 nt, Artificial Sequence
  Description of Artificial Sequence: Synthetic oligonucleotide
gguccggcugguuuggaau

SEQ ID NO: 705728 - RNA, 19 nt, Artificial Sequence
  Description of Artificial Sequence: Synthetic oligonucleotide
gcaauaauuccaccaccuu

SEQ ID NO: 705729 - RNA, 19 nt, Artificial Sequence
  Description of Artificial Sequence: Synthetic oligonucleotide
gugaacguguugagaggua

SEQ ID NO: 705730 - RNA, 19 nt, Artificial Sequence
  Description of Artificial Sequence: Synthetic oligonucleotide
gccguuuucccugggaagu

SEQ ID NO: 705731 - RNA, 19 nt, Artificial Sequence
  Description of Artificial Sequence: Synthetic oligonucleotide
gcaccaguucccugggucu

SEQ ID NO: 705732 - RNA, 19 nt, Artificial Sequence
  Description of Artificial Sequence: Synthetic oligonucleotide
gggcuaacugcaagagcca

SEQ ID NO: 705733 - RNA, 19 nt, Artificial Sequence
  Description of Artificial Sequence: Synthetic oligonucleotide
agcgagggcuuggguggug

SEQ ID NO: 705734 - RNA, 19 nt, Artificial Sequence
  Description of Artificial Sequence: Synthetic oligonucleotide
gguggguaacaagucugcu

SEQ ID NO: 705735 - RNA, 19 nt, Artificial Sequence
  Description of Artificial Sequence: Synthetic oligonucleotide
cucggggcagcccuucaau

SEQ ID NO: 705736 - RNA, 19 nt, Artificial Sequence
  Description of Artificial Sequence: Synthetic oligonucleotide
gguaacugccuggguuuaa

SEQ ID NO: 705737 - RNA, 19 nt, Artificial Sequence
  Description of Artificial Sequence: Synthetic oligonucleotide
cucaucuuaugagcaucau

SEQ ID NO: 705738 - RNA, 19 nt, Artificial Sequence
  Description of Artificial Sequence: Synthetic oligonucleotide
cgaauacugacagccaacu

SEQ ID NO: 705739 - RNA, 19 nt, Artificial Sequence
  Description of Artificial Sequence: Synthetic oligonucleotide
cccucggcacauggcauac

SEQ ID NO: 705740 - RNA, 19 nt, Artificial Sequence
  Description of Artificial Sequence: Synthetic oligonucleotide
uccugugguccggcugguu

SEQ ID NO: 705741 - RNA, 19 nt, Artificial Sequence
  Description of Artificial Sequence: Synthetic oligonucleotide
gggcagcauuaauguguca

SEQ ID NO: 705742 - RNA, 19 nt, Artificial Sequence
  Description of Artificial Sequence: Synthetic oligonucleotide
cggcgcagacugcuaagac

SEQ ID NO: 705743 - RNA, 19 nt, Artificial Sequence
  Description of Artificial Sequence: Synthetic oligonucleotide
gcagcccuucaauguacgu

SEQ ID NO: 705744 - RNA, 19 nt, Artificial Sequence
  Description of Artificial Sequence: Synthetic oligonucleotide
ggaggggaccacucaguuu

SEQ ID NO: 705745 - RNA, 19 nt, Artificial Sequence
  Description of Artificial Sequence: Synthetic oligonucleotide
gccacccugucauuaucau

SEQ ID NO: 705746 - RNA, 19 nt, Artificial Sequence
  Description of Artificial Sequence: Synthetic oligonucleotide
gcgagggcuugggugguga

SEQ ID NO: 705747 - RNA, 19 nt, Artificial Sequence
  Description of Artificial Sequence: Synthetic oligonucleotide
ccaauacuuuuagguaacu

SEQ ID NO: 705748 - RNA, 19 nt, Artificial Sequence
  Description of Artificial Sequence: Synthetic oligonucleotide
cuaagacguuugucuccuu

SEQ ID NO: 705749 - RNA, 19 nt, Artificial Sequence
  Description of Artificial Sequence: Synthetic oligonucleotide
gugguccggcugguuugga

SEQ ID NO: 705750 - RNA, 19 nt, Artificial Sequence
  Description of Artificial Sequence: Synthetic oligonucleotide
gcaacggcgcagacugcua

SEQ ID NO: 705751 - RNA, 19 nt, Artificial Sequence
  Description of Artificial Sequence: Synthetic oligonucleotide
gcccuucaauguacguggu

SEQ ID NO: 705752 - RNA, 19 nt, Artificial Sequence
  Description of Artificial Sequence: Synthetic oligonucleotide
ccaaacgcacgagcuucau

SEQ ID NO: 705753 - RNA, 19 nt, Artificial Sequence
  Description of Artificial Sequence: Synthetic oligonucleotide
ccgaguagccagagccguu

SEQ ID NO: 705754 - RNA, 19 nt, Artificial Sequence
  Description of Artificial Sequence: Synthetic oligonucleotide
cgacugcacaagguuuauu

SEQ ID NO: 705755 - RNA, 19 nt, Artificial Sequence
  Description of Artificial Sequence: Synthetic oligonucleotide
aauaaauagacugugcccc

SEQ ID NO: 705756 - RNA, 19 nt, Artificial Sequence
  Description of Artificial Sequence: Synthetic oligonucleotide
acucaugcaacucagaagc

SEQ ID NO: 705757 - RNA, 19 nt, Artificial Sequence
  Description of Artificial Sequence: Synthetic oligonucleotide
agaaucuugccacaaaggc

SEQ ID NO: 705758 - RNA, 19 nt, Artificial Sequence
  Description of Artificial Sequence: Synthetic oligonucleotide
ucuagaaccacucugacaa

SEQ ID NO: 705759 - RNA, 19 nt, Artificial Sequence
  Description of Artificial Sequence: Synthetic oligonucleotide
uagaucagcgauacgaugg

SEQ ID NO: 705760 - RNA, 19 nt, Artificial Sequence
  Description of Artificial Sequence: Synthetic oligonucleotide
aaauucaggguucucacug

SEQ ID NO: 705761 - RNA, 19 nt, Artificial Sequence
  Description of Artificial Sequence: Synthetic oligonucleotide
uuuugauccacauaucucu

SEQ ID NO: 705762 - RNA, 19 nt, Artificial Sequence
  Description of Artificial Sequence: Synthetic oligonucleotide
aggaacuugccguacaccc

SEQ ID NO: 705763 - RNA, 19 nt, Artificial Sequence
  Description of Artificial Sequence: Synthetic oligonucleotide
aagacuaccaucuugcguu

SEQ ID NO: 705764 - RNA, 19 nt, Artificial Sequence
  Description of Artificial Sequence: Synthetic oligonucleotide
uuuuaggccaguauuugag

SEQ ID NO: 705765 - RNA, 19 nt, Artificial Sequence
  Description of Artificial Sequence: Synthetic oligonucleotide
uagagggucccaaauaccg

SEQ ID NO: 705766 - RNA, 19 nt, Artificial Sequence
  Description of Artificial Sequence: Synthetic oligonucleotide
uuaacagagugcaagggga

SEQ ID NO: 705767 - RNA, 19 nt, Artificial Sequence
  Description of Artificial Sequence: Synthetic oligonucleotide
uguuuucggauauagggcc

SEQ ID NO: 705768 - RNA, 19 nt, Artificial Sequence
  Description of Artificial Sequence: Synthetic oligonucleotide
caggacaaacuuuugaucc

SEQ ID NO: 705769 - RNA, 19 nt, Artificial Sequence
  Description of Artificial Sequence: Synthetic oligonucleotide
uugagcacauuguagauca

SEQ ID NO: 705770 - RNA, 19 nt, Artificial Sequence
  Description of Artificial Sequence: Synthetic oligonucleotide
  modified_base (3)..(3): a, c, u, g, unknown or other
acngacagcgacuuaacag

SEQ ID NO: 705771 - RNA, 19 nt, Artificial Sequence
  Description of Artificial Sequence: Synthetic oligonucleotide
  modified_base (7)..(7): a, c, u, g, unknown or other
uucauunagggcugcacgc

SEQ ID NO: 705772 - RNA, 19 nt, Artificial Sequence
  Description of Artificial Sequence: Synthetic oligonucleotide
cuuugucuagcucugaccc

SEQ ID NO: 705773 - RNA, 19 nt, Artificial Sequence
  Description of Artificial Sequence: Synthetic oligonucleotide
aacaucaccccgcauuggg

SEQ ID NO: 705774 - RNA, 19 nt, Artificial Sequence
  Description of Artificial Sequence: Synthetic oligonucleotide
uuguagaucagcgauacga

SEQ ID NO: 705775 - RNA, 19 nt, Artificial Sequence
  Description of Artificial Sequence: Synthetic oligonucleotide
cuuaacagagugcaagggg

SEQ ID NO: 705776 - RNA, 19 nt, Artificial Sequence
  Description of Artificial Sequence: Synthetic oligonucleotide
aagucaaacaucaccccgc

SEQ ID NO: 705777 - RNA, 19 nt, Artificial Sequence
  Description of Artificial Sequence: Synthetic oligonucleotide
uacacccgaugcaagaugg

SEQ ID NO: 705778 - RNA, 19 nt, Artificial Sequence
  Description of Artificial Sequence: Synthetic oligonucleotide
auaacaugcucugucaagg

SEQ ID NO: 705779 - RNA, 19 nt, Artificial Sequence
  Description of Artificial Sequence: Synthetic oligonucleotide
acuuuugauccacauaucu

SEQ ID NO: 705780 - RNA, 19 nt, Artificial Sequence
  Description of Artificial Sequence: Synthetic oligonucleotide
gauaacaugcucugucaag

SEQ ID NO: 705781 - RNA, 19 nt, Artificial Sequence
  Description of Artificial Sequence: Synthetic oligonucleotide
  modified_base (6)..(6): a, c, u, g, unknown or other
aaaacngacagcgacuuaa

SEQ ID NO: 705782 - RNA, 19 nt, Artificial Sequence
  Description of Artificial Sequence: Synthetic oligonucleotide
caugcaacucagaagcugg

SEQ ID NO: 705783 - RNA, 19 nt, Artificial Sequence
  Description of Artificial Sequence: Synthetic oligonucleotide
agcgcaaagccauugauga

SEQ ID NO: 705784 - RNA, 19 nt, Artificial Sequence
  Description of Artificial Sequence: Synthetic oligonucleotide
gaaacugagaagaacugug

SEQ ID NO: 705785 - RNA, 19 nt, Artificial Sequence
  Description of Artificial Sequence: Synthetic oligonucleotide
acagcgacuuaacagagug

SEQ ID NO: 705786 - RNA, 19 nt, Artificial Sequence
  Description of Artificial Sequence: Synthetic oligonucleotide
uguauuagggcaggggagg

SEQ ID NO: 705787 - RNA, 19 nt, Artificial Sequence
  Description of Artificial Sequence: Synthetic oligonucleotide
  modified_base (8)..(8): a, c, u, g, unknown or other
guucauunagggcugcacg

SEQ ID NO: 705788 - RNA, 19 nt, Artificial Sequence
  Description of Artificial Sequence: Synthetic oligonucleotide
agcaaucaaccuuucagag

SEQ ID NO: 705789 - RNA, 19 nt, Artificial Sequence
  Description of Artificial Sequence: Synthetic oligonucleotide
gauauuucggaugauaucu

SEQ ID NO: 705790 - RNA, 19 nt, Artificial Sequence
  Description of Artificial Sequence: Synthetic oligonucleotide
aagccguccaccuugucug

SEQ ID NO: 705791 - RNA, 19 nt, Artificial Sequence
  Description of Artificial Sequence: Synthetic oligonucleotide
aacaugcucugucaaggug

SEQ ID NO: 705792 - RNA, 19 nt, Artificial Sequence
  Description of Artificial Sequence: Synthetic oligonucleotide
uguaagcucaucgaacagc

SEQ ID NO: 705793 - RNA, 19 nt, Artificial Sequence
  Description of Artificial Sequence: Synthetic oligonucleotide
accguugaaguguuccagc

SEQ ID NO: 705794 - RNA, 19 nt, Artificial Sequence
  Description of Artificial Sequence: Synthetic oligonucleotide
uuaggccaguauuugagga

SEQ ID NO: 705795 - RNA, 19 nt, Artificial Sequence
  Description of Artificial Sequence: Synthetic oligonucleotide
agcacauuguagaucagcg

SEQ ID NO: 705796 - RNA, 19 nt, Artificial Sequence
  Description of Artificial Sequence: Synthetic oligonucleotide
ggaagcuguaagcucaucg

SEQ ID NO: 705797 - RNA, 19 nt, Artificial Sequence
  Description of Artificial Sequence: Synthetic oligonucleotide
cuugagguacucacguucc

SEQ ID NO: 705798 - RNA, 19 nt, Artificial Sequence
  Description of Artificial Sequence: Synthetic oligonucleotide
gggcagaauaaauagacug

SEQ ID NO: 705799 - RNA, 19 nt, Artificial Sequence
  Description of Artificial Sequence: Synthetic oligonucleotide
caagguggcauccuucucc

SEQ ID NO: 705800 - RNA, 19 nt, Artificial Sequence
  Description of Artificial Sequence: Synthetic oligonucleotide
  modified_base (4)..(4): a, c, u, g, unknown or other
aacngacagcgacuuaaca

SEQ ID NO: 705801 - RNA, 19 nt, Artificial Sequence
  Description of Artificial Sequence: Synthetic oligonucleotide
cuuuugauccacauaucuc

SEQ ID NO: 705802 - RNA, 19 nt, Artificial Sequence
  Description of Artificial Sequence: Synthetic oligonucleotide
cuugccguacacccgaugc

SEQ ID NO: 705803 - RNA, 19 nt, Artificial Sequence
  Description of Artificial Sequence: Synthetic oligonucleotide
ucugguagcgaaacugaga

SEQ ID NO: 705804 - RNA, 19 nt, Artificial Sequence
  Description of Artificial Sequence: Synthetic oligonucleotide
aaagucuugagcacauugu

SEQ ID NO: 705805 - RNA, 19 nt, Artificial Sequence
  Description of Artificial Sequence: Synthetic oligonucleotide
guacucacguucccgaggg

SEQ ID NO: 705806 - RNA, 19 nt, Artificial Sequence
  Description of Artificial Sequence: Synthetic oligonucleotide
acaugcucugucaaggugg

SEQ ID NO: 705807 - RNA, 19 nt, Artificial Sequence
  Description of Artificial Sequence: Synthetic oligonucleotide
agucuagaaccacucugac

SEQ ID NO: 705808 - RNA, 19 nt, Artificial Sequence
  Description of Artificial Sequence: Synthetic oligonucleotide
uggcacaucuuugagcagg

SEQ ID NO: 705809 - RNA, 19 nt, Artificial Sequence
  Description of Artificial Sequence: Synthetic oligonucleotide
aagaggggcuccuggaucu

SEQ ID NO: 705810 - RNA, 19 nt, Artificial Sequence
  Description of Artificial Sequence: Synthetic oligonucleotide
  modified_base (9)..(9): a, c, u, g, unknown or other
aguucauunagggcugcac

SEQ ID NO: 705811 - RNA, 19 nt, Artificial Sequence
  Description of Artificial Sequence: Synthetic oligonucleotide
  modified_base (5)..(5): a, c, u, g, unknown or other
aaacngacagcgacuuaac

SEQ ID NO: 705812 - RNA, 19 nt, Artificial Sequence
  Description of Artificial Sequence: Synthetic oligonucleotide
uguagaucagcgauacgau

SEQ ID NO: 705813 - RNA, 19 nt, Artificial Sequence
  Description of Artificial Sequence: Synthetic oligonucleotide
ucagcgauacgaugguuug

SEQ ID NO: 705814 - RNA, 19 nt, Artificial Sequence
  Description of Artificial Sequence: Synthetic oligonucleotide
agccacacaguccaagaag

SEQ ID NO: 705815 - RNA, 19 nt, Artificial Sequence
  Description of Artificial Sequence: Synthetic oligonucleotide
ugugguugcacuuguuuuc

SEQ ID NO: 705816 - RNA, 19 nt, Artificial Sequence
  Description of Artificial Sequence: Synthetic oligonucleotide
aagucuggacucuccaaga

SEQ ID NO: 705817 - RNA, 19 nt, Artificial Sequence
  Description of Artificial Sequence: Synthetic oligonucleotide
agcgaaacugagaagaacu

SEQ ID NO: 705818 - RNA, 19 nt, Artificial Sequence
  Description of Artificial Sequence: Synthetic oligonucleotide
agcgacuuaacagagugca

SEQ ID NO: 705819 - RNA, 19 nt, Artificial Sequence
  Description of Artificial Sequence: Synthetic oligonucleotide
agggaugagagcccaacug

SEQ ID NO: 705820 - RNA, 19 nt, Artificial Sequence
  Description of Artificial Sequence: Synthetic oligonucleotide
uaucuggguagacaggcuc

SEQ ID NO: 705821 - RNA, 19 nt, Artificial Sequence
  Description of Artificial Sequence: Synthetic oligonucleotide
aggggaucaggacucgaac

SEQ ID NO: 705822 - RNA, 19 nt, Artificial Sequence
  Description of Artificial Sequence: Synthetic oligonucleotide
gauacuugguagagggucc

SEQ ID NO: 705823 - RNA, 19 nt, Artificial Sequence
  Description of Artificial Sequence: Synthetic oligonucleotide
ugagguacucacguucccg

SEQ ID NO: 705824 - RNA, 19 nt, Artificial Sequence
  Description of Artificial Sequence: Synthetic oligonucleotide
ugcaaggggaucaggacuc

SEQ ID NO: 705825 - RNA, 19 nt, Artificial Sequence
  Description of Artificial Sequence: Synthetic oligonucleotide
caaacaucaccccgcauug

SEQ ID NO: 705826 - RNA, 19 nt, Artificial Sequence
  Description of Artificial Sequence: Synthetic oligonucleotide
cauugggccagcuuccggc

SEQ ID NO: 705827 - RNA, 19 nt, Artificial Sequence
  Description of Artificial Sequence: Synthetic oligonucleotide
cuguauuagggcaggggag

SEQ ID NO: 705828 - RNA, 19 nt, Artificial Sequence
  Description of Artificial Sequence: Synthetic oligonucleotide
gaaccggaggaagaugugg

SEQ ID NO: 705829 - RNA, 19 nt, Artificial Sequence
  Description of Artificial Sequence: Synthetic oligonucleotide
gacucuccaagaaacgaag

SEQ ID NO: 705830 - RNA, 19 nt, Artificial Sequence
  Description of Artificial Sequence: Synthetic oligonucleotide
gaugauaucuggguagaca

SEQ ID NO: 705831 - RNA, 19 nt, Artificial Sequence
  Description of Artificial Sequence: Synthetic oligonucleotide
gaugcaagauggucuugag

SEQ ID NO: 705832 - RNA, 19 nt, Artificial Sequence
  Description of Artificial Sequence: Synthetic oligonucleotide
  modified_base (2)..(2): a, c, u, g, unknown or other
cngacagcgacuuaacaga

SEQ ID NO: 705833 - RNA, 19 nt, Artificial Sequence
  Description of Artificial Sequence: Synthetic oligonucleotide
agcucaucgaacagcuucc

SEQ ID NO: 705834 - RNA, 19 nt, Artificial Sequence
  Description of Artificial Sequence: Synthetic oligonucleotide
uuccaaaccucuccauagc

SEQ ID NO: 705835 - RNA, 19 nt, Artificial Sequence
  Description of Artificial Sequence: Synthetic oligonucleotide
uccgaaagauauuucggau

SEQ ID NO: 705836 - RNA, 19 nt, Artificial Sequence
  Description of Artificial Sequence: Synthetic oligonucleotide
ugagcgucggggccgagcc

SEQ ID NO: 705837 - RNA, 19 nt, Artificial Sequence
  Description of Artificial Sequence: Synthetic oligonucleotide
acaaacuuuugauccacau

SEQ ID NO: 705838 - RNA, 19 nt, Artificial Sequence
  Description of Artificial Sequence: Synthetic oligonucleotide
aaacugagaagaacugugu

SEQ ID NO: 705839 - RNA, 19 nt, Artificial Sequence
  Description of Artificial Sequence: Synthetic oligonucleotide
cacaguguggcaguugucc

SEQ ID NO: 705840 - RNA, 19 nt, Artificial Sequence
  Description of Artificial Sequence: Synthetic oligonucleotide
gguagcgaaacugagaaga

SEQ ID NO: 705841 - RNA, 19 nt, Artificial Sequence
  Description of Artificial Sequence: Synthetic oligonucleotide
ugagaguucugcugccaag

SEQ ID NO: 705842 - RNA, 19 nt, Artificial Sequence
  Description of Artificial Sequence: Synthetic oligonucleotide
gaaccacucugacaaggcc

SEQ ID NO: 705843 - RNA, 19 nt, Artificial Sequence
  Description of Artificial Sequence: Synthetic oligonucleotide
guagaucagcgauacgaug

SEQ ID NO: 705844 - RNA, 19 nt, Artificial Sequence
  Description of Artificial Sequence: Synthetic oligonucleotide
ugggcagaauaaauagacu

SEQ ID NO: 705845 - RNA, 19 nt, Artificial Sequence
  Description of Artificial Sequence: Synthetic oligonucleotide
gauauagggccggacgacc

SEQ ID NO: 705846 - RNA, 19 nt, Artificial Sequence
  Description of Artificial Sequence: Synthetic oligonucleotide
caucaccccgcauugggcc

SEQ ID NO: 705847 - RNA, 19 nt, Artificial Sequence
  Description of Artificial Sequence: Synthetic oligonucleotide
aaggcucgaugacauccag

SEQ ID NO: 705848 - RNA, 19 nt, Artificial Sequence
  Description of Artificial Sequence: Synthetic oligonucleotide
  modified_base (3)..(3): a, c, u, g, unknown or other
uunagggcugcacgcuuca

SEQ ID NO: 705849 - RNA, 19 nt, Artificial Sequence
  Description of Artificial Sequence: Synthetic oligonucleotide
ggagucuagaaccacucug

SEQ ID NO: 705850 - RNA, 19 nt, Artificial Sequence
  Description of Artificial Sequence: Synthetic oligonucleotide
gucuagucuugccagaauc

SEQ ID NO: 705851 - RNA, 19 nt, Artificial Sequence
  Description of Artificial Sequence: Synthetic oligonucleotide
acaggcucgaugaggacac

SEQ ID NO: 705852 - RNA, 19 nt, Artificial Sequence
  Description of Artificial Sequence: Synthetic oligonucleotide
auauagggccggacgaccc

SEQ ID NO: 705853 - RNA, 19 nt, Artificial Sequence
  Description of Artificial Sequence: Synthetic oligonucleotide
uccuuggauacuugguaga

SEQ ID NO: 705854 - RNA, 19 nt, Artificial Sequence
  Description of Artificial Sequence: Synthetic oligonucleotide
aggguucucacuggguggc

SEQ ID NO: 705855 - RNA, 19 nt, Artificial Sequence
  Description of Artificial Sequence: Synthetic oligonucleotide
gaacuugccguacacccga

SEQ ID NO: 705856 - RNA, 19 nt, Artificial Sequence
  Description of Artificial Sequence: Synthetic oligonucleotide
caucuugcguucuugucuc

SEQ ID NO: 705857 - RNA, 19 nt, Artificial Sequence
  Description of Artificial Sequence: Synthetic oligonucleotide
auuguagaucagcgauacg

SEQ ID NO: 705858 - RNA, 19 nt, Artificial Sequence
  Description of Artificial Sequence: Synthetic oligonucleotide
ugggaaggcucgaugacau

SEQ ID NO: 705859 - RNA, 19 nt, Artificial Sequence
  Description of Artificial Sequence: Synthetic oligonucleotide
guccgaaagauauuucgga

SEQ ID NO: 705860 - RNA, 19 nt, Artificial Sequence
  Description of Artificial Sequence: Synthetic oligonucleotide
  modified_base (4)..(4): a, c, u, g, unknown or other
auunagggcugcacgcuuc

SEQ ID NO: 705861 - RNA, 19 nt, Artificial Sequence
  Description of Artificial Sequence: Synthetic oligonucleotide
uugguagagggucccaaau

SEQ ID NO: 705862 - RNA, 19 nt, Artificial Sequence
  Description of Artificial Sequence: Synthetic oligonucleotide
agagcccaacuguauuagg

SEQ ID NO: 705863 - RNA, 19 nt, Artificial Sequence
  Description of Artificial Sequence: Synthetic oligonucleotide
agaagaacugugugagcgu

SEQ ID NO: 705864 - RNA, 19 nt, Artificial Sequence
  Description of Artificial Sequence: Synthetic oligonucleotide
aaacaucaccccgcauugg

SEQ ID NO: 705865 - RNA, 19 nt, Artificial Sequence
  Description of Artificial Sequence: Synthetic oligonucleotide
gagcacauuguagaucagc

SEQ ID NO: 705866 - RNA, 19 nt, Artificial Sequence
  Description of Artificial Sequence: Synthetic oligonucleotide
uaacaugcucugucaaggu

SEQ ID NO: 705867 - RNA, 19 nt, Artificial Sequence
  Description of Artificial Sequence: Synthetic oligonucleotide
caaccuuucagagcccagg

SEQ ID NO: 705868 - RNA, 19 nt, Artificial Sequence
  Description of Artificial Sequence: Synthetic oligonucleotide
cuugcguucuugucucccc

SEQ ID NO: 705869 - RNA, 19 nt, Artificial Sequence
  Description of Artificial Sequence: Synthetic oligonucleotide
acucacguucccgaggguc

SEQ ID NO: 705870 - RNA, 19 nt, Artificial Sequence
  Description of Artificial Sequence: Synthetic oligonucleotide
agagggucccaaauaccgc

SEQ ID NO: 705871 - RNA, 19 nt, Artificial Sequence
  Description of Artificial Sequence: Synthetic oligonucleotide
aguggcauacuugcccugg

SEQ ID NO: 705872 - RNA, 19 nt, Artificial Sequence
  Description of Artificial Sequence: Synthetic oligonucleotide
uaccgcaggcagcacagug

SEQ ID NO: 705873 - RNA, 19 nt, Artificial Sequence
  Description of Artificial Sequence: Synthetic oligonucleotide
acgacccaggaacuugccg

SEQ ID NO: 705874 - RNA, 19 nt, Artificial Sequence
  Description of Artificial Sequence: Synthetic oligonucleotide
ugcuuccuaagaucuccag

SEQ ID NO: 705875 - RNA, 19 nt, Artificial Sequence
  Description of Artificial Sequence: Synthetic oligonucleotide
uugagguacucacguuccc

SEQ ID NO: 705876 - RNA, 19 nt, Artificial Sequence
  Description of Artificial Sequence: Synthetic oligonucleotide
gaagaggggcuccuggauc

SEQ ID NO: 705877 - RNA, 19 nt, Artificial Sequence
  Description of Artificial Sequence: Synthetic oligonucleotide
agucaaacaucaccccgca

SEQ ID NO: 705878 - RNA, 19 nt, Artificial Sequence
  Description of Artificial Sequence: Synthetic oligonucleotide
  modified_base (6)..(6): a, c, u, g, unknown or other
ucauunagggcugcacgcu

SEQ ID NO: 705879 - RNA, 19 nt, Artificial Sequence
  Description of Artificial Sequence: Synthetic oligonucleotide
gugguugcacuuguuuucg

SEQ ID NO: 705880 - RNA, 19 nt, Artificial Sequence
  Description of Artificial Sequence: Synthetic oligonucleotide
ugaaccggaggaagaugug

SEQ ID NO: 705881 - RNA, 19 nt, Artificial Sequence
  Description of Artificial Sequence: Synthetic oligonucleotide
guuuucggauauagggccg

SEQ ID NO: 705882 - RNA, 19 nt, Artificial Sequence
  Description of Artificial Sequence: Synthetic oligonucleotide
gcagaauaaauagacugug

SEQ ID NO: 705883 - RNA, 19 nt, Artificial Sequence
  Description of Artificial Sequence: Synthetic oligonucleotide
gguccgaaagauauuucgg

SEQ ID NO: 705884 - RNA, 19 nt, Artificial Sequence
  Description of Artificial Sequence: Synthetic oligonucleotide
cucugguagcgaaacugag

SEQ ID NO: 705885 - RNA, 19 nt, Artificial Sequence
  Description of Artificial Sequence: Synthetic oligonucleotide
caucaggacaaacuuuuga

SEQ ID NO: 705886 - RNA, 19 nt, Artificial Sequence
  Description of Artificial Sequence: Synthetic oligonucleotide
cuuggguccccuguagccg

SEQ ID NO: 705887 - RNA, 19 nt, Artificial Sequence
  Description of Artificial Sequence: Synthetic oligonucleotide
aggagcaucaggacaaacu

SEQ ID NO: 705888 - RNA, 19 nt, Artificial Sequence
  Description of Artificial Sequence: Synthetic oligonucleotide
gguuugauuccagugcucc

SEQ ID NO: 705889 - RNA, 19 nt, Artificial Sequence
  Description of Artificial Sequence: Synthetic oligonucleotide
uauagggccggacgaccca

SEQ ID NO: 705890 - RNA, 19 nt, Artificial Sequence
  Description of Artificial Sequence: Synthetic oligonucleotide
agacuaccaucuugcguuc

SEQ ID NO: 705891 - RNA, 19 nt, Artificial Sequence
  Description of Artificial Sequence: Synthetic oligonucleotide
gagguacucacguucccga

SEQ ID NO: 705892 - RNA, 19 nt, Artificial Sequence
  Description of Artificial Sequence: Synthetic oligonucleotide
caugaaagucuugagcaca

SEQ ID NO: 705893 - RNA, 19 nt, Artificial Sequence
  Description of Artificial Sequence: Synthetic oligonucleotide
uugccguacacccgaugca

SEQ ID NO: 705894 - RNA, 19 nt, Artificial Sequence
  Description of Artificial Sequence: Synthetic oligonucleotide
agggagucuagaaccacuc

SEQ ID NO: 705895 - RNA, 19 nt, Artificial Sequence
  Description of Artificial Sequence: Synthetic oligonucleotide
acaucaccccgcauugggc

SEQ ID NO: 705896 - RNA, 19 nt, Artificial Sequence
  Description of Artificial Sequence: Synthetic oligonucleotide
guugcucugguagcgaaac

SEQ ID NO: 705897 - RNA, 19 nt, Artificial Sequence
  Description of Artificial Sequence: Synthetic oligonucleotide
gacucgaaccaggaacugc

SEQ ID NO: 705898 - RNA, 19 nt, Artificial Sequence
  Description of Artificial Sequence: Synthetic oligonucleotide
ugguagcgaaacugagaag

SEQ ID NO: 705899 - RNA, 19 nt, Artificial Sequence
  Description of Artificial Sequence: Synthetic oligonucleotide
agggucaaauucaggguuc

SEQ ID NO: 705900 - RNA, 19 nt, Artificial Sequence
  Description of Artificial Sequence: Synthetic oligonucleotide
ucuugcguucuugucuccc

SEQ ID NO: 705901 - RNA, 19 nt, Artificial Sequence
  Description of Artificial Sequence: Synthetic oligonucleotide
auauuucggaugauaucug

SEQ ID NO: 705902 - RNA, 19 nt, Artificial Sequence
  Description of Artificial Sequence: Synthetic oligonucleotide
guacacccgaugcaagaug

SEQ ID NO: 705903 - RNA, 19 nt, Artificial Sequence
  Description of Artificial Sequence: Synthetic oligonucleotide
ugguugcacuuguuuucgg

SEQ ID NO: 705904 - RNA, 19 nt, Artificial Sequence
  Description of Artificial Sequence: Synthetic oligonucleotide
aacucauacaccagcugua

SEQ ID NO: 705905 - RNA, 19 nt, Artificial Sequence
  Description of Artificial Sequence: Synthetic oligonucleotide
uagcgaaacugagaagaac

SEQ ID NO: 705906 - RNA, 19 nt, Artificial Sequence
  Description of Artificial Sequence: Synthetic oligonucleotide
ggggaucaggacucgaacc

SEQ ID NO: 705907 - RNA, 19 nt, Artificial Sequence
  Description of Artificial Sequence: Synthetic oligonucleotide
cacgaaggcucgagguugg

SEQ ID NO: 705908 - RNA, 19 nt, Artificial Sequence
  Description of Artificial Sequence: Synthetic oligonucleotide
guagagggucccaaauacc

SEQ ID NO: 705909 - RNA, 19 nt, Artificial Sequence
  Description of Artificial Sequence: Synthetic oligonucleotide
gguggcacuggagacagcc

SEQ ID NO: 705910 - RNA, 19 nt, Artificial Sequence
  Description of Artificial Sequence: Synthetic oligonucleotide
agcgauacgaugguuugau

SEQ ID NO: 705911 - RNA, 19 nt, Artificial Sequence
  Description of Artificial Sequence: Synthetic oligonucleotide
aguguggcaguuguccuca

SEQ ID NO: 705912 - RNA, 19 nt, Artificial Sequence
  Description of Artificial Sequence: Synthetic oligonucleotide
agguacucacguucccgag

SEQ ID NO: 705913 - RNA, 19 nt, Artificial Sequence
  Description of Artificial Sequence: Synthetic oligonucleotide
aggacucgaaccaggaacu

SEQ ID NO: 705914 - RNA, 19 nt, Artificial Sequence
  Description of Artificial Sequence: Synthetic oligonucleotide
aggugccgaggguccaugc

SEQ ID NO: 705915 - RNA, 19 nt, Artificial Sequence
  Description of Artificial Sequence: Synthetic oligonucleotide
gaggagagugucccuggac

SEQ ID NO: 705916 - RNA, 19 nt, Artificial Sequence
  Description of Artificial Sequence: Synthetic oligonucleotide
acauaucucuuggccacag

SEQ ID NO: 705917 - RNA, 19 nt, Artificial Sequence
  Description of Artificial Sequence: Synthetic oligonucleotide
gucgcuccccaccacauuc

SEQ ID NO: 705918 - RNA, 19 nt, Artificial Sequence
  Description of Artificial Sequence: Synthetic oligonucleotide
ccuggucuagucuugccag

SEQ ID NO: 705919 - RNA, 19 nt, Artificial Sequence
  Description of Artificial Sequence: Synthetic oligonucleotide
acuugcccuggucuagucu

SEQ ID NO: 705920 - RNA, 19 nt, Artificial Sequence
  Description of Artificial Sequence: Synthetic oligonucleotide
gggaucaggacucgaacca

SEQ ID NO: 705921 - RNA, 19 nt, Artificial Sequence
  Description of Artificial Sequence: Synthetic oligonucleotide
auugggccagcuuccggcu

SEQ ID NO: 705922 - RNA, 19 nt, Artificial Sequence
  Description of Artificial Sequence: Synthetic oligonucleotide
ggccggacgacccaggaac

SEQ ID NO: 705923 - RNA, 19 nt, Artificial Sequence
  Description of Artificial Sequence: Synthetic oligonucleotide
cagcgacuuaacagagugc

SEQ ID NO: 705924 - RNA, 19 nt, Artificial Sequence
  Description of Artificial Sequence: Synthetic oligonucleotide
ucgcuccccaccacauucc

SEQ ID NO: 705925 - RNA, 19 nt, Artificial Sequence
  Description of Artificial Sequence: Synthetic oligonucleotide
ugucuuguugagggugagc

SEQ ID NO: 705926 - RNA, 19 nt, Artificial Sequence
  Description of Artificial Sequence: Synthetic oligonucleotide
guaggucuggaggaagcug

SEQ ID NO: 705927 - RNA, 19 nt, Artificial Sequence
  Description of Artificial Sequence: Synthetic oligonucleotide
aucagcgauacgaugguuu

SEQ ID NO: 705928 - RNA, 19 nt, Artificial Sequence
  Description of Artificial Sequence: Synthetic oligonucleotide
aaggggaucaggacucgaa

SEQ ID NO: 705929 - RNA, 19 nt, Artificial Sequence
  Description of Artificial Sequence: Synthetic oligonucleotide
acccgaugcaagauggucu

SEQ ID NO: 705930 - RNA, 19 nt, Artificial Sequence
  Description of Artificial Sequence: Synthetic oligonucleotide
uccccuguagccggcguag

SEQ ID NO: 705931 - RNA, 19 nt, Artificial Sequence
  Description of Artificial Sequence: Synthetic oligonucleotide
ggaacuugccguacacccg

SEQ ID NO: 705932 - RNA, 19 nt, Artificial Sequence
  Description of Artificial Sequence: Synthetic oligonucleotide
agggaccggcgggagaagc

SEQ ID NO: 705933 - RNA, 19 nt, Artificial Sequence
  Description of Artificial Sequence: Synthetic oligonucleotide
caggggaggaucccugaug

SEQ ID NO: 705934 - RNA, 19 nt, Artificial Sequence
  Description of Artificial Sequence: Synthetic oligonucleotide
ugccguacacccgaugcaa

SEQ ID NO: 705935 - RNA, 19 nt, Artificial Sequence
  Description of Artificial Sequence: Synthetic oligonucleotide
agacacagcgagccaccug

SEQ ID NO: 705936 - RNA, 19 nt, Artificial Sequence
  Description of Artificial Sequence: Synthetic oligonucleotide
ccaguauuugaggagcccc

SEQ ID NO: 705937 - RNA, 19 nt, Artificial Sequence
  Description of Artificial Sequence: Synthetic oligonucleotide
ucuugacguuccugggccu

SEQ ID NO: 705938 - RNA, 19 nt, Artificial Sequence
  Description of Artificial Sequence: Synthetic oligonucleotide
uggucuagucuugccagaa

SEQ ID NO: 705939 - RNA, 19 nt, Artificial Sequence
  Description of Artificial Sequence: Synthetic oligonucleotide
cccaacuguauuagggcag

SEQ ID NO: 705940 - RNA, 19 nt, Artificial Sequence
  Description of Artificial Sequence: Synthetic oligonucleotide
gaaggcucgaugacaucca

SEQ ID NO: 705941 - RNA, 19 nt, Artificial Sequence
  Description of Artificial Sequence: Synthetic oligonucleotide
caggaacuugccguacacc

SEQ ID NO: 705942 - RNA, 19 nt, Artificial Sequence
  Description of Artificial Sequence: Synthetic oligonucleotide
gcugguugcucugguagcg

SEQ ID NO: 705943 - RNA, 19 nt, Artificial Sequence
  Description of Artificial Sequence: Synthetic oligonucleotide
gguguaggcugagggacgg

SEQ ID NO: 705944 - RNA, 19 nt, Artificial Sequence
  Description of Artificial Sequence: Synthetic oligonucleotide
caguguggcaguuguccuc

SEQ ID NO: 705945 - RNA, 19 nt, Artificial Sequence
  Description of Artificial Sequence: Synthetic oligonucleotide
gucaagguggcauccuucu

SEQ ID NO: 705946 - RNA, 19 nt, Artificial Sequence
  Description of Artificial Sequence: Synthetic oligonucleotide
uucggauauagggccggac

SEQ ID NO: 705947 - RNA, 19 nt, Artificial Sequence
  Description of Artificial Sequence: Synthetic oligonucleotide
cgacuuaacagagugcaag

SEQ ID NO: 705948 - RNA, 19 nt, Artificial Sequence
  Description of Artificial Sequence: Synthetic oligonucleotide
ccaagacuaccaucuugcg

SEQ ID NO: 705949 - RNA, 19 nt, Artificial Sequence
  Description of Artificial Sequence: Synthetic oligonucleotide
gcucuugacguuccugggc

SEQ ID NO: 705950 - RNA, 19 nt, Artificial Sequence
  Description of Artificial Sequence: Synthetic oligonucleotide
aucaggacucgaaccagga

SEQ ID NO: 705951 - RNA, 19 nt, Artificial Sequence
  Description of Artificial Sequence: Synthetic oligonucleotide
aucaccccgcauugggcca

SEQ ID NO: 705952 - RNA, 19 nt, Artificial Sequence
  Description of Artificial Sequence: Synthetic oligonucleotide
cauagaugaaccggaggaa

SEQ ID NO: 705953 - RNA, 19 nt, Artificial Sequence
  Description of Artificial Sequence: Synthetic oligonucleotide
ccggauaacaugcucuguc

SEQ ID NO: 705954 - RNA, 19 nt, Artificial Sequence
  Description of Artificial Sequence: Synthetic oligonucleotide
ggauaacaugcucugucaa

SEQ ID NO: 705955 - RNA, 19 nt, Artificial Sequence
  Description of Artificial Sequence: Synthetic oligonucleotide
ggucuugagguacucacgu

SEQ ID NO: 705956 - RNA, 19 nt, Artificial Sequence
  Description of Artificial Sequence: Synthetic oligonucleotide
gggucccaaauaccgcagg

SEQ ID NO: 705957 - RNA, 19 nt, Artificial Sequence
  Description of Artificial Sequence: Synthetic oligonucleotide
cccgcauugggccagcuuc

SEQ ID NO: 705958 - RNA, 19 nt, Artificial Sequence
  Description of Artificial Sequence: Synthetic oligonucleotide
uuucggauauagggccgga

SEQ ID NO: 705959 - RNA, 19 nt, Artificial Sequence
  Description of Artificial Sequence: Synthetic oligonucleotide
gggguguaggcugagggac

SEQ ID NO: 705960 - RNA, 19 nt, Artificial Sequence
  Description of Artificial Sequence: Synthetic oligonucleotide
cacccgaugcaagaugguc

SEQ ID NO: 705961 - RNA, 19 nt, Artificial Sequence
  Description of Artificial Sequence: Synthetic oligonucleotide
gcgaaacugagaagaacug

SEQ ID NO: 705962 - RNA, 19 nt, Artificial Sequence
  Description of Artificial Sequence: Synthetic oligonucleotide
cccaaauaccgcaggcagc

SEQ ID NO: 705963 - RNA, 19 nt, Artificial Sequence
  Description of Artificial Sequence: Synthetic oligonucleotide
uguagccggcguagcugca

SEQ ID NO: 705964 - RNA, 19 nt, Artificial Sequence
  Description of Artificial Sequence: Synthetic oligonucleotide
gucccaaauaccgcaggca

SEQ ID NO: 705965 - RNA, 19 nt, Artificial Sequence
  Description of Artificial Sequence: Synthetic oligonucleotide
aaggccacggggagucgug

SEQ ID NO: 705966 - RNA, 19 nt, Artificial Sequence
  Description of Artificial Sequence: Synthetic oligonucleotide
ccuuggauacuugguagag

SEQ ID NO: 705967 - RNA, 19 nt, Artificial Sequence
  Description of Artificial Sequence: Synthetic oligonucleotide
guagcgaaacugagaagaa

SEQ ID NO: 705968 - RNA, 19 nt, Artificial Sequence
  Description of Artificial Sequence: Synthetic oligonucleotide
ggcagaauaaauagacugu

SEQ ID NO: 705969 - RNA, 19 nt, Artificial Sequence
  Description of Artificial Sequence: Synthetic oligonucleotide
cagagugcaaggggaucag

SEQ ID NO: 705970 - RNA, 19 nt, Artificial Sequence
  Description of Artificial Sequence: Synthetic oligonucleotide
uacuugcccuggucuaguc

SEQ ID NO: 705971 - RNA, 19 nt, Artificial Sequence
  Description of Artificial Sequence: Synthetic oligonucleotide
gggaugagagcccaacugu

SEQ ID NO: 705972 - RNA, 19 nt, Artificial Sequence
  Description of Artificial Sequence: Synthetic oligonucleotide
guagccggcguagcugcag

SEQ ID NO: 705973 - RNA, 19 nt, Artificial Sequence
  Description of Artificial Sequence: Synthetic oligonucleotide
guauuagggcaggggagga

SEQ ID NO: 705974 - RNA, 19 nt, Artificial Sequence
  Description of Artificial Sequence: Synthetic oligonucleotide
ggauauagggccggacgac

SEQ ID NO: 705975 - RNA, 19 nt, Artificial Sequence
  Description of Artificial Sequence: Synthetic oligonucleotide
ugcagguuuuaggccagua

SEQ ID NO: 705976 - RNA, 19 nt, Artificial Sequence
  Description of Artificial Sequence: Synthetic oligonucleotide
cugagaguucugcugccaa

SEQ ID NO: 705977 - RNA, 19 nt, Artificial Sequence
  Description of Artificial Sequence: Synthetic oligonucleotide
uacucacguucccgagggu

SEQ ID NO: 705978 - RNA, 19 nt, Artificial Sequence
  Description of Artificial Sequence: Synthetic oligonucleotide
gucggggccgagcccugcg

SEQ ID NO: 705979 - RNA, 19 nt, Artificial Sequence
  Description of Artificial Sequence: Synthetic oligonucleotide
gguucucacuggguggcag

SEQ ID NO: 705980 - RNA, 19 nt, Artificial Sequence
  Description of Artificial Sequence: Synthetic oligonucleotide
ggcucgaugaggacacccc

SEQ ID NO: 705981 - RNA, 19 nt, Artificial Sequence
  Description of Artificial Sequence: Synthetic oligonucleotide
cuggucuagucuugccaga

SEQ ID NO: 705982 - RNA, 19 nt, Artificial Sequence
  Description of Artificial Sequence: Synthetic oligonucleotide
ggacgacccaggaacuugc

SEQ ID NO: 705983 - RNA, 19 nt, Artificial Sequence
  Description of Artificial Sequence: Synthetic oligonucleotide
uggcaggguccgaaagaua

SEQ ID NO: 705984 - RNA, 19 nt, Artificial Sequence
  Description of Artificial Sequence: Synthetic oligonucleotide
uugacguuccugggccuuc

SEQ ID NO: 705985 - RNA, 19 nt, Artificial Sequence
  Description of Artificial Sequence: Synthetic oligonucleotide
cagggucaaauucaggguu

SEQ ID NO: 705986 - RNA, 19 nt, Artificial Sequence
  Description of Artificial Sequence: Synthetic oligonucleotide
gugagcugggcagaauaaa

SEQ ID NO: 705987 - RNA, 19 nt, Artificial Sequence
  Description of Artificial Sequence: Synthetic oligonucleotide
ccacgaaggcucgagguug

SEQ ID NO: 705988 - RNA, 19 nt, Artificial Sequence
  Description of Artificial Sequence: Synthetic oligonucleotide
  modified_base (2)..(2): a, c, u, g, unknown or other
unagggcugcacgcuucac

SEQ ID NO: 705989 - RNA, 19 nt, Artificial Sequence
  Description of Artificial Sequence: Synthetic oligonucleotide
ggacucuccaagaaacgaa

SEQ ID NO: 705990 - RNA, 19 nt, Artificial Sequence
  Description of Artificial Sequence: Synthetic oligonucleotide
guaugccagcugggcauag

SEQ ID NO: 705991 - RNA, 19 nt, Artificial Sequence
  Description of Artificial Sequence: Synthetic oligonucleotide
acgaaggcucgagguuggg

SEQ ID NO: 705992 - RNA, 19 nt, Artificial Sequence
  Description of Artificial Sequence: Synthetic oligonucleotide
aguaugccagcugggcaua

SEQ ID NO: 705993 - RNA, 19 nt, Artificial Sequence
  Description of Artificial Sequence: Synthetic oligonucleotide
agccggcguagcugcagcu

SEQ ID NO: 705994 - RNA, 19 nt, Artificial Sequence
  Description of Artificial Sequence: Synthetic oligonucleotide
ggccacggggagucguggg

SEQ ID NO: 705995 - RNA, 19 nt, Artificial Sequence
  Description of Artificial Sequence: Synthetic oligonucleotide
ccgcauugggccagcuucc

SEQ ID NO: 705996 - RNA, 19 nt, Artificial Sequence
  Description of Artificial Sequence: Synthetic oligonucleotide
gugagcgucggggccgagc

SEQ ID NO: 705997 - RNA, 19 nt, Artificial Sequence
  Description of Artificial Sequence: Synthetic oligonucleotide
cuguagauguggccacgaa

SEQ ID NO: 705998 - RNA, 19 nt, Artificial Sequence
  Description of Artificial Sequence: Synthetic oligonucleotide
cuggagacacagcgagcca

SEQ ID NO: 705999 - RNA, 19 nt, Artificial Sequence
  Description of Artificial Sequence: Synthetic oligonucleotide
gggagcgcaaagccauuga

SEQ ID NO: 706000 - RNA, 19 nt, Artificial Sequence
  Description of Artificial Sequence: Synthetic oligonucleotide
gacagcgacuuaacagagu

SEQ ID NO: 706001 - RNA, 19 nt, Artificial Sequence
  Description of Artificial Sequence: Synthetic oligonucleotide
gggcugauagcucuggguu

SEQ ID NO: 706002 - RNA, 19 nt, Artificial Sequence
  Description of Artificial Sequence: Synthetic oligonucleotide
gagcgucggggccgagccc

SEQ ID NO: 706003 - RNA, 19 nt, Artificial Sequence
  Description of Artificial Sequence: Synthetic oligonucleotide
gcaaggggaucaggacucg

SEQ ID NO: 706004 - RNA, 19 nt, Artificial Sequence
  Description of Artificial Sequence: Synthetic oligonucleotide
ggaugagagcccaacugua

SEQ ID NO: 706005 - RNA, 19 nt, Artificial Sequence
  Description of Artificial Sequence: Synthetic oligonucleotide
agguugggcucauccucuu

SEQ ID NO: 706006 - RNA, 19 nt, Artificial Sequence
  Description of Artificial Sequence: Synthetic oligonucleotide
  modified_base (5)..(5): a, c, u, g, unknown or other
cauunagggcugcacgcuu

SEQ ID NO: 706007 - RNA, 19 nt, Artificial Sequence
  Description of Artificial Sequence: Synthetic oligonucleotide
cagcuuguaggaagcugua

SEQ ID NO: 706008 - RNA, 19 nt, Artificial Sequence
  Description of Artificial Sequence: Synthetic oligonucleotide
gcugauagcucuggguuua

SEQ ID NO: 706009 - RNA, 19 nt, Artificial Sequence
  Description of Artificial Sequence: Synthetic oligonucleotide
ggacucgaaccaggaacug

SEQ ID NO: 706010 - RNA, 19 nt, Artificial Sequence
  Description of Artificial Sequence: Synthetic oligonucleotide
caggguccgaaagauauuu

SEQ ID NO: 706011 - RNA, 19 nt, Artificial Sequence
  Description of Artificial Sequence: Synthetic oligonucleotide
gcgggagaagccguccacc

SEQ ID NO: 706012 - RNA, 19 nt, Artificial Sequence
  Description of Artificial Sequence: Synthetic oligonucleotide
cuagucuugccagaaucuu

SEQ ID NO: 706013 - RNA, 19 nt, Artificial Sequence
  Description of Artificial Sequence: Synthetic oligonucleotide
gguugggcucauccucuuc

SEQ ID NO: 706014 - RNA, 19 nt, Artificial Sequence
  Description of Artificial Sequence: Synthetic oligonucleotide
gagggaccggcgggagaag

SEQ ID NO: 706015 - RNA, 19 nt, Artificial Sequence
  Description of Artificial Sequence: Synthetic oligonucleotide
ggggcugauagcucugggu

SEQ ID NO: 706016 - RNA, 19 nt, Artificial Sequence
  Description of Artificial Sequence: Synthetic oligonucleotide
ggccacgaaggcucgaggu

SEQ ID NO: 706017 - RNA, 19 nt, Artificial Sequence
  Description of Artificial Sequence: Synthetic oligonucleotide
ggagcgcaaagccauugau

SEQ ID NO: 706018 - RNA, 19 nt, Artificial Sequence
  Description of Artificial Sequence: Synthetic oligonucleotide
cccuggucuagucuugcca

SEQ ID NO: 706019 - RNA, 19 nt, Artificial Sequence
  Description of Artificial Sequence: Synthetic oligonucleotide
cagcgauacgaugguuuga

SEQ ID NO: 706020 - RNA, 19 nt, Artificial Sequence
  Description of Artificial Sequence: Synthetic oligonucleotide
gcuguagauguggccacga

SEQ ID NO: 706021 - RNA, 19 nt, Artificial Sequence
  Description of Artificial Sequence: Synthetic oligonucleotide
gccguacacccgaugcaag

SEQ ID NO: 706022 - RNA, 19 nt, Artificial Sequence
  Description of Artificial Sequence: Synthetic oligonucleotide
gggaccggcgggagaagcc

SEQ ID NO: 706023 - RNA, 19 nt, Artificial Sequence
  Description of Artificial Sequence: Synthetic oligonucleotide
auaccgcaggcagcacagu

SEQ ID NO: 706024 - RNA, 19 nt, Artificial Sequence
  Description of Artificial Sequence: Synthetic oligonucleotide
  modified_base (11)..(11): a, c, u, g, unknown or other
ccaguucauunagggcugc

SEQ ID NO: 706025 - RNA, 19 nt, Artificial Sequence
  Description of Artificial Sequence: Synthetic oligonucleotide
ccguacacccgaugcaaga

SEQ ID NO: 706026 - RNA, 19 nt, Artificial Sequence
  Description of Artificial Sequence: Synthetic oligonucleotide
gcgagccaccugcuugaag

SEQ ID NO: 706027 - RNA, 19 nt, Artificial Sequence
  Description of Artificial Sequence: Synthetic oligonucleotide
gcccuggucuagucuugcc

SEQ ID NO: 706028 - RNA, 19 nt, Artificial Sequence
  Description of Artificial Sequence: Synthetic oligonucleotide
gggagucuagaaccacucu

SEQ ID NO: 706029 - RNA, 19 nt, Artificial Sequence
  Description of Artificial Sequence: Synthetic oligonucleotide
cuccauagcucuugacguu

SEQ ID NO: 706030 - RNA, 19 nt, Artificial Sequence
  Description of Artificial Sequence: Synthetic oligonucleotide
gacuaccaucuugcguucu

SEQ ID NO: 706031 - RNA, 19 nt, Artificial Sequence
  Description of Artificial Sequence: Synthetic oligonucleotide
guccccuguagccggcgua

SEQ ID NO: 706032 - RNA, 19 nt, Artificial Sequence
  Description of Artificial Sequence: Synthetic oligonucleotide
cgaugcaagauggucuuga

SEQ ID NO: 706033 - RNA, 19 nt, Artificial Sequence
  Description of Artificial Sequence: Synthetic oligonucleotide
caggcucgaugaggacacc

SEQ ID NO: 706034 - RNA, 19 nt, Artificial Sequence
  Description of Artificial Sequence: Synthetic oligonucleotide
gaucagcgauacgaugguu

SEQ ID NO: 706035 - RNA, 19 nt, Artificial Sequence
  Description of Artificial Sequence: Synthetic oligonucleotide
gguugcucugguagcgaaa

SEQ ID NO: 706036 - RNA, 19 nt, Artificial Sequence
  Description of Artificial Sequence: Synthetic oligonucleotide
ggcugauagcucuggguuu

SEQ ID NO: 706037 - RNA, 19 nt, Artificial Sequence
  Description of Artificial Sequence: Synthetic oligonucleotide
gggucaaauucaggguucu

SEQ ID NO: 706038 - RNA, 19 nt, Artificial Sequence
  Description of Artificial Sequence: Synthetic oligonucleotide
ggcguagcugcagcucuuc

SEQ ID NO: 706039 - RNA, 19 nt, Artificial Sequence
  Description of Artificial Sequence: Synthetic oligonucleotide
caaugaggcucaggaugua

SEQ ID NO: 706040 - RNA, 19 nt, Artificial Sequence
  Description of Artificial Sequence: Synthetic oligonucleotide
gugugagcgucggggccga

SEQ ID NO: 706041 - RNA, 19 nt, Artificial Sequence
  Description of Artificial Sequence: Synthetic oligonucleotide
gcgacuuaacagagugcaa

SEQ ID NO: 706042 - RNA, 19 nt, Artificial Sequence
  Description of Artificial Sequence: Synthetic oligonucleotide
cgcauugggccagcuuccg

SEQ ID NO: 706043 - RNA, 19 nt, Artificial Sequence
  Description of Artificial Sequence: Synthetic oligonucleotide
cacggggagucgugggccu

SEQ ID NO: 706044 - RNA, 19 nt, Artificial Sequence
  Description of Artificial Sequence: Synthetic oligonucleotide
cggaugauaucuggguaga

SEQ ID NO: 706045 - RNA, 19 nt, Artificial Sequence
  Description of Artificial Sequence: Synthetic oligonucleotide
gccacgaaggcucgagguu

SEQ ID NO: 706046 - RNA, 19 nt, Artificial Sequence
  Description of Artificial Sequence: Synthetic oligonucleotide
caaggccacggggagucgu

SEQ ID NO: 706047 - RNA, 19 nt, Artificial Sequence
  Description of Artificial Sequence: Synthetic oligonucleotide
cuugacguuccugggccuu

SEQ ID NO: 706048 - RNA, 19 nt, Artificial Sequence
  Description of Artificial Sequence: Synthetic oligonucleotide
gagugagcucuugcugguu

SEQ ID NO: 706049 - RNA, 19 nt, Artificial Sequence
  Description of Artificial Sequence: Synthetic oligonucleotide
ccgaugcaagauggucuug

SEQ ID NO: 706050 - RNA, 19 nt, Artificial Sequence
  Description of Artificial Sequence: Synthetic oligonucleotide
cacauuccaccaguucauu

SEQ ID NO: 706051 - RNA, 19 nt, Artificial Sequence
  Description of Artificial Sequence: Synthetic oligonucleotide
ggaaggcccugaccaggcu

SEQ ID NO: 706052 - RNA, 19 nt, Artificial Sequence
  Description of Artificial Sequence: Synthetic oligonucleotide
cacagcgagccaccugcuu

SEQ ID NO: 706053 - RNA, 19 nt, Artificial Sequence
  Description of Artificial Sequence: Synthetic oligonucleotide
accccgcauugggccagcu

SEQ ID NO: 706054 - RNA, 19 nt, Artificial Sequence
  Description of Artificial Sequence: Synthetic oligonucleotide
cuucgucuccauggccagu

SEQ ID NO: 706055 - RNA, 19 nt, Artificial Sequence
  Description of Artificial Sequence: Synthetic oligonucleotide
gcccugcggagggaccggc

SEQ ID NO: 706056 - RNA, 19 nt, Artificial Sequence
  Description of Artificial Sequence: Synthetic oligonucleotide
gcgauacgaugguuugauu

SEQ ID NO: 706057 - RNA, 19 nt, Artificial Sequence
  Description of Artificial Sequence: Synthetic oligonucleotide
ccgggucgcuccccaccac

SEQ ID NO: 706058 - RNA, 19 nt, Artificial Sequence
  Description of Artificial Sequence: Synthetic oligonucleotide
gccggacgacccaggaacu

SEQ ID NO: 706059 - RNA, 19 nt, Artificial Sequence
  Description of Artificial Sequence: Synthetic oligonucleotide
gggucgcuccccaccacau

SEQ ID NO: 706060 - RNA, 19 nt, Artificial Sequence
  Description of Artificial Sequence: Synthetic oligonucleotide
cguacacccgaugcaagau

SEQ ID NO: 706061 - RNA, 19 nt, Artificial Sequence
  Description of Artificial Sequence: Synthetic oligonucleotide
cccggauaacaugcucugu

SEQ ID NO: 706062 - RNA, 19 nt, Artificial Sequence
  Description of Artificial Sequence: Synthetic oligonucleotide
gcgucggggccgagcccug

SEQ ID NO: 706063 - RNA, 19 nt, Artificial Sequence
  Description of Artificial Sequence: Synthetic oligonucleotide
ggcucgagguugggcucau

SEQ ID NO: 706064 - RNA, 19 nt, Artificial Sequence
  Description of Artificial Sequence: Synthetic oligonucleotide
ccggacgacccaggaacuu

SEQ ID NO: 706065 - RNA, 19 nt, Artificial Sequence
  Description of Artificial Sequence: Synthetic oligonucleotide
ccccgcauugggccagcuu

SEQ ID NO: 706066 - RNA, 19 nt, Artificial Sequence
  Description of Artificial Sequence: Synthetic oligonucleotide
cggcguagcugcagcucuu

SEQ ID NO: 706067 - RNA, 19 nt, Artificial Sequence
  Description of Artificial Sequence: Synthetic oligonucleotide
uguagguuaaaucucagcg

SEQ ID NO: 706068 - RNA, 19 nt, Artificial Sequence
  Description of Artificial Sequence: Synthetic oligonucleotide
uguacuguagguuaaaucu

SEQ ID NO: 706069 - RNA, 19 nt, Artificial Sequence
  Description of Artificial Sequence: Synthetic oligonucleotide
uuuuguagaaaacagcgug

SEQ ID NO: 706070 - RNA, 19 nt, Artificial Sequence
  Description of Artificial Sequence: Synthetic oligonucleotide
ucggagaaaaucaaggcag

SEQ ID NO: 706071 - RNA, 19 nt, Artificial Sequence
  Description of Artificial Sequence: Synthetic oligonucleotide
caauucaugggcuugagag

SEQ ID NO: 706072 - RNA, 19 nt, Artificial Sequence
  Description of Artificial Sequence: Synthetic oligonucleotide
uuuguagaaaacagcgugg

SEQ ID NO: 706073 - RNA, 19 nt, Artificial Sequence
  Description of Artificial Sequence: Synthetic oligonucleotide
aaacagaucggagaaaauc

SEQ ID NO: 706074 - RNA, 19 nt, Artificial Sequence
  Description of Artificial Sequence: Synthetic oligonucleotide
caaagaucaacugacaugc

SEQ ID NO: 706075 - RNA, 19 nt, Artificial Sequence
  Description of Artificial Sequence: Synthetic oligonucleotide
cauuauagacucuuguucc

SEQ ID NO: 706076 - RNA, 19 nt, Artificial Sequence
  Description of Artificial Sequence: Synthetic oligonucleotide
uagguuaaaucucagcggc

SEQ ID NO: 706077 - RNA, 19 nt, Artificial Sequence
  Description of Artificial Sequence: Synthetic oligonucleotide
aaccaagaacagcauaaac

SEQ ID NO: 706078 - RNA, 19 nt, Artificial Sequence
  Description of Artificial Sequence: Synthetic oligonucleotide
uccggugugccgaagaugg

SEQ ID NO: 706079 - RNA, 19 nt, Artificial Sequence
  Description of Artificial Sequence: Synthetic oligonucleotide
agucaagcuggauuguucc

SEQ ID NO: 706080 - RNA, 19 nt, Artificial Sequence
  Description of Artificial Sequence: Synthetic oligonucleotide
gguagauaaagccaagugg

SEQ ID NO: 706081 - RNA, 19 nt, Artificial Sequence
  Description of Artificial Sequence: Synthetic oligonucleotide
acauugauggggccgaccc

SEQ ID NO: 706082 - RNA, 19 nt, Artificial Sequence
  Description of Artificial Sequence: Synthetic oligonucleotide
uucaggggaaucaaaaugu

SEQ ID NO: 706083 - RNA, 19 nt, Artificial Sequence
  Description of Artificial Sequence: Synthetic oligonucleotide
uaccgauuugccuucaggg

SEQ ID NO: 706084 - RNA, 19 nt, Artificial Sequence
  Description of Artificial Sequence: Synthetic oligonucleotide
gaacaugggcacuagagug

SEQ ID NO: 706085 - RNA, 19 nt, Artificial Sequence
  Description of Artificial Sequence: Synthetic oligonucleotide
aagaucaacugacaugcca

SEQ ID NO: 706086 - RNA, 19 nt, Artificial Sequence
  Description of Artificial Sequence: Synthetic oligonucleotide
agccccucaaaccaagugc

SEQ ID NO: 706087 - RNA, 19 nt, Artificial Sequence
  Description of Artificial Sequence: Synthetic oligonucleotide
aacagcauaaacagaucgg

SEQ ID NO: 706088 - RNA, 19 nt, Artificial Sequence
  Description of Artificial Sequence: Synthetic oligonucleotide
caugucugcccuauaaugc

SEQ ID NO: 706089 - RNA, 19 nt, Artificial Sequence
  Description of Artificial Sequence: Synthetic oligonucleotide
aacagaucggagaaaauca

SEQ ID NO: 706090 - RNA, 19 nt, Artificial Sequence
  Description of Artificial Sequence: Synthetic oligonucleotide
aaaaucaaggcagccucgg

SEQ ID NO: 706091 - RNA, 19 nt, Artificial Sequence
  Description of Artificial Sequence: Synthetic oligonucleotide
uagacauuguuguaccugc

SEQ ID NO: 706092 - RNA, 19 nt, Artificial Sequence
  Description of Artificial Sequence: Synthetic oligonucleotide
aauccgcucuaaaaggggc

SEQ ID NO: 706093 - RNA, 19 nt, Artificial Sequence
  Description of Artificial Sequence: Synthetic oligonucleotide
caaauccgcucuaaaaggg

SEQ ID NO: 706094 - RNA, 19 nt, Artificial Sequence
  Description of Artificial Sequence: Synthetic oligonucleotide
ugacaugccacacccauac

SEQ ID NO: 706095 - RNA, 19 nt, Artificial Sequence
  Description of Artificial Sequence: Synthetic oligonucleotide
uuauucuccuccuauguaa

SEQ ID NO: 706096 - RNA, 19 nt, Artificial Sequence
  Description of Artificial Sequence: Synthetic oligonucleotide
uguuguaggaccugcucag

SEQ ID NO: 706097 - RNA, 19 nt, Artificial Sequence
  Description of Artificial Sequence: Synthetic oligonucleotide
agaaaugcccgacacucuc

SEQ ID NO: 706098 - RNA, 19 nt, Artificial Sequence
  Description of Artificial Sequence: Synthetic oligonucleotide
ucuuagguccauagaaagc

SEQ ID NO: 706099 - RNA, 19 nt, Artificial Sequence
  Description of Artificial Sequence: Synthetic oligonucleotide
uccucgaucacaugaagcu

SEQ ID NO: 706100 - RNA, 19 nt, Artificial Sequence
  Description of Artificial Sequence: Synthetic oligonucleotide
ugcccuauaaugcucccag

SEQ ID NO: 706101 - RNA, 19 nt, Artificial Sequence
  Description of Artificial Sequence: Synthetic oligonucleotide
uacuguagguuaaaucuca

SEQ ID NO: 706102 - RNA, 19 nt, Artificial Sequence
  Description of Artificial Sequence: Synthetic oligonucleotide
gaaacuucuagccuccgga

SEQ ID NO: 706103 - RNA, 19 nt, Artificial Sequence
  Description of Artificial Sequence: Synthetic oligonucleotide
gaucccgagaaacuucuag

SEQ ID NO: 706104 - RNA, 19 nt, Artificial Sequence
  Description of Artificial Sequence: Synthetic oligonucleotide
aaaagccagauuccguacu

SEQ ID NO: 706105 - RNA, 19 nt, Artificial Sequence
  Description of Artificial Sequence: Synthetic oligonucleotide
aaucaaggcagccucggau

SEQ ID NO: 706106 - RNA, 19 nt, Artificial Sequence
  Description of Artificial Sequence: Synthetic oligonucleotide
ggcaaauccgcucuaaaag

SEQ ID NO: 706107 - RNA, 19 nt, Artificial Sequence
  Description of Artificial Sequence: Synthetic oligonucleotide
guuggaagcgccauaggcg

SEQ ID NO: 706108 - RNA, 19 nt, Artificial Sequence
  Description of Artificial Sequence: Synthetic oligonucleotide
aaauccgcucuaaaagggg

SEQ ID NO: 706109 - RNA, 19 nt, Artificial Sequence
  Description of Artificial Sequence: Synthetic oligonucleotide
aucaaggcagccucggauc

SEQ ID NO: 706110 - RNA, 19 nt, Artificial Sequence
  Description of Artificial Sequence: Synthetic oligonucleotide
uguuguaccugccuggcau

SEQ ID NO: 706111 - RNA, 19 nt, Artificial Sequence
  Description of Artificial Sequence: Synthetic oligonucleotide
ucucgaguccguauguuca

SEQ ID NO: 706112 - RNA, 19 nt, Artificial Sequence
  Description of Artificial Sequence: Synthetic oligonucleotide
accgauuugccuucagggg

SEQ ID NO: 706113 - RNA, 19 nt, Artificial Sequence
  Description of Artificial Sequence: Synthetic oligonucleotide
gaagcugaucccgagaaac

SEQ ID NO: 706114 - RNA, 19 nt, Artificial Sequence
  Description of Artificial Sequence: Synthetic oligonucleotide
caacugacaugccacaccc

SEQ ID NO: 706115 - RNA, 19 nt, Artificial Sequence
  Description of Artificial Sequence: Synthetic oligonucleotide
aaugcccgacacucucugc

SEQ ID NO: 706116 - RNA, 19 nt, Artificial Sequence
  Description of Artificial Sequence: Synthetic oligonucleotide
uagaaaacagcgugggagu

SEQ ID NO: 706117 - RNA, 19 nt, Artificial Sequence
  Description of Artificial Sequence: Synthetic oligonucleotide
agcagcuaugaucuccugg

SEQ ID NO: 706118 - RNA, 19 nt, Artificial Sequence
  Description of Artificial Sequence: Synthetic oligonucleotide
gcaaauccgcucuaaaagg

SEQ ID NO: 706119 - RNA, 19 nt, Artificial Sequence
  Description of Artificial Sequence: Synthetic oligonucleotide
ugaagcuuaaagugguuau

SEQ ID NO: 706120 - RNA, 19 nt, Artificial Sequence
  Description of Artificial Sequence: Synthetic oligonucleotide
aaaugcccgacacucucug

SEQ ID NO: 706121 - RNA, 19 nt, Artificial Sequence
  Description of Artificial Sequence: Synthetic oligonucleotide
ucggcagagaacagcaccc

SEQ ID NO: 706122 - RNA, 19 nt, Artificial Sequence
  Description of Artificial Sequence: Synthetic oligonucleotide
cucagaacauuucuucggc

SEQ ID NO: 706123 - RNA, 19 nt, Artificial Sequence
  Description of Artificial Sequence: Synthetic oligonucleotide
ucucaugagucuaugccuc

SEQ ID NO: 706124 - RNA, 19 nt, Artificial Sequence
  Description of Artificial Sequence: Synthetic oligonucleotide
aggaaagcuaucugaggag

SEQ ID NO: 706125 - RNA, 19 nt, Artificial Sequence
  Description of Artificial Sequence: Synthetic oligonucleotide
agcucucaugagucuaugc

SEQ ID NO: 706126 - RNA, 19 nt, Artificial Sequence
  Description of Artificial Sequence: Synthetic oligonucleotide
auuauagacucuuguuccu

SEQ ID NO: 706127 - RNA, 19 nt, Artificial Sequence
  Description of Artificial Sequence: Synthetic oligonucleotide
uagguccauagaaagcgcc

SEQ ID NO: 706128 - RNA, 19 nt, Artificial Sequence
  Description of Artificial Sequence: Synthetic oligonucleotide
uuaaagugguuauccuuga

SEQ ID NO: 706129 - RNA, 19 nt, Artificial Sequence
  Description of Artificial Sequence: Synthetic oligonucleotide
uccguauguucacaguucu

SEQ ID NO: 706130 - RNA, 19 nt, Artificial Sequence
  Description of Artificial Sequence: Synthetic oligonucleotide
gauaaggaccggaugcucc

SEQ ID NO: 706131 - RNA, 19 nt, Artificial Sequence
  Description of Artificial Sequence: Synthetic oligonucleotide
uuguacuguagguuaaauc

SEQ ID NO: 706132 - RNA, 19 nt, Artificial Sequence
  Description of Artificial Sequence: Synthetic oligonucleotide
caguccagagucagcaucg

SEQ ID NO: 706133 - RNA, 19 nt, Artificial Sequence
  Description of Artificial Sequence: Synthetic oligonucleotide
gaccggaugcuccagggcc

SEQ ID NO: 706134 - RNA, 19 nt, Artificial Sequence
  Description of Artificial Sequence: Synthetic oligonucleotide
guuggggaaagaaaugccc

SEQ ID NO: 706135 - RNA, 19 nt, Artificial Sequence
  Description of Artificial Sequence: Synthetic oligonucleotide
agaguaccgauuugccuuc

SEQ ID NO: 706136 - RNA, 19 nt, Artificial Sequence
  Description of Artificial Sequence: Synthetic oligonucleotide
acucccaacauccucucca

SEQ ID NO: 706137 - RNA, 19 nt, Artificial Sequence
  Description of Artificial Sequence: Synthetic oligonucleotide
uccuccuauguaaacagua

SEQ ID NO: 706138 - RNA, 19 nt, Artificial Sequence
  Description of Artificial Sequence: Synthetic oligonucleotide
aacucuguguuggggaaag

SEQ ID NO: 706139 - RNA, 19 nt, Artificial Sequence
  Description of Artificial Sequence: Synthetic oligonucleotide
ugggcuaggaacuccuaug

SEQ ID NO: 706140 - RNA, 19 nt, Artificial Sequence
  Description of Artificial Sequence: Synthetic oligonucleotide
ucaguaacucuguguuggg

SEQ ID NO: 706141 - RNA, 19 nt, Artificial Sequence
  Description of Artificial Sequence: Synthetic oligonucleotide
acagcauaaacagaucgga

SEQ ID NO: 706142 - RNA, 19 nt, Artificial Sequence
  Description of Artificial Sequence: Synthetic oligonucleotide
acagacucggccaagccuc

SEQ ID NO: 706143 - RNA, 19 nt, Artificial Sequence
  Description of Artificial Sequence: Synthetic oligonucleotide
guagugggcaagcugggcc

SEQ ID NO: 706144 - RNA, 19 nt, Artificial Sequence
  Description of Artificial Sequence: Synthetic oligonucleotide
uggccggguagauaaagcc

SEQ ID NO: 706145 - RNA, 19 nt, Artificial Sequence
  Description of Artificial Sequence: Synthetic oligonucleotide
cagaaccaagcacugcucg

SEQ ID NO: 706146 - RNA, 19 nt, Artificial Sequence
  Description of Artificial Sequence: Synthetic oligonucleotide
uggauuguuccacauugau

SEQ ID NO: 706147 - RNA, 19 nt, Artificial Sequence
  Description of Artificial Sequence: Synthetic oligonucleotide
acagcgugggaguuuucac

SEQ ID NO: 706148 - RNA, 19 nt, Artificial Sequence
  Description of Artificial Sequence: Synthetic oligonucleotide
ugagucuaugccucaccag

SEQ ID NO: 706149 - RNA, 19 nt, Artificial Sequence
  Description of Artificial Sequence: Synthetic oligonucleotide
cucggcagagaacagcacc

SEQ ID NO: 706150 - RNA, 19 nt, Artificial Sequence
  Description of Artificial Sequence: Synthetic oligonucleotide
aaacuucuagccuccggaa

SEQ ID NO: 706151 - RNA, 19 nt, Artificial Sequence
  Description of Artificial Sequence: Synthetic oligonucleotide
guaccgauuugccuucagg

SEQ ID NO: 706152 - RNA, 19 nt, Artificial Sequence
  Description of Artificial Sequence: Synthetic oligonucleotide
gcaaagaucaacugacaug

SEQ ID NO: 706153 - RNA, 19 nt, Artificial Sequence
  Description of Artificial Sequence: Synthetic oligonucleotide
cuguagguuaaaucucagc

SEQ ID NO: 706154 - RNA, 19 nt, Artificial Sequence
  Description of Artificial Sequence: Synthetic oligonucleotide
ugagcuucggacuguccgc

SEQ ID NO: 706155 - RNA, 19 nt, Artificial Sequence
  Description of Artificial Sequence: Synthetic oligonucleotide
augagucuaugccucacca

SEQ ID NO: 706156 - RNA, 19 nt, Artificial Sequence
  Description of Artificial Sequence: Synthetic oligonucleotide
ucagaacauuucuucggca

SEQ ID NO: 706157 - RNA, 19 nt, Artificial Sequence
  Description of Artificial Sequence: Synthetic oligonucleotide
uccccuaggaaaccagaug

SEQ ID NO: 706158 - RNA, 19 nt, Artificial Sequence
  Description of Artificial Sequence: Synthetic oligonucleotide
uuaauccucccagacugcc

SEQ ID NO: 706159 - RNA, 19 nt, Artificial Sequence
  Description of Artificial Sequence: Synthetic oligonucleotide
uucuccuccuauguaaaca

SEQ ID NO: 706160 - RNA, 19 nt, Artificial Sequence
  Description of Artificial Sequence: Synthetic oligonucleotide
aacuccuaugguaagggau

SEQ ID NO: 706161 - RNA, 19 nt, Artificial Sequence
  Description of Artificial Sequence: Synthetic oligonucleotide
ggaaagaaaugcccgacac

SEQ ID NO: 706162 - RNA, 19 nt, Artificial Sequence
  Description of Artificial Sequence: Synthetic oligonucleotide
guagacauuguuguaccug

SEQ ID NO: 706163 - RNA, 19 nt, Artificial Sequence
  Description of Artificial Sequence: Synthetic oligonucleotide
agauuccguacuuggaccu

SEQ ID NO: 706164 - RNA, 19 nt, Artificial Sequence
  Description of Artificial Sequence: Synthetic oligonucleotide
ugggcgaacaucaggcagu

SEQ ID NO: 706165 - RNA, 19 nt, Artificial Sequence
  Description of Artificial Sequence: Synthetic oligonucleotide
agcgugggaguuuucaccu

SEQ ID NO: 706166 - RNA, 19 nt, Artificial Sequence
  Description of Artificial Sequence: Synthetic oligonucleotide
cagcauaaacagaucggag

SEQ ID NO: 706167 - RNA, 19 nt, Artificial Sequence
  Description of Artificial Sequence: Synthetic oligonucleotide
uggcaaauccgcucuaaaa

SEQ ID NO: 706168 - RNA, 19 nt, Artificial Sequence
  Description of Artificial Sequence: Synthetic oligonucleotide
ucaggggaaucaaaauguc

SEQ ID NO: 706169 - RNA, 19 nt, Artificial Sequence
  Description of Artificial Sequence: Synthetic oligonucleotide
aacauccucuccacagaac

SEQ ID NO: 706170 - RNA, 19 nt, Artificial Sequence
  Description of Artificial Sequence: Synthetic oligonucleotide
aaucuguccggugugccga

SEQ ID NO: 706171 - RNA, 19 nt, Artificial Sequence
  Description of Artificial Sequence: Synthetic oligonucleotide
ccccuaggaaaccagaugg

SEQ ID NO: 706172 - RNA, 19 nt, Artificial Sequence
  Description of Artificial Sequence: Synthetic oligonucleotide
aacagcgugggaguuuuca

SEQ ID NO: 706173 - RNA, 19 nt, Artificial Sequence
  Description of Artificial Sequence: Synthetic oligonucleotide
ugccagaguaccgauuugc

SEQ ID NO: 706174 - RNA, 19 nt, Artificial Sequence
  Description of Artificial Sequence: Synthetic oligonucleotide
aaaacagcgugggaguuuu

SEQ ID NO: 706175 - RNA, 19 nt, Artificial Sequence
  Description of Artificial Sequence: Synthetic oligonucleotide
ugauggggccgacccaggg

SEQ ID NO: 706176 - RNA, 19 nt, Artificial Sequence
  Description of Artificial Sequence: Synthetic oligonucleotide
acaugaagcuuaaaguggu

SEQ ID NO: 706177 - RNA, 19 nt, Artificial Sequence
  Description of Artificial Sequence: Synthetic oligonucleotide
uaagggauaggcagcucuc

SEQ ID NO: 706178 - RNA, 19 nt, Artificial Sequence
  Description of Artificial Sequence: Synthetic oligonucleotide
uucccgaugcgccuguggu

SEQ ID NO: 706179 - RNA, 19 nt, Artificial Sequence
  Description of Artificial Sequence: Synthetic oligonucleotide
uucuccucgaucacaugaa

SEQ ID NO: 706180 - RNA, 19 nt, Artificial Sequence
  Description of Artificial Sequence: Synthetic oligonucleotide
gguuaaaucucagcggcag

SEQ ID NO: 706181 - RNA, 19 nt, Artificial Sequence
  Description of Artificial Sequence: Synthetic oligonucleotide
uaggaacuccuaugguaag

SEQ ID NO: 706182 - RNA, 19 nt, Artificial Sequence
  Description of Artificial Sequence: Synthetic oligonucleotide
aggaacuccuaugguaagg

SEQ ID NO: 706183 - RNA, 19 nt, Artificial Sequence
  Description of Artificial Sequence: Synthetic oligonucleotide
caugagucuaugccucacc

SEQ ID NO: 706184 - RNA, 19 nt, Artificial Sequence
  Description of Artificial Sequence: Synthetic oligonucleotide
aggguuaaggucccagggu

SEQ ID NO: 706185 - RNA, 19 nt, Artificial Sequence
  Description of Artificial Sequence: Synthetic oligonucleotide
ccuaugguaagggauaggc

SEQ ID NO: 706186 - RNA, 19 nt, Artificial Sequence
  Description of Artificial Sequence: Synthetic oligonucleotide
cagcgugggaguuuucacc

SEQ ID NO: 706187 - RNA, 19 nt, Artificial Sequence
  Description of Artificial Sequence: Synthetic oligonucleotide
gagucuaugccucaccagu

SEQ ID NO: 706188 - RNA, 19 nt, Artificial Sequence
  Description of Artificial Sequence: Synthetic oligonucleotide
gaagcuuaaagugguuauc

SEQ ID NO: 706189 - RNA, 19 nt, Artificial Sequence
  Description of Artificial Sequence: Synthetic oligonucleotide
gccauaggcguguuaaucc

SEQ ID NO: 706190 - RNA, 19 nt, Artificial Sequence
  Description of Artificial Sequence: Synthetic oligonucleotide
auuccguacuuggaccucg

SEQ ID NO: 706191 - RNA, 19 nt, Artificial Sequence
  Description of Artificial Sequence: Synthetic oligonucleotide
gggcuaggaacuccuaugg

SEQ ID NO: 706192 - RNA, 19 nt, Artificial Sequence
  Description of Artificial Sequence: Synthetic oligonucleotide
gacccuggcguucuguaac

SEQ ID NO: 706193 - RNA, 19 nt, Artificial Sequence
  Description of Artificial Sequence: Synthetic oligonucleotide
uucucucgaguccguaugu

SEQ ID NO: 706194 - RNA, 19 nt, Artificial Sequence
  Description of Artificial Sequence: Synthetic oligonucleotide
gcaagugcgucuuugggac

SEQ ID NO: 706195 - RNA, 19 nt, Artificial Sequence
  Description of Artificial Sequence: Synthetic oligonucleotide
ggcguguuaauccucccag

SEQ ID NO: 706196 - RNA, 19 nt, Artificial Sequence
  Description of Artificial Sequence: Synthetic oligonucleotide
cuucuagccuccggaaugg

SEQ ID NO: 706197 - RNA, 19 nt, Artificial Sequence
  Description of Artificial Sequence: Synthetic oligonucleotide
ugcgccuguggucucugag

SEQ ID NO: 706198 - RNA, 19 nt, Artificial Sequence
  Description of Artificial Sequence: Synthetic oligonucleotide
agagaugucaggaccauua

SEQ ID NO: 706199 - RNA, 19 nt, Artificial Sequence
  Description of Artificial Sequence: Synthetic oligonucleotide
cuaugccucaccagugaac

SEQ ID NO: 706200 - RNA, 19 nt, Artificial Sequence
  Description of Artificial Sequence: Synthetic oligonucleotide
acaauucaugggcuugaga

SEQ ID NO: 706201 - RNA, 19 nt, Artificial Sequence
  Description of Artificial Sequence: Synthetic oligonucleotide
cacugcucgguggauaagg

SEQ ID NO: 706202 - RNA, 19 nt, Artificial Sequence
  Description of Artificial Sequence: Synthetic oligonucleotide
agaacauuucuucggcauu

SEQ ID NO: 706203 - RNA, 19 nt, Artificial Sequence
  Description of Artificial Sequence: Synthetic oligonucleotide
uggauaaggaccggaugcu

SEQ ID NO: 706204 - RNA, 19 nt, Artificial Sequence
  Description of Artificial Sequence: Synthetic oligonucleotide
uuccguacuuggaccucgg

SEQ ID NO: 706205 - RNA, 19 nt, Artificial Sequence
  Description of Artificial Sequence: Synthetic oligonucleotide
uguccgcucuuuucccagg

SEQ ID NO: 706206 - RNA, 19 nt, Artificial Sequence
  Description of Artificial Sequence: Synthetic oligonucleotide
gaaagaaaugcccgacacu

SEQ ID NO: 706207 - RNA, 19 nt, Artificial Sequence
  Description of Artificial Sequence: Synthetic oligonucleotide
cuaugguaagggauaggca

SEQ ID NO: 706208 - RNA, 19 nt, Artificial Sequence
  Description of Artificial Sequence: Synthetic oligonucleotide
cacccauacacuguugcug

SEQ ID NO: 706209 - RNA, 19 nt, Artificial Sequence
  Description of Artificial Sequence: Synthetic oligonucleotide
cacuagagugccagaguac

SEQ ID NO: 706210 - RNA, 19 nt, Artificial Sequence
  Description of Artificial Sequence: Synthetic oligonucleotide
ggacuguccgcucuuuucc

SEQ ID NO: 706211 - RNA, 19 nt, Artificial Sequence
  Description of Artificial Sequence: Synthetic oligonucleotide
agcaucgaggucacugacg

SEQ ID NO: 706212 - RNA, 19 nt, Artificial Sequence
  Description of Artificial Sequence: Synthetic oligonucleotide
cuggccaaccacaaacuga

SEQ ID NO: 706213 - RNA, 19 nt, Artificial Sequence
  Description of Artificial Sequence: Synthetic oligonucleotide
aaaacaugucugcccuaua

SEQ ID NO: 706214 - RNA, 19 nt, Artificial Sequence
  Description of Artificial Sequence: Synthetic oligonucleotide
ugccgguucucucgagucc

SEQ ID NO: 706215 - RNA, 19 nt, Artificial Sequence
  Description of Artificial Sequence: Synthetic oligonucleotide
acacccauacacuguugcu

SEQ ID NO: 706216 - RNA, 19 nt, Artificial Sequence
  Description of Artificial Sequence: Synthetic oligonucleotide
ucucagcggcaguuggaag

SEQ ID NO: 706217 - RNA, 19 nt, Artificial Sequence
  Description of Artificial Sequence: Synthetic oligonucleotide
aggugcacaucaaucuuag

SEQ ID NO: 706218 - RNA, 19 nt, Artificial Sequence
  Description of Artificial Sequence: Synthetic oligonucleotide
ugccccuuguacuguaggu

SEQ ID NO: 706219 - RNA, 19 nt, Artificial Sequence
  Description of Artificial Sequence: Synthetic oligonucleotide
guucccgccaggaucuggg

SEQ ID NO: 706220 - RNA, 19 nt, Artificial Sequence
  Description of Artificial Sequence: Synthetic oligonucleotide
aagcuggauuguuccacau

SEQ ID NO: 706221 - RNA, 19 nt, Artificial Sequence
  Description of Artificial Sequence: Synthetic oligonucleotide
aguaccgauuugccuucag

SEQ ID NO: 706222 - RNA, 19 nt, Artificial Sequence
  Description of Artificial Sequence: Synthetic oligonucleotide
uccuaugguaagggauagg

SEQ ID NO: 706223 - RNA, 19 nt, Artificial Sequence
  Description of Artificial Sequence: Synthetic oligonucleotide
gcguacucagcccugauga

SEQ ID NO: 706224 - RNA, 19 nt, Artificial Sequence
  Description of Artificial Sequence: Synthetic oligonucleotide
cauaggcguguuaauccuc

SEQ ID NO: 706225 - RNA, 19 nt, Artificial Sequence
  Description of Artificial Sequence: Synthetic oligonucleotide
guaacucuguguuggggaa

SEQ ID NO: 706226 - RNA, 19 nt, Artificial Sequence
  Description of Artificial Sequence: Synthetic oligonucleotide
cucagcacgaugcaggacu

SEQ ID NO: 706227 - RNA, 19 nt, Artificial Sequence
  Description of Artificial Sequence: Synthetic oligonucleotide
agcgccauaggcguguuaa

SEQ ID NO: 706228 - RNA, 19 nt, Artificial Sequence
  Description of Artificial Sequence: Synthetic oligonucleotide
guugcuguugggccaguca

SEQ ID NO: 706229 - RNA, 19 nt, Artificial Sequence
  Description of Artificial Sequence: Synthetic oligonucleotide
ucuagccuccggaaugguu

SEQ ID NO: 706230 - RNA, 19 nt, Artificial Sequence
  Description of Artificial Sequence: Synthetic oligonucleotide
ccgagaaacuucuagccuc

SEQ ID NO: 706231 - RNA, 19 nt, Artificial Sequence
  Description of Artificial Sequence: Synthetic oligonucleotide
gcuuccagcugauuuggug

SEQ ID NO: 706232 - RNA, 19 nt, Artificial Sequence
  Description of Artificial Sequence: Synthetic oligonucleotide
aagucaccagggcauuaua

SEQ ID NO: 706233 - RNA, 19 nt, Artificial Sequence
  Description of Artificial Sequence: Synthetic oligonucleotide
aggcguguuaauccuccca

SEQ ID NO: 706234 - RNA, 19 nt, Artificial Sequence
  Description of Artificial Sequence: Synthetic oligonucleotide
uaaagccaaguggaaggaa

SEQ ID NO: 706235 - RNA, 19 nt, Artificial Sequence
  Description of Artificial Sequence: Synthetic oligonucleotide
gcaucgaggucacugacga

SEQ ID NO: 706236 - RNA, 19 nt, Artificial Sequence
  Description of Artificial Sequence: Synthetic oligonucleotide
agucuaugccucaccagug

SEQ ID NO: 706237 - RNA, 19 nt, Artificial Sequence
  Description of Artificial Sequence: Synthetic oligonucleotide
cagugugcaggacaauuca

SEQ ID NO: 706238 - RNA, 19 nt, Artificial Sequence
  Description of Artificial Sequence: Synthetic oligonucleotide
ucggccaagccucgcuccc

SEQ ID NO: 706239 - RNA, 19 nt, Artificial Sequence
  Description of Artificial Sequence: Synthetic oligonucleotide
accggaugcuccagggccc

SEQ ID NO: 706240 - RNA, 19 nt, Artificial Sequence
  Description of Artificial Sequence: Synthetic oligonucleotide
cuguccgcucuuuucccag

SEQ ID NO: 706241 - RNA, 19 nt, Artificial Sequence
  Description of Artificial Sequence: Synthetic oligonucleotide
cccuauaaugcucccagug

SEQ ID NO: 706242 - RNA, 19 nt, Artificial Sequence
  Description of Artificial Sequence: Synthetic oligonucleotide
cuccuaugguaagggauag

SEQ ID NO: 706243 - RNA, 19 nt, Artificial Sequence
  Description of Artificial Sequence: Synthetic oligonucleotide
ugcuccaaucuguccggug

SEQ ID NO: 706244 - RNA, 19 nt, Artificial Sequence
  Description of Artificial Sequence: Synthetic oligonucleotide
acuguccgcucuuuuccca

SEQ ID NO: 706245 - RNA, 19 nt, Artificial Sequence
  Description of Artificial Sequence: Synthetic oligonucleotide
cacugacgagcccugcagc

SEQ ID NO: 706246 - RNA, 19 nt, Artificial Sequence
  Description of Artificial Sequence: Synthetic oligonucleotide
gaaaccacguugggcguac

SEQ ID NO: 706247 - RNA, 19 nt, Artificial Sequence
  Description of Artificial Sequence: Synthetic oligonucleotide
uaaugcucccagugcccug

SEQ ID NO: 706248 - RNA, 19 nt, Artificial Sequence
  Description of Artificial Sequence: Synthetic oligonucleotide
agcacccauuuguugcuca

SEQ ID NO: 706249 - RNA, 19 nt, Artificial Sequence
  Description of Artificial Sequence: Synthetic oligonucleotide
guuaauccucccagacugc

SEQ ID NO: 706250 - RNA, 19 nt, Artificial Sequence
  Description of Artificial Sequence: Synthetic oligonucleotide
uccguacuuggaccucggc

SEQ ID NO: 706251 - RNA, 19 nt, Artificial Sequence
  Description of Artificial Sequence: Synthetic oligonucleotide
acuccuaugguaagggaua

SEQ ID NO: 706252 - RNA, 19 nt, Artificial Sequence
  Description of Artificial Sequence: Synthetic oligonucleotide
cugcucgguggauaaggac

SEQ ID NO: 706253 - RNA, 19 nt, Artificial Sequence
  Description of Artificial Sequence: Synthetic oligonucleotide
caagccucgcuccccgagc

SEQ ID NO: 706254 - RNA, 19 nt, Artificial Sequence
  Description of Artificial Sequence: Synthetic oligonucleotide
accucggcagagaacagca

SEQ ID NO: 706255 - RNA, 19 nt, Artificial Sequence
  Description of Artificial Sequence: Synthetic oligonucleotide
uugggcguacucagcccug

SEQ ID NO: 706256 - RNA, 19 nt, Artificial Sequence
  Description of Artificial Sequence: Synthetic oligonucleotide
gggauaggcagcucucaug

SEQ ID NO: 706257 - RNA, 19 nt, Artificial Sequence
  Description of Artificial Sequence: Synthetic oligonucleotide
cagaguaccgauuugccuu

SEQ ID NO: 706258 - RNA, 19 nt, Artificial Sequence
  Description of Artificial Sequence: Synthetic oligonucleotide
aguugggcuaggaacuccu

SEQ ID NO: 706259 - RNA, 19 nt, Artificial Sequence
  Description of Artificial Sequence: Synthetic oligonucleotide
ucgcuccccgagcugccgg

SEQ ID NO: 706260 - RNA, 19 nt, Artificial Sequence
  Description of Artificial Sequence: Synthetic oligonucleotide
ucgguggauaaggaccgga

SEQ ID NO: 706261 - RNA, 19 nt, Artificial Sequence
  Description of Artificial Sequence: Synthetic oligonucleotide
cugccgguucucucgaguc

SEQ ID NO: 706262 - RNA, 19 nt, Artificial Sequence
  Description of Artificial Sequence: Synthetic oligonucleotide
uccgcucuaaaaggggcaa

SEQ ID NO: 706263 - RNA, 19 nt, Artificial Sequence
  Description of Artificial Sequence: Synthetic oligonucleotide
cagacucggccaagccucg

SEQ ID NO: 706264 - RNA, 19 nt, Artificial Sequence
  Description of Artificial Sequence: Synthetic oligonucleotide
cagccccucaaaccaagug

SEQ ID NO: 706265 - RNA, 19 nt, Artificial Sequence
  Description of Artificial Sequence: Synthetic oligonucleotide
uagccuccggaaugguugu

SEQ ID NO: 706266 - RNA, 19 nt, Artificial Sequence
  Description of Artificial Sequence: Synthetic oligonucleotide
gucaagcuggauuguucca

SEQ ID NO: 706267 - RNA, 19 nt, Artificial Sequence
  Description of Artificial Sequence: Synthetic oligonucleotide
ccaggguuaaggucccagg

SEQ ID NO: 706268 - RNA, 19 nt, Artificial Sequence
  Description of Artificial Sequence: Synthetic oligonucleotide
ucgaguccguauguucaca

SEQ ID NO: 706269 - RNA, 19 nt, Artificial Sequence
  Description of Artificial Sequence: Synthetic oligonucleotide
aucucagcggcaguuggaa

SEQ ID NO: 706270 - RNA, 19 nt, Artificial Sequence
  Description of Artificial Sequence: Synthetic oligonucleotide
cccgccaggaucugggccg

SEQ ID NO: 706271 - RNA, 19 nt, Artificial Sequence
  Description of Artificial Sequence: Synthetic oligonucleotide
guccguauguucacaguuc

SEQ ID NO: 706272 - RNA, 19 nt, Artificial Sequence
  Description of Artificial Sequence: Synthetic oligonucleotide
gaaugguugugcagcagcu

SEQ ID NO: 706273 - RNA, 19 nt, Artificial Sequence
  Description of Artificial Sequence: Synthetic oligonucleotide
agcuggauuguuccacauu

SEQ ID NO: 706274 - RNA, 19 nt, Artificial Sequence
  Description of Artificial Sequence: Synthetic oligonucleotide
ccaucugccccuuguacug

SEQ ID NO: 706275 - RNA, 19 nt, Artificial Sequence
  Description of Artificial Sequence: Synthetic oligonucleotide
cguguuaauccucccagac

SEQ ID NO: 706276 - RNA, 19 nt, Artificial Sequence
  Description of Artificial Sequence: Synthetic oligonucleotide
cagaacauuucuucggcau

SEQ ID NO: 706277 - RNA, 19 nt, Artificial Sequence
  Description of Artificial Sequence: Synthetic oligonucleotide
agcuucggacuguccgcuc

SEQ ID NO: 706278 - RNA, 19 nt, Artificial Sequence
  Description of Artificial Sequence: Synthetic oligonucleotide
ggcggauucuccugcugag

SEQ ID NO: 706279 - RNA, 19 nt, Artificial Sequence
  Description of Artificial Sequence: Synthetic oligonucleotide
aguucccgccaggaucugg

SEQ ID NO: 706280 - RNA, 19 nt, Artificial Sequence
  Description of Artificial Sequence: Synthetic oligonucleotide
ccuggcguucuguaacucc

SEQ ID NO: 706281 - RNA, 19 nt, Artificial Sequence
  Description of Artificial Sequence: Synthetic oligonucleotide
gguugugcagcagcuauga

SEQ ID NO: 706282 - RNA, 19 nt, Artificial Sequence
  Description of Artificial Sequence: Synthetic oligonucleotide
acccuggcguucuguaacu

SEQ ID NO: 706283 - RNA, 19 nt, Artificial Sequence
  Description of Artificial Sequence: Synthetic oligonucleotide
cugaucccgagaaacuucu

SEQ ID NO: 706284 - RNA, 19 nt, Artificial Sequence
  Description of Artificial Sequence: Synthetic oligonucleotide
uccccgagcugccgguucu

SEQ ID NO: 706285 - RNA, 19 nt, Artificial Sequence
  Description of Artificial Sequence: Synthetic oligonucleotide
cacccauuuguugcucagc

SEQ ID NO: 706286 - RNA, 19 nt, Artificial Sequence
  Description of Artificial Sequence: Synthetic oligonucleotide
gaaccaagcacugcucggu

SEQ ID NO: 706287 - RNA, 19 nt, Artificial Sequence
  Description of Artificial Sequence: Synthetic oligonucleotide
agugugcaggacaauucau

SEQ ID NO: 706288 - RNA, 19 nt, Artificial Sequence
  Description of Artificial Sequence: Synthetic oligonucleotide
caucgaggucacugacgag

SEQ ID NO: 706289 - RNA, 19 nt, Artificial Sequence
  Description of Artificial Sequence: Synthetic oligonucleotide
guuaaaucucagcggcagu

SEQ ID NO: 706290 - RNA, 19 nt, Artificial Sequence
  Description of Artificial Sequence: Synthetic oligonucleotide
guugggcguacucagcccu

SEQ ID NO: 706291 - RNA, 19 nt, Artificial Sequence
  Description of Artificial Sequence: Synthetic oligonucleotide
agguuaaaucucagcggca

SEQ ID NO: 706292 - RNA, 19 nt, Artificial Sequence
  Description of Artificial Sequence: Synthetic oligonucleotide
cggugggcgaacaucaggc

SEQ ID NO: 706293 - RNA, 19 nt, Artificial Sequence
  Description of Artificial Sequence: Synthetic oligonucleotide
ugggcacuagagugccaga

SEQ ID NO: 706294 - RNA, 19 nt, Artificial Sequence
  Description of Artificial Sequence: Synthetic oligonucleotide
cacgaugcaggacuccaaa

SEQ ID NO: 706295 - RNA, 19 nt, Artificial Sequence
  Description of Artificial Sequence: Synthetic oligonucleotide
ggcaaagaucaacugacau

SEQ ID NO: 706296 - RNA, 19 nt, Artificial Sequence
  Description of Artificial Sequence: Synthetic oligonucleotide
ggcguacucagcccugaug

SEQ ID NO: 706297 - RNA, 19 nt, Artificial Sequence
  Description of Artificial Sequence: Synthetic oligonucleotide
gccgguucucucgaguccg

SEQ ID NO: 706298 - RNA, 19 nt, Artificial Sequence
  Description of Artificial Sequence: Synthetic oligonucleotide
ucccgaugcgccugugguc

SEQ ID NO: 706299 - RNA, 19 nt, Artificial Sequence
  Description of Artificial Sequence: Synthetic oligonucleotide
ugaucccgagaaacuucua

SEQ ID NO: 706300 - RNA, 19 nt, Artificial Sequence
  Description of Artificial Sequence: Synthetic oligonucleotide
auccgcucuaaaaggggca

SEQ ID NO: 706301 - RNA, 19 nt, Artificial Sequence
  Description of Artificial Sequence: Synthetic oligonucleotide
agcugauuuggugcacaga

SEQ ID NO: 706302 - RNA, 19 nt, Artificial Sequence
  Description of Artificial Sequence: Synthetic oligonucleotide
caacucugagcuucggacu

SEQ ID NO: 706303 - RNA, 19 nt, Artificial Sequence
  Description of Artificial Sequence: Synthetic oligonucleotide
aaacagcgugggaguuuuc

SEQ ID NO: 706304 - RNA, 19 nt, Artificial Sequence
  Description of Artificial Sequence: Synthetic oligonucleotide
aagcacugcucgguggaua

SEQ ID NO: 706305 - RNA, 19 nt, Artificial Sequence
  Description of Artificial Sequence: Synthetic oligonucleotide
guuaaggucccaggguucu

SEQ ID NO: 706306 - RNA, 19 nt, Artificial Sequence
  Description of Artificial Sequence: Synthetic oligonucleotide
ccgauuugccuucagggga

SEQ ID NO: 706307 - RNA, 19 nt, Artificial Sequence
  Description of Artificial Sequence: Synthetic oligonucleotide
ugggacauucugggcugcc

SEQ ID NO: 706308 - RNA, 19 nt, Artificial Sequence
  Description of Artificial Sequence: Synthetic oligonucleotide
gugccagaguaccgauuug

SEQ ID NO: 706309 - RNA, 19 nt, Artificial Sequence
  Description of Artificial Sequence: Synthetic oligonucleotide
gcacccauuuguugcucag

SEQ ID NO: 706310 - RNA, 19 nt, Artificial Sequence
  Description of Artificial Sequence: Synthetic oligonucleotide
cauugauggggccgaccca

SEQ ID NO: 706311 - RNA, 19 nt, Artificial Sequence
  Description of Artificial Sequence: Synthetic oligonucleotide
gaguccguauguucacagu

SEQ ID NO: 706312 - RNA, 19 nt, Artificial Sequence
  Description of Artificial Sequence: Synthetic oligonucleotide
gccagaguaccgauuugcc

SEQ ID NO: 706313 - RNA, 19 nt, Artificial Sequence
  Description of Artificial Sequence: Synthetic oligonucleotide
guuguaccugccuggcaua

SEQ ID NO: 706314 - RNA, 19 nt, Artificial Sequence
  Description of Artificial Sequence: Synthetic oligonucleotide
ucucucgaguccguauguu

SEQ ID NO: 706315 - RNA, 19 nt, Artificial Sequence
  Description of Artificial Sequence: Synthetic oligonucleotide
cccaggguucuccaaacuc

SEQ ID NO: 706316 - RNA, 19 nt, Artificial Sequence
  Description of Artificial Sequence: Synthetic oligonucleotide
gcugaggaguucgucagca

SEQ ID NO: 706317 - RNA, 19 nt, Artificial Sequence
  Description of Artificial Sequence: Synthetic oligonucleotide
gaugcgccuguggucucug

SEQ ID NO: 706318 - RNA, 19 nt, Artificial Sequence
  Description of Artificial Sequence: Synthetic oligonucleotide
gaaaugcccgacacucucu

SEQ ID NO: 706319 - RNA, 19 nt, Artificial Sequence
  Description of Artificial Sequence: Synthetic oligonucleotide
ugggcguacucagcccuga

SEQ ID NO: 706320 - RNA, 19 nt, Artificial Sequence
  Description of Artificial Sequence: Synthetic oligonucleotide
ggaaagcuaucugaggagu

SEQ ID NO: 706321 - RNA, 19 nt, Artificial Sequence
  Description of Artificial Sequence: Synthetic oligonucleotide
gugugccgaagaugggguc

SEQ ID NO: 706322 - RNA, 19 nt, Artificial Sequence
  Description of Artificial Sequence: Synthetic oligonucleotide
ggaccggaugcuccagggc

SEQ ID NO: 706323 - RNA, 19 nt, Artificial Sequence
  Description of Artificial Sequence: Synthetic oligonucleotide
cucgguggauaaggaccgg

SEQ ID NO: 706324 - RNA, 19 nt, Artificial Sequence
  Description of Artificial Sequence: Synthetic oligonucleotide
cgaguccguauguucacag

SEQ ID NO: 706325 - RNA, 19 nt, Artificial Sequence
  Description of Artificial Sequence: Synthetic oligonucleotide
agaaaccacguugggcgua

SEQ ID NO: 706326 - RNA, 19 nt, Artificial Sequence
  Description of Artificial Sequence: Synthetic oligonucleotide
uucuagccuccggaauggu

SEQ ID NO: 706327 - RNA, 19 nt, Artificial Sequence
  Description of Artificial Sequence: Synthetic oligonucleotide
ggauaaggaccggaugcuc

SEQ ID NO: 706328 - RNA, 19 nt, Artificial Sequence
  Description of Artificial Sequence: Synthetic oligonucleotide
cuguccggugugccgaaga

SEQ ID NO: 706329 - RNA, 19 nt, Artificial Sequence
  Description of Artificial Sequence: Synthetic oligonucleotide
ggugggcgaacaucaggca

SEQ ID NO: 706330 - RNA, 19 nt, Artificial Sequence
  Description of Artificial Sequence: Synthetic oligonucleotide
gcggauucuccugcugagg

SEQ ID NO: 706331 - RNA, 19 nt, Artificial Sequence
  Description of Artificial Sequence: Synthetic oligonucleotide
gccggguagauaaagccaa

SEQ ID NO: 706332 - RNA, 19 nt, Artificial Sequence
  Description of Artificial Sequence: Synthetic oligonucleotide
ggccggguagauaaagcca

SEQ ID NO: 706333 - RNA, 19 nt, Artificial Sequence
  Description of Artificial Sequence: Synthetic oligonucleotide
gcucuaaaaggggcaacuc

SEQ ID NO: 706334 - RNA, 19 nt, Artificial Sequence
  Description of Artificial Sequence: Synthetic oligonucleotide
ggguuaaggucccaggguu

SEQ ID NO: 706335 - RNA, 19 nt, Artificial Sequence
  Description of Artificial Sequence: Synthetic oligonucleotide
ccguacuuggaccucggca

SEQ ID NO: 706336 - RNA, 19 nt, Artificial Sequence
  Description of Artificial Sequence: Synthetic oligonucleotide
ggcgaagcugaucccgaga

SEQ ID NO: 706337 - RNA, 19 nt, Artificial Sequence
  Description of Artificial Sequence: Synthetic oligonucleotide
uguaccugccuggcauauu

SEQ ID NO: 706338 - RNA, 19 nt, Artificial Sequence
  Description of Artificial Sequence: Synthetic oligonucleotide
cuuguacuguagguuaaau

SEQ ID NO: 706339 - RNA, 19 nt, Artificial Sequence
  Description of Artificial Sequence: Synthetic oligonucleotide
aucuguccggugugccgaa

SEQ ID NO: 706340 - RNA, 19 nt, Artificial Sequence
  Description of Artificial Sequence: Synthetic oligonucleotide
gcguguuaauccucccaga

SEQ ID NO: 706341 - RNA, 19 nt, Artificial Sequence
  Description of Artificial Sequence: Synthetic oligonucleotide
ccggguagauaaagccaag

SEQ ID NO: 706342 - RNA, 19 nt, Artificial Sequence
  Description of Artificial Sequence: Synthetic oligonucleotide
accagauggccggguagau

SEQ ID NO: 706343 - RNA, 19 nt, Artificial Sequence
  Description of Artificial Sequence: Synthetic oligonucleotide
ccaagcacugcucggugga

SEQ ID NO: 706344 - RNA, 19 nt, Artificial Sequence
  Description of Artificial Sequence: Synthetic oligonucleotide
gcuuuccgccagcacuccc

SEQ ID NO: 706345 - RNA, 19 nt, Artificial Sequence
  Description of Artificial Sequence: Synthetic oligonucleotide
ggcacuagagugccagagu

SEQ ID NO: 706346 - RNA, 19 nt, Artificial Sequence
  Description of Artificial Sequence: Synthetic oligonucleotide
gagcuucggacuguccgcu

SEQ ID NO: 706347 - RNA, 19 nt, Artificial Sequence
  Description of Artificial Sequence: Synthetic oligonucleotide
gccgcacaggcaguucccg

SEQ ID NO: 706348 - RNA, 19 nt, Artificial Sequence
  Description of Artificial Sequence: Synthetic oligonucleotide
gaguaccgauuugccuuca

SEQ ID NO: 706349 - RNA, 19 nt, Artificial Sequence
  Description of Artificial Sequence: Synthetic oligonucleotide
cugcccuauaaugcuccca

SEQ ID NO: 706350 - RNA, 19 nt, Artificial Sequence
  Description of Artificial Sequence: Synthetic oligonucleotide
ggaugacuaccaccuggaa

SEQ ID NO: 706351 - RNA, 19 nt, Artificial Sequence
  Description of Artificial Sequence: Synthetic oligonucleotide
cuccuccuauguaaacagu

SEQ ID NO: 706352 - RNA, 19 nt, Artificial Sequence
  Description of Artificial Sequence: Synthetic oligonucleotide
ccguauguucacaguucuc

SEQ ID NO: 706353 - RNA, 19 nt, Artificial Sequence
  Description of Artificial Sequence: Synthetic oligonucleotide
cagggcauuauagacucuu

SEQ ID NO: 706354 - RNA, 19 nt, Artificial Sequence
  Description of Artificial Sequence: Synthetic oligonucleotide
gguucucucgaguccguau

SEQ ID NO: 706355 - RNA, 19 nt, Artificial Sequence
  Description of Artificial Sequence: Synthetic oligonucleotide
caggacaauucaugggcuu

SEQ ID NO: 706356 - RNA, 19 nt, Artificial Sequence
  Description of Artificial Sequence: Synthetic oligonucleotide
augcgccuguggucucuga

SEQ ID NO: 706357 - RNA, 19 nt, Artificial Sequence
  Description of Artificial Sequence: Synthetic oligonucleotide
ggugugccgaagauggggu

SEQ ID NO: 706358 - RNA, 19 nt, Artificial Sequence
  Description of Artificial Sequence: Synthetic oligonucleotide
ccgcacaggcaguucccgc

SEQ ID NO: 706359 - RNA, 19 nt, Artificial Sequence
  Description of Artificial Sequence: Synthetic oligonucleotide
ccuccggaaugguugugca

SEQ ID NO: 706360 - RNA, 19 nt, Artificial Sequence
  Description of Artificial Sequence: Synthetic oligonucleotide
gggacauucugggcugcca

SEQ ID NO: 706361 - RNA, 19 nt, Artificial Sequence
  Description of Artificial Sequence: Synthetic oligonucleotide
ccucggcagagaacagcac

SEQ ID NO: 706362 - RNA, 19 nt, Artificial Sequence
  Description of Artificial Sequence: Synthetic oligonucleotide
gcuucggacuguccgcucu

SEQ ID NO: 706363 - RNA, 19 nt, Artificial Sequence
  Description of Artificial Sequence: Synthetic oligonucleotide
ucugggccggugggcgaac

SEQ ID NO: 706364 - RNA, 19 nt, Artificial Sequence
  Description of Artificial Sequence: Synthetic oligonucleotide
guugugcagcagcuaugau

SEQ ID NO: 706365 - RNA, 19 nt, Artificial Sequence
  Description of Artificial Sequence: Synthetic oligonucleotide
ccggugugccgaagauggg

SEQ ID NO: 706366 - RNA, 19 nt, Artificial Sequence
  Description of Artificial Sequence: Synthetic oligonucleotide
cgccauaggcguguuaauc

SEQ ID NO: 706367 - RNA, 19 nt, Artificial Sequence
  Description of Artificial Sequence: Synthetic oligonucleotide
ccuucaggggaaucaaaau

SEQ ID NO: 706368 - RNA, 19 nt, Artificial Sequence
  Description of Artificial Sequence: Synthetic oligonucleotide
guugggcuaggaacuccua

SEQ ID NO: 706369 - RNA, 19 nt, Artificial Sequence
  Description of Artificial Sequence: Synthetic oligonucleotide
agauggccggguagauaaa

SEQ ID NO: 706370 - RNA, 19 nt, Artificial Sequence
  Description of Artificial Sequence: Synthetic oligonucleotide
ccggaaugguugugcagca

SEQ ID NO: 706371 - RNA, 19 nt, Artificial Sequence
  Description of Artificial Sequence: Synthetic oligonucleotide
gggcaacucugagcuucgg

SEQ ID NO: 706372 - RNA, 19 nt, Artificial Sequence
  Description of Artificial Sequence: Synthetic oligonucleotide
ccaguugggcuaggaacuc

SEQ ID NO: 706373 - RNA, 19 nt, Artificial Sequence
  Description of Artificial Sequence: Synthetic oligonucleotide
cccuuguacuguagguuaa

SEQ ID NO: 706374 - RNA, 19 nt, Artificial Sequence
  Description of Artificial Sequence: Synthetic oligonucleotide
cccgagaaacuucuagccu

SEQ ID NO: 706375 - RNA, 19 nt, Artificial Sequence
  Description of Artificial Sequence: Synthetic oligonucleotide
cugggcccggcggauucuc

SEQ ID NO: 706376 - RNA, 19 nt, Artificial Sequence
  Description of Artificial Sequence: Synthetic oligonucleotide
gcugccgguucucucgagu

SEQ ID NO: 706377 - RNA, 19 nt, Artificial Sequence
  Description of Artificial Sequence: Synthetic oligonucleotide
gcgugggaguuuucaccuc

SEQ ID NO: 706378 - RNA, 19 nt, Artificial Sequence
  Description of Artificial Sequence: Synthetic oligonucleotide
gugcgucuuugggacaccu

SEQ ID NO: 706379 - RNA, 19 nt, Artificial Sequence
  Description of Artificial Sequence: Synthetic oligonucleotide
gcacugcucgguggauaag

SEQ ID NO: 706380 - RNA, 19 nt, Artificial Sequence
  Description of Artificial Sequence: Synthetic oligonucleotide
ccgagcugccgguucucuc

SEQ ID NO: 706381 - RNA, 19 nt, Artificial Sequence
  Description of Artificial Sequence: Synthetic oligonucleotide
guccuguuggaagcgccau

SEQ ID NO: 706382 - RNA, 19 nt, Artificial Sequence
  Description of Artificial Sequence: Synthetic oligonucleotide
gagugccagaguaccgauu

SEQ ID NO: 706383 - RNA, 19 nt, Artificial Sequence
  Description of Artificial Sequence: Synthetic oligonucleotide
cguccuguuggaagcgcca

SEQ ID NO: 706384 - RNA, 19 nt, Artificial Sequence
  Description of Artificial Sequence: Synthetic oligonucleotide
ggcuugagagcaagugcgu

SEQ ID NO: 706385 - RNA, 19 nt, Artificial Sequence
  Description of Artificial Sequence: Synthetic oligonucleotide
ccuuguacuguagguuaaa

SEQ ID NO: 706386 - RNA, 19 nt, Artificial Sequence
  Description of Artificial Sequence: Synthetic oligonucleotide
ccggaugcuccagggcccc

SEQ ID NO: 706387 - RNA, 19 nt, Artificial Sequence
  Description of Artificial Sequence: Synthetic oligonucleotide
ccgcucuaaaaggggcaac

SEQ ID NO: 706388 - RNA, 19 nt, Artificial Sequence
  Description of Artificial Sequence: Synthetic oligonucleotide
ccggcggauucuccugcug

SEQ ID NO: 706389 - RNA, 19 nt, Artificial Sequence
  Description of Artificial Sequence: Synthetic oligonucleotide
cagcggcaguuggaaguca

SEQ ID NO: 706390 - RNA, 19 nt, Artificial Sequence
  Description of Artificial Sequence: Synthetic oligonucleotide
cuucggacuguccgcucuu

SEQ ID NO: 706391 - RNA, 19 nt, Artificial Sequence
  Description of Artificial Sequence: Synthetic oligonucleotide
gcccuauaaugcucccagu

SEQ ID NO: 706392 - RNA, 19 nt, Artificial Sequence
  Description of Artificial Sequence: Synthetic oligonucleotide
cccgaugcgccuguggucu

SEQ ID NO: 706393 - RNA, 19 nt, Artificial Sequence
  Description of Artificial Sequence: Synthetic oligonucleotide
cgugggaguuuucaccucu

SEQ ID NO: 706394 - RNA, 19 nt, Artificial Sequence
  Description of Artificial Sequence: Synthetic oligonucleotide
cggcggauucuccugcuga

SEQ ID NO: 706395 - RNA, 19 nt, Artificial Sequence
  Description of Artificial Sequence: Synthetic oligonucleotide
ccgccaggaucugggccgg

SEQ ID NO: 706396 - RNA, 19 nt, Artificial Sequence
  Description of Artificial Sequence: Synthetic oligonucleotide
gcccgacacucucugcagu

SEQ ID NO: 706397 - RNA, 19 nt, Artificial Sequence
  Description of Artificial Sequence: Synthetic oligonucleotide
gaagcgccauaggcguguu

SEQ ID NO: 706398 - RNA, 19 nt, Artificial Sequence
  Description of Artificial Sequence: Synthetic oligonucleotide
cccuggcguucuguaacuc

SEQ ID NO: 706399 - RNA, 19 nt, Artificial Sequence
  Description of Artificial Sequence: Synthetic oligonucleotide
ccacagcuuuccgccagca

SEQ ID NO: 706400 - RNA, 19 nt, Artificial Sequence
  Description of Artificial Sequence: Synthetic oligonucleotide
ccgaugcgccuguggucuc

SEQ ID NO: 706401 - RNA, 19 nt, Artificial Sequence
  Description of Artificial Sequence: Synthetic oligonucleotide
gcgccauaggcguguuaau

SEQ ID NO: 706402 - RNA, 19 nt, Artificial Sequence
  Description of Artificial Sequence: Synthetic oligonucleotide
ccucgaucacaugaagcuu

SEQ ID NO: 706403 - RNA, 19 nt, Artificial Sequence
  Description of Artificial Sequence: Synthetic oligonucleotide
gcgccaucuccaggguuaa

SEQ ID NO: 706404 - RNA, 19 nt, Artificial Sequence
  Description of Artificial Sequence: Synthetic oligonucleotide
gggcguacucagcccugau

SEQ ID NO: 706405 - RNA, 19 nt, Artificial Sequence
  Description of Artificial Sequence: Synthetic oligonucleotide
ggcgaacaucaggcagugu

SEQ ID NO: 706406 - RNA, 19 nt, Artificial Sequence
  Description of Artificial Sequence: Synthetic oligonucleotide
cccugacuguucccagagu

SEQ ID NO: 706407 - RNA, 19 nt, Artificial Sequence
  Description of Artificial Sequence: Synthetic oligonucleotide
ccccgagcugccgguucuc

SEQ ID NO: 706408 - RNA, 19 nt, Artificial Sequence
  Description of Artificial Sequence: Synthetic oligonucleotide
ccgguucucucgaguccgu

SEQ ID NO: 706409 - RNA, 19 nt, Artificial Sequence
  Description of Artificial Sequence: Synthetic oligonucleotide
cccgagcugccgguucucu

SEQ ID NO: 706410 - RNA, 19 nt, Artificial Sequence
  Description of Artificial Sequence: Synthetic oligonucleotide
aagacaauaauuucaaaag

SEQ ID NO: 706411 - RNA, 19 nt, Artificial Sequence
  Description of Artificial Sequence: Synthetic oligonucleotide
aauuguaagaagcauaugu

SEQ ID NO: 706412 - RNA, 19 nt, Artificial Sequence
  Description of Artificial Sequence: Synthetic oligonucleotide
gaugauuagaucuuguccg

SEQ ID NO: 706413 - RNA, 19 nt, Artificial Sequence
  Description of Artificial Sequence: Synthetic oligonucleotide
aauuauacauccuuuaaca

SEQ ID NO: 706414 - RNA, 19 nt, Artificial Sequence
  Description of Artificial Sequence: Synthetic oligonucleotide
aacauuuuagcacaaacug

SEQ ID NO: 706415 - RNA, 19 nt, Artificial Sequence
  Description of Artificial Sequence: Synthetic oligonucleotide
uuaauuacuggcaauaucu

SEQ ID NO: 706416 - RNA, 19 nt, Artificial Sequence
  Description of Artificial Sequence: Synthetic oligonucleotide
aaguacgaucuuuugaucc

SEQ ID NO: 706417 - RNA, 19 nt, Artificial Sequence
  Description of Artificial Sequence: Synthetic oligonucleotide
aagacgauuaaacacguuc

SEQ ID NO: 706418 - RNA, 19 nt, Artificial Sequence
  Description of Artificial Sequence: Synthetic oligonucleotide
aacgcaacagcucuguggc

SEQ ID NO: 706419 - RNA, 19 nt, Artificial Sequence
  Description of Artificial Sequence: Synthetic oligonucleotide
gauguaaugguccuuagag

SEQ ID NO: 706420 - RNA, 19 nt, Artificial Sequence
  Description of Artificial Sequence: Synthetic oligonucleotide
aucuuuuauaacuaggcac

SEQ ID NO: 706421 - RNA, 19 nt, Artificial Sequence
  Description of Artificial Sequence: Synthetic oligonucleotide
uuuguaaccccuuagagac

SEQ ID NO: 706422 - RNA, 19 nt, Artificial Sequence
  Description of Artificial Sequence: Synthetic oligonucleotide
aauaauagaaacaauucca

SEQ ID NO: 706423 - RNA, 19 nt, Artificial Sequence
  Description of Artificial Sequence: Synthetic oligonucleotide
uguaaugguccuuagagcc

SEQ ID NO: 706424 - RNA, 19 nt, Artificial Sequence
  Description of Artificial Sequence: Synthetic oligonucleotide
ucaauuaugagaaaucauc

SEQ ID NO: 706425 - RNA, 19 nt, Artificial Sequence
  Description of Artificial Sequence: Synthetic oligonucleotide
aauuuguaaccccuuagag

SEQ ID NO: 706426 - RNA, 19 nt, Artificial Sequence
  Description of Artificial Sequence: Synthetic oligonucleotide
aaucuaccuauuuacauug

SEQ ID NO: 706427 - RNA, 19 nt, Artificial Sequence
  Description of Artificial Sequence: Synthetic oligonucleotide
aauagaucaaaauaucuuu

SEQ ID NO: 706428 - RNA, 19 nt, Artificial Sequence
  Description of Artificial Sequence: Synthetic oligonucleotide
auauauuuccaguugguuc

SEQ ID NO: 706429 - RNA, 19 nt, Artificial Sequence
  Description of Artificial Sequence: Synthetic oligonucleotide
cauuuagaaauucauacag

SEQ ID NO: 706430 - RNA, 19 nt, Artificial Sequence
  Description of Artificial Sequence: Synthetic oligonucleotide
uuagcuuuccuguagacug

SEQ ID NO: 706431 - RNA, 19 nt, Artificial Sequence
  Description of Artificial Sequence: Synthetic oligonucleotide
uuuaagaucccacauucug

SEQ ID NO: 706432 - RNA, 19 nt, Artificial Sequence
  Description of Artificial Sequence: Synthetic oligonucleotide
uguuaauguucgaauaggg

SEQ ID NO: 706433 - RNA, 19 nt, Artificial Sequence
  Description of Artificial Sequence: Synthetic oligonucleotide
ugauaaaucuaccaaugug

SEQ ID NO: 706434 - RNA, 19 nt, Artificial Sequence
  Description of Artificial Sequence: Synthetic oligonucleotide
ugugucagagauuugacca

SEQ ID NO: 706435 - RNA, 19 nt, Artificial Sequence
  Description of Artificial Sequence: Synthetic oligonucleotide
guagauauuaauauuacac

SEQ ID NO: 706436 - RNA, 19 nt, Artificial Sequence
  Description of Artificial Sequence: Synthetic oligonucleotide
aguaagacgauuaaacacg

SEQ ID NO: 706437 - RNA, 19 nt, Artificial Sequence
  Description of Artificial Sequence: Synthetic oligonucleotide
aaacgcaacagcucugugg

SEQ ID NO: 706438 - RNA, 19 nt, Artificial Sequence
  Description of Artificial Sequence: Synthetic oligonucleotide
agcagauagauucagauau

SEQ ID NO: 706439 - RNA, 19 nt, Artificial Sequence
  Description of Artificial Sequence: Synthetic oligonucleotide
uuuacauuguuucccacca

SEQ ID NO: 706440 - RNA, 19 nt, Artificial Sequence
  Description of Artificial Sequence: Synthetic oligonucleotide
auaaugaggaggcucaaag

SEQ ID NO: 706441 - RNA, 19 nt, Artificial Sequence
  Description of Artificial Sequence: Synthetic oligonucleotide
uccaagaguaacuugaccu

SEQ ID NO: 706442 - RNA, 19 nt, Artificial Sequence
  Description of Artificial Sequence: Synthetic oligonucleotide
uccauuauauugaaagagc

SEQ ID NO: 706443 - RNA, 19 nt, Artificial Sequence
  Description of Artificial Sequence: Synthetic oligonucleotide
uugaccaucuugcaaauug

SEQ ID NO: 706444 - RNA, 19 nt, Artificial Sequence
  Description of Artificial Sequence: Synthetic oligonucleotide
ucuuagcagacuaagguca

SEQ ID NO: 706445 - RNA, 19 nt, Artificial Sequence
  Description of Artificial Sequence: Synthetic oligonucleotide
uauaccguuacauaaaauu

SEQ ID NO: 706446 - RNA, 19 nt, Artificial Sequence
  Description of Artificial Sequence: Synthetic oligonucleotide
ucaauaacaguuucuuucc

SEQ ID NO: 706447 - RNA, 19 nt, Artificial Sequence
  Description of Artificial Sequence: Synthetic oligonucleotide
aaauuuguaaccccuuaga

SEQ ID NO: 706448 - RNA, 19 nt, Artificial Sequence
  Description of Artificial Sequence: Synthetic oligonucleotide
aaaaugccgccucugcagc

SEQ ID NO: 706449 - RNA, 19 nt, Artificial Sequence
  Description of Artificial Sequence: Synthetic oligonucleotide
uaaacgugaacauuuuagc

SEQ ID NO: 706450 - RNA, 19 nt, Artificial Sequence
  Description of Artificial Sequence: Synthetic oligonucleotide
ucuaccguaaggcacauaa

SEQ ID NO: 706451 - RNA, 19 nt, Artificial Sequence
  Description of Artificial Sequence: Synthetic oligonucleotide
aaacgugaacauuuuagca

SEQ ID NO: 706452 - RNA, 19 nt, Artificial Sequence
  Description of Artificial Sequence: Synthetic oligonucleotide
ucaaaaguuauaccguuac

SEQ ID NO: 706453 - RNA, 19 nt, Artificial Sequence
  Description of Artificial Sequence: Synthetic oligonucleotide
aguaucaucacagugucag

SEQ ID NO: 706454 - RNA, 19 nt, Artificial Sequence
  Description of Artificial Sequence: Synthetic oligonucleotide
aacgcccagcacuagaaac

SEQ ID NO: 706455 - RNA, 19 nt, Artificial Sequence
  Description of Artificial Sequence: Synthetic oligonucleotide
uaauguucgaauagggaca

SEQ ID NO: 706456 - RNA, 19 nt, Artificial Sequence
  Description of Artificial Sequence: Synthetic oligonucleotide
acaaaugauaaaucuacca

SEQ ID NO: 706457 - RNA, 19 nt, Artificial Sequence
  Description of Artificial Sequence: Synthetic oligonucleotide
aacuguuaucuuucuuagc

SEQ ID NO: 706458 - RNA, 19 nt, Artificial Sequence
  Description of Artificial Sequence: Synthetic oligonucleotide
gaaauuuguaaccccuuag

SEQ ID NO: 706459 - RNA, 19 nt, Artificial Sequence
  Description of Artificial Sequence: Synthetic oligonucleotide
uguugguagauauuaauau

SEQ ID NO: 706460 - RNA, 19 nt, Artificial Sequence
  Description of Artificial Sequence: Synthetic oligonucleotide
uuaauaauaagugcaggac

SEQ ID NO: 706461 - RNA, 19 nt, Artificial Sequence
  Description of Artificial Sequence: Synthetic oligonucleotide
ugagcuaagucccauuucu

SEQ ID NO: 706462 - RNA, 19 nt, Artificial Sequence
  Description of Artificial Sequence: Synthetic oligonucleotide
agagacuagccucggaagc

SEQ ID NO: 706463 - RNA, 19 nt, Artificial Sequence
  Description of Artificial Sequence: Synthetic oligonucleotide
aguaacuugaccugaagau

SEQ ID NO: 706464 - RNA, 19 nt, Artificial Sequence
  Description of Artificial Sequence: Synthetic oligonucleotide
aagaggagaucaucgguag

SEQ ID NO: 706465 - RNA, 19 nt, Artificial Sequence
  Description of Artificial Sequence: Synthetic oligonucleotide
ucgaauagggacauaauuu

SEQ ID NO: 706466 - RNA, 19 nt, Artificial Sequence
  Description of Artificial Sequence: Synthetic oligonucleotide
acaaguacgaucuuuugau

SEQ ID NO: 706467 - RNA, 19 nt, Artificial Sequence
  Description of Artificial Sequence: Synthetic oligonucleotide
auuuguaaccccuuagaga

SEQ ID NO: 706468 - RNA, 19 nt, Artificial Sequence
  Description of Artificial Sequence: Synthetic oligonucleotide
caguaagacgauuaaacac

SEQ ID NO: 706469 - RNA, 19 nt, Artificial Sequence
  Description of Artificial Sequence: Synthetic oligonucleotide
uuggauuuagugcaaucug

SEQ ID NO: 706470 - RNA, 19 nt, Artificial Sequence
  Description of Artificial Sequence: Synthetic oligonucleotide
cacugaauagguuaucccc

SEQ ID NO: 706471 - RNA, 19 nt, Artificial Sequence
  Description of Artificial Sequence: Synthetic oligonucleotide
cuaaggucaauuaugagaa

SEQ ID NO: 706472 - RNA, 19 nt, Artificial Sequence
  Description of Artificial Sequence: Synthetic oligonucleotide
agauaaauuauacauccuu

SEQ ID NO: 706473 - RNA, 19 nt, Artificial Sequence
  Description of Artificial Sequence: Synthetic oligonucleotide
aaauugugggcuuuccaga

SEQ ID NO: 706474 - RNA, 19 nt, Artificial Sequence
  Description of Artificial Sequence: Synthetic oligonucleotide
auuagaucuuguccguugg

SEQ ID NO: 706475 - RNA, 19 nt, Artificial Sequence
  Description of Artificial Sequence: Synthetic oligonucleotide
gaaggaauagcuacugucc

SEQ ID NO: 706476 - RNA, 19 nt, Artificial Sequence
  Description of Artificial Sequence: Synthetic oligonucleotide
ucaugguuaauuacuggca

SEQ ID NO: 706477 - RNA, 19 nt, Artificial Sequence
  Description of Artificial Sequence: Synthetic oligonucleotide
cagucauaaugccagauag

SEQ ID NO: 706478 - RNA, 19 nt, Artificial Sequence
  Description of Artificial Sequence: Synthetic oligonucleotide
acguguuucccugagaaac

SEQ ID NO: 706479 - RNA, 19 nt, Artificial Sequence
  Description of Artificial Sequence: Synthetic oligonucleotide
aucgguagaaucuuguccu

SEQ ID NO: 706480 - RNA, 19 nt, Artificial Sequence
  Description of Artificial Sequence: Synthetic oligonucleotide
ucuauaccaucauaaugag

SEQ ID NO: 706481 - RNA, 19 nt, Artificial Sequence
  Description of Artificial Sequence: Synthetic oligonucleotide
auggucagugcuucuauac

SEQ ID NO: 706482 - RNA, 19 nt, Artificial Sequence
  Description of Artificial Sequence: Synthetic oligonucleotide
aauagcuacuguccggcug

SEQ ID NO: 706483 - RNA, 19 nt, Artificial Sequence
  Description of Artificial Sequence: Synthetic oligonucleotide
acacguucaguucauuacg

SEQ ID NO: 706484 - RNA, 19 nt, Artificial Sequence
  Description of Artificial Sequence: Synthetic oligonucleotide
agggacauaauuuccuguc

SEQ ID NO: 706485 - RNA, 19 nt, Artificial Sequence
  Description of Artificial Sequence: Synthetic oligonucleotide
guaagaagcauauguguug

SEQ ID NO: 706486 - RNA, 19 nt, Artificial Sequence
  Description of Artificial Sequence: Synthetic oligonucleotide
uggaauucacacauauggc

SEQ ID NO: 706487 - RNA, 19 nt, Artificial Sequence
  Description of Artificial Sequence: Synthetic oligonucleotide
cuuuccuguagacugaaac

SEQ ID NO: 706488 - RNA, 19 nt, Artificial Sequence
  Description of Artificial Sequence: Synthetic oligonucleotide
cagacuaaggucaauuaug

SEQ ID NO: 706489 - RNA, 19 nt, Artificial Sequence
  Description of Artificial Sequence: Synthetic oligonucleotide
uuagcacaaacuguuaucu

SEQ ID NO: 706490 - RNA, 19 nt, Artificial Sequence
  Description of Artificial Sequence: Synthetic oligonucleotide
aguaucuuuuauaacuagg

SEQ ID NO: 706491 - RNA, 19 nt, Artificial Sequence
  Description of Artificial Sequence: Synthetic oligonucleotide
caauccugagcacagaaug

SEQ ID NO: 706492 - RNA, 19 nt, Artificial Sequence
  Description of Artificial Sequence: Synthetic oligonucleotide
auucaugguuaauuacugg

SEQ ID NO: 706493 - RNA, 19 nt, Artificial Sequence
  Description of Artificial Sequence: Synthetic oligonucleotide
uuuuagcacaaacuguuau

SEQ ID NO: 706494 - RNA, 19 nt, Artificial Sequence
  Description of Artificial Sequence: Synthetic oligonucleotide
gauuagaucuuguccguug

SEQ ID NO: 706495 - RNA, 19 nt, Artificial Sequence
  Description of Artificial Sequence: Synthetic oligonucleotide
aucuggucuaccguaaggc

SEQ ID NO: 706496 - RNA, 19 nt, Artificial Sequence
  Description of Artificial Sequence: Synthetic oligonucleotide
agacaguacaguuuuauua

SEQ ID NO: 706497 - RNA, 19 nt, Artificial Sequence
  Description of Artificial Sequence: Synthetic oligonucleotide
ucaauaaagaaugcagagu

SEQ ID NO: 706498 - RNA, 19 nt, Artificial Sequence
  Description of Artificial Sequence: Synthetic oligonucleotide
agacugaaaccuuuuaaga

SEQ ID NO: 706499 - RNA, 19 nt, Artificial Sequence
  Description of Artificial Sequence: Synthetic oligonucleotide
agugugauacaagcaauac

SEQ ID NO: 706500 - RNA, 19 nt, Artificial Sequence
  Description of Artificial Sequence: Synthetic oligonucleotide
ugguagauauuaauauuac

SEQ ID NO: 706501 - RNA, 19 nt, Artificial Sequence
  Description of Artificial Sequence: Synthetic oligonucleotide
uacaaucuaccuauuuaca

SEQ ID NO: 706502 - RNA, 19 nt, Artificial Sequence
  Description of Artificial Sequence: Synthetic oligonucleotide
uauguguugguagauauua

SEQ ID NO: 706503 - RNA, 19 nt, Artificial Sequence
  Description of Artificial Sequence: Synthetic oligonucleotide
gacgauuaaacacguucag

SEQ ID NO: 706504 - RNA, 19 nt, Artificial Sequence
  Description of Artificial Sequence: Synthetic oligonucleotide
auucugacggcauuuccag

SEQ ID NO: 706505 - RNA, 19 nt, Artificial Sequence
  Description of Artificial Sequence: Synthetic oligonucleotide
aaaugccgccucugcagcc

SEQ ID NO: 706506 - RNA, 19 nt, Artificial Sequence
  Description of Artificial Sequence: Synthetic oligonucleotide
caucgguagaaucuugucc

SEQ ID NO: 706507 - RNA, 19 nt, Artificial Sequence
  Description of Artificial Sequence: Synthetic oligonucleotide
acauucugacggcauuucc

SEQ ID NO: 706508 - RNA, 19 nt, Artificial Sequence
  Description of Artificial Sequence: Synthetic oligonucleotide
accgucacagaacuagaac

SEQ ID NO: 706509 - RNA, 19 nt, Artificial Sequence
  Description of Artificial Sequence: Synthetic oligonucleotide
caaaaugccgccucugcag

SEQ ID NO: 706510 - RNA, 19 nt, Artificial Sequence
  Description of Artificial Sequence: Synthetic oligonucleotide
gauuccauugucucuggac

SEQ ID NO: 706511 - RNA, 19 nt, Artificial Sequence
  Description of Artificial Sequence: Synthetic oligonucleotide
auaauuuccuguccaguca

SEQ ID NO: 706512 - RNA, 19 nt, Artificial Sequence
  Description of Artificial Sequence: Synthetic oligonucleotide
ugagagacuagccucggaa

SEQ ID NO: 706513 - RNA, 19 nt, Artificial Sequence
  Description of Artificial Sequence: Synthetic oligonucleotide
uaauuuccuguccagucac

SEQ ID NO: 706514 - RNA, 19 nt, Artificial Sequence
  Description of Artificial Sequence: Synthetic oligonucleotide
ugacguguuucccugagaa

SEQ ID NO: 706515 - RNA, 19 nt, Artificial Sequence
  Description of Artificial Sequence: Synthetic oligonucleotide
acaaucuaccuauuuacau

SEQ ID NO: 706516 - RNA, 19 nt, Artificial Sequence
  Description of Artificial Sequence: Synthetic oligonucleotide
aaauugcugauaauaauuu

SEQ ID NO: 706517 - RNA, 19 nt, Artificial Sequence
  Description of Artificial Sequence: Synthetic oligonucleotide
cuguuaggaaaucaacagc

SEQ ID NO: 706518 - RNA, 19 nt, Artificial Sequence
  Description of Artificial Sequence: Synthetic oligonucleotide
uguucgaauagggacauaa

SEQ ID NO: 706519 - RNA, 19 nt, Artificial Sequence
  Description of Artificial Sequence: Synthetic oligonucleotide
ugucugcuuucucauaagc

SEQ ID NO: 706520 - RNA, 19 nt, Artificial Sequence
  Description of Artificial Sequence: Synthetic oligonucleotide
uucuuagcagacuaagguc

SEQ ID NO: 706521 - RNA, 19 nt, Artificial Sequence
  Description of Artificial Sequence: Synthetic oligonucleotide
ugaacugacguguuucccu

SEQ ID NO: 706522 - RNA, 19 nt, Artificial Sequence
  Description of Artificial Sequence: Synthetic oligonucleotide
caucuugcaaauugugggc

SEQ ID NO: 706523 - RNA, 19 nt, Artificial Sequence
  Description of Artificial Sequence: Synthetic oligonucleotide
uacggggccggcuuggugg

SEQ ID NO: 706524 - RNA, 19 nt, Artificial Sequence
  Description of Artificial Sequence: Synthetic oligonucleotide
agcacuagaaacgcaacag

SEQ ID NO: 706525 - RNA, 19 nt, Artificial Sequence
  Description of Artificial Sequence: Synthetic oligonucleotide
ucuggacccacugaauagg

SEQ ID NO: 706526 - RNA, 19 nt, Artificial Sequence
  Description of Artificial Sequence: Synthetic oligonucleotide
ugaaauuuguaaccccuua

SEQ ID NO: 706527 - RNA, 19 nt, Artificial Sequence
  Description of Artificial Sequence: Synthetic oligonucleotide
uuuuaagaucccacauucu

SEQ ID NO: 706528 - RNA, 19 nt, Artificial Sequence
  Description of Artificial Sequence: Synthetic oligonucleotide
auugaucuggcucucucca

SEQ ID NO: 706529 - RNA, 19 nt, Artificial Sequence
  Description of Artificial Sequence: Synthetic oligonucleotide
acacacuaccaaugugugc

SEQ ID NO: 706530 - RNA, 19 nt, Artificial Sequence
  Description of Artificial Sequence: Synthetic oligonucleotide
ugauguaaugguccuuaga

SEQ ID NO: 706531 - RNA, 19 nt, Artificial Sequence
  Description of Artificial Sequence: Synthetic oligonucleotide
aaacacguucaguucauua

SEQ ID NO: 706532 - RNA, 19 nt, Artificial Sequence
  Description of Artificial Sequence: Synthetic oligonucleotide
cauaacaggacccaggugu

SEQ ID NO: 706533 - RNA, 19 nt, Artificial Sequence
  Description of Artificial Sequence: Synthetic oligonucleotide
ggcauugcaauccugagca

SEQ ID NO: 706534 - RNA, 19 nt, Artificial Sequence
  Description of Artificial Sequence: Synthetic oligonucleotide
gaguaacuugaccugaaga

SEQ ID NO: 706535 - RNA, 19 nt, Artificial Sequence
  Description of Artificial Sequence: Synthetic oligonucleotide
ccacaaaugauaaaucuac

SEQ ID NO: 706536 - RNA, 19 nt, Artificial Sequence
  Description of Artificial Sequence: Synthetic oligonucleotide
ggagcuauugcuauuaaac

SEQ ID NO: 706537 - RNA, 19 nt, Artificial Sequence
  Description of Artificial Sequence: Synthetic oligonucleotide
aguacgaucuuuugaucca

SEQ ID NO: 706538 - RNA, 19 nt, Artificial Sequence
  Description of Artificial Sequence: Synthetic oligonucleotide
uuugauguaaugguccuua

SEQ ID NO: 706539 - RNA, 19 nt, Artificial Sequence
  Description of Artificial Sequence: Synthetic oligonucleotide
cuuacaguuccaagagccc

SEQ ID NO: 706540 - RNA, 19 nt, Artificial Sequence
  Description of Artificial Sequence: Synthetic oligonucleotide
agucacgagauuccaaacu

SEQ ID NO: 706541 - RNA, 19 nt, Artificial Sequence
  Description of Artificial Sequence: Synthetic oligonucleotide
acuagaaacgcaacagcuc

SEQ ID NO: 706542 - RNA, 19 nt, Artificial Sequence
  Description of Artificial Sequence: Synthetic oligonucleotide
uguuacaggggaaggcucu

SEQ ID NO: 706543 - RNA, 19 nt, Artificial Sequence
  Description of Artificial Sequence: Synthetic oligonucleotide
uaucuagcagauagauuca

SEQ ID NO: 706544 - RNA, 19 nt, Artificial Sequence
  Description of Artificial Sequence: Synthetic oligonucleotide
ucuagcagauagauucaga

SEQ ID NO: 706545 - RNA, 19 nt, Artificial Sequence
  Description of Artificial Sequence: Synthetic oligonucleotide
auaauagaaacaauuccau

SEQ ID NO: 706546 - RNA, 19 nt, Artificial Sequence
  Description of Artificial Sequence: Synthetic oligonucleotide
uccugagcacagaauguag

SEQ ID NO: 706547 - RNA, 19 nt, Artificial Sequence
  Description of Artificial Sequence: Synthetic oligonucleotide
cucaccgucacagaacuag

SEQ ID NO: 706548 - RNA, 19 nt, Artificial Sequence
  Description of Artificial Sequence: Synthetic oligonucleotide
ugccgguuggauuuagugc

SEQ ID NO: 706549 - RNA, 19 nt, Artificial Sequence
  Description of Artificial Sequence: Synthetic oligonucleotide
ggaauucacacauauggca

SEQ ID NO: 706550 - RNA, 19 nt, Artificial Sequence
  Description of Artificial Sequence: Synthetic oligonucleotide
accccuuagagacugacaa

SEQ ID NO: 706551 - RNA, 19 nt, Artificial Sequence
  Description of Artificial Sequence: Synthetic oligonucleotide
aguugguuccauuaauaau

SEQ ID NO: 706552 - RNA, 19 nt, Artificial Sequence
  Description of Artificial Sequence: Synthetic oligonucleotide
uggcauugcaauccugagc

SEQ ID NO: 706553 - RNA, 19 nt, Artificial Sequence
  Description of Artificial Sequence: Synthetic oligonucleotide
agauagucucucuuuacaa

SEQ ID NO: 706554 - RNA, 19 nt, Artificial Sequence
  Description of Artificial Sequence: Synthetic oligonucleotide
uucagucacaucaaacauu

SEQ ID NO: 706555 - RNA, 19 nt, Artificial Sequence
  Description of Artificial Sequence: Synthetic oligonucleotide
uggucuaccguaaggcaca

SEQ ID NO: 706556 - RNA, 19 nt, Artificial Sequence
  Description of Artificial Sequence: Synthetic oligonucleotide
aacacacuaccaaugugug

SEQ ID NO: 706557 - RNA, 19 nt, Artificial Sequence
  Description of Artificial Sequence: Synthetic oligonucleotide
ugaucuggcucucuccaga

SEQ ID NO: 706558 - RNA, 19 nt, Artificial Sequence
  Description of Artificial Sequence: Synthetic oligonucleotide
cagaauguagaacaacuga

SEQ ID NO: 706559 - RNA, 19 nt, Artificial Sequence
  Description of Artificial Sequence: Synthetic oligonucleotide
aggucaauuaugagaaauc

SEQ ID NO: 706560 - RNA, 19 nt, Artificial Sequence
  Description of Artificial Sequence: Synthetic oligonucleotide
gauacaagcaauacaucaa

SEQ ID NO: 706561 - RNA, 19 nt, Artificial Sequence
  Description of Artificial Sequence: Synthetic oligonucleotide
ggaaaucaacagcucaccg

SEQ ID NO: 706562 - RNA, 19 nt, Artificial Sequence
  Description of Artificial Sequence: Synthetic oligonucleotide
ccgucacagaacuagaacg

SEQ ID NO: 706563 - RNA, 19 nt, Artificial Sequence
  Description of Artificial Sequence: Synthetic oligonucleotide
aagcuuuggucaauauagg

SEQ ID NO: 706564 - RNA, 19 nt, Artificial Sequence
  Description of Artificial Sequence: Synthetic oligonucleotide
gaacugacguguuucccug

SEQ ID NO: 706565 - RNA, 19 nt, Artificial Sequence
  Description of Artificial Sequence: Synthetic oligonucleotide
ugaauagguuauccccuug

SEQ ID NO: 706566 - RNA, 19 nt, Artificial Sequence
  Description of Artificial Sequence: Synthetic oligonucleotide
ucuggucuaccguaaggca

SEQ ID NO: 706567 - RNA, 19 nt, Artificial Sequence
  Description of Artificial Sequence: Synthetic oligonucleotide
aaagugugauacaagcaau

SEQ ID NO: 706568 - RNA, 19 nt, Artificial Sequence
  Description of Artificial Sequence: Synthetic oligonucleotide
aauguucgaauagggacau

SEQ ID NO: 706569 - RNA, 19 nt, Artificial Sequence
  Description of Artificial Sequence: Synthetic oligonucleotide
cacacuaccaaugugugca

SEQ ID NO: 706570 - RNA, 19 nt, Artificial Sequence
  Description of Artificial Sequence: Synthetic oligonucleotide
aagcaauacaucaauugua

SEQ ID NO: 706571 - RNA, 19 nt, Artificial Sequence
  Description of Artificial Sequence: Synthetic oligonucleotide
ugacggcauuuccagaggc

SEQ ID NO: 706572 - RNA, 19 nt, Artificial Sequence
  Description of Artificial Sequence: Synthetic oligonucleotide
acguucaguucauuacggg

SEQ ID NO: 706573 - RNA, 19 nt, Artificial Sequence
  Description of Artificial Sequence: Synthetic oligonucleotide
ucuaccuauuuacauuguu

SEQ ID NO: 706574 - RNA, 19 nt, Artificial Sequence
  Description of Artificial Sequence: Synthetic oligonucleotide
cuggucuaccguaaggcac

SEQ ID NO: 706575 - RNA, 19 nt, Artificial Sequence
  Description of Artificial Sequence: Synthetic oligonucleotide
gcuuacaguuccaagagcc

SEQ ID NO: 706576 - RNA, 19 nt, Artificial Sequence
  Description of Artificial Sequence: Synthetic oligonucleotide
agacuaaggucaauuauga

SEQ ID NO: 706577 - RNA, 19 nt, Artificial Sequence
  Description of Artificial Sequence: Synthetic oligonucleotide
ucuccauucaugguuaauu

SEQ ID NO: 706578 - RNA, 19 nt, Artificial Sequence
  Description of Artificial Sequence: Synthetic oligonucleotide
acgaucuuuugauccagug

SEQ ID NO: 706579 - RNA, 19 nt, Artificial Sequence
  Description of Artificial Sequence: Synthetic oligonucleotide
auaauaagugcaggacauc

SEQ ID NO: 706580 - RNA, 19 nt, Artificial Sequence
  Description of Artificial Sequence: Synthetic oligonucleotide
ugauugaucuggcucucuc

SEQ ID NO: 706581 - RNA, 19 nt, Artificial Sequence
  Description of Artificial Sequence: Synthetic oligonucleotide
aaaaggagcuauugcuauu

SEQ ID NO: 706582 - RNA, 19 nt, Artificial Sequence
  Description of Artificial Sequence: Synthetic oligonucleotide
uuccuuguuacaggggaag

SEQ ID NO: 706583 - RNA, 19 nt, Artificial Sequence
  Description of Artificial Sequence: Synthetic oligonucleotide
augauuagaucuuguccgu

SEQ ID NO: 706584 - RNA, 19 nt, Artificial Sequence
  Description of Artificial Sequence: Synthetic oligonucleotide
uuagaucuuguccguugga

SEQ ID NO: 706585 - RNA, 19 nt, Artificial Sequence
  Description of Artificial Sequence: Synthetic oligonucleotide
agcaauacaucaauuguaa

SEQ ID NO: 706586 - RNA, 19 nt, Artificial Sequence
  Description of Artificial Sequence: Synthetic oligonucleotide
guuauaccguuacauaaaa

SEQ ID NO: 706587 - RNA, 19 nt, Artificial Sequence
  Description of Artificial Sequence: Synthetic oligonucleotide
agacgauuaaacacguuca

SEQ ID NO: 706588 - RNA, 19 nt, Artificial Sequence
  Description of Artificial Sequence: Synthetic oligonucleotide
agcucaccgucacagaacu

SEQ ID NO: 706589 - RNA, 19 nt, Artificial Sequence
  Description of Artificial Sequence: Synthetic oligonucleotide
uuauaccguuacauaaaau

SEQ ID NO: 706590 - RNA, 19 nt, Artificial Sequence
  Description of Artificial Sequence: Synthetic oligonucleotide
guuaauguucgaauaggga

SEQ ID NO: 706591 - RNA, 19 nt, Artificial Sequence
  Description of Artificial Sequence: Synthetic oligonucleotide
ugguuaauuacuggcaaua

SEQ ID NO: 706592 - RNA, 19 nt, Artificial Sequence
  Description of Artificial Sequence: Synthetic oligonucleotide
uugaaauuuguaaccccuu

SEQ ID NO: 706593 - RNA, 19 nt, Artificial Sequence
  Description of Artificial Sequence: Synthetic oligonucleotide
caguuuaugcuuaucucca

SEQ ID NO: 706594 - RNA, 19 nt, Artificial Sequence
  Description of Artificial Sequence: Synthetic oligonucleotide
agaaacaguaagacgauua

SEQ ID NO: 706595 - RNA, 19 nt, Artificial Sequence
  Description of Artificial Sequence: Synthetic oligonucleotide
gacugaaaccuuuuaagau

SEQ ID NO: 706596 - RNA, 19 nt, Artificial Sequence
  Description of Artificial Sequence: Synthetic oligonucleotide
acugaauagguuauccccu

SEQ ID NO: 706597 - RNA, 19 nt, Artificial Sequence
  Description of Artificial Sequence: Synthetic oligonucleotide
ucggaagcaccagaauccg

SEQ ID NO: 706598 - RNA, 19 nt, Artificial Sequence
  Description of Artificial Sequence: Synthetic oligonucleotide
agcaccagaauccgagugu

SEQ ID NO: 706599 - RNA, 19 nt, Artificial Sequence
  Description of Artificial Sequence: Synthetic oligonucleotide
aauuuccuguccagucacg

SEQ ID NO: 706600 - RNA, 19 nt, Artificial Sequence
  Description of Artificial Sequence: Synthetic oligonucleotide
accguaaggcacauaacag

SEQ ID NO: 706601 - RNA, 19 nt, Artificial Sequence
  Description of Artificial Sequence: Synthetic oligonucleotide
ugagcacagaauguagaac

SEQ ID NO: 706602 - RNA, 19 nt, Artificial Sequence
  Description of Artificial Sequence: Synthetic oligonucleotide
gaugggacugucaugaccu

SEQ ID NO: 706603 - RNA, 19 nt, Artificial Sequence
  Description of Artificial Sequence: Synthetic oligonucleotide
acugacguguuucccugag

SEQ ID NO: 706604 - RNA, 19 nt, Artificial Sequence
  Description of Artificial Sequence: Synthetic oligonucleotide
gguuccauuaauaauaagu

SEQ ID NO: 706605 - RNA, 19 nt, Artificial Sequence
  Description of Artificial Sequence: Synthetic oligonucleotide
cauucugacggcauuucca

SEQ ID NO: 706606 - RNA, 19 nt, Artificial Sequence
  Description of Artificial Sequence: Synthetic oligonucleotide
ugaaaccuuuuaagauccc

SEQ ID NO: 706607 - RNA, 19 nt, Artificial Sequence
  Description of Artificial Sequence: Synthetic oligonucleotide
uucauuacggggccggcuu

SEQ ID NO: 706608 - RNA, 19 nt, Artificial Sequence
  Description of Artificial Sequence: Synthetic oligonucleotide
aauggucagugcuucuaua

SEQ ID NO: 706609 - RNA, 19 nt, Artificial Sequence
  Description of Artificial Sequence: Synthetic oligonucleotide
auaccguuacauaaaauua

SEQ ID NO: 706610 - RNA, 19 nt, Artificial Sequence
  Description of Artificial Sequence: Synthetic oligonucleotide
gaaagugccgguuggauuu

SEQ ID NO: 706611 - RNA, 19 nt, Artificial Sequence
  Description of Artificial Sequence: Synthetic oligonucleotide
uagaacgcccagcacuaga

SEQ ID NO: 706612 - RNA, 19 nt, Artificial Sequence
  Description of Artificial Sequence: Synthetic oligonucleotide
agugcuucuauaccaucau

SEQ ID NO: 706613 - RNA, 19 nt, Artificial Sequence
  Description of Artificial Sequence: Synthetic oligonucleotide
aucaauuguaagaagcaua

SEQ ID NO: 706614 - RNA, 19 nt, Artificial Sequence
  Description of Artificial Sequence: Synthetic oligonucleotide
ucaucgguagaaucuuguc

SEQ ID NO: 706615 - RNA, 19 nt, Artificial Sequence
  Description of Artificial Sequence: Synthetic oligonucleotide
acagucauaaugccagaua

SEQ ID NO: 706616 - RNA, 19 nt, Artificial Sequence
  Description of Artificial Sequence: Synthetic oligonucleotide
agaauccgaguguugugcu

SEQ ID NO: 706617 - RNA, 19 nt, Artificial Sequence
  Description of Artificial Sequence: Synthetic oligonucleotide
cagaguaucaucacagugu

SEQ ID NO: 706618 - RNA, 19 nt, Artificial Sequence
  Description of Artificial Sequence: Synthetic oligonucleotide
caagcaauacaucaauugu

SEQ ID NO: 706619 - RNA, 19 nt, Artificial Sequence
  Description of Artificial Sequence: Synthetic oligonucleotide
aguuauaccguuacauaaa

SEQ ID NO: 706620 - RNA, 19 nt, Artificial Sequence
  Description of Artificial Sequence: Synthetic oligonucleotide
ccguaaggcacauaacagg

SEQ ID NO: 706621 - RNA, 19 nt, Artificial Sequence
  Description of Artificial Sequence: Synthetic oligonucleotide
auaacaggacccagguguc

SEQ ID NO: 706622 - RNA, 19 nt, Artificial Sequence
  Description of Artificial Sequence: Synthetic oligonucleotide
gugccgguuggauuuagug

SEQ ID NO: 706623 - RNA, 19 nt, Artificial Sequence
  Description of Artificial Sequence: Synthetic oligonucleotide
ugcugaacugacguguuuc

SEQ ID NO: 706624 - RNA, 19 nt, Artificial Sequence
  Description of Artificial Sequence: Synthetic oligonucleotide
caugguuaauuacuggcaa

SEQ ID NO: 706625 - RNA, 19 nt, Artificial Sequence
  Description of Artificial Sequence: Synthetic oligonucleotide
ucaccgucacagaacuaga

SEQ ID NO: 706626 - RNA, 19 nt, Artificial Sequence
  Description of Artificial Sequence: Synthetic oligonucleotide
ccuugugugcauuugggac

SEQ ID NO: 706627 - RNA, 19 nt, Artificial Sequence
  Description of Artificial Sequence: Synthetic oligonucleotide
caauauagguaaacgugaa

SEQ ID NO: 706628 - RNA, 19 nt, Artificial Sequence
  Description of Artificial Sequence: Synthetic oligonucleotide
caaguacgaucuuuugauc

SEQ ID NO: 706629 - RNA, 19 nt, Artificial Sequence
  Description of Artificial Sequence: Synthetic oligonucleotide
aucuagcagauagauucag

SEQ ID NO: 706630 - RNA, 19 nt, Artificial Sequence
  Description of Artificial Sequence: Synthetic oligonucleotide
acgauuaaacacguucagu

SEQ ID NO: 706631 - RNA, 19 nt, Artificial Sequence
  Description of Artificial Sequence: Synthetic oligonucleotide
acgcccagcacuagaaacg

SEQ ID NO: 706632 - RNA, 19 nt, Artificial Sequence
  Description of Artificial Sequence: Synthetic oligonucleotide
cuagcagauagauucagau

SEQ ID NO: 706633 - RNA, 19 nt, Artificial Sequence
  Description of Artificial Sequence: Synthetic oligonucleotide
aagugugauacaagcaaua

SEQ ID NO: 706634 - RNA, 19 nt, Artificial Sequence
  Description of Artificial Sequence: Synthetic oligonucleotide
agcagacuaaggucaauua

SEQ ID NO: 706635 - RNA, 19 nt, Artificial Sequence
  Description of Artificial Sequence: Synthetic oligonucleotide
auuugaccaucuugcaaau

SEQ ID NO: 706636 - RNA, 19 nt, Artificial Sequence
  Description of Artificial Sequence: Synthetic oligonucleotide
ucgccugugucagagauuu

SEQ ID NO: 706637 - RNA, 19 nt, Artificial Sequence
  Description of Artificial Sequence: Synthetic oligonucleotide
gauagucucucuuuacaau

SEQ ID NO: 706638 - RNA, 19 nt, Artificial Sequence
  Description of Artificial Sequence: Synthetic oligonucleotide
uuacaggggaaggcucugg

SEQ ID NO: 706639 - RNA, 19 nt, Artificial Sequence
  Description of Artificial Sequence: Synthetic oligonucleotide
uugaccugaagauguuaau

SEQ ID NO: 706640 - RNA, 19 nt, Artificial Sequence
  Description of Artificial Sequence: Synthetic oligonucleotide
aguucauuacggggccggc

SEQ ID NO: 706641 - RNA, 19 nt, Artificial Sequence
  Description of Artificial Sequence: Synthetic oligonucleotide
ccgaucaucagcugcagug

SEQ ID NO: 706642 - RNA, 19 nt, Artificial Sequence
  Description of Artificial Sequence: Synthetic oligonucleotide
ucaguucauuacggggccg

SEQ ID NO: 706643 - RNA, 19 nt, Artificial Sequence
  Description of Artificial Sequence: Synthetic oligonucleotide
cguucaguucauuacgggg

SEQ ID NO: 706644 - RNA, 19 nt, Artificial Sequence
  Description of Artificial Sequence: Synthetic oligonucleotide
ucauuacggggccggcuug

SEQ ID NO: 706645 - RNA, 19 nt, Artificial Sequence
  Description of Artificial Sequence: Synthetic oligonucleotide
auagguaaacgugaacauu

SEQ ID NO: 706646 - RNA, 19 nt, Artificial Sequence
  Description of Artificial Sequence: Synthetic oligonucleotide
aguuuaugcuuaucuccau

SEQ ID NO: 706647 - RNA, 19 nt, Artificial Sequence
  Description of Artificial Sequence: Synthetic oligonucleotide
agugaaaacauggguggaa

SEQ ID NO: 706648 - RNA, 19 nt, Artificial Sequence
  Description of Artificial Sequence: Synthetic oligonucleotide
gcagacagauaaauuauac

SEQ ID NO: 706649 - RNA, 19 nt, Artificial Sequence
  Description of Artificial Sequence: Synthetic oligonucleotide
ugucaugaccucucaucuc

SEQ ID NO: 706650 - RNA, 19 nt, Artificial Sequence
  Description of Artificial Sequence: Synthetic oligonucleotide
ucgguagaaucuuguccug

SEQ ID NO: 706651 - RNA, 19 nt, Artificial Sequence
  Description of Artificial Sequence: Synthetic oligonucleotide
cauacaagacaguacaguu

SEQ ID NO: 706652 - RNA, 19 nt, Artificial Sequence
  Description of Artificial Sequence: Synthetic oligonucleotide
caaaaguuauaccguuaca

SEQ ID NO: 706653 - RNA, 19 nt, Artificial Sequence
  Description of Artificial Sequence: Synthetic oligonucleotide
cagaucgccugugucagag

SEQ ID NO: 706654 - RNA, 19 nt, Artificial Sequence
  Description of Artificial Sequence: Synthetic oligonucleotide
ugagcaaaacuggguggcc

SEQ ID NO: 706655 - RNA, 19 nt, Artificial Sequence
  Description of Artificial Sequence: Synthetic oligonucleotide
aggagcuauugcuauuaaa

SEQ ID NO: 706656 - RNA, 19 nt, Artificial Sequence
  Description of Artificial Sequence: Synthetic oligonucleotide
gcuaagucccauuucuuga

SEQ ID NO: 706657 - RNA, 19 nt, Artificial Sequence
  Description of Artificial Sequence: Synthetic oligonucleotide
agugaugauuagaucuugu

SEQ ID NO: 706658 - RNA, 19 nt, Artificial Sequence
  Description of Artificial Sequence: Synthetic oligonucleotide
cuaccguaaggcacauaac

SEQ ID NO: 706659 - RNA, 19 nt, Artificial Sequence
  Description of Artificial Sequence: Synthetic oligonucleotide
guacgaucuuuugauccag

SEQ ID NO: 706660 - RNA, 19 nt, Artificial Sequence
  Description of Artificial Sequence: Synthetic oligonucleotide
ggagaucaucgguagaauc

SEQ ID NO: 706661 - RNA, 19 nt, Artificial Sequence
  Description of Artificial Sequence: Synthetic oligonucleotide
guugguagauauuaauauu

SEQ ID NO: 706662 - RNA, 19 nt, Artificial Sequence
  Description of Artificial Sequence: Synthetic oligonucleotide
gaacuagaacgcccagcac

SEQ ID NO: 706663 - RNA, 19 nt, Artificial Sequence
  Description of Artificial Sequence: Synthetic oligonucleotide
aucaucgguagaaucuugu

SEQ ID NO: 706664 - RNA, 19 nt, Artificial Sequence
  Description of Artificial Sequence: Synthetic oligonucleotide
cagucacgagauuccaaac

SEQ ID NO: 706665 - RNA, 19 nt, Artificial Sequence
  Description of Artificial Sequence: Synthetic oligonucleotide
aguccgaucaucagcugca

SEQ ID NO: 706666 - RNA, 19 nt, Artificial Sequence
  Description of Artificial Sequence: Synthetic oligonucleotide
cuugugugcauuugggacu

SEQ ID NO: 706667 - RNA, 19 nt, Artificial Sequence
  Description of Artificial Sequence: Synthetic oligonucleotide
cauugcaauccugagcaca

SEQ ID NO: 706668 - RNA, 19 nt, Artificial Sequence
  Description of Artificial Sequence: Synthetic oligonucleotide
agucauaaugccagauagu

SEQ ID NO: 706669 - RNA, 19 nt, Artificial Sequence
  Description of Artificial Sequence: Synthetic oligonucleotide
uuguaaccccuuagagacu

SEQ ID NO: 706670 - RNA, 19 nt, Artificial Sequence
  Description of Artificial Sequence: Synthetic oligonucleotide
aaucaacagcucaccguca

SEQ ID NO: 706671 - RNA, 19 nt, Artificial Sequence
  Description of Artificial Sequence: Synthetic oligonucleotide
gaaaucuggucuaccguaa

SEQ ID NO: 706672 - RNA, 19 nt, Artificial Sequence
  Description of Artificial Sequence: Synthetic oligonucleotide
ggaaaucuggucuaccgua

SEQ ID NO: 706673 - RNA, 19 nt, Artificial Sequence
  Description of Artificial Sequence: Synthetic oligonucleotide
gacggcauuuccagaggcc

SEQ ID NO: 706674 - RNA, 19 nt, Artificial Sequence
  Description of Artificial Sequence: Synthetic oligonucleotide
guguugguagauauuaaua

SEQ ID NO: 706675 - RNA, 19 nt, Artificial Sequence
  Description of Artificial Sequence: Synthetic oligonucleotide
agaggagaucaucgguaga

SEQ ID NO: 706676 - RNA, 19 nt, Artificial Sequence
  Description of Artificial Sequence: Synthetic oligonucleotide
auucucacaguccgaucau

SEQ ID NO: 706677 - RNA, 19 nt, Artificial Sequence
  Description of Artificial Sequence: Synthetic oligonucleotide
agccgcugagcaaaacugg

SEQ ID NO: 706678 - RNA, 19 nt, Artificial Sequence
  Description of Artificial Sequence: Synthetic oligonucleotide
uaaccccuuagagacugac

SEQ ID NO: 706679 - RNA, 19 nt, Artificial Sequence
  Description of Artificial Sequence: Synthetic oligonucleotide
uagcagacuaaggucaauu

SEQ ID NO: 706680 - RNA, 19 nt, Artificial Sequence
  Description of Artificial Sequence: Synthetic oligonucleotide
ucuuuacaaucuaccuauu

SEQ ID NO: 706681 - RNA, 19 nt, Artificial Sequence
  Description of Artificial Sequence: Synthetic oligonucleotide
agaucaucgguagaaucuu

SEQ ID NO: 706682 - RNA, 19 nt, Artificial Sequence
  Description of Artificial Sequence: Synthetic oligonucleotide
cacgagauuccaaacuuua

SEQ ID NO: 706683 - RNA, 19 nt, Artificial Sequence
  Description of Artificial Sequence: Synthetic oligonucleotide
cugagcuaagucccauuuc

SEQ ID NO: 706684 - RNA, 19 nt, Artificial Sequence
  Description of Artificial Sequence: Synthetic oligonucleotide
agugucaguuuaugcuuau

SEQ ID NO: 706685 - RNA, 19 nt, Artificial Sequence
  Description of Artificial Sequence: Synthetic oligonucleotide
uaagacgauuaaacacguu

SEQ ID NO: 706686 - RNA, 19 nt, Artificial Sequence
  Description of Artificial Sequence: Synthetic oligonucleotide
uucugacggcauuuccaga

SEQ ID NO: 706687 - RNA, 19 nt, Artificial Sequence
  Description of Artificial Sequence: Synthetic oligonucleotide
ccguuacauaaaauuaaac

SEQ ID NO: 706688 - RNA, 19 nt, Artificial Sequence
  Description of Artificial Sequence: Synthetic oligonucleotide
caagaguaacuugaccuga

SEQ ID NO: 706689 - RNA, 19 nt, Artificial Sequence
  Description of Artificial Sequence: Synthetic oligonucleotide
gauccagugaagaggagau

SEQ ID NO: 706690 - RNA, 19 nt, Artificial Sequence
  Description of Artificial Sequence: Synthetic oligonucleotide
uaaugccagauagucucuc

SEQ ID NO: 706691 - RNA, 19 nt, Artificial Sequence
  Description of Artificial Sequence: Synthetic oligonucleotide
uaacaggacccaggugucc

SEQ ID NO: 706692 - RNA, 19 nt, Artificial Sequence
  Description of Artificial Sequence: Synthetic oligonucleotide
augugugcaaacacaguau

SEQ ID NO: 706693 - RNA, 19 nt, Artificial Sequence
  Description of Artificial Sequence: Synthetic oligonucleotide
gccgcauagaggaaagugc

SEQ ID NO: 706694 - RNA, 19 nt, Artificial Sequence
  Description of Artificial Sequence: Synthetic oligonucleotide
cuaccuauuuacauuguuu

SEQ ID NO: 706695 - RNA, 19 nt, Artificial Sequence
  Description of Artificial Sequence: Synthetic oligonucleotide
aaccccuuagagacugaca

SEQ ID NO: 706696 - RNA, 19 nt, Artificial Sequence
  Description of Artificial Sequence: Synthetic oligonucleotide
accucucaucucuccaacu

SEQ ID NO: 706697 - RNA, 19 nt, Artificial Sequence
  Description of Artificial Sequence: Synthetic oligonucleotide
uuuugauguaaugguccuu

SEQ ID NO: 706698 - RNA, 19 nt, Artificial Sequence
  Description of Artificial Sequence: Synthetic oligonucleotide
caaucuaccuauuuacauu

SEQ ID NO: 706699 - RNA, 19 nt, Artificial Sequence
  Description of Artificial Sequence: Synthetic oligonucleotide
acuagaacgcccagcacua

SEQ ID NO: 706700 - RNA, 19 nt, Artificial Sequence
  Description of Artificial Sequence: Synthetic oligonucleotide
uuacggggccggcuuggug

SEQ ID NO: 706701 - RNA, 19 nt, Artificial Sequence
  Description of Artificial Sequence: Synthetic oligonucleotide
cauuacggggccggcuugg

SEQ ID NO: 706702 - RNA, 19 nt, Artificial Sequence
  Description of Artificial Sequence: Synthetic oligonucleotide
ggacuugcugaagaagacc

SEQ ID NO: 706703 - RNA, 19 nt, Artificial Sequence
  Description of Artificial Sequence: Synthetic oligonucleotide
gaucgccugugucagagau

SEQ ID NO: 706704 - RNA, 19 nt, Artificial Sequence
  Description of Artificial Sequence: Synthetic oligonucleotide
cagcacuagaaacgcaaca

SEQ ID NO: 706705 - RNA, 19 nt, Artificial Sequence
  Description of Artificial Sequence: Synthetic oligonucleotide
auauggcauugaugggacu

SEQ ID NO: 706706 - RNA, 19 nt, Artificial Sequence
  Description of Artificial Sequence: Synthetic oligonucleotide
cuuguuacaggggaaggcu

SEQ ID NO: 706707 - RNA, 19 nt, Artificial Sequence
  Description of Artificial Sequence: Synthetic oligonucleotide
gguuggauuuagugcaauc

SEQ ID NO: 706708 - RNA, 19 nt, Artificial Sequence
  Description of Artificial Sequence: Synthetic oligonucleotide
ugggacugucaugaccucu

SEQ ID NO: 706709 - RNA, 19 nt, Artificial Sequence
  Description of Artificial Sequence: Synthetic oligonucleotide
ugauuagaucuuguccguu

SEQ ID NO: 706710 - RNA, 19 nt, Artificial Sequence
  Description of Artificial Sequence: Synthetic oligonucleotide
acccaaucaaacagcauuu

SEQ ID NO: 706711 - RNA, 19 nt, Artificial Sequence
  Description of Artificial Sequence: Synthetic oligonucleotide
auaaugccagauagucucu

SEQ ID NO: 706712 - RNA, 19 nt, Artificial Sequence
  Description of Artificial Sequence: Synthetic oligonucleotide
gucacgagauuccaaacuu

SEQ ID NO: 706713 - RNA, 19 nt, Artificial Sequence
  Description of Artificial Sequence: Synthetic oligonucleotide
auagaggaaagugccgguu

SEQ ID NO: 706714 - RNA, 19 nt, Artificial Sequence
  Description of Artificial Sequence: Synthetic oligonucleotide
uccgguuagcuuuccugua

SEQ ID NO: 706715 - RNA, 19 nt, Artificial Sequence
  Description of Artificial Sequence: Synthetic oligonucleotide
gguuagcuuuccuguagac

SEQ ID NO: 706716 - RNA, 19 nt, Artificial Sequence
  Description of Artificial Sequence: Synthetic oligonucleotide
agaacgcccagcacuagaa

SEQ ID NO: 706717 - RNA, 19 nt, Artificial Sequence
  Description of Artificial Sequence: Synthetic oligonucleotide
agauagauucagauauauu

SEQ ID NO: 706718 - RNA, 19 nt, Artificial Sequence
  Description of Artificial Sequence: Synthetic oligonucleotide
uugugugcauuugggacuu

SEQ ID NO: 706719 - RNA, 19 nt, Artificial Sequence
  Description of Artificial Sequence: Synthetic oligonucleotide
cauuguuucccaccacaaa

SEQ ID NO: 706720 - RNA, 19 nt, Artificial Sequence
  Description of Artificial Sequence: Synthetic oligonucleotide
cguaaggcacauaacagga

SEQ ID NO: 706721 - RNA, 19 nt, Artificial Sequence
  Description of Artificial Sequence: Synthetic oligonucleotide
gacguguuucccugagaaa

SEQ ID NO: 706722 - RNA, 19 nt, Artificial Sequence
  Description of Artificial Sequence: Synthetic oligonucleotide
agcagacagauaaauuaua

SEQ ID NO: 706723 - RNA, 19 nt, Artificial Sequence
  Description of Artificial Sequence: Synthetic oligonucleotide
gguggaauucacacauaug

SEQ ID NO: 706724 - RNA, 19 nt, Artificial Sequence
  Description of Artificial Sequence: Synthetic oligonucleotide
agaggccgcauagaggaaa

SEQ ID NO: 706725 - RNA, 19 nt, Artificial Sequence
  Description of Artificial Sequence: Synthetic oligonucleotide
guuacaggggaaggcucug

SEQ ID NO: 706726 - RNA, 19 nt, Artificial Sequence
  Description of Artificial Sequence: Synthetic oligonucleotide
acaguccgaucaucagcug

SEQ ID NO: 706727 - RNA, 19 nt, Artificial Sequence
  Description of Artificial Sequence: Synthetic oligonucleotide
guaagacgauuaaacacgu

SEQ ID NO: 706728 - RNA, 19 nt, Artificial Sequence
  Description of Artificial Sequence: Synthetic oligonucleotide
aagugccgguuggauuuag

SEQ ID NO: 706729 - RNA, 19 nt, Artificial Sequence
  Description of Artificial Sequence: Synthetic oligonucleotide
cucaucucuccaacuggca

SEQ ID NO: 706730 - RNA, 19 nt, Artificial Sequence
  Description of Artificial Sequence: Synthetic oligonucleotide
ggccgcauagaggaaagug

SEQ ID NO: 706731 - RNA, 19 nt, Artificial Sequence
  Description of Artificial Sequence: Synthetic oligonucleotide
acuagccucggaagcacca

SEQ ID NO: 706732 - RNA, 19 nt, Artificial Sequence
  Description of Artificial Sequence: Synthetic oligonucleotide
uugcaaauugugggcuuuc

SEQ ID NO: 706733 - RNA, 19 nt, Artificial Sequence
  Description of Artificial Sequence: Synthetic oligonucleotide
gacuagccucggaagcacc

SEQ ID NO: 706734 - RNA, 19 nt, Artificial Sequence
  Description of Artificial Sequence: Synthetic oligonucleotide
uuagcagacuaaggucaau

SEQ ID NO: 706735 - RNA, 19 nt, Artificial Sequence
  Description of Artificial Sequence: Synthetic oligonucleotide
gccgcugagcaaaacuggg

SEQ ID NO: 706736 - RNA, 19 nt, Artificial Sequence
  Description of Artificial Sequence: Synthetic oligonucleotide
ggaggugagagacuagccu

SEQ ID NO: 706737 - RNA, 19 nt, Artificial Sequence
  Description of Artificial Sequence: Synthetic oligonucleotide
acacuaccaaugugugcaa

SEQ ID NO: 706738 - RNA, 19 nt, Artificial Sequence
  Description of Artificial Sequence: Synthetic oligonucleotide
ccaacuggcacaaaaguau

SEQ ID NO: 706739 - RNA, 19 nt, Artificial Sequence
  Description of Artificial Sequence: Synthetic oligonucleotide
acccagguguccgguuagc

SEQ ID NO: 706740 - RNA, 19 nt, Artificial Sequence
  Description of Artificial Sequence: Synthetic oligonucleotide
uuugaccaucuugcaaauu

SEQ ID NO: 706741 - RNA, 19 nt, Artificial Sequence
  Description of Artificial Sequence: Synthetic oligonucleotide
aggagaucaucgguagaau

SEQ ID NO: 706742 - RNA, 19 nt, Artificial Sequence
  Description of Artificial Sequence: Synthetic oligonucleotide
gaggaaagugccgguugga

SEQ ID NO: 706743 - RNA, 19 nt, Artificial Sequence
  Description of Artificial Sequence: Synthetic oligonucleotide
ggugagagacuagccucgg

SEQ ID NO: 706744 - RNA, 19 nt, Artificial Sequence
  Description of Artificial Sequence: Synthetic oligonucleotide
cagauagauucagauauau

SEQ ID NO: 706745 - RNA, 19 nt, Artificial Sequence
  Description of Artificial Sequence: Synthetic oligonucleotide
agaucgccugugucagaga

SEQ ID NO: 706746 - RNA, 19 nt, Artificial Sequence
  Description of Artificial Sequence: Synthetic oligonucleotide
aucuaccuauuuacauugu

SEQ ID NO: 706747 - RNA, 19 nt, Artificial Sequence
  Description of Artificial Sequence: Synthetic oligonucleotide
ccgguuagcuuuccuguag

SEQ ID NO: 706748 - RNA, 19 nt, Artificial Sequence
  Description of Artificial Sequence: Synthetic oligonucleotide
ccagucacgagauuccaaa

SEQ ID NO: 706749 - RNA, 19 nt, Artificial Sequence
  Description of Artificial Sequence: Synthetic oligonucleotide
cuagaacgcccagcacuag

SEQ ID NO: 706750 - RNA, 19 nt, Artificial Sequence
  Description of Artificial Sequence: Synthetic oligonucleotide
gaauagcuacuguccggcu

SEQ ID NO: 706751 - RNA, 19 nt, Artificial Sequence
  Description of Artificial Sequence: Synthetic oligonucleotide
ccugagcacagaauguaga

SEQ ID NO: 706752 - RNA, 19 nt, Artificial Sequence
  Description of Artificial Sequence: Synthetic oligonucleotide
caaucugauugaucuggcu

SEQ ID NO: 706753 - RNA, 19 nt, Artificial Sequence
  Description of Artificial Sequence: Synthetic oligonucleotide
aaagugccgguuggauuua

SEQ ID NO: 706754 - RNA, 19 nt, Artificial Sequence
  Description of Artificial Sequence: Synthetic oligonucleotide
auccgaguguugugcuccu

SEQ ID NO: 706755 - RNA, 19 nt, Artificial Sequence
  Description of Artificial Sequence: Synthetic oligonucleotide
caccgucacagaacuagaa

SEQ ID NO: 706756 - RNA, 19 nt, Artificial Sequence
  Description of Artificial Sequence: Synthetic oligonucleotide
cccuuagagacugacaaaa

SEQ ID NO: 706757 - RNA, 19 nt, Artificial Sequence
  Description of Artificial Sequence: Synthetic oligonucleotide
aaugguccuuagagccagu

SEQ ID NO: 706758 - RNA, 19 nt, Artificial Sequence
  Description of Artificial Sequence: Synthetic oligonucleotide
guccgaucaucagcugcag

SEQ ID NO: 706759 - RNA, 19 nt, Artificial Sequence
  Description of Artificial Sequence: Synthetic oligonucleotide
aaguuguggguggggcuua

SEQ ID NO: 706760 - RNA, 19 nt, Artificial Sequence
  Description of Artificial Sequence: Synthetic oligonucleotide
ggguggaauucacacauau

SEQ ID NO: 706761 - RNA, 19 nt, Artificial Sequence
  Description of Artificial Sequence: Synthetic oligonucleotide
gugagagacuagccucgga

SEQ ID NO: 706762 - RNA, 19 nt, Artificial Sequence
  Description of Artificial Sequence: Synthetic oligonucleotide
cugagcagacagauaaauu

SEQ ID NO: 706763 - RNA, 19 nt, Artificial Sequence
  Description of Artificial Sequence: Synthetic oligonucleotide
acgcaacagcucuguggca

SEQ ID NO: 706764 - RNA, 19 nt, Artificial Sequence
  Description of Artificial Sequence: Synthetic oligonucleotide
ggauuuagugcaaucugau

SEQ ID NO: 706765 - RNA, 19 nt, Artificial Sequence
  Description of Artificial Sequence: Synthetic oligonucleotide
cugacguguuucccugaga

SEQ ID NO: 706766 - RNA, 19 nt, Artificial Sequence
  Description of Artificial Sequence: Synthetic oligonucleotide
auuacggggccggcuuggu

SEQ ID NO: 706767 - RNA, 19 nt, Artificial Sequence
  Description of Artificial Sequence: Synthetic oligonucleotide
gacugucaugaccucucau

SEQ ID NO: 706768 - RNA, 19 nt, Artificial Sequence
  Description of Artificial Sequence: Synthetic oligonucleotide
cugaauagguuauccccuu

SEQ ID NO: 706769 - RNA, 19 nt, Artificial Sequence
  Description of Artificial Sequence: Synthetic oligonucleotide
agugccgguuggauuuagu

SEQ ID NO: 706770 - RNA, 19 nt, Artificial Sequence
  Description of Artificial Sequence: Synthetic oligonucleotide
gguuaauuacuggcaauau

SEQ ID NO: 706771 - RNA, 19 nt, Artificial Sequence
  Description of Artificial Sequence: Synthetic oligonucleotide
ggaaagugccgguuggauu

SEQ ID NO: 706772 - RNA, 19 nt, Artificial Sequence
  Description of Artificial Sequence: Synthetic oligonucleotide
guucgaauagggacauaau

SEQ ID NO: 706773 - RNA, 19 nt, Artificial Sequence
  Description of Artificial Sequence: Synthetic oligonucleotide
ccccagaucgccuguguca

SEQ ID NO: 706774 - RNA, 19 nt, Artificial Sequence
  Description of Artificial Sequence: Synthetic oligonucleotide
gcauugcaauccugagcac

SEQ ID NO: 706775 - RNA, 19 nt, Artificial Sequence
  Description of Artificial Sequence: Synthetic oligonucleotide
guucauuacggggccggcu

SEQ ID NO: 706776 - RNA, 19 nt, Artificial Sequence
  Description of Artificial Sequence: Synthetic oligonucleotide
aggacccagguguccgguu

SEQ ID NO: 706777 - RNA, 19 nt, Artificial Sequence
  Description of Artificial Sequence: Synthetic oligonucleotide
caguuccaagagccccuuc

SEQ ID NO: 706778 - RNA, 19 nt, Artificial Sequence
  Description of Artificial Sequence: Synthetic oligonucleotide
cguguuucccugagaaaca

SEQ ID NO: 706779 - RNA, 19 nt, Artificial Sequence
  Description of Artificial Sequence: Synthetic oligonucleotide
gccauggucaaagugugau

SEQ ID NO: 706780 - RNA, 19 nt, Artificial Sequence
  Description of Artificial Sequence: Synthetic oligonucleotide
agcuacuguccggcugcug

SEQ ID NO: 706781 - RNA, 19 nt, Artificial Sequence
  Description of Artificial Sequence: Synthetic oligonucleotide
guagaacaacugaaagcuu

SEQ ID NO: 706782 - RNA, 19 nt, Artificial Sequence
  Description of Artificial Sequence: Synthetic oligonucleotide
gguuauccccuugaauggu

SEQ ID NO: 706783 - RNA, 19 nt, Artificial Sequence
  Description of Artificial Sequence: Synthetic oligonucleotide
cuugcaaauugugggcuuu

SEQ ID NO: 706784 - RNA, 19 nt, Artificial Sequence
  Description of Artificial Sequence: Synthetic oligonucleotide
ggacccagguguccgguua

SEQ ID NO: 706785 - RNA, 19 nt, Artificial Sequence
  Description of Artificial Sequence: Synthetic oligonucleotide
gagcuaagucccauuucuu

SEQ ID NO: 706786 - RNA, 19 nt, Artificial Sequence
  Description of Artificial Sequence: Synthetic oligonucleotide
cgcccagcacuagaaacgc

SEQ ID NO: 706787 - RNA, 19 nt, Artificial Sequence
  Description of Artificial Sequence: Synthetic oligonucleotide
gguguccgguuagcuuucc

SEQ ID NO: 706788 - RNA, 19 nt, Artificial Sequence
  Description of Artificial Sequence: Synthetic oligonucleotide
ccguuggaaaucuggucua

SEQ ID NO: 706789 - RNA, 19 nt, Artificial Sequence
  Description of Artificial Sequence: Synthetic oligonucleotide
auguucgaauagggacaua

SEQ ID NO: 706790 - RNA, 19 nt, Artificial Sequence
  Description of Artificial Sequence: Synthetic oligonucleotide
gggccggcuugguggggag

SEQ ID NO: 706791 - RNA, 19 nt, Artificial Sequence
  Description of Artificial Sequence: Synthetic oligonucleotide
cgguuagcuuuccuguaga

SEQ ID NO: 706792 - RNA, 19 nt, Artificial Sequence
  Description of Artificial Sequence: Synthetic oligonucleotide
ggccggcuugguggggagg

SEQ ID NO: 706793 - RNA, 19 nt, Artificial Sequence
  Description of Artificial Sequence: Synthetic oligonucleotide
ccgguuggauuuagugcaa

SEQ ID NO: 706794 - RNA, 19 nt, Artificial Sequence
  Description of Artificial Sequence: Synthetic oligonucleotide
ggggccggcuuggugggga

SEQ ID NO: 706795 - RNA, 19 nt, Artificial Sequence
  Description of Artificial Sequence: Synthetic oligonucleotide
gucuaccguaaggcacaua

SEQ ID NO: 706796 - RNA, 19 nt, Artificial Sequence
  Description of Artificial Sequence: Synthetic oligonucleotide
gccucggaagcaccagaau

SEQ ID NO: 706797 - RNA, 19 nt, Artificial Sequence
  Description of Artificial Sequence: Synthetic oligonucleotide
cggaagcaccagaauccga

SEQ ID NO: 706798 - RNA, 19 nt, Artificial Sequence
  Description of Artificial Sequence: Synthetic oligonucleotide
ccagaucgccugugucaga

SEQ ID NO: 706799 - RNA, 19 nt, Artificial Sequence
  Description of Artificial Sequence: Synthetic oligonucleotide
ggucuaccguaaggcacau

SEQ ID NO: 706800 - RNA, 19 nt, Artificial Sequence
  Description of Artificial Sequence: Synthetic oligonucleotide
cgccugugucagagauuug

SEQ ID NO: 706801 - RNA, 19 nt, Artificial Sequence
  Description of Artificial Sequence: Synthetic oligonucleotide
gcucaccgucacagaacua

SEQ ID NO: 706802 - RNA, 19 nt, Artificial Sequence
  Description of Artificial Sequence: Synthetic oligonucleotide
cgguuggauuuagugcaau

SEQ ID NO: 706803 - RNA, 19 nt, Artificial Sequence
  Description of Artificial Sequence: Synthetic oligonucleotide
aauuauugcuuccagauac

SEQ ID NO: 706804 - RNA, 19 nt, Artificial Sequence
  Description of Artificial Sequence: Synthetic oligonucleotide
aauaaaaggguccucgggg

SEQ ID NO: 706805 - RNA, 19 nt, Artificial Sequence
  Description of Artificial Sequence: Synthetic oligonucleotide
auacauagaaauugggugc

SEQ ID NO: 706806 - RNA, 19 nt, Artificial Sequence
  Description of Artificial Sequence: Synthetic oligonucleotide
aaagcauaaaagucuaauc

SEQ ID NO: 706807 - RNA, 19 nt, Artificial Sequence
  Description of Artificial Sequence: Synthetic oligonucleotide
uuccacacaaacuagauca

SEQ ID NO: 706808 - RNA, 19 nt, Artificial Sequence
  Description of Artificial Sequence: Synthetic oligonucleotide
uauaacuuaauuuaucauc

SEQ ID NO: 706809 - RNA, 19 nt, Artificial Sequence
  Description of Artificial Sequence: Synthetic oligonucleotide
uuuauaaggcuaaggaucc

SEQ ID NO: 706810 - RNA, 19 nt, Artificial Sequence
  Description of Artificial Sequence: Synthetic oligonucleotide
guaaaguacacucaccagg

SEQ ID NO: 706811 - RNA, 19 nt, Artificial Sequence
  Description of Artificial Sequence: Synthetic oligonucleotide
ucaucaagcaacaaccugc

SEQ ID NO: 706812 - RNA, 19 nt, Artificial Sequence
  Description of Artificial Sequence: Synthetic oligonucleotide
ucaagaagaauauaaacau

SEQ ID NO: 706813 - RNA, 19 nt, Artificial Sequence
  Description of Artificial Sequence: Synthetic oligonucleotide
aaggaauugacaccugagg

SEQ ID NO: 706814 - RNA, 19 nt, Artificial Sequence
  Description of Artificial Sequence: Synthetic oligonucleotide
uucguuuagauuuaguugu

SEQ ID NO: 706815 - RNA, 19 nt, Artificial Sequence
  Description of Artificial Sequence: Synthetic oligonucleotide
aauuacaaagucagagucc

SEQ ID NO: 706816 - RNA, 19 nt, Artificial Sequence
  Description of Artificial Sequence: Synthetic oligonucleotide
uggagucuagauuugaggg

SEQ ID NO: 706817 - RNA, 19 nt, Artificial Sequence
  Description of Artificial Sequence: Synthetic oligonucleotide
uccauuacagguuaguggc

SEQ ID NO: 706818 - RNA, 19 nt, Artificial Sequence
  Description of Artificial Sequence: Synthetic oligonucleotide
uuuuccaccccaaauaaca

SEQ ID NO: 706819 - RNA, 19 nt, Artificial Sequence
  Description of Artificial Sequence: Synthetic oligonucleotide
auaaugagaccugagaccg

SEQ ID NO: 706820 - RNA, 19 nt, Artificial Sequence
  Description of Artificial Sequence: Synthetic oligonucleotide
gagagagagagacauaugc

SEQ ID NO: 706821 - RNA, 19 nt, Artificial Sequence
  Description of Artificial Sequence: Synthetic oligonucleotide
aaccugcagaaauaaaagg

SEQ ID NO: 706822 - RNA, 19 nt, Artificial Sequence
  Description of Artificial Sequence: Synthetic oligonucleotide
accgcuauguauuuuaauc

SEQ ID NO: 706823 - RNA, 19 nt, Artificial Sequence
  Description of Artificial Sequence: Synthetic oligonucleotide
uaaaguacacucaccaggc

SEQ ID NO: 706824 - RNA, 19 nt, Artificial Sequence
  Description of Artificial Sequence: Synthetic oligonucleotide
aauguaaaacacugcuauc

SEQ ID NO: 706825 - RNA, 19 nt, Artificial Sequence
  Description of Artificial Sequence: Synthetic oligonucleotide
uaauuggccacacacacac

SEQ ID NO: 706826 - RNA, 19 nt, Artificial Sequence
  Description of Artificial Sequence: Synthetic oligonucleotide
agaaauaaaaggguccucg

SEQ ID NO: 706827 - RNA, 19 nt, Artificial Sequence
  Description of Artificial Sequence: Synthetic oligonucleotide
auuagaguuacaccucugg

SEQ ID NO: 706828 - RNA, 19 nt, Artificial Sequence
  Description of Artificial Sequence: Synthetic oligonucleotide
uaauccguuccacugagag

SEQ ID NO: 706829 - RNA, 19 nt, Artificial Sequence
  Description of Artificial Sequence: Synthetic oligonucleotide
aauaacaagaacugcuaaa

SEQ ID NO: 706830 - RNA, 19 nt, Artificial Sequence
  Description of Artificial Sequence: Synthetic oligonucleotide
auuggccacacacacacac

SEQ ID NO: 706831 - RNA, 19 nt, Artificial Sequence
  Description of Artificial Sequence: Synthetic oligonucleotide
ugggaaguuaaauaacaag

SEQ ID NO: 706832 - RNA, 19 nt, Artificial Sequence
  Description of Artificial Sequence: Synthetic oligonucleotide
agcaauguaaaacacugcu

SEQ ID NO: 706833 - RNA, 19 nt, Artificial Sequence
  Description of Artificial Sequence: Synthetic oligonucleotide
uuuaauccguuccacugag

SEQ ID NO: 706834 - RNA, 19 nt, Artificial Sequence
  Description of Artificial Sequence: Synthetic oligonucleotide
auuagcgccacuuuuauua

SEQ ID NO: 706835 - RNA, 19 nt, Artificial Sequence
  Description of Artificial Sequence: Synthetic oligonucleotide
ugaugagucacucucugga

SEQ ID NO: 706836 - RNA, 19 nt, Artificial Sequence
  Description of Artificial Sequence: Synthetic oligonucleotide
ugugauagguaaaaggcau

SEQ ID NO: 706837 - RNA, 19 nt, Artificial Sequence
  Description of Artificial Sequence: Synthetic oligonucleotide
uuuagaggguccaucaaac

SEQ ID NO: 706838 - RNA, 19 nt, Artificial Sequence
  Description of Artificial Sequence: Synthetic oligonucleotide
aacaacaugcuauaacuua

SEQ ID NO: 706839 - RNA, 19 nt, Artificial Sequence
  Description of Artificial Sequence: Synthetic oligonucleotide
cuucguuuagauuuaguug

SEQ ID NO: 706840 - RNA, 19 nt, Artificial Sequence
  Description of Artificial Sequence: Synthetic oligonucleotide
uauuaccaauccaaggccc

SEQ ID NO: 706841 - RNA, 19 nt, Artificial Sequence
  Description of Artificial Sequence: Synthetic oligonucleotide
aaggauccuauuaaccagc

SEQ ID NO: 706842 - RNA, 19 nt, Artificial Sequence
  Description of Artificial Sequence: Synthetic oligonucleotide
cacacacacacacagagag

SEQ ID NO: 706843 - RNA, 19 nt, Artificial Sequence
  Description of Artificial Sequence: Synthetic oligonucleotide
gauccuauuaaccagccaa

SEQ ID NO: 706844 - RNA, 19 nt, Artificial Sequence
  Description of Artificial Sequence: Synthetic oligonucleotide
uauggaaauccagaaauca

SEQ ID NO: 706845 - RNA, 19 nt, Artificial Sequence
  Description of Artificial Sequence: Synthetic oligonucleotide
ugacuuacuaauacugaug

SEQ ID NO: 706846 - RNA, 19 nt, Artificial Sequence
  Description of Artificial Sequence: Synthetic oligonucleotide
cuuugggguaauuagcgcc

SEQ ID NO: 706847 - RNA, 19 nt, Artificial Sequence
  Description of Artificial Sequence: Synthetic oligonucleotide
agaguuacaccucuggaca

SEQ ID NO: 706848 - RNA, 19 nt, Artificial Sequence
  Description of Artificial Sequence: Synthetic oligonucleotide
uuuuaauccguuccacuga

SEQ ID NO: 706849 - RNA, 19 nt, Artificial Sequence
  Description of Artificial Sequence: Synthetic oligonucleotide
ugucaugacuucccggugg

SEQ ID NO: 706850 - RNA, 19 nt, Artificial Sequence
  Description of Artificial Sequence: Synthetic oligonucleotide
ugucucacggcacugacgu

SEQ ID NO: 706851 - RNA, 19 nt, Artificial Sequence
  Description of Artificial Sequence: Synthetic oligonucleotide
ucaaaccuccauuacaggu

SEQ ID NO: 706852 - RNA, 19 nt, Artificial Sequence
  Description of Artificial Sequence: Synthetic oligonucleotide
agcuauuaccaauccaagg

SEQ ID NO: 706853 - RNA, 19 nt, Artificial Sequence
  Description of Artificial Sequence: Synthetic oligonucleotide
ucuaagucucuaaccagag

SEQ ID NO: 706854 - RNA, 19 nt, Artificial Sequence
  Description of Artificial Sequence: Synthetic oligonucleotide
cuuacuaauacugauguga

SEQ ID NO: 706855 - RNA, 19 nt, Artificial Sequence
  Description of Artificial Sequence: Synthetic oligonucleotide
ccaaggaucauaaugagac

SEQ ID NO: 706856 - RNA, 19 nt, Artificial Sequence
  Description of Artificial Sequence: Synthetic oligonucleotide
gcuauuaccaauccaaggc

SEQ ID NO: 706857 - RNA, 19 nt, Artificial Sequence
  Description of Artificial Sequence: Synthetic oligonucleotide
uugugauagguaaaaggca

SEQ ID NO: 706858 - RNA, 19 nt, Artificial Sequence
  Description of Artificial Sequence: Synthetic oligonucleotide
uguaaaguacacucaccag

SEQ ID NO: 706859 - RNA, 19 nt, Artificial Sequence
  Description of Artificial Sequence: Synthetic oligonucleotide
aaggcauucgcuuauuauu

SEQ ID NO: 706860 - RNA, 19 nt, Artificial Sequence
  Description of Artificial Sequence: Synthetic oligonucleotide
ugcuaaauccaaccaaaca

SEQ ID NO: 706861 - RNA, 19 nt, Artificial Sequence
  Description of Artificial Sequence: Synthetic oligonucleotide
auccguuccacugagagag

SEQ ID NO: 706862 - RNA, 19 nt, Artificial Sequence
  Description of Artificial Sequence: Synthetic oligonucleotide
cuauuaccaauccaaggcc

SEQ ID NO: 706863 - RNA, 19 nt, Artificial Sequence
  Description of Artificial Sequence: Synthetic oligonucleotide
ugacccuuagcaauuuugc

SEQ ID NO: 706864 - RNA, 19 nt, Artificial Sequence
  Description of Artificial Sequence: Synthetic oligonucleotide
caagucuaagucucuaacc

SEQ ID NO: 706865 - RNA, 19 nt, Artificial Sequence
  Description of Artificial Sequence: Synthetic oligonucleotide
aucauaaugagaccugaga

SEQ ID NO: 706866 - RNA, 19 nt, Artificial Sequence
  Description of Artificial Sequence: Synthetic oligonucleotide
cuaaccagagcuauuacca

SEQ ID NO: 706867 - RNA, 19 nt, Artificial Sequence
  Description of Artificial Sequence: Synthetic oligonucleotide
cacacagagagagagagag

SEQ ID NO: 706868 - RNA, 19 nt, Artificial Sequence
  Description of Artificial Sequence: Synthetic oligonucleotide
caaccugcagaaauaaaag

SEQ ID NO: 706869 - RNA, 19 nt, Artificial Sequence
  Description of Artificial Sequence: Synthetic oligonucleotide
uuagaguuacaccucugga

SEQ ID NO: 706870 - RNA, 19 nt, Artificial Sequence
  Description of Artificial Sequence: Synthetic oligonucleotide
cuagauuugaggguccugg

SEQ ID NO: 706871 - RNA, 19 nt, Artificial Sequence
  Description of Artificial Sequence: Synthetic oligonucleotide
cuaaggauccuauuaacca

SEQ ID NO: 706872 - RNA, 19 nt, Artificial Sequence
  Description of Artificial Sequence: Synthetic oligonucleotide
acuuugggguaauuagcgc

SEQ ID NO: 706873 - RNA, 19 nt, Artificial Sequence
  Description of Artificial Sequence: Synthetic oligonucleotide
uagaggguccaucaaaccu

SEQ ID NO: 706874 - RNA, 19 nt, Artificial Sequence
  Description of Artificial Sequence: Synthetic oligonucleotide
uagaguuacaccucuggac

SEQ ID NO: 706875 - RNA, 19 nt, Artificial Sequence
  Description of Artificial Sequence: Synthetic oligonucleotide
cacacacacacacacagag

SEQ ID NO: 706876 - RNA, 19 nt, Artificial Sequence
  Description of Artificial Sequence: Synthetic oligonucleotide
agcauaaaagucuaaucaa

SEQ ID NO: 706877 - RNA, 19 nt, Artificial Sequence
  Description of Artificial Sequence: Synthetic oligonucleotide
gaacaaccuagauaugcag

SEQ ID NO: 706878 - RNA, 19 nt, Artificial Sequence
  Description of Artificial Sequence: Synthetic oligonucleotide
cacagagagagagagagag

SEQ ID NO: 706879 - RNA, 19 nt, Artificial Sequence
  Description of Artificial Sequence: Synthetic oligonucleotide
uuagaccucagaacaaccu

SEQ ID NO: 706880 - RNA, 19 nt, Artificial Sequence
  Description of Artificial Sequence: Synthetic oligonucleotide
aaccuagauaugcagcacu

SEQ ID NO: 706881 - RNA, 19 nt, Artificial Sequence
  Description of Artificial Sequence: Synthetic oligonucleotide
cacacacacacacacacag

SEQ ID NO: 706882 - RNA, 19 nt, Artificial Sequence
  Description of Artificial Sequence: Synthetic oligonucleotide
gagaucaagaccccuugcc

SEQ ID NO: 706883 - RNA, 19 nt, Artificial Sequence
  Description of Artificial Sequence: Synthetic oligonucleotide
aacgugcuagcacagggca

SEQ ID NO: 706884 - RNA, 19 nt, Artificial Sequence
  Description of Artificial Sequence: Synthetic oligonucleotide
cacuucaccgcucugcugg

SEQ ID NO: 706885 - RNA, 19 nt, Artificial Sequence
  Description of Artificial Sequence: Synthetic oligonucleotide
caaacgugcuagcacaggg

SEQ ID NO: 706886 - RNA, 19 nt, Artificial Sequence
  Description of Artificial Sequence: Synthetic oligonucleotide
cagaacaaccuagauaugc

SEQ ID NO: 706887 - RNA, 19 nt, Artificial Sequence
  Description of Artificial Sequence: Synthetic oligonucleotide
cuggagucuagauuugagg

SEQ ID NO: 706888 - RNA, 19 nt, Artificial Sequence
  Description of Artificial Sequence: Synthetic oligonucleotide
uuacagauggcugacuuac

SEQ ID NO: 706889 - RNA, 19 nt, Artificial Sequence
  Description of Artificial Sequence: Synthetic oligonucleotide
aaacgugcuagcacagggc

SEQ ID NO: 706890 - RNA, 19 nt, Artificial Sequence
  Description of Artificial Sequence: Synthetic oligonucleotide
gauagguaaaaggcauucg

SEQ ID NO: 706891 - RNA, 19 nt, Artificial Sequence
  Description of Artificial Sequence: Synthetic oligonucleotide
agauuugaggguccugggg

SEQ ID NO: 706892 - RNA, 19 nt, Artificial Sequence
  Description of Artificial Sequence: Synthetic oligonucleotide
cagaauuagaguuacaccu

SEQ ID NO: 706893 - RNA, 19 nt, Artificial Sequence
  Description of Artificial Sequence: Synthetic oligonucleotide
ugcuauaacuuaauuuauc

SEQ ID NO: 706894 - RNA, 19 nt, Artificial Sequence
  Description of Artificial Sequence: Synthetic oligonucleotide
agauaugcagcacugggaa

SEQ ID NO: 706895 - RNA, 19 nt, Artificial Sequence
  Description of Artificial Sequence: Synthetic oligonucleotide
auaacaagaacugcuaaau

SEQ ID NO: 706896 - RNA, 19 nt, Artificial Sequence
  Description of Artificial Sequence: Synthetic oligonucleotide
cugacgugaguccagauuc

SEQ ID NO: 706897 - RNA, 19 nt, Artificial Sequence
  Description of Artificial Sequence: Synthetic oligonucleotide
cacacacacacagagagag

SEQ ID NO: 706898 - RNA, 19 nt, Artificial Sequence
  Description of Artificial Sequence: Synthetic oligonucleotide
uuauggaaauccagaaauc

SEQ ID NO: 706899 - RNA, 19 nt, Artificial Sequence
  Description of Artificial Sequence: Synthetic oligonucleotide
aagguuuagaggguccauc

SEQ ID NO: 706900 - RNA, 19 nt, Artificial Sequence
  Description of Artificial Sequence: Synthetic oligonucleotide
agcaacaaccugcagaaau

SEQ ID NO: 706901 - RNA, 19 nt, Artificial Sequence
  Description of Artificial Sequence: Synthetic oligonucleotide
ugaguccagauucuuuagc

SEQ ID NO: 706902 - RNA, 19 nt, Artificial Sequence
  Description of Artificial Sequence: Synthetic oligonucleotide
acacauacuacacauggua

SEQ ID NO: 706903 - RNA, 19 nt, Artificial Sequence
  Description of Artificial Sequence: Synthetic oligonucleotide
acaugguagaccugaaacu

SEQ ID NO: 706904 - RNA, 19 nt, Artificial Sequence
  Description of Artificial Sequence: Synthetic oligonucleotide
cacacacacacacacacac

SEQ ID NO: 706905 - RNA, 19 nt, Artificial Sequence
  Description of Artificial Sequence: Synthetic oligonucleotide
gacuuacuaauacugaugu

SEQ ID NO: 706906 - RNA, 19 nt, Artificial Sequence
  Description of Artificial Sequence: Synthetic oligonucleotide
ucugacgcagaauggaccu

SEQ ID NO: 706907 - RNA, 19 nt, Artificial Sequence
  Description of Artificial Sequence: Synthetic oligonucleotide
cagagagagagagagagac

SEQ ID NO: 706908 - RNA, 19 nt, Artificial Sequence
  Description of Artificial Sequence: Synthetic oligonucleotide
uuuuaauuuuccaccccaa

SEQ ID NO: 706909 - RNA, 19 nt, Artificial Sequence
  Description of Artificial Sequence: Synthetic oligonucleotide
ugggaugaggcacuucacc

SEQ ID NO: 706910 - RNA, 19 nt, Artificial Sequence
  Description of Artificial Sequence: Synthetic oligonucleotide
gagagaguagcugggagag

SEQ ID NO: 706911 - RNA, 19 nt, Artificial Sequence
  Description of Artificial Sequence: Synthetic oligonucleotide
auaaaaggguccucggggu

SEQ ID NO: 706912 - RNA, 19 nt, Artificial Sequence
  Description of Artificial Sequence: Synthetic oligonucleotide
aaaagacuugagcugcgaa

SEQ ID NO: 706913 - RNA, 19 nt, Artificial Sequence
  Description of Artificial Sequence: Synthetic oligonucleotide
uuaguggcaagaaggaauu

SEQ ID NO: 706914 - RNA, 19 nt, Artificial Sequence
  Description of Artificial Sequence: Synthetic oligonucleotide
augcacguggcacagauaa

SEQ ID NO: 706915 - RNA, 19 nt, Artificial Sequence
  Description of Artificial Sequence: Synthetic oligonucleotide
uuaauuggccacacacaca

SEQ ID NO: 706916 - RNA, 19 nt, Artificial Sequence
  Description of Artificial Sequence: Synthetic oligonucleotide
ggugguuuugaauuauugc

SEQ ID NO: 706917 - RNA, 19 nt, Artificial Sequence
  Description of Artificial Sequence: Synthetic oligonucleotide
agaauuagaguuacaccuc

SEQ ID NO: 706918 - RNA, 19 nt, Artificial Sequence
  Description of Artificial Sequence: Synthetic oligonucleotide
aauccaaggcccauggacu

SEQ ID NO: 706919 - RNA, 19 nt, Artificial Sequence
  Description of Artificial Sequence: Synthetic oligonucleotide
aaugagaccugagaccgcu

SEQ ID NO: 706920 - RNA, 19 nt, Artificial Sequence
  Description of Artificial Sequence: Synthetic oligonucleotide
uagauuugaggguccuggg

SEQ ID NO: 706921 - RNA, 19 nt, Artificial Sequence
  Description of Artificial Sequence: Synthetic oligonucleotide
agauuuaguugugauaggu

SEQ ID NO: 706922 - RNA, 19 nt, Artificial Sequence
  Description of Artificial Sequence: Synthetic oligonucleotide
aauugggugcaaauacaag

SEQ ID NO: 706923 - RNA, 19 nt, Artificial Sequence
  Description of Artificial Sequence: Synthetic oligonucleotide
cacacacagagagagagag

SEQ ID NO: 706924 - RNA, 19 nt, Artificial Sequence
  Description of Artificial Sequence: Synthetic oligonucleotide
uauuagaccucagaacaac

SEQ ID NO: 706925 - RNA, 19 nt, Artificial Sequence
  Description of Artificial Sequence: Synthetic oligonucleotide
aaacacugaacuugaucau

SEQ ID NO: 706926 - RNA, 19 nt, Artificial Sequence
  Description of Artificial Sequence: Synthetic oligonucleotide
uuagaggguccaucaaacc

SEQ ID NO: 706927 - RNA, 19 nt, Artificial Sequence
  Description of Artificial Sequence: Synthetic oligonucleotide
uguaaaacacugcuaucuu

SEQ ID NO: 706928 - RNA, 19 nt, Artificial Sequence
  Description of Artificial Sequence: Synthetic oligonucleotide
auacuacacaugguagacc

SEQ ID NO: 706929 - RNA, 19 nt, Artificial Sequence
  Description of Artificial Sequence: Synthetic oligonucleotide
gaucaagaccccuugccca

SEQ ID NO: 706930 - RNA, 19 nt, Artificial Sequence
  Description of Artificial Sequence: Synthetic oligonucleotide
cucuuuauggaaauccaga

SEQ ID NO: 706931 - RNA, 19 nt, Artificial Sequence
  Description of Artificial Sequence: Synthetic oligonucleotide
uaauuagcgccacuuuuau

SEQ ID NO: 706932 - RNA, 19 nt, Artificial Sequence
  Description of Artificial Sequence: Synthetic oligonucleotide
ggguaagaccauuaauugg

SEQ ID NO: 706933 - RNA, 19 nt, Artificial Sequence
  Description of Artificial Sequence: Synthetic oligonucleotide
acaaucaaacaacaugcua

SEQ ID NO: 706934 - RNA, 19 nt, Artificial Sequence
  Description of Artificial Sequence: Synthetic oligonucleotide
cauacuacacaugguagac

SEQ ID NO: 706935 - RNA, 19 nt, Artificial Sequence
  Description of Artificial Sequence: Synthetic oligonucleotide
aauccguuccacugagaga

SEQ ID NO: 706936 - RNA, 19 nt, Artificial Sequence
  Description of Artificial Sequence: Synthetic oligonucleotide
ucuucguagaagcucugau

SEQ ID NO: 706937 - RNA, 19 nt, Artificial Sequence
  Description of Artificial Sequence: Synthetic oligonucleotide
auaugcagcacugggaagu

SEQ ID NO: 706938 - RNA, 19 nt, Artificial Sequence
  Description of Artificial Sequence: Synthetic oligonucleotide
ucccuuagaugugacaccc

SEQ ID NO: 706939 - RNA, 19 nt, Artificial Sequence
  Description of Artificial Sequence: Synthetic oligonucleotide
gauagcaggggagucuugc

SEQ ID NO: 706940 - RNA, 19 nt, Artificial Sequence
  Description of Artificial Sequence: Synthetic oligonucleotide
uggccacacacacacacac

SEQ ID NO: 706941 - RNA, 19 nt, Artificial Sequence
  Description of Artificial Sequence: Synthetic oligonucleotide
ccuauuuacacauacuaca

SEQ ID NO: 706942 - RNA, 19 nt, Artificial Sequence
  Description of Artificial Sequence: Synthetic oligonucleotide
uuagcucucucaacaauuu

SEQ ID NO: 706943 - RNA, 19 nt, Artificial Sequence
  Description of Artificial Sequence: Synthetic oligonucleotide
ugaugcacguggcacagau

SEQ ID NO: 706944 - RNA, 19 nt, Artificial Sequence
  Description of Artificial Sequence: Synthetic oligonucleotide
ccauuaauuggccacacac

SEQ ID NO: 706945 - RNA, 19 nt, Artificial Sequence
  Description of Artificial Sequence: Synthetic oligonucleotide
cucugacgcagaauggacc

SEQ ID NO: 706946 - RNA, 19 nt, Artificial Sequence
  Description of Artificial Sequence: Synthetic oligonucleotide
agguaaaaggcauucgcuu

SEQ ID NO: 706947 - RNA, 19 nt, Artificial Sequence
  Description of Artificial Sequence: Synthetic oligonucleotide
guagaccugaaacuaagaa

SEQ ID NO: 706948 - RNA, 19 nt, Artificial Sequence
  Description of Artificial Sequence: Synthetic oligonucleotide
ucguuuagauuuaguugug

SEQ ID NO: 706949 - RNA, 19 nt, Artificial Sequence
  Description of Artificial Sequence: Synthetic oligonucleotide
cauuaauuggccacacaca

SEQ ID NO: 706950 - RNA, 19 nt, Artificial Sequence
  Description of Artificial Sequence: Synthetic oligonucleotide
gaucauaaugagaccugag

SEQ ID NO: 706951 - RNA, 19 nt, Artificial Sequence
  Description of Artificial Sequence: Synthetic oligonucleotide
ucucaagagcugaaaacuu

SEQ ID NO: 706952 - RNA, 19 nt, Artificial Sequence
  Description of Artificial Sequence: Synthetic oligonucleotide
ucucacggcacugacguga

SEQ ID NO: 706953 - RNA, 19 nt, Artificial Sequence
  Description of Artificial Sequence: Synthetic oligonucleotide
ucucuaaccagagcuauua

SEQ ID NO: 706954 - RNA, 19 nt, Artificial Sequence
  Description of Artificial Sequence: Synthetic oligonucleotide
gaacugcuaaauccaacca

SEQ ID NO: 706955 - RNA, 19 nt, Artificial Sequence
  Description of Artificial Sequence: Synthetic oligonucleotide
aaaaggcauucgcuuauua

SEQ ID NO: 706956 - RNA, 19 nt, Artificial Sequence
  Description of Artificial Sequence: Synthetic oligonucleotide
aguaggugugggguaacac

SEQ ID NO: 706957 - RNA, 19 nt, Artificial Sequence
  Description of Artificial Sequence: Synthetic oligonucleotide
acuuacuaauacugaugug

SEQ ID NO: 706958 - RNA, 19 nt, Artificial Sequence
  Description of Artificial Sequence: Synthetic oligonucleotide
ugucacccggggaaugggg

SEQ ID NO: 706959 - RNA, 19 nt, Artificial Sequence
  Description of Artificial Sequence: Synthetic oligonucleotide
uugcuuacaguguguguca

SEQ ID NO: 706960 - RNA, 19 nt, Artificial Sequence
  Description of Artificial Sequence: Synthetic oligonucleotide
agagggagaaaagacuuga

SEQ ID NO: 706961 - RNA, 19 nt, Artificial Sequence
  Description of Artificial Sequence: Synthetic oligonucleotide
uucccuuagaugugacacc

SEQ ID NO: 706962 - RNA, 19 nt, Artificial Sequence
  Description of Artificial Sequence: Synthetic oligonucleotide
aacuuggcugcugaagaca

SEQ ID NO: 706963 - RNA, 19 nt, Artificial Sequence
  Description of Artificial Sequence: Synthetic oligonucleotide
acugaacuugaucauuuua

SEQ ID NO: 706964 - RNA, 19 nt, Artificial Sequence
  Description of Artificial Sequence: Synthetic oligonucleotide
ucuaaucaagaagaauaua

SEQ ID NO: 706965 - RNA, 19 nt, Artificial Sequence
  Description of Artificial Sequence: Synthetic oligonucleotide
agaccucagaacaaccuag

SEQ ID NO: 706966 - RNA, 19 nt, Artificial Sequence
  Description of Artificial Sequence: Synthetic oligonucleotide
aggcacuucaccgcucugc

SEQ ID NO: 706967 - RNA, 19 nt, Artificial Sequence
  Description of Artificial Sequence: Synthetic oligonucleotide
guuuagaggguccaucaaa

SEQ ID NO: 706968 - RNA, 19 nt, Artificial Sequence
  Description of Artificial Sequence: Synthetic oligonucleotide
uccacacaaacuagaucac

SEQ ID NO: 706969 - RNA, 19 nt, Artificial Sequence
  Description of Artificial Sequence: Synthetic oligonucleotide
ugaggcacuucaccgcucu

SEQ ID NO: 706970 - RNA, 19 nt, Artificial Sequence
  Description of Artificial Sequence: Synthetic oligonucleotide
ccgcuauguauuuuaaucc

SEQ ID NO: 706971 - RNA, 19 nt, Artificial Sequence
  Description of Artificial Sequence: Synthetic oligonucleotide
aggauccuauuaaccagcc

SEQ ID NO: 706972 - RNA, 19 nt, Artificial Sequence
  Description of Artificial Sequence: Synthetic oligonucleotide
uuagcgccacuuuuauuac

SEQ ID NO: 706973 - RNA, 19 nt, Artificial Sequence
  Description of Artificial Sequence: Synthetic oligonucleotide
uccuguaugcucugacgca

SEQ ID NO: 706974 - RNA, 19 nt, Artificial Sequence
  Description of Artificial Sequence: Synthetic oligonucleotide
aggcuaaggauccuauuaa

SEQ ID NO: 706975 - RNA, 19 nt, Artificial Sequence
  Description of Artificial Sequence: Synthetic oligonucleotide
gacaggauuugcauggcuc

SEQ ID NO: 706976 - RNA, 19 nt, Artificial Sequence
  Description of Artificial Sequence: Synthetic oligonucleotide
gcacauaagacacacugga

SEQ ID NO: 706977 - RNA, 19 nt, Artificial Sequence
  Description of Artificial Sequence: Synthetic oligonucleotide
agcgccacuuuuauuacag

SEQ ID NO: 706978 - RNA, 19 nt, Artificial Sequence
  Description of Artificial Sequence: Synthetic oligonucleotide
uauaaggcuaaggauccua

SEQ ID NO: 706979 - RNA, 19 nt, Artificial Sequence
  Description of Artificial Sequence: Synthetic oligonucleotide
agcaugcugagaaguaagg

SEQ ID NO: 706980 - RNA, 19 nt, Artificial Sequence
  Description of Artificial Sequence: Synthetic oligonucleotide
cugcuaaauccaaccaaac

SEQ ID NO: 706981 - RNA, 19 nt, Artificial Sequence
  Description of Artificial Sequence: Synthetic oligonucleotide
cacguggcacagauaaggc

SEQ ID NO: 706982 - RNA, 19 nt, Artificial Sequence
  Description of Artificial Sequence: Synthetic oligonucleotide
aauuagcgccacuuuuauu

SEQ ID NO: 706983 - RNA, 19 nt, Artificial Sequence
  Description of Artificial Sequence: Synthetic oligonucleotide
uguaugcucugacgcagaa

SEQ ID NO: 706984 - RNA, 19 nt, Artificial Sequence
  Description of Artificial Sequence: Synthetic oligonucleotide
guaagaccauuaauuggcc

SEQ ID NO: 706985 - RNA, 19 nt, Artificial Sequence
  Description of Artificial Sequence: Synthetic oligonucleotide
uggcugacuuacuaauacu

SEQ ID NO: 706986 - RNA, 19 nt, Artificial Sequence
  Description of Artificial Sequence: Synthetic oligonucleotide
gcuaaggauccuauuaacc

SEQ ID NO: 706987 - RNA, 19 nt, Artificial Sequence
  Description of Artificial Sequence: Synthetic oligonucleotide
agagaccacaaaacaauca

SEQ ID NO: 706988 - RNA, 19 nt, Artificial Sequence
  Description of Artificial Sequence: Synthetic oligonucleotide
auuacagauggcugacuua

SEQ ID NO: 706989 - RNA, 19 nt, Artificial Sequence
  Description of Artificial Sequence: Synthetic oligonucleotide
gaucacuucugaacuuggc

SEQ ID NO: 706990 - RNA, 19 nt, Artificial Sequence
  Description of Artificial Sequence: Synthetic oligonucleotide
ugggguaacacagcugcac

SEQ ID NO: 706991 - RNA, 19 nt, Artificial Sequence
  Description of Artificial Sequence: Synthetic oligonucleotide
gagagagagagagagacau

SEQ ID NO: 706992 - RNA, 19 nt, Artificial Sequence
  Description of Artificial Sequence: Synthetic oligonucleotide
acugacgugaguccagauu

SEQ ID NO: 706993 - RNA, 19 nt, Artificial Sequence
  Description of Artificial Sequence: Synthetic oligonucleotide
uuggccacacacacacaca

SEQ ID NO: 706994 - RNA, 19 nt, Artificial Sequence
  Description of Artificial Sequence: Synthetic oligonucleotide
uaaugagaccugagaccgc

SEQ ID NO: 706995 - RNA, 19 nt, Artificial Sequence
  Description of Artificial Sequence: Synthetic oligonucleotide
agucagaguccauucccca

SEQ ID NO: 706996 - RNA, 19 nt, Artificial Sequence
  Description of Artificial Sequence: Synthetic oligonucleotide
gagaccgcuauguauuuua

SEQ ID NO: 706997 - RNA, 19 nt, Artificial Sequence
  Description of Artificial Sequence: Synthetic oligonucleotide
caccccaaauaacaagaac

SEQ ID NO: 706998 - RNA, 19 nt, Artificial Sequence
  Description of Artificial Sequence: Synthetic oligonucleotide
gugacccuuagcaauuuug

SEQ ID NO: 706999 - RNA, 19 nt, Artificial Sequence
  Description of Artificial Sequence: Synthetic oligonucleotide
cgcuauguauuuuaauccg

SEQ ID NO: 707000 - RNA, 19 nt, Artificial Sequence
  Description of Artificial Sequence: Synthetic oligonucleotide
guguggucuccuuuauaag

SEQ ID NO: 707001 - RNA, 19 nt, Artificial Sequence
  Description of Artificial Sequence: Synthetic oligonucleotide
ggcugacuuacuaauacug

SEQ ID NO: 707002 - RNA, 19 nt, Artificial Sequence
  Description of Artificial Sequence: Synthetic oligonucleotide
uuaauccguuccacugaga

SEQ ID NO: 707003 - RNA, 19 nt, Artificial Sequence
  Description of Artificial Sequence: Synthetic oligonucleotide
caucaagcaacaaccugca

SEQ ID NO: 707004 - RNA, 19 nt, Artificial Sequence
  Description of Artificial Sequence: Synthetic oligonucleotide
gucuaagucucuaaccaga

SEQ ID NO: 707005 - RNA, 19 nt, Artificial Sequence
  Description of Artificial Sequence: Synthetic oligonucleotide
gagagagagagagacauau

SEQ ID NO: 707006 - RNA, 19 nt, Artificial Sequence
  Description of Artificial Sequence: Synthetic oligonucleotide
uuccagauacagagcucgc

SEQ ID NO: 707007 - RNA, 19 nt, Artificial Sequence
  Description of Artificial Sequence: Synthetic oligonucleotide
ugacgugaguccagauucu

SEQ ID NO: 707008 - RNA, 19 nt, Artificial Sequence
  Description of Artificial Sequence: Synthetic oligonucleotide
accugagaccgcuauguau

SEQ ID NO: 707009 - RNA, 19 nt, Artificial Sequence
  Description of Artificial Sequence: Synthetic oligonucleotide
acguggcacagauaaggcu

SEQ ID NO: 707010 - RNA, 19 nt, Artificial Sequence
  Description of Artificial Sequence: Synthetic oligonucleotide
gccacacacacacacacac

SEQ ID NO: 707011 - RNA, 19 nt, Artificial Sequence
  Description of Artificial Sequence: Synthetic oligonucleotide
cauugaugcacguggcaca

SEQ ID NO: 707012 - RNA, 19 nt, Artificial Sequence
  Description of Artificial Sequence: Synthetic oligonucleotide
guuuagauuuaguugugau

SEQ ID NO: 707013 - RNA, 19 nt, Artificial Sequence
  Description of Artificial Sequence: Synthetic oligonucleotide
caguucaucccacgacggg

SEQ ID NO: 707014 - RNA, 19 nt, Artificial Sequence
  Description of Artificial Sequence: Synthetic oligonucleotide
ugcacguggcacagauaag

SEQ ID NO: 707015 - RNA, 19 nt, Artificial Sequence
  Description of Artificial Sequence: Synthetic oligonucleotide
gcucucaagagcugaaaac

SEQ ID NO: 707016 - RNA, 19 nt, Artificial Sequence
  Description of Artificial Sequence: Synthetic oligonucleotide
uccagauacagagcucgcu

SEQ ID NO: 707017 - RNA, 19 nt, Artificial Sequence
  Description of Artificial Sequence: Synthetic oligonucleotide
auuaccaauccaaggccca

SEQ ID NO: 707018 - RNA, 19 nt, Artificial Sequence
  Description of Artificial Sequence: Synthetic oligonucleotide
uuauuacagauggcugacu

SEQ ID NO: 707019 - RNA, 19 nt, Artificial Sequence
  Description of Artificial Sequence: Synthetic oligonucleotide
augucaugacuucccggug

SEQ ID NO: 707020 - RNA, 19 nt, Artificial Sequence
  Description of Artificial Sequence: Synthetic oligonucleotide
guaauuagcgccacuuuua

SEQ ID NO: 707021 - RNA, 19 nt, Artificial Sequence
  Description of Artificial Sequence: Synthetic oligonucleotide
guuaguggcaagaaggaau

SEQ ID NO: 707022 - RNA, 19 nt, Artificial Sequence
  Description of Artificial Sequence: Synthetic oligonucleotide
ggaugaggcacuucaccgc

SEQ ID NO: 707023 - RNA, 19 nt, Artificial Sequence
  Description of Artificial Sequence: Synthetic oligonucleotide
guuacaccucuggacauac

SEQ ID NO: 707024 - RNA, 19 nt, Artificial Sequence
  Description of Artificial Sequence: Synthetic oligonucleotide
gaccccuugcccaaggauc

SEQ ID NO: 707025 - RNA, 19 nt, Artificial Sequence
  Description of Artificial Sequence: Synthetic oligonucleotide
auuauugcuuccagauaca

SEQ ID NO: 707026 - RNA, 19 nt, Artificial Sequence
  Description of Artificial Sequence: Synthetic oligonucleotide
accuagauaugcagcacug

SEQ ID NO: 707027 - RNA, 19 nt, Artificial Sequence
  Description of Artificial Sequence: Synthetic oligonucleotide
auacaaggaguuucccuua

SEQ ID NO: 707028 - RNA, 19 nt, Artificial Sequence
  Description of Artificial Sequence: Synthetic oligonucleotide
cguagaagcucugauagag

SEQ ID NO: 707029 - RNA, 19 nt, Artificial Sequence
  Description of Artificial Sequence: Synthetic oligonucleotide
agagagacauaugcagaca

SEQ ID NO: 707030 - RNA, 19 nt, Artificial Sequence
  Description of Artificial Sequence: Synthetic oligonucleotide
uacagauggcugacuuacu

SEQ ID NO: 707031 - RNA, 19 nt, Artificial Sequence
  Description of Artificial Sequence: Synthetic oligonucleotide
gguaaaaggcauucgcuua

SEQ ID NO: 707032 - RNA, 19 nt, Artificial Sequence
  Description of Artificial Sequence: Synthetic oligonucleotide
caugguagaccugaaacua

SEQ ID NO: 707033 - RNA, 19 nt, Artificial Sequence
  Description of Artificial Sequence: Synthetic oligonucleotide
agagcucgcucuucguaga

SEQ ID NO: 707034 - RNA, 19 nt, Artificial Sequence
  Description of Artificial Sequence: Synthetic oligonucleotide
uucaccgcucugcuggcau

SEQ ID NO: 707035 - RNA, 19 nt, Artificial Sequence
  Description of Artificial Sequence: Synthetic oligonucleotide
uaaggcuaaggauccuauu

SEQ ID NO: 707036 - RNA, 19 nt, Artificial Sequence
  Description of Artificial Sequence: Synthetic oligonucleotide
uacacaugguagaccugaa

SEQ ID NO: 707037 - RNA, 19 nt, Artificial Sequence
  Description of Artificial Sequence: Synthetic oligonucleotide
cuucguagaagcucugaua

SEQ ID NO: 707038 - RNA, 19 nt, Artificial Sequence
  Description of Artificial Sequence: Synthetic oligonucleotide
gaaaagacuugagcugcga

SEQ ID NO: 707039 - RNA, 19 nt, Artificial Sequence
  Description of Artificial Sequence: Synthetic oligonucleotide
ggcuaaggauccuauuaac

SEQ ID NO: 707040 - RNA, 19 nt, Artificial Sequence
  Description of Artificial Sequence: Synthetic oligonucleotide
accucagaacaaccuagau

SEQ ID NO: 707041 - RNA, 19 nt, Artificial Sequence
  Description of Artificial Sequence: Synthetic oligonucleotide
acacaugguagaccugaaa

SEQ ID NO: 707042 - RNA, 19 nt, Artificial Sequence
  Description of Artificial Sequence: Synthetic oligonucleotide
uuauaaggcuaaggauccu

SEQ ID NO: 707043 - RNA, 19 nt, Artificial Sequence
  Description of Artificial Sequence: Synthetic oligonucleotide
auaaggcuaaggauccuau

SEQ ID NO: 707044 - RNA, 19 nt, Artificial Sequence
  Description of Artificial Sequence: Synthetic oligonucleotide
cuuacagugugugucauau

SEQ ID NO: 707045 - RNA, 19 nt, Artificial Sequence
  Description of Artificial Sequence: Synthetic oligonucleotide
ucgcucuucguagaagcuc

SEQ ID NO: 707046 - RNA, 19 nt, Artificial Sequence
  Description of Artificial Sequence: Synthetic oligonucleotide
uuacaaagucagaguccau

SEQ ID NO: 707047 - RNA, 19 nt, Artificial Sequence
  Description of Artificial Sequence: Synthetic oligonucleotide
agauacagacacagccuug

SEQ ID NO: 707048 - RNA, 19 nt, Artificial Sequence
  Description of Artificial Sequence: Synthetic oligonucleotide
gacccuuagcaauuuugcu

SEQ ID NO: 707049 - RNA, 19 nt, Artificial Sequence
  Description of Artificial Sequence: Synthetic oligonucleotide
agagagagagagacauaug

SEQ ID NO: 707050 - RNA, 19 nt, Artificial Sequence
  Description of Artificial Sequence: Synthetic oligonucleotide
guagcugggagagggagaa

SEQ ID NO: 707051 - RNA, 19 nt, Artificial Sequence
  Description of Artificial Sequence: Synthetic oligonucleotide
caaccuagauaugcagcac

SEQ ID NO: 707052 - RNA, 19 nt, Artificial Sequence
  Description of Artificial Sequence: Synthetic oligonucleotide
aggauuugcauggcucacu

SEQ ID NO: 707053 - RNA, 19 nt, Artificial Sequence
  Description of Artificial Sequence: Synthetic oligonucleotide
gugucucacggcacugacg

SEQ ID NO: 707054 - RNA, 19 nt, Artificial Sequence
  Description of Artificial Sequence: Synthetic oligonucleotide
ccagauacagagcucgcuc

SEQ ID NO: 707055 - RNA, 19 nt, Artificial Sequence
  Description of Artificial Sequence: Synthetic oligonucleotide
gcauugaugcacguggcac

SEQ ID NO: 707056 - RNA, 19 nt, Artificial Sequence
  Description of Artificial Sequence: Synthetic oligonucleotide
gucuaaucaagaagaauau

SEQ ID NO: 707057 - RNA, 19 nt, Artificial Sequence
  Description of Artificial Sequence: Synthetic oligonucleotide
gaccucagaacaaccuaga

SEQ ID NO: 707058 - RNA, 19 nt, Artificial Sequence
  Description of Artificial Sequence: Synthetic oligonucleotide
auccuauuaaccagccaau

SEQ ID NO: 707059 - RNA, 19 nt, Artificial Sequence
  Description of Artificial Sequence: Synthetic oligonucleotide
accuccauuacagguuagu

SEQ ID NO: 707060 - RNA, 19 nt, Artificial Sequence
  Description of Artificial Sequence: Synthetic oligonucleotide
cacacaaacuagaucacuu

SEQ ID NO: 707061 - RNA, 19 nt, Artificial Sequence
  Description of Artificial Sequence: Synthetic oligonucleotide
gcuucguuuagauuuaguu

SEQ ID NO: 707062 - RNA, 19 nt, Artificial Sequence
  Description of Artificial Sequence: Synthetic oligonucleotide
caguuucccucuuuaugga

SEQ ID NO: 707063 - RNA, 19 nt, Artificial Sequence
  Description of Artificial Sequence: Synthetic oligonucleotide
gcccaaggaucauaaugag

SEQ ID NO: 707064 - RNA, 19 nt, Artificial Sequence
  Description of Artificial Sequence: Synthetic oligonucleotide
agagagagagagagagaca

SEQ ID NO: 707065 - RNA, 19 nt, Artificial Sequence
  Description of Artificial Sequence: Synthetic oligonucleotide
caaggaguuucccuuagau

SEQ ID NO: 707066 - RNA, 19 nt, Artificial Sequence
  Description of Artificial Sequence: Synthetic oligonucleotide
aggggagucuugccugugu

SEQ ID NO: 707067 - RNA, 19 nt, Artificial Sequence
  Description of Artificial Sequence: Synthetic oligonucleotide
ccaucaaaccuccauuaca

SEQ ID NO: 707068 - RNA, 19 nt, Artificial Sequence
  Description of Artificial Sequence: Synthetic oligonucleotide
aauuggccacacacacaca

SEQ ID NO: 707069 - RNA, 19 nt, Artificial Sequence
  Description of Artificial Sequence: Synthetic oligonucleotide
auaucacacuuugggguaa

SEQ ID NO: 707070 - RNA, 19 nt, Artificial Sequence
  Description of Artificial Sequence: Synthetic oligonucleotide
acacacacacacacagaga

SEQ ID NO: 707071 - RNA, 19 nt, Artificial Sequence
  Description of Artificial Sequence: Synthetic oligonucleotide
acagagagagagagagaga

SEQ ID NO: 707072 - RNA, 19 nt, Artificial Sequence
  Description of Artificial Sequence: Synthetic oligonucleotide
agugacccuuagcaauuuu

SEQ ID NO: 707073 - RNA, 19 nt, Artificial Sequence
  Description of Artificial Sequence: Synthetic oligonucleotide
cagauacagagcucgcucu

SEQ ID NO: 707074 - RNA, 19 nt, Artificial Sequence
  Description of Artificial Sequence: Synthetic oligonucleotide
auguuugcuuacagugugu

SEQ ID NO: 707075 - RNA, 19 nt, Artificial Sequence
  Description of Artificial Sequence: Synthetic oligonucleotide
cugucacccggggaauggg

SEQ ID NO: 707076 - RNA, 19 nt, Artificial Sequence
  Description of Artificial Sequence: Synthetic oligonucleotide
ggagucuagauuugagggu

SEQ ID NO: 707077 - RNA, 19 nt, Artificial Sequence
  Description of Artificial Sequence: Synthetic oligonucleotide
acuacacaugguagaccug

SEQ ID NO: 707078 - RNA, 19 nt, Artificial Sequence
  Description of Artificial Sequence: Synthetic oligonucleotide
ggcucucaagagcugaaaa

SEQ ID NO: 707079 - RNA, 19 nt, Artificial Sequence
  Description of Artificial Sequence: Synthetic oligonucleotide
acacacacacacacacaca

SEQ ID NO: 707080 - RNA, 19 nt, Artificial Sequence
  Description of Artificial Sequence: Synthetic oligonucleotide
ugcuuacagugugugucau

SEQ ID NO: 707081 - RNA, 19 nt, Artificial Sequence
  Description of Artificial Sequence: Synthetic oligonucleotide
gcaaacgugcuagcacagg

SEQ ID NO: 707082 - RNA, 19 nt, Artificial Sequence
  Description of Artificial Sequence: Synthetic oligonucleotide
acacacacacacagagaga

SEQ ID NO: 707083 - RNA, 19 nt, Artificial Sequence
  Description of Artificial Sequence: Synthetic oligonucleotide
ugcugucacccggggaaug

SEQ ID NO: 707084 - RNA, 19 nt, Artificial Sequence
  Description of Artificial Sequence: Synthetic oligonucleotide
uggggauagcaggggaguc

SEQ ID NO: 707085 - RNA, 19 nt, Artificial Sequence
  Description of Artificial Sequence: Synthetic oligonucleotide
acacacacacacacacaga

SEQ ID NO: 707086 - RNA, 19 nt, Artificial Sequence
  Description of Artificial Sequence: Synthetic oligonucleotide
gcugucacccggggaaugg

SEQ ID NO: 707087 - RNA, 19 nt, Artificial Sequence
  Description of Artificial Sequence: Synthetic oligonucleotide
ccccuauuuacacauacua

SEQ ID NO: 707088 - RNA, 19 nt, Artificial Sequence
  Description of Artificial Sequence: Synthetic oligonucleotide
cacucaccaggcuaaauuu

SEQ ID NO: 707089 - RNA, 19 nt, Artificial Sequence
  Description of Artificial Sequence: Synthetic oligonucleotide
cagaauggaccucaaugau

SEQ ID NO: 707090 - RNA, 19 nt, Artificial Sequence
  Description of Artificial Sequence: Synthetic oligonucleotide
agccaauuacaaagucaga

SEQ ID NO: 707091 - RNA, 19 nt, Artificial Sequence
  Description of Artificial Sequence: Synthetic oligonucleotide
gugugggguaacacagcug

SEQ ID NO: 707092 - RNA, 19 nt, Artificial Sequence
  Description of Artificial Sequence: Synthetic oligonucleotide
ggaaugggguggguaagac

SEQ ID NO: 707093 - RNA, 19 nt, Artificial Sequence
  Description of Artificial Sequence: Synthetic oligonucleotide
gguuuagaggguccaucaa

SEQ ID NO: 707094 - RNA, 19 nt, Artificial Sequence
  Description of Artificial Sequence: Synthetic oligonucleotide
ugagaccgcuauguauuuu

SEQ ID NO: 707095 - RNA, 19 nt, Artificial Sequence
  Description of Artificial Sequence: Synthetic oligonucleotide
caacaugcuauaacuuaau

SEQ ID NO: 707096 - RNA, 19 nt, Artificial Sequence
  Description of Artificial Sequence: Synthetic oligonucleotide
acacacagagagagagaga

SEQ ID NO: 707097 - RNA, 19 nt, Artificial Sequence
  Description of Artificial Sequence: Synthetic oligonucleotide
acacagagagagagagaga

SEQ ID NO: 707098 - RNA, 19 nt, Artificial Sequence
  Description of Artificial Sequence: Synthetic oligonucleotide
uggcucacuggagcugugu

SEQ ID NO: 707099 - RNA, 19 nt, Artificial Sequence
  Description of Artificial Sequence: Synthetic oligonucleotide
acgcagaauggaccucaau

SEQ ID NO: 707100 - RNA, 19 nt, Artificial Sequence
  Description of Artificial Sequence: Synthetic oligonucleotide
gaccgcuauguauuuuaau

SEQ ID NO: 707101 - RNA, 19 nt, Artificial Sequence
  Description of Artificial Sequence: Synthetic oligonucleotide
cuggcgagggcugcccuug

SEQ ID NO: 707102 - RNA, 19 nt, Artificial Sequence
  Description of Artificial Sequence: Synthetic oligonucleotide
gugaccuucacugcagaau

SEQ ID NO: 707103 - RNA, 19 nt, Artificial Sequence
  Description of Artificial Sequence: Synthetic oligonucleotide
gguuccacuggcgagggcu

SEQ ID NO: 707104 - RNA, 19 nt, Artificial Sequence
  Description of Artificial Sequence: Synthetic oligonucleotide
agaccgcuauguauuuuaa

SEQ ID NO: 707105 - RNA, 19 nt, Artificial Sequence
  Description of Artificial Sequence: Synthetic oligonucleotide
gcuggcauugaugcacgug

SEQ ID NO: 707106 - RNA, 19 nt, Artificial Sequence
  Description of Artificial Sequence: Synthetic oligonucleotide
gaccugagaccgcuaugua

SEQ ID NO: 707107 - RNA, 19 nt, Artificial Sequence
  Description of Artificial Sequence: Synthetic oligonucleotide
uugaugcacguggcacaga

SEQ ID NO: 707108 - RNA, 19 nt, Artificial Sequence
  Description of Artificial Sequence: Synthetic oligonucleotide
gcucugacgcagaauggac

SEQ ID NO: 707109 - RNA, 19 nt, Artificial Sequence
  Description of Artificial Sequence: Synthetic oligonucleotide
ggggagucuugccuguguc

SEQ ID NO: 707110 - RNA, 19 nt, Artificial Sequence
  Description of Artificial Sequence: Synthetic oligonucleotide
cuagaucacuucugaacuu

SEQ ID NO: 707111 - RNA, 19 nt, Artificial Sequence
  Description of Artificial Sequence: Synthetic oligonucleotide
gagcucgcucuucguagaa

SEQ ID NO: 707112 - RNA, 19 nt, Artificial Sequence
  Description of Artificial Sequence: Synthetic oligonucleotide
cguuccacugagagaguag

SEQ ID NO: 707113 - RNA, 19 nt, Artificial Sequence
  Description of Artificial Sequence: Synthetic oligonucleotide
ggcacugacgugaguccag

SEQ ID NO: 707114 - RNA, 19 nt, Artificial Sequence
  Description of Artificial Sequence: Synthetic oligonucleotide
acuggcgagggcugcccuu

SEQ ID NO: 707115 - RNA, 19 nt, Artificial Sequence
  Description of Artificial Sequence: Synthetic oligonucleotide
ucacggcacugacgugagu

SEQ ID NO: 707116 - RNA, 19 nt, Artificial Sequence
  Description of Artificial Sequence: Synthetic oligonucleotide
agagagagagagagacaua

SEQ ID NO: 707117 - RNA, 19 nt, Artificial Sequence
  Description of Artificial Sequence: Synthetic oligonucleotide
acgugaguccagauucuuu

SEQ ID NO: 707118 - RNA, 19 nt, Artificial Sequence
  Description of Artificial Sequence: Synthetic oligonucleotide
ggguggguaagaccauuaa

SEQ ID NO: 707119 - RNA, 19 nt, Artificial Sequence
  Description of Artificial Sequence: Synthetic oligonucleotide
ccugagaccgcuauguauu

SEQ ID NO: 707120 - RNA, 19 nt, Artificial Sequence
  Description of Artificial Sequence: Synthetic oligonucleotide
cucgcucuucguagaagcu

SEQ ID NO: 707121 - RNA, 19 nt, Artificial Sequence
  Description of Artificial Sequence: Synthetic oligonucleotide
cauacucaucuuccuguau

SEQ ID NO: 707122 - RNA, 19 nt, Artificial Sequence
  Description of Artificial Sequence: Synthetic oligonucleotide
cuucccggugguuuugaau

SEQ ID NO: 707123 - RNA, 19 nt, Artificial Sequence
  Description of Artificial Sequence: Synthetic oligonucleotide
cauggcucacuggagcugu

SEQ ID NO: 707124 - RNA, 19 nt, Artificial Sequence
  Description of Artificial Sequence: Synthetic oligonucleotide
ggcacuucaccgcucugcu

SEQ ID NO: 707125 - RNA, 19 nt, Artificial Sequence
  Description of Artificial Sequence: Synthetic oligonucleotide
gaugcacguggcacagaua

SEQ ID NO: 707126 - RNA, 19 nt, Artificial Sequence
  Description of Artificial Sequence: Synthetic oligonucleotide
gcacuucaccgcucugcug

SEQ ID NO: 707127 - RNA, 19 nt, Artificial Sequence
  Description of Artificial Sequence: Synthetic oligonucleotide
cuguguggucuccuuuaua

SEQ ID NO: 707128 - RNA, 19 nt, Artificial Sequence
  Description of Artificial Sequence: Synthetic oligonucleotide
caguaggugugggguaaca

SEQ ID NO: 707129 - RNA, 19 nt, Artificial Sequence
  Description of Artificial Sequence: Synthetic oligonucleotide
gacgcagaauggaccucaa

SEQ ID NO: 707130 - RNA, 19 nt, Artificial Sequence
  Description of Artificial Sequence: Synthetic oligonucleotide
ggguaacacagcugcacau

SEQ ID NO: 707131 - RNA, 19 nt, Artificial Sequence
  Description of Artificial Sequence: Synthetic oligonucleotide
ccacacacacacacacaca

SEQ ID NO: 707132 - RNA, 19 nt, Artificial Sequence
  Description of Artificial Sequence: Synthetic oligonucleotide
caggggagucuugccugug

SEQ ID NO: 707133 - RNA, 19 nt, Artificial Sequence
  Description of Artificial Sequence: Synthetic oligonucleotide
gacgugaguccagauucuu

SEQ ID NO: 707134 - RNA, 19 nt, Artificial Sequence
  Description of Artificial Sequence: Synthetic oligonucleotide
gggguaauuagcgccacuu

SEQ ID NO: 707135 - RNA, 19 nt, Artificial Sequence
  Description of Artificial Sequence: Synthetic oligonucleotide
gucacccggggaauggggu

SEQ ID NO: 707136 - RNA, 19 nt, Artificial Sequence
  Description of Artificial Sequence: Synthetic oligonucleotide
ggcgagggcugcccuuggc

SEQ ID NO: 707137 - RNA, 19 nt, Artificial Sequence
  Description of Artificial Sequence: Synthetic oligonucleotide
ggauagcaggggagucuug

SEQ ID NO: 707138 - RNA, 19 nt, Artificial Sequence
  Description of Artificial Sequence: Synthetic oligonucleotide
accgcucugcuggcauuga

SEQ ID NO: 707139 - RNA, 19 nt, Artificial Sequence
  Description of Artificial Sequence: Synthetic oligonucleotide
auggcucacuggagcugug

SEQ ID NO: 707140 - RNA, 19 nt, Artificial Sequence
  Description of Artificial Sequence: Synthetic oligonucleotide
cugagaccgcuauguauuu

SEQ ID NO: 707141 - RNA, 19 nt, Artificial Sequence
  Description of Artificial Sequence: Synthetic oligonucleotide
cguuuagauuuaguuguga

SEQ ID NO: 707142 - RNA, 19 nt, Artificial Sequence
  Description of Artificial Sequence: Synthetic oligonucleotide
gcgccacuuuuauuacaga

SEQ ID NO: 707143 - RNA, 19 nt, Artificial Sequence
  Description of Artificial Sequence: Synthetic oligonucleotide
gcacugacgugaguccaga

SEQ ID NO: 707144 - RNA, 19 nt, Artificial Sequence
  Description of Artificial Sequence: Synthetic oligonucleotide
ggccacacacacacacaca

SEQ ID NO: 707145 - RNA, 19 nt, Artificial Sequence
  Description of Artificial Sequence: Synthetic oligonucleotide
cuucaccgcucugcuggca

SEQ ID NO: 707146 - RNA, 19 nt, Artificial Sequence
  Description of Artificial Sequence: Synthetic oligonucleotide
gguccauauucaggcugga

SEQ ID NO: 707147 - RNA, 19 nt, Artificial Sequence
  Description of Artificial Sequence: Synthetic oligonucleotide
gcugagaaguaagggcacu

SEQ ID NO: 707148 - RNA, 19 nt, Artificial Sequence
  Description of Artificial Sequence: Synthetic oligonucleotide
augagaccugagaccgcua

SEQ ID NO: 707149 - RNA, 19 nt, Artificial Sequence
  Description of Artificial Sequence: Synthetic oligonucleotide
gggguggguaagaccauua

SEQ ID NO: 707150 - RNA, 19 nt, Artificial Sequence
  Description of Artificial Sequence: Synthetic oligonucleotide
gccuugucugaaaguucca

SEQ ID NO: 707151 - RNA, 19 nt, Artificial Sequence
  Description of Artificial Sequence: Synthetic oligonucleotide
ggcuucguuuagauuuagu

SEQ ID NO: 707152 - RNA, 19 nt, Artificial Sequence
  Description of Artificial Sequence: Synthetic oligonucleotide
cacugacgugaguccagau

SEQ ID NO: 707153 - RNA, 19 nt, Artificial Sequence
  Description of Artificial Sequence: Synthetic oligonucleotide
cacuggcgagggcugcccu

SEQ ID NO: 707154 - RNA, 19 nt, Artificial Sequence
  Description of Artificial Sequence: Synthetic oligonucleotide
gugcuagcacagggcaguu

SEQ ID NO: 707155 - RNA, 19 nt, Artificial Sequence
  Description of Artificial Sequence: Synthetic oligonucleotide
cccuugcccaaggaucaua

SEQ ID NO: 707156 - RNA, 19 nt, Artificial Sequence
  Description of Artificial Sequence: Synthetic oligonucleotide
ccgcucugcuggcauugau

SEQ ID NO: 707157 - RNA, 19 nt, Artificial Sequence
  Description of Artificial Sequence: Synthetic oligonucleotide
ccccuugcccaaggaucau

SEQ ID NO: 707158 - RNA, 19 nt, Artificial Sequence
  Description of Artificial Sequence: Synthetic oligonucleotide
uauaguguagagaagaagg

SEQ ID NO: 707159 - RNA, 19 nt, Artificial Sequence
  Description of Artificial Sequence: Synthetic oligonucleotide
aguucuauggacuagcauc

SEQ ID NO: 707160 - RNA, 19 nt, Artificial Sequence
  Description of Artificial Sequence: Synthetic oligonucleotide
aaugaucugucccacugcc

SEQ ID NO: 707161 - RNA, 19 nt, Artificial Sequence
  Description of Artificial Sequence: Synthetic oligonucleotide
uuuuauguuugaaauacug

SEQ ID NO: 707162 - RNA, 19 nt, Artificial Sequence
  Description of Artificial Sequence: Synthetic oligonucleotide
uauaaaacucaagaaacgg

SEQ ID NO: 707163 - RNA, 19 nt, Artificial Sequence
  Description of Artificial Sequence: Synthetic oligonucleotide
uuauguuugaaauacugca

SEQ ID NO: 707164 - RNA, 19 nt, Artificial Sequence
  Description of Artificial Sequence: Synthetic oligonucleotide
aauagggcgaacuugaguu

SEQ ID NO: 707165 - RNA, 19 nt, Artificial Sequence
  Description of Artificial Sequence: Synthetic oligonucleotide
ugugaagucuauuccaacg

SEQ ID NO: 707166 - RNA, 19 nt, Artificial Sequence
  Description of Artificial Sequence: Synthetic oligonucleotide
uaaaacucaagaaacgggu

SEQ ID NO: 707167 - RNA, 19 nt, Artificial Sequence
  Description of Artificial Sequence: Synthetic oligonucleotide
guccugaucaaauagggcg

SEQ ID NO: 707168 - RNA, 19 nt, Artificial Sequence
  Description of Artificial Sequence: Synthetic oligonucleotide
acaaguauucguuggugcc

SEQ ID NO: 707169 - RNA, 19 nt, Artificial Sequence
  Description of Artificial Sequence: Synthetic oligonucleotide
ucaaauagggcgaacuuga

SEQ ID NO: 707170 - RNA, 19 nt, Artificial Sequence
  Description of Artificial Sequence: Synthetic oligonucleotide
uagcacauaaccugaacgg

SEQ ID NO: 707171 - RNA, 19 nt, Artificial Sequence
  Description of Artificial Sequence: Synthetic oligonucleotide
guagcacauaaccugaacg

SEQ ID NO: 707172 - RNA, 19 nt, Artificial Sequence
  Description of Artificial Sequence: Synthetic oligonucleotide
uuguccugaucaaauaggg

SEQ ID NO: 707173 - RNA, 19 nt, Artificial Sequence
  Description of Artificial Sequence: Synthetic oligonucleotide
uauucguuggugcccaugg

SEQ ID NO: 707174 - RNA, 19 nt, Artificial Sequence
  Description of Artificial Sequence: Synthetic oligonucleotide
ugauauaguguagagaaga

SEQ ID NO: 707175 - RNA, 19 nt, Artificial Sequence
  Description of Artificial Sequence: Synthetic oligonucleotide
cucaggauaaugaugcccg

SEQ ID NO: 707176 - RNA, 19 nt, Artificial Sequence
  Description of Artificial Sequence: Synthetic oligonucleotide
ugaacgugcauguuccugg

SEQ ID NO: 707177 - RNA, 19 nt, Artificial Sequence
  Description of Artificial Sequence: Synthetic oligonucleotide
aauacuuagaguggcagga

SEQ ID NO: 707178 - RNA, 19 nt, Artificial Sequence
  Description of Artificial Sequence: Synthetic oligonucleotide
uccuccaugucacugauga

SEQ ID NO: 707179 - RNA, 19 nt, Artificial Sequence
  Description of Artificial Sequence: Synthetic oligonucleotide
acgguugucugacagcucc

SEQ ID NO: 707180 - RNA, 19 nt, Artificial Sequence
  Description of Artificial Sequence: Synthetic oligonucleotide
ugcauuucggaacucucgg

SEQ ID NO: 707181 - RNA, 19 nt, Artificial Sequence
  Description of Artificial Sequence: Synthetic oligonucleotide
ugaaugaucugucccacug

SEQ ID NO: 707182 - RNA, 19 nt, Artificial Sequence
  Description of Artificial Sequence: Synthetic oligonucleotide
uucuuauccagcuuccugc

SEQ ID NO: 707183 - RNA, 19 nt, Artificial Sequence
  Description of Artificial Sequence: Synthetic oligonucleotide
ugaaguauugcguugccgu

SEQ ID NO: 707184 - RNA, 19 nt, Artificial Sequence
  Description of Artificial Sequence: Synthetic oligonucleotide
uauguuugaaauacugcac

SEQ ID NO: 707185 - RNA, 19 nt, Artificial Sequence
  Description of Artificial Sequence: Synthetic oligonucleotide
cauucaauacuuagagugg

SEQ ID NO: 707186 - RNA, 19 nt, Artificial Sequence
  Description of Artificial Sequence: Synthetic oligonucleotide
aaccugaacgggcuucucc

SEQ ID NO: 707187 - RNA, 19 nt, Artificial Sequence
  Description of Artificial Sequence: Synthetic oligonucleotide
uccauuacugucguagucg

SEQ ID NO: 707188 - RNA, 19 nt, Artificial Sequence
  Description of Artificial Sequence: Synthetic oligonucleotide
auuacugucguagucguag

SEQ ID NO: 707189 - RNA, 19 nt, Artificial Sequence
  Description of Artificial Sequence: Synthetic oligonucleotide
uuuagaggccugcacuacg

SEQ ID NO: 707190 - RNA, 19 nt, Artificial Sequence
  Description of Artificial Sequence: Synthetic oligonucleotide
agucguagcacauaaccug

SEQ ID NO: 707191 - RNA, 19 nt, Artificial Sequence
  Description of Artificial Sequence: Synthetic oligonucleotide
ucuauuccaacggugaaca

SEQ ID NO: 707192 - RNA, 19 nt, Artificial Sequence
  Description of Artificial Sequence: Synthetic oligonucleotide
aacggugaacaugagcugg

SEQ ID NO: 707193 - RNA, 19 nt, Artificial Sequence
  Description of Artificial Sequence: Synthetic oligonucleotide
ugaucucaggauaaugaug

SEQ ID NO: 707194 - RNA, 19 nt, Artificial Sequence
  Description of Artificial Sequence: Synthetic oligonucleotide
gagacaaucgugccaaggc

SEQ ID NO: 707195 - RNA, 19 nt, Artificial Sequence
  Description of Artificial Sequence: Synthetic oligonucleotide
uuugcugcauuucggaacu

SEQ ID NO: 707196 - RNA, 19 nt, Artificial Sequence
  Description of Artificial Sequence: Synthetic oligonucleotide
uuagaggccugcacuacgg

SEQ ID NO: 707197 - RNA, 19 nt, Artificial Sequence
  Description of Artificial Sequence: Synthetic oligonucleotide
gacaaguauucguuggugc

SEQ ID NO: 707198 - RNA, 19 nt, Artificial Sequence
  Description of Artificial Sequence: Synthetic oligonucleotide
auaaugaugcccgaguucu

SEQ ID NO: 707199 - RNA, 19 nt, Artificial Sequence
  Description of Artificial Sequence: Synthetic oligonucleotide
aaauagggcgaacuugagu

SEQ ID NO: 707200 - RNA, 19 nt, Artificial Sequence
  Description of Artificial Sequence: Synthetic oligonucleotide
ucaauacuuagaguggcag

SEQ ID NO: 707201 - RNA, 19 nt, Artificial Sequence
  Description of Artificial Sequence: Synthetic oligonucleotide
aagggucagacuuggaggu

SEQ ID NO: 707202 - RNA, 19 nt, Artificial Sequence
  Description of Artificial Sequence: Synthetic oligonucleotide
ugaucugucccacugccca

SEQ ID NO: 707203 - RNA, 19 nt, Artificial Sequence
  Description of Artificial Sequence: Synthetic oligonucleotide
augauaauggacaugggca

SEQ ID NO: 707204 - RNA, 19 nt, Artificial Sequence
  Description of Artificial Sequence: Synthetic oligonucleotide
agugugaugacacgguugu

SEQ ID NO: 707205 - RNA, 19 nt, Artificial Sequence
  Description of Artificial Sequence: Synthetic oligonucleotide
agcagaaaggguugguggg

SEQ ID NO: 707206 - RNA, 19 nt, Artificial Sequence
  Description of Artificial Sequence: Synthetic oligonucleotide
uacuugaucaccucaguuc

SEQ ID NO: 707207 - RNA, 19 nt, Artificial Sequence
  Description of Artificial Sequence: Synthetic oligonucleotide
agaaacgggucugauuucc

SEQ ID NO: 707208 - RNA, 19 nt, Artificial Sequence
  Description of Artificial Sequence: Synthetic oligonucleotide
augggauucccguuggagg

SEQ ID NO: 707209 - RNA, 19 nt, Artificial Sequence
  Description of Artificial Sequence: Synthetic oligonucleotide
acgaacuucuuggagaagg

SEQ ID NO: 707210 - RNA, 19 nt, Artificial Sequence
  Description of Artificial Sequence: Synthetic oligonucleotide
accaauggcacagugaaug

SEQ ID NO: 707211 - RNA, 19 nt, Artificial Sequence
  Description of Artificial Sequence: Synthetic oligonucleotide
guaguuucgguguaucuug

SEQ ID NO: 707212 - RNA, 19 nt, Artificial Sequence
  Description of Artificial Sequence: Synthetic oligonucleotide
uguaucuugcaugaucuca

SEQ ID NO: 707213 - RNA, 19 nt, Artificial Sequence
  Description of Artificial Sequence: Synthetic oligonucleotide
uuucgguguaucuugcaug

SEQ ID NO: 707214 - RNA, 19 nt, Artificial Sequence
  Description of Artificial Sequence: Synthetic oligonucleotide
ucuuuugcugcauuucgga

SEQ ID NO: 707215 - RNA, 19 nt, Artificial Sequence
  Description of Artificial Sequence: Synthetic oligonucleotide
ugacaaaggaagcccagcu

SEQ ID NO: 707216 - RNA, 19 nt, Artificial Sequence
  Description of Artificial Sequence: Synthetic oligonucleotide
auaguguagagaagaaggg

SEQ ID NO: 707217 - RNA, 19 nt, Artificial Sequence
  Description of Artificial Sequence: Synthetic oligonucleotide
uucuugcuggagacaaucg

SEQ ID NO: 707218 - RNA, 19 nt, Artificial Sequence
  Description of Artificial Sequence: Synthetic oligonucleotide
uauuccaacggugaacaug

SEQ ID NO: 707219 - RNA, 19 nt, Artificial Sequence
  Description of Artificial Sequence: Synthetic oligonucleotide
caugaucucaggauaauga

SEQ ID NO: 707220 - RNA, 19 nt, Artificial Sequence
  Description of Artificial Sequence: Synthetic oligonucleotide
caucaguugacucugacaa

SEQ ID NO: 707221 - RNA, 19 nt, Artificial Sequence
  Description of Artificial Sequence: Synthetic oligonucleotide
uccugaucaaauagggcga

SEQ ID NO: 707222 - RNA, 19 nt, Artificial Sequence
  Description of Artificial Sequence: Synthetic oligonucleotide
ugaucaaauagggcgaacu

SEQ ID NO: 707223 - RNA, 19 nt, Artificial Sequence
  Description of Artificial Sequence: Synthetic oligonucleotide
aagaaacgggucugauuuc

SEQ ID NO: 707224 - RNA, 19 nt, Artificial Sequence
  Description of Artificial Sequence: Synthetic oligonucleotide
gauaaugaugcccgaguuc

SEQ ID NO: 707225 - RNA, 19 nt, Artificial Sequence
  Description of Artificial Sequence: Synthetic oligonucleotide
ugucauacuccauccaccu

SEQ ID NO: 707226 - RNA, 19 nt, Artificial Sequence
  Description of Artificial Sequence: Synthetic oligonucleotide
uagucguagcacauaaccu

SEQ ID NO: 707227 - RNA, 19 nt, Artificial Sequence
  Description of Artificial Sequence: Synthetic oligonucleotide
aaugaugcccgaguucuug

SEQ ID NO: 707228 - RNA, 19 nt, Artificial Sequence
  Description of Artificial Sequence: Synthetic oligonucleotide
ggucugauuucccaaagag

SEQ ID NO: 707229 - RNA, 19 nt, Artificial Sequence
  Description of Artificial Sequence: Synthetic oligonucleotide
uccugaaugaucuguccca

SEQ ID NO: 707230 - RNA, 19 nt, Artificial Sequence
  Description of Artificial Sequence: Synthetic oligonucleotide
ugagcguagucuccgguug

SEQ ID NO: 707231 - RNA, 19 nt, Artificial Sequence
  Description of Artificial Sequence: Synthetic oligonucleotide
guucuauggacuagcaucc

SEQ ID NO: 707232 - RNA, 19 nt, Artificial Sequence
  Description of Artificial Sequence: Synthetic oligonucleotide
ggaaugaguaguuucggug

SEQ ID NO: 707233 - RNA, 19 nt, Artificial Sequence
  Description of Artificial Sequence: Synthetic oligonucleotide
uccaacggugaacaugagc

SEQ ID NO: 707234 - RNA, 19 nt, Artificial Sequence
  Description of Artificial Sequence: Synthetic oligonucleotide
cucggaagggcacaaacug

SEQ ID NO: 707235 - RNA, 19 nt, Artificial Sequence
  Description of Artificial Sequence: Synthetic oligonucleotide
uucguuggugcccauggga

SEQ ID NO: 707236 - RNA, 19 nt, Artificial Sequence
  Description of Artificial Sequence: Synthetic oligonucleotide
cuggaacucgccaaugaag

SEQ ID NO: 707237 - RNA, 19 nt, Artificial Sequence
  Description of Artificial Sequence: Synthetic oligonucleotide
ucucaggauaaugaugccc

SEQ ID NO: 707238 - RNA, 19 nt, Artificial Sequence
  Description of Artificial Sequence: Synthetic oligonucleotide
aguugacucugacaaagga

SEQ ID NO: 707239 - RNA, 19 nt, Artificial Sequence
  Description of Artificial Sequence: Synthetic oligonucleotide
uuguugauagcuguuucug

SEQ ID NO: 707240 - RNA, 19 nt, Artificial Sequence
  Description of Artificial Sequence: Synthetic oligonucleotide
aggauaaugaugcccgagu

SEQ ID NO: 707241 - RNA, 19 nt, Artificial Sequence
  Description of Artificial Sequence: Synthetic oligonucleotide
aucaaauagggcgaacuug

SEQ ID NO: 707242 - RNA, 19 nt, Artificial Sequence
  Description of Artificial Sequence: Synthetic oligonucleotide
uccccaucacacaaggaca

SEQ ID NO: 707243 - RNA, 19 nt, Artificial Sequence
  Description of Artificial Sequence: Synthetic oligonucleotide
cacaccugagcagaaaggg

SEQ ID NO: 707244 - RNA, 19 nt, Artificial Sequence
  Description of Artificial Sequence: Synthetic oligonucleotide
cucgccaaugaagucaugg

SEQ ID NO: 707245 - RNA, 19 nt, Artificial Sequence
  Description of Artificial Sequence: Synthetic oligonucleotide
guucugucauacuccaucc

SEQ ID NO: 707246 - RNA, 19 nt, Artificial Sequence
  Description of Artificial Sequence: Synthetic oligonucleotide
agcacauaaccugaacggg

SEQ ID NO: 707247 - RNA, 19 nt, Artificial Sequence
  Description of Artificial Sequence: Synthetic oligonucleotide
gauugauauaguguagaga

SEQ ID NO: 707248 - RNA, 19 nt, Artificial Sequence
  Description of Artificial Sequence: Synthetic oligonucleotide
ugcacaaugucgcgggcug

SEQ ID NO: 707249 - RNA, 19 nt, Artificial Sequence
  Description of Artificial Sequence: Synthetic oligonucleotide
gacaaaggaagcccagcug

SEQ ID NO: 707250 - RNA, 19 nt, Artificial Sequence
  Description of Artificial Sequence: Synthetic oligonucleotide
acugucguagucguagcac

SEQ ID NO: 707251 - RNA, 19 nt, Artificial Sequence
  Description of Artificial Sequence: Synthetic oligonucleotide
accaucccgagccucacuc

SEQ ID NO: 707252 - RNA, 19 nt, Artificial Sequence
  Description of Artificial Sequence: Synthetic oligonucleotide
guaucuugcaugaucucag

SEQ ID NO: 707253 - RNA, 19 nt, Artificial Sequence
  Description of Artificial Sequence: Synthetic oligonucleotide
gaaugaucugucccacugc

SEQ ID NO: 707254 - RNA, 19 nt, Artificial Sequence
  Description of Artificial Sequence: Synthetic oligonucleotide
aucucaggauaaugaugcc

SEQ ID NO: 707255 - RNA, 19 nt, Artificial Sequence
  Description of Artificial Sequence: Synthetic oligonucleotide
cagucuggcgguaacuggg

SEQ ID NO: 707256 - RNA, 19 nt, Artificial Sequence
  Description of Artificial Sequence: Synthetic oligonucleotide
gaugcccgaguucuuguag

SEQ ID NO: 707257 - RNA, 19 nt, Artificial Sequence
  Description of Artificial Sequence: Synthetic oligonucleotide
gaaugaguaguuucggugu

SEQ ID NO: 707258 - RNA, 19 nt, Artificial Sequence
  Description of Artificial Sequence: Synthetic oligonucleotide
ucggaagggcacaaacugc

SEQ ID NO: 707259 - RNA, 19 nt, Artificial Sequence
  Description of Artificial Sequence: Synthetic oligonucleotide
gaugaaguauugcguugcc

SEQ ID NO: 707260 - RNA, 19 nt, Artificial Sequence
  Description of Artificial Sequence: Synthetic oligonucleotide
acaaucgugccaaggcugc

SEQ ID NO: 707261 - RNA, 19 nt, Artificial Sequence
  Description of Artificial Sequence: Synthetic oligonucleotide
aaugaguaguuucggugua

SEQ ID NO: 707262 - RNA, 19 nt, Artificial Sequence
  Description of Artificial Sequence: Synthetic oligonucleotide
ucguagucguagcacauaa

SEQ ID NO: 707263 - RNA, 19 nt, Artificial Sequence
  Description of Artificial Sequence: Synthetic oligonucleotide
aucaccucaguucuaugga

SEQ ID NO: 707264 - RNA, 19 nt, Artificial Sequence
  Description of Artificial Sequence: Synthetic oligonucleotide
gaugacacgguugucugac

SEQ ID NO: 707265 - RNA, 19 nt, Artificial Sequence
  Description of Artificial Sequence: Synthetic oligonucleotide
gguaacugggccccgaacc

SEQ ID NO: 707266 - RNA, 19 nt, Artificial Sequence
  Description of Artificial Sequence: Synthetic oligonucleotide
augaucucaggauaaugau

SEQ ID NO: 707267 - RNA, 19 nt, Artificial Sequence
  Description of Artificial Sequence: Synthetic oligonucleotide
acugaugaccccgucagug

SEQ ID NO: 707268 - RNA, 19 nt, Artificial Sequence
  Description of Artificial Sequence: Synthetic oligonucleotide
agacaaucgugccaaggcu

SEQ ID NO: 707269 - RNA, 19 nt, Artificial Sequence
  Description of Artificial Sequence: Synthetic oligonucleotide
ucaguucuauggacuagca

SEQ ID NO: 707270 - RNA, 19 nt, Artificial Sequence
  Description of Artificial Sequence: Synthetic oligonucleotide
aggaugaaguauugcguug

SEQ ID NO: 707271 - RNA, 19 nt, Artificial Sequence
  Description of Artificial Sequence: Synthetic oligonucleotide
ugcgaucgugaucaagccc

SEQ ID NO: 707272 - RNA, 19 nt, Artificial Sequence
  Description of Artificial Sequence: Synthetic oligonucleotide
uccccuggcuuauaaaacu

SEQ ID NO: 707273 - RNA, 19 nt, Artificial Sequence
  Description of Artificial Sequence: Synthetic oligonucleotide
uccgccaacaccgcuuugg

SEQ ID NO: 707274 - RNA, 19 nt, Artificial Sequence
  Description of Artificial Sequence: Synthetic oligonucleotide
gaacgugcauguuccuggg

SEQ ID NO: 707275 - RNA, 19 nt, Artificial Sequence
  Description of Artificial Sequence: Synthetic oligonucleotide
ggauugauauaguguagag

SEQ ID NO: 707276 - RNA, 19 nt, Artificial Sequence
  Description of Artificial Sequence: Synthetic oligonucleotide
agaacugacccaggaaguc

SEQ ID NO: 707277 - RNA, 19 nt, Artificial Sequence
  Description of Artificial Sequence: Synthetic oligonucleotide
ugacaaguauucguuggug

SEQ ID NO: 707278 - RNA, 19 nt, Artificial Sequence
  Description of Artificial Sequence: Synthetic oligonucleotide
uucgaagugguaguccagc

SEQ ID NO: 707279 - RNA, 19 nt, Artificial Sequence
  Description of Artificial Sequence: Synthetic oligonucleotide
aacgugcauguuccugggg

SEQ ID NO: 707280 - RNA, 19 nt, Artificial Sequence
  Description of Artificial Sequence: Synthetic oligonucleotide
gaacucgccaaugaaguca

SEQ ID NO: 707281 - RNA, 19 nt, Artificial Sequence
  Description of Artificial Sequence: Synthetic oligonucleotide
uugcguugccgucugcugc

SEQ ID NO: 707282 - RNA, 19 nt, Artificial Sequence
  Description of Artificial Sequence: Synthetic oligonucleotide
aaguauugcguugccgucu

SEQ ID NO: 707283 - RNA, 19 nt, Artificial Sequence
  Description of Artificial Sequence: Synthetic oligonucleotide
gugaucaagcccuucccug

SEQ ID NO: 707284 - RNA, 19 nt, Artificial Sequence
  Description of Artificial Sequence: Synthetic oligonucleotide
cucaguucuauggacuagc

SEQ ID NO: 707285 - RNA, 19 nt, Artificial Sequence
  Description of Artificial Sequence: Synthetic oligonucleotide
guccugaaugaucuguccc

SEQ ID NO: 707286 - RNA, 19 nt, Artificial Sequence
  Description of Artificial Sequence: Synthetic oligonucleotide
ugcacuccaucuccagcgg

SEQ ID NO: 707287 - RNA, 19 nt, Artificial Sequence
  Description of Artificial Sequence: Synthetic oligonucleotide
aguauugcguugccgucug

SEQ ID NO: 707288 - RNA, 19 nt, Artificial Sequence
  Description of Artificial Sequence: Synthetic oligonucleotide
cuguaaagaggacacagaa

SEQ ID NO: 707289 - RNA, 19 nt, Artificial Sequence
  Description of Artificial Sequence: Synthetic oligonucleotide
ucuauggacuagcauccau

SEQ ID NO: 707290 - RNA, 19 nt, Artificial Sequence
  Description of Artificial Sequence: Synthetic oligonucleotide
augaaguauugcguugccg

SEQ ID NO: 707291 - RNA, 19 nt, Artificial Sequence
  Description of Artificial Sequence: Synthetic oligonucleotide
aaucgugccaaggcugcag

SEQ ID NO: 707292 - RNA, 19 nt, Artificial Sequence
  Description of Artificial Sequence: Synthetic oligonucleotide
caaguauucguuggugccc

SEQ ID NO: 707293 - RNA, 19 nt, Artificial Sequence
  Description of Artificial Sequence: Synthetic oligonucleotide
uccgguuguccccauccag

SEQ ID NO: 707294 - RNA, 19 nt, Artificial Sequence
  Description of Artificial Sequence: Synthetic oligonucleotide
aggaaugaguaguuucggu

SEQ ID NO: 707295 - RNA, 19 nt, Artificial Sequence
  Description of Artificial Sequence: Synthetic oligonucleotide
aguuuagaggccugcacua

SEQ ID NO: 707296 - RNA, 19 nt, Artificial Sequence
  Description of Artificial Sequence: Synthetic oligonucleotide
acgugcauguuccuggggu

SEQ ID NO: 707297 - RNA, 19 nt, Artificial Sequence
  Description of Artificial Sequence: Synthetic oligonucleotide
uaguuucgguguaucuugc

SEQ ID NO: 707298 - RNA, 19 nt, Artificial Sequence
  Description of Artificial Sequence: Synthetic oligonucleotide
aacgggucugauuucccaa

SEQ ID NO: 707299 - RNA, 19 nt, Artificial Sequence
  Description of Artificial Sequence: Synthetic oligonucleotide
uucggaacucucggaaggg

SEQ ID NO: 707300 - RNA, 19 nt, Artificial Sequence
  Description of Artificial Sequence: Synthetic oligonucleotide
ucaccucaguucuauggac

SEQ ID NO: 707301 - RNA, 19 nt, Artificial Sequence
  Description of Artificial Sequence: Synthetic oligonucleotide
cauacuccauccaccugcc

SEQ ID NO: 707302 - RNA, 19 nt, Artificial Sequence
  Description of Artificial Sequence: Synthetic oligonucleotide
agaggucuggaacucgcca

SEQ ID NO: 707303 - RNA, 19 nt, Artificial Sequence
  Description of Artificial Sequence: Synthetic oligonucleotide
acugcacaaugucgcgggc

SEQ ID NO: 707304 - RNA, 19 nt, Artificial Sequence
  Description of Artificial Sequence: Synthetic oligonucleotide
ugcacuacggcgugccgug

SEQ ID NO: 707305 - RNA, 19 nt, Artificial Sequence
  Description of Artificial Sequence: Synthetic oligonucleotide
caagaaacgggucugauuu

SEQ ID NO: 707306 - RNA, 19 nt, Artificial Sequence
  Description of Artificial Sequence: Synthetic oligonucleotide
uuacugucguagucguagc

SEQ ID NO: 707307 - RNA, 19 nt, Artificial Sequence
  Description of Artificial Sequence: Synthetic oligonucleotide
gacacgguugucugacagc

SEQ ID NO: 707308 - RNA, 19 nt, Artificial Sequence
  Description of Artificial Sequence: Synthetic oligonucleotide
auugcguugccgucugcug

SEQ ID NO: 707309 - RNA, 19 nt, Artificial Sequence
  Description of Artificial Sequence: Synthetic oligonucleotide
auucguuggugcccauggg

SEQ ID NO: 707310 - RNA, 19 nt, Artificial Sequence
  Description of Artificial Sequence: Synthetic oligonucleotide
gauauaguguagagaagaa

SEQ ID NO: 707311 - RNA, 19 nt, Artificial Sequence
  Description of Artificial Sequence: Synthetic oligonucleotide
accucuucgaagugguagu

SEQ ID NO: 707312 - RNA, 19 nt, Artificial Sequence
  Description of Artificial Sequence: Synthetic oligonucleotide
caaauagggcgaacuugag

SEQ ID NO: 707313 - RNA, 19 nt, Artificial Sequence
  Description of Artificial Sequence: Synthetic oligonucleotide
cagugugaugacacgguug

SEQ ID NO: 707314 - RNA, 19 nt, Artificial Sequence
  Description of Artificial Sequence: Synthetic oligonucleotide
aguaguuucgguguaucuu

SEQ ID NO: 707315 - RNA, 19 nt, Artificial Sequence
  Description of Artificial Sequence: Synthetic oligonucleotide
auacugcacuacuugcuga

SEQ ID NO: 707316 - RNA, 19 nt, Artificial Sequence
  Description of Artificial Sequence: Synthetic oligonucleotide
cucucggaagggcacaaac

SEQ ID NO: 707317 - RNA, 19 nt, Artificial Sequence
  Description of Artificial Sequence: Synthetic oligonucleotide
ugccauuguccucuguaaa

SEQ ID NO: 707318 - RNA, 19 nt, Artificial Sequence
  Description of Artificial Sequence: Synthetic oligonucleotide
caccucuucgaagugguag

SEQ ID NO: 707319 - RNA, 19 nt, Artificial Sequence
  Description of Artificial Sequence: Synthetic oligonucleotide
uggagguccgguuguaaaa

SEQ ID NO: 707320 - RNA, 19 nt, Artificial Sequence
  Description of Artificial Sequence: Synthetic oligonucleotide
ugugagcguagucuccggu

SEQ ID NO: 707321 - RNA, 19 nt, Artificial Sequence
  Description of Artificial Sequence: Synthetic oligonucleotide
uauugcguugccgucugcu

SEQ ID NO: 707322 - RNA, 19 nt, Artificial Sequence
  Description of Artificial Sequence: Synthetic oligonucleotide
caugggauugauauagugu

SEQ ID NO: 707323 - RNA, 19 nt, Artificial Sequence
  Description of Artificial Sequence: Synthetic oligonucleotide
acacgguugucugacagcu

SEQ ID NO: 707324 - RNA, 19 nt, Artificial Sequence
  Description of Artificial Sequence: Synthetic oligonucleotide
ucuccagcgggacaccauc

SEQ ID NO: 707325 - RNA, 19 nt, Artificial Sequence
  Description of Artificial Sequence: Synthetic oligonucleotide
guuggugcccaugggauug

SEQ ID NO: 707326 - RNA, 19 nt, Artificial Sequence
  Description of Artificial Sequence: Synthetic oligonucleotide
gaguaugccugggcgaugc

SEQ ID NO: 707327 - RNA, 19 nt, Artificial Sequence
  Description of Artificial Sequence: Synthetic oligonucleotide
ucagugugaugacacgguu

SEQ ID NO: 707328 - RNA, 19 nt, Artificial Sequence
  Description of Artificial Sequence: Synthetic oligonucleotide
cugcgaucgugaucaagcc

SEQ ID NO: 707329 - RNA, 19 nt, Artificial Sequence
  Description of Artificial Sequence: Synthetic oligonucleotide
auguaguccaggaaugagu

SEQ ID NO: 707330 - RNA, 19 nt, Artificial Sequence
  Description of Artificial Sequence: Synthetic oligonucleotide
gcugcgaucgugaucaagc

SEQ ID NO: 707331 - RNA, 19 nt, Artificial Sequence
  Description of Artificial Sequence: Synthetic oligonucleotide
ucaggauaaugaugcccga

SEQ ID NO: 707332 - RNA, 19 nt, Artificial Sequence
  Description of Artificial Sequence: Synthetic oligonucleotide
agagcaggaaacaucuuau

SEQ ID NO: 707333 - RNA, 19 nt, Artificial Sequence
  Description of Artificial Sequence: Synthetic oligonucleotide
cauuucggaacucucggaa

SEQ ID NO: 707334 - RNA, 19 nt, Artificial Sequence
  Description of Artificial Sequence: Synthetic oligonucleotide
aguaugccugggcgaugcc

SEQ ID NO: 707335 - RNA, 19 nt, Artificial Sequence
  Description of Artificial Sequence: Synthetic oligonucleotide
auacuuagaguggcaggag

SEQ ID NO: 707336 - RNA, 19 nt, Artificial Sequence
  Description of Artificial Sequence: Synthetic oligonucleotide
acagaaagggucagacuug

SEQ ID NO: 707337 - RNA, 19 nt, Artificial Sequence
  Description of Artificial Sequence: Synthetic oligonucleotide
cuuggaggugacgucucgg

SEQ ID NO: 707338 - RNA, 19 nt, Artificial Sequence
  Description of Artificial Sequence: Synthetic oligonucleotide
gugguaguccagcacgaac

SEQ ID NO: 707339 - RNA, 19 nt, Artificial Sequence
  Description of Artificial Sequence: Synthetic oligonucleotide
agucuggcgguaacugggc

SEQ ID NO: 707340 - RNA, 19 nt, Artificial Sequence
  Description of Artificial Sequence: Synthetic oligonucleotide
aacaccgcuuuggccagag

SEQ ID NO: 707341 - RNA, 19 nt, Artificial Sequence
  Description of Artificial Sequence: Synthetic oligonucleotide
aguuucgguguaucuugca

SEQ ID NO: 707342 - RNA, 19 nt, Artificial Sequence
  Description of Artificial Sequence: Synthetic oligonucleotide
cauaaccugaacgggcuuc

SEQ ID NO: 707343 - RNA, 19 nt, Artificial Sequence
  Description of Artificial Sequence: Synthetic oligonucleotide
caggaaacaucuuaucacu

SEQ ID NO: 707344 - RNA, 19 nt, Artificial Sequence
  Description of Artificial Sequence: Synthetic oligonucleotide
guuguugauagcuguuucu

SEQ ID NO: 707345 - RNA, 19 nt, Artificial Sequence
  Description of Artificial Sequence: Synthetic oligonucleotide
gucuauuccaacggugaac

SEQ ID NO: 707346 - RNA, 19 nt, Artificial Sequence
  Description of Artificial Sequence: Synthetic oligonucleotide
gccgguuuguccuggaagc

SEQ ID NO: 707347 - RNA, 19 nt, Artificial Sequence
  Description of Artificial Sequence: Synthetic oligonucleotide
acuacuugcugaggcagcu

SEQ ID NO: 707348 - RNA, 19 nt, Artificial Sequence
  Description of Artificial Sequence: Synthetic oligonucleotide
caacggugaacaugagcug

SEQ ID NO: 707349 - RNA, 19 nt, Artificial Sequence
  Description of Artificial Sequence: Synthetic oligonucleotide
agcggggugaacgugcaug

SEQ ID NO: 707350 - RNA, 19 nt, Artificial Sequence
  Description of Artificial Sequence: Synthetic oligonucleotide
cucuucgaagugguagucc

SEQ ID NO: 707351 - RNA, 19 nt, Artificial Sequence
  Description of Artificial Sequence: Synthetic oligonucleotide
ggugaacaugagcuggcag

SEQ ID NO: 707352 - RNA, 19 nt, Artificial Sequence
  Description of Artificial Sequence: Synthetic oligonucleotide
gaggaugaaguauugcguu

SEQ ID NO: 707353 - RNA, 19 nt, Artificial Sequence
  Description of Artificial Sequence: Synthetic oligonucleotide
gaaacgggucugauuuccc

SEQ ID NO: 707354 - RNA, 19 nt, Artificial Sequence
  Description of Artificial Sequence: Synthetic oligonucleotide
gaacugacccaggaaguca

SEQ ID NO: 707355 - RNA, 19 nt, Artificial Sequence
  Description of Artificial Sequence: Synthetic oligonucleotide
ccaacggugaacaugagcu

SEQ ID NO: 707356 - RNA, 19 nt, Artificial Sequence
  Description of Artificial Sequence: Synthetic oligonucleotide
aucuuaucacugucauagu

SEQ ID NO: 707357 - RNA, 19 nt, Artificial Sequence
  Description of Artificial Sequence: Synthetic oligonucleotide
caggauaaugaugcccgag

SEQ ID NO: 707358 - RNA, 19 nt, Artificial Sequence
  Description of Artificial Sequence: Synthetic oligonucleotide
ugcguugccgucugcugcu

SEQ ID NO: 707359 - RNA, 19 nt, Artificial Sequence
  Description of Artificial Sequence: Synthetic oligonucleotide
gaggucuggaacucgccaa

SEQ ID NO: 707360 - RNA, 19 nt, Artificial Sequence
  Description of Artificial Sequence: Synthetic oligonucleotide
aagugguaguccagcacga

SEQ ID NO: 707361 - RNA, 19 nt, Artificial Sequence
  Description of Artificial Sequence: Synthetic oligonucleotide
auaaccugaacgggcuucu

SEQ ID NO: 707362 - RNA, 19 nt, Artificial Sequence
  Description of Artificial Sequence: Synthetic oligonucleotide
gaucaagcccuucccugca

SEQ ID NO: 707363 - RNA, 19 nt, Artificial Sequence
  Description of Artificial Sequence: Synthetic oligonucleotide
uggcaaacucaugggacac

SEQ ID NO: 707364 - RNA, 19 nt, Artificial Sequence
  Description of Artificial Sequence: Synthetic oligonucleotide
ugcccgaguucuuguagcu

SEQ ID NO: 707365 - RNA, 19 nt, Artificial Sequence
  Description of Artificial Sequence: Synthetic oligonucleotide
augaccccgucagugauga

SEQ ID NO: 707366 - RNA, 19 nt, Artificial Sequence
  Description of Artificial Sequence: Synthetic oligonucleotide
auaauggacaugggcaguu

SEQ ID NO: 707367 - RNA, 19 nt, Artificial Sequence
  Description of Artificial Sequence: Synthetic oligonucleotide
cagcacgaacuucuuggag

SEQ ID NO: 707368 - RNA, 19 nt, Artificial Sequence
  Description of Artificial Sequence: Synthetic oligonucleotide
gguuguugauagcuguuuc

SEQ ID NO: 707369 - RNA, 19 nt, Artificial Sequence
  Description of Artificial Sequence: Synthetic oligonucleotide
guugccgucugcugcugug

SEQ ID NO: 707370 - RNA, 19 nt, Artificial Sequence
  Description of Artificial Sequence: Synthetic oligonucleotide
uagggcgaacuugaguuuc

SEQ ID NO: 707371 - RNA, 19 nt, Artificial Sequence
  Description of Artificial Sequence: Synthetic oligonucleotide
cagaggucuggaacucgcc

SEQ ID NO: 707372 - RNA, 19 nt, Artificial Sequence
  Description of Artificial Sequence: Synthetic oligonucleotide
aucauccccuggcuuauaa

SEQ ID NO: 707373 - RNA, 19 nt, Artificial Sequence
  Description of Artificial Sequence: Synthetic oligonucleotide
acuacggcgugccgugucu

SEQ ID NO: 707374 - RNA, 19 nt, Artificial Sequence
  Description of Artificial Sequence: Synthetic oligonucleotide
gaucaaauagggcgaacuu

SEQ ID NO: 707375 - RNA, 19 nt, Artificial Sequence
  Description of Artificial Sequence: Synthetic oligonucleotide
gacuuguccugaucaaaua

SEQ ID NO: 707376 - RNA, 19 nt, Artificial Sequence
  Description of Artificial Sequence: Synthetic oligonucleotide
gugaacgugcauguuccug

SEQ ID NO: 707377 - RNA, 19 nt, Artificial Sequence
  Description of Artificial Sequence: Synthetic oligonucleotide
ccgucagugaugaugagga

SEQ ID NO: 707378 - RNA, 19 nt, Artificial Sequence
  Description of Artificial Sequence: Synthetic oligonucleotide
agaaguuugugggaccaua

SEQ ID NO: 707379 - RNA, 19 nt, Artificial Sequence
  Description of Artificial Sequence: Synthetic oligonucleotide
gcacauaaccugaacgggc

SEQ ID NO: 707380 - RNA, 19 nt, Artificial Sequence
  Description of Artificial Sequence: Synthetic oligonucleotide
cuccagcgggacaccaucc

SEQ ID NO: 707381 - RNA, 19 nt, Artificial Sequence
  Description of Artificial Sequence: Synthetic oligonucleotide
gggauugauauaguguaga

SEQ ID NO: 707382 - RNA, 19 nt, Artificial Sequence
  Description of Artificial Sequence: Synthetic oligonucleotide
cacagaggucuggaacucg

SEQ ID NO: 707383 - RNA, 19 nt, Artificial Sequence
  Description of Artificial Sequence: Synthetic oligonucleotide
guuuagaggccugcacuac

SEQ ID NO: 707384 - RNA, 19 nt, Artificial Sequence
  Description of Artificial Sequence: Synthetic oligonucleotide
auagggcgaacuugaguuu

SEQ ID NO: 707385 - RNA, 19 nt, Artificial Sequence
  Description of Artificial Sequence: Synthetic oligonucleotide
cacauaaccugaacgggcu

SEQ ID NO: 707386 - RNA, 19 nt, Artificial Sequence
  Description of Artificial Sequence: Synthetic oligonucleotide
gugugagcguagucuccgg

SEQ ID NO: 707387 - RNA, 19 nt, Artificial Sequence
  Description of Artificial Sequence: Synthetic oligonucleotide
uucuauggacuagcaucca

SEQ ID NO: 707388 - RNA, 19 nt, Artificial Sequence
  Description of Artificial Sequence: Synthetic oligonucleotide
uacggcgugccgugucucc

SEQ ID NO: 707389 - RNA, 19 nt, Artificial Sequence
  Description of Artificial Sequence: Synthetic oligonucleotide
ucuugggguugaugcacuc

SEQ ID NO: 707390 - RNA, 19 nt, Artificial Sequence
  Description of Artificial Sequence: Synthetic oligonucleotide
gggaccauagaagcggaug

SEQ ID NO: 707391 - RNA, 19 nt, Artificial Sequence
  Description of Artificial Sequence: Synthetic oligonucleotide
acgggucugauuucccaaa

SEQ ID NO: 707392 - RNA, 19 nt, Artificial Sequence
  Description of Artificial Sequence: Synthetic oligonucleotide
ggggugaacgugcauguuc

SEQ ID NO: 707393 - RNA, 19 nt, Artificial Sequence
  Description of Artificial Sequence: Synthetic oligonucleotide
cuuccagucuggcgguaac

SEQ ID NO: 707394 - RNA, 19 nt, Artificial Sequence
  Description of Artificial Sequence: Synthetic oligonucleotide
uagucuccgguugucccca

SEQ ID NO: 707395 - RNA, 19 nt, Artificial Sequence
  Description of Artificial Sequence: Synthetic oligonucleotide
ugaugcccgaguucuugua

SEQ ID NO: 707396 - RNA, 19 nt, Artificial Sequence
  Description of Artificial Sequence: Synthetic oligonucleotide
agcguagucuccgguuguc

SEQ ID NO: 707397 - RNA, 19 nt, Artificial Sequence
  Description of Artificial Sequence: Synthetic oligonucleotide
acucaagaaacgggucuga

SEQ ID NO: 707398 - RNA, 19 nt, Artificial Sequence
  Description of Artificial Sequence: Synthetic oligonucleotide
aagccgguuuguccuggaa

SEQ ID NO: 707399 - RNA, 19 nt, Artificial Sequence
  Description of Artificial Sequence: Synthetic oligonucleotide
aggaagccgguuuguccug

SEQ ID NO: 707400 - RNA, 19 nt, Artificial Sequence
  Description of Artificial Sequence: Synthetic oligonucleotide
gauaauggacaugggcagu

SEQ ID NO: 707401 - RNA, 19 nt, Artificial Sequence
  Description of Artificial Sequence: Synthetic oligonucleotide
gagaacugacccaggaagu

SEQ ID NO: 707402 - RNA, 19 nt, Artificial Sequence
  Description of Artificial Sequence: Synthetic oligonucleotide
guauucguuggugcccaug

SEQ ID NO: 707403 - RNA, 19 nt, Artificial Sequence
  Description of Artificial Sequence: Synthetic oligonucleotide
agguuguugauagcuguuu

SEQ ID NO: 707404 - RNA, 19 nt, Artificial Sequence
  Description of Artificial Sequence: Synthetic oligonucleotide
cgccaaugaagucauggcc

SEQ ID NO: 707405 - RNA, 19 nt, Artificial Sequence
  Description of Artificial Sequence: Synthetic oligonucleotide
aacucucggaagggcacaa

SEQ ID NO: 707406 - RNA, 19 nt, Artificial Sequence
  Description of Artificial Sequence: Synthetic oligonucleotide
gucuggcgguaacugggcc

SEQ ID NO: 707407 - RNA, 19 nt, Artificial Sequence
  Description of Artificial Sequence: Synthetic oligonucleotide
gcaugaucucaggauaaug

SEQ ID NO: 707408 - RNA, 19 nt, Artificial Sequence
  Description of Artificial Sequence: Synthetic oligonucleotide
ugccaucauccccuggcuu

SEQ ID NO: 707409 - RNA, 19 nt, Artificial Sequence
  Description of Artificial Sequence: Synthetic oligonucleotide
acauaaccugaacgggcuu

SEQ ID NO: 707410 - RNA, 19 nt, Artificial Sequence
  Description of Artificial Sequence: Synthetic oligonucleotide
ugaguaugccugggcgaug

SEQ ID NO: 707411 - RNA, 19 nt, Artificial Sequence
  Description of Artificial Sequence: Synthetic oligonucleotide
ggaccauagaagcggaugu

SEQ ID NO: 707412 - RNA, 19 nt, Artificial Sequence
  Description of Artificial Sequence: Synthetic oligonucleotide
cugccauuguccucuguaa

SEQ ID NO: 707413 - RNA, 19 nt, Artificial Sequence
  Description of Artificial Sequence: Synthetic oligonucleotide
acaccaucccgagccucac

SEQ ID NO: 707414 - RNA, 19 nt, Artificial Sequence
  Description of Artificial Sequence: Synthetic oligonucleotide
caaugucgcgggcugccuc

SEQ ID NO: 707415 - RNA, 19 nt, Artificial Sequence
  Description of Artificial Sequence: Synthetic oligonucleotide
gugacgucucgguccagca

SEQ ID NO: 707416 - RNA, 19 nt, Artificial Sequence
  Description of Artificial Sequence: Synthetic oligonucleotide
cugcaacacagaggucugg

SEQ ID NO: 707417 - RNA, 19 nt, Artificial Sequence
  Description of Artificial Sequence: Synthetic oligonucleotide
ggccccgaaccccagagca

SEQ ID NO: 707418 - RNA, 19 nt, Artificial Sequence
  Description of Artificial Sequence: Synthetic oligonucleotide
uuuguccuggaagcaucau

SEQ ID NO: 707419 - RNA, 19 nt, Artificial Sequence
  Description of Artificial Sequence: Synthetic oligonucleotide
augaguaguuucgguguau

SEQ ID NO: 707420 - RNA, 19 nt, Artificial Sequence
  Description of Artificial Sequence: Synthetic oligonucleotide
guacuugaucaccucaguu

SEQ ID NO: 707421 - RNA, 19 nt, Artificial Sequence
  Description of Artificial Sequence: Synthetic oligonucleotide
ugggaccauagaagcggau

SEQ ID NO: 707422 - RNA, 19 nt, Artificial Sequence
  Description of Artificial Sequence: Synthetic oligonucleotide
guaugccugggcgaugcca

SEQ ID NO: 707423 - RNA, 19 nt, Artificial Sequence
  Description of Artificial Sequence: Synthetic oligonucleotide
cuccucgccugugugugag

SEQ ID NO: 707424 - RNA, 19 nt, Artificial Sequence
  Description of Artificial Sequence: Synthetic oligonucleotide
uaauggacaugggcaguuu

SEQ ID NO: 707425 - RNA, 19 nt, Artificial Sequence
  Description of Artificial Sequence: Synthetic oligonucleotide
gguucuggccacucacuga

SEQ ID NO: 707426 - RNA, 19 nt, Artificial Sequence
  Description of Artificial Sequence: Synthetic oligonucleotide
aucuggaauguaggccaug

SEQ ID NO: 707427 - RNA, 19 nt, Artificial Sequence
  Description of Artificial Sequence: Synthetic oligonucleotide
cccgucagugaugaugagg

SEQ ID NO: 707428 - RNA, 19 nt, Artificial Sequence
  Description of Artificial Sequence: Synthetic oligonucleotide
cagcgggacaccaucccga

SEQ ID NO: 707429 - RNA, 19 nt, Artificial Sequence
  Description of Artificial Sequence: Synthetic oligonucleotide
gugaagcggggugaacgug

SEQ ID NO: 707430 - RNA, 19 nt, Artificial Sequence
  Description of Artificial Sequence: Synthetic oligonucleotide
gcacuccaucuccagcggg

SEQ ID NO: 707431 - RNA, 19 nt, Artificial Sequence
  Description of Artificial Sequence: Synthetic oligonucleotide
ggaggaugaaguauugcgu

SEQ ID NO: 707432 - RNA, 19 nt, Artificial Sequence
  Description of Artificial Sequence: Synthetic oligonucleotide
gcccaaauggcugacaagu

SEQ ID NO: 707433 - RNA, 19 nt, Artificial Sequence
  Description of Artificial Sequence: Synthetic oligonucleotide
ggugacgucucgguccagc

SEQ ID NO: 707434 - RNA, 19 nt, Artificial Sequence
  Description of Artificial Sequence: Synthetic oligonucleotide
ccagcgggacaccaucccg

SEQ ID NO: 707435 - RNA, 19 nt, Artificial Sequence
  Description of Artificial Sequence: Synthetic oligonucleotide
gaucgugaucaagcccuuc

SEQ ID NO: 707436 - RNA, 19 nt, Artificial Sequence
  Description of Artificial Sequence: Synthetic oligonucleotide
gcgaucgugaucaagcccu

SEQ ID NO: 707437 - RNA, 19 nt, Artificial Sequence
  Description of Artificial Sequence: Synthetic oligonucleotide
aucccgagccucacucauc

SEQ ID NO: 707438 - RNA, 19 nt, Artificial Sequence
  Description of Artificial Sequence: Synthetic oligonucleotide
ggaagccgguuuguccugg

SEQ ID NO: 707439 - RNA, 19 nt, Artificial Sequence
  Description of Artificial Sequence: Synthetic oligonucleotide
gcauuucggaacucucgga

SEQ ID NO: 707440 - RNA, 19 nt, Artificial Sequence
  Description of Artificial Sequence: Synthetic oligonucleotide
agugguaguccagcacgaa

SEQ ID NO: 707441 - RNA, 19 nt, Artificial Sequence
  Description of Artificial Sequence: Synthetic oligonucleotide
guauugcguugccgucugc

SEQ ID NO: 707442 - RNA, 19 nt, Artificial Sequence
  Description of Artificial Sequence: Synthetic oligonucleotide
cacuacggcgugccguguc

SEQ ID NO: 707443 - RNA, 19 nt, Artificial Sequence
  Description of Artificial Sequence: Synthetic oligonucleotide
acaaugucgcgggcugccu

SEQ ID NO: 707444 - RNA, 19 nt, Artificial Sequence
  Description of Artificial Sequence: Synthetic oligonucleotide
ccuggcuuauaaaacucaa

SEQ ID NO: 707445 - RNA, 19 nt, Artificial Sequence
  Description of Artificial Sequence: Synthetic oligonucleotide
aagcggggugaacgugcau

SEQ ID NO: 707446 - RNA, 19 nt, Artificial Sequence
  Description of Artificial Sequence: Synthetic oligonucleotide
ggauaaugaugcccgaguu

SEQ ID NO: 707447 - RNA, 19 nt, Artificial Sequence
  Description of Artificial Sequence: Synthetic oligonucleotide
cacgguugucugacagcuc

SEQ ID NO: 707448 - RNA, 19 nt, Artificial Sequence
  Description of Artificial Sequence: Synthetic oligonucleotide
ggcaaacucaugggacacc

SEQ ID NO: 707449 - RNA, 19 nt, Artificial Sequence
  Description of Artificial Sequence: Synthetic oligonucleotide
cuugaucaccucaguucua

SEQ ID NO: 707450 - RNA, 19 nt, Artificial Sequence
  Description of Artificial Sequence: Synthetic oligonucleotide
ccccuggcuuauaaaacuc

SEQ ID NO: 707451 - RNA, 19 nt, Artificial Sequence
  Description of Artificial Sequence: Synthetic oligonucleotide
ugcccgccaggcucagugu

SEQ ID NO: 707452 - RNA, 19 nt, Artificial Sequence
  Description of Artificial Sequence: Synthetic oligonucleotide
cgguguaucuugcaugauc

SEQ ID NO: 707453 - RNA, 19 nt, Artificial Sequence
  Description of Artificial Sequence: Synthetic oligonucleotide
agaaagggucagacuugga

SEQ ID NO: 707454 - RNA, 19 nt, Artificial Sequence
  Description of Artificial Sequence: Synthetic oligonucleotide
uaaccugaacgggcuucuc

SEQ ID NO: 707455 - RNA, 19 nt, Artificial Sequence
  Description of Artificial Sequence: Synthetic oligonucleotide
ccccgaaccccagagcagg

SEQ ID NO: 707456 - RNA, 19 nt, Artificial Sequence
  Description of Artificial Sequence: Synthetic oligonucleotide
ggguccaugggauucccgu

SEQ ID NO: 707457 - RNA, 19 nt, Artificial Sequence
  Description of Artificial Sequence: Synthetic oligonucleotide
agggcgaacuugaguuucu

SEQ ID NO: 707458 - RNA, 19 nt, Artificial Sequence
  Description of Artificial Sequence: Synthetic oligonucleotide
gagcguagucuccgguugu

SEQ ID NO: 707459 - RNA, 19 nt, Artificial Sequence
  Description of Artificial Sequence: Synthetic oligonucleotide
cccguuggaggcugugaag

SEQ ID NO: 707460 - RNA, 19 nt, Artificial Sequence
  Description of Artificial Sequence: Synthetic oligonucleotide
gugggaccauagaagcgga

SEQ ID NO: 707461 - RNA, 19 nt, Artificial Sequence
  Description of Artificial Sequence: Synthetic oligonucleotide
cauuacugucguagucgua

SEQ ID NO: 707462 - RNA, 19 nt, Artificial Sequence
  Description of Artificial Sequence: Synthetic oligonucleotide
cccuggcuuauaaaacuca

SEQ ID NO: 707463 - RNA, 19 nt, Artificial Sequence
  Description of Artificial Sequence: Synthetic oligonucleotide
cugaaugaucugucccacu

SEQ ID NO: 707464 - RNA, 19 nt, Artificial Sequence
  Description of Artificial Sequence: Synthetic oligonucleotide
auccacaccugagcagaaa

SEQ ID NO: 707465 - RNA, 19 nt, Artificial Sequence
  Description of Artificial Sequence: Synthetic oligonucleotide
cgugcauguuccuggggug

SEQ ID NO: 707466 - RNA, 19 nt, Artificial Sequence
  Description of Artificial Sequence: Synthetic oligonucleotide
ucgguguaucuugcaugau

SEQ ID NO: 707467 - RNA, 19 nt, Artificial Sequence
  Description of Artificial Sequence: Synthetic oligonucleotide
gugagcguagucuccgguu

SEQ ID NO: 707468 - RNA, 19 nt, Artificial Sequence
  Description of Artificial Sequence: Synthetic oligonucleotide
cugacccaggaagucaugu

SEQ ID NO: 707469 - RNA, 19 nt, Artificial Sequence
  Description of Artificial Sequence: Synthetic oligonucleotide
ggauggccccuguggcggg

SEQ ID NO: 707470 - RNA, 19 nt, Artificial Sequence
  Description of Artificial Sequence: Synthetic oligonucleotide
ggcgugccgugucuccucc

SEQ ID NO: 707471 - RNA, 19 nt, Artificial Sequence
  Description of Artificial Sequence: Synthetic oligonucleotide
ccgggccacaugguuaacg

SEQ ID NO: 707472 - RNA, 19 nt, Artificial Sequence
  Description of Artificial Sequence: Synthetic oligonucleotide
ggcugcgaucgugaucaag

SEQ ID NO: 707473 - RNA, 19 nt, Artificial Sequence
  Description of Artificial Sequence: Synthetic oligonucleotide
gucguagucguagcacaua

SEQ ID NO: 707474 - RNA, 19 nt, Artificial Sequence
  Description of Artificial Sequence: Synthetic oligonucleotide
caguucuauggacuagcau

SEQ ID NO: 707475 - RNA, 19 nt, Artificial Sequence
  Description of Artificial Sequence: Synthetic oligonucleotide
acggcgugccgugucuccu

SEQ ID NO: 707476 - RNA, 19 nt, Artificial Sequence
  Description of Artificial Sequence: Synthetic oligonucleotide
cugaguaugccugggcgau

SEQ ID NO: 707477 - RNA, 19 nt, Artificial Sequence
  Description of Artificial Sequence: Synthetic oligonucleotide
gccugcacuacggcgugcc

SEQ ID NO: 707478 - RNA, 19 nt, Artificial Sequence
  Description of Artificial Sequence: Synthetic oligonucleotide
acgucucgguccagcaggu

SEQ ID NO: 707479 - RNA, 19 nt, Artificial Sequence
  Description of Artificial Sequence: Synthetic oligonucleotide
acccacgaggcagcagggu

SEQ ID NO: 707480 - RNA, 19 nt, Artificial Sequence
  Description of Artificial Sequence: Synthetic oligonucleotide
cccgaguucuuguagcucu

SEQ ID NO: 707481 - RNA, 19 nt, Artificial Sequence
  Description of Artificial Sequence: Synthetic oligonucleotide
caucuccagcgggacacca

SEQ ID NO: 707482 - RNA, 19 nt, Artificial Sequence
  Description of Artificial Sequence: Synthetic oligonucleotide
gcguagucuccgguugucc

SEQ ID NO: 707483 - RNA, 19 nt, Artificial Sequence
  Description of Artificial Sequence: Synthetic oligonucleotide
acaccgcuuuggccagagu

SEQ ID NO: 707484 - RNA, 19 nt, Artificial Sequence
  Description of Artificial Sequence: Synthetic oligonucleotide
gggcgaugccauccacacc

SEQ ID NO: 707485 - RNA, 19 nt, Artificial Sequence
  Description of Artificial Sequence: Synthetic oligonucleotide
cuacggcgugccgugucuc

SEQ ID NO: 707486 - RNA, 19 nt, Artificial Sequence
  Description of Artificial Sequence: Synthetic oligonucleotide
cgggucugauuucccaaag

SEQ ID NO: 707487 - RNA, 19 nt, Artificial Sequence
  Description of Artificial Sequence: Synthetic oligonucleotide
caucccgagccucacucau

SEQ ID NO: 707488 - RNA, 19 nt, Artificial Sequence
  Description of Artificial Sequence: Synthetic oligonucleotide
gggcgaacuugaguuucug

SEQ ID NO: 707489 - RNA, 19 nt, Artificial Sequence
  Description of Artificial Sequence: Synthetic oligonucleotide
uugcugcauuucggaacuc

SEQ ID NO: 707490 - RNA, 19 nt, Artificial Sequence
  Description of Artificial Sequence: Synthetic oligonucleotide
ccauuacugucguagucgu

SEQ ID NO: 707491 - RNA, 19 nt, Artificial Sequence
  Description of Artificial Sequence: Synthetic oligonucleotide
ccugcacuacggcgugccg

SEQ ID NO: 707492 - RNA, 19 nt, Artificial Sequence
  Description of Artificial Sequence: Synthetic oligonucleotide
caaucgugccaaggcugca

SEQ ID NO: 707493 - RNA, 19 nt, Artificial Sequence
  Description of Artificial Sequence: Synthetic oligonucleotide
gagaaguuugugggaccau

SEQ ID NO: 707494 - RNA, 19 nt, Artificial Sequence
  Description of Artificial Sequence: Synthetic oligonucleotide
cucaagaaacgggucugau

SEQ ID NO: 707495 - RNA, 19 nt, Artificial Sequence
  Description of Artificial Sequence: Synthetic oligonucleotide
cgccaacaccgcuuuggcc

SEQ ID NO: 707496 - RNA, 19 nt, Artificial Sequence
  Description of Artificial Sequence: Synthetic oligonucleotide
cugcacaaugucgcgggcu

SEQ ID NO: 707497 - RNA, 19 nt, Artificial Sequence
  Description of Artificial Sequence: Synthetic oligonucleotide
cuauuccaacggugaacau

SEQ ID NO: 707498 - RNA, 19 nt, Artificial Sequence
  Description of Artificial Sequence: Synthetic oligonucleotide
cugcacuacggcgugccgu

SEQ ID NO: 707499 - RNA, 19 nt, Artificial Sequence
  Description of Artificial Sequence: Synthetic oligonucleotide
ggggagaggaagccgguuu

SEQ ID NO: 707500 - RNA, 19 nt, Artificial Sequence
  Description of Artificial Sequence: Synthetic oligonucleotide
cgggccacaugguuaacga

SEQ ID NO: 707501 - RNA, 19 nt, Artificial Sequence
  Description of Artificial Sequence: Synthetic oligonucleotide
gcggggugaacgugcaugu

SEQ ID NO: 707502 - RNA, 19 nt, Artificial Sequence
  Description of Artificial Sequence: Synthetic oligonucleotide
acucgccaaugaagucaug

SEQ ID NO: 707503 - RNA, 19 nt, Artificial Sequence
  Description of Artificial Sequence: Synthetic oligonucleotide
gccccgaaccccagagcag

SEQ ID NO: 707504 - RNA, 19 nt, Artificial Sequence
  Description of Artificial Sequence: Synthetic oligonucleotide
gcgggacaccaucccgagc

SEQ ID NO: 707505 - RNA, 19 nt, Artificial Sequence
  Description of Artificial Sequence: Synthetic oligonucleotide
ugaccccgucagugaugau

SEQ ID NO: 707506 - RNA, 19 nt, Artificial Sequence
  Description of Artificial Sequence: Synthetic oligonucleotide
caccaauggcacagugaau

SEQ ID NO: 707507 - RNA, 19 nt, Artificial Sequence
  Description of Artificial Sequence: Synthetic oligonucleotide
gccaaggggauggccccug

SEQ ID NO: 707508 - RNA, 19 nt, Artificial Sequence
  Description of Artificial Sequence: Synthetic oligonucleotide
cacugaugaccccgucagu

SEQ ID NO: 707509 - RNA, 19 nt, Artificial Sequence
  Description of Artificial Sequence: Synthetic oligonucleotide
gcccgaguucuuguagcuc

SEQ ID NO: 707510 - RNA, 19 nt, Artificial Sequence
  Description of Artificial Sequence: Synthetic oligonucleotide
ccaucuccagcgggacacc

SEQ ID NO: 707511 - RNA, 19 nt, Artificial Sequence
  Description of Artificial Sequence: Synthetic oligonucleotide
gauucccguuggaggcugu

SEQ ID NO: 707512 - RNA, 19 nt, Artificial Sequence
  Description of Artificial Sequence: Synthetic oligonucleotide
cgguaacugggccccgaac

SEQ ID NO: 707513 - RNA, 19 nt, Artificial Sequence
  Description of Artificial Sequence: Synthetic oligonucleotide
gcgguaacugggccccgaa

SEQ ID NO: 707514 - RNA, 19 nt, Artificial Sequence
  Description of Artificial Sequence: Synthetic oligonucleotide
cgugaucaagcccuucccu

SEQ ID NO: 707515 - RNA, 19 nt, Artificial Sequence
  Description of Artificial Sequence: Synthetic oligonucleotide
ccgguuuguccuggaagca

SEQ ID NO: 707516 - RNA, 19 nt, Artificial Sequence
  Description of Artificial Sequence: Synthetic oligonucleotide
ggcgguaacugggccccga

SEQ ID NO: 707517 - RNA, 19 nt, Artificial Sequence
  Description of Artificial Sequence: Synthetic oligonucleotide
gguccagaguguacuugau

SEQ ID NO: 707518 - RNA, 19 nt, Artificial Sequence
  Description of Artificial Sequence: Synthetic oligonucleotide
cccgaaccccagagcagga

SEQ ID NO: 707519 - RNA, 19 nt, Artificial Sequence
  Description of Artificial Sequence: Synthetic oligonucleotide
caccaucccgagccucacu

SEQ ID NO: 707520 - RNA, 19 nt, Artificial Sequence
  Description of Artificial Sequence: Synthetic oligonucleotide
ggccugcacuacggcgugc

SEQ ID NO: 707521 - RNA, 19 nt, Artificial Sequence
  Description of Artificial Sequence: Synthetic oligonucleotide
gcaaaccgggccacauggu

SEQ ID NO: 707522 - RNA, 19 nt, Artificial Sequence
  Description of Artificial Sequence: Synthetic oligonucleotide
gcguugccgucugcugcug

SEQ ID NO: 707523 - RNA, 19 nt, Artificial Sequence
  Description of Artificial Sequence: Synthetic oligonucleotide
gcgugccgugucuccucca

SEQ ID NO: 707524 - RNA, 19 nt, Artificial Sequence
  Description of Artificial Sequence: Synthetic oligonucleotide
cggugaacaugagcuggca

SEQ ID NO: 707525 - RNA, 19 nt, Artificial Sequence
  Description of Artificial Sequence: Synthetic oligonucleotide
cggcgugccgugucuccuc

SEQ ID NO: 707526 - RNA, 19 nt, Artificial Sequence
  Description of Artificial Sequence: Synthetic oligonucleotide
gcaccucuucgaaguggua

SEQ ID NO: 707527 - RNA, 19 nt, Artificial Sequence
  Description of Artificial Sequence: Synthetic oligonucleotide
ggccuccauuacugucgua

SEQ ID NO: 707528 - RNA, 19 nt, Artificial Sequence
  Description of Artificial Sequence: Synthetic oligonucleotide
ccaucauccccuggcuuau

SEQ ID NO: 707529 - RNA, 19 nt, Artificial Sequence
  Description of Artificial Sequence: Synthetic oligonucleotide
ccaaggggauggccccugu

SEQ ID NO: 707530 - RNA, 19 nt, Artificial Sequence
  Description of Artificial Sequence: Synthetic oligonucleotide
cgguuuguccuggaagcau

SEQ ID NO: 707531 - RNA, 19 nt, Artificial Sequence
  Description of Artificial Sequence: Synthetic oligonucleotide
cgugccgugucuccuccau

SEQ ID NO: 707532 - RNA, 19 nt, Artificial Sequence
  Description of Artificial Sequence: Synthetic oligonucleotide
gcacuacggcgugccgugu

SEQ ID NO: 707533 - RNA, 19 nt, Artificial Sequence
  Description of Artificial Sequence: Synthetic oligonucleotide
cguugccgucugcugcugu

SEQ ID NO: 707534 - RNA, 19 nt, Artificial Sequence
  Description of Artificial Sequence: Synthetic oligonucleotide
cggggugaacgugcauguu

SEQ ID NO: 707535 - RNA, 19 nt, Artificial Sequence
  Description of Artificial Sequence: Synthetic oligonucleotide
uuaaugaucuuuuauaacc

SEQ ID NO: 707536 - RNA, 19 nt, Artificial Sequence
  Description of Artificial Sequence: Synthetic oligonucleotide
uucuuaucacucaagaugg

SEQ ID NO: 707537 - RNA, 19 nt, Artificial Sequence
  Description of Artificial Sequence: Synthetic oligonucleotide
aaguccauugccuugaaag

SEQ ID NO: 707538 - RNA, 19 nt, Artificial Sequence
  Description of Artificial Sequence: Synthetic oligonucleotide
cucuuaauuaaauagagug

SEQ ID NO: 707539 - RNA, 19 nt, Artificial Sequence
  Description of Artificial Sequence: Synthetic oligonucleotide
ucagguauagaauagcuag

SEQ ID NO: 707540 - RNA, 19 nt, Artificial Sequence
  Description of Artificial Sequence: Synthetic oligonucleotide
cuagugauggccaacaccc

SEQ ID NO: 707541 - RNA, 19 nt, Artificial Sequence
  Description of Artificial Sequence: Synthetic oligonucleotide
aagggcaacucauagguag

SEQ ID NO: 707542 - RNA, 19 nt, Artificial Sequence
  Description of Artificial Sequence: Synthetic oligonucleotide
uauagaauagcuagugaug

SEQ ID NO: 707543 - RNA, 19 nt, Artificial Sequence
  Description of Artificial Sequence: Synthetic oligonucleotide
uuuuaaugaucuuuuauaa

SEQ ID NO: 707544 - RNA, 19 nt, Artificial Sequence
  Description of Artificial Sequence: Synthetic oligonucleotide
uaucucuuaauuaaauaga

SEQ ID NO: 707545 - RNA, 19 nt, Artificial Sequence
  Description of Artificial Sequence: Synthetic oligonucleotide
aaaguaccuaucuucucgg

SEQ ID NO: 707546 - RNA, 19 nt, Artificial Sequence
  Description of Artificial Sequence: Synthetic oligonucleotide
caaucugaugaccacaucg

SEQ ID NO: 707547 - RNA, 19 nt, Artificial Sequence
  Description of Artificial Sequence: Synthetic oligonucleotide
uaauccuuaagcuggagga

SEQ ID NO: 707548 - RNA, 19 nt, Artificial Sequence
  Description of Artificial Sequence: Synthetic oligonucleotide
agaauagcuagugauggcc

SEQ ID NO: 707549 - RNA, 19 nt, Artificial Sequence
  Description of Artificial Sequence: Synthetic oligonucleotide
auagacuuaagcgugaucu

SEQ ID NO: 707550 - RNA, 19 nt, Artificial Sequence
  Description of Artificial Sequence: Synthetic oligonucleotide
uugacaucccagaucaggg

SEQ ID NO: 707551 - RNA, 19 nt, Artificial Sequence
  Description of Artificial Sequence: Synthetic oligonucleotide
auaaagaagggguugagaa

SEQ ID NO: 707552 - RNA, 19 nt, Artificial Sequence
  Description of Artificial Sequence: Synthetic oligonucleotide
caaaguaccuaucuucucg

SEQ ID NO: 707553 - RNA, 19 nt, Artificial Sequence
  Description of Artificial Sequence: Synthetic oligonucleotide
guugccgaaaaucuuagag

SEQ ID NO: 707554 - RNA, 19 nt, Artificial Sequence
  Description of Artificial Sequence: Synthetic oligonucleotide
uauugugucccuuuuguga

SEQ ID NO: 707555 - RNA, 19 nt, Artificial Sequence
  Description of Artificial Sequence: Synthetic oligonucleotide
aaaaucuuagaggccugcc

SEQ ID NO: 707556 - RNA, 19 nt, Artificial Sequence
  Description of Artificial Sequence: Synthetic oligonucleotide
uauuuuggggucgaagugg

SEQ ID NO: 707557 - RNA, 19 nt, Artificial Sequence
  Description of Artificial Sequence: Synthetic oligonucleotide
aucccaacgccauagacag

SEQ ID NO: 707558 - RNA, 19 nt, Artificial Sequence
  Description of Artificial Sequence: Synthetic oligonucleotide
aauccgaaucuguuugggg

SEQ ID NO: 707559 - RNA, 19 nt, Artificial Sequence
  Description of Artificial Sequence: Synthetic oligonucleotide
uaugcucucagguauagaa

SEQ ID NO: 707560 - RNA, 19 nt, Artificial Sequence
  Description of Artificial Sequence: Synthetic oligonucleotide
gauggaauaccacaccaug

SEQ ID NO: 707561 - RNA, 19 nt, Artificial Sequence
  Description of Artificial Sequence: Synthetic oligonucleotide
ucuuuacccagaaauaauc

SEQ ID NO: 707562 - RNA, 19 nt, Artificial Sequence
  Description of Artificial Sequence: Synthetic oligonucleotide
cuuacagcgggauuuacug

SEQ ID NO: 707563 - RNA, 19 nt, Artificial Sequence
  Description of Artificial Sequence: Synthetic oligonucleotide
aacgccauagacaggggcc

SEQ ID NO: 707564 - RNA, 19 nt, Artificial Sequence
  Description of Artificial Sequence: Synthetic oligonucleotide
uguuaaauaaucucuuguu

SEQ ID NO: 707565 - RNA, 19 nt, Artificial Sequence
  Description of Artificial Sequence: Synthetic oligonucleotide
agaaugguugccgaaaauc

SEQ ID NO: 707566 - RNA, 19 nt, Artificial Sequence
  Description of Artificial Sequence: Synthetic oligonucleotide
aaaucuuagaggccugccu

SEQ ID NO: 707567 - RNA, 19 nt, Artificial Sequence
  Description of Artificial Sequence: Synthetic oligonucleotide
cacaacacaacgacgacac

SEQ ID NO: 707568 - RNA, 19 nt, Artificial Sequence
  Description of Artificial Sequence: Synthetic oligonucleotide
uuguucaaucugaugacca

SEQ ID NO: 707569 - RNA, 19 nt, Artificial Sequence
  Description of Artificial Sequence: Synthetic oligonucleotide
aguguuaaauaaucucuug

SEQ ID NO: 707570 - RNA, 19 nt, Artificial Sequence
  Description of Artificial Sequence: Synthetic oligonucleotide
uacgugagguucuucacag

SEQ ID NO: 707571 - RNA, 19 nt, Artificial Sequence
  Description of Artificial Sequence: Synthetic oligonucleotide
gaaaccuuuucguacccgc

SEQ ID NO: 707572 - RNA, 19 nt, Artificial Sequence
  Description of Artificial Sequence: Synthetic oligonucleotide
ucucuuaauuaaauagagu

SEQ ID NO: 707573 - RNA, 19 nt, Artificial Sequence
  Description of Artificial Sequence: Synthetic oligonucleotide
gauacuucccagugaacug

SEQ ID NO: 707574 - RNA, 19 nt, Artificial Sequence
  Description of Artificial Sequence: Synthetic oligonucleotide
aagcgugaucuguucauag

SEQ ID NO: 707575 - RNA, 19 nt, Artificial Sequence
  Description of Artificial Sequence: Synthetic oligonucleotide
cguguuacaauucucaucc

SEQ ID NO: 707576 - RNA, 19 nt, Artificial Sequence
  Description of Artificial Sequence: Synthetic oligonucleotide
aacucauagguagauggug

SEQ ID NO: 707577 - RNA, 19 nt, Artificial Sequence
  Description of Artificial Sequence: Synthetic oligonucleotide
ucuaucucuuaauuaaaua

SEQ ID NO: 707578 - RNA, 19 nt, Artificial Sequence
  Description of Artificial Sequence: Synthetic oligonucleotide
agcgaugugcacuaaguca

SEQ ID NO: 707579 - RNA, 19 nt, Artificial Sequence
  Description of Artificial Sequence: Synthetic oligonucleotide
uaaguagggaacuggcgug

SEQ ID NO: 707580 - RNA, 19 nt, Artificial Sequence
  Description of Artificial Sequence: Synthetic oligonucleotide
aguacgugagguucuucac

SEQ ID NO: 707581 - RNA, 19 nt, Artificial Sequence
  Description of Artificial Sequence: Synthetic oligonucleotide
agaacacgguauugugucc

SEQ ID NO: 707582 - RNA, 19 nt, Artificial Sequence
  Description of Artificial Sequence: Synthetic oligonucleotide
uaguucggggccuucacag

SEQ ID NO: 707583 - RNA, 19 nt, Artificial Sequence
  Description of Artificial Sequence: Synthetic oligonucleotide
uucccagugaacuguuccg

SEQ ID NO: 707584 - RNA, 19 nt, Artificial Sequence
  Description of Artificial Sequence: Synthetic oligonucleotide
cauccaagucagaaguacg

SEQ ID NO: 707585 - RNA, 19 nt, Artificial Sequence
  Description of Artificial Sequence: Synthetic oligonucleotide
aucucuuguugcuggggcc

SEQ ID NO: 707586 - RNA, 19 nt, Artificial Sequence
  Description of Artificial Sequence: Synthetic oligonucleotide
aaguaccuaucuucucggg

SEQ ID NO: 707587 - RNA, 19 nt, Artificial Sequence
  Description of Artificial Sequence: Synthetic oligonucleotide
acaggagcguuguucaauc

SEQ ID NO: 707588 - RNA, 19 nt, Artificial Sequence
  Description of Artificial Sequence: Synthetic oligonucleotide
aaauagaguguuaaauaau

SEQ ID NO: 707589 - RNA, 19 nt, Artificial Sequence
  Description of Artificial Sequence: Synthetic oligonucleotide
acuuaagcgugaucuguuc

SEQ ID NO: 707590 - RNA, 19 nt, Artificial Sequence
  Description of Artificial Sequence: Synthetic oligonucleotide
accuaucuggauuuggacu

SEQ ID NO: 707591 - RNA, 19 nt, Artificial Sequence
  Description of Artificial Sequence: Synthetic oligonucleotide
uucccuagaaugguugccg

SEQ ID NO: 707592 - RNA, 19 nt, Artificial Sequence
  Description of Artificial Sequence: Synthetic oligonucleotide
cagaacacgguauuguguc

SEQ ID NO: 707593 - RNA, 19 nt, Artificial Sequence
  Description of Artificial Sequence: Synthetic oligonucleotide
uuacagcgggauuuacugg

SEQ ID NO: 707594 - RNA, 19 nt, Artificial Sequence
  Description of Artificial Sequence: Synthetic oligonucleotide
aaucugaugaccacaucgu

SEQ ID NO: 707595 - RNA, 19 nt, Artificial Sequence
  Description of Artificial Sequence: Synthetic oligonucleotide
caacacccggagaagaagg

SEQ ID NO: 707596 - RNA, 19 nt, Artificial Sequence
  Description of Artificial Sequence: Synthetic oligonucleotide
ucuuugcgcuggcagagag

SEQ ID NO: 707597 - RNA, 19 nt, Artificial Sequence
  Description of Artificial Sequence: Synthetic oligonucleotide
acuguuccgcaaccggugc

SEQ ID NO: 707598 - RNA, 19 nt, Artificial Sequence
  Description of Artificial Sequence: Synthetic oligonucleotide
aggcauguuguacacaccu

SEQ ID NO: 707599 - RNA, 19 nt, Artificial Sequence
  Description of Artificial Sequence: Synthetic oligonucleotide
gucaaugcccuucccaugc

SEQ ID NO: 707600 - RNA, 19 nt, Artificial Sequence
  Description of Artificial Sequence: Synthetic oligonucleotide
uucgugacugcuguauggg

SEQ ID NO: 707601 - RNA, 19 nt, Artificial Sequence
  Description of Artificial Sequence: Synthetic oligonucleotide
cuagcauccgcuugauggc

SEQ ID NO: 707602 - RNA, 19 nt, Artificial Sequence
  Description of Artificial Sequence: Synthetic oligonucleotide
uguucaaucugaugaccac

SEQ ID NO: 707603 - RNA, 19 nt, Artificial Sequence
  Description of Artificial Sequence: Synthetic oligonucleotide
gauuuggacuccaccagag

SEQ ID NO: 707604 - RNA, 19 nt, Artificial Sequence
  Description of Artificial Sequence: Synthetic oligonucleotide
ucauccaagucagaaguac

SEQ ID NO: 707605 - RNA, 19 nt, Artificial Sequence
  Description of Artificial Sequence: Synthetic oligonucleotide
ggguagaagagacguaugg

SEQ ID NO: 707606 - RNA, 19 nt, Artificial Sequence
  Description of Artificial Sequence: Synthetic oligonucleotide
ugguugccgaaaaucuuag

SEQ ID NO: 707607 - RNA, 19 nt, Artificial Sequence
  Description of Artificial Sequence: Synthetic oligonucleotide
guauagaauagcuagugau

SEQ ID NO: 707608 - RNA, 19 nt, Artificial Sequence
  Description of Artificial Sequence: Synthetic oligonucleotide
cccgccauagacuuaagcg

SEQ ID NO: 707609 - RNA, 19 nt, Artificial Sequence
  Description of Artificial Sequence: Synthetic oligonucleotide
agacguaugguggucuugg

SEQ ID NO: 707610 - RNA, 19 nt, Artificial Sequence
  Description of Artificial Sequence: Synthetic oligonucleotide
uuucguacccgcuucuuau

SEQ ID NO: 707611 - RNA, 19 nt, Artificial Sequence
  Description of Artificial Sequence: Synthetic oligonucleotide
uguucccuagaaugguugc

SEQ ID NO: 707612 - RNA, 19 nt, Artificial Sequence
  Description of Artificial Sequence: Synthetic oligonucleotide
gacauugugcccugacccc

SEQ ID NO: 707613 - RNA, 19 nt, Artificial Sequence
  Description of Artificial Sequence: Synthetic oligonucleotide
uuagaggccugccucucug

SEQ ID NO: 707614 - RNA, 19 nt, Artificial Sequence
  Description of Artificial Sequence: Synthetic oligonucleotide
accuuuucguacccgcuuc

SEQ ID NO: 707615 - RNA, 19 nt, Artificial Sequence
  Description of Artificial Sequence: Synthetic oligonucleotide
uucacaggccaauuuaauu

SEQ ID NO: 707616 - RNA, 19 nt, Artificial Sequence
  Description of Artificial Sequence: Synthetic oligonucleotide
uccuuaagcuggaggaaga

SEQ ID NO: 707617 - RNA, 19 nt, Artificial Sequence
  Description of Artificial Sequence: Synthetic oligonucleotide
gaaaaucuuagaggccugc

SEQ ID NO: 707618 - RNA, 19 nt, Artificial Sequence
  Description of Artificial Sequence: Synthetic oligonucleotide
acuggcguguuacaauucu

SEQ ID NO: 707619 - RNA, 19 nt, Artificial Sequence
  Description of Artificial Sequence: Synthetic oligonucleotide
uguaugcucucagguauag

SEQ ID NO: 707620 - RNA, 19 nt, Artificial Sequence
  Description of Artificial Sequence: Synthetic oligonucleotide
aggagcguuguucaaucug

SEQ ID NO: 707621 - RNA, 19 nt, Artificial Sequence
  Description of Artificial Sequence: Synthetic oligonucleotide
gaacacgguauuguguccc

SEQ ID NO: 707622 - RNA, 19 nt, Artificial Sequence
  Description of Artificial Sequence: Synthetic oligonucleotide
aguucaaaguaccuaucuu

SEQ ID NO: 707623 - RNA, 19 nt, Artificial Sequence
  Description of Artificial Sequence: Synthetic oligonucleotide
auuuuggggucgaaguggg

SEQ ID NO: 707624 - RNA, 19 nt, Artificial Sequence
  Description of Artificial Sequence: Synthetic oligonucleotide
cacaccaugacgacgacaa

SEQ ID NO: 707625 - RNA, 19 nt, Artificial Sequence
  Description of Artificial Sequence: Synthetic oligonucleotide
uagauccgcgcgcagcucc

SEQ ID NO: 707626 - RNA, 19 nt, Artificial Sequence
  Description of Artificial Sequence: Synthetic oligonucleotide
acguaugguggucuuggag

SEQ ID NO: 707627 - RNA, 19 nt, Artificial Sequence
  Description of Artificial Sequence: Synthetic oligonucleotide
ucaguguguccaccuaucu

SEQ ID NO: 707628 - RNA, 19 nt, Artificial Sequence
  Description of Artificial Sequence: Synthetic oligonucleotide
caccaugacgacgacaaag

SEQ ID NO: 707629 - RNA, 19 nt, Artificial Sequence
  Description of Artificial Sequence: Synthetic oligonucleotide
uuguacuggcaccaggcau

SEQ ID NO: 707630 - RNA, 19 nt, Artificial Sequence
  Description of Artificial Sequence: Synthetic oligonucleotide
ggaaguagcaaccucucuc

SEQ ID NO: 707631 - RNA, 19 nt, Artificial Sequence
  Description of Artificial Sequence: Synthetic oligonucleotide
uagugauggccaacacccg

SEQ ID NO: 707632 - RNA, 19 nt, Artificial Sequence
  Description of Artificial Sequence: Synthetic oligonucleotide
ggguugacaucccagauca

SEQ ID NO: 707633 - RNA, 19 nt, Artificial Sequence
  Description of Artificial Sequence: Synthetic oligonucleotide
aacuuacagcgggauuuac

SEQ ID NO: 707634 - RNA, 19 nt, Artificial Sequence
  Description of Artificial Sequence: Synthetic oligonucleotide
auagcuagugauggccaac

SEQ ID NO: 707635 - RNA, 19 nt, Artificial Sequence
  Description of Artificial Sequence: Synthetic oligonucleotide
agaacacccuccccaauga

SEQ ID NO: 707636 - RNA, 19 nt, Artificial Sequence
  Description of Artificial Sequence: Synthetic oligonucleotide
uccauugccuugaaagcua

SEQ ID NO: 707637 - RNA, 19 nt, Artificial Sequence
  Description of Artificial Sequence: Synthetic oligonucleotide
uuuucguacccgcuucuua

SEQ ID NO: 707638 - RNA, 19 nt, Artificial Sequence
  Description of Artificial Sequence: Synthetic oligonucleotide
ucuaguucggggccuucac

SEQ ID NO: 707639 - RNA, 19 nt, Artificial Sequence
  Description of Artificial Sequence: Synthetic oligonucleotide
aacuguuccgcaaccggug

SEQ ID NO: 707640 - RNA, 19 nt, Artificial Sequence
  Description of Artificial Sequence: Synthetic oligonucleotide
ucuuucgugacugcuguau

SEQ ID NO: 707641 - RNA, 19 nt, Artificial Sequence
  Description of Artificial Sequence: Synthetic oligonucleotide
uccaccuaucuggauuugg

SEQ ID NO: 707642 - RNA, 19 nt, Artificial Sequence
  Description of Artificial Sequence: Synthetic oligonucleotide
cuguucccuagaaugguug

SEQ ID NO: 707643 - RNA, 19 nt, Artificial Sequence
  Description of Artificial Sequence: Synthetic oligonucleotide
caucccaacgccauagaca

SEQ ID NO: 707644 - RNA, 19 nt, Artificial Sequence
  Description of Artificial Sequence: Synthetic oligonucleotide
ggcggggcgagguagaucc

SEQ ID NO: 707645 - RNA, 19 nt, Artificial Sequence
  Description of Artificial Sequence: Synthetic oligonucleotide
ugugucccuuuugugaaug

SEQ ID NO: 707646 - RNA, 19 nt, Artificial Sequence
  Description of Artificial Sequence: Synthetic oligonucleotide
ucgaagugggccgacucag

SEQ ID NO: 707647 - RNA, 19 nt, Artificial Sequence
  Description of Artificial Sequence: Synthetic oligonucleotide
gagaggggaugccauagca

SEQ ID NO: 707648 - RNA, 19 nt, Artificial Sequence
  Description of Artificial Sequence: Synthetic oligonucleotide
aagagacguaugguggucu

SEQ ID NO: 707649 - RNA, 19 nt, Artificial Sequence
  Description of Artificial Sequence: Synthetic oligonucleotide
agacuuaagcgugaucugu

SEQ ID NO: 707650 - RNA, 19 nt, Artificial Sequence
  Description of Artificial Sequence: Synthetic oligonucleotide
agcuagugauggccaacac

SEQ ID NO: 707651 - RNA, 19 nt, Artificial Sequence
  Description of Artificial Sequence: Synthetic oligonucleotide
uagggaacuggcguguuac

SEQ ID NO: 707652 - RNA, 19 nt, Artificial Sequence
  Description of Artificial Sequence: Synthetic oligonucleotide
agguagauccgcgcgcagc

SEQ ID NO: 707653 - RNA, 19 nt, Artificial Sequence
  Description of Artificial Sequence: Synthetic oligonucleotide
auguuguacacaccuuuaa

SEQ ID NO: 707654 - RNA, 19 nt, Artificial Sequence
  Description of Artificial Sequence: Synthetic oligonucleotide
ucuuaucacucaagauggu

SEQ ID NO: 707655 - RNA, 19 nt, Artificial Sequence
  Description of Artificial Sequence: Synthetic oligonucleotide
guucggggccuucacaggc

SEQ ID NO: 707656 - RNA, 19 nt, Artificial Sequence
  Description of Artificial Sequence: Synthetic oligonucleotide
aacgacgacacuggaggcu

SEQ ID NO: 707657 - RNA, 19 nt, Artificial Sequence
  Description of Artificial Sequence: Synthetic oligonucleotide
cucucagguauagaauagc

SEQ ID NO: 707658 - RNA, 19 nt, Artificial Sequence
  Description of Artificial Sequence: Synthetic oligonucleotide
aguucggggccuucacagg

SEQ ID NO: 707659 - RNA, 19 nt, Artificial Sequence
  Description of Artificial Sequence: Synthetic oligonucleotide
aagugggccgacucagggu

SEQ ID NO: 707660 - RNA, 19 nt, Artificial Sequence
  Description of Artificial Sequence: Synthetic oligonucleotide
cguaugguggucuuggagc

SEQ ID NO: 707661 - RNA, 19 nt, Artificial Sequence
  Description of Artificial Sequence: Synthetic oligonucleotide
cucauagguagaugguguc

SEQ ID NO: 707662 - RNA, 19 nt, Artificial Sequence
  Description of Artificial Sequence: Synthetic oligonucleotide
cuugaucuuucgugacugc

SEQ ID NO: 707663 - RNA, 19 nt, Artificial Sequence
  Description of Artificial Sequence: Synthetic oligonucleotide
uguccaccuaucuggauuu

SEQ ID NO: 707664 - RNA, 19 nt, Artificial Sequence
  Description of Artificial Sequence: Synthetic oligonucleotide
ugggaaguagcaaccucuc

SEQ ID NO: 707665 - RNA, 19 nt, Artificial Sequence
  Description of Artificial Sequence: Synthetic oligonucleotide
gcuagugauggccaacacc

SEQ ID NO: 707666 - RNA, 19 nt, Artificial Sequence
  Description of Artificial Sequence: Synthetic oligonucleotide
acgugagguucuucacagc

SEQ ID NO: 707667 - RNA, 19 nt, Artificial Sequence
  Description of Artificial Sequence: Synthetic oligonucleotide
caccuaucuggauuuggac

SEQ ID NO: 707668 - RNA, 19 nt, Artificial Sequence
  Description of Artificial Sequence: Synthetic oligonucleotide
caaccggugcccauucccc

SEQ ID NO: 707669 - RNA, 19 nt, Artificial Sequence
  Description of Artificial Sequence: Synthetic oligonucleotide
gaucuuucgugacugcugu

SEQ ID NO: 707670 - RNA, 19 nt, Artificial Sequence
  Description of Artificial Sequence: Synthetic oligonucleotide
ggagauggaauaccacacc

SEQ ID NO: 707671 - RNA, 19 nt, Artificial Sequence
  Description of Artificial Sequence: Synthetic oligonucleotide
ucucgggagauggaauacc

SEQ ID NO: 707672 - RNA, 19 nt, Artificial Sequence
  Description of Artificial Sequence: Synthetic oligonucleotide
cuuugcgcuggcagagagg

SEQ ID NO: 707673 - RNA, 19 nt, Artificial Sequence
  Description of Artificial Sequence: Synthetic oligonucleotide
cuuaagcgugaucuguuca

SEQ ID NO: 707674 - RNA, 19 nt, Artificial Sequence
  Description of Artificial Sequence: Synthetic oligonucleotide
accaugacgacgacaaaga

SEQ ID NO: 707675 - RNA, 19 nt, Artificial Sequence
  Description of Artificial Sequence: Synthetic oligonucleotide
agcgugaucuguucauagu

SEQ ID NO: 707676 - RNA, 19 nt, Artificial Sequence
  Description of Artificial Sequence: Synthetic oligonucleotide
gacuccaccagaguagcca

SEQ ID NO: 707677 - RNA, 19 nt, Artificial Sequence
  Description of Artificial Sequence: Synthetic oligonucleotide
aauccaguggaaguccauu

SEQ ID NO: 707678 - RNA, 19 nt, Artificial Sequence
  Description of Artificial Sequence: Synthetic oligonucleotide
acgacaaagaccagagcca

SEQ ID NO: 707679 - RNA, 19 nt, Artificial Sequence
  Description of Artificial Sequence: Synthetic oligonucleotide
uagcuagugauggccaaca

SEQ ID NO: 707680 - RNA, 19 nt, Artificial Sequence
  Description of Artificial Sequence: Synthetic oligonucleotide
aaaccuuuucguacccgcu

SEQ ID NO: 707681 - RNA, 19 nt, Artificial Sequence
  Description of Artificial Sequence: Synthetic oligonucleotide
gguuucaauccaguggaag

SEQ ID NO: 707682 - RNA, 19 nt, Artificial Sequence
  Description of Artificial Sequence: Synthetic oligonucleotide
ggaggcuguuuccagaaac

SEQ ID NO: 707683 - RNA, 19 nt, Artificial Sequence
  Description of Artificial Sequence: Synthetic oligonucleotide
aacuggcguguuacaauuc

SEQ ID NO: 707684 - RNA, 19 nt, Artificial Sequence
  Description of Artificial Sequence: Synthetic oligonucleotide
gacgacgacaaagaccaga

SEQ ID NO: 707685 - RNA, 19 nt, Artificial Sequence
  Description of Artificial Sequence: Synthetic oligonucleotide
cccaacgccauagacaggg

SEQ ID NO: 707686 - RNA, 19 nt, Artificial Sequence
  Description of Artificial Sequence: Synthetic oligonucleotide
guacgugagguucuucaca

SEQ ID NO: 707687 - RNA, 19 nt, Artificial Sequence
  Description of Artificial Sequence: Synthetic oligonucleotide
cacuaagucacagaggugu

SEQ ID NO: 707688 - RNA, 19 nt, Artificial Sequence
  Description of Artificial Sequence: Synthetic oligonucleotide
auccaagucagaaguacgu

SEQ ID NO: 707689 - RNA, 19 nt, Artificial Sequence
  Description of Artificial Sequence: Synthetic oligonucleotide
ucgggagauggaauaccac

SEQ ID NO: 707690 - RNA, 19 nt, Artificial Sequence
  Description of Artificial Sequence: Synthetic oligonucleotide
ucccagugaacuguuccgc

SEQ ID NO: 707691 - RNA, 19 nt, Artificial Sequence
  Description of Artificial Sequence: Synthetic oligonucleotide
aagagcgugucuggguugu

SEQ ID NO: 707692 - RNA, 19 nt, Artificial Sequence
  Description of Artificial Sequence: Synthetic oligonucleotide
cuccgauccgcuaggcgcc

SEQ ID NO: 707693 - RNA, 19 nt, Artificial Sequence
  Description of Artificial Sequence: Synthetic oligonucleotide
uccgaaucuguuugggguu

SEQ ID NO: 707694 - RNA, 19 nt, Artificial Sequence
  Description of Artificial Sequence: Synthetic oligonucleotide
accaagagcgugucugggu

SEQ ID NO: 707695 - RNA, 19 nt, Artificial Sequence
  Description of Artificial Sequence: Synthetic oligonucleotide
aaccggugcccauucccca

SEQ ID NO: 707696 - RNA, 19 nt, Artificial Sequence
  Description of Artificial Sequence: Synthetic oligonucleotide
uccgcuaggcgcccgggcu

SEQ ID NO: 707697 - RNA, 19 nt, Artificial Sequence
  Description of Artificial Sequence: Synthetic oligonucleotide
uggguacccgaagccagcg

SEQ ID NO: 707698 - RNA, 19 nt, Artificial Sequence
  Description of Artificial Sequence: Synthetic oligonucleotide
uucggggccuucacaggcc

SEQ ID NO: 707699 - RNA, 19 nt, Artificial Sequence
  Description of Artificial Sequence: Synthetic oligonucleotide
agaggggaugccauagcag

SEQ ID NO: 707700 - RNA, 19 nt, Artificial Sequence
  Description of Artificial Sequence: Synthetic oligonucleotide
ugauggcuagcagaccugu

SEQ ID NO: 707701 - RNA, 19 nt, Artificial Sequence
  Description of Artificial Sequence: Synthetic oligonucleotide
ucccuagaaugguugccga

SEQ ID NO: 707702 - RNA, 19 nt, Artificial Sequence
  Description of Artificial Sequence: Synthetic oligonucleotide
ggcgagguagauccgcgcg

SEQ ID NO: 707703 - RNA, 19 nt, Artificial Sequence
  Description of Artificial Sequence: Synthetic oligonucleotide
caggugaggccccuucuag

SEQ ID NO: 707704 - RNA, 19 nt, Artificial Sequence
  Description of Artificial Sequence: Synthetic oligonucleotide
cacaucguacuuguugaug

SEQ ID NO: 707705 - RNA, 19 nt, Artificial Sequence
  Description of Artificial Sequence: Synthetic oligonucleotide
auccgcuaggcgcccgggc

SEQ ID NO: 707706 - RNA, 19 nt, Artificial Sequence
  Description of Artificial Sequence: Synthetic oligonucleotide
uacccgaagccagcgaugu

SEQ ID NO: 707707 - RNA, 19 nt, Artificial Sequence
  Description of Artificial Sequence: Synthetic oligonucleotide
uggggagaagugucauccc

SEQ ID NO: 707708 - RNA, 19 nt, Artificial Sequence
  Description of Artificial Sequence: Synthetic oligonucleotide
caacgacgacacuggaggc

SEQ ID NO: 707709 - RNA, 19 nt, Artificial Sequence
  Description of Artificial Sequence: Synthetic oligonucleotide
ggcuccuguagccucagug

SEQ ID NO: 707710 - RNA, 19 nt, Artificial Sequence
  Description of Artificial Sequence: Synthetic oligonucleotide
aacacccggagaagaaggu

SEQ ID NO: 707711 - RNA, 19 nt, Artificial Sequence
  Description of Artificial Sequence: Synthetic oligonucleotide
cauugccuugaaagcuacc

SEQ ID NO: 707712 - RNA, 19 nt, Artificial Sequence
  Description of Artificial Sequence: Synthetic oligonucleotide
aggcaucccaacgccauag

SEQ ID NO: 707713 - RNA, 19 nt, Artificial Sequence
  Description of Artificial Sequence: Synthetic oligonucleotide
guaaguucaaguggguugu

SEQ ID NO: 707714 - RNA, 19 nt, Artificial Sequence
  Description of Artificial Sequence: Synthetic oligonucleotide
cuagaaugguugccgaaaa

SEQ ID NO: 707715 - RNA, 19 nt, Artificial Sequence
  Description of Artificial Sequence: Synthetic oligonucleotide
gcgaugugcacuaagucac

SEQ ID NO: 707716 - RNA, 19 nt, Artificial Sequence
  Description of Artificial Sequence: Synthetic oligonucleotide
uacccgcuucuuaucacuc

SEQ ID NO: 707717 - RNA, 19 nt, Artificial Sequence
  Description of Artificial Sequence: Synthetic oligonucleotide
cagcgaugugcacuaaguc

SEQ ID NO: 707718 - RNA, 19 nt, Artificial Sequence
  Description of Artificial Sequence: Synthetic oligonucleotide
auggcuaaguagggaacug

SEQ ID NO: 707719 - RNA, 19 nt, Artificial Sequence
  Description of Artificial Sequence: Synthetic oligonucleotide
gaagagacguauggugguc

SEQ ID NO: 707720 - RNA, 19 nt, Artificial Sequence
  Description of Artificial Sequence: Synthetic oligonucleotide
uucguacccgcuucuuauc

SEQ ID NO: 707721 - RNA, 19 nt, Artificial Sequence
  Description of Artificial Sequence: Synthetic oligonucleotide
ucgcggguggagcggggcg

SEQ ID NO: 707722 - RNA, 19 nt, Artificial Sequence
  Description of Artificial Sequence: Synthetic oligonucleotide
gauggcuaaguagggaacu

SEQ ID NO: 707723 - RNA, 19 nt, Artificial Sequence
  Description of Artificial Sequence: Synthetic oligonucleotide
gugaucuguucauaguagu

SEQ ID NO: 707724 - RNA, 19 nt, Artificial Sequence
  Description of Artificial Sequence: Synthetic oligonucleotide
cauguuguacacaccuuua

SEQ ID NO: 707725 - RNA, 19 nt, Artificial Sequence
  Description of Artificial Sequence: Synthetic oligonucleotide
aggugaggccccuucuaga

SEQ ID NO: 707726 - RNA, 19 nt, Artificial Sequence
  Description of Artificial Sequence: Synthetic oligonucleotide
gaacuggcguguuacaauu

SEQ ID NO: 707727 - RNA, 19 nt, Artificial Sequence
  Description of Artificial Sequence: Synthetic oligonucleotide
auagguagauggugucuuu

SEQ ID NO: 707728 - RNA, 19 nt, Artificial Sequence
  Description of Artificial Sequence: Synthetic oligonucleotide
uaagcgugaucuguucaua

SEQ ID NO: 707729 - RNA, 19 nt, Artificial Sequence
  Description of Artificial Sequence: Synthetic oligonucleotide
cagaccugugguuggcuuc

SEQ ID NO: 707730 - RNA, 19 nt, Artificial Sequence
  Description of Artificial Sequence: Synthetic oligonucleotide
cagagguguagggccaagg

SEQ ID NO: 707731 - RNA, 19 nt, Artificial Sequence
  Description of Artificial Sequence: Synthetic oligonucleotide
agauggaauaccacaccau

SEQ ID NO: 707732 - RNA, 19 nt, Artificial Sequence
  Description of Artificial Sequence: Synthetic oligonucleotide
ccgcuugauggcuagggcc

SEQ ID NO: 707733 - RNA, 19 nt, Artificial Sequence
  Description of Artificial Sequence: Synthetic oligonucleotide
cuucucgggagauggaaua

SEQ ID NO: 707734 - RNA, 19 nt, Artificial Sequence
  Description of Artificial Sequence: Synthetic oligonucleotide
gcaaccggugcccauuccc

SEQ ID NO: 707735 - RNA, 19 nt, Artificial Sequence
  Description of Artificial Sequence: Synthetic oligonucleotide
agcgggauuuacuggucau

SEQ ID NO: 707736 - RNA, 19 nt, Artificial Sequence
  Description of Artificial Sequence: Synthetic oligonucleotide
gguugagaauccgaaucug

SEQ ID NO: 707737 - RNA, 19 nt, Artificial Sequence
  Description of Artificial Sequence: Synthetic oligonucleotide
ggauuuacuggucauguuu

SEQ ID NO: 707738 - RNA, 19 nt, Artificial Sequence
  Description of Artificial Sequence: Synthetic oligonucleotide
gagacguaugguggucuug

SEQ ID NO: 707739 - RNA, 19 nt, Artificial Sequence
  Description of Artificial Sequence: Synthetic oligonucleotide
cuguuccgcaaccggugcc

SEQ ID NO: 707740 - RNA, 19 nt, Artificial Sequence
  Description of Artificial Sequence: Synthetic oligonucleotide
ucccaacgccauagacagg

SEQ ID NO: 707741 - RNA, 19 nt, Artificial Sequence
  Description of Artificial Sequence: Synthetic oligonucleotide
aggaacuuacagcgggauu

SEQ ID NO: 707742 - RNA, 19 nt, Artificial Sequence
  Description of Artificial Sequence: Synthetic oligonucleotide
ccaagucagaaguacguga

SEQ ID NO: 707743 - RNA, 19 nt, Artificial Sequence
  Description of Artificial Sequence: Synthetic oligonucleotide
guagccucaguguguccac

SEQ ID NO: 707744 - RNA, 19 nt, Artificial Sequence
  Description of Artificial Sequence: Synthetic oligonucleotide
gucgaagugggccgacuca

SEQ ID NO: 707745 - RNA, 19 nt, Artificial Sequence
  Description of Artificial Sequence: Synthetic oligonucleotide
cacccucgcggguggagcg

SEQ ID NO: 707746 - RNA, 19 nt, Artificial Sequence
  Description of Artificial Sequence: Synthetic oligonucleotide
ggagcguuguucaaucuga

SEQ ID NO: 707747 - RNA, 19 nt, Artificial Sequence
  Description of Artificial Sequence: Synthetic oligonucleotide
gaguguuaaauaaucucuu

SEQ ID NO: 707748 - RNA, 19 nt, Artificial Sequence
  Description of Artificial Sequence: Synthetic oligonucleotide
caucccggcugccucgggc

SEQ ID NO: 707749 - RNA, 19 nt, Artificial Sequence
  Description of Artificial Sequence: Synthetic oligonucleotide
gugcccauuccccaccaca

SEQ ID NO: 707750 - RNA, 19 nt, Artificial Sequence
  Description of Artificial Sequence: Synthetic oligonucleotide
gagguagauccgcgcgcag

SEQ ID NO: 707751 - RNA, 19 nt, Artificial Sequence
  Description of Artificial Sequence: Synthetic oligonucleotide
gauggcuagcagaccugug

SEQ ID NO: 707752 - RNA, 19 nt, Artificial Sequence
  Description of Artificial Sequence: Synthetic oligonucleotide
gauggccaacacccggaga

SEQ ID NO: 707753 - RNA, 19 nt, Artificial Sequence
  Description of Artificial Sequence: Synthetic oligonucleotide
uucuuguuguaggccucug

SEQ ID NO: 707754 - RNA, 19 nt, Artificial Sequence
  Description of Artificial Sequence: Synthetic oligonucleotide
agagacguaugguggucuu

SEQ ID NO: 707755 - RNA, 19 nt, Artificial Sequence
  Description of Artificial Sequence: Synthetic oligonucleotide
gcguguuacaauucucauc

SEQ ID NO: 707756 - RNA, 19 nt, Artificial Sequence
  Description of Artificial Sequence: Synthetic oligonucleotide
uugcgcuggcagagagggg

SEQ ID NO: 707757 - RNA, 19 nt, Artificial Sequence
  Description of Artificial Sequence: Synthetic oligonucleotide
accaggaccaagagcgugu

SEQ ID NO: 707758 - RNA, 19 nt, Artificial Sequence
  Description of Artificial Sequence: Synthetic oligonucleotide
aaagggcaacucauaggua

SEQ ID NO: 707759 - RNA, 19 nt, Artificial Sequence
  Description of Artificial Sequence: Synthetic oligonucleotide
gugaggccccuucuagaug

SEQ ID NO: 707760 - RNA, 19 nt, Artificial Sequence
  Description of Artificial Sequence: Synthetic oligonucleotide
aggguagaagagacguaug

SEQ ID NO: 707761 - RNA, 19 nt, Artificial Sequence
  Description of Artificial Sequence: Synthetic oligonucleotide
cuaguucggggccuucaca

SEQ ID NO: 707762 - RNA, 19 nt, Artificial Sequence
  Description of Artificial Sequence: Synthetic oligonucleotide
gaaucuguuugggguugac

SEQ ID NO: 707763 - RNA, 19 nt, Artificial Sequence
  Description of Artificial Sequence: Synthetic oligonucleotide
gacguaugguggucuugga

SEQ ID NO: 707764 - RNA, 19 nt, Artificial Sequence
  Description of Artificial Sequence: Synthetic oligonucleotide
uggccacucccagaacacc

SEQ ID NO: 707765 - RNA, 19 nt, Artificial Sequence
  Description of Artificial Sequence: Synthetic oligonucleotide
cacccggagaagaaggucu

SEQ ID NO: 707766 - RNA, 19 nt, Artificial Sequence
  Description of Artificial Sequence: Synthetic oligonucleotide
gcagcuccgauccgcuagg

SEQ ID NO: 707767 - RNA, 19 nt, Artificial Sequence
  Description of Artificial Sequence: Synthetic oligonucleotide
guccauugccuugaaagcu

SEQ ID NO: 707768 - RNA, 19 nt, Artificial Sequence
  Description of Artificial Sequence: Synthetic oligonucleotide
ggaacuuacagcgggauuu

SEQ ID NO: 707769 - RNA, 19 nt, Artificial Sequence
  Description of Artificial Sequence: Synthetic oligonucleotide
gauccgcuaggcgcccggg

SEQ ID NO: 707770 - RNA, 19 nt, Artificial Sequence
  Description of Artificial Sequence: Synthetic oligonucleotide
cagguauagaauagcuagu

SEQ ID NO: 707771 - RNA, 19 nt, Artificial Sequence
  Description of Artificial Sequence: Synthetic oligonucleotide
gugauggcuagcagaccug

SEQ ID NO: 707772 - RNA, 19 nt, Artificial Sequence
  Description of Artificial Sequence: Synthetic oligonucleotide
cgccauagacuuaagcgug

SEQ ID NO: 707773 - RNA, 19 nt, Artificial Sequence
  Description of Artificial Sequence: Synthetic oligonucleotide
gcgugaucuguucauagua

SEQ ID NO: 707774 - RNA, 19 nt, Artificial Sequence
  Description of Artificial Sequence: Synthetic oligonucleotide
agggcaacucauagguaga

SEQ ID NO: 707775 - RNA, 19 nt, Artificial Sequence
  Description of Artificial Sequence: Synthetic oligonucleotide
guacccgaagccagcgaug

SEQ ID NO: 707776 - RNA, 19 nt, Artificial Sequence
  Description of Artificial Sequence: Synthetic oligonucleotide
guacccgcuucuuaucacu

SEQ ID NO: 707777 - RNA, 19 nt, Artificial Sequence
  Description of Artificial Sequence: Synthetic oligonucleotide
caacucauagguagauggu

SEQ ID NO: 707778 - RNA, 19 nt, Artificial Sequence
  Description of Artificial Sequence: Synthetic oligonucleotide
cucgggccacccucgcggg

SEQ ID NO: 707779 - RNA, 19 nt, Artificial Sequence
  Description of Artificial Sequence: Synthetic oligonucleotide
guaggccucuggguacccg

SEQ ID NO: 707780 - RNA, 19 nt, Artificial Sequence
  Description of Artificial Sequence: Synthetic oligonucleotide
ggggcauagccucuccuga

SEQ ID NO: 707781 - RNA, 19 nt, Artificial Sequence
  Description of Artificial Sequence: Synthetic oligonucleotide
gccagcgaugugcacuaag

SEQ ID NO: 707782 - RNA, 19 nt, Artificial Sequence
  Description of Artificial Sequence: Synthetic oligonucleotide
ggcaacucauagguagaug

SEQ ID NO: 707783 - RNA, 19 nt, Artificial Sequence
  Description of Artificial Sequence: Synthetic oligonucleotide
gcauccgcuugauggcuag

SEQ ID NO: 707784 - RNA, 19 nt, Artificial Sequence
  Description of Artificial Sequence: Synthetic oligonucleotide
ggucgaagugggccgacuc

SEQ ID NO: 707785 - RNA, 19 nt, Artificial Sequence
  Description of Artificial Sequence: Synthetic oligonucleotide
ccauugccuugaaagcuac

SEQ ID NO: 707786 - RNA, 19 nt, Artificial Sequence
  Description of Artificial Sequence: Synthetic oligonucleotide
acuaagucacagaggugua

SEQ ID NO: 707787 - RNA, 19 nt, Artificial Sequence
  Description of Artificial Sequence: Synthetic oligonucleotide
gucaucccggcugccucgg

SEQ ID NO: 707788 - RNA, 19 nt, Artificial Sequence
  Description of Artificial Sequence: Synthetic oligonucleotide
ugccucacccuggaagcau

SEQ ID NO: 707789 - RNA, 19 nt, Artificial Sequence
  Description of Artificial Sequence: Synthetic oligonucleotide
acaggccaauuuaauuuua

SEQ ID NO: 707790 - RNA, 19 nt, Artificial Sequence
  Description of Artificial Sequence: Synthetic oligonucleotide
ccaccuaucuggauuugga

SEQ ID NO: 707791 - RNA, 19 nt, Artificial Sequence
  Description of Artificial Sequence: Synthetic oligonucleotide
cauccgcuugauggcuagg

SEQ ID NO: 707792 - RNA, 19 nt, Artificial Sequence
  Description of Artificial Sequence: Synthetic oligonucleotide
gacuuaagcgugaucuguu

SEQ ID NO: 707793 - RNA, 19 nt, Artificial Sequence
  Description of Artificial Sequence: Synthetic oligonucleotide
aucuuucgugacugcugua

SEQ ID NO: 707794 - RNA, 19 nt, Artificial Sequence
  Description of Artificial Sequence: Synthetic oligonucleotide
gcauguuguacacaccuuu

SEQ ID NO: 707795 - RNA, 19 nt, Artificial Sequence
  Description of Artificial Sequence: Synthetic oligonucleotide
cuguaugcucucagguaua

SEQ ID NO: 707796 - RNA, 19 nt, Artificial Sequence
  Description of Artificial Sequence: Synthetic oligonucleotide
ugggccgacucaggguaga

SEQ ID NO: 707797 - RNA, 19 nt, Artificial Sequence
  Description of Artificial Sequence: Synthetic oligonucleotide
gguugccgaaaaucuuaga

SEQ ID NO: 707798 - RNA, 19 nt, Artificial Sequence
  Description of Artificial Sequence: Synthetic oligonucleotide
ggggcgagguagauccgcg

SEQ ID NO: 707799 - RNA, 19 nt, Artificial Sequence
  Description of Artificial Sequence: Synthetic oligonucleotide
cauagguagauggugucuu

SEQ ID NO: 707800 - RNA, 19 nt, Artificial Sequence
  Description of Artificial Sequence: Synthetic oligonucleotide
cgaaaaucuuagaggccug

SEQ ID NO: 707801 - RNA, 19 nt, Artificial Sequence
  Description of Artificial Sequence: Synthetic oligonucleotide
cugaccccgccauagacuu

SEQ ID NO: 707802 - RNA, 19 nt, Artificial Sequence
  Description of Artificial Sequence: Synthetic oligonucleotide
guguguccaccuaucugga

SEQ ID NO: 707803 - RNA, 19 nt, Artificial Sequence
  Description of Artificial Sequence: Synthetic oligonucleotide
gguacccgaagccagcgau

SEQ ID NO: 707804 - RNA, 19 nt, Artificial Sequence
  Description of Artificial Sequence: Synthetic oligonucleotide
uccgauccgcuaggcgccc

SEQ ID NO: 707805 - RNA, 19 nt, Artificial Sequence
  Description of Artificial Sequence: Synthetic oligonucleotide
agcagauagcaggguuccu

SEQ ID NO: 707806 - RNA, 19 nt, Artificial Sequence
  Description of Artificial Sequence: Synthetic oligonucleotide
agaucaggggaggcuguuu

SEQ ID NO: 707807 - RNA, 19 nt, Artificial Sequence
  Description of Artificial Sequence: Synthetic oligonucleotide
ggugaggccccuucuagau

SEQ ID NO: 707808 - RNA, 19 nt, Artificial Sequence
  Description of Artificial Sequence: Synthetic oligonucleotide
ccgcuucuuaucacucaag

SEQ ID NO: 707809 - RNA, 19 nt, Artificial Sequence
  Description of Artificial Sequence: Synthetic oligonucleotide
ccuagaaugguugccgaaa

SEQ ID NO: 707810 - RNA, 19 nt, Artificial Sequence
  Description of Artificial Sequence: Synthetic oligonucleotide
acgacacuggaggcucugu

SEQ ID NO: 707811 - RNA, 19 nt, Artificial Sequence
  Description of Artificial Sequence: Synthetic oligonucleotide
cucgcggguggagcggggc

SEQ ID NO: 707812 - RNA, 19 nt, Artificial Sequence
  Description of Artificial Sequence: Synthetic oligonucleotide
gggcgagguagauccgcgc

SEQ ID NO: 707813 - RNA, 19 nt, Artificial Sequence
  Description of Artificial Sequence: Synthetic oligonucleotide
ccgccauagacuuaagcgu

SEQ ID NO: 707814 - RNA, 19 nt, Artificial Sequence
  Description of Artificial Sequence: Synthetic oligonucleotide
acccucgcggguggagcgg

SEQ ID NO: 707815 - RNA, 19 nt, Artificial Sequence
  Description of Artificial Sequence: Synthetic oligonucleotide
cccugaccccgccauagac

SEQ ID NO: 707816 - RNA, 19 nt, Artificial Sequence
  Description of Artificial Sequence: Synthetic oligonucleotide
cccuaccuuggccaggcuc

SEQ ID NO: 707817 - RNA, 19 nt, Artificial Sequence
  Description of Artificial Sequence: Synthetic oligonucleotide
ggccgacucaggguagaag

SEQ ID NO: 707818 - RNA, 19 nt, Artificial Sequence
  Description of Artificial Sequence: Synthetic oligonucleotide
ucgggccacccucgcgggu

SEQ ID NO: 707819 - RNA, 19 nt, Artificial Sequence
  Description of Artificial Sequence: Synthetic oligonucleotide
cuuagaggccugccucucu

SEQ ID NO: 707820 - RNA, 19 nt, Artificial Sequence
  Description of Artificial Sequence: Synthetic oligonucleotide
gcacuaagucacagaggug

SEQ ID NO: 707821 - RNA, 19 nt, Artificial Sequence
  Description of Artificial Sequence: Synthetic oligonucleotide
cgaagugggccgacucagg

SEQ ID NO: 707822 - RNA, 19 nt, Artificial Sequence
  Description of Artificial Sequence: Synthetic oligonucleotide
ccacaacacaacgacgaca

SEQ ID NO: 707823 - RNA, 19 nt, Artificial Sequence
  Description of Artificial Sequence: Synthetic oligonucleotide
guccaccuaucuggauuug

SEQ ID NO: 707824 - RNA, 19 nt, Artificial Sequence
  Description of Artificial Sequence: Synthetic oligonucleotide
gcagaacacgguauugugu

SEQ ID NO: 707825 - RNA, 19 nt, Artificial Sequence
  Description of Artificial Sequence: Synthetic oligonucleotide
ccagcgaugugcacuaagu

SEQ ID NO: 707826 - RNA, 19 nt, Artificial Sequence
  Description of Artificial Sequence: Synthetic oligonucleotide
gccauagacuuaagcguga

SEQ ID NO: 707827 - RNA, 19 nt, Artificial Sequence
  Description of Artificial Sequence: Synthetic oligonucleotide
ggcguguuacaauucucau

SEQ ID NO: 707828 - RNA, 19 nt, Artificial Sequence
  Description of Artificial Sequence: Synthetic oligonucleotide
ggcauagccucuccugagu

SEQ ID NO: 707829 - RNA, 19 nt, Artificial Sequence
  Description of Artificial Sequence: Synthetic oligonucleotide
cccagugaacuguuccgca

SEQ ID NO: 707830 - RNA, 19 nt, Artificial Sequence
  Description of Artificial Sequence: Synthetic oligonucleotide
cguacccgcuucuuaucac

SEQ ID NO: 707831 - RNA, 19 nt, Artificial Sequence
  Description of Artificial Sequence: Synthetic oligonucleotide
cagcuccgauccgcuaggc

SEQ ID NO: 707832 - RNA, 19 nt, Artificial Sequence
  Description of Artificial Sequence: Synthetic oligonucleotide
gggaaguagcaaccucucu

SEQ ID NO: 707833 - RNA, 19 nt, Artificial Sequence
  Description of Artificial Sequence: Synthetic oligonucleotide
cgguauugugucccuuuug

SEQ ID NO: 707834 - RNA, 19 nt, Artificial Sequence
  Description of Artificial Sequence: Synthetic oligonucleotide
acccggagaagaaggucuu

SEQ ID NO: 707835 - RNA, 19 nt, Artificial Sequence
  Description of Artificial Sequence: Synthetic oligonucleotide
gagcguuguucaaucugau

SEQ ID NO: 707836 - RNA, 19 nt, Artificial Sequence
  Description of Artificial Sequence: Synthetic oligonucleotide
cucuuugcgcuggcagaga

SEQ ID NO: 707837 - RNA, 19 nt, Artificial Sequence
  Description of Artificial Sequence: Synthetic oligonucleotide
gaccagcccacuguauuuu

SEQ ID NO: 707838 - RNA, 19 nt, Artificial Sequence
  Description of Artificial Sequence: Synthetic oligonucleotide
caggagcguuguucaaucu

SEQ ID NO: 707839 - RNA, 19 nt, Artificial Sequence
  Description of Artificial Sequence: Synthetic oligonucleotide
caggaacuuacagcgggau

SEQ ID NO: 707840 - RNA, 19 nt, Artificial Sequence
  Description of Artificial Sequence: Synthetic oligonucleotide
ccacccucgcggguggagc

SEQ ID NO: 707841 - RNA, 19 nt, Artificial Sequence
  Description of Artificial Sequence: Synthetic oligonucleotide
ccugaccccgccauagacu

SEQ ID NO: 707842 - RNA, 19 nt, Artificial Sequence
  Description of Artificial Sequence: Synthetic oligonucleotide
cccuagaaugguugccgaa

SEQ ID NO: 707843 - RNA, 19 nt, Artificial Sequence
  Description of Artificial Sequence: Synthetic oligonucleotide
gcgcgcagcuccgauccgc

SEQ ID NO: 707844 - RNA, 19 nt, Artificial Sequence
  Description of Artificial Sequence: Synthetic oligonucleotide
ggguaaguucaaguggguu

SEQ ID NO: 707845 - RNA, 19 nt, Artificial Sequence
  Description of Artificial Sequence: Synthetic oligonucleotide
ccccuucuagauggagccc

SEQ ID NO: 707846 - RNA, 19 nt, Artificial Sequence
  Description of Artificial Sequence: Synthetic oligonucleotide
cgauccgcuaggcgcccgg

SEQ ID NO: 707847 - RNA, 19 nt, Artificial Sequence
  Description of Artificial Sequence: Synthetic oligonucleotide
ccgcuaggcgcccgggcug

SEQ ID NO: 707848 - RNA, 19 nt, Artificial Sequence
  Description of Artificial Sequence: Synthetic oligonucleotide
agagcgugucuggguuguu

SEQ ID NO: 707849 - RNA, 19 nt, Artificial Sequence
  Description of Artificial Sequence: Synthetic oligonucleotide
ggccuucacaggccaauuu

SEQ ID NO: 707850 - RNA, 19 nt, Artificial Sequence
  Description of Artificial Sequence: Synthetic oligonucleotide
cggggcgagguagauccgc

SEQ ID NO: 707851 - RNA, 19 nt, Artificial Sequence
  Description of Artificial Sequence: Synthetic oligonucleotide
ccgcaaccggugcccauuc

SEQ ID NO: 707852 - RNA, 19 nt, Artificial Sequence
  Description of Artificial Sequence: Synthetic oligonucleotide
gggcaacucauagguagau

SEQ ID NO: 707853 - RNA, 19 nt, Artificial Sequence
  Description of Artificial Sequence: Synthetic oligonucleotide
ccucgcggguggagcgggg

SEQ ID NO: 707854 - RNA, 19 nt, Artificial Sequence
  Description of Artificial Sequence: Synthetic oligonucleotide
cgagguagauccgcgcgca

SEQ ID NO: 707855 - RNA, 19 nt, Artificial Sequence
  Description of Artificial Sequence: Synthetic oligonucleotide
cgggauuuacuggucaugu

SEQ ID NO: 707856 - RNA, 19 nt, Artificial Sequence
  Description of Artificial Sequence: Synthetic oligonucleotide
cgcaaccggugcccauucc

SEQ ID NO: 707857 - RNA, 19 nt, Artificial Sequence
  Description of Artificial Sequence: Synthetic oligonucleotide
gcccugaccccgccauaga

SEQ ID NO: 707858 - RNA, 19 nt, Artificial Sequence
  Description of Artificial Sequence: Synthetic oligonucleotide
gcggggcgagguagauccg

SEQ ID NO: 707859 - RNA, 19 nt, Artificial Sequence
  Description of Artificial Sequence: Synthetic oligonucleotide
cgcuaggcgcccgggcugg

SEQ ID NO: 707860 - RNA, 19 nt, Artificial Sequence
  Description of Artificial Sequence: Synthetic oligonucleotide
ggggucgaagugggccgac

SEQ ID NO: 707861 - RNA, 19 nt, Artificial Sequence
  Description of Artificial Sequence: Synthetic oligonucleotide
gccauagacaggggccacu

SEQ ID NO: 707862 - RNA, 19 nt, Artificial Sequence
  Description of Artificial Sequence: Synthetic oligonucleotide
ccuuaagcuggaggaagau

SEQ ID NO: 707863 - RNA, 19 nt, Artificial Sequence
  Description of Artificial Sequence: Synthetic oligonucleotide
cagaucaggggaggcuguu

SEQ ID NO: 707864 - RNA, 19 nt, Artificial Sequence
  Description of Artificial Sequence: Synthetic oligonucleotide
ccacaucguacuuguugau

SEQ ID NO: 707865 - RNA, 19 nt, Artificial Sequence
  Description of Artificial Sequence: Synthetic oligonucleotide
ccgauccgcuaggcgcccg

SEQ ID NO: 707866 - RNA, 19 nt, Artificial Sequence
  Description of Artificial Sequence: Synthetic oligonucleotide
gggcggggcgagguagauc

SEQ ID NO: 707867 - RNA, 19 nt, Artificial Sequence
  Description of Artificial Sequence: Synthetic oligonucleotide
gggccgacucaggguagaa

SEQ ID NO: 707868 - RNA, 19 nt, Artificial Sequence
  Description of Artificial Sequence: Synthetic oligonucleotide
cgcgcgcagcuccgauccg

SEQ ID NO: 707869 - RNA, 19 nt, Artificial Sequence
  Description of Artificial Sequence: Synthetic oligonucleotide
cggggcggggcgagguaga

SEQ ID NO: 707870 - RNA, 19 nt, Artificial Sequence
  Description of Artificial Sequence: Synthetic oligonucleotide
ccccuaccuuggccaggcu

SEQ ID NO: 707871 - RNA, 19 nt, Artificial Sequence
  Description of Artificial Sequence: Synthetic oligonucleotide
uuaaaagcugguaaaaggg

SEQ ID NO: 707872 - RNA, 19 nt, Artificial Sequence
  Description of Artificial Sequence: Synthetic oligonucleotide
ucuaagagcaacaauagca

SEQ ID NO: 707873 - RNA, 19 nt, Artificial Sequence
  Description of Artificial Sequence: Synthetic oligonucleotide
uuuaucauuuaucaaacgc

SEQ ID NO: 707874 - RNA, 19 nt, Artificial Sequence
  Description of Artificial Sequence: Synthetic oligonucleotide
uuaaagaauacaaagucca

SEQ ID NO: 707875 - RNA, 19 nt, Artificial Sequence
  Description of Artificial Sequence: Synthetic oligonucleotide
caaaccuugacauuaaacg

SEQ ID NO: 707876 - RNA, 19 nt, Artificial Sequence
  Description of Artificial Sequence: Synthetic oligonucleotide
aaauacaggucuucugacc

SEQ ID NO: 707877 - RNA, 19 nt, Artificial Sequence
  Description of Artificial Sequence: Synthetic oligonucleotide
guuaaaagcugguaaaagg

SEQ ID NO: 707878 - RNA, 19 nt, Artificial Sequence
  Description of Artificial Sequence: Synthetic oligonucleotide
aagauuaauucccacaagu

SEQ ID NO: 707879 - RNA, 19 nt, Artificial Sequence
  Description of Artificial Sequence: Synthetic oligonucleotide
ucuauguuuacuuauggac

SEQ ID NO: 707880 - RNA, 19 nt, Artificial Sequence
  Description of Artificial Sequence: Synthetic oligonucleotide
uuaacuauguuaacuagga

SEQ ID NO: 707881 - RNA, 19 nt, Artificial Sequence
  Description of Artificial Sequence: Synthetic oligonucleotide
uccacuauaaaagacaucu

SEQ ID NO: 707882 - RNA, 19 nt, Artificial Sequence
  Description of Artificial Sequence: Synthetic oligonucleotide
guaguuaaauuauuuaaag

SEQ ID NO: 707883 - RNA, 19 nt, Artificial Sequence
  Description of Artificial Sequence: Synthetic oligonucleotide
cauuaaacgagacaagugc

SEQ ID NO: 707884 - RNA, 19 nt, Artificial Sequence
  Description of Artificial Sequence: Synthetic oligonucleotide
auucccacaaguuuucagc

SEQ ID NO: 707885 - RNA, 19 nt, Artificial Sequence
  Description of Artificial Sequence: Synthetic oligonucleotide
ucaaguauaguuuuguuua

SEQ ID NO: 707886 - RNA, 19 nt, Artificial Sequence
  Description of Artificial Sequence: Synthetic oligonucleotide
ugcuauggguaucagacgg

SEQ ID NO: 707887 - RNA, 19 nt, Artificial Sequence
  Description of Artificial Sequence: Synthetic oligonucleotide
uaucagacgguuaaaagcu

SEQ ID NO: 707888 - RNA, 19 nt, Artificial Sequence
  Description of Artificial Sequence: Synthetic oligonucleotide
guuucuacggccaagaagc

SEQ ID NO: 707889 - RNA, 19 nt, Artificial Sequence
  Description of Artificial Sequence: Synthetic oligonucleotide
gaguauuuguucuacuggg

SEQ ID NO: 707890 - RNA, 19 nt, Artificial Sequence
  Description of Artificial Sequence: Synthetic oligonucleotide
uuagcauggaauccaacag

SEQ ID NO: 707891 - RNA, 19 nt, Artificial Sequence
  Description of Artificial Sequence: Synthetic oligonucleotide
aguauaaagagugaggugu

SEQ ID NO: 707892 - RNA, 19 nt, Artificial Sequence
  Description of Artificial Sequence: Synthetic oligonucleotide
uuauggacaagcuuuaaaa

SEQ ID NO: 707893 - RNA, 19 nt, Artificial Sequence
  Description of Artificial Sequence: Synthetic oligonucleotide
uuacuuauggacaagcuuu

SEQ ID NO: 707894 - RNA, 19 nt, Artificial Sequence
  Description of Artificial Sequence: Synthetic oligonucleotide
aauagcucuuuagcuaucc

SEQ ID NO: 707895 - RNA, 19 nt, Artificial Sequence
  Description of Artificial Sequence: Synthetic oligonucleotide
aacuaggagaguuugccug

SEQ ID NO: 707896 - RNA, 19 nt, Artificial Sequence
  Description of Artificial Sequence: Synthetic oligonucleotide
agaaaaugcaaaccuugac

SEQ ID NO: 707897 - RNA, 19 nt, Artificial Sequence
  Description of Artificial Sequence: Synthetic oligonucleotide
ucaagcguuacuaaacaca

SEQ ID NO: 707898 - RNA, 19 nt, Artificial Sequence
  Description of Artificial Sequence: Synthetic oligonucleotide
aggguuuauaaccccaccc

SEQ ID NO: 707899 - RNA, 19 nt, Artificial Sequence
  Description of Artificial Sequence: Synthetic oligonucleotide
aaacgcugcaucaaaauag

SEQ ID NO: 707900 - RNA, 19 nt, Artificial Sequence
  Description of Artificial Sequence: Synthetic oligonucleotide
uuuguuaaguauuugcuua

SEQ ID NO: 707901 - RNA, 19 nt, Artificial Sequence
  Description of Artificial Sequence: Synthetic oligonucleotide
acuauguuaacuaggagag

SEQ ID NO: 707902 - RNA, 19 nt, Artificial Sequence
  Description of Artificial Sequence: Synthetic oligonucleotide
acuguaugaguauuuguuc

SEQ ID NO: 707903 - RNA, 19 nt, Artificial Sequence
  Description of Artificial Sequence: Synthetic oligonucleotide
uguuucuacggccaagaag

SEQ ID NO: 707904 - RNA, 19 nt, Artificial Sequence
  Description of Artificial Sequence: Synthetic oligonucleotide
ugcgugaugaccucuuucg

SEQ ID NO: 707905 - RNA, 19 nt, Artificial Sequence
  Description of Artificial Sequence: Synthetic oligonucleotide
agauaguugacccaaugcu

SEQ ID NO: 707906 - RNA, 19 nt, Artificial Sequence
  Description of Artificial Sequence: Synthetic oligonucleotide
acucccaauacucugcagg

SEQ ID NO: 707907 - RNA, 19 nt, Artificial Sequence
  Description of Artificial Sequence: Synthetic oligonucleotide
uauaaccccacccuuaaaa

SEQ ID NO: 707908 - RNA, 19 nt, Artificial Sequence
  Description of Artificial Sequence: Synthetic oligonucleotide
acuggaguaaccuucguca

SEQ ID NO: 707909 - RNA, 19 nt, Artificial Sequence
  Description of Artificial Sequence: Synthetic oligonucleotide
uuaaggguaguuaaauuau

SEQ ID NO: 707910 - RNA, 19 nt, Artificial Sequence
  Description of Artificial Sequence: Synthetic oligonucleotide
caaguuuucagcugcugcg

SEQ ID NO: 707911 - RNA, 19 nt, Artificial Sequence
  Description of Artificial Sequence: Synthetic oligonucleotide
cuaagagcaacaauagcac

SEQ ID NO: 707912 - RNA, 19 nt, Artificial Sequence
  Description of Artificial Sequence: Synthetic oligonucleotide
aaaccgaguguugugugcc

SEQ ID NO: 707913 - RNA, 19 nt, Artificial Sequence
  Description of Artificial Sequence: Synthetic oligonucleotide
uaaaagcugguaaaaggga

SEQ ID NO: 707914 - RNA, 19 nt, Artificial Sequence
  Description of Artificial Sequence: Synthetic oligonucleotide
ugauuauccugucuuuucc

SEQ ID NO: 707915 - RNA, 19 nt, Artificial Sequence
  Description of Artificial Sequence: Synthetic oligonucleotide
uuaaacgagacaagugcug

SEQ ID NO: 707916 - RNA, 19 nt, Artificial Sequence
  Description of Artificial Sequence: Synthetic oligonucleotide
ugauuuuguuucuacggcc

SEQ ID NO: 707917 - RNA, 19 nt, Artificial Sequence
  Description of Artificial Sequence: Synthetic oligonucleotide
caagcguuacuaaacacag

SEQ ID NO: 707918 - RNA, 19 nt, Artificial Sequence
  Description of Artificial Sequence: Synthetic oligonucleotide
uauuuguucuacuggggag

SEQ ID NO: 707919 - RNA, 19 nt, Artificial Sequence
  Description of Artificial Sequence: Synthetic oligonucleotide
aaugcaaaccuugacauua

SEQ ID NO: 707920 - RNA, 19 nt, Artificial Sequence
  Description of Artificial Sequence: Synthetic oligonucleotide
uuucaagcguuacuaaaca

SEQ ID NO: 707921 - RNA, 19 nt, Artificial Sequence
  Description of Artificial Sequence: Synthetic oligonucleotide
gacgguacugaauuggccc

SEQ ID NO: 707922 - RNA, 19 nt, Artificial Sequence
  Description of Artificial Sequence: Synthetic oligonucleotide
uuaauagcucuuuagcuau

SEQ ID NO: 707923 - RNA, 19 nt, Artificial Sequence
  Description of Artificial Sequence: Synthetic oligonucleotide
acuaggagaguuugccugc

SEQ ID NO: 707924 - RNA, 19 nt, Artificial Sequence
  Description of Artificial Sequence: Synthetic oligonucleotide
aaacaguuaucaaaaucuc

SEQ ID NO: 707925 - RNA, 19 nt, Artificial Sequence
  Description of Artificial Sequence: Synthetic oligonucleotide
cuuucaagcguuacuaaac

SEQ ID NO: 707926 - RNA, 19 nt, Artificial Sequence
  Description of Artificial Sequence: Synthetic oligonucleotide
uacugaauuggcccagugg

SEQ ID NO: 707927 - RNA, 19 nt, Artificial Sequence
  Description of Artificial Sequence: Synthetic oligonucleotide
gucuacucaacauagcaug

SEQ ID NO: 707928 - RNA, 19 nt, Artificial Sequence
  Description of Artificial Sequence: Synthetic oligonucleotide
gagauaguugacccaaugc

SEQ ID NO: 707929 - RNA, 19 nt, Artificial Sequence
  Description of Artificial Sequence: Synthetic oligonucleotide
aaccuugacauuaaacgag

SEQ ID NO: 707930 - RNA, 19 nt, Artificial Sequence
  Description of Artificial Sequence: Synthetic oligonucleotide
acuaagucaacucaagauu

SEQ ID NO: 707931 - RNA, 19 nt, Artificial Sequence
  Description of Artificial Sequence: Synthetic oligonucleotide
uauccaagauuaaugccug

SEQ ID NO: 707932 - RNA, 19 nt, Artificial Sequence
  Description of Artificial Sequence: Synthetic oligonucleotide
auuaaugccugauuauccu

SEQ ID NO: 707933 - RNA, 19 nt, Artificial Sequence
  Description of Artificial Sequence: Synthetic oligonucleotide
uauaaaagacaucuauguu

SEQ ID NO: 707934 - RNA, 19 nt, Artificial Sequence
  Description of Artificial Sequence: Synthetic oligonucleotide
uagaaaaugcaaaccuuga

SEQ ID NO: 707935 - RNA, 19 nt, Artificial Sequence
  Description of Artificial Sequence: Synthetic oligonucleotide
ggaaguuugacacuggcac

SEQ ID NO: 707936 - RNA, 19 nt, Artificial Sequence
  Description of Artificial Sequence: Synthetic oligonucleotide
aaagggaaugauccuaaaa

SEQ ID NO: 707937 - RNA, 19 nt, Artificial Sequence
  Description of Artificial Sequence: Synthetic oligonucleotide
cugaacuuaacuauguuaa

SEQ ID NO: 707938 - RNA, 19 nt, Artificial Sequence
  Description of Artificial Sequence: Synthetic oligonucleotide
gagaguuugccugcuaugg

SEQ ID NO: 707939 - RNA, 19 nt, Artificial Sequence
  Description of Artificial Sequence: Synthetic oligonucleotide
caucuauguuuacuuaugg

SEQ ID NO: 707940 - RNA, 19 nt, Artificial Sequence
  Description of Artificial Sequence: Synthetic oligonucleotide
uauguuaacuaggagaguu

SEQ ID NO: 707941 - RNA, 19 nt, Artificial Sequence
  Description of Artificial Sequence: Synthetic oligonucleotide
gauaguugacccaaugcug

SEQ ID NO: 707942 - RNA, 19 nt, Artificial Sequence
  Description of Artificial Sequence: Synthetic oligonucleotide
uucuguagagcacgaaaug

SEQ ID NO: 707943 - RNA, 19 nt, Artificial Sequence
  Description of Artificial Sequence: Synthetic oligonucleotide
cuauguuuacuuauggaca

SEQ ID NO: 707944 - RNA, 19 nt, Artificial Sequence
  Description of Artificial Sequence: Synthetic oligonucleotide
aaugccugauuauccuguc

SEQ ID NO: 707945 - RNA, 19 nt, Artificial Sequence
  Description of Artificial Sequence: Synthetic oligonucleotide
aaugcagguaagguuagcu

SEQ ID NO: 707946 - RNA, 19 nt, Artificial Sequence
  Description of Artificial Sequence: Synthetic oligonucleotide
uguuaacuaggagaguuug

SEQ ID NO: 707947 - RNA, 19 nt, Artificial Sequence
  Description of Artificial Sequence: Synthetic oligonucleotide
uacucuaagucugauuuug

SEQ ID NO: 707948 - RNA, 19 nt, Artificial Sequence
  Description of Artificial Sequence: Synthetic oligonucleotide
gaugaccucuuucgaaagg

SEQ ID NO: 707949 - RNA, 19 nt, Artificial Sequence
  Description of Artificial Sequence: Synthetic oligonucleotide
ucuacucaacauagcauga

SEQ ID NO: 707950 - RNA, 19 nt, Artificial Sequence
  Description of Artificial Sequence: Synthetic oligonucleotide
gaggcugaguuuuaauagc

SEQ ID NO: 707951 - RNA, 19 nt, Artificial Sequence
  Description of Artificial Sequence: Synthetic oligonucleotide
agcauugaccuucgucucc

SEQ ID NO: 707952 - RNA, 19 nt, Artificial Sequence
  Description of Artificial Sequence: Synthetic oligonucleotide
uuaaugccugauuauccug

SEQ ID NO: 707953 - RNA, 19 nt, Artificial Sequence
  Description of Artificial Sequence: Synthetic oligonucleotide
uucgucacucccaauacuc

SEQ ID NO: 707954 - RNA, 19 nt, Artificial Sequence
  Description of Artificial Sequence: Synthetic oligonucleotide
agaacuuucaagcguuacu

SEQ ID NO: 707955 - RNA, 19 nt, Artificial Sequence
  Description of Artificial Sequence: Synthetic oligonucleotide
uaaacugaggcugaguuuu

SEQ ID NO: 707956 - RNA, 19 nt, Artificial Sequence
  Description of Artificial Sequence: Synthetic oligonucleotide
aaguuaugaaaaucauaaa

SEQ ID NO: 707957 - RNA, 19 nt, Artificial Sequence
  Description of Artificial Sequence: Synthetic oligonucleotide
auaaagagugaggugucgg

SEQ ID NO: 707958 - RNA, 19 nt, Artificial Sequence
  Description of Artificial Sequence: Synthetic oligonucleotide
agagacgguacugaauugg

SEQ ID NO: 707959 - RNA, 19 nt, Artificial Sequence
  Description of Artificial Sequence: Synthetic oligonucleotide
uuacuaaacacaggcgcag

SEQ ID NO: 707960 - RNA, 19 nt, Artificial Sequence
  Description of Artificial Sequence: Synthetic oligonucleotide
aucagagcggucugaagag

SEQ ID NO: 707961 - RNA, 19 nt, Artificial Sequence
  Description of Artificial Sequence: Synthetic oligonucleotide
ugcccuggugcuaacaaug

SEQ ID NO: 707962 - RNA, 19 nt, Artificial Sequence
  Description of Artificial Sequence: Synthetic oligonucleotide
uguucucguuccaaguucu

SEQ ID NO: 707963 - RNA, 19 nt, Artificial Sequence
  Description of Artificial Sequence: Synthetic oligonucleotide
uuagcuauccaagauuaau

SEQ ID NO: 707964 - RNA, 19 nt, Artificial Sequence
  Description of Artificial Sequence: Synthetic oligonucleotide
agagauaguugacccaaug

SEQ ID NO: 707965 - RNA, 19 nt, Artificial Sequence
  Description of Artificial Sequence: Synthetic oligonucleotide
uaaacgagacaagugcuga

SEQ ID NO: 707966 - RNA, 19 nt, Artificial Sequence
  Description of Artificial Sequence: Synthetic oligonucleotide
agaguuugccugcuauggg

SEQ ID NO: 707967 - RNA, 19 nt, Artificial Sequence
  Description of Artificial Sequence: Synthetic oligonucleotide
ugucuacucaacauagcau

SEQ ID NO: 707968 - RNA, 19 nt, Artificial Sequence
  Description of Artificial Sequence: Synthetic oligonucleotide
ggaucagaacuuucaagcg

SEQ ID NO: 707969 - RNA, 19 nt, Artificial Sequence
  Description of Artificial Sequence: Synthetic oligonucleotide
augauccuaaaagaaaaca

SEQ ID NO: 707970 - RNA, 19 nt, Artificial Sequence
  Description of Artificial Sequence: Synthetic oligonucleotide
cucaggaaggguuuauaac

SEQ ID NO: 707971 - RNA, 19 nt, Artificial Sequence
  Description of Artificial Sequence: Synthetic oligonucleotide
ugcuaaauaugguuguuuu

SEQ ID NO: 707972 - RNA, 19 nt, Artificial Sequence
  Description of Artificial Sequence: Synthetic oligonucleotide
caaguauaguuuuguuuag

SEQ ID NO: 707973 - RNA, 19 nt, Artificial Sequence
  Description of Artificial Sequence: Synthetic oligonucleotide
ugaugaccucuuucgaaag

SEQ ID NO: 707974 - RNA, 19 nt, Artificial Sequence
  Description of Artificial Sequence: Synthetic oligonucleotide
ugcugcgagaaacuguacu

SEQ ID NO: 707975 - RNA, 19 nt, Artificial Sequence
  Description of Artificial Sequence: Synthetic oligonucleotide
aguugacccaaugcugucc

SEQ ID NO: 707976 - RNA, 19 nt, Artificial Sequence
  Description of Artificial Sequence: Synthetic oligonucleotide
caagauuaaugccugauua

SEQ ID NO: 707977 - RNA, 19 nt, Artificial Sequence
  Description of Artificial Sequence: Synthetic oligonucleotide
uaguuuugaaggagacugc

SEQ ID NO: 707978 - RNA, 19 nt, Artificial Sequence
  Description of Artificial Sequence: Synthetic oligonucleotide
auuaaacgagacaagugcu

SEQ ID NO: 707979 - RNA, 19 nt, Artificial Sequence
  Description of Artificial Sequence: Synthetic oligonucleotide
cuuuagcuauccaagauua

SEQ ID NO: 707980 - RNA, 19 nt, Artificial Sequence
  Description of Artificial Sequence: Synthetic oligonucleotide
ucaaacgcugcaucaaaau

SEQ ID NO: 707981 - RNA, 19 nt, Artificial Sequence
  Description of Artificial Sequence: Synthetic oligonucleotide
guauuuguucuacugggga

SEQ ID NO: 707982 - RNA, 19 nt, Artificial Sequence
  Description of Artificial Sequence: Synthetic oligonucleotide
cugguaaaagggaaugauc

SEQ ID NO: 707983 - RNA, 19 nt, Artificial Sequence
  Description of Artificial Sequence: Synthetic oligonucleotide
aagagacgguacugaauug

SEQ ID NO: 707984 - RNA, 19 nt, Artificial Sequence
  Description of Artificial Sequence: Synthetic oligonucleotide
acuuucaagcguuacuaaa

SEQ ID NO: 707985 - RNA, 19 nt, Artificial Sequence
  Description of Artificial Sequence: Synthetic oligonucleotide
cucaagauuaauucccaca

SEQ ID NO: 707986 - RNA, 19 nt, Artificial Sequence
  Description of Artificial Sequence: Synthetic oligonucleotide
gauaaacugaggcugaguu

SEQ ID NO: 707987 - RNA, 19 nt, Artificial Sequence
  Description of Artificial Sequence: Synthetic oligonucleotide
cucccaauacucugcaggc

SEQ ID NO: 707988 - RNA, 19 nt, Artificial Sequence
  Description of Artificial Sequence: Synthetic oligonucleotide
ggucugaagagauaguuga

SEQ ID NO: 707989 - RNA, 19 nt, Artificial Sequence
  Description of Artificial Sequence: Synthetic oligonucleotide
uucaagcguuacuaaacac

SEQ ID NO: 707990 - RNA, 19 nt, Artificial Sequence
  Description of Artificial Sequence: Synthetic oligonucleotide
auccguauccgcuccaucu

SEQ ID NO: 707991 - RNA, 19 nt, Artificial Sequence
  Description of Artificial Sequence: Synthetic oligonucleotide
aucagcaauaaguuaugaa

SEQ ID NO: 707992 - RNA, 19 nt, Artificial Sequence
  Description of Artificial Sequence: Synthetic oligonucleotide
uucccacaaguuuucagcu

SEQ ID NO: 707993 - RNA, 19 nt, Artificial Sequence
  Description of Artificial Sequence: Synthetic oligonucleotide
uguaugaguauuuguucua

SEQ ID NO: 707994 - RNA, 19 nt, Artificial Sequence
  Description of Artificial Sequence: Synthetic oligonucleotide
aaguauaguuuuguuuagu

SEQ ID NO: 707995 - RNA, 19 nt, Artificial Sequence
  Description of Artificial Sequence: Synthetic oligonucleotide
gaagagacgguacugaauu

SEQ ID NO: 707996 - RNA, 19 nt, Artificial Sequence
  Description of Artificial Sequence: Synthetic oligonucleotide
ugcgcugcuaaauaugguu

SEQ ID NO: 707997 - RNA, 19 nt, Artificial Sequence
  Description of Artificial Sequence: Synthetic oligonucleotide
cuugacauuaaacgagaca

SEQ ID NO: 707998 - RNA, 19 nt, Artificial Sequence
  Description of Artificial Sequence: Synthetic oligonucleotide
uauguugccgaagggcugc

SEQ ID NO: 707999 - RNA, 19 nt, Artificial Sequence
  Description of Artificial Sequence: Synthetic oligonucleotide
ugcccguagaaaaugcaaa

SEQ ID NO: 708000 - RNA, 19 nt, Artificial Sequence
  Description of Artificial Sequence: Synthetic oligonucleotide
auaguugacccaaugcugu

SEQ ID NO: 708001 - RNA, 19 nt, Artificial Sequence
  Description of Artificial Sequence: Synthetic oligonucleotide
uguucuacuggggaggcuc

SEQ ID NO: 708002 - RNA, 19 nt, Artificial Sequence
  Description of Artificial Sequence: Synthetic oligonucleotide
ggcuagaaauuucacuuag

SEQ ID NO: 708003 - RNA, 19 nt, Artificial Sequence
  Description of Artificial Sequence: Synthetic oligonucleotide
gguuagcuggcuuagcaug

SEQ ID NO: 708004 - RNA, 19 nt, Artificial Sequence
  Description of Artificial Sequence: Synthetic oligonucleotide
aaaagggaaugauccuaaa

SEQ ID NO: 708005 - RNA, 19 nt, Artificial Sequence
  Description of Artificial Sequence: Synthetic oligonucleotide
cguuacuaaacacaggcgc

SEQ ID NO: 708006 - RNA, 19 nt, Artificial Sequence
  Description of Artificial Sequence: Synthetic oligonucleotide
aacgcugcaucaaaauaga

SEQ ID NO: 708007 - RNA, 19 nt, Artificial Sequence
  Description of Artificial Sequence: Synthetic oligonucleotide
gaacuuucaagcguuacua

SEQ ID NO: 708008 - RNA, 19 nt, Artificial Sequence
  Description of Artificial Sequence: Synthetic oligonucleotide
uguuucgcccugcacugug

SEQ ID NO: 708009 - RNA, 19 nt, Artificial Sequence
  Description of Artificial Sequence: Synthetic oligonucleotide
acucaacauagcaugagca

SEQ ID NO: 708010 - RNA, 19 nt, Artificial Sequence
  Description of Artificial Sequence: Synthetic oligonucleotide
uacuaaacacaggcgcagg

SEQ ID NO: 708011 - RNA, 19 nt, Artificial Sequence
  Description of Artificial Sequence: Synthetic oligonucleotide
gacauuaaacgagacaagu

SEQ ID NO: 708012 - RNA, 19 nt, Artificial Sequence
  Description of Artificial Sequence: Synthetic oligonucleotide
uuuagcuauccaagauuaa

SEQ ID NO: 708013 - RNA, 19 nt, Artificial Sequence
  Description of Artificial Sequence: Synthetic oligonucleotide
uaaccuucgucacucccaa

SEQ ID NO: 708014 - RNA, 19 nt, Artificial Sequence
  Description of Artificial Sequence: Synthetic oligonucleotide
uuuguucuacuggggaggc

SEQ ID NO: 708015 - RNA, 19 nt, Artificial Sequence
  Description of Artificial Sequence: Synthetic oligonucleotide
ucaugggaaucucuccuuc

SEQ ID NO: 708016 - RNA, 19 nt, Artificial Sequence
  Description of Artificial Sequence: Synthetic oligonucleotide
aaacgagacaagugcugaa

SEQ ID NO: 708017 - RNA, 19 nt, Artificial Sequence
  Description of Artificial Sequence: Synthetic oligonucleotide
gaucagaacuuucaagcgu

SEQ ID NO: 708018 - RNA, 19 nt, Artificial Sequence
  Description of Artificial Sequence: Synthetic oligonucleotide
agacgguacugaauuggcc

SEQ ID NO: 708019 - RNA, 19 nt, Artificial Sequence
  Description of Artificial Sequence: Synthetic oligonucleotide
auugaucauccacaggcuu

SEQ ID NO: 708020 - RNA, 19 nt, Artificial Sequence
  Description of Artificial Sequence: Synthetic oligonucleotide
guugccgaagggcugcaag

SEQ ID NO: 708021 - RNA, 19 nt, Artificial Sequence
  Description of Artificial Sequence: Synthetic oligonucleotide
gugcaguauaaagagugag

SEQ ID NO: 708022 - RNA, 19 nt, Artificial Sequence
  Description of Artificial Sequence: Synthetic oligonucleotide
cuucaaguuucuugaugug

SEQ ID NO: 708023 - RNA, 19 nt, Artificial Sequence
  Description of Artificial Sequence: Synthetic oligonucleotide
ugaccucuuucgaaaggcu

SEQ ID NO: 708024 - RNA, 19 nt, Artificial Sequence
  Description of Artificial Sequence: Synthetic oligonucleotide
cugcuauggguaucagacg

SEQ ID NO: 708025 - RNA, 19 nt, Artificial Sequence
  Description of Artificial Sequence: Synthetic oligonucleotide
ugcaggcuagaaauuucac

SEQ ID NO: 708026 - RNA, 19 nt, Artificial Sequence
  Description of Artificial Sequence: Synthetic oligonucleotide
gcuaacaaugcagguaagg

SEQ ID NO: 708027 - RNA, 19 nt, Artificial Sequence
  Description of Artificial Sequence: Synthetic oligonucleotide
gguaguuaaauuauuuaaa

SEQ ID NO: 708028 - RNA, 19 nt, Artificial Sequence
  Description of Artificial Sequence: Synthetic oligonucleotide
guuaacuaggagaguuugc

SEQ ID NO: 708029 - RNA, 19 nt, Artificial Sequence
  Description of Artificial Sequence: Synthetic oligonucleotide
agugcaggcuagaaauuuc

SEQ ID NO: 708030 - RNA, 19 nt, Artificial Sequence
  Description of Artificial Sequence: Synthetic oligonucleotide
aagcguuacuaaacacagg

SEQ ID NO: 708031 - RNA, 19 nt, Artificial Sequence
  Description of Artificial Sequence: Synthetic oligonucleotide
guaugaguauuuguucuac

SEQ ID NO: 708032 - RNA, 19 nt, Artificial Sequence
  Description of Artificial Sequence: Synthetic oligonucleotide
gagacgguacugaauuggc

SEQ ID NO: 708033 - RNA, 19 nt, Artificial Sequence
  Description of Artificial Sequence: Synthetic oligonucleotide
cuaaacacaggcgcaggug

SEQ ID NO: 708034 - RNA, 19 nt, Artificial Sequence
  Description of Artificial Sequence: Synthetic oligonucleotide
gugaugaccucuuucgaaa

SEQ ID NO: 708035 - RNA, 19 nt, Artificial Sequence
  Description of Artificial Sequence: Synthetic oligonucleotide
uccaagauuaaugccugau

SEQ ID NO: 708036 - RNA, 19 nt, Artificial Sequence
  Description of Artificial Sequence: Synthetic oligonucleotide
uggcuuagcauggaaucca

SEQ ID NO: 708037 - RNA, 19 nt, Artificial Sequence
  Description of Artificial Sequence: Synthetic oligonucleotide
ucgucacucccaauacucu

SEQ ID NO: 708038 - RNA, 19 nt, Artificial Sequence
  Description of Artificial Sequence: Synthetic oligonucleotide
cagaucggcgcagacacag

SEQ ID NO: 708039 - RNA, 19 nt, Artificial Sequence
  Description of Artificial Sequence: Synthetic oligonucleotide
ucccacaaguuuucagcug

SEQ ID NO: 708040 - RNA, 19 nt, Artificial Sequence
  Description of Artificial Sequence: Synthetic oligonucleotide
aggagaguuugccugcuau

SEQ ID NO: 708041 - RNA, 19 nt, Artificial Sequence
  Description of Artificial Sequence: Synthetic oligonucleotide
ucucgcucugaaucagagc

SEQ ID NO: 708042 - RNA, 19 nt, Artificial Sequence
  Description of Artificial Sequence: Synthetic oligonucleotide
cuggaguaaccuucgucac

SEQ ID NO: 708043 - RNA, 19 nt, Artificial Sequence
  Description of Artificial Sequence: Synthetic oligonucleotide
agauuaauucccacaaguu

SEQ ID NO: 708044 - RNA, 19 nt, Artificial Sequence
  Description of Artificial Sequence: Synthetic oligonucleotide
augaaccccauugaagaga

SEQ ID NO: 708045 - RNA, 19 nt, Artificial Sequence
  Description of Artificial Sequence: Synthetic oligonucleotide
cucaacauagcaugagcaa

SEQ ID NO: 708046 - RNA, 19 nt, Artificial Sequence
  Description of Artificial Sequence: Synthetic oligonucleotide
gagcaaaccgaguguugug

SEQ ID NO: 708047 - RNA, 19 nt, Artificial Sequence
  Description of Artificial Sequence: Synthetic oligonucleotide
acgguacugaauuggccca

SEQ ID NO: 708048 - RNA, 19 nt, Artificial Sequence
  Description of Artificial Sequence: Synthetic oligonucleotide
ugauaaacugaggcugagu

SEQ ID NO: 708049 - RNA, 19 nt, Artificial Sequence
  Description of Artificial Sequence: Synthetic oligonucleotide
caacuaagucaacucaaga

SEQ ID NO: 708050 - RNA, 19 nt, Artificial Sequence
  Description of Artificial Sequence: Synthetic oligonucleotide
gguguuucgcccugcacug

SEQ ID NO: 708051 - RNA, 19 nt, Artificial Sequence
  Description of Artificial Sequence: Synthetic oligonucleotide
uugcuuaaauacaggucuu

SEQ ID NO: 708052 - RNA, 19 nt, Artificial Sequence
  Description of Artificial Sequence: Synthetic oligonucleotide
uguccucuuuaagucaacu

SEQ ID NO: 708053 - RNA, 19 nt, Artificial Sequence
  Description of Artificial Sequence: Synthetic oligonucleotide
uuucuacggccaagaagcu

SEQ ID NO: 708054 - RNA, 19 nt, Artificial Sequence
  Description of Artificial Sequence: Synthetic oligonucleotide
agcaaaccgaguguugugu

SEQ ID NO: 708055 - RNA, 19 nt, Artificial Sequence
  Description of Artificial Sequence: Synthetic oligonucleotide
ugcuuaaauacaggucuuc

SEQ ID NO: 708056 - RNA, 19 nt, Artificial Sequence
  Description of Artificial Sequence: Synthetic oligonucleotide
guugacccaaugcugucca

SEQ ID NO: 708057 - RNA, 19 nt, Artificial Sequence
  Description of Artificial Sequence: Synthetic oligonucleotide
ugucggguguuuuaucauu

SEQ ID NO: 708058 - RNA, 19 nt, Artificial Sequence
  Description of Artificial Sequence: Synthetic oligonucleotide
uccguauccgcuccaucuc

SEQ ID NO: 708059 - RNA, 19 nt, Artificial Sequence
  Description of Artificial Sequence: Synthetic oligonucleotide
augauaaacugaggcugag

SEQ ID NO: 708060 - RNA, 19 nt, Artificial Sequence
  Description of Artificial Sequence: Synthetic oligonucleotide
uggugcuaacaaugcaggu

SEQ ID NO: 708061 - RNA, 19 nt, Artificial Sequence
  Description of Artificial Sequence: Synthetic oligonucleotide
uuauaaccccacccuuaaa

SEQ ID NO: 708062 - RNA, 19 nt, Artificial Sequence
  Description of Artificial Sequence: Synthetic oligonucleotide
ggugucggguguuuuauca

SEQ ID NO: 708063 - RNA, 19 nt, Artificial Sequence
  Description of Artificial Sequence: Synthetic oligonucleotide
gaaggagacugcccguaga

SEQ ID NO: 708064 - RNA, 19 nt, Artificial Sequence
  Description of Artificial Sequence: Synthetic oligonucleotide
uuucgcccugcacuguggu

SEQ ID NO: 708065 - RNA, 19 nt, Artificial Sequence
  Description of Artificial Sequence: Synthetic oligonucleotide
uccagacgccgcuuuagaa

SEQ ID NO: 708066 - RNA, 19 nt, Artificial Sequence
  Description of Artificial Sequence: Synthetic oligonucleotide
uuguuucuacggccaagaa

SEQ ID NO: 708067 - RNA, 19 nt, Artificial Sequence
  Description of Artificial Sequence: Synthetic oligonucleotide
gacaugcaugggcugcccc

SEQ ID NO: 708068 - RNA, 19 nt, Artificial Sequence
  Description of Artificial Sequence: Synthetic oligonucleotide
ggaaugauccuaaaagaaa

SEQ ID NO: 708069 - RNA, 19 nt, Artificial Sequence
  Description of Artificial Sequence: Synthetic oligonucleotide
cacuggaguaaccuucguc

SEQ ID NO: 708070 - RNA, 19 nt, Artificial Sequence
  Description of Artificial Sequence: Synthetic oligonucleotide
cuaacaaugcagguaaggu

SEQ ID NO: 708071 - RNA, 19 nt, Artificial Sequence
  Description of Artificial Sequence: Synthetic oligonucleotide
gucaacuaagucaacucaa

SEQ ID NO: 708072 - RNA, 19 nt, Artificial Sequence
  Description of Artificial Sequence: Synthetic oligonucleotide
gccccuauguugccgaagg

SEQ ID NO: 708073 - RNA, 19 nt, Artificial Sequence
  Description of Artificial Sequence: Synthetic oligonucleotide
gacugcccguagaaaaugc

SEQ ID NO: 708074 - RNA, 19 nt, Artificial Sequence
  Description of Artificial Sequence: Synthetic oligonucleotide
aaccgaguguugugugccu

SEQ ID NO: 708075 - RNA, 19 nt, Artificial Sequence
  Description of Artificial Sequence: Synthetic oligonucleotide
acauagcaugagcaaacua

SEQ ID NO: 708076 - RNA, 19 nt, Artificial Sequence
  Description of Artificial Sequence: Synthetic oligonucleotide
accuugacauuaaacgaga

SEQ ID NO: 708077 - RNA, 19 nt, Artificial Sequence
  Description of Artificial Sequence: Synthetic oligonucleotide
guaaccuucgucacuccca

SEQ ID NO: 708078 - RNA, 19 nt, Artificial Sequence
  Description of Artificial Sequence: Synthetic oligonucleotide
uguccacgucuccauggga

SEQ ID NO: 708079 - RNA, 19 nt, Artificial Sequence
  Description of Artificial Sequence: Synthetic oligonucleotide
gcugcgagaaacuguacuc

SEQ ID NO: 708080 - RNA, 19 nt, Artificial Sequence
  Description of Artificial Sequence: Synthetic oligonucleotide
guacugaauuggcccagug

SEQ ID NO: 708081 - RNA, 19 nt, Artificial Sequence
  Description of Artificial Sequence: Synthetic oligonucleotide
ugcccagcccuaucuaaac

SEQ ID NO: 708082 - RNA, 19 nt, Artificial Sequence
  Description of Artificial Sequence: Synthetic oligonucleotide
ugaggugucggguguuuua

SEQ ID NO: 708083 - RNA, 19 nt, Artificial Sequence
  Description of Artificial Sequence: Synthetic oligonucleotide
aggugucggguguuuuauc

SEQ ID NO: 708084 - RNA, 19 nt, Artificial Sequence
  Description of Artificial Sequence: Synthetic oligonucleotide
cugcuauacugcaugcaca

SEQ ID NO: 708085 - RNA, 19 nt, Artificial Sequence
  Description of Artificial Sequence: Synthetic oligonucleotide
aggcugaguuuuaauagcu

SEQ ID NO: 708086 - RNA, 19 nt, Artificial Sequence
  Description of Artificial Sequence: Synthetic oligonucleotide
aggcuagaaauuucacuua

SEQ ID NO: 708087 - RNA, 19 nt, Artificial Sequence
  Description of Artificial Sequence: Synthetic oligonucleotide
uaagguuagcuggcuuagc

SEQ ID NO: 708088 - RNA, 19 nt, Artificial Sequence
  Description of Artificial Sequence: Synthetic oligonucleotide
agacugcccguagaaaaug

SEQ ID NO: 708089 - RNA, 19 nt, Artificial Sequence
  Description of Artificial Sequence: Synthetic oligonucleotide
uugccugcuauggguauca

SEQ ID NO: 708090 - RNA, 19 nt, Artificial Sequence
  Description of Artificial Sequence: Synthetic oligonucleotide
ggguuugugaggaaggaga

SEQ ID NO: 708091 - RNA, 19 nt, Artificial Sequence
  Description of Artificial Sequence: Synthetic oligonucleotide
gaguguugugugccuggug

SEQ ID NO: 708092 - RNA, 19 nt, Artificial Sequence
  Description of Artificial Sequence: Synthetic oligonucleotide
cagaacuuucaagcguuac

SEQ ID NO: 708093 - RNA, 19 nt, Artificial Sequence
  Description of Artificial Sequence: Synthetic oligonucleotide
acuacaggacugaaauuaa

SEQ ID NO: 708094 - RNA, 19 nt, Artificial Sequence
  Description of Artificial Sequence: Synthetic oligonucleotide
uuguccucuuuaagucaac

SEQ ID NO: 708095 - RNA, 19 nt, Artificial Sequence
  Description of Artificial Sequence: Synthetic oligonucleotide
ugagcugcgugaugaccuc

SEQ ID NO: 708096 - RNA, 19 nt, Artificial Sequence
  Description of Artificial Sequence: Synthetic oligonucleotide
gcccuaucuaaacauaaaa

SEQ ID NO: 708097 - RNA, 19 nt, Artificial Sequence
  Description of Artificial Sequence: Synthetic oligonucleotide
gcccguagaaaaugcaaac

SEQ ID NO: 708098 - RNA, 19 nt, Artificial Sequence
  Description of Artificial Sequence: Synthetic oligonucleotide
caggugagcucgucgguuc

SEQ ID NO: 708099 - RNA, 19 nt, Artificial Sequence
  Description of Artificial Sequence: Synthetic oligonucleotide
gguuugugaggaaggagac

SEQ ID NO: 708100 - RNA, 19 nt, Artificial Sequence
  Description of Artificial Sequence: Synthetic oligonucleotide
ucggguguuuuaucauuua

SEQ ID NO: 708101 - RNA, 19 nt, Artificial Sequence
  Description of Artificial Sequence: Synthetic oligonucleotide
acaauagcaccugcacagu

SEQ ID NO: 708102 - RNA, 19 nt, Artificial Sequence
  Description of Artificial Sequence: Synthetic oligonucleotide
uucuacggccaagaagcuc

SEQ ID NO: 708103 - RNA, 19 nt, Artificial Sequence
  Description of Artificial Sequence: Synthetic oligonucleotide
aucagacgguuaaaagcug

SEQ ID NO: 708104 - RNA, 19 nt, Artificial Sequence
  Description of Artificial Sequence: Synthetic oligonucleotide
gcguuacuaaacacaggcg

SEQ ID NO: 708105 - RNA, 19 nt, Artificial Sequence
  Description of Artificial Sequence: Synthetic oligonucleotide
cccguagaaaaugcaaacc

SEQ ID NO: 708106 - RNA, 19 nt, Artificial Sequence
  Description of Artificial Sequence: Synthetic oligonucleotide
cugggcucuaggaagugaa

SEQ ID NO: 708107 - RNA, 19 nt, Artificial Sequence
  Description of Artificial Sequence: Synthetic oligonucleotide
guuucgcccugcacugugg

SEQ ID NO: 708108 - RNA, 19 nt, Artificial Sequence
  Description of Artificial Sequence: Synthetic oligonucleotide
gccgcuuuagaaaucucug

SEQ ID NO: 708109 - RNA, 19 nt, Artificial Sequence
  Description of Artificial Sequence: Synthetic oligonucleotide
gcaaaccgaguguugugug

SEQ ID NO: 708110 - RNA, 19 nt, Artificial Sequence
  Description of Artificial Sequence: Synthetic oligonucleotide
cugcccguagaaaaugcaa

SEQ ID NO: 708111 - RNA, 19 nt, Artificial Sequence
  Description of Artificial Sequence: Synthetic oligonucleotide
acucuaagucugauuuugu

SEQ ID NO: 708112 - RNA, 19 nt, Artificial Sequence
  Description of Artificial Sequence: Synthetic oligonucleotide
gcgcaggugagcucgucgg

SEQ ID NO: 708113 - RNA, 19 nt, Artificial Sequence
  Description of Artificial Sequence: Synthetic oligonucleotide
cccuuuuguucaaguauag

SEQ ID NO: 708114 - RNA, 19 nt, Artificial Sequence
  Description of Artificial Sequence: Synthetic oligonucleotide
ggaaggagacugcccguag

SEQ ID NO: 708115 - RNA, 19 nt, Artificial Sequence
  Description of Artificial Sequence: Synthetic oligonucleotide
caaggggaacacaugacau

SEQ ID NO: 708116 - RNA, 19 nt, Artificial Sequence
  Description of Artificial Sequence: Synthetic oligonucleotide
ccacccuuaaaaugucuac

SEQ ID NO: 708117 - RNA, 19 nt, Artificial Sequence
  Description of Artificial Sequence: Synthetic oligonucleotide
acgucuccaugggagaacu

SEQ ID NO: 708118 - RNA, 19 nt, Artificial Sequence
  Description of Artificial Sequence: Synthetic oligonucleotide
gaccuucgucuccccagcc

SEQ ID NO: 708119 - RNA, 19 nt, Artificial Sequence
  Description of Artificial Sequence: Synthetic oligonucleotide
cuucgucuccccagcccag

SEQ ID NO: 708120 - RNA, 19 nt, Artificial Sequence
  Description of Artificial Sequence: Synthetic oligonucleotide
ggguuuauaaccccacccu

SEQ ID NO: 708121 - RNA, 19 nt, Artificial Sequence
  Description of Artificial Sequence: Synthetic oligonucleotide
ccucauucauucugugcag

SEQ ID NO: 708122 - RNA, 19 nt, Artificial Sequence
  Description of Artificial Sequence: Synthetic oligonucleotide
acugcccguagaaaaugca

SEQ ID NO: 708123 - RNA, 19 nt, Artificial Sequence
  Description of Artificial Sequence: Synthetic oligonucleotide
gaauuggcccagugggugu

SEQ ID NO: 708124 - RNA, 19 nt, Artificial Sequence
  Description of Artificial Sequence: Synthetic oligonucleotide
gggaacacaugacaucaaa

SEQ ID NO: 708125 - RNA, 19 nt, Artificial Sequence
  Description of Artificial Sequence: Synthetic oligonucleotide
ucgucuccccagcccagac

SEQ ID NO: 708126 - RNA, 19 nt, Artificial Sequence
  Description of Artificial Sequence: Synthetic oligonucleotide
cuacggccaagaagcucag

SEQ ID NO: 708127 - RNA, 19 nt, Artificial Sequence
  Description of Artificial Sequence: Synthetic oligonucleotide
ugccccuauguugccgaag

SEQ ID NO: 708128 - RNA, 19 nt, Artificial Sequence
  Description of Artificial Sequence: Synthetic oligonucleotide
gccacuguaugaguauuug

SEQ ID NO: 708129 - RNA, 19 nt, Artificial Sequence
  Description of Artificial Sequence: Synthetic oligonucleotide
agacgguuaaaagcuggua

SEQ ID NO: 708130 - RNA, 19 nt, Artificial Sequence
  Description of Artificial Sequence: Synthetic oligonucleotide
uacggccaagaagcucagg

SEQ ID NO: 708131 - RNA, 19 nt, Artificial Sequence
  Description of Artificial Sequence: Synthetic oligonucleotide
gcgcugcuaaauaugguug

SEQ ID NO: 708132 - RNA, 19 nt, Artificial Sequence
  Description of Artificial Sequence: Synthetic oligonucleotide
uaggagaguuugccugcua

SEQ ID NO: 708133 - RNA, 19 nt, Artificial Sequence
  Description of Artificial Sequence: Synthetic oligonucleotide
cgggaucagaacuuucaag

SEQ ID NO: 708134 - RNA, 19 nt, Artificial Sequence
  Description of Artificial Sequence: Synthetic oligonucleotide
accccacccuuaaaauguc

SEQ ID NO: 708135 - RNA, 19 nt, Artificial Sequence
  Description of Artificial Sequence: Synthetic oligonucleotide
agcccuaucuaaacauaaa

SEQ ID NO: 708136 - RNA, 19 nt, Artificial Sequence
  Description of Artificial Sequence: Synthetic oligonucleotide
ugugugccuggugcagucu

SEQ ID NO: 708137 - RNA, 19 nt, Artificial Sequence
  Description of Artificial Sequence: Synthetic oligonucleotide
cauccguauccgcuccauc

SEQ ID NO: 708138 - RNA, 19 nt, Artificial Sequence
  Description of Artificial Sequence: Synthetic oligonucleotide
cagacgccgcuuuagaaau

SEQ ID NO: 708139 - RNA, 19 nt, Artificial Sequence
  Description of Artificial Sequence: Synthetic oligonucleotide
aaccuucgucacucccaau

SEQ ID NO: 708140 - RNA, 19 nt, Artificial Sequence
  Description of Artificial Sequence: Synthetic oligonucleotide
uucgucuccccagcccaga

SEQ ID NO: 708141 - RNA, 19 nt, Artificial Sequence
  Description of Artificial Sequence: Synthetic oligonucleotide
ccuauguugccgaagggcu

SEQ ID NO: 708142 - RNA, 19 nt, Artificial Sequence
  Description of Artificial Sequence: Synthetic oligonucleotide
gcuagaaauuucacuuaga

SEQ ID NO: 708143 - RNA, 19 nt, Artificial Sequence
  Description of Artificial Sequence: Synthetic oligonucleotide
cacgucuccaugggagaac

SEQ ID NO: 708144 - RNA, 19 nt, Artificial Sequence
  Description of Artificial Sequence: Synthetic oligonucleotide
gaagcucaggaaggguuua

SEQ ID NO: 708145 - RNA, 19 nt, Artificial Sequence
  Description of Artificial Sequence: Synthetic oligonucleotide
cacccuuaaaaugucuacu

SEQ ID NO: 708146 - RNA, 19 nt, Artificial Sequence
  Description of Artificial Sequence: Synthetic oligonucleotide
ggccugcuauacugcaugc

SEQ ID NO: 708147 - RNA, 19 nt, Artificial Sequence
  Description of Artificial Sequence: Synthetic oligonucleotide
cugcugcgagaaacuguac

SEQ ID NO: 708148 - RNA, 19 nt, Artificial Sequence
  Description of Artificial Sequence: Synthetic oligonucleotide
cugaauuggcccagugggu

SEQ ID NO: 708149 - RNA, 19 nt, Artificial Sequence
  Description of Artificial Sequence: Synthetic oligonucleotide
gcugcugcgagaaacugua

SEQ ID NO: 708150 - RNA, 19 nt, Artificial Sequence
  Description of Artificial Sequence: Synthetic oligonucleotide
ggugcccuggugcuaacaa

SEQ ID NO: 708151 - RNA, 19 nt, Artificial Sequence
  Description of Artificial Sequence: Synthetic oligonucleotide
agacgccgcuuuagaaauc

SEQ ID NO: 708152 - RNA, 19 nt, Artificial Sequence
  Description of Artificial Sequence: Synthetic oligonucleotide
ccguauccgcuccaucucc

SEQ ID NO: 708153 - RNA, 19 nt, Artificial Sequence
  Description of Artificial Sequence: Synthetic oligonucleotide
aucggcgcagacacaggca

SEQ ID NO: 708154 - RNA, 19 nt, Artificial Sequence
  Description of Artificial Sequence: Synthetic oligonucleotide
cagcgggaucagaacuuuc

SEQ ID NO: 708155 - RNA, 19 nt, Artificial Sequence
  Description of Artificial Sequence: Synthetic oligonucleotide
cagacgguuaaaagcuggu

SEQ ID NO: 708156 - RNA, 19 nt, Artificial Sequence
  Description of Artificial Sequence: Synthetic oligonucleotide
ccagacgccgcuuuagaaa

SEQ ID NO: 708157 - RNA, 19 nt, Artificial Sequence
  Description of Artificial Sequence: Synthetic oligonucleotide
cuuucggcuucuucaaguu

SEQ ID NO: 708158 - RNA, 19 nt, Artificial Sequence
  Description of Artificial Sequence: Synthetic oligonucleotide
cgucacucccaauacucug

SEQ ID NO: 708159 - RNA, 19 nt, Artificial Sequence
  Description of Artificial Sequence: Synthetic oligonucleotide
caucaaagugcaggcuaga

SEQ ID NO: 708160 - RNA, 19 nt, Artificial Sequence
  Description of Artificial Sequence: Synthetic oligonucleotide
ugccugcuauggguaucag

SEQ ID NO: 708161 - RNA, 19 nt, Artificial Sequence
  Description of Artificial Sequence: Synthetic oligonucleotide
cugcgagaaacuguacucu

SEQ ID NO: 708162 - RNA, 19 nt, Artificial Sequence
  Description of Artificial Sequence: Synthetic oligonucleotide
agcggucugaagagauagu

SEQ ID NO: 708163 - RNA, 19 nt, Artificial Sequence
  Description of Artificial Sequence: Synthetic oligonucleotide
gcugccccuauguugccga

SEQ ID NO: 708164 - RNA, 19 nt, Artificial Sequence
  Description of Artificial Sequence: Synthetic oligonucleotide
gcccaguggguguuucgcc

SEQ ID NO: 708165 - RNA, 19 nt, Artificial Sequence
  Description of Artificial Sequence: Synthetic oligonucleotide
agugaggugucggguguuu

SEQ ID NO: 708166 - RNA, 19 nt, Artificial Sequence
  Description of Artificial Sequence: Synthetic oligonucleotide
gaggugucggguguuuuau

SEQ ID NO: 708167 - RNA, 19 nt, Artificial Sequence
  Description of Artificial Sequence: Synthetic oligonucleotide
gcugguaaaagggaaugau

SEQ ID NO: 708168 - RNA, 19 nt, Artificial Sequence
  Description of Artificial Sequence: Synthetic oligonucleotide
guuugccugcuauggguau

SEQ ID NO: 708169 - RNA, 19 nt, Artificial Sequence
  Description of Artificial Sequence: Synthetic oligonucleotide
augugugcuuuggcuuugu

SEQ ID NO: 708170 - RNA, 19 nt, Artificial Sequence
  Description of Artificial Sequence: Synthetic oligonucleotide
gcccuggugcuaacaaugc

SEQ ID NO: 708171 - RNA, 19 nt, Artificial Sequence
  Description of Artificial Sequence: Synthetic oligonucleotide
uguugccgaagggcugcaa

SEQ ID NO: 708172 - RNA, 19 nt, Artificial Sequence
  Description of Artificial Sequence: Synthetic oligonucleotide
acgccgcuuuagaaaucuc

SEQ ID NO: 708173 - RNA, 19 nt, Artificial Sequence
  Description of Artificial Sequence: Synthetic oligonucleotide
gcgggaucagaacuuucaa

SEQ ID NO: 708174 - RNA, 19 nt, Artificial Sequence
  Description of Artificial Sequence: Synthetic oligonucleotide
acgcugcaucaaaauagau

SEQ ID NO: 708175 - RNA, 19 nt, Artificial Sequence
  Description of Artificial Sequence: Synthetic oligonucleotide
cuauguuaacuaggagagu

SEQ ID NO: 708176 - RNA, 19 nt, Artificial Sequence
  Description of Artificial Sequence: Synthetic oligonucleotide
ccccuauguugccgaaggg

SEQ ID NO: 708177 - RNA, 19 nt, Artificial Sequence
  Description of Artificial Sequence: Synthetic oligonucleotide
ccuuucggcuucuucaagu

SEQ ID NO: 708178 - RNA, 19 nt, Artificial Sequence
  Description of Artificial Sequence: Synthetic oligonucleotide
cuauggguaucagacgguu

SEQ ID NO: 708179 - RNA, 19 nt, Artificial Sequence
  Description of Artificial Sequence: Synthetic oligonucleotide
cccacccuuaaaaugucua

SEQ ID NO: 708180 - RNA, 19 nt, Artificial Sequence
  Description of Artificial Sequence: Synthetic oligonucleotide
gcggucaggugcccuggug

SEQ ID NO: 708181 - RNA, 19 nt, Artificial Sequence
  Description of Artificial Sequence: Synthetic oligonucleotide
gccugcuauacugcaugca

SEQ ID NO: 708182 - RNA, 19 nt, Artificial Sequence
  Description of Artificial Sequence: Synthetic oligonucleotide
gggcggucaggugcccugg

SEQ ID NO: 708183 - RNA, 19 nt, Artificial Sequence
  Description of Artificial Sequence: Synthetic oligonucleotide
ccgcuuuagaaaucucugu

SEQ ID NO: 708184 - RNA, 19 nt, Artificial Sequence
  Description of Artificial Sequence: Synthetic oligonucleotide
cccagagggaaaccucaga

SEQ ID NO: 708185 - RNA, 19 nt, Artificial Sequence
  Description of Artificial Sequence: Synthetic oligonucleotide
gcuauggguaucagacggu

SEQ ID NO: 708186 - RNA, 19 nt, Artificial Sequence
  Description of Artificial Sequence: Synthetic oligonucleotide
cgguacugaauuggcccag

SEQ ID NO: 708187 - RNA, 19 nt, Artificial Sequence
  Description of Artificial Sequence: Synthetic oligonucleotide
ccuuacucuaagucugauu

SEQ ID NO: 708188 - RNA, 19 nt, Artificial Sequence
  Description of Artificial Sequence: Synthetic oligonucleotide
cugccccuauguugccgaa

SEQ ID NO: 708189 - RNA, 19 nt, Artificial Sequence
  Description of Artificial Sequence: Synthetic oligonucleotide
cgcugcuaaauaugguugu

SEQ ID NO: 708190 - RNA, 19 nt, Artificial Sequence
  Description of Artificial Sequence: Synthetic oligonucleotide
cgccgcuuuagaaaucucu

SEQ ID NO: 708191 - RNA, 19 nt, Artificial Sequence
  Description of Artificial Sequence: Synthetic oligonucleotide
ccugcacaguggguuugug

SEQ ID NO: 708192 - RNA, 19 nt, Artificial Sequence
  Description of Artificial Sequence: Synthetic oligonucleotide
gagugaggugucggguguu

SEQ ID NO: 708193 - RNA, 19 nt, Artificial Sequence
  Description of Artificial Sequence: Synthetic oligonucleotide
ccugauuauccugucuuuu

SEQ ID NO: 708194 - RNA, 19 nt, Artificial Sequence
  Description of Artificial Sequence: Synthetic oligonucleotide
ccaguggguguuucgcccu

SEQ ID NO: 708195 - RNA, 19 nt, Artificial Sequence
  Description of Artificial Sequence: Synthetic oligonucleotide
guguuucgcccugcacugu

SEQ ID NO: 708196 - RNA, 19 nt, Artificial Sequence
  Description of Artificial Sequence: Synthetic oligonucleotide
gugaggugucggguguuuu

SEQ ID NO: 708197 - RNA, 19 nt, Artificial Sequence
  Description of Artificial Sequence: Synthetic oligonucleotide
cguauccgcuccaucuccu

SEQ ID NO: 708198 - RNA, 19 nt, Artificial Sequence
  Description of Artificial Sequence: Synthetic oligonucleotide
ccccacccuuaaaaugucu

SEQ ID NO: 708199 - RNA, 19 nt, Artificial Sequence
  Description of Artificial Sequence: Synthetic oligonucleotide
caggcgcaggugagcucgu

SEQ ID NO: 708200 - RNA, 19 nt, Artificial Sequence
  Description of Artificial Sequence: Synthetic oligonucleotide
ggcggucaggugcccuggu

SEQ ID NO: 708201 - RNA, 19 nt, Artificial Sequence
  Description of Artificial Sequence: Synthetic oligonucleotide
gcgggcggucaggugcccu

SEQ ID NO: 708202 - RNA, 19 nt, Artificial Sequence
  Description of Artificial Sequence: Synthetic oligonucleotide
ugucauuccauaaauacgg

SEQ ID NO: 708203 - RNA, 19 nt, Artificial Sequence
  Description of Artificial Sequence: Synthetic oligonucleotide
aagacgacaauuuuggaag

SEQ ID NO: 708204 - RNA, 19 nt, Artificial Sequence
  Description of Artificial Sequence: Synthetic oligonucleotide
agcauaaaggcuuccaucc

SEQ ID NO: 708205 - RNA, 19 nt, Artificial Sequence
  Description of Artificial Sequence: Synthetic oligonucleotide
uggaagacgacaauuuugg

SEQ ID NO: 708206 - RNA, 19 nt, Artificial Sequence
  Description of Artificial Sequence: Synthetic oligonucleotide
gaugcaauuagcaaggagc

SEQ ID NO: 708207 - RNA, 19 nt, Artificial Sequence
  Description of Artificial Sequence: Synthetic oligonucleotide
uuugucauuccauaaauac

SEQ ID NO: 708208 - RNA, 19 nt, Artificial Sequence
  Description of Artificial Sequence: Synthetic oligonucleotide
gaaagauaagcagaggugg

SEQ ID NO: 708209 - RNA, 19 nt, Artificial Sequence
  Description of Artificial Sequence: Synthetic oligonucleotide
auugucauaugccaggguc

SEQ ID NO: 708210 - RNA, 19 nt, Artificial Sequence
  Description of Artificial Sequence: Synthetic oligonucleotide
uugucauuccauaaauacg

SEQ ID NO: 708211 - RNA, 19 nt, Artificial Sequence
  Description of Artificial Sequence: Synthetic oligonucleotide
aaugacgcuccccaacacc

SEQ ID NO: 708212 - RNA, 19 nt, Artificial Sequence
  Description of Artificial Sequence: Synthetic oligonucleotide
ugcgguaucgaacagguug

SEQ ID NO: 708213 - RNA, 19 nt, Artificial Sequence
  Description of Artificial Sequence: Synthetic oligonucleotide
ugggaugcaauuagcaagg

SEQ ID NO: 708214 - RNA, 19 nt, Artificial Sequence
  Description of Artificial Sequence: Synthetic oligonucleotide
augucucuugcacacaccc

SEQ ID NO: 708215 - RNA, 19 nt, Artificial Sequence
  Description of Artificial Sequence: Synthetic oligonucleotide
ucaaggccuggaaagagcg

SEQ ID NO: 708216 - RNA, 19 nt, Artificial Sequence
  Description of Artificial Sequence: Synthetic oligonucleotide
aauaaugugcuuccgggaa

SEQ ID NO: 708217 - RNA, 19 nt, Artificial Sequence
  Description of Artificial Sequence: Synthetic oligonucleotide
gaagcgagcgaacagagac

SEQ ID NO: 708218 - RNA, 19 nt, Artificial Sequence
  Description of Artificial Sequence: Synthetic oligonucleotide
uguauugcgccaauguucu

SEQ ID NO: 708219 - RNA, 19 nt, Artificial Sequence
  Description of Artificial Sequence: Synthetic oligonucleotide
aggauuauauuuccacucg

SEQ ID NO: 708220 - RNA, 19 nt, Artificial Sequence
  Description of Artificial Sequence: Synthetic oligonucleotide
uucccuuggauacaaacca

SEQ ID NO: 708221 - RNA, 19 nt, Artificial Sequence
  Description of Artificial Sequence: Synthetic oligonucleotide
uucuuaaugacgcucccca

SEQ ID NO: 708222 - RNA, 19 nt, Artificial Sequence
  Description of Artificial Sequence: Synthetic oligonucleotide
gaaacagcagaagcgagcg

SEQ ID NO: 708223 - RNA, 19 nt, Artificial Sequence
  Description of Artificial Sequence: Synthetic oligonucleotide
aguauaaucccagccaagg

SEQ ID NO: 708224 - RNA, 19 nt, Artificial Sequence
  Description of Artificial Sequence: Synthetic oligonucleotide
aucgaugccaucuccuggc

SEQ ID NO: 708225 - RNA, 19 nt, Artificial Sequence
  Description of Artificial Sequence: Synthetic oligonucleotide
uuaaugacgcuccccaaca

SEQ ID NO: 708226 - RNA, 19 nt, Artificial Sequence
  Description of Artificial Sequence: Synthetic oligonucleotide
cauaaauacgggcugcgcc

SEQ ID NO: 708227 - RNA, 19 nt, Artificial Sequence
  Description of Artificial Sequence: Synthetic oligonucleotide
ugaaacagcagaagcgagc

SEQ ID NO: 708228 - RNA, 19 nt, Artificial Sequence
  Description of Artificial Sequence: Synthetic oligonucleotide
aaagagcgugaccccaggc

SEQ ID NO: 708229 - RNA, 19 nt, Artificial Sequence
  Description of Artificial Sequence: Synthetic oligonucleotide
ugcuguaggguuuauugcc

SEQ ID NO: 708230 - RNA, 19 nt, Artificial Sequence
  Description of Artificial Sequence: Synthetic oligonucleotide
cuaaccaccaggaucuggc

SEQ ID NO: 708231 - RNA, 19 nt, Artificial Sequence
  Description of Artificial Sequence: Synthetic oligonucleotide
gagacaaugccacaggcca

SEQ ID NO: 708232 - RNA, 19 nt, Artificial Sequence
  Description of Artificial Sequence: Synthetic oligonucleotide
gugggaugcaauuagcaag

SEQ ID NO: 708233 - RNA, 19 nt, Artificial Sequence
  Description of Artificial Sequence: Synthetic oligonucleotide
augcaauuagcaaggagcc

SEQ ID NO: 708234 - RNA, 19 nt, Artificial Sequence
  Description of Artificial Sequence: Synthetic oligonucleotide
aaacuguccgagcgggucg

SEQ ID NO: 708235 - RNA, 19 nt, Artificial Sequence
  Description of Artificial Sequence: Synthetic oligonucleotide
auaaauacgggcugcgccu

SEQ ID NO: 708236 - RNA, 19 nt, Artificial Sequence
  Description of Artificial Sequence: Synthetic oligonucleotide
cuugcggucggccuggugg

SEQ ID NO: 708237 - RNA, 19 nt, Artificial Sequence
  Description of Artificial Sequence: Synthetic oligonucleotide
ugaggauuauauuuccacu

SEQ ID NO: 708238 - RNA, 19 nt, Artificial Sequence
  Description of Artificial Sequence: Synthetic oligonucleotide
ucauuccauaaauacgggc

SEQ ID NO: 708239 - RNA, 19 nt, Artificial Sequence
  Description of Artificial Sequence: Synthetic oligonucleotide
ucauaugccagggucauga

SEQ ID NO: 708240 - RNA, 19 nt, Artificial Sequence
  Description of Artificial Sequence: Synthetic oligonucleotide
gaagacgacaauuuuggaa

SEQ ID NO: 708241 - RNA, 19 nt, Artificial Sequence
  Description of Artificial Sequence: Synthetic oligonucleotide
auaagcagaggugguaggc

SEQ ID NO: 708242 - RNA, 19 nt, Artificial Sequence
  Description of Artificial Sequence: Synthetic oligonucleotide
accggaaacuguccgagcg

SEQ ID NO: 708243 - RNA, 19 nt, Artificial Sequence
  Description of Artificial Sequence: Synthetic oligonucleotide
uuugaaagauaagcagagg

SEQ ID NO: 708244 - RNA, 19 nt, Artificial Sequence
  Description of Artificial Sequence: Synthetic oligonucleotide
ucugcgguaucgaacaggu

SEQ ID NO: 708245 - RNA, 19 nt, Artificial Sequence
  Description of Artificial Sequence: Synthetic oligonucleotide
cagaaugcuaucgaucucg

SEQ ID NO: 708246 - RNA, 19 nt, Artificial Sequence
  Description of Artificial Sequence: Synthetic oligonucleotide
ucauacuuuccugagacaa

SEQ ID NO: 708247 - RNA, 19 nt, Artificial Sequence
  Description of Artificial Sequence: Synthetic oligonucleotide
auuccauaaauacgggcug

SEQ ID NO: 708248 - RNA, 19 nt, Artificial Sequence
  Description of Artificial Sequence: Synthetic oligonucleotide
ggugccagagcauaaaggc

SEQ ID NO: 708249 - RNA, 19 nt, Artificial Sequence
  Description of Artificial Sequence: Synthetic oligonucleotide
gugaugaccaggcuggacc

SEQ ID NO: 708250 - RNA, 19 nt, Artificial Sequence
  Description of Artificial Sequence: Synthetic oligonucleotide
uuuccugguaaugucuggg

SEQ ID NO: 708251 - RNA, 19 nt, Artificial Sequence
  Description of Artificial Sequence: Synthetic oligonucleotide
cuguauugcgccaauguuc

SEQ ID NO: 708252 - RNA, 19 nt, Artificial Sequence
  Description of Artificial Sequence: Synthetic oligonucleotide
uggaaggaccuguauugcg

SEQ ID NO: 708253 - RNA, 19 nt, Artificial Sequence
  Description of Artificial Sequence: Synthetic oligonucleotide
uguccgagcgggucgagcg

SEQ ID NO: 708254 - RNA, 19 nt, Artificial Sequence
  Description of Artificial Sequence: Synthetic oligonucleotide
aacagguugaugccauugu

SEQ ID NO: 708255 - RNA, 19 nt, Artificial Sequence
  Description of Artificial Sequence: Synthetic oligonucleotide
uauugcgccaauguucucc

SEQ ID NO: 708256 - RNA, 19 nt, Artificial Sequence
  Description of Artificial Sequence: Synthetic oligonucleotide
acuccuaucuuguggaaca

SEQ ID NO: 708257 - RNA, 19 nt, Artificial Sequence
  Description of Artificial Sequence: Synthetic oligonucleotide
uugucauaugccaggguca

SEQ ID NO: 708258 - RNA, 19 nt, Artificial Sequence
  Description of Artificial Sequence: Synthetic oligonucleotide
aaauacgggcugcgccucc

SEQ ID NO: 708259 - RNA, 19 nt, Artificial Sequence
  Description of Artificial Sequence: Synthetic oligonucleotide
ugucuucccuaaucgaugc

SEQ ID NO: 708260 - RNA, 19 nt, Artificial Sequence
  Description of Artificial Sequence: Synthetic oligonucleotide
auaugccagggucaugagg

SEQ ID NO: 708261 - RNA, 19 nt, Artificial Sequence
  Description of Artificial Sequence: Synthetic oligonucleotide
aucagguugaacugccgag

SEQ ID NO: 708262 - RNA, 19 nt, Artificial Sequence
  Description of Artificial Sequence: Synthetic oligonucleotide
agccagaugggaucccugc

SEQ ID NO: 708263 - RNA, 19 nt, Artificial Sequence
  Description of Artificial Sequence: Synthetic oligonucleotide
uaucgaacagguugaugcc

SEQ ID NO: 708264 - RNA, 19 nt, Artificial Sequence
  Description of Artificial Sequence: Synthetic oligonucleotide
aggucaguauaaucccagc

SEQ ID NO: 708265 - RNA, 19 nt, Artificial Sequence
  Description of Artificial Sequence: Synthetic oligonucleotide
cuuaaugacgcuccccaac

SEQ ID NO: 708266 - RNA, 19 nt, Artificial Sequence
  Description of Artificial Sequence: Synthetic oligonucleotide
cacugguagcccuucaggg

SEQ ID NO: 708267 - RNA, 19 nt, Artificial Sequence
  Description of Artificial Sequence: Synthetic oligonucleotide
uaaucgaugccaucuccug

SEQ ID NO: 708268 - RNA, 19 nt, Artificial Sequence
  Description of Artificial Sequence: Synthetic oligonucleotide
auugcccagaaugcuaucg

SEQ ID NO: 708269 - RNA, 19 nt, Artificial Sequence
  Description of Artificial Sequence: Synthetic oligonucleotide
caauuagcaaggagccucg

SEQ ID NO: 708270 - RNA, 19 nt, Artificial Sequence
  Description of Artificial Sequence: Synthetic oligonucleotide
uuuccacucggccaugacu

SEQ ID NO: 708271 - RNA, 19 nt, Artificial Sequence
  Description of Artificial Sequence: Synthetic oligonucleotide
aacaugugguauucagccu

SEQ ID NO: 708272 - RNA, 19 nt, Artificial Sequence
  Description of Artificial Sequence: Synthetic oligonucleotide
gaaggaccuguauugcgcc

SEQ ID NO: 708273 - RNA, 19 nt, Artificial Sequence
  Description of Artificial Sequence: Synthetic oligonucleotide
acgacaauuuuggaaggac

SEQ ID NO: 708274 - RNA, 19 nt, Artificial Sequence
  Description of Artificial Sequence: Synthetic oligonucleotide
agacgacaauuuuggaagg

SEQ ID NO: 708275 - RNA, 19 nt, Artificial Sequence
  Description of Artificial Sequence: Synthetic oligonucleotide
ugcccuaaccaccaggauc

SEQ ID NO: 708276 - RNA, 19 nt, Artificial Sequence
  Description of Artificial Sequence: Synthetic oligonucleotide
uggugggaugcaauuagca

SEQ ID NO: 708277 - RNA, 19 nt, Artificial Sequence
  Description of Artificial Sequence: Synthetic oligonucleotide
auacuuuccugagacaaug

SEQ ID NO: 708278 - RNA, 19 nt, Artificial Sequence
  Description of Artificial Sequence: Synthetic oligonucleotide
augccauugucauaugcca

SEQ ID NO: 708279 - RNA, 19 nt, Artificial Sequence
  Description of Artificial Sequence: Synthetic oligonucleotide
ggauuauauuuccacucgg

SEQ ID NO: 708280 - RNA, 19 nt, Artificial Sequence
  Description of Artificial Sequence: Synthetic oligonucleotide
uccauaaauacgggcugcg

SEQ ID NO: 708281 - RNA, 19 nt, Artificial Sequence
  Description of Artificial Sequence: Synthetic oligonucleotide
gacuuaggaucuauagucc

SEQ ID NO: 708282 - RNA, 19 nt, Artificial Sequence
  Description of Artificial Sequence: Synthetic oligonucleotide
uuccacucggccaugacuu

SEQ ID NO: 708283 - RNA, 19 nt, Artificial Sequence
  Description of Artificial Sequence: Synthetic oligonucleotide
uaaguugcucugcacugga

SEQ ID NO: 708284 - RNA, 19 nt, Artificial Sequence
  Description of Artificial Sequence: Synthetic oligonucleotide
cuaucgaucucguggauga

SEQ ID NO: 708285 - RNA, 19 nt, Artificial Sequence
  Description of Artificial Sequence: Synthetic oligonucleotide
caggcuauggccagcuggg

SEQ ID NO: 708286 - RNA, 19 nt, Artificial Sequence
  Description of Artificial Sequence: Synthetic oligonucleotide
auaaguugcucugcacugg

SEQ ID NO: 708287 - RNA, 19 nt, Artificial Sequence
  Description of Artificial Sequence: Synthetic oligonucleotide
ucuucccuaaucgaugcca

SEQ ID NO: 708288 - RNA, 19 nt, Artificial Sequence
  Description of Artificial Sequence: Synthetic oligonucleotide
accucugcgguaucgaaca

SEQ ID NO: 708289 - RNA, 19 nt, Artificial Sequence
  Description of Artificial Sequence: Synthetic oligonucleotide
cauuccauaaauacgggcu

SEQ ID NO: 708290 - RNA, 19 nt, Artificial Sequence
  Description of Artificial Sequence: Synthetic oligonucleotide
gaaagagcgugaccccagg

SEQ ID NO: 708291 - RNA, 19 nt, Artificial Sequence
  Description of Artificial Sequence: Synthetic oligonucleotide
accuguauugcgccaaugu

SEQ ID NO: 708292 - RNA, 19 nt, Artificial Sequence
  Description of Artificial Sequence: Synthetic oligonucleotide
uacuuuccugagacaaugc

SEQ ID NO: 708293 - RNA, 19 nt, Artificial Sequence
  Description of Artificial Sequence: Synthetic oligonucleotide
cugagacaaugccacaggc

SEQ ID NO: 708294 - RNA, 19 nt, Artificial Sequence
  Description of Artificial Sequence: Synthetic oligonucleotide
aucucaucggugaucuggc

SEQ ID NO: 708295 - RNA, 19 nt, Artificial Sequence
  Description of Artificial Sequence: Synthetic oligonucleotide
gguuuuauuugucauucca

SEQ ID NO: 708296 - RNA, 19 nt, Artificial Sequence
  Description of Artificial Sequence: Synthetic oligonucleotide
cuccgucugagucuguccg

SEQ ID NO: 708297 - RNA, 19 nt, Artificial Sequence
  Description of Artificial Sequence: Synthetic oligonucleotide
ucccuaaucgaugccaucu

SEQ ID NO: 708298 - RNA, 19 nt, Artificial Sequence
  Description of Artificial Sequence: Synthetic oligonucleotide
auggaagacgacaauuuug

SEQ ID NO: 708299 - RNA, 19 nt, Artificial Sequence
  Description of Artificial Sequence: Synthetic oligonucleotide
cuggcggugacuuuggaga

SEQ ID NO: 708300 - RNA, 19 nt, Artificial Sequence
  Description of Artificial Sequence: Synthetic oligonucleotide
ccuggaaagagcgugaccc

SEQ ID NO: 708301 - RNA, 19 nt, Artificial Sequence
  Description of Artificial Sequence: Synthetic oligonucleotide
cugggaucuccaucaaggg

SEQ ID NO: 708302 - RNA, 19 nt, Artificial Sequence
  Description of Artificial Sequence: Synthetic oligonucleotide
uugcucugaggucuggcca

SEQ ID NO: 708303 - RNA, 19 nt, Artificial Sequence
  Description of Artificial Sequence: Synthetic oligonucleotide
augcuaucgaucucgugga

SEQ ID NO: 708304 - RNA, 19 nt, Artificial Sequence
  Description of Artificial Sequence: Synthetic oligonucleotide
accgaguaggccuccauga

SEQ ID NO: 708305 - RNA, 19 nt, Artificial Sequence
  Description of Artificial Sequence: Synthetic oligonucleotide
gcuaggucaguauaauccc

SEQ ID NO: 708306 - RNA, 19 nt, Artificial Sequence
  Description of Artificial Sequence: Synthetic oligonucleotide
ggucaguauaaucccagcc

SEQ ID NO: 708307 - RNA, 19 nt, Artificial Sequence
  Description of Artificial Sequence: Synthetic oligonucleotide
cagaagcgagcgaacagag

SEQ ID NO: 708308 - RNA, 19 nt, Artificial Sequence
  Description of Artificial Sequence: Synthetic oligonucleotide
ggggacuuaggaucuauag

SEQ ID NO: 708309 - RNA, 19 nt, Artificial Sequence
  Description of Artificial Sequence: Synthetic oligonucleotide
ucucguggaugauggaaga

SEQ ID NO: 708310 - RNA, 19 nt, Artificial Sequence
  Description of Artificial Sequence: Synthetic oligonucleotide
uaggguuuauugcccagaa

SEQ ID NO: 708311 - RNA, 19 nt, Artificial Sequence
  Description of Artificial Sequence: Synthetic oligonucleotide
uauucagccugcucacaga

SEQ ID NO: 708312 - RNA, 19 nt, Artificial Sequence
  Description of Artificial Sequence: Synthetic oligonucleotide
uuccauaaauacgggcugc

SEQ ID NO: 708313 - RNA, 19 nt, Artificial Sequence
  Description of Artificial Sequence: Synthetic oligonucleotide
aguacauggccauccccug

SEQ ID NO: 708314 - RNA, 19 nt, Artificial Sequence
  Description of Artificial Sequence: Synthetic oligonucleotide
caugugguauucagccugc

SEQ ID NO: 708315 - RNA, 19 nt, Artificial Sequence
  Description of Artificial Sequence: Synthetic oligonucleotide
uugaacugccgagccaccg

SEQ ID NO: 708316 - RNA, 19 nt, Artificial Sequence
  Description of Artificial Sequence: Synthetic oligonucleotide
auagcaagcagggccuagg

SEQ ID NO: 708317 - RNA, 19 nt, Artificial Sequence
  Description of Artificial Sequence: Synthetic oligonucleotide
aagcgagcgaacagagacg

SEQ ID NO: 708318 - RNA, 19 nt, Artificial Sequence
  Description of Artificial Sequence: Synthetic oligonucleotide
ugaacugccgagccaccga

SEQ ID NO: 708319 - RNA, 19 nt, Artificial Sequence
  Description of Artificial Sequence: Synthetic oligonucleotide
gacaauuuuggaaggaccu

SEQ ID NO: 708320 - RNA, 19 nt, Artificial Sequence
  Description of Artificial Sequence: Synthetic oligonucleotide
agaucauuuccugguaaug

SEQ ID NO: 708321 - RNA, 19 nt, Artificial Sequence
  Description of Artificial Sequence: Synthetic oligonucleotide
ugguauucagccugcucac

SEQ ID NO: 708322 - RNA, 19 nt, Artificial Sequence
  Description of Artificial Sequence: Synthetic oligonucleotide
acaauuuuggaaggaccug

SEQ ID NO: 708323 - RNA, 19 nt, Artificial Sequence
  Description of Artificial Sequence: Synthetic oligonucleotide
ugugguauucagccugcuc

SEQ ID NO: 708324 - RNA, 19 nt, Artificial Sequence
  Description of Artificial Sequence: Synthetic oligonucleotide
aauacgggcugcgccuccg

SEQ ID NO: 708325 - RNA, 19 nt, Artificial Sequence
  Description of Artificial Sequence: Synthetic oligonucleotide
guaguagcagcucccgcug

SEQ ID NO: 708326 - RNA, 19 nt, Artificial Sequence
  Description of Artificial Sequence: Synthetic oligonucleotide
uccauaaguugcucugcac

SEQ ID NO: 708327 - RNA, 19 nt, Artificial Sequence
  Description of Artificial Sequence: Synthetic oligonucleotide
guaggcuugggugggagcc

SEQ ID NO: 708328 - RNA, 19 nt, Artificial Sequence
  Description of Artificial Sequence: Synthetic oligonucleotide
cacccauguuccaagcccc

SEQ ID NO: 708329 - RNA, 19 nt, Artificial Sequence
  Description of Artificial Sequence: Synthetic oligonucleotide
gagcugacgcccucguucc

SEQ ID NO: 708330 - RNA, 19 nt, Artificial Sequence
  Description of Artificial Sequence: Synthetic oligonucleotide
auugcgccaauguucucca

SEQ ID NO: 708331 - RNA, 19 nt, Artificial Sequence
  Description of Artificial Sequence: Synthetic oligonucleotide
cagguugaacugccgagcc

SEQ ID NO: 708332 - RNA, 19 nt, Artificial Sequence
  Description of Artificial Sequence: Synthetic oligonucleotide
gaaggccagauuugcccag

SEQ ID NO: 708333 - RNA, 19 nt, Artificial Sequence
  Description of Artificial Sequence: Synthetic oligonucleotide
gucauuccauaaauacggg

SEQ ID NO: 708334 - RNA, 19 nt, Artificial Sequence
  Description of Artificial Sequence: Synthetic oligonucleotide
guacauggccauccccugg

SEQ ID NO: 708335 - RNA, 19 nt, Artificial Sequence
  Description of Artificial Sequence: Synthetic oligonucleotide
uaaugacgcuccccaacac

SEQ ID NO: 708336 - RNA, 19 nt, Artificial Sequence
  Description of Artificial Sequence: Synthetic oligonucleotide
auaaugugcuuccgggaaa

SEQ ID NO: 708337 - RNA, 19 nt, Artificial Sequence
  Description of Artificial Sequence: Synthetic oligonucleotide
cuucuuaaugacgcucccc

SEQ ID NO: 708338 - RNA, 19 nt, Artificial Sequence
  Description of Artificial Sequence: Synthetic oligonucleotide
uccgucugagucuguccgg

SEQ ID NO: 708339 - RNA, 19 nt, Artificial Sequence
  Description of Artificial Sequence: Synthetic oligonucleotide
gaucauuuccugguaaugu

SEQ ID NO: 708340 - RNA, 19 nt, Artificial Sequence
  Description of Artificial Sequence: Synthetic oligonucleotide
gaaacuguccgagcggguc

SEQ ID NO: 708341 - RNA, 19 nt, Artificial Sequence
  Description of Artificial Sequence: Synthetic oligonucleotide
gcgaacagagacgaggagg

SEQ ID NO: 708342 - RNA, 19 nt, Artificial Sequence
  Description of Artificial Sequence: Synthetic oligonucleotide
auggcgcccacuccuaucu

SEQ ID NO: 708343 - RNA, 19 nt, Artificial Sequence
  Description of Artificial Sequence: Synthetic oligonucleotide
aaggccagauuugcccagg

SEQ ID NO: 708344 - RNA, 19 nt, Artificial Sequence
  Description of Artificial Sequence: Synthetic oligonucleotide
gaaugcuaucgaucucgug

SEQ ID NO: 708345 - RNA, 19 nt, Artificial Sequence
  Description of Artificial Sequence: Synthetic oligonucleotide
ggaugcaauuagcaaggag

SEQ ID NO: 708346 - RNA, 19 nt, Artificial Sequence
  Description of Artificial Sequence: Synthetic oligonucleotide
ucuuaaugacgcuccccaa

SEQ ID NO: 708347 - RNA, 19 nt, Artificial Sequence
  Description of Artificial Sequence: Synthetic oligonucleotide
agugucuucccuaaucgau

SEQ ID NO: 708348 - RNA, 19 nt, Artificial Sequence
  Description of Artificial Sequence: Synthetic oligonucleotide
acggucucuuccaugggcg

SEQ ID NO: 708349 - RNA, 19 nt, Artificial Sequence
  Description of Artificial Sequence: Synthetic oligonucleotide
ugcgccaauguucuccaua

SEQ ID NO: 708350 - RNA, 19 nt, Artificial Sequence
  Description of Artificial Sequence: Synthetic oligonucleotide
ucggguuuuauuugucauu

SEQ ID NO: 708351 - RNA, 19 nt, Artificial Sequence
  Description of Artificial Sequence: Synthetic oligonucleotide
agcgagcgaacagagacga

SEQ ID NO: 708352 - RNA, 19 nt, Artificial Sequence
  Description of Artificial Sequence: Synthetic oligonucleotide
agcgaacagagacgaggag

SEQ ID NO: 708353 - RNA, 19 nt, Artificial Sequence
  Description of Artificial Sequence: Synthetic oligonucleotide
uugcucugcacuggaagca

SEQ ID NO: 708354 - RNA, 19 nt, Artificial Sequence
  Description of Artificial Sequence: Synthetic oligonucleotide
cuaggucaguauaauccca

SEQ ID NO: 708355 - RNA, 19 nt, Artificial Sequence
  Description of Artificial Sequence: Synthetic oligonucleotide
caucuggcggugacuuugg

SEQ ID NO: 708356 - RNA, 19 nt, Artificial Sequence
  Description of Artificial Sequence: Synthetic oligonucleotide
gugucuucccuaaucgaug

SEQ ID NO: 708357 - RNA, 19 nt, Artificial Sequence
  Description of Artificial Sequence: Synthetic oligonucleotide
ugucauaugccagggucau

SEQ ID NO: 708358 - RNA, 19 nt, Artificial Sequence
  Description of Artificial Sequence: Synthetic oligonucleotide
uccccaacaccaccucagc

SEQ ID NO: 708359 - RNA, 19 nt, Artificial Sequence
  Description of Artificial Sequence: Synthetic oligonucleotide
ccgaaggucacccauguuc

SEQ ID NO: 708360 - RNA, 19 nt, Artificial Sequence
  Description of Artificial Sequence: Synthetic oligonucleotide
uccuaucuuguggaacagc

SEQ ID NO: 708361 - RNA, 19 nt, Artificial Sequence
  Description of Artificial Sequence: Synthetic oligonucleotide
uccagcgugacgugcccca

SEQ ID NO: 708362 - RNA, 19 nt, Artificial Sequence
  Description of Artificial Sequence: Synthetic oligonucleotide
cucugcgguaucgaacagg

SEQ ID NO: 708363 - RNA, 19 nt, Artificial Sequence
  Description of Artificial Sequence: Synthetic oligonucleotide
ugcgccuccgucugagucu

SEQ ID NO: 708364 - RNA, 19 nt, Artificial Sequence
  Description of Artificial Sequence: Synthetic oligonucleotide
augacgcuccccaacacca

SEQ ID NO: 708365 - RNA, 19 nt, Artificial Sequence
  Description of Artificial Sequence: Synthetic oligonucleotide
ccgaaggccagauuugccc

SEQ ID NO: 708366 - RNA, 19 nt, Artificial Sequence
  Description of Artificial Sequence: Synthetic oligonucleotide
cucaggguggaagacgcug

SEQ ID NO: 708367 - RNA, 19 nt, Artificial Sequence
  Description of Artificial Sequence: Synthetic oligonucleotide
gagcgggucgagcgggugg

SEQ ID NO: 708368 - RNA, 19 nt, Artificial Sequence
  Description of Artificial Sequence: Synthetic oligonucleotide
agggagacccugcccuaac

SEQ ID NO: 708369 - RNA, 19 nt, Artificial Sequence
  Description of Artificial Sequence: Synthetic oligonucleotide
gaagacgcugggaaagcca

SEQ ID NO: 708370 - RNA, 19 nt, Artificial Sequence
  Description of Artificial Sequence: Synthetic oligonucleotide
aucgaacagguugaugcca

SEQ ID NO: 708371 - RNA, 19 nt, Artificial Sequence
  Description of Artificial Sequence: Synthetic oligonucleotide
gacaaugccacaggccaga

SEQ ID NO: 708372 - RNA, 19 nt, Artificial Sequence
  Description of Artificial Sequence: Synthetic oligonucleotide
gagcgaacagagacgagga

SEQ ID NO: 708373 - RNA, 19 nt, Artificial Sequence
  Description of Artificial Sequence: Synthetic oligonucleotide
cauaugccagggucaugag

SEQ ID NO: 708374 - RNA, 19 nt, Artificial Sequence
  Description of Artificial Sequence: Synthetic oligonucleotide
ugcccagaaugcuaucgau

SEQ ID NO: 708375 - RNA, 19 nt, Artificial Sequence
  Description of Artificial Sequence: Synthetic oligonucleotide
uccaccccagaagaucuug

SEQ ID NO: 708376 - RNA, 19 nt, Artificial Sequence
  Description of Artificial Sequence: Synthetic oligonucleotide
gauggaagacgacaauuuu

SEQ ID NO: 708377 - RNA, 19 nt, Artificial Sequence
  Description of Artificial Sequence: Synthetic oligonucleotide
aguagggcgggaugccacu

SEQ ID NO: 708378 - RNA, 19 nt, Artificial Sequence
  Description of Artificial Sequence: Synthetic oligonucleotide
cucacagaugggugggauc

SEQ ID NO: 708379 - RNA, 19 nt, Artificial Sequence
  Description of Artificial Sequence: Synthetic oligonucleotide
acucggccaugacuucugg

SEQ ID NO: 708380 - RNA, 19 nt, Artificial Sequence
  Description of Artificial Sequence: Synthetic oligonucleotide
gaggggaccggaaacuguc

SEQ ID NO: 708381 - RNA, 19 nt, Artificial Sequence
  Description of Artificial Sequence: Synthetic oligonucleotide
ccuaaucgaugccaucucc

SEQ ID NO: 708382 - RNA, 19 nt, Artificial Sequence
  Description of Artificial Sequence: Synthetic oligonucleotide
gacgacaauuuuggaagga

SEQ ID NO: 708383 - RNA, 19 nt, Artificial Sequence
  Description of Artificial Sequence: Synthetic oligonucleotide
gcagccuaggcgcucggcg

SEQ ID NO: 708384 - RNA, 19 nt, Artificial Sequence
  Description of Artificial Sequence: Synthetic oligonucleotide
cgacaauuuuggaaggacc

SEQ ID NO: 708385 - RNA, 19 nt, Artificial Sequence
  Description of Artificial Sequence: Synthetic oligonucleotide
uauuuccacucggccauga

SEQ ID NO: 708386 - RNA, 19 nt, Artificial Sequence
  Description of Artificial Sequence: Synthetic oligonucleotide
aggccagccuugaacaaag

SEQ ID NO: 708387 - RNA, 19 nt, Artificial Sequence
  Description of Artificial Sequence: Synthetic oligonucleotide
uaggcgcucggcgauggcc

SEQ ID NO: 708388 - RNA, 19 nt, Artificial Sequence
  Description of Artificial Sequence: Synthetic oligonucleotide
ucgaugccaucuccuggca

SEQ ID NO: 708389 - RNA, 19 nt, Artificial Sequence
  Description of Artificial Sequence: Synthetic oligonucleotide
gccuaggccagcugugugg

SEQ ID NO: 708390 - RNA, 19 nt, Artificial Sequence
  Description of Artificial Sequence: Synthetic oligonucleotide
ugacgugccccaguacaug

SEQ ID NO: 708391 - RNA, 19 nt, Artificial Sequence
  Description of Artificial Sequence: Synthetic oligonucleotide
uaaauacgggcugcgccuc

SEQ ID NO: 708392 - RNA, 19 nt, Artificial Sequence
  Description of Artificial Sequence: Synthetic oligonucleotide
ggugggaugcaauuagcaa

SEQ ID NO: 708393 - RNA, 19 nt, Artificial Sequence
  Description of Artificial Sequence: Synthetic oligonucleotide
gaccggaaacuguccgagc

SEQ ID NO: 708394 - RNA, 19 nt, Artificial Sequence
  Description of Artificial Sequence: Synthetic oligonucleotide
agaugggugggaucagguu

SEQ ID NO: 708395 - RNA, 19 nt, Artificial Sequence
  Description of Artificial Sequence: Synthetic oligonucleotide
uagaccucugcgguaucga

SEQ ID NO: 708396 - RNA, 19 nt, Artificial Sequence
  Description of Artificial Sequence: Synthetic oligonucleotide
gacccgaaggccagauuug

SEQ ID NO: 708397 - RNA, 19 nt, Artificial Sequence
  Description of Artificial Sequence: Synthetic oligonucleotide
agguugaacugccgagcca

SEQ ID NO: 708398 - RNA, 19 nt, Artificial Sequence
  Description of Artificial Sequence: Synthetic oligonucleotide
ggcgaagaccacauccacg

SEQ ID NO: 708399 - RNA, 19 nt, Artificial Sequence
  Description of Artificial Sequence: Synthetic oligonucleotide
aggggaccggaaacugucc

SEQ ID NO: 708400 - RNA, 19 nt, Artificial Sequence
  Description of Artificial Sequence: Synthetic oligonucleotide
gccagccuugaacaaagug

SEQ ID NO: 708401 - RNA, 19 nt, Artificial Sequence
  Description of Artificial Sequence: Synthetic oligonucleotide
cuggaggcgcuugcggucg

SEQ ID NO: 708402 - RNA, 19 nt, Artificial Sequence
  Description of Artificial Sequence: Synthetic oligonucleotide
gaaggucacccauguucca

SEQ ID NO: 708403 - RNA, 19 nt, Artificial Sequence
  Description of Artificial Sequence: Synthetic oligonucleotide
aacuguccgagcgggucga

SEQ ID NO: 708404 - RNA, 19 nt, Artificial Sequence
  Description of Artificial Sequence: Synthetic oligonucleotide
cacauagcaagcagggccu

SEQ ID NO: 708405 - RNA, 19 nt, Artificial Sequence
  Description of Artificial Sequence: Synthetic oligonucleotide
uauugcccagaaugcuauc

SEQ ID NO: 708406 - RNA, 19 nt, Artificial Sequence
  Description of Artificial Sequence: Synthetic oligonucleotide
uucccuaaucgaugccauc

SEQ ID NO: 708407 - RNA, 19 nt, Artificial Sequence
  Description of Artificial Sequence: Synthetic oligonucleotide
ugacgcuccccaacaccac

SEQ ID NO: 708408 - RNA, 19 nt, Artificial Sequence
  Description of Artificial Sequence: Synthetic oligonucleotide
agccagcuaggucaguaua

SEQ ID NO: 708409 - RNA, 19 nt, Artificial Sequence
  Description of Artificial Sequence: Synthetic oligonucleotide
aggguuuauugcccagaau

SEQ ID NO: 708410 - RNA, 19 nt, Artificial Sequence
  Description of Artificial Sequence: Synthetic oligonucleotide
agcgggucgagcggguggg

SEQ ID NO: 708411 - RNA, 19 nt, Artificial Sequence
  Description of Artificial Sequence: Synthetic oligonucleotide
gcuguaggguuuauugccc

SEQ ID NO: 708412 - RNA, 19 nt, Artificial Sequence
  Description of Artificial Sequence: Synthetic oligonucleotide
guaggguuuauugcccaga

SEQ ID NO: 708413 - RNA, 19 nt, Artificial Sequence
  Description of Artificial Sequence: Synthetic oligonucleotide
gucuucccuaaucgaugcc

SEQ ID NO: 708414 - RNA, 19 nt, Artificial Sequence
  Description of Artificial Sequence: Synthetic oligonucleotide
agaccucugcgguaucgaa

SEQ ID NO: 708415 - RNA, 19 nt, Artificial Sequence
  Description of Artificial Sequence: Synthetic oligonucleotide
ggaccggaaacuguccgag

SEQ ID NO: 708416 - RNA, 19 nt, Artificial Sequence
  Description of Artificial Sequence: Synthetic oligonucleotide
caaggagccucgcucauua

SEQ ID NO: 708417 - RNA, 19 nt, Artificial Sequence
  Description of Artificial Sequence: Synthetic oligonucleotide
uuccaagccccaggcagga

SEQ ID NO: 708418 - RNA, 19 nt, Artificial Sequence
  Description of Artificial Sequence: Synthetic oligonucleotide
gaguagggcgggaugccac

SEQ ID NO: 708419 - RNA, 19 nt, Artificial Sequence
  Description of Artificial Sequence: Synthetic oligonucleotide
agaaugcuaucgaucucgu

SEQ ID NO: 708420 - RNA, 19 nt, Artificial Sequence
  Description of Artificial Sequence: Synthetic oligonucleotide
uggcggugacuuuggagau

SEQ ID NO: 708421 - RNA, 19 nt, Artificial Sequence
  Description of Artificial Sequence: Synthetic oligonucleotide
cucguggaugauggaagac

SEQ ID NO: 708422 - RNA, 19 nt, Artificial Sequence
  Description of Artificial Sequence: Synthetic oligonucleotide
ccgggaaaggccucucucc

SEQ ID NO: 708423 - RNA, 19 nt, Artificial Sequence
  Description of Artificial Sequence: Synthetic oligonucleotide
agagccagcuaggucagua

SEQ ID NO: 708424 - RNA, 19 nt, Artificial Sequence
  Description of Artificial Sequence: Synthetic oligonucleotide
ugcuaucgaucucguggau

SEQ ID NO: 708425 - RNA, 19 nt, Artificial Sequence
  Description of Artificial Sequence: Synthetic oligonucleotide
gcuaucgaucucguggaug

SEQ ID NO: 708426 - RNA, 19 nt, Artificial Sequence
  Description of Artificial Sequence: Synthetic oligonucleotide
gguaucgaacagguugaug

SEQ ID NO: 708427 - RNA, 19 nt, Artificial Sequence
  Description of Artificial Sequence: Synthetic oligonucleotide
gaccuguauugcgccaaug

SEQ ID NO: 708428 - RNA, 19 nt, Artificial Sequence
  Description of Artificial Sequence: Synthetic oligonucleotide
gggacuuaggaucuauagu

SEQ ID NO: 708429 - RNA, 19 nt, Artificial Sequence
  Description of Artificial Sequence: Synthetic oligonucleotide
cgggaugccacugucauac

SEQ ID NO: 708430 - RNA, 19 nt, Artificial Sequence
  Description of Artificial Sequence: Synthetic oligonucleotide
cauccacguaguccagcug

SEQ ID NO: 708431 - RNA, 19 nt, Artificial Sequence
  Description of Artificial Sequence: Synthetic oligonucleotide
auccccugguugaugacgu

SEQ ID NO: 708432 - RNA, 19 nt, Artificial Sequence
  Description of Artificial Sequence: Synthetic oligonucleotide
cauggcgcccacuccuauc

SEQ ID NO: 708433 - RNA, 19 nt, Artificial Sequence
  Description of Artificial Sequence: Synthetic oligonucleotide
ggucacccauguuccaagc

SEQ ID NO: 708434 - RNA, 19 nt, Artificial Sequence
  Description of Artificial Sequence: Synthetic oligonucleotide
gagcgugaccccaggccag

SEQ ID NO: 708435 - RNA, 19 nt, Artificial Sequence
  Description of Artificial Sequence: Synthetic oligonucleotide
cagagcauaaaggcuucca

SEQ ID NO: 708436 - RNA, 19 nt, Artificial Sequence
  Description of Artificial Sequence: Synthetic oligonucleotide
gacccugcccuaaccacca

SEQ ID NO: 708437 - RNA, 19 nt, Artificial Sequence
  Description of Artificial Sequence: Synthetic oligonucleotide
ggaagacgcugggaaagcc

SEQ ID NO: 708438 - RNA, 19 nt, Artificial Sequence
  Description of Artificial Sequence: Synthetic oligonucleotide
gcagaagcgagcgaacaga

SEQ ID NO: 708439 - RNA, 19 nt, Artificial Sequence
  Description of Artificial Sequence: Synthetic oligonucleotide
caggggcuuugcucugagg

SEQ ID NO: 708440 - RNA, 19 nt, Artificial Sequence
  Description of Artificial Sequence: Synthetic oligonucleotide
acgcugggaaagccagaug

SEQ ID NO: 708441 - RNA, 19 nt, Artificial Sequence
  Description of Artificial Sequence: Synthetic oligonucleotide
aggaccuguauugcgccaa

SEQ ID NO: 708442 - RNA, 19 nt, Artificial Sequence
  Description of Artificial Sequence: Synthetic oligonucleotide
agaagcgagcgaacagaga

SEQ ID NO: 708443 - RNA, 19 nt, Artificial Sequence
  Description of Artificial Sequence: Synthetic oligonucleotide
ggcguguuggggucugggc

SEQ ID NO: 708444 - RNA, 19 nt, Artificial Sequence
  Description of Artificial Sequence: Synthetic oligonucleotide
aggccagauuugcccaggu

SEQ ID NO: 708445 - RNA, 19 nt, Artificial Sequence
  Description of Artificial Sequence: Synthetic oligonucleotide
agcguagaccucugcggua

SEQ ID NO: 708446 - RNA, 19 nt, Artificial Sequence
  Description of Artificial Sequence: Synthetic oligonucleotide
gccagaugggaucccugcc

SEQ ID NO: 708447 - RNA, 19 nt, Artificial Sequence
  Description of Artificial Sequence: Synthetic oligonucleotide
ggcgcccacuccuaucuug

SEQ ID NO: 708448 - RNA, 19 nt, Artificial Sequence
  Description of Artificial Sequence: Synthetic oligonucleotide
ccggaaacuguccgagcgg

SEQ ID NO: 708449 - RNA, 19 nt, Artificial Sequence
  Description of Artificial Sequence: Synthetic oligonucleotide
gggcgguuggcgaagacca

SEQ ID NO: 708450 - RNA, 19 nt, Artificial Sequence
  Description of Artificial Sequence: Synthetic oligonucleotide
cucggguuuuauuugucau

SEQ ID NO: 708451 - RNA, 19 nt, Artificial Sequence
  Description of Artificial Sequence: Synthetic oligonucleotide
cccacuccuaucuugugga

SEQ ID NO: 708452 - RNA, 19 nt, Artificial Sequence
  Description of Artificial Sequence: Synthetic oligonucleotide
ccauaaauacgggcugcgc

SEQ ID NO: 708453 - RNA, 19 nt, Artificial Sequence
  Description of Artificial Sequence: Synthetic oligonucleotide
ccugcccuaaccaccagga

SEQ ID NO: 708454 - RNA, 19 nt, Artificial Sequence
  Description of Artificial Sequence: Synthetic oligonucleotide
ugcuuccgggaaaggccuc

SEQ ID NO: 708455 - RNA, 19 nt, Artificial Sequence
  Description of Artificial Sequence: Synthetic oligonucleotide
gacgcugggaaagccagau

SEQ ID NO: 708456 - RNA, 19 nt, Artificial Sequence
  Description of Artificial Sequence: Synthetic oligonucleotide
ugacgcccucguuccucag

SEQ ID NO: 708457 - RNA, 19 nt, Artificial Sequence
  Description of Artificial Sequence: Synthetic oligonucleotide
gcccucguuccucaggcac

SEQ ID NO: 708458 - RNA, 19 nt, Artificial Sequence
  Description of Artificial Sequence: Synthetic oligonucleotide
aacugccgagccaccgagu

SEQ ID NO: 708459 - RNA, 19 nt, Artificial Sequence
  Description of Artificial Sequence: Synthetic oligonucleotide
cugacgcccucguuccuca

SEQ ID NO: 708460 - RNA, 19 nt, Artificial Sequence
  Description of Artificial Sequence: Synthetic oligonucleotide
ggucauggcgcccacuccu

SEQ ID NO: 708461 - RNA, 19 nt, Artificial Sequence
  Description of Artificial Sequence: Synthetic oligonucleotide
ggcgcuugcggucggccug

SEQ ID NO: 708462 - RNA, 19 nt, Artificial Sequence
  Description of Artificial Sequence: Synthetic oligonucleotide
cagcagaagcgagcgaaca

SEQ ID NO: 708463 - RNA, 19 nt, Artificial Sequence
  Description of Artificial Sequence: Synthetic oligonucleotide
uuccaccccagaagaucuu

SEQ ID NO: 708464 - RNA, 19 nt, Artificial Sequence
  Description of Artificial Sequence: Synthetic oligonucleotide
cccucguuccucaggcacc

SEQ ID NO: 708465 - RNA, 19 nt, Artificial Sequence
  Description of Artificial Sequence: Synthetic oligonucleotide
gcgguaucgaacagguuga

SEQ ID NO: 708466 - RNA, 19 nt, Artificial Sequence
  Description of Artificial Sequence: Synthetic oligonucleotide
ggcucuggaguagggcggg

SEQ ID NO: 708467 - RNA, 19 nt, Artificial Sequence
  Description of Artificial Sequence: Synthetic oligonucleotide
cuaggccagcuguguggac

SEQ ID NO: 708468 - RNA, 19 nt, Artificial Sequence
  Description of Artificial Sequence: Synthetic oligonucleotide
cugccuucucugaggauua

SEQ ID NO: 708469 - RNA, 19 nt, Artificial Sequence
  Description of Artificial Sequence: Synthetic oligonucleotide
cuucccuaaucgaugccau

SEQ ID NO: 708470 - RNA, 19 nt, Artificial Sequence
  Description of Artificial Sequence: Synthetic oligonucleotide
ccuccgucugagucugucc

SEQ ID NO: 708471 - RNA, 19 nt, Artificial Sequence
  Description of Artificial Sequence: Synthetic oligonucleotide
cccgaaggccagauuugcc

SEQ ID NO: 708472 - RNA, 19 nt, Artificial Sequence
  Description of Artificial Sequence: Synthetic oligonucleotide
uaucgaucucguggaugau

SEQ ID NO: 708473 - RNA, 19 nt, Artificial Sequence
  Description of Artificial Sequence: Synthetic oligonucleotide
gaccgaagggcucggguuu

SEQ ID NO: 708474 - RNA, 19 nt, Artificial Sequence
  Description of Artificial Sequence: Synthetic oligonucleotide
gccuggaaagagcgugacc

SEQ ID NO: 708475 - RNA, 19 nt, Artificial Sequence
  Description of Artificial Sequence: Synthetic oligonucleotide
auacgggcugcgccuccgu

SEQ ID NO: 708476 - RNA, 19 nt, Artificial Sequence
  Description of Artificial Sequence: Synthetic oligonucleotide
guauugcgccaauguucuc

SEQ ID NO: 708477 - RNA, 19 nt, Artificial Sequence
  Description of Artificial Sequence: Synthetic oligonucleotide
gucugggcauaguguuuuc

SEQ ID NO: 708478 - RNA, 19 nt, Artificial Sequence
  Description of Artificial Sequence: Synthetic oligonucleotide
augugguauucagccugcu

SEQ ID NO: 708479 - RNA, 19 nt, Artificial Sequence
  Description of Artificial Sequence: Synthetic oligonucleotide
gugccagagcauaaaggcu

SEQ ID NO: 708480 - RNA, 19 nt, Artificial Sequence
  Description of Artificial Sequence: Synthetic oligonucleotide
gagccaccgaguaggccuc

SEQ ID NO: 708481 - RNA, 19 nt, Artificial Sequence
  Description of Artificial Sequence: Synthetic oligonucleotide
cgugacgugccccaguaca

SEQ ID NO: 708482 - RNA, 19 nt, Artificial Sequence
  Description of Artificial Sequence: Synthetic oligonucleotide
cagcguagaccucugcggu

SEQ ID NO: 708483 - RNA, 19 nt, Artificial Sequence
  Description of Artificial Sequence: Synthetic oligonucleotide
gaagggcucggguuuuauu

SEQ ID NO: 708484 - RNA, 19 nt, Artificial Sequence
  Description of Artificial Sequence: Synthetic oligonucleotide
acgugggucauggcccgca

SEQ ID NO: 708485 - RNA, 19 nt, Artificial Sequence
  Description of Artificial Sequence: Synthetic oligonucleotide
gcaggggcuuugcucugag

SEQ ID NO: 708486 - RNA, 19 nt, Artificial Sequence
  Description of Artificial Sequence: Synthetic oligonucleotide
gggucugggcgguuggcga

SEQ ID NO: 708487 - RNA, 19 nt, Artificial Sequence
  Description of Artificial Sequence: Synthetic oligonucleotide
cuggaacaugugguauuca

SEQ ID NO: 708488 - RNA, 19 nt, Artificial Sequence
  Description of Artificial Sequence: Synthetic oligonucleotide
cccuaaucgaugccaucuc

SEQ ID NO: 708489 - RNA, 19 nt, Artificial Sequence
  Description of Artificial Sequence: Synthetic oligonucleotide
cacccagcaggggcuuugc

SEQ ID NO: 708490 - RNA, 19 nt, Artificial Sequence
  Description of Artificial Sequence: Synthetic oligonucleotide
gcuggaccgucuccauccc

SEQ ID NO: 708491 - RNA, 19 nt, Artificial Sequence
  Description of Artificial Sequence: Synthetic oligonucleotide
caccucagccuugccagca

SEQ ID NO: 708492 - RNA, 19 nt, Artificial Sequence
  Description of Artificial Sequence: Synthetic oligonucleotide
gggcguguuggggucuggg

SEQ ID NO: 708493 - RNA, 19 nt, Artificial Sequence
  Description of Artificial Sequence: Synthetic oligonucleotide
gcuuugcucugaggucugg

SEQ ID NO: 708494 - RNA, 19 nt, Artificial Sequence
  Description of Artificial Sequence: Synthetic oligonucleotide
uugcgccaauguucuccau

SEQ ID NO: 708495 - RNA, 19 nt, Artificial Sequence
  Description of Artificial Sequence: Synthetic oligonucleotide
cgaaggccagauuugccca

SEQ ID NO: 708496 - RNA, 19 nt, Artificial Sequence
  Description of Artificial Sequence: Synthetic oligonucleotide
cuugaacaaagugccugau

SEQ ID NO: 708497 - RNA, 19 nt, Artificial Sequence
  Description of Artificial Sequence: Synthetic oligonucleotide
gccauugcagggcccuguc

SEQ ID NO: 708498 - RNA, 19 nt, Artificial Sequence
  Description of Artificial Sequence: Synthetic oligonucleotide
ggccuggaaagagcgugac

SEQ ID NO: 708499 - RNA, 19 nt, Artificial Sequence
  Description of Artificial Sequence: Synthetic oligonucleotide
ggucugggcgguuggcgaa

SEQ ID NO: 708500 - RNA, 19 nt, Artificial Sequence
  Description of Artificial Sequence: Synthetic oligonucleotide
accgaagggcucggguuuu

SEQ ID NO: 708501 - RNA, 19 nt, Artificial Sequence
  Description of Artificial Sequence: Synthetic oligonucleotide
cugagucuguccggaagcu

SEQ ID NO: 708502 - RNA, 19 nt, Artificial Sequence
  Description of Artificial Sequence: Synthetic oligonucleotide
uggcgcccacuccuaucuu

SEQ ID NO: 708503 - RNA, 19 nt, Artificial Sequence
  Description of Artificial Sequence: Synthetic oligonucleotide
gggaugcaauuagcaagga

SEQ ID NO: 708504 - RNA, 19 nt, Artificial Sequence
  Description of Artificial Sequence: Synthetic oligonucleotide
gcugacgcccucguuccuc

SEQ ID NO: 708505 - RNA, 19 nt, Artificial Sequence
  Description of Artificial Sequence: Synthetic oligonucleotide
gugacgugccccaguacau

SEQ ID NO: 708506 - RNA, 19 nt, Artificial Sequence
  Description of Artificial Sequence: Synthetic oligonucleotide
ccucugcgguaucgaacag

SEQ ID NO: 708507 - RNA, 19 nt, Artificial Sequence
  Description of Artificial Sequence: Synthetic oligonucleotide
ccuguauugcgccaauguu

SEQ ID NO: 708508 - RNA, 19 nt, Artificial Sequence
  Description of Artificial Sequence: Synthetic oligonucleotide
gcgccuccgucugagucug

SEQ ID NO: 708509 - RNA, 19 nt, Artificial Sequence
  Description of Artificial Sequence: Synthetic oligonucleotide
gagacccgaaggccagauu

SEQ ID NO: 708510 - RNA, 19 nt, Artificial Sequence
  Description of Artificial Sequence: Synthetic oligonucleotide
cagcaaggguaagggugga

SEQ ID NO: 708511 - RNA, 19 nt, Artificial Sequence
  Description of Artificial Sequence: Synthetic oligonucleotide
gcgugacgugccccaguac

SEQ ID NO: 708512 - RNA, 19 nt, Artificial Sequence
  Description of Artificial Sequence: Synthetic oligonucleotide
cgccaauguucuccauaag

SEQ ID NO: 708513 - RNA, 19 nt, Artificial Sequence
  Description of Artificial Sequence: Synthetic oligonucleotide
gccuccgucugagucuguc

SEQ ID NO: 708514 - RNA, 19 nt, Artificial Sequence
  Description of Artificial Sequence: Synthetic oligonucleotide
gcgagcgaacagagacgag

SEQ ID NO: 708515 - RNA, 19 nt, Artificial Sequence
  Description of Artificial Sequence: Synthetic oligonucleotide
ggcgguuggcgaagaccac

SEQ ID NO: 708516 - RNA, 19 nt, Artificial Sequence
  Description of Artificial Sequence: Synthetic oligonucleotide
ccgucugagucuguccgga

SEQ ID NO: 708517 - RNA, 19 nt, Artificial Sequence
  Description of Artificial Sequence: Synthetic oligonucleotide
cucuggaguagggcgggau

SEQ ID NO: 708518 - RNA, 19 nt, Artificial Sequence
  Description of Artificial Sequence: Synthetic oligonucleotide
gcguagaccucugcgguau

SEQ ID NO: 708519 - RNA, 19 nt, Artificial Sequence
  Description of Artificial Sequence: Synthetic oligonucleotide
cugcccuaaccaccaggau

SEQ ID NO: 708520 - RNA, 19 nt, Artificial Sequence
  Description of Artificial Sequence: Synthetic oligonucleotide
ccacuccuaucuuguggaa

SEQ ID NO: 708521 - RNA, 19 nt, Artificial Sequence
  Description of Artificial Sequence: Synthetic oligonucleotide
caugggcguguuggggucu

SEQ ID NO: 708522 - RNA, 19 nt, Artificial Sequence
  Description of Artificial Sequence: Synthetic oligonucleotide
cugaggucucaggguggaa

SEQ ID NO: 708523 - RNA, 19 nt, Artificial Sequence
  Description of Artificial Sequence: Synthetic oligonucleotide
ggaccuguauugcgccaau

SEQ ID NO: 708524 - RNA, 19 nt, Artificial Sequence
  Description of Artificial Sequence: Synthetic oligonucleotide
gccuaggcgcucggcgaug

SEQ ID NO: 708525 - RNA, 19 nt, Artificial Sequence
  Description of Artificial Sequence: Synthetic oligonucleotide
cagcgugacgugccccagu

SEQ ID NO: 708526 - RNA, 19 nt, Artificial Sequence
  Description of Artificial Sequence: Synthetic oligonucleotide
cgcccacuccuaucuugug

SEQ ID NO: 708527 - RNA, 19 nt, Artificial Sequence
  Description of Artificial Sequence: Synthetic oligonucleotide
gcgggucgagcgggugggg

SEQ ID NO: 708528 - RNA, 19 nt, Artificial Sequence
  Description of Artificial Sequence: Synthetic oligonucleotide
ggccauugcagggcccugu

SEQ ID NO: 708529 - RNA, 19 nt, Artificial Sequence
  Description of Artificial Sequence: Synthetic oligonucleotide
cguagaccucugcgguauc

SEQ ID NO: 708530 - RNA, 19 nt, Artificial Sequence
  Description of Artificial Sequence: Synthetic oligonucleotide
cugcgguaucgaacagguu

SEQ ID NO: 708531 - RNA, 19 nt, Artificial Sequence
  Description of Artificial Sequence: Synthetic oligonucleotide
cccuaaccaccaggaucug

SEQ ID NO: 708532 - RNA, 19 nt, Artificial Sequence
  Description of Artificial Sequence: Synthetic oligonucleotide
gccaccgaguaggccucca

SEQ ID NO: 708533 - RNA, 19 nt, Artificial Sequence
  Description of Artificial Sequence: Synthetic oligonucleotide
ggcgccggcccuccucacu

SEQ ID NO: 708534 - RNA, 19 nt, Artificial Sequence
  Description of Artificial Sequence: Synthetic oligonucleotide
ccacucggccaugacuucu

SEQ ID NO: 708535 - RNA, 19 nt, Artificial Sequence
  Description of Artificial Sequence: Synthetic oligonucleotide
cgguuggcgaagaccacau

SEQ ID NO: 708536 - RNA, 19 nt, Artificial Sequence
  Description of Artificial Sequence: Synthetic oligonucleotide
gggucauggcccgcacggu

SEQ ID NO: 708537 - RNA, 19 nt, Artificial Sequence
  Description of Artificial Sequence: Synthetic oligonucleotide
gcgccggcccuccucacuu

SEQ ID NO: 708538 - RNA, 19 nt, Artificial Sequence
  Description of Artificial Sequence: Synthetic oligonucleotide
cggcgauggccugcaguuc

SEQ ID NO: 708539 - RNA, 19 nt, Artificial Sequence
  Description of Artificial Sequence: Synthetic oligonucleotide
cgcccucguuccucaggca

SEQ ID NO: 708540 - RNA, 19 nt, Artificial Sequence
  Description of Artificial Sequence: Synthetic oligonucleotide
ggcacccaucagacagcau

SEQ ID NO: 708541 - RNA, 19 nt, Artificial Sequence
  Description of Artificial Sequence: Synthetic oligonucleotide
ccgagcgggucgagcgggu

SEQ ID NO: 708542 - RNA, 19 nt, Artificial Sequence
  Description of Artificial Sequence: Synthetic oligonucleotide
cccgaaggucacccauguu

SEQ ID NO: 708543 - RNA, 19 nt, Artificial Sequence
  Description of Artificial Sequence: Synthetic oligonucleotide
cgaagggcucggguuuuau

SEQ ID NO: 708544 - RNA, 19 nt, Artificial Sequence
  Description of Artificial Sequence: Synthetic oligonucleotide
cggugacuuuggagaucau

SEQ ID NO: 708545 - RNA, 19 nt, Artificial Sequence
  Description of Artificial Sequence: Synthetic oligonucleotide
cgcuugcggucggccuggu

SEQ ID NO: 708546 - RNA, 19 nt, Artificial Sequence
  Description of Artificial Sequence: Synthetic oligonucleotide
aauacuuuagcucauaccc

SEQ ID NO: 708547 - RNA, 19 nt, Artificial Sequence
  Description of Artificial Sequence: Synthetic oligonucleotide
aauccauugaaaugagagc

SEQ ID NO: 708548 - RNA, 19 nt, Artificial Sequence
  Description of Artificial Sequence: Synthetic oligonucleotide
uuaaaugucggacauaccu

SEQ ID NO: 708549 - RNA, 19 nt, Artificial Sequence
  Description of Artificial Sequence: Synthetic oligonucleotide
uucuucaauucauagggag

SEQ ID NO: 708550 - RNA, 19 nt, Artificial Sequence
  Description of Artificial Sequence: Synthetic oligonucleotide
uuuaauccauugaaaugag

SEQ ID NO: 708551 - RNA, 19 nt, Artificial Sequence
  Description of Artificial Sequence: Synthetic oligonucleotide
ucuuuagccaaaacgucug

SEQ ID NO: 708552 - RNA, 19 nt, Artificial Sequence
  Description of Artificial Sequence: Synthetic oligonucleotide
auagggagugucuuugcac

SEQ ID NO: 708553 - RNA, 19 nt, Artificial Sequence
  Description of Artificial Sequence: Synthetic oligonucleotide
cauuuucgggucuuuagcc

SEQ ID NO: 708554 - RNA, 19 nt, Artificial Sequence
  Description of Artificial Sequence: Synthetic oligonucleotide
uaaaauccgagucgcugag

SEQ ID NO: 708555 - RNA, 19 nt, Artificial Sequence
  Description of Artificial Sequence: Synthetic oligonucleotide
caaaacgucugcucgauuc

SEQ ID NO: 708556 - RNA, 19 nt, Artificial Sequence
  Description of Artificial Sequence: Synthetic oligonucleotide
uuuucgaguguggagaugu

SEQ ID NO: 708557 - RNA, 19 nt, Artificial Sequence
  Description of Artificial Sequence: Synthetic oligonucleotide
uaagggugauaccccaagg

SEQ ID NO: 708558 - RNA, 19 nt, Artificial Sequence
  Description of Artificial Sequence: Synthetic oligonucleotide
aaaacgucugcucgauuca

SEQ ID NO: 708559 - RNA, 19 nt, Artificial Sequence
  Description of Artificial Sequence: Synthetic oligonucleotide
uguggagauguauacauuu

SEQ ID NO: 708560 - RNA, 19 nt, Artificial Sequence
  Description of Artificial Sequence: Synthetic oligonucleotide
cauaccgggaguguggucg

SEQ ID NO: 708561 - RNA, 19 nt, Artificial Sequence
  Description of Artificial Sequence: Synthetic oligonucleotide
ucggacauaccuuucuuca

SEQ ID NO: 708562 - RNA, 19 nt, Artificial Sequence
  Description of Artificial Sequence: Synthetic oligonucleotide
gaaccugccauaccgggag

SEQ ID NO: 708563 - RNA, 19 nt, Artificial Sequence
  Description of Artificial Sequence: Synthetic oligonucleotide
uuugcgggcccauuugggg

SEQ ID NO: 708564 - RNA, 19 nt, Artificial Sequence
  Description of Artificial Sequence: Synthetic oligonucleotide
aguagagcgccagcgaggc

SEQ ID NO: 708565 - RNA, 19 nt, Artificial Sequence
  Description of Artificial Sequence: Synthetic oligonucleotide
uccuuaaaauccgagucgc

SEQ ID NO: 708566 - RNA, 19 nt, Artificial Sequence
  Description of Artificial Sequence: Synthetic oligonucleotide
uucguggcggaccucagug

SEQ ID NO: 708567 - RNA, 19 nt, Artificial Sequence
  Description of Artificial Sequence: Synthetic oligonucleotide
uagggagugucuuugcaca

SEQ ID NO: 708568 - RNA, 19 nt, Artificial Sequence
  Description of Artificial Sequence: Synthetic oligonucleotide
uuaauccauugaaaugaga

SEQ ID NO: 708569 - RNA, 19 nt, Artificial Sequence
  Description of Artificial Sequence: Synthetic oligonucleotide
uuaaacuaugaaacaguuu

SEQ ID NO: 708570 - RNA, 19 nt, Artificial Sequence
  Description of Artificial Sequence: Synthetic oligonucleotide
ugggguacggguucuugcg

SEQ ID NO: 708571 - RNA, 19 nt, Artificial Sequence
  Description of Artificial Sequence: Synthetic oligonucleotide
uccauugaaaugagagcca

SEQ ID NO: 708572 - RNA, 19 nt, Artificial Sequence
  Description of Artificial Sequence: Synthetic oligonucleotide
gaaccagguggacaccugg

SEQ ID NO: 708573 - RNA, 19 nt, Artificial Sequence
  Description of Artificial Sequence: Synthetic oligonucleotide
cauaguucguguagccagg

SEQ ID NO: 708574 - RNA, 19 nt, Artificial Sequence
  Description of Artificial Sequence: Synthetic oligonucleotide
auuuucgggucuuuagcca

SEQ ID NO: 708575 - RNA, 19 nt, Artificial Sequence
  Description of Artificial Sequence: Synthetic oligonucleotide
cucgauucaacaccgucug

SEQ ID NO: 708576 - RNA, 19 nt, Artificial Sequence
  Description of Artificial Sequence: Synthetic oligonucleotide
guaagggugauaccccaag

SEQ ID NO: 708577 - RNA, 19 nt, Artificial Sequence
  Description of Artificial Sequence: Synthetic oligonucleotide
aggaaccugccauaccggg

SEQ ID NO: 708578 - RNA, 19 nt, Artificial Sequence
  Description of Artificial Sequence: Synthetic oligonucleotide
uuuucgggucuuuagccaa

SEQ ID NO: 708579 - RNA, 19 nt, Artificial Sequence
  Description of Artificial Sequence: Synthetic oligonucleotide
ucgaguguggagauguaua

SEQ ID NO: 708580 - RNA, 19 nt, Artificial Sequence
  Description of Artificial Sequence: Synthetic oligonucleotide
agugaggacccgcauccuc

SEQ ID NO: 708581 - RNA, 19 nt, Artificial Sequence
  Description of Artificial Sequence: Synthetic oligonucleotide
uuucuugaggcgccgucga

SEQ ID NO: 708582 - RNA, 19 nt, Artificial Sequence
  Description of Artificial Sequence: Synthetic oligonucleotide
gccaccaaggguuugcccg

SEQ ID NO: 708583 - RNA, 19 nt, Artificial Sequence
  Description of Artificial Sequence: Synthetic oligonucleotide
ggugauaccccaaggaacc

SEQ ID NO: 708584 - RNA, 19 nt, Artificial Sequence
  Description of Artificial Sequence: Synthetic oligonucleotide
aaaguccgggaguaccgca

SEQ ID NO: 708585 - RNA, 19 nt, Artificial Sequence
  Description of Artificial Sequence: Synthetic oligonucleotide
aaugucggacauaccuuuc

SEQ ID NO: 708586 - RNA, 19 nt, Artificial Sequence
  Description of Artificial Sequence: Synthetic oligonucleotide
acggcugguacaaguagcc

SEQ ID NO: 708587 - RNA, 19 nt, Artificial Sequence
  Description of Artificial Sequence: Synthetic oligonucleotide
uccccguaaggguaggagc

SEQ ID NO: 708588 - RNA, 19 nt, Artificial Sequence
  Description of Artificial Sequence: Synthetic oligonucleotide
ucgauucaacaccgucugg

SEQ ID NO: 708589 - RNA, 19 nt, Artificial Sequence
  Description of Artificial Sequence: Synthetic oligonucleotide
aaaugagagccaggacccg

SEQ ID NO: 708590 - RNA, 19 nt, Artificial Sequence
  Description of Artificial Sequence: Synthetic oligonucleotide
aaugacgcuggugcuauau

SEQ ID NO: 708591 - RNA, 19 nt, Artificial Sequence
  Description of Artificial Sequence: Synthetic oligonucleotide
uauaugcggggcacgagua

SEQ ID NO: 708592 - RNA, 19 nt, Artificial Sequence
  Description of Artificial Sequence: Synthetic oligonucleotide
aaggguuugcccgcccacg

SEQ ID NO: 708593 - RNA, 19 nt, Artificial Sequence
  Description of Artificial Sequence: Synthetic oligonucleotide
uggcgaaccagguggacac

SEQ ID NO: 708594 - RNA, 19 nt, Artificial Sequence
  Description of Artificial Sequence: Synthetic oligonucleotide
aacgucugcucgauucaac

SEQ ID NO: 708595 - RNA, 19 nt, Artificial Sequence
  Description of Artificial Sequence: Synthetic oligonucleotide
uguggcgucccgaguggcg

SEQ ID NO: 708596 - RNA, 19 nt, Artificial Sequence
  Description of Artificial Sequence: Synthetic oligonucleotide
agggugauaccccaaggaa

SEQ ID NO: 708597 - RNA, 19 nt, Artificial Sequence
  Description of Artificial Sequence: Synthetic oligonucleotide
ugcucgauucaacaccguc

SEQ ID NO: 708598 - RNA, 19 nt, Artificial Sequence
  Description of Artificial Sequence: Synthetic oligonucleotide
aaguccgggaguaccgcac

SEQ ID NO: 708599 - RNA, 19 nt, Artificial Sequence
  Description of Artificial Sequence: Synthetic oligonucleotide
cacgaguagagcgccagcg

SEQ ID NO: 708600 - RNA, 19 nt, Artificial Sequence
  Description of Artificial Sequence: Synthetic oligonucleotide
gacggagcggugaaggcag

SEQ ID NO: 708601 - RNA, 19 nt, Artificial Sequence
  Description of Artificial Sequence: Synthetic oligonucleotide
uuuggggacggcccgccug

SEQ ID NO: 708602 - RNA, 19 nt, Artificial Sequence
  Description of Artificial Sequence: Synthetic oligonucleotide
ugaggacccgcauccuccg

SEQ ID NO: 708603 - RNA, 19 nt, Artificial Sequence
  Description of Artificial Sequence: Synthetic oligonucleotide
gcgaguggaugacugaggg

SEQ ID NO: 708604 - RNA, 19 nt, Artificial Sequence
  Description of Artificial Sequence: Synthetic oligonucleotide
augucggacauaccuuucu

SEQ ID NO: 708605 - RNA, 19 nt, Artificial Sequence
  Description of Artificial Sequence: Synthetic oligonucleotide
auaugcggggcacgaguag

SEQ ID NO: 708606 - RNA, 19 nt, Artificial Sequence
  Description of Artificial Sequence: Synthetic oligonucleotide
accgcacccgaguuaaaug

SEQ ID NO: 708607 - RNA, 19 nt, Artificial Sequence
  Description of Artificial Sequence: Synthetic oligonucleotide
uagcccugcggguaggaca

SEQ ID NO: 708608 - RNA, 19 nt, Artificial Sequence
  Description of Artificial Sequence: Synthetic oligonucleotide
uggcggaccucagugggcg

SEQ ID NO: 708609 - RNA, 19 nt, Artificial Sequence
  Description of Artificial Sequence: Synthetic oligonucleotide
acggagagcccucgcuccc

SEQ ID NO: 708610 - RNA, 19 nt, Artificial Sequence
  Description of Artificial Sequence: Synthetic oligonucleotide
accgagcucauccgugcgg

SEQ ID NO: 708611 - RNA, 19 nt, Artificial Sequence
  Description of Artificial Sequence: Synthetic oligonucleotide
cgggucuuuagccaaaacg

SEQ ID NO: 708612 - RNA, 19 nt, Artificial Sequence
  Description of Artificial Sequence: Synthetic oligonucleotide
cucgcugcgguuccguggc

SEQ ID NO: 708613 - RNA, 19 nt, Artificial Sequence
  Description of Artificial Sequence: Synthetic oligonucleotide
uaugcggggcacgaguaga

SEQ ID NO: 708614 - RNA, 19 nt, Artificial Sequence
  Description of Artificial Sequence: Synthetic oligonucleotide
uguccgaggaaguggcuau

SEQ ID NO: 708615 - RNA, 19 nt, Artificial Sequence
  Description of Artificial Sequence: Synthetic oligonucleotide
auacuuuagcucauaccca

SEQ ID NO: 708616 - RNA, 19 nt, Artificial Sequence
  Description of Artificial Sequence: Synthetic oligonucleotide
aguaccgcacccgaguuaa

SEQ ID NO: 708617 - RNA, 19 nt, Artificial Sequence
  Description of Artificial Sequence: Synthetic oligonucleotide
cccacguacgagaaggcgg

SEQ ID NO: 708618 - RNA, 19 nt, Artificial Sequence
  Description of Artificial Sequence: Synthetic oligonucleotide
uugcgggcccauuugggga

SEQ ID NO: 708619 - RNA, 19 nt, Artificial Sequence
  Description of Artificial Sequence: Synthetic oligonucleotide
ucgagcguuggcgaaccag

SEQ ID NO: 708620 - RNA, 19 nt, Artificial Sequence
  Description of Artificial Sequence: Synthetic oligonucleotide
guucgcagcccgcagucgc

SEQ ID NO: 708621 - RNA, 19 nt, Artificial Sequence
  Description of Artificial Sequence: Synthetic oligonucleotide
uggucguagggagagccca

SEQ ID NO: 708622 - RNA, 19 nt, Artificial Sequence
  Description of Artificial Sequence: Synthetic oligonucleotide
ugcuauaugcggggcacga

SEQ ID NO: 708623 - RNA, 19 nt, Artificial Sequence
  Description of Artificial Sequence: Synthetic oligonucleotide
gaccgagcucauccgugcg

SEQ ID NO: 708624 - RNA, 19 nt, Artificial Sequence
  Description of Artificial Sequence: Synthetic oligonucleotide
gauagaagggcgcggugua

SEQ ID NO: 708625 - RNA, 19 nt, Artificial Sequence
  Description of Artificial Sequence: Synthetic oligonucleotide
ugucggacauaccuuucuu

SEQ ID NO: 708626 - RNA, 19 nt, Artificial Sequence
  Description of Artificial Sequence: Synthetic oligonucleotide
gucggacauaccuuucuuc

SEQ ID NO: 708627 - RNA, 19 nt, Artificial Sequence
  Description of Artificial Sequence: Synthetic oligonucleotide
augacgcuggugcuauaug

SEQ ID NO: 708628 - RNA, 19 nt, Artificial Sequence
  Description of Artificial Sequence: Synthetic oligonucleotide
gagcgaccgagcucauccg

SEQ ID NO: 708629 - RNA, 19 nt, Artificial Sequence
  Description of Artificial Sequence: Synthetic oligonucleotide
ucugaauaagaggguuagu

SEQ ID NO: 708630 - RNA, 19 nt, Artificial Sequence
  Description of Artificial Sequence: Synthetic oligonucleotide
uacgcgggguccccguaag

SEQ ID NO: 708631 - RNA, 19 nt, Artificial Sequence
  Description of Artificial Sequence: Synthetic oligonucleotide
uccguggcguccaugucau

SEQ ID NO: 708632 - RNA, 19 nt, Artificial Sequence
  Description of Artificial Sequence: Synthetic oligonucleotide
uggcguccaugucaucuug

SEQ ID NO: 708633 - RNA, 19 nt, Artificial Sequence
  Description of Artificial Sequence: Synthetic oligonucleotide
gaagacgagcgaccgagcu

SEQ ID NO: 708634 - RNA, 19 nt, Artificial Sequence
  Description of Artificial Sequence: Synthetic oligonucleotide
acgaguagagcgccagcga

SEQ ID NO: 708635 - RNA, 19 nt, Artificial Sequence
  Description of Artificial Sequence: Synthetic oligonucleotide
acguacgagaaggcggcgg

SEQ ID NO: 708636 - RNA, 19 nt, Artificial Sequence
  Description of Artificial Sequence: Synthetic oligonucleotide
uccgggaguaccgcacccg

SEQ ID NO: 708637 - RNA, 19 nt, Artificial Sequence
  Description of Artificial Sequence: Synthetic oligonucleotide
uuugccggcgggacugggu

SEQ ID NO: 708638 - RNA, 19 nt, Artificial Sequence
  Description of Artificial Sequence: Synthetic oligonucleotide
acugcgccgagggcgagcg

SEQ ID NO: 708639 - RNA, 19 nt, Artificial Sequence
  Description of Artificial Sequence: Synthetic oligonucleotide
ggcgacuccuuaaaauccg

SEQ ID NO: 708640 - RNA, 19 nt, Artificial Sequence
  Description of Artificial Sequence: Synthetic oligonucleotide
aaacgucugcucgauucaa

SEQ ID NO: 708641 - RNA, 19 nt, Artificial Sequence
  Description of Artificial Sequence: Synthetic oligonucleotide
aggauagaagggcgcggug

SEQ ID NO: 708642 - RNA, 19 nt, Artificial Sequence
  Description of Artificial Sequence: Synthetic oligonucleotide
agcguagggcgagaaugcg

SEQ ID NO: 708643 - RNA, 19 nt, Artificial Sequence
  Description of Artificial Sequence: Synthetic oligonucleotide
uacggguucuugcggugcu

SEQ ID NO: 708644 - RNA, 19 nt, Artificial Sequence
  Description of Artificial Sequence: Synthetic oligonucleotide
agacgcgcguuugcgggcc

SEQ ID NO: 708645 - RNA, 19 nt, Artificial Sequence
  Description of Artificial Sequence: Synthetic oligonucleotide
gaagggcgcgguguaguag

SEQ ID NO: 708646 - RNA, 19 nt, Artificial Sequence
  Description of Artificial Sequence: Synthetic oligonucleotide
caaaguccgggaguaccgc

SEQ ID NO: 708647 - RNA, 19 nt, Artificial Sequence
  Description of Artificial Sequence: Synthetic oligonucleotide
gguagugaggacccgcauc

SEQ ID NO: 708648 - RNA, 19 nt, Artificial Sequence
  Description of Artificial Sequence: Synthetic oligonucleotide
gcacaggucuagcugagac

SEQ ID NO: 708649 - RNA, 19 nt, Artificial Sequence
  Description of Artificial Sequence: Synthetic oligonucleotide
ccccguaaggguaggagcc

SEQ ID NO: 708650 - RNA, 19 nt, Artificial Sequence
  Description of Artificial Sequence: Synthetic oligonucleotide
acccgaguuaaaugucgga

SEQ ID NO: 708651 - RNA, 19 nt, Artificial Sequence
  Description of Artificial Sequence: Synthetic oligonucleotide
cguucuuccgguacgcggg

SEQ ID NO: 708652 - RNA, 19 nt, Artificial Sequence
  Description of Artificial Sequence: Synthetic oligonucleotide
ugcgggcccauuuggggac

SEQ ID NO: 708653 - RNA, 19 nt, Artificial Sequence
  Description of Artificial Sequence: Synthetic oligonucleotide
gaccuuguccgaggaagug

SEQ ID NO: 708654 - RNA, 19 nt, Artificial Sequence
  Description of Artificial Sequence: Synthetic oligonucleotide
ccagacgcgcguuugcggg

SEQ ID NO: 708655 - RNA, 19 nt, Artificial Sequence
  Description of Artificial Sequence: Synthetic oligonucleotide
ccacguacgagaaggcggc

SEQ ID NO: 708656 - RNA, 19 nt, Artificial Sequence
  Description of Artificial Sequence: Synthetic oligonucleotide
ugccaccaaggguuugccc

SEQ ID NO: 708657 - RNA, 19 nt, Artificial Sequence
  Description of Artificial Sequence: Synthetic oligonucleotide
gguuugcccgcccacgggc

SEQ ID NO: 708658 - RNA, 19 nt, Artificial Sequence
  Description of Artificial Sequence: Synthetic oligonucleotide
ucgggucuuuagccaaaac

SEQ ID NO: 708659 - RNA, 19 nt, Artificial Sequence
  Description of Artificial Sequence: Synthetic oligonucleotide
gcacccgaguuaaaugucg

SEQ ID NO: 708660 - RNA, 19 nt, Artificial Sequence
  Description of Artificial Sequence: Synthetic oligonucleotide
cgagcgaccgagcucaucc

SEQ ID NO: 708661 - RNA, 19 nt, Artificial Sequence
  Description of Artificial Sequence: Synthetic oligonucleotide
cuccgcaacauuuucgggu

SEQ ID NO: 708662 - RNA, 19 nt, Artificial Sequence
  Description of Artificial Sequence: Synthetic oligonucleotide
agcgaccgagcucauccgu

SEQ ID NO: 708663 - RNA, 19 nt, Artificial Sequence
  Description of Artificial Sequence: Synthetic oligonucleotide
caaggguuugcccgcccac

SEQ ID NO: 708664 - RNA, 19 nt, Artificial Sequence
  Description of Artificial Sequence: Synthetic oligonucleotide
auaguucguguagccagga

SEQ ID NO: 708665 - RNA, 19 nt, Artificial Sequence
  Description of Artificial Sequence: Synthetic oligonucleotide
gaggcggacggcugguaca

SEQ ID NO: 708666 - RNA, 19 nt, Artificial Sequence
  Description of Artificial Sequence: Synthetic oligonucleotide
uaguucguguagccaggau

SEQ ID NO: 708667 - RNA, 19 nt, Artificial Sequence
  Description of Artificial Sequence: Synthetic oligonucleotide
guccccguaaggguaggag

SEQ ID NO: 708668 - RNA, 19 nt, Artificial Sequence
  Description of Artificial Sequence: Synthetic oligonucleotide
ccgugaagguguccgaagg

SEQ ID NO: 708669 - RNA, 19 nt, Artificial Sequence
  Description of Artificial Sequence: Synthetic oligonucleotide
cuauaugcggggcacgagu

SEQ ID NO: 708670 - RNA, 19 nt, Artificial Sequence
  Description of Artificial Sequence: Synthetic oligonucleotide
ggugcuauaugcggggcac

SEQ ID NO: 708671 - RNA, 19 nt, Artificial Sequence
  Description of Artificial Sequence: Synthetic oligonucleotide
ugaggcgccgucgagcguu

SEQ ID NO: 708672 - RNA, 19 nt, Artificial Sequence
  Description of Artificial Sequence: Synthetic oligonucleotide
gaaaugacgcuggugcuau

SEQ ID NO: 708673 - RNA, 19 nt, Artificial Sequence
  Description of Artificial Sequence: Synthetic oligonucleotide
cgagcguuggcgaaccagg

SEQ ID NO: 708674 - RNA, 19 nt, Artificial Sequence
  Description of Artificial Sequence: Synthetic oligonucleotide
guacgagaaggcggcggcg

SEQ ID NO: 708675 - RNA, 19 nt, Artificial Sequence
  Description of Artificial Sequence: Synthetic oligonucleotide
ggucuuuagccaaaacguc

SEQ ID NO: 708676 - RNA, 19 nt, Artificial Sequence
  Description of Artificial Sequence: Synthetic oligonucleotide
uaccgcacccgaguuaaau

SEQ ID NO: 708677 - RNA, 19 nt, Artificial Sequence
  Description of Artificial Sequence: Synthetic oligonucleotide
ccgcguaagggugauaccc

SEQ ID NO: 708678 - RNA, 19 nt, Artificial Sequence
  Description of Artificial Sequence: Synthetic oligonucleotide
gaggcgccgcguaagggug

SEQ ID NO: 708679 - RNA, 19 nt, Artificial Sequence
  Description of Artificial Sequence: Synthetic oligonucleotide
gcgaccgcgggguagugag

SEQ ID NO: 708680 - RNA, 19 nt, Artificial Sequence
  Description of Artificial Sequence: Synthetic oligonucleotide
uggccccugcagccguucg

SEQ ID NO: 708681 - RNA, 19 nt, Artificial Sequence
  Description of Artificial Sequence: Synthetic oligonucleotide
cccgaguuaaaugucggac

SEQ ID NO: 708682 - RNA, 19 nt, Artificial Sequence
  Description of Artificial Sequence: Synthetic oligonucleotide
ccgaagacgagcgaccgag

SEQ ID NO: 708683 - RNA, 19 nt, Artificial Sequence
  Description of Artificial Sequence: Synthetic oligonucleotide
auaccgggaguguggucgu

SEQ ID NO: 708684 - RNA, 19 nt, Artificial Sequence
  Description of Artificial Sequence: Synthetic oligonucleotide
guacggguucuugcggugc

SEQ ID NO: 708685 - RNA, 19 nt, Artificial Sequence
  Description of Artificial Sequence: Synthetic oligonucleotide
gucucuuugccggcgggac

SEQ ID NO: 708686 - RNA, 19 nt, Artificial Sequence
  Description of Artificial Sequence: Synthetic oligonucleotide
gaccgcgggguagugagga

SEQ ID NO: 708687 - RNA, 19 nt, Artificial Sequence
  Description of Artificial Sequence: Synthetic oligonucleotide
accgggaguguggucguag

SEQ ID NO: 708688 - RNA, 19 nt, Artificial Sequence
  Description of Artificial Sequence: Synthetic oligonucleotide
cagacgcgcguuugcgggc

SEQ ID NO: 708689 - RNA, 19 nt, Artificial Sequence
  Description of Artificial Sequence: Synthetic oligonucleotide
agaagggcgcgguguagua

SEQ ID NO: 708690 - RNA, 19 nt, Artificial Sequence
  Description of Artificial Sequence: Synthetic oligonucleotide
gugcuauaugcggggcacg

SEQ ID NO: 708691 - RNA, 19 nt, Artificial Sequence
  Description of Artificial Sequence: Synthetic oligonucleotide
uucgggucuuuagccaaaa

SEQ ID NO: 708692 - RNA, 19 nt, Artificial Sequence
  Description of Artificial Sequence: Synthetic oligonucleotide
ucauccgugcggggccccg

SEQ ID NO: 708693 - RNA, 19 nt, Artificial Sequence
  Description of Artificial Sequence: Synthetic oligonucleotide
guagagcgccagcgaggcg

SEQ ID NO: 708694 - RNA, 19 nt, Artificial Sequence
  Description of Artificial Sequence: Synthetic oligonucleotide
agucgccuucuguucugcu

SEQ ID NO: 708695 - RNA, 19 nt, Artificial Sequence
  Description of Artificial Sequence: Synthetic oligonucleotide
gccagacgcgcguuugcgg

SEQ ID NO: 708696 - RNA, 19 nt, Artificial Sequence
  Description of Artificial Sequence: Synthetic oligonucleotide
aaaugacgcuggugcuaua

SEQ ID NO: 708697 - RNA, 19 nt, Artificial Sequence
  Description of Artificial Sequence: Synthetic oligonucleotide
uccucggguuucuguggcu

SEQ ID NO: 708698 - RNA, 19 nt, Artificial Sequence
  Description of Artificial Sequence: Synthetic oligonucleotide
guaaggguaggagcccaga

SEQ ID NO: 708699 - RNA, 19 nt, Artificial Sequence
  Description of Artificial Sequence: Synthetic oligonucleotide
guccgggaguaccgcaccc

SEQ ID NO: 708700 - RNA, 19 nt, Artificial Sequence
  Description of Artificial Sequence: Synthetic oligonucleotide
ucggguuucuguggcucgu

SEQ ID NO: 708701 - RNA, 19 nt, Artificial Sequence
  Description of Artificial Sequence: Synthetic oligonucleotide
ggcacgaguagagcgccag

SEQ ID NO: 708702 - RNA, 19 nt, Artificial Sequence
  Description of Artificial Sequence: Synthetic oligonucleotide
augcggggcacgaguagag

SEQ ID NO: 708703 - RNA, 19 nt, Artificial Sequence
  Description of Artificial Sequence: Synthetic oligonucleotide
guuugcccgcccacgggcc

SEQ ID NO: 708704 - RNA, 19 nt, Artificial Sequence
  Description of Artificial Sequence: Synthetic oligonucleotide
acgcgggguccccguaagg

SEQ ID NO: 708705 - RNA, 19 nt, Artificial Sequence
  Description of Artificial Sequence: Synthetic oligonucleotide
acgcgcggcugccaccaag

SEQ ID NO: 708706 - RNA, 19 nt, Artificial Sequence
  Description of Artificial Sequence: Synthetic oligonucleotide
uuccgguacgcgggguccc

SEQ ID NO: 708707 - RNA, 19 nt, Artificial Sequence
  Description of Artificial Sequence: Synthetic oligonucleotide
ccucgcugcgguuccgugg

SEQ ID NO: 708708 - RNA, 19 nt, Artificial Sequence
  Description of Artificial Sequence: Synthetic oligonucleotide
ucgcugcgguuccguggcg

SEQ ID NO: 708709 - RNA, 19 nt, Artificial Sequence
  Description of Artificial Sequence: Synthetic oligonucleotide
guggucguagggagagccc

SEQ ID NO: 708710 - RNA, 19 nt, Artificial Sequence
  Description of Artificial Sequence: Synthetic oligonucleotide
gaguaccgcacccgaguua

SEQ ID NO: 708711 - RNA, 19 nt, Artificial Sequence
  Description of Artificial Sequence: Synthetic oligonucleotide
cguacgagaaggcggcggc

SEQ ID NO: 708712 - RNA, 19 nt, Artificial Sequence
  Description of Artificial Sequence: Synthetic oligonucleotide
cgcguaagggugauacccc

SEQ ID NO: 708713 - RNA, 19 nt, Artificial Sequence
  Description of Artificial Sequence: Synthetic oligonucleotide
cguagggcgagaaugcgga

SEQ ID NO: 708714 - RNA, 19 nt, Artificial Sequence
  Description of Artificial Sequence: Synthetic oligonucleotide
cacguacgagaaggcggcg

SEQ ID NO: 708715 - RNA, 19 nt, Artificial Sequence
  Description of Artificial Sequence: Synthetic oligonucleotide
ggugcgaguuguagcccgg

SEQ ID NO: 708716 - RNA, 19 nt, Artificial Sequence
  Description of Artificial Sequence: Synthetic oligonucleotide
gggagagcccacguacgag

SEQ ID NO: 708717 - RNA, 19 nt, Artificial Sequence
  Description of Artificial Sequence: Synthetic oligonucleotide
gcuauaugcggggcacgag

SEQ ID NO: 708718 - RNA, 19 nt, Artificial Sequence
  Description of Artificial Sequence: Synthetic oligonucleotide
cgacuccuuaaaauccgag

SEQ ID NO: 708719 - RNA, 19 nt, Artificial Sequence
  Description of Artificial Sequence: Synthetic oligonucleotide
cggagcccgaagacgagcg

SEQ ID NO: 708720 - RNA, 19 nt, Artificial Sequence
  Description of Artificial Sequence: Synthetic oligonucleotide
gcgccgucgagcguuggcg

SEQ ID NO: 708721 - RNA, 19 nt, Artificial Sequence
  Description of Artificial Sequence: Synthetic oligonucleotide
acggucccgccaggaaagg

SEQ ID NO: 708722 - RNA, 19 nt, Artificial Sequence
  Description of Artificial Sequence: Synthetic oligonucleotide
guuugggcuuggcgagcac

SEQ ID NO: 708723 - RNA, 19 nt, Artificial Sequence
  Description of Artificial Sequence: Synthetic oligonucleotide
gcucgauucaacaccgucu

SEQ ID NO: 708724 - RNA, 19 nt, Artificial Sequence
  Description of Artificial Sequence: Synthetic oligonucleotide
gugcggggccccgaaauga

SEQ ID NO: 708725 - RNA, 19 nt, Artificial Sequence
  Description of Artificial Sequence: Synthetic oligonucleotide
ggauagaagggcgcggugu

SEQ ID NO: 708726 - RNA, 19 nt, Artificial Sequence
  Description of Artificial Sequence: Synthetic oligonucleotide
guggcggaccucagugggc

SEQ ID NO: 708727 - RNA, 19 nt, Artificial Sequence
  Description of Artificial Sequence: Synthetic oligonucleotide
ggggcacgaguagagcgcc

SEQ ID NO: 708728 - RNA, 19 nt, Artificial Sequence
  Description of Artificial Sequence: Synthetic oligonucleotide
gggaguaccgcacccgagu

SEQ ID NO: 708729 - RNA, 19 nt, Artificial Sequence
  Description of Artificial Sequence: Synthetic oligonucleotide
guuguagcccggagacgga

SEQ ID NO: 708730 - RNA, 19 nt, Artificial Sequence
  Description of Artificial Sequence: Synthetic oligonucleotide
gacgcgcguuugcgggccc

SEQ ID NO: 708731 - RNA, 19 nt, Artificial Sequence
  Description of Artificial Sequence: Synthetic oligonucleotide
cgaccgagcucauccgugc

SEQ ID NO: 708732 - RNA, 19 nt, Artificial Sequence
  Description of Artificial Sequence: Synthetic oligonucleotide
gccgcguaagggugauacc

SEQ ID NO: 708733 - RNA, 19 nt, Artificial Sequence
  Description of Artificial Sequence: Synthetic oligonucleotide
cggggcacgaguagagcgc

SEQ ID NO: 708734 - RNA, 19 nt, Artificial Sequence
  Description of Artificial Sequence: Synthetic oligonucleotide
cgcgcggcugccaccaagg

SEQ ID NO: 708735 - RNA, 19 nt, Artificial Sequence
  Description of Artificial Sequence: Synthetic oligonucleotide
gggguccccguaaggguag

SEQ ID NO: 708736 - RNA, 19 nt, Artificial Sequence
  Description of Artificial Sequence: Synthetic oligonucleotide
gcgaccgagcucauccgug

SEQ ID NO: 708737 - RNA, 19 nt, Artificial Sequence
  Description of Artificial Sequence: Synthetic oligonucleotide
gggguagugaggacccgca

SEQ ID NO: 708738 - RNA, 19 nt, Artificial Sequence
  Description of Artificial Sequence: Synthetic oligonucleotide
gagcguuggcgaaccaggu

SEQ ID NO: 708739 - RNA, 19 nt, Artificial Sequence
  Description of Artificial Sequence: Synthetic oligonucleotide
cgccgcguaagggugauac

SEQ ID NO: 708740 - RNA, 19 nt, Artificial Sequence
  Description of Artificial Sequence: Synthetic oligonucleotide
cccguaaggguaggagccc

SEQ ID NO: 708741 - RNA, 19 nt, Artificial Sequence
  Description of Artificial Sequence: Synthetic oligonucleotide
cucauccgugcggggcccc

SEQ ID NO: 708742 - RNA, 19 nt, Artificial Sequence
  Description of Artificial Sequence: Synthetic oligonucleotide
ccgcgggguagugaggacc

SEQ ID NO: 708743 - RNA, 19 nt, Artificial Sequence
  Description of Artificial Sequence: Synthetic oligonucleotide
cuuguccgaggaaguggcu

SEQ ID NO: 708744 - RNA, 19 nt, Artificial Sequence
  Description of Artificial Sequence: Synthetic oligonucleotide
ggucguagggagagcccac

SEQ ID NO: 708745 - RNA, 19 nt, Artificial Sequence
  Description of Artificial Sequence: Synthetic oligonucleotide
gcgcgguguaguagagagg

SEQ ID NO: 708746 - RNA, 19 nt, Artificial Sequence
  Description of Artificial Sequence: Synthetic oligonucleotide
gaggcgccgucgagcguug

SEQ ID NO: 708747 - RNA, 19 nt, Artificial Sequence
  Description of Artificial Sequence: Synthetic oligonucleotide
cgaagacgagcgaccgagc

SEQ ID NO: 708748 - RNA, 19 nt, Artificial Sequence
  Description of Artificial Sequence: Synthetic oligonucleotide
gcggagcccgaagacgagc

SEQ ID NO: 708749 - RNA, 19 nt, Artificial Sequence
  Description of Artificial Sequence: Synthetic oligonucleotide
cgcacccgaguuaaauguc

SEQ ID NO: 708750 - RNA, 19 nt, Artificial Sequence
  Description of Artificial Sequence: Synthetic oligonucleotide
ccauuuggggacggcccgc

SEQ ID NO: 708751 - RNA, 19 nt, Artificial Sequence
  Description of Artificial Sequence: Synthetic oligonucleotide
ccgcacccgaguuaaaugu

SEQ ID NO: 708752 - RNA, 19 nt, Artificial Sequence
  Description of Artificial Sequence: Synthetic oligonucleotide
ccguucgcagcccgcaguc

SEQ ID NO: 708753 - RNA, 19 nt, Artificial Sequence
  Description of Artificial Sequence: Synthetic oligonucleotide
gcgacuccuuaaaauccga

SEQ ID NO: 708754 - RNA, 19 nt, Artificial Sequence
  Description of Artificial Sequence: Synthetic oligonucleotide
ggagagcccucgcucccuc

SEQ ID NO: 708755 - RNA, 19 nt, Artificial Sequence
  Description of Artificial Sequence: Synthetic oligonucleotide
ggcacggagagcccucgcu

SEQ ID NO: 708756 - RNA, 19 nt, Artificial Sequence
  Description of Artificial Sequence: Synthetic oligonucleotide
gugauaccccaaggaaccu

SEQ ID NO: 708757 - RNA, 19 nt, Artificial Sequence
  Description of Artificial Sequence: Synthetic oligonucleotide
ccgcagucgccuucuguuc

SEQ ID NO: 708758 - RNA, 19 nt, Artificial Sequence
  Description of Artificial Sequence: Synthetic oligonucleotide
gugcgaguuguagcccgga

SEQ ID NO: 708759 - RNA, 19 nt, Artificial Sequence
  Description of Artificial Sequence: Synthetic oligonucleotide
gcggacggcugguacaagu

SEQ ID NO: 708760 - RNA, 19 nt, Artificial Sequence
  Description of Artificial Sequence: Synthetic oligonucleotide
gucgagcguuggcgaacca

SEQ ID NO: 708761 - RNA, 19 nt, Artificial Sequence
  Description of Artificial Sequence: Synthetic oligonucleotide
ccaaggguuugcccgccca

SEQ ID NO: 708762 - RNA, 19 nt, Artificial Sequence
  Description of Artificial Sequence: Synthetic oligonucleotide
cgucgagcguuggcgaacc

SEQ ID NO: 708763 - RNA, 19 nt, Artificial Sequence
  Description of Artificial Sequence: Synthetic oligonucleotide
gcggaccucagugggcgac

SEQ ID NO: 708764 - RNA, 19 nt, Artificial Sequence
  Description of Artificial Sequence: Synthetic oligonucleotide
ggguccccguaaggguagg

SEQ ID NO: 708765 - RNA, 19 nt, Artificial Sequence
  Description of Artificial Sequence: Synthetic oligonucleotide
ccgccagacgcgcguuugc

SEQ ID NO: 708766 - RNA, 19 nt, Artificial Sequence
  Description of Artificial Sequence: Synthetic oligonucleotide
gggcacggagagcccucgc

SEQ ID NO: 708767 - RNA, 19 nt, Artificial Sequence
  Description of Artificial Sequence: Synthetic oligonucleotide
cgugcggggccccgaaaug

SEQ ID NO: 708768 - RNA, 19 nt, Artificial Sequence
  Description of Artificial Sequence: Synthetic oligonucleotide
cgggguagugaggacccgc

SEQ ID NO: 708769 - RNA, 19 nt, Artificial Sequence
  Description of Artificial Sequence: Synthetic oligonucleotide
cgccagacgcgcguuugcg

SEQ ID NO: 708770 - RNA, 19 nt, Artificial Sequence
  Description of Artificial Sequence: Synthetic oligonucleotide
uaccgggaguguggucgua

SEQ ID NO: 708771 - RNA, 19 nt, Artificial Sequence
  Description of Artificial Sequence: Synthetic oligonucleotide
aggcgccgucgagcguugg

SEQ ID NO: 708772 - RNA, 19 nt, Artificial Sequence
  Description of Artificial Sequence: Synthetic oligonucleotide
aggcgccgcguaaggguga

SEQ ID NO: 708773 - RNA, 19 nt, Artificial Sequence
  Description of Artificial Sequence: Synthetic oligonucleotide
cguaagggugauaccccaa

SEQ ID NO: 708774 - RNA, 19 nt, Artificial Sequence
  Description of Artificial Sequence: Synthetic oligonucleotide
gcgagaaugcggagcccga

SEQ ID NO: 708775 - RNA, 19 nt, Artificial Sequence
  Description of Artificial Sequence: Synthetic oligonucleotide
gcgggguagugaggacccg

SEQ ID NO: 708776 - RNA, 19 nt, Artificial Sequence
  Description of Artificial Sequence: Synthetic oligonucleotide
cugcucgauucaacaccgu

SEQ ID NO: 708777 - RNA, 19 nt, Artificial Sequence
  Description of Artificial Sequence: Synthetic oligonucleotide
ccgggaguaccgcacccga

SEQ ID NO: 708778 - RNA, 19 nt, Artificial Sequence
  Description of Artificial Sequence: Synthetic oligonucleotide
gcgggcccauuuggggacg

SEQ ID NO: 708779 - RNA, 19 nt, Artificial Sequence
  Description of Artificial Sequence: Synthetic oligonucleotide
gccgucgagcguuggcgaa

SEQ ID NO: 708780 - RNA, 19 nt, Artificial Sequence
  Description of Artificial Sequence: Synthetic oligonucleotide
acgcgcguuugcgggccca

SEQ ID NO: 708781 - RNA, 19 nt, Artificial Sequence
  Description of Artificial Sequence: Synthetic oligonucleotide
ccgucgagcguuggcgaac

SEQ ID NO: 708782 - RNA, 19 nt, Artificial Sequence
  Description of Artificial Sequence: Synthetic oligonucleotide
gggcgagaaugcggagccc

SEQ ID NO: 708783 - RNA, 19 nt, Artificial Sequence
  Description of Artificial Sequence: Synthetic oligonucleotide
gcuggcgcgaccgcggggu

SEQ ID NO: 708784 - RNA, 19 nt, Artificial Sequence
  Description of Artificial Sequence: Synthetic oligonucleotide
ccguaaggguaggagccca

SEQ ID NO: 708785 - RNA, 19 nt, Artificial Sequence
  Description of Artificial Sequence: Synthetic oligonucleotide
cccgcagucgccuucuguu

SEQ ID NO: 708786 - RNA, 19 nt, Artificial Sequence
  Description of Artificial Sequence: Synthetic oligonucleotide
ggccggagacgcgcggcug

SEQ ID NO: 708787 - RNA, 19 nt, Artificial Sequence
  Description of Artificial Sequence: Synthetic oligonucleotide
cggugcucguugagccagg

SEQ ID NO: 708788 - RNA, 19 nt, Artificial Sequence
  Description of Artificial Sequence: Synthetic oligonucleotide
gccguucgcagcccgcagu

SEQ ID NO: 708789 - RNA, 19 nt, Artificial Sequence
  Description of Artificial Sequence: Synthetic oligonucleotide
gguccccguaaggguagga

SEQ ID NO: 708790 - RNA, 19 nt, Artificial Sequence
  Description of Artificial Sequence: Synthetic oligonucleotide
ccgcauccuccgccagacg

SEQ ID NO: 708791 - RNA, 19 nt, Artificial Sequence
  Description of Artificial Sequence: Synthetic oligonucleotide
cauccgugcggggccccga

SEQ ID NO: 708792 - RNA, 19 nt, Artificial Sequence
  Description of Artificial Sequence: Synthetic oligonucleotide
ggcguccaugucaucuugu

SEQ ID NO: 708793 - RNA, 19 nt, Artificial Sequence
  Description of Artificial Sequence: Synthetic oligonucleotide
cgcggggucagcgccguac

SEQ ID NO: 708794 - RNA, 19 nt, Artificial Sequence
  Description of Artificial Sequence: Synthetic oligonucleotide
ggcggaccucagugggcga

SEQ ID NO: 708795 - RNA, 19 nt, Artificial Sequence
  Description of Artificial Sequence: Synthetic oligonucleotide
gggcccauuuggggacggc

SEQ ID NO: 708796 - RNA, 19 nt, Artificial Sequence
  Description of Artificial Sequence: Synthetic oligonucleotide
cggacggcugguacaagua

SEQ ID NO: 708797 - RNA, 19 nt, Artificial Sequence
  Description of Artificial Sequence: Synthetic oligonucleotide
gggcgcgguguaguagaga

SEQ ID NO: 708798 - RNA, 19 nt, Artificial Sequence
  Description of Artificial Sequence: Synthetic oligonucleotide
ccguacuggaggugcgagu

SEQ ID NO: 708799 - RNA, 19 nt, Artificial Sequence
  Description of Artificial Sequence: Synthetic oligonucleotide
gggcacgaguagagcgcca

SEQ ID NO: 708800 - RNA, 19 nt, Artificial Sequence
  Description of Artificial Sequence: Synthetic oligonucleotide
cgccgucgagcguuggcga

SEQ ID NO: 708801 - RNA, 19 nt, Artificial Sequence
  Description of Artificial Sequence: Synthetic oligonucleotide
gcgcgaccgcgggguagug

SEQ ID NO: 708802 - RNA, 19 nt, Artificial Sequence
  Description of Artificial Sequence: Synthetic oligonucleotide
ggcgccgcguaagggugau

SEQ ID NO: 708803 - RNA, 19 nt, Artificial Sequence
  Description of Artificial Sequence: Synthetic oligonucleotide
gcgucccgaguggcguucu

SEQ ID NO: 708804 - RNA, 19 nt, Artificial Sequence
  Description of Artificial Sequence: Synthetic oligonucleotide
cgcgaccgcgggguaguga

SEQ ID NO: 708805 - RNA, 19 nt, Artificial Sequence
  Description of Artificial Sequence: Synthetic oligonucleotide
cugcgccgagggcgagcgu

SEQ ID NO: 708806 - RNA, 19 nt, Artificial Sequence
  Description of Artificial Sequence: Synthetic oligonucleotide
cgccagcgaggcggacggc

SEQ ID NO: 708807 - RNA, 19 nt, Artificial Sequence
  Description of Artificial Sequence: Synthetic oligonucleotide
gcgcguuugcgggcccauu

SEQ ID NO: 708808 - RNA, 19 nt, Artificial Sequence
  Description of Artificial Sequence: Synthetic oligonucleotide
gcgccgcguaagggugaua

SEQ ID NO: 708809 - RNA, 19 nt, Artificial Sequence
  Description of Artificial Sequence: Synthetic oligonucleotide
cgcgcguuugcgggcccau

SEQ ID NO: 708810 - RNA, 19 nt, Artificial Sequence
  Description of Artificial Sequence: Synthetic oligonucleotide
aaucuuaugucuuuuaaug

SEQ ID NO: 708811 - RNA, 19 nt, Artificial Sequence
  Description of Artificial Sequence: Synthetic oligonucleotide
uguaauuccuccauaauca

SEQ ID NO: 708812 - RNA, 19 nt, Artificial Sequence
  Description of Artificial Sequence: Synthetic oligonucleotide
ugacccaauagcuacaugg

SEQ ID NO: 708813 - RNA, 19 nt, Artificial Sequence
  Description of Artificial Sequence: Synthetic oligonucleotide
aaucccuacauucauucuc

SEQ ID NO: 708814 - RNA, 19 nt, Artificial Sequence
  Description of Artificial Sequence: Synthetic oligonucleotide
gaagacuuauaucaucucg

SEQ ID NO: 708815 - RNA, 19 nt, Artificial Sequence
  Description of Artificial Sequence: Synthetic oligonucleotide
ucgaaauccauuaauaaaa

SEQ ID NO: 708816 - RNA, 19 nt, Artificial Sequence
  Description of Artificial Sequence: Synthetic oligonucleotide
uuuucuugcagccuucccg

SEQ ID NO: 708817 - RNA, 19 nt, Artificial Sequence
  Description of Artificial Sequence: Synthetic oligonucleotide
uaugcgguggauuagaaga

SEQ ID NO: 708818 - RNA, 19 nt, Artificial Sequence
  Description of Artificial Sequence: Synthetic oligonucleotide
aagugauuccccuucagag

SEQ ID NO: 708819 - RNA, 19 nt, Artificial Sequence
  Description of Artificial Sequence: Synthetic oligonucleotide
caacauaucgauuuggcag

SEQ ID NO: 708820 - RNA, 19 nt, Artificial Sequence
  Description of Artificial Sequence: Synthetic oligonucleotide
gauuagaagaaucgggucc

SEQ ID NO: 708821 - RNA, 19 nt, Artificial Sequence
  Description of Artificial Sequence: Synthetic oligonucleotide
aagauuaugcuuguguauc

SEQ ID NO: 708822 - RNA, 19 nt, Artificial Sequence
  Description of Artificial Sequence: Synthetic oligonucleotide
uguuuaacaagccaguaau

SEQ ID NO: 708823 - RNA, 19 nt, Artificial Sequence
  Description of Artificial Sequence: Synthetic oligonucleotide
uguaagaucauuucauaga

SEQ ID NO: 708824 - RNA, 19 nt, Artificial Sequence
  Description of Artificial Sequence: Synthetic oligonucleotide
agggauacauaucaggccg

SEQ ID NO: 708825 - RNA, 19 nt, Artificial Sequence
  Description of Artificial Sequence: Synthetic oligonucleotide
guuauaauccugcagaauc

SEQ ID NO: 708826 - RNA, 19 nt, Artificial Sequence
  Description of Artificial Sequence: Synthetic oligonucleotide
aaacucaauugcuuuauca

SEQ ID NO: 708827 - RNA, 19 nt, Artificial Sequence
  Description of Artificial Sequence: Synthetic oligonucleotide
uguuaaacuucauuauucc

SEQ ID NO: 708828 - RNA, 19 nt, Artificial Sequence
  Description of Artificial Sequence: Synthetic oligonucleotide
aagacuuauaucaucucgg

SEQ ID NO: 708829 - RNA, 19 nt, Artificial Sequence
  Description of Artificial Sequence: Synthetic oligonucleotide
acuauuucaacauaucgau

SEQ ID NO: 708830 - RNA, 19 nt, Artificial Sequence
  Description of Artificial Sequence: Synthetic oligonucleotide
aauggaauacagaaucagg

SEQ ID NO: 708831 - RNA, 19 nt, Artificial Sequence
  Description of Artificial Sequence: Synthetic oligonucleotide
uguagaaaagugauucccc

SEQ ID NO: 708832 - RNA, 19 nt, Artificial Sequence
  Description of Artificial Sequence: Synthetic oligonucleotide
aaucgaaauccauuaauaa

SEQ ID NO: 708833 - RNA, 19 nt, Artificial Sequence
  Description of Artificial Sequence: Synthetic oligonucleotide
uuuaugauggucccucuug

SEQ ID NO: 708834 - RNA, 19 nt, Artificial Sequence
  Description of Artificial Sequence: Synthetic oligonucleotide
aacauaucgauuuggcaga

SEQ ID NO: 708835 - RNA, 19 nt, Artificial Sequence
  Description of Artificial Sequence: Synthetic oligonucleotide
auagguguacaguucggcc

SEQ ID NO: 708836 - RNA, 19 nt, Artificial Sequence
  Description of Artificial Sequence: Synthetic oligonucleotide
ugaacgaucacugaauugu

SEQ ID NO: 708837 - RNA, 19 nt, Artificial Sequence
  Description of Artificial Sequence: Synthetic oligonucleotide
gucgauaugaucauccugg

SEQ ID NO: 708838 - RNA, 19 nt, Artificial Sequence
  Description of Artificial Sequence: Synthetic oligonucleotide
uaugucuuaauguuaagua

SEQ ID NO: 708839 - RNA, 19 nt, Artificial Sequence
  Description of Artificial Sequence: Synthetic oligonucleotide
auacauaucaggccgaaga

SEQ ID NO: 708840 - RNA, 19 nt, Artificial Sequence
  Description of Artificial Sequence: Synthetic oligonucleotide
ucucaaauugggaaucucc

SEQ ID NO: 708841 - RNA, 19 nt, Artificial Sequence
  Description of Artificial Sequence: Synthetic oligonucleotide
agauauucucuucaucgac

SEQ ID NO: 708842 - RNA, 19 nt, Artificial Sequence
  Description of Artificial Sequence: Synthetic oligonucleotide
auaucgauuuggcagaucu

SEQ ID NO: 708843 - RNA, 19 nt, Artificial Sequence
  Description of Artificial Sequence: Synthetic oligonucleotide
gucucgaacugcuugaacg

SEQ ID NO: 708844 - RNA, 19 nt, Artificial Sequence
  Description of Artificial Sequence: Synthetic oligonucleotide
cauuccuuccuuuaugcgg

SEQ ID NO: 708845 - RNA, 19 nt, Artificial Sequence
  Description of Artificial Sequence: Synthetic oligonucleotide
acgaggauuuucuugcagc

SEQ ID NO: 708846 - RNA, 19 nt, Artificial Sequence
  Description of Artificial Sequence: Synthetic oligonucleotide
uucucaaggagccagucga

SEQ ID NO: 708847 - RNA, 19 nt, Artificial Sequence
  Description of Artificial Sequence: Synthetic oligonucleotide
uucaacauaucgauuuggc

SEQ ID NO: 708848 - RNA, 19 nt, Artificial Sequence
  Description of Artificial Sequence: Synthetic oligonucleotide
acaagccaguaauaaaugg

SEQ ID NO: 708849 - RNA, 19 nt, Artificial Sequence
  Description of Artificial Sequence: Synthetic oligonucleotide
aggccgaagacuuauauca

SEQ ID NO: 708850 - RNA, 19 nt, Artificial Sequence
  Description of Artificial Sequence: Synthetic oligonucleotide
ucuuggacucacaauguag

SEQ ID NO: 708851 - RNA, 19 nt, Artificial Sequence
  Description of Artificial Sequence: Synthetic oligonucleotide
aauggguacugucucggag

SEQ ID NO: 708852 - RNA, 19 nt, Artificial Sequence
  Description of Artificial Sequence: Synthetic oligonucleotide
aauaaggacugauugcuuu

SEQ ID NO: 708853 - RNA, 19 nt, Artificial Sequence
  Description of Artificial Sequence: Synthetic oligonucleotide
ucgacuguuucccauucgg

SEQ ID NO: 708854 - RNA, 19 nt, Artificial Sequence
  Description of Artificial Sequence: Synthetic oligonucleotide
ucaacaucauguaauuccu

SEQ ID NO: 708855 - RNA, 19 nt, Artificial Sequence
  Description of Artificial Sequence: Synthetic oligonucleotide
aacauaucuugauggaagu

SEQ ID NO: 708856 - RNA, 19 nt, Artificial Sequence
  Description of Artificial Sequence: Synthetic oligonucleotide
auauaugccaacccaauau

SEQ ID NO: 708857 - RNA, 19 nt, Artificial Sequence
  Description of Artificial Sequence: Synthetic oligonucleotide
cauucauucuccugaaagc

SEQ ID NO: 708858 - RNA, 19 nt, Artificial Sequence
  Description of Artificial Sequence: Synthetic oligonucleotide
auucguguaagaucauuuc

SEQ ID NO: 708859 - RNA, 19 nt, Artificial Sequence
  Description of Artificial Sequence: Synthetic oligonucleotide
uauuauuggcccaagcaau

SEQ ID NO: 708860 - RNA, 19 nt, Artificial Sequence
  Description of Artificial Sequence: Synthetic oligonucleotide
aguaauaaauggugguuug

SEQ ID NO: 708861 - RNA, 19 nt, Artificial Sequence
  Description of Artificial Sequence: Synthetic oligonucleotide
ugaaucgaaauccauuaau

SEQ ID NO: 708862 - RNA, 19 nt, Artificial Sequence
  Description of Artificial Sequence: Synthetic oligonucleotide
acgacaacgucucuuggac

SEQ ID NO: 708863 - RNA, 19 nt, Artificial Sequence
  Description of Artificial Sequence: Synthetic oligonucleotide
uucguguaagaucauuuca

SEQ ID NO: 708864 - RNA, 19 nt, Artificial Sequence
  Description of Artificial Sequence: Synthetic oligonucleotide
agacuuauaucaucucggg

SEQ ID NO: 708865 - RNA, 19 nt, Artificial Sequence
  Description of Artificial Sequence: Synthetic oligonucleotide
cuugagggcacuucgacug

SEQ ID NO: 708866 - RNA, 19 nt, Artificial Sequence
  Description of Artificial Sequence: Synthetic oligonucleotide
uguuguuuaacaagccagu

SEQ ID NO: 708867 - RNA, 19 nt, Artificial Sequence
  Description of Artificial Sequence: Synthetic oligonucleotide
uaaugagugucacaguauc

SEQ ID NO: 708868 - RNA, 19 nt, Artificial Sequence
  Description of Artificial Sequence: Synthetic oligonucleotide
acgccuuucauuuggguuc

SEQ ID NO: 708869 - RNA, 19 nt, Artificial Sequence
  Description of Artificial Sequence: Synthetic oligonucleotide
gacugauugcuuuaagcug

SEQ ID NO: 708870 - RNA, 19 nt, Artificial Sequence
  Description of Artificial Sequence: Synthetic oligonucleotide
uuauacagaucuccaggcc

SEQ ID NO: 708871 - RNA, 19 nt, Artificial Sequence
  Description of Artificial Sequence: Synthetic oligonucleotide
uuucaacauaucgauuugg

SEQ ID NO: 708872 - RNA, 19 nt, Artificial Sequence
  Description of Artificial Sequence: Synthetic oligonucleotide
gacuuauaucaucucgggg

SEQ ID NO: 708873 - RNA, 19 nt, Artificial Sequence
  Description of Artificial Sequence: Synthetic oligonucleotide
auagaugagugguuucagg

SEQ ID NO: 708874 - RNA, 19 nt, Artificial Sequence
  Description of Artificial Sequence: Synthetic oligonucleotide
uaugccaacccaauaucca

SEQ ID NO: 708875 - RNA, 19 nt, Artificial Sequence
  Description of Artificial Sequence: Synthetic oligonucleotide
ucagaugagaucugugaca

SEQ ID NO: 708876 - RNA, 19 nt, Artificial Sequence
  Description of Artificial Sequence: Synthetic oligonucleotide
ucaacauaucgauuuggca

SEQ ID NO: 708877 - RNA, 19 nt, Artificial Sequence
  Description of Artificial Sequence: Synthetic oligonucleotide
aauugaaauuuugucuuca

SEQ ID NO: 708878 - RNA, 19 nt, Artificial Sequence
  Description of Artificial Sequence: Synthetic oligonucleotide
auaugccaacccaauaucc

SEQ ID NO: 708879 - RNA, 19 nt, Artificial Sequence
  Description of Artificial Sequence: Synthetic oligonucleotide
uauaugccaacccaauauc

SEQ ID NO: 708880 - RNA, 19 nt, Artificial Sequence
  Description of Artificial Sequence: Synthetic oligonucleotide
aucgaaauccauuaauaaa

SEQ ID NO: 708881 - RNA, 19 nt, Artificial Sequence
  Description of Artificial Sequence: Synthetic oligonucleotide
ugggagaaagacacgauuc

SEQ ID NO: 708882 - RNA, 19 nt, Artificial Sequence
  Description of Artificial Sequence: Synthetic oligonucleotide
uuaacaagccaguaauaaa

SEQ ID NO: 708883 - RNA, 19 nt, Artificial Sequence
  Description of Artificial Sequence: Synthetic oligonucleotide
agaagaaucggguccacgu

SEQ ID NO: 708884 - RNA, 19 nt, Artificial Sequence
  Description of Artificial Sequence: Synthetic oligonucleotide
aagaaucggguccacgugu

SEQ ID NO: 708885 - RNA, 19 nt, Artificial Sequence
  Description of Artificial Sequence: Synthetic oligonucleotide
ucuuaaccaaggaaucucu

SEQ ID NO: 708886 - RNA, 19 nt, Artificial Sequence
  Description of Artificial Sequence: Synthetic oligonucleotide
ucauguaauuccuccauaa

SEQ ID NO: 708887 - RNA, 19 nt, Artificial Sequence
  Description of Artificial Sequence: Synthetic oligonucleotide
acuggcgugacguuccuuc

SEQ ID NO: 708888 - RNA, 19 nt, Artificial Sequence
  Description of Artificial Sequence: Synthetic oligonucleotide
uuguuuaacaagccaguaa

SEQ ID NO: 708889 - RNA, 19 nt, Artificial Sequence
  Description of Artificial Sequence: Synthetic oligonucleotide
cauauuauuggcccaagca

SEQ ID NO: 708890 - RNA, 19 nt, Artificial Sequence
  Description of Artificial Sequence: Synthetic oligonucleotide
aaguauauuuccaaagcau

SEQ ID NO: 708891 - RNA, 19 nt, Artificial Sequence
  Description of Artificial Sequence: Synthetic oligonucleotide
agaguauucuaaaugauaa

SEQ ID NO: 708892 - RNA, 19 nt, Artificial Sequence
  Description of Artificial Sequence: Synthetic oligonucleotide
ucguguaagaucauuucau

SEQ ID NO: 708893 - RNA, 19 nt, Artificial Sequence
  Description of Artificial Sequence: Synthetic oligonucleotide
aucuuaaccaaggaaucuc

SEQ ID NO: 708894 - RNA, 19 nt, Artificial Sequence
  Description of Artificial Sequence: Synthetic oligonucleotide
uuggcuacgacaacgucuc

SEQ ID NO: 708895 - RNA, 19 nt, Artificial Sequence
  Description of Artificial Sequence: Synthetic oligonucleotide
uucauuuggguucggugca

SEQ ID NO: 708896 - RNA, 19 nt, Artificial Sequence
  Description of Artificial Sequence: Synthetic oligonucleotide
aaaugauaaucccuacauu

SEQ ID NO: 708897 - RNA, 19 nt, Artificial Sequence
  Description of Artificial Sequence: Synthetic oligonucleotide
cacuauuucaacauaucga

SEQ ID NO: 708898 - RNA, 19 nt, Artificial Sequence
  Description of Artificial Sequence: Synthetic oligonucleotide
aggugguuuauauaugcca

SEQ ID NO: 708899 - RNA, 19 nt, Artificial Sequence
  Description of Artificial Sequence: Synthetic oligonucleotide
ccaauaaugagugucacag

SEQ ID NO: 708900 - RNA, 19 nt, Artificial Sequence
  Description of Artificial Sequence: Synthetic oligonucleotide
aacaugugucgacagugga

SEQ ID NO: 708901 - RNA, 19 nt, Artificial Sequence
  Description of Artificial Sequence: Synthetic oligonucleotide
gacaacgucucuuggacuc

SEQ ID NO: 708902 - RNA, 19 nt, Artificial Sequence
  Description of Artificial Sequence: Synthetic oligonucleotide
uagguguacaguucggcca

SEQ ID NO: 708903 - RNA, 19 nt, Artificial Sequence
  Description of Artificial Sequence: Synthetic oligonucleotide
auaaaacuaucuuauccuu

SEQ ID NO: 708904 - RNA, 19 nt, Artificial Sequence
  Description of Artificial Sequence: Synthetic oligonucleotide
ugauaaucccuacauucau

SEQ ID NO: 708905 - RNA, 19 nt, Artificial Sequence
  Description of Artificial Sequence: Synthetic oligonucleotide
ugcuugaacgaucacugaa

SEQ ID NO: 708906 - RNA, 19 nt, Artificial Sequence
  Description of Artificial Sequence: Synthetic oligonucleotide
gcuacgaggauuuucuugc

SEQ ID NO: 708907 - RNA, 19 nt, Artificial Sequence
  Description of Artificial Sequence: Synthetic oligonucleotide
caugugucgacaguggaag

SEQ ID NO: 708908 - RNA, 19 nt, Artificial Sequence
  Description of Artificial Sequence: Synthetic oligonucleotide
aacaagccaguaauaaaug

SEQ ID NO: 708909 - RNA, 19 nt, Artificial Sequence
  Description of Artificial Sequence: Synthetic oligonucleotide
ugacagagagucagcuacg

SEQ ID NO: 708910 - RNA, 19 nt, Artificial Sequence
  Description of Artificial Sequence: Synthetic oligonucleotide
gguacugucucggagaaag

SEQ ID NO: 708911 - RNA, 19 nt, Artificial Sequence
  Description of Artificial Sequence: Synthetic oligonucleotide
uguccuuuaugaugguccc

SEQ ID NO: 708912 - RNA, 19 nt, Artificial Sequence
  Description of Artificial Sequence: Synthetic oligonucleotide
acugcuugaacgaucacug

SEQ ID NO: 708913 - RNA, 19 nt, Artificial Sequence
  Description of Artificial Sequence: Synthetic oligonucleotide
aacgccuuucauuuggguu

SEQ ID NO: 708914 - RNA, 19 nt, Artificial Sequence
  Description of Artificial Sequence: Synthetic oligonucleotide
cagaacgccuuucauuugg

SEQ ID NO: 708915 - RNA, 19 nt, Artificial Sequence
  Description of Artificial Sequence: Synthetic oligonucleotide
agguccacggcucuuagca

SEQ ID NO: 708916 - RNA, 19 nt, Artificial Sequence
  Description of Artificial Sequence: Synthetic oligonucleotide
uuaugcgguggauuagaag

SEQ ID NO: 708917 - RNA, 19 nt, Artificial Sequence
  Description of Artificial Sequence: Synthetic oligonucleotide
ucucgaacugcuugaacga

SEQ ID NO: 708918 - RNA, 19 nt, Artificial Sequence
  Description of Artificial Sequence: Synthetic oligonucleotide
ucagaguauucuaaaugau

SEQ ID NO: 708919 - RNA, 19 nt, Artificial Sequence
  Description of Artificial Sequence: Synthetic oligonucleotide
uugaacgaucacugaauug

SEQ ID NO: 708920 - RNA, 19 nt, Artificial Sequence
  Description of Artificial Sequence: Synthetic oligonucleotide
uacgaggauuuucuugcag

SEQ ID NO: 708921 - RNA, 19 nt, Artificial Sequence
  Description of Artificial Sequence: Synthetic oligonucleotide
cagggauacauaucaggcc

SEQ ID NO: 708922 - RNA, 19 nt, Artificial Sequence
  Description of Artificial Sequence: Synthetic oligonucleotide
agaaucugcaaguuauaau

SEQ ID NO: 708923 - RNA, 19 nt, Artificial Sequence
  Description of Artificial Sequence: Synthetic oligonucleotide
agucgauaugaucauccug

SEQ ID NO: 708924 - RNA, 19 nt, Artificial Sequence
  Description of Artificial Sequence: Synthetic oligonucleotide
aaggacugauugcuuuaag

SEQ ID NO: 708925 - RNA, 19 nt, Artificial Sequence
  Description of Artificial Sequence: Synthetic oligonucleotide
agugauuccccuucagagu

SEQ ID NO: 708926 - RNA, 19 nt, Artificial Sequence
  Description of Artificial Sequence: Synthetic oligonucleotide
agcuacgaggauuuucuug

SEQ ID NO: 708927 - RNA, 19 nt, Artificial Sequence
  Description of Artificial Sequence: Synthetic oligonucleotide
auuauuggcccaagcaauc

SEQ ID NO: 708928 - RNA, 19 nt, Artificial Sequence
  Description of Artificial Sequence: Synthetic oligonucleotide
gaagaaucggguccacgug

SEQ ID NO: 708929 - RNA, 19 nt, Artificial Sequence
  Description of Artificial Sequence: Synthetic oligonucleotide
acgaucacugaauuguuau

SEQ ID NO: 708930 - RNA, 19 nt, Artificial Sequence
  Description of Artificial Sequence: Synthetic oligonucleotide
uucccauucggcucagaag

SEQ ID NO: 708931 - RNA, 19 nt, Artificial Sequence
  Description of Artificial Sequence: Synthetic oligonucleotide
acgcugaagggcuuagccg

SEQ ID NO: 708932 - RNA, 19 nt, Artificial Sequence
  Description of Artificial Sequence: Synthetic oligonucleotide
gauuaugcuuguguaucag

SEQ ID NO: 708933 - RNA, 19 nt, Artificial Sequence
  Description of Artificial Sequence: Synthetic oligonucleotide
gguuuauauaugccaaccc

SEQ ID NO: 708934 - RNA, 19 nt, Artificial Sequence
  Description of Artificial Sequence: Synthetic oligonucleotide
ucucgugguagcacugucc

SEQ ID NO: 708935 - RNA, 19 nt, Artificial Sequence
  Description of Artificial Sequence: Synthetic oligonucleotide
aucucucaaauugggaauc

SEQ ID NO: 708936 - RNA, 19 nt, Artificial Sequence
  Description of Artificial Sequence: Synthetic oligonucleotide
auuaugcuuguguaucagu

SEQ ID NO: 708937 - RNA, 19 nt, Artificial Sequence
  Description of Artificial Sequence: Synthetic oligonucleotide
cucaaauugggaaucucca

SEQ ID NO: 708938 - RNA, 19 nt, Artificial Sequence
  Description of Artificial Sequence: Synthetic oligonucleotide
ugcaaguuauaauccugca

SEQ ID NO: 708939 - RNA, 19 nt, Artificial Sequence
  Description of Artificial Sequence: Synthetic oligonucleotide
agauuaugcuuguguauca

SEQ ID NO: 708940 - RNA, 19 nt, Artificial Sequence
  Description of Artificial Sequence: Synthetic oligonucleotide
ugaacauaucuugauggaa

SEQ ID NO: 708941 - RNA, 19 nt, Artificial Sequence
  Description of Artificial Sequence: Synthetic oligonucleotide
uuccccagccaauaaugag

SEQ ID NO: 708942 - RNA, 19 nt, Artificial Sequence
  Description of Artificial Sequence: Synthetic oligonucleotide
cuugauggagcugaaaaga

SEQ ID NO: 708943 - RNA, 19 nt, Artificial Sequence
  Description of Artificial Sequence: Synthetic oligonucleotide
ugucgacaguggaagacca

SEQ ID NO: 708944 - RNA, 19 nt, Artificial Sequence
  Description of Artificial Sequence: Synthetic oligonucleotide
uacgacaacgucucuugga

SEQ ID NO: 708945 - RNA, 19 nt, Artificial Sequence
  Description of Artificial Sequence: Synthetic oligonucleotide
uucgacuguuucccauucg

SEQ ID NO: 708946 - RNA, 19 nt, Artificial Sequence
  Description of Artificial Sequence: Synthetic oligonucleotide
ucgacaguggaagaccacc

SEQ ID NO: 708947 - RNA, 19 nt, Artificial Sequence
  Description of Artificial Sequence: Synthetic oligonucleotide
uggugguuugucaauggaa

SEQ ID NO: 708948 - RNA, 19 nt, Artificial Sequence
  Description of Artificial Sequence: Synthetic oligonucleotide
acccaauagcuacauggag

SEQ ID NO: 708949 - RNA, 19 nt, Artificial Sequence
  Description of Artificial Sequence: Synthetic oligonucleotide
uguggaacaugugucgaca

SEQ ID NO: 708950 - RNA, 19 nt, Artificial Sequence
  Description of Artificial Sequence: Synthetic oligonucleotide
gaaucgaaauccauuaaua

SEQ ID NO: 708951 - RNA, 19 nt, Artificial Sequence
  Description of Artificial Sequence: Synthetic oligonucleotide
cagaugagaucugugacac

SEQ ID NO: 708952 - RNA, 19 nt, Artificial Sequence
  Description of Artificial Sequence: Synthetic oligonucleotide
ggacucacaauguagaaaa

SEQ ID NO: 708953 - RNA, 19 nt, Artificial Sequence
  Description of Artificial Sequence: Synthetic oligonucleotide
ucgaccagaacgccuuuca

SEQ ID NO: 708954 - RNA, 19 nt, Artificial Sequence
  Description of Artificial Sequence: Synthetic oligonucleotide
gguggauuagaagaaucgg

SEQ ID NO: 708955 - RNA, 19 nt, Artificial Sequence
  Description of Artificial Sequence: Synthetic oligonucleotide
uccuuauguucccuucccc

SEQ ID NO: 708956 - RNA, 19 nt, Artificial Sequence
  Description of Artificial Sequence: Synthetic oligonucleotide
uccccuucgugcaggacag

SEQ ID NO: 708957 - RNA, 19 nt, Artificial Sequence
  Description of Artificial Sequence: Synthetic oligonucleotide
ugacugucagagcaucaga

SEQ ID NO: 708958 - RNA, 19 nt, Artificial Sequence
  Description of Artificial Sequence: Synthetic oligonucleotide
agagagucagcuacgagga

SEQ ID NO: 708959 - RNA, 19 nt, Artificial Sequence
  Description of Artificial Sequence: Synthetic oligonucleotide
uuucauagaugagugguuu

SEQ ID NO: 708960 - RNA, 19 nt, Artificial Sequence
  Description of Artificial Sequence: Synthetic oligonucleotide
uuucuggcauuuucgugca

SEQ ID NO: 708961 - RNA, 19 nt, Artificial Sequence
  Description of Artificial Sequence: Synthetic oligonucleotide
ucaucgaccagaacgccuu

SEQ ID NO: 708962 - RNA, 19 nt, Artificial Sequence
  Description of Artificial Sequence: Synthetic oligonucleotide
agccaguaauaaauggugg

SEQ ID NO: 708963 - RNA, 19 nt, Artificial Sequence
  Description of Artificial Sequence: Synthetic oligonucleotide
ucaggccgaagacuuauau

SEQ ID NO: 708964 - RNA, 19 nt, Artificial Sequence
  Description of Artificial Sequence: Synthetic oligonucleotide
uuuaugcgguggauuagaa

SEQ ID NO: 708965 - RNA, 19 nt, Artificial Sequence
  Description of Artificial Sequence: Synthetic oligonucleotide
aauguggcaaagcccucau

SEQ ID NO: 708966 - RNA, 19 nt, Artificial Sequence
  Description of Artificial Sequence: Synthetic oligonucleotide
uuuggccggucauauucag

SEQ ID NO: 708967 - RNA, 19 nt, Artificial Sequence
  Description of Artificial Sequence: Synthetic oligonucleotide
ugugucgacaguggaagac

SEQ ID NO: 708968 - RNA, 19 nt, Artificial Sequence
  Description of Artificial Sequence: Synthetic oligonucleotide
aaucggguccacgugugug

SEQ ID NO: 708969 - RNA, 19 nt, Artificial Sequence
  Description of Artificial Sequence: Synthetic oligonucleotide
caggugguuuauauaugcc

SEQ ID NO: 708970 - RNA, 19 nt, Artificial Sequence
  Description of Artificial Sequence: Synthetic oligonucleotide
gacguuccuucacugaaca

SEQ ID NO: 708971 - RNA, 19 nt, Artificial Sequence
  Description of Artificial Sequence: Synthetic oligonucleotide
ucugacugucagagcauca

SEQ ID NO: 708972 - RNA, 19 nt, Artificial Sequence
  Description of Artificial Sequence: Synthetic oligonucleotide
auagcuacauggagcagag

SEQ ID NO: 708973 - RNA, 19 nt, Artificial Sequence
  Description of Artificial Sequence: Synthetic oligonucleotide
agccgcaucuguugggagg

SEQ ID NO: 708974 - RNA, 19 nt, Artificial Sequence
  Description of Artificial Sequence: Synthetic oligonucleotide
cuuaaccaaggaaucucuc

SEQ ID NO: 708975 - RNA, 19 nt, Artificial Sequence
  Description of Artificial Sequence: Synthetic oligonucleotide
uacaguucggccaguguuu

SEQ ID NO: 708976 - RNA, 19 nt, Artificial Sequence
  Description of Artificial Sequence: Synthetic oligonucleotide
agccaauaaugagugucac

SEQ ID NO: 708977 - RNA, 19 nt, Artificial Sequence
  Description of Artificial Sequence: Synthetic oligonucleotide
ggagcauucaugcuuggca

SEQ ID NO: 708978 - RNA, 19 nt, Artificial Sequence
  Description of Artificial Sequence: Synthetic oligonucleotide
cacaauguagaaaagugau

SEQ ID NO: 708979 - RNA, 19 nt, Artificial Sequence
  Description of Artificial Sequence: Synthetic oligonucleotide
augggagaaagacacgauu

SEQ ID NO: 708980 - RNA, 19 nt, Artificial Sequence
  Description of Artificial Sequence: Synthetic oligonucleotide
agcauacagacugaucugu

SEQ ID NO: 708981 - RNA, 19 nt, Artificial Sequence
  Description of Artificial Sequence: Synthetic oligonucleotide
ucgaacugcuugaacgauc

SEQ ID NO: 708982 - RNA, 19 nt, Artificial Sequence
  Description of Artificial Sequence: Synthetic oligonucleotide
aaggagguuuggccgguca

SEQ ID NO: 708983 - RNA, 19 nt, Artificial Sequence
  Description of Artificial Sequence: Synthetic oligonucleotide
ugacguuccuucacugaac

SEQ ID NO: 708984 - RNA, 19 nt, Artificial Sequence
  Description of Artificial Sequence: Synthetic oligonucleotide
ccaggugguuuauauaugc

SEQ ID NO: 708985 - RNA, 19 nt, Artificial Sequence
  Description of Artificial Sequence: Synthetic oligonucleotide
ugagaucugugacacuauu

SEQ ID NO: 708986 - RNA, 19 nt, Artificial Sequence
  Description of Artificial Sequence: Synthetic oligonucleotide
cuccuuauguucccuuccc

SEQ ID NO: 708987 - RNA, 19 nt, Artificial Sequence
  Description of Artificial Sequence: Synthetic oligonucleotide
uuguggaacaugugucgac

SEQ ID NO: 708988 - RNA, 19 nt, Artificial Sequence
  Description of Artificial Sequence: Synthetic oligonucleotide
cugaauuguuauacagauc

SEQ ID NO: 708989 - RNA, 19 nt, Artificial Sequence
  Description of Artificial Sequence: Synthetic oligonucleotide
guggaagaccaccacgcug

SEQ ID NO: 708990 - RNA, 19 nt, Artificial Sequence
  Description of Artificial Sequence: Synthetic oligonucleotide
uucaagcgggcaaugggua

SEQ ID NO: 708991 - RNA, 19 nt, Artificial Sequence
  Description of Artificial Sequence: Synthetic oligonucleotide
cauagaugagugguuucag

SEQ ID NO: 708992 - RNA, 19 nt, Artificial Sequence
  Description of Artificial Sequence: Synthetic oligonucleotide
cuuauaucaucucggggaa

SEQ ID NO: 708993 - RNA, 19 nt, Artificial Sequence
  Description of Artificial Sequence: Synthetic oligonucleotide
uggacucacaauguagaaa

SEQ ID NO: 708994 - RNA, 19 nt, Artificial Sequence
  Description of Artificial Sequence: Synthetic oligonucleotide
cugaacauaucuugaugga

SEQ ID NO: 708995 - RNA, 19 nt, Artificial Sequence
  Description of Artificial Sequence: Synthetic oligonucleotide
ucguuccuuggcuacgaca

SEQ ID NO: 708996 - RNA, 19 nt, Artificial Sequence
  Description of Artificial Sequence: Synthetic oligonucleotide
gcuacgacaacgucucuug

SEQ ID NO: 708997 - RNA, 19 nt, Artificial Sequence
  Description of Artificial Sequence: Synthetic oligonucleotide
ucgauaugaucauccuggu

SEQ ID NO: 708998 - RNA, 19 nt, Artificial Sequence
  Description of Artificial Sequence: Synthetic oligonucleotide
gcagggauacauaucaggc

SEQ ID NO: 708999 - RNA, 19 nt, Artificial Sequence
  Description of Artificial Sequence: Synthetic oligonucleotide
cugacugucagagcaucag

SEQ ID NO: 709000 - RNA, 19 nt, Artificial Sequence
  Description of Artificial Sequence: Synthetic oligonucleotide
uaucgauuuggcagaucuc

SEQ ID NO: 709001 - RNA, 19 nt, Artificial Sequence
  Description of Artificial Sequence: Synthetic oligonucleotide
gguggucucgaacugcuug

SEQ ID NO: 709002 - RNA, 19 nt, Artificial Sequence
  Description of Artificial Sequence: Synthetic oligonucleotide
ucaagcgggcaauggguac

SEQ ID NO: 709003 - RNA, 19 nt, Artificial Sequence
  Description of Artificial Sequence: Synthetic oligonucleotide
uuacaguacugugcaggag

SEQ ID NO: 709004 - RNA, 19 nt, Artificial Sequence
  Description of Artificial Sequence: Synthetic oligonucleotide
uggguacugucucggagaa

SEQ ID NO: 709005 - RNA, 19 nt, Artificial Sequence
  Description of Artificial Sequence: Synthetic oligonucleotide
ucgauuuggcagaucucuc

SEQ ID NO: 709006 - RNA, 19 nt, Artificial Sequence
  Description of Artificial Sequence: Synthetic oligonucleotide
augccaacccaauauccaa

SEQ ID NO: 709007 - RNA, 19 nt, Artificial Sequence
  Description of Artificial Sequence: Synthetic oligonucleotide
gugauuccccuucagagua

SEQ ID NO: 709008 - RNA, 19 nt, Artificial Sequence
  Description of Artificial Sequence: Synthetic oligonucleotide
cagauauucucuucaucga

SEQ ID NO: 709009 - RNA, 19 nt, Artificial Sequence
  Description of Artificial Sequence: Synthetic oligonucleotide
agggcuuagccgcaucugu

SEQ ID NO: 709010 - RNA, 19 nt, Artificial Sequence
  Description of Artificial Sequence: Synthetic oligonucleotide
ugagugguuucaggacugg

SEQ ID NO: 709011 - RNA, 19 nt, Artificial Sequence
  Description of Artificial Sequence: Synthetic oligonucleotide
ggauuagaagaaucggguc

SEQ ID NO: 709012 - RNA, 19 nt, Artificial Sequence
  Description of Artificial Sequence: Synthetic oligonucleotide
cuacgacaacgucucuugg

SEQ ID NO: 709013 - RNA, 19 nt, Artificial Sequence
  Description of Artificial Sequence: Synthetic oligonucleotide
cauuucacgcuccuuaugu

SEQ ID NO: 709014 - RNA, 19 nt, Artificial Sequence
  Description of Artificial Sequence: Synthetic oligonucleotide
aguggaagaccaccacgcu

SEQ ID NO: 709015 - RNA, 19 nt, Artificial Sequence
  Description of Artificial Sequence: Synthetic oligonucleotide
uguugggaggaugggagaa

SEQ ID NO: 709016 - RNA, 19 nt, Artificial Sequence
  Description of Artificial Sequence: Synthetic oligonucleotide
ggacugauugcuuuaagcu

SEQ ID NO: 709017 - RNA, 19 nt, Artificial Sequence
  Description of Artificial Sequence: Synthetic oligonucleotide
ccucuugguaaauaaggac

SEQ ID NO: 709018 - RNA, 19 nt, Artificial Sequence
  Description of Artificial Sequence: Synthetic oligonucleotide
ucggcucagaagguaaacu

SEQ ID NO: 709019 - RNA, 19 nt, Artificial Sequence
  Description of Artificial Sequence: Synthetic oligonucleotide
gaauuguuauacagaucuc

SEQ ID NO: 709020 - RNA, 19 nt, Artificial Sequence
  Description of Artificial Sequence: Synthetic oligonucleotide
aguacugugcaggagcauu

SEQ ID NO: 709021 - RNA, 19 nt, Artificial Sequence
  Description of Artificial Sequence: Synthetic oligonucleotide
ugucaacgcagcugcugug

SEQ ID NO: 709022 - RNA, 19 nt, Artificial Sequence
  Description of Artificial Sequence: Synthetic oligonucleotide
gacccaauagcuacaugga

SEQ ID NO: 709023 - RNA, 19 nt, Artificial Sequence
  Description of Artificial Sequence: Synthetic oligonucleotide
aagggcuuagccgcaucug

SEQ ID NO: 709024 - RNA, 19 nt, Artificial Sequence
  Description of Artificial Sequence: Synthetic oligonucleotide
cuaucuuauccuugaugga

SEQ ID NO: 709025 - RNA, 19 nt, Artificial Sequence
  Description of Artificial Sequence: Synthetic oligonucleotide
gugucgacaguggaagacc

SEQ ID NO: 709026 - RNA, 19 nt, Artificial Sequence
  Description of Artificial Sequence: Synthetic oligonucleotide
gugacguuccuucacugaa

SEQ ID NO: 709027 - RNA, 19 nt, Artificial Sequence
  Description of Artificial Sequence: Synthetic oligonucleotide
aauucuggucugucuucua

SEQ ID NO: 709028 - RNA, 19 nt, Artificial Sequence
  Description of Artificial Sequence: Synthetic oligonucleotide
ccauaaucaucuugagggc

SEQ ID NO: 709029 - RNA, 19 nt, Artificial Sequence
  Description of Artificial Sequence: Synthetic oligonucleotide
caguauccuuccagcagag

SEQ ID NO: 709030 - RNA, 19 nt, Artificial Sequence
  Description of Artificial Sequence: Synthetic oligonucleotide
caggccgaagacuuauauc

SEQ ID NO: 709031 - RNA, 19 nt, Artificial Sequence
  Description of Artificial Sequence: Synthetic oligonucleotide
aggcuggcgagcaugcagg

SEQ ID NO: 709032 - RNA, 19 nt, Artificial Sequence
  Description of Artificial Sequence: Synthetic oligonucleotide
acgucucuuggacucacaa

SEQ ID NO: 709033 - RNA, 19 nt, Artificial Sequence
  Description of Artificial Sequence: Synthetic oligonucleotide
agagucagcuacgaggauu

SEQ ID NO: 709034 - RNA, 19 nt, Artificial Sequence
  Description of Artificial Sequence: Synthetic oligonucleotide
agaacgccuuucauuuggg

SEQ ID NO: 709035 - RNA, 19 nt, Artificial Sequence
  Description of Artificial Sequence: Synthetic oligonucleotide
cuucgacuguuucccauuc

SEQ ID NO: 709036 - RNA, 19 nt, Artificial Sequence
  Description of Artificial Sequence: Synthetic oligonucleotide
uggguucggugcauuuucu

SEQ ID NO: 709037 - RNA, 19 nt, Artificial Sequence
  Description of Artificial Sequence: Synthetic oligonucleotide
uggugauucuuugcuuuga

SEQ ID NO: 709038 - RNA, 19 nt, Artificial Sequence
  Description of Artificial Sequence: Synthetic oligonucleotide
ggguaggcacuccuugugg

SEQ ID NO: 709039 - RNA, 19 nt, Artificial Sequence
  Description of Artificial Sequence: Synthetic oligonucleotide
cuuuaugcgguggauuaga

SEQ ID NO: 709040 - RNA, 19 nt, Artificial Sequence
  Description of Artificial Sequence: Synthetic oligonucleotide
cuuuaagcuguccuaauuu

SEQ ID NO: 709041 - RNA, 19 nt, Artificial Sequence
  Description of Artificial Sequence: Synthetic oligonucleotide
auuucacgcuccuuauguu

SEQ ID NO: 709042 - RNA, 19 nt, Artificial Sequence
  Description of Artificial Sequence: Synthetic oligonucleotide
cuuagcacugcagauguua

SEQ ID NO: 709043 - RNA, 19 nt, Artificial Sequence
  Description of Artificial Sequence: Synthetic oligonucleotide
acuucgacuguuucccauu

SEQ ID NO: 709044 - RNA, 19 nt, Artificial Sequence
  Description of Artificial Sequence: Synthetic oligonucleotide
cgguggauuagaagaaucg

SEQ ID NO: 709045 - RNA, 19 nt, Artificial Sequence
  Description of Artificial Sequence: Synthetic oligonucleotide
uuucucgugguagcacugu

SEQ ID NO: 709046 - RNA, 19 nt, Artificial Sequence
  Description of Artificial Sequence: Synthetic oligonucleotide
uucggcucagaagguaaac

SEQ ID NO: 709047 - RNA, 19 nt, Artificial Sequence
  Description of Artificial Sequence: Synthetic oligonucleotide
uugagggcacuucgacugu

SEQ ID NO: 709048 - RNA, 19 nt, Artificial Sequence
  Description of Artificial Sequence: Synthetic oligonucleotide
caccaggugguuuauauau

SEQ ID NO: 709049 - RNA, 19 nt, Artificial Sequence
  Description of Artificial Sequence: Synthetic oligonucleotide
gaaguuccccagccaauaa

SEQ ID NO: 709050 - RNA, 19 nt, Artificial Sequence
  Description of Artificial Sequence: Synthetic oligonucleotide
uuuggguucggugcauuuu

SEQ ID NO: 709051 - RNA, 19 nt, Artificial Sequence
  Description of Artificial Sequence: Synthetic oligonucleotide
acaguacugugcaggagca

SEQ ID NO: 709052 - RNA, 19 nt, Artificial Sequence
  Description of Artificial Sequence: Synthetic oligonucleotide
gaccaccacgcugaagggc

SEQ ID NO: 709053 - RNA, 19 nt, Artificial Sequence
  Description of Artificial Sequence: Synthetic oligonucleotide
uggcgugacguuccuucac

SEQ ID NO: 709054 - RNA, 19 nt, Artificial Sequence
  Description of Artificial Sequence: Synthetic oligonucleotide
agaaucggguccacgugug

SEQ ID NO: 709055 - RNA, 19 nt, Artificial Sequence
  Description of Artificial Sequence: Synthetic oligonucleotide
cagaagguaaacugucucu

SEQ ID NO: 709056 - RNA, 19 nt, Artificial Sequence
  Description of Artificial Sequence: Synthetic oligonucleotide
aucgaccagaacgccuuuc

SEQ ID NO: 709057 - RNA, 19 nt, Artificial Sequence
  Description of Artificial Sequence: Synthetic oligonucleotide
aagcgggcaauggguacug

SEQ ID NO: 709058 - RNA, 19 nt, Artificial Sequence
  Description of Artificial Sequence: Synthetic oligonucleotide
uucuggcauuuucgugcag

SEQ ID NO: 709059 - RNA, 19 nt, Artificial Sequence
  Description of Artificial Sequence: Synthetic oligonucleotide
gaauacagaaucaggucuu

SEQ ID NO: 709060 - RNA, 19 nt, Artificial Sequence
  Description of Artificial Sequence: Synthetic oligonucleotide
augugucgacaguggaaga

SEQ ID NO: 709061 - RNA, 19 nt, Artificial Sequence
  Description of Artificial Sequence: Synthetic oligonucleotide
uuggcagaucucucaucuc

SEQ ID NO: 709062 - RNA, 19 nt, Artificial Sequence
  Description of Artificial Sequence: Synthetic oligonucleotide
cuuauccuugauggagcug

SEQ ID NO: 709063 - RNA, 19 nt, Artificial Sequence
  Description of Artificial Sequence: Synthetic oligonucleotide
acaugugucgacaguggaa

SEQ ID NO: 709064 - RNA, 19 nt, Artificial Sequence
  Description of Artificial Sequence: Synthetic oligonucleotide
gucucguuccuuggcuacg

SEQ ID NO: 709065 - RNA, 19 nt, Artificial Sequence
  Description of Artificial Sequence: Synthetic oligonucleotide
ccggucauauucagcauac

SEQ ID NO: 709066 - RNA, 19 nt, Artificial Sequence
  Description of Artificial Sequence: Synthetic oligonucleotide
caucuugagggcacuucga

SEQ ID NO: 709067 - RNA, 19 nt, Artificial Sequence
  Description of Artificial Sequence: Synthetic oligonucleotide
ucccuacauucauucuccu

SEQ ID NO: 709068 - RNA, 19 nt, Artificial Sequence
  Description of Artificial Sequence: Synthetic oligonucleotide
agccagucgauaugaucau

SEQ ID NO: 709069 - RNA, 19 nt, Artificial Sequence
  Description of Artificial Sequence: Synthetic oligonucleotide
cucucaaauugggaaucuc

SEQ ID NO: 709070 - RNA, 19 nt, Artificial Sequence
  Description of Artificial Sequence: Synthetic oligonucleotide
guacugugcaggagcauuc

SEQ ID NO: 709071 - RNA, 19 nt, Artificial Sequence
  Description of Artificial Sequence: Synthetic oligonucleotide
aggagguuuggccggucau

SEQ ID NO: 709072 - RNA, 19 nt, Artificial Sequence
  Description of Artificial Sequence: Synthetic oligonucleotide
ccuucgugcaggacagagg

SEQ ID NO: 709073 - RNA, 19 nt, Artificial Sequence
  Description of Artificial Sequence: Synthetic oligonucleotide
ugcgguggauuagaagaau

SEQ ID NO: 709074 - RNA, 19 nt, Artificial Sequence
  Description of Artificial Sequence: Synthetic oligonucleotide
acccauauuauuggcccaa

SEQ ID NO: 709075 - RNA, 19 nt, Artificial Sequence
  Description of Artificial Sequence: Synthetic oligonucleotide
ucggguccacgugugugcc

SEQ ID NO: 709076 - RNA, 19 nt, Artificial Sequence
  Description of Artificial Sequence: Synthetic oligonucleotide
acggcucuuagcacugcag

SEQ ID NO: 709077 - RNA, 19 nt, Artificial Sequence
  Description of Artificial Sequence: Synthetic oligonucleotide
ggugucaacgcagcugcug

SEQ ID NO: 709078 - RNA, 19 nt, Artificial Sequence
  Description of Artificial Sequence: Synthetic oligonucleotide
guuuggccggucauauuca

SEQ ID NO: 709079 - RNA, 19 nt, Artificial Sequence
  Description of Artificial Sequence: Synthetic oligonucleotide
gugucaacgcagcugcugu

SEQ ID NO: 709080 - RNA, 19 nt, Artificial Sequence
  Description of Artificial Sequence: Synthetic oligonucleotide
caauagcuacauggagcag

SEQ ID NO: 709081 - RNA, 19 nt, Artificial Sequence
  Description of Artificial Sequence: Synthetic oligonucleotide
uucgugcaggacagaggau

SEQ ID NO: 709082 - RNA, 19 nt, Artificial Sequence
  Description of Artificial Sequence: Synthetic oligonucleotide
ccuccauaaucaucuugag

SEQ ID NO: 709083 - RNA, 19 nt, Artificial Sequence
  Description of Artificial Sequence: Synthetic oligonucleotide
gccuucccgaagcagaauc

SEQ ID NO: 709084 - RNA, 19 nt, Artificial Sequence
  Description of Artificial Sequence: Synthetic oligonucleotide
cucgugguagcacuguccu

SEQ ID NO: 709085 - RNA, 19 nt, Artificial Sequence
  Description of Artificial Sequence: Synthetic oligonucleotide
gccaguaauaaaugguggu

SEQ ID NO: 709086 - RNA, 19 nt, Artificial Sequence
  Description of Artificial Sequence: Synthetic oligonucleotide
cugcugugacccaauagcu

SEQ ID NO: 709087 - RNA, 19 nt, Artificial Sequence
  Description of Artificial Sequence: Synthetic oligonucleotide
cuugaacgaucacugaauu

SEQ ID NO: 709088 - RNA, 19 nt, Artificial Sequence
  Description of Artificial Sequence: Synthetic oligonucleotide
ggucucguuccuuggcuac

SEQ ID NO: 709089 - RNA, 19 nt, Artificial Sequence
  Description of Artificial Sequence: Synthetic oligonucleotide
acaacgucucuuggacuca

SEQ ID NO: 709090 - RNA, 19 nt, Artificial Sequence
  Description of Artificial Sequence: Synthetic oligonucleotide
ucacuggcgugacguuccu

SEQ ID NO: 709091 - RNA, 19 nt, Artificial Sequence
  Description of Artificial Sequence: Synthetic oligonucleotide
acauaucgauuuggcagau

SEQ ID NO: 709092 - RNA, 19 nt, Artificial Sequence
  Description of Artificial Sequence: Synthetic oligonucleotide
guguacaguucggccagug

SEQ ID NO: 709093 - RNA, 19 nt, Artificial Sequence
  Description of Artificial Sequence: Synthetic oligonucleotide
cacccauauuauuggccca

SEQ ID NO: 709094 - RNA, 19 nt, Artificial Sequence
  Description of Artificial Sequence: Synthetic oligonucleotide
ggugguuugucaauggaau

SEQ ID NO: 709095 - RNA, 19 nt, Artificial Sequence
  Description of Artificial Sequence: Synthetic oligonucleotide
gaacgccuuucauuugggu

SEQ ID NO: 709096 - RNA, 19 nt, Artificial Sequence
  Description of Artificial Sequence: Synthetic oligonucleotide
cucaucucacuggcgugac

SEQ ID NO: 709097 - RNA, 19 nt, Artificial Sequence
  Description of Artificial Sequence: Synthetic oligonucleotide
gaagcagaaucugcaaguu

SEQ ID NO: 709098 - RNA, 19 nt, Artificial Sequence
  Description of Artificial Sequence: Synthetic oligonucleotide
auaucaucucggggaacau

SEQ ID NO: 709099 - RNA, 19 nt, Artificial Sequence
  Description of Artificial Sequence: Synthetic oligonucleotide
cucuuggacucacaaugua

SEQ ID NO: 709100 - RNA, 19 nt, Artificial Sequence
  Description of Artificial Sequence: Synthetic oligonucleotide
aacgucucuuggacucaca

SEQ ID NO: 709101 - RNA, 19 nt, Artificial Sequence
  Description of Artificial Sequence: Synthetic oligonucleotide
augcgguggauuagaagaa

SEQ ID NO: 709102 - RNA, 19 nt, Artificial Sequence
  Description of Artificial Sequence: Synthetic oligonucleotide
caauggguacugucucgga

SEQ ID NO: 709103 - RNA, 19 nt, Artificial Sequence
  Description of Artificial Sequence: Synthetic oligonucleotide
accacgcugaagggcuuag

SEQ ID NO: 709104 - RNA, 19 nt, Artificial Sequence
  Description of Artificial Sequence: Synthetic oligonucleotide
gagucagcuacgaggauuu

SEQ ID NO: 709105 - RNA, 19 nt, Artificial Sequence
  Description of Artificial Sequence: Synthetic oligonucleotide
cauaucgauuuggcagauc

SEQ ID NO: 709106 - RNA, 19 nt, Artificial Sequence
  Description of Artificial Sequence: Synthetic oligonucleotide
cuaauucuucgacaacuuu

SEQ ID NO: 709107 - RNA, 19 nt, Artificial Sequence
  Description of Artificial Sequence: Synthetic oligonucleotide
uggguccccucuugguaaa

SEQ ID NO: 709108 - RNA, 19 nt, Artificial Sequence
  Description of Artificial Sequence: Synthetic oligonucleotide
uuauuccagagggcugcua

SEQ ID NO: 709109 - RNA, 19 nt, Artificial Sequence
  Description of Artificial Sequence: Synthetic oligonucleotide
augagaucugugacacuau

SEQ ID NO: 709110 - RNA, 19 nt, Artificial Sequence
  Description of Artificial Sequence: Synthetic oligonucleotide
gaugggagaaagacacgau

SEQ ID NO: 709111 - RNA, 19 nt, Artificial Sequence
  Description of Artificial Sequence: Synthetic oligonucleotide
cucguuccuuggcuacgac

SEQ ID NO: 709112 - RNA, 19 nt, Artificial Sequence
  Description of Artificial Sequence: Synthetic oligonucleotide
acaguucggccaguguuuu

SEQ ID NO: 709113 - RNA, 19 nt, Artificial Sequence
  Description of Artificial Sequence: Synthetic oligonucleotide
gagguuuggccggucauau

SEQ ID NO: 709114 - RNA, 19 nt, Artificial Sequence
  Description of Artificial Sequence: Synthetic oligonucleotide
cccaauauccaaaucuuau

SEQ ID NO: 709115 - RNA, 19 nt, Artificial Sequence
  Description of Artificial Sequence: Synthetic oligonucleotide
cuggcgugacguuccuuca

SEQ ID NO: 709116 - RNA, 19 nt, Artificial Sequence
  Description of Artificial Sequence: Synthetic oligonucleotide
gacuggguccccucuuggu

SEQ ID NO: 709117 - RNA, 19 nt, Artificial Sequence
  Description of Artificial Sequence: Synthetic oligonucleotide
guuucaggacugggucccc

SEQ ID NO: 709118 - RNA, 19 nt, Artificial Sequence
  Description of Artificial Sequence: Synthetic oligonucleotide
cagucgauaugaucauccu

SEQ ID NO: 709119 - RNA, 19 nt, Artificial Sequence
  Description of Artificial Sequence: Synthetic oligonucleotide
uggcauggguaggcacucc

SEQ ID NO: 709120 - RNA, 19 nt, Artificial Sequence
  Description of Artificial Sequence: Synthetic oligonucleotide
gcgugacguuccuucacug

SEQ ID NO: 709121 - RNA, 19 nt, Artificial Sequence
  Description of Artificial Sequence: Synthetic oligonucleotide
gucgacaguggaagaccac

SEQ ID NO: 709122 - RNA, 19 nt, Artificial Sequence
  Description of Artificial Sequence: Synthetic oligonucleotide
ccaacccaauauccaaauc

SEQ ID NO: 709123 - RNA, 19 nt, Artificial Sequence
  Description of Artificial Sequence: Synthetic oligonucleotide
cgaagacuuauaucaucuc

SEQ ID NO: 709124 - RNA, 19 nt, Artificial Sequence
  Description of Artificial Sequence: Synthetic oligonucleotide
gguccacggcucuuagcac

SEQ ID NO: 709125 - RNA, 19 nt, Artificial Sequence
  Description of Artificial Sequence: Synthetic oligonucleotide
uggcuacgacaacgucucu

SEQ ID NO: 709126 - RNA, 19 nt, Artificial Sequence
  Description of Artificial Sequence: Synthetic oligonucleotide
gcgguggauuagaagaauc

SEQ ID NO: 709127 - RNA, 19 nt, Artificial Sequence
  Description of Artificial Sequence: Synthetic oligonucleotide
acgcuccuuauguucccuu

SEQ ID NO: 709128 - RNA, 19 nt, Artificial Sequence
  Description of Artificial Sequence: Synthetic oligonucleotide
cccuucgugcaggacagag

SEQ ID NO: 709129 - RNA, 19 nt, Artificial Sequence
  Description of Artificial Sequence: Synthetic oligonucleotide
cccaagcaaucagauggcc

SEQ ID NO: 709130 - RNA, 19 nt, Artificial Sequence
  Description of Artificial Sequence: Synthetic oligonucleotide
agguuuggccggucauauu

SEQ ID NO: 709131 - RNA, 19 nt, Artificial Sequence
  Description of Artificial Sequence: Synthetic oligonucleotide
auaucaggccgaagacuua

SEQ ID NO: 709132 - RNA, 19 nt, Artificial Sequence
  Description of Artificial Sequence: Synthetic oligonucleotide
ccagaacgccuuucauuug

SEQ ID NO: 709133 - RNA, 19 nt, Artificial Sequence
  Description of Artificial Sequence: Synthetic oligonucleotide
gcuuuaagcuguccuaauu

SEQ ID NO: 709134 - RNA, 19 nt, Artificial Sequence
  Description of Artificial Sequence: Synthetic oligonucleotide
gcuugaacgaucacugaau

SEQ ID NO: 709135 - RNA, 19 nt, Artificial Sequence
  Description of Artificial Sequence: Synthetic oligonucleotide
gggauacauaucaggccga

SEQ ID NO: 709136 - RNA, 19 nt, Artificial Sequence
  Description of Artificial Sequence: Synthetic oligonucleotide
cauuuucgugcagccaugu

SEQ ID NO: 709137 - RNA, 19 nt, Artificial Sequence
  Description of Artificial Sequence: Synthetic oligonucleotide
gccaccaggugguuuauau

SEQ ID NO: 709138 - RNA, 19 nt, Artificial Sequence
  Description of Artificial Sequence: Synthetic oligonucleotide
ccaagcaaucagauggccu

SEQ ID NO: 709139 - RNA, 19 nt, Artificial Sequence
  Description of Artificial Sequence: Synthetic oligonucleotide
cacuucgacuguuucccau

SEQ ID NO: 709140 - RNA, 19 nt, Artificial Sequence
  Description of Artificial Sequence: Synthetic oligonucleotide
ggcgugacguuccuucacu

SEQ ID NO: 709141 - RNA, 19 nt, Artificial Sequence
  Description of Artificial Sequence: Synthetic oligonucleotide
gccaacccaauauccaaau

SEQ ID NO: 709142 - RNA, 19 nt, Artificial Sequence
  Description of Artificial Sequence: Synthetic oligonucleotide
caagcgggcaauggguacu

SEQ ID NO: 709143 - RNA, 19 nt, Artificial Sequence
  Description of Artificial Sequence: Synthetic oligonucleotide
aucaggccgaagacuuaua

SEQ ID NO: 709144 - RNA, 19 nt, Artificial Sequence
  Description of Artificial Sequence: Synthetic oligonucleotide
cgcuccuuauguucccuuc

SEQ ID NO: 709145 - RNA, 19 nt, Artificial Sequence
  Description of Artificial Sequence: Synthetic oligonucleotide
cgugacguuccuucacuga

SEQ ID NO: 709146 - RNA, 19 nt, Artificial Sequence
  Description of Artificial Sequence: Synthetic oligonucleotide
cccgaagcagaaucugcaa

SEQ ID NO: 709147 - RNA, 19 nt, Artificial Sequence
  Description of Artificial Sequence: Synthetic oligonucleotide
cucgaacugcuugaacgau

SEQ ID NO: 709148 - RNA, 19 nt, Artificial Sequence
  Description of Artificial Sequence: Synthetic oligonucleotide
ccuuuaugauggucccucu

SEQ ID NO: 709149 - RNA, 19 nt, Artificial Sequence
  Description of Artificial Sequence: Synthetic oligonucleotide
cagcuacgaggauuuucuu

SEQ ID NO: 709150 - RNA, 19 nt, Artificial Sequence
  Description of Artificial Sequence: Synthetic oligonucleotide
ggccgaagacuuauaucau

SEQ ID NO: 709151 - RNA, 19 nt, Artificial Sequence
  Description of Artificial Sequence: Synthetic oligonucleotide
gcauacagacugaucuguu

SEQ ID NO: 709152 - RNA, 19 nt, Artificial Sequence
  Description of Artificial Sequence: Synthetic oligonucleotide
caggacuggguccccucuu

SEQ ID NO: 709153 - RNA, 19 nt, Artificial Sequence
  Description of Artificial Sequence: Synthetic oligonucleotide
caucgaccagaacgccuuu

SEQ ID NO: 709154 - RNA, 19 nt, Artificial Sequence
  Description of Artificial Sequence: Synthetic oligonucleotide
gggcuuagccgcaucuguu

SEQ ID NO: 709155 - RNA, 19 nt, Artificial Sequence
  Description of Artificial Sequence: Synthetic oligonucleotide
caguacugugcaggagcau

SEQ ID NO: 709156 - RNA, 19 nt, Artificial Sequence
  Description of Artificial Sequence: Synthetic oligonucleotide
ggguacugucucggagaaa

SEQ ID NO: 709157 - RNA, 19 nt, Artificial Sequence
  Description of Artificial Sequence: Synthetic oligonucleotide
gcauggguaggcacuccuu

SEQ ID NO: 709158 - RNA, 19 nt, Artificial Sequence
  Description of Artificial Sequence: Synthetic oligonucleotide
gcgagcaugcagggcuacu

SEQ ID NO: 709159 - RNA, 19 nt, Artificial Sequence
  Description of Artificial Sequence: Synthetic oligonucleotide
cacuggcgugacguuccuu

SEQ ID NO: 709160 - RNA, 19 nt, Artificial Sequence
  Description of Artificial Sequence: Synthetic oligonucleotide
ccccuucgugcaggacaga

SEQ ID NO: 709161 - RNA, 19 nt, Artificial Sequence
  Description of Artificial Sequence: Synthetic oligonucleotide
ucgaaugucaucuugaccc

SEQ ID NO: 709162 - RNA, 19 nt, Artificial Sequence
  Description of Artificial Sequence: Synthetic oligonucleotide
ugaaggacaguuuagacag

SEQ ID NO: 709163 - RNA, 19 nt, Artificial Sequence
  Description of Artificial Sequence: Synthetic oligonucleotide
gcuacuaauaauuacaggg

SEQ ID NO: 709164 - RNA, 19 nt, Artificial Sequence
  Description of Artificial Sequence: Synthetic oligonucleotide
aauauggauaccuccauug

SEQ ID NO: 709165 - RNA, 19 nt, Artificial Sequence
  Description of Artificial Sequence: Synthetic oligonucleotide
agaaaugagagugaaggcc

SEQ ID NO: 709166 - RNA, 19 nt, Artificial Sequence
  Description of Artificial Sequence: Synthetic oligonucleotide
auuagaauugcuuauugcu

SEQ ID NO: 709167 - RNA, 19 nt, Artificial Sequence
  Description of Artificial Sequence: Synthetic oligonucleotide
ugguaccucaacuagauag

SEQ ID NO: 709168 - RNA, 19 nt, Artificial Sequence
  Description of Artificial Sequence: Synthetic oligonucleotide
aaggguuuggcuuucggag

SEQ ID NO: 709169 - RNA, 19 nt, Artificial Sequence
  Description of Artificial Sequence: Synthetic oligonucleotide
ugaaccauugucuugacuc

SEQ ID NO: 709170 - RNA, 19 nt, Artificial Sequence
  Description of Artificial Sequence: Synthetic oligonucleotide
ucuucggacuugaugaugg

SEQ ID NO: 709171 - RNA, 19 nt, Artificial Sequence
  Description of Artificial Sequence: Synthetic oligonucleotide
uuagaauugcuuauugcug

SEQ ID NO: 709172 - RNA, 19 nt, Artificial Sequence
  Description of Artificial Sequence: Synthetic oligonucleotide
uuucggagggacaaggagg

SEQ ID NO: 709173 - RNA, 19 nt, Artificial Sequence
  Description of Artificial Sequence: Synthetic oligonucleotide
uucaagaacggauucuggg

SEQ ID NO: 709174 - RNA, 19 nt, Artificial Sequence
  Description of Artificial Sequence: Synthetic oligonucleotide
acccauucagcccacaccc

SEQ ID NO: 709175 - RNA, 19 nt, Artificial Sequence
  Description of Artificial Sequence: Synthetic oligonucleotide
ucuaaugguauacagucuc

SEQ ID NO: 709176 - RNA, 19 nt, Artificial Sequence
  Description of Artificial Sequence: Synthetic oligonucleotide
uauagcuagguguucaccc

SEQ ID NO: 709177 - RNA, 19 nt, Artificial Sequence
  Description of Artificial Sequence: Synthetic oligonucleotide
uacuaauaauuacagggca

SEQ ID NO: 709178 - RNA, 19 nt, Artificial Sequence
  Description of Artificial Sequence: Synthetic oligonucleotide
uguauggcuaaggugaccg

SEQ ID NO: 709179 - RNA, 19 nt, Artificial Sequence
  Description of Artificial Sequence: Synthetic oligonucleotide
aaagcauagaaaugagagu

SEQ ID NO: 709180 - RNA, 19 nt, Artificial Sequence
  Description of Artificial Sequence: Synthetic oligonucleotide
aguuacgagcuauucuucc

SEQ ID NO: 709181 - RNA, 19 nt, Artificial Sequence
  Description of Artificial Sequence: Synthetic oligonucleotide
ggagcuaagccauuaaugg

SEQ ID NO: 709182 - RNA, 19 nt, Artificial Sequence
  Description of Artificial Sequence: Synthetic oligonucleotide
auauggauaccuccauugc

SEQ ID NO: 709183 - RNA, 19 nt, Artificial Sequence
  Description of Artificial Sequence: Synthetic oligonucleotide
cuaugcguggcccagaccc

SEQ ID NO: 709184 - RNA, 19 nt, Artificial Sequence
  Description of Artificial Sequence: Synthetic oligonucleotide
aacccuagcaaguuacgag

SEQ ID NO: 709185 - RNA, 19 nt, Artificial Sequence
  Description of Artificial Sequence: Synthetic oligonucleotide
acccuagcaaguuacgagc

SEQ ID NO: 709186 - RNA, 19 nt, Artificial Sequence
  Description of Artificial Sequence: Synthetic oligonucleotide
cucuacaugcuauagcuag

SEQ ID NO: 709187 - RNA, 19 nt, Artificial Sequence
  Description of Artificial Sequence: Synthetic oligonucleotide
ugaagcuugaaaccaguca

SEQ ID NO: 709188 - RNA, 19 nt, Artificial Sequence
  Description of Artificial Sequence: Synthetic oligonucleotide
aacuagauagcaccggaga

SEQ ID NO: 709189 - RNA, 19 nt, Artificial Sequence
  Description of Artificial Sequence: Synthetic oligonucleotide
cacuauucaaagaaauggc

SEQ ID NO: 709190 - RNA, 19 nt, Artificial Sequence
  Description of Artificial Sequence: Synthetic oligonucleotide
agucucuacaugcuauagc

SEQ ID NO: 709191 - RNA, 19 nt, Artificial Sequence
  Description of Artificial Sequence: Synthetic oligonucleotide
ucaagaacggauucugggc

SEQ ID NO: 709192 - RNA, 19 nt, Artificial Sequence
  Description of Artificial Sequence: Synthetic oligonucleotide
auagcuagguguucacccc

SEQ ID NO: 709193 - RNA, 19 nt, Artificial Sequence
  Description of Artificial Sequence: Synthetic oligonucleotide
acaugcuauagcuaggugu

SEQ ID NO: 709194 - RNA, 19 nt, Artificial Sequence
  Description of Artificial Sequence: Synthetic oligonucleotide
ugcaugacaacggugauga

SEQ ID NO: 709195 - RNA, 19 nt, Artificial Sequence
  Description of Artificial Sequence: Synthetic oligonucleotide
aggucuagacuucaagaac

SEQ ID NO: 709196 - RNA, 19 nt, Artificial Sequence
  Description of Artificial Sequence: Synthetic oligonucleotide
cuuauugcuguaguaagcc

SEQ ID NO: 709197 - RNA, 19 nt, Artificial Sequence
  Description of Artificial Sequence: Synthetic oligonucleotide
ugcuuauugcuguaguaag

SEQ ID NO: 709198 - RNA, 19 nt, Artificial Sequence
  Description of Artificial Sequence: Synthetic oligonucleotide
auggucccgaaacaggagc

SEQ ID NO: 709199 - RNA, 19 nt, Artificial Sequence
  Description of Artificial Sequence: Synthetic oligonucleotide
uauggauaccuccauugca

SEQ ID NO: 709200 - RNA, 19 nt, Artificial Sequence
  Description of Artificial Sequence: Synthetic oligonucleotide
cauuagaauugcuuauugc

SEQ ID NO: 709201 - RNA, 19 nt, Artificial Sequence
  Description of Artificial Sequence: Synthetic oligonucleotide
aacagcccugcuuucauug

SEQ ID NO: 709202 - RNA, 19 nt, Artificial Sequence
  Description of Artificial Sequence: Synthetic oligonucleotide
aguuuagacagccagugaa

SEQ ID NO: 709203 - RNA, 19 nt, Artificial Sequence
  Description of Artificial Sequence: Synthetic oligonucleotide
auguauguccacuugauuu

SEQ ID NO: 709204 - RNA, 19 nt, Artificial Sequence
  Description of Artificial Sequence: Synthetic oligonucleotide
uauacagucucuacaugcu

SEQ ID NO: 709205 - RNA, 19 nt, Artificial Sequence
  Description of Artificial Sequence: Synthetic oligonucleotide
uuguuuaugugaugcuggg

SEQ ID NO: 709206 - RNA, 19 nt, Artificial Sequence
  Description of Artificial Sequence: Synthetic oligonucleotide
ucaacuagauagcaccgga

SEQ ID NO: 709207 - RNA, 19 nt, Artificial Sequence
  Description of Artificial Sequence: Synthetic oligonucleotide
acuaauaauuacagggcac

SEQ ID NO: 709208 - RNA, 19 nt, Artificial Sequence
  Description of Artificial Sequence: Synthetic oligonucleotide
uuuagacagccagugaaag

SEQ ID NO: 709209 - RNA, 19 nt, Artificial Sequence
  Description of Artificial Sequence: Synthetic oligonucleotide
uguguagggucugagaucu

SEQ ID NO: 709210 - RNA, 19 nt, Artificial Sequence
  Description of Artificial Sequence: Synthetic oligonucleotide
acggauucugggcaguggc

SEQ ID NO: 709211 - RNA, 19 nt, Artificial Sequence
  Description of Artificial Sequence: Synthetic oligonucleotide
acacucacauaugaggggc

SEQ ID NO: 709212 - RNA, 19 nt, Artificial Sequence
  Description of Artificial Sequence: Synthetic oligonucleotide
aaggaguugguuugggccu

SEQ ID NO: 709213 - RNA, 19 nt, Artificial Sequence
  Description of Artificial Sequence: Synthetic oligonucleotide
gauagcaccggagaccagg

SEQ ID NO: 709214 - RNA, 19 nt, Artificial Sequence
  Description of Artificial Sequence: Synthetic oligonucleotide
acgagcuauucuuccaagc

SEQ ID NO: 709215 - RNA, 19 nt, Artificial Sequence
  Description of Artificial Sequence: Synthetic oligonucleotide
acacaaugggccaugcugc

SEQ ID NO: 709216 - RNA, 19 nt, Artificial Sequence
  Description of Artificial Sequence: Synthetic oligonucleotide
ugacccacugaagaguugg

SEQ ID NO: 709217 - RNA, 19 nt, Artificial Sequence
  Description of Artificial Sequence: Synthetic oligonucleotide
uugaaaccagucaagcuau

SEQ ID NO: 709218 - RNA, 19 nt, Artificial Sequence
  Description of Artificial Sequence: Synthetic oligonucleotide
agacuucaagaacggauuc

SEQ ID NO: 709219 - RNA, 19 nt, Artificial Sequence
  Description of Artificial Sequence: Synthetic oligonucleotide
gugaccacacucuagcccc

SEQ ID NO: 709220 - RNA, 19 nt, Artificial Sequence
  Description of Artificial Sequence: Synthetic oligonucleotide
uagaauugucacacuauuc

SEQ ID NO: 709221 - RNA, 19 nt, Artificial Sequence
  Description of Artificial Sequence: Synthetic oligonucleotide
ggucuagacuucaagaacg

SEQ ID NO: 709222 - RNA, 19 nt, Artificial Sequence
  Description of Artificial Sequence: Synthetic oligonucleotide
acaguuuagacagccagug

SEQ ID NO: 709223 - RNA, 19 nt, Artificial Sequence
  Description of Artificial Sequence: Synthetic oligonucleotide
auggcaaggcuucccaagg

SEQ ID NO: 709224 - RNA, 19 nt, Artificial Sequence
  Description of Artificial Sequence: Synthetic oligonucleotide
gaaacaggagccguguaug

SEQ ID NO: 709225 - RNA, 19 nt, Artificial Sequence
  Description of Artificial Sequence: Synthetic oligonucleotide
acuauucaaagaaauggca

SEQ ID NO: 709226 - RNA, 19 nt, Artificial Sequence
  Description of Artificial Sequence: Synthetic oligonucleotide
uguauguccacuugauuuu

SEQ ID NO: 709227 - RNA, 19 nt, Artificial Sequence
  Description of Artificial Sequence: Synthetic oligonucleotide
aaaaucaugccaggaggcu

SEQ ID NO: 709228 - RNA, 19 nt, Artificial Sequence
  Description of Artificial Sequence: Synthetic oligonucleotide
auggaacacucacauauga

SEQ ID NO: 709229 - RNA, 19 nt, Artificial Sequence
  Description of Artificial Sequence: Synthetic oligonucleotide
uucauuggauucacgcugu

SEQ ID NO: 709230 - RNA, 19 nt, Artificial Sequence
  Description of Artificial Sequence: Synthetic oligonucleotide
ggucuuuugaaggagagac

SEQ ID NO: 709231 - RNA, 19 nt, Artificial Sequence
  Description of Artificial Sequence: Synthetic oligonucleotide
uacccauucagcccacacc

SEQ ID NO: 709232 - RNA, 19 nt, Artificial Sequence
  Description of Artificial Sequence: Synthetic oligonucleotide
gagaccaggcaucacuccc

SEQ ID NO: 709233 - RNA, 19 nt, Artificial Sequence
  Description of Artificial Sequence: Synthetic oligonucleotide
aggcgcuacuaauaauuac

SEQ ID NO: 709234 - RNA, 19 nt, Artificial Sequence
  Description of Artificial Sequence: Synthetic oligonucleotide
uguagggucugagaucucc

SEQ ID NO: 709235 - RNA, 19 nt, Artificial Sequence
  Description of Artificial Sequence: Synthetic oligonucleotide
auaauauggauaccuccau

SEQ ID NO: 709236 - RNA, 19 nt, Artificial Sequence
  Description of Artificial Sequence: Synthetic oligonucleotide
cucucgccauccaauaagg

SEQ ID NO: 709237 - RNA, 19 nt, Artificial Sequence
  Description of Artificial Sequence: Synthetic oligonucleotide
ucugucagucagccuagag

SEQ ID NO: 709238 - RNA, 19 nt, Artificial Sequence
  Description of Artificial Sequence: Synthetic oligonucleotide
aacuagcuccucaaugguc

SEQ ID NO: 709239 - RNA, 19 nt, Artificial Sequence
  Description of Artificial Sequence: Synthetic oligonucleotide
uuacgagcuauucuuccaa

SEQ ID NO: 709240 - RNA, 19 nt, Artificial Sequence
  Description of Artificial Sequence: Synthetic oligonucleotide
aaugaagcuugaaaccagu

SEQ ID NO: 709241 - RNA, 19 nt, Artificial Sequence
  Description of Artificial Sequence: Synthetic oligonucleotide
aaguuacgagcuauucuuc

SEQ ID NO: 709242 - RNA, 19 nt, Artificial Sequence
  Description of Artificial Sequence: Synthetic oligonucleotide
ucagccuagagggugugag

SEQ ID NO: 709243 - RNA, 19 nt, Artificial Sequence
  Description of Artificial Sequence: Synthetic oligonucleotide
gcaccuuugcucuuaaaag

SEQ ID NO: 709244 - RNA, 19 nt, Artificial Sequence
  Description of Artificial Sequence: Synthetic oligonucleotide
gucaucuugacccacugaa

SEQ ID NO: 709245 - RNA, 19 nt, Artificial Sequence
  Description of Artificial Sequence: Synthetic oligonucleotide
aaagggccgaauagaauug

SEQ ID NO: 709246 - RNA, 19 nt, Artificial Sequence
  Description of Artificial Sequence: Synthetic oligonucleotide
acugaagaguuggagagga

SEQ ID NO: 709247 - RNA, 19 nt, Artificial Sequence
  Description of Artificial Sequence: Synthetic oligonucleotide
aaggugaccgugguuuauc

SEQ ID NO: 709248 - RNA, 19 nt, Artificial Sequence
  Description of Artificial Sequence: Synthetic oligonucleotide
ccugagguuauguaugucc

SEQ ID NO: 709249 - RNA, 19 nt, Artificial Sequence
  Description of Artificial Sequence: Synthetic oligonucleotide
uugucuugacucuguagcu

SEQ ID NO: 709250 - RNA, 19 nt, Artificial Sequence
  Description of Artificial Sequence: Synthetic oligonucleotide
agaaaagucuaaugguaua

SEQ ID NO: 709251 - RNA, 19 nt, Artificial Sequence
  Description of Artificial Sequence: Synthetic oligonucleotide
uuggccacggccacguaca

SEQ ID NO: 709252 - RNA, 19 nt, Artificial Sequence
  Description of Artificial Sequence: Synthetic oligonucleotide
guugguuugggccuaaccu

SEQ ID NO: 709253 - RNA, 19 nt, Artificial Sequence
  Description of Artificial Sequence: Synthetic oligonucleotide
uaggauauggcugucugua

SEQ ID NO: 709254 - RNA, 19 nt, Artificial Sequence
  Description of Artificial Sequence: Synthetic oligonucleotide
agagaggcgcuacuaauaa

SEQ ID NO: 709255 - RNA, 19 nt, Artificial Sequence
  Description of Artificial Sequence: Synthetic oligonucleotide
uacgagcuauucuuccaag

SEQ ID NO: 709256 - RNA, 19 nt, Artificial Sequence
  Description of Artificial Sequence: Synthetic oligonucleotide
aggaacaacuugcuuuugu

SEQ ID NO: 709257 - RNA, 19 nt, Artificial Sequence
  Description of Artificial Sequence: Synthetic oligonucleotide
gugaccgugguuuaucaca

SEQ ID NO: 709258 - RNA, 19 nt, Artificial Sequence
  Description of Artificial Sequence: Synthetic oligonucleotide
uggucccgaaacaggagcc

SEQ ID NO: 709259 - RNA, 19 nt, Artificial Sequence
  Description of Artificial Sequence: Synthetic oligonucleotide
agcuaugcguggcccagac

SEQ ID NO: 709260 - RNA, 19 nt, Artificial Sequence
  Description of Artificial Sequence: Synthetic oligonucleotide
agagacgagaaggaagaug

SEQ ID NO: 709261 - RNA, 19 nt, Artificial Sequence
  Description of Artificial Sequence: Synthetic oligonucleotide
aacggauucugggcagugg

SEQ ID NO: 709262 - RNA, 19 nt, Artificial Sequence
  Description of Artificial Sequence: Synthetic oligonucleotide
ugaccgugguuuaucacau

SEQ ID NO: 709263 - RNA, 19 nt, Artificial Sequence
  Description of Artificial Sequence: Synthetic oligonucleotide
cucaacuagauagcaccgg

SEQ ID NO: 709264 - RNA, 19 nt, Artificial Sequence
  Description of Artificial Sequence: Synthetic oligonucleotide
guuccuagagggaugccag

SEQ ID NO: 709265 - RNA, 19 nt, Artificial Sequence
  Description of Artificial Sequence: Synthetic oligonucleotide
caagaacggauucugggca

SEQ ID NO: 709266 - RNA, 19 nt, Artificial Sequence
  Description of Artificial Sequence: Synthetic oligonucleotide
uaauaauuacagggcacaa

SEQ ID NO: 709267 - RNA, 19 nt, Artificial Sequence
  Description of Artificial Sequence: Synthetic oligonucleotide
ucucgccauccaauaaggc

SEQ ID NO: 709268 - RNA, 19 nt, Artificial Sequence
  Description of Artificial Sequence: Synthetic oligonucleotide
gucuagacuucaagaacgg

SEQ ID NO: 709269 - RNA, 19 nt, Artificial Sequence
  Description of Artificial Sequence: Synthetic oligonucleotide
agcgcuuuccugcugcacu

SEQ ID NO: 709270 - RNA, 19 nt, Artificial Sequence
  Description of Artificial Sequence: Synthetic oligonucleotide
gcauuagaauugcuuauug

SEQ ID NO: 709271 - RNA, 19 nt, Artificial Sequence
  Description of Artificial Sequence: Synthetic oligonucleotide
aaccauugucuugacucug

SEQ ID NO: 709272 - RNA, 19 nt, Artificial Sequence
  Description of Artificial Sequence: Synthetic oligonucleotide
auagcaccggagaccaggc

SEQ ID NO: 709273 - RNA, 19 nt, Artificial Sequence
  Description of Artificial Sequence: Synthetic oligonucleotide
gagcucaauggaaggacag

SEQ ID NO: 709274 - RNA, 19 nt, Artificial Sequence
  Description of Artificial Sequence: Synthetic oligonucleotide
guuacgagcuauucuucca

SEQ ID NO: 709275 - RNA, 19 nt, Artificial Sequence
  Description of Artificial Sequence: Synthetic oligonucleotide
gucuuuugaaggagagacg

SEQ ID NO: 709276 - RNA, 19 nt, Artificial Sequence
  Description of Artificial Sequence: Synthetic oligonucleotide
ccgaauagaauugucacac

SEQ ID NO: 709277 - RNA, 19 nt, Artificial Sequence
  Description of Artificial Sequence: Synthetic oligonucleotide
guaguaagccugguggggc

SEQ ID NO: 709278 - RNA, 19 nt, Artificial Sequence
  Description of Artificial Sequence: Synthetic oligonucleotide
gaccaggcaucacuccccg

SEQ ID NO: 709279 - RNA, 19 nt, Artificial Sequence
  Description of Artificial Sequence: Synthetic oligonucleotide
gagcuauucuuccaagcaa

SEQ ID NO: 709280 - RNA, 19 nt, Artificial Sequence
  Description of Artificial Sequence: Synthetic oligonucleotide
aggggcuugguaccucaac

SEQ ID NO: 709281 - RNA, 19 nt, Artificial Sequence
  Description of Artificial Sequence: Synthetic oligonucleotide
cuauagcuagguguucacc

SEQ ID NO: 709282 - RNA, 19 nt, Artificial Sequence
  Description of Artificial Sequence: Synthetic oligonucleotide
guuugggccuaaccugagg

SEQ ID NO: 709283 - RNA, 19 nt, Artificial Sequence
  Description of Artificial Sequence: Synthetic oligonucleotide
agaggcgcuacuaauaauu

SEQ ID NO: 709284 - RNA, 19 nt, Artificial Sequence
  Description of Artificial Sequence: Synthetic oligonucleotide
cuagacuucaagaacggau

SEQ ID NO: 709285 - RNA, 19 nt, Artificial Sequence
  Description of Artificial Sequence: Synthetic oligonucleotide
caaguuacgagcuauucuu

SEQ ID NO: 709286 - RNA, 19 nt, Artificial Sequence
  Description of Artificial Sequence: Synthetic oligonucleotide
ucuagacuucaagaacgga

SEQ ID NO: 709287 - RNA, 19 nt, Artificial Sequence
  Description of Artificial Sequence: Synthetic oligonucleotide
ucacuuaccuuggccagca

SEQ ID NO: 709288 - RNA, 19 nt, Artificial Sequence
  Description of Artificial Sequence: Synthetic oligonucleotide
ccguguauggcuaagguga

SEQ ID NO: 709289 - RNA, 19 nt, Artificial Sequence
  Description of Artificial Sequence: Synthetic oligonucleotide
cacgcuguugcccucugac

SEQ ID NO: 709290 - RNA, 19 nt, Artificial Sequence
  Description of Artificial Sequence: Synthetic oligonucleotide
cucuuugcguggagggagg

SEQ ID NO: 709291 - RNA, 19 nt, Artificial Sequence
  Description of Artificial Sequence: Synthetic oligonucleotide
accaggucuggucuuuuga

SEQ ID NO: 709292 - RNA, 19 nt, Artificial Sequence
  Description of Artificial Sequence: Synthetic oligonucleotide
ggcuugguaccucaacuag

SEQ ID NO: 709293 - RNA, 19 nt, Artificial Sequence
  Description of Artificial Sequence: Synthetic oligonucleotide
cuuaccuuggccagcaccu

SEQ ID NO: 709294 - RNA, 19 nt, Artificial Sequence
  Description of Artificial Sequence: Synthetic oligonucleotide
aagagaggcgcuacuaaua

SEQ ID NO: 709295 - RNA, 19 nt, Artificial Sequence
  Description of Artificial Sequence: Synthetic oligonucleotide
gacgagaaggaagauggaa

SEQ ID NO: 709296 - RNA, 19 nt, Artificial Sequence
  Description of Artificial Sequence: Synthetic oligonucleotide
uaguaagccugguggggca

SEQ ID NO: 709297 - RNA, 19 nt, Artificial Sequence
  Description of Artificial Sequence: Synthetic oligonucleotide
guaagagaggcgcuacuaa

SEQ ID NO: 709298 - RNA, 19 nt, Artificial Sequence
  Description of Artificial Sequence: Synthetic oligonucleotide
aggugaggaguaugaacca

SEQ ID NO: 709299 - RNA, 19 nt, Artificial Sequence
  Description of Artificial Sequence: Synthetic oligonucleotide
cguacagugaguccuuugg

SEQ ID NO: 709300 - RNA, 19 nt, Artificial Sequence
  Description of Artificial Sequence: Synthetic oligonucleotide
agccguguauggcuaaggu

SEQ ID NO: 709301 - RNA, 19 nt, Artificial Sequence
  Description of Artificial Sequence: Synthetic oligonucleotide
ggcgcuacuaauaauuaca

SEQ ID NO: 709302 - RNA, 19 nt, Artificial Sequence
  Description of Artificial Sequence: Synthetic oligonucleotide
gcucucgccauccaauaag

SEQ ID NO: 709303 - RNA, 19 nt, Artificial Sequence
  Description of Artificial Sequence: Synthetic oligonucleotide
agcuauucuuccaagcaaa

SEQ ID NO: 709304 - RNA, 19 nt, Artificial Sequence
  Description of Artificial Sequence: Synthetic oligonucleotide
ucccgaaacaggagccgug

SEQ ID NO: 709305 - RNA, 19 nt, Artificial Sequence
  Description of Artificial Sequence: Synthetic oligonucleotide
augaaccauugucuugacu

SEQ ID NO: 709306 - RNA, 19 nt, Artificial Sequence
  Description of Artificial Sequence: Synthetic oligonucleotide
cuguguagggucugagauc

SEQ ID NO: 709307 - RNA, 19 nt, Artificial Sequence
  Description of Artificial Sequence: Synthetic oligonucleotide
ggagagacgagaaggaaga

SEQ ID NO: 709308 - RNA, 19 nt, Artificial Sequence
  Description of Artificial Sequence: Synthetic oligonucleotide
uaugcguggcccagaccca

SEQ ID NO: 709309 - RNA, 19 nt, Artificial Sequence
  Description of Artificial Sequence: Synthetic oligonucleotide
augggacggagguugggcu

SEQ ID NO: 709310 - RNA, 19 nt, Artificial Sequence
  Description of Artificial Sequence: Synthetic oligonucleotide
aagggccgaauagaauugu

SEQ ID NO: 709311 - RNA, 19 nt, Artificial Sequence
  Description of Artificial Sequence: Synthetic oligonucleotide
aguaagagaggcgcuacua

SEQ ID NO: 709312 - RNA, 19 nt, Artificial Sequence
  Description of Artificial Sequence: Synthetic oligonucleotide
acaccccucugacuucagg

SEQ ID NO: 709313 - RNA, 19 nt, Artificial Sequence
  Description of Artificial Sequence: Synthetic oligonucleotide
ccucaacuagauagcaccg

SEQ ID NO: 709314 - RNA, 19 nt, Artificial Sequence
  Description of Artificial Sequence: Synthetic oligonucleotide
cuacccauucagcccacac

SEQ ID NO: 709315 - RNA, 19 nt, Artificial Sequence
  Description of Artificial Sequence: Synthetic oligonucleotide
ucuagccccaugucguuuu

SEQ ID NO: 709316 - RNA, 19 nt, Artificial Sequence
  Description of Artificial Sequence: Synthetic oligonucleotide
uggcaaggcuucccaaggu

SEQ ID NO: 709317 - RNA, 19 nt, Artificial Sequence
  Description of Artificial Sequence: Synthetic oligonucleotide
aggugaccgugguuuauca

SEQ ID NO: 709318 - RNA, 19 nt, Artificial Sequence
  Description of Artificial Sequence: Synthetic oligonucleotide
uccuucgaaguuggccacg

SEQ ID NO: 709319 - RNA, 19 nt, Artificial Sequence
  Description of Artificial Sequence: Synthetic oligonucleotide
cacuguuccuagagggaug

SEQ ID NO: 709320 - RNA, 19 nt, Artificial Sequence
  Description of Artificial Sequence: Synthetic oligonucleotide
cuugguaccucaacuagau

SEQ ID NO: 709321 - RNA, 19 nt, Artificial Sequence
  Description of Artificial Sequence: Synthetic oligonucleotide
caugcuauagcuagguguu

SEQ ID NO: 709322 - RNA, 19 nt, Artificial Sequence
  Description of Artificial Sequence: Synthetic oligonucleotide
uaugugaugcugggaugga

SEQ ID NO: 709323 - RNA, 19 nt, Artificial Sequence
  Description of Artificial Sequence: Synthetic oligonucleotide
gagccguguauggcuaagg

SEQ ID NO: 709324 - RNA, 19 nt, Artificial Sequence
  Description of Artificial Sequence: Synthetic oligonucleotide
cacggccacguacagugag

SEQ ID NO: 709325 - RNA, 19 nt, Artificial Sequence
  Description of Artificial Sequence: Synthetic oligonucleotide
ccccuuacauuaaacacuc

SEQ ID NO: 709326 - RNA, 19 nt, Artificial Sequence
  Description of Artificial Sequence: Synthetic oligonucleotide
agagcucaauggaaggaca

SEQ ID NO: 709327 - RNA, 19 nt, Artificial Sequence
  Description of Artificial Sequence: Synthetic oligonucleotide
gagguuauguauguccacu

SEQ ID NO: 709328 - RNA, 19 nt, Artificial Sequence
  Description of Artificial Sequence: Synthetic oligonucleotide
gcuuauugcuguaguaagc

SEQ ID NO: 709329 - RNA, 19 nt, Artificial Sequence
  Description of Artificial Sequence: Synthetic oligonucleotide
agccuagagggugugagaa

SEQ ID NO: 709330 - RNA, 19 nt, Artificial Sequence
  Description of Artificial Sequence: Synthetic oligonucleotide
ccuaaccugaggucuagac

SEQ ID NO: 709331 - RNA, 19 nt, Artificial Sequence
  Description of Artificial Sequence: Synthetic oligonucleotide
uccucauagccugcugaug

SEQ ID NO: 709332 - RNA, 19 nt, Artificial Sequence
  Description of Artificial Sequence: Synthetic oligonucleotide
guuuagacagccagugaaa

SEQ ID NO: 709333 - RNA, 19 nt, Artificial Sequence
  Description of Artificial Sequence: Synthetic oligonucleotide
uuccuagagggaugccaga

SEQ ID NO: 709334 - RNA, 19 nt, Artificial Sequence
  Description of Artificial Sequence: Synthetic oligonucleotide
gcgcuacuaauaauuacag

SEQ ID NO: 709335 - RNA, 19 nt, Artificial Sequence
  Description of Artificial Sequence: Synthetic oligonucleotide
gugcagacuaugucagcac

SEQ ID NO: 709336 - RNA, 19 nt, Artificial Sequence
  Description of Artificial Sequence: Synthetic oligonucleotide
guaccucaacuagauagca

SEQ ID NO: 709337 - RNA, 19 nt, Artificial Sequence
  Description of Artificial Sequence: Synthetic oligonucleotide
ucaggucaguccagcugcu

SEQ ID NO: 709338 - RNA, 19 nt, Artificial Sequence
  Description of Artificial Sequence: Synthetic oligonucleotide
acaaugggccaugcugcuc

SEQ ID NO: 709339 - RNA, 19 nt, Artificial Sequence
  Description of Artificial Sequence: Synthetic oligonucleotide
gcauugcaggcauaauaug

SEQ ID NO: 709340 - RNA, 19 nt, Artificial Sequence
  Description of Artificial Sequence: Synthetic oligonucleotide
ggugcagacuaugucagca

SEQ ID NO: 709341 - RNA, 19 nt, Artificial Sequence
  Description of Artificial Sequence: Synthetic oligonucleotide
cacuccccggagcaggaag

SEQ ID NO: 709342 - RNA, 19 nt, Artificial Sequence
  Description of Artificial Sequence: Synthetic oligonucleotide
cuuugccucgaaugucauc

SEQ ID NO: 709343 - RNA, 19 nt, Artificial Sequence
  Description of Artificial Sequence: Synthetic oligonucleotide
ucuuugcguggagggaggc

SEQ ID NO: 709344 - RNA, 19 nt, Artificial Sequence
  Description of Artificial Sequence: Synthetic oligonucleotide
cuccuucgaaguuggccac

SEQ ID NO: 709345 - RNA, 19 nt, Artificial Sequence
  Description of Artificial Sequence: Synthetic oligonucleotide
gccguguauggcuaaggug

SEQ ID NO: 709346 - RNA, 19 nt, Artificial Sequence
  Description of Artificial Sequence: Synthetic oligonucleotide
gcuauucuuccaagcaaag

SEQ ID NO: 709347 - RNA, 19 nt, Artificial Sequence
  Description of Artificial Sequence: Synthetic oligonucleotide
gaacggauucugggcagug

SEQ ID NO: 709348 - RNA, 19 nt, Artificial Sequence
  Description of Artificial Sequence: Synthetic oligonucleotide
agggccgaauagaauuguc

SEQ ID NO: 709349 - RNA, 19 nt, Artificial Sequence
  Description of Artificial Sequence: Synthetic oligonucleotide
augcuauagcuagguguuc

SEQ ID NO: 709350 - RNA, 19 nt, Artificial Sequence
  Description of Artificial Sequence: Synthetic oligonucleotide
acaacggugaugagguuuu

SEQ ID NO: 709351 - RNA, 19 nt, Artificial Sequence
  Description of Artificial Sequence: Synthetic oligonucleotide
ugaccacacucuagcccca

SEQ ID NO: 709352 - RNA, 19 nt, Artificial Sequence
  Description of Artificial Sequence: Synthetic oligonucleotide
ccgugguuuaucacauucc

SEQ ID NO: 709353 - RNA, 19 nt, Artificial Sequence
  Description of Artificial Sequence: Synthetic oligonucleotide
gcucaauggaaggacagga

SEQ ID NO: 709354 - RNA, 19 nt, Artificial Sequence
  Description of Artificial Sequence: Synthetic oligonucleotide
auauggcugucuguaguau

SEQ ID NO: 709355 - RNA, 19 nt, Artificial Sequence
  Description of Artificial Sequence: Synthetic oligonucleotide
gccgaauagaauugucaca

SEQ ID NO: 709356 - RNA, 19 nt, Artificial Sequence
  Description of Artificial Sequence: Synthetic oligonucleotide
cauuggcgauggcaccagg

SEQ ID NO: 709357 - RNA, 19 nt, Artificial Sequence
  Description of Artificial Sequence: Synthetic oligonucleotide
gacaguuuagacagccagu

SEQ ID NO: 709358 - RNA, 19 nt, Artificial Sequence
  Description of Artificial Sequence: Synthetic oligonucleotide
gggcacaaaggcauugcag

SEQ ID NO: 709359 - RNA, 19 nt, Artificial Sequence
  Description of Artificial Sequence: Synthetic oligonucleotide
cacucuagccccaugucgu

SEQ ID NO: 709360 - RNA, 19 nt, Artificial Sequence
  Description of Artificial Sequence: Synthetic oligonucleotide
gacuucaagaacggauucu

SEQ ID NO: 709361 - RNA, 19 nt, Artificial Sequence
  Description of Artificial Sequence: Synthetic oligonucleotide
cgcuacuaauaauuacagg

SEQ ID NO: 709362 - RNA, 19 nt, Artificial Sequence
  Description of Artificial Sequence: Synthetic oligonucleotide
cucauagccugcugaugca

SEQ ID NO: 709363 - RNA, 19 nt, Artificial Sequence
  Description of Artificial Sequence: Synthetic oligonucleotide
gcuauagcuagguguucac

SEQ ID NO: 709364 - RNA, 19 nt, Artificial Sequence
  Description of Artificial Sequence: Synthetic oligonucleotide
uccuacugucucgggccgg

SEQ ID NO: 709365 - RNA, 19 nt, Artificial Sequence
  Description of Artificial Sequence: Synthetic oligonucleotide
cuucgaaguuggccacggc

SEQ ID NO: 709366 - RNA, 19 nt, Artificial Sequence
  Description of Artificial Sequence: Synthetic oligonucleotide
gacucuuugcguggaggga

SEQ ID NO: 709367 - RNA, 19 nt, Artificial Sequence
  Description of Artificial Sequence: Synthetic oligonucleotide
agcucggcuuuggaccugg

SEQ ID NO: 709368 - RNA, 19 nt, Artificial Sequence
  Description of Artificial Sequence: Synthetic oligonucleotide
uaaggugaccgugguuuau

SEQ ID NO: 709369 - RNA, 19 nt, Artificial Sequence
  Description of Artificial Sequence: Synthetic oligonucleotide
aacuugcuuuugucagguu

SEQ ID NO: 709370 - RNA, 19 nt, Artificial Sequence
  Description of Artificial Sequence: Synthetic oligonucleotide
accuugccagcuaugcgug

SEQ ID NO: 709371 - RNA, 19 nt, Artificial Sequence
  Description of Artificial Sequence: Synthetic oligonucleotide
ccuugugaccacacucuag

SEQ ID NO: 709372 - RNA, 19 nt, Artificial Sequence
  Description of Artificial Sequence: Synthetic oligonucleotide
uggcucucgccauccaaua

SEQ ID NO: 709373 - RNA, 19 nt, Artificial Sequence
  Description of Artificial Sequence: Synthetic oligonucleotide
ggggccugcaugacaacgg

SEQ ID NO: 709374 - RNA, 19 nt, Artificial Sequence
  Description of Artificial Sequence: Synthetic oligonucleotide
gaggcgcuacuaauaauua

SEQ ID NO: 709375 - RNA, 19 nt, Artificial Sequence
  Description of Artificial Sequence: Synthetic oligonucleotide
ugcguggcccagacccacc

SEQ ID NO: 709376 - RNA, 19 nt, Artificial Sequence
  Description of Artificial Sequence: Synthetic oligonucleotide
gacaacggugaugagguuu

SEQ ID NO: 709377 - RNA, 19 nt, Artificial Sequence
  Description of Artificial Sequence: Synthetic oligonucleotide
gaggaguaugaaccauugu

SEQ ID NO: 709378 - RNA, 19 nt, Artificial Sequence
  Description of Artificial Sequence: Synthetic oligonucleotide
accaggcaucacuccccgg

SEQ ID NO: 709379 - RNA, 19 nt, Artificial Sequence
  Description of Artificial Sequence: Synthetic oligonucleotide
ggucccgaaacaggagccg

SEQ ID NO: 709380 - RNA, 19 nt, Artificial Sequence
  Description of Artificial Sequence: Synthetic oligonucleotide
auucacgcuguugcccucu

SEQ ID NO: 709381 - RNA, 19 nt, Artificial Sequence
  Description of Artificial Sequence: Synthetic oligonucleotide
ugggacggagguugggcuu

SEQ ID NO: 709382 - RNA, 19 nt, Artificial Sequence
  Description of Artificial Sequence: Synthetic oligonucleotide
uuugggccaucagcauuga

SEQ ID NO: 709383 - RNA, 19 nt, Artificial Sequence
  Description of Artificial Sequence: Synthetic oligonucleotide
cuacaugcuauagcuaggu

SEQ ID NO: 709384 - RNA, 19 nt, Artificial Sequence
  Description of Artificial Sequence: Synthetic oligonucleotide
gaguuggagaggaaggguu

SEQ ID NO: 709385 - RNA, 19 nt, Artificial Sequence
  Description of Artificial Sequence: Synthetic oligonucleotide
cuagcaaguuacgagcuau

SEQ ID NO: 709386 - RNA, 19 nt, Artificial Sequence
  Description of Artificial Sequence: Synthetic oligonucleotide
ggcauugcaggcauaauau

SEQ ID NO: 709387 - RNA, 19 nt, Artificial Sequence
  Description of Artificial Sequence: Synthetic oligonucleotide
ggugaccgugguuuaucac

SEQ ID NO: 709388 - RNA, 19 nt, Artificial Sequence
  Description of Artificial Sequence: Synthetic oligonucleotide
cuugacccacugaagaguu

SEQ ID NO: 709389 - RNA, 19 nt, Artificial Sequence
  Description of Artificial Sequence: Synthetic oligonucleotide
agccauuaauggucuuguu

SEQ ID NO: 709390 - RNA, 19 nt, Artificial Sequence
  Description of Artificial Sequence: Synthetic oligonucleotide
ucucuucgggcagcucggc

SEQ ID NO: 709391 - RNA, 19 nt, Artificial Sequence
  Description of Artificial Sequence: Synthetic oligonucleotide
cuaaggugaccgugguuua

SEQ ID NO: 709392 - RNA, 19 nt, Artificial Sequence
  Description of Artificial Sequence: Synthetic oligonucleotide
ccuuacauuaaacacucau

SEQ ID NO: 709393 - RNA, 19 nt, Artificial Sequence
  Description of Artificial Sequence: Synthetic oligonucleotide
gccuagagggugugagaag

SEQ ID NO: 709394 - RNA, 19 nt, Artificial Sequence
  Description of Artificial Sequence: Synthetic oligonucleotide
ccaccuugccagcuaugcg

SEQ ID NO: 709395 - RNA, 19 nt, Artificial Sequence
  Description of Artificial Sequence: Synthetic oligonucleotide
gccgguggggcaugcuugg

SEQ ID NO: 709396 - RNA, 19 nt, Artificial Sequence
  Description of Artificial Sequence: Synthetic oligonucleotide
cgagcuauucuuccaagca

SEQ ID NO: 709397 - RNA, 19 nt, Artificial Sequence
  Description of Artificial Sequence: Synthetic oligonucleotide
gucuaaugguauacagucu

SEQ ID NO: 709398 - RNA, 19 nt, Artificial Sequence
  Description of Artificial Sequence: Synthetic oligonucleotide
gccccaugaaugcuggcca

SEQ ID NO: 709399 - RNA, 19 nt, Artificial Sequence
  Description of Artificial Sequence: Synthetic oligonucleotide
agacgagaaggaagaugga

SEQ ID NO: 709400 - RNA, 19 nt, Artificial Sequence
  Description of Artificial Sequence: Synthetic oligonucleotide
caacuagcuccucaauggu

SEQ ID NO: 709401 - RNA, 19 nt, Artificial Sequence
  Description of Artificial Sequence: Synthetic oligonucleotide
agucagccuagagggugug

SEQ ID NO: 709402 - RNA, 19 nt, Artificial Sequence
  Description of Artificial Sequence: Synthetic oligonucleotide
ggggcuugguaccucaacu

SEQ ID NO: 709403 - RNA, 19 nt, Artificial Sequence
  Description of Artificial Sequence: Synthetic oligonucleotide
cuccggggugggaccacag

SEQ ID NO: 709404 - RNA, 19 nt, Artificial Sequence
  Description of Artificial Sequence: Synthetic oligonucleotide
cuccugagguuauguaugu

SEQ ID NO: 709405 - RNA, 19 nt, Artificial Sequence
  Description of Artificial Sequence: Synthetic oligonucleotide
ggccacguacagugagucc

SEQ ID NO: 709406 - RNA, 19 nt, Artificial Sequence
  Description of Artificial Sequence: Synthetic oligonucleotide
cugucucgggccggugggg

SEQ ID NO: 709407 - RNA, 19 nt, Artificial Sequence
  Description of Artificial Sequence: Synthetic oligonucleotide
ucggagggacaaggagggc

SEQ ID NO: 709408 - RNA, 19 nt, Artificial Sequence
  Description of Artificial Sequence: Synthetic oligonucleotide
gagaggcgcuacuaauaau

SEQ ID NO: 709409 - RNA, 19 nt, Artificial Sequence
  Description of Artificial Sequence: Synthetic oligonucleotide
ggcuuccuacugucucggg

SEQ ID NO: 709410 - RNA, 19 nt, Artificial Sequence
  Description of Artificial Sequence: Synthetic oligonucleotide
ugacaacggugaugagguu

SEQ ID NO: 709411 - RNA, 19 nt, Artificial Sequence
  Description of Artificial Sequence: Synthetic oligonucleotide
gggcuugguaccucaacua

SEQ ID NO: 709412 - RNA, 19 nt, Artificial Sequence
  Description of Artificial Sequence: Synthetic oligonucleotide
cugaagaguuggagaggaa

SEQ ID NO: 709413 - RNA, 19 nt, Artificial Sequence
  Description of Artificial Sequence: Synthetic oligonucleotide
cuggaacccuagcaaguua

SEQ ID NO: 709414 - RNA, 19 nt, Artificial Sequence
  Description of Artificial Sequence: Synthetic oligonucleotide
ggagccguguauggcuaag

SEQ ID NO: 709415 - RNA, 19 nt, Artificial Sequence
  Description of Artificial Sequence: Synthetic oligonucleotide
acccaccuuugccucgaau

SEQ ID NO: 709416 - RNA, 19 nt, Artificial Sequence
  Description of Artificial Sequence: Synthetic oligonucleotide
acggccacguacagugagu

SEQ ID NO: 709417 - RNA, 19 nt, Artificial Sequence
  Description of Artificial Sequence: Synthetic oligonucleotide
aguuugcuccugagguuau

SEQ ID NO: 709418 - RNA, 19 nt, Artificial Sequence
  Description of Artificial Sequence: Synthetic oligonucleotide
gcuaagccauuaauggucu

SEQ ID NO: 709419 - RNA, 19 nt, Artificial Sequence
  Description of Artificial Sequence: Synthetic oligonucleotide
gcuaugcguggcccagacc

SEQ ID NO: 709420 - RNA, 19 nt, Artificial Sequence
  Description of Artificial Sequence: Synthetic oligonucleotide
cacaaugggccaugcugcu

SEQ ID NO: 709421 - RNA, 19 nt, Artificial Sequence
  Description of Artificial Sequence: Synthetic oligonucleotide
cccauucagcccacacccc

SEQ ID NO: 709422 - RNA, 19 nt, Artificial Sequence
  Description of Artificial Sequence: Synthetic oligonucleotide
gaguugguuugggccuaac

SEQ ID NO: 709423 - RNA, 19 nt, Artificial Sequence
  Description of Artificial Sequence: Synthetic oligonucleotide
ccaggucuggucuuuugaa

SEQ ID NO: 709424 - RNA, 19 nt, Artificial Sequence
  Description of Artificial Sequence: Synthetic oligonucleotide
gugaggaguaugaaccauu

SEQ ID NO: 709425 - RNA, 19 nt, Artificial Sequence
  Description of Artificial Sequence: Synthetic oligonucleotide
ccucaauggucccgaaaca

SEQ ID NO: 709426 - RNA, 19 nt, Artificial Sequence
  Description of Artificial Sequence: Synthetic oligonucleotide
guuuguaggugaggaguau

SEQ ID NO: 709427 - RNA, 19 nt, Artificial Sequence
  Description of Artificial Sequence: Synthetic oligonucleotide
agauagcaccggagaccag

SEQ ID NO: 709428 - RNA, 19 nt, Artificial Sequence
  Description of Artificial Sequence: Synthetic oligonucleotide
cacuuaccuuggccagcac

SEQ ID NO: 709429 - RNA, 19 nt, Artificial Sequence
  Description of Artificial Sequence: Synthetic oligonucleotide
cagucagccuagagggugu

SEQ ID NO: 709430 - RNA, 19 nt, Artificial Sequence
  Description of Artificial Sequence: Synthetic oligonucleotide
gcaugacaacggugaugag

SEQ ID NO: 709431 - RNA, 19 nt, Artificial Sequence
  Description of Artificial Sequence: Synthetic oligonucleotide
gucucgggccgguggggca

SEQ ID NO: 709432 - RNA, 19 nt, Artificial Sequence
  Description of Artificial Sequence: Synthetic oligonucleotide
ggcucucgccauccaauaa

SEQ ID NO: 709433 - RNA, 19 nt, Artificial Sequence
  Description of Artificial Sequence: Synthetic oligonucleotide
ucacuccccggagcaggaa

SEQ ID NO: 709434 - RNA, 19 nt, Artificial Sequence
  Description of Artificial Sequence: Synthetic oligonucleotide
gcgauggcaccaggucugg

SEQ ID NO: 709435 - RNA, 19 nt, Artificial Sequence
  Description of Artificial Sequence: Synthetic oligonucleotide
cgaaugucaucuugaccca

SEQ ID NO: 709436 - RNA, 19 nt, Artificial Sequence
  Description of Artificial Sequence: Synthetic oligonucleotide
gucagccuagaggguguga

SEQ ID NO: 709437 - RNA, 19 nt, Artificial Sequence
  Description of Artificial Sequence: Synthetic oligonucleotide
caccggagaccaggcauca

SEQ ID NO: 709438 - RNA, 19 nt, Artificial Sequence
  Description of Artificial Sequence: Synthetic oligonucleotide
gggacggagguugggcuuc

SEQ ID NO: 709439 - RNA, 19 nt, Artificial Sequence
  Description of Artificial Sequence: Synthetic oligonucleotide
gcaccggagaccaggcauc

SEQ ID NO: 709440 - RNA, 19 nt, Artificial Sequence
  Description of Artificial Sequence: Synthetic oligonucleotide
ggugaggaguaugaaccau

SEQ ID NO: 709441 - RNA, 19 nt, Artificial Sequence
  Description of Artificial Sequence: Synthetic oligonucleotide
cccuagcaaguuacgagcu

SEQ ID NO: 709442 - RNA, 19 nt, Artificial Sequence
  Description of Artificial Sequence: Synthetic oligonucleotide
ccauucagcccacaccccu

SEQ ID NO: 709443 - RNA, 19 nt, Artificial Sequence
  Description of Artificial Sequence: Synthetic oligonucleotide
cuaagccauuaauggucuu

SEQ ID NO: 709444 - RNA, 19 nt, Artificial Sequence
  Description of Artificial Sequence: Synthetic oligonucleotide
ucgggccgguggggcaugc

SEQ ID NO: 709445 - RNA, 19 nt, Artificial Sequence
  Description of Artificial Sequence: Synthetic oligonucleotide
cccacaccccucugacuuc

SEQ ID NO: 709446 - RNA, 19 nt, Artificial Sequence
  Description of Artificial Sequence: Synthetic oligonucleotide
ccauugucuugacucugua

SEQ ID NO: 709447 - RNA, 19 nt, Artificial Sequence
  Description of Artificial Sequence: Synthetic oligonucleotide
ggucuccggggugggacca

SEQ ID NO: 709448 - RNA, 19 nt, Artificial Sequence
  Description of Artificial Sequence: Synthetic oligonucleotide
gacccaccuuugccucgaa

SEQ ID NO: 709449 - RNA, 19 nt, Artificial Sequence
  Description of Artificial Sequence: Synthetic oligonucleotide
guguagggucugagaucuc

SEQ ID NO: 709450 - RNA, 19 nt, Artificial Sequence
  Description of Artificial Sequence: Synthetic oligonucleotide
cagcuaugcguggcccaga

SEQ ID NO: 709451 - RNA, 19 nt, Artificial Sequence
  Description of Artificial Sequence: Synthetic oligonucleotide
cggccacguacagugaguc

SEQ ID NO: 709452 - RNA, 19 nt, Artificial Sequence
  Description of Artificial Sequence: Synthetic oligonucleotide
gccuaaccugaggucuaga

SEQ ID NO: 709453 - RNA, 19 nt, Artificial Sequence
  Description of Artificial Sequence: Synthetic oligonucleotide
cucuagccccaugucguuu

SEQ ID NO: 709454 - RNA, 19 nt, Artificial Sequence
  Description of Artificial Sequence: Synthetic oligonucleotide
gcguggcccagacccaccu

SEQ ID NO: 709455 - RNA, 19 nt, Artificial Sequence
  Description of Artificial Sequence: Synthetic oligonucleotide
ccccaggaucugucaguca

SEQ ID NO: 709456 - RNA, 19 nt, Artificial Sequence
  Description of Artificial Sequence: Synthetic oligonucleotide
cacguacagugaguccuuu

SEQ ID NO: 709457 - RNA, 19 nt, Artificial Sequence
  Description of Artificial Sequence: Synthetic oligonucleotide
ccuacugucucgggccggu

SEQ ID NO: 709458 - RNA, 19 nt, Artificial Sequence
  Description of Artificial Sequence: Synthetic oligonucleotide
ggacggagguugggcuucu

SEQ ID NO: 709459 - RNA, 19 nt, Artificial Sequence
  Description of Artificial Sequence: Synthetic oligonucleotide
gggugggaccacaggucuu

SEQ ID NO: 709460 - RNA, 19 nt, Artificial Sequence
  Description of Artificial Sequence: Synthetic oligonucleotide
ccuggccugugggaaguuu

SEQ ID NO: 709461 - RNA, 19 nt, Artificial Sequence
  Description of Artificial Sequence: Synthetic oligonucleotide
aauuuuacauuacucugcc

SEQ ID NO: 709462 - RNA, 19 nt, Artificial Sequence
  Description of Artificial Sequence: Synthetic oligonucleotide
uauuauaauagucuuugcg

SEQ ID NO: 709463 - RNA, 19 nt, Artificial Sequence
  Description of Artificial Sequence: Synthetic oligonucleotide
ucugaaugacaauagacgg

SEQ ID NO: 709464 - RNA, 19 nt, Artificial Sequence
  Description of Artificial Sequence: Synthetic oligonucleotide
aauuuuccgggaaagaagc

SEQ ID NO: 709465 - RNA, 19 nt, Artificial Sequence
  Description of Artificial Sequence: Synthetic oligonucleotide
aaagcuuaguauuaaauau

SEQ ID NO: 709466 - RNA, 19 nt, Artificial Sequence
  Description of Artificial Sequence: Synthetic oligonucleotide
cauacuuccaugauuagcc

SEQ ID NO: 709467 - RNA, 19 nt, Artificial Sequence
  Description of Artificial Sequence: Synthetic oligonucleotide
uuugcgucaagguacauag

SEQ ID NO: 709468 - RNA, 19 nt, Artificial Sequence
  Description of Artificial Sequence: Synthetic oligonucleotide
cucaacaugagcuucaaag

SEQ ID NO: 709469 - RNA, 19 nt, Artificial Sequence
  Description of Artificial Sequence: Synthetic oligonucleotide
uacauauuuggucugagca

SEQ ID NO: 709470 - RNA, 19 nt, Artificial Sequence
  Description of Artificial Sequence: Synthetic oligonucleotide
aggaguggcaaaucgaucc

SEQ ID NO: 709471 - RNA, 19 nt, Artificial Sequence
  Description of Artificial Sequence: Synthetic oligonucleotide
ugaaguacauauuuggucu

SEQ ID NO: 709472 - RNA, 19 nt, Artificial Sequence
  Description of Artificial Sequence: Synthetic oligonucleotide
ucaacaugagcuucaaagg

SEQ ID NO: 709473 - RNA, 19 nt, Artificial Sequence
  Description of Artificial Sequence: Synthetic oligonucleotide
uaauuuuacauuacucugc

SEQ ID NO: 709474 - RNA, 19 nt, Artificial Sequence
  Description of Artificial Sequence: Synthetic oligonucleotide
uacaacaccacucaagcca

SEQ ID NO: 709475 - RNA, 19 nt, Artificial Sequence
  Description of Artificial Sequence: Synthetic oligonucleotide
cauaugucaaauuuuccgg

SEQ ID NO: 709476 - RNA, 19 nt, Artificial Sequence
  Description of Artificial Sequence: Synthetic oligonucleotide
aguauuuaaacucaaguua

SEQ ID NO: 709477 - RNA, 19 nt, Artificial Sequence
  Description of Artificial Sequence: Synthetic oligonucleotide
ugagacuggaaccauaugu

SEQ ID NO: 709478 - RNA, 19 nt, Artificial Sequence
  Description of Artificial Sequence: Synthetic oligonucleotide
ucuaagagauuucuucuag

SEQ ID NO: 709479 - RNA, 19 nt, Artificial Sequence
  Description of Artificial Sequence: Synthetic oligonucleotide
auaaucaguagagcaaucc

SEQ ID NO: 709480 - RNA, 19 nt, Artificial Sequence
  Description of Artificial Sequence: Synthetic oligonucleotide
agauaacucagacucuccc

SEQ ID NO: 709481 - RNA, 19 nt, Artificial Sequence
  Description of Artificial Sequence: Synthetic oligonucleotide
ucuauggccaugcaacagg

SEQ ID NO: 709482 - RNA, 19 nt, Artificial Sequence
  Description of Artificial Sequence: Synthetic oligonucleotide
aaugacaauagacggugug

SEQ ID NO: 709483 - RNA, 19 nt, Artificial Sequence
  Description of Artificial Sequence: Synthetic oligonucleotide
ucagcgauuguaaagugca

SEQ ID NO: 709484 - RNA, 19 nt, Artificial Sequence
  Description of Artificial Sequence: Synthetic oligonucleotide
gauuguaaagugcauggug

SEQ ID NO: 709485 - RNA, 19 nt, Artificial Sequence
  Description of Artificial Sequence: Synthetic oligonucleotide
uacauagcaaugauagcag

SEQ ID NO: 709486 - RNA, 19 nt, Artificial Sequence
  Description of Artificial Sequence: Synthetic oligonucleotide
auuguaaagugcauggugg

SEQ ID NO: 709487 - RNA, 19 nt, Artificial Sequence
  Description of Artificial Sequence: Synthetic oligonucleotide
aagaacaucccaaacacca

SEQ ID NO: 709488 - RNA, 19 nt, Artificial Sequence
  Description of Artificial Sequence: Synthetic oligonucleotide
aaaauggauggccuguugu

SEQ ID NO: 709489 - RNA, 19 nt, Artificial Sequence
  Description of Artificial Sequence: Synthetic oligonucleotide
ugaaugacaauagacggug

SEQ ID NO: 709490 - RNA, 19 nt, Artificial Sequence
  Description of Artificial Sequence: Synthetic oligonucleotide
aaguacgucauaugggaug

SEQ ID NO: 709491 - RNA, 19 nt, Artificial Sequence
  Description of Artificial Sequence: Synthetic oligonucleotide
ucaaguuacuugaagccug

SEQ ID NO: 709492 - RNA, 19 nt, Artificial Sequence
  Description of Artificial Sequence: Synthetic oligonucleotide
agguacauagcaaugauag

SEQ ID NO: 709493 - RNA, 19 nt, Artificial Sequence
  Description of Artificial Sequence: Synthetic oligonucleotide
aaauuuuccgggaaagaag

SEQ ID NO: 709494 - RNA, 19 nt, Artificial Sequence
  Description of Artificial Sequence: Synthetic oligonucleotide
cuugaagcaagcccgaaag

SEQ ID NO: 709495 - RNA, 19 nt, Artificial Sequence
  Description of Artificial Sequence: Synthetic oligonucleotide
gaaggaguaauagagccag

SEQ ID NO: 709496 - RNA, 19 nt, Artificial Sequence
  Description of Artificial Sequence: Synthetic oligonucleotide
ugcgucaagguacauagca

SEQ ID NO: 709497 - RNA, 19 nt, Artificial Sequence
  Description of Artificial Sequence: Synthetic oligonucleotide
uagacgguguggaagagcc

SEQ ID NO: 709498 - RNA, 19 nt, Artificial Sequence
  Description of Artificial Sequence: Synthetic oligonucleotide
uggucuauggccaugcaac

SEQ ID NO: 709499 - RNA, 19 nt, Artificial Sequence
  Description of Artificial Sequence: Synthetic oligonucleotide
gacguggaaaaucugauga

SEQ ID NO: 709500 - RNA, 19 nt, Artificial Sequence
  Description of Artificial Sequence: Synthetic oligonucleotide
aguaauagagccaggggac

SEQ ID NO: 709501 - RNA, 19 nt, Artificial Sequence
  Description of Artificial Sequence: Synthetic oligonucleotide
guuacuugaagccuggaca

SEQ ID NO: 709502 - RNA, 19 nt, Artificial Sequence
  Description of Artificial Sequence: Synthetic oligonucleotide
auaauuguuucugaaaagu

SEQ ID NO: 709503 - RNA, 19 nt, Artificial Sequence
  Description of Artificial Sequence: Synthetic oligonucleotide
agaaauacccaggacacag

SEQ ID NO: 709504 - RNA, 19 nt, Artificial Sequence
  Description of Artificial Sequence: Synthetic oligonucleotide
cuuguauacgaacuccucc

SEQ ID NO: 709505 - RNA, 19 nt, Artificial Sequence
  Description of Artificial Sequence: Synthetic oligonucleotide
ugguacucaauucucuaag

SEQ ID NO: 709506 - RNA, 19 nt, Artificial Sequence
  Description of Artificial Sequence: Synthetic oligonucleotide
cuuacuucagcaaagaagu

SEQ ID NO: 709507 - RNA, 19 nt, Artificial Sequence
  Description of Artificial Sequence: Synthetic oligonucleotide
aagguuggggucucucagc

SEQ ID NO: 709508 - RNA, 19 nt, Artificial Sequence
  Description of Artificial Sequence: Synthetic oligonucleotide
auggccaugcaacagguag

SEQ ID NO: 709509 - RNA, 19 nt, Artificial Sequence
  Description of Artificial Sequence: Synthetic oligonucleotide
aaguccgagagacuuucuc

SEQ ID NO: 709510 - RNA, 19 nt, Artificial Sequence
  Description of Artificial Sequence: Synthetic oligonucleotide
uuguauacgaacuccucca

SEQ ID NO: 709511 - RNA, 19 nt, Artificial Sequence
  Description of Artificial Sequence: Synthetic oligonucleotide
acauacuuccaugauuagc

SEQ ID NO: 709512 - RNA, 19 nt, Artificial Sequence
  Description of Artificial Sequence: Synthetic oligonucleotide
guacauagcaaugauagca

SEQ ID NO: 709513 - RNA, 19 nt, Artificial Sequence
  Description of Artificial Sequence: Synthetic oligonucleotide
uauuaaauaucuuccccau

SEQ ID NO: 709514 - RNA, 19 nt, Artificial Sequence
  Description of Artificial Sequence: Synthetic oligonucleotide
uggcaaaucgaucccacug

SEQ ID NO: 709515 - RNA, 19 nt, Artificial Sequence
  Description of Artificial Sequence: Synthetic oligonucleotide
uuaggaguggcaaaucgau

SEQ ID NO: 709516 - RNA, 19 nt, Artificial Sequence
  Description of Artificial Sequence: Synthetic oligonucleotide
caaggcguagcuuuguuug

SEQ ID NO: 709517 - RNA, 19 nt, Artificial Sequence
  Description of Artificial Sequence: Synthetic oligonucleotide
ucauaugggaugacucucc

SEQ ID NO: 709518 - RNA, 19 nt, Artificial Sequence
  Description of Artificial Sequence: Synthetic oligonucleotide
aaucaguagagcaaucccu

SEQ ID NO: 709519 - RNA, 19 nt, Artificial Sequence
  Description of Artificial Sequence: Synthetic oligonucleotide
cucuguuacuagaaggagc

SEQ ID NO: 709520 - RNA, 19 nt, Artificial Sequence
  Description of Artificial Sequence: Synthetic oligonucleotide
uacuuccaugauuagccgg

SEQ ID NO: 709521 - RNA, 19 nt, Artificial Sequence
  Description of Artificial Sequence: Synthetic oligonucleotide
uguccuagaaagacgggac

SEQ ID NO: 709522 - RNA, 19 nt, Artificial Sequence
  Description of Artificial Sequence: Synthetic oligonucleotide
gauuagccgggcuacauca

SEQ ID NO: 709523 - RNA, 19 nt, Artificial Sequence
  Description of Artificial Sequence: Synthetic oligonucleotide
aaaggcuauccuugaagga

SEQ ID NO: 709524 - RNA, 19 nt, Artificial Sequence
  Description of Artificial Sequence: Synthetic oligonucleotide
aaggggagguuuauugccc

SEQ ID NO: 709525 - RNA, 19 nt, Artificial Sequence
  Description of Artificial Sequence: Synthetic oligonucleotide
ucaagguacauagcaauga

SEQ ID NO: 709526 - RNA, 19 nt, Artificial Sequence
  Description of Artificial Sequence: Synthetic oligonucleotide
acaauagacgguguggaag

SEQ ID NO: 709527 - RNA, 19 nt, Artificial Sequence
  Description of Artificial Sequence: Synthetic oligonucleotide
aggaaugcgagcagcauac

SEQ ID NO: 709528 - RNA, 19 nt, Artificial Sequence
  Description of Artificial Sequence: Synthetic oligonucleotide
aggaguaauagagccaggg

SEQ ID NO: 709529 - RNA, 19 nt, Artificial Sequence
  Description of Artificial Sequence: Synthetic oligonucleotide
ucaauucucuaagagauuu

SEQ ID NO: 709530 - RNA, 19 nt, Artificial Sequence
  Description of Artificial Sequence: Synthetic oligonucleotide
augacaauagacggugugg

SEQ ID NO: 709531 - RNA, 19 nt, Artificial Sequence
  Description of Artificial Sequence: Synthetic oligonucleotide
uacaucaaggcguagcuuu

SEQ ID NO: 709532 - RNA, 19 nt, Artificial Sequence
  Description of Artificial Sequence: Synthetic oligonucleotide
uuuccgggaaagaagcgcu

SEQ ID NO: 709533 - RNA, 19 nt, Artificial Sequence
  Description of Artificial Sequence: Synthetic oligonucleotide
caagccaagucccaggaac

SEQ ID NO: 709534 - RNA, 19 nt, Artificial Sequence
  Description of Artificial Sequence: Synthetic oligonucleotide
uucucugaaugacaauaga

SEQ ID NO: 709535 - RNA, 19 nt, Artificial Sequence
  Description of Artificial Sequence: Synthetic oligonucleotide
cucaauacccugcagcuuc

SEQ ID NO: 709536 - RNA, 19 nt, Artificial Sequence
  Description of Artificial Sequence: Synthetic oligonucleotide
auacuuccaugauuagccg

SEQ ID NO: 709537 - RNA, 19 nt, Artificial Sequence
  Description of Artificial Sequence: Synthetic oligonucleotide
auacaggccagcuccagug

SEQ ID NO: 709538 - RNA, 19 nt, Artificial Sequence
  Description of Artificial Sequence: Synthetic oligonucleotide
auagucuuugcgucaaggu

SEQ ID NO: 709539 - RNA, 19 nt, Artificial Sequence
  Description of Artificial Sequence: Synthetic oligonucleotide
uagaaagacgggacuaggu

SEQ ID NO: 709540 - RNA, 19 nt, Artificial Sequence
  Description of Artificial Sequence: Synthetic oligonucleotide
uuuauugcccaguggcugu

SEQ ID NO: 709541 - RNA, 19 nt, Artificial Sequence
  Description of Artificial Sequence: Synthetic oligonucleotide
guaagggaggaauauuuuc

SEQ ID NO: 709542 - RNA, 19 nt, Artificial Sequence
  Description of Artificial Sequence: Synthetic oligonucleotide
acacagacgauggagaggu

SEQ ID NO: 709543 - RNA, 19 nt, Artificial Sequence
  Description of Artificial Sequence: Synthetic oligonucleotide
caaguuacuugaagccugg

SEQ ID NO: 709544 - RNA, 19 nt, Artificial Sequence
  Description of Artificial Sequence: Synthetic oligonucleotide
gagguuuauugcccagugg

SEQ ID NO: 709545 - RNA, 19 nt, Artificial Sequence
  Description of Artificial Sequence: Synthetic oligonucleotide
ugacaauagacggugugga

SEQ ID NO: 709546 - RNA, 19 nt, Artificial Sequence
  Description of Artificial Sequence: Synthetic oligonucleotide
auggucaagauucccagaa

SEQ ID NO: 709547 - RNA, 19 nt, Artificial Sequence
  Description of Artificial Sequence: Synthetic oligonucleotide
agccgggcuacaucaaggc

SEQ ID NO: 709548 - RNA, 19 nt, Artificial Sequence
  Description of Artificial Sequence: Synthetic oligonucleotide
accucaauacccugcagcu

SEQ ID NO: 709549 - RNA, 19 nt, Artificial Sequence
  Description of Artificial Sequence: Synthetic oligonucleotide
acucaagccaagucccagg

SEQ ID NO: 709550 - RNA, 19 nt, Artificial Sequence
  Description of Artificial Sequence: Synthetic oligonucleotide
ucucuguuacuagaaggag

SEQ ID NO: 709551 - RNA, 19 nt, Artificial Sequence
  Description of Artificial Sequence: Synthetic oligonucleotide
uaaagugcaugguggguac

SEQ ID NO: 709552 - RNA, 19 nt, Artificial Sequence
  Description of Artificial Sequence: Synthetic oligonucleotide
caaugauggcagaaauacc

SEQ ID NO: 709553 - RNA, 19 nt, Artificial Sequence
  Description of Artificial Sequence: Synthetic oligonucleotide
uuguccuagaaagacggga

SEQ ID NO: 709554 - RNA, 19 nt, Artificial Sequence
  Description of Artificial Sequence: Synthetic oligonucleotide
uccaacguccuucccagac

SEQ ID NO: 709555 - RNA, 19 nt, Artificial Sequence
  Description of Artificial Sequence: Synthetic oligonucleotide
aguccgagagacuuucucu

SEQ ID NO: 709556 - RNA, 19 nt, Artificial Sequence
  Description of Artificial Sequence: Synthetic oligonucleotide
agagcaaucccugaauagu

SEQ ID NO: 709557 - RNA, 19 nt, Artificial Sequence
  Description of Artificial Sequence: Synthetic oligonucleotide
ggaaguacgucauauggga

SEQ ID NO: 709558 - RNA, 19 nt, Artificial Sequence
  Description of Artificial Sequence: Synthetic oligonucleotide
ggaguaauagagccagggg

SEQ ID NO: 709559 - RNA, 19 nt, Artificial Sequence
  Description of Artificial Sequence: Synthetic oligonucleotide
uggacauacuuccaugauu

SEQ ID NO: 709560 - RNA, 19 nt, Artificial Sequence
  Description of Artificial Sequence: Synthetic oligonucleotide
acaccacucaagccaaguc

SEQ ID NO: 709561 - RNA, 19 nt, Artificial Sequence
  Description of Artificial Sequence: Synthetic oligonucleotide
gaaagacgggacuagguua

SEQ ID NO: 709562 - RNA, 19 nt, Artificial Sequence
  Description of Artificial Sequence: Synthetic oligonucleotide
uccaugauuagccgggcua

SEQ ID NO: 709563 - RNA, 19 nt, Artificial Sequence
  Description of Artificial Sequence: Synthetic oligonucleotide
guagaaggaguaauagagc

SEQ ID NO: 709564 - RNA, 19 nt, Artificial Sequence
  Description of Artificial Sequence: Synthetic oligonucleotide
auagacgguguggaagagc

SEQ ID NO: 709565 - RNA, 19 nt, Artificial Sequence
  Description of Artificial Sequence: Synthetic oligonucleotide
acagacgauggagagguag

SEQ ID NO: 709566 - RNA, 19 nt, Artificial Sequence
  Description of Artificial Sequence: Synthetic oligonucleotide
uagaccguagcggaauucc

SEQ ID NO: 709567 - RNA, 19 nt, Artificial Sequence
  Description of Artificial Sequence: Synthetic oligonucleotide
aagggagucgucgguacag

SEQ ID NO: 709568 - RNA, 19 nt, Artificial Sequence
  Description of Artificial Sequence: Synthetic oligonucleotide
uguuugccggugcuuagga

SEQ ID NO: 709569 - RNA, 19 nt, Artificial Sequence
  Description of Artificial Sequence: Synthetic oligonucleotide
aggcuauccuugaaggacc

SEQ ID NO: 709570 - RNA, 19 nt, Artificial Sequence
  Description of Artificial Sequence: Synthetic oligonucleotide
aaucucaacaugagcuuca

SEQ ID NO: 709571 - RNA, 19 nt, Artificial Sequence
  Description of Artificial Sequence: Synthetic oligonucleotide
cuagaaggagccccauugc

SEQ ID NO: 709572 - RNA, 19 nt, Artificial Sequence
  Description of Artificial Sequence: Synthetic oligonucleotide
cagagaagggagucgucgg

SEQ ID NO: 709573 - RNA, 19 nt, Artificial Sequence
  Description of Artificial Sequence: Synthetic oligonucleotide
uggcugguaccucaauacc

SEQ ID NO: 709574 - RNA, 19 nt, Artificial Sequence
  Description of Artificial Sequence: Synthetic oligonucleotide
cagaaagaacaucccaaac

SEQ ID NO: 709575 - RNA, 19 nt, Artificial Sequence
  Description of Artificial Sequence: Synthetic oligonucleotide
gagucgucgguacagccac

SEQ ID NO: 709576 - RNA, 19 nt, Artificial Sequence
  Description of Artificial Sequence: Synthetic oligonucleotide
cuagaaagacgggacuagg

SEQ ID NO: 709577 - RNA, 19 nt, Artificial Sequence
  Description of Artificial Sequence: Synthetic oligonucleotide
aaagacgggacuagguuau

SEQ ID NO: 709578 - RNA, 19 nt, Artificial Sequence
  Description of Artificial Sequence: Synthetic oligonucleotide
agguagaugagccguggcu

SEQ ID NO: 709579 - RNA, 19 nt, Artificial Sequence
  Description of Artificial Sequence: Synthetic oligonucleotide
aguacgucauaugggauga

SEQ ID NO: 709580 - RNA, 19 nt, Artificial Sequence
  Description of Artificial Sequence: Synthetic oligonucleotide
caauagacgguguggaaga

SEQ ID NO: 709581 - RNA, 19 nt, Artificial Sequence
  Description of Artificial Sequence: Synthetic oligonucleotide
aucaguagagcaaucccug

SEQ ID NO: 709582 - RNA, 19 nt, Artificial Sequence
  Description of Artificial Sequence: Synthetic oligonucleotide
uguauacgaacuccuccau

SEQ ID NO: 709583 - RNA, 19 nt, Artificial Sequence
  Description of Artificial Sequence: Synthetic oligonucleotide
caaaucgaucccacugagc

SEQ ID NO: 709584 - RNA, 19 nt, Artificial Sequence
  Description of Artificial Sequence: Synthetic oligonucleotide
gacauacuuccaugauuag

SEQ ID NO: 709585 - RNA, 19 nt, Artificial Sequence
  Description of Artificial Sequence: Synthetic oligonucleotide
cuuaggaguggcaaaucga

SEQ ID NO: 709586 - RNA, 19 nt, Artificial Sequence
  Description of Artificial Sequence: Synthetic oligonucleotide
gaugagccguggcuguggg

SEQ ID NO: 709587 - RNA, 19 nt, Artificial Sequence
  Description of Artificial Sequence: Synthetic oligonucleotide
ucaguagagcaaucccuga

SEQ ID NO: 709588 - RNA, 19 nt, Artificial Sequence
  Description of Artificial Sequence: Synthetic oligonucleotide
aaguaaggaugggguaagg

SEQ ID NO: 709589 - RNA, 19 nt, Artificial Sequence
  Description of Artificial Sequence: Synthetic oligonucleotide
uguaaagugcauggugggu

SEQ ID NO: 709590 - RNA, 19 nt, Artificial Sequence
  Description of Artificial Sequence: Synthetic oligonucleotide
ugauuagccgggcuacauc

SEQ ID NO: 709591 - RNA, 19 nt, Artificial Sequence
  Description of Artificial Sequence: Synthetic oligonucleotide
auagcaaugauagcagguu

SEQ ID NO: 709592 - RNA, 19 nt, Artificial Sequence
  Description of Artificial Sequence: Synthetic oligonucleotide
uuguuugccggugcuuagg

SEQ ID NO: 709593 - RNA, 19 nt, Artificial Sequence
  Description of Artificial Sequence: Synthetic oligonucleotide
cuuugugggaagacaucug

SEQ ID NO: 709594 - RNA, 19 nt, Artificial Sequence
  Description of Artificial Sequence: Synthetic oligonucleotide
gauaacucagacucucccu

SEQ ID NO: 709595 - RNA, 19 nt, Artificial Sequence
  Description of Artificial Sequence: Synthetic oligonucleotide
auggccuguugucagccag

SEQ ID NO: 709596 - RNA, 19 nt, Artificial Sequence
  Description of Artificial Sequence: Synthetic oligonucleotide
uucaaaggcuauccuugaa

SEQ ID NO: 709597 - RNA, 19 nt, Artificial Sequence
  Description of Artificial Sequence: Synthetic oligonucleotide
augucaaauuuuccgggaa

SEQ ID NO: 709598 - RNA, 19 nt, Artificial Sequence
  Description of Artificial Sequence: Synthetic oligonucleotide
uagcaaugauagcagguuu

SEQ ID NO: 709599 - RNA, 19 nt, Artificial Sequence
  Description of Artificial Sequence: Synthetic oligonucleotide
acauuacucugccaaggaa

SEQ ID NO: 709600 - RNA, 19 nt, Artificial Sequence
  Description of Artificial Sequence: Synthetic oligonucleotide
guggguacaacaccacuca

SEQ ID NO: 709601 - RNA, 19 nt, Artificial Sequence
  Description of Artificial Sequence: Synthetic oligonucleotide
acacuccugcucuuguuug

SEQ ID NO: 709602 - RNA, 19 nt, Artificial Sequence
  Description of Artificial Sequence: Synthetic oligonucleotide
aagcgcucaggaaugcgag

SEQ ID NO: 709603 - RNA, 19 nt, Artificial Sequence
  Description of Artificial Sequence: Synthetic oligonucleotide
ucaauacccugcagcuuca

SEQ ID NO: 709604 - RNA, 19 nt, Artificial Sequence
  Description of Artificial Sequence: Synthetic oligonucleotide
gaagcgucaguacccgcac

SEQ ID NO: 709605 - RNA, 19 nt, Artificial Sequence
  Description of Artificial Sequence: Synthetic oligonucleotide
acgggacuagguuauaauu

SEQ ID NO: 709606 - RNA, 19 nt, Artificial Sequence
  Description of Artificial Sequence: Synthetic oligonucleotide
auaauagucuuugcgucaa

SEQ ID NO: 709607 - RNA, 19 nt, Artificial Sequence
  Description of Artificial Sequence: Synthetic oligonucleotide
aaagcccucagcgauugua

SEQ ID NO: 709608 - RNA, 19 nt, Artificial Sequence
  Description of Artificial Sequence: Synthetic oligonucleotide
acugguacucaauucucua

SEQ ID NO: 709609 - RNA, 19 nt, Artificial Sequence
  Description of Artificial Sequence: Synthetic oligonucleotide
gacuuucucugaaugacaa

SEQ ID NO: 709610 - RNA, 19 nt, Artificial Sequence
  Description of Artificial Sequence: Synthetic oligonucleotide
uggccaugcaacagguagu

SEQ ID NO: 709611 - RNA, 19 nt, Artificial Sequence
  Description of Artificial Sequence: Synthetic oligonucleotide
uccgagagacuuucucuga

SEQ ID NO: 709612 - RNA, 19 nt, Artificial Sequence
  Description of Artificial Sequence: Synthetic oligonucleotide
auuuuccgggaaagaagcg

SEQ ID NO: 709613 - RNA, 19 nt, Artificial Sequence
  Description of Artificial Sequence: Synthetic oligonucleotide
caauucucuaagagauuuc

SEQ ID NO: 709614 - RNA, 19 nt, Artificial Sequence
  Description of Artificial Sequence: Synthetic oligonucleotide
auuacucugccaaggaaaa

SEQ ID NO: 709615 - RNA, 19 nt, Artificial Sequence
  Description of Artificial Sequence: Synthetic oligonucleotide
caggacguggaaaaucuga

SEQ ID NO: 709616 - RNA, 19 nt, Artificial Sequence
  Description of Artificial Sequence: Synthetic oligonucleotide
uaggaguggcaaaucgauc

SEQ ID NO: 709617 - RNA, 19 nt, Artificial Sequence
  Description of Artificial Sequence: Synthetic oligonucleotide
gguacauagcaaugauagc

SEQ ID NO: 709618 - RNA, 19 nt, Artificial Sequence
  Description of Artificial Sequence: Synthetic oligonucleotide
cacugcacccagaaagaac

SEQ ID NO: 709619 - RNA, 19 nt, Artificial Sequence
  Description of Artificial Sequence: Synthetic oligonucleotide
aggaagcgucaguacccgc

SEQ ID NO: 709620 - RNA, 19 nt, Artificial Sequence
  Description of Artificial Sequence: Synthetic oligonucleotide
gcagaaauacccaggacac

SEQ ID NO: 709621 - RNA, 19 nt, Artificial Sequence
  Description of Artificial Sequence: Synthetic oligonucleotide
accaggacguggaaaaucu

SEQ ID NO: 709622 - RNA, 19 nt, Artificial Sequence
  Description of Artificial Sequence: Synthetic oligonucleotide
gagguagaugagccguggc

SEQ ID NO: 709623 - RNA, 19 nt, Artificial Sequence
  Description of Artificial Sequence: Synthetic oligonucleotide
ggaaccauaugucaaauuu

SEQ ID NO: 709624 - RNA, 19 nt, Artificial Sequence
  Description of Artificial Sequence: Synthetic oligonucleotide
uccuagaaagacgggacua

SEQ ID NO: 709625 - RNA, 19 nt, Artificial Sequence
  Description of Artificial Sequence: Synthetic oligonucleotide
aaggaguaauagagccagg

SEQ ID NO: 709626 - RNA, 19 nt, Artificial Sequence
  Description of Artificial Sequence: Synthetic oligonucleotide
ggagguuuauugcccagug

SEQ ID NO: 709627 - RNA, 19 nt, Artificial Sequence
  Description of Artificial Sequence: Synthetic oligonucleotide
guauacgaacuccuccauc

SEQ ID NO: 709628 - RNA, 19 nt, Artificial Sequence
  Description of Artificial Sequence: Synthetic oligonucleotide
uccccauaaucaguagagc

SEQ ID NO: 709629 - RNA, 19 nt, Artificial Sequence
  Description of Artificial Sequence: Synthetic oligonucleotide
uuccaugauuagccgggcu

SEQ ID NO: 709630 - RNA, 19 nt, Artificial Sequence
  Description of Artificial Sequence: Synthetic oligonucleotide
uaauagagccaggggacaa

SEQ ID NO: 709631 - RNA, 19 nt, Artificial Sequence
  Description of Artificial Sequence: Synthetic oligonucleotide
augagacuggaaccauaug

SEQ ID NO: 709632 - RNA, 19 nt, Artificial Sequence
  Description of Artificial Sequence: Synthetic oligonucleotide
ccugaauaguccaguuugg

SEQ ID NO: 709633 - RNA, 19 nt, Artificial Sequence
  Description of Artificial Sequence: Synthetic oligonucleotide
cauagcaaugauagcaggu

SEQ ID NO: 709634 - RNA, 19 nt, Artificial Sequence
  Description of Artificial Sequence: Synthetic oligonucleotide
uagcggaauuccugaaggu

SEQ ID NO: 709635 - RNA, 19 nt, Artificial Sequence
  Description of Artificial Sequence: Synthetic oligonucleotide
uucuagaccguagcggaau

SEQ ID NO: 709636 - RNA, 19 nt, Artificial Sequence
  Description of Artificial Sequence: Synthetic oligonucleotide
caucccgcggcgcuagagg

SEQ ID NO: 709637 - RNA, 19 nt, Artificial Sequence
  Description of Artificial Sequence: Synthetic oligonucleotide
agcuccagugauguacauc

SEQ ID NO: 709638 - RNA, 19 nt, Artificial Sequence
  Description of Artificial Sequence: Synthetic oligonucleotide
gucauaugggaugacucuc

SEQ ID NO: 709639 - RNA, 19 nt, Artificial Sequence
  Description of Artificial Sequence: Synthetic oligonucleotide
guaaagugcauggugggua

SEQ ID NO: 709640 - RNA, 19 nt, Artificial Sequence
  Description of Artificial Sequence: Synthetic oligonucleotide
aggggagccaugaaguaca

SEQ ID NO: 709641 - RNA, 19 nt, Artificial Sequence
  Description of Artificial Sequence: Synthetic oligonucleotide
gacaauagacgguguggaa

SEQ ID NO: 709642 - RNA, 19 nt, Artificial Sequence
  Description of Artificial Sequence: Synthetic oligonucleotide
gguacucaauucucuaaga

SEQ ID NO: 709643 - RNA, 19 nt, Artificial Sequence
  Description of Artificial Sequence: Synthetic oligonucleotide
ggacauacuuccaugauua

SEQ ID NO: 709644 - RNA, 19 nt, Artificial Sequence
  Description of Artificial Sequence: Synthetic oligonucleotide
ugaagcugacugguacuca

SEQ ID NO: 709645 - RNA, 19 nt, Artificial Sequence
  Description of Artificial Sequence: Synthetic oligonucleotide
gucuauggccaugcaacag

SEQ ID NO: 709646 - RNA, 19 nt, Artificial Sequence
  Description of Artificial Sequence: Synthetic oligonucleotide
guuugccggugcuuaggag

SEQ ID NO: 709647 - RNA, 19 nt, Artificial Sequence
  Description of Artificial Sequence: Synthetic oligonucleotide
ggaugacucuccaacgucc

SEQ ID NO: 709648 - RNA, 19 nt, Artificial Sequence
  Description of Artificial Sequence: Synthetic oligonucleotide
ucaagccaagucccaggaa

SEQ ID NO: 709649 - RNA, 19 nt, Artificial Sequence
  Description of Artificial Sequence: Synthetic oligonucleotide
uggauggccuguugucagc

SEQ ID NO: 709650 - RNA, 19 nt, Artificial Sequence
  Description of Artificial Sequence: Synthetic oligonucleotide
agggagucgucgguacagc

SEQ ID NO: 709651 - RNA, 19 nt, Artificial Sequence
  Description of Artificial Sequence: Synthetic oligonucleotide
caacagguagucauugucu

SEQ ID NO: 709652 - RNA, 19 nt, Artificial Sequence
  Description of Artificial Sequence: Synthetic oligonucleotide
ggcaaaucgaucccacuga

SEQ ID NO: 709653 - RNA, 19 nt, Artificial Sequence
  Description of Artificial Sequence: Synthetic oligonucleotide
ucuagaccguagcggaauu

SEQ ID NO: 709654 - RNA, 19 nt, Artificial Sequence
  Description of Artificial Sequence: Synthetic oligonucleotide
gguaccucaauacccugca

SEQ ID NO: 709655 - RNA, 19 nt, Artificial Sequence
  Description of Artificial Sequence: Synthetic oligonucleotide
aggggagguuuauugccca

SEQ ID NO: 709656 - RNA, 19 nt, Artificial Sequence
  Description of Artificial Sequence: Synthetic oligonucleotide
uggguacaacaccacucaa

SEQ ID NO: 709657 - RNA, 19 nt, Artificial Sequence
  Description of Artificial Sequence: Synthetic oligonucleotide
ggacguggaaaaucugaug

SEQ ID NO: 709658 - RNA, 19 nt, Artificial Sequence
  Description of Artificial Sequence: Synthetic oligonucleotide
uccacccuugggugggaag

SEQ ID NO: 709659 - RNA, 19 nt, Artificial Sequence
  Description of Artificial Sequence: Synthetic oligonucleotide
uauuuggucugagcauggu

SEQ ID NO: 709660 - RNA, 19 nt, Artificial Sequence
  Description of Artificial Sequence: Synthetic oligonucleotide
aggcguagcuuuguuuguc

SEQ ID NO: 709661 - RNA, 19 nt, Artificial Sequence
  Description of Artificial Sequence: Synthetic oligonucleotide
cugaaugacaauagacggu

SEQ ID NO: 709662 - RNA, 19 nt, Artificial Sequence
  Description of Artificial Sequence: Synthetic oligonucleotide
ggcugguaccucaauaccc

SEQ ID NO: 709663 - RNA, 19 nt, Artificial Sequence
  Description of Artificial Sequence: Synthetic oligonucleotide
cucuaagagauuucuucua

SEQ ID NO: 709664 - RNA, 19 nt, Artificial Sequence
  Description of Artificial Sequence: Synthetic oligonucleotide
auaugggaugacucuccaa

SEQ ID NO: 709665 - RNA, 19 nt, Artificial Sequence
  Description of Artificial Sequence: Synthetic oligonucleotide
agacaucuggcugguaccu

SEQ ID NO: 709666 - RNA, 19 nt, Artificial Sequence
  Description of Artificial Sequence: Synthetic oligonucleotide
cagacgauggagagguaga

SEQ ID NO: 709667 - RNA, 19 nt, Artificial Sequence
  Description of Artificial Sequence: Synthetic oligonucleotide
gagagguagaugagccgug

SEQ ID NO: 709668 - RNA, 19 nt, Artificial Sequence
  Description of Artificial Sequence: Synthetic oligonucleotide
ggcgcuacaucccgcggcg

SEQ ID NO: 709669 - RNA, 19 nt, Artificial Sequence
  Description of Artificial Sequence: Synthetic oligonucleotide
guaccucaauacccugcag

SEQ ID NO: 709670 - RNA, 19 nt, Artificial Sequence
  Description of Artificial Sequence: Synthetic oligonucleotide
uacuagaaggagccccauu

SEQ ID NO: 709671 - RNA, 19 nt, Artificial Sequence
  Description of Artificial Sequence: Synthetic oligonucleotide
guaauagagccaggggaca

SEQ ID NO: 709672 - RNA, 19 nt, Artificial Sequence
  Description of Artificial Sequence: Synthetic oligonucleotide
cugguacucaauucucuaa

SEQ ID NO: 709673 - RNA, 19 nt, Artificial Sequence
  Description of Artificial Sequence: Synthetic oligonucleotide
guggaugcggaagaugcuc

SEQ ID NO: 709674 - RNA, 19 nt, Artificial Sequence
  Description of Artificial Sequence: Synthetic oligonucleotide
aucccgcggcgcuagaggu

SEQ ID NO: 709675 - RNA, 19 nt, Artificial Sequence
  Description of Artificial Sequence: Synthetic oligonucleotide
ggcguagcuuuguuugucc

SEQ ID NO: 709676 - RNA, 19 nt, Artificial Sequence
  Description of Artificial Sequence: Synthetic oligonucleotide
cacucaagccaagucccag

SEQ ID NO: 709677 - RNA, 19 nt, Artificial Sequence
  Description of Artificial Sequence: Synthetic oligonucleotide
gaccaggaguccucgcuga

SEQ ID NO: 709678 - RNA, 19 nt, Artificial Sequence
  Description of Artificial Sequence: Synthetic oligonucleotide
aggacguggaaaaucugau

SEQ ID NO: 709679 - RNA, 19 nt, Artificial Sequence
  Description of Artificial Sequence: Synthetic oligonucleotide
gguggguacaacaccacuc

SEQ ID NO: 709680 - RNA, 19 nt, Artificial Sequence
  Description of Artificial Sequence: Synthetic oligonucleotide
gccagguuacaaaguaagg

SEQ ID NO: 709681 - RNA, 19 nt, Artificial Sequence
  Description of Artificial Sequence: Synthetic oligonucleotide
gggacuagguuauaauugu

SEQ ID NO: 709682 - RNA, 19 nt, Artificial Sequence
  Description of Artificial Sequence: Synthetic oligonucleotide
cuuccaugauuagccgggc

SEQ ID NO: 709683 - RNA, 19 nt, Artificial Sequence
  Description of Artificial Sequence: Synthetic oligonucleotide
cccucuuacuucagcaaag

SEQ ID NO: 709684 - RNA, 19 nt, Artificial Sequence
  Description of Artificial Sequence: Synthetic oligonucleotide
guggucuauggccaugcaa

SEQ ID NO: 709685 - RNA, 19 nt, Artificial Sequence
  Description of Artificial Sequence: Synthetic oligonucleotide
aucaaggcguagcuuuguu

SEQ ID NO: 709686 - RNA, 19 nt, Artificial Sequence
  Description of Artificial Sequence: Synthetic oligonucleotide
gcccucagcgauuguaaag

SEQ ID NO: 709687 - RNA, 19 nt, Artificial Sequence
  Description of Artificial Sequence: Synthetic oligonucleotide
uggucugagcauggucaag

SEQ ID NO: 709688 - RNA, 19 nt, Artificial Sequence
  Description of Artificial Sequence: Synthetic oligonucleotide
aaaguccgagagacuuucu

SEQ ID NO: 709689 - RNA, 19 nt, Artificial Sequence
  Description of Artificial Sequence: Synthetic oligonucleotide
ccuucuagaccguagcgga

SEQ ID NO: 709690 - RNA, 19 nt, Artificial Sequence
  Description of Artificial Sequence: Synthetic oligonucleotide
uccucagcgcccugcccgc

SEQ ID NO: 709691 - RNA, 19 nt, Artificial Sequence
  Description of Artificial Sequence: Synthetic oligonucleotide
uuuccccaaaauggcugga

SEQ ID NO: 709692 - RNA, 19 nt, Artificial Sequence
  Description of Artificial Sequence: Synthetic oligonucleotide
cauugucuuucagccaguc

SEQ ID NO: 709693 - RNA, 19 nt, Artificial Sequence
  Description of Artificial Sequence: Synthetic oligonucleotide
augauuagccgggcuacau

SEQ ID NO: 709694 - RNA, 19 nt, Artificial Sequence
  Description of Artificial Sequence: Synthetic oligonucleotide
ccuagaaagacgggacuag

SEQ ID NO: 709695 - RNA, 19 nt, Artificial Sequence
  Description of Artificial Sequence: Synthetic oligonucleotide
cucaaguuacuugaagccu

SEQ ID NO: 709696 - RNA, 19 nt, Artificial Sequence
  Description of Artificial Sequence: Synthetic oligonucleotide
caccaggacguggaaaauc

SEQ ID NO: 709697 - RNA, 19 nt, Artificial Sequence
  Description of Artificial Sequence: Synthetic oligonucleotide
ggaccaggaguccucgcug

SEQ ID NO: 709698 - RNA, 19 nt, Artificial Sequence
  Description of Artificial Sequence: Synthetic oligonucleotide
ggaguccucgcugagguga

SEQ ID NO: 709699 - RNA, 19 nt, Artificial Sequence
  Description of Artificial Sequence: Synthetic oligonucleotide
gacgggacuagguuauaau

SEQ ID NO: 709700 - RNA, 19 nt, Artificial Sequence
  Description of Artificial Sequence: Synthetic oligonucleotide
gggaugacucuccaacguc

SEQ ID NO: 709701 - RNA, 19 nt, Artificial Sequence
  Description of Artificial Sequence: Synthetic oligonucleotide
ggucuauggccaugcaaca

SEQ ID NO: 709702 - RNA, 19 nt, Artificial Sequence
  Description of Artificial Sequence: Synthetic oligonucleotide
cugaagguuggagacccca

SEQ ID NO: 709703 - RNA, 19 nt, Artificial Sequence
  Description of Artificial Sequence: Synthetic oligonucleotide
cuagaccguagcggaauuc

SEQ ID NO: 709704 - RNA, 19 nt, Artificial Sequence
  Description of Artificial Sequence: Synthetic oligonucleotide
gggagucgucgguacagcc

SEQ ID NO: 709705 - RNA, 19 nt, Artificial Sequence
  Description of Artificial Sequence: Synthetic oligonucleotide
gccgggcuacaucaaggcg

SEQ ID NO: 709706 - RNA, 19 nt, Artificial Sequence
  Description of Artificial Sequence: Synthetic oligonucleotide
cuauggccaugcaacaggu

SEQ ID NO: 709707 - RNA, 19 nt, Artificial Sequence
  Description of Artificial Sequence: Synthetic oligonucleotide
caacaccacucaagccaag

SEQ ID NO: 709708 - RNA, 19 nt, Artificial Sequence
  Description of Artificial Sequence: Synthetic oligonucleotide
agcccucagcgauuguaaa

SEQ ID NO: 709709 - RNA, 19 nt, Artificial Sequence
  Description of Artificial Sequence: Synthetic oligonucleotide
gaugacucuccaacguccu

SEQ ID NO: 709710 - RNA, 19 nt, Artificial Sequence
  Description of Artificial Sequence: Synthetic oligonucleotide
ggaagcgucaguacccgca

SEQ ID NO: 709711 - RNA, 19 nt, Artificial Sequence
  Description of Artificial Sequence: Synthetic oligonucleotide
ccaacguccuucccagacc

SEQ ID NO: 709712 - RNA, 19 nt, Artificial Sequence
  Description of Artificial Sequence: Synthetic oligonucleotide
ucccgcggcgcuagaggug

SEQ ID NO: 709713 - RNA, 19 nt, Artificial Sequence
  Description of Artificial Sequence: Synthetic oligonucleotide
agacgggacuagguuauaa

SEQ ID NO: 709714 - RNA, 19 nt, Artificial Sequence
  Description of Artificial Sequence: Synthetic oligonucleotide
gucuuugcgucaagguaca

SEQ ID NO: 709715 - RNA, 19 nt, Artificial Sequence
  Description of Artificial Sequence: Synthetic oligonucleotide
guccuagaaagacgggacu

SEQ ID NO: 709716 - RNA, 19 nt, Artificial Sequence
  Description of Artificial Sequence: Synthetic oligonucleotide
cuuugcgucaagguacaua

SEQ ID NO: 709717 - RNA, 19 nt, Artificial Sequence
  Description of Artificial Sequence: Synthetic oligonucleotide
agucgucgguacagccacc

SEQ ID NO: 709718 - RNA, 19 nt, Artificial Sequence
  Description of Artificial Sequence: Synthetic oligonucleotide
caacguccuucccagaccu

SEQ ID NO: 709719 - RNA, 19 nt, Artificial Sequence
  Description of Artificial Sequence: Synthetic oligonucleotide
aagcccgaaaggagggcau

SEQ ID NO: 709720 - RNA, 19 nt, Artificial Sequence
  Description of Artificial Sequence: Synthetic oligonucleotide
aggggacaaagcuccccau

SEQ ID NO: 709721 - RNA, 19 nt, Artificial Sequence
  Description of Artificial Sequence: Synthetic oligonucleotide
cuucuagaccguagcggaa

SEQ ID NO: 709722 - RNA, 19 nt, Artificial Sequence
  Description of Artificial Sequence: Synthetic oligonucleotide
agaccguagcggaauuccu

SEQ ID NO: 709723 - RNA, 19 nt, Artificial Sequence
  Description of Artificial Sequence: Synthetic oligonucleotide
ccaugauuagccgggcuac

SEQ ID NO: 709724 - RNA, 19 nt, Artificial Sequence
  Description of Artificial Sequence: Synthetic oligonucleotide
gggcgcuacaucccgcggc

SEQ ID NO: 709725 - RNA, 19 nt, Artificial Sequence
  Description of Artificial Sequence: Synthetic oligonucleotide
gaaguacgucauaugggau

SEQ ID NO: 709726 - RNA, 19 nt, Artificial Sequence
  Description of Artificial Sequence: Synthetic oligonucleotide
gucgguacagccaccuucu

SEQ ID NO: 709727 - RNA, 19 nt, Artificial Sequence
  Description of Artificial Sequence: Synthetic oligonucleotide
ccccaaaauggcuggagga

SEQ ID NO: 709728 - RNA, 19 nt, Artificial Sequence
  Description of Artificial Sequence: Synthetic oligonucleotide
ucgaucccacugagccaca

SEQ ID NO: 709729 - RNA, 19 nt, Artificial Sequence
  Description of Artificial Sequence: Synthetic oligonucleotide
caugcaacagguagucauu

SEQ ID NO: 709730 - RNA, 19 nt, Artificial Sequence
  Description of Artificial Sequence: Synthetic oligonucleotide
gccaccuucuagaccguag

SEQ ID NO: 709731 - RNA, 19 nt, Artificial Sequence
  Description of Artificial Sequence: Synthetic oligonucleotide
caugauuagccgggcuaca

SEQ ID NO: 709732 - RNA, 19 nt, Artificial Sequence
  Description of Artificial Sequence: Synthetic oligonucleotide
ggagucgucgguacagcca

SEQ ID NO: 709733 - RNA, 19 nt, Artificial Sequence
  Description of Artificial Sequence: Synthetic oligonucleotide
gccgaggggcgcccgaucc

SEQ ID NO: 709734 - RNA, 19 nt, Artificial Sequence
  Description of Artificial Sequence: Synthetic oligonucleotide
ucgguacagccaccuucua

SEQ ID NO: 709735 - RNA, 19 nt, Artificial Sequence
  Description of Artificial Sequence: Synthetic oligonucleotide
cauacaggccagcuccagu

SEQ ID NO: 709736 - RNA, 19 nt, Artificial Sequence
  Description of Artificial Sequence: Synthetic oligonucleotide
cgucgguacagccaccuuc

SEQ ID NO: 709737 - RNA, 19 nt, Artificial Sequence
  Description of Artificial Sequence: Synthetic oligonucleotide
ggaaugggugaaaucucaa

SEQ ID NO: 709738 - RNA, 19 nt, Artificial Sequence
  Description of Artificial Sequence: Synthetic oligonucleotide
ggcgcuagagguggccugc

SEQ ID NO: 709739 - RNA, 19 nt, Artificial Sequence
  Description of Artificial Sequence: Synthetic oligonucleotide
gguuuauugcccaguggcu

SEQ ID NO: 709740 - RNA, 19 nt, Artificial Sequence
  Description of Artificial Sequence: Synthetic oligonucleotide
aagacgggacuagguuaua

SEQ ID NO: 709741 - RNA, 19 nt, Artificial Sequence
  Description of Artificial Sequence: Synthetic oligonucleotide
ucgucgguacagccaccuu

SEQ ID NO: 709742 - RNA, 19 nt, Artificial Sequence
  Description of Artificial Sequence: Synthetic oligonucleotide
cccgaaaggagggcauagg

SEQ ID NO: 709743 - RNA, 19 nt, Artificial Sequence
  Description of Artificial Sequence: Synthetic oligonucleotide
ucuuugcgucaagguacau

SEQ ID NO: 709744 - RNA, 19 nt, Artificial Sequence
  Description of Artificial Sequence: Synthetic oligonucleotide
gaucccacugagccacaau

SEQ ID NO: 709745 - RNA, 19 nt, Artificial Sequence
  Description of Artificial Sequence: Synthetic oligonucleotide
ccgggcuacaucaaggcgu

SEQ ID NO: 709746 - RNA, 19 nt, Artificial Sequence
  Description of Artificial Sequence: Synthetic oligonucleotide
cugcccgcgccggaagggc

SEQ ID NO: 709747 - RNA, 19 nt, Artificial Sequence
  Description of Artificial Sequence: Synthetic oligonucleotide
guacgucauaugggaugac

SEQ ID NO: 709748 - RNA, 19 nt, Artificial Sequence
  Description of Artificial Sequence: Synthetic oligonucleotide
ccugaagguuggagacccc

SEQ ID NO: 709749 - RNA, 19 nt, Artificial Sequence
  Description of Artificial Sequence: Synthetic oligonucleotide
ccucuuacuucagcaaaga

SEQ ID NO: 709750 - RNA, 19 nt, Artificial Sequence
  Description of Artificial Sequence: Synthetic oligonucleotide
ggcuauccuugaaggacca

SEQ ID NO: 709751 - RNA, 19 nt, Artificial Sequence
  Description of Artificial Sequence: Synthetic oligonucleotide
gcgucaagguacauagcaa

SEQ ID NO: 709752 - RNA, 19 nt, Artificial Sequence
  Description of Artificial Sequence: Synthetic oligonucleotide
gucgucgguacagccaccu

SEQ ID NO: 709753 - RNA, 19 nt, Artificial Sequence
  Description of Artificial Sequence: Synthetic oligonucleotide
gcaagcccgaaaggagggc

SEQ ID NO: 709754 - RNA, 19 nt, Artificial Sequence
  Description of Artificial Sequence: Synthetic oligonucleotide
gguggucuauggccaugca

SEQ ID NO: 709755 - RNA, 19 nt, Artificial Sequence
  Description of Artificial Sequence: Synthetic oligonucleotide
aacguccuucccagaccuu

SEQ ID NO: 709756 - RNA, 19 nt, Artificial Sequence
  Description of Artificial Sequence: Synthetic oligonucleotide
ccgaaaggagggcauaggu

SEQ ID NO: 709757 - RNA, 19 nt, Artificial Sequence
  Description of Artificial Sequence: Synthetic oligonucleotide
agcccgaaaggagggcaua

SEQ ID NO: 709758 - RNA, 19 nt, Artificial Sequence
  Description of Artificial Sequence: Synthetic oligonucleotide
cgucaagguacauagcaau

SEQ ID NO: 709759 - RNA, 19 nt, Artificial Sequence
  Description of Artificial Sequence: Synthetic oligonucleotide
cggggcgcuacaucccgcg

SEQ ID NO: 709760 - RNA, 19 nt, Artificial Sequence
  Description of Artificial Sequence: Synthetic oligonucleotide
cccucagcgauuguaaagu

SEQ ID NO: 709761 - RNA, 19 nt, Artificial Sequence
  Description of Artificial Sequence: Synthetic oligonucleotide
ccgauccucagcgcccugc

SEQ ID NO: 709762 - RNA, 19 nt, Artificial Sequence
  Description of Artificial Sequence: Synthetic oligonucleotide
ccgagagacuuucucugaa

SEQ ID NO: 709763 - RNA, 19 nt, Artificial Sequence
  Description of Artificial Sequence: Synthetic oligonucleotide
gccagucaggaaguacguc

SEQ ID NO: 709764 - RNA, 19 nt, Artificial Sequence
  Description of Artificial Sequence: Synthetic oligonucleotide
ggaaugcgagcagcauaca

SEQ ID NO: 709765 - RNA, 19 nt, Artificial Sequence
  Description of Artificial Sequence: Synthetic oligonucleotide
cagcgauuguaaagugcau

SEQ ID NO: 709766 - RNA, 19 nt, Artificial Sequence
  Description of Artificial Sequence: Synthetic oligonucleotide
gggagguuuauugcccagu

SEQ ID NO: 709767 - RNA, 19 nt, Artificial Sequence
  Description of Artificial Sequence: Synthetic oligonucleotide
cgcccgauccucagcgccc

SEQ ID NO: 709768 - RNA, 19 nt, Artificial Sequence
  Description of Artificial Sequence: Synthetic oligonucleotide
gcgcuagagguggccugcg

SEQ ID NO: 709769 - RNA, 19 nt, Artificial Sequence
  Description of Artificial Sequence: Synthetic oligonucleotide
cccugcccgcgccggaagg

SEQ ID NO: 709770 - RNA, 19 nt, Artificial Sequence
  Description of Artificial Sequence: Synthetic oligonucleotide
cugcacccagaaagaacau

SEQ ID NO: 709771 - RNA, 19 nt, Artificial Sequence
  Description of Artificial Sequence: Synthetic oligonucleotide
gccaugcaacagguaguca

SEQ ID NO: 709772 - RNA, 19 nt, Artificial Sequence
  Description of Artificial Sequence: Synthetic oligonucleotide
cacagacgauggagaggua

SEQ ID NO: 709773 - RNA, 19 nt, Artificial Sequence
  Description of Artificial Sequence: Synthetic oligonucleotide
ccggggcgcuacaucccgc

SEQ ID NO: 709774 - RNA, 19 nt, Artificial Sequence
  Description of Artificial Sequence: Synthetic oligonucleotide
gcgucaguacccgcaccuc

SEQ ID NO: 709775 - RNA, 19 nt, Artificial Sequence
  Description of Artificial Sequence: Synthetic oligonucleotide
gggcuacaucaaggcguag

SEQ ID NO: 709776 - RNA, 19 nt, Artificial Sequence
  Description of Artificial Sequence: Synthetic oligonucleotide
cugcggccgaggggcgccc

SEQ ID NO: 709777 - RNA, 19 nt, Artificial Sequence
  Description of Artificial Sequence: Synthetic oligonucleotide
cgggcuacaucaaggcgua

SEQ ID NO: 709778 - RNA, 19 nt, Artificial Sequence
  Description of Artificial Sequence: Synthetic oligonucleotide
cggcgcuagagguggccug

SEQ ID NO: 709779 - RNA, 19 nt, Artificial Sequence
  Description of Artificial Sequence: Synthetic oligonucleotide
caggaacacuccugcucuu

SEQ ID NO: 709780 - RNA, 19 nt, Artificial Sequence
  Description of Artificial Sequence: Synthetic oligonucleotide
caaagcccucagcgauugu

SEQ ID NO: 709781 - RNA, 19 nt, Artificial Sequence
  Description of Artificial Sequence: Synthetic oligonucleotide
ggccgaggggcgcccgauc

SEQ ID NO: 709782 - RNA, 19 nt, Artificial Sequence
  Description of Artificial Sequence: Synthetic oligonucleotide
cggugcuuaggaguggcaa

SEQ ID NO: 709783 - RNA, 19 nt, Artificial Sequence
  Description of Artificial Sequence: Synthetic oligonucleotide
gggagccaugaaguacaua

SEQ ID NO: 709784 - RNA, 19 nt, Artificial Sequence
  Description of Artificial Sequence: Synthetic oligonucleotide
ggucccaguucagccaguu

SEQ ID NO: 709785 - RNA, 19 nt, Artificial Sequence
  Description of Artificial Sequence: Synthetic oligonucleotide
gcggcgcuagagguggccu

SEQ ID NO: 709786 - RNA, 19 nt, Artificial Sequence
  Description of Artificial Sequence: Synthetic oligonucleotide
cccgauccucagcgcccug

SEQ ID NO: 709787 - RNA, 19 nt, Artificial Sequence
  Description of Artificial Sequence: Synthetic oligonucleotide
gcggccgaggggcgcccga

SEQ ID NO: 709788 - RNA, 19 nt, Artificial Sequence
  Description of Artificial Sequence: Synthetic oligonucleotide
gcgggccggggcgcuacau

SEQ ID NO: 709789 - RNA, 19 nt, Artificial Sequence
  Description of Artificial Sequence: Synthetic oligonucleotide
cgcccugcccgcgccggaa

SEQ ID NO: 709790 - RNA, 19 nt, Artificial Sequence
  Description of Artificial Sequence: Synthetic oligonucleotide
aacacauagaaauacaggc

SEQ ID NO: 709791 - RNA, 19 nt, Artificial Sequence
  Description of Artificial Sequence: Synthetic oligonucleotide
aaguccuuaaaacagacug

SEQ ID NO: 709792 - RNA, 19 nt, Artificial Sequence
  Description of Artificial Sequence: Synthetic oligonucleotide
ucagauaugggguaaaggu

SEQ ID NO: 709793 - RNA, 19 nt, Artificial Sequence
  Description of Artificial Sequence: Synthetic oligonucleotide
agaggcguggccuauaugg

SEQ ID NO: 709794 - RNA, 19 nt, Artificial Sequence
  Description of Artificial Sequence: Synthetic oligonucleotide
auugacaacaucuccaaug

SEQ ID NO: 709795 - RNA, 19 nt, Artificial Sequence
  Description of Artificial Sequence: Synthetic oligonucleotide
aagaaaugauucuacucag

SEQ ID NO: 709796 - RNA, 19 nt, Artificial Sequence
  Description of Artificial Sequence: Synthetic oligonucleotide
uuuauucgguuguacaggg

SEQ ID NO: 709797 - RNA, 19 nt, Artificial Sequence
  Description of Artificial Sequence: Synthetic oligonucleotide
agauaugggguaaaggucc

SEQ ID NO: 709798 - RNA, 19 nt, Artificial Sequence
  Description of Artificial Sequence: Synthetic oligonucleotide
aauggaugugaccaggcug

SEQ ID NO: 709799 - RNA, 19 nt, Artificial Sequence
  Description of Artificial Sequence: Synthetic oligonucleotide
cacaacuggaucaugauug

SEQ ID NO: 709800 - RNA, 19 nt, Artificial Sequence
  Description of Artificial Sequence: Synthetic oligonucleotide
cuguauguaggcuucauag

SEQ ID NO: 709801 - RNA, 19 nt, Artificial Sequence
  Description of Artificial Sequence: Synthetic oligonucleotide
aacaccuuaaaccugucau

SEQ ID NO: 709802 - RNA, 19 nt, Artificial Sequence
  Description of Artificial Sequence: Synthetic oligonucleotide
acaaucucggagugaaucc

SEQ ID NO: 709803 - RNA, 19 nt, Artificial Sequence
  Description of Artificial Sequence: Synthetic oligonucleotide
auuccgguauaguuggucc

SEQ ID NO: 709804 - RNA, 19 nt, Artificial Sequence
  Description of Artificial Sequence: Synthetic oligonucleotide
guccuaguaaaacacauag

SEQ ID NO: 709805 - RNA, 19 nt, Artificial Sequence
  Description of Artificial Sequence: Synthetic oligonucleotide
ucuaacucauaaaaguccu

SEQ ID NO: 709806 - RNA, 19 nt, Artificial Sequence
  Description of Artificial Sequence: Synthetic oligonucleotide
uggaauuccgguauaguug

SEQ ID NO: 709807 - RNA, 19 nt, Artificial Sequence
  Description of Artificial Sequence: Synthetic oligonucleotide
guauaguugguccaccugg

SEQ ID NO: 709808 - RNA, 19 nt, Artificial Sequence
  Description of Artificial Sequence: Synthetic oligonucleotide
guagaugaucuccaggugg

SEQ ID NO: 709809 - RNA, 19 nt, Artificial Sequence
  Description of Artificial Sequence: Synthetic oligonucleotide
aaaccauucccauggcccg

SEQ ID NO: 709810 - RNA, 19 nt, Artificial Sequence
  Description of Artificial Sequence: Synthetic oligonucleotide
uucauagucugcaaacacc

SEQ ID NO: 709811 - RNA, 19 nt, Artificial Sequence
  Description of Artificial Sequence: Synthetic oligonucleotide
aaguaguagagugaugguc

SEQ ID NO: 709812 - RNA, 19 nt, Artificial Sequence
  Description of Artificial Sequence: Synthetic oligonucleotide
uaaccaaggccucagauau

SEQ ID NO: 709813 - RNA, 19 nt, Artificial Sequence
  Description of Artificial Sequence: Synthetic oligonucleotide
agacguuuaauccauuucu

SEQ ID NO: 709814 - RNA, 19 nt, Artificial Sequence
  Description of Artificial Sequence: Synthetic oligonucleotide
cacaugguuccacagaugg

SEQ ID NO: 709815 - RNA, 19 nt, Artificial Sequence
  Description of Artificial Sequence: Synthetic oligonucleotide
uuacccuacagcuagugac

SEQ ID NO: 709816 - RNA, 19 nt, Artificial Sequence
  Description of Artificial Sequence: Synthetic oligonucleotide
aauacagccaagggcagag

SEQ ID NO: 709817 - RNA, 19 nt, Artificial Sequence
  Description of Artificial Sequence: Synthetic oligonucleotide
uuagcuaguuucaauuccu

SEQ ID NO: 709818 - RNA, 19 nt, Artificial Sequence
  Description of Artificial Sequence: Synthetic oligonucleotide
aacccaacucuaaauuugc

SEQ ID NO: 709819 - RNA, 19 nt, Artificial Sequence
  Description of Artificial Sequence: Synthetic oligonucleotide
aucauaacaguccugggaa

SEQ ID NO: 709820 - RNA, 19 nt, Artificial Sequence
  Description of Artificial Sequence: Synthetic oligonucleotide
guaauuaguccuuggggag

SEQ ID NO: 709821 - RNA, 19 nt, Artificial Sequence
  Description of Artificial Sequence: Synthetic oligonucleotide
aaaccugucaugguacauc

SEQ ID NO: 709822 - RNA, 19 nt, Artificial Sequence
  Description of Artificial Sequence: Synthetic oligonucleotide
aaacugagcuaguacgaug

SEQ ID NO: 709823 - RNA, 19 nt, Artificial Sequence
  Description of Artificial Sequence: Synthetic oligonucleotide
ucaugguacaucagcaugu

SEQ ID NO: 709824 - RNA, 19 nt, Artificial Sequence
  Description of Artificial Sequence: Synthetic oligonucleotide
aaggacacccgguaguucu

SEQ ID NO: 709825 - RNA, 19 nt, Artificial Sequence
  Description of Artificial Sequence: Synthetic oligonucleotide
augauaugcaggcaguuga

SEQ ID NO: 709826 - RNA, 19 nt, Artificial Sequence
  Description of Artificial Sequence: Synthetic oligonucleotide
ggaauuccgguauaguugg

SEQ ID NO: 709827 - RNA, 19 nt, Artificial Sequence
  Description of Artificial Sequence: Synthetic oligonucleotide
gcaaguaguagagugaugg

SEQ ID NO: 709828 - RNA, 19 nt, Artificial Sequence
  Description of Artificial Sequence: Synthetic oligonucleotide
auggaugugaccaggcugc

SEQ ID NO: 709829 - RNA, 19 nt, Artificial Sequence
  Description of Artificial Sequence: Synthetic oligonucleotide
aauuccgguauaguugguc

SEQ ID NO: 709830 - RNA, 19 nt, Artificial Sequence
  Description of Artificial Sequence: Synthetic oligonucleotide
acaaggagguaacagcaag

SEQ ID NO: 709831 - RNA, 19 nt, Artificial Sequence
  Description of Artificial Sequence: Synthetic oligonucleotide
agagugauggucauguauc

SEQ ID NO: 709832 - RNA, 19 nt, Artificial Sequence
  Description of Artificial Sequence: Synthetic oligonucleotide
cuuuauucgguuguacagg

SEQ ID NO: 709833 - RNA, 19 nt, Artificial Sequence
  Description of Artificial Sequence: Synthetic oligonucleotide
guaagagccccauugagca

SEQ ID NO: 709834 - RNA, 19 nt, Artificial Sequence
  Description of Artificial Sequence: Synthetic oligonucleotide
uaguacgauguuuacuugc

SEQ ID NO: 709835 - RNA, 19 nt, Artificial Sequence
  Description of Artificial Sequence: Synthetic oligonucleotide
uguggugggguaauuaguc

SEQ ID NO: 709836 - RNA, 19 nt, Artificial Sequence
  Description of Artificial Sequence: Synthetic oligonucleotide
ccuauaugggccaacaacc

SEQ ID NO: 709837 - RNA, 19 nt, Artificial Sequence
  Description of Artificial Sequence: Synthetic oligonucleotide
auaugcaggcaguugagca

SEQ ID NO: 709838 - RNA, 19 nt, Artificial Sequence
  Description of Artificial Sequence: Synthetic oligonucleotide
caugacacccacaugguuc

SEQ ID NO: 709839 - RNA, 19 nt, Artificial Sequence
  Description of Artificial Sequence: Synthetic oligonucleotide
aguccuuaaaacagacugc

SEQ ID NO: 709840 - RNA, 19 nt, Artificial Sequence
  Description of Artificial Sequence: Synthetic oligonucleotide
cuauaugggccaacaaccc

SEQ ID NO: 709841 - RNA, 19 nt, Artificial Sequence
  Description of Artificial Sequence: Synthetic oligonucleotide
ugauaugcaggcaguugag

SEQ ID NO: 709842 - RNA, 19 nt, Artificial Sequence
  Description of Artificial Sequence: Synthetic oligonucleotide
acuggaucaugauugacaa

SEQ ID NO: 709843 - RNA, 19 nt, Artificial Sequence
  Description of Artificial Sequence: Synthetic oligonucleotide
aacuggaucaugauugaca

SEQ ID NO: 709844 - RNA, 19 nt, Artificial Sequence
  Description of Artificial Sequence: Synthetic oligonucleotide
uauaugggccaacaaccca

SEQ ID NO: 709845 - RNA, 19 nt, Artificial Sequence
  Description of Artificial Sequence: Synthetic oligonucleotide
agaaaugauucuacucagc

SEQ ID NO: 709846 - RNA, 19 nt, Artificial Sequence
  Description of Artificial Sequence: Synthetic oligonucleotide
aguaguagagugaugguca

SEQ ID NO: 709847 - RNA, 19 nt, Artificial Sequence
  Description of Artificial Sequence: Synthetic oligonucleotide
gguaauuaguccuugggga

SEQ ID NO: 709848 - RNA, 19 nt, Artificial Sequence
  Description of Artificial Sequence: Synthetic oligonucleotide
aacugagcuaguacgaugu

SEQ ID NO: 709849 - RNA, 19 nt, Artificial Sequence
  Description of Artificial Sequence: Synthetic oligonucleotide
caccuuaaaccugucaugg

SEQ ID NO: 709850 - RNA, 19 nt, Artificial Sequence
  Description of Artificial Sequence: Synthetic oligonucleotide
acaaugaugucugcccagc

SEQ ID NO: 709851 - RNA, 19 nt, Artificial Sequence
  Description of Artificial Sequence: Synthetic oligonucleotide
gguaacagcaaguaguaga

SEQ ID NO: 709852 - RNA, 19 nt, Artificial Sequence
  Description of Artificial Sequence: Synthetic oligonucleotide
auaguugguccaccugggc

SEQ ID NO: 709853 - RNA, 19 nt, Artificial Sequence
  Description of Artificial Sequence: Synthetic oligonucleotide
ugauugacaacaucuccaa

SEQ ID NO: 709854 - RNA, 19 nt, Artificial Sequence
  Description of Artificial Sequence: Synthetic oligonucleotide
uuaaccaaggccucagaua

SEQ ID NO: 709855 - RNA, 19 nt, Artificial Sequence
  Description of Artificial Sequence: Synthetic oligonucleotide
acccauauucccaauacag

SEQ ID NO: 709856 - RNA, 19 nt, Artificial Sequence
  Description of Artificial Sequence: Synthetic oligonucleotide
uagacguuuaauccauuuc

SEQ ID NO: 709857 - RNA, 19 nt, Artificial Sequence
  Description of Artificial Sequence: Synthetic oligonucleotide
ggguaauuaguccuugggg

SEQ ID NO: 709858 - RNA, 19 nt, Artificial Sequence
  Description of Artificial Sequence: Synthetic oligonucleotide
uuggaauuccgguauaguu

SEQ ID NO: 709859 - RNA, 19 nt, Artificial Sequence
  Description of Artificial Sequence: Synthetic oligonucleotide
uacccuacagcuagugacc

SEQ ID NO: 709860 - RNA, 19 nt, Artificial Sequence
  Description of Artificial Sequence: Synthetic oligonucleotide
aacccauauucccaauaca

SEQ ID NO: 709861 - RNA, 19 nt, Artificial Sequence
  Description of Artificial Sequence: Synthetic oligonucleotide
ucacacaaggagguaacag

SEQ ID NO: 709862 - RNA, 19 nt, Artificial Sequence
  Description of Artificial Sequence: Synthetic oligonucleotide
ucagcuaaggacacccggu

SEQ ID NO: 709863 - RNA, 19 nt, Artificial Sequence
  Description of Artificial Sequence: Synthetic oligonucleotide
ucggagugaauccuugcca

SEQ ID NO: 709864 - RNA, 19 nt, Artificial Sequence
  Description of Artificial Sequence: Synthetic oligonucleotide
uuucagcuaaggacacccg

SEQ ID NO: 709865 - RNA, 19 nt, Artificial Sequence
  Description of Artificial Sequence: Synthetic oligonucleotide
acguuuaauccauuucuca

SEQ ID NO: 709866 - RNA, 19 nt, Artificial Sequence
  Description of Artificial Sequence: Synthetic oligonucleotide
aggucggagggcucuacgc

SEQ ID NO: 709867 - RNA, 19 nt, Artificial Sequence
  Description of Artificial Sequence: Synthetic oligonucleotide
ugcaucggaucacagggac

SEQ ID NO: 709868 - RNA, 19 nt, Artificial Sequence
  Description of Artificial Sequence: Synthetic oligonucleotide
uuugccaguccuuaaccaa

SEQ ID NO: 709869 - RNA, 19 nt, Artificial Sequence
  Description of Artificial Sequence: Synthetic oligonucleotide
acaccuuaaaccugucaug

SEQ ID NO: 709870 - RNA, 19 nt, Artificial Sequence
  Description of Artificial Sequence: Synthetic oligonucleotide
gaugauaugcaggcaguug

SEQ ID NO: 709871 - RNA, 19 nt, Artificial Sequence
  Description of Artificial Sequence: Synthetic oligonucleotide
ggagaaaagaagccgcugc

SEQ ID NO: 709872 - RNA, 19 nt, Artificial Sequence
  Description of Artificial Sequence: Synthetic oligonucleotide
uuggcaccguccauggugc

SEQ ID NO: 709873 - RNA, 19 nt, Artificial Sequence
  Description of Artificial Sequence: Synthetic oligonucleotide
aggcguggccuauaugggc

SEQ ID NO: 709874 - RNA, 19 nt, Artificial Sequence
  Description of Artificial Sequence: Synthetic oligonucleotide
auuugccaguccuuaacca

SEQ ID NO: 709875 - RNA, 19 nt, Artificial Sequence
  Description of Artificial Sequence: Synthetic oligonucleotide
aaggcuuuagcuaguuuca

SEQ ID NO: 709876 - RNA, 19 nt, Artificial Sequence
  Description of Artificial Sequence: Synthetic oligonucleotide
caacccauauucccaauac

SEQ ID NO: 709877 - RNA, 19 nt, Artificial Sequence
  Description of Artificial Sequence: Synthetic oligonucleotide
aggagguaacagcaaguag

SEQ ID NO: 709878 - RNA, 19 nt, Artificial Sequence
  Description of Artificial Sequence: Synthetic oligonucleotide
aaacaagccacuggucuca

SEQ ID NO: 709879 - RNA, 19 nt, Artificial Sequence
  Description of Artificial Sequence: Synthetic oligonucleotide
ugacccagguccuaguaaa

SEQ ID NO: 709880 - RNA, 19 nt, Artificial Sequence
  Description of Artificial Sequence: Synthetic oligonucleotide
uggguucuacaugacaccc

SEQ ID NO: 709881 - RNA, 19 nt, Artificial Sequence
  Description of Artificial Sequence: Synthetic oligonucleotide
uugcaaaaccaggagggug

SEQ ID NO: 709882 - RNA, 19 nt, Artificial Sequence
  Description of Artificial Sequence: Synthetic oligonucleotide
ugcaugggacccaaucaca

SEQ ID NO: 709883 - RNA, 19 nt, Artificial Sequence
  Description of Artificial Sequence: Synthetic oligonucleotide
ucaagcgguccacaucccc

SEQ ID NO: 709884 - RNA, 19 nt, Artificial Sequence
  Description of Artificial Sequence: Synthetic oligonucleotide
uuauccccagucuaccuuc

SEQ ID NO: 709885 - RNA, 19 nt, Artificial Sequence
  Description of Artificial Sequence: Synthetic oligonucleotide
auagacguuuaauccauuu

SEQ ID NO: 709886 - RNA, 19 nt, Artificial Sequence
  Description of Artificial Sequence: Synthetic oligonucleotide
gggguaauuaguccuuggg

SEQ ID NO: 709887 - RNA, 19 nt, Artificial Sequence
  Description of Artificial Sequence: Synthetic oligonucleotide
gagugaauccuugccacgc

SEQ ID NO: 709888 - RNA, 19 nt, Artificial Sequence
  Description of Artificial Sequence: Synthetic oligonucleotide
gugaauccuugccacgccg

SEQ ID NO: 709889 - RNA, 19 nt, Artificial Sequence
  Description of Artificial Sequence: Synthetic oligonucleotide
gauaugcaggcaguugagc

SEQ ID NO: 709890 - RNA, 19 nt, Artificial Sequence
  Description of Artificial Sequence: Synthetic oligonucleotide
cacaaucucggagugaauc

SEQ ID NO: 709891 - RNA, 19 nt, Artificial Sequence
  Description of Artificial Sequence: Synthetic oligonucleotide
aaaguccuuaaaacagacu

SEQ ID NO: 709892 - RNA, 19 nt, Artificial Sequence
  Description of Artificial Sequence: Synthetic oligonucleotide
gauggucauguaucauggc

SEQ ID NO: 709893 - RNA, 19 nt, Artificial Sequence
  Description of Artificial Sequence: Synthetic oligonucleotide
uacagcuagugacccaggu

SEQ ID NO: 709894 - RNA, 19 nt, Artificial Sequence
  Description of Artificial Sequence: Synthetic oligonucleotide
agcuaaggacacccgguag

SEQ ID NO: 709895 - RNA, 19 nt, Artificial Sequence
  Description of Artificial Sequence: Synthetic oligonucleotide
ggcaauauucuugaucacc

SEQ ID NO: 709896 - RNA, 19 nt, Artificial Sequence
  Description of Artificial Sequence: Synthetic oligonucleotide
acccgcauaccaaagauga

SEQ ID NO: 709897 - RNA, 19 nt, Artificial Sequence
  Description of Artificial Sequence: Synthetic oligonucleotide
ugaauccuugccacgccgu

SEQ ID NO: 709898 - RNA, 19 nt, Artificial Sequence
  Description of Artificial Sequence: Synthetic oligonucleotide
ucauaacaguccugggaac

SEQ ID NO: 709899 - RNA, 19 nt, Artificial Sequence
  Description of Artificial Sequence: Synthetic oligonucleotide
uaggucggagggcucuacg

SEQ ID NO: 709900 - RNA, 19 nt, Artificial Sequence
  Description of Artificial Sequence: Synthetic oligonucleotide
cuaguacgauguuuacuug

SEQ ID NO: 709901 - RNA, 19 nt, Artificial Sequence
  Description of Artificial Sequence: Synthetic oligonucleotide
auucuacucagcaggacca

SEQ ID NO: 709902 - RNA, 19 nt, Artificial Sequence
  Description of Artificial Sequence: Synthetic oligonucleotide
ccucaagcgguccacaucc

SEQ ID NO: 709903 - RNA, 19 nt, Artificial Sequence
  Description of Artificial Sequence: Synthetic oligonucleotide
aacuugccagagcaggcaa

SEQ ID NO: 709904 - RNA, 19 nt, Artificial Sequence
  Description of Artificial Sequence: Synthetic oligonucleotide
gacguuuaauccauuucuc

SEQ ID NO: 709905 - RNA, 19 nt, Artificial Sequence
  Description of Artificial Sequence: Synthetic oligonucleotide
aguacgauguuuacuugcu

SEQ ID NO: 709906 - RNA, 19 nt, Artificial Sequence
  Description of Artificial Sequence: Synthetic oligonucleotide
ggccuuacccuacagcuag

SEQ ID NO: 709907 - RNA, 19 nt, Artificial Sequence
  Description of Artificial Sequence: Synthetic oligonucleotide
uccacccgcauaccaaaga

SEQ ID NO: 709908 - RNA, 19 nt, Artificial Sequence
  Description of Artificial Sequence: Synthetic oligonucleotide
acgauguuuacuugcuaaa

SEQ ID NO: 709909 - RNA, 19 nt, Artificial Sequence
  Description of Artificial Sequence: Synthetic oligonucleotide
ucucggagugaauccuugc

SEQ ID NO: 709910 - RNA, 19 nt, Artificial Sequence
  Description of Artificial Sequence: Synthetic oligonucleotide
ggcauagacguuuaaucca

SEQ ID NO: 709911 - RNA, 19 nt, Artificial Sequence
  Description of Artificial Sequence: Synthetic oligonucleotide
acccuacagcuagugaccc

SEQ ID NO: 709912 - RNA, 19 nt, Artificial Sequence
  Description of Artificial Sequence: Synthetic oligonucleotide
ucuacucagcaggaccaag

SEQ ID NO: 709913 - RNA, 19 nt, Artificial Sequence
  Description of Artificial Sequence: Synthetic oligonucleotide
uuccgguauaguuggucca

SEQ ID NO: 709914 - RNA, 19 nt, Artificial Sequence
  Description of Artificial Sequence: Synthetic oligonucleotide
uuauucgguuguacagggu

SEQ ID NO: 709915 - RNA, 19 nt, Artificial Sequence
  Description of Artificial Sequence: Synthetic oligonucleotide
guggugggguaauuagucc

SEQ ID NO: 709916 - RNA, 19 nt, Artificial Sequence
  Description of Artificial Sequence: Synthetic oligonucleotide
ccuugaagcagucuggauc

SEQ ID NO: 709917 - RNA, 19 nt, Artificial Sequence
  Description of Artificial Sequence: Synthetic oligonucleotide
ucuacgccccagaucuccc

SEQ ID NO: 709918 - RNA, 19 nt, Artificial Sequence
  Description of Artificial Sequence: Synthetic oligonucleotide
gaggcguggccuauauggg

SEQ ID NO: 709919 - RNA, 19 nt, Artificial Sequence
  Description of Artificial Sequence: Synthetic oligonucleotide
caguguugcucuccugagg

SEQ ID NO: 709920 - RNA, 19 nt, Artificial Sequence
  Description of Artificial Sequence: Synthetic oligonucleotide
uaugggguaaaggucccuc

SEQ ID NO: 709921 - RNA, 19 nt, Artificial Sequence
  Description of Artificial Sequence: Synthetic oligonucleotide
uuugagccugucacccaca

SEQ ID NO: 709922 - RNA, 19 nt, Artificial Sequence
  Description of Artificial Sequence: Synthetic oligonucleotide
aucucugcccauccgugcu

SEQ ID NO: 709923 - RNA, 19 nt, Artificial Sequence
  Description of Artificial Sequence: Synthetic oligonucleotide
gagaaaagaagccgcugcu

SEQ ID NO: 709924 - RNA, 19 nt, Artificial Sequence
  Description of Artificial Sequence: Synthetic oligonucleotide
aacaccaacccaacucuaa

SEQ ID NO: 709925 - RNA, 19 nt, Artificial Sequence
  Description of Artificial Sequence: Synthetic oligonucleotide
aacaacccauauucccaau

SEQ ID NO: 709926 - RNA, 19 nt, Artificial Sequence
  Description of Artificial Sequence: Synthetic oligonucleotide
acaacccauauucccaaua

SEQ ID NO: 709927 - RNA, 19 nt, Artificial Sequence
  Description of Artificial Sequence: Synthetic oligonucleotide
acuguauguaggcuucaua

SEQ ID NO: 709928 - RNA, 19 nt, Artificial Sequence
  Description of Artificial Sequence: Synthetic oligonucleotide
agcggcuggaaucacuuuu

SEQ ID NO: 709929 - RNA, 19 nt, Artificial Sequence
  Description of Artificial Sequence: Synthetic oligonucleotide
auaugggccaacaacccau

SEQ ID NO: 709930 - RNA, 19 nt, Artificial Sequence
  Description of Artificial Sequence: Synthetic oligonucleotide
gucggagggcucuacgccc

SEQ ID NO: 709931 - RNA, 19 nt, Artificial Sequence
  Description of Artificial Sequence: Synthetic oligonucleotide
ggcucuacgccccagaucu

SEQ ID NO: 709932 - RNA, 19 nt, Artificial Sequence
  Description of Artificial Sequence: Synthetic oligonucleotide
gggaucuguaggucggagg

SEQ ID NO: 709933 - RNA, 19 nt, Artificial Sequence
  Description of Artificial Sequence: Synthetic oligonucleotide
aguccuuaaccaaggccuc

SEQ ID NO: 709934 - RNA, 19 nt, Artificial Sequence
  Description of Artificial Sequence: Synthetic oligonucleotide
agaucccuacucagauucc

SEQ ID NO: 709935 - RNA, 19 nt, Artificial Sequence
  Description of Artificial Sequence: Synthetic oligonucleotide
cagggccaaacugagcuag

SEQ ID NO: 709936 - RNA, 19 nt, Artificial Sequence
  Description of Artificial Sequence: Synthetic oligonucleotide
ggagguaacagcaaguagu

SEQ ID NO: 709937 - RNA, 19 nt, Artificial Sequence
  Description of Artificial Sequence: Synthetic oligonucleotide
acgugauccaagugccucu

SEQ ID NO: 709938 - RNA, 19 nt, Artificial Sequence
  Description of Artificial Sequence: Synthetic oligonucleotide
accuuaaaccugucauggu

SEQ ID NO: 709939 - RNA, 19 nt, Artificial Sequence
  Description of Artificial Sequence: Synthetic oligonucleotide
ugauucuacucagcaggac

SEQ ID NO: 709940 - RNA, 19 nt, Artificial Sequence
  Description of Artificial Sequence: Synthetic oligonucleotide
cucuacgccccagaucucc

SEQ ID NO: 709941 - RNA, 19 nt, Artificial Sequence
  Description of Artificial Sequence: Synthetic oligonucleotide
gaugugaccaggcugccuu

SEQ ID NO: 709942 - RNA, 19 nt, Artificial Sequence
  Description of Artificial Sequence: Synthetic oligonucleotide
uccgguauaguugguccac

SEQ ID NO: 709943 - RNA, 19 nt, Artificial Sequence
  Description of Artificial Sequence: Synthetic oligonucleotide
gcuaguacgauguuuacuu

SEQ ID NO: 709944 - RNA, 19 nt, Artificial Sequence
  Description of Artificial Sequence: Synthetic oligonucleotide
ucucccgugcauacucagu

SEQ ID NO: 709945 - RNA, 19 nt, Artificial Sequence
  Description of Artificial Sequence: Synthetic oligonucleotide
acacagugcaucggaucac

SEQ ID NO: 709946 - RNA, 19 nt, Artificial Sequence
  Description of Artificial Sequence: Synthetic oligonucleotide
gaucccuacucagauucca

SEQ ID NO: 709947 - RNA, 19 nt, Artificial Sequence
  Description of Artificial Sequence: Synthetic oligonucleotide
gagcuaguacgauguuuac

SEQ ID NO: 709948 - RNA, 19 nt, Artificial Sequence
  Description of Artificial Sequence: Synthetic oligonucleotide
acacccgguaguucuccag

SEQ ID NO: 709949 - RNA, 19 nt, Artificial Sequence
  Description of Artificial Sequence: Synthetic oligonucleotide
cauggcccguccuggaaac

SEQ ID NO: 709950 - RNA, 19 nt, Artificial Sequence
  Description of Artificial Sequence: Synthetic oligonucleotide
caccgucggguugugaucc

SEQ ID NO: 709951 - RNA, 19 nt, Artificial Sequence
  Description of Artificial Sequence: Synthetic oligonucleotide
caggcaggcgcucauaaaa

SEQ ID NO: 709952 - RNA, 19 nt, Artificial Sequence
  Description of Artificial Sequence: Synthetic oligonucleotide
ugggguaaaggucccucuu

SEQ ID NO: 709953 - RNA, 19 nt, Artificial Sequence
  Description of Artificial Sequence: Synthetic oligonucleotide
ccuacucagauuccaaauc

SEQ ID NO: 709954 - RNA, 19 nt, Artificial Sequence
  Description of Artificial Sequence: Synthetic oligonucleotide
uggccuauaugggccaaca

SEQ ID NO: 709955 - RNA, 19 nt, Artificial Sequence
  Description of Artificial Sequence: Synthetic oligonucleotide
guccuuaaaacagacugcu

SEQ ID NO: 709956 - RNA, 19 nt, Artificial Sequence
  Description of Artificial Sequence: Synthetic oligonucleotide
agguccuaguaaaacacau

SEQ ID NO: 709957 - RNA, 19 nt, Artificial Sequence
  Description of Artificial Sequence: Synthetic oligonucleotide
gugccaaugguaagagccc

SEQ ID NO: 709958 - RNA, 19 nt, Artificial Sequence
  Description of Artificial Sequence: Synthetic oligonucleotide
cuacgccccagaucucccg

SEQ ID NO: 709959 - RNA, 19 nt, Artificial Sequence
  Description of Artificial Sequence: Synthetic oligonucleotide
uugugaucccauuggucuu

SEQ ID NO: 709960 - RNA, 19 nt, Artificial Sequence
  Description of Artificial Sequence: Synthetic oligonucleotide
augauucuacucagcagga

SEQ ID NO: 709961 - RNA, 19 nt, Artificial Sequence
  Description of Artificial Sequence: Synthetic oligonucleotide
caagcgguccacaucccca

SEQ ID NO: 709962 - RNA, 19 nt, Artificial Sequence
  Description of Artificial Sequence: Synthetic oligonucleotide
cuuacccuacagcuaguga

SEQ ID NO: 709963 - RNA, 19 nt, Artificial Sequence
  Description of Artificial Sequence: Synthetic oligonucleotide
ccgcauaccaaagaugaag

SEQ ID NO: 709964 - RNA, 19 nt, Artificial Sequence
  Description of Artificial Sequence: Synthetic oligonucleotide
cacgugauccaagugccuc

SEQ ID NO: 709965 - RNA, 19 nt, Artificial Sequence
  Description of Artificial Sequence: Synthetic oligonucleotide
ugugaucccauuggucuua

SEQ ID NO: 709966 - RNA, 19 nt, Artificial Sequence
  Description of Artificial Sequence: Synthetic oligonucleotide
ggcaguugagcagcugucg

SEQ ID NO: 709967 - RNA, 19 nt, Artificial Sequence
  Description of Artificial Sequence: Synthetic oligonucleotide
cuggaucaugauugacaac

SEQ ID NO: 709968 - RNA, 19 nt, Artificial Sequence
  Description of Artificial Sequence: Synthetic oligonucleotide
caacaacccauauucccaa

SEQ ID NO: 709969 - RNA, 19 nt, Artificial Sequence
  Description of Artificial Sequence: Synthetic oligonucleotide
aggccuuauccccagucua

SEQ ID NO: 709970 - RNA, 19 nt, Artificial Sequence
  Description of Artificial Sequence: Synthetic oligonucleotide
ccaacaacccauauuccca

SEQ ID NO: 709971 - RNA, 19 nt, Artificial Sequence
  Description of Artificial Sequence: Synthetic oligonucleotide
ggucggagggcucuacgcc

SEQ ID NO: 709972 - RNA, 19 nt, Artificial Sequence
  Description of Artificial Sequence: Synthetic oligonucleotide
cccgauucucuccacaaug

SEQ ID NO: 709973 - RNA, 19 nt, Artificial Sequence
  Description of Artificial Sequence: Synthetic oligonucleotide
accgucggguugugauccc

SEQ ID NO: 709974 - RNA, 19 nt, Artificial Sequence
  Description of Artificial Sequence: Synthetic oligonucleotide
acagaggcguggccuauau

SEQ ID NO: 709975 - RNA, 19 nt, Artificial Sequence
  Description of Artificial Sequence: Synthetic oligonucleotide
uggccuuacccuacagcua

SEQ ID NO: 709976 - RNA, 19 nt, Artificial Sequence
  Description of Artificial Sequence: Synthetic oligonucleotide
aaucucggagugaauccuu

SEQ ID NO: 709977 - RNA, 19 nt, Artificial Sequence
  Description of Artificial Sequence: Synthetic oligonucleotide
accgccuuggcagaccaga

SEQ ID NO: 709978 - RNA, 19 nt, Artificial Sequence
  Description of Artificial Sequence: Synthetic oligonucleotide
ccucaugaaguguuauuuc

SEQ ID NO: 709979 - RNA, 19 nt, Artificial Sequence
  Description of Artificial Sequence: Synthetic oligonucleotide
agugauggucauguaucau

SEQ ID NO: 709980 - RNA, 19 nt, Artificial Sequence
  Description of Artificial Sequence: Synthetic oligonucleotide
cucaagcgguccacauccc

SEQ ID NO: 709981 - RNA, 19 nt, Artificial Sequence
  Description of Artificial Sequence: Synthetic oligonucleotide
aaccauucccauggcccgu

SEQ ID NO: 709982 - RNA, 19 nt, Artificial Sequence
  Description of Artificial Sequence: Synthetic oligonucleotide
aacguccuccacccgcaua

SEQ ID NO: 709983 - RNA, 19 nt, Artificial Sequence
  Description of Artificial Sequence: Synthetic oligonucleotide
cuccacccgcauaccaaag

SEQ ID NO: 709984 - RNA, 19 nt, Artificial Sequence
  Description of Artificial Sequence: Synthetic oligonucleotide
auacagccaagggcagagg

SEQ ID NO: 709985 - RNA, 19 nt, Artificial Sequence
  Description of Artificial Sequence: Synthetic oligonucleotide
gccacgugauccaagugcc

SEQ ID NO: 709986 - RNA, 19 nt, Artificial Sequence
  Description of Artificial Sequence: Synthetic oligonucleotide
gcaauauucuugaucaccu

SEQ ID NO: 709987 - RNA, 19 nt, Artificial Sequence
  Description of Artificial Sequence: Synthetic oligonucleotide
uggugcggucacuggagaa

SEQ ID NO: 709988 - RNA, 19 nt, Artificial Sequence
  Description of Artificial Sequence: Synthetic oligonucleotide
ucacaaucucggagugaau

SEQ ID NO: 709989 - RNA, 19 nt, Artificial Sequence
  Description of Artificial Sequence: Synthetic oligonucleotide
uaaggacacccgguaguuc

SEQ ID NO: 709990 - RNA, 19 nt, Artificial Sequence
  Description of Artificial Sequence: Synthetic oligonucleotide
uggcccguccuggaaacac

SEQ ID NO: 709991 - RNA, 19 nt, Artificial Sequence
  Description of Artificial Sequence: Synthetic oligonucleotide
aaccaaggccucagauaug

SEQ ID NO: 709992 - RNA, 19 nt, Artificial Sequence
  Description of Artificial Sequence: Synthetic oligonucleotide
ggcguggccuauaugggcc

SEQ ID NO: 709993 - RNA, 19 nt, Artificial Sequence
  Description of Artificial Sequence: Synthetic oligonucleotide
uucuacucagcaggaccaa

SEQ ID NO: 709994 - RNA, 19 nt, Artificial Sequence
  Description of Artificial Sequence: Synthetic oligonucleotide
gugacccagguccuaguaa

SEQ ID NO: 709995 - RNA, 19 nt, Artificial Sequence
  Description of Artificial Sequence: Synthetic oligonucleotide
guggcguggcagcagcuuc

SEQ ID NO: 709996 - RNA, 19 nt, Artificial Sequence
  Description of Artificial Sequence: Synthetic oligonucleotide
agggcucuacgccccagau

SEQ ID NO: 709997 - RNA, 19 nt, Artificial Sequence
  Description of Artificial Sequence: Synthetic oligonucleotide
gaucacuuuugagccuguc

SEQ ID NO: 709998 - RNA, 19 nt, Artificial Sequence
  Description of Artificial Sequence: Synthetic oligonucleotide
cacagaucccuacucagau

SEQ ID NO: 709999 - RNA, 19 nt, Artificial Sequence
  Description of Artificial Sequence: Synthetic oligonucleotide
acugagcuaguacgauguu

SEQ ID NO: 710000 - RNA, 19 nt, Artificial Sequence
  Description of Artificial Sequence: Synthetic oligonucleotide
agcugucgccccgauucuc

SEQ ID NO: 710001 - RNA, 19 nt, Artificial Sequence
  Description of Artificial Sequence: Synthetic oligonucleotide
acccaaucacacacagaug

SEQ ID NO: 710002 - RNA, 19 nt, Artificial Sequence
  Description of Artificial Sequence: Synthetic oligonucleotide
auaugggguaaaggucccu

SEQ ID NO: 710003 - RNA, 19 nt, Artificial Sequence
  Description of Artificial Sequence: Synthetic oligonucleotide
gacacccgguaguucucca

SEQ ID NO: 710004 - RNA, 19 nt, Artificial Sequence
  Description of Artificial Sequence: Synthetic oligonucleotide
caaguaguagagugauggu

SEQ ID NO: 710005 - RNA, 19 nt, Artificial Sequence
  Description of Artificial Sequence: Synthetic oligonucleotide
cgcauaccaaagaugaaga

SEQ ID NO: 710006 - RNA, 19 nt, Artificial Sequence
  Description of Artificial Sequence: Synthetic oligonucleotide
cggagugaauccuugccac

SEQ ID NO: 710007 - RNA, 19 nt, Artificial Sequence
  Description of Artificial Sequence: Synthetic oligonucleotide
guacgauguuuacuugcua

SEQ ID NO: 710008 - RNA, 19 nt, Artificial Sequence
  Description of Artificial Sequence: Synthetic oligonucleotide
ggcacuguauguaggcuuc

SEQ ID NO: 710009 - RNA, 19 nt, Artificial Sequence
  Description of Artificial Sequence: Synthetic oligonucleotide
aggacacccgguaguucuc

SEQ ID NO: 710010 - RNA, 19 nt, Artificial Sequence
  Description of Artificial Sequence: Synthetic oligonucleotide
gcuaaggacacccgguagu

SEQ ID NO: 710011 - RNA, 19 nt, Artificial Sequence
  Description of Artificial Sequence: Synthetic oligonucleotide
accgugugguugguguaug

SEQ ID NO: 710012 - RNA, 19 nt, Artificial Sequence
  Description of Artificial Sequence: Synthetic oligonucleotide
guaguagagugauggucau

SEQ ID NO: 710013 - RNA, 19 nt, Artificial Sequence
  Description of Artificial Sequence: Synthetic oligonucleotide
caauggaugugaccaggcu

SEQ ID NO: 710014 - RNA, 19 nt, Artificial Sequence
  Description of Artificial Sequence: Synthetic oligonucleotide
cagccacgugauccaagug

SEQ ID NO: 710015 - RNA, 19 nt, Artificial Sequence
  Description of Artificial Sequence: Synthetic oligonucleotide
aggcuuuagcuaguuucaa

SEQ ID NO: 710016 - RNA, 19 nt, Artificial Sequence
  Description of Artificial Sequence: Synthetic oligonucleotide
aggcaggcgcucauaaaau

SEQ ID NO: 710017 - RNA, 19 nt, Artificial Sequence
  Description of Artificial Sequence: Synthetic oligonucleotide
gaaaggcuuuagcuaguuu

SEQ ID NO: 710018 - RNA, 19 nt, Artificial Sequence
  Description of Artificial Sequence: Synthetic oligonucleotide
gcauuguacccuuucuggu

SEQ ID NO: 710019 - RNA, 19 nt, Artificial Sequence
  Description of Artificial Sequence: Synthetic oligonucleotide
cuuggaauuccgguauagu

SEQ ID NO: 710020 - RNA, 19 nt, Artificial Sequence
  Description of Artificial Sequence: Synthetic oligonucleotide
cagcuaaggacacccggua

SEQ ID NO: 710021 - RNA, 19 nt, Artificial Sequence
  Description of Artificial Sequence: Synthetic oligonucleotide
cagaggcguggccuauaug

SEQ ID NO: 710022 - RNA, 19 nt, Artificial Sequence
  Description of Artificial Sequence: Synthetic oligonucleotide
ggccuuauccccagucuac

SEQ ID NO: 710023 - RNA, 19 nt, Artificial Sequence
  Description of Artificial Sequence: Synthetic oligonucleotide
uguaggucggagggcucua

SEQ ID NO: 710024 - RNA, 19 nt, Artificial Sequence
  Description of Artificial Sequence: Synthetic oligonucleotide
cugucgccccgauucucuc

SEQ ID NO: 710025 - RNA, 19 nt, Artificial Sequence
  Description of Artificial Sequence: Synthetic oligonucleotide
gguuccacagauggcuaca

SEQ ID NO: 710026 - RNA, 19 nt, Artificial Sequence
  Description of Artificial Sequence: Synthetic oligonucleotide
uggcaccguccauggugcc

SEQ ID NO: 710027 - RNA, 19 nt, Artificial Sequence
  Description of Artificial Sequence: Synthetic oligonucleotide
gaauccuugccacgccguu

SEQ ID NO: 710028 - RNA, 19 nt, Artificial Sequence
  Description of Artificial Sequence: Synthetic oligonucleotide
ccuuacccuacagcuagug

SEQ ID NO: 710029 - RNA, 19 nt, Artificial Sequence
  Description of Artificial Sequence: Synthetic oligonucleotide
augguuccacagauggcua

SEQ ID NO: 710030 - RNA, 19 nt, Artificial Sequence
  Description of Artificial Sequence: Synthetic oligonucleotide
guaggucggagggcucuac

SEQ ID NO: 710031 - RNA, 19 nt, Artificial Sequence
  Description of Artificial Sequence: Synthetic oligonucleotide
uacagaggcguggccuaua

SEQ ID NO: 710032 - RNA, 19 nt, Artificial Sequence
  Description of Artificial Sequence: Synthetic oligonucleotide
gcaucggaucacagggacc

SEQ ID NO: 710033 - RNA, 19 nt, Artificial Sequence
  Description of Artificial Sequence: Synthetic oligonucleotide
gguccuaguaaaacacaua

SEQ ID NO: 710034 - RNA, 19 nt, Artificial Sequence
  Description of Artificial Sequence: Synthetic oligonucleotide
ggacacccgguaguucucc

SEQ ID NO: 710035 - RNA, 19 nt, Artificial Sequence
  Description of Artificial Sequence: Synthetic oligonucleotide
gcccguccuggaaacacag

SEQ ID NO: 710036 - RNA, 19 nt, Artificial Sequence
  Description of Artificial Sequence: Synthetic oligonucleotide
caggccuuauccccagucu

SEQ ID NO: 710037 - RNA, 19 nt, Artificial Sequence
  Description of Artificial Sequence: Synthetic oligonucleotide
caagugccucugguugaug

SEQ ID NO: 710038 - RNA, 19 nt, Artificial Sequence
  Description of Artificial Sequence: Synthetic oligonucleotide
cccgaucauaacaguccug

SEQ ID NO: 710039 - RNA, 19 nt, Artificial Sequence
  Description of Artificial Sequence: Synthetic oligonucleotide
ggcuuuagcuaguuucaau

SEQ ID NO: 710040 - RNA, 19 nt, Artificial Sequence
  Description of Artificial Sequence: Synthetic oligonucleotide
guggccuauaugggccaac

SEQ ID NO: 710041 - RNA, 19 nt, Artificial Sequence
  Description of Artificial Sequence: Synthetic oligonucleotide
gcauagacguuuaauccau

SEQ ID NO: 710042 - RNA, 19 nt, Artificial Sequence
  Description of Artificial Sequence: Synthetic oligonucleotide
cucuggacucuaacucaua

SEQ ID NO: 710043 - RNA, 19 nt, Artificial Sequence
  Description of Artificial Sequence: Synthetic oligonucleotide
cugucacccacaacuggau

SEQ ID NO: 710044 - RNA, 19 nt, Artificial Sequence
  Description of Artificial Sequence: Synthetic oligonucleotide
caccgccuuggcagaccag

SEQ ID NO: 710045 - RNA, 19 nt, Artificial Sequence
  Description of Artificial Sequence: Synthetic oligonucleotide
gggcucuacgccccagauc

SEQ ID NO: 710046 - RNA, 19 nt, Artificial Sequence
  Description of Artificial Sequence: Synthetic oligonucleotide
ggccuauaugggccaacaa

SEQ ID NO: 710047 - RNA, 19 nt, Artificial Sequence
  Description of Artificial Sequence: Synthetic oligonucleotide
ggaccaaggaggccacaua

SEQ ID NO: 710048 - RNA, 19 nt, Artificial Sequence
  Description of Artificial Sequence: Synthetic oligonucleotide
cauagacguuuaauccauu

SEQ ID NO: 710049 - RNA, 19 nt, Artificial Sequence
  Description of Artificial Sequence: Synthetic oligonucleotide
ccaccgucggguugugauc

SEQ ID NO: 710050 - RNA, 19 nt, Artificial Sequence
  Description of Artificial Sequence: Synthetic oligonucleotide
ucgccccgauucucuccac

SEQ ID NO: 710051 - RNA, 19 nt, Artificial Sequence
  Description of Artificial Sequence: Synthetic oligonucleotide
gaauuccgguauaguuggu

SEQ ID NO: 710052 - RNA, 19 nt, Artificial Sequence
  Description of Artificial Sequence: Synthetic oligonucleotide
auuaguccuuggggagguu

SEQ ID NO: 710053 - RNA, 19 nt, Artificial Sequence
  Description of Artificial Sequence: Synthetic oligonucleotide
ccucaacguccuccacccg

SEQ ID NO: 710054 - RNA, 19 nt, Artificial Sequence
  Description of Artificial Sequence: Synthetic oligonucleotide
cauucccauggcccguccu

SEQ ID NO: 710055 - RNA, 19 nt, Artificial Sequence
  Description of Artificial Sequence: Synthetic oligonucleotide
ggcaggcgcucauaaaauu

SEQ ID NO: 710056 - RNA, 19 nt, Artificial Sequence
  Description of Artificial Sequence: Synthetic oligonucleotide
ccuuaaccaaggccucaga

SEQ ID NO: 710057 - RNA, 19 nt, Artificial Sequence
  Description of Artificial Sequence: Synthetic oligonucleotide
ccauucccauggcccgucc

SEQ ID NO: 710058 - RNA, 19 nt, Artificial Sequence
  Description of Artificial Sequence: Synthetic oligonucleotide
ggcaccguccauggugcca

SEQ ID NO: 710059 - RNA, 19 nt, Artificial Sequence
  Description of Artificial Sequence: Synthetic oligonucleotide
ggggcgggaucuguagguc

SEQ ID NO: 710060 - RNA, 19 nt, Artificial Sequence
  Description of Artificial Sequence: Synthetic oligonucleotide
ccauggcccguccuggaaa

SEQ ID NO: 710061 - RNA, 19 nt, Artificial Sequence
  Description of Artificial Sequence: Synthetic oligonucleotide
ggugggguaauuaguccuu

SEQ ID NO: 710062 - RNA, 19 nt, Artificial Sequence
  Description of Artificial Sequence: Synthetic oligonucleotide
cacuguauguaggcuucau

SEQ ID NO: 710063 - RNA, 19 nt, Artificial Sequence
  Description of Artificial Sequence: Synthetic oligonucleotide
ccccgaucauaacaguccu

SEQ ID NO: 710064 - RNA, 19 nt, Artificial Sequence
  Description of Artificial Sequence: Synthetic oligonucleotide
cccgcauaccaaagaugaa

SEQ ID NO: 710065 - RNA, 19 nt, Artificial Sequence
  Description of Artificial Sequence: Synthetic oligonucleotide
cccuacagcuagugaccca

SEQ ID NO: 710066 - RNA, 19 nt, Artificial Sequence
  Description of Artificial Sequence: Synthetic oligonucleotide
ccacgccguucacugcaug

SEQ ID NO: 710067 - RNA, 19 nt, Artificial Sequence
  Description of Artificial Sequence: Synthetic oligonucleotide
agccaccgucggguuguga

SEQ ID NO: 710068 - RNA, 19 nt, Artificial Sequence
  Description of Artificial Sequence: Synthetic oligonucleotide
cccgguaguucuccaggaa

SEQ ID NO: 710069 - RNA, 19 nt, Artificial Sequence
  Description of Artificial Sequence: Synthetic oligonucleotide
ggaugugaccaggcugccu

SEQ ID NO: 710070 - RNA, 19 nt, Artificial Sequence
  Description of Artificial Sequence: Synthetic oligonucleotide
gcguggcagcagcuucuca

SEQ ID NO: 710071 - RNA, 19 nt, Artificial Sequence
  Description of Artificial Sequence: Synthetic oligonucleotide
cauccgugcuguggacucu

SEQ ID NO: 710072 - RNA, 19 nt, Artificial Sequence
  Description of Artificial Sequence: Synthetic oligonucleotide
cgccguucacugcauggga

SEQ ID NO: 710073 - RNA, 19 nt, Artificial Sequence
  Description of Artificial Sequence: Synthetic oligonucleotide
ccaaugguaagagccccau

SEQ ID NO: 710074 - RNA, 19 nt, Artificial Sequence
  Description of Artificial Sequence: Synthetic oligonucleotide
gcgggaucuguaggucgga

SEQ ID NO: 710075 - RNA, 19 nt, Artificial Sequence
  Description of Artificial Sequence: Synthetic oligonucleotide
gguggcguggcagcagcuu

SEQ ID NO: 710076 - RNA, 19 nt, Artificial Sequence
  Description of Artificial Sequence: Synthetic oligonucleotide
cagcggcuggaaucacuuu

SEQ ID NO: 710077 - RNA, 19 nt, Artificial Sequence
  Description of Artificial Sequence: Synthetic oligonucleotide
gcucuacgccccagaucuc

SEQ ID NO: 710078 - RNA, 19 nt, Artificial Sequence
  Description of Artificial Sequence: Synthetic oligonucleotide
caacguccuccacccgcau

SEQ ID NO: 710079 - RNA, 19 nt, Artificial Sequence
  Description of Artificial Sequence: Synthetic oligonucleotide
ccacgugauccaagugccu

SEQ ID NO: 710080 - RNA, 19 nt, Artificial Sequence
  Description of Artificial Sequence: Synthetic oligonucleotide
ccgucggguugugauccca

SEQ ID NO: 710081 - RNA, 19 nt, Artificial Sequence
  Description of Artificial Sequence: Synthetic oligonucleotide
ccaagugccucugguugau

SEQ ID NO: 710082 - RNA, 19 nt, Artificial Sequence
  Description of Artificial Sequence: Synthetic oligonucleotide
cccguccuggaaacacagu

SEQ ID NO: 710083 - RNA, 19 nt, Artificial Sequence
  Description of Artificial Sequence: Synthetic oligonucleotide
ccccgauucucuccacaau

SEQ ID NO: 710084 - RNA, 19 nt, Artificial Sequence
  Description of Artificial Sequence: Synthetic oligonucleotide
gccuuacccuacagcuagu

SEQ ID NO: 710085 - RNA, 19 nt, Artificial Sequence
  Description of Artificial Sequence: Synthetic oligonucleotide
caccguccauggugccaau

SEQ ID NO: 710086 - RNA, 19 nt, Artificial Sequence
  Description of Artificial Sequence: Synthetic oligonucleotide
cgucggguugugaucccau

SEQ ID NO: 710087 - RNA, 19 nt, Artificial Sequence
  Description of Artificial Sequence: Synthetic oligonucleotide
cguggccuauaugggccaa

SEQ ID NO: 710088 - RNA, 19 nt, Artificial Sequence
  Description of Artificial Sequence: Synthetic oligonucleotide
aauaaauagaguaacaaag

SEQ ID NO: 710089 - RNA, 19 nt, Artificial Sequence
  Description of Artificial Sequence: Synthetic oligonucleotide
gauguaauagugcucauag

SEQ ID NO: 710090 - RNA, 19 nt, Artificial Sequence
  Description of Artificial Sequence: Synthetic oligonucleotide
auauucugggguuagaagg

SEQ ID NO: 710091 - RNA, 19 nt, Artificial Sequence
  Description of Artificial Sequence: Synthetic oligonucleotide
aaggcagcuacacaguccc

SEQ ID NO: 710092 - RNA, 19 nt, Artificial Sequence
  Description of Artificial Sequence: Synthetic oligonucleotide
aaagcucggacucacugcc

SEQ ID NO: 710093 - RNA, 19 nt, Artificial Sequence
  Description of Artificial Sequence: Synthetic oligonucleotide
aacuugacaggccaagggc

SEQ ID NO: 710094 - RNA, 19 nt, Artificial Sequence
  Description of Artificial Sequence: Synthetic oligonucleotide
uguaauagugcucauagau

SEQ ID NO: 710095 - RNA, 19 nt, Artificial Sequence
  Description of Artificial Sequence: Synthetic oligonucleotide
aaaacauugugguagguau

SEQ ID NO: 710096 - RNA, 19 nt, Artificial Sequence
  Description of Artificial Sequence: Synthetic oligonucleotide
uaauagugcucauagauga

SEQ ID NO: 710097 - RNA, 19 nt, Artificial Sequence
  Description of Artificial Sequence: Synthetic oligonucleotide
cagacuuugacucaggggc

SEQ ID NO: 710098 - RNA, 19 nt, Artificial Sequence
  Description of Artificial Sequence: Synthetic oligonucleotide
ugguauuuuauacaaguga

SEQ ID NO: 710099 - RNA, 19 nt, Artificial Sequence
  Description of Artificial Sequence: Synthetic oligonucleotide
aaaggaugagguccuuucc

SEQ ID NO: 710100 - RNA, 19 nt, Artificial Sequence
  Description of Artificial Sequence: Synthetic oligonucleotide
gacuaaaauaaauagagua

SEQ ID NO: 710101 - RNA, 19 nt, Artificial Sequence
  Description of Artificial Sequence: Synthetic oligonucleotide
aggagcaccaagcugaaac

SEQ ID NO: 710102 - RNA, 19 nt, Artificial Sequence
  Description of Artificial Sequence: Synthetic oligonucleotide
guagguaucaagcaccagg

SEQ ID NO: 710103 - RNA, 19 nt, Artificial Sequence
  Description of Artificial Sequence: Synthetic oligonucleotide
ucagagacagguuaacuag

SEQ ID NO: 710104 - RNA, 19 nt, Artificial Sequence
  Description of Artificial Sequence: Synthetic oligonucleotide
uauaagaaagucuauuuua

SEQ ID NO: 710105 - RNA, 19 nt, Artificial Sequence
  Description of Artificial Sequence: Synthetic oligonucleotide
agaacucucguacccagcc

SEQ ID NO: 710106 - RNA, 19 nt, Artificial Sequence
  Description of Artificial Sequence: Synthetic oligonucleotide
auaggaugaaagcucgugg

SEQ ID NO: 710107 - RNA, 19 nt, Artificial Sequence
  Description of Artificial Sequence: Synthetic oligonucleotide
uaaguauaggaugaaagcu

SEQ ID NO: 710108 - RNA, 19 nt, Artificial Sequence
  Description of Artificial Sequence: Synthetic oligonucleotide
uguggaaucggugacacug

SEQ ID NO: 710109 - RNA, 19 nt, Artificial Sequence
  Description of Artificial Sequence: Synthetic oligonucleotide
caucaugggauuauagggg

SEQ ID NO: 710110 - RNA, 19 nt, Artificial Sequence
  Description of Artificial Sequence: Synthetic oligonucleotide
uuaacuagguaacuuucac

SEQ ID NO: 710111 - RNA, 19 nt, Artificial Sequence
  Description of Artificial Sequence: Synthetic oligonucleotide
uuauacaagugacuaaaau

SEQ ID NO: 710112 - RNA, 19 nt, Artificial Sequence
  Description of Artificial Sequence: Synthetic oligonucleotide
ucggagauuaggaguaccg

SEQ ID NO: 710113 - RNA, 19 nt, Artificial Sequence
  Description of Artificial Sequence: Synthetic oligonucleotide
cuaaugaggcaacuggagg

SEQ ID NO: 710114 - RNA, 19 nt, Artificial Sequence
  Description of Artificial Sequence: Synthetic oligonucleotide
agcgggaucaauuggcugg

SEQ ID NO: 710115 - RNA, 19 nt, Artificial Sequence
  Description of Artificial Sequence: Synthetic oligonucleotide
auaaccaaagguccccgac

SEQ ID NO: 710116 - RNA, 19 nt, Artificial Sequence
  Description of Artificial Sequence: Synthetic oligonucleotide
agugugucggaugaguccc

SEQ ID NO: 710117 - RNA, 19 nt, Artificial Sequence
  Description of Artificial Sequence: Synthetic oligonucleotide
uguggauagagagaccccg

SEQ ID NO: 710118 - RNA, 19 nt, Artificial Sequence
  Description of Artificial Sequence: Synthetic oligonucleotide
uugguauuuuauacaagug

SEQ ID NO: 710119 - RNA, 19 nt, Artificial Sequence
  Description of Artificial Sequence: Synthetic oligonucleotide
ugugguagguaucaagcac

SEQ ID NO: 710120 - RNA, 19 nt, Artificial Sequence
  Description of Artificial Sequence: Synthetic oligonucleotide
agacagguuaacuagguaa

SEQ ID NO: 710121 - RNA, 19 nt, Artificial Sequence
  Description of Artificial Sequence: Synthetic oligonucleotide
uagguaucaagcaccagga

SEQ ID NO: 710122 - RNA, 19 nt, Artificial Sequence
  Description of Artificial Sequence: Synthetic oligonucleotide
aaagguccccgacuacccc

SEQ ID NO: 710123 - RNA, 19 nt, Artificial Sequence
  Description of Artificial Sequence: Synthetic oligonucleotide
acuagguaacuuucacagc

SEQ ID NO: 710124 - RNA, 19 nt, Artificial Sequence
  Description of Artificial Sequence: Synthetic oligonucleotide
ugacuaaaauaaauagagu

SEQ ID NO: 710125 - RNA, 19 nt, Artificial Sequence
  Description of Artificial Sequence: Synthetic oligonucleotide
cauguggauagagagaccc

SEQ ID NO: 710126 - RNA, 19 nt, Artificial Sequence
  Description of Artificial Sequence: Synthetic oligonucleotide
cugcuaaugaggcaacugg

SEQ ID NO: 710127 - RNA, 19 nt, Artificial Sequence
  Description of Artificial Sequence: Synthetic oligonucleotide
uacuccccaaaauauaaga

SEQ ID NO: 710128 - RNA, 19 nt, Artificial Sequence
  Description of Artificial Sequence: Synthetic oligonucleotide
ucggugacacugcuaaagg

SEQ ID NO: 710129 - RNA, 19 nt, Artificial Sequence
  Description of Artificial Sequence: Synthetic oligonucleotide
aacauugugguagguauca

SEQ ID NO: 710130 - RNA, 19 nt, Artificial Sequence
  Description of Artificial Sequence: Synthetic oligonucleotide
gaaagcucgugguagggug

SEQ ID NO: 710131 - RNA, 19 nt, Artificial Sequence
  Description of Artificial Sequence: Synthetic oligonucleotide
uucaauaguccacuggcau

SEQ ID NO: 710132 - RNA, 19 nt, Artificial Sequence
  Description of Artificial Sequence: Synthetic oligonucleotide
ucuaacuggaggagcacca

SEQ ID NO: 710133 - RNA, 19 nt, Artificial Sequence
  Description of Artificial Sequence: Synthetic oligonucleotide
uauaggaugaaagcucgug

SEQ ID NO: 710134 - RNA, 19 nt, Artificial Sequence
  Description of Artificial Sequence: Synthetic oligonucleotide
aguguaacugugaugaugu

SEQ ID NO: 710135 - RNA, 19 nt, Artificial Sequence
  Description of Artificial Sequence: Synthetic oligonucleotide
ucaugaggguggaagaacu

SEQ ID NO: 710136 - RNA, 19 nt, Artificial Sequence
  Description of Artificial Sequence: Synthetic oligonucleotide
uugucguucagagacaggu

SEQ ID NO: 710137 - RNA, 19 nt, Artificial Sequence
  Description of Artificial Sequence: Synthetic oligonucleotide
gaaucggugacacugcuaa

SEQ ID NO: 710138 - RNA, 19 nt, Artificial Sequence
  Description of Artificial Sequence: Synthetic oligonucleotide
ugaugguacagccagucua

SEQ ID NO: 710139 - RNA, 19 nt, Artificial Sequence
  Description of Artificial Sequence: Synthetic oligonucleotide
uaacuagguaacuuucaca

SEQ ID NO: 710140 - RNA, 19 nt, Artificial Sequence
  Description of Artificial Sequence: Synthetic oligonucleotide
uaaaggaugagguccuuuc

SEQ ID NO: 710141 - RNA, 19 nt, Artificial Sequence
  Description of Artificial Sequence: Synthetic oligonucleotide
guaacuuucacagccacca

SEQ ID NO: 710142 - RNA, 19 nt, Artificial Sequence
  Description of Artificial Sequence: Synthetic oligonucleotide
agccuagaaaggcauuugg

SEQ ID NO: 710143 - RNA, 19 nt, Artificial Sequence
  Description of Artificial Sequence: Synthetic oligonucleotide
augacuaccaucaugggau

SEQ ID NO: 710144 - RNA, 19 nt, Artificial Sequence
  Description of Artificial Sequence: Synthetic oligonucleotide
gguauuuuauacaagugac

SEQ ID NO: 710145 - RNA, 19 nt, Artificial Sequence
  Description of Artificial Sequence: Synthetic oligonucleotide
aguaccgccuguugagccc

SEQ ID NO: 710146 - RNA, 19 nt, Artificial Sequence
  Description of Artificial Sequence: Synthetic oligonucleotide
guaucaagcaccaggauga

SEQ ID NO: 710147 - RNA, 19 nt, Artificial Sequence
  Description of Artificial Sequence: Synthetic oligonucleotide
ccaagcugaaacuugacag

SEQ ID NO: 710148 - RNA, 19 nt, Artificial Sequence
  Description of Artificial Sequence: Synthetic oligonucleotide
gaaagcucggacucacugc

SEQ ID NO: 710149 - RNA, 19 nt, Artificial Sequence
  Description of Artificial Sequence: Synthetic oligonucleotide
aucaauuggcuggaugggc

SEQ ID NO: 710150 - RNA, 19 nt, Artificial Sequence
  Description of Artificial Sequence: Synthetic oligonucleotide
ugaaacuugacaggccaag

SEQ ID NO: 710151 - RNA, 19 nt, Artificial Sequence
  Description of Artificial Sequence: Synthetic oligonucleotide
gguaccacuaaccaccacc

SEQ ID NO: 710152 - RNA, 19 nt, Artificial Sequence
  Description of Artificial Sequence: Synthetic oligonucleotide
uguacacaccaccagcuuc

SEQ ID NO: 710153 - RNA, 19 nt, Artificial Sequence
  Description of Artificial Sequence: Synthetic oligonucleotide
gaaggguuucuucacauaa

SEQ ID NO: 710154 - RNA, 19 nt, Artificial Sequence
  Description of Artificial Sequence: Synthetic oligonucleotide
cacuauaaggagcaccaag

SEQ ID NO: 710155 - RNA, 19 nt, Artificial Sequence
  Description of Artificial Sequence: Synthetic oligonucleotide
agcucugacggcuagcugu

SEQ ID NO: 710156 - RNA, 19 nt, Artificial Sequence
  Description of Artificial Sequence: Synthetic oligonucleotide
uaggcugguacucuccagc

SEQ ID NO: 710157 - RNA, 19 nt, Artificial Sequence
  Description of Artificial Sequence: Synthetic oligonucleotide
gagaccccggcuuucacag

SEQ ID NO: 710158 - RNA, 19 nt, Artificial Sequence
  Description of Artificial Sequence: Synthetic oligonucleotide
agagacauuguggaaucgg

SEQ ID NO: 710159 - RNA, 19 nt, Artificial Sequence
  Description of Artificial Sequence: Synthetic oligonucleotide
gaaacuugacaggccaagg

SEQ ID NO: 710160 - RNA, 19 nt, Artificial Sequence
  Description of Artificial Sequence: Synthetic oligonucleotide
aucaugggauuauagggga

SEQ ID NO: 710161 - RNA, 19 nt, Artificial Sequence
  Description of Artificial Sequence: Synthetic oligonucleotide
acccaaugcggccucaggg

SEQ ID NO: 710162 - RNA, 19 nt, Artificial Sequence
  Description of Artificial Sequence: Synthetic oligonucleotide
uuuccaugcgugguggccg

SEQ ID NO: 710163 - RNA, 19 nt, Artificial Sequence
  Description of Artificial Sequence: Synthetic oligonucleotide
guaauagugcucauagaug

SEQ ID NO: 710164 - RNA, 19 nt, Artificial Sequence
  Description of Artificial Sequence: Synthetic oligonucleotide
aaugaggcaacuggaggug

SEQ ID NO: 710165 - RNA, 19 nt, Artificial Sequence
  Description of Artificial Sequence: Synthetic oligonucleotide
gaucaauuggcuggauggg

SEQ ID NO: 710166 - RNA, 19 nt, Artificial Sequence
  Description of Artificial Sequence: Synthetic oligonucleotide
cucaucagagucuccuagg

SEQ ID NO: 710167 - RNA, 19 nt, Artificial Sequence
  Description of Artificial Sequence: Synthetic oligonucleotide
ucaguggaacugcugaauc

SEQ ID NO: 710168 - RNA, 19 nt, Artificial Sequence
  Description of Artificial Sequence: Synthetic oligonucleotide
guaacaaaggcagcuacac

SEQ ID NO: 710169 - RNA, 19 nt, Artificial Sequence
  Description of Artificial Sequence: Synthetic oligonucleotide
aggaguaccgccuguugag

SEQ ID NO: 710170 - RNA, 19 nt, Artificial Sequence
  Description of Artificial Sequence: Synthetic oligonucleotide
uaggaguaccgccuguuga

SEQ ID NO: 710171 - RNA, 19 nt, Artificial Sequence
  Description of Artificial Sequence: Synthetic oligonucleotide
auagaguaacaaaggcagc

SEQ ID NO: 710172 - RNA, 19 nt, Artificial Sequence
  Description of Artificial Sequence: Synthetic oligonucleotide
ucuaggguacccaggcccc

SEQ ID NO: 710173 - RNA, 19 nt, Artificial Sequence
  Description of Artificial Sequence: Synthetic oligonucleotide
acggcuagcugucaguucu

SEQ ID NO: 710174 - RNA, 19 nt, Artificial Sequence
  Description of Artificial Sequence: Synthetic oligonucleotide
ggagauuaggaguaccgcc

SEQ ID NO: 710175 - RNA, 19 nt, Artificial Sequence
  Description of Artificial Sequence: Synthetic oligonucleotide
aaaauucacugggguugcc

SEQ ID NO: 710176 - RNA, 19 nt, Artificial Sequence
  Description of Artificial Sequence: Synthetic oligonucleotide
uggauagagagaccccggc

SEQ ID NO: 710177 - RNA, 19 nt, Artificial Sequence
  Description of Artificial Sequence: Synthetic oligonucleotide
agaggccauguccaugugg

SEQ ID NO: 710178 - RNA, 19 nt, Artificial Sequence
  Description of Artificial Sequence: Synthetic oligonucleotide
ucugacggcuagcugucag

SEQ ID NO: 710179 - RNA, 19 nt, Artificial Sequence
  Description of Artificial Sequence: Synthetic oligonucleotide
gaagagcucggagauuagg

SEQ ID NO: 710180 - RNA, 19 nt, Artificial Sequence
  Description of Artificial Sequence: Synthetic oligonucleotide
aggcacuauaaggagcacc

SEQ ID NO: 710181 - RNA, 19 nt, Artificial Sequence
  Description of Artificial Sequence: Synthetic oligonucleotide
ucaugacuaccaucauggg

SEQ ID NO: 710182 - RNA, 19 nt, Artificial Sequence
  Description of Artificial Sequence: Synthetic oligonucleotide
cugucuaggguacccaggc

SEQ ID NO: 710183 - RNA, 19 nt, Artificial Sequence
  Description of Artificial Sequence: Synthetic oligonucleotide
ccuucaauaguccacuggc

SEQ ID NO: 710184 - RNA, 19 nt, Artificial Sequence
  Description of Artificial Sequence: Synthetic oligonucleotide
cguaaguauaggaugaaag

SEQ ID NO: 710185 - RNA, 19 nt, Artificial Sequence
  Description of Artificial Sequence: Synthetic oligonucleotide
ugaaucuacucaugguguc

SEQ ID NO: 710186 - RNA, 19 nt, Artificial Sequence
  Description of Artificial Sequence: Synthetic oligonucleotide
accaagcugaaacuugaca

SEQ ID NO: 710187 - RNA, 19 nt, Artificial Sequence
  Description of Artificial Sequence: Synthetic oligonucleotide
uccccgacuaccccugagg

SEQ ID NO: 710188 - RNA, 19 nt, Artificial Sequence
  Description of Artificial Sequence: Synthetic oligonucleotide
ugagucccgccuucaauag

SEQ ID NO: 710189 - RNA, 19 nt, Artificial Sequence
  Description of Artificial Sequence: Synthetic oligonucleotide
aaagcucgugguagggugg

SEQ ID NO: 710190 - RNA, 19 nt, Artificial Sequence
  Description of Artificial Sequence: Synthetic oligonucleotide
ugguagguaucaagcacca

SEQ ID NO: 710191 - RNA, 19 nt, Artificial Sequence
  Description of Artificial Sequence: Synthetic oligonucleotide
agcucggacucacugccac

SEQ ID NO: 710192 - RNA, 19 nt, Artificial Sequence
  Description of Artificial Sequence: Synthetic oligonucleotide
uagguaacuuucacagcca

SEQ ID NO: 710193 - RNA, 19 nt, Artificial Sequence
  Description of Artificial Sequence: Synthetic oligonucleotide
aaguaaucuuguugacagu

SEQ ID NO: 710194 - RNA, 19 nt, Artificial Sequence
  Description of Artificial Sequence: Synthetic oligonucleotide
agguuaacuagguaacuuu

SEQ ID NO: 710195 - RNA, 19 nt, Artificial Sequence
  Description of Artificial Sequence: Synthetic oligonucleotide
caaagguccccgacuaccc

SEQ ID NO: 710196 - RNA, 19 nt, Artificial Sequence
  Description of Artificial Sequence: Synthetic oligonucleotide
gguuagaaggguuucuuca

SEQ ID NO: 710197 - RNA, 19 nt, Artificial Sequence
  Description of Artificial Sequence: Synthetic oligonucleotide
gacgagccagauguaauag

SEQ ID NO: 710198 - RNA, 19 nt, Artificial Sequence
  Description of Artificial Sequence: Synthetic oligonucleotide
cuacacaguccccauguac

SEQ ID NO: 710199 - RNA, 19 nt, Artificial Sequence
  Description of Artificial Sequence: Synthetic oligonucleotide
gagcccaggucucuaacug

SEQ ID NO: 710200 - RNA, 19 nt, Artificial Sequence
  Description of Artificial Sequence: Synthetic oligonucleotide
uggaagagcucggagauua

SEQ ID NO: 710201 - RNA, 19 nt, Artificial Sequence
  Description of Artificial Sequence: Synthetic oligonucleotide
cccacuggaaccaucauug

SEQ ID NO: 710202 - RNA, 19 nt, Artificial Sequence
  Description of Artificial Sequence: Synthetic oligonucleotide
uugagccccuggauggagg

SEQ ID NO: 710203 - RNA, 19 nt, Artificial Sequence
  Description of Artificial Sequence: Synthetic oligonucleotide
aaugcggccucaggguagg

SEQ ID NO: 710204 - RNA, 19 nt, Artificial Sequence
  Description of Artificial Sequence: Synthetic oligonucleotide
ucauugucguucagagaca

SEQ ID NO: 710205 - RNA, 19 nt, Artificial Sequence
  Description of Artificial Sequence: Synthetic oligonucleotide
cucgugguaggguggaggc

SEQ ID NO: 710206 - RNA, 19 nt, Artificial Sequence
  Description of Artificial Sequence: Synthetic oligonucleotide
aaucuacucauggugucau

SEQ ID NO: 710207 - RNA, 19 nt, Artificial Sequence
  Description of Artificial Sequence: Synthetic oligonucleotide
gaggguggaagaacucucg

SEQ ID NO: 710208 - RNA, 19 nt, Artificial Sequence
  Description of Artificial Sequence: Synthetic oligonucleotide
aagguccccgacuaccccu

SEQ ID NO: 710209 - RNA, 19 nt, Artificial Sequence
  Description of Artificial Sequence: Synthetic oligonucleotide
uccuuuccaugcguggugg

SEQ ID NO: 710210 - RNA, 19 nt, Artificial Sequence
  Description of Artificial Sequence: Synthetic oligonucleotide
ggcaucaugacuaccauca

SEQ ID NO: 710211 - RNA, 19 nt, Artificial Sequence
  Description of Artificial Sequence: Synthetic oligonucleotide
gaguaccgccuguugagcc

SEQ ID NO: 710212 - RNA, 19 nt, Artificial Sequence
  Description of Artificial Sequence: Synthetic oligonucleotide
ugcugucuaggguacccag

SEQ ID NO: 710213 - RNA, 19 nt, Artificial Sequence
  Description of Artificial Sequence: Synthetic oligonucleotide
aggcaucaugacuaccauc

SEQ ID NO: 710214 - RNA, 19 nt, Artificial Sequence
  Description of Artificial Sequence: Synthetic oligonucleotide
guaccacuaaccaccaccc

SEQ ID NO: 710215 - RNA, 19 nt, Artificial Sequence
  Description of Artificial Sequence: Synthetic oligonucleotide
uuggacugcugucuagggu

SEQ ID NO: 710216 - RNA, 19 nt, Artificial Sequence
  Description of Artificial Sequence: Synthetic oligonucleotide
caugacuaccaucauggga

SEQ ID NO: 710217 - RNA, 19 nt, Artificial Sequence
  Description of Artificial Sequence: Synthetic oligonucleotide
agguccuuuccaugcgugg

SEQ ID NO: 710218 - RNA, 19 nt, Artificial Sequence
  Description of Artificial Sequence: Synthetic oligonucleotide
cauugucguucagagacag

SEQ ID NO: 710219 - RNA, 19 nt, Artificial Sequence
  Description of Artificial Sequence: Synthetic oligonucleotide
ggaaagcucggacucacug

SEQ ID NO: 710220 - RNA, 19 nt, Artificial Sequence
  Description of Artificial Sequence: Synthetic oligonucleotide
ucguucagagacagguuaa

SEQ ID NO: 710221 - RNA, 19 nt, Artificial Sequence
  Description of Artificial Sequence: Synthetic oligonucleotide
agcggagugugacacccag

SEQ ID NO: 710222 - RNA, 19 nt, Artificial Sequence
  Description of Artificial Sequence: Synthetic oligonucleotide
guggccgcugcuuucuccg

SEQ ID NO: 710223 - RNA, 19 nt, Artificial Sequence
  Description of Artificial Sequence: Synthetic oligonucleotide
gacacugcuaaaggaugag

SEQ ID NO: 710224 - RNA, 19 nt, Artificial Sequence
  Description of Artificial Sequence: Synthetic oligonucleotide
guuaacuagguaacuuuca

SEQ ID NO: 710225 - RNA, 19 nt, Artificial Sequence
  Description of Artificial Sequence: Synthetic oligonucleotide
uccgucaccccgcucauua

SEQ ID NO: 710226 - RNA, 19 nt, Artificial Sequence
  Description of Artificial Sequence: Synthetic oligonucleotide
uggcgcuugaggaggcggg

SEQ ID NO: 710227 - RNA, 19 nt, Artificial Sequence
  Description of Artificial Sequence: Synthetic oligonucleotide
ucaggguaggcccuacaua

SEQ ID NO: 710228 - RNA, 19 nt, Artificial Sequence
  Description of Artificial Sequence: Synthetic oligonucleotide
caggcagcgggaucaauug

SEQ ID NO: 710229 - RNA, 19 nt, Artificial Sequence
  Description of Artificial Sequence: Synthetic oligonucleotide
uccuaggcugguacucucc

SEQ ID NO: 710230 - RNA, 19 nt, Artificial Sequence
  Description of Artificial Sequence: Synthetic oligonucleotide
gaggccauguccaugugga

SEQ ID NO: 710231 - RNA, 19 nt, Artificial Sequence
  Description of Artificial Sequence: Synthetic oligonucleotide
caccguaaguauaggauga

SEQ ID NO: 710232 - RNA, 19 nt, Artificial Sequence
  Description of Artificial Sequence: Synthetic oligonucleotide
uggaagcucugacggcuag

SEQ ID NO: 710233 - RNA, 19 nt, Artificial Sequence
  Description of Artificial Sequence: Synthetic oligonucleotide
uggaaucggugacacugcu

SEQ ID NO: 710234 - RNA, 19 nt, Artificial Sequence
  Description of Artificial Sequence: Synthetic oligonucleotide
aguccccauguacacacca

SEQ ID NO: 710235 - RNA, 19 nt, Artificial Sequence
  Description of Artificial Sequence: Synthetic oligonucleotide
gugacugcuaaugaggcaa

SEQ ID NO: 710236 - RNA, 19 nt, Artificial Sequence
  Description of Artificial Sequence: Synthetic oligonucleotide
accaaagguccccgacuac

SEQ ID NO: 710237 - RNA, 19 nt, Artificial Sequence
  Description of Artificial Sequence: Synthetic oligonucleotide
ccaagugacugcuaaugag

SEQ ID NO: 710238 - RNA, 19 nt, Artificial Sequence
  Description of Artificial Sequence: Synthetic oligonucleotide
uugggauggugaucuugag

SEQ ID NO: 710239 - RNA, 19 nt, Artificial Sequence
  Description of Artificial Sequence: Synthetic oligonucleotide
cucuaacuggaggagcacc

SEQ ID NO: 710240 - RNA, 19 nt, Artificial Sequence
  Description of Artificial Sequence: Synthetic oligonucleotide
gcugaaacuugacaggcca

SEQ ID NO: 710241 - RNA, 19 nt, Artificial Sequence
  Description of Artificial Sequence: Synthetic oligonucleotide
agcagcggagugugacacc

SEQ ID NO: 710242 - RNA, 19 nt, Artificial Sequence
  Description of Artificial Sequence: Synthetic oligonucleotide
gaaucuacucaugguguca

SEQ ID NO: 710243 - RNA, 19 nt, Artificial Sequence
  Description of Artificial Sequence: Synthetic oligonucleotide
aggaugagguccuuuccau

SEQ ID NO: 710244 - RNA, 19 nt, Artificial Sequence
  Description of Artificial Sequence: Synthetic oligonucleotide
ugagccuagaaaggcauuu

SEQ ID NO: 710245 - RNA, 19 nt, Artificial Sequence
  Description of Artificial Sequence: Synthetic oligonucleotide
gauagagagaccccggcuu

SEQ ID NO: 710246 - RNA, 19 nt, Artificial Sequence
  Description of Artificial Sequence: Synthetic oligonucleotide
cuucaauaguccacuggca

SEQ ID NO: 710247 - RNA, 19 nt, Artificial Sequence
  Description of Artificial Sequence: Synthetic oligonucleotide
cuuuccaugcgugguggcc

SEQ ID NO: 710248 - RNA, 19 nt, Artificial Sequence
  Description of Artificial Sequence: Synthetic oligonucleotide
uaacuuucacagccaccac

SEQ ID NO: 710249 - RNA, 19 nt, Artificial Sequence
  Description of Artificial Sequence: Synthetic oligonucleotide
ccuagaaaggcauuuggga

SEQ ID NO: 710250 - RNA, 19 nt, Artificial Sequence
  Description of Artificial Sequence: Synthetic oligonucleotide
gacccaaugcggccucagg

SEQ ID NO: 710251 - RNA, 19 nt, Artificial Sequence
  Description of Artificial Sequence: Synthetic oligonucleotide
aggcagcgggaucaauugg

SEQ ID NO: 710252 - RNA, 19 nt, Artificial Sequence
  Description of Artificial Sequence: Synthetic oligonucleotide
auacuccccaaaauauaag

SEQ ID NO: 710253 - RNA, 19 nt, Artificial Sequence
  Description of Artificial Sequence: Synthetic oligonucleotide
ugaaagcucgugguagggu

SEQ ID NO: 710254 - RNA, 19 nt, Artificial Sequence
  Description of Artificial Sequence: Synthetic oligonucleotide
ugacugcuaaugaggcaac

SEQ ID NO: 710255 - RNA, 19 nt, Artificial Sequence
  Description of Artificial Sequence: Synthetic oligonucleotide
gacuuugacucaggggccc

SEQ ID NO: 710256 - RNA, 19 nt, Artificial Sequence
  Description of Artificial Sequence: Synthetic oligonucleotide
agagacagguuaacuaggu

SEQ ID NO: 710257 - RNA, 19 nt, Artificial Sequence
  Description of Artificial Sequence: Synthetic oligonucleotide
guaggcccuacauaacauc

SEQ ID NO: 710258 - RNA, 19 nt, Artificial Sequence
  Description of Artificial Sequence: Synthetic oligonucleotide
augaugguacagccagucu

SEQ ID NO: 710259 - RNA, 19 nt, Artificial Sequence
  Description of Artificial Sequence: Synthetic oligonucleotide
acgagccagauguaauagu

SEQ ID NO: 710260 - RNA, 19 nt, Artificial Sequence
  Description of Artificial Sequence: Synthetic oligonucleotide
cuucgguggcgcuugagga

SEQ ID NO: 710261 - RNA, 19 nt, Artificial Sequence
  Description of Artificial Sequence: Synthetic oligonucleotide
uaaccaccacccacccucc

SEQ ID NO: 710262 - RNA, 19 nt, Artificial Sequence
  Description of Artificial Sequence: Synthetic oligonucleotide
uccuuggacugcugucuag

SEQ ID NO: 710263 - RNA, 19 nt, Artificial Sequence
  Description of Artificial Sequence: Synthetic oligonucleotide
aggguauccuggucagaag

SEQ ID NO: 710264 - RNA, 19 nt, Artificial Sequence
  Description of Artificial Sequence: Synthetic oligonucleotide
agccuugaggugccacugg

SEQ ID NO: 710265 - RNA, 19 nt, Artificial Sequence
  Description of Artificial Sequence: Synthetic oligonucleotide
caaugcggccucaggguag

SEQ ID NO: 710266 - RNA, 19 nt, Artificial Sequence
  Description of Artificial Sequence: Synthetic oligonucleotide
cugaaucuacucauggugu

SEQ ID NO: 710267 - RNA, 19 nt, Artificial Sequence
  Description of Artificial Sequence: Synthetic oligonucleotide
ccaccguaaguauaggaug

SEQ ID NO: 710268 - RNA, 19 nt, Artificial Sequence
  Description of Artificial Sequence: Synthetic oligonucleotide
acagguuaacuagguaacu

SEQ ID NO: 710269 - RNA, 19 nt, Artificial Sequence
  Description of Artificial Sequence: Synthetic oligonucleotide
cacugcuaaaggaugaggu

SEQ ID NO: 710270 - RNA, 19 nt, Artificial Sequence
  Description of Artificial Sequence: Synthetic oligonucleotide
agauggcccaggaaguuug

SEQ ID NO: 710271 - RNA, 19 nt, Artificial Sequence
  Description of Artificial Sequence: Synthetic oligonucleotide
ggcacuauaaggagcacca

SEQ ID NO: 710272 - RNA, 19 nt, Artificial Sequence
  Description of Artificial Sequence: Synthetic oligonucleotide
cuaggcugguacucuccag

SEQ ID NO: 710273 - RNA, 19 nt, Artificial Sequence
  Description of Artificial Sequence: Synthetic oligonucleotide
acuccccaaaauauaagaa

SEQ ID NO: 710274 - RNA, 19 nt, Artificial Sequence
  Description of Artificial Sequence: Synthetic oligonucleotide
aggucucuaacuggaggag

SEQ ID NO: 710275 - RNA, 19 nt, Artificial Sequence
  Description of Artificial Sequence: Synthetic oligonucleotide
agagcccggauaagcaggg

SEQ ID NO: 710276 - RNA, 19 nt, Artificial Sequence
  Description of Artificial Sequence: Synthetic oligonucleotide
aggaugaacacaggcacua

SEQ ID NO: 710277 - RNA, 19 nt, Artificial Sequence
  Description of Artificial Sequence: Synthetic oligonucleotide
cuaacuggaggagcaccag

SEQ ID NO: 710278 - RNA, 19 nt, Artificial Sequence
  Description of Artificial Sequence: Synthetic oligonucleotide
uaccacuaaccaccaccca

SEQ ID NO: 710279 - RNA, 19 nt, Artificial Sequence
  Description of Artificial Sequence: Synthetic oligonucleotide
aaucggugacacugcuaaa

SEQ ID NO: 710280 - RNA, 19 nt, Artificial Sequence
  Description of Artificial Sequence: Synthetic oligonucleotide
auaguccacuggcauacuu

SEQ ID NO: 710281 - RNA, 19 nt, Artificial Sequence
  Description of Artificial Sequence: Synthetic oligonucleotide
caauuggcuggaugggcuc

SEQ ID NO: 710282 - RNA, 19 nt, Artificial Sequence
  Description of Artificial Sequence: Synthetic oligonucleotide
caugggauuauaggggaga

SEQ ID NO: 710283 - RNA, 19 nt, Artificial Sequence
  Description of Artificial Sequence: Synthetic oligonucleotide
ucuccuaggcugguacucu

SEQ ID NO: 710284 - RNA, 19 nt, Artificial Sequence
  Description of Artificial Sequence: Synthetic oligonucleotide
ggcccuacauaacaucuac

SEQ ID NO: 710285 - RNA, 19 nt, Artificial Sequence
  Description of Artificial Sequence: Synthetic oligonucleotide
agauguaauagugcucaua

SEQ ID NO: 710286 - RNA, 19 nt, Artificial Sequence
  Description of Artificial Sequence: Synthetic oligonucleotide
gggaucaauuggcuggaug

SEQ ID NO: 710287 - RNA, 19 nt, Artificial Sequence
  Description of Artificial Sequence: Synthetic oligonucleotide
gguauccuggucagaagcc

SEQ ID NO: 710288 - RNA, 19 nt, Artificial Sequence
  Description of Artificial Sequence: Synthetic oligonucleotide
cgagccagauguaauagug

SEQ ID NO: 710289 - RNA, 19 nt, Artificial Sequence
  Description of Artificial Sequence: Synthetic oligonucleotide
cugguaggagaagguaggc

SEQ ID NO: 710290 - RNA, 19 nt, Artificial Sequence
  Description of Artificial Sequence: Synthetic oligonucleotide
cuauaaggagcaccaagcu

SEQ ID NO: 710291 - RNA, 19 nt, Artificial Sequence
  Description of Artificial Sequence: Synthetic oligonucleotide
agucuccuaggcugguacu

SEQ ID NO: 710292 - RNA, 19 nt, Artificial Sequence
  Description of Artificial Sequence: Synthetic oligonucleotide
gccacugccagacuuugac

SEQ ID NO: 710293 - RNA, 19 nt, Artificial Sequence
  Description of Artificial Sequence: Synthetic oligonucleotide
ccgacuaccccugaggaag

SEQ ID NO: 710294 - RNA, 19 nt, Artificial Sequence
  Description of Artificial Sequence: Synthetic oligonucleotide
ucggacucacugccacugc

SEQ ID NO: 710295 - RNA, 19 nt, Artificial Sequence
  Description of Artificial Sequence: Synthetic oligonucleotide
cagagcagcggagugugac

SEQ ID NO: 710296 - RNA, 19 nt, Artificial Sequence
  Description of Artificial Sequence: Synthetic oligonucleotide
ccccaaaaggcuuauaaaa

SEQ ID NO: 710297 - RNA, 19 nt, Artificial Sequence
  Description of Artificial Sequence: Synthetic oligonucleotide
aauaguccacuggcauacu

SEQ ID NO: 710298 - RNA, 19 nt, Artificial Sequence
  Description of Artificial Sequence: Synthetic oligonucleotide
cacccacccuccaagugac

SEQ ID NO: 710299 - RNA, 19 nt, Artificial Sequence
  Description of Artificial Sequence: Synthetic oligonucleotide
gaacucucguacccagcca

SEQ ID NO: 710300 - RNA, 19 nt, Artificial Sequence
  Description of Artificial Sequence: Synthetic oligonucleotide
auuauaggggagagccaug

SEQ ID NO: 710301 - RNA, 19 nt, Artificial Sequence
  Description of Artificial Sequence: Synthetic oligonucleotide
uuccaugcgugguggccgc

SEQ ID NO: 710302 - RNA, 19 nt, Artificial Sequence
  Description of Artificial Sequence: Synthetic oligonucleotide
ugugucggaugagucccgc

SEQ ID NO: 710303 - RNA, 19 nt, Artificial Sequence
  Description of Artificial Sequence: Synthetic oligonucleotide
cuggaaagcucggacucac

SEQ ID NO: 710304 - RNA, 19 nt, Artificial Sequence
  Description of Artificial Sequence: Synthetic oligonucleotide
ucucuaacuggaggagcac

SEQ ID NO: 710305 - RNA, 19 nt, Artificial Sequence
  Description of Artificial Sequence: Synthetic oligonucleotide
uucuccgccuucgguggcg

SEQ ID NO: 710306 - RNA, 19 nt, Artificial Sequence
  Description of Artificial Sequence: Synthetic oligonucleotide
agaccccggcuuucacagc

SEQ ID NO: 710307 - RNA, 19 nt, Artificial Sequence
  Description of Artificial Sequence: Synthetic oligonucleotide
caccccgcucauuacuuug

SEQ ID NO: 710308 - RNA, 19 nt, Artificial Sequence
  Description of Artificial Sequence: Synthetic oligonucleotide
ucccgccuucaauagucca

SEQ ID NO: 710309 - RNA, 19 nt, Artificial Sequence
  Description of Artificial Sequence: Synthetic oligonucleotide
ugggguuagaaggguuucu

SEQ ID NO: 710310 - RNA, 19 nt, Artificial Sequence
  Description of Artificial Sequence: Synthetic oligonucleotide
cccuacauaacaucuacaa

SEQ ID NO: 710311 - RNA, 19 nt, Artificial Sequence
  Description of Artificial Sequence: Synthetic oligonucleotide
aucugagccuagaaaggca

SEQ ID NO: 710312 - RNA, 19 nt, Artificial Sequence
  Description of Artificial Sequence: Synthetic oligonucleotide
ggaugagguccuuuccaug

SEQ ID NO: 710313 - RNA, 19 nt, Artificial Sequence
  Description of Artificial Sequence: Synthetic oligonucleotide
acuaaccaccacccacccu

SEQ ID NO: 710314 - RNA, 19 nt, Artificial Sequence
  Description of Artificial Sequence: Synthetic oligonucleotide
cuccaccguaaguauagga

SEQ ID NO: 710315 - RNA, 19 nt, Artificial Sequence
  Description of Artificial Sequence: Synthetic oligonucleotide
guggaaucggugacacugc

SEQ ID NO: 710316 - RNA, 19 nt, Artificial Sequence
  Description of Artificial Sequence: Synthetic oligonucleotide
caccaagcugaaacuugac

SEQ ID NO: 710317 - RNA, 19 nt, Artificial Sequence
  Description of Artificial Sequence: Synthetic oligonucleotide
ggcagcgggaucaauuggc

SEQ ID NO: 710318 - RNA, 19 nt, Artificial Sequence
  Description of Artificial Sequence: Synthetic oligonucleotide
agguaucaagcaccaggau

SEQ ID NO: 710319 - RNA, 19 nt, Artificial Sequence
  Description of Artificial Sequence: Synthetic oligonucleotide
uaccccugaggaaggggaa

SEQ ID NO: 710320 - RNA, 19 nt, Artificial Sequence
  Description of Artificial Sequence: Synthetic oligonucleotide
ggucccgaacuucuagccc

SEQ ID NO: 710321 - RNA, 19 nt, Artificial Sequence
  Description of Artificial Sequence: Synthetic oligonucleotide
gacuaccccugaggaaggg

SEQ ID NO: 710322 - RNA, 19 nt, Artificial Sequence
  Description of Artificial Sequence: Synthetic oligonucleotide
guccauagggauggagccc

SEQ ID NO: 710323 - RNA, 19 nt, Artificial Sequence
  Description of Artificial Sequence: Synthetic oligonucleotide
uugacccacugcuccggcu

SEQ ID NO: 710324 - RNA, 19 nt, Artificial Sequence
  Description of Artificial Sequence: Synthetic oligonucleotide
ccaaagguccccgacuacc

SEQ ID NO: 710325 - RNA, 19 nt, Artificial Sequence
  Description of Artificial Sequence: Synthetic oligonucleotide
aagcucgugguagggugga

SEQ ID NO: 710326 - RNA, 19 nt, Artificial Sequence
  Description of Artificial Sequence: Synthetic oligonucleotide
cagcgggaucaauuggcug

SEQ ID NO: 710327 - RNA, 19 nt, Artificial Sequence
  Description of Artificial Sequence: Synthetic oligonucleotide
guugacccacugcuccggc

SEQ ID NO: 710328 - RNA, 19 nt, Artificial Sequence
  Description of Artificial Sequence: Synthetic oligonucleotide
gaugagucccgccuucaau

SEQ ID NO: 710329 - RNA, 19 nt, Artificial Sequence
  Description of Artificial Sequence: Synthetic oligonucleotide
accccgcucauuacuuugg

SEQ ID NO: 710330 - RNA, 19 nt, Artificial Sequence
  Description of Artificial Sequence: Synthetic oligonucleotide
guggcgcuugaggaggcgg

SEQ ID NO: 710331 - RNA, 19 nt, Artificial Sequence
  Description of Artificial Sequence: Synthetic oligonucleotide
gacggcuagcugucaguuc

SEQ ID NO: 710332 - RNA, 19 nt, Artificial Sequence
  Description of Artificial Sequence: Synthetic oligonucleotide
ugacggcuagcugucaguu

SEQ ID NO: 710333 - RNA, 19 nt, Artificial Sequence
  Description of Artificial Sequence: Synthetic oligonucleotide
guugagccccuggauggag

SEQ ID NO: 710334 - RNA, 19 nt, Artificial Sequence
  Description of Artificial Sequence: Synthetic oligonucleotide
acucucguacccagccagg

SEQ ID NO: 710335 - RNA, 19 nt, Artificial Sequence
  Description of Artificial Sequence: Synthetic oligonucleotide
ggucucuaacuggaggagc

SEQ ID NO: 710336 - RNA, 19 nt, Artificial Sequence
  Description of Artificial Sequence: Synthetic oligonucleotide
gcggccucaggguaggccc

SEQ ID NO: 710337 - RNA, 19 nt, Artificial Sequence
  Description of Artificial Sequence: Synthetic oligonucleotide
gguggucauauucuggggu

SEQ ID NO: 710338 - RNA, 19 nt, Artificial Sequence
  Description of Artificial Sequence: Synthetic oligonucleotide
gauuaggaguaccgccugu

SEQ ID NO: 710339 - RNA, 19 nt, Artificial Sequence
  Description of Artificial Sequence: Synthetic oligonucleotide
ggguuagaaggguuucuuc

SEQ ID NO: 710340 - RNA, 19 nt, Artificial Sequence
  Description of Artificial Sequence: Synthetic oligonucleotide
gcauuugggauggugaucu

SEQ ID NO: 710341 - RNA, 19 nt, Artificial Sequence
  Description of Artificial Sequence: Synthetic oligonucleotide
agagagaccccggcuuuca

SEQ ID NO: 710342 - RNA, 19 nt, Artificial Sequence
  Description of Artificial Sequence: Synthetic oligonucleotide
ccaggguaccacuaaccac

SEQ ID NO: 710343 - RNA, 19 nt, Artificial Sequence
  Description of Artificial Sequence: Synthetic oligonucleotide
gcugucuaggguacccagg

SEQ ID NO: 710344 - RNA, 19 nt, Artificial Sequence
  Description of Artificial Sequence: Synthetic oligonucleotide
ugugggcuguaugggugug

SEQ ID NO: 710345 - RNA, 19 nt, Artificial Sequence
  Description of Artificial Sequence: Synthetic oligonucleotide
cugaaacuugacaggccaa

SEQ ID NO: 710346 - RNA, 19 nt, Artificial Sequence
  Description of Artificial Sequence: Synthetic oligonucleotide
cccauguacacaccaccag

SEQ ID NO: 710347 - RNA, 19 nt, Artificial Sequence
  Description of Artificial Sequence: Synthetic oligonucleotide
gaggaggcgggaggcacug

SEQ ID NO: 710348 - RNA, 19 nt, Artificial Sequence
  Description of Artificial Sequence: Synthetic oligonucleotide
cuccuaggcugguacucuc

SEQ ID NO: 710349 - RNA, 19 nt, Artificial Sequence
  Description of Artificial Sequence: Synthetic oligonucleotide
cugggguuagaaggguuuc

SEQ ID NO: 710350 - RNA, 19 nt, Artificial Sequence
  Description of Artificial Sequence: Synthetic oligonucleotide
gagagaccccggcuuucac

SEQ ID NO: 710351 - RNA, 19 nt, Artificial Sequence
  Description of Artificial Sequence: Synthetic oligonucleotide
guccacuggcauacuuccg

SEQ ID NO: 710352 - RNA, 19 nt, Artificial Sequence
  Description of Artificial Sequence: Synthetic oligonucleotide
gucuccuaggcugguacuc

SEQ ID NO: 710353 - RNA, 19 nt, Artificial Sequence
  Description of Artificial Sequence: Synthetic oligonucleotide
gugucggaugagucccgcc

SEQ ID NO: 710354 - RNA, 19 nt, Artificial Sequence
  Description of Artificial Sequence: Synthetic oligonucleotide
gcucgugguaggguggagg

SEQ ID NO: 710355 - RNA, 19 nt, Artificial Sequence
  Description of Artificial Sequence: Synthetic oligonucleotide
cccggauaagcagggaagg

SEQ ID NO: 710356 - RNA, 19 nt, Artificial Sequence
  Description of Artificial Sequence: Synthetic oligonucleotide
ggcacggacccaaugcggc

SEQ ID NO: 710357 - RNA, 19 nt, Artificial Sequence
  Description of Artificial Sequence: Synthetic oligonucleotide
accguaaguauaggaugaa

SEQ ID NO: 710358 - RNA, 19 nt, Artificial Sequence
  Description of Artificial Sequence: Synthetic oligonucleotide
gccgaaggcugccuccccg

SEQ ID NO: 710359 - RNA, 19 nt, Artificial Sequence
  Description of Artificial Sequence: Synthetic oligonucleotide
uccagccuugaggugccac

SEQ ID NO: 710360 - RNA, 19 nt, Artificial Sequence
  Description of Artificial Sequence: Synthetic oligonucleotide
ccuacauaacaucuacaaa

SEQ ID NO: 710361 - RNA, 19 nt, Artificial Sequence
  Description of Artificial Sequence: Synthetic oligonucleotide
ggcuagcugucaguucugg

SEQ ID NO: 710362 - RNA, 19 nt, Artificial Sequence
  Description of Artificial Sequence: Synthetic oligonucleotide
cccgccuucaauaguccac

SEQ ID NO: 710363 - RNA, 19 nt, Artificial Sequence
  Description of Artificial Sequence: Synthetic oligonucleotide
gccuccgucaccccgcuca

SEQ ID NO: 710364 - RNA, 19 nt, Artificial Sequence
  Description of Artificial Sequence: Synthetic oligonucleotide
ggacgagccagauguaaua

SEQ ID NO: 710365 - RNA, 19 nt, Artificial Sequence
  Description of Artificial Sequence: Synthetic oligonucleotide
gguggccgcugcuuucucc

SEQ ID NO: 710366 - RNA, 19 nt, Artificial Sequence
  Description of Artificial Sequence: Synthetic oligonucleotide
gugugucggaugagucccg

SEQ ID NO: 710367 - RNA, 19 nt, Artificial Sequence
  Description of Artificial Sequence: Synthetic oligonucleotide
guauggguguggggcuggg

SEQ ID NO: 710368 - RNA, 19 nt, Artificial Sequence
  Description of Artificial Sequence: Synthetic oligonucleotide
guggucauauucugggguu

SEQ ID NO: 710369 - RNA, 19 nt, Artificial Sequence
  Description of Artificial Sequence: Synthetic oligonucleotide
cccgcucauuacuuuggcc

SEQ ID NO: 710370 - RNA, 19 nt, Artificial Sequence
  Description of Artificial Sequence: Synthetic oligonucleotide
guccccgacuaccccugag

SEQ ID NO: 710371 - RNA, 19 nt, Artificial Sequence
  Description of Artificial Sequence: Synthetic oligonucleotide
ggaguaccgccuguugagc

SEQ ID NO: 710372 - RNA, 19 nt, Artificial Sequence
  Description of Artificial Sequence: Synthetic oligonucleotide
gggcacggacccaaugcgg

SEQ ID NO: 710373 - RNA, 19 nt, Artificial Sequence
  Description of Artificial Sequence: Synthetic oligonucleotide
cucauuacuuuggcccaca

SEQ ID NO: 710374 - RNA, 19 nt, Artificial Sequence
  Description of Artificial Sequence: Synthetic oligonucleotide
ccauguggauagagagacc

SEQ ID NO: 710375 - RNA, 19 nt, Artificial Sequence
  Description of Artificial Sequence: Synthetic oligonucleotide
aggguaccacuaaccacca

SEQ ID NO: 710376 - RNA, 19 nt, Artificial Sequence
  Description of Artificial Sequence: Synthetic oligonucleotide
ggguggaagaacucucgua

SEQ ID NO: 710377 - RNA, 19 nt, Artificial Sequence
  Description of Artificial Sequence: Synthetic oligonucleotide
ggagugugacacccaggca

SEQ ID NO: 710378 - RNA, 19 nt, Artificial Sequence
  Description of Artificial Sequence: Synthetic oligonucleotide
cauuacuuuggcccacaau

SEQ ID NO: 710379 - RNA, 19 nt, Artificial Sequence
  Description of Artificial Sequence: Synthetic oligonucleotide
gacuaccaucaugggauua

SEQ ID NO: 710380 - RNA, 19 nt, Artificial Sequence
  Description of Artificial Sequence: Synthetic oligonucleotide
cggucccgaacuucuagcc

SEQ ID NO: 710381 - RNA, 19 nt, Artificial Sequence
  Description of Artificial Sequence: Synthetic oligonucleotide
ggaagagcucggagauuag

SEQ ID NO: 710382 - RNA, 19 nt, Artificial Sequence
  Description of Artificial Sequence: Synthetic oligonucleotide
ggcagggacgagccagaug

SEQ ID NO: 710383 - RNA, 19 nt, Artificial Sequence
  Description of Artificial Sequence: Synthetic oligonucleotide
cucaggguaggcccuacau

SEQ ID NO: 710384 - RNA, 19 nt, Artificial Sequence
  Description of Artificial Sequence: Synthetic oligonucleotide
ggucaugaggguggaagaa

SEQ ID NO: 710385 - RNA, 19 nt, Artificial Sequence
  Description of Artificial Sequence: Synthetic oligonucleotide
cggagauuaggaguaccgc

SEQ ID NO: 710386 - RNA, 19 nt, Artificial Sequence
  Description of Artificial Sequence: Synthetic oligonucleotide
ccacccacccuccaaguga

SEQ ID NO: 710387 - RNA, 19 nt, Artificial Sequence
  Description of Artificial Sequence: Synthetic oligonucleotide
agguccccgacuaccccug

SEQ ID NO: 710388 - RNA, 19 nt, Artificial Sequence
  Description of Artificial Sequence: Synthetic oligonucleotide
gggguagcuccaggaagag

SEQ ID NO: 710389 - RNA, 19 nt, Artificial Sequence
  Description of Artificial Sequence: Synthetic oligonucleotide
gagucccgccuucaauagu

SEQ ID NO: 710390 - RNA, 19 nt, Artificial Sequence
  Description of Artificial Sequence: Synthetic oligonucleotide
ccccauguacacaccacca

SEQ ID NO: 710391 - RNA, 19 nt, Artificial Sequence
  Description of Artificial Sequence: Synthetic oligonucleotide
ccuuuccaugcgugguggc

SEQ ID NO: 710392 - RNA, 19 nt, Artificial Sequence
  Description of Artificial Sequence: Synthetic oligonucleotide
cagguuaacuagguaacuu

SEQ ID NO: 710393 - RNA, 19 nt, Artificial Sequence
  Description of Artificial Sequence: Synthetic oligonucleotide
ccccaaaauauaagaaagu

SEQ ID NO: 710394 - RNA, 19 nt, Artificial Sequence
  Description of Artificial Sequence: Synthetic oligonucleotide
cccacccuccaagugacug

SEQ ID NO: 710395 - RNA, 19 nt, Artificial Sequence
  Description of Artificial Sequence: Synthetic oligonucleotide
cuaccaucaugggauuaua

SEQ ID NO: 710396 - RNA, 19 nt, Artificial Sequence
  Description of Artificial Sequence: Synthetic oligonucleotide
cugacggcuagcugucagu

SEQ ID NO: 710397 - RNA, 19 nt, Artificial Sequence
  Description of Artificial Sequence: Synthetic oligonucleotide
guauaggaugaaagcucgu

SEQ ID NO: 710398 - RNA, 19 nt, Artificial Sequence
  Description of Artificial Sequence: Synthetic oligonucleotide
aggcccuacauaacaucua

SEQ ID NO: 710399 - RNA, 19 nt, Artificial Sequence
  Description of Artificial Sequence: Synthetic oligonucleotide
cgacuaccccugaggaagg

SEQ ID NO: 710400 - RNA, 19 nt, Artificial Sequence
  Description of Artificial Sequence: Synthetic oligonucleotide
gagauggcccaggaaguuu

SEQ ID NO: 710401 - RNA, 19 nt, Artificial Sequence
  Description of Artificial Sequence: Synthetic oligonucleotide
gcggagugugacacccagg

SEQ ID NO: 710402 - RNA, 19 nt, Artificial Sequence
  Description of Artificial Sequence: Synthetic oligonucleotide
gguggcgcuugaggaggcg

SEQ ID NO: 710403 - RNA, 19 nt, Artificial Sequence
  Description of Artificial Sequence: Synthetic oligonucleotide
cguucagagacagguuaac

SEQ ID NO: 710404 - RNA, 19 nt, Artificial Sequence
  Description of Artificial Sequence: Synthetic oligonucleotide
ggaugagucccgccuucaa

SEQ ID NO: 710405 - RNA, 19 nt, Artificial Sequence
  Description of Artificial Sequence: Synthetic oligonucleotide
gcuggaaagcucggacuca

SEQ ID NO: 710406 - RNA, 19 nt, Artificial Sequence
  Description of Artificial Sequence: Synthetic oligonucleotide
cccgccgaaggcugccucc

SEQ ID NO: 710407 - RNA, 19 nt, Artificial Sequence
  Description of Artificial Sequence: Synthetic oligonucleotide
ccccgcucauuacuuuggc

SEQ ID NO: 710408 - RNA, 19 nt, Artificial Sequence
  Description of Artificial Sequence: Synthetic oligonucleotide
ccuccaccguaaguauagg

SEQ ID NO: 710409 - RNA, 19 nt, Artificial Sequence
  Description of Artificial Sequence: Synthetic oligonucleotide
caccccgccgaaggcugcc

SEQ ID NO: 710410 - RNA, 19 nt, Artificial Sequence
  Description of Artificial Sequence: Synthetic oligonucleotide
ccgccuguugagccccugg

SEQ ID NO: 710411 - RNA, 19 nt, Artificial Sequence
  Description of Artificial Sequence: Synthetic oligonucleotide
gcccuacauaacaucuaca

SEQ ID NO: 710412 - RNA, 19 nt, Artificial Sequence
  Description of Artificial Sequence: Synthetic oligonucleotide
ucccggcgcucaggaaagc

SEQ ID NO: 710413 - RNA, 19 nt, Artificial Sequence
  Description of Artificial Sequence: Synthetic oligonucleotide
gguaggcccuacauaacau

SEQ ID NO: 710414 - RNA, 19 nt, Artificial Sequence
  Description of Artificial Sequence: Synthetic oligonucleotide
uccaugcgugguggccgcu

SEQ ID NO: 710415 - RNA, 19 nt, Artificial Sequence
  Description of Artificial Sequence: Synthetic oligonucleotide
cacccuccaagugacugcu

SEQ ID NO: 710416 - RNA, 19 nt, Artificial Sequence
  Description of Artificial Sequence: Synthetic oligonucleotide
cucucguacccagccaggu

SEQ ID NO: 710417 - RNA, 19 nt, Artificial Sequence
  Description of Artificial Sequence: Synthetic oligonucleotide
ccccgacuaccccugagga

SEQ ID NO: 710418 - RNA, 19 nt, Artificial Sequence
  Description of Artificial Sequence: Synthetic oligonucleotide
ggaaucggugacacugcua

SEQ ID NO: 710419 - RNA, 19 nt, Artificial Sequence
  Description of Artificial Sequence: Synthetic oligonucleotide
cugccuccaccguaaguau

SEQ ID NO: 710420 - RNA, 19 nt, Artificial Sequence
  Description of Artificial Sequence: Synthetic oligonucleotide
cagcggagugugacaccca

SEQ ID NO: 710421 - RNA, 19 nt, Artificial Sequence
  Description of Artificial Sequence: Synthetic oligonucleotide
guggaagcucugacggcua

SEQ ID NO: 710422 - RNA, 19 nt, Artificial Sequence
  Description of Artificial Sequence: Synthetic oligonucleotide
gagcccggauaagcaggga

SEQ ID NO: 710423 - RNA, 19 nt, Artificial Sequence
  Description of Artificial Sequence: Synthetic oligonucleotide
cccggcgcucaggaaagcc

SEQ ID NO: 710424 - RNA, 19 nt, Artificial Sequence
  Description of Artificial Sequence: Synthetic oligonucleotide
gacacccaggcagcgggau

SEQ ID NO: 710425 - RNA, 19 nt, Artificial Sequence
  Description of Artificial Sequence: Synthetic oligonucleotide
gcgggaucaauuggcugga

SEQ ID NO: 710426 - RNA, 19 nt, Artificial Sequence
  Description of Artificial Sequence: Synthetic oligonucleotide
cccaaugcggccucagggu

SEQ ID NO: 710427 - RNA, 19 nt, Artificial Sequence
  Description of Artificial Sequence: Synthetic oligonucleotide
ccaaugcggccucagggua

SEQ ID NO: 710428 - RNA, 19 nt, Artificial Sequence
  Description of Artificial Sequence: Synthetic oligonucleotide
agguccccgaagacauaau

SEQ ID NO: 710429 - RNA, 19 nt, Artificial Sequence
  Description of Artificial Sequence: Synthetic oligonucleotide
ccguaaguauaggaugaaa

SEQ ID NO: 710430 - RNA, 19 nt, Artificial Sequence
  Description of Artificial Sequence: Synthetic oligonucleotide
cacugccuccaccguaagu

SEQ ID NO: 710431 - RNA, 19 nt, Artificial Sequence
  Description of Artificial Sequence: Synthetic oligonucleotide
gcacuauaaggagcaccaa

SEQ ID NO: 710432 - RNA, 19 nt, Artificial Sequence
  Description of Artificial Sequence: Synthetic oligonucleotide
gcagcgggaucaauuggcu

SEQ ID NO: 710433 - RNA, 19 nt, Artificial Sequence
  Description of Artificial Sequence: Synthetic oligonucleotide
gggguuagaaggguuucuu

SEQ ID NO: 710434 - RNA, 19 nt, Artificial Sequence
  Description of Artificial Sequence: Synthetic oligonucleotide
ggcgcuugaggaggcggga

SEQ ID NO: 710435 - RNA, 19 nt, Artificial Sequence
  Description of Artificial Sequence: Synthetic oligonucleotide
gggacgagccagauguaau

SEQ ID NO: 710436 - RNA, 19 nt, Artificial Sequence
  Description of Artificial Sequence: Synthetic oligonucleotide
ccgccgaaggcugccuccc

SEQ ID NO: 710437 - RNA, 19 nt, Artificial Sequence
  Description of Artificial Sequence: Synthetic oligonucleotide
ccagccuugaggugccacu

SEQ ID NO: 710438 - RNA, 19 nt, Artificial Sequence
  Description of Artificial Sequence: Synthetic oligonucleotide
gccuguugagccccuggau

SEQ ID NO: 710439 - RNA, 19 nt, Artificial Sequence
  Description of Artificial Sequence: Synthetic oligonucleotide
cccgacuaccccugaggaa

SEQ ID NO: 710440 - RNA, 19 nt, Artificial Sequence
  Description of Artificial Sequence: Synthetic oligonucleotide
ccaccccgccgaaggcugc

SEQ ID NO: 710441 - RNA, 19 nt, Artificial Sequence
  Description of Artificial Sequence: Synthetic oligonucleotide
ccgaacuucuagcccagau

SEQ ID NO: 710442 - RNA, 19 nt, Artificial Sequence
  Description of Artificial Sequence: Synthetic oligonucleotide
ccgccuucgguggcgcuug

SEQ ID NO: 710443 - RNA, 19 nt, Artificial Sequence
  Description of Artificial Sequence: Synthetic oligonucleotide
gguccccgacuaccccuga

SEQ ID NO: 710444 - RNA, 19 nt, Artificial Sequence
  Description of Artificial Sequence: Synthetic oligonucleotide
ccggcgcucaggaaagccu

SEQ ID NO: 710445 - RNA, 19 nt, Artificial Sequence
  Description of Artificial Sequence: Synthetic oligonucleotide
gcucggacucacugccacu

SEQ ID NO: 710446 - RNA, 19 nt, Artificial Sequence
  Description of Artificial Sequence: Synthetic oligonucleotide
ccgccuucaauaguccacu

SEQ ID NO: 710447 - RNA, 19 nt, Artificial Sequence
  Description of Artificial Sequence: Synthetic oligonucleotide
cgccuguugagccccugga

SEQ ID NO: 710448 - RNA, 19 nt, Artificial Sequence
  Description of Artificial Sequence: Synthetic oligonucleotide
ccuccaagugacugcuaau

SEQ ID NO: 710449 - RNA, 19 nt, Artificial Sequence
  Description of Artificial Sequence: Synthetic oligonucleotide
cgccgaaggcugccucccc

SEQ ID NO: 710450 - RNA, 19 nt, Artificial Sequence
  Description of Artificial Sequence: Synthetic oligonucleotide
ccccgccgaaggcugccuc

SEQ ID NO: 710451 - RNA, 19 nt, Artificial Sequence
  Description of Artificial Sequence: Synthetic oligonucleotide
gcuaaaggaugagguccuu

SEQ ID NO: 710452 - RNA, 19 nt, Artificial Sequence
  Description of Artificial Sequence: Synthetic oligonucleotide
cccguuccucaggccuccc

SEQ ID NO: 710453 - RNA, 19 nt, Artificial Sequence
  Description of Artificial Sequence: Synthetic oligonucleotide
cggcgcucaggaaagccuu

SEQ ID NO: 710454 - RNA, 19 nt, Artificial Sequence
  Description of Artificial Sequence: Synthetic oligonucleotide
cgggaggcacugcucugcu

SEQ ID NO: 710455 - RNA, 19 nt, Artificial Sequence
  Description of Artificial Sequence: Synthetic oligonucleotide
cuccgucaccccgcucauu

SEQ ID NO: 710456 - RNA, 19 nt, Artificial Sequence
  Description of Artificial Sequence: Synthetic oligonucleotide
cggacccaaugcggccuca

SEQ ID NO: 710457 - RNA, 19 nt, Artificial Sequence
  Description of Artificial Sequence: Synthetic oligonucleotide
cgggaucaauuggcuggau

SEQ ID NO: 710458 - RNA, 19 nt, Artificial Sequence
  Description of Artificial Sequence: Synthetic oligonucleotide
aaccucacaaaacucaggc

SEQ ID NO: 710459 - RNA, 19 nt, Artificial Sequence
  Description of Artificial Sequence: Synthetic oligonucleotide
acaauuuuaacacgguccc

SEQ ID NO: 710460 - RNA, 19 nt, Artificial Sequence
  Description of Artificial Sequence: Synthetic oligonucleotide
ugugauaacgaauuggacc

SEQ ID NO: 710461 - RNA, 19 nt, Artificial Sequence
  Description of Artificial Sequence: Synthetic oligonucleotide
aggagguugcauuagaagc

SEQ ID NO: 710462 - RNA, 19 nt, Artificial Sequence
  Description of Artificial Sequence: Synthetic oligonucleotide
ugugaaaccucacaaaacu

SEQ ID NO: 710463 - RNA, 19 nt, Artificial Sequence
  Description of Artificial Sequence: Synthetic oligonucleotide
acuaggaacagucaguuug

SEQ ID NO: 710464 - RNA, 19 nt, Artificial Sequence
  Description of Artificial Sequence: Synthetic oligonucleotide
aacgaauuggacccgcucg

SEQ ID NO: 710465 - RNA, 19 nt, Artificial Sequence
  Description of Artificial Sequence: Synthetic oligonucleotide
uuucacacggaacuggccg

SEQ ID NO: 710466 - RNA, 19 nt, Artificial Sequence
  Description of Artificial Sequence: Synthetic oligonucleotide
ugggguuugagccacuucg

SEQ ID NO: 710467 - RNA, 19 nt, Artificial Sequence
  Description of Artificial Sequence: Synthetic oligonucleotide
aauuuuaacacggucccag

SEQ ID NO: 710468 - RNA, 19 nt, Artificial Sequence
  Description of Artificial Sequence: Synthetic oligonucleotide
gugauaacgaauuggaccc

SEQ ID NO: 710469 - RNA, 19 nt, Artificial Sequence
  Description of Artificial Sequence: Synthetic oligonucleotide
gaagacgucuuguugaugc

SEQ ID NO: 710470 - RNA, 19 nt, Artificial Sequence
  Description of Artificial Sequence: Synthetic oligonucleotide
uaucggauaagcuuccucc

SEQ ID NO: 710471 - RNA, 19 nt, Artificial Sequence
  Description of Artificial Sequence: Synthetic oligonucleotide
aacguaucggauaagcuuc

SEQ ID NO: 710472 - RNA, 19 nt, Artificial Sequence
  Description of Artificial Sequence: Synthetic oligonucleotide
uuuuaacacggucccagcg

SEQ ID NO: 710473 - RNA, 19 nt, Artificial Sequence
  Description of Artificial Sequence: Synthetic oligonucleotide
agaggaggugaccagaagg

SEQ ID NO: 710474 - RNA, 19 nt, Artificial Sequence
  Description of Artificial Sequence: Synthetic oligonucleotide
aaacauacgaacgcgguug

SEQ ID NO: 710475 - RNA, 19 nt, Artificial Sequence
  Description of Artificial Sequence: Synthetic oligonucleotide
ucauuacaacuguagaucc

SEQ ID NO: 710476 - RNA, 19 nt, Artificial Sequence
  Description of Artificial Sequence: Synthetic oligonucleotide
ugcauuagaagccugcagu

SEQ ID NO: 710477 - RNA, 19 nt, Artificial Sequence
  Description of Artificial Sequence: Synthetic oligonucleotide
uccucuuucacacggaacu

SEQ ID NO: 710478 - RNA, 19 nt, Artificial Sequence
  Description of Artificial Sequence: Synthetic oligonucleotide
aaugucuaugcuguguauc

SEQ ID NO: 710479 - RNA, 19 nt, Artificial Sequence
  Description of Artificial Sequence: Synthetic oligonucleotide
uuuaacacggucccagcgc

SEQ ID NO: 710480 - RNA, 19 nt, Artificial Sequence
  Description of Artificial Sequence: Synthetic oligonucleotide
ugaaagcuguaacguaucg

SEQ ID NO: 710481 - RNA, 19 nt, Artificial Sequence
  Description of Artificial Sequence: Synthetic oligonucleotide
gaaggguucuccaucaggg

SEQ ID NO: 710482 - RNA, 19 nt, Artificial Sequence
  Description of Artificial Sequence: Synthetic oligonucleotide
uauuauacucaugugugug

SEQ ID NO: 710483 - RNA, 19 nt, Artificial Sequence
  Description of Artificial Sequence: Synthetic oligonucleotide
uguaacguaucggauaagc

SEQ ID NO: 710484 - RNA, 19 nt, Artificial Sequence
  Description of Artificial Sequence: Synthetic oligonucleotide
uguagauccaccggggccg

SEQ ID NO: 710485 - RNA, 19 nt, Artificial Sequence
  Description of Artificial Sequence: Synthetic oligonucleotide
auuuuaacacggucccagc

SEQ ID NO: 710486 - RNA, 19 nt, Artificial Sequence
  Description of Artificial Sequence: Synthetic oligonucleotide
uucccaaugucuaugcugu

SEQ ID NO: 710487 - RNA, 19 nt, Artificial Sequence
  Description of Artificial Sequence: Synthetic oligonucleotide
uucucauuacaacuguaga

SEQ ID NO: 710488 - RNA, 19 nt, Artificial Sequence
  Description of Artificial Sequence: Synthetic oligonucleotide
ugcacaaugggucgagucc

SEQ ID NO: 710489 - RNA, 19 nt, Artificial Sequence
  Description of Artificial Sequence: Synthetic oligonucleotide
ucucauuacaacuguagau

SEQ ID NO: 710490 - RNA, 19 nt, Artificial Sequence
  Description of Artificial Sequence: Synthetic oligonucleotide
aacauacgaacgcgguugg

SEQ ID NO: 710491 - RNA, 19 nt, Artificial Sequence
  Description of Artificial Sequence: Synthetic oligonucleotide
ucuagauucaaguccaguu

SEQ ID NO: 710492 - RNA, 19 nt, Artificial Sequence
  Description of Artificial Sequence: Synthetic oligonucleotide
gaaggggacaugaaagagg

SEQ ID NO: 710493 - RNA, 19 nt, Artificial Sequence
  Description of Artificial Sequence: Synthetic oligonucleotide
acgaauuggacccgcucgc

SEQ ID NO: 710494 - RNA, 19 nt, Artificial Sequence
  Description of Artificial Sequence: Synthetic oligonucleotide
cuaggaacagucaguuugg

SEQ ID NO: 710495 - RNA, 19 nt, Artificial Sequence
  Description of Artificial Sequence: Synthetic oligonucleotide
aauuggacccgcucgcuca

SEQ ID NO: 710496 - RNA, 19 nt, Artificial Sequence
  Description of Artificial Sequence: Synthetic oligonucleotide
cucgucuuugucuggaggg

SEQ ID NO: 710497 - RNA, 19 nt, Artificial Sequence
  Description of Artificial Sequence: Synthetic oligonucleotide
agucuccuuuauuauacuc

SEQ ID NO: 710498 - RNA, 19 nt, Artificial Sequence
  Description of Artificial Sequence: Synthetic oligonucleotide
aaugggucgaguccuggcu

SEQ ID NO: 710499 - RNA, 19 nt, Artificial Sequence
  Description of Artificial Sequence: Synthetic oligonucleotide
uuauuauacucaugugugu

SEQ ID NO: 710500 - RNA, 19 nt, Artificial Sequence
  Description of Artificial Sequence: Synthetic oligonucleotide
caacuguagauccaccggg

SEQ ID NO: 710501 - RNA, 19 nt, Artificial Sequence
  Description of Artificial Sequence: Synthetic oligonucleotide
ucuggugagggcgauuugg

SEQ ID NO: 710502 - RNA, 19 nt, Artificial Sequence
  Description of Artificial Sequence: Synthetic oligonucleotide
uaggugucggccuugagaa

SEQ ID NO: 710503 - RNA, 19 nt, Artificial Sequence
  Description of Artificial Sequence: Synthetic oligonucleotide
cacucuuuccgcacaaucc

SEQ ID NO: 710504 - RNA, 19 nt, Artificial Sequence
  Description of Artificial Sequence: Synthetic oligonucleotide
ugcaagagcuacccaaagc

SEQ ID NO: 710505 - RNA, 19 nt, Artificial Sequence
  Description of Artificial Sequence: Synthetic oligonucleotide
gauggggucccacuccugg

SEQ ID NO: 710506 - RNA, 19 nt, Artificial Sequence
  Description of Artificial Sequence: Synthetic oligonucleotide
uggggagcgacuaggaaca

SEQ ID NO: 710507 - RNA, 19 nt, Artificial Sequence
  Description of Artificial Sequence: Synthetic oligonucleotide
aagacgucuuguugaugcg

SEQ ID NO: 710508 - RNA, 19 nt, Artificial Sequence
  Description of Artificial Sequence: Synthetic oligonucleotide
aacuggccgagcuugguca

SEQ ID NO: 710509 - RNA, 19 nt, Artificial Sequence
  Description of Artificial Sequence: Synthetic oligonucleotide
ugagguaccugcgggaggg

SEQ ID NO: 710510 - RNA, 19 nt, Artificial Sequence
  Description of Artificial Sequence: Synthetic oligonucleotide
gaagaagagagccccuggc

SEQ ID NO: 710511 - RNA, 19 nt, Artificial Sequence
  Description of Artificial Sequence: Synthetic oligonucleotide
acaaaacucaggccauagg

SEQ ID NO: 710512 - RNA, 19 nt, Artificial Sequence
  Description of Artificial Sequence: Synthetic oligonucleotide
ugggcugugauaacgaauu

SEQ ID NO: 710513 - RNA, 19 nt, Artificial Sequence
  Description of Artificial Sequence: Synthetic oligonucleotide
aggaagaaguguuugcccu

SEQ ID NO: 710514 - RNA, 19 nt, Artificial Sequence
  Description of Artificial Sequence: Synthetic oligonucleotide
uuaacacggucccagcgcu

SEQ ID NO: 710515 - RNA, 19 nt, Artificial Sequence
  Description of Artificial Sequence: Synthetic oligonucleotide
acaauccggccuccgaggc

SEQ ID NO: 710516 - RNA, 19 nt, Artificial Sequence
  Description of Artificial Sequence: Synthetic oligonucleotide
ugugugugcacgcaugguc

SEQ ID NO: 710517 - RNA, 19 nt, Artificial Sequence
  Description of Artificial Sequence: Synthetic oligonucleotide
gaagcucugagcggaaggg

SEQ ID NO: 710518 - RNA, 19 nt, Artificial Sequence
  Description of Artificial Sequence: Synthetic oligonucleotide
uuauacucaugugugugca

SEQ ID NO: 710519 - RNA, 19 nt, Artificial Sequence
  Description of Artificial Sequence: Synthetic oligonucleotide
gucuggacgauacuuggcc

SEQ ID NO: 710520 - RNA, 19 nt, Artificial Sequence
  Description of Artificial Sequence: Synthetic oligonucleotide
aagcccugccaugagguac

SEQ ID NO: 710521 - RNA, 19 nt, Artificial Sequence
  Description of Artificial Sequence: Synthetic oligonucleotide
ucaugugugugcacgcaug

SEQ ID NO: 710522 - RNA, 19 nt, Artificial Sequence
  Description of Artificial Sequence: Synthetic oligonucleotide
cauacgaacgcgguugggg

SEQ ID NO: 710523 - RNA, 19 nt, Artificial Sequence
  Description of Artificial Sequence: Synthetic oligonucleotide
ucuuuccgcacaauccggc

SEQ ID NO: 710524 - RNA, 19 nt, Artificial Sequence
  Description of Artificial Sequence: Synthetic oligonucleotide
aacuguagauccaccgggg

SEQ ID NO: 710525 - RNA, 19 nt, Artificial Sequence
  Description of Artificial Sequence: Synthetic oligonucleotide
ucuacgaaggccgagccau

SEQ ID NO: 710526 - RNA, 19 nt, Artificial Sequence
  Description of Artificial Sequence: Synthetic oligonucleotide
ucuggggcgagcugggucc

SEQ ID NO: 710527 - RNA, 19 nt, Artificial Sequence
  Description of Artificial Sequence: Synthetic oligonucleotide
ggagcuggcaccaucaucc

SEQ ID NO: 710528 - RNA, 19 nt, Artificial Sequence
  Description of Artificial Sequence: Synthetic oligonucleotide
gaacuccccguacaggaag

SEQ ID NO: 710529 - RNA, 19 nt, Artificial Sequence
  Description of Artificial Sequence: Synthetic oligonucleotide
auuagaagccugcagugua

SEQ ID NO: 710530 - RNA, 19 nt, Artificial Sequence
  Description of Artificial Sequence: Synthetic oligonucleotide
ucuaugcuguguaucugcu

SEQ ID NO: 710531 - RNA, 19 nt, Artificial Sequence
  Description of Artificial Sequence: Synthetic oligonucleotide
auugaaagcuguaacguau

SEQ ID NO: 710532 - RNA, 19 nt, Artificial Sequence
  Description of Artificial Sequence: Synthetic oligonucleotide
ucuggacgauacuuggccc

SEQ ID NO: 710533 - RNA, 19 nt, Artificial Sequence
  Description of Artificial Sequence: Synthetic oligonucleotide
cuugcuguauggcuggcug

SEQ ID NO: 710534 - RNA, 19 nt, Artificial Sequence
  Description of Artificial Sequence: Synthetic oligonucleotide
guaguccucaaguucacca

SEQ ID NO: 710535 - RNA, 19 nt, Artificial Sequence
  Description of Artificial Sequence: Synthetic oligonucleotide
cugugaaaccucacaaaac

SEQ ID NO: 710536 - RNA, 19 nt, Artificial Sequence
  Description of Artificial Sequence: Synthetic oligonucleotide
uugaaagcuguaacguauc

SEQ ID NO: 710537 - RNA, 19 nt, Artificial Sequence
  Description of Artificial Sequence: Synthetic oligonucleotide
cagucuggacgauacuugg

SEQ ID NO: 710538 - RNA, 19 nt, Artificial Sequence
  Description of Artificial Sequence: Synthetic oligonucleotide
agaccgggucaccagcacc

SEQ ID NO: 710539 - RNA, 19 nt, Artificial Sequence
  Description of Artificial Sequence: Synthetic oligonucleotide
aggccgagccaucauuccc

SEQ ID NO: 710540 - RNA, 19 nt, Artificial Sequence
  Description of Artificial Sequence: Synthetic oligonucleotide
cuuguugaugcgacugaag

SEQ ID NO: 710541 - RNA, 19 nt, Artificial Sequence
  Description of Artificial Sequence: Synthetic oligonucleotide
agauggucuucucgccugc

SEQ ID NO: 710542 - RNA, 19 nt, Artificial Sequence
  Description of Artificial Sequence: Synthetic oligonucleotide
aacacggucccagcgcuuc

SEQ ID NO: 710543 - RNA, 19 nt, Artificial Sequence
  Description of Artificial Sequence: Synthetic oligonucleotide
ugucaggcccaaacauacg

SEQ ID NO: 710544 - RNA, 19 nt, Artificial Sequence
  Description of Artificial Sequence: Synthetic oligonucleotide
gagauggucuucucgccug

SEQ ID NO: 710545 - RNA, 19 nt, Artificial Sequence
  Description of Artificial Sequence: Synthetic oligonucleotide
ugcacgcauggucaccccg

SEQ ID NO: 710546 - RNA, 19 nt, Artificial Sequence
  Description of Artificial Sequence: Synthetic oligonucleotide
gauaacgaauuggacccgc

SEQ ID NO: 710547 - RNA, 19 nt, Artificial Sequence
  Description of Artificial Sequence: Synthetic oligonucleotide
gucacuauuguccuggggu

SEQ ID NO: 710548 - RNA, 19 nt, Artificial Sequence
  Description of Artificial Sequence: Synthetic oligonucleotide
augcgacugaagaagagag

SEQ ID NO: 710549 - RNA, 19 nt, Artificial Sequence
  Description of Artificial Sequence: Synthetic oligonucleotide
ugcgacugaagaagagagc

SEQ ID NO: 710550 - RNA, 19 nt, Artificial Sequence
  Description of Artificial Sequence: Synthetic oligonucleotide
ggagccagcauaugggucc

SEQ ID NO: 710551 - RNA, 19 nt, Artificial Sequence
  Description of Artificial Sequence: Synthetic oligonucleotide
caguguagcugcugcauag

SEQ ID NO: 710552 - RNA, 19 nt, Artificial Sequence
  Description of Artificial Sequence: Synthetic oligonucleotide
uccgccucgucuuugucug

SEQ ID NO: 710553 - RNA, 19 nt, Artificial Sequence
  Description of Artificial Sequence: Synthetic oligonucleotide
accucuacgaaggccgagc

SEQ ID NO: 710554 - RNA, 19 nt, Artificial Sequence
  Description of Artificial Sequence: Synthetic oligonucleotide
auauggguccucaccauuc

SEQ ID NO: 710555 - RNA, 19 nt, Artificial Sequence
  Description of Artificial Sequence: Synthetic oligonucleotide
acccugcagaaucuucccc

SEQ ID NO: 710556 - RNA, 19 nt, Artificial Sequence
  Description of Artificial Sequence: Synthetic oligonucleotide
cuggacgauacuuggcccc

SEQ ID NO: 710557 - RNA, 19 nt, Artificial Sequence
  Description of Artificial Sequence: Synthetic oligonucleotide
aguguagcugcugcauagc

SEQ ID NO: 710558 - RNA, 19 nt, Artificial Sequence
  Description of Artificial Sequence: Synthetic oligonucleotide
auacgaacgcgguuggggu

SEQ ID NO: 710559 - RNA, 19 nt, Artificial Sequence
  Description of Artificial Sequence: Synthetic oligonucleotide
acgcgguugggguuugagc

SEQ ID NO: 710560 - RNA, 19 nt, Artificial Sequence
  Description of Artificial Sequence: Synthetic oligonucleotide
uuuccgcacaauccggccu

SEQ ID NO: 710561 - RNA, 19 nt, Artificial Sequence
  Description of Artificial Sequence: Synthetic oligonucleotide
cucuuucacacggaacugg

SEQ ID NO: 710562 - RNA, 19 nt, Artificial Sequence
  Description of Artificial Sequence: Synthetic oligonucleotide
cuuucacacggaacuggcc

SEQ ID NO: 710563 - RNA, 19 nt, Artificial Sequence
  Description of Artificial Sequence: Synthetic oligonucleotide
uccucuucccuuugggaga

SEQ ID NO: 710564 - RNA, 19 nt, Artificial Sequence
  Description of Artificial Sequence: Synthetic oligonucleotide
gucuccggaaucuuccgcc

SEQ ID NO: 710565 - RNA, 19 nt, Artificial Sequence
  Description of Artificial Sequence: Synthetic oligonucleotide
ugugcacgcauggucaccc

SEQ ID NO: 710566 - RNA, 19 nt, Artificial Sequence
  Description of Artificial Sequence: Synthetic oligonucleotide
gaugcgacugaagaagaga

SEQ ID NO: 710567 - RNA, 19 nt, Artificial Sequence
  Description of Artificial Sequence: Synthetic oligonucleotide
uggggcaccacuccauaga

SEQ ID NO: 710568 - RNA, 19 nt, Artificial Sequence
  Description of Artificial Sequence: Synthetic oligonucleotide
cacaauccggccuccgagg

SEQ ID NO: 710569 - RNA, 19 nt, Artificial Sequence
  Description of Artificial Sequence: Synthetic oligonucleotide
acuuccgguaggugucggc

SEQ ID NO: 710570 - RNA, 19 nt, Artificial Sequence
  Description of Artificial Sequence: Synthetic oligonucleotide
uauggguccucaccauucu

SEQ ID NO: 710571 - RNA, 19 nt, Artificial Sequence
  Description of Artificial Sequence: Synthetic oligonucleotide
uaacgaauuggacccgcuc

SEQ ID NO: 710572 - RNA, 19 nt, Artificial Sequence
  Description of Artificial Sequence: Synthetic oligonucleotide
ugucuccggaaucuuccgc

SEQ ID NO: 710573 - RNA, 19 nt, Artificial Sequence
  Description of Artificial Sequence: Synthetic oligonucleotide
gcgacugaagaagagagcc

SEQ ID NO: 710574 - RNA, 19 nt, Artificial Sequence
  Description of Artificial Sequence: Synthetic oligonucleotide
agcuguaacguaucggaua

SEQ ID NO: 710575 - RNA, 19 nt, Artificial Sequence
  Description of Artificial Sequence: Synthetic oligonucleotide
ggaaucuuccgccccauug

SEQ ID NO: 710576 - RNA, 19 nt, Artificial Sequence
  Description of Artificial Sequence: Synthetic oligonucleotide
ggaaggguucuccaucagg

SEQ ID NO: 710577 - RNA, 19 nt, Artificial Sequence
  Description of Artificial Sequence: Synthetic oligonucleotide
aagaggccgaggagguugc

SEQ ID NO: 710578 - RNA, 19 nt, Artificial Sequence
  Description of Artificial Sequence: Synthetic oligonucleotide
cuuuccgcacaauccggcc

SEQ ID NO: 710579 - RNA, 19 nt, Artificial Sequence
  Description of Artificial Sequence: Synthetic oligonucleotide
gcgauuuggucucuuuugg

SEQ ID NO: 710580 - RNA, 19 nt, Artificial Sequence
  Description of Artificial Sequence: Synthetic oligonucleotide
ggagguugcauuagaagcc

SEQ ID NO: 710581 - RNA, 19 nt, Artificial Sequence
  Description of Artificial Sequence: Synthetic oligonucleotide
caugaaagaggaggugacc

SEQ ID NO: 710582 - RNA, 19 nt, Artificial Sequence
  Description of Artificial Sequence: Synthetic oligonucleotide
gugaguccuugcuguaugg

SEQ ID NO: 710583 - RNA, 19 nt, Artificial Sequence
  Description of Artificial Sequence: Synthetic oligonucleotide
uggagucuccgccucgucu

SEQ ID NO: 710584 - RNA, 19 nt, Artificial Sequence
  Description of Artificial Sequence: Synthetic oligonucleotide
uauacucaugugugugcac

SEQ ID NO: 710585 - RNA, 19 nt, Artificial Sequence
  Description of Artificial Sequence: Synthetic oligonucleotide
uugucuggagggcugugaa

SEQ ID NO: 710586 - RNA, 19 nt, Artificial Sequence
  Description of Artificial Sequence: Synthetic oligonucleotide
agucuggacgauacuuggc

SEQ ID NO: 710587 - RNA, 19 nt, Artificial Sequence
  Description of Artificial Sequence: Synthetic oligonucleotide
uucucgucuguggagccag

SEQ ID NO: 710588 - RNA, 19 nt, Artificial Sequence
  Description of Artificial Sequence: Synthetic oligonucleotide
ggcgauuuggucucuuuug

SEQ ID NO: 710589 - RNA, 19 nt, Artificial Sequence
  Description of Artificial Sequence: Synthetic oligonucleotide
uucuagauucaaguccagu

SEQ ID NO: 710590 - RNA, 19 nt, Artificial Sequence
  Description of Artificial Sequence: Synthetic oligonucleotide
ugcugcaggacacgacgug

SEQ ID NO: 710591 - RNA, 19 nt, Artificial Sequence
  Description of Artificial Sequence: Synthetic oligonucleotide
ucuccggaaucuuccgccc

SEQ ID NO: 710592 - RNA, 19 nt, Artificial Sequence
  Description of Artificial Sequence: Synthetic oligonucleotide
caugagguaccugcgggag

SEQ ID NO: 710593 - RNA, 19 nt, Artificial Sequence
  Description of Artificial Sequence: Synthetic oligonucleotide
cuuccgguaggugucggcc

SEQ ID NO: 710594 - RNA, 19 nt, Artificial Sequence
  Description of Artificial Sequence: Synthetic oligonucleotide
ggcccaaacauacgaacgc

SEQ ID NO: 710595 - RNA, 19 nt, Artificial Sequence
  Description of Artificial Sequence: Synthetic oligonucleotide
gaaucuuccgccccauugu

SEQ ID NO: 710596 - RNA, 19 nt, Artificial Sequence
  Description of Artificial Sequence: Synthetic oligonucleotide
acuggccgagcuuggucac

SEQ ID NO: 710597 - RNA, 19 nt, Artificial Sequence
  Description of Artificial Sequence: Synthetic oligonucleotide
agccucguugucuguguuc

SEQ ID NO: 710598 - RNA, 19 nt, Artificial Sequence
  Description of Artificial Sequence: Synthetic oligonucleotide
ugcuguauggcuggcugca

SEQ ID NO: 710599 - RNA, 19 nt, Artificial Sequence
  Description of Artificial Sequence: Synthetic oligonucleotide
gacgucuuguugaugcgac

SEQ ID NO: 710600 - RNA, 19 nt, Artificial Sequence
  Description of Artificial Sequence: Synthetic oligonucleotide
augggucgaguccuggcug

SEQ ID NO: 710601 - RNA, 19 nt, Artificial Sequence
  Description of Artificial Sequence: Synthetic oligonucleotide
ugucuaugcuguguaucug

SEQ ID NO: 710602 - RNA, 19 nt, Artificial Sequence
  Description of Artificial Sequence: Synthetic oligonucleotide
gaagguuugcuggcaggcc

SEQ ID NO: 710603 - RNA, 19 nt, Artificial Sequence
  Description of Artificial Sequence: Synthetic oligonucleotide
acguaucggauaagcuucc

SEQ ID NO: 710604 - RNA, 19 nt, Artificial Sequence
  Description of Artificial Sequence: Synthetic oligonucleotide
uuccgcacaauccggccuc

SEQ ID NO: 710605 - RNA, 19 nt, Artificial Sequence
  Description of Artificial Sequence: Synthetic oligonucleotide
guccccagggaacuccccg

SEQ ID NO: 710606 - RNA, 19 nt, Artificial Sequence
  Description of Artificial Sequence: Synthetic oligonucleotide
aacgcgguugggguuugag

SEQ ID NO: 710607 - RNA, 19 nt, Artificial Sequence
  Description of Artificial Sequence: Synthetic oligonucleotide
gaauuggacccgcucgcuc

SEQ ID NO: 710608 - RNA, 19 nt, Artificial Sequence
  Description of Artificial Sequence: Synthetic oligonucleotide
gcugugauaacgaauugga

SEQ ID NO: 710609 - RNA, 19 nt, Artificial Sequence
  Description of Artificial Sequence: Synthetic oligonucleotide
ucgucuuugucuggagggc

SEQ ID NO: 710610 - RNA, 19 nt, Artificial Sequence
  Description of Artificial Sequence: Synthetic oligonucleotide
auggguccucaccauucuc

SEQ ID NO: 710611 - RNA, 19 nt, Artificial Sequence
  Description of Artificial Sequence: Synthetic oligonucleotide
acuauuguccugggguucu

SEQ ID NO: 710612 - RNA, 19 nt, Artificial Sequence
  Description of Artificial Sequence: Synthetic oligonucleotide
guguucucgucuguggagc

SEQ ID NO: 710613 - RNA, 19 nt, Artificial Sequence
  Description of Artificial Sequence: Synthetic oligonucleotide
ugggucgaguccuggcugc

SEQ ID NO: 710614 - RNA, 19 nt, Artificial Sequence
  Description of Artificial Sequence: Synthetic oligonucleotide
acacggaacuggccgagcu

SEQ ID NO: 710615 - RNA, 19 nt, Artificial Sequence
  Description of Artificial Sequence: Synthetic oligonucleotide
cccaaacauacgaacgcgg

SEQ ID NO: 710616 - RNA, 19 nt, Artificial Sequence
  Description of Artificial Sequence: Synthetic oligonucleotide
cauugaaagcuguaacgua

SEQ ID NO: 710617 - RNA, 19 nt, Artificial Sequence
  Description of Artificial Sequence: Synthetic oligonucleotide
gcuuuagggagcuggcacc

SEQ ID NO: 710618 - RNA, 19 nt, Artificial Sequence
  Description of Artificial Sequence: Synthetic oligonucleotide
cacccugcagaaucuuccc

SEQ ID NO: 710619 - RNA, 19 nt, Artificial Sequence
  Description of Artificial Sequence: Synthetic oligonucleotide
ggagcgacuaggaacaguc

SEQ ID NO: 710620 - RNA, 19 nt, Artificial Sequence
  Description of Artificial Sequence: Synthetic oligonucleotide
ggaagaaguguuugcccug

SEQ ID NO: 710621 - RNA, 19 nt, Artificial Sequence
  Description of Artificial Sequence: Synthetic oligonucleotide
gcuguaacguaucggauaa

SEQ ID NO: 710622 - RNA, 19 nt, Artificial Sequence
  Description of Artificial Sequence: Synthetic oligonucleotide
uccuccucucguccccagg

SEQ ID NO: 710623 - RNA, 19 nt, Artificial Sequence
  Description of Artificial Sequence: Synthetic oligonucleotide
cuguccgggguccagucug

SEQ ID NO: 710624 - RNA, 19 nt, Artificial Sequence
  Description of Artificial Sequence: Synthetic oligonucleotide
gaacuggccgagcuugguc

SEQ ID NO: 710625 - RNA, 19 nt, Artificial Sequence
  Description of Artificial Sequence: Synthetic oligonucleotide
acgcauggucaccccggcc

SEQ ID NO: 710626 - RNA, 19 nt, Artificial Sequence
  Description of Artificial Sequence: Synthetic oligonucleotide
acuucggcucucagaaggg

SEQ ID NO: 710627 - RNA, 19 nt, Artificial Sequence
  Description of Artificial Sequence: Synthetic oligonucleotide
uccucucguccccagggaa

SEQ ID NO: 710628 - RNA, 19 nt, Artificial Sequence
  Description of Artificial Sequence: Synthetic oligonucleotide
gguugcauuagaagccugc

SEQ ID NO: 710629 - RNA, 19 nt, Artificial Sequence
  Description of Artificial Sequence: Synthetic oligonucleotide
gucccgaagcucugagcgg

SEQ ID NO: 710630 - RNA, 19 nt, Artificial Sequence
  Description of Artificial Sequence: Synthetic oligonucleotide
acucucaccgggagagucg

SEQ ID NO: 710631 - RNA, 19 nt, Artificial Sequence
  Description of Artificial Sequence: Synthetic oligonucleotide
cgcgguugggguuugagcc

SEQ ID NO: 710632 - RNA, 19 nt, Artificial Sequence
  Description of Artificial Sequence: Synthetic oligonucleotide
ucacacggaacuggccgag

SEQ ID NO: 710633 - RNA, 19 nt, Artificial Sequence
  Description of Artificial Sequence: Synthetic oligonucleotide
ugaucuccggcaugcccac

SEQ ID NO: 710634 - RNA, 19 nt, Artificial Sequence
  Description of Artificial Sequence: Synthetic oligonucleotide
gugucacuauuguccuggg

SEQ ID NO: 710635 - RNA, 19 nt, Artificial Sequence
  Description of Artificial Sequence: Synthetic oligonucleotide
ucuuugucuggagggcugu

SEQ ID NO: 710636 - RNA, 19 nt, Artificial Sequence
  Description of Artificial Sequence: Synthetic oligonucleotide
ccgagcuuggucacggucc

SEQ ID NO: 710637 - RNA, 19 nt, Artificial Sequence
  Description of Artificial Sequence: Synthetic oligonucleotide
cacgacguggcggaggcug

SEQ ID NO: 710638 - RNA, 19 nt, Artificial Sequence
  Description of Artificial Sequence: Synthetic oligonucleotide
ucgucuguggagccagcau

SEQ ID NO: 710639 - RNA, 19 nt, Artificial Sequence
  Description of Artificial Sequence: Synthetic oligonucleotide
agccacuucggcucucaga

SEQ ID NO: 710640 - RNA, 19 nt, Artificial Sequence
  Description of Artificial Sequence: Synthetic oligonucleotide
uucuggugagggcgauuug

SEQ ID NO: 710641 - RNA, 19 nt, Artificial Sequence
  Description of Artificial Sequence: Synthetic oligonucleotide
ucccuuugggagacuccug

SEQ ID NO: 710642 - RNA, 19 nt, Artificial Sequence
  Description of Artificial Sequence: Synthetic oligonucleotide
ccgggguccagucuggacg

SEQ ID NO: 710643 - RNA, 19 nt, Artificial Sequence
  Description of Artificial Sequence: Synthetic oligonucleotide
ucuucucgccugcgguggc

SEQ ID NO: 710644 - RNA, 19 nt, Artificial Sequence
  Description of Artificial Sequence: Synthetic oligonucleotide
ugucuggagggcugugaaa

SEQ ID NO: 710645 - RNA, 19 nt, Artificial Sequence
  Description of Artificial Sequence: Synthetic oligonucleotide
aagcuguaacguaucggau

SEQ ID NO: 710646 - RNA, 19 nt, Artificial Sequence
  Description of Artificial Sequence: Synthetic oligonucleotide
ggugagggcgauuuggucu

SEQ ID NO: 710647 - RNA, 19 nt, Artificial Sequence
  Description of Artificial Sequence: Synthetic oligonucleotide
ugccgcccggacuaacuug

SEQ ID NO: 710648 - RNA, 19 nt, Artificial Sequence
  Description of Artificial Sequence: Synthetic oligonucleotide
uggugagggcgauuugguc

SEQ ID NO: 710649 - RNA, 19 nt, Artificial Sequence
  Description of Artificial Sequence: Synthetic oligonucleotide
gcucauguaguccucaagu

SEQ ID NO: 710650 - RNA, 19 nt, Artificial Sequence
  Description of Artificial Sequence: Synthetic oligonucleotide
aacuccccguacaggaaga

SEQ ID NO: 710651 - RNA, 19 nt, Artificial Sequence
  Description of Artificial Sequence: Synthetic oligonucleotide
caggacacgacguggcgga

SEQ ID NO: 710652 - RNA, 19 nt, Artificial Sequence
  Description of Artificial Sequence: Synthetic oligonucleotide
cuguguucucgucugugga

SEQ ID NO: 710653 - RNA, 19 nt, Artificial Sequence
  Description of Artificial Sequence: Synthetic oligonucleotide
ccagucuggacgauacuug

SEQ ID NO: 710654 - RNA, 19 nt, Artificial Sequence
  Description of Artificial Sequence: Synthetic oligonucleotide
gcccaaacauacgaacgcg

SEQ ID NO: 710655 - RNA, 19 nt, Artificial Sequence
  Description of Artificial Sequence: Synthetic oligonucleotide
gaggccgcuuccgggaaag

SEQ ID NO: 710656 - RNA, 19 nt, Artificial Sequence
  Description of Artificial Sequence: Synthetic oligonucleotide
acauacgaacgcgguuggg

SEQ ID NO: 710657 - RNA, 19 nt, Artificial Sequence
  Description of Artificial Sequence: Synthetic oligonucleotide
gcugaucuccggcaugccc

SEQ ID NO: 710658 - RNA, 19 nt, Artificial Sequence
  Description of Artificial Sequence: Synthetic oligonucleotide
ucccaaugucuaugcugug

SEQ ID NO: 710659 - RNA, 19 nt, Artificial Sequence
  Description of Artificial Sequence: Synthetic oligonucleotide
aggccgaggagguugcauu

SEQ ID NO: 710660 - RNA, 19 nt, Artificial Sequence
  Description of Artificial Sequence: Synthetic oligonucleotide
auaacgaauuggacccgcu

SEQ ID NO: 710661 - RNA, 19 nt, Artificial Sequence
  Description of Artificial Sequence: Synthetic oligonucleotide
guaacguaucggauaagcu

SEQ ID NO: 710662 - RNA, 19 nt, Artificial Sequence
  Description of Artificial Sequence: Synthetic oligonucleotide
acgucuuguugaugcgacu

SEQ ID NO: 710663 - RNA, 19 nt, Artificial Sequence
  Description of Artificial Sequence: Synthetic oligonucleotide
agguuugcuggcaggccuc

SEQ ID NO: 710664 - RNA, 19 nt, Artificial Sequence
  Description of Artificial Sequence: Synthetic oligonucleotide
ggccuguguguacaugugc

SEQ ID NO: 710665 - RNA, 19 nt, Artificial Sequence
  Description of Artificial Sequence: Synthetic oligonucleotide
cauagggugaguccuugcu

SEQ ID NO: 710666 - RNA, 19 nt, Artificial Sequence
  Description of Artificial Sequence: Synthetic oligonucleotide
cuuuagggagcuggcacca

SEQ ID NO: 710667 - RNA, 19 nt, Artificial Sequence
  Description of Artificial Sequence: Synthetic oligonucleotide
gacuaacuugucaggccca

SEQ ID NO: 710668 - RNA, 19 nt, Artificial Sequence
  Description of Artificial Sequence: Synthetic oligonucleotide
ugagccacuucggcucuca

SEQ ID NO: 710669 - RNA, 19 nt, Artificial Sequence
  Description of Artificial Sequence: Synthetic oligonucleotide
uccucaccauucuccccug

SEQ ID NO: 710670 - RNA, 19 nt, Artificial Sequence
  Description of Artificial Sequence: Synthetic oligonucleotide
agcuugggagcuucgucuu

SEQ ID NO: 710671 - RNA, 19 nt, Artificial Sequence
  Description of Artificial Sequence: Synthetic oligonucleotide
ggcuccgugccuucucggg

SEQ ID NO: 710672 - RNA, 19 nt, Artificial Sequence
  Description of Artificial Sequence: Synthetic oligonucleotide
acuaacuugucaggcccaa

SEQ ID NO: 710673 - RNA, 19 nt, Artificial Sequence
  Description of Artificial Sequence: Synthetic oligonucleotide
gaagagagccccuggcuuu

SEQ ID NO: 710674 - RNA, 19 nt, Artificial Sequence
  Description of Artificial Sequence: Synthetic oligonucleotide
aggugucggccuugagaag

SEQ ID NO: 710675 - RNA, 19 nt, Artificial Sequence
  Description of Artificial Sequence: Synthetic oligonucleotide
gggguuugagccacuucgg

SEQ ID NO: 710676 - RNA, 19 nt, Artificial Sequence
  Description of Artificial Sequence: Synthetic oligonucleotide
gaagccucguugucugugu

SEQ ID NO: 710677 - RNA, 19 nt, Artificial Sequence
  Description of Artificial Sequence: Synthetic oligonucleotide
cacgcauggucaccccggc

SEQ ID NO: 710678 - RNA, 19 nt, Artificial Sequence
  Description of Artificial Sequence: Synthetic oligonucleotide
ucacaaaacucaggccaua

SEQ ID NO: 710679 - RNA, 19 nt, Artificial Sequence
  Description of Artificial Sequence: Synthetic oligonucleotide
uacgaacgcgguugggguu

SEQ ID NO: 710680 - RNA, 19 nt, Artificial Sequence
  Description of Artificial Sequence: Synthetic oligonucleotide
ggucuucucgccugcggug

SEQ ID NO: 710681 - RNA, 19 nt, Artificial Sequence
  Description of Artificial Sequence: Synthetic oligonucleotide
cacuauuguccugggguuc

SEQ ID NO: 710682 - RNA, 19 nt, Artificial Sequence
  Description of Artificial Sequence: Synthetic oligonucleotide
gagguugcauuagaagccu

SEQ ID NO: 710683 - RNA, 19 nt, Artificial Sequence
  Description of Artificial Sequence: Synthetic oligonucleotide
uccgguaggugucggccuu

SEQ ID NO: 710684 - RNA, 19 nt, Artificial Sequence
  Description of Artificial Sequence: Synthetic oligonucleotide
ucugagcggaagggguucu

SEQ ID NO: 710685 - RNA, 19 nt, Artificial Sequence
  Description of Artificial Sequence: Synthetic oligonucleotide
ucgcucauguaguccucaa

SEQ ID NO: 710686 - RNA, 19 nt, Artificial Sequence
  Description of Artificial Sequence: Synthetic oligonucleotide
gcaggacacgacguggcgg

SEQ ID NO: 710687 - RNA, 19 nt, Artificial Sequence
  Description of Artificial Sequence: Synthetic oligonucleotide
auuggacccgcucgcucau

SEQ ID NO: 710688 - RNA, 19 nt, Artificial Sequence
  Description of Artificial Sequence: Synthetic oligonucleotide
ggcagaccgggucaccagc

SEQ ID NO: 710689 - RNA, 19 nt, Artificial Sequence
  Description of Artificial Sequence: Synthetic oligonucleotide
uccgggguccagucuggac

SEQ ID NO: 710690 - RNA, 19 nt, Artificial Sequence
  Description of Artificial Sequence: Synthetic oligonucleotide
cccggacuaacuugucagg

SEQ ID NO: 710691 - RNA, 19 nt, Artificial Sequence
  Description of Artificial Sequence: Synthetic oligonucleotide
caauuuuaacacgguccca

SEQ ID NO: 710692 - RNA, 19 nt, Artificial Sequence
  Description of Artificial Sequence: Synthetic oligonucleotide
guagauccaccggggccgg

SEQ ID NO: 710693 - RNA, 19 nt, Artificial Sequence
  Description of Artificial Sequence: Synthetic oligonucleotide
ggcugugaaaccucacaaa

SEQ ID NO: 710694 - RNA, 19 nt, Artificial Sequence
  Description of Artificial Sequence: Synthetic oligonucleotide
gaaagcuugggagcuucgu

SEQ ID NO: 710695 - RNA, 19 nt, Artificial Sequence
  Description of Artificial Sequence: Synthetic oligonucleotide
cucugagcggaagggguuc

SEQ ID NO: 710696 - RNA, 19 nt, Artificial Sequence
  Description of Artificial Sequence: Synthetic oligonucleotide
ggaaagcuugggagcuucg

SEQ ID NO: 710697 - RNA, 19 nt, Artificial Sequence
  Description of Artificial Sequence: Synthetic oligonucleotide
ccggacuaacuugucaggc

SEQ ID NO: 710698 - RNA, 19 nt, Artificial Sequence
  Description of Artificial Sequence: Synthetic oligonucleotide
ccucuacgaaggccgagcc

SEQ ID NO: 710699 - RNA, 19 nt, Artificial Sequence
  Description of Artificial Sequence: Synthetic oligonucleotide
cuguaacguaucggauaag

SEQ ID NO: 710700 - RNA, 19 nt, Artificial Sequence
  Description of Artificial Sequence: Synthetic oligonucleotide
ccacucuuuccgcacaauc

SEQ ID NO: 710701 - RNA, 19 nt, Artificial Sequence
  Description of Artificial Sequence: Synthetic oligonucleotide
cuacgaaggccgagccauc

SEQ ID NO: 710702 - RNA, 19 nt, Artificial Sequence
  Description of Artificial Sequence: Synthetic oligonucleotide
ugaggccgcuuccgggaaa

SEQ ID NO: 710703 - RNA, 19 nt, Artificial Sequence
  Description of Artificial Sequence: Synthetic oligonucleotide
cagaccgggucaccagcac

SEQ ID NO: 710704 - RNA, 19 nt, Artificial Sequence
  Description of Artificial Sequence: Synthetic oligonucleotide
agggcgauuuggucucuuu

SEQ ID NO: 710705 - RNA, 19 nt, Artificial Sequence
  Description of Artificial Sequence: Synthetic oligonucleotide
acgaaggccgagccaucau

SEQ ID NO: 710706 - RNA, 19 nt, Artificial Sequence
  Description of Artificial Sequence: Synthetic oligonucleotide
gcacgcauggucaccccgg

SEQ ID NO: 710707 - RNA, 19 nt, Artificial Sequence
  Description of Artificial Sequence: Synthetic oligonucleotide
cagcgcuucuccgcugccg

SEQ ID NO: 710708 - RNA, 19 nt, Artificial Sequence
  Description of Artificial Sequence: Synthetic oligonucleotide
cucuacgaaggccgagcca

SEQ ID NO: 710709 - RNA, 19 nt, Artificial Sequence
  Description of Artificial Sequence: Synthetic oligonucleotide
cuuugucuggagggcugug

SEQ ID NO: 710710 - RNA, 19 nt, Artificial Sequence
  Description of Artificial Sequence: Synthetic oligonucleotide
gaccgggucaccagcaccu

SEQ ID NO: 710711 - RNA, 19 nt, Artificial Sequence
  Description of Artificial Sequence: Synthetic oligonucleotide
ggccggacgaaggccaggg

SEQ ID NO: 710712 - RNA, 19 nt, Artificial Sequence
  Description of Artificial Sequence: Synthetic oligonucleotide
uaacacggucccagcgcuu

SEQ ID NO: 710713 - RNA, 19 nt, Artificial Sequence
  Description of Artificial Sequence: Synthetic oligonucleotide
agguaccugcgggagggca

SEQ ID NO: 710714 - RNA, 19 nt, Artificial Sequence
  Description of Artificial Sequence: Synthetic oligonucleotide
uuuagggagcuggcaccau

SEQ ID NO: 710715 - RNA, 19 nt, Artificial Sequence
  Description of Artificial Sequence: Synthetic oligonucleotide
gagcgacuaggaacaguca

SEQ ID NO: 710716 - RNA, 19 nt, Artificial Sequence
  Description of Artificial Sequence: Synthetic oligonucleotide
caugcccacggccgcggac

SEQ ID NO: 710717 - RNA, 19 nt, Artificial Sequence
  Description of Artificial Sequence: Synthetic oligonucleotide
caaacauacgaacgcgguu

SEQ ID NO: 710718 - RNA, 19 nt, Artificial Sequence
  Description of Artificial Sequence: Synthetic oligonucleotide
acgaacgcgguugggguuu

SEQ ID NO: 710719 - RNA, 19 nt, Artificial Sequence
  Description of Artificial Sequence: Synthetic oligonucleotide
uucuccgcugccgcccgga

SEQ ID NO: 710720 - RNA, 19 nt, Artificial Sequence
  Description of Artificial Sequence: Synthetic oligonucleotide
cgucuuguugaugcgacug

SEQ ID NO: 710721 - RNA, 19 nt, Artificial Sequence
  Description of Artificial Sequence: Synthetic oligonucleotide
ucuccgcugccgcccggac

SEQ ID NO: 710722 - RNA, 19 nt, Artificial Sequence
  Description of Artificial Sequence: Synthetic oligonucleotide
ggcggaggcugaucuccgg

SEQ ID NO: 710723 - RNA, 19 nt, Artificial Sequence
  Description of Artificial Sequence: Synthetic oligonucleotide
cuuccgccccauuguccug

SEQ ID NO: 710724 - RNA, 19 nt, Artificial Sequence
  Description of Artificial Sequence: Synthetic oligonucleotide
cuggccgagcuuggucacg

SEQ ID NO: 710725 - RNA, 19 nt, Artificial Sequence
  Description of Artificial Sequence: Synthetic oligonucleotide
ccauagggugaguccuugc

SEQ ID NO: 710726 - RNA, 19 nt, Artificial Sequence
  Description of Artificial Sequence: Synthetic oligonucleotide
cuauuguccugggguucug

SEQ ID NO: 710727 - RNA, 19 nt, Artificial Sequence
  Description of Artificial Sequence: Synthetic oligonucleotide
cuuuuggaguggguggucu

SEQ ID NO: 710728 - RNA, 19 nt, Artificial Sequence
  Description of Artificial Sequence: Synthetic oligonucleotide
ccaaugucuaugcugugua

SEQ ID NO: 710729 - RNA, 19 nt, Artificial Sequence
  Description of Artificial Sequence: Synthetic oligonucleotide
cacacggaacuggccgagc

SEQ ID NO: 710730 - RNA, 19 nt, Artificial Sequence
  Description of Artificial Sequence: Synthetic oligonucleotide
gggaaagcuugggagcuuc

SEQ ID NO: 710731 - RNA, 19 nt, Artificial Sequence
  Description of Artificial Sequence: Synthetic oligonucleotide
acagucaguuugggucucu

SEQ ID NO: 710732 - RNA, 19 nt, Artificial Sequence
  Description of Artificial Sequence: Synthetic oligonucleotide
gugcacgcauggucacccc

SEQ ID NO: 710733 - RNA, 19 nt, Artificial Sequence
  Description of Artificial Sequence: Synthetic oligonucleotide
ucgauggcuguggccccgc

SEQ ID NO: 710734 - RNA, 19 nt, Artificial Sequence
  Description of Artificial Sequence: Synthetic oligonucleotide
cucgccugcgguggcugcc

SEQ ID NO: 710735 - RNA, 19 nt, Artificial Sequence
  Description of Artificial Sequence: Synthetic oligonucleotide
cucgcucauguaguccuca

SEQ ID NO: 710736 - RNA, 19 nt, Artificial Sequence
  Description of Artificial Sequence: Synthetic oligonucleotide
agagagccccuggcuuuag

SEQ ID NO: 710737 - RNA, 19 nt, Artificial Sequence
  Description of Artificial Sequence: Synthetic oligonucleotide
cuccgaggcccagaaccug

SEQ ID NO: 710738 - RNA, 19 nt, Artificial Sequence
  Description of Artificial Sequence: Synthetic oligonucleotide
guauggcuggcugcacaca

SEQ ID NO: 710739 - RNA, 19 nt, Artificial Sequence
  Description of Artificial Sequence: Synthetic oligonucleotide
aggccagggaaggguucuc

SEQ ID NO: 710740 - RNA, 19 nt, Artificial Sequence
  Description of Artificial Sequence: Synthetic oligonucleotide
gacuaggaacagucaguuu

SEQ ID NO: 710741 - RNA, 19 nt, Artificial Sequence
  Description of Artificial Sequence: Synthetic oligonucleotide
cauccucggugucuccgga

SEQ ID NO: 710742 - RNA, 19 nt, Artificial Sequence
  Description of Artificial Sequence: Synthetic oligonucleotide
accccggccuguguguaca

SEQ ID NO: 710743 - RNA, 19 nt, Artificial Sequence
  Description of Artificial Sequence: Synthetic oligonucleotide
caaugucuaugcuguguau

SEQ ID NO: 710744 - RNA, 19 nt, Artificial Sequence
  Description of Artificial Sequence: Synthetic oligonucleotide
cugcccgccacuuccggua

SEQ ID NO: 710745 - RNA, 19 nt, Artificial Sequence
  Description of Artificial Sequence: Synthetic oligonucleotide
gagcuucgucuucaccacu

SEQ ID NO: 710746 - RNA, 19 nt, Artificial Sequence
  Description of Artificial Sequence: Synthetic oligonucleotide
cucaugugugugcacgcau

SEQ ID NO: 710747 - RNA, 19 nt, Artificial Sequence
  Description of Artificial Sequence: Synthetic oligonucleotide
agauggggucccacuccug

SEQ ID NO: 710748 - RNA, 19 nt, Artificial Sequence
  Description of Artificial Sequence: Synthetic oligonucleotide
gagguaccugcgggagggc

SEQ ID NO: 710749 - RNA, 19 nt, Artificial Sequence
  Description of Artificial Sequence: Synthetic oligonucleotide
cacucaggccuggggcacc

SEQ ID NO: 710750 - RNA, 19 nt, Artificial Sequence
  Description of Artificial Sequence: Synthetic oligonucleotide
ugagggcgauuuggucucu

SEQ ID NO: 710751 - RNA, 19 nt, Artificial Sequence
  Description of Artificial Sequence: Synthetic oligonucleotide
uccggcagaccgggucacc

SEQ ID NO: 710752 - RNA, 19 nt, Artificial Sequence
  Description of Artificial Sequence: Synthetic oligonucleotide
ccgcaggcgguaacagucc

SEQ ID NO: 710753 - RNA, 19 nt, Artificial Sequence
  Description of Artificial Sequence: Synthetic oligonucleotide
gccgagcuuggucacgguc

SEQ ID NO: 710754 - RNA, 19 nt, Artificial Sequence
  Description of Artificial Sequence: Synthetic oligonucleotide
gacguggcggaggcugauc

SEQ ID NO: 710755 - RNA, 19 nt, Artificial Sequence
  Description of Artificial Sequence: Synthetic oligonucleotide
ucggugucuccggaaucuu

SEQ ID NO: 710756 - RNA, 19 nt, Artificial Sequence
  Description of Artificial Sequence: Synthetic oligonucleotide
cugagcggaagggguucug

SEQ ID NO: 710757 - RNA, 19 nt, Artificial Sequence
  Description of Artificial Sequence: Synthetic oligonucleotide
gccgaggagguugcauuag

SEQ ID NO: 710758 - RNA, 19 nt, Artificial Sequence
  Description of Artificial Sequence: Synthetic oligonucleotide
gcgguugggguuugagcca

SEQ ID NO: 710759 - RNA, 19 nt, Artificial Sequence
  Description of Artificial Sequence: Synthetic oligonucleotide
acuccccguacaggaagaa

SEQ ID NO: 710760 - RNA, 19 nt, Artificial Sequence
  Description of Artificial Sequence: Synthetic oligonucleotide
uaccugcgggagggcagcc

SEQ ID NO: 710761 - RNA, 19 nt, Artificial Sequence
  Description of Artificial Sequence: Synthetic oligonucleotide
cgcucauguaguccucaag

SEQ ID NO: 710762 - RNA, 19 nt, Artificial Sequence
  Description of Artificial Sequence: Synthetic oligonucleotide
cuaacuugucaggcccaaa

SEQ ID NO: 710763 - RNA, 19 nt, Artificial Sequence
  Description of Artificial Sequence: Synthetic oligonucleotide
caccccggccuguguguac

SEQ ID NO: 710764 - RNA, 19 nt, Artificial Sequence
  Description of Artificial Sequence: Synthetic oligonucleotide
gucccagcgcuucuccgcu

SEQ ID NO: 710765 - RNA, 19 nt, Artificial Sequence
  Description of Artificial Sequence: Synthetic oligonucleotide
caagcccugccaugaggua

SEQ ID NO: 710766 - RNA, 19 nt, Artificial Sequence
  Description of Artificial Sequence: Synthetic oligonucleotide
cugcugcaggacacgacgu

SEQ ID NO: 710767 - RNA, 19 nt, Artificial Sequence
  Description of Artificial Sequence: Synthetic oligonucleotide
cuugaggguggguggcccu

SEQ ID NO: 710768 - RNA, 19 nt, Artificial Sequence
  Description of Artificial Sequence: Synthetic oligonucleotide
ggagucuccgccucgucuu

SEQ ID NO: 710769 - RNA, 19 nt, Artificial Sequence
  Description of Artificial Sequence: Synthetic oligonucleotide
ugucggccuugagaagguu

SEQ ID NO: 710770 - RNA, 19 nt, Artificial Sequence
  Description of Artificial Sequence: Synthetic oligonucleotide
ccggacgaaggccagggaa

SEQ ID NO: 710771 - RNA, 19 nt, Artificial Sequence
  Description of Artificial Sequence: Synthetic oligonucleotide
uugagccacuucggcucuc

SEQ ID NO: 710772 - RNA, 19 nt, Artificial Sequence
  Description of Artificial Sequence: Synthetic oligonucleotide
cucucguccccagggaacu

SEQ ID NO: 710773 - RNA, 19 nt, Artificial Sequence
  Description of Artificial Sequence: Synthetic oligonucleotide
gagggcagccggcgccgca

SEQ ID NO: 710774 - RNA, 19 nt, Artificial Sequence
  Description of Artificial Sequence: Synthetic oligonucleotide
acgacguggcggaggcuga

SEQ ID NO: 710775 - RNA, 19 nt, Artificial Sequence
  Description of Artificial Sequence: Synthetic oligonucleotide
gcgacuaggaacagucagu

SEQ ID NO: 710776 - RNA, 19 nt, Artificial Sequence
  Description of Artificial Sequence: Synthetic oligonucleotide
cuccggcagaccgggucac

SEQ ID NO: 710777 - RNA, 19 nt, Artificial Sequence
  Description of Artificial Sequence: Synthetic oligonucleotide
ggccgaggagguugcauua

SEQ ID NO: 710778 - RNA, 19 nt, Artificial Sequence
  Description of Artificial Sequence: Synthetic oligonucleotide
ccguacaggaagaaguguu

SEQ ID NO: 710779 - RNA, 19 nt, Artificial Sequence
  Description of Artificial Sequence: Synthetic oligonucleotide
cugaggccgcuuccgggaa

SEQ ID NO: 710780 - RNA, 19 nt, Artificial Sequence
  Description of Artificial Sequence: Synthetic oligonucleotide
gagccagcauauggguccu

SEQ ID NO: 710781 - RNA, 19 nt, Artificial Sequence
  Description of Artificial Sequence: Synthetic oligonucleotide
uagauccaccggggccgga

SEQ ID NO: 710782 - RNA, 19 nt, Artificial Sequence
  Description of Artificial Sequence: Synthetic oligonucleotide
agaggccgaggagguugca

SEQ ID NO: 710783 - RNA, 19 nt, Artificial Sequence
  Description of Artificial Sequence: Synthetic oligonucleotide
ccgaggagguugcauuaga

SEQ ID NO: 710784 - RNA, 19 nt, Artificial Sequence
  Description of Artificial Sequence: Synthetic oligonucleotide
gcuguauggcuggcugcac

SEQ ID NO: 710785 - RNA, 19 nt, Artificial Sequence
  Description of Artificial Sequence: Synthetic oligonucleotide
gcauauggguccucaccau

SEQ ID NO: 710786 - RNA, 19 nt, Artificial Sequence
  Description of Artificial Sequence: Synthetic oligonucleotide
cgcgagcagaggcugaaga

SEQ ID NO: 710787 - RNA, 19 nt, Artificial Sequence
  Description of Artificial Sequence: Synthetic oligonucleotide
gggcgauuuggucucuuuu

SEQ ID NO: 710788 - RNA, 19 nt, Artificial Sequence
  Description of Artificial Sequence: Synthetic oligonucleotide
guugggguuugagccacuu

SEQ ID NO: 710789 - RNA, 19 nt, Artificial Sequence
  Description of Artificial Sequence: Synthetic oligonucleotide
gagucuccgccucgucuuu

SEQ ID NO: 710790 - RNA, 19 nt, Artificial Sequence
  Description of Artificial Sequence: Synthetic oligonucleotide
ggcgccgcaggcgguaaca

SEQ ID NO: 710791 - RNA, 19 nt, Artificial Sequence
  Description of Artificial Sequence: Synthetic oligonucleotide
gugucggccuugagaaggu

SEQ ID NO: 710792 - RNA, 19 nt, Artificial Sequence
  Description of Artificial Sequence: Synthetic oligonucleotide
acacgacguggcggaggcu

SEQ ID NO: 710793 - RNA, 19 nt, Artificial Sequence
  Description of Artificial Sequence: Synthetic oligonucleotide
gcccgccacuuccgguagg

SEQ ID NO: 710794 - RNA, 19 nt, Artificial Sequence
  Description of Artificial Sequence: Synthetic oligonucleotide
gaacgcgguugggguuuga

SEQ ID NO: 710795 - RNA, 19 nt, Artificial Sequence
  Description of Artificial Sequence: Synthetic oligonucleotide
cgcauggucaccccggccu

SEQ ID NO: 710796 - RNA, 19 nt, Artificial Sequence
  Description of Artificial Sequence: Synthetic oligonucleotide
cgcuuccgggaaagcuugg

SEQ ID NO: 710797 - RNA, 19 nt, Artificial Sequence
  Description of Artificial Sequence: Synthetic oligonucleotide
cacggaacuggccgagcuu

SEQ ID NO: 710798 - RNA, 19 nt, Artificial Sequence
  Description of Artificial Sequence: Synthetic oligonucleotide
ccggggccggacgaaggcc

SEQ ID NO: 710799 - RNA, 19 nt, Artificial Sequence
  Description of Artificial Sequence: Synthetic oligonucleotide
cguacaggaagaaguguuu

SEQ ID NO: 710800 - RNA, 19 nt, Artificial Sequence
  Description of Artificial Sequence: Synthetic oligonucleotide
cgcucgcucauguaguccu

SEQ ID NO: 710801 - RNA, 19 nt, Artificial Sequence
  Description of Artificial Sequence: Synthetic oligonucleotide
gccgcccggacuaacuugu

SEQ ID NO: 710802 - RNA, 19 nt, Artificial Sequence
  Description of Artificial Sequence: Synthetic oligonucleotide
gcaccucuacgaaggccga

SEQ ID NO: 710803 - RNA, 19 nt, Artificial Sequence
  Description of Artificial Sequence: Synthetic oligonucleotide
gcucgcucauguaguccuc

SEQ ID NO: 710804 - RNA, 19 nt, Artificial Sequence
  Description of Artificial Sequence: Synthetic oligonucleotide
ccagggaaggguucuccau

SEQ ID NO: 710805 - RNA, 19 nt, Artificial Sequence
  Description of Artificial Sequence: Synthetic oligonucleotide
gccggacgaaggccaggga

SEQ ID NO: 710806 - RNA, 19 nt, Artificial Sequence
  Description of Artificial Sequence: Synthetic oligonucleotide
ggguccagucuggacgaua

SEQ ID NO: 710807 - RNA, 19 nt, Artificial Sequence
  Description of Artificial Sequence: Synthetic oligonucleotide
gggagcgacuaggaacagu

SEQ ID NO: 710808 - RNA, 19 nt, Artificial Sequence
  Description of Artificial Sequence: Synthetic oligonucleotide
gcucuggaauuggcagguc

SEQ ID NO: 710809 - RNA, 19 nt, Artificial Sequence
  Description of Artificial Sequence: Synthetic oligonucleotide
cugccgcccggacuaacuu

SEQ ID NO: 710810 - RNA, 19 nt, Artificial Sequence
  Description of Artificial Sequence: Synthetic oligonucleotide
cuccgcugccgcccggacu

SEQ ID NO: 710811 - RNA, 19 nt, Artificial Sequence
  Description of Artificial Sequence: Synthetic oligonucleotide
ccgcacaauccggccuccg

SEQ ID NO: 710812 - RNA, 19 nt, Artificial Sequence
  Description of Artificial Sequence: Synthetic oligonucleotide
gcugcccgccacuuccggu

SEQ ID NO: 710813 - RNA, 19 nt, Artificial Sequence
  Description of Artificial Sequence: Synthetic oligonucleotide
gggugaguccuugcuguau

SEQ ID NO: 710814 - RNA, 19 nt, Artificial Sequence
  Description of Artificial Sequence: Synthetic oligonucleotide
ccggcagaccgggucacca

SEQ ID NO: 710815 - RNA, 19 nt, Artificial Sequence
  Description of Artificial Sequence: Synthetic oligonucleotide
ccgccccauuguccugucc

SEQ ID NO: 710816 - RNA, 19 nt, Artificial Sequence
  Description of Artificial Sequence: Synthetic oligonucleotide
gccgcgagcagaggcugaa

SEQ ID NO: 710817 - RNA, 19 nt, Artificial Sequence
  Description of Artificial Sequence: Synthetic oligonucleotide
gagggcgauuuggucucuu

SEQ ID NO: 710818 - RNA, 19 nt, Artificial Sequence
  Description of Artificial Sequence: Synthetic oligonucleotide
cccguacaggaagaagugu

SEQ ID NO: 710819 - RNA, 19 nt, Artificial Sequence
  Description of Artificial Sequence: Synthetic oligonucleotide
cgacuaggaacagucaguu

SEQ ID NO: 710820 - RNA, 19 nt, Artificial Sequence
  Description of Artificial Sequence: Synthetic oligonucleotide
ccgcgagcagaggcugaag

SEQ ID NO: 710821 - RNA, 19 nt, Artificial Sequence
  Description of Artificial Sequence: Synthetic oligonucleotide
gcaugcccacggccgcgga

SEQ ID NO: 710822 - RNA, 19 nt, Artificial Sequence
  Description of Artificial Sequence: Synthetic oligonucleotide
gcucugagcggaagggguu

SEQ ID NO: 710823 - RNA, 19 nt, Artificial Sequence
  Description of Artificial Sequence: Synthetic oligonucleotide
cggcaugcccacggccgcg

SEQ ID NO: 710824 - RNA, 19 nt, Artificial Sequence
  Description of Artificial Sequence: Synthetic oligonucleotide
cgucuuugucuggagggcu

SEQ ID NO: 710825 - RNA, 19 nt, Artificial Sequence
  Description of Artificial Sequence: Synthetic oligonucleotide
ccgccacuuccgguaggug

SEQ ID NO: 710826 - RNA, 19 nt, Artificial Sequence
  Description of Artificial Sequence: Synthetic oligonucleotide
cccugccaugagguaccug

SEQ ID NO: 710827 - RNA, 19 nt, Artificial Sequence
  Description of Artificial Sequence: Synthetic oligonucleotide
cuggggcgagcuggguccu

SEQ ID NO: 710828 - RNA, 19 nt, Artificial Sequence
  Description of Artificial Sequence: Synthetic oligonucleotide
cgaacgcgguugggguuug

SEQ ID NO: 710829 - RNA, 19 nt, Artificial Sequence
  Description of Artificial Sequence: Synthetic oligonucleotide
gggucgaguccuggcugcu

SEQ ID NO: 710830 - RNA, 19 nt, Artificial Sequence
  Description of Artificial Sequence: Synthetic oligonucleotide
ggccauagggugaguccuu

SEQ ID NO: 710831 - RNA, 19 nt, Artificial Sequence
  Description of Artificial Sequence: Synthetic oligonucleotide
gguugggguuugagccacu

SEQ ID NO: 710832 - RNA, 19 nt, Artificial Sequence
  Description of Artificial Sequence: Synthetic oligonucleotide
ggccgagcuuggucacggu

SEQ ID NO: 710833 - RNA, 19 nt, Artificial Sequence
  Description of Artificial Sequence: Synthetic oligonucleotide
cgaauuggacccgcucgcu

SEQ ID NO: 710834 - RNA, 19 nt, Artificial Sequence
  Description of Artificial Sequence: Synthetic oligonucleotide
ccccuucagugucacuauu

SEQ ID NO: 710835 - RNA, 19 nt, Artificial Sequence
  Description of Artificial Sequence: Synthetic oligonucleotide
gcccugccaugagguaccu

SEQ ID NO: 710836 - RNA, 19 nt, Artificial Sequence
  Description of Artificial Sequence: Synthetic oligonucleotide
gggguccagucuggacgau

SEQ ID NO: 710837 - RNA, 19 nt, Artificial Sequence
  Description of Artificial Sequence: Synthetic oligonucleotide
ccgugccuucucggggcuu

SEQ ID NO: 710838 - RNA, 19 nt, Artificial Sequence
  Description of Artificial Sequence: Synthetic oligonucleotide
aaucguuuuacacagauac

SEQ ID NO: 710839 - RNA, 19 nt, Artificial Sequence
  Description of Artificial Sequence: Synthetic oligonucleotide
aaugaauaccauuaacugc

SEQ ID NO: 710840 - RNA, 19 nt, Artificial Sequence
  Description of Artificial Sequence: Synthetic oligonucleotide
agaauaauauauuaaaacu

SEQ ID NO: 710841 - RNA, 19 nt, Artificial Sequence
  Description of Artificial Sequence: Synthetic oligonucleotide
aauaccauuaacugcucac

SEQ ID NO: 710842 - RNA, 19 nt, Artificial Sequence
  Description of Artificial Sequence: Synthetic oligonucleotide
aaugucuugagaugggcac

SEQ ID NO: 710843 - RNA, 19 nt, Artificial Sequence
  Description of Artificial Sequence: Synthetic oligonucleotide
uuuagcaccaaaaucaagu

SEQ ID NO: 710844 - RNA, 19 nt, Artificial Sequence
  Description of Artificial Sequence: Synthetic oligonucleotide
aauuggggaacuuuagcac

SEQ ID NO: 710845 - RNA, 19 nt, Artificial Sequence
  Description of Artificial Sequence: Synthetic oligonucleotide
aagaauauauucuauggau

SEQ ID NO: 710846 - RNA, 19 nt, Artificial Sequence
  Description of Artificial Sequence: Synthetic oligonucleotide
aagaaauagaaagcgacgg

SEQ ID NO: 710847 - RNA, 19 nt, Artificial Sequence
  Description of Artificial Sequence: Synthetic oligonucleotide
uuaugcgugguuaaguggg

SEQ ID NO: 710848 - RNA, 19 nt, Artificial Sequence
  Description of Artificial Sequence: Synthetic oligonucleotide
uuuauauugaugugcagug

SEQ ID NO: 710849 - RNA, 19 nt, Artificial Sequence
  Description of Artificial Sequence: Synthetic oligonucleotide
gaaugaauaccauuaacug

SEQ ID NO: 710850 - RNA, 19 nt, Artificial Sequence
  Description of Artificial Sequence: Synthetic oligonucleotide
uuggaaaacuccaaccugg

SEQ ID NO: 710851 - RNA, 19 nt, Artificial Sequence
  Description of Artificial Sequence: Synthetic oligonucleotide
aaagcuaugcugaaggcgg

SEQ ID NO: 710852 - RNA, 19 nt, Artificial Sequence
  Description of Artificial Sequence: Synthetic oligonucleotide
caugcuaggagcaaagagg

SEQ ID NO: 710853 - RNA, 19 nt, Artificial Sequence
  Description of Artificial Sequence: Synthetic oligonucleotide
agguaggggaaucugagcc

SEQ ID NO: 710854 - RNA, 19 nt, Artificial Sequence
  Description of Artificial Sequence: Synthetic oligonucleotide
cuugaguuguccaagguag

SEQ ID NO: 710855 - RNA, 19 nt, Artificial Sequence
  Description of Artificial Sequence: Synthetic oligonucleotide
uugaaugucaaaauagaaa

SEQ ID NO: 710856 - RNA, 19 nt, Artificial Sequence
  Description of Artificial Sequence: Synthetic oligonucleotide
aggaaaucguuuuacacag

SEQ ID NO: 710857 - RNA, 19 nt, Artificial Sequence
  Description of Artificial Sequence: Synthetic oligonucleotide
uguggaaugaauaccauua

SEQ ID NO: 710858 - RNA, 19 nt, Artificial Sequence
  Description of Artificial Sequence: Synthetic oligonucleotide
uaaagcuacuucuacagga

SEQ ID NO: 710859 - RNA, 19 nt, Artificial Sequence
  Description of Artificial Sequence: Synthetic oligonucleotide
gaaguuuaaacccagggaa

SEQ ID NO: 710860 - RNA, 19 nt, Artificial Sequence
  Description of Artificial Sequence: Synthetic oligonucleotide
acuuagucaucugagaugg

SEQ ID NO: 710861 - RNA, 19 nt, Artificial Sequence
  Description of Artificial Sequence: Synthetic oligonucleotide
aauaaauaauccaacaguu

SEQ ID NO: 710862 - RNA, 19 nt, Artificial Sequence
  Description of Artificial Sequence: Synthetic oligonucleotide
aagauuagucaacaggggu

SEQ ID NO: 710863 - RNA, 19 nt, Artificial Sequence
  Description of Artificial Sequence: Synthetic oligonucleotide
guauucuagagcaaaaucc

SEQ ID NO: 710864 - RNA, 19 nt, Artificial Sequence
  Description of Artificial Sequence: Synthetic oligonucleotide
aauugacuuguccuuaugu

SEQ ID NO: 710865 - RNA, 19 nt, Artificial Sequence
  Description of Artificial Sequence: Synthetic oligonucleotide
ggcacauaaagucaaaggg

SEQ ID NO: 710866 - RNA, 19 nt, Artificial Sequence
  Description of Artificial Sequence: Synthetic oligonucleotide
agaaccucgaaucugcgag

SEQ ID NO: 710867 - RNA, 19 nt, Artificial Sequence
  Description of Artificial Sequence: Synthetic oligonucleotide
uauauugaugugcagugac

SEQ ID NO: 710868 - RNA, 19 nt, Artificial Sequence
  Description of Artificial Sequence: Synthetic oligonucleotide
aaagacacgucacaaaauu

SEQ ID NO: 710869 - RNA, 19 nt, Artificial Sequence
  Description of Artificial Sequence: Synthetic oligonucleotide
ucaauguaggaauugggga

SEQ ID NO: 710870 - RNA, 19 nt, Artificial Sequence
  Description of Artificial Sequence: Synthetic oligonucleotide
uaagguagaccuaagguau

SEQ ID NO: 710871 - RNA, 19 nt, Artificial Sequence
  Description of Artificial Sequence: Synthetic oligonucleotide
aauacguuuugauaaguua

SEQ ID NO: 710872 - RNA, 19 nt, Artificial Sequence
  Description of Artificial Sequence: Synthetic oligonucleotide
auaaauacguuuugauaag

SEQ ID NO: 710873 - RNA, 19 nt, Artificial Sequence
  Description of Artificial Sequence: Synthetic oligonucleotide
uuaaagcuacuucuacagg

SEQ ID NO: 710874 - RNA, 19 nt, Artificial Sequence
  Description of Artificial Sequence: Synthetic oligonucleotide
agcuauacauaaaaggugg

SEQ ID NO: 710875 - RNA, 19 nt, Artificial Sequence
  Description of Artificial Sequence: Synthetic oligonucleotide
uaaagcuaugcugaaggcg

SEQ ID NO: 710876 - RNA, 19 nt, Artificial Sequence
  Description of Artificial Sequence: Synthetic oligonucleotide
aagguuuugaaugucaaaa

SEQ ID NO: 710877 - RNA, 19 nt, Artificial Sequence
  Description of Artificial Sequence: Synthetic oligonucleotide
ugugaaaaugaaguggcag

SEQ ID NO: 710878 - RNA, 19 nt, Artificial Sequence
  Description of Artificial Sequence: Synthetic oligonucleotide
ucguuuuacacagauacug

SEQ ID NO: 710879 - RNA, 19 nt, Artificial Sequence
  Description of Artificial Sequence: Synthetic oligonucleotide
accuaagguauucuagagc

SEQ ID NO: 710880 - RNA, 19 nt, Artificial Sequence
  Description of Artificial Sequence: Synthetic oligonucleotide
gaagcuaccaacaaauuga

SEQ ID NO: 710881 - RNA, 19 nt, Artificial Sequence
  Description of Artificial Sequence: Synthetic oligonucleotide
aaauagaaagcgacgguag

SEQ ID NO: 710882 - RNA, 19 nt, Artificial Sequence
  Description of Artificial Sequence: Synthetic oligonucleotide
caauguaggaauuggggag

SEQ ID NO: 710883 - RNA, 19 nt, Artificial Sequence
  Description of Artificial Sequence: Synthetic oligonucleotide
uagaccuaagguauucuag

SEQ ID NO: 710884 - RNA, 19 nt, Artificial Sequence
  Description of Artificial Sequence: Synthetic oligonucleotide
gaauuggggaacuuuagca

SEQ ID NO: 710885 - RNA, 19 nt, Artificial Sequence
  Description of Artificial Sequence: Synthetic oligonucleotide
aaagcgacgguagugacca

SEQ ID NO: 710886 - RNA, 19 nt, Artificial Sequence
  Description of Artificial Sequence: Synthetic oligonucleotide
ugauaaguuaaauaagcuu

SEQ ID NO: 710887 - RNA, 19 nt, Artificial Sequence
  Description of Artificial Sequence: Synthetic oligonucleotide
ugaauuggggaacuuuagc

SEQ ID NO: 710888 - RNA, 19 nt, Artificial Sequence
  Description of Artificial Sequence: Synthetic oligonucleotide
uguauguggaaugaauacc

SEQ ID NO: 710889 - RNA, 19 nt, Artificial Sequence
  Description of Artificial Sequence: Synthetic oligonucleotide
gaagguaugggauggggug

SEQ ID NO: 710890 - RNA, 19 nt, Artificial Sequence
  Description of Artificial Sequence: Synthetic oligonucleotide
augaauaccauuaacugcu

SEQ ID NO: 710891 - RNA, 19 nt, Artificial Sequence
  Description of Artificial Sequence: Synthetic oligonucleotide
aacaaauugacuuguccuu

SEQ ID NO: 710892 - RNA, 19 nt, Artificial Sequence
  Description of Artificial Sequence: Synthetic oligonucleotide
agcaaagcuaaagcuaugc

SEQ ID NO: 710893 - RNA, 19 nt, Artificial Sequence
  Description of Artificial Sequence: Synthetic oligonucleotide
uguuaugcgugguuaagug

SEQ ID NO: 710894 - RNA, 19 nt, Artificial Sequence
  Description of Artificial Sequence: Synthetic oligonucleotide
acuuaugucaaaaccuucg

SEQ ID NO: 710895 - RNA, 19 nt, Artificial Sequence
  Description of Artificial Sequence: Synthetic oligonucleotide
uugaugugcagugacaagc

SEQ ID NO: 710896 - RNA, 19 nt, Artificial Sequence
  Description of Artificial Sequence: Synthetic oligonucleotide
ucccacuuaugucaaaacc

SEQ ID NO: 710897 - RNA, 19 nt, Artificial Sequence
  Description of Artificial Sequence: Synthetic oligonucleotide
uauggauuugucaucccga

SEQ ID NO: 710898 - RNA, 19 nt, Artificial Sequence
  Description of Artificial Sequence: Synthetic oligonucleotide
auaccauuaacugcucacc

SEQ ID NO: 710899 - RNA, 19 nt, Artificial Sequence
  Description of Artificial Sequence: Synthetic oligonucleotide
uuucaagccagaagaagcu

SEQ ID NO: 710900 - RNA, 19 nt, Artificial Sequence
  Description of Artificial Sequence: Synthetic oligonucleotide
gcaagauuagucaacaggg

SEQ ID NO: 710901 - RNA, 19 nt, Artificial Sequence
  Description of Artificial Sequence: Synthetic oligonucleotide
guuucaagccagaagaagc

SEQ ID NO: 710902 - RNA, 19 nt, Artificial Sequence
  Description of Artificial Sequence: Synthetic oligonucleotide
aagguaugggauggggugc

SEQ ID NO: 710903 - RNA, 19 nt, Artificial Sequence
  Description of Artificial Sequence: Synthetic oligonucleotide
ugacuuagucaucugagau

SEQ ID NO: 710904 - RNA, 19 nt, Artificial Sequence
  Description of Artificial Sequence: Synthetic oligonucleotide
caagauuagucaacagggg

SEQ ID NO: 710905 - RNA, 19 nt, Artificial Sequence
  Description of Artificial Sequence: Synthetic oligonucleotide
cuauggauuugucaucccg

SEQ ID NO: 710906 - RNA, 19 nt, Artificial Sequence
  Description of Artificial Sequence: Synthetic oligonucleotide
cacgucacaaaauuuuaag

SEQ ID NO: 710907 - RNA, 19 nt, Artificial Sequence
  Description of Artificial Sequence: Synthetic oligonucleotide
aaacccagcaaagcuaaag

SEQ ID NO: 710908 - RNA, 19 nt, Artificial Sequence
  Description of Artificial Sequence: Synthetic oligonucleotide
uguugaagaauaauauauu

SEQ ID NO: 710909 - RNA, 19 nt, Artificial Sequence
  Description of Artificial Sequence: Synthetic oligonucleotide
cuuauguuaggggaggggc

SEQ ID NO: 710910 - RNA, 19 nt, Artificial Sequence
  Description of Artificial Sequence: Synthetic oligonucleotide
guuaugcgugguuaagugg

SEQ ID NO: 710911 - RNA, 19 nt, Artificial Sequence
  Description of Artificial Sequence: Synthetic oligonucleotide
auucuauggauuugucauc

SEQ ID NO: 710912 - RNA, 19 nt, Artificial Sequence
  Description of Artificial Sequence: Synthetic oligonucleotide
uucuauggauuugucaucc

SEQ ID NO: 710913 - RNA, 19 nt, Artificial Sequence
  Description of Artificial Sequence: Synthetic oligonucleotide
agaugucacauaugaauug

SEQ ID NO: 710914 - RNA, 19 nt, Artificial Sequence
  Description of Artificial Sequence: Synthetic oligonucleotide
gacuuagucaucugagaug

SEQ ID NO: 710915 - RNA, 19 nt, Artificial Sequence
  Description of Artificial Sequence: Synthetic oligonucleotide
agggcucuaagguagaccu

SEQ ID NO: 710916 - RNA, 19 nt, Artificial Sequence
  Description of Artificial Sequence: Synthetic oligonucleotide
cuguauguggaaugaauac

SEQ ID NO: 710917 - RNA, 19 nt, Artificial Sequence
  Description of Artificial Sequence: Synthetic oligonucleotide
agauacuguauguggaaug

SEQ ID NO: 710918 - RNA, 19 nt, Artificial Sequence
  Description of Artificial Sequence: Synthetic oligonucleotide
uugucaucccgauaaauau

SEQ ID NO: 710919 - RNA, 19 nt, Artificial Sequence
  Description of Artificial Sequence: Synthetic oligonucleotide
gagagucugcugaaaaugg

SEQ ID NO: 710920 - RNA, 19 nt, Artificial Sequence
  Description of Artificial Sequence: Synthetic oligonucleotide
cuuguacauacauucucag

SEQ ID NO: 710921 - RNA, 19 nt, Artificial Sequence
  Description of Artificial Sequence: Synthetic oligonucleotide
ucguccaacuaguucaacc

SEQ ID NO: 710922 - RNA, 19 nt, Artificial Sequence
  Description of Artificial Sequence: Synthetic oligonucleotide
ucauccgcgcucagaaugg

SEQ ID NO: 710923 - RNA, 19 nt, Artificial Sequence
  Description of Artificial Sequence: Synthetic oligonucleotide
aaauugacuuguccuuaug

SEQ ID NO: 710924 - RNA, 19 nt, Artificial Sequence
  Description of Artificial Sequence: Synthetic oligonucleotide
acgucacaaaauuuuaaga

SEQ ID NO: 710925 - RNA, 19 nt, Artificial Sequence
  Description of Artificial Sequence: Synthetic oligonucleotide
auauauucuauggauuugu

SEQ ID NO: 710926 - RNA, 19 nt, Artificial Sequence
  Description of Artificial Sequence: Synthetic oligonucleotide
uuauguuaggggaggggca

SEQ ID NO: 710927 - RNA, 19 nt, Artificial Sequence
  Description of Artificial Sequence: Synthetic oligonucleotide
agaaauagaaagcgacggu

SEQ ID NO: 710928 - RNA, 19 nt, Artificial Sequence
  Description of Artificial Sequence: Synthetic oligonucleotide
uuauuggugccaucgggca

SEQ ID NO: 710929 - RNA, 19 nt, Artificial Sequence
  Description of Artificial Sequence: Synthetic oligonucleotide
auaugaagaucauaauuua

SEQ ID NO: 710930 - RNA, 19 nt, Artificial Sequence
  Description of Artificial Sequence: Synthetic oligonucleotide
gaaaaugaaguggcagcgg

SEQ ID NO: 710931 - RNA, 19 nt, Artificial Sequence
  Description of Artificial Sequence: Synthetic oligonucleotide
aguucaaccuuccucccug

SEQ ID NO: 710932 - RNA, 19 nt, Artificial Sequence
  Description of Artificial Sequence: Synthetic oligonucleotide
cuaugaaauggagggaggg

SEQ ID NO: 710933 - RNA, 19 nt, Artificial Sequence
  Description of Artificial Sequence: Synthetic oligonucleotide
ucuugaguuguccaaggua

SEQ ID NO: 710934 - RNA, 19 nt, Artificial Sequence
  Description of Artificial Sequence: Synthetic oligonucleotide
uauugaugugcagugacaa

SEQ ID NO: 710935 - RNA, 19 nt, Artificial Sequence
  Description of Artificial Sequence: Synthetic oligonucleotide
uccaacuaguucaaccuuc

SEQ ID NO: 710936 - RNA, 19 nt, Artificial Sequence
  Description of Artificial Sequence: Synthetic oligonucleotide
ucaguccuaccugugaaag

SEQ ID NO: 710937 - RNA, 19 nt, Artificial Sequence
  Description of Artificial Sequence: Synthetic oligonucleotide
aaaggcgaagggguuauug

SEQ ID NO: 710938 - RNA, 19 nt, Artificial Sequence
  Description of Artificial Sequence: Synthetic oligonucleotide
cucuaagguagaccuaagg

SEQ ID NO: 710939 - RNA, 19 nt, Artificial Sequence
  Description of Artificial Sequence: Synthetic oligonucleotide
uauauucuauggauuuguc

SEQ ID NO: 710940 - RNA, 19 nt, Artificial Sequence
  Description of Artificial Sequence: Synthetic oligonucleotide
uccauuaaagcuacuucua

SEQ ID NO: 710941 - RNA, 19 nt, Artificial Sequence
  Description of Artificial Sequence: Synthetic oligonucleotide
aaaugaaguggcagcgggg

SEQ ID NO: 710942 - RNA, 19 nt, Artificial Sequence
  Description of Artificial Sequence: Synthetic oligonucleotide
gaugaaguuuaaacccagg

SEQ ID NO: 710943 - RNA, 19 nt, Artificial Sequence
  Description of Artificial Sequence: Synthetic oligonucleotide
agaaagcgacgguagugac

SEQ ID NO: 710944 - RNA, 19 nt, Artificial Sequence
  Description of Artificial Sequence: Synthetic oligonucleotide
ucaacagggguucgggcug

SEQ ID NO: 710945 - RNA, 19 nt, Artificial Sequence
  Description of Artificial Sequence: Synthetic oligonucleotide
aaccucgaaucugcgagcg

SEQ ID NO: 710946 - RNA, 19 nt, Artificial Sequence
  Description of Artificial Sequence: Synthetic oligonucleotide
agcaagaggaauaauaauu

SEQ ID NO: 710947 - RNA, 19 nt, Artificial Sequence
  Description of Artificial Sequence: Synthetic oligonucleotide
acacaaaggggaaaauuuc

SEQ ID NO: 710948 - RNA, 19 nt, Artificial Sequence
  Description of Artificial Sequence: Synthetic oligonucleotide
aaacgggguuuauugauuu

SEQ ID NO: 710949 - RNA, 19 nt, Artificial Sequence
  Description of Artificial Sequence: Synthetic oligonucleotide
ucuacaggaaaucguuuua

SEQ ID NO: 710950 - RNA, 19 nt, Artificial Sequence
  Description of Artificial Sequence: Synthetic oligonucleotide
auugacuuguccuuauguu

SEQ ID NO: 710951 - RNA, 19 nt, Artificial Sequence
  Description of Artificial Sequence: Synthetic oligonucleotide
ggauuugucaucccgauaa

SEQ ID NO: 710952 - RNA, 19 nt, Artificial Sequence
  Description of Artificial Sequence: Synthetic oligonucleotide
guauguggaaugaauacca

SEQ ID NO: 710953 - RNA, 19 nt, Artificial Sequence
  Description of Artificial Sequence: Synthetic oligonucleotide
accaagguuguucugguau

SEQ ID NO: 710954 - RNA, 19 nt, Artificial Sequence
  Description of Artificial Sequence: Synthetic oligonucleotide
gucauccgcgcucagaaug

SEQ ID NO: 710955 - RNA, 19 nt, Artificial Sequence
  Description of Artificial Sequence: Synthetic oligonucleotide
ucuccaauuucugaaaguu

SEQ ID NO: 710956 - RNA, 19 nt, Artificial Sequence
  Description of Artificial Sequence: Synthetic oligonucleotide
aaaccuucguccaacuagu

SEQ ID NO: 710957 - RNA, 19 nt, Artificial Sequence
  Description of Artificial Sequence: Synthetic oligonucleotide
gguuauuggugccaucggg

SEQ ID NO: 710958 - RNA, 19 nt, Artificial Sequence
  Description of Artificial Sequence: Synthetic oligonucleotide
auagaaagcgacgguagug

SEQ ID NO: 710959 - RNA, 19 nt, Artificial Sequence
  Description of Artificial Sequence: Synthetic oligonucleotide
gaaauagaaagcgacggua

SEQ ID NO: 710960 - RNA, 19 nt, Artificial Sequence
  Description of Artificial Sequence: Synthetic oligonucleotide
accuucguccaacuaguuc

SEQ ID NO: 710961 - RNA, 19 nt, Artificial Sequence
  Description of Artificial Sequence: Synthetic oligonucleotide
uauuggugccaucgggcag

SEQ ID NO: 710962 - RNA, 19 nt, Artificial Sequence
  Description of Artificial Sequence: Synthetic oligonucleotide
uaaauacguuuugauaagu

SEQ ID NO: 710963 - RNA, 19 nt, Artificial Sequence
  Description of Artificial Sequence: Synthetic oligonucleotide
cuaaggagaagaaacucaa

SEQ ID NO: 710964 - RNA, 19 nt, Artificial Sequence
  Description of Artificial Sequence: Synthetic oligonucleotide
ucuguuaugcgugguuaag

SEQ ID NO: 710965 - RNA, 19 nt, Artificial Sequence
  Description of Artificial Sequence: Synthetic oligonucleotide
ccuaagguauucuagagca

SEQ ID NO: 710966 - RNA, 19 nt, Artificial Sequence
  Description of Artificial Sequence: Synthetic oligonucleotide
uuauauugaugugcaguga

SEQ ID NO: 710967 - RNA, 19 nt, Artificial Sequence
  Description of Artificial Sequence: Synthetic oligonucleotide
aggggcaacauaccaaggu

SEQ ID NO: 710968 - RNA, 19 nt, Artificial Sequence
  Description of Artificial Sequence: Synthetic oligonucleotide
gaaaucguuuuacacagau

SEQ ID NO: 710969 - RNA, 19 nt, Artificial Sequence
  Description of Artificial Sequence: Synthetic oligonucleotide
acuuguacauacauucuca

SEQ ID NO: 710970 - RNA, 19 nt, Artificial Sequence
  Description of Artificial Sequence: Synthetic oligonucleotide
agguuuugaaugucaaaau

SEQ ID NO: 710971 - RNA, 19 nt, Artificial Sequence
  Description of Artificial Sequence: Synthetic oligonucleotide
aaauacguuuugauaaguu

SEQ ID NO: 710972 - RNA, 19 nt, Artificial Sequence
  Description of Artificial Sequence: Synthetic oligonucleotide
uccgagagagaauccugag

SEQ ID NO: 710973 - RNA, 19 nt, Artificial Sequence
  Description of Artificial Sequence: Synthetic oligonucleotide
cagggguucgggcugaaag

SEQ ID NO: 710974 - RNA, 19 nt, Artificial Sequence
  Description of Artificial Sequence: Synthetic oligonucleotide
aaagcuacuucuacaggaa

SEQ ID NO: 710975 - RNA, 19 nt, Artificial Sequence
  Description of Artificial Sequence: Synthetic oligonucleotide
agaaguuaaggggugggga

SEQ ID NO: 710976 - RNA, 19 nt, Artificial Sequence
  Description of Artificial Sequence: Synthetic oligonucleotide
ucugcgagcggaaugucuu

SEQ ID NO: 710977 - RNA, 19 nt, Artificial Sequence
  Description of Artificial Sequence: Synthetic oligonucleotide
ucucucauuuuguugucau

SEQ ID NO: 710978 - RNA, 19 nt, Artificial Sequence
  Description of Artificial Sequence: Synthetic oligonucleotide
ucccuuuuagaagcuauac

SEQ ID NO: 710979 - RNA, 19 nt, Artificial Sequence
  Description of Artificial Sequence: Synthetic oligonucleotide
uaugcgugguuaagugggc

SEQ ID NO: 710980 - RNA, 19 nt, Artificial Sequence
  Description of Artificial Sequence: Synthetic oligonucleotide
ugggcaggcgucuugaguu

SEQ ID NO: 710981 - RNA, 19 nt, Artificial Sequence
  Description of Artificial Sequence: Synthetic oligonucleotide
cuuuaugugugugcgccag

SEQ ID NO: 710982 - RNA, 19 nt, Artificial Sequence
  Description of Artificial Sequence: Synthetic oligonucleotide
caacaaauugacuuguccu

SEQ ID NO: 710983 - RNA, 19 nt, Artificial Sequence
  Description of Artificial Sequence: Synthetic oligonucleotide
gaauaccauuaacugcuca

SEQ ID NO: 710984 - RNA, 19 nt, Artificial Sequence
  Description of Artificial Sequence: Synthetic oligonucleotide
acauaaaaggugguuuccu

SEQ ID NO: 710985 - RNA, 19 nt, Artificial Sequence
  Description of Artificial Sequence: Synthetic oligonucleotide
ugugugcgccaguuguuag

SEQ ID NO: 710986 - RNA, 19 nt, Artificial Sequence
  Description of Artificial Sequence: Synthetic oligonucleotide
gggguuauuggugccaucg

SEQ ID NO: 710987 - RNA, 19 nt, Artificial Sequence
  Description of Artificial Sequence: Synthetic oligonucleotide
aaaugggcaggcgucuuga

SEQ ID NO: 710988 - RNA, 19 nt, Artificial Sequence
  Description of Artificial Sequence: Synthetic oligonucleotide
gaaccucgaaucugcgagc

SEQ ID NO: 710989 - RNA, 19 nt, Artificial Sequence
  Description of Artificial Sequence: Synthetic oligonucleotide
gaaagcgacgguagugacc

SEQ ID NO: 710990 - RNA, 19 nt, Artificial Sequence
  Description of Artificial Sequence: Synthetic oligonucleotide
uaggaauuggggagaaguu

SEQ ID NO: 710991 - RNA, 19 nt, Artificial Sequence
  Description of Artificial Sequence: Synthetic oligonucleotide
aaagcauaguuuggcaaua

SEQ ID NO: 710992 - RNA, 19 nt, Artificial Sequence
  Description of Artificial Sequence: Synthetic oligonucleotide
ugucaaaaccuucguccaa

SEQ ID NO: 710993 - RNA, 19 nt, Artificial Sequence
  Description of Artificial Sequence: Synthetic oligonucleotide
ucuuuaugugugugcgcca

SEQ ID NO: 710994 - RNA, 19 nt, Artificial Sequence
  Description of Artificial Sequence: Synthetic oligonucleotide
gcuaccaacaaauugacuu

SEQ ID NO: 710995 - RNA, 19 nt, Artificial Sequence
  Description of Artificial Sequence: Synthetic oligonucleotide
agguagaccuaagguauuc

SEQ ID NO: 710996 - RNA, 19 nt, Artificial Sequence
  Description of Artificial Sequence: Synthetic oligonucleotide
uauguuaggggaggggcaa

SEQ ID NO: 710997 - RNA, 19 nt, Artificial Sequence
  Description of Artificial Sequence: Synthetic oligonucleotide
ugaauaccauuaacugcuc

SEQ ID NO: 710998 - RNA, 19 nt, Artificial Sequence
  Description of Artificial Sequence: Synthetic oligonucleotide
guccuuauguuaggggagg

SEQ ID NO: 710999 - RNA, 19 nt, Artificial Sequence
  Description of Artificial Sequence: Synthetic oligonucleotide
cacuuaugucaaaaccuuc

SEQ ID NO: 711000 - RNA, 19 nt, Artificial Sequence
  Description of Artificial Sequence: Synthetic oligonucleotide
agacacgucacaaaauuuu

SEQ ID NO: 711001 - RNA, 19 nt, Artificial Sequence
  Description of Artificial Sequence: Synthetic oligonucleotide
agauuagucaacagggguu

SEQ ID NO: 711002 - RNA, 19 nt, Artificial Sequence
  Description of Artificial Sequence: Synthetic oligonucleotide
caguccuaccugugaaagg

SEQ ID NO: 711003 - RNA, 19 nt, Artificial Sequence
  Description of Artificial Sequence: Synthetic oligonucleotide
accagcaagaggaauaaua

SEQ ID NO: 711004 - RNA, 19 nt, Artificial Sequence
  Description of Artificial Sequence: Synthetic oligonucleotide
agggguucgggcugaaaga

SEQ ID NO: 711005 - RNA, 19 nt, Artificial Sequence
  Description of Artificial Sequence: Synthetic oligonucleotide
uuuaugugugugcgccagu

SEQ ID NO: 711006 - RNA, 19 nt, Artificial Sequence
  Description of Artificial Sequence: Synthetic oligonucleotide
aaguuagaugaaguuuaaa

SEQ ID NO: 711007 - RNA, 19 nt, Artificial Sequence
  Description of Artificial Sequence: Synthetic oligonucleotide
acauaugaauuggggaacu

SEQ ID NO: 711008 - RNA, 19 nt, Artificial Sequence
  Description of Artificial Sequence: Synthetic oligonucleotide
guaggaauuggggagaagu

SEQ ID NO: 711009 - RNA, 19 nt, Artificial Sequence
  Description of Artificial Sequence: Synthetic oligonucleotide
caaacccaggcaagauuag

SEQ ID NO: 711010 - RNA, 19 nt, Artificial Sequence
  Description of Artificial Sequence: Synthetic oligonucleotide
aaucugcgagcggaauguc

SEQ ID NO: 711011 - RNA, 19 nt, Artificial Sequence
  Description of Artificial Sequence: Synthetic oligonucleotide
auaugaauuggggaacuuu

SEQ ID NO: 711012 - RNA, 19 nt, Artificial Sequence
  Description of Artificial Sequence: Synthetic oligonucleotide
aagguauucuagagcaaaa

SEQ ID NO: 711013 - RNA, 19 nt, Artificial Sequence
  Description of Artificial Sequence: Synthetic oligonucleotide
ugcgccaguuguuagcuuu

SEQ ID NO: 711014 - RNA, 19 nt, Artificial Sequence
  Description of Artificial Sequence: Synthetic oligonucleotide
aggcaagauuagucaacag

SEQ ID NO: 711015 - RNA, 19 nt, Artificial Sequence
  Description of Artificial Sequence: Synthetic oligonucleotide
aagacacgucacaaaauuu

SEQ ID NO: 711016 - RNA, 19 nt, Artificial Sequence
  Description of Artificial Sequence: Synthetic oligonucleotide
auuaacugcucaccccuua

SEQ ID NO: 711017 - RNA, 19 nt, Artificial Sequence
  Description of Artificial Sequence: Synthetic oligonucleotide
auauugaugugcagugaca

SEQ ID NO: 711018 - RNA, 19 nt, Artificial Sequence
  Description of Artificial Sequence: Synthetic oligonucleotide
cugacuuagucaucugaga

SEQ ID NO: 711019 - RNA, 19 nt, Artificial Sequence
  Description of Artificial Sequence: Synthetic oligonucleotide
cacauaaagucaaaggguu

SEQ ID NO: 711020 - RNA, 19 nt, Artificial Sequence
  Description of Artificial Sequence: Synthetic oligonucleotide
acaaauugacuuguccuua

SEQ ID NO: 711021 - RNA, 19 nt, Artificial Sequence
  Description of Artificial Sequence: Synthetic oligonucleotide
aaaucguuuuacacagaua

SEQ ID NO: 711022 - RNA, 19 nt, Artificial Sequence
  Description of Artificial Sequence: Synthetic oligonucleotide
gagcggaaugucuugagau

SEQ ID NO: 711023 - RNA, 19 nt, Artificial Sequence
  Description of Artificial Sequence: Synthetic oligonucleotide
aaagucccacuuaugucaa

SEQ ID NO: 711024 - RNA, 19 nt, Artificial Sequence
  Description of Artificial Sequence: Synthetic oligonucleotide
agguauucuagagcaaaau

SEQ ID NO: 711025 - RNA, 19 nt, Artificial Sequence
  Description of Artificial Sequence: Synthetic oligonucleotide
ggagaaguuaagggguggg

SEQ ID NO: 711026 - RNA, 19 nt, Artificial Sequence
  Description of Artificial Sequence: Synthetic oligonucleotide
ugguccgagagagaauccu

SEQ ID NO: 711027 - RNA, 19 nt, Artificial Sequence
  Description of Artificial Sequence: Synthetic oligonucleotide
ggcguugugaaaaugaagu

SEQ ID NO: 711028 - RNA, 19 nt, Artificial Sequence
  Description of Artificial Sequence: Synthetic oligonucleotide
gaaucugcgagcggaaugu

SEQ ID NO: 711029 - RNA, 19 nt, Artificial Sequence
  Description of Artificial Sequence: Synthetic oligonucleotide
ccuaaggagaagaaacuca

SEQ ID NO: 711030 - RNA, 19 nt, Artificial Sequence
  Description of Artificial Sequence: Synthetic oligonucleotide
augugaggggacucagaca

SEQ ID NO: 711031 - RNA, 19 nt, Artificial Sequence
  Description of Artificial Sequence: Synthetic oligonucleotide
uguaggaauuggggagaag

SEQ ID NO: 711032 - RNA, 19 nt, Artificial Sequence
  Description of Artificial Sequence: Synthetic oligonucleotide
auggcgugagggcucuaag

SEQ ID NO: 711033 - RNA, 19 nt, Artificial Sequence
  Description of Artificial Sequence: Synthetic oligonucleotide
guagaccuaagguauucua

SEQ ID NO: 711034 - RNA, 19 nt, Artificial Sequence
  Description of Artificial Sequence: Synthetic oligonucleotide
acauaccaagguuguucug

SEQ ID NO: 711035 - RNA, 19 nt, Artificial Sequence
  Description of Artificial Sequence: Synthetic oligonucleotide
caaacaugugaggggacuc

SEQ ID NO: 711036 - RNA, 19 nt, Artificial Sequence
  Description of Artificial Sequence: Synthetic oligonucleotide
agcuacuucuacaggaaau

SEQ ID NO: 711037 - RNA, 19 nt, Artificial Sequence
  Description of Artificial Sequence: Synthetic oligonucleotide
augggcaggcgucuugagu

SEQ ID NO: 711038 - RNA, 19 nt, Artificial Sequence
  Description of Artificial Sequence: Synthetic oligonucleotide
caugggccggaagaggaag

SEQ ID NO: 711039 - RNA, 19 nt, Artificial Sequence
  Description of Artificial Sequence: Synthetic oligonucleotide
gugugcgccaguuguuagc

SEQ ID NO: 711040 - RNA, 19 nt, Artificial Sequence
  Description of Artificial Sequence: Synthetic oligonucleotide
gacacgucacaaaauuuua

SEQ ID NO: 711041 - RNA, 19 nt, Artificial Sequence
  Description of Artificial Sequence: Synthetic oligonucleotide
gcguugugaaaaugaagug

SEQ ID NO: 711042 - RNA, 19 nt, Artificial Sequence
  Description of Artificial Sequence: Synthetic oligonucleotide
aacucaauuugcaguccaa

SEQ ID NO: 711043 - RNA, 19 nt, Artificial Sequence
  Description of Artificial Sequence: Synthetic oligonucleotide
gcaagaggaauaauaauua

SEQ ID NO: 711044 - RNA, 19 nt, Artificial Sequence
  Description of Artificial Sequence: Synthetic oligonucleotide
ugcgugguuaagugggcua

SEQ ID NO: 711045 - RNA, 19 nt, Artificial Sequence
  Description of Artificial Sequence: Synthetic oligonucleotide
aaccuggaauccagaaccu

SEQ ID NO: 711046 - RNA, 19 nt, Artificial Sequence
  Description of Artificial Sequence: Synthetic oligonucleotide
agcuaugcugaaggcgggg

SEQ ID NO: 711047 - RNA, 19 nt, Artificial Sequence
  Description of Artificial Sequence: Synthetic oligonucleotide
ucccuacccugacuuaguc

SEQ ID NO: 711048 - RNA, 19 nt, Artificial Sequence
  Description of Artificial Sequence: Synthetic oligonucleotide
ggguuauuggugccaucgg

SEQ ID NO: 711049 - RNA, 19 nt, Artificial Sequence
  Description of Artificial Sequence: Synthetic oligonucleotide
aucguuuuacacagauacu

SEQ ID NO: 711050 - RNA, 19 nt, Artificial Sequence
  Description of Artificial Sequence: Synthetic oligonucleotide
uucaaccuuccucccugaa

SEQ ID NO: 711051 - RNA, 19 nt, Artificial Sequence
  Description of Artificial Sequence: Synthetic oligonucleotide
uguccaagguaggggaauc

SEQ ID NO: 711052 - RNA, 19 nt, Artificial Sequence
  Description of Artificial Sequence: Synthetic oligonucleotide
ccugugaaaggccuaagga

SEQ ID NO: 711053 - RNA, 19 nt, Artificial Sequence
  Description of Artificial Sequence: Synthetic oligonucleotide
caggcaagauuagucaaca

SEQ ID NO: 711054 - RNA, 19 nt, Artificial Sequence
  Description of Artificial Sequence: Synthetic oligonucleotide
cugguccgagagagaaucc

SEQ ID NO: 711055 - RNA, 19 nt, Artificial Sequence
  Description of Artificial Sequence: Synthetic oligonucleotide
augucuugagaugggcaca

SEQ ID NO: 711056 - RNA, 19 nt, Artificial Sequence
  Description of Artificial Sequence: Synthetic oligonucleotide
ugcgagcggaaugucuuga

SEQ ID NO: 711057 - RNA, 19 nt, Artificial Sequence
  Description of Artificial Sequence: Synthetic oligonucleotide
acacgucacaaaauuuuaa

SEQ ID NO: 711058 - RNA, 19 nt, Artificial Sequence
  Description of Artificial Sequence: Synthetic oligonucleotide
cuaagguauucuagagcaa

SEQ ID NO: 711059 - RNA, 19 nt, Artificial Sequence
  Description of Artificial Sequence: Synthetic oligonucleotide
gggcguugagcuuaaaugu

SEQ ID NO: 711060 - RNA, 19 nt, Artificial Sequence
  Description of Artificial Sequence: Synthetic oligonucleotide
ccaggcaagauuagucaac

SEQ ID NO: 711061 - RNA, 19 nt, Artificial Sequence
  Description of Artificial Sequence: Synthetic oligonucleotide
gggagaaguuaaggggugg

SEQ ID NO: 711062 - RNA, 19 nt, Artificial Sequence
  Description of Artificial Sequence: Synthetic oligonucleotide
cuuccuccccaacuuaaaa

SEQ ID NO: 711063 - RNA, 19 nt, Artificial Sequence
  Description of Artificial Sequence: Synthetic oligonucleotide
caggcgucuugaguugucc

SEQ ID NO: 711064 - RNA, 19 nt, Artificial Sequence
  Description of Artificial Sequence: Synthetic oligonucleotide
ggaaacccagcaaagcuaa

SEQ ID NO: 711065 - RNA, 19 nt, Artificial Sequence
  Description of Artificial Sequence: Synthetic oligonucleotide
aagguagaccuaagguauu

SEQ ID NO: 711066 - RNA, 19 nt, Artificial Sequence
  Description of Artificial Sequence: Synthetic oligonucleotide
aagucccacuuaugucaaa

SEQ ID NO: 711067 - RNA, 19 nt, Artificial Sequence
  Description of Artificial Sequence: Synthetic oligonucleotide
cagaaccucgaaucugcga

SEQ ID NO: 711068 - RNA, 19 nt, Artificial Sequence
  Description of Artificial Sequence: Synthetic oligonucleotide
gauggggugcaggguggag

SEQ ID NO: 711069 - RNA, 19 nt, Artificial Sequence
  Description of Artificial Sequence: Synthetic oligonucleotide
gguucgggcugaaagaaaa

SEQ ID NO: 711070 - RNA, 19 nt, Artificial Sequence
  Description of Artificial Sequence: Synthetic oligonucleotide
gucagcggagagguccccg

SEQ ID NO: 711071 - RNA, 19 nt, Artificial Sequence
  Description of Artificial Sequence: Synthetic oligonucleotide
ccuuauguuaggggagggg

SEQ ID NO: 711072 - RNA, 19 nt, Artificial Sequence
  Description of Artificial Sequence: Synthetic oligonucleotide
cugcgagcggaaugucuug

SEQ ID NO: 711073 - RNA, 19 nt, Artificial Sequence
  Description of Artificial Sequence: Synthetic oligonucleotide
gacguggggcuguccagca

SEQ ID NO: 711074 - RNA, 19 nt, Artificial Sequence
  Description of Artificial Sequence: Synthetic oligonucleotide
uaggggaaucugagccacu

SEQ ID NO: 711075 - RNA, 19 nt, Artificial Sequence
  Description of Artificial Sequence: Synthetic oligonucleotide
cauaaaaggugguuuccuu

SEQ ID NO: 711076 - RNA, 19 nt, Artificial Sequence
  Description of Artificial Sequence: Synthetic oligonucleotide
ggcagccccaugcuaggag

SEQ ID NO: 711077 - RNA, 19 nt, Artificial Sequence
  Description of Artificial Sequence: Synthetic oligonucleotide
gaaaaggcgaagggguuau

SEQ ID NO: 711078 - RNA, 19 nt, Artificial Sequence
  Description of Artificial Sequence: Synthetic oligonucleotide
aucugcgagcggaaugucu

SEQ ID NO: 711079 - RNA, 19 nt, Artificial Sequence
  Description of Artificial Sequence: Synthetic oligonucleotide
ggcucuaagguagaccuaa

SEQ ID NO: 711080 - RNA, 19 nt, Artificial Sequence
  Description of Artificial Sequence: Synthetic oligonucleotide
aggaggucauccgcgcuca

SEQ ID NO: 711081 - RNA, 19 nt, Artificial Sequence
  Description of Artificial Sequence: Synthetic oligonucleotide
gccuaaggagaagaaacuc

SEQ ID NO: 711082 - RNA, 19 nt, Artificial Sequence
  Description of Artificial Sequence: Synthetic oligonucleotide
guaggugagcccaggaggu

SEQ ID NO: 711083 - RNA, 19 nt, Artificial Sequence
  Description of Artificial Sequence: Synthetic oligonucleotide
ccagaaccucgaaucugcg

SEQ ID NO: 711084 - RNA, 19 nt, Artificial Sequence
  Description of Artificial Sequence: Synthetic oligonucleotide
guccuaccugugaaaggcc

SEQ ID NO: 711085 - RNA, 19 nt, Artificial Sequence
  Description of Artificial Sequence: Synthetic oligonucleotide
gucaaacaugugaggggac

SEQ ID NO: 711086 - RNA, 19 nt, Artificial Sequence
  Description of Artificial Sequence: Synthetic oligonucleotide
cauccgcgcucagaauggg

SEQ ID NO: 711087 - RNA, 19 nt, Artificial Sequence
  Description of Artificial Sequence: Synthetic oligonucleotide
auccgcgcucagaaugggg

SEQ ID NO: 711088 - RNA, 19 nt, Artificial Sequence
  Description of Artificial Sequence: Synthetic oligonucleotide
agcuaccaacaaauugacu

SEQ ID NO: 711089 - RNA, 19 nt, Artificial Sequence
  Description of Artificial Sequence: Synthetic oligonucleotide
uucguccaacuaguucaac

SEQ ID NO: 711090 - RNA, 19 nt, Artificial Sequence
  Description of Artificial Sequence: Synthetic oligonucleotide
guucaaccuuccucccuga

SEQ ID NO: 711091 - RNA, 19 nt, Artificial Sequence
  Description of Artificial Sequence: Synthetic oligonucleotide
augcgugguuaagugggcu

SEQ ID NO: 711092 - RNA, 19 nt, Artificial Sequence
  Description of Artificial Sequence: Synthetic oligonucleotide
ggcgugagggcucuaaggu

SEQ ID NO: 711093 - RNA, 19 nt, Artificial Sequence
  Description of Artificial Sequence: Synthetic oligonucleotide
auguaggaauuggggagaa

SEQ ID NO: 711094 - RNA, 19 nt, Artificial Sequence
  Description of Artificial Sequence: Synthetic oligonucleotide
caggguaggugagcccagg

SEQ ID NO: 711095 - RNA, 19 nt, Artificial Sequence
  Description of Artificial Sequence: Synthetic oligonucleotide
ucgggcaggguaggugagc

SEQ ID NO: 711096 - RNA, 19 nt, Artificial Sequence
  Description of Artificial Sequence: Synthetic oligonucleotide
uagcccuccugguccgaga

SEQ ID NO: 711097 - RNA, 19 nt, Artificial Sequence
  Description of Artificial Sequence: Synthetic oligonucleotide
agcggcacugggaaaccca

SEQ ID NO: 711098 - RNA, 19 nt, Artificial Sequence
  Description of Artificial Sequence: Synthetic oligonucleotide
cucgaaucugcgagcggaa

SEQ ID NO: 711099 - RNA, 19 nt, Artificial Sequence
  Description of Artificial Sequence: Synthetic oligonucleotide
ggcgucuugaguuguccaa

SEQ ID NO: 711100 - RNA, 19 nt, Artificial Sequence
  Description of Artificial Sequence: Synthetic oligonucleotide
aaaaggcgaagggguuauu

SEQ ID NO: 711101 - RNA, 19 nt, Artificial Sequence
  Description of Artificial Sequence: Synthetic oligonucleotide
cuguuaugcgugguuaagu

SEQ ID NO: 711102 - RNA, 19 nt, Artificial Sequence
  Description of Artificial Sequence: Synthetic oligonucleotide
uggggaacuuuagcaccaa

SEQ ID NO: 711103 - RNA, 19 nt, Artificial Sequence
  Description of Artificial Sequence: Synthetic oligonucleotide
ggaggugaagguaugggau

SEQ ID NO: 711104 - RNA, 19 nt, Artificial Sequence
  Description of Artificial Sequence: Synthetic oligonucleotide
ggacguggggcuguccagc

SEQ ID NO: 711105 - RNA, 19 nt, Artificial Sequence
  Description of Artificial Sequence: Synthetic oligonucleotide
cagccccaugcuaggagca

SEQ ID NO: 711106 - RNA, 19 nt, Artificial Sequence
  Description of Artificial Sequence: Synthetic oligonucleotide
aaccuucguccaacuaguu

SEQ ID NO: 711107 - RNA, 19 nt, Artificial Sequence
  Description of Artificial Sequence: Synthetic oligonucleotide
gcucuaagguagaccuaag

SEQ ID NO: 711108 - RNA, 19 nt, Artificial Sequence
  Description of Artificial Sequence: Synthetic oligonucleotide
guccaacuaguucaaccuu

SEQ ID NO: 711109 - RNA, 19 nt, Artificial Sequence
  Description of Artificial Sequence: Synthetic oligonucleotide
ccucgaaucugcgagcgga

SEQ ID NO: 711110 - RNA, 19 nt, Artificial Sequence
  Description of Artificial Sequence: Synthetic oligonucleotide
gcggcacugggaaacccag

SEQ ID NO: 711111 - RNA, 19 nt, Artificial Sequence
  Description of Artificial Sequence: Synthetic oligonucleotide
ggcguugagcuuaaaugua

SEQ ID NO: 711112 - RNA, 19 nt, Artificial Sequence
  Description of Artificial Sequence: Synthetic oligonucleotide
gcuaugcugaaggcgggga

SEQ ID NO: 711113 - RNA, 19 nt, Artificial Sequence
  Description of Artificial Sequence: Synthetic oligonucleotide
ggggcaacauaccaagguu

SEQ ID NO: 711114 - RNA, 19 nt, Artificial Sequence
  Description of Artificial Sequence: Synthetic oligonucleotide
gggguucgggcugaaagaa

SEQ ID NO: 711115 - RNA, 19 nt, Artificial Sequence
  Description of Artificial Sequence: Synthetic oligonucleotide
gugaggggacucagacaug

SEQ ID NO: 711116 - RNA, 19 nt, Artificial Sequence
  Description of Artificial Sequence: Synthetic oligonucleotide
acaugggccggaagaggaa

SEQ ID NO: 711117 - RNA, 19 nt, Artificial Sequence
  Description of Artificial Sequence: Synthetic oligonucleotide
cauggcgugagggcucuaa

SEQ ID NO: 711118 - RNA, 19 nt, Artificial Sequence
  Description of Artificial Sequence: Synthetic oligonucleotide
ggaaaucguuuuacacaga

SEQ ID NO: 711119 - RNA, 19 nt, Artificial Sequence
  Description of Artificial Sequence: Synthetic oligonucleotide
gcgacgguagugaccagca

SEQ ID NO: 711120 - RNA, 19 nt, Artificial Sequence
  Description of Artificial Sequence: Synthetic oligonucleotide
ccacuuaugucaaaaccuu

SEQ ID NO: 711121 - RNA, 19 nt, Artificial Sequence
  Description of Artificial Sequence: Synthetic oligonucleotide
gguagaccuaagguauucu

SEQ ID NO: 711122 - RNA, 19 nt, Artificial Sequence
  Description of Artificial Sequence: Synthetic oligonucleotide
gguaugggauggggugcag

SEQ ID NO: 711123 - RNA, 19 nt, Artificial Sequence
  Description of Artificial Sequence: Synthetic oligonucleotide
cagccccguggcagcggcg

SEQ ID NO: 711124 - RNA, 19 nt, Artificial Sequence
  Description of Artificial Sequence: Synthetic oligonucleotide
cccuacccugacuuaguca

SEQ ID NO: 711125 - RNA, 19 nt, Artificial Sequence
  Description of Artificial Sequence: Synthetic oligonucleotide
cucccuacccugacuuagu

SEQ ID NO: 711126 - RNA, 19 nt, Artificial Sequence
  Description of Artificial Sequence: Synthetic oligonucleotide
cauuaacugcucaccccuu

SEQ ID NO: 711127 - RNA, 19 nt, Artificial Sequence
  Description of Artificial Sequence: Synthetic oligonucleotide
gcgugagggcucuaaggua

SEQ ID NO: 711128 - RNA, 19 nt, Artificial Sequence
  Description of Artificial Sequence: Synthetic oligonucleotide
gcgccaguuguuagcuuug

SEQ ID NO: 711129 - RNA, 19 nt, Artificial Sequence
  Description of Artificial Sequence: Synthetic oligonucleotide
caacagggguucgggcuga

SEQ ID NO: 711130 - RNA, 19 nt, Artificial Sequence
  Description of Artificial Sequence: Synthetic oligonucleotide
cauaugaauuggggaacuu

SEQ ID NO: 711131 - RNA, 19 nt, Artificial Sequence
  Description of Artificial Sequence: Synthetic oligonucleotide
gcguugagcuuaaauguau

SEQ ID NO: 711132 - RNA, 19 nt, Artificial Sequence
  Description of Artificial Sequence: Synthetic oligonucleotide
ccuaccugugaaaggccua

SEQ ID NO: 711133 - RNA, 19 nt, Artificial Sequence
  Description of Artificial Sequence: Synthetic oligonucleotide
gggcccguacgggcaaaag

SEQ ID NO: 711134 - RNA, 19 nt, Artificial Sequence
  Description of Artificial Sequence: Synthetic oligonucleotide
cccugaagaccuacacaaa

SEQ ID NO: 711135 - RNA, 19 nt, Artificial Sequence
  Description of Artificial Sequence: Synthetic oligonucleotide
ggguucgggcugaaagaaa

SEQ ID NO: 711136 - RNA, 19 nt, Artificial Sequence
  Description of Artificial Sequence: Synthetic oligonucleotide
cgugguuaagugggcuaug

SEQ ID NO: 711137 - RNA, 19 nt, Artificial Sequence
  Description of Artificial Sequence: Synthetic oligonucleotide
gcaggcgucuugaguuguc

SEQ ID NO: 711138 - RNA, 19 nt, Artificial Sequence
  Description of Artificial Sequence: Synthetic oligonucleotide
gcgugguuaagugggcuau

SEQ ID NO: 711139 - RNA, 19 nt, Artificial Sequence
  Description of Artificial Sequence: Synthetic oligonucleotide
ggucauccgcgcucagaau

SEQ ID NO: 711140 - RNA, 19 nt, Artificial Sequence
  Description of Artificial Sequence: Synthetic oligonucleotide
gugcgccaguuguuagcuu

SEQ ID NO: 711141 - RNA, 19 nt, Artificial Sequence
  Description of Artificial Sequence: Synthetic oligonucleotide
ggggcccguacgggcaaaa

SEQ ID NO: 711142 - RNA, 19 nt, Artificial Sequence
  Description of Artificial Sequence: Synthetic oligonucleotide
cccucccuacccugacuua

SEQ ID NO: 711143 - RNA, 19 nt, Artificial Sequence
  Description of Artificial Sequence: Synthetic oligonucleotide
gccaucgggcaggguaggu

SEQ ID NO: 711144 - RNA, 19 nt, Artificial Sequence
  Description of Artificial Sequence: Synthetic oligonucleotide
cggggcccguacgggcaaa

SEQ ID NO: 711145 - RNA, 19 nt, Artificial Sequence
  Description of Artificial Sequence: Synthetic oligonucleotide
ugaucgaucacucuaaucc

SEQ ID NO: 711146 - RNA, 19 nt, Artificial Sequence
  Description of Artificial Sequence: Synthetic oligonucleotide
ugaauguuaaguauggugc

SEQ ID NO: 711147 - RNA, 19 nt, Artificial Sequence
  Description of Artificial Sequence: Synthetic oligonucleotide
guaacuguagcuucgaucg

SEQ ID NO: 711148 - RNA, 19 nt, Artificial Sequence
  Description of Artificial Sequence: Synthetic oligonucleotide
aaugcucgaaaauacuggc

SEQ ID NO: 711149 - RNA, 19 nt, Artificial Sequence
  Description of Artificial Sequence: Synthetic oligonucleotide
aaaagacccgcuuaccugc

SEQ ID NO: 711150 - RNA, 19 nt, Artificial Sequence
  Description of Artificial Sequence: Synthetic oligonucleotide
uggaauugagaaaagaccc

SEQ ID NO: 711151 - RNA, 19 nt, Artificial Sequence
  Description of Artificial Sequence: Synthetic oligonucleotide
aaaggaauaagccuucgcu

SEQ ID NO: 711152 - RNA, 19 nt, Artificial Sequence
  Description of Artificial Sequence: Synthetic oligonucleotide
cagguaaugugaaugaucg

SEQ ID NO: 711153 - RNA, 19 nt, Artificial Sequence
  Description of Artificial Sequence: Synthetic oligonucleotide
uaaugcucgaaaauacugg

SEQ ID NO: 711154 - RNA, 19 nt, Artificial Sequence
  Description of Artificial Sequence: Synthetic oligonucleotide
cauaggaacuauuaggccc

SEQ ID NO: 711155 - RNA, 19 nt, Artificial Sequence
  Description of Artificial Sequence: Synthetic oligonucleotide
ucugagcgcacuuuaaugg

SEQ ID NO: 711156 - RNA, 19 nt, Artificial Sequence
  Description of Artificial Sequence: Synthetic oligonucleotide
ugaucucaaugccagaccg

SEQ ID NO: 711157 - RNA, 19 nt, Artificial Sequence
  Description of Artificial Sequence: Synthetic oligonucleotide
auaauuuugagugucacca

SEQ ID NO: 711158 - RNA, 19 nt, Artificial Sequence
  Description of Artificial Sequence: Synthetic oligonucleotide
uauugauccaaucauguau

SEQ ID NO: 711159 - RNA, 19 nt, Artificial Sequence
  Description of Artificial Sequence: Synthetic oligonucleotide
uuaauggcgucuaggauag

SEQ ID NO: 711160 - RNA, 19 nt, Artificial Sequence
  Description of Artificial Sequence: Synthetic oligonucleotide
aguagaauccuccagcucu

SEQ ID NO: 711161 - RNA, 19 nt, Artificial Sequence
  Description of Artificial Sequence: Synthetic oligonucleotide
uaccuguuaacauuagagg

SEQ ID NO: 711162 - RNA, 19 nt, Artificial Sequence
  Description of Artificial Sequence: Synthetic oligonucleotide
aaggaauaagccuucgcug

SEQ ID NO: 711163 - RNA, 19 nt, Artificial Sequence
  Description of Artificial Sequence: Synthetic oligonucleotide
uuuaauggcgucuaggaua

SEQ ID NO: 711164 - RNA, 19 nt, Artificial Sequence
  Description of Artificial Sequence: Synthetic oligonucleotide
aaugugaaugaucgaucac

SEQ ID NO: 711165 - RNA, 19 nt, Artificial Sequence
  Description of Artificial Sequence: Synthetic oligonucleotide
aggaauaagccuucgcugg

SEQ ID NO: 711166 - RNA, 19 nt, Artificial Sequence
  Description of Artificial Sequence: Synthetic oligonucleotide
aaguauggugcagagguac

SEQ ID NO: 711167 - RNA, 19 nt, Artificial Sequence
  Description of Artificial Sequence: Synthetic oligonucleotide
aaagugacugauugccagg

SEQ ID NO: 711168 - RNA, 19 nt, Artificial Sequence
  Description of Artificial Sequence: Synthetic oligonucleotide
uguagauguacuugaguag

SEQ ID NO: 711169 - RNA, 19 nt, Artificial Sequence
  Description of Artificial Sequence: Synthetic oligonucleotide
uaucccggcucucugagcg

SEQ ID NO: 711170 - RNA, 19 nt, Artificial Sequence
  Description of Artificial Sequence: Synthetic oligonucleotide
gacacguauagccagaauc

SEQ ID NO: 711171 - RNA, 19 nt, Artificial Sequence
  Description of Artificial Sequence: Synthetic oligonucleotide
aaccguauugauccaauca

SEQ ID NO: 711172 - RNA, 19 nt, Artificial Sequence
  Description of Artificial Sequence: Synthetic oligonucleotide
uaaugugaaugaucgauca

SEQ ID NO: 711173 - RNA, 19 nt, Artificial Sequence
  Description of Artificial Sequence: Synthetic oligonucleotide
ugaaugaucgaucacucua

SEQ ID NO: 711174 - RNA, 19 nt, Artificial Sequence
  Description of Artificial Sequence: Synthetic oligonucleotide
aacgauucggaugaaggag

SEQ ID NO: 711175 - RNA, 19 nt, Artificial Sequence
  Description of Artificial Sequence: Synthetic oligonucleotide
uuaguguccccauucagca

SEQ ID NO: 711176 - RNA, 19 nt, Artificial Sequence
  Description of Artificial Sequence: Synthetic oligonucleotide
cuuaguguccccauucagc

SEQ ID NO: 711177 - RNA, 19 nt, Artificial Sequence
  Description of Artificial Sequence: Synthetic oligonucleotide
uauuuaugagccaggcuca

SEQ ID NO: 711178 - RNA, 19 nt, Artificial Sequence
  Description of Artificial Sequence: Synthetic oligonucleotide
aaggcauuucggcugcgac

SEQ ID NO: 711179 - RNA, 19 nt, Artificial Sequence
  Description of Artificial Sequence: Synthetic oligonucleotide
aaauacuggcaccuagcug

SEQ ID NO: 711180 - RNA, 19 nt, Artificial Sequence
  Description of Artificial Sequence: Synthetic oligonucleotide
cagagguaaacgcacagcc

SEQ ID NO: 711181 - RNA, 19 nt, Artificial Sequence
  Description of Artificial Sequence: Synthetic oligonucleotide
guagcuucgaucgucacag

SEQ ID NO: 711182 - RNA, 19 nt, Artificial Sequence
  Description of Artificial Sequence: Synthetic oligonucleotide
uaugugguugauaauggau

SEQ ID NO: 711183 - RNA, 19 nt, Artificial Sequence
  Description of Artificial Sequence: Synthetic oligonucleotide
aauguuaaguauggugcag

SEQ ID NO: 711184 - RNA, 19 nt, Artificial Sequence
  Description of Artificial Sequence: Synthetic oligonucleotide
uguuaaguauggugcagag

SEQ ID NO: 711185 - RNA, 19 nt, Artificial Sequence
  Description of Artificial Sequence: Synthetic oligonucleotide
cauaauuuugagugucacc

SEQ ID NO: 711186 - RNA, 19 nt, Artificial Sequence
  Description of Artificial Sequence: Synthetic oligonucleotide
ucuucugguaugagcaugc

SEQ ID NO: 711187 - RNA, 19 nt, Artificial Sequence
  Description of Artificial Sequence: Synthetic oligonucleotide
guggaauugagaaaagacc

SEQ ID NO: 711188 - RNA, 19 nt, Artificial Sequence
  Description of Artificial Sequence: Synthetic oligonucleotide
gaauugagaaaagacccgc

SEQ ID NO: 711189 - RNA, 19 nt, Artificial Sequence
  Description of Artificial Sequence: Synthetic oligonucleotide
ucacucuaauccaaucaag

SEQ ID NO: 711190 - RNA, 19 nt, Artificial Sequence
  Description of Artificial Sequence: Synthetic oligonucleotide
ugagcgcacuuuaauggcg

SEQ ID NO: 711191 - RNA, 19 nt, Artificial Sequence
  Description of Artificial Sequence: Synthetic oligonucleotide
ucgauaaaauaagaauaag

SEQ ID NO: 711192 - RNA, 19 nt, Artificial Sequence
  Description of Artificial Sequence: Synthetic oligonucleotide
gaucacucuaauccaauca

SEQ ID NO: 711193 - RNA, 19 nt, Artificial Sequence
  Description of Artificial Sequence: Synthetic oligonucleotide
gcuggugacacguauagcc

SEQ ID NO: 711194 - RNA, 19 nt, Artificial Sequence
  Description of Artificial Sequence: Synthetic oligonucleotide
aucaacaaggcaccaacgu

SEQ ID NO: 711195 - RNA, 19 nt, Artificial Sequence
  Description of Artificial Sequence: Synthetic oligonucleotide
uucggauauaccugcagac

SEQ ID NO: 711196 - RNA, 19 nt, Artificial Sequence
  Description of Artificial Sequence: Synthetic oligonucleotide
cuaaaaugacccugugagc

SEQ ID NO: 711197 - RNA, 19 nt, Artificial Sequence
  Description of Artificial Sequence: Synthetic oligonucleotide
uucuucuucuucuucuucu

SEQ ID NO: 711198 - RNA, 19 nt, Artificial Sequence
  Description of Artificial Sequence: Synthetic oligonucleotide
cucggaaguagaauccucc

SEQ ID NO: 711199 - RNA, 19 nt, Artificial Sequence
  Description of Artificial Sequence: Synthetic oligonucleotide
guaaugcucgaaaauacug

SEQ ID NO: 711200 - RNA, 19 nt, Artificial Sequence
  Description of Artificial Sequence: Synthetic oligonucleotide
gaauguuaaguauggugca

SEQ ID NO: 711201 - RNA, 19 nt, Artificial Sequence
  Description of Artificial Sequence: Synthetic oligonucleotide
cuuaccugcccuuggagac

SEQ ID NO: 711202 - RNA, 19 nt, Artificial Sequence
  Description of Artificial Sequence: Synthetic oligonucleotide
aucucaaugccagaccgac

SEQ ID NO: 711203 - RNA, 19 nt, Artificial Sequence
  Description of Artificial Sequence: Synthetic oligonucleotide
cagucccagaguaacaacc

SEQ ID NO: 711204 - RNA, 19 nt, Artificial Sequence
  Description of Artificial Sequence: Synthetic oligonucleotide
uguguuccaacgauucgga

SEQ ID NO: 711205 - RNA, 19 nt, Artificial Sequence
  Description of Artificial Sequence: Synthetic oligonucleotide
ugaguagcaucgugaaugc

SEQ ID NO: 711206 - RNA, 19 nt, Artificial Sequence
  Description of Artificial Sequence: Synthetic oligonucleotide
gaucgucacagucccagag

SEQ ID NO: 711207 - RNA, 19 nt, Artificial Sequence
  Description of Artificial Sequence: Synthetic oligonucleotide
ugagggguaaaaccuggca

SEQ ID NO: 711208 - RNA, 19 nt, Artificial Sequence
  Description of Artificial Sequence: Synthetic oligonucleotide
uguugugagucccaacuau

SEQ ID NO: 711209 - RNA, 19 nt, Artificial Sequence
  Description of Artificial Sequence: Synthetic oligonucleotide
auucggauauaccugcaga

SEQ ID NO: 711210 - RNA, 19 nt, Artificial Sequence
  Description of Artificial Sequence: Synthetic oligonucleotide
augccgggaaaauccaugg

SEQ ID NO: 711211 - RNA, 19 nt, Artificial Sequence
  Description of Artificial Sequence: Synthetic oligonucleotide
accguauugauccaaucau

SEQ ID NO: 711212 - RNA, 19 nt, Artificial Sequence
  Description of Artificial Sequence: Synthetic oligonucleotide
cuucgaucgucacaguccc

SEQ ID NO: 711213 - RNA, 19 nt, Artificial Sequence
  Description of Artificial Sequence: Synthetic oligonucleotide
augaucgaucacucuaauc

SEQ ID NO: 711214 - RNA, 19 nt, Artificial Sequence
  Description of Artificial Sequence: Synthetic oligonucleotide
gaguaaugcucgaaaauac

SEQ ID NO: 711215 - RNA, 19 nt, Artificial Sequence
  Description of Artificial Sequence: Synthetic oligonucleotide
uugauaauggaugguuggc

SEQ ID NO: 711216 - RNA, 19 nt, Artificial Sequence
  Description of Artificial Sequence: Synthetic oligonucleotide
ucuucuucuucuucuuucu

SEQ ID NO: 711217 - RNA, 19 nt, Artificial Sequence
  Description of Artificial Sequence: Synthetic oligonucleotide
aucagagguaaacgcacag

SEQ ID NO: 711218 - RNA, 19 nt, Artificial Sequence
  Description of Artificial Sequence: Synthetic oligonucleotide
agcuucgaucgucacaguc

SEQ ID NO: 711219 - RNA, 19 nt, Artificial Sequence
  Description of Artificial Sequence: Synthetic oligonucleotide
uuuugagugucaccaucca

SEQ ID NO: 711220 - RNA, 19 nt, Artificial Sequence
  Description of Artificial Sequence: Synthetic oligonucleotide
uucuucuucuucuucuuuc

SEQ ID NO: 711221 - RNA, 19 nt, Artificial Sequence
  Description of Artificial Sequence: Synthetic oligonucleotide
auacagacguucugaaugu

SEQ ID NO: 711222 - RNA, 19 nt, Artificial Sequence
  Description of Artificial Sequence: Synthetic oligonucleotide
guguagauguacuugagua

SEQ ID NO: 711223 - RNA, 19 nt, Artificial Sequence
  Description of Artificial Sequence: Synthetic oligonucleotide
guuaacauuagagguagga

SEQ ID NO: 711224 - RNA, 19 nt, Artificial Sequence
  Description of Artificial Sequence: Synthetic oligonucleotide
uggugacacguauagccag

SEQ ID NO: 711225 - RNA, 19 nt, Artificial Sequence
  Description of Artificial Sequence: Synthetic oligonucleotide
cacaaucggcaauuguugc

SEQ ID NO: 711226 - RNA, 19 nt, Artificial Sequence
  Description of Artificial Sequence: Synthetic oligonucleotide
aaugaucgaucacucuaau

SEQ ID NO: 711227 - RNA, 19 nt, Artificial Sequence
  Description of Artificial Sequence: Synthetic oligonucleotide
aggcguaugugguugauaa

SEQ ID NO: 711228 - RNA, 19 nt, Artificial Sequence
  Description of Artificial Sequence: Synthetic oligonucleotide
ucgaucgucacagucccag

SEQ ID NO: 711229 - RNA, 19 nt, Artificial Sequence
  Description of Artificial Sequence: Synthetic oligonucleotide
gaucgaucacucuaaucca

SEQ ID NO: 711230 - RNA, 19 nt, Artificial Sequence
  Description of Artificial Sequence: Synthetic oligonucleotide
ugacugauugccaggacuu

SEQ ID NO: 711231 - RNA, 19 nt, Artificial Sequence
  Description of Artificial Sequence: Synthetic oligonucleotide
uuaacuuggggagcgagua

SEQ ID NO: 711232 - RNA, 19 nt, Artificial Sequence
  Description of Artificial Sequence: Synthetic oligonucleotide
caaaggaauaagccuucgc

SEQ ID NO: 711233 - RNA, 19 nt, Artificial Sequence
  Description of Artificial Sequence: Synthetic oligonucleotide
cucugagcgcacuuuaaug

SEQ ID NO: 711234 - RNA, 19 nt, Artificial Sequence
  Description of Artificial Sequence: Synthetic oligonucleotide
guuaaguauggugcagagg

SEQ ID NO: 711235 - RNA, 19 nt, Artificial Sequence
  Description of Artificial Sequence: Synthetic oligonucleotide
auaauucuuagugucccca

SEQ ID NO: 711236 - RNA, 19 nt, Artificial Sequence
  Description of Artificial Sequence: Synthetic oligonucleotide
acaaucggcaauuguugca

SEQ ID NO: 711237 - RNA, 19 nt, Artificial Sequence
  Description of Artificial Sequence: Synthetic oligonucleotide
cugagcgcacuuuaauggc

SEQ ID NO: 711238 - RNA, 19 nt, Artificial Sequence
  Description of Artificial Sequence: Synthetic oligonucleotide
caacuauucggauauaccu

SEQ ID NO: 711239 - RNA, 19 nt, Artificial Sequence
  Description of Artificial Sequence: Synthetic oligonucleotide
acgauucggaugaaggagg

SEQ ID NO: 711240 - RNA, 19 nt, Artificial Sequence
  Description of Artificial Sequence: Synthetic oligonucleotide
agaccgacagucaucauca

SEQ ID NO: 711241 - RNA, 19 nt, Artificial Sequence
  Description of Artificial Sequence: Synthetic oligonucleotide
ucagagguaaacgcacagc

SEQ ID NO: 711242 - RNA, 19 nt, Artificial Sequence
  Description of Artificial Sequence: Synthetic oligonucleotide
cacuuuaauggcgucuagg

SEQ ID NO: 711243 - RNA, 19 nt, Artificial Sequence
  Description of Artificial Sequence: Synthetic oligonucleotide
ggaauugagaaaagacccg

SEQ ID NO: 711244 - RNA, 19 nt, Artificial Sequence
  Description of Artificial Sequence: Synthetic oligonucleotide
uuucuucuucuucuucuuc

SEQ ID NO: 711245 - RNA, 19 nt, Artificial Sequence
  Description of Artificial Sequence: Synthetic oligonucleotide
ucggaaguagaauccucca

SEQ ID NO: 711246 - RNA, 19 nt, Artificial Sequence
  Description of Artificial Sequence: Synthetic oligonucleotide
uuuauuggugcuguugguu

SEQ ID NO: 711247 - RNA, 19 nt, Artificial Sequence
  Description of Artificial Sequence: Synthetic oligonucleotide
aagugacugauugccagga

SEQ ID NO: 711248 - RNA, 19 nt, Artificial Sequence
  Description of Artificial Sequence: Synthetic oligonucleotide
ucgagcucuccuuucacaa

SEQ ID NO: 711249 - RNA, 19 nt, Artificial Sequence
  Description of Artificial Sequence: Synthetic oligonucleotide
auaggaacuauuaggcccu

SEQ ID NO: 711250 - RNA, 19 nt, Artificial Sequence
  Description of Artificial Sequence: Synthetic oligonucleotide
acaguggaauaccucauuu

SEQ ID NO: 711251 - RNA, 19 nt, Artificial Sequence
  Description of Artificial Sequence: Synthetic oligonucleotide
ucgucacagucccagagua

SEQ ID NO: 711252 - RNA, 19 nt, Artificial Sequence
  Description of Artificial Sequence: Synthetic oligonucleotide
uggacacuucgauaaaaua

SEQ ID NO: 711253 - RNA, 19 nt, Artificial Sequence
  Description of Artificial Sequence: Synthetic oligonucleotide
cauaucccggcucucugag

SEQ ID NO: 711254 - RNA, 19 nt, Artificial Sequence
  Description of Artificial Sequence: Synthetic oligonucleotide
uuggccaagcuugaucuca

SEQ ID NO: 711255 - RNA, 19 nt, Artificial Sequence
  Description of Artificial Sequence: Synthetic oligonucleotide
cagaccgacagucaucauc

SEQ ID NO: 711256 - RNA, 19 nt, Artificial Sequence
  Description of Artificial Sequence: Synthetic oligonucleotide
ugauugguggaaaccucaa

SEQ ID NO: 711257 - RNA, 19 nt, Artificial Sequence
  Description of Artificial Sequence: Synthetic oligonucleotide
auaucccggcucucugagc

SEQ ID NO: 711258 - RNA, 19 nt, Artificial Sequence
  Description of Artificial Sequence: Synthetic oligonucleotide
agacguucugaauguuaag

SEQ ID NO: 711259 - RNA, 19 nt, Artificial Sequence
  Description of Artificial Sequence: Synthetic oligonucleotide
ucccagaguaacaaccgua

SEQ ID NO: 711260 - RNA, 19 nt, Artificial Sequence
  Description of Artificial Sequence: Synthetic oligonucleotide
agcaaaggaauaagccuuc

SEQ ID NO: 711261 - RNA, 19 nt, Artificial Sequence
  Description of Artificial Sequence: Synthetic oligonucleotide
cacuucgauaaaauaagaa

SEQ ID NO: 711262 - RNA, 19 nt, Artificial Sequence
  Description of Artificial Sequence: Synthetic oligonucleotide
agaucgacacagguaaugu

SEQ ID NO: 711263 - RNA, 19 nt, Artificial Sequence
  Description of Artificial Sequence: Synthetic oligonucleotide
ugggcauuccuguccauaa

SEQ ID NO: 711264 - RNA, 19 nt, Artificial Sequence
  Description of Artificial Sequence: Synthetic oligonucleotide
ccaacuauucggauauacc

SEQ ID NO: 711265 - RNA, 19 nt, Artificial Sequence
  Description of Artificial Sequence: Synthetic oligonucleotide
gaaugaucgaucacucuaa

SEQ ID NO: 711266 - RNA, 19 nt, Artificial Sequence
  Description of Artificial Sequence: Synthetic oligonucleotide
ucgaucacucuaauccaau

SEQ ID NO: 711267 - RNA, 19 nt, Artificial Sequence
  Description of Artificial Sequence: Synthetic oligonucleotide
ccgggaaaauccauggucc

SEQ ID NO: 711268 - RNA, 19 nt, Artificial Sequence
  Description of Artificial Sequence: Synthetic oligonucleotide
ggacacuucgauaaaauaa

SEQ ID NO: 711269 - RNA, 19 nt, Artificial Sequence
  Description of Artificial Sequence: Synthetic oligonucleotide
gcguaugugguugauaaug

SEQ ID NO: 711270 - RNA, 19 nt, Artificial Sequence
  Description of Artificial Sequence: Synthetic oligonucleotide
caacgauucggaugaagga

SEQ ID NO: 711271 - RNA, 19 nt, Artificial Sequence
  Description of Artificial Sequence: Synthetic oligonucleotide
ccuagcugcuaaaaugacc

SEQ ID NO: 711272 - RNA, 19 nt, Artificial Sequence
  Description of Artificial Sequence: Synthetic oligonucleotide
guaugugguugauaaugga

SEQ ID NO: 711273 - RNA, 19 nt, Artificial Sequence
  Description of Artificial Sequence: Synthetic oligonucleotide
cacguauagccagaauccc

SEQ ID NO: 711274 - RNA, 19 nt, Artificial Sequence
  Description of Artificial Sequence: Synthetic oligonucleotide
ucuucuucuucuucuucuu

SEQ ID NO: 711275 - RNA, 19 nt, Artificial Sequence
  Description of Artificial Sequence: Synthetic oligonucleotide
ucucaaugccagaccgaca

SEQ ID NO: 711276 - RNA, 19 nt, Artificial Sequence
  Description of Artificial Sequence: Synthetic oligonucleotide
augagggguaaaaccuggc

SEQ ID NO: 711277 - RNA, 19 nt, Artificial Sequence
  Description of Artificial Sequence: Synthetic oligonucleotide
gacguucugaauguuaagu

SEQ ID NO: 711278 - RNA, 19 nt, Artificial Sequence
  Description of Artificial Sequence: Synthetic oligonucleotide
aacaaccguauugauccaa

SEQ ID NO: 711279 - RNA, 19 nt, Artificial Sequence
  Description of Artificial Sequence: Synthetic oligonucleotide
gucagugucgcccgcccag

SEQ ID NO: 711280 - RNA, 19 nt, Artificial Sequence
  Description of Artificial Sequence: Synthetic oligonucleotide
uaaguauggugcagaggua

SEQ ID NO: 711281 - RNA, 19 nt, Artificial Sequence
  Description of Artificial Sequence: Synthetic oligonucleotide
ggcauuccuguccauaaac

SEQ ID NO: 711282 - RNA, 19 nt, Artificial Sequence
  Description of Artificial Sequence: Synthetic oligonucleotide
ugcuccggacacucgaagu

SEQ ID NO: 711283 - RNA, 19 nt, Artificial Sequence
  Description of Artificial Sequence: Synthetic oligonucleotide
augggaugccgggaaaauc

SEQ ID NO: 711284 - RNA, 19 nt, Artificial Sequence
  Description of Artificial Sequence: Synthetic oligonucleotide
cagacguucugaauguuaa

SEQ ID NO: 711285 - RNA, 19 nt, Artificial Sequence
  Description of Artificial Sequence: Synthetic oligonucleotide
ccaagaucgacacagguaa

SEQ ID NO: 711286 - RNA, 19 nt, Artificial Sequence
  Description of Artificial Sequence: Synthetic oligonucleotide
agcaucgugaaugcuucug

SEQ ID NO: 711287 - RNA, 19 nt, Artificial Sequence
  Description of Artificial Sequence: Synthetic oligonucleotide
ggcauuucggcugcgacug

SEQ ID NO: 711288 - RNA, 19 nt, Artificial Sequence
  Description of Artificial Sequence: Synthetic oligonucleotide
cuucuucuucuucuucuuc

SEQ ID NO: 711289 - RNA, 19 nt, Artificial Sequence
  Description of Artificial Sequence: Synthetic oligonucleotide
ccauaggaacuauuaggcc

SEQ ID NO: 711290 - RNA, 19 nt, Artificial Sequence
  Description of Artificial Sequence: Synthetic oligonucleotide
ggugaguaccuccugggca

SEQ ID NO: 711291 - RNA, 19 nt, Artificial Sequence
  Description of Artificial Sequence: Synthetic oligonucleotide
ucgcuggugaguaccuccu

SEQ ID NO: 711292 - RNA, 19 nt, Artificial Sequence
  Description of Artificial Sequence: Synthetic oligonucleotide
gcgacugacuccuucaauc

SEQ ID NO: 711293 - RNA, 19 nt, Artificial Sequence
  Description of Artificial Sequence: Synthetic oligonucleotide
gcuucgaucgucacagucc

SEQ ID NO: 711294 - RNA, 19 nt, Artificial Sequence
  Description of Artificial Sequence: Synthetic oligonucleotide
agcgcacuuuaauggcguc

SEQ ID NO: 711295 - RNA, 19 nt, Artificial Sequence
  Description of Artificial Sequence: Synthetic oligonucleotide
uaacaaccguauugaucca

SEQ ID NO: 711296 - RNA, 19 nt, Artificial Sequence
  Description of Artificial Sequence: Synthetic oligonucleotide
cuggugacacguauagcca

SEQ ID NO: 711297 - RNA, 19 nt, Artificial Sequence
  Description of Artificial Sequence: Synthetic oligonucleotide
gcaucgugaaugcuucugc

SEQ ID NO: 711298 - RNA, 19 nt, Artificial Sequence
  Description of Artificial Sequence: Synthetic oligonucleotide
aagccuucgcuggugagua

SEQ ID NO: 711299 - RNA, 19 nt, Artificial Sequence
  Description of Artificial Sequence: Synthetic oligonucleotide
ggccucacgacauucagaa

SEQ ID NO: 711300 - RNA, 19 nt, Artificial Sequence
  Description of Artificial Sequence: Synthetic oligonucleotide
accauagaguaaugcucga

SEQ ID NO: 711301 - RNA, 19 nt, Artificial Sequence
  Description of Artificial Sequence: Synthetic oligonucleotide
acacuucgauaaaauaaga

SEQ ID NO: 711302 - RNA, 19 nt, Artificial Sequence
  Description of Artificial Sequence: Synthetic oligonucleotide
agguaaugugaaugaucga

SEQ ID NO: 711303 - RNA, 19 nt, Artificial Sequence
  Description of Artificial Sequence: Synthetic oligonucleotide
agcaugccucuguaguuga

SEQ ID NO: 711304 - RNA, 19 nt, Artificial Sequence
  Description of Artificial Sequence: Synthetic oligonucleotide
caucgugaaugcuucugca

SEQ ID NO: 711305 - RNA, 19 nt, Artificial Sequence
  Description of Artificial Sequence: Synthetic oligonucleotide
gguaaugugaaugaucgau

SEQ ID NO: 711306 - RNA, 19 nt, Artificial Sequence
  Description of Artificial Sequence: Synthetic oligonucleotide
caaccguauugauccaauc

SEQ ID NO: 711307 - RNA, 19 nt, Artificial Sequence
  Description of Artificial Sequence: Synthetic oligonucleotide
ugcaugauuucagcauggu

SEQ ID NO: 711308 - RNA, 19 nt, Artificial Sequence
  Description of Artificial Sequence: Synthetic oligonucleotide
gugacugauugccaggacu

SEQ ID NO: 711309 - RNA, 19 nt, Artificial Sequence
  Description of Artificial Sequence: Synthetic oligonucleotide
gguccaagucauaauuuug

SEQ ID NO: 711310 - RNA, 19 nt, Artificial Sequence
  Description of Artificial Sequence: Synthetic oligonucleotide
ugccgggaaaauccauggu

SEQ ID NO: 711311 - RNA, 19 nt, Artificial Sequence
  Description of Artificial Sequence: Synthetic oligonucleotide
gcacaaucggcaauuguug

SEQ ID NO: 711312 - RNA, 19 nt, Artificial Sequence
  Description of Artificial Sequence: Synthetic oligonucleotide
aucccagucauaauucuua

SEQ ID NO: 711313 - RNA, 19 nt, Artificial Sequence
  Description of Artificial Sequence: Synthetic oligonucleotide
cagcugaaccacaauugca

SEQ ID NO: 711314 - RNA, 19 nt, Artificial Sequence
  Description of Artificial Sequence: Synthetic oligonucleotide
gccgggaaaauccaugguc

SEQ ID NO: 711315 - RNA, 19 nt, Artificial Sequence
  Description of Artificial Sequence: Synthetic oligonucleotide
gucccaacuauucggauau

SEQ ID NO: 711316 - RNA, 19 nt, Artificial Sequence
  Description of Artificial Sequence: Synthetic oligonucleotide
caucagagguaaacgcaca

SEQ ID NO: 711317 - RNA, 19 nt, Artificial Sequence
  Description of Artificial Sequence: Synthetic oligonucleotide
auacaacuuuugccaagau

SEQ ID NO: 711318 - RNA, 19 nt, Artificial Sequence
  Description of Artificial Sequence: Synthetic oligonucleotide
ggaacuauuaggcccuucu

SEQ ID NO: 711319 - RNA, 19 nt, Artificial Sequence
  Description of Artificial Sequence: Synthetic oligonucleotide
ggagcgaguagagacuggc

SEQ ID NO: 711320 - RNA, 19 nt, Artificial Sequence
  Description of Artificial Sequence: Synthetic oligonucleotide
ugacacguauagccagaau

SEQ ID NO: 711321 - RNA, 19 nt, Artificial Sequence
  Description of Artificial Sequence: Synthetic oligonucleotide
uaccugcagacacgagcug

SEQ ID NO: 711322 - RNA, 19 nt, Artificial Sequence
  Description of Artificial Sequence: Synthetic oligonucleotide
agugucgcccgcccagugu

SEQ ID NO: 711323 - RNA, 19 nt, Artificial Sequence
  Description of Artificial Sequence: Synthetic oligonucleotide
cugucagugucgcccgccc

SEQ ID NO: 711324 - RNA, 19 nt, Artificial Sequence
  Description of Artificial Sequence: Synthetic oligonucleotide
ccguauugauccaaucaug

SEQ ID NO: 711325 - RNA, 19 nt, Artificial Sequence
  Description of Artificial Sequence: Synthetic oligonucleotide
cauuagagguaggaacuga

SEQ ID NO: 711326 - RNA, 19 nt, Artificial Sequence
  Description of Artificial Sequence: Synthetic oligonucleotide
ugguaugagcaugccucug

SEQ ID NO: 711327 - RNA, 19 nt, Artificial Sequence
  Description of Artificial Sequence: Synthetic oligonucleotide
cauuucggcugcgacugac

SEQ ID NO: 711328 - RNA, 19 nt, Artificial Sequence
  Description of Artificial Sequence: Synthetic oligonucleotide
gagagggauuucugcuuca

SEQ ID NO: 711329 - RNA, 19 nt, Artificial Sequence
  Description of Artificial Sequence: Synthetic oligonucleotide
cuauucggauauaccugca

SEQ ID NO: 711330 - RNA, 19 nt, Artificial Sequence
  Description of Artificial Sequence: Synthetic oligonucleotide
cauauuuaugagccaggcu

SEQ ID NO: 711331 - RNA, 19 nt, Artificial Sequence
  Description of Artificial Sequence: Synthetic oligonucleotide
caaucggcaauuguugcaa

SEQ ID NO: 711332 - RNA, 19 nt, Artificial Sequence
  Description of Artificial Sequence: Synthetic oligonucleotide
aaguuaacuuggggagcga

SEQ ID NO: 711333 - RNA, 19 nt, Artificial Sequence
  Description of Artificial Sequence: Synthetic oligonucleotide
gcaaaggaauaagccuucg

SEQ ID NO: 711334 - RNA, 19 nt, Artificial Sequence
  Description of Artificial Sequence: Synthetic oligonucleotide
uuaccugcccuuggagacu

SEQ ID NO: 711335 - RNA, 19 nt, Artificial Sequence
  Description of Artificial Sequence: Synthetic oligonucleotide
gcgaguagagacuggcaac

SEQ ID NO: 711336 - RNA, 19 nt, Artificial Sequence
  Description of Artificial Sequence: Synthetic oligonucleotide
cucgaaaauacuggcaccu

SEQ ID NO: 711337 - RNA, 19 nt, Artificial Sequence
  Description of Artificial Sequence: Synthetic oligonucleotide
aucgaucacucuaauccaa

SEQ ID NO: 711338 - RNA, 19 nt, Artificial Sequence
  Description of Artificial Sequence: Synthetic oligonucleotide
ugucgcccgcccaguguag

SEQ ID NO: 711339 - RNA, 19 nt, Artificial Sequence
  Description of Artificial Sequence: Synthetic oligonucleotide
uucgaucgucacaguccca

SEQ ID NO: 711340 - RNA, 19 nt, Artificial Sequence
  Description of Artificial Sequence: Synthetic oligonucleotide
acaaccguauugauccaau

SEQ ID NO: 711341 - RNA, 19 nt, Artificial Sequence
  Description of Artificial Sequence: Synthetic oligonucleotide
aggaacuauuaggcccuuc

SEQ ID NO: 711342 - RNA, 19 nt, Artificial Sequence
  Description of Artificial Sequence: Synthetic oligonucleotide
ccuguuaacauuagaggua

SEQ ID NO: 711343 - RNA, 19 nt, Artificial Sequence
  Description of Artificial Sequence: Synthetic oligonucleotide
acuguguugugagucccaa

SEQ ID NO: 711344 - RNA, 19 nt, Artificial Sequence
  Description of Artificial Sequence: Synthetic oligonucleotide
guaugagcaugccucugua

SEQ ID NO: 711345 - RNA, 19 nt, Artificial Sequence
  Description of Artificial Sequence: Synthetic oligonucleotide
acagacguucugaauguua

SEQ ID NO: 711346 - RNA, 19 nt, Artificial Sequence
  Description of Artificial Sequence: Synthetic oligonucleotide
auuuaugagccaggcucaa

SEQ ID NO: 711347 - RNA, 19 nt, Artificial Sequence
  Description of Artificial Sequence: Synthetic oligonucleotide
cuuuaauggcgucuaggau

SEQ ID NO: 711348 - RNA, 19 nt, Artificial Sequence
  Description of Artificial Sequence: Synthetic oligonucleotide
acucucgcaugccaccaua

SEQ ID NO: 711349 - RNA, 19 nt, Artificial Sequence
  Description of Artificial Sequence: Synthetic oligonucleotide
cacagucccagaguaacaa

SEQ ID NO: 711350 - RNA, 19 nt, Artificial Sequence
  Description of Artificial Sequence: Synthetic oligonucleotide
gugaguaccuccugggcau

SEQ ID NO: 711351 - RNA, 19 nt, Artificial Sequence
  Description of Artificial Sequence: Synthetic oligonucleotide
agccuucgcuggugaguac

SEQ ID NO: 711352 - RNA, 19 nt, Artificial Sequence
  Description of Artificial Sequence: Synthetic oligonucleotide
ucaaucacgcuggcacaau

SEQ ID NO: 711353 - RNA, 19 nt, Artificial Sequence
  Description of Artificial Sequence: Synthetic oligonucleotide
cccaacuauucggauauac

SEQ ID NO: 711354 - RNA, 19 nt, Artificial Sequence
  Description of Artificial Sequence: Synthetic oligonucleotide
gugaaugaucgaucacucu

SEQ ID NO: 711355 - RNA, 19 nt, Artificial Sequence
  Description of Artificial Sequence: Synthetic oligonucleotide
auuucggcugcgacugacu

SEQ ID NO: 711356 - RNA, 19 nt, Artificial Sequence
  Description of Artificial Sequence: Synthetic oligonucleotide
aggaggcguaugugguuga

SEQ ID NO: 711357 - RNA, 19 nt, Artificial Sequence
  Description of Artificial Sequence: Synthetic oligonucleotide
gacacucgaaguggacaca

SEQ ID NO: 711358 - RNA, 19 nt, Artificial Sequence
  Description of Artificial Sequence: Synthetic oligonucleotide
gguaugagcaugccucugu

SEQ ID NO: 711359 - RNA, 19 nt, Artificial Sequence
  Description of Artificial Sequence: Synthetic oligonucleotide
guuucuucuucuucuucuu

SEQ ID NO: 711360 - RNA, 19 nt, Artificial Sequence
  Description of Artificial Sequence: Synthetic oligonucleotide
guuaacuuggggagcgagu

SEQ ID NO: 711361 - RNA, 19 nt, Artificial Sequence
  Description of Artificial Sequence: Synthetic oligonucleotide
gagcgaguagagacuggca

SEQ ID NO: 711362 - RNA, 19 nt, Artificial Sequence
  Description of Artificial Sequence: Synthetic oligonucleotide
gccagaccgacagucauca

SEQ ID NO: 711363 - RNA, 19 nt, Artificial Sequence
  Description of Artificial Sequence: Synthetic oligonucleotide
uacagacguucugaauguu

SEQ ID NO: 711364 - RNA, 19 nt, Artificial Sequence
  Description of Artificial Sequence: Synthetic oligonucleotide
cguauugauccaaucaugu

SEQ ID NO: 711365 - RNA, 19 nt, Artificial Sequence
  Description of Artificial Sequence: Synthetic oligonucleotide
ccaagucauaauuuugagu

SEQ ID NO: 711366 - RNA, 19 nt, Artificial Sequence
  Description of Artificial Sequence: Synthetic oligonucleotide
gguaaacgcacagccugca

SEQ ID NO: 711367 - RNA, 19 nt, Artificial Sequence
  Description of Artificial Sequence: Synthetic oligonucleotide
gagcgcacuuuaauggcgu

SEQ ID NO: 711368 - RNA, 19 nt, Artificial Sequence
  Description of Artificial Sequence: Synthetic oligonucleotide
gugucgcccgcccagugua

SEQ ID NO: 711369 - RNA, 19 nt, Artificial Sequence
  Description of Artificial Sequence: Synthetic oligonucleotide
gugacacguauagccagaa

SEQ ID NO: 711370 - RNA, 19 nt, Artificial Sequence
  Description of Artificial Sequence: Synthetic oligonucleotide
uagcuucgaucgucacagu

SEQ ID NO: 711371 - RNA, 19 nt, Artificial Sequence
  Description of Artificial Sequence: Synthetic oligonucleotide
ggugacacguauagccaga

SEQ ID NO: 711372 - RNA, 19 nt, Artificial Sequence
  Description of Artificial Sequence: Synthetic oligonucleotide
gucccagaguaacaaccgu

SEQ ID NO: 711373 - RNA, 19 nt, Artificial Sequence
  Description of Artificial Sequence: Synthetic oligonucleotide
cgaucacucuaauccaauc

SEQ ID NO: 711374 - RNA, 19 nt, Artificial Sequence
  Description of Artificial Sequence: Synthetic oligonucleotide
guugugagucccaacuauu

SEQ ID NO: 711375 - RNA, 19 nt, Artificial Sequence
  Description of Artificial Sequence: Synthetic oligonucleotide
gaggcguaugugguugaua

SEQ ID NO: 711376 - RNA, 19 nt, Artificial Sequence
  Description of Artificial Sequence: Synthetic oligonucleotide
cuugaguagcaucgugaau

SEQ ID NO: 711377 - RNA, 19 nt, Artificial Sequence
  Description of Artificial Sequence: Synthetic oligonucleotide
ucgcccgcccaguguagau

SEQ ID NO: 711378 - RNA, 19 nt, Artificial Sequence
  Description of Artificial Sequence: Synthetic oligonucleotide
gccaagaucgacacaggua

SEQ ID NO: 711379 - RNA, 19 nt, Artificial Sequence
  Description of Artificial Sequence: Synthetic oligonucleotide
gccucacgacauucagaag

SEQ ID NO: 711380 - RNA, 19 nt, Artificial Sequence
  Description of Artificial Sequence: Synthetic oligonucleotide
gcccgcccaagucacacca

SEQ ID NO: 711381 - RNA, 19 nt, Artificial Sequence
  Description of Artificial Sequence: Synthetic oligonucleotide
cauaaacaugcagcacaua

SEQ ID NO: 711382 - RNA, 19 nt, Artificial Sequence
  Description of Artificial Sequence: Synthetic oligonucleotide
gaccgacagucaucaucaa

SEQ ID NO: 711383 - RNA, 19 nt, Artificial Sequence
  Description of Artificial Sequence: Synthetic oligonucleotide
gggagcgaguagagacugg

SEQ ID NO: 711384 - RNA, 19 nt, Artificial Sequence
  Description of Artificial Sequence: Synthetic oligonucleotide
ggcaccuagcugcuaaaau

SEQ ID NO: 711385 - RNA, 19 nt, Artificial Sequence
  Description of Artificial Sequence: Synthetic oligonucleotide
cuucuucuucuucuucuuu

SEQ ID NO: 711386 - RNA, 19 nt, Artificial Sequence
  Description of Artificial Sequence: Synthetic oligonucleotide
ggcgucuaggauagcaucu

SEQ ID NO: 711387 - RNA, 19 nt, Artificial Sequence
  Description of Artificial Sequence: Synthetic oligonucleotide
ccaacaaggcugacuucga

SEQ ID NO: 711388 - RNA, 19 nt, Artificial Sequence
  Description of Artificial Sequence: Synthetic oligonucleotide
ugggugcccuucuguccau

SEQ ID NO: 711389 - RNA, 19 nt, Artificial Sequence
  Description of Artificial Sequence: Synthetic oligonucleotide
gaguagcaucgugaaugcu

SEQ ID NO: 711390 - RNA, 19 nt, Artificial Sequence
  Description of Artificial Sequence: Synthetic oligonucleotide
cccagaguaacaaccguau

SEQ ID NO: 711391 - RNA, 19 nt, Artificial Sequence
  Description of Artificial Sequence: Synthetic oligonucleotide
cuucuucuucuucuuucuu

SEQ ID NO: 711392 - RNA, 19 nt, Artificial Sequence
  Description of Artificial Sequence: Synthetic oligonucleotide
ucccaacuauucggauaua

SEQ ID NO: 711393 - RNA, 19 nt, Artificial Sequence
  Description of Artificial Sequence: Synthetic oligonucleotide
uuccaacgauucggaugaa

SEQ ID NO: 711394 - RNA, 19 nt, Artificial Sequence
  Description of Artificial Sequence: Synthetic oligonucleotide
ccggacacucgaaguggac

SEQ ID NO: 711395 - RNA, 19 nt, Artificial Sequence
  Description of Artificial Sequence: Synthetic oligonucleotide
gcaugccucuguaguugag

SEQ ID NO: 711396 - RNA, 19 nt, Artificial Sequence
  Description of Artificial Sequence: Synthetic oligonucleotide
ggcccgcccaagucacacc

SEQ ID NO: 711397 - RNA, 19 nt, Artificial Sequence
  Description of Artificial Sequence: Synthetic oligonucleotide
ccuccuuuauuggugcugu

SEQ ID NO: 711398 - RNA, 19 nt, Artificial Sequence
  Description of Artificial Sequence: Synthetic oligonucleotide
ggcguaugugguugauaau

SEQ ID NO: 711399 - RNA, 19 nt, Artificial Sequence
  Description of Artificial Sequence: Synthetic oligonucleotide
ccauggacacuucgauaaa

SEQ ID NO: 711400 - RNA, 19 nt, Artificial Sequence
  Description of Artificial Sequence: Synthetic oligonucleotide
cccgcccaagucacaccac

SEQ ID NO: 711401 - RNA, 19 nt, Artificial Sequence
  Description of Artificial Sequence: Synthetic oligonucleotide
gcauuucggcugcgacuga

SEQ ID NO: 711402 - RNA, 19 nt, Artificial Sequence
  Description of Artificial Sequence: Synthetic oligonucleotide
gcugcuccggacacucgaa

SEQ ID NO: 711403 - RNA, 19 nt, Artificial Sequence
  Description of Artificial Sequence: Synthetic oligonucleotide
caggcccgcccaagucaca

SEQ ID NO: 711404 - RNA, 19 nt, Artificial Sequence
  Description of Artificial Sequence: Synthetic oligonucleotide
cugugcccgguuccucacu

SEQ ID NO: 711405 - RNA, 19 nt, Artificial Sequence
  Description of Artificial Sequence: Synthetic oligonucleotide
cgucacagucccagaguaa

SEQ ID NO: 711406 - RNA, 19 nt, Artificial Sequence
  Description of Artificial Sequence: Synthetic oligonucleotide
cggcaauuguugcaacauu

SEQ ID NO: 711407 - RNA, 19 nt, Artificial Sequence
  Description of Artificial Sequence: Synthetic oligonucleotide
cggcugucacggucccaca

SEQ ID NO: 711408 - RNA, 19 nt, Artificial Sequence
  Description of Artificial Sequence: Synthetic oligonucleotide
cccgcccaguguagaugua

SEQ ID NO: 711409 - RNA, 19 nt, Artificial Sequence
  Description of Artificial Sequence: Synthetic oligonucleotide
ccagaccgacagucaucau

SEQ ID NO: 711410 - RNA, 19 nt, Artificial Sequence
  Description of Artificial Sequence: Synthetic oligonucleotide
cggcugcgacugacuccuu

SEQ ID NO: 711411 - RNA, 19 nt, Artificial Sequence
  Description of Artificial Sequence: Synthetic oligonucleotide
aauagcacgagucagaugc

SEQ ID NO: 711412 - RNA, 19 nt, Artificial Sequence
  Description of Artificial Sequence: Synthetic oligonucleotide
aauaguuucaagcauugac

SEQ ID NO: 711413 - RNA, 19 nt, Artificial Sequence
  Description of Artificial Sequence: Synthetic oligonucleotide
auuaaaacgguguggaagg

SEQ ID NO: 711414 - RNA, 19 nt, Artificial Sequence
  Description of Artificial Sequence: Synthetic oligonucleotide
agaaucaauaccucuggcc

SEQ ID NO: 711415 - RNA, 19 nt, Artificial Sequence
  Description of Artificial Sequence: Synthetic oligonucleotide
aguguauuaagacauaggu

SEQ ID NO: 711416 - RNA, 19 nt, Artificial Sequence
  Description of Artificial Sequence: Synthetic oligonucleotide
aauucuuacacgugauuag

SEQ ID NO: 711417 - RNA, 19 nt, Artificial Sequence
  Description of Artificial Sequence: Synthetic oligonucleotide
ugcaguaaaucucugcggg

SEQ ID NO: 711418 - RNA, 19 nt, Artificial Sequence
  Description of Artificial Sequence: Synthetic oligonucleotide
uuuauuaaaacggugugga

SEQ ID NO: 711419 - RNA, 19 nt, Artificial Sequence
  Description of Artificial Sequence: Synthetic oligonucleotide
uuaauuuuacacaaggcuu

SEQ ID NO: 711420 - RNA, 19 nt, Artificial Sequence
  Description of Artificial Sequence: Synthetic oligonucleotide
uauuaaaacgguguggaag

SEQ ID NO: 711421 - RNA, 19 nt, Artificial Sequence
  Description of Artificial Sequence: Synthetic oligonucleotide
aaggccuugcuucucaaac

SEQ ID NO: 711422 - RNA, 19 nt, Artificial Sequence
  Description of Artificial Sequence: Synthetic oligonucleotide
gaaucauacacacuaacuc

SEQ ID NO: 711423 - RNA, 19 nt, Artificial Sequence
  Description of Artificial Sequence: Synthetic oligonucleotide
uguuggucagguuugauca

SEQ ID NO: 711424 - RNA, 19 nt, Artificial Sequence
  Description of Artificial Sequence: Synthetic oligonucleotide
agaaucaaagugcaaauga

SEQ ID NO: 711425 - RNA, 19 nt, Artificial Sequence
  Description of Artificial Sequence: Synthetic oligonucleotide
auugacaauucuuacacgu

SEQ ID NO: 711426 - RNA, 19 nt, Artificial Sequence
  Description of Artificial Sequence: Synthetic oligonucleotide
uaguguuacagauuucagg

SEQ ID NO: 711427 - RNA, 19 nt, Artificial Sequence
  Description of Artificial Sequence: Synthetic oligonucleotide
auauuuguaucucaagucu

SEQ ID NO: 711428 - RNA, 19 nt, Artificial Sequence
  Description of Artificial Sequence: Synthetic oligonucleotide
uuugaucauagguugagga

SEQ ID NO: 711429 - RNA, 19 nt, Artificial Sequence
  Description of Artificial Sequence: Synthetic oligonucleotide
gaugguaccgucuacuaug

SEQ ID NO: 711430 - RNA, 19 nt, Artificial Sequence
  Description of Artificial Sequence: Synthetic oligonucleotide
aagacauagguucucgugu

SEQ ID NO: 711431 - RNA, 19 nt, Artificial Sequence
  Description of Artificial Sequence: Synthetic oligonucleotide
auauucuucuuggauaccc

SEQ ID NO: 711432 - RNA, 19 nt, Artificial Sequence
  Description of Artificial Sequence: Synthetic oligonucleotide
ugaaaguacauucacuaau

SEQ ID NO: 711433 - RNA, 19 nt, Artificial Sequence
  Description of Artificial Sequence: Synthetic oligonucleotide
aagcauugacaauucuuac

SEQ ID NO: 711434 - RNA, 19 nt, Artificial Sequence
  Description of Artificial Sequence: Synthetic oligonucleotide
uaggauuuugucacuacag

SEQ ID NO: 711435 - RNA, 19 nt, Artificial Sequence
  Description of Artificial Sequence: Synthetic oligonucleotide
aaguacauucacuaaugca

SEQ ID NO: 711436 - RNA, 19 nt, Artificial Sequence
  Description of Artificial Sequence: Synthetic oligonucleotide
auuuauuaaaacggugugg

SEQ ID NO: 711437 - RNA, 19 nt, Artificial Sequence
  Description of Artificial Sequence: Synthetic oligonucleotide
ucucaagucuguaaugcag

SEQ ID NO: 711438 - RNA, 19 nt, Artificial Sequence
  Description of Artificial Sequence: Synthetic oligonucleotide
ugugccucgcccaugaacc

SEQ ID NO: 711439 - RNA, 19 nt, Artificial Sequence
  Description of Artificial Sequence: Synthetic oligonucleotide
aaugugaugaggaaugcca

SEQ ID NO: 711440 - RNA, 19 nt, Artificial Sequence
  Description of Artificial Sequence: Synthetic oligonucleotide
acauacgauaauuuggugu

SEQ ID NO: 711441 - RNA, 19 nt, Artificial Sequence
  Description of Artificial Sequence: Synthetic oligonucleotide
uguaucucaagucuguaau

SEQ ID NO: 711442 - RNA, 19 nt, Artificial Sequence
  Description of Artificial Sequence: Synthetic oligonucleotide
uauuuguaucucaagucug

SEQ ID NO: 711443 - RNA, 19 nt, Artificial Sequence
  Description of Artificial Sequence: Synthetic oligonucleotide
aaacauacgauaauuuggu

SEQ ID NO: 711444 - RNA, 19 nt, Artificial Sequence
  Description of Artificial Sequence: Synthetic oligonucleotide
aaggguaaccuaguguuac

SEQ ID NO: 711445 - RNA, 19 nt, Artificial Sequence
  Description of Artificial Sequence: Synthetic oligonucleotide
guagccauuagaaucaaag

SEQ ID NO: 711446 - RNA, 19 nt, Artificial Sequence
  Description of Artificial Sequence: Synthetic oligonucleotide
gaaauuuauuaaaacggug

SEQ ID NO: 711447 - RNA, 19 nt, Artificial Sequence
  Description of Artificial Sequence: Synthetic oligonucleotide
auauaguugcuguuggcag

SEQ ID NO: 711448 - RNA, 19 nt, Artificial Sequence
  Description of Artificial Sequence: Synthetic oligonucleotide
aggauuuugucacuacagg

SEQ ID NO: 711449 - RNA, 19 nt, Artificial Sequence
  Description of Artificial Sequence: Synthetic oligonucleotide
uggacagagauaaaaguuc

SEQ ID NO: 711450 - RNA, 19 nt, Artificial Sequence
  Description of Artificial Sequence: Synthetic oligonucleotide
uuagucaaagaaugcaaga

SEQ ID NO: 711451 - RNA, 19 nt, Artificial Sequence
  Description of Artificial Sequence: Synthetic oligonucleotide
ugauuagucaaagaaugca

SEQ ID NO: 711452 - RNA, 19 nt, Artificial Sequence
  Description of Artificial Sequence: Synthetic oligonucleotide
uugaucauagguugaggag

SEQ ID NO: 711453 - RNA, 19 nt, Artificial Sequence
  Description of Artificial Sequence: Synthetic oligonucleotide
aaccuaguguuacagauuu

SEQ ID NO: 711454 - RNA, 19 nt, Artificial Sequence
  Description of Artificial Sequence: Synthetic oligonucleotide
uguggcuacaucccagggg

SEQ ID NO: 711455 - RNA, 19 nt, Artificial Sequence
  Description of Artificial Sequence: Synthetic oligonucleotide
aguaguucuuggcuaacuc

SEQ ID NO: 711456 - RNA, 19 nt, Artificial Sequence
  Description of Artificial Sequence: Synthetic oligonucleotide
ugaaaggguaaccuagugu

SEQ ID NO: 711457 - RNA, 19 nt, Artificial Sequence
  Description of Artificial Sequence: Synthetic oligonucleotide
gucaaagaaugcaagacag

SEQ ID NO: 711458 - RNA, 19 nt, Artificial Sequence
  Description of Artificial Sequence: Synthetic oligonucleotide
ucaccaauccuuuauguuc

SEQ ID NO: 711459 - RNA, 19 nt, Artificial Sequence
  Description of Artificial Sequence: Synthetic oligonucleotide
uaauuuuacacaaggcuuu

SEQ ID NO: 711460 - RNA, 19 nt, Artificial Sequence
  Description of Artificial Sequence: Synthetic oligonucleotide
uaagacauagguucucgug

SEQ ID NO: 711461 - RNA, 19 nt, Artificial Sequence
  Description of Artificial Sequence: Synthetic oligonucleotide
guagccaucggccaaacac

SEQ ID NO: 711462 - RNA, 19 nt, Artificial Sequence
  Description of Artificial Sequence: Synthetic oligonucleotide
ugguugacgauaaagggau

SEQ ID NO: 711463 - RNA, 19 nt, Artificial Sequence
  Description of Artificial Sequence: Synthetic oligonucleotide
uaucucaagucuguaaugc

SEQ ID NO: 711464 - RNA, 19 nt, Artificial Sequence
  Description of Artificial Sequence: Synthetic oligonucleotide
agucaaagaaugcaagaca

SEQ ID NO: 711465 - RNA, 19 nt, Artificial Sequence
  Description of Artificial Sequence: Synthetic oligonucleotide
ugagaaagguauacuguca

SEQ ID NO: 711466 - RNA, 19 nt, Artificial Sequence
  Description of Artificial Sequence: Synthetic oligonucleotide
auuaagacauagguucucg

SEQ ID NO: 711467 - RNA, 19 nt, Artificial Sequence
  Description of Artificial Sequence: Synthetic oligonucleotide
ugucauuuaagggacacaa

SEQ ID NO: 711468 - RNA, 19 nt, Artificial Sequence
  Description of Artificial Sequence: Synthetic oligonucleotide
aacagcuggucugugcccc

SEQ ID NO: 711469 - RNA, 19 nt, Artificial Sequence
  Description of Artificial Sequence: Synthetic oligonucleotide
aaacacgccccacugucag

SEQ ID NO: 711470 - RNA, 19 nt, Artificial Sequence
  Description of Artificial Sequence: Synthetic oligonucleotide
aguugcuguuggcagaggg

SEQ ID NO: 711471 - RNA, 19 nt, Artificial Sequence
  Description of Artificial Sequence: Synthetic oligonucleotide
agaaauuuauuaaaacggu

SEQ ID NO: 711472 - RNA, 19 nt, Artificial Sequence
  Description of Artificial Sequence: Synthetic oligonucleotide
uaguucuuggcuaacucgu

SEQ ID NO: 711473 - RNA, 19 nt, Artificial Sequence
  Description of Artificial Sequence: Synthetic oligonucleotide
accaguugacgcuuguuuc

SEQ ID NO: 711474 - RNA, 19 nt, Artificial Sequence
  Description of Artificial Sequence: Synthetic oligonucleotide
ucaagcauugacaauucuu

SEQ ID NO: 711475 - RNA, 19 nt, Artificial Sequence
  Description of Artificial Sequence: Synthetic oligonucleotide
gcuuuucacaaacagcugg

SEQ ID NO: 711476 - RNA, 19 nt, Artificial Sequence
  Description of Artificial Sequence: Synthetic oligonucleotide
accccuucaacuugaguac

SEQ ID NO: 711477 - RNA, 19 nt, Artificial Sequence
  Description of Artificial Sequence: Synthetic oligonucleotide
cagguuugaucauagguug

SEQ ID NO: 711478 - RNA, 19 nt, Artificial Sequence
  Description of Artificial Sequence: Synthetic oligonucleotide
gaaucaauaccucuggccu

SEQ ID NO: 711479 - RNA, 19 nt, Artificial Sequence
  Description of Artificial Sequence: Synthetic oligonucleotide
auaguuucaagcauugaca

SEQ ID NO: 711480 - RNA, 19 nt, Artificial Sequence
  Description of Artificial Sequence: Synthetic oligonucleotide
uugguguugugcaaagaca

SEQ ID NO: 711481 - RNA, 19 nt, Artificial Sequence
  Description of Artificial Sequence: Synthetic oligonucleotide
uaaagggauagcguagucc

SEQ ID NO: 711482 - RNA, 19 nt, Artificial Sequence
  Description of Artificial Sequence: Synthetic oligonucleotide
ucgcccaugaaccagcuuc

SEQ ID NO: 711483 - RNA, 19 nt, Artificial Sequence
  Description of Artificial Sequence: Synthetic oligonucleotide
aaaugugccucgcccauga

SEQ ID NO: 711484 - RNA, 19 nt, Artificial Sequence
  Description of Artificial Sequence: Synthetic oligonucleotide
cuaacucguagucacgggc

SEQ ID NO: 711485 - RNA, 19 nt, Artificial Sequence
  Description of Artificial Sequence: Synthetic oligonucleotide
cugagaaagguauacuguc

SEQ ID NO: 711486 - RNA, 19 nt, Artificial Sequence
  Description of Artificial Sequence: Synthetic oligonucleotide
agcauugacaauucuuaca

SEQ ID NO: 711487 - RNA, 19 nt, Artificial Sequence
  Description of Artificial Sequence: Synthetic oligonucleotide
aguaaaucucugcgggcac

SEQ ID NO: 711488 - RNA, 19 nt, Artificial Sequence
  Description of Artificial Sequence: Synthetic oligonucleotide
auccaauucccauagccca

SEQ ID NO: 711489 - RNA, 19 nt, Artificial Sequence
  Description of Artificial Sequence: Synthetic oligonucleotide
uuauguucaccucuucguc

SEQ ID NO: 711490 - RNA, 19 nt, Artificial Sequence
  Description of Artificial Sequence: Synthetic oligonucleotide
gauauaguugcuguuggca

SEQ ID NO: 711491 - RNA, 19 nt, Artificial Sequence
  Description of Artificial Sequence: Synthetic oligonucleotide
gaugaucuacccuccauga

SEQ ID NO: 711492 - RNA, 19 nt, Artificial Sequence
  Description of Artificial Sequence: Synthetic oligonucleotide
ugcccuacaaccccugacc

SEQ ID NO: 711493 - RNA, 19 nt, Artificial Sequence
  Description of Artificial Sequence: Synthetic oligonucleotide
guggguacaaugucacugg

SEQ ID NO: 711494 - RNA, 19 nt, Artificial Sequence
  Description of Artificial Sequence: Synthetic oligonucleotide
uaacucguagucacgggca

SEQ ID NO: 711495 - RNA, 19 nt, Artificial Sequence
  Description of Artificial Sequence: Synthetic oligonucleotide
uagccaucggccaaacacc

SEQ ID NO: 711496 - RNA, 19 nt, Artificial Sequence
  Description of Artificial Sequence: Synthetic oligonucleotide
guugacgauaaagggauag

SEQ ID NO: 711497 - RNA, 19 nt, Artificial Sequence
  Description of Artificial Sequence: Synthetic oligonucleotide
acgauaaagggauagcgua

SEQ ID NO: 711498 - RNA, 19 nt, Artificial Sequence
  Description of Artificial Sequence: Synthetic oligonucleotide
gcauugacaauucuuacac

SEQ ID NO: 711499 - RNA, 19 nt, Artificial Sequence
  Description of Artificial Sequence: Synthetic oligonucleotide
aaggccaacaaagaccccu

SEQ ID NO: 711500 - RNA, 19 nt, Artificial Sequence
  Description of Artificial Sequence: Synthetic oligonucleotide
acccgagacaacuccuucc

SEQ ID NO: 711501 - RNA, 19 nt, Artificial Sequence
  Description of Artificial Sequence: Synthetic oligonucleotide
caaagaugaucuacccucc

SEQ ID NO: 711502 - RNA, 19 nt, Artificial Sequence
  Description of Artificial Sequence: Synthetic oligonucleotide
ucacuacaggacaugguac

SEQ ID NO: 711503 - RNA, 19 nt, Artificial Sequence
  Description of Artificial Sequence: Synthetic oligonucleotide
gaaaggguaaccuaguguu

SEQ ID NO: 711504 - RNA, 19 nt, Artificial Sequence
  Description of Artificial Sequence: Synthetic oligonucleotide
aaggggagugcaggaaacc

SEQ ID NO: 711505 - RNA, 19 nt, Artificial Sequence
  Description of Artificial Sequence: Synthetic oligonucleotide
gucauuggguacuggacag

SEQ ID NO: 711506 - RNA, 19 nt, Artificial Sequence
  Description of Artificial Sequence: Synthetic oligonucleotide
gaccccaugggaaacacgc

SEQ ID NO: 711507 - RNA, 19 nt, Artificial Sequence
  Description of Artificial Sequence: Synthetic oligonucleotide
cauugacaauucuuacacg

SEQ ID NO: 711508 - RNA, 19 nt, Artificial Sequence
  Description of Artificial Sequence: Synthetic oligonucleotide
aacucguagucacgggcag

SEQ ID NO: 711509 - RNA, 19 nt, Artificial Sequence
  Description of Artificial Sequence: Synthetic oligonucleotide
gccauuagaaucaaagugc

SEQ ID NO: 711510 - RNA, 19 nt, Artificial Sequence
  Description of Artificial Sequence: Synthetic oligonucleotide
ugucccaaccacauucuac

SEQ ID NO: 711511 - RNA, 19 nt, Artificial Sequence
  Description of Artificial Sequence: Synthetic oligonucleotide
aggaaauaguuucaagcau

SEQ ID NO: 711512 - RNA, 19 nt, Artificial Sequence
  Description of Artificial Sequence: Synthetic oligonucleotide
gagacaguagccauuagaa

SEQ ID NO: 711513 - RNA, 19 nt, Artificial Sequence
  Description of Artificial Sequence: Synthetic oligonucleotide
aguuagugcucuguggguc

SEQ ID NO: 711514 - RNA, 19 nt, Artificial Sequence
  Description of Artificial Sequence: Synthetic oligonucleotide
augaucuacccuccaugac

SEQ ID NO: 711515 - RNA, 19 nt, Artificial Sequence
  Description of Artificial Sequence: Synthetic oligonucleotide
aaggagggaugguaccguc

SEQ ID NO: 711516 - RNA, 19 nt, Artificial Sequence
  Description of Artificial Sequence: Synthetic oligonucleotide
agaaacaucaccacaggaa

SEQ ID NO: 711517 - RNA, 19 nt, Artificial Sequence
  Description of Artificial Sequence: Synthetic oligonucleotide
cacgugauuagucaaagaa

SEQ ID NO: 711518 - RNA, 19 nt, Artificial Sequence
  Description of Artificial Sequence: Synthetic oligonucleotide
aaaacgguguggaagggaa

SEQ ID NO: 711519 - RNA, 19 nt, Artificial Sequence
  Description of Artificial Sequence: Synthetic oligonucleotide
ucucaaacauacgauaauu

SEQ ID NO: 711520 - RNA, 19 nt, Artificial Sequence
  Description of Artificial Sequence: Synthetic oligonucleotide
acaaagaccccuucaacuu

SEQ ID NO: 711521 - RNA, 19 nt, Artificial Sequence
  Description of Artificial Sequence: Synthetic oligonucleotide
ucacgcggcagcaaauagc

SEQ ID NO: 711522 - RNA, 19 nt, Artificial Sequence
  Description of Artificial Sequence: Synthetic oligonucleotide
caagcauugacaauucuua

SEQ ID NO: 711523 - RNA, 19 nt, Artificial Sequence
  Description of Artificial Sequence: Synthetic oligonucleotide
uuaagacauagguucucgu

SEQ ID NO: 711524 - RNA, 19 nt, Artificial Sequence
  Description of Artificial Sequence: Synthetic oligonucleotide
uuaaaacgguguggaaggg

SEQ ID NO: 711525 - RNA, 19 nt, Artificial Sequence
  Description of Artificial Sequence: Synthetic oligonucleotide
acuaacucggccgaccuug

SEQ ID NO: 711526 - RNA, 19 nt, Artificial Sequence
  Description of Artificial Sequence: Synthetic oligonucleotide
guaucucaagucuguaaug

SEQ ID NO: 711527 - RNA, 19 nt, Artificial Sequence
  Description of Artificial Sequence: Synthetic oligonucleotide
ugcuacacguggauagagc

SEQ ID NO: 711528 - RNA, 19 nt, Artificial Sequence
  Description of Artificial Sequence: Synthetic oligonucleotide
gauggagccacaccauuca

SEQ ID NO: 711529 - RNA, 19 nt, Artificial Sequence
  Description of Artificial Sequence: Synthetic oligonucleotide
ugggacaaagaugaucuac

SEQ ID NO: 711530 - RNA, 19 nt, Artificial Sequence
  Description of Artificial Sequence: Synthetic oligonucleotide
gccuuuuggaaucauacac

SEQ ID NO: 711531 - RNA, 19 nt, Artificial Sequence
  Description of Artificial Sequence: Synthetic oligonucleotide
aaucaauaccucuggccuu

SEQ ID NO: 711532 - RNA, 19 nt, Artificial Sequence
  Description of Artificial Sequence: Synthetic oligonucleotide
uuguaucucaagucuguaa

SEQ ID NO: 711533 - RNA, 19 nt, Artificial Sequence
  Description of Artificial Sequence: Synthetic oligonucleotide
guggcuacaucccagggga

SEQ ID NO: 711534 - RNA, 19 nt, Artificial Sequence
  Description of Artificial Sequence: Synthetic oligonucleotide
cucaccguaggagagcugc

SEQ ID NO: 711535 - RNA, 19 nt, Artificial Sequence
  Description of Artificial Sequence: Synthetic oligonucleotide
uccggauugccuuuuggaa

SEQ ID NO: 711536 - RNA, 19 nt, Artificial Sequence
  Description of Artificial Sequence: Synthetic oligonucleotide
gcuacacguggauagagcc

SEQ ID NO: 711537 - RNA, 19 nt, Artificial Sequence
  Description of Artificial Sequence: Synthetic oligonucleotide
aguuuucaacuccugcccu

SEQ ID NO: 711538 - RNA, 19 nt, Artificial Sequence
  Description of Artificial Sequence: Synthetic oligonucleotide
cucuaggucguagccaucg

SEQ ID NO: 711539 - RNA, 19 nt, Artificial Sequence
  Description of Artificial Sequence: Synthetic oligonucleotide
uacgauaauuugguguugu

SEQ ID NO: 711540 - RNA, 19 nt, Artificial Sequence
  Description of Artificial Sequence: Synthetic oligonucleotide
uggucuuuccggauugccu

SEQ ID NO: 711541 - RNA, 19 nt, Artificial Sequence
  Description of Artificial Sequence: Synthetic oligonucleotide
aucucuaggucguagccau

SEQ ID NO: 711542 - RNA, 19 nt, Artificial Sequence
  Description of Artificial Sequence: Synthetic oligonucleotide
uugacgauaaagggauagc

SEQ ID NO: 711543 - RNA, 19 nt, Artificial Sequence
  Description of Artificial Sequence: Synthetic oligonucleotide
gaggaaugccaugaacucc

SEQ ID NO: 711544 - RNA, 19 nt, Artificial Sequence
  Description of Artificial Sequence: Synthetic oligonucleotide
aauccaaggagggauggua

SEQ ID NO: 711545 - RNA, 19 nt, Artificial Sequence
  Description of Artificial Sequence: Synthetic oligonucleotide
aaucucugcgggcacggaa

SEQ ID NO: 711546 - RNA, 19 nt, Artificial Sequence
  Description of Artificial Sequence: Synthetic oligonucleotide
ugcugcacccaguuagugc

SEQ ID NO: 711547 - RNA, 19 nt, Artificial Sequence
  Description of Artificial Sequence: Synthetic oligonucleotide
uucaagcauugacaauucu

SEQ ID NO: 711548 - RNA, 19 nt, Artificial Sequence
  Description of Artificial Sequence: Synthetic oligonucleotide
agggaaguucccuggcggg

SEQ ID NO: 711549 - RNA, 19 nt, Artificial Sequence
  Description of Artificial Sequence: Synthetic oligonucleotide
ccaguuagugcucuguggg

SEQ ID NO: 711550 - RNA, 19 nt, Artificial Sequence
  Description of Artificial Sequence: Synthetic oligonucleotide
ucccacguggguacaaugu

SEQ ID NO: 711551 - RNA, 19 nt, Artificial Sequence
  Description of Artificial Sequence: Synthetic oligonucleotide
aucucaagucuguaaugca

SEQ ID NO: 711552 - RNA, 19 nt, Artificial Sequence
  Description of Artificial Sequence: Synthetic oligonucleotide
agcacuuccccaguuccac

SEQ ID NO: 711553 - RNA, 19 nt, Artificial Sequence
  Description of Artificial Sequence: Synthetic oligonucleotide
cucggcuugagcacuuccc

SEQ ID NO: 711554 - RNA, 19 nt, Artificial Sequence
  Description of Artificial Sequence: Synthetic oligonucleotide
gucacuacaggacauggua

SEQ ID NO: 711555 - RNA, 19 nt, Artificial Sequence
  Description of Artificial Sequence: Synthetic oligonucleotide
uauuaagacauagguucuc

SEQ ID NO: 711556 - RNA, 19 nt, Artificial Sequence
  Description of Artificial Sequence: Synthetic oligonucleotide
uaaaacgguguggaaggga

SEQ ID NO: 711557 - RNA, 19 nt, Artificial Sequence
  Description of Artificial Sequence: Synthetic oligonucleotide
agggauagcguaguccguc

SEQ ID NO: 711558 - RNA, 19 nt, Artificial Sequence
  Description of Artificial Sequence: Synthetic oligonucleotide
aaagaccccuucaacuuga

SEQ ID NO: 711559 - RNA, 19 nt, Artificial Sequence
  Description of Artificial Sequence: Synthetic oligonucleotide
caaagaccccuucaacuug

SEQ ID NO: 711560 - RNA, 19 nt, Artificial Sequence
  Description of Artificial Sequence: Synthetic oligonucleotide
cacguggguacaaugucac

SEQ ID NO: 711561 - RNA, 19 nt, Artificial Sequence
  Description of Artificial Sequence: Synthetic oligonucleotide
uacuaugguuccuccauua

SEQ ID NO: 711562 - RNA, 19 nt, Artificial Sequence
  Description of Artificial Sequence: Synthetic oligonucleotide
caagucuguaaugcagucc

SEQ ID NO: 711563 - RNA, 19 nt, Artificial Sequence
  Description of Artificial Sequence: Synthetic oligonucleotide
guaaaucucugcgggcacg

SEQ ID NO: 711564 - RNA, 19 nt, Artificial Sequence
  Description of Artificial Sequence: Synthetic oligonucleotide
uccguccucaaaugcauuc

SEQ ID NO: 711565 - RNA, 19 nt, Artificial Sequence
  Description of Artificial Sequence: Synthetic oligonucleotide
cugaaaggguaaccuagug

SEQ ID NO: 711566 - RNA, 19 nt, Artificial Sequence
  Description of Artificial Sequence: Synthetic oligonucleotide
gacauagguucucguguug

SEQ ID NO: 711567 - RNA, 19 nt, Artificial Sequence
  Description of Artificial Sequence: Synthetic oligonucleotide
auagguugaggagacagua

SEQ ID NO: 711568 - RNA, 19 nt, Artificial Sequence
  Description of Artificial Sequence: Synthetic oligonucleotide
acaugguacggagucuuuc

SEQ ID NO: 711569 - RNA, 19 nt, Artificial Sequence
  Description of Artificial Sequence: Synthetic oligonucleotide
gaaagguauacugucauuu

SEQ ID NO: 711570 - RNA, 19 nt, Artificial Sequence
  Description of Artificial Sequence: Synthetic oligonucleotide
caaugugaugaggaaugcc

SEQ ID NO: 711571 - RNA, 19 nt, Artificial Sequence
  Description of Artificial Sequence: Synthetic oligonucleotide
ccaugcuacacguggauag

SEQ ID NO: 711572 - RNA, 19 nt, Artificial Sequence
  Description of Artificial Sequence: Synthetic oligonucleotide
cuuacacgugauuagucaa

SEQ ID NO: 711573 - RNA, 19 nt, Artificial Sequence
  Description of Artificial Sequence: Synthetic oligonucleotide
aaccccugaccacaguuuu

SEQ ID NO: 711574 - RNA, 19 nt, Artificial Sequence
  Description of Artificial Sequence: Synthetic oligonucleotide
agacaguagccauuagaau

SEQ ID NO: 711575 - RNA, 19 nt, Artificial Sequence
  Description of Artificial Sequence: Synthetic oligonucleotide
gggacaaagaugaucuacc

SEQ ID NO: 711576 - RNA, 19 nt, Artificial Sequence
  Description of Artificial Sequence: Synthetic oligonucleotide
cacgcggcagcaaauagca

SEQ ID NO: 711577 - RNA, 19 nt, Artificial Sequence
  Description of Artificial Sequence: Synthetic oligonucleotide
uugagcacuuccccaguuc

SEQ ID NO: 711578 - RNA, 19 nt, Artificial Sequence
  Description of Artificial Sequence: Synthetic oligonucleotide
ucuacccuccaugacuugu

SEQ ID NO: 711579 - RNA, 19 nt, Artificial Sequence
  Description of Artificial Sequence: Synthetic oligonucleotide
acaauucuuacacgugauu

SEQ ID NO: 711580 - RNA, 19 nt, Artificial Sequence
  Description of Artificial Sequence: Synthetic oligonucleotide
gugcuuuacagaagggcag

SEQ ID NO: 711581 - RNA, 19 nt, Artificial Sequence
  Description of Artificial Sequence: Synthetic oligonucleotide
uggguacaaugucacugga

SEQ ID NO: 711582 - RNA, 19 nt, Artificial Sequence
  Description of Artificial Sequence: Synthetic oligonucleotide
cccuuguaaacauuucacc

SEQ ID NO: 711583 - RNA, 19 nt, Artificial Sequence
  Description of Artificial Sequence: Synthetic oligonucleotide
cauacgauaauuugguguu

SEQ ID NO: 711584 - RNA, 19 nt, Artificial Sequence
  Description of Artificial Sequence: Synthetic oligonucleotide
uccaauucccauagcccau

SEQ ID NO: 711585 - RNA, 19 nt, Artificial Sequence
  Description of Artificial Sequence: Synthetic oligonucleotide
acacuaacucggccgaccu

SEQ ID NO: 711586 - RNA, 19 nt, Artificial Sequence
  Description of Artificial Sequence: Synthetic oligonucleotide
gguuugaucauagguugag

SEQ ID NO: 711587 - RNA, 19 nt, Artificial Sequence
  Description of Artificial Sequence: Synthetic oligonucleotide
acucggccgaccuuggggu

SEQ ID NO: 711588 - RNA, 19 nt, Artificial Sequence
  Description of Artificial Sequence: Synthetic oligonucleotide
uaccaucccacguggguac

SEQ ID NO: 711589 - RNA, 19 nt, Artificial Sequence
  Description of Artificial Sequence: Synthetic oligonucleotide
uuggcuguucccagaugga

SEQ ID NO: 711590 - RNA, 19 nt, Artificial Sequence
  Description of Artificial Sequence: Synthetic oligonucleotide
gacgcuuguuuccuugguc

SEQ ID NO: 711591 - RNA, 19 nt, Artificial Sequence
  Description of Artificial Sequence: Synthetic oligonucleotide
agacauagguucucguguu

SEQ ID NO: 711592 - RNA, 19 nt, Artificial Sequence
  Description of Artificial Sequence: Synthetic oligonucleotide
gagaaagguauacugucau

SEQ ID NO: 711593 - RNA, 19 nt, Artificial Sequence
  Description of Artificial Sequence: Synthetic oligonucleotide
acaaccccugaccacaguu

SEQ ID NO: 711594 - RNA, 19 nt, Artificial Sequence
  Description of Artificial Sequence: Synthetic oligonucleotide
ggagacaguagccauuaga

SEQ ID NO: 711595 - RNA, 19 nt, Artificial Sequence
  Description of Artificial Sequence: Synthetic oligonucleotide
ggaaacacgccccacuguc

SEQ ID NO: 711596 - RNA, 19 nt, Artificial Sequence
  Description of Artificial Sequence: Synthetic oligonucleotide
gagcagagcuucuuaaacu

SEQ ID NO: 711597 - RNA, 19 nt, Artificial Sequence
  Description of Artificial Sequence: Synthetic oligonucleotide
acacgccccacugucaguc

SEQ ID NO: 711598 - RNA, 19 nt, Artificial Sequence
  Description of Artificial Sequence: Synthetic oligonucleotide
uaacucggccgaccuuggg

SEQ ID NO: 711599 - RNA, 19 nt, Artificial Sequence
  Description of Artificial Sequence: Synthetic oligonucleotide
cuaacucggccgaccuugg

SEQ ID NO: 711600 - RNA, 19 nt, Artificial Sequence
  Description of Artificial Sequence: Synthetic oligonucleotide
cuggugcccauccaggauc

SEQ ID NO: 711601 - RNA, 19 nt, Artificial Sequence
  Description of Artificial Sequence: Synthetic oligonucleotide
acgugauuagucaaagaau

SEQ ID NO: 711602 - RNA, 19 nt, Artificial Sequence
  Description of Artificial Sequence: Synthetic oligonucleotide
uaccgucuacuaugguucc

SEQ ID NO: 711603 - RNA, 19 nt, Artificial Sequence
  Description of Artificial Sequence: Synthetic oligonucleotide
gucacgcggcagcaaauag

SEQ ID NO: 711604 - RNA, 19 nt, Artificial Sequence
  Description of Artificial Sequence: Synthetic oligonucleotide
gcagcaaauagcacgaguc

SEQ ID NO: 711605 - RNA, 19 nt, Artificial Sequence
  Description of Artificial Sequence: Synthetic oligonucleotide
ggcuaacucguagucacgg

SEQ ID NO: 711606 - RNA, 19 nt, Artificial Sequence
  Description of Artificial Sequence: Synthetic oligonucleotide
ugccaugaacucccucuga

SEQ ID NO: 711607 - RNA, 19 nt, Artificial Sequence
  Description of Artificial Sequence: Synthetic oligonucleotide
ugggguuugcugauccaau

SEQ ID NO: 711608 - RNA, 19 nt, Artificial Sequence
  Description of Artificial Sequence: Synthetic oligonucleotide
cuaugccugggcucuuccc

SEQ ID NO: 711609 - RNA, 19 nt, Artificial Sequence
  Description of Artificial Sequence: Synthetic oligonucleotide
ucccgcaggcuuuucuuga

SEQ ID NO: 711610 - RNA, 19 nt, Artificial Sequence
  Description of Artificial Sequence: Synthetic oligonucleotide
cacacuaacucggccgacc

SEQ ID NO: 711611 - RNA, 19 nt, Artificial Sequence
  Description of Artificial Sequence: Synthetic oligonucleotide
ggaauccaaggagggaugg

SEQ ID NO: 711612 - RNA, 19 nt, Artificial Sequence
  Description of Artificial Sequence: Synthetic oligonucleotide
accguaggagagcugcagu

SEQ ID NO: 711613 - RNA, 19 nt, Artificial Sequence
  Description of Artificial Sequence: Synthetic oligonucleotide
uucguccucuggagugggg

SEQ ID NO: 711614 - RNA, 19 nt, Artificial Sequence
  Description of Artificial Sequence: Synthetic oligonucleotide
cagcaaauagcacgaguca

SEQ ID NO: 711615 - RNA, 19 nt, Artificial Sequence
  Description of Artificial Sequence: Synthetic oligonucleotide
cccaaggcggauaccaucc

SEQ ID NO: 711616 - RNA, 19 nt, Artificial Sequence
  Description of Artificial Sequence: Synthetic oligonucleotide
caguaaaucucugcgggca

SEQ ID NO: 711617 - RNA, 19 nt, Artificial Sequence
  Description of Artificial Sequence: Synthetic oligonucleotide
auacgauaauuugguguug

SEQ ID NO: 711618 - RNA, 19 nt, Artificial Sequence
  Description of Artificial Sequence: Synthetic oligonucleotide
gcuaacucguagucacggg

SEQ ID NO: 711619 - RNA, 19 nt, Artificial Sequence
  Description of Artificial Sequence: Synthetic oligonucleotide
guuacagauuucagguaca

SEQ ID NO: 711620 - RNA, 19 nt, Artificial Sequence
  Description of Artificial Sequence: Synthetic oligonucleotide
ggguacuggacagagauaa

SEQ ID NO: 711621 - RNA, 19 nt, Artificial Sequence
  Description of Artificial Sequence: Synthetic oligonucleotide
cuacaaccccugaccacag

SEQ ID NO: 711622 - RNA, 19 nt, Artificial Sequence
  Description of Artificial Sequence: Synthetic oligonucleotide
aaaggguaaccuaguguua

SEQ ID NO: 711623 - RNA, 19 nt, Artificial Sequence
  Description of Artificial Sequence: Synthetic oligonucleotide
aggguaaccuaguguuaca

SEQ ID NO: 711624 - RNA, 19 nt, Artificial Sequence
  Description of Artificial Sequence: Synthetic oligonucleotide
ccauuagaaucaaagugca

SEQ ID NO: 711625 - RNA, 19 nt, Artificial Sequence
  Description of Artificial Sequence: Synthetic oligonucleotide
aacucccucugaccccaug

SEQ ID NO: 711626 - RNA, 19 nt, Artificial Sequence
  Description of Artificial Sequence: Synthetic oligonucleotide
ggcccagcacauuccagcg

SEQ ID NO: 711627 - RNA, 19 nt, Artificial Sequence
  Description of Artificial Sequence: Synthetic oligonucleotide
cuacacguggauagagcca

SEQ ID NO: 711628 - RNA, 19 nt, Artificial Sequence
  Description of Artificial Sequence: Synthetic oligonucleotide
gaccuugcucggcuugagc

SEQ ID NO: 711629 - RNA, 19 nt, Artificial Sequence
  Description of Artificial Sequence: Synthetic oligonucleotide
uuguuacugggcagggcuu

SEQ ID NO: 711630 - RNA, 19 nt, Artificial Sequence
  Description of Artificial Sequence: Synthetic oligonucleotide
gcggauaccaucccacgug

SEQ ID NO: 711631 - RNA, 19 nt, Artificial Sequence
  Description of Artificial Sequence: Synthetic oligonucleotide
ccuaguguuacagauuuca

SEQ ID NO: 711632 - RNA, 19 nt, Artificial Sequence
  Description of Artificial Sequence: Synthetic oligonucleotide
gcaguaaaucucugcgggc

SEQ ID NO: 711633 - RNA, 19 nt, Artificial Sequence
  Description of Artificial Sequence: Synthetic oligonucleotide
ggguaaccuaguguuacag

SEQ ID NO: 711634 - RNA, 19 nt, Artificial Sequence
  Description of Artificial Sequence: Synthetic oligonucleotide
aggggagugcaggaaacca

SEQ ID NO: 711635 - RNA, 19 nt, Artificial Sequence
  Description of Artificial Sequence: Synthetic oligonucleotide
gggauguugcugcacccag

SEQ ID NO: 711636 - RNA, 19 nt, Artificial Sequence
  Description of Artificial Sequence: Synthetic oligonucleotide
ucauuggguacuggacaga

SEQ ID NO: 711637 - RNA, 19 nt, Artificial Sequence
  Description of Artificial Sequence: Synthetic oligonucleotide
ucggccgaccuuggggugg

SEQ ID NO: 711638 - RNA, 19 nt, Artificial Sequence
  Description of Artificial Sequence: Synthetic oligonucleotide
cgauaauuugguguugugc

SEQ ID NO: 711639 - RNA, 19 nt, Artificial Sequence
  Description of Artificial Sequence: Synthetic oligonucleotide
cucaaacauacgauaauuu

SEQ ID NO: 711640 - RNA, 19 nt, Artificial Sequence
  Description of Artificial Sequence: Synthetic oligonucleotide
aucaauaccucuggccuuu

SEQ ID NO: 711641 - RNA, 19 nt, Artificial Sequence
  Description of Artificial Sequence: Synthetic oligonucleotide
cauuagaaucaaagugcaa

SEQ ID NO: 711642 - RNA, 19 nt, Artificial Sequence
  Description of Artificial Sequence: Synthetic oligonucleotide
agcguaggauuuugucacu

SEQ ID NO: 711643 - RNA, 19 nt, Artificial Sequence
  Description of Artificial Sequence: Synthetic oligonucleotide
auaccaucccacgugggua

SEQ ID NO: 711644 - RNA, 19 nt, Artificial Sequence
  Description of Artificial Sequence: Synthetic oligonucleotide
cugcgggcacggaaggagc

SEQ ID NO: 711645 - RNA, 19 nt, Artificial Sequence
  Description of Artificial Sequence: Synthetic oligonucleotide
cugcccuacaaccccugac

SEQ ID NO: 711646 - RNA, 19 nt, Artificial Sequence
  Description of Artificial Sequence: Synthetic oligonucleotide
ccuguuuguuacugggcag

SEQ ID NO: 711647 - RNA, 19 nt, Artificial Sequence
  Description of Artificial Sequence: Synthetic oligonucleotide
gucccgcaggcuuuucuug

SEQ ID NO: 711648 - RNA, 19 nt, Artificial Sequence
  Description of Artificial Sequence: Synthetic oligonucleotide
gccaugaacucccucugac

SEQ ID NO: 711649 - RNA, 19 nt, Artificial Sequence
  Description of Artificial Sequence: Synthetic oligonucleotide
aggagacaguagccauuag

SEQ ID NO: 711650 - RNA, 19 nt, Artificial Sequence
  Description of Artificial Sequence: Synthetic oligonucleotide
ggauagagccagauuccag

SEQ ID NO: 711651 - RNA, 19 nt, Artificial Sequence
  Description of Artificial Sequence: Synthetic oligonucleotide
cccgagacaacuccuuccc

SEQ ID NO: 711652 - RNA, 19 nt, Artificial Sequence
  Description of Artificial Sequence: Synthetic oligonucleotide
ccaugaaccagcuucugaa

SEQ ID NO: 711653 - RNA, 19 nt, Artificial Sequence
  Description of Artificial Sequence: Synthetic oligonucleotide
acacacuaacucggccgac

SEQ ID NO: 711654 - RNA, 19 nt, Artificial Sequence
  Description of Artificial Sequence: Synthetic oligonucleotide
gggauagcguaguccgucc

SEQ ID NO: 711655 - RNA, 19 nt, Artificial Sequence
  Description of Artificial Sequence: Synthetic oligonucleotide
ccaaggagggaugguaccg

SEQ ID NO: 711656 - RNA, 19 nt, Artificial Sequence
  Description of Artificial Sequence: Synthetic oligonucleotide
uacaaccccugaccacagu

SEQ ID NO: 711657 - RNA, 19 nt, Artificial Sequence
  Description of Artificial Sequence: Synthetic oligonucleotide
aaugugccucgcccaugaa

SEQ ID NO: 711658 - RNA, 19 nt, Artificial Sequence
  Description of Artificial Sequence: Synthetic oligonucleotide
cccaugggaaacacgcccc

SEQ ID NO: 711659 - RNA, 19 nt, Artificial Sequence
  Description of Artificial Sequence: Synthetic oligonucleotide
guguuacagauuucaggua

SEQ ID NO: 711660 - RNA, 19 nt, Artificial Sequence
  Description of Artificial Sequence: Synthetic oligonucleotide
gcccuuguaaacauuucac

SEQ ID NO: 711661 - RNA, 19 nt, Artificial Sequence
  Description of Artificial Sequence: Synthetic oligonucleotide
gauacccgagacaacuccu

SEQ ID NO: 711662 - RNA, 19 nt, Artificial Sequence
  Description of Artificial Sequence: Synthetic oligonucleotide
caccguaggagagcugcag

SEQ ID NO: 711663 - RNA, 19 nt, Artificial Sequence
  Description of Artificial Sequence: Synthetic oligonucleotide
cauucccaucucuggucac

SEQ ID NO: 711664 - RNA, 19 nt, Artificial Sequence
  Description of Artificial Sequence: Synthetic oligonucleotide
aaaucucugcgggcacgga

SEQ ID NO: 711665 - RNA, 19 nt, Artificial Sequence
  Description of Artificial Sequence: Synthetic oligonucleotide
agcguaguccguccucaaa

SEQ ID NO: 711666 - RNA, 19 nt, Artificial Sequence
  Description of Artificial Sequence: Synthetic oligonucleotide
gcugcacccaguuagugcu

SEQ ID NO: 711667 - RNA, 19 nt, Artificial Sequence
  Description of Artificial Sequence: Synthetic oligonucleotide
gacaauucuuacacgugau

SEQ ID NO: 711668 - RNA, 19 nt, Artificial Sequence
  Description of Artificial Sequence: Synthetic oligonucleotide
ggcuguucccagauggagc

SEQ ID NO: 711669 - RNA, 19 nt, Artificial Sequence
  Description of Artificial Sequence: Synthetic oligonucleotide
guguauuaagacauagguu

SEQ ID NO: 711670 - RNA, 19 nt, Artificial Sequence
  Description of Artificial Sequence: Synthetic oligonucleotide
aucuacccuccaugacuug

SEQ ID NO: 711671 - RNA, 19 nt, Artificial Sequence
  Description of Artificial Sequence: Synthetic oligonucleotide
gguaccgucuacuaugguu

SEQ ID NO: 711672 - RNA, 19 nt, Artificial Sequence
  Description of Artificial Sequence: Synthetic oligonucleotide
cacggccuguuuguuacug

SEQ ID NO: 711673 - RNA, 19 nt, Artificial Sequence
  Description of Artificial Sequence: Synthetic oligonucleotide
ugguaccgucuacuauggu

SEQ ID NO: 711674 - RNA, 19 nt, Artificial Sequence
  Description of Artificial Sequence: Synthetic oligonucleotide
aggacaugguacggagucu

SEQ ID NO: 711675 - RNA, 19 nt, Artificial Sequence
  Description of Artificial Sequence: Synthetic oligonucleotide
cuacaggacaugguacgga

SEQ ID NO: 711676 - RNA, 19 nt, Artificial Sequence
  Description of Artificial Sequence: Synthetic oligonucleotide
gcacggaaggagcagagcu

SEQ ID NO: 711677 - RNA, 19 nt, Artificial Sequence
  Description of Artificial Sequence: Synthetic oligonucleotide
accccaaggccaacaaaga

SEQ ID NO: 711678 - RNA, 19 nt, Artificial Sequence
  Description of Artificial Sequence: Synthetic oligonucleotide
auuggguacuggacagaga

SEQ ID NO: 711679 - RNA, 19 nt, Artificial Sequence
  Description of Artificial Sequence: Synthetic oligonucleotide
ccauccacggugccucugg

SEQ ID NO: 711680 - RNA, 19 nt, Artificial Sequence
  Description of Artificial Sequence: Synthetic oligonucleotide
ggacagagauaaaaguucu

SEQ ID NO: 711681 - RNA, 19 nt, Artificial Sequence
  Description of Artificial Sequence: Synthetic oligonucleotide
ccaaugugaugaggaaugc

SEQ ID NO: 711682 - RNA, 19 nt, Artificial Sequence
  Description of Artificial Sequence: Synthetic oligonucleotide
agccaucuguuaaaaugaa

SEQ ID NO: 711683 - RNA, 19 nt, Artificial Sequence
  Description of Artificial Sequence: Synthetic oligonucleotide
accccugaccacaguuuuc

SEQ ID NO: 711684 - RNA, 19 nt, Artificial Sequence
  Description of Artificial Sequence: Synthetic oligonucleotide
ccuacaaccccugaccaca

SEQ ID NO: 711685 - RNA, 19 nt, Artificial Sequence
  Description of Artificial Sequence: Synthetic oligonucleotide
cggauaccaucccacgugg

SEQ ID NO: 711686 - RNA, 19 nt, Artificial Sequence
  Description of Artificial Sequence: Synthetic oligonucleotide
ggauaccaucccacguggg

SEQ ID NO: 711687 - RNA, 19 nt, Artificial Sequence
  Description of Artificial Sequence: Synthetic oligonucleotide
ccuugcucggcuugagcac

SEQ ID NO: 711688 - RNA, 19 nt, Artificial Sequence
  Description of Artificial Sequence: Synthetic oligonucleotide
ggagugcaggaaaccacug

SEQ ID NO: 711689 - RNA, 19 nt, Artificial Sequence
  Description of Artificial Sequence: Synthetic oligonucleotide
cuguaaugcaguccagaau

SEQ ID NO: 711690 - RNA, 19 nt, Artificial Sequence
  Description of Artificial Sequence: Synthetic oligonucleotide
ggggagugcaggaaaccac

SEQ ID NO: 711691 - RNA, 19 nt, Artificial Sequence
  Description of Artificial Sequence: Synthetic oligonucleotide
auacccgagacaacuccuu

SEQ ID NO: 711692 - RNA, 19 nt, Artificial Sequence
  Description of Artificial Sequence: Synthetic oligonucleotide
ggaauugugccuuccccau

SEQ ID NO: 711693 - RNA, 19 nt, Artificial Sequence
  Description of Artificial Sequence: Synthetic oligonucleotide
cugggguuugcugauccaa

SEQ ID NO: 711694 - RNA, 19 nt, Artificial Sequence
  Description of Artificial Sequence: Synthetic oligonucleotide
gguguugugcaaagacauc

SEQ ID NO: 711695 - RNA, 19 nt, Artificial Sequence
  Description of Artificial Sequence: Synthetic oligonucleotide
uggcuacaucccaggggau

SEQ ID NO: 711696 - RNA, 19 nt, Artificial Sequence
  Description of Artificial Sequence: Synthetic oligonucleotide
uggggugguugacgauaaa

SEQ ID NO: 711697 - RNA, 19 nt, Artificial Sequence
  Description of Artificial Sequence: Synthetic oligonucleotide
gcaggcuuuucuugaagua

SEQ ID NO: 711698 - RNA, 19 nt, Artificial Sequence
  Description of Artificial Sequence: Synthetic oligonucleotide
acauucccacugcccuaca

SEQ ID NO: 711699 - RNA, 19 nt, Artificial Sequence
  Description of Artificial Sequence: Synthetic oligonucleotide
ccacguggguacaauguca

SEQ ID NO: 711700 - RNA, 19 nt, Artificial Sequence
  Description of Artificial Sequence: Synthetic oligonucleotide
ccguccucaaaugcauucc

SEQ ID NO: 711701 - RNA, 19 nt, Artificial Sequence
  Description of Artificial Sequence: Synthetic oligonucleotide
uagugcucugugggucccc

SEQ ID NO: 711702 - RNA, 19 nt, Artificial Sequence
  Description of Artificial Sequence: Synthetic oligonucleotide
cucguagucacgggcagcu

SEQ ID NO: 711703 - RNA, 19 nt, Artificial Sequence
  Description of Artificial Sequence: Synthetic oligonucleotide
gcccuacaaccccugacca

SEQ ID NO: 711704 - RNA, 19 nt, Artificial Sequence
  Description of Artificial Sequence: Synthetic oligonucleotide
uugcucggcuugagcacuu

SEQ ID NO: 711705 - RNA, 19 nt, Artificial Sequence
  Description of Artificial Sequence: Synthetic oligonucleotide
accgucuacuaugguuccu

SEQ ID NO: 711706 - RNA, 19 nt, Artificial Sequence
  Description of Artificial Sequence: Synthetic oligonucleotide
caccaguugacgcuuguuu

SEQ ID NO: 711707 - RNA, 19 nt, Artificial Sequence
  Description of Artificial Sequence: Synthetic oligonucleotide
cgucuacuaugguuccucc

SEQ ID NO: 711708 - RNA, 19 nt, Artificial Sequence
  Description of Artificial Sequence: Synthetic oligonucleotide
ucguagccaucggccaaac

SEQ ID NO: 711709 - RNA, 19 nt, Artificial Sequence
  Description of Artificial Sequence: Synthetic oligonucleotide
acgcggcagcaaauagcac

SEQ ID NO: 711710 - RNA, 19 nt, Artificial Sequence
  Description of Artificial Sequence: Synthetic oligonucleotide
gggaugguaccgucuacua

SEQ ID NO: 711711 - RNA, 19 nt, Artificial Sequence
  Description of Artificial Sequence: Synthetic oligonucleotide
acaccaguugacgcuuguu

SEQ ID NO: 711712 - RNA, 19 nt, Artificial Sequence
  Description of Artificial Sequence: Synthetic oligonucleotide
cccuacaaccccugaccac

SEQ ID NO: 711713 - RNA, 19 nt, Artificial Sequence
  Description of Artificial Sequence: Synthetic oligonucleotide
gucguagccaucggccaaa

SEQ ID NO: 711714 - RNA, 19 nt, Artificial Sequence
  Description of Artificial Sequence: Synthetic oligonucleotide
cuugcucggcuugagcacu

SEQ ID NO: 711715 - RNA, 19 nt, Artificial Sequence
  Description of Artificial Sequence: Synthetic oligonucleotide
ggucguagccaucggccaa

SEQ ID NO: 711716 - RNA, 19 nt, Artificial Sequence
  Description of Artificial Sequence: Synthetic oligonucleotide
aggccaacaaagaccccuu

SEQ ID NO: 711717 - RNA, 19 nt, Artificial Sequence
  Description of Artificial Sequence: Synthetic oligonucleotide
gcguaguccguccucaaau

SEQ ID NO: 711718 - RNA, 19 nt, Artificial Sequence
  Description of Artificial Sequence: Synthetic oligonucleotide
ccgucuacuaugguuccuc

SEQ ID NO: 711719 - RNA, 19 nt, Artificial Sequence
  Description of Artificial Sequence: Synthetic oligonucleotide
gggcacggaaggagcagag

SEQ ID NO: 711720 - RNA, 19 nt, Artificial Sequence
  Description of Artificial Sequence: Synthetic oligonucleotide
cugggacaaagaugaucua

SEQ ID NO: 711721 - RNA, 19 nt, Artificial Sequence
  Description of Artificial Sequence: Synthetic oligonucleotide
gggagugcaggaaaccacu

SEQ ID NO: 711722 - RNA, 19 nt, Artificial Sequence
  Description of Artificial Sequence: Synthetic oligonucleotide
gcuacaucccaggggaugu

SEQ ID NO: 711723 - RNA, 19 nt, Artificial Sequence
  Description of Artificial Sequence: Synthetic oligonucleotide
cuacuaugguuccuccauu

SEQ ID NO: 711724 - RNA, 19 nt, Artificial Sequence
  Description of Artificial Sequence: Synthetic oligonucleotide
ggaccuugcucggcuugag

SEQ ID NO: 711725 - RNA, 19 nt, Artificial Sequence
  Description of Artificial Sequence: Synthetic oligonucleotide
cacggaaggagcagagcuu

SEQ ID NO: 711726 - RNA, 19 nt, Artificial Sequence
  Description of Artificial Sequence: Synthetic oligonucleotide
accaucccacguggguaca

SEQ ID NO: 711727 - RNA, 19 nt, Artificial Sequence
  Description of Artificial Sequence: Synthetic oligonucleotide
caaggagggaugguaccgu

SEQ ID NO: 711728 - RNA, 19 nt, Artificial Sequence
  Description of Artificial Sequence: Synthetic oligonucleotide
cugucccaaccacauucua

SEQ ID NO: 711729 - RNA, 19 nt, Artificial Sequence
  Description of Artificial Sequence: Synthetic oligonucleotide
gcugaaaggguaaccuagu

SEQ ID NO: 711730 - RNA, 19 nt, Artificial Sequence
  Description of Artificial Sequence: Synthetic oligonucleotide
ggauugccuuuuggaauca

SEQ ID NO: 711731 - RNA, 19 nt, Artificial Sequence
  Description of Artificial Sequence: Synthetic oligonucleotide
cagggcuugccugucccaa

SEQ ID NO: 711732 - RNA, 19 nt, Artificial Sequence
  Description of Artificial Sequence: Synthetic oligonucleotide
gcacuuccccaguuccaca

SEQ ID NO: 711733 - RNA, 19 nt, Artificial Sequence
  Description of Artificial Sequence: Synthetic oligonucleotide
ggauagcguaguccguccu

SEQ ID NO: 711734 - RNA, 19 nt, Artificial Sequence
  Description of Artificial Sequence: Synthetic oligonucleotide
gggaaacacgccccacugu

SEQ ID NO: 711735 - RNA, 19 nt, Artificial Sequence
  Description of Artificial Sequence: Synthetic oligonucleotide
ccguaggagagcugcagua

SEQ ID NO: 711736 - RNA, 19 nt, Artificial Sequence
  Description of Artificial Sequence: Synthetic oligonucleotide
ccggauugccuuuuggaau

SEQ ID NO: 711737 - RNA, 19 nt, Artificial Sequence
  Description of Artificial Sequence: Synthetic oligonucleotide
cacgccccacugucaguca

SEQ ID NO: 711738 - RNA, 19 nt, Artificial Sequence
  Description of Artificial Sequence: Synthetic oligonucleotide
ucguagucacgggcagcuu

SEQ ID NO: 711739 - RNA, 19 nt, Artificial Sequence
  Description of Artificial Sequence: Synthetic oligonucleotide
ccaugggaaacacgcccca

SEQ ID NO: 711740 - RNA, 19 nt, Artificial Sequence
  Description of Artificial Sequence: Synthetic oligonucleotide
gggguuugcugauccaauu

SEQ ID NO: 711741 - RNA, 19 nt, Artificial Sequence
  Description of Artificial Sequence: Synthetic oligonucleotide
ggucacgcggcagcaaaua

SEQ ID NO: 711742 - RNA, 19 nt, Artificial Sequence
  Description of Artificial Sequence: Synthetic oligonucleotide
cacguggauagagccagau

SEQ ID NO: 711743 - RNA, 19 nt, Artificial Sequence
  Description of Artificial Sequence: Synthetic oligonucleotide
ccaaggcuaugccugggcu

SEQ ID NO: 711744 - RNA, 19 nt, Artificial Sequence
  Description of Artificial Sequence: Synthetic oligonucleotide
ccugucccaaccacauucu

SEQ ID NO: 711745 - RNA, 19 nt, Artificial Sequence
  Description of Artificial Sequence: Synthetic oligonucleotide
acggugccucuggugccca

SEQ ID NO: 711746 - RNA, 19 nt, Artificial Sequence
  Description of Artificial Sequence: Synthetic oligonucleotide
gugagucagcagugccccu

SEQ ID NO: 711747 - RNA, 19 nt, Artificial Sequence
  Description of Artificial Sequence: Synthetic oligonucleotide
cauccacggugccucuggu

SEQ ID NO: 711748 - RNA, 19 nt, Artificial Sequence
  Description of Artificial Sequence: Synthetic oligonucleotide
gguugacgauaaagggaua

SEQ ID NO: 711749 - RNA, 19 nt, Artificial Sequence
  Description of Artificial Sequence: Synthetic oligonucleotide
ccucaccguaggagagcug

SEQ ID NO: 711750 - RNA, 19 nt, Artificial Sequence
  Description of Artificial Sequence: Synthetic oligonucleotide
ccccuucaacuugaguaca

SEQ ID NO: 711751 - RNA, 19 nt, Artificial Sequence
  Description of Artificial Sequence: Synthetic oligonucleotide
caucccacguggguacaau

SEQ ID NO: 711752 - RNA, 19 nt, Artificial Sequence
  Description of Artificial Sequence: Synthetic oligonucleotide
cgaccuuggggugguugac

SEQ ID NO: 711753 - RNA, 19 nt, Artificial Sequence
  Description of Artificial Sequence: Synthetic oligonucleotide
cccaugcuacacguggaua

SEQ ID NO: 711754 - RNA, 19 nt, Artificial Sequence
  Description of Artificial Sequence: Synthetic oligonucleotide
aggcuaugccugggcucuu

SEQ ID NO: 711755 - RNA, 19 nt, Artificial Sequence
  Description of Artificial Sequence: Synthetic oligonucleotide
cuacaucccaggggauguu

SEQ ID NO: 711756 - RNA, 19 nt, Artificial Sequence
  Description of Artificial Sequence: Synthetic oligonucleotide
cgcccaugaaccagcuucu

SEQ ID NO: 711757 - RNA, 19 nt, Artificial Sequence
  Description of Artificial Sequence: Synthetic oligonucleotide
ccgagacaacuccuucccu

SEQ ID NO: 711758 - RNA, 19 nt, Artificial Sequence
  Description of Artificial Sequence: Synthetic oligonucleotide
ccccaugcuacacguggau

SEQ ID NO: 711759 - RNA, 19 nt, Artificial Sequence
  Description of Artificial Sequence: Synthetic oligonucleotide
gcacggccuguuuguuacu

SEQ ID NO: 711760 - RNA, 19 nt, Artificial Sequence
  Description of Artificial Sequence: Synthetic oligonucleotide
gaacucccucugaccccau

SEQ ID NO: 711761 - RNA, 19 nt, Artificial Sequence
  Description of Artificial Sequence: Synthetic oligonucleotide
ccaucccacguggguacaa

SEQ ID NO: 711762 - RNA, 19 nt, Artificial Sequence
  Description of Artificial Sequence: Synthetic oligonucleotide
cagcuggucugugccccau

SEQ ID NO: 711763 - RNA, 19 nt, Artificial Sequence
  Description of Artificial Sequence: Synthetic oligonucleotide
ccaugucccgcaggcuuuu

SEQ ID NO: 711764 - RNA, 19 nt, Artificial Sequence
  Description of Artificial Sequence: Synthetic oligonucleotide
cggugccucuggugcccau

SEQ ID NO: 711765 - RNA, 19 nt, Artificial Sequence
  Description of Artificial Sequence: Synthetic oligonucleotide
acagauaccagcuacauug

SEQ ID NO: 711766 - RNA, 19 nt, Artificial Sequence
  Description of Artificial Sequence: Synthetic oligonucleotide
uguaaagaugaacucaucc

SEQ ID NO: 711767 - RNA, 19 nt, Artificial Sequence
  Description of Artificial Sequence: Synthetic oligonucleotide
uaagaguugagcauggacc

SEQ ID NO: 711768 - RNA, 19 nt, Artificial Sequence
  Description of Artificial Sequence: Synthetic oligonucleotide
gaucacgucacacugaugc

SEQ ID NO: 711769 - RNA, 19 nt, Artificial Sequence
  Description of Artificial Sequence: Synthetic oligonucleotide
acauugaagcauuagagag

SEQ ID NO: 711770 - RNA, 19 nt, Artificial Sequence
  Description of Artificial Sequence: Synthetic oligonucleotide
auuuacacgcuuuaagaac

SEQ ID NO: 711771 - RNA, 19 nt, Artificial Sequence
  Description of Artificial Sequence: Synthetic oligonucleotide
aaggaugccggagagaggc

SEQ ID NO: 711772 - RNA, 19 nt, Artificial Sequence
  Description of Artificial Sequence: Synthetic oligonucleotide
uuuacacgcuuuaagaaca

SEQ ID NO: 711773 - RNA, 19 nt, Artificial Sequence
  Description of Artificial Sequence: Synthetic oligonucleotide
aguaucaccaguauacacc

SEQ ID NO: 711774 - RNA, 19 nt, Artificial Sequence
  Description of Artificial Sequence: Synthetic oligonucleotide
acagcuuggucccagacac

SEQ ID NO: 711775 - RNA, 19 nt, Artificial Sequence
  Description of Artificial Sequence: Synthetic oligonucleotide
guucuugagacacucaggg

SEQ ID NO: 711776 - RNA, 19 nt, Artificial Sequence
  Description of Artificial Sequence: Synthetic oligonucleotide
ucuuauccuauaaauaaac

SEQ ID NO: 711777 - RNA, 19 nt, Artificial Sequence
  Description of Artificial Sequence: Synthetic oligonucleotide
aauucccggaaaccggucc

SEQ ID NO: 711778 - RNA, 19 nt, Artificial Sequence
  Description of Artificial Sequence: Synthetic oligonucleotide
acuauuuacacgcuuuaag

SEQ ID NO: 711779 - RNA, 19 nt, Artificial Sequence
  Description of Artificial Sequence: Synthetic oligonucleotide
cauaaaagaguuuggcagg

SEQ ID NO: 711780 - RNA, 19 nt, Artificial Sequence
  Description of Artificial Sequence: Synthetic oligonucleotide
uauugagugaguaggggcc

SEQ ID NO: 711781 - RNA, 19 nt, Artificial Sequence
  Description of Artificial Sequence: Synthetic oligonucleotide
augaacucaucccacuugc

SEQ ID NO: 711782 - RNA, 19 nt, Artificial Sequence
  Description of Artificial Sequence: Synthetic oligonucleotide
guaaagaugaacucauccc

SEQ ID NO: 711783 - RNA, 19 nt, Artificial Sequence
  Description of Artificial Sequence: Synthetic oligonucleotide
ugguccaacacaaaugccc

SEQ ID NO: 711784 - RNA, 19 nt, Artificial Sequence
  Description of Artificial Sequence: Synthetic oligonucleotide
accaguaucaccaguauac

SEQ ID NO: 711785 - RNA, 19 nt, Artificial Sequence
  Description of Artificial Sequence: Synthetic oligonucleotide
aagauauauuccauaaaag

SEQ ID NO: 711786 - RNA, 19 nt, Artificial Sequence
  Description of Artificial Sequence: Synthetic oligonucleotide
guacguaagacacacauca

SEQ ID NO: 711787 - RNA, 19 nt, Artificial Sequence
  Description of Artificial Sequence: Synthetic oligonucleotide
aagaguugagcauggaccu

SEQ ID NO: 711788 - RNA, 19 nt, Artificial Sequence
  Description of Artificial Sequence: Synthetic oligonucleotide
ugcacuaccaugaacccug

SEQ ID NO: 711789 - RNA, 19 nt, Artificial Sequence
  Description of Artificial Sequence: Synthetic oligonucleotide
cuuaaugcuauggagacac

SEQ ID NO: 711790 - RNA, 19 nt, Artificial Sequence
  Description of Artificial Sequence: Synthetic oligonucleotide
ugaggauccugcaagccgg

SEQ ID NO: 711791 - RNA, 19 nt, Artificial Sequence
  Description of Artificial Sequence: Synthetic oligonucleotide
aagacagugaagccaagca

SEQ ID NO: 711792 - RNA, 19 nt, Artificial Sequence
  Description of Artificial Sequence: Synthetic oligonucleotide
ucaaguaugggcagaugag

SEQ ID NO: 711793 - RNA, 19 nt, Artificial Sequence
  Description of Artificial Sequence: Synthetic oligonucleotide
acuaccaugaacccuguug

SEQ ID NO: 711794 - RNA, 19 nt, Artificial Sequence
  Description of Artificial Sequence: Synthetic oligonucleotide
aaagguaagaguugagcau

SEQ ID NO: 711795 - RNA, 19 nt, Artificial Sequence
  Description of Artificial Sequence: Synthetic oligonucleotide
uuaacauaagacgugcuga

SEQ ID NO: 711796 - RNA, 19 nt, Artificial Sequence
  Description of Artificial Sequence: Synthetic oligonucleotide
cuaccaugaacccuguugg

SEQ ID NO: 711797 - RNA, 19 nt, Artificial Sequence
  Description of Artificial Sequence: Synthetic oligonucleotide
uuuacugccucgaugucug

SEQ ID NO: 711798 - RNA, 19 nt, Artificial Sequence
  Description of Artificial Sequence: Synthetic oligonucleotide
gaugccaugucaaguaugg

SEQ ID NO: 711799 - RNA, 19 nt, Artificial Sequence
  Description of Artificial Sequence: Synthetic oligonucleotide
cauugaagcauuagagagg

SEQ ID NO: 711800 - RNA, 19 nt, Artificial Sequence
  Description of Artificial Sequence: Synthetic oligonucleotide
augaccugccuuuacugcc

SEQ ID NO: 711801 - RNA, 19 nt, Artificial Sequence
  Description of Artificial Sequence: Synthetic oligonucleotide
aaugcuauggagacacagg

SEQ ID NO: 711802 - RNA, 19 nt, Artificial Sequence
  Description of Artificial Sequence: Synthetic oligonucleotide
uccauaaaagaguuuggca

SEQ ID NO: 711803 - RNA, 19 nt, Artificial Sequence
  Description of Artificial Sequence: Synthetic oligonucleotide
ucgggaguuaacauaagac

SEQ ID NO: 711804 - RNA, 19 nt, Artificial Sequence
  Description of Artificial Sequence: Synthetic oligonucleotide
uagaauguacaccucggca

SEQ ID NO: 711805 - RNA, 19 nt, Artificial Sequence
  Description of Artificial Sequence: Synthetic oligonucleotide
uaacauaagacgugcugag

SEQ ID NO: 711806 - RNA, 19 nt, Artificial Sequence
  Description of Artificial Sequence: Synthetic oligonucleotide
guuaacauaagacgugcug

SEQ ID NO: 711807 - RNA, 19 nt, Artificial Sequence
  Description of Artificial Sequence: Synthetic oligonucleotide
uaagacacacaucauuuuc

SEQ ID NO: 711808 - RNA, 19 nt, Artificial Sequence
  Description of Artificial Sequence: Synthetic oligonucleotide
acauaagacgugcugagcu

SEQ ID NO: 711809 - RNA, 19 nt, Artificial Sequence
  Description of Artificial Sequence: Synthetic oligonucleotide
aacauaagacgugcugagc

SEQ ID NO: 711810 - RNA, 19 nt, Artificial Sequence
  Description of Artificial Sequence: Synthetic oligonucleotide
aagguaagaguugagcaug

SEQ ID NO: 711811 - RNA, 19 nt, Artificial Sequence
  Description of Artificial Sequence: Synthetic oligonucleotide
uuaagauauauuccauaaa

SEQ ID NO: 711812 - RNA, 19 nt, Artificial Sequence
  Description of Artificial Sequence: Synthetic oligonucleotide
aggacagccacccagugug

SEQ ID NO: 711813 - RNA, 19 nt, Artificial Sequence
  Description of Artificial Sequence: Synthetic oligonucleotide
accuaagccuuauugagug

SEQ ID NO: 711814 - RNA, 19 nt, Artificial Sequence
  Description of Artificial Sequence: Synthetic oligonucleotide
gagagaucacgucacacug

SEQ ID NO: 711815 - RNA, 19 nt, Artificial Sequence
  Description of Artificial Sequence: Synthetic oligonucleotide
gaugccgaagaucugcagc

SEQ ID NO: 711816 - RNA, 19 nt, Artificial Sequence
  Description of Artificial Sequence: Synthetic oligonucleotide
cucggcaaguaacugaagg

SEQ ID NO: 711817 - RNA, 19 nt, Artificial Sequence
  Description of Artificial Sequence: Synthetic oligonucleotide
guuucaguagcaccgagac

SEQ ID NO: 711818 - RNA, 19 nt, Artificial Sequence
  Description of Artificial Sequence: Synthetic oligonucleotide
cauguuugcacuaccauga

SEQ ID NO: 711819 - RNA, 19 nt, Artificial Sequence
  Description of Artificial Sequence: Synthetic oligonucleotide
ucuguggcucacaagggcc

SEQ ID NO: 711820 - RNA, 19 nt, Artificial Sequence
  Description of Artificial Sequence: Synthetic oligonucleotide
ucacuacuccacaugaaga

SEQ ID NO: 711821 - RNA, 19 nt, Artificial Sequence
  Description of Artificial Sequence: Synthetic oligonucleotide
aagaauucccggaaaccgg

SEQ ID NO: 711822 - RNA, 19 nt, Artificial Sequence
  Description of Artificial Sequence: Synthetic oligonucleotide
cacuagaauguacaccucg

SEQ ID NO: 711823 - RNA, 19 nt, Artificial Sequence
  Description of Artificial Sequence: Synthetic oligonucleotide
auggaccuaagccuuauug

SEQ ID NO: 711824 - RNA, 19 nt, Artificial Sequence
  Description of Artificial Sequence: Synthetic oligonucleotide
agaauguacaccucggcaa

SEQ ID NO: 711825 - RNA, 19 nt, Artificial Sequence
  Description of Artificial Sequence: Synthetic oligonucleotide
gucacuacuccacaugaag

SEQ ID NO: 711826 - RNA, 19 nt, Artificial Sequence
  Description of Artificial Sequence: Synthetic oligonucleotide
aagccgguggcauguuugc

SEQ ID NO: 711827 - RNA, 19 nt, Artificial Sequence
  Description of Artificial Sequence: Synthetic oligonucleotide
agggcuuaaugcuauggag

SEQ ID NO: 711828 - RNA, 19 nt, Artificial Sequence
  Description of Artificial Sequence: Synthetic oligonucleotide
cacuacuccacaugaagag

SEQ ID NO: 711829 - RNA, 19 nt, Artificial Sequence
  Description of Artificial Sequence: Synthetic oligonucleotide
accaguauacaccacacua

SEQ ID NO: 711830 - RNA, 19 nt, Artificial Sequence
  Description of Artificial Sequence: Synthetic oligonucleotide
agaagcaucacacuuccua

SEQ ID NO: 711831 - RNA, 19 nt, Artificial Sequence
  Description of Artificial Sequence: Synthetic oligonucleotide
agggccauaagccccacag

SEQ ID NO: 711832 - RNA, 19 nt, Artificial Sequence
  Description of Artificial Sequence: Synthetic oligonucleotide
ugcugguccaacacaaaug

SEQ ID NO: 711833 - RNA, 19 nt, Artificial Sequence
  Description of Artificial Sequence: Synthetic oligonucleotide
cacccuuuuguaaagauga

SEQ ID NO: 711834 - RNA, 19 nt, Artificial Sequence
  Description of Artificial Sequence: Synthetic oligonucleotide
uggaccuaagccuuauuga

SEQ ID NO: 711835 - RNA, 19 nt, Artificial Sequence
  Description of Artificial Sequence: Synthetic oligonucleotide
uuugcacuaccaugaaccc

SEQ ID NO: 711836 - RNA, 19 nt, Artificial Sequence
  Description of Artificial Sequence: Synthetic oligonucleotide
ugucaucccgauaggaucu

SEQ ID NO: 711837 - RNA, 19 nt, Artificial Sequence
  Description of Artificial Sequence: Synthetic oligonucleotide
cacgcuuuaagaacaggag

SEQ ID NO: 711838 - RNA, 19 nt, Artificial Sequence
  Description of Artificial Sequence: Synthetic oligonucleotide
agagagaucacgucacacu

SEQ ID NO: 711839 - RNA, 19 nt, Artificial Sequence
  Description of Artificial Sequence: Synthetic oligonucleotide
gaguuaacauaagacgugc

SEQ ID NO: 711840 - RNA, 19 nt, Artificial Sequence
  Description of Artificial Sequence: Synthetic oligonucleotide
ucgaagaauucccggaaac

SEQ ID NO: 711841 - RNA, 19 nt, Artificial Sequence
  Description of Artificial Sequence: Synthetic oligonucleotide
ugaugaccugccuuuacug

SEQ ID NO: 711842 - RNA, 19 nt, Artificial Sequence
  Description of Artificial Sequence: Synthetic oligonucleotide
gacuuacacuuccucaugc

SEQ ID NO: 711843 - RNA, 19 nt, Artificial Sequence
  Description of Artificial Sequence: Synthetic oligonucleotide
acugaugccgaagacuggg

SEQ ID NO: 711844 - RNA, 19 nt, Artificial Sequence
  Description of Artificial Sequence: Synthetic oligonucleotide
gaggacagauaccagcuac

SEQ ID NO: 711845 - RNA, 19 nt, Artificial Sequence
  Description of Artificial Sequence: Synthetic oligonucleotide
uccaguacguaagacacac

SEQ ID NO: 711846 - RNA, 19 nt, Artificial Sequence
  Description of Artificial Sequence: Synthetic oligonucleotide
aggaguauccaguacguaa

SEQ ID NO: 711847 - RNA, 19 nt, Artificial Sequence
  Description of Artificial Sequence: Synthetic oligonucleotide
aucacgucacacugaugcc

SEQ ID NO: 711848 - RNA, 19 nt, Artificial Sequence
  Description of Artificial Sequence: Synthetic oligonucleotide
caauguagauguuccuggg

SEQ ID NO: 711849 - RNA, 19 nt, Artificial Sequence
  Description of Artificial Sequence: Synthetic oligonucleotide
gucaaguaugggcagauga

SEQ ID NO: 711850 - RNA, 19 nt, Artificial Sequence
  Description of Artificial Sequence: Synthetic oligonucleotide
gaugcacccuuuuguaaag

SEQ ID NO: 711851 - RNA, 19 nt, Artificial Sequence
  Description of Artificial Sequence: Synthetic oligonucleotide
agcaagagaaggguacccc

SEQ ID NO: 711852 - RNA, 19 nt, Artificial Sequence
  Description of Artificial Sequence: Synthetic oligonucleotide
aaaugcccugcccacaaaa

SEQ ID NO: 711853 - RNA, 19 nt, Artificial Sequence
  Description of Artificial Sequence: Synthetic oligonucleotide
guauccaguacguaagaca

SEQ ID NO: 711854 - RNA, 19 nt, Artificial Sequence
  Description of Artificial Sequence: Synthetic oligonucleotide
aguaggggccugcaaauug

SEQ ID NO: 711855 - RNA, 19 nt, Artificial Sequence
  Description of Artificial Sequence: Synthetic oligonucleotide
cugaggauccugcaagccg

SEQ ID NO: 711856 - RNA, 19 nt, Artificial Sequence
  Description of Artificial Sequence: Synthetic oligonucleotide
acuuggacauggcugagga

SEQ ID NO: 711857 - RNA, 19 nt, Artificial Sequence
  Description of Artificial Sequence: Synthetic oligonucleotide
acgcuuuaagaacaggaga

SEQ ID NO: 711858 - RNA, 19 nt, Artificial Sequence
  Description of Artificial Sequence: Synthetic oligonucleotide
cuagaauguacaccucggc

SEQ ID NO: 711859 - RNA, 19 nt, Artificial Sequence
  Description of Artificial Sequence: Synthetic oligonucleotide
agagucacuacuccacaug

SEQ ID NO: 711860 - RNA, 19 nt, Artificial Sequence
  Description of Artificial Sequence: Synthetic oligonucleotide
acuagaauguacaccucgg

SEQ ID NO: 711861 - RNA, 19 nt, Artificial Sequence
  Description of Artificial Sequence: Synthetic oligonucleotide
ucggcaaguaacugaaggu

SEQ ID NO: 711862 - RNA, 19 nt, Artificial Sequence
  Description of Artificial Sequence: Synthetic oligonucleotide
ucaccaguauacaccacac

SEQ ID NO: 711863 - RNA, 19 nt, Artificial Sequence
  Description of Artificial Sequence: Synthetic oligonucleotide
uacacauugaggucccagu

SEQ ID NO: 711864 - RNA, 19 nt, Artificial Sequence
  Description of Artificial Sequence: Synthetic oligonucleotide
ggaccuaagccuuauugag

SEQ ID NO: 711865 - RNA, 19 nt, Artificial Sequence
  Description of Artificial Sequence: Synthetic oligonucleotide
cucgggaacccacuggacg

SEQ ID NO: 711866 - RNA, 19 nt, Artificial Sequence
  Description of Artificial Sequence: Synthetic oligonucleotide
uuacacgcuuuaagaacag

SEQ ID NO: 711867 - RNA, 19 nt, Artificial Sequence
  Description of Artificial Sequence: Synthetic oligonucleotide
acaagcauucuuccuccuc

SEQ ID NO: 711868 - RNA, 19 nt, Artificial Sequence
  Description of Artificial Sequence: Synthetic oligonucleotide
auaaacuauuuacacgcuu

SEQ ID NO: 711869 - RNA, 19 nt, Artificial Sequence
  Description of Artificial Sequence: Synthetic oligonucleotide
uucuggagugagucgauga

SEQ ID NO: 711870 - RNA, 19 nt, Artificial Sequence
  Description of Artificial Sequence: Synthetic oligonucleotide
cacacuagaauguacaccu

SEQ ID NO: 711871 - RNA, 19 nt, Artificial Sequence
  Description of Artificial Sequence: Synthetic oligonucleotide
auaagacgugcugagcuuc

SEQ ID NO: 711872 - RNA, 19 nt, Artificial Sequence
  Description of Artificial Sequence: Synthetic oligonucleotide
caucaucaugaacacacac

SEQ ID NO: 711873 - RNA, 19 nt, Artificial Sequence
  Description of Artificial Sequence: Synthetic oligonucleotide
cacucagggaacugaagag

SEQ ID NO: 711874 - RNA, 19 nt, Artificial Sequence
  Description of Artificial Sequence: Synthetic oligonucleotide
aaccccuucagagaugcca

SEQ ID NO: 711875 - RNA, 19 nt, Artificial Sequence
  Description of Artificial Sequence: Synthetic oligonucleotide
gacgacuuacacuuccuca

SEQ ID NO: 711876 - RNA, 19 nt, Artificial Sequence
  Description of Artificial Sequence: Synthetic oligonucleotide
uuuucaagagcagccccag

SEQ ID NO: 711877 - RNA, 19 nt, Artificial Sequence
  Description of Artificial Sequence: Synthetic oligonucleotide
agaucugcagcagugagau

SEQ ID NO: 711878 - RNA, 19 nt, Artificial Sequence
  Description of Artificial Sequence: Synthetic oligonucleotide
gccuuauugagugaguagg

SEQ ID NO: 711879 - RNA, 19 nt, Artificial Sequence
  Description of Artificial Sequence: Synthetic oligonucleotide
uguuugcacuaccaugaac

SEQ ID NO: 711880 - RNA, 19 nt, Artificial Sequence
  Description of Artificial Sequence: Synthetic oligonucleotide
acacugaugccgaagacug

SEQ ID NO: 711881 - RNA, 19 nt, Artificial Sequence
  Description of Artificial Sequence: Synthetic oligonucleotide
uuauggcuggcucaggcuu

SEQ ID NO: 711882 - RNA, 19 nt, Artificial Sequence
  Description of Artificial Sequence: Synthetic oligonucleotide
auccgguggaugcagaagu

SEQ ID NO: 711883 - RNA, 19 nt, Artificial Sequence
  Description of Artificial Sequence: Synthetic oligonucleotide
aaguaacugaagguaggca

SEQ ID NO: 711884 - RNA, 19 nt, Artificial Sequence
  Description of Artificial Sequence: Synthetic oligonucleotide
caaguaacugaagguaggc

SEQ ID NO: 711885 - RNA, 19 nt, Artificial Sequence
  Description of Artificial Sequence: Synthetic oligonucleotide
agccuuauugagugaguag

SEQ ID NO: 711886 - RNA, 19 nt, Artificial Sequence
  Description of Artificial Sequence: Synthetic oligonucleotide
agggagaaagggucaauca

SEQ ID NO: 711887 - RNA, 19 nt, Artificial Sequence
  Description of Artificial Sequence: Synthetic oligonucleotide
gagggaauguggacgacag

SEQ ID NO: 711888 - RNA, 19 nt, Artificial Sequence
  Description of Artificial Sequence: Synthetic oligonucleotide
acgacuuacacuuccucau

SEQ ID NO: 711889 - RNA, 19 nt, Artificial Sequence
  Description of Artificial Sequence: Synthetic oligonucleotide
uuucaguagcaccgagacc

SEQ ID NO: 711890 - RNA, 19 nt, Artificial Sequence
  Description of Artificial Sequence: Synthetic oligonucleotide
caucaagcccuccuuguag

SEQ ID NO: 711891 - RNA, 19 nt, Artificial Sequence
  Description of Artificial Sequence: Synthetic oligonucleotide
auguggacgacagggagag

SEQ ID NO: 711892 - RNA, 19 nt, Artificial Sequence
  Description of Artificial Sequence: Synthetic oligonucleotide
ucgggaacccacuggacga

SEQ ID NO: 711893 - RNA, 19 nt, Artificial Sequence
  Description of Artificial Sequence: Synthetic oligonucleotide
uuggucacgagaggaaccc

SEQ ID NO: 711894 - RNA, 19 nt, Artificial Sequence
  Description of Artificial Sequence: Synthetic oligonucleotide
agagacauucucugucucu

SEQ ID NO: 711895 - RNA, 19 nt, Artificial Sequence
  Description of Artificial Sequence: Synthetic oligonucleotide
uccucuagucaucaucauc

SEQ ID NO: 711896 - RNA, 19 nt, Artificial Sequence
  Description of Artificial Sequence: Synthetic oligonucleotide
uuuugcgcaggaucuggca

SEQ ID NO: 711897 - RNA, 19 nt, Artificial Sequence
  Description of Artificial Sequence: Synthetic oligonucleotide
uaagacgugcugagcuucc

SEQ ID NO: 711898 - RNA, 19 nt, Artificial Sequence
  Description of Artificial Sequence: Synthetic oligonucleotide
caccgagaccagaagacag

SEQ ID NO: 711899 - RNA, 19 nt, Artificial Sequence
  Description of Artificial Sequence: Synthetic oligonucleotide
ugaugccgaagacuggggu

SEQ ID NO: 711900 - RNA, 19 nt, Artificial Sequence
  Description of Artificial Sequence: Synthetic oligonucleotide
aauguggacgacagggaga

SEQ ID NO: 711901 - RNA, 19 nt, Artificial Sequence
  Description of Artificial Sequence: Synthetic oligonucleotide
agcuuucuggagugagucg

SEQ ID NO: 711902 - RNA, 19 nt, Artificial Sequence
  Description of Artificial Sequence: Synthetic oligonucleotide
cuggacgacuuacacuucc

SEQ ID NO: 711903 - RNA, 19 nt, Artificial Sequence
  Description of Artificial Sequence: Synthetic oligonucleotide
acguaagacacacaucauu

SEQ ID NO: 711904 - RNA, 19 nt, Artificial Sequence
  Description of Artificial Sequence: Synthetic oligonucleotide
aaguaugggcagaugagaa

SEQ ID NO: 711905 - RNA, 19 nt, Artificial Sequence
  Description of Artificial Sequence: Synthetic oligonucleotide
guccucgccaggaagaugc

SEQ ID NO: 711906 - RNA, 19 nt, Artificial Sequence
  Description of Artificial Sequence: Synthetic oligonucleotide
gcuuccauacagcaccugg

SEQ ID NO: 711907 - RNA, 19 nt, Artificial Sequence
  Description of Artificial Sequence: Synthetic oligonucleotide
agaguuuggcaggucaaag

SEQ ID NO: 711908 - RNA, 19 nt, Artificial Sequence
  Description of Artificial Sequence: Synthetic oligonucleotide
cgggaguuaacauaagacg

SEQ ID NO: 711909 - RNA, 19 nt, Artificial Sequence
  Description of Artificial Sequence: Synthetic oligonucleotide
gggucaaucagaauucaag

SEQ ID NO: 711910 - RNA, 19 nt, Artificial Sequence
  Description of Artificial Sequence: Synthetic oligonucleotide
uggcauguuugcacuacca

SEQ ID NO: 711911 - RNA, 19 nt, Artificial Sequence
  Description of Artificial Sequence: Synthetic oligonucleotide
gaugccgaagacugggguc

SEQ ID NO: 711912 - RNA, 19 nt, Artificial Sequence
  Description of Artificial Sequence: Synthetic oligonucleotide
agcauuagagaggagccca

SEQ ID NO: 711913 - RNA, 19 nt, Artificial Sequence
  Description of Artificial Sequence: Synthetic oligonucleotide
aagacaccagccacaaugu

SEQ ID NO: 711914 - RNA, 19 nt, Artificial Sequence
  Description of Artificial Sequence: Synthetic oligonucleotide
agaacauucuuauccuaua

SEQ ID NO: 711915 - RNA, 19 nt, Artificial Sequence
  Description of Artificial Sequence: Synthetic oligonucleotide
ggcuuaaugcuauggagac

SEQ ID NO: 711916 - RNA, 19 nt, Artificial Sequence
  Description of Artificial Sequence: Synthetic oligonucleotide
ggacagcacacuuugggcc

SEQ ID NO: 711917 - RNA, 19 nt, Artificial Sequence
  Description of Artificial Sequence: Synthetic oligonucleotide
agcaucacacuuccuaaaa

SEQ ID NO: 711918 - RNA, 19 nt, Artificial Sequence
  Description of Artificial Sequence: Synthetic oligonucleotide
ugaguaggggccugcaaau

SEQ ID NO: 711919 - RNA, 19 nt, Artificial Sequence
  Description of Artificial Sequence: Synthetic oligonucleotide
acacgcuuuaagaacagga

SEQ ID NO: 711920 - RNA, 19 nt, Artificial Sequence
  Description of Artificial Sequence: Synthetic oligonucleotide
aucccgauaggaucugaug

SEQ ID NO: 711921 - RNA, 19 nt, Artificial Sequence
  Description of Artificial Sequence: Synthetic oligonucleotide
ugcagaguaucacccucca

SEQ ID NO: 711922 - RNA, 19 nt, Artificial Sequence
  Description of Artificial Sequence: Synthetic oligonucleotide
acugaauccugacaucaua

SEQ ID NO: 711923 - RNA, 19 nt, Artificial Sequence
  Description of Artificial Sequence: Synthetic oligonucleotide
caagaagaaacagagagau

SEQ ID NO: 711924 - RNA, 19 nt, Artificial Sequence
  Description of Artificial Sequence: Synthetic oligonucleotide
ggaguauccaguacguaag

SEQ ID NO: 711925 - RNA, 19 nt, Artificial Sequence
  Description of Artificial Sequence: Synthetic oligonucleotide
aacccaguuuccagcuagc

SEQ ID NO: 711926 - RNA, 19 nt, Artificial Sequence
  Description of Artificial Sequence: Synthetic oligonucleotide
uacacgcuuuaagaacagg

SEQ ID NO: 711927 - RNA, 19 nt, Artificial Sequence
  Description of Artificial Sequence: Synthetic oligonucleotide
caagccgguggcauguuug

SEQ ID NO: 711928 - RNA, 19 nt, Artificial Sequence
  Description of Artificial Sequence: Synthetic oligonucleotide
uagcuuucuggagugaguc

SEQ ID NO: 711929 - RNA, 19 nt, Artificial Sequence
  Description of Artificial Sequence: Synthetic oligonucleotide
ccuuauugagugaguaggg

SEQ ID NO: 711930 - RNA, 19 nt, Artificial Sequence
  Description of Artificial Sequence: Synthetic oligonucleotide
uguugcucucgaagaauuc

SEQ ID NO: 711931 - RNA, 19 nt, Artificial Sequence
  Description of Artificial Sequence: Synthetic oligonucleotide
acugccucgaugucugaga

SEQ ID NO: 711932 - RNA, 19 nt, Artificial Sequence
  Description of Artificial Sequence: Synthetic oligonucleotide
ucaagcccuccuuguagcc

SEQ ID NO: 711933 - RNA, 19 nt, Artificial Sequence
  Description of Artificial Sequence: Synthetic oligonucleotide
gucuguggcucacaagggc

SEQ ID NO: 711934 - RNA, 19 nt, Artificial Sequence
  Description of Artificial Sequence: Synthetic oligonucleotide
aaagaguuuggcaggucaa

SEQ ID NO: 711935 - RNA, 19 nt, Artificial Sequence
  Description of Artificial Sequence: Synthetic oligonucleotide
caaauugcucaugggcucc

SEQ ID NO: 711936 - RNA, 19 nt, Artificial Sequence
  Description of Artificial Sequence: Synthetic oligonucleotide
cuuauccuauaaauaaacu

SEQ ID NO: 711937 - RNA, 19 nt, Artificial Sequence
  Description of Artificial Sequence: Synthetic oligonucleotide
ucuacccugggagagcagu

SEQ ID NO: 711938 - RNA, 19 nt, Artificial Sequence
  Description of Artificial Sequence: Synthetic oligonucleotide
auugaggucccagucuuca

SEQ ID NO: 711939 - RNA, 19 nt, Artificial Sequence
  Description of Artificial Sequence: Synthetic oligonucleotide
uguacaccucggcaaguaa

SEQ ID NO: 711940 - RNA, 19 nt, Artificial Sequence
  Description of Artificial Sequence: Synthetic oligonucleotide
ugaccugccuuuacugccu

SEQ ID NO: 711941 - RNA, 19 nt, Artificial Sequence
  Description of Artificial Sequence: Synthetic oligonucleotide
caguauacaccacacuaga

SEQ ID NO: 711942 - RNA, 19 nt, Artificial Sequence
  Description of Artificial Sequence: Synthetic oligonucleotide
aacccuguuggcacucggg

SEQ ID NO: 711943 - RNA, 19 nt, Artificial Sequence
  Description of Artificial Sequence: Synthetic oligonucleotide
ggggaggucaccucgggag

SEQ ID NO: 711944 - RNA, 19 nt, Artificial Sequence
  Description of Artificial Sequence: Synthetic oligonucleotide
gacagcuuggucccagaca

SEQ ID NO: 711945 - RNA, 19 nt, Artificial Sequence
  Description of Artificial Sequence: Synthetic oligonucleotide
aagccuuauugagugagua

SEQ ID NO: 711946 - RNA, 19 nt, Artificial Sequence
  Description of Artificial Sequence: Synthetic oligonucleotide
gguuauggcuggcucaggc

SEQ ID NO: 711947 - RNA, 19 nt, Artificial Sequence
  Description of Artificial Sequence: Synthetic oligonucleotide
uuuugauccgguggaugca

SEQ ID NO: 711948 - RNA, 19 nt, Artificial Sequence
  Description of Artificial Sequence: Synthetic oligonucleotide
agcuacauugaagcauuag

SEQ ID NO: 711949 - RNA, 19 nt, Artificial Sequence
  Description of Artificial Sequence: Synthetic oligonucleotide
gaacccuguuggcacucgg

SEQ ID NO: 711950 - RNA, 19 nt, Artificial Sequence
  Description of Artificial Sequence: Synthetic oligonucleotide
gauaggaucugauguugcu

SEQ ID NO: 711951 - RNA, 19 nt, Artificial Sequence
  Description of Artificial Sequence: Synthetic oligonucleotide
cuuauuucacuuggacaug

SEQ ID NO: 711952 - RNA, 19 nt, Artificial Sequence
  Description of Artificial Sequence: Synthetic oligonucleotide
agcagugagauggcaauga

SEQ ID NO: 711953 - RNA, 19 nt, Artificial Sequence
  Description of Artificial Sequence: Synthetic oligonucleotide
aauguacaccucggcaagu

SEQ ID NO: 711954 - RNA, 19 nt, Artificial Sequence
  Description of Artificial Sequence: Synthetic oligonucleotide
uggaugcacccuuuuguaa

SEQ ID NO: 711955 - RNA, 19 nt, Artificial Sequence
  Description of Artificial Sequence: Synthetic oligonucleotide
guugagcauggaccuaagc

SEQ ID NO: 711956 - RNA, 19 nt, Artificial Sequence
  Description of Artificial Sequence: Synthetic oligonucleotide
gugagauggcaaugaagac

SEQ ID NO: 711957 - RNA, 19 nt, Artificial Sequence
  Description of Artificial Sequence: Synthetic oligonucleotide
accagcuacauugaagcau

SEQ ID NO: 711958 - RNA, 19 nt, Artificial Sequence
  Description of Artificial Sequence: Synthetic oligonucleotide
cugguccaacacaaaugcc

SEQ ID NO: 711959 - RNA, 19 nt, Artificial Sequence
  Description of Artificial Sequence: Synthetic oligonucleotide
uuggcacucgggaacccac

SEQ ID NO: 711960 - RNA, 19 nt, Artificial Sequence
  Description of Artificial Sequence: Synthetic oligonucleotide
cugaugccgaagacugggg

SEQ ID NO: 711961 - RNA, 19 nt, Artificial Sequence
  Description of Artificial Sequence: Synthetic oligonucleotide
uacguaagacacacaucau

SEQ ID NO: 711962 - RNA, 19 nt, Artificial Sequence
  Description of Artificial Sequence: Synthetic oligonucleotide
acuacuccacaugaagaga

SEQ ID NO: 711963 - RNA, 19 nt, Artificial Sequence
  Description of Artificial Sequence: Synthetic oligonucleotide
agguaagaguugagcaugg

SEQ ID NO: 711964 - RNA, 19 nt, Artificial Sequence
  Description of Artificial Sequence: Synthetic oligonucleotide
uguucuacccugggagagc

SEQ ID NO: 711965 - RNA, 19 nt, Artificial Sequence
  Description of Artificial Sequence: Synthetic oligonucleotide
uguaggcuuggaaggcagu

SEQ ID NO: 711966 - RNA, 19 nt, Artificial Sequence
  Description of Artificial Sequence: Synthetic oligonucleotide
agaauucccggaaaccggu

SEQ ID NO: 711967 - RNA, 19 nt, Artificial Sequence
  Description of Artificial Sequence: Synthetic oligonucleotide
cugauuagcuuucuggagu

SEQ ID NO: 711968 - RNA, 19 nt, Artificial Sequence
  Description of Artificial Sequence: Synthetic oligonucleotide
ggucaaucagaauucaagu

SEQ ID NO: 711969 - RNA, 19 nt, Artificial Sequence
  Description of Artificial Sequence: Synthetic oligonucleotide
cacuagcuguacuugguca

SEQ ID NO: 711970 - RNA, 19 nt, Artificial Sequence
  Description of Artificial Sequence: Synthetic oligonucleotide
uacaccacacuagaaugua

SEQ ID NO: 711971 - RNA, 19 nt, Artificial Sequence
  Description of Artificial Sequence: Synthetic oligonucleotide
uuucuggagugagucgaug

SEQ ID NO: 711972 - RNA, 19 nt, Artificial Sequence
  Description of Artificial Sequence: Synthetic oligonucleotide
ucacgagaggaacccaguu

SEQ ID NO: 711973 - RNA, 19 nt, Artificial Sequence
  Description of Artificial Sequence: Synthetic oligonucleotide
guaggggccugcaaauugc

SEQ ID NO: 711974 - RNA, 19 nt, Artificial Sequence
  Description of Artificial Sequence: Synthetic oligonucleotide
aguuucaguagcaccgaga

SEQ ID NO: 711975 - RNA, 19 nt, Artificial Sequence
  Description of Artificial Sequence: Synthetic oligonucleotide
gagagcaguguaggcuugg

SEQ ID NO: 711976 - RNA, 19 nt, Artificial Sequence
  Description of Artificial Sequence: Synthetic oligonucleotide
ugauccgguggaugcagaa

SEQ ID NO: 711977 - RNA, 19 nt, Artificial Sequence
  Description of Artificial Sequence: Synthetic oligonucleotide
uugaagcauuagagaggag

SEQ ID NO: 711978 - RNA, 19 nt, Artificial Sequence
  Description of Artificial Sequence: Synthetic oligonucleotide
cacuggacgacuuacacuu

SEQ ID NO: 711979 - RNA, 19 nt, Artificial Sequence
  Description of Artificial Sequence: Synthetic oligonucleotide
cucgggaguuaacauaaga

SEQ ID NO: 711980 - RNA, 19 nt, Artificial Sequence
  Description of Artificial Sequence: Synthetic oligonucleotide
guacaccucggcaaguaac

SEQ ID NO: 711981 - RNA, 19 nt, Artificial Sequence
  Description of Artificial Sequence: Synthetic oligonucleotide
cugggagagcaguguaggc

SEQ ID NO: 711982 - RNA, 19 nt, Artificial Sequence
  Description of Artificial Sequence: Synthetic oligonucleotide
ggaaaccggucccucaccc

SEQ ID NO: 711983 - RNA, 19 nt, Artificial Sequence
  Description of Artificial Sequence: Synthetic oligonucleotide
cauuagagaggagcccagc

SEQ ID NO: 711984 - RNA, 19 nt, Artificial Sequence
  Description of Artificial Sequence: Synthetic oligonucleotide
auugagugaguaggggccu

SEQ ID NO: 711985 - RNA, 19 nt, Artificial Sequence
  Description of Artificial Sequence: Synthetic oligonucleotide
augccgaagacuggggucu

SEQ ID NO: 711986 - RNA, 19 nt, Artificial Sequence
  Description of Artificial Sequence: Synthetic oligonucleotide
gucaccucgggaguuaaca

SEQ ID NO: 711987 - RNA, 19 nt, Artificial Sequence
  Description of Artificial Sequence: Synthetic oligonucleotide
aaauugcucaugggcucca

SEQ ID NO: 711988 - RNA, 19 nt, Artificial Sequence
  Description of Artificial Sequence: Synthetic oligonucleotide
cagagagaucacgucacac

SEQ ID NO: 711989 - RNA, 19 nt, Artificial Sequence
  Description of Artificial Sequence: Synthetic oligonucleotide
ugaacccuguuggcacucg

SEQ ID NO: 711990 - RNA, 19 nt, Artificial Sequence
  Description of Artificial Sequence: Synthetic oligonucleotide
aguuaacauaagacgugcu

SEQ ID NO: 711991 - RNA, 19 nt, Artificial Sequence
  Description of Artificial Sequence: Synthetic oligonucleotide
uaggggccugcaaauugcu

SEQ ID NO: 711992 - RNA, 19 nt, Artificial Sequence
  Description of Artificial Sequence: Synthetic oligonucleotide
uauggcuggcucaggcuua

SEQ ID NO: 711993 - RNA, 19 nt, Artificial Sequence
  Description of Artificial Sequence: Synthetic oligonucleotide
ggcacucaaccccugaaca

SEQ ID NO: 711994 - RNA, 19 nt, Artificial Sequence
  Description of Artificial Sequence: Synthetic oligonucleotide
gugcguggagggaaugugg

SEQ ID NO: 711995 - RNA, 19 nt, Artificial Sequence
  Description of Artificial Sequence: Synthetic oligonucleotide
ggaucugauguugcucucg

SEQ ID NO: 711996 - RNA, 19 nt, Artificial Sequence
  Description of Artificial Sequence: Synthetic oligonucleotide
uugcacuaccaugaacccu

SEQ ID NO: 711997 - RNA, 19 nt, Artificial Sequence
  Description of Artificial Sequence: Synthetic oligonucleotide
accucgggaguuaacauaa

SEQ ID NO: 711998 - RNA, 19 nt, Artificial Sequence
  Description of Artificial Sequence: Synthetic oligonucleotide
uaucaccaguauacaccac

SEQ ID NO: 711999 - RNA, 19 nt, Artificial Sequence
  Description of Artificial Sequence: Synthetic oligonucleotide
gagaucacgucacacugau

SEQ ID NO: 712000 - RNA, 19 nt, Artificial Sequence
  Description of Artificial Sequence: Synthetic oligonucleotide
caguacguaagacacacau

SEQ ID NO: 712001 - RNA, 19 nt, Artificial Sequence
  Description of Artificial Sequence: Synthetic oligonucleotide
cuucgucuucagcaccagc

SEQ ID NO: 712002 - RNA, 19 nt, Artificial Sequence
  Description of Artificial Sequence: Synthetic oligonucleotide
ucccagacacuggguaagg

SEQ ID NO: 712003 - RNA, 19 nt, Artificial Sequence
  Description of Artificial Sequence: Synthetic oligonucleotide
gcacucaaccccugaacag

SEQ ID NO: 712004 - RNA, 19 nt, Artificial Sequence
  Description of Artificial Sequence: Synthetic oligonucleotide
gaggugcuucccugggacc

SEQ ID NO: 712005 - RNA, 19 nt, Artificial Sequence
  Description of Artificial Sequence: Synthetic oligonucleotide
ccaugaacccuguuggcac

SEQ ID NO: 712006 - RNA, 19 nt, Artificial Sequence
  Description of Artificial Sequence: Synthetic oligonucleotide
gccaucuguccucagaguc

SEQ ID NO: 712007 - RNA, 19 nt, Artificial Sequence
  Description of Artificial Sequence: Synthetic oligonucleotide
cuacccugggagagcagug

SEQ ID NO: 712008 - RNA, 19 nt, Artificial Sequence
  Description of Artificial Sequence: Synthetic oligonucleotide
caagcauucuuccuccucu

SEQ ID NO: 712009 - RNA, 19 nt, Artificial Sequence
  Description of Artificial Sequence: Synthetic oligonucleotide
ugucaaguaugggcagaug

SEQ ID NO: 712010 - RNA, 19 nt, Artificial Sequence
  Description of Artificial Sequence: Synthetic oligonucleotide
gccaugucaaguaugggca

SEQ ID NO: 712011 - RNA, 19 nt, Artificial Sequence
  Description of Artificial Sequence: Synthetic oligonucleotide
gggaguuaacauaagacgu

SEQ ID NO: 712012 - RNA, 19 nt, Artificial Sequence
  Description of Artificial Sequence: Synthetic oligonucleotide
acucaaccccugaacagug

SEQ ID NO: 712013 - RNA, 19 nt, Artificial Sequence
  Description of Artificial Sequence: Synthetic oligonucleotide
caguuucaguagcaccgag

SEQ ID NO: 712014 - RNA, 19 nt, Artificial Sequence
  Description of Artificial Sequence: Synthetic oligonucleotide
gaaaccggucccucaccca

SEQ ID NO: 712015 - RNA, 19 nt, Artificial Sequence
  Description of Artificial Sequence: Synthetic oligonucleotide
cagggcuuaaugcuaugga

SEQ ID NO: 712016 - RNA, 19 nt, Artificial Sequence
  Description of Artificial Sequence: Synthetic oligonucleotide
cuggcuucaccuccacgug

SEQ ID NO: 712017 - RNA, 19 nt, Artificial Sequence
  Description of Artificial Sequence: Synthetic oligonucleotide
gaccgguuauggcuggcuc

SEQ ID NO: 712018 - RNA, 19 nt, Artificial Sequence
  Description of Artificial Sequence: Synthetic oligonucleotide
augaacccuguuggcacuc

SEQ ID NO: 712019 - RNA, 19 nt, Artificial Sequence
  Description of Artificial Sequence: Synthetic oligonucleotide
cacucgggaacccacugga

SEQ ID NO: 712020 - RNA, 19 nt, Artificial Sequence
  Description of Artificial Sequence: Synthetic oligonucleotide
acacuagaauguacaccuc

SEQ ID NO: 712021 - RNA, 19 nt, Artificial Sequence
  Description of Artificial Sequence: Synthetic oligonucleotide
gcagggcuuaaugcuaugg

SEQ ID NO: 712022 - RNA, 19 nt, Artificial Sequence
  Description of Artificial Sequence: Synthetic oligonucleotide
uugggccacuagcuguacu

SEQ ID NO: 712023 - RNA, 19 nt, Artificial Sequence
  Description of Artificial Sequence: Synthetic oligonucleotide
augccaugucaaguauggg

SEQ ID NO: 712024 - RNA, 19 nt, Artificial Sequence
  Description of Artificial Sequence: Synthetic oligonucleotide
gaguaucacccuccaggga

SEQ ID NO: 712025 - RNA, 19 nt, Artificial Sequence
  Description of Artificial Sequence: Synthetic oligonucleotide
gggcuuaaugcuauggaga

SEQ ID NO: 712026 - RNA, 19 nt, Artificial Sequence
  Description of Artificial Sequence: Synthetic oligonucleotide
auguuugcacuaccaugaa

SEQ ID NO: 712027 - RNA, 19 nt, Artificial Sequence
  Description of Artificial Sequence: Synthetic oligonucleotide
gugaagccaagcaggggug

SEQ ID NO: 712028 - RNA, 19 nt, Artificial Sequence
  Description of Artificial Sequence: Synthetic oligonucleotide
guaacugaagguaggcacu

SEQ ID NO: 712029 - RNA, 19 nt, Artificial Sequence
  Description of Artificial Sequence: Synthetic oligonucleotide
accugccuuuacugccucg

SEQ ID NO: 712030 - RNA, 19 nt, Artificial Sequence
  Description of Artificial Sequence: Synthetic oligonucleotide
auaagccccacagcacuga

SEQ ID NO: 712031 - RNA, 19 nt, Artificial Sequence
  Description of Artificial Sequence: Synthetic oligonucleotide
ggucacgagaggaacccag

SEQ ID NO: 712032 - RNA, 19 nt, Artificial Sequence
  Description of Artificial Sequence: Synthetic oligonucleotide
gggcagaugagaaggggcc

SEQ ID NO: 712033 - RNA, 19 nt, Artificial Sequence
  Description of Artificial Sequence: Synthetic oligonucleotide
ucacuuggacauggcugag

SEQ ID NO: 712034 - RNA, 19 nt, Artificial Sequence
  Description of Artificial Sequence: Synthetic oligonucleotide
uugagugaguaggggccug

SEQ ID NO: 712035 - RNA, 19 nt, Artificial Sequence
  Description of Artificial Sequence: Synthetic oligonucleotide
caguagggagaaaggguca

SEQ ID NO: 712036 - RNA, 19 nt, Artificial Sequence
  Description of Artificial Sequence: Synthetic oligonucleotide
ccuccucuagucaucauca

SEQ ID NO: 712037 - RNA, 19 nt, Artificial Sequence
  Description of Artificial Sequence: Synthetic oligonucleotide
accucggcaaguaacugaa

SEQ ID NO: 712038 - RNA, 19 nt, Artificial Sequence
  Description of Artificial Sequence: Synthetic oligonucleotide
cacccagugugccucagga

SEQ ID NO: 712039 - RNA, 19 nt, Artificial Sequence
  Description of Artificial Sequence: Synthetic oligonucleotide
caccucggcaaguaacuga

SEQ ID NO: 712040 - RNA, 19 nt, Artificial Sequence
  Description of Artificial Sequence: Synthetic oligonucleotide
aagccaagcaggggugcgu

SEQ ID NO: 712041 - RNA, 19 nt, Artificial Sequence
  Description of Artificial Sequence: Synthetic oligonucleotide
uguggcucacaagggccug

SEQ ID NO: 712042 - RNA, 19 nt, Artificial Sequence
  Description of Artificial Sequence: Synthetic oligonucleotide
aagacgugcugagcuucca

SEQ ID NO: 712043 - RNA, 19 nt, Artificial Sequence
  Description of Artificial Sequence: Synthetic oligonucleotide
guucuacccugggagagca

SEQ ID NO: 712044 - RNA, 19 nt, Artificial Sequence
  Description of Artificial Sequence: Synthetic oligonucleotide
acgacagggagaggcuguc

SEQ ID NO: 712045 - RNA, 19 nt, Artificial Sequence
  Description of Artificial Sequence: Synthetic oligonucleotide
uacccugggagagcagugu

SEQ ID NO: 712046 - RNA, 19 nt, Artificial Sequence
  Description of Artificial Sequence: Synthetic oligonucleotide
guuauggcuggcucaggcu

SEQ ID NO: 712047 - RNA, 19 nt, Artificial Sequence
  Description of Artificial Sequence: Synthetic oligonucleotide
agcagggcuuaaugcuaug

SEQ ID NO: 712048 - RNA, 19 nt, Artificial Sequence
  Description of Artificial Sequence: Synthetic oligonucleotide
gauuagcuuucuggaguga

SEQ ID NO: 712049 - RNA, 19 nt, Artificial Sequence
  Description of Artificial Sequence: Synthetic oligonucleotide
agacgugcugagcuuccau

SEQ ID NO: 712050 - RNA, 19 nt, Artificial Sequence
  Description of Artificial Sequence: Synthetic oligonucleotide
gcuguacuuggucacgaga

SEQ ID NO: 712051 - RNA, 19 nt, Artificial Sequence
  Description of Artificial Sequence: Synthetic oligonucleotide
cagaaguuguucccaaccu

SEQ ID NO: 712052 - RNA, 19 nt, Artificial Sequence
  Description of Artificial Sequence: Synthetic oligonucleotide
guaagacacacaucauuuu

SEQ ID NO: 712053 - RNA, 19 nt, Artificial Sequence
  Description of Artificial Sequence: Synthetic oligonucleotide
uccucgccaggaagaugcc

SEQ ID NO: 712054 - RNA, 19 nt, Artificial Sequence
  Description of Artificial Sequence: Synthetic oligonucleotide
cucgaagaauucccggaaa

SEQ ID NO: 712055 - RNA, 19 nt, Artificial Sequence
  Description of Artificial Sequence: Synthetic oligonucleotide
guaggcacucaaccccuga

SEQ ID NO: 712056 - RNA, 19 nt, Artificial Sequence
  Description of Artificial Sequence: Synthetic oligonucleotide
gaccuaagccuuauugagu

SEQ ID NO: 712057 - RNA, 19 nt, Artificial Sequence
  Description of Artificial Sequence: Synthetic oligonucleotide
ugcgcaggaucuggcacac

SEQ ID NO: 712058 - RNA, 19 nt, Artificial Sequence
  Description of Artificial Sequence: Synthetic oligonucleotide
ugccggagagaggcaauga

SEQ ID NO: 712059 - RNA, 19 nt, Artificial Sequence
  Description of Artificial Sequence: Synthetic oligonucleotide
aagugaugaccugccuuua

SEQ ID NO: 712060 - RNA, 19 nt, Artificial Sequence
  Description of Artificial Sequence: Synthetic oligonucleotide
ucaucccgauaggaucuga

SEQ ID NO: 712061 - RNA, 19 nt, Artificial Sequence
  Description of Artificial Sequence: Synthetic oligonucleotide
gaauucccggaaaccgguc

SEQ ID NO: 712062 - RNA, 19 nt, Artificial Sequence
  Description of Artificial Sequence: Synthetic oligonucleotide
cacauugaggucccagucu

SEQ ID NO: 712063 - RNA, 19 nt, Artificial Sequence
  Description of Artificial Sequence: Synthetic oligonucleotide
uguuggcacucgggaaccc

SEQ ID NO: 712064 - RNA, 19 nt, Artificial Sequence
  Description of Artificial Sequence: Synthetic oligonucleotide
uccugacaucauagccaca

SEQ ID NO: 712065 - RNA, 19 nt, Artificial Sequence
  Description of Artificial Sequence: Synthetic oligonucleotide
acuggacgacuuacacuuc

SEQ ID NO: 712066 - RNA, 19 nt, Artificial Sequence
  Description of Artificial Sequence: Synthetic oligonucleotide
agacaccagccacaaugua

SEQ ID NO: 712067 - RNA, 19 nt, Artificial Sequence
  Description of Artificial Sequence: Synthetic oligonucleotide
gccgguggcauguuugcac

SEQ ID NO: 712068 - RNA, 19 nt, Artificial Sequence
  Description of Artificial Sequence: Synthetic oligonucleotide
caccuggugucuguggcuc

SEQ ID NO: 712069 - RNA, 19 nt, Artificial Sequence
  Description of Artificial Sequence: Synthetic oligonucleotide
auauuccauaaaagaguuu

SEQ ID NO: 712070 - RNA, 19 nt, Artificial Sequence
  Description of Artificial Sequence: Synthetic oligonucleotide
ggcaaaccccuucagagau

SEQ ID NO: 712071 - RNA, 19 nt, Artificial Sequence
  Description of Artificial Sequence: Synthetic oligonucleotide
cuuacacuuccucaugcuu

SEQ ID NO: 712072 - RNA, 19 nt, Artificial Sequence
  Description of Artificial Sequence: Synthetic oligonucleotide
gcuguucuacccugggaga

SEQ ID NO: 712073 - RNA, 19 nt, Artificial Sequence
  Description of Artificial Sequence: Synthetic oligonucleotide
gguggcauguuugcacuac

SEQ ID NO: 712074 - RNA, 19 nt, Artificial Sequence
  Description of Artificial Sequence: Synthetic oligonucleotide
uucccggaaaccggucccu

SEQ ID NO: 712075 - RNA, 19 nt, Artificial Sequence
  Description of Artificial Sequence: Synthetic oligonucleotide
uggucacgagaggaaccca

SEQ ID NO: 712076 - RNA, 19 nt, Artificial Sequence
  Description of Artificial Sequence: Synthetic oligonucleotide
uguggacgacagggagagg

SEQ ID NO: 712077 - RNA, 19 nt, Artificial Sequence
  Description of Artificial Sequence: Synthetic oligonucleotide
cugguucuugagacacuca

SEQ ID NO: 712078 - RNA, 19 nt, Artificial Sequence
  Description of Artificial Sequence: Synthetic oligonucleotide
caccucgggaguuaacaua

SEQ ID NO: 712079 - RNA, 19 nt, Artificial Sequence
  Description of Artificial Sequence: Synthetic oligonucleotide
cagaugagaaggggccuuc

SEQ ID NO: 712080 - RNA, 19 nt, Artificial Sequence
  Description of Artificial Sequence: Synthetic oligonucleotide
agucacuacuccacaugaa

SEQ ID NO: 712081 - RNA, 19 nt, Artificial Sequence
  Description of Artificial Sequence: Synthetic oligonucleotide
ccgauaggaucugauguug

SEQ ID NO: 712082 - RNA, 19 nt, Artificial Sequence
  Description of Artificial Sequence: Synthetic oligonucleotide
gggcaaaccccuucagaga

SEQ ID NO: 712083 - RNA, 19 nt, Artificial Sequence
  Description of Artificial Sequence: Synthetic oligonucleotide
agggucaaucagaauucaa

SEQ ID NO: 712084 - RNA, 19 nt, Artificial Sequence
  Description of Artificial Sequence: Synthetic oligonucleotide
auccaguacguaagacaca

SEQ ID NO: 712085 - RNA, 19 nt, Artificial Sequence
  Description of Artificial Sequence: Synthetic oligonucleotide
augcacccuuuuguaaaga

SEQ ID NO: 712086 - RNA, 19 nt, Artificial Sequence
  Description of Artificial Sequence: Synthetic oligonucleotide
aguccucgccaggaagaug

SEQ ID NO: 712087 - RNA, 19 nt, Artificial Sequence
  Description of Artificial Sequence: Synthetic oligonucleotide
caccaguaucaccaguaua

SEQ ID NO: 712088 - RNA, 19 nt, Artificial Sequence
  Description of Artificial Sequence: Synthetic oligonucleotide
cauaagacgugcugagcuu

SEQ ID NO: 712089 - RNA, 19 nt, Artificial Sequence
  Description of Artificial Sequence: Synthetic oligonucleotide
agaucacgucacacugaug

SEQ ID NO: 712090 - RNA, 19 nt, Artificial Sequence
  Description of Artificial Sequence: Synthetic oligonucleotide
aaccggucccucacccagu

SEQ ID NO: 712091 - RNA, 19 nt, Artificial Sequence
  Description of Artificial Sequence: Synthetic oligonucleotide
cacucaaccccugaacagu

SEQ ID NO: 712092 - RNA, 19 nt, Artificial Sequence
  Description of Artificial Sequence: Synthetic oligonucleotide
agcuuccauacagcaccug

SEQ ID NO: 712093 - RNA, 19 nt, Artificial Sequence
  Description of Artificial Sequence: Synthetic oligonucleotide
caugaacccuguuggcacu

SEQ ID NO: 712094 - RNA, 19 nt, Artificial Sequence
  Description of Artificial Sequence: Synthetic oligonucleotide
agaguugagcauggaccua

SEQ ID NO: 712095 - RNA, 19 nt, Artificial Sequence
  Description of Artificial Sequence: Synthetic oligonucleotide
ccgagaccagaagacagug

SEQ ID NO: 712096 - RNA, 19 nt, Artificial Sequence
  Description of Artificial Sequence: Synthetic oligonucleotide
gacgacagggagaggcugu

SEQ ID NO: 712097 - RNA, 19 nt, Artificial Sequence
  Description of Artificial Sequence: Synthetic oligonucleotide
gcagugagauggcaaugaa

SEQ ID NO: 712098 - RNA, 19 nt, Artificial Sequence
  Description of Artificial Sequence: Synthetic oligonucleotide
ccgguuauggcuggcucag

SEQ ID NO: 712099 - RNA, 19 nt, Artificial Sequence
  Description of Artificial Sequence: Synthetic oligonucleotide
cuguggcucacaagggccu

SEQ ID NO: 712100 - RNA, 19 nt, Artificial Sequence
  Description of Artificial Sequence: Synthetic oligonucleotide
ccggaaaccggucccucac

SEQ ID NO: 712101 - RNA, 19 nt, Artificial Sequence
  Description of Artificial Sequence: Synthetic oligonucleotide
ggcaguggcgaggugcuuc

SEQ ID NO: 712102 - RNA, 19 nt, Artificial Sequence
  Description of Artificial Sequence: Synthetic oligonucleotide
gcuuaaugcuauggagaca

SEQ ID NO: 712103 - RNA, 19 nt, Artificial Sequence
  Description of Artificial Sequence: Synthetic oligonucleotide
gguaagaguugagcaugga

SEQ ID NO: 712104 - RNA, 19 nt, Artificial Sequence
  Description of Artificial Sequence: Synthetic oligonucleotide
cacgagaggaacccaguuu

SEQ ID NO: 712105 - RNA, 19 nt, Artificial Sequence
  Description of Artificial Sequence: Synthetic oligonucleotide
gccggagagaggcaaugaa

SEQ ID NO: 712106 - RNA, 19 nt, Artificial Sequence
  Description of Artificial Sequence: Synthetic oligonucleotide
gcguggagggaauguggac

SEQ ID NO: 712107 - RNA, 19 nt, Artificial Sequence
  Description of Artificial Sequence: Synthetic oligonucleotide
cagagucacuacuccacau

SEQ ID NO: 712108 - RNA, 19 nt, Artificial Sequence
  Description of Artificial Sequence: Synthetic oligonucleotide
caucccgauaggaucugau

SEQ ID NO: 712109 - RNA, 19 nt, Artificial Sequence
  Description of Artificial Sequence: Synthetic oligonucleotide
cgacuuacacuuccucaug

SEQ ID NO: 712110 - RNA, 19 nt, Artificial Sequence
  Description of Artificial Sequence: Synthetic oligonucleotide
ccaaccugcugguccaaca

SEQ ID NO: 712111 - RNA, 19 nt, Artificial Sequence
  Description of Artificial Sequence: Synthetic oligonucleotide
agccgguggcauguuugca

SEQ ID NO: 712112 - RNA, 19 nt, Artificial Sequence
  Description of Artificial Sequence: Synthetic oligonucleotide
cuuucuggagugagucgau

SEQ ID NO: 712113 - RNA, 19 nt, Artificial Sequence
  Description of Artificial Sequence: Synthetic oligonucleotide
ucccggaaaccggucccuc

SEQ ID NO: 712114 - RNA, 19 nt, Artificial Sequence
  Description of Artificial Sequence: Synthetic oligonucleotide
caccaguauacaccacacu

SEQ ID NO: 712115 - RNA, 19 nt, Artificial Sequence
  Description of Artificial Sequence: Synthetic oligonucleotide
ccgaagacuggggucuggc

SEQ ID NO: 712116 - RNA, 19 nt, Artificial Sequence
  Description of Artificial Sequence: Synthetic oligonucleotide
gcaccgagaccagaagaca

SEQ ID NO: 712117 - RNA, 19 nt, Artificial Sequence
  Description of Artificial Sequence: Synthetic oligonucleotide
ccucgggaguuaacauaag

SEQ ID NO: 712118 - RNA, 19 nt, Artificial Sequence
  Description of Artificial Sequence: Synthetic oligonucleotide
gucacgagaggaacccagu

SEQ ID NO: 712119 - RNA, 19 nt, Artificial Sequence
  Description of Artificial Sequence: Synthetic oligonucleotide
ccucgccaggaagaugccg

SEQ ID NO: 712120 - RNA, 19 nt, Artificial Sequence
  Description of Artificial Sequence: Synthetic oligonucleotide
gcaaaccccuucagagaug

SEQ ID NO: 712121 - RNA, 19 nt, Artificial Sequence
  Description of Artificial Sequence: Synthetic oligonucleotide
aggucaccucgggaguuaa

SEQ ID NO: 712122 - RNA, 19 nt, Artificial Sequence
  Description of Artificial Sequence: Synthetic oligonucleotide
caaaugcccugcccacaaa

SEQ ID NO: 712123 - RNA, 19 nt, Artificial Sequence
  Description of Artificial Sequence: Synthetic oligonucleotide
ccagcuacauugaagcauu

SEQ ID NO: 712124 - RNA, 19 nt, Artificial Sequence
  Description of Artificial Sequence: Synthetic oligonucleotide
ccucggcaaguaacugaag

SEQ ID NO: 712125 - RNA, 19 nt, Artificial Sequence
  Description of Artificial Sequence: Synthetic oligonucleotide
gguaggcacucaaccccug

SEQ ID NO: 712126 - RNA, 19 nt, Artificial Sequence
  Description of Artificial Sequence: Synthetic oligonucleotide
cugccucgaugucugagau

SEQ ID NO: 712127 - RNA, 19 nt, Artificial Sequence
  Description of Artificial Sequence: Synthetic oligonucleotide
ccuaagccuuauugaguga

SEQ ID NO: 712128 - RNA, 19 nt, Artificial Sequence
  Description of Artificial Sequence: Synthetic oligonucleotide
ugcuucccugggaccgguu

SEQ ID NO: 712129 - RNA, 19 nt, Artificial Sequence
  Description of Artificial Sequence: Synthetic oligonucleotide
gaugccggagagaggcaau

SEQ ID NO: 712130 - RNA, 19 nt, Artificial Sequence
  Description of Artificial Sequence: Synthetic oligonucleotide
ggguaaggcugcugagaaa

SEQ ID NO: 712131 - RNA, 19 nt, Artificial Sequence
  Description of Artificial Sequence: Synthetic oligonucleotide
cuucccugggaccgguuau

SEQ ID NO: 712132 - RNA, 19 nt, Artificial Sequence
  Description of Artificial Sequence: Synthetic oligonucleotide
cacaagcauucuuccuccu

SEQ ID NO: 712133 - RNA, 19 nt, Artificial Sequence
  Description of Artificial Sequence: Synthetic oligonucleotide
ccugccuuuacugccucga

SEQ ID NO: 712134 - RNA, 19 nt, Artificial Sequence
  Description of Artificial Sequence: Synthetic oligonucleotide
gcuucccugggaccgguua

SEQ ID NO: 712135 - RNA, 19 nt, Artificial Sequence
  Description of Artificial Sequence: Synthetic oligonucleotide
gaguccucgccaggaagau

SEQ ID NO: 712136 - RNA, 19 nt, Artificial Sequence
  Description of Artificial Sequence: Synthetic oligonucleotide
cagcuacauugaagcauua

SEQ ID NO: 712137 - RNA, 19 nt, Artificial Sequence
  Description of Artificial Sequence: Synthetic oligonucleotide
caggaguauccaguacgua

SEQ ID NO: 712138 - RNA, 19 nt, Artificial Sequence
  Description of Artificial Sequence: Synthetic oligonucleotide
guagggagaaagggucaau

SEQ ID NO: 712139 - RNA, 19 nt, Artificial Sequence
  Description of Artificial Sequence: Synthetic oligonucleotide
cggaaaccggucccucacc

SEQ ID NO: 712140 - RNA, 19 nt, Artificial Sequence
  Description of Artificial Sequence: Synthetic oligonucleotide
cuccucuagucaucaucau

SEQ ID NO: 712141 - RNA, 19 nt, Artificial Sequence
  Description of Artificial Sequence: Synthetic oligonucleotide
ccaguacguaagacacaca

SEQ ID NO: 712142 - RNA, 19 nt, Artificial Sequence
  Description of Artificial Sequence: Synthetic oligonucleotide
cggcaaguaacugaaggua

SEQ ID NO: 712143 - RNA, 19 nt, Artificial Sequence
  Description of Artificial Sequence: Synthetic oligonucleotide
ccccacauuucucucggcu

SEQ ID NO: 712144 - RNA, 19 nt, Artificial Sequence
  Description of Artificial Sequence: Synthetic oligonucleotide
cccggaaaccggucccuca

SEQ ID NO: 712145 - RNA, 19 nt, Artificial Sequence
  Description of Artificial Sequence: Synthetic oligonucleotide
gggaccgguuauggcuggc

SEQ ID NO: 712146 - RNA, 19 nt, Artificial Sequence
  Description of Artificial Sequence: Synthetic oligonucleotide
ggggugcguggagggaaug

SEQ ID NO: 712147 - RNA, 19 nt, Artificial Sequence
  Description of Artificial Sequence: Synthetic oligonucleotide
cugccuuuacugccucgau

SEQ ID NO: 712148 - RNA, 19 nt, Artificial Sequence
  Description of Artificial Sequence: Synthetic oligonucleotide
cauggaccuaagccuuauu

SEQ ID NO: 712149 - RNA, 19 nt, Artificial Sequence
  Description of Artificial Sequence: Synthetic oligonucleotide
ccgguggcauguuugcacu

SEQ ID NO: 712150 - RNA, 19 nt, Artificial Sequence
  Description of Artificial Sequence: Synthetic oligonucleotide
cagcuuggucccagacacu

SEQ ID NO: 712151 - RNA, 19 nt, Artificial Sequence
  Description of Artificial Sequence: Synthetic oligonucleotide
ggaccgguuauggcuggcu

SEQ ID NO: 712152 - RNA, 19 nt, Artificial Sequence
  Description of Artificial Sequence: Synthetic oligonucleotide
gcaggggugcguggaggga

SEQ ID NO: 712153 - RNA, 19 nt, Artificial Sequence
  Description of Artificial Sequence: Synthetic oligonucleotide
gggugcguggagggaaugu

SEQ ID NO: 712154 - RNA, 19 nt, Artificial Sequence
  Description of Artificial Sequence: Synthetic oligonucleotide
cagugugccucaggaguau

SEQ ID NO: 712155 - RNA, 19 nt, Artificial Sequence
  Description of Artificial Sequence: Synthetic oligonucleotide
gcauggaccuaagccuuau

SEQ ID NO: 712156 - RNA, 19 nt, Artificial Sequence
  Description of Artificial Sequence: Synthetic oligonucleotide
cgguuauggcuggcucagg

SEQ ID NO: 712157 - RNA, 19 nt, Artificial Sequence
  Description of Artificial Sequence: Synthetic oligonucleotide
cgggaacccacuggacgac

SEQ ID NO: 712158 - RNA, 19 nt, Artificial Sequence
  Description of Artificial Sequence: Synthetic oligonucleotide
cacuaccaugaacccuguu

SEQ ID NO: 712159 - RNA, 19 nt, Artificial Sequence
  Description of Artificial Sequence: Synthetic oligonucleotide
gcacuaccaugaacccugu

SEQ ID NO: 712160 - RNA, 19 nt, Artificial Sequence
  Description of Artificial Sequence: Synthetic oligonucleotide
cagcacacuuugggccacu

SEQ ID NO: 712161 - RNA, 19 nt, Artificial Sequence
  Description of Artificial Sequence: Synthetic oligonucleotide
ucauagagaaaacugaagg

SEQ ID NO: 712162 - RNA, 19 nt, Artificial Sequence
  Description of Artificial Sequence: Synthetic oligonucleotide
agauacaggaguuaugugc

SEQ ID NO: 712163 - RNA, 19 nt, Artificial Sequence
  Description of Artificial Sequence: Synthetic oligonucleotide
aguaauucuucacagggcc

SEQ ID NO: 712164 - RNA, 19 nt, Artificial Sequence
  Description of Artificial Sequence: Synthetic oligonucleotide
ucugcuaugaaccuggcca

SEQ ID NO: 712165 - RNA, 19 nt, Artificial Sequence
  Description of Artificial Sequence: Synthetic oligonucleotide
ucuacugucagcuugaauu

SEQ ID NO: 712166 - RNA, 19 nt, Artificial Sequence
  Description of Artificial Sequence: Synthetic oligonucleotide
ugaucugaaagcuagacuu

SEQ ID NO: 712167 - RNA, 19 nt, Artificial Sequence
  Description of Artificial Sequence: Synthetic oligonucleotide
uucacuggguucuugaugc

SEQ ID NO: 712168 - RNA, 19 nt, Artificial Sequence
  Description of Artificial Sequence: Synthetic oligonucleotide
ugugaguaauucuucacag

SEQ ID NO: 712169 - RNA, 19 nt, Artificial Sequence
  Description of Artificial Sequence: Synthetic oligonucleotide
cagaauauucaguaguagg

SEQ ID NO: 712170 - RNA, 19 nt, Artificial Sequence
  Description of Artificial Sequence: Synthetic oligonucleotide
uaugugacaacauuccaca

SEQ ID NO: 712171 - RNA, 19 nt, Artificial Sequence
  Description of Artificial Sequence: Synthetic oligonucleotide
cauagagaaaacugaaggc

SEQ ID NO: 712172 - RNA, 19 nt, Artificial Sequence
  Description of Artificial Sequence: Synthetic oligonucleotide
cucaucaucaucaucauca

SEQ ID NO: 712173 - RNA, 19 nt, Artificial Sequence
  Description of Artificial Sequence: Synthetic oligonucleotide
agaagcuaccaucauuggc

SEQ ID NO: 712174 - RNA, 19 nt, Artificial Sequence
  Description of Artificial Sequence: Synthetic oligonucleotide
acuuguuggagauacagga

SEQ ID NO: 712175 - RNA, 19 nt, Artificial Sequence
  Description of Artificial Sequence: Synthetic oligonucleotide
gaagucaccaaugaagugc

SEQ ID NO: 712176 - RNA, 19 nt, Artificial Sequence
  Description of Artificial Sequence: Synthetic oligonucleotide
cuucucguaaccaagcccc

SEQ ID NO: 712177 - RNA, 19 nt, Artificial Sequence
  Description of Artificial Sequence: Synthetic oligonucleotide
aaacuuguuggagauacag

SEQ ID NO: 712178 - RNA, 19 nt, Artificial Sequence
  Description of Artificial Sequence: Synthetic oligonucleotide
aucaucaucaucaucauca

SEQ ID NO: 712179 - RNA, 19 nt, Artificial Sequence
  Description of Artificial Sequence: Synthetic oligonucleotide
ugugacacccaccaggccc

SEQ ID NO: 712180 - RNA, 19 nt, Artificial Sequence
  Description of Artificial Sequence: Synthetic oligonucleotide
accgauuagccuuuccugc

SEQ ID NO: 712181 - RNA, 19 nt, Artificial Sequence
  Description of Artificial Sequence: Synthetic oligonucleotide
aaaaugugaaggcaggguu

SEQ ID NO: 712182 - RNA, 19 nt, Artificial Sequence
  Description of Artificial Sequence: Synthetic oligonucleotide
uuccagaauauucaguagu

SEQ ID NO: 712183 - RNA, 19 nt, Artificial Sequence
  Description of Artificial Sequence: Synthetic oligonucleotide
guaguauuuguauccuugg

SEQ ID NO: 712184 - RNA, 19 nt, Artificial Sequence
  Description of Artificial Sequence: Synthetic oligonucleotide
ucuugagacucauccaucc

SEQ ID NO: 712185 - RNA, 19 nt, Artificial Sequence
  Description of Artificial Sequence: Synthetic oligonucleotide
gauguaugugacaacauuc

SEQ ID NO: 712186 - RNA, 19 nt, Artificial Sequence
  Description of Artificial Sequence: Synthetic oligonucleotide
uggcugaucugaaagcuag

SEQ ID NO: 712187 - RNA, 19 nt, Artificial Sequence
  Description of Artificial Sequence: Synthetic oligonucleotide
uugaauuccuuguacucug

SEQ ID NO: 712188 - RNA, 19 nt, Artificial Sequence
  Description of Artificial Sequence: Synthetic oligonucleotide
uggaggauauucauauuca

SEQ ID NO: 712189 - RNA, 19 nt, Artificial Sequence
  Description of Artificial Sequence: Synthetic oligonucleotide
gaacugacagaggugacgg

SEQ ID NO: 712190 - RNA, 19 nt, Artificial Sequence
  Description of Artificial Sequence: Synthetic oligonucleotide
ugaaagcuagacuuugugu

SEQ ID NO: 712191 - RNA, 19 nt, Artificial Sequence
  Description of Artificial Sequence: Synthetic oligonucleotide
cuugcggaaggcuucauac

SEQ ID NO: 712192 - RNA, 19 nt, Artificial Sequence
  Description of Artificial Sequence: Synthetic oligonucleotide
ugcacuggcaauuucucca

SEQ ID NO: 712193 - RNA, 19 nt, Artificial Sequence
  Description of Artificial Sequence: Synthetic oligonucleotide
uguaugugacaacauucca

SEQ ID NO: 712194 - RNA, 19 nt, Artificial Sequence
  Description of Artificial Sequence: Synthetic oligonucleotide
ugaacugacagaggugacg

SEQ ID NO: 712195 - RNA, 19 nt, Artificial Sequence
  Description of Artificial Sequence: Synthetic oligonucleotide
uaguauuuguauccuuggc

SEQ ID NO: 712196 - RNA, 19 nt, Artificial Sequence
  Description of Artificial Sequence: Synthetic oligonucleotide
uaguacaggaauucccugc

SEQ ID NO: 712197 - RNA, 19 nt, Artificial Sequence
  Description of Artificial Sequence: Synthetic oligonucleotide
ugcuaguucagcagguggc

SEQ ID NO: 712198 - RNA, 19 nt, Artificial Sequence
  Description of Artificial Sequence: Synthetic oligonucleotide
ugcuauucuuaucauguaa

SEQ ID NO: 712199 - RNA, 19 nt, Artificial Sequence
  Description of Artificial Sequence: Synthetic oligonucleotide
gugacaacauuccacaguc

SEQ ID NO: 712200 - RNA, 19 nt, Artificial Sequence
  Description of Artificial Sequence: Synthetic oligonucleotide
aacuuguuggagauacagg

SEQ ID NO: 712201 - RNA, 19 nt, Artificial Sequence
  Description of Artificial Sequence: Synthetic oligonucleotide
uauucaguaguagggccgg

SEQ ID NO: 712202 - RNA, 19 nt, Artificial Sequence
  Description of Artificial Sequence: Synthetic oligonucleotide
ucagaaauugcugcaagaa

SEQ ID NO: 712203 - RNA, 19 nt, Artificial Sequence
  Description of Artificial Sequence: Synthetic oligonucleotide
gaugcuugggcggugugcg

SEQ ID NO: 712204 - RNA, 19 nt, Artificial Sequence
  Description of Artificial Sequence: Synthetic oligonucleotide
auauucaguaguagggccg

SEQ ID NO: 712205 - RNA, 19 nt, Artificial Sequence
  Description of Artificial Sequence: Synthetic oligonucleotide
uguaguccuccauagcuac

SEQ ID NO: 712206 - RNA, 19 nt, Artificial Sequence
  Description of Artificial Sequence: Synthetic oligonucleotide
uugacgguaguauuuguau

SEQ ID NO: 712207 - RNA, 19 nt, Artificial Sequence
  Description of Artificial Sequence: Synthetic oligonucleotide
ucaucaucaucaucaucag

SEQ ID NO: 712208 - RNA, 19 nt, Artificial Sequence
  Description of Artificial Sequence: Synthetic oligonucleotide
aagcuagacuuuguguuuc

SEQ ID NO: 712209 - RNA, 19 nt, Artificial Sequence
  Description of Artificial Sequence: Synthetic oligonucleotide
uccagaauauucaguagua

SEQ ID NO: 712210 - RNA, 19 nt, Artificial Sequence
  Description of Artificial Sequence: Synthetic oligonucleotide
uccuccauagcuacuuucu

SEQ ID NO: 712211 - RNA, 19 nt, Artificial Sequence
  Description of Artificial Sequence: Synthetic oligonucleotide
gugucgucgugcuaggagg

SEQ ID NO: 712212 - RNA, 19 nt, Artificial Sequence
  Description of Artificial Sequence: Synthetic oligonucleotide
uuugacgguaguauuugua

SEQ ID NO: 712213 - RNA, 19 nt, Artificial Sequence
  Description of Artificial Sequence: Synthetic oligonucleotide
gaagcgguaggccagcauc

SEQ ID NO: 712214 - RNA, 19 nt, Artificial Sequence
  Description of Artificial Sequence: Synthetic oligonucleotide
agcgccuucucccacagca

SEQ ID NO: 712215 - RNA, 19 nt, Artificial Sequence
  Description of Artificial Sequence: Synthetic oligonucleotide
augagcaucugguagccga

SEQ ID NO: 712216 - RNA, 19 nt, Artificial Sequence
  Description of Artificial Sequence: Synthetic oligonucleotide
ugcuaggagggguacuggg

SEQ ID NO: 712217 - RNA, 19 nt, Artificial Sequence
  Description of Artificial Sequence: Synthetic oligonucleotide
ugggguugacagcaggugc

SEQ ID NO: 712218 - RNA, 19 nt, Artificial Sequence
  Description of Artificial Sequence: Synthetic oligonucleotide
aaacgagccagcuucucua

SEQ ID NO: 712219 - RNA, 19 nt, Artificial Sequence
  Description of Artificial Sequence: Synthetic oligonucleotide
uucucuacugucagcuuga

SEQ ID NO: 712220 - RNA, 19 nt, Artificial Sequence
  Description of Artificial Sequence: Synthetic oligonucleotide
caugugaguaauucuucac

SEQ ID NO: 712221 - RNA, 19 nt, Artificial Sequence
  Description of Artificial Sequence: Synthetic oligonucleotide
uggagagcucagcuggccg

SEQ ID NO: 712222 - RNA, 19 nt, Artificial Sequence
  Description of Artificial Sequence: Synthetic oligonucleotide
uuuccugcaacaucccggu

SEQ ID NO: 712223 - RNA, 19 nt, Artificial Sequence
  Description of Artificial Sequence: Synthetic oligonucleotide
cuucagaaauugcugcaag

SEQ ID NO: 712224 - RNA, 19 nt, Artificial Sequence
  Description of Artificial Sequence: Synthetic oligonucleotide
uccauagcuacuuucucua

SEQ ID NO: 712225 - RNA, 19 nt, Artificial Sequence
  Description of Artificial Sequence: Synthetic oligonucleotide
cuggaagaugcuugggcgg

SEQ ID NO: 712226 - RNA, 19 nt, Artificial Sequence
  Description of Artificial Sequence: Synthetic oligonucleotide
agauguaugugacaacauu

SEQ ID NO: 712227 - RNA, 19 nt, Artificial Sequence
  Description of Artificial Sequence: Synthetic oligonucleotide
agcuagacuuuguguuucc

SEQ ID NO: 712228 - RNA, 19 nt, Artificial Sequence
  Description of Artificial Sequence: Synthetic oligonucleotide
uggagugggguugacagca

SEQ ID NO: 712229 - RNA, 19 nt, Artificial Sequence
  Description of Artificial Sequence: Synthetic oligonucleotide
uuccgccacaaaacgagcc

SEQ ID NO: 712230 - RNA, 19 nt, Artificial Sequence
  Description of Artificial Sequence: Synthetic oligonucleotide
guaugugacaacauuccac

SEQ ID NO: 712231 - RNA, 19 nt, Artificial Sequence
  Description of Artificial Sequence: Synthetic oligonucleotide
auagccgugcuggugcugc

SEQ ID NO: 712232 - RNA, 19 nt, Artificial Sequence
  Description of Artificial Sequence: Synthetic oligonucleotide
gaucauagagaaaacugaa

SEQ ID NO: 712233 - RNA, 19 nt, Artificial Sequence
  Description of Artificial Sequence: Synthetic oligonucleotide
cuacugucagcuugaauuc

SEQ ID NO: 712234 - RNA, 19 nt, Artificial Sequence
  Description of Artificial Sequence: Synthetic oligonucleotide
uugguucagggguugggcc

SEQ ID NO: 712235 - RNA, 19 nt, Artificial Sequence
  Description of Artificial Sequence: Synthetic oligonucleotide
gugcuaguucagcaggugg

SEQ ID NO: 712236 - RNA, 19 nt, Artificial Sequence
  Description of Artificial Sequence: Synthetic oligonucleotide
aguaguagggccggucugg

SEQ ID NO: 712237 - RNA, 19 nt, Artificial Sequence
  Description of Artificial Sequence: Synthetic oligonucleotide
aaugugaaggcaggguuau

SEQ ID NO: 712238 - RNA, 19 nt, Artificial Sequence
  Description of Artificial Sequence: Synthetic oligonucleotide
ugugcacuggcaauuucuc

SEQ ID NO: 712239 - RNA, 19 nt, Artificial Sequence
  Description of Artificial Sequence: Synthetic oligonucleotide
cuuuugacgguaguauuug

SEQ ID NO: 712240 - RNA, 19 nt, Artificial Sequence
  Description of Artificial Sequence: Synthetic oligonucleotide
aagucaccaaugaagugcu

SEQ ID NO: 712241 - RNA, 19 nt, Artificial Sequence
  Description of Artificial Sequence: Synthetic oligonucleotide
ugggaucauagagaaaacu

SEQ ID NO: 712242 - RNA, 19 nt, Artificial Sequence
  Description of Artificial Sequence: Synthetic oligonucleotide
agcuucucuaucacucucc

SEQ ID NO: 712243 - RNA, 19 nt, Artificial Sequence
  Description of Artificial Sequence: Synthetic oligonucleotide
ugugcgaugggcagcugcu

SEQ ID NO: 712244 - RNA, 19 nt, Artificial Sequence
  Description of Artificial Sequence: Synthetic oligonucleotide
gguaguauuuguauccuug

SEQ ID NO: 712245 - RNA, 19 nt, Artificial Sequence
  Description of Artificial Sequence: Synthetic oligonucleotide
gggaucauagagaaaacug

SEQ ID NO: 712246 - RNA, 19 nt, Artificial Sequence
  Description of Artificial Sequence: Synthetic oligonucleotide
uguggagccugccuuggcu

SEQ ID NO: 712247 - RNA, 19 nt, Artificial Sequence
  Description of Artificial Sequence: Synthetic oligonucleotide
caucaucaucaucaucagg

SEQ ID NO: 712248 - RNA, 19 nt, Artificial Sequence
  Description of Artificial Sequence: Synthetic oligonucleotide
uaguucagcagguggcagc

SEQ ID NO: 712249 - RNA, 19 nt, Artificial Sequence
  Description of Artificial Sequence: Synthetic oligonucleotide
uaucacucuccgagucucg

SEQ ID NO: 712250 - RNA, 19 nt, Artificial Sequence
  Description of Artificial Sequence: Synthetic oligonucleotide
uguccgcuugcugaguagg

SEQ ID NO: 712251 - RNA, 19 nt, Artificial Sequence
  Description of Artificial Sequence: Synthetic oligonucleotide
ugucauacaucuguugcau

SEQ ID NO: 712252 - RNA, 19 nt, Artificial Sequence
  Description of Artificial Sequence: Synthetic oligonucleotide
cuccuuccgccacaaaacg

SEQ ID NO: 712253 - RNA, 19 nt, Artificial Sequence
  Description of Artificial Sequence: Synthetic oligonucleotide
ugacgguaguauuuguauc

SEQ ID NO: 712254 - RNA, 19 nt, Artificial Sequence
  Description of Artificial Sequence: Synthetic oligonucleotide
cuugagacucauccauccc

SEQ ID NO: 712255 - RNA, 19 nt, Artificial Sequence
  Description of Artificial Sequence: Synthetic oligonucleotide
auucccugcuauucuuauc

SEQ ID NO: 712256 - RNA, 19 nt, Artificial Sequence
  Description of Artificial Sequence: Synthetic oligonucleotide
agacuugcgccgcaggcug

SEQ ID NO: 712257 - RNA, 19 nt, Artificial Sequence
  Description of Artificial Sequence: Synthetic oligonucleotide
uuuugacgguaguauuugu

SEQ ID NO: 712258 - RNA, 19 nt, Artificial Sequence
  Description of Artificial Sequence: Synthetic oligonucleotide
uaugaaccuggccaacuuu

SEQ ID NO: 712259 - RNA, 19 nt, Artificial Sequence
  Description of Artificial Sequence: Synthetic oligonucleotide
aacaucccgguuguccauc

SEQ ID NO: 712260 - RNA, 19 nt, Artificial Sequence
  Description of Artificial Sequence: Synthetic oligonucleotide
caccgauuagccuuuccug

SEQ ID NO: 712261 - RNA, 19 nt, Artificial Sequence
  Description of Artificial Sequence: Synthetic oligonucleotide
auuccacaguccaggaugg

SEQ ID NO: 712262 - RNA, 19 nt, Artificial Sequence
  Description of Artificial Sequence: Synthetic oligonucleotide
aaaugugaaggcaggguua

SEQ ID NO: 712263 - RNA, 19 nt, Artificial Sequence
  Description of Artificial Sequence: Synthetic oligonucleotide
caucuaugucccucugugc

SEQ ID NO: 712264 - RNA, 19 nt, Artificial Sequence
  Description of Artificial Sequence: Synthetic oligonucleotide
acggugaggcaucuauguc

SEQ ID NO: 712265 - RNA, 19 nt, Artificial Sequence
  Description of Artificial Sequence: Synthetic oligonucleotide
aagcuaccaucauuggcaa

SEQ ID NO: 712266 - RNA, 19 nt, Artificial Sequence
  Description of Artificial Sequence: Synthetic oligonucleotide
ugacggugaggcaucuaug

SEQ ID NO: 712267 - RNA, 19 nt, Artificial Sequence
  Description of Artificial Sequence: Synthetic oligonucleotide
cugggugucgucgugcuag

SEQ ID NO: 712268 - RNA, 19 nt, Artificial Sequence
  Description of Artificial Sequence: Synthetic oligonucleotide
ugcugcaagaagcuaccau

SEQ ID NO: 712269 - RNA, 19 nt, Artificial Sequence
  Description of Artificial Sequence: Synthetic oligonucleotide
ugcauggcgcgcuugugcu

SEQ ID NO: 712270 - RNA, 19 nt, Artificial Sequence
  Description of Artificial Sequence: Synthetic oligonucleotide
cucguaaccaagccccuug

SEQ ID NO: 712271 - RNA, 19 nt, Artificial Sequence
  Description of Artificial Sequence: Synthetic oligonucleotide
ucaucaucaucaucaucau

SEQ ID NO: 712272 - RNA, 19 nt, Artificial Sequence
  Description of Artificial Sequence: Synthetic oligonucleotide
ggaucauagagaaaacuga

SEQ ID NO: 712273 - RNA, 19 nt, Artificial Sequence
  Description of Artificial Sequence: Synthetic oligonucleotide
gaggggucucuucaaggug

SEQ ID NO: 712274 - RNA, 19 nt, Artificial Sequence
  Description of Artificial Sequence: Synthetic oligonucleotide
uggccggucaaugccaaag

SEQ ID NO: 712275 - RNA, 19 nt, Artificial Sequence
  Description of Artificial Sequence: Synthetic oligonucleotide
uguagcgccuucucccaca

SEQ ID NO: 712276 - RNA, 19 nt, Artificial Sequence
  Description of Artificial Sequence: Synthetic oligonucleotide
ugaaacuuucagggcagcu

SEQ ID NO: 712277 - RNA, 19 nt, Artificial Sequence
  Description of Artificial Sequence: Synthetic oligonucleotide
ggcaauuucuccaggauga

SEQ ID NO: 712278 - RNA, 19 nt, Artificial Sequence
  Description of Artificial Sequence: Synthetic oligonucleotide
guaauucuucacagggccc

SEQ ID NO: 712279 - RNA, 19 nt, Artificial Sequence
  Description of Artificial Sequence: Synthetic oligonucleotide
cuaugucccucugugcuag

SEQ ID NO: 712280 - RNA, 19 nt, Artificial Sequence
  Description of Artificial Sequence: Synthetic oligonucleotide
uacaggaguuaugugcacu

SEQ ID NO: 712281 - RNA, 19 nt, Artificial Sequence
  Description of Artificial Sequence: Synthetic oligonucleotide
ucguaaccaagccccuuga

SEQ ID NO: 712282 - RNA, 19 nt, Artificial Sequence
  Description of Artificial Sequence: Synthetic oligonucleotide
  modified_base (7)..(7): a, c, u, g, unknown or other
ggggcunugggcuggcugc

SEQ ID NO: 712283 - RNA, 19 nt, Artificial Sequence
  Description of Artificial Sequence: Synthetic oligonucleotide
ggcugugccaucccaaacc

SEQ ID NO: 712284 - RNA, 19 nt, Artificial Sequence
  Description of Artificial Sequence: Synthetic oligonucleotide
ggugucgucgugcuaggag

SEQ ID NO: 712285 - RNA, 19 nt, Artificial Sequence
  Description of Artificial Sequence: Synthetic oligonucleotide
cuuccgccacaaaacgagc

SEQ ID NO: 712286 - RNA, 19 nt, Artificial Sequence
  Description of Artificial Sequence: Synthetic oligonucleotide
cuggcugcaugacucugcc

SEQ ID NO: 712287 - RNA, 19 nt, Artificial Sequence
  Description of Artificial Sequence: Synthetic oligonucleotide
uugcggaaggcuucauacu

SEQ ID NO: 712288 - RNA, 19 nt, Artificial Sequence
  Description of Artificial Sequence: Synthetic oligonucleotide
gacggugaggcaucuaugu

SEQ ID NO: 712289 - RNA, 19 nt, Artificial Sequence
  Description of Artificial Sequence: Synthetic oligonucleotide
ucuaugucccucugugcua

SEQ ID NO: 712290 - RNA, 19 nt, Artificial Sequence
  Description of Artificial Sequence: Synthetic oligonucleotide
caaaccaccgauuagccuu

SEQ ID NO: 712291 - RNA, 19 nt, Artificial Sequence
  Description of Artificial Sequence: Synthetic oligonucleotide
aagaugcuugggcggugug

SEQ ID NO: 712292 - RNA, 19 nt, Artificial Sequence
  Description of Artificial Sequence: Synthetic oligonucleotide
uccgcuugcugaguaggag

SEQ ID NO: 712293 - RNA, 19 nt, Artificial Sequence
  Description of Artificial Sequence: Synthetic oligonucleotide
agcuuuugacgguaguauu

SEQ ID NO: 712294 - RNA, 19 nt, Artificial Sequence
  Description of Artificial Sequence: Synthetic oligonucleotide
cuucacaguggcuguggug

SEQ ID NO: 712295 - RNA, 19 nt, Artificial Sequence
  Description of Artificial Sequence: Synthetic oligonucleotide
uacugugguggcucccuug

SEQ ID NO: 712296 - RNA, 19 nt, Artificial Sequence
  Description of Artificial Sequence: Synthetic oligonucleotide
aaggccugguucucacggu

SEQ ID NO: 712297 - RNA, 19 nt, Artificial Sequence
  Description of Artificial Sequence: Synthetic oligonucleotide
ucacucuccgagucucggc

SEQ ID NO: 712298 - RNA, 19 nt, Artificial Sequence
  Description of Artificial Sequence: Synthetic oligonucleotide
uccagcuuuugacgguagu

SEQ ID NO: 712299 - RNA, 19 nt, Artificial Sequence
  Description of Artificial Sequence: Synthetic oligonucleotide
uggaagaugcuugggcggu

SEQ ID NO: 712300 - RNA, 19 nt, Artificial Sequence
  Description of Artificial Sequence: Synthetic oligonucleotide
acucuccgagucucggcuc

SEQ ID NO: 712301 - RNA, 19 nt, Artificial Sequence
  Description of Artificial Sequence: Synthetic oligonucleotide
uucucguaaccaagccccu

SEQ ID NO: 712302 - RNA, 19 nt, Artificial Sequence
  Description of Artificial Sequence: Synthetic oligonucleotide
cucucggcccuccuucagg

SEQ ID NO: 712303 - RNA, 19 nt, Artificial Sequence
  Description of Artificial Sequence: Synthetic oligonucleotide
cuuugaucuccagccacug

SEQ ID NO: 712304 - RNA, 19 nt, Artificial Sequence
  Description of Artificial Sequence: Synthetic oligonucleotide
ccgucugcuaugaaccugg

SEQ ID NO: 712305 - RNA, 19 nt, Artificial Sequence
  Description of Artificial Sequence: Synthetic oligonucleotide
caucaucaucaucaucauc

SEQ ID NO: 712306 - RNA, 19 nt, Artificial Sequence
  Description of Artificial Sequence: Synthetic oligonucleotide
gggugaaacuuugaucucc

SEQ ID NO: 712307 - RNA, 19 nt, Artificial Sequence
  Description of Artificial Sequence: Synthetic oligonucleotide
gugugcgaugggcagcugc

SEQ ID NO: 712308 - RNA, 19 nt, Artificial Sequence
  Description of Artificial Sequence: Synthetic oligonucleotide
ugggugucgucgugcuagg

SEQ ID NO: 712309 - RNA, 19 nt, Artificial Sequence
  Description of Artificial Sequence: Synthetic oligonucleotide
aucuacugugguggcuccc

SEQ ID NO: 712310 - RNA, 19 nt, Artificial Sequence
  Description of Artificial Sequence: Synthetic oligonucleotide
  modified_base (3)..(3): a, c, u, g, unknown or other
cunugggcuggcugcauga

SEQ ID NO: 712311 - RNA, 19 nt, Artificial Sequence
  Description of Artificial Sequence: Synthetic oligonucleotide
cugaacugacagaggugac

SEQ ID NO: 712312 - RNA, 19 nt, Artificial Sequence
  Description of Artificial Sequence: Synthetic oligonucleotide
caugcgccgcagcuggugc

SEQ ID NO: 712313 - RNA, 19 nt, Artificial Sequence
  Description of Artificial Sequence: Synthetic oligonucleotide
caccaaugaagugcuugcc

SEQ ID NO: 712314 - RNA, 19 nt, Artificial Sequence
  Description of Artificial Sequence: Synthetic oligonucleotide
gcuauucuuaucauguaaa

SEQ ID NO: 712315 - RNA, 19 nt, Artificial Sequence
  Description of Artificial Sequence: Synthetic oligonucleotide
ugggcggugugcgaugggc

SEQ ID NO: 712316 - RNA, 19 nt, Artificial Sequence
  Description of Artificial Sequence: Synthetic oligonucleotide
caggggcagacuugcgccg

SEQ ID NO: 712317 - RNA, 19 nt, Artificial Sequence
  Description of Artificial Sequence: Synthetic oligonucleotide
gagucucggcucccucugg

SEQ ID NO: 712318 - RNA, 19 nt, Artificial Sequence
  Description of Artificial Sequence: Synthetic oligonucleotide
cuugccgcgacccaucugu

SEQ ID NO: 712319 - RNA, 19 nt, Artificial Sequence
  Description of Artificial Sequence: Synthetic oligonucleotide
acgguaguauuuguauccu

SEQ ID NO: 712320 - RNA, 19 nt, Artificial Sequence
  Description of Artificial Sequence: Synthetic oligonucleotide
guagcgccuucucccacag

SEQ ID NO: 712321 - RNA, 19 nt, Artificial Sequence
  Description of Artificial Sequence: Synthetic oligonucleotide
caucccaaaccaccgauua

SEQ ID NO: 712322 - RNA, 19 nt, Artificial Sequence
  Description of Artificial Sequence: Synthetic oligonucleotide
ccuccuuccgccacaaaac

SEQ ID NO: 712323 - RNA, 19 nt, Artificial Sequence
  Description of Artificial Sequence: Synthetic oligonucleotide
uagcucggggccuccuucc

SEQ ID NO: 712324 - RNA, 19 nt, Artificial Sequence
  Description of Artificial Sequence: Synthetic oligonucleotide
gcaugugaguaauucuuca

SEQ ID NO: 712325 - RNA, 19 nt, Artificial Sequence
  Description of Artificial Sequence: Synthetic oligonucleotide
uuaugugcacuggcaauuu

SEQ ID NO: 712326 - RNA, 19 nt, Artificial Sequence
  Description of Artificial Sequence: Synthetic oligonucleotide
uaccaucauuggcaaacuu

SEQ ID NO: 712327 - RNA, 19 nt, Artificial Sequence
  Description of Artificial Sequence: Synthetic oligonucleotide
gucucggcucccucugggg

SEQ ID NO: 712328 - RNA, 19 nt, Artificial Sequence
  Description of Artificial Sequence: Synthetic oligonucleotide
agguuuccccuucucguaa

SEQ ID NO: 712329 - RNA, 19 nt, Artificial Sequence
  Description of Artificial Sequence: Synthetic oligonucleotide
cuuuguguuuccagaauau

SEQ ID NO: 712330 - RNA, 19 nt, Artificial Sequence
  Description of Artificial Sequence: Synthetic oligonucleotide
ugggcugugccaucccaaa

SEQ ID NO: 712331 - RNA, 19 nt, Artificial Sequence
  Description of Artificial Sequence: Synthetic oligonucleotide
ucauagccgugcuggugcu

SEQ ID NO: 712332 - RNA, 19 nt, Artificial Sequence
  Description of Artificial Sequence: Synthetic oligonucleotide
agacuugggcugugccauc

SEQ ID NO: 712333 - RNA, 19 nt, Artificial Sequence
  Description of Artificial Sequence: Synthetic oligonucleotide
aggggcagacuugcgccgc

SEQ ID NO: 712334 - RNA, 19 nt, Artificial Sequence
  Description of Artificial Sequence: Synthetic oligonucleotide
cuccaucuacugugguggc

SEQ ID NO: 712335 - RNA, 19 nt, Artificial Sequence
  Description of Artificial Sequence: Synthetic oligonucleotide
cauuggcaaacuuguugga

SEQ ID NO: 712336 - RNA, 19 nt, Artificial Sequence
  Description of Artificial Sequence: Synthetic oligonucleotide
cuagcucggggccuccuuc

SEQ ID NO: 712337 - RNA, 19 nt, Artificial Sequence
  Description of Artificial Sequence: Synthetic oligonucleotide
agcucggggccuccuuccg

SEQ ID NO: 712338 - RNA, 19 nt, Artificial Sequence
  Description of Artificial Sequence: Synthetic oligonucleotide
  modified_base (2)..(2): a, c, u, g, unknown or other
unugggcuggcugcaugac

SEQ ID NO: 712339 - RNA, 19 nt, Artificial Sequence
  Description of Artificial Sequence: Synthetic oligonucleotide
ugcuugccgcgacccaucu

SEQ ID NO: 712340 - RNA, 19 nt, Artificial Sequence
  Description of Artificial Sequence: Synthetic oligonucleotide
cuguccgcuugcugaguag

SEQ ID NO: 712341 - RNA, 19 nt, Artificial Sequence
  Description of Artificial Sequence: Synthetic oligonucleotide
uugggcggugugcgauggg

SEQ ID NO: 712342 - RNA, 19 nt, Artificial Sequence
  Description of Artificial Sequence: Synthetic oligonucleotide
ucgucgugcuaggaggggu

SEQ ID NO: 712343 - RNA, 19 nt, Artificial Sequence
  Description of Artificial Sequence: Synthetic oligonucleotide
cuucugagcgaugagcucu

SEQ ID NO: 712344 - RNA, 19 nt, Artificial Sequence
  Description of Artificial Sequence: Synthetic oligonucleotide
cugaucugaaagcuagacu

SEQ ID NO: 712345 - RNA, 19 nt, Artificial Sequence
  Description of Artificial Sequence: Synthetic oligonucleotide
ugguagccgauguucucua

SEQ ID NO: 712346 - RNA, 19 nt, Artificial Sequence
  Description of Artificial Sequence: Synthetic oligonucleotide
ugcuaugaaccuggccaac

SEQ ID NO: 712347 - RNA, 19 nt, Artificial Sequence
  Description of Artificial Sequence: Synthetic oligonucleotide
aaaccaccgauuagccuuu

SEQ ID NO: 712348 - RNA, 19 nt, Artificial Sequence
  Description of Artificial Sequence: Synthetic oligonucleotide
gccgauguucucuacuguc

SEQ ID NO: 712349 - RNA, 19 nt, Artificial Sequence
  Description of Artificial Sequence: Synthetic oligonucleotide
cugcuaugaaccuggccaa

SEQ ID NO: 712350 - RNA, 19 nt, Artificial Sequence
  Description of Artificial Sequence: Synthetic oligonucleotide
ucucuucaaggugcugggu

SEQ ID NO: 712351 - RNA, 19 nt, Artificial Sequence
  Description of Artificial Sequence: Synthetic oligonucleotide
ucuagcucggggccuccuu

SEQ ID NO: 712352 - RNA, 19 nt, Artificial Sequence
  Description of Artificial Sequence: Synthetic oligonucleotide
guugggccggaagcgguag

SEQ ID NO: 712353 - RNA, 19 nt, Artificial Sequence
  Description of Artificial Sequence: Synthetic oligonucleotide
ggcggugugcgaugggcag

SEQ ID NO: 712354 - RNA, 19 nt, Artificial Sequence
  Description of Artificial Sequence: Synthetic oligonucleotide
uggcucccuuguucacugg

SEQ ID NO: 712355 - RNA, 19 nt, Artificial Sequence
  Description of Artificial Sequence: Synthetic oligonucleotide
uugccgcgacccaucugug

SEQ ID NO: 712356 - RNA, 19 nt, Artificial Sequence
  Description of Artificial Sequence: Synthetic oligonucleotide
cuggguucuugaugcccug

SEQ ID NO: 712357 - RNA, 19 nt, Artificial Sequence
  Description of Artificial Sequence: Synthetic oligonucleotide
ucccugcuauucuuaucau

SEQ ID NO: 712358 - RNA, 19 nt, Artificial Sequence
  Description of Artificial Sequence: Synthetic oligonucleotide
guuaugugcacuggcaauu

SEQ ID NO: 712359 - RNA, 19 nt, Artificial Sequence
  Description of Artificial Sequence: Synthetic oligonucleotide
gucgucgugcuaggagggg

SEQ ID NO: 712360 - RNA, 19 nt, Artificial Sequence
  Description of Artificial Sequence: Synthetic oligonucleotide
ugccgcgacccaucugugu

SEQ ID NO: 712361 - RNA, 19 nt, Artificial Sequence
  Description of Artificial Sequence: Synthetic oligonucleotide
auggauggagugggguuga

SEQ ID NO: 712362 - RNA, 19 nt, Artificial Sequence
  Description of Artificial Sequence: Synthetic oligonucleotide
uccgagucucggcucccuc

SEQ ID NO: 712363 - RNA, 19 nt, Artificial Sequence
  Description of Artificial Sequence: Synthetic oligonucleotide
cccugcuauucuuaucaug

SEQ ID NO: 712364 - RNA, 19 nt, Artificial Sequence
  Description of Artificial Sequence: Synthetic oligonucleotide
cccuucucguaaccaagcc

SEQ ID NO: 712365 - RNA, 19 nt, Artificial Sequence
  Description of Artificial Sequence: Synthetic oligonucleotide
ccccuucucguaaccaagc

SEQ ID NO: 712366 - RNA, 19 nt, Artificial Sequence
  Description of Artificial Sequence: Synthetic oligonucleotide
cccuugagauccugaacug

SEQ ID NO: 712367 - RNA, 19 nt, Artificial Sequence
  Description of Artificial Sequence: Synthetic oligonucleotide
gguuuccccuucucguaac

SEQ ID NO: 712368 - RNA, 19 nt, Artificial Sequence
  Description of Artificial Sequence: Synthetic oligonucleotide
ccaucuacugugguggcuc

SEQ ID NO: 712369 - RNA, 19 nt, Artificial Sequence
  Description of Artificial Sequence: Synthetic oligonucleotide
cacgguuguucuggagggc

SEQ ID NO: 712370 - RNA, 19 nt, Artificial Sequence
  Description of Artificial Sequence: Synthetic oligonucleotide
ucucguaaccaagccccuu

SEQ ID NO: 712371 - RNA, 19 nt, Artificial Sequence
  Description of Artificial Sequence: Synthetic oligonucleotide
cugcuuggcaugugaguaa

SEQ ID NO: 712372 - RNA, 19 nt, Artificial Sequence
  Description of Artificial Sequence: Synthetic oligonucleotide
ucucuacugucagcuugaa

SEQ ID NO: 712373 - RNA, 19 nt, Artificial Sequence
  Description of Artificial Sequence: Synthetic oligonucleotide
cuguagcgccuucucccac

SEQ ID NO: 712374 - RNA, 19 nt, Artificial Sequence
  Description of Artificial Sequence: Synthetic oligonucleotide
ggggcaagaagucaccaau

SEQ ID NO: 712375 - RNA, 19 nt, Artificial Sequence
  Description of Artificial Sequence: Synthetic oligonucleotide
ccgauguucucuacuguca

SEQ ID NO: 712376 - RNA, 19 nt, Artificial Sequence
  Description of Artificial Sequence: Synthetic oligonucleotide
gaagaugcuugggcggugu

SEQ ID NO: 712377 - RNA, 19 nt, Artificial Sequence
  Description of Artificial Sequence: Synthetic oligonucleotide
caccgacucuuccgcuucc

SEQ ID NO: 712378 - RNA, 19 nt, Artificial Sequence
  Description of Artificial Sequence: Synthetic oligonucleotide
cagguuuccccuucucgua

SEQ ID NO: 712379 - RNA, 19 nt, Artificial Sequence
  Description of Artificial Sequence: Synthetic oligonucleotide
agccugccuuggcuuuccg

SEQ ID NO: 712380 - RNA, 19 nt, Artificial Sequence
  Description of Artificial Sequence: Synthetic oligonucleotide
gccgcgacccaucuguguc

SEQ ID NO: 712381 - RNA, 19 nt, Artificial Sequence
  Description of Artificial Sequence: Synthetic oligonucleotide
ucgugcuaggagggguacu

SEQ ID NO: 712382 - RNA, 19 nt, Artificial Sequence
  Description of Artificial Sequence: Synthetic oligonucleotide
cacucuccgagucucggcu

SEQ ID NO: 712383 - RNA, 19 nt, Artificial Sequence
  Description of Artificial Sequence: Synthetic oligonucleotide
ggggugaaacuuugaucuc

SEQ ID NO: 712384 - RNA, 19 nt, Artificial Sequence
  Description of Artificial Sequence: Synthetic oligonucleotide
guacaggaauucccugcua

SEQ ID NO: 712385 - RNA, 19 nt, Artificial Sequence
  Description of Artificial Sequence: Synthetic oligonucleotide
gguagccgauguucucuac

SEQ ID NO: 712386 - RNA, 19 nt, Artificial Sequence
  Description of Artificial Sequence: Synthetic oligonucleotide
cuguuccauucuggccucg

SEQ ID NO: 712387 - RNA, 19 nt, Artificial Sequence
  Description of Artificial Sequence: Synthetic oligonucleotide
gucgugcuaggagggguac

SEQ ID NO: 712388 - RNA, 19 nt, Artificial Sequence
  Description of Artificial Sequence: Synthetic oligonucleotide
auucaguaguagggccggu

SEQ ID NO: 712389 - RNA, 19 nt, Artificial Sequence
  Description of Artificial Sequence: Synthetic oligonucleotide
cuggcaauuucuccaggau

SEQ ID NO: 712390 - RNA, 19 nt, Artificial Sequence
  Description of Artificial Sequence: Synthetic oligonucleotide
acucccgggucuuguccau

SEQ ID NO: 712391 - RNA, 19 nt, Artificial Sequence
  Description of Artificial Sequence: Synthetic oligonucleotide
ccgauuagccuuuccugca

SEQ ID NO: 712392 - RNA, 19 nt, Artificial Sequence
  Description of Artificial Sequence: Synthetic oligonucleotide
cugguagccgauguucucu

SEQ ID NO: 712393 - RNA, 19 nt, Artificial Sequence
  Description of Artificial Sequence: Synthetic oligonucleotide
ccucaucaucaucaucauc

SEQ ID NO: 712394 - RNA, 19 nt, Artificial Sequence
  Description of Artificial Sequence: Synthetic oligonucleotide
ggcgcgcuugugcugcaug

SEQ ID NO: 712395 - RNA, 19 nt, Artificial Sequence
  Description of Artificial Sequence: Synthetic oligonucleotide
ucugagcgaugagcucuuc

SEQ ID NO: 712396 - RNA, 19 nt, Artificial Sequence
  Description of Artificial Sequence: Synthetic oligonucleotide
uagccgugcuggugcugcu

SEQ ID NO: 712397 - RNA, 19 nt, Artificial Sequence
  Description of Artificial Sequence: Synthetic oligonucleotide
ggaagaugcuugggcggug

SEQ ID NO: 712398 - RNA, 19 nt, Artificial Sequence
  Description of Artificial Sequence: Synthetic oligonucleotide
cgugcuaggagggguacug

SEQ ID NO: 712399 - RNA, 19 nt, Artificial Sequence
  Description of Artificial Sequence: Synthetic oligonucleotide
ccgccacaaaacgagccag

SEQ ID NO: 712400 - RNA, 19 nt, Artificial Sequence
  Description of Artificial Sequence: Synthetic oligonucleotide
ggauggagugggguugaca

SEQ ID NO: 712401 - RNA, 19 nt, Artificial Sequence
  Description of Artificial Sequence: Synthetic oligonucleotide
guccgcuugcugaguagga

SEQ ID NO: 712402 - RNA, 19 nt, Artificial Sequence
  Description of Artificial Sequence: Synthetic oligonucleotide
cuaccaucauuggcaaacu

SEQ ID NO: 712403 - RNA, 19 nt, Artificial Sequence
  Description of Artificial Sequence: Synthetic oligonucleotide
gcuaugaaccuggccaacu

SEQ ID NO: 712404 - RNA, 19 nt, Artificial Sequence
  Description of Artificial Sequence: Synthetic oligonucleotide
guggagccugccuuggcuu

SEQ ID NO: 712405 - RNA, 19 nt, Artificial Sequence
  Description of Artificial Sequence: Synthetic oligonucleotide
caucaggggacuggaagau

SEQ ID NO: 712406 - RNA, 19 nt, Artificial Sequence
  Description of Artificial Sequence: Synthetic oligonucleotide
gcgcgcuugugcugcauga

SEQ ID NO: 712407 - RNA, 19 nt, Artificial Sequence
  Description of Artificial Sequence: Synthetic oligonucleotide
cagacuugcgccgcaggcu

SEQ ID NO: 712408 - RNA, 19 nt, Artificial Sequence
  Description of Artificial Sequence: Synthetic oligonucleotide
ccaccgacucuuccgcuuc

SEQ ID NO: 712409 - RNA, 19 nt, Artificial Sequence
  Description of Artificial Sequence: Synthetic oligonucleotide
gggguugacagcaggugcu

SEQ ID NO: 712410 - RNA, 19 nt, Artificial Sequence
  Description of Artificial Sequence: Synthetic oligonucleotide
ccaccgauuagccuuuccu

SEQ ID NO: 712411 - RNA, 19 nt, Artificial Sequence
  Description of Artificial Sequence: Synthetic oligonucleotide
cucccuuguucacuggguu

SEQ ID NO: 712412 - RNA, 19 nt, Artificial Sequence
  Description of Artificial Sequence: Synthetic oligonucleotide
gcgguaggccagcaucauc

SEQ ID NO: 712413 - RNA, 19 nt, Artificial Sequence
  Description of Artificial Sequence: Synthetic oligonucleotide
cgagucucggcucccucug

SEQ ID NO: 712414 - RNA, 19 nt, Artificial Sequence
  Description of Artificial Sequence: Synthetic oligonucleotide
uucagggguugggccggaa

SEQ ID NO: 712415 - RNA, 19 nt, Artificial Sequence
  Description of Artificial Sequence: Synthetic oligonucleotide
cccgucugcuaugaaccug

SEQ ID NO: 712416 - RNA, 19 nt, Artificial Sequence
  Description of Artificial Sequence: Synthetic oligonucleotide
gccaucccaaaccaccgau

SEQ ID NO: 712417 - RNA, 19 nt, Artificial Sequence
  Description of Artificial Sequence: Synthetic oligonucleotide
gcuugccgcgacccaucug

SEQ ID NO: 712418 - RNA, 19 nt, Artificial Sequence
  Description of Artificial Sequence: Synthetic oligonucleotide
gcggugugcgaugggcagc

SEQ ID NO: 712419 - RNA, 19 nt, Artificial Sequence
  Description of Artificial Sequence: Synthetic oligonucleotide
ccaaaccaccgauuagccu

SEQ ID NO: 712420 - RNA, 19 nt, Artificial Sequence
  Description of Artificial Sequence: Synthetic oligonucleotide
gguggaggauauucauauu

SEQ ID NO: 712421 - RNA, 19 nt, Artificial Sequence
  Description of Artificial Sequence: Synthetic oligonucleotide
guagggccggucugggguu

SEQ ID NO: 712422 - RNA, 19 nt, Artificial Sequence
  Description of Artificial Sequence: Synthetic oligonucleotide
gggagacuguggagccugc

SEQ ID NO: 712423 - RNA, 19 nt, Artificial Sequence
  Description of Artificial Sequence: Synthetic oligonucleotide
ccgacucuuccgcuuccuc

SEQ ID NO: 712424 - RNA, 19 nt, Artificial Sequence
  Description of Artificial Sequence: Synthetic oligonucleotide
cgucugcuaugaaccuggc

SEQ ID NO: 712425 - RNA, 19 nt, Artificial Sequence
  Description of Artificial Sequence: Synthetic oligonucleotide
cuggccggucaaugccaaa

SEQ ID NO: 712426 - RNA, 19 nt, Artificial Sequence
  Description of Artificial Sequence: Synthetic oligonucleotide
ggggcagacuugcgccgca

SEQ ID NO: 712427 - RNA, 19 nt, Artificial Sequence
  Description of Artificial Sequence: Synthetic oligonucleotide
gugaggcaucuaugucccu

SEQ ID NO: 712428 - RNA, 19 nt, Artificial Sequence
  Description of Artificial Sequence: Synthetic oligonucleotide
ccgaaacuccuccagcuuu

SEQ ID NO: 712429 - RNA, 19 nt, Artificial Sequence
  Description of Artificial Sequence: Synthetic oligonucleotide
ggaagcgguaggccagcau

SEQ ID NO: 712430 - RNA, 19 nt, Artificial Sequence
  Description of Artificial Sequence: Synthetic oligonucleotide
gcucccuuguucacugggu

SEQ ID NO: 712431 - RNA, 19 nt, Artificial Sequence
  Description of Artificial Sequence: Synthetic oligonucleotide
cgcgacccaucugugucag

SEQ ID NO: 712432 - RNA, 19 nt, Artificial Sequence
  Description of Artificial Sequence: Synthetic oligonucleotide
ccaaagccagcuccaucua

SEQ ID NO: 712433 - RNA, 19 nt, Artificial Sequence
  Description of Artificial Sequence: Synthetic oligonucleotide
cuacugugguggcucccuu

SEQ ID NO: 712434 - RNA, 19 nt, Artificial Sequence
  Description of Artificial Sequence: Synthetic oligonucleotide
gccgcaggcugggguuggg

SEQ ID NO: 712435 - RNA, 19 nt, Artificial Sequence
  Description of Artificial Sequence: Synthetic oligonucleotide
gggugucgucgugcuagga

SEQ ID NO: 712436 - RNA, 19 nt, Artificial Sequence
  Description of Artificial Sequence: Synthetic oligonucleotide
ccgagucucggcucccucu

SEQ ID NO: 712437 - RNA, 19 nt, Artificial Sequence
  Description of Artificial Sequence: Synthetic oligonucleotide
gcugggugucgucgugcua

SEQ ID NO: 712438 - RNA, 19 nt, Artificial Sequence
  Description of Artificial Sequence: Synthetic oligonucleotide
ccaucccaaaccaccgauu

SEQ ID NO: 712439 - RNA, 19 nt, Artificial Sequence
  Description of Artificial Sequence: Synthetic oligonucleotide
cgucgugcuaggaggggua

SEQ ID NO: 712440 - RNA, 19 nt, Artificial Sequence
  Description of Artificial Sequence: Synthetic oligonucleotide
ggugacggugaggcaucua

SEQ ID NO: 712441 - RNA, 19 nt, Artificial Sequence
  Description of Artificial Sequence: Synthetic oligonucleotide
cuccgagucucggcucccu

SEQ ID NO: 712442 - RNA, 19 nt, Artificial Sequence
  Description of Artificial Sequence: Synthetic oligonucleotide
gugcgaugggcagcugcuu

SEQ ID NO: 712443 - RNA, 19 nt, Artificial Sequence
  Description of Artificial Sequence: Synthetic oligonucleotide
ccccgucugcuaugaaccu

SEQ ID NO: 712444 - RNA, 19 nt, Artificial Sequence
  Description of Artificial Sequence: Synthetic oligonucleotide
cccaccgacucuuccgcuu

SEQ ID NO: 712445 - RNA, 19 nt, Artificial Sequence
  Description of Artificial Sequence: Synthetic oligonucleotide
ggcccacagguuuccccuu

SEQ ID NO: 712446 - RNA, 19 nt, Artificial Sequence
  Description of Artificial Sequence: Synthetic oligonucleotide
ggggugcaucuguguuugu

SEQ ID NO: 712447 - RNA, 19 nt, Artificial Sequence
  Description of Artificial Sequence: Synthetic oligonucleotide
cgccgcaggcugggguugg

SEQ ID NO: 712448 - RNA, 19 nt, Artificial Sequence
  Description of Artificial Sequence: Synthetic oligonucleotide
ccgcaggcugggguuggga

SEQ ID NO: 712449 - RNA, 19 nt, Artificial Sequence
  Description of Artificial Sequence: Synthetic oligonucleotide
gccuguccgcuugcugagu

SEQ ID NO: 712450 - RNA, 19 nt, Artificial Sequence
  Description of Artificial Sequence: Synthetic oligonucleotide
ccccaccgacucuuccgcu

SEQ ID NO: 712451 - RNA, 19 nt, Artificial Sequence
  Description of Artificial Sequence: Synthetic oligonucleotide
aaaggcaagacuuggaccc

SEQ ID NO: 712452 - RNA, 19 nt, Artificial Sequence
  Description of Artificial Sequence: Synthetic oligonucleotide
uguaaaauuacccauuuac

SEQ ID NO: 712453 - RNA, 19 nt, Artificial Sequence
  Description of Artificial Sequence: Synthetic oligonucleotide
uguaguuucuaaaaugccg

SEQ ID NO: 712454 - RNA, 19 nt, Artificial Sequence
  Description of Artificial Sequence: Synthetic oligonucleotide
aucuauacagcucacacac

SEQ ID NO: 712455 - RNA, 19 nt, Artificial Sequence
  Description of Artificial Sequence: Synthetic oligonucleotide
uguacauuuauacacuuca

SEQ ID NO: 712456 - RNA, 19 nt, Artificial Sequence
  Description of Artificial Sequence: Synthetic oligonucleotide
ugugacauuuauuugcugg

SEQ ID NO: 712457 - RNA, 19 nt, Artificial Sequence
  Description of Artificial Sequence: Synthetic oligonucleotide
cauuaugguagcaagaagc

SEQ ID NO: 712458 - RNA, 19 nt, Artificial Sequence
  Description of Artificial Sequence: Synthetic oligonucleotide
uacacuaugaccuagggua

SEQ ID NO: 712459 - RNA, 19 nt, Artificial Sequence
  Description of Artificial Sequence: Synthetic oligonucleotide
accauaaauacacuggcgg

SEQ ID NO: 712460 - RNA, 19 nt, Artificial Sequence
  Description of Artificial Sequence: Synthetic oligonucleotide
ugacgugacaucuauacag

SEQ ID NO: 712461 - RNA, 19 nt, Artificial Sequence
  Description of Artificial Sequence: Synthetic oligonucleotide
aaaaugccgaucugcagac

SEQ ID NO: 712462 - RNA, 19 nt, Artificial Sequence
  Description of Artificial Sequence: Synthetic oligonucleotide
uaugguagcaagaagcaca

SEQ ID NO: 712463 - RNA, 19 nt, Artificial Sequence
  Description of Artificial Sequence: Synthetic oligonucleotide
ucugguuacagguauacca

SEQ ID NO: 712464 - RNA, 19 nt, Artificial Sequence
  Description of Artificial Sequence: Synthetic oligonucleotide
gacauguuuaauccgaacc

SEQ ID NO: 712465 - RNA, 19 nt, Artificial Sequence
  Description of Artificial Sequence: Synthetic oligonucleotide
uauuagaugcauucucucg

SEQ ID NO: 712466 - RNA, 19 nt, Artificial Sequence
  Description of Artificial Sequence: Synthetic oligonucleotide
aauaguuugugacauuuau

SEQ ID NO: 712467 - RNA, 19 nt, Artificial Sequence
  Description of Artificial Sequence: Synthetic oligonucleotide
auuuuauagacacucaaau

SEQ ID NO: 712468 - RNA, 19 nt, Artificial Sequence
  Description of Artificial Sequence: Synthetic oligonucleotide
aauacgaaucugaccaucc

SEQ ID NO: 712469 - RNA, 19 nt, Artificial Sequence
  Description of Artificial Sequence: Synthetic oligonucleotide
aaugccgaucugcagacuc

SEQ ID NO: 712470 - RNA, 19 nt, Artificial Sequence
  Description of Artificial Sequence: Synthetic oligonucleotide
ugucauguaaaauuaccca

SEQ ID NO: 712471 - RNA, 19 nt, Artificial Sequence
  Description of Artificial Sequence: Synthetic oligonucleotide
uuauuugcuggcauggaug

SEQ ID NO: 712472 - RNA, 19 nt, Artificial Sequence
  Description of Artificial Sequence: Synthetic oligonucleotide
uauacuuccuuauuacgug

SEQ ID NO: 712473 - RNA, 19 nt, Artificial Sequence
  Description of Artificial Sequence: Synthetic oligonucleotide
uguuaaaauuaaaugcuaa

SEQ ID NO: 712474 - RNA, 19 nt, Artificial Sequence
  Description of Artificial Sequence: Synthetic oligonucleotide
uuugguuuaugguugaguc

SEQ ID NO: 712475 - RNA, 19 nt, Artificial Sequence
  Description of Artificial Sequence: Synthetic oligonucleotide
uacacuucauauaaguuaa

SEQ ID NO: 712476 - RNA, 19 nt, Artificial Sequence
  Description of Artificial Sequence: Synthetic oligonucleotide
cuugacgugacaucuauac

SEQ ID NO: 712477 - RNA, 19 nt, Artificial Sequence
  Description of Artificial Sequence: Synthetic oligonucleotide
cuucauauaaguuaaaggu

SEQ ID NO: 712478 - RNA, 19 nt, Artificial Sequence
  Description of Artificial Sequence: Synthetic oligonucleotide
uuacgugagaucaauaaua

SEQ ID NO: 712479 - RNA, 19 nt, Artificial Sequence
  Description of Artificial Sequence: Synthetic oligonucleotide
uauuacgugagaucaauaa

SEQ ID NO: 712480 - RNA, 19 nt, Artificial Sequence
  Description of Artificial Sequence: Synthetic oligonucleotide
auacagcucacacacacag

SEQ ID NO: 712481 - RNA, 19 nt, Artificial Sequence
  Description of Artificial Sequence: Synthetic oligonucleotide
aguacgugggcucauuggg

SEQ ID NO: 712482 - RNA, 19 nt, Artificial Sequence
  Description of Artificial Sequence: Synthetic oligonucleotide
uuuuauagacacucaaauc

SEQ ID NO: 712483 - RNA, 19 nt, Artificial Sequence
  Description of Artificial Sequence: Synthetic oligonucleotide
uaggccauguauaaaauau

SEQ ID NO: 712484 - RNA, 19 nt, Artificial Sequence
  Description of Artificial Sequence: Synthetic oligonucleotide
uuaauccgaaccuauauuu

SEQ ID NO: 712485 - RNA, 19 nt, Artificial Sequence
  Description of Artificial Sequence: Synthetic oligonucleotide
uccuuauuacgugagauca

SEQ ID NO: 712486 - RNA, 19 nt, Artificial Sequence
  Description of Artificial Sequence: Synthetic oligonucleotide
auuagaugcauucucucga

SEQ ID NO: 712487 - RNA, 19 nt, Artificial Sequence
  Description of Artificial Sequence: Synthetic oligonucleotide
cugacuuacaaucuggauc

SEQ ID NO: 712488 - RNA, 19 nt, Artificial Sequence
  Description of Artificial Sequence: Synthetic oligonucleotide
acauguuuaauccgaaccu

SEQ ID NO: 712489 - RNA, 19 nt, Artificial Sequence
  Description of Artificial Sequence: Synthetic oligonucleotide
ucuaaauaguuugugacau

SEQ ID NO: 712490 - RNA, 19 nt, Artificial Sequence
  Description of Artificial Sequence: Synthetic oligonucleotide
gugauuauuagaugcauuc

SEQ ID NO: 712491 - RNA, 19 nt, Artificial Sequence
  Description of Artificial Sequence: Synthetic oligonucleotide
aaauacgaaucugaccauc

SEQ ID NO: 712492 - RNA, 19 nt, Artificial Sequence
  Description of Artificial Sequence: Synthetic oligonucleotide
uguuauucggcuugucugc

SEQ ID NO: 712493 - RNA, 19 nt, Artificial Sequence
  Description of Artificial Sequence: Synthetic oligonucleotide
auucuuagcucacaggcca

SEQ ID NO: 712494 - RNA, 19 nt, Artificial Sequence
  Description of Artificial Sequence: Synthetic oligonucleotide
aauguacccagucauuaaa

SEQ ID NO: 712495 - RNA, 19 nt, Artificial Sequence
  Description of Artificial Sequence: Synthetic oligonucleotide
uuacauuaugguagcaaga

SEQ ID NO: 712496 - RNA, 19 nt, Artificial Sequence
  Description of Artificial Sequence: Synthetic oligonucleotide
cuauacagcucacacacac

SEQ ID NO: 712497 - RNA, 19 nt, Artificial Sequence
  Description of Artificial Sequence: Synthetic oligonucleotide
cucgauggggcacucaucg

SEQ ID NO: 712498 - RNA, 19 nt, Artificial Sequence
  Description of Artificial Sequence: Synthetic oligonucleotide
uugucuaaacugcuggugu

SEQ ID NO: 712499 - RNA, 19 nt, Artificial Sequence
  Description of Artificial Sequence: Synthetic oligonucleotide
cugagaaacacagagacca

SEQ ID NO: 712500 - RNA, 19 nt, Artificial Sequence
  Description of Artificial Sequence: Synthetic oligonucleotide
uguaucaugaaaugugauu

SEQ ID NO: 712501 - RNA, 19 nt, Artificial Sequence
  Description of Artificial Sequence: Synthetic oligonucleotide
uuuaauccgaaccuauauu

SEQ ID NO: 712502 - RNA, 19 nt, Artificial Sequence
  Description of Artificial Sequence: Synthetic oligonucleotide
aaaauaugucauguaaaau

SEQ ID NO: 712503 - RNA, 19 nt, Artificial Sequence
  Description of Artificial Sequence: Synthetic oligonucleotide
uaguucaccagguggaucu

SEQ ID NO: 712504 - RNA, 19 nt, Artificial Sequence
  Description of Artificial Sequence: Synthetic oligonucleotide
ggauguaauguauacuucc

SEQ ID NO: 712505 - RNA, 19 nt, Artificial Sequence
  Description of Artificial Sequence: Synthetic oligonucleotide
ugugucugaccuauuaaaa

SEQ ID NO: 712506 - RNA, 19 nt, Artificial Sequence
  Description of Artificial Sequence: Synthetic oligonucleotide
uuuggcgucgaucucccgc

SEQ ID NO: 712507 - RNA, 19 nt, Artificial Sequence
  Description of Artificial Sequence: Synthetic oligonucleotide
gaagagcucgacaugacug

SEQ ID NO: 712508 - RNA, 19 nt, Artificial Sequence
  Description of Artificial Sequence: Synthetic oligonucleotide
uccaccaucugacuuacaa

SEQ ID NO: 712509 - RNA, 19 nt, Artificial Sequence
  Description of Artificial Sequence: Synthetic oligonucleotide
ugcucuaaauaguuuguga

SEQ ID NO: 712510 - RNA, 19 nt, Artificial Sequence
  Description of Artificial Sequence: Synthetic oligonucleotide
gugacaucuauacagcuca

SEQ ID NO: 712511 - RNA, 19 nt, Artificial Sequence
  Description of Artificial Sequence: Synthetic oligonucleotide
uccgaaccuauauuuguag

SEQ ID NO: 712512 - RNA, 19 nt, Artificial Sequence
  Description of Artificial Sequence: Synthetic oligonucleotide
uauaauacagcaggggcaa

SEQ ID NO: 712513 - RNA, 19 nt, Artificial Sequence
  Description of Artificial Sequence: Synthetic oligonucleotide
acucaacaugguuccaccc

SEQ ID NO: 712514 - RNA, 19 nt, Artificial Sequence
  Description of Artificial Sequence: Synthetic oligonucleotide
ggucgugauuauuagaugc

SEQ ID NO: 712515 - RNA, 19 nt, Artificial Sequence
  Description of Artificial Sequence: Synthetic oligonucleotide
ucucgauucucauuguuuc

SEQ ID NO: 712516 - RNA, 19 nt, Artificial Sequence
  Description of Artificial Sequence: Synthetic oligonucleotide
uacgugagaucaauaauau

SEQ ID NO: 712517 - RNA, 19 nt, Artificial Sequence
  Description of Artificial Sequence: Synthetic oligonucleotide
auugccucacucuuggacu

SEQ ID NO: 712518 - RNA, 19 nt, Artificial Sequence
  Description of Artificial Sequence: Synthetic oligonucleotide
ccgguuauaauacagcagg

SEQ ID NO: 712519 - RNA, 19 nt, Artificial Sequence
  Description of Artificial Sequence: Synthetic oligonucleotide
acucagucugguuacaggu

SEQ ID NO: 712520 - RNA, 19 nt, Artificial Sequence
  Description of Artificial Sequence: Synthetic oligonucleotide
uuauuagaugcauucucuc

SEQ ID NO: 712521 - RNA, 19 nt, Artificial Sequence
  Description of Artificial Sequence: Synthetic oligonucleotide
gauugccucacucuuggac

SEQ ID NO: 712522 - RNA, 19 nt, Artificial Sequence
  Description of Artificial Sequence: Synthetic oligonucleotide
uaaagguggcuacacuaug

SEQ ID NO: 712523 - RNA, 19 nt, Artificial Sequence
  Description of Artificial Sequence: Synthetic oligonucleotide
aagagcucgacaugacugu

SEQ ID NO: 712524 - RNA, 19 nt, Artificial Sequence
  Description of Artificial Sequence: Synthetic oligonucleotide
gugauugccucacucuugg

SEQ ID NO: 712525 - RNA, 19 nt, Artificial Sequence
  Description of Artificial Sequence: Synthetic oligonucleotide
auuauuagaugcauucucu

SEQ ID NO: 712526 - RNA, 19 nt, Artificial Sequence
  Description of Artificial Sequence: Synthetic oligonucleotide
auuacgugagaucaauaau

SEQ ID NO: 712527 - RNA, 19 nt, Artificial Sequence
  Description of Artificial Sequence: Synthetic oligonucleotide
uugagucccacacaagaaa

SEQ ID NO: 712528 - RNA, 19 nt, Artificial Sequence
  Description of Artificial Sequence: Synthetic oligonucleotide
augacuguccaccugccug

SEQ ID NO: 712529 - RNA, 19 nt, Artificial Sequence
  Description of Artificial Sequence: Synthetic oligonucleotide
uacuuccuuauuacgugag

SEQ ID NO: 712530 - RNA, 19 nt, Artificial Sequence
  Description of Artificial Sequence: Synthetic oligonucleotide
uugugucugaccuauuaaa

SEQ ID NO: 712531 - RNA, 19 nt, Artificial Sequence
  Description of Artificial Sequence: Synthetic oligonucleotide
ugcagacucagucugguua

SEQ ID NO: 712532 - RNA, 19 nt, Artificial Sequence
  Description of Artificial Sequence: Synthetic oligonucleotide
gacucagucugguuacagg

SEQ ID NO: 712533 - RNA, 19 nt, Artificial Sequence
  Description of Artificial Sequence: Synthetic oligonucleotide
gcuuugucuaaacugcugg

SEQ ID NO: 712534 - RNA, 19 nt, Artificial Sequence
  Description of Artificial Sequence: Synthetic oligonucleotide
ugcugacauguuuaauccg

SEQ ID NO: 712535 - RNA, 19 nt, Artificial Sequence
  Description of Artificial Sequence: Synthetic oligonucleotide
cauucuuagcucacaggcc

SEQ ID NO: 712536 - RNA, 19 nt, Artificial Sequence
  Description of Artificial Sequence: Synthetic oligonucleotide
cucgacaugacuguccacc

SEQ ID NO: 712537 - RNA, 19 nt, Artificial Sequence
  Description of Artificial Sequence: Synthetic oligonucleotide
uaggagaccugauugcaca

SEQ ID NO: 712538 - RNA, 19 nt, Artificial Sequence
  Description of Artificial Sequence: Synthetic oligonucleotide
ucuguuagguuacuuccaa

SEQ ID NO: 712539 - RNA, 19 nt, Artificial Sequence
  Description of Artificial Sequence: Synthetic oligonucleotide
acgcuugaacuucucauag

SEQ ID NO: 712540 - RNA, 19 nt, Artificial Sequence
  Description of Artificial Sequence: Synthetic oligonucleotide
uugucugccugagugauug

SEQ ID NO: 712541 - RNA, 19 nt, Artificial Sequence
  Description of Artificial Sequence: Synthetic oligonucleotide
caccauaaauacacuggcg

SEQ ID NO: 712542 - RNA, 19 nt, Artificial Sequence
  Description of Artificial Sequence: Synthetic oligonucleotide
aaaauacgaaucugaccau

SEQ ID NO: 712543 - RNA, 19 nt, Artificial Sequence
  Description of Artificial Sequence: Synthetic oligonucleotide
uucgaagagcucgacauga

SEQ ID NO: 712544 - RNA, 19 nt, Artificial Sequence
  Description of Artificial Sequence: Synthetic oligonucleotide
ccauucuuagcucacaggc

SEQ ID NO: 712545 - RNA, 19 nt, Artificial Sequence
  Description of Artificial Sequence: Synthetic oligonucleotide
ucagcaaccuggcuaauuu

SEQ ID NO: 712546 - RNA, 19 nt, Artificial Sequence
  Description of Artificial Sequence: Synthetic oligonucleotide
agucugguuacagguauac

SEQ ID NO: 712547 - RNA, 19 nt, Artificial Sequence
  Description of Artificial Sequence: Synthetic oligonucleotide
caagauguacauuuauaca

SEQ ID NO: 712548 - RNA, 19 nt, Artificial Sequence
  Description of Artificial Sequence: Synthetic oligonucleotide
ugauuauuagaugcauucu

SEQ ID NO: 712549 - RNA, 19 nt, Artificial Sequence
  Description of Artificial Sequence: Synthetic oligonucleotide
gaccauucuuagcucacag

SEQ ID NO: 712550 - RNA, 19 nt, Artificial Sequence
  Description of Artificial Sequence: Synthetic oligonucleotide
ucccgcaucagcgagacgu

SEQ ID NO: 712551 - RNA, 19 nt, Artificial Sequence
  Description of Artificial Sequence: Synthetic oligonucleotide
guuaaagguggcuacacua

SEQ ID NO: 712552 - RNA, 19 nt, Artificial Sequence
  Description of Artificial Sequence: Synthetic oligonucleotide
aggggcaagauguacauuu

SEQ ID NO: 712553 - RNA, 19 nt, Artificial Sequence
  Description of Artificial Sequence: Synthetic oligonucleotide
gacucaacaugguuccacc

SEQ ID NO: 712554 - RNA, 19 nt, Artificial Sequence
  Description of Artificial Sequence: Synthetic oligonucleotide
uauucggcuugucugccug

SEQ ID NO: 712555 - RNA, 19 nt, Artificial Sequence
  Description of Artificial Sequence: Synthetic oligonucleotide
uuugcuggcauggauguaa

SEQ ID NO: 712556 - RNA, 19 nt, Artificial Sequence
  Description of Artificial Sequence: Synthetic oligonucleotide
uauuuggcgucgaucuccc

SEQ ID NO: 712557 - RNA, 19 nt, Artificial Sequence
  Description of Artificial Sequence: Synthetic oligonucleotide
uacgaaucugaccauccuc

SEQ ID NO: 712558 - RNA, 19 nt, Artificial Sequence
  Description of Artificial Sequence: Synthetic oligonucleotide
acugagaaacacagagacc

SEQ ID NO: 712559 - RNA, 19 nt, Artificial Sequence
  Description of Artificial Sequence: Synthetic oligonucleotide
auuaugguagcaagaagca

SEQ ID NO: 712560 - RNA, 19 nt, Artificial Sequence
  Description of Artificial Sequence: Synthetic oligonucleotide
guaguuucuaaaaugccga

SEQ ID NO: 712561 - RNA, 19 nt, Artificial Sequence
  Description of Artificial Sequence: Synthetic oligonucleotide
ucucucgugugaaugucca

SEQ ID NO: 712562 - RNA, 19 nt, Artificial Sequence
  Description of Artificial Sequence: Synthetic oligonucleotide
uauacagcucacacacaca

SEQ ID NO: 712563 - RNA, 19 nt, Artificial Sequence
  Description of Artificial Sequence: Synthetic oligonucleotide
cucaucguugucacagccg

SEQ ID NO: 712564 - RNA, 19 nt, Artificial Sequence
  Description of Artificial Sequence: Synthetic oligonucleotide
cucgauucucauuguuucg

SEQ ID NO: 712565 - RNA, 19 nt, Artificial Sequence
  Description of Artificial Sequence: Synthetic oligonucleotide
uaugaccuaggguagcaaa

SEQ ID NO: 712566 - RNA, 19 nt, Artificial Sequence
  Description of Artificial Sequence: Synthetic oligonucleotide
uugacgugacaucuauaca

SEQ ID NO: 712567 - RNA, 19 nt, Artificial Sequence
  Description of Artificial Sequence: Synthetic oligonucleotide
cucuaaauaguuugugaca

SEQ ID NO: 712568 - RNA, 19 nt, Artificial Sequence
  Description of Artificial Sequence: Synthetic oligonucleotide
caagacuuggacccacugc

SEQ ID NO: 712569 - RNA, 19 nt, Artificial Sequence
  Description of Artificial Sequence: Synthetic oligonucleotide
uuccuuauuacgugagauc

SEQ ID NO: 712570 - RNA, 19 nt, Artificial Sequence
  Description of Artificial Sequence: Synthetic oligonucleotide
augguagcaagaagcacac

SEQ ID NO: 712571 - RNA, 19 nt, Artificial Sequence
  Description of Artificial Sequence: Synthetic oligonucleotide
ugcccuuugguuuaugguu

SEQ ID NO: 712572 - RNA, 19 nt, Artificial Sequence
  Description of Artificial Sequence: Synthetic oligonucleotide
auacuuccuuauuacguga

SEQ ID NO: 712573 - RNA, 19 nt, Artificial Sequence
  Description of Artificial Sequence: Synthetic oligonucleotide
gcuaaagaaacagacuggc

SEQ ID NO: 712574 - RNA, 19 nt, Artificial Sequence
  Description of Artificial Sequence: Synthetic oligonucleotide
aguuaaagguggcuacacu

SEQ ID NO: 712575 - RNA, 19 nt, Artificial Sequence
  Description of Artificial Sequence: Synthetic oligonucleotide
ucgaaaggcagugacucga

SEQ ID NO: 712576 - RNA, 19 nt, Artificial Sequence
  Description of Artificial Sequence: Synthetic oligonucleotide
gacgugacaucuauacagc

SEQ ID NO: 712577 - RNA, 19 nt, Artificial Sequence
  Description of Artificial Sequence: Synthetic oligonucleotide
auggucgugauuauuagau

SEQ ID NO: 712578 - RNA, 19 nt, Artificial Sequence
  Description of Artificial Sequence: Synthetic oligonucleotide
ucauaguagucauccaauu

SEQ ID NO: 712579 - RNA, 19 nt, Artificial Sequence
  Description of Artificial Sequence: Synthetic oligonucleotide
ugacauguuuaauccgaac

SEQ ID NO: 712580 - RNA, 19 nt, Artificial Sequence
  Description of Artificial Sequence: Synthetic oligonucleotide
ucauuguuucgcugccucc

SEQ ID NO: 712581 - RNA, 19 nt, Artificial Sequence
  Description of Artificial Sequence: Synthetic oligonucleotide
uuauuacgugagaucaaua

SEQ ID NO: 712582 - RNA, 19 nt, Artificial Sequence
  Description of Artificial Sequence: Synthetic oligonucleotide
uuagaugcauucucucgau

SEQ ID NO: 712583 - RNA, 19 nt, Artificial Sequence
  Description of Artificial Sequence: Synthetic oligonucleotide
gugaauaggccauguauaa

SEQ ID NO: 712584 - RNA, 19 nt, Artificial Sequence
  Description of Artificial Sequence: Synthetic oligonucleotide
uggucgugauuauuagaug

SEQ ID NO: 712585 - RNA, 19 nt, Artificial Sequence
  Description of Artificial Sequence: Synthetic oligonucleotide
uuaugguagcaagaagcac

SEQ ID NO: 712586 - RNA, 19 nt, Artificial Sequence
  Description of Artificial Sequence: Synthetic oligonucleotide
ucucuugguauuuggcguc

SEQ ID NO: 712587 - RNA, 19 nt, Artificial Sequence
  Description of Artificial Sequence: Synthetic oligonucleotide
cacaccuuggcuucacaac

SEQ ID NO: 712588 - RNA, 19 nt, Artificial Sequence
  Description of Artificial Sequence: Synthetic oligonucleotide
ucgauggggaggucugcgg

SEQ ID NO: 712589 - RNA, 19 nt, Artificial Sequence
  Description of Artificial Sequence: Synthetic oligonucleotide
uuagcucacaggccacaca

SEQ ID NO: 712590 - RNA, 19 nt, Artificial Sequence
  Description of Artificial Sequence: Synthetic oligonucleotide
acgaaucugaccauccuca

SEQ ID NO: 712591 - RNA, 19 nt, Artificial Sequence
  Description of Artificial Sequence: Synthetic oligonucleotide
ugcuucgaagagcucgaca

SEQ ID NO: 712592 - RNA, 19 nt, Artificial Sequence
  Description of Artificial Sequence: Synthetic oligonucleotide
guagcaaaggcaagacuug

SEQ ID NO: 712593 - RNA, 19 nt, Artificial Sequence
  Description of Artificial Sequence: Synthetic oligonucleotide
auaggccauguauaaaaua

SEQ ID NO: 712594 - RNA, 19 nt, Artificial Sequence
  Description of Artificial Sequence: Synthetic oligonucleotide
auugcacagacaguacgug

SEQ ID NO: 712595 - RNA, 19 nt, Artificial Sequence
  Description of Artificial Sequence: Synthetic oligonucleotide
auacgaaucugaccauccu

SEQ ID NO: 712596 - RNA, 19 nt, Artificial Sequence
  Description of Artificial Sequence: Synthetic oligonucleotide
guaucaugaaaugugauuu

SEQ ID NO: 712597 - RNA, 19 nt, Artificial Sequence
  Description of Artificial Sequence: Synthetic oligonucleotide
caggucgaaaggcagugac

SEQ ID NO: 712598 - RNA, 19 nt, Artificial Sequence
  Description of Artificial Sequence: Synthetic oligonucleotide
cucauuguuucgcugccuc

SEQ ID NO: 712599 - RNA, 19 nt, Artificial Sequence
  Description of Artificial Sequence: Synthetic oligonucleotide
gucgaaaggcagugacucg

SEQ ID NO: 712600 - RNA, 19 nt, Artificial Sequence
  Description of Artificial Sequence: Synthetic oligonucleotide
ugucuaaacugcuggugua

SEQ ID NO: 712601 - RNA, 19 nt, Artificial Sequence
  Description of Artificial Sequence: Synthetic oligonucleotide
ugcaggucgaaaggcagug

SEQ ID NO: 712602 - RNA, 19 nt, Artificial Sequence
  Description of Artificial Sequence: Synthetic oligonucleotide
ugaccauccucagacuucu

SEQ ID NO: 712603 - RNA, 19 nt, Artificial Sequence
  Description of Artificial Sequence: Synthetic oligonucleotide
uuaaaccuuugaccaacuu

SEQ ID NO: 712604 - RNA, 19 nt, Artificial Sequence
  Description of Artificial Sequence: Synthetic oligonucleotide
uuuauacaucuguuagguu

SEQ ID NO: 712605 - RNA, 19 nt, Artificial Sequence
  Description of Artificial Sequence: Synthetic oligonucleotide
uugugacauuuauuugcug

SEQ ID NO: 712606 - RNA, 19 nt, Artificial Sequence
  Description of Artificial Sequence: Synthetic oligonucleotide
cuguuagguuacuuccaag

SEQ ID NO: 712607 - RNA, 19 nt, Artificial Sequence
  Description of Artificial Sequence: Synthetic oligonucleotide
guuuaauccgaaccuauau

SEQ ID NO: 712608 - RNA, 19 nt, Artificial Sequence
  Description of Artificial Sequence: Synthetic oligonucleotide
uaaauacacuggcggguuc

SEQ ID NO: 712609 - RNA, 19 nt, Artificial Sequence
  Description of Artificial Sequence: Synthetic oligonucleotide
acuuccuuauuacgugaga

SEQ ID NO: 712610 - RNA, 19 nt, Artificial Sequence
  Description of Artificial Sequence: Synthetic oligonucleotide
gcuacacuaugaccuaggg

SEQ ID NO: 712611 - RNA, 19 nt, Artificial Sequence
  Description of Artificial Sequence: Synthetic oligonucleotide
uaguuucuaaaaugccgau

SEQ ID NO: 712612 - RNA, 19 nt, Artificial Sequence
  Description of Artificial Sequence: Synthetic oligonucleotide
gucgucauggucgugauua

SEQ ID NO: 712613 - RNA, 19 nt, Artificial Sequence
  Description of Artificial Sequence: Synthetic oligonucleotide
ugaauaggccauguauaaa

SEQ ID NO: 712614 - RNA, 19 nt, Artificial Sequence
  Description of Artificial Sequence: Synthetic oligonucleotide
uuucgcugccuccgggacc

SEQ ID NO: 712615 - RNA, 19 nt, Artificial Sequence
  Description of Artificial Sequence: Synthetic oligonucleotide
acgugacaucuauacagcu

SEQ ID NO: 712616 - RNA, 19 nt, Artificial Sequence
  Description of Artificial Sequence: Synthetic oligonucleotide
uuuccuaaccucugcucua

SEQ ID NO: 712617 - RNA, 19 nt, Artificial Sequence
  Description of Artificial Sequence: Synthetic oligonucleotide
uugguauuuggcgucgauc

SEQ ID NO: 712618 - RNA, 19 nt, Artificial Sequence
  Description of Artificial Sequence: Synthetic oligonucleotide
ugguugagucccacacaag

SEQ ID NO: 712619 - RNA, 19 nt, Artificial Sequence
  Description of Artificial Sequence: Synthetic oligonucleotide
guaauguauacuuccuuau

SEQ ID NO: 712620 - RNA, 19 nt, Artificial Sequence
  Description of Artificial Sequence: Synthetic oligonucleotide
aauuacccauuuaccauuu

SEQ ID NO: 712621 - RNA, 19 nt, Artificial Sequence
  Description of Artificial Sequence: Synthetic oligonucleotide
uguaagcccuuucuuucuu

SEQ ID NO: 712622 - RNA, 19 nt, Artificial Sequence
  Description of Artificial Sequence: Synthetic oligonucleotide
uucuuagcucacaggccac

SEQ ID NO: 712623 - RNA, 19 nt, Artificial Sequence
  Description of Artificial Sequence: Synthetic oligonucleotide
ucgugauuauuagaugcau

SEQ ID NO: 712624 - RNA, 19 nt, Artificial Sequence
  Description of Artificial Sequence: Synthetic oligonucleotide
acucaaaucugaauuucau

SEQ ID NO: 712625 - RNA, 19 nt, Artificial Sequence
  Description of Artificial Sequence: Synthetic oligonucleotide
guacgugggcucauugggg

SEQ ID NO: 712626 - RNA, 19 nt, Artificial Sequence
  Description of Artificial Sequence: Synthetic oligonucleotide
ucucucgauucucauuguu

SEQ ID NO: 712627 - RNA, 19 nt, Artificial Sequence
  Description of Artificial Sequence: Synthetic oligonucleotide
acuaugaccuaggguagca

SEQ ID NO: 712628 - RNA, 19 nt, Artificial Sequence
  Description of Artificial Sequence: Synthetic oligonucleotide
cuucgaagagcucgacaug

SEQ ID NO: 712629 - RNA, 19 nt, Artificial Sequence
  Description of Artificial Sequence: Synthetic oligonucleotide
uuggacuuuuccagggcuu

SEQ ID NO: 712630 - RNA, 19 nt, Artificial Sequence
  Description of Artificial Sequence: Synthetic oligonucleotide
acacuaugaccuaggguag

SEQ ID NO: 712631 - RNA, 19 nt, Artificial Sequence
  Description of Artificial Sequence: Synthetic oligonucleotide
agugauugccucacucuug

SEQ ID NO: 712632 - RNA, 19 nt, Artificial Sequence
  Description of Artificial Sequence: Synthetic oligonucleotide
ggucgaaaggcagugacuc

SEQ ID NO: 712633 - RNA, 19 nt, Artificial Sequence
  Description of Artificial Sequence: Synthetic oligonucleotide
gggaccgcuuguuauucgg

SEQ ID NO: 712634 - RNA, 19 nt, Artificial Sequence
  Description of Artificial Sequence: Synthetic oligonucleotide
agagcucgacaugacuguc

SEQ ID NO: 712635 - RNA, 19 nt, Artificial Sequence
  Description of Artificial Sequence: Synthetic oligonucleotide
uguccacaaacuaccuguu

SEQ ID NO: 712636 - RNA, 19 nt, Artificial Sequence
  Description of Artificial Sequence: Synthetic oligonucleotide
aggccauguauaaaauaug

SEQ ID NO: 712637 - RNA, 19 nt, Artificial Sequence
  Description of Artificial Sequence: Synthetic oligonucleotide
cauggucgugauuauuaga

SEQ ID NO: 712638 - RNA, 19 nt, Artificial Sequence
  Description of Artificial Sequence: Synthetic oligonucleotide
ugccgaucugcagacucag

SEQ ID NO: 712639 - RNA, 19 nt, Artificial Sequence
  Description of Artificial Sequence: Synthetic oligonucleotide
agacucagucugguuacag

SEQ ID NO: 712640 - RNA, 19 nt, Artificial Sequence
  Description of Artificial Sequence: Synthetic oligonucleotide
cugcucuaaauaguuugug

SEQ ID NO: 712641 - RNA, 19 nt, Artificial Sequence
  Description of Artificial Sequence: Synthetic oligonucleotide
aggaucuguuccuaacauu

SEQ ID NO: 712642 - RNA, 19 nt, Artificial Sequence
  Description of Artificial Sequence: Synthetic oligonucleotide
gucgugauuauuagaugca

SEQ ID NO: 712643 - RNA, 19 nt, Artificial Sequence
  Description of Artificial Sequence: Synthetic oligonucleotide
gagcucgacaugacugucc

SEQ ID NO: 712644 - RNA, 19 nt, Artificial Sequence
  Description of Artificial Sequence: Synthetic oligonucleotide
ucgauggaguccagguaau

SEQ ID NO: 712645 - RNA, 19 nt, Artificial Sequence
  Description of Artificial Sequence: Synthetic oligonucleotide
gaaccuauauuuguaguuu

SEQ ID NO: 712646 - RNA, 19 nt, Artificial Sequence
  Description of Artificial Sequence: Synthetic oligonucleotide
uucucucgauucucauugu

SEQ ID NO: 712647 - RNA, 19 nt, Artificial Sequence
  Description of Artificial Sequence: Synthetic oligonucleotide
ugcgggagaggcuucccuc

SEQ ID NO: 712648 - RNA, 19 nt, Artificial Sequence
  Description of Artificial Sequence: Synthetic oligonucleotide
aucuguuagguuacuucca

SEQ ID NO: 712649 - RNA, 19 nt, Artificial Sequence
  Description of Artificial Sequence: Synthetic oligonucleotide
uggcuacacuaugaccuag

SEQ ID NO: 712650 - RNA, 19 nt, Artificial Sequence
  Description of Artificial Sequence: Synthetic oligonucleotide
guccgucucacgcuugaac

SEQ ID NO: 712651 - RNA, 19 nt, Artificial Sequence
  Description of Artificial Sequence: Synthetic oligonucleotide
ggcggguucuguucucucg

SEQ ID NO: 712652 - RNA, 19 nt, Artificial Sequence
  Description of Artificial Sequence: Synthetic oligonucleotide
cgacauuuggggcaguacc

SEQ ID NO: 712653 - RNA, 19 nt, Artificial Sequence
  Description of Artificial Sequence: Synthetic oligonucleotide
guuucgcugccuccgggac

SEQ ID NO: 712654 - RNA, 19 nt, Artificial Sequence
  Description of Artificial Sequence: Synthetic oligonucleotide
gaggaucuguuccuaacau

SEQ ID NO: 712655 - RNA, 19 nt, Artificial Sequence
  Description of Artificial Sequence: Synthetic oligonucleotide
aaggcaagacuuggaccca

SEQ ID NO: 712656 - RNA, 19 nt, Artificial Sequence
  Description of Artificial Sequence: Synthetic oligonucleotide
agcaggggcaagauguaca

SEQ ID NO: 712657 - RNA, 19 nt, Artificial Sequence
  Description of Artificial Sequence: Synthetic oligonucleotide
ucgugugaauguccacaaa

SEQ ID NO: 712658 - RNA, 19 nt, Artificial Sequence
  Description of Artificial Sequence: Synthetic oligonucleotide
uaggacuuucauguaucau

SEQ ID NO: 712659 - RNA, 19 nt, Artificial Sequence
  Description of Artificial Sequence: Synthetic oligonucleotide
ugguucgguucuccaccag

SEQ ID NO: 712660 - RNA, 19 nt, Artificial Sequence
  Description of Artificial Sequence: Synthetic oligonucleotide
gacgacacaggcuguuucu

SEQ ID NO: 712661 - RNA, 19 nt, Artificial Sequence
  Description of Artificial Sequence: Synthetic oligonucleotide
aggcaagacuuggacccac

SEQ ID NO: 712662 - RNA, 19 nt, Artificial Sequence
  Description of Artificial Sequence: Synthetic oligonucleotide
ugcuggcauggauguaaug

SEQ ID NO: 712663 - RNA, 19 nt, Artificial Sequence
  Description of Artificial Sequence: Synthetic oligonucleotide
guccccggcgacucggcgg

SEQ ID NO: 712664 - RNA, 19 nt, Artificial Sequence
  Description of Artificial Sequence: Synthetic oligonucleotide
acgugagaucaauaauaua

SEQ ID NO: 712665 - RNA, 19 nt, Artificial Sequence
  Description of Artificial Sequence: Synthetic oligonucleotide
acacuugcugacauguuua

SEQ ID NO: 712666 - RNA, 19 nt, Artificial Sequence
  Description of Artificial Sequence: Synthetic oligonucleotide
uuccuaaccucugcucuaa

SEQ ID NO: 712667 - RNA, 19 nt, Artificial Sequence
  Description of Artificial Sequence: Synthetic oligonucleotide
auaauacagcaggggcaag

SEQ ID NO: 712668 - RNA, 19 nt, Artificial Sequence
  Description of Artificial Sequence: Synthetic oligonucleotide
cuccccguuggcaggacuc

SEQ ID NO: 712669 - RNA, 19 nt, Artificial Sequence
  Description of Artificial Sequence: Synthetic oligonucleotide
auguacccagucauuaaaa

SEQ ID NO: 712670 - RNA, 19 nt, Artificial Sequence
  Description of Artificial Sequence: Synthetic oligonucleotide
gcuucgaagagcucgacau

SEQ ID NO: 712671 - RNA, 19 nt, Artificial Sequence
  Description of Artificial Sequence: Synthetic oligonucleotide
ggcuacacuaugaccuagg

SEQ ID NO: 712672 - RNA, 19 nt, Artificial Sequence
  Description of Artificial Sequence: Synthetic oligonucleotide
uacaucuguuagguuacuu

SEQ ID NO: 712673 - RNA, 19 nt, Artificial Sequence
  Description of Artificial Sequence: Synthetic oligonucleotide
cugacauguuuaauccgaa

SEQ ID NO: 712674 - RNA, 19 nt, Artificial Sequence
  Description of Artificial Sequence: Synthetic oligonucleotide
ugauugccucacucuugga

SEQ ID NO: 712675 - RNA, 19 nt, Artificial Sequence
  Description of Artificial Sequence: Synthetic oligonucleotide
cuuugucuaaacugcuggu

SEQ ID NO: 712676 - RNA, 19 nt, Artificial Sequence
  Description of Artificial Sequence: Synthetic oligonucleotide
cacgcuugaacuucucaua

SEQ ID NO: 712677 - RNA, 19 nt, Artificial Sequence
  Description of Artificial Sequence: Synthetic oligonucleotide
gacucggcggcuuuccgcu

SEQ ID NO: 712678 - RNA, 19 nt, Artificial Sequence
  Description of Artificial Sequence: Synthetic oligonucleotide
gucugguuacagguauacc

SEQ ID NO: 712679 - RNA, 19 nt, Artificial Sequence
  Description of Artificial Sequence: Synthetic oligonucleotide
cgguuauaauacagcaggg

SEQ ID NO: 712680 - RNA, 19 nt, Artificial Sequence
  Description of Artificial Sequence: Synthetic oligonucleotide
agaccauucuuagcucaca

SEQ ID NO: 712681 - RNA, 19 nt, Artificial Sequence
  Description of Artificial Sequence: Synthetic oligonucleotide
agucugacacuugcugaca

SEQ ID NO: 712682 - RNA, 19 nt, Artificial Sequence
  Description of Artificial Sequence: Synthetic oligonucleotide
aaaugccgaucugcagacu

SEQ ID NO: 712683 - RNA, 19 nt, Artificial Sequence
  Description of Artificial Sequence: Synthetic oligonucleotide
gcaagacuuggacccacug

SEQ ID NO: 712684 - RNA, 19 nt, Artificial Sequence
  Description of Artificial Sequence: Synthetic oligonucleotide
guucucucgugugaauguc

SEQ ID NO: 712685 - RNA, 19 nt, Artificial Sequence
  Description of Artificial Sequence: Synthetic oligonucleotide
ucgauggggcacucaucgu

SEQ ID NO: 712686 - RNA, 19 nt, Artificial Sequence
  Description of Artificial Sequence: Synthetic oligonucleotide
cucucgugugaauguccac

SEQ ID NO: 712687 - RNA, 19 nt, Artificial Sequence
  Description of Artificial Sequence: Synthetic oligonucleotide
cgagacguuccucugcagg

SEQ ID NO: 712688 - RNA, 19 nt, Artificial Sequence
  Description of Artificial Sequence: Synthetic oligonucleotide
acucgauggggcacucauc

SEQ ID NO: 712689 - RNA, 19 nt, Artificial Sequence
  Description of Artificial Sequence: Synthetic oligonucleotide
uuccaccccggacgguccc

SEQ ID NO: 712690 - RNA, 19 nt, Artificial Sequence
  Description of Artificial Sequence: Synthetic oligonucleotide
accacuugugucugaccua

SEQ ID NO: 712691 - RNA, 19 nt, Artificial Sequence
  Description of Artificial Sequence: Synthetic oligonucleotide
ggccauguauaaaauaugu

SEQ ID NO: 712692 - RNA, 19 nt, Artificial Sequence
  Description of Artificial Sequence: Synthetic oligonucleotide
ugggcguuccugaggugau

SEQ ID NO: 712693 - RNA, 19 nt, Artificial Sequence
  Description of Artificial Sequence: Synthetic oligonucleotide
ggcagcgacaccauaaaua

SEQ ID NO: 712694 - RNA, 19 nt, Artificial Sequence
  Description of Artificial Sequence: Synthetic oligonucleotide
gcuggcauggauguaaugu

SEQ ID NO: 712695 - RNA, 19 nt, Artificial Sequence
  Description of Artificial Sequence: Synthetic oligonucleotide
ugccggugcugucacugau

SEQ ID NO: 712696 - RNA, 19 nt, Artificial Sequence
  Description of Artificial Sequence: Synthetic oligonucleotide
cacaaacuaccuguuguaa

SEQ ID NO: 712697 - RNA, 19 nt, Artificial Sequence
  Description of Artificial Sequence: Synthetic oligonucleotide
cuacacuaugaccuagggu

SEQ ID NO: 712698 - RNA, 19 nt, Artificial Sequence
  Description of Artificial Sequence: Synthetic oligonucleotide
ucggcuugucugccugagu

SEQ ID NO: 712699 - RNA, 19 nt, Artificial Sequence
  Description of Artificial Sequence: Synthetic oligonucleotide
cauggauguaauguauacu

SEQ ID NO: 712700 - RNA, 19 nt, Artificial Sequence
  Description of Artificial Sequence: Synthetic oligonucleotide
uccuaaccucugcucuaaa

SEQ ID NO: 712701 - RNA, 19 nt, Artificial Sequence
  Description of Artificial Sequence: Synthetic oligonucleotide
aacuugucauguggauuua

SEQ ID NO: 712702 - RNA, 19 nt, Artificial Sequence
  Description of Artificial Sequence: Synthetic oligonucleotide
aggucgaaaggcagugacu

SEQ ID NO: 712703 - RNA, 19 nt, Artificial Sequence
  Description of Artificial Sequence: Synthetic oligonucleotide
ucgucauggucgugauuau

SEQ ID NO: 712704 - RNA, 19 nt, Artificial Sequence
  Description of Artificial Sequence: Synthetic oligonucleotide
auccgaaccuauauuugua

SEQ ID NO: 712705 - RNA, 19 nt, Artificial Sequence
  Description of Artificial Sequence: Synthetic oligonucleotide
cucagucugguuacaggua

SEQ ID NO: 712706 - RNA, 19 nt, Artificial Sequence
  Description of Artificial Sequence: Synthetic oligonucleotide
uggggcacucaucguuguc

SEQ ID NO: 712707 - RNA, 19 nt, Artificial Sequence
  Description of Artificial Sequence: Synthetic oligonucleotide
gacgguccccggcgacucg

SEQ ID NO: 712708 - RNA, 19 nt, Artificial Sequence
  Description of Artificial Sequence: Synthetic oligonucleotide
cugguucgguucuccacca

SEQ ID NO: 712709 - RNA, 19 nt, Artificial Sequence
  Description of Artificial Sequence: Synthetic oligonucleotide
gcgucgaucucccgcauca

SEQ ID NO: 712710 - RNA, 19 nt, Artificial Sequence
  Description of Artificial Sequence: Synthetic oligonucleotide
cucucgauucucauuguuu

SEQ ID NO: 712711 - RNA, 19 nt, Artificial Sequence
  Description of Artificial Sequence: Synthetic oligonucleotide
cacuuccgguuauaauaca

SEQ ID NO: 712712 - RNA, 19 nt, Artificial Sequence
  Description of Artificial Sequence: Synthetic oligonucleotide
cuggccaaguuucauuuau

SEQ ID NO: 712713 - RNA, 19 nt, Artificial Sequence
  Description of Artificial Sequence: Synthetic oligonucleotide
guuccugaggugaugucgu

SEQ ID NO: 712714 - RNA, 19 nt, Artificial Sequence
  Description of Artificial Sequence: Synthetic oligonucleotide
ggacgcacaccuuggcuuc

SEQ ID NO: 712715 - RNA, 19 nt, Artificial Sequence
  Description of Artificial Sequence: Synthetic oligonucleotide
ugucgucauggucgugauu

SEQ ID NO: 712716 - RNA, 19 nt, Artificial Sequence
  Description of Artificial Sequence: Synthetic oligonucleotide
auacacuggcggguucugu

SEQ ID NO: 712717 - RNA, 19 nt, Artificial Sequence
  Description of Artificial Sequence: Synthetic oligonucleotide
ccgcuuguuauucggcuug

SEQ ID NO: 712718 - RNA, 19 nt, Artificial Sequence
  Description of Artificial Sequence: Synthetic oligonucleotide
cagacaguacgugggcuca

SEQ ID NO: 712719 - RNA, 19 nt, Artificial Sequence
  Description of Artificial Sequence: Synthetic oligonucleotide
cagcgacaccauaaauaca

SEQ ID NO: 712720 - RNA, 19 nt, Artificial Sequence
  Description of Artificial Sequence: Synthetic oligonucleotide
guggcuacacuaugaccua

SEQ ID NO: 712721 - RNA, 19 nt, Artificial Sequence
  Description of Artificial Sequence: Synthetic oligonucleotide
acgguccccggcgacucgg

SEQ ID NO: 712722 - RNA, 19 nt, Artificial Sequence
  Description of Artificial Sequence: Synthetic oligonucleotide
augccgaucugcagacuca

SEQ ID NO: 712723 - RNA, 19 nt, Artificial Sequence
  Description of Artificial Sequence: Synthetic oligonucleotide
acgcacaccuuggcuucac

SEQ ID NO: 712724 - RNA, 19 nt, Artificial Sequence
  Description of Artificial Sequence: Synthetic oligonucleotide
uuccaccaucugacuuaca

SEQ ID NO: 712725 - RNA, 19 nt, Artificial Sequence
  Description of Artificial Sequence: Synthetic oligonucleotide
cuucugggugccguccguc

SEQ ID NO: 712726 - RNA, 19 nt, Artificial Sequence
  Description of Artificial Sequence: Synthetic oligonucleotide
gguuccaccccggacgguc

SEQ ID NO: 712727 - RNA, 19 nt, Artificial Sequence
  Description of Artificial Sequence: Synthetic oligonucleotide
gucugcgggagaggcuucc

SEQ ID NO: 712728 - RNA, 19 nt, Artificial Sequence
  Description of Artificial Sequence: Synthetic oligonucleotide
augacgacacaggcuguuu

SEQ ID NO: 712729 - RNA, 19 nt, Artificial Sequence
  Description of Artificial Sequence: Synthetic oligonucleotide
cacccgccucuucugggug

SEQ ID NO: 712730 - RNA, 19 nt, Artificial Sequence
  Description of Artificial Sequence: Synthetic oligonucleotide
cacccagcuccuggcuucg

SEQ ID NO: 712731 - RNA, 19 nt, Artificial Sequence
  Description of Artificial Sequence: Synthetic oligonucleotide
gguauaccaugacgacaca

SEQ ID NO: 712732 - RNA, 19 nt, Artificial Sequence
  Description of Artificial Sequence: Synthetic oligonucleotide
uaccuguuguaagcccuuu

SEQ ID NO: 712733 - RNA, 19 nt, Artificial Sequence
  Description of Artificial Sequence: Synthetic oligonucleotide
ccuauauuuguaguuucua

SEQ ID NO: 712734 - RNA, 19 nt, Artificial Sequence
  Description of Artificial Sequence: Synthetic oligonucleotide
cuaugaccuaggguagcaa

SEQ ID NO: 712735 - RNA, 19 nt, Artificial Sequence
  Description of Artificial Sequence: Synthetic oligonucleotide
gguccccggcgacucggcg

SEQ ID NO: 712736 - RNA, 19 nt, Artificial Sequence
  Description of Artificial Sequence: Synthetic oligonucleotide
aucucccgcaucagcgaga

SEQ ID NO: 712737 - RNA, 19 nt, Artificial Sequence
  Description of Artificial Sequence: Synthetic oligonucleotide
ccuuauuacgugagaucaa

SEQ ID NO: 712738 - RNA, 19 nt, Artificial Sequence
  Description of Artificial Sequence: Synthetic oligonucleotide
ggagaccugauugcacaga

SEQ ID NO: 712739 - RNA, 19 nt, Artificial Sequence
  Description of Artificial Sequence: Synthetic oligonucleotide
agucacuccccaaccccaa

SEQ ID NO: 712740 - RNA, 19 nt, Artificial Sequence
  Description of Artificial Sequence: Synthetic oligonucleotide
auuugcuggcauggaugua

SEQ ID NO: 712741 - RNA, 19 nt, Artificial Sequence
  Description of Artificial Sequence: Synthetic oligonucleotide
ccguuggcaggacucaaca

SEQ ID NO: 712742 - RNA, 19 nt, Artificial Sequence
  Description of Artificial Sequence: Synthetic oligonucleotide
gacgcacaccuuggcuuca

SEQ ID NO: 712743 - RNA, 19 nt, Artificial Sequence
  Description of Artificial Sequence: Synthetic oligonucleotide
caggacgcacaccuuggcu

SEQ ID NO: 712744 - RNA, 19 nt, Artificial Sequence
  Description of Artificial Sequence: Synthetic oligonucleotide
uggcgucgaucucccgcau

SEQ ID NO: 712745 - RNA, 19 nt, Artificial Sequence
  Description of Artificial Sequence: Synthetic oligonucleotide
guucgguucuccaccaguu

SEQ ID NO: 712746 - RNA, 19 nt, Artificial Sequence
  Description of Artificial Sequence: Synthetic oligonucleotide
cccguuggcaggacucaac

SEQ ID NO: 712747 - RNA, 19 nt, Artificial Sequence
  Description of Artificial Sequence: Synthetic oligonucleotide
gaccauccucagacuucug

SEQ ID NO: 712748 - RNA, 19 nt, Artificial Sequence
  Description of Artificial Sequence: Synthetic oligonucleotide
cuugguauuuggcgucgau

SEQ ID NO: 712749 - RNA, 19 nt, Artificial Sequence
  Description of Artificial Sequence: Synthetic oligonucleotide
gugacucgauggaguccag

SEQ ID NO: 712750 - RNA, 19 nt, Artificial Sequence
  Description of Artificial Sequence: Synthetic oligonucleotide
caugacuguccaccugccu

SEQ ID NO: 712751 - RNA, 19 nt, Artificial Sequence
  Description of Artificial Sequence: Synthetic oligonucleotide
agacaguacgugggcucau

SEQ ID NO: 712752 - RNA, 19 nt, Artificial Sequence
  Description of Artificial Sequence: Synthetic oligonucleotide
cgacucggcggcuuuccgc

SEQ ID NO: 712753 - RNA, 19 nt, Artificial Sequence
  Description of Artificial Sequence: Synthetic oligonucleotide
ggcgacucggcggcuuucc

SEQ ID NO: 712754 - RNA, 19 nt, Artificial Sequence
  Description of Artificial Sequence: Synthetic oligonucleotide
gugcuucgaagagcucgac

SEQ ID NO: 712755 - RNA, 19 nt, Artificial Sequence
  Description of Artificial Sequence: Synthetic oligonucleotide
caccccggacgguccccgg

SEQ ID NO: 712756 - RNA, 19 nt, Artificial Sequence
  Description of Artificial Sequence: Synthetic oligonucleotide
ccgacauuuggggcaguac

SEQ ID NO: 712757 - RNA, 19 nt, Artificial Sequence
  Description of Artificial Sequence: Synthetic oligonucleotide
cagacucagucugguuaca

SEQ ID NO: 712758 - RNA, 19 nt, Artificial Sequence
  Description of Artificial Sequence: Synthetic oligonucleotide
cuaccuguuguaagcccuu

SEQ ID NO: 712759 - RNA, 19 nt, Artificial Sequence
  Description of Artificial Sequence: Synthetic oligonucleotide
cucccgcaucagcgagacg

SEQ ID NO: 712760 - RNA, 19 nt, Artificial Sequence
  Description of Artificial Sequence: Synthetic oligonucleotide
cuccgggaccgcuuguuau

SEQ ID NO: 712761 - RNA, 19 nt, Artificial Sequence
  Description of Artificial Sequence: Synthetic oligonucleotide
cgucucacgcuugaacuuc

SEQ ID NO: 712762 - RNA, 19 nt, Artificial Sequence
  Description of Artificial Sequence: Synthetic oligonucleotide
cgaaccuauauuuguaguu

SEQ ID NO: 712763 - RNA, 19 nt, Artificial Sequence
  Description of Artificial Sequence: Synthetic oligonucleotide
gucucacgcuugaacuucu

SEQ ID NO: 712764 - RNA, 19 nt, Artificial Sequence
  Description of Artificial Sequence: Synthetic oligonucleotide
gcggguucuguucucucgu

SEQ ID NO: 712765 - RNA, 19 nt, Artificial Sequence
  Description of Artificial Sequence: Synthetic oligonucleotide
gcuuguuauucggcuuguc

SEQ ID NO: 712766 - RNA, 19 nt, Artificial Sequence
  Description of Artificial Sequence: Synthetic oligonucleotide
cgggaccgcuuguuauucg

SEQ ID NO: 712767 - RNA, 19 nt, Artificial Sequence
  Description of Artificial Sequence: Synthetic oligonucleotide
cagcaaccuggcuaauuuu

SEQ ID NO: 712768 - RNA, 19 nt, Artificial Sequence
  Description of Artificial Sequence: Synthetic oligonucleotide
ugguuccaccccggacggu

SEQ ID NO: 712769 - RNA, 19 nt, Artificial Sequence
  Description of Artificial Sequence: Synthetic oligonucleotide
caugacgacacaggcuguu

SEQ ID NO: 712770 - RNA, 19 nt, Artificial Sequence
  Description of Artificial Sequence: Synthetic oligonucleotide
gacaguacgugggcucauu

SEQ ID NO: 712771 - RNA, 19 nt, Artificial Sequence
  Description of Artificial Sequence: Synthetic oligonucleotide
ggggcaagauguacauuua

SEQ ID NO: 712772 - RNA, 19 nt, Artificial Sequence
  Description of Artificial Sequence: Synthetic oligonucleotide
gcgggagaggcuucccucu

SEQ ID NO: 712773 - RNA, 19 nt, Artificial Sequence
  Description of Artificial Sequence: Synthetic oligonucleotide
gcaggucgaaaggcaguga

SEQ ID NO: 712774 - RNA, 19 nt, Artificial Sequence
  Description of Artificial Sequence: Synthetic oligonucleotide
ggacgguccccggcgacuc

SEQ ID NO: 712775 - RNA, 19 nt, Artificial Sequence
  Description of Artificial Sequence: Synthetic oligonucleotide
caucguugucacagccgau

SEQ ID NO: 712776 - RNA, 19 nt, Artificial Sequence
  Description of Artificial Sequence: Synthetic oligonucleotide
ggggucgauggggaggucu

SEQ ID NO: 712777 - RNA, 19 nt, Artificial Sequence
  Description of Artificial Sequence: Synthetic oligonucleotide
gacuguccaccugccuggu

SEQ ID NO: 712778 - RNA, 19 nt, Artificial Sequence
  Description of Artificial Sequence: Synthetic oligonucleotide
cgaagagcucgacaugacu

SEQ ID NO: 712779 - RNA, 19 nt, Artificial Sequence
  Description of Artificial Sequence: Synthetic oligonucleotide
cgauucucauuguuucgcu

SEQ ID NO: 712780 - RNA, 19 nt, Artificial Sequence
  Description of Artificial Sequence: Synthetic oligonucleotide
gcacccgccucuucugggu

SEQ ID NO: 712781 - RNA, 19 nt, Artificial Sequence
  Description of Artificial Sequence: Synthetic oligonucleotide
uggggucgauggggagguc

SEQ ID NO: 712782 - RNA, 19 nt, Artificial Sequence
  Description of Artificial Sequence: Synthetic oligonucleotide
ccgcaucagcgagacguuc

SEQ ID NO: 712783 - RNA, 19 nt, Artificial Sequence
  Description of Artificial Sequence: Synthetic oligonucleotide
ggcaagacuuggacccacu

SEQ ID NO: 712784 - RNA, 19 nt, Artificial Sequence
  Description of Artificial Sequence: Synthetic oligonucleotide
ccguccgucucacgcuuga

SEQ ID NO: 712785 - RNA, 19 nt, Artificial Sequence
  Description of Artificial Sequence: Synthetic oligonucleotide
ccggacgguccccggcgac

SEQ ID NO: 712786 - RNA, 19 nt, Artificial Sequence
  Description of Artificial Sequence: Synthetic oligonucleotide
cgauggggcacucaucguu

SEQ ID NO: 712787 - RNA, 19 nt, Artificial Sequence
  Description of Artificial Sequence: Synthetic oligonucleotide
ccgucucacgcuugaacuu

SEQ ID NO: 712788 - RNA, 19 nt, Artificial Sequence
  Description of Artificial Sequence: Synthetic oligonucleotide
ccuccgggaccgcuuguua

SEQ ID NO: 712789 - RNA, 19 nt, Artificial Sequence
  Description of Artificial Sequence: Synthetic oligonucleotide
caggggcaagauguacauu

SEQ ID NO: 712790 - RNA, 19 nt, Artificial Sequence
  Description of Artificial Sequence: Synthetic oligonucleotide
cgguccccggcgacucggc

SEQ ID NO: 712791 - RNA, 19 nt, Artificial Sequence
  Description of Artificial Sequence: Synthetic oligonucleotide
cccgacauuuggggcagua

SEQ ID NO: 712792 - RNA, 19 nt, Artificial Sequence
  Description of Artificial Sequence: Synthetic oligonucleotide
cgcacaccuuggcuucaca

SEQ ID NO: 712793 - RNA, 19 nt, Artificial Sequence
  Description of Artificial Sequence: Synthetic oligonucleotide
gccgaucugcagacucagu

SEQ ID NO: 712794 - RNA, 19 nt, Artificial Sequence
  Description of Artificial Sequence: Synthetic oligonucleotide
cccggacgguccccggcga

SEQ ID NO: 712795 - RNA, 19 nt, Artificial Sequence
  Description of Artificial Sequence: Synthetic oligonucleotide
cccgcaucagcgagacguu

SEQ ID NO: 712796 - RNA, 19 nt, Artificial Sequence
  Description of Artificial Sequence: Synthetic oligonucleotide
cggcgacucggcggcuuuc

SEQ ID NO: 712797 - RNA, 19 nt, Artificial Sequence
  Description of Artificial Sequence: Synthetic oligonucleotide
gccaucccauggagaggau

SEQ ID NO: 712798 - RNA, 19 nt, Artificial Sequence
  Description of Artificial Sequence: Synthetic oligonucleotide
ccccgacauuuggggcagu

SEQ ID NO: 712799 - RNA, 19 nt, Artificial Sequence
  Description of Artificial Sequence: Synthetic oligonucleotide
aauugcuucccgcauuccc

SEQ ID NO: 712800 - RNA, 19 nt, Artificial Sequence
  Description of Artificial Sequence: Synthetic oligonucleotide
uccaauuuauucucuaggg

SEQ ID NO: 712801 - RNA, 19 nt, Artificial Sequence
  Description of Artificial Sequence: Synthetic oligonucleotide
acaguagucgcacugguag

SEQ ID NO: 712802 - RNA, 19 nt, Artificial Sequence
  Description of Artificial Sequence: Synthetic oligonucleotide
uacgugagaacgcagguug

SEQ ID NO: 712803 - RNA, 19 nt, Artificial Sequence
  Description of Artificial Sequence: Synthetic oligonucleotide
aaauaagcagucagaggcc

SEQ ID NO: 712804 - RNA, 19 nt, Artificial Sequence
  Description of Artificial Sequence: Synthetic oligonucleotide
gacugaacgaaucucuugc

SEQ ID NO: 712805 - RNA, 19 nt, Artificial Sequence
  Description of Artificial Sequence: Synthetic oligonucleotide
uuaacugucggcaggcccc

SEQ ID NO: 712806 - RNA, 19 nt, Artificial Sequence
  Description of Artificial Sequence: Synthetic oligonucleotide
aaucucuugccacagcgcu

SEQ ID NO: 712807 - RNA, 19 nt, Artificial Sequence
  Description of Artificial Sequence: Synthetic oligonucleotide
ugugcuuugugccuggcca

SEQ ID NO: 712808 - RNA, 19 nt, Artificial Sequence
  Description of Artificial Sequence: Synthetic oligonucleotide
cuuuacgugagaacgcagg

SEQ ID NO: 712809 - RNA, 19 nt, Artificial Sequence
  Description of Artificial Sequence: Synthetic oligonucleotide
gauccgaacaugcugggcc

SEQ ID NO: 712810 - RNA, 19 nt, Artificial Sequence
  Description of Artificial Sequence: Synthetic oligonucleotide
aauuuauucucuagggaug

SEQ ID NO: 712811 - RNA, 19 nt, Artificial Sequence
  Description of Artificial Sequence: Synthetic oligonucleotide
gaugauuauguguuuggac

SEQ ID NO: 712812 - RNA, 19 nt, Artificial Sequence
  Description of Artificial Sequence: Synthetic oligonucleotide
uguggauccgaacaugcug

SEQ ID NO: 712813 - RNA, 19 nt, Artificial Sequence
  Description of Artificial Sequence: Synthetic oligonucleotide
uauucucuagggauggggc

SEQ ID NO: 712814 - RNA, 19 nt, Artificial Sequence
  Description of Artificial Sequence: Synthetic oligonucleotide
ucgcacuuguggaugaugg

SEQ ID NO: 712815 - RNA, 19 nt, Artificial Sequence
  Description of Artificial Sequence: Synthetic oligonucleotide
uggaugauuauguguuugg

SEQ ID NO: 712816 - RNA, 19 nt, Artificial Sequence
  Description of Artificial Sequence: Synthetic oligonucleotide
aagccuuggacucggugcg

SEQ ID NO: 712817 - RNA, 19 nt, Artificial Sequence
  Description of Artificial Sequence: Synthetic oligonucleotide
ugaugcacggucuuuacgu

SEQ ID NO: 712818 - RNA, 19 nt, Artificial Sequence
  Description of Artificial Sequence: Synthetic oligonucleotide
acugaacgaaucucuugcc

SEQ ID NO: 712819 - RNA, 19 nt, Artificial Sequence
  Description of Artificial Sequence: Synthetic oligonucleotide
gaaucacaagcguagagga

SEQ ID NO: 712820 - RNA, 19 nt, Artificial Sequence
  Description of Artificial Sequence: Synthetic oligonucleotide
uuauucucuagggaugggg

SEQ ID NO: 712821 - RNA, 19 nt, Artificial Sequence
  Description of Artificial Sequence: Synthetic oligonucleotide
gucaugagucuccaggugg

SEQ ID NO: 712822 - RNA, 19 nt, Artificial Sequence
  Description of Artificial Sequence: Synthetic oligonucleotide
gguguguuggcgcacaugg

SEQ ID NO: 712823 - RNA, 19 nt, Artificial Sequence
  Description of Artificial Sequence: Synthetic oligonucleotide
uugagguugccugaagugg

SEQ ID NO: 712824 - RNA, 19 nt, Artificial Sequence
  Description of Artificial Sequence: Synthetic oligonucleotide
ugugcgugaacuccuuucc

SEQ ID NO: 712825 - RNA, 19 nt, Artificial Sequence
  Description of Artificial Sequence: Synthetic oligonucleotide
accacgaccacacuuguca

SEQ ID NO: 712826 - RNA, 19 nt, Artificial Sequence
  Description of Artificial Sequence: Synthetic oligonucleotide
uggcguuugaaguuccccg

SEQ ID NO: 712827 - RNA, 19 nt, Artificial Sequence
  Description of Artificial Sequence: Synthetic oligonucleotide
uucucaugggccuugcaug

SEQ ID NO: 712828 - RNA, 19 nt, Artificial Sequence
  Description of Artificial Sequence: Synthetic oligonucleotide
uuuacgugagaacgcaggu

SEQ ID NO: 712829 - RNA, 19 nt, Artificial Sequence
  Description of Artificial Sequence: Synthetic oligonucleotide
uauguggucggauauuguc

SEQ ID NO: 712830 - RNA, 19 nt, Artificial Sequence
  Description of Artificial Sequence: Synthetic oligonucleotide
uuccuuaacugucggcagg

SEQ ID NO: 712831 - RNA, 19 nt, Artificial Sequence
  Description of Artificial Sequence: Synthetic oligonucleotide
acugugagcugagugaccg

SEQ ID NO: 712832 - RNA, 19 nt, Artificial Sequence
  Description of Artificial Sequence: Synthetic oligonucleotide
aucacaagcguagaggaug

SEQ ID NO: 712833 - RNA, 19 nt, Artificial Sequence
  Description of Artificial Sequence: Synthetic oligonucleotide
acauaacacacuggcaugg

SEQ ID NO: 712834 - RNA, 19 nt, Artificial Sequence
  Description of Artificial Sequence: Synthetic oligonucleotide
acaggaaucacaagcguag

SEQ ID NO: 712835 - RNA, 19 nt, Artificial Sequence
  Description of Artificial Sequence: Synthetic oligonucleotide
caacuggcuggacugaacg

SEQ ID NO: 712836 - RNA, 19 nt, Artificial Sequence
  Description of Artificial Sequence: Synthetic oligonucleotide
ugaauugcuucccgcauuc

SEQ ID NO: 712837 - RNA, 19 nt, Artificial Sequence
  Description of Artificial Sequence: Synthetic oligonucleotide
ucaugagucuccagguggc

SEQ ID NO: 712838 - RNA, 19 nt, Artificial Sequence
  Description of Artificial Sequence: Synthetic oligonucleotide
acaagcguagaggaugugg

SEQ ID NO: 712839 - RNA, 19 nt, Artificial Sequence
  Description of Artificial Sequence: Synthetic oligonucleotide
agugugaccaugucgucca

SEQ ID NO: 712840 - RNA, 19 nt, Artificial Sequence
  Description of Artificial Sequence: Synthetic oligonucleotide
ugcacggucuuuacgugag

SEQ ID NO: 712841 - RNA, 19 nt, Artificial Sequence
  Description of Artificial Sequence: Synthetic oligonucleotide
cuuaacugucggcaggccc

SEQ ID NO: 712842 - RNA, 19 nt, Artificial Sequence
  Description of Artificial Sequence: Synthetic oligonucleotide
ugagguugccugaaguggu

SEQ ID NO: 712843 - RNA, 19 nt, Artificial Sequence
  Description of Artificial Sequence: Synthetic oligonucleotide
uggcccauacugcugguag

SEQ ID NO: 712844 - RNA, 19 nt, Artificial Sequence
  Description of Artificial Sequence: Synthetic oligonucleotide
ucuuuacgugagaacgcag

SEQ ID NO: 712845 - RNA, 19 nt, Artificial Sequence
  Description of Artificial Sequence: Synthetic oligonucleotide
agcacuuccgucucaucag

SEQ ID NO: 712846 - RNA, 19 nt, Artificial Sequence
  Description of Artificial Sequence: Synthetic oligonucleotide
acgaccacacuugucacac

SEQ ID NO: 712847 - RNA, 19 nt, Artificial Sequence
  Description of Artificial Sequence: Synthetic oligonucleotide
agccagugugaccaugucg

SEQ ID NO: 712848 - RNA, 19 nt, Artificial Sequence
  Description of Artificial Sequence: Synthetic oligonucleotide
ugcgugaacuccuuuccgc

SEQ ID NO: 712849 - RNA, 19 nt, Artificial Sequence
  Description of Artificial Sequence: Synthetic oligonucleotide
caauguggaucuucaagug

SEQ ID NO: 712850 - RNA, 19 nt, Artificial Sequence
  Description of Artificial Sequence: Synthetic oligonucleotide
ugugauuggccaacuggcu

SEQ ID NO: 712851 - RNA, 19 nt, Artificial Sequence
  Description of Artificial Sequence: Synthetic oligonucleotide
aguagucgcacugguaggg

SEQ ID NO: 712852 - RNA, 19 nt, Artificial Sequence
  Description of Artificial Sequence: Synthetic oligonucleotide
cuuauguggucggauauug

SEQ ID NO: 712853 - RNA, 19 nt, Artificial Sequence
  Description of Artificial Sequence: Synthetic oligonucleotide
ggcaauguggaucuucaag

SEQ ID NO: 712854 - RNA, 19 nt, Artificial Sequence
  Description of Artificial Sequence: Synthetic oligonucleotide
ggcaggagcaccuugaguc

SEQ ID NO: 712855 - RNA, 19 nt, Artificial Sequence
  Description of Artificial Sequence: Synthetic oligonucleotide
ugacagugggugcacacgu

SEQ ID NO: 712856 - RNA, 19 nt, Artificial Sequence
  Description of Artificial Sequence: Synthetic oligonucleotide
gaaguccgcaucugucugg

SEQ ID NO: 712857 - RNA, 19 nt, Artificial Sequence
  Description of Artificial Sequence: Synthetic oligonucleotide
cucggugcgauccccauag

SEQ ID NO: 712858 - RNA, 19 nt, Artificial Sequence
  Description of Artificial Sequence: Synthetic oligonucleotide
acggucuuuacgugagaac

SEQ ID NO: 712859 - RNA, 19 nt, Artificial Sequence
  Description of Artificial Sequence: Synthetic oligonucleotide
agguggcgcaucuuggagg

SEQ ID NO: 712860 - RNA, 19 nt, Artificial Sequence
  Description of Artificial Sequence: Synthetic oligonucleotide
acacacgcugcacuuaugu

SEQ ID NO: 712861 - RNA, 19 nt, Artificial Sequence
  Description of Artificial Sequence: Synthetic oligonucleotide
ucacaagcguagaggaugu

SEQ ID NO: 712862 - RNA, 19 nt, Artificial Sequence
  Description of Artificial Sequence: Synthetic oligonucleotide
ugauggagccauaagccuu

SEQ ID NO: 712863 - RNA, 19 nt, Artificial Sequence
  Description of Artificial Sequence: Synthetic oligonucleotide
cacauaacacacuggcaug

SEQ ID NO: 712864 - RNA, 19 nt, Artificial Sequence
  Description of Artificial Sequence: Synthetic oligonucleotide
uguggucggauauugucau

SEQ ID NO: 712865 - RNA, 19 nt, Artificial Sequence
  Description of Artificial Sequence: Synthetic oligonucleotide
agaaguccgcaucugucug

SEQ ID NO: 712866 - RNA, 19 nt, Artificial Sequence
  Description of Artificial Sequence: Synthetic oligonucleotide
caauuuauucucuagggau

SEQ ID NO: 712867 - RNA, 19 nt, Artificial Sequence
  Description of Artificial Sequence: Synthetic oligonucleotide
cuugagagggccaucggca

SEQ ID NO: 712868 - RNA, 19 nt, Artificial Sequence
  Description of Artificial Sequence: Synthetic oligonucleotide
ucguccacagugaccacgc

SEQ ID NO: 712869 - RNA, 19 nt, Artificial Sequence
  Description of Artificial Sequence: Synthetic oligonucleotide
uuggccaacuggcuggacu

SEQ ID NO: 712870 - RNA, 19 nt, Artificial Sequence
  Description of Artificial Sequence: Synthetic oligonucleotide
cucccgaggggcaucagcc

SEQ ID NO: 712871 - RNA, 19 nt, Artificial Sequence
  Description of Artificial Sequence: Synthetic oligonucleotide
agaacgcagguuguccacc

SEQ ID NO: 712872 - RNA, 19 nt, Artificial Sequence
  Description of Artificial Sequence: Synthetic oligonucleotide
cugugcaccagcugguggc

SEQ ID NO: 712873 - RNA, 19 nt, Artificial Sequence
  Description of Artificial Sequence: Synthetic oligonucleotide
uggcgcaucuuggaggugg

SEQ ID NO: 712874 - RNA, 19 nt, Artificial Sequence
  Description of Artificial Sequence: Synthetic oligonucleotide
acagcgcucacagacguag

SEQ ID NO: 712875 - RNA, 19 nt, Artificial Sequence
  Description of Artificial Sequence: Synthetic oligonucleotide
gaugcacggucuuuacgug

SEQ ID NO: 712876 - RNA, 19 nt, Artificial Sequence
  Description of Artificial Sequence: Synthetic oligonucleotide
uuuauucucuagggauggg

SEQ ID NO: 712877 - RNA, 19 nt, Artificial Sequence
  Description of Artificial Sequence: Synthetic oligonucleotide
uccaugcuaagcuccugcc

SEQ ID NO: 712878 - RNA, 19 nt, Artificial Sequence
  Description of Artificial Sequence: Synthetic oligonucleotide
uguguuuggacaggucccc

SEQ ID NO: 712879 - RNA, 19 nt, Artificial Sequence
  Description of Artificial Sequence: Synthetic oligonucleotide
auaagccuuggacucggug

SEQ ID NO: 712880 - RNA, 19 nt, Artificial Sequence
  Description of Artificial Sequence: Synthetic oligonucleotide
aacgcagguuguccacccg

SEQ ID NO: 712881 - RNA, 19 nt, Artificial Sequence
  Description of Artificial Sequence: Synthetic oligonucleotide
gauggagccauaagccuug

SEQ ID NO: 712882 - RNA, 19 nt, Artificial Sequence
  Description of Artificial Sequence: Synthetic oligonucleotide
auucucuagggauggggca

SEQ ID NO: 712883 - RNA, 19 nt, Artificial Sequence
  Description of Artificial Sequence: Synthetic oligonucleotide
auuauguguuuggacaggu

SEQ ID NO: 712884 - RNA, 19 nt, Artificial Sequence
  Description of Artificial Sequence: Synthetic oligonucleotide
aagcguagaggaugugggu

SEQ ID NO: 712885 - RNA, 19 nt, Artificial Sequence
  Description of Artificial Sequence: Synthetic oligonucleotide
acgaaucucuugccacagc

SEQ ID NO: 712886 - RNA, 19 nt, Artificial Sequence
  Description of Artificial Sequence: Synthetic oligonucleotide
uuauguggucggauauugu

SEQ ID NO: 712887 - RNA, 19 nt, Artificial Sequence
  Description of Artificial Sequence: Synthetic oligonucleotide
uguccacccgguugaaacc

SEQ ID NO: 712888 - RNA, 19 nt, Artificial Sequence
  Description of Artificial Sequence: Synthetic oligonucleotide
uugagcgcagguuccggcc

SEQ ID NO: 712889 - RNA, 19 nt, Artificial Sequence
  Description of Artificial Sequence: Synthetic oligonucleotide
uccuuaacugucggcaggc

SEQ ID NO: 712890 - RNA, 19 nt, Artificial Sequence
  Description of Artificial Sequence: Synthetic oligonucleotide
gauccguacgugccgcugc

SEQ ID NO: 712891 - RNA, 19 nt, Artificial Sequence
  Description of Artificial Sequence: Synthetic oligonucleotide
gaacgcagguuguccaccc

SEQ ID NO: 712892 - RNA, 19 nt, Artificial Sequence
  Description of Artificial Sequence: Synthetic oligonucleotide
acccgguugaaaccacgac

SEQ ID NO: 712893 - RNA, 19 nt, Artificial Sequence
  Description of Artificial Sequence: Synthetic oligonucleotide
agccguagcgcgccucucc

SEQ ID NO: 712894 - RNA, 19 nt, Artificial Sequence
  Description of Artificial Sequence: Synthetic oligonucleotide
guggcuugagcgcagguuc

SEQ ID NO: 712895 - RNA, 19 nt, Artificial Sequence
  Description of Artificial Sequence: Synthetic oligonucleotide
acgcagguuguccacccgg

SEQ ID NO: 712896 - RNA, 19 nt, Artificial Sequence
  Description of Artificial Sequence: Synthetic oligonucleotide
uacgugccgcugcagcgcg

SEQ ID NO: 712897 - RNA, 19 nt, Artificial Sequence
  Description of Artificial Sequence: Synthetic oligonucleotide
cuugagcgcagguuccggc

SEQ ID NO: 712898 - RNA, 19 nt, Artificial Sequence
  Description of Artificial Sequence: Synthetic oligonucleotide
caguagucgcacugguagg

SEQ ID NO: 712899 - RNA, 19 nt, Artificial Sequence
  Description of Artificial Sequence: Synthetic oligonucleotide
ugccacccacuuuaaauaa

SEQ ID NO: 712900 - RNA, 19 nt, Artificial Sequence
  Description of Artificial Sequence: Synthetic oligonucleotide
ugcucugagcucucugaca

SEQ ID NO: 712901 - RNA, 19 nt, Artificial Sequence
  Description of Artificial Sequence: Synthetic oligonucleotide
accccgcuccucuuugagc

SEQ ID NO: 712902 - RNA, 19 nt, Artificial Sequence
  Description of Artificial Sequence: Synthetic oligonucleotide
ugccagagccuccguagcc

SEQ ID NO: 712903 - RNA, 19 nt, Artificial Sequence
  Description of Artificial Sequence: Synthetic oligonucleotide
agagcuugccacagucccc

SEQ ID NO: 712904 - RNA, 19 nt, Artificial Sequence
  Description of Artificial Sequence: Synthetic oligonucleotide
auaauccaauuuauucucu

SEQ ID NO: 712905 - RNA, 19 nt, Artificial Sequence
  Description of Artificial Sequence: Synthetic oligonucleotide
ccacccacuuuaaauaagc

SEQ ID NO: 712906 - RNA, 19 nt, Artificial Sequence
  Description of Artificial Sequence: Synthetic oligonucleotide
uguggcguuugaaguuccc

SEQ ID NO: 712907 - RNA, 19 nt, Artificial Sequence
  Description of Artificial Sequence: Synthetic oligonucleotide
uggcuugagcgcagguucc

SEQ ID NO: 712908 - RNA, 19 nt, Artificial Sequence
  Description of Artificial Sequence: Synthetic oligonucleotide
uggacugaacgaaucucuu

SEQ ID NO: 712909 - RNA, 19 nt, Artificial Sequence
  Description of Artificial Sequence: Synthetic oligonucleotide
accuugagucccagggugc

SEQ ID NO: 712910 - RNA, 19 nt, Artificial Sequence
  Description of Artificial Sequence: Synthetic oligonucleotide
gaaguuccccgugugcgug

SEQ ID NO: 712911 - RNA, 19 nt, Artificial Sequence
  Description of Artificial Sequence: Synthetic oligonucleotide
cugugggcggaguuucugc

SEQ ID NO: 712912 - RNA, 19 nt, Artificial Sequence
  Description of Artificial Sequence: Synthetic oligonucleotide
auguggucggauauuguca

SEQ ID NO: 712913 - RNA, 19 nt, Artificial Sequence
  Description of Artificial Sequence: Synthetic oligonucleotide
cauaacacacuggcauggc

SEQ ID NO: 712914 - RNA, 19 nt, Artificial Sequence
  Description of Artificial Sequence: Synthetic oligonucleotide
auaggguuucagcgggcug

SEQ ID NO: 712915 - RNA, 19 nt, Artificial Sequence
  Description of Artificial Sequence: Synthetic oligonucleotide
gguuucagcgggcugugug

SEQ ID NO: 712916 - RNA, 19 nt, Artificial Sequence
  Description of Artificial Sequence: Synthetic oligonucleotide
auccgaacaugcugggcca

SEQ ID NO: 712917 - RNA, 19 nt, Artificial Sequence
  Description of Artificial Sequence: Synthetic oligonucleotide
augcuaagcuccugcccag

SEQ ID NO: 712918 - RNA, 19 nt, Artificial Sequence
  Description of Artificial Sequence: Synthetic oligonucleotide
ggugcgauccccauaggug

SEQ ID NO: 712919 - RNA, 19 nt, Artificial Sequence
  Description of Artificial Sequence: Synthetic oligonucleotide
augcacggucuuuacguga

SEQ ID NO: 712920 - RNA, 19 nt, Artificial Sequence
  Description of Artificial Sequence: Synthetic oligonucleotide
uuggacucggugcgauccc

SEQ ID NO: 712921 - RNA, 19 nt, Artificial Sequence
  Description of Artificial Sequence: Synthetic oligonucleotide
uccgagaaggagcggccac

SEQ ID NO: 712922 - RNA, 19 nt, Artificial Sequence
  Description of Artificial Sequence: Synthetic oligonucleotide
auaagcagucagaggccac

SEQ ID NO: 712923 - RNA, 19 nt, Artificial Sequence
  Description of Artificial Sequence: Synthetic oligonucleotide
aaucacaagcguagaggau

SEQ ID NO: 712924 - RNA, 19 nt, Artificial Sequence
  Description of Artificial Sequence: Synthetic oligonucleotide
uucuugucgcagugugggc

SEQ ID NO: 712925 - RNA, 19 nt, Artificial Sequence
  Description of Artificial Sequence: Synthetic oligonucleotide
cccgguugaaaccacgacc

SEQ ID NO: 712926 - RNA, 19 nt, Artificial Sequence
  Description of Artificial Sequence: Synthetic oligonucleotide
cggucuuuacgugagaacg

SEQ ID NO: 712927 - RNA, 19 nt, Artificial Sequence
  Description of Artificial Sequence: Synthetic oligonucleotide
gugugcgugaacuccuuuc

SEQ ID NO: 712928 - RNA, 19 nt, Artificial Sequence
  Description of Artificial Sequence: Synthetic oligonucleotide
ggacugaacgaaucucuug

SEQ ID NO: 712929 - RNA, 19 nt, Artificial Sequence
  Description of Artificial Sequence: Synthetic oligonucleotide
ucccgagugccgcuucuug

SEQ ID NO: 712930 - RNA, 19 nt, Artificial Sequence
  Description of Artificial Sequence: Synthetic oligonucleotide
uaacugucggcaggccccg

SEQ ID NO: 712931 - RNA, 19 nt, Artificial Sequence
  Description of Artificial Sequence: Synthetic oligonucleotide
aaguccgcaucugucugga

SEQ ID NO: 712932 - RNA, 19 nt, Artificial Sequence
  Description of Artificial Sequence: Synthetic oligonucleotide
ugcacuuauguggucggau

SEQ ID NO: 712933 - RNA, 19 nt, Artificial Sequence
  Description of Artificial Sequence: Synthetic oligonucleotide
gauucggauguggcguuug

SEQ ID NO: 712934 - RNA, 19 nt, Artificial Sequence
  Description of Artificial Sequence: Synthetic oligonucleotide
caugccacucguggggucc

SEQ ID NO: 712935 - RNA, 19 nt, Artificial Sequence
  Description of Artificial Sequence: Synthetic oligonucleotide
gucuuuacgugagaacgca

SEQ ID NO: 712936 - RNA, 19 nt, Artificial Sequence
  Description of Artificial Sequence: Synthetic oligonucleotide
uacacacgcugcacuuaug

SEQ ID NO: 712937 - RNA, 19 nt, Artificial Sequence
  Description of Artificial Sequence: Synthetic oligonucleotide
ucccugagguggugaauug

SEQ ID NO: 712938 - RNA, 19 nt, Artificial Sequence
  Description of Artificial Sequence: Synthetic oligonucleotide
aaccacgaccacacuuguc

SEQ ID NO: 712939 - RNA, 19 nt, Artificial Sequence
  Description of Artificial Sequence: Synthetic oligonucleotide
guguggauccguacgugcc

SEQ ID NO: 712940 - RNA, 19 nt, Artificial Sequence
  Description of Artificial Sequence: Synthetic oligonucleotide
acucccggcaugagaaggg

SEQ ID NO: 712941 - RNA, 19 nt, Artificial Sequence
  Description of Artificial Sequence: Synthetic oligonucleotide
uccccgcagccguagcgcg

SEQ ID NO: 712942 - RNA, 19 nt, Artificial Sequence
  Description of Artificial Sequence: Synthetic oligonucleotide
cacaggaaucacaagcgua

SEQ ID NO: 712943 - RNA, 19 nt, Artificial Sequence
  Description of Artificial Sequence: Synthetic oligonucleotide
aaguuccccgugugcguga

SEQ ID NO: 712944 - RNA, 19 nt, Artificial Sequence
  Description of Artificial Sequence: Synthetic oligonucleotide
aguccucgcacuuguggau

SEQ ID NO: 712945 - RNA, 19 nt, Artificial Sequence
  Description of Artificial Sequence: Synthetic oligonucleotide
uuacgugagaacgcagguu

SEQ ID NO: 712946 - RNA, 19 nt, Artificial Sequence
  Description of Artificial Sequence: Synthetic oligonucleotide
gcacuugagagggccaucg

SEQ ID NO: 712947 - RNA, 19 nt, Artificial Sequence
  Description of Artificial Sequence: Synthetic oligonucleotide
cagcugucacugcagcccc

SEQ ID NO: 712948 - RNA, 19 nt, Artificial Sequence
  Description of Artificial Sequence: Synthetic oligonucleotide
cacuugagagggccaucgg

SEQ ID NO: 712949 - RNA, 19 nt, Artificial Sequence
  Description of Artificial Sequence: Synthetic oligonucleotide
aggccccgugcccucuucc

SEQ ID NO: 712950 - RNA, 19 nt, Artificial Sequence
  Description of Artificial Sequence: Synthetic oligonucleotide
agggagcuggcuugaguga

SEQ ID NO: 712951 - RNA, 19 nt, Artificial Sequence
  Description of Artificial Sequence: Synthetic oligonucleotide
guggcguuugaaguucccc

SEQ ID NO: 712952 - RNA, 19 nt, Artificial Sequence
  Description of Artificial Sequence: Synthetic oligonucleotide
ugagagggccaucggcaau

SEQ ID NO: 712953 - RNA, 19 nt, Artificial Sequence
  Description of Artificial Sequence: Synthetic oligonucleotide
ggucuuuacgugagaacgc

SEQ ID NO: 712954 - RNA, 19 nt, Artificial Sequence
  Description of Artificial Sequence: Synthetic oligonucleotide
gcugagugaccgcuguugc

SEQ ID NO: 712955 - RNA, 19 nt, Artificial Sequence
  Description of Artificial Sequence: Synthetic oligonucleotide
uucagcacuuccgucucau

SEQ ID NO: 712956 - RNA, 19 nt, Artificial Sequence
  Description of Artificial Sequence: Synthetic oligonucleotide
ggauauugucaugguggcg

SEQ ID NO: 712957 - RNA, 19 nt, Artificial Sequence
  Description of Artificial Sequence: Synthetic oligonucleotide
ccaauuuauucucuaggga

SEQ ID NO: 712958 - RNA, 19 nt, Artificial Sequence
  Description of Artificial Sequence: Synthetic oligonucleotide
agggguucuccccguucuc

SEQ ID NO: 712959 - RNA, 19 nt, Artificial Sequence
  Description of Artificial Sequence: Synthetic oligonucleotide
gaauugcuucccgcauucc

SEQ ID NO: 712960 - RNA, 19 nt, Artificial Sequence
  Description of Artificial Sequence: Synthetic oligonucleotide
cacccacuuuaaauaagca

SEQ ID NO: 712961 - RNA, 19 nt, Artificial Sequence
  Description of Artificial Sequence: Synthetic oligonucleotide
cuccguagccagugugacc

SEQ ID NO: 712962 - RNA, 19 nt, Artificial Sequence
  Description of Artificial Sequence: Synthetic oligonucleotide
ccgguugaaaccacgacca

SEQ ID NO: 712963 - RNA, 19 nt, Artificial Sequence
  Description of Artificial Sequence: Synthetic oligonucleotide
gugggauggcccucagccc

SEQ ID NO: 712964 - RNA, 19 nt, Artificial Sequence
  Description of Artificial Sequence: Synthetic oligonucleotide
gaugcauccccucuuccuu

SEQ ID NO: 712965 - RNA, 19 nt, Artificial Sequence
  Description of Artificial Sequence: Synthetic oligonucleotide
gagguugccugaaguggug

SEQ ID NO: 712966 - RNA, 19 nt, Artificial Sequence
  Description of Artificial Sequence: Synthetic oligonucleotide
agcagucagaggccaccug

SEQ ID NO: 712967 - RNA, 19 nt, Artificial Sequence
  Description of Artificial Sequence: Synthetic oligonucleotide
uuucagcgggcuguguguc

SEQ ID NO: 712968 - RNA, 19 nt, Artificial Sequence
  Description of Artificial Sequence: Synthetic oligonucleotide
uccgucucaucagcuguca

SEQ ID NO: 712969 - RNA, 19 nt, Artificial Sequence
  Description of Artificial Sequence: Synthetic oligonucleotide
ugccuggcccauacugcug

SEQ ID NO: 712970 - RNA, 19 nt, Artificial Sequence
  Description of Artificial Sequence: Synthetic oligonucleotide
ucggugcgauccccauagg

SEQ ID NO: 712971 - RNA, 19 nt, Artificial Sequence
  Description of Artificial Sequence: Synthetic oligonucleotide
ugcauccccucuuccuuaa

SEQ ID NO: 712972 - RNA, 19 nt, Artificial Sequence
  Description of Artificial Sequence: Synthetic oligonucleotide
uuccggcccuccaugcuaa

SEQ ID NO: 712973 - RNA, 19 nt, Artificial Sequence
  Description of Artificial Sequence: Synthetic oligonucleotide
gauccgcaggugccgcuug

SEQ ID NO: 712974 - RNA, 19 nt, Artificial Sequence
  Description of Artificial Sequence: Synthetic oligonucleotide
uccucgccuuugcuggcug

SEQ ID NO: 712975 - RNA, 19 nt, Artificial Sequence
  Description of Artificial Sequence: Synthetic oligonucleotide
uggacucggugcgaucccc

SEQ ID NO: 712976 - RNA, 19 nt, Artificial Sequence
  Description of Artificial Sequence: Synthetic oligonucleotide
guagucgcacugguagggc

SEQ ID NO: 712977 - RNA, 19 nt, Artificial Sequence
  Description of Artificial Sequence: Synthetic oligonucleotide
uccacccgguugaaaccac

SEQ ID NO: 712978 - RNA, 19 nt, Artificial Sequence
  Description of Artificial Sequence: Synthetic oligonucleotide
uucagcgggcugugugucu

SEQ ID NO: 712979 - RNA, 19 nt, Artificial Sequence
  Description of Artificial Sequence: Synthetic oligonucleotide
guuucagcgggcugugugu

SEQ ID NO: 712980 - RNA, 19 nt, Artificial Sequence
  Description of Artificial Sequence: Synthetic oligonucleotide
guggauucggauguggcgu

SEQ ID NO: 712981 - RNA, 19 nt, Artificial Sequence
  Description of Artificial Sequence: Synthetic oligonucleotide
uggauucggauguggcguu

SEQ ID NO: 712982 - RNA, 19 nt, Artificial Sequence
  Description of Artificial Sequence: Synthetic oligonucleotide
ugaccucaccacccucuuc

SEQ ID NO: 712983 - RNA, 19 nt, Artificial Sequence
  Description of Artificial Sequence: Synthetic oligonucleotide
ggaugauuauguguuugga

SEQ ID NO: 712984 - RNA, 19 nt, Artificial Sequence
  Description of Artificial Sequence: Synthetic oligonucleotide
cugaggagccuguagcucu

SEQ ID NO: 712985 - RNA, 19 nt, Artificial Sequence
  Description of Artificial Sequence: Synthetic oligonucleotide
gccacaguagucgcacugg

SEQ ID NO: 712986 - RNA, 19 nt, Artificial Sequence
  Description of Artificial Sequence: Synthetic oligonucleotide
cggauauugucaugguggc

SEQ ID NO: 712987 - RNA, 19 nt, Artificial Sequence
  Description of Artificial Sequence: Synthetic oligonucleotide
auccguacgugccgcugca

SEQ ID NO: 712988 - RNA, 19 nt, Artificial Sequence
  Description of Artificial Sequence: Synthetic oligonucleotide
guacgugccgcugcagcgc

SEQ ID NO: 712989 - RNA, 19 nt, Artificial Sequence
  Description of Artificial Sequence: Synthetic oligonucleotide
ggugggguccgagaaggag

SEQ ID NO: 712990 - RNA, 19 nt, Artificial Sequence
  Description of Artificial Sequence: Synthetic oligonucleotide
ccaugcuaagcuccugccc

SEQ ID NO: 712991 - RNA, 19 nt, Artificial Sequence
  Description of Artificial Sequence: Synthetic oligonucleotide
gcuugagugaaggcuuugc

SEQ ID NO: 712992 - RNA, 19 nt, Artificial Sequence
  Description of Artificial Sequence: Synthetic oligonucleotide
guggauccguacgugccgc

SEQ ID NO: 712993 - RNA, 19 nt, Artificial Sequence
  Description of Artificial Sequence: Synthetic oligonucleotide
cucgcacuuguggaugaug

SEQ ID NO: 712994 - RNA, 19 nt, Artificial Sequence
  Description of Artificial Sequence: Synthetic oligonucleotide
guggucggauauugucaug

SEQ ID NO: 712995 - RNA, 19 nt, Artificial Sequence
  Description of Artificial Sequence: Synthetic oligonucleotide
cucgccuuugcuggcuggc

SEQ ID NO: 712996 - RNA, 19 nt, Artificial Sequence
  Description of Artificial Sequence: Synthetic oligonucleotide
cuuggaggugggguccgag

SEQ ID NO: 712997 - RNA, 19 nt, Artificial Sequence
  Description of Artificial Sequence: Synthetic oligonucleotide
guccucgcacuuguggaug

SEQ ID NO: 712998 - RNA, 19 nt, Artificial Sequence
  Description of Artificial Sequence: Synthetic oligonucleotide
auagguggcuugagcgcag

SEQ ID NO: 712999 - RNA, 19 nt, Artificial Sequence
  Description of Artificial Sequence: Synthetic oligonucleotide
cguacgugccgcugcagcg

SEQ ID NO: 713000 - RNA, 19 nt, Artificial Sequence
  Description of Artificial Sequence: Synthetic oligonucleotide
agcgcgccucucccgagug

SEQ ID NO: 713001 - RNA, 19 nt, Artificial Sequence
  Description of Artificial Sequence: Synthetic oligonucleotide
cuugagcuccacagaugga

SEQ ID NO: 713002 - RNA, 19 nt, Artificial Sequence
  Description of Artificial Sequence: Synthetic oligonucleotide
ggguccgagaaggagcggc

SEQ ID NO: 713003 - RNA, 19 nt, Artificial Sequence
  Description of Artificial Sequence: Synthetic oligonucleotide
cacccgguugaaaccacga

SEQ ID NO: 713004 - RNA, 19 nt, Artificial Sequence
  Description of Artificial Sequence: Synthetic oligonucleotide
agguugccugaagugguga

SEQ ID NO: 713005 - RNA, 19 nt, Artificial Sequence
  Description of Artificial Sequence: Synthetic oligonucleotide
gauuggccaacuggcugga

SEQ ID NO: 713006 - RNA, 19 nt, Artificial Sequence
  Description of Artificial Sequence: Synthetic oligonucleotide
ccugggacggaagaccagc

SEQ ID NO: 713007 - RNA, 19 nt, Artificial Sequence
  Description of Artificial Sequence: Synthetic oligonucleotide
gcccgccuugcccugaugc

SEQ ID NO: 713008 - RNA, 19 nt, Artificial Sequence
  Description of Artificial Sequence: Synthetic oligonucleotide
uagcgcgccucucccgagu

SEQ ID NO: 713009 - RNA, 19 nt, Artificial Sequence
  Description of Artificial Sequence: Synthetic oligonucleotide
ugggguccggcuugagcuc

SEQ ID NO: 713010 - RNA, 19 nt, Artificial Sequence
  Description of Artificial Sequence: Synthetic oligonucleotide
uggauccguacgugccgcu

SEQ ID NO: 713011 - RNA, 19 nt, Artificial Sequence
  Description of Artificial Sequence: Synthetic oligonucleotide
guccacccgguugaaacca

SEQ ID NO: 713012 - RNA, 19 nt, Artificial Sequence
  Description of Artificial Sequence: Synthetic oligonucleotide
guagcgcgccucucccgag

SEQ ID NO: 713013 - RNA, 19 nt, Artificial Sequence
  Description of Artificial Sequence: Synthetic oligonucleotide
cacggucuuuacgugagaa

SEQ ID NO: 713014 - RNA, 19 nt, Artificial Sequence
  Description of Artificial Sequence: Synthetic oligonucleotide
cacuuauguggucggauau

SEQ ID NO: 713015 - RNA, 19 nt, Artificial Sequence
  Description of Artificial Sequence: Synthetic oligonucleotide
ccgagugccgcuucuugug

SEQ ID NO: 713016 - RNA, 19 nt, Artificial Sequence
  Description of Artificial Sequence: Synthetic oligonucleotide
ucccggcaugagaaggguu

SEQ ID NO: 713017 - RNA, 19 nt, Artificial Sequence
  Description of Artificial Sequence: Synthetic oligonucleotide
caggugccgcuugagguuc

SEQ ID NO: 713018 - RNA, 19 nt, Artificial Sequence
  Description of Artificial Sequence: Synthetic oligonucleotide
gccacccacuuuaaauaag

SEQ ID NO: 713019 - RNA, 19 nt, Artificial Sequence
  Description of Artificial Sequence: Synthetic oligonucleotide
uccguacgugccgcugcag

SEQ ID NO: 713020 - RNA, 19 nt, Artificial Sequence
  Description of Artificial Sequence: Synthetic oligonucleotide
ugccgcugcagcgcgccug

SEQ ID NO: 713021 - RNA, 19 nt, Artificial Sequence
  Description of Artificial Sequence: Synthetic oligonucleotide
gcacuuauguggucggaua

SEQ ID NO: 713022 - RNA, 19 nt, Artificial Sequence
  Description of Artificial Sequence: Synthetic oligonucleotide
ggcuugagcgcagguuccg

SEQ ID NO: 713023 - RNA, 19 nt, Artificial Sequence
  Description of Artificial Sequence: Synthetic oligonucleotide
cuccgucugcucugcacca

SEQ ID NO: 713024 - RNA, 19 nt, Artificial Sequence
  Description of Artificial Sequence: Synthetic oligonucleotide
caugaccagugccugggcu

SEQ ID NO: 713025 - RNA, 19 nt, Artificial Sequence
  Description of Artificial Sequence: Synthetic oligonucleotide
ccacccgguugaaaccacg

SEQ ID NO: 713026 - RNA, 19 nt, Artificial Sequence
  Description of Artificial Sequence: Synthetic oligonucleotide
acgugagaacgcagguugu

SEQ ID NO: 713027 - RNA, 19 nt, Artificial Sequence
  Description of Artificial Sequence: Synthetic oligonucleotide
uccgucugcucugcaccac

SEQ ID NO: 713028 - RNA, 19 nt, Artificial Sequence
  Description of Artificial Sequence: Synthetic oligonucleotide
acucggugcgauccccaua

SEQ ID NO: 713029 - RNA, 19 nt, Artificial Sequence
  Description of Artificial Sequence: Synthetic oligonucleotide
ggauccgaacaugcugggc

SEQ ID NO: 713030 - RNA, 19 nt, Artificial Sequence
  Description of Artificial Sequence: Synthetic oligonucleotide
gcuugagcgcagguuccgg

SEQ ID NO: 713031 - RNA, 19 nt, Artificial Sequence
  Description of Artificial Sequence: Synthetic oligonucleotide
gugaccacgcugaccucac

SEQ ID NO: 713032 - RNA, 19 nt, Artificial Sequence
  Description of Artificial Sequence: Synthetic oligonucleotide
ggcuugagcuccacagaug

SEQ ID NO: 713033 - RNA, 19 nt, Artificial Sequence
  Description of Artificial Sequence: Synthetic oligonucleotide
ggugaauugcuucccgcau

SEQ ID NO: 713034 - RNA, 19 nt, Artificial Sequence
  Description of Artificial Sequence: Synthetic oligonucleotide
gggccaucggcaaugugga

SEQ ID NO: 713035 - RNA, 19 nt, Artificial Sequence
  Description of Artificial Sequence: Synthetic oligonucleotide
ccguacgugccgcugcagc

SEQ ID NO: 713036 - RNA, 19 nt, Artificial Sequence
  Description of Artificial Sequence: Synthetic oligonucleotide
cuaagcuccugcccagagu

SEQ ID NO: 713037 - RNA, 19 nt, Artificial Sequence
  Description of Artificial Sequence: Synthetic oligonucleotide
uccggcccuccaugcuaag

SEQ ID NO: 713038 - RNA, 19 nt, Artificial Sequence
  Description of Artificial Sequence: Synthetic oligonucleotide
ggagcuggcuugagugaag

SEQ ID NO: 713039 - RNA, 19 nt, Artificial Sequence
  Description of Artificial Sequence: Synthetic oligonucleotide
ccuugagucccagggugcc

SEQ ID NO: 713040 - RNA, 19 nt, Artificial Sequence
  Description of Artificial Sequence: Synthetic oligonucleotide
gccguagcgcgccucuccc

SEQ ID NO: 713041 - RNA, 19 nt, Artificial Sequence
  Description of Artificial Sequence: Synthetic oligonucleotide
gccgcuugagguucccuga

SEQ ID NO: 713042 - RNA, 19 nt, Artificial Sequence
  Description of Artificial Sequence: Synthetic oligonucleotide
gccgcugcagcgcgccugg

SEQ ID NO: 713043 - RNA, 19 nt, Artificial Sequence
  Description of Artificial Sequence: Synthetic oligonucleotide
ccacgaccacacuugucac

SEQ ID NO: 713044 - RNA, 19 nt, Artificial Sequence
  Description of Artificial Sequence: Synthetic oligonucleotide
ugccacucgugggguccgg

SEQ ID NO: 713045 - RNA, 19 nt, Artificial Sequence
  Description of Artificial Sequence: Synthetic oligonucleotide
cauaggguuucagcgggcu

SEQ ID NO: 713046 - RNA, 19 nt, Artificial Sequence
  Description of Artificial Sequence: Synthetic oligonucleotide
ggauccguacgugccgcug

SEQ ID NO: 713047 - RNA, 19 nt, Artificial Sequence
  Description of Artificial Sequence: Synthetic oligonucleotide
ggcccauacugcugguaga

SEQ ID NO: 713048 - RNA, 19 nt, Artificial Sequence
  Description of Artificial Sequence: Synthetic oligonucleotide
cacaagcguagaggaugug

SEQ ID NO: 713049 - RNA, 19 nt, Artificial Sequence
  Description of Artificial Sequence: Synthetic oligonucleotide
cccugagguggugaauugc

SEQ ID NO: 713050 - RNA, 19 nt, Artificial Sequence
  Description of Artificial Sequence: Synthetic oligonucleotide
guccgagaaggagcggcca

SEQ ID NO: 713051 - RNA, 19 nt, Artificial Sequence
  Description of Artificial Sequence: Synthetic oligonucleotide
gcuguguggauccgaacau

SEQ ID NO: 713052 - RNA, 19 nt, Artificial Sequence
  Description of Artificial Sequence: Synthetic oligonucleotide
gcugugggcggaguuucug

SEQ ID NO: 713053 - RNA, 19 nt, Artificial Sequence
  Description of Artificial Sequence: Synthetic oligonucleotide
cucucccgagugccgcuuc

SEQ ID NO: 713054 - RNA, 19 nt, Artificial Sequence
  Description of Artificial Sequence: Synthetic oligonucleotide
ccccgugugcgugaacucc

SEQ ID NO: 713055 - RNA, 19 nt, Artificial Sequence
  Description of Artificial Sequence: Synthetic oligonucleotide
cgugcugccuggcccauac

SEQ ID NO: 713056 - RNA, 19 nt, Artificial Sequence
  Description of Artificial Sequence: Synthetic oligonucleotide
cugggacggaagaccagcu

SEQ ID NO: 713057 - RNA, 19 nt, Artificial Sequence
  Description of Artificial Sequence: Synthetic oligonucleotide
cgagugccgcuucuugugc

SEQ ID NO: 713058 - RNA, 19 nt, Artificial Sequence
  Description of Artificial Sequence: Synthetic oligonucleotide
aguccgcaucugucuggaa

SEQ ID NO: 713059 - RNA, 19 nt, Artificial Sequence
  Description of Artificial Sequence: Synthetic oligonucleotide
aguuccccgugugcgugaa

SEQ ID NO: 713060 - RNA, 19 nt, Artificial Sequence
  Description of Artificial Sequence: Synthetic oligonucleotide
ccuuaacugucggcaggcc

SEQ ID NO: 713061 - RNA, 19 nt, Artificial Sequence
  Description of Artificial Sequence: Synthetic oligonucleotide
ggcauggcuucucacccgu

SEQ ID NO: 713062 - RNA, 19 nt, Artificial Sequence
  Description of Artificial Sequence: Synthetic oligonucleotide
ggucggauauugucauggu

SEQ ID NO: 713063 - RNA, 19 nt, Artificial Sequence
  Description of Artificial Sequence: Synthetic oligonucleotide
uguggguguuggggucuuc

SEQ ID NO: 713064 - RNA, 19 nt, Artificial Sequence
  Description of Artificial Sequence: Synthetic oligonucleotide
ggccacgugcugccuggcc

SEQ ID NO: 713065 - RNA, 19 nt, Artificial Sequence
  Description of Artificial Sequence: Synthetic oligonucleotide
gcccauacugcugguagaa

SEQ ID NO: 713066 - RNA, 19 nt, Artificial Sequence
  Description of Artificial Sequence: Synthetic oligonucleotide
aacugucggcaggccccgu

SEQ ID NO: 713067 - RNA, 19 nt, Artificial Sequence
  Description of Artificial Sequence: Synthetic oligonucleotide
guccggcuugagcuccaca

SEQ ID NO: 713068 - RNA, 19 nt, Artificial Sequence
  Description of Artificial Sequence: Synthetic oligonucleotide
ccgaggggcaucagccuuc

SEQ ID NO: 713069 - RNA, 19 nt, Artificial Sequence
  Description of Artificial Sequence: Synthetic oligonucleotide
agccuuggacucggugcga

SEQ ID NO: 713070 - RNA, 19 nt, Artificial Sequence
  Description of Artificial Sequence: Synthetic oligonucleotide
uggccacgugcugccuggc

SEQ ID NO: 713071 - RNA, 19 nt, Artificial Sequence
  Description of Artificial Sequence: Synthetic oligonucleotide
acgugccgcugcagcgcgc

SEQ ID NO: 713072 - RNA, 19 nt, Artificial Sequence
  Description of Artificial Sequence: Synthetic oligonucleotide
aggcucccgaggggcauca

SEQ ID NO: 713073 - RNA, 19 nt, Artificial Sequence
  Description of Artificial Sequence: Synthetic oligonucleotide
ucgugggguccggcuugag

SEQ ID NO: 713074 - RNA, 19 nt, Artificial Sequence
  Description of Artificial Sequence: Synthetic oligonucleotide
gaccagugccugggcugug

SEQ ID NO: 713075 - RNA, 19 nt, Artificial Sequence
  Description of Artificial Sequence: Synthetic oligonucleotide
gccuccguagccaguguga

SEQ ID NO: 713076 - RNA, 19 nt, Artificial Sequence
  Description of Artificial Sequence: Synthetic oligonucleotide
gagcgcagguuccggcccu

SEQ ID NO: 713077 - RNA, 19 nt, Artificial Sequence
  Description of Artificial Sequence: Synthetic oligonucleotide
ccguagcgcgccucucccg

SEQ ID NO: 713078 - RNA, 19 nt, Artificial Sequence
  Description of Artificial Sequence: Synthetic oligonucleotide
cgcgccugggucagcaaac

SEQ ID NO: 713079 - RNA, 19 nt, Artificial Sequence
  Description of Artificial Sequence: Synthetic oligonucleotide
ccgccuugcccugaugcac

SEQ ID NO: 713080 - RNA, 19 nt, Artificial Sequence
  Description of Artificial Sequence: Synthetic oligonucleotide
cccugggacggaagaccag

SEQ ID NO: 713081 - RNA, 19 nt, Artificial Sequence
  Description of Artificial Sequence: Synthetic oligonucleotide
agcgcgccugggucagcaa

SEQ ID NO: 713082 - RNA, 19 nt, Artificial Sequence
  Description of Artificial Sequence: Synthetic oligonucleotide
ccuuggacucggugcgauc

SEQ ID NO: 713083 - RNA, 19 nt, Artificial Sequence
  Description of Artificial Sequence: Synthetic oligonucleotide
cgugagaacgcagguuguc

SEQ ID NO: 713084 - RNA, 19 nt, Artificial Sequence
  Description of Artificial Sequence: Synthetic oligonucleotide
ccgucucaucagcugucac

SEQ ID NO: 713085 - RNA, 19 nt, Artificial Sequence
  Description of Artificial Sequence: Synthetic oligonucleotide
cauaagccuuggacucggu

SEQ ID NO: 713086 - RNA, 19 nt, Artificial Sequence
  Description of Artificial Sequence: Synthetic oligonucleotide
gcgaugagggagcuggcuu

SEQ ID NO: 713087 - RNA, 19 nt, Artificial Sequence
  Description of Artificial Sequence: Synthetic oligonucleotide
cacagcgcucacagacgua

SEQ ID NO: 713088 - RNA, 19 nt, Artificial Sequence
  Description of Artificial Sequence: Synthetic oligonucleotide
gcuacacacgcugcacuua

SEQ ID NO: 713089 - RNA, 19 nt, Artificial Sequence
  Description of Artificial Sequence: Synthetic oligonucleotide
cgcgccucucccgagugcc

SEQ ID NO: 713090 - RNA, 19 nt, Artificial Sequence
  Description of Artificial Sequence: Synthetic oligonucleotide
cgucucaucagcugucacu

SEQ ID NO: 713091 - RNA, 19 nt, Artificial Sequence
  Description of Artificial Sequence: Synthetic oligonucleotide
ccggcaugagaaggguuuc

SEQ ID NO: 713092 - RNA, 19 nt, Artificial Sequence
  Description of Artificial Sequence: Synthetic oligonucleotide
ggacucggugcgaucccca

SEQ ID NO: 713093 - RNA, 19 nt, Artificial Sequence
  Description of Artificial Sequence: Synthetic oligonucleotide
gcacggucuuuacgugaga

SEQ ID NO: 713094 - RNA, 19 nt, Artificial Sequence
  Description of Artificial Sequence: Synthetic oligonucleotide
cuccaguguggaugauuau

SEQ ID NO: 713095 - RNA, 19 nt, Artificial Sequence
  Description of Artificial Sequence: Synthetic oligonucleotide
cgguugaaaccacgaccac

SEQ ID NO: 713096 - RNA, 19 nt, Artificial Sequence
  Description of Artificial Sequence: Synthetic oligonucleotide
ccggcccuccaugcuaagc

SEQ ID NO: 713097 - RNA, 19 nt, Artificial Sequence
  Description of Artificial Sequence: Synthetic oligonucleotide
cccggcaugagaaggguuu

SEQ ID NO: 713098 - RNA, 19 nt, Artificial Sequence
  Description of Artificial Sequence: Synthetic oligonucleotide
cucgugggguccggcuuga

SEQ ID NO: 713099 - RNA, 19 nt, Artificial Sequence
  Description of Artificial Sequence: Synthetic oligonucleotide
gggugccacccacuuuaaa

SEQ ID NO: 713100 - RNA, 19 nt, Artificial Sequence
  Description of Artificial Sequence: Synthetic oligonucleotide
cuggcccauacugcuggua

SEQ ID NO: 713101 - RNA, 19 nt, Artificial Sequence
  Description of Artificial Sequence: Synthetic oligonucleotide
cgcacuuguggaugaugga

SEQ ID NO: 713102 - RNA, 19 nt, Artificial Sequence
  Description of Artificial Sequence: Synthetic oligonucleotide
guuggcgcacaugggcgau

SEQ ID NO: 713103 - RNA, 19 nt, Artificial Sequence
  Description of Artificial Sequence: Synthetic oligonucleotide
cguagcgcgccucucccga

SEQ ID NO: 713104 - RNA, 19 nt, Artificial Sequence
  Description of Artificial Sequence: Synthetic oligonucleotide
cacucgugggguccggcuu

SEQ ID NO: 713105 - RNA, 19 nt, Artificial Sequence
  Description of Artificial Sequence: Synthetic oligonucleotide
cucccggcaugagaagggu

SEQ ID NO: 713106 - RNA, 19 nt, Artificial Sequence
  Description of Artificial Sequence: Synthetic oligonucleotide
ccucacacccauaggguuu

SEQ ID NO: 713107 - RNA, 19 nt, Artificial Sequence
  Description of Artificial Sequence: Synthetic oligonucleotide
cguuugaaguuccccgugu

SEQ ID NO: 713108 - RNA, 19 nt, Artificial Sequence
  Description of Artificial Sequence: Synthetic oligonucleotide
ggagcugugggcggaguuu

SEQ ID NO: 713109 - RNA, 19 nt, Artificial Sequence
  Description of Artificial Sequence: Synthetic oligonucleotide
gccacucgugggguccggc

SEQ ID NO: 713110 - RNA, 19 nt, Artificial Sequence
  Description of Artificial Sequence: Synthetic oligonucleotide
gcgccucucccgagugccg

SEQ ID NO: 713111 - RNA, 19 nt, Artificial Sequence
  Description of Artificial Sequence: Synthetic oligonucleotide
gcgcgccucucccgagugc

SEQ ID NO: 713112 - RNA, 19 nt, Artificial Sequence
  Description of Artificial Sequence: Synthetic oligonucleotide
cccugaugcacggucuuua

SEQ ID NO: 713113 - RNA, 19 nt, Artificial Sequence
  Description of Artificial Sequence: Synthetic oligonucleotide
cccgugugcgugaacuccu

SEQ ID NO: 713114 - RNA, 19 nt, Artificial Sequence
  Description of Artificial Sequence: Synthetic oligonucleotide
ccggcacuugagagggcca

SEQ ID NO: 713115 - RNA, 19 nt, Artificial Sequence
  Description of Artificial Sequence: Synthetic oligonucleotide
gcaccacuggcugugcuuu

SEQ ID NO: 713116 - RNA, 19 nt, Artificial Sequence
  Description of Artificial Sequence: Synthetic oligonucleotide
cccgagugccgcuucuugu

SEQ ID NO: 713117 - RNA, 19 nt, Artificial Sequence
  Description of Artificial Sequence: Synthetic oligonucleotide
cuccucgccuuugcuggcu

SEQ ID NO: 713118 - RNA, 19 nt, Artificial Sequence
  Description of Artificial Sequence: Synthetic oligonucleotide
cggcuugagcuccacagau

SEQ ID NO: 713119 - RNA, 19 nt, Artificial Sequence
  Description of Artificial Sequence: Synthetic oligonucleotide
acgugcugccuggcccaua

SEQ ID NO: 713120 - RNA, 19 nt, Artificial Sequence
  Description of Artificial Sequence: Synthetic oligonucleotide
cggugcgauccccauaggu

SEQ ID NO: 713121 - RNA, 19 nt, Artificial Sequence
  Description of Artificial Sequence: Synthetic oligonucleotide
ggcucccgaggggcaucag

SEQ ID NO: 713122 - RNA, 19 nt, Artificial Sequence
  Description of Artificial Sequence: Synthetic oligonucleotide
ccacucgugggguccggcu

SEQ ID NO: 713123 - RNA, 19 nt, Artificial Sequence
  Description of Artificial Sequence: Synthetic oligonucleotide
cccgguguguuggcgcaca

SEQ ID NO: 713124 - RNA, 19 nt, Artificial Sequence
  Description of Artificial Sequence: Synthetic oligonucleotide
gugccgcuugagguucccu

SEQ ID NO: 713125 - RNA, 19 nt, Artificial Sequence
  Description of Artificial Sequence: Synthetic oligonucleotide
gcgauccccauagguggcu

SEQ ID NO: 713126 - RNA, 19 nt, Artificial Sequence
  Description of Artificial Sequence: Synthetic oligonucleotide
ggauucggauguggcguuu

SEQ ID NO: 713127 - RNA, 19 nt, Artificial Sequence
  Description of Artificial Sequence: Synthetic oligonucleotide
cccgaggggcaucagccuu

SEQ ID NO: 713128 - RNA, 19 nt, Artificial Sequence
  Description of Artificial Sequence: Synthetic oligonucleotide
ccccgguguguuggcgcac

SEQ ID NO: 713129 - RNA, 19 nt, Artificial Sequence
  Description of Artificial Sequence: Synthetic oligonucleotide
ggguuucagcgggcugugu

SEQ ID NO: 713130 - RNA, 19 nt, Artificial Sequence
  Description of Artificial Sequence: Synthetic oligonucleotide
gcagcgcgccugggucagc

SEQ ID NO: 713131 - RNA, 19 nt, Artificial Sequence
  Description of Artificial Sequence: Synthetic oligonucleotide
cacgugcugccuggcccau

SEQ ID NO: 713132 - RNA, 19 nt, Artificial Sequence
  Description of Artificial Sequence: Synthetic oligonucleotide
ccagggugccacccacuuu

SEQ ID NO: 713133 - RNA, 19 nt, Artificial Sequence
  Description of Artificial Sequence: Synthetic oligonucleotide
caucggcaauguggaucuu

SEQ ID NO: 713134 - RNA, 19 nt, Artificial Sequence
  Description of Artificial Sequence: Synthetic oligonucleotide
cgaggggcaucagccuucu

SEQ ID NO: 713135 - RNA, 19 nt, Artificial Sequence
  Description of Artificial Sequence: Synthetic oligonucleotide
ccguagccagugugaccau

SEQ ID NO: 713136 - RNA, 19 nt, Artificial Sequence
  Description of Artificial Sequence: Synthetic oligonucleotide
ccucgcacuuguggaugau

SEQ ID NO: 713137 - RNA, 19 nt, Artificial Sequence
  Description of Artificial Sequence: Synthetic oligonucleotide
cgauccccauagguggcuu

SEQ ID NO: 713138 - RNA, 19 nt, Artificial Sequence
  Description of Artificial Sequence: Synthetic oligonucleotide
aagaauuagauacugagug

SEQ ID NO: 713139 - RNA, 19 nt, Artificial Sequence
  Description of Artificial Sequence: Synthetic oligonucleotide
aauucaguauaguucaugg

SEQ ID NO: 713140 - RNA, 19 nt, Artificial Sequence
  Description of Artificial Sequence: Synthetic oligonucleotide
aaaaccugaagcuauauga

SEQ ID NO: 713141 - RNA, 19 nt, Artificial Sequence
  Description of Artificial Sequence: Synthetic oligonucleotide
ugaauauuuacacugcucc

SEQ ID NO: 713142 - RNA, 19 nt, Artificial Sequence
  Description of Artificial Sequence: Synthetic oligonucleotide
aaauaauucuguuagcuca

SEQ ID NO: 713143 - RNA, 19 nt, Artificial Sequence
  Description of Artificial Sequence: Synthetic oligonucleotide
cucaagaugaacaacauag

SEQ ID NO: 713144 - RNA, 19 nt, Artificial Sequence
  Description of Artificial Sequence: Synthetic oligonucleotide
aaacucacaaagcagagug

SEQ ID NO: 713145 - RNA, 19 nt, Artificial Sequence
  Description of Artificial Sequence: Synthetic oligonucleotide
aucgauuuugcucaagucc

SEQ ID NO: 713146 - RNA, 19 nt, Artificial Sequence
  Description of Artificial Sequence: Synthetic oligonucleotide
uggaaauuugccaacaucc

SEQ ID NO: 713147 - RNA, 19 nt, Artificial Sequence
  Description of Artificial Sequence: Synthetic oligonucleotide
uagacuuacagacugcugg

SEQ ID NO: 713148 - RNA, 19 nt, Artificial Sequence
  Description of Artificial Sequence: Synthetic oligonucleotide
gaaaugacacuucaaaucc

SEQ ID NO: 713149 - RNA, 19 nt, Artificial Sequence
  Description of Artificial Sequence: Synthetic oligonucleotide
aguaguauuaacuugaguu

SEQ ID NO: 713150 - RNA, 19 nt, Artificial Sequence
  Description of Artificial Sequence: Synthetic oligonucleotide
aaucaaaacauaugacuuc

SEQ ID NO: 713151 - RNA, 19 nt, Artificial Sequence
  Description of Artificial Sequence: Synthetic oligonucleotide
auaacugcuaccuuccagc

SEQ ID NO: 713152 - RNA, 19 nt, Artificial Sequence
  Description of Artificial Sequence: Synthetic oligonucleotide
uaaugaagaaucaaguucu

SEQ ID NO: 713153 - RNA, 19 nt, Artificial Sequence
  Description of Artificial Sequence: Synthetic oligonucleotide
auaacuauaaaugguaagg

SEQ ID NO: 713154 - RNA, 19 nt, Artificial Sequence
  Description of Artificial Sequence: Synthetic oligonucleotide
uugaagacuaaucuaauga

SEQ ID NO: 713155 - RNA, 19 nt, Artificial Sequence
  Description of Artificial Sequence: Synthetic oligonucleotide
acuaguuucuaucacauug

SEQ ID NO: 713156 - RNA, 19 nt, Artificial Sequence
  Description of Artificial Sequence: Synthetic oligonucleotide
uauagaaaguguuucaucu

SEQ ID NO: 713157 - RNA, 19 nt, Artificial Sequence
  Description of Artificial Sequence: Synthetic oligonucleotide
aauauuuacacugcuccac

SEQ ID NO: 713158 - RNA, 19 nt, Artificial Sequence
  Description of Artificial Sequence: Synthetic oligonucleotide
uccaauuagaagcaauagg

SEQ ID NO: 713159 - RNA, 19 nt, Artificial Sequence
  Description of Artificial Sequence: Synthetic oligonucleotide
augacuuccuuauagaaag

SEQ ID NO: 713160 - RNA, 19 nt, Artificial Sequence
  Description of Artificial Sequence: Synthetic oligonucleotide
accuuuuauaccuucuucc

SEQ ID NO: 713161 - RNA, 19 nt, Artificial Sequence
  Description of Artificial Sequence: Synthetic oligonucleotide
aaauaguaucauuagacaa

SEQ ID NO: 713162 - RNA, 19 nt, Artificial Sequence
  Description of Artificial Sequence: Synthetic oligonucleotide
uuuaccauccucuugacuc

SEQ ID NO: 713163 - RNA, 19 nt, Artificial Sequence
  Description of Artificial Sequence: Synthetic oligonucleotide
agaaguuugagguuuaacu

SEQ ID NO: 713164 - RNA, 19 nt, Artificial Sequence
  Description of Artificial Sequence: Synthetic oligonucleotide
agauuuacauuccaacugg

SEQ ID NO: 713165 - RNA, 19 nt, Artificial Sequence
  Description of Artificial Sequence: Synthetic oligonucleotide
ucuaacacaaaugugucag

SEQ ID NO: 713166 - RNA, 19 nt, Artificial Sequence
  Description of Artificial Sequence: Synthetic oligonucleotide
uuguaaaugcagcaaaccc

SEQ ID NO: 713167 - RNA, 19 nt, Artificial Sequence
  Description of Artificial Sequence: Synthetic oligonucleotide
ucugcuguauuguaaaugc

SEQ ID NO: 713168 - RNA, 19 nt, Artificial Sequence
  Description of Artificial Sequence: Synthetic oligonucleotide
uguaaaugcagcaaacccu

SEQ ID NO: 713169 - RNA, 19 nt, Artificial Sequence
  Description of Artificial Sequence: Synthetic oligonucleotide
ugaaguaucgauuuugcuc

SEQ ID NO: 713170 - RNA, 19 nt, Artificial Sequence
  Description of Artificial Sequence: Synthetic oligonucleotide
ugaagaaucaaguucugcu

SEQ ID NO: 713171 - RNA, 19 nt, Artificial Sequence
  Description of Artificial Sequence: Synthetic oligonucleotide
cuauaaaugguaaggauuc

SEQ ID NO: 713172 - RNA, 19 nt, Artificial Sequence
  Description of Artificial Sequence: Synthetic oligonucleotide
agauaauucaguauaguuc

SEQ ID NO: 713173 - RNA, 19 nt, Artificial Sequence
  Description of Artificial Sequence: Synthetic oligonucleotide
agggauaaagaaugggacc

SEQ ID NO: 713174 - RNA, 19 nt, Artificial Sequence
  Description of Artificial Sequence: Synthetic oligonucleotide
aaauacagacaaucugcac

SEQ ID NO: 713175 - RNA, 19 nt, Artificial Sequence
  Description of Artificial Sequence: Synthetic oligonucleotide
auaaagaguacugcuauac

SEQ ID NO: 713176 - RNA, 19 nt, Artificial Sequence
  Description of Artificial Sequence: Synthetic oligonucleotide
aaagaguacugcuauacau

SEQ ID NO: 713177 - RNA, 19 nt, Artificial Sequence
  Description of Artificial Sequence: Synthetic oligonucleotide
acauaugacuuccuuauag

SEQ ID NO: 713178 - RNA, 19 nt, Artificial Sequence
  Description of Artificial Sequence: Synthetic oligonucleotide
ucgauuuugcucaaguccc

SEQ ID NO: 713179 - RNA, 19 nt, Artificial Sequence
  Description of Artificial Sequence: Synthetic oligonucleotide
aaguuugagguuuaacuca

SEQ ID NO: 713180 - RNA, 19 nt, Artificial Sequence
  Description of Artificial Sequence: Synthetic oligonucleotide
ugcuguauuguaaaugcag

SEQ ID NO: 713181 - RNA, 19 nt, Artificial Sequence
  Description of Artificial Sequence: Synthetic oligonucleotide
aauaacugcuaccuuccag

SEQ ID NO: 713182 - RNA, 19 nt, Artificial Sequence
  Description of Artificial Sequence: Synthetic oligonucleotide
cauagguuggugaauaaag

SEQ ID NO: 713183 - RNA, 19 nt, Artificial Sequence
  Description of Artificial Sequence: Synthetic oligonucleotide
ucuuuuaugaacucucuuc

SEQ ID NO: 713184 - RNA, 19 nt, Artificial Sequence
  Description of Artificial Sequence: Synthetic oligonucleotide
cauggaaaggacaacuggg

SEQ ID NO: 713185 - RNA, 19 nt, Artificial Sequence
  Description of Artificial Sequence: Synthetic oligonucleotide
augaauaccauccaagaau

SEQ ID NO: 713186 - RNA, 19 nt, Artificial Sequence
  Description of Artificial Sequence: Synthetic oligonucleotide
guuuaacucaauuauuuac

SEQ ID NO: 713187 - RNA, 19 nt, Artificial Sequence
  Description of Artificial Sequence: Synthetic oligonucleotide
aaaugugucaggaucuuuc

SEQ ID NO: 713188 - RNA, 19 nt, Artificial Sequence
  Description of Artificial Sequence: Synthetic oligonucleotide
uguaaugugccuaccgugc

SEQ ID NO: 713189 - RNA, 19 nt, Artificial Sequence
  Description of Artificial Sequence: Synthetic oligonucleotide
ugaacucucuucaaauugc

SEQ ID NO: 713190 - RNA, 19 nt, Artificial Sequence
  Description of Artificial Sequence: Synthetic oligonucleotide
uuaguucacugcuugagug

SEQ ID NO: 713191 - RNA, 19 nt, Artificial Sequence
  Description of Artificial Sequence: Synthetic oligonucleotide
aguacugcuauacaugagu

SEQ ID NO: 713192 - RNA, 19 nt, Artificial Sequence
  Description of Artificial Sequence: Synthetic oligonucleotide
aaugggacccgucucuuag

SEQ ID NO: 713193 - RNA, 19 nt, Artificial Sequence
  Description of Artificial Sequence: Synthetic oligonucleotide
uuauaaacacaagaugggc

SEQ ID NO: 713194 - RNA, 19 nt, Artificial Sequence
  Description of Artificial Sequence: Synthetic oligonucleotide
aaagaagauuuacauucca

SEQ ID NO: 713195 - RNA, 19 nt, Artificial Sequence
  Description of Artificial Sequence: Synthetic oligonucleotide
uauacaugaguggugaucu

SEQ ID NO: 713196 - RNA, 19 nt, Artificial Sequence
  Description of Artificial Sequence: Synthetic oligonucleotide
uagggauaaagaaugggac

SEQ ID NO: 713197 - RNA, 19 nt, Artificial Sequence
  Description of Artificial Sequence: Synthetic oligonucleotide
uauaguucauggaaaggac

SEQ ID NO: 713198 - RNA, 19 nt, Artificial Sequence
  Description of Artificial Sequence: Synthetic oligonucleotide
ucaugacuaauacuguucu

SEQ ID NO: 713199 - RNA, 19 nt, Artificial Sequence
  Description of Artificial Sequence: Synthetic oligonucleotide
uuaccuuuaaaguaguauu

SEQ ID NO: 713200 - RNA, 19 nt, Artificial Sequence
  Description of Artificial Sequence: Synthetic oligonucleotide
ucuuucauugauuguuuag

SEQ ID NO: 713201 - RNA, 19 nt, Artificial Sequence
  Description of Artificial Sequence: Synthetic oligonucleotide
aauaguaucauuagacaau

SEQ ID NO: 713202 - RNA, 19 nt, Artificial Sequence
  Description of Artificial Sequence: Synthetic oligonucleotide
ugaagcuauaugaaacuac

SEQ ID NO: 713203 - RNA, 19 nt, Artificial Sequence
  Description of Artificial Sequence: Synthetic oligonucleotide
agugaucaaaucaucaauc

SEQ ID NO: 713204 - RNA, 19 nt, Artificial Sequence
  Description of Artificial Sequence: Synthetic oligonucleotide
augaacucucuucaaauug

SEQ ID NO: 713205 - RNA, 19 nt, Artificial Sequence
  Description of Artificial Sequence: Synthetic oligonucleotide
agcuauaugaaacuacuaa

SEQ ID NO: 713206 - RNA, 19 nt, Artificial Sequence
  Description of Artificial Sequence: Synthetic oligonucleotide
auacugagugaucaaauca

SEQ ID NO: 713207 - RNA, 19 nt, Artificial Sequence
  Description of Artificial Sequence: Synthetic oligonucleotide
ugaauaccauccaagaaua

SEQ ID NO: 713208 - RNA, 19 nt, Artificial Sequence
  Description of Artificial Sequence: Synthetic oligonucleotide
acuuacagacugcuggugg

SEQ ID NO: 713209 - RNA, 19 nt, Artificial Sequence
  Description of Artificial Sequence: Synthetic oligonucleotide
auagguuggugaauaaagc

SEQ ID NO: 713210 - RNA, 19 nt, Artificial Sequence
  Description of Artificial Sequence: Synthetic oligonucleotide
acuacuaguuucuaucaca

SEQ ID NO: 713211 - RNA, 19 nt, Artificial Sequence
  Description of Artificial Sequence: Synthetic oligonucleotide
augaaacuacuaaagaauc

SEQ ID NO: 713212 - RNA, 19 nt, Artificial Sequence
  Description of Artificial Sequence: Synthetic oligonucleotide
auaauucuggcucaguuuu

SEQ ID NO: 713213 - RNA, 19 nt, Artificial Sequence
  Description of Artificial Sequence: Synthetic oligonucleotide
uauaugggcuguaucuugc

SEQ ID NO: 713214 - RNA, 19 nt, Artificial Sequence
  Description of Artificial Sequence: Synthetic oligonucleotide
ucucuuaguucacugcuug

SEQ ID NO: 713215 - RNA, 19 nt, Artificial Sequence
  Description of Artificial Sequence: Synthetic oligonucleotide
aaugugucaggaucuuuca

SEQ ID NO: 713216 - RNA, 19 nt, Artificial Sequence
  Description of Artificial Sequence: Synthetic oligonucleotide
uaacuauaaaugguaagga

SEQ ID NO: 713217 - RNA, 19 nt, Artificial Sequence
  Description of Artificial Sequence: Synthetic oligonucleotide
uuuaccuuuaaaguaguau

SEQ ID NO: 713218 - RNA, 19 nt, Artificial Sequence
  Description of Artificial Sequence: Synthetic oligonucleotide
augacuaauacuguucuug

SEQ ID NO: 713219 - RNA, 19 nt, Artificial Sequence
  Description of Artificial Sequence: Synthetic oligonucleotide
aaucaugacuaauacuguu

SEQ ID NO: 713220 - RNA, 19 nt, Artificial Sequence
  Description of Artificial Sequence: Synthetic oligonucleotide
uauccaauuagaagcaaua

SEQ ID NO: 713221 - RNA, 19 nt, Artificial Sequence
  Description of Artificial Sequence: Synthetic oligonucleotide
aagaauagaggauggcaaa

SEQ ID NO: 713222 - RNA, 19 nt, Artificial Sequence
  Description of Artificial Sequence: Synthetic oligonucleotide
ucacauggaaauuugccaa

SEQ ID NO: 713223 - RNA, 19 nt, Artificial Sequence
  Description of Artificial Sequence: Synthetic oligonucleotide
acugggcuacuucacaaac

SEQ ID NO: 713224 - RNA, 19 nt, Artificial Sequence
  Description of Artificial Sequence: Synthetic oligonucleotide
acaugaauaccauccaaga

SEQ ID NO: 713225 - RNA, 19 nt, Artificial Sequence
  Description of Artificial Sequence: Synthetic oligonucleotide
cauuacauuucauggacuc

SEQ ID NO: 713226 - RNA, 19 nt, Artificial Sequence
  Description of Artificial Sequence: Synthetic oligonucleotide
uugaauauuuacacugcuc

SEQ ID NO: 713227 - RNA, 19 nt, Artificial Sequence
  Description of Artificial Sequence: Synthetic oligonucleotide
uaaagaguacugcuauaca

SEQ ID NO: 713228 - RNA, 19 nt, Artificial Sequence
  Description of Artificial Sequence: Synthetic oligonucleotide
cuugaagacuaaucuaaug

SEQ ID NO: 713229 - RNA, 19 nt, Artificial Sequence
  Description of Artificial Sequence: Synthetic oligonucleotide
agaauuagauacugaguga

SEQ ID NO: 713230 - RNA, 19 nt, Artificial Sequence
  Description of Artificial Sequence: Synthetic oligonucleotide
agaauagaggauggcaaac

SEQ ID NO: 713231 - RNA, 19 nt, Artificial Sequence
  Description of Artificial Sequence: Synthetic oligonucleotide
ugagugaucaaaucaucaa

SEQ ID NO: 713232 - RNA, 19 nt, Artificial Sequence
  Description of Artificial Sequence: Synthetic oligonucleotide
ucucuaacacaaauguguc

SEQ ID NO: 713233 - RNA, 19 nt, Artificial Sequence
  Description of Artificial Sequence: Synthetic oligonucleotide
ugauaggcaggaauuauuu

SEQ ID NO: 713234 - RNA, 19 nt, Artificial Sequence
  Description of Artificial Sequence: Synthetic oligonucleotide
uuauaccuucuuccugugg

SEQ ID NO: 713235 - RNA, 19 nt, Artificial Sequence
  Description of Artificial Sequence: Synthetic oligonucleotide
acugcuauacaugaguggu

SEQ ID NO: 713236 - RNA, 19 nt, Artificial Sequence
  Description of Artificial Sequence: Synthetic oligonucleotide
caguauaguucauggaaag

SEQ ID NO: 713237 - RNA, 19 nt, Artificial Sequence
  Description of Artificial Sequence: Synthetic oligonucleotide
uaccuuuaaaguaguauua

SEQ ID NO: 713238 - RNA, 19 nt, Artificial Sequence
  Description of Artificial Sequence: Synthetic oligonucleotide
aguauaguucauggaaagg

SEQ ID NO: 713239 - RNA, 19 nt, Artificial Sequence
  Description of Artificial Sequence: Synthetic oligonucleotide
uuuagacuuacagacugcu

SEQ ID NO: 713240 - RNA, 19 nt, Artificial Sequence
  Description of Artificial Sequence: Synthetic oligonucleotide
aucauuauuuaccuuuaaa

SEQ ID NO: 713241 - RNA, 19 nt, Artificial Sequence
  Description of Artificial Sequence: Synthetic oligonucleotide
ugcuccgagaauaacugcu

SEQ ID NO: 713242 - RNA, 19 nt, Artificial Sequence
  Description of Artificial Sequence: Synthetic oligonucleotide
aguuguuagcuguuguuga

SEQ ID NO: 713243 - RNA, 19 nt, Artificial Sequence
  Description of Artificial Sequence: Synthetic oligonucleotide
aacuacuaaagaaucugcu

SEQ ID NO: 713244 - RNA, 19 nt, Artificial Sequence
  Description of Artificial Sequence: Synthetic oligonucleotide
ugaacugccacagcggucu

SEQ ID NO: 713245 - RNA, 19 nt, Artificial Sequence
  Description of Artificial Sequence: Synthetic oligonucleotide
cucauuuuagacuuacaga

SEQ ID NO: 713246 - RNA, 19 nt, Artificial Sequence
  Description of Artificial Sequence: Synthetic oligonucleotide
aaguaguauuaacuugagu

SEQ ID NO: 713247 - RNA, 19 nt, Artificial Sequence
  Description of Artificial Sequence: Synthetic oligonucleotide
aucaugacuaauacuguuc

SEQ ID NO: 713248 - RNA, 19 nt, Artificial Sequence
  Description of Artificial Sequence: Synthetic oligonucleotide
caugaaguuucauguagug

SEQ ID NO: 713249 - RNA, 19 nt, Artificial Sequence
  Description of Artificial Sequence: Synthetic oligonucleotide
ccaauuagaagcaauagga

SEQ ID NO: 713250 - RNA, 19 nt, Artificial Sequence
  Description of Artificial Sequence: Synthetic oligonucleotide
uaauucaguauaguucaug

SEQ ID NO: 713251 - RNA, 19 nt, Artificial Sequence
  Description of Artificial Sequence: Synthetic oligonucleotide
aguaaggucuauaugggcu

SEQ ID NO: 713252 - RNA, 19 nt, Artificial Sequence
  Description of Artificial Sequence: Synthetic oligonucleotide
acagcaguaaggucuauau

SEQ ID NO: 713253 - RNA, 19 nt, Artificial Sequence
  Description of Artificial Sequence: Synthetic oligonucleotide
acuauaaaugguaaggauu

SEQ ID NO: 713254 - RNA, 19 nt, Artificial Sequence
  Description of Artificial Sequence: Synthetic oligonucleotide
gaauauuuacacugcucca

SEQ ID NO: 713255 - RNA, 19 nt, Artificial Sequence
  Description of Artificial Sequence: Synthetic oligonucleotide
uuagacuuacagacugcug

SEQ ID NO: 713256 - RNA, 19 nt, Artificial Sequence
  Description of Artificial Sequence: Synthetic oligonucleotide
aaacacaagaugggcucac

SEQ ID NO: 713257 - RNA, 19 nt, Artificial Sequence
  Description of Artificial Sequence: Synthetic oligonucleotide
uaguauuaacuugaguuuc

SEQ ID NO: 713258 - RNA, 19 nt, Artificial Sequence
  Description of Artificial Sequence: Synthetic oligonucleotide
cgaauugcaaauauaaaug

SEQ ID NO: 713259 - RNA, 19 nt, Artificial Sequence
  Description of Artificial Sequence: Synthetic oligonucleotide
cuugaguggucucugucag

SEQ ID NO: 713260 - RNA, 19 nt, Artificial Sequence
  Description of Artificial Sequence: Synthetic oligonucleotide
gauuguuuaguuucaauuu

SEQ ID NO: 713261 - RNA, 19 nt, Artificial Sequence
  Description of Artificial Sequence: Synthetic oligonucleotide
cuaacacaaaugugucagg

SEQ ID NO: 713262 - RNA, 19 nt, Artificial Sequence
  Description of Artificial Sequence: Synthetic oligonucleotide
uccgagaauaacugcuacc

SEQ ID NO: 713263 - RNA, 19 nt, Artificial Sequence
  Description of Artificial Sequence: Synthetic oligonucleotide
cuauaugggcuguaucuug

SEQ ID NO: 713264 - RNA, 19 nt, Artificial Sequence
  Description of Artificial Sequence: Synthetic oligonucleotide
ucuucaaauugcuugccuu

SEQ ID NO: 713265 - RNA, 19 nt, Artificial Sequence
  Description of Artificial Sequence: Synthetic oligonucleotide
ugcgaauugcaaauauaaa

SEQ ID NO: 713266 - RNA, 19 nt, Artificial Sequence
  Description of Artificial Sequence: Synthetic oligonucleotide
guaaugugccuaccgugcg

SEQ ID NO: 713267 - RNA, 19 nt, Artificial Sequence
  Description of Artificial Sequence: Synthetic oligonucleotide
auccaauuagaagcaauag

SEQ ID NO: 713268 - RNA, 19 nt, Artificial Sequence
  Description of Artificial Sequence: Synthetic oligonucleotide
auggacucauaacuauauc

SEQ ID NO: 713269 - RNA, 19 nt, Artificial Sequence
  Description of Artificial Sequence: Synthetic oligonucleotide
ugauaccaauuuuaaaauu

SEQ ID NO: 713270 - RNA, 19 nt, Artificial Sequence
  Description of Artificial Sequence: Synthetic oligonucleotide
uacaugaguggugaucugc

SEQ ID NO: 713271 - RNA, 19 nt, Artificial Sequence
  Description of Artificial Sequence: Synthetic oligonucleotide
ucuugaagacuaaucuaau

SEQ ID NO: 713272 - RNA, 19 nt, Artificial Sequence
  Description of Artificial Sequence: Synthetic oligonucleotide
ccaacgauaauucuggcuc

SEQ ID NO: 713273 - RNA, 19 nt, Artificial Sequence
  Description of Artificial Sequence: Synthetic oligonucleotide
gugauuuuauuuaaggcaa

SEQ ID NO: 713274 - RNA, 19 nt, Artificial Sequence
  Description of Artificial Sequence: Synthetic oligonucleotide
guuugaacugccacagcgg

SEQ ID NO: 713275 - RNA, 19 nt, Artificial Sequence
  Description of Artificial Sequence: Synthetic oligonucleotide
uguuuaguuucaauuucuu

SEQ ID NO: 713276 - RNA, 19 nt, Artificial Sequence
  Description of Artificial Sequence: Synthetic oligonucleotide
uaucgauuuugcucaaguc

SEQ ID NO: 713277 - RNA, 19 nt, Artificial Sequence
  Description of Artificial Sequence: Synthetic oligonucleotide
gggauaaagaaugggaccc

SEQ ID NO: 713278 - RNA, 19 nt, Artificial Sequence
  Description of Artificial Sequence: Synthetic oligonucleotide
auggucuaccucaagauga

SEQ ID NO: 713279 - RNA, 19 nt, Artificial Sequence
  Description of Artificial Sequence: Synthetic oligonucleotide
cuaguuucuaucacauuga

SEQ ID NO: 713280 - RNA, 19 nt, Artificial Sequence
  Description of Artificial Sequence: Synthetic oligonucleotide
uucuacauuugugcuaucu

SEQ ID NO: 713281 - RNA, 19 nt, Artificial Sequence
  Description of Artificial Sequence: Synthetic oligonucleotide
aaaccugaagcuauaugaa

SEQ ID NO: 713282 - RNA, 19 nt, Artificial Sequence
  Description of Artificial Sequence: Synthetic oligonucleotide
aagucccauagggauaaag

SEQ ID NO: 713283 - RNA, 19 nt, Artificial Sequence
  Description of Artificial Sequence: Synthetic oligonucleotide
aacgauaauucuggcucag

SEQ ID NO: 713284 - RNA, 19 nt, Artificial Sequence
  Description of Artificial Sequence: Synthetic oligonucleotide
gaagacuaaucuaaugaaa

SEQ ID NO: 713285 - RNA, 19 nt, Artificial Sequence
  Description of Artificial Sequence: Synthetic oligonucleotide
agguuggugaauaaagcug

SEQ ID NO: 713286 - RNA, 19 nt, Artificial Sequence
  Description of Artificial Sequence: Synthetic oligonucleotide
uuaccauccucuugacuca

SEQ ID NO: 713287 - RNA, 19 nt, Artificial Sequence
  Description of Artificial Sequence: Synthetic oligonucleotide
agugcuccgagaauaacug

SEQ ID NO: 713288 - RNA, 19 nt, Artificial Sequence
  Description of Artificial Sequence: Synthetic oligonucleotide
uaacucaauuauuuacaau

SEQ ID NO: 713289 - RNA, 19 nt, Artificial Sequence
  Description of Artificial Sequence: Synthetic oligonucleotide
ugauuuuauuuaaggcaau

SEQ ID NO: 713290 - RNA, 19 nt, Artificial Sequence
  Description of Artificial Sequence: Synthetic oligonucleotide
caguaaggucuauaugggc

SEQ ID NO: 713291 - RNA, 19 nt, Artificial Sequence
  Description of Artificial Sequence: Synthetic oligonucleotide
aucuacaaauaaagaguac

SEQ ID NO: 713292 - RNA, 19 nt, Artificial Sequence
  Description of Artificial Sequence: Synthetic oligonucleotide
cauggucuaccucaagaug

SEQ ID NO: 713293 - RNA, 19 nt, Artificial Sequence
  Description of Artificial Sequence: Synthetic oligonucleotide
uaaggccuauaaauaguaa

SEQ ID NO: 713294 - RNA, 19 nt, Artificial Sequence
  Description of Artificial Sequence: Synthetic oligonucleotide
cauagcucagauaaguugu

SEQ ID NO: 713295 - RNA, 19 nt, Artificial Sequence
  Description of Artificial Sequence: Synthetic oligonucleotide
guagugcuguauuaggcca

SEQ ID NO: 713296 - RNA, 19 nt, Artificial Sequence
  Description of Artificial Sequence: Synthetic oligonucleotide
acaaccuaaggccuauaaa

SEQ ID NO: 713297 - RNA, 19 nt, Artificial Sequence
  Description of Artificial Sequence: Synthetic oligonucleotide
gcuauaugaaacuacuaaa

SEQ ID NO: 713298 - RNA, 19 nt, Artificial Sequence
  Description of Artificial Sequence: Synthetic oligonucleotide
ugacucagaugccaucuuc

SEQ ID NO: 713299 - RNA, 19 nt, Artificial Sequence
  Description of Artificial Sequence: Synthetic oligonucleotide
caauuagaagcaauaggaa

SEQ ID NO: 713300 - RNA, 19 nt, Artificial Sequence
  Description of Artificial Sequence: Synthetic oligonucleotide
uuggugaauaaagcugagc

SEQ ID NO: 713301 - RNA, 19 nt, Artificial Sequence
  Description of Artificial Sequence: Synthetic oligonucleotide
cuauacaugaguggugauc

SEQ ID NO: 713302 - RNA, 19 nt, Artificial Sequence
  Description of Artificial Sequence: Synthetic oligonucleotide
uaacugcuaccuuccagca

SEQ ID NO: 713303 - RNA, 19 nt, Artificial Sequence
  Description of Artificial Sequence: Synthetic oligonucleotide
caaccuaaggccuauaaau

SEQ ID NO: 713304 - RNA, 19 nt, Artificial Sequence
  Description of Artificial Sequence: Synthetic oligonucleotide
uauaaaugguaaggauucu

SEQ ID NO: 713305 - RNA, 19 nt, Artificial Sequence
  Description of Artificial Sequence: Synthetic oligonucleotide
uaaacacaagaugggcuca

SEQ ID NO: 713306 - RNA, 19 nt, Artificial Sequence
  Description of Artificial Sequence: Synthetic oligonucleotide
ugcuaucuucauuuauuaa

SEQ ID NO: 713307 - RNA, 19 nt, Artificial Sequence
  Description of Artificial Sequence: Synthetic oligonucleotide
agcaaacccuggugaacac

SEQ ID NO: 713308 - RNA, 19 nt, Artificial Sequence
  Description of Artificial Sequence: Synthetic oligonucleotide
agucccauagggauaaaga

SEQ ID NO: 713309 - RNA, 19 nt, Artificial Sequence
  Description of Artificial Sequence: Synthetic oligonucleotide
aaccuaaggccuauaaaua

SEQ ID NO: 713310 - RNA, 19 nt, Artificial Sequence
  Description of Artificial Sequence: Synthetic oligonucleotide
auaaagaaugggacccguc

SEQ ID NO: 713311 - RNA, 19 nt, Artificial Sequence
  Description of Artificial Sequence: Synthetic oligonucleotide
guacugcuauacaugagug

SEQ ID NO: 713312 - RNA, 19 nt, Artificial Sequence
  Description of Artificial Sequence: Synthetic oligonucleotide
uaccgugcgaauugcaaau

SEQ ID NO: 713313 - RNA, 19 nt, Artificial Sequence
  Description of Artificial Sequence: Synthetic oligonucleotide
agaugggcucacuuugaug

SEQ ID NO: 713314 - RNA, 19 nt, Artificial Sequence
  Description of Artificial Sequence: Synthetic oligonucleotide
ucugauaggcaggaauuau

SEQ ID NO: 713315 - RNA, 19 nt, Artificial Sequence
  Description of Artificial Sequence: Synthetic oligonucleotide
aguauuaacuugaguuucu

SEQ ID NO: 713316 - RNA, 19 nt, Artificial Sequence
  Description of Artificial Sequence: Synthetic oligonucleotide
cuaaggccuauaaauagua

SEQ ID NO: 713317 - RNA, 19 nt, Artificial Sequence
  Description of Artificial Sequence: Synthetic oligonucleotide
gugcgaauugcaaauauaa

SEQ ID NO: 713318 - RNA, 19 nt, Artificial Sequence
  Description of Artificial Sequence: Synthetic oligonucleotide
ucuauaugggcuguaucuu

SEQ ID NO: 713319 - RNA, 19 nt, Artificial Sequence
  Description of Artificial Sequence: Synthetic oligonucleotide
uugacguuugcugugcuuu

SEQ ID NO: 713320 - RNA, 19 nt, Artificial Sequence
  Description of Artificial Sequence: Synthetic oligonucleotide
aaugugccuaccgugcgaa

SEQ ID NO: 713321 - RNA, 19 nt, Artificial Sequence
  Description of Artificial Sequence: Synthetic oligonucleotide
aggccuauaaauaguaaaa

SEQ ID NO: 713322 - RNA, 19 nt, Artificial Sequence
  Description of Artificial Sequence: Synthetic oligonucleotide
aaggauucuugcauuuuau

SEQ ID NO: 713323 - RNA, 19 nt, Artificial Sequence
  Description of Artificial Sequence: Synthetic oligonucleotide
guaguauuaacuugaguuu

SEQ ID NO: 713324 - RNA, 19 nt, Artificial Sequence
  Description of Artificial Sequence: Synthetic oligonucleotide
auaaaugguaaggauucuu

SEQ ID NO: 713325 - RNA, 19 nt, Artificial Sequence
  Description of Artificial Sequence: Synthetic oligonucleotide
gcuguauuguaaaugcagc

SEQ ID NO: 713326 - RNA, 19 nt, Artificial Sequence
  Description of Artificial Sequence: Synthetic oligonucleotide
ccuuuaaaguaguauuaac

SEQ ID NO: 713327 - RNA, 19 nt, Artificial Sequence
  Description of Artificial Sequence: Synthetic oligonucleotide
aggaauuauuuuccugaaa

SEQ ID NO: 713328 - RNA, 19 nt, Artificial Sequence
  Description of Artificial Sequence: Synthetic oligonucleotide
gagugaucaaaucaucaau

SEQ ID NO: 713329 - RNA, 19 nt, Artificial Sequence
  Description of Artificial Sequence: Synthetic oligonucleotide
aacauagcucagauaaguu

SEQ ID NO: 713330 - RNA, 19 nt, Artificial Sequence
  Description of Artificial Sequence: Synthetic oligonucleotide
accuuuaaaguaguauuaa

SEQ ID NO: 713331 - RNA, 19 nt, Artificial Sequence
  Description of Artificial Sequence: Synthetic oligonucleotide
uggucuaccucaagaugaa

SEQ ID NO: 713332 - RNA, 19 nt, Artificial Sequence
  Description of Artificial Sequence: Synthetic oligonucleotide
ggacucauaacuauaucca

SEQ ID NO: 713333 - RNA, 19 nt, Artificial Sequence
  Description of Artificial Sequence: Synthetic oligonucleotide
ugacuuccuuauagaaagu

SEQ ID NO: 713334 - RNA, 19 nt, Artificial Sequence
  Description of Artificial Sequence: Synthetic oligonucleotide
gcgaauugcaaauauaaau

SEQ ID NO: 713335 - RNA, 19 nt, Artificial Sequence
  Description of Artificial Sequence: Synthetic oligonucleotide
auauccaauuagaagcaau

SEQ ID NO: 713336 - RNA, 19 nt, Artificial Sequence
  Description of Artificial Sequence: Synthetic oligonucleotide
acaacauagcucagauaag

SEQ ID NO: 713337 - RNA, 19 nt, Artificial Sequence
  Description of Artificial Sequence: Synthetic oligonucleotide
gugccuaccgugcgaauug

SEQ ID NO: 713338 - RNA, 19 nt, Artificial Sequence
  Description of Artificial Sequence: Synthetic oligonucleotide
guaucgauuuugcucaagu

SEQ ID NO: 713339 - RNA, 19 nt, Artificial Sequence
  Description of Artificial Sequence: Synthetic oligonucleotide
auaugggcuguaucuugcu

SEQ ID NO: 713340 - RNA, 19 nt, Artificial Sequence
  Description of Artificial Sequence: Synthetic oligonucleotide
cuccgagaauaacugcuac

SEQ ID NO: 713341 - RNA, 19 nt, Artificial Sequence
  Description of Artificial Sequence: Synthetic oligonucleotide
gucgaaggaugcaggaugc

SEQ ID NO: 713342 - RNA, 19 nt, Artificial Sequence
  Description of Artificial Sequence: Synthetic oligonucleotide
ggacccgucucuuaguuca

SEQ ID NO: 713343 - RNA, 19 nt, Artificial Sequence
  Description of Artificial Sequence: Synthetic oligonucleotide
cauuccaacuggucacaug

SEQ ID NO: 713344 - RNA, 19 nt, Artificial Sequence
  Description of Artificial Sequence: Synthetic oligonucleotide
gcaauacugggcuacuuca

SEQ ID NO: 713345 - RNA, 19 nt, Artificial Sequence
  Description of Artificial Sequence: Synthetic oligonucleotide
cucuaacacaaauguguca

SEQ ID NO: 713346 - RNA, 19 nt, Artificial Sequence
  Description of Artificial Sequence: Synthetic oligonucleotide
caugaguggugaucugcug

SEQ ID NO: 713347 - RNA, 19 nt, Artificial Sequence
  Description of Artificial Sequence: Synthetic oligonucleotide
gacuuacagacugcuggug

SEQ ID NO: 713348 - RNA, 19 nt, Artificial Sequence
  Description of Artificial Sequence: Synthetic oligonucleotide
uugaacugccacagcgguc

SEQ ID NO: 713349 - RNA, 19 nt, Artificial Sequence
  Description of Artificial Sequence: Synthetic oligonucleotide
auacaugaguggugaucug

SEQ ID NO: 713350 - RNA, 19 nt, Artificial Sequence
  Description of Artificial Sequence: Synthetic oligonucleotide
guuggugaauaaagcugag

SEQ ID NO: 713351 - RNA, 19 nt, Artificial Sequence
  Description of Artificial Sequence: Synthetic oligonucleotide
uuaaggcaauacugggcua

SEQ ID NO: 713352 - RNA, 19 nt, Artificial Sequence
  Description of Artificial Sequence: Synthetic oligonucleotide
acugggugacagaaguuug

SEQ ID NO: 713353 - RNA, 19 nt, Artificial Sequence
  Description of Artificial Sequence: Synthetic oligonucleotide
aguaucgauuuugcucaag

SEQ ID NO: 713354 - RNA, 19 nt, Artificial Sequence
  Description of Artificial Sequence: Synthetic oligonucleotide
aagcuauaugaaacuacua

SEQ ID NO: 713355 - RNA, 19 nt, Artificial Sequence
  Description of Artificial Sequence: Synthetic oligonucleotide
acacaagaugggcucacuu

SEQ ID NO: 713356 - RNA, 19 nt, Artificial Sequence
  Description of Artificial Sequence: Synthetic oligonucleotide
aaguaucgauuuugcucaa

SEQ ID NO: 713357 - RNA, 19 nt, Artificial Sequence
  Description of Artificial Sequence: Synthetic oligonucleotide
caacgauaauucuggcuca

SEQ ID NO: 713358 - RNA, 19 nt, Artificial Sequence
  Description of Artificial Sequence: Synthetic oligonucleotide
gguuuaacucaauuauuua

SEQ ID NO: 713359 - RNA, 19 nt, Artificial Sequence
  Description of Artificial Sequence: Synthetic oligonucleotide
uugaguggucucugucaga

SEQ ID NO: 713360 - RNA, 19 nt, Artificial Sequence
  Description of Artificial Sequence: Synthetic oligonucleotide
caauaacugaaguaucgau

SEQ ID NO: 713361 - RNA, 19 nt, Artificial Sequence
  Description of Artificial Sequence: Synthetic oligonucleotide
gauaccaaucacacagaua

SEQ ID NO: 713362 - RNA, 19 nt, Artificial Sequence
  Description of Artificial Sequence: Synthetic oligonucleotide
ugugccuaccgugcgaauu

SEQ ID NO: 713363 - RNA, 19 nt, Artificial Sequence
  Description of Artificial Sequence: Synthetic oligonucleotide
cuaaagaaucugcucaaau

SEQ ID NO: 713364 - RNA, 19 nt, Artificial Sequence
  Description of Artificial Sequence: Synthetic oligonucleotide
caauguaguaaagucuuua

SEQ ID NO: 713365 - RNA, 19 nt, Artificial Sequence
  Description of Artificial Sequence: Synthetic oligonucleotide
cauggacucauaacuauau

SEQ ID NO: 713366 - RNA, 19 nt, Artificial Sequence
  Description of Artificial Sequence: Synthetic oligonucleotide
cuaccgugcgaauugcaaa

SEQ ID NO: 713367 - RNA, 19 nt, Artificial Sequence
  Description of Artificial Sequence: Synthetic oligonucleotide
cccauugguuugaaggagc

SEQ ID NO: 713368 - RNA, 19 nt, Artificial Sequence
  Description of Artificial Sequence: Synthetic oligonucleotide
ugggacccgucucuuaguu

SEQ ID NO: 713369 - RNA, 19 nt, Artificial Sequence
  Description of Artificial Sequence: Synthetic oligonucleotide
uacuaguuucuaucacauu

SEQ ID NO: 713370 - RNA, 19 nt, Artificial Sequence
  Description of Artificial Sequence: Synthetic oligonucleotide
uugacucagaugccaucuu

SEQ ID NO: 713371 - RNA, 19 nt, Artificial Sequence
  Description of Artificial Sequence: Synthetic oligonucleotide
caagaugggcucacuuuga

SEQ ID NO: 713372 - RNA, 19 nt, Artificial Sequence
  Description of Artificial Sequence: Synthetic oligonucleotide
cugggugacagaaguuuga

SEQ ID NO: 713373 - RNA, 19 nt, Artificial Sequence
  Description of Artificial Sequence: Synthetic oligonucleotide
gugcuccgagaauaacugc

SEQ ID NO: 713374 - RNA, 19 nt, Artificial Sequence
  Description of Artificial Sequence: Synthetic oligonucleotide
caggaauuauuuuccugaa

SEQ ID NO: 713375 - RNA, 19 nt, Artificial Sequence
  Description of Artificial Sequence: Synthetic oligonucleotide
gcuugaguggucucuguca

SEQ ID NO: 713376 - RNA, 19 nt, Artificial Sequence
  Description of Artificial Sequence: Synthetic oligonucleotide
gucauuucaugaaguuuca

SEQ ID NO: 713377 - RNA, 19 nt, Artificial Sequence
  Description of Artificial Sequence: Synthetic oligonucleotide
cuaccuuccagcauagguu

SEQ ID NO: 713378 - RNA, 19 nt, Artificial Sequence
  Description of Artificial Sequence: Synthetic oligonucleotide
cacaaccuaaggccuauaa

SEQ ID NO: 713379 - RNA, 19 nt, Artificial Sequence
  Description of Artificial Sequence: Synthetic oligonucleotide
guggaguuguuagcuguug

SEQ ID NO: 713380 - RNA, 19 nt, Artificial Sequence
  Description of Artificial Sequence: Synthetic oligonucleotide
gacucagaugccaucuucu

SEQ ID NO: 713381 - RNA, 19 nt, Artificial Sequence
  Description of Artificial Sequence: Synthetic oligonucleotide
gcuaccuuccagcauaggu

SEQ ID NO: 713382 - RNA, 19 nt, Artificial Sequence
  Description of Artificial Sequence: Synthetic oligonucleotide
ggucuauaugggcuguauc

SEQ ID NO: 713383 - RNA, 19 nt, Artificial Sequence
  Description of Artificial Sequence: Synthetic oligonucleotide
ugcacaaccuaaggccuau

SEQ ID NO: 713384 - RNA, 19 nt, Artificial Sequence
  Description of Artificial Sequence: Synthetic oligonucleotide
cuugacucagaugccaucu

SEQ ID NO: 713385 - RNA, 19 nt, Artificial Sequence
  Description of Artificial Sequence: Synthetic oligonucleotide
gcugucagugcuccgagaa

SEQ ID NO: 713386 - RNA, 19 nt, Artificial Sequence
  Description of Artificial Sequence: Synthetic oligonucleotide
guuugcaguauugacguuu

SEQ ID NO: 713387 - RNA, 19 nt, Artificial Sequence
  Description of Artificial Sequence: Synthetic oligonucleotide
cuguggaguuguuagcugu

SEQ ID NO: 713388 - RNA, 19 nt, Artificial Sequence
  Description of Artificial Sequence: Synthetic oligonucleotide
ugcuaccuuccagcauagg

SEQ ID NO: 713389 - RNA, 19 nt, Artificial Sequence
  Description of Artificial Sequence: Synthetic oligonucleotide
augggacccgucucuuagu

SEQ ID NO: 713390 - RNA, 19 nt, Artificial Sequence
  Description of Artificial Sequence: Synthetic oligonucleotide
ugccuaccgugcgaauugc

SEQ ID NO: 713391 - RNA, 19 nt, Artificial Sequence
  Description of Artificial Sequence: Synthetic oligonucleotide
aggucuauaugggcuguau

SEQ ID NO: 713392 - RNA, 19 nt, Artificial Sequence
  Description of Artificial Sequence: Synthetic oligonucleotide
gagguuuaacucaauuauu

SEQ ID NO: 713393 - RNA, 19 nt, Artificial Sequence
  Description of Artificial Sequence: Synthetic oligonucleotide
ucgaaggaugcaggaugcu

SEQ ID NO: 713394 - RNA, 19 nt, Artificial Sequence
  Description of Artificial Sequence: Synthetic oligonucleotide
acgauaauucuggcucagu

SEQ ID NO: 713395 - RNA, 19 nt, Artificial Sequence
  Description of Artificial Sequence: Synthetic oligonucleotide
uuuccacguggcugucagu

SEQ ID NO: 713396 - RNA, 19 nt, Artificial Sequence
  Description of Artificial Sequence: Synthetic oligonucleotide
uguuugcaguauugacguu

SEQ ID NO: 713397 - RNA, 19 nt, Artificial Sequence
  Description of Artificial Sequence: Synthetic oligonucleotide
ccgucucuuaguucacugc

SEQ ID NO: 713398 - RNA, 19 nt, Artificial Sequence
  Description of Artificial Sequence: Synthetic oligonucleotide
augggcucacuuugaugau

SEQ ID NO: 713399 - RNA, 19 nt, Artificial Sequence
  Description of Artificial Sequence: Synthetic oligonucleotide
gguggcagcaaaugauuua

SEQ ID NO: 713400 - RNA, 19 nt, Artificial Sequence
  Description of Artificial Sequence: Synthetic oligonucleotide
auagcucagauaaguugua

SEQ ID NO: 713401 - RNA, 19 nt, Artificial Sequence
  Description of Artificial Sequence: Synthetic oligonucleotide
uuucuacauuugugcuauc

SEQ ID NO: 713402 - RNA, 19 nt, Artificial Sequence
  Description of Artificial Sequence: Synthetic oligonucleotide
aggccaguaauugcuugaa

SEQ ID NO: 713403 - RNA, 19 nt, Artificial Sequence
  Description of Artificial Sequence: Synthetic oligonucleotide
gaaugggacccgucucuua

SEQ ID NO: 713404 - RNA, 19 nt, Artificial Sequence
  Description of Artificial Sequence: Synthetic oligonucleotide
aaggucuauaugggcugua

SEQ ID NO: 713405 - RNA, 19 nt, Artificial Sequence
  Description of Artificial Sequence: Synthetic oligonucleotide
cacugcuccacuacuaguu

SEQ ID NO: 713406 - RNA, 19 nt, Artificial Sequence
  Description of Artificial Sequence: Synthetic oligonucleotide
cacguggcugucagugcuc

SEQ ID NO: 713407 - RNA, 19 nt, Artificial Sequence
  Description of Artificial Sequence: Synthetic oligonucleotide
agaaugggacccgucucuu

SEQ ID NO: 713408 - RNA, 19 nt, Artificial Sequence
  Description of Artificial Sequence: Synthetic oligonucleotide
gauuuugcucaagucccau

SEQ ID NO: 713409 - RNA, 19 nt, Artificial Sequence
  Description of Artificial Sequence: Synthetic oligonucleotide
gguaaggauucuugcauuu

SEQ ID NO: 713410 - RNA, 19 nt, Artificial Sequence
  Description of Artificial Sequence: Synthetic oligonucleotide
ggagucauuucaugaaguu

SEQ ID NO: 713411 - RNA, 19 nt, Artificial Sequence
  Description of Artificial Sequence: Synthetic oligonucleotide
ccuaaggccuauaaauagu

SEQ ID NO: 713412 - RNA, 19 nt, Artificial Sequence
  Description of Artificial Sequence: Synthetic oligonucleotide
ggcucacuuugaugauacc

SEQ ID NO: 713413 - RNA, 19 nt, Artificial Sequence
  Description of Artificial Sequence: Synthetic oligonucleotide
ccgagaauaacugcuaccu

SEQ ID NO: 713414 - RNA, 19 nt, Artificial Sequence
  Description of Artificial Sequence: Synthetic oligonucleotide
ccuaccgugcgaauugcaa

SEQ ID NO: 713415 - RNA, 19 nt, Artificial Sequence
  Description of Artificial Sequence: Synthetic oligonucleotide
cacagcggucucuucgucu

SEQ ID NO: 713416 - RNA, 19 nt, Artificial Sequence
  Description of Artificial Sequence: Synthetic oligonucleotide
cugcacaaccuaaggccua

SEQ ID NO: 713417 - RNA, 19 nt, Artificial Sequence
  Description of Artificial Sequence: Synthetic oligonucleotide
caugacuaauacuguucuu

SEQ ID NO: 713418 - RNA, 19 nt, Artificial Sequence
  Description of Artificial Sequence: Synthetic oligonucleotide
accgugcgaauugcaaaua

SEQ ID NO: 713419 - RNA, 19 nt, Artificial Sequence
  Description of Artificial Sequence: Synthetic oligonucleotide
gacccgucucuuaguucac

SEQ ID NO: 713420 - RNA, 19 nt, Artificial Sequence
  Description of Artificial Sequence: Synthetic oligonucleotide
gaacugccacagcggucuc

SEQ ID NO: 713421 - RNA, 19 nt, Artificial Sequence
  Description of Artificial Sequence: Synthetic oligonucleotide
augugccuaccgugcgaau

SEQ ID NO: 713422 - RNA, 19 nt, Artificial Sequence
  Description of Artificial Sequence: Synthetic oligonucleotide
ggucuaccucaagaugaac

SEQ ID NO: 713423 - RNA, 19 nt, Artificial Sequence
  Description of Artificial Sequence: Synthetic oligonucleotide
gaguggucucugucagacu

SEQ ID NO: 713424 - RNA, 19 nt, Artificial Sequence
  Description of Artificial Sequence: Synthetic oligonucleotide
ccccaacgauaauucuggc

SEQ ID NO: 713425 - RNA, 19 nt, Artificial Sequence
  Description of Artificial Sequence: Synthetic oligonucleotide
cucaccugacaccggaauu

SEQ ID NO: 713426 - RNA, 19 nt, Artificial Sequence
  Description of Artificial Sequence: Synthetic oligonucleotide
gccugguaaugaagaauca

SEQ ID NO: 713427 - RNA, 19 nt, Artificial Sequence
  Description of Artificial Sequence: Synthetic oligonucleotide
cccaacgauaauucuggcu

SEQ ID NO: 713428 - RNA, 19 nt, Artificial Sequence
  Description of Artificial Sequence: Synthetic oligonucleotide
ccauuacauuucauggacu

SEQ ID NO: 713429 - RNA, 19 nt, Artificial Sequence
  Description of Artificial Sequence: Synthetic oligonucleotide
ccauugguuugaaggagcu

SEQ ID NO: 713430 - RNA, 19 nt, Artificial Sequence
  Description of Artificial Sequence: Synthetic oligonucleotide
ccugacaccggaauucuuu

SEQ ID NO: 713431 - RNA, 19 nt, Artificial Sequence
  Description of Artificial Sequence: Synthetic oligonucleotide
gcuauacaugaguggugau

SEQ ID NO: 713432 - RNA, 19 nt, Artificial Sequence
  Description of Artificial Sequence: Synthetic oligonucleotide
cgauaauucuggcucaguu

SEQ ID NO: 713433 - RNA, 19 nt, Artificial Sequence
  Description of Artificial Sequence: Synthetic oligonucleotide
gccuaccgugcgaauugca

SEQ ID NO: 713434 - RNA, 19 nt, Artificial Sequence
  Description of Artificial Sequence: Synthetic oligonucleotide
caagucccauagggauaaa

SEQ ID NO: 713435 - RNA, 19 nt, Artificial Sequence
  Description of Artificial Sequence: Synthetic oligonucleotide
cgagaauaacugcuaccuu

SEQ ID NO: 713436 - RNA, 19 nt, Artificial Sequence
  Description of Artificial Sequence: Synthetic oligonucleotide
gcacaaccuaaggccuaua

SEQ ID NO: 713437 - RNA, 19 nt, Artificial Sequence
  Description of Artificial Sequence: Synthetic oligonucleotide
cagcggucucuucgucuuu

SEQ ID NO: 713438 - RNA, 19 nt, Artificial Sequence
  Description of Artificial Sequence: Synthetic oligonucleotide
uaugccuaaaguuugaggc

SEQ ID NO: 713439 - RNA, 19 nt, Artificial Sequence
  Description of Artificial Sequence: Synthetic oligonucleotide
gagaagcucacguugaggg

SEQ ID NO: 713440 - RNA, 19 nt, Artificial Sequence
  Description of Artificial Sequence: Synthetic oligonucleotide
aaagaugggaagcauaaaa

SEQ ID NO: 713441 - RNA, 19 nt, Artificial Sequence
  Description of Artificial Sequence: Synthetic oligonucleotide
auagaaauucuccuccucg

SEQ ID NO: 713442 - RNA, 19 nt, Artificial Sequence
  Description of Artificial Sequence: Synthetic oligonucleotide
auuuaaggguccuauuuac

SEQ ID NO: 713443 - RNA, 19 nt, Artificial Sequence
  Description of Artificial Sequence: Synthetic oligonucleotide
aaguggguaaacuuuaaga

SEQ ID NO: 713444 - RNA, 19 nt, Artificial Sequence
  Description of Artificial Sequence: Synthetic oligonucleotide
aaggguccuauuuacauug

SEQ ID NO: 713445 - RNA, 19 nt, Artificial Sequence
  Description of Artificial Sequence: Synthetic oligonucleotide
aauagggcugcaccgaguc

SEQ ID NO: 713446 - RNA, 19 nt, Artificial Sequence
  Description of Artificial Sequence: Synthetic oligonucleotide
gaggcaguuaacauuaugg

SEQ ID NO: 713447 - RNA, 19 nt, Artificial Sequence
  Description of Artificial Sequence: Synthetic oligonucleotide
uuugaggauaacuaccuug

SEQ ID NO: 713448 - RNA, 19 nt, Artificial Sequence
  Description of Artificial Sequence: Synthetic oligonucleotide
cuuacagucccaaagcccc

SEQ ID NO: 713449 - RNA, 19 nt, Artificial Sequence
  Description of Artificial Sequence: Synthetic oligonucleotide
uauaaacguuuuauuaaag

SEQ ID NO: 713450 - RNA, 19 nt, Artificial Sequence
  Description of Artificial Sequence: Synthetic oligonucleotide
ugcguaauugugcugauga

SEQ ID NO: 713451 - RNA, 19 nt, Artificial Sequence
  Description of Artificial Sequence: Synthetic oligonucleotide
aggcaguuaacauuauggc

SEQ ID NO: 713452 - RNA, 19 nt, Artificial Sequence
  Description of Artificial Sequence: Synthetic oligonucleotide
augaaauagggcugcaccg

SEQ ID NO: 713453 - RNA, 19 nt, Artificial Sequence
  Description of Artificial Sequence: Synthetic oligonucleotide
aaaguggguaaacuuuaag

SEQ ID NO: 713454 - RNA, 19 nt, Artificial Sequence
  Description of Artificial Sequence: Synthetic oligonucleotide
ucgcagaugaaauagggcu

SEQ ID NO: 713455 - RNA, 19 nt, Artificial Sequence
  Description of Artificial Sequence: Synthetic oligonucleotide
aguggguaaacuuuaagau

SEQ ID NO: 713456 - RNA, 19 nt, Artificial Sequence
  Description of Artificial Sequence: Synthetic oligonucleotide
aagacguuguguguccucc

SEQ ID NO: 713457 - RNA, 19 nt, Artificial Sequence
  Description of Artificial Sequence: Synthetic oligonucleotide
uggauggacaggauguagg

SEQ ID NO: 713458 - RNA, 19 nt, Artificial Sequence
  Description of Artificial Sequence: Synthetic oligonucleotide
aacauuauggcugaagcuu

SEQ ID NO: 713459 - RNA, 19 nt, Artificial Sequence
  Description of Artificial Sequence: Synthetic oligonucleotide
aaguccagcgcaucaguuc

SEQ ID NO: 713460 - RNA, 19 nt, Artificial Sequence
  Description of Artificial Sequence: Synthetic oligonucleotide
agcgcaucaguucuaagag

SEQ ID NO: 713461 - RNA, 19 nt, Artificial Sequence
  Description of Artificial Sequence: Synthetic oligonucleotide
aacguuuuauuaaaguuau

SEQ ID NO: 713462 - RNA, 19 nt, Artificial Sequence
  Description of Artificial Sequence: Synthetic oligonucleotide
uuaaggguccuauuuacau

SEQ ID NO: 713463 - RNA, 19 nt, Artificial Sequence
  Description of Artificial Sequence: Synthetic oligonucleotide
uuuaaggguccuauuuaca

SEQ ID NO: 713464 - RNA, 19 nt, Artificial Sequence
  Description of Artificial Sequence: Synthetic oligonucleotide
uuccagauauccucacugg

SEQ ID NO: 713465 - RNA, 19 nt, Artificial Sequence
  Description of Artificial Sequence: Synthetic oligonucleotide
ucagggucgcagaugaagc

SEQ ID NO: 713466 - RNA, 19 nt, Artificial Sequence
  Description of Artificial Sequence: Synthetic oligonucleotide
cuuucaggggagccgaucg

SEQ ID NO: 713467 - RNA, 19 nt, Artificial Sequence
  Description of Artificial Sequence: Synthetic oligonucleotide
aaaguuugaggcaguuaac

SEQ ID NO: 713468 - RNA, 19 nt, Artificial Sequence
  Description of Artificial Sequence: Synthetic oligonucleotide
acagacacgacaucaauuu

SEQ ID NO: 713469 - RNA, 19 nt, Artificial Sequence
  Description of Artificial Sequence: Synthetic oligonucleotide
auaacuguuauaaacguuu

SEQ ID NO: 713470 - RNA, 19 nt, Artificial Sequence
  Description of Artificial Sequence: Synthetic oligonucleotide
agucggacgagguacagga

SEQ ID NO: 713471 - RNA, 19 nt, Artificial Sequence
  Description of Artificial Sequence: Synthetic oligonucleotide
uucucggagaccagcuugg

SEQ ID NO: 713472 - RNA, 19 nt, Artificial Sequence
  Description of Artificial Sequence: Synthetic oligonucleotide
agacguggcaucuuuugag

SEQ ID NO: 713473 - RNA, 19 nt, Artificial Sequence
  Description of Artificial Sequence: Synthetic oligonucleotide
gauauccucacugggcgcg

SEQ ID NO: 713474 - RNA, 19 nt, Artificial Sequence
  Description of Artificial Sequence: Synthetic oligonucleotide
uaauugugcugaugagugg

SEQ ID NO: 713475 - RNA, 19 nt, Artificial Sequence
  Description of Artificial Sequence: Synthetic oligonucleotide
uggugauagaaauucuccu

SEQ ID NO: 713476 - RNA, 19 nt, Artificial Sequence
  Description of Artificial Sequence: Synthetic oligonucleotide
gucaguucacgcaacagag

SEQ ID NO: 713477 - RNA, 19 nt, Artificial Sequence
  Description of Artificial Sequence: Synthetic oligonucleotide
cucgcagacuguaaguccc

SEQ ID NO: 713478 - RNA, 19 nt, Artificial Sequence
  Description of Artificial Sequence: Synthetic oligonucleotide
aggauauccagccuucaga

SEQ ID NO: 713479 - RNA, 19 nt, Artificial Sequence
  Description of Artificial Sequence: Synthetic oligonucleotide
ucgucagggucgcagauga

SEQ ID NO: 713480 - RNA, 19 nt, Artificial Sequence
  Description of Artificial Sequence: Synthetic oligonucleotide
uggaaaaguggguaaacuu

SEQ ID NO: 713481 - RNA, 19 nt, Artificial Sequence
  Description of Artificial Sequence: Synthetic oligonucleotide
gaagcucacguugaggggc

SEQ ID NO: 713482 - RNA, 19 nt, Artificial Sequence
  Description of Artificial Sequence: Synthetic oligonucleotide
cauacaauccuggaugaug

SEQ ID NO: 713483 - RNA, 19 nt, Artificial Sequence
  Description of Artificial Sequence: Synthetic oligonucleotide
uuuaugccuaaaguuugag

SEQ ID NO: 713484 - RNA, 19 nt, Artificial Sequence
  Description of Artificial Sequence: Synthetic oligonucleotide
ucggacgagguacaggacu

SEQ ID NO: 713485 - RNA, 19 nt, Artificial Sequence
  Description of Artificial Sequence: Synthetic oligonucleotide
aaaaguucuuuuaugccua

SEQ ID NO: 713486 - RNA, 19 nt, Artificial Sequence
  Description of Artificial Sequence: Synthetic oligonucleotide
ugauagaaauucuccuccu

SEQ ID NO: 713487 - RNA, 19 nt, Artificial Sequence
  Description of Artificial Sequence: Synthetic oligonucleotide
ucgucgcagaugaaauagg

SEQ ID NO: 713488 - RNA, 19 nt, Artificial Sequence
  Description of Artificial Sequence: Synthetic oligonucleotide
gauagaaauucuccuccuc

SEQ ID NO: 713489 - RNA, 19 nt, Artificial Sequence
  Description of Artificial Sequence: Synthetic oligonucleotide
gaugacccugauucggacc

SEQ ID NO: 713490 - RNA, 19 nt, Artificial Sequence
  Description of Artificial Sequence: Synthetic oligonucleotide
aagcgcucucccuacucuc

SEQ ID NO: 713491 - RNA, 19 nt, Artificial Sequence
  Description of Artificial Sequence: Synthetic oligonucleotide
cucgucgcagaugaaauag

SEQ ID NO: 713492 - RNA, 19 nt, Artificial Sequence
  Description of Artificial Sequence: Synthetic oligonucleotide
aacuguuauaaacguuuua

SEQ ID NO: 713493 - RNA, 19 nt, Artificial Sequence
  Description of Artificial Sequence: Synthetic oligonucleotide
ucgcagaugaagcucugac

SEQ ID NO: 713494 - RNA, 19 nt, Artificial Sequence
  Description of Artificial Sequence: Synthetic oligonucleotide
ugauucggaccuccuagca

SEQ ID NO: 713495 - RNA, 19 nt, Artificial Sequence
  Description of Artificial Sequence: Synthetic oligonucleotide
ucugacucaccaugucucc

SEQ ID NO: 713496 - RNA, 19 nt, Artificial Sequence
  Description of Artificial Sequence: Synthetic oligonucleotide
gcgaccgucacauaggaug

SEQ ID NO: 713497 - RNA, 19 nt, Artificial Sequence
  Description of Artificial Sequence: Synthetic oligonucleotide
auacaauccuggaugauga

SEQ ID NO: 713498 - RNA, 19 nt, Artificial Sequence
  Description of Artificial Sequence: Synthetic oligonucleotide
uuggaaaaguggguaaacu

SEQ ID NO: 713499 - RNA, 19 nt, Artificial Sequence
  Description of Artificial Sequence: Synthetic oligonucleotide
agguacaggacuugggcga

SEQ ID NO: 713500 - RNA, 19 nt, Artificial Sequence
  Description of Artificial Sequence: Synthetic oligonucleotide
ggauaguccuuccucgugg

SEQ ID NO: 713501 - RNA, 19 nt, Artificial Sequence
  Description of Artificial Sequence: Synthetic oligonucleotide
uucagagagcgcgaggagc

SEQ ID NO: 713502 - RNA, 19 nt, Artificial Sequence
  Description of Artificial Sequence: Synthetic oligonucleotide
guucuaagaggaggaagcg

SEQ ID NO: 713503 - RNA, 19 nt, Artificial Sequence
  Description of Artificial Sequence: Synthetic oligonucleotide
gaugcacucggacgcggcg

SEQ ID NO: 713504 - RNA, 19 nt, Artificial Sequence
  Description of Artificial Sequence: Synthetic oligonucleotide
cucacguugaggggcaucg

SEQ ID NO: 713505 - RNA, 19 nt, Artificial Sequence
  Description of Artificial Sequence: Synthetic oligonucleotide
uccaagacguugugugucc

SEQ ID NO: 713506 - RNA, 19 nt, Artificial Sequence
  Description of Artificial Sequence: Synthetic oligonucleotide
agcgcgaggagcuccuuuc

SEQ ID NO: 713507 - RNA, 19 nt, Artificial Sequence
  Description of Artificial Sequence: Synthetic oligonucleotide
ugauccgcgguggagaagu

SEQ ID NO: 713508 - RNA, 19 nt, Artificial Sequence
  Description of Artificial Sequence: Synthetic oligonucleotide
agacacgacaucaauuucu

SEQ ID NO: 713509 - RNA, 19 nt, Artificial Sequence
  Description of Artificial Sequence: Synthetic oligonucleotide
uguguccuccucuugucgu

SEQ ID NO: 713510 - RNA, 19 nt, Artificial Sequence
  Description of Artificial Sequence: Synthetic oligonucleotide
uaacuguuauaaacguuuu

SEQ ID NO: 713511 - RNA, 19 nt, Artificial Sequence
  Description of Artificial Sequence: Synthetic oligonucleotide
uauccagccuucagagagc

SEQ ID NO: 713512 - RNA, 19 nt, Artificial Sequence
  Description of Artificial Sequence: Synthetic oligonucleotide
uuggauggacaggauguag

SEQ ID NO: 713513 - RNA, 19 nt, Artificial Sequence
  Description of Artificial Sequence: Synthetic oligonucleotide
acauuugcgguuguugcug

SEQ ID NO: 713514 - RNA, 19 nt, Artificial Sequence
  Description of Artificial Sequence: Synthetic oligonucleotide
gaaaaguggguaaacuuua

SEQ ID NO: 713515 - RNA, 19 nt, Artificial Sequence
  Description of Artificial Sequence: Synthetic oligonucleotide
gacuccgaggacagcagcg

SEQ ID NO: 713516 - RNA, 19 nt, Artificial Sequence
  Description of Artificial Sequence: Synthetic oligonucleotide
gacgagguacaggacuugg

SEQ ID NO: 713517 - RNA, 19 nt, Artificial Sequence
  Description of Artificial Sequence: Synthetic oligonucleotide
gucauaguuccuguuggag

SEQ ID NO: 713518 - RNA, 19 nt, Artificial Sequence
  Description of Artificial Sequence: Synthetic oligonucleotide
guucacgcaacagaguuuc

SEQ ID NO: 713519 - RNA, 19 nt, Artificial Sequence
  Description of Artificial Sequence: Synthetic oligonucleotide
uccucgucgcagaugaaau

SEQ ID NO: 713520 - RNA, 19 nt, Artificial Sequence
  Description of Artificial Sequence: Synthetic oligonucleotide
gaugaguggagacguggca

SEQ ID NO: 713521 - RNA, 19 nt, Artificial Sequence
  Description of Artificial Sequence: Synthetic oligonucleotide
uguugcugaucuguuucag

SEQ ID NO: 713522 - RNA, 19 nt, Artificial Sequence
  Description of Artificial Sequence: Synthetic oligonucleotide
cugucugcggguuuuccac

SEQ ID NO: 713523 - RNA, 19 nt, Artificial Sequence
  Description of Artificial Sequence: Synthetic oligonucleotide
ucacucgcagacuguaagu

SEQ ID NO: 713524 - RNA, 19 nt, Artificial Sequence
  Description of Artificial Sequence: Synthetic oligonucleotide
uggcguuccaagacguugu

SEQ ID NO: 713525 - RNA, 19 nt, Artificial Sequence
  Description of Artificial Sequence: Synthetic oligonucleotide
ggucgaugcacucggacgc

SEQ ID NO: 713526 - RNA, 19 nt, Artificial Sequence
  Description of Artificial Sequence: Synthetic oligonucleotide
ucacgcaacagaguuucga

SEQ ID NO: 713527 - RNA, 19 nt, Artificial Sequence
  Description of Artificial Sequence: Synthetic oligonucleotide
acguugaggggcaucgucg

SEQ ID NO: 713528 - RNA, 19 nt, Artificial Sequence
  Description of Artificial Sequence: Synthetic oligonucleotide
gacguggcaucuuuugaga

SEQ ID NO: 713529 - RNA, 19 nt, Artificial Sequence
  Description of Artificial Sequence: Synthetic oligonucleotide
aaaagaugggaagcauaaa

SEQ ID NO: 713530 - RNA, 19 nt, Artificial Sequence
  Description of Artificial Sequence: Synthetic oligonucleotide
uaaggguccuauuuacauu

SEQ ID NO: 713531 - RNA, 19 nt, Artificial Sequence
  Description of Artificial Sequence: Synthetic oligonucleotide
acucaccaugucuccuccc

SEQ ID NO: 713532 - RNA, 19 nt, Artificial Sequence
  Description of Artificial Sequence: Synthetic oligonucleotide
ccagauauccucacugggc

SEQ ID NO: 713533 - RNA, 19 nt, Artificial Sequence
  Description of Artificial Sequence: Synthetic oligonucleotide
cauuauggcugaagcuuac

SEQ ID NO: 713534 - RNA, 19 nt, Artificial Sequence
  Description of Artificial Sequence: Synthetic oligonucleotide
gaggaggaagcgcucuccc

SEQ ID NO: 713535 - RNA, 19 nt, Artificial Sequence
  Description of Artificial Sequence: Synthetic oligonucleotide
gggucgaugcacucggacg

SEQ ID NO: 713536 - RNA, 19 nt, Artificial Sequence
  Description of Artificial Sequence: Synthetic oligonucleotide
gacucaccaugucuccucc

SEQ ID NO: 713537 - RNA, 19 nt, Artificial Sequence
  Description of Artificial Sequence: Synthetic oligonucleotide
ucaacuguucucuccgcuu

SEQ ID NO: 713538 - RNA, 19 nt, Artificial Sequence
  Description of Artificial Sequence: Synthetic oligonucleotide
agucccaaagccccagcca

SEQ ID NO: 713539 - RNA, 19 nt, Artificial Sequence
  Description of Artificial Sequence: Synthetic oligonucleotide
uucacgcaacagaguuucg

SEQ ID NO: 713540 - RNA, 19 nt, Artificial Sequence
  Description of Artificial Sequence: Synthetic oligonucleotide
gucugcggguuuuccaccg

SEQ ID NO: 713541 - RNA, 19 nt, Artificial Sequence
  Description of Artificial Sequence: Synthetic oligonucleotide
cacauacaauccuggauga

SEQ ID NO: 713542 - RNA, 19 nt, Artificial Sequence
  Description of Artificial Sequence: Synthetic oligonucleotide
gagacguggcaucuuuuga

SEQ ID NO: 713543 - RNA, 19 nt, Artificial Sequence
  Description of Artificial Sequence: Synthetic oligonucleotide
gugcugaugaguggagacg

SEQ ID NO: 713544 - RNA, 19 nt, Artificial Sequence
  Description of Artificial Sequence: Synthetic oligonucleotide
ucgaggucauaguuccugu

SEQ ID NO: 713545 - RNA, 19 nt, Artificial Sequence
  Description of Artificial Sequence: Synthetic oligonucleotide
ugucugcggguuuuccacc

SEQ ID NO: 713546 - RNA, 19 nt, Artificial Sequence
  Description of Artificial Sequence: Synthetic oligonucleotide
cucggagaccagcuuggcg

SEQ ID NO: 713547 - RNA, 19 nt, Artificial Sequence
  Description of Artificial Sequence: Synthetic oligonucleotide
ugaagcuuacagucccaaa

SEQ ID NO: 713548 - RNA, 19 nt, Artificial Sequence
  Description of Artificial Sequence: Synthetic oligonucleotide
agggucgcagaugaagcuc

SEQ ID NO: 713549 - RNA, 19 nt, Artificial Sequence
  Description of Artificial Sequence: Synthetic oligonucleotide
ucccuacucucauuccagc

SEQ ID NO: 713550 - RNA, 19 nt, Artificial Sequence
  Description of Artificial Sequence: Synthetic oligonucleotide
accgagucguagucgaggu

SEQ ID NO: 713551 - RNA, 19 nt, Artificial Sequence
  Description of Artificial Sequence: Synthetic oligonucleotide
cuucggcuuggauggacag

SEQ ID NO: 713552 - RNA, 19 nt, Artificial Sequence
  Description of Artificial Sequence: Synthetic oligonucleotide
aucgucgcggcugucugcg

SEQ ID NO: 713553 - RNA, 19 nt, Artificial Sequence
  Description of Artificial Sequence: Synthetic oligonucleotide
cuugcguucuucggcuugg

SEQ ID NO: 713554 - RNA, 19 nt, Artificial Sequence
  Description of Artificial Sequence: Synthetic oligonucleotide
uuuccaccgccccaaggau

SEQ ID NO: 713555 - RNA, 19 nt, Artificial Sequence
  Description of Artificial Sequence: Synthetic oligonucleotide
uguccgcccgcugcaaugg

SEQ ID NO: 713556 - RNA, 19 nt, Artificial Sequence
  Description of Artificial Sequence: Synthetic oligonucleotide
auaggucaguucacgcaac

SEQ ID NO: 713557 - RNA, 19 nt, Artificial Sequence
  Description of Artificial Sequence: Synthetic oligonucleotide
ggagacguggcaucuuuug

SEQ ID NO: 713558 - RNA, 19 nt, Artificial Sequence
  Description of Artificial Sequence: Synthetic oligonucleotide
ugggaggugucuccucgug

SEQ ID NO: 713559 - RNA, 19 nt, Artificial Sequence
  Description of Artificial Sequence: Synthetic oligonucleotide
gaugaaggucucgucguca

SEQ ID NO: 713560 - RNA, 19 nt, Artificial Sequence
  Description of Artificial Sequence: Synthetic oligonucleotide
ggucaguucacgcaacaga

SEQ ID NO: 713561 - RNA, 19 nt, Artificial Sequence
  Description of Artificial Sequence: Synthetic oligonucleotide
uggagucggacgagguaca

SEQ ID NO: 713562 - RNA, 19 nt, Artificial Sequence
  Description of Artificial Sequence: Synthetic oligonucleotide
cguuccaagacguugugug

SEQ ID NO: 713563 - RNA, 19 nt, Artificial Sequence
  Description of Artificial Sequence: Synthetic oligonucleotide
agcgaguccgaggaaggag

SEQ ID NO: 713564 - RNA, 19 nt, Artificial Sequence
  Description of Artificial Sequence: Synthetic oligonucleotide
gagucggacgagguacagg

SEQ ID NO: 713565 - RNA, 19 nt, Artificial Sequence
  Description of Artificial Sequence: Synthetic oligonucleotide
uccucacugggcgcgggcg

SEQ ID NO: 713566 - RNA, 19 nt, Artificial Sequence
  Description of Artificial Sequence: Synthetic oligonucleotide
cuggcguuccaagacguug

SEQ ID NO: 713567 - RNA, 19 nt, Artificial Sequence
  Description of Artificial Sequence: Synthetic oligonucleotide
caccgagucguagucgagg

SEQ ID NO: 713568 - RNA, 19 nt, Artificial Sequence
  Description of Artificial Sequence: Synthetic oligonucleotide
ggucucgucgucagggucg

SEQ ID NO: 713569 - RNA, 19 nt, Artificial Sequence
  Description of Artificial Sequence: Synthetic oligonucleotide
auugugcugaugaguggag

SEQ ID NO: 713570 - RNA, 19 nt, Artificial Sequence
  Description of Artificial Sequence: Synthetic oligonucleotide
uugugcugaugaguggaga

SEQ ID NO: 713571 - RNA, 19 nt, Artificial Sequence
  Description of Artificial Sequence: Synthetic oligonucleotide
gcgaggagcuccuuucagg

SEQ ID NO: 713572 - RNA, 19 nt, Artificial Sequence
  Description of Artificial Sequence: Synthetic oligonucleotide
guugugagguuaggcugcg

SEQ ID NO: 713573 - RNA, 19 nt, Artificial Sequence
  Description of Artificial Sequence: Synthetic oligonucleotide
gagcggguagggaaagacc

SEQ ID NO: 713574 - RNA, 19 nt, Artificial Sequence
  Description of Artificial Sequence: Synthetic oligonucleotide
uccccauaggucaguucac

SEQ ID NO: 713575 - RNA, 19 nt, Artificial Sequence
  Description of Artificial Sequence: Synthetic oligonucleotide
ucugcggguuuuccaccgc

SEQ ID NO: 713576 - RNA, 19 nt, Artificial Sequence
  Description of Artificial Sequence: Synthetic oligonucleotide
aggucaguucacgcaacag

SEQ ID NO: 713577 - RNA, 19 nt, Artificial Sequence
  Description of Artificial Sequence: Synthetic oligonucleotide
gguggugauagaaauucuc

SEQ ID NO: 713578 - RNA, 19 nt, Artificial Sequence
  Description of Artificial Sequence: Synthetic oligonucleotide
cgucgcagaugaaauaggg

SEQ ID NO: 713579 - RNA, 19 nt, Artificial Sequence
  Description of Artificial Sequence: Synthetic oligonucleotide
auuauggcugaagcuuaca

SEQ ID NO: 713580 - RNA, 19 nt, Artificial Sequence
  Description of Artificial Sequence: Synthetic oligonucleotide
gcugcgagcaugcauuuga

SEQ ID NO: 713581 - RNA, 19 nt, Artificial Sequence
  Description of Artificial Sequence: Synthetic oligonucleotide
acgagguacaggacuuggg

SEQ ID NO: 713582 - RNA, 19 nt, Artificial Sequence
  Description of Artificial Sequence: Synthetic oligonucleotide
cacucgcagacuguaaguc

SEQ ID NO: 713583 - RNA, 19 nt, Artificial Sequence
  Description of Artificial Sequence: Synthetic oligonucleotide
cagacacgacaucaauuuc

SEQ ID NO: 713584 - RNA, 19 nt, Artificial Sequence
  Description of Artificial Sequence: Synthetic oligonucleotide
acguggcaucuuuugagaa

SEQ ID NO: 713585 - RNA, 19 nt, Artificial Sequence
  Description of Artificial Sequence: Synthetic oligonucleotide
gagccgaucgcgggcagag

SEQ ID NO: 713586 - RNA, 19 nt, Artificial Sequence
  Description of Artificial Sequence: Synthetic oligonucleotide
gcgagcaugcauuugaagu

SEQ ID NO: 713587 - RNA, 19 nt, Artificial Sequence
  Description of Artificial Sequence: Synthetic oligonucleotide
guuucgaagcuguucgagu

SEQ ID NO: 713588 - RNA, 19 nt, Artificial Sequence
  Description of Artificial Sequence: Synthetic oligonucleotide
cacgcaacagaguuucgaa

SEQ ID NO: 713589 - RNA, 19 nt, Artificial Sequence
  Description of Artificial Sequence: Synthetic oligonucleotide
cucggucaccaucuccagc

SEQ ID NO: 713590 - RNA, 19 nt, Artificial Sequence
  Description of Artificial Sequence: Synthetic oligonucleotide
ucucuccgcuuccucagua

SEQ ID NO: 713591 - RNA, 19 nt, Artificial Sequence
  Description of Artificial Sequence: Synthetic oligonucleotide
acauuauggcugaagcuua

SEQ ID NO: 713592 - RNA, 19 nt, Artificial Sequence
  Description of Artificial Sequence: Synthetic oligonucleotide
cuguucgaguuuguguuuc

SEQ ID NO: 713593 - RNA, 19 nt, Artificial Sequence
  Description of Artificial Sequence: Synthetic oligonucleotide
agcugauccgcgguggaga

SEQ ID NO: 713594 - RNA, 19 nt, Artificial Sequence
  Description of Artificial Sequence: Synthetic oligonucleotide
gacccugauucggaccucc

SEQ ID NO: 713595 - RNA, 19 nt, Artificial Sequence
  Description of Artificial Sequence: Synthetic oligonucleotide
aauuuccuccccggcgccu

SEQ ID NO: 713596 - RNA, 19 nt, Artificial Sequence
  Description of Artificial Sequence: Synthetic oligonucleotide
gcgcaucaguucuaagagg

SEQ ID NO: 713597 - RNA, 19 nt, Artificial Sequence
  Description of Artificial Sequence: Synthetic oligonucleotide
caccgccccaaggauaucc

SEQ ID NO: 713598 - RNA, 19 nt, Artificial Sequence
  Description of Artificial Sequence: Synthetic oligonucleotide
cgagcaugcauuugaaguc

SEQ ID NO: 713599 - RNA, 19 nt, Artificial Sequence
  Description of Artificial Sequence: Synthetic oligonucleotide
ggggcgaggguugcgaccg

SEQ ID NO: 713600 - RNA, 19 nt, Artificial Sequence
  Description of Artificial Sequence: Synthetic oligonucleotide
caaaaguguccgcccgcug

SEQ ID NO: 713601 - RNA, 19 nt, Artificial Sequence
  Description of Artificial Sequence: Synthetic oligonucleotide
gagcuugcguucuucggcu

SEQ ID NO: 713602 - RNA, 19 nt, Artificial Sequence
  Description of Artificial Sequence: Synthetic oligonucleotide
gacgcagcgaccgucacau

SEQ ID NO: 713603 - RNA, 19 nt, Artificial Sequence
  Description of Artificial Sequence: Synthetic oligonucleotide
aagcucacguugaggggca

SEQ ID NO: 713604 - RNA, 19 nt, Artificial Sequence
  Description of Artificial Sequence: Synthetic oligonucleotide
cccauaggucaguucacgc

SEQ ID NO: 713605 - RNA, 19 nt, Artificial Sequence
  Description of Artificial Sequence: Synthetic oligonucleotide
aggguccuauuuacauugg

SEQ ID NO: 713606 - RNA, 19 nt, Artificial Sequence
  Description of Artificial Sequence: Synthetic oligonucleotide
guguccgcccgcugcaaug

SEQ ID NO: 713607 - RNA, 19 nt, Artificial Sequence
  Description of Artificial Sequence: Synthetic oligonucleotide
uccggauggggaugacccu

SEQ ID NO: 713608 - RNA, 19 nt, Artificial Sequence
  Description of Artificial Sequence: Synthetic oligonucleotide
gucgaugcacucggacgcg

SEQ ID NO: 713609 - RNA, 19 nt, Artificial Sequence
  Description of Artificial Sequence: Synthetic oligonucleotide
gcagcgaccgucacauagg

SEQ ID NO: 713610 - RNA, 19 nt, Artificial Sequence
  Description of Artificial Sequence: Synthetic oligonucleotide
ugcguucuucggcuuggau

SEQ ID NO: 713611 - RNA, 19 nt, Artificial Sequence
  Description of Artificial Sequence: Synthetic oligonucleotide
caucgucgcggcugucugc

SEQ ID NO: 713612 - RNA, 19 nt, Artificial Sequence
  Description of Artificial Sequence: Synthetic oligonucleotide
gccgaucgcgggcagaggc

SEQ ID NO: 713613 - RNA, 19 nt, Artificial Sequence
  Description of Artificial Sequence: Synthetic oligonucleotide
ccucuggcguuccaagacg

SEQ ID NO: 713614 - RNA, 19 nt, Artificial Sequence
  Description of Artificial Sequence: Synthetic oligonucleotide
cauuugcgguuguugcuga

SEQ ID NO: 713615 - RNA, 19 nt, Artificial Sequence
  Description of Artificial Sequence: Synthetic oligonucleotide
ucggaccuccuagcagagg

SEQ ID NO: 713616 - RNA, 19 nt, Artificial Sequence
  Description of Artificial Sequence: Synthetic oligonucleotide
caguucacgcaacagaguu

SEQ ID NO: 713617 - RNA, 19 nt, Artificial Sequence
  Description of Artificial Sequence: Synthetic oligonucleotide
gcgguggagaaguugccac

SEQ ID NO: 713618 - RNA, 19 nt, Artificial Sequence
  Description of Artificial Sequence: Synthetic oligonucleotide
ucuggcguuccaagacguu

SEQ ID NO: 713619 - RNA, 19 nt, Artificial Sequence
  Description of Artificial Sequence: Synthetic oligonucleotide
ggaugacccugauucggac

SEQ ID NO: 713620 - RNA, 19 nt, Artificial Sequence
  Description of Artificial Sequence: Synthetic oligonucleotide
gcucaaauuucuuccagau

SEQ ID NO: 713621 - RNA, 19 nt, Artificial Sequence
  Description of Artificial Sequence: Synthetic oligonucleotide
gguacaggacuugggcgag

SEQ ID NO: 713622 - RNA, 19 nt, Artificial Sequence
  Description of Artificial Sequence: Synthetic oligonucleotide
gggaggugucuccucgugc

SEQ ID NO: 713623 - RNA, 19 nt, Artificial Sequence
  Description of Artificial Sequence: Synthetic oligonucleotide
uggcccgaggggaggacuc

SEQ ID NO: 713624 - RNA, 19 nt, Artificial Sequence
  Description of Artificial Sequence: Synthetic oligonucleotide
gcuguggagucggacgagg

SEQ ID NO: 713625 - RNA, 19 nt, Artificial Sequence
  Description of Artificial Sequence: Synthetic oligonucleotide
gucgucagggucgcagaug

SEQ ID NO: 713626 - RNA, 19 nt, Artificial Sequence
  Description of Artificial Sequence: Synthetic oligonucleotide
gacacgacaucaauuucuu

SEQ ID NO: 713627 - RNA, 19 nt, Artificial Sequence
  Description of Artificial Sequence: Synthetic oligonucleotide
aguucacgcaacagaguuu

SEQ ID NO: 713628 - RNA, 19 nt, Artificial Sequence
  Description of Artificial Sequence: Synthetic oligonucleotide
gcuugcguucuucggcuug

SEQ ID NO: 713629 - RNA, 19 nt, Artificial Sequence
  Description of Artificial Sequence: Synthetic oligonucleotide
cugcguaauugugcugaug

SEQ ID NO: 713630 - RNA, 19 nt, Artificial Sequence
  Description of Artificial Sequence: Synthetic oligonucleotide
ucguccucccucggggaga

SEQ ID NO: 713631 - RNA, 19 nt, Artificial Sequence
  Description of Artificial Sequence: Synthetic oligonucleotide
cacagacacgacaucaauu

SEQ ID NO: 713632 - RNA, 19 nt, Artificial Sequence
  Description of Artificial Sequence: Synthetic oligonucleotide
acuccgggaucuggucacg

SEQ ID NO: 713633 - RNA, 19 nt, Artificial Sequence
  Description of Artificial Sequence: Synthetic oligonucleotide
ggggucgaugcacucggac

SEQ ID NO: 713634 - RNA, 19 nt, Artificial Sequence
  Description of Artificial Sequence: Synthetic oligonucleotide
ggaagcgcucucccuacuc

SEQ ID NO: 713635 - RNA, 19 nt, Artificial Sequence
  Description of Artificial Sequence: Synthetic oligonucleotide
cagcgaccgucacauagga

SEQ ID NO: 713636 - RNA, 19 nt, Artificial Sequence
  Description of Artificial Sequence: Synthetic oligonucleotide
cagaggggucgaugcacuc

SEQ ID NO: 713637 - RNA, 19 nt, Artificial Sequence
  Description of Artificial Sequence: Synthetic oligonucleotide
gcaucgucgcggcugucug

SEQ ID NO: 713638 - RNA, 19 nt, Artificial Sequence
  Description of Artificial Sequence: Synthetic oligonucleotide
gcggguuuuccaccgcccc

SEQ ID NO: 713639 - RNA, 19 nt, Artificial Sequence
  Description of Artificial Sequence: Synthetic oligonucleotide
cguugaggggcaucgucgc

SEQ ID NO: 713640 - RNA, 19 nt, Artificial Sequence
  Description of Artificial Sequence: Synthetic oligonucleotide
gguuuuccaccgccccaag

SEQ ID NO: 713641 - RNA, 19 nt, Artificial Sequence
  Description of Artificial Sequence: Synthetic oligonucleotide
uccuuucaggggagccgau

SEQ ID NO: 713642 - RNA, 19 nt, Artificial Sequence
  Description of Artificial Sequence: Synthetic oligonucleotide
ccccauaggucaguucacg

SEQ ID NO: 713643 - RNA, 19 nt, Artificial Sequence
  Description of Artificial Sequence: Synthetic oligonucleotide
ggcgcugcguaauugugcu

SEQ ID NO: 713644 - RNA, 19 nt, Artificial Sequence
  Description of Artificial Sequence: Synthetic oligonucleotide
uggccuccggauggggaug

SEQ ID NO: 713645 - RNA, 19 nt, Artificial Sequence
  Description of Artificial Sequence: Synthetic oligonucleotide
ucuuugcgcgcagccuggu

SEQ ID NO: 713646 - RNA, 19 nt, Artificial Sequence
  Description of Artificial Sequence: Synthetic oligonucleotide
acucggacgcggcggcggu

SEQ ID NO: 713647 - RNA, 19 nt, Artificial Sequence
  Description of Artificial Sequence: Synthetic oligonucleotide
cugcgagcaugcauuugaa

SEQ ID NO: 713648 - RNA, 19 nt, Artificial Sequence
  Description of Artificial Sequence: Synthetic oligonucleotide
ccgucgucguccucccucg

SEQ ID NO: 713649 - RNA, 19 nt, Artificial Sequence
  Description of Artificial Sequence: Synthetic oligonucleotide
gccgcuccacauacaaucc

SEQ ID NO: 713650 - RNA, 19 nt, Artificial Sequence
  Description of Artificial Sequence: Synthetic oligonucleotide
aguuaacauuauggcugaa

SEQ ID NO: 713651 - RNA, 19 nt, Artificial Sequence
  Description of Artificial Sequence: Synthetic oligonucleotide
gggcgcugcguaauugugc

SEQ ID NO: 713652 - RNA, 19 nt, Artificial Sequence
  Description of Artificial Sequence: Synthetic oligonucleotide
cgcgcagccugguaggaag

SEQ ID NO: 713653 - RNA, 19 nt, Artificial Sequence
  Description of Artificial Sequence: Synthetic oligonucleotide
gucgcagaugaagcucuga

SEQ ID NO: 713654 - RNA, 19 nt, Artificial Sequence
  Description of Artificial Sequence: Synthetic oligonucleotide
uugcguucuucggcuugga

SEQ ID NO: 713655 - RNA, 19 nt, Artificial Sequence
  Description of Artificial Sequence: Synthetic oligonucleotide
uugugagguuaggcugcga

SEQ ID NO: 713656 - RNA, 19 nt, Artificial Sequence
  Description of Artificial Sequence: Synthetic oligonucleotide
gcgaguccgaggaaggaga

SEQ ID NO: 713657 - RNA, 19 nt, Artificial Sequence
  Description of Artificial Sequence: Synthetic oligonucleotide
ugcgcgcagccugguagga

SEQ ID NO: 713658 - RNA, 19 nt, Artificial Sequence
  Description of Artificial Sequence: Synthetic oligonucleotide
guacaggacuugggcgagc

SEQ ID NO: 713659 - RNA, 19 nt, Artificial Sequence
  Description of Artificial Sequence: Synthetic oligonucleotide
aggcugcgagcaugcauuu

SEQ ID NO: 713660 - RNA, 19 nt, Artificial Sequence
  Description of Artificial Sequence: Synthetic oligonucleotide
cagagccccgagcggcggc

SEQ ID NO: 713661 - RNA, 19 nt, Artificial Sequence
  Description of Artificial Sequence: Synthetic oligonucleotide
cugauccgcgguggagaag

SEQ ID NO: 713662 - RNA, 19 nt, Artificial Sequence
  Description of Artificial Sequence: Synthetic oligonucleotide
agcuugcguucuucggcuu

SEQ ID NO: 713663 - RNA, 19 nt, Artificial Sequence
  Description of Artificial Sequence: Synthetic oligonucleotide
agaagccgcuccacauaca

SEQ ID NO: 713664 - RNA, 19 nt, Artificial Sequence
  Description of Artificial Sequence: Synthetic oligonucleotide
cagggucgcagaugaagcu

SEQ ID NO: 713665 - RNA, 19 nt, Artificial Sequence
  Description of Artificial Sequence: Synthetic oligonucleotide
gggaugacccugauucgga

SEQ ID NO: 713666 - RNA, 19 nt, Artificial Sequence
  Description of Artificial Sequence: Synthetic oligonucleotide
acguuuuauuaaaguuauu

SEQ ID NO: 713667 - RNA, 19 nt, Artificial Sequence
  Description of Artificial Sequence: Synthetic oligonucleotide
accgccccaaggauaucca

SEQ ID NO: 713668 - RNA, 19 nt, Artificial Sequence
  Description of Artificial Sequence: Synthetic oligonucleotide
guagugggaggugucuccu

SEQ ID NO: 713669 - RNA, 19 nt, Artificial Sequence
  Description of Artificial Sequence: Synthetic oligonucleotide
agccgaucgcgggcagagg

SEQ ID NO: 713670 - RNA, 19 nt, Artificial Sequence
  Description of Artificial Sequence: Synthetic oligonucleotide
aguggagacguggcaucuu

SEQ ID NO: 713671 - RNA, 19 nt, Artificial Sequence
  Description of Artificial Sequence: Synthetic oligonucleotide
guggagacguggcaucuuu

SEQ ID NO: 713672 - RNA, 19 nt, Artificial Sequence
  Description of Artificial Sequence: Synthetic oligonucleotide
ggaccuccuagcagagggc

SEQ ID NO: 713673 - RNA, 19 nt, Artificial Sequence
  Description of Artificial Sequence: Synthetic oligonucleotide
gucggacgagguacaggac

SEQ ID NO: 713674 - RNA, 19 nt, Artificial Sequence
  Description of Artificial Sequence: Synthetic oligonucleotide
ggacgagguacaggacuug

SEQ ID NO: 713675 - RNA, 19 nt, Artificial Sequence
  Description of Artificial Sequence: Synthetic oligonucleotide
gagguuaggcugcgagcau

SEQ ID NO: 713676 - RNA, 19 nt, Artificial Sequence
  Description of Artificial Sequence: Synthetic oligonucleotide
gcugaugaguggagacgug

SEQ ID NO: 713677 - RNA, 19 nt, Artificial Sequence
  Description of Artificial Sequence: Synthetic oligonucleotide
gcugauccgcgguggagaa

SEQ ID NO: 713678 - RNA, 19 nt, Artificial Sequence
  Description of Artificial Sequence: Synthetic oligonucleotide
ggcgcugucuuugcgcgca

SEQ ID NO: 713679 - RNA, 19 nt, Artificial Sequence
  Description of Artificial Sequence: Synthetic oligonucleotide
cuguggagucggacgaggu

SEQ ID NO: 713680 - RNA, 19 nt, Artificial Sequence
  Description of Artificial Sequence: Synthetic oligonucleotide
ccggauggggaugacccug

SEQ ID NO: 713681 - RNA, 19 nt, Artificial Sequence
  Description of Artificial Sequence: Synthetic oligonucleotide
ccgucacauaggauggaga

SEQ ID NO: 713682 - RNA, 19 nt, Artificial Sequence
  Description of Artificial Sequence: Synthetic oligonucleotide
uggcacauuugcgguuguu

SEQ ID NO: 713683 - RNA, 19 nt, Artificial Sequence
  Description of Artificial Sequence: Synthetic oligonucleotide
ccgaggggaggacuccgag

SEQ ID NO: 713684 - RNA, 19 nt, Artificial Sequence
  Description of Artificial Sequence: Synthetic oligonucleotide
ccagcgcaucaguucuaag

SEQ ID NO: 713685 - RNA, 19 nt, Artificial Sequence
  Description of Artificial Sequence: Synthetic oligonucleotide
cagagagcgcgaggagcuc

SEQ ID NO: 713686 - RNA, 19 nt, Artificial Sequence
  Description of Artificial Sequence: Synthetic oligonucleotide
cagcuuggcggcggccgag

SEQ ID NO: 713687 - RNA, 19 nt, Artificial Sequence
  Description of Artificial Sequence: Synthetic oligonucleotide
ccuccggauggggaugacc

SEQ ID NO: 713688 - RNA, 19 nt, Artificial Sequence
  Description of Artificial Sequence: Synthetic oligonucleotide
cgucgcggcugucugcggg

SEQ ID NO: 713689 - RNA, 19 nt, Artificial Sequence
  Description of Artificial Sequence: Synthetic oligonucleotide
ccgccccaaggauauccag

SEQ ID NO: 713690 - RNA, 19 nt, Artificial Sequence
  Description of Artificial Sequence: Synthetic oligonucleotide
cugguagugggaggugucu

SEQ ID NO: 713691 - RNA, 19 nt, Artificial Sequence
  Description of Artificial Sequence: Synthetic oligonucleotide
cgaugcacucggacgcggc

SEQ ID NO: 713692 - RNA, 19 nt, Artificial Sequence
  Description of Artificial Sequence: Synthetic oligonucleotide
cgcugcguaauugugcuga

SEQ ID NO: 713693 - RNA, 19 nt, Artificial Sequence
  Description of Artificial Sequence: Synthetic oligonucleotide
ggucgcagaugaagcucug

SEQ ID NO: 713694 - RNA, 19 nt, Artificial Sequence
  Description of Artificial Sequence: Synthetic oligonucleotide
gagagcgcgaggagcuccu

SEQ ID NO: 713695 - RNA, 19 nt, Artificial Sequence
  Description of Artificial Sequence: Synthetic oligonucleotide
agcgaccgucacauaggau

SEQ ID NO: 713696 - RNA, 19 nt, Artificial Sequence
  Description of Artificial Sequence: Synthetic oligonucleotide
agucguagucgaggucaua

SEQ ID NO: 713697 - RNA, 19 nt, Artificial Sequence
  Description of Artificial Sequence: Synthetic oligonucleotide
cuuugcgcgcagccuggua

SEQ ID NO: 713698 - RNA, 19 nt, Artificial Sequence
  Description of Artificial Sequence: Synthetic oligonucleotide
gggucgcagaugaagcucu

SEQ ID NO: 713699 - RNA, 19 nt, Artificial Sequence
  Description of Artificial Sequence: Synthetic oligonucleotide
cgcgaggagcuccuuucag

SEQ ID NO: 713700 - RNA, 19 nt, Artificial Sequence
  Description of Artificial Sequence: Synthetic oligonucleotide
gcggugagauccugcaggu

SEQ ID NO: 713701 - RNA, 19 nt, Artificial Sequence
  Description of Artificial Sequence: Synthetic oligonucleotide
gcccgaggggaggacuccg

SEQ ID NO: 713702 - RNA, 19 nt, Artificial Sequence
  Description of Artificial Sequence: Synthetic oligonucleotide
ggcugcgagcaugcauuug

SEQ ID NO: 713703 - RNA, 19 nt, Artificial Sequence
  Description of Artificial Sequence: Synthetic oligonucleotide
cgaucgcgggcagaggcag

SEQ ID NO: 713704 - RNA, 19 nt, Artificial Sequence
  Description of Artificial Sequence: Synthetic oligonucleotide
gagucguagucgaggucau

SEQ ID NO: 713705 - RNA, 19 nt, Artificial Sequence
  Description of Artificial Sequence: Synthetic oligonucleotide
cuccgggaucuggucacga

SEQ ID NO: 713706 - RNA, 19 nt, Artificial Sequence
  Description of Artificial Sequence: Synthetic oligonucleotide
ccuccccauaggucaguuc

SEQ ID NO: 713707 - RNA, 19 nt, Artificial Sequence
  Description of Artificial Sequence: Synthetic oligonucleotide
cagagucgcugcugguagu

SEQ ID NO: 713708 - RNA, 19 nt, Artificial Sequence
  Description of Artificial Sequence: Synthetic oligonucleotide
gagcgcgaggagcuccuuu

SEQ ID NO: 713709 - RNA, 19 nt, Artificial Sequence
  Description of Artificial Sequence: Synthetic oligonucleotide
gcgcugcguaauugugcug

SEQ ID NO: 713710 - RNA, 19 nt, Artificial Sequence
  Description of Artificial Sequence: Synthetic oligonucleotide
gggagccgaucgcgggcag

SEQ ID NO: 713711 - RNA, 19 nt, Artificial Sequence
  Description of Artificial Sequence: Synthetic oligonucleotide
ccucccucggggagaagga

SEQ ID NO: 713712 - RNA, 19 nt, Artificial Sequence
  Description of Artificial Sequence: Synthetic oligonucleotide
gcgcgaggagcuccuuuca

SEQ ID NO: 713713 - RNA, 19 nt, Artificial Sequence
  Description of Artificial Sequence: Synthetic oligonucleotide
ccgagucguagucgagguc

SEQ ID NO: 713714 - RNA, 19 nt, Artificial Sequence
  Description of Artificial Sequence: Synthetic oligonucleotide
gcuguucgaguuuguguuu

SEQ ID NO: 713715 - RNA, 19 nt, Artificial Sequence
  Description of Artificial Sequence: Synthetic oligonucleotide
gggcugcaccgagucguag

SEQ ID NO: 713716 - RNA, 19 nt, Artificial Sequence
  Description of Artificial Sequence: Synthetic oligonucleotide
cucggacgcggcggcggug

SEQ ID NO: 713717 - RNA, 19 nt, Artificial Sequence
  Description of Artificial Sequence: Synthetic oligonucleotide
ggcaucgucgcggcugucu

SEQ ID NO: 713718 - RNA, 19 nt, Artificial Sequence
  Description of Artificial Sequence: Synthetic oligonucleotide
cguagucgaggucauaguu

SEQ ID NO: 713719 - RNA, 19 nt, Artificial Sequence
  Description of Artificial Sequence: Synthetic oligonucleotide
agggcugcaccgagucgua

SEQ ID NO: 713720 - RNA, 19 nt, Artificial Sequence
  Description of Artificial Sequence: Synthetic oligonucleotide
agcucacguugaggggcau

SEQ ID NO: 713721 - RNA, 19 nt, Artificial Sequence
  Description of Artificial Sequence: Synthetic oligonucleotide
gcucacguugaggggcauc

SEQ ID NO: 713722 - RNA, 19 nt, Artificial Sequence
  Description of Artificial Sequence: Synthetic oligonucleotide
gcgcugucuuugcgcgcag

SEQ ID NO: 713723 - RNA, 19 nt, Artificial Sequence
  Description of Artificial Sequence: Synthetic oligonucleotide
ggagccgaucgcgggcaga

SEQ ID NO: 713724 - RNA, 19 nt, Artificial Sequence
  Description of Artificial Sequence: Synthetic oligonucleotide
gcugcguaauugugcugau

SEQ ID NO: 713725 - RNA, 19 nt, Artificial Sequence
  Description of Artificial Sequence: Synthetic oligonucleotide
cgagaagccgcuccacaua

SEQ ID NO: 713726 - RNA, 19 nt, Artificial Sequence
  Description of Artificial Sequence: Synthetic oligonucleotide
gaggggcaucgucgcggcu

SEQ ID NO: 713727 - RNA, 19 nt, Artificial Sequence
  Description of Artificial Sequence: Synthetic oligonucleotide
cagcagcgaguccgaggaa

SEQ ID NO: 713728 - RNA, 19 nt, Artificial Sequence
  Description of Artificial Sequence: Synthetic oligonucleotide
acgcagcgaccgucacaua

SEQ ID NO: 713729 - RNA, 19 nt, Artificial Sequence
  Description of Artificial Sequence: Synthetic oligonucleotide
gcguuccaagacguugugu

SEQ ID NO: 713730 - RNA, 19 nt, Artificial Sequence
  Description of Artificial Sequence: Synthetic oligonucleotide
cccgaggggaggacuccga

SEQ ID NO: 713731 - RNA, 19 nt, Artificial Sequence
  Description of Artificial Sequence: Synthetic oligonucleotide
cgucgucguccucccucgg

SEQ ID NO: 713732 - RNA, 19 nt, Artificial Sequence
  Description of Artificial Sequence: Synthetic oligonucleotide
ggcgccuggggaguccugu

SEQ ID NO: 713733 - RNA, 19 nt, Artificial Sequence
  Description of Artificial Sequence: Synthetic oligonucleotide
ggcccucuuggcagcugga

SEQ ID NO: 713734 - RNA, 19 nt, Artificial Sequence
  Description of Artificial Sequence: Synthetic oligonucleotide
cgucguccucccucgggga

SEQ ID NO: 713735 - RNA, 19 nt, Artificial Sequence
  Description of Artificial Sequence: Synthetic oligonucleotide
ccuccccggcgccugggga

SEQ ID NO: 713736 - RNA, 19 nt, Artificial Sequence
  Description of Artificial Sequence: Synthetic oligonucleotide
cggacgagguacaggacuu

SEQ ID NO: 713737 - RNA, 19 nt, Artificial Sequence
  Description of Artificial Sequence: Synthetic oligonucleotide
ccaagacguuguguguccu

SEQ ID NO: 713738 - RNA, 19 nt, Artificial Sequence
  Description of Artificial Sequence: Synthetic oligonucleotide
ggcggccgagaagccgcuc

SEQ ID NO: 713739 - RNA, 19 nt, Artificial Sequence
  Description of Artificial Sequence: Synthetic oligonucleotide
gccuccggauggggaugac

SEQ ID NO: 713740 - RNA, 19 nt, Artificial Sequence
  Description of Artificial Sequence: Synthetic oligonucleotide
ccaccgccccaaggauauc

SEQ ID NO: 713741 - RNA, 19 nt, Artificial Sequence
  Description of Artificial Sequence: Synthetic oligonucleotide
cggcgccuggggaguccug

SEQ ID NO: 713742 - RNA, 19 nt, Artificial Sequence
  Description of Artificial Sequence: Synthetic oligonucleotide
ccccggcgccuggggaguc

SEQ ID NO: 713743 - RNA, 19 nt, Artificial Sequence
  Description of Artificial Sequence: Synthetic oligonucleotide
ccggcgccuggggaguccu

SEQ ID NO: 713744 - RNA, 19 nt, Artificial Sequence
  Description of Artificial Sequence: Synthetic oligonucleotide
cgugcccgcgggcggggcu

SEQ ID NO: 713745 - RNA, 19 nt, Artificial Sequence
  Description of Artificial Sequence: Synthetic oligonucleotide
cgcggcugucugcggguuu

SEQ ID NO: 713746 - RNA, 19 nt, Artificial Sequence
  Description of Artificial Sequence: Synthetic oligonucleotide
aacguaauuacacacaagc

SEQ ID NO: 713747 - RNA, 19 nt, Artificial Sequence
  Description of Artificial Sequence: Synthetic oligonucleotide
aacaugauccgguugggac

SEQ ID NO: 713748 - RNA, 19 nt, Artificial Sequence
  Description of Artificial Sequence: Synthetic oligonucleotide
caucuaggaaacaugaucc

SEQ ID NO: 713749 - RNA, 19 nt, Artificial Sequence
  Description of Artificial Sequence: Synthetic oligonucleotide
acugaacguaauuacacac

SEQ ID NO: 713750 - RNA, 19 nt, Artificial Sequence
  Description of Artificial Sequence: Synthetic oligonucleotide
cuuaagguuuucaaggcgg

SEQ ID NO: 713751 - RNA, 19 nt, Artificial Sequence
  Description of Artificial Sequence: Synthetic oligonucleotide
ugacgggagauaaucaugg

SEQ ID NO: 713752 - RNA, 19 nt, Artificial Sequence
  Description of Artificial Sequence: Synthetic oligonucleotide
aaacuuggagcucugauau

SEQ ID NO: 713753 - RNA, 19 nt, Artificial Sequence
  Description of Artificial Sequence: Synthetic oligonucleotide
uccauaauguucaagucga

SEQ ID NO: 713754 - RNA, 19 nt, Artificial Sequence
  Description of Artificial Sequence: Synthetic oligonucleotide
auagcaagaaggcaauggg

SEQ ID NO: 713755 - RNA, 19 nt, Artificial Sequence
  Description of Artificial Sequence: Synthetic oligonucleotide
uccagaauagccacgaagu

SEQ ID NO: 713756 - RNA, 19 nt, Artificial Sequence
  Description of Artificial Sequence: Synthetic oligonucleotide
uccuggaacauacauagac

SEQ ID NO: 713757 - RNA, 19 nt, Artificial Sequence
  Description of Artificial Sequence: Synthetic oligonucleotide
uuagguacuagaguugagg

SEQ ID NO: 713758 - RNA, 19 nt, Artificial Sequence
  Description of Artificial Sequence: Synthetic oligonucleotide
gaaacugucauuauuauua

SEQ ID NO: 713759 - RNA, 19 nt, Artificial Sequence
  Description of Artificial Sequence: Synthetic oligonucleotide
acuggauauaggcguaucc

SEQ ID NO: 713760 - RNA, 19 nt, Artificial Sequence
  Description of Artificial Sequence: Synthetic oligonucleotide
aauccucccauucccgggc

SEQ ID NO: 713761 - RNA, 19 nt, Artificial Sequence
  Description of Artificial Sequence: Synthetic oligonucleotide
guccauaauguucaagucg

SEQ ID NO: 713762 - RNA, 19 nt, Artificial Sequence
  Description of Artificial Sequence: Synthetic oligonucleotide
cauacauagacuaaauaga

SEQ ID NO: 713763 - RNA, 19 nt, Artificial Sequence
  Description of Artificial Sequence: Synthetic oligonucleotide
uuaagguuuucaaggcggg

SEQ ID NO: 713764 - RNA, 19 nt, Artificial Sequence
  Description of Artificial Sequence: Synthetic oligonucleotide
uuucaaggcgggaauauga

SEQ ID NO: 713765 - RNA, 19 nt, Artificial Sequence
  Description of Artificial Sequence: Synthetic oligonucleotide
ugaacguaauuacacacaa

SEQ ID NO: 713766 - RNA, 19 nt, Artificial Sequence
  Description of Artificial Sequence: Synthetic oligonucleotide
uccuuauccuuuuagguac

SEQ ID NO: 713767 - RNA, 19 nt, Artificial Sequence
  Description of Artificial Sequence: Synthetic oligonucleotide
uauccuuuuagguacuaga

SEQ ID NO: 713768 - RNA, 19 nt, Artificial Sequence
  Description of Artificial Sequence: Synthetic oligonucleotide
gauauaggcguauccuggg

SEQ ID NO: 713769 - RNA, 19 nt, Artificial Sequence
  Description of Artificial Sequence: Synthetic oligonucleotide
accgucuugacauguuugc

SEQ ID NO: 713770 - RNA, 19 nt, Artificial Sequence
  Description of Artificial Sequence: Synthetic oligonucleotide
auauguucacuguugauau

SEQ ID NO: 713771 - RNA, 19 nt, Artificial Sequence
  Description of Artificial Sequence: Synthetic oligonucleotide
aaacgugcacuugugcggc

SEQ ID NO: 713772 - RNA, 19 nt, Artificial Sequence
  Description of Artificial Sequence: Synthetic oligonucleotide
agacuaaauagaguucccc

SEQ ID NO: 713773 - RNA, 19 nt, Artificial Sequence
  Description of Artificial Sequence: Synthetic oligonucleotide
uggagcucugauauggaag

SEQ ID NO: 713774 - RNA, 19 nt, Artificial Sequence
  Description of Artificial Sequence: Synthetic oligonucleotide
gauucuggugcuuggcgcg

SEQ ID NO: 713775 - RNA, 19 nt, Artificial Sequence
  Description of Artificial Sequence: Synthetic oligonucleotide
uccgacaaccuucaaacgu

SEQ ID NO: 713776 - RNA, 19 nt, Artificial Sequence
  Description of Artificial Sequence: Synthetic oligonucleotide
aaagggacggugcccgugg

SEQ ID NO: 713777 - RNA, 19 nt, Artificial Sequence
  Description of Artificial Sequence: Synthetic oligonucleotide
aucaggaccaugcaccguc

SEQ ID NO: 713778 - RNA, 19 nt, Artificial Sequence
  Description of Artificial Sequence: Synthetic oligonucleotide
auaggcguauccuggguac

SEQ ID NO: 713779 - RNA, 19 nt, Artificial Sequence
  Description of Artificial Sequence: Synthetic oligonucleotide
aguccgguggaguuagacc

SEQ ID NO: 713780 - RNA, 19 nt, Artificial Sequence
  Description of Artificial Sequence: Synthetic oligonucleotide
cauagcaagaaggcaaugg

SEQ ID NO: 713781 - RNA, 19 nt, Artificial Sequence
  Description of Artificial Sequence: Synthetic oligonucleotide
gauaaucauggggaggccg

SEQ ID NO: 713782 - RNA, 19 nt, Artificial Sequence
  Description of Artificial Sequence: Synthetic oligonucleotide
caaacgugcacuugugcgg

SEQ ID NO: 713783 - RNA, 19 nt, Artificial Sequence
  Description of Artificial Sequence: Synthetic oligonucleotide
auccagaauagccacgaag

SEQ ID NO: 713784 - RNA, 19 nt, Artificial Sequence
  Description of Artificial Sequence: Synthetic oligonucleotide
gagguccauagcaagaagg

SEQ ID NO: 713785 - RNA, 19 nt, Artificial Sequence
  Description of Artificial Sequence: Synthetic oligonucleotide
uaauuacacacaagcugag

SEQ ID NO: 713786 - RNA, 19 nt, Artificial Sequence
  Description of Artificial Sequence: Synthetic oligonucleotide
uagguacuagaguugagga

SEQ ID NO: 713787 - RNA, 19 nt, Artificial Sequence
  Description of Artificial Sequence: Synthetic oligonucleotide
gaccccgggacccuaaugg

SEQ ID NO: 713788 - RNA, 19 nt, Artificial Sequence
  Description of Artificial Sequence: Synthetic oligonucleotide
agacacucauguuacccac

SEQ ID NO: 713789 - RNA, 19 nt, Artificial Sequence
  Description of Artificial Sequence: Synthetic oligonucleotide
uggauauaggcguauccug

SEQ ID NO: 713790 - RNA, 19 nt, Artificial Sequence
  Description of Artificial Sequence: Synthetic oligonucleotide
gacuaaauagaguucccca

SEQ ID NO: 713791 - RNA, 19 nt, Artificial Sequence
  Description of Artificial Sequence: Synthetic oligonucleotide
uuaaacugggcaguuugag

SEQ ID NO: 713792 - RNA, 19 nt, Artificial Sequence
  Description of Artificial Sequence: Synthetic oligonucleotide
aucuaggaaacaugauccg

SEQ ID NO: 713793 - RNA, 19 nt, Artificial Sequence
  Description of Artificial Sequence: Synthetic oligonucleotide
acuccuuauccuuuuaggu

SEQ ID NO: 713794 - RNA, 19 nt, Artificial Sequence
  Description of Artificial Sequence: Synthetic oligonucleotide
aggucaagagaauccagag

SEQ ID NO: 713795 - RNA, 19 nt, Artificial Sequence
  Description of Artificial Sequence: Synthetic oligonucleotide
uaauggccggagcugaugc

SEQ ID NO: 713796 - RNA, 19 nt, Artificial Sequence
  Description of Artificial Sequence: Synthetic oligonucleotide
guccgguggaguuagaccc

SEQ ID NO: 713797 - RNA, 19 nt, Artificial Sequence
  Description of Artificial Sequence: Synthetic oligonucleotide
uggauauguucacuguuga

SEQ ID NO: 713798 - RNA, 19 nt, Artificial Sequence
  Description of Artificial Sequence: Synthetic oligonucleotide
aaaggagccgggcuuguga

SEQ ID NO: 713799 - RNA, 19 nt, Artificial Sequence
  Description of Artificial Sequence: Synthetic oligonucleotide
auuaaaguuuucuccugga

SEQ ID NO: 713800 - RNA, 19 nt, Artificial Sequence
  Description of Artificial Sequence: Synthetic oligonucleotide
uguuugcggagugagcugg

SEQ ID NO: 713801 - RNA, 19 nt, Artificial Sequence
  Description of Artificial Sequence: Synthetic oligonucleotide
ugauauggaaguuccuggu

SEQ ID NO: 713802 - RNA, 19 nt, Artificial Sequence
  Description of Artificial Sequence: Synthetic oligonucleotide
uuguucugguuuuaccugc

SEQ ID NO: 713803 - RNA, 19 nt, Artificial Sequence
  Description of Artificial Sequence: Synthetic oligonucleotide
ggaauugugucucucccgg

SEQ ID NO: 713804 - RNA, 19 nt, Artificial Sequence
  Description of Artificial Sequence: Synthetic oligonucleotide
uuuuagagcuguccccuug

SEQ ID NO: 713805 - RNA, 19 nt, Artificial Sequence
  Description of Artificial Sequence: Synthetic oligonucleotide
ugcgacugaacguaauuac

SEQ ID NO: 713806 - RNA, 19 nt, Artificial Sequence
  Description of Artificial Sequence: Synthetic oligonucleotide
uaaacugggcaguuugaga

SEQ ID NO: 713807 - RNA, 19 nt, Artificial Sequence
  Description of Artificial Sequence: Synthetic oligonucleotide
agcccaauccucccauucc

SEQ ID NO: 713808 - RNA, 19 nt, Artificial Sequence
  Description of Artificial Sequence: Synthetic oligonucleotide
uuagaccccaccaggcacc

SEQ ID NO: 713809 - RNA, 19 nt, Artificial Sequence
  Description of Artificial Sequence: Synthetic oligonucleotide
uauugucaggaaacuguca

SEQ ID NO: 713810 - RNA, 19 nt, Artificial Sequence
  Description of Artificial Sequence: Synthetic oligonucleotide
uuuagguacuagaguugag

SEQ ID NO: 713811 - RNA, 19 nt, Artificial Sequence
  Description of Artificial Sequence: Synthetic oligonucleotide
uacggcuucucauuggagu

SEQ ID NO: 713812 - RNA, 19 nt, Artificial Sequence
  Description of Artificial Sequence: Synthetic oligonucleotide
aaaugaagguugcgggccu

SEQ ID NO: 713813 - RNA, 19 nt, Artificial Sequence
  Description of Artificial Sequence: Synthetic oligonucleotide
uucaaggcgggaauaugac

SEQ ID NO: 713814 - RNA, 19 nt, Artificial Sequence
  Description of Artificial Sequence: Synthetic oligonucleotide
ucucagcauuccuuuauug

SEQ ID NO: 713815 - RNA, 19 nt, Artificial Sequence
  Description of Artificial Sequence: Synthetic oligonucleotide
uuuaccugcacuuguccau

SEQ ID NO: 713816 - RNA, 19 nt, Artificial Sequence
  Description of Artificial Sequence: Synthetic oligonucleotide
ugucaggaaacugucauua

SEQ ID NO: 713817 - RNA, 19 nt, Artificial Sequence
  Description of Artificial Sequence: Synthetic oligonucleotide
uuucacccgugugugaccg

SEQ ID NO: 713818 - RNA, 19 nt, Artificial Sequence
  Description of Artificial Sequence: Synthetic oligonucleotide
caggccuguguucugacgg

SEQ ID NO: 713819 - RNA, 19 nt, Artificial Sequence
  Description of Artificial Sequence: Synthetic oligonucleotide
guuuuaccugcacuugucc

SEQ ID NO: 713820 - RNA, 19 nt, Artificial Sequence
  Description of Artificial Sequence: Synthetic oligonucleotide
ucugacgggagauaaucau

SEQ ID NO: 713821 - RNA, 19 nt, Artificial Sequence
  Description of Artificial Sequence: Synthetic oligonucleotide
uugacauguuugcggagug

SEQ ID NO: 713822 - RNA, 19 nt, Artificial Sequence
  Description of Artificial Sequence: Synthetic oligonucleotide
uguccauaauguucaaguc

SEQ ID NO: 713823 - RNA, 19 nt, Artificial Sequence
  Description of Artificial Sequence: Synthetic oligonucleotide
gaaacuuggagcucugaua

SEQ ID NO: 713824 - RNA, 19 nt, Artificial Sequence
  Description of Artificial Sequence: Synthetic oligonucleotide
accuugagagguccauagc

SEQ ID NO: 713825 - RNA, 19 nt, Artificial Sequence
  Description of Artificial Sequence: Synthetic oligonucleotide
agaaacuuggagcucugau

SEQ ID NO: 713826 - RNA, 19 nt, Artificial Sequence
  Description of Artificial Sequence: Synthetic oligonucleotide
ugguuuuaccugcacuugu

SEQ ID NO: 713827 - RNA, 19 nt, Artificial Sequence
  Description of Artificial Sequence: Synthetic oligonucleotide
agcucugauauggaaguuc

SEQ ID NO: 713828 - RNA, 19 nt, Artificial Sequence
  Description of Artificial Sequence: Synthetic oligonucleotide
gaaggggccggaaaggagc

SEQ ID NO: 713829 - RNA, 19 nt, Artificial Sequence
  Description of Artificial Sequence: Synthetic oligonucleotide
ucaagucgaggacacugga

SEQ ID NO: 713830 - RNA, 19 nt, Artificial Sequence
  Description of Artificial Sequence: Synthetic oligonucleotide
auccuuuuagguacuagag

SEQ ID NO: 713831 - RNA, 19 nt, Artificial Sequence
  Description of Artificial Sequence: Synthetic oligonucleotide
cguaauuacacacaagcug

SEQ ID NO: 713832 - RNA, 19 nt, Artificial Sequence
  Description of Artificial Sequence: Synthetic oligonucleotide
uucugacgggagauaauca

SEQ ID NO: 713833 - RNA, 19 nt, Artificial Sequence
  Description of Artificial Sequence: Synthetic oligonucleotide
acauacggcuucucauugg

SEQ ID NO: 713834 - RNA, 19 nt, Artificial Sequence
  Description of Artificial Sequence: Synthetic oligonucleotide
gucgguauuggcugcacug

SEQ ID NO: 713835 - RNA, 19 nt, Artificial Sequence
  Description of Artificial Sequence: Synthetic oligonucleotide
agugcguccgauucuggug

SEQ ID NO: 713836 - RNA, 19 nt, Artificial Sequence
  Description of Artificial Sequence: Synthetic oligonucleotide
uauaggcguauccugggua

SEQ ID NO: 713837 - RNA, 19 nt, Artificial Sequence
  Description of Artificial Sequence: Synthetic oligonucleotide
ugcgucuuaagguuuucaa

SEQ ID NO: 713838 - RNA, 19 nt, Artificial Sequence
  Description of Artificial Sequence: Synthetic oligonucleotide
ugugucuacgcaugugcac

SEQ ID NO: 713839 - RNA, 19 nt, Artificial Sequence
  Description of Artificial Sequence: Synthetic oligonucleotide
ggauauaggcguauccugg

SEQ ID NO: 713840 - RNA, 19 nt, Artificial Sequence
  Description of Artificial Sequence: Synthetic oligonucleotide
ucuacgcaugugcaccacc

SEQ ID NO: 713841 - RNA, 19 nt, Artificial Sequence
  Description of Artificial Sequence: Synthetic oligonucleotide
uggcgaaggggccggaaag

SEQ ID NO: 713842 - RNA, 19 nt, Artificial Sequence
  Description of Artificial Sequence: Synthetic oligonucleotide
gacgggagauaaucauggg

SEQ ID NO: 713843 - RNA, 19 nt, Artificial Sequence
  Description of Artificial Sequence: Synthetic oligonucleotide
ucaaggcgggaauaugacu

SEQ ID NO: 713844 - RNA, 19 nt, Artificial Sequence
  Description of Artificial Sequence: Synthetic oligonucleotide
uggccuaugggaaggccug

SEQ ID NO: 713845 - RNA, 19 nt, Artificial Sequence
  Description of Artificial Sequence: Synthetic oligonucleotide
cuggaacauacauagacua

SEQ ID NO: 713846 - RNA, 19 nt, Artificial Sequence
  Description of Artificial Sequence: Synthetic oligonucleotide
aggaaacaugauccgguug

SEQ ID NO: 713847 - RNA, 19 nt, Artificial Sequence
  Description of Artificial Sequence: Synthetic oligonucleotide
uguucugguuuuaccugca

SEQ ID NO: 713848 - RNA, 19 nt, Artificial Sequence
  Description of Artificial Sequence: Synthetic oligonucleotide
aguuagaccccaccaggca

SEQ ID NO: 713849 - RNA, 19 nt, Artificial Sequence
  Description of Artificial Sequence: Synthetic oligonucleotide
cugaacguaauuacacaca

SEQ ID NO: 713850 - RNA, 19 nt, Artificial Sequence
  Description of Artificial Sequence: Synthetic oligonucleotide
cagcauggguuaaacuggg

SEQ ID NO: 713851 - RNA, 19 nt, Artificial Sequence
  Description of Artificial Sequence: Synthetic oligonucleotide
uguugauaugaugcaccag

SEQ ID NO: 713852 - RNA, 19 nt, Artificial Sequence
  Description of Artificial Sequence: Synthetic oligonucleotide
uauguucacuguugauaug

SEQ ID NO: 713853 - RNA, 19 nt, Artificial Sequence
  Description of Artificial Sequence: Synthetic oligonucleotide
caaccccugggccucaucc

SEQ ID NO: 713854 - RNA, 19 nt, Artificial Sequence
  Description of Artificial Sequence: Synthetic oligonucleotide
acuagaguugaggaauugu

SEQ ID NO: 713855 - RNA, 19 nt, Artificial Sequence
  Description of Artificial Sequence: Synthetic oligonucleotide
gaacguaauuacacacaag

SEQ ID NO: 713856 - RNA, 19 nt, Artificial Sequence
  Description of Artificial Sequence: Synthetic oligonucleotide
ugggaguaaugggaaaaug

SEQ ID NO: 713857 - RNA, 19 nt, Artificial Sequence
  Description of Artificial Sequence: Synthetic oligonucleotide
gaguuagaccccaccaggc

SEQ ID NO: 713858 - RNA, 19 nt, Artificial Sequence
  Description of Artificial Sequence: Synthetic oligonucleotide
gugcguccgauucuggugc

SEQ ID NO: 713859 - RNA, 19 nt, Artificial Sequence
  Description of Artificial Sequence: Synthetic oligonucleotide
uacgcaugugcaccaccag

SEQ ID NO: 713860 - RNA, 19 nt, Artificial Sequence
  Description of Artificial Sequence: Synthetic oligonucleotide
accccgggacccuaauggc

SEQ ID NO: 713861 - RNA, 19 nt, Artificial Sequence
  Description of Artificial Sequence: Synthetic oligonucleotide
guucugacgggagauaauc

SEQ ID NO: 713862 - RNA, 19 nt, Artificial Sequence
  Description of Artificial Sequence: Synthetic oligonucleotide
gaauugugucucucccggc

SEQ ID NO: 713863 - RNA, 19 nt, Artificial Sequence
  Description of Artificial Sequence: Synthetic oligonucleotide
acauguuugcggagugagc

SEQ ID NO: 713864 - RNA, 19 nt, Artificial Sequence
  Description of Artificial Sequence: Synthetic oligonucleotide
auauaggcguauccugggu

SEQ ID NO: 713865 - RNA, 19 nt, Artificial Sequence
  Description of Artificial Sequence: Synthetic oligonucleotide
ucgguauuggcugcacugc

SEQ ID NO: 713866 - RNA, 19 nt, Artificial Sequence
  Description of Artificial Sequence: Synthetic oligonucleotide
aauggccggagcugaugca

SEQ ID NO: 713867 - RNA, 19 nt, Artificial Sequence
  Description of Artificial Sequence: Synthetic oligonucleotide
uuggagcucugauauggaa

SEQ ID NO: 713868 - RNA, 19 nt, Artificial Sequence
  Description of Artificial Sequence: Synthetic oligonucleotide
ggagauaaucauggggagg

SEQ ID NO: 713869 - RNA, 19 nt, Artificial Sequence
  Description of Artificial Sequence: Synthetic oligonucleotide
cucgaugccucuuggucac

SEQ ID NO: 713870 - RNA, 19 nt, Artificial Sequence
  Description of Artificial Sequence: Synthetic oligonucleotide
cugugugccgcagugggcc

SEQ ID NO: 713871 - RNA, 19 nt, Artificial Sequence
  Description of Artificial Sequence: Synthetic oligonucleotide
guagggaccugacugggga

SEQ ID NO: 713872 - RNA, 19 nt, Artificial Sequence
  Description of Artificial Sequence: Synthetic oligonucleotide
ugucuacgcaugugcacca

SEQ ID NO: 713873 - RNA, 19 nt, Artificial Sequence
  Description of Artificial Sequence: Synthetic oligonucleotide
acguaauuacacacaagcu

SEQ ID NO: 713874 - RNA, 19 nt, Artificial Sequence
  Description of Artificial Sequence: Synthetic oligonucleotide
acuccuuccgcuccccaug

SEQ ID NO: 713875 - RNA, 19 nt, Artificial Sequence
  Description of Artificial Sequence: Synthetic oligonucleotide
ugauuagccugggaacccc

SEQ ID NO: 713876 - RNA, 19 nt, Artificial Sequence
  Description of Artificial Sequence: Synthetic oligonucleotide
guggaguuagaccccacca

SEQ ID NO: 713877 - RNA, 19 nt, Artificial Sequence
  Description of Artificial Sequence: Synthetic oligonucleotide
aggaccaugcaccgucuug

SEQ ID NO: 713878 - RNA, 19 nt, Artificial Sequence
  Description of Artificial Sequence: Synthetic oligonucleotide
acaagguccuucauccaag

SEQ ID NO: 713879 - RNA, 19 nt, Artificial Sequence
  Description of Artificial Sequence: Synthetic oligonucleotide
agguacuagaguugaggaa

SEQ ID NO: 713880 - RNA, 19 nt, Artificial Sequence
  Description of Artificial Sequence: Synthetic oligonucleotide
cuugagagguccauagcaa

SEQ ID NO: 713881 - RNA, 19 nt, Artificial Sequence
  Description of Artificial Sequence: Synthetic oligonucleotide
ucauggcauggcgaagggg

SEQ ID NO: 713882 - RNA, 19 nt, Artificial Sequence
  Description of Artificial Sequence: Synthetic oligonucleotide
cuaggaaacaugauccggu

SEQ ID NO: 713883 - RNA, 19 nt, Artificial Sequence
  Description of Artificial Sequence: Synthetic oligonucleotide
auaaucauggggaggccga

SEQ ID NO: 713884 - RNA, 19 nt, Artificial Sequence
  Description of Artificial Sequence: Synthetic oligonucleotide
uggagugcguccgauucug

SEQ ID NO: 713885 - RNA, 19 nt, Artificial Sequence
  Description of Artificial Sequence: Synthetic oligonucleotide
gggagauaaucauggggag

SEQ ID NO: 713886 - RNA, 19 nt, Artificial Sequence
  Description of Artificial Sequence: Synthetic oligonucleotide
uccuggguacucagcucgg

SEQ ID NO: 713887 - RNA, 19 nt, Artificial Sequence
  Description of Artificial Sequence: Synthetic oligonucleotide
agucgaggacacuggauau

SEQ ID NO: 713888 - RNA, 19 nt, Artificial Sequence
  Description of Artificial Sequence: Synthetic oligonucleotide
aggcgggaauaugacuucc

SEQ ID NO: 713889 - RNA, 19 nt, Artificial Sequence
  Description of Artificial Sequence: Synthetic oligonucleotide
caccgucuugacauguuug

SEQ ID NO: 713890 - RNA, 19 nt, Artificial Sequence
  Description of Artificial Sequence: Synthetic oligonucleotide
agguuuucaaggcgggaau

SEQ ID NO: 713891 - RNA, 19 nt, Artificial Sequence
  Description of Artificial Sequence: Synthetic oligonucleotide
uacuagaguugaggaauug

SEQ ID NO: 713892 - RNA, 19 nt, Artificial Sequence
  Description of Artificial Sequence: Synthetic oligonucleotide
cuccuuauccuuuuaggua

SEQ ID NO: 713893 - RNA, 19 nt, Artificial Sequence
  Description of Artificial Sequence: Synthetic oligonucleotide
aaugaagguugcgggccug

SEQ ID NO: 713894 - RNA, 19 nt, Artificial Sequence
  Description of Artificial Sequence: Synthetic oligonucleotide
auaugaugcaccagcugcu

SEQ ID NO: 713895 - RNA, 19 nt, Artificial Sequence
  Description of Artificial Sequence: Synthetic oligonucleotide
auguuugcggagugagcug

SEQ ID NO: 713896 - RNA, 19 nt, Artificial Sequence
  Description of Artificial Sequence: Synthetic oligonucleotide
gggaguaaugggaaaauga

SEQ ID NO: 713897 - RNA, 19 nt, Artificial Sequence
  Description of Artificial Sequence: Synthetic oligonucleotide
uguucugacgggagauaau

SEQ ID NO: 713898 - RNA, 19 nt, Artificial Sequence
  Description of Artificial Sequence: Synthetic oligonucleotide
ggcuccaccguggaaaggg

SEQ ID NO: 713899 - RNA, 19 nt, Artificial Sequence
  Description of Artificial Sequence: Synthetic oligonucleotide
cauacggcuucucauugga

SEQ ID NO: 713900 - RNA, 19 nt, Artificial Sequence
  Description of Artificial Sequence: Synthetic oligonucleotide
uaaucauggggaggccgag

SEQ ID NO: 713901 - RNA, 19 nt, Artificial Sequence
  Description of Artificial Sequence: Synthetic oligonucleotide
auguuacccacugccaugu

SEQ ID NO: 713902 - RNA, 19 nt, Artificial Sequence
  Description of Artificial Sequence: Synthetic oligonucleotide
cuguuuauacccacugcaa

SEQ ID NO: 713903 - RNA, 19 nt, Artificial Sequence
  Description of Artificial Sequence: Synthetic oligonucleotide
uccccucgaugccucuugg

SEQ ID NO: 713904 - RNA, 19 nt, Artificial Sequence
  Description of Artificial Sequence: Synthetic oligonucleotide
ugucgguauuggcugcacu

SEQ ID NO: 713905 - RNA, 19 nt, Artificial Sequence
  Description of Artificial Sequence: Synthetic oligonucleotide
gaaggugcgucuuaagguu

SEQ ID NO: 713906 - RNA, 19 nt, Artificial Sequence
  Description of Artificial Sequence: Synthetic oligonucleotide
acucagcucggcuucucca

SEQ ID NO: 713907 - RNA, 19 nt, Artificial Sequence
  Description of Artificial Sequence: Synthetic oligonucleotide
cuacgcaugugcaccacca

SEQ ID NO: 713908 - RNA, 19 nt, Artificial Sequence
  Description of Artificial Sequence: Synthetic oligonucleotide
uauccuggguacucagcuc

SEQ ID NO: 713909 - RNA, 19 nt, Artificial Sequence
  Description of Artificial Sequence: Synthetic oligonucleotide
uuccgcuccccauggauau

SEQ ID NO: 713910 - RNA, 19 nt, Artificial Sequence
  Description of Artificial Sequence: Synthetic oligonucleotide
uugggaguaaugggaaaau

SEQ ID NO: 713911 - RNA, 19 nt, Artificial Sequence
  Description of Artificial Sequence: Synthetic oligonucleotide
guugggaguaaugggaaaa

SEQ ID NO: 713912 - RNA, 19 nt, Artificial Sequence
  Description of Artificial Sequence: Synthetic oligonucleotide
uggguacucagcucggcuu

SEQ ID NO: 713913 - RNA, 19 nt, Artificial Sequence
  Description of Artificial Sequence: Synthetic oligonucleotide
cauguuugcggagugagcu

SEQ ID NO: 713914 - RNA, 19 nt, Artificial Sequence
  Description of Artificial Sequence: Synthetic oligonucleotide
ugcccguggcaaagggcgg

SEQ ID NO: 713915 - RNA, 19 nt, Artificial Sequence
  Description of Artificial Sequence: Synthetic oligonucleotide
cagauccgcugcuggaccc

SEQ ID NO: 713916 - RNA, 19 nt, Artificial Sequence
  Description of Artificial Sequence: Synthetic oligonucleotide
aggugcaaagccagauccg

SEQ ID NO: 713917 - RNA, 19 nt, Artificial Sequence
  Description of Artificial Sequence: Synthetic oligonucleotide
gacccuaauggccggagcu

SEQ ID NO: 713918 - RNA, 19 nt, Artificial Sequence
  Description of Artificial Sequence: Synthetic oligonucleotide
caugauccgguugggacuc

SEQ ID NO: 713919 - RNA, 19 nt, Artificial Sequence
  Description of Artificial Sequence: Synthetic oligonucleotide
ccgacaaccuucaaacgug

SEQ ID NO: 713920 - RNA, 19 nt, Artificial Sequence
  Description of Artificial Sequence: Synthetic oligonucleotide
uggcauggcgaaggggccg

SEQ ID NO: 713921 - RNA, 19 nt, Artificial Sequence
  Description of Artificial Sequence: Synthetic oligonucleotide
cgacugaacguaauuacac

SEQ ID NO: 713922 - RNA, 19 nt, Artificial Sequence
  Description of Artificial Sequence: Synthetic oligonucleotide
cuccuuccgcuccccaugg

SEQ ID NO: 713923 - RNA, 19 nt, Artificial Sequence
  Description of Artificial Sequence: Synthetic oligonucleotide
uugcggagugagcugggau

SEQ ID NO: 713924 - RNA, 19 nt, Artificial Sequence
  Description of Artificial Sequence: Synthetic oligonucleotide
gguacuagaguugaggaau

SEQ ID NO: 713925 - RNA, 19 nt, Artificial Sequence
  Description of Artificial Sequence: Synthetic oligonucleotide
ccuugagagguccauagca

SEQ ID NO: 713926 - RNA, 19 nt, Artificial Sequence
  Description of Artificial Sequence: Synthetic oligonucleotide
caaggcgggaauaugacuu

SEQ ID NO: 713927 - RNA, 19 nt, Artificial Sequence
  Description of Artificial Sequence: Synthetic oligonucleotide
gcaaagggcgguccccucg

SEQ ID NO: 713928 - RNA, 19 nt, Artificial Sequence
  Description of Artificial Sequence: Synthetic oligonucleotide
gaggccgaggguagggacc

SEQ ID NO: 713929 - RNA, 19 nt, Artificial Sequence
  Description of Artificial Sequence: Synthetic oligonucleotide
cacaagguccuucauccaa

SEQ ID NO: 713930 - RNA, 19 nt, Artificial Sequence
  Description of Artificial Sequence: Synthetic oligonucleotide
accguggaaagggacggug

SEQ ID NO: 713931 - RNA, 19 nt, Artificial Sequence
  Description of Artificial Sequence: Synthetic oligonucleotide
cagcugauccagccugagg

SEQ ID NO: 713932 - RNA, 19 nt, Artificial Sequence
  Description of Artificial Sequence: Synthetic oligonucleotide
ccucauccagaauagccac

SEQ ID NO: 713933 - RNA, 19 nt, Artificial Sequence
  Description of Artificial Sequence: Synthetic oligonucleotide
ccaauccucccauucccgg

SEQ ID NO: 713934 - RNA, 19 nt, Artificial Sequence
  Description of Artificial Sequence: Synthetic oligonucleotide
aggcguauccuggguacuc

SEQ ID NO: 713935 - RNA, 19 nt, Artificial Sequence
  Description of Artificial Sequence: Synthetic oligonucleotide
gaccaugcaccgucuugac

SEQ ID NO: 713936 - RNA, 19 nt, Artificial Sequence
  Description of Artificial Sequence: Synthetic oligonucleotide
ccagucaucuccacaccgc

SEQ ID NO: 713937 - RNA, 19 nt, Artificial Sequence
  Description of Artificial Sequence: Synthetic oligonucleotide
cucgugggaaggaggagga

SEQ ID NO: 713938 - RNA, 19 nt, Artificial Sequence
  Description of Artificial Sequence: Synthetic oligonucleotide
caugcaccgucuugacaug

SEQ ID NO: 713939 - RNA, 19 nt, Artificial Sequence
  Description of Artificial Sequence: Synthetic oligonucleotide
auggcgaaggggccggaaa

SEQ ID NO: 713940 - RNA, 19 nt, Artificial Sequence
  Description of Artificial Sequence: Synthetic oligonucleotide
uuugagaccccgggacccu

SEQ ID NO: 713941 - RNA, 19 nt, Artificial Sequence
  Description of Artificial Sequence: Synthetic oligonucleotide
agaccccgggacccuaaug

SEQ ID NO: 713942 - RNA, 19 nt, Artificial Sequence
  Description of Artificial Sequence: Synthetic oligonucleotide
acccuaauggccggagcug

SEQ ID NO: 713943 - RNA, 19 nt, Artificial Sequence
  Description of Artificial Sequence: Synthetic oligonucleotide
ccgauucuggugcuuggcg

SEQ ID NO: 713944 - RNA, 19 nt, Artificial Sequence
  Description of Artificial Sequence: Synthetic oligonucleotide
ugcugcgacugaacguaau

SEQ ID NO: 713945 - RNA, 19 nt, Artificial Sequence
  Description of Artificial Sequence: Synthetic oligonucleotide
ggauccguguagcgcuugg

SEQ ID NO: 713946 - RNA, 19 nt, Artificial Sequence
  Description of Artificial Sequence: Synthetic oligonucleotide
cuggauauaggcguauccu

SEQ ID NO: 713947 - RNA, 19 nt, Artificial Sequence
  Description of Artificial Sequence: Synthetic oligonucleotide
ugugugccgcagugggcca

SEQ ID NO: 713948 - RNA, 19 nt, Artificial Sequence
  Description of Artificial Sequence: Synthetic oligonucleotide
cccaauggcacacgaacuc

SEQ ID NO: 713949 - RNA, 19 nt, Artificial Sequence
  Description of Artificial Sequence: Synthetic oligonucleotide
auacggcuucucauuggag

SEQ ID NO: 713950 - RNA, 19 nt, Artificial Sequence
  Description of Artificial Sequence: Synthetic oligonucleotide
cugggauccguguagcgcu

SEQ ID NO: 713951 - RNA, 19 nt, Artificial Sequence
  Description of Artificial Sequence: Synthetic oligonucleotide
ccugaugggcccuccuucc

SEQ ID NO: 713952 - RNA, 19 nt, Artificial Sequence
  Description of Artificial Sequence: Synthetic oligonucleotide
guuugcggagugagcuggg

SEQ ID NO: 713953 - RNA, 19 nt, Artificial Sequence
  Description of Artificial Sequence: Synthetic oligonucleotide
cugguuggggagcccuccc

SEQ ID NO: 713954 - RNA, 19 nt, Artificial Sequence
  Description of Artificial Sequence: Synthetic oligonucleotide
agccgggcuugugacuggc

SEQ ID NO: 713955 - RNA, 19 nt, Artificial Sequence
  Description of Artificial Sequence: Synthetic oligonucleotide
cgauucuggugcuuggcgc

SEQ ID NO: 713956 - RNA, 19 nt, Artificial Sequence
  Description of Artificial Sequence: Synthetic oligonucleotide
guccccucgaugccucuug

SEQ ID NO: 713957 - RNA, 19 nt, Artificial Sequence
  Description of Artificial Sequence: Synthetic oligonucleotide
uggcaaagggcgguccccu

SEQ ID NO: 713958 - RNA, 19 nt, Artificial Sequence
  Description of Artificial Sequence: Synthetic oligonucleotide
ccaggucaagagaauccag

SEQ ID NO: 713959 - RNA, 19 nt, Artificial Sequence
  Description of Artificial Sequence: Synthetic oligonucleotide
ggcauugaggcagggugcc

SEQ ID NO: 713960 - RNA, 19 nt, Artificial Sequence
  Description of Artificial Sequence: Synthetic oligonucleotide
gcugggauccguguagcgc

SEQ ID NO: 713961 - RNA, 19 nt, Artificial Sequence
  Description of Artificial Sequence: Synthetic oligonucleotide
cccaauccucccauucccg

SEQ ID NO: 713962 - RNA, 19 nt, Artificial Sequence
  Description of Artificial Sequence: Synthetic oligonucleotide
ggcgggaauaugacuuccg

SEQ ID NO: 713963 - RNA, 19 nt, Artificial Sequence
  Description of Artificial Sequence: Synthetic oligonucleotide
uaccugcacuuguccauaa

SEQ ID NO: 713964 - RNA, 19 nt, Artificial Sequence
  Description of Artificial Sequence: Synthetic oligonucleotide
ucuggugcuuggcgcgguc

SEQ ID NO: 713965 - RNA, 19 nt, Artificial Sequence
  Description of Artificial Sequence: Synthetic oligonucleotide
gccucauccagaauagcca

SEQ ID NO: 713966 - RNA, 19 nt, Artificial Sequence
  Description of Artificial Sequence: Synthetic oligonucleotide
gagugcguccgauucuggu

SEQ ID NO: 713967 - RNA, 19 nt, Artificial Sequence
  Description of Artificial Sequence: Synthetic oligonucleotide
aggcggugaaguguggaaa

SEQ ID NO: 713968 - RNA, 19 nt, Artificial Sequence
  Description of Artificial Sequence: Synthetic oligonucleotide
uaggcguauccuggguacu

SEQ ID NO: 713969 - RNA, 19 nt, Artificial Sequence
  Description of Artificial Sequence: Synthetic oligonucleotide
gcggagugagcugggaucc

SEQ ID NO: 713970 - RNA, 19 nt, Artificial Sequence
  Description of Artificial Sequence: Synthetic oligonucleotide
cuuccgcuccccauggaua

SEQ ID NO: 713971 - RNA, 19 nt, Artificial Sequence
  Description of Artificial Sequence: Synthetic oligonucleotide
aggcugugugccgcagugg

SEQ ID NO: 713972 - RNA, 19 nt, Artificial Sequence
  Description of Artificial Sequence: Synthetic oligonucleotide
guugcgggccuggggaccc

SEQ ID NO: 713973 - RNA, 19 nt, Artificial Sequence
  Description of Artificial Sequence: Synthetic oligonucleotide
ugauccgguugggacuccu

SEQ ID NO: 713974 - RNA, 19 nt, Artificial Sequence
  Description of Artificial Sequence: Synthetic oligonucleotide
cguggaaagggacggugcc

SEQ ID NO: 713975 - RNA, 19 nt, Artificial Sequence
  Description of Artificial Sequence: Synthetic oligonucleotide
ccagauccgcugcuggacc

SEQ ID NO: 713976 - RNA, 19 nt, Artificial Sequence
  Description of Artificial Sequence: Synthetic oligonucleotide
auggggaggccgaggguag

SEQ ID NO: 713977 - RNA, 19 nt, Artificial Sequence
  Description of Artificial Sequence: Synthetic oligonucleotide
ugcguccgauucuggugcu

SEQ ID NO: 713978 - RNA, 19 nt, Artificial Sequence
  Description of Artificial Sequence: Synthetic oligonucleotide
augggaaggccuguuuaua

SEQ ID NO: 713979 - RNA, 19 nt, Artificial Sequence
  Description of Artificial Sequence: Synthetic oligonucleotide
gcgacugaacguaauuaca

SEQ ID NO: 713980 - RNA, 19 nt, Artificial Sequence
  Description of Artificial Sequence: Synthetic oligonucleotide
augcaccgucuugacaugu

SEQ ID NO: 713981 - RNA, 19 nt, Artificial Sequence
  Description of Artificial Sequence: Synthetic oligonucleotide
augauccgguugggacucc

SEQ ID NO: 713982 - RNA, 19 nt, Artificial Sequence
  Description of Artificial Sequence: Synthetic oligonucleotide
cugcgacugaacguaauua

SEQ ID NO: 713983 - RNA, 19 nt, Artificial Sequence
  Description of Artificial Sequence: Synthetic oligonucleotide
ccucgaugccucuugguca

SEQ ID NO: 713984 - RNA, 19 nt, Artificial Sequence
  Description of Artificial Sequence: Synthetic oligonucleotide
caaagggcgguccccucga

SEQ ID NO: 713985 - RNA, 19 nt, Artificial Sequence
  Description of Artificial Sequence: Synthetic oligonucleotide
agggacggugcccguggca

SEQ ID NO: 713986 - RNA, 19 nt, Artificial Sequence
  Description of Artificial Sequence: Synthetic oligonucleotide
gcgggaauaugacuuccga

SEQ ID NO: 713987 - RNA, 19 nt, Artificial Sequence
  Description of Artificial Sequence: Synthetic oligonucleotide
gcguauccuggguacucag

SEQ ID NO: 713988 - RNA, 19 nt, Artificial Sequence
  Description of Artificial Sequence: Synthetic oligonucleotide
uugcguugccagucaucuc

SEQ ID NO: 713989 - RNA, 19 nt, Artificial Sequence
  Description of Artificial Sequence: Synthetic oligonucleotide
aggccgaggguagggaccu

SEQ ID NO: 713990 - RNA, 19 nt, Artificial Sequence
  Description of Artificial Sequence: Synthetic oligonucleotide
ucgaugccucuuggucacg

SEQ ID NO: 713991 - RNA, 19 nt, Artificial Sequence
  Description of Artificial Sequence: Synthetic oligonucleotide
cccucgaugccucuugguc

SEQ ID NO: 713992 - RNA, 19 nt, Artificial Sequence
  Description of Artificial Sequence: Synthetic oligonucleotide
uccuuccgcuccccaugga

SEQ ID NO: 713993 - RNA, 19 nt, Artificial Sequence
  Description of Artificial Sequence: Synthetic oligonucleotide
ccgcugucgguauuggcug

SEQ ID NO: 713994 - RNA, 19 nt, Artificial Sequence
  Description of Artificial Sequence: Synthetic oligonucleotide
cgacaaccuucaaacgugc

SEQ ID NO: 713995 - RNA, 19 nt, Artificial Sequence
  Description of Artificial Sequence: Synthetic oligonucleotide
ccgucuugacauguuugcg

SEQ ID NO: 713996 - RNA, 19 nt, Artificial Sequence
  Description of Artificial Sequence: Synthetic oligonucleotide
ggaaacugucauuauuauu

SEQ ID NO: 713997 - RNA, 19 nt, Artificial Sequence
  Description of Artificial Sequence: Synthetic oligonucleotide
ggacccuaauggccggagc

SEQ ID NO: 713998 - RNA, 19 nt, Artificial Sequence
  Description of Artificial Sequence: Synthetic oligonucleotide
cacccgugugugaccgaag

SEQ ID NO: 713999 - RNA, 19 nt, Artificial Sequence
  Description of Artificial Sequence: Synthetic oligonucleotide
gccaguccgguggaguuag

SEQ ID NO: 714000 - RNA, 19 nt, Artificial Sequence
  Description of Artificial Sequence: Synthetic oligonucleotide
gguacaaggcagggccugc

SEQ ID NO: 714001 - RNA, 19 nt, Artificial Sequence
  Description of Artificial Sequence: Synthetic oligonucleotide
acggugcccguggcaaagg

SEQ ID NO: 714002 - RNA, 19 nt, Artificial Sequence
  Description of Artificial Sequence: Synthetic oligonucleotide
uguuacccacugccauguu

SEQ ID NO: 714003 - RNA, 19 nt, Artificial Sequence
  Description of Artificial Sequence: Synthetic oligonucleotide
gaccgaaggugcgucuuaa

SEQ ID NO: 714004 - RNA, 19 nt, Artificial Sequence
  Description of Artificial Sequence: Synthetic oligonucleotide
cgguugggacuccuuaucc

SEQ ID NO: 714005 - RNA, 19 nt, Artificial Sequence
  Description of Artificial Sequence: Synthetic oligonucleotide
acccuugacagggcucuga

SEQ ID NO: 714006 - RNA, 19 nt, Artificial Sequence
  Description of Artificial Sequence: Synthetic oligonucleotide
gugugaccgaaggugcguc

SEQ ID NO: 714007 - RNA, 19 nt, Artificial Sequence
  Description of Artificial Sequence: Synthetic oligonucleotide
ugggauccguguagcgcuu

SEQ ID NO: 714008 - RNA, 19 nt, Artificial Sequence
  Description of Artificial Sequence: Synthetic oligonucleotide
cguauccuggguacucagc

SEQ ID NO: 714009 - RNA, 19 nt, Artificial Sequence
  Description of Artificial Sequence: Synthetic oligonucleotide
ggguacaaggcagggccug

SEQ ID NO: 714010 - RNA, 19 nt, Artificial Sequence
  Description of Artificial Sequence: Synthetic oligonucleotide
uucuggugcuuggcgcggu

SEQ ID NO: 714011 - RNA, 19 nt, Artificial Sequence
  Description of Artificial Sequence: Synthetic oligonucleotide
gccacgaaguccagcugag

SEQ ID NO: 714012 - RNA, 19 nt, Artificial Sequence
  Description of Artificial Sequence: Synthetic oligonucleotide
uccgcuccccauggauaug

SEQ ID NO: 714013 - RNA, 19 nt, Artificial Sequence
  Description of Artificial Sequence: Synthetic oligonucleotide
ugccaguccgguggaguua

SEQ ID NO: 714014 - RNA, 19 nt, Artificial Sequence
  Description of Artificial Sequence: Synthetic oligonucleotide
ggauauguucacuguugau

SEQ ID NO: 714015 - RNA, 19 nt, Artificial Sequence
  Description of Artificial Sequence: Synthetic oligonucleotide
cuggguacucagcucggcu

SEQ ID NO: 714016 - RNA, 19 nt, Artificial Sequence
  Description of Artificial Sequence: Synthetic oligonucleotide
cgguauuggcugcacugcc

SEQ ID NO: 714017 - RNA, 19 nt, Artificial Sequence
  Description of Artificial Sequence: Synthetic oligonucleotide
ccgauccaggcugugugcc

SEQ ID NO: 714018 - RNA, 19 nt, Artificial Sequence
  Description of Artificial Sequence: Synthetic oligonucleotide
ggagugcguccgauucugg

SEQ ID NO: 714019 - RNA, 19 nt, Artificial Sequence
  Description of Artificial Sequence: Synthetic oligonucleotide
cacccucgggcacagucaa

SEQ ID NO: 714020 - RNA, 19 nt, Artificial Sequence
  Description of Artificial Sequence: Synthetic oligonucleotide
gucuacgcaugugcaccac

SEQ ID NO: 714021 - RNA, 19 nt, Artificial Sequence
  Description of Artificial Sequence: Synthetic oligonucleotide
gucgaggacacuggauaua

SEQ ID NO: 714022 - RNA, 19 nt, Artificial Sequence
  Description of Artificial Sequence: Synthetic oligonucleotide
ggguugggaguaaugggaa

SEQ ID NO: 714023 - RNA, 19 nt, Artificial Sequence
  Description of Artificial Sequence: Synthetic oligonucleotide
guacugggcuuugaagggu

SEQ ID NO: 714024 - RNA, 19 nt, Artificial Sequence
  Description of Artificial Sequence: Synthetic oligonucleotide
gggacccuaauggccggag

SEQ ID NO: 714025 - RNA, 19 nt, Artificial Sequence
  Description of Artificial Sequence: Synthetic oligonucleotide
ccuugcucgugggaaggag

SEQ ID NO: 714026 - RNA, 19 nt, Artificial Sequence
  Description of Artificial Sequence: Synthetic oligonucleotide
cgaaggugcgucuuaaggu

SEQ ID NO: 714027 - RNA, 19 nt, Artificial Sequence
  Description of Artificial Sequence: Synthetic oligonucleotide
cgaggacacuggauauagg

SEQ ID NO: 714028 - RNA, 19 nt, Artificial Sequence
  Description of Artificial Sequence: Synthetic oligonucleotide
ccccaguaagacacucaug

SEQ ID NO: 714029 - RNA, 19 nt, Artificial Sequence
  Description of Artificial Sequence: Synthetic oligonucleotide
gauccguguagcgcuuggu

SEQ ID NO: 714030 - RNA, 19 nt, Artificial Sequence
  Description of Artificial Sequence: Synthetic oligonucleotide
gaugggcccuccuucccuu

SEQ ID NO: 714031 - RNA, 19 nt, Artificial Sequence
  Description of Artificial Sequence: Synthetic oligonucleotide
gacccuugacagggcucug

SEQ ID NO: 714032 - RNA, 19 nt, Artificial Sequence
  Description of Artificial Sequence: Synthetic oligonucleotide
gguugcgggccuggggacc

SEQ ID NO: 714033 - RNA, 19 nt, Artificial Sequence
  Description of Artificial Sequence: Synthetic oligonucleotide
gguauuggcugcacugccu

SEQ ID NO: 714034 - RNA, 19 nt, Artificial Sequence
  Description of Artificial Sequence: Synthetic oligonucleotide
guacuagaguugaggaauu

SEQ ID NO: 714035 - RNA, 19 nt, Artificial Sequence
  Description of Artificial Sequence: Synthetic oligonucleotide
gacuuccgacaaccuucaa

SEQ ID NO: 714036 - RNA, 19 nt, Artificial Sequence
  Description of Artificial Sequence: Synthetic oligonucleotide
ccauagcaagaaggcaaug

SEQ ID NO: 714037 - RNA, 19 nt, Artificial Sequence
  Description of Artificial Sequence: Synthetic oligonucleotide
ggcguauccuggguacuca

SEQ ID NO: 714038 - RNA, 19 nt, Artificial Sequence
  Description of Artificial Sequence: Synthetic oligonucleotide
ccacugcaaaagucucaug

SEQ ID NO: 714039 - RNA, 19 nt, Artificial Sequence
  Description of Artificial Sequence: Synthetic oligonucleotide
gugcaaagccagauccgcu

SEQ ID NO: 714040 - RNA, 19 nt, Artificial Sequence
  Description of Artificial Sequence: Synthetic oligonucleotide
cgggcuugugacuggccag

SEQ ID NO: 714041 - RNA, 19 nt, Artificial Sequence
  Description of Artificial Sequence: Synthetic oligonucleotide
cuggugcuuggcgcgguca

SEQ ID NO: 714042 - RNA, 19 nt, Artificial Sequence
  Description of Artificial Sequence: Synthetic oligonucleotide
ccccuugcucgugggaagg

SEQ ID NO: 714043 - RNA, 19 nt, Artificial Sequence
  Description of Artificial Sequence: Synthetic oligonucleotide
ccgaggguagggaccugac

SEQ ID NO: 714044 - RNA, 19 nt, Artificial Sequence
  Description of Artificial Sequence: Synthetic oligonucleotide
ccuggguacucagcucggc

SEQ ID NO: 714045 - RNA, 19 nt, Artificial Sequence
  Description of Artificial Sequence: Synthetic oligonucleotide
gcugcgacugaacguaauu

SEQ ID NO: 714046 - RNA, 19 nt, Artificial Sequence
  Description of Artificial Sequence: Synthetic oligonucleotide
ccccuaccuugagaggucc

SEQ ID NO: 714047 - RNA, 19 nt, Artificial Sequence
  Description of Artificial Sequence: Synthetic oligonucleotide
ccgggacccuaauggccgg

SEQ ID NO: 714048 - RNA, 19 nt, Artificial Sequence
  Description of Artificial Sequence: Synthetic oligonucleotide
cguccgauucuggugcuug

SEQ ID NO: 714049 - RNA, 19 nt, Artificial Sequence
  Description of Artificial Sequence: Synthetic oligonucleotide
ggccggaaaggagccgggc

SEQ ID NO: 714050 - RNA, 19 nt, Artificial Sequence
  Description of Artificial Sequence: Synthetic oligonucleotide
ccggcagagaccccaguaa

SEQ ID NO: 714051 - RNA, 19 nt, Artificial Sequence
  Description of Artificial Sequence: Synthetic oligonucleotide
gccggaaaggagccgggcu

SEQ ID NO: 714052 - RNA, 19 nt, Artificial Sequence
  Description of Artificial Sequence: Synthetic oligonucleotide
aggcacccuuguucugguu

SEQ ID NO: 714053 - RNA, 19 nt, Artificial Sequence
  Description of Artificial Sequence: Synthetic oligonucleotide
gcugucgguauuggcugca

SEQ ID NO: 714054 - RNA, 19 nt, Artificial Sequence
  Description of Artificial Sequence: Synthetic oligonucleotide
ugcgggccuggggaccccu

SEQ ID NO: 714055 - RNA, 19 nt, Artificial Sequence
  Description of Artificial Sequence: Synthetic oligonucleotide
cccuaauggccggagcuga

SEQ ID NO: 714056 - RNA, 19 nt, Artificial Sequence
  Description of Artificial Sequence: Synthetic oligonucleotide
gcuccggggcucugcugug

SEQ ID NO: 714057 - RNA, 19 nt, Artificial Sequence
  Description of Artificial Sequence: Synthetic oligonucleotide
caccucauguggccaucua

SEQ ID NO: 714058 - RNA, 19 nt, Artificial Sequence
  Description of Artificial Sequence: Synthetic oligonucleotide
gagaccccgggacccuaau

SEQ ID NO: 714059 - RNA, 19 nt, Artificial Sequence
  Description of Artificial Sequence: Synthetic oligonucleotide
cacagucaaucugcucucu

SEQ ID NO: 714060 - RNA, 19 nt, Artificial Sequence
  Description of Artificial Sequence: Synthetic oligonucleotide
cauggcgaaggggccggaa

SEQ ID NO: 714061 - RNA, 19 nt, Artificial Sequence
  Description of Artificial Sequence: Synthetic oligonucleotide
gccgaggguagggaccuga

SEQ ID NO: 714062 - RNA, 19 nt, Artificial Sequence
  Description of Artificial Sequence: Synthetic oligonucleotide
ccuuauccuuuuagguacu

SEQ ID NO: 714063 - RNA, 19 nt, Artificial Sequence
  Description of Artificial Sequence: Synthetic oligonucleotide
gcugauccagccugagguu

SEQ ID NO: 714064 - RNA, 19 nt, Artificial Sequence
  Description of Artificial Sequence: Synthetic oligonucleotide
gcaccgucuugacauguuu

SEQ ID NO: 714065 - RNA, 19 nt, Artificial Sequence
  Description of Artificial Sequence: Synthetic oligonucleotide
gauccgguugggacuccuu

SEQ ID NO: 714066 - RNA, 19 nt, Artificial Sequence
  Description of Artificial Sequence: Synthetic oligonucleotide
gcggugaaguguggaaagu

SEQ ID NO: 714067 - RNA, 19 nt, Artificial Sequence
  Description of Artificial Sequence: Synthetic oligonucleotide
cccuaccuugagaggucca

SEQ ID NO: 714068 - RNA, 19 nt, Artificial Sequence
  Description of Artificial Sequence: Synthetic oligonucleotide
gggugccaguccgguggag

SEQ ID NO: 714069 - RNA, 19 nt, Artificial Sequence
  Description of Artificial Sequence: Synthetic oligonucleotide
ggaaaggagccgggcuugu

SEQ ID NO: 714070 - RNA, 19 nt, Artificial Sequence
  Description of Artificial Sequence: Synthetic oligonucleotide
ccuaccuugagagguccau

SEQ ID NO: 714071 - RNA, 19 nt, Artificial Sequence
  Description of Artificial Sequence: Synthetic oligonucleotide
ccggaaaggagccgggcuu

SEQ ID NO: 714072 - RNA, 19 nt, Artificial Sequence
  Description of Artificial Sequence: Synthetic oligonucleotide
gggcaccucauguggccau

SEQ ID NO: 714073 - RNA, 19 nt, Artificial Sequence
  Description of Artificial Sequence: Synthetic oligonucleotide
gcaccucauguggccaucu

SEQ ID NO: 714074 - RNA, 19 nt, Artificial Sequence
  Description of Artificial Sequence: Synthetic oligonucleotide
ccuaauggccggagcugau

SEQ ID NO: 714075 - RNA, 19 nt, Artificial Sequence
  Description of Artificial Sequence: Synthetic oligonucleotide
caccguggaaagggacggu

SEQ ID NO: 714076 - RNA, 19 nt, Artificial Sequence
  Description of Artificial Sequence: Synthetic oligonucleotide
gcgcggucacuggcauugc

SEQ ID NO: 714077 - RNA, 19 nt, Artificial Sequence
  Description of Artificial Sequence: Synthetic oligonucleotide
cccuugcucgugggaagga

SEQ ID NO: 714078 - RNA, 19 nt, Artificial Sequence
  Description of Artificial Sequence: Synthetic oligonucleotide
ccgcuccccauggauaugu

SEQ ID NO: 714079 - RNA, 19 nt, Artificial Sequence
  Description of Artificial Sequence: Synthetic oligonucleotide
cggcccuugcccucccaca

SEQ ID NO: 714080 - RNA, 19 nt, Artificial Sequence
  Description of Artificial Sequence: Synthetic oligonucleotide
ccaguccgguggaguuaga

SEQ ID NO: 714081 - RNA, 19 nt, Artificial Sequence
  Description of Artificial Sequence: Synthetic oligonucleotide
ccauucccgggcaccucau

SEQ ID NO: 714082 - RNA, 19 nt, Artificial Sequence
  Description of Artificial Sequence: Synthetic oligonucleotide
gguccccucgaugccucuu

SEQ ID NO: 714083 - RNA, 19 nt, Artificial Sequence
  Description of Artificial Sequence: Synthetic oligonucleotide
cccuugcguugccagucau

SEQ ID NO: 714084 - RNA, 19 nt, Artificial Sequence
  Description of Artificial Sequence: Synthetic oligonucleotide
gcguccgauucuggugcuu

SEQ ID NO: 714085 - RNA, 19 nt, Artificial Sequence
  Description of Artificial Sequence: Synthetic oligonucleotide
uccacgauugauuagagcc

SEQ ID NO: 714086 - RNA, 19 nt, Artificial Sequence
  Description of Artificial Sequence: Synthetic oligonucleotide
aauagaauuggaaaacuuc

SEQ ID NO: 714087 - RNA, 19 nt, Artificial Sequence
  Description of Artificial Sequence: Synthetic oligonucleotide
accguaauggaacagguac

SEQ ID NO: 714088 - RNA, 19 nt, Artificial Sequence
  Description of Artificial Sequence: Synthetic oligonucleotide
uaucaacucagacaguggg

SEQ ID NO: 714089 - RNA, 19 nt, Artificial Sequence
  Description of Artificial Sequence: Synthetic oligonucleotide
aauuugaccaguucagucu

SEQ ID NO: 714090 - RNA, 19 nt, Artificial Sequence
  Description of Artificial Sequence: Synthetic oligonucleotide
auagugcccagccagauac

SEQ ID NO: 714091 - RNA, 19 nt, Artificial Sequence
  Description of Artificial Sequence: Synthetic oligonucleotide
aauagcacuaagcagcagu

SEQ ID NO: 714092 - RNA, 19 nt, Artificial Sequence
  Description of Artificial Sequence: Synthetic oligonucleotide
cauguugugagugugaggg

SEQ ID NO: 714093 - RNA, 19 nt, Artificial Sequence
  Description of Artificial Sequence: Synthetic oligonucleotide
aacguuuugaucccuggag

SEQ ID NO: 714094 - RNA, 19 nt, Artificial Sequence
  Description of Artificial Sequence: Synthetic oligonucleotide
aaugguguuggugacuccc

SEQ ID NO: 714095 - RNA, 19 nt, Artificial Sequence
  Description of Artificial Sequence: Synthetic oligonucleotide
acagguaacaugcuugagg

SEQ ID NO: 714096 - RNA, 19 nt, Artificial Sequence
  Description of Artificial Sequence: Synthetic oligonucleotide
acuucaacggacccggacc

SEQ ID NO: 714097 - RNA, 19 nt, Artificial Sequence
  Description of Artificial Sequence: Synthetic oligonucleotide
ucauauguaugcacagugg

SEQ ID NO: 714098 - RNA, 19 nt, Artificial Sequence
  Description of Artificial Sequence: Synthetic oligonucleotide
cauauguaugcacaguggg

SEQ ID NO: 714099 - RNA, 19 nt, Artificial Sequence
  Description of Artificial Sequence: Synthetic oligonucleotide
aaagcggguaaacccuucc

SEQ ID NO: 714100 - RNA, 19 nt, Artificial Sequence
  Description of Artificial Sequence: Synthetic oligonucleotide
agaauuggaaaacuucuug

SEQ ID NO: 714101 - RNA, 19 nt, Artificial Sequence
  Description of Artificial Sequence: Synthetic oligonucleotide
acauuaaucugcaaacccc

SEQ ID NO: 714102 - RNA, 19 nt, Artificial Sequence
  Description of Artificial Sequence: Synthetic oligonucleotide
ucuaucaacucagacagug

SEQ ID NO: 714103 - RNA, 19 nt, Artificial Sequence
  Description of Artificial Sequence: Synthetic oligonucleotide
gguacaguagaccagguag

SEQ ID NO: 714104 - RNA, 19 nt, Artificial Sequence
  Description of Artificial Sequence: Synthetic oligonucleotide
uccacauuaaucugcaaac

SEQ ID NO: 714105 - RNA, 19 nt, Artificial Sequence
  Description of Artificial Sequence: Synthetic oligonucleotide
uguucgucuucacagcagg

SEQ ID NO: 714106 - RNA, 19 nt, Artificial Sequence
  Description of Artificial Sequence: Synthetic oligonucleotide
cagauuaacuccacgauug

SEQ ID NO: 714107 - RNA, 19 nt, Artificial Sequence
  Description of Artificial Sequence: Synthetic oligonucleotide
ugagugugaggguagaagc

SEQ ID NO: 714108 - RNA, 19 nt, Artificial Sequence
  Description of Artificial Sequence: Synthetic oligonucleotide
cagguaacaugcuugaggc

SEQ ID NO: 714109 - RNA, 19 nt, Artificial Sequence
  Description of Artificial Sequence: Synthetic oligonucleotide
ucuccguaagaauaguaag

SEQ ID NO: 714110 - RNA, 19 nt, Artificial Sequence
  Description of Artificial Sequence: Synthetic oligonucleotide
gacuuauuuuggcuuaggg

SEQ ID NO: 714111 - RNA, 19 nt, Artificial Sequence
  Description of Artificial Sequence: Synthetic oligonucleotide
acuuauuuuggcuuaggga

SEQ ID NO: 714112 - RNA, 19 nt, Artificial Sequence
  Description of Artificial Sequence: Synthetic oligonucleotide
cucgaaagcggguaaaccc

SEQ ID NO: 714113 - RNA, 19 nt, Artificial Sequence
  Description of Artificial Sequence: Synthetic oligonucleotide
agucaauagcacuaagcag

SEQ ID NO: 714114 - RNA, 19 nt, Artificial Sequence
  Description of Artificial Sequence: Synthetic oligonucleotide
agcauagucuaccacccac

SEQ ID NO: 714115 - RNA, 19 nt, Artificial Sequence
  Description of Artificial Sequence: Synthetic oligonucleotide
cugaagccgauucagauac

SEQ ID NO: 714116 - RNA, 19 nt, Artificial Sequence
  Description of Artificial Sequence: Synthetic oligonucleotide
ggugaaagcgccuuucucg

SEQ ID NO: 714117 - RNA, 19 nt, Artificial Sequence
  Description of Artificial Sequence: Synthetic oligonucleotide
uagucuaccacccacucau

SEQ ID NO: 714118 - RNA, 19 nt, Artificial Sequence
  Description of Artificial Sequence: Synthetic oligonucleotide
aaacgaugcagguugccca

SEQ ID NO: 714119 - RNA, 19 nt, Artificial Sequence
  Description of Artificial Sequence: Synthetic oligonucleotide
aagccguccauguugugag

SEQ ID NO: 714120 - RNA, 19 nt, Artificial Sequence
  Description of Artificial Sequence: Synthetic oligonucleotide
aacgaugcagguugcccac

SEQ ID NO: 714121 - RNA, 19 nt, Artificial Sequence
  Description of Artificial Sequence: Synthetic oligonucleotide
uccguaagaauaguaagug

SEQ ID NO: 714122 - RNA, 19 nt, Artificial Sequence
  Description of Artificial Sequence: Synthetic oligonucleotide
ucugcgacggguuuucaag

SEQ ID NO: 714123 - RNA, 19 nt, Artificial Sequence
  Description of Artificial Sequence: Synthetic oligonucleotide
uuaacuccacgauugauua

SEQ ID NO: 714124 - RNA, 19 nt, Artificial Sequence
  Description of Artificial Sequence: Synthetic oligonucleotide
uggggaauagaauuggaaa

SEQ ID NO: 714125 - RNA, 19 nt, Artificial Sequence
  Description of Artificial Sequence: Synthetic oligonucleotide
ucgggaguagcuccaauag

SEQ ID NO: 714126 - RNA, 19 nt, Artificial Sequence
  Description of Artificial Sequence: Synthetic oligonucleotide
cuggcguccaucauagugg

SEQ ID NO: 714127 - RNA, 19 nt, Artificial Sequence
  Description of Artificial Sequence: Synthetic oligonucleotide
gaauuugaccaguucaguc

SEQ ID NO: 714128 - RNA, 19 nt, Artificial Sequence
  Description of Artificial Sequence: Synthetic oligonucleotide
caagaauuugaccaguuca

SEQ ID NO: 714129 - RNA, 19 nt, Artificial Sequence
  Description of Artificial Sequence: Synthetic oligonucleotide
aucgagaccgcccuucuuc

SEQ ID NO: 714130 - RNA, 19 nt, Artificial Sequence
  Description of Artificial Sequence: Synthetic oligonucleotide
uauauccuggauccgcuug

SEQ ID NO: 714131 - RNA, 19 nt, Artificial Sequence
  Description of Artificial Sequence: Synthetic oligonucleotide
ucuaagauccguucaugcu

SEQ ID NO: 714132 - RNA, 19 nt, Artificial Sequence
  Description of Artificial Sequence: Synthetic oligonucleotide
acuggcguccaucauagug

SEQ ID NO: 714133 - RNA, 19 nt, Artificial Sequence
  Description of Artificial Sequence: Synthetic oligonucleotide
cuaagauccguucaugcuc

SEQ ID NO: 714134 - RNA, 19 nt, Artificial Sequence
  Description of Artificial Sequence: Synthetic oligonucleotide
uaagaauaguaaguggcca

SEQ ID NO: 714135 - RNA, 19 nt, Artificial Sequence
  Description of Artificial Sequence: Synthetic oligonucleotide
agccgauucagauacucag

SEQ ID NO: 714136 - RNA, 19 nt, Artificial Sequence
  Description of Artificial Sequence: Synthetic oligonucleotide
uuuuaggggugaaaauaug

SEQ ID NO: 714137 - RNA, 19 nt, Artificial Sequence
  Description of Artificial Sequence: Synthetic oligonucleotide
aaagcgccuuucucgaaag

SEQ ID NO: 714138 - RNA, 19 nt, Artificial Sequence
  Description of Artificial Sequence: Synthetic oligonucleotide
uuauuuuggcuuagggacu

SEQ ID NO: 714139 - RNA, 19 nt, Artificial Sequence
  Description of Artificial Sequence: Synthetic oligonucleotide
aacuccacgauugauuaga

SEQ ID NO: 714140 - RNA, 19 nt, Artificial Sequence
  Description of Artificial Sequence: Synthetic oligonucleotide
ugauuagagccugagcaag

SEQ ID NO: 714141 - RNA, 19 nt, Artificial Sequence
  Description of Artificial Sequence: Synthetic oligonucleotide
gauugauuagagccugagc

SEQ ID NO: 714142 - RNA, 19 nt, Artificial Sequence
  Description of Artificial Sequence: Synthetic oligonucleotide
ugauccuucagcucaggcu

SEQ ID NO: 714143 - RNA, 19 nt, Artificial Sequence
  Description of Artificial Sequence: Synthetic oligonucleotide
guaagaauaguaaguggcc

SEQ ID NO: 714144 - RNA, 19 nt, Artificial Sequence
  Description of Artificial Sequence: Synthetic oligonucleotide
acgacucgaauucucauca

SEQ ID NO: 714145 - RNA, 19 nt, Artificial Sequence
  Description of Artificial Sequence: Synthetic oligonucleotide
ucgaauucucaucaccaac

SEQ ID NO: 714146 - RNA, 19 nt, Artificial Sequence
  Description of Artificial Sequence: Synthetic oligonucleotide
gaagucuccguaagaauag

SEQ ID NO: 714147 - RNA, 19 nt, Artificial Sequence
  Description of Artificial Sequence: Synthetic oligonucleotide
ucgaaagcggguaaacccu

SEQ ID NO: 714148 - RNA, 19 nt, Artificial Sequence
  Description of Artificial Sequence: Synthetic oligonucleotide
gacucgaauucucaucacc

SEQ ID NO: 714149 - RNA, 19 nt, Artificial Sequence
  Description of Artificial Sequence: Synthetic oligonucleotide
gauccagauuaacuccacg

SEQ ID NO: 714150 - RNA, 19 nt, Artificial Sequence
  Description of Artificial Sequence: Synthetic oligonucleotide
cuuagggacuucaacggac

SEQ ID NO: 714151 - RNA, 19 nt, Artificial Sequence
  Description of Artificial Sequence: Synthetic oligonucleotide
ucuuucaaugggcaacaac

SEQ ID NO: 714152 - RNA, 19 nt, Artificial Sequence
  Description of Artificial Sequence: Synthetic oligonucleotide
uccaccguaauggaacagg

SEQ ID NO: 714153 - RNA, 19 nt, Artificial Sequence
  Description of Artificial Sequence: Synthetic oligonucleotide
aucguccacauuaaucugc

SEQ ID NO: 714154 - RNA, 19 nt, Artificial Sequence
  Description of Artificial Sequence: Synthetic oligonucleotide
uucagauacucagaucgag

SEQ ID NO: 714155 - RNA, 19 nt, Artificial Sequence
  Description of Artificial Sequence: Synthetic oligonucleotide
cucaucguccacauuaauc

SEQ ID NO: 714156 - RNA, 19 nt, Artificial Sequence
  Description of Artificial Sequence: Synthetic oligonucleotide
aggagcgcaacacaugucu

SEQ ID NO: 714157 - RNA, 19 nt, Artificial Sequence
  Description of Artificial Sequence: Synthetic oligonucleotide
cuaucaacucagacagugg

SEQ ID NO: 714158 - RNA, 19 nt, Artificial Sequence
  Description of Artificial Sequence: Synthetic oligonucleotide
aguggggagaccaucauug

SEQ ID NO: 714159 - RNA, 19 nt, Artificial Sequence
  Description of Artificial Sequence: Synthetic oligonucleotide
uccagauuaacuccacgau

SEQ ID NO: 714160 - RNA, 19 nt, Artificial Sequence
  Description of Artificial Sequence: Synthetic oligonucleotide
cucguugcaggucuggagc

SEQ ID NO: 714161 - RNA, 19 nt, Artificial Sequence
  Description of Artificial Sequence: Synthetic oligonucleotide
uuccugaccaaaguccagg

SEQ ID NO: 714162 - RNA, 19 nt, Artificial Sequence
  Description of Artificial Sequence: Synthetic oligonucleotide
uugauuagagccugagcaa

SEQ ID NO: 714163 - RNA, 19 nt, Artificial Sequence
  Description of Artificial Sequence: Synthetic oligonucleotide
uggauucugcaccuagccc

SEQ ID NO: 714164 - RNA, 19 nt, Artificial Sequence
  Description of Artificial Sequence: Synthetic oligonucleotide
gauuagagccugagcaagg

SEQ ID NO: 714165 - RNA, 19 nt, Artificial Sequence
  Description of Artificial Sequence: Synthetic oligonucleotide
gaacuggcguccaucauag

SEQ ID NO: 714166 - RNA, 19 nt, Artificial Sequence
  Description of Artificial Sequence: Synthetic oligonucleotide
uccgcuugugaacucguug

SEQ ID NO: 714167 - RNA, 19 nt, Artificial Sequence
  Description of Artificial Sequence: Synthetic oligonucleotide
gaacucuaucaacucagac

SEQ ID NO: 714168 - RNA, 19 nt, Artificial Sequence
  Description of Artificial Sequence: Synthetic oligonucleotide
ugccacauuuccugugugg

SEQ ID NO: 714169 - RNA, 19 nt, Artificial Sequence
  Description of Artificial Sequence: Synthetic oligonucleotide
agcauuggcgucauuggcg

SEQ ID NO: 714170 - RNA, 19 nt, Artificial Sequence
  Description of Artificial Sequence: Synthetic oligonucleotide
acucuugaggcgcucagca

SEQ ID NO: 714171 - RNA, 19 nt, Artificial Sequence
  Description of Artificial Sequence: Synthetic oligonucleotide
augcagguugcccacaaca

SEQ ID NO: 714172 - RNA, 19 nt, Artificial Sequence
  Description of Artificial Sequence: Synthetic oligonucleotide
uugcuaacucuccaggcaa

SEQ ID NO: 714173 - RNA, 19 nt, Artificial Sequence
  Description of Artificial Sequence: Synthetic oligonucleotide
gcaaggagcauccagcagc

SEQ ID NO: 714174 - RNA, 19 nt, Artificial Sequence
  Description of Artificial Sequence: Synthetic oligonucleotide
guggauucugcaccuagcc

SEQ ID NO: 714175 - RNA, 19 nt, Artificial Sequence
  Description of Artificial Sequence: Synthetic oligonucleotide
ggcuuagggacuucaacgg

SEQ ID NO: 714176 - RNA, 19 nt, Artificial Sequence
  Description of Artificial Sequence: Synthetic oligonucleotide
auuggcgaggaucacuccu

SEQ ID NO: 714177 - RNA, 19 nt, Artificial Sequence
  Description of Artificial Sequence: Synthetic oligonucleotide
uuguucgucuucacagcag

SEQ ID NO: 714178 - RNA, 19 nt, Artificial Sequence
  Description of Artificial Sequence: Synthetic oligonucleotide
ugauaaugguguuggugac

SEQ ID NO: 714179 - RNA, 19 nt, Artificial Sequence
  Description of Artificial Sequence: Synthetic oligonucleotide
aacagguacaguagaccag

SEQ ID NO: 714180 - RNA, 19 nt, Artificial Sequence
  Description of Artificial Sequence: Synthetic oligonucleotide
gagaccgcccuucuucccg

SEQ ID NO: 714181 - RNA, 19 nt, Artificial Sequence
  Description of Artificial Sequence: Synthetic oligonucleotide
uuggagacgccauucaguu

SEQ ID NO: 714182 - RNA, 19 nt, Artificial Sequence
  Description of Artificial Sequence: Synthetic oligonucleotide
ugggacagaaggugcagug

SEQ ID NO: 714183 - RNA, 19 nt, Artificial Sequence
  Description of Artificial Sequence: Synthetic oligonucleotide
ucggaaaccgggcccacgc

SEQ ID NO: 714184 - RNA, 19 nt, Artificial Sequence
  Description of Artificial Sequence: Synthetic oligonucleotide
aguggauucugcaccuagc

SEQ ID NO: 714185 - RNA, 19 nt, Artificial Sequence
  Description of Artificial Sequence: Synthetic oligonucleotide
ggagacgccauucaguuuc

SEQ ID NO: 714186 - RNA, 19 nt, Artificial Sequence
  Description of Artificial Sequence: Synthetic oligonucleotide
accacaaguccagacuugg

SEQ ID NO: 714187 - RNA, 19 nt, Artificial Sequence
  Description of Artificial Sequence: Synthetic oligonucleotide
ugggaagaucuccaugagu

SEQ ID NO: 714188 - RNA, 19 nt, Artificial Sequence
  Description of Artificial Sequence: Synthetic oligonucleotide
acucagaucgagaccgccc

SEQ ID NO: 714189 - RNA, 19 nt, Artificial Sequence
  Description of Artificial Sequence: Synthetic oligonucleotide
ucucgaaagcggguaaacc

SEQ ID NO: 714190 - RNA, 19 nt, Artificial Sequence
  Description of Artificial Sequence: Synthetic oligonucleotide
gaagcauauagugcccagc

SEQ ID NO: 714191 - RNA, 19 nt, Artificial Sequence
  Description of Artificial Sequence: Synthetic oligonucleotide
caaacgaugcagguugccc

SEQ ID NO: 714192 - RNA, 19 nt, Artificial Sequence
  Description of Artificial Sequence: Synthetic oligonucleotide
uuugccacgccaucuuccu

SEQ ID NO: 714193 - RNA, 19 nt, Artificial Sequence
  Description of Artificial Sequence: Synthetic oligonucleotide
auguaugcacaguggggag

SEQ ID NO: 714194 - RNA, 19 nt, Artificial Sequence
  Description of Artificial Sequence: Synthetic oligonucleotide
acucguugcaggucuggag

SEQ ID NO: 714195 - RNA, 19 nt, Artificial Sequence
  Description of Artificial Sequence: Synthetic oligonucleotide
cuauguagcuggucuuccc

SEQ ID NO: 714196 - RNA, 19 nt, Artificial Sequence
  Description of Artificial Sequence: Synthetic oligonucleotide
acucgaauucucaucacca

SEQ ID NO: 714197 - RNA, 19 nt, Artificial Sequence
  Description of Artificial Sequence: Synthetic oligonucleotide
uuaccccgagccuggacag

SEQ ID NO: 714198 - RNA, 19 nt, Artificial Sequence
  Description of Artificial Sequence: Synthetic oligonucleotide
auauccuggauccgcuugu

SEQ ID NO: 714199 - RNA, 19 nt, Artificial Sequence
  Description of Artificial Sequence: Synthetic oligonucleotide
aagcggguaaacccuuccu

SEQ ID NO: 714200 - RNA, 19 nt, Artificial Sequence
  Description of Artificial Sequence: Synthetic oligonucleotide
aguagcuccaauaggcacu

SEQ ID NO: 714201 - RNA, 19 nt, Artificial Sequence
  Description of Artificial Sequence: Synthetic oligonucleotide
uaacucuccaggcaacguu

SEQ ID NO: 714202 - RNA, 19 nt, Artificial Sequence
  Description of Artificial Sequence: Synthetic oligonucleotide
ugacucccaaacgaugcag

SEQ ID NO: 714203 - RNA, 19 nt, Artificial Sequence
  Description of Artificial Sequence: Synthetic oligonucleotide
cugcgacggguuuucaagg

SEQ ID NO: 714204 - RNA, 19 nt, Artificial Sequence
  Description of Artificial Sequence: Synthetic oligonucleotide
uaacuccacgauugauuag

SEQ ID NO: 714205 - RNA, 19 nt, Artificial Sequence
  Description of Artificial Sequence: Synthetic oligonucleotide
aauaggcacugaagaauca

SEQ ID NO: 714206 - RNA, 19 nt, Artificial Sequence
  Description of Artificial Sequence: Synthetic oligonucleotide
auagucuaccacccacuca

SEQ ID NO: 714207 - RNA, 19 nt, Artificial Sequence
  Description of Artificial Sequence: Synthetic oligonucleotide
uuuggcuuagggacuucaa

SEQ ID NO: 714208 - RNA, 19 nt, Artificial Sequence
  Description of Artificial Sequence: Synthetic oligonucleotide
uuuuggcuuagggacuuca

SEQ ID NO: 714209 - RNA, 19 nt, Artificial Sequence
  Description of Artificial Sequence: Synthetic oligonucleotide
gaagccgauucagauacuc

SEQ ID NO: 714210 - RNA, 19 nt, Artificial Sequence
  Description of Artificial Sequence: Synthetic oligonucleotide
ggggaauagaauuggaaaa

SEQ ID NO: 714211 - RNA, 19 nt, Artificial Sequence
  Description of Artificial Sequence: Synthetic oligonucleotide
gacuucaacggacccggac

SEQ ID NO: 714212 - RNA, 19 nt, Artificial Sequence
  Description of Artificial Sequence: Synthetic oligonucleotide
gaaagcgccuuucucgaaa

SEQ ID NO: 714213 - RNA, 19 nt, Artificial Sequence
  Description of Artificial Sequence: Synthetic oligonucleotide
ucaacggacccggaccucc

SEQ ID NO: 714214 - RNA, 19 nt, Artificial Sequence
  Description of Artificial Sequence: Synthetic oligonucleotide
gggaauagaauuggaaaac

SEQ ID NO: 714215 - RNA, 19 nt, Artificial Sequence
  Description of Artificial Sequence: Synthetic oligonucleotide
cuuaccccgagccuggaca

SEQ ID NO: 714216 - RNA, 19 nt, Artificial Sequence
  Description of Artificial Sequence: Synthetic oligonucleotide
aagcauagucuaccaccca

SEQ ID NO: 714217 - RNA, 19 nt, Artificial Sequence
  Description of Artificial Sequence: Synthetic oligonucleotide
ucgagaccgcccuucuucc

SEQ ID NO: 714218 - RNA, 19 nt, Artificial Sequence
  Description of Artificial Sequence: Synthetic oligonucleotide
ggguggagcgcagagaggg

SEQ ID NO: 714219 - RNA, 19 nt, Artificial Sequence
  Description of Artificial Sequence: Synthetic oligonucleotide
cugggcgcuucuuaccccg

SEQ ID NO: 714220 - RNA, 19 nt, Artificial Sequence
  Description of Artificial Sequence: Synthetic oligonucleotide
cacgacucgaauucucauc

SEQ ID NO: 714221 - RNA, 19 nt, Artificial Sequence
  Description of Artificial Sequence: Synthetic oligonucleotide
agggacuucaacggacccg

SEQ ID NO: 714222 - RNA, 19 nt, Artificial Sequence
  Description of Artificial Sequence: Synthetic oligonucleotide
gugaaagcgccuuucucga

SEQ ID NO: 714223 - RNA, 19 nt, Artificial Sequence
  Description of Artificial Sequence: Synthetic oligonucleotide
cuuguucgucuucacagca

SEQ ID NO: 714224 - RNA, 19 nt, Artificial Sequence
  Description of Artificial Sequence: Synthetic oligonucleotide
aggaucacuccuguguucu

SEQ ID NO: 714225 - RNA, 19 nt, Artificial Sequence
  Description of Artificial Sequence: Synthetic oligonucleotide
aaguccagacuuggaccac

SEQ ID NO: 714226 - RNA, 19 nt, Artificial Sequence
  Description of Artificial Sequence: Synthetic oligonucleotide
agcgcaacacaugucuaag

SEQ ID NO: 714227 - RNA, 19 nt, Artificial Sequence
  Description of Artificial Sequence: Synthetic oligonucleotide
gggacuucaacggacccgg

SEQ ID NO: 714228 - RNA, 19 nt, Artificial Sequence
  Description of Artificial Sequence: Synthetic oligonucleotide
guaacaugcuugaggcucc

SEQ ID NO: 714229 - RNA, 19 nt, Artificial Sequence
  Description of Artificial Sequence: Synthetic oligonucleotide
auuagagccugagcaaggu

SEQ ID NO: 714230 - RNA, 19 nt, Artificial Sequence
  Description of Artificial Sequence: Synthetic oligonucleotide
caucguccacauuaaucug

SEQ ID NO: 714231 - RNA, 19 nt, Artificial Sequence
  Description of Artificial Sequence: Synthetic oligonucleotide
cacgauugauuagagccug

SEQ ID NO: 714232 - RNA, 19 nt, Artificial Sequence
  Description of Artificial Sequence: Synthetic oligonucleotide
uauagugcccagccagaua

SEQ ID NO: 714233 - RNA, 19 nt, Artificial Sequence
  Description of Artificial Sequence: Synthetic oligonucleotide
caguggauucugcaccuag

SEQ ID NO: 714234 - RNA, 19 nt, Artificial Sequence
  Description of Artificial Sequence: Synthetic oligonucleotide
ugcuaacucuccaggcaac

SEQ ID NO: 714235 - RNA, 19 nt, Artificial Sequence
  Description of Artificial Sequence: Synthetic oligonucleotide
cuguuuccgggccuuucgg

SEQ ID NO: 714236 - RNA, 19 nt, Artificial Sequence
  Description of Artificial Sequence: Synthetic oligonucleotide
ugcgacggguuuucaaggu

SEQ ID NO: 714237 - RNA, 19 nt, Artificial Sequence
  Description of Artificial Sequence: Synthetic oligonucleotide
cuccacgauugauuagagc

SEQ ID NO: 714238 - RNA, 19 nt, Artificial Sequence
  Description of Artificial Sequence: Synthetic oligonucleotide
cacccuucuguuuccgggc

SEQ ID NO: 714239 - RNA, 19 nt, Artificial Sequence
  Description of Artificial Sequence: Synthetic oligonucleotide
uucucgaaagcggguaaac

SEQ ID NO: 714240 - RNA, 19 nt, Artificial Sequence
  Description of Artificial Sequence: Synthetic oligonucleotide
gcaacguuuugaucccugg

SEQ ID NO: 714241 - RNA, 19 nt, Artificial Sequence
  Description of Artificial Sequence: Synthetic oligonucleotide
uauuuuggcuuagggacuu

SEQ ID NO: 714242 - RNA, 19 nt, Artificial Sequence
  Description of Artificial Sequence: Synthetic oligonucleotide
uugaccaguucagucucug

SEQ ID NO: 714243 - RNA, 19 nt, Artificial Sequence
  Description of Artificial Sequence: Synthetic oligonucleotide
cuuccugaccaaaguccag

SEQ ID NO: 714244 - RNA, 19 nt, Artificial Sequence
  Description of Artificial Sequence: Synthetic oligonucleotide
acuauauccuggauccgcu

SEQ ID NO: 714245 - RNA, 19 nt, Artificial Sequence
  Description of Artificial Sequence: Synthetic oligonucleotide
aagggugauuggccggggu

SEQ ID NO: 714246 - RNA, 19 nt, Artificial Sequence
  Description of Artificial Sequence: Synthetic oligonucleotide
cauauagugcccagccaga

SEQ ID NO: 714247 - RNA, 19 nt, Artificial Sequence
  Description of Artificial Sequence: Synthetic oligonucleotide
guuugccacgccaucuucc

SEQ ID NO: 714248 - RNA, 19 nt, Artificial Sequence
  Description of Artificial Sequence: Synthetic oligonucleotide
caucauccuuugagggacg

SEQ ID NO: 714249 - RNA, 19 nt, Artificial Sequence
  Description of Artificial Sequence: Synthetic oligonucleotide
caagggauccagauuaacu

SEQ ID NO: 714250 - RNA, 19 nt, Artificial Sequence
  Description of Artificial Sequence: Synthetic oligonucleotide
uggugcgaagggugauugg

SEQ ID NO: 714251 - RNA, 19 nt, Artificial Sequence
  Description of Artificial Sequence: Synthetic oligonucleotide
aacucuccaggcaacguuu

SEQ ID NO: 714252 - RNA, 19 nt, Artificial Sequence
  Description of Artificial Sequence: Synthetic oligonucleotide
aagucuccguaagaauagu

SEQ ID NO: 714253 - RNA, 19 nt, Artificial Sequence
  Description of Artificial Sequence: Synthetic oligonucleotide
guagcuccaauaggcacug

SEQ ID NO: 714254 - RNA, 19 nt, Artificial Sequence
  Description of Artificial Sequence: Synthetic oligonucleotide
cuggggaauagaauuggaa

SEQ ID NO: 714255 - RNA, 19 nt, Artificial Sequence
  Description of Artificial Sequence: Synthetic oligonucleotide
cauuagcuucuaagaacuc

SEQ ID NO: 714256 - RNA, 19 nt, Artificial Sequence
  Description of Artificial Sequence: Synthetic oligonucleotide
caugcuugaggcucccuga

SEQ ID NO: 714257 - RNA, 19 nt, Artificial Sequence
  Description of Artificial Sequence: Synthetic oligonucleotide
aagccgauucagauacuca

SEQ ID NO: 714258 - RNA, 19 nt, Artificial Sequence
  Description of Artificial Sequence: Synthetic oligonucleotide
ggugcgaagggugauuggc

SEQ ID NO: 714259 - RNA, 19 nt, Artificial Sequence
  Description of Artificial Sequence: Synthetic oligonucleotide
gucuccguaagaauaguaa

SEQ ID NO: 714260 - RNA, 19 nt, Artificial Sequence
  Description of Artificial Sequence: Synthetic oligonucleotide
cuccguaagaauaguaagu

SEQ ID NO: 714261 - RNA, 19 nt, Artificial Sequence
  Description of Artificial Sequence: Synthetic oligonucleotide
aggggugaaagcgccuuuc

SEQ ID NO: 714262 - RNA, 19 nt, Artificial Sequence
  Description of Artificial Sequence: Synthetic oligonucleotide
aacucguugcaggucugga

SEQ ID NO: 714263 - RNA, 19 nt, Artificial Sequence
  Description of Artificial Sequence: Synthetic oligonucleotide
uaaacccuuccugaccaaa

SEQ ID NO: 714264 - RNA, 19 nt, Artificial Sequence
  Description of Artificial Sequence: Synthetic oligonucleotide
gguguuggugcgaagggug

SEQ ID NO: 714265 - RNA, 19 nt, Artificial Sequence
  Description of Artificial Sequence: Synthetic oligonucleotide
uuucucgaaagcggguaaa

SEQ ID NO: 714266 - RNA, 19 nt, Artificial Sequence
  Description of Artificial Sequence: Synthetic oligonucleotide
auacucagaucgagaccgc

SEQ ID NO: 714267 - RNA, 19 nt, Artificial Sequence
  Description of Artificial Sequence: Synthetic oligonucleotide
gagcgcaacacaugucuaa

SEQ ID NO: 714268 - RNA, 19 nt, Artificial Sequence
  Description of Artificial Sequence: Synthetic oligonucleotide
aggacguccuucucauccu

SEQ ID NO: 714269 - RNA, 19 nt, Artificial Sequence
  Description of Artificial Sequence: Synthetic oligonucleotide
uccgagcacgacucgaauu

SEQ ID NO: 714270 - RNA, 19 nt, Artificial Sequence
  Description of Artificial Sequence: Synthetic oligonucleotide
uucggaaaccgggcccacg

SEQ ID NO: 714271 - RNA, 19 nt, Artificial Sequence
  Description of Artificial Sequence: Synthetic oligonucleotide
gcaacacaugucuaagauc

SEQ ID NO: 714272 - RNA, 19 nt, Artificial Sequence
  Description of Artificial Sequence: Synthetic oligonucleotide
ugcuuugccuuugccgccc

SEQ ID NO: 714273 - RNA, 19 nt, Artificial Sequence
  Description of Artificial Sequence: Synthetic oligonucleotide
ucuuaccccgagccuggac

SEQ ID NO: 714274 - RNA, 19 nt, Artificial Sequence
  Description of Artificial Sequence: Synthetic oligonucleotide
cauuggcgaggaucacucc

SEQ ID NO: 714275 - RNA, 19 nt, Artificial Sequence
  Description of Artificial Sequence: Synthetic oligonucleotide
uuucaagguguuggugcga

SEQ ID NO: 714276 - RNA, 19 nt, Artificial Sequence
  Description of Artificial Sequence: Synthetic oligonucleotide
auucagauacucagaucga

SEQ ID NO: 714277 - RNA, 19 nt, Artificial Sequence
  Description of Artificial Sequence: Synthetic oligonucleotide
uuggcgucauuggcgagga

SEQ ID NO: 714278 - RNA, 19 nt, Artificial Sequence
  Description of Artificial Sequence: Synthetic oligonucleotide
ugguuugccacgccaucuu

SEQ ID NO: 714279 - RNA, 19 nt, Artificial Sequence
  Description of Artificial Sequence: Synthetic oligonucleotide
caccacaaguccagacuug

SEQ ID NO: 714280 - RNA, 19 nt, Artificial Sequence
  Description of Artificial Sequence: Synthetic oligonucleotide
cugcaaggagcauccagca

SEQ ID NO: 714281 - RNA, 19 nt, Artificial Sequence
  Description of Artificial Sequence: Synthetic oligonucleotide
guuuccgggccuuucggaa

SEQ ID NO: 714282 - RNA, 19 nt, Artificial Sequence
  Description of Artificial Sequence: Synthetic oligonucleotide
cuuccaccguaauggaaca

SEQ ID NO: 714283 - RNA, 19 nt, Artificial Sequence
  Description of Artificial Sequence: Synthetic oligonucleotide
gaagcgucggguggagcgc

SEQ ID NO: 714284 - RNA, 19 nt, Artificial Sequence
  Description of Artificial Sequence: Synthetic oligonucleotide
gaaaccgggcccacgcuuc

SEQ ID NO: 714285 - RNA, 19 nt, Artificial Sequence
  Description of Artificial Sequence: Synthetic oligonucleotide
cucgaauucucaucaccaa

SEQ ID NO: 714286 - RNA, 19 nt, Artificial Sequence
  Description of Artificial Sequence: Synthetic oligonucleotide
ugaaagcgccuuucucgaa

SEQ ID NO: 714287 - RNA, 19 nt, Artificial Sequence
  Description of Artificial Sequence: Synthetic oligonucleotide
ggauccgcuugugaacucg

SEQ ID NO: 714288 - RNA, 19 nt, Artificial Sequence
  Description of Artificial Sequence: Synthetic oligonucleotide
auauagugcccagccagau

SEQ ID NO: 714289 - RNA, 19 nt, Artificial Sequence
  Description of Artificial Sequence: Synthetic oligonucleotide
aagauccguucaugcuccu

SEQ ID NO: 714290 - RNA, 19 nt, Artificial Sequence
  Description of Artificial Sequence: Synthetic oligonucleotide
ccuuguucgucuucacagc

SEQ ID NO: 714291 - RNA, 19 nt, Artificial Sequence
  Description of Artificial Sequence: Synthetic oligonucleotide
agguacaguagaccaggua

SEQ ID NO: 714292 - RNA, 19 nt, Artificial Sequence
  Description of Artificial Sequence: Synthetic oligonucleotide
gaccaucauugcagggccg

SEQ ID NO: 714293 - RNA, 19 nt, Artificial Sequence
  Description of Artificial Sequence: Synthetic oligonucleotide
uuccaccguaauggaacag

SEQ ID NO: 714294 - RNA, 19 nt, Artificial Sequence
  Description of Artificial Sequence: Synthetic oligonucleotide
gguuuucaagguguuggug

SEQ ID NO: 714295 - RNA, 19 nt, Artificial Sequence
  Description of Artificial Sequence: Synthetic oligonucleotide
uuccgagcacgacucgaau

SEQ ID NO: 714296 - RNA, 19 nt, Artificial Sequence
  Description of Artificial Sequence: Synthetic oligonucleotide
acuccacgauugauuagag

SEQ ID NO: 714297 - RNA, 19 nt, Artificial Sequence
  Description of Artificial Sequence: Synthetic oligonucleotide
gaagggugauuggccgggg

SEQ ID NO: 714298 - RNA, 19 nt, Artificial Sequence
  Description of Artificial Sequence: Synthetic oligonucleotide
ugaagccgauucagauacu

SEQ ID NO: 714299 - RNA, 19 nt, Artificial Sequence
  Description of Artificial Sequence: Synthetic oligonucleotide
caacguuuugaucccugga

SEQ ID NO: 714300 - RNA, 19 nt, Artificial Sequence
  Description of Artificial Sequence: Synthetic oligonucleotide
cguaauggaacagguacag

SEQ ID NO: 714301 - RNA, 19 nt, Artificial Sequence
  Description of Artificial Sequence: Synthetic oligonucleotide
gaggguagaagcgucgggu

SEQ ID NO: 714302 - RNA, 19 nt, Artificial Sequence
  Description of Artificial Sequence: Synthetic oligonucleotide
uggccgggguaccucauua

SEQ ID NO: 714303 - RNA, 19 nt, Artificial Sequence
  Description of Artificial Sequence: Synthetic oligonucleotide
ggagaugacuccugugcca

SEQ ID NO: 714304 - RNA, 19 nt, Artificial Sequence
  Description of Artificial Sequence: Synthetic oligonucleotide
gugacucccaaacgaugca

SEQ ID NO: 714305 - RNA, 19 nt, Artificial Sequence
  Description of Artificial Sequence: Synthetic oligonucleotide
gacguccuucucauccuug

SEQ ID NO: 714306 - RNA, 19 nt, Artificial Sequence
  Description of Artificial Sequence: Synthetic oligonucleotide
gcuccuuuugcuaacucuc

SEQ ID NO: 714307 - RNA, 19 nt, Artificial Sequence
  Description of Artificial Sequence: Synthetic oligonucleotide
ccuuucggaaaccgggccc

SEQ ID NO: 714308 - RNA, 19 nt, Artificial Sequence
  Description of Artificial Sequence: Synthetic oligonucleotide
ccgagcacgacucgaauuc

SEQ ID NO: 714309 - RNA, 19 nt, Artificial Sequence
  Description of Artificial Sequence: Synthetic oligonucleotide
cuuucucgaaagcggguaa

SEQ ID NO: 714310 - RNA, 19 nt, Artificial Sequence
  Description of Artificial Sequence: Synthetic oligonucleotide
cuuucggaaaccgggccca

SEQ ID NO: 714311 - RNA, 19 nt, Artificial Sequence
  Description of Artificial Sequence: Synthetic oligonucleotide
gcauuggcgucauuggcga

SEQ ID NO: 714312 - RNA, 19 nt, Artificial Sequence
  Description of Artificial Sequence: Synthetic oligonucleotide
gaaagcggguaaacccuuc

SEQ ID NO: 714313 - RNA, 19 nt, Artificial Sequence
  Description of Artificial Sequence: Synthetic oligonucleotide
cucauucucuuccaccgua

SEQ ID NO: 714314 - RNA, 19 nt, Artificial Sequence
  Description of Artificial Sequence: Synthetic oligonucleotide
gcgccuuucucgaaagcgg

SEQ ID NO: 714315 - RNA, 19 nt, Artificial Sequence
  Description of Artificial Sequence: Synthetic oligonucleotide
cucgggaguagcuccaaua

SEQ ID NO: 714316 - RNA, 19 nt, Artificial Sequence
  Description of Artificial Sequence: Synthetic oligonucleotide
cucaggcuccgaagggaug

SEQ ID NO: 714317 - RNA, 19 nt, Artificial Sequence
  Description of Artificial Sequence: Synthetic oligonucleotide
cugaagcauauagugccca

SEQ ID NO: 714318 - RNA, 19 nt, Artificial Sequence
  Description of Artificial Sequence: Synthetic oligonucleotide
gcggguaaacccuuccuga

SEQ ID NO: 714319 - RNA, 19 nt, Artificial Sequence
  Description of Artificial Sequence: Synthetic oligonucleotide
cagaucgagaccgcccuuc

SEQ ID NO: 714320 - RNA, 19 nt, Artificial Sequence
  Description of Artificial Sequence: Synthetic oligonucleotide
cauuggcgucauuggcgag

SEQ ID NO: 714321 - RNA, 19 nt, Artificial Sequence
  Description of Artificial Sequence: Synthetic oligonucleotide
acucagacagugggaagau

SEQ ID NO: 714322 - RNA, 19 nt, Artificial Sequence
  Description of Artificial Sequence: Synthetic oligonucleotide
gcuauguagcuggucuucc

SEQ ID NO: 714323 - RNA, 19 nt, Artificial Sequence
  Description of Artificial Sequence: Synthetic oligonucleotide
uguuggugcgaagggugau

SEQ ID NO: 714324 - RNA, 19 nt, Artificial Sequence
  Description of Artificial Sequence: Synthetic oligonucleotide
ccauguugugagugugagg

SEQ ID NO: 714325 - RNA, 19 nt, Artificial Sequence
  Description of Artificial Sequence: Synthetic oligonucleotide
gaauaguaaguggccagau

SEQ ID NO: 714326 - RNA, 19 nt, Artificial Sequence
  Description of Artificial Sequence: Synthetic oligonucleotide
ccaccuuggggaacuggcg

SEQ ID NO: 714327 - RNA, 19 nt, Artificial Sequence
  Description of Artificial Sequence: Synthetic oligonucleotide
agccgcacauuccucuuuu

SEQ ID NO: 714328 - RNA, 19 nt, Artificial Sequence
  Description of Artificial Sequence: Synthetic oligonucleotide
cuuccgagcacgacucgaa

SEQ ID NO: 714329 - RNA, 19 nt, Artificial Sequence
  Description of Artificial Sequence: Synthetic oligonucleotide
ccucauuagcuucuaagaa

SEQ ID NO: 714330 - RNA, 19 nt, Artificial Sequence
  Description of Artificial Sequence: Synthetic oligonucleotide
ccucuuccgagcacgacuc

SEQ ID NO: 714331 - RNA, 19 nt, Artificial Sequence
  Description of Artificial Sequence: Synthetic oligonucleotide
aacuggcguccaucauagu

SEQ ID NO: 714332 - RNA, 19 nt, Artificial Sequence
  Description of Artificial Sequence: Synthetic oligonucleotide
ucagaucgagaccgcccuu

SEQ ID NO: 714333 - RNA, 19 nt, Artificial Sequence
  Description of Artificial Sequence: Synthetic oligonucleotide
cucagaucgagaccgcccu

SEQ ID NO: 714334 - RNA, 19 nt, Artificial Sequence
  Description of Artificial Sequence: Synthetic oligonucleotide
agaggggugaaagcgccuu

SEQ ID NO: 714335 - RNA, 19 nt, Artificial Sequence
  Description of Artificial Sequence: Synthetic oligonucleotide
gccgggguaccucauuagc

SEQ ID NO: 714336 - RNA, 19 nt, Artificial Sequence
  Description of Artificial Sequence: Synthetic oligonucleotide
gccuuucggaaaccgggcc

SEQ ID NO: 714337 - RNA, 19 nt, Artificial Sequence
  Description of Artificial Sequence: Synthetic oligonucleotide
aaggucucugcgacggguu

SEQ ID NO: 714338 - RNA, 19 nt, Artificial Sequence
  Description of Artificial Sequence: Synthetic oligonucleotide
agccagauacucgggagua

SEQ ID NO: 714339 - RNA, 19 nt, Artificial Sequence
  Description of Artificial Sequence: Synthetic oligonucleotide
cuucaacggacccggaccu

SEQ ID NO: 714340 - RNA, 19 nt, Artificial Sequence
  Description of Artificial Sequence: Synthetic oligonucleotide
gggguaccucauuagcuuc

SEQ ID NO: 714341 - RNA, 19 nt, Artificial Sequence
  Description of Artificial Sequence: Synthetic oligonucleotide
agucuccguaagaauagua

SEQ ID NO: 714342 - RNA, 19 nt, Artificial Sequence
  Description of Artificial Sequence: Synthetic oligonucleotide
gcuuagggacuucaacgga

SEQ ID NO: 714343 - RNA, 19 nt, Artificial Sequence
  Description of Artificial Sequence: Synthetic oligonucleotide
gagcacgacucgaauucuc

SEQ ID NO: 714344 - RNA, 19 nt, Artificial Sequence
  Description of Artificial Sequence: Synthetic oligonucleotide
cuagcccuuuggagacgcc

SEQ ID NO: 714345 - RNA, 19 nt, Artificial Sequence
  Description of Artificial Sequence: Synthetic oligonucleotide
ccccacuauauccuggauc

SEQ ID NO: 714346 - RNA, 19 nt, Artificial Sequence
  Description of Artificial Sequence: Synthetic oligonucleotide
auacucgggaguagcucca

SEQ ID NO: 714347 - RNA, 19 nt, Artificial Sequence
  Description of Artificial Sequence: Synthetic oligonucleotide
gcgucauuggcgaggauca

SEQ ID NO: 714348 - RNA, 19 nt, Artificial Sequence
  Description of Artificial Sequence: Synthetic oligonucleotide
gcgaggaucacuccugugu

SEQ ID NO: 714349 - RNA, 19 nt, Artificial Sequence
  Description of Artificial Sequence: Synthetic oligonucleotide
uggagacgccauucaguuu

SEQ ID NO: 714350 - RNA, 19 nt, Artificial Sequence
  Description of Artificial Sequence: Synthetic oligonucleotide
gggugaaagcgccuuucuc

SEQ ID NO: 714351 - RNA, 19 nt, Artificial Sequence
  Description of Artificial Sequence: Synthetic oligonucleotide
aaccgggcccacgcuucuc

SEQ ID NO: 714352 - RNA, 19 nt, Artificial Sequence
  Description of Artificial Sequence: Synthetic oligonucleotide
gcgacggguuuucaaggug

SEQ ID NO: 714353 - RNA, 19 nt, Artificial Sequence
  Description of Artificial Sequence: Synthetic oligonucleotide
gggcugaccacuguucuca

SEQ ID NO: 714354 - RNA, 19 nt, Artificial Sequence
  Description of Artificial Sequence: Synthetic oligonucleotide
gcgcagagaggggugaaag

SEQ ID NO: 714355 - RNA, 19 nt, Artificial Sequence
  Description of Artificial Sequence: Synthetic oligonucleotide
gggugauuggccgggguac

SEQ ID NO: 714356 - RNA, 19 nt, Artificial Sequence
  Description of Artificial Sequence: Synthetic oligonucleotide
cuuugagggacggggcgca

SEQ ID NO: 714357 - RNA, 19 nt, Artificial Sequence
  Description of Artificial Sequence: Synthetic oligonucleotide
ugggcgcuucuuaccccga

SEQ ID NO: 714358 - RNA, 19 nt, Artificial Sequence
  Description of Artificial Sequence: Synthetic oligonucleotide
acucgggaguagcuccaau

SEQ ID NO: 714359 - RNA, 19 nt, Artificial Sequence
  Description of Artificial Sequence: Synthetic oligonucleotide
aggucucugcgacggguuu

SEQ ID NO: 714360 - RNA, 19 nt, Artificial Sequence
  Description of Artificial Sequence: Synthetic oligonucleotide
agguugcccacaacacucu

SEQ ID NO: 714361 - RNA, 19 nt, Artificial Sequence
  Description of Artificial Sequence: Synthetic oligonucleotide
ccguaauggaacagguaca

SEQ ID NO: 714362 - RNA, 19 nt, Artificial Sequence
  Description of Artificial Sequence: Synthetic oligonucleotide
ggcaacaacuuuuccuccu

SEQ ID NO: 714363 - RNA, 19 nt, Artificial Sequence
  Description of Artificial Sequence: Synthetic oligonucleotide
gcuggucuucccuccagga

SEQ ID NO: 714364 - RNA, 19 nt, Artificial Sequence
  Description of Artificial Sequence: Synthetic oligonucleotide
uuggccgggguaccucauu

SEQ ID NO: 714365 - RNA, 19 nt, Artificial Sequence
  Description of Artificial Sequence: Synthetic oligonucleotide
ggcuauguagcuggucuuc

SEQ ID NO: 714366 - RNA, 19 nt, Artificial Sequence
  Description of Artificial Sequence: Synthetic oligonucleotide
ggugauuggccgggguacc

SEQ ID NO: 714367 - RNA, 19 nt, Artificial Sequence
  Description of Artificial Sequence: Synthetic oligonucleotide
gucauuggcgaggaucacu

SEQ ID NO: 714368 - RNA, 19 nt, Artificial Sequence
  Description of Artificial Sequence: Synthetic oligonucleotide
caucaccaacugcaggcaa

SEQ ID NO: 714369 - RNA, 19 nt, Artificial Sequence
  Description of Artificial Sequence: Synthetic oligonucleotide
cugcacccuucuguuuccg

SEQ ID NO: 714370 - RNA, 19 nt, Artificial Sequence
  Description of Artificial Sequence: Synthetic oligonucleotide
ggccgggguaccucauuag

SEQ ID NO: 714371 - RNA, 19 nt, Artificial Sequence
  Description of Artificial Sequence: Synthetic oligonucleotide
cagauacucgggaguagcu

SEQ ID NO: 714372 - RNA, 19 nt, Artificial Sequence
  Description of Artificial Sequence: Synthetic oligonucleotide
acgauugauuagagccuga

SEQ ID NO: 714373 - RNA, 19 nt, Artificial Sequence
  Description of Artificial Sequence: Synthetic oligonucleotide
ggccuuucggaaaccgggc

SEQ ID NO: 714374 - RNA, 19 nt, Artificial Sequence
  Description of Artificial Sequence: Synthetic oligonucleotide
ggauccagauuaacuccac

SEQ ID NO: 714375 - RNA, 19 nt, Artificial Sequence
  Description of Artificial Sequence: Synthetic oligonucleotide
caccguaauggaacaggua

SEQ ID NO: 714376 - RNA, 19 nt, Artificial Sequence
  Description of Artificial Sequence: Synthetic oligonucleotide
cgauugauuagagccugag

SEQ ID NO: 714377 - RNA, 19 nt, Artificial Sequence
  Description of Artificial Sequence: Synthetic oligonucleotide
agcccuuuggagacgccau

SEQ ID NO: 714378 - RNA, 19 nt, Artificial Sequence
  Description of Artificial Sequence: Synthetic oligonucleotide
uucaacggacccggaccuc

SEQ ID NO: 714379 - RNA, 19 nt, Artificial Sequence
  Description of Artificial Sequence: Synthetic oligonucleotide
ccuuugagggacggggcgc

SEQ ID NO: 714380 - RNA, 19 nt, Artificial Sequence
  Description of Artificial Sequence: Synthetic oligonucleotide
ccgaagggauggcugcugc

SEQ ID NO: 714381 - RNA, 19 nt, Artificial Sequence
  Description of Artificial Sequence: Synthetic oligonucleotide
cccaaacgaugcagguugc

SEQ ID NO: 714382 - RNA, 19 nt, Artificial Sequence
  Description of Artificial Sequence: Synthetic oligonucleotide
uucuuaccccgagccugga

SEQ ID NO: 714383 - RNA, 19 nt, Artificial Sequence
  Description of Artificial Sequence: Synthetic oligonucleotide
cgcagagaggggugaaagc

SEQ ID NO: 714384 - RNA, 19 nt, Artificial Sequence
  Description of Artificial Sequence: Synthetic oligonucleotide
ccuuggggaacuggcgucc

SEQ ID NO: 714385 - RNA, 19 nt, Artificial Sequence
  Description of Artificial Sequence: Synthetic oligonucleotide
uacucgggaguagcuccaa

SEQ ID NO: 714386 - RNA, 19 nt, Artificial Sequence
  Description of Artificial Sequence: Synthetic oligonucleotide
gcgcaacacaugucuaaga

SEQ ID NO: 714387 - RNA, 19 nt, Artificial Sequence
  Description of Artificial Sequence: Synthetic oligonucleotide
ggcgaggaucacuccugug

SEQ ID NO: 714388 - RNA, 19 nt, Artificial Sequence
  Description of Artificial Sequence: Synthetic oligonucleotide
cggguaaacccuuccugac

SEQ ID NO: 714389 - RNA, 19 nt, Artificial Sequence
  Description of Artificial Sequence: Synthetic oligonucleotide
ccaagggauccagauuaac

SEQ ID NO: 714390 - RNA, 19 nt, Artificial Sequence
  Description of Artificial Sequence: Synthetic oligonucleotide
agacgccauucaguuucug

SEQ ID NO: 714391 - RNA, 19 nt, Artificial Sequence
  Description of Artificial Sequence: Synthetic oligonucleotide
guguggggcuggggaauag

SEQ ID NO: 714392 - RNA, 19 nt, Artificial Sequence
  Description of Artificial Sequence: Synthetic oligonucleotide
agcgcagagaggggugaaa

SEQ ID NO: 714393 - RNA, 19 nt, Artificial Sequence
  Description of Artificial Sequence: Synthetic oligonucleotide
gauccgcuugugaacucgu

SEQ ID NO: 714394 - RNA, 19 nt, Artificial Sequence
  Description of Artificial Sequence: Synthetic oligonucleotide
gggcccacgcuucuccuuc

SEQ ID NO: 714395 - RNA, 19 nt, Artificial Sequence
  Description of Artificial Sequence: Synthetic oligonucleotide
cuaacucuccaggcaacgu

SEQ ID NO: 714396 - RNA, 19 nt, Artificial Sequence
  Description of Artificial Sequence: Synthetic oligonucleotide
ccugguuugccacgccauc

SEQ ID NO: 714397 - RNA, 19 nt, Artificial Sequence
  Description of Artificial Sequence: Synthetic oligonucleotide
cugguuugccacgccaucu

SEQ ID NO: 714398 - RNA, 19 nt, Artificial Sequence
  Description of Artificial Sequence: Synthetic oligonucleotide
guuggugcugggcgcuucu

SEQ ID NO: 714399 - RNA, 19 nt, Artificial Sequence
  Description of Artificial Sequence: Synthetic oligonucleotide
ccacuauauccuggauccg

SEQ ID NO: 714400 - RNA, 19 nt, Artificial Sequence
  Description of Artificial Sequence: Synthetic oligonucleotide
cuuugccgccccaccagcu

SEQ ID NO: 714401 - RNA, 19 nt, Artificial Sequence
  Description of Artificial Sequence: Synthetic oligonucleotide
cgggccuuucggaaaccgg

SEQ ID NO: 714402 - RNA, 19 nt, Artificial Sequence
  Description of Artificial Sequence: Synthetic oligonucleotide
ccacgauugauuagagccu

SEQ ID NO: 714403 - RNA, 19 nt, Artificial Sequence
  Description of Artificial Sequence: Synthetic oligonucleotide
ccgauucagauacucagau

SEQ ID NO: 714404 - RNA, 19 nt, Artificial Sequence
  Description of Artificial Sequence: Synthetic oligonucleotide
ggcgcucagcauuggcguc

SEQ ID NO: 714405 - RNA, 19 nt, Artificial Sequence
  Description of Artificial Sequence: Synthetic oligonucleotide
ccagauuaacuccacgauu

SEQ ID NO: 714406 - RNA, 19 nt, Artificial Sequence
  Description of Artificial Sequence: Synthetic oligonucleotide
gggaguggccugauccuuc

SEQ ID NO: 714407 - RNA, 19 nt, Artificial Sequence
  Description of Artificial Sequence: Synthetic oligonucleotide
gaucgagaccgcccuucuu

SEQ ID NO: 714408 - RNA, 19 nt, Artificial Sequence
  Description of Artificial Sequence: Synthetic oligonucleotide
ggggugaaagcgccuuucu

SEQ ID NO: 714409 - RNA, 19 nt, Artificial Sequence
  Description of Artificial Sequence: Synthetic oligonucleotide
gagacgccauucaguuucu

SEQ ID NO: 714410 - RNA, 19 nt, Artificial Sequence
  Description of Artificial Sequence: Synthetic oligonucleotide
ccaccguaauggaacaggu

SEQ ID NO: 714411 - RNA, 19 nt, Artificial Sequence
  Description of Artificial Sequence: Synthetic oligonucleotide
ccuuucucgaaagcgggua

SEQ ID NO: 714412 - RNA, 19 nt, Artificial Sequence
  Description of Artificial Sequence: Synthetic oligonucleotide
ggaaaccgggcccacgcuu

SEQ ID NO: 714413 - RNA, 19 nt, Artificial Sequence
  Description of Artificial Sequence: Synthetic oligonucleotide
agucuaccacccacucauu

SEQ ID NO: 714414 - RNA, 19 nt, Artificial Sequence
  Description of Artificial Sequence: Synthetic oligonucleotide
cgacucgaauucucaucac

SEQ ID NO: 714415 - RNA, 19 nt, Artificial Sequence
  Description of Artificial Sequence: Synthetic oligonucleotide
ugggcaccagccgcacauu

SEQ ID NO: 714416 - RNA, 19 nt, Artificial Sequence
  Description of Artificial Sequence: Synthetic oligonucleotide
gagcgcagagaggggugaa

SEQ ID NO: 714417 - RNA, 19 nt, Artificial Sequence
  Description of Artificial Sequence: Synthetic oligonucleotide
auccgcuugugaacucguu

SEQ ID NO: 714418 - RNA, 19 nt, Artificial Sequence
  Description of Artificial Sequence: Synthetic oligonucleotide
ggagcgcaacacaugucua

SEQ ID NO: 714419 - RNA, 19 nt, Artificial Sequence
  Description of Artificial Sequence: Synthetic oligonucleotide
gcgcucagcauuggcguca

SEQ ID NO: 714420 - RNA, 19 nt, Artificial Sequence
  Description of Artificial Sequence: Synthetic oligonucleotide
gcacgacucgaauucucau

SEQ ID NO: 714421 - RNA, 19 nt, Artificial Sequence
  Description of Artificial Sequence: Synthetic oligonucleotide
ggcaagaauuugaccaguu

SEQ ID NO: 714422 - RNA, 19 nt, Artificial Sequence
  Description of Artificial Sequence: Synthetic oligonucleotide
caacggacccggaccuccu

SEQ ID NO: 714423 - RNA, 19 nt, Artificial Sequence
  Description of Artificial Sequence: Synthetic oligonucleotide
ccccugguuugccacgcca

SEQ ID NO: 714424 - RNA, 19 nt, Artificial Sequence
  Description of Artificial Sequence: Synthetic oligonucleotide
gggcuauguagcuggucuu

SEQ ID NO: 714425 - RNA, 19 nt, Artificial Sequence
  Description of Artificial Sequence: Synthetic oligonucleotide
ggacguccuucucauccuu

SEQ ID NO: 714426 - RNA, 19 nt, Artificial Sequence
  Description of Artificial Sequence: Synthetic oligonucleotide
ggacuucaacggacccgga

SEQ ID NO: 714427 - RNA, 19 nt, Artificial Sequence
  Description of Artificial Sequence: Synthetic oligonucleotide
ggaucacuccuguguucuu

SEQ ID NO: 714428 - RNA, 19 nt, Artificial Sequence
  Description of Artificial Sequence: Synthetic oligonucleotide
cgggguaccucauuagcuu

SEQ ID NO: 714429 - RNA, 19 nt, Artificial Sequence
  Description of Artificial Sequence: Synthetic oligonucleotide
gggccaugacagguaacau

SEQ ID NO: 714430 - RNA, 19 nt, Artificial Sequence
  Description of Artificial Sequence: Synthetic oligonucleotide
cgcaggacguccuucucau

SEQ ID NO: 714431 - RNA, 19 nt, Artificial Sequence
  Description of Artificial Sequence: Synthetic oligonucleotide
cccugguuugccacgccau

SEQ ID NO: 714432 - RNA, 19 nt, Artificial Sequence
  Description of Artificial Sequence: Synthetic oligonucleotide
cgaaagcggguaaacccuu

SEQ ID NO: 714433 - RNA, 19 nt, Artificial Sequence
  Description of Artificial Sequence: Synthetic oligonucleotide
ccccaccaccuuggggaac

SEQ ID NO: 714434 - RNA, 19 nt, Artificial Sequence
  Description of Artificial Sequence: Synthetic oligonucleotide
ccgccucaucauccuuuga

SEQ ID NO: 714435 - RNA, 19 nt, Artificial Sequence
  Description of Artificial Sequence: Synthetic oligonucleotide
cgcuucuuaccccgagccu

SEQ ID NO: 714436 - RNA, 19 nt, Artificial Sequence
  Description of Artificial Sequence: Synthetic oligonucleotide
cgagcacgacucgaauucu

SEQ ID NO: 714437 - RNA, 19 nt, Artificial Sequence
  Description of Artificial Sequence: Synthetic oligonucleotide
ccacgccaucuuccucaga

SEQ ID NO: 714438 - RNA, 19 nt, Artificial Sequence
  Description of Artificial Sequence: Synthetic oligonucleotide
cggaaaccgggcccacgcu

SEQ ID NO: 714439 - RNA, 19 nt, Artificial Sequence
  Description of Artificial Sequence: Synthetic oligonucleotide
aauagaaugacuucuuggc

SEQ ID NO: 714440 - RNA, 19 nt, Artificial Sequence
  Description of Artificial Sequence: Synthetic oligonucleotide
ucaauuguaaauuaaggca

SEQ ID NO: 714441 - RNA, 19 nt, Artificial Sequence
  Description of Artificial Sequence: Synthetic oligonucleotide
uagaaauaggugaaggugg

SEQ ID NO: 714442 - RNA, 19 nt, Artificial Sequence
  Description of Artificial Sequence: Synthetic oligonucleotide
aauauuauagaacacgcuu

SEQ ID NO: 714443 - RNA, 19 nt, Artificial Sequence
  Description of Artificial Sequence: Synthetic oligonucleotide
uucuauaacccuuacauug

SEQ ID NO: 714444 - RNA, 19 nt, Artificial Sequence
  Description of Artificial Sequence: Synthetic oligonucleotide
gaugccuuagguuauaugc

SEQ ID NO: 714445 - RNA, 19 nt, Artificial Sequence
  Description of Artificial Sequence: Synthetic oligonucleotide
uuuacaugcuuauacacag

SEQ ID NO: 714446 - RNA, 19 nt, Artificial Sequence
  Description of Artificial Sequence: Synthetic oligonucleotide
uaaucaugaacuauguagc

SEQ ID NO: 714447 - RNA, 19 nt, Artificial Sequence
  Description of Artificial Sequence: Synthetic oligonucleotide
uucuuauagaaauagguga

SEQ ID NO: 714448 - RNA, 19 nt, Artificial Sequence
  Description of Artificial Sequence: Synthetic oligonucleotide
aauaacugaaguacaacac

SEQ ID NO: 714449 - RNA, 19 nt, Artificial Sequence
  Description of Artificial Sequence: Synthetic oligonucleotide
uuuuccucgaccaauagaa

SEQ ID NO: 714450 - RNA, 19 nt, Artificial Sequence
  Description of Artificial Sequence: Synthetic oligonucleotide
cuuauacacagcuuggucc

SEQ ID NO: 714451 - RNA, 19 nt, Artificial Sequence
  Description of Artificial Sequence: Synthetic oligonucleotide
guagccguguaucagaugg

SEQ ID NO: 714452 - RNA, 19 nt, Artificial Sequence
  Description of Artificial Sequence: Synthetic oligonucleotide
uuagguuauaugcaucucc

SEQ ID NO: 714453 - RNA, 19 nt, Artificial Sequence
  Description of Artificial Sequence: Synthetic oligonucleotide
cuaauuuguggaaagaauc

SEQ ID NO: 714454 - RNA, 19 nt, Artificial Sequence
  Description of Artificial Sequence: Synthetic oligonucleotide
uuuaaagcgacugucauuc

SEQ ID NO: 714455 - RNA, 19 nt, Artificial Sequence
  Description of Artificial Sequence: Synthetic oligonucleotide
uuccggaucauucagagaa

SEQ ID NO: 714456 - RNA, 19 nt, Artificial Sequence
  Description of Artificial Sequence: Synthetic oligonucleotide
ugucggaucaacacuagag

SEQ ID NO: 714457 - RNA, 19 nt, Artificial Sequence
  Description of Artificial Sequence: Synthetic oligonucleotide
acggaugucaacaaguacc

SEQ ID NO: 714458 - RNA, 19 nt, Artificial Sequence
  Description of Artificial Sequence: Synthetic oligonucleotide
ugagaugccucuagaaacg

SEQ ID NO: 714459 - RNA, 19 nt, Artificial Sequence
  Description of Artificial Sequence: Synthetic oligonucleotide
aacuauguagccguguauc

SEQ ID NO: 714460 - RNA, 19 nt, Artificial Sequence
  Description of Artificial Sequence: Synthetic oligonucleotide
caauagaaugacuucuugg

SEQ ID NO: 714461 - RNA, 19 nt, Artificial Sequence
  Description of Artificial Sequence: Synthetic oligonucleotide
gaaagcaagcuuuucggag

SEQ ID NO: 714462 - RNA, 19 nt, Artificial Sequence
  Description of Artificial Sequence: Synthetic oligonucleotide
caugcuuauacacagcuug

SEQ ID NO: 714463 - RNA, 19 nt, Artificial Sequence
  Description of Artificial Sequence: Synthetic oligonucleotide
gaugauaacuuccggauca

SEQ ID NO: 714464 - RNA, 19 nt, Artificial Sequence
  Description of Artificial Sequence: Synthetic oligonucleotide
aaacagaaacuuuacugga

SEQ ID NO: 714465 - RNA, 19 nt, Artificial Sequence
  Description of Artificial Sequence: Synthetic oligonucleotide
ucuuauagaaauaggugaa

SEQ ID NO: 714466 - RNA, 19 nt, Artificial Sequence
  Description of Artificial Sequence: Synthetic oligonucleotide
aacuuuacuggagaugagg

SEQ ID NO: 714467 - RNA, 19 nt, Artificial Sequence
  Description of Artificial Sequence: Synthetic oligonucleotide
uguaaauuaaggcauuauu

SEQ ID NO: 714468 - RNA, 19 nt, Artificial Sequence
  Description of Artificial Sequence: Synthetic oligonucleotide
aagaaccgucgccaaagcc

SEQ ID NO: 714469 - RNA, 19 nt, Artificial Sequence
  Description of Artificial Sequence: Synthetic oligonucleotide
uucauacagagcuugggcc

SEQ ID NO: 714470 - RNA, 19 nt, Artificial Sequence
  Description of Artificial Sequence: Synthetic oligonucleotide
ucuuuuaagucucucucga

SEQ ID NO: 714471 - RNA, 19 nt, Artificial Sequence
  Description of Artificial Sequence: Synthetic oligonucleotide
uuauaugcaucucccagca

SEQ ID NO: 714472 - RNA, 19 nt, Artificial Sequence
  Description of Artificial Sequence: Synthetic oligonucleotide
aguaguucacucuugauuu

SEQ ID NO: 714473 - RNA, 19 nt, Artificial Sequence
  Description of Artificial Sequence: Synthetic oligonucleotide
uguuguuucugacacgcug

SEQ ID NO: 714474 - RNA, 19 nt, Artificial Sequence
  Description of Artificial Sequence: Synthetic oligonucleotide
uuucggagacucaugauga

SEQ ID NO: 714475 - RNA, 19 nt, Artificial Sequence
  Description of Artificial Sequence: Synthetic oligonucleotide
auagaaauaggugaaggug

SEQ ID NO: 714476 - RNA, 19 nt, Artificial Sequence
  Description of Artificial Sequence: Synthetic oligonucleotide
aaagaagugucggaucaac

SEQ ID NO: 714477 - RNA, 19 nt, Artificial Sequence
  Description of Artificial Sequence: Synthetic oligonucleotide
uagguuauaugcaucuccc

SEQ ID NO: 714478 - RNA, 19 nt, Artificial Sequence
  Description of Artificial Sequence: Synthetic oligonucleotide
aaguaguucacucuugauu

SEQ ID NO: 714479 - RNA, 19 nt, Artificial Sequence
  Description of Artificial Sequence: Synthetic oligonucleotide
caccguagaagucagacag

SEQ ID NO: 714480 - RNA, 19 nt, Artificial Sequence
  Description of Artificial Sequence: Synthetic oligonucleotide
auaacccuuacauugggcu

SEQ ID NO: 714481 - RNA, 19 nt, Artificial Sequence
  Description of Artificial Sequence: Synthetic oligonucleotide
uguggaaagaaucauucuu

SEQ ID NO: 714482 - RNA, 19 nt, Artificial Sequence
  Description of Artificial Sequence: Synthetic oligonucleotide
guuagcacuaauuugugga

SEQ ID NO: 714483 - RNA, 19 nt, Artificial Sequence
  Description of Artificial Sequence: Synthetic oligonucleotide
cauuucuuauagaaauagg

SEQ ID NO: 714484 - RNA, 19 nt, Artificial Sequence
  Description of Artificial Sequence: Synthetic oligonucleotide
aacaacagucaacggggcg

SEQ ID NO: 714485 - RNA, 19 nt, Artificial Sequence
  Description of Artificial Sequence: Synthetic oligonucleotide
acucucuuaaguuccuugg

SEQ ID NO: 714486 - RNA, 19 nt, Artificial Sequence
  Description of Artificial Sequence: Synthetic oligonucleotide
ucuucauaaggaaacccac

SEQ ID NO: 714487 - RNA, 19 nt, Artificial Sequence
  Description of Artificial Sequence: Synthetic oligonucleotide
ucaacaaguacccgagucu

SEQ ID NO: 714488 - RNA, 19 nt, Artificial Sequence
  Description of Artificial Sequence: Synthetic oligonucleotide
ucgaccaauagaaugacuu

SEQ ID NO: 714489 - RNA, 19 nt, Artificial Sequence
  Description of Artificial Sequence: Synthetic oligonucleotide
uccucgaccaauagaauga

SEQ ID NO: 714490 - RNA, 19 nt, Artificial Sequence
  Description of Artificial Sequence: Synthetic oligonucleotide
gaaaacagcagcaucguca

SEQ ID NO: 714491 - RNA, 19 nt, Artificial Sequence
  Description of Artificial Sequence: Synthetic oligonucleotide
uuauacacagcuugguccu

SEQ ID NO: 714492 - RNA, 19 nt, Artificial Sequence
  Description of Artificial Sequence: Synthetic oligonucleotide
aaauaggugaagguggcga

SEQ ID NO: 714493 - RNA, 19 nt, Artificial Sequence
  Description of Artificial Sequence: Synthetic oligonucleotide
guuauaugcaucucccagc

SEQ ID NO: 714494 - RNA, 19 nt, Artificial Sequence
  Description of Artificial Sequence: Synthetic oligonucleotide
uuaagaguuuucuccauaa

SEQ ID NO: 714495 - RNA, 19 nt, Artificial Sequence
  Description of Artificial Sequence: Synthetic oligonucleotide
uagaacacgcuuuguacag

SEQ ID NO: 714496 - RNA, 19 nt, Artificial Sequence
  Description of Artificial Sequence: Synthetic oligonucleotide
aaagccgagaggaugucgg

SEQ ID NO: 714497 - RNA, 19 nt, Artificial Sequence
  Description of Artificial Sequence: Synthetic oligonucleotide
cucuuuuaagucucucucg

SEQ ID NO: 714498 - RNA, 19 nt, Artificial Sequence
  Description of Artificial Sequence: Synthetic oligonucleotide
uggcuuuaaacuguggugc

SEQ ID NO: 714499 - RNA, 19 nt, Artificial Sequence
  Description of Artificial Sequence: Synthetic oligonucleotide
aguuagcacuaauuugugg

SEQ ID NO: 714500 - RNA, 19 nt, Artificial Sequence
  Description of Artificial Sequence: Synthetic oligonucleotide
aauauguggcauagauggc

SEQ ID NO: 714501 - RNA, 19 nt, Artificial Sequence
  Description of Artificial Sequence: Synthetic oligonucleotide
agaaccgucgccaaagccg

SEQ ID NO: 714502 - RNA, 19 nt, Artificial Sequence
  Description of Artificial Sequence: Synthetic oligonucleotide
gcuauauacauccucuucc

SEQ ID NO: 714503 - RNA, 19 nt, Artificial Sequence
  Description of Artificial Sequence: Synthetic oligonucleotide
aaggaaucgucuguagcgg

SEQ ID NO: 714504 - RNA, 19 nt, Artificial Sequence
  Description of Artificial Sequence: Synthetic oligonucleotide
uuccucgaccaauagaaug

SEQ ID NO: 714505 - RNA, 19 nt, Artificial Sequence
  Description of Artificial Sequence: Synthetic oligonucleotide
uuuaaggacgcgguaacca

SEQ ID NO: 714506 - RNA, 19 nt, Artificial Sequence
  Description of Artificial Sequence: Synthetic oligonucleotide
acagaaacuuuacuggaga

SEQ ID NO: 714507 - RNA, 19 nt, Artificial Sequence
  Description of Artificial Sequence: Synthetic oligonucleotide
aaggaaacccacaaaguga

SEQ ID NO: 714508 - RNA, 19 nt, Artificial Sequence
  Description of Artificial Sequence: Synthetic oligonucleotide
gagguuuuguggcccaugg

SEQ ID NO: 714509 - RNA, 19 nt, Artificial Sequence
  Description of Artificial Sequence: Synthetic oligonucleotide
aagaaccccucguuuguuc

SEQ ID NO: 714510 - RNA, 19 nt, Artificial Sequence
  Description of Artificial Sequence: Synthetic oligonucleotide
ucauacagagcuugggcca

SEQ ID NO: 714511 - RNA, 19 nt, Artificial Sequence
  Description of Artificial Sequence: Synthetic oligonucleotide
acaacaccuucuauaaccc

SEQ ID NO: 714512 - RNA, 19 nt, Artificial Sequence
  Description of Artificial Sequence: Synthetic oligonucleotide
uggguugagcagaacaagc

SEQ ID NO: 714513 - RNA, 19 nt, Artificial Sequence
  Description of Artificial Sequence: Synthetic oligonucleotide
caugguggaaagcaacucc

SEQ ID NO: 714514 - RNA, 19 nt, Artificial Sequence
  Description of Artificial Sequence: Synthetic oligonucleotide
acuuggguugagcagaaca

SEQ ID NO: 714515 - RNA, 19 nt, Artificial Sequence
  Description of Artificial Sequence: Synthetic oligonucleotide
ucuuuaaggacgcgguaac

SEQ ID NO: 714516 - RNA, 19 nt, Artificial Sequence
  Description of Artificial Sequence: Synthetic oligonucleotide
uccauaauuucacaucuuu

SEQ ID NO: 714517 - RNA, 19 nt, Artificial Sequence
  Description of Artificial Sequence: Synthetic oligonucleotide
aagucaaaagaagacucca

SEQ ID NO: 714518 - RNA, 19 nt, Artificial Sequence
  Description of Artificial Sequence: Synthetic oligonucleotide
uuauuugcauguccaguga

SEQ ID NO: 714519 - RNA, 19 nt, Artificial Sequence
  Description of Artificial Sequence: Synthetic oligonucleotide
uaaacuguggugcauucuu

SEQ ID NO: 714520 - RNA, 19 nt, Artificial Sequence
  Description of Artificial Sequence: Synthetic oligonucleotide
gguuauaugcaucucccag

SEQ ID NO: 714521 - RNA, 19 nt, Artificial Sequence
  Description of Artificial Sequence: Synthetic oligonucleotide
uuaccgucaccuuucuucc

SEQ ID NO: 714522 - RNA, 19 nt, Artificial Sequence
  Description of Artificial Sequence: Synthetic oligonucleotide
agcaucgucauagagguca

SEQ ID NO: 714523 - RNA, 19 nt, Artificial Sequence
  Description of Artificial Sequence: Synthetic oligonucleotide
ggaauauuauagaacacgc

SEQ ID NO: 714524 - RNA, 19 nt, Artificial Sequence
  Description of Artificial Sequence: Synthetic oligonucleotide
uuuuccgacaccggguagg

SEQ ID NO: 714525 - RNA, 19 nt, Artificial Sequence
  Description of Artificial Sequence: Synthetic oligonucleotide
agugagaggaugccuuagg

SEQ ID NO: 714526 - RNA, 19 nt, Artificial Sequence
  Description of Artificial Sequence: Synthetic oligonucleotide
aauuuguggaaagaaucau

SEQ ID NO: 714527 - RNA, 19 nt, Artificial Sequence
  Description of Artificial Sequence: Synthetic oligonucleotide
aguucugggcuauauacau

SEQ ID NO: 714528 - RNA, 19 nt, Artificial Sequence
  Description of Artificial Sequence: Synthetic oligonucleotide
cuguuacugagguagcggc

SEQ ID NO: 714529 - RNA, 19 nt, Artificial Sequence
  Description of Artificial Sequence: Synthetic oligonucleotide
acgaugauaacuuccggau

SEQ ID NO: 714530 - RNA, 19 nt, Artificial Sequence
  Description of Artificial Sequence: Synthetic oligonucleotide
aauaggugaagguggcgau

SEQ ID NO: 714531 - RNA, 19 nt, Artificial Sequence
  Description of Artificial Sequence: Synthetic oligonucleotide
ugaacuauguagccgugua

SEQ ID NO: 714532 - RNA, 19 nt, Artificial Sequence
  Description of Artificial Sequence: Synthetic oligonucleotide
uagaaacgcuuccuucagg

SEQ ID NO: 714533 - RNA, 19 nt, Artificial Sequence
  Description of Artificial Sequence: Synthetic oligonucleotide
augggcauuaaaacccucc

SEQ ID NO: 714534 - RNA, 19 nt, Artificial Sequence
  Description of Artificial Sequence: Synthetic oligonucleotide
aaguacccgagucucgcug

SEQ ID NO: 714535 - RNA, 19 nt, Artificial Sequence
  Description of Artificial Sequence: Synthetic oligonucleotide
gagagggaauauuauagaa

SEQ ID NO: 714536 - RNA, 19 nt, Artificial Sequence
  Description of Artificial Sequence: Synthetic oligonucleotide
ucgauuaccgucaccuuuc

SEQ ID NO: 714537 - RNA, 19 nt, Artificial Sequence
  Description of Artificial Sequence: Synthetic oligonucleotide
uuagcacuaauuuguggaa

SEQ ID NO: 714538 - RNA, 19 nt, Artificial Sequence
  Description of Artificial Sequence: Synthetic oligonucleotide
guagggaaucugcacuucg

SEQ ID NO: 714539 - RNA, 19 nt, Artificial Sequence
  Description of Artificial Sequence: Synthetic oligonucleotide
uacugaacgcccgucacag

SEQ ID NO: 714540 - RNA, 19 nt, Artificial Sequence
  Description of Artificial Sequence: Synthetic oligonucleotide
uuaaggacgcgguaaccac

SEQ ID NO: 714541 - RNA, 19 nt, Artificial Sequence
  Description of Artificial Sequence: Synthetic oligonucleotide
uguacugaacgcccgucac

SEQ ID NO: 714542 - RNA, 19 nt, Artificial Sequence
  Description of Artificial Sequence: Synthetic oligonucleotide
uauuugcauguccagugaa

SEQ ID NO: 714543 - RNA, 19 nt, Artificial Sequence
  Description of Artificial Sequence: Synthetic oligonucleotide
agaagcucgccaacgauuc

SEQ ID NO: 714544 - RNA, 19 nt, Artificial Sequence
  Description of Artificial Sequence: Synthetic oligonucleotide
cacgcuuuguacaguacag

SEQ ID NO: 714545 - RNA, 19 nt, Artificial Sequence
  Description of Artificial Sequence: Synthetic oligonucleotide
uuacaugcuuauacacagc

SEQ ID NO: 714546 - RNA, 19 nt, Artificial Sequence
  Description of Artificial Sequence: Synthetic oligonucleotide
uucaaugaaccagauacuu

SEQ ID NO: 714547 - RNA, 19 nt, Artificial Sequence
  Description of Artificial Sequence: Synthetic oligonucleotide
acuggacuuggguugagca

SEQ ID NO: 714548 - RNA, 19 nt, Artificial Sequence
  Description of Artificial Sequence: Synthetic oligonucleotide
aguacccgagucucgcugg

SEQ ID NO: 714549 - RNA, 19 nt, Artificial Sequence
  Description of Artificial Sequence: Synthetic oligonucleotide
ugcacuuacuggacuccgg

SEQ ID NO: 714550 - RNA, 19 nt, Artificial Sequence
  Description of Artificial Sequence: Synthetic oligonucleotide
cagaagaaccccucguuug

SEQ ID NO: 714551 - RNA, 19 nt, Artificial Sequence
  Description of Artificial Sequence: Synthetic oligonucleotide
cuagaaacgcuuccuucag

SEQ ID NO: 714552 - RNA, 19 nt, Artificial Sequence
  Description of Artificial Sequence: Synthetic oligonucleotide
uuguacugaacgcccguca

SEQ ID NO: 714553 - RNA, 19 nt, Artificial Sequence
  Description of Artificial Sequence: Synthetic oligonucleotide
auagaggucaggaaugccu

SEQ ID NO: 714554 - RNA, 19 nt, Artificial Sequence
  Description of Artificial Sequence: Synthetic oligonucleotide
uuggcauuuccccacggau

SEQ ID NO: 714555 - RNA, 19 nt, Artificial Sequence
  Description of Artificial Sequence: Synthetic oligonucleotide
aacccuuacauugggcucu

SEQ ID NO: 714556 - RNA, 19 nt, Artificial Sequence
  Description of Artificial Sequence: Synthetic oligonucleotide
agggcucgagguuuugugg

SEQ ID NO: 714557 - RNA, 19 nt, Artificial Sequence
  Description of Artificial Sequence: Synthetic oligonucleotide
agguuuuguggcccauggc

SEQ ID NO: 714558 - RNA, 19 nt, Artificial Sequence
  Description of Artificial Sequence: Synthetic oligonucleotide
gaugagaacuggacuuggg

SEQ ID NO: 714559 - RNA, 19 nt, Artificial Sequence
  Description of Artificial Sequence: Synthetic oligonucleotide
cugaacgcccgucacagug

SEQ ID NO: 714560 - RNA, 19 nt, Artificial Sequence
  Description of Artificial Sequence: Synthetic oligonucleotide
cuguagcggaaaauaauuc

SEQ ID NO: 714561 - RNA, 19 nt, Artificial Sequence
  Description of Artificial Sequence: Synthetic oligonucleotide
cucucuuaaguuccuuggc

SEQ ID NO: 714562 - RNA, 19 nt, Artificial Sequence
  Description of Artificial Sequence: Synthetic oligonucleotide
ugcaaggaaucgucuguag

SEQ ID NO: 714563 - RNA, 19 nt, Artificial Sequence
  Description of Artificial Sequence: Synthetic oligonucleotide
agccguguaucagaugggc

SEQ ID NO: 714564 - RNA, 19 nt, Artificial Sequence
  Description of Artificial Sequence: Synthetic oligonucleotide
uggaaagaaucauucuuuu

SEQ ID NO: 714565 - RNA, 19 nt, Artificial Sequence
  Description of Artificial Sequence: Synthetic oligonucleotide
agugucaccguccucuaau

SEQ ID NO: 714566 - RNA, 19 nt, Artificial Sequence
  Description of Artificial Sequence: Synthetic oligonucleotide
uaagucucucucgauuacc

SEQ ID NO: 714567 - RNA, 19 nt, Artificial Sequence
  Description of Artificial Sequence: Synthetic oligonucleotide
ugcagaagcucgccaacga

SEQ ID NO: 714568 - RNA, 19 nt, Artificial Sequence
  Description of Artificial Sequence: Synthetic oligonucleotide
aauuguaaauuaaggcauu

SEQ ID NO: 714569 - RNA, 19 nt, Artificial Sequence
  Description of Artificial Sequence: Synthetic oligonucleotide
ucuccaccguagaagucag

SEQ ID NO: 714570 - RNA, 19 nt, Artificial Sequence
  Description of Artificial Sequence: Synthetic oligonucleotide
auauuauagaacacgcuuu

SEQ ID NO: 714571 - RNA, 19 nt, Artificial Sequence
  Description of Artificial Sequence: Synthetic oligonucleotide
uaagaguuuucuccauaau

SEQ ID NO: 714572 - RNA, 19 nt, Artificial Sequence
  Description of Artificial Sequence: Synthetic oligonucleotide
acaacagucaacggggcgu

SEQ ID NO: 714573 - RNA, 19 nt, Artificial Sequence
  Description of Artificial Sequence: Synthetic oligonucleotide
acgcuuuguacaguacagc

SEQ ID NO: 714574 - RNA, 19 nt, Artificial Sequence
  Description of Artificial Sequence: Synthetic oligonucleotide
agggaauauuauagaacac

SEQ ID NO: 714575 - RNA, 19 nt, Artificial Sequence
  Description of Artificial Sequence: Synthetic oligonucleotide
gaagcuugcuggcaugguc

SEQ ID NO: 714576 - RNA, 19 nt, Artificial Sequence
  Description of Artificial Sequence: Synthetic oligonucleotide
uugguuguuuuccgacacc

SEQ ID NO: 714577 - RNA, 19 nt, Artificial Sequence
  Description of Artificial Sequence: Synthetic oligonucleotide
caugguccgcagacgagcg

SEQ ID NO: 714578 - RNA, 19 nt, Artificial Sequence
  Description of Artificial Sequence: Synthetic oligonucleotide
caacgauucugucuggcuc

SEQ ID NO: 714579 - RNA, 19 nt, Artificial Sequence
  Description of Artificial Sequence: Synthetic oligonucleotide
agucaaaagaagacuccag

SEQ ID NO: 714580 - RNA, 19 nt, Artificial Sequence
  Description of Artificial Sequence: Synthetic oligonucleotide
aacaccuucuauaacccuu

SEQ ID NO: 714581 - RNA, 19 nt, Artificial Sequence
  Description of Artificial Sequence: Synthetic oligonucleotide
uggcaugguccgcagacga

SEQ ID NO: 714582 - RNA, 19 nt, Artificial Sequence
  Description of Artificial Sequence: Synthetic oligonucleotide
ugccuuagguuauaugcau

SEQ ID NO: 714583 - RNA, 19 nt, Artificial Sequence
  Description of Artificial Sequence: Synthetic oligonucleotide
aagcucgccaacgauucug

SEQ ID NO: 714584 - RNA, 19 nt, Artificial Sequence
  Description of Artificial Sequence: Synthetic oligonucleotide
aacacgcuuuguacaguac

SEQ ID NO: 714585 - RNA, 19 nt, Artificial Sequence
  Description of Artificial Sequence: Synthetic oligonucleotide
aaggcauuauuuacaugcu

SEQ ID NO: 714586 - RNA, 19 nt, Artificial Sequence
  Description of Artificial Sequence: Synthetic oligonucleotide
ugcuuuucggagacucaug

SEQ ID NO: 714587 - RNA, 19 nt, Artificial Sequence
  Description of Artificial Sequence: Synthetic oligonucleotide
gacgagcgcucugagaugc

SEQ ID NO: 714588 - RNA, 19 nt, Artificial Sequence
  Description of Artificial Sequence: Synthetic oligonucleotide
uccggaucauucagagaag

SEQ ID NO: 714589 - RNA, 19 nt, Artificial Sequence
  Description of Artificial Sequence: Synthetic oligonucleotide
uaacccuuacauugggcuc

SEQ ID NO: 714590 - RNA, 19 nt, Artificial Sequence
  Description of Artificial Sequence: Synthetic oligonucleotide
gaugcaaggaaucgucugu

SEQ ID NO: 714591 - RNA, 19 nt, Artificial Sequence
  Description of Artificial Sequence: Synthetic oligonucleotide
gaagugucggaucaacacu

SEQ ID NO: 714592 - RNA, 19 nt, Artificial Sequence
  Description of Artificial Sequence: Synthetic oligonucleotide
agaaccccucguuuguuca

SEQ ID NO: 714593 - RNA, 19 nt, Artificial Sequence
  Description of Artificial Sequence: Synthetic oligonucleotide
uagaggucaggaaugccuu

SEQ ID NO: 714594 - RNA, 19 nt, Artificial Sequence
  Description of Artificial Sequence: Synthetic oligonucleotide
agucaacggggcguggagc

SEQ ID NO: 714595 - RNA, 19 nt, Artificial Sequence
  Description of Artificial Sequence: Synthetic oligonucleotide
ucgucuguagcggaaaaua

SEQ ID NO: 714596 - RNA, 19 nt, Artificial Sequence
  Description of Artificial Sequence: Synthetic oligonucleotide
aagugucggaucaacacua

SEQ ID NO: 714597 - RNA, 19 nt, Artificial Sequence
  Description of Artificial Sequence: Synthetic oligonucleotide
ggaucaacacuagagggug

SEQ ID NO: 714598 - RNA, 19 nt, Artificial Sequence
  Description of Artificial Sequence: Synthetic oligonucleotide
gucucucucgauuaccguc

SEQ ID NO: 714599 - RNA, 19 nt, Artificial Sequence
  Description of Artificial Sequence: Synthetic oligonucleotide
ucugcacuuacuggacucc

SEQ ID NO: 714600 - RNA, 19 nt, Artificial Sequence
  Description of Artificial Sequence: Synthetic oligonucleotide
uuaaagcgacugucauucc

SEQ ID NO: 714601 - RNA, 19 nt, Artificial Sequence
  Description of Artificial Sequence: Synthetic oligonucleotide
ugaacgcccgucacagugu

SEQ ID NO: 714602 - RNA, 19 nt, Artificial Sequence
  Description of Artificial Sequence: Synthetic oligonucleotide
gcagaaauauguggcauag

SEQ ID NO: 714603 - RNA, 19 nt, Artificial Sequence
  Description of Artificial Sequence: Synthetic oligonucleotide
uggagaugagguucuuccu

SEQ ID NO: 714604 - RNA, 19 nt, Artificial Sequence
  Description of Artificial Sequence: Synthetic oligonucleotide
ugcuuauacacagcuuggu

SEQ ID NO: 714605 - RNA, 19 nt, Artificial Sequence
  Description of Artificial Sequence: Synthetic oligonucleotide
agguuauaugcaucuccca

SEQ ID NO: 714606 - RNA, 19 nt, Artificial Sequence
  Description of Artificial Sequence: Synthetic oligonucleotide
gaauauuauagaacacgcu

SEQ ID NO: 714607 - RNA, 19 nt, Artificial Sequence
  Description of Artificial Sequence: Synthetic oligonucleotide
ccgaugagaggcaaagccg

SEQ ID NO: 714608 - RNA, 19 nt, Artificial Sequence
  Description of Artificial Sequence: Synthetic oligonucleotide
gacgcgguaaccaccuggc

SEQ ID NO: 714609 - RNA, 19 nt, Artificial Sequence
  Description of Artificial Sequence: Synthetic oligonucleotide
ugcguugcgguggcgacag

SEQ ID NO: 714610 - RNA, 19 nt, Artificial Sequence
  Description of Artificial Sequence: Synthetic oligonucleotide
caacaaguacccgagucuc

SEQ ID NO: 714611 - RNA, 19 nt, Artificial Sequence
  Description of Artificial Sequence: Synthetic oligonucleotide
caacggcaaagaagugucg

SEQ ID NO: 714612 - RNA, 19 nt, Artificial Sequence
  Description of Artificial Sequence: Synthetic oligonucleotide
accuucuauaacccuuaca

SEQ ID NO: 714613 - RNA, 19 nt, Artificial Sequence
  Description of Artificial Sequence: Synthetic oligonucleotide
aaggacgcgguaaccaccu

SEQ ID NO: 714614 - RNA, 19 nt, Artificial Sequence
  Description of Artificial Sequence: Synthetic oligonucleotide
cagcucuuuaaggacgcgg

SEQ ID NO: 714615 - RNA, 19 nt, Artificial Sequence
  Description of Artificial Sequence: Synthetic oligonucleotide
uuuccucgaccaauagaau

SEQ ID NO: 714616 - RNA, 19 nt, Artificial Sequence
  Description of Artificial Sequence: Synthetic oligonucleotide
aacgcuuccuucagguggu

SEQ ID NO: 714617 - RNA, 19 nt, Artificial Sequence
  Description of Artificial Sequence: Synthetic oligonucleotide
accgucgccaaagccgacc

SEQ ID NO: 714618 - RNA, 19 nt, Artificial Sequence
  Description of Artificial Sequence: Synthetic oligonucleotide
uuugacccuucauucucaa

SEQ ID NO: 714619 - RNA, 19 nt, Artificial Sequence
  Description of Artificial Sequence: Synthetic oligonucleotide
cucguuuguucacugguga

SEQ ID NO: 714620 - RNA, 19 nt, Artificial Sequence
  Description of Artificial Sequence: Synthetic oligonucleotide
cacggaugucaacaaguac

SEQ ID NO: 714621 - RNA, 19 nt, Artificial Sequence
  Description of Artificial Sequence: Synthetic oligonucleotide
ucguuuguucacuggugaa

SEQ ID NO: 714622 - RNA, 19 nt, Artificial Sequence
  Description of Artificial Sequence: Synthetic oligonucleotide
gaacacgcuuuguacagua

SEQ ID NO: 714623 - RNA, 19 nt, Artificial Sequence
  Description of Artificial Sequence: Synthetic oligonucleotide
aaugaaccagauacuucau

SEQ ID NO: 714624 - RNA, 19 nt, Artificial Sequence
  Description of Artificial Sequence: Synthetic oligonucleotide
gguuuuguggcccauggcu

SEQ ID NO: 714625 - RNA, 19 nt, Artificial Sequence
  Description of Artificial Sequence: Synthetic oligonucleotide
gagaugccucuagaaacgc

SEQ ID NO: 714626 - RNA, 19 nt, Artificial Sequence
  Description of Artificial Sequence: Synthetic oligonucleotide
caccggguagggaaucugc

SEQ ID NO: 714627 - RNA, 19 nt, Artificial Sequence
  Description of Artificial Sequence: Synthetic oligonucleotide
agcucuuuaaggacgcggu

SEQ ID NO: 714628 - RNA, 19 nt, Artificial Sequence
  Description of Artificial Sequence: Synthetic oligonucleotide
uucggagcugaugcaagga

SEQ ID NO: 714629 - RNA, 19 nt, Artificial Sequence
  Description of Artificial Sequence: Synthetic oligonucleotide
ggacgcgguaaccaccugg

SEQ ID NO: 714630 - RNA, 19 nt, Artificial Sequence
  Description of Artificial Sequence: Synthetic oligonucleotide
aggaaucgucuguagcgga

SEQ ID NO: 714631 - RNA, 19 nt, Artificial Sequence
  Description of Artificial Sequence: Synthetic oligonucleotide
cauacagagcuugggccag

SEQ ID NO: 714632 - RNA, 19 nt, Artificial Sequence
  Description of Artificial Sequence: Synthetic oligonucleotide
augccuuagguuauaugca

SEQ ID NO: 714633 - RNA, 19 nt, Artificial Sequence
  Description of Artificial Sequence: Synthetic oligonucleotide
aagccgagaggaugucgga

SEQ ID NO: 714634 - RNA, 19 nt, Artificial Sequence
  Description of Artificial Sequence: Synthetic oligonucleotide
gcuuuucggagacucauga

SEQ ID NO: 714635 - RNA, 19 nt, Artificial Sequence
  Description of Artificial Sequence: Synthetic oligonucleotide
guugcgguggcgacagcgg

SEQ ID NO: 714636 - RNA, 19 nt, Artificial Sequence
  Description of Artificial Sequence: Synthetic oligonucleotide
caccccaaauacugaaguc

SEQ ID NO: 714637 - RNA, 19 nt, Artificial Sequence
  Description of Artificial Sequence: Synthetic oligonucleotide
gcuuauacacagcuugguc

SEQ ID NO: 714638 - RNA, 19 nt, Artificial Sequence
  Description of Artificial Sequence: Synthetic oligonucleotide
caaagccgacccaaggaca

SEQ ID NO: 714639 - RNA, 19 nt, Artificial Sequence
  Description of Artificial Sequence: Synthetic oligonucleotide
agcccaacaggacccguca

SEQ ID NO: 714640 - RNA, 19 nt, Artificial Sequence
  Description of Artificial Sequence: Synthetic oligonucleotide
gacccgucacacauucucc

SEQ ID NO: 714641 - RNA, 19 nt, Artificial Sequence
  Description of Artificial Sequence: Synthetic oligonucleotide
cacgcugguuucuuuucug

SEQ ID NO: 714642 - RNA, 19 nt, Artificial Sequence
  Description of Artificial Sequence: Synthetic oligonucleotide
cuuagguuauaugcaucuc

SEQ ID NO: 714643 - RNA, 19 nt, Artificial Sequence
  Description of Artificial Sequence: Synthetic oligonucleotide
ggcuauauacauccucuuc

SEQ ID NO: 714644 - RNA, 19 nt, Artificial Sequence
  Description of Artificial Sequence: Synthetic oligonucleotide
acuacugaaaagggcucga

SEQ ID NO: 714645 - RNA, 19 nt, Artificial Sequence
  Description of Artificial Sequence: Synthetic oligonucleotide
agaccccacgaugauaacu

SEQ ID NO: 714646 - RNA, 19 nt, Artificial Sequence
  Description of Artificial Sequence: Synthetic oligonucleotide
accccacgaugauaacuuc

SEQ ID NO: 714647 - RNA, 19 nt, Artificial Sequence
  Description of Artificial Sequence: Synthetic oligonucleotide
gaaccgucgccaaagccga

SEQ ID NO: 714648 - RNA, 19 nt, Artificial Sequence
  Description of Artificial Sequence: Synthetic oligonucleotide
cugaaguacaacaccuucu

SEQ ID NO: 714649 - RNA, 19 nt, Artificial Sequence
  Description of Artificial Sequence: Synthetic oligonucleotide
uccuugagucuccaccgua

SEQ ID NO: 714650 - RNA, 19 nt, Artificial Sequence
  Description of Artificial Sequence: Synthetic oligonucleotide
ugguccgcagacgagcgcu

SEQ ID NO: 714651 - RNA, 19 nt, Artificial Sequence
  Description of Artificial Sequence: Synthetic oligonucleotide
guuuuccgacaccggguag

SEQ ID NO: 714652 - RNA, 19 nt, Artificial Sequence
  Description of Artificial Sequence: Synthetic oligonucleotide
agaacuggacuuggguuga

SEQ ID NO: 714653 - RNA, 19 nt, Artificial Sequence
  Description of Artificial Sequence: Synthetic oligonucleotide
caguucugggcuauauaca

SEQ ID NO: 714654 - RNA, 19 nt, Artificial Sequence
  Description of Artificial Sequence: Synthetic oligonucleotide
cuacugaaaagggcucgag

SEQ ID NO: 714655 - RNA, 19 nt, Artificial Sequence
  Description of Artificial Sequence: Synthetic oligonucleotide
ggacccgucacacauucuc

SEQ ID NO: 714656 - RNA, 19 nt, Artificial Sequence
  Description of Artificial Sequence: Synthetic oligonucleotide
caggacccgucacacauuc

SEQ ID NO: 714657 - RNA, 19 nt, Artificial Sequence
  Description of Artificial Sequence: Synthetic oligonucleotide
augaacuauguagccgugu

SEQ ID NO: 714658 - RNA, 19 nt, Artificial Sequence
  Description of Artificial Sequence: Synthetic oligonucleotide
augccucuagaaacgcuuc

SEQ ID NO: 714659 - RNA, 19 nt, Artificial Sequence
  Description of Artificial Sequence: Synthetic oligonucleotide
cucucgauuaccgucaccu

SEQ ID NO: 714660 - RNA, 19 nt, Artificial Sequence
  Description of Artificial Sequence: Synthetic oligonucleotide
aggccugcguugcgguggc

SEQ ID NO: 714661 - RNA, 19 nt, Artificial Sequence
  Description of Artificial Sequence: Synthetic oligonucleotide
cugucuggcucuuuuaagu

SEQ ID NO: 714662 - RNA, 19 nt, Artificial Sequence
  Description of Artificial Sequence: Synthetic oligonucleotide
uucggagacucaugaugaa

SEQ ID NO: 714663 - RNA, 19 nt, Artificial Sequence
  Description of Artificial Sequence: Synthetic oligonucleotide
aaccccucguuuguucacu

SEQ ID NO: 714664 - RNA, 19 nt, Artificial Sequence
  Description of Artificial Sequence: Synthetic oligonucleotide
gcacuuacuggacuccggc

SEQ ID NO: 714665 - RNA, 19 nt, Artificial Sequence
  Description of Artificial Sequence: Synthetic oligonucleotide
gaaccccucguuuguucac

SEQ ID NO: 714666 - RNA, 19 nt, Artificial Sequence
  Description of Artificial Sequence: Synthetic oligonucleotide
cucuuuaaggacgcgguaa

SEQ ID NO: 714667 - RNA, 19 nt, Artificial Sequence
  Description of Artificial Sequence: Synthetic oligonucleotide
cagacgagcgcucugagau

SEQ ID NO: 714668 - RNA, 19 nt, Artificial Sequence
  Description of Artificial Sequence: Synthetic oligonucleotide
gacaguucugggcuauaua

SEQ ID NO: 714669 - RNA, 19 nt, Artificial Sequence
  Description of Artificial Sequence: Synthetic oligonucleotide
aagugagaugaaacagaaa

SEQ ID NO: 714670 - RNA, 19 nt, Artificial Sequence
  Description of Artificial Sequence: Synthetic oligonucleotide
uguaucagaugggcauuaa

SEQ ID NO: 714671 - RNA, 19 nt, Artificial Sequence
  Description of Artificial Sequence: Synthetic oligonucleotide
agacgagcgcucugagaug

SEQ ID NO: 714672 - RNA, 19 nt, Artificial Sequence
  Description of Artificial Sequence: Synthetic oligonucleotide
guacugaacgcccgucaca

SEQ ID NO: 714673 - RNA, 19 nt, Artificial Sequence
  Description of Artificial Sequence: Synthetic oligonucleotide
cuuguacugaacgcccguc

SEQ ID NO: 714674 - RNA, 19 nt, Artificial Sequence
  Description of Artificial Sequence: Synthetic oligonucleotide
ggagagggcggcgaacugg

SEQ ID NO: 714675 - RNA, 19 nt, Artificial Sequence
  Description of Artificial Sequence: Synthetic oligonucleotide
gggcucgagguuuuguggc

SEQ ID NO: 714676 - RNA, 19 nt, Artificial Sequence
  Description of Artificial Sequence: Synthetic oligonucleotide
agccgagaggaugucggag

SEQ ID NO: 714677 - RNA, 19 nt, Artificial Sequence
  Description of Artificial Sequence: Synthetic oligonucleotide
ggaugccuuagguuauaug

SEQ ID NO: 714678 - RNA, 19 nt, Artificial Sequence
  Description of Artificial Sequence: Synthetic oligonucleotide
gcugaugcaaggaaucguc

SEQ ID NO: 714679 - RNA, 19 nt, Artificial Sequence
  Description of Artificial Sequence: Synthetic oligonucleotide
ucggaucugcuuucauaau

SEQ ID NO: 714680 - RNA, 19 nt, Artificial Sequence
  Description of Artificial Sequence: Synthetic oligonucleotide
gaugccucuagaaacgcuu

SEQ ID NO: 714681 - RNA, 19 nt, Artificial Sequence
  Description of Artificial Sequence: Synthetic oligonucleotide
ccaaauacugaagucaaaa

SEQ ID NO: 714682 - RNA, 19 nt, Artificial Sequence
  Description of Artificial Sequence: Synthetic oligonucleotide
cuugagucuccaccguaga

SEQ ID NO: 714683 - RNA, 19 nt, Artificial Sequence
  Description of Artificial Sequence: Synthetic oligonucleotide
gggcauuaaaacccuccac

SEQ ID NO: 714684 - RNA, 19 nt, Artificial Sequence
  Description of Artificial Sequence: Synthetic oligonucleotide
agaacacgcuuuguacagu

SEQ ID NO: 714685 - RNA, 19 nt, Artificial Sequence
  Description of Artificial Sequence: Synthetic oligonucleotide
caacggggcguggagcucc

SEQ ID NO: 714686 - RNA, 19 nt, Artificial Sequence
  Description of Artificial Sequence: Synthetic oligonucleotide
gucucgcuggcugagaucu

SEQ ID NO: 714687 - RNA, 19 nt, Artificial Sequence
  Description of Artificial Sequence: Synthetic oligonucleotide
cucgccaacgauucugucu

SEQ ID NO: 714688 - RNA, 19 nt, Artificial Sequence
  Description of Artificial Sequence: Synthetic oligonucleotide
ucucgauuaccgucaccuu

SEQ ID NO: 714689 - RNA, 19 nt, Artificial Sequence
  Description of Artificial Sequence: Synthetic oligonucleotide
guggaaagaaucauucuuu

SEQ ID NO: 714690 - RNA, 19 nt, Artificial Sequence
  Description of Artificial Sequence: Synthetic oligonucleotide
cagugagaggaugccuuag

SEQ ID NO: 714691 - RNA, 19 nt, Artificial Sequence
  Description of Artificial Sequence: Synthetic oligonucleotide
caacagucaacggggcgug

SEQ ID NO: 714692 - RNA, 19 nt, Artificial Sequence
  Description of Artificial Sequence: Synthetic oligonucleotide
gaacuauguagccguguau

SEQ ID NO: 714693 - RNA, 19 nt, Artificial Sequence
  Description of Artificial Sequence: Synthetic oligonucleotide
gcgguaggagagcaccagg

SEQ ID NO: 714694 - RNA, 19 nt, Artificial Sequence
  Description of Artificial Sequence: Synthetic oligonucleotide
uccgaggcccagcucuuua

SEQ ID NO: 714695 - RNA, 19 nt, Artificial Sequence
  Description of Artificial Sequence: Synthetic oligonucleotide
gacguccccgcauuucuua

SEQ ID NO: 714696 - RNA, 19 nt, Artificial Sequence
  Description of Artificial Sequence: Synthetic oligonucleotide
gugucggaucaacacuaga

SEQ ID NO: 714697 - RNA, 19 nt, Artificial Sequence
  Description of Artificial Sequence: Synthetic oligonucleotide
guacccgagucucgcuggc

SEQ ID NO: 714698 - RNA, 19 nt, Artificial Sequence
  Description of Artificial Sequence: Synthetic oligonucleotide
gcaugguccgcagacgagc

SEQ ID NO: 714699 - RNA, 19 nt, Artificial Sequence
  Description of Artificial Sequence: Synthetic oligonucleotide
aucgucuguagcggaaaau

SEQ ID NO: 714700 - RNA, 19 nt, Artificial Sequence
  Description of Artificial Sequence: Synthetic oligonucleotide
gucaacggggcguggagcu

SEQ ID NO: 714701 - RNA, 19 nt, Artificial Sequence
  Description of Artificial Sequence: Synthetic oligonucleotide
ggcucgagguuuuguggcc

SEQ ID NO: 714702 - RNA, 19 nt, Artificial Sequence
  Description of Artificial Sequence: Synthetic oligonucleotide
caccuucuauaacccuuac

SEQ ID NO: 714703 - RNA, 19 nt, Artificial Sequence
  Description of Artificial Sequence: Synthetic oligonucleotide
caucgucauagaggucagg

SEQ ID NO: 714704 - RNA, 19 nt, Artificial Sequence
  Description of Artificial Sequence: Synthetic oligonucleotide
acaccuucuauaacccuua

SEQ ID NO: 714705 - RNA, 19 nt, Artificial Sequence
  Description of Artificial Sequence: Synthetic oligonucleotide
gcccgucacagugucaccg

SEQ ID NO: 714706 - RNA, 19 nt, Artificial Sequence
  Description of Artificial Sequence: Synthetic oligonucleotide
cucucucgauuaccgucac

SEQ ID NO: 714707 - RNA, 19 nt, Artificial Sequence
  Description of Artificial Sequence: Synthetic oligonucleotide
augcaaggaaucgucugua

SEQ ID NO: 714708 - RNA, 19 nt, Artificial Sequence
  Description of Artificial Sequence: Synthetic oligonucleotide
cuuccggaucauucagaga

SEQ ID NO: 714709 - RNA, 19 nt, Artificial Sequence
  Description of Artificial Sequence: Synthetic oligonucleotide
cagcccaacaggacccguc

SEQ ID NO: 714710 - RNA, 19 nt, Artificial Sequence
  Description of Artificial Sequence: Synthetic oligonucleotide
ggcucugauuuaaagcaga

SEQ ID NO: 714711 - RNA, 19 nt, Artificial Sequence
  Description of Artificial Sequence: Synthetic oligonucleotide
ucucgcuggcugagaucug

SEQ ID NO: 714712 - RNA, 19 nt, Artificial Sequence
  Description of Artificial Sequence: Synthetic oligonucleotide
ccacgaugauaacuuccgg

SEQ ID NO: 714713 - RNA, 19 nt, Artificial Sequence
  Description of Artificial Sequence: Synthetic oligonucleotide
uaucuccgaggcccagcuc

SEQ ID NO: 714714 - RNA, 19 nt, Artificial Sequence
  Description of Artificial Sequence: Synthetic oligonucleotide
ccuuagguuauaugcaucu

SEQ ID NO: 714715 - RNA, 19 nt, Artificial Sequence
  Description of Artificial Sequence: Synthetic oligonucleotide
cguccucuaauaacugaag

SEQ ID NO: 714716 - RNA, 19 nt, Artificial Sequence
  Description of Artificial Sequence: Synthetic oligonucleotide
gguggcgaugccaaggaaa

SEQ ID NO: 714717 - RNA, 19 nt, Artificial Sequence
  Description of Artificial Sequence: Synthetic oligonucleotide
gaccccacgaugauaacuu

SEQ ID NO: 714718 - RNA, 19 nt, Artificial Sequence
  Description of Artificial Sequence: Synthetic oligonucleotide
accggguagggaaucugca

SEQ ID NO: 714719 - RNA, 19 nt, Artificial Sequence
  Description of Artificial Sequence: Synthetic oligonucleotide
acaccggguagggaaucug

SEQ ID NO: 714720 - RNA, 19 nt, Artificial Sequence
  Description of Artificial Sequence: Synthetic oligonucleotide
gcaagcuuuucggagcuga

SEQ ID NO: 714721 - RNA, 19 nt, Artificial Sequence
  Description of Artificial Sequence: Synthetic oligonucleotide
cggaucugcuuucauaauc

SEQ ID NO: 714722 - RNA, 19 nt, Artificial Sequence
  Description of Artificial Sequence: Synthetic oligonucleotide
aaccgucgccaaagccgac

SEQ ID NO: 714723 - RNA, 19 nt, Artificial Sequence
  Description of Artificial Sequence: Synthetic oligonucleotide
agcucgccaacgauucugu

SEQ ID NO: 714724 - RNA, 19 nt, Artificial Sequence
  Description of Artificial Sequence: Synthetic oligonucleotide
cucgauuaccgucaccuuu

SEQ ID NO: 714725 - RNA, 19 nt, Artificial Sequence
  Description of Artificial Sequence: Synthetic oligonucleotide
accguagaagucagacagu

SEQ ID NO: 714726 - RNA, 19 nt, Artificial Sequence
  Description of Artificial Sequence: Synthetic oligonucleotide
gacagcgguaggagagcac

SEQ ID NO: 714727 - RNA, 19 nt, Artificial Sequence
  Description of Artificial Sequence: Synthetic oligonucleotide
cgaccaauagaaugacuuc

SEQ ID NO: 714728 - RNA, 19 nt, Artificial Sequence
  Description of Artificial Sequence: Synthetic oligonucleotide
cgacccaaggacaccagac

SEQ ID NO: 714729 - RNA, 19 nt, Artificial Sequence
  Description of Artificial Sequence: Synthetic oligonucleotide
cuuuaaacuguggugcauu

SEQ ID NO: 714730 - RNA, 19 nt, Artificial Sequence
  Description of Artificial Sequence: Synthetic oligonucleotide
uauacacagcuugguccuu

SEQ ID NO: 714731 - RNA, 19 nt, Artificial Sequence
  Description of Artificial Sequence: Synthetic oligonucleotide
acgcgguaaccaccuggcu

SEQ ID NO: 714732 - RNA, 19 nt, Artificial Sequence
  Description of Artificial Sequence: Synthetic oligonucleotide
gagucucgcuggcugagau

SEQ ID NO: 714733 - RNA, 19 nt, Artificial Sequence
  Description of Artificial Sequence: Synthetic oligonucleotide
cgcgguaaccaccuggcug

SEQ ID NO: 714734 - RNA, 19 nt, Artificial Sequence
  Description of Artificial Sequence: Synthetic oligonucleotide
gugucaccguccucuaaua

SEQ ID NO: 714735 - RNA, 19 nt, Artificial Sequence
  Description of Artificial Sequence: Synthetic oligonucleotide
cagaaauauguggcauaga

SEQ ID NO: 714736 - RNA, 19 nt, Artificial Sequence
  Description of Artificial Sequence: Synthetic oligonucleotide
aggaugccuuagguuauau

SEQ ID NO: 714737 - RNA, 19 nt, Artificial Sequence
  Description of Artificial Sequence: Synthetic oligonucleotide
ccggguagggaaucugcac

SEQ ID NO: 714738 - RNA, 19 nt, Artificial Sequence
  Description of Artificial Sequence: Synthetic oligonucleotide
gccaacgauucugucuggc

SEQ ID NO: 714739 - RNA, 19 nt, Artificial Sequence
  Description of Artificial Sequence: Synthetic oligonucleotide
cagaccccacgaugauaac

SEQ ID NO: 714740 - RNA, 19 nt, Artificial Sequence
  Description of Artificial Sequence: Synthetic oligonucleotide
agguggcgaugccaaggaa

SEQ ID NO: 714741 - RNA, 19 nt, Artificial Sequence
  Description of Artificial Sequence: Synthetic oligonucleotide
guguaucagaugggcauua

SEQ ID NO: 714742 - RNA, 19 nt, Artificial Sequence
  Description of Artificial Sequence: Synthetic oligonucleotide
cacuagcucauuugacccu

SEQ ID NO: 714743 - RNA, 19 nt, Artificial Sequence
  Description of Artificial Sequence: Synthetic oligonucleotide
gaagcucgccaacgauucu

SEQ ID NO: 714744 - RNA, 19 nt, Artificial Sequence
  Description of Artificial Sequence: Synthetic oligonucleotide
cguugcgguggcgacagcg

SEQ ID NO: 714745 - RNA, 19 nt, Artificial Sequence
  Description of Artificial Sequence: Synthetic oligonucleotide
ccguccucuaauaacugaa

SEQ ID NO: 714746 - RNA, 19 nt, Artificial Sequence
  Description of Artificial Sequence: Synthetic oligonucleotide
gcucgagguuuuguggccc

SEQ ID NO: 714747 - RNA, 19 nt, Artificial Sequence
  Description of Artificial Sequence: Synthetic oligonucleotide
ucaacggggcguggagcuc

SEQ ID NO: 714748 - RNA, 19 nt, Artificial Sequence
  Description of Artificial Sequence: Synthetic oligonucleotide
caacaccuucuauaacccu

SEQ ID NO: 714749 - RNA, 19 nt, Artificial Sequence
  Description of Artificial Sequence: Synthetic oligonucleotide
cgaugauaacuuccggauc

SEQ ID NO: 714750 - RNA, 19 nt, Artificial Sequence
  Description of Artificial Sequence: Synthetic oligonucleotide
ggcaaagccgagaggaugu

SEQ ID NO: 714751 - RNA, 19 nt, Artificial Sequence
  Description of Artificial Sequence: Synthetic oligonucleotide
aggacgcgguaaccaccug

SEQ ID NO: 714752 - RNA, 19 nt, Artificial Sequence
  Description of Artificial Sequence: Synthetic oligonucleotide
uacccgagucucgcuggcu

SEQ ID NO: 714753 - RNA, 19 nt, Artificial Sequence
  Description of Artificial Sequence: Synthetic oligonucleotide
gacuuggguugagcagaac

SEQ ID NO: 714754 - RNA, 19 nt, Artificial Sequence
  Description of Artificial Sequence: Synthetic oligonucleotide
ccgucgccaaagccgaccc

SEQ ID NO: 714755 - RNA, 19 nt, Artificial Sequence
  Description of Artificial Sequence: Synthetic oligonucleotide
ggcaugguccgcagacgag

SEQ ID NO: 714756 - RNA, 19 nt, Artificial Sequence
  Description of Artificial Sequence: Synthetic oligonucleotide
aacgcccgucacaguguca

SEQ ID NO: 714757 - RNA, 19 nt, Artificial Sequence
  Description of Artificial Sequence: Synthetic oligonucleotide
ccucgaccaauagaaugac

SEQ ID NO: 714758 - RNA, 19 nt, Artificial Sequence
  Description of Artificial Sequence: Synthetic oligonucleotide
ccccucguuuguucacugg

SEQ ID NO: 714759 - RNA, 19 nt, Artificial Sequence
  Description of Artificial Sequence: Synthetic oligonucleotide
ggugacguccccgcauuuc

SEQ ID NO: 714760 - RNA, 19 nt, Artificial Sequence
  Description of Artificial Sequence: Synthetic oligonucleotide
gccuuagguuauaugcauc

SEQ ID NO: 714761 - RNA, 19 nt, Artificial Sequence
  Description of Artificial Sequence: Synthetic oligonucleotide
gcagacgagcgcucugaga

SEQ ID NO: 714762 - RNA, 19 nt, Artificial Sequence
  Description of Artificial Sequence: Synthetic oligonucleotide
cccacggaugucaacaagu

SEQ ID NO: 714763 - RNA, 19 nt, Artificial Sequence
  Description of Artificial Sequence: Synthetic oligonucleotide
cccuucauucucaauugua

SEQ ID NO: 714764 - RNA, 19 nt, Artificial Sequence
  Description of Artificial Sequence: Synthetic oligonucleotide
gaggaugccuuagguuaua

SEQ ID NO: 714765 - RNA, 19 nt, Artificial Sequence
  Description of Artificial Sequence: Synthetic oligonucleotide
ccugcguugcgguggcgac

SEQ ID NO: 714766 - RNA, 19 nt, Artificial Sequence
  Description of Artificial Sequence: Synthetic oligonucleotide
gauuaccgucaccuuucuu

SEQ ID NO: 714767 - RNA, 19 nt, Artificial Sequence
  Description of Artificial Sequence: Synthetic oligonucleotide
acgaaggaguggguccuuu

SEQ ID NO: 714768 - RNA, 19 nt, Artificial Sequence
  Description of Artificial Sequence: Synthetic oligonucleotide
ggagacucaugaugaacuu

SEQ ID NO: 714769 - RNA, 19 nt, Artificial Sequence
  Description of Artificial Sequence: Synthetic oligonucleotide
gcucuuuaaggacgcggua

SEQ ID NO: 714770 - RNA, 19 nt, Artificial Sequence
  Description of Artificial Sequence: Synthetic oligonucleotide
gacaccggguagggaaucu

SEQ ID NO: 714771 - RNA, 19 nt, Artificial Sequence
  Description of Artificial Sequence: Synthetic oligonucleotide
gaagaaccccucguuuguu

SEQ ID NO: 714772 - RNA, 19 nt, Artificial Sequence
  Description of Artificial Sequence: Synthetic oligonucleotide
ccguguaucagaugggcau

SEQ ID NO: 714773 - RNA, 19 nt, Artificial Sequence
  Description of Artificial Sequence: Synthetic oligonucleotide
caaguacccgagucucgcu

SEQ ID NO: 714774 - RNA, 19 nt, Artificial Sequence
  Description of Artificial Sequence: Synthetic oligonucleotide
aacggggcguggagcuccu

SEQ ID NO: 714775 - RNA, 19 nt, Artificial Sequence
  Description of Artificial Sequence: Synthetic oligonucleotide
cgucuguagcggaaaauaa

SEQ ID NO: 714776 - RNA, 19 nt, Artificial Sequence
  Description of Artificial Sequence: Synthetic oligonucleotide
ccggaucauucagagaaga

SEQ ID NO: 714777 - RNA, 19 nt, Artificial Sequence
  Description of Artificial Sequence: Synthetic oligonucleotide
auggcucacaaggcuucuu

SEQ ID NO: 714778 - RNA, 19 nt, Artificial Sequence
  Description of Artificial Sequence: Synthetic oligonucleotide
acgcuuccuucaggugguc

SEQ ID NO: 714779 - RNA, 19 nt, Artificial Sequence
  Description of Artificial Sequence: Synthetic oligonucleotide
gccguguaucagaugggca

SEQ ID NO: 714780 - RNA, 19 nt, Artificial Sequence
  Description of Artificial Sequence: Synthetic oligonucleotide
cccgucaguguuguuucug

SEQ ID NO: 714781 - RNA, 19 nt, Artificial Sequence
  Description of Artificial Sequence: Synthetic oligonucleotide
ggguagggaaucugcacuu

SEQ ID NO: 714782 - RNA, 19 nt, Artificial Sequence
  Description of Artificial Sequence: Synthetic oligonucleotide
acaggacccgucacacauu

SEQ ID NO: 714783 - RNA, 19 nt, Artificial Sequence
  Description of Artificial Sequence: Synthetic oligonucleotide
ccagcucuuuaaggacgcg

SEQ ID NO: 714784 - RNA, 19 nt, Artificial Sequence
  Description of Artificial Sequence: Synthetic oligonucleotide
cugcacuucggaucugcuu

SEQ ID NO: 714785 - RNA, 19 nt, Artificial Sequence
  Description of Artificial Sequence: Synthetic oligonucleotide
ggaagccgaugagaggcaa

SEQ ID NO: 714786 - RNA, 19 nt, Artificial Sequence
  Description of Artificial Sequence: Synthetic oligonucleotide
cguggagcuccuugguguc

SEQ ID NO: 714787 - RNA, 19 nt, Artificial Sequence
  Description of Artificial Sequence: Synthetic oligonucleotide
cggaucaacacuagagggu

SEQ ID NO: 714788 - RNA, 19 nt, Artificial Sequence
  Description of Artificial Sequence: Synthetic oligonucleotide
gcagaagcucgccaacgau

SEQ ID NO: 714789 - RNA, 19 nt, Artificial Sequence
  Description of Artificial Sequence: Synthetic oligonucleotide
gcccaacaggacccgucac

SEQ ID NO: 714790 - RNA, 19 nt, Artificial Sequence
  Description of Artificial Sequence: Synthetic oligonucleotide
ccaacgauucugucuggcu

SEQ ID NO: 714791 - RNA, 19 nt, Artificial Sequence
  Description of Artificial Sequence: Synthetic oligonucleotide
aggacccgucacacauucu

SEQ ID NO: 714792 - RNA, 19 nt, Artificial Sequence
  Description of Artificial Sequence: Synthetic oligonucleotide
ccgucaccuuucuuccauc

SEQ ID NO: 714793 - RNA, 19 nt, Artificial Sequence
  Description of Artificial Sequence: Synthetic oligonucleotide
ccgagucucgcuggcugag

SEQ ID NO: 714794 - RNA, 19 nt, Artificial Sequence
  Description of Artificial Sequence: Synthetic oligonucleotide
gccugcguugcgguggcga

SEQ ID NO: 714795 - RNA, 19 nt, Artificial Sequence
  Description of Artificial Sequence: Synthetic oligonucleotide
gccgacccaaggacaccag

SEQ ID NO: 714796 - RNA, 19 nt, Artificial Sequence
  Description of Artificial Sequence: Synthetic oligonucleotide
ccgacccaaggacaccaga

SEQ ID NO: 714797 - RNA, 19 nt, Artificial Sequence
  Description of Artificial Sequence: Synthetic oligonucleotide
cgccaacgauucugucugg

SEQ ID NO: 714798 - RNA, 19 nt, Artificial Sequence
  Description of Artificial Sequence: Synthetic oligonucleotide
cccuucaaugaaccagaua

SEQ ID NO: 714799 - RNA, 19 nt, Artificial Sequence
  Description of Artificial Sequence: Synthetic oligonucleotide
ccuuguacugaacgcccgu

SEQ ID NO: 714800 - RNA, 19 nt, Artificial Sequence
  Description of Artificial Sequence: Synthetic oligonucleotide
ggcgaacugggcgccgcuc

SEQ ID NO: 714801 - RNA, 19 nt, Artificial Sequence
  Description of Artificial Sequence: Synthetic oligonucleotide
ggcggcgaacugggcgccg

SEQ ID NO: 714802 - RNA, 19 nt, Artificial Sequence
  Description of Artificial Sequence: Synthetic oligonucleotide
cccauggcucugauuuaaa

SEQ ID NO: 714803 - RNA, 19 nt, Artificial Sequence
  Description of Artificial Sequence: Synthetic oligonucleotide
gcggcgaacugggcgccgc

SEQ ID NO: 714804 - RNA, 19 nt, Artificial Sequence
  Description of Artificial Sequence: Synthetic oligonucleotide
ggacaccagaccccacgau

SEQ ID NO: 714805 - RNA, 19 nt, Artificial Sequence
  Description of Artificial Sequence: Synthetic oligonucleotide
gcauuuccccacggauguc

SEQ ID NO: 714806 - RNA, 19 nt, Artificial Sequence
  Description of Artificial Sequence: Synthetic oligonucleotide
gguccgcagacgagcgcuc

SEQ ID NO: 714807 - RNA, 19 nt, Artificial Sequence
  Description of Artificial Sequence: Synthetic oligonucleotide
caccagaccccacgaugau

SEQ ID NO: 714808 - RNA, 19 nt, Artificial Sequence
  Description of Artificial Sequence: Synthetic oligonucleotide
ccgaggcccagcucuuuaa

SEQ ID NO: 714809 - RNA, 19 nt, Artificial Sequence
  Description of Artificial Sequence: Synthetic oligonucleotide
gggcguggagcuccuuggu

SEQ ID NO: 714810 - RNA, 19 nt, Artificial Sequence
  Description of Artificial Sequence: Synthetic oligonucleotide
cgcccgucacagugucacc

SEQ ID NO: 714811 - RNA, 19 nt, Artificial Sequence
  Description of Artificial Sequence: Synthetic oligonucleotide
cggaucauucagagaagau

SEQ ID NO: 714812 - RNA, 19 nt, Artificial Sequence
  Description of Artificial Sequence: Synthetic oligonucleotide
cccgucacagugucaccgu

SEQ ID NO: 714813 - RNA, 19 nt, Artificial Sequence
  Description of Artificial Sequence: Synthetic oligonucleotide
cgacaccggguagggaauc

SEQ ID NO: 714814 - RNA, 19 nt, Artificial Sequence
  Description of Artificial Sequence: Synthetic oligonucleotide
ccgacaccggguagggaau

SEQ ID NO: 714815 - RNA, 19 nt, Artificial Sequence
  Description of Artificial Sequence: Synthetic oligonucleotide
cgauuaccgucaccuuucu

SEQ ID NO: 714816 - RNA, 19 nt, Artificial Sequence
  Description of Artificial Sequence: Synthetic oligonucleotide
cguguaucagaugggcauu

SEQ ID NO: 714817 - RNA, 19 nt, Artificial Sequence
  Description of Artificial Sequence: Synthetic oligonucleotide
gggugacguccccgcauuu

SEQ ID NO: 714818 - RNA, 19 nt, Artificial Sequence
  Description of Artificial Sequence: Synthetic oligonucleotide
cgccgcucugcuggcgccc

SEQ ID NO: 714819 - RNA, 19 nt, Artificial Sequence
  Description of Artificial Sequence: Synthetic oligonucleotide
cgagucucgcuggcugaga

SEQ ID NO: 714820 - RNA, 19 nt, Artificial Sequence
  Description of Artificial Sequence: Synthetic oligonucleotide
acggggcguggagcuccuu

SEQ ID NO: 714821 - RNA, 19 nt, Artificial Sequence
  Description of Artificial Sequence: Synthetic oligonucleotide
cgagcgcucugagaugccu

SEQ ID NO: 714822 - RNA, 19 nt, Artificial Sequence
  Description of Artificial Sequence: Synthetic oligonucleotide
cuccgaggcccagcucuuu

SEQ ID NO: 714823 - RNA, 19 nt, Artificial Sequence
  Description of Artificial Sequence: Synthetic oligonucleotide
ccccgucaguguuguuucu

SEQ ID NO: 714824 - RNA, 19 nt, Artificial Sequence
  Description of Artificial Sequence: Synthetic oligonucleotide
cggcgaacugggcgccgcu

SEQ ID NO: 714825 - RNA, 19 nt, Artificial Sequence
  Description of Artificial Sequence: Synthetic oligonucleotide
aaucaggucagucaugugc

SEQ ID NO: 714826 - RNA, 19 nt, Artificial Sequence
  Description of Artificial Sequence: Synthetic oligonucleotide
aaugauaggagcuggauca

SEQ ID NO: 714827 - RNA, 19 nt, Artificial Sequence
  Description of Artificial Sequence: Synthetic oligonucleotide
acaucugagguacaaaggc

SEQ ID NO: 714828 - RNA, 19 nt, Artificial Sequence
  Description of Artificial Sequence: Synthetic oligonucleotide
uaguaucugacaaugugcg

SEQ ID NO: 714829 - RNA, 19 nt, Artificial Sequence
  Description of Artificial Sequence: Synthetic oligonucleotide
aauguggccacacgauucc

SEQ ID NO: 714830 - RNA, 19 nt, Artificial Sequence
  Description of Artificial Sequence: Synthetic oligonucleotide
uucgcgauuuccuugaucc

SEQ ID NO: 714831 - RNA, 19 nt, Artificial Sequence
  Description of Artificial Sequence: Synthetic oligonucleotide
auacacaucccucucaggg

SEQ ID NO: 714832 - RNA, 19 nt, Artificial Sequence
  Description of Artificial Sequence: Synthetic oligonucleotide
aaccacuuauuggagaccc

SEQ ID NO: 714833 - RNA, 19 nt, Artificial Sequence
  Description of Artificial Sequence: Synthetic oligonucleotide
uguaaacacagcaucagaa

SEQ ID NO: 714834 - RNA, 19 nt, Artificial Sequence
  Description of Artificial Sequence: Synthetic oligonucleotide
cuucauuguaggcugagcg

SEQ ID NO: 714835 - RNA, 19 nt, Artificial Sequence
  Description of Artificial Sequence: Synthetic oligonucleotide
caguaugauaauaaucucc

SEQ ID NO: 714836 - RNA, 19 nt, Artificial Sequence
  Description of Artificial Sequence: Synthetic oligonucleotide
aauugcagcucccaaguca

SEQ ID NO: 714837 - RNA, 19 nt, Artificial Sequence
  Description of Artificial Sequence: Synthetic oligonucleotide
aacgcuugaaagcaucuug

SEQ ID NO: 714838 - RNA, 19 nt, Artificial Sequence
  Description of Artificial Sequence: Synthetic oligonucleotide
ucugauugaacaaggauuu

SEQ ID NO: 714839 - RNA, 19 nt, Artificial Sequence
  Description of Artificial Sequence: Synthetic oligonucleotide
auacaaaggaaucuguggu

SEQ ID NO: 714840 - RNA, 19 nt, Artificial Sequence
  Description of Artificial Sequence: Synthetic oligonucleotide
ucagucaugugcccaauag

SEQ ID NO: 714841 - RNA, 19 nt, Artificial Sequence
  Description of Artificial Sequence: Synthetic oligonucleotide
ucaugugcccaauagaggu

SEQ ID NO: 714842 - RNA, 19 nt, Artificial Sequence
  Description of Artificial Sequence: Synthetic oligonucleotide
aaucaacuucugucguucc

SEQ ID NO: 714843 - RNA, 19 nt, Artificial Sequence
  Description of Artificial Sequence: Synthetic oligonucleotide
cuuauaggcauucacagga

SEQ ID NO: 714844 - RNA, 19 nt, Artificial Sequence
  Description of Artificial Sequence: Synthetic oligonucleotide
acuaaaacaucucccaccu

SEQ ID NO: 714845 - RNA, 19 nt, Artificial Sequence
  Description of Artificial Sequence: Synthetic oligonucleotide
cuagagaagucaaagugug

SEQ ID NO: 714846 - RNA, 19 nt, Artificial Sequence
  Description of Artificial Sequence: Synthetic oligonucleotide
aaaaggacgucaaucaacu

SEQ ID NO: 714847 - RNA, 19 nt, Artificial Sequence
  Description of Artificial Sequence: Synthetic oligonucleotide
gauaugcugcauccgacgg

SEQ ID NO: 714848 - RNA, 19 nt, Artificial Sequence
  Description of Artificial Sequence: Synthetic oligonucleotide
guaucugacaaugugcggg

SEQ ID NO: 714849 - RNA, 19 nt, Artificial Sequence
  Description of Artificial Sequence: Synthetic oligonucleotide
ucgauagucaccuucccca

SEQ ID NO: 714850 - RNA, 19 nt, Artificial Sequence
  Description of Artificial Sequence: Synthetic oligonucleotide
agccauaccaaugcuaccc

SEQ ID NO: 714851 - RNA, 19 nt, Artificial Sequence
  Description of Artificial Sequence: Synthetic oligonucleotide
augacuugcugguuagagc

SEQ ID NO: 714852 - RNA, 19 nt, Artificial Sequence
  Description of Artificial Sequence: Synthetic oligonucleotide
acaguaugauaauaaucuc

SEQ ID NO: 714853 - RNA, 19 nt, Artificial Sequence
  Description of Artificial Sequence: Synthetic oligonucleotide
agggagguaguccacgggc

SEQ ID NO: 714854 - RNA, 19 nt, Artificial Sequence
  Description of Artificial Sequence: Synthetic oligonucleotide
aacagucgcucaaaguacc

SEQ ID NO: 714855 - RNA, 19 nt, Artificial Sequence
  Description of Artificial Sequence: Synthetic oligonucleotide
aguaugauaauaaucuccu

SEQ ID NO: 714856 - RNA, 19 nt, Artificial Sequence
  Description of Artificial Sequence: Synthetic oligonucleotide
cucaucagcgcucuggcgg

SEQ ID NO: 714857 - RNA, 19 nt, Artificial Sequence
  Description of Artificial Sequence: Synthetic oligonucleotide
agaagguuguaccagaaua

SEQ ID NO: 714858 - RNA, 19 nt, Artificial Sequence
  Description of Artificial Sequence: Synthetic oligonucleotide
cauacucucucaaauucag

SEQ ID NO: 714859 - RNA, 19 nt, Artificial Sequence
  Description of Artificial Sequence: Synthetic oligonucleotide
ugggucaagagagagcagg

SEQ ID NO: 714860 - RNA, 19 nt, Artificial Sequence
  Description of Artificial Sequence: Synthetic oligonucleotide
uuugacgcccuccccacgg

SEQ ID NO: 714861 - RNA, 19 nt, Artificial Sequence
  Description of Artificial Sequence: Synthetic oligonucleotide
augguaccuacagaaaagc

SEQ ID NO: 714862 - RNA, 19 nt, Artificial Sequence
  Description of Artificial Sequence: Synthetic oligonucleotide
auagucaccuuccccacuc

SEQ ID NO: 714863 - RNA, 19 nt, Artificial Sequence
  Description of Artificial Sequence: Synthetic oligonucleotide
agucaugugcccaauagag

SEQ ID NO: 714864 - RNA, 19 nt, Artificial Sequence
  Description of Artificial Sequence: Synthetic oligonucleotide
gaugguaccuacagaaaag

SEQ ID NO: 714865 - RNA, 19 nt, Artificial Sequence
  Description of Artificial Sequence: Synthetic oligonucleotide
ucaugaucggaaagggcag

SEQ ID NO: 714866 - RNA, 19 nt, Artificial Sequence
  Description of Artificial Sequence: Synthetic oligonucleotide
uggaucauacaaaggaauc

SEQ ID NO: 714867 - RNA, 19 nt, Artificial Sequence
  Description of Artificial Sequence: Synthetic oligonucleotide
uauaggcauucacaggaug

SEQ ID NO: 714868 - RNA, 19 nt, Artificial Sequence
  Description of Artificial Sequence: Synthetic oligonucleotide
uuggcgacaaaaccugcag

SEQ ID NO: 714869 - RNA, 19 nt, Artificial Sequence
  Description of Artificial Sequence: Synthetic oligonucleotide
ugucuugggaucacggaca

SEQ ID NO: 714870 - RNA, 19 nt, Artificial Sequence
  Description of Artificial Sequence: Synthetic oligonucleotide
caaugcuacccuuggagcc

SEQ ID NO: 714871 - RNA, 19 nt, Artificial Sequence
  Description of Artificial Sequence: Synthetic oligonucleotide
gaugacuugcugguuagag

SEQ ID NO: 714872 - RNA, 19 nt, Artificial Sequence
  Description of Artificial Sequence: Synthetic oligonucleotide
gaaaaggacgucaaucaac

SEQ ID NO: 714873 - RNA, 19 nt, Artificial Sequence
  Description of Artificial Sequence: Synthetic oligonucleotide
uagagcuuccaucuugcug

SEQ ID NO: 714874 - RNA, 19 nt, Artificial Sequence
  Description of Artificial Sequence: Synthetic oligonucleotide
uucgauagucaccuucccc

SEQ ID NO: 714875 - RNA, 19 nt, Artificial Sequence
  Description of Artificial Sequence: Synthetic oligonucleotide
agagaagucaaaguguggu

SEQ ID NO: 714876 - RNA, 19 nt, Artificial Sequence
  Description of Artificial Sequence: Synthetic oligonucleotide
auuggagacccacuugcag

SEQ ID NO: 714877 - RNA, 19 nt, Artificial Sequence
  Description of Artificial Sequence: Synthetic oligonucleotide
gaagguuguaccagaauac

SEQ ID NO: 714878 - RNA, 19 nt, Artificial Sequence
  Description of Artificial Sequence: Synthetic oligonucleotide
ucuaacagucgcucaaagu

SEQ ID NO: 714879 - RNA, 19 nt, Artificial Sequence
  Description of Artificial Sequence: Synthetic oligonucleotide
uaaacgcuugaaagcaucu

SEQ ID NO: 714880 - RNA, 19 nt, Artificial Sequence
  Description of Artificial Sequence: Synthetic oligonucleotide
ucucguucgauagucaccu

SEQ ID NO: 714881 - RNA, 19 nt, Artificial Sequence
  Description of Artificial Sequence: Synthetic oligonucleotide
cuuaaucuuggagagcuug

SEQ ID NO: 714882 - RNA, 19 nt, Artificial Sequence
  Description of Artificial Sequence: Synthetic oligonucleotide
uaucugacaaugugcgggc

SEQ ID NO: 714883 - RNA, 19 nt, Artificial Sequence
  Description of Artificial Sequence: Synthetic oligonucleotide
aggacauacucucucaaau

SEQ ID NO: 714884 - RNA, 19 nt, Artificial Sequence
  Description of Artificial Sequence: Synthetic oligonucleotide
agugaggacaccugucuug

SEQ ID NO: 714885 - RNA, 19 nt, Artificial Sequence
  Description of Artificial Sequence: Synthetic oligonucleotide
gauaggagcuggaucauac

SEQ ID NO: 714886 - RNA, 19 nt, Artificial Sequence
  Description of Artificial Sequence: Synthetic oligonucleotide
ugcgaguuugggcuucgcg

SEQ ID NO: 714887 - RNA, 19 nt, Artificial Sequence
  Description of Artificial Sequence: Synthetic oligonucleotide
uccgcaaggauguacuccu

SEQ ID NO: 714888 - RNA, 19 nt, Artificial Sequence
  Description of Artificial Sequence: Synthetic oligonucleotide
ucuugcucaucgcuccuag

SEQ ID NO: 714889 - RNA, 19 nt, Artificial Sequence
  Description of Artificial Sequence: Synthetic oligonucleotide
guaccuacagaaaagcuuc

SEQ ID NO: 714890 - RNA, 19 nt, Artificial Sequence
  Description of Artificial Sequence: Synthetic oligonucleotide
acgcuugaaagcaucuugc

SEQ ID NO: 714891 - RNA, 19 nt, Artificial Sequence
  Description of Artificial Sequence: Synthetic oligonucleotide
aagguuguaccagaauaca

SEQ ID NO: 714892 - RNA, 19 nt, Artificial Sequence
  Description of Artificial Sequence: Synthetic oligonucleotide
uacaaaggaaucugugguc

SEQ ID NO: 714893 - RNA, 19 nt, Artificial Sequence
  Description of Artificial Sequence: Synthetic oligonucleotide
ucuuucauggaaccacuua

SEQ ID NO: 714894 - RNA, 19 nt, Artificial Sequence
  Description of Artificial Sequence: Synthetic oligonucleotide
ucugacaaugugcgggcug

SEQ ID NO: 714895 - RNA, 19 nt, Artificial Sequence
  Description of Artificial Sequence: Synthetic oligonucleotide
aagggguagagcagaaaag

SEQ ID NO: 714896 - RNA, 19 nt, Artificial Sequence
  Description of Artificial Sequence: Synthetic oligonucleotide
cuugggucaagagagagca

SEQ ID NO: 714897 - RNA, 19 nt, Artificial Sequence
  Description of Artificial Sequence: Synthetic oligonucleotide
uaguuugcgaccugcaaua

SEQ ID NO: 714898 - RNA, 19 nt, Artificial Sequence
  Description of Artificial Sequence: Synthetic oligonucleotide
acuuauuggagacccacuu

SEQ ID NO: 714899 - RNA, 19 nt, Artificial Sequence
  Description of Artificial Sequence: Synthetic oligonucleotide
acuuuguuccuggaaguuc

SEQ ID NO: 714900 - RNA, 19 nt, Artificial Sequence
  Description of Artificial Sequence: Synthetic oligonucleotide
ugucaacccugugauaugc

SEQ ID NO: 714901 - RNA, 19 nt, Artificial Sequence
  Description of Artificial Sequence: Synthetic oligonucleotide
cucucucaaauucagacaa

SEQ ID NO: 714902 - RNA, 19 nt, Artificial Sequence
  Description of Artificial Sequence: Synthetic oligonucleotide
ugucguuccacaaggccuc

SEQ ID NO: 714903 - RNA, 19 nt, Artificial Sequence
  Description of Artificial Sequence: Synthetic oligonucleotide
caaugauaggagcuggauc

SEQ ID NO: 714904 - RNA, 19 nt, Artificial Sequence
  Description of Artificial Sequence: Synthetic oligonucleotide
agucgcucaaaguaccgca

SEQ ID NO: 714905 - RNA, 19 nt, Artificial Sequence
  Description of Artificial Sequence: Synthetic oligonucleotide
ucguucgauagucaccuuc

SEQ ID NO: 714906 - RNA, 19 nt, Artificial Sequence
  Description of Artificial Sequence: Synthetic oligonucleotide
ugaaacaucugagguacaa

SEQ ID NO: 714907 - RNA, 19 nt, Artificial Sequence
  Description of Artificial Sequence: Synthetic oligonucleotide
uccucuaacagucgcucaa

SEQ ID NO: 714908 - RNA, 19 nt, Artificial Sequence
  Description of Artificial Sequence: Synthetic oligonucleotide
aaugugcgggcugucccac

SEQ ID NO: 714909 - RNA, 19 nt, Artificial Sequence
  Description of Artificial Sequence: Synthetic oligonucleotide
ugcgaccugcaauaguucu

SEQ ID NO: 714910 - RNA, 19 nt, Artificial Sequence
  Description of Artificial Sequence: Synthetic oligonucleotide
agcauagcucagguagucc

SEQ ID NO: 714911 - RNA, 19 nt, Artificial Sequence
  Description of Artificial Sequence: Synthetic oligonucleotide
aaacacagcaucagaacuu

SEQ ID NO: 714912 - RNA, 19 nt, Artificial Sequence
  Description of Artificial Sequence: Synthetic oligonucleotide
guaacccucagggucagcc

SEQ ID NO: 714913 - RNA, 19 nt, Artificial Sequence
  Description of Artificial Sequence: Synthetic oligonucleotide
uggcgacaaaaccugcagc

SEQ ID NO: 714914 - RNA, 19 nt, Artificial Sequence
  Description of Artificial Sequence: Synthetic oligonucleotide
uuccccucuggaaauugug

SEQ ID NO: 714915 - RNA, 19 nt, Artificial Sequence
  Description of Artificial Sequence: Synthetic oligonucleotide
ucaucgcuccuagagaagu

SEQ ID NO: 714916 - RNA, 19 nt, Artificial Sequence
  Description of Artificial Sequence: Synthetic oligonucleotide
gguuagagcuuccaucuug

SEQ ID NO: 714917 - RNA, 19 nt, Artificial Sequence
  Description of Artificial Sequence: Synthetic oligonucleotide
gaauguggccacacgauuc

SEQ ID NO: 714918 - RNA, 19 nt, Artificial Sequence
  Description of Artificial Sequence: Synthetic oligonucleotide
uguagguguccugaagucu

SEQ ID NO: 714919 - RNA, 19 nt, Artificial Sequence
  Description of Artificial Sequence: Synthetic oligonucleotide
gcuuauaggcauucacagg

SEQ ID NO: 714920 - RNA, 19 nt, Artificial Sequence
  Description of Artificial Sequence: Synthetic oligonucleotide
cgaacuaggugcuacacag

SEQ ID NO: 714921 - RNA, 19 nt, Artificial Sequence
  Description of Artificial Sequence: Synthetic oligonucleotide
aauugugucuggguccagu

SEQ ID NO: 714922 - RNA, 19 nt, Artificial Sequence
  Description of Artificial Sequence: Synthetic oligonucleotide
gaaauugugucugggucca

SEQ ID NO: 714923 - RNA, 19 nt, Artificial Sequence
  Description of Artificial Sequence: Synthetic oligonucleotide
gauaauaaucuccuucauu

SEQ ID NO: 714924 - RNA, 19 nt, Artificial Sequence
  Description of Artificial Sequence: Synthetic oligonucleotide
uuauaggcauucacaggau

SEQ ID NO: 714925 - RNA, 19 nt, Artificial Sequence
  Description of Artificial Sequence: Synthetic oligonucleotide
ucauccgacaucacaucau

SEQ ID NO: 714926 - RNA, 19 nt, Artificial Sequence
  Description of Artificial Sequence: Synthetic oligonucleotide
gucaugugcccaauagagg

SEQ ID NO: 714927 - RNA, 19 nt, Artificial Sequence
  Description of Artificial Sequence: Synthetic oligonucleotide
cauccgacgguugacucgg

SEQ ID NO: 714928 - RNA, 19 nt, Artificial Sequence
  Description of Artificial Sequence: Synthetic oligonucleotide
caugucucguucgauaguc

SEQ ID NO: 714929 - RNA, 19 nt, Artificial Sequence
  Description of Artificial Sequence: Synthetic oligonucleotide
gaaucuguggucacacuga

SEQ ID NO: 714930 - RNA, 19 nt, Artificial Sequence
  Description of Artificial Sequence: Synthetic oligonucleotide
agucccuaaacgcuugaaa

SEQ ID NO: 714931 - RNA, 19 nt, Artificial Sequence
  Description of Artificial Sequence: Synthetic oligonucleotide
cauacacaucccucucagg

SEQ ID NO: 714932 - RNA, 19 nt, Artificial Sequence
  Description of Artificial Sequence: Synthetic oligonucleotide
agcuuuuggaaacucugua

SEQ ID NO: 714933 - RNA, 19 nt, Artificial Sequence
  Description of Artificial Sequence: Synthetic oligonucleotide
caaucaacuucugucguuc

SEQ ID NO: 714934 - RNA, 19 nt, Artificial Sequence
  Description of Artificial Sequence: Synthetic oligonucleotide
cgucaaucaacuucugucg

SEQ ID NO: 714935 - RNA, 19 nt, Artificial Sequence
  Description of Artificial Sequence: Synthetic oligonucleotide
cauaaaucaggucagucau

SEQ ID NO: 714936 - RNA, 19 nt, Artificial Sequence
  Description of Artificial Sequence: Synthetic oligonucleotide
cagcuuauaggcauucaca

SEQ ID NO: 714937 - RNA, 19 nt, Artificial Sequence
  Description of Artificial Sequence: Synthetic oligonucleotide
ugguacuuuguuccuggaa

SEQ ID NO: 714938 - RNA, 19 nt, Artificial Sequence
  Description of Artificial Sequence: Synthetic oligonucleotide
cucuaacagucgcucaaag

SEQ ID NO: 714939 - RNA, 19 nt, Artificial Sequence
  Description of Artificial Sequence: Synthetic oligonucleotide
acggacaguggcucuugcg

SEQ ID NO: 714940 - RNA, 19 nt, Artificial Sequence
  Description of Artificial Sequence: Synthetic oligonucleotide
cauuguaggcugagcggcc

SEQ ID NO: 714941 - RNA, 19 nt, Artificial Sequence
  Description of Artificial Sequence: Synthetic oligonucleotide
ucaaucaacuucugucguu

SEQ ID NO: 714942 - RNA, 19 nt, Artificial Sequence
  Description of Artificial Sequence: Synthetic oligonucleotide
gagagguuggcgacaaaac

SEQ ID NO: 714943 - RNA, 19 nt, Artificial Sequence
  Description of Artificial Sequence: Synthetic oligonucleotide
ccaaauugcagcucccaag

SEQ ID NO: 714944 - RNA, 19 nt, Artificial Sequence
  Description of Artificial Sequence: Synthetic oligonucleotide
agacugaacgagguccuuc

SEQ ID NO: 714945 - RNA, 19 nt, Artificial Sequence
  Description of Artificial Sequence: Synthetic oligonucleotide
auaugcugcauccgacggu

SEQ ID NO: 714946 - RNA, 19 nt, Artificial Sequence
  Description of Artificial Sequence: Synthetic oligonucleotide
accgaacuaggugcuacac

SEQ ID NO: 714947 - RNA, 19 nt, Artificial Sequence
  Description of Artificial Sequence: Synthetic oligonucleotide
ucguacugcccucccauuc

SEQ ID NO: 714948 - RNA, 19 nt, Artificial Sequence
  Description of Artificial Sequence: Synthetic oligonucleotide
uaugcugcauccgacgguu

SEQ ID NO: 714949 - RNA, 19 nt, Artificial Sequence
  Description of Artificial Sequence: Synthetic oligonucleotide
acugaacgagguccuucuc

SEQ ID NO: 714950 - RNA, 19 nt, Artificial Sequence
  Description of Artificial Sequence: Synthetic oligonucleotide
caugugcccaauagaggug

SEQ ID NO: 714951 - RNA, 19 nt, Artificial Sequence
  Description of Artificial Sequence: Synthetic oligonucleotide
caagagagagcaggcggcg

SEQ ID NO: 714952 - RNA, 19 nt, Artificial Sequence
  Description of Artificial Sequence: Synthetic oligonucleotide
guucaaccgcuucaccagc

SEQ ID NO: 714953 - RNA, 19 nt, Artificial Sequence
  Description of Artificial Sequence: Synthetic oligonucleotide
gucuugggaucacggacag

SEQ ID NO: 714954 - RNA, 19 nt, Artificial Sequence
  Description of Artificial Sequence: Synthetic oligonucleotide
aggucacccaggacuaggc

SEQ ID NO: 714955 - RNA, 19 nt, Artificial Sequence
  Description of Artificial Sequence: Synthetic oligonucleotide
uaccuacagaaaagcuucu

SEQ ID NO: 714956 - RNA, 19 nt, Artificial Sequence
  Description of Artificial Sequence: Synthetic oligonucleotide
cuuucauggaaccacuuau

SEQ ID NO: 714957 - RNA, 19 nt, Artificial Sequence
  Description of Artificial Sequence: Synthetic oligonucleotide
gagguuggcgacaaaaccu

SEQ ID NO: 714958 - RNA, 19 nt, Artificial Sequence
  Description of Artificial Sequence: Synthetic oligonucleotide
guagguguccugaagucuc

SEQ ID NO: 714959 - RNA, 19 nt, Artificial Sequence
  Description of Artificial Sequence: Synthetic oligonucleotide
caaauugcagcucccaagu

SEQ ID NO: 714960 - RNA, 19 nt, Artificial Sequence
  Description of Artificial Sequence: Synthetic oligonucleotide
guucgauagucaccuuccc

SEQ ID NO: 714961 - RNA, 19 nt, Artificial Sequence
  Description of Artificial Sequence: Synthetic oligonucleotide
ccugguacuuuguuccugg

SEQ ID NO: 714962 - RNA, 19 nt, Artificial Sequence
  Description of Artificial Sequence: Synthetic oligonucleotide
gaaccacuuauuggagacc

SEQ ID NO: 714963 - RNA, 19 nt, Artificial Sequence
  Description of Artificial Sequence: Synthetic oligonucleotide
auaaaucaggucagucaug

SEQ ID NO: 714964 - RNA, 19 nt, Artificial Sequence
  Description of Artificial Sequence: Synthetic oligonucleotide
uuccucuaacagucgcuca

SEQ ID NO: 714965 - RNA, 19 nt, Artificial Sequence
  Description of Artificial Sequence: Synthetic oligonucleotide
aaaggacgucaaucaacuu

SEQ ID NO: 714966 - RNA, 19 nt, Artificial Sequence
  Description of Artificial Sequence: Synthetic oligonucleotide
agguuggcgacaaaaccug

SEQ ID NO: 714967 - RNA, 19 nt, Artificial Sequence
  Description of Artificial Sequence: Synthetic oligonucleotide
cacaaggccucaagaacuc

SEQ ID NO: 714968 - RNA, 19 nt, Artificial Sequence
  Description of Artificial Sequence: Synthetic oligonucleotide
uaccgcagauucccgccag

SEQ ID NO: 714969 - RNA, 19 nt, Artificial Sequence
  Description of Artificial Sequence: Synthetic oligonucleotide
accgcagauucccgccagc

SEQ ID NO: 714970 - RNA, 19 nt, Artificial Sequence
  Description of Artificial Sequence: Synthetic oligonucleotide
cucagggagguaguccacg

SEQ ID NO: 714971 - RNA, 19 nt, Artificial Sequence
  Description of Artificial Sequence: Synthetic oligonucleotide
uugggucaagagagagcag

SEQ ID NO: 714972 - RNA, 19 nt, Artificial Sequence
  Description of Artificial Sequence: Synthetic oligonucleotide
ugugguucguacugcccuc

SEQ ID NO: 714973 - RNA, 19 nt, Artificial Sequence
  Description of Artificial Sequence: Synthetic oligonucleotide
ccuacagaaaagcuucuuc

SEQ ID NO: 714974 - RNA, 19 nt, Artificial Sequence
  Description of Artificial Sequence: Synthetic oligonucleotide
aucgcuccuagagaaguca

SEQ ID NO: 714975 - RNA, 19 nt, Artificial Sequence
  Description of Artificial Sequence: Synthetic oligonucleotide
uccgacgguugacucgggc

SEQ ID NO: 714976 - RNA, 19 nt, Artificial Sequence
  Description of Artificial Sequence: Synthetic oligonucleotide
acagucgcucaaaguaccg

SEQ ID NO: 714977 - RNA, 19 nt, Artificial Sequence
  Description of Artificial Sequence: Synthetic oligonucleotide
ggcucuugcgaguuugggc

SEQ ID NO: 714978 - RNA, 19 nt, Artificial Sequence
  Description of Artificial Sequence: Synthetic oligonucleotide
aaacgcuugaaagcaucuu

SEQ ID NO: 714979 - RNA, 19 nt, Artificial Sequence
  Description of Artificial Sequence: Synthetic oligonucleotide
ucauaacaacaaacuugua

SEQ ID NO: 714980 - RNA, 19 nt, Artificial Sequence
  Description of Artificial Sequence: Synthetic oligonucleotide
ggcgaugaggagcuguggc

SEQ ID NO: 714981 - RNA, 19 nt, Artificial Sequence
  Description of Artificial Sequence: Synthetic oligonucleotide
gcucaggacaccaaaccag

SEQ ID NO: 714982 - RNA, 19 nt, Artificial Sequence
  Description of Artificial Sequence: Synthetic oligonucleotide
agcuucuacaucacucaug

SEQ ID NO: 714983 - RNA, 19 nt, Artificial Sequence
  Description of Artificial Sequence: Synthetic oligonucleotide
agugcaggccagucugugu

SEQ ID NO: 714984 - RNA, 19 nt, Artificial Sequence
  Description of Artificial Sequence: Synthetic oligonucleotide
gacugaacgagguccuucu

SEQ ID NO: 714985 - RNA, 19 nt, Artificial Sequence
  Description of Artificial Sequence: Synthetic oligonucleotide
cuaaaacaucucccaccug

SEQ ID NO: 714986 - RNA, 19 nt, Artificial Sequence
  Description of Artificial Sequence: Synthetic oligonucleotide
cguucgauagucaccuucc

SEQ ID NO: 714987 - RNA, 19 nt, Artificial Sequence
  Description of Artificial Sequence: Synthetic oligonucleotide
aguuugcgaccugcaauag

SEQ ID NO: 714988 - RNA, 19 nt, Artificial Sequence
  Description of Artificial Sequence: Synthetic oligonucleotide
ucgcuccuagagaagucaa

SEQ ID NO: 714989 - RNA, 19 nt, Artificial Sequence
  Description of Artificial Sequence: Synthetic oligonucleotide
guuugacgcccuccccacg

SEQ ID NO: 714990 - RNA, 19 nt, Artificial Sequence
  Description of Artificial Sequence: Synthetic oligonucleotide
gcauccgacgguugacucg

SEQ ID NO: 714991 - RNA, 19 nt, Artificial Sequence
  Description of Artificial Sequence: Synthetic oligonucleotide
ccagcuuauaggcauucac

SEQ ID NO: 714992 - RNA, 19 nt, Artificial Sequence
  Description of Artificial Sequence: Synthetic oligonucleotide
gucgcucaaaguaccgcag

SEQ ID NO: 714993 - RNA, 19 nt, Artificial Sequence
  Description of Artificial Sequence: Synthetic oligonucleotide
gaauacagcugugcccuuc

SEQ ID NO: 714994 - RNA, 19 nt, Artificial Sequence
  Description of Artificial Sequence: Synthetic oligonucleotide
cacugaacuugaagaugac

SEQ ID NO: 714995 - RNA, 19 nt, Artificial Sequence
  Description of Artificial Sequence: Synthetic oligonucleotide
cagucaugugcccaauaga

SEQ ID NO: 714996 - RNA, 19 nt, Artificial Sequence
  Description of Artificial Sequence: Synthetic oligonucleotide
aaauugugucuggguccag

SEQ ID NO: 714997 - RNA, 19 nt, Artificial Sequence
  Description of Artificial Sequence: Synthetic oligonucleotide
acgauucccagucccuaaa

SEQ ID NO: 714998 - RNA, 19 nt, Artificial Sequence
  Description of Artificial Sequence: Synthetic oligonucleotide
cagucgcucaaaguaccgc

SEQ ID NO: 714999 - RNA, 19 nt, Artificial Sequence
  Description of Artificial Sequence: Synthetic oligonucleotide
uccacgggccucucauaca

SEQ ID NO: 715000 - RNA, 19 nt, Artificial Sequence
  Description of Artificial Sequence: Synthetic oligonucleotide
gcucuugcgaguuugggcu

SEQ ID NO: 715001 - RNA, 19 nt, Artificial Sequence
  Description of Artificial Sequence: Synthetic oligonucleotide
ggcgacaaaaccugcagcu

SEQ ID NO: 715002 - RNA, 19 nt, Artificial Sequence
  Description of Artificial Sequence: Synthetic oligonucleotide
cuucgcgauuuccuugauc

SEQ ID NO: 715003 - RNA, 19 nt, Artificial Sequence
  Description of Artificial Sequence: Synthetic oligonucleotide
guuggcgacaaaaccugca

SEQ ID NO: 715004 - RNA, 19 nt, Artificial Sequence
  Description of Artificial Sequence: Synthetic oligonucleotide
ucggaaagggcaguaucuu

SEQ ID NO: 715005 - RNA, 19 nt, Artificial Sequence
  Description of Artificial Sequence: Synthetic oligonucleotide
gucaaucaacuucugucgu

SEQ ID NO: 715006 - RNA, 19 nt, Artificial Sequence
  Description of Artificial Sequence: Synthetic oligonucleotide
agaauucugccugcaccca

SEQ ID NO: 715007 - RNA, 19 nt, Artificial Sequence
  Description of Artificial Sequence: Synthetic oligonucleotide
ucgcgauuuccuugauccu

SEQ ID NO: 715008 - RNA, 19 nt, Artificial Sequence
  Description of Artificial Sequence: Synthetic oligonucleotide
caucgcuccuagagaaguc

SEQ ID NO: 715009 - RNA, 19 nt, Artificial Sequence
  Description of Artificial Sequence: Synthetic oligonucleotide
accaauaccuggagcuuca

SEQ ID NO: 715010 - RNA, 19 nt, Artificial Sequence
  Description of Artificial Sequence: Synthetic oligonucleotide
gcaggacaaggucacccag

SEQ ID NO: 715011 - RNA, 19 nt, Artificial Sequence
  Description of Artificial Sequence: Synthetic oligonucleotide
cucuggcggcuccagacuc

SEQ ID NO: 715012 - RNA, 19 nt, Artificial Sequence
  Description of Artificial Sequence: Synthetic oligonucleotide
ggcuugggucaagagagag

SEQ ID NO: 715013 - RNA, 19 nt, Artificial Sequence
  Description of Artificial Sequence: Synthetic oligonucleotide
gauucccgccagcucguuc

SEQ ID NO: 715014 - RNA, 19 nt, Artificial Sequence
  Description of Artificial Sequence: Synthetic oligonucleotide
ccucucauacacguuuucc

SEQ ID NO: 715015 - RNA, 19 nt, Artificial Sequence
  Description of Artificial Sequence: Synthetic oligonucleotide
uuccuccgcaaggauguac

SEQ ID NO: 715016 - RNA, 19 nt, Artificial Sequence
  Description of Artificial Sequence: Synthetic oligonucleotide
ugugcccaauagaggugaa

SEQ ID NO: 715017 - RNA, 19 nt, Artificial Sequence
  Description of Artificial Sequence: Synthetic oligonucleotide
ucuugcgaguuugggcuuc

SEQ ID NO: 715018 - RNA, 19 nt, Artificial Sequence
  Description of Artificial Sequence: Synthetic oligonucleotide
acccuguuaccaugauggu

SEQ ID NO: 715019 - RNA, 19 nt, Artificial Sequence
  Description of Artificial Sequence: Synthetic oligonucleotide
ucacggacaguggcucuug

SEQ ID NO: 715020 - RNA, 19 nt, Artificial Sequence
  Description of Artificial Sequence: Synthetic oligonucleotide
cauccgacaucacaucaua

SEQ ID NO: 715021 - RNA, 19 nt, Artificial Sequence
  Description of Artificial Sequence: Synthetic oligonucleotide
caggacauacucucucaaa

SEQ ID NO: 715022 - RNA, 19 nt, Artificial Sequence
  Description of Artificial Sequence: Synthetic oligonucleotide
ugggucgcuaguccagcuu

SEQ ID NO: 715023 - RNA, 19 nt, Artificial Sequence
  Description of Artificial Sequence: Synthetic oligonucleotide
ccgacgguugacucgggcc

SEQ ID NO: 715024 - RNA, 19 nt, Artificial Sequence
  Description of Artificial Sequence: Synthetic oligonucleotide
cacgggccucucauacacg

SEQ ID NO: 715025 - RNA, 19 nt, Artificial Sequence
  Description of Artificial Sequence: Synthetic oligonucleotide
ccacacgauucccaguccc

SEQ ID NO: 715026 - RNA, 19 nt, Artificial Sequence
  Description of Artificial Sequence: Synthetic oligonucleotide
ggccucaagaacucuuguc

SEQ ID NO: 715027 - RNA, 19 nt, Artificial Sequence
  Description of Artificial Sequence: Synthetic oligonucleotide
gacaguggcucuugcgagu

SEQ ID NO: 715028 - RNA, 19 nt, Artificial Sequence
  Description of Artificial Sequence: Synthetic oligonucleotide
ggcuucgcgauuuccuuga

SEQ ID NO: 715029 - RNA, 19 nt, Artificial Sequence
  Description of Artificial Sequence: Synthetic oligonucleotide
gagcuuuuggaaacucugu

SEQ ID NO: 715030 - RNA, 19 nt, Artificial Sequence
  Description of Artificial Sequence: Synthetic oligonucleotide
ccacuuauuggagacccac

SEQ ID NO: 715031 - RNA, 19 nt, Artificial Sequence
  Description of Artificial Sequence: Synthetic oligonucleotide
uggucacacugaacuugaa

SEQ ID NO: 715032 - RNA, 19 nt, Artificial Sequence
  Description of Artificial Sequence: Synthetic oligonucleotide
guucguacugcccucccau

SEQ ID NO: 715033 - RNA, 19 nt, Artificial Sequence
  Description of Artificial Sequence: Synthetic oligonucleotide
gacccacuugcagcccacg

SEQ ID NO: 715034 - RNA, 19 nt, Artificial Sequence
  Description of Artificial Sequence: Synthetic oligonucleotide
ggcugagcggcccaugcca

SEQ ID NO: 715035 - RNA, 19 nt, Artificial Sequence
  Description of Artificial Sequence: Synthetic oligonucleotide
gggucgcuaguccagcuuc

SEQ ID NO: 715036 - RNA, 19 nt, Artificial Sequence
  Description of Artificial Sequence: Synthetic oligonucleotide
gucagccgaugacuugcug

SEQ ID NO: 715037 - RNA, 19 nt, Artificial Sequence
  Description of Artificial Sequence: Synthetic oligonucleotide
ccucuggaaauugugucug

SEQ ID NO: 715038 - RNA, 19 nt, Artificial Sequence
  Description of Artificial Sequence: Synthetic oligonucleotide
cccuaaacgcuugaaagca

SEQ ID NO: 715039 - RNA, 19 nt, Artificial Sequence
  Description of Artificial Sequence: Synthetic oligonucleotide
gguaccuacagaaaagcuu

SEQ ID NO: 715040 - RNA, 19 nt, Artificial Sequence
  Description of Artificial Sequence: Synthetic oligonucleotide
cacggacaguggcucuugc

SEQ ID NO: 715041 - RNA, 19 nt, Artificial Sequence
  Description of Artificial Sequence: Synthetic oligonucleotide
guaccgcagauucccgcca

SEQ ID NO: 715042 - RNA, 19 nt, Artificial Sequence
  Description of Artificial Sequence: Synthetic oligonucleotide
ccaauagaggugaagaauu

SEQ ID NO: 715043 - RNA, 19 nt, Artificial Sequence
  Description of Artificial Sequence: Synthetic oligonucleotide
gugguucguacugcccucc

SEQ ID NO: 715044 - RNA, 19 nt, Artificial Sequence
  Description of Artificial Sequence: Synthetic oligonucleotide
gcgaugaggagcuguggca

SEQ ID NO: 715045 - RNA, 19 nt, Artificial Sequence
  Description of Artificial Sequence: Synthetic oligonucleotide
cagcaugucucguucgaua

SEQ ID NO: 715046 - RNA, 19 nt, Artificial Sequence
  Description of Artificial Sequence: Synthetic oligonucleotide
cccacuccgcagaagguug

SEQ ID NO: 715047 - RNA, 19 nt, Artificial Sequence
  Description of Artificial Sequence: Synthetic oligonucleotide
ccacgggccucucauacac

SEQ ID NO: 715048 - RNA, 19 nt, Artificial Sequence
  Description of Artificial Sequence: Synthetic oligonucleotide
ccccucuggaaauuguguc

SEQ ID NO: 715049 - RNA, 19 nt, Artificial Sequence
  Description of Artificial Sequence: Synthetic oligonucleotide
ggaucacggacaguggcuc

SEQ ID NO: 715050 - RNA, 19 nt, Artificial Sequence
  Description of Artificial Sequence: Synthetic oligonucleotide
accuacagaaaagcuucuu

SEQ ID NO: 715051 - RNA, 19 nt, Artificial Sequence
  Description of Artificial Sequence: Synthetic oligonucleotide
cagcucccaagucagggaa

SEQ ID NO: 715052 - RNA, 19 nt, Artificial Sequence
  Description of Artificial Sequence: Synthetic oligonucleotide
gggcuucgcgauuuccuug

SEQ ID NO: 715053 - RNA, 19 nt, Artificial Sequence
  Description of Artificial Sequence: Synthetic oligonucleotide
gggagguaguccacgggcc

SEQ ID NO: 715054 - RNA, 19 nt, Artificial Sequence
  Description of Artificial Sequence: Synthetic oligonucleotide
gacgguugacucgggccac

SEQ ID NO: 715055 - RNA, 19 nt, Artificial Sequence
  Description of Artificial Sequence: Synthetic oligonucleotide
cguacugcccucccauucc

SEQ ID NO: 715056 - RNA, 19 nt, Artificial Sequence
  Description of Artificial Sequence: Synthetic oligonucleotide
gcuguggcacccuguuacc

SEQ ID NO: 715057 - RNA, 19 nt, Artificial Sequence
  Description of Artificial Sequence: Synthetic oligonucleotide
cuugcucaucgcuccuaga

SEQ ID NO: 715058 - RNA, 19 nt, Artificial Sequence
  Description of Artificial Sequence: Synthetic oligonucleotide
guaugauaauaaucuccuu

SEQ ID NO: 715059 - RNA, 19 nt, Artificial Sequence
  Description of Artificial Sequence: Synthetic oligonucleotide
cacgauucccagucccuaa

SEQ ID NO: 715060 - RNA, 19 nt, Artificial Sequence
  Description of Artificial Sequence: Synthetic oligonucleotide
aucugacaaugugcgggcu

SEQ ID NO: 715061 - RNA, 19 nt, Artificial Sequence
  Description of Artificial Sequence: Synthetic oligonucleotide
gucgcuaguccagcuucug

SEQ ID NO: 715062 - RNA, 19 nt, Artificial Sequence
  Description of Artificial Sequence: Synthetic oligonucleotide
cacuuauuggagacccacu

SEQ ID NO: 715063 - RNA, 19 nt, Artificial Sequence
  Description of Artificial Sequence: Synthetic oligonucleotide
agguaacccucagggucag

SEQ ID NO: 715064 - RNA, 19 nt, Artificial Sequence
  Description of Artificial Sequence: Synthetic oligonucleotide
augucucguucgauaguca

SEQ ID NO: 715065 - RNA, 19 nt, Artificial Sequence
  Description of Artificial Sequence: Synthetic oligonucleotide
gaucacggacaguggcucu

SEQ ID NO: 715066 - RNA, 19 nt, Artificial Sequence
  Description of Artificial Sequence: Synthetic oligonucleotide
gcucuuaaucuuggagagc

SEQ ID NO: 715067 - RNA, 19 nt, Artificial Sequence
  Description of Artificial Sequence: Synthetic oligonucleotide
gcuacccuuggagccagag

SEQ ID NO: 715068 - RNA, 19 nt, Artificial Sequence
  Description of Artificial Sequence: Synthetic oligonucleotide
accgagagguuggcgacaa

SEQ ID NO: 715069 - RNA, 19 nt, Artificial Sequence
  Description of Artificial Sequence: Synthetic oligonucleotide
gcaccgagagguuggcgac

SEQ ID NO: 715070 - RNA, 19 nt, Artificial Sequence
  Description of Artificial Sequence: Synthetic oligonucleotide
ccacaaggccucaagaacu

SEQ ID NO: 715071 - RNA, 19 nt, Artificial Sequence
  Description of Artificial Sequence: Synthetic oligonucleotide
gcccaauagaggugaagaa

SEQ ID NO: 715072 - RNA, 19 nt, Artificial Sequence
  Description of Artificial Sequence: Synthetic oligonucleotide
ucuugggaucacggacagu

SEQ ID NO: 715073 - RNA, 19 nt, Artificial Sequence
  Description of Artificial Sequence: Synthetic oligonucleotide
aucacggacaguggcucuu

SEQ ID NO: 715074 - RNA, 19 nt, Artificial Sequence
  Description of Artificial Sequence: Synthetic oligonucleotide
guuugggcuucgcgauuuc

SEQ ID NO: 715075 - RNA, 19 nt, Artificial Sequence
  Description of Artificial Sequence: Synthetic oligonucleotide
ggacauacucucucaaauu

SEQ ID NO: 715076 - RNA, 19 nt, Artificial Sequence
  Description of Artificial Sequence: Synthetic oligonucleotide
ggacaccugucuugggauc

SEQ ID NO: 715077 - RNA, 19 nt, Artificial Sequence
  Description of Artificial Sequence: Synthetic oligonucleotide
cguuccacaaggccucaag

SEQ ID NO: 715078 - RNA, 19 nt, Artificial Sequence
  Description of Artificial Sequence: Synthetic oligonucleotide
caggacaaggucacccagu

SEQ ID NO: 715079 - RNA, 19 nt, Artificial Sequence
  Description of Artificial Sequence: Synthetic oligonucleotide
gguucguacugcccuccca

SEQ ID NO: 715080 - RNA, 19 nt, Artificial Sequence
  Description of Artificial Sequence: Synthetic oligonucleotide
accacuuauuggagaccca

SEQ ID NO: 715081 - RNA, 19 nt, Artificial Sequence
  Description of Artificial Sequence: Synthetic oligonucleotide
gcgaccugcaauaguucug

SEQ ID NO: 715082 - RNA, 19 nt, Artificial Sequence
  Description of Artificial Sequence: Synthetic oligonucleotide
cacacgauucccagucccu

SEQ ID NO: 715083 - RNA, 19 nt, Artificial Sequence
  Description of Artificial Sequence: Synthetic oligonucleotide
gccacacgauucccagucc

SEQ ID NO: 715084 - RNA, 19 nt, Artificial Sequence
  Description of Artificial Sequence: Synthetic oligonucleotide
cuguggcacccuguuacca

SEQ ID NO: 715085 - RNA, 19 nt, Artificial Sequence
  Description of Artificial Sequence: Synthetic oligonucleotide
augugcgggcugucccacu

SEQ ID NO: 715086 - RNA, 19 nt, Artificial Sequence
  Description of Artificial Sequence: Synthetic oligonucleotide
gguugacucgggccacaac

SEQ ID NO: 715087 - RNA, 19 nt, Artificial Sequence
  Description of Artificial Sequence: Synthetic oligonucleotide
cgauagucaccuuccccac

SEQ ID NO: 715088 - RNA, 19 nt, Artificial Sequence
  Description of Artificial Sequence: Synthetic oligonucleotide
gcucccaagucagggaaga

SEQ ID NO: 715089 - RNA, 19 nt, Artificial Sequence
  Description of Artificial Sequence: Synthetic oligonucleotide
ggaauguggccacacgauu

SEQ ID NO: 715090 - RNA, 19 nt, Artificial Sequence
  Description of Artificial Sequence: Synthetic oligonucleotide
gggcgaugaggagcugugg

SEQ ID NO: 715091 - RNA, 19 nt, Artificial Sequence
  Description of Artificial Sequence: Synthetic oligonucleotide
ccgcagaagguuguaccag

SEQ ID NO: 715092 - RNA, 19 nt, Artificial Sequence
  Description of Artificial Sequence: Synthetic oligonucleotide
cagaagguuguaccagaau

SEQ ID NO: 715093 - RNA, 19 nt, Artificial Sequence
  Description of Artificial Sequence: Synthetic oligonucleotide
ggccaaauugcagcuccca

SEQ ID NO: 715094 - RNA, 19 nt, Artificial Sequence
  Description of Artificial Sequence: Synthetic oligonucleotide
ucguuccacaaggccucaa

SEQ ID NO: 715095 - RNA, 19 nt, Artificial Sequence
  Description of Artificial Sequence: Synthetic oligonucleotide
cgcgauuuccuugauccuc

SEQ ID NO: 715096 - RNA, 19 nt, Artificial Sequence
  Description of Artificial Sequence: Synthetic oligonucleotide
ccgaacuaggugcuacaca

SEQ ID NO: 715097 - RNA, 19 nt, Artificial Sequence
  Description of Artificial Sequence: Synthetic oligonucleotide
cggcgggugagcuccacag

SEQ ID NO: 715098 - RNA, 19 nt, Artificial Sequence
  Description of Artificial Sequence: Synthetic oligonucleotide
acgguugacucgggccaca

SEQ ID NO: 715099 - RNA, 19 nt, Artificial Sequence
  Description of Artificial Sequence: Synthetic oligonucleotide
ccugggucgcuaguccagc

SEQ ID NO: 715100 - RNA, 19 nt, Artificial Sequence
  Description of Artificial Sequence: Synthetic oligonucleotide
ggacgucaaucaacuucug

SEQ ID NO: 715101 - RNA, 19 nt, Artificial Sequence
  Description of Artificial Sequence: Synthetic oligonucleotide
guuccccucuggaaauugu

SEQ ID NO: 715102 - RNA, 19 nt, Artificial Sequence
  Description of Artificial Sequence: Synthetic oligonucleotide
cagauucccgccagcucgu

SEQ ID NO: 715103 - RNA, 19 nt, Artificial Sequence
  Description of Artificial Sequence: Synthetic oligonucleotide
cacugucaacccugugaua

SEQ ID NO: 715104 - RNA, 19 nt, Artificial Sequence
  Description of Artificial Sequence: Synthetic oligonucleotide
gccauaccaaugcuacccu

SEQ ID NO: 715105 - RNA, 19 nt, Artificial Sequence
  Description of Artificial Sequence: Synthetic oligonucleotide
cccucuggaaauugugucu

SEQ ID NO: 715106 - RNA, 19 nt, Artificial Sequence
  Description of Artificial Sequence: Synthetic oligonucleotide
ccuccgcaaggauguacuc

SEQ ID NO: 715107 - RNA, 19 nt, Artificial Sequence
  Description of Artificial Sequence: Synthetic oligonucleotide
cugagcggcccaugccaaa

SEQ ID NO: 715108 - RNA, 19 nt, Artificial Sequence
  Description of Artificial Sequence: Synthetic oligonucleotide
cgacgguugacucgggcca

SEQ ID NO: 715109 - RNA, 19 nt, Artificial Sequence
  Description of Artificial Sequence: Synthetic oligonucleotide
cagucccuaaacgcuugaa

SEQ ID NO: 715110 - RNA, 19 nt, Artificial Sequence
  Description of Artificial Sequence: Synthetic oligonucleotide
gggaucacggacaguggcu

SEQ ID NO: 715111 - RNA, 19 nt, Artificial Sequence
  Description of Artificial Sequence: Synthetic oligonucleotide
auccgacgguugacucggg

SEQ ID NO: 715112 - RNA, 19 nt, Artificial Sequence
  Description of Artificial Sequence: Synthetic oligonucleotide
gucguuccacaaggccuca

SEQ ID NO: 715113 - RNA, 19 nt, Artificial Sequence
  Description of Artificial Sequence: Synthetic oligonucleotide
caccgagagguuggcgaca

SEQ ID NO: 715114 - RNA, 19 nt, Artificial Sequence
  Description of Artificial Sequence: Synthetic oligonucleotide
cugggucgcuaguccagcu

SEQ ID NO: 715115 - RNA, 19 nt, Artificial Sequence
  Description of Artificial Sequence: Synthetic oligonucleotide
agauucccgccagcucguu

SEQ ID NO: 715116 - RNA, 19 nt, Artificial Sequence
  Description of Artificial Sequence: Synthetic oligonucleotide
gguaacccucagggucagc

SEQ ID NO: 715117 - RNA, 19 nt, Artificial Sequence
  Description of Artificial Sequence: Synthetic oligonucleotide
cucuugcgaguuugggcuu

SEQ ID NO: 715118 - RNA, 19 nt, Artificial Sequence
  Description of Artificial Sequence: Synthetic oligonucleotide
ccucuaacagucgcucaaa

SEQ ID NO: 715119 - RNA, 19 nt, Artificial Sequence
  Description of Artificial Sequence: Synthetic oligonucleotide
ccagucccuaaacgcuuga

SEQ ID NO: 715120 - RNA, 19 nt, Artificial Sequence
  Description of Artificial Sequence: Synthetic oligonucleotide
ggucgcuaguccagcuucu

SEQ ID NO: 715121 - RNA, 19 nt, Artificial Sequence
  Description of Artificial Sequence: Synthetic oligonucleotide
ccuuccccacuccgcagaa

SEQ ID NO: 715122 - RNA, 19 nt, Artificial Sequence
  Description of Artificial Sequence: Synthetic oligonucleotide
ggcaccgaacuaggugcua

SEQ ID NO: 715123 - RNA, 19 nt, Artificial Sequence
  Description of Artificial Sequence: Synthetic oligonucleotide
cucguucgauagucaccuu

SEQ ID NO: 715124 - RNA, 19 nt, Artificial Sequence
  Description of Artificial Sequence: Synthetic oligonucleotide
caucccucucagggaggua

SEQ ID NO: 715125 - RNA, 19 nt, Artificial Sequence
  Description of Artificial Sequence: Synthetic oligonucleotide
ccacagcacggugcagguc

SEQ ID NO: 715126 - RNA, 19 nt, Artificial Sequence
  Description of Artificial Sequence: Synthetic oligonucleotide
ccacuccgcagaagguugu

SEQ ID NO: 715127 - RNA, 19 nt, Artificial Sequence
  Description of Artificial Sequence: Synthetic oligonucleotide
ggucagucaugugcccaau

SEQ ID NO: 715128 - RNA, 19 nt, Artificial Sequence
  Description of Artificial Sequence: Synthetic oligonucleotide
gcuucgcgauuuccuugau

SEQ ID NO: 715129 - RNA, 19 nt, Artificial Sequence
  Description of Artificial Sequence: Synthetic oligonucleotide
ccccacggcacaggcucuc

SEQ ID NO: 715130 - RNA, 19 nt, Artificial Sequence
  Description of Artificial Sequence: Synthetic oligonucleotide
ccgcagauucccgccagcu

SEQ ID NO: 715131 - RNA, 19 nt, Artificial Sequence
  Description of Artificial Sequence: Synthetic oligonucleotide
ccgagagguuggcgacaaa

SEQ ID NO: 715132 - RNA, 19 nt, Artificial Sequence
  Description of Artificial Sequence: Synthetic oligonucleotide
ccacggcacaggcucucau

SEQ ID NO: 715133 - RNA, 19 nt, Artificial Sequence
  Description of Artificial Sequence: Synthetic oligonucleotide
ccgcaaggauguacuccuu

SEQ ID NO: 715134 - RNA, 19 nt, Artificial Sequence
  Description of Artificial Sequence: Synthetic oligonucleotide
uucgagaugucuaagauca

SEQ ID NO: 715135 - RNA, 19 nt, Artificial Sequence
  Description of Artificial Sequence: Synthetic oligonucleotide
aucauagugaggcuggccc

SEQ ID NO: 715136 - RNA, 19 nt, Artificial Sequence
  Description of Artificial Sequence: Synthetic oligonucleotide
aagaccaugcuugaggggc

SEQ ID NO: 715137 - RNA, 19 nt, Artificial Sequence
  Description of Artificial Sequence: Synthetic oligonucleotide
aacuaggggaaucauagug

SEQ ID NO: 715138 - RNA, 19 nt, Artificial Sequence
  Description of Artificial Sequence: Synthetic oligonucleotide
guucuagacaccuugaagc

SEQ ID NO: 715139 - RNA, 19 nt, Artificial Sequence
  Description of Artificial Sequence: Synthetic oligonucleotide
uauacaauccacaauuuau

SEQ ID NO: 715140 - RNA, 19 nt, Artificial Sequence
  Description of Artificial Sequence: Synthetic oligonucleotide
agauaaauuucucagugca

SEQ ID NO: 715141 - RNA, 19 nt, Artificial Sequence
  Description of Artificial Sequence: Synthetic oligonucleotide
ugguauaaagccuggauac

SEQ ID NO: 715142 - RNA, 19 nt, Artificial Sequence
  Description of Artificial Sequence: Synthetic oligonucleotide
ucuuccuugaagccgagug

SEQ ID NO: 715143 - RNA, 19 nt, Artificial Sequence
  Description of Artificial Sequence: Synthetic oligonucleotide
  modified_base (2)..(2): a, c, u, g, unknown or other
cngaaaaggucucagacac

SEQ ID NO: 715144 - RNA, 19 nt, Artificial Sequence
  Description of Artificial Sequence: Synthetic oligonucleotide
ggaacaguggauuaacugg

SEQ ID NO: 715145 - RNA, 19 nt, Artificial Sequence
  Description of Artificial Sequence: Synthetic oligonucleotide
aaagccuggauaccuguag

SEQ ID NO: 715146 - RNA, 19 nt, Artificial Sequence
  Description of Artificial Sequence: Synthetic oligonucleotide
ucaaacgaccuguagauaa

SEQ ID NO: 715147 - RNA, 19 nt, Artificial Sequence
  Description of Artificial Sequence: Synthetic oligonucleotide
aaccucgugguccagucgg

SEQ ID NO: 715148 - RNA, 19 nt, Artificial Sequence
  Description of Artificial Sequence: Synthetic oligonucleotide
uugucaaacgaccuguaga

SEQ ID NO: 715149 - RNA, 19 nt, Artificial Sequence
  Description of Artificial Sequence: Synthetic oligonucleotide
uccaggcuagacaagcucg

SEQ ID NO: 715150 - RNA, 19 nt, Artificial Sequence
  Description of Artificial Sequence: Synthetic oligonucleotide
acaggguuaagucacuaag

SEQ ID NO: 715151 - RNA, 19 nt, Artificial Sequence
  Description of Artificial Sequence: Synthetic oligonucleotide
aaccgguugauugaacugg

SEQ ID NO: 715152 - RNA, 19 nt, Artificial Sequence
  Description of Artificial Sequence: Synthetic oligonucleotide
aauuugcacaccacgggac

SEQ ID NO: 715153 - RNA, 19 nt, Artificial Sequence
  Description of Artificial Sequence: Synthetic oligonucleotide
uucugcguggaggagaugg

SEQ ID NO: 715154 - RNA, 19 nt, Artificial Sequence
  Description of Artificial Sequence: Synthetic oligonucleotide
uggauuaacuggcuguggc

SEQ ID NO: 715155 - RNA, 19 nt, Artificial Sequence
  Description of Artificial Sequence: Synthetic oligonucleotide
uuggcaacgccgaaaacca

SEQ ID NO: 715156 - RNA, 19 nt, Artificial Sequence
  Description of Artificial Sequence: Synthetic oligonucleotide
ugucaaacgaccuguagau

SEQ ID NO: 715157 - RNA, 19 nt, Artificial Sequence
  Description of Artificial Sequence: Synthetic oligonucleotide
cuagacaccuugaagcccc

SEQ ID NO: 715158 - RNA, 19 nt, Artificial Sequence
  Description of Artificial Sequence: Synthetic oligonucleotide
agaugugaggccucgaaca

SEQ ID NO: 715159 - RNA, 19 nt, Artificial Sequence
  Description of Artificial Sequence: Synthetic oligonucleotide
aagccuggauaccuguagg

SEQ ID NO: 715160 - RNA, 19 nt, Artificial Sequence
  Description of Artificial Sequence: Synthetic oligonucleotide
guaccaauaggcuguaccc

SEQ ID NO: 715161 - RNA, 19 nt, Artificial Sequence
  Description of Artificial Sequence: Synthetic oligonucleotide
cugguggguaccaauaggc

SEQ ID NO: 715162 - RNA, 19 nt, Artificial Sequence
  Description of Artificial Sequence: Synthetic oligonucleotide
ugugguauaaagccuggau

SEQ ID NO: 715163 - RNA, 19 nt, Artificial Sequence
  Description of Artificial Sequence: Synthetic oligonucleotide
aggguuaagucacuaagga

SEQ ID NO: 715164 - RNA, 19 nt, Artificial Sequence
  Description of Artificial Sequence: Synthetic oligonucleotide
guuggcaacgccgaaaacc

SEQ ID NO: 715165 - RNA, 19 nt, Artificial Sequence
  Description of Artificial Sequence: Synthetic oligonucleotide
uacaauccacaauuuauaa

SEQ ID NO: 715166 - RNA, 19 nt, Artificial Sequence
  Description of Artificial Sequence: Synthetic oligonucleotide
caggguuaagucacuaagg

SEQ ID NO: 715167 - RNA, 19 nt, Artificial Sequence
  Description of Artificial Sequence: Synthetic oligonucleotide
gguugauugaacugggugc

SEQ ID NO: 715168 - RNA, 19 nt, Artificial Sequence
  Description of Artificial Sequence: Synthetic oligonucleotide
  modified_base (12)..(12): a, c, u, g, unknown or other
gaggacgacucngaaaagg

SEQ ID NO: 715169 - RNA, 19 nt, Artificial Sequence
  Description of Artificial Sequence: Synthetic oligonucleotide
uggagcuacucugaaagag

SEQ ID NO: 715170 - RNA, 19 nt, Artificial Sequence
  Description of Artificial Sequence: Synthetic oligonucleotide
gauaccuguaggcaguguc

SEQ ID NO: 715171 - RNA, 19 nt, Artificial Sequence
  Description of Artificial Sequence: Synthetic oligonucleotide
gugaauacgccuucugcag

SEQ ID NO: 715172 - RNA, 19 nt, Artificial Sequence
  Description of Artificial Sequence: Synthetic oligonucleotide
cagaggacgauguggacgc

SEQ ID NO: 715173 - RNA, 19 nt, Artificial Sequence
  Description of Artificial Sequence: Synthetic oligonucleotide
agacacggccgucuguugc

SEQ ID NO: 715174 - RNA, 19 nt, Artificial Sequence
  Description of Artificial Sequence: Synthetic oligonucleotide
gaauacgccuucugcaggc

SEQ ID NO: 715175 - RNA, 19 nt, Artificial Sequence
  Description of Artificial Sequence: Synthetic oligonucleotide
caggaacaaaaccucgugg

SEQ ID NO: 715176 - RNA, 19 nt, Artificial Sequence
  Description of Artificial Sequence: Synthetic oligonucleotide
gaauuugcacaccacggga

SEQ ID NO: 715177 - RNA, 19 nt, Artificial Sequence
  Description of Artificial Sequence: Synthetic oligonucleotide
acccaugcgaauuugcaca

SEQ ID NO: 715178 - RNA, 19 nt, Artificial Sequence
  Description of Artificial Sequence: Synthetic oligonucleotide
gucacuaaggagugggcag

SEQ ID NO: 715179 - RNA, 19 nt, Artificial Sequence
  Description of Artificial Sequence: Synthetic oligonucleotide
ugggaaaugcuugccaucc

SEQ ID NO: 715180 - RNA, 19 nt, Artificial Sequence
  Description of Artificial Sequence: Synthetic oligonucleotide
auaccuguaggcagugucc

SEQ ID NO: 715181 - RNA, 19 nt, Artificial Sequence
  Description of Artificial Sequence: Synthetic oligonucleotide
gguaccaauaggcuguacc

SEQ ID NO: 715182 - RNA, 19 nt, Artificial Sequence
  Description of Artificial Sequence: Synthetic oligonucleotide
aaggucucagacacggccg

SEQ ID NO: 715183 - RNA, 19 nt, Artificial Sequence
  Description of Artificial Sequence: Synthetic oligonucleotide
aguucgagaugucuaagau

SEQ ID NO: 715184 - RNA, 19 nt, Artificial Sequence
  Description of Artificial Sequence: Synthetic oligonucleotide
aaaccucgugguccagucg

SEQ ID NO: 715185 - RNA, 19 nt, Artificial Sequence
  Description of Artificial Sequence: Synthetic oligonucleotide
agcagacgaugcuucauuc

SEQ ID NO: 715186 - RNA, 19 nt, Artificial Sequence
  Description of Artificial Sequence: Synthetic oligonucleotide
gcaacuaggggaaucauag

SEQ ID NO: 715187 - RNA, 19 nt, Artificial Sequence
  Description of Artificial Sequence: Synthetic oligonucleotide
agaacuccccaagagguuc

SEQ ID NO: 715188 - RNA, 19 nt, Artificial Sequence
  Description of Artificial Sequence: Synthetic oligonucleotide
agggguucuagacaccuug

SEQ ID NO: 715189 - RNA, 19 nt, Artificial Sequence
  Description of Artificial Sequence: Synthetic oligonucleotide
uaguucgagaugucuaaga

SEQ ID NO: 715190 - RNA, 19 nt, Artificial Sequence
  Description of Artificial Sequence: Synthetic oligonucleotide
uccgcuguaguagucuagg

SEQ ID NO: 715191 - RNA, 19 nt, Artificial Sequence
  Description of Artificial Sequence: Synthetic oligonucleotide
uguaccaccucgcuccuuc

SEQ ID NO: 715192 - RNA, 19 nt, Artificial Sequence
  Description of Artificial Sequence: Synthetic oligonucleotide
acaauccacaauuuauaau

SEQ ID NO: 715193 - RNA, 19 nt, Artificial Sequence
  Description of Artificial Sequence: Synthetic oligonucleotide
ggcuagacaagcucgacug

SEQ ID NO: 715194 - RNA, 19 nt, Artificial Sequence
  Description of Artificial Sequence: Synthetic oligonucleotide
gaagaccaugcuugagggg

SEQ ID NO: 715195 - RNA, 19 nt, Artificial Sequence
  Description of Artificial Sequence: Synthetic oligonucleotide
gguucuagacaccuugaag

SEQ ID NO: 715196 - RNA, 19 nt, Artificial Sequence
  Description of Artificial Sequence: Synthetic oligonucleotide
ucugcguggaggagauggg

SEQ ID NO: 715197 - RNA, 19 nt, Artificial Sequence
  Description of Artificial Sequence: Synthetic oligonucleotide
aauauacaauccacaauuu

SEQ ID NO: 715198 - RNA, 19 nt, Artificial Sequence
  Description of Artificial Sequence: Synthetic oligonucleotide
agucccucggcacagggga

SEQ ID NO: 715199 - RNA, 19 nt, Artificial Sequence
  Description of Artificial Sequence: Synthetic oligonucleotide
gcuguaguagucuaggcca

SEQ ID NO: 715200 - RNA, 19 nt, Artificial Sequence
  Description of Artificial Sequence: Synthetic oligonucleotide
accacgggaccacagcagg

SEQ ID NO: 715201 - RNA, 19 nt, Artificial Sequence
  Description of Artificial Sequence: Synthetic oligonucleotide
cagucggcacuucaguugg

SEQ ID NO: 715202 - RNA, 19 nt, Artificial Sequence
  Description of Artificial Sequence: Synthetic oligonucleotide
cucgcaaccucuugcacac

SEQ ID NO: 715203 - RNA, 19 nt, Artificial Sequence
  Description of Artificial Sequence: Synthetic oligonucleotide
uuaagucacuaaggagugg

SEQ ID NO: 715204 - RNA, 19 nt, Artificial Sequence
  Description of Artificial Sequence: Synthetic oligonucleotide
ucuagacaccuugaagccc

SEQ ID NO: 715205 - RNA, 19 nt, Artificial Sequence
  Description of Artificial Sequence: Synthetic oligonucleotide
gaggcauacagccuccguc

SEQ ID NO: 715206 - RNA, 19 nt, Artificial Sequence
  Description of Artificial Sequence: Synthetic oligonucleotide
  modified_base (6)..(6): a, c, u, g, unknown or other
gacucngaaaaggucucag

SEQ ID NO: 715207 - RNA, 19 nt, Artificial Sequence
  Description of Artificial Sequence: Synthetic oligonucleotide
ucgacuggcccucacugcu

SEQ ID NO: 715208 - RNA, 19 nt, Artificial Sequence
  Description of Artificial Sequence: Synthetic oligonucleotide
ugcguggaggagaugggca

SEQ ID NO: 715209 - RNA, 19 nt, Artificial Sequence
  Description of Artificial Sequence: Synthetic oligonucleotide
cacucuuagggccuccacc

SEQ ID NO: 715210 - RNA, 19 nt, Artificial Sequence
  Description of Artificial Sequence: Synthetic oligonucleotide
ggaaucauagugaggcugg

SEQ ID NO: 715211 - RNA, 19 nt, Artificial Sequence
  Description of Artificial Sequence: Synthetic oligonucleotide
uuccaguuguagccgggag

SEQ ID NO: 715212 - RNA, 19 nt, Artificial Sequence
  Description of Artificial Sequence: Synthetic oligonucleotide
ucauagugaggcuggccca

SEQ ID NO: 715213 - RNA, 19 nt, Artificial Sequence
  Description of Artificial Sequence: Synthetic oligonucleotide
aguggauuaacuggcugug

SEQ ID NO: 715214 - RNA, 19 nt, Artificial Sequence
  Description of Artificial Sequence: Synthetic oligonucleotide
  modified_base (5)..(5): a, c, u, g, unknown or other
acucngaaaaggucucaga

SEQ ID NO: 715215 - RNA, 19 nt, Artificial Sequence
  Description of Artificial Sequence: Synthetic oligonucleotide
agcuuugugggugguggcc

SEQ ID NO: 715216 - RNA, 19 nt, Artificial Sequence
  Description of Artificial Sequence: Synthetic oligonucleotide
uguggcguguaguucgaga

SEQ ID NO: 715217 - RNA, 19 nt, Artificial Sequence
  Description of Artificial Sequence: Synthetic oligonucleotide
ucaccuucggcuucugcgu

SEQ ID NO: 715218 - RNA, 19 nt, Artificial Sequence
  Description of Artificial Sequence: Synthetic oligonucleotide
cauacagccuccguccugc

SEQ ID NO: 715219 - RNA, 19 nt, Artificial Sequence
  Description of Artificial Sequence: Synthetic oligonucleotide
ggugaauacgccuucugca

SEQ ID NO: 715220 - RNA, 19 nt, Artificial Sequence
  Description of Artificial Sequence: Synthetic oligonucleotide
guucgagaugucuaagauc

SEQ ID NO: 715221 - RNA, 19 nt, Artificial Sequence
  Description of Artificial Sequence: Synthetic oligonucleotide
caucgaacacugugggcgg

SEQ ID NO: 715222 - RNA, 19 nt, Artificial Sequence
  Description of Artificial Sequence: Synthetic oligonucleotide
uacagggaggugacgguga

SEQ ID NO: 715223 - RNA, 19 nt, Artificial Sequence
  Description of Artificial Sequence: Synthetic oligonucleotide
cacgggguggaccuggcgg

SEQ ID NO: 715224 - RNA, 19 nt, Artificial Sequence
  Description of Artificial Sequence: Synthetic oligonucleotide
cuuagggccuccacccagg

SEQ ID NO: 715225 - RNA, 19 nt, Artificial Sequence
  Description of Artificial Sequence: Synthetic oligonucleotide
ucacuaaggagugggcagc

SEQ ID NO: 715226 - RNA, 19 nt, Artificial Sequence
  Description of Artificial Sequence: Synthetic oligonucleotide
acgaugcuucauuccaguc

SEQ ID NO: 715227 - RNA, 19 nt, Artificial Sequence
  Description of Artificial Sequence: Synthetic oligonucleotide
gguggguaccaauaggcug

SEQ ID NO: 715228 - RNA, 19 nt, Artificial Sequence
  Description of Artificial Sequence: Synthetic oligonucleotide
ugguggguaccaauaggcu

SEQ ID NO: 715229 - RNA, 19 nt, Artificial Sequence
  Description of Artificial Sequence: Synthetic oligonucleotide
  modified_base (9)..(9): a, c, u, g, unknown or other
gacgacucngaaaaggucu

SEQ ID NO: 715230 - RNA, 19 nt, Artificial Sequence
  Description of Artificial Sequence: Synthetic oligonucleotide
caugcgaauuugcacacca

SEQ ID NO: 715231 - RNA, 19 nt, Artificial Sequence
  Description of Artificial Sequence: Synthetic oligonucleotide
cacugaggcauacagccuc

SEQ ID NO: 715232 - RNA, 19 nt, Artificial Sequence
  Description of Artificial Sequence: Synthetic oligonucleotide
caaccgguugauugaacug

SEQ ID NO: 715233 - RNA, 19 nt, Artificial Sequence
  Description of Artificial Sequence: Synthetic oligonucleotide
caaccucuugcacacucgc

SEQ ID NO: 715234 - RNA, 19 nt, Artificial Sequence
  Description of Artificial Sequence: Synthetic oligonucleotide
gaauguguccucaggguga

SEQ ID NO: 715235 - RNA, 19 nt, Artificial Sequence
  Description of Artificial Sequence: Synthetic oligonucleotide
ggagcuacucugaaagagg

SEQ ID NO: 715236 - RNA, 19 nt, Artificial Sequence
  Description of Artificial Sequence: Synthetic oligonucleotide
uuuugucaaacgaccugua

SEQ ID NO: 715237 - RNA, 19 nt, Artificial Sequence
  Description of Artificial Sequence: Synthetic oligonucleotide
uccguuuggacggguagcc

SEQ ID NO: 715238 - RNA, 19 nt, Artificial Sequence
  Description of Artificial Sequence: Synthetic oligonucleotide
uucauagggugggcuacgg

SEQ ID NO: 715239 - RNA, 19 nt, Artificial Sequence
  Description of Artificial Sequence: Synthetic oligonucleotide
guagucuaggccaaggucu

SEQ ID NO: 715240 - RNA, 19 nt, Artificial Sequence
  Description of Artificial Sequence: Synthetic oligonucleotide
uggccaaaagugccaucag

SEQ ID NO: 715241 - RNA, 19 nt, Artificial Sequence
  Description of Artificial Sequence: Synthetic oligonucleotide
gacggguagccagaggcag

SEQ ID NO: 715242 - RNA, 19 nt, Artificial Sequence
  Description of Artificial Sequence: Synthetic oligonucleotide
aaacgaccuguagauaaau

SEQ ID NO: 715243 - RNA, 19 nt, Artificial Sequence
  Description of Artificial Sequence: Synthetic oligonucleotide
acugaggcauacagccucc

SEQ ID NO: 715244 - RNA, 19 nt, Artificial Sequence
  Description of Artificial Sequence: Synthetic oligonucleotide
aggcuagacaagcucgacu

SEQ ID NO: 715245 - RNA, 19 nt, Artificial Sequence
  Description of Artificial Sequence: Synthetic oligonucleotide
uguaguagucuaggccaag

SEQ ID NO: 715246 - RNA, 19 nt, Artificial Sequence
  Description of Artificial Sequence: Synthetic oligonucleotide
uaccaauaggcuguacccu

SEQ ID NO: 715247 - RNA, 19 nt, Artificial Sequence
  Description of Artificial Sequence: Synthetic oligonucleotide
uggcguguaguucgagaug

SEQ ID NO: 715248 - RNA, 19 nt, Artificial Sequence
  Description of Artificial Sequence: Synthetic oligonucleotide
cacccaugcgaauuugcac

SEQ ID NO: 715249 - RNA, 19 nt, Artificial Sequence
  Description of Artificial Sequence: Synthetic oligonucleotide
ugaagucacaggggucgcg

SEQ ID NO: 715250 - RNA, 19 nt, Artificial Sequence
  Description of Artificial Sequence: Synthetic oligonucleotide
gaagguguagauggauuca

SEQ ID NO: 715251 - RNA, 19 nt, Artificial Sequence
  Description of Artificial Sequence: Synthetic oligonucleotide
accaauaggcuguacccuu

SEQ ID NO: 715252 - RNA, 19 nt, Artificial Sequence
  Description of Artificial Sequence: Synthetic oligonucleotide
cuugggcguggcuggaggg

SEQ ID NO: 715253 - RNA, 19 nt, Artificial Sequence
  Description of Artificial Sequence: Synthetic oligonucleotide
ucgugguccagucggcacu

SEQ ID NO: 715254 - RNA, 19 nt, Artificial Sequence
  Description of Artificial Sequence: Synthetic oligonucleotide
acaagcucgacuggcccuc

SEQ ID NO: 715255 - RNA, 19 nt, Artificial Sequence
  Description of Artificial Sequence: Synthetic oligonucleotide
  modified_base (11)..(11): a, c, u, g, unknown or other
aggacgacucngaaaaggu

SEQ ID NO: 715256 - RNA, 19 nt, Artificial Sequence
  Description of Artificial Sequence: Synthetic oligonucleotide
augcgccugugguauaaag

SEQ ID NO: 715257 - RNA, 19 nt, Artificial Sequence
  Description of Artificial Sequence: Synthetic oligonucleotide
  modified_base (8)..(8): a, c, u, g, unknown or other
acgacucngaaaaggucuc

SEQ ID NO: 715258 - RNA, 19 nt, Artificial Sequence
  Description of Artificial Sequence: Synthetic oligonucleotide
ucggcacuucaguugguac

SEQ ID NO: 715259 - RNA, 19 nt, Artificial Sequence
  Description of Artificial Sequence: Synthetic oligonucleotide
cuugcaacuaggggaauca

SEQ ID NO: 715260 - RNA, 19 nt, Artificial Sequence
  Description of Artificial Sequence: Synthetic oligonucleotide
ugaggcauacagccuccgu

SEQ ID NO: 715261 - RNA, 19 nt, Artificial Sequence
  Description of Artificial Sequence: Synthetic oligonucleotide
guaguucgagaugucuaag

SEQ ID NO: 715262 - RNA, 19 nt, Artificial Sequence
  Description of Artificial Sequence: Synthetic oligonucleotide
aguuguagccgggagcaga

SEQ ID NO: 715263 - RNA, 19 nt, Artificial Sequence
  Description of Artificial Sequence: Synthetic oligonucleotide
uagacaccuugaagccccg

SEQ ID NO: 715264 - RNA, 19 nt, Artificial Sequence
  Description of Artificial Sequence: Synthetic oligonucleotide
aggggucgcgcucucccac

SEQ ID NO: 715265 - RNA, 19 nt, Artificial Sequence
  Description of Artificial Sequence: Synthetic oligonucleotide
accuucggcuucugcgugg

SEQ ID NO: 715266 - RNA, 19 nt, Artificial Sequence
  Description of Artificial Sequence: Synthetic oligonucleotide
acguggcccuccuugucgg

SEQ ID NO: 715267 - RNA, 19 nt, Artificial Sequence
  Description of Artificial Sequence: Synthetic oligonucleotide
ccgaaaaccaccaccacca

SEQ ID NO: 715268 - RNA, 19 nt, Artificial Sequence
  Description of Artificial Sequence: Synthetic oligonucleotide
gacaggguuaagucacuaa

SEQ ID NO: 715269 - RNA, 19 nt, Artificial Sequence
  Description of Artificial Sequence: Synthetic oligonucleotide
agcagcgagucccucggca

SEQ ID NO: 715270 - RNA, 19 nt, Artificial Sequence
  Description of Artificial Sequence: Synthetic oligonucleotide
gacaugcugcuaucuccgc

SEQ ID NO: 715271 - RNA, 19 nt, Artificial Sequence
  Description of Artificial Sequence: Synthetic oligonucleotide
ucuguggcguguaguucga

SEQ ID NO: 715272 - RNA, 19 nt, Artificial Sequence
  Description of Artificial Sequence: Synthetic oligonucleotide
guggauuaacuggcugugg

SEQ ID NO: 715273 - RNA, 19 nt, Artificial Sequence
  Description of Artificial Sequence: Synthetic oligonucleotide
cuucauagggugggcuacg

SEQ ID NO: 715274 - RNA, 19 nt, Artificial Sequence
  Description of Artificial Sequence: Synthetic oligonucleotide
agugccaucagaaggugua

SEQ ID NO: 715275 - RNA, 19 nt, Artificial Sequence
  Description of Artificial Sequence: Synthetic oligonucleotide
ggaacaaaaccucgugguc

SEQ ID NO: 715276 - RNA, 19 nt, Artificial Sequence
  Description of Artificial Sequence: Synthetic oligonucleotide
  modified_base (15)..(15): a, c, u, g, unknown or other
ucggaggacgacucngaaa

SEQ ID NO: 715277 - RNA, 19 nt, Artificial Sequence
  Description of Artificial Sequence: Synthetic oligonucleotide
aagcucgacuggcccucac

SEQ ID NO: 715278 - RNA, 19 nt, Artificial Sequence
  Description of Artificial Sequence: Synthetic oligonucleotide
guauaaagccuggauaccu

SEQ ID NO: 715279 - RNA, 19 nt, Artificial Sequence
  Description of Artificial Sequence: Synthetic oligonucleotide
ugcugucggaggacgacuc

SEQ ID NO: 715280 - RNA, 19 nt, Artificial Sequence
  Description of Artificial Sequence: Synthetic oligonucleotide
cuuugugggugguggccgc

SEQ ID NO: 715281 - RNA, 19 nt, Artificial Sequence
  Description of Artificial Sequence: Synthetic oligonucleotide
gguauaaagccuggauacc

SEQ ID NO: 715282 - RNA, 19 nt, Artificial Sequence
  Description of Artificial Sequence: Synthetic oligonucleotide
accgguugauugaacuggg

SEQ ID NO: 715283 - RNA, 19 nt, Artificial Sequence
  Description of Artificial Sequence: Synthetic oligonucleotide
cucgacuggcccucacugc

SEQ ID NO: 715284 - RNA, 19 nt, Artificial Sequence
  Description of Artificial Sequence: Synthetic oligonucleotide
gcugcuaucuccgcuguag

SEQ ID NO: 715285 - RNA, 19 nt, Artificial Sequence
  Description of Artificial Sequence: Synthetic oligonucleotide
ugcuaucuccgcuguagua

SEQ ID NO: 715286 - RNA, 19 nt, Artificial Sequence
  Description of Artificial Sequence: Synthetic oligonucleotide
uguuggcaacgccgaaaac

SEQ ID NO: 715287 - RNA, 19 nt, Artificial Sequence
  Description of Artificial Sequence: Synthetic oligonucleotide
cacuaccccggccaccccg

SEQ ID NO: 715288 - RNA, 19 nt, Artificial Sequence
  Description of Artificial Sequence: Synthetic oligonucleotide
acgccgaaaaccaccacca

SEQ ID NO: 715289 - RNA, 19 nt, Artificial Sequence
  Description of Artificial Sequence: Synthetic oligonucleotide
agacgaugcuucauuccag

SEQ ID NO: 715290 - RNA, 19 nt, Artificial Sequence
  Description of Artificial Sequence: Synthetic oligonucleotide
  modified_base (18)..(18): a, c, u, g, unknown or other
cugucggaggacgacucng

SEQ ID NO: 715291 - RNA, 19 nt, Artificial Sequence
  Description of Artificial Sequence: Synthetic oligonucleotide
guagauggauucauggagu

SEQ ID NO: 715292 - RNA, 19 nt, Artificial Sequence
  Description of Artificial Sequence: Synthetic oligonucleotide
ggccuuagcagcuguacca

SEQ ID NO: 715293 - RNA, 19 nt, Artificial Sequence
  Description of Artificial Sequence: Synthetic oligonucleotide
gucgcgcucucccacacca

SEQ ID NO: 715294 - RNA, 19 nt, Artificial Sequence
  Description of Artificial Sequence: Synthetic oligonucleotide
uugauugaacugggugcug

SEQ ID NO: 715295 - RNA, 19 nt, Artificial Sequence
  Description of Artificial Sequence: Synthetic oligonucleotide
cuacagggaggugacggug

SEQ ID NO: 715296 - RNA, 19 nt, Artificial Sequence
  Description of Artificial Sequence: Synthetic oligonucleotide
gacgaugcuucauuccagu

SEQ ID NO: 715297 - RNA, 19 nt, Artificial Sequence
  Description of Artificial Sequence: Synthetic oligonucleotide
gguacuacagggaggugac

SEQ ID NO: 715298 - RNA, 19 nt, Artificial Sequence
  Description of Artificial Sequence: Synthetic oligonucleotide
ggcaacgccgaaaaccacc

SEQ ID NO: 715299 - RNA, 19 nt, Artificial Sequence
  Description of Artificial Sequence: Synthetic oligonucleotide
gugggaaaugcuugccauc

SEQ ID NO: 715300 - RNA, 19 nt, Artificial Sequence
  Description of Artificial Sequence: Synthetic oligonucleotide
ggugacaugcugcuaucuc

SEQ ID NO: 715301 - RNA, 19 nt, Artificial Sequence
  Description of Artificial Sequence: Synthetic oligonucleotide
gagucccucggcacagggg

SEQ ID NO: 715302 - RNA, 19 nt, Artificial Sequence
  Description of Artificial Sequence: Synthetic oligonucleotide
uugaagccccgcucgcaac

SEQ ID NO: 715303 - RNA, 19 nt, Artificial Sequence
  Description of Artificial Sequence: Synthetic oligonucleotide
agccgggagcagacgaugc

SEQ ID NO: 715304 - RNA, 19 nt, Artificial Sequence
  Description of Artificial Sequence: Synthetic oligonucleotide
cucgcucucucucucucuc

SEQ ID NO: 715305 - RNA, 19 nt, Artificial Sequence
  Description of Artificial Sequence: Synthetic oligonucleotide
acuguuggcaacgccgaaa

SEQ ID NO: 715306 - RNA, 19 nt, Artificial Sequence
  Description of Artificial Sequence: Synthetic oligonucleotide
ccugguggguaccaauagg

SEQ ID NO: 715307 - RNA, 19 nt, Artificial Sequence
  Description of Artificial Sequence: Synthetic oligonucleotide
cuccguuuggacggguagc

SEQ ID NO: 715308 - RNA, 19 nt, Artificial Sequence
  Description of Artificial Sequence: Synthetic oligonucleotide
gugggcuacgggcagcuga

SEQ ID NO: 715309 - RNA, 19 nt, Artificial Sequence
  Description of Artificial Sequence: Synthetic oligonucleotide
uaucuccgcuguaguaguc

SEQ ID NO: 715310 - RNA, 19 nt, Artificial Sequence
  Description of Artificial Sequence: Synthetic oligonucleotide
cuccgcuguaguagucuag

SEQ ID NO: 715311 - RNA, 19 nt, Artificial Sequence
  Description of Artificial Sequence: Synthetic oligonucleotide
gauuaacuggcuguggcuu

SEQ ID NO: 715312 - RNA, 19 nt, Artificial Sequence
  Description of Artificial Sequence: Synthetic oligonucleotide
ggcuacgggcagcugaacc

SEQ ID NO: 715313 - RNA, 19 nt, Artificial Sequence
  Description of Artificial Sequence: Synthetic oligonucleotide
gacaccuugaagccccgcu

SEQ ID NO: 715314 - RNA, 19 nt, Artificial Sequence
  Description of Artificial Sequence: Synthetic oligonucleotide
caaacgaccuguagauaaa

SEQ ID NO: 715315 - RNA, 19 nt, Artificial Sequence
  Description of Artificial Sequence: Synthetic oligonucleotide
gugacggugaauguguccu

SEQ ID NO: 715316 - RNA, 19 nt, Artificial Sequence
  Description of Artificial Sequence: Synthetic oligonucleotide
cuguuggcaacgccgaaaa

SEQ ID NO: 715317 - RNA, 19 nt, Artificial Sequence
  Description of Artificial Sequence: Synthetic oligonucleotide
cacuaaggagugggcagcc

SEQ ID NO: 715318 - RNA, 19 nt, Artificial Sequence
  Description of Artificial Sequence: Synthetic oligonucleotide
gcuuugugggugguggccg

SEQ ID NO: 715319 - RNA, 19 nt, Artificial Sequence
  Description of Artificial Sequence: Synthetic oligonucleotide
aagaacuccccaagagguu

SEQ ID NO: 715320 - RNA, 19 nt, Artificial Sequence
  Description of Artificial Sequence: Synthetic oligonucleotide
ccagucggcacuucaguug

SEQ ID NO: 715321 - RNA, 19 nt, Artificial Sequence
  Description of Artificial Sequence: Synthetic oligonucleotide
ccugugguauaaagccugg

SEQ ID NO: 715322 - RNA, 19 nt, Artificial Sequence
  Description of Artificial Sequence: Synthetic oligonucleotide
uagccgggagcagacgaug

SEQ ID NO: 715323 - RNA, 19 nt, Artificial Sequence
  Description of Artificial Sequence: Synthetic oligonucleotide
gcucgacuggcccucacug

SEQ ID NO: 715324 - RNA, 19 nt, Artificial Sequence
  Description of Artificial Sequence: Synthetic oligonucleotide
cgcuguaguagucuaggcc

SEQ ID NO: 715325 - RNA, 19 nt, Artificial Sequence
  Description of Artificial Sequence: Synthetic oligonucleotide
ucauggaguagggucccau

SEQ ID NO: 715326 - RNA, 19 nt, Artificial Sequence
  Description of Artificial Sequence: Synthetic oligonucleotide
cauccagcucgggagcacc

SEQ ID NO: 715327 - RNA, 19 nt, Artificial Sequence
  Description of Artificial Sequence: Synthetic oligonucleotide
guaggauauggggcugcag

SEQ ID NO: 715328 - RNA, 19 nt, Artificial Sequence
  Description of Artificial Sequence: Synthetic oligonucleotide
ugcacacuugcagggguuc

SEQ ID NO: 715329 - RNA, 19 nt, Artificial Sequence
  Description of Artificial Sequence: Synthetic oligonucleotide
acucgcucucucucucucu

SEQ ID NO: 715330 - RNA, 19 nt, Artificial Sequence
  Description of Artificial Sequence: Synthetic oligonucleotide
gccugugguauaaagccug

SEQ ID NO: 715331 - RNA, 19 nt, Artificial Sequence
  Description of Artificial Sequence: Synthetic oligonucleotide
ugacggugaauguguccuc

SEQ ID NO: 715332 - RNA, 19 nt, Artificial Sequence
  Description of Artificial Sequence: Synthetic oligonucleotide
gcuguacccuugcaacuag

SEQ ID NO: 715333 - RNA, 19 nt, Artificial Sequence
  Description of Artificial Sequence: Synthetic oligonucleotide
uggcaacgccgaaaaccac

SEQ ID NO: 715334 - RNA, 19 nt, Artificial Sequence
  Description of Artificial Sequence: Synthetic oligonucleotide
gcuccguuuggacggguag

SEQ ID NO: 715335 - RNA, 19 nt, Artificial Sequence
  Description of Artificial Sequence: Synthetic oligonucleotide
ggugagguuccgccauggg

SEQ ID NO: 715336 - RNA, 19 nt, Artificial Sequence
  Description of Artificial Sequence: Synthetic oligonucleotide
cuugaagccccgcucgcaa

SEQ ID NO: 715337 - RNA, 19 nt, Artificial Sequence
  Description of Artificial Sequence: Synthetic oligonucleotide
  modified_base (10)..(10): a, c, u, g, unknown or other
ggacgacucngaaaagguc

SEQ ID NO: 715338 - RNA, 19 nt, Artificial Sequence
  Description of Artificial Sequence: Synthetic oligonucleotide
acacucgcucucucucucu

SEQ ID NO: 715339 - RNA, 19 nt, Artificial Sequence
  Description of Artificial Sequence: Synthetic oligonucleotide
agcgagucccucggcacag

SEQ ID NO: 715340 - RNA, 19 nt, Artificial Sequence
  Description of Artificial Sequence: Synthetic oligonucleotide
guguaguucgagaugucua

SEQ ID NO: 715341 - RNA, 19 nt, Artificial Sequence
  Description of Artificial Sequence: Synthetic oligonucleotide
acccuugcaacuaggggaa

SEQ ID NO: 715342 - RNA, 19 nt, Artificial Sequence
  Description of Artificial Sequence: Synthetic oligonucleotide
ucucucucucucucucuuu

SEQ ID NO: 715343 - RNA, 19 nt, Artificial Sequence
  Description of Artificial Sequence: Synthetic oligonucleotide
cguuuggacggguagccag

SEQ ID NO: 715344 - RNA, 19 nt, Artificial Sequence
  Description of Artificial Sequence: Synthetic oligonucleotide
guacuacagggaggugacg

SEQ ID NO: 715345 - RNA, 19 nt, Artificial Sequence
  Description of Artificial Sequence: Synthetic oligonucleotide
guggcguguaguucgagau

SEQ ID NO: 715346 - RNA, 19 nt, Artificial Sequence
  Description of Artificial Sequence: Synthetic oligonucleotide
uuugugggugguggccgca

SEQ ID NO: 715347 - RNA, 19 nt, Artificial Sequence
  Description of Artificial Sequence: Synthetic oligonucleotide
accucgugguccagucggc

SEQ ID NO: 715348 - RNA, 19 nt, Artificial Sequence
  Description of Artificial Sequence: Synthetic oligonucleotide
ucgcucucucucucucucu

SEQ ID NO: 715349 - RNA, 19 nt, Artificial Sequence
  Description of Artificial Sequence: Synthetic oligonucleotide
cgguugauugaacugggug

SEQ ID NO: 715350 - RNA, 19 nt, Artificial Sequence
  Description of Artificial Sequence: Synthetic oligonucleotide
cuguaguagucuaggccaa

SEQ ID NO: 715351 - RNA, 19 nt, Artificial Sequence
  Description of Artificial Sequence: Synthetic oligonucleotide
ugcuccguuuggacgggua

SEQ ID NO: 715352 - RNA, 19 nt, Artificial Sequence
  Description of Artificial Sequence: Synthetic oligonucleotide
guuuggacggguagccaga

SEQ ID NO: 715353 - RNA, 19 nt, Artificial Sequence
  Description of Artificial Sequence: Synthetic oligonucleotide
cuggauaccuguaggcagu

SEQ ID NO: 715354 - RNA, 19 nt, Artificial Sequence
  Description of Artificial Sequence: Synthetic oligonucleotide
cuaucuccgcuguaguagu

SEQ ID NO: 715355 - RNA, 19 nt, Artificial Sequence
  Description of Artificial Sequence: Synthetic oligonucleotide
ucgaacacugugggcgggu

SEQ ID NO: 715356 - RNA, 19 nt, Artificial Sequence
  Description of Artificial Sequence: Synthetic oligonucleotide
ccggugcuccguuuggacg

SEQ ID NO: 715357 - RNA, 19 nt, Artificial Sequence
  Description of Artificial Sequence: Synthetic oligonucleotide
cugaacccaccuugccuuc

SEQ ID NO: 715358 - RNA, 19 nt, Artificial Sequence
  Description of Artificial Sequence: Synthetic oligonucleotide
gacgcugggaggggucuug

SEQ ID NO: 715359 - RNA, 19 nt, Artificial Sequence
  Description of Artificial Sequence: Synthetic oligonucleotide
cacucgcucucucucucuc

SEQ ID NO: 715360 - RNA, 19 nt, Artificial Sequence
  Description of Artificial Sequence: Synthetic oligonucleotide
gguccagucggcacuucag

SEQ ID NO: 715361 - RNA, 19 nt, Artificial Sequence
  Description of Artificial Sequence: Synthetic oligonucleotide
ccuugccuucauagggugg

SEQ ID NO: 715362 - RNA, 19 nt, Artificial Sequence
  Description of Artificial Sequence: Synthetic oligonucleotide
gucuaggccaaggucugga

SEQ ID NO: 715363 - RNA, 19 nt, Artificial Sequence
  Description of Artificial Sequence: Synthetic oligonucleotide
caccuucggcuucugcgug

SEQ ID NO: 715364 - RNA, 19 nt, Artificial Sequence
  Description of Artificial Sequence: Synthetic oligonucleotide
aacccaccuugccuucaua

SEQ ID NO: 715365 - RNA, 19 nt, Artificial Sequence
  Description of Artificial Sequence: Synthetic oligonucleotide
gaaccugguggguaccaau

SEQ ID NO: 715366 - RNA, 19 nt, Artificial Sequence
  Description of Artificial Sequence: Synthetic oligonucleotide
caggcuagacaagcucgac

SEQ ID NO: 715367 - RNA, 19 nt, Artificial Sequence
  Description of Artificial Sequence: Synthetic oligonucleotide
cuaggccaaggucuggacu

SEQ ID NO: 715368 - RNA, 19 nt, Artificial Sequence
  Description of Artificial Sequence: Synthetic oligonucleotide
ggugggaaaugcuugccau

SEQ ID NO: 715369 - RNA, 19 nt, Artificial Sequence
  Description of Artificial Sequence: Synthetic oligonucleotide
ggcguguaguucgagaugu

SEQ ID NO: 715370 - RNA, 19 nt, Artificial Sequence
  Description of Artificial Sequence: Synthetic oligonucleotide
gcagcgagucccucggcac

SEQ ID NO: 715371 - RNA, 19 nt, Artificial Sequence
  Description of Artificial Sequence: Synthetic oligonucleotide
caccgaggcugggagaguc

SEQ ID NO: 715372 - RNA, 19 nt, Artificial Sequence
  Description of Artificial Sequence: Synthetic oligonucleotide
gcuacgggcagcugaaccu

SEQ ID NO: 715373 - RNA, 19 nt, Artificial Sequence
  Description of Artificial Sequence: Synthetic oligonucleotide
ccuucauagggugggcuac

SEQ ID NO: 715374 - RNA, 19 nt, Artificial Sequence
  Description of Artificial Sequence: Synthetic oligonucleotide
  modified_base (13)..(13): a, c, u, g, unknown or other
ggaggacgacucngaaaag

SEQ ID NO: 715375 - RNA, 19 nt, Artificial Sequence
  Description of Artificial Sequence: Synthetic oligonucleotide
ggguucuagacaccuugaa

SEQ ID NO: 715376 - RNA, 19 nt, Artificial Sequence
  Description of Artificial Sequence: Synthetic oligonucleotide
gcauacagccuccguccug

SEQ ID NO: 715377 - RNA, 19 nt, Artificial Sequence
  Description of Artificial Sequence: Synthetic oligonucleotide
uuccgccaugggccccagg

SEQ ID NO: 715378 - RNA, 19 nt, Artificial Sequence
  Description of Artificial Sequence: Synthetic oligonucleotide
acggccgucuguugcuuua

SEQ ID NO: 715379 - RNA, 19 nt, Artificial Sequence
  Description of Artificial Sequence: Synthetic oligonucleotide
gcaacgccgaaaaccacca

SEQ ID NO: 715380 - RNA, 19 nt, Artificial Sequence
  Description of Artificial Sequence: Synthetic oligonucleotide
ccgcuguaguagucuaggc

SEQ ID NO: 715381 - RNA, 19 nt, Artificial Sequence
  Description of Artificial Sequence: Synthetic oligonucleotide
ccaccaaccgguugauuga

SEQ ID NO: 715382 - RNA, 19 nt, Artificial Sequence
  Description of Artificial Sequence: Synthetic oligonucleotide
gucaaacgaccuguagaua

SEQ ID NO: 715383 - RNA, 19 nt, Artificial Sequence
  Description of Artificial Sequence: Synthetic oligonucleotide
acuaccccggccaccccga

SEQ ID NO: 715384 - RNA, 19 nt, Artificial Sequence
  Description of Artificial Sequence: Synthetic oligonucleotide
ggugcuccguuuggacggg

SEQ ID NO: 715385 - RNA, 19 nt, Artificial Sequence
  Description of Artificial Sequence: Synthetic oligonucleotide
cagcgagucccucggcaca

SEQ ID NO: 715386 - RNA, 19 nt, Artificial Sequence
  Description of Artificial Sequence: Synthetic oligonucleotide
ggccgucuguugcuuuacc

SEQ ID NO: 715387 - RNA, 19 nt, Artificial Sequence
  Description of Artificial Sequence: Synthetic oligonucleotide
cuucggcuucugcguggag

SEQ ID NO: 715388 - RNA, 19 nt, Artificial Sequence
  Description of Artificial Sequence: Synthetic oligonucleotide
ccuugcaacuaggggaauc

SEQ ID NO: 715389 - RNA, 19 nt, Artificial Sequence
  Description of Artificial Sequence: Synthetic oligonucleotide
gaugcgccugugguauaaa

SEQ ID NO: 715390 - RNA, 19 nt, Artificial Sequence
  Description of Artificial Sequence: Synthetic oligonucleotide
gcccugaacccaccuugcc

SEQ ID NO: 715391 - RNA, 19 nt, Artificial Sequence
  Description of Artificial Sequence: Synthetic oligonucleotide
ccagcucgggagcaccgag

SEQ ID NO: 715392 - RNA, 19 nt, Artificial Sequence
  Description of Artificial Sequence: Synthetic oligonucleotide
acggguagccagaggcagu

SEQ ID NO: 715393 - RNA, 19 nt, Artificial Sequence
  Description of Artificial Sequence: Synthetic oligonucleotide
cuguggcguguaguucgag

SEQ ID NO: 715394 - RNA, 19 nt, Artificial Sequence
  Description of Artificial Sequence: Synthetic oligonucleotide
ccaggcuagacaagcucga

SEQ ID NO: 715395 - RNA, 19 nt, Artificial Sequence
  Description of Artificial Sequence: Synthetic oligonucleotide
cucucucucucucucuuuu

SEQ ID NO: 715396 - RNA, 19 nt, Artificial Sequence
  Description of Artificial Sequence: Synthetic oligonucleotide
gucggcacuucaguuggua

SEQ ID NO: 715397 - RNA, 19 nt, Artificial Sequence
  Description of Artificial Sequence: Synthetic oligonucleotide
gguaggauauggggcugca

SEQ ID NO: 715398 - RNA, 19 nt, Artificial Sequence
  Description of Artificial Sequence: Synthetic oligonucleotide
cagcagcgagucccucggc

SEQ ID NO: 715399 - RNA, 19 nt, Artificial Sequence
  Description of Artificial Sequence: Synthetic oligonucleotide
gcccagaugugaggccucg

SEQ ID NO: 715400 - RNA, 19 nt, Artificial Sequence
  Description of Artificial Sequence: Synthetic oligonucleotide
  modified_base (19)..(19): a, c, u, g, unknown or other
gcugucggaggacgacucn

SEQ ID NO: 715401 - RNA, 19 nt, Artificial Sequence
  Description of Artificial Sequence: Synthetic oligonucleotide
gggguucuagacaccuuga

SEQ ID NO: 715402 - RNA, 19 nt, Artificial Sequence
  Description of Artificial Sequence: Synthetic oligonucleotide
gugguggccgcagcucuuc

SEQ ID NO: 715403 - RNA, 19 nt, Artificial Sequence
  Description of Artificial Sequence: Synthetic oligonucleotide
cccggugcuccguuuggac

SEQ ID NO: 715404 - RNA, 19 nt, Artificial Sequence
  Description of Artificial Sequence: Synthetic oligonucleotide
caaaaccucgugguccagu

SEQ ID NO: 715405 - RNA, 19 nt, Artificial Sequence
  Description of Artificial Sequence: Synthetic oligonucleotide
gccgucuguugcuuuaccu

SEQ ID NO: 715406 - RNA, 19 nt, Artificial Sequence
  Description of Artificial Sequence: Synthetic oligonucleotide
cugcuaucuccgcuguagu

SEQ ID NO: 715407 - RNA, 19 nt, Artificial Sequence
  Description of Artificial Sequence: Synthetic oligonucleotide
caccaaccgguugauugaa

SEQ ID NO: 715408 - RNA, 19 nt, Artificial Sequence
  Description of Artificial Sequence: Synthetic oligonucleotide
cgagucccucggcacaggg

SEQ ID NO: 715409 - RNA, 19 nt, Artificial Sequence
  Description of Artificial Sequence: Synthetic oligonucleotide
accgaggcugggagaguca

SEQ ID NO: 715410 - RNA, 19 nt, Artificial Sequence
  Description of Artificial Sequence: Synthetic oligonucleotide
ggcugagcaggccccacua

SEQ ID NO: 715411 - RNA, 19 nt, Artificial Sequence
  Description of Artificial Sequence: Synthetic oligonucleotide
ccaugcgaauuugcacacc

SEQ ID NO: 715412 - RNA, 19 nt, Artificial Sequence
  Description of Artificial Sequence: Synthetic oligonucleotide
ggucgcgcucucccacacc

SEQ ID NO: 715413 - RNA, 19 nt, Artificial Sequence
  Description of Artificial Sequence: Synthetic oligonucleotide
guggacgcugggagggguc

SEQ ID NO: 715414 - RNA, 19 nt, Artificial Sequence
  Description of Artificial Sequence: Synthetic oligonucleotide
ccgggccaucuccacgugg

SEQ ID NO: 715415 - RNA, 19 nt, Artificial Sequence
  Description of Artificial Sequence: Synthetic oligonucleotide
cucucucucucucucucuu

SEQ ID NO: 715416 - RNA, 19 nt, Artificial Sequence
  Description of Artificial Sequence: Synthetic oligonucleotide
aggaugcgccugugguaua

SEQ ID NO: 715417 - RNA, 19 nt, Artificial Sequence
  Description of Artificial Sequence: Synthetic oligonucleotide
gaagccccgcucgcaaccu

SEQ ID NO: 715418 - RNA, 19 nt, Artificial Sequence
  Description of Artificial Sequence: Synthetic oligonucleotide
cacuguuggcaacgccgaa

SEQ ID NO: 715419 - RNA, 19 nt, Artificial Sequence
  Description of Artificial Sequence: Synthetic oligonucleotide
caugggccccaggaagcca

SEQ ID NO: 715420 - RNA, 19 nt, Artificial Sequence
  Description of Artificial Sequence: Synthetic oligonucleotide
ucgcaaccucuugcacacu

SEQ ID NO: 715421 - RNA, 19 nt, Artificial Sequence
  Description of Artificial Sequence: Synthetic oligonucleotide
gugggugaauacgccuucu

SEQ ID NO: 715422 - RNA, 19 nt, Artificial Sequence
  Description of Artificial Sequence: Synthetic oligonucleotide
gggucgcgcucucccacac

SEQ ID NO: 715423 - RNA, 19 nt, Artificial Sequence
  Description of Artificial Sequence: Synthetic oligonucleotide
gugcugucggaggacgacu

SEQ ID NO: 715424 - RNA, 19 nt, Artificial Sequence
  Description of Artificial Sequence: Synthetic oligonucleotide
cuucugcguggaggagaug

SEQ ID NO: 715425 - RNA, 19 nt, Artificial Sequence
  Description of Artificial Sequence: Synthetic oligonucleotide
ugucggccuugggcguggc

SEQ ID NO: 715426 - RNA, 19 nt, Artificial Sequence
  Description of Artificial Sequence: Synthetic oligonucleotide
guaccaccucgcuccuucu

SEQ ID NO: 715427 - RNA, 19 nt, Artificial Sequence
  Description of Artificial Sequence: Synthetic oligonucleotide
cgcucucucucucucucuc

SEQ ID NO: 715428 - RNA, 19 nt, Artificial Sequence
  Description of Artificial Sequence: Synthetic oligonucleotide
guagccgggagcagacgau

SEQ ID NO: 715429 - RNA, 19 nt, Artificial Sequence
  Description of Artificial Sequence: Synthetic oligonucleotide
ccgcucgcaaccucuugca

SEQ ID NO: 715430 - RNA, 19 nt, Artificial Sequence
  Description of Artificial Sequence: Synthetic oligonucleotide
gcacaggggacaggguuaa

SEQ ID NO: 715431 - RNA, 19 nt, Artificial Sequence
  Description of Artificial Sequence: Synthetic oligonucleotide
gcucucucucucucucucu

SEQ ID NO: 715432 - RNA, 19 nt, Artificial Sequence
  Description of Artificial Sequence: Synthetic oligonucleotide
acggccaggcuuggagcua

SEQ ID NO: 715433 - RNA, 19 nt, Artificial Sequence
  Description of Artificial Sequence: Synthetic oligonucleotide
cccugaacccaccuugccu

SEQ ID NO: 715434 - RNA, 19 nt, Artificial Sequence
  Description of Artificial Sequence: Synthetic oligonucleotide
gccauccagcucgggagca

SEQ ID NO: 715435 - RNA, 19 nt, Artificial Sequence
  Description of Artificial Sequence: Synthetic oligonucleotide
ggggugcaaagggcaggug

SEQ ID NO: 715436 - RNA, 19 nt, Artificial Sequence
  Description of Artificial Sequence: Synthetic oligonucleotide
cggugggaaaugcuugcca

SEQ ID NO: 715437 - RNA, 19 nt, Artificial Sequence
  Description of Artificial Sequence: Synthetic oligonucleotide
gcuucugcguggaggagau

SEQ ID NO: 715438 - RNA, 19 nt, Artificial Sequence
  Description of Artificial Sequence: Synthetic oligonucleotide
cacgggaccacagcagguu

SEQ ID NO: 715439 - RNA, 19 nt, Artificial Sequence
  Description of Artificial Sequence: Synthetic oligonucleotide
ccauccagcucgggagcac

SEQ ID NO: 715440 - RNA, 19 nt, Artificial Sequence
  Description of Artificial Sequence: Synthetic oligonucleotide
  modified_base (7)..(7): a, c, u, g, unknown or other
cgacucngaaaaggucuca

SEQ ID NO: 715441 - RNA, 19 nt, Artificial Sequence
  Description of Artificial Sequence: Synthetic oligonucleotide
gcguguaguucgagauguc

SEQ ID NO: 715442 - RNA, 19 nt, Artificial Sequence
  Description of Artificial Sequence: Synthetic oligonucleotide
gcggccgggccaucuccac

SEQ ID NO: 715443 - RNA, 19 nt, Artificial Sequence
  Description of Artificial Sequence: Synthetic oligonucleotide
cucuuccuugaagccgagu

SEQ ID NO: 715444 - RNA, 19 nt, Artificial Sequence
  Description of Artificial Sequence: Synthetic oligonucleotide
cacaugcagucagcuuugu

SEQ ID NO: 715445 - RNA, 19 nt, Artificial Sequence
  Description of Artificial Sequence: Synthetic oligonucleotide
ccccgcucgcaaccucuug

SEQ ID NO: 715446 - RNA, 19 nt, Artificial Sequence
  Description of Artificial Sequence: Synthetic oligonucleotide
ccguccugcccaggaaguc

SEQ ID NO: 715447 - RNA, 19 nt, Artificial Sequence
  Description of Artificial Sequence: Synthetic oligonucleotide
gggacaggguuaagucacu

SEQ ID NO: 715448 - RNA, 19 nt, Artificial Sequence
  Description of Artificial Sequence: Synthetic oligonucleotide
gaccuggcggccgggccau

SEQ ID NO: 715449 - RNA, 19 nt, Artificial Sequence
  Description of Artificial Sequence: Synthetic oligonucleotide
ccacuaccccggccacccc

SEQ ID NO: 715450 - RNA, 19 nt, Artificial Sequence
  Description of Artificial Sequence: Synthetic oligonucleotide
gccguccacggccaggcuu

SEQ ID NO: 715451 - RNA, 19 nt, Artificial Sequence
  Description of Artificial Sequence: Synthetic oligonucleotide
ccgguugauugaacugggu

SEQ ID NO: 715452 - RNA, 19 nt, Artificial Sequence
  Description of Artificial Sequence: Synthetic oligonucleotide
ccguuuggacggguagcca

SEQ ID NO: 715453 - RNA, 19 nt, Artificial Sequence
  Description of Artificial Sequence: Synthetic oligonucleotide
ccacgggaccacagcaggu

SEQ ID NO: 715454 - RNA, 19 nt, Artificial Sequence
  Description of Artificial Sequence: Synthetic oligonucleotide
cgggaccacagcagguuua

SEQ ID NO: 715455 - RNA, 19 nt, Artificial Sequence
  Description of Artificial Sequence: Synthetic oligonucleotide
cguccacggccaggcuugg

SEQ ID NO: 715456 - RNA, 19 nt, Artificial Sequence
  Description of Artificial Sequence: Synthetic oligonucleotide
gugcuccguuuggacgggu

SEQ ID NO: 715457 - RNA, 19 nt, Artificial Sequence
  Description of Artificial Sequence: Synthetic oligonucleotide
caccaccaaccgguugauu

SEQ ID NO: 715458 - RNA, 19 nt, Artificial Sequence
  Description of Artificial Sequence: Synthetic oligonucleotide
cuguaccaccucgcuccuu

SEQ ID NO: 715459 - RNA, 19 nt, Artificial Sequence
  Description of Artificial Sequence: Synthetic oligonucleotide
cgacuggcccucacugcuu

SEQ ID NO: 715460 - RNA, 19 nt, Artificial Sequence
  Description of Artificial Sequence: Synthetic oligonucleotide
gccccgcucgcaaccucuu

SEQ ID NO: 715461 - RNA, 19 nt, Artificial Sequence
  Description of Artificial Sequence: Synthetic oligonucleotide
uuuguuauagauaucaggg

SEQ ID NO: 715462 - RNA, 19 nt, Artificial Sequence
  Description of Artificial Sequence: Synthetic oligonucleotide
acaucuacaacacaggugc

SEQ ID NO: 715463 - RNA, 19 nt, Artificial Sequence
  Description of Artificial Sequence: Synthetic oligonucleotide
aaacguagcacacacagac

SEQ ID NO: 715464 - RNA, 19 nt, Artificial Sequence
  Description of Artificial Sequence: Synthetic oligonucleotide
ucagggauuaauaagaugc

SEQ ID NO: 715465 - RNA, 19 nt, Artificial Sequence
  Description of Artificial Sequence: Synthetic oligonucleotide
aaaacagcgccauuggagc

SEQ ID NO: 715466 - RNA, 19 nt, Artificial Sequence
  Description of Artificial Sequence: Synthetic oligonucleotide
uguaugacaacaaugaagu

SEQ ID NO: 715467 - RNA, 19 nt, Artificial Sequence
  Description of Artificial Sequence: Synthetic oligonucleotide
uggguuaacauacaaagcc

SEQ ID NO: 715468 - RNA, 19 nt, Artificial Sequence
  Description of Artificial Sequence: Synthetic oligonucleotide
uauuguaacaguccagugg

SEQ ID NO: 715469 - RNA, 19 nt, Artificial Sequence
  Description of Artificial Sequence: Synthetic oligonucleotide
auuguaacaguccaguggg

SEQ ID NO: 715470 - RNA, 19 nt, Artificial Sequence
  Description of Artificial Sequence: Synthetic oligonucleotide
aguggguuaacauacaaag

SEQ ID NO: 715471 - RNA, 19 nt, Artificial Sequence
  Description of Artificial Sequence: Synthetic oligonucleotide
uguaagggaacccugcucg

SEQ ID NO: 715472 - RNA, 19 nt, Artificial Sequence
  Description of Artificial Sequence: Synthetic oligonucleotide
uuuaucaaggcccagggcu

SEQ ID NO: 715473 - RNA, 19 nt, Artificial Sequence
  Description of Artificial Sequence: Synthetic oligonucleotide
ugaguagugucuaagcacg

SEQ ID NO: 715474 - RNA, 19 nt, Artificial Sequence
  Description of Artificial Sequence: Synthetic oligonucleotide
aacauucgaacaccaaagc

SEQ ID NO: 715475 - RNA, 19 nt, Artificial Sequence
  Description of Artificial Sequence: Synthetic oligonucleotide
uuuuagaccauauugccug

SEQ ID NO: 715476 - RNA, 19 nt, Artificial Sequence
  Description of Artificial Sequence: Synthetic oligonucleotide
auuaauaagaugcaccugu

SEQ ID NO: 715477 - RNA, 19 nt, Artificial Sequence
  Description of Artificial Sequence: Synthetic oligonucleotide
accuguaauacuuuaaauc

SEQ ID NO: 715478 - RNA, 19 nt, Artificial Sequence
  Description of Artificial Sequence: Synthetic oligonucleotide
aaucgaaacugauaaagca

SEQ ID NO: 715479 - RNA, 19 nt, Artificial Sequence
  Description of Artificial Sequence: Synthetic oligonucleotide
uuaacauaaaauugaauuc

SEQ ID NO: 715480 - RNA, 19 nt, Artificial Sequence
  Description of Artificial Sequence: Synthetic oligonucleotide
ucgaaacugauaaagcagg

SEQ ID NO: 715481 - RNA, 19 nt, Artificial Sequence
  Description of Artificial Sequence: Synthetic oligonucleotide
aaaauuaagcuuaaaguca

SEQ ID NO: 715482 - RNA, 19 nt, Artificial Sequence
  Description of Artificial Sequence: Synthetic oligonucleotide
uaauucgccugaaugaagg

SEQ ID NO: 715483 - RNA, 19 nt, Artificial Sequence
  Description of Artificial Sequence: Synthetic oligonucleotide
aggucuugugaucacaucc

SEQ ID NO: 715484 - RNA, 19 nt, Artificial Sequence
  Description of Artificial Sequence: Synthetic oligonucleotide
uaacauucgaacaccaaag

SEQ ID NO: 715485 - RNA, 19 nt, Artificial Sequence
  Description of Artificial Sequence: Synthetic oligonucleotide
acgaaucugaaacucaugg

SEQ ID NO: 715486 - RNA, 19 nt, Artificial Sequence
  Description of Artificial Sequence: Synthetic oligonucleotide
accucgacacaucagagcc

SEQ ID NO: 715487 - RNA, 19 nt, Artificial Sequence
  Description of Artificial Sequence: Synthetic oligonucleotide
aauaagaugcaccuguaau

SEQ ID NO: 715488 - RNA, 19 nt, Artificial Sequence
  Description of Artificial Sequence: Synthetic oligonucleotide
guuuguuauagauaucagg

SEQ ID NO: 715489 - RNA, 19 nt, Artificial Sequence
  Description of Artificial Sequence: Synthetic oligonucleotide
aauggguuuggaugcagac

SEQ ID NO: 715490 - RNA, 19 nt, Artificial Sequence
  Description of Artificial Sequence: Synthetic oligonucleotide
uaucauauguacuaacucu

SEQ ID NO: 715491 - RNA, 19 nt, Artificial Sequence
  Description of Artificial Sequence: Synthetic oligonucleotide
uucgccugaaugaaggugg

SEQ ID NO: 715492 - RNA, 19 nt, Artificial Sequence
  Description of Artificial Sequence: Synthetic oligonucleotide
uuauggaacaucaaaccac

SEQ ID NO: 715493 - RNA, 19 nt, Artificial Sequence
  Description of Artificial Sequence: Synthetic oligonucleotide
auugcaugagaccauauca

SEQ ID NO: 715494 - RNA, 19 nt, Artificial Sequence
  Description of Artificial Sequence: Synthetic oligonucleotide
aauugaccccuucuaauag

SEQ ID NO: 715495 - RNA, 19 nt, Artificial Sequence
  Description of Artificial Sequence: Synthetic oligonucleotide
uguuauagauaucagggau

SEQ ID NO: 715496 - RNA, 19 nt, Artificial Sequence
  Description of Artificial Sequence: Synthetic oligonucleotide
ugggugacgaaucugaaac

SEQ ID NO: 715497 - RNA, 19 nt, Artificial Sequence
  Description of Artificial Sequence: Synthetic oligonucleotide
ucuaagcacgccaauacug

SEQ ID NO: 715498 - RNA, 19 nt, Artificial Sequence
  Description of Artificial Sequence: Synthetic oligonucleotide
uaaucgaaacugauaaagc

SEQ ID NO: 715499 - RNA, 19 nt, Artificial Sequence
  Description of Artificial Sequence: Synthetic oligonucleotide
acauucgaacaccaaagcg

SEQ ID NO: 715500 - RNA, 19 nt, Artificial Sequence
  Description of Artificial Sequence: Synthetic oligonucleotide
ucuuuacguauuuaugucc

SEQ ID NO: 715501 - RNA, 19 nt, Artificial Sequence
  Description of Artificial Sequence: Synthetic oligonucleotide
auugccagccaucaaacag

SEQ ID NO: 715502 - RNA, 19 nt, Artificial Sequence
  Description of Artificial Sequence: Synthetic oligonucleotide
ugcuguuuguuauagauau

SEQ ID NO: 715503 - RNA, 19 nt, Artificial Sequence
  Description of Artificial Sequence: Synthetic oligonucleotide
aagaucagaggauugucca

SEQ ID NO: 715504 - RNA, 19 nt, Artificial Sequence
  Description of Artificial Sequence: Synthetic oligonucleotide
caucagacgaacaacaguc

SEQ ID NO: 715505 - RNA, 19 nt, Artificial Sequence
  Description of Artificial Sequence: Synthetic oligonucleotide
aacaccucgacacaucaga

SEQ ID NO: 715506 - RNA, 19 nt, Artificial Sequence
  Description of Artificial Sequence: Synthetic oligonucleotide
agaccauauugccuggucc

SEQ ID NO: 715507 - RNA, 19 nt, Artificial Sequence
  Description of Artificial Sequence: Synthetic oligonucleotide
ugucccacgauuccaaaag

SEQ ID NO: 715508 - RNA, 19 nt, Artificial Sequence
  Description of Artificial Sequence: Synthetic oligonucleotide
gaucuagaauggcaggucg

SEQ ID NO: 715509 - RNA, 19 nt, Artificial Sequence
  Description of Artificial Sequence: Synthetic oligonucleotide
uacguauuuauguccagag

SEQ ID NO: 715510 - RNA, 19 nt, Artificial Sequence
  Description of Artificial Sequence: Synthetic oligonucleotide
cugauaaauccacaguucc

SEQ ID NO: 715511 - RNA, 19 nt, Artificial Sequence
  Description of Artificial Sequence: Synthetic oligonucleotide
aaacagcgccauuggagcc

SEQ ID NO: 715512 - RNA, 19 nt, Artificial Sequence
  Description of Artificial Sequence: Synthetic oligonucleotide
uggauauucaauugacccc

SEQ ID NO: 715513 - RNA, 19 nt, Artificial Sequence
  Description of Artificial Sequence: Synthetic oligonucleotide
ucuacgcugugcaggaugg

SEQ ID NO: 715514 - RNA, 19 nt, Artificial Sequence
  Description of Artificial Sequence: Synthetic oligonucleotide
gauguccuggucuaaauga

SEQ ID NO: 715515 - RNA, 19 nt, Artificial Sequence
  Description of Artificial Sequence: Synthetic oligonucleotide
aucaguaucauauguacua

SEQ ID NO: 715516 - RNA, 19 nt, Artificial Sequence
  Description of Artificial Sequence: Synthetic oligonucleotide
uggguguaugacaacaaug

SEQ ID NO: 715517 - RNA, 19 nt, Artificial Sequence
  Description of Artificial Sequence: Synthetic oligonucleotide
ugucuaagcacgccaauac

SEQ ID NO: 715518 - RNA, 19 nt, Artificial Sequence
  Description of Artificial Sequence: Synthetic oligonucleotide
cauucucgcugauaaaucc

SEQ ID NO: 715519 - RNA, 19 nt, Artificial Sequence
  Description of Artificial Sequence: Synthetic oligonucleotide
aacaccaaagcguugccau

SEQ ID NO: 715520 - RNA, 19 nt, Artificial Sequence
  Description of Artificial Sequence: Synthetic oligonucleotide
acagggauucgucuuguac

SEQ ID NO: 715521 - RNA, 19 nt, Artificial Sequence
  Description of Artificial Sequence: Synthetic oligonucleotide
guugcuggguaaaacagcg

SEQ ID NO: 715522 - RNA, 19 nt, Artificial Sequence
  Description of Artificial Sequence: Synthetic oligonucleotide
accauaucacuucaauauc

SEQ ID NO: 715523 - RNA, 19 nt, Artificial Sequence
  Description of Artificial Sequence: Synthetic oligonucleotide
ucuaauaggccagugaaua

SEQ ID NO: 715524 - RNA, 19 nt, Artificial Sequence
  Description of Artificial Sequence: Synthetic oligonucleotide
acauacaaagccucuucuc

SEQ ID NO: 715525 - RNA, 19 nt, Artificial Sequence
  Description of Artificial Sequence: Synthetic oligonucleotide
aauaucugccagaacagcu

SEQ ID NO: 715526 - RNA, 19 nt, Artificial Sequence
  Description of Artificial Sequence: Synthetic oligonucleotide
acgauaggucgcuucacgc

SEQ ID NO: 715527 - RNA, 19 nt, Artificial Sequence
  Description of Artificial Sequence: Synthetic oligonucleotide
gauaggucgcuucacgccc

SEQ ID NO: 715528 - RNA, 19 nt, Artificial Sequence
  Description of Artificial Sequence: Synthetic oligonucleotide
aaauuaagcuuaaagucaa

SEQ ID NO: 715529 - RNA, 19 nt, Artificial Sequence
  Description of Artificial Sequence: Synthetic oligonucleotide
gaucagaggauuguccacg

SEQ ID NO: 715530 - RNA, 19 nt, Artificial Sequence
  Description of Artificial Sequence: Synthetic oligonucleotide
cuaagcacgccaauacugc

SEQ ID NO: 715531 - RNA, 19 nt, Artificial Sequence
  Description of Artificial Sequence: Synthetic oligonucleotide
uuguuauagauaucaggga

SEQ ID NO: 715532 - RNA, 19 nt, Artificial Sequence
  Description of Artificial Sequence: Synthetic oligonucleotide
uucaucuccuaaucgaaac

SEQ ID NO: 715533 - RNA, 19 nt, Artificial Sequence
  Description of Artificial Sequence: Synthetic oligonucleotide
agacaaagccguguguucc

SEQ ID NO: 715534 - RNA, 19 nt, Artificial Sequence
  Description of Artificial Sequence: Synthetic oligonucleotide
uucgucuuguaccauuuga

SEQ ID NO: 715535 - RNA, 19 nt, Artificial Sequence
  Description of Artificial Sequence: Synthetic oligonucleotide
auucauuuaauugguagga

SEQ ID NO: 715536 - RNA, 19 nt, Artificial Sequence
  Description of Artificial Sequence: Synthetic oligonucleotide
ugauaaauccacaguuccu

SEQ ID NO: 715537 - RNA, 19 nt, Artificial Sequence
  Description of Artificial Sequence: Synthetic oligonucleotide
uucuuuacguauuuauguc

SEQ ID NO: 715538 - RNA, 19 nt, Artificial Sequence
  Description of Artificial Sequence: Synthetic oligonucleotide
acgaacaacagucuacgcu

SEQ ID NO: 715539 - RNA, 19 nt, Artificial Sequence
  Description of Artificial Sequence: Synthetic oligonucleotide
uugcaugagaccauaucac

SEQ ID NO: 715540 - RNA, 19 nt, Artificial Sequence
  Description of Artificial Sequence: Synthetic oligonucleotide
auugaccccuucuaauagg

SEQ ID NO: 715541 - RNA, 19 nt, Artificial Sequence
  Description of Artificial Sequence: Synthetic oligonucleotide
cugaguagugucuaagcac

SEQ ID NO: 715542 - RNA, 19 nt, Artificial Sequence
  Description of Artificial Sequence: Synthetic oligonucleotide
ucuuguaccauuugacauc

SEQ ID NO: 715543 - RNA, 19 nt, Artificial Sequence
  Description of Artificial Sequence: Synthetic oligonucleotide
ugcaagaggaggcaaucca

SEQ ID NO: 715544 - RNA, 19 nt, Artificial Sequence
  Description of Artificial Sequence: Synthetic oligonucleotide
uagauaucagggauuaaua

SEQ ID NO: 715545 - RNA, 19 nt, Artificial Sequence
  Description of Artificial Sequence: Synthetic oligonucleotide
agauaucagggauuaauaa

SEQ ID NO: 715546 - RNA, 19 nt, Artificial Sequence
  Description of Artificial Sequence: Synthetic oligonucleotide
uucaauugaccccuucuaa

SEQ ID NO: 715547 - RNA, 19 nt, Artificial Sequence
  Description of Artificial Sequence: Synthetic oligonucleotide
aaacagucucccugggaag

SEQ ID NO: 715548 - RNA, 19 nt, Artificial Sequence
  Description of Artificial Sequence: Synthetic oligonucleotide
uauugcaugagaccauauc

SEQ ID NO: 715549 - RNA, 19 nt, Artificial Sequence
  Description of Artificial Sequence: Synthetic oligonucleotide
uugaccccuucuaauaggc

SEQ ID NO: 715550 - RNA, 19 nt, Artificial Sequence
  Description of Artificial Sequence: Synthetic oligonucleotide
auagauaucagggauuaau

SEQ ID NO: 715551 - RNA, 19 nt, Artificial Sequence
  Description of Artificial Sequence: Synthetic oligonucleotide
agacgaacaacagucuacg

SEQ ID NO: 715552 - RNA, 19 nt, Artificial Sequence
  Description of Artificial Sequence: Synthetic oligonucleotide
aucgaaacugauaaagcag

SEQ ID NO: 715553 - RNA, 19 nt, Artificial Sequence
  Description of Artificial Sequence: Synthetic oligonucleotide
agcuuuauggaacaucaaa

SEQ ID NO: 715554 - RNA, 19 nt, Artificial Sequence
  Description of Artificial Sequence: Synthetic oligonucleotide
guaucauauguacuaacuc

SEQ ID NO: 715555 - RNA, 19 nt, Artificial Sequence
  Description of Artificial Sequence: Synthetic oligonucleotide
ucuuuaaggugcugcaaga

SEQ ID NO: 715556 - RNA, 19 nt, Artificial Sequence
  Description of Artificial Sequence: Synthetic oligonucleotide
cagugaucuagaauggcag

SEQ ID NO: 715557 - RNA, 19 nt, Artificial Sequence
  Description of Artificial Sequence: Synthetic oligonucleotide
gaccauaucacuucaauau

SEQ ID NO: 715558 - RNA, 19 nt, Artificial Sequence
  Description of Artificial Sequence: Synthetic oligonucleotide
cauaucacuucaauaucug

SEQ ID NO: 715559 - RNA, 19 nt, Artificial Sequence
  Description of Artificial Sequence: Synthetic oligonucleotide
gaagaucagaggauugucc

SEQ ID NO: 715560 - RNA, 19 nt, Artificial Sequence
  Description of Artificial Sequence: Synthetic oligonucleotide
ucgaccaauucuuaaaguu

SEQ ID NO: 715561 - RNA, 19 nt, Artificial Sequence
  Description of Artificial Sequence: Synthetic oligonucleotide
uuauagauaucagggauua

SEQ ID NO: 715562 - RNA, 19 nt, Artificial Sequence
  Description of Artificial Sequence: Synthetic oligonucleotide
ucgucuuguaccauuugac

SEQ ID NO: 715563 - RNA, 19 nt, Artificial Sequence
  Description of Artificial Sequence: Synthetic oligonucleotide
ucgugcaaugacaugggga

SEQ ID NO: 715564 - RNA, 19 nt, Artificial Sequence
  Description of Artificial Sequence: Synthetic oligonucleotide
gaauauuguaacaguccag

SEQ ID NO: 715565 - RNA, 19 nt, Artificial Sequence
  Description of Artificial Sequence: Synthetic oligonucleotide
agagauuugguuugguuuu

SEQ ID NO: 715566 - RNA, 19 nt, Artificial Sequence
  Description of Artificial Sequence: Synthetic oligonucleotide
guaacauucgaacaccaaa

SEQ ID NO: 715567 - RNA, 19 nt, Artificial Sequence
  Description of Artificial Sequence: Synthetic oligonucleotide
ucaauugaccccuucuaau

SEQ ID NO: 715568 - RNA, 19 nt, Artificial Sequence
  Description of Artificial Sequence: Synthetic oligonucleotide
aguaucauauguacuaacu

SEQ ID NO: 715569 - RNA, 19 nt, Artificial Sequence
  Description of Artificial Sequence: Synthetic oligonucleotide
agcguugccauucucgcug

SEQ ID NO: 715570 - RNA, 19 nt, Artificial Sequence
  Description of Artificial Sequence: Synthetic oligonucleotide
aguagugucuaagcacgcc

SEQ ID NO: 715571 - RNA, 19 nt, Artificial Sequence
  Description of Artificial Sequence: Synthetic oligonucleotide
acgccaauacugcuccucc

SEQ ID NO: 715572 - RNA, 19 nt, Artificial Sequence
  Description of Artificial Sequence: Synthetic oligonucleotide
ucgaacaccaaagcguugc

SEQ ID NO: 715573 - RNA, 19 nt, Artificial Sequence
  Description of Artificial Sequence: Synthetic oligonucleotide
cuuuacguauuuaugucca

SEQ ID NO: 715574 - RNA, 19 nt, Artificial Sequence
  Description of Artificial Sequence: Synthetic oligonucleotide
auauuguaacaguccagug

SEQ ID NO: 715575 - RNA, 19 nt, Artificial Sequence
  Description of Artificial Sequence: Synthetic oligonucleotide
acagucuacgcugugcagg

SEQ ID NO: 715576 - RNA, 19 nt, Artificial Sequence
  Description of Artificial Sequence: Synthetic oligonucleotide
cuguuuguuauagauauca

SEQ ID NO: 715577 - RNA, 19 nt, Artificial Sequence
  Description of Artificial Sequence: Synthetic oligonucleotide
ugcaugagaccauaucacu

SEQ ID NO: 715578 - RNA, 19 nt, Artificial Sequence
  Description of Artificial Sequence: Synthetic oligonucleotide
ucccaaacguagcacacac

SEQ ID NO: 715579 - RNA, 19 nt, Artificial Sequence
  Description of Artificial Sequence: Synthetic oligonucleotide
gacaaagccguguguuccg

SEQ ID NO: 715580 - RNA, 19 nt, Artificial Sequence
  Description of Artificial Sequence: Synthetic oligonucleotide
uuauuuguuaacugacauu

SEQ ID NO: 715581 - RNA, 19 nt, Artificial Sequence
  Description of Artificial Sequence: Synthetic oligonucleotide
auguccuuaggucuuguga

SEQ ID NO: 715582 - RNA, 19 nt, Artificial Sequence
  Description of Artificial Sequence: Synthetic oligonucleotide
uucucgcugauaaauccac

SEQ ID NO: 715583 - RNA, 19 nt, Artificial Sequence
  Description of Artificial Sequence: Synthetic oligonucleotide
acuuccggucagcaguagc

SEQ ID NO: 715584 - RNA, 19 nt, Artificial Sequence
  Description of Artificial Sequence: Synthetic oligonucleotide
uguggcucgaccaauucuu

SEQ ID NO: 715585 - RNA, 19 nt, Artificial Sequence
  Description of Artificial Sequence: Synthetic oligonucleotide
uucgugcaaugacaugggg

SEQ ID NO: 715586 - RNA, 19 nt, Artificial Sequence
  Description of Artificial Sequence: Synthetic oligonucleotide
caguuguccuuguacagag

SEQ ID NO: 715587 - RNA, 19 nt, Artificial Sequence
  Description of Artificial Sequence: Synthetic oligonucleotide
uuaauaagaugcaccugua

SEQ ID NO: 715588 - RNA, 19 nt, Artificial Sequence
  Description of Artificial Sequence: Synthetic oligonucleotide
gauuaauaagaugcaccug

SEQ ID NO: 715589 - RNA, 19 nt, Artificial Sequence
  Description of Artificial Sequence: Synthetic oligonucleotide
aacagucuacgcugugcag

SEQ ID NO: 715590 - RNA, 19 nt, Artificial Sequence
  Description of Artificial Sequence: Synthetic oligonucleotide
cuucuaauaggccagugaa

SEQ ID NO: 715591 - RNA, 19 nt, Artificial Sequence
  Description of Artificial Sequence: Synthetic oligonucleotide
agaauggcaggucgcaucu

SEQ ID NO: 715592 - RNA, 19 nt, Artificial Sequence
  Description of Artificial Sequence: Synthetic oligonucleotide
ccaaacguagcacacacag

SEQ ID NO: 715593 - RNA, 19 nt, Artificial Sequence
  Description of Artificial Sequence: Synthetic oligonucleotide
aauucgccugaaugaaggu

SEQ ID NO: 715594 - RNA, 19 nt, Artificial Sequence
  Description of Artificial Sequence: Synthetic oligonucleotide
ucuguaagggaacccugcu

SEQ ID NO: 715595 - RNA, 19 nt, Artificial Sequence
  Description of Artificial Sequence: Synthetic oligonucleotide
guguguuccgaugagacac

SEQ ID NO: 715596 - RNA, 19 nt, Artificial Sequence
  Description of Artificial Sequence: Synthetic oligonucleotide
aucagaggauuguccacgg

SEQ ID NO: 715597 - RNA, 19 nt, Artificial Sequence
  Description of Artificial Sequence: Synthetic oligonucleotide
agggcuuuuccuucaaaca

SEQ ID NO: 715598 - RNA, 19 nt, Artificial Sequence
  Description of Artificial Sequence: Synthetic oligonucleotide
cagacgaacaacagucuac

SEQ ID NO: 715599 - RNA, 19 nt, Artificial Sequence
  Description of Artificial Sequence: Synthetic oligonucleotide
aagccguguguuccgauga

SEQ ID NO: 715600 - RNA, 19 nt, Artificial Sequence
  Description of Artificial Sequence: Synthetic oligonucleotide
cuucgugcaaugacauggg

SEQ ID NO: 715601 - RNA, 19 nt, Artificial Sequence
  Description of Artificial Sequence: Synthetic oligonucleotide
ucuagaauggcaggucgca

SEQ ID NO: 715602 - RNA, 19 nt, Artificial Sequence
  Description of Artificial Sequence: Synthetic oligonucleotide
ugucuucgugcaaugacau

SEQ ID NO: 715603 - RNA, 19 nt, Artificial Sequence
  Description of Artificial Sequence: Synthetic oligonucleotide
uuacguauuuauguccaga

SEQ ID NO: 715604 - RNA, 19 nt, Artificial Sequence
  Description of Artificial Sequence: Synthetic oligonucleotide
gggauuaauaagaugcacc

SEQ ID NO: 715605 - RNA, 19 nt, Artificial Sequence
  Description of Artificial Sequence: Synthetic oligonucleotide
ucagacgaacaacagucua

SEQ ID NO: 715606 - RNA, 19 nt, Artificial Sequence
  Description of Artificial Sequence: Synthetic oligonucleotide
gacacagggauucgucuug

SEQ ID NO: 715607 - RNA, 19 nt, Artificial Sequence
  Description of Artificial Sequence: Synthetic oligonucleotide
cauucgaacaccaaagcgu

SEQ ID NO: 715608 - RNA, 19 nt, Artificial Sequence
  Description of Artificial Sequence: Synthetic oligonucleotide
gaccauauugccuggucca

SEQ ID NO: 715609 - RNA, 19 nt, Artificial Sequence
  Description of Artificial Sequence: Synthetic oligonucleotide
cuuguuguaggagcgugcc

SEQ ID NO: 715610 - RNA, 19 nt, Artificial Sequence
  Description of Artificial Sequence: Synthetic oligonucleotide
aagguggcaucuuguugag

SEQ ID NO: 715611 - RNA, 19 nt, Artificial Sequence
  Description of Artificial Sequence: Synthetic oligonucleotide
uucuaauaggccagugaau

SEQ ID NO: 715612 - RNA, 19 nt, Artificial Sequence
  Description of Artificial Sequence: Synthetic oligonucleotide
uucucuguaagggaacccu

SEQ ID NO: 715613 - RNA, 19 nt, Artificial Sequence
  Description of Artificial Sequence: Synthetic oligonucleotide
ucggcuugggucaucucug

SEQ ID NO: 715614 - RNA, 19 nt, Artificial Sequence
  Description of Artificial Sequence: Synthetic oligonucleotide
auuguccacggagaucccc

SEQ ID NO: 715615 - RNA, 19 nt, Artificial Sequence
  Description of Artificial Sequence: Synthetic oligonucleotide
ucgcugauaaauccacagu

SEQ ID NO: 715616 - RNA, 19 nt, Artificial Sequence
  Description of Artificial Sequence: Synthetic oligonucleotide
ucauauguacuaacucuuu

SEQ ID NO: 715617 - RNA, 19 nt, Artificial Sequence
  Description of Artificial Sequence: Synthetic oligonucleotide
aucuagaauggcaggucgc

SEQ ID NO: 715618 - RNA, 19 nt, Artificial Sequence
  Description of Artificial Sequence: Synthetic oligonucleotide
cacgauaggucgcuucacg

SEQ ID NO: 715619 - RNA, 19 nt, Artificial Sequence
  Description of Artificial Sequence: Synthetic oligonucleotide
aacgccggcacgauagguc

SEQ ID NO: 715620 - RNA, 19 nt, Artificial Sequence
  Description of Artificial Sequence: Synthetic oligonucleotide
caucuccuaaucgaaacug

SEQ ID NO: 715621 - RNA, 19 nt, Artificial Sequence
  Description of Artificial Sequence: Synthetic oligonucleotide
uguacagaggcugcccuug

SEQ ID NO: 715622 - RNA, 19 nt, Artificial Sequence
  Description of Artificial Sequence: Synthetic oligonucleotide
uguguuccgaugagacacc

SEQ ID NO: 715623 - RNA, 19 nt, Artificial Sequence
  Description of Artificial Sequence: Synthetic oligonucleotide
gcuuuauggaacaucaaac

SEQ ID NO: 715624 - RNA, 19 nt, Artificial Sequence
  Description of Artificial Sequence: Synthetic oligonucleotide
acgccggcacgauaggucg

SEQ ID NO: 715625 - RNA, 19 nt, Artificial Sequence
  Description of Artificial Sequence: Synthetic oligonucleotide
caguaucauauguacuaac

SEQ ID NO: 715626 - RNA, 19 nt, Artificial Sequence
  Description of Artificial Sequence: Synthetic oligonucleotide
ugggaucugugcugcaaag

SEQ ID NO: 715627 - RNA, 19 nt, Artificial Sequence
  Description of Artificial Sequence: Synthetic oligonucleotide
uuaucaaggcccagggcuu

SEQ ID NO: 715628 - RNA, 19 nt, Artificial Sequence
  Description of Artificial Sequence: Synthetic oligonucleotide
gguaucaucagacgaacaa

SEQ ID NO: 715629 - RNA, 19 nt, Artificial Sequence
  Description of Artificial Sequence: Synthetic oligonucleotide
agaccauaucacuucaaua

SEQ ID NO: 715630 - RNA, 19 nt, Artificial Sequence
  Description of Artificial Sequence: Synthetic oligonucleotide
aguccaguggguuaacaua

SEQ ID NO: 715631 - RNA, 19 nt, Artificial Sequence
  Description of Artificial Sequence: Synthetic oligonucleotide
ggauuaauaagaugcaccu

SEQ ID NO: 715632 - RNA, 19 nt, Artificial Sequence
  Description of Artificial Sequence: Synthetic oligonucleotide
agguuuauuuaguccuucu

SEQ ID NO: 715633 - RNA, 19 nt, Artificial Sequence
  Description of Artificial Sequence: Synthetic oligonucleotide
uucauuuaauugguaggaa

SEQ ID NO: 715634 - RNA, 19 nt, Artificial Sequence
  Description of Artificial Sequence: Synthetic oligonucleotide
acguauuuauguccagaga

SEQ ID NO: 715635 - RNA, 19 nt, Artificial Sequence
  Description of Artificial Sequence: Synthetic oligonucleotide
acagugaucuagaauggca

SEQ ID NO: 715636 - RNA, 19 nt, Artificial Sequence
  Description of Artificial Sequence: Synthetic oligonucleotide
auaucugccagaacagcug

SEQ ID NO: 715637 - RNA, 19 nt, Artificial Sequence
  Description of Artificial Sequence: Synthetic oligonucleotide
augagaccauaucacuuca

SEQ ID NO: 715638 - RNA, 19 nt, Artificial Sequence
  Description of Artificial Sequence: Synthetic oligonucleotide
uguaggagcgugccuguuc

SEQ ID NO: 715639 - RNA, 19 nt, Artificial Sequence
  Description of Artificial Sequence: Synthetic oligonucleotide
caauaucugccagaacagc

SEQ ID NO: 715640 - RNA, 19 nt, Artificial Sequence
  Description of Artificial Sequence: Synthetic oligonucleotide
accaacgccggcacgauag

SEQ ID NO: 715641 - RNA, 19 nt, Artificial Sequence
  Description of Artificial Sequence: Synthetic oligonucleotide
cagugggauuuccaaauac

SEQ ID NO: 715642 - RNA, 19 nt, Artificial Sequence
  Description of Artificial Sequence: Synthetic oligonucleotide
ccacgauuccaaaaguugc

SEQ ID NO: 715643 - RNA, 19 nt, Artificial Sequence
  Description of Artificial Sequence: Synthetic oligonucleotide
ugguaucaucagacgaaca

SEQ ID NO: 715644 - RNA, 19 nt, Artificial Sequence
  Description of Artificial Sequence: Synthetic oligonucleotide
ucucgcugauaaauccaca

SEQ ID NO: 715645 - RNA, 19 nt, Artificial Sequence
  Description of Artificial Sequence: Synthetic oligonucleotide
ccuguaauacuuuaaaucu

SEQ ID NO: 715646 - RNA, 19 nt, Artificial Sequence
  Description of Artificial Sequence: Synthetic oligonucleotide
ggauccauguccuuagguc

SEQ ID NO: 715647 - RNA, 19 nt, Artificial Sequence
  Description of Artificial Sequence: Synthetic oligonucleotide
uguaacaguccaguggguu

SEQ ID NO: 715648 - RNA, 19 nt, Artificial Sequence
  Description of Artificial Sequence: Synthetic oligonucleotide
gacgaacaacagucuacgc

SEQ ID NO: 715649 - RNA, 19 nt, Artificial Sequence
  Description of Artificial Sequence: Synthetic oligonucleotide
cauauugccugguccacca

SEQ ID NO: 715650 - RNA, 19 nt, Artificial Sequence
  Description of Artificial Sequence: Synthetic oligonucleotide
cccacaaccaggauagagc

SEQ ID NO: 715651 - RNA, 19 nt, Artificial Sequence
  Description of Artificial Sequence: Synthetic oligonucleotide
ugcuuguuguaggagcgug

SEQ ID NO: 715652 - RNA, 19 nt, Artificial Sequence
  Description of Artificial Sequence: Synthetic oligonucleotide
uguuccgaugagacacccc

SEQ ID NO: 715653 - RNA, 19 nt, Artificial Sequence
  Description of Artificial Sequence: Synthetic oligonucleotide
ugaccccuucuaauaggcc

SEQ ID NO: 715654 - RNA, 19 nt, Artificial Sequence
  Description of Artificial Sequence: Synthetic oligonucleotide
auaugccagacaaagccgu

SEQ ID NO: 715655 - RNA, 19 nt, Artificial Sequence
  Description of Artificial Sequence: Synthetic oligonucleotide
gcucgaccaauucuuaaag

SEQ ID NO: 715656 - RNA, 19 nt, Artificial Sequence
  Description of Artificial Sequence: Synthetic oligonucleotide
guuuggaugcagacuuccg

SEQ ID NO: 715657 - RNA, 19 nt, Artificial Sequence
  Description of Artificial Sequence: Synthetic oligonucleotide
acucccaaacguagcacac

SEQ ID NO: 715658 - RNA, 19 nt, Artificial Sequence
  Description of Artificial Sequence: Synthetic oligonucleotide
caccucgacacaucagagc

SEQ ID NO: 715659 - RNA, 19 nt, Artificial Sequence
  Description of Artificial Sequence: Synthetic oligonucleotide
augagauggcaguuuuccu

SEQ ID NO: 715660 - RNA, 19 nt, Artificial Sequence
  Description of Artificial Sequence: Synthetic oligonucleotide
uauugccugguccaccauu

SEQ ID NO: 715661 - RNA, 19 nt, Artificial Sequence
  Description of Artificial Sequence: Synthetic oligonucleotide
aagcguugccauucucgcu

SEQ ID NO: 715662 - RNA, 19 nt, Artificial Sequence
  Description of Artificial Sequence: Synthetic oligonucleotide
uucgaacaccaaagcguug

SEQ ID NO: 715663 - RNA, 19 nt, Artificial Sequence
  Description of Artificial Sequence: Synthetic oligonucleotide
ucccacgauuccaaaaguu

SEQ ID NO: 715664 - RNA, 19 nt, Artificial Sequence
  Description of Artificial Sequence: Synthetic oligonucleotide
acgauuccaaaaguugcug

SEQ ID NO: 715665 - RNA, 19 nt, Artificial Sequence
  Description of Artificial Sequence: Synthetic oligonucleotide
aaacaccucgacacaucag

SEQ ID NO: 715666 - RNA, 19 nt, Artificial Sequence
  Description of Artificial Sequence: Synthetic oligonucleotide
aacagcgccauuggagccu

SEQ ID NO: 715667 - RNA, 19 nt, Artificial Sequence
  Description of Artificial Sequence: Synthetic oligonucleotide
ugagauguguuuguccauu

SEQ ID NO: 715668 - RNA, 19 nt, Artificial Sequence
  Description of Artificial Sequence: Synthetic oligonucleotide
gucaucucugccaccgccg

SEQ ID NO: 715669 - RNA, 19 nt, Artificial Sequence
  Description of Artificial Sequence: Synthetic oligonucleotide
gacgaaucugaaacucaug

SEQ ID NO: 715670 - RNA, 19 nt, Artificial Sequence
  Description of Artificial Sequence: Synthetic oligonucleotide
ugcaaucagccggggaucc

SEQ ID NO: 715671 - RNA, 19 nt, Artificial Sequence
  Description of Artificial Sequence: Synthetic oligonucleotide
caauugaccccuucuaaua

SEQ ID NO: 715672 - RNA, 19 nt, Artificial Sequence
  Description of Artificial Sequence: Synthetic oligonucleotide
ucaucgugcggguccucag

SEQ ID NO: 715673 - RNA, 19 nt, Artificial Sequence
  Description of Artificial Sequence: Synthetic oligonucleotide
cagggauuaauaagaugca

SEQ ID NO: 715674 - RNA, 19 nt, Artificial Sequence
  Description of Artificial Sequence: Synthetic oligonucleotide
gcucccguaacauucgaac

SEQ ID NO: 715675 - RNA, 19 nt, Artificial Sequence
  Description of Artificial Sequence: Synthetic oligonucleotide
ucagaggauuguccacgga

SEQ ID NO: 715676 - RNA, 19 nt, Artificial Sequence
  Description of Artificial Sequence: Synthetic oligonucleotide
ugugcaggauggcuuuauc

SEQ ID NO: 715677 - RNA, 19 nt, Artificial Sequence
  Description of Artificial Sequence: Synthetic oligonucleotide
uacgcugugcaggauggcu

SEQ ID NO: 715678 - RNA, 19 nt, Artificial Sequence
  Description of Artificial Sequence: Synthetic oligonucleotide
auaggucgcuucacgcccc

SEQ ID NO: 715679 - RNA, 19 nt, Artificial Sequence
  Description of Artificial Sequence: Synthetic oligonucleotide
gucuuguaccauuugacau

SEQ ID NO: 715680 - RNA, 19 nt, Artificial Sequence
  Description of Artificial Sequence: Synthetic oligonucleotide
cccacgauuccaaaaguug

SEQ ID NO: 715681 - RNA, 19 nt, Artificial Sequence
  Description of Artificial Sequence: Synthetic oligonucleotide
aucaaaccaccucccacaa

SEQ ID NO: 715682 - RNA, 19 nt, Artificial Sequence
  Description of Artificial Sequence: Synthetic oligonucleotide
gucuugugaucacauccac

SEQ ID NO: 715683 - RNA, 19 nt, Artificial Sequence
  Description of Artificial Sequence: Synthetic oligonucleotide
aauuaagcuuaaagucaau

SEQ ID NO: 715684 - RNA, 19 nt, Artificial Sequence
  Description of Artificial Sequence: Synthetic oligonucleotide
auucucgcugauaaaucca

SEQ ID NO: 715685 - RNA, 19 nt, Artificial Sequence
  Description of Artificial Sequence: Synthetic oligonucleotide
gguccaccauuuuaaggcc

SEQ ID NO: 715686 - RNA, 19 nt, Artificial Sequence
  Description of Artificial Sequence: Synthetic oligonucleotide
caucgugcggguccucagg

SEQ ID NO: 715687 - RNA, 19 nt, Artificial Sequence
  Description of Artificial Sequence: Synthetic oligonucleotide
guaacaguccaguggguua

SEQ ID NO: 715688 - RNA, 19 nt, Artificial Sequence
  Description of Artificial Sequence: Synthetic oligonucleotide
ucaaaccaccucccacaac

SEQ ID NO: 715689 - RNA, 19 nt, Artificial Sequence
  Description of Artificial Sequence: Synthetic oligonucleotide
gagaccauaucacuucaau

SEQ ID NO: 715690 - RNA, 19 nt, Artificial Sequence
  Description of Artificial Sequence: Synthetic oligonucleotide
cuguaagggaacccugcuc

SEQ ID NO: 715691 - RNA, 19 nt, Artificial Sequence
  Description of Artificial Sequence: Synthetic oligonucleotide
agugucuaagcacgccaau

SEQ ID NO: 715692 - RNA, 19 nt, Artificial Sequence
  Description of Artificial Sequence: Synthetic oligonucleotide
uaggucgcuucacgccccg

SEQ ID NO: 715693 - RNA, 19 nt, Artificial Sequence
  Description of Artificial Sequence: Synthetic oligonucleotide
gugucuucgugcaaugaca

SEQ ID NO: 715694 - RNA, 19 nt, Artificial Sequence
  Description of Artificial Sequence: Synthetic oligonucleotide
cuuuaacauaaaauugaau

SEQ ID NO: 715695 - RNA, 19 nt, Artificial Sequence
  Description of Artificial Sequence: Synthetic oligonucleotide
aucgugcggguccucagga

SEQ ID NO: 715696 - RNA, 19 nt, Artificial Sequence
  Description of Artificial Sequence: Synthetic oligonucleotide
cauguccuuaggucuugug

SEQ ID NO: 715697 - RNA, 19 nt, Artificial Sequence
  Description of Artificial Sequence: Synthetic oligonucleotide
ggugacgaaucugaaacuc

SEQ ID NO: 715698 - RNA, 19 nt, Artificial Sequence
  Description of Artificial Sequence: Synthetic oligonucleotide
uaggucuugugaucacauc

SEQ ID NO: 715699 - RNA, 19 nt, Artificial Sequence
  Description of Artificial Sequence: Synthetic oligonucleotide
cgaccaauucuuaaaguug

SEQ ID NO: 715700 - RNA, 19 nt, Artificial Sequence
  Description of Artificial Sequence: Synthetic oligonucleotide
agccacucccaaacguagc

SEQ ID NO: 715701 - RNA, 19 nt, Artificial Sequence
  Description of Artificial Sequence: Synthetic oligonucleotide
guaucuguggcucgaccaa

SEQ ID NO: 715702 - RNA, 19 nt, Artificial Sequence
  Description of Artificial Sequence: Synthetic oligonucleotide
guugaaccuggguguauga

SEQ ID NO: 715703 - RNA, 19 nt, Artificial Sequence
  Description of Artificial Sequence: Synthetic oligonucleotide
uuagaccauauugccuggu

SEQ ID NO: 715704 - RNA, 19 nt, Artificial Sequence
  Description of Artificial Sequence: Synthetic oligonucleotide
cuuuugcggacuguuccug

SEQ ID NO: 715705 - RNA, 19 nt, Artificial Sequence
  Description of Artificial Sequence: Synthetic oligonucleotide
caccaaagcguugccauuc

SEQ ID NO: 715706 - RNA, 19 nt, Artificial Sequence
  Description of Artificial Sequence: Synthetic oligonucleotide
acaccucgacacaucagag

SEQ ID NO: 715707 - RNA, 19 nt, Artificial Sequence
  Description of Artificial Sequence: Synthetic oligonucleotide
cgaaacugauaaagcaggg

SEQ ID NO: 715708 - RNA, 19 nt, Artificial Sequence
  Description of Artificial Sequence: Synthetic oligonucleotide
ggauauucaauugaccccu

SEQ ID NO: 715709 - RNA, 19 nt, Artificial Sequence
  Description of Artificial Sequence: Synthetic oligonucleotide
ccccauaugccagacaaag

SEQ ID NO: 715710 - RNA, 19 nt, Artificial Sequence
  Description of Artificial Sequence: Synthetic oligonucleotide
ggcaggucgcaucugcuug

SEQ ID NO: 715711 - RNA, 19 nt, Artificial Sequence
  Description of Artificial Sequence: Synthetic oligonucleotide
caaacguagcacacacaga

SEQ ID NO: 715712 - RNA, 19 nt, Artificial Sequence
  Description of Artificial Sequence: Synthetic oligonucleotide
aaaccaccucccacaacca

SEQ ID NO: 715713 - RNA, 19 nt, Artificial Sequence
  Description of Artificial Sequence: Synthetic oligonucleotide
aucagacgaacaacagucu

SEQ ID NO: 715714 - RNA, 19 nt, Artificial Sequence
  Description of Artificial Sequence: Synthetic oligonucleotide
gauggaccacaaucccuga

SEQ ID NO: 715715 - RNA, 19 nt, Artificial Sequence
  Description of Artificial Sequence: Synthetic oligonucleotide
gugacgaaucugaaacuca

SEQ ID NO: 715716 - RNA, 19 nt, Artificial Sequence
  Description of Artificial Sequence: Synthetic oligonucleotide
uggcucgaccaauucuuaa

SEQ ID NO: 715717 - RNA, 19 nt, Artificial Sequence
  Description of Artificial Sequence: Synthetic oligonucleotide
ucgggcaccaacgccggca

SEQ ID NO: 715718 - RNA, 19 nt, Artificial Sequence
  Description of Artificial Sequence: Synthetic oligonucleotide
cuuaggucuugugaucaca

SEQ ID NO: 715719 - RNA, 19 nt, Artificial Sequence
  Description of Artificial Sequence: Synthetic oligonucleotide
gucuucgugcaaugacaug

SEQ ID NO: 715720 - RNA, 19 nt, Artificial Sequence
  Description of Artificial Sequence: Synthetic oligonucleotide
agcagcccgcucccguaac

SEQ ID NO: 715721 - RNA, 19 nt, Artificial Sequence
  Description of Artificial Sequence: Synthetic oligonucleotide
agccguguguuccgaugag

SEQ ID NO: 715722 - RNA, 19 nt, Artificial Sequence
  Description of Artificial Sequence: Synthetic oligonucleotide
uccaugcaaucagccgggg

SEQ ID NO: 715723 - RNA, 19 nt, Artificial Sequence
  Description of Artificial Sequence: Synthetic oligonucleotide
cagucuacgcugugcagga

SEQ ID NO: 715724 - RNA, 19 nt, Artificial Sequence
  Description of Artificial Sequence: Synthetic oligonucleotide
guaggagcgugccuguucu

SEQ ID NO: 715725 - RNA, 19 nt, Artificial Sequence
  Description of Artificial Sequence: Synthetic oligonucleotide
cuugaagcccggagauguc

SEQ ID NO: 715726 - RNA, 19 nt, Artificial Sequence
  Description of Artificial Sequence: Synthetic oligonucleotide
ccguguguuccgaugagac

SEQ ID NO: 715727 - RNA, 19 nt, Artificial Sequence
  Description of Artificial Sequence: Synthetic oligonucleotide
guuauagauaucagggauu

SEQ ID NO: 715728 - RNA, 19 nt, Artificial Sequence
  Description of Artificial Sequence: Synthetic oligonucleotide
cacgauuccaaaaguugcu

SEQ ID NO: 715729 - RNA, 19 nt, Artificial Sequence
  Description of Artificial Sequence: Synthetic oligonucleotide
uuccgaugagacaccccau

SEQ ID NO: 715730 - RNA, 19 nt, Artificial Sequence
  Description of Artificial Sequence: Synthetic oligonucleotide
aagcagcccgcucccguaa

SEQ ID NO: 715731 - RNA, 19 nt, Artificial Sequence
  Description of Artificial Sequence: Synthetic oligonucleotide
augccagacaaagccgugu

SEQ ID NO: 715732 - RNA, 19 nt, Artificial Sequence
  Description of Artificial Sequence: Synthetic oligonucleotide
guccagagauuugguuugg

SEQ ID NO: 715733 - RNA, 19 nt, Artificial Sequence
  Description of Artificial Sequence: Synthetic oligonucleotide
gugccuguucuggugacac

SEQ ID NO: 715734 - RNA, 19 nt, Artificial Sequence
  Description of Artificial Sequence: Synthetic oligonucleotide
ccugaguagugucuaagca

SEQ ID NO: 715735 - RNA, 19 nt, Artificial Sequence
  Description of Artificial Sequence: Synthetic oligonucleotide
ccauucucgcugauaaauc

SEQ ID NO: 715736 - RNA, 19 nt, Artificial Sequence
  Description of Artificial Sequence: Synthetic oligonucleotide
gagaaauucuugagcuuua

SEQ ID NO: 715737 - RNA, 19 nt, Artificial Sequence
  Description of Artificial Sequence: Synthetic oligonucleotide
cccauaugccagacaaagc

SEQ ID NO: 715738 - RNA, 19 nt, Artificial Sequence
  Description of Artificial Sequence: Synthetic oligonucleotide
agauggcaguuuuccugga

SEQ ID NO: 715739 - RNA, 19 nt, Artificial Sequence
  Description of Artificial Sequence: Synthetic oligonucleotide
gucuaagcacgccaauacu

SEQ ID NO: 715740 - RNA, 19 nt, Artificial Sequence
  Description of Artificial Sequence: Synthetic oligonucleotide
gaggauuguccacggagau

SEQ ID NO: 715741 - RNA, 19 nt, Artificial Sequence
  Description of Artificial Sequence: Synthetic oligonucleotide
cgauaggucgcuucacgcc

SEQ ID NO: 715742 - RNA, 19 nt, Artificial Sequence
  Description of Artificial Sequence: Synthetic oligonucleotide
ggucgcaucugcuuguugu

SEQ ID NO: 715743 - RNA, 19 nt, Artificial Sequence
  Description of Artificial Sequence: Synthetic oligonucleotide
ggcaggggaaucuggguga

SEQ ID NO: 715744 - RNA, 19 nt, Artificial Sequence
  Description of Artificial Sequence: Synthetic oligonucleotide
cgugcaaugacauggggaa

SEQ ID NO: 715745 - RNA, 19 nt, Artificial Sequence
  Description of Artificial Sequence: Synthetic oligonucleotide
ggcucgaccaauucuuaaa

SEQ ID NO: 715746 - RNA, 19 nt, Artificial Sequence
  Description of Artificial Sequence: Synthetic oligonucleotide
cugggugacgaaucugaaa

SEQ ID NO: 715747 - RNA, 19 nt, Artificial Sequence
  Description of Artificial Sequence: Synthetic oligonucleotide
ggcaauccauuuuauuugu

SEQ ID NO: 715748 - RNA, 19 nt, Artificial Sequence
  Description of Artificial Sequence: Synthetic oligonucleotide
uggcaggucgcaucugcuu

SEQ ID NO: 715749 - RNA, 19 nt, Artificial Sequence
  Description of Artificial Sequence: Synthetic oligonucleotide
cacgccaauacugcuccuc

SEQ ID NO: 715750 - RNA, 19 nt, Artificial Sequence
  Description of Artificial Sequence: Synthetic oligonucleotide
uggguaaaacagcgccauu

SEQ ID NO: 715751 - RNA, 19 nt, Artificial Sequence
  Description of Artificial Sequence: Synthetic oligonucleotide
ccauaucacuucaauaucu

SEQ ID NO: 715752 - RNA, 19 nt, Artificial Sequence
  Description of Artificial Sequence: Synthetic oligonucleotide
aggcugcccuuguugcuug

SEQ ID NO: 715753 - RNA, 19 nt, Artificial Sequence
  Description of Artificial Sequence: Synthetic oligonucleotide
ggaaugcuggcaggaagug

SEQ ID NO: 715754 - RNA, 19 nt, Artificial Sequence
  Description of Artificial Sequence: Synthetic oligonucleotide
ccuuucucggcuuggguca

SEQ ID NO: 715755 - RNA, 19 nt, Artificial Sequence
  Description of Artificial Sequence: Synthetic oligonucleotide
cucgaccaauucuuaaagu

SEQ ID NO: 715756 - RNA, 19 nt, Artificial Sequence
  Description of Artificial Sequence: Synthetic oligonucleotide
ccuucuaauaggccaguga

SEQ ID NO: 715757 - RNA, 19 nt, Artificial Sequence
  Description of Artificial Sequence: Synthetic oligonucleotide
ugcucaucgugcggguccu

SEQ ID NO: 715758 - RNA, 19 nt, Artificial Sequence
  Description of Artificial Sequence: Synthetic oligonucleotide
acaaagccguguguuccga

SEQ ID NO: 715759 - RNA, 19 nt, Artificial Sequence
  Description of Artificial Sequence: Synthetic oligonucleotide
uaggagcgugccuguucug

SEQ ID NO: 715760 - RNA, 19 nt, Artificial Sequence
  Description of Artificial Sequence: Synthetic oligonucleotide
aggucgcaucugcuuguug

SEQ ID NO: 715761 - RNA, 19 nt, Artificial Sequence
  Description of Artificial Sequence: Synthetic oligonucleotide
auauugccugguccaccau

SEQ ID NO: 715762 - RNA, 19 nt, Artificial Sequence
  Description of Artificial Sequence: Synthetic oligonucleotide
uggcuuuaucaaggcccag

SEQ ID NO: 715763 - RNA, 19 nt, Artificial Sequence
  Description of Artificial Sequence: Synthetic oligonucleotide
gauucgucuuguaccauuu

SEQ ID NO: 715764 - RNA, 19 nt, Artificial Sequence
  Description of Artificial Sequence: Synthetic oligonucleotide
gugucuaagcacgccaaua

SEQ ID NO: 715765 - RNA, 19 nt, Artificial Sequence
  Description of Artificial Sequence: Synthetic oligonucleotide
cugucccacgauuccaaaa

SEQ ID NO: 715766 - RNA, 19 nt, Artificial Sequence
  Description of Artificial Sequence: Synthetic oligonucleotide
gccauuggagccuggagcu

SEQ ID NO: 715767 - RNA, 19 nt, Artificial Sequence
  Description of Artificial Sequence: Synthetic oligonucleotide
gcuuguuguaggagcgugc

SEQ ID NO: 715768 - RNA, 19 nt, Artificial Sequence
  Description of Artificial Sequence: Synthetic oligonucleotide
ggguuaacauacaaagccu

SEQ ID NO: 715769 - RNA, 19 nt, Artificial Sequence
  Description of Artificial Sequence: Synthetic oligonucleotide
guccaccauuuuaaggcca

SEQ ID NO: 715770 - RNA, 19 nt, Artificial Sequence
  Description of Artificial Sequence: Synthetic oligonucleotide
uuccggucagcaguagcuu

SEQ ID NO: 715771 - RNA, 19 nt, Artificial Sequence
  Description of Artificial Sequence: Synthetic oligonucleotide
uccuucccguucuccgcgu

SEQ ID NO: 715772 - RNA, 19 nt, Artificial Sequence
  Description of Artificial Sequence: Synthetic oligonucleotide
ccacaguuccugaguagug

SEQ ID NO: 715773 - RNA, 19 nt, Artificial Sequence
  Description of Artificial Sequence: Synthetic oligonucleotide
gacuuccggucagcaguag

SEQ ID NO: 715774 - RNA, 19 nt, Artificial Sequence
  Description of Artificial Sequence: Synthetic oligonucleotide
ccucgacacaucagagccc

SEQ ID NO: 715775 - RNA, 19 nt, Artificial Sequence
  Description of Artificial Sequence: Synthetic oligonucleotide
agcgccauuggagccugga

SEQ ID NO: 715776 - RNA, 19 nt, Artificial Sequence
  Description of Artificial Sequence: Synthetic oligonucleotide
gcgacucgggcaccaacgc

SEQ ID NO: 715777 - RNA, 19 nt, Artificial Sequence
  Description of Artificial Sequence: Synthetic oligonucleotide
cagcgacucgggcaccaac

SEQ ID NO: 715778 - RNA, 19 nt, Artificial Sequence
  Description of Artificial Sequence: Synthetic oligonucleotide
ucgugcggguccucaggau

SEQ ID NO: 715779 - RNA, 19 nt, Artificial Sequence
  Description of Artificial Sequence: Synthetic oligonucleotide
ccauauugccugguccacc

SEQ ID NO: 715780 - RNA, 19 nt, Artificial Sequence
  Description of Artificial Sequence: Synthetic oligonucleotide
gucccacgauuccaaaagu

SEQ ID NO: 715781 - RNA, 19 nt, Artificial Sequence
  Description of Artificial Sequence: Synthetic oligonucleotide
cuacgcugugcaggauggc

SEQ ID NO: 715782 - RNA, 19 nt, Artificial Sequence
  Description of Artificial Sequence: Synthetic oligonucleotide
gcuggguaaaacagcgcca

SEQ ID NO: 715783 - RNA, 19 nt, Artificial Sequence
  Description of Artificial Sequence: Synthetic oligonucleotide
cucccaaacguagcacaca

SEQ ID NO: 715784 - RNA, 19 nt, Artificial Sequence
  Description of Artificial Sequence: Synthetic oligonucleotide
ccuuaggucuugugaucac

SEQ ID NO: 715785 - RNA, 19 nt, Artificial Sequence
  Description of Artificial Sequence: Synthetic oligonucleotide
ccuaaucgaaacugauaaa

SEQ ID NO: 715786 - RNA, 19 nt, Artificial Sequence
  Description of Artificial Sequence: Synthetic oligonucleotide
cuggguguaugacaacaau

SEQ ID NO: 715787 - RNA, 19 nt, Artificial Sequence
  Description of Artificial Sequence: Synthetic oligonucleotide
cuguggcucgaccaauucu

SEQ ID NO: 715788 - RNA, 19 nt, Artificial Sequence
  Description of Artificial Sequence: Synthetic oligonucleotide
cuggguaaaacagcgccau

SEQ ID NO: 715789 - RNA, 19 nt, Artificial Sequence
  Description of Artificial Sequence: Synthetic oligonucleotide
aggucgcuucacgccccgc

SEQ ID NO: 715790 - RNA, 19 nt, Artificial Sequence
  Description of Artificial Sequence: Synthetic oligonucleotide
gggauccauguccuuaggu

SEQ ID NO: 715791 - RNA, 19 nt, Artificial Sequence
  Description of Artificial Sequence: Synthetic oligonucleotide
gcggacuguuccuguuugc

SEQ ID NO: 715792 - RNA, 19 nt, Artificial Sequence
  Description of Artificial Sequence: Synthetic oligonucleotide
gcuuuugcggacuguuccu

SEQ ID NO: 715793 - RNA, 19 nt, Artificial Sequence
  Description of Artificial Sequence: Synthetic oligonucleotide
gugagauguguuuguccau

SEQ ID NO: 715794 - RNA, 19 nt, Artificial Sequence
  Description of Artificial Sequence: Synthetic oligonucleotide
ucgcugcaugagccaguaa

SEQ ID NO: 715795 - RNA, 19 nt, Artificial Sequence
  Description of Artificial Sequence: Synthetic oligonucleotide
ccguaacauucgaacacca

SEQ ID NO: 715796 - RNA, 19 nt, Artificial Sequence
  Description of Artificial Sequence: Synthetic oligonucleotide
cuacaacacaggugcugcu

SEQ ID NO: 715797 - RNA, 19 nt, Artificial Sequence
  Description of Artificial Sequence: Synthetic oligonucleotide
gcuguuuguuauagauauc

SEQ ID NO: 715798 - RNA, 19 nt, Artificial Sequence
  Description of Artificial Sequence: Synthetic oligonucleotide
agcccgcucccguaacauu

SEQ ID NO: 715799 - RNA, 19 nt, Artificial Sequence
  Description of Artificial Sequence: Synthetic oligonucleotide
caucuacaacacaggugcu

SEQ ID NO: 715800 - RNA, 19 nt, Artificial Sequence
  Description of Artificial Sequence: Synthetic oligonucleotide
ggauucgucuuguaccauu

SEQ ID NO: 715801 - RNA, 19 nt, Artificial Sequence
  Description of Artificial Sequence: Synthetic oligonucleotide
gcccgcucccguaacauuc

SEQ ID NO: 715802 - RNA, 19 nt, Artificial Sequence
  Description of Artificial Sequence: Synthetic oligonucleotide
gggugacgaaucugaaacu

SEQ ID NO: 715803 - RNA, 19 nt, Artificial Sequence
  Description of Artificial Sequence: Synthetic oligonucleotide
guggcaucuuguugagaau

SEQ ID NO: 715804 - RNA, 19 nt, Artificial Sequence
  Description of Artificial Sequence: Synthetic oligonucleotide
gggucaucucugccaccgc

SEQ ID NO: 715805 - RNA, 19 nt, Artificial Sequence
  Description of Artificial Sequence: Synthetic oligonucleotide
ccuggguguaugacaacaa

SEQ ID NO: 715806 - RNA, 19 nt, Artificial Sequence
  Description of Artificial Sequence: Synthetic oligonucleotide
cgugcggguccucaggauc

SEQ ID NO: 715807 - RNA, 19 nt, Artificial Sequence
  Description of Artificial Sequence: Synthetic oligonucleotide
gugcggguccucaggaucu

SEQ ID NO: 715808 - RNA, 19 nt, Artificial Sequence
  Description of Artificial Sequence: Synthetic oligonucleotide
guauugcaugagaccauau

SEQ ID NO: 715809 - RNA, 19 nt, Artificial Sequence
  Description of Artificial Sequence: Synthetic oligonucleotide
gcaugagaccauaucacuu

SEQ ID NO: 715810 - RNA, 19 nt, Artificial Sequence
  Description of Artificial Sequence: Synthetic oligonucleotide
ccacucccaaacguagcac

SEQ ID NO: 715811 - RNA, 19 nt, Artificial Sequence
  Description of Artificial Sequence: Synthetic oligonucleotide
cguaacauucgaacaccaa

SEQ ID NO: 715812 - RNA, 19 nt, Artificial Sequence
  Description of Artificial Sequence: Synthetic oligonucleotide
guggcucgaccaauucuua

SEQ ID NO: 715813 - RNA, 19 nt, Artificial Sequence
  Description of Artificial Sequence: Synthetic oligonucleotide
cuagaauggcaggucgcau

SEQ ID NO: 715814 - RNA, 19 nt, Artificial Sequence
  Description of Artificial Sequence: Synthetic oligonucleotide
cacgccccgcugcuccuuc

SEQ ID NO: 715815 - RNA, 19 nt, Artificial Sequence
  Description of Artificial Sequence: Synthetic oligonucleotide
cacagggauucgucuugua

SEQ ID NO: 715816 - RNA, 19 nt, Artificial Sequence
  Description of Artificial Sequence: Synthetic oligonucleotide
caaucagccggggauccau

SEQ ID NO: 715817 - RNA, 19 nt, Artificial Sequence
  Description of Artificial Sequence: Synthetic oligonucleotide
ggggaaucugggugacgaa

SEQ ID NO: 715818 - RNA, 19 nt, Artificial Sequence
  Description of Artificial Sequence: Synthetic oligonucleotide
cccaaacguagcacacaca

SEQ ID NO: 715819 - RNA, 19 nt, Artificial Sequence
  Description of Artificial Sequence: Synthetic oligonucleotide
cagcgccauuggagccugg

SEQ ID NO: 715820 - RNA, 19 nt, Artificial Sequence
  Description of Artificial Sequence: Synthetic oligonucleotide
acgccccgcugcuccuucu

SEQ ID NO: 715821 - RNA, 19 nt, Artificial Sequence
  Description of Artificial Sequence: Synthetic oligonucleotide
gcaggucgcaucugcuugu

SEQ ID NO: 715822 - RNA, 19 nt, Artificial Sequence
  Description of Artificial Sequence: Synthetic oligonucleotide
ccaugcaaucagccgggga

SEQ ID NO: 715823 - RNA, 19 nt, Artificial Sequence
  Description of Artificial Sequence: Synthetic oligonucleotide
gccguguguuccgaugaga

SEQ ID NO: 715824 - RNA, 19 nt, Artificial Sequence
  Description of Artificial Sequence: Synthetic oligonucleotide
gcagcccgcucccguaaca

SEQ ID NO: 715825 - RNA, 19 nt, Artificial Sequence
  Description of Artificial Sequence: Synthetic oligonucleotide
ccgaugagacaccccaucu

SEQ ID NO: 715826 - RNA, 19 nt, Artificial Sequence
  Description of Artificial Sequence: Synthetic oligonucleotide
gugcaaugacauggggaau

SEQ ID NO: 715827 - RNA, 19 nt, Artificial Sequence
  Description of Artificial Sequence: Synthetic oligonucleotide
cugcuuguuguaggagcgu

SEQ ID NO: 715828 - RNA, 19 nt, Artificial Sequence
  Description of Artificial Sequence: Synthetic oligonucleotide
cggcacgauaggucgcuuc

SEQ ID NO: 715829 - RNA, 19 nt, Artificial Sequence
  Description of Artificial Sequence: Synthetic oligonucleotide
ccgcguccccuuucucggc

SEQ ID NO: 715830 - RNA, 19 nt, Artificial Sequence
  Description of Artificial Sequence: Synthetic oligonucleotide
cgccggcacgauaggucgc

SEQ ID NO: 715831 - RNA, 19 nt, Artificial Sequence
  Description of Artificial Sequence: Synthetic oligonucleotide
cagcccgcucccguaacau

SEQ ID NO: 715832 - RNA, 19 nt, Artificial Sequence
  Description of Artificial Sequence: Synthetic oligonucleotide
caggucgcaucugcuuguu

SEQ ID NO: 715833 - RNA, 19 nt, Artificial Sequence
  Description of Artificial Sequence: Synthetic oligonucleotide
gcucaucgugcggguccuc

SEQ ID NO: 715834 - RNA, 19 nt, Artificial Sequence
  Description of Artificial Sequence: Synthetic oligonucleotide
caccucccacaaccaggau

SEQ ID NO: 715835 - RNA, 19 nt, Artificial Sequence
  Description of Artificial Sequence: Synthetic oligonucleotide
ccguucuccgcguccccuu

SEQ ID NO: 715836 - RNA, 19 nt, Artificial Sequence
  Description of Artificial Sequence: Synthetic oligonucleotide
cguucuccgcguccccuuu

SEQ ID NO: 715837 - RNA, 19 nt, Artificial Sequence
  Description of Artificial Sequence: Synthetic oligonucleotide
aauuaugcagccuauaaga

SEQ ID NO: 715838 - RNA, 19 nt, Artificial Sequence
  Description of Artificial Sequence: Synthetic oligonucleotide
aauacguugagcauuaaag

SEQ ID NO: 715839 - RNA, 19 nt, Artificial Sequence
  Description of Artificial Sequence: Synthetic oligonucleotide
uaugcuaucauagcaaagg

SEQ ID NO: 715840 - RNA, 19 nt, Artificial Sequence
  Description of Artificial Sequence: Synthetic oligonucleotide
uaaucugacgcucugacga

SEQ ID NO: 715841 - RNA, 19 nt, Artificial Sequence
  Description of Artificial Sequence: Synthetic oligonucleotide
aggaacacgacauuuauug

SEQ ID NO: 715842 - RNA, 19 nt, Artificial Sequence
  Description of Artificial Sequence: Synthetic oligonucleotide
aaugacuagaggccagagc

SEQ ID NO: 715843 - RNA, 19 nt, Artificial Sequence
  Description of Artificial Sequence: Synthetic oligonucleotide
aaacgcucuauucauaucu

SEQ ID NO: 715844 - RNA, 19 nt, Artificial Sequence
  Description of Artificial Sequence: Synthetic oligonucleotide
uguuggguagguuagagug

SEQ ID NO: 715845 - RNA, 19 nt, Artificial Sequence
  Description of Artificial Sequence: Synthetic oligonucleotide
caaaauguagcucagggug

SEQ ID NO: 715846 - RNA, 19 nt, Artificial Sequence
  Description of Artificial Sequence: Synthetic oligonucleotide
acuacacuaauacggagcg

SEQ ID NO: 715847 - RNA, 19 nt, Artificial Sequence
  Description of Artificial Sequence: Synthetic oligonucleotide
ucaacaagaguucaggauc

SEQ ID NO: 715848 - RNA, 19 nt, Artificial Sequence
  Description of Artificial Sequence: Synthetic oligonucleotide
aaagcaagggucccacccc

SEQ ID NO: 715849 - RNA, 19 nt, Artificial Sequence
  Description of Artificial Sequence: Synthetic oligonucleotide
aauaccgaagcacacugug

SEQ ID NO: 715850 - RNA, 19 nt, Artificial Sequence
  Description of Artificial Sequence: Synthetic oligonucleotide
uaauacggagcgcacaggg

SEQ ID NO: 715851 - RNA, 19 nt, Artificial Sequence
  Description of Artificial Sequence: Synthetic oligonucleotide
augacuagaggccagagca

SEQ ID NO: 715852 - RNA, 19 nt, Artificial Sequence
  Description of Artificial Sequence: Synthetic oligonucleotide
auacggagcgcacagggcc

SEQ ID NO: 715853 - RNA, 19 nt, Artificial Sequence
  Description of Artificial Sequence: Synthetic oligonucleotide
uuagauuccaucuuuccuc

SEQ ID NO: 715854 - RNA, 19 nt, Artificial Sequence
  Description of Artificial Sequence: Synthetic oligonucleotide
gauuguguaggccugacca

SEQ ID NO: 715855 - RNA, 19 nt, Artificial Sequence
  Description of Artificial Sequence: Synthetic oligonucleotide
cauuaaaguaaagagcugc

SEQ ID NO: 715856 - RNA, 19 nt, Artificial Sequence
  Description of Artificial Sequence: Synthetic oligonucleotide
aacacgacauuuauugaac

SEQ ID NO: 715857 - RNA, 19 nt, Artificial Sequence
  Description of Artificial Sequence: Synthetic oligonucleotide
aagaaaacgcucuauucau

SEQ ID NO: 715858 - RNA, 19 nt, Artificial Sequence
  Description of Artificial Sequence: Synthetic oligonucleotide
ggagacuacacuaauacgg

SEQ ID NO: 715859 - RNA, 19 nt, Artificial Sequence
  Description of Artificial Sequence: Synthetic oligonucleotide
accuacccuauucucaucc

SEQ ID NO: 715860 - RNA, 19 nt, Artificial Sequence
  Description of Artificial Sequence: Synthetic oligonucleotide
ugcagaugaacuuucuggc

SEQ ID NO: 715861 - RNA, 19 nt, Artificial Sequence
  Description of Artificial Sequence: Synthetic oligonucleotide
acuaauacggagcgcacag

SEQ ID NO: 715862 - RNA, 19 nt, Artificial Sequence
  Description of Artificial Sequence: Synthetic oligonucleotide
aggaucgggagccagcagc

SEQ ID NO: 715863 - RNA, 19 nt, Artificial Sequence
  Description of Artificial Sequence: Synthetic oligonucleotide
aaauggaggauguugggua

SEQ ID NO: 715864 - RNA, 19 nt, Artificial Sequence
  Description of Artificial Sequence: Synthetic oligonucleotide
cugcguacaaccuagggug

SEQ ID NO: 715865 - RNA, 19 nt, Artificial Sequence
  Description of Artificial Sequence: Synthetic oligonucleotide
ucagaugucagccuagcau

SEQ ID NO: 715866 - RNA, 19 nt, Artificial Sequence
  Description of Artificial Sequence: Synthetic oligonucleotide
aaaauggaggucucuggca

SEQ ID NO: 715867 - RNA, 19 nt, Artificial Sequence
  Description of Artificial Sequence: Synthetic oligonucleotide
caacaagaguucaggaucg

SEQ ID NO: 715868 - RNA, 19 nt, Artificial Sequence
  Description of Artificial Sequence: Synthetic oligonucleotide
auacguugagcauuaaagu

SEQ ID NO: 715869 - RNA, 19 nt, Artificial Sequence
  Description of Artificial Sequence: Synthetic oligonucleotide
ugagucaguagaccagggg

SEQ ID NO: 715870 - RNA, 19 nt, Artificial Sequence
  Description of Artificial Sequence: Synthetic oligonucleotide
agccuauaagaucauuggg

SEQ ID NO: 715871 - RNA, 19 nt, Artificial Sequence
  Description of Artificial Sequence: Synthetic oligonucleotide
aaucugacgcucugacgac

SEQ ID NO: 715872 - RNA, 19 nt, Artificial Sequence
  Description of Artificial Sequence: Synthetic oligonucleotide
caucugucggauuucauug

SEQ ID NO: 715873 - RNA, 19 nt, Artificial Sequence
  Description of Artificial Sequence: Synthetic oligonucleotide
gaugagucaguagaccagg

SEQ ID NO: 715874 - RNA, 19 nt, Artificial Sequence
  Description of Artificial Sequence: Synthetic oligonucleotide
uggagacuacacuaauacg

SEQ ID NO: 715875 - RNA, 19 nt, Artificial Sequence
  Description of Artificial Sequence: Synthetic oligonucleotide
ugacaauucucuccgggca

SEQ ID NO: 715876 - RNA, 19 nt, Artificial Sequence
  Description of Artificial Sequence: Synthetic oligonucleotide
cuggcguccaauuaugcag

SEQ ID NO: 715877 - RNA, 19 nt, Artificial Sequence
  Description of Artificial Sequence: Synthetic oligonucleotide
ucugacgacccuucagugg

SEQ ID NO: 715878 - RNA, 19 nt, Artificial Sequence
  Description of Artificial Sequence: Synthetic oligonucleotide
gguccauagauccaaauac

SEQ ID NO: 715879 - RNA, 19 nt, Artificial Sequence
  Description of Artificial Sequence: Synthetic oligonucleotide
uucggaggaguguaaaggc

SEQ ID NO: 715880 - RNA, 19 nt, Artificial Sequence
  Description of Artificial Sequence: Synthetic oligonucleotide
uucaacaagaguucaggau

SEQ ID NO: 715881 - RNA, 19 nt, Artificial Sequence
  Description of Artificial Sequence: Synthetic oligonucleotide
caaauaccgaagcacacug

SEQ ID NO: 715882 - RNA, 19 nt, Artificial Sequence
  Description of Artificial Sequence: Synthetic oligonucleotide
cucuauucauaucugcaag

SEQ ID NO: 715883 - RNA, 19 nt, Artificial Sequence
  Description of Artificial Sequence: Synthetic oligonucleotide
uacguugagcauuaaagua

SEQ ID NO: 715884 - RNA, 19 nt, Artificial Sequence
  Description of Artificial Sequence: Synthetic oligonucleotide
gcagccaaugacuagaggc

SEQ ID NO: 715885 - RNA, 19 nt, Artificial Sequence
  Description of Artificial Sequence: Synthetic oligonucleotide
gcuguuaaagcaucaaacc

SEQ ID NO: 715886 - RNA, 19 nt, Artificial Sequence
  Description of Artificial Sequence: Synthetic oligonucleotide
aucuggagcucaccuaccc

SEQ ID NO: 715887 - RNA, 19 nt, Artificial Sequence
  Description of Artificial Sequence: Synthetic oligonucleotide
auuguguaggccugaccac

SEQ ID NO: 715888 - RNA, 19 nt, Artificial Sequence
  Description of Artificial Sequence: Synthetic oligonucleotide
aaucucugaaacaucacau

SEQ ID NO: 715889 - RNA, 19 nt, Artificial Sequence
  Description of Artificial Sequence: Synthetic oligonucleotide
aauacggagcgcacagggc

SEQ ID NO: 715890 - RNA, 19 nt, Artificial Sequence
  Description of Artificial Sequence: Synthetic oligonucleotide
uguaugcuaucauagcaaa

SEQ ID NO: 715891 - RNA, 19 nt, Artificial Sequence
  Description of Artificial Sequence: Synthetic oligonucleotide
ugcuaucauagcaaaggcu

SEQ ID NO: 715892 - RNA, 19 nt, Artificial Sequence
  Description of Artificial Sequence: Synthetic oligonucleotide
gagucaguagaccagggga

SEQ ID NO: 715893 - RNA, 19 nt, Artificial Sequence
  Description of Artificial Sequence: Synthetic oligonucleotide
uuaaugauguccuccucaa

SEQ ID NO: 715894 - RNA, 19 nt, Artificial Sequence
  Description of Artificial Sequence: Synthetic oligonucleotide
gacuacacuaauacggagc

SEQ ID NO: 715895 - RNA, 19 nt, Artificial Sequence
  Description of Artificial Sequence: Synthetic oligonucleotide
gaaaaguaccucugauccc

SEQ ID NO: 715896 - RNA, 19 nt, Artificial Sequence
  Description of Artificial Sequence: Synthetic oligonucleotide
cauagauccaaauaccgaa

SEQ ID NO: 715897 - RNA, 19 nt, Artificial Sequence
  Description of Artificial Sequence: Synthetic oligonucleotide
ugucccuggauuguguagg

SEQ ID NO: 715898 - RNA, 19 nt, Artificial Sequence
  Description of Artificial Sequence: Synthetic oligonucleotide
ucuuagagccgccuuuccc

SEQ ID NO: 715899 - RNA, 19 nt, Artificial Sequence
  Description of Artificial Sequence: Synthetic oligonucleotide
cuucggaggaguguaaagg

SEQ ID NO: 715900 - RNA, 19 nt, Artificial Sequence
  Description of Artificial Sequence: Synthetic oligonucleotide
acgcucuauucauaucugc

SEQ ID NO: 715901 - RNA, 19 nt, Artificial Sequence
  Description of Artificial Sequence: Synthetic oligonucleotide
gaacacgacauuuauugaa

SEQ ID NO: 715902 - RNA, 19 nt, Artificial Sequence
  Description of Artificial Sequence: Synthetic oligonucleotide
cuaucgucuguuuguaaag

SEQ ID NO: 715903 - RNA, 19 nt, Artificial Sequence
  Description of Artificial Sequence: Synthetic oligonucleotide
cugacgacccuucaguggc

SEQ ID NO: 715904 - RNA, 19 nt, Artificial Sequence
  Description of Artificial Sequence: Synthetic oligonucleotide
acuaucgucuguuuguaaa

SEQ ID NO: 715905 - RNA, 19 nt, Artificial Sequence
  Description of Artificial Sequence: Synthetic oligonucleotide
uuucuccggggaaagcggg

SEQ ID NO: 715906 - RNA, 19 nt, Artificial Sequence
  Description of Artificial Sequence: Synthetic oligonucleotide
ggcucuaugguucaaaaca

SEQ ID NO: 715907 - RNA, 19 nt, Artificial Sequence
  Description of Artificial Sequence: Synthetic oligonucleotide
uuacguucaggccaccuuc

SEQ ID NO: 715908 - RNA, 19 nt, Artificial Sequence
  Description of Artificial Sequence: Synthetic oligonucleotide
cagccaaugacuagaggcc

SEQ ID NO: 715909 - RNA, 19 nt, Artificial Sequence
  Description of Artificial Sequence: Synthetic oligonucleotide
acgacauuuauugaacucu

SEQ ID NO: 715910 - RNA, 19 nt, Artificial Sequence
  Description of Artificial Sequence: Synthetic oligonucleotide
cuguuaaagcaucaaacca

SEQ ID NO: 715911 - RNA, 19 nt, Artificial Sequence
  Description of Artificial Sequence: Synthetic oligonucleotide
cuaugguucaaaacagguc

SEQ ID NO: 715912 - RNA, 19 nt, Artificial Sequence
  Description of Artificial Sequence: Synthetic oligonucleotide
cuagucgcaaugucacugg

SEQ ID NO: 715913 - RNA, 19 nt, Artificial Sequence
  Description of Artificial Sequence: Synthetic oligonucleotide
ucuucggaggaguguaaag

SEQ ID NO: 715914 - RNA, 19 nt, Artificial Sequence
  Description of Artificial Sequence: Synthetic oligonucleotide
uccaaauaccgaagcacac

SEQ ID NO: 715915 - RNA, 19 nt, Artificial Sequence
  Description of Artificial Sequence: Synthetic oligonucleotide
auggaauuaaugauguccu

SEQ ID NO: 715916 - RNA, 19 nt, Artificial Sequence
  Description of Artificial Sequence: Synthetic oligonucleotide
aguguaaaggcagcuuuuc

SEQ ID NO: 715917 - RNA, 19 nt, Artificial Sequence
  Description of Artificial Sequence: Synthetic oligonucleotide
cugauauuggcuggggucc

SEQ ID NO: 715918 - RNA, 19 nt, Artificial Sequence
  Description of Artificial Sequence: Synthetic oligonucleotide
gaaugguggcaccuuucgg

SEQ ID NO: 715919 - RNA, 19 nt, Artificial Sequence
  Description of Artificial Sequence: Synthetic oligonucleotide
gaguucaggaucgggagcc

SEQ ID NO: 715920 - RNA, 19 nt, Artificial Sequence
  Description of Artificial Sequence: Synthetic oligonucleotide
acuagucgcaaugucacug

SEQ ID NO: 715921 - RNA, 19 nt, Artificial Sequence
  Description of Artificial Sequence: Synthetic oligonucleotide
agacuacacuaauacggag

SEQ ID NO: 715922 - RNA, 19 nt, Artificial Sequence
  Description of Artificial Sequence: Synthetic oligonucleotide
ucgucuguuuguaaagaaa

SEQ ID NO: 715923 - RNA, 19 nt, Artificial Sequence
  Description of Artificial Sequence: Synthetic oligonucleotide
uggcauccagaccugacga

SEQ ID NO: 715924 - RNA, 19 nt, Artificial Sequence
  Description of Artificial Sequence: Synthetic oligonucleotide
ucuucgcgcaucuucuuca

SEQ ID NO: 715925 - RNA, 19 nt, Artificial Sequence
  Description of Artificial Sequence: Synthetic oligonucleotide
aggcucuaugguucaaaac

SEQ ID NO: 715926 - RNA, 19 nt, Artificial Sequence
  Description of Artificial Sequence: Synthetic oligonucleotide
aucuuagagccgccuuucc

SEQ ID NO: 715927 - RNA, 19 nt, Artificial Sequence
  Description of Artificial Sequence: Synthetic oligonucleotide
gagaccuuagauuccaucu

SEQ ID NO: 715928 - RNA, 19 nt, Artificial Sequence
  Description of Artificial Sequence: Synthetic oligonucleotide
ugcguacaaccuagggugg

SEQ ID NO: 715929 - RNA, 19 nt, Artificial Sequence
  Description of Artificial Sequence: Synthetic oligonucleotide
ucugacgcucugacgaccc

SEQ ID NO: 715930 - RNA, 19 nt, Artificial Sequence
  Description of Artificial Sequence: Synthetic oligonucleotide
uacccuauucucauccccu

SEQ ID NO: 715931 - RNA, 19 nt, Artificial Sequence
  Description of Artificial Sequence: Synthetic oligonucleotide
uggcguccaauuaugcagc

SEQ ID NO: 715932 - RNA, 19 nt, Artificial Sequence
  Description of Artificial Sequence: Synthetic oligonucleotide
gugacaauucucuccgggc

SEQ ID NO: 715933 - RNA, 19 nt, Artificial Sequence
  Description of Artificial Sequence: Synthetic oligonucleotide
ucggaggaguguaaaggca

SEQ ID NO: 715934 - RNA, 19 nt, Artificial Sequence
  Description of Artificial Sequence: Synthetic oligonucleotide
agguugcaagaaaaguacc

SEQ ID NO: 715935 - RNA, 19 nt, Artificial Sequence
  Description of Artificial Sequence: Synthetic oligonucleotide
uucccaaucagggacccgc

SEQ ID NO: 715936 - RNA, 19 nt, Artificial Sequence
  Description of Artificial Sequence: Synthetic oligonucleotide
cuggcauccagaccugacg

SEQ ID NO: 715937 - RNA, 19 nt, Artificial Sequence
  Description of Artificial Sequence: Synthetic oligonucleotide
agagccgccuuucccaauc

SEQ ID NO: 715938 - RNA, 19 nt, Artificial Sequence
  Description of Artificial Sequence: Synthetic oligonucleotide
gauggcguacugucccugg

SEQ ID NO: 715939 - RNA, 19 nt, Artificial Sequence
  Description of Artificial Sequence: Synthetic oligonucleotide
agcgggguuggucuguccg

SEQ ID NO: 715940 - RNA, 19 nt, Artificial Sequence
  Description of Artificial Sequence: Synthetic oligonucleotide
auagauccaaauaccgaag

SEQ ID NO: 715941 - RNA, 19 nt, Artificial Sequence
  Description of Artificial Sequence: Synthetic oligonucleotide
uagucgcaaugucacuggg

SEQ ID NO: 715942 - RNA, 19 nt, Artificial Sequence
  Description of Artificial Sequence: Synthetic oligonucleotide
cuuagagccgccuuuccca

SEQ ID NO: 715943 - RNA, 19 nt, Artificial Sequence
  Description of Artificial Sequence: Synthetic oligonucleotide
uagguuagagugcacccau

SEQ ID NO: 715944 - RNA, 19 nt, Artificial Sequence
  Description of Artificial Sequence: Synthetic oligonucleotide
ugaucuuagagccgccuuu

SEQ ID NO: 715945 - RNA, 19 nt, Artificial Sequence
  Description of Artificial Sequence: Synthetic oligonucleotide
uuguguaggccugaccacc

SEQ ID NO: 715946 - RNA, 19 nt, Artificial Sequence
  Description of Artificial Sequence: Synthetic oligonucleotide
ugagaccuuagauuccauc

SEQ ID NO: 715947 - RNA, 19 nt, Artificial Sequence
  Description of Artificial Sequence: Synthetic oligonucleotide
caaucagggacccgcacug

SEQ ID NO: 715948 - RNA, 19 nt, Artificial Sequence
  Description of Artificial Sequence: Synthetic oligonucleotide
cuacccuauucucaucccc

SEQ ID NO: 715949 - RNA, 19 nt, Artificial Sequence
  Description of Artificial Sequence: Synthetic oligonucleotide
aacaagaguucaggaucgg

SEQ ID NO: 715950 - RNA, 19 nt, Artificial Sequence
  Description of Artificial Sequence: Synthetic oligonucleotide
cacgacauuuauugaacuc

SEQ ID NO: 715951 - RNA, 19 nt, Artificial Sequence
  Description of Artificial Sequence: Synthetic oligonucleotide
agugcacccaucccgguga

SEQ ID NO: 715952 - RNA, 19 nt, Artificial Sequence
  Description of Artificial Sequence: Synthetic oligonucleotide
cacggcaaaagcaccugcc

SEQ ID NO: 715953 - RNA, 19 nt, Artificial Sequence
  Description of Artificial Sequence: Synthetic oligonucleotide
gaauacguugagcauuaaa

SEQ ID NO: 715954 - RNA, 19 nt, Artificial Sequence
  Description of Artificial Sequence: Synthetic oligonucleotide
agucaguagaccaggggag

SEQ ID NO: 715955 - RNA, 19 nt, Artificial Sequence
  Description of Artificial Sequence: Synthetic oligonucleotide
ucaccuacccuauucucau

SEQ ID NO: 715956 - RNA, 19 nt, Artificial Sequence
  Description of Artificial Sequence: Synthetic oligonucleotide
guugcaagaaaaguaccuc

SEQ ID NO: 715957 - RNA, 19 nt, Artificial Sequence
  Description of Artificial Sequence: Synthetic oligonucleotide
gagacuacacuaauacgga

SEQ ID NO: 715958 - RNA, 19 nt, Artificial Sequence
  Description of Artificial Sequence: Synthetic oligonucleotide
aagcaagggucccacccca

SEQ ID NO: 715959 - RNA, 19 nt, Artificial Sequence
  Description of Artificial Sequence: Synthetic oligonucleotide
ucgcacuaucgucuguuug

SEQ ID NO: 715960 - RNA, 19 nt, Artificial Sequence
  Description of Artificial Sequence: Synthetic oligonucleotide
accucugaucccugcguac

SEQ ID NO: 715961 - RNA, 19 nt, Artificial Sequence
  Description of Artificial Sequence: Synthetic oligonucleotide
aguaggcggauggucaggg

SEQ ID NO: 715962 - RNA, 19 nt, Artificial Sequence
  Description of Artificial Sequence: Synthetic oligonucleotide
caggguuacguucaggcca

SEQ ID NO: 715963 - RNA, 19 nt, Artificial Sequence
  Description of Artificial Sequence: Synthetic oligonucleotide
uguguaggccugaccaccu

SEQ ID NO: 715964 - RNA, 19 nt, Artificial Sequence
  Description of Artificial Sequence: Synthetic oligonucleotide
ugagauugucacugcccgc

SEQ ID NO: 715965 - RNA, 19 nt, Artificial Sequence
  Description of Artificial Sequence: Synthetic oligonucleotide
uucuccggggaaagcgggg

SEQ ID NO: 715966 - RNA, 19 nt, Artificial Sequence
  Description of Artificial Sequence: Synthetic oligonucleotide
aacgcucuauucauaucug

SEQ ID NO: 715967 - RNA, 19 nt, Artificial Sequence
  Description of Artificial Sequence: Synthetic oligonucleotide
acguugagcauuaaaguaa

SEQ ID NO: 715968 - RNA, 19 nt, Artificial Sequence
  Description of Artificial Sequence: Synthetic oligonucleotide
uguugcucauggaauuaau

SEQ ID NO: 715969 - RNA, 19 nt, Artificial Sequence
  Description of Artificial Sequence: Synthetic oligonucleotide
aucccggugaccucagaug

SEQ ID NO: 715970 - RNA, 19 nt, Artificial Sequence
  Description of Artificial Sequence: Synthetic oligonucleotide
uaucuggagcucaccuacc

SEQ ID NO: 715971 - RNA, 19 nt, Artificial Sequence
  Description of Artificial Sequence: Synthetic oligonucleotide
cuucaacaagaguucagga

SEQ ID NO: 715972 - RNA, 19 nt, Artificial Sequence
  Description of Artificial Sequence: Synthetic oligonucleotide
agcaaggguucaccacggc

SEQ ID NO: 715973 - RNA, 19 nt, Artificial Sequence
  Description of Artificial Sequence: Synthetic oligonucleotide
auaccgaagcacacugugg

SEQ ID NO: 715974 - RNA, 19 nt, Artificial Sequence
  Description of Artificial Sequence: Synthetic oligonucleotide
ugggaauacguugagcauu

SEQ ID NO: 715975 - RNA, 19 nt, Artificial Sequence
  Description of Artificial Sequence: Synthetic oligonucleotide
cucaccuacccuauucuca

SEQ ID NO: 715976 - RNA, 19 nt, Artificial Sequence
  Description of Artificial Sequence: Synthetic oligonucleotide
aucugacgcucugacgacc

SEQ ID NO: 715977 - RNA, 19 nt, Artificial Sequence
  Description of Artificial Sequence: Synthetic oligonucleotide
agcucaccuacccuauucu

SEQ ID NO: 715978 - RNA, 19 nt, Artificial Sequence
  Description of Artificial Sequence: Synthetic oligonucleotide
cagaccugacgacuggccc

SEQ ID NO: 715979 - RNA, 19 nt, Artificial Sequence
  Description of Artificial Sequence: Synthetic oligonucleotide
cauccagaccugacgacug

SEQ ID NO: 715980 - RNA, 19 nt, Artificial Sequence
  Description of Artificial Sequence: Synthetic oligonucleotide
uugggaauacguugagcau

SEQ ID NO: 715981 - RNA, 19 nt, Artificial Sequence
  Description of Artificial Sequence: Synthetic oligonucleotide
uugaucuuagagccgccuu

SEQ ID NO: 715982 - RNA, 19 nt, Artificial Sequence
  Description of Artificial Sequence: Synthetic oligonucleotide
agaccugacgacuggccca

SEQ ID NO: 715983 - RNA, 19 nt, Artificial Sequence
  Description of Artificial Sequence: Synthetic oligonucleotide
aagcgggguuggucugucc

SEQ ID NO: 715984 - RNA, 19 nt, Artificial Sequence
  Description of Artificial Sequence: Synthetic oligonucleotide
uacguucaggccaccuucu

SEQ ID NO: 715985 - RNA, 19 nt, Artificial Sequence
  Description of Artificial Sequence: Synthetic oligonucleotide
guaugcuaucauagcaaag

SEQ ID NO: 715986 - RNA, 19 nt, Artificial Sequence
  Description of Artificial Sequence: Synthetic oligonucleotide
ucauaucugcaaggaagga

SEQ ID NO: 715987 - RNA, 19 nt, Artificial Sequence
  Description of Artificial Sequence: Synthetic oligonucleotide
gcugauauuggcugggguc

SEQ ID NO: 715988 - RNA, 19 nt, Artificial Sequence
  Description of Artificial Sequence: Synthetic oligonucleotide
agauugucacugcccgcuc

SEQ ID NO: 715989 - RNA, 19 nt, Artificial Sequence
  Description of Artificial Sequence: Synthetic oligonucleotide
aaauaccgaagcacacugu

SEQ ID NO: 715990 - RNA, 19 nt, Artificial Sequence
  Description of Artificial Sequence: Synthetic oligonucleotide
agaccuuagauuccaucuu

SEQ ID NO: 715991 - RNA, 19 nt, Artificial Sequence
  Description of Artificial Sequence: Synthetic oligonucleotide
aggguuacguucaggccac

SEQ ID NO: 715992 - RNA, 19 nt, Artificial Sequence
  Description of Artificial Sequence: Synthetic oligonucleotide
guggaggcgggcuuugggc

SEQ ID NO: 715993 - RNA, 19 nt, Artificial Sequence
  Description of Artificial Sequence: Synthetic oligonucleotide
gagcucaccuacccuauuc

SEQ ID NO: 715994 - RNA, 19 nt, Artificial Sequence
  Description of Artificial Sequence: Synthetic oligonucleotide
gagcaaggguucaccacgg

SEQ ID NO: 715995 - RNA, 19 nt, Artificial Sequence
  Description of Artificial Sequence: Synthetic oligonucleotide
ucccaaugaugcuuccaac

SEQ ID NO: 715996 - RNA, 19 nt, Artificial Sequence
  Description of Artificial Sequence: Synthetic oligonucleotide
gauauuggcuggggucccg

SEQ ID NO: 715997 - RNA, 19 nt, Artificial Sequence
  Description of Artificial Sequence: Synthetic oligonucleotide
agcgcguggagacuacacu

SEQ ID NO: 715998 - RNA, 19 nt, Artificial Sequence
  Description of Artificial Sequence: Synthetic oligonucleotide
ccgccuuucccaaucaggg

SEQ ID NO: 715999 - RNA, 19 nt, Artificial Sequence
  Description of Artificial Sequence: Synthetic oligonucleotide
gccuauaagaucauuggga

SEQ ID NO: 716000 - RNA, 19 nt, Artificial Sequence
  Description of Artificial Sequence: Synthetic oligonucleotide
agucgcaaugucacugggg

SEQ ID NO: 716001 - RNA, 19 nt, Artificial Sequence
  Description of Artificial Sequence: Synthetic oligonucleotide
uuagagccgccuuucccaa

SEQ ID NO: 716002 - RNA, 19 nt, Artificial Sequence
  Description of Artificial Sequence: Synthetic oligonucleotide
acaaccuaggguggggaug

SEQ ID NO: 716003 - RNA, 19 nt, Artificial Sequence
  Description of Artificial Sequence: Synthetic oligonucleotide
cagagcaccauccaccaaa

SEQ ID NO: 716004 - RNA, 19 nt, Artificial Sequence
  Description of Artificial Sequence: Synthetic oligonucleotide
ggugcagaugaacuuucug

SEQ ID NO: 716005 - RNA, 19 nt, Artificial Sequence
  Description of Artificial Sequence: Synthetic oligonucleotide
ccuggcgccacucucuucg

SEQ ID NO: 716006 - RNA, 19 nt, Artificial Sequence
  Description of Artificial Sequence: Synthetic oligonucleotide
ccgaugugugaaauggagg

SEQ ID NO: 716007 - RNA, 19 nt, Artificial Sequence
  Description of Artificial Sequence: Synthetic oligonucleotide
ccuauaagaucauugggaa

SEQ ID NO: 716008 - RNA, 19 nt, Artificial Sequence
  Description of Artificial Sequence: Synthetic oligonucleotide
aaacagguccauagaucca

SEQ ID NO: 716009 - RNA, 19 nt, Artificial Sequence
  Description of Artificial Sequence: Synthetic oligonucleotide
uacugucccuggauugugu

SEQ ID NO: 716010 - RNA, 19 nt, Artificial Sequence
  Description of Artificial Sequence: Synthetic oligonucleotide
uuuuggugcccuggcgucc

SEQ ID NO: 716011 - RNA, 19 nt, Artificial Sequence
  Description of Artificial Sequence: Synthetic oligonucleotide
gagugcacccaucccggug

SEQ ID NO: 716012 - RNA, 19 nt, Artificial Sequence
  Description of Artificial Sequence: Synthetic oligonucleotide
ugauauuggcugggguccc

SEQ ID NO: 716013 - RNA, 19 nt, Artificial Sequence
  Description of Artificial Sequence: Synthetic oligonucleotide
ccacuagucgcaaugucac

SEQ ID NO: 716014 - RNA, 19 nt, Artificial Sequence
  Description of Artificial Sequence: Synthetic oligonucleotide
gguggcuuaaggugcugag

SEQ ID NO: 716015 - RNA, 19 nt, Artificial Sequence
  Description of Artificial Sequence: Synthetic oligonucleotide
aguugggccugugauggug

SEQ ID NO: 716016 - RNA, 19 nt, Artificial Sequence
  Description of Artificial Sequence: Synthetic oligonucleotide
cuuugggcgguagggaaug

SEQ ID NO: 716017 - RNA, 19 nt, Artificial Sequence
  Description of Artificial Sequence: Synthetic oligonucleotide
agcuucaacaagaguucag

SEQ ID NO: 716018 - RNA, 19 nt, Artificial Sequence
  Description of Artificial Sequence: Synthetic oligonucleotide
cugacgacuggcccaucag

SEQ ID NO: 716019 - RNA, 19 nt, Artificial Sequence
  Description of Artificial Sequence: Synthetic oligonucleotide
gguucaccacggcaaaagc

SEQ ID NO: 716020 - RNA, 19 nt, Artificial Sequence
  Description of Artificial Sequence: Synthetic oligonucleotide
ugguaaucugacgcucuga

SEQ ID NO: 716021 - RNA, 19 nt, Artificial Sequence
  Description of Artificial Sequence: Synthetic oligonucleotide
cuuagucaucuuggaagac

SEQ ID NO: 716022 - RNA, 19 nt, Artificial Sequence
  Description of Artificial Sequence: Synthetic oligonucleotide
cuuaucuggagcucaccua

SEQ ID NO: 716023 - RNA, 19 nt, Artificial Sequence
  Description of Artificial Sequence: Synthetic oligonucleotide
ucuguacagugugccagcu

SEQ ID NO: 716024 - RNA, 19 nt, Artificial Sequence
  Description of Artificial Sequence: Synthetic oligonucleotide
aaaguaccucugaucccug

SEQ ID NO: 716025 - RNA, 19 nt, Artificial Sequence
  Description of Artificial Sequence: Synthetic oligonucleotide
gagauugucacugcccgcu

SEQ ID NO: 716026 - RNA, 19 nt, Artificial Sequence
  Description of Artificial Sequence: Synthetic oligonucleotide
uacaaccuaggguggggau

SEQ ID NO: 716027 - RNA, 19 nt, Artificial Sequence
  Description of Artificial Sequence: Synthetic oligonucleotide
ucccaaucagggacccgca

SEQ ID NO: 716028 - RNA, 19 nt, Artificial Sequence
  Description of Artificial Sequence: Synthetic oligonucleotide
uucuucggaggaguguaaa

SEQ ID NO: 716029 - RNA, 19 nt, Artificial Sequence
  Description of Artificial Sequence: Synthetic oligonucleotide
uccaauuaugcagccuaua

SEQ ID NO: 716030 - RNA, 19 nt, Artificial Sequence
  Description of Artificial Sequence: Synthetic oligonucleotide
uccggggaaagcgggguug

SEQ ID NO: 716031 - RNA, 19 nt, Artificial Sequence
  Description of Artificial Sequence: Synthetic oligonucleotide
cucaugagugcuggccggg

SEQ ID NO: 716032 - RNA, 19 nt, Artificial Sequence
  Description of Artificial Sequence: Synthetic oligonucleotide
gcucuauucauaucugcaa

SEQ ID NO: 716033 - RNA, 19 nt, Artificial Sequence
  Description of Artificial Sequence: Synthetic oligonucleotide
augguucaaaacaggucca

SEQ ID NO: 716034 - RNA, 19 nt, Artificial Sequence
  Description of Artificial Sequence: Synthetic oligonucleotide
ugcaugccagcgcguggag

SEQ ID NO: 716035 - RNA, 19 nt, Artificial Sequence
  Description of Artificial Sequence: Synthetic oligonucleotide
uuugggcgguagggaaugg

SEQ ID NO: 716036 - RNA, 19 nt, Artificial Sequence
  Description of Artificial Sequence: Synthetic oligonucleotide
ugagcaccuguggacuccc

SEQ ID NO: 716037 - RNA, 19 nt, Artificial Sequence
  Description of Artificial Sequence: Synthetic oligonucleotide
gugaugguaaucugacgcu

SEQ ID NO: 716038 - RNA, 19 nt, Artificial Sequence
  Description of Artificial Sequence: Synthetic oligonucleotide
cugagaacaaggggcagca

SEQ ID NO: 716039 - RNA, 19 nt, Artificial Sequence
  Description of Artificial Sequence: Synthetic oligonucleotide
gaccucagaugucagccua

SEQ ID NO: 716040 - RNA, 19 nt, Artificial Sequence
  Description of Artificial Sequence: Synthetic oligonucleotide
uggcguacugucccuggau

SEQ ID NO: 716041 - RNA, 19 nt, Artificial Sequence
  Description of Artificial Sequence: Synthetic oligonucleotide
ugguucaaaacagguccau

SEQ ID NO: 716042 - RNA, 19 nt, Artificial Sequence
  Description of Artificial Sequence: Synthetic oligonucleotide
agggacccgcacuggcugg

SEQ ID NO: 716043 - RNA, 19 nt, Artificial Sequence
  Description of Artificial Sequence: Synthetic oligonucleotide
ggaacacgacauuuauuga

SEQ ID NO: 716044 - RNA, 19 nt, Artificial Sequence
  Description of Artificial Sequence: Synthetic oligonucleotide
cuacacuaauacggagcgc

SEQ ID NO: 716045 - RNA, 19 nt, Artificial Sequence
  Description of Artificial Sequence: Synthetic oligonucleotide
cauaggaagugcuguuaaa

SEQ ID NO: 716046 - RNA, 19 nt, Artificial Sequence
  Description of Artificial Sequence: Synthetic oligonucleotide
caagaaaaguaccucugau

SEQ ID NO: 716047 - RNA, 19 nt, Artificial Sequence
  Description of Artificial Sequence: Synthetic oligonucleotide
gagccauccgaugugugaa

SEQ ID NO: 716048 - RNA, 19 nt, Artificial Sequence
  Description of Artificial Sequence: Synthetic oligonucleotide
ucccggugaugguaaucug

SEQ ID NO: 716049 - RNA, 19 nt, Artificial Sequence
  Description of Artificial Sequence: Synthetic oligonucleotide
ggauuguguaggccugacc

SEQ ID NO: 716050 - RNA, 19 nt, Artificial Sequence
  Description of Artificial Sequence: Synthetic oligonucleotide
uauuggcuggggucccggu

SEQ ID NO: 716051 - RNA, 19 nt, Artificial Sequence
  Description of Artificial Sequence: Synthetic oligonucleotide
ccauagauccaaauaccga

SEQ ID NO: 716052 - RNA, 19 nt, Artificial Sequence
  Description of Artificial Sequence: Synthetic oligonucleotide
caaacuuguaugcuaucau

SEQ ID NO: 716053 - RNA, 19 nt, Artificial Sequence
  Description of Artificial Sequence: Synthetic oligonucleotide
aggcugauauuggcugggg

SEQ ID NO: 716054 - RNA, 19 nt, Artificial Sequence
  Description of Artificial Sequence: Synthetic oligonucleotide
gcauuaaaguaaagagcug

SEQ ID NO: 716055 - RNA, 19 nt, Artificial Sequence
  Description of Artificial Sequence: Synthetic oligonucleotide
auggcguacugucccugga

SEQ ID NO: 716056 - RNA, 19 nt, Artificial Sequence
  Description of Artificial Sequence: Synthetic oligonucleotide
caaccuaggguggggauga

SEQ ID NO: 716057 - RNA, 19 nt, Artificial Sequence
  Description of Artificial Sequence: Synthetic oligonucleotide
cagcgcguggagacuacac

SEQ ID NO: 716058 - RNA, 19 nt, Artificial Sequence
  Description of Artificial Sequence: Synthetic oligonucleotide
gauugucacugcccgcucu

SEQ ID NO: 716059 - RNA, 19 nt, Artificial Sequence
  Description of Artificial Sequence: Synthetic oligonucleotide
ucccuggauuguguaggcc

SEQ ID NO: 716060 - RNA, 19 nt, Artificial Sequence
  Description of Artificial Sequence: Synthetic oligonucleotide
gaacucugaggggugcaga

SEQ ID NO: 716061 - RNA, 19 nt, Artificial Sequence
  Description of Artificial Sequence: Synthetic oligonucleotide
ccaugcaucaguaggcgga

SEQ ID NO: 716062 - RNA, 19 nt, Artificial Sequence
  Description of Artificial Sequence: Synthetic oligonucleotide
agcuucuucggaggagugu

SEQ ID NO: 716063 - RNA, 19 nt, Artificial Sequence
  Description of Artificial Sequence: Synthetic oligonucleotide
caggcucuaugguucaaaa

SEQ ID NO: 716064 - RNA, 19 nt, Artificial Sequence
  Description of Artificial Sequence: Synthetic oligonucleotide
agguuagagugcacccauc

SEQ ID NO: 716065 - RNA, 19 nt, Artificial Sequence
  Description of Artificial Sequence: Synthetic oligonucleotide
gguugcaagaaaaguaccu

SEQ ID NO: 716066 - RNA, 19 nt, Artificial Sequence
  Description of Artificial Sequence: Synthetic oligonucleotide
gggcagacucgcacuaucg

SEQ ID NO: 716067 - RNA, 19 nt, Artificial Sequence
  Description of Artificial Sequence: Synthetic oligonucleotide
accucagaugucagccuag

SEQ ID NO: 716068 - RNA, 19 nt, Artificial Sequence
  Description of Artificial Sequence: Synthetic oligonucleotide
gccgccuuucccaaucagg

SEQ ID NO: 716069 - RNA, 19 nt, Artificial Sequence
  Description of Artificial Sequence: Synthetic oligonucleotide
acgacuggcccaucagauu

SEQ ID NO: 716070 - RNA, 19 nt, Artificial Sequence
  Description of Artificial Sequence: Synthetic oligonucleotide
cucagaugucagccuagca

SEQ ID NO: 716071 - RNA, 19 nt, Artificial Sequence
  Description of Artificial Sequence: Synthetic oligonucleotide
ccuggauuguguaggccug

SEQ ID NO: 716072 - RNA, 19 nt, Artificial Sequence
  Description of Artificial Sequence: Synthetic oligonucleotide
aggaguguaaaggcagcuu

SEQ ID NO: 716073 - RNA, 19 nt, Artificial Sequence
  Description of Artificial Sequence: Synthetic oligonucleotide
agagugcacccaucccggu

SEQ ID NO: 716074 - RNA, 19 nt, Artificial Sequence
  Description of Artificial Sequence: Synthetic oligonucleotide
uugggcgguagggaauggu

SEQ ID NO: 716075 - RNA, 19 nt, Artificial Sequence
  Description of Artificial Sequence: Synthetic oligonucleotide
acccuauucucauccccuu

SEQ ID NO: 716076 - RNA, 19 nt, Artificial Sequence
  Description of Artificial Sequence: Synthetic oligonucleotide
cacuaauacggagcgcaca

SEQ ID NO: 716077 - RNA, 19 nt, Artificial Sequence
  Description of Artificial Sequence: Synthetic oligonucleotide
ggaucgggagccagcagcc

SEQ ID NO: 716078 - RNA, 19 nt, Artificial Sequence
  Description of Artificial Sequence: Synthetic oligonucleotide
caguaggcggauggucagg

SEQ ID NO: 716079 - RNA, 19 nt, Artificial Sequence
  Description of Artificial Sequence: Synthetic oligonucleotide
guacaaccuagggugggga

SEQ ID NO: 716080 - RNA, 19 nt, Artificial Sequence
  Description of Artificial Sequence: Synthetic oligonucleotide
ccuccaaaauguagcucag

SEQ ID NO: 716081 - RNA, 19 nt, Artificial Sequence
  Description of Artificial Sequence: Synthetic oligonucleotide
ccuacccuauucucauccc

SEQ ID NO: 716082 - RNA, 19 nt, Artificial Sequence
  Description of Artificial Sequence: Synthetic oligonucleotide
cauuggcgauuuugaucug

SEQ ID NO: 716083 - RNA, 19 nt, Artificial Sequence
  Description of Artificial Sequence: Synthetic oligonucleotide
ggccgggaccacuagucgc

SEQ ID NO: 716084 - RNA, 19 nt, Artificial Sequence
  Description of Artificial Sequence: Synthetic oligonucleotide
agcaagggucccaccccac

SEQ ID NO: 716085 - RNA, 19 nt, Artificial Sequence
  Description of Artificial Sequence: Synthetic oligonucleotide
gcugcaugccagcgcgugg

SEQ ID NO: 716086 - RNA, 19 nt, Artificial Sequence
  Description of Artificial Sequence: Synthetic oligonucleotide
gagugggcagacucgcacu

SEQ ID NO: 716087 - RNA, 19 nt, Artificial Sequence
  Description of Artificial Sequence: Synthetic oligonucleotide
ggcagcuuuucuccgggga

SEQ ID NO: 716088 - RNA, 19 nt, Artificial Sequence
  Description of Artificial Sequence: Synthetic oligonucleotide
guaccucugaucccugcgu

SEQ ID NO: 716089 - RNA, 19 nt, Artificial Sequence
  Description of Artificial Sequence: Synthetic oligonucleotide
gacgacuggcccaucagau

SEQ ID NO: 716090 - RNA, 19 nt, Artificial Sequence
  Description of Artificial Sequence: Synthetic oligonucleotide
caccuuucgguggggacuc

SEQ ID NO: 716091 - RNA, 19 nt, Artificial Sequence
  Description of Artificial Sequence: Synthetic oligonucleotide
guuacguucaggccaccuu

SEQ ID NO: 716092 - RNA, 19 nt, Artificial Sequence
  Description of Artificial Sequence: Synthetic oligonucleotide
ggcguccaauuaugcagcc

SEQ ID NO: 716093 - RNA, 19 nt, Artificial Sequence
  Description of Artificial Sequence: Synthetic oligonucleotide
accuguggacucccggauu

SEQ ID NO: 716094 - RNA, 19 nt, Artificial Sequence
  Description of Artificial Sequence: Synthetic oligonucleotide
ugacgcucugacgacccuu

SEQ ID NO: 716095 - RNA, 19 nt, Artificial Sequence
  Description of Artificial Sequence: Synthetic oligonucleotide
gggguuugcugcauggcca

SEQ ID NO: 716096 - RNA, 19 nt, Artificial Sequence
  Description of Artificial Sequence: Synthetic oligonucleotide
gcucaccuacccuauucuc

SEQ ID NO: 716097 - RNA, 19 nt, Artificial Sequence
  Description of Artificial Sequence: Synthetic oligonucleotide
cauaggcaggcucuauggu

SEQ ID NO: 716098 - RNA, 19 nt, Artificial Sequence
  Description of Artificial Sequence: Synthetic oligonucleotide
caggaucgggagccagcag

SEQ ID NO: 716099 - RNA, 19 nt, Artificial Sequence
  Description of Artificial Sequence: Synthetic oligonucleotide
aaccuaggguggggaugag

SEQ ID NO: 716100 - RNA, 19 nt, Artificial Sequence
  Description of Artificial Sequence: Synthetic oligonucleotide
gcguacaaccuaggguggg

SEQ ID NO: 716101 - RNA, 19 nt, Artificial Sequence
  Description of Artificial Sequence: Synthetic oligonucleotide
cugcaugccagcgcgugga

SEQ ID NO: 716102 - RNA, 19 nt, Artificial Sequence
  Description of Artificial Sequence: Synthetic oligonucleotide
gggaauacguugagcauua

SEQ ID NO: 716103 - RNA, 19 nt, Artificial Sequence
  Description of Artificial Sequence: Synthetic oligonucleotide
cacuaucgucuguuuguaa

SEQ ID NO: 716104 - RNA, 19 nt, Artificial Sequence
  Description of Artificial Sequence: Synthetic oligonucleotide
caccuacccuauucucauc

SEQ ID NO: 716105 - RNA, 19 nt, Artificial Sequence
  Description of Artificial Sequence: Synthetic oligonucleotide
uggggucccugagauuguc

SEQ ID NO: 716106 - RNA, 19 nt, Artificial Sequence
  Description of Artificial Sequence: Synthetic oligonucleotide
gcaucaguugggccuguga

SEQ ID NO: 716107 - RNA, 19 nt, Artificial Sequence
  Description of Artificial Sequence: Synthetic oligonucleotide
ccaaaauguagcucagggu

SEQ ID NO: 716108 - RNA, 19 nt, Artificial Sequence
  Description of Artificial Sequence: Synthetic oligonucleotide
ccacggcaaaagcaccugc

SEQ ID NO: 716109 - RNA, 19 nt, Artificial Sequence
  Description of Artificial Sequence: Synthetic oligonucleotide
ccuggcguccaauuaugca

SEQ ID NO: 716110 - RNA, 19 nt, Artificial Sequence
  Description of Artificial Sequence: Synthetic oligonucleotide
cccggugaugguaaucuga

SEQ ID NO: 716111 - RNA, 19 nt, Artificial Sequence
  Description of Artificial Sequence: Synthetic oligonucleotide
cccagauggcgucaccuuc

SEQ ID NO: 716112 - RNA, 19 nt, Artificial Sequence
  Description of Artificial Sequence: Synthetic oligonucleotide
cguugagcauuaaaguaaa

SEQ ID NO: 716113 - RNA, 19 nt, Artificial Sequence
  Description of Artificial Sequence: Synthetic oligonucleotide
gcgcguggagacuacacua

SEQ ID NO: 716114 - RNA, 19 nt, Artificial Sequence
  Description of Artificial Sequence: Synthetic oligonucleotide
ggcuuaucuggagcucacc

SEQ ID NO: 716115 - RNA, 19 nt, Artificial Sequence
  Description of Artificial Sequence: Synthetic oligonucleotide
cccuggcguccaauuaugc

SEQ ID NO: 716116 - RNA, 19 nt, Artificial Sequence
  Description of Artificial Sequence: Synthetic oligonucleotide
cguccaauuaugcagccua

SEQ ID NO: 716117 - RNA, 19 nt, Artificial Sequence
  Description of Artificial Sequence: Synthetic oligonucleotide
ccugcguacaaccuagggu

SEQ ID NO: 716118 - RNA, 19 nt, Artificial Sequence
  Description of Artificial Sequence: Synthetic oligonucleotide
gcgggcuuugggcgguagg

SEQ ID NO: 716119 - RNA, 19 nt, Artificial Sequence
  Description of Artificial Sequence: Synthetic oligonucleotide
ccacggacagcgaggccgc

SEQ ID NO: 716120 - RNA, 19 nt, Artificial Sequence
  Description of Artificial Sequence: Synthetic oligonucleotide
uggggcccagauggcguca

SEQ ID NO: 716121 - RNA, 19 nt, Artificial Sequence
  Description of Artificial Sequence: Synthetic oligonucleotide
cccuggauuguguaggccu

SEQ ID NO: 716122 - RNA, 19 nt, Artificial Sequence
  Description of Artificial Sequence: Synthetic oligonucleotide
gugcacccaucccggugac

SEQ ID NO: 716123 - RNA, 19 nt, Artificial Sequence
  Description of Artificial Sequence: Synthetic oligonucleotide
cacuagucgcaaugucacu

SEQ ID NO: 716124 - RNA, 19 nt, Artificial Sequence
  Description of Artificial Sequence: Synthetic oligonucleotide
acgacccuucaguggcauu

SEQ ID NO: 716125 - RNA, 19 nt, Artificial Sequence
  Description of Artificial Sequence: Synthetic oligonucleotide
gacucgcacuaucgucugu

SEQ ID NO: 716126 - RNA, 19 nt, Artificial Sequence
  Description of Artificial Sequence: Synthetic oligonucleotide
ccugacgacuggcccauca

SEQ ID NO: 716127 - RNA, 19 nt, Artificial Sequence
  Description of Artificial Sequence: Synthetic oligonucleotide
gcuggcuuaucuggagcuc

SEQ ID NO: 716128 - RNA, 19 nt, Artificial Sequence
  Description of Artificial Sequence: Synthetic oligonucleotide
ccaaauaccgaagcacacu

SEQ ID NO: 716129 - RNA, 19 nt, Artificial Sequence
  Description of Artificial Sequence: Synthetic oligonucleotide
ccggggaaagcgggguugg

SEQ ID NO: 716130 - RNA, 19 nt, Artificial Sequence
  Description of Artificial Sequence: Synthetic oligonucleotide
gaccugacgacuggcccau

SEQ ID NO: 716131 - RNA, 19 nt, Artificial Sequence
  Description of Artificial Sequence: Synthetic oligonucleotide
caugcaucaguaggcggau

SEQ ID NO: 716132 - RNA, 19 nt, Artificial Sequence
  Description of Artificial Sequence: Synthetic oligonucleotide
guaggcggauggucagggu

SEQ ID NO: 716133 - RNA, 19 nt, Artificial Sequence
  Description of Artificial Sequence: Synthetic oligonucleotide
ccaaucagggacccgcacu

SEQ ID NO: 716134 - RNA, 19 nt, Artificial Sequence
  Description of Artificial Sequence: Synthetic oligonucleotide
guccaauuaugcagccuau

SEQ ID NO: 716135 - RNA, 19 nt, Artificial Sequence
  Description of Artificial Sequence: Synthetic oligonucleotide
ggagcgcacagggccugag

SEQ ID NO: 716136 - RNA, 19 nt, Artificial Sequence
  Description of Artificial Sequence: Synthetic oligonucleotide
cacggacagcgaggccgcg

SEQ ID NO: 716137 - RNA, 19 nt, Artificial Sequence
  Description of Artificial Sequence: Synthetic oligonucleotide
ggucccggugaugguaauc

SEQ ID NO: 716138 - RNA, 19 nt, Artificial Sequence
  Description of Artificial Sequence: Synthetic oligonucleotide
ggcguacugucccuggauu

SEQ ID NO: 716139 - RNA, 19 nt, Artificial Sequence
  Description of Artificial Sequence: Synthetic oligonucleotide
ccgccacggacagcgaggc

SEQ ID NO: 716140 - RNA, 19 nt, Artificial Sequence
  Description of Artificial Sequence: Synthetic oligonucleotide
gguuacguucaggccaccu

SEQ ID NO: 716141 - RNA, 19 nt, Artificial Sequence
  Description of Artificial Sequence: Synthetic oligonucleotide
ccccgccacggacagcgag

SEQ ID NO: 716142 - RNA, 19 nt, Artificial Sequence
  Description of Artificial Sequence: Synthetic oligonucleotide
ggcaucaguugggccugug

SEQ ID NO: 716143 - RNA, 19 nt, Artificial Sequence
  Description of Artificial Sequence: Synthetic oligonucleotide
cucgcacuaucgucuguuu

SEQ ID NO: 716144 - RNA, 19 nt, Artificial Sequence
  Description of Artificial Sequence: Synthetic oligonucleotide
cccaucccggugaccucag

SEQ ID NO: 716145 - RNA, 19 nt, Artificial Sequence
  Description of Artificial Sequence: Synthetic oligonucleotide
ggugcccuggcguccaauu

SEQ ID NO: 716146 - RNA, 19 nt, Artificial Sequence
  Description of Artificial Sequence: Synthetic oligonucleotide
cgcguggagacuacacuaa

SEQ ID NO: 716147 - RNA, 19 nt, Artificial Sequence
  Description of Artificial Sequence: Synthetic oligonucleotide
gggauggcguacugucccu

SEQ ID NO: 716148 - RNA, 19 nt, Artificial Sequence
  Description of Artificial Sequence: Synthetic oligonucleotide
gcguggagacuacacuaau

SEQ ID NO: 716149 - RNA, 19 nt, Artificial Sequence
  Description of Artificial Sequence: Synthetic oligonucleotide
cugacgcucugacgacccu

SEQ ID NO: 716150 - RNA, 19 nt, Artificial Sequence
  Description of Artificial Sequence: Synthetic oligonucleotide
cggauggucaggguuacgu

SEQ ID NO: 716151 - RNA, 19 nt, Artificial Sequence
  Description of Artificial Sequence: Synthetic oligonucleotide
caguugggccugugauggu

SEQ ID NO: 716152 - RNA, 19 nt, Artificial Sequence
  Description of Artificial Sequence: Synthetic oligonucleotide
ccccgagauaucccagcaa

SEQ ID NO: 716153 - RNA, 19 nt, Artificial Sequence
  Description of Artificial Sequence: Synthetic oligonucleotide
gagcugcaugccagcgcgu

SEQ ID NO: 716154 - RNA, 19 nt, Artificial Sequence
  Description of Artificial Sequence: Synthetic oligonucleotide
gccagcgcguggagacuac

SEQ ID NO: 716155 - RNA, 19 nt, Artificial Sequence
  Description of Artificial Sequence: Synthetic oligonucleotide
gcguccaauuaugcagccu

SEQ ID NO: 716156 - RNA, 19 nt, Artificial Sequence
  Description of Artificial Sequence: Synthetic oligonucleotide
ccagcgcguggagacuaca

SEQ ID NO: 716157 - RNA, 19 nt, Artificial Sequence
  Description of Artificial Sequence: Synthetic oligonucleotide
ccgggaccacuagucgcaa

SEQ ID NO: 716158 - RNA, 19 nt, Artificial Sequence
  Description of Artificial Sequence: Synthetic oligonucleotide
gccccgccacggacagcga

SEQ ID NO: 716159 - RNA, 19 nt, Artificial Sequence
  Description of Artificial Sequence: Synthetic oligonucleotide
cgggaccacuagucgcaau

SEQ ID NO: 716160 - RNA, 19 nt, Artificial Sequence
  Description of Artificial Sequence: Synthetic oligonucleotide
uuuauauucacuuucaacc

SEQ ID NO: 716161 - RNA, 19 nt, Artificial Sequence
  Description of Artificial Sequence: Synthetic oligonucleotide
aaaagaguugaauucgucc

SEQ ID NO: 716162 - RNA, 19 nt, Artificial Sequence
  Description of Artificial Sequence: Synthetic oligonucleotide
uauugugucacacugaucc

SEQ ID NO: 716163 - RNA, 19 nt, Artificial Sequence
  Description of Artificial Sequence: Synthetic oligonucleotide
aaucaauuggaauagagca

SEQ ID NO: 716164 - RNA, 19 nt, Artificial Sequence
  Description of Artificial Sequence: Synthetic oligonucleotide
aaaacauucucacaugccg

SEQ ID NO: 716165 - RNA, 19 nt, Artificial Sequence
  Description of Artificial Sequence: Synthetic oligonucleotide
ucaguuaaaacauaguuug

SEQ ID NO: 716166 - RNA, 19 nt, Artificial Sequence
  Description of Artificial Sequence: Synthetic oligonucleotide
gaauuuucuauauagguug

SEQ ID NO: 716167 - RNA, 19 nt, Artificial Sequence
  Description of Artificial Sequence: Synthetic oligonucleotide
ugaauauugugucacacug

SEQ ID NO: 716168 - RNA, 19 nt, Artificial Sequence
  Description of Artificial Sequence: Synthetic oligonucleotide
gaucauugcacauacguag

SEQ ID NO: 716169 - RNA, 19 nt, Artificial Sequence
  Description of Artificial Sequence: Synthetic oligonucleotide
ugauuucucagauagagga

SEQ ID NO: 716170 - RNA, 19 nt, Artificial Sequence
  Description of Artificial Sequence: Synthetic oligonucleotide
aaagugaauauugugucac

SEQ ID NO: 716171 - RNA, 19 nt, Artificial Sequence
  Description of Artificial Sequence: Synthetic oligonucleotide
uuuauuaccauguucucca

SEQ ID NO: 716172 - RNA, 19 nt, Artificial Sequence
  Description of Artificial Sequence: Synthetic oligonucleotide
gauuccaaagccuuguuag

SEQ ID NO: 716173 - RNA, 19 nt, Artificial Sequence
  Description of Artificial Sequence: Synthetic oligonucleotide
uuccauauuaucaggacag

SEQ ID NO: 716174 - RNA, 19 nt, Artificial Sequence
  Description of Artificial Sequence: Synthetic oligonucleotide
auagguuguaaucaauugg

SEQ ID NO: 716175 - RNA, 19 nt, Artificial Sequence
  Description of Artificial Sequence: Synthetic oligonucleotide
uuccguaccacucuugugg

SEQ ID NO: 716176 - RNA, 19 nt, Artificial Sequence
  Description of Artificial Sequence: Synthetic oligonucleotide
uuuguaguaucuucaaucc

SEQ ID NO: 716177 - RNA, 19 nt, Artificial Sequence
  Description of Artificial Sequence: Synthetic oligonucleotide
uucagcaugcuucugaccc

SEQ ID NO: 716178 - RNA, 19 nt, Artificial Sequence
  Description of Artificial Sequence: Synthetic oligonucleotide
augaguuccaauuuucuuc

SEQ ID NO: 716179 - RNA, 19 nt, Artificial Sequence
  Description of Artificial Sequence: Synthetic oligonucleotide
ucuaucuucagcaugcuuc

SEQ ID NO: 716180 - RNA, 19 nt, Artificial Sequence
  Description of Artificial Sequence: Synthetic oligonucleotide
uuggaauagagcaaguugu

SEQ ID NO: 716181 - RNA, 19 nt, Artificial Sequence
  Description of Artificial Sequence: Synthetic oligonucleotide
uuuaucucgccgaacauca

SEQ ID NO: 716182 - RNA, 19 nt, Artificial Sequence
  Description of Artificial Sequence: Synthetic oligonucleotide
aacuuugcaaaguauacau

SEQ ID NO: 716183 - RNA, 19 nt, Artificial Sequence
  Description of Artificial Sequence: Synthetic oligonucleotide
aauucguccacagaaaacu

SEQ ID NO: 716184 - RNA, 19 nt, Artificial Sequence
  Description of Artificial Sequence: Synthetic oligonucleotide
uuuaccaaaaccacuggac

SEQ ID NO: 716185 - RNA, 19 nt, Artificial Sequence
  Description of Artificial Sequence: Synthetic oligonucleotide
aggacagagauuccaaagc

SEQ ID NO: 716186 - RNA, 19 nt, Artificial Sequence
  Description of Artificial Sequence: Synthetic oligonucleotide
uuaaauugcugguugguug

SEQ ID NO: 716187 - RNA, 19 nt, Artificial Sequence
  Description of Artificial Sequence: Synthetic oligonucleotide
ucuauauagguuguaauca

SEQ ID NO: 716188 - RNA, 19 nt, Artificial Sequence
  Description of Artificial Sequence: Synthetic oligonucleotide
aaucugccuaauuucagag

SEQ ID NO: 716189 - RNA, 19 nt, Artificial Sequence
  Description of Artificial Sequence: Synthetic oligonucleotide
uaaauugcugguugguugg

SEQ ID NO: 716190 - RNA, 19 nt, Artificial Sequence
  Description of Artificial Sequence: Synthetic oligonucleotide
aagcuaacuauuugucucg

SEQ ID NO: 716191 - RNA, 19 nt, Artificial Sequence
  Description of Artificial Sequence: Synthetic oligonucleotide
uaauuucuaaguacggagc

SEQ ID NO: 716192 - RNA, 19 nt, Artificial Sequence
  Description of Artificial Sequence: Synthetic oligonucleotide
uagguuguaaucaauugga

SEQ ID NO: 716193 - RNA, 19 nt, Artificial Sequence
  Description of Artificial Sequence: Synthetic oligonucleotide
aauagcaagagaaauaaua

SEQ ID NO: 716194 - RNA, 19 nt, Artificial Sequence
  Description of Artificial Sequence: Synthetic oligonucleotide
uuguuuagugcgcugauca

SEQ ID NO: 716195 - RNA, 19 nt, Artificial Sequence
  Description of Artificial Sequence: Synthetic oligonucleotide
cauaauuugaauuguucac

SEQ ID NO: 716196 - RNA, 19 nt, Artificial Sequence
  Description of Artificial Sequence: Synthetic oligonucleotide
ucuucuuuccagaacaccu

SEQ ID NO: 716197 - RNA, 19 nt, Artificial Sequence
  Description of Artificial Sequence: Synthetic oligonucleotide
auguauuugauuuccaagu

SEQ ID NO: 716198 - RNA, 19 nt, Artificial Sequence
  Description of Artificial Sequence: Synthetic oligonucleotide
agaagugagggcuucuucg

SEQ ID NO: 716199 - RNA, 19 nt, Artificial Sequence
  Description of Artificial Sequence: Synthetic oligonucleotide
ucaauuggaauagagcaag

SEQ ID NO: 716200 - RNA, 19 nt, Artificial Sequence
  Description of Artificial Sequence: Synthetic oligonucleotide
ucucauagcauuguacugg

SEQ ID NO: 716201 - RNA, 19 nt, Artificial Sequence
  Description of Artificial Sequence: Synthetic oligonucleotide
aauagcuaaaacauucuca

SEQ ID NO: 716202 - RNA, 19 nt, Artificial Sequence
  Description of Artificial Sequence: Synthetic oligonucleotide
ugguaacaaaaucuuauca

SEQ ID NO: 716203 - RNA, 19 nt, Artificial Sequence
  Description of Artificial Sequence: Synthetic oligonucleotide
uggcaaauaacucuaucug

SEQ ID NO: 716204 - RNA, 19 nt, Artificial Sequence
  Description of Artificial Sequence: Synthetic oligonucleotide
ugcaaaguauacauguucu

SEQ ID NO: 716205 - RNA, 19 nt, Artificial Sequence
  Description of Artificial Sequence: Synthetic oligonucleotide
cuuuauauucacuuucaac

SEQ ID NO: 716206 - RNA, 19 nt, Artificial Sequence
  Description of Artificial Sequence: Synthetic oligonucleotide
ugccuaagaagucuucugg

SEQ ID NO: 716207 - RNA, 19 nt, Artificial Sequence
  Description of Artificial Sequence: Synthetic oligonucleotide
aagaaaagaaagcaagcua

SEQ ID NO: 716208 - RNA, 19 nt, Artificial Sequence
  Description of Artificial Sequence: Synthetic oligonucleotide
cuaacuauuugucucggag

SEQ ID NO: 716209 - RNA, 19 nt, Artificial Sequence
  Description of Artificial Sequence: Synthetic oligonucleotide
auagaauguauuugauuuc

SEQ ID NO: 716210 - RNA, 19 nt, Artificial Sequence
  Description of Artificial Sequence: Synthetic oligonucleotide
uucuauauagguuguaauc

SEQ ID NO: 716211 - RNA, 19 nt, Artificial Sequence
  Description of Artificial Sequence: Synthetic oligonucleotide
aaucuuaucacaguuuaau

SEQ ID NO: 716212 - RNA, 19 nt, Artificial Sequence
  Description of Artificial Sequence: Synthetic oligonucleotide
aaguuuguuggcaaauaac

SEQ ID NO: 716213 - RNA, 19 nt, Artificial Sequence
  Description of Artificial Sequence: Synthetic oligonucleotide
ugcucauuuguauugaaaa

SEQ ID NO: 716214 - RNA, 19 nt, Artificial Sequence
  Description of Artificial Sequence: Synthetic oligonucleotide
uagauaaucuucugaggag

SEQ ID NO: 716215 - RNA, 19 nt, Artificial Sequence
  Description of Artificial Sequence: Synthetic oligonucleotide
cauuaguuaggcuuucagc

SEQ ID NO: 716216 - RNA, 19 nt, Artificial Sequence
  Description of Artificial Sequence: Synthetic oligonucleotide
ucuaccaucuuugaaaauc

SEQ ID NO: 716217 - RNA, 19 nt, Artificial Sequence
  Description of Artificial Sequence: Synthetic oligonucleotide
aauuuaaccugucccuuga

SEQ ID NO: 716218 - RNA, 19 nt, Artificial Sequence
  Description of Artificial Sequence: Synthetic oligonucleotide
uuacagguuuaucucgccg

SEQ ID NO: 716219 - RNA, 19 nt, Artificial Sequence
  Description of Artificial Sequence: Synthetic oligonucleotide
uagaauguauuugauuucc

SEQ ID NO: 716220 - RNA, 19 nt, Artificial Sequence
  Description of Artificial Sequence: Synthetic oligonucleotide
ugccgaaugauuuauaauu

SEQ ID NO: 716221 - RNA, 19 nt, Artificial Sequence
  Description of Artificial Sequence: Synthetic oligonucleotide
uuaauauaugcucuaccau

SEQ ID NO: 716222 - RNA, 19 nt, Artificial Sequence
  Description of Artificial Sequence: Synthetic oligonucleotide
gauuuagauaaucuucuga

SEQ ID NO: 716223 - RNA, 19 nt, Artificial Sequence
  Description of Artificial Sequence: Synthetic oligonucleotide
cuucuucgugcuaagagcc

SEQ ID NO: 716224 - RNA, 19 nt, Artificial Sequence
  Description of Artificial Sequence: Synthetic oligonucleotide
cuucaauccagagugauug

SEQ ID NO: 716225 - RNA, 19 nt, Artificial Sequence
  Description of Artificial Sequence: Synthetic oligonucleotide
aguaucuucaauccagagu

SEQ ID NO: 716226 - RNA, 19 nt, Artificial Sequence
  Description of Artificial Sequence: Synthetic oligonucleotide
uguuuaccaaaaccacugg

SEQ ID NO: 716227 - RNA, 19 nt, Artificial Sequence
  Description of Artificial Sequence: Synthetic oligonucleotide
uuuagugcgcugaucaggu

SEQ ID NO: 716228 - RNA, 19 nt, Artificial Sequence
  Description of Artificial Sequence: Synthetic oligonucleotide
accucugaaagcuugguca

SEQ ID NO: 716229 - RNA, 19 nt, Artificial Sequence
  Description of Artificial Sequence: Synthetic oligonucleotide
uaucucgccgaacaucagg

SEQ ID NO: 716230 - RNA, 19 nt, Artificial Sequence
  Description of Artificial Sequence: Synthetic oligonucleotide
uguuacagguuuaucucgc

SEQ ID NO: 716231 - RNA, 19 nt, Artificial Sequence
  Description of Artificial Sequence: Synthetic oligonucleotide
acuuuguaaguuaagaccu

SEQ ID NO: 716232 - RNA, 19 nt, Artificial Sequence
  Description of Artificial Sequence: Synthetic oligonucleotide
uuaauccagacuuguuuag

SEQ ID NO: 716233 - RNA, 19 nt, Artificial Sequence
  Description of Artificial Sequence: Synthetic oligonucleotide
aaagcuuggucaaggguac

SEQ ID NO: 716234 - RNA, 19 nt, Artificial Sequence
  Description of Artificial Sequence: Synthetic oligonucleotide
agugaauauugugucacac

SEQ ID NO: 716235 - RNA, 19 nt, Artificial Sequence
  Description of Artificial Sequence: Synthetic oligonucleotide
gguaacaaaaucuuaucac

SEQ ID NO: 716236 - RNA, 19 nt, Artificial Sequence
  Description of Artificial Sequence: Synthetic oligonucleotide
cuggcagacucuuaaauug

SEQ ID NO: 716237 - RNA, 19 nt, Artificial Sequence
  Description of Artificial Sequence: Synthetic oligonucleotide
uaaguacggagccaaaauc

SEQ ID NO: 716238 - RNA, 19 nt, Artificial Sequence
  Description of Artificial Sequence: Synthetic oligonucleotide
uaauagcuaaaacauucuc

SEQ ID NO: 716239 - RNA, 19 nt, Artificial Sequence
  Description of Artificial Sequence: Synthetic oligonucleotide
cugaaguaauccugaagcg

SEQ ID NO: 716240 - RNA, 19 nt, Artificial Sequence
  Description of Artificial Sequence: Synthetic oligonucleotide
auaauuugaauuguucaca

SEQ ID NO: 716241 - RNA, 19 nt, Artificial Sequence
  Description of Artificial Sequence: Synthetic oligonucleotide
gaaguaauccugaagcgac

SEQ ID NO: 716242 - RNA, 19 nt, Artificial Sequence
  Description of Artificial Sequence: Synthetic oligonucleotide
agagugauugcucaucagu

SEQ ID NO: 716243 - RNA, 19 nt, Artificial Sequence
  Description of Artificial Sequence: Synthetic oligonucleotide
uuuaaccugucccuugaga

SEQ ID NO: 716244 - RNA, 19 nt, Artificial Sequence
  Description of Artificial Sequence: Synthetic oligonucleotide
uuaagaccugauuucucag

SEQ ID NO: 716245 - RNA, 19 nt, Artificial Sequence
  Description of Artificial Sequence: Synthetic oligonucleotide
cuuggcuagcuuuauuacc

SEQ ID NO: 716246 - RNA, 19 nt, Artificial Sequence
  Description of Artificial Sequence: Synthetic oligonucleotide
cauauuaucaggacagaga

SEQ ID NO: 716247 - RNA, 19 nt, Artificial Sequence
  Description of Artificial Sequence: Synthetic oligonucleotide
uaucuguuguugcaugagc

SEQ ID NO: 716248 - RNA, 19 nt, Artificial Sequence
  Description of Artificial Sequence: Synthetic oligonucleotide
aaguacggagccaaaaucu

SEQ ID NO: 716249 - RNA, 19 nt, Artificial Sequence
  Description of Artificial Sequence: Synthetic oligonucleotide
uccugaagcgaccagaauu

SEQ ID NO: 716250 - RNA, 19 nt, Artificial Sequence
  Description of Artificial Sequence: Synthetic oligonucleotide
uugagauuuagauaaucuu

SEQ ID NO: 716251 - RNA, 19 nt, Artificial Sequence
  Description of Artificial Sequence: Synthetic oligonucleotide
ugaaguaauccugaagcga

SEQ ID NO: 716252 - RNA, 19 nt, Artificial Sequence
  Description of Artificial Sequence: Synthetic oligonucleotide
gaauuuaaccugucccuug

SEQ ID NO: 716253 - RNA, 19 nt, Artificial Sequence
  Description of Artificial Sequence: Synthetic oligonucleotide
ucaucaguuaaaacauagu

SEQ ID NO: 716254 - RNA, 19 nt, Artificial Sequence
  Description of Artificial Sequence: Synthetic oligonucleotide
ugauuuacaggcuuccaua

SEQ ID NO: 716255 - RNA, 19 nt, Artificial Sequence
  Description of Artificial Sequence: Synthetic oligonucleotide
ucagcuguaaauccaucaa

SEQ ID NO: 716256 - RNA, 19 nt, Artificial Sequence
  Description of Artificial Sequence: Synthetic oligonucleotide
guuaagaccugauuucuca

SEQ ID NO: 716257 - RNA, 19 nt, Artificial Sequence
  Description of Artificial Sequence: Synthetic oligonucleotide
auacguaguaaauaauuuu

SEQ ID NO: 716258 - RNA, 19 nt, Artificial Sequence
  Description of Artificial Sequence: Synthetic oligonucleotide
uuggcauguauucucuugu

SEQ ID NO: 716259 - RNA, 19 nt, Artificial Sequence
  Description of Artificial Sequence: Synthetic oligonucleotide
uucaguaaagcaucauuau

SEQ ID NO: 716260 - RNA, 19 nt, Artificial Sequence
  Description of Artificial Sequence: Synthetic oligonucleotide
uuccagguuaaacugacuu

SEQ ID NO: 716261 - RNA, 19 nt, Artificial Sequence
  Description of Artificial Sequence: Synthetic oligonucleotide
uauauagguuguaaucaau

SEQ ID NO: 716262 - RNA, 19 nt, Artificial Sequence
  Description of Artificial Sequence: Synthetic oligonucleotide
aguguuuaauauaugcucu

SEQ ID NO: 716263 - RNA, 19 nt, Artificial Sequence
  Description of Artificial Sequence: Synthetic oligonucleotide
uguuggggcuucaucaucu

SEQ ID NO: 716264 - RNA, 19 nt, Artificial Sequence
  Description of Artificial Sequence: Synthetic oligonucleotide
agguuuaucucgccgaaca

SEQ ID NO: 716265 - RNA, 19 nt, Artificial Sequence
  Description of Artificial Sequence: Synthetic oligonucleotide
aguugguagacugauuuug

SEQ ID NO: 716266 - RNA, 19 nt, Artificial Sequence
  Description of Artificial Sequence: Synthetic oligonucleotide
uucucauagcauuguacug

SEQ ID NO: 716267 - RNA, 19 nt, Artificial Sequence
  Description of Artificial Sequence: Synthetic oligonucleotide
agcagaauagaauguauuu

SEQ ID NO: 716268 - RNA, 19 nt, Artificial Sequence
  Description of Artificial Sequence: Synthetic oligonucleotide
uucugaggagaucauugca

SEQ ID NO: 716269 - RNA, 19 nt, Artificial Sequence
  Description of Artificial Sequence: Synthetic oligonucleotide
uauucacuuucaaccaugu

SEQ ID NO: 716270 - RNA, 19 nt, Artificial Sequence
  Description of Artificial Sequence: Synthetic oligonucleotide
uaccaaaaccacuggaccu

SEQ ID NO: 716271 - RNA, 19 nt, Artificial Sequence
  Description of Artificial Sequence: Synthetic oligonucleotide
gaccucuuaucaaaugccg

SEQ ID NO: 716272 - RNA, 19 nt, Artificial Sequence
  Description of Artificial Sequence: Synthetic oligonucleotide
ugaucagguuaucuguugu

SEQ ID NO: 716273 - RNA, 19 nt, Artificial Sequence
  Description of Artificial Sequence: Synthetic oligonucleotide
acgcaguacagacacuuuc

SEQ ID NO: 716274 - RNA, 19 nt, Artificial Sequence
  Description of Artificial Sequence: Synthetic oligonucleotide
uuuguaaguuaagaccuga

SEQ ID NO: 716275 - RNA, 19 nt, Artificial Sequence
  Description of Artificial Sequence: Synthetic oligonucleotide
cuuugaaaaucuuucucca

SEQ ID NO: 716276 - RNA, 19 nt, Artificial Sequence
  Description of Artificial Sequence: Synthetic oligonucleotide
gucacucagcuguaaaucc

SEQ ID NO: 716277 - RNA, 19 nt, Artificial Sequence
  Description of Artificial Sequence: Synthetic oligonucleotide
agauuuagauaaucuucug

SEQ ID NO: 716278 - RNA, 19 nt, Artificial Sequence
  Description of Artificial Sequence: Synthetic oligonucleotide
guuuagugcgcugaucagg

SEQ ID NO: 716279 - RNA, 19 nt, Artificial Sequence
  Description of Artificial Sequence: Synthetic oligonucleotide
cucggagucauuaguuagg

SEQ ID NO: 716280 - RNA, 19 nt, Artificial Sequence
  Description of Artificial Sequence: Synthetic oligonucleotide
caagagaaauaauagcuaa

SEQ ID NO: 716281 - RNA, 19 nt, Artificial Sequence
  Description of Artificial Sequence: Synthetic oligonucleotide
aaauugcugguugguuggc

SEQ ID NO: 716282 - RNA, 19 nt, Artificial Sequence
  Description of Artificial Sequence: Synthetic oligonucleotide
uuugaauuguucacagcuu

SEQ ID NO: 716283 - RNA, 19 nt, Artificial Sequence
  Description of Artificial Sequence: Synthetic oligonucleotide
auugcacauacguaguaaa

SEQ ID NO: 716284 - RNA, 19 nt, Artificial Sequence
  Description of Artificial Sequence: Synthetic oligonucleotide
uaagaccugauuucucaga

SEQ ID NO: 716285 - RNA, 19 nt, Artificial Sequence
  Description of Artificial Sequence: Synthetic oligonucleotide
ucacucagcuguaaaucca

SEQ ID NO: 716286 - RNA, 19 nt, Artificial Sequence
  Description of Artificial Sequence: Synthetic oligonucleotide
uuaucuguuguugcaugag

SEQ ID NO: 716287 - RNA, 19 nt, Artificial Sequence
  Description of Artificial Sequence: Synthetic oligonucleotide
aagagccugagagcucucc

SEQ ID NO: 716288 - RNA, 19 nt, Artificial Sequence
  Description of Artificial Sequence: Synthetic oligonucleotide
uucuuguugggcccuuugc

SEQ ID NO: 716289 - RNA, 19 nt, Artificial Sequence
  Description of Artificial Sequence: Synthetic oligonucleotide
ccagguaacugacugaagg

SEQ ID NO: 716290 - RNA, 19 nt, Artificial Sequence
  Description of Artificial Sequence: Synthetic oligonucleotide
gaaagcuuggucaagggua

SEQ ID NO: 716291 - RNA, 19 nt, Artificial Sequence
  Description of Artificial Sequence: Synthetic oligonucleotide
cuucaguaaagcaucauua

SEQ ID NO: 716292 - RNA, 19 nt, Artificial Sequence
  Description of Artificial Sequence: Synthetic oligonucleotide
cacgucuucacugucacac

SEQ ID NO: 716293 - RNA, 19 nt, Artificial Sequence
  Description of Artificial Sequence: Synthetic oligonucleotide
uccacccauaauuugaauu

SEQ ID NO: 716294 - RNA, 19 nt, Artificial Sequence
  Description of Artificial Sequence: Synthetic oligonucleotide
guggacgcaguacagacac

SEQ ID NO: 716295 - RNA, 19 nt, Artificial Sequence
  Description of Artificial Sequence: Synthetic oligonucleotide
ugauccaaaggaaggcagu

SEQ ID NO: 716296 - RNA, 19 nt, Artificial Sequence
  Description of Artificial Sequence: Synthetic oligonucleotide
aaacauucucacaugccga

SEQ ID NO: 716297 - RNA, 19 nt, Artificial Sequence
  Description of Artificial Sequence: Synthetic oligonucleotide
uguuuagugcgcugaucag

SEQ ID NO: 716298 - RNA, 19 nt, Artificial Sequence
  Description of Artificial Sequence: Synthetic oligonucleotide
uuguacuggguuccugaag

SEQ ID NO: 716299 - RNA, 19 nt, Artificial Sequence
  Description of Artificial Sequence: Synthetic oligonucleotide
agcaagcuaacuauuuguc

SEQ ID NO: 716300 - RNA, 19 nt, Artificial Sequence
  Description of Artificial Sequence: Synthetic oligonucleotide
uuucuaaguacggagccaa

SEQ ID NO: 716301 - RNA, 19 nt, Artificial Sequence
  Description of Artificial Sequence: Synthetic oligonucleotide
uuggucaaggguacuauuu

SEQ ID NO: 716302 - RNA, 19 nt, Artificial Sequence
  Description of Artificial Sequence: Synthetic oligonucleotide
uugccuaagaagucuucug

SEQ ID NO: 716303 - RNA, 19 nt, Artificial Sequence
  Description of Artificial Sequence: Synthetic oligonucleotide
ugccaggcaacaaggagcu

SEQ ID NO: 716304 - RNA, 19 nt, Artificial Sequence
  Description of Artificial Sequence: Synthetic oligonucleotide
agacucuuaaauugcuggu

SEQ ID NO: 716305 - RNA, 19 nt, Artificial Sequence
  Description of Artificial Sequence: Synthetic oligonucleotide
ugcaacaggaugugucgcc

SEQ ID NO: 716306 - RNA, 19 nt, Artificial Sequence
  Description of Artificial Sequence: Synthetic oligonucleotide
ugcucuuuccguaccacuc

SEQ ID NO: 716307 - RNA, 19 nt, Artificial Sequence
  Description of Artificial Sequence: Synthetic oligonucleotide
aaccugucccuugagauau

SEQ ID NO: 716308 - RNA, 19 nt, Artificial Sequence
  Description of Artificial Sequence: Synthetic oligonucleotide
uguuucugauuuacaggcu

SEQ ID NO: 716309 - RNA, 19 nt, Artificial Sequence
  Description of Artificial Sequence: Synthetic oligonucleotide
ucuggcagacucuuaaauu

SEQ ID NO: 716310 - RNA, 19 nt, Artificial Sequence
  Description of Artificial Sequence: Synthetic oligonucleotide
accaaaaccacuggaccuc

SEQ ID NO: 716311 - RNA, 19 nt, Artificial Sequence
  Description of Artificial Sequence: Synthetic oligonucleotide
uugucucggagucauuagu

SEQ ID NO: 716312 - RNA, 19 nt, Artificial Sequence
  Description of Artificial Sequence: Synthetic oligonucleotide
cuguuguugcaugagcucc

SEQ ID NO: 716313 - RNA, 19 nt, Artificial Sequence
  Description of Artificial Sequence: Synthetic oligonucleotide
ugaagcgaccagaauuuuc

SEQ ID NO: 716314 - RNA, 19 nt, Artificial Sequence
  Description of Artificial Sequence: Synthetic oligonucleotide
ugucacucagcuguaaauc

SEQ ID NO: 716315 - RNA, 19 nt, Artificial Sequence
  Description of Artificial Sequence: Synthetic oligonucleotide
aagugagggcuucuucgug

SEQ ID NO: 716316 - RNA, 19 nt, Artificial Sequence
  Description of Artificial Sequence: Synthetic oligonucleotide
ugaugcucuuucuuucaca

SEQ ID NO: 716317 - RNA, 19 nt, Artificial Sequence
  Description of Artificial Sequence: Synthetic oligonucleotide
aagagaaauaauagcuaaa

SEQ ID NO: 716318 - RNA, 19 nt, Artificial Sequence
  Description of Artificial Sequence: Synthetic oligonucleotide
aucagguuaucuguuguug

SEQ ID NO: 716319 - RNA, 19 nt, Artificial Sequence
  Description of Artificial Sequence: Synthetic oligonucleotide
gguuaaacugacuuuguaa

SEQ ID NO: 716320 - RNA, 19 nt, Artificial Sequence
  Description of Artificial Sequence: Synthetic oligonucleotide
acauacguaguaaauaauu

SEQ ID NO: 716321 - RNA, 19 nt, Artificial Sequence
  Description of Artificial Sequence: Synthetic oligonucleotide
ucaauccagagugauugcu

SEQ ID NO: 716322 - RNA, 19 nt, Artificial Sequence
  Description of Artificial Sequence: Synthetic oligonucleotide
ugaauuguucacagcuuua

SEQ ID NO: 716323 - RNA, 19 nt, Artificial Sequence
  Description of Artificial Sequence: Synthetic oligonucleotide
aucuuaucacaguuuaaua

SEQ ID NO: 716324 - RNA, 19 nt, Artificial Sequence
  Description of Artificial Sequence: Synthetic oligonucleotide
uccaagguuggcauguauu

SEQ ID NO: 716325 - RNA, 19 nt, Artificial Sequence
  Description of Artificial Sequence: Synthetic oligonucleotide
uucaauccagagugauugc

SEQ ID NO: 716326 - RNA, 19 nt, Artificial Sequence
  Description of Artificial Sequence: Synthetic oligonucleotide
agagcaaguuguuggggcu

SEQ ID NO: 716327 - RNA, 19 nt, Artificial Sequence
  Description of Artificial Sequence: Synthetic oligonucleotide
ugucucggagucauuaguu

SEQ ID NO: 716328 - RNA, 19 nt, Artificial Sequence
  Description of Artificial Sequence: Synthetic oligonucleotide
ucggagucauuaguuaggc

SEQ ID NO: 716329 - RNA, 19 nt, Artificial Sequence
  Description of Artificial Sequence: Synthetic oligonucleotide
auuuaaccugucccuugag

SEQ ID NO: 716330 - RNA, 19 nt, Artificial Sequence
  Description of Artificial Sequence: Synthetic oligonucleotide
aaugccgcuugguaacaaa

SEQ ID NO: 716331 - RNA, 19 nt, Artificial Sequence
  Description of Artificial Sequence: Synthetic oligonucleotide
uugcacauacguaguaaau

SEQ ID NO: 716332 - RNA, 19 nt, Artificial Sequence
  Description of Artificial Sequence: Synthetic oligonucleotide
agagauuccaaagccuugu

SEQ ID NO: 716333 - RNA, 19 nt, Artificial Sequence
  Description of Artificial Sequence: Synthetic oligonucleotide
ucgccgaaaguuacuguca

SEQ ID NO: 716334 - RNA, 19 nt, Artificial Sequence
  Description of Artificial Sequence: Synthetic oligonucleotide
gaauucguccacagaaaac

SEQ ID NO: 716335 - RNA, 19 nt, Artificial Sequence
  Description of Artificial Sequence: Synthetic oligonucleotide
uguggacgcaguacagaca

SEQ ID NO: 716336 - RNA, 19 nt, Artificial Sequence
  Description of Artificial Sequence: Synthetic oligonucleotide
uaucuguuccccuguuaca

SEQ ID NO: 716337 - RNA, 19 nt, Artificial Sequence
  Description of Artificial Sequence: Synthetic oligonucleotide
ucuucgugcuaagagccug

SEQ ID NO: 716338 - RNA, 19 nt, Artificial Sequence
  Description of Artificial Sequence: Synthetic oligonucleotide
guuacagguuuaucucgcc

SEQ ID NO: 716339 - RNA, 19 nt, Artificial Sequence
  Description of Artificial Sequence: Synthetic oligonucleotide
cacugucacacucaaucug

SEQ ID NO: 716340 - RNA, 19 nt, Artificial Sequence
  Description of Artificial Sequence: Synthetic oligonucleotide
aaaacagcuaacacuucuu

SEQ ID NO: 716341 - RNA, 19 nt, Artificial Sequence
  Description of Artificial Sequence: Synthetic oligonucleotide
ccacccauaauuugaauug

SEQ ID NO: 716342 - RNA, 19 nt, Artificial Sequence
  Description of Artificial Sequence: Synthetic oligonucleotide
uggaauagagcaaguuguu

SEQ ID NO: 716343 - RNA, 19 nt, Artificial Sequence
  Description of Artificial Sequence: Synthetic oligonucleotide
ggcuucuucgugcuaagag

SEQ ID NO: 716344 - RNA, 19 nt, Artificial Sequence
  Description of Artificial Sequence: Synthetic oligonucleotide
ucuuuccguaccacucuug

SEQ ID NO: 716345 - RNA, 19 nt, Artificial Sequence
  Description of Artificial Sequence: Synthetic oligonucleotide
gcuaaaacauucucacaug

SEQ ID NO: 716346 - RNA, 19 nt, Artificial Sequence
  Description of Artificial Sequence: Synthetic oligonucleotide
gucgccgaaaguuacuguc

SEQ ID NO: 716347 - RNA, 19 nt, Artificial Sequence
  Description of Artificial Sequence: Synthetic oligonucleotide
aguaauccugaagcgacca

SEQ ID NO: 716348 - RNA, 19 nt, Artificial Sequence
  Description of Artificial Sequence: Synthetic oligonucleotide
gccuaagaagucuucuggg

SEQ ID NO: 716349 - RNA, 19 nt, Artificial Sequence
  Description of Artificial Sequence: Synthetic oligonucleotide
guguggacgcaguacagac

SEQ ID NO: 716350 - RNA, 19 nt, Artificial Sequence
  Description of Artificial Sequence: Synthetic oligonucleotide
ugaauuuaaccugucccuu

SEQ ID NO: 716351 - RNA, 19 nt, Artificial Sequence
  Description of Artificial Sequence: Synthetic oligonucleotide
agcuaacacuucuucagaa

SEQ ID NO: 716352 - RNA, 19 nt, Artificial Sequence
  Description of Artificial Sequence: Synthetic oligonucleotide
ucauugcacauacguagua

SEQ ID NO: 716353 - RNA, 19 nt, Artificial Sequence
  Description of Artificial Sequence: Synthetic oligonucleotide
aacaggaugugucgccgaa

SEQ ID NO: 716354 - RNA, 19 nt, Artificial Sequence
  Description of Artificial Sequence: Synthetic oligonucleotide
ucuucaauccagagugauu

SEQ ID NO: 716355 - RNA, 19 nt, Artificial Sequence
  Description of Artificial Sequence: Synthetic oligonucleotide
agggucugcuuguucaaug

SEQ ID NO: 716356 - RNA, 19 nt, Artificial Sequence
  Description of Artificial Sequence: Synthetic oligonucleotide
aaacauaguuugaacuuuu

SEQ ID NO: 716357 - RNA, 19 nt, Artificial Sequence
  Description of Artificial Sequence: Synthetic oligonucleotide
gugauugcucaucaguuaa

SEQ ID NO: 716358 - RNA, 19 nt, Artificial Sequence
  Description of Artificial Sequence: Synthetic oligonucleotide
ugugucgccgaaaguuacu

SEQ ID NO: 716359 - RNA, 19 nt, Artificial Sequence
  Description of Artificial Sequence: Synthetic oligonucleotide
uuaucucgccgaacaucag

SEQ ID NO: 716360 - RNA, 19 nt, Artificial Sequence
  Description of Artificial Sequence: Synthetic oligonucleotide
auuucuaaguacggagcca

SEQ ID NO: 716361 - RNA, 19 nt, Artificial Sequence
  Description of Artificial Sequence: Synthetic oligonucleotide
ucuaucuguuccccuguua

SEQ ID NO: 716362 - RNA, 19 nt, Artificial Sequence
  Description of Artificial Sequence: Synthetic oligonucleotide
guuuaucucgccgaacauc

SEQ ID NO: 716363 - RNA, 19 nt, Artificial Sequence
  Description of Artificial Sequence: Synthetic oligonucleotide
gauuuacaggcuuccauau

SEQ ID NO: 716364 - RNA, 19 nt, Artificial Sequence
  Description of Artificial Sequence: Synthetic oligonucleotide
aacugacuuuguaaguuaa

SEQ ID NO: 716365 - RNA, 19 nt, Artificial Sequence
  Description of Artificial Sequence: Synthetic oligonucleotide
agcgaccagaauuuucuau

SEQ ID NO: 716366 - RNA, 19 nt, Artificial Sequence
  Description of Artificial Sequence: Synthetic oligonucleotide
agaauacuugagaaaaguu

SEQ ID NO: 716367 - RNA, 19 nt, Artificial Sequence
  Description of Artificial Sequence: Synthetic oligonucleotide
uagacugauuuuguaguau

SEQ ID NO: 716368 - RNA, 19 nt, Artificial Sequence
  Description of Artificial Sequence: Synthetic oligonucleotide
acaaaacuugggcagccuu

SEQ ID NO: 716369 - RNA, 19 nt, Artificial Sequence
  Description of Artificial Sequence: Synthetic oligonucleotide
uggcuugauauuucuguua

SEQ ID NO: 716370 - RNA, 19 nt, Artificial Sequence
  Description of Artificial Sequence: Synthetic oligonucleotide
cagagauuccaaagccuug

SEQ ID NO: 716371 - RNA, 19 nt, Artificial Sequence
  Description of Artificial Sequence: Synthetic oligonucleotide
ccuguuacagguuuaucuc

SEQ ID NO: 716372 - RNA, 19 nt, Artificial Sequence
  Description of Artificial Sequence: Synthetic oligonucleotide
uuuucacucccagguaacu

SEQ ID NO: 716373 - RNA, 19 nt, Artificial Sequence
  Description of Artificial Sequence: Synthetic oligonucleotide
guaauccugaagcgaccag

SEQ ID NO: 716374 - RNA, 19 nt, Artificial Sequence
  Description of Artificial Sequence: Synthetic oligonucleotide
agcuaacuauuugucucgg

SEQ ID NO: 716375 - RNA, 19 nt, Artificial Sequence
  Description of Artificial Sequence: Synthetic oligonucleotide
gcacauacguaguaaauaa

SEQ ID NO: 716376 - RNA, 19 nt, Artificial Sequence
  Description of Artificial Sequence: Synthetic oligonucleotide
aucaauuggaauagagcaa

SEQ ID NO: 716377 - RNA, 19 nt, Artificial Sequence
  Description of Artificial Sequence: Synthetic oligonucleotide
ucccagguaacugacugaa

SEQ ID NO: 716378 - RNA, 19 nt, Artificial Sequence
  Description of Artificial Sequence: Synthetic oligonucleotide
gucacacucaaucugccua

SEQ ID NO: 716379 - RNA, 19 nt, Artificial Sequence
  Description of Artificial Sequence: Synthetic oligonucleotide
augccgaaugauuuauaau

SEQ ID NO: 716380 - RNA, 19 nt, Artificial Sequence
  Description of Artificial Sequence: Synthetic oligonucleotide
ggucacuuaauccagacuu

SEQ ID NO: 716381 - RNA, 19 nt, Artificial Sequence
  Description of Artificial Sequence: Synthetic oligonucleotide
gacuuguuuagugcgcuga

SEQ ID NO: 716382 - RNA, 19 nt, Artificial Sequence
  Description of Artificial Sequence: Synthetic oligonucleotide
uucuucgugcuaagagccu

SEQ ID NO: 716383 - RNA, 19 nt, Artificial Sequence
  Description of Artificial Sequence: Synthetic oligonucleotide
acugucacucagcuguaaa

SEQ ID NO: 716384 - RNA, 19 nt, Artificial Sequence
  Description of Artificial Sequence: Synthetic oligonucleotide
acucuaucuguuccccugu

SEQ ID NO: 716385 - RNA, 19 nt, Artificial Sequence
  Description of Artificial Sequence: Synthetic oligonucleotide
agguuaaacugacuuugua

SEQ ID NO: 716386 - RNA, 19 nt, Artificial Sequence
  Description of Artificial Sequence: Synthetic oligonucleotide
uaacucuaucuguuccccu

SEQ ID NO: 716387 - RNA, 19 nt, Artificial Sequence
  Description of Artificial Sequence: Synthetic oligonucleotide
aggucacuuaauccagacu

SEQ ID NO: 716388 - RNA, 19 nt, Artificial Sequence
  Description of Artificial Sequence: Synthetic oligonucleotide
augugucgccgaaaguuac

SEQ ID NO: 716389 - RNA, 19 nt, Artificial Sequence
  Description of Artificial Sequence: Synthetic oligonucleotide
agaguugaauucguccaca

SEQ ID NO: 716390 - RNA, 19 nt, Artificial Sequence
  Description of Artificial Sequence: Synthetic oligonucleotide
cuuugccuaagaagucuuc

SEQ ID NO: 716391 - RNA, 19 nt, Artificial Sequence
  Description of Artificial Sequence: Synthetic oligonucleotide
uccauauuaucaggacaga

SEQ ID NO: 716392 - RNA, 19 nt, Artificial Sequence
  Description of Artificial Sequence: Synthetic oligonucleotide
uaacugacugaaggcauuc

SEQ ID NO: 716393 - RNA, 19 nt, Artificial Sequence
  Description of Artificial Sequence: Synthetic oligonucleotide
cauacguaguaaauaauuu

SEQ ID NO: 716394 - RNA, 19 nt, Artificial Sequence
  Description of Artificial Sequence: Synthetic oligonucleotide
guuccugaaguaauccuga

SEQ ID NO: 716395 - RNA, 19 nt, Artificial Sequence
  Description of Artificial Sequence: Synthetic oligonucleotide
acuuguuuagugcgcugau

SEQ ID NO: 716396 - RNA, 19 nt, Artificial Sequence
  Description of Artificial Sequence: Synthetic oligonucleotide
ugcgcugaucagguuaucu

SEQ ID NO: 716397 - RNA, 19 nt, Artificial Sequence
  Description of Artificial Sequence: Synthetic oligonucleotide
ggaauagagcaaguuguug

SEQ ID NO: 716398 - RNA, 19 nt, Artificial Sequence
  Description of Artificial Sequence: Synthetic oligonucleotide
gggcccuuugccuaagaag

SEQ ID NO: 716399 - RNA, 19 nt, Artificial Sequence
  Description of Artificial Sequence: Synthetic oligonucleotide
ccaagguuggcauguauuc

SEQ ID NO: 716400 - RNA, 19 nt, Artificial Sequence
  Description of Artificial Sequence: Synthetic oligonucleotide
ggaccucuuaucaaaugcc

SEQ ID NO: 716401 - RNA, 19 nt, Artificial Sequence
  Description of Artificial Sequence: Synthetic oligonucleotide
agacuuguuuagugcgcug

SEQ ID NO: 716402 - RNA, 19 nt, Artificial Sequence
  Description of Artificial Sequence: Synthetic oligonucleotide
ccaaagccuuguuagcucc

SEQ ID NO: 716403 - RNA, 19 nt, Artificial Sequence
  Description of Artificial Sequence: Synthetic oligonucleotide
caguuaaaacauaguuuga

SEQ ID NO: 716404 - RNA, 19 nt, Artificial Sequence
  Description of Artificial Sequence: Synthetic oligonucleotide
aacugacugaaggcauuca

SEQ ID NO: 716405 - RNA, 19 nt, Artificial Sequence
  Description of Artificial Sequence: Synthetic oligonucleotide
ucucgccgaacaucagggc

SEQ ID NO: 716406 - RNA, 19 nt, Artificial Sequence
  Description of Artificial Sequence: Synthetic oligonucleotide
gugaauauugugucacacu

SEQ ID NO: 716407 - RNA, 19 nt, Artificial Sequence
  Description of Artificial Sequence: Synthetic oligonucleotide
uacuggguuccugaaguaa

SEQ ID NO: 716408 - RNA, 19 nt, Artificial Sequence
  Description of Artificial Sequence: Synthetic oligonucleotide
guagacugauuuuguagua

SEQ ID NO: 716409 - RNA, 19 nt, Artificial Sequence
  Description of Artificial Sequence: Synthetic oligonucleotide
gaagugagggcuucuucgu

SEQ ID NO: 716410 - RNA, 19 nt, Artificial Sequence
  Description of Artificial Sequence: Synthetic oligonucleotide
ugucgccgaaaguuacugu

SEQ ID NO: 716411 - RNA, 19 nt, Artificial Sequence
  Description of Artificial Sequence: Synthetic oligonucleotide
uucuaaguacggagccaaa

SEQ ID NO: 716412 - RNA, 19 nt, Artificial Sequence
  Description of Artificial Sequence: Synthetic oligonucleotide
ucgugcuaagagccugaga

SEQ ID NO: 716413 - RNA, 19 nt, Artificial Sequence
  Description of Artificial Sequence: Synthetic oligonucleotide
ccgaaaguuacugucacuc

SEQ ID NO: 716414 - RNA, 19 nt, Artificial Sequence
  Description of Artificial Sequence: Synthetic oligonucleotide
gaugugucgccgaaaguua

SEQ ID NO: 716415 - RNA, 19 nt, Artificial Sequence
  Description of Artificial Sequence: Synthetic oligonucleotide
uucgugcuaagagccugag

SEQ ID NO: 716416 - RNA, 19 nt, Artificial Sequence
  Description of Artificial Sequence: Synthetic oligonucleotide
cuuguuuagugcgcugauc

SEQ ID NO: 716417 - RNA, 19 nt, Artificial Sequence
  Description of Artificial Sequence: Synthetic oligonucleotide
agccuuguuagcuccucau

SEQ ID NO: 716418 - RNA, 19 nt, Artificial Sequence
  Description of Artificial Sequence: Synthetic oligonucleotide
agaaagcaagcuaacuauu

SEQ ID NO: 716419 - RNA, 19 nt, Artificial Sequence
  Description of Artificial Sequence: Synthetic oligonucleotide
cacuggaccucuuaucaaa

SEQ ID NO: 716420 - RNA, 19 nt, Artificial Sequence
  Description of Artificial Sequence: Synthetic oligonucleotide
ccgaaugauuuauaauuuc

SEQ ID NO: 716421 - RNA, 19 nt, Artificial Sequence
  Description of Artificial Sequence: Synthetic oligonucleotide
cagaacaccucugaaagcu

SEQ ID NO: 716422 - RNA, 19 nt, Artificial Sequence
  Description of Artificial Sequence: Synthetic oligonucleotide
gaauuguucacagcuuuau

SEQ ID NO: 716423 - RNA, 19 nt, Artificial Sequence
  Description of Artificial Sequence: Synthetic oligonucleotide
auauaugcucuaccaucuu

SEQ ID NO: 716424 - RNA, 19 nt, Artificial Sequence
  Description of Artificial Sequence: Synthetic oligonucleotide
ugaucuugccaggcaacaa

SEQ ID NO: 716425 - RNA, 19 nt, Artificial Sequence
  Description of Artificial Sequence: Synthetic oligonucleotide
gugucgccgaaaguuacug

SEQ ID NO: 716426 - RNA, 19 nt, Artificial Sequence
  Description of Artificial Sequence: Synthetic oligonucleotide
uccuggaggcuugaguauc

SEQ ID NO: 716427 - RNA, 19 nt, Artificial Sequence
  Description of Artificial Sequence: Synthetic oligonucleotide
cuaaguacggagccaaaau

SEQ ID NO: 716428 - RNA, 19 nt, Artificial Sequence
  Description of Artificial Sequence: Synthetic oligonucleotide
uguugggcccuuugccuaa

SEQ ID NO: 716429 - RNA, 19 nt, Artificial Sequence
  Description of Artificial Sequence: Synthetic oligonucleotide
ggugguaguuccuuggcua

SEQ ID NO: 716430 - RNA, 19 nt, Artificial Sequence
  Description of Artificial Sequence: Synthetic oligonucleotide
cagacacuuucaguuacuc

SEQ ID NO: 716431 - RNA, 19 nt, Artificial Sequence
  Description of Artificial Sequence: Synthetic oligonucleotide
gacugauuuuguaguaucu

SEQ ID NO: 716432 - RNA, 19 nt, Artificial Sequence
  Description of Artificial Sequence: Synthetic oligonucleotide
cugcaacaggaugugucgc

SEQ ID NO: 716433 - RNA, 19 nt, Artificial Sequence
  Description of Artificial Sequence: Synthetic oligonucleotide
uggcauguauucucuuguu

SEQ ID NO: 716434 - RNA, 19 nt, Artificial Sequence
  Description of Artificial Sequence: Synthetic oligonucleotide
ccagacuuguuuagugcgc

SEQ ID NO: 716435 - RNA, 19 nt, Artificial Sequence
  Description of Artificial Sequence: Synthetic oligonucleotide
cauuuguauugaaaacagu

SEQ ID NO: 716436 - RNA, 19 nt, Artificial Sequence
  Description of Artificial Sequence: Synthetic oligonucleotide
ccuuggcuagcuuuauuac

SEQ ID NO: 716437 - RNA, 19 nt, Artificial Sequence
  Description of Artificial Sequence: Synthetic oligonucleotide
aguacggagccaaaaucuu

SEQ ID NO: 716438 - RNA, 19 nt, Artificial Sequence
  Description of Artificial Sequence: Synthetic oligonucleotide
guacggagccaaaaucuuc

SEQ ID NO: 716439 - RNA, 19 nt, Artificial Sequence
  Description of Artificial Sequence: Synthetic oligonucleotide
gcgcugaucagguuaucug

SEQ ID NO: 716440 - RNA, 19 nt, Artificial Sequence
  Description of Artificial Sequence: Synthetic oligonucleotide
cauugcacauacguaguaa

SEQ ID NO: 716441 - RNA, 19 nt, Artificial Sequence
  Description of Artificial Sequence: Synthetic oligonucleotide
gaggcuugaguaucaucua

SEQ ID NO: 716442 - RNA, 19 nt, Artificial Sequence
  Description of Artificial Sequence: Synthetic oligonucleotide
aaaugccgcuugguaacaa

SEQ ID NO: 716443 - RNA, 19 nt, Artificial Sequence
  Description of Artificial Sequence: Synthetic oligonucleotide
cagcuaacacuucuucaga

SEQ ID NO: 716444 - RNA, 19 nt, Artificial Sequence
  Description of Artificial Sequence: Synthetic oligonucleotide
ggcuagcuuuauuaccaug

SEQ ID NO: 716445 - RNA, 19 nt, Artificial Sequence
  Description of Artificial Sequence: Synthetic oligonucleotide
agaccugauuucucagaua

SEQ ID NO: 716446 - RNA, 19 nt, Artificial Sequence
  Description of Artificial Sequence: Synthetic oligonucleotide
ggcauucaacaauggcuug

SEQ ID NO: 716447 - RNA, 19 nt, Artificial Sequence
  Description of Artificial Sequence: Synthetic oligonucleotide
agguuguaaucaauuggaa

SEQ ID NO: 716448 - RNA, 19 nt, Artificial Sequence
  Description of Artificial Sequence: Synthetic oligonucleotide
ucacgucuucacugucaca

SEQ ID NO: 716449 - RNA, 19 nt, Artificial Sequence
  Description of Artificial Sequence: Synthetic oligonucleotide
gucucggagucauuaguua

SEQ ID NO: 716450 - RNA, 19 nt, Artificial Sequence
  Description of Artificial Sequence: Synthetic oligonucleotide
cuuuccguaccacucuugu

SEQ ID NO: 716451 - RNA, 19 nt, Artificial Sequence
  Description of Artificial Sequence: Synthetic oligonucleotide
agugcgcugaucagguuau

SEQ ID NO: 716452 - RNA, 19 nt, Artificial Sequence
  Description of Artificial Sequence: Synthetic oligonucleotide
cuaagagccugagagcucu

SEQ ID NO: 716453 - RNA, 19 nt, Artificial Sequence
  Description of Artificial Sequence: Synthetic oligonucleotide
cugauuuacaggcuuccau

SEQ ID NO: 716454 - RNA, 19 nt, Artificial Sequence
  Description of Artificial Sequence: Synthetic oligonucleotide
gaucagguuaucuguuguu

SEQ ID NO: 716455 - RNA, 19 nt, Artificial Sequence
  Description of Artificial Sequence: Synthetic oligonucleotide
agguuggcauguauucucu

SEQ ID NO: 716456 - RNA, 19 nt, Artificial Sequence
  Description of Artificial Sequence: Synthetic oligonucleotide
gcgaccagaauuuucuaua

SEQ ID NO: 716457 - RNA, 19 nt, Artificial Sequence
  Description of Artificial Sequence: Synthetic oligonucleotide
uccuucaguaaagcaucau

SEQ ID NO: 716458 - RNA, 19 nt, Artificial Sequence
  Description of Artificial Sequence: Synthetic oligonucleotide
gcaagcuaacuauuugucu

SEQ ID NO: 716459 - RNA, 19 nt, Artificial Sequence
  Description of Artificial Sequence: Synthetic oligonucleotide
ggcccuuugccuaagaagu

SEQ ID NO: 716460 - RNA, 19 nt, Artificial Sequence
  Description of Artificial Sequence: Synthetic oligonucleotide
uggacgcaguacagacacu

SEQ ID NO: 716461 - RNA, 19 nt, Artificial Sequence
  Description of Artificial Sequence: Synthetic oligonucleotide
uucugacccagggugcuuu

SEQ ID NO: 716462 - RNA, 19 nt, Artificial Sequence
  Description of Artificial Sequence: Synthetic oligonucleotide
uuccccuguuacagguuua

SEQ ID NO: 716463 - RNA, 19 nt, Artificial Sequence
  Description of Artificial Sequence: Synthetic oligonucleotide
uaagagccugagagcucuc

SEQ ID NO: 716464 - RNA, 19 nt, Artificial Sequence
  Description of Artificial Sequence: Synthetic oligonucleotide
agauagcaguugguagacu

SEQ ID NO: 716465 - RNA, 19 nt, Artificial Sequence
  Description of Artificial Sequence: Synthetic oligonucleotide
cccuguuacagguuuaucu

SEQ ID NO: 716466 - RNA, 19 nt, Artificial Sequence
  Description of Artificial Sequence: Synthetic oligonucleotide
cucgccgaacaucagggcu

SEQ ID NO: 716467 - RNA, 19 nt, Artificial Sequence
  Description of Artificial Sequence: Synthetic oligonucleotide
cagguuuaucucgccgaac

SEQ ID NO: 716468 - RNA, 19 nt, Artificial Sequence
  Description of Artificial Sequence: Synthetic oligonucleotide
cacauacguaguaaauaau

SEQ ID NO: 716469 - RNA, 19 nt, Artificial Sequence
  Description of Artificial Sequence: Synthetic oligonucleotide
acauucucacaugccgaau

SEQ ID NO: 716470 - RNA, 19 nt, Artificial Sequence
  Description of Artificial Sequence: Synthetic oligonucleotide
cucccagguaacugacuga

SEQ ID NO: 716471 - RNA, 19 nt, Artificial Sequence
  Description of Artificial Sequence: Synthetic oligonucleotide
caugcuucugacccagggu

SEQ ID NO: 716472 - RNA, 19 nt, Artificial Sequence
  Description of Artificial Sequence: Synthetic oligonucleotide
cagcagaauagaauguauu

SEQ ID NO: 716473 - RNA, 19 nt, Artificial Sequence
  Description of Artificial Sequence: Synthetic oligonucleotide
uuagugcgcugaucagguu

SEQ ID NO: 716474 - RNA, 19 nt, Artificial Sequence
  Description of Artificial Sequence: Synthetic oligonucleotide
ggaugugucgccgaaaguu

SEQ ID NO: 716475 - RNA, 19 nt, Artificial Sequence
  Description of Artificial Sequence: Synthetic oligonucleotide
ccaacagcacaaauggugu

SEQ ID NO: 716476 - RNA, 19 nt, Artificial Sequence
  Description of Artificial Sequence: Synthetic oligonucleotide
caauuggaauagagcaagu

SEQ ID NO: 716477 - RNA, 19 nt, Artificial Sequence
  Description of Artificial Sequence: Synthetic oligonucleotide
gcuaacuauuugucucgga

SEQ ID NO: 716478 - RNA, 19 nt, Artificial Sequence
  Description of Artificial Sequence: Synthetic oligonucleotide
caaaugguguggacgcagu

SEQ ID NO: 716479 - RNA, 19 nt, Artificial Sequence
  Description of Artificial Sequence: Synthetic oligonucleotide
gguugguuggcuggaagaa

SEQ ID NO: 716480 - RNA, 19 nt, Artificial Sequence
  Description of Artificial Sequence: Synthetic oligonucleotide
cagguuaaacugacuuugu

SEQ ID NO: 716481 - RNA, 19 nt, Artificial Sequence
  Description of Artificial Sequence: Synthetic oligonucleotide
ggggcugcucuuuccguac

SEQ ID NO: 716482 - RNA, 19 nt, Artificial Sequence
  Description of Artificial Sequence: Synthetic oligonucleotide
cuagcuuuauuaccauguu

SEQ ID NO: 716483 - RNA, 19 nt, Artificial Sequence
  Description of Artificial Sequence: Synthetic oligonucleotide
agaacaccucugaaagcuu

SEQ ID NO: 716484 - RNA, 19 nt, Artificial Sequence
  Description of Artificial Sequence: Synthetic oligonucleotide
gguguggacgcaguacaga

SEQ ID NO: 716485 - RNA, 19 nt, Artificial Sequence
  Description of Artificial Sequence: Synthetic oligonucleotide
gcuaacacuucuucagaau

SEQ ID NO: 716486 - RNA, 19 nt, Artificial Sequence
  Description of Artificial Sequence: Synthetic oligonucleotide
cgcaguacagacacuuuca

SEQ ID NO: 716487 - RNA, 19 nt, Artificial Sequence
  Description of Artificial Sequence: Synthetic oligonucleotide
gcuugguaacaaaaucuua

SEQ ID NO: 716488 - RNA, 19 nt, Artificial Sequence
  Description of Artificial Sequence: Synthetic oligonucleotide
cagacuuguuuagugcgcu

SEQ ID NO: 716489 - RNA, 19 nt, Artificial Sequence
  Description of Artificial Sequence: Synthetic oligonucleotide
gccagcagaauagaaugua

SEQ ID NO: 716490 - RNA, 19 nt, Artificial Sequence
  Description of Artificial Sequence: Synthetic oligonucleotide
guuaggcuuucagcaaggu

SEQ ID NO: 716491 - RNA, 19 nt, Artificial Sequence
  Description of Artificial Sequence: Synthetic oligonucleotide
cugcucuuuccguaccacu

SEQ ID NO: 716492 - RNA, 19 nt, Artificial Sequence
  Description of Artificial Sequence: Synthetic oligonucleotide
ccugaagcgaccagaauuu

SEQ ID NO: 716493 - RNA, 19 nt, Artificial Sequence
  Description of Artificial Sequence: Synthetic oligonucleotide
acaugccgaaugauuuaua

SEQ ID NO: 716494 - RNA, 19 nt, Artificial Sequence
  Description of Artificial Sequence: Synthetic oligonucleotide
cgaaaguuacugucacuca

SEQ ID NO: 716495 - RNA, 19 nt, Artificial Sequence
  Description of Artificial Sequence: Synthetic oligonucleotide
cacaugccgaaugauuuau

SEQ ID NO: 716496 - RNA, 19 nt, Artificial Sequence
  Description of Artificial Sequence: Synthetic oligonucleotide
cgccgaaaguuacugucac

SEQ ID NO: 716497 - RNA, 19 nt, Artificial Sequence
  Description of Artificial Sequence: Synthetic oligonucleotide
gguuuaucucgccgaacau

SEQ ID NO: 716498 - RNA, 19 nt, Artificial Sequence
  Description of Artificial Sequence: Synthetic oligonucleotide
cuuggugucugaugcucuu

SEQ ID NO: 716499 - RNA, 19 nt, Artificial Sequence
  Description of Artificial Sequence: Synthetic oligonucleotide
gcugcucuuuccguaccac

SEQ ID NO: 716500 - RNA, 19 nt, Artificial Sequence
  Description of Artificial Sequence: Synthetic oligonucleotide
cucuuaucaaaugccgcuu

SEQ ID NO: 716501 - RNA, 19 nt, Artificial Sequence
  Description of Artificial Sequence: Synthetic oligonucleotide
gccgaaugauuuauaauuu

SEQ ID NO: 716502 - RNA, 19 nt, Artificial Sequence
  Description of Artificial Sequence: Synthetic oligonucleotide
gcuaagagccugagagcuc

SEQ ID NO: 716503 - RNA, 19 nt, Artificial Sequence
  Description of Artificial Sequence: Synthetic oligonucleotide
ggacgcaguacagacacuu

SEQ ID NO: 716504 - RNA, 19 nt, Artificial Sequence
  Description of Artificial Sequence: Synthetic oligonucleotide
ccguaccacucuugugggc

SEQ ID NO: 716505 - RNA, 19 nt, Artificial Sequence
  Description of Artificial Sequence: Synthetic oligonucleotide
ggcuugaguaucaucuaau

SEQ ID NO: 716506 - RNA, 19 nt, Artificial Sequence
  Description of Artificial Sequence: Synthetic oligonucleotide
cccuugagauauugaaaua

SEQ ID NO: 716507 - RNA, 19 nt, Artificial Sequence
  Description of Artificial Sequence: Synthetic oligonucleotide
cucuaccaucuuugaaaau

SEQ ID NO: 716508 - RNA, 19 nt, Artificial Sequence
  Description of Artificial Sequence: Synthetic oligonucleotide
ccaaguuuguuggcaaaua

SEQ ID NO: 716509 - RNA, 19 nt, Artificial Sequence
  Description of Artificial Sequence: Synthetic oligonucleotide
cacaaaacuugggcagccu

SEQ ID NO: 716510 - RNA, 19 nt, Artificial Sequence
  Description of Artificial Sequence: Synthetic oligonucleotide
gcucaucaguuaaaacaua

SEQ ID NO: 716511 - RNA, 19 nt, Artificial Sequence
  Description of Artificial Sequence: Synthetic oligonucleotide
gacgcaguacagacacuuu

SEQ ID NO: 716512 - RNA, 19 nt, Artificial Sequence
  Description of Artificial Sequence: Synthetic oligonucleotide
cucuuuccguaccacucuu

SEQ ID NO: 716513 - RNA, 19 nt, Artificial Sequence
  Description of Artificial Sequence: Synthetic oligonucleotide
gcccuuugccuaagaaguc

SEQ ID NO: 716514 - RNA, 19 nt, Artificial Sequence
  Description of Artificial Sequence: Synthetic oligonucleotide
gccgaaaguuacugucacu

SEQ ID NO: 716515 - RNA, 19 nt, Artificial Sequence
  Description of Artificial Sequence: Synthetic oligonucleotide
ccacuggaccucuuaucaa

SEQ ID NO: 716516 - RNA, 19 nt, Artificial Sequence
  Description of Artificial Sequence: Synthetic oligonucleotide
gcuuuccugcucauuugua

SEQ ID NO: 716517 - RNA, 19 nt, Artificial Sequence
  Description of Artificial Sequence: Synthetic oligonucleotide
guuguugcaugagcuccuu

SEQ ID NO: 716518 - RNA, 19 nt, Artificial Sequence
  Description of Artificial Sequence: Synthetic oligonucleotide
gcugaucagguuaucuguu

SEQ ID NO: 716519 - RNA, 19 nt, Artificial Sequence
  Description of Artificial Sequence: Synthetic oligonucleotide
gcuugauauuucuguuauu

SEQ ID NO: 716520 - RNA, 19 nt, Artificial Sequence
  Description of Artificial Sequence: Synthetic oligonucleotide
ccccaauagcaagagaaau

SEQ ID NO: 716521 - RNA, 19 nt, Artificial Sequence
  Description of Artificial Sequence: Synthetic oligonucleotide
ccuuugccuaagaagucuu

SEQ ID NO: 716522 - RNA, 19 nt, Artificial Sequence
  Description of Artificial Sequence: Synthetic oligonucleotide
gugcgcugaucagguuauc

SEQ ID NO: 716523 - RNA, 19 nt, Artificial Sequence
  Description of Artificial Sequence: Synthetic oligonucleotide
ccccuguuacagguuuauc

SEQ ID NO: 716524 - RNA, 19 nt, Artificial Sequence
  Description of Artificial Sequence: Synthetic oligonucleotide
cacacucaaucugccuaau

SEQ ID NO: 716525 - RNA, 19 nt, Artificial Sequence
  Description of Artificial Sequence: Synthetic oligonucleotide
cuggaggcuugaguaucau

SEQ ID NO: 716526 - RNA, 19 nt, Artificial Sequence
  Description of Artificial Sequence: Synthetic oligonucleotide
acugaaauuaacuagagcu

SEQ ID NO: 716527 - RNA, 19 nt, Artificial Sequence
  Description of Artificial Sequence: Synthetic oligonucleotide
ucacuaacaaggcagaagg

SEQ ID NO: 716528 - RNA, 19 nt, Artificial Sequence
  Description of Artificial Sequence: Synthetic oligonucleotide
aagaucagcucauaggcgg

SEQ ID NO: 716529 - RNA, 19 nt, Artificial Sequence
  Description of Artificial Sequence: Synthetic oligonucleotide
ucaguuaucacacuaacua

SEQ ID NO: 716530 - RNA, 19 nt, Artificial Sequence
  Description of Artificial Sequence: Synthetic oligonucleotide
aacuuucacagauagccuc

SEQ ID NO: 716531 - RNA, 19 nt, Artificial Sequence
  Description of Artificial Sequence: Synthetic oligonucleotide
ugaaauuaacuagagcugg

SEQ ID NO: 716532 - RNA, 19 nt, Artificial Sequence
  Description of Artificial Sequence: Synthetic oligonucleotide
aagacggccacuuuucagg

SEQ ID NO: 716533 - RNA, 19 nt, Artificial Sequence
  Description of Artificial Sequence: Synthetic oligonucleotide
acacacacaacacacugcc

SEQ ID NO: 716534 - RNA, 19 nt, Artificial Sequence
  Description of Artificial Sequence: Synthetic oligonucleotide
aaacacacacaacacacug

SEQ ID NO: 716535 - RNA, 19 nt, Artificial Sequence
  Description of Artificial Sequence: Synthetic oligonucleotide
cacuaacuaaccuagcucg

SEQ ID NO: 716536 - RNA, 19 nt, Artificial Sequence
  Description of Artificial Sequence: Synthetic oligonucleotide
aauggagcuaacuuucucu

SEQ ID NO: 716537 - RNA, 19 nt, Artificial Sequence
  Description of Artificial Sequence: Synthetic oligonucleotide
auagcaaucagcauauaac

SEQ ID NO: 716538 - RNA, 19 nt, Artificial Sequence
  Description of Artificial Sequence: Synthetic oligonucleotide
ucuggaacggaaauggagc

SEQ ID NO: 716539 - RNA, 19 nt, Artificial Sequence
  Description of Artificial Sequence: Synthetic oligonucleotide
cuugucauacaccucaggg

SEQ ID NO: 716540 - RNA, 19 nt, Artificial Sequence
  Description of Artificial Sequence: Synthetic oligonucleotide
ucaaaucgcagcuugacgu

SEQ ID NO: 716541 - RNA, 19 nt, Artificial Sequence
  Description of Artificial Sequence: Synthetic oligonucleotide
ugacccauagacaccaagg

SEQ ID NO: 716542 - RNA, 19 nt, Artificial Sequence
  Description of Artificial Sequence: Synthetic oligonucleotide
auagaaaagguacugaguu

SEQ ID NO: 716543 - RNA, 19 nt, Artificial Sequence
  Description of Artificial Sequence: Synthetic oligonucleotide
agaaaacuuucaugcagcc

SEQ ID NO: 716544 - RNA, 19 nt, Artificial Sequence
  Description of Artificial Sequence: Synthetic oligonucleotide
aaauuaacuagagcugggg

SEQ ID NO: 716545 - RNA, 19 nt, Artificial Sequence
  Description of Artificial Sequence: Synthetic oligonucleotide
cuaacaaggcagaaggacc

SEQ ID NO: 716546 - RNA, 19 nt, Artificial Sequence
  Description of Artificial Sequence: Synthetic oligonucleotide
ugggagucaagaaagaaaa

SEQ ID NO: 716547 - RNA, 19 nt, Artificial Sequence
  Description of Artificial Sequence: Synthetic oligonucleotide
aacuggcucaaaucgcagc

SEQ ID NO: 716548 - RNA, 19 nt, Artificial Sequence
  Description of Artificial Sequence: Synthetic oligonucleotide
ucugggaaagcagagaagc

SEQ ID NO: 716549 - RNA, 19 nt, Artificial Sequence
  Description of Artificial Sequence: Synthetic oligonucleotide
gagucaagaaagaaaagcc

SEQ ID NO: 716550 - RNA, 19 nt, Artificial Sequence
  Description of Artificial Sequence: Synthetic oligonucleotide
caugggugaacuuucacag

SEQ ID NO: 716551 - RNA, 19 nt, Artificial Sequence
  Description of Artificial Sequence: Synthetic oligonucleotide
ugaguuuucagacggcgug

SEQ ID NO: 716552 - RNA, 19 nt, Artificial Sequence
  Description of Artificial Sequence: Synthetic oligonucleotide
ugauucaaaaucccuuccc

SEQ ID NO: 716553 - RNA, 19 nt, Artificial Sequence
  Description of Artificial Sequence: Synthetic oligonucleotide
uagagugacacacucuggc

SEQ ID NO: 716554 - RNA, 19 nt, Artificial Sequence
  Description of Artificial Sequence: Synthetic oligonucleotide
ugauuuuccagaaaacuuu

SEQ ID NO: 716555 - RNA, 19 nt, Artificial Sequence
  Description of Artificial Sequence: Synthetic oligonucleotide
agugauacggaucucggca

SEQ ID NO: 716556 - RNA, 19 nt, Artificial Sequence
  Description of Artificial Sequence: Synthetic oligonucleotide
augugacacagucaugagc

SEQ ID NO: 716557 - RNA, 19 nt, Artificial Sequence
  Description of Artificial Sequence: Synthetic oligonucleotide
ucauaggcggugcagaugu

SEQ ID NO: 716558 - RNA, 19 nt, Artificial Sequence
  Description of Artificial Sequence: Synthetic oligonucleotide
uuuucgagaccugaguggg

SEQ ID NO: 716559 - RNA, 19 nt, Artificial Sequence
  Description of Artificial Sequence: Synthetic oligonucleotide
uugaccauucaucugcagc

SEQ ID NO: 716560 - RNA, 19 nt, Artificial Sequence
  Description of Artificial Sequence: Synthetic oligonucleotide
ugggaugacgacucgaugc

SEQ ID NO: 716561 - RNA, 19 nt, Artificial Sequence
  Description of Artificial Sequence: Synthetic oligonucleotide
ugaccauucaucugcagca

SEQ ID NO: 716562 - RNA, 19 nt, Artificial Sequence
  Description of Artificial Sequence: Synthetic oligonucleotide
uugacguacuucuuggcag

SEQ ID NO: 716563 - RNA, 19 nt, Artificial Sequence
  Description of Artificial Sequence: Synthetic oligonucleotide
aacaugggugaacuuucac

SEQ ID NO: 716564 - RNA, 19 nt, Artificial Sequence
  Description of Artificial Sequence: Synthetic oligonucleotide
uuucagacggcgugcagcg

SEQ ID NO: 716565 - RNA, 19 nt, Artificial Sequence
  Description of Artificial Sequence: Synthetic oligonucleotide
uccaucaaguugaucauga

SEQ ID NO: 716566 - RNA, 19 nt, Artificial Sequence
  Description of Artificial Sequence: Synthetic oligonucleotide
agagucaucagucggcgag

SEQ ID NO: 716567 - RNA, 19 nt, Artificial Sequence
  Description of Artificial Sequence: Synthetic oligonucleotide
accccuaugugacacaguc

SEQ ID NO: 716568 - RNA, 19 nt, Artificial Sequence
  Description of Artificial Sequence: Synthetic oligonucleotide
aacacacacaacacacugc

SEQ ID NO: 716569 - RNA, 19 nt, Artificial Sequence
  Description of Artificial Sequence: Synthetic oligonucleotide
ugguuauuuagagugacac

SEQ ID NO: 716570 - RNA, 19 nt, Artificial Sequence
  Description of Artificial Sequence: Synthetic oligonucleotide
ugcgagagccugauaaggg

SEQ ID NO: 716571 - RNA, 19 nt, Artificial Sequence
  Description of Artificial Sequence: Synthetic oligonucleotide
acuaaccugaggcuaaugu

SEQ ID NO: 716572 - RNA, 19 nt, Artificial Sequence
  Description of Artificial Sequence: Synthetic oligonucleotide
uuaucacacuaacuaaccu

SEQ ID NO: 716573 - RNA, 19 nt, Artificial Sequence
  Description of Artificial Sequence: Synthetic oligonucleotide
aucagcauauaacaugggu

SEQ ID NO: 716574 - RNA, 19 nt, Artificial Sequence
  Description of Artificial Sequence: Synthetic oligonucleotide
agcuugacguacuucuugg

SEQ ID NO: 716575 - RNA, 19 nt, Artificial Sequence
  Description of Artificial Sequence: Synthetic oligonucleotide
gaaauuaacuagagcuggg

SEQ ID NO: 716576 - RNA, 19 nt, Artificial Sequence
  Description of Artificial Sequence: Synthetic oligonucleotide
uuuugguuauuuagaguga

SEQ ID NO: 716577 - RNA, 19 nt, Artificial Sequence
  Description of Artificial Sequence: Synthetic oligonucleotide
ggugaacuuucacagauag

SEQ ID NO: 716578 - RNA, 19 nt, Artificial Sequence
  Description of Artificial Sequence: Synthetic oligonucleotide
uuucugaaaucugggaaag

SEQ ID NO: 716579 - RNA, 19 nt, Artificial Sequence
  Description of Artificial Sequence: Synthetic oligonucleotide
uccacaugcacuguccggg

SEQ ID NO: 716580 - RNA, 19 nt, Artificial Sequence
  Description of Artificial Sequence: Synthetic oligonucleotide
ugucaguuaucacacuaac

SEQ ID NO: 716581 - RNA, 19 nt, Artificial Sequence
  Description of Artificial Sequence: Synthetic oligonucleotide
guucuuaugcgucuucuug

SEQ ID NO: 716582 - RNA, 19 nt, Artificial Sequence
  Description of Artificial Sequence: Synthetic oligonucleotide
agagugacacacucuggcg

SEQ ID NO: 716583 - RNA, 19 nt, Artificial Sequence
  Description of Artificial Sequence: Synthetic oligonucleotide
cuccacucgaacaaucugc

SEQ ID NO: 716584 - RNA, 19 nt, Artificial Sequence
  Description of Artificial Sequence: Synthetic oligonucleotide
uuaggauuuguaaggcacu

SEQ ID NO: 716585 - RNA, 19 nt, Artificial Sequence
  Description of Artificial Sequence: Synthetic oligonucleotide
cuaaccugaggcuaaugug

SEQ ID NO: 716586 - RNA, 19 nt, Artificial Sequence
  Description of Artificial Sequence: Synthetic oligonucleotide
acucaggggauucuagcgg

SEQ ID NO: 716587 - RNA, 19 nt, Artificial Sequence
  Description of Artificial Sequence: Synthetic oligonucleotide
ugacguacuucuuggcagg

SEQ ID NO: 716588 - RNA, 19 nt, Artificial Sequence
  Description of Artificial Sequence: Synthetic oligonucleotide
agcgagggagagcaagucc

SEQ ID NO: 716589 - RNA, 19 nt, Artificial Sequence
  Description of Artificial Sequence: Synthetic oligonucleotide
ccacgcuucacuaacaagg

SEQ ID NO: 716590 - RNA, 19 nt, Artificial Sequence
  Description of Artificial Sequence: Synthetic oligonucleotide
uucuuaugcgucuucuugu

SEQ ID NO: 716591 - RNA, 19 nt, Artificial Sequence
  Description of Artificial Sequence: Synthetic oligonucleotide
acaugggugaacuuucaca

SEQ ID NO: 716592 - RNA, 19 nt, Artificial Sequence
  Description of Artificial Sequence: Synthetic oligonucleotide
acuaaccuagcucgcauug

SEQ ID NO: 716593 - RNA, 19 nt, Artificial Sequence
  Description of Artificial Sequence: Synthetic oligonucleotide
agggguuucuuucugaaau

SEQ ID NO: 716594 - RNA, 19 nt, Artificial Sequence
  Description of Artificial Sequence: Synthetic oligonucleotide
guuaucacacuaacuaacc

SEQ ID NO: 716595 - RNA, 19 nt, Artificial Sequence
  Description of Artificial Sequence: Synthetic oligonucleotide
cucgcauugaccauucauc

SEQ ID NO: 716596 - RNA, 19 nt, Artificial Sequence
  Description of Artificial Sequence: Synthetic oligonucleotide
agcuuaggauuuguaaggc

SEQ ID NO: 716597 - RNA, 19 nt, Artificial Sequence
  Description of Artificial Sequence: Synthetic oligonucleotide
caagaucagcucauaggcg

SEQ ID NO: 716598 - RNA, 19 nt, Artificial Sequence
  Description of Artificial Sequence: Synthetic oligonucleotide
ugcgucuucuuguauuucc

SEQ ID NO: 716599 - RNA, 19 nt, Artificial Sequence
  Description of Artificial Sequence: Synthetic oligonucleotide
cucuggaacggaaauggag

SEQ ID NO: 716600 - RNA, 19 nt, Artificial Sequence
  Description of Artificial Sequence: Synthetic oligonucleotide
uuggagccaaacacuaacc

SEQ ID NO: 716601 - RNA, 19 nt, Artificial Sequence
  Description of Artificial Sequence: Synthetic oligonucleotide
agugacacacucuggcguc

SEQ ID NO: 716602 - RNA, 19 nt, Artificial Sequence
  Description of Artificial Sequence: Synthetic oligonucleotide
uuuucagacggcgugcagc

SEQ ID NO: 716603 - RNA, 19 nt, Artificial Sequence
  Description of Artificial Sequence: Synthetic oligonucleotide
gauggugugucaguuauca

SEQ ID NO: 716604 - RNA, 19 nt, Artificial Sequence
  Description of Artificial Sequence: Synthetic oligonucleotide
uacaccucagggaaggcgu

SEQ ID NO: 716605 - RNA, 19 nt, Artificial Sequence
  Description of Artificial Sequence: Synthetic oligonucleotide
acugaguuuucagacggcg

SEQ ID NO: 716606 - RNA, 19 nt, Artificial Sequence
  Description of Artificial Sequence: Synthetic oligonucleotide
uguguucuggagaguaggc

SEQ ID NO: 716607 - RNA, 19 nt, Artificial Sequence
  Description of Artificial Sequence: Synthetic oligonucleotide
ucaucagucggcgaggacu

SEQ ID NO: 716608 - RNA, 19 nt, Artificial Sequence
  Description of Artificial Sequence: Synthetic oligonucleotide
caaggagccaucaaacauc

SEQ ID NO: 716609 - RNA, 19 nt, Artificial Sequence
  Description of Artificial Sequence: Synthetic oligonucleotide
uggagaguaggcacagugc

SEQ ID NO: 716610 - RNA, 19 nt, Artificial Sequence
  Description of Artificial Sequence: Synthetic oligonucleotide
gcaaucagcauauaacaug

SEQ ID NO: 716611 - RNA, 19 nt, Artificial Sequence
  Description of Artificial Sequence: Synthetic oligonucleotide
uguaaggcacugaaauuaa

SEQ ID NO: 716612 - RNA, 19 nt, Artificial Sequence
  Description of Artificial Sequence: Synthetic oligonucleotide
caccaugcguggaagacgg

SEQ ID NO: 716613 - RNA, 19 nt, Artificial Sequence
  Description of Artificial Sequence: Synthetic oligonucleotide
ucgcauugaccauucaucu

SEQ ID NO: 716614 - RNA, 19 nt, Artificial Sequence
  Description of Artificial Sequence: Synthetic oligonucleotide
uggagccaaacacuaaccu

SEQ ID NO: 716615 - RNA, 19 nt, Artificial Sequence
  Description of Artificial Sequence: Synthetic oligonucleotide
cucaaaucgcagcuugacg

SEQ ID NO: 716616 - RNA, 19 nt, Artificial Sequence
  Description of Artificial Sequence: Synthetic oligonucleotide
uacaaggagccaucaaaca

SEQ ID NO: 716617 - RNA, 19 nt, Artificial Sequence
  Description of Artificial Sequence: Synthetic oligonucleotide
uccgacaggaccaggguac

SEQ ID NO: 716618 - RNA, 19 nt, Artificial Sequence
  Description of Artificial Sequence: Synthetic oligonucleotide
uaaccuagcucgcauugac

SEQ ID NO: 716619 - RNA, 19 nt, Artificial Sequence
  Description of Artificial Sequence: Synthetic oligonucleotide
agacggccacuuuucaggc

SEQ ID NO: 716620 - RNA, 19 nt, Artificial Sequence
  Description of Artificial Sequence: Synthetic oligonucleotide
cagcauauaacauggguga

SEQ ID NO: 716621 - RNA, 19 nt, Artificial Sequence
  Description of Artificial Sequence: Synthetic oligonucleotide
accuagcucgcauugacca

SEQ ID NO: 716622 - RNA, 19 nt, Artificial Sequence
  Description of Artificial Sequence: Synthetic oligonucleotide
auaauagcaaucagcauau

SEQ ID NO: 716623 - RNA, 19 nt, Artificial Sequence
  Description of Artificial Sequence: Synthetic oligonucleotide
gaagacggccacuuuucag

SEQ ID NO: 716624 - RNA, 19 nt, Artificial Sequence
  Description of Artificial Sequence: Synthetic oligonucleotide
auucaugccuucuccuuag

SEQ ID NO: 716625 - RNA, 19 nt, Artificial Sequence
  Description of Artificial Sequence: Synthetic oligonucleotide
auggagcuaacuuucucug

SEQ ID NO: 716626 - RNA, 19 nt, Artificial Sequence
  Description of Artificial Sequence: Synthetic oligonucleotide
cucgggaauuucuggaggg

SEQ ID NO: 716627 - RNA, 19 nt, Artificial Sequence
  Description of Artificial Sequence: Synthetic oligonucleotide
ggguacagcauagaaaagg

SEQ ID NO: 716628 - RNA, 19 nt, Artificial Sequence
  Description of Artificial Sequence: Synthetic oligonucleotide
agcuugugguacaaggagc

SEQ ID NO: 716629 - RNA, 19 nt, Artificial Sequence
  Description of Artificial Sequence: Synthetic oligonucleotide
aaaacacacacaacacacu

SEQ ID NO: 716630 - RNA, 19 nt, Artificial Sequence
  Description of Artificial Sequence: Synthetic oligonucleotide
aaccaccccuaugugacac

SEQ ID NO: 716631 - RNA, 19 nt, Artificial Sequence
  Description of Artificial Sequence: Synthetic oligonucleotide
ggccuaagcacacaggaag

SEQ ID NO: 716632 - RNA, 19 nt, Artificial Sequence
  Description of Artificial Sequence: Synthetic oligonucleotide
aagggcuccacucgaacaa

SEQ ID NO: 716633 - RNA, 19 nt, Artificial Sequence
  Description of Artificial Sequence: Synthetic oligonucleotide
aaccuagcucgcauugacc

SEQ ID NO: 716634 - RNA, 19 nt, Artificial Sequence
  Description of Artificial Sequence: Synthetic oligonucleotide
acgacucgaugccugugcc

SEQ ID NO: 716635 - RNA, 19 nt, Artificial Sequence
  Description of Artificial Sequence: Synthetic oligonucleotide
aaaucugggaaagcagaga

SEQ ID NO: 716636 - RNA, 19 nt, Artificial Sequence
  Description of Artificial Sequence: Synthetic oligonucleotide
uugguuauuuagagugaca

SEQ ID NO: 716637 - RNA, 19 nt, Artificial Sequence
  Description of Artificial Sequence: Synthetic oligonucleotide
uggcucaaaucgcagcuug

SEQ ID NO: 716638 - RNA, 19 nt, Artificial Sequence
  Description of Artificial Sequence: Synthetic oligonucleotide
acuaacuaaccuagcucgc

SEQ ID NO: 716639 - RNA, 19 nt, Artificial Sequence
  Description of Artificial Sequence: Synthetic oligonucleotide
aggugccccgcucagugcc

SEQ ID NO: 716640 - RNA, 19 nt, Artificial Sequence
  Description of Artificial Sequence: Synthetic oligonucleotide
aggcuaaugugauucaaaa

SEQ ID NO: 716641 - RNA, 19 nt, Artificial Sequence
  Description of Artificial Sequence: Synthetic oligonucleotide
cuggagaguaggcacagug

SEQ ID NO: 716642 - RNA, 19 nt, Artificial Sequence
  Description of Artificial Sequence: Synthetic oligonucleotide
acuugugggaugacgacuc

SEQ ID NO: 716643 - RNA, 19 nt, Artificial Sequence
  Description of Artificial Sequence: Synthetic oligonucleotide
cacgcuucacuaacaaggc

SEQ ID NO: 716644 - RNA, 19 nt, Artificial Sequence
  Description of Artificial Sequence: Synthetic oligonucleotide
cacugaaauuaacuagagc

SEQ ID NO: 716645 - RNA, 19 nt, Artificial Sequence
  Description of Artificial Sequence: Synthetic oligonucleotide
uuaugcgucuucuuguauu

SEQ ID NO: 716646 - RNA, 19 nt, Artificial Sequence
  Description of Artificial Sequence: Synthetic oligonucleotide
caaggcagaaggaccuugg

SEQ ID NO: 716647 - RNA, 19 nt, Artificial Sequence
  Description of Artificial Sequence: Synthetic oligonucleotide
uuuggacuggaccuggcuu

SEQ ID NO: 716648 - RNA, 19 nt, Artificial Sequence
  Description of Artificial Sequence: Synthetic oligonucleotide
ugaucaugauguucuuaug

SEQ ID NO: 716649 - RNA, 19 nt, Artificial Sequence
  Description of Artificial Sequence: Synthetic oligonucleotide
acggaaauggagcuaacuu

SEQ ID NO: 716650 - RNA, 19 nt, Artificial Sequence
  Description of Artificial Sequence: Synthetic oligonucleotide
ggacauguguucuggagag

SEQ ID NO: 716651 - RNA, 19 nt, Artificial Sequence
  Description of Artificial Sequence: Synthetic oligonucleotide
ucaccaugcguggaagacg

SEQ ID NO: 716652 - RNA, 19 nt, Artificial Sequence
  Description of Artificial Sequence: Synthetic oligonucleotide
cagcuugugguacaaggag

SEQ ID NO: 716653 - RNA, 19 nt, Artificial Sequence
  Description of Artificial Sequence: Synthetic oligonucleotide
cagagagaacuuuggacug

SEQ ID NO: 716654 - RNA, 19 nt, Artificial Sequence
  Description of Artificial Sequence: Synthetic oligonucleotide
ugugggaugacgacucgau

SEQ ID NO: 716655 - RNA, 19 nt, Artificial Sequence
  Description of Artificial Sequence: Synthetic oligonucleotide
uagcccucgggccuaagca

SEQ ID NO: 716656 - RNA, 19 nt, Artificial Sequence
  Description of Artificial Sequence: Synthetic oligonucleotide
uaacuaaccuagcucgcau

SEQ ID NO: 716657 - RNA, 19 nt, Artificial Sequence
  Description of Artificial Sequence: Synthetic oligonucleotide
cuuccaaccccagggaggg

SEQ ID NO: 716658 - RNA, 19 nt, Artificial Sequence
  Description of Artificial Sequence: Synthetic oligonucleotide
uccucgcgguucauaauag

SEQ ID NO: 716659 - RNA, 19 nt, Artificial Sequence
  Description of Artificial Sequence: Synthetic oligonucleotide
gacgacucgaugccugugc

SEQ ID NO: 716660 - RNA, 19 nt, Artificial Sequence
  Description of Artificial Sequence: Synthetic oligonucleotide
gugauacggaucucggcag

SEQ ID NO: 716661 - RNA, 19 nt, Artificial Sequence
  Description of Artificial Sequence: Synthetic oligonucleotide
ucgcgguucauaauagcaa

SEQ ID NO: 716662 - RNA, 19 nt, Artificial Sequence
  Description of Artificial Sequence: Synthetic oligonucleotide
ugauacggaucucggcagc

SEQ ID NO: 716663 - RNA, 19 nt, Artificial Sequence
  Description of Artificial Sequence: Synthetic oligonucleotide
guacaaggagccaucaaac

SEQ ID NO: 716664 - RNA, 19 nt, Artificial Sequence
  Description of Artificial Sequence: Synthetic oligonucleotide
cuaagcacacaggaagaag

SEQ ID NO: 716665 - RNA, 19 nt, Artificial Sequence
  Description of Artificial Sequence: Synthetic oligonucleotide
gguucauaauagcaaucag

SEQ ID NO: 716666 - RNA, 19 nt, Artificial Sequence
  Description of Artificial Sequence: Synthetic oligonucleotide
gaugacgacucgaugccug

SEQ ID NO: 716667 - RNA, 19 nt, Artificial Sequence
  Description of Artificial Sequence: Synthetic oligonucleotide
ucacacuaacuaaccuagc

SEQ ID NO: 716668 - RNA, 19 nt, Artificial Sequence
  Description of Artificial Sequence: Synthetic oligonucleotide
cccgaacuggcucaaaucg

SEQ ID NO: 716669 - RNA, 19 nt, Artificial Sequence
  Description of Artificial Sequence: Synthetic oligonucleotide
cagccaauggaguucagca

SEQ ID NO: 716670 - RNA, 19 nt, Artificial Sequence
  Description of Artificial Sequence: Synthetic oligonucleotide
gguacaaggagccaucaaa

SEQ ID NO: 716671 - RNA, 19 nt, Artificial Sequence
  Description of Artificial Sequence: Synthetic oligonucleotide
caagacauuggagccaaac

SEQ ID NO: 716672 - RNA, 19 nt, Artificial Sequence
  Description of Artificial Sequence: Synthetic oligonucleotide
ucuuaugcgucuucuugua

SEQ ID NO: 716673 - RNA, 19 nt, Artificial Sequence
  Description of Artificial Sequence: Synthetic oligonucleotide
uucgagaccugagugggcu

SEQ ID NO: 716674 - RNA, 19 nt, Artificial Sequence
  Description of Artificial Sequence: Synthetic oligonucleotide
cucgcgguucauaauagca

SEQ ID NO: 716675 - RNA, 19 nt, Artificial Sequence
  Description of Artificial Sequence: Synthetic oligonucleotide
aacuaaccuagcucgcauu

SEQ ID NO: 716676 - RNA, 19 nt, Artificial Sequence
  Description of Artificial Sequence: Synthetic oligonucleotide
aucagcucauaggcggugc

SEQ ID NO: 716677 - RNA, 19 nt, Artificial Sequence
  Description of Artificial Sequence: Synthetic oligonucleotide
uucucacucagcgugggaa

SEQ ID NO: 716678 - RNA, 19 nt, Artificial Sequence
  Description of Artificial Sequence: Synthetic oligonucleotide
agcccucgggccuaagcac

SEQ ID NO: 716679 - RNA, 19 nt, Artificial Sequence
  Description of Artificial Sequence: Synthetic oligonucleotide
aacaucucccagaacuccu

SEQ ID NO: 716680 - RNA, 19 nt, Artificial Sequence
  Description of Artificial Sequence: Synthetic oligonucleotide
aacuuucucugagcuuagg

SEQ ID NO: 716681 - RNA, 19 nt, Artificial Sequence
  Description of Artificial Sequence: Synthetic oligonucleotide
aguagcacagggcggaaua

SEQ ID NO: 716682 - RNA, 19 nt, Artificial Sequence
  Description of Artificial Sequence: Synthetic oligonucleotide
auugaccauucaucugcag

SEQ ID NO: 716683 - RNA, 19 nt, Artificial Sequence
  Description of Artificial Sequence: Synthetic oligonucleotide
aacacuaaccugaggcuaa

SEQ ID NO: 716684 - RNA, 19 nt, Artificial Sequence
  Description of Artificial Sequence: Synthetic oligonucleotide
accacgcuucacuaacaag

SEQ ID NO: 716685 - RNA, 19 nt, Artificial Sequence
  Description of Artificial Sequence: Synthetic oligonucleotide
ugccucgggaauuucugga

SEQ ID NO: 716686 - RNA, 19 nt, Artificial Sequence
  Description of Artificial Sequence: Synthetic oligonucleotide
ucgggccuaagcacacagg

SEQ ID NO: 716687 - RNA, 19 nt, Artificial Sequence
  Description of Artificial Sequence: Synthetic oligonucleotide
ggugugucaguuaucacac

SEQ ID NO: 716688 - RNA, 19 nt, Artificial Sequence
  Description of Artificial Sequence: Synthetic oligonucleotide
gauacggaucucggcagcc

SEQ ID NO: 716689 - RNA, 19 nt, Artificial Sequence
  Description of Artificial Sequence: Synthetic oligonucleotide
gaguuuucagacggcgugc

SEQ ID NO: 716690 - RNA, 19 nt, Artificial Sequence
  Description of Artificial Sequence: Synthetic oligonucleotide
uucuagcggagguucagau

SEQ ID NO: 716691 - RNA, 19 nt, Artificial Sequence
  Description of Artificial Sequence: Synthetic oligonucleotide
aaccaaccacgcuucacua

SEQ ID NO: 716692 - RNA, 19 nt, Artificial Sequence
  Description of Artificial Sequence: Synthetic oligonucleotide
gagcaaguccauucccaug

SEQ ID NO: 716693 - RNA, 19 nt, Artificial Sequence
  Description of Artificial Sequence: Synthetic oligonucleotide
cugacccauagacaccaag

SEQ ID NO: 716694 - RNA, 19 nt, Artificial Sequence
  Description of Artificial Sequence: Synthetic oligonucleotide
gagucaucagucggcgagg

SEQ ID NO: 716695 - RNA, 19 nt, Artificial Sequence
  Description of Artificial Sequence: Synthetic oligonucleotide
gggagugauacggaucucg

SEQ ID NO: 716696 - RNA, 19 nt, Artificial Sequence
  Description of Artificial Sequence: Synthetic oligonucleotide
cauagaaaagguacugagu

SEQ ID NO: 716697 - RNA, 19 nt, Artificial Sequence
  Description of Artificial Sequence: Synthetic oligonucleotide
auuuagagugacacacucu

SEQ ID NO: 716698 - RNA, 19 nt, Artificial Sequence
  Description of Artificial Sequence: Synthetic oligonucleotide
ggauuuguaaggcacugaa

SEQ ID NO: 716699 - RNA, 19 nt, Artificial Sequence
  Description of Artificial Sequence: Synthetic oligonucleotide
uuccaguaacagccaauuc

SEQ ID NO: 716700 - RNA, 19 nt, Artificial Sequence
  Description of Artificial Sequence: Synthetic oligonucleotide
agucggcgaggacugugac

SEQ ID NO: 716701 - RNA, 19 nt, Artificial Sequence
  Description of Artificial Sequence: Synthetic oligonucleotide
ucuagccagacaguggcua

SEQ ID NO: 716702 - RNA, 19 nt, Artificial Sequence
  Description of Artificial Sequence: Synthetic oligonucleotide
gacucgaugccugugccca

SEQ ID NO: 716703 - RNA, 19 nt, Artificial Sequence
  Description of Artificial Sequence: Synthetic oligonucleotide
uucugaaaucugggaaagc

SEQ ID NO: 716704 - RNA, 19 nt, Artificial Sequence
  Description of Artificial Sequence: Synthetic oligonucleotide
guacuugugggaugacgac

SEQ ID NO: 716705 - RNA, 19 nt, Artificial Sequence
  Description of Artificial Sequence: Synthetic oligonucleotide
agcgcacaaagcugccauc

SEQ ID NO: 716706 - RNA, 19 nt, Artificial Sequence
  Description of Artificial Sequence: Synthetic oligonucleotide
caugcacuguccgggaccc

SEQ ID NO: 716707 - RNA, 19 nt, Artificial Sequence
  Description of Artificial Sequence: Synthetic oligonucleotide
gggaugacgacucgaugcc

SEQ ID NO: 716708 - RNA, 19 nt, Artificial Sequence
  Description of Artificial Sequence: Synthetic oligonucleotide
ugaccagcucagcucuuga

SEQ ID NO: 716709 - RNA, 19 nt, Artificial Sequence
  Description of Artificial Sequence: Synthetic oligonucleotide
cuugugggaugacgacucg

SEQ ID NO: 716710 - RNA, 19 nt, Artificial Sequence
  Description of Artificial Sequence: Synthetic oligonucleotide
ggggauucaugccuucucc

SEQ ID NO: 716711 - RNA, 19 nt, Artificial Sequence
  Description of Artificial Sequence: Synthetic oligonucleotide
cucgggccuaagcacacag

SEQ ID NO: 716712 - RNA, 19 nt, Artificial Sequence
  Description of Artificial Sequence: Synthetic oligonucleotide
cucaccaugcguggaagac

SEQ ID NO: 716713 - RNA, 19 nt, Artificial Sequence
  Description of Artificial Sequence: Synthetic oligonucleotide
gacguacuucuuggcaggg

SEQ ID NO: 716714 - RNA, 19 nt, Artificial Sequence
  Description of Artificial Sequence: Synthetic oligonucleotide
ugaggcuaaugugauucaa

SEQ ID NO: 716715 - RNA, 19 nt, Artificial Sequence
  Description of Artificial Sequence: Synthetic oligonucleotide
gagugacacacucuggcgu

SEQ ID NO: 716716 - RNA, 19 nt, Artificial Sequence
  Description of Artificial Sequence: Synthetic oligonucleotide
ugugccccuguugugacuc

SEQ ID NO: 716717 - RNA, 19 nt, Artificial Sequence
  Description of Artificial Sequence: Synthetic oligonucleotide
uacaaccaaccacgcuuca

SEQ ID NO: 716718 - RNA, 19 nt, Artificial Sequence
  Description of Artificial Sequence: Synthetic oligonucleotide
agagaccguacuuguggga

SEQ ID NO: 716719 - RNA, 19 nt, Artificial Sequence
  Description of Artificial Sequence: Synthetic oligonucleotide
agaccguacuugugggaug

SEQ ID NO: 716720 - RNA, 19 nt, Artificial Sequence
  Description of Artificial Sequence: Synthetic oligonucleotide
uucuagccagacaguggcu

SEQ ID NO: 716721 - RNA, 19 nt, Artificial Sequence
  Description of Artificial Sequence: Synthetic oligonucleotide
ccuuccaaccccagggagg

SEQ ID NO: 716722 - RNA, 19 nt, Artificial Sequence
  Description of Artificial Sequence: Synthetic oligonucleotide
cauucaucugcagcaagca

SEQ ID NO: 716723 - RNA, 19 nt, Artificial Sequence
  Description of Artificial Sequence: Synthetic oligonucleotide
cuaacuaaccuagcucgca

SEQ ID NO: 716724 - RNA, 19 nt, Artificial Sequence
  Description of Artificial Sequence: Synthetic oligonucleotide
caugugccccuguugugac

SEQ ID NO: 716725 - RNA, 19 nt, Artificial Sequence
  Description of Artificial Sequence: Synthetic oligonucleotide
aguuuucagacggcgugca

SEQ ID NO: 716726 - RNA, 19 nt, Artificial Sequence
  Description of Artificial Sequence: Synthetic oligonucleotide
cugccuugcagaucuuguc

SEQ ID NO: 716727 - RNA, 19 nt, Artificial Sequence
  Description of Artificial Sequence: Synthetic oligonucleotide
auauaacaugggugaacuu

SEQ ID NO: 716728 - RNA, 19 nt, Artificial Sequence
  Description of Artificial Sequence: Synthetic oligonucleotide
guagcccucgggccuaagc

SEQ ID NO: 716729 - RNA, 19 nt, Artificial Sequence
  Description of Artificial Sequence: Synthetic oligonucleotide
gggacauguguucuggaga

SEQ ID NO: 716730 - RNA, 19 nt, Artificial Sequence
  Description of Artificial Sequence: Synthetic oligonucleotide
ugauggugugucaguuauc

SEQ ID NO: 716731 - RNA, 19 nt, Artificial Sequence
  Description of Artificial Sequence: Synthetic oligonucleotide
aaucgcagcuugacguacu

SEQ ID NO: 716732 - RNA, 19 nt, Artificial Sequence
  Description of Artificial Sequence: Synthetic oligonucleotide
augacgacucgaugccugu

SEQ ID NO: 716733 - RNA, 19 nt, Artificial Sequence
  Description of Artificial Sequence: Synthetic oligonucleotide
ggcugcgagagccugauaa

SEQ ID NO: 716734 - RNA, 19 nt, Artificial Sequence
  Description of Artificial Sequence: Synthetic oligonucleotide
ugugacucaggggauucua

SEQ ID NO: 716735 - RNA, 19 nt, Artificial Sequence
  Description of Artificial Sequence: Synthetic oligonucleotide
acgcuucacuaacaaggca

SEQ ID NO: 716736 - RNA, 19 nt, Artificial Sequence
  Description of Artificial Sequence: Synthetic oligonucleotide
gaucagcucauaggcggug

SEQ ID NO: 716737 - RNA, 19 nt, Artificial Sequence
  Description of Artificial Sequence: Synthetic oligonucleotide
gugggaugacgacucgaug

SEQ ID NO: 716738 - RNA, 19 nt, Artificial Sequence
  Description of Artificial Sequence: Synthetic oligonucleotide
ccaaccacgcuucacuaac

SEQ ID NO: 716739 - RNA, 19 nt, Artificial Sequence
  Description of Artificial Sequence: Synthetic oligonucleotide
cauugaccauucaucugca

SEQ ID NO: 716740 - RNA, 19 nt, Artificial Sequence
  Description of Artificial Sequence: Synthetic oligonucleotide
cagggagugauacggaucu

SEQ ID NO: 716741 - RNA, 19 nt, Artificial Sequence
  Description of Artificial Sequence: Synthetic oligonucleotide
gaccguacuugugggauga

SEQ ID NO: 716742 - RNA, 19 nt, Artificial Sequence
  Description of Artificial Sequence: Synthetic oligonucleotide
uggaggccccucccucugg

SEQ ID NO: 716743 - RNA, 19 nt, Artificial Sequence
  Description of Artificial Sequence: Synthetic oligonucleotide
uagcucgcauugaccauuc

SEQ ID NO: 716744 - RNA, 19 nt, Artificial Sequence
  Description of Artificial Sequence: Synthetic oligonucleotide
gcacugaaauuaacuagag

SEQ ID NO: 716745 - RNA, 19 nt, Artificial Sequence
  Description of Artificial Sequence: Synthetic oligonucleotide
caggggauucuagcggagg

SEQ ID NO: 716746 - RNA, 19 nt, Artificial Sequence
  Description of Artificial Sequence: Synthetic oligonucleotide
agcucagcucuugaauucu

SEQ ID NO: 716747 - RNA, 19 nt, Artificial Sequence
  Description of Artificial Sequence: Synthetic oligonucleotide
ucacucagcgugggaacca

SEQ ID NO: 716748 - RNA, 19 nt, Artificial Sequence
  Description of Artificial Sequence: Synthetic oligonucleotide
aggauuuguaaggcacuga

SEQ ID NO: 716749 - RNA, 19 nt, Artificial Sequence
  Description of Artificial Sequence: Synthetic oligonucleotide
guugugacucaggggauuc

SEQ ID NO: 716750 - RNA, 19 nt, Artificial Sequence
  Description of Artificial Sequence: Synthetic oligonucleotide
uucaugccuucuccuuagu

SEQ ID NO: 716751 - RNA, 19 nt, Artificial Sequence
  Description of Artificial Sequence: Synthetic oligonucleotide
accaaccacgcuucacuaa

SEQ ID NO: 716752 - RNA, 19 nt, Artificial Sequence
  Description of Artificial Sequence: Synthetic oligonucleotide
agguucagauggugggagu

SEQ ID NO: 716753 - RNA, 19 nt, Artificial Sequence
  Description of Artificial Sequence: Synthetic oligonucleotide
ggaacggaaauggagcuaa

SEQ ID NO: 716754 - RNA, 19 nt, Artificial Sequence
  Description of Artificial Sequence: Synthetic oligonucleotide
auucuagcggagguucaga

SEQ ID NO: 716755 - RNA, 19 nt, Artificial Sequence
  Description of Artificial Sequence: Synthetic oligonucleotide
caacacacugccacaccca

SEQ ID NO: 716756 - RNA, 19 nt, Artificial Sequence
  Description of Artificial Sequence: Synthetic oligonucleotide
agccaaacacuaaccugag

SEQ ID NO: 716757 - RNA, 19 nt, Artificial Sequence
  Description of Artificial Sequence: Synthetic oligonucleotide
caaccaaccacgcuucacu

SEQ ID NO: 716758 - RNA, 19 nt, Artificial Sequence
  Description of Artificial Sequence: Synthetic oligonucleotide
agcauauaacaugggugaa

SEQ ID NO: 716759 - RNA, 19 nt, Artificial Sequence
  Description of Artificial Sequence: Synthetic oligonucleotide
augagcaugugccccuguu

SEQ ID NO: 716760 - RNA, 19 nt, Artificial Sequence
  Description of Artificial Sequence: Synthetic oligonucleotide
guucuggagaguaggcaca

SEQ ID NO: 716761 - RNA, 19 nt, Artificial Sequence
  Description of Artificial Sequence: Synthetic oligonucleotide
ggcggaauaccccuuucuc

SEQ ID NO: 716762 - RNA, 19 nt, Artificial Sequence
  Description of Artificial Sequence: Synthetic oligonucleotide
gcuuaggauuuguaaggca

SEQ ID NO: 716763 - RNA, 19 nt, Artificial Sequence
  Description of Artificial Sequence: Synthetic oligonucleotide
gcggaauaccccuuucuca

SEQ ID NO: 716764 - RNA, 19 nt, Artificial Sequence
  Description of Artificial Sequence: Synthetic oligonucleotide
uugcgcagcuugugguaca

SEQ ID NO: 716765 - RNA, 19 nt, Artificial Sequence
  Description of Artificial Sequence: Synthetic oligonucleotide
ccgaacuggcucaaaucgc

SEQ ID NO: 716766 - RNA, 19 nt, Artificial Sequence
  Description of Artificial Sequence: Synthetic oligonucleotide
gccucgggaauuucuggag

SEQ ID NO: 716767 - RNA, 19 nt, Artificial Sequence
  Description of Artificial Sequence: Synthetic oligonucleotide
caaaucgcagcuugacgua

SEQ ID NO: 716768 - RNA, 19 nt, Artificial Sequence
  Description of Artificial Sequence: Synthetic oligonucleotide
cccaggguccgacaggacc

SEQ ID NO: 716769 - RNA, 19 nt, Artificial Sequence
  Description of Artificial Sequence: Synthetic oligonucleotide
cacaugcacuguccgggac

SEQ ID NO: 716770 - RNA, 19 nt, Artificial Sequence
  Description of Artificial Sequence: Synthetic oligonucleotide
agugccucgcugccuugca

SEQ ID NO: 716771 - RNA, 19 nt, Artificial Sequence
  Description of Artificial Sequence: Synthetic oligonucleotide
cuccucgcgguucauaaua

SEQ ID NO: 716772 - RNA, 19 nt, Artificial Sequence
  Description of Artificial Sequence: Synthetic oligonucleotide
cguacuugugggaugacga

SEQ ID NO: 716773 - RNA, 19 nt, Artificial Sequence
  Description of Artificial Sequence: Synthetic oligonucleotide
agucaucagucggcgagga

SEQ ID NO: 716774 - RNA, 19 nt, Artificial Sequence
  Description of Artificial Sequence: Synthetic oligonucleotide
aggaccuuggaggccccuc

SEQ ID NO: 716775 - RNA, 19 nt, Artificial Sequence
  Description of Artificial Sequence: Synthetic oligonucleotide
ugacgacucgaugccugug

SEQ ID NO: 716776 - RNA, 19 nt, Artificial Sequence
  Description of Artificial Sequence: Synthetic oligonucleotide
cugaggcuaaugugauuca

SEQ ID NO: 716777 - RNA, 19 nt, Artificial Sequence
  Description of Artificial Sequence: Synthetic oligonucleotide
aacaaggcagaaggaccuu

SEQ ID NO: 716778 - RNA, 19 nt, Artificial Sequence
  Description of Artificial Sequence: Synthetic oligonucleotide
gaagugagugacccuggau

SEQ ID NO: 716779 - RNA, 19 nt, Artificial Sequence
  Description of Artificial Sequence: Synthetic oligonucleotide
ggguccgacaggaccaggg

SEQ ID NO: 716780 - RNA, 19 nt, Artificial Sequence
  Description of Artificial Sequence: Synthetic oligonucleotide
agcggagguucagauggug

SEQ ID NO: 716781 - RNA, 19 nt, Artificial Sequence
  Description of Artificial Sequence: Synthetic oligonucleotide
cacucuggcgucacugcca

SEQ ID NO: 716782 - RNA, 19 nt, Artificial Sequence
  Description of Artificial Sequence: Synthetic oligonucleotide
agaucagcucauaggcggu

SEQ ID NO: 716783 - RNA, 19 nt, Artificial Sequence
  Description of Artificial Sequence: Synthetic oligonucleotide
gucaguuaucacacuaacu

SEQ ID NO: 716784 - RNA, 19 nt, Artificial Sequence
  Description of Artificial Sequence: Synthetic oligonucleotide
gaaccaccccuaugugaca

SEQ ID NO: 716785 - RNA, 19 nt, Artificial Sequence
  Description of Artificial Sequence: Synthetic oligonucleotide
ggaccuuggaggccccucc

SEQ ID NO: 716786 - RNA, 19 nt, Artificial Sequence
  Description of Artificial Sequence: Synthetic oligonucleotide
ggcaguucugaaggugggg

SEQ ID NO: 716787 - RNA, 19 nt, Artificial Sequence
  Description of Artificial Sequence: Synthetic oligonucleotide
gcggagguucagauggugg

SEQ ID NO: 716788 - RNA, 19 nt, Artificial Sequence
  Description of Artificial Sequence: Synthetic oligonucleotide
cucagugauggcuggggua

SEQ ID NO: 716789 - RNA, 19 nt, Artificial Sequence
  Description of Artificial Sequence: Synthetic oligonucleotide
uagcggagguucagauggu

SEQ ID NO: 716790 - RNA, 19 nt, Artificial Sequence
  Description of Artificial Sequence: Synthetic oligonucleotide
ugccccuguugugacucag

SEQ ID NO: 716791 - RNA, 19 nt, Artificial Sequence
  Description of Artificial Sequence: Synthetic oligonucleotide
ccaugcguggaagacggcc

SEQ ID NO: 716792 - RNA, 19 nt, Artificial Sequence
  Description of Artificial Sequence: Synthetic oligonucleotide
gcucaaaucgcagcuugac

SEQ ID NO: 716793 - RNA, 19 nt, Artificial Sequence
  Description of Artificial Sequence: Synthetic oligonucleotide
cuaaccuagcucgcauuga

SEQ ID NO: 716794 - RNA, 19 nt, Artificial Sequence
  Description of Artificial Sequence: Synthetic oligonucleotide
uccagccaauggaguucag

SEQ ID NO: 716795 - RNA, 19 nt, Artificial Sequence
  Description of Artificial Sequence: Synthetic oligonucleotide
gagaccguacuugugggau

SEQ ID NO: 716796 - RNA, 19 nt, Artificial Sequence
  Description of Artificial Sequence: Synthetic oligonucleotide
auacggaucucggcagcca

SEQ ID NO: 716797 - RNA, 19 nt, Artificial Sequence
  Description of Artificial Sequence: Synthetic oligonucleotide
gugauggcugggguagccc

SEQ ID NO: 716798 - RNA, 19 nt, Artificial Sequence
  Description of Artificial Sequence: Synthetic oligonucleotide
ugccugaggcugcgagagc

SEQ ID NO: 716799 - RNA, 19 nt, Artificial Sequence
  Description of Artificial Sequence: Synthetic oligonucleotide
cagccgagcugcuugcgca

SEQ ID NO: 716800 - RNA, 19 nt, Artificial Sequence
  Description of Artificial Sequence: Synthetic oligonucleotide
caaccacgcuucacuaaca

SEQ ID NO: 716801 - RNA, 19 nt, Artificial Sequence
  Description of Artificial Sequence: Synthetic oligonucleotide
uguccgggacccagcucac

SEQ ID NO: 716802 - RNA, 19 nt, Artificial Sequence
  Description of Artificial Sequence: Synthetic oligonucleotide
ugacacacucuggcgucac

SEQ ID NO: 716803 - RNA, 19 nt, Artificial Sequence
  Description of Artificial Sequence: Synthetic oligonucleotide
gaacggaaauggagcuaac

SEQ ID NO: 716804 - RNA, 19 nt, Artificial Sequence
  Description of Artificial Sequence: Synthetic oligonucleotide
guguuggaagagaccguac

SEQ ID NO: 716805 - RNA, 19 nt, Artificial Sequence
  Description of Artificial Sequence: Synthetic oligonucleotide
ucgagaccugagugggcuc

SEQ ID NO: 716806 - RNA, 19 nt, Artificial Sequence
  Description of Artificial Sequence: Synthetic oligonucleotide
ggaaugauggugugucagu

SEQ ID NO: 716807 - RNA, 19 nt, Artificial Sequence
  Description of Artificial Sequence: Synthetic oligonucleotide
cagacggcgugcagcgcac

SEQ ID NO: 716808 - RNA, 19 nt, Artificial Sequence
  Description of Artificial Sequence: Synthetic oligonucleotide
ggaagacggccacuuuuca

SEQ ID NO: 716809 - RNA, 19 nt, Artificial Sequence
  Description of Artificial Sequence: Synthetic oligonucleotide
uacagaagugguggcccua

SEQ ID NO: 716810 - RNA, 19 nt, Artificial Sequence
  Description of Artificial Sequence: Synthetic oligonucleotide
ccaggugccccgcucagug

SEQ ID NO: 716811 - RNA, 19 nt, Artificial Sequence
  Description of Artificial Sequence: Synthetic oligonucleotide
cacagggcggaauaccccu

SEQ ID NO: 716812 - RNA, 19 nt, Artificial Sequence
  Description of Artificial Sequence: Synthetic oligonucleotide
cagucggcgaggacuguga

SEQ ID NO: 716813 - RNA, 19 nt, Artificial Sequence
  Description of Artificial Sequence: Synthetic oligonucleotide
agggagugauacggaucuc

SEQ ID NO: 716814 - RNA, 19 nt, Artificial Sequence
  Description of Artificial Sequence: Synthetic oligonucleotide
ggugggagucaagaaagaa

SEQ ID NO: 716815 - RNA, 19 nt, Artificial Sequence
  Description of Artificial Sequence: Synthetic oligonucleotide
gcagcuugugguacaagga

SEQ ID NO: 716816 - RNA, 19 nt, Artificial Sequence
  Description of Artificial Sequence: Synthetic oligonucleotide
gucaucagucggcgaggac

SEQ ID NO: 716817 - RNA, 19 nt, Artificial Sequence
  Description of Artificial Sequence: Synthetic oligonucleotide
gagaguaggcacagugccu

SEQ ID NO: 716818 - RNA, 19 nt, Artificial Sequence
  Description of Artificial Sequence: Synthetic oligonucleotide
cacuaaccugaggcuaaug

SEQ ID NO: 716819 - RNA, 19 nt, Artificial Sequence
  Description of Artificial Sequence: Synthetic oligonucleotide
ccguacuugugggaugacg

SEQ ID NO: 716820 - RNA, 19 nt, Artificial Sequence
  Description of Artificial Sequence: Synthetic oligonucleotide
ccagccaauggaguucagc

SEQ ID NO: 716821 - RNA, 19 nt, Artificial Sequence
  Description of Artificial Sequence: Synthetic oligonucleotide
ccuaugugacacagucaug

SEQ ID NO: 716822 - RNA, 19 nt, Artificial Sequence
  Description of Artificial Sequence: Synthetic oligonucleotide
guccgacaggaccagggua

SEQ ID NO: 716823 - RNA, 19 nt, Artificial Sequence
  Description of Artificial Sequence: Synthetic oligonucleotide
uucagacggcgugcagcgc

SEQ ID NO: 716824 - RNA, 19 nt, Artificial Sequence
  Description of Artificial Sequence: Synthetic oligonucleotide
augugccccuguugugacu

SEQ ID NO: 716825 - RNA, 19 nt, Artificial Sequence
  Description of Artificial Sequence: Synthetic oligonucleotide
accguacuugugggaugac

SEQ ID NO: 716826 - RNA, 19 nt, Artificial Sequence
  Description of Artificial Sequence: Synthetic oligonucleotide
cgaacuggcucaaaucgca

SEQ ID NO: 716827 - RNA, 19 nt, Artificial Sequence
  Description of Artificial Sequence: Synthetic oligonucleotide
cuucacuaacaaggcagaa

SEQ ID NO: 716828 - RNA, 19 nt, Artificial Sequence
  Description of Artificial Sequence: Synthetic oligonucleotide
ccucgcgguucauaauagc

SEQ ID NO: 716829 - RNA, 19 nt, Artificial Sequence
  Description of Artificial Sequence: Synthetic oligonucleotide
accaugcguggaagacggc

SEQ ID NO: 716830 - RNA, 19 nt, Artificial Sequence
  Description of Artificial Sequence: Synthetic oligonucleotide
gguggcccuacagccacag

SEQ ID NO: 716831 - RNA, 19 nt, Artificial Sequence
  Description of Artificial Sequence: Synthetic oligonucleotide
cugugaggucauccagcuc

SEQ ID NO: 716832 - RNA, 19 nt, Artificial Sequence
  Description of Artificial Sequence: Synthetic oligonucleotide
gguccagccaauggaguuc

SEQ ID NO: 716833 - RNA, 19 nt, Artificial Sequence
  Description of Artificial Sequence: Synthetic oligonucleotide
ucucggcagccaccaggaa

SEQ ID NO: 716834 - RNA, 19 nt, Artificial Sequence
  Description of Artificial Sequence: Synthetic oligonucleotide
ggguuucuuucugaaaucu

SEQ ID NO: 716835 - RNA, 19 nt, Artificial Sequence
  Description of Artificial Sequence: Synthetic oligonucleotide
ggcaagacauuggagccaa

SEQ ID NO: 716836 - RNA, 19 nt, Artificial Sequence
  Description of Artificial Sequence: Synthetic oligonucleotide
gcagccgagcugcuugcgc

SEQ ID NO: 716837 - RNA, 19 nt, Artificial Sequence
  Description of Artificial Sequence: Synthetic oligonucleotide
cagugccucgcugccuugc

SEQ ID NO: 716838 - RNA, 19 nt, Artificial Sequence
  Description of Artificial Sequence: Synthetic oligonucleotide
ucgcagcuugacguacuuc

SEQ ID NO: 716839 - RNA, 19 nt, Artificial Sequence
  Description of Artificial Sequence: Synthetic oligonucleotide
ggagguucagaugguggga

SEQ ID NO: 716840 - RNA, 19 nt, Artificial Sequence
  Description of Artificial Sequence: Synthetic oligonucleotide
caguucugaagguggggcu

SEQ ID NO: 716841 - RNA, 19 nt, Artificial Sequence
  Description of Artificial Sequence: Synthetic oligonucleotide
acacuaaccugaggcuaau

SEQ ID NO: 716842 - RNA, 19 nt, Artificial Sequence
  Description of Artificial Sequence: Synthetic oligonucleotide
caguggcuacaacucuuga

SEQ ID NO: 716843 - RNA, 19 nt, Artificial Sequence
  Description of Artificial Sequence: Synthetic oligonucleotide
agcucgcauugaccauuca

SEQ ID NO: 716844 - RNA, 19 nt, Artificial Sequence
  Description of Artificial Sequence: Synthetic oligonucleotide
agguggggcuguacaacca

SEQ ID NO: 716845 - RNA, 19 nt, Artificial Sequence
  Description of Artificial Sequence: Synthetic oligonucleotide
cagagucaucagucggcga

SEQ ID NO: 716846 - RNA, 19 nt, Artificial Sequence
  Description of Artificial Sequence: Synthetic oligonucleotide
gccuaagcacacaggaaga

SEQ ID NO: 716847 - RNA, 19 nt, Artificial Sequence
  Description of Artificial Sequence: Synthetic oligonucleotide
cgguucauaauagcaauca

SEQ ID NO: 716848 - RNA, 19 nt, Artificial Sequence
  Description of Artificial Sequence: Synthetic oligonucleotide
ccccgaacuggcucaaauc

SEQ ID NO: 716849 - RNA, 19 nt, Artificial Sequence
  Description of Artificial Sequence: Synthetic oligonucleotide
cgcauugaccauucaucug

SEQ ID NO: 716850 - RNA, 19 nt, Artificial Sequence
  Description of Artificial Sequence: Synthetic oligonucleotide
caggguccgacaggaccag

SEQ ID NO: 716851 - RNA, 19 nt, Artificial Sequence
  Description of Artificial Sequence: Synthetic oligonucleotide
aggguccgacaggaccagg

SEQ ID NO: 716852 - RNA, 19 nt, Artificial Sequence
  Description of Artificial Sequence: Synthetic oligonucleotide
cuuaugcgucuucuuguau

SEQ ID NO: 716853 - RNA, 19 nt, Artificial Sequence
  Description of Artificial Sequence: Synthetic oligonucleotide
ccaccccuaugugacacag

SEQ ID NO: 716854 - RNA, 19 nt, Artificial Sequence
  Description of Artificial Sequence: Synthetic oligonucleotide
gcacagggcggaauacccc

SEQ ID NO: 716855 - RNA, 19 nt, Artificial Sequence
  Description of Artificial Sequence: Synthetic oligonucleotide
aggagccaucaaacaucuc

SEQ ID NO: 716856 - RNA, 19 nt, Artificial Sequence
  Description of Artificial Sequence: Synthetic oligonucleotide
ggauucaugccuucuccuu

SEQ ID NO: 716857 - RNA, 19 nt, Artificial Sequence
  Description of Artificial Sequence: Synthetic oligonucleotide
cgggccuaagcacacagga

SEQ ID NO: 716858 - RNA, 19 nt, Artificial Sequence
  Description of Artificial Sequence: Synthetic oligonucleotide
ggauucuagcggagguuca

SEQ ID NO: 716859 - RNA, 19 nt, Artificial Sequence
  Description of Artificial Sequence: Synthetic oligonucleotide
gcucgcauugaccauucau

SEQ ID NO: 716860 - RNA, 19 nt, Artificial Sequence
  Description of Artificial Sequence: Synthetic oligonucleotide
ggaauaccccuuucucacu

SEQ ID NO: 716861 - RNA, 19 nt, Artificial Sequence
  Description of Artificial Sequence: Synthetic oligonucleotide
cuuugggauggaggcuuga

SEQ ID NO: 716862 - RNA, 19 nt, Artificial Sequence
  Description of Artificial Sequence: Synthetic oligonucleotide
gcucaccaugcguggaaga

SEQ ID NO: 716863 - RNA, 19 nt, Artificial Sequence
  Description of Artificial Sequence: Synthetic oligonucleotide
agaccugagugggcucagu

SEQ ID NO: 716864 - RNA, 19 nt, Artificial Sequence
  Description of Artificial Sequence: Synthetic oligonucleotide
gacauguguucuggagagu

SEQ ID NO: 716865 - RNA, 19 nt, Artificial Sequence
  Description of Artificial Sequence: Synthetic oligonucleotide
cuagcucgcauugaccauu

SEQ ID NO: 716866 - RNA, 19 nt, Artificial Sequence
  Description of Artificial Sequence: Synthetic oligonucleotide
gccccuguugugacucagg

SEQ ID NO: 716867 - RNA, 19 nt, Artificial Sequence
  Description of Artificial Sequence: Synthetic oligonucleotide
caaguccauucccaugcau

SEQ ID NO: 716868 - RNA, 19 nt, Artificial Sequence
  Description of Artificial Sequence: Synthetic oligonucleotide
cucccucuggaacggaaau

SEQ ID NO: 716869 - RNA, 19 nt, Artificial Sequence
  Description of Artificial Sequence: Synthetic oligonucleotide
gugugucaguuaucacacu

SEQ ID NO: 716870 - RNA, 19 nt, Artificial Sequence
  Description of Artificial Sequence: Synthetic oligonucleotide
ggcucaaaucgcagcuuga

SEQ ID NO: 716871 - RNA, 19 nt, Artificial Sequence
  Description of Artificial Sequence: Synthetic oligonucleotide
cccuacagccacagggaca

SEQ ID NO: 716872 - RNA, 19 nt, Artificial Sequence
  Description of Artificial Sequence: Synthetic oligonucleotide
gcuaacuuucucugagcuu

SEQ ID NO: 716873 - RNA, 19 nt, Artificial Sequence
  Description of Artificial Sequence: Synthetic oligonucleotide
ccuaagcacacaggaagaa

SEQ ID NO: 716874 - RNA, 19 nt, Artificial Sequence
  Description of Artificial Sequence: Synthetic oligonucleotide
gcuuugggauggaggcuug

SEQ ID NO: 716875 - RNA, 19 nt, Artificial Sequence
  Description of Artificial Sequence: Synthetic oligonucleotide
gggcggaauaccccuuucu

SEQ ID NO: 716876 - RNA, 19 nt, Artificial Sequence
  Description of Artificial Sequence: Synthetic oligonucleotide
cacuguccgggacccagcu

SEQ ID NO: 716877 - RNA, 19 nt, Artificial Sequence
  Description of Artificial Sequence: Synthetic oligonucleotide
gccagacaguggcuacaac

SEQ ID NO: 716878 - RNA, 19 nt, Artificial Sequence
  Description of Artificial Sequence: Synthetic oligonucleotide
cgugggaaccaccccuaug

SEQ ID NO: 716879 - RNA, 19 nt, Artificial Sequence
  Description of Artificial Sequence: Synthetic oligonucleotide
ccccuaugugacacaguca

SEQ ID NO: 716880 - RNA, 19 nt, Artificial Sequence
  Description of Artificial Sequence: Synthetic oligonucleotide
gggccuaagcacacaggaa

SEQ ID NO: 716881 - RNA, 19 nt, Artificial Sequence
  Description of Artificial Sequence: Synthetic oligonucleotide
gggcuccacucgaacaauc

SEQ ID NO: 716882 - RNA, 19 nt, Artificial Sequence
  Description of Artificial Sequence: Synthetic oligonucleotide
ccacaugcacuguccggga

SEQ ID NO: 716883 - RNA, 19 nt, Artificial Sequence
  Description of Artificial Sequence: Synthetic oligonucleotide
gcccucgggccuaagcaca

SEQ ID NO: 716884 - RNA, 19 nt, Artificial Sequence
  Description of Artificial Sequence: Synthetic oligonucleotide
gagugacccuggaugcuuu

SEQ ID NO: 716885 - RNA, 19 nt, Artificial Sequence
  Description of Artificial Sequence: Synthetic oligonucleotide
cccaucuugagaugcuuuu

SEQ ID NO: 716886 - RNA, 19 nt, Artificial Sequence
  Description of Artificial Sequence: Synthetic oligonucleotide
cugccaagaucagcucaua

SEQ ID NO: 716887 - RNA, 19 nt, Artificial Sequence
  Description of Artificial Sequence: Synthetic oligonucleotide
ggaugacgacucgaugccu

SEQ ID NO: 716888 - RNA, 19 nt, Artificial Sequence
  Description of Artificial Sequence: Synthetic oligonucleotide
gcgaggacugugaccagcu

SEQ ID NO: 716889 - RNA, 19 nt, Artificial Sequence
  Description of Artificial Sequence: Synthetic oligonucleotide
caccccuaugugacacagu

SEQ ID NO: 716890 - RNA, 19 nt, Artificial Sequence
  Description of Artificial Sequence: Synthetic oligonucleotide
aggcugcgagagccugaua

SEQ ID NO: 716891 - RNA, 19 nt, Artificial Sequence
  Description of Artificial Sequence: Synthetic oligonucleotide
ccaggccauacuuuauuuu

SEQ ID NO: 716892 - RNA, 19 nt, Artificial Sequence
  Description of Artificial Sequence: Synthetic oligonucleotide
ccaucaaguugaucaugau

SEQ ID NO: 716893 - RNA, 19 nt, Artificial Sequence
  Description of Artificial Sequence: Synthetic oligonucleotide
aggccccgaacuggcucaa

SEQ ID NO: 716894 - RNA, 19 nt, Artificial Sequence
  Description of Artificial Sequence: Synthetic oligonucleotide
caggcaggguccagccaau

SEQ ID NO: 716895 - RNA, 19 nt, Artificial Sequence
  Description of Artificial Sequence: Synthetic oligonucleotide
ggggauucuagcggagguu

SEQ ID NO: 716896 - RNA, 19 nt, Artificial Sequence
  Description of Artificial Sequence: Synthetic oligonucleotide
cccucccucuggaacggaa

SEQ ID NO: 716897 - RNA, 19 nt, Artificial Sequence
  Description of Artificial Sequence: Synthetic oligonucleotide
ccuagcucgcauugaccau

SEQ ID NO: 716898 - RNA, 19 nt, Artificial Sequence
  Description of Artificial Sequence: Synthetic oligonucleotide
caguagcacagggcggaau

SEQ ID NO: 716899 - RNA, 19 nt, Artificial Sequence
  Description of Artificial Sequence: Synthetic oligonucleotide
gcgugggaaccaccccuau

SEQ ID NO: 716900 - RNA, 19 nt, Artificial Sequence
  Description of Artificial Sequence: Synthetic oligonucleotide
ggguagcccucgggccuaa

SEQ ID NO: 716901 - RNA, 19 nt, Artificial Sequence
  Description of Artificial Sequence: Synthetic oligonucleotide
cugggccugccugccccau

SEQ ID NO: 716902 - RNA, 19 nt, Artificial Sequence
  Description of Artificial Sequence: Synthetic oligonucleotide
ccccucccucuggaacgga

SEQ ID NO: 716903 - RNA, 19 nt, Artificial Sequence
  Description of Artificial Sequence: Synthetic oligonucleotide
aaaugaaagcucuugggcc

SEQ ID NO: 716904 - RNA, 19 nt, Artificial Sequence
  Description of Artificial Sequence: Synthetic oligonucleotide
ucuauguaaauuaucagcc

SEQ ID NO: 716905 - RNA, 19 nt, Artificial Sequence
  Description of Artificial Sequence: Synthetic oligonucleotide
aacggcuaaauguaggugc

SEQ ID NO: 716906 - RNA, 19 nt, Artificial Sequence
  Description of Artificial Sequence: Synthetic oligonucleotide
aaauguaggugcuucaggg

SEQ ID NO: 716907 - RNA, 19 nt, Artificial Sequence
  Description of Artificial Sequence: Synthetic oligonucleotide
uaaauuaucagccccaccu

SEQ ID NO: 716908 - RNA, 19 nt, Artificial Sequence
  Description of Artificial Sequence: Synthetic oligonucleotide
uaugguaagaagcugcaca

SEQ ID NO: 716909 - RNA, 19 nt, Artificial Sequence
  Description of Artificial Sequence: Synthetic oligonucleotide
ucagccgaauaucaaaggg

SEQ ID NO: 716910 - RNA, 19 nt, Artificial Sequence
  Description of Artificial Sequence: Synthetic oligonucleotide
aaauuaacuccucuguggu

SEQ ID NO: 716911 - RNA, 19 nt, Artificial Sequence
  Description of Artificial Sequence: Synthetic oligonucleotide
aaucaaccagacucaagac

SEQ ID NO: 716912 - RNA, 19 nt, Artificial Sequence
  Description of Artificial Sequence: Synthetic oligonucleotide
ugggagagcacucuuauga

SEQ ID NO: 716913 - RNA, 19 nt, Artificial Sequence
  Description of Artificial Sequence: Synthetic oligonucleotide
uaaauguaggugcuucagg

SEQ ID NO: 716914 - RNA, 19 nt, Artificial Sequence
  Description of Artificial Sequence: Synthetic oligonucleotide
cauaguucgccauauuccg

SEQ ID NO: 716915 - RNA, 19 nt, Artificial Sequence
  Description of Artificial Sequence: Synthetic oligonucleotide
cacacguaugguaagaagc

SEQ ID NO: 716916 - RNA, 19 nt, Artificial Sequence
  Description of Artificial Sequence: Synthetic oligonucleotide
ucauguguaacuugggaga

SEQ ID NO: 716917 - RNA, 19 nt, Artificial Sequence
  Description of Artificial Sequence: Synthetic oligonucleotide
uggcgaauaaccacauugg

SEQ ID NO: 716918 - RNA, 19 nt, Artificial Sequence
  Description of Artificial Sequence: Synthetic oligonucleotide
gaacacgaagcacauugcg

SEQ ID NO: 716919 - RNA, 19 nt, Artificial Sequence
  Description of Artificial Sequence: Synthetic oligonucleotide
aauggcuuaggagcguggc

SEQ ID NO: 716920 - RNA, 19 nt, Artificial Sequence
  Description of Artificial Sequence: Synthetic oligonucleotide
aaauuaucagccccaccug

SEQ ID NO: 716921 - RNA, 19 nt, Artificial Sequence
  Description of Artificial Sequence: Synthetic oligonucleotide
cucauguguaacuugggag

SEQ ID NO: 716922 - RNA, 19 nt, Artificial Sequence
  Description of Artificial Sequence: Synthetic oligonucleotide
cuguaauagaauuaaggca

SEQ ID NO: 716923 - RNA, 19 nt, Artificial Sequence
  Description of Artificial Sequence: Synthetic oligonucleotide
aaauccucaaucaaccaga

SEQ ID NO: 716924 - RNA, 19 nt, Artificial Sequence
  Description of Artificial Sequence: Synthetic oligonucleotide
uuagguauuggcuggguaa

SEQ ID NO: 716925 - RNA, 19 nt, Artificial Sequence
  Description of Artificial Sequence: Synthetic oligonucleotide
ugcacggugagaccggccg

SEQ ID NO: 716926 - RNA, 19 nt, Artificial Sequence
  Description of Artificial Sequence: Synthetic oligonucleotide
ugaguucagccgaauauca

SEQ ID NO: 716927 - RNA, 19 nt, Artificial Sequence
  Description of Artificial Sequence: Synthetic oligonucleotide
ugaagguacagguagggua

SEQ ID NO: 716928 - RNA, 19 nt, Artificial Sequence
  Description of Artificial Sequence: Synthetic oligonucleotide
uccuuagcucccuaaaagc

SEQ ID NO: 716929 - RNA, 19 nt, Artificial Sequence
  Description of Artificial Sequence: Synthetic oligonucleotide
uugaaacggcuaaauguag

SEQ ID NO: 716930 - RNA, 19 nt, Artificial Sequence
  Description of Artificial Sequence: Synthetic oligonucleotide
uggacuaacgaagcaagag

SEQ ID NO: 716931 - RNA, 19 nt, Artificial Sequence
  Description of Artificial Sequence: Synthetic oligonucleotide
uuacccaugugucugucac

SEQ ID NO: 716932 - RNA, 19 nt, Artificial Sequence
  Description of Artificial Sequence: Synthetic oligonucleotide
agaaccuuaaccacugaag

SEQ ID NO: 716933 - RNA, 19 nt, Artificial Sequence
  Description of Artificial Sequence: Synthetic oligonucleotide
cacucuagcaccaggugcc

SEQ ID NO: 716934 - RNA, 19 nt, Artificial Sequence
  Description of Artificial Sequence: Synthetic oligonucleotide
agugagacaccacauggga

SEQ ID NO: 716935 - RNA, 19 nt, Artificial Sequence
  Description of Artificial Sequence: Synthetic oligonucleotide
cuaguggagacaaagacua

SEQ ID NO: 716936 - RNA, 19 nt, Artificial Sequence
  Description of Artificial Sequence: Synthetic oligonucleotide
aacaccaaguaggccagcg

SEQ ID NO: 716937 - RNA, 19 nt, Artificial Sequence
  Description of Artificial Sequence: Synthetic oligonucleotide
agugcgacgaaggugguag

SEQ ID NO: 716938 - RNA, 19 nt, Artificial Sequence
  Description of Artificial Sequence: Synthetic oligonucleotide
uguuccaggaccaguagua

SEQ ID NO: 716939 - RNA, 19 nt, Artificial Sequence
  Description of Artificial Sequence: Synthetic oligonucleotide
caguaguagaucaggguag

SEQ ID NO: 716940 - RNA, 19 nt, Artificial Sequence
  Description of Artificial Sequence: Synthetic oligonucleotide
acgaagcaagagaagacgc

SEQ ID NO: 716941 - RNA, 19 nt, Artificial Sequence
  Description of Artificial Sequence: Synthetic oligonucleotide
auuaaggcaaacuggccaa

SEQ ID NO: 716942 - RNA, 19 nt, Artificial Sequence
  Description of Artificial Sequence: Synthetic oligonucleotide
cagccgaauaucaaagggc

SEQ ID NO: 716943 - RNA, 19 nt, Artificial Sequence
  Description of Artificial Sequence: Synthetic oligonucleotide
guccuuagcucccuaaaag

SEQ ID NO: 716944 - RNA, 19 nt, Artificial Sequence
  Description of Artificial Sequence: Synthetic oligonucleotide
aauccucaaucaaccagac

SEQ ID NO: 716945 - RNA, 19 nt, Artificial Sequence
  Description of Artificial Sequence: Synthetic oligonucleotide
uggcuuaggagcguggcgg

SEQ ID NO: 716946 - RNA, 19 nt, Artificial Sequence
  Description of Artificial Sequence: Synthetic oligonucleotide
cacauaguucgccauauuc

SEQ ID NO: 716947 - RNA, 19 nt, Artificial Sequence
  Description of Artificial Sequence: Synthetic oligonucleotide
ugaaguacccuuccugauc

SEQ ID NO: 716948 - RNA, 19 nt, Artificial Sequence
  Description of Artificial Sequence: Synthetic oligonucleotide
cuagcuaagccuguacugc

SEQ ID NO: 716949 - RNA, 19 nt, Artificial Sequence
  Description of Artificial Sequence: Synthetic oligonucleotide
gaagacgccaaaagcacug

SEQ ID NO: 716950 - RNA, 19 nt, Artificial Sequence
  Description of Artificial Sequence: Synthetic oligonucleotide
cacaugcccauguaguagc

SEQ ID NO: 716951 - RNA, 19 nt, Artificial Sequence
  Description of Artificial Sequence: Synthetic oligonucleotide
ugcuaggcaacccuugaaa

SEQ ID NO: 716952 - RNA, 19 nt, Artificial Sequence
  Description of Artificial Sequence: Synthetic oligonucleotide
aacuccguauugauggaag

SEQ ID NO: 716953 - RNA, 19 nt, Artificial Sequence
  Description of Artificial Sequence: Synthetic oligonucleotide
uaguucgccauauuccgcu

SEQ ID NO: 716954 - RNA, 19 nt, Artificial Sequence
  Description of Artificial Sequence: Synthetic oligonucleotide
cuaaauguaggugcuucag

SEQ ID NO: 716955 - RNA, 19 nt, Artificial Sequence
  Description of Artificial Sequence: Synthetic oligonucleotide
aguggagacaaagacuaug

SEQ ID NO: 716956 - RNA, 19 nt, Artificial Sequence
  Description of Artificial Sequence: Synthetic oligonucleotide
acucguugggcgugaacac

SEQ ID NO: 716957 - RNA, 19 nt, Artificial Sequence
  Description of Artificial Sequence: Synthetic oligonucleotide
aaacggcuaaauguaggug

SEQ ID NO: 716958 - RNA, 19 nt, Artificial Sequence
  Description of Artificial Sequence: Synthetic oligonucleotide
agcuuaagcaacccucaug

SEQ ID NO: 716959 - RNA, 19 nt, Artificial Sequence
  Description of Artificial Sequence: Synthetic oligonucleotide
gagaagacgccaaaagcac

SEQ ID NO: 716960 - RNA, 19 nt, Artificial Sequence
  Description of Artificial Sequence: Synthetic oligonucleotide
uggccguacuucaaggaca

SEQ ID NO: 716961 - RNA, 19 nt, Artificial Sequence
  Description of Artificial Sequence: Synthetic oligonucleotide
gguaacuaggaagagagga

SEQ ID NO: 716962 - RNA, 19 nt, Artificial Sequence
  Description of Artificial Sequence: Synthetic oligonucleotide
agaccggccgaguaaaacu

SEQ ID NO: 716963 - RNA, 19 nt, Artificial Sequence
  Description of Artificial Sequence: Synthetic oligonucleotide
cuaagccuguacugcagcc

SEQ ID NO: 716964 - RNA, 19 nt, Artificial Sequence
  Description of Artificial Sequence: Synthetic oligonucleotide
agguaggguauuuccauga

SEQ ID NO: 716965 - RNA, 19 nt, Artificial Sequence
  Description of Artificial Sequence: Synthetic oligonucleotide
guagaaccuuuugucaagg

SEQ ID NO: 716966 - RNA, 19 nt, Artificial Sequence
  Description of Artificial Sequence: Synthetic oligonucleotide
uccuggccguacuucaagg

SEQ ID NO: 716967 - RNA, 19 nt, Artificial Sequence
  Description of Artificial Sequence: Synthetic oligonucleotide
agcagugaauggcuuagga

SEQ ID NO: 716968 - RNA, 19 nt, Artificial Sequence
  Description of Artificial Sequence: Synthetic oligonucleotide
uugcccaugcaagugagac

SEQ ID NO: 716969 - RNA, 19 nt, Artificial Sequence
  Description of Artificial Sequence: Synthetic oligonucleotide
gccgaguaaaacucguugg

SEQ ID NO: 716970 - RNA, 19 nt, Artificial Sequence
  Description of Artificial Sequence: Synthetic oligonucleotide
gccaaaagcacugugggcc

SEQ ID NO: 716971 - RNA, 19 nt, Artificial Sequence
  Description of Artificial Sequence: Synthetic oligonucleotide
auaguucgccauauuccgc

SEQ ID NO: 716972 - RNA, 19 nt, Artificial Sequence
  Description of Artificial Sequence: Synthetic oligonucleotide
uaucaaagggcugcauagc

SEQ ID NO: 716973 - RNA, 19 nt, Artificial Sequence
  Description of Artificial Sequence: Synthetic oligonucleotide
guaaauuaucagccccacc

SEQ ID NO: 716974 - RNA, 19 nt, Artificial Sequence
  Description of Artificial Sequence: Synthetic oligonucleotide
auggcuuaggagcguggcg

SEQ ID NO: 716975 - RNA, 19 nt, Artificial Sequence
  Description of Artificial Sequence: Synthetic oligonucleotide
uagcccaacggcagcagug

SEQ ID NO: 716976 - RNA, 19 nt, Artificial Sequence
  Description of Artificial Sequence: Synthetic oligonucleotide
auaaccacauuggcugcac

SEQ ID NO: 716977 - RNA, 19 nt, Artificial Sequence
  Description of Artificial Sequence: Synthetic oligonucleotide
cauguguaacuugggagag

SEQ ID NO: 716978 - RNA, 19 nt, Artificial Sequence
  Description of Artificial Sequence: Synthetic oligonucleotide
caugugucugucacaauca

SEQ ID NO: 716979 - RNA, 19 nt, Artificial Sequence
  Description of Artificial Sequence: Synthetic oligonucleotide
uucggauuggggcguggag

SEQ ID NO: 716980 - RNA, 19 nt, Artificial Sequence
  Description of Artificial Sequence: Synthetic oligonucleotide
agccgaauaucaaagggcu

SEQ ID NO: 716981 - RNA, 19 nt, Artificial Sequence
  Description of Artificial Sequence: Synthetic oligonucleotide
cacgaaagcggcguccucg

SEQ ID NO: 716982 - RNA, 19 nt, Artificial Sequence
  Description of Artificial Sequence: Synthetic oligonucleotide
gcuugaaacggcuaaaugu

SEQ ID NO: 716983 - RNA, 19 nt, Artificial Sequence
  Description of Artificial Sequence: Synthetic oligonucleotide
uuccaggaccaguaguaga

SEQ ID NO: 716984 - RNA, 19 nt, Artificial Sequence
  Description of Artificial Sequence: Synthetic oligonucleotide
acuaacgaagcaagagaag

SEQ ID NO: 716985 - RNA, 19 nt, Artificial Sequence
  Description of Artificial Sequence: Synthetic oligonucleotide
gaacccacaagagcccuag

SEQ ID NO: 716986 - RNA, 19 nt, Artificial Sequence
  Description of Artificial Sequence: Synthetic oligonucleotide
acacguaugguaagaagcu

SEQ ID NO: 716987 - RNA, 19 nt, Artificial Sequence
  Description of Artificial Sequence: Synthetic oligonucleotide
ucucacauaguucgccaua

SEQ ID NO: 716988 - RNA, 19 nt, Artificial Sequence
  Description of Artificial Sequence: Synthetic oligonucleotide
acuacugcuugaaacggcu

SEQ ID NO: 716989 - RNA, 19 nt, Artificial Sequence
  Description of Artificial Sequence: Synthetic oligonucleotide
cacuacugcuugaaacggc

SEQ ID NO: 716990 - RNA, 19 nt, Artificial Sequence
  Description of Artificial Sequence: Synthetic oligonucleotide
ucccuaaaagcccucccua

SEQ ID NO: 716991 - RNA, 19 nt, Artificial Sequence
  Description of Artificial Sequence: Synthetic oligonucleotide
gagagaucgugcugccgag

SEQ ID NO: 716992 - RNA, 19 nt, Artificial Sequence
  Description of Artificial Sequence: Synthetic oligonucleotide
gacggcaauaacacugcug

SEQ ID NO: 716993 - RNA, 19 nt, Artificial Sequence
  Description of Artificial Sequence: Synthetic oligonucleotide
cuggauagugcuguaguuc

SEQ ID NO: 716994 - RNA, 19 nt, Artificial Sequence
  Description of Artificial Sequence: Synthetic oligonucleotide
uagugcucgccacacguau

SEQ ID NO: 716995 - RNA, 19 nt, Artificial Sequence
  Description of Artificial Sequence: Synthetic oligonucleotide
gcuuaagcaacccucaugu

SEQ ID NO: 716996 - RNA, 19 nt, Artificial Sequence
  Description of Artificial Sequence: Synthetic oligonucleotide
cuggccguacuucaaggac

SEQ ID NO: 716997 - RNA, 19 nt, Artificial Sequence
  Description of Artificial Sequence: Synthetic oligonucleotide
aagcuuaagcaacccucau

SEQ ID NO: 716998 - RNA, 19 nt, Artificial Sequence
  Description of Artificial Sequence: Synthetic oligonucleotide
uguaucagagauggccaac

SEQ ID NO: 716999 - RNA, 19 nt, Artificial Sequence
  Description of Artificial Sequence: Synthetic oligonucleotide
ucauuacccaugugucugu

SEQ ID NO: 717000 - RNA, 19 nt, Artificial Sequence
  Description of Artificial Sequence: Synthetic oligonucleotide
cacaagagcccuagcuaag

SEQ ID NO: 717001 - RNA, 19 nt, Artificial Sequence
  Description of Artificial Sequence: Synthetic oligonucleotide
ggcgaauaaccacauuggc

SEQ ID NO: 717002 - RNA, 19 nt, Artificial Sequence
  Description of Artificial Sequence: Synthetic oligonucleotide
ccuggacuaacgaagcaag

SEQ ID NO: 717003 - RNA, 19 nt, Artificial Sequence
  Description of Artificial Sequence: Synthetic oligonucleotide
guaggguauuuccaugaga

SEQ ID NO: 717004 - RNA, 19 nt, Artificial Sequence
  Description of Artificial Sequence: Synthetic oligonucleotide
ccgaauaucaaagggcugc

SEQ ID NO: 717005 - RNA, 19 nt, Artificial Sequence
  Description of Artificial Sequence: Synthetic oligonucleotide
auuacccaugugucuguca

SEQ ID NO: 717006 - RNA, 19 nt, Artificial Sequence
  Description of Artificial Sequence: Synthetic oligonucleotide
ccgaguaaaacucguuggg

SEQ ID NO: 717007 - RNA, 19 nt, Artificial Sequence
  Description of Artificial Sequence: Synthetic oligonucleotide
cuuuagccaccccucauca

SEQ ID NO: 717008 - RNA, 19 nt, Artificial Sequence
  Description of Artificial Sequence: Synthetic oligonucleotide
ucuccccuggacuaacgaa

SEQ ID NO: 717009 - RNA, 19 nt, Artificial Sequence
  Description of Artificial Sequence: Synthetic oligonucleotide
acggcuggcaaaccacuug

SEQ ID NO: 717010 - RNA, 19 nt, Artificial Sequence
  Description of Artificial Sequence: Synthetic oligonucleotide
ggaccaguaguagaucagg

SEQ ID NO: 717011 - RNA, 19 nt, Artificial Sequence
  Description of Artificial Sequence: Synthetic oligonucleotide
ggccgaguaaaacucguug

SEQ ID NO: 717012 - RNA, 19 nt, Artificial Sequence
  Description of Artificial Sequence: Synthetic oligonucleotide
cuuaggagcguggcggaag

SEQ ID NO: 717013 - RNA, 19 nt, Artificial Sequence
  Description of Artificial Sequence: Synthetic oligonucleotide
guuggagagguccucccuc

SEQ ID NO: 717014 - RNA, 19 nt, Artificial Sequence
  Description of Artificial Sequence: Synthetic oligonucleotide
cagguaggguauuuccaug

SEQ ID NO: 717015 - RNA, 19 nt, Artificial Sequence
  Description of Artificial Sequence: Synthetic oligonucleotide
uggcauucgcccaccgcug

SEQ ID NO: 717016 - RNA, 19 nt, Artificial Sequence
  Description of Artificial Sequence: Synthetic oligonucleotide
guaucagagauggccaaca

SEQ ID NO: 717017 - RNA, 19 nt, Artificial Sequence
  Description of Artificial Sequence: Synthetic oligonucleotide
acccuugaaacuggcugac

SEQ ID NO: 717018 - RNA, 19 nt, Artificial Sequence
  Description of Artificial Sequence: Synthetic oligonucleotide
agcguaaaggucaccucag

SEQ ID NO: 717019 - RNA, 19 nt, Artificial Sequence
  Description of Artificial Sequence: Synthetic oligonucleotide
uaacuugggagagcacucu

SEQ ID NO: 717020 - RNA, 19 nt, Artificial Sequence
  Description of Artificial Sequence: Synthetic oligonucleotide
uaaaacucguugggcguga

SEQ ID NO: 717021 - RNA, 19 nt, Artificial Sequence
  Description of Artificial Sequence: Synthetic oligonucleotide
gguaggguauuuccaugag

SEQ ID NO: 717022 - RNA, 19 nt, Artificial Sequence
  Description of Artificial Sequence: Synthetic oligonucleotide
cucgccacacguaugguaa

SEQ ID NO: 717023 - RNA, 19 nt, Artificial Sequence
  Description of Artificial Sequence: Synthetic oligonucleotide
cucguugggcgugaacacg

SEQ ID NO: 717024 - RNA, 19 nt, Artificial Sequence
  Description of Artificial Sequence: Synthetic oligonucleotide
ugcccaugcaagugagaca

SEQ ID NO: 717025 - RNA, 19 nt, Artificial Sequence
  Description of Artificial Sequence: Synthetic oligonucleotide
gcgcuggggauccugacgg

SEQ ID NO: 717026 - RNA, 19 nt, Artificial Sequence
  Description of Artificial Sequence: Synthetic oligonucleotide
ccuagcuaagccuguacug

SEQ ID NO: 717027 - RNA, 19 nt, Artificial Sequence
  Description of Artificial Sequence: Synthetic oligonucleotide
augaucuguaauagaauua

SEQ ID NO: 717028 - RNA, 19 nt, Artificial Sequence
  Description of Artificial Sequence: Synthetic oligonucleotide
ugcgaugcucagcguacac

SEQ ID NO: 717029 - RNA, 19 nt, Artificial Sequence
  Description of Artificial Sequence: Synthetic oligonucleotide
ggucugucacuacugcuug

SEQ ID NO: 717030 - RNA, 19 nt, Artificial Sequence
  Description of Artificial Sequence: Synthetic oligonucleotide
aagacgccaaaagcacugu

SEQ ID NO: 717031 - RNA, 19 nt, Artificial Sequence
  Description of Artificial Sequence: Synthetic oligonucleotide
caggguuagugcucgccac

SEQ ID NO: 717032 - RNA, 19 nt, Artificial Sequence
  Description of Artificial Sequence: Synthetic oligonucleotide
aguucgccauauuccgcug

SEQ ID NO: 717033 - RNA, 19 nt, Artificial Sequence
  Description of Artificial Sequence: Synthetic oligonucleotide
agaagacgccaaaagcacu

SEQ ID NO: 717034 - RNA, 19 nt, Artificial Sequence
  Description of Artificial Sequence: Synthetic oligonucleotide
cauauuccgcugaguucag

SEQ ID NO: 717035 - RNA, 19 nt, Artificial Sequence
  Description of Artificial Sequence: Synthetic oligonucleotide
auguuucuaggaagagguc

SEQ ID NO: 717036 - RNA, 19 nt, Artificial Sequence
  Description of Artificial Sequence: Synthetic oligonucleotide
cagguagauuugagucugg

SEQ ID NO: 717037 - RNA, 19 nt, Artificial Sequence
  Description of Artificial Sequence: Synthetic oligonucleotide
aggaccaguaguagaucag

SEQ ID NO: 717038 - RNA, 19 nt, Artificial Sequence
  Description of Artificial Sequence: Synthetic oligonucleotide
uggcggaagugcgacgaag

SEQ ID NO: 717039 - RNA, 19 nt, Artificial Sequence
  Description of Artificial Sequence: Synthetic oligonucleotide
gagaccggccgaguaaaac

SEQ ID NO: 717040 - RNA, 19 nt, Artificial Sequence
  Description of Artificial Sequence: Synthetic oligonucleotide
cacguaugguaagaagcug

SEQ ID NO: 717041 - RNA, 19 nt, Artificial Sequence
  Description of Artificial Sequence: Synthetic oligonucleotide
agguaacuaggaagagagg

SEQ ID NO: 717042 - RNA, 19 nt, Artificial Sequence
  Description of Artificial Sequence: Synthetic oligonucleotide
ucgccacacguaugguaag

SEQ ID NO: 717043 - RNA, 19 nt, Artificial Sequence
  Description of Artificial Sequence: Synthetic oligonucleotide
ggcucuggcgaauaaccac

SEQ ID NO: 717044 - RNA, 19 nt, Artificial Sequence
  Description of Artificial Sequence: Synthetic oligonucleotide
aauccgccggaacuccgua

SEQ ID NO: 717045 - RNA, 19 nt, Artificial Sequence
  Description of Artificial Sequence: Synthetic oligonucleotide
guuagguauuggcugggua

SEQ ID NO: 717046 - RNA, 19 nt, Artificial Sequence
  Description of Artificial Sequence: Synthetic oligonucleotide
agggccgggagugugagau

SEQ ID NO: 717047 - RNA, 19 nt, Artificial Sequence
  Description of Artificial Sequence: Synthetic oligonucleotide
gaccggccgaguaaaacuc

SEQ ID NO: 717048 - RNA, 19 nt, Artificial Sequence
  Description of Artificial Sequence: Synthetic oligonucleotide
cuaaagcuuaagcaacccu

SEQ ID NO: 717049 - RNA, 19 nt, Artificial Sequence
  Description of Artificial Sequence: Synthetic oligonucleotide
uaguggagacaaagacuau

SEQ ID NO: 717050 - RNA, 19 nt, Artificial Sequence
  Description of Artificial Sequence: Synthetic oligonucleotide
cccucuaaagcuuaagcaa

SEQ ID NO: 717051 - RNA, 19 nt, Artificial Sequence
  Description of Artificial Sequence: Synthetic oligonucleotide
acggcuaaauguaggugcu

SEQ ID NO: 717052 - RNA, 19 nt, Artificial Sequence
  Description of Artificial Sequence: Synthetic oligonucleotide
acugcuugaaacggcuaaa

SEQ ID NO: 717053 - RNA, 19 nt, Artificial Sequence
  Description of Artificial Sequence: Synthetic oligonucleotide
gguuagugcucgccacacg

SEQ ID NO: 717054 - RNA, 19 nt, Artificial Sequence
  Description of Artificial Sequence: Synthetic oligonucleotide
ccacauuggcugcacuucg

SEQ ID NO: 717055 - RNA, 19 nt, Artificial Sequence
  Description of Artificial Sequence: Synthetic oligonucleotide
cuggacuaacgaagcaaga

SEQ ID NO: 717056 - RNA, 19 nt, Artificial Sequence
  Description of Artificial Sequence: Synthetic oligonucleotide
gugagagaucgugcugccg

SEQ ID NO: 717057 - RNA, 19 nt, Artificial Sequence
  Description of Artificial Sequence: Synthetic oligonucleotide
gcguaaaggucaccucagg

SEQ ID NO: 717058 - RNA, 19 nt, Artificial Sequence
  Description of Artificial Sequence: Synthetic oligonucleotide
ggugagagaucgugcugcc

SEQ ID NO: 717059 - RNA, 19 nt, Artificial Sequence
  Description of Artificial Sequence: Synthetic oligonucleotide
gaugcucagcguacacaac

SEQ ID NO: 717060 - RNA, 19 nt, Artificial Sequence
  Description of Artificial Sequence: Synthetic oligonucleotide
ugcugccgagacucuguca

SEQ ID NO: 717061 - RNA, 19 nt, Artificial Sequence
  Description of Artificial Sequence: Synthetic oligonucleotide
ccaguaguagaucagggua

SEQ ID NO: 717062 - RNA, 19 nt, Artificial Sequence
  Description of Artificial Sequence: Synthetic oligonucleotide
ucuggcgaauaaccacauu

SEQ ID NO: 717063 - RNA, 19 nt, Artificial Sequence
  Description of Artificial Sequence: Synthetic oligonucleotide
gcuuuagccaccccucauc

SEQ ID NO: 717064 - RNA, 19 nt, Artificial Sequence
  Description of Artificial Sequence: Synthetic oligonucleotide
cacuugcccaugcaaguga

SEQ ID NO: 717065 - RNA, 19 nt, Artificial Sequence
  Description of Artificial Sequence: Synthetic oligonucleotide
guaacuaggaagagaggau

SEQ ID NO: 717066 - RNA, 19 nt, Artificial Sequence
  Description of Artificial Sequence: Synthetic oligonucleotide
guucgccauauuccgcuga

SEQ ID NO: 717067 - RNA, 19 nt, Artificial Sequence
  Description of Artificial Sequence: Synthetic oligonucleotide
aggcaacccuugaaacugg

SEQ ID NO: 717068 - RNA, 19 nt, Artificial Sequence
  Description of Artificial Sequence: Synthetic oligonucleotide
ugagaccggccgaguaaaa

SEQ ID NO: 717069 - RNA, 19 nt, Artificial Sequence
  Description of Artificial Sequence: Synthetic oligonucleotide
ggcauucgcccaccgcugg

SEQ ID NO: 717070 - RNA, 19 nt, Artificial Sequence
  Description of Artificial Sequence: Synthetic oligonucleotide
gaacuccguauugauggaa

SEQ ID NO: 717071 - RNA, 19 nt, Artificial Sequence
  Description of Artificial Sequence: Synthetic oligonucleotide
cacggugagaccggccgag

SEQ ID NO: 717072 - RNA, 19 nt, Artificial Sequence
  Description of Artificial Sequence: Synthetic oligonucleotide
gggacggcaauaacacugc

SEQ ID NO: 717073 - RNA, 19 nt, Artificial Sequence
  Description of Artificial Sequence: Synthetic oligonucleotide
gaguucagccgaauaucaa

SEQ ID NO: 717074 - RNA, 19 nt, Artificial Sequence
  Description of Artificial Sequence: Synthetic oligonucleotide
cugaauaggcuggguugac

SEQ ID NO: 717075 - RNA, 19 nt, Artificial Sequence
  Description of Artificial Sequence: Synthetic oligonucleotide
aaaacucguugggcgugaa

SEQ ID NO: 717076 - RNA, 19 nt, Artificial Sequence
  Description of Artificial Sequence: Synthetic oligonucleotide
cgaguaaaacucguugggc

SEQ ID NO: 717077 - RNA, 19 nt, Artificial Sequence
  Description of Artificial Sequence: Synthetic oligonucleotide
gucuccccuggacuaacga

SEQ ID NO: 717078 - RNA, 19 nt, Artificial Sequence
  Description of Artificial Sequence: Synthetic oligonucleotide
gguccuuagcucccuaaaa

SEQ ID NO: 717079 - RNA, 19 nt, Artificial Sequence
  Description of Artificial Sequence: Synthetic oligonucleotide
cagcagugaauggcuuagg

SEQ ID NO: 717080 - RNA, 19 nt, Artificial Sequence
  Description of Artificial Sequence: Synthetic oligonucleotide
acuucggauuggggcgugg

SEQ ID NO: 717081 - RNA, 19 nt, Artificial Sequence
  Description of Artificial Sequence: Synthetic oligonucleotide
agugcucgccacacguaug

SEQ ID NO: 717082 - RNA, 19 nt, Artificial Sequence
  Description of Artificial Sequence: Synthetic oligonucleotide
cauuacccaugugucuguc

SEQ ID NO: 717083 - RNA, 19 nt, Artificial Sequence
  Description of Artificial Sequence: Synthetic oligonucleotide
ggugagaccggccgaguaa

SEQ ID NO: 717084 - RNA, 19 nt, Artificial Sequence
  Description of Artificial Sequence: Synthetic oligonucleotide
ccgagacucugucacaguc

SEQ ID NO: 717085 - RNA, 19 nt, Artificial Sequence
  Description of Artificial Sequence: Synthetic oligonucleotide
gcuaguggagacaaagacu

SEQ ID NO: 717086 - RNA, 19 nt, Artificial Sequence
  Description of Artificial Sequence: Synthetic oligonucleotide
agcacauugcgaacaccaa

SEQ ID NO: 717087 - RNA, 19 nt, Artificial Sequence
  Description of Artificial Sequence: Synthetic oligonucleotide
gcgaauaaccacauuggcu

SEQ ID NO: 717088 - RNA, 19 nt, Artificial Sequence
  Description of Artificial Sequence: Synthetic oligonucleotide
cucuagcaccaggugcccc

SEQ ID NO: 717089 - RNA, 19 nt, Artificial Sequence
  Description of Artificial Sequence: Synthetic oligonucleotide
augaaagcucuugggccaa

SEQ ID NO: 717090 - RNA, 19 nt, Artificial Sequence
  Description of Artificial Sequence: Synthetic oligonucleotide
uuggucuccccuggacuaa

SEQ ID NO: 717091 - RNA, 19 nt, Artificial Sequence
  Description of Artificial Sequence: Synthetic oligonucleotide
ggaacuccguauugaugga

SEQ ID NO: 717092 - RNA, 19 nt, Artificial Sequence
  Description of Artificial Sequence: Synthetic oligonucleotide
cucccuaaaagcccucccu

SEQ ID NO: 717093 - RNA, 19 nt, Artificial Sequence
  Description of Artificial Sequence: Synthetic oligonucleotide
gugagaccggccgaguaaa

SEQ ID NO: 717094 - RNA, 19 nt, Artificial Sequence
  Description of Artificial Sequence: Synthetic oligonucleotide
aagugcgacgaagguggua

SEQ ID NO: 717095 - RNA, 19 nt, Artificial Sequence
  Description of Artificial Sequence: Synthetic oligonucleotide
agccaagugucagggcgcu

SEQ ID NO: 717096 - RNA, 19 nt, Artificial Sequence
  Description of Artificial Sequence: Synthetic oligonucleotide
auccgccggaacuccguau

SEQ ID NO: 717097 - RNA, 19 nt, Artificial Sequence
  Description of Artificial Sequence: Synthetic oligonucleotide
uaggagcguggcggaagug

SEQ ID NO: 717098 - RNA, 19 nt, Artificial Sequence
  Description of Artificial Sequence: Synthetic oligonucleotide
gcuggcauucgcccaccgc

SEQ ID NO: 717099 - RNA, 19 nt, Artificial Sequence
  Description of Artificial Sequence: Synthetic oligonucleotide
gcaacccucauguguaacu

SEQ ID NO: 717100 - RNA, 19 nt, Artificial Sequence
  Description of Artificial Sequence: Synthetic oligonucleotide
caguggcuaguggagacaa

SEQ ID NO: 717101 - RNA, 19 nt, Artificial Sequence
  Description of Artificial Sequence: Synthetic oligonucleotide
ggguuagugcucgccacac

SEQ ID NO: 717102 - RNA, 19 nt, Artificial Sequence
  Description of Artificial Sequence: Synthetic oligonucleotide
cuucggauuggggcgugga

SEQ ID NO: 717103 - RNA, 19 nt, Artificial Sequence
  Description of Artificial Sequence: Synthetic oligonucleotide
uagggccgggagugugaga

SEQ ID NO: 717104 - RNA, 19 nt, Artificial Sequence
  Description of Artificial Sequence: Synthetic oligonucleotide
cgccaaaagcacugugggc

SEQ ID NO: 717105 - RNA, 19 nt, Artificial Sequence
  Description of Artificial Sequence: Synthetic oligonucleotide
ggcuggcaaaccacuugcc

SEQ ID NO: 717106 - RNA, 19 nt, Artificial Sequence
  Description of Artificial Sequence: Synthetic oligonucleotide
ggcuuaggagcguggcgga

SEQ ID NO: 717107 - RNA, 19 nt, Artificial Sequence
  Description of Artificial Sequence: Synthetic oligonucleotide
gcauucgcccaccgcuggc

SEQ ID NO: 717108 - RNA, 19 nt, Artificial Sequence
  Description of Artificial Sequence: Synthetic oligonucleotide
gcccuagcuaagccuguac

SEQ ID NO: 717109 - RNA, 19 nt, Artificial Sequence
  Description of Artificial Sequence: Synthetic oligonucleotide
cacuagggaggcaaauguu

SEQ ID NO: 717110 - RNA, 19 nt, Artificial Sequence
  Description of Artificial Sequence: Synthetic oligonucleotide
gcaaaucccugggguuagg

SEQ ID NO: 717111 - RNA, 19 nt, Artificial Sequence
  Description of Artificial Sequence: Synthetic oligonucleotide
cacgguauguugucacuuu

SEQ ID NO: 717112 - RNA, 19 nt, Artificial Sequence
  Description of Artificial Sequence: Synthetic oligonucleotide
caauccgccggaacuccgu

SEQ ID NO: 717113 - RNA, 19 nt, Artificial Sequence
  Description of Artificial Sequence: Synthetic oligonucleotide
gcacugaauaggcuggguu

SEQ ID NO: 717114 - RNA, 19 nt, Artificial Sequence
  Description of Artificial Sequence: Synthetic oligonucleotide
cgagacucugucacaguca

SEQ ID NO: 717115 - RNA, 19 nt, Artificial Sequence
  Description of Artificial Sequence: Synthetic oligonucleotide
gcgaugcucagcguacaca

SEQ ID NO: 717116 - RNA, 19 nt, Artificial Sequence
  Description of Artificial Sequence: Synthetic oligonucleotide
caaaucccugggguuaggu

SEQ ID NO: 717117 - RNA, 19 nt, Artificial Sequence
  Description of Artificial Sequence: Synthetic oligonucleotide
cucuggcgaauaaccacau

SEQ ID NO: 717118 - RNA, 19 nt, Artificial Sequence
  Description of Artificial Sequence: Synthetic oligonucleotide
aguggcuaguggagacaaa

SEQ ID NO: 717119 - RNA, 19 nt, Artificial Sequence
  Description of Artificial Sequence: Synthetic oligonucleotide
acggugagaccggccgagu

SEQ ID NO: 717120 - RNA, 19 nt, Artificial Sequence
  Description of Artificial Sequence: Synthetic oligonucleotide
agcccuagcuaagccugua

SEQ ID NO: 717121 - RNA, 19 nt, Artificial Sequence
  Description of Artificial Sequence: Synthetic oligonucleotide
cacuucggauuggggcgug

SEQ ID NO: 717122 - RNA, 19 nt, Artificial Sequence
  Description of Artificial Sequence: Synthetic oligonucleotide
gccccaguagcaaacuugu

SEQ ID NO: 717123 - RNA, 19 nt, Artificial Sequence
  Description of Artificial Sequence: Synthetic oligonucleotide
gccacacguaugguaagaa

SEQ ID NO: 717124 - RNA, 19 nt, Artificial Sequence
  Description of Artificial Sequence: Synthetic oligonucleotide
guggcggaagugcgacgaa

SEQ ID NO: 717125 - RNA, 19 nt, Artificial Sequence
  Description of Artificial Sequence: Synthetic oligonucleotide
cauucgcccaccgcuggcu

SEQ ID NO: 717126 - RNA, 19 nt, Artificial Sequence
  Description of Artificial Sequence: Synthetic oligonucleotide
cccuagcuaagccuguacu

SEQ ID NO: 717127 - RNA, 19 nt, Artificial Sequence
  Description of Artificial Sequence: Synthetic oligonucleotide
ccuagggccgggaguguga

SEQ ID NO: 717128 - RNA, 19 nt, Artificial Sequence
  Description of Artificial Sequence: Synthetic oligonucleotide
ccaaguaggccagcguaaa

SEQ ID NO: 717129 - RNA, 19 nt, Artificial Sequence
  Description of Artificial Sequence: Synthetic oligonucleotide
gcacggugagaccggccga

SEQ ID NO: 717130 - RNA, 19 nt, Artificial Sequence
  Description of Artificial Sequence: Synthetic oligonucleotide
ccccaguagcaaacuuguc

SEQ ID NO: 717131 - RNA, 19 nt, Artificial Sequence
  Description of Artificial Sequence: Synthetic oligonucleotide
ccgccggaacuccguauug

SEQ ID NO: 717132 - RNA, 19 nt, Artificial Sequence
  Description of Artificial Sequence: Synthetic oligonucleotide
gacggcuggcaaaccacuu

SEQ ID NO: 717133 - RNA, 19 nt, Artificial Sequence
  Description of Artificial Sequence: Synthetic oligonucleotide
gcugacuccuggccguacu

SEQ ID NO: 717134 - RNA, 19 nt, Artificial Sequence
  Description of Artificial Sequence: Synthetic oligonucleotide
gccguacuucaaggacagg

SEQ ID NO: 717135 - RNA, 19 nt, Artificial Sequence
  Description of Artificial Sequence: Synthetic oligonucleotide
ggcacgaaagcggcguccu

SEQ ID NO: 717136 - RNA, 19 nt, Artificial Sequence
  Description of Artificial Sequence: Synthetic oligonucleotide
ggacggcaauaacacugcu

SEQ ID NO: 717137 - RNA, 19 nt, Artificial Sequence
  Description of Artificial Sequence: Synthetic oligonucleotide
cugacuccuggccguacuu

SEQ ID NO: 717138 - RNA, 19 nt, Artificial Sequence
  Description of Artificial Sequence: Synthetic oligonucleotide
cguggcggaagugcgacga

SEQ ID NO: 717139 - RNA, 19 nt, Artificial Sequence
  Description of Artificial Sequence: Synthetic oligonucleotide
gcacgaaagcggcguccuc

SEQ ID NO: 717140 - RNA, 19 nt, Artificial Sequence
  Description of Artificial Sequence: Synthetic oligonucleotide
cacggcuagccagccaagu

SEQ ID NO: 717141 - RNA, 19 nt, Artificial Sequence
  Description of Artificial Sequence: Synthetic oligonucleotide
gugccccaguagcaaacuu

SEQ ID NO: 717142 - RNA, 19 nt, Artificial Sequence
  Description of Artificial Sequence: Synthetic oligonucleotide
gcuggggauccugacggcu

SEQ ID NO: 717143 - RNA, 19 nt, Artificial Sequence
  Description of Artificial Sequence: Synthetic oligonucleotide
cacaugcacacgguauguu

SEQ ID NO: 717144 - RNA, 19 nt, Artificial Sequence
  Description of Artificial Sequence: Synthetic oligonucleotide
gcguggagcuucucacaua

SEQ ID NO: 717145 - RNA, 19 nt, Artificial Sequence
  Description of Artificial Sequence: Synthetic oligonucleotide
gcuuaggagcguggcggaa

SEQ ID NO: 717146 - RNA, 19 nt, Artificial Sequence
  Description of Artificial Sequence: Synthetic oligonucleotide
ggccagcguaaaggucacc

SEQ ID NO: 717147 - RNA, 19 nt, Artificial Sequence
  Description of Artificial Sequence: Synthetic oligonucleotide
gccgagacucugucacagu

SEQ ID NO: 717148 - RNA, 19 nt, Artificial Sequence
  Description of Artificial Sequence: Synthetic oligonucleotide
ccggccgaguaaaacucgu

SEQ ID NO: 717149 - RNA, 19 nt, Artificial Sequence
  Description of Artificial Sequence: Synthetic oligonucleotide
ccacaugcacacgguaugu

SEQ ID NO: 717150 - RNA, 19 nt, Artificial Sequence
  Description of Artificial Sequence: Synthetic oligonucleotide
gcacuucggauuggggcgu

SEQ ID NO: 717151 - RNA, 19 nt, Artificial Sequence
  Description of Artificial Sequence: Synthetic oligonucleotide
cgccacacguaugguaaga

SEQ ID NO: 717152 - RNA, 19 nt, Artificial Sequence
  Description of Artificial Sequence: Synthetic oligonucleotide
ccccaccuggagguaacua

SEQ ID NO: 717153 - RNA, 19 nt, Artificial Sequence
  Description of Artificial Sequence: Synthetic oligonucleotide
cgaaagcggcguccucgcu

SEQ ID NO: 717154 - RNA, 19 nt, Artificial Sequence
  Description of Artificial Sequence: Synthetic oligonucleotide
cggccgaguaaaacucguu

SEQ ID NO: 717155 - RNA, 19 nt, Artificial Sequence
  Description of Artificial Sequence: Synthetic oligonucleotide
cggcuaaauguaggugcuu

SEQ ID NO: 717156 - RNA, 19 nt, Artificial Sequence
  Description of Artificial Sequence: Synthetic oligonucleotide
aacaagaguacauuugugg

SEQ ID NO: 717157 - RNA, 19 nt, Artificial Sequence
  Description of Artificial Sequence: Synthetic oligonucleotide
aaguauauugaauauggca

SEQ ID NO: 717158 - RNA, 19 nt, Artificial Sequence
  Description of Artificial Sequence: Synthetic oligonucleotide
aucuagaacgccuugaauc

SEQ ID NO: 717159 - RNA, 19 nt, Artificial Sequence
  Description of Artificial Sequence: Synthetic oligonucleotide
uaagcauugauauuuagaa

SEQ ID NO: 717160 - RNA, 19 nt, Artificial Sequence
  Description of Artificial Sequence: Synthetic oligonucleotide
agacaauagacacaucggc

SEQ ID NO: 717161 - RNA, 19 nt, Artificial Sequence
  Description of Artificial Sequence: Synthetic oligonucleotide
ucaaguuccauuccauugg

SEQ ID NO: 717162 - RNA, 19 nt, Artificial Sequence
  Description of Artificial Sequence: Synthetic oligonucleotide
ugaacgucuagacugcugg

SEQ ID NO: 717163 - RNA, 19 nt, Artificial Sequence
  Description of Artificial Sequence: Synthetic oligonucleotide
uuuguucuaauacuagcag

SEQ ID NO: 717164 - RNA, 19 nt, Artificial Sequence
  Description of Artificial Sequence: Synthetic oligonucleotide
auuugguagcauuuuacac

SEQ ID NO: 717165 - RNA, 19 nt, Artificial Sequence
  Description of Artificial Sequence: Synthetic oligonucleotide
ugucauaauaaucgcggcg

SEQ ID NO: 717166 - RNA, 19 nt, Artificial Sequence
  Description of Artificial Sequence: Synthetic oligonucleotide
cuagauucagaucuggacc

SEQ ID NO: 717167 - RNA, 19 nt, Artificial Sequence
  Description of Artificial Sequence: Synthetic oligonucleotide
uagagaauacuucucuuag

SEQ ID NO: 717168 - RNA, 19 nt, Artificial Sequence
  Description of Artificial Sequence: Synthetic oligonucleotide
cuuugguaagcaaaggacc

SEQ ID NO: 717169 - RNA, 19 nt, Artificial Sequence
  Description of Artificial Sequence: Synthetic oligonucleotide
cuuauucccugcuauauag

SEQ ID NO: 717170 - RNA, 19 nt, Artificial Sequence
  Description of Artificial Sequence: Synthetic oligonucleotide
auaaucucggcuguaagac

SEQ ID NO: 717171 - RNA, 19 nt, Artificial Sequence
  Description of Artificial Sequence: Synthetic oligonucleotide
uucgccguaguucugcucg

SEQ ID NO: 717172 - RNA, 19 nt, Artificial Sequence
  Description of Artificial Sequence: Synthetic oligonucleotide
uuauggagaaaucaacccu

SEQ ID NO: 717173 - RNA, 19 nt, Artificial Sequence
  Description of Artificial Sequence: Synthetic oligonucleotide
aaaucaacccuaauucgac

SEQ ID NO: 717174 - RNA, 19 nt, Artificial Sequence
  Description of Artificial Sequence: Synthetic oligonucleotide
uggagcgugaccuugcagg

SEQ ID NO: 717175 - RNA, 19 nt, Artificial Sequence
  Description of Artificial Sequence: Synthetic oligonucleotide
aagcauuaagcauuugcug

SEQ ID NO: 717176 - RNA, 19 nt, Artificial Sequence
  Description of Artificial Sequence: Synthetic oligonucleotide
aaucaacccuaauucgacg

SEQ ID NO: 717177 - RNA, 19 nt, Artificial Sequence
  Description of Artificial Sequence: Synthetic oligonucleotide
ucaugcuuuaauagcgacg

SEQ ID NO: 717178 - RNA, 19 nt, Artificial Sequence
  Description of Artificial Sequence: Synthetic oligonucleotide
uggaacgugaccuguaucc

SEQ ID NO: 717179 - RNA, 19 nt, Artificial Sequence
  Description of Artificial Sequence: Synthetic oligonucleotide
ugcuuuaauagcgacgagg

SEQ ID NO: 717180 - RNA, 19 nt, Artificial Sequence
  Description of Artificial Sequence: Synthetic oligonucleotide
acaaacaauaucccagcuc

SEQ ID NO: 717181 - RNA, 19 nt, Artificial Sequence
  Description of Artificial Sequence: Synthetic oligonucleotide
aauccacauuaauguaagc

SEQ ID NO: 717182 - RNA, 19 nt, Artificial Sequence
  Description of Artificial Sequence: Synthetic oligonucleotide
cuuguugauaacuaguuga

SEQ ID NO: 717183 - RNA, 19 nt, Artificial Sequence
  Description of Artificial Sequence: Synthetic oligonucleotide
ucaacuccaccaaaaguag

SEQ ID NO: 717184 - RNA, 19 nt, Artificial Sequence
  Description of Artificial Sequence: Synthetic oligonucleotide
agucccgaucaucauaacc

SEQ ID NO: 717185 - RNA, 19 nt, Artificial Sequence
  Description of Artificial Sequence: Synthetic oligonucleotide
ucgacguccgucaaguucc

SEQ ID NO: 717186 - RNA, 19 nt, Artificial Sequence
  Description of Artificial Sequence: Synthetic oligonucleotide
ucuagaacgccuugaaucu

SEQ ID NO: 717187 - RNA, 19 nt, Artificial Sequence
  Description of Artificial Sequence: Synthetic oligonucleotide
acuucaugcuuuaauagcg

SEQ ID NO: 717188 - RNA, 19 nt, Artificial Sequence
  Description of Artificial Sequence: Synthetic oligonucleotide
aguauuauauagucuaaaa

SEQ ID NO: 717189 - RNA, 19 nt, Artificial Sequence
  Description of Artificial Sequence: Synthetic oligonucleotide
aacacuuaauugcaaguau

SEQ ID NO: 717190 - RNA, 19 nt, Artificial Sequence
  Description of Artificial Sequence: Synthetic oligonucleotide
aacgugaccuguauccucc

SEQ ID NO: 717191 - RNA, 19 nt, Artificial Sequence
  Description of Artificial Sequence: Synthetic oligonucleotide
ucaccuaacuucacuaggc

SEQ ID NO: 717192 - RNA, 19 nt, Artificial Sequence
  Description of Artificial Sequence: Synthetic oligonucleotide
ugauaacuaguugaaauac

SEQ ID NO: 717193 - RNA, 19 nt, Artificial Sequence
  Description of Artificial Sequence: Synthetic oligonucleotide
aacuccaccaaaaguaguc

SEQ ID NO: 717194 - RNA, 19 nt, Artificial Sequence
  Description of Artificial Sequence: Synthetic oligonucleotide
uccacauuaauguaagcau

SEQ ID NO: 717195 - RNA, 19 nt, Artificial Sequence
  Description of Artificial Sequence: Synthetic oligonucleotide
uaugaucgagaucuggaac

SEQ ID NO: 717196 - RNA, 19 nt, Artificial Sequence
  Description of Artificial Sequence: Synthetic oligonucleotide
acaagaguacauuuguggu

SEQ ID NO: 717197 - RNA, 19 nt, Artificial Sequence
  Description of Artificial Sequence: Synthetic oligonucleotide
ucuaguagacaugggagag

SEQ ID NO: 717198 - RNA, 19 nt, Artificial Sequence
  Description of Artificial Sequence: Synthetic oligonucleotide
uacugguaacuuaagggug

SEQ ID NO: 717199 - RNA, 19 nt, Artificial Sequence
  Description of Artificial Sequence: Synthetic oligonucleotide
ucuuaggucucuuucugug

SEQ ID NO: 717200 - RNA, 19 nt, Artificial Sequence
  Description of Artificial Sequence: Synthetic oligonucleotide
uuaaggguguuucugguua

SEQ ID NO: 717201 - RNA, 19 nt, Artificial Sequence
  Description of Artificial Sequence: Synthetic oligonucleotide
guugaaauaccauuaucuc

SEQ ID NO: 717202 - RNA, 19 nt, Artificial Sequence
  Description of Artificial Sequence: Synthetic oligonucleotide
uagauucagaucuggaccu

SEQ ID NO: 717203 - RNA, 19 nt, Artificial Sequence
  Description of Artificial Sequence: Synthetic oligonucleotide
aauucgacguccgucaagu

SEQ ID NO: 717204 - RNA, 19 nt, Artificial Sequence
  Description of Artificial Sequence: Synthetic oligonucleotide
auaacuaguugaaauacca

SEQ ID NO: 717205 - RNA, 19 nt, Artificial Sequence
  Description of Artificial Sequence: Synthetic oligonucleotide
gauaacuaguugaaauacc

SEQ ID NO: 717206 - RNA, 19 nt, Artificial Sequence
  Description of Artificial Sequence: Synthetic oligonucleotide
gauaaucucggcuguaaga

SEQ ID NO: 717207 - RNA, 19 nt, Artificial Sequence
  Description of Artificial Sequence: Synthetic oligonucleotide
aucgugaccuuguauaaug

SEQ ID NO: 717208 - RNA, 19 nt, Artificial Sequence
  Description of Artificial Sequence: Synthetic oligonucleotide
agcacccaguauuauauag

SEQ ID NO: 717209 - RNA, 19 nt, Artificial Sequence
  Description of Artificial Sequence: Synthetic oligonucleotide
gacacaucggcaauggggc

SEQ ID NO: 717210 - RNA, 19 nt, Artificial Sequence
  Description of Artificial Sequence: Synthetic oligonucleotide
ggucauagacaauagacac

SEQ ID NO: 717211 - RNA, 19 nt, Artificial Sequence
  Description of Artificial Sequence: Synthetic oligonucleotide
aaauaccauuaucucuuug

SEQ ID NO: 717212 - RNA, 19 nt, Artificial Sequence
  Description of Artificial Sequence: Synthetic oligonucleotide
uuguugauaacuaguugaa

SEQ ID NO: 717213 - RNA, 19 nt, Artificial Sequence
  Description of Artificial Sequence: Synthetic oligonucleotide
caagacaacaguugggguc

SEQ ID NO: 717214 - RNA, 19 nt, Artificial Sequence
  Description of Artificial Sequence: Synthetic oligonucleotide
aacgggauucccguucgcc

SEQ ID NO: 717215 - RNA, 19 nt, Artificial Sequence
  Description of Artificial Sequence: Synthetic oligonucleotide
ucuugaacgucuagacugc

SEQ ID NO: 717216 - RNA, 19 nt, Artificial Sequence
  Description of Artificial Sequence: Synthetic oligonucleotide
aacaugacgccuucuagua

SEQ ID NO: 717217 - RNA, 19 nt, Artificial Sequence
  Description of Artificial Sequence: Synthetic oligonucleotide
auacccuggauucaguaga

SEQ ID NO: 717218 - RNA, 19 nt, Artificial Sequence
  Description of Artificial Sequence: Synthetic oligonucleotide
gaaaucaacccuaauucga

SEQ ID NO: 717219 - RNA, 19 nt, Artificial Sequence
  Description of Artificial Sequence: Synthetic oligonucleotide
uguaaaucccaggcguugg

SEQ ID NO: 717220 - RNA, 19 nt, Artificial Sequence
  Description of Artificial Sequence: Synthetic oligonucleotide
uuuguuaacccgaguugca

SEQ ID NO: 717221 - RNA, 19 nt, Artificial Sequence
  Description of Artificial Sequence: Synthetic oligonucleotide
uuugagaguugcccgggcc

SEQ ID NO: 717222 - RNA, 19 nt, Artificial Sequence
  Description of Artificial Sequence: Synthetic oligonucleotide
gucaccuaacuucacuagg

SEQ ID NO: 717223 - RNA, 19 nt, Artificial Sequence
  Description of Artificial Sequence: Synthetic oligonucleotide
aacgccuugaaucuuccuu

SEQ ID NO: 717224 - RNA, 19 nt, Artificial Sequence
  Description of Artificial Sequence: Synthetic oligonucleotide
auccacauuaauguaagca

SEQ ID NO: 717225 - RNA, 19 nt, Artificial Sequence
  Description of Artificial Sequence: Synthetic oligonucleotide
agugaauugggcuuccuuu

SEQ ID NO: 717226 - RNA, 19 nt, Artificial Sequence
  Description of Artificial Sequence: Synthetic oligonucleotide
gcagucaaaauuuggacug

SEQ ID NO: 717227 - RNA, 19 nt, Artificial Sequence
  Description of Artificial Sequence: Synthetic oligonucleotide
cauuaucucuuuguaacag

SEQ ID NO: 717228 - RNA, 19 nt, Artificial Sequence
  Description of Artificial Sequence: Synthetic oligonucleotide
ucauaauaaucgcggcggc

SEQ ID NO: 717229 - RNA, 19 nt, Artificial Sequence
  Description of Artificial Sequence: Synthetic oligonucleotide
uggaauguauuguuaucac

SEQ ID NO: 717230 - RNA, 19 nt, Artificial Sequence
  Description of Artificial Sequence: Synthetic oligonucleotide
aucaacccuaauucgacgu

SEQ ID NO: 717231 - RNA, 19 nt, Artificial Sequence
  Description of Artificial Sequence: Synthetic oligonucleotide
guugauaacuaguugaaau

SEQ ID NO: 717232 - RNA, 19 nt, Artificial Sequence
  Description of Artificial Sequence: Synthetic oligonucleotide
accuguauccuccacgacu

SEQ ID NO: 717233 - RNA, 19 nt, Artificial Sequence
  Description of Artificial Sequence: Synthetic oligonucleotide
ccgguuuccaacaugacgc

SEQ ID NO: 717234 - RNA, 19 nt, Artificial Sequence
  Description of Artificial Sequence: Synthetic oligonucleotide
agaacgggauucccguucg

SEQ ID NO: 717235 - RNA, 19 nt, Artificial Sequence
  Description of Artificial Sequence: Synthetic oligonucleotide
aaggaccugaaaauaauau

SEQ ID NO: 717236 - RNA, 19 nt, Artificial Sequence
  Description of Artificial Sequence: Synthetic oligonucleotide
ugaucuagaacgccuugaa

SEQ ID NO: 717237 - RNA, 19 nt, Artificial Sequence
  Description of Artificial Sequence: Synthetic oligonucleotide
gucuaugggagcgggaucg

SEQ ID NO: 717238 - RNA, 19 nt, Artificial Sequence
  Description of Artificial Sequence: Synthetic oligonucleotide
guaauagucccgaucauca

SEQ ID NO: 717239 - RNA, 19 nt, Artificial Sequence
  Description of Artificial Sequence: Synthetic oligonucleotide
aauagcgacgaggugagua

SEQ ID NO: 717240 - RNA, 19 nt, Artificial Sequence
  Description of Artificial Sequence: Synthetic oligonucleotide
cucgcgacgacacacuuug

SEQ ID NO: 717241 - RNA, 19 nt, Artificial Sequence
  Description of Artificial Sequence: Synthetic oligonucleotide
caugcuuuaauagcgacga

SEQ ID NO: 717242 - RNA, 19 nt, Artificial Sequence
  Description of Artificial Sequence: Synthetic oligonucleotide
uccgucaaguuccauucca

SEQ ID NO: 717243 - RNA, 19 nt, Artificial Sequence
  Description of Artificial Sequence: Synthetic oligonucleotide
uggggccauauuuagagaa

SEQ ID NO: 717244 - RNA, 19 nt, Artificial Sequence
  Description of Artificial Sequence: Synthetic oligonucleotide
uucaugcuuuaauagcgac

SEQ ID NO: 717245 - RNA, 19 nt, Artificial Sequence
  Description of Artificial Sequence: Synthetic oligonucleotide
ugccgugcagauuuccccg

SEQ ID NO: 717246 - RNA, 19 nt, Artificial Sequence
  Description of Artificial Sequence: Synthetic oligonucleotide
aacaauaucccagcucuau

SEQ ID NO: 717247 - RNA, 19 nt, Artificial Sequence
  Description of Artificial Sequence: Synthetic oligonucleotide
uucgacguccgucaaguuc

SEQ ID NO: 717248 - RNA, 19 nt, Artificial Sequence
  Description of Artificial Sequence: Synthetic oligonucleotide
uaauucgacguccgucaag

SEQ ID NO: 717249 - RNA, 19 nt, Artificial Sequence
  Description of Artificial Sequence: Synthetic oligonucleotide
gacaauagacacaucggca

SEQ ID NO: 717250 - RNA, 19 nt, Artificial Sequence
  Description of Artificial Sequence: Synthetic oligonucleotide
gugcagauuuccccgaucc

SEQ ID NO: 717251 - RNA, 19 nt, Artificial Sequence
  Description of Artificial Sequence: Synthetic oligonucleotide
uuauucccugcuauauaga

SEQ ID NO: 717252 - RNA, 19 nt, Artificial Sequence
  Description of Artificial Sequence: Synthetic oligonucleotide
uaacacuuaauugcaagua

SEQ ID NO: 717253 - RNA, 19 nt, Artificial Sequence
  Description of Artificial Sequence: Synthetic oligonucleotide
uaaaucccaggcguugggg

SEQ ID NO: 717254 - RNA, 19 nt, Artificial Sequence
  Description of Artificial Sequence: Synthetic oligonucleotide
gaguaugaucgagaucugg

SEQ ID NO: 717255 - RNA, 19 nt, Artificial Sequence
  Description of Artificial Sequence: Synthetic oligonucleotide
acgccuugaaucuuccuug

SEQ ID NO: 717256 - RNA, 19 nt, Artificial Sequence
  Description of Artificial Sequence: Synthetic oligonucleotide
uaaucucggcuguaagacc

SEQ ID NO: 717257 - RNA, 19 nt, Artificial Sequence
  Description of Artificial Sequence: Synthetic oligonucleotide
cagcagucaaaauuuggac

SEQ ID NO: 717258 - RNA, 19 nt, Artificial Sequence
  Description of Artificial Sequence: Synthetic oligonucleotide
cugucauaauaaucgcggc

SEQ ID NO: 717259 - RNA, 19 nt, Artificial Sequence
  Description of Artificial Sequence: Synthetic oligonucleotide
ugcuguaauagucccgauc

SEQ ID NO: 717260 - RNA, 19 nt, Artificial Sequence
  Description of Artificial Sequence: Synthetic oligonucleotide
cauaauaaucgcggcggcg

SEQ ID NO: 717261 - RNA, 19 nt, Artificial Sequence
  Description of Artificial Sequence: Synthetic oligonucleotide
acgggauucccguucgccg

SEQ ID NO: 717262 - RNA, 19 nt, Artificial Sequence
  Description of Artificial Sequence: Synthetic oligonucleotide
uccauuggcacguucuuua

SEQ ID NO: 717263 - RNA, 19 nt, Artificial Sequence
  Description of Artificial Sequence: Synthetic oligonucleotide
aauugggcuuccuuuggua

SEQ ID NO: 717264 - RNA, 19 nt, Artificial Sequence
  Description of Artificial Sequence: Synthetic oligonucleotide
acaggcuucgaucuucaga

SEQ ID NO: 717265 - RNA, 19 nt, Artificial Sequence
  Description of Artificial Sequence: Synthetic oligonucleotide
cuuuacggaagcugucaag

SEQ ID NO: 717266 - RNA, 19 nt, Artificial Sequence
  Description of Artificial Sequence: Synthetic oligonucleotide
aguaugaucgagaucugga

SEQ ID NO: 717267 - RNA, 19 nt, Artificial Sequence
  Description of Artificial Sequence: Synthetic oligonucleotide
ugaucgugaccuuguauaa

SEQ ID NO: 717268 - RNA, 19 nt, Artificial Sequence
  Description of Artificial Sequence: Synthetic oligonucleotide
aggaccugaaaauaauauu

SEQ ID NO: 717269 - RNA, 19 nt, Artificial Sequence
  Description of Artificial Sequence: Synthetic oligonucleotide
ccgaacuacacaaaugcag

SEQ ID NO: 717270 - RNA, 19 nt, Artificial Sequence
  Description of Artificial Sequence: Synthetic oligonucleotide
uugaacgucuagacugcug

SEQ ID NO: 717271 - RNA, 19 nt, Artificial Sequence
  Description of Artificial Sequence: Synthetic oligonucleotide
gaacaagaguacauuugug

SEQ ID NO: 717272 - RNA, 19 nt, Artificial Sequence
  Description of Artificial Sequence: Synthetic oligonucleotide
ucccgaucaucauaacccc

SEQ ID NO: 717273 - RNA, 19 nt, Artificial Sequence
  Description of Artificial Sequence: Synthetic oligonucleotide
uaauaaucgcggcggcgug

SEQ ID NO: 717274 - RNA, 19 nt, Artificial Sequence
  Description of Artificial Sequence: Synthetic oligonucleotide
gugaucgugaccuuguaua

SEQ ID NO: 717275 - RNA, 19 nt, Artificial Sequence
  Description of Artificial Sequence: Synthetic oligonucleotide
aacccuaauucgacguccg

SEQ ID NO: 717276 - RNA, 19 nt, Artificial Sequence
  Description of Artificial Sequence: Synthetic oligonucleotide
acgucuagacugcugguca

SEQ ID NO: 717277 - RNA, 19 nt, Artificial Sequence
  Description of Artificial Sequence: Synthetic oligonucleotide
uugaucuagaacgccuuga

SEQ ID NO: 717278 - RNA, 19 nt, Artificial Sequence
  Description of Artificial Sequence: Synthetic oligonucleotide
uaacccgaguugcauuagc

SEQ ID NO: 717279 - RNA, 19 nt, Artificial Sequence
  Description of Artificial Sequence: Synthetic oligonucleotide
agcaccgaacuacacaaau

SEQ ID NO: 717280 - RNA, 19 nt, Artificial Sequence
  Description of Artificial Sequence: Synthetic oligonucleotide
caugacgccuucuaguaga

SEQ ID NO: 717281 - RNA, 19 nt, Artificial Sequence
  Description of Artificial Sequence: Synthetic oligonucleotide
agcucuuauucccugcuau

SEQ ID NO: 717282 - RNA, 19 nt, Artificial Sequence
  Description of Artificial Sequence: Synthetic oligonucleotide
aaaggaccugaaaauaaua

SEQ ID NO: 717283 - RNA, 19 nt, Artificial Sequence
  Description of Artificial Sequence: Synthetic oligonucleotide
ucaacccuaauucgacguc

SEQ ID NO: 717284 - RNA, 19 nt, Artificial Sequence
  Description of Artificial Sequence: Synthetic oligonucleotide
gaccuagauucagaucugg

SEQ ID NO: 717285 - RNA, 19 nt, Artificial Sequence
  Description of Artificial Sequence: Synthetic oligonucleotide
auagcgacgaggugaguau

SEQ ID NO: 717286 - RNA, 19 nt, Artificial Sequence
  Description of Artificial Sequence: Synthetic oligonucleotide
acaugacgccuucuaguag

SEQ ID NO: 717287 - RNA, 19 nt, Artificial Sequence
  Description of Artificial Sequence: Synthetic oligonucleotide
uguugauaacuaguugaaa

SEQ ID NO: 717288 - RNA, 19 nt, Artificial Sequence
  Description of Artificial Sequence: Synthetic oligonucleotide
gguaacuuaaggguguuuc

SEQ ID NO: 717289 - RNA, 19 nt, Artificial Sequence
  Description of Artificial Sequence: Synthetic oligonucleotide
auauugaauauggcaagau

SEQ ID NO: 717290 - RNA, 19 nt, Artificial Sequence
  Description of Artificial Sequence: Synthetic oligonucleotide
cagauuuccccgauccaug

SEQ ID NO: 717291 - RNA, 19 nt, Artificial Sequence
  Description of Artificial Sequence: Synthetic oligonucleotide
ucgugaccuuguauaaugu

SEQ ID NO: 717292 - RNA, 19 nt, Artificial Sequence
  Description of Artificial Sequence: Synthetic oligonucleotide
ugaguaugaucgagaucug

SEQ ID NO: 717293 - RNA, 19 nt, Artificial Sequence
  Description of Artificial Sequence: Synthetic oligonucleotide
caacccuaauucgacgucc

SEQ ID NO: 717294 - RNA, 19 nt, Artificial Sequence
  Description of Artificial Sequence: Synthetic oligonucleotide
uauccuccacgacuguagu

SEQ ID NO: 717295 - RNA, 19 nt, Artificial Sequence
  Description of Artificial Sequence: Synthetic oligonucleotide
uuuccaacaugacgccuuc

SEQ ID NO: 717296 - RNA, 19 nt, Artificial Sequence
  Description of Artificial Sequence: Synthetic oligonucleotide
auagucccgaucaucauaa

SEQ ID NO: 717297 - RNA, 19 nt, Artificial Sequence
  Description of Artificial Sequence: Synthetic oligonucleotide
guaugaucgagaucuggaa

SEQ ID NO: 717298 - RNA, 19 nt, Artificial Sequence
  Description of Artificial Sequence: Synthetic oligonucleotide
acugguaacuuaagggugu

SEQ ID NO: 717299 - RNA, 19 nt, Artificial Sequence
  Description of Artificial Sequence: Synthetic oligonucleotide
aauaaucgcggcggcguga

SEQ ID NO: 717300 - RNA, 19 nt, Artificial Sequence
  Description of Artificial Sequence: Synthetic oligonucleotide
gccgucuucgauaaucucg

SEQ ID NO: 717301 - RNA, 19 nt, Artificial Sequence
  Description of Artificial Sequence: Synthetic oligonucleotide
ugcagauuuccccgaucca

SEQ ID NO: 717302 - RNA, 19 nt, Artificial Sequence
  Description of Artificial Sequence: Synthetic oligonucleotide
cuucgaucuucagaauacc

SEQ ID NO: 717303 - RNA, 19 nt, Artificial Sequence
  Description of Artificial Sequence: Synthetic oligonucleotide
ccgucuucgauaaucucgg

SEQ ID NO: 717304 - RNA, 19 nt, Artificial Sequence
  Description of Artificial Sequence: Synthetic oligonucleotide
gaacgugaccuguauccuc

SEQ ID NO: 717305 - RNA, 19 nt, Artificial Sequence
  Description of Artificial Sequence: Synthetic oligonucleotide
gcuauauagaauagauuac

SEQ ID NO: 717306 - RNA, 19 nt, Artificial Sequence
  Description of Artificial Sequence: Synthetic oligonucleotide
cuucaugcuuuaauagcga

SEQ ID NO: 717307 - RNA, 19 nt, Artificial Sequence
  Description of Artificial Sequence: Synthetic oligonucleotide
auaaccccgaucauauccu

SEQ ID NO: 717308 - RNA, 19 nt, Artificial Sequence
  Description of Artificial Sequence: Synthetic oligonucleotide
gaagcacccaguauuauau

SEQ ID NO: 717309 - RNA, 19 nt, Artificial Sequence
  Description of Artificial Sequence: Synthetic oligonucleotide
guacaagcuuaacccaaac

SEQ ID NO: 717310 - RNA, 19 nt, Artificial Sequence
  Description of Artificial Sequence: Synthetic oligonucleotide
ggagcgugaccuugcaggg

SEQ ID NO: 717311 - RNA, 19 nt, Artificial Sequence
  Description of Artificial Sequence: Synthetic oligonucleotide
uccccgauccaugagcacu

SEQ ID NO: 717312 - RNA, 19 nt, Artificial Sequence
  Description of Artificial Sequence: Synthetic oligonucleotide
accgccuucuguaaauuug

SEQ ID NO: 717313 - RNA, 19 nt, Artificial Sequence
  Description of Artificial Sequence: Synthetic oligonucleotide
ggagaaaucaacccuaauu

SEQ ID NO: 717314 - RNA, 19 nt, Artificial Sequence
  Description of Artificial Sequence: Synthetic oligonucleotide
uuguuaucacuuguugaua

SEQ ID NO: 717315 - RNA, 19 nt, Artificial Sequence
  Description of Artificial Sequence: Synthetic oligonucleotide
ucgucuaugggagcgggau

SEQ ID NO: 717316 - RNA, 19 nt, Artificial Sequence
  Description of Artificial Sequence: Synthetic oligonucleotide
agggguaugccgugcagau

SEQ ID NO: 717317 - RNA, 19 nt, Artificial Sequence
  Description of Artificial Sequence: Synthetic oligonucleotide
cagaacgggauucccguuc

SEQ ID NO: 717318 - RNA, 19 nt, Artificial Sequence
  Description of Artificial Sequence: Synthetic oligonucleotide
uuguuaacccgaguugcau

SEQ ID NO: 717319 - RNA, 19 nt, Artificial Sequence
  Description of Artificial Sequence: Synthetic oligonucleotide
cccgguuuccaacaugacg

SEQ ID NO: 717320 - RNA, 19 nt, Artificial Sequence
  Description of Artificial Sequence: Synthetic oligonucleotide
uucccguucgccguaguuc

SEQ ID NO: 717321 - RNA, 19 nt, Artificial Sequence
  Description of Artificial Sequence: Synthetic oligonucleotide
acuccaccaaaaguaguca

SEQ ID NO: 717322 - RNA, 19 nt, Artificial Sequence
  Description of Artificial Sequence: Synthetic oligonucleotide
guaacuuaaggguguuucu

SEQ ID NO: 717323 - RNA, 19 nt, Artificial Sequence
  Description of Artificial Sequence: Synthetic oligonucleotide
ccuaauucgacguccguca

SEQ ID NO: 717324 - RNA, 19 nt, Artificial Sequence
  Description of Artificial Sequence: Synthetic oligonucleotide
caggauuugcccgguuucc

SEQ ID NO: 717325 - RNA, 19 nt, Artificial Sequence
  Description of Artificial Sequence: Synthetic oligonucleotide
ugcuccgggaucgucuaug

SEQ ID NO: 717326 - RNA, 19 nt, Artificial Sequence
  Description of Artificial Sequence: Synthetic oligonucleotide
aagcacccaguauuauaua

SEQ ID NO: 717327 - RNA, 19 nt, Artificial Sequence
  Description of Artificial Sequence: Synthetic oligonucleotide
aucgcggcggcgugaacug

SEQ ID NO: 717328 - RNA, 19 nt, Artificial Sequence
  Description of Artificial Sequence: Synthetic oligonucleotide
acguccgucaaguuccauu

SEQ ID NO: 717329 - RNA, 19 nt, Artificial Sequence
  Description of Artificial Sequence: Synthetic oligonucleotide
agcuccugccuucucuaca

SEQ ID NO: 717330 - RNA, 19 nt, Artificial Sequence
  Description of Artificial Sequence: Synthetic oligonucleotide
uguauccuccacgacugua

SEQ ID NO: 717331 - RNA, 19 nt, Artificial Sequence
  Description of Artificial Sequence: Synthetic oligonucleotide
cagccucucgcgacgacac

SEQ ID NO: 717332 - RNA, 19 nt, Artificial Sequence
  Description of Artificial Sequence: Synthetic oligonucleotide
gucuucgauaaucucggcu

SEQ ID NO: 717333 - RNA, 19 nt, Artificial Sequence
  Description of Artificial Sequence: Synthetic oligonucleotide
augacgccuucuaguagac

SEQ ID NO: 717334 - RNA, 19 nt, Artificial Sequence
  Description of Artificial Sequence: Synthetic oligonucleotide
ccaacaugacgccuucuag

SEQ ID NO: 717335 - RNA, 19 nt, Artificial Sequence
  Description of Artificial Sequence: Synthetic oligonucleotide
gaguugcccgggccgacgc

SEQ ID NO: 717336 - RNA, 19 nt, Artificial Sequence
  Description of Artificial Sequence: Synthetic oligonucleotide
caguauuauauagucuaaa

SEQ ID NO: 717337 - RNA, 19 nt, Artificial Sequence
  Description of Artificial Sequence: Synthetic oligonucleotide
uaaccccgaucauauccuc

SEQ ID NO: 717338 - RNA, 19 nt, Artificial Sequence
  Description of Artificial Sequence: Synthetic oligonucleotide
caccuaacuucacuaggca

SEQ ID NO: 717339 - RNA, 19 nt, Artificial Sequence
  Description of Artificial Sequence: Synthetic oligonucleotide
uagcucuuauucccugcua

SEQ ID NO: 717340 - RNA, 19 nt, Artificial Sequence
  Description of Artificial Sequence: Synthetic oligonucleotide
accgaacuacacaaaugca

SEQ ID NO: 717341 - RNA, 19 nt, Artificial Sequence
  Description of Artificial Sequence: Synthetic oligonucleotide
gucaaaauuuggacuguaa

SEQ ID NO: 717342 - RNA, 19 nt, Artificial Sequence
  Description of Artificial Sequence: Synthetic oligonucleotide
aucgugaucgugaccuugu

SEQ ID NO: 717343 - RNA, 19 nt, Artificial Sequence
  Description of Artificial Sequence: Synthetic oligonucleotide
gaauugggcuuccuuuggu

SEQ ID NO: 717344 - RNA, 19 nt, Artificial Sequence
  Description of Artificial Sequence: Synthetic oligonucleotide
agaguacauuuguggugga

SEQ ID NO: 717345 - RNA, 19 nt, Artificial Sequence
  Description of Artificial Sequence: Synthetic oligonucleotide
gaucuagaacgccuugaau

SEQ ID NO: 717346 - RNA, 19 nt, Artificial Sequence
  Description of Artificial Sequence: Synthetic oligonucleotide
acgaggugaguaugaucga

SEQ ID NO: 717347 - RNA, 19 nt, Artificial Sequence
  Description of Artificial Sequence: Synthetic oligonucleotide
caucauaaccccgaucaua

SEQ ID NO: 717348 - RNA, 19 nt, Artificial Sequence
  Description of Artificial Sequence: Synthetic oligonucleotide
guaugccgugcagauuucc

SEQ ID NO: 717349 - RNA, 19 nt, Artificial Sequence
  Description of Artificial Sequence: Synthetic oligonucleotide
ucucgcgacgacacacuuu

SEQ ID NO: 717350 - RNA, 19 nt, Artificial Sequence
  Description of Artificial Sequence: Synthetic oligonucleotide
cacuuguugauaacuaguu

SEQ ID NO: 717351 - RNA, 19 nt, Artificial Sequence
  Description of Artificial Sequence: Synthetic oligonucleotide
uagcgacgaggugaguaug

SEQ ID NO: 717352 - RNA, 19 nt, Artificial Sequence
  Description of Artificial Sequence: Synthetic oligonucleotide
gaacgggauucccguucgc

SEQ ID NO: 717353 - RNA, 19 nt, Artificial Sequence
  Description of Artificial Sequence: Synthetic oligonucleotide
cuccgggaucgucuauggg

SEQ ID NO: 717354 - RNA, 19 nt, Artificial Sequence
  Description of Artificial Sequence: Synthetic oligonucleotide
gcuccgggaucgucuaugg

SEQ ID NO: 717355 - RNA, 19 nt, Artificial Sequence
  Description of Artificial Sequence: Synthetic oligonucleotide
uucgauaaucucggcugua

SEQ ID NO: 717356 - RNA, 19 nt, Artificial Sequence
  Description of Artificial Sequence: Synthetic oligonucleotide
gcgacgacacacuuugaga

SEQ ID NO: 717357 - RNA, 19 nt, Artificial Sequence
  Description of Artificial Sequence: Synthetic oligonucleotide
auucccguucgccguaguu

SEQ ID NO: 717358 - RNA, 19 nt, Artificial Sequence
  Description of Artificial Sequence: Synthetic oligonucleotide
gcuaugccgucuucgauaa

SEQ ID NO: 717359 - RNA, 19 nt, Artificial Sequence
  Description of Artificial Sequence: Synthetic oligonucleotide
gcuggucauagacaauaga

SEQ ID NO: 717360 - RNA, 19 nt, Artificial Sequence
  Description of Artificial Sequence: Synthetic oligonucleotide
cccgaucaucauaaccccg

SEQ ID NO: 717361 - RNA, 19 nt, Artificial Sequence
  Description of Artificial Sequence: Synthetic oligonucleotide
auaaucgcggcggcgugaa

SEQ ID NO: 717362 - RNA, 19 nt, Artificial Sequence
  Description of Artificial Sequence: Synthetic oligonucleotide
ggcuaugccgucuucgaua

SEQ ID NO: 717363 - RNA, 19 nt, Artificial Sequence
  Description of Artificial Sequence: Synthetic oligonucleotide
ggcugacgaauccacauua

SEQ ID NO: 717364 - RNA, 19 nt, Artificial Sequence
  Description of Artificial Sequence: Synthetic oligonucleotide
ggcaagauucauggacucc

SEQ ID NO: 717365 - RNA, 19 nt, Artificial Sequence
  Description of Artificial Sequence: Synthetic oligonucleotide
ucgugaucgugaccuugua

SEQ ID NO: 717366 - RNA, 19 nt, Artificial Sequence
  Description of Artificial Sequence: Synthetic oligonucleotide
acccuaauucgacguccgu

SEQ ID NO: 717367 - RNA, 19 nt, Artificial Sequence
  Description of Artificial Sequence: Synthetic oligonucleotide
agcgacgaggugaguauga

SEQ ID NO: 717368 - RNA, 19 nt, Artificial Sequence
  Description of Artificial Sequence: Synthetic oligonucleotide
cguccgucaaguuccauuc

SEQ ID NO: 717369 - RNA, 19 nt, Artificial Sequence
  Description of Artificial Sequence: Synthetic oligonucleotide
gcaccgaacuacacaaaug

SEQ ID NO: 717370 - RNA, 19 nt, Artificial Sequence
  Description of Artificial Sequence: Synthetic oligonucleotide
ucuaugggagcgggaucgu

SEQ ID NO: 717371 - RNA, 19 nt, Artificial Sequence
  Description of Artificial Sequence: Synthetic oligonucleotide
ggguaugccgugcagauuu

SEQ ID NO: 717372 - RNA, 19 nt, Artificial Sequence
  Description of Artificial Sequence: Synthetic oligonucleotide
accuccgcaccggucuaac

SEQ ID NO: 717373 - RNA, 19 nt, Artificial Sequence
  Description of Artificial Sequence: Synthetic oligonucleotide
guugcccgggccgacgcgc

SEQ ID NO: 717374 - RNA, 19 nt, Artificial Sequence
  Description of Artificial Sequence: Synthetic oligonucleotide
uuccccgauccaugagcac

SEQ ID NO: 717375 - RNA, 19 nt, Artificial Sequence
  Description of Artificial Sequence: Synthetic oligonucleotide
ccgaucaucauaaccccga

SEQ ID NO: 717376 - RNA, 19 nt, Artificial Sequence
  Description of Artificial Sequence: Synthetic oligonucleotide
uagucccgaucaucauaac

SEQ ID NO: 717377 - RNA, 19 nt, Artificial Sequence
  Description of Artificial Sequence: Synthetic oligonucleotide
cuaauucgacguccgucaa

SEQ ID NO: 717378 - RNA, 19 nt, Artificial Sequence
  Description of Artificial Sequence: Synthetic oligonucleotide
ccguaguucugcucgccgc

SEQ ID NO: 717379 - RNA, 19 nt, Artificial Sequence
  Description of Artificial Sequence: Synthetic oligonucleotide
cuucgauaaucucggcugu

SEQ ID NO: 717380 - RNA, 19 nt, Artificial Sequence
  Description of Artificial Sequence: Synthetic oligonucleotide
aucggcaauggggccauau

SEQ ID NO: 717381 - RNA, 19 nt, Artificial Sequence
  Description of Artificial Sequence: Synthetic oligonucleotide
ccacgacuguaguaaggag

SEQ ID NO: 717382 - RNA, 19 nt, Artificial Sequence
  Description of Artificial Sequence: Synthetic oligonucleotide
uuccaacaugacgccuucu

SEQ ID NO: 717383 - RNA, 19 nt, Artificial Sequence
  Description of Artificial Sequence: Synthetic oligonucleotide
cgauaaucucggcuguaag

SEQ ID NO: 717384 - RNA, 19 nt, Artificial Sequence
  Description of Artificial Sequence: Synthetic oligonucleotide
cgcgacgacacacuuugag

SEQ ID NO: 717385 - RNA, 19 nt, Artificial Sequence
  Description of Artificial Sequence: Synthetic oligonucleotide
cucuuauucccugcuauau

SEQ ID NO: 717386 - RNA, 19 nt, Artificial Sequence
  Description of Artificial Sequence: Synthetic oligonucleotide
guucgccguaguucugcuc

SEQ ID NO: 717387 - RNA, 19 nt, Artificial Sequence
  Description of Artificial Sequence: Synthetic oligonucleotide
caauagacacaucggcaau

SEQ ID NO: 717388 - RNA, 19 nt, Artificial Sequence
  Description of Artificial Sequence: Synthetic oligonucleotide
cgugaccuuguauaauguc

SEQ ID NO: 717389 - RNA, 19 nt, Artificial Sequence
  Description of Artificial Sequence: Synthetic oligonucleotide
ucgcgacgacacacuuuga

SEQ ID NO: 717390 - RNA, 19 nt, Artificial Sequence
  Description of Artificial Sequence: Synthetic oligonucleotide
gaucgugaccuuguauaau

SEQ ID NO: 717391 - RNA, 19 nt, Artificial Sequence
  Description of Artificial Sequence: Synthetic oligonucleotide
ccgcugucgcucaugacuc

SEQ ID NO: 717392 - RNA, 19 nt, Artificial Sequence
  Description of Artificial Sequence: Synthetic oligonucleotide
cccuaauucgacguccguc

SEQ ID NO: 717393 - RNA, 19 nt, Artificial Sequence
  Description of Artificial Sequence: Synthetic oligonucleotide
agacaacaguuggggucag

SEQ ID NO: 717394 - RNA, 19 nt, Artificial Sequence
  Description of Artificial Sequence: Synthetic oligonucleotide
uaaucgcggcggcgugaac

SEQ ID NO: 717395 - RNA, 19 nt, Artificial Sequence
  Description of Artificial Sequence: Synthetic oligonucleotide
auucgacguccgucaaguu

SEQ ID NO: 717396 - RNA, 19 nt, Artificial Sequence
  Description of Artificial Sequence: Synthetic oligonucleotide
gccuuuacggaagcuguca

SEQ ID NO: 717397 - RNA, 19 nt, Artificial Sequence
  Description of Artificial Sequence: Synthetic oligonucleotide
uaauagcgacgaggugagu

SEQ ID NO: 717398 - RNA, 19 nt, Artificial Sequence
  Description of Artificial Sequence: Synthetic oligonucleotide
gugaccgccuucuguaaau

SEQ ID NO: 717399 - RNA, 19 nt, Artificial Sequence
  Description of Artificial Sequence: Synthetic oligonucleotide
cuccaccaaaaguagucau

SEQ ID NO: 717400 - RNA, 19 nt, Artificial Sequence
  Description of Artificial Sequence: Synthetic oligonucleotide
cgaggugaguaugaucgag

SEQ ID NO: 717401 - RNA, 19 nt, Artificial Sequence
  Description of Artificial Sequence: Synthetic oligonucleotide
ccgccuucuguaaauuuga

SEQ ID NO: 717402 - RNA, 19 nt, Artificial Sequence
  Description of Artificial Sequence: Synthetic oligonucleotide
gcucuuauucccugcuaua

SEQ ID NO: 717403 - RNA, 19 nt, Artificial Sequence
  Description of Artificial Sequence: Synthetic oligonucleotide
ggugaccgccuucuguaaa

SEQ ID NO: 717404 - RNA, 19 nt, Artificial Sequence
  Description of Artificial Sequence: Synthetic oligonucleotide
aucgucuaugggagcggga

SEQ ID NO: 717405 - RNA, 19 nt, Artificial Sequence
  Description of Artificial Sequence: Synthetic oligonucleotide
cucaugacuccggauggcu

SEQ ID NO: 717406 - RNA, 19 nt, Artificial Sequence
  Description of Artificial Sequence: Synthetic oligonucleotide
agccucucgcgacgacaca

SEQ ID NO: 717407 - RNA, 19 nt, Artificial Sequence
  Description of Artificial Sequence: Synthetic oligonucleotide
cgguuuccaacaugacgcc

SEQ ID NO: 717408 - RNA, 19 nt, Artificial Sequence
  Description of Artificial Sequence: Synthetic oligonucleotide
gccucucgcgacgacacac

SEQ ID NO: 717409 - RNA, 19 nt, Artificial Sequence
  Description of Artificial Sequence: Synthetic oligonucleotide
caacaguuggggucaggau

SEQ ID NO: 717410 - RNA, 19 nt, Artificial Sequence
  Description of Artificial Sequence: Synthetic oligonucleotide
ggauucccguucgccguag

SEQ ID NO: 717411 - RNA, 19 nt, Artificial Sequence
  Description of Artificial Sequence: Synthetic oligonucleotide
ccuuuacggaagcugucaa

SEQ ID NO: 717412 - RNA, 19 nt, Artificial Sequence
  Description of Artificial Sequence: Synthetic oligonucleotide
ggaacgugaccuguauccu

SEQ ID NO: 717413 - RNA, 19 nt, Artificial Sequence
  Description of Artificial Sequence: Synthetic oligonucleotide
cuugaacgucuagacugcu

SEQ ID NO: 717414 - RNA, 19 nt, Artificial Sequence
  Description of Artificial Sequence: Synthetic oligonucleotide
cccgaguugcauuagcaau

SEQ ID NO: 717415 - RNA, 19 nt, Artificial Sequence
  Description of Artificial Sequence: Synthetic oligonucleotide
gauucccguucgccguagu

SEQ ID NO: 717416 - RNA, 19 nt, Artificial Sequence
  Description of Artificial Sequence: Synthetic oligonucleotide
cgacgaggugaguaugauc

SEQ ID NO: 717417 - RNA, 19 nt, Artificial Sequence
  Description of Artificial Sequence: Synthetic oligonucleotide
ggcggcgugaacugccaua

SEQ ID NO: 717418 - RNA, 19 nt, Artificial Sequence
  Description of Artificial Sequence: Synthetic oligonucleotide
gacgcgcuccgcaccaccu

SEQ ID NO: 717419 - RNA, 19 nt, Artificial Sequence
  Description of Artificial Sequence: Synthetic oligonucleotide
cacagaguuacagcauauu

SEQ ID NO: 717420 - RNA, 19 nt, Artificial Sequence
  Description of Artificial Sequence: Synthetic oligonucleotide
ccgaguugcauuagcaauu

SEQ ID NO: 717421 - RNA, 19 nt, Artificial Sequence
  Description of Artificial Sequence: Synthetic oligonucleotide
gguaugccgugcagauuuc

SEQ ID NO: 717422 - RNA, 19 nt, Artificial Sequence
  Description of Artificial Sequence: Synthetic oligonucleotide
gguuuccaacaugacgccu

SEQ ID NO: 717423 - RNA, 19 nt, Artificial Sequence
  Description of Artificial Sequence: Synthetic oligonucleotide
cgucuucgauaaucucggc

SEQ ID NO: 717424 - RNA, 19 nt, Artificial Sequence
  Description of Artificial Sequence: Synthetic oligonucleotide
cgugcagauuuccccgauc

SEQ ID NO: 717425 - RNA, 19 nt, Artificial Sequence
  Description of Artificial Sequence: Synthetic oligonucleotide
gccgacgcgcuccgcacca

SEQ ID NO: 717426 - RNA, 19 nt, Artificial Sequence
  Description of Artificial Sequence: Synthetic oligonucleotide
cuagaacgccuugaaucuu

SEQ ID NO: 717427 - RNA, 19 nt, Artificial Sequence
  Description of Artificial Sequence: Synthetic oligonucleotide
gggauucccguucgccgua

SEQ ID NO: 717428 - RNA, 19 nt, Artificial Sequence
  Description of Artificial Sequence: Synthetic oligonucleotide
cuguauccuccacgacugu

SEQ ID NO: 717429 - RNA, 19 nt, Artificial Sequence
  Description of Artificial Sequence: Synthetic oligonucleotide
cgggaucgugaucgugacc

SEQ ID NO: 717430 - RNA, 19 nt, Artificial Sequence
  Description of Artificial Sequence: Synthetic oligonucleotide
gcacagaguuacagcauau

SEQ ID NO: 717431 - RNA, 19 nt, Artificial Sequence
  Description of Artificial Sequence: Synthetic oligonucleotide
cgacgcgcuccgcaccacc

SEQ ID NO: 717432 - RNA, 19 nt, Artificial Sequence
  Description of Artificial Sequence: Synthetic oligonucleotide
ccucucgcgacgacacacu

SEQ ID NO: 717433 - RNA, 19 nt, Artificial Sequence
  Description of Artificial Sequence: Synthetic oligonucleotide
gacguccgucaaguuccau

SEQ ID NO: 717434 - RNA, 19 nt, Artificial Sequence
  Description of Artificial Sequence: Synthetic oligonucleotide
caccuccgcaccggucuaa

SEQ ID NO: 717435 - RNA, 19 nt, Artificial Sequence
  Description of Artificial Sequence: Synthetic oligonucleotide
cgugaucgugaccuuguau

SEQ ID NO: 717436 - RNA, 19 nt, Artificial Sequence
  Description of Artificial Sequence: Synthetic oligonucleotide
gcgacgaggugaguaugau

SEQ ID NO: 717437 - RNA, 19 nt, Artificial Sequence
  Description of Artificial Sequence: Synthetic oligonucleotide
gucaccgcuccuggccuuu

SEQ ID NO: 717438 - RNA, 19 nt, Artificial Sequence
  Description of Artificial Sequence: Synthetic oligonucleotide
ccccgauccaugagcacuu

SEQ ID NO: 717439 - RNA, 19 nt, Artificial Sequence
  Description of Artificial Sequence: Synthetic oligonucleotide
cgggccgacgcgcuccgca

SEQ ID NO: 717440 - RNA, 19 nt, Artificial Sequence
  Description of Artificial Sequence: Synthetic oligonucleotide
cugcuccgggaucgucuau

SEQ ID NO: 717441 - RNA, 19 nt, Artificial Sequence
  Description of Artificial Sequence: Synthetic oligonucleotide
cgacguccgucaaguucca

SEQ ID NO: 717442 - RNA, 19 nt, Artificial Sequence
  Description of Artificial Sequence: Synthetic oligonucleotide
cgccgcugucgcucaugac

SEQ ID NO: 717443 - RNA, 19 nt, Artificial Sequence
  Description of Artificial Sequence: Synthetic oligonucleotide
gggguaugccgugcagauu

SEQ ID NO: 717444 - RNA, 19 nt, Artificial Sequence
  Description of Artificial Sequence: Synthetic oligonucleotide
cguucgccguaguucugcu

SEQ ID NO: 717445 - RNA, 19 nt, Artificial Sequence
  Description of Artificial Sequence: Synthetic oligonucleotide
ccgugcagauuuccccgau

SEQ ID NO: 717446 - RNA, 19 nt, Artificial Sequence
  Description of Artificial Sequence: Synthetic oligonucleotide
cggcggcgugaacugccau

SEQ ID NO: 717447 - RNA, 19 nt, Artificial Sequence
  Description of Artificial Sequence: Synthetic oligonucleotide
aauaagaucaaaccuugac

SEQ ID NO: 717448 - RNA, 19 nt, Artificial Sequence
  Description of Artificial Sequence: Synthetic oligonucleotide
gaauuaaugacucuaacug

SEQ ID NO: 717449 - RNA, 19 nt, Artificial Sequence
  Description of Artificial Sequence: Synthetic oligonucleotide
ucuuacuugaaucugaugu

SEQ ID NO: 717450 - RNA, 19 nt, Artificial Sequence
  Description of Artificial Sequence: Synthetic oligonucleotide
aaaaucuuacuuuagcaug

SEQ ID NO: 717451 - RNA, 19 nt, Artificial Sequence
  Description of Artificial Sequence: Synthetic oligonucleotide
uugacaacaauguaugugg

SEQ ID NO: 717452 - RNA, 19 nt, Artificial Sequence
  Description of Artificial Sequence: Synthetic oligonucleotide
acucaauaggauuugcugc

SEQ ID NO: 717453 - RNA, 19 nt, Artificial Sequence
  Description of Artificial Sequence: Synthetic oligonucleotide
uaacguucaaagaagaucu

SEQ ID NO: 717454 - RNA, 19 nt, Artificial Sequence
  Description of Artificial Sequence: Synthetic oligonucleotide
ucuacaagaucauuguggg

SEQ ID NO: 717455 - RNA, 19 nt, Artificial Sequence
  Description of Artificial Sequence: Synthetic oligonucleotide
auagauauauccacaaugc

SEQ ID NO: 717456 - RNA, 19 nt, Artificial Sequence
  Description of Artificial Sequence: Synthetic oligonucleotide
auauuaaucucuccaaguc

SEQ ID NO: 717457 - RNA, 19 nt, Artificial Sequence
  Description of Artificial Sequence: Synthetic oligonucleotide
aguuggauauuuucaaugg

SEQ ID NO: 717458 - RNA, 19 nt, Artificial Sequence
  Description of Artificial Sequence: Synthetic oligonucleotide
uuuauagacagacuucaca

SEQ ID NO: 717459 - RNA, 19 nt, Artificial Sequence
  Description of Artificial Sequence: Synthetic oligonucleotide
uaauauuaaucucuccaag

SEQ ID NO: 717460 - RNA, 19 nt, Artificial Sequence
  Description of Artificial Sequence: Synthetic oligonucleotide
uaauggaugacaucaaugu

SEQ ID NO: 717461 - RNA, 19 nt, Artificial Sequence
  Description of Artificial Sequence: Synthetic oligonucleotide
ucuuacuuuagcaugggcu

SEQ ID NO: 717462 - RNA, 19 nt, Artificial Sequence
  Description of Artificial Sequence: Synthetic oligonucleotide
aaugacucuaacugucggg

SEQ ID NO: 717463 - RNA, 19 nt, Artificial Sequence
  Description of Artificial Sequence: Synthetic oligonucleotide
uuuucuuaggauuccacug

SEQ ID NO: 717464 - RNA, 19 nt, Artificial Sequence
  Description of Artificial Sequence: Synthetic oligonucleotide
cuuaagcaauuuuacacgg

SEQ ID NO: 717465 - RNA, 19 nt, Artificial Sequence
  Description of Artificial Sequence: Synthetic oligonucleotide
uguucguaaaugcugggag

SEQ ID NO: 717466 - RNA, 19 nt, Artificial Sequence
  Description of Artificial Sequence: Synthetic oligonucleotide
uugaaguuugaucaucugc

SEQ ID NO: 717467 - RNA, 19 nt, Artificial Sequence
  Description of Artificial Sequence: Synthetic oligonucleotide
auaacguucaaagaagauc

SEQ ID NO: 717468 - RNA, 19 nt, Artificial Sequence
  Description of Artificial Sequence: Synthetic oligonucleotide
agcaaugcggccucggucc

SEQ ID NO: 717469 - RNA, 19 nt, Artificial Sequence
  Description of Artificial Sequence: Synthetic oligonucleotide
uuugguaguacagugaaac

SEQ ID NO: 717470 - RNA, 19 nt, Artificial Sequence
  Description of Artificial Sequence: Synthetic oligonucleotide
aauuuuacacgguucucug

SEQ ID NO: 717471 - RNA, 19 nt, Artificial Sequence
  Description of Artificial Sequence: Synthetic oligonucleotide
uacccuuagauaaaauaag

SEQ ID NO: 717472 - RNA, 19 nt, Artificial Sequence
  Description of Artificial Sequence: Synthetic oligonucleotide
aagaucaaaccuugacaac

SEQ ID NO: 717473 - RNA, 19 nt, Artificial Sequence
  Description of Artificial Sequence: Synthetic oligonucleotide
gauugacucgaauagguac

SEQ ID NO: 717474 - RNA, 19 nt, Artificial Sequence
  Description of Artificial Sequence: Synthetic oligonucleotide
aaggcguuuugccucuucc

SEQ ID NO: 717475 - RNA, 19 nt, Artificial Sequence
  Description of Artificial Sequence: Synthetic oligonucleotide
uccccuguaauauuaaucu

SEQ ID NO: 717476 - RNA, 19 nt, Artificial Sequence
  Description of Artificial Sequence: Synthetic oligonucleotide
ugcuaaucgaauuaaugac

SEQ ID NO: 717477 - RNA, 19 nt, Artificial Sequence
  Description of Artificial Sequence: Synthetic oligonucleotide
caacauaugccauugucgc

SEQ ID NO: 717478 - RNA, 19 nt, Artificial Sequence
  Description of Artificial Sequence: Synthetic oligonucleotide
aagcaagucgcucauaaau

SEQ ID NO: 717479 - RNA, 19 nt, Artificial Sequence
  Description of Artificial Sequence: Synthetic oligonucleotide
uaauugcugugucagacug

SEQ ID NO: 717480 - RNA, 19 nt, Artificial Sequence
  Description of Artificial Sequence: Synthetic oligonucleotide
auauaugccugugacauuc

SEQ ID NO: 717481 - RNA, 19 nt, Artificial Sequence
  Description of Artificial Sequence: Synthetic oligonucleotide
ucuuuuacgagaaguggca

SEQ ID NO: 717482 - RNA, 19 nt, Artificial Sequence
  Description of Artificial Sequence: Synthetic oligonucleotide
uaggauuccacugagacuc

SEQ ID NO: 717483 - RNA, 19 nt, Artificial Sequence
  Description of Artificial Sequence: Synthetic oligonucleotide
uugaucaucugcuuaucag

SEQ ID NO: 717484 - RNA, 19 nt, Artificial Sequence
  Description of Artificial Sequence: Synthetic oligonucleotide
ugauguucuaagauggagu

SEQ ID NO: 717485 - RNA, 19 nt, Artificial Sequence
  Description of Artificial Sequence: Synthetic oligonucleotide
aaugcaacauaugccauug

SEQ ID NO: 717486 - RNA, 19 nt, Artificial Sequence
  Description of Artificial Sequence: Synthetic oligonucleotide
guugguauaaccuccugug

SEQ ID NO: 717487 - RNA, 19 nt, Artificial Sequence
  Description of Artificial Sequence: Synthetic oligonucleotide
ugugcauaugcuauguagu

SEQ ID NO: 717488 - RNA, 19 nt, Artificial Sequence
  Description of Artificial Sequence: Synthetic oligonucleotide
gucuacaagaucauugugg

SEQ ID NO: 717489 - RNA, 19 nt, Artificial Sequence
  Description of Artificial Sequence: Synthetic oligonucleotide
cuaaucgaauuaaugacuc

SEQ ID NO: 717490 - RNA, 19 nt, Artificial Sequence
  Description of Artificial Sequence: Synthetic oligonucleotide
augugcauaugcuauguag

SEQ ID NO: 717491 - RNA, 19 nt, Artificial Sequence
  Description of Artificial Sequence: Synthetic oligonucleotide
uguaggacuagcugccugg

SEQ ID NO: 717492 - RNA, 19 nt, Artificial Sequence
  Description of Artificial Sequence: Synthetic oligonucleotide
uuguugguacuuuaaagcu

SEQ ID NO: 717493 - RNA, 19 nt, Artificial Sequence
  Description of Artificial Sequence: Synthetic oligonucleotide
cucgaauagguacugcucg

SEQ ID NO: 717494 - RNA, 19 nt, Artificial Sequence
  Description of Artificial Sequence: Synthetic oligonucleotide
uuaagcugacagaugauuc

SEQ ID NO: 717495 - RNA, 19 nt, Artificial Sequence
  Description of Artificial Sequence: Synthetic oligonucleotide
ucagaaaacagugaucggu

SEQ ID NO: 717496 - RNA, 19 nt, Artificial Sequence
  Description of Artificial Sequence: Synthetic oligonucleotide
ugguacuaugugcauaugc

SEQ ID NO: 717497 - RNA, 19 nt, Artificial Sequence
  Description of Artificial Sequence: Synthetic oligonucleotide
uaagcugacagaugauucc

SEQ ID NO: 717498 - RNA, 19 nt, Artificial Sequence
  Description of Artificial Sequence: Synthetic oligonucleotide
agaugugcgggcauuaagc

SEQ ID NO: 717499 - RNA, 19 nt, Artificial Sequence
  Description of Artificial Sequence: Synthetic oligonucleotide
uggauugacucgaauaggu

SEQ ID NO: 717500 - RNA, 19 nt, Artificial Sequence
  Description of Artificial Sequence: Synthetic oligonucleotide
cuuugcaauggacagaguc

SEQ ID NO: 717501 - RNA, 19 nt, Artificial Sequence
  Description of Artificial Sequence: Synthetic oligonucleotide
guagcagacugcuuuagag

SEQ ID NO: 717502 - RNA, 19 nt, Artificial Sequence
  Description of Artificial Sequence: Synthetic oligonucleotide
ugguauaaccuccugugga

SEQ ID NO: 717503 - RNA, 19 nt, Artificial Sequence
  Description of Artificial Sequence: Synthetic oligonucleotide
uauccacaaugccagugcg

SEQ ID NO: 717504 - RNA, 19 nt, Artificial Sequence
  Description of Artificial Sequence: Synthetic oligonucleotide
uuccagauguguauuggcc

SEQ ID NO: 717505 - RNA, 19 nt, Artificial Sequence
  Description of Artificial Sequence: Synthetic oligonucleotide
auucacucuauccccuggc

SEQ ID NO: 717506 - RNA, 19 nt, Artificial Sequence
  Description of Artificial Sequence: Synthetic oligonucleotide
agaauagauauauccacaa

SEQ ID NO: 717507 - RNA, 19 nt, Artificial Sequence
  Description of Artificial Sequence: Synthetic oligonucleotide
uuugaucaucugcuuauca

SEQ ID NO: 717508 - RNA, 19 nt, Artificial Sequence
  Description of Artificial Sequence: Synthetic oligonucleotide
uacuaugugcauaugcuau

SEQ ID NO: 717509 - RNA, 19 nt, Artificial Sequence
  Description of Artificial Sequence: Synthetic oligonucleotide
ugguaguacagugaaacca

SEQ ID NO: 717510 - RNA, 19 nt, Artificial Sequence
  Description of Artificial Sequence: Synthetic oligonucleotide
cacaaugccagugcgaggg

SEQ ID NO: 717511 - RNA, 19 nt, Artificial Sequence
  Description of Artificial Sequence: Synthetic oligonucleotide
uccagauguguauuggccc

SEQ ID NO: 717512 - RNA, 19 nt, Artificial Sequence
  Description of Artificial Sequence: Synthetic oligonucleotide
auuuaaaauggcuccccug

SEQ ID NO: 717513 - RNA, 19 nt, Artificial Sequence
  Description of Artificial Sequence: Synthetic oligonucleotide
cucgauauaugccugugac

SEQ ID NO: 717514 - RNA, 19 nt, Artificial Sequence
  Description of Artificial Sequence: Synthetic oligonucleotide
ucagcacggaauuugcccc

SEQ ID NO: 717515 - RNA, 19 nt, Artificial Sequence
  Description of Artificial Sequence: Synthetic oligonucleotide
uacugcucgauauaugccu

SEQ ID NO: 717516 - RNA, 19 nt, Artificial Sequence
  Description of Artificial Sequence: Synthetic oligonucleotide
ucaucaaggccauguaggc

SEQ ID NO: 717517 - RNA, 19 nt, Artificial Sequence
  Description of Artificial Sequence: Synthetic oligonucleotide
gguaugggcacacacuugg

SEQ ID NO: 717518 - RNA, 19 nt, Artificial Sequence
  Description of Artificial Sequence: Synthetic oligonucleotide
uucguaaaugcugggagcc

SEQ ID NO: 717519 - RNA, 19 nt, Artificial Sequence
  Description of Artificial Sequence: Synthetic oligonucleotide
augacucuaacugucgggg

SEQ ID NO: 717520 - RNA, 19 nt, Artificial Sequence
  Description of Artificial Sequence: Synthetic oligonucleotide
cucagcacggaauuugccc

SEQ ID NO: 717521 - RNA, 19 nt, Artificial Sequence
  Description of Artificial Sequence: Synthetic oligonucleotide
aaucgaauuaaugacucua

SEQ ID NO: 717522 - RNA, 19 nt, Artificial Sequence
  Description of Artificial Sequence: Synthetic oligonucleotide
uucuuaggauuccacugag

SEQ ID NO: 717523 - RNA, 19 nt, Artificial Sequence
  Description of Artificial Sequence: Synthetic oligonucleotide
ugacugaaauccuuccuug

SEQ ID NO: 717524 - RNA, 19 nt, Artificial Sequence
  Description of Artificial Sequence: Synthetic oligonucleotide
uuugcaucgguuuuccgau

SEQ ID NO: 717525 - RNA, 19 nt, Artificial Sequence
  Description of Artificial Sequence: Synthetic oligonucleotide
agacuguccccgaauaucc

SEQ ID NO: 717526 - RNA, 19 nt, Artificial Sequence
  Description of Artificial Sequence: Synthetic oligonucleotide
ucgaauuaaugacucuaac

SEQ ID NO: 717527 - RNA, 19 nt, Artificial Sequence
  Description of Artificial Sequence: Synthetic oligonucleotide
caucaucugccaaugcacg

SEQ ID NO: 717528 - RNA, 19 nt, Artificial Sequence
  Description of Artificial Sequence: Synthetic oligonucleotide
guaauauuaaucucuccaa

SEQ ID NO: 717529 - RNA, 19 nt, Artificial Sequence
  Description of Artificial Sequence: Synthetic oligonucleotide
uuuccagauguguauuggc

SEQ ID NO: 717530 - RNA, 19 nt, Artificial Sequence
  Description of Artificial Sequence: Synthetic oligonucleotide
ggauguugaucucagcacg

SEQ ID NO: 717531 - RNA, 19 nt, Artificial Sequence
  Description of Artificial Sequence: Synthetic oligonucleotide
ugucugguuuccuggaaag

SEQ ID NO: 717532 - RNA, 19 nt, Artificial Sequence
  Description of Artificial Sequence: Synthetic oligonucleotide
auaauggaugacaucaaug

SEQ ID NO: 717533 - RNA, 19 nt, Artificial Sequence
  Description of Artificial Sequence: Synthetic oligonucleotide
ucgguuuuccgauaaugga

SEQ ID NO: 717534 - RNA, 19 nt, Artificial Sequence
  Description of Artificial Sequence: Synthetic oligonucleotide
ugucuacaagaucauugug

SEQ ID NO: 717535 - RNA, 19 nt, Artificial Sequence
  Description of Artificial Sequence: Synthetic oligonucleotide
uuuuacgagaaguggcacu

SEQ ID NO: 717536 - RNA, 19 nt, Artificial Sequence
  Description of Artificial Sequence: Synthetic oligonucleotide
ucuaagauggagucaggau

SEQ ID NO: 717537 - RNA, 19 nt, Artificial Sequence
  Description of Artificial Sequence: Synthetic oligonucleotide
uuggauugacucgaauagg

SEQ ID NO: 717538 - RNA, 19 nt, Artificial Sequence
  Description of Artificial Sequence: Synthetic oligonucleotide
uacagugaaaccaggugau

SEQ ID NO: 717539 - RNA, 19 nt, Artificial Sequence
  Description of Artificial Sequence: Synthetic oligonucleotide
augcauuaaaaggucuuac

SEQ ID NO: 717540 - RNA, 19 nt, Artificial Sequence
  Description of Artificial Sequence: Synthetic oligonucleotide
aucgguuuuccgauaaugg

SEQ ID NO: 717541 - RNA, 19 nt, Artificial Sequence
  Description of Artificial Sequence: Synthetic oligonucleotide
uuaagcaauuuuacacggu

SEQ ID NO: 717542 - RNA, 19 nt, Artificial Sequence
  Description of Artificial Sequence: Synthetic oligonucleotide
caggauaacguucaaagaa

SEQ ID NO: 717543 - RNA, 19 nt, Artificial Sequence
  Description of Artificial Sequence: Synthetic oligonucleotide
aggauaacguucaaagaag

SEQ ID NO: 717544 - RNA, 19 nt, Artificial Sequence
  Description of Artificial Sequence: Synthetic oligonucleotide
cucauguucacauaggccu

SEQ ID NO: 717545 - RNA, 19 nt, Artificial Sequence
  Description of Artificial Sequence: Synthetic oligonucleotide
auugucgcucaagacaagg

SEQ ID NO: 717546 - RNA, 19 nt, Artificial Sequence
  Description of Artificial Sequence: Synthetic oligonucleotide
agggucuuucaucacguag

SEQ ID NO: 717547 - RNA, 19 nt, Artificial Sequence
  Description of Artificial Sequence: Synthetic oligonucleotide
guggguuuuauagacagac

SEQ ID NO: 717548 - RNA, 19 nt, Artificial Sequence
  Description of Artificial Sequence: Synthetic oligonucleotide
acuaugugcauaugcuaug

SEQ ID NO: 717549 - RNA, 19 nt, Artificial Sequence
  Description of Artificial Sequence: Synthetic oligonucleotide
uguuuuacccuuagauaaa

SEQ ID NO: 717550 - RNA, 19 nt, Artificial Sequence
  Description of Artificial Sequence: Synthetic oligonucleotide
ugcauaugcuauguagucc

SEQ ID NO: 717551 - RNA, 19 nt, Artificial Sequence
  Description of Artificial Sequence: Synthetic oligonucleotide
uugguaguacagugaaacc

SEQ ID NO: 717552 - RNA, 19 nt, Artificial Sequence
  Description of Artificial Sequence: Synthetic oligonucleotide
guggauaggagaugaguug

SEQ ID NO: 717553 - RNA, 19 nt, Artificial Sequence
  Description of Artificial Sequence: Synthetic oligonucleotide
uaguacagugaaaccaggu

SEQ ID NO: 717554 - RNA, 19 nt, Artificial Sequence
  Description of Artificial Sequence: Synthetic oligonucleotide
aaugcauuaaaaggucuua

SEQ ID NO: 717555 - RNA, 19 nt, Artificial Sequence
  Description of Artificial Sequence: Synthetic oligonucleotide
uguauuggccccuggggac

SEQ ID NO: 717556 - RNA, 19 nt, Artificial Sequence
  Description of Artificial Sequence: Synthetic oligonucleotide
acugagacucaauaggauu

SEQ ID NO: 717557 - RNA, 19 nt, Artificial Sequence
  Description of Artificial Sequence: Synthetic oligonucleotide
uccccgaauauccucaaau

SEQ ID NO: 717558 - RNA, 19 nt, Artificial Sequence
  Description of Artificial Sequence: Synthetic oligonucleotide
ucuauccccuggcugaacu

SEQ ID NO: 717559 - RNA, 19 nt, Artificial Sequence
  Description of Artificial Sequence: Synthetic oligonucleotide
aaggucuuacuugaaucug

SEQ ID NO: 717560 - RNA, 19 nt, Artificial Sequence
  Description of Artificial Sequence: Synthetic oligonucleotide
uggagucaggauaacguuc

SEQ ID NO: 717561 - RNA, 19 nt, Artificial Sequence
  Description of Artificial Sequence: Synthetic oligonucleotide
guucguaaaugcugggagc

SEQ ID NO: 717562 - RNA, 19 nt, Artificial Sequence
  Description of Artificial Sequence: Synthetic oligonucleotide
uggauaggagaugaguugu

SEQ ID NO: 717563 - RNA, 19 nt, Artificial Sequence
  Description of Artificial Sequence: Synthetic oligonucleotide
cuucaugcaguacagaucu

SEQ ID NO: 717564 - RNA, 19 nt, Artificial Sequence
  Description of Artificial Sequence: Synthetic oligonucleotide
ucgguugugggaucagugc

SEQ ID NO: 717565 - RNA, 19 nt, Artificial Sequence
  Description of Artificial Sequence: Synthetic oligonucleotide
uccuggaaaguuccuuaag

SEQ ID NO: 717566 - RNA, 19 nt, Artificial Sequence
  Description of Artificial Sequence: Synthetic oligonucleotide
accuugacaacaauguaug

SEQ ID NO: 717567 - RNA, 19 nt, Artificial Sequence
  Description of Artificial Sequence: Synthetic oligonucleotide
gguacuuuaaagcuggugu

SEQ ID NO: 717568 - RNA, 19 nt, Artificial Sequence
  Description of Artificial Sequence: Synthetic oligonucleotide
gcuacuaccaaucuuccuc

SEQ ID NO: 717569 - RNA, 19 nt, Artificial Sequence
  Description of Artificial Sequence: Synthetic oligonucleotide
ucugauguucuaagaugga

SEQ ID NO: 717570 - RNA, 19 nt, Artificial Sequence
  Description of Artificial Sequence: Synthetic oligonucleotide
ugaucgaugucuucuggau

SEQ ID NO: 717571 - RNA, 19 nt, Artificial Sequence
  Description of Artificial Sequence: Synthetic oligonucleotide
agguuguauacauacugaa

SEQ ID NO: 717572 - RNA, 19 nt, Artificial Sequence
  Description of Artificial Sequence: Synthetic oligonucleotide
gcauuaagcugacagauga

SEQ ID NO: 717573 - RNA, 19 nt, Artificial Sequence
  Description of Artificial Sequence: Synthetic oligonucleotide
uaaucgaauuaaugacucu

SEQ ID NO: 717574 - RNA, 19 nt, Artificial Sequence
  Description of Artificial Sequence: Synthetic oligonucleotide
auuggaagaaggccuccug

SEQ ID NO: 717575 - RNA, 19 nt, Artificial Sequence
  Description of Artificial Sequence: Synthetic oligonucleotide
gguaguacagugaaaccag

SEQ ID NO: 717576 - RNA, 19 nt, Artificial Sequence
  Description of Artificial Sequence: Synthetic oligonucleotide
acauugcucacucuuggau

SEQ ID NO: 717577 - RNA, 19 nt, Artificial Sequence
  Description of Artificial Sequence: Synthetic oligonucleotide
caucacguaggcugugagg

SEQ ID NO: 717578 - RNA, 19 nt, Artificial Sequence
  Description of Artificial Sequence: Synthetic oligonucleotide
auaaguuuccucaaugcuu

SEQ ID NO: 717579 - RNA, 19 nt, Artificial Sequence
  Description of Artificial Sequence: Synthetic oligonucleotide
uuccgauaauggaugacau

SEQ ID NO: 717580 - RNA, 19 nt, Artificial Sequence
  Description of Artificial Sequence: Synthetic oligonucleotide
cuccccuguaauauuaauc

SEQ ID NO: 717581 - RNA, 19 nt, Artificial Sequence
  Description of Artificial Sequence: Synthetic oligonucleotide
ucaagacaagggcaccugu

SEQ ID NO: 717582 - RNA, 19 nt, Artificial Sequence
  Description of Artificial Sequence: Synthetic oligonucleotide
agcaagcguacaguuuucc

SEQ ID NO: 717583 - RNA, 19 nt, Artificial Sequence
  Description of Artificial Sequence: Synthetic oligonucleotide
auaugcuauguaguccuuc

SEQ ID NO: 717584 - RNA, 19 nt, Artificial Sequence
  Description of Artificial Sequence: Synthetic oligonucleotide
auugacucgaauagguacu

SEQ ID NO: 717585 - RNA, 19 nt, Artificial Sequence
  Description of Artificial Sequence: Synthetic oligonucleotide
ucuuaggauuccacugaga

SEQ ID NO: 717586 - RNA, 19 nt, Artificial Sequence
  Description of Artificial Sequence: Synthetic oligonucleotide
ucgcucaagacaagggcac

SEQ ID NO: 717587 - RNA, 19 nt, Artificial Sequence
  Description of Artificial Sequence: Synthetic oligonucleotide
uguugaucucagcacggaa

SEQ ID NO: 717588 - RNA, 19 nt, Artificial Sequence
  Description of Artificial Sequence: Synthetic oligonucleotide
cauguucguaaaugcuggg

SEQ ID NO: 717589 - RNA, 19 nt, Artificial Sequence
  Description of Artificial Sequence: Synthetic oligonucleotide
gagaugaguuguuuauaca

SEQ ID NO: 717590 - RNA, 19 nt, Artificial Sequence
  Description of Artificial Sequence: Synthetic oligonucleotide
ugagacucaauaggauuug

SEQ ID NO: 717591 - RNA, 19 nt, Artificial Sequence
  Description of Artificial Sequence: Synthetic oligonucleotide
auuuuacacgguucucuga

SEQ ID NO: 717592 - RNA, 19 nt, Artificial Sequence
  Description of Artificial Sequence: Synthetic oligonucleotide
acuaccaaucuuccucaug

SEQ ID NO: 717593 - RNA, 19 nt, Artificial Sequence
  Description of Artificial Sequence: Synthetic oligonucleotide
uauagacagacuucacauu

SEQ ID NO: 717594 - RNA, 19 nt, Artificial Sequence
  Description of Artificial Sequence: Synthetic oligonucleotide
gggucuuucaucacguagg

SEQ ID NO: 717595 - RNA, 19 nt, Artificial Sequence
  Description of Artificial Sequence: Synthetic oligonucleotide
aauguggguuuuauagaca

SEQ ID NO: 717596 - RNA, 19 nt, Artificial Sequence
  Description of Artificial Sequence: Synthetic oligonucleotide
uggguuuuauagacagacu

SEQ ID NO: 717597 - RNA, 19 nt, Artificial Sequence
  Description of Artificial Sequence: Synthetic oligonucleotide
auuaagcugacagaugauu

SEQ ID NO: 717598 - RNA, 19 nt, Artificial Sequence
  Description of Artificial Sequence: Synthetic oligonucleotide
auaggagaugaguuguuua

SEQ ID NO: 717599 - RNA, 19 nt, Artificial Sequence
  Description of Artificial Sequence: Synthetic oligonucleotide
ucgaauagguacugcucga

SEQ ID NO: 717600 - RNA, 19 nt, Artificial Sequence
  Description of Artificial Sequence: Synthetic oligonucleotide
cucagucggggcgugaugg

SEQ ID NO: 717601 - RNA, 19 nt, Artificial Sequence
  Description of Artificial Sequence: Synthetic oligonucleotide
aaauaagaucaaaccuuga

SEQ ID NO: 717602 - RNA, 19 nt, Artificial Sequence
  Description of Artificial Sequence: Synthetic oligonucleotide
aauuugccccuuccugugu

SEQ ID NO: 717603 - RNA, 19 nt, Artificial Sequence
  Description of Artificial Sequence: Synthetic oligonucleotide
ugcaucgguuuuccgauaa

SEQ ID NO: 717604 - RNA, 19 nt, Artificial Sequence
  Description of Artificial Sequence: Synthetic oligonucleotide
gauggagucaggauaacgu

SEQ ID NO: 717605 - RNA, 19 nt, Artificial Sequence
  Description of Artificial Sequence: Synthetic oligonucleotide
caugggcuucugcuaaucg

SEQ ID NO: 717606 - RNA, 19 nt, Artificial Sequence
  Description of Artificial Sequence: Synthetic oligonucleotide
ucugguuuccuggaaaguu

SEQ ID NO: 717607 - RNA, 19 nt, Artificial Sequence
  Description of Artificial Sequence: Synthetic oligonucleotide
agcaagucgcucauaaaug

SEQ ID NO: 717608 - RNA, 19 nt, Artificial Sequence
  Description of Artificial Sequence: Synthetic oligonucleotide
aacguucaaagaagaucuc

SEQ ID NO: 717609 - RNA, 19 nt, Artificial Sequence
  Description of Artificial Sequence: Synthetic oligonucleotide
gcgggcauuaagcugacag

SEQ ID NO: 717610 - RNA, 19 nt, Artificial Sequence
  Description of Artificial Sequence: Synthetic oligonucleotide
ucgcucauaaaugucuggu

SEQ ID NO: 717611 - RNA, 19 nt, Artificial Sequence
  Description of Artificial Sequence: Synthetic oligonucleotide
gucgcucauaaaugucugg

SEQ ID NO: 717612 - RNA, 19 nt, Artificial Sequence
  Description of Artificial Sequence: Synthetic oligonucleotide
augacuucaugcaguacag

SEQ ID NO: 717613 - RNA, 19 nt, Artificial Sequence
  Description of Artificial Sequence: Synthetic oligonucleotide
uguggguuuuauagacaga

SEQ ID NO: 717614 - RNA, 19 nt, Artificial Sequence
  Description of Artificial Sequence: Synthetic oligonucleotide
cgagaaguggcacucaucc

SEQ ID NO: 717615 - RNA, 19 nt, Artificial Sequence
  Description of Artificial Sequence: Synthetic oligonucleotide
gaaaacagugaucgguugu

SEQ ID NO: 717616 - RNA, 19 nt, Artificial Sequence
  Description of Artificial Sequence: Synthetic oligonucleotide
gguaguuggauauuuucaa

SEQ ID NO: 717617 - RNA, 19 nt, Artificial Sequence
  Description of Artificial Sequence: Synthetic oligonucleotide
acccuuagauaaaauaagu

SEQ ID NO: 717618 - RNA, 19 nt, Artificial Sequence
  Description of Artificial Sequence: Synthetic oligonucleotide
gguuuuccgauaauggaug

SEQ ID NO: 717619 - RNA, 19 nt, Artificial Sequence
  Description of Artificial Sequence: Synthetic oligonucleotide
ucaccguuaagaagucauc

SEQ ID NO: 717620 - RNA, 19 nt, Artificial Sequence
  Description of Artificial Sequence: Synthetic oligonucleotide
cagugcgagggucaguagc

SEQ ID NO: 717621 - RNA, 19 nt, Artificial Sequence
  Description of Artificial Sequence: Synthetic oligonucleotide
caucgguuuuccgauaaug

SEQ ID NO: 717622 - RNA, 19 nt, Artificial Sequence
  Description of Artificial Sequence: Synthetic oligonucleotide
guggcacucaucccuguag

SEQ ID NO: 717623 - RNA, 19 nt, Artificial Sequence
  Description of Artificial Sequence: Synthetic oligonucleotide
ggaaucagcugugaugucc

SEQ ID NO: 717624 - RNA, 19 nt, Artificial Sequence
  Description of Artificial Sequence: Synthetic oligonucleotide
uugacucgaauagguacug

SEQ ID NO: 717625 - RNA, 19 nt, Artificial Sequence
  Description of Artificial Sequence: Synthetic oligonucleotide
cugcuuaucagaaaacagu

SEQ ID NO: 717626 - RNA, 19 nt, Artificial Sequence
  Description of Artificial Sequence: Synthetic oligonucleotide
auuugccccuuccugugug

SEQ ID NO: 717627 - RNA, 19 nt, Artificial Sequence
  Description of Artificial Sequence: Synthetic oligonucleotide
caagacaagggcaccuguc

SEQ ID NO: 717628 - RNA, 19 nt, Artificial Sequence
  Description of Artificial Sequence: Synthetic oligonucleotide
acguucaaagaagaucuca

SEQ ID NO: 717629 - RNA, 19 nt, Artificial Sequence
  Description of Artificial Sequence: Synthetic oligonucleotide
caagucgcucauaaauguc

SEQ ID NO: 717630 - RNA, 19 nt, Artificial Sequence
  Description of Artificial Sequence: Synthetic oligonucleotide
caucaaggccauguaggcg

SEQ ID NO: 717631 - RNA, 19 nt, Artificial Sequence
  Description of Artificial Sequence: Synthetic oligonucleotide
uggcacucaucccuguagu

SEQ ID NO: 717632 - RNA, 19 nt, Artificial Sequence
  Description of Artificial Sequence: Synthetic oligonucleotide
agugaucgguugugggauc

SEQ ID NO: 717633 - RNA, 19 nt, Artificial Sequence
  Description of Artificial Sequence: Synthetic oligonucleotide
ucaauaggauuugcugcug

SEQ ID NO: 717634 - RNA, 19 nt, Artificial Sequence
  Description of Artificial Sequence: Synthetic oligonucleotide
ugguaugggcacacacuug

SEQ ID NO: 717635 - RNA, 19 nt, Artificial Sequence
  Description of Artificial Sequence: Synthetic oligonucleotide
gccauugucgcucaagaca

SEQ ID NO: 717636 - RNA, 19 nt, Artificial Sequence
  Description of Artificial Sequence: Synthetic oligonucleotide
gacucgaauagguacugcu

SEQ ID NO: 717637 - RNA, 19 nt, Artificial Sequence
  Description of Artificial Sequence: Synthetic oligonucleotide
uacgagaaguggcacucau

SEQ ID NO: 717638 - RNA, 19 nt, Artificial Sequence
  Description of Artificial Sequence: Synthetic oligonucleotide
uuuuccgauaauggaugac

SEQ ID NO: 717639 - RNA, 19 nt, Artificial Sequence
  Description of Artificial Sequence: Synthetic oligonucleotide
auaaccuccuguggauagg

SEQ ID NO: 717640 - RNA, 19 nt, Artificial Sequence
  Description of Artificial Sequence: Synthetic oligonucleotide
cacucuauccccuggcuga

SEQ ID NO: 717641 - RNA, 19 nt, Artificial Sequence
  Description of Artificial Sequence: Synthetic oligonucleotide
cuuuuacgagaaguggcac

SEQ ID NO: 717642 - RNA, 19 nt, Artificial Sequence
  Description of Artificial Sequence: Synthetic oligonucleotide
uacuuuagcaugggcuucu

SEQ ID NO: 717643 - RNA, 19 nt, Artificial Sequence
  Description of Artificial Sequence: Synthetic oligonucleotide
uaugugcauaugcuaugua

SEQ ID NO: 717644 - RNA, 19 nt, Artificial Sequence
  Description of Artificial Sequence: Synthetic oligonucleotide
auaggauuugcugcugcca

SEQ ID NO: 717645 - RNA, 19 nt, Artificial Sequence
  Description of Artificial Sequence: Synthetic oligonucleotide
gagacucaauaggauuugc

SEQ ID NO: 717646 - RNA, 19 nt, Artificial Sequence
  Description of Artificial Sequence: Synthetic oligonucleotide
cacggaauuugccccuucc

SEQ ID NO: 717647 - RNA, 19 nt, Artificial Sequence
  Description of Artificial Sequence: Synthetic oligonucleotide
guaugugguaguuggauau

SEQ ID NO: 717648 - RNA, 19 nt, Artificial Sequence
  Description of Artificial Sequence: Synthetic oligonucleotide
gugaaaccaggugaugagc

SEQ ID NO: 717649 - RNA, 19 nt, Artificial Sequence
  Description of Artificial Sequence: Synthetic oligonucleotide
acggaauuugccccuuccu

SEQ ID NO: 717650 - RNA, 19 nt, Artificial Sequence
  Description of Artificial Sequence: Synthetic oligonucleotide
cugugucagacuguccccg

SEQ ID NO: 717651 - RNA, 19 nt, Artificial Sequence
  Description of Artificial Sequence: Synthetic oligonucleotide
gaugugcgggcauuaagcu

SEQ ID NO: 717652 - RNA, 19 nt, Artificial Sequence
  Description of Artificial Sequence: Synthetic oligonucleotide
ugucagacuguccccgaau

SEQ ID NO: 717653 - RNA, 19 nt, Artificial Sequence
  Description of Artificial Sequence: Synthetic oligonucleotide
cucaauaggauuugcugcu

SEQ ID NO: 717654 - RNA, 19 nt, Artificial Sequence
  Description of Artificial Sequence: Synthetic oligonucleotide
cuuacuuuagcaugggcuu

SEQ ID NO: 717655 - RNA, 19 nt, Artificial Sequence
  Description of Artificial Sequence: Synthetic oligonucleotide
ugguaauugcugugucaga

SEQ ID NO: 717656 - RNA, 19 nt, Artificial Sequence
  Description of Artificial Sequence: Synthetic oligonucleotide
uuacuuuagcaugggcuuc

SEQ ID NO: 717657 - RNA, 19 nt, Artificial Sequence
  Description of Artificial Sequence: Synthetic oligonucleotide
agucggggcgugaugguac

SEQ ID NO: 717658 - RNA, 19 nt, Artificial Sequence
  Description of Artificial Sequence: Synthetic oligonucleotide
ggcgugaugguacuaugug

SEQ ID NO: 717659 - RNA, 19 nt, Artificial Sequence
  Description of Artificial Sequence: Synthetic oligonucleotide
ucacguaggcugugaggcc

SEQ ID NO: 717660 - RNA, 19 nt, Artificial Sequence
  Description of Artificial Sequence: Synthetic oligonucleotide
aucgaauuaaugacucuaa

SEQ ID NO: 717661 - RNA, 19 nt, Artificial Sequence
  Description of Artificial Sequence: Synthetic oligonucleotide
cagacgccggucauaugcc

SEQ ID NO: 717662 - RNA, 19 nt, Artificial Sequence
  Description of Artificial Sequence: Synthetic oligonucleotide
cauaugccucauccugagg

SEQ ID NO: 717663 - RNA, 19 nt, Artificial Sequence
  Description of Artificial Sequence: Synthetic oligonucleotide
uccccggcuacuaccaauc

SEQ ID NO: 717664 - RNA, 19 nt, Artificial Sequence
  Description of Artificial Sequence: Synthetic oligonucleotide
auauauccacaaugccagu

SEQ ID NO: 717665 - RNA, 19 nt, Artificial Sequence
  Description of Artificial Sequence: Synthetic oligonucleotide
ccggcuacuaccaaucuuc

SEQ ID NO: 717666 - RNA, 19 nt, Artificial Sequence
  Description of Artificial Sequence: Synthetic oligonucleotide
agacucaauaggauuugcu

SEQ ID NO: 717667 - RNA, 19 nt, Artificial Sequence
  Description of Artificial Sequence: Synthetic oligonucleotide
guacugcucgauauaugcc

SEQ ID NO: 717668 - RNA, 19 nt, Artificial Sequence
  Description of Artificial Sequence: Synthetic oligonucleotide
agugcgagggucaguagca

SEQ ID NO: 717669 - RNA, 19 nt, Artificial Sequence
  Description of Artificial Sequence: Synthetic oligonucleotide
uaggcguuuugcaucgguu

SEQ ID NO: 717670 - RNA, 19 nt, Artificial Sequence
  Description of Artificial Sequence: Synthetic oligonucleotide
ugugucagacuguccccga

SEQ ID NO: 717671 - RNA, 19 nt, Artificial Sequence
  Description of Artificial Sequence: Synthetic oligonucleotide
cagacuguccccgaauauc

SEQ ID NO: 717672 - RNA, 19 nt, Artificial Sequence
  Description of Artificial Sequence: Synthetic oligonucleotide
ugcucgauauaugccugug

SEQ ID NO: 717673 - RNA, 19 nt, Artificial Sequence
  Description of Artificial Sequence: Synthetic oligonucleotide
ugcuucaacuuugucugaa

SEQ ID NO: 717674 - RNA, 19 nt, Artificial Sequence
  Description of Artificial Sequence: Synthetic oligonucleotide
ugcgagggucaguagcaga

SEQ ID NO: 717675 - RNA, 19 nt, Artificial Sequence
  Description of Artificial Sequence: Synthetic oligonucleotide
aucgguugugggaucagug

SEQ ID NO: 717676 - RNA, 19 nt, Artificial Sequence
  Description of Artificial Sequence: Synthetic oligonucleotide
gucgcucaagacaagggca

SEQ ID NO: 717677 - RNA, 19 nt, Artificial Sequence
  Description of Artificial Sequence: Synthetic oligonucleotide
cagugaaaccaggugauga

SEQ ID NO: 717678 - RNA, 19 nt, Artificial Sequence
  Description of Artificial Sequence: Synthetic oligonucleotide
gcugaucgaugucuucugg

SEQ ID NO: 717679 - RNA, 19 nt, Artificial Sequence
  Description of Artificial Sequence: Synthetic oligonucleotide
gacugcuuuagagccuccc

SEQ ID NO: 717680 - RNA, 19 nt, Artificial Sequence
  Description of Artificial Sequence: Synthetic oligonucleotide
gaagcaagucgcucauaaa

SEQ ID NO: 717681 - RNA, 19 nt, Artificial Sequence
  Description of Artificial Sequence: Synthetic oligonucleotide
uccacccuggugguauggg

SEQ ID NO: 717682 - RNA, 19 nt, Artificial Sequence
  Description of Artificial Sequence: Synthetic oligonucleotide
gcgugaugguacuaugugc

SEQ ID NO: 717683 - RNA, 19 nt, Artificial Sequence
  Description of Artificial Sequence: Synthetic oligonucleotide
agucgcucauaaaugucug

SEQ ID NO: 717684 - RNA, 19 nt, Artificial Sequence
  Description of Artificial Sequence: Synthetic oligonucleotide
uuugccccuuccuguguga

SEQ ID NO: 717685 - RNA, 19 nt, Artificial Sequence
  Description of Artificial Sequence: Synthetic oligonucleotide
guuuuacccuuagauaaaa

SEQ ID NO: 717686 - RNA, 19 nt, Artificial Sequence
  Description of Artificial Sequence: Synthetic oligonucleotide
caccguuaagaagucauca

SEQ ID NO: 717687 - RNA, 19 nt, Artificial Sequence
  Description of Artificial Sequence: Synthetic oligonucleotide
acaacagugugaggugucu

SEQ ID NO: 717688 - RNA, 19 nt, Artificial Sequence
  Description of Artificial Sequence: Synthetic oligonucleotide
cuguaggacuagcugccug

SEQ ID NO: 717689 - RNA, 19 nt, Artificial Sequence
  Description of Artificial Sequence: Synthetic oligonucleotide
cacucuuggauugacucga

SEQ ID NO: 717690 - RNA, 19 nt, Artificial Sequence
  Description of Artificial Sequence: Synthetic oligonucleotide
ugacucgaauagguacugc

SEQ ID NO: 717691 - RNA, 19 nt, Artificial Sequence
  Description of Artificial Sequence: Synthetic oligonucleotide
caauuuuacacgguucucu

SEQ ID NO: 717692 - RNA, 19 nt, Artificial Sequence
  Description of Artificial Sequence: Synthetic oligonucleotide
gcaagcguacaguuuuccc

SEQ ID NO: 717693 - RNA, 19 nt, Artificial Sequence
  Description of Artificial Sequence: Synthetic oligonucleotide
ggagucaggauaacguuca

SEQ ID NO: 717694 - RNA, 19 nt, Artificial Sequence
  Description of Artificial Sequence: Synthetic oligonucleotide
ggauaacguucaaagaaga

SEQ ID NO: 717695 - RNA, 19 nt, Artificial Sequence
  Description of Artificial Sequence: Synthetic oligonucleotide
gguacuaugugcauaugcu

SEQ ID NO: 717696 - RNA, 19 nt, Artificial Sequence
  Description of Artificial Sequence: Synthetic oligonucleotide
cauuccccggcuacuacca

SEQ ID NO: 717697 - RNA, 19 nt, Artificial Sequence
  Description of Artificial Sequence: Synthetic oligonucleotide
cagacugcuuuagagccuc

SEQ ID NO: 717698 - RNA, 19 nt, Artificial Sequence
  Description of Artificial Sequence: Synthetic oligonucleotide
ucguaaaugcugggagcca

SEQ ID NO: 717699 - RNA, 19 nt, Artificial Sequence
  Description of Artificial Sequence: Synthetic oligonucleotide
uugguacuuuaaagcuggu

SEQ ID NO: 717700 - RNA, 19 nt, Artificial Sequence
  Description of Artificial Sequence: Synthetic oligonucleotide
uugcugugucagacugucc

SEQ ID NO: 717701 - RNA, 19 nt, Artificial Sequence
  Description of Artificial Sequence: Synthetic oligonucleotide
cauugucgcucaagacaag

SEQ ID NO: 717702 - RNA, 19 nt, Artificial Sequence
  Description of Artificial Sequence: Synthetic oligonucleotide
gauaacguucaaagaagau

SEQ ID NO: 717703 - RNA, 19 nt, Artificial Sequence
  Description of Artificial Sequence: Synthetic oligonucleotide
ucccuguaguaagaauaga

SEQ ID NO: 717704 - RNA, 19 nt, Artificial Sequence
  Description of Artificial Sequence: Synthetic oligonucleotide
acgagaaguggcacucauc

SEQ ID NO: 717705 - RNA, 19 nt, Artificial Sequence
  Description of Artificial Sequence: Synthetic oligonucleotide
uuacgagaaguggcacuca

SEQ ID NO: 717706 - RNA, 19 nt, Artificial Sequence
  Description of Artificial Sequence: Synthetic oligonucleotide
cugagacucaauaggauuu

SEQ ID NO: 717707 - RNA, 19 nt, Artificial Sequence
  Description of Artificial Sequence: Synthetic oligonucleotide
gcauuaaaaggucuuacuu

SEQ ID NO: 717708 - RNA, 19 nt, Artificial Sequence
  Description of Artificial Sequence: Synthetic oligonucleotide
uaugugguaguuggauauu

SEQ ID NO: 717709 - RNA, 19 nt, Artificial Sequence
  Description of Artificial Sequence: Synthetic oligonucleotide
uaggacuagcugccugguc

SEQ ID NO: 717710 - RNA, 19 nt, Artificial Sequence
  Description of Artificial Sequence: Synthetic oligonucleotide
gauucagguuucucauacu

SEQ ID NO: 717711 - RNA, 19 nt, Artificial Sequence
  Description of Artificial Sequence: Synthetic oligonucleotide
auguugaucucagcacgga

SEQ ID NO: 717712 - RNA, 19 nt, Artificial Sequence
  Description of Artificial Sequence: Synthetic oligonucleotide
ccauugucgcucaagacaa

SEQ ID NO: 717713 - RNA, 19 nt, Artificial Sequence
  Description of Artificial Sequence: Synthetic oligonucleotide
gcuaaucgaauuaaugacu

SEQ ID NO: 717714 - RNA, 19 nt, Artificial Sequence
  Description of Artificial Sequence: Synthetic oligonucleotide
gaaggcguuuugccucuuc

SEQ ID NO: 717715 - RNA, 19 nt, Artificial Sequence
  Description of Artificial Sequence: Synthetic oligonucleotide
acucagucggggcgugaug

SEQ ID NO: 717716 - RNA, 19 nt, Artificial Sequence
  Description of Artificial Sequence: Synthetic oligonucleotide
agacgccggucauaugccu

SEQ ID NO: 717717 - RNA, 19 nt, Artificial Sequence
  Description of Artificial Sequence: Synthetic oligonucleotide
ucagucggggcgugauggu

SEQ ID NO: 717718 - RNA, 19 nt, Artificial Sequence
  Description of Artificial Sequence: Synthetic oligonucleotide
cucagcaaugcggccucgg

SEQ ID NO: 717719 - RNA, 19 nt, Artificial Sequence
  Description of Artificial Sequence: Synthetic oligonucleotide
cacauugcucacucuugga

SEQ ID NO: 717720 - RNA, 19 nt, Artificial Sequence
  Description of Artificial Sequence: Synthetic oligonucleotide
cacaagugcagggcucagc

SEQ ID NO: 717721 - RNA, 19 nt, Artificial Sequence
  Description of Artificial Sequence: Synthetic oligonucleotide
ccggugaaggcguuuugcc

SEQ ID NO: 717722 - RNA, 19 nt, Artificial Sequence
  Description of Artificial Sequence: Synthetic oligonucleotide
cuuugguaguacagugaaa

SEQ ID NO: 717723 - RNA, 19 nt, Artificial Sequence
  Description of Artificial Sequence: Synthetic oligonucleotide
gcaagucgcucauaaaugu

SEQ ID NO: 717724 - RNA, 19 nt, Artificial Sequence
  Description of Artificial Sequence: Synthetic oligonucleotide
ugcucacucuuggauugac

SEQ ID NO: 717725 - RNA, 19 nt, Artificial Sequence
  Description of Artificial Sequence: Synthetic oligonucleotide
ucccggugaaggcguuuug

SEQ ID NO: 717726 - RNA, 19 nt, Artificial Sequence
  Description of Artificial Sequence: Synthetic oligonucleotide
ggccauguaggcguuuugc

SEQ ID NO: 717727 - RNA, 19 nt, Artificial Sequence
  Description of Artificial Sequence: Synthetic oligonucleotide
uacuaccaaucuuccucau

SEQ ID NO: 717728 - RNA, 19 nt, Artificial Sequence
  Description of Artificial Sequence: Synthetic oligonucleotide
accagguuguauacauacu

SEQ ID NO: 717729 - RNA, 19 nt, Artificial Sequence
  Description of Artificial Sequence: Synthetic oligonucleotide
gguugguauaaccuccugu

SEQ ID NO: 717730 - RNA, 19 nt, Artificial Sequence
  Description of Artificial Sequence: Synthetic oligonucleotide
agauguguauuggccccug

SEQ ID NO: 717731 - RNA, 19 nt, Artificial Sequence
  Description of Artificial Sequence: Synthetic oligonucleotide
cccuguaauauuaaucucu

SEQ ID NO: 717732 - RNA, 19 nt, Artificial Sequence
  Description of Artificial Sequence: Synthetic oligonucleotide
aaugcggccucgguccauu

SEQ ID NO: 717733 - RNA, 19 nt, Artificial Sequence
  Description of Artificial Sequence: Synthetic oligonucleotide
gaucgaugucuucuggauu

SEQ ID NO: 717734 - RNA, 19 nt, Artificial Sequence
  Description of Artificial Sequence: Synthetic oligonucleotide
gucaccguuaagaagucau

SEQ ID NO: 717735 - RNA, 19 nt, Artificial Sequence
  Description of Artificial Sequence: Synthetic oligonucleotide
gguauaaccuccuguggau

SEQ ID NO: 717736 - RNA, 19 nt, Artificial Sequence
  Description of Artificial Sequence: Synthetic oligonucleotide
ccgaauauccucaaauagu

SEQ ID NO: 717737 - RNA, 19 nt, Artificial Sequence
  Description of Artificial Sequence: Synthetic oligonucleotide
caucaauguggguuuuaua

SEQ ID NO: 717738 - RNA, 19 nt, Artificial Sequence
  Description of Artificial Sequence: Synthetic oligonucleotide
acucaucccuguaguaaga

SEQ ID NO: 717739 - RNA, 19 nt, Artificial Sequence
  Description of Artificial Sequence: Synthetic oligonucleotide
cauugcucacucuuggauu

SEQ ID NO: 717740 - RNA, 19 nt, Artificial Sequence
  Description of Artificial Sequence: Synthetic oligonucleotide
uauuggccccuggggacca

SEQ ID NO: 717741 - RNA, 19 nt, Artificial Sequence
  Description of Artificial Sequence: Synthetic oligonucleotide
caaugccagugcgaggguc

SEQ ID NO: 717742 - RNA, 19 nt, Artificial Sequence
  Description of Artificial Sequence: Synthetic oligonucleotide
auggcuccccuguaauauu

SEQ ID NO: 717743 - RNA, 19 nt, Artificial Sequence
  Description of Artificial Sequence: Synthetic oligonucleotide
agccagacgccggucauau

SEQ ID NO: 717744 - RNA, 19 nt, Artificial Sequence
  Description of Artificial Sequence: Synthetic oligonucleotide
agacugcuuuagagccucc

SEQ ID NO: 717745 - RNA, 19 nt, Artificial Sequence
  Description of Artificial Sequence: Synthetic oligonucleotide
cugugacauucacucuauc

SEQ ID NO: 717746 - RNA, 19 nt, Artificial Sequence
  Description of Artificial Sequence: Synthetic oligonucleotide
gauauaugccugugacauu

SEQ ID NO: 717747 - RNA, 19 nt, Artificial Sequence
  Description of Artificial Sequence: Synthetic oligonucleotide
gugaucgguugugggauca

SEQ ID NO: 717748 - RNA, 19 nt, Artificial Sequence
  Description of Artificial Sequence: Synthetic oligonucleotide
cggaauuugccccuuccug

SEQ ID NO: 717749 - RNA, 19 nt, Artificial Sequence
  Description of Artificial Sequence: Synthetic oligonucleotide
aucugccaaugcacgcagg

SEQ ID NO: 717750 - RNA, 19 nt, Artificial Sequence
  Description of Artificial Sequence: Synthetic oligonucleotide
gcgagggucaguagcagac

SEQ ID NO: 717751 - RNA, 19 nt, Artificial Sequence
  Description of Artificial Sequence: Synthetic oligonucleotide
augguacuaugugcauaug

SEQ ID NO: 717752 - RNA, 19 nt, Artificial Sequence
  Description of Artificial Sequence: Synthetic oligonucleotide
uugcaucgguuuuccgaua

SEQ ID NO: 717753 - RNA, 19 nt, Artificial Sequence
  Description of Artificial Sequence: Synthetic oligonucleotide
acagaugugcgggcauuaa

SEQ ID NO: 717754 - RNA, 19 nt, Artificial Sequence
  Description of Artificial Sequence: Synthetic oligonucleotide
gcguuuugccucuuccaca

SEQ ID NO: 717755 - RNA, 19 nt, Artificial Sequence
  Description of Artificial Sequence: Synthetic oligonucleotide
ggcauuggaagaaggccuc

SEQ ID NO: 717756 - RNA, 19 nt, Artificial Sequence
  Description of Artificial Sequence: Synthetic oligonucleotide
guaggcguuuugcaucggu

SEQ ID NO: 717757 - RNA, 19 nt, Artificial Sequence
  Description of Artificial Sequence: Synthetic oligonucleotide
gcaauuuuacacgguucuc

SEQ ID NO: 717758 - RNA, 19 nt, Artificial Sequence
  Description of Artificial Sequence: Synthetic oligonucleotide
ggacuagcugccuggucuc

SEQ ID NO: 717759 - RNA, 19 nt, Artificial Sequence
  Description of Artificial Sequence: Synthetic oligonucleotide
ggggcgugaugguacuaug

SEQ ID NO: 717760 - RNA, 19 nt, Artificial Sequence
  Description of Artificial Sequence: Synthetic oligonucleotide
ccccuguaauauuaaucuc

SEQ ID NO: 717761 - RNA, 19 nt, Artificial Sequence
  Description of Artificial Sequence: Synthetic oligonucleotide
gugcgagggucaguagcag

SEQ ID NO: 717762 - RNA, 19 nt, Artificial Sequence
  Description of Artificial Sequence: Synthetic oligonucleotide
cauuaagcugacagaugau

SEQ ID NO: 717763 - RNA, 19 nt, Artificial Sequence
  Description of Artificial Sequence: Synthetic oligonucleotide
cacugagacucaauaggau

SEQ ID NO: 717764 - RNA, 19 nt, Artificial Sequence
  Description of Artificial Sequence: Synthetic oligonucleotide
ccacccuggugguaugggc

SEQ ID NO: 717765 - RNA, 19 nt, Artificial Sequence
  Description of Artificial Sequence: Synthetic oligonucleotide
ccacaaugccagugcgagg

SEQ ID NO: 717766 - RNA, 19 nt, Artificial Sequence
  Description of Artificial Sequence: Synthetic oligonucleotide
cccuguaguaagaauagau

SEQ ID NO: 717767 - RNA, 19 nt, Artificial Sequence
  Description of Artificial Sequence: Synthetic oligonucleotide
ggugguaugggcacacacu

SEQ ID NO: 717768 - RNA, 19 nt, Artificial Sequence
  Description of Artificial Sequence: Synthetic oligonucleotide
gaucgguugugggaucagu

SEQ ID NO: 717769 - RNA, 19 nt, Artificial Sequence
  Description of Artificial Sequence: Synthetic oligonucleotide
gugucagacuguccccgaa

SEQ ID NO: 717770 - RNA, 19 nt, Artificial Sequence
  Description of Artificial Sequence: Synthetic oligonucleotide
acucuauccccuggcugaa

SEQ ID NO: 717771 - RNA, 19 nt, Artificial Sequence
  Description of Artificial Sequence: Synthetic oligonucleotide
caccugucuguaggacuag

SEQ ID NO: 717772 - RNA, 19 nt, Artificial Sequence
  Description of Artificial Sequence: Synthetic oligonucleotide
auaugccauugucgcucaa

SEQ ID NO: 717773 - RNA, 19 nt, Artificial Sequence
  Description of Artificial Sequence: Synthetic oligonucleotide
cccggugaaggcguuuugc

SEQ ID NO: 717774 - RNA, 19 nt, Artificial Sequence
  Description of Artificial Sequence: Synthetic oligonucleotide
ggauugacucgaauaggua

SEQ ID NO: 717775 - RNA, 19 nt, Artificial Sequence
  Description of Artificial Sequence: Synthetic oligonucleotide
ucacucagucggggcguga

SEQ ID NO: 717776 - RNA, 19 nt, Artificial Sequence
  Description of Artificial Sequence: Synthetic oligonucleotide
cagugaucgguugugggau

SEQ ID NO: 717777 - RNA, 19 nt, Artificial Sequence
  Description of Artificial Sequence: Synthetic oligonucleotide
gcuaugggugguguggcaa

SEQ ID NO: 717778 - RNA, 19 nt, Artificial Sequence
  Description of Artificial Sequence: Synthetic oligonucleotide
cucuauccccuggcugaac

SEQ ID NO: 717779 - RNA, 19 nt, Artificial Sequence
  Description of Artificial Sequence: Synthetic oligonucleotide
cggcuacuaccaaucuucc

SEQ ID NO: 717780 - RNA, 19 nt, Artificial Sequence
  Description of Artificial Sequence: Synthetic oligonucleotide
gcaccugucuguaggacua

SEQ ID NO: 717781 - RNA, 19 nt, Artificial Sequence
  Description of Artificial Sequence: Synthetic oligonucleotide
guccccgaauauccucaaa

SEQ ID NO: 717782 - RNA, 19 nt, Artificial Sequence
  Description of Artificial Sequence: Synthetic oligonucleotide
ugcgggcauuaagcugaca

SEQ ID NO: 717783 - RNA, 19 nt, Artificial Sequence
  Description of Artificial Sequence: Synthetic oligonucleotide
guaggacuagcugccuggu

SEQ ID NO: 717784 - RNA, 19 nt, Artificial Sequence
  Description of Artificial Sequence: Synthetic oligonucleotide
agcacggaauuugccccuu

SEQ ID NO: 717785 - RNA, 19 nt, Artificial Sequence
  Description of Artificial Sequence: Synthetic oligonucleotide
ugccuggucucagggucuu

SEQ ID NO: 717786 - RNA, 19 nt, Artificial Sequence
  Description of Artificial Sequence: Synthetic oligonucleotide
cgggcauuaagcugacaga

SEQ ID NO: 717787 - RNA, 19 nt, Artificial Sequence
  Description of Artificial Sequence: Synthetic oligonucleotide
caggagacucuugaaguuu

SEQ ID NO: 717788 - RNA, 19 nt, Artificial Sequence
  Description of Artificial Sequence: Synthetic oligonucleotide
cagcacggaauuugccccu

SEQ ID NO: 717789 - RNA, 19 nt, Artificial Sequence
  Description of Artificial Sequence: Synthetic oligonucleotide
ccugucuguaggacuagcu

SEQ ID NO: 717790 - RNA, 19 nt, Artificial Sequence
  Description of Artificial Sequence: Synthetic oligonucleotide
cauaugcuauguaguccuu

SEQ ID NO: 717791 - RNA, 19 nt, Artificial Sequence
  Description of Artificial Sequence: Synthetic oligonucleotide
cgguuuuccgauaauggau

SEQ ID NO: 717792 - RNA, 19 nt, Artificial Sequence
  Description of Artificial Sequence: Synthetic oligonucleotide
gucggggcgugaugguacu

SEQ ID NO: 717793 - RNA, 19 nt, Artificial Sequence
  Description of Artificial Sequence: Synthetic oligonucleotide
gcacaagugcagggcucag

SEQ ID NO: 717794 - RNA, 19 nt, Artificial Sequence
  Description of Artificial Sequence: Synthetic oligonucleotide
gagccagacgccggucaua

SEQ ID NO: 717795 - RNA, 19 nt, Artificial Sequence
  Description of Artificial Sequence: Synthetic oligonucleotide
cagauguguauuggccccu

SEQ ID NO: 717796 - RNA, 19 nt, Artificial Sequence
  Description of Artificial Sequence: Synthetic oligonucleotide
ccaaugcacgcagggcuuc

SEQ ID NO: 717797 - RNA, 19 nt, Artificial Sequence
  Description of Artificial Sequence: Synthetic oligonucleotide
ccuugacaacaauguaugu

SEQ ID NO: 717798 - RNA, 19 nt, Artificial Sequence
  Description of Artificial Sequence: Synthetic oligonucleotide
cguuuugccucuuccacau

SEQ ID NO: 717799 - RNA, 19 nt, Artificial Sequence
  Description of Artificial Sequence: Synthetic oligonucleotide
gugcgggcauuaagcugac

SEQ ID NO: 717800 - RNA, 19 nt, Artificial Sequence
  Description of Artificial Sequence: Synthetic oligonucleotide
ccugugugacugaaauccu

SEQ ID NO: 717801 - RNA, 19 nt, Artificial Sequence
  Description of Artificial Sequence: Synthetic oligonucleotide
ucggggcgugaugguacua

SEQ ID NO: 717802 - RNA, 19 nt, Artificial Sequence
  Description of Artificial Sequence: Synthetic oligonucleotide
gggcgugaugguacuaugu

SEQ ID NO: 717803 - RNA, 19 nt, Artificial Sequence
  Description of Artificial Sequence: Synthetic oligonucleotide
cugaagcaagucgcucaua

SEQ ID NO: 717804 - RNA, 19 nt, Artificial Sequence
  Description of Artificial Sequence: Synthetic oligonucleotide
cagucggggcgugauggua

SEQ ID NO: 717805 - RNA, 19 nt, Artificial Sequence
  Description of Artificial Sequence: Synthetic oligonucleotide
ggcuccccuguaauauuaa

SEQ ID NO: 717806 - RNA, 19 nt, Artificial Sequence
  Description of Artificial Sequence: Synthetic oligonucleotide
caaugcacgcagggcuucu

SEQ ID NO: 717807 - RNA, 19 nt, Artificial Sequence
  Description of Artificial Sequence: Synthetic oligonucleotide
gcucacucuuggauugacu

SEQ ID NO: 717808 - RNA, 19 nt, Artificial Sequence
  Description of Artificial Sequence: Synthetic oligonucleotide
cacucagucggggcgugau

SEQ ID NO: 717809 - RNA, 19 nt, Artificial Sequence
  Description of Artificial Sequence: Synthetic oligonucleotide
cucccggugaaggcguuuu

SEQ ID NO: 717810 - RNA, 19 nt, Artificial Sequence
  Description of Artificial Sequence: Synthetic oligonucleotide
ccucacucagucggggcgu

SEQ ID NO: 717811 - RNA, 19 nt, Artificial Sequence
  Description of Artificial Sequence: Synthetic oligonucleotide
cgaauagguacugcucgau

SEQ ID NO: 717812 - RNA, 19 nt, Artificial Sequence
  Description of Artificial Sequence: Synthetic oligonucleotide
cccggcuacuaccaaucuu

SEQ ID NO: 717813 - RNA, 19 nt, Artificial Sequence
  Description of Artificial Sequence: Synthetic oligonucleotide
caaugcggccucgguccau

SEQ ID NO: 717814 - RNA, 19 nt, Artificial Sequence
  Description of Artificial Sequence: Synthetic oligonucleotide
ccccggcuacuaccaaucu

SEQ ID NO: 717815 - RNA, 19 nt, Artificial Sequence
  Description of Artificial Sequence: Synthetic oligonucleotide
cggggcgugaugguacuau

SEQ ID NO: 717816 - RNA, 19 nt, Artificial Sequence
  Description of Artificial Sequence: Synthetic oligonucleotide
ccucccggugaaggcguuu

SEQ ID NO: 717817 - RNA, 19 nt, Artificial Sequence
  Description of Artificial Sequence: Synthetic oligonucleotide
auuacuucaggcuaagugc

SEQ ID NO: 717818 - RNA, 19 nt, Artificial Sequence
  Description of Artificial Sequence: Synthetic oligonucleotide
cauaaauauaguuuggucg

SEQ ID NO: 717819 - RNA, 19 nt, Artificial Sequence
  Description of Artificial Sequence: Synthetic oligonucleotide
uuuagguagacacaccugg

SEQ ID NO: 717820 - RNA, 19 nt, Artificial Sequence
  Description of Artificial Sequence: Synthetic oligonucleotide
aaaaccgggagcuagcuuc

SEQ ID NO: 717821 - RNA, 19 nt, Artificial Sequence
  Description of Artificial Sequence: Synthetic oligonucleotide
aagucaaucacauggaugu

SEQ ID NO: 717822 - RNA, 19 nt, Artificial Sequence
  Description of Artificial Sequence: Synthetic oligonucleotide
uaaguuuugccuaaguucc

SEQ ID NO: 717823 - RNA, 19 nt, Artificial Sequence
  Description of Artificial Sequence: Synthetic oligonucleotide
aaaguaucaggcuucuaac

SEQ ID NO: 717824 - RNA, 19 nt, Artificial Sequence
  Description of Artificial Sequence: Synthetic oligonucleotide
aaugaaaguacugaguuug

SEQ ID NO: 717825 - RNA, 19 nt, Artificial Sequence
  Description of Artificial Sequence: Synthetic oligonucleotide
ugugccauuguaaugauac

SEQ ID NO: 717826 - RNA, 19 nt, Artificial Sequence
  Description of Artificial Sequence: Synthetic oligonucleotide
aaaaguaucaggcuucuaa

SEQ ID NO: 717827 - RNA, 19 nt, Artificial Sequence
  Description of Artificial Sequence: Synthetic oligonucleotide
gacucauaaauauaguuug

SEQ ID NO: 717828 - RNA, 19 nt, Artificial Sequence
  Description of Artificial Sequence: Synthetic oligonucleotide
aacaucaaagacuagggau

SEQ ID NO: 717829 - RNA, 19 nt, Artificial Sequence
  Description of Artificial Sequence: Synthetic oligonucleotide
ugcaugaacuaucucaggg

SEQ ID NO: 717830 - RNA, 19 nt, Artificial Sequence
  Description of Artificial Sequence: Synthetic oligonucleotide
auggaugucgaauaccagc

SEQ ID NO: 717831 - RNA, 19 nt, Artificial Sequence
  Description of Artificial Sequence: Synthetic oligonucleotide
aauacgucugaaucugaac

SEQ ID NO: 717832 - RNA, 19 nt, Artificial Sequence
  Description of Artificial Sequence: Synthetic oligonucleotide
ucgaauaccagcacagccg

SEQ ID NO: 717833 - RNA, 19 nt, Artificial Sequence
  Description of Artificial Sequence: Synthetic oligonucleotide
aaagacuagggaugccugc

SEQ ID NO: 717834 - RNA, 19 nt, Artificial Sequence
  Description of Artificial Sequence: Synthetic oligonucleotide
aauaccagcacagccgagc

SEQ ID NO: 717835 - RNA, 19 nt, Artificial Sequence
  Description of Artificial Sequence: Synthetic oligonucleotide
aaaucaaucucuuuaggua

SEQ ID NO: 717836 - RNA, 19 nt, Artificial Sequence
  Description of Artificial Sequence: Synthetic oligonucleotide
agugccaacauuuggggac

SEQ ID NO: 717837 - RNA, 19 nt, Artificial Sequence
  Description of Artificial Sequence: Synthetic oligonucleotide
ugcaacaucaaagacuagg

SEQ ID NO: 717838 - RNA, 19 nt, Artificial Sequence
  Description of Artificial Sequence: Synthetic oligonucleotide
acuaccuuguucucaaugg

SEQ ID NO: 717839 - RNA, 19 nt, Artificial Sequence
  Description of Artificial Sequence: Synthetic oligonucleotide
aaaggugugguuccuugcg

SEQ ID NO: 717840 - RNA, 19 nt, Artificial Sequence
  Description of Artificial Sequence: Synthetic oligonucleotide
uucuccauaggccagaaaa

SEQ ID NO: 717841 - RNA, 19 nt, Artificial Sequence
  Description of Artificial Sequence: Synthetic oligonucleotide
ucgauuucuucaaagaggu

SEQ ID NO: 717842 - RNA, 19 nt, Artificial Sequence
  Description of Artificial Sequence: Synthetic oligonucleotide
uauaguuuggucguacagg

SEQ ID NO: 717843 - RNA, 19 nt, Artificial Sequence
  Description of Artificial Sequence: Synthetic oligonucleotide
uuauggagguccaacaaug

SEQ ID NO: 717844 - RNA, 19 nt, Artificial Sequence
  Description of Artificial Sequence: Synthetic oligonucleotide
uucuuaagacaccagcaag

SEQ ID NO: 717845 - RNA, 19 nt, Artificial Sequence
  Description of Artificial Sequence: Synthetic oligonucleotide
ucucagaggacucauaaau

SEQ ID NO: 717846 - RNA, 19 nt, Artificial Sequence
  Description of Artificial Sequence: Synthetic oligonucleotide
guaaguuuugccuaaguuc

SEQ ID NO: 717847 - RNA, 19 nt, Artificial Sequence
  Description of Artificial Sequence: Synthetic oligonucleotide
uccauaggccagaaaaggg

SEQ ID NO: 717848 - RNA, 19 nt, Artificial Sequence
  Description of Artificial Sequence: Synthetic oligonucleotide
uuacuucaggcuaagugcc

SEQ ID NO: 717849 - RNA, 19 nt, Artificial Sequence
  Description of Artificial Sequence: Synthetic oligonucleotide
ugccauuguaaugauaccg

SEQ ID NO: 717850 - RNA, 19 nt, Artificial Sequence
  Description of Artificial Sequence: Synthetic oligonucleotide
uccaaugcaaacaccaagu

SEQ ID NO: 717851 - RNA, 19 nt, Artificial Sequence
  Description of Artificial Sequence: Synthetic oligonucleotide
uaaugucauaccuuccuag

SEQ ID NO: 717852 - RNA, 19 nt, Artificial Sequence
  Description of Artificial Sequence: Synthetic oligonucleotide
aacacgagcacagcacugc

SEQ ID NO: 717853 - RNA, 19 nt, Artificial Sequence
  Description of Artificial Sequence: Synthetic oligonucleotide
aguaagccuucauccaucc

SEQ ID NO: 717854 - RNA, 19 nt, Artificial Sequence
  Description of Artificial Sequence: Synthetic oligonucleotide
uucucgccaacacacaugc

SEQ ID NO: 717855 - RNA, 19 nt, Artificial Sequence
  Description of Artificial Sequence: Synthetic oligonucleotide
guaaugauaccgaaggaag

SEQ ID NO: 717856 - RNA, 19 nt, Artificial Sequence
  Description of Artificial Sequence: Synthetic oligonucleotide
agguagacacaccugguac

SEQ ID NO: 717857 - RNA, 19 nt, Artificial Sequence
  Description of Artificial Sequence: Synthetic oligonucleotide
cuaaguuccauguggaguc

SEQ ID NO: 717858 - RNA, 19 nt, Artificial Sequence
  Description of Artificial Sequence: Synthetic oligonucleotide
agaggacucauaaauauag

SEQ ID NO: 717859 - RNA, 19 nt, Artificial Sequence
  Description of Artificial Sequence: Synthetic oligonucleotide
augaauguacucugagaac

SEQ ID NO: 717860 - RNA, 19 nt, Artificial Sequence
  Description of Artificial Sequence: Synthetic oligonucleotide
acccuugauuacuucaggc

SEQ ID NO: 717861 - RNA, 19 nt, Artificial Sequence
  Description of Artificial Sequence: Synthetic oligonucleotide
ucaggcuuacaguucgucg

SEQ ID NO: 717862 - RNA, 19 nt, Artificial Sequence
  Description of Artificial Sequence: Synthetic oligonucleotide
auauaguuuggucguacag

SEQ ID NO: 717863 - RNA, 19 nt, Artificial Sequence
  Description of Artificial Sequence: Synthetic oligonucleotide
uucagcauuaaaaccggga

SEQ ID NO: 717864 - RNA, 19 nt, Artificial Sequence
  Description of Artificial Sequence: Synthetic oligonucleotide
aauauucccucuuccuucu

SEQ ID NO: 717865 - RNA, 19 nt, Artificial Sequence
  Description of Artificial Sequence: Synthetic oligonucleotide
uaacccuagaaaugcaccc

SEQ ID NO: 717866 - RNA, 19 nt, Artificial Sequence
  Description of Artificial Sequence: Synthetic oligonucleotide
cuaacccuagaaaugcacc

SEQ ID NO: 717867 - RNA, 19 nt, Artificial Sequence
  Description of Artificial Sequence: Synthetic oligonucleotide
cucgccaacacacaugccc

SEQ ID NO: 717868 - RNA, 19 nt, Artificial Sequence
  Description of Artificial Sequence: Synthetic oligonucleotide
ugguaccucacaaaaucag

SEQ ID NO: 717869 - RNA, 19 nt, Artificial Sequence
  Description of Artificial Sequence: Synthetic oligonucleotide
agcauuaaaaccgggagcu

SEQ ID NO: 717870 - RNA, 19 nt, Artificial Sequence
  Description of Artificial Sequence: Synthetic oligonucleotide
uaguaacacaacuucucag

SEQ ID NO: 717871 - RNA, 19 nt, Artificial Sequence
  Description of Artificial Sequence: Synthetic oligonucleotide
ugaaccuggucuaauucca

SEQ ID NO: 717872 - RNA, 19 nt, Artificial Sequence
  Description of Artificial Sequence: Synthetic oligonucleotide
ugcguagcuggaaucaaag

SEQ ID NO: 717873 - RNA, 19 nt, Artificial Sequence
  Description of Artificial Sequence: Synthetic oligonucleotide
auuacuaacccuagaaaug

SEQ ID NO: 717874 - RNA, 19 nt, Artificial Sequence
  Description of Artificial Sequence: Synthetic oligonucleotide
cauuguaaugauaccgaag

SEQ ID NO: 717875 - RNA, 19 nt, Artificial Sequence
  Description of Artificial Sequence: Synthetic oligonucleotide
aacaucaguacaaaacagu

SEQ ID NO: 717876 - RNA, 19 nt, Artificial Sequence
  Description of Artificial Sequence: Synthetic oligonucleotide
uaaugauaccgaaggaagu

SEQ ID NO: 717877 - RNA, 19 nt, Artificial Sequence
  Description of Artificial Sequence: Synthetic oligonucleotide
cacagauucuauuacuaac

SEQ ID NO: 717878 - RNA, 19 nt, Artificial Sequence
  Description of Artificial Sequence: Synthetic oligonucleotide
uagaaucaaacaguguccc

SEQ ID NO: 717879 - RNA, 19 nt, Artificial Sequence
  Description of Artificial Sequence: Synthetic oligonucleotide
uggcuagaaucaaacagug

SEQ ID NO: 717880 - RNA, 19 nt, Artificial Sequence
  Description of Artificial Sequence: Synthetic oligonucleotide
acuugcuaaugucauaccu

SEQ ID NO: 717881 - RNA, 19 nt, Artificial Sequence
  Description of Artificial Sequence: Synthetic oligonucleotide
augauaccgaaggaagucc

SEQ ID NO: 717882 - RNA, 19 nt, Artificial Sequence
  Description of Artificial Sequence: Synthetic oligonucleotide
uccaagaacguuccguugu

SEQ ID NO: 717883 - RNA, 19 nt, Artificial Sequence
  Description of Artificial Sequence: Synthetic oligonucleotide
ucauugaacaaguguccag

SEQ ID NO: 717884 - RNA, 19 nt, Artificial Sequence
  Description of Artificial Sequence: Synthetic oligonucleotide
augaacauguaccccuccg

SEQ ID NO: 717885 - RNA, 19 nt, Artificial Sequence
  Description of Artificial Sequence: Synthetic oligonucleotide
agaacguuccguuguaaug

SEQ ID NO: 717886 - RNA, 19 nt, Artificial Sequence
  Description of Artificial Sequence: Synthetic oligonucleotide
acggcuaugucuucuauga

SEQ ID NO: 717887 - RNA, 19 nt, Artificial Sequence
  Description of Artificial Sequence: Synthetic oligonucleotide
ucucuuuagguagacacac

SEQ ID NO: 717888 - RNA, 19 nt, Artificial Sequence
  Description of Artificial Sequence: Synthetic oligonucleotide
ugauaccgaaggaaguccc

SEQ ID NO: 717889 - RNA, 19 nt, Artificial Sequence
  Description of Artificial Sequence: Synthetic oligonucleotide
acauguaccccuccggaag

SEQ ID NO: 717890 - RNA, 19 nt, Artificial Sequence
  Description of Artificial Sequence: Synthetic oligonucleotide
uuacaguucgucgugcuug

SEQ ID NO: 717891 - RNA, 19 nt, Artificial Sequence
  Description of Artificial Sequence: Synthetic oligonucleotide
ggugaugauacgcuucucg

SEQ ID NO: 717892 - RNA, 19 nt, Artificial Sequence
  Description of Artificial Sequence: Synthetic oligonucleotide
gagcuuaaauuccucggcc

SEQ ID NO: 717893 - RNA, 19 nt, Artificial Sequence
  Description of Artificial Sequence: Synthetic oligonucleotide
uauggagguccaacaaugc

SEQ ID NO: 717894 - RNA, 19 nt, Artificial Sequence
  Description of Artificial Sequence: Synthetic oligonucleotide
gguacuacuuguuuccucc

SEQ ID NO: 717895 - RNA, 19 nt, Artificial Sequence
  Description of Artificial Sequence: Synthetic oligonucleotide
uuuucaugcgauuguggcu

SEQ ID NO: 717896 - RNA, 19 nt, Artificial Sequence
  Description of Artificial Sequence: Synthetic oligonucleotide
cuuauagugggaagugaug

SEQ ID NO: 717897 - RNA, 19 nt, Artificial Sequence
  Description of Artificial Sequence: Synthetic oligonucleotide
gucgaauaccagcacagcc

SEQ ID NO: 717898 - RNA, 19 nt, Artificial Sequence
  Description of Artificial Sequence: Synthetic oligonucleotide
cauuaaaaccgggagcuag

SEQ ID NO: 717899 - RNA, 19 nt, Artificial Sequence
  Description of Artificial Sequence: Synthetic oligonucleotide
uggucuaauuccaaauauc

SEQ ID NO: 717900 - RNA, 19 nt, Artificial Sequence
  Description of Artificial Sequence: Synthetic oligonucleotide
gaugucgaauaccagcaca

SEQ ID NO: 717901 - RNA, 19 nt, Artificial Sequence
  Description of Artificial Sequence: Synthetic oligonucleotide
uucgcucacaguucucagg

SEQ ID NO: 717902 - RNA, 19 nt, Artificial Sequence
  Description of Artificial Sequence: Synthetic oligonucleotide
ugcacagauucuauuacua

SEQ ID NO: 717903 - RNA, 19 nt, Artificial Sequence
  Description of Artificial Sequence: Synthetic oligonucleotide
acuaacccuagaaaugcac

SEQ ID NO: 717904 - RNA, 19 nt, Artificial Sequence
  Description of Artificial Sequence: Synthetic oligonucleotide
uuguaaugauaccgaagga

SEQ ID NO: 717905 - RNA, 19 nt, Artificial Sequence
  Description of Artificial Sequence: Synthetic oligonucleotide
acgagcacagcacugccag

SEQ ID NO: 717906 - RNA, 19 nt, Artificial Sequence
  Description of Artificial Sequence: Synthetic oligonucleotide
uacgucugaaucugaaccu

SEQ ID NO: 717907 - RNA, 19 nt, Artificial Sequence
  Description of Artificial Sequence: Synthetic oligonucleotide
uuucaugcgauuguggcua

SEQ ID NO: 717908 - RNA, 19 nt, Artificial Sequence
  Description of Artificial Sequence: Synthetic oligonucleotide
uccaugacggcuaugucuu

SEQ ID NO: 717909 - RNA, 19 nt, Artificial Sequence
  Description of Artificial Sequence: Synthetic oligonucleotide
aaguaagccuucauccauc

SEQ ID NO: 717910 - RNA, 19 nt, Artificial Sequence
  Description of Artificial Sequence: Synthetic oligonucleotide
uuacucagcacugagcaau

SEQ ID NO: 717911 - RNA, 19 nt, Artificial Sequence
  Description of Artificial Sequence: Synthetic oligonucleotide
aguuuggucguacaggcuu

SEQ ID NO: 717912 - RNA, 19 nt, Artificial Sequence
  Description of Artificial Sequence: Synthetic oligonucleotide
ugaacuaucucagggcaac

SEQ ID NO: 717913 - RNA, 19 nt, Artificial Sequence
  Description of Artificial Sequence: Synthetic oligonucleotide
uacuacuugcuaaugucau

SEQ ID NO: 717914 - RNA, 19 nt, Artificial Sequence
  Description of Artificial Sequence: Synthetic oligonucleotide
auaguccgaggacaacugg

SEQ ID NO: 717915 - RNA, 19 nt, Artificial Sequence
  Description of Artificial Sequence: Synthetic oligonucleotide
aggaauauucccucuuccu

SEQ ID NO: 717916 - RNA, 19 nt, Artificial Sequence
  Description of Artificial Sequence: Synthetic oligonucleotide
cuccaaugcaaacaccaag

SEQ ID NO: 717917 - RNA, 19 nt, Artificial Sequence
  Description of Artificial Sequence: Synthetic oligonucleotide
uacaguucgucgugcuugg

SEQ ID NO: 717918 - RNA, 19 nt, Artificial Sequence
  Description of Artificial Sequence: Synthetic oligonucleotide
ucauaccuuccuagaaacc

SEQ ID NO: 717919 - RNA, 19 nt, Artificial Sequence
  Description of Artificial Sequence: Synthetic oligonucleotide
auacgcuucucgccaacac

SEQ ID NO: 717920 - RNA, 19 nt, Artificial Sequence
  Description of Artificial Sequence: Synthetic oligonucleotide
uuugccgguugccacuugc

SEQ ID NO: 717921 - RNA, 19 nt, Artificial Sequence
  Description of Artificial Sequence: Synthetic oligonucleotide
cagcauuaaaaccgggagc

SEQ ID NO: 717922 - RNA, 19 nt, Artificial Sequence
  Description of Artificial Sequence: Synthetic oligonucleotide
auugaacaaguguccagca

SEQ ID NO: 717923 - RNA, 19 nt, Artificial Sequence
  Description of Artificial Sequence: Synthetic oligonucleotide
uacaccggccucuccauag

SEQ ID NO: 717924 - RNA, 19 nt, Artificial Sequence
  Description of Artificial Sequence: Synthetic oligonucleotide
augacaggucacuuggugu

SEQ ID NO: 717925 - RNA, 19 nt, Artificial Sequence
  Description of Artificial Sequence: Synthetic oligonucleotide
uuagguagacacaccuggu

SEQ ID NO: 717926 - RNA, 19 nt, Artificial Sequence
  Description of Artificial Sequence: Synthetic oligonucleotide
ugacaggucacuugguguc

SEQ ID NO: 717927 - RNA, 19 nt, Artificial Sequence
  Description of Artificial Sequence: Synthetic oligonucleotide
ugaguuuggagggaucaca

SEQ ID NO: 717928 - RNA, 19 nt, Artificial Sequence
  Description of Artificial Sequence: Synthetic oligonucleotide
uguaugugucaaaggugug

SEQ ID NO: 717929 - RNA, 19 nt, Artificial Sequence
  Description of Artificial Sequence: Synthetic oligonucleotide
accuggauaguccgaggac

SEQ ID NO: 717930 - RNA, 19 nt, Artificial Sequence
  Description of Artificial Sequence: Synthetic oligonucleotide
caugaacuaucucagggca

SEQ ID NO: 717931 - RNA, 19 nt, Artificial Sequence
  Description of Artificial Sequence: Synthetic oligonucleotide
cuuuagguagacacaccug

SEQ ID NO: 717932 - RNA, 19 nt, Artificial Sequence
  Description of Artificial Sequence: Synthetic oligonucleotide
uggucguacaggcuuuccc

SEQ ID NO: 717933 - RNA, 19 nt, Artificial Sequence
  Description of Artificial Sequence: Synthetic oligonucleotide
aaaccgggagcuagcuucc

SEQ ID NO: 717934 - RNA, 19 nt, Artificial Sequence
  Description of Artificial Sequence: Synthetic oligonucleotide
aagugccaacauuugggga

SEQ ID NO: 717935 - RNA, 19 nt, Artificial Sequence
  Description of Artificial Sequence: Synthetic oligonucleotide
ugccuaaguuccaugugga

SEQ ID NO: 717936 - RNA, 19 nt, Artificial Sequence
  Description of Artificial Sequence: Synthetic oligonucleotide
ucacauggaugucgaauac

SEQ ID NO: 717937 - RNA, 19 nt, Artificial Sequence
  Description of Artificial Sequence: Synthetic oligonucleotide
uaccuuguucucaauggaa

SEQ ID NO: 717938 - RNA, 19 nt, Artificial Sequence
  Description of Artificial Sequence: Synthetic oligonucleotide
uauguaccagguacuacau

SEQ ID NO: 717939 - RNA, 19 nt, Artificial Sequence
  Description of Artificial Sequence: Synthetic oligonucleotide
uacgcuucucgccaacaca

SEQ ID NO: 717940 - RNA, 19 nt, Artificial Sequence
  Description of Artificial Sequence: Synthetic oligonucleotide
caugacaggucacuuggug

SEQ ID NO: 717941 - RNA, 19 nt, Artificial Sequence
  Description of Artificial Sequence: Synthetic oligonucleotide
acauggaugucgaauacca

SEQ ID NO: 717942 - RNA, 19 nt, Artificial Sequence
  Description of Artificial Sequence: Synthetic oligonucleotide
ugugguuccuugcguagcu

SEQ ID NO: 717943 - RNA, 19 nt, Artificial Sequence
  Description of Artificial Sequence: Synthetic oligonucleotide
accuacuacuugcuaaugu

SEQ ID NO: 717944 - RNA, 19 nt, Artificial Sequence
  Description of Artificial Sequence: Synthetic oligonucleotide
ucuucacgaucauuucagc

SEQ ID NO: 717945 - RNA, 19 nt, Artificial Sequence
  Description of Artificial Sequence: Synthetic oligonucleotide
gauaguccgaggacaacug

SEQ ID NO: 717946 - RNA, 19 nt, Artificial Sequence
  Description of Artificial Sequence: Synthetic oligonucleotide
gaacauguaccccuccgga

SEQ ID NO: 717947 - RNA, 19 nt, Artificial Sequence
  Description of Artificial Sequence: Synthetic oligonucleotide
aacguuccguuguaauggu

SEQ ID NO: 717948 - RNA, 19 nt, Artificial Sequence
  Description of Artificial Sequence: Synthetic oligonucleotide
ucagggcaacaucaguaca

SEQ ID NO: 717949 - RNA, 19 nt, Artificial Sequence
  Description of Artificial Sequence: Synthetic oligonucleotide
auaccgaaggaaguccccg

SEQ ID NO: 717950 - RNA, 19 nt, Artificial Sequence
  Description of Artificial Sequence: Synthetic oligonucleotide
agggaccacaauccuucgc

SEQ ID NO: 717951 - RNA, 19 nt, Artificial Sequence
  Description of Artificial Sequence: Synthetic oligonucleotide
aucuacaccggccucucca

SEQ ID NO: 717952 - RNA, 19 nt, Artificial Sequence
  Description of Artificial Sequence: Synthetic oligonucleotide
gacggcuaugucuucuaug

SEQ ID NO: 717953 - RNA, 19 nt, Artificial Sequence
  Description of Artificial Sequence: Synthetic oligonucleotide
aaauacgucugaaucugaa

SEQ ID NO: 717954 - RNA, 19 nt, Artificial Sequence
  Description of Artificial Sequence: Synthetic oligonucleotide
cuacuacuugcuaauguca

SEQ ID NO: 717955 - RNA, 19 nt, Artificial Sequence
  Description of Artificial Sequence: Synthetic oligonucleotide
acguacgugucauagguuu

SEQ ID NO: 717956 - RNA, 19 nt, Artificial Sequence
  Description of Artificial Sequence: Synthetic oligonucleotide
gaaaugcuauccuuggggu

SEQ ID NO: 717957 - RNA, 19 nt, Artificial Sequence
  Description of Artificial Sequence: Synthetic oligonucleotide
uggggcgggaugaucacug

SEQ ID NO: 717958 - RNA, 19 nt, Artificial Sequence
  Description of Artificial Sequence: Synthetic oligonucleotide
agccgagccaggaauauuc

SEQ ID NO: 717959 - RNA, 19 nt, Artificial Sequence
  Description of Artificial Sequence: Synthetic oligonucleotide
cauguaccccuccggaagg

SEQ ID NO: 717960 - RNA, 19 nt, Artificial Sequence
  Description of Artificial Sequence: Synthetic oligonucleotide
uguccauucccggaaucag

SEQ ID NO: 717961 - RNA, 19 nt, Artificial Sequence
  Description of Artificial Sequence: Synthetic oligonucleotide
guacucugagaacuccucc

SEQ ID NO: 717962 - RNA, 19 nt, Artificial Sequence
  Description of Artificial Sequence: Synthetic oligonucleotide
uuaaaaccgggagcuagcu

SEQ ID NO: 717963 - RNA, 19 nt, Artificial Sequence
  Description of Artificial Sequence: Synthetic oligonucleotide
uacuaacccuagaaaugca

SEQ ID NO: 717964 - RNA, 19 nt, Artificial Sequence
  Description of Artificial Sequence: Synthetic oligonucleotide
uugaacaaguguccagcau

SEQ ID NO: 717965 - RNA, 19 nt, Artificial Sequence
  Description of Artificial Sequence: Synthetic oligonucleotide
cuacuuguuuccuccauga

SEQ ID NO: 717966 - RNA, 19 nt, Artificial Sequence
  Description of Artificial Sequence: Synthetic oligonucleotide
uugccgguugccacuugcg

SEQ ID NO: 717967 - RNA, 19 nt, Artificial Sequence
  Description of Artificial Sequence: Synthetic oligonucleotide
cuucacgaucauuucagca

SEQ ID NO: 717968 - RNA, 19 nt, Artificial Sequence
  Description of Artificial Sequence: Synthetic oligonucleotide
guuccguuguaaugguacc

SEQ ID NO: 717969 - RNA, 19 nt, Artificial Sequence
  Description of Artificial Sequence: Synthetic oligonucleotide
aaccuggucuaauuccaaa

SEQ ID NO: 717970 - RNA, 19 nt, Artificial Sequence
  Description of Artificial Sequence: Synthetic oligonucleotide
ccugguacuacuuguuucc

SEQ ID NO: 717971 - RNA, 19 nt, Artificial Sequence
  Description of Artificial Sequence: Synthetic oligonucleotide
uacuugcuaaugucauacc

SEQ ID NO: 717972 - RNA, 19 nt, Artificial Sequence
  Description of Artificial Sequence: Synthetic oligonucleotide
aacccuagaaaugcaccca

SEQ ID NO: 717973 - RNA, 19 nt, Artificial Sequence
  Description of Artificial Sequence: Synthetic oligonucleotide
ggugucaagcucuccuugg

SEQ ID NO: 717974 - RNA, 19 nt, Artificial Sequence
  Description of Artificial Sequence: Synthetic oligonucleotide
uuggagggaucacaccaga

SEQ ID NO: 717975 - RNA, 19 nt, Artificial Sequence
  Description of Artificial Sequence: Synthetic oligonucleotide
uaaguuccauguggagucg

SEQ ID NO: 717976 - RNA, 19 nt, Artificial Sequence
  Description of Artificial Sequence: Synthetic oligonucleotide
agcacgacuuguccagauc

SEQ ID NO: 717977 - RNA, 19 nt, Artificial Sequence
  Description of Artificial Sequence: Synthetic oligonucleotide
acaucaguacaaaacaguu

SEQ ID NO: 717978 - RNA, 19 nt, Artificial Sequence
  Description of Artificial Sequence: Synthetic oligonucleotide
uaccuuccuagaaaccuuc

SEQ ID NO: 717979 - RNA, 19 nt, Artificial Sequence
  Description of Artificial Sequence: Synthetic oligonucleotide
cauggaugucgaauaccag

SEQ ID NO: 717980 - RNA, 19 nt, Artificial Sequence
  Description of Artificial Sequence: Synthetic oligonucleotide
acaauccuucgccucucuc

SEQ ID NO: 717981 - RNA, 19 nt, Artificial Sequence
  Description of Artificial Sequence: Synthetic oligonucleotide
gucacuuggugucaagcuc

SEQ ID NO: 717982 - RNA, 19 nt, Artificial Sequence
  Description of Artificial Sequence: Synthetic oligonucleotide
aucaaagacuagggaugcc

SEQ ID NO: 717983 - RNA, 19 nt, Artificial Sequence
  Description of Artificial Sequence: Synthetic oligonucleotide
acauggcuaccacauggug

SEQ ID NO: 717984 - RNA, 19 nt, Artificial Sequence
  Description of Artificial Sequence: Synthetic oligonucleotide
gguugggagacacuucacc

SEQ ID NO: 717985 - RNA, 19 nt, Artificial Sequence
  Description of Artificial Sequence: Synthetic oligonucleotide
aguucgucgugcuuggcuu

SEQ ID NO: 717986 - RNA, 19 nt, Artificial Sequence
  Description of Artificial Sequence: Synthetic oligonucleotide
gauaccgaaggaagucccc

SEQ ID NO: 717987 - RNA, 19 nt, Artificial Sequence
  Description of Artificial Sequence: Synthetic oligonucleotide
accuggucuaauuccaaau

SEQ ID NO: 717988 - RNA, 19 nt, Artificial Sequence
  Description of Artificial Sequence: Synthetic oligonucleotide
augaaaguacugaguuugg

SEQ ID NO: 717989 - RNA, 19 nt, Artificial Sequence
  Description of Artificial Sequence: Synthetic oligonucleotide
cauguggagucgagcagag

SEQ ID NO: 717990 - RNA, 19 nt, Artificial Sequence
  Description of Artificial Sequence: Synthetic oligonucleotide
gacaucaacccaccccaac

SEQ ID NO: 717991 - RNA, 19 nt, Artificial Sequence
  Description of Artificial Sequence: Synthetic oligonucleotide
aaacacgagcacagcacug

SEQ ID NO: 717992 - RNA, 19 nt, Artificial Sequence
  Description of Artificial Sequence: Synthetic oligonucleotide
caaacagugucccauccaa

SEQ ID NO: 717993 - RNA, 19 nt, Artificial Sequence
  Description of Artificial Sequence: Synthetic oligonucleotide
auccaagaacguuccguug

SEQ ID NO: 717994 - RNA, 19 nt, Artificial Sequence
  Description of Artificial Sequence: Synthetic oligonucleotide
cuauccuugggguuaugga

SEQ ID NO: 717995 - RNA, 19 nt, Artificial Sequence
  Description of Artificial Sequence: Synthetic oligonucleotide
cacauggaugucgaauacc

SEQ ID NO: 717996 - RNA, 19 nt, Artificial Sequence
  Description of Artificial Sequence: Synthetic oligonucleotide
aauccccacguacguguca

SEQ ID NO: 717997 - RNA, 19 nt, Artificial Sequence
  Description of Artificial Sequence: Synthetic oligonucleotide
cacuugcgcaugaauguac

SEQ ID NO: 717998 - RNA, 19 nt, Artificial Sequence
  Description of Artificial Sequence: Synthetic oligonucleotide
cauagugaacaguucuuaa

SEQ ID NO: 717999 - RNA, 19 nt, Artificial Sequence
  Description of Artificial Sequence: Synthetic oligonucleotide
uuccuugcguagcuggaau

SEQ ID NO: 718000 - RNA, 19 nt, Artificial Sequence
  Description of Artificial Sequence: Synthetic oligonucleotide
uccguuguaaugguaccuc

SEQ ID NO: 718001 - RNA, 19 nt, Artificial Sequence
  Description of Artificial Sequence: Synthetic oligonucleotide
acaccuggauaguccgagg

SEQ ID NO: 718002 - RNA, 19 nt, Artificial Sequence
  Description of Artificial Sequence: Synthetic oligonucleotide
aggcuuacaguucgucgug

SEQ ID NO: 718003 - RNA, 19 nt, Artificial Sequence
  Description of Artificial Sequence: Synthetic oligonucleotide
gagggaccacaauccuucg

SEQ ID NO: 718004 - RNA, 19 nt, Artificial Sequence
  Description of Artificial Sequence: Synthetic oligonucleotide
agucgagcagagucccauc

SEQ ID NO: 718005 - RNA, 19 nt, Artificial Sequence
  Description of Artificial Sequence: Synthetic oligonucleotide
uugcguagcuggaaucaaa

SEQ ID NO: 718006 - RNA, 19 nt, Artificial Sequence
  Description of Artificial Sequence: Synthetic oligonucleotide
ucguacaggcuuucccaug

SEQ ID NO: 718007 - RNA, 19 nt, Artificial Sequence
  Description of Artificial Sequence: Synthetic oligonucleotide
uucccaucuccauuccggu

SEQ ID NO: 718008 - RNA, 19 nt, Artificial Sequence
  Description of Artificial Sequence: Synthetic oligonucleotide
uuccguuguaaugguaccu

SEQ ID NO: 718009 - RNA, 19 nt, Artificial Sequence
  Description of Artificial Sequence: Synthetic oligonucleotide
auccaauccccacguacgu

SEQ ID NO: 718010 - RNA, 19 nt, Artificial Sequence
  Description of Artificial Sequence: Synthetic oligonucleotide
agguccaacaaugcaacau

SEQ ID NO: 718011 - RNA, 19 nt, Artificial Sequence
  Description of Artificial Sequence: Synthetic oligonucleotide
acacuucaccauuccauau

SEQ ID NO: 718012 - RNA, 19 nt, Artificial Sequence
  Description of Artificial Sequence: Synthetic oligonucleotide
acuacuugcuaaugucaua

SEQ ID NO: 718013 - RNA, 19 nt, Artificial Sequence
  Description of Artificial Sequence: Synthetic oligonucleotide
aggcuuauagugggaagug

SEQ ID NO: 718014 - RNA, 19 nt, Artificial Sequence
  Description of Artificial Sequence: Synthetic oligonucleotide
gcgggaugaucacuguucg

SEQ ID NO: 718015 - RNA, 19 nt, Artificial Sequence
  Description of Artificial Sequence: Synthetic oligonucleotide
uagugguauuucagguagu

SEQ ID NO: 718016 - RNA, 19 nt, Artificial Sequence
  Description of Artificial Sequence: Synthetic oligonucleotide
cauaccuuccuagaaaccu

SEQ ID NO: 718017 - RNA, 19 nt, Artificial Sequence
  Description of Artificial Sequence: Synthetic oligonucleotide
ugauacgcuucucgccaac

SEQ ID NO: 718018 - RNA, 19 nt, Artificial Sequence
  Description of Artificial Sequence: Synthetic oligonucleotide
ggcuucuaacauuaauuuc

SEQ ID NO: 718019 - RNA, 19 nt, Artificial Sequence
  Description of Artificial Sequence: Synthetic oligonucleotide
agaucccaacacaauguug

SEQ ID NO: 718020 - RNA, 19 nt, Artificial Sequence
  Description of Artificial Sequence: Synthetic oligonucleotide
cuaccuuguucucaaugga

SEQ ID NO: 718021 - RNA, 19 nt, Artificial Sequence
  Description of Artificial Sequence: Synthetic oligonucleotide
acgucugaaucugaaccug

SEQ ID NO: 718022 - RNA, 19 nt, Artificial Sequence
  Description of Artificial Sequence: Synthetic oligonucleotide
accgaaggaaguccccgcu

SEQ ID NO: 718023 - RNA, 19 nt, Artificial Sequence
  Description of Artificial Sequence: Synthetic oligonucleotide
ucuacaccggccucuccau

SEQ ID NO: 718024 - RNA, 19 nt, Artificial Sequence
  Description of Artificial Sequence: Synthetic oligonucleotide
cgugucauagguuuucaug

SEQ ID NO: 718025 - RNA, 19 nt, Artificial Sequence
  Description of Artificial Sequence: Synthetic oligonucleotide
aggcuaagugccaacauuu

SEQ ID NO: 718026 - RNA, 19 nt, Artificial Sequence
  Description of Artificial Sequence: Synthetic oligonucleotide
cugcccacauagugaacag

SEQ ID NO: 718027 - RNA, 19 nt, Artificial Sequence
  Description of Artificial Sequence: Synthetic oligonucleotide
ggucguacaggcuuuccca

SEQ ID NO: 718028 - RNA, 19 nt, Artificial Sequence
  Description of Artificial Sequence: Synthetic oligonucleotide
uucccuuugccgguugcca

SEQ ID NO: 718029 - RNA, 19 nt, Artificial Sequence
  Description of Artificial Sequence: Synthetic oligonucleotide
cuugcgcaugaauguacuc

SEQ ID NO: 718030 - RNA, 19 nt, Artificial Sequence
  Description of Artificial Sequence: Synthetic oligonucleotide
cagggcaacaucaguacaa

SEQ ID NO: 718031 - RNA, 19 nt, Artificial Sequence
  Description of Artificial Sequence: Synthetic oligonucleotide
uacgugucauagguuuuca

SEQ ID NO: 718032 - RNA, 19 nt, Artificial Sequence
  Description of Artificial Sequence: Synthetic oligonucleotide
guuauggagguccaacaau

SEQ ID NO: 718033 - RNA, 19 nt, Artificial Sequence
  Description of Artificial Sequence: Synthetic oligonucleotide
augaucacuguucgcuuuu

SEQ ID NO: 718034 - RNA, 19 nt, Artificial Sequence
  Description of Artificial Sequence: Synthetic oligonucleotide
aaguuuugccuaaguucca

SEQ ID NO: 718035 - RNA, 19 nt, Artificial Sequence
  Description of Artificial Sequence: Synthetic oligonucleotide
ggggauggugaugauacgc

SEQ ID NO: 718036 - RNA, 19 nt, Artificial Sequence
  Description of Artificial Sequence: Synthetic oligonucleotide
uucuaacauuaauuucauu

SEQ ID NO: 718037 - RNA, 19 nt, Artificial Sequence
  Description of Artificial Sequence: Synthetic oligonucleotide
gcuauccuugggguuaugg

SEQ ID NO: 718038 - RNA, 19 nt, Artificial Sequence
  Description of Artificial Sequence: Synthetic oligonucleotide
ucgugcuuggcuuccugau

SEQ ID NO: 718039 - RNA, 19 nt, Artificial Sequence
  Description of Artificial Sequence: Synthetic oligonucleotide
gaggcuuauagugggaagu

SEQ ID NO: 718040 - RNA, 19 nt, Artificial Sequence
  Description of Artificial Sequence: Synthetic oligonucleotide
ccaaguucucaccauggac

SEQ ID NO: 718041 - RNA, 19 nt, Artificial Sequence
  Description of Artificial Sequence: Synthetic oligonucleotide
uccuucgccucucuccaau

SEQ ID NO: 718042 - RNA, 19 nt, Artificial Sequence
  Description of Artificial Sequence: Synthetic oligonucleotide
uccuugcguagcuggaauc

SEQ ID NO: 718043 - RNA, 19 nt, Artificial Sequence
  Description of Artificial Sequence: Synthetic oligonucleotide
uacugaguuuggagggauc

SEQ ID NO: 718044 - RNA, 19 nt, Artificial Sequence
  Description of Artificial Sequence: Synthetic oligonucleotide
cauggcuaccacauggugu

SEQ ID NO: 718045 - RNA, 19 nt, Artificial Sequence
  Description of Artificial Sequence: Synthetic oligonucleotide
gaaauacgucugaaucuga

SEQ ID NO: 718046 - RNA, 19 nt, Artificial Sequence
  Description of Artificial Sequence: Synthetic oligonucleotide
agacccauguccaucccca

SEQ ID NO: 718047 - RNA, 19 nt, Artificial Sequence
  Description of Artificial Sequence: Synthetic oligonucleotide
aguuuugccuaaguuccau

SEQ ID NO: 718048 - RNA, 19 nt, Artificial Sequence
  Description of Artificial Sequence: Synthetic oligonucleotide
aaccgggagcuagcuuccc

SEQ ID NO: 718049 - RNA, 19 nt, Artificial Sequence
  Description of Artificial Sequence: Synthetic oligonucleotide
cuaaugucauaccuuccua

SEQ ID NO: 718050 - RNA, 19 nt, Artificial Sequence
  Description of Artificial Sequence: Synthetic oligonucleotide
cguuccguuguaaugguac

SEQ ID NO: 718051 - RNA, 19 nt, Artificial Sequence
  Description of Artificial Sequence: Synthetic oligonucleotide
aaguuccauguggagucga

SEQ ID NO: 718052 - RNA, 19 nt, Artificial Sequence
  Description of Artificial Sequence: Synthetic oligonucleotide
cuugcuaaugucauaccuu

SEQ ID NO: 718053 - RNA, 19 nt, Artificial Sequence
  Description of Artificial Sequence: Synthetic oligonucleotide
ggagguccaacaaugcaac

SEQ ID NO: 718054 - RNA, 19 nt, Artificial Sequence
  Description of Artificial Sequence: Synthetic oligonucleotide
acuugcgcaugaauguacu

SEQ ID NO: 718055 - RNA, 19 nt, Artificial Sequence
  Description of Artificial Sequence: Synthetic oligonucleotide
gcuaaugucauaccuuccu

SEQ ID NO: 718056 - RNA, 19 nt, Artificial Sequence
  Description of Artificial Sequence: Synthetic oligonucleotide
accccaacguauguaccag

SEQ ID NO: 718057 - RNA, 19 nt, Artificial Sequence
  Description of Artificial Sequence: Synthetic oligonucleotide
acacaauguuguaaguuuu

SEQ ID NO: 718058 - RNA, 19 nt, Artificial Sequence
  Description of Artificial Sequence: Synthetic oligonucleotide
ugacggcuaugucuucuau

SEQ ID NO: 718059 - RNA, 19 nt, Artificial Sequence
  Description of Artificial Sequence: Synthetic oligonucleotide
gacccauguccauccccag

SEQ ID NO: 718060 - RNA, 19 nt, Artificial Sequence
  Description of Artificial Sequence: Synthetic oligonucleotide
uucgucgugcuuggcuucc

SEQ ID NO: 718061 - RNA, 19 nt, Artificial Sequence
  Description of Artificial Sequence: Synthetic oligonucleotide
gauacgcuucucgccaaca

SEQ ID NO: 718062 - RNA, 19 nt, Artificial Sequence
  Description of Artificial Sequence: Synthetic oligonucleotide
guacgugucauagguuuuc

SEQ ID NO: 718063 - RNA, 19 nt, Artificial Sequence
  Description of Artificial Sequence: Synthetic oligonucleotide
cacaacuucucagaggacu

SEQ ID NO: 718064 - RNA, 19 nt, Artificial Sequence
  Description of Artificial Sequence: Synthetic oligonucleotide
ggggcuugaaauacgucug

SEQ ID NO: 718065 - RNA, 19 nt, Artificial Sequence
  Description of Artificial Sequence: Synthetic oligonucleotide
caggcuuacaguucgucgu

SEQ ID NO: 718066 - RNA, 19 nt, Artificial Sequence
  Description of Artificial Sequence: Synthetic oligonucleotide
cuggucuaauuccaaauau

SEQ ID NO: 718067 - RNA, 19 nt, Artificial Sequence
  Description of Artificial Sequence: Synthetic oligonucleotide
ccuagaaaccuucacaccu

SEQ ID NO: 718068 - RNA, 19 nt, Artificial Sequence
  Description of Artificial Sequence: Synthetic oligonucleotide
gguaccucacaaaaucaga

SEQ ID NO: 718069 - RNA, 19 nt, Artificial Sequence
  Description of Artificial Sequence: Synthetic oligonucleotide
ggguuauggagguccaaca

SEQ ID NO: 718070 - RNA, 19 nt, Artificial Sequence
  Description of Artificial Sequence: Synthetic oligonucleotide
gcauuguagugguauuuca

SEQ ID NO: 718071 - RNA, 19 nt, Artificial Sequence
  Description of Artificial Sequence: Synthetic oligonucleotide
caccuggauaguccgagga

SEQ ID NO: 718072 - RNA, 19 nt, Artificial Sequence
  Description of Artificial Sequence: Synthetic oligonucleotide
aucaacccaccccaacgua

SEQ ID NO: 718073 - RNA, 19 nt, Artificial Sequence
  Description of Artificial Sequence: Synthetic oligonucleotide
gagguccaacaaugcaaca

SEQ ID NO: 718074 - RNA, 19 nt, Artificial Sequence
  Description of Artificial Sequence: Synthetic oligonucleotide
cagaggacucauaaauaua

SEQ ID NO: 718075 - RNA, 19 nt, Artificial Sequence
  Description of Artificial Sequence: Synthetic oligonucleotide
guacaggcuuucccaugcc

SEQ ID NO: 718076 - RNA, 19 nt, Artificial Sequence
  Description of Artificial Sequence: Synthetic oligonucleotide
uuggucguacaggcuuucc

SEQ ID NO: 718077 - RNA, 19 nt, Artificial Sequence
  Description of Artificial Sequence: Synthetic oligonucleotide
gccauuguaaugauaccga

SEQ ID NO: 718078 - RNA, 19 nt, Artificial Sequence
  Description of Artificial Sequence: Synthetic oligonucleotide
acgugucauagguuuucau

SEQ ID NO: 718079 - RNA, 19 nt, Artificial Sequence
  Description of Artificial Sequence: Synthetic oligonucleotide
cccagcacgacuuguccag

SEQ ID NO: 718080 - RNA, 19 nt, Artificial Sequence
  Description of Artificial Sequence: Synthetic oligonucleotide
acaguucgucgugcuuggc

SEQ ID NO: 718081 - RNA, 19 nt, Artificial Sequence
  Description of Artificial Sequence: Synthetic oligonucleotide
ugcccacauagugaacagu

SEQ ID NO: 718082 - RNA, 19 nt, Artificial Sequence
  Description of Artificial Sequence: Synthetic oligonucleotide
uuuggucguacaggcuuuc

SEQ ID NO: 718083 - RNA, 19 nt, Artificial Sequence
  Description of Artificial Sequence: Synthetic oligonucleotide
agggcaacaucaguacaaa

SEQ ID NO: 718084 - RNA, 19 nt, Artificial Sequence
  Description of Artificial Sequence: Synthetic oligonucleotide
augacggcuaugucuucua

SEQ ID NO: 718085 - RNA, 19 nt, Artificial Sequence
  Description of Artificial Sequence: Synthetic oligonucleotide
gugugguuccuugcguagc

SEQ ID NO: 718086 - RNA, 19 nt, Artificial Sequence
  Description of Artificial Sequence: Synthetic oligonucleotide
caaguaagccuucauccau

SEQ ID NO: 718087 - RNA, 19 nt, Artificial Sequence
  Description of Artificial Sequence: Synthetic oligonucleotide
uucuucgcucacaguucuc

SEQ ID NO: 718088 - RNA, 19 nt, Artificial Sequence
  Description of Artificial Sequence: Synthetic oligonucleotide
caccggccucuccauagcc

SEQ ID NO: 718089 - RNA, 19 nt, Artificial Sequence
  Description of Artificial Sequence: Synthetic oligonucleotide
acagaacauaaagcaggaa

SEQ ID NO: 718090 - RNA, 19 nt, Artificial Sequence
  Description of Artificial Sequence: Synthetic oligonucleotide
cccaccccaacguauguac

SEQ ID NO: 718091 - RNA, 19 nt, Artificial Sequence
  Description of Artificial Sequence: Synthetic oligonucleotide
acgaucauuucagcauuaa

SEQ ID NO: 718092 - RNA, 19 nt, Artificial Sequence
  Description of Artificial Sequence: Synthetic oligonucleotide
gggacuaccuuguucucaa

SEQ ID NO: 718093 - RNA, 19 nt, Artificial Sequence
  Description of Artificial Sequence: Synthetic oligonucleotide
gaacuaucucagggcaaca

SEQ ID NO: 718094 - RNA, 19 nt, Artificial Sequence
  Description of Artificial Sequence: Synthetic oligonucleotide
uguccauccccagcacgac

SEQ ID NO: 718095 - RNA, 19 nt, Artificial Sequence
  Description of Artificial Sequence: Synthetic oligonucleotide
guagacacaccugguacua

SEQ ID NO: 718096 - RNA, 19 nt, Artificial Sequence
  Description of Artificial Sequence: Synthetic oligonucleotide
aggcauuguagugguauuu

SEQ ID NO: 718097 - RNA, 19 nt, Artificial Sequence
  Description of Artificial Sequence: Synthetic oligonucleotide
guaucaggcuucuaacauu

SEQ ID NO: 718098 - RNA, 19 nt, Artificial Sequence
  Description of Artificial Sequence: Synthetic oligonucleotide
caauccccacguacguguc

SEQ ID NO: 718099 - RNA, 19 nt, Artificial Sequence
  Description of Artificial Sequence: Synthetic oligonucleotide
cgucugaaucugaaccugg

SEQ ID NO: 718100 - RNA, 19 nt, Artificial Sequence
  Description of Artificial Sequence: Synthetic oligonucleotide
ccuugauuacuucaggcua

SEQ ID NO: 718101 - RNA, 19 nt, Artificial Sequence
  Description of Artificial Sequence: Synthetic oligonucleotide
guucgucgugcuuggcuuc

SEQ ID NO: 718102 - RNA, 19 nt, Artificial Sequence
  Description of Artificial Sequence: Synthetic oligonucleotide
augaacuaucucagggcaa

SEQ ID NO: 718103 - RNA, 19 nt, Artificial Sequence
  Description of Artificial Sequence: Synthetic oligonucleotide
gaggacucauaaauauagu

SEQ ID NO: 718104 - RNA, 19 nt, Artificial Sequence
  Description of Artificial Sequence: Synthetic oligonucleotide
cauccaagaacguuccguu

SEQ ID NO: 718105 - RNA, 19 nt, Artificial Sequence
  Description of Artificial Sequence: Synthetic oligonucleotide
acguauguaccagguacua

SEQ ID NO: 718106 - RNA, 19 nt, Artificial Sequence
  Description of Artificial Sequence: Synthetic oligonucleotide
ggcuaagugccaacauuug

SEQ ID NO: 718107 - RNA, 19 nt, Artificial Sequence
  Description of Artificial Sequence: Synthetic oligonucleotide
cccacguacgugucauagg

SEQ ID NO: 718108 - RNA, 19 nt, Artificial Sequence
  Description of Artificial Sequence: Synthetic oligonucleotide
cguuguaaugguaccucac

SEQ ID NO: 718109 - RNA, 19 nt, Artificial Sequence
  Description of Artificial Sequence: Synthetic oligonucleotide
gaaccuggucuaauuccaa

SEQ ID NO: 718110 - RNA, 19 nt, Artificial Sequence
  Description of Artificial Sequence: Synthetic oligonucleotide
uccccgcucugacuucuuc

SEQ ID NO: 718111 - RNA, 19 nt, Artificial Sequence
  Description of Artificial Sequence: Synthetic oligonucleotide
auccccacguacgugucau

SEQ ID NO: 718112 - RNA, 19 nt, Artificial Sequence
  Description of Artificial Sequence: Synthetic oligonucleotide
cccuucuuacucagcacug

SEQ ID NO: 718113 - RNA, 19 nt, Artificial Sequence
  Description of Artificial Sequence: Synthetic oligonucleotide
ccgagccaggaauauuccc

SEQ ID NO: 718114 - RNA, 19 nt, Artificial Sequence
  Description of Artificial Sequence: Synthetic oligonucleotide
caccuacuacuugcuaaug

SEQ ID NO: 718115 - RNA, 19 nt, Artificial Sequence
  Description of Artificial Sequence: Synthetic oligonucleotide
cccuagaaaugcacccaag

SEQ ID NO: 718116 - RNA, 19 nt, Artificial Sequence
  Description of Artificial Sequence: Synthetic oligonucleotide
cccggaaucagccauccaa

SEQ ID NO: 718117 - RNA, 19 nt, Artificial Sequence
  Description of Artificial Sequence: Synthetic oligonucleotide
gggcuugaaauacgucuga

SEQ ID NO: 718118 - RNA, 19 nt, Artificial Sequence
  Description of Artificial Sequence: Synthetic oligonucleotide
aguccccgcucugacuucu

SEQ ID NO: 718119 - RNA, 19 nt, Artificial Sequence
  Description of Artificial Sequence: Synthetic oligonucleotide
cacgaucauuucagcauua

SEQ ID NO: 718120 - RNA, 19 nt, Artificial Sequence
  Description of Artificial Sequence: Synthetic oligonucleotide
ccccaacguauguaccagg

SEQ ID NO: 718121 - RNA, 19 nt, Artificial Sequence
  Description of Artificial Sequence: Synthetic oligonucleotide
ccauuguaaugauaccgaa

SEQ ID NO: 718122 - RNA, 19 nt, Artificial Sequence
  Description of Artificial Sequence: Synthetic oligonucleotide
cucugacuucuucgcucac

SEQ ID NO: 718123 - RNA, 19 nt, Artificial Sequence
  Description of Artificial Sequence: Synthetic oligonucleotide
ggcuuacaguucgucgugc

SEQ ID NO: 718124 - RNA, 19 nt, Artificial Sequence
  Description of Artificial Sequence: Synthetic oligonucleotide
cuugcguagcuggaaucaa

SEQ ID NO: 718125 - RNA, 19 nt, Artificial Sequence
  Description of Artificial Sequence: Synthetic oligonucleotide
ccauuccgguccugguugg

SEQ ID NO: 718126 - RNA, 19 nt, Artificial Sequence
  Description of Artificial Sequence: Synthetic oligonucleotide
gugguuccuugcguagcug

SEQ ID NO: 718127 - RNA, 19 nt, Artificial Sequence
  Description of Artificial Sequence: Synthetic oligonucleotide
auauucccucuuccuucuu

SEQ ID NO: 718128 - RNA, 19 nt, Artificial Sequence
  Description of Artificial Sequence: Synthetic oligonucleotide
ccuggucuaauuccaaaua

SEQ ID NO: 718129 - RNA, 19 nt, Artificial Sequence
  Description of Artificial Sequence: Synthetic oligonucleotide
cacaccuugacagcaugcu

SEQ ID NO: 718130 - RNA, 19 nt, Artificial Sequence
  Description of Artificial Sequence: Synthetic oligonucleotide
gucguacaggcuuucccau

SEQ ID NO: 718131 - RNA, 19 nt, Artificial Sequence
  Description of Artificial Sequence: Synthetic oligonucleotide
gagucgagcagagucccau

SEQ ID NO: 718132 - RNA, 19 nt, Artificial Sequence
  Description of Artificial Sequence: Synthetic oligonucleotide
ccccacguacgugucauag

SEQ ID NO: 718133 - RNA, 19 nt, Artificial Sequence
  Description of Artificial Sequence: Synthetic oligonucleotide
ugggguuauggagguccaa

SEQ ID NO: 718134 - RNA, 19 nt, Artificial Sequence
  Description of Artificial Sequence: Synthetic oligonucleotide
caguucgucgugcuuggcu

SEQ ID NO: 718135 - RNA, 19 nt, Artificial Sequence
  Description of Artificial Sequence: Synthetic oligonucleotide
cacagccgagccaggaaua

SEQ ID NO: 718136 - RNA, 19 nt, Artificial Sequence
  Description of Artificial Sequence: Synthetic oligonucleotide
ccacguacgugucauaggu

SEQ ID NO: 718137 - RNA, 19 nt, Artificial Sequence
  Description of Artificial Sequence: Synthetic oligonucleotide
gagacgagcuccagcaguu

SEQ ID NO: 718138 - RNA, 19 nt, Artificial Sequence
  Description of Artificial Sequence: Synthetic oligonucleotide
ccuugcguagcuggaauca

SEQ ID NO: 718139 - RNA, 19 nt, Artificial Sequence
  Description of Artificial Sequence: Synthetic oligonucleotide
guugccacuugcgcaugaa

SEQ ID NO: 718140 - RNA, 19 nt, Artificial Sequence
  Description of Artificial Sequence: Synthetic oligonucleotide
ccaauccccacguacgugu

SEQ ID NO: 718141 - RNA, 19 nt, Artificial Sequence
  Description of Artificial Sequence: Synthetic oligonucleotide
ggcuugaaauacgucugaa

SEQ ID NO: 718142 - RNA, 19 nt, Artificial Sequence
  Description of Artificial Sequence: Synthetic oligonucleotide
gggcaacaucaguacaaaa

SEQ ID NO: 718143 - RNA, 19 nt, Artificial Sequence
  Description of Artificial Sequence: Synthetic oligonucleotide
ccgugaccuucccaucucc

SEQ ID NO: 718144 - RNA, 19 nt, Artificial Sequence
  Description of Artificial Sequence: Synthetic oligonucleotide
gccgagccaggaauauucc

SEQ ID NO: 718145 - RNA, 19 nt, Artificial Sequence
  Description of Artificial Sequence: Synthetic oligonucleotide
ccguuguaaugguaccuca

SEQ ID NO: 718146 - RNA, 19 nt, Artificial Sequence
  Description of Artificial Sequence: Synthetic oligonucleotide
cguauguaccagguacuac

SEQ ID NO: 718147 - RNA, 19 nt, Artificial Sequence
  Description of Artificial Sequence: Synthetic oligonucleotide
guacugaguuuggagggau

SEQ ID NO: 718148 - RNA, 19 nt, Artificial Sequence
  Description of Artificial Sequence: Synthetic oligonucleotide
gcuuacaguucgucgugcu

SEQ ID NO: 718149 - RNA, 19 nt, Artificial Sequence
  Description of Artificial Sequence: Synthetic oligonucleotide
ggaccacaauccuucgccu

SEQ ID NO: 718150 - RNA, 19 nt, Artificial Sequence
  Description of Artificial Sequence: Synthetic oligonucleotide
gguugccacuugcgcauga

SEQ ID NO: 718151 - RNA, 19 nt, Artificial Sequence
  Description of Artificial Sequence: Synthetic oligonucleotide
ucgucgugcuuggcuuccu

SEQ ID NO: 718152 - RNA, 19 nt, Artificial Sequence
  Description of Artificial Sequence: Synthetic oligonucleotide
ccgaaggaaguccccgcuc

SEQ ID NO: 718153 - RNA, 19 nt, Artificial Sequence
  Description of Artificial Sequence: Synthetic oligonucleotide
uccccacguacgugucaua

SEQ ID NO: 718154 - RNA, 19 nt, Artificial Sequence
  Description of Artificial Sequence: Synthetic oligonucleotide
gguuggugaacauguucuu

SEQ ID NO: 718155 - RNA, 19 nt, Artificial Sequence
  Description of Artificial Sequence: Synthetic oligonucleotide
guuuggucguacaggcuuu

SEQ ID NO: 718156 - RNA, 19 nt, Artificial Sequence
  Description of Artificial Sequence: Synthetic oligonucleotide
gccgugaccuucccaucuc

SEQ ID NO: 718157 - RNA, 19 nt, Artificial Sequence
  Description of Artificial Sequence: Synthetic oligonucleotide
cgugcuuggcuuccugauc

SEQ ID NO: 718158 - RNA, 19 nt, Artificial Sequence
  Description of Artificial Sequence: Synthetic oligonucleotide
gcccacauagugaacaguu

SEQ ID NO: 718159 - RNA, 19 nt, Artificial Sequence
  Description of Artificial Sequence: Synthetic oligonucleotide
gcacagccgagccaggaau

SEQ ID NO: 718160 - RNA, 19 nt, Artificial Sequence
  Description of Artificial Sequence: Synthetic oligonucleotide
cugguacuacuuguuuccu

SEQ ID NO: 718161 - RNA, 19 nt, Artificial Sequence
  Description of Artificial Sequence: Synthetic oligonucleotide
gagcaaucaggaggcuuau

SEQ ID NO: 718162 - RNA, 19 nt, Artificial Sequence
  Description of Artificial Sequence: Synthetic oligonucleotide
acguuccguuguaauggua

SEQ ID NO: 718163 - RNA, 19 nt, Artificial Sequence
  Description of Artificial Sequence: Synthetic oligonucleotide
gcccugcccaauguaugug

SEQ ID NO: 718164 - RNA, 19 nt, Artificial Sequence
  Description of Artificial Sequence: Synthetic oligonucleotide
cuacaccggccucuccaua

SEQ ID NO: 718165 - RNA, 19 nt, Artificial Sequence
  Description of Artificial Sequence: Synthetic oligonucleotide
ccaagaacguuccguugua

SEQ ID NO: 718166 - RNA, 19 nt, Artificial Sequence
  Description of Artificial Sequence: Synthetic oligonucleotide
caucuccauuccgguccug

SEQ ID NO: 718167 - RNA, 19 nt, Artificial Sequence
  Description of Artificial Sequence: Synthetic oligonucleotide
cacguacgugucauagguu

SEQ ID NO: 718168 - RNA, 19 nt, Artificial Sequence
  Description of Artificial Sequence: Synthetic oligonucleotide
ccauucccggaaucagcca

SEQ ID NO: 718169 - RNA, 19 nt, Artificial Sequence
  Description of Artificial Sequence: Synthetic oligonucleotide
ccccagcacgacuugucca

SEQ ID NO: 718170 - RNA, 19 nt, Artificial Sequence
  Description of Artificial Sequence: Synthetic oligonucleotide
gcgcaugaauguacucuga

SEQ ID NO: 718171 - RNA, 19 nt, Artificial Sequence
  Description of Artificial Sequence: Synthetic oligonucleotide
cagcacgacuuguccagau

SEQ ID NO: 718172 - RNA, 19 nt, Artificial Sequence
  Description of Artificial Sequence: Synthetic oligonucleotide
guggggcgggaugaucacu

SEQ ID NO: 718173 - RNA, 19 nt, Artificial Sequence
  Description of Artificial Sequence: Synthetic oligonucleotide
gcccaccuacuacuugcua

SEQ ID NO: 718174 - RNA, 19 nt, Artificial Sequence
  Description of Artificial Sequence: Synthetic oligonucleotide
cccuuugccgguugccacu

SEQ ID NO: 718175 - RNA, 19 nt, Artificial Sequence
  Description of Artificial Sequence: Synthetic oligonucleotide
ccagcacgacuuguccaga

SEQ ID NO: 718176 - RNA, 19 nt, Artificial Sequence
  Description of Artificial Sequence: Synthetic oligonucleotide
cggcuaugucuucuaugaa

SEQ ID NO: 718177 - RNA, 19 nt, Artificial Sequence
  Description of Artificial Sequence: Synthetic oligonucleotide
cggccgugaccuucccauc

SEQ ID NO: 718178 - RNA, 19 nt, Artificial Sequence
  Description of Artificial Sequence: Synthetic oligonucleotide
ggcccucugcacagauucu

SEQ ID NO: 718179 - RNA, 19 nt, Artificial Sequence
  Description of Artificial Sequence: Synthetic oligonucleotide
ccgcucugacuucuucgcu

SEQ ID NO: 718180 - RNA, 19 nt, Artificial Sequence
  Description of Artificial Sequence: Synthetic oligonucleotide
cgguugccacuugcgcaug

SEQ ID NO: 718181 - RNA, 19 nt, Artificial Sequence
  Description of Artificial Sequence: Synthetic oligonucleotide
cgggagcuagcuucccuuu

SEQ ID NO: 718182 - RNA, 19 nt, Artificial Sequence
  Description of Artificial Sequence: Synthetic oligonucleotide
guccccgcucugacuucuu

SEQ ID NO: 718183 - RNA, 19 nt, Artificial Sequence
  Description of Artificial Sequence: Synthetic oligonucleotide
aaugacaaaacauaguuag

SEQ ID NO: 718184 - RNA, 19 nt, Artificial Sequence
  Description of Artificial Sequence: Synthetic oligonucleotide
aauaguauggcucugcuuc

SEQ ID NO: 718185 - RNA, 19 nt, Artificial Sequence
  Description of Artificial Sequence: Synthetic oligonucleotide
aaagagacuuacuauaugg

SEQ ID NO: 718186 - RNA, 19 nt, Artificial Sequence
  Description of Artificial Sequence: Synthetic oligonucleotide
aaaccaauuggauaaugcc

SEQ ID NO: 718187 - RNA, 19 nt, Artificial Sequence
  Description of Artificial Sequence: Synthetic oligonucleotide
aguuaucucauccugauac

SEQ ID NO: 718188 - RNA, 19 nt, Artificial Sequence
  Description of Artificial Sequence: Synthetic oligonucleotide
aaagcuagcucacaaaauc

SEQ ID NO: 718189 - RNA, 19 nt, Artificial Sequence
  Description of Artificial Sequence: Synthetic oligonucleotide
uacuauaugggauucaggg

SEQ ID NO: 718190 - RNA, 19 nt, Artificial Sequence
  Description of Artificial Sequence: Synthetic oligonucleotide
aagggauauaacgaaaucc

SEQ ID NO: 718191 - RNA, 19 nt, Artificial Sequence
  Description of Artificial Sequence: Synthetic oligonucleotide
aauacccaccaauagcucc

SEQ ID NO: 718192 - RNA, 19 nt, Artificial Sequence
  Description of Artificial Sequence: Synthetic oligonucleotide
aacgaaauccauuuucuuc

SEQ ID NO: 718193 - RNA, 19 nt, Artificial Sequence
  Description of Artificial Sequence: Synthetic oligonucleotide
aaaucugucauucugcagu

SEQ ID NO: 718194 - RNA, 19 nt, Artificial Sequence
  Description of Artificial Sequence: Synthetic oligonucleotide
ucuaaaagggauauaacga

SEQ ID NO: 718195 - RNA, 19 nt, Artificial Sequence
  Description of Artificial Sequence: Synthetic oligonucleotide
gauaaugccauuucagggg

SEQ ID NO: 718196 - RNA, 19 nt, Artificial Sequence
  Description of Artificial Sequence: Synthetic oligonucleotide
aaagcaaauaguauggcuc

SEQ ID NO: 718197 - RNA, 19 nt, Artificial Sequence
  Description of Artificial Sequence: Synthetic oligonucleotide
uuugcauaccaauagacug

SEQ ID NO: 718198 - RNA, 19 nt, Artificial Sequence
  Description of Artificial Sequence: Synthetic oligonucleotide
aaccauaucucacugacgu

SEQ ID NO: 718199 - RNA, 19 nt, Artificial Sequence
  Description of Artificial Sequence: Synthetic oligonucleotide
ucagauaacugacucuugg

SEQ ID NO: 718200 - RNA, 19 nt, Artificial Sequence
  Description of Artificial Sequence: Synthetic oligonucleotide
uuggaauucguccaaacca

SEQ ID NO: 718201 - RNA, 19 nt, Artificial Sequence
  Description of Artificial Sequence: Synthetic oligonucleotide
aacgucagauaacugacuc

SEQ ID NO: 718202 - RNA, 19 nt, Artificial Sequence
  Description of Artificial Sequence: Synthetic oligonucleotide
uacauauaugcuaaguucu

SEQ ID NO: 718203 - RNA, 19 nt, Artificial Sequence
  Description of Artificial Sequence: Synthetic oligonucleotide
ugaaaggucguucaguugu

SEQ ID NO: 718204 - RNA, 19 nt, Artificial Sequence
  Description of Artificial Sequence: Synthetic oligonucleotide
aaacucuugaaauguacug

SEQ ID NO: 718205 - RNA, 19 nt, Artificial Sequence
  Description of Artificial Sequence: Synthetic oligonucleotide
uuaagucuaauuuucuuga

SEQ ID NO: 718206 - RNA, 19 nt, Artificial Sequence
  Description of Artificial Sequence: Synthetic oligonucleotide
uguuauuaaaugacaaaac

SEQ ID NO: 718207 - RNA, 19 nt, Artificial Sequence
  Description of Artificial Sequence: Synthetic oligonucleotide
guugcaguaauaaauaccc

SEQ ID NO: 718208 - RNA, 19 nt, Artificial Sequence
  Description of Artificial Sequence: Synthetic oligonucleotide
guaaaagcaaauaguaugg

SEQ ID NO: 718209 - RNA, 19 nt, Artificial Sequence
  Description of Artificial Sequence: Synthetic oligonucleotide
cauaccaauagacugacug

SEQ ID NO: 718210 - RNA, 19 nt, Artificial Sequence
  Description of Artificial Sequence: Synthetic oligonucleotide
uuagucagaaauacaaacu

SEQ ID NO: 718211 - RNA, 19 nt, Artificial Sequence
  Description of Artificial Sequence: Synthetic oligonucleotide
ugacuaagguucaagcacg

SEQ ID NO: 718212 - RNA, 19 nt, Artificial Sequence
  Description of Artificial Sequence: Synthetic oligonucleotide
ugacuuuugugcuuuagag

SEQ ID NO: 718213 - RNA, 19 nt, Artificial Sequence
  Description of Artificial Sequence: Synthetic oligonucleotide
ucguacucaaaccauaucu

SEQ ID NO: 718214 - RNA, 19 nt, Artificial Sequence
  Description of Artificial Sequence: Synthetic oligonucleotide
uugacuaagguucaagcac

SEQ ID NO: 718215 - RNA, 19 nt, Artificial Sequence
  Description of Artificial Sequence: Synthetic oligonucleotide
gacacaauaguccuagagc

SEQ ID NO: 718216 - RNA, 19 nt, Artificial Sequence
  Description of Artificial Sequence: Synthetic oligonucleotide
uauuccaugaguuuccggu

SEQ ID NO: 718217 - RNA, 19 nt, Artificial Sequence
  Description of Artificial Sequence: Synthetic oligonucleotide
guuagucagaaauacaaac

SEQ ID NO: 718218 - RNA, 19 nt, Artificial Sequence
  Description of Artificial Sequence: Synthetic oligonucleotide
uaagguucaagcacgguca

SEQ ID NO: 718219 - RNA, 19 nt, Artificial Sequence
  Description of Artificial Sequence: Synthetic oligonucleotide
auauaugcuaaguucuguc

SEQ ID NO: 718220 - RNA, 19 nt, Artificial Sequence
  Description of Artificial Sequence: Synthetic oligonucleotide
ugugcuuuagagcaucagc

SEQ ID NO: 718221 - RNA, 19 nt, Artificial Sequence
  Description of Artificial Sequence: Synthetic oligonucleotide
agacagaucuucaaguugc

SEQ ID NO: 718222 - RNA, 19 nt, Artificial Sequence
  Description of Artificial Sequence: Synthetic oligonucleotide
aguugcaguaauaaauacc

SEQ ID NO: 718223 - RNA, 19 nt, Artificial Sequence
  Description of Artificial Sequence: Synthetic oligonucleotide
aaugaaaggucguucaguu

SEQ ID NO: 718224 - RNA, 19 nt, Artificial Sequence
  Description of Artificial Sequence: Synthetic oligonucleotide
uauuucaugagaggaaaag

SEQ ID NO: 718225 - RNA, 19 nt, Artificial Sequence
  Description of Artificial Sequence: Synthetic oligonucleotide
uguuugcauaccaauagac

SEQ ID NO: 718226 - RNA, 19 nt, Artificial Sequence
  Description of Artificial Sequence: Synthetic oligonucleotide
uuauuccuagagcaaaggc

SEQ ID NO: 718227 - RNA, 19 nt, Artificial Sequence
  Description of Artificial Sequence: Synthetic oligonucleotide
ugcauuguauuucaugaga

SEQ ID NO: 718228 - RNA, 19 nt, Artificial Sequence
  Description of Artificial Sequence: Synthetic oligonucleotide
acauaaaaugagcuucgac

SEQ ID NO: 718229 - RNA, 19 nt, Artificial Sequence
  Description of Artificial Sequence: Synthetic oligonucleotide
aaacuggucaaaucuguca

SEQ ID NO: 718230 - RNA, 19 nt, Artificial Sequence
  Description of Artificial Sequence: Synthetic oligonucleotide
auaguuagaggcuuuauuu

SEQ ID NO: 718231 - RNA, 19 nt, Artificial Sequence
  Description of Artificial Sequence: Synthetic oligonucleotide
uuucaguuaucucauccug

SEQ ID NO: 718232 - RNA, 19 nt, Artificial Sequence
  Description of Artificial Sequence: Synthetic oligonucleotide
uggguugacauucaaugug

SEQ ID NO: 718233 - RNA, 19 nt, Artificial Sequence
  Description of Artificial Sequence: Synthetic oligonucleotide
auagacugacuguaaacag

SEQ ID NO: 718234 - RNA, 19 nt, Artificial Sequence
  Description of Artificial Sequence: Synthetic oligonucleotide
ucaauuccgugaaucauca

SEQ ID NO: 718235 - RNA, 19 nt, Artificial Sequence
  Description of Artificial Sequence: Synthetic oligonucleotide
uucacuuuaucaguuacca

SEQ ID NO: 718236 - RNA, 19 nt, Artificial Sequence
  Description of Artificial Sequence: Synthetic oligonucleotide
guacauauaugcuaaguuc

SEQ ID NO: 718237 - RNA, 19 nt, Artificial Sequence
  Description of Artificial Sequence: Synthetic oligonucleotide
auaaagcuagcucacaaaa

SEQ ID NO: 718238 - RNA, 19 nt, Artificial Sequence
  Description of Artificial Sequence: Synthetic oligonucleotide
uaaagcaaguuggaauucg

SEQ ID NO: 718239 - RNA, 19 nt, Artificial Sequence
  Description of Artificial Sequence: Synthetic oligonucleotide
uuacuauaugggauucagg

SEQ ID NO: 718240 - RNA, 19 nt, Artificial Sequence
  Description of Artificial Sequence: Synthetic oligonucleotide
caaaccauacaucucgaag

SEQ ID NO: 718241 - RNA, 19 nt, Artificial Sequence
  Description of Artificial Sequence: Synthetic oligonucleotide
aaccaauguuuccacuuuc

SEQ ID NO: 718242 - RNA, 19 nt, Artificial Sequence
  Description of Artificial Sequence: Synthetic oligonucleotide
uauaugcuaaguucugucu

SEQ ID NO: 718243 - RNA, 19 nt, Artificial Sequence
  Description of Artificial Sequence: Synthetic oligonucleotide
acuugaugcaagaagauca

SEQ ID NO: 718244 - RNA, 19 nt, Artificial Sequence
  Description of Artificial Sequence: Synthetic oligonucleotide
cauaaaaugagcuucgacu

SEQ ID NO: 718245 - RNA, 19 nt, Artificial Sequence
  Description of Artificial Sequence: Synthetic oligonucleotide
ucauuaaggaaagaugggu

SEQ ID NO: 718246 - RNA, 19 nt, Artificial Sequence
  Description of Artificial Sequence: Synthetic oligonucleotide
accaacgucagauaacuga

SEQ ID NO: 718247 - RNA, 19 nt, Artificial Sequence
  Description of Artificial Sequence: Synthetic oligonucleotide
auaguauggcucugcuucc

SEQ ID NO: 718248 - RNA, 19 nt, Artificial Sequence
  Description of Artificial Sequence: Synthetic oligonucleotide
gauauaacgaaauccauuu

SEQ ID NO: 718249 - RNA, 19 nt, Artificial Sequence
  Description of Artificial Sequence: Synthetic oligonucleotide
agagacuuacuauauggga

SEQ ID NO: 718250 - RNA, 19 nt, Artificial Sequence
  Description of Artificial Sequence: Synthetic oligonucleotide
ucaagcacggucaccuuag

SEQ ID NO: 718251 - RNA, 19 nt, Artificial Sequence
  Description of Artificial Sequence: Synthetic oligonucleotide
aagucuaauuuucuugaaa

SEQ ID NO: 718252 - RNA, 19 nt, Artificial Sequence
  Description of Artificial Sequence: Synthetic oligonucleotide
gauaacugacucuugguaa

SEQ ID NO: 718253 - RNA, 19 nt, Artificial Sequence
  Description of Artificial Sequence: Synthetic oligonucleotide
gguuuugguaaugauaagg

SEQ ID NO: 718254 - RNA, 19 nt, Artificial Sequence
  Description of Artificial Sequence: Synthetic oligonucleotide
uugcauaccaauagacuga

SEQ ID NO: 718255 - RNA, 19 nt, Artificial Sequence
  Description of Artificial Sequence: Synthetic oligonucleotide
gacaaguugcccuacugac

SEQ ID NO: 718256 - RNA, 19 nt, Artificial Sequence
  Description of Artificial Sequence: Synthetic oligonucleotide
uguauuucaugagaggaaa

SEQ ID NO: 718257 - RNA, 19 nt, Artificial Sequence
  Description of Artificial Sequence: Synthetic oligonucleotide
cuuacuauaugggauucag

SEQ ID NO: 718258 - RNA, 19 nt, Artificial Sequence
  Description of Artificial Sequence: Synthetic oligonucleotide
uuaccaacgucagauaacu

SEQ ID NO: 718259 - RNA, 19 nt, Artificial Sequence
  Description of Artificial Sequence: Synthetic oligonucleotide
uucaguuaucucauccuga

SEQ ID NO: 718260 - RNA, 19 nt, Artificial Sequence
  Description of Artificial Sequence: Synthetic oligonucleotide
uuuugguaaugauaaggaa

SEQ ID NO: 718261 - RNA, 19 nt, Artificial Sequence
  Description of Artificial Sequence: Synthetic oligonucleotide
acugacguccuccugucuc

SEQ ID NO: 718262 - RNA, 19 nt, Artificial Sequence
  Description of Artificial Sequence: Synthetic oligonucleotide
ugacauucaauguggacau

SEQ ID NO: 718263 - RNA, 19 nt, Artificial Sequence
  Description of Artificial Sequence: Synthetic oligonucleotide
guaaugauaaggaaaagcu

SEQ ID NO: 718264 - RNA, 19 nt, Artificial Sequence
  Description of Artificial Sequence: Synthetic oligonucleotide
uuguuugcauaccaauaga

SEQ ID NO: 718265 - RNA, 19 nt, Artificial Sequence
  Description of Artificial Sequence: Synthetic oligonucleotide
caauagacugacuguaaac

SEQ ID NO: 718266 - RNA, 19 nt, Artificial Sequence
  Description of Artificial Sequence: Synthetic oligonucleotide
ugcccuaucucucuuggga

SEQ ID NO: 718267 - RNA, 19 nt, Artificial Sequence
  Description of Artificial Sequence: Synthetic oligonucleotide
aauacaaacuguggcacau

SEQ ID NO: 718268 - RNA, 19 nt, Artificial Sequence
  Description of Artificial Sequence: Synthetic oligonucleotide
cucagaugcucacucagcc

SEQ ID NO: 718269 - RNA, 19 nt, Artificial Sequence
  Description of Artificial Sequence: Synthetic oligonucleotide
guugauggcccaaaacugg

SEQ ID NO: 718270 - RNA, 19 nt, Artificial Sequence
  Description of Artificial Sequence: Synthetic oligonucleotide
uacccugcuuauuuguuag

SEQ ID NO: 718271 - RNA, 19 nt, Artificial Sequence
  Description of Artificial Sequence: Synthetic oligonucleotide
aguuagaggcuuuauuuaa

SEQ ID NO: 718272 - RNA, 19 nt, Artificial Sequence
  Description of Artificial Sequence: Synthetic oligonucleotide
acuauaugggauucagggu

SEQ ID NO: 718273 - RNA, 19 nt, Artificial Sequence
  Description of Artificial Sequence: Synthetic oligonucleotide
ugcccuacugaccugcacc

SEQ ID NO: 718274 - RNA, 19 nt, Artificial Sequence
  Description of Artificial Sequence: Synthetic oligonucleotide
cuagagacaggucaccuuc

SEQ ID NO: 718275 - RNA, 19 nt, Artificial Sequence
  Description of Artificial Sequence: Synthetic oligonucleotide
ugaguuuccgguugauggc

SEQ ID NO: 718276 - RNA, 19 nt, Artificial Sequence
  Description of Artificial Sequence: Synthetic oligonucleotide
uggaauucguccaaaccau

SEQ ID NO: 718277 - RNA, 19 nt, Artificial Sequence
  Description of Artificial Sequence: Synthetic oligonucleotide
uggauauuccaugaguuuc

SEQ ID NO: 718278 - RNA, 19 nt, Artificial Sequence
  Description of Artificial Sequence: Synthetic oligonucleotide
aaucaacuguaggagucuc

SEQ ID NO: 718279 - RNA, 19 nt, Artificial Sequence
  Description of Artificial Sequence: Synthetic oligonucleotide
uauaugggauucagggugu

SEQ ID NO: 718280 - RNA, 19 nt, Artificial Sequence
  Description of Artificial Sequence: Synthetic oligonucleotide
ugccuucguacucaaacca

SEQ ID NO: 718281 - RNA, 19 nt, Artificial Sequence
  Description of Artificial Sequence: Synthetic oligonucleotide
ucaaccaauguuuccacuu

SEQ ID NO: 718282 - RNA, 19 nt, Artificial Sequence
  Description of Artificial Sequence: Synthetic oligonucleotide
gaaagauggguuuacugua

SEQ ID NO: 718283 - RNA, 19 nt, Artificial Sequence
  Description of Artificial Sequence: Synthetic oligonucleotide
gacucaaggugauuccacc

SEQ ID NO: 718284 - RNA, 19 nt, Artificial Sequence
  Description of Artificial Sequence: Synthetic oligonucleotide
agcacggucaccuuaggaa

SEQ ID NO: 718285 - RNA, 19 nt, Artificial Sequence
  Description of Artificial Sequence: Synthetic oligonucleotide
aaaucaacuguaggagucu

SEQ ID NO: 718286 - RNA, 19 nt, Artificial Sequence
  Description of Artificial Sequence: Synthetic oligonucleotide
acaaguugcccuacugacc

SEQ ID NO: 718287 - RNA, 19 nt, Artificial Sequence
  Description of Artificial Sequence: Synthetic oligonucleotide
uucgacugcauccuuggau

SEQ ID NO: 718288 - RNA, 19 nt, Artificial Sequence
  Description of Artificial Sequence: Synthetic oligonucleotide
gauggcccaaaacugguca

SEQ ID NO: 718289 - RNA, 19 nt, Artificial Sequence
  Description of Artificial Sequence: Synthetic oligonucleotide
uguaaguuauugacagcaa

SEQ ID NO: 718290 - RNA, 19 nt, Artificial Sequence
  Description of Artificial Sequence: Synthetic oligonucleotide
aggugauuccaccauccag

SEQ ID NO: 718291 - RNA, 19 nt, Artificial Sequence
  Description of Artificial Sequence: Synthetic oligonucleotide
aaaccauaucucacugacg

SEQ ID NO: 718292 - RNA, 19 nt, Artificial Sequence
  Description of Artificial Sequence: Synthetic oligonucleotide
uccugagacaaguugcccu

SEQ ID NO: 718293 - RNA, 19 nt, Artificial Sequence
  Description of Artificial Sequence: Synthetic oligonucleotide
acguccuccugucucauag

SEQ ID NO: 718294 - RNA, 19 nt, Artificial Sequence
  Description of Artificial Sequence: Synthetic oligonucleotide
cauaccagggaggaacugg

SEQ ID NO: 718295 - RNA, 19 nt, Artificial Sequence
  Description of Artificial Sequence: Synthetic oligonucleotide
aaauaguauggcucugcuu

SEQ ID NO: 718296 - RNA, 19 nt, Artificial Sequence
  Description of Artificial Sequence: Synthetic oligonucleotide
ucaaaccauaucucacuga

SEQ ID NO: 718297 - RNA, 19 nt, Artificial Sequence
  Description of Artificial Sequence: Synthetic oligonucleotide
aguugcccuacugaccugc

SEQ ID NO: 718298 - RNA, 19 nt, Artificial Sequence
  Description of Artificial Sequence: Synthetic oligonucleotide
gugauuccaccauccagcg

SEQ ID NO: 718299 - RNA, 19 nt, Artificial Sequence
  Description of Artificial Sequence: Synthetic oligonucleotide
aaaugacaaaacauaguua

SEQ ID NO: 718300 - RNA, 19 nt, Artificial Sequence
  Description of Artificial Sequence: Synthetic oligonucleotide
aagcaaguuggaauucguc

SEQ ID NO: 718301 - RNA, 19 nt, Artificial Sequence
  Description of Artificial Sequence: Synthetic oligonucleotide
ucagagugggaggaguucc

SEQ ID NO: 718302 - RNA, 19 nt, Artificial Sequence
  Description of Artificial Sequence: Synthetic oligonucleotide
uccuccuaggcuugcaggc

SEQ ID NO: 718303 - RNA, 19 nt, Artificial Sequence
  Description of Artificial Sequence: Synthetic oligonucleotide
guacucaaaccauaucuca

SEQ ID NO: 718304 - RNA, 19 nt, Artificial Sequence
  Description of Artificial Sequence: Synthetic oligonucleotide
acugcggaaggacagacuu

SEQ ID NO: 718305 - RNA, 19 nt, Artificial Sequence
  Description of Artificial Sequence: Synthetic oligonucleotide
auauuccaugaguuuccgg

SEQ ID NO: 718306 - RNA, 19 nt, Artificial Sequence
  Description of Artificial Sequence: Synthetic oligonucleotide
ugcuuauuuguuagucaga

SEQ ID NO: 718307 - RNA, 19 nt, Artificial Sequence
  Description of Artificial Sequence: Synthetic oligonucleotide
ggugauuccaccauccagc

SEQ ID NO: 718308 - RNA, 19 nt, Artificial Sequence
  Description of Artificial Sequence: Synthetic oligonucleotide
agacuuacuauaugggauu

SEQ ID NO: 718309 - RNA, 19 nt, Artificial Sequence
  Description of Artificial Sequence: Synthetic oligonucleotide
agucuagagacaggucacc

SEQ ID NO: 718310 - RNA, 19 nt, Artificial Sequence
  Description of Artificial Sequence: Synthetic oligonucleotide
auccugauacaguguaaag

SEQ ID NO: 718311 - RNA, 19 nt, Artificial Sequence
  Description of Artificial Sequence: Synthetic oligonucleotide
cauagccuucugaaagugc

SEQ ID NO: 718312 - RNA, 19 nt, Artificial Sequence
  Description of Artificial Sequence: Synthetic oligonucleotide
ucaaggugauuccaccauc

SEQ ID NO: 718313 - RNA, 19 nt, Artificial Sequence
  Description of Artificial Sequence: Synthetic oligonucleotide
aagcuacugcagucuagag

SEQ ID NO: 718314 - RNA, 19 nt, Artificial Sequence
  Description of Artificial Sequence: Synthetic oligonucleotide
uugcaguaauaaauaccca

SEQ ID NO: 718315 - RNA, 19 nt, Artificial Sequence
  Description of Artificial Sequence: Synthetic oligonucleotide
aguaccagggcccgcgcag

SEQ ID NO: 718316 - RNA, 19 nt, Artificial Sequence
  Description of Artificial Sequence: Synthetic oligonucleotide
cuacugaccugcaccuucg

SEQ ID NO: 718317 - RNA, 19 nt, Artificial Sequence
  Description of Artificial Sequence: Synthetic oligonucleotide
guugacauucaauguggac

SEQ ID NO: 718318 - RNA, 19 nt, Artificial Sequence
  Description of Artificial Sequence: Synthetic oligonucleotide
uaagucuaauuuucuugaa

SEQ ID NO: 718319 - RNA, 19 nt, Artificial Sequence
  Description of Artificial Sequence: Synthetic oligonucleotide
aaagcaaguuggaauucgu

SEQ ID NO: 718320 - RNA, 19 nt, Artificial Sequence
  Description of Artificial Sequence: Synthetic oligonucleotide
aagacgcugggucgccgcg

SEQ ID NO: 718321 - RNA, 19 nt, Artificial Sequence
  Description of Artificial Sequence: Synthetic oligonucleotide
uuugugcuuuagagcauca

SEQ ID NO: 718322 - RNA, 19 nt, Artificial Sequence
  Description of Artificial Sequence: Synthetic oligonucleotide
ucagaugcucacucagcca

SEQ ID NO: 718323 - RNA, 19 nt, Artificial Sequence
  Description of Artificial Sequence: Synthetic oligonucleotide
aaaggucguucaguuguag

SEQ ID NO: 718324 - RNA, 19 nt, Artificial Sequence
  Description of Artificial Sequence: Synthetic oligonucleotide
uuuugugcuuuagagcauc

SEQ ID NO: 718325 - RNA, 19 nt, Artificial Sequence
  Description of Artificial Sequence: Synthetic oligonucleotide
ucaguuguagucugauaua

SEQ ID NO: 718326 - RNA, 19 nt, Artificial Sequence
  Description of Artificial Sequence: Synthetic oligonucleotide
agcaguacauauaugcuaa

SEQ ID NO: 718327 - RNA, 19 nt, Artificial Sequence
  Description of Artificial Sequence: Synthetic oligonucleotide
ucggguggauauuccauga

SEQ ID NO: 718328 - RNA, 19 nt, Artificial Sequence
  Description of Artificial Sequence: Synthetic oligonucleotide
accaauuggauaaugccau

SEQ ID NO: 718329 - RNA, 19 nt, Artificial Sequence
  Description of Artificial Sequence: Synthetic oligonucleotide
gcagucuagagacagguca

SEQ ID NO: 718330 - RNA, 19 nt, Artificial Sequence
  Description of Artificial Sequence: Synthetic oligonucleotide
uucgccauaccagggagga

SEQ ID NO: 718331 - RNA, 19 nt, Artificial Sequence
  Description of Artificial Sequence: Synthetic oligonucleotide
augaaaggucguucaguug

SEQ ID NO: 718332 - RNA, 19 nt, Artificial Sequence
  Description of Artificial Sequence: Synthetic oligonucleotide
acaauaguccuagagccaa

SEQ ID NO: 718333 - RNA, 19 nt, Artificial Sequence
  Description of Artificial Sequence: Synthetic oligonucleotide
ugcauaccaauagacugac

SEQ ID NO: 718334 - RNA, 19 nt, Artificial Sequence
  Description of Artificial Sequence: Synthetic oligonucleotide
gaaccucuggagguuuugg

SEQ ID NO: 718335 - RNA, 19 nt, Artificial Sequence
  Description of Artificial Sequence: Synthetic oligonucleotide
uccaugaguuuccgguuga

SEQ ID NO: 718336 - RNA, 19 nt, Artificial Sequence
  Description of Artificial Sequence: Synthetic oligonucleotide
cagucuagagacaggucac

SEQ ID NO: 718337 - RNA, 19 nt, Artificial Sequence
  Description of Artificial Sequence: Synthetic oligonucleotide
ccauaucucacugacgucc

SEQ ID NO: 718338 - RNA, 19 nt, Artificial Sequence
  Description of Artificial Sequence: Synthetic oligonucleotide
gguaaagcaguacauauau

SEQ ID NO: 718339 - RNA, 19 nt, Artificial Sequence
  Description of Artificial Sequence: Synthetic oligonucleotide
cugaccugcaccuucgcca

SEQ ID NO: 718340 - RNA, 19 nt, Artificial Sequence
  Description of Artificial Sequence: Synthetic oligonucleotide
uucuucggguggauauucc

SEQ ID NO: 718341 - RNA, 19 nt, Artificial Sequence
  Description of Artificial Sequence: Synthetic oligonucleotide
ggguugacauucaaugugg

SEQ ID NO: 718342 - RNA, 19 nt, Artificial Sequence
  Description of Artificial Sequence: Synthetic oligonucleotide
gacaggggaccacagugac

SEQ ID NO: 718343 - RNA, 19 nt, Artificial Sequence
  Description of Artificial Sequence: Synthetic oligonucleotide
guaaaccaauuggauaaug

SEQ ID NO: 718344 - RNA, 19 nt, Artificial Sequence
  Description of Artificial Sequence: Synthetic oligonucleotide
ugagacaaguugcccuacu

SEQ ID NO: 718345 - RNA, 19 nt, Artificial Sequence
  Description of Artificial Sequence: Synthetic oligonucleotide
aggaguuccaggaaccucu

SEQ ID NO: 718346 - RNA, 19 nt, Artificial Sequence
  Description of Artificial Sequence: Synthetic oligonucleotide
aucugucauucuuccagug

SEQ ID NO: 718347 - RNA, 19 nt, Artificial Sequence
  Description of Artificial Sequence: Synthetic oligonucleotide
agguuuugguaaugauaag

SEQ ID NO: 718348 - RNA, 19 nt, Artificial Sequence
  Description of Artificial Sequence: Synthetic oligonucleotide
ugaaauguacugugauguu

SEQ ID NO: 718349 - RNA, 19 nt, Artificial Sequence
  Description of Artificial Sequence: Synthetic oligonucleotide
guuaccaacgucagauaac

SEQ ID NO: 718350 - RNA, 19 nt, Artificial Sequence
  Description of Artificial Sequence: Synthetic oligonucleotide
cuucgccauaccagggagg

SEQ ID NO: 718351 - RNA, 19 nt, Artificial Sequence
  Description of Artificial Sequence: Synthetic oligonucleotide
ugcuuuagagcaucagcuu

SEQ ID NO: 718352 - RNA, 19 nt, Artificial Sequence
  Description of Artificial Sequence: Synthetic oligonucleotide
auauaacgaaauccauuuu

SEQ ID NO: 718353 - RNA, 19 nt, Artificial Sequence
  Description of Artificial Sequence: Synthetic oligonucleotide
cauaaagcuagcucacaaa

SEQ ID NO: 718354 - RNA, 19 nt, Artificial Sequence
  Description of Artificial Sequence: Synthetic oligonucleotide
auguuauuccuagagcaaa

SEQ ID NO: 718355 - RNA, 19 nt, Artificial Sequence
  Description of Artificial Sequence: Synthetic oligonucleotide
acucacggcgcucugcaga

SEQ ID NO: 718356 - RNA, 19 nt, Artificial Sequence
  Description of Artificial Sequence: Synthetic oligonucleotide
acgucagauaacugacucu

SEQ ID NO: 718357 - RNA, 19 nt, Artificial Sequence
  Description of Artificial Sequence: Synthetic oligonucleotide
uuucuucggguggauauuc

SEQ ID NO: 718358 - RNA, 19 nt, Artificial Sequence
  Description of Artificial Sequence: Synthetic oligonucleotide
ccaacgucagauaacugac

SEQ ID NO: 718359 - RNA, 19 nt, Artificial Sequence
  Description of Artificial Sequence: Synthetic oligonucleotide
gaagacgcugggucgccgc

SEQ ID NO: 718360 - RNA, 19 nt, Artificial Sequence
  Description of Artificial Sequence: Synthetic oligonucleotide
ggggacaaugcuaauauga

SEQ ID NO: 718361 - RNA, 19 nt, Artificial Sequence
  Description of Artificial Sequence: Synthetic oligonucleotide
ggauauuccaugaguuucc

SEQ ID NO: 718362 - RNA, 19 nt, Artificial Sequence
  Description of Artificial Sequence: Synthetic oligonucleotide
gucguucaguuguagucug

SEQ ID NO: 718363 - RNA, 19 nt, Artificial Sequence
  Description of Artificial Sequence: Synthetic oligonucleotide
gcaccuucgccauaccagg

SEQ ID NO: 718364 - RNA, 19 nt, Artificial Sequence
  Description of Artificial Sequence: Synthetic oligonucleotide
ugccauuucaggggugugc

SEQ ID NO: 718365 - RNA, 19 nt, Artificial Sequence
  Description of Artificial Sequence: Synthetic oligonucleotide
auuccgugaaucaucacuu

SEQ ID NO: 718366 - RNA, 19 nt, Artificial Sequence
  Description of Artificial Sequence: Synthetic oligonucleotide
caaguguaugcagcugucc

SEQ ID NO: 718367 - RNA, 19 nt, Artificial Sequence
  Description of Artificial Sequence: Synthetic oligonucleotide
gcuuuagagcaucagcuuc

SEQ ID NO: 718368 - RNA, 19 nt, Artificial Sequence
  Description of Artificial Sequence: Synthetic oligonucleotide
cagagcgacugccaccggg

SEQ ID NO: 718369 - RNA, 19 nt, Artificial Sequence
  Description of Artificial Sequence: Synthetic oligonucleotide
gagacuuacuauaugggau

SEQ ID NO: 718370 - RNA, 19 nt, Artificial Sequence
  Description of Artificial Sequence: Synthetic oligonucleotide
aucaguuaccaacgucaga

SEQ ID NO: 718371 - RNA, 19 nt, Artificial Sequence
  Description of Artificial Sequence: Synthetic oligonucleotide
uggcucaauuccgugaauc

SEQ ID NO: 718372 - RNA, 19 nt, Artificial Sequence
  Description of Artificial Sequence: Synthetic oligonucleotide
aggacggaagagcuucuga

SEQ ID NO: 718373 - RNA, 19 nt, Artificial Sequence
  Description of Artificial Sequence: Synthetic oligonucleotide
aaguaccagggcccgcgca

SEQ ID NO: 718374 - RNA, 19 nt, Artificial Sequence
  Description of Artificial Sequence: Synthetic oligonucleotide
uaccaacgucagauaacug

SEQ ID NO: 718375 - RNA, 19 nt, Artificial Sequence
  Description of Artificial Sequence: Synthetic oligonucleotide
agagcugaacuugaugcaa

SEQ ID NO: 718376 - RNA, 19 nt, Artificial Sequence
  Description of Artificial Sequence: Synthetic oligonucleotide
guuacaagauuguuugcau

SEQ ID NO: 718377 - RNA, 19 nt, Artificial Sequence
  Description of Artificial Sequence: Synthetic oligonucleotide
aggguguccuugaaaagug

SEQ ID NO: 718378 - RNA, 19 nt, Artificial Sequence
  Description of Artificial Sequence: Synthetic oligonucleotide
gaaugaaaggucguucagu

SEQ ID NO: 718379 - RNA, 19 nt, Artificial Sequence
  Description of Artificial Sequence: Synthetic oligonucleotide
cacggcgcucugcagaggc

SEQ ID NO: 718380 - RNA, 19 nt, Artificial Sequence
  Description of Artificial Sequence: Synthetic oligonucleotide
caggggugugccuucguac

SEQ ID NO: 718381 - RNA, 19 nt, Artificial Sequence
  Description of Artificial Sequence: Synthetic oligonucleotide
aguggguaaagcaguacau

SEQ ID NO: 718382 - RNA, 19 nt, Artificial Sequence
  Description of Artificial Sequence: Synthetic oligonucleotide
ugcagucuagagacagguc

SEQ ID NO: 718383 - RNA, 19 nt, Artificial Sequence
  Description of Artificial Sequence: Synthetic oligonucleotide
agguucaagcacggucacc

SEQ ID NO: 718384 - RNA, 19 nt, Artificial Sequence
  Description of Artificial Sequence: Synthetic oligonucleotide
cucauccugauacagugua

SEQ ID NO: 718385 - RNA, 19 nt, Artificial Sequence
  Description of Artificial Sequence: Synthetic oligonucleotide
ucguucaguuguagucuga

SEQ ID NO: 718386 - RNA, 19 nt, Artificial Sequence
  Description of Artificial Sequence: Synthetic oligonucleotide
gugcuuuagagcaucagcu

SEQ ID NO: 718387 - RNA, 19 nt, Artificial Sequence
  Description of Artificial Sequence: Synthetic oligonucleotide
guuugcauaccaauagacu

SEQ ID NO: 718388 - RNA, 19 nt, Artificial Sequence
  Description of Artificial Sequence: Synthetic oligonucleotide
auacccaccaauagcuccu

SEQ ID NO: 718389 - RNA, 19 nt, Artificial Sequence
  Description of Artificial Sequence: Synthetic oligonucleotide
caccuucgccauaccaggg

SEQ ID NO: 718390 - RNA, 19 nt, Artificial Sequence
  Description of Artificial Sequence: Synthetic oligonucleotide
ccauacaucucgaagcaca

SEQ ID NO: 718391 - RNA, 19 nt, Artificial Sequence
  Description of Artificial Sequence: Synthetic oligonucleotide
ugacugcggaaggacagac

SEQ ID NO: 718392 - RNA, 19 nt, Artificial Sequence
  Description of Artificial Sequence: Synthetic oligonucleotide
gcuuauuuguuagucagaa

SEQ ID NO: 718393 - RNA, 19 nt, Artificial Sequence
  Description of Artificial Sequence: Synthetic oligonucleotide
gcaaauaguauggcucugc

SEQ ID NO: 718394 - RNA, 19 nt, Artificial Sequence
  Description of Artificial Sequence: Synthetic oligonucleotide
aaguugcccuacugaccug

SEQ ID NO: 718395 - RNA, 19 nt, Artificial Sequence
  Description of Artificial Sequence: Synthetic oligonucleotide
agagggguuuccagcauug

SEQ ID NO: 718396 - RNA, 19 nt, Artificial Sequence
  Description of Artificial Sequence: Synthetic oligonucleotide
gaaguaccagggcccgcgc

SEQ ID NO: 718397 - RNA, 19 nt, Artificial Sequence
  Description of Artificial Sequence: Synthetic oligonucleotide
uccgccugccugacucacg

SEQ ID NO: 718398 - RNA, 19 nt, Artificial Sequence
  Description of Artificial Sequence: Synthetic oligonucleotide
auaccagggaggaacugga

SEQ ID NO: 718399 - RNA, 19 nt, Artificial Sequence
  Description of Artificial Sequence: Synthetic oligonucleotide
agcaaauaguauggcucug

SEQ ID NO: 718400 - RNA, 19 nt, Artificial Sequence
  Description of Artificial Sequence: Synthetic oligonucleotide
caagcagcuggccauaggu

SEQ ID NO: 718401 - RNA, 19 nt, Artificial Sequence
  Description of Artificial Sequence: Synthetic oligonucleotide
uacugaccugcaccuucgc

SEQ ID NO: 718402 - RNA, 19 nt, Artificial Sequence
  Description of Artificial Sequence: Synthetic oligonucleotide
agcauuggcucaauuccgu

SEQ ID NO: 718403 - RNA, 19 nt, Artificial Sequence
  Description of Artificial Sequence: Synthetic oligonucleotide
ggcucaauuccgugaauca

SEQ ID NO: 718404 - RNA, 19 nt, Artificial Sequence
  Description of Artificial Sequence: Synthetic oligonucleotide
cugcccuaucucucuuggg

SEQ ID NO: 718405 - RNA, 19 nt, Artificial Sequence
  Description of Artificial Sequence: Synthetic oligonucleotide
acaguguagaagguccuuu

SEQ ID NO: 718406 - RNA, 19 nt, Artificial Sequence
  Description of Artificial Sequence: Synthetic oligonucleotide
cguacucaaaccauaucuc

SEQ ID NO: 718407 - RNA, 19 nt, Artificial Sequence
  Description of Artificial Sequence: Synthetic oligonucleotide
aucucucacuguucauuau

SEQ ID NO: 718408 - RNA, 19 nt, Artificial Sequence
  Description of Artificial Sequence: Synthetic oligonucleotide
cuccugagacaaguugccc

SEQ ID NO: 718409 - RNA, 19 nt, Artificial Sequence
  Description of Artificial Sequence: Synthetic oligonucleotide
auggcccaaaacuggucaa

SEQ ID NO: 718410 - RNA, 19 nt, Artificial Sequence
  Description of Artificial Sequence: Synthetic oligonucleotide
uucagcggugacugcggaa

SEQ ID NO: 718411 - RNA, 19 nt, Artificial Sequence
  Description of Artificial Sequence: Synthetic oligonucleotide
caaauaguauggcucugcu

SEQ ID NO: 718412 - RNA, 19 nt, Artificial Sequence
  Description of Artificial Sequence: Synthetic oligonucleotide
gcaguacauauaugcuaag

SEQ ID NO: 718413 - RNA, 19 nt, Artificial Sequence
  Description of Artificial Sequence: Synthetic oligonucleotide
cauaguuagaggcuuuauu

SEQ ID NO: 718414 - RNA, 19 nt, Artificial Sequence
  Description of Artificial Sequence: Synthetic oligonucleotide
ggagguuuugguaaugaua

SEQ ID NO: 718415 - RNA, 19 nt, Artificial Sequence
  Description of Artificial Sequence: Synthetic oligonucleotide
agacacuccagguccuguu

SEQ ID NO: 718416 - RNA, 19 nt, Artificial Sequence
  Description of Artificial Sequence: Synthetic oligonucleotide
accaauagacugacuguaa

SEQ ID NO: 718417 - RNA, 19 nt, Artificial Sequence
  Description of Artificial Sequence: Synthetic oligonucleotide
caauuccgugaaucaucac

SEQ ID NO: 718418 - RNA, 19 nt, Artificial Sequence
  Description of Artificial Sequence: Synthetic oligonucleotide
cugacguccuccugucuca

SEQ ID NO: 718419 - RNA, 19 nt, Artificial Sequence
  Description of Artificial Sequence: Synthetic oligonucleotide
guauuucaugagaggaaaa

SEQ ID NO: 718420 - RNA, 19 nt, Artificial Sequence
  Description of Artificial Sequence: Synthetic oligonucleotide
cuucguacucaaaccauau

SEQ ID NO: 718421 - RNA, 19 nt, Artificial Sequence
  Description of Artificial Sequence: Synthetic oligonucleotide
gcucacaaaaucaacugua

SEQ ID NO: 718422 - RNA, 19 nt, Artificial Sequence
  Description of Artificial Sequence: Synthetic oligonucleotide
guuaucuggguagcucaga

SEQ ID NO: 718423 - RNA, 19 nt, Artificial Sequence
  Description of Artificial Sequence: Synthetic oligonucleotide
uggcccaaaacuggucaaa

SEQ ID NO: 718424 - RNA, 19 nt, Artificial Sequence
  Description of Artificial Sequence: Synthetic oligonucleotide
cugacucacggcgcucugc

SEQ ID NO: 718425 - RNA, 19 nt, Artificial Sequence
  Description of Artificial Sequence: Synthetic oligonucleotide
cauacaucucgaagcacau

SEQ ID NO: 718426 - RNA, 19 nt, Artificial Sequence
  Description of Artificial Sequence: Synthetic oligonucleotide
cauagguugcagcaaguuu

SEQ ID NO: 718427 - RNA, 19 nt, Artificial Sequence
  Description of Artificial Sequence: Synthetic oligonucleotide
guuuccgguugauggccca

SEQ ID NO: 718428 - RNA, 19 nt, Artificial Sequence
  Description of Artificial Sequence: Synthetic oligonucleotide
aggaaauacccugcuuauu

SEQ ID NO: 718429 - RNA, 19 nt, Artificial Sequence
  Description of Artificial Sequence: Synthetic oligonucleotide
gcacggucaccuuaggaaa

SEQ ID NO: 718430 - RNA, 19 nt, Artificial Sequence
  Description of Artificial Sequence: Synthetic oligonucleotide
cugagacaaguugcccuac

SEQ ID NO: 718431 - RNA, 19 nt, Artificial Sequence
  Description of Artificial Sequence: Synthetic oligonucleotide
caucugucauucuuccagu

SEQ ID NO: 718432 - RNA, 19 nt, Artificial Sequence
  Description of Artificial Sequence: Synthetic oligonucleotide
uuuccgguugauggcccaa

SEQ ID NO: 718433 - RNA, 19 nt, Artificial Sequence
  Description of Artificial Sequence: Synthetic oligonucleotide
gaaaggucguucaguugua

SEQ ID NO: 718434 - RNA, 19 nt, Artificial Sequence
  Description of Artificial Sequence: Synthetic oligonucleotide
cagagugggaggaguucca

SEQ ID NO: 718435 - RNA, 19 nt, Artificial Sequence
  Description of Artificial Sequence: Synthetic oligonucleotide
ggguggauauuccaugagu

SEQ ID NO: 718436 - RNA, 19 nt, Artificial Sequence
  Description of Artificial Sequence: Synthetic oligonucleotide
caguuguagucugauauau

SEQ ID NO: 718437 - RNA, 19 nt, Artificial Sequence
  Description of Artificial Sequence: Synthetic oligonucleotide
cucaaggugauuccaccau

SEQ ID NO: 718438 - RNA, 19 nt, Artificial Sequence
  Description of Artificial Sequence: Synthetic oligonucleotide
accaaagaagacagaucuu

SEQ ID NO: 718439 - RNA, 19 nt, Artificial Sequence
  Description of Artificial Sequence: Synthetic oligonucleotide
gguggauauuccaugaguu

SEQ ID NO: 718440 - RNA, 19 nt, Artificial Sequence
  Description of Artificial Sequence: Synthetic oligonucleotide
gauggacaguguagaaggu

SEQ ID NO: 718441 - RNA, 19 nt, Artificial Sequence
  Description of Artificial Sequence: Synthetic oligonucleotide
uuccgguugauggcccaaa

SEQ ID NO: 718442 - RNA, 19 nt, Artificial Sequence
  Description of Artificial Sequence: Synthetic oligonucleotide
caacgucagauaacugacu

SEQ ID NO: 718443 - RNA, 19 nt, Artificial Sequence
  Description of Artificial Sequence: Synthetic oligonucleotide
caggacggaagagcuucug

SEQ ID NO: 718444 - RNA, 19 nt, Artificial Sequence
  Description of Artificial Sequence: Synthetic oligonucleotide
cuggcugacaggggaccac

SEQ ID NO: 718445 - RNA, 19 nt, Artificial Sequence
  Description of Artificial Sequence: Synthetic oligonucleotide
cccuaucucucuugggauc

SEQ ID NO: 718446 - RNA, 19 nt, Artificial Sequence
  Description of Artificial Sequence: Synthetic oligonucleotide
ccgguugauggcccaaaac

SEQ ID NO: 718447 - RNA, 19 nt, Artificial Sequence
  Description of Artificial Sequence: Synthetic oligonucleotide
ggucguucaguuguagucu

SEQ ID NO: 718448 - RNA, 19 nt, Artificial Sequence
  Description of Artificial Sequence: Synthetic oligonucleotide
caacuguaggagucuccaa

SEQ ID NO: 718449 - RNA, 19 nt, Artificial Sequence
  Description of Artificial Sequence: Synthetic oligonucleotide
augccauuucaggggugug

SEQ ID NO: 718450 - RNA, 19 nt, Artificial Sequence
  Description of Artificial Sequence: Synthetic oligonucleotide
agcccugcgcgcacuuccg

SEQ ID NO: 718451 - RNA, 19 nt, Artificial Sequence
  Description of Artificial Sequence: Synthetic oligonucleotide
caauuggauaaugccauuu

SEQ ID NO: 718452 - RNA, 19 nt, Artificial Sequence
  Description of Artificial Sequence: Synthetic oligonucleotide
guaccagggcccgcgcagc

SEQ ID NO: 718453 - RNA, 19 nt, Artificial Sequence
  Description of Artificial Sequence: Synthetic oligonucleotide
gugacugcggaaggacaga

SEQ ID NO: 718454 - RNA, 19 nt, Artificial Sequence
  Description of Artificial Sequence: Synthetic oligonucleotide
acggucaccuuaggaaaua

SEQ ID NO: 718455 - RNA, 19 nt, Artificial Sequence
  Description of Artificial Sequence: Synthetic oligonucleotide
cuucagcggugacugcgga

SEQ ID NO: 718456 - RNA, 19 nt, Artificial Sequence
  Description of Artificial Sequence: Synthetic oligonucleotide
ggaagacgcugggucgccg

SEQ ID NO: 718457 - RNA, 19 nt, Artificial Sequence
  Description of Artificial Sequence: Synthetic oligonucleotide
ggguaaagcaguacauaua

SEQ ID NO: 718458 - RNA, 19 nt, Artificial Sequence
  Description of Artificial Sequence: Synthetic oligonucleotide
gguugcagcaaguuuccuu

SEQ ID NO: 718459 - RNA, 19 nt, Artificial Sequence
  Description of Artificial Sequence: Synthetic oligonucleotide
agaguugcuuguggucuuu

SEQ ID NO: 718460 - RNA, 19 nt, Artificial Sequence
  Description of Artificial Sequence: Synthetic oligonucleotide
caguuaucucauccugaua

SEQ ID NO: 718461 - RNA, 19 nt, Artificial Sequence
  Description of Artificial Sequence: Synthetic oligonucleotide
gccgcagagcgacugccac

SEQ ID NO: 718462 - RNA, 19 nt, Artificial Sequence
  Description of Artificial Sequence: Synthetic oligonucleotide
ggaguuccaggaaccucug

SEQ ID NO: 718463 - RNA, 19 nt, Artificial Sequence
  Description of Artificial Sequence: Synthetic oligonucleotide
ccuucguacucaaaccaua

SEQ ID NO: 718464 - RNA, 19 nt, Artificial Sequence
  Description of Artificial Sequence: Synthetic oligonucleotide
ugacguccuccugucucau

SEQ ID NO: 718465 - RNA, 19 nt, Artificial Sequence
  Description of Artificial Sequence: Synthetic oligonucleotide
cauugaugaccugacuuuu

SEQ ID NO: 718466 - RNA, 19 nt, Artificial Sequence
  Description of Artificial Sequence: Synthetic oligonucleotide
cgguugauggcccaaaacu

SEQ ID NO: 718467 - RNA, 19 nt, Artificial Sequence
  Description of Artificial Sequence: Synthetic oligonucleotide
cguccaaaccauacaucuc

SEQ ID NO: 718468 - RNA, 19 nt, Artificial Sequence
  Description of Artificial Sequence: Synthetic oligonucleotide
aggcuugcaggcagcccug

SEQ ID NO: 718469 - RNA, 19 nt, Artificial Sequence
  Description of Artificial Sequence: Synthetic oligonucleotide
ccgugaaucaucacuuggu

SEQ ID NO: 718470 - RNA, 19 nt, Artificial Sequence
  Description of Artificial Sequence: Synthetic oligonucleotide
cauccagcgaggagcugcu

SEQ ID NO: 718471 - RNA, 19 nt, Artificial Sequence
  Description of Artificial Sequence: Synthetic oligonucleotide
gcggugacugcggaaggac

SEQ ID NO: 718472 - RNA, 19 nt, Artificial Sequence
  Description of Artificial Sequence: Synthetic oligonucleotide
ccggggucagagcccagcc

SEQ ID NO: 718473 - RNA, 19 nt, Artificial Sequence
  Description of Artificial Sequence: Synthetic oligonucleotide
ccaaaccauacaucucgaa

SEQ ID NO: 718474 - RNA, 19 nt, Artificial Sequence
  Description of Artificial Sequence: Synthetic oligonucleotide
gcugggucgccgcgcuccg

SEQ ID NO: 718475 - RNA, 19 nt, Artificial Sequence
  Description of Artificial Sequence: Synthetic oligonucleotide
cacggucaccuuaggaaau

SEQ ID NO: 718476 - RNA, 19 nt, Artificial Sequence
  Description of Artificial Sequence: Synthetic oligonucleotide
ccgcagagcgacugccacc

SEQ ID NO: 718477 - RNA, 19 nt, Artificial Sequence
  Description of Artificial Sequence: Synthetic oligonucleotide
guugcccuacugaccugca

SEQ ID NO: 718478 - RNA, 19 nt, Artificial Sequence
  Description of Artificial Sequence: Synthetic oligonucleotide
ggaauucguccaaaccaua

SEQ ID NO: 718479 - RNA, 19 nt, Artificial Sequence
  Description of Artificial Sequence: Synthetic oligonucleotide
acgcugggucgccgcgcuc

SEQ ID NO: 718480 - RNA, 19 nt, Artificial Sequence
  Description of Artificial Sequence: Synthetic oligonucleotide
agccgcagagcgacugcca

SEQ ID NO: 718481 - RNA, 19 nt, Artificial Sequence
  Description of Artificial Sequence: Synthetic oligonucleotide
ucgccauaccagggaggaa

SEQ ID NO: 718482 - RNA, 19 nt, Artificial Sequence
  Description of Artificial Sequence: Synthetic oligonucleotide
cggguggauauuccaugag

SEQ ID NO: 718483 - RNA, 19 nt, Artificial Sequence
  Description of Artificial Sequence: Synthetic oligonucleotide
gguagcucagaugcucacu

SEQ ID NO: 718484 - RNA, 19 nt, Artificial Sequence
  Description of Artificial Sequence: Synthetic oligonucleotide
gcuugcaggcagcccugac

SEQ ID NO: 718485 - RNA, 19 nt, Artificial Sequence
  Description of Artificial Sequence: Synthetic oligonucleotide
gggaagacgcugggucgcc

SEQ ID NO: 718486 - RNA, 19 nt, Artificial Sequence
  Description of Artificial Sequence: Synthetic oligonucleotide
cccuuucaguuaucucauc

SEQ ID NO: 718487 - RNA, 19 nt, Artificial Sequence
  Description of Artificial Sequence: Synthetic oligonucleotide
gcagagcgacugccaccgg

SEQ ID NO: 718488 - RNA, 19 nt, Artificial Sequence
  Description of Artificial Sequence: Synthetic oligonucleotide
gcccuaucucucuugggau

SEQ ID NO: 718489 - RNA, 19 nt, Artificial Sequence
  Description of Artificial Sequence: Synthetic oligonucleotide
ccauaccagggaggaacug

SEQ ID NO: 718490 - RNA, 19 nt, Artificial Sequence
  Description of Artificial Sequence: Synthetic oligonucleotide
cugccugacucacggcgcu

SEQ ID NO: 718491 - RNA, 19 nt, Artificial Sequence
  Description of Artificial Sequence: Synthetic oligonucleotide
ccugacucacggcgcucug

SEQ ID NO: 718492 - RNA, 19 nt, Artificial Sequence
  Description of Artificial Sequence: Synthetic oligonucleotide
cugggucgccgcgcuccgc

SEQ ID NO: 718493 - RNA, 19 nt, Artificial Sequence
  Description of Artificial Sequence: Synthetic oligonucleotide
caccggggucagagcccag

SEQ ID NO: 718494 - RNA, 19 nt, Artificial Sequence
  Description of Artificial Sequence: Synthetic oligonucleotide
gcccugcgcgcacuuccgc

SEQ ID NO: 718495 - RNA, 19 nt, Artificial Sequence
  Description of Artificial Sequence: Synthetic oligonucleotide
cgcugggucgccgcgcucc

SEQ ID NO: 718496 - RNA, 19 nt, Artificial Sequence
  Description of Artificial Sequence: Synthetic oligonucleotide
cgucagauaacugacucuu

SEQ ID NO: 718497 - RNA, 19 nt, Artificial Sequence
  Description of Artificial Sequence: Synthetic oligonucleotide
cgugaaucaucacuugguu

SEQ ID NO: 718498 - RNA, 19 nt, Artificial Sequence
  Description of Artificial Sequence: Synthetic oligonucleotide
gccuucguacucaaaccau

SEQ ID NO: 718499 - RNA, 19 nt, Artificial Sequence
  Description of Artificial Sequence: Synthetic oligonucleotide
ccaauuggauaaugccauu

SEQ ID NO: 718500 - RNA, 19 nt, Artificial Sequence
  Description of Artificial Sequence: Synthetic oligonucleotide
cugcgcgcacuuccgcccu

SEQ ID NO: 718501 - RNA, 19 nt, Artificial Sequence
  Description of Artificial Sequence: Synthetic oligonucleotide
ccaccggggucagagccca

SEQ ID NO: 718502 - RNA, 19 nt, Artificial Sequence
  Description of Artificial Sequence: Synthetic oligonucleotide
gccugacucacggcgcucu

SEQ ID NO: 718503 - RNA, 19 nt, Artificial Sequence
  Description of Artificial Sequence: Synthetic oligonucleotide
ccauagguugcagcaaguu

SEQ ID NO: 718504 - RNA, 19 nt, Artificial Sequence
  Description of Artificial Sequence: Synthetic oligonucleotide
gcauaccaauagacugacu

SEQ ID NO: 718505 - RNA, 19 nt, Artificial Sequence
  Description of Artificial Sequence: Synthetic oligonucleotide
ccgcgcuccgccugccuga

SEQ ID NO: 718506 - RNA, 19 nt, Artificial Sequence
  Description of Artificial Sequence: Synthetic oligonucleotide
ccaugaguuuccgguugau

SEQ ID NO: 718507 - RNA, 19 nt, Artificial Sequence
  Description of Artificial Sequence: Synthetic oligonucleotide
cccuacugaccugcaccuu

SEQ ID NO: 718508 - RNA, 19 nt, Artificial Sequence
  Description of Artificial Sequence: Synthetic oligonucleotide
gcgcuccgccugccugacu

SEQ ID NO: 718509 - RNA, 19 nt, Artificial Sequence
  Description of Artificial Sequence: Synthetic oligonucleotide
uaaucuguuauuaauaugc

SEQ ID NO: 718510 - RNA, 19 nt, Artificial Sequence
  Description of Artificial Sequence: Synthetic oligonucleotide
uuuuacaugcuaaaugucg

SEQ ID NO: 718511 - RNA, 19 nt, Artificial Sequence
  Description of Artificial Sequence: Synthetic oligonucleotide
uuaaccacuaguaugacug

SEQ ID NO: 718512 - RNA, 19 nt, Artificial Sequence
  Description of Artificial Sequence: Synthetic oligonucleotide
aguacgaucucccagaguc

SEQ ID NO: 718513 - RNA, 19 nt, Artificial Sequence
  Description of Artificial Sequence: Synthetic oligonucleotide
acauaacacaaccuaaccc

SEQ ID NO: 718514 - RNA, 19 nt, Artificial Sequence
  Description of Artificial Sequence: Synthetic oligonucleotide
ucuguuauuaauaugcaaa

SEQ ID NO: 718515 - RNA, 19 nt, Artificial Sequence
  Description of Artificial Sequence: Synthetic oligonucleotide
uucaauaugaagcuguuaa

SEQ ID NO: 718516 - RNA, 19 nt, Artificial Sequence
  Description of Artificial Sequence: Synthetic oligonucleotide
aauuaauucaugcacguua

SEQ ID NO: 718517 - RNA, 19 nt, Artificial Sequence
  Description of Artificial Sequence: Synthetic oligonucleotide
ugcacuuuagaauuguuag

SEQ ID NO: 718518 - RNA, 19 nt, Artificial Sequence
  Description of Artificial Sequence: Synthetic oligonucleotide
guuagugugagaucaaagg

SEQ ID NO: 718519 - RNA, 19 nt, Artificial Sequence
  Description of Artificial Sequence: Synthetic oligonucleotide
augauuuagccuuacguac

SEQ ID NO: 718520 - RNA, 19 nt, Artificial Sequence
  Description of Artificial Sequence: Synthetic oligonucleotide
aagaagaugaauaccuacc

SEQ ID NO: 718521 - RNA, 19 nt, Artificial Sequence
  Description of Artificial Sequence: Synthetic oligonucleotide
ucaagggcaggacugaugg

SEQ ID NO: 718522 - RNA, 19 nt, Artificial Sequence
  Description of Artificial Sequence: Synthetic oligonucleotide
aaagcuaaacauggcagcc

SEQ ID NO: 718523 - RNA, 19 nt, Artificial Sequence
  Description of Artificial Sequence: Synthetic oligonucleotide
uuaaccucagucaagggca

SEQ ID NO: 718524 - RNA, 19 nt, Artificial Sequence
  Description of Artificial Sequence: Synthetic oligonucleotide
uuagugugagaucaaaggc

SEQ ID NO: 718525 - RNA, 19 nt, Artificial Sequence
  Description of Artificial Sequence: Synthetic oligonucleotide
aguuaaaagcuaaacaugg

SEQ ID NO: 718526 - RNA, 19 nt, Artificial Sequence
  Description of Artificial Sequence: Synthetic oligonucleotide
uagcuaucaguucagaaag

SEQ ID NO: 718527 - RNA, 19 nt, Artificial Sequence
  Description of Artificial Sequence: Synthetic oligonucleotide
auaccuaccagauuucuuc

SEQ ID NO: 718528 - RNA, 19 nt, Artificial Sequence
  Description of Artificial Sequence: Synthetic oligonucleotide
aagaaucagagcucgauga

SEQ ID NO: 718529 - RNA, 19 nt, Artificial Sequence
  Description of Artificial Sequence: Synthetic oligonucleotide
aaugucguguuaaugugcc

SEQ ID NO: 718530 - RNA, 19 nt, Artificial Sequence
  Description of Artificial Sequence: Synthetic oligonucleotide
uuuuacuagagucagcuua

SEQ ID NO: 718531 - RNA, 19 nt, Artificial Sequence
  Description of Artificial Sequence: Synthetic oligonucleotide
ugaugauuuagccuuacgu

SEQ ID NO: 718532 - RNA, 19 nt, Artificial Sequence
  Description of Artificial Sequence: Synthetic oligonucleotide
cuauuuacuaagauucugc

SEQ ID NO: 718533 - RNA, 19 nt, Artificial Sequence
  Description of Artificial Sequence: Synthetic oligonucleotide
guaaucccuacuuugaaag

SEQ ID NO: 718534 - RNA, 19 nt, Artificial Sequence
  Description of Artificial Sequence: Synthetic oligonucleotide
guaugucuaaucuucacag

SEQ ID NO: 718535 - RNA, 19 nt, Artificial Sequence
  Description of Artificial Sequence: Synthetic oligonucleotide
ugaaguggagguaaauucc

SEQ ID NO: 718536 - RNA, 19 nt, Artificial Sequence
  Description of Artificial Sequence: Synthetic oligonucleotide
auucauguaggccacgcgg

SEQ ID NO: 718537 - RNA, 19 nt, Artificial Sequence
  Description of Artificial Sequence: Synthetic oligonucleotide
augaauaccuaccagauuu

SEQ ID NO: 718538 - RNA, 19 nt, Artificial Sequence
  Description of Artificial Sequence: Synthetic oligonucleotide
ugucuuaaccacuaguaug

SEQ ID NO: 718539 - RNA, 19 nt, Artificial Sequence
  Description of Artificial Sequence: Synthetic oligonucleotide
augacugcaaaguacgauc

SEQ ID NO: 718540 - RNA, 19 nt, Artificial Sequence
  Description of Artificial Sequence: Synthetic oligonucleotide
uuagcuaucaguucagaaa

SEQ ID NO: 718541 - RNA, 19 nt, Artificial Sequence
  Description of Artificial Sequence: Synthetic oligonucleotide
uuuggaugagcuuucauuc

SEQ ID NO: 718542 - RNA, 19 nt, Artificial Sequence
  Description of Artificial Sequence: Synthetic oligonucleotide
ucuaucgucauacagcuuu

SEQ ID NO: 718543 - RNA, 19 nt, Artificial Sequence
  Description of Artificial Sequence: Synthetic oligonucleotide
uuaaagccgguauaaaaca

SEQ ID NO: 718544 - RNA, 19 nt, Artificial Sequence
  Description of Artificial Sequence: Synthetic oligonucleotide
uuugugcuaagucucagcu

SEQ ID NO: 718545 - RNA, 19 nt, Artificial Sequence
  Description of Artificial Sequence: Synthetic oligonucleotide
ucugaugacgacccagugg

SEQ ID NO: 718546 - RNA, 19 nt, Artificial Sequence
  Description of Artificial Sequence: Synthetic oligonucleotide
aucgcuauuggauucaugu

SEQ ID NO: 718547 - RNA, 19 nt, Artificial Sequence
  Description of Artificial Sequence: Synthetic oligonucleotide
aguaugacugcaaaguacg

SEQ ID NO: 718548 - RNA, 19 nt, Artificial Sequence
  Description of Artificial Sequence: Synthetic oligonucleotide
uucugguuacaucuuaaag

SEQ ID NO: 718549 - RNA, 19 nt, Artificial Sequence
  Description of Artificial Sequence: Synthetic oligonucleotide
aaucauggcccuucgcacg

SEQ ID NO: 718550 - RNA, 19 nt, Artificial Sequence
  Description of Artificial Sequence: Synthetic oligonucleotide
aagccgguauaaaacaugc

SEQ ID NO: 718551 - RNA, 19 nt, Artificial Sequence
  Description of Artificial Sequence: Synthetic oligonucleotide
aagggaauuaauucaugca

SEQ ID NO: 718552 - RNA, 19 nt, Artificial Sequence
  Description of Artificial Sequence: Synthetic oligonucleotide
uuuacaugcuaaaugucgu

SEQ ID NO: 718553 - RNA, 19 nt, Artificial Sequence
  Description of Artificial Sequence: Synthetic oligonucleotide
aaagcuuuggaacccuucu

SEQ ID NO: 718554 - RNA, 19 nt, Artificial Sequence
  Description of Artificial Sequence: Synthetic oligonucleotide
acauaaaguagcuaucacu

SEQ ID NO: 718555 - RNA, 19 nt, Artificial Sequence
  Description of Artificial Sequence: Synthetic oligonucleotide
uguaggcaaaauuaauuca

SEQ ID NO: 718556 - RNA, 19 nt, Artificial Sequence
  Description of Artificial Sequence: Synthetic oligonucleotide
cauaauccgacucugauga

SEQ ID NO: 718557 - RNA, 19 nt, Artificial Sequence
  Description of Artificial Sequence: Synthetic oligonucleotide
uaaaugucguguuaaugug

SEQ ID NO: 718558 - RNA, 19 nt, Artificial Sequence
  Description of Artificial Sequence: Synthetic oligonucleotide
acugcaaaguacgaucucc

SEQ ID NO: 718559 - RNA, 19 nt, Artificial Sequence
  Description of Artificial Sequence: Synthetic oligonucleotide
aaauacacuuaucuacaga

SEQ ID NO: 718560 - RNA, 19 nt, Artificial Sequence
  Description of Artificial Sequence: Synthetic oligonucleotide
auucaugcacguuacuccg

SEQ ID NO: 718561 - RNA, 19 nt, Artificial Sequence
  Description of Artificial Sequence: Synthetic oligonucleotide
gaugucguuaaccucaguc

SEQ ID NO: 718562 - RNA, 19 nt, Artificial Sequence
  Description of Artificial Sequence: Synthetic oligonucleotide
gaagaagaugaauaccuac

SEQ ID NO: 718563 - RNA, 19 nt, Artificial Sequence
  Description of Artificial Sequence: Synthetic oligonucleotide
acuagagucagcuuaguau

SEQ ID NO: 718564 - RNA, 19 nt, Artificial Sequence
  Description of Artificial Sequence: Synthetic oligonucleotide
guuaaccucagucaagggc

SEQ ID NO: 718565 - RNA, 19 nt, Artificial Sequence
  Description of Artificial Sequence: Synthetic oligonucleotide
uuguuauuauugaagugga

SEQ ID NO: 718566 - RNA, 19 nt, Artificial Sequence
  Description of Artificial Sequence: Synthetic oligonucleotide
acaguugagagcuccuucg

SEQ ID NO: 718567 - RNA, 19 nt, Artificial Sequence
  Description of Artificial Sequence: Synthetic oligonucleotide
ucuacagaugucguuaacc

SEQ ID NO: 718568 - RNA, 19 nt, Artificial Sequence
  Description of Artificial Sequence: Synthetic oligonucleotide
ugacauaacacaaccuaac

SEQ ID NO: 718569 - RNA, 19 nt, Artificial Sequence
  Description of Artificial Sequence: Synthetic oligonucleotide
aacaaucauggcccuucgc

SEQ ID NO: 718570 - RNA, 19 nt, Artificial Sequence
  Description of Artificial Sequence: Synthetic oligonucleotide
acaaucauggcccuucgca

SEQ ID NO: 718571 - RNA, 19 nt, Artificial Sequence
  Description of Artificial Sequence: Synthetic oligonucleotide
ucuauuuacuaagauucug

SEQ ID NO: 718572 - RNA, 19 nt, Artificial Sequence
  Description of Artificial Sequence: Synthetic oligonucleotide
guuaaagccgguauaaaac

SEQ ID NO: 718573 - RNA, 19 nt, Artificial Sequence
  Description of Artificial Sequence: Synthetic oligonucleotide
acacaagggaauuaauuca

SEQ ID NO: 718574 - RNA, 19 nt, Artificial Sequence
  Description of Artificial Sequence: Synthetic oligonucleotide
gaugauuuagccuuacgua

SEQ ID NO: 718575 - RNA, 19 nt, Artificial Sequence
  Description of Artificial Sequence: Synthetic oligonucleotide
aauauuagcuuuauuccaa

SEQ ID NO: 718576 - RNA, 19 nt, Artificial Sequence
  Description of Artificial Sequence: Synthetic oligonucleotide
aauguaaucccuacuuuga

SEQ ID NO: 718577 - RNA, 19 nt, Artificial Sequence
  Description of Artificial Sequence: Synthetic oligonucleotide
aaaguacgaucucccagag

SEQ ID NO: 718578 - RNA, 19 nt, Artificial Sequence
  Description of Artificial Sequence: Synthetic oligonucleotide
ucauaauccgacucugaug

SEQ ID NO: 718579 - RNA, 19 nt, Artificial Sequence
  Description of Artificial Sequence: Synthetic oligonucleotide
caauaugaagcuguuaaac

SEQ ID NO: 718580 - RNA, 19 nt, Artificial Sequence
  Description of Artificial Sequence: Synthetic oligonucleotide
uccagauucaguuucugau

SEQ ID NO: 718581 - RNA, 19 nt, Artificial Sequence
  Description of Artificial Sequence: Synthetic oligonucleotide
aagauacagcauaccaggc

SEQ ID NO: 718582 - RNA, 19 nt, Artificial Sequence
  Description of Artificial Sequence: Synthetic oligonucleotide
aguuguuauuauugaagug

SEQ ID NO: 718583 - RNA, 19 nt, Artificial Sequence
  Description of Artificial Sequence: Synthetic oligonucleotide
ucugccauagcuuuaugua

SEQ ID NO: 718584 - RNA, 19 nt, Artificial Sequence
  Description of Artificial Sequence: Synthetic oligonucleotide
aaacccucugaccaguuaa

SEQ ID NO: 718585 - RNA, 19 nt, Artificial Sequence
  Description of Artificial Sequence: Synthetic oligonucleotide
uagccuuacguacuucuag

SEQ ID NO: 718586 - RNA, 19 nt, Artificial Sequence
  Description of Artificial Sequence: Synthetic oligonucleotide
auucccacuuaacaacuuc

SEQ ID NO: 718587 - RNA, 19 nt, Artificial Sequence
  Description of Artificial Sequence: Synthetic oligonucleotide
ucugaacuugaaucagcgg

SEQ ID NO: 718588 - RNA, 19 nt, Artificial Sequence
  Description of Artificial Sequence: Synthetic oligonucleotide
ugucguuaaccucagucaa

SEQ ID NO: 718589 - RNA, 19 nt, Artificial Sequence
  Description of Artificial Sequence: Synthetic oligonucleotide
augucguuaaccucaguca

SEQ ID NO: 718590 - RNA, 19 nt, Artificial Sequence
  Description of Artificial Sequence: Synthetic oligonucleotide
aagucuacacacaagggaa

SEQ ID NO: 718591 - RNA, 19 nt, Artificial Sequence
  Description of Artificial Sequence: Synthetic oligonucleotide
cuaucaguucagaaaguac

SEQ ID NO: 718592 - RNA, 19 nt, Artificial Sequence
  Description of Artificial Sequence: Synthetic oligonucleotide
ugacugcaaaguacgaucu

SEQ ID NO: 718593 - RNA, 19 nt, Artificial Sequence
  Description of Artificial Sequence: Synthetic oligonucleotide
uagaauuguuagcuaucag

SEQ ID NO: 718594 - RNA, 19 nt, Artificial Sequence
  Description of Artificial Sequence: Synthetic oligonucleotide
aaaguguaggcaaaauuaa

SEQ ID NO: 718595 - RNA, 19 nt, Artificial Sequence
  Description of Artificial Sequence: Synthetic oligonucleotide
gauucauguaggccacgcg

SEQ ID NO: 718596 - RNA, 19 nt, Artificial Sequence
  Description of Artificial Sequence: Synthetic oligonucleotide
cauaacacaaccuaacccu

SEQ ID NO: 718597 - RNA, 19 nt, Artificial Sequence
  Description of Artificial Sequence: Synthetic oligonucleotide
aggccugccacuuaacuug

SEQ ID NO: 718598 - RNA, 19 nt, Artificial Sequence
  Description of Artificial Sequence: Synthetic oligonucleotide
uuaaugugccacugaacac

SEQ ID NO: 718599 - RNA, 19 nt, Artificial Sequence
  Description of Artificial Sequence: Synthetic oligonucleotide
ugcugacuaguccaggaca

SEQ ID NO: 718600 - RNA, 19 nt, Artificial Sequence
  Description of Artificial Sequence: Synthetic oligonucleotide
uguuaaugugccacugaac

SEQ ID NO: 718601 - RNA, 19 nt, Artificial Sequence
  Description of Artificial Sequence: Synthetic oligonucleotide
uguaaucccuacuuugaaa

SEQ ID NO: 718602 - RNA, 19 nt, Artificial Sequence
  Description of Artificial Sequence: Synthetic oligonucleotide
uuacaugcuaaaugucgug

SEQ ID NO: 718603 - RNA, 19 nt, Artificial Sequence
  Description of Artificial Sequence: Synthetic oligonucleotide
ucuaaucuucacaguugag

SEQ ID NO: 718604 - RNA, 19 nt, Artificial Sequence
  Description of Artificial Sequence: Synthetic oligonucleotide
ucaauaugaagcuguuaaa

SEQ ID NO: 718605 - RNA, 19 nt, Artificial Sequence
  Description of Artificial Sequence: Synthetic oligonucleotide
acagaugucguuaaccuca

SEQ ID NO: 718606 - RNA, 19 nt, Artificial Sequence
  Description of Artificial Sequence: Synthetic oligonucleotide
agacuuauggcaacggcuc

SEQ ID NO: 718607 - RNA, 19 nt, Artificial Sequence
  Description of Artificial Sequence: Synthetic oligonucleotide
aaagccgguauaaaacaug

SEQ ID NO: 718608 - RNA, 19 nt, Artificial Sequence
  Description of Artificial Sequence: Synthetic oligonucleotide
accaaaauauacgugggga

SEQ ID NO: 718609 - RNA, 19 nt, Artificial Sequence
  Description of Artificial Sequence: Synthetic oligonucleotide
augucuaaucuucacaguu

SEQ ID NO: 718610 - RNA, 19 nt, Artificial Sequence
  Description of Artificial Sequence: Synthetic oligonucleotide
gauuguuggcccugaagac

SEQ ID NO: 718611 - RNA, 19 nt, Artificial Sequence
  Description of Artificial Sequence: Synthetic oligonucleotide
aguaccagugucuaucaaa

SEQ ID NO: 718612 - RNA, 19 nt, Artificial Sequence
  Description of Artificial Sequence: Synthetic oligonucleotide
uuacguacuucuaguaaaa

SEQ ID NO: 718613 - RNA, 19 nt, Artificial Sequence
  Description of Artificial Sequence: Synthetic oligonucleotide
cacuuaucuacagaguaag

SEQ ID NO: 718614 - RNA, 19 nt, Artificial Sequence
  Description of Artificial Sequence: Synthetic oligonucleotide
cugaugacgacccagugga

SEQ ID NO: 718615 - RNA, 19 nt, Artificial Sequence
  Description of Artificial Sequence: Synthetic oligonucleotide
acuaguccaggacaagucu

SEQ ID NO: 718616 - RNA, 19 nt, Artificial Sequence
  Description of Artificial Sequence: Synthetic oligonucleotide
ggauuggaccccucgaucg

SEQ ID NO: 718617 - RNA, 19 nt, Artificial Sequence
  Description of Artificial Sequence: Synthetic oligonucleotide
uggcccuucgcacgcaugg

SEQ ID NO: 718618 - RNA, 19 nt, Artificial Sequence
  Description of Artificial Sequence: Synthetic oligonucleotide
uucgacauugcacucggua

SEQ ID NO: 718619 - RNA, 19 nt, Artificial Sequence
  Description of Artificial Sequence: Synthetic oligonucleotide
uucacacgaagcagcauac

SEQ ID NO: 718620 - RNA, 19 nt, Artificial Sequence
  Description of Artificial Sequence: Synthetic oligonucleotide
aaucuguuauuaauaugca

SEQ ID NO: 718621 - RNA, 19 nt, Artificial Sequence
  Description of Artificial Sequence: Synthetic oligonucleotide
cuccguaugucuaaucuuc

SEQ ID NO: 718622 - RNA, 19 nt, Artificial Sequence
  Description of Artificial Sequence: Synthetic oligonucleotide
agcuuuauguaacaagaua

SEQ ID NO: 718623 - RNA, 19 nt, Artificial Sequence
  Description of Artificial Sequence: Synthetic oligonucleotide
aguggacagcgcucuaucg

SEQ ID NO: 718624 - RNA, 19 nt, Artificial Sequence
  Description of Artificial Sequence: Synthetic oligonucleotide
cacgaagcagcauacaaca

SEQ ID NO: 718625 - RNA, 19 nt, Artificial Sequence
  Description of Artificial Sequence: Synthetic oligonucleotide
aaaugacauaacacaaccu

SEQ ID NO: 718626 - RNA, 19 nt, Artificial Sequence
  Description of Artificial Sequence: Synthetic oligonucleotide
cuugcuauccgagucggag

SEQ ID NO: 718627 - RNA, 19 nt, Artificial Sequence
  Description of Artificial Sequence: Synthetic oligonucleotide
ugucauaaucuguuauuaa

SEQ ID NO: 718628 - RNA, 19 nt, Artificial Sequence
  Description of Artificial Sequence: Synthetic oligonucleotide
cuauuggauucauguaggc

SEQ ID NO: 718629 - RNA, 19 nt, Artificial Sequence
  Description of Artificial Sequence: Synthetic oligonucleotide
caagucuacacacaaggga

SEQ ID NO: 718630 - RNA, 19 nt, Artificial Sequence
  Description of Artificial Sequence: Synthetic oligonucleotide
cuuacguacuucuaguaaa

SEQ ID NO: 718631 - RNA, 19 nt, Artificial Sequence
  Description of Artificial Sequence: Synthetic oligonucleotide
auggcgguauccgaguggc

SEQ ID NO: 718632 - RNA, 19 nt, Artificial Sequence
  Description of Artificial Sequence: Synthetic oligonucleotide
agucugaacuugaaucagc

SEQ ID NO: 718633 - RNA, 19 nt, Artificial Sequence
  Description of Artificial Sequence: Synthetic oligonucleotide
ggaguuaaaagcuaaacau

SEQ ID NO: 718634 - RNA, 19 nt, Artificial Sequence
  Description of Artificial Sequence: Synthetic oligonucleotide
caaaguacgaucucccaga

SEQ ID NO: 718635 - RNA, 19 nt, Artificial Sequence
  Description of Artificial Sequence: Synthetic oligonucleotide
uuaacuuguuugugcuaag

SEQ ID NO: 718636 - RNA, 19 nt, Artificial Sequence
  Description of Artificial Sequence: Synthetic oligonucleotide
ucgacauugcacucgguaa

SEQ ID NO: 718637 - RNA, 19 nt, Artificial Sequence
  Description of Artificial Sequence: Synthetic oligonucleotide
ugcacguuacuccguaugu

SEQ ID NO: 718638 - RNA, 19 nt, Artificial Sequence
  Description of Artificial Sequence: Synthetic oligonucleotide
ugucguguuaaugugccac

SEQ ID NO: 718639 - RNA, 19 nt, Artificial Sequence
  Description of Artificial Sequence: Synthetic oligonucleotide
ugaaucagcggccuucuuu

SEQ ID NO: 718640 - RNA, 19 nt, Artificial Sequence
  Description of Artificial Sequence: Synthetic oligonucleotide
uaaaagcuccuuccccaag

SEQ ID NO: 718641 - RNA, 19 nt, Artificial Sequence
  Description of Artificial Sequence: Synthetic oligonucleotide
gucuuaaccacuaguauga

SEQ ID NO: 718642 - RNA, 19 nt, Artificial Sequence
  Description of Artificial Sequence: Synthetic oligonucleotide
gacuggauuggaccccucg

SEQ ID NO: 718643 - RNA, 19 nt, Artificial Sequence
  Description of Artificial Sequence: Synthetic oligonucleotide
uaugucuaaucuucacagu

SEQ ID NO: 718644 - RNA, 19 nt, Artificial Sequence
  Description of Artificial Sequence: Synthetic oligonucleotide
cugcaaaguacgaucuccc

SEQ ID NO: 718645 - RNA, 19 nt, Artificial Sequence
  Description of Artificial Sequence: Synthetic oligonucleotide
gacauugcacucgguaagg

SEQ ID NO: 718646 - RNA, 19 nt, Artificial Sequence
  Description of Artificial Sequence: Synthetic oligonucleotide
aaucccuacuuugaaaguu

SEQ ID NO: 718647 - RNA, 19 nt, Artificial Sequence
  Description of Artificial Sequence: Synthetic oligonucleotide
aucucugguucacacgaag

SEQ ID NO: 718648 - RNA, 19 nt, Artificial Sequence
  Description of Artificial Sequence: Synthetic oligonucleotide
acauucuauuuacuaagau

SEQ ID NO: 718649 - RNA, 19 nt, Artificial Sequence
  Description of Artificial Sequence: Synthetic oligonucleotide
ucgucauacagcuuucuuu

SEQ ID NO: 718650 - RNA, 19 nt, Artificial Sequence
  Description of Artificial Sequence: Synthetic oligonucleotide
gaucgagccaucgcuauug

SEQ ID NO: 718651 - RNA, 19 nt, Artificial Sequence
  Description of Artificial Sequence: Synthetic oligonucleotide
uacaugcuaaaugucgugu

SEQ ID NO: 718652 - RNA, 19 nt, Artificial Sequence
  Description of Artificial Sequence: Synthetic oligonucleotide
gaaguaguuagugugagau

SEQ ID NO: 718653 - RNA, 19 nt, Artificial Sequence
  Description of Artificial Sequence: Synthetic oligonucleotide
aggacaagucuacacacaa

SEQ ID NO: 718654 - RNA, 19 nt, Artificial Sequence
  Description of Artificial Sequence: Synthetic oligonucleotide
aucuguuauuaauaugcaa

SEQ ID NO: 718655 - RNA, 19 nt, Artificial Sequence
  Description of Artificial Sequence: Synthetic oligonucleotide
cacuaguaugacugcaaag

SEQ ID NO: 718656 - RNA, 19 nt, Artificial Sequence
  Description of Artificial Sequence: Synthetic oligonucleotide
uuguuugugcuaagucuca

SEQ ID NO: 718657 - RNA, 19 nt, Artificial Sequence
  Description of Artificial Sequence: Synthetic oligonucleotide
acaagucuacacacaaggg

SEQ ID NO: 718658 - RNA, 19 nt, Artificial Sequence
  Description of Artificial Sequence: Synthetic oligonucleotide
ugcuauccgagucggaguc

SEQ ID NO: 718659 - RNA, 19 nt, Artificial Sequence
  Description of Artificial Sequence: Synthetic oligonucleotide
ugaauaccuaccagauuuc

SEQ ID NO: 718660 - RNA, 19 nt, Artificial Sequence
  Description of Artificial Sequence: Synthetic oligonucleotide
caaucauggcccuucgcac

SEQ ID NO: 718661 - RNA, 19 nt, Artificial Sequence
  Description of Artificial Sequence: Synthetic oligonucleotide
uaguccuggauuguuggcc

SEQ ID NO: 718662 - RNA, 19 nt, Artificial Sequence
  Description of Artificial Sequence: Synthetic oligonucleotide
augucuuaaccacuaguau

SEQ ID NO: 718663 - RNA, 19 nt, Artificial Sequence
  Description of Artificial Sequence: Synthetic oligonucleotide
ugaccucccaggaaacaug

SEQ ID NO: 718664 - RNA, 19 nt, Artificial Sequence
  Description of Artificial Sequence: Synthetic oligonucleotide
gccgguauaaaacaugcac

SEQ ID NO: 718665 - RNA, 19 nt, Artificial Sequence
  Description of Artificial Sequence: Synthetic oligonucleotide
uuaguauuucugguuacau

SEQ ID NO: 718666 - RNA, 19 nt, Artificial Sequence
  Description of Artificial Sequence: Synthetic oligonucleotide
uccuucgacauugcacucg

SEQ ID NO: 718667 - RNA, 19 nt, Artificial Sequence
  Description of Artificial Sequence: Synthetic oligonucleotide
uaacaagauacagcauacc

SEQ ID NO: 718668 - RNA, 19 nt, Artificial Sequence
  Description of Artificial Sequence: Synthetic oligonucleotide
uccguaugucuaaucuuca

SEQ ID NO: 718669 - RNA, 19 nt, Artificial Sequence
  Description of Artificial Sequence: Synthetic oligonucleotide
ugcaaaguacgaucuccca

SEQ ID NO: 718670 - RNA, 19 nt, Artificial Sequence
  Description of Artificial Sequence: Synthetic oligonucleotide
acuuaacaacuucucucug

SEQ ID NO: 718671 - RNA, 19 nt, Artificial Sequence
  Description of Artificial Sequence: Synthetic oligonucleotide
ggagguaaauuccagagcu

SEQ ID NO: 718672 - RNA, 19 nt, Artificial Sequence
  Description of Artificial Sequence: Synthetic oligonucleotide
agccaucgcuauuggauuc

SEQ ID NO: 718673 - RNA, 19 nt, Artificial Sequence
  Description of Artificial Sequence: Synthetic oligonucleotide
cagauucaguuucugauga

SEQ ID NO: 718674 - RNA, 19 nt, Artificial Sequence
  Description of Artificial Sequence: Synthetic oligonucleotide
gcuauuggauucauguagg

SEQ ID NO: 718675 - RNA, 19 nt, Artificial Sequence
  Description of Artificial Sequence: Synthetic oligonucleotide
uauuauugaaguggaggua

SEQ ID NO: 718676 - RNA, 19 nt, Artificial Sequence
  Description of Artificial Sequence: Synthetic oligonucleotide
cucgaugaagaagaagaug

SEQ ID NO: 718677 - RNA, 19 nt, Artificial Sequence
  Description of Artificial Sequence: Synthetic oligonucleotide
augcacguuacuccguaug

SEQ ID NO: 718678 - RNA, 19 nt, Artificial Sequence
  Description of Artificial Sequence: Synthetic oligonucleotide
gcaaaguacgaucucccag

SEQ ID NO: 718679 - RNA, 19 nt, Artificial Sequence
  Description of Artificial Sequence: Synthetic oligonucleotide
uaaccacuaguaugacugc

SEQ ID NO: 718680 - RNA, 19 nt, Artificial Sequence
  Description of Artificial Sequence: Synthetic oligonucleotide
auuguuggcccugaagacu

SEQ ID NO: 718681 - RNA, 19 nt, Artificial Sequence
  Description of Artificial Sequence: Synthetic oligonucleotide
uacagaugucguuaaccuc

SEQ ID NO: 718682 - RNA, 19 nt, Artificial Sequence
  Description of Artificial Sequence: Synthetic oligonucleotide
agccuuacguacuucuagu

SEQ ID NO: 718683 - RNA, 19 nt, Artificial Sequence
  Description of Artificial Sequence: Synthetic oligonucleotide
auaauccgacucugaugac

SEQ ID NO: 718684 - RNA, 19 nt, Artificial Sequence
  Description of Artificial Sequence: Synthetic oligonucleotide
uguuugugcuaagucucag

SEQ ID NO: 718685 - RNA, 19 nt, Artificial Sequence
  Description of Artificial Sequence: Synthetic oligonucleotide
uggauuggaccccucgauc

SEQ ID NO: 718686 - RNA, 19 nt, Artificial Sequence
  Description of Artificial Sequence: Synthetic oligonucleotide
uccuugcuauccgagucgg

SEQ ID NO: 718687 - RNA, 19 nt, Artificial Sequence
  Description of Artificial Sequence: Synthetic oligonucleotide
acuuaucuacagaguaagg

SEQ ID NO: 718688 - RNA, 19 nt, Artificial Sequence
  Description of Artificial Sequence: Synthetic oligonucleotide
uggacagcgcucuaucguc

SEQ ID NO: 718689 - RNA, 19 nt, Artificial Sequence
  Description of Artificial Sequence: Synthetic oligonucleotide
ucggagucugacacugagc

SEQ ID NO: 718690 - RNA, 19 nt, Artificial Sequence
  Description of Artificial Sequence: Synthetic oligonucleotide
uaccuaccagauuucuucu

SEQ ID NO: 718691 - RNA, 19 nt, Artificial Sequence
  Description of Artificial Sequence: Synthetic oligonucleotide
aaaacccucugaccaguua

SEQ ID NO: 718692 - RNA, 19 nt, Artificial Sequence
  Description of Artificial Sequence: Synthetic oligonucleotide
uuagccuuacguacuucua

SEQ ID NO: 718693 - RNA, 19 nt, Artificial Sequence
  Description of Artificial Sequence: Synthetic oligonucleotide
acuuuagaauuguuagcua

SEQ ID NO: 718694 - RNA, 19 nt, Artificial Sequence
  Description of Artificial Sequence: Synthetic oligonucleotide
ucaugcacguuacuccgua

SEQ ID NO: 718695 - RNA, 19 nt, Artificial Sequence
  Description of Artificial Sequence: Synthetic oligonucleotide
cauggcgguauccgagugg

SEQ ID NO: 718696 - RNA, 19 nt, Artificial Sequence
  Description of Artificial Sequence: Synthetic oligonucleotide
uacgaucucccagagucac

SEQ ID NO: 718697 - RNA, 19 nt, Artificial Sequence
  Description of Artificial Sequence: Synthetic oligonucleotide
uguguccacagaaguaguu

SEQ ID NO: 718698 - RNA, 19 nt, Artificial Sequence
  Description of Artificial Sequence: Synthetic oligonucleotide
uugcuauccgagucggagu

SEQ ID NO: 718699 - RNA, 19 nt, Artificial Sequence
  Description of Artificial Sequence: Synthetic oligonucleotide
aauaccuaccagauuucuu

SEQ ID NO: 718700 - RNA, 19 nt, Artificial Sequence
  Description of Artificial Sequence: Synthetic oligonucleotide
accaguuaaagccgguaua

SEQ ID NO: 718701 - RNA, 19 nt, Artificial Sequence
  Description of Artificial Sequence: Synthetic oligonucleotide
augacauaacacaaccuaa

SEQ ID NO: 718702 - RNA, 19 nt, Artificial Sequence
  Description of Artificial Sequence: Synthetic oligonucleotide
gucucgcuuccccauggcg

SEQ ID NO: 718703 - RNA, 19 nt, Artificial Sequence
  Description of Artificial Sequence: Synthetic oligonucleotide
cuacagaugucguuaaccu

SEQ ID NO: 718704 - RNA, 19 nt, Artificial Sequence
  Description of Artificial Sequence: Synthetic oligonucleotide
gacuaguccaggacaaguc

SEQ ID NO: 718705 - RNA, 19 nt, Artificial Sequence
  Description of Artificial Sequence: Synthetic oligonucleotide
aucgagccaucgcuauugg

SEQ ID NO: 718706 - RNA, 19 nt, Artificial Sequence
  Description of Artificial Sequence: Synthetic oligonucleotide
acgcgguugucucgcuucc

SEQ ID NO: 718707 - RNA, 19 nt, Artificial Sequence
  Description of Artificial Sequence: Synthetic oligonucleotide
aggacugauggugcccagc

SEQ ID NO: 718708 - RNA, 19 nt, Artificial Sequence
  Description of Artificial Sequence: Synthetic oligonucleotide
ucguguuaaugugccacug

SEQ ID NO: 718709 - RNA, 19 nt, Artificial Sequence
  Description of Artificial Sequence: Synthetic oligonucleotide
aggagacuuauggcaacgg

SEQ ID NO: 718710 - RNA, 19 nt, Artificial Sequence
  Description of Artificial Sequence: Synthetic oligonucleotide
ucgguaagggacccugguc

SEQ ID NO: 718711 - RNA, 19 nt, Artificial Sequence
  Description of Artificial Sequence: Synthetic oligonucleotide
agauaguccuggauuguug

SEQ ID NO: 718712 - RNA, 19 nt, Artificial Sequence
  Description of Artificial Sequence: Synthetic oligonucleotide
ggagacuuauggcaacggc

SEQ ID NO: 718713 - RNA, 19 nt, Artificial Sequence
  Description of Artificial Sequence: Synthetic oligonucleotide
ucuacacacaagggaauua

SEQ ID NO: 718714 - RNA, 19 nt, Artificial Sequence
  Description of Artificial Sequence: Synthetic oligonucleotide
uacagcauaccaggccugc

SEQ ID NO: 718715 - RNA, 19 nt, Artificial Sequence
  Description of Artificial Sequence: Synthetic oligonucleotide
uguuagcuaucaguucaga

SEQ ID NO: 718716 - RNA, 19 nt, Artificial Sequence
  Description of Artificial Sequence: Synthetic oligonucleotide
auguaggccacgcgguugu

SEQ ID NO: 718717 - RNA, 19 nt, Artificial Sequence
  Description of Artificial Sequence: Synthetic oligonucleotide
aguccuuuaguguccuuuu

SEQ ID NO: 718718 - RNA, 19 nt, Artificial Sequence
  Description of Artificial Sequence: Synthetic oligonucleotide
uucaugcacguuacuccgu

SEQ ID NO: 718719 - RNA, 19 nt, Artificial Sequence
  Description of Artificial Sequence: Synthetic oligonucleotide
auuuagccuuacguacuuc

SEQ ID NO: 718720 - RNA, 19 nt, Artificial Sequence
  Description of Artificial Sequence: Synthetic oligonucleotide
uuacuaagauucugccaua

SEQ ID NO: 718721 - RNA, 19 nt, Artificial Sequence
  Description of Artificial Sequence: Synthetic oligonucleotide
cuaguaugacugcaaagua

SEQ ID NO: 718722 - RNA, 19 nt, Artificial Sequence
  Description of Artificial Sequence: Synthetic oligonucleotide
acaugcacuuuagaauugu

SEQ ID NO: 718723 - RNA, 19 nt, Artificial Sequence
  Description of Artificial Sequence: Synthetic oligonucleotide
acaagggaauuaauucaug

SEQ ID NO: 718724 - RNA, 19 nt, Artificial Sequence
  Description of Artificial Sequence: Synthetic oligonucleotide
aaguaccagugucuaucaa

SEQ ID NO: 718725 - RNA, 19 nt, Artificial Sequence
  Description of Artificial Sequence: Synthetic oligonucleotide
uggaccccucgaucgagcc

SEQ ID NO: 718726 - RNA, 19 nt, Artificial Sequence
  Description of Artificial Sequence: Synthetic oligonucleotide
uccgagucggagucugaca

SEQ ID NO: 718727 - RNA, 19 nt, Artificial Sequence
  Description of Artificial Sequence: Synthetic oligonucleotide
gaaucagcggccuucuuuu

SEQ ID NO: 718728 - RNA, 19 nt, Artificial Sequence
  Description of Artificial Sequence: Synthetic oligonucleotide
ucgcuauuggauucaugua

SEQ ID NO: 718729 - RNA, 19 nt, Artificial Sequence
  Description of Artificial Sequence: Synthetic oligonucleotide
ccgacucugaugacgaccc

SEQ ID NO: 718730 - RNA, 19 nt, Artificial Sequence
  Description of Artificial Sequence: Synthetic oligonucleotide
gauuggaccccucgaucga

SEQ ID NO: 718731 - RNA, 19 nt, Artificial Sequence
  Description of Artificial Sequence: Synthetic oligonucleotide
ucuuaaccacuaguaugac

SEQ ID NO: 718732 - RNA, 19 nt, Artificial Sequence
  Description of Artificial Sequence: Synthetic oligonucleotide
agucagcuuaguauuucug

SEQ ID NO: 718733 - RNA, 19 nt, Artificial Sequence
  Description of Artificial Sequence: Synthetic oligonucleotide
cagaaucugaagaacugcu

SEQ ID NO: 718734 - RNA, 19 nt, Artificial Sequence
  Description of Artificial Sequence: Synthetic oligonucleotide
uaggccacgcgguugucuc

SEQ ID NO: 718735 - RNA, 19 nt, Artificial Sequence
  Description of Artificial Sequence: Synthetic oligonucleotide
uuacuccguaugucuaauc

SEQ ID NO: 718736 - RNA, 19 nt, Artificial Sequence
  Description of Artificial Sequence: Synthetic oligonucleotide
aucgucauacagcuuucuu

SEQ ID NO: 718737 - RNA, 19 nt, Artificial Sequence
  Description of Artificial Sequence: Synthetic oligonucleotide
uaucucugguucacacgaa

SEQ ID NO: 718738 - RNA, 19 nt, Artificial Sequence
  Description of Artificial Sequence: Synthetic oligonucleotide
cagcgcucuaucgucauac

SEQ ID NO: 718739 - RNA, 19 nt, Artificial Sequence
  Description of Artificial Sequence: Synthetic oligonucleotide
auuggaccccucgaucgag

SEQ ID NO: 718740 - RNA, 19 nt, Artificial Sequence
  Description of Artificial Sequence: Synthetic oligonucleotide
acacuuaucuacagaguaa

SEQ ID NO: 718741 - RNA, 19 nt, Artificial Sequence
  Description of Artificial Sequence: Synthetic oligonucleotide
ucccuacuuugaaaguuuu

SEQ ID NO: 718742 - RNA, 19 nt, Artificial Sequence
  Description of Artificial Sequence: Synthetic oligonucleotide
cacuuaacuuguuugugcu

SEQ ID NO: 718743 - RNA, 19 nt, Artificial Sequence
  Description of Artificial Sequence: Synthetic oligonucleotide
cuauccgagucggagucug

SEQ ID NO: 718744 - RNA, 19 nt, Artificial Sequence
  Description of Artificial Sequence: Synthetic oligonucleotide
uugugcuaagucucagcuu

SEQ ID NO: 718745 - RNA, 19 nt, Artificial Sequence
  Description of Artificial Sequence: Synthetic oligonucleotide
ugcacucgguaagggaccc

SEQ ID NO: 718746 - RNA, 19 nt, Artificial Sequence
  Description of Artificial Sequence: Synthetic oligonucleotide
augcacuuuagaauuguua

SEQ ID NO: 718747 - RNA, 19 nt, Artificial Sequence
  Description of Artificial Sequence: Synthetic oligonucleotide
cacgcgguugucucgcuuc

SEQ ID NO: 718748 - RNA, 19 nt, Artificial Sequence
  Description of Artificial Sequence: Synthetic oligonucleotide
aacuugaaucagcggccuu

SEQ ID NO: 718749 - RNA, 19 nt, Artificial Sequence
  Description of Artificial Sequence: Synthetic oligonucleotide
ccuucgacauugcacucgg

SEQ ID NO: 718750 - RNA, 19 nt, Artificial Sequence
  Description of Artificial Sequence: Synthetic oligonucleotide
auaacacaaccuaacccua

SEQ ID NO: 718751 - RNA, 19 nt, Artificial Sequence
  Description of Artificial Sequence: Synthetic oligonucleotide
acccucugaccaguuaaag

SEQ ID NO: 718752 - RNA, 19 nt, Artificial Sequence
  Description of Artificial Sequence: Synthetic oligonucleotide
ucgagccaucgcuauugga

SEQ ID NO: 718753 - RNA, 19 nt, Artificial Sequence
  Description of Artificial Sequence: Synthetic oligonucleotide
cacguuacuccguaugucu

SEQ ID NO: 718754 - RNA, 19 nt, Artificial Sequence
  Description of Artificial Sequence: Synthetic oligonucleotide
gcuuaguauuucugguuac

SEQ ID NO: 718755 - RNA, 19 nt, Artificial Sequence
  Description of Artificial Sequence: Synthetic oligonucleotide
cuaguccaggacaagucua

SEQ ID NO: 718756 - RNA, 19 nt, Artificial Sequence
  Description of Artificial Sequence: Synthetic oligonucleotide
cuuaaccacuaguaugacu

SEQ ID NO: 718757 - RNA, 19 nt, Artificial Sequence
  Description of Artificial Sequence: Synthetic oligonucleotide
ugaccaguuaaagccggua

SEQ ID NO: 718758 - RNA, 19 nt, Artificial Sequence
  Description of Artificial Sequence: Synthetic oligonucleotide
ugaugacgacccaguggac

SEQ ID NO: 718759 - RNA, 19 nt, Artificial Sequence
  Description of Artificial Sequence: Synthetic oligonucleotide
caucgcuauuggauucaug

SEQ ID NO: 718760 - RNA, 19 nt, Artificial Sequence
  Description of Artificial Sequence: Synthetic oligonucleotide
gaccaguuaaagccgguau

SEQ ID NO: 718761 - RNA, 19 nt, Artificial Sequence
  Description of Artificial Sequence: Synthetic oligonucleotide
ucacacgaagcagcauaca

SEQ ID NO: 718762 - RNA, 19 nt, Artificial Sequence
  Description of Artificial Sequence: Synthetic oligonucleotide
gcucuaucgucauacagcu

SEQ ID NO: 718763 - RNA, 19 nt, Artificial Sequence
  Description of Artificial Sequence: Synthetic oligonucleotide
cacucgguaagggacccug

SEQ ID NO: 718764 - RNA, 19 nt, Artificial Sequence
  Description of Artificial Sequence: Synthetic oligonucleotide
gaauaccuaccagauuucu

SEQ ID NO: 718765 - RNA, 19 nt, Artificial Sequence
  Description of Artificial Sequence: Synthetic oligonucleotide
acgaucucccagagucacc

SEQ ID NO: 718766 - RNA, 19 nt, Artificial Sequence
  Description of Artificial Sequence: Synthetic oligonucleotide
caguggacagcgcucuauc

SEQ ID NO: 718767 - RNA, 19 nt, Artificial Sequence
  Description of Artificial Sequence: Synthetic oligonucleotide
ucggucgguucagauaguc

SEQ ID NO: 718768 - RNA, 19 nt, Artificial Sequence
  Description of Artificial Sequence: Synthetic oligonucleotide
gauuuagccuuacguacuu

SEQ ID NO: 718769 - RNA, 19 nt, Artificial Sequence
  Description of Artificial Sequence: Synthetic oligonucleotide
ccgagucggagucugacac

SEQ ID NO: 718770 - RNA, 19 nt, Artificial Sequence
  Description of Artificial Sequence: Synthetic oligonucleotide
acgaagcagcauacaacag

SEQ ID NO: 718771 - RNA, 19 nt, Artificial Sequence
  Description of Artificial Sequence: Synthetic oligonucleotide
gucgguucagauaguccug

SEQ ID NO: 718772 - RNA, 19 nt, Artificial Sequence
  Description of Artificial Sequence: Synthetic oligonucleotide
gcgcucuaucgucauacag

SEQ ID NO: 718773 - RNA, 19 nt, Artificial Sequence
  Description of Artificial Sequence: Synthetic oligonucleotide
ccaaaauauacguggggaa

SEQ ID NO: 718774 - RNA, 19 nt, Artificial Sequence
  Description of Artificial Sequence: Synthetic oligonucleotide
acgcauggcgguauccgag

SEQ ID NO: 718775 - RNA, 19 nt, Artificial Sequence
  Description of Artificial Sequence: Synthetic oligonucleotide
cugacuaguccaggacaag

SEQ ID NO: 718776 - RNA, 19 nt, Artificial Sequence
  Description of Artificial Sequence: Synthetic oligonucleotide
agcgcucuaucgucauaca

SEQ ID NO: 718777 - RNA, 19 nt, Artificial Sequence
  Description of Artificial Sequence: Synthetic oligonucleotide
gacugauggugcccagcuc

SEQ ID NO: 718778 - RNA, 19 nt, Artificial Sequence
  Description of Artificial Sequence: Synthetic oligonucleotide
cagccuaaauaaaaucuau

SEQ ID NO: 718779 - RNA, 19 nt, Artificial Sequence
  Description of Artificial Sequence: Synthetic oligonucleotide
acucgguaagggacccugg

SEQ ID NO: 718780 - RNA, 19 nt, Artificial Sequence
  Description of Artificial Sequence: Synthetic oligonucleotide
aucccuacuuugaaaguuu

SEQ ID NO: 718781 - RNA, 19 nt, Artificial Sequence
  Description of Artificial Sequence: Synthetic oligonucleotide
guaugacugcaaaguacga

SEQ ID NO: 718782 - RNA, 19 nt, Artificial Sequence
  Description of Artificial Sequence: Synthetic oligonucleotide
guggacagcgcucuaucgu

SEQ ID NO: 718783 - RNA, 19 nt, Artificial Sequence
  Description of Artificial Sequence: Synthetic oligonucleotide
agcuaucaguucagaaagu

SEQ ID NO: 718784 - RNA, 19 nt, Artificial Sequence
  Description of Artificial Sequence: Synthetic oligonucleotide
gacuuauggcaacggcucu

SEQ ID NO: 718785 - RNA, 19 nt, Artificial Sequence
  Description of Artificial Sequence: Synthetic oligonucleotide
cgacauugcacucgguaag

SEQ ID NO: 718786 - RNA, 19 nt, Artificial Sequence
  Description of Artificial Sequence: Synthetic oligonucleotide
cccuucgcacgcauggcgg

SEQ ID NO: 718787 - RNA, 19 nt, Artificial Sequence
  Description of Artificial Sequence: Synthetic oligonucleotide
aggcaacaaucauggcccu

SEQ ID NO: 718788 - RNA, 19 nt, Artificial Sequence
  Description of Artificial Sequence: Synthetic oligonucleotide
gcuaucaguucagaaagua

SEQ ID NO: 718789 - RNA, 19 nt, Artificial Sequence
  Description of Artificial Sequence: Synthetic oligonucleotide
cguaugucuaaucuucaca

SEQ ID NO: 718790 - RNA, 19 nt, Artificial Sequence
  Description of Artificial Sequence: Synthetic oligonucleotide
gucguguuaaugugccacu

SEQ ID NO: 718791 - RNA, 19 nt, Artificial Sequence
  Description of Artificial Sequence: Synthetic oligonucleotide
gcacgcauggcgguauccg

SEQ ID NO: 718792 - RNA, 19 nt, Artificial Sequence
  Description of Artificial Sequence: Synthetic oligonucleotide
cuccuucgacauugcacuc

SEQ ID NO: 718793 - RNA, 19 nt, Artificial Sequence
  Description of Artificial Sequence: Synthetic oligonucleotide
gagccaucgcuauuggauu

SEQ ID NO: 718794 - RNA, 19 nt, Artificial Sequence
  Description of Artificial Sequence: Synthetic oligonucleotide
gcgguugucucgcuucccc

SEQ ID NO: 718795 - RNA, 19 nt, Artificial Sequence
  Description of Artificial Sequence: Synthetic oligonucleotide
gcgguauccgaguggcugc

SEQ ID NO: 718796 - RNA, 19 nt, Artificial Sequence
  Description of Artificial Sequence: Synthetic oligonucleotide
gaauuaauucaugcacguu

SEQ ID NO: 718797 - RNA, 19 nt, Artificial Sequence
  Description of Artificial Sequence: Synthetic oligonucleotide
gcagccuaaauaaaaucua

SEQ ID NO: 718798 - RNA, 19 nt, Artificial Sequence
  Description of Artificial Sequence: Synthetic oligonucleotide
ccguaugucuaaucuucac

SEQ ID NO: 718799 - RNA, 19 nt, Artificial Sequence
  Description of Artificial Sequence: Synthetic oligonucleotide
gacccaguggacagcgcuc

SEQ ID NO: 718800 - RNA, 19 nt, Artificial Sequence
  Description of Artificial Sequence: Synthetic oligonucleotide
cacgcauggcgguauccga

SEQ ID NO: 718801 - RNA, 19 nt, Artificial Sequence
  Description of Artificial Sequence: Synthetic oligonucleotide
uucgcacgcauggcgguau

SEQ ID NO: 718802 - RNA, 19 nt, Artificial Sequence
  Description of Artificial Sequence: Synthetic oligonucleotide
cucgaucgagccaucgcua

SEQ ID NO: 718803 - RNA, 19 nt, Artificial Sequence
  Description of Artificial Sequence: Synthetic oligonucleotide
uugaaucagcggccuucuu

SEQ ID NO: 718804 - RNA, 19 nt, Artificial Sequence
  Description of Artificial Sequence: Synthetic oligonucleotide
guaguuagugugagaucaa

SEQ ID NO: 718805 - RNA, 19 nt, Artificial Sequence
  Description of Artificial Sequence: Synthetic oligonucleotide
gaguccuuuaguguccuuu

SEQ ID NO: 718806 - RNA, 19 nt, Artificial Sequence
  Description of Artificial Sequence: Synthetic oligonucleotide
ccuuacguacuucuaguaa

SEQ ID NO: 718807 - RNA, 19 nt, Artificial Sequence
  Description of Artificial Sequence: Synthetic oligonucleotide
ucgcguucuucaccacuuu

SEQ ID NO: 718808 - RNA, 19 nt, Artificial Sequence
  Description of Artificial Sequence: Synthetic oligonucleotide
agccgguauaaaacaugca

SEQ ID NO: 718809 - RNA, 19 nt, Artificial Sequence
  Description of Artificial Sequence: Synthetic oligonucleotide
gaccccucgaucgagccau

SEQ ID NO: 718810 - RNA, 19 nt, Artificial Sequence
  Description of Artificial Sequence: Synthetic oligonucleotide
ggagucugacacugagcuc

SEQ ID NO: 718811 - RNA, 19 nt, Artificial Sequence
  Description of Artificial Sequence: Synthetic oligonucleotide
ggacugauggugcccagcu

SEQ ID NO: 718812 - RNA, 19 nt, Artificial Sequence
  Description of Artificial Sequence: Synthetic oligonucleotide
acguuacuccguaugucua

SEQ ID NO: 718813 - RNA, 19 nt, Artificial Sequence
  Description of Artificial Sequence: Synthetic oligonucleotide
uggcgguauccgaguggcu

SEQ ID NO: 718814 - RNA, 19 nt, Artificial Sequence
  Description of Artificial Sequence: Synthetic oligonucleotide
auaccaggccugccacuua

SEQ ID NO: 718815 - RNA, 19 nt, Artificial Sequence
  Description of Artificial Sequence: Synthetic oligonucleotide
ggaccgcacaggcccgagg

SEQ ID NO: 718816 - RNA, 19 nt, Artificial Sequence
  Description of Artificial Sequence: Synthetic oligonucleotide
acagcgcucuaucgucaua

SEQ ID NO: 718817 - RNA, 19 nt, Artificial Sequence
  Description of Artificial Sequence: Synthetic oligonucleotide
acgcugagucugaacuuga

SEQ ID NO: 718818 - RNA, 19 nt, Artificial Sequence
  Description of Artificial Sequence: Synthetic oligonucleotide
guuacuccguaugucuaau

SEQ ID NO: 718819 - RNA, 19 nt, Artificial Sequence
  Description of Artificial Sequence: Synthetic oligonucleotide
ucauggcccuucgcacgca

SEQ ID NO: 718820 - RNA, 19 nt, Artificial Sequence
  Description of Artificial Sequence: Synthetic oligonucleotide
gacagcgcucuaucgucau

SEQ ID NO: 718821 - RNA, 19 nt, Artificial Sequence
  Description of Artificial Sequence: Synthetic oligonucleotide
agacuggauuggaccccuc

SEQ ID NO: 718822 - RNA, 19 nt, Artificial Sequence
  Description of Artificial Sequence: Synthetic oligonucleotide
gccuuacguacuucuagua

SEQ ID NO: 718823 - RNA, 19 nt, Artificial Sequence
  Description of Artificial Sequence: Synthetic oligonucleotide
gugcuaagucucagcuuca

SEQ ID NO: 718824 - RNA, 19 nt, Artificial Sequence
  Description of Artificial Sequence: Synthetic oligonucleotide
caugcacuuuagaauuguu

SEQ ID NO: 718825 - RNA, 19 nt, Artificial Sequence
  Description of Artificial Sequence: Synthetic oligonucleotide
gcacguuacuccguauguc

SEQ ID NO: 718826 - RNA, 19 nt, Artificial Sequence
  Description of Artificial Sequence: Synthetic oligonucleotide
cggucgguucagauagucc

SEQ ID NO: 718827 - RNA, 19 nt, Artificial Sequence
  Description of Artificial Sequence: Synthetic oligonucleotide
ccgaguggcugcugacuag

SEQ ID NO: 718828 - RNA, 19 nt, Artificial Sequence
  Description of Artificial Sequence: Synthetic oligonucleotide
gagguaaauuccagagcuu

SEQ ID NO: 718829 - RNA, 19 nt, Artificial Sequence
  Description of Artificial Sequence: Synthetic oligonucleotide
ccacuaguaugacugcaaa

SEQ ID NO: 718830 - RNA, 19 nt, Artificial Sequence
  Description of Artificial Sequence: Synthetic oligonucleotide
ggccacgcgguugucucgc

SEQ ID NO: 718831 - RNA, 19 nt, Artificial Sequence
  Description of Artificial Sequence: Synthetic oligonucleotide
cagaugcuacgcugagucu

SEQ ID NO: 718832 - RNA, 19 nt, Artificial Sequence
  Description of Artificial Sequence: Synthetic oligonucleotide
gguaggccucggucgguuc

SEQ ID NO: 718833 - RNA, 19 nt, Artificial Sequence
  Description of Artificial Sequence: Synthetic oligonucleotide
ggacagcgcucuaucguca

SEQ ID NO: 718834 - RNA, 19 nt, Artificial Sequence
  Description of Artificial Sequence: Synthetic oligonucleotide
gguugucucgcuuccccau

SEQ ID NO: 718835 - RNA, 19 nt, Artificial Sequence
  Description of Artificial Sequence: Synthetic oligonucleotide
ccucgaucgagccaucgcu

SEQ ID NO: 718836 - RNA, 19 nt, Artificial Sequence
  Description of Artificial Sequence: Synthetic oligonucleotide
ggaagccgcggaccgcaca

SEQ ID NO: 718837 - RNA, 19 nt, Artificial Sequence
  Description of Artificial Sequence: Synthetic oligonucleotide
cuggauuguuggcccugaa

SEQ ID NO: 718838 - RNA, 19 nt, Artificial Sequence
  Description of Artificial Sequence: Synthetic oligonucleotide
ggaccccucgaucgagcca

SEQ ID NO: 718839 - RNA, 19 nt, Artificial Sequence
  Description of Artificial Sequence: Synthetic oligonucleotide
guaggccacgcgguugucu

SEQ ID NO: 718840 - RNA, 19 nt, Artificial Sequence
  Description of Artificial Sequence: Synthetic oligonucleotide
cgguaagggacccuggucu

SEQ ID NO: 718841 - RNA, 19 nt, Artificial Sequence
  Description of Artificial Sequence: Synthetic oligonucleotide
cguuacuccguaugucuaa

SEQ ID NO: 718842 - RNA, 19 nt, Artificial Sequence
  Description of Artificial Sequence: Synthetic oligonucleotide
caugcacguuacuccguau

SEQ ID NO: 718843 - RNA, 19 nt, Artificial Sequence
  Description of Artificial Sequence: Synthetic oligonucleotide
gguaagggacccuggucuu

SEQ ID NO: 718844 - RNA, 19 nt, Artificial Sequence
  Description of Artificial Sequence: Synthetic oligonucleotide
cuucgcacgcauggcggua

SEQ ID NO: 718845 - RNA, 19 nt, Artificial Sequence
  Description of Artificial Sequence: Synthetic oligonucleotide
ccccucgaucgagccaucg

SEQ ID NO: 718846 - RNA, 19 nt, Artificial Sequence
  Description of Artificial Sequence: Synthetic oligonucleotide
cuucgacauugcacucggu

SEQ ID NO: 718847 - RNA, 19 nt, Artificial Sequence
  Description of Artificial Sequence: Synthetic oligonucleotide
accccucgaucgagccauc

SEQ ID NO: 718848 - RNA, 19 nt, Artificial Sequence
  Description of Artificial Sequence: Synthetic oligonucleotide
gcggccggcugcaggcgcg

SEQ ID NO: 718849 - RNA, 19 nt, Artificial Sequence
  Description of Artificial Sequence: Synthetic oligonucleotide
cucuaucgucauacagcuu

SEQ ID NO: 718850 - RNA, 19 nt, Artificial Sequence
  Description of Artificial Sequence: Synthetic oligonucleotide
ccuggauuguuggcccuga

SEQ ID NO: 718851 - RNA, 19 nt, Artificial Sequence
  Description of Artificial Sequence: Synthetic oligonucleotide
ccuugcuauccgagucgga

SEQ ID NO: 718852 - RNA, 19 nt, Artificial Sequence
  Description of Artificial Sequence: Synthetic oligonucleotide
cgcacgcauggcgguaucc

SEQ ID NO: 718853 - RNA, 19 nt, Artificial Sequence
  Description of Artificial Sequence: Synthetic oligonucleotide
cgguugucucgcuucccca

SEQ ID NO: 718854 - RNA, 19 nt, Artificial Sequence
  Description of Artificial Sequence: Synthetic oligonucleotide
cgacccaguggacagcgcu

SEQ ID NO: 718855 - RNA, 19 nt, Artificial Sequence
  Description of Artificial Sequence: Synthetic oligonucleotide
gcuauccgagucggagucu

SEQ ID NO: 718856 - RNA, 19 nt, Artificial Sequence
  Description of Artificial Sequence: Synthetic oligonucleotide
ggccugccacuuaacuugu

SEQ ID NO: 718857 - RNA, 19 nt, Artificial Sequence
  Description of Artificial Sequence: Synthetic oligonucleotide
cgcgguugucucgcuuccc

SEQ ID NO: 718858 - RNA, 19 nt, Artificial Sequence
  Description of Artificial Sequence: Synthetic oligonucleotide
cgcauggcgguauccgagu

SEQ ID NO: 718859 - RNA, 19 nt, Artificial Sequence
  Description of Artificial Sequence: Synthetic oligonucleotide
cgaguggcugcugacuagu

SEQ ID NO: 718860 - RNA, 19 nt, Artificial Sequence
  Description of Artificial Sequence: Synthetic oligonucleotide
gcggaccgcacaggcccga

SEQ ID NO: 718861 - RNA, 19 nt, Artificial Sequence
  Description of Artificial Sequence: Synthetic oligonucleotide
cggaccgcacaggcccgag

SEQ ID NO: 718862 - RNA, 19 nt, Artificial Sequence
  Description of Artificial Sequence: Synthetic oligonucleotide
gccacgcgguugucucgcu

SEQ ID NO: 718863 - RNA, 19 nt, Artificial Sequence
  Description of Artificial Sequence: Synthetic oligonucleotide
gcacucgguaagggacccu

SEQ ID NO: 718864 - RNA, 19 nt, Artificial Sequence
  Description of Artificial Sequence: Synthetic oligonucleotide
cgaucgagccaucgcuauu

SEQ ID NO: 718865 - RNA, 19 nt, Artificial Sequence
  Description of Artificial Sequence: Synthetic oligonucleotide
ccacgcgguugucucgcuu

SEQ ID NO: 718866 - RNA, 19 nt, Artificial Sequence
  Description of Artificial Sequence: Synthetic oligonucleotide
cgguauccgaguggcugcu

SEQ ID NO: 718867 - RNA, 19 nt, Artificial Sequence
  Description of Artificial Sequence: Synthetic oligonucleotide
  modified_base (3)..(3): a, c, u, g, unknown or other
uunuuuaauacucuguccc

SEQ ID NO: 718868 - RNA, 19 nt, Artificial Sequence
  Description of Artificial Sequence: Synthetic oligonucleotide
auugauaaggcucacaaga

SEQ ID NO: 718869 - RNA, 19 nt, Artificial Sequence
  Description of Artificial Sequence: Synthetic oligonucleotide
aaagcauuguagcagccac

SEQ ID NO: 718870 - RNA, 19 nt, Artificial Sequence
  Description of Artificial Sequence: Synthetic oligonucleotide
  modified_base (5)..(5): a, c, u, g, unknown or other
uuuunuuuaauacucuguc

SEQ ID NO: 718871 - RNA, 19 nt, Artificial Sequence
  Description of Artificial Sequence: Synthetic oligonucleotide
uaacaaucgggccugauag

SEQ ID NO: 718872 - RNA, 19 nt, Artificial Sequence
  Description of Artificial Sequence: Synthetic oligonucleotide
  modified_base (4)..(4): a, c, u, g, unknown or other
uuunuuuaauacucugucc

SEQ ID NO: 718873 - RNA, 19 nt, Artificial Sequence
  Description of Artificial Sequence: Synthetic oligonucleotide
uccguauuaaacaugacau

SEQ ID NO: 718874 - RNA, 19 nt, Artificial Sequence
  Description of Artificial Sequence: Synthetic oligonucleotide
uguagacugccaaaagucg

SEQ ID NO: 718875 - RNA, 19 nt, Artificial Sequence
  Description of Artificial Sequence: Synthetic oligonucleotide
ucuaccacguccaacaacu

SEQ ID NO: 718876 - RNA, 19 nt, Artificial Sequence
  Description of Artificial Sequence: Synthetic oligonucleotide
ucaagaguagagaaguagc

SEQ ID NO: 718877 - RNA, 19 nt, Artificial Sequence
  Description of Artificial Sequence: Synthetic oligonucleotide
gauggaagggcucuagacg

SEQ ID NO: 718878 - RNA, 19 nt, Artificial Sequence
  Description of Artificial Sequence: Synthetic oligonucleotide
ucacguucauauaugaagc

SEQ ID NO: 718879 - RNA, 19 nt, Artificial Sequence
  Description of Artificial Sequence: Synthetic oligonucleotide
uuaauacucugucccaagg

SEQ ID NO: 718880 - RNA, 19 nt, Artificial Sequence
  Description of Artificial Sequence: Synthetic oligonucleotide
agagaaguagcuaaguaac

SEQ ID NO: 718881 - RNA, 19 nt, Artificial Sequence
  Description of Artificial Sequence: Synthetic oligonucleotide
uaauacucugucccaaggg

SEQ ID NO: 718882 - RNA, 19 nt, Artificial Sequence
  Description of Artificial Sequence: Synthetic oligonucleotide
aguccaaucccguagguag

SEQ ID NO: 718883 - RNA, 19 nt, Artificial Sequence
  Description of Artificial Sequence: Synthetic oligonucleotide
accauaagaacuugggguc

SEQ ID NO: 718884 - RNA, 19 nt, Artificial Sequence
  Description of Artificial Sequence: Synthetic oligonucleotide
uccaacaacucguaguucc

SEQ ID NO: 718885 - RNA, 19 nt, Artificial Sequence
  Description of Artificial Sequence: Synthetic oligonucleotide
aagucgucugaccaggcuc

SEQ ID NO: 718886 - RNA, 19 nt, Artificial Sequence
  Description of Artificial Sequence: Synthetic oligonucleotide
uucgguugcaaauagcaca

SEQ ID NO: 718887 - RNA, 19 nt, Artificial Sequence
  Description of Artificial Sequence: Synthetic oligonucleotide
auauggugcacucacagga

SEQ ID NO: 718888 - RNA, 19 nt, Artificial Sequence
  Description of Artificial Sequence: Synthetic oligonucleotide
uguguagacugccaaaagu

SEQ ID NO: 718889 - RNA, 19 nt, Artificial Sequence
  Description of Artificial Sequence: Synthetic oligonucleotide
cacauacccagacagagcc

SEQ ID NO: 718890 - RNA, 19 nt, Artificial Sequence
  Description of Artificial Sequence: Synthetic oligonucleotide
aacaacucguaguuccuag

SEQ ID NO: 718891 - RNA, 19 nt, Artificial Sequence
  Description of Artificial Sequence: Synthetic oligonucleotide
uagagaaguagcuaaguaa

SEQ ID NO: 718892 - RNA, 19 nt, Artificial Sequence
  Description of Artificial Sequence: Synthetic oligonucleotide
aagcaaucggcgaagaaag

SEQ ID NO: 718893 - RNA, 19 nt, Artificial Sequence
  Description of Artificial Sequence: Synthetic oligonucleotide
uuuucacccugcaauuagg

SEQ ID NO: 718894 - RNA, 19 nt, Artificial Sequence
  Description of Artificial Sequence: Synthetic oligonucleotide
aaucgggccugauaggcag

SEQ ID NO: 718895 - RNA, 19 nt, Artificial Sequence
  Description of Artificial Sequence: Synthetic oligonucleotide
uuuaauacucugucccaag

SEQ ID NO: 718896 - RNA, 19 nt, Artificial Sequence
  Description of Artificial Sequence: Synthetic oligonucleotide
uaugcaucuggcucuaggc

SEQ ID NO: 718897 - RNA, 19 nt, Artificial Sequence
  Description of Artificial Sequence: Synthetic oligonucleotide
guagguagcguacaguggc

SEQ ID NO: 718898 - RNA, 19 nt, Artificial Sequence
  Description of Artificial Sequence: Synthetic oligonucleotide
  modified_base (2)..(2): a, c, u, g, unknown or other
unuuuaauacucuguccca

SEQ ID NO: 718899 - RNA, 19 nt, Artificial Sequence
  Description of Artificial Sequence: Synthetic oligonucleotide
auguagguagcguacagug

SEQ ID NO: 718900 - RNA, 19 nt, Artificial Sequence
  Description of Artificial Sequence: Synthetic oligonucleotide
uguagguagcguacagugg

SEQ ID NO: 718901 - RNA, 19 nt, Artificial Sequence
  Description of Artificial Sequence: Synthetic oligonucleotide
agcuaacucagcuaccauc

SEQ ID NO: 718902 - RNA, 19 nt, Artificial Sequence
  Description of Artificial Sequence: Synthetic oligonucleotide
uuccugagcaagcaaucgg

SEQ ID NO: 718903 - RNA, 19 nt, Artificial Sequence
  Description of Artificial Sequence: Synthetic oligonucleotide
acaaucgggccugauaggc

SEQ ID NO: 718904 - RNA, 19 nt, Artificial Sequence
  Description of Artificial Sequence: Synthetic oligonucleotide
auacucuuuguagugugcc

SEQ ID NO: 718905 - RNA, 19 nt, Artificial Sequence
  Description of Artificial Sequence: Synthetic oligonucleotide
uccgcaucuuaucuuggcg

SEQ ID NO: 718906 - RNA, 19 nt, Artificial Sequence
  Description of Artificial Sequence: Synthetic oligonucleotide
uuauuguccugcaacaguu

SEQ ID NO: 718907 - RNA, 19 nt, Artificial Sequence
  Description of Artificial Sequence: Synthetic oligonucleotide
uggaaaugcaugcagccuc

SEQ ID NO: 718908 - RNA, 19 nt, Artificial Sequence
  Description of Artificial Sequence: Synthetic oligonucleotide
cuggaugucaagaguagag

SEQ ID NO: 718909 - RNA, 19 nt, Artificial Sequence
  Description of Artificial Sequence: Synthetic oligonucleotide
uccugagcaagcaaucggc

SEQ ID NO: 718910 - RNA, 19 nt, Artificial Sequence
  Description of Artificial Sequence: Synthetic oligonucleotide
aacaaucgggccugauagg

SEQ ID NO: 718911 - RNA, 19 nt, Artificial Sequence
  Description of Artificial Sequence: Synthetic oligonucleotide
aguugcaaaaggugcagug

SEQ ID NO: 718912 - RNA, 19 nt, Artificial Sequence
  Description of Artificial Sequence: Synthetic oligonucleotide
aggaaaaggcacccagccc

SEQ ID NO: 718913 - RNA, 19 nt, Artificial Sequence
  Description of Artificial Sequence: Synthetic oligonucleotide
uguucacguucauauauga

SEQ ID NO: 718914 - RNA, 19 nt, Artificial Sequence
  Description of Artificial Sequence: Synthetic oligonucleotide
acucguaguuccuaggugu

SEQ ID NO: 718915 - RNA, 19 nt, Artificial Sequence
  Description of Artificial Sequence: Synthetic oligonucleotide
caucgguaaggucaggccg

SEQ ID NO: 718916 - RNA, 19 nt, Artificial Sequence
  Description of Artificial Sequence: Synthetic oligonucleotide
aacucguaguuccuaggug

SEQ ID NO: 718917 - RNA, 19 nt, Artificial Sequence
  Description of Artificial Sequence: Synthetic oligonucleotide
aaagagcuggcauacgguu

SEQ ID NO: 718918 - RNA, 19 nt, Artificial Sequence
  Description of Artificial Sequence: Synthetic oligonucleotide
aaucggcgaagaaaggcac

SEQ ID NO: 718919 - RNA, 19 nt, Artificial Sequence
  Description of Artificial Sequence: Synthetic oligonucleotide
ugauggaagggcucuagac

SEQ ID NO: 718920 - RNA, 19 nt, Artificial Sequence
  Description of Artificial Sequence: Synthetic oligonucleotide
cuggcauacgguugaaggg

SEQ ID NO: 718921 - RNA, 19 nt, Artificial Sequence
  Description of Artificial Sequence: Synthetic oligonucleotide
uuguucacguucauauaug

SEQ ID NO: 718922 - RNA, 19 nt, Artificial Sequence
  Description of Artificial Sequence: Synthetic oligonucleotide
ggcgcuguaacucagucag

SEQ ID NO: 718923 - RNA, 19 nt, Artificial Sequence
  Description of Artificial Sequence: Synthetic oligonucleotide
ugagcaagcaaucggcgaa

SEQ ID NO: 718924 - RNA, 19 nt, Artificial Sequence
  Description of Artificial Sequence: Synthetic oligonucleotide
guuguugcggguucgguug

SEQ ID NO: 718925 - RNA, 19 nt, Artificial Sequence
  Description of Artificial Sequence: Synthetic oligonucleotide
cugaagauacauugccagg

SEQ ID NO: 718926 - RNA, 19 nt, Artificial Sequence
  Description of Artificial Sequence: Synthetic oligonucleotide
agauacucuuuguagugug

SEQ ID NO: 718927 - RNA, 19 nt, Artificial Sequence
  Description of Artificial Sequence: Synthetic oligonucleotide
agacugagaagaucucuuc

SEQ ID NO: 718928 - RNA, 19 nt, Artificial Sequence
  Description of Artificial Sequence: Synthetic oligonucleotide
gucaagaguagagaaguag

SEQ ID NO: 718929 - RNA, 19 nt, Artificial Sequence
  Description of Artificial Sequence: Synthetic oligonucleotide
agcacauacccagacagag

SEQ ID NO: 718930 - RNA, 19 nt, Artificial Sequence
  Description of Artificial Sequence: Synthetic oligonucleotide
ugacgaucaagccaggcuu

SEQ ID NO: 718931 - RNA, 19 nt, Artificial Sequence
  Description of Artificial Sequence: Synthetic oligonucleotide
ucugcucggccccaacugg

SEQ ID NO: 718932 - RNA, 19 nt, Artificial Sequence
  Description of Artificial Sequence: Synthetic oligonucleotide
auacgguugaagggcaugc

SEQ ID NO: 718933 - RNA, 19 nt, Artificial Sequence
  Description of Artificial Sequence: Synthetic oligonucleotide
uucuuaugaaacagggcau

SEQ ID NO: 718934 - RNA, 19 nt, Artificial Sequence
  Description of Artificial Sequence: Synthetic oligonucleotide
ucaucgguaaggucaggcc

SEQ ID NO: 718935 - RNA, 19 nt, Artificial Sequence
  Description of Artificial Sequence: Synthetic oligonucleotide
aagaacuuggggucucgca

SEQ ID NO: 718936 - RNA, 19 nt, Artificial Sequence
  Description of Artificial Sequence: Synthetic oligonucleotide
caaaagucgucugaccagg

SEQ ID NO: 718937 - RNA, 19 nt, Artificial Sequence
  Description of Artificial Sequence: Synthetic oligonucleotide
acaacucguaguuccuagg

SEQ ID NO: 718938 - RNA, 19 nt, Artificial Sequence
  Description of Artificial Sequence: Synthetic oligonucleotide
uacucugucccaaggguac

SEQ ID NO: 718939 - RNA, 19 nt, Artificial Sequence
  Description of Artificial Sequence: Synthetic oligonucleotide
cagucaggacauauggugc

SEQ ID NO: 718940 - RNA, 19 nt, Artificial Sequence
  Description of Artificial Sequence: Synthetic oligonucleotide
aaaagucgucugaccaggc

SEQ ID NO: 718941 - RNA, 19 nt, Artificial Sequence
  Description of Artificial Sequence: Synthetic oligonucleotide
ugauaaggcucacaagaua

SEQ ID NO: 718942 - RNA, 19 nt, Artificial Sequence
  Description of Artificial Sequence: Synthetic oligonucleotide
cuucuguaacaaucgggcc

SEQ ID NO: 718943 - RNA, 19 nt, Artificial Sequence
  Description of Artificial Sequence: Synthetic oligonucleotide
uggcauacgguugaagggc

SEQ ID NO: 718944 - RNA, 19 nt, Artificial Sequence
  Description of Artificial Sequence: Synthetic oligonucleotide
ucgguugcaaauagcacau

SEQ ID NO: 718945 - RNA, 19 nt, Artificial Sequence
  Description of Artificial Sequence: Synthetic oligonucleotide
uagugacccuucuuuaggc

SEQ ID NO: 718946 - RNA, 19 nt, Artificial Sequence
  Description of Artificial Sequence: Synthetic oligonucleotide
cacguucauauaugaagcc

SEQ ID NO: 718947 - RNA, 19 nt, Artificial Sequence
  Description of Artificial Sequence: Synthetic oligonucleotide
gacacuggggacaugucgc

SEQ ID NO: 718948 - RNA, 19 nt, Artificial Sequence
  Description of Artificial Sequence: Synthetic oligonucleotide
cuccguauuaaacaugaca

SEQ ID NO: 718949 - RNA, 19 nt, Artificial Sequence
  Description of Artificial Sequence: Synthetic oligonucleotide
cuggggaguguguagacug

SEQ ID NO: 718950 - RNA, 19 nt, Artificial Sequence
  Description of Artificial Sequence: Synthetic oligonucleotide
aagcacugaggcguugugg

SEQ ID NO: 718951 - RNA, 19 nt, Artificial Sequence
  Description of Artificial Sequence: Synthetic oligonucleotide
ucucgcaugagcacacccu

SEQ ID NO: 718952 - RNA, 19 nt, Artificial Sequence
  Description of Artificial Sequence: Synthetic oligonucleotide
agagcuggcauacgguuga

SEQ ID NO: 718953 - RNA, 19 nt, Artificial Sequence
  Description of Artificial Sequence: Synthetic oligonucleotide
uuaggcccgaagcccagag

SEQ ID NO: 718954 - RNA, 19 nt, Artificial Sequence
  Description of Artificial Sequence: Synthetic oligonucleotide
aagcugggcacaccauauc

SEQ ID NO: 718955 - RNA, 19 nt, Artificial Sequence
  Description of Artificial Sequence: Synthetic oligonucleotide
uagcuaaguaacugugugu

SEQ ID NO: 718956 - RNA, 19 nt, Artificial Sequence
  Description of Artificial Sequence: Synthetic oligonucleotide
cacacccucagucagcuuc

SEQ ID NO: 718957 - RNA, 19 nt, Artificial Sequence
  Description of Artificial Sequence: Synthetic oligonucleotide
guccagcuaacucagcuac

SEQ ID NO: 718958 - RNA, 19 nt, Artificial Sequence
  Description of Artificial Sequence: Synthetic oligonucleotide
cucagcuaccaucuccagg

SEQ ID NO: 718959 - RNA, 19 nt, Artificial Sequence
  Description of Artificial Sequence: Synthetic oligonucleotide
auaggcguugauggaaggg

SEQ ID NO: 718960 - RNA, 19 nt, Artificial Sequence
  Description of Artificial Sequence: Synthetic oligonucleotide
agcugggcacaccauaucu

SEQ ID NO: 718961 - RNA, 19 nt, Artificial Sequence
  Description of Artificial Sequence: Synthetic oligonucleotide
gauacucuuuguagugugc

SEQ ID NO: 718962 - RNA, 19 nt, Artificial Sequence
  Description of Artificial Sequence: Synthetic oligonucleotide
caucuuaucuuggcggugc

SEQ ID NO: 718963 - RNA, 19 nt, Artificial Sequence
  Description of Artificial Sequence: Synthetic oligonucleotide
aacucagucagagcccgug

SEQ ID NO: 718964 - RNA, 19 nt, Artificial Sequence
  Description of Artificial Sequence: Synthetic oligonucleotide
caccauaagaacuuggggu

SEQ ID NO: 718965 - RNA, 19 nt, Artificial Sequence
  Description of Artificial Sequence: Synthetic oligonucleotide
gacaugucgccuccaguug

SEQ ID NO: 718966 - RNA, 19 nt, Artificial Sequence
  Description of Artificial Sequence: Synthetic oligonucleotide
aguuccuaggugucucuug

SEQ ID NO: 718967 - RNA, 19 nt, Artificial Sequence
  Description of Artificial Sequence: Synthetic oligonucleotide
uauggugcacucacaggaa

SEQ ID NO: 718968 - RNA, 19 nt, Artificial Sequence
  Description of Artificial Sequence: Synthetic oligonucleotide
caaucggcgaagaaaggca

SEQ ID NO: 718969 - RNA, 19 nt, Artificial Sequence
  Description of Artificial Sequence: Synthetic oligonucleotide
cauacccagacagagccug

SEQ ID NO: 718970 - RNA, 19 nt, Artificial Sequence
  Description of Artificial Sequence: Synthetic oligonucleotide
aucgguaaggucaggccgg

SEQ ID NO: 718971 - RNA, 19 nt, Artificial Sequence
  Description of Artificial Sequence: Synthetic oligonucleotide
uucacccugcaauuagggu

SEQ ID NO: 718972 - RNA, 19 nt, Artificial Sequence
  Description of Artificial Sequence: Synthetic oligonucleotide
aguguguagacugccaaaa

SEQ ID NO: 718973 - RNA, 19 nt, Artificial Sequence
  Description of Artificial Sequence: Synthetic oligonucleotide
cauaggcguugauggaagg

SEQ ID NO: 718974 - RNA, 19 nt, Artificial Sequence
  Description of Artificial Sequence: Synthetic oligonucleotide
aaugccuguagugacccuu

SEQ ID NO: 718975 - RNA, 19 nt, Artificial Sequence
  Description of Artificial Sequence: Synthetic oligonucleotide
acguucauauaugaagcca

SEQ ID NO: 718976 - RNA, 19 nt, Artificial Sequence
  Description of Artificial Sequence: Synthetic oligonucleotide
gagacuggagcuccugcac

SEQ ID NO: 718977 - RNA, 19 nt, Artificial Sequence
  Description of Artificial Sequence: Synthetic oligonucleotide
uagacgcuggcgcuguaac

SEQ ID NO: 718978 - RNA, 19 nt, Artificial Sequence
  Description of Artificial Sequence: Synthetic oligonucleotide
guaacugugugucaucggu

SEQ ID NO: 718979 - RNA, 19 nt, Artificial Sequence
  Description of Artificial Sequence: Synthetic oligonucleotide
uacauguagguagcguaca

SEQ ID NO: 718980 - RNA, 19 nt, Artificial Sequence
  Description of Artificial Sequence: Synthetic oligonucleotide
guguguagacugccaaaag

SEQ ID NO: 718981 - RNA, 19 nt, Artificial Sequence
  Description of Artificial Sequence: Synthetic oligonucleotide
uguuguugcggguucgguu

SEQ ID NO: 718982 - RNA, 19 nt, Artificial Sequence
  Description of Artificial Sequence: Synthetic oligonucleotide
augagugggcauugauaag

SEQ ID NO: 718983 - RNA, 19 nt, Artificial Sequence
  Description of Artificial Sequence: Synthetic oligonucleotide
caaucccguagguagaaga

SEQ ID NO: 718984 - RNA, 19 nt, Artificial Sequence
  Description of Artificial Sequence: Synthetic oligonucleotide
gaagggcaugcuguacugg

SEQ ID NO: 718985 - RNA, 19 nt, Artificial Sequence
  Description of Artificial Sequence: Synthetic oligonucleotide
uagcacauacccagacaga

SEQ ID NO: 718986 - RNA, 19 nt, Artificial Sequence
  Description of Artificial Sequence: Synthetic oligonucleotide
uccagcuaacucagcuacc

SEQ ID NO: 718987 - RNA, 19 nt, Artificial Sequence
  Description of Artificial Sequence: Synthetic oligonucleotide
uacuucauacagcguugcu

SEQ ID NO: 718988 - RNA, 19 nt, Artificial Sequence
  Description of Artificial Sequence: Synthetic oligonucleotide
agggcauaugcaucuggcu

SEQ ID NO: 718989 - RNA, 19 nt, Artificial Sequence
  Description of Artificial Sequence: Synthetic oligonucleotide
ggucaggccggccacaagc

SEQ ID NO: 718990 - RNA, 19 nt, Artificial Sequence
  Description of Artificial Sequence: Synthetic oligonucleotide
gucaucgguaaggucaggc

SEQ ID NO: 718991 - RNA, 19 nt, Artificial Sequence
  Description of Artificial Sequence: Synthetic oligonucleotide
gguucgguugcaaauagca

SEQ ID NO: 718992 - RNA, 19 nt, Artificial Sequence
  Description of Artificial Sequence: Synthetic oligonucleotide
uggggaguguguagacugc

SEQ ID NO: 718993 - RNA, 19 nt, Artificial Sequence
  Description of Artificial Sequence: Synthetic oligonucleotide
gcauaugagaacuugcacu

SEQ ID NO: 718994 - RNA, 19 nt, Artificial Sequence
  Description of Artificial Sequence: Synthetic oligonucleotide
cagcuucuguaacaaucgg

SEQ ID NO: 718995 - RNA, 19 nt, Artificial Sequence
  Description of Artificial Sequence: Synthetic oligonucleotide
ugucaagaguagagaagua

SEQ ID NO: 718996 - RNA, 19 nt, Artificial Sequence
  Description of Artificial Sequence: Synthetic oligonucleotide
agcguugcuggguccaaug

SEQ ID NO: 718997 - RNA, 19 nt, Artificial Sequence
  Description of Artificial Sequence: Synthetic oligonucleotide
guacauguagguagcguac

SEQ ID NO: 718998 - RNA, 19 nt, Artificial Sequence
  Description of Artificial Sequence: Synthetic oligonucleotide
cacaccauaucugugaugu

SEQ ID NO: 718999 - RNA, 19 nt, Artificial Sequence
  Description of Artificial Sequence: Synthetic oligonucleotide
ugcggguucgguugcaaau

SEQ ID NO: 719000 - RNA, 19 nt, Artificial Sequence
  Description of Artificial Sequence: Synthetic oligonucleotide
cauaugagaacuugcacuu

SEQ ID NO: 719001 - RNA, 19 nt, Artificial Sequence
  Description of Artificial Sequence: Synthetic oligonucleotide
guaacaaucgggccugaua

SEQ ID NO: 719002 - RNA, 19 nt, Artificial Sequence
  Description of Artificial Sequence: Synthetic oligonucleotide
uagguagcguacaguggcu

SEQ ID NO: 719003 - RNA, 19 nt, Artificial Sequence
  Description of Artificial Sequence: Synthetic oligonucleotide
acggucguggcugugccuc

SEQ ID NO: 719004 - RNA, 19 nt, Artificial Sequence
  Description of Artificial Sequence: Synthetic oligonucleotide
acauuccugagcaagcaau

SEQ ID NO: 719005 - RNA, 19 nt, Artificial Sequence
  Description of Artificial Sequence: Synthetic oligonucleotide
gugcauaugagaacuugca

SEQ ID NO: 719006 - RNA, 19 nt, Artificial Sequence
  Description of Artificial Sequence: Synthetic oligonucleotide
ugaggcguuguggggaccc

SEQ ID NO: 719007 - RNA, 19 nt, Artificial Sequence
  Description of Artificial Sequence: Synthetic oligonucleotide
aucuuggcggugcuucucu

SEQ ID NO: 719008 - RNA, 19 nt, Artificial Sequence
  Description of Artificial Sequence: Synthetic oligonucleotide
gcaaucggcgaagaaaggc

SEQ ID NO: 719009 - RNA, 19 nt, Artificial Sequence
  Description of Artificial Sequence: Synthetic oligonucleotide
ccaaaagucgucugaccag

SEQ ID NO: 719010 - RNA, 19 nt, Artificial Sequence
  Description of Artificial Sequence: Synthetic oligonucleotide
ccgcaucuuaucuuggcgg

SEQ ID NO: 719011 - RNA, 19 nt, Artificial Sequence
  Description of Artificial Sequence: Synthetic oligonucleotide
aguuguucacguucauaua

SEQ ID NO: 719012 - RNA, 19 nt, Artificial Sequence
  Description of Artificial Sequence: Synthetic oligonucleotide
guaaggucaggccggccac

SEQ ID NO: 719013 - RNA, 19 nt, Artificial Sequence
  Description of Artificial Sequence: Synthetic oligonucleotide
uuguugcggguucgguugc

SEQ ID NO: 719014 - RNA, 19 nt, Artificial Sequence
  Description of Artificial Sequence: Synthetic oligonucleotide
gucucgcaugagcacaccc

SEQ ID NO: 719015 - RNA, 19 nt, Artificial Sequence
  Description of Artificial Sequence: Synthetic oligonucleotide
gguaaggucaggccggcca

SEQ ID NO: 719016 - RNA, 19 nt, Artificial Sequence
  Description of Artificial Sequence: Synthetic oligonucleotide
cucguaguuccuagguguc

SEQ ID NO: 719017 - RNA, 19 nt, Artificial Sequence
  Description of Artificial Sequence: Synthetic oligonucleotide
uggcgcuguaacucaguca

SEQ ID NO: 719018 - RNA, 19 nt, Artificial Sequence
  Description of Artificial Sequence: Synthetic oligonucleotide
caugacgaucaagccaggc

SEQ ID NO: 719019 - RNA, 19 nt, Artificial Sequence
  Description of Artificial Sequence: Synthetic oligonucleotide
cacugcaagggcaccucag

SEQ ID NO: 719020 - RNA, 19 nt, Artificial Sequence
  Description of Artificial Sequence: Synthetic oligonucleotide
gcacucacaggaaaucagg

SEQ ID NO: 719021 - RNA, 19 nt, Artificial Sequence
  Description of Artificial Sequence: Synthetic oligonucleotide
agcguacaguggcugucuc

SEQ ID NO: 719022 - RNA, 19 nt, Artificial Sequence
  Description of Artificial Sequence: Synthetic oligonucleotide
aggcuuuggaaguuccuuu

SEQ ID NO: 719023 - RNA, 19 nt, Artificial Sequence
  Description of Artificial Sequence: Synthetic oligonucleotide
cugcucggccccaacuggg

SEQ ID NO: 719024 - RNA, 19 nt, Artificial Sequence
  Description of Artificial Sequence: Synthetic oligonucleotide
gugucaucgguaaggucag

SEQ ID NO: 719025 - RNA, 19 nt, Artificial Sequence
  Description of Artificial Sequence: Synthetic oligonucleotide
ggugcguuuccaguucugg

SEQ ID NO: 719026 - RNA, 19 nt, Artificial Sequence
  Description of Artificial Sequence: Synthetic oligonucleotide
auggugcacucacaggaaa

SEQ ID NO: 719027 - RNA, 19 nt, Artificial Sequence
  Description of Artificial Sequence: Synthetic oligonucleotide
agcuggaugucaagaguag

SEQ ID NO: 719028 - RNA, 19 nt, Artificial Sequence
  Description of Artificial Sequence: Synthetic oligonucleotide
ccugagcaagcaaucggcg

SEQ ID NO: 719029 - RNA, 19 nt, Artificial Sequence
  Description of Artificial Sequence: Synthetic oligonucleotide
cugagcaagcaaucggcga

SEQ ID NO: 719030 - RNA, 19 nt, Artificial Sequence
  Description of Artificial Sequence: Synthetic oligonucleotide
cauacgguugaagggcaug

SEQ ID NO: 719031 - RNA, 19 nt, Artificial Sequence
  Description of Artificial Sequence: Synthetic oligonucleotide
ugggucauuggugcguuuc

SEQ ID NO: 719032 - RNA, 19 nt, Artificial Sequence
  Description of Artificial Sequence: Synthetic oligonucleotide
cucugaacgcagccacugc

SEQ ID NO: 719033 - RNA, 19 nt, Artificial Sequence
  Description of Artificial Sequence: Synthetic oligonucleotide
aucggcgaagaaaggcacg

SEQ ID NO: 719034 - RNA, 19 nt, Artificial Sequence
  Description of Artificial Sequence: Synthetic oligonucleotide
gcguuuccaguucuggaag

SEQ ID NO: 719035 - RNA, 19 nt, Artificial Sequence
  Description of Artificial Sequence: Synthetic oligonucleotide
cucggccccaacuggggag

SEQ ID NO: 719036 - RNA, 19 nt, Artificial Sequence
  Description of Artificial Sequence: Synthetic oligonucleotide
agcaaucggcgaagaaagg

SEQ ID NO: 719037 - RNA, 19 nt, Artificial Sequence
  Description of Artificial Sequence: Synthetic oligonucleotide
agucgucugaccaggcucu

SEQ ID NO: 719038 - RNA, 19 nt, Artificial Sequence
  Description of Artificial Sequence: Synthetic oligonucleotide
acgaucaagccaggcuuuc

SEQ ID NO: 719039 - RNA, 19 nt, Artificial Sequence
  Description of Artificial Sequence: Synthetic oligonucleotide
ccuaggugucucuugcagc

SEQ ID NO: 719040 - RNA, 19 nt, Artificial Sequence
  Description of Artificial Sequence: Synthetic oligonucleotide
ucgggccagugcauaugag

SEQ ID NO: 719041 - RNA, 19 nt, Artificial Sequence
  Description of Artificial Sequence: Synthetic oligonucleotide
uuccgggcuucuugacagg

SEQ ID NO: 719042 - RNA, 19 nt, Artificial Sequence
  Description of Artificial Sequence: Synthetic oligonucleotide
uccaaucccguagguagaa

SEQ ID NO: 719043 - RNA, 19 nt, Artificial Sequence
  Description of Artificial Sequence: Synthetic oligonucleotide
cuuuccgggcuucuugaca

SEQ ID NO: 719044 - RNA, 19 nt, Artificial Sequence
  Description of Artificial Sequence: Synthetic oligonucleotide
uggugcguuuccaguucug

SEQ ID NO: 719045 - RNA, 19 nt, Artificial Sequence
  Description of Artificial Sequence: Synthetic oligonucleotide
ggcuccguauuaaacauga

SEQ ID NO: 719046 - RNA, 19 nt, Artificial Sequence
  Description of Artificial Sequence: Synthetic oligonucleotide
cuggcgcuguaacucaguc

SEQ ID NO: 719047 - RNA, 19 nt, Artificial Sequence
  Description of Artificial Sequence: Synthetic oligonucleotide
cuccuucuggcacgcacac

SEQ ID NO: 719048 - RNA, 19 nt, Artificial Sequence
  Description of Artificial Sequence: Synthetic oligonucleotide
agacgcuggcgcuguaacu

SEQ ID NO: 719049 - RNA, 19 nt, Artificial Sequence
  Description of Artificial Sequence: Synthetic oligonucleotide
aggacauauggugcacuca

SEQ ID NO: 719050 - RNA, 19 nt, Artificial Sequence
  Description of Artificial Sequence: Synthetic oligonucleotide
ggccggcauagccaggugg

SEQ ID NO: 719051 - RNA, 19 nt, Artificial Sequence
  Description of Artificial Sequence: Synthetic oligonucleotide
ccauaggcguugauggaag

SEQ ID NO: 719052 - RNA, 19 nt, Artificial Sequence
  Description of Artificial Sequence: Synthetic oligonucleotide
ucguaguuccuaggugucu

SEQ ID NO: 719053 - RNA, 19 nt, Artificial Sequence
  Description of Artificial Sequence: Synthetic oligonucleotide
cuggggacaugucgccucc

SEQ ID NO: 719054 - RNA, 19 nt, Artificial Sequence
  Description of Artificial Sequence: Synthetic oligonucleotide
gacauauggugcacucaca

SEQ ID NO: 719055 - RNA, 19 nt, Artificial Sequence
  Description of Artificial Sequence: Synthetic oligonucleotide
cuaaguaacugugugucau

SEQ ID NO: 719056 - RNA, 19 nt, Artificial Sequence
  Description of Artificial Sequence: Synthetic oligonucleotide
cagguggaguuuccuugcc

SEQ ID NO: 719057 - RNA, 19 nt, Artificial Sequence
  Description of Artificial Sequence: Synthetic oligonucleotide
uagcguacaguggcugucu

SEQ ID NO: 719058 - RNA, 19 nt, Artificial Sequence
  Description of Artificial Sequence: Synthetic oligonucleotide
uaggcccgaagcccagaga

SEQ ID NO: 719059 - RNA, 19 nt, Artificial Sequence
  Description of Artificial Sequence: Synthetic oligonucleotide
uaggugucucuugcagcag

SEQ ID NO: 719060 - RNA, 19 nt, Artificial Sequence
  Description of Artificial Sequence: Synthetic oligonucleotide
gguggcgacacugugugca

SEQ ID NO: 719061 - RNA, 19 nt, Artificial Sequence
  Description of Artificial Sequence: Synthetic oligonucleotide
uggagccgaacagcagucc

SEQ ID NO: 719062 - RNA, 19 nt, Artificial Sequence
  Description of Artificial Sequence: Synthetic oligonucleotide
ugccuguagugacccuucu

SEQ ID NO: 719063 - RNA, 19 nt, Artificial Sequence
  Description of Artificial Sequence: Synthetic oligonucleotide
gggcacaccauaucuguga

SEQ ID NO: 719064 - RNA, 19 nt, Artificial Sequence
  Description of Artificial Sequence: Synthetic oligonucleotide
caaagagcuggcauacggu

SEQ ID NO: 719065 - RNA, 19 nt, Artificial Sequence
  Description of Artificial Sequence: Synthetic oligonucleotide
uguaacaaucgggccugau

SEQ ID NO: 719066 - RNA, 19 nt, Artificial Sequence
  Description of Artificial Sequence: Synthetic oligonucleotide
caaucgggccugauaggca

SEQ ID NO: 719067 - RNA, 19 nt, Artificial Sequence
  Description of Artificial Sequence: Synthetic oligonucleotide
guagcguacaguggcuguc

SEQ ID NO: 719068 - RNA, 19 nt, Artificial Sequence
  Description of Artificial Sequence: Synthetic oligonucleotide
ccguagguagaagaggcag

SEQ ID NO: 719069 - RNA, 19 nt, Artificial Sequence
  Description of Artificial Sequence: Synthetic oligonucleotide
guucacguucauauaugaa

SEQ ID NO: 719070 - RNA, 19 nt, Artificial Sequence
  Description of Artificial Sequence: Synthetic oligonucleotide
caggaaaucagggccugca

SEQ ID NO: 719071 - RNA, 19 nt, Artificial Sequence
  Description of Artificial Sequence: Synthetic oligonucleotide
acgcuggcgcuguaacuca

SEQ ID NO: 719072 - RNA, 19 nt, Artificial Sequence
  Description of Artificial Sequence: Synthetic oligonucleotide
uugcggguucgguugcaaa

SEQ ID NO: 719073 - RNA, 19 nt, Artificial Sequence
  Description of Artificial Sequence: Synthetic oligonucleotide
ucgguaaggucaggccggc

SEQ ID NO: 719074 - RNA, 19 nt, Artificial Sequence
  Description of Artificial Sequence: Synthetic oligonucleotide
cuggcggaagcagucagga

SEQ ID NO: 719075 - RNA, 19 nt, Artificial Sequence
  Description of Artificial Sequence: Synthetic oligonucleotide
caacucguaguuccuaggu

SEQ ID NO: 719076 - RNA, 19 nt, Artificial Sequence
  Description of Artificial Sequence: Synthetic oligonucleotide
cuaccacguccaacaacuc

SEQ ID NO: 719077 - RNA, 19 nt, Artificial Sequence
  Description of Artificial Sequence: Synthetic oligonucleotide
ggcagucaaugccauuuuc

SEQ ID NO: 719078 - RNA, 19 nt, Artificial Sequence
  Description of Artificial Sequence: Synthetic oligonucleotide
aggcguugauggaagggcu

SEQ ID NO: 719079 - RNA, 19 nt, Artificial Sequence
  Description of Artificial Sequence: Synthetic oligonucleotide
uggcggaagcagucaggac

SEQ ID NO: 719080 - RNA, 19 nt, Artificial Sequence
  Description of Artificial Sequence: Synthetic oligonucleotide
auguuguugcggguucggu

SEQ ID NO: 719081 - RNA, 19 nt, Artificial Sequence
  Description of Artificial Sequence: Synthetic oligonucleotide
ccgguugcggggcagggcc

SEQ ID NO: 719082 - RNA, 19 nt, Artificial Sequence
  Description of Artificial Sequence: Synthetic oligonucleotide
agccgaacagcaguccaau

SEQ ID NO: 719083 - RNA, 19 nt, Artificial Sequence
  Description of Artificial Sequence: Synthetic oligonucleotide
cugcauccgguugcggggc

SEQ ID NO: 719084 - RNA, 19 nt, Artificial Sequence
  Description of Artificial Sequence: Synthetic oligonucleotide
ggccagugcauaugagaac

SEQ ID NO: 719085 - RNA, 19 nt, Artificial Sequence
  Description of Artificial Sequence: Synthetic oligonucleotide
ugguggcgacacugugugc

SEQ ID NO: 719086 - RNA, 19 nt, Artificial Sequence
  Description of Artificial Sequence: Synthetic oligonucleotide
gccagugcauaugagaacu

SEQ ID NO: 719087 - RNA, 19 nt, Artificial Sequence
  Description of Artificial Sequence: Synthetic oligonucleotide
caagcugggcacaccauau

SEQ ID NO: 719088 - RNA, 19 nt, Artificial Sequence
  Description of Artificial Sequence: Synthetic oligonucleotide
agagcccgugccacaucac

SEQ ID NO: 719089 - RNA, 19 nt, Artificial Sequence
  Description of Artificial Sequence: Synthetic oligonucleotide
cccugaacccacugggaac

SEQ ID NO: 719090 - RNA, 19 nt, Artificial Sequence
  Description of Artificial Sequence: Synthetic oligonucleotide
gcguacaguggcugucucc

SEQ ID NO: 719091 - RNA, 19 nt, Artificial Sequence
  Description of Artificial Sequence: Synthetic oligonucleotide
uaguuccuaggugucucuu

SEQ ID NO: 719092 - RNA, 19 nt, Artificial Sequence
  Description of Artificial Sequence: Synthetic oligonucleotide
acauacccagacagagccu

SEQ ID NO: 719093 - RNA, 19 nt, Artificial Sequence
  Description of Artificial Sequence: Synthetic oligonucleotide
gcacauacccagacagagc

SEQ ID NO: 719094 - RNA, 19 nt, Artificial Sequence
  Description of Artificial Sequence: Synthetic oligonucleotide
ggcguuguggggacccagg

SEQ ID NO: 719095 - RNA, 19 nt, Artificial Sequence
  Description of Artificial Sequence: Synthetic oligonucleotide
gcccgugccacaucacccc

SEQ ID NO: 719096 - RNA, 19 nt, Artificial Sequence
  Description of Artificial Sequence: Synthetic oligonucleotide
aucgggccugauaggcagg

SEQ ID NO: 719097 - RNA, 19 nt, Artificial Sequence
  Description of Artificial Sequence: Synthetic oligonucleotide
ggggaguguguagacugcc

SEQ ID NO: 719098 - RNA, 19 nt, Artificial Sequence
  Description of Artificial Sequence: Synthetic oligonucleotide
gagccgaacagcaguccaa

SEQ ID NO: 719099 - RNA, 19 nt, Artificial Sequence
  Description of Artificial Sequence: Synthetic oligonucleotide
ucgucugaccaggcucugu

SEQ ID NO: 719100 - RNA, 19 nt, Artificial Sequence
  Description of Artificial Sequence: Synthetic oligonucleotide
gcguuguggggacccaggc

SEQ ID NO: 719101 - RNA, 19 nt, Artificial Sequence
  Description of Artificial Sequence: Synthetic oligonucleotide
gcacaccauaucugugaug

SEQ ID NO: 719102 - RNA, 19 nt, Artificial Sequence
  Description of Artificial Sequence: Synthetic oligonucleotide
aggcguuguggggacccag

SEQ ID NO: 719103 - RNA, 19 nt, Artificial Sequence
  Description of Artificial Sequence: Synthetic oligonucleotide
guccaaucccguagguaga

SEQ ID NO: 719104 - RNA, 19 nt, Artificial Sequence
  Description of Artificial Sequence: Synthetic oligonucleotide
cagcuaccaucuccaggac

SEQ ID NO: 719105 - RNA, 19 nt, Artificial Sequence
  Description of Artificial Sequence: Synthetic oligonucleotide
uggcgacacugugugcagu

SEQ ID NO: 719106 - RNA, 19 nt, Artificial Sequence
  Description of Artificial Sequence: Synthetic oligonucleotide
ucuagacgcuggcgcugua

SEQ ID NO: 719107 - RNA, 19 nt, Artificial Sequence
  Description of Artificial Sequence: Synthetic oligonucleotide
gcaucuuaucuuggcggug

SEQ ID NO: 719108 - RNA, 19 nt, Artificial Sequence
  Description of Artificial Sequence: Synthetic oligonucleotide
gcacggucguggcugugcc

SEQ ID NO: 719109 - RNA, 19 nt, Artificial Sequence
  Description of Artificial Sequence: Synthetic oligonucleotide
agcucugaacgcagccacu

SEQ ID NO: 719110 - RNA, 19 nt, Artificial Sequence
  Description of Artificial Sequence: Synthetic oligonucleotide
ggguucgguugcaaauagc

SEQ ID NO: 719111 - RNA, 19 nt, Artificial Sequence
  Description of Artificial Sequence: Synthetic oligonucleotide
ggcauugauaaggcucaca

SEQ ID NO: 719112 - RNA, 19 nt, Artificial Sequence
  Description of Artificial Sequence: Synthetic oligonucleotide
ggcauacgguugaagggca

SEQ ID NO: 719113 - RNA, 19 nt, Artificial Sequence
  Description of Artificial Sequence: Synthetic oligonucleotide
gguagcguacaguggcugu

SEQ ID NO: 719114 - RNA, 19 nt, Artificial Sequence
  Description of Artificial Sequence: Synthetic oligonucleotide
cucacuagcugaagacuuu

SEQ ID NO: 719115 - RNA, 19 nt, Artificial Sequence
  Description of Artificial Sequence: Synthetic oligonucleotide
ggccugauaggcagggaga

SEQ ID NO: 719116 - RNA, 19 nt, Artificial Sequence
  Description of Artificial Sequence: Synthetic oligonucleotide
cuagacgcuggcgcuguaa

SEQ ID NO: 719117 - RNA, 19 nt, Artificial Sequence
  Description of Artificial Sequence: Synthetic oligonucleotide
caacaacucguaguuccua

SEQ ID NO: 719118 - RNA, 19 nt, Artificial Sequence
  Description of Artificial Sequence: Synthetic oligonucleotide
cccgaagcccagagacugg

SEQ ID NO: 719119 - RNA, 19 nt, Artificial Sequence
  Description of Artificial Sequence: Synthetic oligonucleotide
aacccacugggaaccucuu

SEQ ID NO: 719120 - RNA, 19 nt, Artificial Sequence
  Description of Artificial Sequence: Synthetic oligonucleotide
agggacugcccgggucccg

SEQ ID NO: 719121 - RNA, 19 nt, Artificial Sequence
  Description of Artificial Sequence: Synthetic oligonucleotide
caucacucggcagccaccu

SEQ ID NO: 719122 - RNA, 19 nt, Artificial Sequence
  Description of Artificial Sequence: Synthetic oligonucleotide
cggguucgguugcaaauag

SEQ ID NO: 719123 - RNA, 19 nt, Artificial Sequence
  Description of Artificial Sequence: Synthetic oligonucleotide
uggggacaugucgccucca

SEQ ID NO: 719124 - RNA, 19 nt, Artificial Sequence
  Description of Artificial Sequence: Synthetic oligonucleotide
cguaguuccuaggugucuc

SEQ ID NO: 719125 - RNA, 19 nt, Artificial Sequence
  Description of Artificial Sequence: Synthetic oligonucleotide
gacgaucaagccaggcuuu

SEQ ID NO: 719126 - RNA, 19 nt, Artificial Sequence
  Description of Artificial Sequence: Synthetic oligonucleotide
ccaugacgaucaagccagg

SEQ ID NO: 719127 - RNA, 19 nt, Artificial Sequence
  Description of Artificial Sequence: Synthetic oligonucleotide
cucagugccugaguacugu

SEQ ID NO: 719128 - RNA, 19 nt, Artificial Sequence
  Description of Artificial Sequence: Synthetic oligonucleotide
ggcguugauggaagggcuc

SEQ ID NO: 719129 - RNA, 19 nt, Artificial Sequence
  Description of Artificial Sequence: Synthetic oligonucleotide
caguccaaucccguaggua

SEQ ID NO: 719130 - RNA, 19 nt, Artificial Sequence
  Description of Artificial Sequence: Synthetic oligonucleotide
cugaggcguuguggggacc

SEQ ID NO: 719131 - RNA, 19 nt, Artificial Sequence
  Description of Artificial Sequence: Synthetic oligonucleotide
gccggcauagccaggugga

SEQ ID NO: 719132 - RNA, 19 nt, Artificial Sequence
  Description of Artificial Sequence: Synthetic oligonucleotide
gucgucugaccaggcucug

SEQ ID NO: 719133 - RNA, 19 nt, Artificial Sequence
  Description of Artificial Sequence: Synthetic oligonucleotide
gggucucgcaugagcacac

SEQ ID NO: 719134 - RNA, 19 nt, Artificial Sequence
  Description of Artificial Sequence: Synthetic oligonucleotide
ggcccacccgcacacugca

SEQ ID NO: 719135 - RNA, 19 nt, Artificial Sequence
  Description of Artificial Sequence: Synthetic oligonucleotide
ggcgcuugcagcgcacaca

SEQ ID NO: 719136 - RNA, 19 nt, Artificial Sequence
  Description of Artificial Sequence: Synthetic oligonucleotide
guugcggguucgguugcaa

SEQ ID NO: 719137 - RNA, 19 nt, Artificial Sequence
  Description of Artificial Sequence: Synthetic oligonucleotide
gugcuggcggaagcaguca

SEQ ID NO: 719138 - RNA, 19 nt, Artificial Sequence
  Description of Artificial Sequence: Synthetic oligonucleotide
gccgaacagcaguccaauc

SEQ ID NO: 719139 - RNA, 19 nt, Artificial Sequence
  Description of Artificial Sequence: Synthetic oligonucleotide
gucaggccggccacaagcu

SEQ ID NO: 719140 - RNA, 19 nt, Artificial Sequence
  Description of Artificial Sequence: Synthetic oligonucleotide
gaggcguuguggggaccca

SEQ ID NO: 719141 - RNA, 19 nt, Artificial Sequence
  Description of Artificial Sequence: Synthetic oligonucleotide
uccaucugcuggggaugua

SEQ ID NO: 719142 - RNA, 19 nt, Artificial Sequence
  Description of Artificial Sequence: Synthetic oligonucleotide
ggucucgcaugagcacacc

SEQ ID NO: 719143 - RNA, 19 nt, Artificial Sequence
  Description of Artificial Sequence: Synthetic oligonucleotide
gcucacuagcugaagacuu

SEQ ID NO: 719144 - RNA, 19 nt, Artificial Sequence
  Description of Artificial Sequence: Synthetic oligonucleotide
gcuccguauuaaacaugac

SEQ ID NO: 719145 - RNA, 19 nt, Artificial Sequence
  Description of Artificial Sequence: Synthetic oligonucleotide
gacugcccgggucccggcu

SEQ ID NO: 719146 - RNA, 19 nt, Artificial Sequence
  Description of Artificial Sequence: Synthetic oligonucleotide
cuggcgcuugcagcgcaca

SEQ ID NO: 719147 - RNA, 19 nt, Artificial Sequence
  Description of Artificial Sequence: Synthetic oligonucleotide
gcggguucgguugcaaaua

SEQ ID NO: 719148 - RNA, 19 nt, Artificial Sequence
  Description of Artificial Sequence: Synthetic oligonucleotide
ccguauuaaacaugacauu

SEQ ID NO: 719149 - RNA, 19 nt, Artificial Sequence
  Description of Artificial Sequence: Synthetic oligonucleotide
cucuagacgcuggcgcugu

SEQ ID NO: 719150 - RNA, 19 nt, Artificial Sequence
  Description of Artificial Sequence: Synthetic oligonucleotide
ggacugcccgggucccggc

SEQ ID NO: 719151 - RNA, 19 nt, Artificial Sequence
  Description of Artificial Sequence: Synthetic oligonucleotide
ggguccaaugagugggcau

SEQ ID NO: 719152 - RNA, 19 nt, Artificial Sequence
  Description of Artificial Sequence: Synthetic oligonucleotide
gggaagcacugaggcguug

SEQ ID NO: 719153 - RNA, 19 nt, Artificial Sequence
  Description of Artificial Sequence: Synthetic oligonucleotide
gcggaagcagucaggacau

SEQ ID NO: 719154 - RNA, 19 nt, Artificial Sequence
  Description of Artificial Sequence: Synthetic oligonucleotide
cguccaacaacucguaguu

SEQ ID NO: 719155 - RNA, 19 nt, Artificial Sequence
  Description of Artificial Sequence: Synthetic oligonucleotide
cagcuaacucagcuaccau

SEQ ID NO: 719156 - RNA, 19 nt, Artificial Sequence
  Description of Artificial Sequence: Synthetic oligonucleotide
ccggcauagccagguggag

SEQ ID NO: 719157 - RNA, 19 nt, Artificial Sequence
  Description of Artificial Sequence: Synthetic oligonucleotide
gguugcggggcagggccca

SEQ ID NO: 719158 - RNA, 19 nt, Artificial Sequence
  Description of Artificial Sequence: Synthetic oligonucleotide
ccucgggccagugcauaug

SEQ ID NO: 719159 - RNA, 19 nt, Artificial Sequence
  Description of Artificial Sequence: Synthetic oligonucleotide
gcacgcacacacuccucua

SEQ ID NO: 719160 - RNA, 19 nt, Artificial Sequence
  Description of Artificial Sequence: Synthetic oligonucleotide
cgcaucuuaucuuggcggu

SEQ ID NO: 719161 - RNA, 19 nt, Artificial Sequence
  Description of Artificial Sequence: Synthetic oligonucleotide
cacggucguggcugugccu

SEQ ID NO: 719162 - RNA, 19 nt, Artificial Sequence
  Description of Artificial Sequence: Synthetic oligonucleotide
gccuguagugacccuucuu

SEQ ID NO: 719163 - RNA, 19 nt, Artificial Sequence
  Description of Artificial Sequence: Synthetic oligonucleotide
ccgggcuucuugacaggaa

SEQ ID NO: 719164 - RNA, 19 nt, Artificial Sequence
  Description of Artificial Sequence: Synthetic oligonucleotide
ccucuacuucauacagcgu

SEQ ID NO: 719165 - RNA, 19 nt, Artificial Sequence
  Description of Artificial Sequence: Synthetic oligonucleotide
gcauacgguugaagggcau

SEQ ID NO: 719166 - RNA, 19 nt, Artificial Sequence
  Description of Artificial Sequence: Synthetic oligonucleotide
ccggcuggaggcuccguau

SEQ ID NO: 719167 - RNA, 19 nt, Artificial Sequence
  Description of Artificial Sequence: Synthetic oligonucleotide
cgguaaggucaggccggcc

SEQ ID NO: 719168 - RNA, 19 nt, Artificial Sequence
  Description of Artificial Sequence: Synthetic oligonucleotide
ccacccgcacacugcacau

SEQ ID NO: 719169 - RNA, 19 nt, Artificial Sequence
  Description of Artificial Sequence: Synthetic oligonucleotide
cagcguugcuggguccaau

SEQ ID NO: 719170 - RNA, 19 nt, Artificial Sequence
  Description of Artificial Sequence: Synthetic oligonucleotide
cacccgcacacugcacauu

SEQ ID NO: 719171 - RNA, 19 nt, Artificial Sequence
  Description of Artificial Sequence: Synthetic oligonucleotide
uguaauguuguacaaaccc

SEQ ID NO: 719172 - RNA, 19 nt, Artificial Sequence
  Description of Artificial Sequence: Synthetic oligonucleotide
  modified_base (9)..(9): a, c, u, g, unknown or other
aauguaacngggaaguugc

SEQ ID NO: 719173 - RNA, 19 nt, Artificial Sequence
  Description of Artificial Sequence: Synthetic oligonucleotide
aacacuguaaguauguugg

SEQ ID NO: 719174 - RNA, 19 nt, Artificial Sequence
  Description of Artificial Sequence: Synthetic oligonucleotide
aauaugcauaaccuauggc

SEQ ID NO: 719175 - RNA, 19 nt, Artificial Sequence
  Description of Artificial Sequence: Synthetic oligonucleotide
acuuguauagcucuguuuc

SEQ ID NO: 719176 - RNA, 19 nt, Artificial Sequence
  Description of Artificial Sequence: Synthetic oligonucleotide
aaaagcaaugacuuggcug

SEQ ID NO: 719177 - RNA, 19 nt, Artificial Sequence
  Description of Artificial Sequence: Synthetic oligonucleotide
ugucucaacaguaagauaa

SEQ ID NO: 719178 - RNA, 19 nt, Artificial Sequence
  Description of Artificial Sequence: Synthetic oligonucleotide
uccugugucaauuagacca

SEQ ID NO: 719179 - RNA, 19 nt, Artificial Sequence
  Description of Artificial Sequence: Synthetic oligonucleotide
aacccuagagcacacaggg

SEQ ID NO: 719180 - RNA, 19 nt, Artificial Sequence
  Description of Artificial Sequence: Synthetic oligonucleotide
aauuagaccagugacagcu

SEQ ID NO: 719181 - RNA, 19 nt, Artificial Sequence
  Description of Artificial Sequence: Synthetic oligonucleotide
gauuugacaacagucaagg

SEQ ID NO: 719182 - RNA, 19 nt, Artificial Sequence
  Description of Artificial Sequence: Synthetic oligonucleotide
uuguacaaacccaauaugc

SEQ ID NO: 719183 - RNA, 19 nt, Artificial Sequence
  Description of Artificial Sequence: Synthetic oligonucleotide
auaugcauaaccuauggcu

SEQ ID NO: 719184 - RNA, 19 nt, Artificial Sequence
  Description of Artificial Sequence: Synthetic oligonucleotide
ugcaauaagagcuugucca

SEQ ID NO: 719185 - RNA, 19 nt, Artificial Sequence
  Description of Artificial Sequence: Synthetic oligonucleotide
aacucgagacagcagagac

SEQ ID NO: 719186 - RNA, 19 nt, Artificial Sequence
  Description of Artificial Sequence: Synthetic oligonucleotide
aaaucuacccucuuuggcu

SEQ ID NO: 719187 - RNA, 19 nt, Artificial Sequence
  Description of Artificial Sequence: Synthetic oligonucleotide
uguaacacaucucugcagc

SEQ ID NO: 719188 - RNA, 19 nt, Artificial Sequence
  Description of Artificial Sequence: Synthetic oligonucleotide
  modified_base (16)..(16): a, c, u, g, unknown or other
uccguagaauguaacnggg

SEQ ID NO: 719189 - RNA, 19 nt, Artificial Sequence
  Description of Artificial Sequence: Synthetic oligonucleotide
auugaguugggauagccag

SEQ ID NO: 719190 - RNA, 19 nt, Artificial Sequence
  Description of Artificial Sequence: Synthetic oligonucleotide
ucaauuagaccagugacag

SEQ ID NO: 719191 - RNA, 19 nt, Artificial Sequence
  Description of Artificial Sequence: Synthetic oligonucleotide
cuugcaagaacacagccag

SEQ ID NO: 719192 - RNA, 19 nt, Artificial Sequence
  Description of Artificial Sequence: Synthetic oligonucleotide
uguuguacaaacccaauau

SEQ ID NO: 719193 - RNA, 19 nt, Artificial Sequence
  Description of Artificial Sequence: Synthetic oligonucleotide
uguacaaacccaauaugca

SEQ ID NO: 719194 - RNA, 19 nt, Artificial Sequence
  Description of Artificial Sequence: Synthetic oligonucleotide
cuuuuagucauauucacca

SEQ ID NO: 719195 - RNA, 19 nt, Artificial Sequence
  Description of Artificial Sequence: Synthetic oligonucleotide
accaacgugcaguugauac

SEQ ID NO: 719196 - RNA, 19 nt, Artificial Sequence
  Description of Artificial Sequence: Synthetic oligonucleotide
acaguaagauaacugcugg

SEQ ID NO: 719197 - RNA, 19 nt, Artificial Sequence
  Description of Artificial Sequence: Synthetic oligonucleotide
cucacaaccaugauuacug

SEQ ID NO: 719198 - RNA, 19 nt, Artificial Sequence
  Description of Artificial Sequence: Synthetic oligonucleotide
guagaggugucuuaagagg

SEQ ID NO: 719199 - RNA, 19 nt, Artificial Sequence
  Description of Artificial Sequence: Synthetic oligonucleotide
  modified_base (17)..(17): a, c, u, g, unknown or other
uuccguagaauguaacngg

SEQ ID NO: 719200 - RNA, 19 nt, Artificial Sequence
  Description of Artificial Sequence: Synthetic oligonucleotide
acuguaaguauguuggucu

SEQ ID NO: 719201 - RNA, 19 nt, Artificial Sequence
  Description of Artificial Sequence: Synthetic oligonucleotide
uucugauuugacaacaguc

SEQ ID NO: 719202 - RNA, 19 nt, Artificial Sequence
  Description of Artificial Sequence: Synthetic oligonucleotide
uguaacacuguaaguaugu

SEQ ID NO: 719203 - RNA, 19 nt, Artificial Sequence
  Description of Artificial Sequence: Synthetic oligonucleotide
agcuuuuagucauauucac

SEQ ID NO: 719204 - RNA, 19 nt, Artificial Sequence
  Description of Artificial Sequence: Synthetic oligonucleotide
uaaauagcccaacauugug

SEQ ID NO: 719205 - RNA, 19 nt, Artificial Sequence
  Description of Artificial Sequence: Synthetic oligonucleotide
uuaaauucuuugugcacag

SEQ ID NO: 719206 - RNA, 19 nt, Artificial Sequence
  Description of Artificial Sequence: Synthetic oligonucleotide
auuagccaugcacacuucc

SEQ ID NO: 719207 - RNA, 19 nt, Artificial Sequence
  Description of Artificial Sequence: Synthetic oligonucleotide
ugucauaacuuccaacugu

SEQ ID NO: 719208 - RNA, 19 nt, Artificial Sequence
  Description of Artificial Sequence: Synthetic oligonucleotide
uaugcauaaccuauggcuc

SEQ ID NO: 719209 - RNA, 19 nt, Artificial Sequence
  Description of Artificial Sequence: Synthetic oligonucleotide
uagucauauucaccaaugg

SEQ ID NO: 719210 - RNA, 19 nt, Artificial Sequence
  Description of Artificial Sequence: Synthetic oligonucleotide
accagugacagcuugugag

SEQ ID NO: 719211 - RNA, 19 nt, Artificial Sequence
  Description of Artificial Sequence: Synthetic oligonucleotide
uacaauugaguugggauag

SEQ ID NO: 719212 - RNA, 19 nt, Artificial Sequence
  Description of Artificial Sequence: Synthetic oligonucleotide
gaaacauuagccaugcaca

SEQ ID NO: 719213 - RNA, 19 nt, Artificial Sequence
  Description of Artificial Sequence: Synthetic oligonucleotide
ucuaguacagcaucuggga

SEQ ID NO: 719214 - RNA, 19 nt, Artificial Sequence
  Description of Artificial Sequence: Synthetic oligonucleotide
augcauaaccuauggcucc

SEQ ID NO: 719215 - RNA, 19 nt, Artificial Sequence
  Description of Artificial Sequence: Synthetic oligonucleotide
ugauuuacacugaacuugu

SEQ ID NO: 719216 - RNA, 19 nt, Artificial Sequence
  Description of Artificial Sequence: Synthetic oligonucleotide
ucagauauccuuccugugu

SEQ ID NO: 719217 - RNA, 19 nt, Artificial Sequence
  Description of Artificial Sequence: Synthetic oligonucleotide
agcuugcaagaacacagcc

SEQ ID NO: 719218 - RNA, 19 nt, Artificial Sequence
  Description of Artificial Sequence: Synthetic oligonucleotide
uaagauaacugcuggcuga

SEQ ID NO: 719219 - RNA, 19 nt, Artificial Sequence
  Description of Artificial Sequence: Synthetic oligonucleotide
ugcaguguacaauaaugcc

SEQ ID NO: 719220 - RNA, 19 nt, Artificial Sequence
  Description of Artificial Sequence: Synthetic oligonucleotide
uuuuaaauucuuugugcac

SEQ ID NO: 719221 - RNA, 19 nt, Artificial Sequence
  Description of Artificial Sequence: Synthetic oligonucleotide
uggagcguaauucugaauu

SEQ ID NO: 719222 - RNA, 19 nt, Artificial Sequence
  Description of Artificial Sequence: Synthetic oligonucleotide
aaucuacccucuuuggcug

SEQ ID NO: 719223 - RNA, 19 nt, Artificial Sequence
  Description of Artificial Sequence: Synthetic oligonucleotide
aguaagaaggcaucuguga

SEQ ID NO: 719224 - RNA, 19 nt, Artificial Sequence
  Description of Artificial Sequence: Synthetic oligonucleotide
uuugaaaagcaaugacuug

SEQ ID NO: 719225 - RNA, 19 nt, Artificial Sequence
  Description of Artificial Sequence: Synthetic oligonucleotide
agcagugcgagcuucaaca

SEQ ID NO: 719226 - RNA, 19 nt, Artificial Sequence
  Description of Artificial Sequence: Synthetic oligonucleotide
uugacuuaaaggcuucgac

SEQ ID NO: 719227 - RNA, 19 nt, Artificial Sequence
  Description of Artificial Sequence: Synthetic oligonucleotide
agucaaggcucucucauag

SEQ ID NO: 719228 - RNA, 19 nt, Artificial Sequence
  Description of Artificial Sequence: Synthetic oligonucleotide
aaaccuacgauguccucca

SEQ ID NO: 719229 - RNA, 19 nt, Artificial Sequence
  Description of Artificial Sequence: Synthetic oligonucleotide
auugcaguguacaauaaug

SEQ ID NO: 719230 - RNA, 19 nt, Artificial Sequence
  Description of Artificial Sequence: Synthetic oligonucleotide
uuaagcgcugcuuuugaca

SEQ ID NO: 719231 - RNA, 19 nt, Artificial Sequence
  Description of Artificial Sequence: Synthetic oligonucleotide
aagaacacagccagaggac

SEQ ID NO: 719232 - RNA, 19 nt, Artificial Sequence
  Description of Artificial Sequence: Synthetic oligonucleotide
  modified_base (19)..(19): a, c, u, g, unknown or other
ucuuccguagaauguaacn

SEQ ID NO: 719233 - RNA, 19 nt, Artificial Sequence
  Description of Artificial Sequence: Synthetic oligonucleotide
  modified_base (7)..(7): a, c, u, g, unknown or other
uguaacngggaaguugccc

SEQ ID NO: 719234 - RNA, 19 nt, Artificial Sequence
  Description of Artificial Sequence: Synthetic oligonucleotide
agugcgagcuucaacagac

SEQ ID NO: 719235 - RNA, 19 nt, Artificial Sequence
  Description of Artificial Sequence: Synthetic oligonucleotide
uguagauguucauuuaaau

SEQ ID NO: 719236 - RNA, 19 nt, Artificial Sequence
  Description of Artificial Sequence: Synthetic oligonucleotide
aauugcccuguugggaugc

SEQ ID NO: 719237 - RNA, 19 nt, Artificial Sequence
  Description of Artificial Sequence: Synthetic oligonucleotide
aguaagauaacugcuggcu

SEQ ID NO: 719238 - RNA, 19 nt, Artificial Sequence
  Description of Artificial Sequence: Synthetic oligonucleotide
ucuuaacuguagauguuca

SEQ ID NO: 719239 - RNA, 19 nt, Artificial Sequence
  Description of Artificial Sequence: Synthetic oligonucleotide
uguuuguauucuguuauug

SEQ ID NO: 719240 - RNA, 19 nt, Artificial Sequence
  Description of Artificial Sequence: Synthetic oligonucleotide
ugucuuuguccuuaaguga

SEQ ID NO: 719241 - RNA, 19 nt, Artificial Sequence
  Description of Artificial Sequence: Synthetic oligonucleotide
agucauauucaccaaugga

SEQ ID NO: 719242 - RNA, 19 nt, Artificial Sequence
  Description of Artificial Sequence: Synthetic oligonucleotide
aggggcguugacuuaaagg

SEQ ID NO: 719243 - RNA, 19 nt, Artificial Sequence
  Description of Artificial Sequence: Synthetic oligonucleotide
aacagcguucaucuggaga

SEQ ID NO: 719244 - RNA, 19 nt, Artificial Sequence
  Description of Artificial Sequence: Synthetic oligonucleotide
ggggcguugacuuaaaggc

SEQ ID NO: 719245 - RNA, 19 nt, Artificial Sequence
  Description of Artificial Sequence: Synthetic oligonucleotide
uauggcuccuucaguaugc

SEQ ID NO: 719246 - RNA, 19 nt, Artificial Sequence
  Description of Artificial Sequence: Synthetic oligonucleotide
uuuacacagaacacccugu

SEQ ID NO: 719247 - RNA, 19 nt, Artificial Sequence
  Description of Artificial Sequence: Synthetic oligonucleotide
acagcguucaucuggagaa

SEQ ID NO: 719248 - RNA, 19 nt, Artificial Sequence
  Description of Artificial Sequence: Synthetic oligonucleotide
guuguacaaacccaauaug

SEQ ID NO: 719249 - RNA, 19 nt, Artificial Sequence
  Description of Artificial Sequence: Synthetic oligonucleotide
gauacaauugaguugggau

SEQ ID NO: 719250 - RNA, 19 nt, Artificial Sequence
  Description of Artificial Sequence: Synthetic oligonucleotide
uacaaacccaauaugcaua

SEQ ID NO: 719251 - RNA, 19 nt, Artificial Sequence
  Description of Artificial Sequence: Synthetic oligonucleotide
uguuguacuuguauagcuc

SEQ ID NO: 719252 - RNA, 19 nt, Artificial Sequence
  Description of Artificial Sequence: Synthetic oligonucleotide
  modified_base (18)..(18): a, c, u, g, unknown or other
cuuccguagaauguaacng

SEQ ID NO: 719253 - RNA, 19 nt, Artificial Sequence
  Description of Artificial Sequence: Synthetic oligonucleotide
uguagugugccugaagaga

SEQ ID NO: 719254 - RNA, 19 nt, Artificial Sequence
  Description of Artificial Sequence: Synthetic oligonucleotide
ugcuguaccacuucccaug

SEQ ID NO: 719255 - RNA, 19 nt, Artificial Sequence
  Description of Artificial Sequence: Synthetic oligonucleotide
guugaauuguaacaaagcu

SEQ ID NO: 719256 - RNA, 19 nt, Artificial Sequence
  Description of Artificial Sequence: Synthetic oligonucleotide
auuaagcgcugcuuuugac

SEQ ID NO: 719257 - RNA, 19 nt, Artificial Sequence
  Description of Artificial Sequence: Synthetic oligonucleotide
ugacaguguagcauccugc

SEQ ID NO: 719258 - RNA, 19 nt, Artificial Sequence
  Description of Artificial Sequence: Synthetic oligonucleotide
gaagcaaggaugaccagug

SEQ ID NO: 719259 - RNA, 19 nt, Artificial Sequence
  Description of Artificial Sequence: Synthetic oligonucleotide
aaauagcccaacauuguga

SEQ ID NO: 719260 - RNA, 19 nt, Artificial Sequence
  Description of Artificial Sequence: Synthetic oligonucleotide
ugugucaauuagaccagug

SEQ ID NO: 719261 - RNA, 19 nt, Artificial Sequence
  Description of Artificial Sequence: Synthetic oligonucleotide
uaagagguaccaacgugca

SEQ ID NO: 719262 - RNA, 19 nt, Artificial Sequence
  Description of Artificial Sequence: Synthetic oligonucleotide
aguguacugagcaacaacu

SEQ ID NO: 719263 - RNA, 19 nt, Artificial Sequence
  Description of Artificial Sequence: Synthetic oligonucleotide
acuguaacacuguaaguau

SEQ ID NO: 719264 - RNA, 19 nt, Artificial Sequence
  Description of Artificial Sequence: Synthetic oligonucleotide
cuucuaguacagcaucugg

SEQ ID NO: 719265 - RNA, 19 nt, Artificial Sequence
  Description of Artificial Sequence: Synthetic oligonucleotide
auacaauugaguugggaua

SEQ ID NO: 719266 - RNA, 19 nt, Artificial Sequence
  Description of Artificial Sequence: Synthetic oligonucleotide
auggccaacugguuuauug

SEQ ID NO: 719267 - RNA, 19 nt, Artificial Sequence
  Description of Artificial Sequence: Synthetic oligonucleotide
uugcgguugaauuguaaca

SEQ ID NO: 719268 - RNA, 19 nt, Artificial Sequence
  Description of Artificial Sequence: Synthetic oligonucleotide
guaagauaacugcuggcug

SEQ ID NO: 719269 - RNA, 19 nt, Artificial Sequence
  Description of Artificial Sequence: Synthetic oligonucleotide
uuagccaugcacacuucca

SEQ ID NO: 719270 - RNA, 19 nt, Artificial Sequence
  Description of Artificial Sequence: Synthetic oligonucleotide
acauuagccaugcacacuu

SEQ ID NO: 719271 - RNA, 19 nt, Artificial Sequence
  Description of Artificial Sequence: Synthetic oligonucleotide
uccaugauuugcauccaga

SEQ ID NO: 719272 - RNA, 19 nt, Artificial Sequence
  Description of Artificial Sequence: Synthetic oligonucleotide
agcccaacauugugaaagc

SEQ ID NO: 719273 - RNA, 19 nt, Artificial Sequence
  Description of Artificial Sequence: Synthetic oligonucleotide
gagcugucaagacaugagc

SEQ ID NO: 719274 - RNA, 19 nt, Artificial Sequence
  Description of Artificial Sequence: Synthetic oligonucleotide
  modified_base (13)..(13): a, c, u, g, unknown or other
guagaauguaacngggaag

SEQ ID NO: 719275 - RNA, 19 nt, Artificial Sequence
  Description of Artificial Sequence: Synthetic oligonucleotide
uucgacagcuuuuagucau

SEQ ID NO: 719276 - RNA, 19 nt, Artificial Sequence
  Description of Artificial Sequence: Synthetic oligonucleotide
agugauuuacacugaacuu

SEQ ID NO: 719277 - RNA, 19 nt, Artificial Sequence
  Description of Artificial Sequence: Synthetic oligonucleotide
aguauguuggucuuccgua

SEQ ID NO: 719278 - RNA, 19 nt, Artificial Sequence
  Description of Artificial Sequence: Synthetic oligonucleotide
uacacagaacacccugugc

SEQ ID NO: 719279 - RNA, 19 nt, Artificial Sequence
  Description of Artificial Sequence: Synthetic oligonucleotide
uauugcaguguacaauaau

SEQ ID NO: 719280 - RNA, 19 nt, Artificial Sequence
  Description of Artificial Sequence: Synthetic oligonucleotide
uguauagcucuguuucucu

SEQ ID NO: 719281 - RNA, 19 nt, Artificial Sequence
  Description of Artificial Sequence: Synthetic oligonucleotide
guagauguucauuuaaaua

SEQ ID NO: 719282 - RNA, 19 nt, Artificial Sequence
  Description of Artificial Sequence: Synthetic oligonucleotide
guauguuggucuuccguag

SEQ ID NO: 719283 - RNA, 19 nt, Artificial Sequence
  Description of Artificial Sequence: Synthetic oligonucleotide
caaugccaaaccuacgaug

SEQ ID NO: 719284 - RNA, 19 nt, Artificial Sequence
  Description of Artificial Sequence: Synthetic oligonucleotide
gagaccacuuuucaaguga

SEQ ID NO: 719285 - RNA, 19 nt, Artificial Sequence
  Description of Artificial Sequence: Synthetic oligonucleotide
ugaagcaaggaugaccagu

SEQ ID NO: 719286 - RNA, 19 nt, Artificial Sequence
  Description of Artificial Sequence: Synthetic oligonucleotide
caaaccuacgauguccucc

SEQ ID NO: 719287 - RNA, 19 nt, Artificial Sequence
  Description of Artificial Sequence: Synthetic oligonucleotide
aaguaagaaggcaucugug

SEQ ID NO: 719288 - RNA, 19 nt, Artificial Sequence
  Description of Artificial Sequence: Synthetic oligonucleotide
uuggcuguauccauuuguc

SEQ ID NO: 719289 - RNA, 19 nt, Artificial Sequence
  Description of Artificial Sequence: Synthetic oligonucleotide
accaacacgucaaugagcu

SEQ ID NO: 719290 - RNA, 19 nt, Artificial Sequence
  Description of Artificial Sequence: Synthetic oligonucleotide
uucaguaugcaugcugagc

SEQ ID NO: 719291 - RNA, 19 nt, Artificial Sequence
  Description of Artificial Sequence: Synthetic oligonucleotide
ugcagcacccaucauuccu

SEQ ID NO: 719292 - RNA, 19 nt, Artificial Sequence
  Description of Artificial Sequence: Synthetic oligonucleotide
uaugguugguuccuuuaaa

SEQ ID NO: 719293 - RNA, 19 nt, Artificial Sequence
  Description of Artificial Sequence: Synthetic oligonucleotide
cacagaucgcugaaguaag

SEQ ID NO: 719294 - RNA, 19 nt, Artificial Sequence
  Description of Artificial Sequence: Synthetic oligonucleotide
acgucaaugagcucuuggu

SEQ ID NO: 719295 - RNA, 19 nt, Artificial Sequence
  Description of Artificial Sequence: Synthetic oligonucleotide
uuccguugaguguacugag

SEQ ID NO: 719296 - RNA, 19 nt, Artificial Sequence
  Description of Artificial Sequence: Synthetic oligonucleotide
auaaccuauggcuccuuca

SEQ ID NO: 719297 - RNA, 19 nt, Artificial Sequence
  Description of Artificial Sequence: Synthetic oligonucleotide
ugccaaaccuacgaugucc

SEQ ID NO: 719298 - RNA, 19 nt, Artificial Sequence
  Description of Artificial Sequence: Synthetic oligonucleotide
uuguucugauuugacaaca

SEQ ID NO: 719299 - RNA, 19 nt, Artificial Sequence
  Description of Artificial Sequence: Synthetic oligonucleotide
guugaguguacugagcaac

SEQ ID NO: 719300 - RNA, 19 nt, Artificial Sequence
  Description of Artificial Sequence: Synthetic oligonucleotide
uuugcacugccacgcugcg

SEQ ID NO: 719301 - RNA, 19 nt, Artificial Sequence
  Description of Artificial Sequence: Synthetic oligonucleotide
cuaguacagcaucugggag

SEQ ID NO: 719302 - RNA, 19 nt, Artificial Sequence
  Description of Artificial Sequence: Synthetic oligonucleotide
ucauuaagcgcugcuuuug

SEQ ID NO: 719303 - RNA, 19 nt, Artificial Sequence
  Description of Artificial Sequence: Synthetic oligonucleotide
ugcgguugaauuguaacaa

SEQ ID NO: 719304 - RNA, 19 nt, Artificial Sequence
  Description of Artificial Sequence: Synthetic oligonucleotide
ucuuguaauguuguacaaa

SEQ ID NO: 719305 - RNA, 19 nt, Artificial Sequence
  Description of Artificial Sequence: Synthetic oligonucleotide
uuccaugauuugcauccag

SEQ ID NO: 719306 - RNA, 19 nt, Artificial Sequence
  Description of Artificial Sequence: Synthetic oligonucleotide
aaugccaaugccaaaccua

SEQ ID NO: 719307 - RNA, 19 nt, Artificial Sequence
  Description of Artificial Sequence: Synthetic oligonucleotide
uucagauauccuuccugug

SEQ ID NO: 719308 - RNA, 19 nt, Artificial Sequence
  Description of Artificial Sequence: Synthetic oligonucleotide
aaguugcccuuugguaugc

SEQ ID NO: 719309 - RNA, 19 nt, Artificial Sequence
  Description of Artificial Sequence: Synthetic oligonucleotide
acagacucgagagcuuccc

SEQ ID NO: 719310 - RNA, 19 nt, Artificial Sequence
  Description of Artificial Sequence: Synthetic oligonucleotide
gacaguguagcauccugca

SEQ ID NO: 719311 - RNA, 19 nt, Artificial Sequence
  Description of Artificial Sequence: Synthetic oligonucleotide
gcuucgacagcuuuuaguc

SEQ ID NO: 719312 - RNA, 19 nt, Artificial Sequence
  Description of Artificial Sequence: Synthetic oligonucleotide
ucucacuguaacacuguaa

SEQ ID NO: 719313 - RNA, 19 nt, Artificial Sequence
  Description of Artificial Sequence: Synthetic oligonucleotide
gguugaauuguaacaaagc

SEQ ID NO: 719314 - RNA, 19 nt, Artificial Sequence
  Description of Artificial Sequence: Synthetic oligonucleotide
uuauugcaguguacaauaa

SEQ ID NO: 719315 - RNA, 19 nt, Artificial Sequence
  Description of Artificial Sequence: Synthetic oligonucleotide
cuguaacacuguaaguaug

SEQ ID NO: 719316 - RNA, 19 nt, Artificial Sequence
  Description of Artificial Sequence: Synthetic oligonucleotide
caacccuagagcacacagg

SEQ ID NO: 719317 - RNA, 19 nt, Artificial Sequence
  Description of Artificial Sequence: Synthetic oligonucleotide
gugcaguugauacaauuga

SEQ ID NO: 719318 - RNA, 19 nt, Artificial Sequence
  Description of Artificial Sequence: Synthetic oligonucleotide
cauauucaccaauggaaca

SEQ ID NO: 719319 - RNA, 19 nt, Artificial Sequence
  Description of Artificial Sequence: Synthetic oligonucleotide
cuguaacacaucucugcag

SEQ ID NO: 719320 - RNA, 19 nt, Artificial Sequence
  Description of Artificial Sequence: Synthetic oligonucleotide
gguaccaacgugcaguuga

SEQ ID NO: 719321 - RNA, 19 nt, Artificial Sequence
  Description of Artificial Sequence: Synthetic oligonucleotide
ggugucauaacuuccaacu

SEQ ID NO: 719322 - RNA, 19 nt, Artificial Sequence
  Description of Artificial Sequence: Synthetic oligonucleotide
caauugaguugggauagcc

SEQ ID NO: 719323 - RNA, 19 nt, Artificial Sequence
  Description of Artificial Sequence: Synthetic oligonucleotide
cacgucaaugagcucuugg

SEQ ID NO: 719324 - RNA, 19 nt, Artificial Sequence
  Description of Artificial Sequence: Synthetic oligonucleotide
ucuuugcacugccacgcug

SEQ ID NO: 719325 - RNA, 19 nt, Artificial Sequence
  Description of Artificial Sequence: Synthetic oligonucleotide
auuccguugaguguacuga

SEQ ID NO: 719326 - RNA, 19 nt, Artificial Sequence
  Description of Artificial Sequence: Synthetic oligonucleotide
accggcgacagcuccuccc

SEQ ID NO: 719327 - RNA, 19 nt, Artificial Sequence
  Description of Artificial Sequence: Synthetic oligonucleotide
uccguugaguguacugagc

SEQ ID NO: 719328 - RNA, 19 nt, Artificial Sequence
  Description of Artificial Sequence: Synthetic oligonucleotide
ucgagagcuucccacucca

SEQ ID NO: 719329 - RNA, 19 nt, Artificial Sequence
  Description of Artificial Sequence: Synthetic oligonucleotide
uauugccagagcugucaag

SEQ ID NO: 719330 - RNA, 19 nt, Artificial Sequence
  Description of Artificial Sequence: Synthetic oligonucleotide
uggcuguauccauuugucc

SEQ ID NO: 719331 - RNA, 19 nt, Artificial Sequence
  Description of Artificial Sequence: Synthetic oligonucleotide
acucgagacagcagagacc

SEQ ID NO: 719332 - RNA, 19 nt, Artificial Sequence
  Description of Artificial Sequence: Synthetic oligonucleotide
acuggaaacauuagccaug

SEQ ID NO: 719333 - RNA, 19 nt, Artificial Sequence
  Description of Artificial Sequence: Synthetic oligonucleotide
gucaauuagaccagugaca

SEQ ID NO: 719334 - RNA, 19 nt, Artificial Sequence
  Description of Artificial Sequence: Synthetic oligonucleotide
gagcaacaacucgagacag

SEQ ID NO: 719335 - RNA, 19 nt, Artificial Sequence
  Description of Artificial Sequence: Synthetic oligonucleotide
guuguacuuguauagcucu

SEQ ID NO: 719336 - RNA, 19 nt, Artificial Sequence
  Description of Artificial Sequence: Synthetic oligonucleotide
  modified_base (6)..(6): a, c, u, g, unknown or other
guaacngggaaguugcccu

SEQ ID NO: 719337 - RNA, 19 nt, Artificial Sequence
  Description of Artificial Sequence: Synthetic oligonucleotide
cauuccguugaguguacug

SEQ ID NO: 719338 - RNA, 19 nt, Artificial Sequence
  Description of Artificial Sequence: Synthetic oligonucleotide
gcucuccuuauauaguucc

SEQ ID NO: 719339 - RNA, 19 nt, Artificial Sequence
  Description of Artificial Sequence: Synthetic oligonucleotide
gauuacugugaugacagcu

SEQ ID NO: 719340 - RNA, 19 nt, Artificial Sequence
  Description of Artificial Sequence: Synthetic oligonucleotide
agcagugccaagugcaaau

SEQ ID NO: 719341 - RNA, 19 nt, Artificial Sequence
  Description of Artificial Sequence: Synthetic oligonucleotide
uggugucauaacuuccaac

SEQ ID NO: 719342 - RNA, 19 nt, Artificial Sequence
  Description of Artificial Sequence: Synthetic oligonucleotide
acaauugaguugggauagc

SEQ ID NO: 719343 - RNA, 19 nt, Artificial Sequence
  Description of Artificial Sequence: Synthetic oligonucleotide
ggaacagagguggaauugg

SEQ ID NO: 719344 - RNA, 19 nt, Artificial Sequence
  Description of Artificial Sequence: Synthetic oligonucleotide
cagcuugugagagagacca

SEQ ID NO: 719345 - RNA, 19 nt, Artificial Sequence
  Description of Artificial Sequence: Synthetic oligonucleotide
accuauggcuccuucagua

SEQ ID NO: 719346 - RNA, 19 nt, Artificial Sequence
  Description of Artificial Sequence: Synthetic oligonucleotide
aaggggcguugacuuaaag

SEQ ID NO: 719347 - RNA, 19 nt, Artificial Sequence
  Description of Artificial Sequence: Synthetic oligonucleotide
ugguuguaauuuugcaaaa

SEQ ID NO: 719348 - RNA, 19 nt, Artificial Sequence
  Description of Artificial Sequence: Synthetic oligonucleotide
guugaccaaagccaguuua

SEQ ID NO: 719349 - RNA, 19 nt, Artificial Sequence
  Description of Artificial Sequence: Synthetic oligonucleotide
gucauaacuuccaacuguc

SEQ ID NO: 719350 - RNA, 19 nt, Artificial Sequence
  Description of Artificial Sequence: Synthetic oligonucleotide
acacaucucugcagcaccc

SEQ ID NO: 719351 - RNA, 19 nt, Artificial Sequence
  Description of Artificial Sequence: Synthetic oligonucleotide
guagacucuuucuguaaca

SEQ ID NO: 719352 - RNA, 19 nt, Artificial Sequence
  Description of Artificial Sequence: Synthetic oligonucleotide
uaacacaucucugcagcac

SEQ ID NO: 719353 - RNA, 19 nt, Artificial Sequence
  Description of Artificial Sequence: Synthetic oligonucleotide
cucccuuugcauuccguug

SEQ ID NO: 719354 - RNA, 19 nt, Artificial Sequence
  Description of Artificial Sequence: Synthetic oligonucleotide
agcugucaagacaugagcu

SEQ ID NO: 719355 - RNA, 19 nt, Artificial Sequence
  Description of Artificial Sequence: Synthetic oligonucleotide
ucuugcgguugaauuguaa

SEQ ID NO: 719356 - RNA, 19 nt, Artificial Sequence
  Description of Artificial Sequence: Synthetic oligonucleotide
uuguugaccaaagccaguu

SEQ ID NO: 719357 - RNA, 19 nt, Artificial Sequence
  Description of Artificial Sequence: Synthetic oligonucleotide
agcgcugcuuuugacagug

SEQ ID NO: 719358 - RNA, 19 nt, Artificial Sequence
  Description of Artificial Sequence: Synthetic oligonucleotide
aagauaacugcuggcugau

SEQ ID NO: 719359 - RNA, 19 nt, Artificial Sequence
  Description of Artificial Sequence: Synthetic oligonucleotide
gucaaggcucucucauagg

SEQ ID NO: 719360 - RNA, 19 nt, Artificial Sequence
  Description of Artificial Sequence: Synthetic oligonucleotide
caauuagaccagugacagc

SEQ ID NO: 719361 - RNA, 19 nt, Artificial Sequence
  Description of Artificial Sequence: Synthetic oligonucleotide
ccaauggaacacaacaauc

SEQ ID NO: 719362 - RNA, 19 nt, Artificial Sequence
  Description of Artificial Sequence: Synthetic oligonucleotide
ugcucuccuuauauaguuc

SEQ ID NO: 719363 - RNA, 19 nt, Artificial Sequence
  Description of Artificial Sequence: Synthetic oligonucleotide
ucaaggggcguugacuuaa

SEQ ID NO: 719364 - RNA, 19 nt, Artificial Sequence
  Description of Artificial Sequence: Synthetic oligonucleotide
agcagugauuuacacugaa

SEQ ID NO: 719365 - RNA, 19 nt, Artificial Sequence
  Description of Artificial Sequence: Synthetic oligonucleotide
aagcaaggaugaccaguga

SEQ ID NO: 719366 - RNA, 19 nt, Artificial Sequence
  Description of Artificial Sequence: Synthetic oligonucleotide
uguaaguauguuggucuuc

SEQ ID NO: 719367 - RNA, 19 nt, Artificial Sequence
  Description of Artificial Sequence: Synthetic oligonucleotide
ugcccuguugggaugccac

SEQ ID NO: 719368 - RNA, 19 nt, Artificial Sequence
  Description of Artificial Sequence: Synthetic oligonucleotide
uguuauugccagagcuguc

SEQ ID NO: 719369 - RNA, 19 nt, Artificial Sequence
  Description of Artificial Sequence: Synthetic oligonucleotide
agggucaucuggagaaagg

SEQ ID NO: 719370 - RNA, 19 nt, Artificial Sequence
  Description of Artificial Sequence: Synthetic oligonucleotide
cguagaggugucuuaagag

SEQ ID NO: 719371 - RNA, 19 nt, Artificial Sequence
  Description of Artificial Sequence: Synthetic oligonucleotide
caugagcuuugucuuguuc

SEQ ID NO: 719372 - RNA, 19 nt, Artificial Sequence
  Description of Artificial Sequence: Synthetic oligonucleotide
  modified_base (8)..(8): a, c, u, g, unknown or other
auguaacngggaaguugcc

SEQ ID NO: 719373 - RNA, 19 nt, Artificial Sequence
  Description of Artificial Sequence: Synthetic oligonucleotide
ccaauaugcauaaccuaug

SEQ ID NO: 719374 - RNA, 19 nt, Artificial Sequence
  Description of Artificial Sequence: Synthetic oligonucleotide
ucgcugaaguaagaaggca

SEQ ID NO: 719375 - RNA, 19 nt, Artificial Sequence
  Description of Artificial Sequence: Synthetic oligonucleotide
guaacacaucucugcagca

SEQ ID NO: 719376 - RNA, 19 nt, Artificial Sequence
  Description of Artificial Sequence: Synthetic oligonucleotide
cccaacauugugaaagcug

SEQ ID NO: 719377 - RNA, 19 nt, Artificial Sequence
  Description of Artificial Sequence: Synthetic oligonucleotide
ugggacugauacaccugug

SEQ ID NO: 719378 - RNA, 19 nt, Artificial Sequence
  Description of Artificial Sequence: Synthetic oligonucleotide
  modified_base (3)..(3): a, c, u, g, unknown or other
acngggaaguugcccuuug

SEQ ID NO: 719379 - RNA, 19 nt, Artificial Sequence
  Description of Artificial Sequence: Synthetic oligonucleotide
gcuuuuagucauauucacc

SEQ ID NO: 719380 - RNA, 19 nt, Artificial Sequence
  Description of Artificial Sequence: Synthetic oligonucleotide
uggucuuccguagaaugua

SEQ ID NO: 719381 - RNA, 19 nt, Artificial Sequence
  Description of Artificial Sequence: Synthetic oligonucleotide
cauaaccuauggcuccuuc

SEQ ID NO: 719382 - RNA, 19 nt, Artificial Sequence
  Description of Artificial Sequence: Synthetic oligonucleotide
uuaaaggcuucgacagcuu

SEQ ID NO: 719383 - RNA, 19 nt, Artificial Sequence
  Description of Artificial Sequence: Synthetic oligonucleotide
gcugauacacuacuuucuc

SEQ ID NO: 719384 - RNA, 19 nt, Artificial Sequence
  Description of Artificial Sequence: Synthetic oligonucleotide
gccaaugccaaaccuacga

SEQ ID NO: 719385 - RNA, 19 nt, Artificial Sequence
  Description of Artificial Sequence: Synthetic oligonucleotide
ugcauaaccuauggcuccu

SEQ ID NO: 719386 - RNA, 19 nt, Artificial Sequence
  Description of Artificial Sequence: Synthetic oligonucleotide
  modified_base (2)..(2): a, c, u, g, unknown or other
cngggaaguugcccuuugg

SEQ ID NO: 719387 - RNA, 19 nt, Artificial Sequence
  Description of Artificial Sequence: Synthetic oligonucleotide
cauuaagcgcugcuuuuga

SEQ ID NO: 719388 - RNA, 19 nt, Artificial Sequence
  Description of Artificial Sequence: Synthetic oligonucleotide
uguugggaugccacuugua

SEQ ID NO: 719389 - RNA, 19 nt, Artificial Sequence
  Description of Artificial Sequence: Synthetic oligonucleotide
ggagcguaauucugaauuc

SEQ ID NO: 719390 - RNA, 19 nt, Artificial Sequence
  Description of Artificial Sequence: Synthetic oligonucleotide
caacacgucaaugagcucu

SEQ ID NO: 719391 - RNA, 19 nt, Artificial Sequence
  Description of Artificial Sequence: Synthetic oligonucleotide
guugacuuaaaggcuucga

SEQ ID NO: 719392 - RNA, 19 nt, Artificial Sequence
  Description of Artificial Sequence: Synthetic oligonucleotide
agcguucaucuggagaaug

SEQ ID NO: 719393 - RNA, 19 nt, Artificial Sequence
  Description of Artificial Sequence: Synthetic oligonucleotide
uaugcaugcugagcucugu

SEQ ID NO: 719394 - RNA, 19 nt, Artificial Sequence
  Description of Artificial Sequence: Synthetic oligonucleotide
gauauccuuccugugucaa

SEQ ID NO: 719395 - RNA, 19 nt, Artificial Sequence
  Description of Artificial Sequence: Synthetic oligonucleotide
ugcauuccguugaguguac

SEQ ID NO: 719396 - RNA, 19 nt, Artificial Sequence
  Description of Artificial Sequence: Synthetic oligonucleotide
uguauccauuuguccuugu

SEQ ID NO: 719397 - RNA, 19 nt, Artificial Sequence
  Description of Artificial Sequence: Synthetic oligonucleotide
gaacagagguggaauugga

SEQ ID NO: 719398 - RNA, 19 nt, Artificial Sequence
  Description of Artificial Sequence: Synthetic oligonucleotide
gcgagcuucaacagacucg

SEQ ID NO: 719399 - RNA, 19 nt, Artificial Sequence
  Description of Artificial Sequence: Synthetic oligonucleotide
cgguugaauuguaacaaag

SEQ ID NO: 719400 - RNA, 19 nt, Artificial Sequence
  Description of Artificial Sequence: Synthetic oligonucleotide
cugaacuugucucaacagu

SEQ ID NO: 719401 - RNA, 19 nt, Artificial Sequence
  Description of Artificial Sequence: Synthetic oligonucleotide
cuuccaacugucucugcaa

SEQ ID NO: 719402 - RNA, 19 nt, Artificial Sequence
  Description of Artificial Sequence: Synthetic oligonucleotide
ggcuguauccauuuguccu

SEQ ID NO: 719403 - RNA, 19 nt, Artificial Sequence
  Description of Artificial Sequence: Synthetic oligonucleotide
cuaugguugguuccuuuaa

SEQ ID NO: 719404 - RNA, 19 nt, Artificial Sequence
  Description of Artificial Sequence: Synthetic oligonucleotide
  modified_base (5)..(5): a, c, u, g, unknown or other
uaacngggaaguugcccuu

SEQ ID NO: 719405 - RNA, 19 nt, Artificial Sequence
  Description of Artificial Sequence: Synthetic oligonucleotide
ggugucuuaagagguacca

SEQ ID NO: 719406 - RNA, 19 nt, Artificial Sequence
  Description of Artificial Sequence: Synthetic oligonucleotide
aagcgcugcuuuugacagu

SEQ ID NO: 719407 - RNA, 19 nt, Artificial Sequence
  Description of Artificial Sequence: Synthetic oligonucleotide
  modified_base (14)..(14): a, c, u, g, unknown or other
cguagaauguaacngggaa

SEQ ID NO: 719408 - RNA, 19 nt, Artificial Sequence
  Description of Artificial Sequence: Synthetic oligonucleotide
uggcguagaggugucuuaa

SEQ ID NO: 719409 - RNA, 19 nt, Artificial Sequence
  Description of Artificial Sequence: Synthetic oligonucleotide
uuccucaaggggcguugac

SEQ ID NO: 719410 - RNA, 19 nt, Artificial Sequence
  Description of Artificial Sequence: Synthetic oligonucleotide
agauaacugcuggcugauc

SEQ ID NO: 719411 - RNA, 19 nt, Artificial Sequence
  Description of Artificial Sequence: Synthetic oligonucleotide
cugguggccucuugaagca

SEQ ID NO: 719412 - RNA, 19 nt, Artificial Sequence
  Description of Artificial Sequence: Synthetic oligonucleotide
ucgacagcuuuuagucaua

SEQ ID NO: 719413 - RNA, 19 nt, Artificial Sequence
  Description of Artificial Sequence: Synthetic oligonucleotide
cauuagccaugcacacuuc

SEQ ID NO: 719414 - RNA, 19 nt, Artificial Sequence
  Description of Artificial Sequence: Synthetic oligonucleotide
cuacgauguccuccaguuc

SEQ ID NO: 719415 - RNA, 19 nt, Artificial Sequence
  Description of Artificial Sequence: Synthetic oligonucleotide
auccauggugucauaacuu

SEQ ID NO: 719416 - RNA, 19 nt, Artificial Sequence
  Description of Artificial Sequence: Synthetic oligonucleotide
gaauuggacaucacuguuu

SEQ ID NO: 719417 - RNA, 19 nt, Artificial Sequence
  Description of Artificial Sequence: Synthetic oligonucleotide
aucuacccucuuuggcuga

SEQ ID NO: 719418 - RNA, 19 nt, Artificial Sequence
  Description of Artificial Sequence: Synthetic oligonucleotide
  modified_base (11)..(11): a, c, u, g, unknown or other
agaauguaacngggaaguu

SEQ ID NO: 719419 - RNA, 19 nt, Artificial Sequence
  Description of Artificial Sequence: Synthetic oligonucleotide
ccaaugucuuuugucacug

SEQ ID NO: 719420 - RNA, 19 nt, Artificial Sequence
  Description of Artificial Sequence: Synthetic oligonucleotide
aggcuucgacagcuuuuag

SEQ ID NO: 719421 - RNA, 19 nt, Artificial Sequence
  Description of Artificial Sequence: Synthetic oligonucleotide
ggaugaccagugaucacug

SEQ ID NO: 719422 - RNA, 19 nt, Artificial Sequence
  Description of Artificial Sequence: Synthetic oligonucleotide
gcguagaggugucuuaaga

SEQ ID NO: 719423 - RNA, 19 nt, Artificial Sequence
  Description of Artificial Sequence: Synthetic oligonucleotide
guagugugccugaagagau

SEQ ID NO: 719424 - RNA, 19 nt, Artificial Sequence
  Description of Artificial Sequence: Synthetic oligonucleotide
uuuuggcguagaggugucu

SEQ ID NO: 719425 - RNA, 19 nt, Artificial Sequence
  Description of Artificial Sequence: Synthetic oligonucleotide
auucaccaauggaacacaa

SEQ ID NO: 719426 - RNA, 19 nt, Artificial Sequence
  Description of Artificial Sequence: Synthetic oligonucleotide
ggcguagaggugucuuaag

SEQ ID NO: 719427 - RNA, 19 nt, Artificial Sequence
  Description of Artificial Sequence: Synthetic oligonucleotide
cacccaucauuccuuggga

SEQ ID NO: 719428 - RNA, 19 nt, Artificial Sequence
  Description of Artificial Sequence: Synthetic oligonucleotide
ggagugcacagaucgcuga

SEQ ID NO: 719429 - RNA, 19 nt, Artificial Sequence
  Description of Artificial Sequence: Synthetic oligonucleotide
ugccaacccuagagcacac

SEQ ID NO: 719430 - RNA, 19 nt, Artificial Sequence
  Description of Artificial Sequence: Synthetic oligonucleotide
uccuuaagugaggcagaaa

SEQ ID NO: 719431 - RNA, 19 nt, Artificial Sequence
  Description of Artificial Sequence: Synthetic oligonucleotide
ccaugauuugcauccagaa

SEQ ID NO: 719432 - RNA, 19 nt, Artificial Sequence
  Description of Artificial Sequence: Synthetic oligonucleotide
agcuugugagagagaccac

SEQ ID NO: 719433 - RNA, 19 nt, Artificial Sequence
  Description of Artificial Sequence: Synthetic oligonucleotide
cucgcugguggccucuuga

SEQ ID NO: 719434 - RNA, 19 nt, Artificial Sequence
  Description of Artificial Sequence: Synthetic oligonucleotide
gguggccucuugaagcaag

SEQ ID NO: 719435 - RNA, 19 nt, Artificial Sequence
  Description of Artificial Sequence: Synthetic oligonucleotide
cugauacaccugugccaac

SEQ ID NO: 719436 - RNA, 19 nt, Artificial Sequence
  Description of Artificial Sequence: Synthetic oligonucleotide
caagugacugguuguaauu

SEQ ID NO: 719437 - RNA, 19 nt, Artificial Sequence
  Description of Artificial Sequence: Synthetic oligonucleotide
cugaaguaagaaggcaucu

SEQ ID NO: 719438 - RNA, 19 nt, Artificial Sequence
  Description of Artificial Sequence: Synthetic oligonucleotide
ccguugaguguacugagca

SEQ ID NO: 719439 - RNA, 19 nt, Artificial Sequence
  Description of Artificial Sequence: Synthetic oligonucleotide
gugucuuaagagguaccaa

SEQ ID NO: 719440 - RNA, 19 nt, Artificial Sequence
  Description of Artificial Sequence: Synthetic oligonucleotide
gugacuccagcagugauuu

SEQ ID NO: 719441 - RNA, 19 nt, Artificial Sequence
  Description of Artificial Sequence: Synthetic oligonucleotide
cacgcugcggcccuggagu

SEQ ID NO: 719442 - RNA, 19 nt, Artificial Sequence
  Description of Artificial Sequence: Synthetic oligonucleotide
ugguaugccucugcugcuu

SEQ ID NO: 719443 - RNA, 19 nt, Artificial Sequence
  Description of Artificial Sequence: Synthetic oligonucleotide
ggcuucgacagcuuuuagu

SEQ ID NO: 719444 - RNA, 19 nt, Artificial Sequence
  Description of Artificial Sequence: Synthetic oligonucleotide
ccaacgugcaguugauaca

SEQ ID NO: 719445 - RNA, 19 nt, Artificial Sequence
  Description of Artificial Sequence: Synthetic oligonucleotide
caucagcccagcccagaca

SEQ ID NO: 719446 - RNA, 19 nt, Artificial Sequence
  Description of Artificial Sequence: Synthetic oligonucleotide
aacgugcaguugauacaau

SEQ ID NO: 719447 - RNA, 19 nt, Artificial Sequence
  Description of Artificial Sequence: Synthetic oligonucleotide
ggaauuggacaucacuguu

SEQ ID NO: 719448 - RNA, 19 nt, Artificial Sequence
  Description of Artificial Sequence: Synthetic oligonucleotide
gagguaccaacgugcaguu

SEQ ID NO: 719449 - RNA, 19 nt, Artificial Sequence
  Description of Artificial Sequence: Synthetic oligonucleotide
gguaugccucugcugcuuc

SEQ ID NO: 719450 - RNA, 19 nt, Artificial Sequence
  Description of Artificial Sequence: Synthetic oligonucleotide
cagcagugauuuacacuga

SEQ ID NO: 719451 - RNA, 19 nt, Artificial Sequence
  Description of Artificial Sequence: Synthetic oligonucleotide
cagacucgagagcuuccca

SEQ ID NO: 719452 - RNA, 19 nt, Artificial Sequence
  Description of Artificial Sequence: Synthetic oligonucleotide
guacuuguauagcucuguu

SEQ ID NO: 719453 - RNA, 19 nt, Artificial Sequence
  Description of Artificial Sequence: Synthetic oligonucleotide
cucugcaauaagagcuugu

SEQ ID NO: 719454 - RNA, 19 nt, Artificial Sequence
  Description of Artificial Sequence: Synthetic oligonucleotide
ugccacgcugcggcccugg

SEQ ID NO: 719455 - RNA, 19 nt, Artificial Sequence
  Description of Artificial Sequence: Synthetic oligonucleotide
guauccauuuguccuuguu

SEQ ID NO: 719456 - RNA, 19 nt, Artificial Sequence
  Description of Artificial Sequence: Synthetic oligonucleotide
gcgguugaauuguaacaaa

SEQ ID NO: 719457 - RNA, 19 nt, Artificial Sequence
  Description of Artificial Sequence: Synthetic oligonucleotide
cccuuugguaugccucugc

SEQ ID NO: 719458 - RNA, 19 nt, Artificial Sequence
  Description of Artificial Sequence: Synthetic oligonucleotide
cagucaaggcucucucaua

SEQ ID NO: 719459 - RNA, 19 nt, Artificial Sequence
  Description of Artificial Sequence: Synthetic oligonucleotide
cuguaaguauguuggucuu

SEQ ID NO: 719460 - RNA, 19 nt, Artificial Sequence
  Description of Artificial Sequence: Synthetic oligonucleotide
acacaacaaucugcccagu

SEQ ID NO: 719461 - RNA, 19 nt, Artificial Sequence
  Description of Artificial Sequence: Synthetic oligonucleotide
gguuguaauuuugcaaaau

SEQ ID NO: 719462 - RNA, 19 nt, Artificial Sequence
  Description of Artificial Sequence: Synthetic oligonucleotide
gcgacagcuccucccuuug

SEQ ID NO: 719463 - RNA, 19 nt, Artificial Sequence
  Description of Artificial Sequence: Synthetic oligonucleotide
agguaccaacgugcaguug

SEQ ID NO: 719464 - RNA, 19 nt, Artificial Sequence
  Description of Artificial Sequence: Synthetic oligonucleotide
gucaagacaugagcuuugu

SEQ ID NO: 719465 - RNA, 19 nt, Artificial Sequence
  Description of Artificial Sequence: Synthetic oligonucleotide
ccuugggacugauacaccu

SEQ ID NO: 719466 - RNA, 19 nt, Artificial Sequence
  Description of Artificial Sequence: Synthetic oligonucleotide
  modified_base (15)..(15): a, c, u, g, unknown or other
ccguagaauguaacnggga

SEQ ID NO: 719467 - RNA, 19 nt, Artificial Sequence
  Description of Artificial Sequence: Synthetic oligonucleotide
guuccucaaggggcguuga

SEQ ID NO: 719468 - RNA, 19 nt, Artificial Sequence
  Description of Artificial Sequence: Synthetic oligonucleotide
ugguggccucuugaagcaa

SEQ ID NO: 719469 - RNA, 19 nt, Artificial Sequence
  Description of Artificial Sequence: Synthetic oligonucleotide
guaacacuguaaguauguu

SEQ ID NO: 719470 - RNA, 19 nt, Artificial Sequence
  Description of Artificial Sequence: Synthetic oligonucleotide
cucaaggggcguugacuua

SEQ ID NO: 719471 - RNA, 19 nt, Artificial Sequence
  Description of Artificial Sequence: Synthetic oligonucleotide
ggucuuccguagaauguaa

SEQ ID NO: 719472 - RNA, 19 nt, Artificial Sequence
  Description of Artificial Sequence: Synthetic oligonucleotide
caaggggcguugacuuaaa

SEQ ID NO: 719473 - RNA, 19 nt, Artificial Sequence
  Description of Artificial Sequence: Synthetic oligonucleotide
gucuuugcacugccacgcu

SEQ ID NO: 719474 - RNA, 19 nt, Artificial Sequence
  Description of Artificial Sequence: Synthetic oligonucleotide
ccaaaccuacgauguccuc

SEQ ID NO: 719475 - RNA, 19 nt, Artificial Sequence
  Description of Artificial Sequence: Synthetic oligonucleotide
caccggcgacagcuccucc

SEQ ID NO: 719476 - RNA, 19 nt, Artificial Sequence
  Description of Artificial Sequence: Synthetic oligonucleotide
gcguugacuuaaaggcuuc

SEQ ID NO: 719477 - RNA, 19 nt, Artificial Sequence
  Description of Artificial Sequence: Synthetic oligonucleotide
gccaaaccuacgauguccu

SEQ ID NO: 719478 - RNA, 19 nt, Artificial Sequence
  Description of Artificial Sequence: Synthetic oligonucleotide
guaccaacgugcaguugau

SEQ ID NO: 719479 - RNA, 19 nt, Artificial Sequence
  Description of Artificial Sequence: Synthetic oligonucleotide
ccaacacgucaaugagcuc

SEQ ID NO: 719480 - RNA, 19 nt, Artificial Sequence
  Description of Artificial Sequence: Synthetic oligonucleotide
cugugucaauuagaccagu

SEQ ID NO: 719481 - RNA, 19 nt, Artificial Sequence
  Description of Artificial Sequence: Synthetic oligonucleotide
gcguaauucugaauucuuu

SEQ ID NO: 719482 - RNA, 19 nt, Artificial Sequence
  Description of Artificial Sequence: Synthetic oligonucleotide
gcguucaucuggagaaugu

SEQ ID NO: 719483 - RNA, 19 nt, Artificial Sequence
  Description of Artificial Sequence: Synthetic oligonucleotide
gugcgagcuucaacagacu

SEQ ID NO: 719484 - RNA, 19 nt, Artificial Sequence
  Description of Artificial Sequence: Synthetic oligonucleotide
ccucgcugguggccucuug

SEQ ID NO: 719485 - RNA, 19 nt, Artificial Sequence
  Description of Artificial Sequence: Synthetic oligonucleotide
cagcguucaucuggagaau

SEQ ID NO: 719486 - RNA, 19 nt, Artificial Sequence
  Description of Artificial Sequence: Synthetic oligonucleotide
cuggcugaucaggguuacu

SEQ ID NO: 719487 - RNA, 19 nt, Artificial Sequence
  Description of Artificial Sequence: Synthetic oligonucleotide
caaugagcucuuggucguu

SEQ ID NO: 719488 - RNA, 19 nt, Artificial Sequence
  Description of Artificial Sequence: Synthetic oligonucleotide
gcauuccguugaguguacu

SEQ ID NO: 719489 - RNA, 19 nt, Artificial Sequence
  Description of Artificial Sequence: Synthetic oligonucleotide
ccggcgacagcuccucccu

SEQ ID NO: 719490 - RNA, 19 nt, Artificial Sequence
  Description of Artificial Sequence: Synthetic oligonucleotide
cauggccaacugguuuauu

SEQ ID NO: 719491 - RNA, 19 nt, Artificial Sequence
  Description of Artificial Sequence: Synthetic oligonucleotide
cugggucagcaggguuacu

SEQ ID NO: 719492 - RNA, 19 nt, Artificial Sequence
  Description of Artificial Sequence: Synthetic oligonucleotide
gcgcugcuuuugacagugu

SEQ ID NO: 719493 - RNA, 19 nt, Artificial Sequence
  Description of Artificial Sequence: Synthetic oligonucleotide
agaaauacgaacuuuaaug

SEQ ID NO: 719494 - RNA, 19 nt, Artificial Sequence
  Description of Artificial Sequence: Synthetic oligonucleotide
guuauuuuaggccagagag

SEQ ID NO: 719495 - RNA, 19 nt, Artificial Sequence
  Description of Artificial Sequence: Synthetic oligonucleotide
uuaaugaagacuauuuccc

SEQ ID NO: 719496 - RNA, 19 nt, Artificial Sequence
  Description of Artificial Sequence: Synthetic oligonucleotide
aaagagugcaguuccagac

SEQ ID NO: 719497 - RNA, 19 nt, Artificial Sequence
  Description of Artificial Sequence: Synthetic oligonucleotide
aaguuugggaaacucaacg

SEQ ID NO: 719498 - RNA, 19 nt, Artificial Sequence
  Description of Artificial Sequence: Synthetic oligonucleotide
aaaucuacagcccuaaaau

SEQ ID NO: 719499 - RNA, 19 nt, Artificial Sequence
  Description of Artificial Sequence: Synthetic oligonucleotide
aguaggauauguuaugagg

SEQ ID NO: 719500 - RNA, 19 nt, Artificial Sequence
  Description of Artificial Sequence: Synthetic oligonucleotide
uauguuaugagggaucugg

SEQ ID NO: 719501 - RNA, 19 nt, Artificial Sequence
  Description of Artificial Sequence: Synthetic oligonucleotide
ucgacuaucauaauuugug

SEQ ID NO: 719502 - RNA, 19 nt, Artificial Sequence
  Description of Artificial Sequence: Synthetic oligonucleotide
aaagcggugauccuuuguc

SEQ ID NO: 719503 - RNA, 19 nt, Artificial Sequence
  Description of Artificial Sequence: Synthetic oligonucleotide
acuaucauaauuugugcuc

SEQ ID NO: 719504 - RNA, 19 nt, Artificial Sequence
  Description of Artificial Sequence: Synthetic oligonucleotide
aacgaggugauauauaaau

SEQ ID NO: 719505 - RNA, 19 nt, Artificial Sequence
  Description of Artificial Sequence: Synthetic oligonucleotide
gagaauagagaucaaggcc

SEQ ID NO: 719506 - RNA, 19 nt, Artificial Sequence
  Description of Artificial Sequence: Synthetic oligonucleotide
aauacgaacuuuaaugaag

SEQ ID NO: 719507 - RNA, 19 nt, Artificial Sequence
  Description of Artificial Sequence: Synthetic oligonucleotide
auaauuugugcucaaaagu

SEQ ID NO: 719508 - RNA, 19 nt, Artificial Sequence
  Description of Artificial Sequence: Synthetic oligonucleotide
acagcccuaaaauauauuc

SEQ ID NO: 719509 - RNA, 19 nt, Artificial Sequence
  Description of Artificial Sequence: Synthetic oligonucleotide
gagaguaaaaucccaacag

SEQ ID NO: 719510 - RNA, 19 nt, Artificial Sequence
  Description of Artificial Sequence: Synthetic oligonucleotide
aaagggauggaaggcaucc

SEQ ID NO: 719511 - RNA, 19 nt, Artificial Sequence
  Description of Artificial Sequence: Synthetic oligonucleotide
acaaccaaaaggcagagga

SEQ ID NO: 719512 - RNA, 19 nt, Artificial Sequence
  Description of Artificial Sequence: Synthetic oligonucleotide
aaauauauucguguuaaca

SEQ ID NO: 719513 - RNA, 19 nt, Artificial Sequence
  Description of Artificial Sequence: Synthetic oligonucleotide
cuguuuacggacuucaggg

SEQ ID NO: 719514 - RNA, 19 nt, Artificial Sequence
  Description of Artificial Sequence: Synthetic oligonucleotide
gauauauaaauguaaucga

SEQ ID NO: 719515 - RNA, 19 nt, Artificial Sequence
  Description of Artificial Sequence: Synthetic oligonucleotide
uauauucguguuaacaaca

SEQ ID NO: 719516 - RNA, 19 nt, Artificial Sequence
  Description of Artificial Sequence: Synthetic oligonucleotide
ucuguuuacggacuucagg

SEQ ID NO: 719517 - RNA, 19 nt, Artificial Sequence
  Description of Artificial Sequence: Synthetic oligonucleotide
aaauccucgucucugccuc

SEQ ID NO: 719518 - RNA, 19 nt, Artificial Sequence
  Description of Artificial Sequence: Synthetic oligonucleotide
ucagccauggacauggucu

SEQ ID NO: 719519 - RNA, 19 nt, Artificial Sequence
  Description of Artificial Sequence: Synthetic oligonucleotide
uaauuugugcucaaaagua

SEQ ID NO: 719520 - RNA, 19 nt, Artificial Sequence
  Description of Artificial Sequence: Synthetic oligonucleotide
caagugauuguccaugugg

SEQ ID NO: 719521 - RNA, 19 nt, Artificial Sequence
  Description of Artificial Sequence: Synthetic oligonucleotide
guaggauauguuaugaggg

SEQ ID NO: 719522 - RNA, 19 nt, Artificial Sequence
  Description of Artificial Sequence: Synthetic oligonucleotide
aagacuauuucccuuuggu

SEQ ID NO: 719523 - RNA, 19 nt, Artificial Sequence
  Description of Artificial Sequence: Synthetic oligonucleotide
ucugguguagaccagccug

SEQ ID NO: 719524 - RNA, 19 nt, Artificial Sequence
  Description of Artificial Sequence: Synthetic oligonucleotide
aagggcaucuucaaagggc

SEQ ID NO: 719525 - RNA, 19 nt, Artificial Sequence
  Description of Artificial Sequence: Synthetic oligonucleotide
uaagaaccuacccuuuggg

SEQ ID NO: 719526 - RNA, 19 nt, Artificial Sequence
  Description of Artificial Sequence: Synthetic oligonucleotide
aagaaccuacccuuugggg

SEQ ID NO: 719527 - RNA, 19 nt, Artificial Sequence
  Description of Artificial Sequence: Synthetic oligonucleotide
uguccuaguuauuuuaggc

SEQ ID NO: 719528 - RNA, 19 nt, Artificial Sequence
  Description of Artificial Sequence: Synthetic oligonucleotide
agcaugcugcccuauaggc

SEQ ID NO: 719529 - RNA, 19 nt, Artificial Sequence
  Description of Artificial Sequence: Synthetic oligonucleotide
uaaaucuacagcccuaaaa

SEQ ID NO: 719530 - RNA, 19 nt, Artificial Sequence
  Description of Artificial Sequence: Synthetic oligonucleotide
aaugaagggccugagaacu

SEQ ID NO: 719531 - RNA, 19 nt, Artificial Sequence
  Description of Artificial Sequence: Synthetic oligonucleotide
auauaaauguaaucgacua

SEQ ID NO: 719532 - RNA, 19 nt, Artificial Sequence
  Description of Artificial Sequence: Synthetic oligonucleotide
uuaacucuacacacacugg

SEQ ID NO: 719533 - RNA, 19 nt, Artificial Sequence
  Description of Artificial Sequence: Synthetic oligonucleotide
ucauaauuugugcucaaaa

SEQ ID NO: 719534 - RNA, 19 nt, Artificial Sequence
  Description of Artificial Sequence: Synthetic oligonucleotide
agguuccuaacuaaaaccc

SEQ ID NO: 719535 - RNA, 19 nt, Artificial Sequence
  Description of Artificial Sequence: Synthetic oligonucleotide
aaccacaccuucaggaucc

SEQ ID NO: 719536 - RNA, 19 nt, Artificial Sequence
  Description of Artificial Sequence: Synthetic oligonucleotide
uuugugcucaaaaguaagc

SEQ ID NO: 719537 - RNA, 19 nt, Artificial Sequence
  Description of Artificial Sequence: Synthetic oligonucleotide
gguagaaagggauggaagg

SEQ ID NO: 719538 - RNA, 19 nt, Artificial Sequence
  Description of Artificial Sequence: Synthetic oligonucleotide
aaucgacuaucauaauuug

SEQ ID NO: 719539 - RNA, 19 nt, Artificial Sequence
  Description of Artificial Sequence: Synthetic oligonucleotide
guauaaggcauccaaacca

SEQ ID NO: 719540 - RNA, 19 nt, Artificial Sequence
  Description of Artificial Sequence: Synthetic oligonucleotide
uaacucuacacacacugga

SEQ ID NO: 719541 - RNA, 19 nt, Artificial Sequence
  Description of Artificial Sequence: Synthetic oligonucleotide
agagaguaccuacagaccu

SEQ ID NO: 719542 - RNA, 19 nt, Artificial Sequence
  Description of Artificial Sequence: Synthetic oligonucleotide
uccauuguaagaaccuacc

SEQ ID NO: 719543 - RNA, 19 nt, Artificial Sequence
  Description of Artificial Sequence: Synthetic oligonucleotide
aauacuuuggugagguuug

SEQ ID NO: 719544 - RNA, 19 nt, Artificial Sequence
  Description of Artificial Sequence: Synthetic oligonucleotide
gacauaggaagggucaucg

SEQ ID NO: 719545 - RNA, 19 nt, Artificial Sequence
  Description of Artificial Sequence: Synthetic oligonucleotide
auuguaagaaccuacccuu

SEQ ID NO: 719546 - RNA, 19 nt, Artificial Sequence
  Description of Artificial Sequence: Synthetic oligonucleotide
agcacauuuccauuguaag

SEQ ID NO: 719547 - RNA, 19 nt, Artificial Sequence
  Description of Artificial Sequence: Synthetic oligonucleotide
agagaguaaaaucccaaca

SEQ ID NO: 719548 - RNA, 19 nt, Artificial Sequence
  Description of Artificial Sequence: Synthetic oligonucleotide
ucgagguuaacucuacaca

SEQ ID NO: 719549 - RNA, 19 nt, Artificial Sequence
  Description of Artificial Sequence: Synthetic oligonucleotide
auuaauacuuuggugaggu

SEQ ID NO: 719550 - RNA, 19 nt, Artificial Sequence
  Description of Artificial Sequence: Synthetic oligonucleotide
ucaucgaagaguucucugc

SEQ ID NO: 719551 - RNA, 19 nt, Artificial Sequence
  Description of Artificial Sequence: Synthetic oligonucleotide
uuauuuuaggccagagaga

SEQ ID NO: 719552 - RNA, 19 nt, Artificial Sequence
  Description of Artificial Sequence: Synthetic oligonucleotide
ugguagaaagggauggaag

SEQ ID NO: 719553 - RNA, 19 nt, Artificial Sequence
  Description of Artificial Sequence: Synthetic oligonucleotide
acucuacacacacuggagg

SEQ ID NO: 719554 - RNA, 19 nt, Artificial Sequence
  Description of Artificial Sequence: Synthetic oligonucleotide
gaagucaccguugagcugc

SEQ ID NO: 719555 - RNA, 19 nt, Artificial Sequence
  Description of Artificial Sequence: Synthetic oligonucleotide
guuugggaaacucaacgag

SEQ ID NO: 719556 - RNA, 19 nt, Artificial Sequence
  Description of Artificial Sequence: Synthetic oligonucleotide
cagguuccuaacuaaaacc

SEQ ID NO: 719557 - RNA, 19 nt, Artificial Sequence
  Description of Artificial Sequence: Synthetic oligonucleotide
cuaaugaggugacugacac

SEQ ID NO: 719558 - RNA, 19 nt, Artificial Sequence
  Description of Artificial Sequence: Synthetic oligonucleotide
uucguguuaacaacaacaa

SEQ ID NO: 719559 - RNA, 19 nt, Artificial Sequence
  Description of Artificial Sequence: Synthetic oligonucleotide
caggcuuagaaauguauag

SEQ ID NO: 719560 - RNA, 19 nt, Artificial Sequence
  Description of Artificial Sequence: Synthetic oligonucleotide
agaagggcuaugcuuuggc

SEQ ID NO: 719561 - RNA, 19 nt, Artificial Sequence
  Description of Artificial Sequence: Synthetic oligonucleotide
agggcuucaugucaaagag

SEQ ID NO: 719562 - RNA, 19 nt, Artificial Sequence
  Description of Artificial Sequence: Synthetic oligonucleotide
aaaaguuugggaaacucaa

SEQ ID NO: 719563 - RNA, 19 nt, Artificial Sequence
  Description of Artificial Sequence: Synthetic oligonucleotide
uguagacacaguucgcugc

SEQ ID NO: 719564 - RNA, 19 nt, Artificial Sequence
  Description of Artificial Sequence: Synthetic oligonucleotide
aguaccuacagaccuagga

SEQ ID NO: 719565 - RNA, 19 nt, Artificial Sequence
  Description of Artificial Sequence: Synthetic oligonucleotide
caugcugcccuauaggcag

SEQ ID NO: 719566 - RNA, 19 nt, Artificial Sequence
  Description of Artificial Sequence: Synthetic oligonucleotide
uauaaauguaaucgacuau

SEQ ID NO: 719567 - RNA, 19 nt, Artificial Sequence
  Description of Artificial Sequence: Synthetic oligonucleotide
agaguaaaaucccaacagu

SEQ ID NO: 719568 - RNA, 19 nt, Artificial Sequence
  Description of Artificial Sequence: Synthetic oligonucleotide
auucguguuaacaacaaca

SEQ ID NO: 719569 - RNA, 19 nt, Artificial Sequence
  Description of Artificial Sequence: Synthetic oligonucleotide
uguaagaaccuacccuuug

SEQ ID NO: 719570 - RNA, 19 nt, Artificial Sequence
  Description of Artificial Sequence: Synthetic oligonucleotide
ugcucaaaaguaagcaaca

SEQ ID NO: 719571 - RNA, 19 nt, Artificial Sequence
  Description of Artificial Sequence: Synthetic oligonucleotide
agauucuggauguugacau

SEQ ID NO: 719572 - RNA, 19 nt, Artificial Sequence
  Description of Artificial Sequence: Synthetic oligonucleotide
ucagcaaccccuauccaca

SEQ ID NO: 719573 - RNA, 19 nt, Artificial Sequence
  Description of Artificial Sequence: Synthetic oligonucleotide
gaagaggucacgccuuccg

SEQ ID NO: 719574 - RNA, 19 nt, Artificial Sequence
  Description of Artificial Sequence: Synthetic oligonucleotide
guaccuacagaccuaggag

SEQ ID NO: 719575 - RNA, 19 nt, Artificial Sequence
  Description of Artificial Sequence: Synthetic oligonucleotide
ugggguacccugcagacca

SEQ ID NO: 719576 - RNA, 19 nt, Artificial Sequence
  Description of Artificial Sequence: Synthetic oligonucleotide
cagcccuaaaauauauucg

SEQ ID NO: 719577 - RNA, 19 nt, Artificial Sequence
  Description of Artificial Sequence: Synthetic oligonucleotide
aaacucaacgaggugauau

SEQ ID NO: 719578 - RNA, 19 nt, Artificial Sequence
  Description of Artificial Sequence: Synthetic oligonucleotide
aaauguaaucgacuaucau

SEQ ID NO: 719579 - RNA, 19 nt, Artificial Sequence
  Description of Artificial Sequence: Synthetic oligonucleotide
gauugggaggcccagcccc

SEQ ID NO: 719580 - RNA, 19 nt, Artificial Sequence
  Description of Artificial Sequence: Synthetic oligonucleotide
ugcauagggaguaggauau

SEQ ID NO: 719581 - RNA, 19 nt, Artificial Sequence
  Description of Artificial Sequence: Synthetic oligonucleotide
guccuaguuauuuuaggcc

SEQ ID NO: 719582 - RNA, 19 nt, Artificial Sequence
  Description of Artificial Sequence: Synthetic oligonucleotide
aaucccaacaguuguguua

SEQ ID NO: 719583 - RNA, 19 nt, Artificial Sequence
  Description of Artificial Sequence: Synthetic oligonucleotide
cuccgcaaaacccaccucg

SEQ ID NO: 719584 - RNA, 19 nt, Artificial Sequence
  Description of Artificial Sequence: Synthetic oligonucleotide
uuccauuguaagaaccuac

SEQ ID NO: 719585 - RNA, 19 nt, Artificial Sequence
  Description of Artificial Sequence: Synthetic oligonucleotide
caagagaccacucuguaca

SEQ ID NO: 719586 - RNA, 19 nt, Artificial Sequence
  Description of Artificial Sequence: Synthetic oligonucleotide
auguaaucgacuaucauaa

SEQ ID NO: 719587 - RNA, 19 nt, Artificial Sequence
  Description of Artificial Sequence: Synthetic oligonucleotide
guagcuaaugaggugacug

SEQ ID NO: 719588 - RNA, 19 nt, Artificial Sequence
  Description of Artificial Sequence: Synthetic oligonucleotide
ugcccuauaggcaguguag

SEQ ID NO: 719589 - RNA, 19 nt, Artificial Sequence
  Description of Artificial Sequence: Synthetic oligonucleotide
agggcaauugcuccacugg

SEQ ID NO: 719590 - RNA, 19 nt, Artificial Sequence
  Description of Artificial Sequence: Synthetic oligonucleotide
ugugcucucucgaaccaag

SEQ ID NO: 719591 - RNA, 19 nt, Artificial Sequence
  Description of Artificial Sequence: Synthetic oligonucleotide
gagagaguaaaaucccaac

SEQ ID NO: 719592 - RNA, 19 nt, Artificial Sequence
  Description of Artificial Sequence: Synthetic oligonucleotide
gugucagcaaccccuaucc

SEQ ID NO: 719593 - RNA, 19 nt, Artificial Sequence
  Description of Artificial Sequence: Synthetic oligonucleotide
gugauauauaaauguaauc

SEQ ID NO: 719594 - RNA, 19 nt, Artificial Sequence
  Description of Artificial Sequence: Synthetic oligonucleotide
ugugcucaaaaguaagcaa

SEQ ID NO: 719595 - RNA, 19 nt, Artificial Sequence
  Description of Artificial Sequence: Synthetic oligonucleotide
ucgaagaguucucugccug

SEQ ID NO: 719596 - RNA, 19 nt, Artificial Sequence
  Description of Artificial Sequence: Synthetic oligonucleotide
uaauacuuuggugagguuu

SEQ ID NO: 719597 - RNA, 19 nt, Artificial Sequence
  Description of Artificial Sequence: Synthetic oligonucleotide
gcacaugucagucauacac

SEQ ID NO: 719598 - RNA, 19 nt, Artificial Sequence
  Description of Artificial Sequence: Synthetic oligonucleotide
ugugguugugcucucucga

SEQ ID NO: 719599 - RNA, 19 nt, Artificial Sequence
  Description of Artificial Sequence: Synthetic oligonucleotide
auuaauggaaggauuggga

SEQ ID NO: 719600 - RNA, 19 nt, Artificial Sequence
  Description of Artificial Sequence: Synthetic oligonucleotide
ucuacagcccuaaaauaua

SEQ ID NO: 719601 - RNA, 19 nt, Artificial Sequence
  Description of Artificial Sequence: Synthetic oligonucleotide
aagggcaauugcuccacug

SEQ ID NO: 719602 - RNA, 19 nt, Artificial Sequence
  Description of Artificial Sequence: Synthetic oligonucleotide
uccaugugguagcuaauga

SEQ ID NO: 719603 - RNA, 19 nt, Artificial Sequence
  Description of Artificial Sequence: Synthetic oligonucleotide
auagagaucaaggccagga

SEQ ID NO: 719604 - RNA, 19 nt, Artificial Sequence
  Description of Artificial Sequence: Synthetic oligonucleotide
acgaacuuuaaugaagacu

SEQ ID NO: 719605 - RNA, 19 nt, Artificial Sequence
  Description of Artificial Sequence: Synthetic oligonucleotide
uauucguguuaacaacaac

SEQ ID NO: 719606 - RNA, 19 nt, Artificial Sequence
  Description of Artificial Sequence: Synthetic oligonucleotide
aacucuacacacacuggag

SEQ ID NO: 719607 - RNA, 19 nt, Artificial Sequence
  Description of Artificial Sequence: Synthetic oligonucleotide
caucgaagaguucucugcc

SEQ ID NO: 719608 - RNA, 19 nt, Artificial Sequence
  Description of Artificial Sequence: Synthetic oligonucleotide
aauccuguccuaguuauuu

SEQ ID NO: 719609 - RNA, 19 nt, Artificial Sequence
  Description of Artificial Sequence: Synthetic oligonucleotide
agugcaguuccagaccuac

SEQ ID NO: 719610 - RNA, 19 nt, Artificial Sequence
  Description of Artificial Sequence: Synthetic oligonucleotide
guaugauuguuucccuucc

SEQ ID NO: 719611 - RNA, 19 nt, Artificial Sequence
  Description of Artificial Sequence: Synthetic oligonucleotide
auaggaagggucaucgaag

SEQ ID NO: 719612 - RNA, 19 nt, Artificial Sequence
  Description of Artificial Sequence: Synthetic oligonucleotide
aggucacgccuuccgaucc

SEQ ID NO: 719613 - RNA, 19 nt, Artificial Sequence
  Description of Artificial Sequence: Synthetic oligonucleotide
uagggaguaggauauguua

SEQ ID NO: 719614 - RNA, 19 nt, Artificial Sequence
  Description of Artificial Sequence: Synthetic oligonucleotide
cauggaaccaggacucccc

SEQ ID NO: 719615 - RNA, 19 nt, Artificial Sequence
  Description of Artificial Sequence: Synthetic oligonucleotide
cuaugcuuuggcuguagac

SEQ ID NO: 719616 - RNA, 19 nt, Artificial Sequence
  Description of Artificial Sequence: Synthetic oligonucleotide
cuguccuaguuauuuuagg

SEQ ID NO: 719617 - RNA, 19 nt, Artificial Sequence
  Description of Artificial Sequence: Synthetic oligonucleotide
accuaggagacagucaaag

SEQ ID NO: 719618 - RNA, 19 nt, Artificial Sequence
  Description of Artificial Sequence: Synthetic oligonucleotide
cacggguugcuguagacac

SEQ ID NO: 719619 - RNA, 19 nt, Artificial Sequence
  Description of Artificial Sequence: Synthetic oligonucleotide
auacgaacuuuaaugaaga

SEQ ID NO: 719620 - RNA, 19 nt, Artificial Sequence
  Description of Artificial Sequence: Synthetic oligonucleotide
acagaccuaggagacaguc

SEQ ID NO: 719621 - RNA, 19 nt, Artificial Sequence
  Description of Artificial Sequence: Synthetic oligonucleotide
guaacacacaugcagacgu

SEQ ID NO: 719622 - RNA, 19 nt, Artificial Sequence
  Description of Artificial Sequence: Synthetic oligonucleotide
uccuuuguccgaaccacac

SEQ ID NO: 719623 - RNA, 19 nt, Artificial Sequence
  Description of Artificial Sequence: Synthetic oligonucleotide
cagucauacacaccccucc

SEQ ID NO: 719624 - RNA, 19 nt, Artificial Sequence
  Description of Artificial Sequence: Synthetic oligonucleotide
agucaaaggcacaaaguug

SEQ ID NO: 719625 - RNA, 19 nt, Artificial Sequence
  Description of Artificial Sequence: Synthetic oligonucleotide
agacacaguucgcugcccg

SEQ ID NO: 719626 - RNA, 19 nt, Artificial Sequence
  Description of Artificial Sequence: Synthetic oligonucleotide
ggcugcacaaccaaaaggc

SEQ ID NO: 719627 - RNA, 19 nt, Artificial Sequence
  Description of Artificial Sequence: Synthetic oligonucleotide
aggagauagcugccacucc

SEQ ID NO: 719628 - RNA, 19 nt, Artificial Sequence
  Description of Artificial Sequence: Synthetic oligonucleotide
uagauucuggauguugaca

SEQ ID NO: 719629 - RNA, 19 nt, Artificial Sequence
  Description of Artificial Sequence: Synthetic oligonucleotide
uagcuaaugaggugacuga

SEQ ID NO: 719630 - RNA, 19 nt, Artificial Sequence
  Description of Artificial Sequence: Synthetic oligonucleotide
cagagaguaccuacagacc

SEQ ID NO: 719631 - RNA, 19 nt, Artificial Sequence
  Description of Artificial Sequence: Synthetic oligonucleotide
guagacacaguucgcugcc

SEQ ID NO: 719632 - RNA, 19 nt, Artificial Sequence
  Description of Artificial Sequence: Synthetic oligonucleotide
uuuuguagaggccgaggua

SEQ ID NO: 719633 - RNA, 19 nt, Artificial Sequence
  Description of Artificial Sequence: Synthetic oligonucleotide
gcaacaucuguuuacggac

SEQ ID NO: 719634 - RNA, 19 nt, Artificial Sequence
  Description of Artificial Sequence: Synthetic oligonucleotide
guuaugagggaucuggggu

SEQ ID NO: 719635 - RNA, 19 nt, Artificial Sequence
  Description of Artificial Sequence: Synthetic oligonucleotide
cuagauucuggauguugac

SEQ ID NO: 719636 - RNA, 19 nt, Artificial Sequence
  Description of Artificial Sequence: Synthetic oligonucleotide
gauccuuuguccgaaccac

SEQ ID NO: 719637 - RNA, 19 nt, Artificial Sequence
  Description of Artificial Sequence: Synthetic oligonucleotide
ucguguuaacaacaacaaa

SEQ ID NO: 719638 - RNA, 19 nt, Artificial Sequence
  Description of Artificial Sequence: Synthetic oligonucleotide
gucagcaaccccuauccac

SEQ ID NO: 719639 - RNA, 19 nt, Artificial Sequence
  Description of Artificial Sequence: Synthetic oligonucleotide
aucuacagcccuaaaauau

SEQ ID NO: 719640 - RNA, 19 nt, Artificial Sequence
  Description of Artificial Sequence: Synthetic oligonucleotide
acuauuucccuuugguaua

SEQ ID NO: 719641 - RNA, 19 nt, Artificial Sequence
  Description of Artificial Sequence: Synthetic oligonucleotide
uccgaaccacaccuucagg

SEQ ID NO: 719642 - RNA, 19 nt, Artificial Sequence
  Description of Artificial Sequence: Synthetic oligonucleotide
aacucaacgaggugauaua

SEQ ID NO: 719643 - RNA, 19 nt, Artificial Sequence
  Description of Artificial Sequence: Synthetic oligonucleotide
aagaggucacgccuuccga

SEQ ID NO: 719644 - RNA, 19 nt, Artificial Sequence
  Description of Artificial Sequence: Synthetic oligonucleotide
aaauaaaucuacagcccua

SEQ ID NO: 719645 - RNA, 19 nt, Artificial Sequence
  Description of Artificial Sequence: Synthetic oligonucleotide
agaguaccuacagaccuag

SEQ ID NO: 719646 - RNA, 19 nt, Artificial Sequence
  Description of Artificial Sequence: Synthetic oligonucleotide
gaagccucaugucuaccac

SEQ ID NO: 719647 - RNA, 19 nt, Artificial Sequence
  Description of Artificial Sequence: Synthetic oligonucleotide
ugucagucauacacacccc

SEQ ID NO: 719648 - RNA, 19 nt, Artificial Sequence
  Description of Artificial Sequence: Synthetic oligonucleotide
accccuauccacaaugaag

SEQ ID NO: 719649 - RNA, 19 nt, Artificial Sequence
  Description of Artificial Sequence: Synthetic oligonucleotide
ucugggguacccugcagac

SEQ ID NO: 719650 - RNA, 19 nt, Artificial Sequence
  Description of Artificial Sequence: Synthetic oligonucleotide
cacgccuuccgauccacgg

SEQ ID NO: 719651 - RNA, 19 nt, Artificial Sequence
  Description of Artificial Sequence: Synthetic oligonucleotide
cucugcagagaguaccuac

SEQ ID NO: 719652 - RNA, 19 nt, Artificial Sequence
  Description of Artificial Sequence: Synthetic oligonucleotide
ucucgaagccucaugucua

SEQ ID NO: 719653 - RNA, 19 nt, Artificial Sequence
  Description of Artificial Sequence: Synthetic oligonucleotide
agcaugacaggguuccaga

SEQ ID NO: 719654 - RNA, 19 nt, Artificial Sequence
  Description of Artificial Sequence: Synthetic oligonucleotide
ccuacagauggcauugggg

SEQ ID NO: 719655 - RNA, 19 nt, Artificial Sequence
  Description of Artificial Sequence: Synthetic oligonucleotide
ggauguugacauaggaagg

SEQ ID NO: 719656 - RNA, 19 nt, Artificial Sequence
  Description of Artificial Sequence: Synthetic oligonucleotide
cguguuaacaacaacaaaa

SEQ ID NO: 719657 - RNA, 19 nt, Artificial Sequence
  Description of Artificial Sequence: Synthetic oligonucleotide
cuaucauaauuugugcuca

SEQ ID NO: 719658 - RNA, 19 nt, Artificial Sequence
  Description of Artificial Sequence: Synthetic oligonucleotide
gguugugcucucucgaacc

SEQ ID NO: 719659 - RNA, 19 nt, Artificial Sequence
  Description of Artificial Sequence: Synthetic oligonucleotide
agacuauuucccuuuggua

SEQ ID NO: 719660 - RNA, 19 nt, Artificial Sequence
  Description of Artificial Sequence: Synthetic oligonucleotide
uacgaacuuuaaugaagac

SEQ ID NO: 719661 - RNA, 19 nt, Artificial Sequence
  Description of Artificial Sequence: Synthetic oligonucleotide
gauauguuaugagggaucu

SEQ ID NO: 719662 - RNA, 19 nt, Artificial Sequence
  Description of Artificial Sequence: Synthetic oligonucleotide
gcucucucgaaccaagaag

SEQ ID NO: 719663 - RNA, 19 nt, Artificial Sequence
  Description of Artificial Sequence: Synthetic oligonucleotide
gagagaggugcugagcaug

SEQ ID NO: 719664 - RNA, 19 nt, Artificial Sequence
  Description of Artificial Sequence: Synthetic oligonucleotide
ugcucucucgaaccaagaa

SEQ ID NO: 719665 - RNA, 19 nt, Artificial Sequence
  Description of Artificial Sequence: Synthetic oligonucleotide
gugguagcuaaugagguga

SEQ ID NO: 719666 - RNA, 19 nt, Artificial Sequence
  Description of Artificial Sequence: Synthetic oligonucleotide
uuguccgaaccacaccuuc

SEQ ID NO: 719667 - RNA, 19 nt, Artificial Sequence
  Description of Artificial Sequence: Synthetic oligonucleotide
gacacucucaaagcgguga

SEQ ID NO: 719668 - RNA, 19 nt, Artificial Sequence
  Description of Artificial Sequence: Synthetic oligonucleotide
uggccuuacaaauccucgu

SEQ ID NO: 719669 - RNA, 19 nt, Artificial Sequence
  Description of Artificial Sequence: Synthetic oligonucleotide
uccgcaaaacccaccucga

SEQ ID NO: 719670 - RNA, 19 nt, Artificial Sequence
  Description of Artificial Sequence: Synthetic oligonucleotide
cuguagacacaguucgcug

SEQ ID NO: 719671 - RNA, 19 nt, Artificial Sequence
  Description of Artificial Sequence: Synthetic oligonucleotide
ugcuguagacacaguucgc

SEQ ID NO: 719672 - RNA, 19 nt, Artificial Sequence
  Description of Artificial Sequence: Synthetic oligonucleotide
aggugauauauaaauguaa

SEQ ID NO: 719673 - RNA, 19 nt, Artificial Sequence
  Description of Artificial Sequence: Synthetic oligonucleotide
gugugguugugcucucucg

SEQ ID NO: 719674 - RNA, 19 nt, Artificial Sequence
  Description of Artificial Sequence: Synthetic oligonucleotide
ugaugggcaagugauuguc

SEQ ID NO: 719675 - RNA, 19 nt, Artificial Sequence
  Description of Artificial Sequence: Synthetic oligonucleotide
acagucaaaggcacaaagu

SEQ ID NO: 719676 - RNA, 19 nt, Artificial Sequence
  Description of Artificial Sequence: Synthetic oligonucleotide
ccgaagggcaucuucaaag

SEQ ID NO: 719677 - RNA, 19 nt, Artificial Sequence
  Description of Artificial Sequence: Synthetic oligonucleotide
aggcaacaucuguuuacgg

SEQ ID NO: 719678 - RNA, 19 nt, Artificial Sequence
  Description of Artificial Sequence: Synthetic oligonucleotide
uccuguccuaguuauuuua

SEQ ID NO: 719679 - RNA, 19 nt, Artificial Sequence
  Description of Artificial Sequence: Synthetic oligonucleotide
cgaacuuuaaugaagacua

SEQ ID NO: 719680 - RNA, 19 nt, Artificial Sequence
  Description of Artificial Sequence: Synthetic oligonucleotide
aaagaagaggucacgccuu

SEQ ID NO: 719681 - RNA, 19 nt, Artificial Sequence
  Description of Artificial Sequence: Synthetic oligonucleotide
ggaaccaggacuccccuug

SEQ ID NO: 719682 - RNA, 19 nt, Artificial Sequence
  Description of Artificial Sequence: Synthetic oligonucleotide
guccgaaccacaccuucag

SEQ ID NO: 719683 - RNA, 19 nt, Artificial Sequence
  Description of Artificial Sequence: Synthetic oligonucleotide
aucgaagaguucucugccu

SEQ ID NO: 719684 - RNA, 19 nt, Artificial Sequence
  Description of Artificial Sequence: Synthetic oligonucleotide
uuuccauuguaagaaccua

SEQ ID NO: 719685 - RNA, 19 nt, Artificial Sequence
  Description of Artificial Sequence: Synthetic oligonucleotide
agaacaugguagaaaggga

SEQ ID NO: 719686 - RNA, 19 nt, Artificial Sequence
  Description of Artificial Sequence: Synthetic oligonucleotide
uaucauaauuugugcucaa

SEQ ID NO: 719687 - RNA, 19 nt, Artificial Sequence
  Description of Artificial Sequence: Synthetic oligonucleotide
ccacucuguacauuaauac

SEQ ID NO: 719688 - RNA, 19 nt, Artificial Sequence
  Description of Artificial Sequence: Synthetic oligonucleotide
auguuaugagggaucuggg

SEQ ID NO: 719689 - RNA, 19 nt, Artificial Sequence
  Description of Artificial Sequence: Synthetic oligonucleotide
gcaaccccuauccacaaug

SEQ ID NO: 719690 - RNA, 19 nt, Artificial Sequence
  Description of Artificial Sequence: Synthetic oligonucleotide
cuuaagggcugcacaacca

SEQ ID NO: 719691 - RNA, 19 nt, Artificial Sequence
  Description of Artificial Sequence: Synthetic oligonucleotide
aaccccuauccacaaugaa

SEQ ID NO: 719692 - RNA, 19 nt, Artificial Sequence
  Description of Artificial Sequence: Synthetic oligonucleotide
aggcuuagaaauguauaga

SEQ ID NO: 719693 - RNA, 19 nt, Artificial Sequence
  Description of Artificial Sequence: Synthetic oligonucleotide
caaggugucagcaaccccu

SEQ ID NO: 719694 - RNA, 19 nt, Artificial Sequence
  Description of Artificial Sequence: Synthetic oligonucleotide
cauggacauggucugagga

SEQ ID NO: 719695 - RNA, 19 nt, Artificial Sequence
  Description of Artificial Sequence: Synthetic oligonucleotide
acgaggugauauauaaaug

SEQ ID NO: 719696 - RNA, 19 nt, Artificial Sequence
  Description of Artificial Sequence: Synthetic oligonucleotide
ccgagguagaagaaauacg

SEQ ID NO: 719697 - RNA, 19 nt, Artificial Sequence
  Description of Artificial Sequence: Synthetic oligonucleotide
guaaucgacuaucauaauu

SEQ ID NO: 719698 - RNA, 19 nt, Artificial Sequence
  Description of Artificial Sequence: Synthetic oligonucleotide
gaggugauauauaaaugua

SEQ ID NO: 719699 - RNA, 19 nt, Artificial Sequence
  Description of Artificial Sequence: Synthetic oligonucleotide
ggcaacaucuguuuacgga

SEQ ID NO: 719700 - RNA, 19 nt, Artificial Sequence
  Description of Artificial Sequence: Synthetic oligonucleotide
ccaugugguagcuaaugag

SEQ ID NO: 719701 - RNA, 19 nt, Artificial Sequence
  Description of Artificial Sequence: Synthetic oligonucleotide
uuguaagaaccuacccuuu

SEQ ID NO: 719702 - RNA, 19 nt, Artificial Sequence
  Description of Artificial Sequence: Synthetic oligonucleotide
gggaguaggauauguuaug

SEQ ID NO: 719703 - RNA, 19 nt, Artificial Sequence
  Description of Artificial Sequence: Synthetic oligonucleotide
uaucaccccagcacauuuc

SEQ ID NO: 719704 - RNA, 19 nt, Artificial Sequence
  Description of Artificial Sequence: Synthetic oligonucleotide
accguugagcugcagcagu

SEQ ID NO: 719705 - RNA, 19 nt, Artificial Sequence
  Description of Artificial Sequence: Synthetic oligonucleotide
gaaccaagaagucaccguu

SEQ ID NO: 719706 - RNA, 19 nt, Artificial Sequence
  Description of Artificial Sequence: Synthetic oligonucleotide
aucgacuaucauaauuugu

SEQ ID NO: 719707 - RNA, 19 nt, Artificial Sequence
  Description of Artificial Sequence: Synthetic oligonucleotide
ugggccuaucaccccagca

SEQ ID NO: 719708 - RNA, 19 nt, Artificial Sequence
  Description of Artificial Sequence: Synthetic oligonucleotide
cugcuucagucucaaugcc

SEQ ID NO: 719709 - RNA, 19 nt, Artificial Sequence
  Description of Artificial Sequence: Synthetic oligonucleotide
ugucagcaaccccuaucca

SEQ ID NO: 719710 - RNA, 19 nt, Artificial Sequence
  Description of Artificial Sequence: Synthetic oligonucleotide
uguaaucgacuaucauaau

SEQ ID NO: 719711 - RNA, 19 nt, Artificial Sequence
  Description of Artificial Sequence: Synthetic oligonucleotide
agacgugggaggggcaggc

SEQ ID NO: 719712 - RNA, 19 nt, Artificial Sequence
  Description of Artificial Sequence: Synthetic oligonucleotide
agccaaggugucagcaacc

SEQ ID NO: 719713 - RNA, 19 nt, Artificial Sequence
  Description of Artificial Sequence: Synthetic oligonucleotide
gacacucucuuaagggcug

SEQ ID NO: 719714 - RNA, 19 nt, Artificial Sequence
  Description of Artificial Sequence: Synthetic oligonucleotide
ggaguuagagaacauggua

SEQ ID NO: 719715 - RNA, 19 nt, Artificial Sequence
  Description of Artificial Sequence: Synthetic oligonucleotide
agaggucacgccuuccgau

SEQ ID NO: 719716 - RNA, 19 nt, Artificial Sequence
  Description of Artificial Sequence: Synthetic oligonucleotide
agucucaaugccuccgcaa

SEQ ID NO: 719717 - RNA, 19 nt, Artificial Sequence
  Description of Artificial Sequence: Synthetic oligonucleotide
ugacacucucaaagcggug

SEQ ID NO: 719718 - RNA, 19 nt, Artificial Sequence
  Description of Artificial Sequence: Synthetic oligonucleotide
ugcagaccagggguaaacc

SEQ ID NO: 719719 - RNA, 19 nt, Artificial Sequence
  Description of Artificial Sequence: Synthetic oligonucleotide
cacugccauuaauggaagg

SEQ ID NO: 719720 - RNA, 19 nt, Artificial Sequence
  Description of Artificial Sequence: Synthetic oligonucleotide
cagggauccgauccugccc

SEQ ID NO: 719721 - RNA, 19 nt, Artificial Sequence
  Description of Artificial Sequence: Synthetic oligonucleotide
cuuccgauccacggguugc

SEQ ID NO: 719722 - RNA, 19 nt, Artificial Sequence
  Description of Artificial Sequence: Synthetic oligonucleotide
uuuaggccagagagagagu

SEQ ID NO: 719723 - RNA, 19 nt, Artificial Sequence
  Description of Artificial Sequence: Synthetic oligonucleotide
agggaguaggauauguuau

SEQ ID NO: 719724 - RNA, 19 nt, Artificial Sequence
  Description of Artificial Sequence: Synthetic oligonucleotide
caaaguugcauagggagua

SEQ ID NO: 719725 - RNA, 19 nt, Artificial Sequence
  Description of Artificial Sequence: Synthetic oligonucleotide
ccagguuccuaacuaaaac

SEQ ID NO: 719726 - RNA, 19 nt, Artificial Sequence
  Description of Artificial Sequence: Synthetic oligonucleotide
uagaccccuuggagaauag

SEQ ID NO: 719727 - RNA, 19 nt, Artificial Sequence
  Description of Artificial Sequence: Synthetic oligonucleotide
uacagcccuaaaauauauu

SEQ ID NO: 719728 - RNA, 19 nt, Artificial Sequence
  Description of Artificial Sequence: Synthetic oligonucleotide
ccuaggagacagucaaagg

SEQ ID NO: 719729 - RNA, 19 nt, Artificial Sequence
  Description of Artificial Sequence: Synthetic oligonucleotide
gaggucccaggaguuagag

SEQ ID NO: 719730 - RNA, 19 nt, Artificial Sequence
  Description of Artificial Sequence: Synthetic oligonucleotide
ucacgccuuccgauccacg

SEQ ID NO: 719731 - RNA, 19 nt, Artificial Sequence
  Description of Artificial Sequence: Synthetic oligonucleotide
auauucguguuaacaacaa

SEQ ID NO: 719732 - RNA, 19 nt, Artificial Sequence
  Description of Artificial Sequence: Synthetic oligonucleotide
gguuccuaacuaaaacccc

SEQ ID NO: 719733 - RNA, 19 nt, Artificial Sequence
  Description of Artificial Sequence: Synthetic oligonucleotide
ucugcagaccagugagcac

SEQ ID NO: 719734 - RNA, 19 nt, Artificial Sequence
  Description of Artificial Sequence: Synthetic oligonucleotide
gaggucacgccuuccgauc

SEQ ID NO: 719735 - RNA, 19 nt, Artificial Sequence
  Description of Artificial Sequence: Synthetic oligonucleotide
acacucucuuaagggcugc

SEQ ID NO: 719736 - RNA, 19 nt, Artificial Sequence
  Description of Artificial Sequence: Synthetic oligonucleotide
caucuguuuacggacuuca

SEQ ID NO: 719737 - RNA, 19 nt, Artificial Sequence
  Description of Artificial Sequence: Synthetic oligonucleotide
gucaaagaggucucggggu

SEQ ID NO: 719738 - RNA, 19 nt, Artificial Sequence
  Description of Artificial Sequence: Synthetic oligonucleotide
acucaacgaggugauauau

SEQ ID NO: 719739 - RNA, 19 nt, Artificial Sequence
  Description of Artificial Sequence: Synthetic oligonucleotide
acauaggaagggucaucga

SEQ ID NO: 719740 - RNA, 19 nt, Artificial Sequence
  Description of Artificial Sequence: Synthetic oligonucleotide
uggaggcaacaucuguuua

SEQ ID NO: 719741 - RNA, 19 nt, Artificial Sequence
  Description of Artificial Sequence: Synthetic oligonucleotide
ccauuaauggaaggauugg

SEQ ID NO: 719742 - RNA, 19 nt, Artificial Sequence
  Description of Artificial Sequence: Synthetic oligonucleotide
guugugcucucucgaacca

SEQ ID NO: 719743 - RNA, 19 nt, Artificial Sequence
  Description of Artificial Sequence: Synthetic oligonucleotide
auggaaccaggacuccccu

SEQ ID NO: 719744 - RNA, 19 nt, Artificial Sequence
  Description of Artificial Sequence: Synthetic oligonucleotide
agagagaggugcugagcau

SEQ ID NO: 719745 - RNA, 19 nt, Artificial Sequence
  Description of Artificial Sequence: Synthetic oligonucleotide
uccacggguugcuguagac

SEQ ID NO: 719746 - RNA, 19 nt, Artificial Sequence
  Description of Artificial Sequence: Synthetic oligonucleotide
gggccuaucaccccagcac

SEQ ID NO: 719747 - RNA, 19 nt, Artificial Sequence
  Description of Artificial Sequence: Synthetic oligonucleotide
cgacuaucauaauuugugc

SEQ ID NO: 719748 - RNA, 19 nt, Artificial Sequence
  Description of Artificial Sequence: Synthetic oligonucleotide
gccgagguagaagaaauac

SEQ ID NO: 719749 - RNA, 19 nt, Artificial Sequence
  Description of Artificial Sequence: Synthetic oligonucleotide
uuaauacuuuggugagguu

SEQ ID NO: 719750 - RNA, 19 nt, Artificial Sequence
  Description of Artificial Sequence: Synthetic oligonucleotide
gaguucucugccugggcaa

SEQ ID NO: 719751 - RNA, 19 nt, Artificial Sequence
  Description of Artificial Sequence: Synthetic oligonucleotide
acacucucaaagcggugau

SEQ ID NO: 719752 - RNA, 19 nt, Artificial Sequence
  Description of Artificial Sequence: Synthetic oligonucleotide
ggaguaggauauguuauga

SEQ ID NO: 719753 - RNA, 19 nt, Artificial Sequence
  Description of Artificial Sequence: Synthetic oligonucleotide
caguucgcugcccgcagag

SEQ ID NO: 719754 - RNA, 19 nt, Artificial Sequence
  Description of Artificial Sequence: Synthetic oligonucleotide
cucuuaagggcugcacaac

SEQ ID NO: 719755 - RNA, 19 nt, Artificial Sequence
  Description of Artificial Sequence: Synthetic oligonucleotide
cgcaaaacccaccucgagg

SEQ ID NO: 719756 - RNA, 19 nt, Artificial Sequence
  Description of Artificial Sequence: Synthetic oligonucleotide
guuagagaacaugguagaa

SEQ ID NO: 719757 - RNA, 19 nt, Artificial Sequence
  Description of Artificial Sequence: Synthetic oligonucleotide
cacaaccaaaaggcagagg

SEQ ID NO: 719758 - RNA, 19 nt, Artificial Sequence
  Description of Artificial Sequence: Synthetic oligonucleotide
aaacccaccucgagguuaa

SEQ ID NO: 719759 - RNA, 19 nt, Artificial Sequence
  Description of Artificial Sequence: Synthetic oligonucleotide
auauguuaugagggaucug

SEQ ID NO: 719760 - RNA, 19 nt, Artificial Sequence
  Description of Artificial Sequence: Synthetic oligonucleotide
gugcacugccauuaaugga

SEQ ID NO: 719761 - RNA, 19 nt, Artificial Sequence
  Description of Artificial Sequence: Synthetic oligonucleotide
accucgagguuaacucuac

SEQ ID NO: 719762 - RNA, 19 nt, Artificial Sequence
  Description of Artificial Sequence: Synthetic oligonucleotide
gcaagagaccacucuguac

SEQ ID NO: 719763 - RNA, 19 nt, Artificial Sequence
  Description of Artificial Sequence: Synthetic oligonucleotide
gauccacggguugcuguag

SEQ ID NO: 719764 - RNA, 19 nt, Artificial Sequence
  Description of Artificial Sequence: Synthetic oligonucleotide
cccaccucgagguuaacuc

SEQ ID NO: 719765 - RNA, 19 nt, Artificial Sequence
  Description of Artificial Sequence: Synthetic oligonucleotide
uacagaccuaggagacagu

SEQ ID NO: 719766 - RNA, 19 nt, Artificial Sequence
  Description of Artificial Sequence: Synthetic oligonucleotide
aucuguuuacggacuucag

SEQ ID NO: 719767 - RNA, 19 nt, Artificial Sequence
  Description of Artificial Sequence: Synthetic oligonucleotide
aagggucaucgaagaguuc

SEQ ID NO: 719768 - RNA, 19 nt, Artificial Sequence
  Description of Artificial Sequence: Synthetic oligonucleotide
auagaccccuuggagaaua

SEQ ID NO: 719769 - RNA, 19 nt, Artificial Sequence
  Description of Artificial Sequence: Synthetic oligonucleotide
cacaguucgcugcccgcag

SEQ ID NO: 719770 - RNA, 19 nt, Artificial Sequence
  Description of Artificial Sequence: Synthetic oligonucleotide
ggcagagugggucgagcag

SEQ ID NO: 719771 - RNA, 19 nt, Artificial Sequence
  Description of Artificial Sequence: Synthetic oligonucleotide
ggccuuacaaauccucguc

SEQ ID NO: 719772 - RNA, 19 nt, Artificial Sequence
  Description of Artificial Sequence: Synthetic oligonucleotide
cacuaagcccaguggccac

SEQ ID NO: 719773 - RNA, 19 nt, Artificial Sequence
  Description of Artificial Sequence: Synthetic oligonucleotide
augagggaucugggguacc

SEQ ID NO: 719774 - RNA, 19 nt, Artificial Sequence
  Description of Artificial Sequence: Synthetic oligonucleotide
caaccccuauccacaauga

SEQ ID NO: 719775 - RNA, 19 nt, Artificial Sequence
  Description of Artificial Sequence: Synthetic oligonucleotide
ugcagcaugcugcccuaua

SEQ ID NO: 719776 - RNA, 19 nt, Artificial Sequence
  Description of Artificial Sequence: Synthetic oligonucleotide
acaggguuccagaagccaa

SEQ ID NO: 719777 - RNA, 19 nt, Artificial Sequence
  Description of Artificial Sequence: Synthetic oligonucleotide
agaggucucggggugcacu

SEQ ID NO: 719778 - RNA, 19 nt, Artificial Sequence
  Description of Artificial Sequence: Synthetic oligonucleotide
cacaaugaagggccugaga

SEQ ID NO: 719779 - RNA, 19 nt, Artificial Sequence
  Description of Artificial Sequence: Synthetic oligonucleotide
gagguaugauuguuucccu

SEQ ID NO: 719780 - RNA, 19 nt, Artificial Sequence
  Description of Artificial Sequence: Synthetic oligonucleotide
ccagcccuacagaacagag

SEQ ID NO: 719781 - RNA, 19 nt, Artificial Sequence
  Description of Artificial Sequence: Synthetic oligonucleotide
gaguaccuacagaccuagg

SEQ ID NO: 719782 - RNA, 19 nt, Artificial Sequence
  Description of Artificial Sequence: Synthetic oligonucleotide
cugcagaccagggguaaac

SEQ ID NO: 719783 - RNA, 19 nt, Artificial Sequence
  Description of Artificial Sequence: Synthetic oligonucleotide
agcccagcuugggacacuc

SEQ ID NO: 719784 - RNA, 19 nt, Artificial Sequence
  Description of Artificial Sequence: Synthetic oligonucleotide
ggcuguagacuguaacaca

SEQ ID NO: 719785 - RNA, 19 nt, Artificial Sequence
  Description of Artificial Sequence: Synthetic oligonucleotide
auagggaguaggauauguu

SEQ ID NO: 719786 - RNA, 19 nt, Artificial Sequence
  Description of Artificial Sequence: Synthetic oligonucleotide
ucgaagccucaugucuacc

SEQ ID NO: 719787 - RNA, 19 nt, Artificial Sequence
  Description of Artificial Sequence: Synthetic oligonucleotide
cucaacgaggugauauaua

SEQ ID NO: 719788 - RNA, 19 nt, Artificial Sequence
  Description of Artificial Sequence: Synthetic oligonucleotide
auccacggguugcuguaga

SEQ ID NO: 719789 - RNA, 19 nt, Artificial Sequence
  Description of Artificial Sequence: Synthetic oligonucleotide
ggagauagcugccacuccu

SEQ ID NO: 719790 - RNA, 19 nt, Artificial Sequence
  Description of Artificial Sequence: Synthetic oligonucleotide
ugcuugggcugcccacucu

SEQ ID NO: 719791 - RNA, 19 nt, Artificial Sequence
  Description of Artificial Sequence: Synthetic oligonucleotide
auacuggccaggugugguu

SEQ ID NO: 719792 - RNA, 19 nt, Artificial Sequence
  Description of Artificial Sequence: Synthetic oligonucleotide
acaguucgcugcccgcaga

SEQ ID NO: 719793 - RNA, 19 nt, Artificial Sequence
  Description of Artificial Sequence: Synthetic oligonucleotide
caacgaggugauauauaaa

SEQ ID NO: 719794 - RNA, 19 nt, Artificial Sequence
  Description of Artificial Sequence: Synthetic oligonucleotide
aggccgagguagaagaaau

SEQ ID NO: 719795 - RNA, 19 nt, Artificial Sequence
  Description of Artificial Sequence: Synthetic oligonucleotide
cgaggugauauauaaaugu

SEQ ID NO: 719796 - RNA, 19 nt, Artificial Sequence
  Description of Artificial Sequence: Synthetic oligonucleotide
ggaagggucaucgaagagu

SEQ ID NO: 719797 - RNA, 19 nt, Artificial Sequence
  Description of Artificial Sequence: Synthetic oligonucleotide
gaggccgagguagaagaaa

SEQ ID NO: 719798 - RNA, 19 nt, Artificial Sequence
  Description of Artificial Sequence: Synthetic oligonucleotide
gcaagugauuguccaugug

SEQ ID NO: 719799 - RNA, 19 nt, Artificial Sequence
  Description of Artificial Sequence: Synthetic oligonucleotide
cccuauccacaaugaaggg

SEQ ID NO: 719800 - RNA, 19 nt, Artificial Sequence
  Description of Artificial Sequence: Synthetic oligonucleotide
ggaugcuaccccagguucc

SEQ ID NO: 719801 - RNA, 19 nt, Artificial Sequence
  Description of Artificial Sequence: Synthetic oligonucleotide
cauagggaguaggauaugu

SEQ ID NO: 719802 - RNA, 19 nt, Artificial Sequence
  Description of Artificial Sequence: Synthetic oligonucleotide
gcccuaaaauauauucgug

SEQ ID NO: 719803 - RNA, 19 nt, Artificial Sequence
  Description of Artificial Sequence: Synthetic oligonucleotide
cuacagcccuaaaauauau

SEQ ID NO: 719804 - RNA, 19 nt, Artificial Sequence
  Description of Artificial Sequence: Synthetic oligonucleotide
ccuuuguccgaaccacacc

SEQ ID NO: 719805 - RNA, 19 nt, Artificial Sequence
  Description of Artificial Sequence: Synthetic oligonucleotide
cagcuucccauggaaccag

SEQ ID NO: 719806 - RNA, 19 nt, Artificial Sequence
  Description of Artificial Sequence: Synthetic oligonucleotide
uuccgauccacggguugcu

SEQ ID NO: 719807 - RNA, 19 nt, Artificial Sequence
  Description of Artificial Sequence: Synthetic oligonucleotide
aaggugucagcaaccccua

SEQ ID NO: 719808 - RNA, 19 nt, Artificial Sequence
  Description of Artificial Sequence: Synthetic oligonucleotide
ugcugcccuauaggcagug

SEQ ID NO: 719809 - RNA, 19 nt, Artificial Sequence
  Description of Artificial Sequence: Synthetic oligonucleotide
gagaguaccuacagaccua

SEQ ID NO: 719810 - RNA, 19 nt, Artificial Sequence
  Description of Artificial Sequence: Synthetic oligonucleotide
agacuguaacacacaugca

SEQ ID NO: 719811 - RNA, 19 nt, Artificial Sequence
  Description of Artificial Sequence: Synthetic oligonucleotide
gcuaaugaggugacugaca

SEQ ID NO: 719812 - RNA, 19 nt, Artificial Sequence
  Description of Artificial Sequence: Synthetic oligonucleotide
cauacacaccccucccaaa

SEQ ID NO: 719813 - RNA, 19 nt, Artificial Sequence
  Description of Artificial Sequence: Synthetic oligonucleotide
cugggguacccugcagacc

SEQ ID NO: 719814 - RNA, 19 nt, Artificial Sequence
  Description of Artificial Sequence: Synthetic oligonucleotide
gaugcuaccccagguuccu

SEQ ID NO: 719815 - RNA, 19 nt, Artificial Sequence
  Description of Artificial Sequence: Synthetic oligonucleotide
caccguugagcugcagcag

SEQ ID NO: 719816 - RNA, 19 nt, Artificial Sequence
  Description of Artificial Sequence: Synthetic oligonucleotide
guucgcugcccgcagagau

SEQ ID NO: 719817 - RNA, 19 nt, Artificial Sequence
  Description of Artificial Sequence: Synthetic oligonucleotide
gcccuauaggcaguguagc

SEQ ID NO: 719818 - RNA, 19 nt, Artificial Sequence
  Description of Artificial Sequence: Synthetic oligonucleotide
acccaccucgagguuaacu

SEQ ID NO: 719819 - RNA, 19 nt, Artificial Sequence
  Description of Artificial Sequence: Synthetic oligonucleotide
cagacgugggaggggcagg

SEQ ID NO: 719820 - RNA, 19 nt, Artificial Sequence
  Description of Artificial Sequence: Synthetic oligonucleotide
uccgauccacggguugcug

SEQ ID NO: 719821 - RNA, 19 nt, Artificial Sequence
  Description of Artificial Sequence: Synthetic oligonucleotide
cacugggccuaucacccca

SEQ ID NO: 719822 - RNA, 19 nt, Artificial Sequence
  Description of Artificial Sequence: Synthetic oligonucleotide
uggaaccaggacuccccuu

SEQ ID NO: 719823 - RNA, 19 nt, Artificial Sequence
  Description of Artificial Sequence: Synthetic oligonucleotide
agaccccuuggagaauaga

SEQ ID NO: 719824 - RNA, 19 nt, Artificial Sequence
  Description of Artificial Sequence: Synthetic oligonucleotide
agcaaccccuauccacaau

SEQ ID NO: 719825 - RNA, 19 nt, Artificial Sequence
  Description of Artificial Sequence: Synthetic oligonucleotide
aacccaccucgagguuaac

SEQ ID NO: 719826 - RNA, 19 nt, Artificial Sequence
  Description of Artificial Sequence: Synthetic oligonucleotide
caccucgagguuaacucua

SEQ ID NO: 719827 - RNA, 19 nt, Artificial Sequence
  Description of Artificial Sequence: Synthetic oligonucleotide
guggaggcaacaucuguuu

SEQ ID NO: 719828 - RNA, 19 nt, Artificial Sequence
  Description of Artificial Sequence: Synthetic oligonucleotide
cugcccuauaggcagugua

SEQ ID NO: 719829 - RNA, 19 nt, Artificial Sequence
  Description of Artificial Sequence: Synthetic oligonucleotide
agagugggucgagcagcuc

SEQ ID NO: 719830 - RNA, 19 nt, Artificial Sequence
  Description of Artificial Sequence: Synthetic oligonucleotide
agcaaggcagggauccgau

SEQ ID NO: 719831 - RNA, 19 nt, Artificial Sequence
  Description of Artificial Sequence: Synthetic oligonucleotide
gcaggcuuagaaauguaua

SEQ ID NO: 719832 - RNA, 19 nt, Artificial Sequence
  Description of Artificial Sequence: Synthetic oligonucleotide
cugggccuaucaccccagc

SEQ ID NO: 719833 - RNA, 19 nt, Artificial Sequence
  Description of Artificial Sequence: Synthetic oligonucleotide
ggcaagagaccacucugua

SEQ ID NO: 719834 - RNA, 19 nt, Artificial Sequence
  Description of Artificial Sequence: Synthetic oligonucleotide
ggugauccuuuguccgaac

SEQ ID NO: 719835 - RNA, 19 nt, Artificial Sequence
  Description of Artificial Sequence: Synthetic oligonucleotide
cccuuggagaauagagauc

SEQ ID NO: 719836 - RNA, 19 nt, Artificial Sequence
  Description of Artificial Sequence: Synthetic oligonucleotide
ggaaggauugggaggccca

SEQ ID NO: 719837 - RNA, 19 nt, Artificial Sequence
  Description of Artificial Sequence: Synthetic oligonucleotide
gcacaaaguugcauaggga

SEQ ID NO: 719838 - RNA, 19 nt, Artificial Sequence
  Description of Artificial Sequence: Synthetic oligonucleotide
gcacugccauuaauggaag

SEQ ID NO: 719839 - RNA, 19 nt, Artificial Sequence
  Description of Artificial Sequence: Synthetic oligonucleotide
gccuuacaaauccucgucu

SEQ ID NO: 719840 - RNA, 19 nt, Artificial Sequence
  Description of Artificial Sequence: Synthetic oligonucleotide
gcuaugcuuuggcuguaga

SEQ ID NO: 719841 - RNA, 19 nt, Artificial Sequence
  Description of Artificial Sequence: Synthetic oligonucleotide
ggugacugacacucucaaa

SEQ ID NO: 719842 - RNA, 19 nt, Artificial Sequence
  Description of Artificial Sequence: Synthetic oligonucleotide
cuaucaccccagcacauuu

SEQ ID NO: 719843 - RNA, 19 nt, Artificial Sequence
  Description of Artificial Sequence: Synthetic oligonucleotide
aguucgcugcccgcagaga

SEQ ID NO: 719844 - RNA, 19 nt, Artificial Sequence
  Description of Artificial Sequence: Synthetic oligonucleotide
gggccucucuacauagccc

SEQ ID NO: 719845 - RNA, 19 nt, Artificial Sequence
  Description of Artificial Sequence: Synthetic oligonucleotide
cggguugcuguagacacag

SEQ ID NO: 719846 - RNA, 19 nt, Artificial Sequence
  Description of Artificial Sequence: Synthetic oligonucleotide
cauacuggccagguguggu

SEQ ID NO: 719847 - RNA, 19 nt, Artificial Sequence
  Description of Artificial Sequence: Synthetic oligonucleotide
aagucaccguugagcugca

SEQ ID NO: 719848 - RNA, 19 nt, Artificial Sequence
  Description of Artificial Sequence: Synthetic oligonucleotide
agaccacucuguacauuaa

SEQ ID NO: 719849 - RNA, 19 nt, Artificial Sequence
  Description of Artificial Sequence: Synthetic oligonucleotide
ccuucucgaagccucaugu

SEQ ID NO: 719850 - RNA, 19 nt, Artificial Sequence
  Description of Artificial Sequence: Synthetic oligonucleotide
gcaugcugcccuauaggca

SEQ ID NO: 719851 - RNA, 19 nt, Artificial Sequence
  Description of Artificial Sequence: Synthetic oligonucleotide
gucacgccuuccgauccac

SEQ ID NO: 719852 - RNA, 19 nt, Artificial Sequence
  Description of Artificial Sequence: Synthetic oligonucleotide
caaagcggugauccuuugu

SEQ ID NO: 719853 - RNA, 19 nt, Artificial Sequence
  Description of Artificial Sequence: Synthetic oligonucleotide
ggaaacucaacgaggugau

SEQ ID NO: 719854 - RNA, 19 nt, Artificial Sequence
  Description of Artificial Sequence: Synthetic oligonucleotide
ccuuccgauccacggguug

SEQ ID NO: 719855 - RNA, 19 nt, Artificial Sequence
  Description of Artificial Sequence: Synthetic oligonucleotide
cucccaaaagugggagaca

SEQ ID NO: 719856 - RNA, 19 nt, Artificial Sequence
  Description of Artificial Sequence: Synthetic oligonucleotide
ccgcaaaacccaccucgag

SEQ ID NO: 719857 - RNA, 19 nt, Artificial Sequence
  Description of Artificial Sequence: Synthetic oligonucleotide
gcggugauccuuuguccga

SEQ ID NO: 719858 - RNA, 19 nt, Artificial Sequence
  Description of Artificial Sequence: Synthetic oligonucleotide
acggguugcuguagacaca

SEQ ID NO: 719859 - RNA, 19 nt, Artificial Sequence
  Description of Artificial Sequence: Synthetic oligonucleotide
cgaagccucaugucuacca

SEQ ID NO: 719860 - RNA, 19 nt, Artificial Sequence
  Description of Artificial Sequence: Synthetic oligonucleotide
aggcacccgaagggcaucu

SEQ ID NO: 719861 - RNA, 19 nt, Artificial Sequence
  Description of Artificial Sequence: Synthetic oligonucleotide
ccccuuggagaauagagau

SEQ ID NO: 719862 - RNA, 19 nt, Artificial Sequence
  Description of Artificial Sequence: Synthetic oligonucleotide
gugcaguuccagaccuaca

SEQ ID NO: 719863 - RNA, 19 nt, Artificial Sequence
  Description of Artificial Sequence: Synthetic oligonucleotide
gcaaggcagggauccgauc

SEQ ID NO: 719864 - RNA, 19 nt, Artificial Sequence
  Description of Artificial Sequence: Synthetic oligonucleotide
gcauagggaguaggauaug

SEQ ID NO: 719865 - RNA, 19 nt, Artificial Sequence
  Description of Artificial Sequence: Synthetic oligonucleotide
ggucacgccuuccgaucca

SEQ ID NO: 719866 - RNA, 19 nt, Artificial Sequence
  Description of Artificial Sequence: Synthetic oligonucleotide
gcauuggggauuguccacu

SEQ ID NO: 719867 - RNA, 19 nt, Artificial Sequence
  Description of Artificial Sequence: Synthetic oligonucleotide
gagugcaguuccagaccua

SEQ ID NO: 719868 - RNA, 19 nt, Artificial Sequence
  Description of Artificial Sequence: Synthetic oligonucleotide
gucucggggugcacugcca

SEQ ID NO: 719869 - RNA, 19 nt, Artificial Sequence
  Description of Artificial Sequence: Synthetic oligonucleotide
ccccaaccccagcuugccg

SEQ ID NO: 719870 - RNA, 19 nt, Artificial Sequence
  Description of Artificial Sequence: Synthetic oligonucleotide
augcugcccuauaggcagu

SEQ ID NO: 719871 - RNA, 19 nt, Artificial Sequence
  Description of Artificial Sequence: Synthetic oligonucleotide
ccuacagaccuaggagaca

SEQ ID NO: 719872 - RNA, 19 nt, Artificial Sequence
  Description of Artificial Sequence: Synthetic oligonucleotide
gguagcuaaugaggugacu

SEQ ID NO: 719873 - RNA, 19 nt, Artificial Sequence
  Description of Artificial Sequence: Synthetic oligonucleotide
ccccagguuccuaacuaaa

SEQ ID NO: 719874 - RNA, 19 nt, Artificial Sequence
  Description of Artificial Sequence: Synthetic oligonucleotide
gccucucuacauagcccug

SEQ ID NO: 719875 - RNA, 19 nt, Artificial Sequence
  Description of Artificial Sequence: Synthetic oligonucleotide
ccuugucuagauucuggau

SEQ ID NO: 719876 - RNA, 19 nt, Artificial Sequence
  Description of Artificial Sequence: Synthetic oligonucleotide
ccaccucgagguuaacucu

SEQ ID NO: 719877 - RNA, 19 nt, Artificial Sequence
  Description of Artificial Sequence: Synthetic oligonucleotide
ccacggguugcuguagaca

SEQ ID NO: 719878 - RNA, 19 nt, Artificial Sequence
  Description of Artificial Sequence: Synthetic oligonucleotide
ggacauggucugaggaggu

SEQ ID NO: 719879 - RNA, 19 nt, Artificial Sequence
  Description of Artificial Sequence: Synthetic oligonucleotide
gggguacccugcagaccag

SEQ ID NO: 719880 - RNA, 19 nt, Artificial Sequence
  Description of Artificial Sequence: Synthetic oligonucleotide
ggccgagguagaagaaaua

SEQ ID NO: 719881 - RNA, 19 nt, Artificial Sequence
  Description of Artificial Sequence: Synthetic oligonucleotide
gacgugggaggggcaggcu

SEQ ID NO: 719882 - RNA, 19 nt, Artificial Sequence
  Description of Artificial Sequence: Synthetic oligonucleotide
cgauccacggguugcugua

SEQ ID NO: 719883 - RNA, 19 nt, Artificial Sequence
  Description of Artificial Sequence: Synthetic oligonucleotide
cccgccggcucagcuuccc

SEQ ID NO: 719884 - RNA, 19 nt, Artificial Sequence
  Description of Artificial Sequence: Synthetic oligonucleotide
cugcagggagaagggcuau

SEQ ID NO: 719885 - RNA, 19 nt, Artificial Sequence
  Description of Artificial Sequence: Synthetic oligonucleotide
cgccuuccgauccacgggu

SEQ ID NO: 719886 - RNA, 19 nt, Artificial Sequence
  Description of Artificial Sequence: Synthetic oligonucleotide
cccugcagaccagggguaa

SEQ ID NO: 719887 - RNA, 19 nt, Artificial Sequence
  Description of Artificial Sequence: Synthetic oligonucleotide
gcugcccuauaggcagugu

SEQ ID NO: 719888 - RNA, 19 nt, Artificial Sequence
  Description of Artificial Sequence: Synthetic oligonucleotide
ccgccggcucagcuuccca

SEQ ID NO: 719889 - RNA, 19 nt, Artificial Sequence
  Description of Artificial Sequence: Synthetic oligonucleotide
cggggugcacugccauuaa

SEQ ID NO: 719890 - RNA, 19 nt, Artificial Sequence
  Description of Artificial Sequence: Synthetic oligonucleotide
auuaaauacauugagcugc

SEQ ID NO: 719891 - RNA, 19 nt, Artificial Sequence
  Description of Artificial Sequence: Synthetic oligonucleotide
aaaacuauauuuauugaac

SEQ ID NO: 719892 - RNA, 19 nt, Artificial Sequence
  Description of Artificial Sequence: Synthetic oligonucleotide
auuuggaauaccuagaaug

SEQ ID NO: 719893 - RNA, 19 nt, Artificial Sequence
  Description of Artificial Sequence: Synthetic oligonucleotide
uaaacuagcuuucugacca

SEQ ID NO: 719894 - RNA, 19 nt, Artificial Sequence
  Description of Artificial Sequence: Synthetic oligonucleotide
ucuaagaacaugaagggga

SEQ ID NO: 719895 - RNA, 19 nt, Artificial Sequence
  Description of Artificial Sequence: Synthetic oligonucleotide
uuucaaaugggcuacaaca

SEQ ID NO: 719896 - RNA, 19 nt, Artificial Sequence
  Description of Artificial Sequence: Synthetic oligonucleotide
ugaauuaaauacauugagc

SEQ ID NO: 719897 - RNA, 19 nt, Artificial Sequence
  Description of Artificial Sequence: Synthetic oligonucleotide
aauaacuuauuuugaagca

SEQ ID NO: 719898 - RNA, 19 nt, Artificial Sequence
  Description of Artificial Sequence: Synthetic oligonucleotide
aacaccaaagucuuaaagu

SEQ ID NO: 719899 - RNA, 19 nt, Artificial Sequence
  Description of Artificial Sequence: Synthetic oligonucleotide
uuuuaaacuagcuuucuga

SEQ ID NO: 719900 - RNA, 19 nt, Artificial Sequence
  Description of Artificial Sequence: Synthetic oligonucleotide
auucauuuggaauaccuag

SEQ ID NO: 719901 - RNA, 19 nt, Artificial Sequence
  Description of Artificial Sequence: Synthetic oligonucleotide
uuaaaguaaacuuuccuaa

SEQ ID NO: 719902 - RNA, 19 nt, Artificial Sequence
  Description of Artificial Sequence: Synthetic oligonucleotide
aaaauguggggaaaugggc

SEQ ID NO: 719903 - RNA, 19 nt, Artificial Sequence
  Description of Artificial Sequence: Synthetic oligonucleotide
guaaauuugaacaccaaag

SEQ ID NO: 719904 - RNA, 19 nt, Artificial Sequence
  Description of Artificial Sequence: Synthetic oligonucleotide
caucauaugacucauaaga

SEQ ID NO: 719905 - RNA, 19 nt, Artificial Sequence
  Description of Artificial Sequence: Synthetic oligonucleotide
uacauaguuacaacaguag

SEQ ID NO: 719906 - RNA, 19 nt, Artificial Sequence
  Description of Artificial Sequence: Synthetic oligonucleotide
ucauaauuugaugugaugu

SEQ ID NO: 719907 - RNA, 19 nt, Artificial Sequence
  Description of Artificial Sequence: Synthetic oligonucleotide
aauaaggaaauaauuacau

SEQ ID NO: 719908 - RNA, 19 nt, Artificial Sequence
  Description of Artificial Sequence: Synthetic oligonucleotide
uuuggaauaccuagaaugu

SEQ ID NO: 719909 - RNA, 19 nt, Artificial Sequence
  Description of Artificial Sequence: Synthetic oligonucleotide
auaagaacugcucauggca

SEQ ID NO: 719910 - RNA, 19 nt, Artificial Sequence
  Description of Artificial Sequence: Synthetic oligonucleotide
auaauuacauucaugacgu

SEQ ID NO: 719911 - RNA, 19 nt, Artificial Sequence
  Description of Artificial Sequence: Synthetic oligonucleotide
ugucgggagaacaugaggc

SEQ ID NO: 719912 - RNA, 19 nt, Artificial Sequence
  Description of Artificial Sequence: Synthetic oligonucleotide
uuuaaacuagcuuucugac

SEQ ID NO: 719913 - RNA, 19 nt, Artificial Sequence
  Description of Artificial Sequence: Synthetic oligonucleotide
auaauuugaugugauguac

SEQ ID NO: 719914 - RNA, 19 nt, Artificial Sequence
  Description of Artificial Sequence: Synthetic oligonucleotide
ucaauggguacauaguuac

SEQ ID NO: 719915 - RNA, 19 nt, Artificial Sequence
  Description of Artificial Sequence: Synthetic oligonucleotide
cucauaguaacccucuggg

SEQ ID NO: 719916 - RNA, 19 nt, Artificial Sequence
  Description of Artificial Sequence: Synthetic oligonucleotide
caucguacaguagagagcg

SEQ ID NO: 719917 - RNA, 19 nt, Artificial Sequence
  Description of Artificial Sequence: Synthetic oligonucleotide
ucugcuuuauaacaaguaa

SEQ ID NO: 719918 - RNA, 19 nt, Artificial Sequence
  Description of Artificial Sequence: Synthetic oligonucleotide
uuucugaccaaaucuaaga

SEQ ID NO: 719919 - RNA, 19 nt, Artificial Sequence
  Description of Artificial Sequence: Synthetic oligonucleotide
auggguguccaauauguac

SEQ ID NO: 719920 - RNA, 19 nt, Artificial Sequence
  Description of Artificial Sequence: Synthetic oligonucleotide
gagaauuuuccagaguccg

SEQ ID NO: 719921 - RNA, 19 nt, Artificial Sequence
  Description of Artificial Sequence: Synthetic oligonucleotide
acacgugucacacuugagg

SEQ ID NO: 719922 - RNA, 19 nt, Artificial Sequence
  Description of Artificial Sequence: Synthetic oligonucleotide
caaaugggcuacaacauag

SEQ ID NO: 719923 - RNA, 19 nt, Artificial Sequence
  Description of Artificial Sequence: Synthetic oligonucleotide
ucauaugacucauaagaac

SEQ ID NO: 719924 - RNA, 19 nt, Artificial Sequence
  Description of Artificial Sequence: Synthetic oligonucleotide
aacacaggagacuguggac

SEQ ID NO: 719925 - RNA, 19 nt, Artificial Sequence
  Description of Artificial Sequence: Synthetic oligonucleotide
ugaaguggcuagaaaaugu

SEQ ID NO: 719926 - RNA, 19 nt, Artificial Sequence
  Description of Artificial Sequence: Synthetic oligonucleotide
accaucguacaguagagag

SEQ ID NO: 719927 - RNA, 19 nt, Artificial Sequence
  Description of Artificial Sequence: Synthetic oligonucleotide
agaaaauguggggaaaugg

SEQ ID NO: 719928 - RNA, 19 nt, Artificial Sequence
  Description of Artificial Sequence: Synthetic oligonucleotide
uguauucgcagcaggaugu

SEQ ID NO: 719929 - RNA, 19 nt, Artificial Sequence
  Description of Artificial Sequence: Synthetic oligonucleotide
uuuccuauuacacgugacu

SEQ ID NO: 719930 - RNA, 19 nt, Artificial Sequence
  Description of Artificial Sequence: Synthetic oligonucleotide
ucgauggccaguccuaggg

SEQ ID NO: 719931 - RNA, 19 nt, Artificial Sequence
  Description of Artificial Sequence: Synthetic oligonucleotide
cugaccaaaucuaagaaca

SEQ ID NO: 719932 - RNA, 19 nt, Artificial Sequence
  Description of Artificial Sequence: Synthetic oligonucleotide
aguaaauuugaacaccaaa

SEQ ID NO: 719933 - RNA, 19 nt, Artificial Sequence
  Description of Artificial Sequence: Synthetic oligonucleotide
caaacuucugaagucaugc

SEQ ID NO: 719934 - RNA, 19 nt, Artificial Sequence
  Description of Artificial Sequence: Synthetic oligonucleotide
uaauuugaugugauguacu

SEQ ID NO: 719935 - RNA, 19 nt, Artificial Sequence
  Description of Artificial Sequence: Synthetic oligonucleotide
uguacucuggagcuuuucc

SEQ ID NO: 719936 - RNA, 19 nt, Artificial Sequence
  Description of Artificial Sequence: Synthetic oligonucleotide
uggguguccaauauguaca

SEQ ID NO: 719937 - RNA, 19 nt, Artificial Sequence
  Description of Artificial Sequence: Synthetic oligonucleotide
aagugaaucacaagccuag

SEQ ID NO: 719938 - RNA, 19 nt, Artificial Sequence
  Description of Artificial Sequence: Synthetic oligonucleotide
aguggcuagaaaauguggg

SEQ ID NO: 719939 - RNA, 19 nt, Artificial Sequence
  Description of Artificial Sequence: Synthetic oligonucleotide
uuugaagcaaauguuuuaa

SEQ ID NO: 719940 - RNA, 19 nt, Artificial Sequence
  Description of Artificial Sequence: Synthetic oligonucleotide
uugucaacccuuuuguuuc

SEQ ID NO: 719941 - RNA, 19 nt, Artificial Sequence
  Description of Artificial Sequence: Synthetic oligonucleotide
ucagacucaguccaaacuu

SEQ ID NO: 719942 - RNA, 19 nt, Artificial Sequence
  Description of Artificial Sequence: Synthetic oligonucleotide
ucaucauaugacucauaag

SEQ ID NO: 719943 - RNA, 19 nt, Artificial Sequence
  Description of Artificial Sequence: Synthetic oligonucleotide
cauaagaacugcucauggc

SEQ ID NO: 719944 - RNA, 19 nt, Artificial Sequence
  Description of Artificial Sequence: Synthetic oligonucleotide
acaccaaagucuuaaagua

SEQ ID NO: 719945 - RNA, 19 nt, Artificial Sequence
  Description of Artificial Sequence: Synthetic oligonucleotide
uccuauuacacgugacucc

SEQ ID NO: 719946 - RNA, 19 nt, Artificial Sequence
  Description of Artificial Sequence: Synthetic oligonucleotide
agagcgugcacacaagcug

SEQ ID NO: 719947 - RNA, 19 nt, Artificial Sequence
  Description of Artificial Sequence: Synthetic oligonucleotide
uucuuagcacaaauguaga

SEQ ID NO: 719948 - RNA, 19 nt, Artificial Sequence
  Description of Artificial Sequence: Synthetic oligonucleotide
caugcauguggcuuuuggg

SEQ ID NO: 719949 - RNA, 19 nt, Artificial Sequence
  Description of Artificial Sequence: Synthetic oligonucleotide
gacucauaagaacugcuca

SEQ ID NO: 719950 - RNA, 19 nt, Artificial Sequence
  Description of Artificial Sequence: Synthetic oligonucleotide
aaaaggcgaaguucgacua

SEQ ID NO: 719951 - RNA, 19 nt, Artificial Sequence
  Description of Artificial Sequence: Synthetic oligonucleotide
accaaaucuaagaacauga

SEQ ID NO: 719952 - RNA, 19 nt, Artificial Sequence
  Description of Artificial Sequence: Synthetic oligonucleotide
aagaacaccugugccauug

SEQ ID NO: 719953 - RNA, 19 nt, Artificial Sequence
  Description of Artificial Sequence: Synthetic oligonucleotide
uuuccagaguccgaugccg

SEQ ID NO: 719954 - RNA, 19 nt, Artificial Sequence
  Description of Artificial Sequence: Synthetic oligonucleotide
acaagccuaguucuuagca

SEQ ID NO: 719955 - RNA, 19 nt, Artificial Sequence
  Description of Artificial Sequence: Synthetic oligonucleotide
cauaugacucauaagaacu

SEQ ID NO: 719956 - RNA, 19 nt, Artificial Sequence
  Description of Artificial Sequence: Synthetic oligonucleotide
agucauuucaaaugggcua

SEQ ID NO: 719957 - RNA, 19 nt, Artificial Sequence
  Description of Artificial Sequence: Synthetic oligonucleotide
caaguuccgccaaugggcg

SEQ ID NO: 719958 - RNA, 19 nt, Artificial Sequence
  Description of Artificial Sequence: Synthetic oligonucleotide
aagaacaugaaggggaguu

SEQ ID NO: 719959 - RNA, 19 nt, Artificial Sequence
  Description of Artificial Sequence: Synthetic oligonucleotide
auaguaacccucugggaga

SEQ ID NO: 719960 - RNA, 19 nt, Artificial Sequence
  Description of Artificial Sequence: Synthetic oligonucleotide
aaugggcuacaacauaguu

SEQ ID NO: 719961 - RNA, 19 nt, Artificial Sequence
  Description of Artificial Sequence: Synthetic oligonucleotide
auacacaaacaaguuccgc

SEQ ID NO: 719962 - RNA, 19 nt, Artificial Sequence
  Description of Artificial Sequence: Synthetic oligonucleotide
aaagcccuuggaugaugac

SEQ ID NO: 719963 - RNA, 19 nt, Artificial Sequence
  Description of Artificial Sequence: Synthetic oligonucleotide
ugacucauaagaacugcuc

SEQ ID NO: 719964 - RNA, 19 nt, Artificial Sequence
  Description of Artificial Sequence: Synthetic oligonucleotide
uuuuccuauuacacgugac

SEQ ID NO: 719965 - RNA, 19 nt, Artificial Sequence
  Description of Artificial Sequence: Synthetic oligonucleotide
aaugggcgccgucaauggg

SEQ ID NO: 719966 - RNA, 19 nt, Artificial Sequence
  Description of Artificial Sequence: Synthetic oligonucleotide
acucaguccaaacuucuga

SEQ ID NO: 719967 - RNA, 19 nt, Artificial Sequence
  Description of Artificial Sequence: Synthetic oligonucleotide
ucacaagccuaguucuuag

SEQ ID NO: 719968 - RNA, 19 nt, Artificial Sequence
  Description of Artificial Sequence: Synthetic oligonucleotide
aacacugugugaauccuga

SEQ ID NO: 719969 - RNA, 19 nt, Artificial Sequence
  Description of Artificial Sequence: Synthetic oligonucleotide
ucaaaugggcuacaacaua

SEQ ID NO: 719970 - RNA, 19 nt, Artificial Sequence
  Description of Artificial Sequence: Synthetic oligonucleotide
ucuuagcacaaauguagaa

SEQ ID NO: 719971 - RNA, 19 nt, Artificial Sequence
  Description of Artificial Sequence: Synthetic oligonucleotide
agcugcacaaucaaaauau

SEQ ID NO: 719972 - RNA, 19 nt, Artificial Sequence
  Description of Artificial Sequence: Synthetic oligonucleotide
auuaauacacaaacaaguu

SEQ ID NO: 719973 - RNA, 19 nt, Artificial Sequence
  Description of Artificial Sequence: Synthetic oligonucleotide
gaaucacaagccuaguucu

SEQ ID NO: 719974 - RNA, 19 nt, Artificial Sequence
  Description of Artificial Sequence: Synthetic oligonucleotide
aguuccgccaaugggcgcc

SEQ ID NO: 719975 - RNA, 19 nt, Artificial Sequence
  Description of Artificial Sequence: Synthetic oligonucleotide
acacgugacuccauuuucc

SEQ ID NO: 719976 - RNA, 19 nt, Artificial Sequence
  Description of Artificial Sequence: Synthetic oligonucleotide
gucagcgucagacucaguc

SEQ ID NO: 719977 - RNA, 19 nt, Artificial Sequence
  Description of Artificial Sequence: Synthetic oligonucleotide
uguucacagguaagggccc

SEQ ID NO: 719978 - RNA, 19 nt, Artificial Sequence
  Description of Artificial Sequence: Synthetic oligonucleotide
ucauaguaacccucuggga

SEQ ID NO: 719979 - RNA, 19 nt, Artificial Sequence
  Description of Artificial Sequence: Synthetic oligonucleotide
ggagucauaauuugaugug

SEQ ID NO: 719980 - RNA, 19 nt, Artificial Sequence
  Description of Artificial Sequence: Synthetic oligonucleotide
uuaugcagcucuguggaac

SEQ ID NO: 719981 - RNA, 19 nt, Artificial Sequence
  Description of Artificial Sequence: Synthetic oligonucleotide
acucauaagaacugcucau

SEQ ID NO: 719982 - RNA, 19 nt, Artificial Sequence
  Description of Artificial Sequence: Synthetic oligonucleotide
ugggaccuacuuuaugcag

SEQ ID NO: 719983 - RNA, 19 nt, Artificial Sequence
  Description of Artificial Sequence: Synthetic oligonucleotide
gaccaaaucuaagaacaug

SEQ ID NO: 719984 - RNA, 19 nt, Artificial Sequence
  Description of Artificial Sequence: Synthetic oligonucleotide
uaaagggcaccaucguaca

SEQ ID NO: 719985 - RNA, 19 nt, Artificial Sequence
  Description of Artificial Sequence: Synthetic oligonucleotide
uuccuauuacacgugacuc

SEQ ID NO: 719986 - RNA, 19 nt, Artificial Sequence
  Description of Artificial Sequence: Synthetic oligonucleotide
ucguacaguagagagcgug

SEQ ID NO: 719987 - RNA, 19 nt, Artificial Sequence
  Description of Artificial Sequence: Synthetic oligonucleotide
uacauucaugacgugaaaa

SEQ ID NO: 719988 - RNA, 19 nt, Artificial Sequence
  Description of Artificial Sequence: Synthetic oligonucleotide
aacaccugugccauugaug

SEQ ID NO: 719989 - RNA, 19 nt, Artificial Sequence
  Description of Artificial Sequence: Synthetic oligonucleotide
caagccuaguucuuagcac

SEQ ID NO: 719990 - RNA, 19 nt, Artificial Sequence
  Description of Artificial Sequence: Synthetic oligonucleotide
uuacacgugacuccauuuu

SEQ ID NO: 719991 - RNA, 19 nt, Artificial Sequence
  Description of Artificial Sequence: Synthetic oligonucleotide
ugaugacuguauucgcagc

SEQ ID NO: 719992 - RNA, 19 nt, Artificial Sequence
  Description of Artificial Sequence: Synthetic oligonucleotide
cuguauucgcagcaggaug

SEQ ID NO: 719993 - RNA, 19 nt, Artificial Sequence
  Description of Artificial Sequence: Synthetic oligonucleotide
acuguggacuugauguccc

SEQ ID NO: 719994 - RNA, 19 nt, Artificial Sequence
  Description of Artificial Sequence: Synthetic oligonucleotide
uacacgugacuccauuuuc

SEQ ID NO: 719995 - RNA, 19 nt, Artificial Sequence
  Description of Artificial Sequence: Synthetic oligonucleotide
ugcauguggcuuuugggaa

SEQ ID NO: 719996 - RNA, 19 nt, Artificial Sequence
  Description of Artificial Sequence: Synthetic oligonucleotide
gagcgugcacacaagcugg

SEQ ID NO: 719997 - RNA, 19 nt, Artificial Sequence
  Description of Artificial Sequence: Synthetic oligonucleotide
uaugcagcucuguggaacu

SEQ ID NO: 719998 - RNA, 19 nt, Artificial Sequence
  Description of Artificial Sequence: Synthetic oligonucleotide
uggcuagaaaaugugggga

SEQ ID NO: 719999 - RNA, 19 nt, Artificial Sequence
  Description of Artificial Sequence: Synthetic oligonucleotide
gcucaggccacuuugggag

SEQ ID NO: 720000 - RNA, 19 nt, Artificial Sequence
  Description of Artificial Sequence: Synthetic oligonucleotide
ugucgguaaggguggaggc

SEQ ID NO: 720001 - RNA, 19 nt, Artificial Sequence
  Description of Artificial Sequence: Synthetic oligonucleotide
ggaugaaguggcuagaaaa

SEQ ID NO: 720002 - RNA, 19 nt, Artificial Sequence
  Description of Artificial Sequence: Synthetic oligonucleotide
uguggacuugauguccccg

SEQ ID NO: 720003 - RNA, 19 nt, Artificial Sequence
  Description of Artificial Sequence: Synthetic oligonucleotide
ugugucuuugcaagauuau

SEQ ID NO: 720004 - RNA, 19 nt, Artificial Sequence
  Description of Artificial Sequence: Synthetic oligonucleotide
cugcuuuauaacaaguaaa

SEQ ID NO: 720005 - RNA, 19 nt, Artificial Sequence
  Description of Artificial Sequence: Synthetic oligonucleotide
auaugacucauaagaacug

SEQ ID NO: 720006 - RNA, 19 nt, Artificial Sequence
  Description of Artificial Sequence: Synthetic oligonucleotide
cacacaagcuggccaaggg

SEQ ID NO: 720007 - RNA, 19 nt, Artificial Sequence
  Description of Artificial Sequence: Synthetic oligonucleotide
acaguagagagcgugcaca

SEQ ID NO: 720008 - RNA, 19 nt, Artificial Sequence
  Description of Artificial Sequence: Synthetic oligonucleotide
cugucgggagaacaugagg

SEQ ID NO: 720009 - RNA, 19 nt, Artificial Sequence
  Description of Artificial Sequence: Synthetic oligonucleotide
ugagaacacugugugaauc

SEQ ID NO: 720010 - RNA, 19 nt, Artificial Sequence
  Description of Artificial Sequence: Synthetic oligonucleotide
uugggaggcacacguguca

SEQ ID NO: 720011 - RNA, 19 nt, Artificial Sequence
  Description of Artificial Sequence: Synthetic oligonucleotide
guagagagcgugcacacaa

SEQ ID NO: 720012 - RNA, 19 nt, Artificial Sequence
  Description of Artificial Sequence: Synthetic oligonucleotide
ugcaagucucuuugcauaa

SEQ ID NO: 720013 - RNA, 19 nt, Artificial Sequence
  Description of Artificial Sequence: Synthetic oligonucleotide
gaauaccuagaauguaaaa

SEQ ID NO: 720014 - RNA, 19 nt, Artificial Sequence
  Description of Artificial Sequence: Synthetic oligonucleotide
aguugaugugagguacucg

SEQ ID NO: 720015 - RNA, 19 nt, Artificial Sequence
  Description of Artificial Sequence: Synthetic oligonucleotide
cucugaagacaauuucuuc

SEQ ID NO: 720016 - RNA, 19 nt, Artificial Sequence
  Description of Artificial Sequence: Synthetic oligonucleotide
caaugggcgccgucaaugg

SEQ ID NO: 720017 - RNA, 19 nt, Artificial Sequence
  Description of Artificial Sequence: Synthetic oligonucleotide
uacaguagagagcgugcac

SEQ ID NO: 720018 - RNA, 19 nt, Artificial Sequence
  Description of Artificial Sequence: Synthetic oligonucleotide
gacuguggacuugaugucc

SEQ ID NO: 720019 - RNA, 19 nt, Artificial Sequence
  Description of Artificial Sequence: Synthetic oligonucleotide
agccgcacuguucacaggu

SEQ ID NO: 720020 - RNA, 19 nt, Artificial Sequence
  Description of Artificial Sequence: Synthetic oligonucleotide
ucucauggguguccaauau

SEQ ID NO: 720021 - RNA, 19 nt, Artificial Sequence
  Description of Artificial Sequence: Synthetic oligonucleotide
ugaccaaaucuaagaacau

SEQ ID NO: 720022 - RNA, 19 nt, Artificial Sequence
  Description of Artificial Sequence: Synthetic oligonucleotide
ugauguccccgacuugggc

SEQ ID NO: 720023 - RNA, 19 nt, Artificial Sequence
  Description of Artificial Sequence: Synthetic oligonucleotide
gaaugagaacacuguguga

SEQ ID NO: 720024 - RNA, 19 nt, Artificial Sequence
  Description of Artificial Sequence: Synthetic oligonucleotide
uuacauucaugacgugaaa

SEQ ID NO: 720025 - RNA, 19 nt, Artificial Sequence
  Description of Artificial Sequence: Synthetic oligonucleotide
agguaagggccccucagca

SEQ ID NO: 720026 - RNA, 19 nt, Artificial Sequence
  Description of Artificial Sequence: Synthetic oligonucleotide
uccuaaagggcaccaucgu

SEQ ID NO: 720027 - RNA, 19 nt, Artificial Sequence
  Description of Artificial Sequence: Synthetic oligonucleotide
uagagagcgugcacacaag

SEQ ID NO: 720028 - RNA, 19 nt, Artificial Sequence
  Description of Artificial Sequence: Synthetic oligonucleotide
uggaugaaguggcuagaaa

SEQ ID NO: 720029 - RNA, 19 nt, Artificial Sequence
  Description of Artificial Sequence: Synthetic oligonucleotide
uuugggaggcacacguguc

SEQ ID NO: 720030 - RNA, 19 nt, Artificial Sequence
  Description of Artificial Sequence: Synthetic oligonucleotide
aucauaugacucauaagaa

SEQ ID NO: 720031 - RNA, 19 nt, Artificial Sequence
  Description of Artificial Sequence: Synthetic oligonucleotide
gccgucaauggguacauag

SEQ ID NO: 720032 - RNA, 19 nt, Artificial Sequence
  Description of Artificial Sequence: Synthetic oligonucleotide
uggcaucggagucauaauu

SEQ ID NO: 720033 - RNA, 19 nt, Artificial Sequence
  Description of Artificial Sequence: Synthetic oligonucleotide
guaagggccccucagcauc

SEQ ID NO: 720034 - RNA, 19 nt, Artificial Sequence
  Description of Artificial Sequence: Synthetic oligonucleotide
cuggccaagggucagcguc

SEQ ID NO: 720035 - RNA, 19 nt, Artificial Sequence
  Description of Artificial Sequence: Synthetic oligonucleotide
uccaaacuucugaagucau

SEQ ID NO: 720036 - RNA, 19 nt, Artificial Sequence
  Description of Artificial Sequence: Synthetic oligonucleotide
augccgaaacacaggagac

SEQ ID NO: 720037 - RNA, 19 nt, Artificial Sequence
  Description of Artificial Sequence: Synthetic oligonucleotide
gaagucaugcucaggccac

SEQ ID NO: 720038 - RNA, 19 nt, Artificial Sequence
  Description of Artificial Sequence: Synthetic oligonucleotide
aaaugggcuacaacauagu

SEQ ID NO: 720039 - RNA, 19 nt, Artificial Sequence
  Description of Artificial Sequence: Synthetic oligonucleotide
ccacgagcaauucauuugg

SEQ ID NO: 720040 - RNA, 19 nt, Artificial Sequence
  Description of Artificial Sequence: Synthetic oligonucleotide
cuacaacauaguuaauuaa

SEQ ID NO: 720041 - RNA, 19 nt, Artificial Sequence
  Description of Artificial Sequence: Synthetic oligonucleotide
cccgacuugggcucgaugg

SEQ ID NO: 720042 - RNA, 19 nt, Artificial Sequence
  Description of Artificial Sequence: Synthetic oligonucleotide
gcuacaacauaguuaauua

SEQ ID NO: 720043 - RNA, 19 nt, Artificial Sequence
  Description of Artificial Sequence: Synthetic oligonucleotide
cagacucaguccaaacuuc

SEQ ID NO: 720044 - RNA, 19 nt, Artificial Sequence
  Description of Artificial Sequence: Synthetic oligonucleotide
cauugcaagucucuuugca

SEQ ID NO: 720045 - RNA, 19 nt, Artificial Sequence
  Description of Artificial Sequence: Synthetic oligonucleotide
agagccacgagcaauucau

SEQ ID NO: 720046 - RNA, 19 nt, Artificial Sequence
  Description of Artificial Sequence: Synthetic oligonucleotide
gaguccgaugccgaaacac

SEQ ID NO: 720047 - RNA, 19 nt, Artificial Sequence
  Description of Artificial Sequence: Synthetic oligonucleotide
uaguaacccucugggagag

SEQ ID NO: 720048 - RNA, 19 nt, Artificial Sequence
  Description of Artificial Sequence: Synthetic oligonucleotide
uaauuacauucaugacgug

SEQ ID NO: 720049 - RNA, 19 nt, Artificial Sequence
  Description of Artificial Sequence: Synthetic oligonucleotide
ugggagaauuuuccagagu

SEQ ID NO: 720050 - RNA, 19 nt, Artificial Sequence
  Description of Artificial Sequence: Synthetic oligonucleotide
guacauaguuacaacagua

SEQ ID NO: 720051 - RNA, 19 nt, Artificial Sequence
  Description of Artificial Sequence: Synthetic oligonucleotide
cuuuuccuauuacacguga

SEQ ID NO: 720052 - RNA, 19 nt, Artificial Sequence
  Description of Artificial Sequence: Synthetic oligonucleotide
cucauggguguccaauaug

SEQ ID NO: 720053 - RNA, 19 nt, Artificial Sequence
  Description of Artificial Sequence: Synthetic oligonucleotide
cagaguccgaugccgaaac

SEQ ID NO: 720054 - RNA, 19 nt, Artificial Sequence
  Description of Artificial Sequence: Synthetic oligonucleotide
caguagagagcgugcacac

SEQ ID NO: 720055 - RNA, 19 nt, Artificial Sequence
  Description of Artificial Sequence: Synthetic oligonucleotide
cacaagccuaguucuuagc

SEQ ID NO: 720056 - RNA, 19 nt, Artificial Sequence
  Description of Artificial Sequence: Synthetic oligonucleotide
cauggcaucggagucauaa

SEQ ID NO: 720057 - RNA, 19 nt, Artificial Sequence
  Description of Artificial Sequence: Synthetic oligonucleotide
aaacuagcuuucugaccaa

SEQ ID NO: 720058 - RNA, 19 nt, Artificial Sequence
  Description of Artificial Sequence: Synthetic oligonucleotide
aucggagucauaauuugau

SEQ ID NO: 720059 - RNA, 19 nt, Artificial Sequence
  Description of Artificial Sequence: Synthetic oligonucleotide
caagugaaucacaagccua

SEQ ID NO: 720060 - RNA, 19 nt, Artificial Sequence
  Description of Artificial Sequence: Synthetic oligonucleotide
gaacacugugugaauccug

SEQ ID NO: 720061 - RNA, 19 nt, Artificial Sequence
  Description of Artificial Sequence: Synthetic oligonucleotide
gauguccccgacuugggcu

SEQ ID NO: 720062 - RNA, 19 nt, Artificial Sequence
  Description of Artificial Sequence: Synthetic oligonucleotide
uuggaauaccuagaaugua

SEQ ID NO: 720063 - RNA, 19 nt, Artificial Sequence
  Description of Artificial Sequence: Synthetic oligonucleotide
ucuucaggacagccgcacu

SEQ ID NO: 720064 - RNA, 19 nt, Artificial Sequence
  Description of Artificial Sequence: Synthetic oligonucleotide
agucauaauuugaugugau

SEQ ID NO: 720065 - RNA, 19 nt, Artificial Sequence
  Description of Artificial Sequence: Synthetic oligonucleotide
uuuaugcagcucuguggaa

SEQ ID NO: 720066 - RNA, 19 nt, Artificial Sequence
  Description of Artificial Sequence: Synthetic oligonucleotide
caucacuugugucacagcu

SEQ ID NO: 720067 - RNA, 19 nt, Artificial Sequence
  Description of Artificial Sequence: Synthetic oligonucleotide
augacucauaagaacugcu

SEQ ID NO: 720068 - RNA, 19 nt, Artificial Sequence
  Description of Artificial Sequence: Synthetic oligonucleotide
acgugucacacuugaggcu

SEQ ID NO: 720069 - RNA, 19 nt, Artificial Sequence
  Description of Artificial Sequence: Synthetic oligonucleotide
ccugguuccacacaaagaa

SEQ ID NO: 720070 - RNA, 19 nt, Artificial Sequence
  Description of Artificial Sequence: Synthetic oligonucleotide
aggguauucagaacaacuu

SEQ ID NO: 720071 - RNA, 19 nt, Artificial Sequence
  Description of Artificial Sequence: Synthetic oligonucleotide
ggucauagaaugagaacac

SEQ ID NO: 720072 - RNA, 19 nt, Artificial Sequence
  Description of Artificial Sequence: Synthetic oligonucleotide
uauucgcagcaggauguug

SEQ ID NO: 720073 - RNA, 19 nt, Artificial Sequence
  Description of Artificial Sequence: Synthetic oligonucleotide
ugucaacccuuuuguuucu

SEQ ID NO: 720074 - RNA, 19 nt, Artificial Sequence
  Description of Artificial Sequence: Synthetic oligonucleotide
gaauuuuccagaguccgau

SEQ ID NO: 720075 - RNA, 19 nt, Artificial Sequence
  Description of Artificial Sequence: Synthetic oligonucleotide
aguccuagggugacaccac

SEQ ID NO: 720076 - RNA, 19 nt, Artificial Sequence
  Description of Artificial Sequence: Synthetic oligonucleotide
agccacgagcaauucauuu

SEQ ID NO: 720077 - RNA, 19 nt, Artificial Sequence
  Description of Artificial Sequence: Synthetic oligonucleotide
gacucagcggcacggcuuc

SEQ ID NO: 720078 - RNA, 19 nt, Artificial Sequence
  Description of Artificial Sequence: Synthetic oligonucleotide
gguggcaguaugcagucuc

SEQ ID NO: 720079 - RNA, 19 nt, Artificial Sequence
  Description of Artificial Sequence: Synthetic oligonucleotide
ugccgaaacacaggagacu

SEQ ID NO: 720080 - RNA, 19 nt, Artificial Sequence
  Description of Artificial Sequence: Synthetic oligonucleotide
augggcuacaacauaguua

SEQ ID NO: 720081 - RNA, 19 nt, Artificial Sequence
  Description of Artificial Sequence: Synthetic oligonucleotide
ccaucguacaguagagagc

SEQ ID NO: 720082 - RNA, 19 nt, Artificial Sequence
  Description of Artificial Sequence: Synthetic oligonucleotide
gaugucucaugggugucca

SEQ ID NO: 720083 - RNA, 19 nt, Artificial Sequence
  Description of Artificial Sequence: Synthetic oligonucleotide
caguccaaacuucugaagu

SEQ ID NO: 720084 - RNA, 19 nt, Artificial Sequence
  Description of Artificial Sequence: Synthetic oligonucleotide
aggggucauagaaugagaa

SEQ ID NO: 720085 - RNA, 19 nt, Artificial Sequence
  Description of Artificial Sequence: Synthetic oligonucleotide
agcacgugcccacggcaag

SEQ ID NO: 720086 - RNA, 19 nt, Artificial Sequence
  Description of Artificial Sequence: Synthetic oligonucleotide
ggagagaggaugucgguaa

SEQ ID NO: 720087 - RNA, 19 nt, Artificial Sequence
  Description of Artificial Sequence: Synthetic oligonucleotide
aguccgaugccgaaacaca

SEQ ID NO: 720088 - RNA, 19 nt, Artificial Sequence
  Description of Artificial Sequence: Synthetic oligonucleotide
gggaccuacuuuaugcagc

SEQ ID NO: 720089 - RNA, 19 nt, Artificial Sequence
  Description of Artificial Sequence: Synthetic oligonucleotide
acugucgggagaacaugag

SEQ ID NO: 720090 - RNA, 19 nt, Artificial Sequence
  Description of Artificial Sequence: Synthetic oligonucleotide
cacugucgggagaacauga

SEQ ID NO: 720091 - RNA, 19 nt, Artificial Sequence
  Description of Artificial Sequence: Synthetic oligonucleotide
cugggaccuacuuuaugca

SEQ ID NO: 720092 - RNA, 19 nt, Artificial Sequence
  Description of Artificial Sequence: Synthetic oligonucleotide
aggcccgcugucaggaggc

SEQ ID NO: 720093 - RNA, 19 nt, Artificial Sequence
  Description of Artificial Sequence: Synthetic oligonucleotide
gguauucagaacaacuugu

SEQ ID NO: 720094 - RNA, 19 nt, Artificial Sequence
  Description of Artificial Sequence: Synthetic oligonucleotide
cacacgugucacacuugag

SEQ ID NO: 720095 - RNA, 19 nt, Artificial Sequence
  Description of Artificial Sequence: Synthetic oligonucleotide
gucgguaaggguggaggcc

SEQ ID NO: 720096 - RNA, 19 nt, Artificial Sequence
  Description of Artificial Sequence: Synthetic oligonucleotide
uaaauacauugagcugcac

SEQ ID NO: 720097 - RNA, 19 nt, Artificial Sequence
  Description of Artificial Sequence: Synthetic oligonucleotide
guccuagggugacaccacc

SEQ ID NO: 720098 - RNA, 19 nt, Artificial Sequence
  Description of Artificial Sequence: Synthetic oligonucleotide
aucacaagccuaguucuua

SEQ ID NO: 720099 - RNA, 19 nt, Artificial Sequence
  Description of Artificial Sequence: Synthetic oligonucleotide
ccuacuuuaugcagcucug

SEQ ID NO: 720100 - RNA, 19 nt, Artificial Sequence
  Description of Artificial Sequence: Synthetic oligonucleotide
uccagaguccgaugccgaa

SEQ ID NO: 720101 - RNA, 19 nt, Artificial Sequence
  Description of Artificial Sequence: Synthetic oligonucleotide
guacaguagagagcgugca

SEQ ID NO: 720102 - RNA, 19 nt, Artificial Sequence
  Description of Artificial Sequence: Synthetic oligonucleotide
auggcaucggagucauaau

SEQ ID NO: 720103 - RNA, 19 nt, Artificial Sequence
  Description of Artificial Sequence: Synthetic oligonucleotide
gucaauggguacauaguua

SEQ ID NO: 720104 - RNA, 19 nt, Artificial Sequence
  Description of Artificial Sequence: Synthetic oligonucleotide
aggaugucucauggguguc

SEQ ID NO: 720105 - RNA, 19 nt, Artificial Sequence
  Description of Artificial Sequence: Synthetic oligonucleotide
auacauugagcugcacaau

SEQ ID NO: 720106 - RNA, 19 nt, Artificial Sequence
  Description of Artificial Sequence: Synthetic oligonucleotide
ccaaggucaagugaaucac

SEQ ID NO: 720107 - RNA, 19 nt, Artificial Sequence
  Description of Artificial Sequence: Synthetic oligonucleotide
aagucaugcucaggccacu

SEQ ID NO: 720108 - RNA, 19 nt, Artificial Sequence
  Description of Artificial Sequence: Synthetic oligonucleotide
gugcacacaagcuggccaa

SEQ ID NO: 720109 - RNA, 19 nt, Artificial Sequence
  Description of Artificial Sequence: Synthetic oligonucleotide
cguacaguagagagcgugc

SEQ ID NO: 720110 - RNA, 19 nt, Artificial Sequence
  Description of Artificial Sequence: Synthetic oligonucleotide
aguagagagcgugcacaca

SEQ ID NO: 720111 - RNA, 19 nt, Artificial Sequence
  Description of Artificial Sequence: Synthetic oligonucleotide
acuagcuuucugaccaaau

SEQ ID NO: 720112 - RNA, 19 nt, Artificial Sequence
  Description of Artificial Sequence: Synthetic oligonucleotide
augggcgccgucaaugggu

SEQ ID NO: 720113 - RNA, 19 nt, Artificial Sequence
  Description of Artificial Sequence: Synthetic oligonucleotide
gggaaaugggcugaaaacu

SEQ ID NO: 720114 - RNA, 19 nt, Artificial Sequence
  Description of Artificial Sequence: Synthetic oligonucleotide
caguugaugugagguacuc

SEQ ID NO: 720115 - RNA, 19 nt, Artificial Sequence
  Description of Artificial Sequence: Synthetic oligonucleotide
ggaauaccuagaauguaaa

SEQ ID NO: 720116 - RNA, 19 nt, Artificial Sequence
  Description of Artificial Sequence: Synthetic oligonucleotide
caguaugcagucucugucu

SEQ ID NO: 720117 - RNA, 19 nt, Artificial Sequence
  Description of Artificial Sequence: Synthetic oligonucleotide
ggaaaugggcugaaaacua

SEQ ID NO: 720118 - RNA, 19 nt, Artificial Sequence
  Description of Artificial Sequence: Synthetic oligonucleotide
ccugacaggaugucucaug

SEQ ID NO: 720119 - RNA, 19 nt, Artificial Sequence
  Description of Artificial Sequence: Synthetic oligonucleotide
ugggcgccgucaaugggua

SEQ ID NO: 720120 - RNA, 19 nt, Artificial Sequence
  Description of Artificial Sequence: Synthetic oligonucleotide
caccugugccauugauggc

SEQ ID NO: 720121 - RNA, 19 nt, Artificial Sequence
  Description of Artificial Sequence: Synthetic oligonucleotide
ggacacaguucccuuggca

SEQ ID NO: 720122 - RNA, 19 nt, Artificial Sequence
  Description of Artificial Sequence: Synthetic oligonucleotide
ugggcucgauggccagucc

SEQ ID NO: 720123 - RNA, 19 nt, Artificial Sequence
  Description of Artificial Sequence: Synthetic oligonucleotide
ccuauuacacgugacucca

SEQ ID NO: 720124 - RNA, 19 nt, Artificial Sequence
  Description of Artificial Sequence: Synthetic oligonucleotide
caaagaacaccugugccau

SEQ ID NO: 720125 - RNA, 19 nt, Artificial Sequence
  Description of Artificial Sequence: Synthetic oligonucleotide
gucgggagaacaugaggcu

SEQ ID NO: 720126 - RNA, 19 nt, Artificial Sequence
  Description of Artificial Sequence: Synthetic oligonucleotide
ccaaugggcgccgucaaug

SEQ ID NO: 720127 - RNA, 19 nt, Artificial Sequence
  Description of Artificial Sequence: Synthetic oligonucleotide
cacaaacaaguuccgccaa

SEQ ID NO: 720128 - RNA, 19 nt, Artificial Sequence
  Description of Artificial Sequence: Synthetic oligonucleotide
gagagcgugcacacaagcu

SEQ ID NO: 720129 - RNA, 19 nt, Artificial Sequence
  Description of Artificial Sequence: Synthetic oligonucleotide
gcaccaucguacaguagag

SEQ ID NO: 720130 - RNA, 19 nt, Artificial Sequence
  Description of Artificial Sequence: Synthetic oligonucleotide
ggaugucucaugggugucc

SEQ ID NO: 720131 - RNA, 19 nt, Artificial Sequence
  Description of Artificial Sequence: Synthetic oligonucleotide
cacgagcaauucauuugga

SEQ ID NO: 720132 - RNA, 19 nt, Artificial Sequence
  Description of Artificial Sequence: Synthetic oligonucleotide
cccgcugucaggaggcagc

SEQ ID NO: 720133 - RNA, 19 nt, Artificial Sequence
  Description of Artificial Sequence: Synthetic oligonucleotide
gugaaucacaagccuaguu

SEQ ID NO: 720134 - RNA, 19 nt, Artificial Sequence
  Description of Artificial Sequence: Synthetic oligonucleotide
ccaaaucuaagaacaugaa

SEQ ID NO: 720135 - RNA, 19 nt, Artificial Sequence
  Description of Artificial Sequence: Synthetic oligonucleotide
gaucucaggcagaggcauc

SEQ ID NO: 720136 - RNA, 19 nt, Artificial Sequence
  Description of Artificial Sequence: Synthetic oligonucleotide
cauuuggaauaccuagaau

SEQ ID NO: 720137 - RNA, 19 nt, Artificial Sequence
  Description of Artificial Sequence: Synthetic oligonucleotide
gucaacccuuuuguuucug

SEQ ID NO: 720138 - RNA, 19 nt, Artificial Sequence
  Description of Artificial Sequence: Synthetic oligonucleotide
ggaccuacuuuaugcagcu

SEQ ID NO: 720139 - RNA, 19 nt, Artificial Sequence
  Description of Artificial Sequence: Synthetic oligonucleotide
cauggguguccaauaugua

SEQ ID NO: 720140 - RNA, 19 nt, Artificial Sequence
  Description of Artificial Sequence: Synthetic oligonucleotide
cuucaucauaugacucaua

SEQ ID NO: 720141 - RNA, 19 nt, Artificial Sequence
  Description of Artificial Sequence: Synthetic oligonucleotide
uccgccaaugggcgccguc

SEQ ID NO: 720142 - RNA, 19 nt, Artificial Sequence
  Description of Artificial Sequence: Synthetic oligonucleotide
ccaggacucagcggcacgg

SEQ ID NO: 720143 - RNA, 19 nt, Artificial Sequence
  Description of Artificial Sequence: Synthetic oligonucleotide
guuccgccaaugggcgccg

SEQ ID NO: 720144 - RNA, 19 nt, Artificial Sequence
  Description of Artificial Sequence: Synthetic oligonucleotide
caggacucagcggcacggc

SEQ ID NO: 720145 - RNA, 19 nt, Artificial Sequence
  Description of Artificial Sequence: Synthetic oligonucleotide
cagccgcacuguucacagg

SEQ ID NO: 720146 - RNA, 19 nt, Artificial Sequence
  Description of Artificial Sequence: Synthetic oligonucleotide
caugguccuucacuucaaa

SEQ ID NO: 720147 - RNA, 19 nt, Artificial Sequence
  Description of Artificial Sequence: Synthetic oligonucleotide
gccaguccuagggugacac

SEQ ID NO: 720148 - RNA, 19 nt, Artificial Sequence
  Description of Artificial Sequence: Synthetic oligonucleotide
cggagucauaauuugaugu

SEQ ID NO: 720149 - RNA, 19 nt, Artificial Sequence
  Description of Artificial Sequence: Synthetic oligonucleotide
cgcacuguucacagguaag

SEQ ID NO: 720150 - RNA, 19 nt, Artificial Sequence
  Description of Artificial Sequence: Synthetic oligonucleotide
caccaucguacaguagaga

SEQ ID NO: 720151 - RNA, 19 nt, Artificial Sequence
  Description of Artificial Sequence: Synthetic oligonucleotide
augucucauggguguccaa

SEQ ID NO: 720152 - RNA, 19 nt, Artificial Sequence
  Description of Artificial Sequence: Synthetic oligonucleotide
gcagcacgugcccacggca

SEQ ID NO: 720153 - RNA, 19 nt, Artificial Sequence
  Description of Artificial Sequence: Synthetic oligonucleotide
agucaugcucaggccacuu

SEQ ID NO: 720154 - RNA, 19 nt, Artificial Sequence
  Description of Artificial Sequence: Synthetic oligonucleotide
cagcacgugcccacggcaa

SEQ ID NO: 720155 - RNA, 19 nt, Artificial Sequence
  Description of Artificial Sequence: Synthetic oligonucleotide
gaccuacuuuaugcagcuc

SEQ ID NO: 720156 - RNA, 19 nt, Artificial Sequence
  Description of Artificial Sequence: Synthetic oligonucleotide
cuacuuuaugcagcucugu

SEQ ID NO: 720157 - RNA, 19 nt, Artificial Sequence
  Description of Artificial Sequence: Synthetic oligonucleotide
ggcgccgucaauggguaca

SEQ ID NO: 720158 - RNA, 19 nt, Artificial Sequence
  Description of Artificial Sequence: Synthetic oligonucleotide
aggauccaccaaggucaag

SEQ ID NO: 720159 - RNA, 19 nt, Artificial Sequence
  Description of Artificial Sequence: Synthetic oligonucleotide
cgagcaauucauuuggaau

SEQ ID NO: 720160 - RNA, 19 nt, Artificial Sequence
  Description of Artificial Sequence: Synthetic oligonucleotide
cgucagacucaguccaaac

SEQ ID NO: 720161 - RNA, 19 nt, Artificial Sequence
  Description of Artificial Sequence: Synthetic oligonucleotide
ccuaguucuuagcacaaau

SEQ ID NO: 720162 - RNA, 19 nt, Artificial Sequence
  Description of Artificial Sequence: Synthetic oligonucleotide
gaggcacacgugucacacu

SEQ ID NO: 720163 - RNA, 19 nt, Artificial Sequence
  Description of Artificial Sequence: Synthetic oligonucleotide
cagcggcacggcuuccuca

SEQ ID NO: 720164 - RNA, 19 nt, Artificial Sequence
  Description of Artificial Sequence: Synthetic oligonucleotide
aggcgaaguucgacuauua

SEQ ID NO: 720165 - RNA, 19 nt, Artificial Sequence
  Description of Artificial Sequence: Synthetic oligonucleotide
ccaguccuagggugacacc

SEQ ID NO: 720166 - RNA, 19 nt, Artificial Sequence
  Description of Artificial Sequence: Synthetic oligonucleotide
aguaacccucugggagaga

SEQ ID NO: 720167 - RNA, 19 nt, Artificial Sequence
  Description of Artificial Sequence: Synthetic oligonucleotide
ggacuugauguccccgacu

SEQ ID NO: 720168 - RNA, 19 nt, Artificial Sequence
  Description of Artificial Sequence: Synthetic oligonucleotide
ccacugucgggagaacaug

SEQ ID NO: 720169 - RNA, 19 nt, Artificial Sequence
  Description of Artificial Sequence: Synthetic oligonucleotide
aucguacaguagagagcgu

SEQ ID NO: 720170 - RNA, 19 nt, Artificial Sequence
  Description of Artificial Sequence: Synthetic oligonucleotide
agcgucagacucaguccaa

SEQ ID NO: 720171 - RNA, 19 nt, Artificial Sequence
  Description of Artificial Sequence: Synthetic oligonucleotide
cuauuacacgugacuccau

SEQ ID NO: 720172 - RNA, 19 nt, Artificial Sequence
  Description of Artificial Sequence: Synthetic oligonucleotide
gaucaugcauguggcuuuu

SEQ ID NO: 720173 - RNA, 19 nt, Artificial Sequence
  Description of Artificial Sequence: Synthetic oligonucleotide
ugcccacggcaaggggagc

SEQ ID NO: 720174 - RNA, 19 nt, Artificial Sequence
  Description of Artificial Sequence: Synthetic oligonucleotide
gguaagggccccucagcau

SEQ ID NO: 720175 - RNA, 19 nt, Artificial Sequence
  Description of Artificial Sequence: Synthetic oligonucleotide
gggaggcacacgugucaca

SEQ ID NO: 720176 - RNA, 19 nt, Artificial Sequence
  Description of Artificial Sequence: Synthetic oligonucleotide
gcaucugacuuggagguuu

SEQ ID NO: 720177 - RNA, 19 nt, Artificial Sequence
  Description of Artificial Sequence: Synthetic oligonucleotide
ccgucaauggguacauagu

SEQ ID NO: 720178 - RNA, 19 nt, Artificial Sequence
  Description of Artificial Sequence: Synthetic oligonucleotide
gggcucgauggccaguccu

SEQ ID NO: 720179 - RNA, 19 nt, Artificial Sequence
  Description of Artificial Sequence: Synthetic oligonucleotide
caucugacuuggagguuuu

SEQ ID NO: 720180 - RNA, 19 nt, Artificial Sequence
  Description of Artificial Sequence: Synthetic oligonucleotide
ggcucgauggccaguccua

SEQ ID NO: 720181 - RNA, 19 nt, Artificial Sequence
  Description of Artificial Sequence: Synthetic oligonucleotide
gguguccaauauguacaua

SEQ ID NO: 720182 - RNA, 19 nt, Artificial Sequence
  Description of Artificial Sequence: Synthetic oligonucleotide
ccgcugucaggaggcagcc

SEQ ID NO: 720183 - RNA, 19 nt, Artificial Sequence
  Description of Artificial Sequence: Synthetic oligonucleotide
ggcacggcuuccucauagu

SEQ ID NO: 720184 - RNA, 19 nt, Artificial Sequence
  Description of Artificial Sequence: Synthetic oligonucleotide
gggcaccaucguacaguag

SEQ ID NO: 720185 - RNA, 19 nt, Artificial Sequence
  Description of Artificial Sequence: Synthetic oligonucleotide
gcaugguccuucacuucaa

SEQ ID NO: 720186 - RNA, 19 nt, Artificial Sequence
  Description of Artificial Sequence: Synthetic oligonucleotide
gcgucagacucaguccaaa

SEQ ID NO: 720187 - RNA, 19 nt, Artificial Sequence
  Description of Artificial Sequence: Synthetic oligonucleotide
uccccgacuugggcucgau

SEQ ID NO: 720188 - RNA, 19 nt, Artificial Sequence
  Description of Artificial Sequence: Synthetic oligonucleotide
gagccacgagcaauucauu

SEQ ID NO: 720189 - RNA, 19 nt, Artificial Sequence
  Description of Artificial Sequence: Synthetic oligonucleotide
gccuaguucuuagcacaaa

SEQ ID NO: 720190 - RNA, 19 nt, Artificial Sequence
  Description of Artificial Sequence: Synthetic oligonucleotide
uuccgccaaugggcgccgu

SEQ ID NO: 720191 - RNA, 19 nt, Artificial Sequence
  Description of Artificial Sequence: Synthetic oligonucleotide
ccagaguccgaugccgaaa

SEQ ID NO: 720192 - RNA, 19 nt, Artificial Sequence
  Description of Artificial Sequence: Synthetic oligonucleotide
ccgccaaugggcgccguca

SEQ ID NO: 720193 - RNA, 19 nt, Artificial Sequence
  Description of Artificial Sequence: Synthetic oligonucleotide
cccacggcaaggggagcug

SEQ ID NO: 720194 - RNA, 19 nt, Artificial Sequence
  Description of Artificial Sequence: Synthetic oligonucleotide
ccccgacuugggcucgaug

SEQ ID NO: 720195 - RNA, 19 nt, Artificial Sequence
  Description of Artificial Sequence: Synthetic oligonucleotide
gggcgccgucaauggguac

SEQ ID NO: 720196 - RNA, 19 nt, Artificial Sequence
  Description of Artificial Sequence: Synthetic oligonucleotide
ccgaaacacaggagacugu

SEQ ID NO: 720197 - RNA, 19 nt, Artificial Sequence
  Description of Artificial Sequence: Synthetic oligonucleotide
cauuuuccgucagcaccuu

SEQ ID NO: 720198 - RNA, 19 nt, Artificial Sequence
  Description of Artificial Sequence: Synthetic oligonucleotide
gcccacggcaaggggagcu

SEQ ID NO: 720199 - RNA, 19 nt, Artificial Sequence
  Description of Artificial Sequence: Synthetic oligonucleotide
gccaaugggcgccgucaau

SEQ ID NO: 720200 - RNA, 19 nt, Artificial Sequence
  Description of Artificial Sequence: Synthetic oligonucleotide
gcgccgucaauggguacau

SEQ ID NO: 720201 - RNA, 19 nt, Artificial Sequence
  Description of Artificial Sequence: Synthetic oligonucleotide
gggcuacaacauaguuaau

SEQ ID NO: 720202 - RNA, 19 nt, Artificial Sequence
  Description of Artificial Sequence: Synthetic oligonucleotide
ggucagcgucagacucagu

SEQ ID NO: 720203 - RNA, 19 nt, Artificial Sequence
  Description of Artificial Sequence: Synthetic oligonucleotide
cgccgucaauggguacaua

SEQ ID NO: 720204 - RNA, 19 nt, Artificial Sequence
  Description of Artificial Sequence: Synthetic oligonucleotide
aaggauaugggcuaacucc

SEQ ID NO: 720205 - RNA, 19 nt, Artificial Sequence
  Description of Artificial Sequence: Synthetic oligonucleotide
aaaggcauugaccugcacc

SEQ ID NO: 720206 - RNA, 19 nt, Artificial Sequence
  Description of Artificial Sequence: Synthetic oligonucleotide
ucuaguuaggugauggugg

SEQ ID NO: 720207 - RNA, 19 nt, Artificial Sequence
  Description of Artificial Sequence: Synthetic oligonucleotide
aguaucaccgaagacaucc

SEQ ID NO: 720208 - RNA, 19 nt, Artificial Sequence
  Description of Artificial Sequence: Synthetic oligonucleotide
aaggcauugaccugcaccg

SEQ ID NO: 720209 - RNA, 19 nt, Artificial Sequence
  Description of Artificial Sequence: Synthetic oligonucleotide
aaaacggaaagacaagaga

SEQ ID NO: 720210 - RNA, 19 nt, Artificial Sequence
  Description of Artificial Sequence: Synthetic oligonucleotide
aaacggaaagacaagagag

SEQ ID NO: 720211 - RNA, 19 nt, Artificial Sequence
  Description of Artificial Sequence: Synthetic oligonucleotide
gaagcucuggcucacaggg

SEQ ID NO: 720212 - RNA, 19 nt, Artificial Sequence
  Description of Artificial Sequence: Synthetic oligonucleotide
ucuuuuaaggcguuguccc

SEQ ID NO: 720213 - RNA, 19 nt, Artificial Sequence
  Description of Artificial Sequence: Synthetic oligonucleotide
guuggguagaucuaguuag

SEQ ID NO: 720214 - RNA, 19 nt, Artificial Sequence
  Description of Artificial Sequence: Synthetic oligonucleotide
uggcaaagggccuagaugc

SEQ ID NO: 720215 - RNA, 19 nt, Artificial Sequence
  Description of Artificial Sequence: Synthetic oligonucleotide
cuaagucaaggucaaaacg

SEQ ID NO: 720216 - RNA, 19 nt, Artificial Sequence
  Description of Artificial Sequence: Synthetic oligonucleotide
uaucauugagcauuccagg

SEQ ID NO: 720217 - RNA, 19 nt, Artificial Sequence
  Description of Artificial Sequence: Synthetic oligonucleotide
auugguuccaggcaccugg

SEQ ID NO: 720218 - RNA, 19 nt, Artificial Sequence
  Description of Artificial Sequence: Synthetic oligonucleotide
uugguuacucauuaccgcg

SEQ ID NO: 720219 - RNA, 19 nt, Artificial Sequence
  Description of Artificial Sequence: Synthetic oligonucleotide
gauggcaggacauggagcc

SEQ ID NO: 720220 - RNA, 19 nt, Artificial Sequence
  Description of Artificial Sequence: Synthetic oligonucleotide
guugggucaagucaguagg

SEQ ID NO: 720221 - RNA, 19 nt, Artificial Sequence
  Description of Artificial Sequence: Synthetic oligonucleotide
aggggaaagaauuuugcuc

SEQ ID NO: 720222 - RNA, 19 nt, Artificial Sequence
  Description of Artificial Sequence: Synthetic oligonucleotide
gauuauggggcagauauug

SEQ ID NO: 720223 - RNA, 19 nt, Artificial Sequence
  Description of Artificial Sequence: Synthetic oligonucleotide
aacaggacuaggcuuuguc

SEQ ID NO: 720224 - RNA, 19 nt, Artificial Sequence
  Description of Artificial Sequence: Synthetic oligonucleotide
aaggaaguaucaccgaaga

SEQ ID NO: 720225 - RNA, 19 nt, Artificial Sequence
  Description of Artificial Sequence: Synthetic oligonucleotide
cacuguggagagaagaugg

SEQ ID NO: 720226 - RNA, 19 nt, Artificial Sequence
  Description of Artificial Sequence: Synthetic oligonucleotide
uggugcagaacccagaauc

SEQ ID NO: 720227 - RNA, 19 nt, Artificial Sequence
  Description of Artificial Sequence: Synthetic oligonucleotide
cuuugucucagccacagug

SEQ ID NO: 720228 - RNA, 19 nt, Artificial Sequence
  Description of Artificial Sequence: Synthetic oligonucleotide
uccgacaggagacagcuug

SEQ ID NO: 720229 - RNA, 19 nt, Artificial Sequence
  Description of Artificial Sequence: Synthetic oligonucleotide
ggaaauuucggggugagcg

SEQ ID NO: 720230 - RNA, 19 nt, Artificial Sequence
  Description of Artificial Sequence: Synthetic oligonucleotide
gaagacauccccaccacgg

SEQ ID NO: 720231 - RNA, 19 nt, Artificial Sequence
  Description of Artificial Sequence: Synthetic oligonucleotide
gaaauuucggggugagcgg

SEQ ID NO: 720232 - RNA, 19 nt, Artificial Sequence
  Description of Artificial Sequence: Synthetic oligonucleotide
uauacauguaaaccugccu

SEQ ID NO: 720233 - RNA, 19 nt, Artificial Sequence
  Description of Artificial Sequence: Synthetic oligonucleotide
agaucuaguuaggugaugg

SEQ ID NO: 720234 - RNA, 19 nt, Artificial Sequence
  Description of Artificial Sequence: Synthetic oligonucleotide
agauaagggucccaccugg

SEQ ID NO: 720235 - RNA, 19 nt, Artificial Sequence
  Description of Artificial Sequence: Synthetic oligonucleotide
agagcgucgaagcucuggc

SEQ ID NO: 720236 - RNA, 19 nt, Artificial Sequence
  Description of Artificial Sequence: Synthetic oligonucleotide
uaugggcuaacuccgguug

SEQ ID NO: 720237 - RNA, 19 nt, Artificial Sequence
  Description of Artificial Sequence: Synthetic oligonucleotide
ucaaaacggaaagacaaga

SEQ ID NO: 720238 - RNA, 19 nt, Artificial Sequence
  Description of Artificial Sequence: Synthetic oligonucleotide
gguagaucuaguuagguga

SEQ ID NO: 720239 - RNA, 19 nt, Artificial Sequence
  Description of Artificial Sequence: Synthetic oligonucleotide
aacaugaucccgguccugg

SEQ ID NO: 720240 - RNA, 19 nt, Artificial Sequence
  Description of Artificial Sequence: Synthetic oligonucleotide
auaagggucccaccugggc

SEQ ID NO: 720241 - RNA, 19 nt, Artificial Sequence
  Description of Artificial Sequence: Synthetic oligonucleotide
acccuauacauguaaaccu

SEQ ID NO: 720242 - RNA, 19 nt, Artificial Sequence
  Description of Artificial Sequence: Synthetic oligonucleotide
cuauacauguaaaccugcc

SEQ ID NO: 720243 - RNA, 19 nt, Artificial Sequence
  Description of Artificial Sequence: Synthetic oligonucleotide
uucauucaggcucucccag

SEQ ID NO: 720244 - RNA, 19 nt, Artificial Sequence
  Description of Artificial Sequence: Synthetic oligonucleotide
ucuaaaugagcagggcagg

SEQ ID NO: 720245 - RNA, 19 nt, Artificial Sequence
  Description of Artificial Sequence: Synthetic oligonucleotide
ugagcaccugccaagcugc

SEQ ID NO: 720246 - RNA, 19 nt, Artificial Sequence
  Description of Artificial Sequence: Synthetic oligonucleotide
uuugucucagccacagugu

SEQ ID NO: 720247 - RNA, 19 nt, Artificial Sequence
  Description of Artificial Sequence: Synthetic oligonucleotide
cuaguuaggugaugguggg

SEQ ID NO: 720248 - RNA, 19 nt, Artificial Sequence
  Description of Artificial Sequence: Synthetic oligonucleotide
guugguuacucauuaccgc

SEQ ID NO: 720249 - RNA, 19 nt, Artificial Sequence
  Description of Artificial Sequence: Synthetic oligonucleotide
uuauggggcagauauuggu

SEQ ID NO: 720250 - RNA, 19 nt, Artificial Sequence
  Description of Artificial Sequence: Synthetic oligonucleotide
cauugagcauuccagguug

SEQ ID NO: 720251 - RNA, 19 nt, Artificial Sequence
  Description of Artificial Sequence: Synthetic oligonucleotide
acaggggaaagaauuuugc

SEQ ID NO: 720252 - RNA, 19 nt, Artificial Sequence
  Description of Artificial Sequence: Synthetic oligonucleotide
ggaaagacaagagagaguc

SEQ ID NO: 720253 - RNA, 19 nt, Artificial Sequence
  Description of Artificial Sequence: Synthetic oligonucleotide
acuccgguuggguagaucu

SEQ ID NO: 720254 - RNA, 19 nt, Artificial Sequence
  Description of Artificial Sequence: Synthetic oligonucleotide
ggaaauguccaugggaugg

SEQ ID NO: 720255 - RNA, 19 nt, Artificial Sequence
  Description of Artificial Sequence: Synthetic oligonucleotide
aucauugagcauuccaggu

SEQ ID NO: 720256 - RNA, 19 nt, Artificial Sequence
  Description of Artificial Sequence: Synthetic oligonucleotide
ugccuagucccucacaccu

SEQ ID NO: 720257 - RNA, 19 nt, Artificial Sequence
  Description of Artificial Sequence: Synthetic oligonucleotide
acccucgacucuuuuaagg

SEQ ID NO: 720258 - RNA, 19 nt, Artificial Sequence
  Description of Artificial Sequence: Synthetic oligonucleotide
cuugucucggggucuaggg

SEQ ID NO: 720259 - RNA, 19 nt, Artificial Sequence
  Description of Artificial Sequence: Synthetic oligonucleotide
gaaggaaguaucaccgaag

SEQ ID NO: 720260 - RNA, 19 nt, Artificial Sequence
  Description of Artificial Sequence: Synthetic oligonucleotide
agcgucgaagcucuggcuc

SEQ ID NO: 720261 - RNA, 19 nt, Artificial Sequence
  Description of Artificial Sequence: Synthetic oligonucleotide
gaagugggaggguuggcag

SEQ ID NO: 720262 - RNA, 19 nt, Artificial Sequence
  Description of Artificial Sequence: Synthetic oligonucleotide
uggacuugugguagcaccc

SEQ ID NO: 720263 - RNA, 19 nt, Artificial Sequence
  Description of Artificial Sequence: Synthetic oligonucleotide
ggaaguaucaccgaagaca

SEQ ID NO: 720264 - RNA, 19 nt, Artificial Sequence
  Description of Artificial Sequence: Synthetic oligonucleotide
aggauaugggcuaacuccg

SEQ ID NO: 720265 - RNA, 19 nt, Artificial Sequence
  Description of Artificial Sequence: Synthetic oligonucleotide
aucucaguguaguggcggc

SEQ ID NO: 720266 - RNA, 19 nt, Artificial Sequence
  Description of Artificial Sequence: Synthetic oligonucleotide
aggaaguaucaccgaagac

SEQ ID NO: 720267 - RNA, 19 nt, Artificial Sequence
  Description of Artificial Sequence: Synthetic oligonucleotide
acagccacggucucgguug

SEQ ID NO: 720268 - RNA, 19 nt, Artificial Sequence
  Description of Artificial Sequence: Synthetic oligonucleotide
uggggcagcucuaaaugag

SEQ ID NO: 720269 - RNA, 19 nt, Artificial Sequence
  Description of Artificial Sequence: Synthetic oligonucleotide
cacccuauacauguaaacc

SEQ ID NO: 720270 - RNA, 19 nt, Artificial Sequence
  Description of Artificial Sequence: Synthetic oligonucleotide
agaagccaacccucgacuc

SEQ ID NO: 720271 - RNA, 19 nt, Artificial Sequence
  Description of Artificial Sequence: Synthetic oligonucleotide
aaagggccuagaugcagug

SEQ ID NO: 720272 - RNA, 19 nt, Artificial Sequence
  Description of Artificial Sequence: Synthetic oligonucleotide
uaucaccgaagacaucccc

SEQ ID NO: 720273 - RNA, 19 nt, Artificial Sequence
  Description of Artificial Sequence: Synthetic oligonucleotide
cucuuuuaaggcguugucc

SEQ ID NO: 720274 - RNA, 19 nt, Artificial Sequence
  Description of Artificial Sequence: Synthetic oligonucleotide
uccacaccugccaaagggc

SEQ ID NO: 720275 - RNA, 19 nt, Artificial Sequence
  Description of Artificial Sequence: Synthetic oligonucleotide
uuuuaaggcguugucccca

SEQ ID NO: 720276 - RNA, 19 nt, Artificial Sequence
  Description of Artificial Sequence: Synthetic oligonucleotide
uccaacaggacuaggcuuu

SEQ ID NO: 720277 - RNA, 19 nt, Artificial Sequence
  Description of Artificial Sequence: Synthetic oligonucleotide
caugucugcugucagccgc

SEQ ID NO: 720278 - RNA, 19 nt, Artificial Sequence
  Description of Artificial Sequence: Synthetic oligonucleotide
aucuaguuaggugauggug

SEQ ID NO: 720279 - RNA, 19 nt, Artificial Sequence
  Description of Artificial Sequence: Synthetic oligonucleotide
cuuuuaaggcguugucccc

SEQ ID NO: 720280 - RNA, 19 nt, Artificial Sequence
  Description of Artificial Sequence: Synthetic oligonucleotide
aaauuucggggugagcggu

SEQ ID NO: 720281 - RNA, 19 nt, Artificial Sequence
  Description of Artificial Sequence: Synthetic oligonucleotide
agcaguuaccccauugggg

SEQ ID NO: 720282 - RNA, 19 nt, Artificial Sequence
  Description of Artificial Sequence: Synthetic oligonucleotide
agacaauggcccugugugg

SEQ ID NO: 720283 - RNA, 19 nt, Artificial Sequence
  Description of Artificial Sequence: Synthetic oligonucleotide
accgaagacauccccacca

SEQ ID NO: 720284 - RNA, 19 nt, Artificial Sequence
  Description of Artificial Sequence: Synthetic oligonucleotide
acacccauccgacaggaga

SEQ ID NO: 720285 - RNA, 19 nt, Artificial Sequence
  Description of Artificial Sequence: Synthetic oligonucleotide
aacggaaagacaagagaga

SEQ ID NO: 720286 - RNA, 19 nt, Artificial Sequence
  Description of Artificial Sequence: Synthetic oligonucleotide
gugguuauggcacgggcug

SEQ ID NO: 720287 - RNA, 19 nt, Artificial Sequence
  Description of Artificial Sequence: Synthetic oligonucleotide
gaacuggacacccauccga

SEQ ID NO: 720288 - RNA, 19 nt, Artificial Sequence
  Description of Artificial Sequence: Synthetic oligonucleotide
aagucaaggucaaaacgga

SEQ ID NO: 720289 - RNA, 19 nt, Artificial Sequence
  Description of Artificial Sequence: Synthetic oligonucleotide
ucauuaccgcgucugcccc

SEQ ID NO: 720290 - RNA, 19 nt, Artificial Sequence
  Description of Artificial Sequence: Synthetic oligonucleotide
aagggucccaccugggccu

SEQ ID NO: 720291 - RNA, 19 nt, Artificial Sequence
  Description of Artificial Sequence: Synthetic oligonucleotide
uuuuccacacguggcaagc

SEQ ID NO: 720292 - RNA, 19 nt, Artificial Sequence
  Description of Artificial Sequence: Synthetic oligonucleotide
ugcuuacaacugcuggucc

SEQ ID NO: 720293 - RNA, 19 nt, Artificial Sequence
  Description of Artificial Sequence: Synthetic oligonucleotide
uauggggcagauauugguu

SEQ ID NO: 720294 - RNA, 19 nt, Artificial Sequence
  Description of Artificial Sequence: Synthetic oligonucleotide
cuugugguagcaccccugc

SEQ ID NO: 720295 - RNA, 19 nt, Artificial Sequence
  Description of Artificial Sequence: Synthetic oligonucleotide
agcucuaaaugagcagggc

SEQ ID NO: 720296 - RNA, 19 nt, Artificial Sequence
  Description of Artificial Sequence: Synthetic oligonucleotide
ugccccgugggauuauggg

SEQ ID NO: 720297 - RNA, 19 nt, Artificial Sequence
  Description of Artificial Sequence: Synthetic oligonucleotide
uaggacugcugucaaaguu

SEQ ID NO: 720298 - RNA, 19 nt, Artificial Sequence
  Description of Artificial Sequence: Synthetic oligonucleotide
gguaggacugcugucaaag

SEQ ID NO: 720299 - RNA, 19 nt, Artificial Sequence
  Description of Artificial Sequence: Synthetic oligonucleotide
agagacaauggcccugugu

SEQ ID NO: 720300 - RNA, 19 nt, Artificial Sequence
  Description of Artificial Sequence: Synthetic oligonucleotide
ugguuacucauuaccgcgu

SEQ ID NO: 720301 - RNA, 19 nt, Artificial Sequence
  Description of Artificial Sequence: Synthetic oligonucleotide
ugggaggcuugucucgggg

SEQ ID NO: 720302 - RNA, 19 nt, Artificial Sequence
  Description of Artificial Sequence: Synthetic oligonucleotide
auaagcucgcugaggaggg

SEQ ID NO: 720303 - RNA, 19 nt, Artificial Sequence
  Description of Artificial Sequence: Synthetic oligonucleotide
gcuaacuccgguuggguag

SEQ ID NO: 720304 - RNA, 19 nt, Artificial Sequence
  Description of Artificial Sequence: Synthetic oligonucleotide
cagcaguuaccccauuggg

SEQ ID NO: 720305 - RNA, 19 nt, Artificial Sequence
  Description of Artificial Sequence: Synthetic oligonucleotide
aacccucgacucuuuuaag

SEQ ID NO: 720306 - RNA, 19 nt, Artificial Sequence
  Description of Artificial Sequence: Synthetic oligonucleotide
uccacacguggcaagcgug

SEQ ID NO: 720307 - RNA, 19 nt, Artificial Sequence
  Description of Artificial Sequence: Synthetic oligonucleotide
auuauggggcagauauugg

SEQ ID NO: 720308 - RNA, 19 nt, Artificial Sequence
  Description of Artificial Sequence: Synthetic oligonucleotide
uacaacugcugguccaugu

SEQ ID NO: 720309 - RNA, 19 nt, Artificial Sequence
  Description of Artificial Sequence: Synthetic oligonucleotide
aggguguuccaggaacugc

SEQ ID NO: 720310 - RNA, 19 nt, Artificial Sequence
  Description of Artificial Sequence: Synthetic oligonucleotide
ugcagauaagggucccacc

SEQ ID NO: 720311 - RNA, 19 nt, Artificial Sequence
  Description of Artificial Sequence: Synthetic oligonucleotide
gucaagucaguagggaccc

SEQ ID NO: 720312 - RNA, 19 nt, Artificial Sequence
  Description of Artificial Sequence: Synthetic oligonucleotide
uggggcagauauugguucc

SEQ ID NO: 720313 - RNA, 19 nt, Artificial Sequence
  Description of Artificial Sequence: Synthetic oligonucleotide
cuagggugguuauggcacg

SEQ ID NO: 720314 - RNA, 19 nt, Artificial Sequence
  Description of Artificial Sequence: Synthetic oligonucleotide
uaccccauuggggaaaugu

SEQ ID NO: 720315 - RNA, 19 nt, Artificial Sequence
  Description of Artificial Sequence: Synthetic oligonucleotide
agccucuuucuguugacga

SEQ ID NO: 720316 - RNA, 19 nt, Artificial Sequence
  Description of Artificial Sequence: Synthetic oligonucleotide
agaauccaggccauaacca

SEQ ID NO: 720317 - RNA, 19 nt, Artificial Sequence
  Description of Artificial Sequence: Synthetic oligonucleotide
augggcuaacuccgguugg

SEQ ID NO: 720318 - RNA, 19 nt, Artificial Sequence
  Description of Artificial Sequence: Synthetic oligonucleotide
gauaagggucccaccuggg

SEQ ID NO: 720319 - RNA, 19 nt, Artificial Sequence
  Description of Artificial Sequence: Synthetic oligonucleotide
cacccauccgacaggagac

SEQ ID NO: 720320 - RNA, 19 nt, Artificial Sequence
  Description of Artificial Sequence: Synthetic oligonucleotide
uuuccacacguggcaagcg

SEQ ID NO: 720321 - RNA, 19 nt, Artificial Sequence
  Description of Artificial Sequence: Synthetic oligonucleotide
uguugacgaagauggcgga

SEQ ID NO: 720322 - RNA, 19 nt, Artificial Sequence
  Description of Artificial Sequence: Synthetic oligonucleotide
acaugcaugguguggcgga

SEQ ID NO: 720323 - RNA, 19 nt, Artificial Sequence
  Description of Artificial Sequence: Synthetic oligonucleotide
ccuaagucaaggucaaaac

SEQ ID NO: 720324 - RNA, 19 nt, Artificial Sequence
  Description of Artificial Sequence: Synthetic oligonucleotide
gaaguaucaccgaagacau

SEQ ID NO: 720325 - RNA, 19 nt, Artificial Sequence
  Description of Artificial Sequence: Synthetic oligonucleotide
gagauggugcagaacccag

SEQ ID NO: 720326 - RNA, 19 nt, Artificial Sequence
  Description of Artificial Sequence: Synthetic oligonucleotide
gcaguuaccccauugggga

SEQ ID NO: 720327 - RNA, 19 nt, Artificial Sequence
  Description of Artificial Sequence: Synthetic oligonucleotide
gugguagcaccccugccag

SEQ ID NO: 720328 - RNA, 19 nt, Artificial Sequence
  Description of Artificial Sequence: Synthetic oligonucleotide
guugggagguaccugggga

SEQ ID NO: 720329 - RNA, 19 nt, Artificial Sequence
  Description of Artificial Sequence: Synthetic oligonucleotide
gggauuauggggcagauau

SEQ ID NO: 720330 - RNA, 19 nt, Artificial Sequence
  Description of Artificial Sequence: Synthetic oligonucleotide
aagcgugagauggugcaga

SEQ ID NO: 720331 - RNA, 19 nt, Artificial Sequence
  Description of Artificial Sequence: Synthetic oligonucleotide
caucaccaggcugucauag

SEQ ID NO: 720332 - RNA, 19 nt, Artificial Sequence
  Description of Artificial Sequence: Synthetic oligonucleotide
cuuuggcugcuuacaacug

SEQ ID NO: 720333 - RNA, 19 nt, Artificial Sequence
  Description of Artificial Sequence: Synthetic oligonucleotide
ggggaaagaauuuugcucu

SEQ ID NO: 720334 - RNA, 19 nt, Artificial Sequence
  Description of Artificial Sequence: Synthetic oligonucleotide
gggucuagggugguuaugg

SEQ ID NO: 720335 - RNA, 19 nt, Artificial Sequence
  Description of Artificial Sequence: Synthetic oligonucleotide
ccuauacauguaaaccugc

SEQ ID NO: 720336 - RNA, 19 nt, Artificial Sequence
  Description of Artificial Sequence: Synthetic oligonucleotide
ggauuggggucucagcugc

SEQ ID NO: 720337 - RNA, 19 nt, Artificial Sequence
  Description of Artificial Sequence: Synthetic oligonucleotide
agucccucacaccuugacu

SEQ ID NO: 720338 - RNA, 19 nt, Artificial Sequence
  Description of Artificial Sequence: Synthetic oligonucleotide
ugggcuaacuccgguuggg

SEQ ID NO: 720339 - RNA, 19 nt, Artificial Sequence
  Description of Artificial Sequence: Synthetic oligonucleotide
uaggcggugcacuccauuc

SEQ ID NO: 720340 - RNA, 19 nt, Artificial Sequence
  Description of Artificial Sequence: Synthetic oligonucleotide
cacccugcgcaccugcugg

SEQ ID NO: 720341 - RNA, 19 nt, Artificial Sequence
  Description of Artificial Sequence: Synthetic oligonucleotide
ggccucuuaucauugagca

SEQ ID NO: 720342 - RNA, 19 nt, Artificial Sequence
  Description of Artificial Sequence: Synthetic oligonucleotide
ugcaguggugggaguuggg

SEQ ID NO: 720343 - RNA, 19 nt, Artificial Sequence
  Description of Artificial Sequence: Synthetic oligonucleotide
ggguagaucuaguuaggug

SEQ ID NO: 720344 - RNA, 19 nt, Artificial Sequence
  Description of Artificial Sequence: Synthetic oligonucleotide
aggaaauuucggggugagc

SEQ ID NO: 720345 - RNA, 19 nt, Artificial Sequence
  Description of Artificial Sequence: Synthetic oligonucleotide
agggcauguugggagguac

SEQ ID NO: 720346 - RNA, 19 nt, Artificial Sequence
  Description of Artificial Sequence: Synthetic oligonucleotide
gugauggugggugagcuca

SEQ ID NO: 720347 - RNA, 19 nt, Artificial Sequence
  Description of Artificial Sequence: Synthetic oligonucleotide
uagucccucacaccuugac

SEQ ID NO: 720348 - RNA, 19 nt, Artificial Sequence
  Description of Artificial Sequence: Synthetic oligonucleotide
augggaacuggacacccau

SEQ ID NO: 720349 - RNA, 19 nt, Artificial Sequence
  Description of Artificial Sequence: Synthetic oligonucleotide
aagacaagagagagucaga

SEQ ID NO: 720350 - RNA, 19 nt, Artificial Sequence
  Description of Artificial Sequence: Synthetic oligonucleotide
ugaccugcaccgugcuggg

SEQ ID NO: 720351 - RNA, 19 nt, Artificial Sequence
  Description of Artificial Sequence: Synthetic oligonucleotide
gucaaggucaaaacggaaa

SEQ ID NO: 720352 - RNA, 19 nt, Artificial Sequence
  Description of Artificial Sequence: Synthetic oligonucleotide
cagauaagggucccaccug

SEQ ID NO: 720353 - RNA, 19 nt, Artificial Sequence
  Description of Artificial Sequence: Synthetic oligonucleotide
uugcauagaccaggaagga

SEQ ID NO: 720354 - RNA, 19 nt, Artificial Sequence
  Description of Artificial Sequence: Synthetic oligonucleotide
uggguagaucuaguuaggu

SEQ ID NO: 720355 - RNA, 19 nt, Artificial Sequence
  Description of Artificial Sequence: Synthetic oligonucleotide
gucuagggugguuauggca

SEQ ID NO: 720356 - RNA, 19 nt, Artificial Sequence
  Description of Artificial Sequence: Synthetic oligonucleotide
uugugguagcaccccugcc

SEQ ID NO: 720357 - RNA, 19 nt, Artificial Sequence
  Description of Artificial Sequence: Synthetic oligonucleotide
uuucggggugagcgguggg

SEQ ID NO: 720358 - RNA, 19 nt, Artificial Sequence
  Description of Artificial Sequence: Synthetic oligonucleotide
gagagagucagagcgucga

SEQ ID NO: 720359 - RNA, 19 nt, Artificial Sequence
  Description of Artificial Sequence: Synthetic oligonucleotide
acucagagacaauggcccu

SEQ ID NO: 720360 - RNA, 19 nt, Artificial Sequence
  Description of Artificial Sequence: Synthetic oligonucleotide
auaugggcuaacuccgguu

SEQ ID NO: 720361 - RNA, 19 nt, Artificial Sequence
  Description of Artificial Sequence: Synthetic oligonucleotide
auuccagguugguuacuca

SEQ ID NO: 720362 - RNA, 19 nt, Artificial Sequence
  Description of Artificial Sequence: Synthetic oligonucleotide
cccuauacauguaaaccug

SEQ ID NO: 720363 - RNA, 19 nt, Artificial Sequence
  Description of Artificial Sequence: Synthetic oligonucleotide
uagggugguuauggcacgg

SEQ ID NO: 720364 - RNA, 19 nt, Artificial Sequence
  Description of Artificial Sequence: Synthetic oligonucleotide
guugacgaagauggcggag

SEQ ID NO: 720365 - RNA, 19 nt, Artificial Sequence
  Description of Artificial Sequence: Synthetic oligonucleotide
uggugaccugagcaccugc

SEQ ID NO: 720366 - RNA, 19 nt, Artificial Sequence
  Description of Artificial Sequence: Synthetic oligonucleotide
cugcuuacaacugcugguc

SEQ ID NO: 720367 - RNA, 19 nt, Artificial Sequence
  Description of Artificial Sequence: Synthetic oligonucleotide
aggucaaaacggaaagaca

SEQ ID NO: 720368 - RNA, 19 nt, Artificial Sequence
  Description of Artificial Sequence: Synthetic oligonucleotide
cccucgacucuuuuaaggc

SEQ ID NO: 720369 - RNA, 19 nt, Artificial Sequence
  Description of Artificial Sequence: Synthetic oligonucleotide
ccucgacucuuuuaaggcg

SEQ ID NO: 720370 - RNA, 19 nt, Artificial Sequence
  Description of Artificial Sequence: Synthetic oligonucleotide
ggugcagaacccagaaucc

SEQ ID NO: 720371 - RNA, 19 nt, Artificial Sequence
  Description of Artificial Sequence: Synthetic oligonucleotide
cuugaacaugaucccgguc

SEQ ID NO: 720372 - RNA, 19 nt, Artificial Sequence
  Description of Artificial Sequence: Synthetic oligonucleotide
uagaucuaguuaggugaug

SEQ ID NO: 720373 - RNA, 19 nt, Artificial Sequence
  Description of Artificial Sequence: Synthetic oligonucleotide
cguggcaagcgugagaugg

SEQ ID NO: 720374 - RNA, 19 nt, Artificial Sequence
  Description of Artificial Sequence: Synthetic oligonucleotide
ggagccauggacuuguggu

SEQ ID NO: 720375 - RNA, 19 nt, Artificial Sequence
  Description of Artificial Sequence: Synthetic oligonucleotide
aaguaucaccgaagacauc

SEQ ID NO: 720376 - RNA, 19 nt, Artificial Sequence
  Description of Artificial Sequence: Synthetic oligonucleotide
acggcccacaugcauggug

SEQ ID NO: 720377 - RNA, 19 nt, Artificial Sequence
  Description of Artificial Sequence: Synthetic oligonucleotide
cauucaggcucucccagga

SEQ ID NO: 720378 - RNA, 19 nt, Artificial Sequence
  Description of Artificial Sequence: Synthetic oligonucleotide
gagggcugaucaugucugc

SEQ ID NO: 720379 - RNA, 19 nt, Artificial Sequence
  Description of Artificial Sequence: Synthetic oligonucleotide
guuaggugaugguggguga

SEQ ID NO: 720380 - RNA, 19 nt, Artificial Sequence
  Description of Artificial Sequence: Synthetic oligonucleotide
cauagcggccaucugugga

SEQ ID NO: 720381 - RNA, 19 nt, Artificial Sequence
  Description of Artificial Sequence: Synthetic oligonucleotide
agggcguagcacuguggag

SEQ ID NO: 720382 - RNA, 19 nt, Artificial Sequence
  Description of Artificial Sequence: Synthetic oligonucleotide
gauaugggcuaacuccggu

SEQ ID NO: 720383 - RNA, 19 nt, Artificial Sequence
  Description of Artificial Sequence: Synthetic oligonucleotide
ugagcauuccagguugguu

SEQ ID NO: 720384 - RNA, 19 nt, Artificial Sequence
  Description of Artificial Sequence: Synthetic oligonucleotide
gggucaagucaguagggac

SEQ ID NO: 720385 - RNA, 19 nt, Artificial Sequence
  Description of Artificial Sequence: Synthetic oligonucleotide
ucuugaugaugggcgagau

SEQ ID NO: 720386 - RNA, 19 nt, Artificial Sequence
  Description of Artificial Sequence: Synthetic oligonucleotide
cucaguguaguggcggcug

SEQ ID NO: 720387 - RNA, 19 nt, Artificial Sequence
  Description of Artificial Sequence: Synthetic oligonucleotide
aacuccgguuggguagauc

SEQ ID NO: 720388 - RNA, 19 nt, Artificial Sequence
  Description of Artificial Sequence: Synthetic oligonucleotide
acaccugccaaagggcaug

SEQ ID NO: 720389 - RNA, 19 nt, Artificial Sequence
  Description of Artificial Sequence: Synthetic oligonucleotide
cagguugguuacucauuac

SEQ ID NO: 720390 - RNA, 19 nt, Artificial Sequence
  Description of Artificial Sequence: Synthetic oligonucleotide
gggauucucuccaacagga

SEQ ID NO: 720391 - RNA, 19 nt, Artificial Sequence
  Description of Artificial Sequence: Synthetic oligonucleotide
cugagccacccuauacaug

SEQ ID NO: 720392 - RNA, 19 nt, Artificial Sequence
  Description of Artificial Sequence: Synthetic oligonucleotide
ugggaacuggacacccauc

SEQ ID NO: 720393 - RNA, 19 nt, Artificial Sequence
  Description of Artificial Sequence: Synthetic oligonucleotide
gguaccuggggauucucuc

SEQ ID NO: 720394 - RNA, 19 nt, Artificial Sequence
  Description of Artificial Sequence: Synthetic oligonucleotide
caccuugacuucaucaucu

SEQ ID NO: 720395 - RNA, 19 nt, Artificial Sequence
  Description of Artificial Sequence: Synthetic oligonucleotide
cucagagacaauggcccug

SEQ ID NO: 720396 - RNA, 19 nt, Artificial Sequence
  Description of Artificial Sequence: Synthetic oligonucleotide
caggaaauuucggggugag

SEQ ID NO: 720397 - RNA, 19 nt, Artificial Sequence
  Description of Artificial Sequence: Synthetic oligonucleotide
gaucuaguuaggugauggu

SEQ ID NO: 720398 - RNA, 19 nt, Artificial Sequence
  Description of Artificial Sequence: Synthetic oligonucleotide
gcuuuggcugcuuacaacu

SEQ ID NO: 720399 - RNA, 19 nt, Artificial Sequence
  Description of Artificial Sequence: Synthetic oligonucleotide
ggcguagcacuguggagag

SEQ ID NO: 720400 - RNA, 19 nt, Artificial Sequence
  Description of Artificial Sequence: Synthetic oligonucleotide
guaucaccgaagacauccc

SEQ ID NO: 720401 - RNA, 19 nt, Artificial Sequence
  Description of Artificial Sequence: Synthetic oligonucleotide
gacucuuuuaaggcguugu

SEQ ID NO: 720402 - RNA, 19 nt, Artificial Sequence
  Description of Artificial Sequence: Synthetic oligonucleotide
cucgacucuuuuaaggcgu

SEQ ID NO: 720403 - RNA, 19 nt, Artificial Sequence
  Description of Artificial Sequence: Synthetic oligonucleotide
cugccccgugggauuaugg

SEQ ID NO: 720404 - RNA, 19 nt, Artificial Sequence
  Description of Artificial Sequence: Synthetic oligonucleotide
gguuggguagaucuaguua

SEQ ID NO: 720405 - RNA, 19 nt, Artificial Sequence
  Description of Artificial Sequence: Synthetic oligonucleotide
guuauggcacgggcugggg

SEQ ID NO: 720406 - RNA, 19 nt, Artificial Sequence
  Description of Artificial Sequence: Synthetic oligonucleotide
ccacccuauacauguaaac

SEQ ID NO: 720407 - RNA, 19 nt, Artificial Sequence
  Description of Artificial Sequence: Synthetic oligonucleotide
aggcggugcacuccauucu

SEQ ID NO: 720408 - RNA, 19 nt, Artificial Sequence
  Description of Artificial Sequence: Synthetic oligonucleotide
gccaggguguuccaggaac

SEQ ID NO: 720409 - RNA, 19 nt, Artificial Sequence
  Description of Artificial Sequence: Synthetic oligonucleotide
gggcugaucaugucugcug

SEQ ID NO: 720410 - RNA, 19 nt, Artificial Sequence
  Description of Artificial Sequence: Synthetic oligonucleotide
gacaauggcccuguguggu

SEQ ID NO: 720411 - RNA, 19 nt, Artificial Sequence
  Description of Artificial Sequence: Synthetic oligonucleotide
uugagcauuccagguuggu

SEQ ID NO: 720412 - RNA, 19 nt, Artificial Sequence
  Description of Artificial Sequence: Synthetic oligonucleotide
uggucccggucacagccac

SEQ ID NO: 720413 - RNA, 19 nt, Artificial Sequence
  Description of Artificial Sequence: Synthetic oligonucleotide
gggauuggggucucagcug

SEQ ID NO: 720414 - RNA, 19 nt, Artificial Sequence
  Description of Artificial Sequence: Synthetic oligonucleotide
ggcuuugucucagccacag

SEQ ID NO: 720415 - RNA, 19 nt, Artificial Sequence
  Description of Artificial Sequence: Synthetic oligonucleotide
gguuauggcacgggcuggg

SEQ ID NO: 720416 - RNA, 19 nt, Artificial Sequence
  Description of Artificial Sequence: Synthetic oligonucleotide
cagggcguagcacugugga

SEQ ID NO: 720417 - RNA, 19 nt, Artificial Sequence
  Description of Artificial Sequence: Synthetic oligonucleotide
cagccucuuucuguugacg

SEQ ID NO: 720418 - RNA, 19 nt, Artificial Sequence
  Description of Artificial Sequence: Synthetic oligonucleotide
cccaugguugcugaggaag

SEQ ID NO: 720419 - RNA, 19 nt, Artificial Sequence
  Description of Artificial Sequence: Synthetic oligonucleotide
auguugggagguaccuggg

SEQ ID NO: 720420 - RNA, 19 nt, Artificial Sequence
  Description of Artificial Sequence: Synthetic oligonucleotide
accacggcccacaugcaug

SEQ ID NO: 720421 - RNA, 19 nt, Artificial Sequence
  Description of Artificial Sequence: Synthetic oligonucleotide
agagagucagagcgucgaa

SEQ ID NO: 720422 - RNA, 19 nt, Artificial Sequence
  Description of Artificial Sequence: Synthetic oligonucleotide
gcuugucgaggcugggagg

SEQ ID NO: 720423 - RNA, 19 nt, Artificial Sequence
  Description of Artificial Sequence: Synthetic oligonucleotide
ggugcaggcggggaagccg

SEQ ID NO: 720424 - RNA, 19 nt, Artificial Sequence
  Description of Artificial Sequence: Synthetic oligonucleotide
gcuuacaacugcuggucca

SEQ ID NO: 720425 - RNA, 19 nt, Artificial Sequence
  Description of Artificial Sequence: Synthetic oligonucleotide
cacagggcguagcacugug

SEQ ID NO: 720426 - RNA, 19 nt, Artificial Sequence
  Description of Artificial Sequence: Synthetic oligonucleotide
aguuaccccauuggggaaa

SEQ ID NO: 720427 - RNA, 19 nt, Artificial Sequence
  Description of Artificial Sequence: Synthetic oligonucleotide
caccgaagacauccccacc

SEQ ID NO: 720428 - RNA, 19 nt, Artificial Sequence
  Description of Artificial Sequence: Synthetic oligonucleotide
gguuacucauuaccgcguc

SEQ ID NO: 720429 - RNA, 19 nt, Artificial Sequence
  Description of Artificial Sequence: Synthetic oligonucleotide
ggauaugggcuaacuccgg

SEQ ID NO: 720430 - RNA, 19 nt, Artificial Sequence
  Description of Artificial Sequence: Synthetic oligonucleotide
gugaccugagcaccugcca

SEQ ID NO: 720431 - RNA, 19 nt, Artificial Sequence
  Description of Artificial Sequence: Synthetic oligonucleotide
auggugcagaacccagaau

SEQ ID NO: 720432 - RNA, 19 nt, Artificial Sequence
  Description of Artificial Sequence: Synthetic oligonucleotide
ggcgagauggcaggugggg

SEQ ID NO: 720433 - RNA, 19 nt, Artificial Sequence
  Description of Artificial Sequence: Synthetic oligonucleotide
cauagaccaggaaggauau

SEQ ID NO: 720434 - RNA, 19 nt, Artificial Sequence
  Description of Artificial Sequence: Synthetic oligonucleotide
gaacaugaucccgguccug

SEQ ID NO: 720435 - RNA, 19 nt, Artificial Sequence
  Description of Artificial Sequence: Synthetic oligonucleotide
guaguggcggcuggcccgg

SEQ ID NO: 720436 - RNA, 19 nt, Artificial Sequence
  Description of Artificial Sequence: Synthetic oligonucleotide
caggggaaagaauuuugcu

SEQ ID NO: 720437 - RNA, 19 nt, Artificial Sequence
  Description of Artificial Sequence: Synthetic oligonucleotide
uuaaggcguuguccccagu

SEQ ID NO: 720438 - RNA, 19 nt, Artificial Sequence
  Description of Artificial Sequence: Synthetic oligonucleotide
cauggacuugugguagcac

SEQ ID NO: 720439 - RNA, 19 nt, Artificial Sequence
  Description of Artificial Sequence: Synthetic oligonucleotide
cacggucucgguugcugug

SEQ ID NO: 720440 - RNA, 19 nt, Artificial Sequence
  Description of Artificial Sequence: Synthetic oligonucleotide
cccauaagcucgcugagga

SEQ ID NO: 720441 - RNA, 19 nt, Artificial Sequence
  Description of Artificial Sequence: Synthetic oligonucleotide
cauagguggccugguugag

SEQ ID NO: 720442 - RNA, 19 nt, Artificial Sequence
  Description of Artificial Sequence: Synthetic oligonucleotide
ucggggucuagggugguua

SEQ ID NO: 720443 - RNA, 19 nt, Artificial Sequence
  Description of Artificial Sequence: Synthetic oligonucleotide
ugguaggacugcugucaaa

SEQ ID NO: 720444 - RNA, 19 nt, Artificial Sequence
  Description of Artificial Sequence: Synthetic oligonucleotide
ggucuagggugguuauggc

SEQ ID NO: 720445 - RNA, 19 nt, Artificial Sequence
  Description of Artificial Sequence: Synthetic oligonucleotide
cauccgacaggagacagcu

SEQ ID NO: 720446 - RNA, 19 nt, Artificial Sequence
  Description of Artificial Sequence: Synthetic oligonucleotide
cccacaugcaugguguggc

SEQ ID NO: 720447 - RNA, 19 nt, Artificial Sequence
  Description of Artificial Sequence: Synthetic oligonucleotide
ccuagucccucacaccuug

SEQ ID NO: 720448 - RNA, 19 nt, Artificial Sequence
  Description of Artificial Sequence: Synthetic oligonucleotide
gggcguagcacuguggaga

SEQ ID NO: 720449 - RNA, 19 nt, Artificial Sequence
  Description of Artificial Sequence: Synthetic oligonucleotide
aacccagaauccaggccau

SEQ ID NO: 720450 - RNA, 19 nt, Artificial Sequence
  Description of Artificial Sequence: Synthetic oligonucleotide
ucccgccgagcauccaucu

SEQ ID NO: 720451 - RNA, 19 nt, Artificial Sequence
  Description of Artificial Sequence: Synthetic oligonucleotide
gccuaagucaaggucaaaa

SEQ ID NO: 720452 - RNA, 19 nt, Artificial Sequence
  Description of Artificial Sequence: Synthetic oligonucleotide
gggccucuuaucauugagc

SEQ ID NO: 720453 - RNA, 19 nt, Artificial Sequence
  Description of Artificial Sequence: Synthetic oligonucleotide
ucaagucaguagggacccc

SEQ ID NO: 720454 - RNA, 19 nt, Artificial Sequence
  Description of Artificial Sequence: Synthetic oligonucleotide
ccuggccaggaaauuucgg

SEQ ID NO: 720455 - RNA, 19 nt, Artificial Sequence
  Description of Artificial Sequence: Synthetic oligonucleotide
ggaggcuugucucgggguc

SEQ ID NO: 720456 - RNA, 19 nt, Artificial Sequence
  Description of Artificial Sequence: Synthetic oligonucleotide
ggugaccugagcaccugcc

SEQ ID NO: 720457 - RNA, 19 nt, Artificial Sequence
  Description of Artificial Sequence: Synthetic oligonucleotide
ugguagcaccccugccagc

SEQ ID NO: 720458 - RNA, 19 nt, Artificial Sequence
  Description of Artificial Sequence: Synthetic oligonucleotide
cucuucccaugggaacugg

SEQ ID NO: 720459 - RNA, 19 nt, Artificial Sequence
  Description of Artificial Sequence: Synthetic oligonucleotide
caagagagagucagagcgu

SEQ ID NO: 720460 - RNA, 19 nt, Artificial Sequence
  Description of Artificial Sequence: Synthetic oligonucleotide
ugccccugagccacccuau

SEQ ID NO: 720461 - RNA, 19 nt, Artificial Sequence
  Description of Artificial Sequence: Synthetic oligonucleotide
auagaccaggaaggauaug

SEQ ID NO: 720462 - RNA, 19 nt, Artificial Sequence
  Description of Artificial Sequence: Synthetic oligonucleotide
cacacguggcaagcgugag

SEQ ID NO: 720463 - RNA, 19 nt, Artificial Sequence
  Description of Artificial Sequence: Synthetic oligonucleotide
acugaggcacagggcguag

SEQ ID NO: 720464 - RNA, 19 nt, Artificial Sequence
  Description of Artificial Sequence: Synthetic oligonucleotide
cuaacuccgguuggguaga

SEQ ID NO: 720465 - RNA, 19 nt, Artificial Sequence
  Description of Artificial Sequence: Synthetic oligonucleotide
caaagggccuagaugcagu

SEQ ID NO: 720466 - RNA, 19 nt, Artificial Sequence
  Description of Artificial Sequence: Synthetic oligonucleotide
gcugcuuacaacugcuggu

SEQ ID NO: 720467 - RNA, 19 nt, Artificial Sequence
  Description of Artificial Sequence: Synthetic oligonucleotide
guuacucauuaccgcgucu

SEQ ID NO: 720468 - RNA, 19 nt, Artificial Sequence
  Description of Artificial Sequence: Synthetic oligonucleotide
gcggugggugcuuccagag

SEQ ID NO: 720469 - RNA, 19 nt, Artificial Sequence
  Description of Artificial Sequence: Synthetic oligonucleotide
ccuccuggugaccugagca

SEQ ID NO: 720470 - RNA, 19 nt, Artificial Sequence
  Description of Artificial Sequence: Synthetic oligonucleotide
ggggcagcucuaaaugagc

SEQ ID NO: 720471 - RNA, 19 nt, Artificial Sequence
  Description of Artificial Sequence: Synthetic oligonucleotide
cagaagccaacccucgacu

SEQ ID NO: 720472 - RNA, 19 nt, Artificial Sequence
  Description of Artificial Sequence: Synthetic oligonucleotide
gacuugugguagcaccccu

SEQ ID NO: 720473 - RNA, 19 nt, Artificial Sequence
  Description of Artificial Sequence: Synthetic oligonucleotide
ggacuugugguagcacccc

SEQ ID NO: 720474 - RNA, 19 nt, Artificial Sequence
  Description of Artificial Sequence: Synthetic oligonucleotide
ugccacugguaggcggugc

SEQ ID NO: 720475 - RNA, 19 nt, Artificial Sequence
  Description of Artificial Sequence: Synthetic oligonucleotide
cucccgccgagcauccauc

SEQ ID NO: 720476 - RNA, 19 nt, Artificial Sequence
  Description of Artificial Sequence: Synthetic oligonucleotide
gcuugucucggggucuagg

SEQ ID NO: 720477 - RNA, 19 nt, Artificial Sequence
  Description of Artificial Sequence: Synthetic oligonucleotide
augggcgagauggcaggug

SEQ ID NO: 720478 - RNA, 19 nt, Artificial Sequence
  Description of Artificial Sequence: Synthetic oligonucleotide
guagaucuaguuaggugau

SEQ ID NO: 720479 - RNA, 19 nt, Artificial Sequence
  Description of Artificial Sequence: Synthetic oligonucleotide
ccacaugcaugguguggcg

SEQ ID NO: 720480 - RNA, 19 nt, Artificial Sequence
  Description of Artificial Sequence: Synthetic oligonucleotide
uccuucgagguggcacccc

SEQ ID NO: 720481 - RNA, 19 nt, Artificial Sequence
  Description of Artificial Sequence: Synthetic oligonucleotide
cguccuucgagguggcacc

SEQ ID NO: 720482 - RNA, 19 nt, Artificial Sequence
  Description of Artificial Sequence: Synthetic oligonucleotide
gacacccauccgacaggag

SEQ ID NO: 720483 - RNA, 19 nt, Artificial Sequence
  Description of Artificial Sequence: Synthetic oligonucleotide
cugaggcacagggcguagc

SEQ ID NO: 720484 - RNA, 19 nt, Artificial Sequence
  Description of Artificial Sequence: Synthetic oligonucleotide
aagggcauguugggaggua

SEQ ID NO: 720485 - RNA, 19 nt, Artificial Sequence
  Description of Artificial Sequence: Synthetic oligonucleotide
ugggauuauggggcagaua

SEQ ID NO: 720486 - RNA, 19 nt, Artificial Sequence
  Description of Artificial Sequence: Synthetic oligonucleotide
cucacaggggaaagaauuu

SEQ ID NO: 720487 - RNA, 19 nt, Artificial Sequence
  Description of Artificial Sequence: Synthetic oligonucleotide
ugucgaggcugggaggcuu

SEQ ID NO: 720488 - RNA, 19 nt, Artificial Sequence
  Description of Artificial Sequence: Synthetic oligonucleotide
cgaagacauccccaccacg

SEQ ID NO: 720489 - RNA, 19 nt, Artificial Sequence
  Description of Artificial Sequence: Synthetic oligonucleotide
ccauccgacaggagacagc

SEQ ID NO: 720490 - RNA, 19 nt, Artificial Sequence
  Description of Artificial Sequence: Synthetic oligonucleotide
ugggagguaccuggggauu

SEQ ID NO: 720491 - RNA, 19 nt, Artificial Sequence
  Description of Artificial Sequence: Synthetic oligonucleotide
gggcaaagagauggcauuc

SEQ ID NO: 720492 - RNA, 19 nt, Artificial Sequence
  Description of Artificial Sequence: Synthetic oligonucleotide
gcagggauuggggucucag

SEQ ID NO: 720493 - RNA, 19 nt, Artificial Sequence
  Description of Artificial Sequence: Synthetic oligonucleotide
cacguggcaagcgugagau

SEQ ID NO: 720494 - RNA, 19 nt, Artificial Sequence
  Description of Artificial Sequence: Synthetic oligonucleotide
gggcagauauugguuccag

SEQ ID NO: 720495 - RNA, 19 nt, Artificial Sequence
  Description of Artificial Sequence: Synthetic oligonucleotide
acguggcaagcgugagaug

SEQ ID NO: 720496 - RNA, 19 nt, Artificial Sequence
  Description of Artificial Sequence: Synthetic oligonucleotide
cucgguugcugugcuuuuc

SEQ ID NO: 720497 - RNA, 19 nt, Artificial Sequence
  Description of Artificial Sequence: Synthetic oligonucleotide
gcccacaugcauggugugg

SEQ ID NO: 720498 - RNA, 19 nt, Artificial Sequence
  Description of Artificial Sequence: Synthetic oligonucleotide
aggcuugucgaggcuggga

SEQ ID NO: 720499 - RNA, 19 nt, Artificial Sequence
  Description of Artificial Sequence: Synthetic oligonucleotide
cagucccacucagagacaa

SEQ ID NO: 720500 - RNA, 19 nt, Artificial Sequence
  Description of Artificial Sequence: Synthetic oligonucleotide
cugguaggacugcugucaa

SEQ ID NO: 720501 - RNA, 19 nt, Artificial Sequence
  Description of Artificial Sequence: Synthetic oligonucleotide
cagccacggucucgguugc

SEQ ID NO: 720502 - RNA, 19 nt, Artificial Sequence
  Description of Artificial Sequence: Synthetic oligonucleotide
ggccaggaaauuucggggu

SEQ ID NO: 720503 - RNA, 19 nt, Artificial Sequence
  Description of Artificial Sequence: Synthetic oligonucleotide
uuaccccauuggggaaaug

SEQ ID NO: 720504 - RNA, 19 nt, Artificial Sequence
  Description of Artificial Sequence: Synthetic oligonucleotide
cuagucccucacaccuuga

SEQ ID NO: 720505 - RNA, 19 nt, Artificial Sequence
  Description of Artificial Sequence: Synthetic oligonucleotide
uugucgaggcugggaggcu

SEQ ID NO: 720506 - RNA, 19 nt, Artificial Sequence
  Description of Artificial Sequence: Synthetic oligonucleotide
guccuucgagguggcaccc

SEQ ID NO: 720507 - RNA, 19 nt, Artificial Sequence
  Description of Artificial Sequence: Synthetic oligonucleotide
gucgaggcugggaggcuug

SEQ ID NO: 720508 - RNA, 19 nt, Artificial Sequence
  Description of Artificial Sequence: Synthetic oligonucleotide
caguuaccccauuggggaa

SEQ ID NO: 720509 - RNA, 19 nt, Artificial Sequence
  Description of Artificial Sequence: Synthetic oligonucleotide
acccauccgacaggagaca

SEQ ID NO: 720510 - RNA, 19 nt, Artificial Sequence
  Description of Artificial Sequence: Synthetic oligonucleotide
gagguaccuggggauucuc

SEQ ID NO: 720511 - RNA, 19 nt, Artificial Sequence
  Description of Artificial Sequence: Synthetic oligonucleotide
cuuacaacugcugguccau

SEQ ID NO: 720512 - RNA, 19 nt, Artificial Sequence
  Description of Artificial Sequence: Synthetic oligonucleotide
gagcgucgaagcucuggcu

SEQ ID NO: 720513 - RNA, 19 nt, Artificial Sequence
  Description of Artificial Sequence: Synthetic oligonucleotide
accuagagccagggaagau

SEQ ID NO: 720514 - RNA, 19 nt, Artificial Sequence
  Description of Artificial Sequence: Synthetic oligonucleotide
aagcugccccgugggauua

SEQ ID NO: 720515 - RNA, 19 nt, Artificial Sequence
  Description of Artificial Sequence: Synthetic oligonucleotide
ggaaggauaugggcuaacu

SEQ ID NO: 720516 - RNA, 19 nt, Artificial Sequence
  Description of Artificial Sequence: Synthetic oligonucleotide
ccccauaagcucgcugagg

SEQ ID NO: 720517 - RNA, 19 nt, Artificial Sequence
  Description of Artificial Sequence: Synthetic oligonucleotide
ggcuaacuccgguugggua

SEQ ID NO: 720518 - RNA, 19 nt, Artificial Sequence
  Description of Artificial Sequence: Synthetic oligonucleotide
ccgccgagcauccaucuca

SEQ ID NO: 720519 - RNA, 19 nt, Artificial Sequence
  Description of Artificial Sequence: Synthetic oligonucleotide
gaggcuugucucggggucu

SEQ ID NO: 720520 - RNA, 19 nt, Artificial Sequence
  Description of Artificial Sequence: Synthetic oligonucleotide
uggggcccugccacuggua

SEQ ID NO: 720521 - RNA, 19 nt, Artificial Sequence
  Description of Artificial Sequence: Synthetic oligonucleotide
gggguuggcauggggugug

SEQ ID NO: 720522 - RNA, 19 nt, Artificial Sequence
  Description of Artificial Sequence: Synthetic oligonucleotide
ccguccuucgagguggcac

SEQ ID NO: 720523 - RNA, 19 nt, Artificial Sequence
  Description of Artificial Sequence: Synthetic oligonucleotide
gggcgagauggcagguggg

SEQ ID NO: 720524 - RNA, 19 nt, Artificial Sequence
  Description of Artificial Sequence: Synthetic oligonucleotide
ggcccacaugcauggugug

SEQ ID NO: 720525 - RNA, 19 nt, Artificial Sequence
  Description of Artificial Sequence: Synthetic oligonucleotide
cccauccgacaggagacag

SEQ ID NO: 720526 - RNA, 19 nt, Artificial Sequence
  Description of Artificial Sequence: Synthetic oligonucleotide
gugagggugcaggcgggga

SEQ ID NO: 720527 - RNA, 19 nt, Artificial Sequence
  Description of Artificial Sequence: Synthetic oligonucleotide
gggagguaccuggggauuc

SEQ ID NO: 720528 - RNA, 19 nt, Artificial Sequence
  Description of Artificial Sequence: Synthetic oligonucleotide
gaugggcgagauggcaggu

SEQ ID NO: 720529 - RNA, 19 nt, Artificial Sequence
  Description of Artificial Sequence: Synthetic oligonucleotide
cuuccuggccaggaaauuu

SEQ ID NO: 720530 - RNA, 19 nt, Artificial Sequence
  Description of Artificial Sequence: Synthetic oligonucleotide
caugcaugguguggcggaa

SEQ ID NO: 720531 - RNA, 19 nt, Artificial Sequence
  Description of Artificial Sequence: Synthetic oligonucleotide
gcuuugcauagaccaggaa

SEQ ID NO: 720532 - RNA, 19 nt, Artificial Sequence
  Description of Artificial Sequence: Synthetic oligonucleotide
ggcauguugggagguaccu

SEQ ID NO: 720533 - RNA, 19 nt, Artificial Sequence
  Description of Artificial Sequence: Synthetic oligonucleotide
gggaggugccccugagcca

SEQ ID NO: 720534 - RNA, 19 nt, Artificial Sequence
  Description of Artificial Sequence: Synthetic oligonucleotide
uaacuccgguuggguagau

SEQ ID NO: 720535 - RNA, 19 nt, Artificial Sequence
  Description of Artificial Sequence: Synthetic oligonucleotide
ggggucuagggugguuaug

SEQ ID NO: 720536 - RNA, 19 nt, Artificial Sequence
  Description of Artificial Sequence: Synthetic oligonucleotide
cacaccugccaaagggcau

SEQ ID NO: 720537 - RNA, 19 nt, Artificial Sequence
  Description of Artificial Sequence: Synthetic oligonucleotide
gccacccuauacauguaaa

SEQ ID NO: 720538 - RNA, 19 nt, Artificial Sequence
  Description of Artificial Sequence: Synthetic oligonucleotide
guaggcggugcacuccauu

SEQ ID NO: 720539 - RNA, 19 nt, Artificial Sequence
  Description of Artificial Sequence: Synthetic oligonucleotide
ccaacaggacuaggcuuug

SEQ ID NO: 720540 - RNA, 19 nt, Artificial Sequence
  Description of Artificial Sequence: Synthetic oligonucleotide
gcaggcggggaagccgucc

SEQ ID NO: 720541 - RNA, 19 nt, Artificial Sequence
  Description of Artificial Sequence: Synthetic oligonucleotide
cacugguaggcggugcacu

SEQ ID NO: 720542 - RNA, 19 nt, Artificial Sequence
  Description of Artificial Sequence: Synthetic oligonucleotide
ccggucacagccacggucu

SEQ ID NO: 720543 - RNA, 19 nt, Artificial Sequence
  Description of Artificial Sequence: Synthetic oligonucleotide
guuaccccauuggggaaau

SEQ ID NO: 720544 - RNA, 19 nt, Artificial Sequence
  Description of Artificial Sequence: Synthetic oligonucleotide
ccaacccucgacucuuuua

SEQ ID NO: 720545 - RNA, 19 nt, Artificial Sequence
  Description of Artificial Sequence: Synthetic oligonucleotide
ccacccugcgcaccugcug

SEQ ID NO: 720546 - RNA, 19 nt, Artificial Sequence
  Description of Artificial Sequence: Synthetic oligonucleotide
cagcuugcccaggcucaug

SEQ ID NO: 720547 - RNA, 19 nt, Artificial Sequence
  Description of Artificial Sequence: Synthetic oligonucleotide
aggcuugucucggggucua

SEQ ID NO: 720548 - RNA, 19 nt, Artificial Sequence
  Description of Artificial Sequence: Synthetic oligonucleotide
guggcaagcgugagauggu

SEQ ID NO: 720549 - RNA, 19 nt, Artificial Sequence
  Description of Artificial Sequence: Synthetic oligonucleotide
gggccgggcaucagcuuug

SEQ ID NO: 720550 - RNA, 19 nt, Artificial Sequence
  Description of Artificial Sequence: Synthetic oligonucleotide
cccaugccuagucccucac

SEQ ID NO: 720551 - RNA, 19 nt, Artificial Sequence
  Description of Artificial Sequence: Synthetic oligonucleotide
gggaggcuugucucggggu

SEQ ID NO: 720552 - RNA, 19 nt, Artificial Sequence
  Description of Artificial Sequence: Synthetic oligonucleotide
ccccagcuggcuccacacc

SEQ ID NO: 720553 - RNA, 19 nt, Artificial Sequence
  Description of Artificial Sequence: Synthetic oligonucleotide
gcgugagauggugcagaac

SEQ ID NO: 720554 - RNA, 19 nt, Artificial Sequence
  Description of Artificial Sequence: Synthetic oligonucleotide
caggcggggaagccguccu

SEQ ID NO: 720555 - RNA, 19 nt, Artificial Sequence
  Description of Artificial Sequence: Synthetic oligonucleotide
ccaggguguuccaggaacu

SEQ ID NO: 720556 - RNA, 19 nt, Artificial Sequence
  Description of Artificial Sequence: Synthetic oligonucleotide
caccacggcccacaugcau

SEQ ID NO: 720557 - RNA, 19 nt, Artificial Sequence
  Description of Artificial Sequence: Synthetic oligonucleotide
ggcggugcacuccauucuu

SEQ ID NO: 720558 - RNA, 19 nt, Artificial Sequence
  Description of Artificial Sequence: Synthetic oligonucleotide
gcugccccgugggauuaug

SEQ ID NO: 720559 - RNA, 19 nt, Artificial Sequence
  Description of Artificial Sequence: Synthetic oligonucleotide
gcggugcacuccauucuuc

SEQ ID NO: 720560 - RNA, 19 nt, Artificial Sequence
  Description of Artificial Sequence: Synthetic oligonucleotide
cggagcagaagccaacccu

SEQ ID NO: 720561 - RNA, 19 nt, Artificial Sequence
  Description of Artificial Sequence: Synthetic oligonucleotide
caccugggccucuuaucau

SEQ ID NO: 720562 - RNA, 19 nt, Artificial Sequence
  Description of Artificial Sequence: Synthetic oligonucleotide
ggcuugucucggggucuag

SEQ ID NO: 720563 - RNA, 19 nt, Artificial Sequence
  Description of Artificial Sequence: Synthetic oligonucleotide
ggagguaccuggggauucu

SEQ ID NO: 720564 - RNA, 19 nt, Artificial Sequence
  Description of Artificial Sequence: Synthetic oligonucleotide
ccgccucuucccaugggaa

SEQ ID NO: 720565 - RNA, 19 nt, Artificial Sequence
  Description of Artificial Sequence: Synthetic oligonucleotide
ggauuauggggcagauauu

SEQ ID NO: 720566 - RNA, 19 nt, Artificial Sequence
  Description of Artificial Sequence: Synthetic oligonucleotide
ccgugggauuauggggcag

SEQ ID NO: 720567 - RNA, 19 nt, Artificial Sequence
  Description of Artificial Sequence: Synthetic oligonucleotide
cccgccgagcauccaucuc

SEQ ID NO: 720568 - RNA, 19 nt, Artificial Sequence
  Description of Artificial Sequence: Synthetic oligonucleotide
agcugccccgugggauuau

SEQ ID NO: 720569 - RNA, 19 nt, Artificial Sequence
  Description of Artificial Sequence: Synthetic oligonucleotide
gggcuaacuccgguugggu

SEQ ID NO: 720570 - RNA, 19 nt, Artificial Sequence
  Description of Artificial Sequence: Synthetic oligonucleotide
ccgguuggguagaucuagu

SEQ ID NO: 720571 - RNA, 19 nt, Artificial Sequence
  Description of Artificial Sequence: Synthetic oligonucleotide
ccacggucucgguugcugu

SEQ ID NO: 720572 - RNA, 19 nt, Artificial Sequence
  Description of Artificial Sequence: Synthetic oligonucleotide
gccccugagccacccuaua

SEQ ID NO: 720573 - RNA, 19 nt, Artificial Sequence
  Description of Artificial Sequence: Synthetic oligonucleotide
ccaccacggcccacaugca

SEQ ID NO: 720574 - RNA, 19 nt, Artificial Sequence
  Description of Artificial Sequence: Synthetic oligonucleotide
ccccaugguugcugaggaa

SEQ ID NO: 720575 - RNA, 19 nt, Artificial Sequence
  Description of Artificial Sequence: Synthetic oligonucleotide
ggugccccugagccacccu

SEQ ID NO: 720576 - RNA, 19 nt, Artificial Sequence
  Description of Artificial Sequence: Synthetic oligonucleotide
gcacagggcguagcacugu

SEQ ID NO: 720577 - RNA, 19 nt, Artificial Sequence
  Description of Artificial Sequence: Synthetic oligonucleotide
ccucacccaugccugcuuu

SEQ ID NO: 720578 - RNA, 19 nt, Artificial Sequence
  Description of Artificial Sequence: Synthetic oligonucleotide
gccguccuucgagguggca

SEQ ID NO: 720579 - RNA, 19 nt, Artificial Sequence
  Description of Artificial Sequence: Synthetic oligonucleotide
cggucucgguugcugugcu

SEQ ID NO: 720580 - RNA, 19 nt, Artificial Sequence
  Description of Artificial Sequence: Synthetic oligonucleotide
uauaaugacacuuaguugc

SEQ ID NO: 720581 - RNA, 19 nt, Artificial Sequence
  Description of Artificial Sequence: Synthetic oligonucleotide
aaaacaugcggauucuagg

SEQ ID NO: 720582 - RNA, 19 nt, Artificial Sequence
  Description of Artificial Sequence: Synthetic oligonucleotide
aaacaugcggauucuaggg

SEQ ID NO: 720583 - RNA, 19 nt, Artificial Sequence
  Description of Artificial Sequence: Synthetic oligonucleotide
aaaguacuugcacagaagu

SEQ ID NO: 720584 - RNA, 19 nt, Artificial Sequence
  Description of Artificial Sequence: Synthetic oligonucleotide
auagucaggggacagggcc

SEQ ID NO: 720585 - RNA, 19 nt, Artificial Sequence
  Description of Artificial Sequence: Synthetic oligonucleotide
agaacugcgaugucaaugg

SEQ ID NO: 720586 - RNA, 19 nt, Artificial Sequence
  Description of Artificial Sequence: Synthetic oligonucleotide
uccaaauugcccuggaagg

SEQ ID NO: 720587 - RNA, 19 nt, Artificial Sequence
  Description of Artificial Sequence: Synthetic oligonucleotide
aguuccuuauacuuaagag

SEQ ID NO: 720588 - RNA, 19 nt, Artificial Sequence
  Description of Artificial Sequence: Synthetic oligonucleotide
caaggguucagaaagguag

SEQ ID NO: 720589 - RNA, 19 nt, Artificial Sequence
  Description of Artificial Sequence: Synthetic oligonucleotide
aggacaagcaaauaaauaa

SEQ ID NO: 720590 - RNA, 19 nt, Artificial Sequence
  Description of Artificial Sequence: Synthetic oligonucleotide
uucauaagcgaugugaagc

SEQ ID NO: 720591 - RNA, 19 nt, Artificial Sequence
  Description of Artificial Sequence: Synthetic oligonucleotide
aaaggaagaacugcgaugu

SEQ ID NO: 720592 - RNA, 19 nt, Artificial Sequence
  Description of Artificial Sequence: Synthetic oligonucleotide
aguugaaaggaagaacugc

SEQ ID NO: 720593 - RNA, 19 nt, Artificial Sequence
  Description of Artificial Sequence: Synthetic oligonucleotide
gauaaggacaagcaaauaa

SEQ ID NO: 720594 - RNA, 19 nt, Artificial Sequence
  Description of Artificial Sequence: Synthetic oligonucleotide
ucuccaagcaaggauaagg

SEQ ID NO: 720595 - RNA, 19 nt, Artificial Sequence
  Description of Artificial Sequence: Synthetic oligonucleotide
agacauuggguauaaugac

SEQ ID NO: 720596 - RNA, 19 nt, Artificial Sequence
  Description of Artificial Sequence: Synthetic oligonucleotide
acuaccuagcaguuguagc

SEQ ID NO: 720597 - RNA, 19 nt, Artificial Sequence
  Description of Artificial Sequence: Synthetic oligonucleotide
aaccaaauggccaauauaa

SEQ ID NO: 720598 - RNA, 19 nt, Artificial Sequence
  Description of Artificial Sequence: Synthetic oligonucleotide
guugaaaggaagaacugcg

SEQ ID NO: 720599 - RNA, 19 nt, Artificial Sequence
  Description of Artificial Sequence: Synthetic oligonucleotide
aagaugugacaacaggucu

SEQ ID NO: 720600 - RNA, 19 nt, Artificial Sequence
  Description of Artificial Sequence: Synthetic oligonucleotide
uacacuaccuagcaguugu

SEQ ID NO: 720601 - RNA, 19 nt, Artificial Sequence
  Description of Artificial Sequence: Synthetic oligonucleotide
aagaggugggcaucaugcc

SEQ ID NO: 720602 - RNA, 19 nt, Artificial Sequence
  Description of Artificial Sequence: Synthetic oligonucleotide
gaaaggaagaacugcgaug

SEQ ID NO: 720603 - RNA, 19 nt, Artificial Sequence
  Description of Artificial Sequence: Synthetic oligonucleotide
ugcgaagaaaccucgggag

SEQ ID NO: 720604 - RNA, 19 nt, Artificial Sequence
  Description of Artificial Sequence: Synthetic oligonucleotide
uugaguguccacauguaca

SEQ ID NO: 720605 - RNA, 19 nt, Artificial Sequence
  Description of Artificial Sequence: Synthetic oligonucleotide
auggccaauauaaagggcg

SEQ ID NO: 720606 - RNA, 19 nt, Artificial Sequence
  Description of Artificial Sequence: Synthetic oligonucleotide
uguuuguaggggaagucug

SEQ ID NO: 720607 - RNA, 19 nt, Artificial Sequence
  Description of Artificial Sequence: Synthetic oligonucleotide
ugugaagcaggcaucgcgc

SEQ ID NO: 720608 - RNA, 19 nt, Artificial Sequence
  Description of Artificial Sequence: Synthetic oligonucleotide
ugguguaaccuccugcucc

SEQ ID NO: 720609 - RNA, 19 nt, Artificial Sequence
  Description of Artificial Sequence: Synthetic oligonucleotide
ugggaaaacaugcggauuc

SEQ ID NO: 720610 - RNA, 19 nt, Artificial Sequence
  Description of Artificial Sequence: Synthetic oligonucleotide
uaagcgaugugaagcaggc

SEQ ID NO: 720611 - RNA, 19 nt, Artificial Sequence
  Description of Artificial Sequence: Synthetic oligonucleotide
aagaacugcgaugucaaug

SEQ ID NO: 720612 - RNA, 19 nt, Artificial Sequence
  Description of Artificial Sequence: Synthetic oligonucleotide
guauaaugacacuuaguug

SEQ ID NO: 720613 - RNA, 19 nt, Artificial Sequence
  Description of Artificial Sequence: Synthetic oligonucleotide
ucauaagcgaugugaagca

SEQ ID NO: 720614 - RNA, 19 nt, Artificial Sequence
  Description of Artificial Sequence: Synthetic oligonucleotide
cuuauacuuaagagguggg

SEQ ID NO: 720615 - RNA, 19 nt, Artificial Sequence
  Description of Artificial Sequence: Synthetic oligonucleotide
uggguauaaugacacuuag

SEQ ID NO: 720616 - RNA, 19 nt, Artificial Sequence
  Description of Artificial Sequence: Synthetic oligonucleotide
ucaccaaugaacauuuauu

SEQ ID NO: 720617 - RNA, 19 nt, Artificial Sequence
  Description of Artificial Sequence: Synthetic oligonucleotide
gguucagaaagguaguucc

SEQ ID NO: 720618 - RNA, 19 nt, Artificial Sequence
  Description of Artificial Sequence: Synthetic oligonucleotide
agcucuugcaagucagccc

SEQ ID NO: 720619 - RNA, 19 nt, Artificial Sequence
  Description of Artificial Sequence: Synthetic oligonucleotide
acagucaggugacaccagc

SEQ ID NO: 720620 - RNA, 19 nt, Artificial Sequence
  Description of Artificial Sequence: Synthetic oligonucleotide
aauucuaccagcacacccu

SEQ ID NO: 720621 - RNA, 19 nt, Artificial Sequence
  Description of Artificial Sequence: Synthetic oligonucleotide
cugugaaaugucauuggcc

SEQ ID NO: 720622 - RNA, 19 nt, Artificial Sequence
  Description of Artificial Sequence: Synthetic oligonucleotide
ugagguaucauggccgggg

SEQ ID NO: 720623 - RNA, 19 nt, Artificial Sequence
  Description of Artificial Sequence: Synthetic oligonucleotide
auauaaagggcgcggaccu

SEQ ID NO: 720624 - RNA, 19 nt, Artificial Sequence
  Description of Artificial Sequence: Synthetic oligonucleotide
guggagugcaaucacuggg

SEQ ID NO: 720625 - RNA, 19 nt, Artificial Sequence
  Description of Artificial Sequence: Synthetic oligonucleotide
gucacuaaaguugaaagga

SEQ ID NO: 720626 - RNA, 19 nt, Artificial Sequence
  Description of Artificial Sequence: Synthetic oligonucleotide
cacugagguaucauggccg

SEQ ID NO: 720627 - RNA, 19 nt, Artificial Sequence
  Description of Artificial Sequence: Synthetic oligonucleotide
aguuggggcuuacacuacc

SEQ ID NO: 720628 - RNA, 19 nt, Artificial Sequence
  Description of Artificial Sequence: Synthetic oligonucleotide
auaaugacacuuaguugcc

SEQ ID NO: 720629 - RNA, 19 nt, Artificial Sequence
  Description of Artificial Sequence: Synthetic oligonucleotide
uaccagcacacccugguag

SEQ ID NO: 720630 - RNA, 19 nt, Artificial Sequence
  Description of Artificial Sequence: Synthetic oligonucleotide
uugaaaggaagaacugcga

SEQ ID NO: 720631 - RNA, 19 nt, Artificial Sequence
  Description of Artificial Sequence: Synthetic oligonucleotide
uuauacuuaagaggugggc

SEQ ID NO: 720632 - RNA, 19 nt, Artificial Sequence
  Description of Artificial Sequence: Synthetic oligonucleotide
cucuguuccaagccaaucc

SEQ ID NO: 720633 - RNA, 19 nt, Artificial Sequence
  Description of Artificial Sequence: Synthetic oligonucleotide
accaaugaacauuuauuga

SEQ ID NO: 720634 - RNA, 19 nt, Artificial Sequence
  Description of Artificial Sequence: Synthetic oligonucleotide
aggaugcaguuccuuauac

SEQ ID NO: 720635 - RNA, 19 nt, Artificial Sequence
  Description of Artificial Sequence: Synthetic oligonucleotide
aagggcgcggaccuugggg

SEQ ID NO: 720636 - RNA, 19 nt, Artificial Sequence
  Description of Artificial Sequence: Synthetic oligonucleotide
augggacugugacagaaag

SEQ ID NO: 720637 - RNA, 19 nt, Artificial Sequence
  Description of Artificial Sequence: Synthetic oligonucleotide
aacaugcggauucuagggu

SEQ ID NO: 720638 - RNA, 19 nt, Artificial Sequence
  Description of Artificial Sequence: Synthetic oligonucleotide
agcgaugugaagcaggcau

SEQ ID NO: 720639 - RNA, 19 nt, Artificial Sequence
  Description of Artificial Sequence: Synthetic oligonucleotide
auucuagggugguguaacc

SEQ ID NO: 720640 - RNA, 19 nt, Artificial Sequence
  Description of Artificial Sequence: Synthetic oligonucleotide
gaagaugugacaacagguc

SEQ ID NO: 720641 - RNA, 19 nt, Artificial Sequence
  Description of Artificial Sequence: Synthetic oligonucleotide
ucacuaaaguugaaaggaa

SEQ ID NO: 720642 - RNA, 19 nt, Artificial Sequence
  Description of Artificial Sequence: Synthetic oligonucleotide
ugaucaggaucucccgggg

SEQ ID NO: 720643 - RNA, 19 nt, Artificial Sequence
  Description of Artificial Sequence: Synthetic oligonucleotide
gaagucugaagaagggucc

SEQ ID NO: 720644 - RNA, 19 nt, Artificial Sequence
  Description of Artificial Sequence: Synthetic oligonucleotide
aguaugcgggucuccaagg

SEQ ID NO: 720645 - RNA, 19 nt, Artificial Sequence
  Description of Artificial Sequence: Synthetic oligonucleotide
acuuaguugcccucguucu

SEQ ID NO: 720646 - RNA, 19 nt, Artificial Sequence
  Description of Artificial Sequence: Synthetic oligonucleotide
uggagugcaaucacuggga

SEQ ID NO: 720647 - RNA, 19 nt, Artificial Sequence
  Description of Artificial Sequence: Synthetic oligonucleotide
uuguugcugcacuagugag

SEQ ID NO: 720648 - RNA, 19 nt, Artificial Sequence
  Description of Artificial Sequence: Synthetic oligonucleotide
uggugcagugaccaccagg

SEQ ID NO: 720649 - RNA, 19 nt, Artificial Sequence
  Description of Artificial Sequence: Synthetic oligonucleotide
gaguaugcgggucuccaag

SEQ ID NO: 720650 - RNA, 19 nt, Artificial Sequence
  Description of Artificial Sequence: Synthetic oligonucleotide
agucuaagcagggauuggg

SEQ ID NO: 720651 - RNA, 19 nt, Artificial Sequence
  Description of Artificial Sequence: Synthetic oligonucleotide
auaagcgaugugaagcagg

SEQ ID NO: 720652 - RNA, 19 nt, Artificial Sequence
  Description of Artificial Sequence: Synthetic oligonucleotide
uuggguauaaugacacuua

SEQ ID NO: 720653 - RNA, 19 nt, Artificial Sequence
  Description of Artificial Sequence: Synthetic oligonucleotide
gggucacuaaaguugaaag

SEQ ID NO: 720654 - RNA, 19 nt, Artificial Sequence
  Description of Artificial Sequence: Synthetic oligonucleotide
cuaccuagcaguuguagca

SEQ ID NO: 720655 - RNA, 19 nt, Artificial Sequence
  Description of Artificial Sequence: Synthetic oligonucleotide
acaugcggauucuagggug

SEQ ID NO: 720656 - RNA, 19 nt, Artificial Sequence
  Description of Artificial Sequence: Synthetic oligonucleotide
aaguugaaaggaagaacug

SEQ ID NO: 720657 - RNA, 19 nt, Artificial Sequence
  Description of Artificial Sequence: Synthetic oligonucleotide
gaacccucccuucugucag

SEQ ID NO: 720658 - RNA, 19 nt, Artificial Sequence
  Description of Artificial Sequence: Synthetic oligonucleotide
agucgcgucucccugcagg

SEQ ID NO: 720659 - RNA, 19 nt, Artificial Sequence
  Description of Artificial Sequence: Synthetic oligonucleotide
guucauaagcgaugugaag

SEQ ID NO: 720660 - RNA, 19 nt, Artificial Sequence
  Description of Artificial Sequence: Synthetic oligonucleotide
gguauaaugacacuuaguu

SEQ ID NO: 720661 - RNA, 19 nt, Artificial Sequence
  Description of Artificial Sequence: Synthetic oligonucleotide
cuagggugguguaaccucc

SEQ ID NO: 720662 - RNA, 19 nt, Artificial Sequence
  Description of Artificial Sequence: Synthetic oligonucleotide
gauucuagggugguguaac

SEQ ID NO: 720663 - RNA, 19 nt, Artificial Sequence
  Description of Artificial Sequence: Synthetic oligonucleotide
augucaauggccugagccu

SEQ ID NO: 720664 - RNA, 19 nt, Artificial Sequence
  Description of Artificial Sequence: Synthetic oligonucleotide
uaucccuacuggaugcccc

SEQ ID NO: 720665 - RNA, 19 nt, Artificial Sequence
  Description of Artificial Sequence: Synthetic oligonucleotide
uggccaauauaaagggcgc

SEQ ID NO: 720666 - RNA, 19 nt, Artificial Sequence
  Description of Artificial Sequence: Synthetic oligonucleotide
gaacuuggcggucacagaa

SEQ ID NO: 720667 - RNA, 19 nt, Artificial Sequence
  Description of Artificial Sequence: Synthetic oligonucleotide
ucuagggugguguaaccuc

SEQ ID NO: 720668 - RNA, 19 nt, Artificial Sequence
  Description of Artificial Sequence: Synthetic oligonucleotide
caugcggauucuagggugg

SEQ ID NO: 720669 - RNA, 19 nt, Artificial Sequence
  Description of Artificial Sequence: Synthetic oligonucleotide
gagccgggccauuaggagg

SEQ ID NO: 720670 - RNA, 19 nt, Artificial Sequence
  Description of Artificial Sequence: Synthetic oligonucleotide
aaguacuugcacagaagug

SEQ ID NO: 720671 - RNA, 19 nt, Artificial Sequence
  Description of Artificial Sequence: Synthetic oligonucleotide
caaucacugggaaaacaug

SEQ ID NO: 720672 - RNA, 19 nt, Artificial Sequence
  Description of Artificial Sequence: Synthetic oligonucleotide
aggcaagaaccaaauggcc

SEQ ID NO: 720673 - RNA, 19 nt, Artificial Sequence
  Description of Artificial Sequence: Synthetic oligonucleotide
ccuuauacuuaagaggugg

SEQ ID NO: 720674 - RNA, 19 nt, Artificial Sequence
  Description of Artificial Sequence: Synthetic oligonucleotide
auuggguauaaugacacuu

SEQ ID NO: 720675 - RNA, 19 nt, Artificial Sequence
  Description of Artificial Sequence: Synthetic oligonucleotide
aucacugggaaaacaugcg

SEQ ID NO: 720676 - RNA, 19 nt, Artificial Sequence
  Description of Artificial Sequence: Synthetic oligonucleotide
uuagcccucgcuaauucua

SEQ ID NO: 720677 - RNA, 19 nt, Artificial Sequence
  Description of Artificial Sequence: Synthetic oligonucleotide
cacacaacccgugaaggcc

SEQ ID NO: 720678 - RNA, 19 nt, Artificial Sequence
  Description of Artificial Sequence: Synthetic oligonucleotide
gaugcaguuccuuauacuu

SEQ ID NO: 720679 - RNA, 19 nt, Artificial Sequence
  Description of Artificial Sequence: Synthetic oligonucleotide
gacauuggguauaaugaca

SEQ ID NO: 720680 - RNA, 19 nt, Artificial Sequence
  Description of Artificial Sequence: Synthetic oligonucleotide
gacaggggcaugucggacc

SEQ ID NO: 720681 - RNA, 19 nt, Artificial Sequence
  Description of Artificial Sequence: Synthetic oligonucleotide
aaagaggauggcagcugcg

SEQ ID NO: 720682 - RNA, 19 nt, Artificial Sequence
  Description of Artificial Sequence: Synthetic oligonucleotide
aacuuggcggucacagaac

SEQ ID NO: 720683 - RNA, 19 nt, Artificial Sequence
  Description of Artificial Sequence: Synthetic oligonucleotide
uuaggaggcccaagguggc

SEQ ID NO: 720684 - RNA, 19 nt, Artificial Sequence
  Description of Artificial Sequence: Synthetic oligonucleotide
uaaagggcgcggaccuugg

SEQ ID NO: 720685 - RNA, 19 nt, Artificial Sequence
  Description of Artificial Sequence: Synthetic oligonucleotide
caguggagugcaaucacug

SEQ ID NO: 720686 - RNA, 19 nt, Artificial Sequence
  Description of Artificial Sequence: Synthetic oligonucleotide
guaugcgggucuccaaggg

SEQ ID NO: 720687 - RNA, 19 nt, Artificial Sequence
  Description of Artificial Sequence: Synthetic oligonucleotide
gccauuaggaggcccaagg

SEQ ID NO: 720688 - RNA, 19 nt, Artificial Sequence
  Description of Artificial Sequence: Synthetic oligonucleotide
uaugcgggucuccaagggu

SEQ ID NO: 720689 - RNA, 19 nt, Artificial Sequence
  Description of Artificial Sequence: Synthetic oligonucleotide
gaugccuccucccuccuuc

SEQ ID NO: 720690 - RNA, 19 nt, Artificial Sequence
  Description of Artificial Sequence: Synthetic oligonucleotide
cacuuaguugcccucguuc

SEQ ID NO: 720691 - RNA, 19 nt, Artificial Sequence
  Description of Artificial Sequence: Synthetic oligonucleotide
cucgcuaauucuaccagca

SEQ ID NO: 720692 - RNA, 19 nt, Artificial Sequence
  Description of Artificial Sequence: Synthetic oligonucleotide
ugcgguaauggcuggcugu

SEQ ID NO: 720693 - RNA, 19 nt, Artificial Sequence
  Description of Artificial Sequence: Synthetic oligonucleotide
aagaggauggcagcugcga

SEQ ID NO: 720694 - RNA, 19 nt, Artificial Sequence
  Description of Artificial Sequence: Synthetic oligonucleotide
cuaaaguugaaaggaagaa

SEQ ID NO: 720695 - RNA, 19 nt, Artificial Sequence
  Description of Artificial Sequence: Synthetic oligonucleotide
ugcaaucacugggaaaaca

SEQ ID NO: 720696 - RNA, 19 nt, Artificial Sequence
  Description of Artificial Sequence: Synthetic oligonucleotide
gaaccaaauggccaauaua

SEQ ID NO: 720697 - RNA, 19 nt, Artificial Sequence
  Description of Artificial Sequence: Synthetic oligonucleotide
gucuaagcagggauugggg

SEQ ID NO: 720698 - RNA, 19 nt, Artificial Sequence
  Description of Artificial Sequence: Synthetic oligonucleotide
ggaaagagguuccccaccc

SEQ ID NO: 720699 - RNA, 19 nt, Artificial Sequence
  Description of Artificial Sequence: Synthetic oligonucleotide
aauugcccuggaaggacag

SEQ ID NO: 720700 - RNA, 19 nt, Artificial Sequence
  Description of Artificial Sequence: Synthetic oligonucleotide
agccgggccauuaggaggc

SEQ ID NO: 720701 - RNA, 19 nt, Artificial Sequence
  Description of Artificial Sequence: Synthetic oligonucleotide
gaggagccgggccauuagg

SEQ ID NO: 720702 - RNA, 19 nt, Artificial Sequence
  Description of Artificial Sequence: Synthetic oligonucleotide
ugaggagccgggccauuag

SEQ ID NO: 720703 - RNA, 19 nt, Artificial Sequence
  Description of Artificial Sequence: Synthetic oligonucleotide
cuccaagcaaggauaagga

SEQ ID NO: 720704 - RNA, 19 nt, Artificial Sequence
  Description of Artificial Sequence: Synthetic oligonucleotide
gcuaauucuaccagcacac

SEQ ID NO: 720705 - RNA, 19 nt, Artificial Sequence
  Description of Artificial Sequence: Synthetic oligonucleotide
uucuaccagcacacccugg

SEQ ID NO: 720706 - RNA, 19 nt, Artificial Sequence
  Description of Artificial Sequence: Synthetic oligonucleotide
agcccucgcuaauucuacc

SEQ ID NO: 720707 - RNA, 19 nt, Artificial Sequence
  Description of Artificial Sequence: Synthetic oligonucleotide
gaaagagguuccccacccc

SEQ ID NO: 720708 - RNA, 19 nt, Artificial Sequence
  Description of Artificial Sequence: Synthetic oligonucleotide
auaaagggcgcggaccuug

SEQ ID NO: 720709 - RNA, 19 nt, Artificial Sequence
  Description of Artificial Sequence: Synthetic oligonucleotide
cccgcuugcagccucaugg

SEQ ID NO: 720710 - RNA, 19 nt, Artificial Sequence
  Description of Artificial Sequence: Synthetic oligonucleotide
caaauugcccuggaaggac

SEQ ID NO: 720711 - RNA, 19 nt, Artificial Sequence
  Description of Artificial Sequence: Synthetic oligonucleotide
aaauugcccuggaaggaca

SEQ ID NO: 720712 - RNA, 19 nt, Artificial Sequence
  Description of Artificial Sequence: Synthetic oligonucleotide
gcugcgaagaaaccucggg

SEQ ID NO: 720713 - RNA, 19 nt, Artificial Sequence
  Description of Artificial Sequence: Synthetic oligonucleotide
ggguagaggagcugaagcc

SEQ ID NO: 720714 - RNA, 19 nt, Artificial Sequence
  Description of Artificial Sequence: Synthetic oligonucleotide
ggacaagcaaauaaauaac

SEQ ID NO: 720715 - RNA, 19 nt, Artificial Sequence
  Description of Artificial Sequence: Synthetic oligonucleotide
gaaaccucgggaggcuggg

SEQ ID NO: 720716 - RNA, 19 nt, Artificial Sequence
  Description of Artificial Sequence: Synthetic oligonucleotide
caaaagcucaagagaccug

SEQ ID NO: 720717 - RNA, 19 nt, Artificial Sequence
  Description of Artificial Sequence: Synthetic oligonucleotide
cuuaguugcccucguucug

SEQ ID NO: 720718 - RNA, 19 nt, Artificial Sequence
  Description of Artificial Sequence: Synthetic oligonucleotide
gacaacaggucugcaggcc

SEQ ID NO: 720719 - RNA, 19 nt, Artificial Sequence
  Description of Artificial Sequence: Synthetic oligonucleotide
uucuagggugguguaaccu

SEQ ID NO: 720720 - RNA, 19 nt, Artificial Sequence
  Description of Artificial Sequence: Synthetic oligonucleotide
cagcugcgaagaaaccucg

SEQ ID NO: 720721 - RNA, 19 nt, Artificial Sequence
  Description of Artificial Sequence: Synthetic oligonucleotide
gucagggagccagacauug

SEQ ID NO: 720722 - RNA, 19 nt, Artificial Sequence
  Description of Artificial Sequence: Synthetic oligonucleotide
ggccaaguuagccaccugc

SEQ ID NO: 720723 - RNA, 19 nt, Artificial Sequence
  Description of Artificial Sequence: Synthetic oligonucleotide
gcuuacacuaccuagcagu

SEQ ID NO: 720724 - RNA, 19 nt, Artificial Sequence
  Description of Artificial Sequence: Synthetic oligonucleotide
caaggauaaggacaagcaa

SEQ ID NO: 720725 - RNA, 19 nt, Artificial Sequence
  Description of Artificial Sequence: Synthetic oligonucleotide
gccaauauaaagggcgcgg

SEQ ID NO: 720726 - RNA, 19 nt, Artificial Sequence
  Description of Artificial Sequence: Synthetic oligonucleotide
gagucuaagcagggauugg

SEQ ID NO: 720727 - RNA, 19 nt, Artificial Sequence
  Description of Artificial Sequence: Synthetic oligonucleotide
ugcacuagugagggcagug

SEQ ID NO: 720728 - RNA, 19 nt, Artificial Sequence
  Description of Artificial Sequence: Synthetic oligonucleotide
cuaauucuaccagcacacc

SEQ ID NO: 720729 - RNA, 19 nt, Artificial Sequence
  Description of Artificial Sequence: Synthetic oligonucleotide
cagucucccuuguugcugc

SEQ ID NO: 720730 - RNA, 19 nt, Artificial Sequence
  Description of Artificial Sequence: Synthetic oligonucleotide
ucgcuaauucuaccagcac

SEQ ID NO: 720731 - RNA, 19 nt, Artificial Sequence
  Description of Artificial Sequence: Synthetic oligonucleotide
acuuaagaggugggcauca

SEQ ID NO: 720732 - RNA, 19 nt, Artificial Sequence
  Description of Artificial Sequence: Synthetic oligonucleotide
agcgcagguggaaagaggu

SEQ ID NO: 720733 - RNA, 19 nt, Artificial Sequence
  Description of Artificial Sequence: Synthetic oligonucleotide
acccgugaaggccugcaug

SEQ ID NO: 720734 - RNA, 19 nt, Artificial Sequence
  Description of Artificial Sequence: Synthetic oligonucleotide
gcgaagaaaccucgggagg

SEQ ID NO: 720735 - RNA, 19 nt, Artificial Sequence
  Description of Artificial Sequence: Synthetic oligonucleotide
uagcccucgcuaauucuac

SEQ ID NO: 720736 - RNA, 19 nt, Artificial Sequence
  Description of Artificial Sequence: Synthetic oligonucleotide
gaacugcgaugucaauggc

SEQ ID NO: 720737 - RNA, 19 nt, Artificial Sequence
  Description of Artificial Sequence: Synthetic oligonucleotide
guucccucaaggaagcgca

SEQ ID NO: 720738 - RNA, 19 nt, Artificial Sequence
  Description of Artificial Sequence: Synthetic oligonucleotide
uggcccgugccacauggga

SEQ ID NO: 720739 - RNA, 19 nt, Artificial Sequence
  Description of Artificial Sequence: Synthetic oligonucleotide
caguuccuuauacuuaaga

SEQ ID NO: 720740 - RNA, 19 nt, Artificial Sequence
  Description of Artificial Sequence: Synthetic oligonucleotide
cuuggcggucacagaacgc

SEQ ID NO: 720741 - RNA, 19 nt, Artificial Sequence
  Description of Artificial Sequence: Synthetic oligonucleotide
cauaagcgaugugaagcag

SEQ ID NO: 720742 - RNA, 19 nt, Artificial Sequence
  Description of Artificial Sequence: Synthetic oligonucleotide
gguggcccgugccacaugg

SEQ ID NO: 720743 - RNA, 19 nt, Artificial Sequence
  Description of Artificial Sequence: Synthetic oligonucleotide
ggcacacaacccgugaagg

SEQ ID NO: 720744 - RNA, 19 nt, Artificial Sequence
  Description of Artificial Sequence: Synthetic oligonucleotide
aggauggcagcugcgaaga

SEQ ID NO: 720745 - RNA, 19 nt, Artificial Sequence
  Description of Artificial Sequence: Synthetic oligonucleotide
uacccuggaacccucccuu

SEQ ID NO: 720746 - RNA, 19 nt, Artificial Sequence
  Description of Artificial Sequence: Synthetic oligonucleotide
ggagucuaagcagggauug

SEQ ID NO: 720747 - RNA, 19 nt, Artificial Sequence
  Description of Artificial Sequence: Synthetic oligonucleotide
agccaugcgguaauggcug

SEQ ID NO: 720748 - RNA, 19 nt, Artificial Sequence
  Description of Artificial Sequence: Synthetic oligonucleotide
ucgcgcuugaucagcccug

SEQ ID NO: 720749 - RNA, 19 nt, Artificial Sequence
  Description of Artificial Sequence: Synthetic oligonucleotide
cacuaccuagcaguuguag

SEQ ID NO: 720750 - RNA, 19 nt, Artificial Sequence
  Description of Artificial Sequence: Synthetic oligonucleotide
cguccaagaggacuaaagg

SEQ ID NO: 720751 - RNA, 19 nt, Artificial Sequence
  Description of Artificial Sequence: Synthetic oligonucleotide
cugcgaagaaaccucggga

SEQ ID NO: 720752 - RNA, 19 nt, Artificial Sequence
  Description of Artificial Sequence: Synthetic oligonucleotide
gggauugggguagaggagc

SEQ ID NO: 720753 - RNA, 19 nt, Artificial Sequence
  Description of Artificial Sequence: Synthetic oligonucleotide
guaggggaagucugaagaa

SEQ ID NO: 720754 - RNA, 19 nt, Artificial Sequence
  Description of Artificial Sequence: Synthetic oligonucleotide
cagcaguggcacacaaccc

SEQ ID NO: 720755 - RNA, 19 nt, Artificial Sequence
  Description of Artificial Sequence: Synthetic oligonucleotide
uacuuaagaggugggcauc

SEQ ID NO: 720756 - RNA, 19 nt, Artificial Sequence
  Description of Artificial Sequence: Synthetic oligonucleotide
aggguguucauaagcgaug

SEQ ID NO: 720757 - RNA, 19 nt, Artificial Sequence
  Description of Artificial Sequence: Synthetic oligonucleotide
gaugugaagcaggcaucgc

SEQ ID NO: 720758 - RNA, 19 nt, Artificial Sequence
  Description of Artificial Sequence: Synthetic oligonucleotide
gccggcagggcacauaggc

SEQ ID NO: 720759 - RNA, 19 nt, Artificial Sequence
  Description of Artificial Sequence: Synthetic oligonucleotide
gugacagaaagaggauggc

SEQ ID NO: 720760 - RNA, 19 nt, Artificial Sequence
  Description of Artificial Sequence: Synthetic oligonucleotide
caugcccuagcccucagaa

SEQ ID NO: 720761 - RNA, 19 nt, Artificial Sequence
  Description of Artificial Sequence: Synthetic oligonucleotide
aaaccucgggaggcugggg

SEQ ID NO: 720762 - RNA, 19 nt, Artificial Sequence
  Description of Artificial Sequence: Synthetic oligonucleotide
cuaucccuacuggaugccc

SEQ ID NO: 720763 - RNA, 19 nt, Artificial Sequence
  Description of Artificial Sequence: Synthetic oligonucleotide
ggcaagaaccaaauggcca

SEQ ID NO: 720764 - RNA, 19 nt, Artificial Sequence
  Description of Artificial Sequence: Synthetic oligonucleotide
cuugaucagcccuggugca

SEQ ID NO: 720765 - RNA, 19 nt, Artificial Sequence
  Description of Artificial Sequence: Synthetic oligonucleotide
agaaggggcaccacagccu

SEQ ID NO: 720766 - RNA, 19 nt, Artificial Sequence
  Description of Artificial Sequence: Synthetic oligonucleotide
ggcaucaugcccuagcccu

SEQ ID NO: 720767 - RNA, 19 nt, Artificial Sequence
  Description of Artificial Sequence: Synthetic oligonucleotide
guaguuccugcuggagccg

SEQ ID NO: 720768 - RNA, 19 nt, Artificial Sequence
  Description of Artificial Sequence: Synthetic oligonucleotide
uugcccucguucuggggcu

SEQ ID NO: 720769 - RNA, 19 nt, Artificial Sequence
  Description of Artificial Sequence: Synthetic oligonucleotide
acagccgguuagcccucgc

SEQ ID NO: 720770 - RNA, 19 nt, Artificial Sequence
  Description of Artificial Sequence: Synthetic oligonucleotide
agugggagagauggccaag

SEQ ID NO: 720771 - RNA, 19 nt, Artificial Sequence
  Description of Artificial Sequence: Synthetic oligonucleotide
aggaguaugcgggucucca

SEQ ID NO: 720772 - RNA, 19 nt, Artificial Sequence
  Description of Artificial Sequence: Synthetic oligonucleotide
ggagccgggccauuaggag

SEQ ID NO: 720773 - RNA, 19 nt, Artificial Sequence
  Description of Artificial Sequence: Synthetic oligonucleotide
ucccggcacagccgguuag

SEQ ID NO: 720774 - RNA, 19 nt, Artificial Sequence
  Description of Artificial Sequence: Synthetic oligonucleotide
gguagaggagcugaagcca

SEQ ID NO: 720775 - RNA, 19 nt, Artificial Sequence
  Description of Artificial Sequence: Synthetic oligonucleotide
aacccgugaaggccugcau

SEQ ID NO: 720776 - RNA, 19 nt, Artificial Sequence
  Description of Artificial Sequence: Synthetic oligonucleotide
gcagcaggggccaaccagg

SEQ ID NO: 720777 - RNA, 19 nt, Artificial Sequence
  Description of Artificial Sequence: Synthetic oligonucleotide
gaucagcccuggugcagug

SEQ ID NO: 720778 - RNA, 19 nt, Artificial Sequence
  Description of Artificial Sequence: Synthetic oligonucleotide
uccuacccuggaacccucc

SEQ ID NO: 720779 - RNA, 19 nt, Artificial Sequence
  Description of Artificial Sequence: Synthetic oligonucleotide
cuccacgcugucuggcagc

SEQ ID NO: 720780 - RNA, 19 nt, Artificial Sequence
  Description of Artificial Sequence: Synthetic oligonucleotide
aagcaaggauaaggacaag

SEQ ID NO: 720781 - RNA, 19 nt, Artificial Sequence
  Description of Artificial Sequence: Synthetic oligonucleotide
uggcggucacagaacgcac

SEQ ID NO: 720782 - RNA, 19 nt, Artificial Sequence
  Description of Artificial Sequence: Synthetic oligonucleotide
ggaagaugugacaacaggu

SEQ ID NO: 720783 - RNA, 19 nt, Artificial Sequence
  Description of Artificial Sequence: Synthetic oligonucleotide
acacaacccgugaaggccu

SEQ ID NO: 720784 - RNA, 19 nt, Artificial Sequence
  Description of Artificial Sequence: Synthetic oligonucleotide
uucugucagggagccagac

SEQ ID NO: 720785 - RNA, 19 nt, Artificial Sequence
  Description of Artificial Sequence: Synthetic oligonucleotide
cagucagcgccugccagcc

SEQ ID NO: 720786 - RNA, 19 nt, Artificial Sequence
  Description of Artificial Sequence: Synthetic oligonucleotide
ccucgcuaauucuaccagc

SEQ ID NO: 720787 - RNA, 19 nt, Artificial Sequence
  Description of Artificial Sequence: Synthetic oligonucleotide
augucggacccugggucac

SEQ ID NO: 720788 - RNA, 19 nt, Artificial Sequence
  Description of Artificial Sequence: Synthetic oligonucleotide
cacgguggcaguggagugc

SEQ ID NO: 720789 - RNA, 19 nt, Artificial Sequence
  Description of Artificial Sequence: Synthetic oligonucleotide
gcacacaacccgugaaggc

SEQ ID NO: 720790 - RNA, 19 nt, Artificial Sequence
  Description of Artificial Sequence: Synthetic oligonucleotide
uggaacccucccuucuguc

SEQ ID NO: 720791 - RNA, 19 nt, Artificial Sequence
  Description of Artificial Sequence: Synthetic oligonucleotide
ggcuuacacuaccuagcag

SEQ ID NO: 720792 - RNA, 19 nt, Artificial Sequence
  Description of Artificial Sequence: Synthetic oligonucleotide
agucagcgccugccagccc

SEQ ID NO: 720793 - RNA, 19 nt, Artificial Sequence
  Description of Artificial Sequence: Synthetic oligonucleotide
caucgcgcuugaucagccc

SEQ ID NO: 720794 - RNA, 19 nt, Artificial Sequence
  Description of Artificial Sequence: Synthetic oligonucleotide
ggaagaacugcgaugucaa

SEQ ID NO: 720795 - RNA, 19 nt, Artificial Sequence
  Description of Artificial Sequence: Synthetic oligonucleotide
aagcaggcaucgcgcuuga

SEQ ID NO: 720796 - RNA, 19 nt, Artificial Sequence
  Description of Artificial Sequence: Synthetic oligonucleotide
cagggaucugaugcucagg

SEQ ID NO: 720797 - RNA, 19 nt, Artificial Sequence
  Description of Artificial Sequence: Synthetic oligonucleotide
acaacccgugaaggccugc

SEQ ID NO: 720798 - RNA, 19 nt, Artificial Sequence
  Description of Artificial Sequence: Synthetic oligonucleotide
gcaggcaucgcgcuugauc

SEQ ID NO: 720799 - RNA, 19 nt, Artificial Sequence
  Description of Artificial Sequence: Synthetic oligonucleotide
gguuagcccucgcuaauuc

SEQ ID NO: 720800 - RNA, 19 nt, Artificial Sequence
  Description of Artificial Sequence: Synthetic oligonucleotide
agccgguuagcccucgcua

SEQ ID NO: 720801 - RNA, 19 nt, Artificial Sequence
  Description of Artificial Sequence: Synthetic oligonucleotide
aagcgaugugaagcaggca

SEQ ID NO: 720802 - RNA, 19 nt, Artificial Sequence
  Description of Artificial Sequence: Synthetic oligonucleotide
agccaaucccugccccaag

SEQ ID NO: 720803 - RNA, 19 nt, Artificial Sequence
  Description of Artificial Sequence: Synthetic oligonucleotide
uuccuguggccagcgggag

SEQ ID NO: 720804 - RNA, 19 nt, Artificial Sequence
  Description of Artificial Sequence: Synthetic oligonucleotide
agccggagagcauccccug

SEQ ID NO: 720805 - RNA, 19 nt, Artificial Sequence
  Description of Artificial Sequence: Synthetic oligonucleotide
gccagaaggggcaccacag

SEQ ID NO: 720806 - RNA, 19 nt, Artificial Sequence
  Description of Artificial Sequence: Synthetic oligonucleotide
guguuuguaggggaagucu

SEQ ID NO: 720807 - RNA, 19 nt, Artificial Sequence
  Description of Artificial Sequence: Synthetic oligonucleotide
ucagcgccugccagcccgc

SEQ ID NO: 720808 - RNA, 19 nt, Artificial Sequence
  Description of Artificial Sequence: Synthetic oligonucleotide
aggagccggagagcauccc

SEQ ID NO: 720809 - RNA, 19 nt, Artificial Sequence
  Description of Artificial Sequence: Synthetic oligonucleotide
gugguguaaccuccugcuc

SEQ ID NO: 720810 - RNA, 19 nt, Artificial Sequence
  Description of Artificial Sequence: Synthetic oligonucleotide
gcaauuccuguggccagcg

SEQ ID NO: 720811 - RNA, 19 nt, Artificial Sequence
  Description of Artificial Sequence: Synthetic oligonucleotide
gguguucauaagcgaugug

SEQ ID NO: 720812 - RNA, 19 nt, Artificial Sequence
  Description of Artificial Sequence: Synthetic oligonucleotide
guuagcccucgcuaauucu

SEQ ID NO: 720813 - RNA, 19 nt, Artificial Sequence
  Description of Artificial Sequence: Synthetic oligonucleotide
acgguggcaguggagugca

SEQ ID NO: 720814 - RNA, 19 nt, Artificial Sequence
  Description of Artificial Sequence: Synthetic oligonucleotide
gucuccaagcaaggauaag

SEQ ID NO: 720815 - RNA, 19 nt, Artificial Sequence
  Description of Artificial Sequence: Synthetic oligonucleotide
aggagucuaagcagggauu

SEQ ID NO: 720816 - RNA, 19 nt, Artificial Sequence
  Description of Artificial Sequence: Synthetic oligonucleotide
gucgcgucucccugcagga

SEQ ID NO: 720817 - RNA, 19 nt, Artificial Sequence
  Description of Artificial Sequence: Synthetic oligonucleotide
aggagccgggccauuagga

SEQ ID NO: 720818 - RNA, 19 nt, Artificial Sequence
  Description of Artificial Sequence: Synthetic oligonucleotide
cuuacacuaccuagcaguu

SEQ ID NO: 720819 - RNA, 19 nt, Artificial Sequence
  Description of Artificial Sequence: Synthetic oligonucleotide
cgaugugaagcaggcaucg

SEQ ID NO: 720820 - RNA, 19 nt, Artificial Sequence
  Description of Artificial Sequence: Synthetic oligonucleotide
guggcacacaacccgugaa

SEQ ID NO: 720821 - RNA, 19 nt, Artificial Sequence
  Description of Artificial Sequence: Synthetic oligonucleotide
caacaggucugcaggccga

SEQ ID NO: 720822 - RNA, 19 nt, Artificial Sequence
  Description of Artificial Sequence: Synthetic oligonucleotide
cugagguaucauggccggg

SEQ ID NO: 720823 - RNA, 19 nt, Artificial Sequence
  Description of Artificial Sequence: Synthetic oligonucleotide
augcccuagcccucagaaa

SEQ ID NO: 720824 - RNA, 19 nt, Artificial Sequence
  Description of Artificial Sequence: Synthetic oligonucleotide
gaagaaaccucgggaggcu

SEQ ID NO: 720825 - RNA, 19 nt, Artificial Sequence
  Description of Artificial Sequence: Synthetic oligonucleotide
cagcuuugaacuuggcggu

SEQ ID NO: 720826 - RNA, 19 nt, Artificial Sequence
  Description of Artificial Sequence: Synthetic oligonucleotide
caggguguucauaagcgau

SEQ ID NO: 720827 - RNA, 19 nt, Artificial Sequence
  Description of Artificial Sequence: Synthetic oligonucleotide
uggggaggccacgcccugg

SEQ ID NO: 720828 - RNA, 19 nt, Artificial Sequence
  Description of Artificial Sequence: Synthetic oligonucleotide
gaguuggggcuuacacuac

SEQ ID NO: 720829 - RNA, 19 nt, Artificial Sequence
  Description of Artificial Sequence: Synthetic oligonucleotide
caggagucuaagcagggau

SEQ ID NO: 720830 - RNA, 19 nt, Artificial Sequence
  Description of Artificial Sequence: Synthetic oligonucleotide
gguguuuguaggggaaguc

SEQ ID NO: 720831 - RNA, 19 nt, Artificial Sequence
  Description of Artificial Sequence: Synthetic oligonucleotide
cacaacccgugaaggccug

SEQ ID NO: 720832 - RNA, 19 nt, Artificial Sequence
  Description of Artificial Sequence: Synthetic oligonucleotide
cccucgcuaauucuaccag

SEQ ID NO: 720833 - RNA, 19 nt, Artificial Sequence
  Description of Artificial Sequence: Synthetic oligonucleotide
agcgccugccagcccgcuc

SEQ ID NO: 720834 - RNA, 19 nt, Artificial Sequence
  Description of Artificial Sequence: Synthetic oligonucleotide
agcauccccuggccaggag

SEQ ID NO: 720835 - RNA, 19 nt, Artificial Sequence
  Description of Artificial Sequence: Synthetic oligonucleotide
ggaccaagggcucuugggu

SEQ ID NO: 720836 - RNA, 19 nt, Artificial Sequence
  Description of Artificial Sequence: Synthetic oligonucleotide
gaccaagggcucuuggguu

SEQ ID NO: 720837 - RNA, 19 nt, Artificial Sequence
  Description of Artificial Sequence: Synthetic oligonucleotide
agggagccagacauugggu

SEQ ID NO: 720838 - RNA, 19 nt, Artificial Sequence
  Description of Artificial Sequence: Synthetic oligonucleotide
uugcugcacuagugagggc

SEQ ID NO: 720839 - RNA, 19 nt, Artificial Sequence
  Description of Artificial Sequence: Synthetic oligonucleotide
gcuagaagcagucucccuu

SEQ ID NO: 720840 - RNA, 19 nt, Artificial Sequence
  Description of Artificial Sequence: Synthetic oligonucleotide
gcuggagccgccagucgcg

SEQ ID NO: 720841 - RNA, 19 nt, Artificial Sequence
  Description of Artificial Sequence: Synthetic oligonucleotide
caggaguaugcgggucucc

SEQ ID NO: 720842 - RNA, 19 nt, Artificial Sequence
  Description of Artificial Sequence: Synthetic oligonucleotide
ccucguagagggucuuggc

SEQ ID NO: 720843 - RNA, 19 nt, Artificial Sequence
  Description of Artificial Sequence: Synthetic oligonucleotide
cagcccuggugcagugacc

SEQ ID NO: 720844 - RNA, 19 nt, Artificial Sequence
  Description of Artificial Sequence: Synthetic oligonucleotide
guucagaaagguaguuccu

SEQ ID NO: 720845 - RNA, 19 nt, Artificial Sequence
  Description of Artificial Sequence: Synthetic oligonucleotide
caaccuuccccggccuggc

SEQ ID NO: 720846 - RNA, 19 nt, Artificial Sequence
  Description of Artificial Sequence: Synthetic oligonucleotide
gcccucgcuaauucuacca

SEQ ID NO: 720847 - RNA, 19 nt, Artificial Sequence
  Description of Artificial Sequence: Synthetic oligonucleotide
gcgccugccagcccgcucc

SEQ ID NO: 720848 - RNA, 19 nt, Artificial Sequence
  Description of Artificial Sequence: Synthetic oligonucleotide
ggcaggaugcaguuccuua

SEQ ID NO: 720849 - RNA, 19 nt, Artificial Sequence
  Description of Artificial Sequence: Synthetic oligonucleotide
cagauggcaccaggggcac

SEQ ID NO: 720850 - RNA, 19 nt, Artificial Sequence
  Description of Artificial Sequence: Synthetic oligonucleotide
ucgcgucucccugcaggag

SEQ ID NO: 720851 - RNA, 19 nt, Artificial Sequence
  Description of Artificial Sequence: Synthetic oligonucleotide
gaagaacugcgaugucaau

SEQ ID NO: 720852 - RNA, 19 nt, Artificial Sequence
  Description of Artificial Sequence: Synthetic oligonucleotide
cauuggguauaaugacacu

SEQ ID NO: 720853 - RNA, 19 nt, Artificial Sequence
  Description of Artificial Sequence: Synthetic oligonucleotide
cuguuccaagccaaucccu

SEQ ID NO: 720854 - RNA, 19 nt, Artificial Sequence
  Description of Artificial Sequence: Synthetic oligonucleotide
ccuacuggaugccccucag

SEQ ID NO: 720855 - RNA, 19 nt, Artificial Sequence
  Description of Artificial Sequence: Synthetic oligonucleotide
gugcaaucacugggaaaac

SEQ ID NO: 720856 - RNA, 19 nt, Artificial Sequence
  Description of Artificial Sequence: Synthetic oligonucleotide
ccuuggagagcuggagagg

SEQ ID NO: 720857 - RNA, 19 nt, Artificial Sequence
  Description of Artificial Sequence: Synthetic oligonucleotide
gccaugcgguaauggcugg

SEQ ID NO: 720858 - RNA, 19 nt, Artificial Sequence
  Description of Artificial Sequence: Synthetic oligonucleotide
uccguccaagaggacuaaa

SEQ ID NO: 720859 - RNA, 19 nt, Artificial Sequence
  Description of Artificial Sequence: Synthetic oligonucleotide
accucgggaggcugggguu

SEQ ID NO: 720860 - RNA, 19 nt, Artificial Sequence
  Description of Artificial Sequence: Synthetic oligonucleotide
gcugcacuagugagggcag

SEQ ID NO: 720861 - RNA, 19 nt, Artificial Sequence
  Description of Artificial Sequence: Synthetic oligonucleotide
cuccuacccuggaacccuc

SEQ ID NO: 720862 - RNA, 19 nt, Artificial Sequence
  Description of Artificial Sequence: Synthetic oligonucleotide
ccuacccuggaacccuccc

SEQ ID NO: 720863 - RNA, 19 nt, Artificial Sequence
  Description of Artificial Sequence: Synthetic oligonucleotide
gcuuugaacuuggcgguca

SEQ ID NO: 720864 - RNA, 19 nt, Artificial Sequence
  Description of Artificial Sequence: Synthetic oligonucleotide
ccaauauaaagggcgcgga

SEQ ID NO: 720865 - RNA, 19 nt, Artificial Sequence
  Description of Artificial Sequence: Synthetic oligonucleotide
acccgcuugcagccucaug

SEQ ID NO: 720866 - RNA, 19 nt, Artificial Sequence
  Description of Artificial Sequence: Synthetic oligonucleotide
ccaaauugcccuggaagga

SEQ ID NO: 720867 - RNA, 19 nt, Artificial Sequence
  Description of Artificial Sequence: Synthetic oligonucleotide
aggggcacagggaucugau

SEQ ID NO: 720868 - RNA, 19 nt, Artificial Sequence
  Description of Artificial Sequence: Synthetic oligonucleotide
acgcugucuggcagcacug

SEQ ID NO: 720869 - RNA, 19 nt, Artificial Sequence
  Description of Artificial Sequence: Synthetic oligonucleotide
ccgcuugcagccucauggc

SEQ ID NO: 720870 - RNA, 19 nt, Artificial Sequence
  Description of Artificial Sequence: Synthetic oligonucleotide
guggccagcgggagcgcag

SEQ ID NO: 720871 - RNA, 19 nt, Artificial Sequence
  Description of Artificial Sequence: Synthetic oligonucleotide
cccuagcccucagaaaagc

SEQ ID NO: 720872 - RNA, 19 nt, Artificial Sequence
  Description of Artificial Sequence: Synthetic oligonucleotide
guuggggcuuacacuaccu

SEQ ID NO: 720873 - RNA, 19 nt, Artificial Sequence
  Description of Artificial Sequence: Synthetic oligonucleotide
gcaguuccuuauacuuaag

SEQ ID NO: 720874 - RNA, 19 nt, Artificial Sequence
  Description of Artificial Sequence: Synthetic oligonucleotide
gccagucgcgucucccugc

SEQ ID NO: 720875 - RNA, 19 nt, Artificial Sequence
  Description of Artificial Sequence: Synthetic oligonucleotide
gagccggagagcauccccu

SEQ ID NO: 720876 - RNA, 19 nt, Artificial Sequence
  Description of Artificial Sequence: Synthetic oligonucleotide
ugucggacccugggucacu

SEQ ID NO: 720877 - RNA, 19 nt, Artificial Sequence
  Description of Artificial Sequence: Synthetic oligonucleotide
agcaaggggucaggaguau

SEQ ID NO: 720878 - RNA, 19 nt, Artificial Sequence
  Description of Artificial Sequence: Synthetic oligonucleotide
gcaucgcgcuugaucagcc

SEQ ID NO: 720879 - RNA, 19 nt, Artificial Sequence
  Description of Artificial Sequence: Synthetic oligonucleotide
ggaguaugcgggucuccaa

SEQ ID NO: 720880 - RNA, 19 nt, Artificial Sequence
  Description of Artificial Sequence: Synthetic oligonucleotide
ccgcuccuacccuggaacc

SEQ ID NO: 720881 - RNA, 19 nt, Artificial Sequence
  Description of Artificial Sequence: Synthetic oligonucleotide
uggcggggccaaccucugu

SEQ ID NO: 720882 - RNA, 19 nt, Artificial Sequence
  Description of Artificial Sequence: Synthetic oligonucleotide
ggucuccaagcaaggauaa

SEQ ID NO: 720883 - RNA, 19 nt, Artificial Sequence
  Description of Artificial Sequence: Synthetic oligonucleotide
ucggacccugggucacuaa

SEQ ID NO: 720884 - RNA, 19 nt, Artificial Sequence
  Description of Artificial Sequence: Synthetic oligonucleotide
gccgguuagcccucgcuaa

SEQ ID NO: 720885 - RNA, 19 nt, Artificial Sequence
  Description of Artificial Sequence: Synthetic oligonucleotide
cuccucguagagggucuug

SEQ ID NO: 720886 - RNA, 19 nt, Artificial Sequence
  Description of Artificial Sequence: Synthetic oligonucleotide
caacccgugaaggccugca

SEQ ID NO: 720887 - RNA, 19 nt, Artificial Sequence
  Description of Artificial Sequence: Synthetic oligonucleotide
ggguauaaugacacuuagu

SEQ ID NO: 720888 - RNA, 19 nt, Artificial Sequence
  Description of Artificial Sequence: Synthetic oligonucleotide
cuacccuggaacccucccu

SEQ ID NO: 720889 - RNA, 19 nt, Artificial Sequence
  Description of Artificial Sequence: Synthetic oligonucleotide
gcgaugugaagcaggcauc

SEQ ID NO: 720890 - RNA, 19 nt, Artificial Sequence
  Description of Artificial Sequence: Synthetic oligonucleotide
ggauaaggacaagcaaaua

SEQ ID NO: 720891 - RNA, 19 nt, Artificial Sequence
  Description of Artificial Sequence: Synthetic oligonucleotide
cacagccgguuagcccucg

SEQ ID NO: 720892 - RNA, 19 nt, Artificial Sequence
  Description of Artificial Sequence: Synthetic oligonucleotide
ggauucuagggugguguaa

SEQ ID NO: 720893 - RNA, 19 nt, Artificial Sequence
  Description of Artificial Sequence: Synthetic oligonucleotide
gcccuagcccucagaaaag

SEQ ID NO: 720894 - RNA, 19 nt, Artificial Sequence
  Description of Artificial Sequence: Synthetic oligonucleotide
ggccauuaggaggcccaag

SEQ ID NO: 720895 - RNA, 19 nt, Artificial Sequence
  Description of Artificial Sequence: Synthetic oligonucleotide
ggcucuuggguucccucaa

SEQ ID NO: 720896 - RNA, 19 nt, Artificial Sequence
  Description of Artificial Sequence: Synthetic oligonucleotide
ggaaaacaugcggauucua

SEQ ID NO: 720897 - RNA, 19 nt, Artificial Sequence
  Description of Artificial Sequence: Synthetic oligonucleotide
ugcccucguucuggggcug

SEQ ID NO: 720898 - RNA, 19 nt, Artificial Sequence
  Description of Artificial Sequence: Synthetic oligonucleotide
gcggauucuaggguggugu

SEQ ID NO: 720899 - RNA, 19 nt, Artificial Sequence
  Description of Artificial Sequence: Synthetic oligonucleotide
gggcgcggaccuuggggag

SEQ ID NO: 720900 - RNA, 19 nt, Artificial Sequence
  Description of Artificial Sequence: Synthetic oligonucleotide
cugggucacuaaaguugaa

SEQ ID NO: 720901 - RNA, 19 nt, Artificial Sequence
  Description of Artificial Sequence: Synthetic oligonucleotide
gagcauccccuggccagga

SEQ ID NO: 720902 - RNA, 19 nt, Artificial Sequence
  Description of Artificial Sequence: Synthetic oligonucleotide
ggcaugucggacccugggu

SEQ ID NO: 720903 - RNA, 19 nt, Artificial Sequence
  Description of Artificial Sequence: Synthetic oligonucleotide
cagucgcgucucccugcag

SEQ ID NO: 720904 - RNA, 19 nt, Artificial Sequence
  Description of Artificial Sequence: Synthetic oligonucleotide
ccaucucaggcuugacaga

SEQ ID NO: 720905 - RNA, 19 nt, Artificial Sequence
  Description of Artificial Sequence: Synthetic oligonucleotide
cugggguagugggagagau

SEQ ID NO: 720906 - RNA, 19 nt, Artificial Sequence
  Description of Artificial Sequence: Synthetic oligonucleotide
gccaaguuagccaccugcu

SEQ ID NO: 720907 - RNA, 19 nt, Artificial Sequence
  Description of Artificial Sequence: Synthetic oligonucleotide
gcggggccaaccucuguuc

SEQ ID NO: 720908 - RNA, 19 nt, Artificial Sequence
  Description of Artificial Sequence: Synthetic oligonucleotide
agauggcaccaggggcaca

SEQ ID NO: 720909 - RNA, 19 nt, Artificial Sequence
  Description of Artificial Sequence: Synthetic oligonucleotide
ggcgcggaccuuggggagc

SEQ ID NO: 720910 - RNA, 19 nt, Artificial Sequence
  Description of Artificial Sequence: Synthetic oligonucleotide
cggggccaaccucuguucc

SEQ ID NO: 720911 - RNA, 19 nt, Artificial Sequence
  Description of Artificial Sequence: Synthetic oligonucleotide
ccgugaaggccugcaugcc

SEQ ID NO: 720912 - RNA, 19 nt, Artificial Sequence
  Description of Artificial Sequence: Synthetic oligonucleotide
gggagccagaaggggcacc

SEQ ID NO: 720913 - RNA, 19 nt, Artificial Sequence
  Description of Artificial Sequence: Synthetic oligonucleotide
ccggcacagccgguuagcc

SEQ ID NO: 720914 - RNA, 19 nt, Artificial Sequence
  Description of Artificial Sequence: Synthetic oligonucleotide
cgcuccuacccuggaaccc

SEQ ID NO: 720915 - RNA, 19 nt, Artificial Sequence
  Description of Artificial Sequence: Synthetic oligonucleotide
gcgucucccugcaggaguc

SEQ ID NO: 720916 - RNA, 19 nt, Artificial Sequence
  Description of Artificial Sequence: Synthetic oligonucleotide
gcgcggaccuuggggagcc

SEQ ID NO: 720917 - RNA, 19 nt, Artificial Sequence
  Description of Artificial Sequence: Synthetic oligonucleotide
cccuacuggaugccccuca

SEQ ID NO: 720918 - RNA, 19 nt, Artificial Sequence
  Description of Artificial Sequence: Synthetic oligonucleotide
cagccgguuagcccucgcu

SEQ ID NO: 720919 - RNA, 19 nt, Artificial Sequence
  Description of Artificial Sequence: Synthetic oligonucleotide
cccggcacagccgguuagc

SEQ ID NO: 720920 - RNA, 19 nt, Artificial Sequence
  Description of Artificial Sequence: Synthetic oligonucleotide
gcuccuacccuggaacccu

SEQ ID NO: 720921 - RNA, 19 nt, Artificial Sequence
  Description of Artificial Sequence: Synthetic oligonucleotide
cgcgcuugaucagcccugg

SEQ ID NO: 720922 - RNA, 19 nt, Artificial Sequence
  Description of Artificial Sequence: Synthetic oligonucleotide
gucggacccugggucacua

SEQ ID NO: 720923 - RNA, 19 nt, Artificial Sequence
  Description of Artificial Sequence: Synthetic oligonucleotide
cgggccauuaggaggccca

SEQ ID NO: 720924 - RNA, 19 nt, Artificial Sequence
  Description of Artificial Sequence: Synthetic oligonucleotide
ccagucgcgucucccugca

SEQ ID NO: 720925 - RNA, 19 nt, Artificial Sequence
  Description of Artificial Sequence: Synthetic oligonucleotide
ggcggggccaaccucuguu

SEQ ID NO: 720926 - RNA, 19 nt, Artificial Sequence
  Description of Artificial Sequence: Synthetic oligonucleotide
cuccguccaagaggacuaa

SEQ ID NO: 720927 - RNA, 19 nt, Artificial Sequence
  Description of Artificial Sequence: Synthetic oligonucleotide
agcaggcaucgcgcuugau

SEQ ID NO: 720928 - RNA, 19 nt, Artificial Sequence
  Description of Artificial Sequence: Synthetic oligonucleotide
ggguggcccgugccacaug

SEQ ID NO: 720929 - RNA, 19 nt, Artificial Sequence
  Description of Artificial Sequence: Synthetic oligonucleotide
ggucugccugcuccaaauu

SEQ ID NO: 720930 - RNA, 19 nt, Artificial Sequence
  Description of Artificial Sequence: Synthetic oligonucleotide
gggccauuaggaggcccaa

SEQ ID NO: 720931 - RNA, 19 nt, Artificial Sequence
  Description of Artificial Sequence: Synthetic oligonucleotide
cugcacuagugagggcagu

SEQ ID NO: 720932 - RNA, 19 nt, Artificial Sequence
  Description of Artificial Sequence: Synthetic oligonucleotide
gcccucguucuggggcugc

SEQ ID NO: 720933 - RNA, 19 nt, Artificial Sequence
  Description of Artificial Sequence: Synthetic oligonucleotide
gcgguaauggcuggcuguu

SEQ ID NO: 720934 - RNA, 19 nt, Artificial Sequence
  Description of Artificial Sequence: Synthetic oligonucleotide
ggccuggcggggccaaccu

SEQ ID NO: 720935 - RNA, 19 nt, Artificial Sequence
  Description of Artificial Sequence: Synthetic oligonucleotide
cuggccggcagggcacaua

SEQ ID NO: 720936 - RNA, 19 nt, Artificial Sequence
  Description of Artificial Sequence: Synthetic oligonucleotide
cuggagccgccagucgcgu

SEQ ID NO: 720937 - RNA, 19 nt, Artificial Sequence
  Description of Artificial Sequence: Synthetic oligonucleotide
cggauucuaggguggugua

SEQ ID NO: 720938 - RNA, 19 nt, Artificial Sequence
  Description of Artificial Sequence: Synthetic oligonucleotide
gccagcccgcuccuacccu

SEQ ID NO: 720939 - RNA, 19 nt, Artificial Sequence
  Description of Artificial Sequence: Synthetic oligonucleotide
gccgggccauuaggaggcc

SEQ ID NO: 720940 - RNA, 19 nt, Artificial Sequence
  Description of Artificial Sequence: Synthetic oligonucleotide
ccgguuagcccucgcuaau

SEQ ID NO: 720941 - RNA, 19 nt, Artificial Sequence
  Description of Artificial Sequence: Synthetic oligonucleotide
ggccacgcccuggccggca

SEQ ID NO: 720942 - RNA, 19 nt, Artificial Sequence
  Description of Artificial Sequence: Synthetic oligonucleotide
ccacgcugucuggcagcac

SEQ ID NO: 720943 - RNA, 19 nt, Artificial Sequence
  Description of Artificial Sequence: Synthetic oligonucleotide
gcgcuugaucagcccuggu

SEQ ID NO: 720944 - RNA, 19 nt, Artificial Sequence
  Description of Artificial Sequence: Synthetic oligonucleotide
gccagacauuggguauaau

SEQ ID NO: 720945 - RNA, 19 nt, Artificial Sequence
  Description of Artificial Sequence: Synthetic oligonucleotide
caggggcaugucggacccu

SEQ ID NO: 720946 - RNA, 19 nt, Artificial Sequence
  Description of Artificial Sequence: Synthetic oligonucleotide
cagcgccugccagcccgcu

SEQ ID NO: 720947 - RNA, 19 nt, Artificial Sequence
  Description of Artificial Sequence: Synthetic oligonucleotide
ccggccuggcggggccaac

SEQ ID NO: 720948 - RNA, 19 nt, Artificial Sequence
  Description of Artificial Sequence: Synthetic oligonucleotide
cgguuagcccucgcuaauu

SEQ ID NO: 720949 - RNA, 19 nt, Artificial Sequence
  Description of Artificial Sequence: Synthetic oligonucleotide
cccucguucuggggcugcu

SEQ ID NO: 720950 - RNA, 19 nt, Artificial Sequence
  Description of Artificial Sequence: Synthetic oligonucleotide
ccgugccacaugggacugu

SEQ ID NO: 720951 - RNA, 19 nt, Artificial Sequence
  Description of Artificial Sequence: Synthetic oligonucleotide
cgguaauggcuggcuguuu

SEQ ID NO: 720952 - RNA, 19 nt, Artificial Sequence
  Description of Artificial Sequence: Synthetic oligonucleotide
ugaggugaccaucugaagg

SEQ ID NO: 720953 - RNA, 19 nt, Artificial Sequence
  Description of Artificial Sequence: Synthetic oligonucleotide
uuuauuagaggugagguga

SEQ ID NO: 720954 - RNA, 19 nt, Artificial Sequence
  Description of Artificial Sequence: Synthetic oligonucleotide
aggaacaggccauagagcg

SEQ ID NO: 720955 - RNA, 19 nt, Artificial Sequence
  Description of Artificial Sequence: Synthetic oligonucleotide
aaagaagugcaacccggcc

SEQ ID NO: 720956 - RNA, 19 nt, Artificial Sequence
  Description of Artificial Sequence: Synthetic oligonucleotide
uguauuuuauuagagguga

SEQ ID NO: 720957 - RNA, 19 nt, Artificial Sequence
  Description of Artificial Sequence: Synthetic oligonucleotide
aucuuuauccgcugaacgc

SEQ ID NO: 720958 - RNA, 19 nt, Artificial Sequence
  Description of Artificial Sequence: Synthetic oligonucleotide
agaacguagggccacacgg

SEQ ID NO: 720959 - RNA, 19 nt, Artificial Sequence
  Description of Artificial Sequence: Synthetic oligonucleotide
uguggauaagcacugugcc

SEQ ID NO: 720960 - RNA, 19 nt, Artificial Sequence
  Description of Artificial Sequence: Synthetic oligonucleotide
aguaguuucagcaucuauc

SEQ ID NO: 720961 - RNA, 19 nt, Artificial Sequence
  Description of Artificial Sequence: Synthetic oligonucleotide
acaagcaucaggguaaggg

SEQ ID NO: 720962 - RNA, 19 nt, Artificial Sequence
  Description of Artificial Sequence: Synthetic oligonucleotide
auggguauggccacaaucc

SEQ ID NO: 720963 - RNA, 19 nt, Artificial Sequence
  Description of Artificial Sequence: Synthetic oligonucleotide
uucacgaugaggagggugc

SEQ ID NO: 720964 - RNA, 19 nt, Artificial Sequence
  Description of Artificial Sequence: Synthetic oligonucleotide
ugaaccuccaccugaaaga

SEQ ID NO: 720965 - RNA, 19 nt, Artificial Sequence
  Description of Artificial Sequence: Synthetic oligonucleotide
acugucauccccaauuacc

SEQ ID NO: 720966 - RNA, 19 nt, Artificial Sequence
  Description of Artificial Sequence: Synthetic oligonucleotide
ugauguaacuagcucuucc

SEQ ID NO: 720967 - RNA, 19 nt, Artificial Sequence
  Description of Artificial Sequence: Synthetic oligonucleotide
uguuccauggcaaauccaa

SEQ ID NO: 720968 - RNA, 19 nt, Artificial Sequence
  Description of Artificial Sequence: Synthetic oligonucleotide
ucccuucccgauaaaaccg

SEQ ID NO: 720969 - RNA, 19 nt, Artificial Sequence
  Description of Artificial Sequence: Synthetic oligonucleotide
agauuguugacuaucagca

SEQ ID NO: 720970 - RNA, 19 nt, Artificial Sequence
  Description of Artificial Sequence: Synthetic oligonucleotide
aacugcuacugcuccaggg

SEQ ID NO: 720971 - RNA, 19 nt, Artificial Sequence
  Description of Artificial Sequence: Synthetic oligonucleotide
cagauuguugacuaucagc

SEQ ID NO: 720972 - RNA, 19 nt, Artificial Sequence
  Description of Artificial Sequence: Synthetic oligonucleotide
ucaagcauaagagucacaa

SEQ ID NO: 720973 - RNA, 19 nt, Artificial Sequence
  Description of Artificial Sequence: Synthetic oligonucleotide
uaugaugcccaguuccagg

SEQ ID NO: 720974 - RNA, 19 nt, Artificial Sequence
  Description of Artificial Sequence: Synthetic oligonucleotide
augcuauaccuccugcugc

SEQ ID NO: 720975 - RNA, 19 nt, Artificial Sequence
  Description of Artificial Sequence: Synthetic oligonucleotide
gacaagcuuaucccaaggg

SEQ ID NO: 720976 - RNA, 19 nt, Artificial Sequence
  Description of Artificial Sequence: Synthetic oligonucleotide
aagaagugcaacccggccu

SEQ ID NO: 720977 - RNA, 19 nt, Artificial Sequence
  Description of Artificial Sequence: Synthetic oligonucleotide
caucuuuauccgcugaacg

SEQ ID NO: 720978 - RNA, 19 nt, Artificial Sequence
  Description of Artificial Sequence: Synthetic oligonucleotide
gaugcuauaccuccugcug

SEQ ID NO: 720979 - RNA, 19 nt, Artificial Sequence
  Description of Artificial Sequence: Synthetic oligonucleotide
gaggugaccaucugaaggc

SEQ ID NO: 720980 - RNA, 19 nt, Artificial Sequence
  Description of Artificial Sequence: Synthetic oligonucleotide
caggucagaacguagggcc

SEQ ID NO: 720981 - RNA, 19 nt, Artificial Sequence
  Description of Artificial Sequence: Synthetic oligonucleotide
agacaguuuggaaaguacc

SEQ ID NO: 720982 - RNA, 19 nt, Artificial Sequence
  Description of Artificial Sequence: Synthetic oligonucleotide
uggauaagcacugugccgc

SEQ ID NO: 720983 - RNA, 19 nt, Artificial Sequence
  Description of Artificial Sequence: Synthetic oligonucleotide
uuugucauguggucaagca

SEQ ID NO: 720984 - RNA, 19 nt, Artificial Sequence
  Description of Artificial Sequence: Synthetic oligonucleotide
aagcuuaucccaaggguac

SEQ ID NO: 720985 - RNA, 19 nt, Artificial Sequence
  Description of Artificial Sequence: Synthetic oligonucleotide
ugucauguggucaagcaua

SEQ ID NO: 720986 - RNA, 19 nt, Artificial Sequence
  Description of Artificial Sequence: Synthetic oligonucleotide
gcaucuaucagcuucagca

SEQ ID NO: 720987 - RNA, 19 nt, Artificial Sequence
  Description of Artificial Sequence: Synthetic oligonucleotide
agucgugcagaacugaugu

SEQ ID NO: 720988 - RNA, 19 nt, Artificial Sequence
  Description of Artificial Sequence: Synthetic oligonucleotide
aucaggguaagggaaacac

SEQ ID NO: 720989 - RNA, 19 nt, Artificial Sequence
  Description of Artificial Sequence: Synthetic oligonucleotide
ucuuuauccgcugaacgcc

SEQ ID NO: 720990 - RNA, 19 nt, Artificial Sequence
  Description of Artificial Sequence: Synthetic oligonucleotide
aaguugagcucacacuucu

SEQ ID NO: 720991 - RNA, 19 nt, Artificial Sequence
  Description of Artificial Sequence: Synthetic oligonucleotide
cuagcuguuggcagggugg

SEQ ID NO: 720992 - RNA, 19 nt, Artificial Sequence
  Description of Artificial Sequence: Synthetic oligonucleotide
guaacuagcucuuccagca

SEQ ID NO: 720993 - RNA, 19 nt, Artificial Sequence
  Description of Artificial Sequence: Synthetic oligonucleotide
agcgaauagcagcaucagc

SEQ ID NO: 720994 - RNA, 19 nt, Artificial Sequence
  Description of Artificial Sequence: Synthetic oligonucleotide
cauguauuuuauuagaggu

SEQ ID NO: 720995 - RNA, 19 nt, Artificial Sequence
  Description of Artificial Sequence: Synthetic oligonucleotide
auuccgcccagucacagag

SEQ ID NO: 720996 - RNA, 19 nt, Artificial Sequence
  Description of Artificial Sequence: Synthetic oligonucleotide
gauguaacuagcucuucca

SEQ ID NO: 720997 - RNA, 19 nt, Artificial Sequence
  Description of Artificial Sequence: Synthetic oligonucleotide
acaagcuuaucccaagggu

SEQ ID NO: 720998 - RNA, 19 nt, Artificial Sequence
  Description of Artificial Sequence: Synthetic oligonucleotide
ugcugcauguauuuuauua

SEQ ID NO: 720999 - RNA, 19 nt, Artificial Sequence
  Description of Artificial Sequence: Synthetic oligonucleotide
guugagucgauccccagug

SEQ ID NO: 721000 - RNA, 19 nt, Artificial Sequence
  Description of Artificial Sequence: Synthetic oligonucleotide
auaaaaccggcaugggcag

SEQ ID NO: 721001 - RNA, 19 nt, Artificial Sequence
  Description of Artificial Sequence: Synthetic oligonucleotide
uaacccagcaagagcauca

SEQ ID NO: 721002 - RNA, 19 nt, Artificial Sequence
  Description of Artificial Sequence: Synthetic oligonucleotide
cuuguuccauggcaaaucc

SEQ ID NO: 721003 - RNA, 19 nt, Artificial Sequence
  Description of Artificial Sequence: Synthetic oligonucleotide
auuugcgaucuccuccagc

SEQ ID NO: 721004 - RNA, 19 nt, Artificial Sequence
  Description of Artificial Sequence: Synthetic oligonucleotide
aaaguaccugggcagggcu

SEQ ID NO: 721005 - RNA, 19 nt, Artificial Sequence
  Description of Artificial Sequence: Synthetic oligonucleotide
caaucugaucagcaggugc

SEQ ID NO: 721006 - RNA, 19 nt, Artificial Sequence
  Description of Artificial Sequence: Synthetic oligonucleotide
aauagcagcaucagcuaug

SEQ ID NO: 721007 - RNA, 19 nt, Artificial Sequence
  Description of Artificial Sequence: Synthetic oligonucleotide
agguauuugucaugugguc

SEQ ID NO: 721008 - RNA, 19 nt, Artificial Sequence
  Description of Artificial Sequence: Synthetic oligonucleotide
cauagagcgccccagauga

SEQ ID NO: 721009 - RNA, 19 nt, Artificial Sequence
  Description of Artificial Sequence: Synthetic oligonucleotide
ugagccucccaucuucucc

SEQ ID NO: 721010 - RNA, 19 nt, Artificial Sequence
  Description of Artificial Sequence: Synthetic oligonucleotide
uguggucaagcauaagagu

SEQ ID NO: 721011 - RNA, 19 nt, Artificial Sequence
  Description of Artificial Sequence: Synthetic oligonucleotide
aguccgagcaggguggugc

SEQ ID NO: 721012 - RNA, 19 nt, Artificial Sequence
  Description of Artificial Sequence: Synthetic oligonucleotide
gaucuagucgugcagaacu

SEQ ID NO: 721013 - RNA, 19 nt, Artificial Sequence
  Description of Artificial Sequence: Synthetic oligonucleotide
gcagguuaggguuacaggc

SEQ ID NO: 721014 - RNA, 19 nt, Artificial Sequence
  Description of Artificial Sequence: Synthetic oligonucleotide
uacauuggagguauuuguc

SEQ ID NO: 721015 - RNA, 19 nt, Artificial Sequence
  Description of Artificial Sequence: Synthetic oligonucleotide
ucugauccgauuccgccca

SEQ ID NO: 721016 - RNA, 19 nt, Artificial Sequence
  Description of Artificial Sequence: Synthetic oligonucleotide
aacguagggccacacggug

SEQ ID NO: 721017 - RNA, 19 nt, Artificial Sequence
  Description of Artificial Sequence: Synthetic oligonucleotide
ccaacaagcgaauagcagc

SEQ ID NO: 721018 - RNA, 19 nt, Artificial Sequence
  Description of Artificial Sequence: Synthetic oligonucleotide
agcugcucugauccgauuc

SEQ ID NO: 721019 - RNA, 19 nt, Artificial Sequence
  Description of Artificial Sequence: Synthetic oligonucleotide
agugcuaccucgucugaag

SEQ ID NO: 721020 - RNA, 19 nt, Artificial Sequence
  Description of Artificial Sequence: Synthetic oligonucleotide
gaacaggccauagagcgcc

SEQ ID NO: 721021 - RNA, 19 nt, Artificial Sequence
  Description of Artificial Sequence: Synthetic oligonucleotide
acaagcauugucugcuuug

SEQ ID NO: 721022 - RNA, 19 nt, Artificial Sequence
  Description of Artificial Sequence: Synthetic oligonucleotide
uccagcauuguccugucuc

SEQ ID NO: 721023 - RNA, 19 nt, Artificial Sequence
  Description of Artificial Sequence: Synthetic oligonucleotide
auguaacuagcucuuccag

SEQ ID NO: 721024 - RNA, 19 nt, Artificial Sequence
  Description of Artificial Sequence: Synthetic oligonucleotide
cacuaacccagcaagagca

SEQ ID NO: 721025 - RNA, 19 nt, Artificial Sequence
  Description of Artificial Sequence: Synthetic oligonucleotide
caaaguugagucgaucccc

SEQ ID NO: 721026 - RNA, 19 nt, Artificial Sequence
  Description of Artificial Sequence: Synthetic oligonucleotide
caucuaucagcuucagcag

SEQ ID NO: 721027 - RNA, 19 nt, Artificial Sequence
  Description of Artificial Sequence: Synthetic oligonucleotide
cagaacugauguaacuagc

SEQ ID NO: 721028 - RNA, 19 nt, Artificial Sequence
  Description of Artificial Sequence: Synthetic oligonucleotide
ugcaaucgaccccugucag

SEQ ID NO: 721029 - RNA, 19 nt, Artificial Sequence
  Description of Artificial Sequence: Synthetic oligonucleotide
aggccacuaacccagcaag

SEQ ID NO: 721030 - RNA, 19 nt, Artificial Sequence
  Description of Artificial Sequence: Synthetic oligonucleotide
guacccauggccuuggcga

SEQ ID NO: 721031 - RNA, 19 nt, Artificial Sequence
  Description of Artificial Sequence: Synthetic oligonucleotide
gaacugauguaacuagcuc

SEQ ID NO: 721032 - RNA, 19 nt, Artificial Sequence
  Description of Artificial Sequence: Synthetic oligonucleotide
uucccgauaaaaccggcau

SEQ ID NO: 721033 - RNA, 19 nt, Artificial Sequence
  Description of Artificial Sequence: Synthetic oligonucleotide
gcaaauccaaaguugaguc

SEQ ID NO: 721034 - RNA, 19 nt, Artificial Sequence
  Description of Artificial Sequence: Synthetic oligonucleotide
cagacaugaagguacccac

SEQ ID NO: 721035 - RNA, 19 nt, Artificial Sequence
  Description of Artificial Sequence: Synthetic oligonucleotide
cagguuaggguuacaggcc

SEQ ID NO: 721036 - RNA, 19 nt, Artificial Sequence
  Description of Artificial Sequence: Synthetic oligonucleotide
auguauuuuauuagaggug

SEQ ID NO: 721037 - RNA, 19 nt, Artificial Sequence
  Description of Artificial Sequence: Synthetic oligonucleotide
ugaugcuauaccuccugcu

SEQ ID NO: 721038 - RNA, 19 nt, Artificial Sequence
  Description of Artificial Sequence: Synthetic oligonucleotide
gauuguugacuaucagcac

SEQ ID NO: 721039 - RNA, 19 nt, Artificial Sequence
  Description of Artificial Sequence: Synthetic oligonucleotide
gguuacaggccacuaaccc

SEQ ID NO: 721040 - RNA, 19 nt, Artificial Sequence
  Description of Artificial Sequence: Synthetic oligonucleotide
agcauaagagucacaaucu

SEQ ID NO: 721041 - RNA, 19 nt, Artificial Sequence
  Description of Artificial Sequence: Synthetic oligonucleotide
caagcgaauagcagcauca

SEQ ID NO: 721042 - RNA, 19 nt, Artificial Sequence
  Description of Artificial Sequence: Synthetic oligonucleotide
ugcuuugaugcuauaccuc

SEQ ID NO: 721043 - RNA, 19 nt, Artificial Sequence
  Description of Artificial Sequence: Synthetic oligonucleotide
cugagugcuaccucgucug

SEQ ID NO: 721044 - RNA, 19 nt, Artificial Sequence
  Description of Artificial Sequence: Synthetic oligonucleotide
auuagaggugaggugacca

SEQ ID NO: 721045 - RNA, 19 nt, Artificial Sequence
  Description of Artificial Sequence: Synthetic oligonucleotide
ugcuccuagcuguuggcag

SEQ ID NO: 721046 - RNA, 19 nt, Artificial Sequence
  Description of Artificial Sequence: Synthetic oligonucleotide
uguccugucuccuggugca

SEQ ID NO: 721047 - RNA, 19 nt, Artificial Sequence
  Description of Artificial Sequence: Synthetic oligonucleotide
ugcuauaccuccugcugca

SEQ ID NO: 721048 - RNA, 19 nt, Artificial Sequence
  Description of Artificial Sequence: Synthetic oligonucleotide
gguauggccacaauccccg

SEQ ID NO: 721049 - RNA, 19 nt, Artificial Sequence
  Description of Artificial Sequence: Synthetic oligonucleotide
guuacaggccacuaaccca

SEQ ID NO: 721050 - RNA, 19 nt, Artificial Sequence
  Description of Artificial Sequence: Synthetic oligonucleotide
gcagaacugauguaacuag

SEQ ID NO: 721051 - RNA, 19 nt, Artificial Sequence
  Description of Artificial Sequence: Synthetic oligonucleotide
agcuggagaagcgaacacg

SEQ ID NO: 721052 - RNA, 19 nt, Artificial Sequence
  Description of Artificial Sequence: Synthetic oligonucleotide
ugaaacaaguugagcucac

SEQ ID NO: 721053 - RNA, 19 nt, Artificial Sequence
  Description of Artificial Sequence: Synthetic oligonucleotide
uagucgugcagaacugaug

SEQ ID NO: 721054 - RNA, 19 nt, Artificial Sequence
  Description of Artificial Sequence: Synthetic oligonucleotide
uugucauguggucaagcau

SEQ ID NO: 721055 - RNA, 19 nt, Artificial Sequence
  Description of Artificial Sequence: Synthetic oligonucleotide
agaacugauguaacuagcu

SEQ ID NO: 721056 - RNA, 19 nt, Artificial Sequence
  Description of Artificial Sequence: Synthetic oligonucleotide
ucccgauaaaaccggcaug

SEQ ID NO: 721057 - RNA, 19 nt, Artificial Sequence
  Description of Artificial Sequence: Synthetic oligonucleotide
aagcgaauagcagcaucag

SEQ ID NO: 721058 - RNA, 19 nt, Artificial Sequence
  Description of Artificial Sequence: Synthetic oligonucleotide
uacaggaggacaagcuuau

SEQ ID NO: 721059 - RNA, 19 nt, Artificial Sequence
  Description of Artificial Sequence: Synthetic oligonucleotide
gauggcacggaagauggca

SEQ ID NO: 721060 - RNA, 19 nt, Artificial Sequence
  Description of Artificial Sequence: Synthetic oligonucleotide
ugucagcauucccuucccg

SEQ ID NO: 721061 - RNA, 19 nt, Artificial Sequence
  Description of Artificial Sequence: Synthetic oligonucleotide
aaguugagucgauccccag

SEQ ID NO: 721062 - RNA, 19 nt, Artificial Sequence
  Description of Artificial Sequence: Synthetic oligonucleotide
ugggauacauuggagguau

SEQ ID NO: 721063 - RNA, 19 nt, Artificial Sequence
  Description of Artificial Sequence: Synthetic oligonucleotide
aguugagucgauccccagu

SEQ ID NO: 721064 - RNA, 19 nt, Artificial Sequence
  Description of Artificial Sequence: Synthetic oligonucleotide
agagcgccccagaugagcc

SEQ ID NO: 721065 - RNA, 19 nt, Artificial Sequence
  Description of Artificial Sequence: Synthetic oligonucleotide
ucagcauucccuucccgau

SEQ ID NO: 721066 - RNA, 19 nt, Artificial Sequence
  Description of Artificial Sequence: Synthetic oligonucleotide
acccagauuguugacuauc

SEQ ID NO: 721067 - RNA, 19 nt, Artificial Sequence
  Description of Artificial Sequence: Synthetic oligonucleotide
agaagugcaacccggccuu

SEQ ID NO: 721068 - RNA, 19 nt, Artificial Sequence
  Description of Artificial Sequence: Synthetic oligonucleotide
ggcuuuaagaggcugggca

SEQ ID NO: 721069 - RNA, 19 nt, Artificial Sequence
  Description of Artificial Sequence: Synthetic oligonucleotide
uuuaagaggcugggcagcu

SEQ ID NO: 721070 - RNA, 19 nt, Artificial Sequence
  Description of Artificial Sequence: Synthetic oligonucleotide
gcuggagaagcgaacacgg

SEQ ID NO: 721071 - RNA, 19 nt, Artificial Sequence
  Description of Artificial Sequence: Synthetic oligonucleotide
uuguuccauggcaaaucca

SEQ ID NO: 721072 - RNA, 19 nt, Artificial Sequence
  Description of Artificial Sequence: Synthetic oligonucleotide
ccacugaagagccugacug

SEQ ID NO: 721073 - RNA, 19 nt, Artificial Sequence
  Description of Artificial Sequence: Synthetic oligonucleotide
ggucuggcugaucuagucg

SEQ ID NO: 721074 - RNA, 19 nt, Artificial Sequence
  Description of Artificial Sequence: Synthetic oligonucleotide
uuauccgcugaacgccagc

SEQ ID NO: 721075 - RNA, 19 nt, Artificial Sequence
  Description of Artificial Sequence: Synthetic oligonucleotide
gagcaucaucagcacaccc

SEQ ID NO: 721076 - RNA, 19 nt, Artificial Sequence
  Description of Artificial Sequence: Synthetic oligonucleotide
ucaugguagggaagcucug

SEQ ID NO: 721077 - RNA, 19 nt, Artificial Sequence
  Description of Artificial Sequence: Synthetic oligonucleotide
agaccuccaggauggcacg

SEQ ID NO: 721078 - RNA, 19 nt, Artificial Sequence
  Description of Artificial Sequence: Synthetic oligonucleotide
ucuagucgugcagaacuga

SEQ ID NO: 721079 - RNA, 19 nt, Artificial Sequence
  Description of Artificial Sequence: Synthetic oligonucleotide
uuagaggugaggugaccau

SEQ ID NO: 721080 - RNA, 19 nt, Artificial Sequence
  Description of Artificial Sequence: Synthetic oligonucleotide
uauuagaggugaggugacc

SEQ ID NO: 721081 - RNA, 19 nt, Artificial Sequence
  Description of Artificial Sequence: Synthetic oligonucleotide
agcagcccgauccaaggca

SEQ ID NO: 721082 - RNA, 19 nt, Artificial Sequence
  Description of Artificial Sequence: Synthetic oligonucleotide
acggauccugcaaucgacc

SEQ ID NO: 721083 - RNA, 19 nt, Artificial Sequence
  Description of Artificial Sequence: Synthetic oligonucleotide
cacggauccugcaaucgac

SEQ ID NO: 721084 - RNA, 19 nt, Artificial Sequence
  Description of Artificial Sequence: Synthetic oligonucleotide
acgacggccugccuucuuc

SEQ ID NO: 721085 - RNA, 19 nt, Artificial Sequence
  Description of Artificial Sequence: Synthetic oligonucleotide
cccgauaaaaccggcaugg

SEQ ID NO: 721086 - RNA, 19 nt, Artificial Sequence
  Description of Artificial Sequence: Synthetic oligonucleotide
aaccggcaugggcaggcuc

SEQ ID NO: 721087 - RNA, 19 nt, Artificial Sequence
  Description of Artificial Sequence: Synthetic oligonucleotide
acagcuggagaagcgaaca

SEQ ID NO: 721088 - RNA, 19 nt, Artificial Sequence
  Description of Artificial Sequence: Synthetic oligonucleotide
acguucacccgauuugcga

SEQ ID NO: 721089 - RNA, 19 nt, Artificial Sequence
  Description of Artificial Sequence: Synthetic oligonucleotide
gguaagggaaacaccagac

SEQ ID NO: 721090 - RNA, 19 nt, Artificial Sequence
  Description of Artificial Sequence: Synthetic oligonucleotide
ggacaagcuuaucccaagg

SEQ ID NO: 721091 - RNA, 19 nt, Artificial Sequence
  Description of Artificial Sequence: Synthetic oligonucleotide
cccaguguaguucuucacg

SEQ ID NO: 721092 - RNA, 19 nt, Artificial Sequence
  Description of Artificial Sequence: Synthetic oligonucleotide
uaacuagcucuuccagcac

SEQ ID NO: 721093 - RNA, 19 nt, Artificial Sequence
  Description of Artificial Sequence: Synthetic oligonucleotide
cacguucacccgauuugcg

SEQ ID NO: 721094 - RNA, 19 nt, Artificial Sequence
  Description of Artificial Sequence: Synthetic oligonucleotide
acgcuacaggaggacaagc

SEQ ID NO: 721095 - RNA, 19 nt, Artificial Sequence
  Description of Artificial Sequence: Synthetic oligonucleotide
gacaguuuggaaaguaccu

SEQ ID NO: 721096 - RNA, 19 nt, Artificial Sequence
  Description of Artificial Sequence: Synthetic oligonucleotide
gcauaagagucacaaucug

SEQ ID NO: 721097 - RNA, 19 nt, Artificial Sequence
  Description of Artificial Sequence: Synthetic oligonucleotide
gucagcauucccuucccga

SEQ ID NO: 721098 - RNA, 19 nt, Artificial Sequence
  Description of Artificial Sequence: Synthetic oligonucleotide
acggccugccuucuucagg

SEQ ID NO: 721099 - RNA, 19 nt, Artificial Sequence
  Description of Artificial Sequence: Synthetic oligonucleotide
gauccgauuccgcccaguc

SEQ ID NO: 721100 - RNA, 19 nt, Artificial Sequence
  Description of Artificial Sequence: Synthetic oligonucleotide
cuccaguccgagcagggug

SEQ ID NO: 721101 - RNA, 19 nt, Artificial Sequence
  Description of Artificial Sequence: Synthetic oligonucleotide
gugaccaucugaaggcaag

SEQ ID NO: 721102 - RNA, 19 nt, Artificial Sequence
  Description of Artificial Sequence: Synthetic oligonucleotide
uggcugaucuagucgugca

SEQ ID NO: 721103 - RNA, 19 nt, Artificial Sequence
  Description of Artificial Sequence: Synthetic oligonucleotide
cagaacguagggccacacg

SEQ ID NO: 721104 - RNA, 19 nt, Artificial Sequence
  Description of Artificial Sequence: Synthetic oligonucleotide
acacggauccugcaaucga

SEQ ID NO: 721105 - RNA, 19 nt, Artificial Sequence
  Description of Artificial Sequence: Synthetic oligonucleotide
uagagcgccccagaugagc

SEQ ID NO: 721106 - RNA, 19 nt, Artificial Sequence
  Description of Artificial Sequence: Synthetic oligonucleotide
gguacccauggccuuggcg

SEQ ID NO: 721107 - RNA, 19 nt, Artificial Sequence
  Description of Artificial Sequence: Synthetic oligonucleotide
uauccgcugaacgccagcu

SEQ ID NO: 721108 - RNA, 19 nt, Artificial Sequence
  Description of Artificial Sequence: Synthetic oligonucleotide
uaaaaccggcaugggcagg

SEQ ID NO: 721109 - RNA, 19 nt, Artificial Sequence
  Description of Artificial Sequence: Synthetic oligonucleotide
ugccaucuuuauccgcuga

SEQ ID NO: 721110 - RNA, 19 nt, Artificial Sequence
  Description of Artificial Sequence: Synthetic oligonucleotide
accagacaucuccagugca

SEQ ID NO: 721111 - RNA, 19 nt, Artificial Sequence
  Description of Artificial Sequence: Synthetic oligonucleotide
gagguauuugucauguggu

SEQ ID NO: 721112 - RNA, 19 nt, Artificial Sequence
  Description of Artificial Sequence: Synthetic oligonucleotide
cuuggagcuccuguccugc

SEQ ID NO: 721113 - RNA, 19 nt, Artificial Sequence
  Description of Artificial Sequence: Synthetic oligonucleotide
acugauguaacuagcucuu

SEQ ID NO: 721114 - RNA, 19 nt, Artificial Sequence
  Description of Artificial Sequence: Synthetic oligonucleotide
gacgcuacaggaggacaag

SEQ ID NO: 721115 - RNA, 19 nt, Artificial Sequence
  Description of Artificial Sequence: Synthetic oligonucleotide
cuaugaugcccaguuccag

SEQ ID NO: 721116 - RNA, 19 nt, Artificial Sequence
  Description of Artificial Sequence: Synthetic oligonucleotide
gguggugcacacucgcucc

SEQ ID NO: 721117 - RNA, 19 nt, Artificial Sequence
  Description of Artificial Sequence: Synthetic oligonucleotide
gauuugcgaucuccuccag

SEQ ID NO: 721118 - RNA, 19 nt, Artificial Sequence
  Description of Artificial Sequence: Synthetic oligonucleotide
agaggugaggugaccaucu

SEQ ID NO: 721119 - RNA, 19 nt, Artificial Sequence
  Description of Artificial Sequence: Synthetic oligonucleotide
agcucaaagguggguuugg

SEQ ID NO: 721120 - RNA, 19 nt, Artificial Sequence
  Description of Artificial Sequence: Synthetic oligonucleotide
uuaucccaaggguacccau

SEQ ID NO: 721121 - RNA, 19 nt, Artificial Sequence
  Description of Artificial Sequence: Synthetic oligonucleotide
ugagugcuaccucgucuga

SEQ ID NO: 721122 - RNA, 19 nt, Artificial Sequence
  Description of Artificial Sequence: Synthetic oligonucleotide
cagucaugcucccuguguc

SEQ ID NO: 721123 - RNA, 19 nt, Artificial Sequence
  Description of Artificial Sequence: Synthetic oligonucleotide
uugcgaucuccuccagccc

SEQ ID NO: 721124 - RNA, 19 nt, Artificial Sequence
  Description of Artificial Sequence: Synthetic oligonucleotide
uugagucgauccccagugu

SEQ ID NO: 721125 - RNA, 19 nt, Artificial Sequence
  Description of Artificial Sequence: Synthetic oligonucleotide
acguagggccacacggugc

SEQ ID NO: 721126 - RNA, 19 nt, Artificial Sequence
  Description of Artificial Sequence: Synthetic oligonucleotide
caccugaaagaagugcaac

SEQ ID NO: 721127 - RNA, 19 nt, Artificial Sequence
  Description of Artificial Sequence: Synthetic oligonucleotide
caccuuguggauaagcacu

SEQ ID NO: 721128 - RNA, 19 nt, Artificial Sequence
  Description of Artificial Sequence: Synthetic oligonucleotide
cagccuuuccauacuucug

SEQ ID NO: 721129 - RNA, 19 nt, Artificial Sequence
  Description of Artificial Sequence: Synthetic oligonucleotide
ggguggccaauccugagug

SEQ ID NO: 721130 - RNA, 19 nt, Artificial Sequence
  Description of Artificial Sequence: Synthetic oligonucleotide
ugaaggcaagaggaaugga

SEQ ID NO: 721131 - RNA, 19 nt, Artificial Sequence
  Description of Artificial Sequence: Synthetic oligonucleotide
gcacucuugacugcuuucg

SEQ ID NO: 721132 - RNA, 19 nt, Artificial Sequence
  Description of Artificial Sequence: Synthetic oligonucleotide
cugcaaucgaccccuguca

SEQ ID NO: 721133 - RNA, 19 nt, Artificial Sequence
  Description of Artificial Sequence: Synthetic oligonucleotide
gacuaucagcaccacugaa

SEQ ID NO: 721134 - RNA, 19 nt, Artificial Sequence
  Description of Artificial Sequence: Synthetic oligonucleotide
ggcacgggcaaccuucacc

SEQ ID NO: 721135 - RNA, 19 nt, Artificial Sequence
  Description of Artificial Sequence: Synthetic oligonucleotide
auccgauuccgcccaguca

SEQ ID NO: 721136 - RNA, 19 nt, Artificial Sequence
  Description of Artificial Sequence: Synthetic oligonucleotide
cuggcugaucuagucgugc

SEQ ID NO: 721137 - RNA, 19 nt, Artificial Sequence
  Description of Artificial Sequence: Synthetic oligonucleotide
cacccgauuugcgaucucc

SEQ ID NO: 721138 - RNA, 19 nt, Artificial Sequence
  Description of Artificial Sequence: Synthetic oligonucleotide
cuuggcgaccacguucacc

SEQ ID NO: 721139 - RNA, 19 nt, Artificial Sequence
  Description of Artificial Sequence: Synthetic oligonucleotide
caccccacguucuuccaac

SEQ ID NO: 721140 - RNA, 19 nt, Artificial Sequence
  Description of Artificial Sequence: Synthetic oligonucleotide
aacaggccauagagcgccc

SEQ ID NO: 721141 - RNA, 19 nt, Artificial Sequence
  Description of Artificial Sequence: Synthetic oligonucleotide
uggagguauuugucaugug

SEQ ID NO: 721142 - RNA, 19 nt, Artificial Sequence
  Description of Artificial Sequence: Synthetic oligonucleotide
caauuaccaccaucuccac

SEQ ID NO: 721143 - RNA, 19 nt, Artificial Sequence
  Description of Artificial Sequence: Synthetic oligonucleotide
cuucccgauaaaaccggca

SEQ ID NO: 721144 - RNA, 19 nt, Artificial Sequence
  Description of Artificial Sequence: Synthetic oligonucleotide
agucgauccccaguguagu

SEQ ID NO: 721145 - RNA, 19 nt, Artificial Sequence
  Description of Artificial Sequence: Synthetic oligonucleotide
gcugcucugauccgauucc

SEQ ID NO: 721146 - RNA, 19 nt, Artificial Sequence
  Description of Artificial Sequence: Synthetic oligonucleotide
ggauccugcaaucgacccc

SEQ ID NO: 721147 - RNA, 19 nt, Artificial Sequence
  Description of Artificial Sequence: Synthetic oligonucleotide
agggacgcuacaggaggac

SEQ ID NO: 721148 - RNA, 19 nt, Artificial Sequence
  Description of Artificial Sequence: Synthetic oligonucleotide
ggaaaguaccugggcaggg

SEQ ID NO: 721149 - RNA, 19 nt, Artificial Sequence
  Description of Artificial Sequence: Synthetic oligonucleotide
ugcccgcugugccugcuug

SEQ ID NO: 721150 - RNA, 19 nt, Artificial Sequence
  Description of Artificial Sequence: Synthetic oligonucleotide
caggccuaauuccacuuca

SEQ ID NO: 721151 - RNA, 19 nt, Artificial Sequence
  Description of Artificial Sequence: Synthetic oligonucleotide
ggguaagggaaacaccaga

SEQ ID NO: 721152 - RNA, 19 nt, Artificial Sequence
  Description of Artificial Sequence: Synthetic oligonucleotide
aucuagucgugcagaacug

SEQ ID NO: 721153 - RNA, 19 nt, Artificial Sequence
  Description of Artificial Sequence: Synthetic oligonucleotide
cugcucugauccgauuccg

SEQ ID NO: 721154 - RNA, 19 nt, Artificial Sequence
  Description of Artificial Sequence: Synthetic oligonucleotide
aaccuccaccugaaagaag

SEQ ID NO: 721155 - RNA, 19 nt, Artificial Sequence
  Description of Artificial Sequence: Synthetic oligonucleotide
ucgaccccugucagcauuc

SEQ ID NO: 721156 - RNA, 19 nt, Artificial Sequence
  Description of Artificial Sequence: Synthetic oligonucleotide
cuccuagcuguuggcaggg

SEQ ID NO: 721157 - RNA, 19 nt, Artificial Sequence
  Description of Artificial Sequence: Synthetic oligonucleotide
caagagcaucaucagcaca

SEQ ID NO: 721158 - RNA, 19 nt, Artificial Sequence
  Description of Artificial Sequence: Synthetic oligonucleotide
gucuggcugaucuagucgu

SEQ ID NO: 721159 - RNA, 19 nt, Artificial Sequence
  Description of Artificial Sequence: Synthetic oligonucleotide
cuaacccagcaagagcauc

SEQ ID NO: 721160 - RNA, 19 nt, Artificial Sequence
  Description of Artificial Sequence: Synthetic oligonucleotide
ccggcuauggguauggcca

SEQ ID NO: 721161 - RNA, 19 nt, Artificial Sequence
  Description of Artificial Sequence: Synthetic oligonucleotide
gacggccugccuucuucag

SEQ ID NO: 721162 - RNA, 19 nt, Artificial Sequence
  Description of Artificial Sequence: Synthetic oligonucleotide
caggccggcauccauggca

SEQ ID NO: 721163 - RNA, 19 nt, Artificial Sequence
  Description of Artificial Sequence: Synthetic oligonucleotide
caacugcuacugcuccagg

SEQ ID NO: 721164 - RNA, 19 nt, Artificial Sequence
  Description of Artificial Sequence: Synthetic oligonucleotide
uccugagugcuaccucguc

SEQ ID NO: 721165 - RNA, 19 nt, Artificial Sequence
  Description of Artificial Sequence: Synthetic oligonucleotide
uuaggguuacaggccacua

SEQ ID NO: 721166 - RNA, 19 nt, Artificial Sequence
  Description of Artificial Sequence: Synthetic oligonucleotide
guacccacgagggcacggg

SEQ ID NO: 721167 - RNA, 19 nt, Artificial Sequence
  Description of Artificial Sequence: Synthetic oligonucleotide
acaggccacuaacccagca

SEQ ID NO: 721168 - RNA, 19 nt, Artificial Sequence
  Description of Artificial Sequence: Synthetic oligonucleotide
uacaggccacuaacccagc

SEQ ID NO: 721169 - RNA, 19 nt, Artificial Sequence
  Description of Artificial Sequence: Synthetic oligonucleotide
uccugcaaucgaccccugu

SEQ ID NO: 721170 - RNA, 19 nt, Artificial Sequence
  Description of Artificial Sequence: Synthetic oligonucleotide
ccacuaacccagcaagagc

SEQ ID NO: 721171 - RNA, 19 nt, Artificial Sequence
  Description of Artificial Sequence: Synthetic oligonucleotide
agggaagcucugaaacaag

SEQ ID NO: 721172 - RNA, 19 nt, Artificial Sequence
  Description of Artificial Sequence: Synthetic oligonucleotide
agcgaacacggauccugca

SEQ ID NO: 721173 - RNA, 19 nt, Artificial Sequence
  Description of Artificial Sequence: Synthetic oligonucleotide
gauuccgcccagucacaga

SEQ ID NO: 721174 - RNA, 19 nt, Artificial Sequence
  Description of Artificial Sequence: Synthetic oligonucleotide
ucagaacguagggccacac

SEQ ID NO: 721175 - RNA, 19 nt, Artificial Sequence
  Description of Artificial Sequence: Synthetic oligonucleotide
ugcuuucgucaggacuggg

SEQ ID NO: 721176 - RNA, 19 nt, Artificial Sequence
  Description of Artificial Sequence: Synthetic oligonucleotide
ggucaagcauaagagucac

SEQ ID NO: 721177 - RNA, 19 nt, Artificial Sequence
  Description of Artificial Sequence: Synthetic oligonucleotide
ggagccagggacgcuacag

SEQ ID NO: 721178 - RNA, 19 nt, Artificial Sequence
  Description of Artificial Sequence: Synthetic oligonucleotide
aaucgaccccugucagcau

SEQ ID NO: 721179 - RNA, 19 nt, Artificial Sequence
  Description of Artificial Sequence: Synthetic oligonucleotide
cagcuggagaagcgaacac

SEQ ID NO: 721180 - RNA, 19 nt, Artificial Sequence
  Description of Artificial Sequence: Synthetic oligonucleotide
cugaucuagucgugcagaa

SEQ ID NO: 721181 - RNA, 19 nt, Artificial Sequence
  Description of Artificial Sequence: Synthetic oligonucleotide
caucagcuaugaugcccag

SEQ ID NO: 721182 - RNA, 19 nt, Artificial Sequence
  Description of Artificial Sequence: Synthetic oligonucleotide
uguugacuaucagcaccac

SEQ ID NO: 721183 - RNA, 19 nt, Artificial Sequence
  Description of Artificial Sequence: Synthetic oligonucleotide
ccagauuguugacuaucag

SEQ ID NO: 721184 - RNA, 19 nt, Artificial Sequence
  Description of Artificial Sequence: Synthetic oligonucleotide
cacgagggcacgggcaacc

SEQ ID NO: 721185 - RNA, 19 nt, Artificial Sequence
  Description of Artificial Sequence: Synthetic oligonucleotide
ggguauggccacaaucccc

SEQ ID NO: 721186 - RNA, 19 nt, Artificial Sequence
  Description of Artificial Sequence: Synthetic oligonucleotide
uggccaauccugagugcua

SEQ ID NO: 721187 - RNA, 19 nt, Artificial Sequence
  Description of Artificial Sequence: Synthetic oligonucleotide
ccugcaaucgaccccuguc

SEQ ID NO: 721188 - RNA, 19 nt, Artificial Sequence
  Description of Artificial Sequence: Synthetic oligonucleotide
ugugccgcacaggccacga

SEQ ID NO: 721189 - RNA, 19 nt, Artificial Sequence
  Description of Artificial Sequence: Synthetic oligonucleotide
aggccggcauccauggcag

SEQ ID NO: 721190 - RNA, 19 nt, Artificial Sequence
  Description of Artificial Sequence: Synthetic oligonucleotide
ugcccaguuccaggaaaga

SEQ ID NO: 721191 - RNA, 19 nt, Artificial Sequence
  Description of Artificial Sequence: Synthetic oligonucleotide
aggcagucaugcucccugu

SEQ ID NO: 721192 - RNA, 19 nt, Artificial Sequence
  Description of Artificial Sequence: Synthetic oligonucleotide
gguuuggagccagggacgc

SEQ ID NO: 721193 - RNA, 19 nt, Artificial Sequence
  Description of Artificial Sequence: Synthetic oligonucleotide
gcaaucgaccccugucagc

SEQ ID NO: 721194 - RNA, 19 nt, Artificial Sequence
  Description of Artificial Sequence: Synthetic oligonucleotide
ggccuaauuccacuucauc

SEQ ID NO: 721195 - RNA, 19 nt, Artificial Sequence
  Description of Artificial Sequence: Synthetic oligonucleotide
caauccccgucaccagcag

SEQ ID NO: 721196 - RNA, 19 nt, Artificial Sequence
  Description of Artificial Sequence: Synthetic oligonucleotide
cuuaucccaaggguaccca

SEQ ID NO: 721197 - RNA, 19 nt, Artificial Sequence
  Description of Artificial Sequence: Synthetic oligonucleotide
caggccacgacggccugcc

SEQ ID NO: 721198 - RNA, 19 nt, Artificial Sequence
  Description of Artificial Sequence: Synthetic oligonucleotide
uggccacaauccccgucac

SEQ ID NO: 721199 - RNA, 19 nt, Artificial Sequence
  Description of Artificial Sequence: Synthetic oligonucleotide
ggguuacaggccacuaacc

SEQ ID NO: 721200 - RNA, 19 nt, Artificial Sequence
  Description of Artificial Sequence: Synthetic oligonucleotide
gcugaucuagucgugcaga

SEQ ID NO: 721201 - RNA, 19 nt, Artificial Sequence
  Description of Artificial Sequence: Synthetic oligonucleotide
ccgauccaaggcauucagg

SEQ ID NO: 721202 - RNA, 19 nt, Artificial Sequence
  Description of Artificial Sequence: Synthetic oligonucleotide
ggaacaggccauagagcgc

SEQ ID NO: 721203 - RNA, 19 nt, Artificial Sequence
  Description of Artificial Sequence: Synthetic oligonucleotide
ccauagagcgccccagaug

SEQ ID NO: 721204 - RNA, 19 nt, Artificial Sequence
  Description of Artificial Sequence: Synthetic oligonucleotide
gcacacucgcuccagcaca

SEQ ID NO: 721205 - RNA, 19 nt, Artificial Sequence
  Description of Artificial Sequence: Synthetic oligonucleotide
aggucagaacguagggcca

SEQ ID NO: 721206 - RNA, 19 nt, Artificial Sequence
  Description of Artificial Sequence: Synthetic oligonucleotide
aaaccggcaugggcaggcu

SEQ ID NO: 721207 - RNA, 19 nt, Artificial Sequence
  Description of Artificial Sequence: Synthetic oligonucleotide
cguagggccacacggugcc

SEQ ID NO: 721208 - RNA, 19 nt, Artificial Sequence
  Description of Artificial Sequence: Synthetic oligonucleotide
ugauccgauuccgcccagu

SEQ ID NO: 721209 - RNA, 19 nt, Artificial Sequence
  Description of Artificial Sequence: Synthetic oligonucleotide
ccuagcuguuggcagggug

SEQ ID NO: 721210 - RNA, 19 nt, Artificial Sequence
  Description of Artificial Sequence: Synthetic oligonucleotide
cgugcagaacugauguaac

SEQ ID NO: 721211 - RNA, 19 nt, Artificial Sequence
  Description of Artificial Sequence: Synthetic oligonucleotide
gguggccaauccugagugc

SEQ ID NO: 721212 - RNA, 19 nt, Artificial Sequence
  Description of Artificial Sequence: Synthetic oligonucleotide
caggccacuaacccagcaa

SEQ ID NO: 721213 - RNA, 19 nt, Artificial Sequence
  Description of Artificial Sequence: Synthetic oligonucleotide
cccggcuauggguauggcc

SEQ ID NO: 721214 - RNA, 19 nt, Artificial Sequence
  Description of Artificial Sequence: Synthetic oligonucleotide
gaacguagggccacacggu

SEQ ID NO: 721215 - RNA, 19 nt, Artificial Sequence
  Description of Artificial Sequence: Synthetic oligonucleotide
ggaggucaugguagggaag

SEQ ID NO: 721216 - RNA, 19 nt, Artificial Sequence
  Description of Artificial Sequence: Synthetic oligonucleotide
cuagucgugcagaacugau

SEQ ID NO: 721217 - RNA, 19 nt, Artificial Sequence
  Description of Artificial Sequence: Synthetic oligonucleotide
ccuucccgauaaaaccggc

SEQ ID NO: 721218 - RNA, 19 nt, Artificial Sequence
  Description of Artificial Sequence: Synthetic oligonucleotide
ugaccucuggaggcucugu

SEQ ID NO: 721219 - RNA, 19 nt, Artificial Sequence
  Description of Artificial Sequence: Synthetic oligonucleotide
gguacccacgagggcacgg

SEQ ID NO: 721220 - RNA, 19 nt, Artificial Sequence
  Description of Artificial Sequence: Synthetic oligonucleotide
gaccacguucacccgauuu

SEQ ID NO: 721221 - RNA, 19 nt, Artificial Sequence
  Description of Artificial Sequence: Synthetic oligonucleotide
ggucaugguagggaagcuc

SEQ ID NO: 721222 - RNA, 19 nt, Artificial Sequence
  Description of Artificial Sequence: Synthetic oligonucleotide
gaugagccucccaucuucu

SEQ ID NO: 721223 - RNA, 19 nt, Artificial Sequence
  Description of Artificial Sequence: Synthetic oligonucleotide
guuaggguuacaggccacu

SEQ ID NO: 721224 - RNA, 19 nt, Artificial Sequence
  Description of Artificial Sequence: Synthetic oligonucleotide
auagagcgccccagaugag

SEQ ID NO: 721225 - RNA, 19 nt, Artificial Sequence
  Description of Artificial Sequence: Synthetic oligonucleotide
gagugcuaccucgucugaa

SEQ ID NO: 721226 - RNA, 19 nt, Artificial Sequence
  Description of Artificial Sequence: Synthetic oligonucleotide
cggauccugcaaucgaccc

SEQ ID NO: 721227 - RNA, 19 nt, Artificial Sequence
  Description of Artificial Sequence: Synthetic oligonucleotide
ggucagaacguagggccac

SEQ ID NO: 721228 - RNA, 19 nt, Artificial Sequence
  Description of Artificial Sequence: Synthetic oligonucleotide
ggccaauccugagugcuac

SEQ ID NO: 721229 - RNA, 19 nt, Artificial Sequence
  Description of Artificial Sequence: Synthetic oligonucleotide
cacacucgcuccagcacaa

SEQ ID NO: 721230 - RNA, 19 nt, Artificial Sequence
  Description of Artificial Sequence: Synthetic oligonucleotide
ggauaagcacugugccgca

SEQ ID NO: 721231 - RNA, 19 nt, Artificial Sequence
  Description of Artificial Sequence: Synthetic oligonucleotide
auccugagugcuaccucgu

SEQ ID NO: 721232 - RNA, 19 nt, Artificial Sequence
  Description of Artificial Sequence: Synthetic oligonucleotide
cgauccaaggcauucaggu

SEQ ID NO: 721233 - RNA, 19 nt, Artificial Sequence
  Description of Artificial Sequence: Synthetic oligonucleotide
auccgcugaacgccagcuu

SEQ ID NO: 721234 - RNA, 19 nt, Artificial Sequence
  Description of Artificial Sequence: Synthetic oligonucleotide
gcgaacacggauccugcaa

SEQ ID NO: 721235 - RNA, 19 nt, Artificial Sequence
  Description of Artificial Sequence: Synthetic oligonucleotide
cugauccgauuccgcccag

SEQ ID NO: 721236 - RNA, 19 nt, Artificial Sequence
  Description of Artificial Sequence: Synthetic oligonucleotide
cgauuugcgaucuccucca

SEQ ID NO: 721237 - RNA, 19 nt, Artificial Sequence
  Description of Artificial Sequence: Synthetic oligonucleotide
ggccacacggugcccuugc

SEQ ID NO: 721238 - RNA, 19 nt, Artificial Sequence
  Description of Artificial Sequence: Synthetic oligonucleotide
agguacccacgagggcacg

SEQ ID NO: 721239 - RNA, 19 nt, Artificial Sequence
  Description of Artificial Sequence: Synthetic oligonucleotide
aggccuaauuccacuucau

SEQ ID NO: 721240 - RNA, 19 nt, Artificial Sequence
  Description of Artificial Sequence: Synthetic oligonucleotide
aggucagucuuggcuuuaa

SEQ ID NO: 721241 - RNA, 19 nt, Artificial Sequence
  Description of Artificial Sequence: Synthetic oligonucleotide
ggcgaccacguucacccga

SEQ ID NO: 721242 - RNA, 19 nt, Artificial Sequence
  Description of Artificial Sequence: Synthetic oligonucleotide
gcagucaugcucccugugu

SEQ ID NO: 721243 - RNA, 19 nt, Artificial Sequence
  Description of Artificial Sequence: Synthetic oligonucleotide
cugugccgcacaggccacg

SEQ ID NO: 721244 - RNA, 19 nt, Artificial Sequence
  Description of Artificial Sequence: Synthetic oligonucleotide
cugcuccuagcuguuggca

SEQ ID NO: 721245 - RNA, 19 nt, Artificial Sequence
  Description of Artificial Sequence: Synthetic oligonucleotide
gucagaacguagggccaca

SEQ ID NO: 721246 - RNA, 19 nt, Artificial Sequence
  Description of Artificial Sequence: Synthetic oligonucleotide
caguaguuucagcaucuau

SEQ ID NO: 721247 - RNA, 19 nt, Artificial Sequence
  Description of Artificial Sequence: Synthetic oligonucleotide
gagggugcccgcugugccu

SEQ ID NO: 721248 - RNA, 19 nt, Artificial Sequence
  Description of Artificial Sequence: Synthetic oligonucleotide
ggacgcuacaggaggacaa

SEQ ID NO: 721249 - RNA, 19 nt, Artificial Sequence
  Description of Artificial Sequence: Synthetic oligonucleotide
uccuagcuguuggcagggu

SEQ ID NO: 721250 - RNA, 19 nt, Artificial Sequence
  Description of Artificial Sequence: Synthetic oligonucleotide
ggauacauuggagguauuu

SEQ ID NO: 721251 - RNA, 19 nt, Artificial Sequence
  Description of Artificial Sequence: Synthetic oligonucleotide
ccagaugagccucccaucu

SEQ ID NO: 721252 - RNA, 19 nt, Artificial Sequence
  Description of Artificial Sequence: Synthetic oligonucleotide
cagcauucccuucccgaua

SEQ ID NO: 721253 - RNA, 19 nt, Artificial Sequence
  Description of Artificial Sequence: Synthetic oligonucleotide
acgagggcacgggcaaccu

SEQ ID NO: 721254 - RNA, 19 nt, Artificial Sequence
  Description of Artificial Sequence: Synthetic oligonucleotide
ggccauagagcgccccaga

SEQ ID NO: 721255 - RNA, 19 nt, Artificial Sequence
  Description of Artificial Sequence: Synthetic oligonucleotide
cauggauccccaggccuaa

SEQ ID NO: 721256 - RNA, 19 nt, Artificial Sequence
  Description of Artificial Sequence: Synthetic oligonucleotide
cagagaccuuggccaugug

SEQ ID NO: 721257 - RNA, 19 nt, Artificial Sequence
  Description of Artificial Sequence: Synthetic oligonucleotide
ccacaagcaucaggguaag

SEQ ID NO: 721258 - RNA, 19 nt, Artificial Sequence
  Description of Artificial Sequence: Synthetic oligonucleotide
guagggccacacggugccc

SEQ ID NO: 721259 - RNA, 19 nt, Artificial Sequence
  Description of Artificial Sequence: Synthetic oligonucleotide
gggacgcuacaggaggaca

SEQ ID NO: 721260 - RNA, 19 nt, Artificial Sequence
  Description of Artificial Sequence: Synthetic oligonucleotide
cuuuggcagcccggcuaug

SEQ ID NO: 721261 - RNA, 19 nt, Artificial Sequence
  Description of Artificial Sequence: Synthetic oligonucleotide
ggugaccaucugaaggcaa

SEQ ID NO: 721262 - RNA, 19 nt, Artificial Sequence
  Description of Artificial Sequence: Synthetic oligonucleotide
gcuauggguauggccacaa

SEQ ID NO: 721263 - RNA, 19 nt, Artificial Sequence
  Description of Artificial Sequence: Synthetic oligonucleotide
cgaauagcagcaucagcua

SEQ ID NO: 721264 - RNA, 19 nt, Artificial Sequence
  Description of Artificial Sequence: Synthetic oligonucleotide
ccugagugcuaccucgucu

SEQ ID NO: 721265 - RNA, 19 nt, Artificial Sequence
  Description of Artificial Sequence: Synthetic oligonucleotide
guauggccacaauccccgu

SEQ ID NO: 721266 - RNA, 19 nt, Artificial Sequence
  Description of Artificial Sequence: Synthetic oligonucleotide
cccgucaccagcagcccga

SEQ ID NO: 721267 - RNA, 19 nt, Artificial Sequence
  Description of Artificial Sequence: Synthetic oligonucleotide
gcuuuggcagcccggcuau

SEQ ID NO: 721268 - RNA, 19 nt, Artificial Sequence
  Description of Artificial Sequence: Synthetic oligonucleotide
caacccggccuuugaggcu

SEQ ID NO: 721269 - RNA, 19 nt, Artificial Sequence
  Description of Artificial Sequence: Synthetic oligonucleotide
cagucaggaacaggccaua

SEQ ID NO: 721270 - RNA, 19 nt, Artificial Sequence
  Description of Artificial Sequence: Synthetic oligonucleotide
ccgcccagucacagagacc

SEQ ID NO: 721271 - RNA, 19 nt, Artificial Sequence
  Description of Artificial Sequence: Synthetic oligonucleotide
gccauagagcgccccagau

SEQ ID NO: 721272 - RNA, 19 nt, Artificial Sequence
  Description of Artificial Sequence: Synthetic oligonucleotide
cucuaauggcugccaggau

SEQ ID NO: 721273 - RNA, 19 nt, Artificial Sequence
  Description of Artificial Sequence: Synthetic oligonucleotide
cccugucagcauucccuuc

SEQ ID NO: 721274 - RNA, 19 nt, Artificial Sequence
  Description of Artificial Sequence: Synthetic oligonucleotide
cgauuccgcccagucacag

SEQ ID NO: 721275 - RNA, 19 nt, Artificial Sequence
  Description of Artificial Sequence: Synthetic oligonucleotide
cggcuauggguauggccac

SEQ ID NO: 721276 - RNA, 19 nt, Artificial Sequence
  Description of Artificial Sequence: Synthetic oligonucleotide
ggcuauggguauggccaca

SEQ ID NO: 721277 - RNA, 19 nt, Artificial Sequence
  Description of Artificial Sequence: Synthetic oligonucleotide
auccugcaaucgaccccug

SEQ ID NO: 721278 - RNA, 19 nt, Artificial Sequence
  Description of Artificial Sequence: Synthetic oligonucleotide
aggccacgacggccugccu

SEQ ID NO: 721279 - RNA, 19 nt, Artificial Sequence
  Description of Artificial Sequence: Synthetic oligonucleotide
cagaugagccucccaucuu

SEQ ID NO: 721280 - RNA, 19 nt, Artificial Sequence
  Description of Artificial Sequence: Synthetic oligonucleotide
cccacgagggcacgggcaa

SEQ ID NO: 721281 - RNA, 19 nt, Artificial Sequence
  Description of Artificial Sequence: Synthetic oligonucleotide
cgcuacaggaggacaagcu

SEQ ID NO: 721282 - RNA, 19 nt, Artificial Sequence
  Description of Artificial Sequence: Synthetic oligonucleotide
ggcuuguuccauggcaaau

SEQ ID NO: 721283 - RNA, 19 nt, Artificial Sequence
  Description of Artificial Sequence: Synthetic oligonucleotide
cacccagauuguugacuau

SEQ ID NO: 721284 - RNA, 19 nt, Artificial Sequence
  Description of Artificial Sequence: Synthetic oligonucleotide
cguucacccgauuugcgau

SEQ ID NO: 721285 - RNA, 19 nt, Artificial Sequence
  Description of Artificial Sequence: Synthetic oligonucleotide
ggccggcauccauggcagc

SEQ ID NO: 721286 - RNA, 19 nt, Artificial Sequence
  Description of Artificial Sequence: Synthetic oligonucleotide
ccgcacaggccacgacggc

SEQ ID NO: 721287 - RNA, 19 nt, Artificial Sequence
  Description of Artificial Sequence: Synthetic oligonucleotide
ccccagaugagccucccau

SEQ ID NO: 721288 - RNA, 19 nt, Artificial Sequence
  Description of Artificial Sequence: Synthetic oligonucleotide
cgaacacggauccugcaau

SEQ ID NO: 721289 - RNA, 19 nt, Artificial Sequence
  Description of Artificial Sequence: Synthetic oligonucleotide
ggcuagggcugggcccucc

SEQ ID NO: 721290 - RNA, 19 nt, Artificial Sequence
  Description of Artificial Sequence: Synthetic oligonucleotide
ccgauuccgcccagucaca

SEQ ID NO: 721291 - RNA, 19 nt, Artificial Sequence
  Description of Artificial Sequence: Synthetic oligonucleotide
gaagugcaacccggccuuu

SEQ ID NO: 721292 - RNA, 19 nt, Artificial Sequence
  Description of Artificial Sequence: Synthetic oligonucleotide
ggccacgacggccugccuu

SEQ ID NO: 721293 - RNA, 19 nt, Artificial Sequence
  Description of Artificial Sequence: Synthetic oligonucleotide
gggugcccgcugugccugc

SEQ ID NO: 721294 - RNA, 19 nt, Artificial Sequence
  Description of Artificial Sequence: Synthetic oligonucleotide
gccccagaugagccuccca

SEQ ID NO: 721295 - RNA, 19 nt, Artificial Sequence
  Description of Artificial Sequence: Synthetic oligonucleotide
uggcuagggcugggcccuc

SEQ ID NO: 721296 - RNA, 19 nt, Artificial Sequence
  Description of Artificial Sequence: Synthetic oligonucleotide
gcagcccgauccaaggcau

SEQ ID NO: 721297 - RNA, 19 nt, Artificial Sequence
  Description of Artificial Sequence: Synthetic oligonucleotide
caugugaggccaggcuguu

SEQ ID NO: 721298 - RNA, 19 nt, Artificial Sequence
  Description of Artificial Sequence: Synthetic oligonucleotide
cgacggccugccuucuuca

SEQ ID NO: 721299 - RNA, 19 nt, Artificial Sequence
  Description of Artificial Sequence: Synthetic oligonucleotide
ccgcugaacgccagcuucu

SEQ ID NO: 721300 - RNA, 19 nt, Artificial Sequence
  Description of Artificial Sequence: Synthetic oligonucleotide
cauccccaauuaccaccau

SEQ ID NO: 721301 - RNA, 19 nt, Artificial Sequence
  Description of Artificial Sequence: Synthetic oligonucleotide
ccacgagggcacgggcaac

SEQ ID NO: 721302 - RNA, 19 nt, Artificial Sequence
  Description of Artificial Sequence: Synthetic oligonucleotide
cgcugaacgccagcuucuc

SEQ ID NO: 721303 - RNA, 19 nt, Artificial Sequence
  Description of Artificial Sequence: Synthetic oligonucleotide
gcccggcuauggguauggc

SEQ ID NO: 721304 - RNA, 19 nt, Artificial Sequence
  Description of Artificial Sequence: Synthetic oligonucleotide
gcgaccacguucacccgau

SEQ ID NO: 721305 - RNA, 19 nt, Artificial Sequence
  Description of Artificial Sequence: Synthetic oligonucleotide
cacgacggccugccuucuu

SEQ ID NO: 721306 - RNA, 19 nt, Artificial Sequence
  Description of Artificial Sequence: Synthetic oligonucleotide
cgucaccagcagcccgauc

SEQ ID NO: 721307 - RNA, 19 nt, Artificial Sequence
  Description of Artificial Sequence: Synthetic oligonucleotide
ccuccaguccgagcagggu

SEQ ID NO: 721308 - RNA, 19 nt, Artificial Sequence
  Description of Artificial Sequence: Synthetic oligonucleotide
ccggcaugggcaggcucau

SEQ ID NO: 721309 - RNA, 19 nt, Artificial Sequence
  Description of Artificial Sequence: Synthetic oligonucleotide
cacuggcuccugggcucuu

SEQ ID NO: 721310 - RNA, 19 nt, Artificial Sequence
  Description of Artificial Sequence: Synthetic oligonucleotide
ccacgacggccugccuucu

SEQ ID NO: 721311 - RNA, 19 nt, Artificial Sequence
  Description of Artificial Sequence: Synthetic oligonucleotide
ccgucaccagcagcccgau

SEQ ID NO: 721312 - RNA, 19 nt, Artificial Sequence
  Description of Artificial Sequence: Synthetic oligonucleotide
cgaccacguucacccgauu

SEQ ID NO: 721313 - RNA, 19 nt, Artificial Sequence
  Description of Artificial Sequence: Synthetic oligonucleotide
aaacauaguagccugacuc

SEQ ID NO: 721314 - RNA, 19 nt, Artificial Sequence
  Description of Artificial Sequence: Synthetic oligonucleotide
aauuauucauccuugcaag

SEQ ID NO: 721315 - RNA, 19 nt, Artificial Sequence
  Description of Artificial Sequence: Synthetic oligonucleotide
uaaguaauaaaauucgaca

SEQ ID NO: 721316 - RNA, 19 nt, Artificial Sequence
  Description of Artificial Sequence: Synthetic oligonucleotide
agagcaaucauguacugcg

SEQ ID NO: 721317 - RNA, 19 nt, Artificial Sequence
  Description of Artificial Sequence: Synthetic oligonucleotide
gaagagaucccuuucauug

SEQ ID NO: 721318 - RNA, 19 nt, Artificial Sequence
  Description of Artificial Sequence: Synthetic oligonucleotide
ucugucuuagccuuggagg

SEQ ID NO: 721319 - RNA, 19 nt, Artificial Sequence
  Description of Artificial Sequence: Synthetic oligonucleotide
gacauauuaaaucuuagca

SEQ ID NO: 721320 - RNA, 19 nt, Artificial Sequence
  Description of Artificial Sequence: Synthetic oligonucleotide
aaauugggagcuccaaccc

SEQ ID NO: 721321 - RNA, 19 nt, Artificial Sequence
  Description of Artificial Sequence: Synthetic oligonucleotide
uuuuacucaaauaucauua

SEQ ID NO: 721322 - RNA, 19 nt, Artificial Sequence
  Description of Artificial Sequence: Synthetic oligonucleotide
agaauuaaucuucucagag

SEQ ID NO: 721323 - RNA, 19 nt, Artificial Sequence
  Description of Artificial Sequence: Synthetic oligonucleotide
  modified_base (7)..(7): a, c, u, g, unknown or other
aaugganacggcuggcuuc

SEQ ID NO: 721324 - RNA, 19 nt, Artificial Sequence
  Description of Artificial Sequence: Synthetic oligonucleotide
auaugguugaguuugaagu

SEQ ID NO: 721325 - RNA, 19 nt, Artificial Sequence
  Description of Artificial Sequence: Synthetic oligonucleotide
auuacauacuuacugguag

SEQ ID NO: 721326 - RNA, 19 nt, Artificial Sequence
  Description of Artificial Sequence: Synthetic oligonucleotide
agauugauuauucucuuuc

SEQ ID NO: 721327 - RNA, 19 nt, Artificial Sequence
  Description of Artificial Sequence: Synthetic oligonucleotide
aacccaguuaucuuagcac

SEQ ID NO: 721328 - RNA, 19 nt, Artificial Sequence
  Description of Artificial Sequence: Synthetic oligonucleotide
ugucauuugaaacuaauua

SEQ ID NO: 721329 - RNA, 19 nt, Artificial Sequence
  Description of Artificial Sequence: Synthetic oligonucleotide
gauagagucugucuuagcc

SEQ ID NO: 721330 - RNA, 19 nt, Artificial Sequence
  Description of Artificial Sequence: Synthetic oligonucleotide
uccauuacauacuuacugg

SEQ ID NO: 721331 - RNA, 19 nt, Artificial Sequence
  Description of Artificial Sequence: Synthetic oligonucleotide
uaauuauucauccuugcaa

SEQ ID NO: 721332 - RNA, 19 nt, Artificial Sequence
  Description of Artificial Sequence: Synthetic oligonucleotide
auaaguaauaaaauucgac

SEQ ID NO: 721333 - RNA, 19 nt, Artificial Sequence
  Description of Artificial Sequence: Synthetic oligonucleotide
uguauaucugcaauggaga

SEQ ID NO: 721334 - RNA, 19 nt, Artificial Sequence
  Description of Artificial Sequence: Synthetic oligonucleotide
uauuucucgcuccaggcgg

SEQ ID NO: 721335 - RNA, 19 nt, Artificial Sequence
  Description of Artificial Sequence: Synthetic oligonucleotide
cucuuuacgaccuggauac

SEQ ID NO: 721336 - RNA, 19 nt, Artificial Sequence
  Description of Artificial Sequence: Synthetic oligonucleotide
auuuuccaccauuagguac

SEQ ID NO: 721337 - RNA, 19 nt, Artificial Sequence
  Description of Artificial Sequence: Synthetic oligonucleotide
aagauuaauaaaauugccu

SEQ ID NO: 721338 - RNA, 19 nt, Artificial Sequence
  Description of Artificial Sequence: Synthetic oligonucleotide
guagauaugguugaguuug

SEQ ID NO: 721339 - RNA, 19 nt, Artificial Sequence
  Description of Artificial Sequence: Synthetic oligonucleotide
guaaccauggaaaagagca

SEQ ID NO: 721340 - RNA, 19 nt, Artificial Sequence
  Description of Artificial Sequence: Synthetic oligonucleotide
caaauugggagcuccaacc

SEQ ID NO: 721341 - RNA, 19 nt, Artificial Sequence
  Description of Artificial Sequence: Synthetic oligonucleotide
uucccuacuaaccaccucc

SEQ ID NO: 721342 - RNA, 19 nt, Artificial Sequence
  Description of Artificial Sequence: Synthetic oligonucleotide
acauauuaaaucuuagcau

SEQ ID NO: 721343 - RNA, 19 nt, Artificial Sequence
  Description of Artificial Sequence: Synthetic oligonucleotide
gauaugguugaguuugaag

SEQ ID NO: 721344 - RNA, 19 nt, Artificial Sequence
  Description of Artificial Sequence: Synthetic oligonucleotide
  modified_base (3)..(3): a, c, u, g, unknown or other
agnacccugagcucagugc

SEQ ID NO: 721345 - RNA, 19 nt, Artificial Sequence
  Description of Artificial Sequence: Synthetic oligonucleotide
uuauuggaaagugaggcgc

SEQ ID NO: 721346 - RNA, 19 nt, Artificial Sequence
  Description of Artificial Sequence: Synthetic oligonucleotide
acgcauacucuuuacgacc

SEQ ID NO: 721347 - RNA, 19 nt, Artificial Sequence
  Description of Artificial Sequence: Synthetic oligonucleotide
accauuagguacaugacac

SEQ ID NO: 721348 - RNA, 19 nt, Artificial Sequence
  Description of Artificial Sequence: Synthetic oligonucleotide
uuaauaaaauugccugaug

SEQ ID NO: 721349 - RNA, 19 nt, Artificial Sequence
  Description of Artificial Sequence: Synthetic oligonucleotide
aaucuuagcauauguccgu

SEQ ID NO: 721350 - RNA, 19 nt, Artificial Sequence
  Description of Artificial Sequence: Synthetic oligonucleotide
auuauucauccuugcaagg

SEQ ID NO: 721351 - RNA, 19 nt, Artificial Sequence
  Description of Artificial Sequence: Synthetic oligonucleotide
uugccuucgagaaccacgg

SEQ ID NO: 721352 - RNA, 19 nt, Artificial Sequence
  Description of Artificial Sequence: Synthetic oligonucleotide
ucuaguaggucuaacucuc

SEQ ID NO: 721353 - RNA, 19 nt, Artificial Sequence
  Description of Artificial Sequence: Synthetic oligonucleotide
cacgguuugauaaacuuug

SEQ ID NO: 721354 - RNA, 19 nt, Artificial Sequence
  Description of Artificial Sequence: Synthetic oligonucleotide
uagaggauuucacauggug

SEQ ID NO: 721355 - RNA, 19 nt, Artificial Sequence
  Description of Artificial Sequence: Synthetic oligonucleotide
ugcuaggauauugauagag

SEQ ID NO: 721356 - RNA, 19 nt, Artificial Sequence
  Description of Artificial Sequence: Synthetic oligonucleotide
aucuguauaucugcaaugg

SEQ ID NO: 721357 - RNA, 19 nt, Artificial Sequence
  Description of Artificial Sequence: Synthetic oligonucleotide
ucgacauauuaaaucuuag

SEQ ID NO: 721358 - RNA, 19 nt, Artificial Sequence
  Description of Artificial Sequence: Synthetic oligonucleotide
aaaauugccugaugcuaug

SEQ ID NO: 721359 - RNA, 19 nt, Artificial Sequence
  Description of Artificial Sequence: Synthetic oligonucleotide
aaauugccugaugcuaugc

SEQ ID NO: 721360 - RNA, 19 nt, Artificial Sequence
  Description of Artificial Sequence: Synthetic oligonucleotide
ucaguaaacugcuuggaau

SEQ ID NO: 721361 - RNA, 19 nt, Artificial Sequence
  Description of Artificial Sequence: Synthetic oligonucleotide
ugaguuugaaguguuugag

SEQ ID NO: 721362 - RNA, 19 nt, Artificial Sequence
  Description of Artificial Sequence: Synthetic oligonucleotide
augaggauugcugucacgg

SEQ ID NO: 721363 - RNA, 19 nt, Artificial Sequence
  Description of Artificial Sequence: Synthetic oligonucleotide
uauugagaauuaaucuucu

SEQ ID NO: 721364 - RNA, 19 nt, Artificial Sequence
  Description of Artificial Sequence: Synthetic oligonucleotide
auugauuauucucuuuccu

SEQ ID NO: 721365 - RNA, 19 nt, Artificial Sequence
  Description of Artificial Sequence: Synthetic oligonucleotide
auguccgugccucugaaag

SEQ ID NO: 721366 - RNA, 19 nt, Artificial Sequence
  Description of Artificial Sequence: Synthetic oligonucleotide
caaggguaaacauaaccac

SEQ ID NO: 721367 - RNA, 19 nt, Artificial Sequence
  Description of Artificial Sequence: Synthetic oligonucleotide
uuugguaaccauggaaaag

SEQ ID NO: 721368 - RNA, 19 nt, Artificial Sequence
  Description of Artificial Sequence: Synthetic oligonucleotide
ugaucuguauaucugcaau

SEQ ID NO: 721369 - RNA, 19 nt, Artificial Sequence
  Description of Artificial Sequence: Synthetic oligonucleotide
ugcaagguuaguuucucca

SEQ ID NO: 721370 - RNA, 19 nt, Artificial Sequence
  Description of Artificial Sequence: Synthetic oligonucleotide
aaugaggauugcugucacg

SEQ ID NO: 721371 - RNA, 19 nt, Artificial Sequence
  Description of Artificial Sequence: Synthetic oligonucleotide
aaucuucucagaguuauaa

SEQ ID NO: 721372 - RNA, 19 nt, Artificial Sequence
  Description of Artificial Sequence: Synthetic oligonucleotide
auauugauagagucugucu

SEQ ID NO: 721373 - RNA, 19 nt, Artificial Sequence
  Description of Artificial Sequence: Synthetic oligonucleotide
cuuagcauauguccgugcc

SEQ ID NO: 721374 - RNA, 19 nt, Artificial Sequence
  Description of Artificial Sequence: Synthetic oligonucleotide
uuuacgaccuggauacugu

SEQ ID NO: 721375 - RNA, 19 nt, Artificial Sequence
  Description of Artificial Sequence: Synthetic oligonucleotide
uucgacauauuaaaucuua

SEQ ID NO: 721376 - RNA, 19 nt, Artificial Sequence
  Description of Artificial Sequence: Synthetic oligonucleotide
uccuuauacaacugaauau

SEQ ID NO: 721377 - RNA, 19 nt, Artificial Sequence
  Description of Artificial Sequence: Synthetic oligonucleotide
auugagaauuaaucuucuc

SEQ ID NO: 721378 - RNA, 19 nt, Artificial Sequence
  Description of Artificial Sequence: Synthetic oligonucleotide
aaucuuaagcagagcaauc

SEQ ID NO: 721379 - RNA, 19 nt, Artificial Sequence
  Description of Artificial Sequence: Synthetic oligonucleotide
uuaaaguagauugauuauu

SEQ ID NO: 721380 - RNA, 19 nt, Artificial Sequence
  Description of Artificial Sequence: Synthetic oligonucleotide
uauuggaaagugaggcgcc

SEQ ID NO: 721381 - RNA, 19 nt, Artificial Sequence
  Description of Artificial Sequence: Synthetic oligonucleotide
caauagcagaaaaccagcc

SEQ ID NO: 721382 - RNA, 19 nt, Artificial Sequence
  Description of Artificial Sequence: Synthetic oligonucleotide
uccuggauaauuaucuuuu

SEQ ID NO: 721383 - RNA, 19 nt, Artificial Sequence
  Description of Artificial Sequence: Synthetic oligonucleotide
ugcuaugcucaguaaacug

SEQ ID NO: 721384 - RNA, 19 nt, Artificial Sequence
  Description of Artificial Sequence: Synthetic oligonucleotide
aguucggaaggucucucgg

SEQ ID NO: 721385 - RNA, 19 nt, Artificial Sequence
  Description of Artificial Sequence: Synthetic oligonucleotide
guauugagaauuaaucuuc

SEQ ID NO: 721386 - RNA, 19 nt, Artificial Sequence
  Description of Artificial Sequence: Synthetic oligonucleotide
aagagaucccuuucauugu

SEQ ID NO: 721387 - RNA, 19 nt, Artificial Sequence
  Description of Artificial Sequence: Synthetic oligonucleotide
ugccaauagcagaaaacca

SEQ ID NO: 721388 - RNA, 19 nt, Artificial Sequence
  Description of Artificial Sequence: Synthetic oligonucleotide
uuacauacuuacugguaga

SEQ ID NO: 721389 - RNA, 19 nt, Artificial Sequence
  Description of Artificial Sequence: Synthetic oligonucleotide
ggaccagugaagcacaucc

SEQ ID NO: 721390 - RNA, 19 nt, Artificial Sequence
  Description of Artificial Sequence: Synthetic oligonucleotide
uggaaagugaggcgccagg

SEQ ID NO: 721391 - RNA, 19 nt, Artificial Sequence
  Description of Artificial Sequence: Synthetic oligonucleotide
uuuagcgucuucacacucu

SEQ ID NO: 721392 - RNA, 19 nt, Artificial Sequence
  Description of Artificial Sequence: Synthetic oligonucleotide
uguuucugguaccaccucu

SEQ ID NO: 721393 - RNA, 19 nt, Artificial Sequence
  Description of Artificial Sequence: Synthetic oligonucleotide
uuauucauccuugcaaggu

SEQ ID NO: 721394 - RNA, 19 nt, Artificial Sequence
  Description of Artificial Sequence: Synthetic oligonucleotide
uauggguggaaaagcugag

SEQ ID NO: 721395 - RNA, 19 nt, Artificial Sequence
  Description of Artificial Sequence: Synthetic oligonucleotide
ucuguauaucugcaaugga

SEQ ID NO: 721396 - RNA, 19 nt, Artificial Sequence
  Description of Artificial Sequence: Synthetic oligonucleotide
ugcugucacgguuugauaa

SEQ ID NO: 721397 - RNA, 19 nt, Artificial Sequence
  Description of Artificial Sequence: Synthetic oligonucleotide
ugguaaccauggaaaagag

SEQ ID NO: 721398 - RNA, 19 nt, Artificial Sequence
  Description of Artificial Sequence: Synthetic oligonucleotide
uaaaacauaguagccugac

SEQ ID NO: 721399 - RNA, 19 nt, Artificial Sequence
  Description of Artificial Sequence: Synthetic oligonucleotide
aaggcuacucggucaguag

SEQ ID NO: 721400 - RNA, 19 nt, Artificial Sequence
  Description of Artificial Sequence: Synthetic oligonucleotide
uugauagagucugucuuag

SEQ ID NO: 721401 - RNA, 19 nt, Artificial Sequence
  Description of Artificial Sequence: Synthetic oligonucleotide
  modified_base (6)..(6): a, c, u, g, unknown or other
augganacggcuggcuucc

SEQ ID NO: 721402 - RNA, 19 nt, Artificial Sequence
  Description of Artificial Sequence: Synthetic oligonucleotide
agcacgcauacucuuuacg

SEQ ID NO: 721403 - RNA, 19 nt, Artificial Sequence
  Description of Artificial Sequence: Synthetic oligonucleotide
ugcucuaguaggucuaacu

SEQ ID NO: 721404 - RNA, 19 nt, Artificial Sequence
  Description of Artificial Sequence: Synthetic oligonucleotide
aguguuugagaaguagaag

SEQ ID NO: 721405 - RNA, 19 nt, Artificial Sequence
  Description of Artificial Sequence: Synthetic oligonucleotide
ucucagaguuauaaguaau

SEQ ID NO: 721406 - RNA, 19 nt, Artificial Sequence
  Description of Artificial Sequence: Synthetic oligonucleotide
aguuaugggcaucucuuca

SEQ ID NO: 721407 - RNA, 19 nt, Artificial Sequence
  Description of Artificial Sequence: Synthetic oligonucleotide
agguaauccaaccaaggua

SEQ ID NO: 721408 - RNA, 19 nt, Artificial Sequence
  Description of Artificial Sequence: Synthetic oligonucleotide
aucuucucagaguuauaag

SEQ ID NO: 721409 - RNA, 19 nt, Artificial Sequence
  Description of Artificial Sequence: Synthetic oligonucleotide
ucggucaguagagagaggu

SEQ ID NO: 721410 - RNA, 19 nt, Artificial Sequence
  Description of Artificial Sequence: Synthetic oligonucleotide
gagaauuaaucuucucaga

SEQ ID NO: 721411 - RNA, 19 nt, Artificial Sequence
  Description of Artificial Sequence: Synthetic oligonucleotide
gaugggucgagguaaucca

SEQ ID NO: 721412 - RNA, 19 nt, Artificial Sequence
  Description of Artificial Sequence: Synthetic oligonucleotide
uccaucuguauugagaauu

SEQ ID NO: 721413 - RNA, 19 nt, Artificial Sequence
  Description of Artificial Sequence: Synthetic oligonucleotide
acucggucaguagagagag

SEQ ID NO: 721414 - RNA, 19 nt, Artificial Sequence
  Description of Artificial Sequence: Synthetic oligonucleotide
  modified_base (2)..(2): a, c, u, g, unknown or other
anacggcuggcuuccgaag

SEQ ID NO: 721415 - RNA, 19 nt, Artificial Sequence
  Description of Artificial Sequence: Synthetic oligonucleotide
aucccuuucauuguagaug

SEQ ID NO: 721416 - RNA, 19 nt, Artificial Sequence
  Description of Artificial Sequence: Synthetic oligonucleotide
  modified_base (10)..(10): a, c, u, g, unknown or other
agcaaugganacggcuggc

SEQ ID NO: 721417 - RNA, 19 nt, Artificial Sequence
  Description of Artificial Sequence: Synthetic oligonucleotide
uuagcauauguccgugccu

SEQ ID NO: 721418 - RNA, 19 nt, Artificial Sequence
  Description of Artificial Sequence: Synthetic oligonucleotide
uauucauccuugcaagguu

SEQ ID NO: 721419 - RNA, 19 nt, Artificial Sequence
  Description of Artificial Sequence: Synthetic oligonucleotide
gucuguucacaucaaugcc

SEQ ID NO: 721420 - RNA, 19 nt, Artificial Sequence
  Description of Artificial Sequence: Synthetic oligonucleotide
aggagucuauuucucgcuc

SEQ ID NO: 721421 - RNA, 19 nt, Artificial Sequence
  Description of Artificial Sequence: Synthetic oligonucleotide
accagagguauccugcucu

SEQ ID NO: 721422 - RNA, 19 nt, Artificial Sequence
  Description of Artificial Sequence: Synthetic oligonucleotide
gaauuaaucuucucagagu

SEQ ID NO: 721423 - RNA, 19 nt, Artificial Sequence
  Description of Artificial Sequence: Synthetic oligonucleotide
acucuuuacgaccuggaua

SEQ ID NO: 721424 - RNA, 19 nt, Artificial Sequence
  Description of Artificial Sequence: Synthetic oligonucleotide
uacucggucaguagagaga

SEQ ID NO: 721425 - RNA, 19 nt, Artificial Sequence
  Description of Artificial Sequence: Synthetic oligonucleotide
uaguaggucuaacucucca

SEQ ID NO: 721426 - RNA, 19 nt, Artificial Sequence
  Description of Artificial Sequence: Synthetic oligonucleotide
agauacagaacagcccggg

SEQ ID NO: 721427 - RNA, 19 nt, Artificial Sequence
  Description of Artificial Sequence: Synthetic oligonucleotide
cuacucggucaguagagag

SEQ ID NO: 721428 - RNA, 19 nt, Artificial Sequence
  Description of Artificial Sequence: Synthetic oligonucleotide
acugcggaaggcuguacag

SEQ ID NO: 721429 - RNA, 19 nt, Artificial Sequence
  Description of Artificial Sequence: Synthetic oligonucleotide
gaaccuucuuuauuggaaa

SEQ ID NO: 721430 - RNA, 19 nt, Artificial Sequence
  Description of Artificial Sequence: Synthetic oligonucleotide
acgaccuggauacuguccu

SEQ ID NO: 721431 - RNA, 19 nt, Artificial Sequence
  Description of Artificial Sequence: Synthetic oligonucleotide
caggcggauauuuuccacc

SEQ ID NO: 721432 - RNA, 19 nt, Artificial Sequence
  Description of Artificial Sequence: Synthetic oligonucleotide
gaguguaagaaggugggga

SEQ ID NO: 721433 - RNA, 19 nt, Artificial Sequence
  Description of Artificial Sequence: Synthetic oligonucleotide
caaucauguacugcggaag

SEQ ID NO: 721434 - RNA, 19 nt, Artificial Sequence
  Description of Artificial Sequence: Synthetic oligonucleotide
cacgcauacucuuuacgac

SEQ ID NO: 721435 - RNA, 19 nt, Artificial Sequence
  Description of Artificial Sequence: Synthetic oligonucleotide
guaggucuaacucuccauc

SEQ ID NO: 721436 - RNA, 19 nt, Artificial Sequence
  Description of Artificial Sequence: Synthetic oligonucleotide
ggaguugccuucgagaacc

SEQ ID NO: 721437 - RNA, 19 nt, Artificial Sequence
  Description of Artificial Sequence: Synthetic oligonucleotide
ucuuagcauauguccgugc

SEQ ID NO: 721438 - RNA, 19 nt, Artificial Sequence
  Description of Artificial Sequence: Synthetic oligonucleotide
ccuuauacaacugaauaug

SEQ ID NO: 721439 - RNA, 19 nt, Artificial Sequence
  Description of Artificial Sequence: Synthetic oligonucleotide
ucacgguuugauaaacuuu

SEQ ID NO: 721440 - RNA, 19 nt, Artificial Sequence
  Description of Artificial Sequence: Synthetic oligonucleotide
  modified_base (9)..(9): a, c, u, g, unknown or other
cucagcagnacccugagcu

SEQ ID NO: 721441 - RNA, 19 nt, Artificial Sequence
  Description of Artificial Sequence: Synthetic oligonucleotide
ucgagaguguaagaaggug

SEQ ID NO: 721442 - RNA, 19 nt, Artificial Sequence
  Description of Artificial Sequence: Synthetic oligonucleotide
uugaucuguauaucugcaa

SEQ ID NO: 721443 - RNA, 19 nt, Artificial Sequence
  Description of Artificial Sequence: Synthetic oligonucleotide
cuagcugccaauagcagaa

SEQ ID NO: 721444 - RNA, 19 nt, Artificial Sequence
  Description of Artificial Sequence: Synthetic oligonucleotide
gccaauagcagaaaaccag

SEQ ID NO: 721445 - RNA, 19 nt, Artificial Sequence
  Description of Artificial Sequence: Synthetic oligonucleotide
uugcacuugaguccugaaa

SEQ ID NO: 721446 - RNA, 19 nt, Artificial Sequence
  Description of Artificial Sequence: Synthetic oligonucleotide
uacugcggaaggcuguaca

SEQ ID NO: 721447 - RNA, 19 nt, Artificial Sequence
  Description of Artificial Sequence: Synthetic oligonucleotide
ucgagaaccacggcggccc

SEQ ID NO: 721448 - RNA, 19 nt, Artificial Sequence
  Description of Artificial Sequence: Synthetic oligonucleotide
ugucacgguuugauaaacu

SEQ ID NO: 721449 - RNA, 19 nt, Artificial Sequence
  Description of Artificial Sequence: Synthetic oligonucleotide
aagcagaaccuucuuuauu

SEQ ID NO: 721450 - RNA, 19 nt, Artificial Sequence
  Description of Artificial Sequence: Synthetic oligonucleotide
cuuuacgaccuggauacug

SEQ ID NO: 721451 - RNA, 19 nt, Artificial Sequence
  Description of Artificial Sequence: Synthetic oligonucleotide
caguagaaucuuaagcaga

SEQ ID NO: 721452 - RNA, 19 nt, Artificial Sequence
  Description of Artificial Sequence: Synthetic oligonucleotide
agaucccuuucauuguaga

SEQ ID NO: 721453 - RNA, 19 nt, Artificial Sequence
  Description of Artificial Sequence: Synthetic oligonucleotide
uagcauauguccgugccuc

SEQ ID NO: 721454 - RNA, 19 nt, Artificial Sequence
  Description of Artificial Sequence: Synthetic oligonucleotide
cuaguaggucuaacucucc

SEQ ID NO: 721455 - RNA, 19 nt, Artificial Sequence
  Description of Artificial Sequence: Synthetic oligonucleotide
guaaacugcuuggaaugag

SEQ ID NO: 721456 - RNA, 19 nt, Artificial Sequence
  Description of Artificial Sequence: Synthetic oligonucleotide
cagaagucccaucacauaa

SEQ ID NO: 721457 - RNA, 19 nt, Artificial Sequence
  Description of Artificial Sequence: Synthetic oligonucleotide
ggaaaggcuacucggucag

SEQ ID NO: 721458 - RNA, 19 nt, Artificial Sequence
  Description of Artificial Sequence: Synthetic oligonucleotide
gccuucgagaaccacggcg

SEQ ID NO: 721459 - RNA, 19 nt, Artificial Sequence
  Description of Artificial Sequence: Synthetic oligonucleotide
gacgucugcuaggauauug

SEQ ID NO: 721460 - RNA, 19 nt, Artificial Sequence
  Description of Artificial Sequence: Synthetic oligonucleotide
cagcaaguuguagaggaag

SEQ ID NO: 721461 - RNA, 19 nt, Artificial Sequence
  Description of Artificial Sequence: Synthetic oligonucleotide
aacucugcgcgcuucugua

SEQ ID NO: 721462 - RNA, 19 nt, Artificial Sequence
  Description of Artificial Sequence: Synthetic oligonucleotide
ugauagagucugucuuagc

SEQ ID NO: 721463 - RNA, 19 nt, Artificial Sequence
  Description of Artificial Sequence: Synthetic oligonucleotide
uguccgugccucugaaagc

SEQ ID NO: 721464 - RNA, 19 nt, Artificial Sequence
  Description of Artificial Sequence: Synthetic oligonucleotide
uagauaugguugaguuuga

SEQ ID NO: 721465 - RNA, 19 nt, Artificial Sequence
  Description of Artificial Sequence: Synthetic oligonucleotide
aggcggauauuuuccacca

SEQ ID NO: 721466 - RNA, 19 nt, Artificial Sequence
  Description of Artificial Sequence: Synthetic oligonucleotide
augguugaguuugaagugu

SEQ ID NO: 721467 - RNA, 19 nt, Artificial Sequence
  Description of Artificial Sequence: Synthetic oligonucleotide
aguaaacugcuuggaauga

SEQ ID NO: 721468 - RNA, 19 nt, Artificial Sequence
  Description of Artificial Sequence: Synthetic oligonucleotide
  modified_base (3)..(3): a, c, u, g, unknown or other
ganacggcuggcuuccgaa

SEQ ID NO: 721469 - RNA, 19 nt, Artificial Sequence
  Description of Artificial Sequence: Synthetic oligonucleotide
ugaugucauuugaaacuaa

SEQ ID NO: 721470 - RNA, 19 nt, Artificial Sequence
  Description of Artificial Sequence: Synthetic oligonucleotide
gucgagguaauccaaccaa

SEQ ID NO: 721471 - RNA, 19 nt, Artificial Sequence
  Description of Artificial Sequence: Synthetic oligonucleotide
gaaucuuaagcagagcaau

SEQ ID NO: 721472 - RNA, 19 nt, Artificial Sequence
  Description of Artificial Sequence: Synthetic oligonucleotide
uugcaagguuaguuucucc

SEQ ID NO: 721473 - RNA, 19 nt, Artificial Sequence
  Description of Artificial Sequence: Synthetic oligonucleotide
gagguaauccaaccaaggu

SEQ ID NO: 721474 - RNA, 19 nt, Artificial Sequence
  Description of Artificial Sequence: Synthetic oligonucleotide
  modified_base (2)..(2): a, c, u, g, unknown or other
gnacccugagcucagugcu

SEQ ID NO: 721475 - RNA, 19 nt, Artificial Sequence
  Description of Artificial Sequence: Synthetic oligonucleotide
gauuuccauguggaguagc

SEQ ID NO: 721476 - RNA, 19 nt, Artificial Sequence
  Description of Artificial Sequence: Synthetic oligonucleotide
guuaguuucuccaucugua

SEQ ID NO: 721477 - RNA, 19 nt, Artificial Sequence
  Description of Artificial Sequence: Synthetic oligonucleotide
agaaucuuaagcagagcaa

SEQ ID NO: 721478 - RNA, 19 nt, Artificial Sequence
  Description of Artificial Sequence: Synthetic oligonucleotide
acggcuggcuuccgaaggg

SEQ ID NO: 721479 - RNA, 19 nt, Artificial Sequence
  Description of Artificial Sequence: Synthetic oligonucleotide
acgaucgagaguguaagaa

SEQ ID NO: 721480 - RNA, 19 nt, Artificial Sequence
  Description of Artificial Sequence: Synthetic oligonucleotide
caccauuagguacaugaca

SEQ ID NO: 721481 - RNA, 19 nt, Artificial Sequence
  Description of Artificial Sequence: Synthetic oligonucleotide
uagauugauuauucucuuu

SEQ ID NO: 721482 - RNA, 19 nt, Artificial Sequence
  Description of Artificial Sequence: Synthetic oligonucleotide
uccuuagugucuugcacuu

SEQ ID NO: 721483 - RNA, 19 nt, Artificial Sequence
  Description of Artificial Sequence: Synthetic oligonucleotide
ucccuacuaaccaccucca

SEQ ID NO: 721484 - RNA, 19 nt, Artificial Sequence
  Description of Artificial Sequence: Synthetic oligonucleotide
cuugggcuagauacagaac

SEQ ID NO: 721485 - RNA, 19 nt, Artificial Sequence
  Description of Artificial Sequence: Synthetic oligonucleotide
cuuuagcgucuucacacuc

SEQ ID NO: 721486 - RNA, 19 nt, Artificial Sequence
  Description of Artificial Sequence: Synthetic oligonucleotide
acaguuaugggcaucucuu

SEQ ID NO: 721487 - RNA, 19 nt, Artificial Sequence
  Description of Artificial Sequence: Synthetic oligonucleotide
guuguaucuggaccaguga

SEQ ID NO: 721488 - RNA, 19 nt, Artificial Sequence
  Description of Artificial Sequence: Synthetic oligonucleotide
caguucggaaggucucucg

SEQ ID NO: 721489 - RNA, 19 nt, Artificial Sequence
  Description of Artificial Sequence: Synthetic oligonucleotide
cucagaguuauaaguaaua

SEQ ID NO: 721490 - RNA, 19 nt, Artificial Sequence
  Description of Artificial Sequence: Synthetic oligonucleotide
uguugucgauuuccaugug

SEQ ID NO: 721491 - RNA, 19 nt, Artificial Sequence
  Description of Artificial Sequence: Synthetic oligonucleotide
accuucuuuauuggaaagu

SEQ ID NO: 721492 - RNA, 19 nt, Artificial Sequence
  Description of Artificial Sequence: Synthetic oligonucleotide
cauuacauacuuacuggua

SEQ ID NO: 721493 - RNA, 19 nt, Artificial Sequence
  Description of Artificial Sequence: Synthetic oligonucleotide
  modified_base (8)..(8): a, c, u, g, unknown or other
ucagcagnacccugagcuc

SEQ ID NO: 721494 - RNA, 19 nt, Artificial Sequence
  Description of Artificial Sequence: Synthetic oligonucleotide
uccauccaaggcucguucu

SEQ ID NO: 721495 - RNA, 19 nt, Artificial Sequence
  Description of Artificial Sequence: Synthetic oligonucleotide
agagaucccuuucauugua

SEQ ID NO: 721496 - RNA, 19 nt, Artificial Sequence
  Description of Artificial Sequence: Synthetic oligonucleotide
gagaucccuuucauuguag

SEQ ID NO: 721497 - RNA, 19 nt, Artificial Sequence
  Description of Artificial Sequence: Synthetic oligonucleotide
cauuauggguggaaaagcu

SEQ ID NO: 721498 - RNA, 19 nt, Artificial Sequence
  Description of Artificial Sequence: Synthetic oligonucleotide
aagccguuguucccuacua

SEQ ID NO: 721499 - RNA, 19 nt, Artificial Sequence
  Description of Artificial Sequence: Synthetic oligonucleotide
gaacuuauuucugcucauc

SEQ ID NO: 721500 - RNA, 19 nt, Artificial Sequence
  Description of Artificial Sequence: Synthetic oligonucleotide
uagguacaugacacucagc

SEQ ID NO: 721501 - RNA, 19 nt, Artificial Sequence
  Description of Artificial Sequence: Synthetic oligonucleotide
gcucuaguaggucuaacuc

SEQ ID NO: 721502 - RNA, 19 nt, Artificial Sequence
  Description of Artificial Sequence: Synthetic oligonucleotide
caacccaguuaucuuagca

SEQ ID NO: 721503 - RNA, 19 nt, Artificial Sequence
  Description of Artificial Sequence: Synthetic oligonucleotide
gaaggcuguacagcaugcc

SEQ ID NO: 721504 - RNA, 19 nt, Artificial Sequence
  Description of Artificial Sequence: Synthetic oligonucleotide
caaaagugccuugggcuag

SEQ ID NO: 721505 - RNA, 19 nt, Artificial Sequence
  Description of Artificial Sequence: Synthetic oligonucleotide
gugaggaguugccuucgag

SEQ ID NO: 721506 - RNA, 19 nt, Artificial Sequence
  Description of Artificial Sequence: Synthetic oligonucleotide
ugguugaguuugaaguguu

SEQ ID NO: 721507 - RNA, 19 nt, Artificial Sequence
  Description of Artificial Sequence: Synthetic oligonucleotide
cuugcaagguuaguuucuc

SEQ ID NO: 721508 - RNA, 19 nt, Artificial Sequence
  Description of Artificial Sequence: Synthetic oligonucleotide
ugguaccaccucuucuccc

SEQ ID NO: 721509 - RNA, 19 nt, Artificial Sequence
  Description of Artificial Sequence: Synthetic oligonucleotide
caguuaugggcaucucuuc

SEQ ID NO: 721510 - RNA, 19 nt, Artificial Sequence
  Description of Artificial Sequence: Synthetic oligonucleotide
uuacgaccuggauacuguc

SEQ ID NO: 721511 - RNA, 19 nt, Artificial Sequence
  Description of Artificial Sequence: Synthetic oligonucleotide
cuucaugcucuggagaaca

SEQ ID NO: 721512 - RNA, 19 nt, Artificial Sequence
  Description of Artificial Sequence: Synthetic oligonucleotide
aucuuagcauauguccgug

SEQ ID NO: 721513 - RNA, 19 nt, Artificial Sequence
  Description of Artificial Sequence: Synthetic oligonucleotide
cuguugucgauuuccaugu

SEQ ID NO: 721514 - RNA, 19 nt, Artificial Sequence
  Description of Artificial Sequence: Synthetic oligonucleotide
cucuaguaggucuaacucu

SEQ ID NO: 721515 - RNA, 19 nt, Artificial Sequence
  Description of Artificial Sequence: Synthetic oligonucleotide
aggggcuagcugccaauag

SEQ ID NO: 721516 - RNA, 19 nt, Artificial Sequence
  Description of Artificial Sequence: Synthetic oligonucleotide
gguaauccaaccaagguau

SEQ ID NO: 721517 - RNA, 19 nt, Artificial Sequence
  Description of Artificial Sequence: Synthetic oligonucleotide
uggggcauuucuccagguc

SEQ ID NO: 721518 - RNA, 19 nt, Artificial Sequence
  Description of Artificial Sequence: Synthetic oligonucleotide
  modified_base (4)..(4): a, c, u, g, unknown or other
cagnacccugagcucagug

SEQ ID NO: 721519 - RNA, 19 nt, Artificial Sequence
  Description of Artificial Sequence: Synthetic oligonucleotide
uucgagaaccacggcggcc

SEQ ID NO: 721520 - RNA, 19 nt, Artificial Sequence
  Description of Artificial Sequence: Synthetic oligonucleotide
cuucgagaaccacggcggc

SEQ ID NO: 721521 - RNA, 19 nt, Artificial Sequence
  Description of Artificial Sequence: Synthetic oligonucleotide
gacucaagauuaauaaaau

SEQ ID NO: 721522 - RNA, 19 nt, Artificial Sequence
  Description of Artificial Sequence: Synthetic oligonucleotide
gcacgcauacucuuuacga

SEQ ID NO: 721523 - RNA, 19 nt, Artificial Sequence
  Description of Artificial Sequence: Synthetic oligonucleotide
gguaaccauggaaaagagc

SEQ ID NO: 721524 - RNA, 19 nt, Artificial Sequence
  Description of Artificial Sequence: Synthetic oligonucleotide
ugcgcgcuucuguauuuug

SEQ ID NO: 721525 - RNA, 19 nt, Artificial Sequence
  Description of Artificial Sequence: Synthetic oligonucleotide
cagugaagcacauccaccu

SEQ ID NO: 721526 - RNA, 19 nt, Artificial Sequence
  Description of Artificial Sequence: Synthetic oligonucleotide
agaagguccccaucugaua

SEQ ID NO: 721527 - RNA, 19 nt, Artificial Sequence
  Description of Artificial Sequence: Synthetic oligonucleotide
acauaguagccugacucaa

SEQ ID NO: 721528 - RNA, 19 nt, Artificial Sequence
  Description of Artificial Sequence: Synthetic oligonucleotide
uuagcacaaggggcuagcu

SEQ ID NO: 721529 - RNA, 19 nt, Artificial Sequence
  Description of Artificial Sequence: Synthetic oligonucleotide
ggggcuagcugccaauagc

SEQ ID NO: 721530 - RNA, 19 nt, Artificial Sequence
  Description of Artificial Sequence: Synthetic oligonucleotide
aggacgucugcuaggauau

SEQ ID NO: 721531 - RNA, 19 nt, Artificial Sequence
  Description of Artificial Sequence: Synthetic oligonucleotide
aguugccuucgagaaccac

SEQ ID NO: 721532 - RNA, 19 nt, Artificial Sequence
  Description of Artificial Sequence: Synthetic oligonucleotide
uagccugacucaagauuaa

SEQ ID NO: 721533 - RNA, 19 nt, Artificial Sequence
  Description of Artificial Sequence: Synthetic oligonucleotide
ccguuguucccuacuaacc

SEQ ID NO: 721534 - RNA, 19 nt, Artificial Sequence
  Description of Artificial Sequence: Synthetic oligonucleotide
aucgagaguguaagaaggu

SEQ ID NO: 721535 - RNA, 19 nt, Artificial Sequence
  Description of Artificial Sequence: Synthetic oligonucleotide
gcuagcugccaauagcaga

SEQ ID NO: 721536 - RNA, 19 nt, Artificial Sequence
  Description of Artificial Sequence: Synthetic oligonucleotide
cugucacgguuugauaaac

SEQ ID NO: 721537 - RNA, 19 nt, Artificial Sequence
  Description of Artificial Sequence: Synthetic oligonucleotide
auauguccgugccucugaa

SEQ ID NO: 721538 - RNA, 19 nt, Artificial Sequence
  Description of Artificial Sequence: Synthetic oligonucleotide
gggucgagguaauccaacc

SEQ ID NO: 721539 - RNA, 19 nt, Artificial Sequence
  Description of Artificial Sequence: Synthetic oligonucleotide
auuggaaagugaggcgcca

SEQ ID NO: 721540 - RNA, 19 nt, Artificial Sequence
  Description of Artificial Sequence: Synthetic oligonucleotide
caggacgucugcuaggaua

SEQ ID NO: 721541 - RNA, 19 nt, Artificial Sequence
  Description of Artificial Sequence: Synthetic oligonucleotide
cauauguccgugccucuga

SEQ ID NO: 721542 - RNA, 19 nt, Artificial Sequence
  Description of Artificial Sequence: Synthetic oligonucleotide
cuccauccaaggcucguuc

SEQ ID NO: 721543 - RNA, 19 nt, Artificial Sequence
  Description of Artificial Sequence: Synthetic oligonucleotide
agcauauguccgugccucu

SEQ ID NO: 721544 - RNA, 19 nt, Artificial Sequence
  Description of Artificial Sequence: Synthetic oligonucleotide
auucauccuugcaagguua

SEQ ID NO: 721545 - RNA, 19 nt, Artificial Sequence
  Description of Artificial Sequence: Synthetic oligonucleotide
cgaucgagaguguaagaag

SEQ ID NO: 721546 - RNA, 19 nt, Artificial Sequence
  Description of Artificial Sequence: Synthetic oligonucleotide
guccgugccucugaaagca

SEQ ID NO: 721547 - RNA, 19 nt, Artificial Sequence
  Description of Artificial Sequence: Synthetic oligonucleotide
  modified_base (7)..(7): a, c, u, g, unknown or other
cagcagnacccugagcuca

SEQ ID NO: 721548 - RNA, 19 nt, Artificial Sequence
  Description of Artificial Sequence: Synthetic oligonucleotide
gccguuguucccuacuaac

SEQ ID NO: 721549 - RNA, 19 nt, Artificial Sequence
  Description of Artificial Sequence: Synthetic oligonucleotide
gcgcuucuguauuuuguag

SEQ ID NO: 721550 - RNA, 19 nt, Artificial Sequence
  Description of Artificial Sequence: Synthetic oligonucleotide
acgucugcuaggauauuga

SEQ ID NO: 721551 - RNA, 19 nt, Artificial Sequence
  Description of Artificial Sequence: Synthetic oligonucleotide
guagauugauuauucucuu

SEQ ID NO: 721552 - RNA, 19 nt, Artificial Sequence
  Description of Artificial Sequence: Synthetic oligonucleotide
ugaauccaaugaacuuauu

SEQ ID NO: 721553 - RNA, 19 nt, Artificial Sequence
  Description of Artificial Sequence: Synthetic oligonucleotide
cuccaacccaguuaucuua

SEQ ID NO: 721554 - RNA, 19 nt, Artificial Sequence
  Description of Artificial Sequence: Synthetic oligonucleotide
caugguguuucugguacca

SEQ ID NO: 721555 - RNA, 19 nt, Artificial Sequence
  Description of Artificial Sequence: Synthetic oligonucleotide
auucgacauauuaaaucuu

SEQ ID NO: 721556 - RNA, 19 nt, Artificial Sequence
  Description of Artificial Sequence: Synthetic oligonucleotide
ggauuucacaugguguuuc

SEQ ID NO: 721557 - RNA, 19 nt, Artificial Sequence
  Description of Artificial Sequence: Synthetic oligonucleotide
gucacgguuugauaaacuu

SEQ ID NO: 721558 - RNA, 19 nt, Artificial Sequence
  Description of Artificial Sequence: Synthetic oligonucleotide
gagaacaguuaugggcauc

SEQ ID NO: 721559 - RNA, 19 nt, Artificial Sequence
  Description of Artificial Sequence: Synthetic oligonucleotide
ggucgagguaauccaacca

SEQ ID NO: 721560 - RNA, 19 nt, Artificial Sequence
  Description of Artificial Sequence: Synthetic oligonucleotide
gaggauugcugucacgguu

SEQ ID NO: 721561 - RNA, 19 nt, Artificial Sequence
  Description of Artificial Sequence: Synthetic oligonucleotide
cucggucaguagagagagg

SEQ ID NO: 721562 - RNA, 19 nt, Artificial Sequence
  Description of Artificial Sequence: Synthetic oligonucleotide
ugccuucgagaaccacggc

SEQ ID NO: 721563 - RNA, 19 nt, Artificial Sequence
  Description of Artificial Sequence: Synthetic oligonucleotide
aagucccaucacauaaguu

SEQ ID NO: 721564 - RNA, 19 nt, Artificial Sequence
  Description of Artificial Sequence: Synthetic oligonucleotide
ggagcuccaacccaguuau

SEQ ID NO: 721565 - RNA, 19 nt, Artificial Sequence
  Description of Artificial Sequence: Synthetic oligonucleotide
ucugcgcgcuucuguauuu

SEQ ID NO: 721566 - RNA, 19 nt, Artificial Sequence
  Description of Artificial Sequence: Synthetic oligonucleotide
agccguuguucccuacuaa

SEQ ID NO: 721567 - RNA, 19 nt, Artificial Sequence
  Description of Artificial Sequence: Synthetic oligonucleotide
  modified_base (6)..(6): a, c, u, g, unknown or other
agcagnacccugagcucag

SEQ ID NO: 721568 - RNA, 19 nt, Artificial Sequence
  Description of Artificial Sequence: Synthetic oligonucleotide
caccaaggguaaacauaac

SEQ ID NO: 721569 - RNA, 19 nt, Artificial Sequence
  Description of Artificial Sequence: Synthetic oligonucleotide
ggucaguagagagaggugu

SEQ ID NO: 721570 - RNA, 19 nt, Artificial Sequence
  Description of Artificial Sequence: Synthetic oligonucleotide
cucucauggaugggucgag

SEQ ID NO: 721571 - RNA, 19 nt, Artificial Sequence
  Description of Artificial Sequence: Synthetic oligonucleotide
aaggggcuagcugccaaua

SEQ ID NO: 721572 - RNA, 19 nt, Artificial Sequence
  Description of Artificial Sequence: Synthetic oligonucleotide
gcacuugaguccugaaauc

SEQ ID NO: 721573 - RNA, 19 nt, Artificial Sequence
  Description of Artificial Sequence: Synthetic oligonucleotide
ugggagcuccaacccaguu

SEQ ID NO: 721574 - RNA, 19 nt, Artificial Sequence
  Description of Artificial Sequence: Synthetic oligonucleotide
ccacgaucgagaguguaag

SEQ ID NO: 721575 - RNA, 19 nt, Artificial Sequence
  Description of Artificial Sequence: Synthetic oligonucleotide
acccugagcucagugcugu

SEQ ID NO: 721576 - RNA, 19 nt, Artificial Sequence
  Description of Artificial Sequence: Synthetic oligonucleotide
acauuccccaaaagugccu

SEQ ID NO: 721577 - RNA, 19 nt, Artificial Sequence
  Description of Artificial Sequence: Synthetic oligonucleotide
  modified_base (5)..(5): a, c, u, g, unknown or other
ugganacggcuggcuuccg

SEQ ID NO: 721578 - RNA, 19 nt, Artificial Sequence
  Description of Artificial Sequence: Synthetic oligonucleotide
acucugcgcgcuucuguau

SEQ ID NO: 721579 - RNA, 19 nt, Artificial Sequence
  Description of Artificial Sequence: Synthetic oligonucleotide
gggcuagcugccaauagca

SEQ ID NO: 721580 - RNA, 19 nt, Artificial Sequence
  Description of Artificial Sequence: Synthetic oligonucleotide
cucauggaugggucgaggu

SEQ ID NO: 721581 - RNA, 19 nt, Artificial Sequence
  Description of Artificial Sequence: Synthetic oligonucleotide
cacgaucgagaguguaaga

SEQ ID NO: 721582 - RNA, 19 nt, Artificial Sequence
  Description of Artificial Sequence: Synthetic oligonucleotide
ucuuuacgaccuggauacu

SEQ ID NO: 721583 - RNA, 19 nt, Artificial Sequence
  Description of Artificial Sequence: Synthetic oligonucleotide
cucaaauugggagcuccaa

SEQ ID NO: 721584 - RNA, 19 nt, Artificial Sequence
  Description of Artificial Sequence: Synthetic oligonucleotide
uggcuuccgaagggcacug

SEQ ID NO: 721585 - RNA, 19 nt, Artificial Sequence
  Description of Artificial Sequence: Synthetic oligonucleotide
gaacaguuaugggcaucuc

SEQ ID NO: 721586 - RNA, 19 nt, Artificial Sequence
  Description of Artificial Sequence: Synthetic oligonucleotide
agucgguccagaaguccca

SEQ ID NO: 721587 - RNA, 19 nt, Artificial Sequence
  Description of Artificial Sequence: Synthetic oligonucleotide
gcugucacgguuugauaaa

SEQ ID NO: 721588 - RNA, 19 nt, Artificial Sequence
  Description of Artificial Sequence: Synthetic oligonucleotide
uaaccaccuccagucgguc

SEQ ID NO: 721589 - RNA, 19 nt, Artificial Sequence
  Description of Artificial Sequence: Synthetic oligonucleotide
gauugcugucacgguuuga

SEQ ID NO: 721590 - RNA, 19 nt, Artificial Sequence
  Description of Artificial Sequence: Synthetic oligonucleotide
  modified_base (4)..(4): a, c, u, g, unknown or other
gganacggcuggcuuccga

SEQ ID NO: 721591 - RNA, 19 nt, Artificial Sequence
  Description of Artificial Sequence: Synthetic oligonucleotide
ccaaaagugccuugggcua

SEQ ID NO: 721592 - RNA, 19 nt, Artificial Sequence
  Description of Artificial Sequence: Synthetic oligonucleotide
cauccuugcaagguuaguu

SEQ ID NO: 721593 - RNA, 19 nt, Artificial Sequence
  Description of Artificial Sequence: Synthetic oligonucleotide
augggucgagguaauccaa

SEQ ID NO: 721594 - RNA, 19 nt, Artificial Sequence
  Description of Artificial Sequence: Synthetic oligonucleotide
gcauauguccgugccucug

SEQ ID NO: 721595 - RNA, 19 nt, Artificial Sequence
  Description of Artificial Sequence: Synthetic oligonucleotide
gguagauaugguugaguuu

SEQ ID NO: 721596 - RNA, 19 nt, Artificial Sequence
  Description of Artificial Sequence: Synthetic oligonucleotide
ccauuacauacuuacuggu

SEQ ID NO: 721597 - RNA, 19 nt, Artificial Sequence
  Description of Artificial Sequence: Synthetic oligonucleotide
ccaacccaguuaucuuagc

SEQ ID NO: 721598 - RNA, 19 nt, Artificial Sequence
  Description of Artificial Sequence: Synthetic oligonucleotide
caggcccaacucugcgcgc

SEQ ID NO: 721599 - RNA, 19 nt, Artificial Sequence
  Description of Artificial Sequence: Synthetic oligonucleotide
cugcucuaguaggucuaac

SEQ ID NO: 721600 - RNA, 19 nt, Artificial Sequence
  Description of Artificial Sequence: Synthetic oligonucleotide
ccuacuaaccaccuccagu

SEQ ID NO: 721601 - RNA, 19 nt, Artificial Sequence
  Description of Artificial Sequence: Synthetic oligonucleotide
ggcaggacgucugcuagga

SEQ ID NO: 721602 - RNA, 19 nt, Artificial Sequence
  Description of Artificial Sequence: Synthetic oligonucleotide
ccacagcaaguuguagagg

SEQ ID NO: 721603 - RNA, 19 nt, Artificial Sequence
  Description of Artificial Sequence: Synthetic oligonucleotide
uagcugccaauagcagaaa

SEQ ID NO: 721604 - RNA, 19 nt, Artificial Sequence
  Description of Artificial Sequence: Synthetic oligonucleotide
  modified_base (8)..(8): a, c, u, g, unknown or other
caaugganacggcuggcuu

SEQ ID NO: 721605 - RNA, 19 nt, Artificial Sequence
  Description of Artificial Sequence: Synthetic oligonucleotide
gcaagguuaguuucuccau

SEQ ID NO: 721606 - RNA, 19 nt, Artificial Sequence
  Description of Artificial Sequence: Synthetic oligonucleotide
gcagcacgcauacucuuua

SEQ ID NO: 721607 - RNA, 19 nt, Artificial Sequence
  Description of Artificial Sequence: Synthetic oligonucleotide
cggcccgcagcuuggaggg

SEQ ID NO: 721608 - RNA, 19 nt, Artificial Sequence
  Description of Artificial Sequence: Synthetic oligonucleotide
gcuuuagcgucuucacacu

SEQ ID NO: 721609 - RNA, 19 nt, Artificial Sequence
  Description of Artificial Sequence: Synthetic oligonucleotide
gccugacucaagauuaaua

SEQ ID NO: 721610 - RNA, 19 nt, Artificial Sequence
  Description of Artificial Sequence: Synthetic oligonucleotide
cccuacuaaccaccuccag

SEQ ID NO: 721611 - RNA, 19 nt, Artificial Sequence
  Description of Artificial Sequence: Synthetic oligonucleotide
cccgcagcuuggagggugg

SEQ ID NO: 721612 - RNA, 19 nt, Artificial Sequence
  Description of Artificial Sequence: Synthetic oligonucleotide
cggauauuuuccaccauua

SEQ ID NO: 721613 - RNA, 19 nt, Artificial Sequence
  Description of Artificial Sequence: Synthetic oligonucleotide
cccacgaucgagaguguaa

SEQ ID NO: 721614 - RNA, 19 nt, Artificial Sequence
  Description of Artificial Sequence: Synthetic oligonucleotide
  modified_base (9)..(9): a, c, u, g, unknown or other
gcaaugganacggcuggcu

SEQ ID NO: 721615 - RNA, 19 nt, Artificial Sequence
  Description of Artificial Sequence: Synthetic oligonucleotide
cggucaguagagagaggug

SEQ ID NO: 721616 - RNA, 19 nt, Artificial Sequence
  Description of Artificial Sequence: Synthetic oligonucleotide
cuccaucuguauugagaau

SEQ ID NO: 721617 - RNA, 19 nt, Artificial Sequence
  Description of Artificial Sequence: Synthetic oligonucleotide
ccuuagugucuugcacuug

SEQ ID NO: 721618 - RNA, 19 nt, Artificial Sequence
  Description of Artificial Sequence: Synthetic oligonucleotide
gguccccaucugauagagc

SEQ ID NO: 721619 - RNA, 19 nt, Artificial Sequence
  Description of Artificial Sequence: Synthetic oligonucleotide
ggccgagaagguccccauc

SEQ ID NO: 721620 - RNA, 19 nt, Artificial Sequence
  Description of Artificial Sequence: Synthetic oligonucleotide
cucugcgcgcuucuguauu

SEQ ID NO: 721621 - RNA, 19 nt, Artificial Sequence
  Description of Artificial Sequence: Synthetic oligonucleotide
cugccccagggugaaucca

SEQ ID NO: 721622 - RNA, 19 nt, Artificial Sequence
  Description of Artificial Sequence: Synthetic oligonucleotide
gguggggaggcagcacgca

SEQ ID NO: 721623 - RNA, 19 nt, Artificial Sequence
  Description of Artificial Sequence: Synthetic oligonucleotide
cuggaccagugaagcacau

SEQ ID NO: 721624 - RNA, 19 nt, Artificial Sequence
  Description of Artificial Sequence: Synthetic oligonucleotide
gcucuucauuaugggugga

SEQ ID NO: 721625 - RNA, 19 nt, Artificial Sequence
  Description of Artificial Sequence: Synthetic oligonucleotide
gucgguccagaagucccau

SEQ ID NO: 721626 - RNA, 19 nt, Artificial Sequence
  Description of Artificial Sequence: Synthetic oligonucleotide
ggcggauauuuuccaccau

SEQ ID NO: 721627 - RNA, 19 nt, Artificial Sequence
  Description of Artificial Sequence: Synthetic oligonucleotide
gcgcgcuucuguauuuugu

SEQ ID NO: 721628 - RNA, 19 nt, Artificial Sequence
  Description of Artificial Sequence: Synthetic oligonucleotide
ccugcucuaguaggucuaa

SEQ ID NO: 721629 - RNA, 19 nt, Artificial Sequence
  Description of Artificial Sequence: Synthetic oligonucleotide
ggcagcacgcauacucuuu

SEQ ID NO: 721630 - RNA, 19 nt, Artificial Sequence
  Description of Artificial Sequence: Synthetic oligonucleotide
gcccaacucugcgcgcuuc

SEQ ID NO: 721631 - RNA, 19 nt, Artificial Sequence
  Description of Artificial Sequence: Synthetic oligonucleotide
cugcgcgcuucuguauuuu

SEQ ID NO: 721632 - RNA, 19 nt, Artificial Sequence
  Description of Artificial Sequence: Synthetic oligonucleotide
  modified_base (5)..(5): a, c, u, g, unknown or other
gcagnacccugagcucagu

SEQ ID NO: 721633 - RNA, 19 nt, Artificial Sequence
  Description of Artificial Sequence: Synthetic oligonucleotide
gcaggacgucugcuaggau

SEQ ID NO: 721634 - RNA, 19 nt, Artificial Sequence
  Description of Artificial Sequence: Synthetic oligonucleotide
gcggaaggcuguacagcau

SEQ ID NO: 721635 - RNA, 19 nt, Artificial Sequence
  Description of Artificial Sequence: Synthetic oligonucleotide
ccaggccacugcagaauuu

SEQ ID NO: 721636 - RNA, 19 nt, Artificial Sequence
  Description of Artificial Sequence: Synthetic oligonucleotide
ccccacgaucgagagugua

SEQ ID NO: 721637 - RNA, 19 nt, Artificial Sequence
  Description of Artificial Sequence: Synthetic oligonucleotide
ggacgucugcuaggauauu

SEQ ID NO: 721638 - RNA, 19 nt, Artificial Sequence
  Description of Artificial Sequence: Synthetic oligonucleotide
ggcccgcagcuuggagggu

SEQ ID NO: 721639 - RNA, 19 nt, Artificial Sequence
  Description of Artificial Sequence: Synthetic oligonucleotide
aaaucuauaauucacagca

SEQ ID NO: 721640 - RNA, 19 nt, Artificial Sequence
  Description of Artificial Sequence: Synthetic oligonucleotide
aaaccaaaagccuaauggc

SEQ ID NO: 721641 - RNA, 19 nt, Artificial Sequence
  Description of Artificial Sequence: Synthetic oligonucleotide
aaauuaggacuauugauac

SEQ ID NO: 721642 - RNA, 19 nt, Artificial Sequence
  Description of Artificial Sequence: Synthetic oligonucleotide
ugaaauagaaauuaggacu

SEQ ID NO: 721643 - RNA, 19 nt, Artificial Sequence
  Description of Artificial Sequence: Synthetic oligonucleotide
aauaagcaguaguacaucc

SEQ ID NO: 721644 - RNA, 19 nt, Artificial Sequence
  Description of Artificial Sequence: Synthetic oligonucleotide
aauaauuaauaaaaguggg

SEQ ID NO: 721645 - RNA, 19 nt, Artificial Sequence
  Description of Artificial Sequence: Synthetic oligonucleotide
aauagaauccuucuguucu

SEQ ID NO: 721646 - RNA, 19 nt, Artificial Sequence
  Description of Artificial Sequence: Synthetic oligonucleotide
aauauguagguacaucagg

SEQ ID NO: 721647 - RNA, 19 nt, Artificial Sequence
  Description of Artificial Sequence: Synthetic oligonucleotide
agucagacaacuuauuggc

SEQ ID NO: 721648 - RNA, 19 nt, Artificial Sequence
  Description of Artificial Sequence: Synthetic oligonucleotide
augaaauagaaauuaggac

SEQ ID NO: 721649 - RNA, 19 nt, Artificial Sequence
  Description of Artificial Sequence: Synthetic oligonucleotide
uuuuaauucuuauagcagc

SEQ ID NO: 721650 - RNA, 19 nt, Artificial Sequence
  Description of Artificial Sequence: Synthetic oligonucleotide
ucgagcauagacaucaugg

SEQ ID NO: 721651 - RNA, 19 nt, Artificial Sequence
  Description of Artificial Sequence: Synthetic oligonucleotide
aauguggguacgcacuucc

SEQ ID NO: 721652 - RNA, 19 nt, Artificial Sequence
  Description of Artificial Sequence: Synthetic oligonucleotide
ugugugaggaccuauuagg

SEQ ID NO: 721653 - RNA, 19 nt, Artificial Sequence
  Description of Artificial Sequence: Synthetic oligonucleotide
aaagugaaagcacacguca

SEQ ID NO: 721654 - RNA, 19 nt, Artificial Sequence
  Description of Artificial Sequence: Synthetic oligonucleotide
aguaauagaauguuugucu

SEQ ID NO: 721655 - RNA, 19 nt, Artificial Sequence
  Description of Artificial Sequence: Synthetic oligonucleotide
uucuuauucuucaaggcag

SEQ ID NO: 721656 - RNA, 19 nt, Artificial Sequence
  Description of Artificial Sequence: Synthetic oligonucleotide
uuuauucauaacuuccucc

SEQ ID NO: 721657 - RNA, 19 nt, Artificial Sequence
  Description of Artificial Sequence: Synthetic oligonucleotide
auggcauuaagcaagcucc

SEQ ID NO: 721658 - RNA, 19 nt, Artificial Sequence
  Description of Artificial Sequence: Synthetic oligonucleotide
ugauacagaucucaaaucu

SEQ ID NO: 721659 - RNA, 19 nt, Artificial Sequence
  Description of Artificial Sequence: Synthetic oligonucleotide
uuagguucaauccuuggca

SEQ ID NO: 721660 - RNA, 19 nt, Artificial Sequence
  Description of Artificial Sequence: Synthetic oligonucleotide
uauugauacacccagugau

SEQ ID NO: 721661 - RNA, 19 nt, Artificial Sequence
  Description of Artificial Sequence: Synthetic oligonucleotide
uuuacucaaauauaaaguu

SEQ ID NO: 721662 - RNA, 19 nt, Artificial Sequence
  Description of Artificial Sequence: Synthetic oligonucleotide
ugacuuauaauguucacaa

SEQ ID NO: 721663 - RNA, 19 nt, Artificial Sequence
  Description of Artificial Sequence: Synthetic oligonucleotide
uugggauugaauaagcagu

SEQ ID NO: 721664 - RNA, 19 nt, Artificial Sequence
  Description of Artificial Sequence: Synthetic oligonucleotide
aagccuaauggcauuaagc

SEQ ID NO: 721665 - RNA, 19 nt, Artificial Sequence
  Description of Artificial Sequence: Synthetic oligonucleotide
agagaggucgagcauagac

SEQ ID NO: 721666 - RNA, 19 nt, Artificial Sequence
  Description of Artificial Sequence: Synthetic oligonucleotide
uuggauugguacaauaccc

SEQ ID NO: 721667 - RNA, 19 nt, Artificial Sequence
  Description of Artificial Sequence: Synthetic oligonucleotide
uggcaaguuuaucugaacg

SEQ ID NO: 721668 - RNA, 19 nt, Artificial Sequence
  Description of Artificial Sequence: Synthetic oligonucleotide
uguuugucuaacaugugug

SEQ ID NO: 721669 - RNA, 19 nt, Artificial Sequence
  Description of Artificial Sequence: Synthetic oligonucleotide
guuagguugagacaacuag

SEQ ID NO: 721670 - RNA, 19 nt, Artificial Sequence
  Description of Artificial Sequence: Synthetic oligonucleotide
cuagauuugacaucacagc

SEQ ID NO: 721671 - RNA, 19 nt, Artificial Sequence
  Description of Artificial Sequence: Synthetic oligonucleotide
uaauagguuggaaaucucc

SEQ ID NO: 721672 - RNA, 19 nt, Artificial Sequence
  Description of Artificial Sequence: Synthetic oligonucleotide
ugaucagucaccagcagug

SEQ ID NO: 721673 - RNA, 19 nt, Artificial Sequence
  Description of Artificial Sequence: Synthetic oligonucleotide
gacgcaauuacgcaggaug

SEQ ID NO: 721674 - RNA, 19 nt, Artificial Sequence
  Description of Artificial Sequence: Synthetic oligonucleotide
uuauucauaacuuccuccu

SEQ ID NO: 721675 - RNA, 19 nt, Artificial Sequence
  Description of Artificial Sequence: Synthetic oligonucleotide
agugauacagaucucaaau

SEQ ID NO: 721676 - RNA, 19 nt, Artificial Sequence
  Description of Artificial Sequence: Synthetic oligonucleotide
cuuuauccauuuaucaggg

SEQ ID NO: 721677 - RNA, 19 nt, Artificial Sequence
  Description of Artificial Sequence: Synthetic oligonucleotide
uuauaauguucacaauaag

SEQ ID NO: 721678 - RNA, 19 nt, Artificial Sequence
  Description of Artificial Sequence: Synthetic oligonucleotide
ucagucaccagcagugucg

SEQ ID NO: 721679 - RNA, 19 nt, Artificial Sequence
  Description of Artificial Sequence: Synthetic oligonucleotide
auaaacuguauuuuacuca

SEQ ID NO: 721680 - RNA, 19 nt, Artificial Sequence
  Description of Artificial Sequence: Synthetic oligonucleotide
aauggugguccacauugcg

SEQ ID NO: 721681 - RNA, 19 nt, Artificial Sequence
  Description of Artificial Sequence: Synthetic oligonucleotide
uaauauguagguacaucag

SEQ ID NO: 721682 - RNA, 19 nt, Artificial Sequence
  Description of Artificial Sequence: Synthetic oligonucleotide
ugguugaucagucaccagc

SEQ ID NO: 721683 - RNA, 19 nt, Artificial Sequence
  Description of Artificial Sequence: Synthetic oligonucleotide
acuuauaauguucacaaua

SEQ ID NO: 721684 - RNA, 19 nt, Artificial Sequence
  Description of Artificial Sequence: Synthetic oligonucleotide
ucuauaauucacagcaagu

SEQ ID NO: 721685 - RNA, 19 nt, Artificial Sequence
  Description of Artificial Sequence: Synthetic oligonucleotide
ugaauaagcaguaguacau

SEQ ID NO: 721686 - RNA, 19 nt, Artificial Sequence
  Description of Artificial Sequence: Synthetic oligonucleotide
uuaagcaagcuccugugug

SEQ ID NO: 721687 - RNA, 19 nt, Artificial Sequence
  Description of Artificial Sequence: Synthetic oligonucleotide
acuauugauacacccagug

SEQ ID NO: 721688 - RNA, 19 nt, Artificial Sequence
  Description of Artificial Sequence: Synthetic oligonucleotide
agaaauuaggacuauugau

SEQ ID NO: 721689 - RNA, 19 nt, Artificial Sequence
  Description of Artificial Sequence: Synthetic oligonucleotide
agaaagugaaagcacacgu

SEQ ID NO: 721690 - RNA, 19 nt, Artificial Sequence
  Description of Artificial Sequence: Synthetic oligonucleotide
gauacacccagugauacag

SEQ ID NO: 721691 - RNA, 19 nt, Artificial Sequence
  Description of Artificial Sequence: Synthetic oligonucleotide
uccaaucuuauauacggug

SEQ ID NO: 721692 - RNA, 19 nt, Artificial Sequence
  Description of Artificial Sequence: Synthetic oligonucleotide
aguuauucucaaaaguuac

SEQ ID NO: 721693 - RNA, 19 nt, Artificial Sequence
  Description of Artificial Sequence: Synthetic oligonucleotide
agguacaucagggagaauc

SEQ ID NO: 721694 - RNA, 19 nt, Artificial Sequence
  Description of Artificial Sequence: Synthetic oligonucleotide
aaagacaguaagaauuaag

SEQ ID NO: 721695 - RNA, 19 nt, Artificial Sequence
  Description of Artificial Sequence: Synthetic oligonucleotide
uuauuggcaaguuuaucug

SEQ ID NO: 721696 - RNA, 19 nt, Artificial Sequence
  Description of Artificial Sequence: Synthetic oligonucleotide
aagaauuaaguggagggca

SEQ ID NO: 721697 - RNA, 19 nt, Artificial Sequence
  Description of Artificial Sequence: Synthetic oligonucleotide
auugcguuuagcccacccc

SEQ ID NO: 721698 - RNA, 19 nt, Artificial Sequence
  Description of Artificial Sequence: Synthetic oligonucleotide
gaccuauuagguucaaucc

SEQ ID NO: 721699 - RNA, 19 nt, Artificial Sequence
  Description of Artificial Sequence: Synthetic oligonucleotide
uuaucagggcuuauaaacu

SEQ ID NO: 721700 - RNA, 19 nt, Artificial Sequence
  Description of Artificial Sequence: Synthetic oligonucleotide
uguagguacaucagggaga

SEQ ID NO: 721701 - RNA, 19 nt, Artificial Sequence
  Description of Artificial Sequence: Synthetic oligonucleotide
ucuaaguagaccuccugca

SEQ ID NO: 721702 - RNA, 19 nt, Artificial Sequence
  Description of Artificial Sequence: Synthetic oligonucleotide
acuagauuugacaucacag

SEQ ID NO: 721703 - RNA, 19 nt, Artificial Sequence
  Description of Artificial Sequence: Synthetic oligonucleotide
aagaucagugcuugcuagg

SEQ ID NO: 721704 - RNA, 19 nt, Artificial Sequence
  Description of Artificial Sequence: Synthetic oligonucleotide
aaagccuaauggcauuaag

SEQ ID NO: 721705 - RNA, 19 nt, Artificial Sequence
  Description of Artificial Sequence: Synthetic oligonucleotide
aacuagauuugacaucaca

SEQ ID NO: 721706 - RNA, 19 nt, Artificial Sequence
  Description of Artificial Sequence: Synthetic oligonucleotide
acaacuagauuugacauca

SEQ ID NO: 721707 - RNA, 19 nt, Artificial Sequence
  Description of Artificial Sequence: Synthetic oligonucleotide
aaguuuaucugaacgcuuc

SEQ ID NO: 721708 - RNA, 19 nt, Artificial Sequence
  Description of Artificial Sequence: Synthetic oligonucleotide
agugcuugcuaggauagcc

SEQ ID NO: 721709 - RNA, 19 nt, Artificial Sequence
  Description of Artificial Sequence: Synthetic oligonucleotide
agcaaguuauucucaaaag

SEQ ID NO: 721710 - RNA, 19 nt, Artificial Sequence
  Description of Artificial Sequence: Synthetic oligonucleotide
ugugugacuuauaauguuc

SEQ ID NO: 721711 - RNA, 19 nt, Artificial Sequence
  Description of Artificial Sequence: Synthetic oligonucleotide
aauuggagccacuuggcau

SEQ ID NO: 721712 - RNA, 19 nt, Artificial Sequence
  Description of Artificial Sequence: Synthetic oligonucleotide
uaaguagaccuccugcaug

SEQ ID NO: 721713 - RNA, 19 nt, Artificial Sequence
  Description of Artificial Sequence: Synthetic oligonucleotide
aaguagaccuccugcauga

SEQ ID NO: 721714 - RNA, 19 nt, Artificial Sequence
  Description of Artificial Sequence: Synthetic oligonucleotide
uauuagguucaauccuugg

SEQ ID NO: 721715 - RNA, 19 nt, Artificial Sequence
  Description of Artificial Sequence: Synthetic oligonucleotide
acaguaagaauuaagugga

SEQ ID NO: 721716 - RNA, 19 nt, Artificial Sequence
  Description of Artificial Sequence: Synthetic oligonucleotide
aauuaaguggagggcauug

SEQ ID NO: 721717 - RNA, 19 nt, Artificial Sequence
  Description of Artificial Sequence: Synthetic oligonucleotide
cacauggacgcaauuacgc

SEQ ID NO: 721718 - RNA, 19 nt, Artificial Sequence
  Description of Artificial Sequence: Synthetic oligonucleotide
uaucagggcuuauaaacug

SEQ ID NO: 721719 - RNA, 19 nt, Artificial Sequence
  Description of Artificial Sequence: Synthetic oligonucleotide
ucugaauuggguccuggga

SEQ ID NO: 721720 - RNA, 19 nt, Artificial Sequence
  Description of Artificial Sequence: Synthetic oligonucleotide
ugcacauggacgcaauuac

SEQ ID NO: 721721 - RNA, 19 nt, Artificial Sequence
  Description of Artificial Sequence: Synthetic oligonucleotide
auaaugauacagcuuagua

SEQ ID NO: 721722 - RNA, 19 nt, Artificial Sequence
  Description of Artificial Sequence: Synthetic oligonucleotide
ugucuaacaugugugagga

SEQ ID NO: 721723 - RNA, 19 nt, Artificial Sequence
  Description of Artificial Sequence: Synthetic oligonucleotide
aucuguauucucccauccc

SEQ ID NO: 721724 - RNA, 19 nt, Artificial Sequence
  Description of Artificial Sequence: Synthetic oligonucleotide
caucccaugggaaucagug

SEQ ID NO: 721725 - RNA, 19 nt, Artificial Sequence
  Description of Artificial Sequence: Synthetic oligonucleotide
uauacggugguuuuauuuu

SEQ ID NO: 721726 - RNA, 19 nt, Artificial Sequence
  Description of Artificial Sequence: Synthetic oligonucleotide
aagcacacgucagugauug

SEQ ID NO: 721727 - RNA, 19 nt, Artificial Sequence
  Description of Artificial Sequence: Synthetic oligonucleotide
aauuaggacuauugauaca

SEQ ID NO: 721728 - RNA, 19 nt, Artificial Sequence
  Description of Artificial Sequence: Synthetic oligonucleotide
aguaugaaauagaaauuag

SEQ ID NO: 721729 - RNA, 19 nt, Artificial Sequence
  Description of Artificial Sequence: Synthetic oligonucleotide
uccuuaacaaucucagcac

SEQ ID NO: 721730 - RNA, 19 nt, Artificial Sequence
  Description of Artificial Sequence: Synthetic oligonucleotide
cacuguacgauuguuuugg

SEQ ID NO: 721731 - RNA, 19 nt, Artificial Sequence
  Description of Artificial Sequence: Synthetic oligonucleotide
ugaugaacuugucuaagua

SEQ ID NO: 721732 - RNA, 19 nt, Artificial Sequence
  Description of Artificial Sequence: Synthetic oligonucleotide
gagaagauugguugaucag

SEQ ID NO: 721733 - RNA, 19 nt, Artificial Sequence
  Description of Artificial Sequence: Synthetic oligonucleotide
aguuacauacuguucaauu

SEQ ID NO: 721734 - RNA, 19 nt, Artificial Sequence
  Description of Artificial Sequence: Synthetic oligonucleotide
cuguugacgguuuggauug

SEQ ID NO: 721735 - RNA, 19 nt, Artificial Sequence
  Description of Artificial Sequence: Synthetic oligonucleotide
ucagugauuggcauggguu

SEQ ID NO: 721736 - RNA, 19 nt, Artificial Sequence
  Description of Artificial Sequence: Synthetic oligonucleotide
ugcuugcuaggauagccgg

SEQ ID NO: 721737 - RNA, 19 nt, Artificial Sequence
  Description of Artificial Sequence: Synthetic oligonucleotide
acgcacuuccccuaggcgg

SEQ ID NO: 721738 - RNA, 19 nt, Artificial Sequence
  Description of Artificial Sequence: Synthetic oligonucleotide
uuaacaaucucagcacuga

SEQ ID NO: 721739 - RNA, 19 nt, Artificial Sequence
  Description of Artificial Sequence: Synthetic oligonucleotide
cugaauuggguccugggac

SEQ ID NO: 721740 - RNA, 19 nt, Artificial Sequence
  Description of Artificial Sequence: Synthetic oligonucleotide
accuauuagguucaauccu

SEQ ID NO: 721741 - RNA, 19 nt, Artificial Sequence
  Description of Artificial Sequence: Synthetic oligonucleotide
caauuacgcaggauggugc

SEQ ID NO: 721742 - RNA, 19 nt, Artificial Sequence
  Description of Artificial Sequence: Synthetic oligonucleotide
uacagcuuaguaauagaau

SEQ ID NO: 721743 - RNA, 19 nt, Artificial Sequence
  Description of Artificial Sequence: Synthetic oligonucleotide
cauggacgcaauuacgcag

SEQ ID NO: 721744 - RNA, 19 nt, Artificial Sequence
  Description of Artificial Sequence: Synthetic oligonucleotide
aaccaaaagccuaauggca

SEQ ID NO: 721745 - RNA, 19 nt, Artificial Sequence
  Description of Artificial Sequence: Synthetic oligonucleotide
uguggguacgcacuucccc

SEQ ID NO: 721746 - RNA, 19 nt, Artificial Sequence
  Description of Artificial Sequence: Synthetic oligonucleotide
ucuuauucuucaaggcaga

SEQ ID NO: 721747 - RNA, 19 nt, Artificial Sequence
  Description of Artificial Sequence: Synthetic oligonucleotide
auaauucacagcaaguuau

SEQ ID NO: 721748 - RNA, 19 nt, Artificial Sequence
  Description of Artificial Sequence: Synthetic oligonucleotide
ugcaugaauuuugugacac

SEQ ID NO: 721749 - RNA, 19 nt, Artificial Sequence
  Description of Artificial Sequence: Synthetic oligonucleotide
uugcguuuagcccacccca

SEQ ID NO: 721750 - RNA, 19 nt, Artificial Sequence
  Description of Artificial Sequence: Synthetic oligonucleotide
acggccaagcauuccaugg

SEQ ID NO: 721751 - RNA, 19 nt, Artificial Sequence
  Description of Artificial Sequence: Synthetic oligonucleotide
gugaggaccuauuagguuc

SEQ ID NO: 721752 - RNA, 19 nt, Artificial Sequence
  Description of Artificial Sequence: Synthetic oligonucleotide
uugaucagucaccagcagu

SEQ ID NO: 721753 - RNA, 19 nt, Artificial Sequence
  Description of Artificial Sequence: Synthetic oligonucleotide
guguuuugcaguaugagga

SEQ ID NO: 721754 - RNA, 19 nt, Artificial Sequence
  Description of Artificial Sequence: Synthetic oligonucleotide
ugugacaccagggaacagc

SEQ ID NO: 721755 - RNA, 19 nt, Artificial Sequence
  Description of Artificial Sequence: Synthetic oligonucleotide
uaauagaauccuucuguuc

SEQ ID NO: 721756 - RNA, 19 nt, Artificial Sequence
  Description of Artificial Sequence: Synthetic oligonucleotide
agaauuggagccacuuggc

SEQ ID NO: 721757 - RNA, 19 nt, Artificial Sequence
  Description of Artificial Sequence: Synthetic oligonucleotide
ugaggagaagauugguuga

SEQ ID NO: 721758 - RNA, 19 nt, Artificial Sequence
  Description of Artificial Sequence: Synthetic oligonucleotide
gauugaauaagcaguagua

SEQ ID NO: 721759 - RNA, 19 nt, Artificial Sequence
  Description of Artificial Sequence: Synthetic oligonucleotide
guugaagugggucugucuc

SEQ ID NO: 721760 - RNA, 19 nt, Artificial Sequence
  Description of Artificial Sequence: Synthetic oligonucleotide
ggacuauugauacacccag

SEQ ID NO: 721761 - RNA, 19 nt, Artificial Sequence
  Description of Artificial Sequence: Synthetic oligonucleotide
agaagauugguugaucagu

SEQ ID NO: 721762 - RNA, 19 nt, Artificial Sequence
  Description of Artificial Sequence: Synthetic oligonucleotide
aagauugguugaucaguca

SEQ ID NO: 721763 - RNA, 19 nt, Artificial Sequence
  Description of Artificial Sequence: Synthetic oligonucleotide
agugaaagcacacgucagu

SEQ ID NO: 721764 - RNA, 19 nt, Artificial Sequence
  Description of Artificial Sequence: Synthetic oligonucleotide
uauccauuuaucagggcuu

SEQ ID NO: 721765 - RNA, 19 nt, Artificial Sequence
  Description of Artificial Sequence: Synthetic oligonucleotide
auauacggugguuuuauuu

SEQ ID NO: 721766 - RNA, 19 nt, Artificial Sequence
  Description of Artificial Sequence: Synthetic oligonucleotide
gauacagcuuaguaauaga

SEQ ID NO: 721767 - RNA, 19 nt, Artificial Sequence
  Description of Artificial Sequence: Synthetic oligonucleotide
uuaggacuauugauacacc

SEQ ID NO: 721768 - RNA, 19 nt, Artificial Sequence
  Description of Artificial Sequence: Synthetic oligonucleotide
gauugguugaucagucacc

SEQ ID NO: 721769 - RNA, 19 nt, Artificial Sequence
  Description of Artificial Sequence: Synthetic oligonucleotide
uuauauacggugguuuuau

SEQ ID NO: 721770 - RNA, 19 nt, Artificial Sequence
  Description of Artificial Sequence: Synthetic oligonucleotide
acgucagugauuggcaugg

SEQ ID NO: 721771 - RNA, 19 nt, Artificial Sequence
  Description of Artificial Sequence: Synthetic oligonucleotide
gacaacuagauuugacauc

SEQ ID NO: 721772 - RNA, 19 nt, Artificial Sequence
  Description of Artificial Sequence: Synthetic oligonucleotide
uacgacgcccacacgaaug

SEQ ID NO: 721773 - RNA, 19 nt, Artificial Sequence
  Description of Artificial Sequence: Synthetic oligonucleotide
ccaaucuuauauacggugg

SEQ ID NO: 721774 - RNA, 19 nt, Artificial Sequence
  Description of Artificial Sequence: Synthetic oligonucleotide
uugauacacccagugauac

SEQ ID NO: 721775 - RNA, 19 nt, Artificial Sequence
  Description of Artificial Sequence: Synthetic oligonucleotide
ucuuauauacggugguuuu

SEQ ID NO: 721776 - RNA, 19 nt, Artificial Sequence
  Description of Artificial Sequence: Synthetic oligonucleotide
ggcaaguuuaucugaacgc

SEQ ID NO: 721777 - RNA, 19 nt, Artificial Sequence
  Description of Artificial Sequence: Synthetic oligonucleotide
aggucgagcauagacauca

SEQ ID NO: 721778 - RNA, 19 nt, Artificial Sequence
  Description of Artificial Sequence: Synthetic oligonucleotide
aagccuguaaucccacuaa

SEQ ID NO: 721779 - RNA, 19 nt, Artificial Sequence
  Description of Artificial Sequence: Synthetic oligonucleotide
aucccacuaacuugggaag

SEQ ID NO: 721780 - RNA, 19 nt, Artificial Sequence
  Description of Artificial Sequence: Synthetic oligonucleotide
caacuuauuggcaaguuua

SEQ ID NO: 721781 - RNA, 19 nt, Artificial Sequence
  Description of Artificial Sequence: Synthetic oligonucleotide
uaucugaacgcuucugcaa

SEQ ID NO: 721782 - RNA, 19 nt, Artificial Sequence
  Description of Artificial Sequence: Synthetic oligonucleotide
cuguacgauuguuuugggg

SEQ ID NO: 721783 - RNA, 19 nt, Artificial Sequence
  Description of Artificial Sequence: Synthetic oligonucleotide
uccacuguacgauuguuuu

SEQ ID NO: 721784 - RNA, 19 nt, Artificial Sequence
  Description of Artificial Sequence: Synthetic oligonucleotide
ggaccuauuagguucaauc

SEQ ID NO: 721785 - RNA, 19 nt, Artificial Sequence
  Description of Artificial Sequence: Synthetic oligonucleotide
gaagauugguugaucaguc

SEQ ID NO: 721786 - RNA, 19 nt, Artificial Sequence
  Description of Artificial Sequence: Synthetic oligonucleotide
guaguacauccacacaaug

SEQ ID NO: 721787 - RNA, 19 nt, Artificial Sequence
  Description of Artificial Sequence: Synthetic oligonucleotide
gacaauggagggcaccgug

SEQ ID NO: 721788 - RNA, 19 nt, Artificial Sequence
  Description of Artificial Sequence: Synthetic oligonucleotide
uugaagugggucugucucc

SEQ ID NO: 721789 - RNA, 19 nt, Artificial Sequence
  Description of Artificial Sequence: Synthetic oligonucleotide
auuaagcaagcuccugugu

SEQ ID NO: 721790 - RNA, 19 nt, Artificial Sequence
  Description of Artificial Sequence: Synthetic oligonucleotide
auuuaucagggcuuauaaa

SEQ ID NO: 721791 - RNA, 19 nt, Artificial Sequence
  Description of Artificial Sequence: Synthetic oligonucleotide
gacgguuuggauugguaca

SEQ ID NO: 721792 - RNA, 19 nt, Artificial Sequence
  Description of Artificial Sequence: Synthetic oligonucleotide
aagugaaagcacacgucag

SEQ ID NO: 721793 - RNA, 19 nt, Artificial Sequence
  Description of Artificial Sequence: Synthetic oligonucleotide
ugugacuuauaauguucac

SEQ ID NO: 721794 - RNA, 19 nt, Artificial Sequence
  Description of Artificial Sequence: Synthetic oligonucleotide
uuuagcccaccccaucugu

SEQ ID NO: 721795 - RNA, 19 nt, Artificial Sequence
  Description of Artificial Sequence: Synthetic oligonucleotide
ucgaauugccaucuguauu

SEQ ID NO: 721796 - RNA, 19 nt, Artificial Sequence
  Description of Artificial Sequence: Synthetic oligonucleotide
cagacaacuuauuggcaag

SEQ ID NO: 721797 - RNA, 19 nt, Artificial Sequence
  Description of Artificial Sequence: Synthetic oligonucleotide
cuauuagguucaauccuug

SEQ ID NO: 721798 - RNA, 19 nt, Artificial Sequence
  Description of Artificial Sequence: Synthetic oligonucleotide
ucucccacggccaagcauu

SEQ ID NO: 721799 - RNA, 19 nt, Artificial Sequence
  Description of Artificial Sequence: Synthetic oligonucleotide
auugguugaucagucacca

SEQ ID NO: 721800 - RNA, 19 nt, Artificial Sequence
  Description of Artificial Sequence: Synthetic oligonucleotide
uuuauccauuuaucagggc

SEQ ID NO: 721801 - RNA, 19 nt, Artificial Sequence
  Description of Artificial Sequence: Synthetic oligonucleotide
gcuauuuucaccagcggag

SEQ ID NO: 721802 - RNA, 19 nt, Artificial Sequence
  Description of Artificial Sequence: Synthetic oligonucleotide
ucccacgcuacacgcacgg

SEQ ID NO: 721803 - RNA, 19 nt, Artificial Sequence
  Description of Artificial Sequence: Synthetic oligonucleotide
gguacaauacccagugagg

SEQ ID NO: 721804 - RNA, 19 nt, Artificial Sequence
  Description of Artificial Sequence: Synthetic oligonucleotide
aaucgaauugccaucugua

SEQ ID NO: 721805 - RNA, 19 nt, Artificial Sequence
  Description of Artificial Sequence: Synthetic oligonucleotide
aggcuaauagaauccuucu

SEQ ID NO: 721806 - RNA, 19 nt, Artificial Sequence
  Description of Artificial Sequence: Synthetic oligonucleotide
ggguguucuaauauguagg

SEQ ID NO: 721807 - RNA, 19 nt, Artificial Sequence
  Description of Artificial Sequence: Synthetic oligonucleotide
gaaagugaaagcacacguc

SEQ ID NO: 721808 - RNA, 19 nt, Artificial Sequence
  Description of Artificial Sequence: Synthetic oligonucleotide
agugucgucacaguugcca

SEQ ID NO: 721809 - RNA, 19 nt, Artificial Sequence
  Description of Artificial Sequence: Synthetic oligonucleotide
cagcucaucggauucuccc

SEQ ID NO: 721810 - RNA, 19 nt, Artificial Sequence
  Description of Artificial Sequence: Synthetic oligonucleotide
gagugugaguagguggugg

SEQ ID NO: 721811 - RNA, 19 nt, Artificial Sequence
  Description of Artificial Sequence: Synthetic oligonucleotide
gguacaucagggagaaucg

SEQ ID NO: 721812 - RNA, 19 nt, Artificial Sequence
  Description of Artificial Sequence: Synthetic oligonucleotide
agggcuuauaaacuguauu

SEQ ID NO: 721813 - RNA, 19 nt, Artificial Sequence
  Description of Artificial Sequence: Synthetic oligonucleotide
cauuuaucagggcuuauaa

SEQ ID NO: 721814 - RNA, 19 nt, Artificial Sequence
  Description of Artificial Sequence: Synthetic oligonucleotide
uauuuucaccagcggagaa

SEQ ID NO: 721815 - RNA, 19 nt, Artificial Sequence
  Description of Artificial Sequence: Synthetic oligonucleotide
uaaucccacuaacuuggga

SEQ ID NO: 721816 - RNA, 19 nt, Artificial Sequence
  Description of Artificial Sequence: Synthetic oligonucleotide
acauggacgcaauuacgca

SEQ ID NO: 721817 - RNA, 19 nt, Artificial Sequence
  Description of Artificial Sequence: Synthetic oligonucleotide
cucugaauuggguccuggg

SEQ ID NO: 721818 - RNA, 19 nt, Artificial Sequence
  Description of Artificial Sequence: Synthetic oligonucleotide
cucagcacugagaugcgug

SEQ ID NO: 721819 - RNA, 19 nt, Artificial Sequence
  Description of Artificial Sequence: Synthetic oligonucleotide
aucgaauugccaucuguau

SEQ ID NO: 721820 - RNA, 19 nt, Artificial Sequence
  Description of Artificial Sequence: Synthetic oligonucleotide
gaauuggagccacuuggca

SEQ ID NO: 721821 - RNA, 19 nt, Artificial Sequence
  Description of Artificial Sequence: Synthetic oligonucleotide
agcgcugaaggauggucuc

SEQ ID NO: 721822 - RNA, 19 nt, Artificial Sequence
  Description of Artificial Sequence: Synthetic oligonucleotide
uaauucacagcaaguuauu

SEQ ID NO: 721823 - RNA, 19 nt, Artificial Sequence
  Description of Artificial Sequence: Synthetic oligonucleotide
auggacgcaauuacgcagg

SEQ ID NO: 721824 - RNA, 19 nt, Artificial Sequence
  Description of Artificial Sequence: Synthetic oligonucleotide
acgcaauuacgcaggaugg

SEQ ID NO: 721825 - RNA, 19 nt, Artificial Sequence
  Description of Artificial Sequence: Synthetic oligonucleotide
uuugcaguaugaggagaag

SEQ ID NO: 721826 - RNA, 19 nt, Artificial Sequence
  Description of Artificial Sequence: Synthetic oligonucleotide
aucugaacgcuucugcaau

SEQ ID NO: 721827 - RNA, 19 nt, Artificial Sequence
  Description of Artificial Sequence: Synthetic oligonucleotide
gaugacaauggagggcacc

SEQ ID NO: 721828 - RNA, 19 nt, Artificial Sequence
  Description of Artificial Sequence: Synthetic oligonucleotide
ugcgagcgcugaaggaugg

SEQ ID NO: 721829 - RNA, 19 nt, Artificial Sequence
  Description of Artificial Sequence: Synthetic oligonucleotide
ggagaagauugguugauca

SEQ ID NO: 721830 - RNA, 19 nt, Artificial Sequence
  Description of Artificial Sequence: Synthetic oligonucleotide
gauucucccacggccaagc

SEQ ID NO: 721831 - RNA, 19 nt, Artificial Sequence
  Description of Artificial Sequence: Synthetic oligonucleotide
ucagggcuuauaaacugua

SEQ ID NO: 721832 - RNA, 19 nt, Artificial Sequence
  Description of Artificial Sequence: Synthetic oligonucleotide
aaucuuauauacggugguu

SEQ ID NO: 721833 - RNA, 19 nt, Artificial Sequence
  Description of Artificial Sequence: Synthetic oligonucleotide
cacccagugauacagaucu

SEQ ID NO: 721834 - RNA, 19 nt, Artificial Sequence
  Description of Artificial Sequence: Synthetic oligonucleotide
ucugcaacauugggcggcg

SEQ ID NO: 721835 - RNA, 19 nt, Artificial Sequence
  Description of Artificial Sequence: Synthetic oligonucleotide
uugcuaggauagccgggcg

SEQ ID NO: 721836 - RNA, 19 nt, Artificial Sequence
  Description of Artificial Sequence: Synthetic oligonucleotide
agugugaguaggugguggu

SEQ ID NO: 721837 - RNA, 19 nt, Artificial Sequence
  Description of Artificial Sequence: Synthetic oligonucleotide
ugauacacccagugauaca

SEQ ID NO: 721838 - RNA, 19 nt, Artificial Sequence
  Description of Artificial Sequence: Synthetic oligonucleotide
gcuaauagaauccuucugu

SEQ ID NO: 721839 - RNA, 19 nt, Artificial Sequence
  Description of Artificial Sequence: Synthetic oligonucleotide
ugugaggaccuauuagguu

SEQ ID NO: 721840 - RNA, 19 nt, Artificial Sequence
  Description of Artificial Sequence: Synthetic oligonucleotide
ugcaacauugggcggcggu

SEQ ID NO: 721841 - RNA, 19 nt, Artificial Sequence
  Description of Artificial Sequence: Synthetic oligonucleotide
uagguugcgagcgcugaag

SEQ ID NO: 721842 - RNA, 19 nt, Artificial Sequence
  Description of Artificial Sequence: Synthetic oligonucleotide
cuauugauacacccaguga

SEQ ID NO: 721843 - RNA, 19 nt, Artificial Sequence
  Description of Artificial Sequence: Synthetic oligonucleotide
gaaucgaauugccaucugu

SEQ ID NO: 721844 - RNA, 19 nt, Artificial Sequence
  Description of Artificial Sequence: Synthetic oligonucleotide
guugaucagucaccagcag

SEQ ID NO: 721845 - RNA, 19 nt, Artificial Sequence
  Description of Artificial Sequence: Synthetic oligonucleotide
aucuuauauacggugguuu

SEQ ID NO: 721846 - RNA, 19 nt, Artificial Sequence
  Description of Artificial Sequence: Synthetic oligonucleotide
cacgaauguggguacgcac

SEQ ID NO: 721847 - RNA, 19 nt, Artificial Sequence
  Description of Artificial Sequence: Synthetic oligonucleotide
acauugggaaggccuacga

SEQ ID NO: 721848 - RNA, 19 nt, Artificial Sequence
  Description of Artificial Sequence: Synthetic oligonucleotide
ugcuaggauagccgggcgu

SEQ ID NO: 721849 - RNA, 19 nt, Artificial Sequence
  Description of Artificial Sequence: Synthetic oligonucleotide
auggugucuucguuggccu

SEQ ID NO: 721850 - RNA, 19 nt, Artificial Sequence
  Description of Artificial Sequence: Synthetic oligonucleotide
caauggugguccacauugc

SEQ ID NO: 721851 - RNA, 19 nt, Artificial Sequence
  Description of Artificial Sequence: Synthetic oligonucleotide
aggacuauugauacaccca

SEQ ID NO: 721852 - RNA, 19 nt, Artificial Sequence
  Description of Artificial Sequence: Synthetic oligonucleotide
cauugggaaggccuacgac

SEQ ID NO: 721853 - RNA, 19 nt, Artificial Sequence
  Description of Artificial Sequence: Synthetic oligonucleotide
agcucaucggauucuccca

SEQ ID NO: 721854 - RNA, 19 nt, Artificial Sequence
  Description of Artificial Sequence: Synthetic oligonucleotide
agcuuaguaauagaauguu

SEQ ID NO: 721855 - RNA, 19 nt, Artificial Sequence
  Description of Artificial Sequence: Synthetic oligonucleotide
cucugcaacauugggcggc

SEQ ID NO: 721856 - RNA, 19 nt, Artificial Sequence
  Description of Artificial Sequence: Synthetic oligonucleotide
agaucagugcuugcuagga

SEQ ID NO: 721857 - RNA, 19 nt, Artificial Sequence
  Description of Artificial Sequence: Synthetic oligonucleotide
gugucgucacaguugccag

SEQ ID NO: 721858 - RNA, 19 nt, Artificial Sequence
  Description of Artificial Sequence: Synthetic oligonucleotide
ggcuaauagaauccuucug

SEQ ID NO: 721859 - RNA, 19 nt, Artificial Sequence
  Description of Artificial Sequence: Synthetic oligonucleotide
ucuagguugcgagcgcuga

SEQ ID NO: 721860 - RNA, 19 nt, Artificial Sequence
  Description of Artificial Sequence: Synthetic oligonucleotide
aacauugggcggcggucca

SEQ ID NO: 721861 - RNA, 19 nt, Artificial Sequence
  Description of Artificial Sequence: Synthetic oligonucleotide
gugcccaccucugaauugg

SEQ ID NO: 721862 - RNA, 19 nt, Artificial Sequence
  Description of Artificial Sequence: Synthetic oligonucleotide
gugcuugcuaggauagccg

SEQ ID NO: 721863 - RNA, 19 nt, Artificial Sequence
  Description of Artificial Sequence: Synthetic oligonucleotide
cgaauugccaucuguauuc

SEQ ID NO: 721864 - RNA, 19 nt, Artificial Sequence
  Description of Artificial Sequence: Synthetic oligonucleotide
aaaagccuaauggcauuaa

SEQ ID NO: 721865 - RNA, 19 nt, Artificial Sequence
  Description of Artificial Sequence: Synthetic oligonucleotide
agaaucgaauugccaucug

SEQ ID NO: 721866 - RNA, 19 nt, Artificial Sequence
  Description of Artificial Sequence: Synthetic oligonucleotide
aacaugugugaggaccuau

SEQ ID NO: 721867 - RNA, 19 nt, Artificial Sequence
  Description of Artificial Sequence: Synthetic oligonucleotide
agcggagaauuggagccac

SEQ ID NO: 721868 - RNA, 19 nt, Artificial Sequence
  Description of Artificial Sequence: Synthetic oligonucleotide
acgaauguggguacgcacu

SEQ ID NO: 721869 - RNA, 19 nt, Artificial Sequence
  Description of Artificial Sequence: Synthetic oligonucleotide
ggagaaucgaauugccauc

SEQ ID NO: 721870 - RNA, 19 nt, Artificial Sequence
  Description of Artificial Sequence: Synthetic oligonucleotide
gucgagcauagacaucaug

SEQ ID NO: 721871 - RNA, 19 nt, Artificial Sequence
  Description of Artificial Sequence: Synthetic oligonucleotide
gugugacuuauaauguuca

SEQ ID NO: 721872 - RNA, 19 nt, Artificial Sequence
  Description of Artificial Sequence: Synthetic oligonucleotide
guugccagagaggucgagc

SEQ ID NO: 721873 - RNA, 19 nt, Artificial Sequence
  Description of Artificial Sequence: Synthetic oligonucleotide
caacauugggcggcggucc

SEQ ID NO: 721874 - RNA, 19 nt, Artificial Sequence
  Description of Artificial Sequence: Synthetic oligonucleotide
ucccacuaacuugggaagc

SEQ ID NO: 721875 - RNA, 19 nt, Artificial Sequence
  Description of Artificial Sequence: Synthetic oligonucleotide
acgacgcccacacgaaugu

SEQ ID NO: 721876 - RNA, 19 nt, Artificial Sequence
  Description of Artificial Sequence: Synthetic oligonucleotide
cacgucagugauuggcaug

SEQ ID NO: 721877 - RNA, 19 nt, Artificial Sequence
  Description of Artificial Sequence: Synthetic oligonucleotide
ccacuuacaacucuuuuca

SEQ ID NO: 721878 - RNA, 19 nt, Artificial Sequence
  Description of Artificial Sequence: Synthetic oligonucleotide
acuugggauugaauaagca

SEQ ID NO: 721879 - RNA, 19 nt, Artificial Sequence
  Description of Artificial Sequence: Synthetic oligonucleotide
cacauugggaaggccuacg

SEQ ID NO: 721880 - RNA, 19 nt, Artificial Sequence
  Description of Artificial Sequence: Synthetic oligonucleotide
cacacgucagugauuggca

SEQ ID NO: 721881 - RNA, 19 nt, Artificial Sequence
  Description of Artificial Sequence: Synthetic oligonucleotide
agacaacuuauuggcaagu

SEQ ID NO: 721882 - RNA, 19 nt, Artificial Sequence
  Description of Artificial Sequence: Synthetic oligonucleotide
ugaacgcuucugcaauuuu

SEQ ID NO: 721883 - RNA, 19 nt, Artificial Sequence
  Description of Artificial Sequence: Synthetic oligonucleotide
uucucccacggccaagcau

SEQ ID NO: 721884 - RNA, 19 nt, Artificial Sequence
  Description of Artificial Sequence: Synthetic oligonucleotide
acacgcacggcugcgcuuc

SEQ ID NO: 721885 - RNA, 19 nt, Artificial Sequence
  Description of Artificial Sequence: Synthetic oligonucleotide
gcaauuacgcaggauggug

SEQ ID NO: 721886 - RNA, 19 nt, Artificial Sequence
  Description of Artificial Sequence: Synthetic oligonucleotide
uauauacggugguuuuauu

SEQ ID NO: 721887 - RNA, 19 nt, Artificial Sequence
  Description of Artificial Sequence: Synthetic oligonucleotide
agcauuccauggugucuuc

SEQ ID NO: 721888 - RNA, 19 nt, Artificial Sequence
  Description of Artificial Sequence: Synthetic oligonucleotide
uggacgcaauuacgcagga

SEQ ID NO: 721889 - RNA, 19 nt, Artificial Sequence
  Description of Artificial Sequence: Synthetic oligonucleotide
gagaaucgaauugccaucu

SEQ ID NO: 721890 - RNA, 19 nt, Artificial Sequence
  Description of Artificial Sequence: Synthetic oligonucleotide
ugcguuuagcccaccccau

SEQ ID NO: 721891 - RNA, 19 nt, Artificial Sequence
  Description of Artificial Sequence: Synthetic oligonucleotide
cacacgaauguggguacgc

SEQ ID NO: 721892 - RNA, 19 nt, Artificial Sequence
  Description of Artificial Sequence: Synthetic oligonucleotide
guaaucccacuaacuuggg

SEQ ID NO: 721893 - RNA, 19 nt, Artificial Sequence
  Description of Artificial Sequence: Synthetic oligonucleotide
auguggguacgcacuuccc

SEQ ID NO: 721894 - RNA, 19 nt, Artificial Sequence
  Description of Artificial Sequence: Synthetic oligonucleotide
gguguucuaauauguaggu

SEQ ID NO: 721895 - RNA, 19 nt, Artificial Sequence
  Description of Artificial Sequence: Synthetic oligonucleotide
ugaugacaauggagggcac

SEQ ID NO: 721896 - RNA, 19 nt, Artificial Sequence
  Description of Artificial Sequence: Synthetic oligonucleotide
gauugguacaauacccagu

SEQ ID NO: 721897 - RNA, 19 nt, Artificial Sequence
  Description of Artificial Sequence: Synthetic oligonucleotide
ucugaacgcuucugcaauu

SEQ ID NO: 721898 - RNA, 19 nt, Artificial Sequence
  Description of Artificial Sequence: Synthetic oligonucleotide
gauagccgggcguuggugu

SEQ ID NO: 721899 - RNA, 19 nt, Artificial Sequence
  Description of Artificial Sequence: Synthetic oligonucleotide
cuauuuucaccagcggaga

SEQ ID NO: 721900 - RNA, 19 nt, Artificial Sequence
  Description of Artificial Sequence: Synthetic oligonucleotide
cagcuuaguaauagaaugu

SEQ ID NO: 721901 - RNA, 19 nt, Artificial Sequence
  Description of Artificial Sequence: Synthetic oligonucleotide
gaagugggucugucuccag

SEQ ID NO: 721902 - RNA, 19 nt, Artificial Sequence
  Description of Artificial Sequence: Synthetic oligonucleotide
uguugacgguuuggauugg

SEQ ID NO: 721903 - RNA, 19 nt, Artificial Sequence
  Description of Artificial Sequence: Synthetic oligonucleotide
caaucuuauauacgguggu

SEQ ID NO: 721904 - RNA, 19 nt, Artificial Sequence
  Description of Artificial Sequence: Synthetic oligonucleotide
uuagcccaccccaucuguu

SEQ ID NO: 721905 - RNA, 19 nt, Artificial Sequence
  Description of Artificial Sequence: Synthetic oligonucleotide
acgcccacacgaauguggg

SEQ ID NO: 721906 - RNA, 19 nt, Artificial Sequence
  Description of Artificial Sequence: Synthetic oligonucleotide
gcacacgucagugauuggc

SEQ ID NO: 721907 - RNA, 19 nt, Artificial Sequence
  Description of Artificial Sequence: Synthetic oligonucleotide
gguugaucagucaccagca

SEQ ID NO: 721908 - RNA, 19 nt, Artificial Sequence
  Description of Artificial Sequence: Synthetic oligonucleotide
ccacauugcguuuagccca

SEQ ID NO: 721909 - RNA, 19 nt, Artificial Sequence
  Description of Artificial Sequence: Synthetic oligonucleotide
acgguuuggauugguacaa

SEQ ID NO: 721910 - RNA, 19 nt, Artificial Sequence
  Description of Artificial Sequence: Synthetic oligonucleotide
gaugccaaagccuggccuu

SEQ ID NO: 721911 - RNA, 19 nt, Artificial Sequence
  Description of Artificial Sequence: Synthetic oligonucleotide
aaggccuacgacgcccaca

SEQ ID NO: 721912 - RNA, 19 nt, Artificial Sequence
  Description of Artificial Sequence: Synthetic oligonucleotide
gcacauggacgcaauuacg

SEQ ID NO: 721913 - RNA, 19 nt, Artificial Sequence
  Description of Artificial Sequence: Synthetic oligonucleotide
gggagaaucgaauugccau

SEQ ID NO: 721914 - RNA, 19 nt, Artificial Sequence
  Description of Artificial Sequence: Synthetic oligonucleotide
caucuguugacgguuugga

SEQ ID NO: 721915 - RNA, 19 nt, Artificial Sequence
  Description of Artificial Sequence: Synthetic oligonucleotide
cuguucaauuccacuuaca

SEQ ID NO: 721916 - RNA, 19 nt, Artificial Sequence
  Description of Artificial Sequence: Synthetic oligonucleotide
cucuagguugcgagcgcug

SEQ ID NO: 721917 - RNA, 19 nt, Artificial Sequence
  Description of Artificial Sequence: Synthetic oligonucleotide
uugggcggcgguccacuga

SEQ ID NO: 721918 - RNA, 19 nt, Artificial Sequence
  Description of Artificial Sequence: Synthetic oligonucleotide
agggagaaucgaauugcca

SEQ ID NO: 721919 - RNA, 19 nt, Artificial Sequence
  Description of Artificial Sequence: Synthetic oligonucleotide
agcacacgucagugauugg

SEQ ID NO: 721920 - RNA, 19 nt, Artificial Sequence
  Description of Artificial Sequence: Synthetic oligonucleotide
gccuacgacgcccacacga

SEQ ID NO: 721921 - RNA, 19 nt, Artificial Sequence
  Description of Artificial Sequence: Synthetic oligonucleotide
acacgaauguggguacgca

SEQ ID NO: 721922 - RNA, 19 nt, Artificial Sequence
  Description of Artificial Sequence: Synthetic oligonucleotide
cacggccaagcauuccaug

SEQ ID NO: 721923 - RNA, 19 nt, Artificial Sequence
  Description of Artificial Sequence: Synthetic oligonucleotide
gggcuuauaaacuguauuu

SEQ ID NO: 721924 - RNA, 19 nt, Artificial Sequence
  Description of Artificial Sequence: Synthetic oligonucleotide
cucccacgcuacacgcacg

SEQ ID NO: 721925 - RNA, 19 nt, Artificial Sequence
  Description of Artificial Sequence: Synthetic oligonucleotide
cucaacuguaaaggauguc

SEQ ID NO: 721926 - RNA, 19 nt, Artificial Sequence
  Description of Artificial Sequence: Synthetic oligonucleotide
gaauguggguacgcacuuc

SEQ ID NO: 721927 - RNA, 19 nt, Artificial Sequence
  Description of Artificial Sequence: Synthetic oligonucleotide
acuccauaauagguuggaa

SEQ ID NO: 721928 - RNA, 19 nt, Artificial Sequence
  Description of Artificial Sequence: Synthetic oligonucleotide
aggauagccgggcguuggu

SEQ ID NO: 721929 - RNA, 19 nt, Artificial Sequence
  Description of Artificial Sequence: Synthetic oligonucleotide
auacccagugagguuucca

SEQ ID NO: 721930 - RNA, 19 nt, Artificial Sequence
  Description of Artificial Sequence: Synthetic oligonucleotide
guggguacgcacuuccccu

SEQ ID NO: 721931 - RNA, 19 nt, Artificial Sequence
  Description of Artificial Sequence: Synthetic oligonucleotide
uggguacgcacuuccccua

SEQ ID NO: 721932 - RNA, 19 nt, Artificial Sequence
  Description of Artificial Sequence: Synthetic oligonucleotide
acauugggcggcgguccac

SEQ ID NO: 721933 - RNA, 19 nt, Artificial Sequence
  Description of Artificial Sequence: Synthetic oligonucleotide
gucuaacaugugugaggac

SEQ ID NO: 721934 - RNA, 19 nt, Artificial Sequence
  Description of Artificial Sequence: Synthetic oligonucleotide
auucucccacggccaagca

SEQ ID NO: 721935 - RNA, 19 nt, Artificial Sequence
  Description of Artificial Sequence: Synthetic oligonucleotide
auugggcggcgguccacug

SEQ ID NO: 721936 - RNA, 19 nt, Artificial Sequence
  Description of Artificial Sequence: Synthetic oligonucleotide
gcucaucggauucucccac

SEQ ID NO: 721937 - RNA, 19 nt, Artificial Sequence
  Description of Artificial Sequence: Synthetic oligonucleotide
cuaaguagaccuccugcau

SEQ ID NO: 721938 - RNA, 19 nt, Artificial Sequence
  Description of Artificial Sequence: Synthetic oligonucleotide
ggaacagcucccacgcuac

SEQ ID NO: 721939 - RNA, 19 nt, Artificial Sequence
  Description of Artificial Sequence: Synthetic oligonucleotide
ggcagagugugaguaggug

SEQ ID NO: 721940 - RNA, 19 nt, Artificial Sequence
  Description of Artificial Sequence: Synthetic oligonucleotide
cuaggauagccgggcguug

SEQ ID NO: 721941 - RNA, 19 nt, Artificial Sequence
  Description of Artificial Sequence: Synthetic oligonucleotide
auagccgggcguugguguu

SEQ ID NO: 721942 - RNA, 19 nt, Artificial Sequence
  Description of Artificial Sequence: Synthetic oligonucleotide
gcucccacgcuacacgcac

SEQ ID NO: 721943 - RNA, 19 nt, Artificial Sequence
  Description of Artificial Sequence: Synthetic oligonucleotide
gggaaggccuacgacgccc

SEQ ID NO: 721944 - RNA, 19 nt, Artificial Sequence
  Description of Artificial Sequence: Synthetic oligonucleotide
gauguaguggauggaugau

SEQ ID NO: 721945 - RNA, 19 nt, Artificial Sequence
  Description of Artificial Sequence: Synthetic oligonucleotide
caauaucaaagaccucagu

SEQ ID NO: 721946 - RNA, 19 nt, Artificial Sequence
  Description of Artificial Sequence: Synthetic oligonucleotide
caaguuuaucugaacgcuu

SEQ ID NO: 721947 - RNA, 19 nt, Artificial Sequence
  Description of Artificial Sequence: Synthetic oligonucleotide
gaacagcucccacgcuaca

SEQ ID NO: 721948 - RNA, 19 nt, Artificial Sequence
  Description of Artificial Sequence: Synthetic oligonucleotide
ccacuguacgauuguuuug

SEQ ID NO: 721949 - RNA, 19 nt, Artificial Sequence
  Description of Artificial Sequence: Synthetic oligonucleotide
gagcgcugaaggauggucu

SEQ ID NO: 721950 - RNA, 19 nt, Artificial Sequence
  Description of Artificial Sequence: Synthetic oligonucleotide
gaaggccuacgacgcccac

SEQ ID NO: 721951 - RNA, 19 nt, Artificial Sequence
  Description of Artificial Sequence: Synthetic oligonucleotide
auacacccagugauacaga

SEQ ID NO: 721952 - RNA, 19 nt, Artificial Sequence
  Description of Artificial Sequence: Synthetic oligonucleotide
ggguacgcacuuccccuag

SEQ ID NO: 721953 - RNA, 19 nt, Artificial Sequence
  Description of Artificial Sequence: Synthetic oligonucleotide
caucagggagaaucgaauu

SEQ ID NO: 721954 - RNA, 19 nt, Artificial Sequence
  Description of Artificial Sequence: Synthetic oligonucleotide
gaggagaagauugguugau

SEQ ID NO: 721955 - RNA, 19 nt, Artificial Sequence
  Description of Artificial Sequence: Synthetic oligonucleotide
gacaacuuauuggcaaguu

SEQ ID NO: 721956 - RNA, 19 nt, Artificial Sequence
  Description of Artificial Sequence: Synthetic oligonucleotide
cagugcuugcuaggauagc

SEQ ID NO: 721957 - RNA, 19 nt, Artificial Sequence
  Description of Artificial Sequence: Synthetic oligonucleotide
cagugucgucacaguugcc

SEQ ID NO: 721958 - RNA, 19 nt, Artificial Sequence
  Description of Artificial Sequence: Synthetic oligonucleotide
cugugugacuuauaauguu

SEQ ID NO: 721959 - RNA, 19 nt, Artificial Sequence
  Description of Artificial Sequence: Synthetic oligonucleotide
uacacgcacggcugcgcuu

SEQ ID NO: 721960 - RNA, 19 nt, Artificial Sequence
  Description of Artificial Sequence: Synthetic oligonucleotide
ccugugugacuuauaaugu

SEQ ID NO: 721961 - RNA, 19 nt, Artificial Sequence
  Description of Artificial Sequence: Synthetic oligonucleotide
cucccacggccaagcauuc

SEQ ID NO: 721962 - RNA, 19 nt, Artificial Sequence
  Description of Artificial Sequence: Synthetic oligonucleotide
gaucagucaccagcagugu

SEQ ID NO: 721963 - RNA, 19 nt, Artificial Sequence
  Description of Artificial Sequence: Synthetic oligonucleotide
gcggcgguccacugaacug

SEQ ID NO: 721964 - RNA, 19 nt, Artificial Sequence
  Description of Artificial Sequence: Synthetic oligonucleotide
guaguggauggaugauggu

SEQ ID NO: 721965 - RNA, 19 nt, Artificial Sequence
  Description of Artificial Sequence: Synthetic oligonucleotide
ccuguaaucccacuaacuu

SEQ ID NO: 721966 - RNA, 19 nt, Artificial Sequence
  Description of Artificial Sequence: Synthetic oligonucleotide
guagaccuccugcaugaau

SEQ ID NO: 721967 - RNA, 19 nt, Artificial Sequence
  Description of Artificial Sequence: Synthetic oligonucleotide
aggaccuauuagguucaau

SEQ ID NO: 721968 - RNA, 19 nt, Artificial Sequence
  Description of Artificial Sequence: Synthetic oligonucleotide
acccagugauacagaucuc

SEQ ID NO: 721969 - RNA, 19 nt, Artificial Sequence
  Description of Artificial Sequence: Synthetic oligonucleotide
cuagguugcgagcgcugaa

SEQ ID NO: 721970 - RNA, 19 nt, Artificial Sequence
  Description of Artificial Sequence: Synthetic oligonucleotide
ccucugcaacauugggcgg

SEQ ID NO: 721971 - RNA, 19 nt, Artificial Sequence
  Description of Artificial Sequence: Synthetic oligonucleotide
ggcuuauaaacuguauuuu

SEQ ID NO: 721972 - RNA, 19 nt, Artificial Sequence
  Description of Artificial Sequence: Synthetic oligonucleotide
ggacaaugccuggagcauc

SEQ ID NO: 721973 - RNA, 19 nt, Artificial Sequence
  Description of Artificial Sequence: Synthetic oligonucleotide
ggauagccgggcguuggug

SEQ ID NO: 721974 - RNA, 19 nt, Artificial Sequence
  Description of Artificial Sequence: Synthetic oligonucleotide
gguuagguugagacaacua

SEQ ID NO: 721975 - RNA, 19 nt, Artificial Sequence
  Description of Artificial Sequence: Synthetic oligonucleotide
ccuauuagguucaauccuu

SEQ ID NO: 721976 - RNA, 19 nt, Artificial Sequence
  Description of Artificial Sequence: Synthetic oligonucleotide
aguagaccuccugcaugaa

SEQ ID NO: 721977 - RNA, 19 nt, Artificial Sequence
  Description of Artificial Sequence: Synthetic oligonucleotide
ggauucucccacggccaag

SEQ ID NO: 721978 - RNA, 19 nt, Artificial Sequence
  Description of Artificial Sequence: Synthetic oligonucleotide
ccacuaacuugggaagcug

SEQ ID NO: 721979 - RNA, 19 nt, Artificial Sequence
  Description of Artificial Sequence: Synthetic oligonucleotide
cugcaacauugggcggcgg

SEQ ID NO: 721980 - RNA, 19 nt, Artificial Sequence
  Description of Artificial Sequence: Synthetic oligonucleotide
agguggugguccagagacu

SEQ ID NO: 721981 - RNA, 19 nt, Artificial Sequence
  Description of Artificial Sequence: Synthetic oligonucleotide
gcguuuagcccaccccauc

SEQ ID NO: 721982 - RNA, 19 nt, Artificial Sequence
  Description of Artificial Sequence: Synthetic oligonucleotide
cacggcugcgcuucaggcu

SEQ ID NO: 721983 - RNA, 19 nt, Artificial Sequence
  Description of Artificial Sequence: Synthetic oligonucleotide
gcuuaguaauagaauguuu

SEQ ID NO: 721984 - RNA, 19 nt, Artificial Sequence
  Description of Artificial Sequence: Synthetic oligonucleotide
ccuacgacgcccacacgaa

SEQ ID NO: 721985 - RNA, 19 nt, Artificial Sequence
  Description of Artificial Sequence: Synthetic oligonucleotide
cggcgguccacugaacugc

SEQ ID NO: 721986 - RNA, 19 nt, Artificial Sequence
  Description of Artificial Sequence: Synthetic oligonucleotide
ccucaacuguaaaggaugu

SEQ ID NO: 721987 - RNA, 19 nt, Artificial Sequence
  Description of Artificial Sequence: Synthetic oligonucleotide
gcgcugaaggauggucucc

SEQ ID NO: 721988 - RNA, 19 nt, Artificial Sequence
  Description of Artificial Sequence: Synthetic oligonucleotide
gggaggcuaauagaauccu

SEQ ID NO: 721989 - RNA, 19 nt, Artificial Sequence
  Description of Artificial Sequence: Synthetic oligonucleotide
ccacauugggaaggccuac

SEQ ID NO: 721990 - RNA, 19 nt, Artificial Sequence
  Description of Artificial Sequence: Synthetic oligonucleotide
caccagggaacagcuccca

SEQ ID NO: 721991 - RNA, 19 nt, Artificial Sequence
  Description of Artificial Sequence: Synthetic oligonucleotide
gaggaccuauuagguucaa

SEQ ID NO: 721992 - RNA, 19 nt, Artificial Sequence
  Description of Artificial Sequence: Synthetic oligonucleotide
gcaguaugaggagaagauu

SEQ ID NO: 721993 - RNA, 19 nt, Artificial Sequence
  Description of Artificial Sequence: Synthetic oligonucleotide
ccacgcuacacgcacggcu

SEQ ID NO: 721994 - RNA, 19 nt, Artificial Sequence
  Description of Artificial Sequence: Synthetic oligonucleotide
caccucugaauuggguccu

SEQ ID NO: 721995 - RNA, 19 nt, Artificial Sequence
  Description of Artificial Sequence: Synthetic oligonucleotide
cuacgacgcccacacgaau

SEQ ID NO: 721996 - RNA, 19 nt, Artificial Sequence
  Description of Artificial Sequence: Synthetic oligonucleotide
cauugggcggcgguccacu

SEQ ID NO: 721997 - RNA, 19 nt, Artificial Sequence
  Description of Artificial Sequence: Synthetic oligonucleotide
cagagaggucgagcauaga

SEQ ID NO: 721998 - RNA, 19 nt, Artificial Sequence
  Description of Artificial Sequence: Synthetic oligonucleotide
cguuuagcccaccccaucu

SEQ ID NO: 721999 - RNA, 19 nt, Artificial Sequence
  Description of Artificial Sequence: Synthetic oligonucleotide
ggaggcuaauagaauccuu

SEQ ID NO: 722000 - RNA, 19 nt, Artificial Sequence
  Description of Artificial Sequence: Synthetic oligonucleotide
cgcuacacgcacggcugcg

SEQ ID NO: 722001 - RNA, 19 nt, Artificial Sequence
  Description of Artificial Sequence: Synthetic oligonucleotide
gcugcgcuucaggcuguug

SEQ ID NO: 722002 - RNA, 19 nt, Artificial Sequence
  Description of Artificial Sequence: Synthetic oligonucleotide
cccacuaacuugggaagcu

SEQ ID NO: 722003 - RNA, 19 nt, Artificial Sequence
  Description of Artificial Sequence: Synthetic oligonucleotide
cccacgcuacacgcacggc

SEQ ID NO: 722004 - RNA, 19 nt, Artificial Sequence
  Description of Artificial Sequence: Synthetic oligonucleotide
gggcagagugugaguaggu

SEQ ID NO: 722005 - RNA, 19 nt, Artificial Sequence
  Description of Artificial Sequence: Synthetic oligonucleotide
ggacgcaauuacgcaggau

SEQ ID NO: 722006 - RNA, 19 nt, Artificial Sequence
  Description of Artificial Sequence: Synthetic oligonucleotide
ccucuagguugcgagcgcu

SEQ ID NO: 722007 - RNA, 19 nt, Artificial Sequence
  Description of Artificial Sequence: Synthetic oligonucleotide
gcgugggcagagugugagu

SEQ ID NO: 722008 - RNA, 19 nt, Artificial Sequence
  Description of Artificial Sequence: Synthetic oligonucleotide
gcgguccacugaacugcca

SEQ ID NO: 722009 - RNA, 19 nt, Artificial Sequence
  Description of Artificial Sequence: Synthetic oligonucleotide
cgcaauuacgcaggauggu

SEQ ID NO: 722010 - RNA, 19 nt, Artificial Sequence
  Description of Artificial Sequence: Synthetic oligonucleotide
cgacgcccacacgaaugug

SEQ ID NO: 722011 - RNA, 19 nt, Artificial Sequence
  Description of Artificial Sequence: Synthetic oligonucleotide
ggucgagcauagacaucau

SEQ ID NO: 722012 - RNA, 19 nt, Artificial Sequence
  Description of Artificial Sequence: Synthetic oligonucleotide
ccacggccaagcauuccau

SEQ ID NO: 722013 - RNA, 19 nt, Artificial Sequence
  Description of Artificial Sequence: Synthetic oligonucleotide
gcgagcgcugaaggauggu

SEQ ID NO: 722014 - RNA, 19 nt, Artificial Sequence
  Description of Artificial Sequence: Synthetic oligonucleotide
aguuggauagccucgaacc

SEQ ID NO: 722015 - RNA, 19 nt, Artificial Sequence
  Description of Artificial Sequence: Synthetic oligonucleotide
aauaaaugucuguaacggg

SEQ ID NO: 722016 - RNA, 19 nt, Artificial Sequence
  Description of Artificial Sequence: Synthetic oligonucleotide
acuuuagccacauagaccu

SEQ ID NO: 722017 - RNA, 19 nt, Artificial Sequence
  Description of Artificial Sequence: Synthetic oligonucleotide
aaaugaaucccacugcuca

SEQ ID NO: 722018 - RNA, 19 nt, Artificial Sequence
  Description of Artificial Sequence: Synthetic oligonucleotide
uaauauugccaagagaagg

SEQ ID NO: 722019 - RNA, 19 nt, Artificial Sequence
  Description of Artificial Sequence: Synthetic oligonucleotide
uguguaaagaaucaagguc

SEQ ID NO: 722020 - RNA, 19 nt, Artificial Sequence
  Description of Artificial Sequence: Synthetic oligonucleotide
agacacgcaaucaagaucc

SEQ ID NO: 722021 - RNA, 19 nt, Artificial Sequence
  Description of Artificial Sequence: Synthetic oligonucleotide
auaaaugucuguaacgggc

SEQ ID NO: 722022 - RNA, 19 nt, Artificial Sequence
  Description of Artificial Sequence: Synthetic oligonucleotide
caugaugcaaagcugaagc

SEQ ID NO: 722023 - RNA, 19 nt, Artificial Sequence
  Description of Artificial Sequence: Synthetic oligonucleotide
uucggaauguucaaggccc

SEQ ID NO: 722024 - RNA, 19 nt, Artificial Sequence
  Description of Artificial Sequence: Synthetic oligonucleotide
augauuaauaauaaauguc

SEQ ID NO: 722025 - RNA, 19 nt, Artificial Sequence
  Description of Artificial Sequence: Synthetic oligonucleotide
cuuaacuguauuuuaguug

SEQ ID NO: 722026 - RNA, 19 nt, Artificial Sequence
  Description of Artificial Sequence: Synthetic oligonucleotide
aguuucggaauguucaagg

SEQ ID NO: 722027 - RNA, 19 nt, Artificial Sequence
  Description of Artificial Sequence: Synthetic oligonucleotide
agcuugauuagagacacgc

SEQ ID NO: 722028 - RNA, 19 nt, Artificial Sequence
  Description of Artificial Sequence: Synthetic oligonucleotide
aaucuugacaguuucggaa

SEQ ID NO: 722029 - RNA, 19 nt, Artificial Sequence
  Description of Artificial Sequence: Synthetic oligonucleotide
aacaugacgaagugcgcgg

SEQ ID NO: 722030 - RNA, 19 nt, Artificial Sequence
  Description of Artificial Sequence: Synthetic oligonucleotide
uugcuagacauuccuaggg

SEQ ID NO: 722031 - RNA, 19 nt, Artificial Sequence
  Description of Artificial Sequence: Synthetic oligonucleotide
guauaaaccaauuguacca

SEQ ID NO: 722032 - RNA, 19 nt, Artificial Sequence
  Description of Artificial Sequence: Synthetic oligonucleotide
uucgaagucucuaggaccc

SEQ ID NO: 722033 - RNA, 19 nt, Artificial Sequence
  Description of Artificial Sequence: Synthetic oligonucleotide
uuucggaauguucaaggcc

SEQ ID NO: 722034 - RNA, 19 nt, Artificial Sequence
  Description of Artificial Sequence: Synthetic oligonucleotide
accuccauugugcucaccc

SEQ ID NO: 722035 - RNA, 19 nt, Artificial Sequence
  Description of Artificial Sequence: Synthetic oligonucleotide
uccaaguuggcuguagucg

SEQ ID NO: 722036 - RNA, 19 nt, Artificial Sequence
  Description of Artificial Sequence: Synthetic oligonucleotide
agaaucaaggucucuaccu

SEQ ID NO: 722037 - RNA, 19 nt, Artificial Sequence
  Description of Artificial Sequence: Synthetic oligonucleotide
ucuguaacgggcuggcagg

SEQ ID NO: 722038 - RNA, 19 nt, Artificial Sequence
  Description of Artificial Sequence: Synthetic oligonucleotide
ugcuagacauuccuagggg

SEQ ID NO: 722039 - RNA, 19 nt, Artificial Sequence
  Description of Artificial Sequence: Synthetic oligonucleotide
aauauugccaagagaaggu

SEQ ID NO: 722040 - RNA, 19 nt, Artificial Sequence
  Description of Artificial Sequence: Synthetic oligonucleotide
aguucuuuucugugagugc

SEQ ID NO: 722041 - RNA, 19 nt, Artificial Sequence
  Description of Artificial Sequence: Synthetic oligonucleotide
aaaguauaaaccaauugua

SEQ ID NO: 722042 - RNA, 19 nt, Artificial Sequence
  Description of Artificial Sequence: Synthetic oligonucleotide
ugcuaaaaggacugcuugg

SEQ ID NO: 722043 - RNA, 19 nt, Artificial Sequence
  Description of Artificial Sequence: Synthetic oligonucleotide
uuugcgacuccacauaguc

SEQ ID NO: 722044 - RNA, 19 nt, Artificial Sequence
  Description of Artificial Sequence: Synthetic oligonucleotide
aaaacuuuaggguggggua

SEQ ID NO: 722045 - RNA, 19 nt, Artificial Sequence
  Description of Artificial Sequence: Synthetic oligonucleotide
uuuagagagcuccucccag

SEQ ID NO: 722046 - RNA, 19 nt, Artificial Sequence
  Description of Artificial Sequence: Synthetic oligonucleotide
ugcgugaacaugucggccg

SEQ ID NO: 722047 - RNA, 19 nt, Artificial Sequence
  Description of Artificial Sequence: Synthetic oligonucleotide
ucaagcugcuaaaaggacu

SEQ ID NO: 722048 - RNA, 19 nt, Artificial Sequence
  Description of Artificial Sequence: Synthetic oligonucleotide
acaguggaaacauggaugu

SEQ ID NO: 722049 - RNA, 19 nt, Artificial Sequence
  Description of Artificial Sequence: Synthetic oligonucleotide
uguuguacuugucucccag

SEQ ID NO: 722050 - RNA, 19 nt, Artificial Sequence
  Description of Artificial Sequence: Synthetic oligonucleotide
aguguuucgaagucucuag

SEQ ID NO: 722051 - RNA, 19 nt, Artificial Sequence
  Description of Artificial Sequence: Synthetic oligonucleotide
ugugggauagccucgcacc

SEQ ID NO: 722052 - RNA, 19 nt, Artificial Sequence
  Description of Artificial Sequence: Synthetic oligonucleotide
uaaaugucuguaacgggcu

SEQ ID NO: 722053 - RNA, 19 nt, Artificial Sequence
  Description of Artificial Sequence: Synthetic oligonucleotide
gaacaugacgaagugcgcg

SEQ ID NO: 722054 - RNA, 19 nt, Artificial Sequence
  Description of Artificial Sequence: Synthetic oligonucleotide
cacaguggaaacauggaug

SEQ ID NO: 722055 - RNA, 19 nt, Artificial Sequence
  Description of Artificial Sequence: Synthetic oligonucleotide
ugauuagagacacgcaauc

SEQ ID NO: 722056 - RNA, 19 nt, Artificial Sequence
  Description of Artificial Sequence: Synthetic oligonucleotide
cuagacauuccuaggggcc

SEQ ID NO: 722057 - RNA, 19 nt, Artificial Sequence
  Description of Artificial Sequence: Synthetic oligonucleotide
auugccaagagaagguuac

SEQ ID NO: 722058 - RNA, 19 nt, Artificial Sequence
  Description of Artificial Sequence: Synthetic oligonucleotide
gucgccuugagaaacaugc

SEQ ID NO: 722059 - RNA, 19 nt, Artificial Sequence
  Description of Artificial Sequence: Synthetic oligonucleotide
uuuuagagagcuccuccca

SEQ ID NO: 722060 - RNA, 19 nt, Artificial Sequence
  Description of Artificial Sequence: Synthetic oligonucleotide
ugugaaccacacaugauua

SEQ ID NO: 722061 - RNA, 19 nt, Artificial Sequence
  Description of Artificial Sequence: Synthetic oligonucleotide
uccacuuuagccacauaga

SEQ ID NO: 722062 - RNA, 19 nt, Artificial Sequence
  Description of Artificial Sequence: Synthetic oligonucleotide
ggucaaaugaaucccacug

SEQ ID NO: 722063 - RNA, 19 nt, Artificial Sequence
  Description of Artificial Sequence: Synthetic oligonucleotide
uggauugccacugaaaaua

SEQ ID NO: 722064 - RNA, 19 nt, Artificial Sequence
  Description of Artificial Sequence: Synthetic oligonucleotide
caaaguuguuggcugagag

SEQ ID NO: 722065 - RNA, 19 nt, Artificial Sequence
  Description of Artificial Sequence: Synthetic oligonucleotide
ucuuaacuguauuuuaguu

SEQ ID NO: 722066 - RNA, 19 nt, Artificial Sequence
  Description of Artificial Sequence: Synthetic oligonucleotide
uugauuagagacacgcaau

SEQ ID NO: 722067 - RNA, 19 nt, Artificial Sequence
  Description of Artificial Sequence: Synthetic oligonucleotide
uuaguugcaagggaagcca

SEQ ID NO: 722068 - RNA, 19 nt, Artificial Sequence
  Description of Artificial Sequence: Synthetic oligonucleotide
agugcagucuacuuuugca

SEQ ID NO: 722069 - RNA, 19 nt, Artificial Sequence
  Description of Artificial Sequence: Synthetic oligonucleotide
auagccucgaaccugguuu

SEQ ID NO: 722070 - RNA, 19 nt, Artificial Sequence
  Description of Artificial Sequence: Synthetic oligonucleotide
auuccuaggggccaagaga

SEQ ID NO: 722071 - RNA, 19 nt, Artificial Sequence
  Description of Artificial Sequence: Synthetic oligonucleotide
cuccuuaccauacauucug

SEQ ID NO: 722072 - RNA, 19 nt, Artificial Sequence
  Description of Artificial Sequence: Synthetic oligonucleotide
gucuccuuaccauacauuc

SEQ ID NO: 722073 - RNA, 19 nt, Artificial Sequence
  Description of Artificial Sequence: Synthetic oligonucleotide
ggagcauagaacuugacaa

SEQ ID NO: 722074 - RNA, 19 nt, Artificial Sequence
  Description of Artificial Sequence: Synthetic oligonucleotide
uuugcaacggugaccucug

SEQ ID NO: 722075 - RNA, 19 nt, Artificial Sequence
  Description of Artificial Sequence: Synthetic oligonucleotide
cuugauuagagacacgcaa

SEQ ID NO: 722076 - RNA, 19 nt, Artificial Sequence
  Description of Artificial Sequence: Synthetic oligonucleotide
ugguuuuaaaggacagcug

SEQ ID NO: 722077 - RNA, 19 nt, Artificial Sequence
  Description of Artificial Sequence: Synthetic oligonucleotide
ucggaaaagcagcaaugug

SEQ ID NO: 722078 - RNA, 19 nt, Artificial Sequence
  Description of Artificial Sequence: Synthetic oligonucleotide
cugacguaggacaaagcug

SEQ ID NO: 722079 - RNA, 19 nt, Artificial Sequence
  Description of Artificial Sequence: Synthetic oligonucleotide
aggacaaagcuguguaaag

SEQ ID NO: 722080 - RNA, 19 nt, Artificial Sequence
  Description of Artificial Sequence: Synthetic oligonucleotide
ggucauuccaaguuggcug

SEQ ID NO: 722081 - RNA, 19 nt, Artificial Sequence
  Description of Artificial Sequence: Synthetic oligonucleotide
ucgaaccugguuuucugag

SEQ ID NO: 722082 - RNA, 19 nt, Artificial Sequence
  Description of Artificial Sequence: Synthetic oligonucleotide
aacaugucggccguguaca

SEQ ID NO: 722083 - RNA, 19 nt, Artificial Sequence
  Description of Artificial Sequence: Synthetic oligonucleotide
uacuucaccgcuucuuggc

SEQ ID NO: 722084 - RNA, 19 nt, Artificial Sequence
  Description of Artificial Sequence: Synthetic oligonucleotide
ucgaccuugccaaucuuga

SEQ ID NO: 722085 - RNA, 19 nt, Artificial Sequence
  Description of Artificial Sequence: Synthetic oligonucleotide
aguggucgccuugagaaac

SEQ ID NO: 722086 - RNA, 19 nt, Artificial Sequence
  Description of Artificial Sequence: Synthetic oligonucleotide
gaaccugguuuucugagca

SEQ ID NO: 722087 - RNA, 19 nt, Artificial Sequence
  Description of Artificial Sequence: Synthetic oligonucleotide
agcgaagaacuugauaaag

SEQ ID NO: 722088 - RNA, 19 nt, Artificial Sequence
  Description of Artificial Sequence: Synthetic oligonucleotide
gaaucaaggucucuaccuc

SEQ ID NO: 722089 - RNA, 19 nt, Artificial Sequence
  Description of Artificial Sequence: Synthetic oligonucleotide
uggcugagagcucauacaa

SEQ ID NO: 722090 - RNA, 19 nt, Artificial Sequence
  Description of Artificial Sequence: Synthetic oligonucleotide
auuuuaguugcaagggaag

SEQ ID NO: 722091 - RNA, 19 nt, Artificial Sequence
  Description of Artificial Sequence: Synthetic oligonucleotide
gacauuacgcucagcagug

SEQ ID NO: 722092 - RNA, 19 nt, Artificial Sequence
  Description of Artificial Sequence: Synthetic oligonucleotide
guaacgggcuggcagggcg

SEQ ID NO: 722093 - RNA, 19 nt, Artificial Sequence
  Description of Artificial Sequence: Synthetic oligonucleotide
ugcaagggaagccaauuua

SEQ ID NO: 722094 - RNA, 19 nt, Artificial Sequence
  Description of Artificial Sequence: Synthetic oligonucleotide
ugcauuugcgacuccacau

SEQ ID NO: 722095 - RNA, 19 nt, Artificial Sequence
  Description of Artificial Sequence: Synthetic oligonucleotide
ccugcuuaagcucaggggc

SEQ ID NO: 722096 - RNA, 19 nt, Artificial Sequence
  Description of Artificial Sequence: Synthetic oligonucleotide
acgcaaucaagauccguag

SEQ ID NO: 722097 - RNA, 19 nt, Artificial Sequence
  Description of Artificial Sequence: Synthetic oligonucleotide
accguuuucuggcuaacca

SEQ ID NO: 722098 - RNA, 19 nt, Artificial Sequence
  Description of Artificial Sequence: Synthetic oligonucleotide
uauaaaccaauuguaccau

SEQ ID NO: 722099 - RNA, 19 nt, Artificial Sequence
  Description of Artificial Sequence: Synthetic oligonucleotide
cugcuaaaaggacugcuug

SEQ ID NO: 722100 - RNA, 19 nt, Artificial Sequence
  Description of Artificial Sequence: Synthetic oligonucleotide
ucaugaugcaaagcugaag

SEQ ID NO: 722101 - RNA, 19 nt, Artificial Sequence
  Description of Artificial Sequence: Synthetic oligonucleotide
auugugcucacccacuuuu

SEQ ID NO: 722102 - RNA, 19 nt, Artificial Sequence
  Description of Artificial Sequence: Synthetic oligonucleotide
ucgaaaccagagcagaguu

SEQ ID NO: 722103 - RNA, 19 nt, Artificial Sequence
  Description of Artificial Sequence: Synthetic oligonucleotide
uacaaccccugcuuaagcu

SEQ ID NO: 722104 - RNA, 19 nt, Artificial Sequence
  Description of Artificial Sequence: Synthetic oligonucleotide
auagccucgcaccgaguac

SEQ ID NO: 722105 - RNA, 19 nt, Artificial Sequence
  Description of Artificial Sequence: Synthetic oligonucleotide
aacuuuagggugggguauc

SEQ ID NO: 722106 - RNA, 19 nt, Artificial Sequence
  Description of Artificial Sequence: Synthetic oligonucleotide
uauugccaagagaagguua

SEQ ID NO: 722107 - RNA, 19 nt, Artificial Sequence
  Description of Artificial Sequence: Synthetic oligonucleotide
guguuucgaagucucuagg

SEQ ID NO: 722108 - RNA, 19 nt, Artificial Sequence
  Description of Artificial Sequence: Synthetic oligonucleotide
accauuugaguuuucuuuu

SEQ ID NO: 722109 - RNA, 19 nt, Artificial Sequence
  Description of Artificial Sequence: Synthetic oligonucleotide
cauuugcgacuccacauag

SEQ ID NO: 722110 - RNA, 19 nt, Artificial Sequence
  Description of Artificial Sequence: Synthetic oligonucleotide
agagacacgcaaucaagau

SEQ ID NO: 722111 - RNA, 19 nt, Artificial Sequence
  Description of Artificial Sequence: Synthetic oligonucleotide
gccaauuuaauauugccaa

SEQ ID NO: 722112 - RNA, 19 nt, Artificial Sequence
  Description of Artificial Sequence: Synthetic oligonucleotide
auccguagugugugguggc

SEQ ID NO: 722113 - RNA, 19 nt, Artificial Sequence
  Description of Artificial Sequence: Synthetic oligonucleotide
gagcacacaucggaguugg

SEQ ID NO: 722114 - RNA, 19 nt, Artificial Sequence
  Description of Artificial Sequence: Synthetic oligonucleotide
cagacauuacgcucagcag

SEQ ID NO: 722115 - RNA, 19 nt, Artificial Sequence
  Description of Artificial Sequence: Synthetic oligonucleotide
gauaaaguggucgccuuga

SEQ ID NO: 722116 - RNA, 19 nt, Artificial Sequence
  Description of Artificial Sequence: Synthetic oligonucleotide
gaagucucuaggacccugg

SEQ ID NO: 722117 - RNA, 19 nt, Artificial Sequence
  Description of Artificial Sequence: Synthetic oligonucleotide
ugacaguuucggaauguuc

SEQ ID NO: 722118 - RNA, 19 nt, Artificial Sequence
  Description of Artificial Sequence: Synthetic oligonucleotide
uccucggaaaagcagcaau

SEQ ID NO: 722119 - RNA, 19 nt, Artificial Sequence
  Description of Artificial Sequence: Synthetic oligonucleotide
uggcuaaccacaguggaaa

SEQ ID NO: 722120 - RNA, 19 nt, Artificial Sequence
  Description of Artificial Sequence: Synthetic oligonucleotide
aaacuuuagggugggguau

SEQ ID NO: 722121 - RNA, 19 nt, Artificial Sequence
  Description of Artificial Sequence: Synthetic oligonucleotide
gcuaaaaggacugcuuggg

SEQ ID NO: 722122 - RNA, 19 nt, Artificial Sequence
  Description of Artificial Sequence: Synthetic oligonucleotide
cauggagcgaagaacuuga

SEQ ID NO: 722123 - RNA, 19 nt, Artificial Sequence
  Description of Artificial Sequence: Synthetic oligonucleotide
augucuguaacgggcuggc

SEQ ID NO: 722124 - RNA, 19 nt, Artificial Sequence
  Description of Artificial Sequence: Synthetic oligonucleotide
gauuagagacacgcaauca

SEQ ID NO: 722125 - RNA, 19 nt, Artificial Sequence
  Description of Artificial Sequence: Synthetic oligonucleotide
augacgaagugcgcggcgc

SEQ ID NO: 722126 - RNA, 19 nt, Artificial Sequence
  Description of Artificial Sequence: Synthetic oligonucleotide
agugacuccaagucccgcu

SEQ ID NO: 722127 - RNA, 19 nt, Artificial Sequence
  Description of Artificial Sequence: Synthetic oligonucleotide
cucaagcugcuaaaaggac

SEQ ID NO: 722128 - RNA, 19 nt, Artificial Sequence
  Description of Artificial Sequence: Synthetic oligonucleotide
cugcuuaagcucaggggcc

SEQ ID NO: 722129 - RNA, 19 nt, Artificial Sequence
  Description of Artificial Sequence: Synthetic oligonucleotide
gcagacauuacgcucagca

SEQ ID NO: 722130 - RNA, 19 nt, Artificial Sequence
  Description of Artificial Sequence: Synthetic oligonucleotide
gguucgacagucuccgggg

SEQ ID NO: 722131 - RNA, 19 nt, Artificial Sequence
  Description of Artificial Sequence: Synthetic oligonucleotide
agaacaugacgaagugcgc

SEQ ID NO: 722132 - RNA, 19 nt, Artificial Sequence
  Description of Artificial Sequence: Synthetic oligonucleotide
uccauugugcucacccacu

SEQ ID NO: 722133 - RNA, 19 nt, Artificial Sequence
  Description of Artificial Sequence: Synthetic oligonucleotide
gccaagagaagguuacagg

SEQ ID NO: 722134 - RNA, 19 nt, Artificial Sequence
  Description of Artificial Sequence: Synthetic oligonucleotide
ugcgcggcgcuuuggaucc

SEQ ID NO: 722135 - RNA, 19 nt, Artificial Sequence
  Description of Artificial Sequence: Synthetic oligonucleotide
gacucaugaugcaaagcug

SEQ ID NO: 722136 - RNA, 19 nt, Artificial Sequence
  Description of Artificial Sequence: Synthetic oligonucleotide
uuacaggguggauugccac

SEQ ID NO: 722137 - RNA, 19 nt, Artificial Sequence
  Description of Artificial Sequence: Synthetic oligonucleotide
uacaagacucaugaugcaa

SEQ ID NO: 722138 - RNA, 19 nt, Artificial Sequence
  Description of Artificial Sequence: Synthetic oligonucleotide
aggaaguagacuuggucuu

SEQ ID NO: 722139 - RNA, 19 nt, Artificial Sequence
  Description of Artificial Sequence: Synthetic oligonucleotide
uccauagugcugugugcag

SEQ ID NO: 722140 - RNA, 19 nt, Artificial Sequence
  Description of Artificial Sequence: Synthetic oligonucleotide
cauuccuaggggccaagag

SEQ ID NO: 722141 - RNA, 19 nt, Artificial Sequence
  Description of Artificial Sequence: Synthetic oligonucleotide
gugggauagccucgcaccg

SEQ ID NO: 722142 - RNA, 19 nt, Artificial Sequence
  Description of Artificial Sequence: Synthetic oligonucleotide
uucaccgcuucuuggccag

SEQ ID NO: 722143 - RNA, 19 nt, Artificial Sequence
  Description of Artificial Sequence: Synthetic oligonucleotide
uccaagucccgcuuucccu

SEQ ID NO: 722144 - RNA, 19 nt, Artificial Sequence
  Description of Artificial Sequence: Synthetic oligonucleotide
ggacacaccguuuucuggc

SEQ ID NO: 722145 - RNA, 19 nt, Artificial Sequence
  Description of Artificial Sequence: Synthetic oligonucleotide
cuacuuuugcaacggugac

SEQ ID NO: 722146 - RNA, 19 nt, Artificial Sequence
  Description of Artificial Sequence: Synthetic oligonucleotide
gagaagauacacaggcuga

SEQ ID NO: 722147 - RNA, 19 nt, Artificial Sequence
  Description of Artificial Sequence: Synthetic oligonucleotide
uggcuguagucgcuggcag

SEQ ID NO: 722148 - RNA, 19 nt, Artificial Sequence
  Description of Artificial Sequence: Synthetic oligonucleotide
uaacuguauuuuaguugca

SEQ ID NO: 722149 - RNA, 19 nt, Artificial Sequence
  Description of Artificial Sequence: Synthetic oligonucleotide
gguggauugccacugaaaa

SEQ ID NO: 722150 - RNA, 19 nt, Artificial Sequence
  Description of Artificial Sequence: Synthetic oligonucleotide
uauccccgcacacccuggg

SEQ ID NO: 722151 - RNA, 19 nt, Artificial Sequence
  Description of Artificial Sequence: Synthetic oligonucleotide
agauccguaguguguggug

SEQ ID NO: 722152 - RNA, 19 nt, Artificial Sequence
  Description of Artificial Sequence: Synthetic oligonucleotide
uggugcagacauuacgcuc

SEQ ID NO: 722153 - RNA, 19 nt, Artificial Sequence
  Description of Artificial Sequence: Synthetic oligonucleotide
gauagccucgcaccgagua

SEQ ID NO: 722154 - RNA, 19 nt, Artificial Sequence
  Description of Artificial Sequence: Synthetic oligonucleotide
ugccugacguaggacaaag

SEQ ID NO: 722155 - RNA, 19 nt, Artificial Sequence
  Description of Artificial Sequence: Synthetic oligonucleotide
uccuuaccauacauucugu

SEQ ID NO: 722156 - RNA, 19 nt, Artificial Sequence
  Description of Artificial Sequence: Synthetic oligonucleotide
acaugacgaagugcgcggc

SEQ ID NO: 722157 - RNA, 19 nt, Artificial Sequence
  Description of Artificial Sequence: Synthetic oligonucleotide
gcuagacauuccuaggggc

SEQ ID NO: 722158 - RNA, 19 nt, Artificial Sequence
  Description of Artificial Sequence: Synthetic oligonucleotide
gacccugguacuucaccgc

SEQ ID NO: 722159 - RNA, 19 nt, Artificial Sequence
  Description of Artificial Sequence: Synthetic oligonucleotide
caagauccguagugugugg

SEQ ID NO: 722160 - RNA, 19 nt, Artificial Sequence
  Description of Artificial Sequence: Synthetic oligonucleotide
auuacgcucagcagugcag

SEQ ID NO: 722161 - RNA, 19 nt, Artificial Sequence
  Description of Artificial Sequence: Synthetic oligonucleotide
aagauccguaguguguggu

SEQ ID NO: 722162 - RNA, 19 nt, Artificial Sequence
  Description of Artificial Sequence: Synthetic oligonucleotide
cuccauugugcucacccac

SEQ ID NO: 722163 - RNA, 19 nt, Artificial Sequence
  Description of Artificial Sequence: Synthetic oligonucleotide
gagcucauacaaccccugc

SEQ ID NO: 722164 - RNA, 19 nt, Artificial Sequence
  Description of Artificial Sequence: Synthetic oligonucleotide
acaguuucggaauguucaa

SEQ ID NO: 722165 - RNA, 19 nt, Artificial Sequence
  Description of Artificial Sequence: Synthetic oligonucleotide
ggaagccaauuuaauauug

SEQ ID NO: 722166 - RNA, 19 nt, Artificial Sequence
  Description of Artificial Sequence: Synthetic oligonucleotide
uugcgacuccacauagucu

SEQ ID NO: 722167 - RNA, 19 nt, Artificial Sequence
  Description of Artificial Sequence: Synthetic oligonucleotide
uugauaaaguggucgccuu

SEQ ID NO: 722168 - RNA, 19 nt, Artificial Sequence
  Description of Artificial Sequence: Synthetic oligonucleotide
caugacgaagugcgcggcg

SEQ ID NO: 722169 - RNA, 19 nt, Artificial Sequence
  Description of Artificial Sequence: Synthetic oligonucleotide
aguuuuccaguguuucgaa

SEQ ID NO: 722170 - RNA, 19 nt, Artificial Sequence
  Description of Artificial Sequence: Synthetic oligonucleotide
aaacugccaacugcagucu

SEQ ID NO: 722171 - RNA, 19 nt, Artificial Sequence
  Description of Artificial Sequence: Synthetic oligonucleotide
ggcgcgaagaacaugacga

SEQ ID NO: 722172 - RNA, 19 nt, Artificial Sequence
  Description of Artificial Sequence: Synthetic oligonucleotide
aagugcgcggcgcuuugga

SEQ ID NO: 722173 - RNA, 19 nt, Artificial Sequence
  Description of Artificial Sequence: Synthetic oligonucleotide
cagggcgcgaagaacauga

SEQ ID NO: 722174 - RNA, 19 nt, Artificial Sequence
  Description of Artificial Sequence: Synthetic oligonucleotide
ggguucgacagucuccggg

SEQ ID NO: 722175 - RNA, 19 nt, Artificial Sequence
  Description of Artificial Sequence: Synthetic oligonucleotide
gccucugaggguucgacag

SEQ ID NO: 722176 - RNA, 19 nt, Artificial Sequence
  Description of Artificial Sequence: Synthetic oligonucleotide
acacaucggaguuggcugu

SEQ ID NO: 722177 - RNA, 19 nt, Artificial Sequence
  Description of Artificial Sequence: Synthetic oligonucleotide
aacgggcuggcagggcgcc

SEQ ID NO: 722178 - RNA, 19 nt, Artificial Sequence
  Description of Artificial Sequence: Synthetic oligonucleotide
auaaaccaauuguaccauu

SEQ ID NO: 722179 - RNA, 19 nt, Artificial Sequence
  Description of Artificial Sequence: Synthetic oligonucleotide
ucggaauguucaaggccca

SEQ ID NO: 722180 - RNA, 19 nt, Artificial Sequence
  Description of Artificial Sequence: Synthetic oligonucleotide
ugcucaugggaggugggug

SEQ ID NO: 722181 - RNA, 19 nt, Artificial Sequence
  Description of Artificial Sequence: Synthetic oligonucleotide
ccaauuuaauauugccaag

SEQ ID NO: 722182 - RNA, 19 nt, Artificial Sequence
  Description of Artificial Sequence: Synthetic oligonucleotide
acaagacucaugaugcaaa

SEQ ID NO: 722183 - RNA, 19 nt, Artificial Sequence
  Description of Artificial Sequence: Synthetic oligonucleotide
cacgcaaucaagauccgua

SEQ ID NO: 722184 - RNA, 19 nt, Artificial Sequence
  Description of Artificial Sequence: Synthetic oligonucleotide
ccacuuuagccacauagac

SEQ ID NO: 722185 - RNA, 19 nt, Artificial Sequence
  Description of Artificial Sequence: Synthetic oligonucleotide
cuguguaaagaaucaaggu

SEQ ID NO: 722186 - RNA, 19 nt, Artificial Sequence
  Description of Artificial Sequence: Synthetic oligonucleotide
ucgccuugagaaacaugca

SEQ ID NO: 722187 - RNA, 19 nt, Artificial Sequence
  Description of Artificial Sequence: Synthetic oligonucleotide
caggucauuccaaguuggc

SEQ ID NO: 722188 - RNA, 19 nt, Artificial Sequence
  Description of Artificial Sequence: Synthetic oligonucleotide
gaugucacuccuaugcacu

SEQ ID NO: 722189 - RNA, 19 nt, Artificial Sequence
  Description of Artificial Sequence: Synthetic oligonucleotide
acauuacgcucagcagugc

SEQ ID NO: 722190 - RNA, 19 nt, Artificial Sequence
  Description of Artificial Sequence: Synthetic oligonucleotide
ccgugcgugaacaugucgg

SEQ ID NO: 722191 - RNA, 19 nt, Artificial Sequence
  Description of Artificial Sequence: Synthetic oligonucleotide
auagaacuugacaaagguu

SEQ ID NO: 722192 - RNA, 19 nt, Artificial Sequence
  Description of Artificial Sequence: Synthetic oligonucleotide
aaguggucgccuugagaaa

SEQ ID NO: 722193 - RNA, 19 nt, Artificial Sequence
  Description of Artificial Sequence: Synthetic oligonucleotide
ccaggucauuccaaguugg

SEQ ID NO: 722194 - RNA, 19 nt, Artificial Sequence
  Description of Artificial Sequence: Synthetic oligonucleotide
caaucuugacaguuucgga

SEQ ID NO: 722195 - RNA, 19 nt, Artificial Sequence
  Description of Artificial Sequence: Synthetic oligonucleotide
uugccaaucuugacaguuu

SEQ ID NO: 722196 - RNA, 19 nt, Artificial Sequence
  Description of Artificial Sequence: Synthetic oligonucleotide
gaucccgugcgugaacaug

SEQ ID NO: 722197 - RNA, 19 nt, Artificial Sequence
  Description of Artificial Sequence: Synthetic oligonucleotide
aggucauuccaaguuggcu

SEQ ID NO: 722198 - RNA, 19 nt, Artificial Sequence
  Description of Artificial Sequence: Synthetic oligonucleotide
gagcgaagaacuugauaaa

SEQ ID NO: 722199 - RNA, 19 nt, Artificial Sequence
  Description of Artificial Sequence: Synthetic oligonucleotide
ucuaggacccugguacuuc

SEQ ID NO: 722200 - RNA, 19 nt, Artificial Sequence
  Description of Artificial Sequence: Synthetic oligonucleotide
guuggcuguagucgcuggc

SEQ ID NO: 722201 - RNA, 19 nt, Artificial Sequence
  Description of Artificial Sequence: Synthetic oligonucleotide
cuaggggccaagagaguuc

SEQ ID NO: 722202 - RNA, 19 nt, Artificial Sequence
  Description of Artificial Sequence: Synthetic oligonucleotide
uuugcccagcuugauuaga

SEQ ID NO: 722203 - RNA, 19 nt, Artificial Sequence
  Description of Artificial Sequence: Synthetic oligonucleotide
gggguauccccgcacaccc

SEQ ID NO: 722204 - RNA, 19 nt, Artificial Sequence
  Description of Artificial Sequence: Synthetic oligonucleotide
uggaucccgugcgugaaca

SEQ ID NO: 722205 - RNA, 19 nt, Artificial Sequence
  Description of Artificial Sequence: Synthetic oligonucleotide
cugugugcagucgaccuug

SEQ ID NO: 722206 - RNA, 19 nt, Artificial Sequence
  Description of Artificial Sequence: Synthetic oligonucleotide
uuuggaucccgugcgugaa

SEQ ID NO: 722207 - RNA, 19 nt, Artificial Sequence
  Description of Artificial Sequence: Synthetic oligonucleotide
ucgacagucuccggggcca

SEQ ID NO: 722208 - RNA, 19 nt, Artificial Sequence
  Description of Artificial Sequence: Synthetic oligonucleotide
ggugcagacauuacgcuca

SEQ ID NO: 722209 - RNA, 19 nt, Artificial Sequence
  Description of Artificial Sequence: Synthetic oligonucleotide
agcugcuaaaaggacugcu

SEQ ID NO: 722210 - RNA, 19 nt, Artificial Sequence
  Description of Artificial Sequence: Synthetic oligonucleotide
gcagaguuggauagccucg

SEQ ID NO: 722211 - RNA, 19 nt, Artificial Sequence
  Description of Artificial Sequence: Synthetic oligonucleotide
ccucgcaccgaguacuugg

SEQ ID NO: 722212 - RNA, 19 nt, Artificial Sequence
  Description of Artificial Sequence: Synthetic oligonucleotide
acaaagcuguguaaagaau

SEQ ID NO: 722213 - RNA, 19 nt, Artificial Sequence
  Description of Artificial Sequence: Synthetic oligonucleotide
ugacgaagugcgcggcgcu

SEQ ID NO: 722214 - RNA, 19 nt, Artificial Sequence
  Description of Artificial Sequence: Synthetic oligonucleotide
caguuucggaauguucaag

SEQ ID NO: 722215 - RNA, 19 nt, Artificial Sequence
  Description of Artificial Sequence: Synthetic oligonucleotide
acaugucggccguguacag

SEQ ID NO: 722216 - RNA, 19 nt, Artificial Sequence
  Description of Artificial Sequence: Synthetic oligonucleotide
guccauagugcugugugca

SEQ ID NO: 722217 - RNA, 19 nt, Artificial Sequence
  Description of Artificial Sequence: Synthetic oligonucleotide
ucggccguguacaggugcu

SEQ ID NO: 722218 - RNA, 19 nt, Artificial Sequence
  Description of Artificial Sequence: Synthetic oligonucleotide
ugcuuaagcucaggggccu

SEQ ID NO: 722219 - RNA, 19 nt, Artificial Sequence
  Description of Artificial Sequence: Synthetic oligonucleotide
ggagcauuucuucaggggu

SEQ ID NO: 722220 - RNA, 19 nt, Artificial Sequence
  Description of Artificial Sequence: Synthetic oligonucleotide
caugucggccguguacagg

SEQ ID NO: 722221 - RNA, 19 nt, Artificial Sequence
  Description of Artificial Sequence: Synthetic oligonucleotide
uuccggcucugguguaggg

SEQ ID NO: 722222 - RNA, 19 nt, Artificial Sequence
  Description of Artificial Sequence: Synthetic oligonucleotide
gggcgcgaagaacaugacg

SEQ ID NO: 722223 - RNA, 19 nt, Artificial Sequence
  Description of Artificial Sequence: Synthetic oligonucleotide
auauugccaagagaagguu

SEQ ID NO: 722224 - RNA, 19 nt, Artificial Sequence
  Description of Artificial Sequence: Synthetic oligonucleotide
uaugcacuaggagcauuuc

SEQ ID NO: 722225 - RNA, 19 nt, Artificial Sequence
  Description of Artificial Sequence: Synthetic oligonucleotide
cuugauaaaguggucgccu

SEQ ID NO: 722226 - RNA, 19 nt, Artificial Sequence
  Description of Artificial Sequence: Synthetic oligonucleotide
gcgcuuuggaucccgugcg

SEQ ID NO: 722227 - RNA, 19 nt, Artificial Sequence
  Description of Artificial Sequence: Synthetic oligonucleotide
gacacgcaaucaagauccg

SEQ ID NO: 722228 - RNA, 19 nt, Artificial Sequence
  Description of Artificial Sequence: Synthetic oligonucleotide
cagcugugaaccacacaug

SEQ ID NO: 722229 - RNA, 19 nt, Artificial Sequence
  Description of Artificial Sequence: Synthetic oligonucleotide
aucccgugcgugaacaugu

SEQ ID NO: 722230 - RNA, 19 nt, Artificial Sequence
  Description of Artificial Sequence: Synthetic oligonucleotide
gguauccccgcacacccug

SEQ ID NO: 722231 - RNA, 19 nt, Artificial Sequence
  Description of Artificial Sequence: Synthetic oligonucleotide
guacuuggugcagacauua

SEQ ID NO: 722232 - RNA, 19 nt, Artificial Sequence
  Description of Artificial Sequence: Synthetic oligonucleotide
guuggauagccucgaaccu

SEQ ID NO: 722233 - RNA, 19 nt, Artificial Sequence
  Description of Artificial Sequence: Synthetic oligonucleotide
gucauuccaaguuggcugu

SEQ ID NO: 722234 - RNA, 19 nt, Artificial Sequence
  Description of Artificial Sequence: Synthetic oligonucleotide
gggauagccucgcaccgag

SEQ ID NO: 722235 - RNA, 19 nt, Artificial Sequence
  Description of Artificial Sequence: Synthetic oligonucleotide
aacugccaacugcagucuu

SEQ ID NO: 722236 - RNA, 19 nt, Artificial Sequence
  Description of Artificial Sequence: Synthetic oligonucleotide
acugcucaagcugcuaaaa

SEQ ID NO: 722237 - RNA, 19 nt, Artificial Sequence
  Description of Artificial Sequence: Synthetic oligonucleotide
auggagcauagaacuugac

SEQ ID NO: 722238 - RNA, 19 nt, Artificial Sequence
  Description of Artificial Sequence: Synthetic oligonucleotide
cugugaaccacacaugauu

SEQ ID NO: 722239 - RNA, 19 nt, Artificial Sequence
  Description of Artificial Sequence: Synthetic oligonucleotide
acguaggacaaagcugugu

SEQ ID NO: 722240 - RNA, 19 nt, Artificial Sequence
  Description of Artificial Sequence: Synthetic oligonucleotide
guagucgcuggcagugucc

SEQ ID NO: 722241 - RNA, 19 nt, Artificial Sequence
  Description of Artificial Sequence: Synthetic oligonucleotide
cucgaaccugguuuucuga

SEQ ID NO: 722242 - RNA, 19 nt, Artificial Sequence
  Description of Artificial Sequence: Synthetic oligonucleotide
cuguaacgggcuggcaggg

SEQ ID NO: 722243 - RNA, 19 nt, Artificial Sequence
  Description of Artificial Sequence: Synthetic oligonucleotide
acaccguuuucuggcuaac

SEQ ID NO: 722244 - RNA, 19 nt, Artificial Sequence
  Description of Artificial Sequence: Synthetic oligonucleotide
cugaggacacaccguuuuc

SEQ ID NO: 722245 - RNA, 19 nt, Artificial Sequence
  Description of Artificial Sequence: Synthetic oligonucleotide
cuucaccgcuucuuggcca

SEQ ID NO: 722246 - RNA, 19 nt, Artificial Sequence
  Description of Artificial Sequence: Synthetic oligonucleotide
gaagugcgcggcgcuuugg

SEQ ID NO: 722247 - RNA, 19 nt, Artificial Sequence
  Description of Artificial Sequence: Synthetic oligonucleotide
uguaacgggcuggcagggc

SEQ ID NO: 722248 - RNA, 19 nt, Artificial Sequence
  Description of Artificial Sequence: Synthetic oligonucleotide
cuaggacccugguacuuca

SEQ ID NO: 722249 - RNA, 19 nt, Artificial Sequence
  Description of Artificial Sequence: Synthetic oligonucleotide
cagcuugauuagagacacg

SEQ ID NO: 722250 - RNA, 19 nt, Artificial Sequence
  Description of Artificial Sequence: Synthetic oligonucleotide
ccguuuucuggcuaaccac

SEQ ID NO: 722251 - RNA, 19 nt, Artificial Sequence
  Description of Artificial Sequence: Synthetic oligonucleotide
gugcagacauuacgcucag

SEQ ID NO: 722252 - RNA, 19 nt, Artificial Sequence
  Description of Artificial Sequence: Synthetic oligonucleotide
augucacuccuaugcacua

SEQ ID NO: 722253 - RNA, 19 nt, Artificial Sequence
  Description of Artificial Sequence: Synthetic oligonucleotide
gacgggaggaggcguccug

SEQ ID NO: 722254 - RNA, 19 nt, Artificial Sequence
  Description of Artificial Sequence: Synthetic oligonucleotide
gccguguacaggugcuugg

SEQ ID NO: 722255 - RNA, 19 nt, Artificial Sequence
  Description of Artificial Sequence: Synthetic oligonucleotide
uccuaggggccaagagagu

SEQ ID NO: 722256 - RNA, 19 nt, Artificial Sequence
  Description of Artificial Sequence: Synthetic oligonucleotide
cuggcgagcucucgcccgg

SEQ ID NO: 722257 - RNA, 19 nt, Artificial Sequence
  Description of Artificial Sequence: Synthetic oligonucleotide
cuuggcgugcggguccugc

SEQ ID NO: 722258 - RNA, 19 nt, Artificial Sequence
  Description of Artificial Sequence: Synthetic oligonucleotide
ugggauagccucgcaccga

SEQ ID NO: 722259 - RNA, 19 nt, Artificial Sequence
  Description of Artificial Sequence: Synthetic oligonucleotide
cgcaccgaguacuuggugc

SEQ ID NO: 722260 - RNA, 19 nt, Artificial Sequence
  Description of Artificial Sequence: Synthetic oligonucleotide
gugcgugaacaugucggcc

SEQ ID NO: 722261 - RNA, 19 nt, Artificial Sequence
  Description of Artificial Sequence: Synthetic oligonucleotide
caccguuuucuggcuaacc

SEQ ID NO: 722262 - RNA, 19 nt, Artificial Sequence
  Description of Artificial Sequence: Synthetic oligonucleotide
gcacuaggagcauuucuuc

SEQ ID NO: 722263 - RNA, 19 nt, Artificial Sequence
  Description of Artificial Sequence: Synthetic oligonucleotide
caaucaagauccguagugu

SEQ ID NO: 722264 - RNA, 19 nt, Artificial Sequence
  Description of Artificial Sequence: Synthetic oligonucleotide
uccguagugugugguggcu

SEQ ID NO: 722265 - RNA, 19 nt, Artificial Sequence
  Description of Artificial Sequence: Synthetic oligonucleotide
aggguucgacagucuccgg

SEQ ID NO: 722266 - RNA, 19 nt, Artificial Sequence
  Description of Artificial Sequence: Synthetic oligonucleotide
acacgcaaucaagauccgu

SEQ ID NO: 722267 - RNA, 19 nt, Artificial Sequence
  Description of Artificial Sequence: Synthetic oligonucleotide
gcuggcgagcucucgcccg

SEQ ID NO: 722268 - RNA, 19 nt, Artificial Sequence
  Description of Artificial Sequence: Synthetic oligonucleotide
auccugcauuugcgacucc

SEQ ID NO: 722269 - RNA, 19 nt, Artificial Sequence
  Description of Artificial Sequence: Synthetic oligonucleotide
accgaguacuuggugcaga

SEQ ID NO: 722270 - RNA, 19 nt, Artificial Sequence
  Description of Artificial Sequence: Synthetic oligonucleotide
aaccccugcuuaagcucag

SEQ ID NO: 722271 - RNA, 19 nt, Artificial Sequence
  Description of Artificial Sequence: Synthetic oligonucleotide
cacaccguuuucuggcuaa

SEQ ID NO: 722272 - RNA, 19 nt, Artificial Sequence
  Description of Artificial Sequence: Synthetic oligonucleotide
gacacaccguuuucuggcu

SEQ ID NO: 722273 - RNA, 19 nt, Artificial Sequence
  Description of Artificial Sequence: Synthetic oligonucleotide
cucggaaaagcagcaaugu

SEQ ID NO: 722274 - RNA, 19 nt, Artificial Sequence
  Description of Artificial Sequence: Synthetic oligonucleotide
agugcgcggcgcuuuggau

SEQ ID NO: 722275 - RNA, 19 nt, Artificial Sequence
  Description of Artificial Sequence: Synthetic oligonucleotide
gggguuucuauaguucauc

SEQ ID NO: 722276 - RNA, 19 nt, Artificial Sequence
  Description of Artificial Sequence: Synthetic oligonucleotide
cuaugcacuaggagcauuu

SEQ ID NO: 722277 - RNA, 19 nt, Artificial Sequence
  Description of Artificial Sequence: Synthetic oligonucleotide
guggauugccacugaaaau

SEQ ID NO: 722278 - RNA, 19 nt, Artificial Sequence
  Description of Artificial Sequence: Synthetic oligonucleotide
ggugguuccgcuuccggcu

SEQ ID NO: 722279 - RNA, 19 nt, Artificial Sequence
  Description of Artificial Sequence: Synthetic oligonucleotide
gucccgcuuucccuuguac

SEQ ID NO: 722280 - RNA, 19 nt, Artificial Sequence
  Description of Artificial Sequence: Synthetic oligonucleotide
ggcuaaccacaguggaaac

SEQ ID NO: 722281 - RNA, 19 nt, Artificial Sequence
  Description of Artificial Sequence: Synthetic oligonucleotide
ucccgugcgugaacauguc

SEQ ID NO: 722282 - RNA, 19 nt, Artificial Sequence
  Description of Artificial Sequence: Synthetic oligonucleotide
gcuaaccacaguggaaaca

SEQ ID NO: 722283 - RNA, 19 nt, Artificial Sequence
  Description of Artificial Sequence: Synthetic oligonucleotide
guaaagaaucaaggucucu

SEQ ID NO: 722284 - RNA, 19 nt, Artificial Sequence
  Description of Artificial Sequence: Synthetic oligonucleotide
ugcagacauuacgcucagc

SEQ ID NO: 722285 - RNA, 19 nt, Artificial Sequence
  Description of Artificial Sequence: Synthetic oligonucleotide
caucggaguuggcugugca

SEQ ID NO: 722286 - RNA, 19 nt, Artificial Sequence
  Description of Artificial Sequence: Synthetic oligonucleotide
cagaguuggauagccucga

SEQ ID NO: 722287 - RNA, 19 nt, Artificial Sequence
  Description of Artificial Sequence: Synthetic oligonucleotide
agggcgcgaagaacaugac

SEQ ID NO: 722288 - RNA, 19 nt, Artificial Sequence
  Description of Artificial Sequence: Synthetic oligonucleotide
ggugggguauccccgcaca

SEQ ID NO: 722289 - RNA, 19 nt, Artificial Sequence
  Description of Artificial Sequence: Synthetic oligonucleotide
acacaccguuuucuggcua

SEQ ID NO: 722290 - RNA, 19 nt, Artificial Sequence
  Description of Artificial Sequence: Synthetic oligonucleotide
cgugcgugaacaugucggc

SEQ ID NO: 722291 - RNA, 19 nt, Artificial Sequence
  Description of Artificial Sequence: Synthetic oligonucleotide
uccuaugcacuaggagcau

SEQ ID NO: 722292 - RNA, 19 nt, Artificial Sequence
  Description of Artificial Sequence: Synthetic oligonucleotide
cacccugggcagagcacac

SEQ ID NO: 722293 - RNA, 19 nt, Artificial Sequence
  Description of Artificial Sequence: Synthetic oligonucleotide
cguguacaggugcuuggcg

SEQ ID NO: 722294 - RNA, 19 nt, Artificial Sequence
  Description of Artificial Sequence: Synthetic oligonucleotide
caccgcuucuuggccaggc

SEQ ID NO: 722295 - RNA, 19 nt, Artificial Sequence
  Description of Artificial Sequence: Synthetic oligonucleotide
ucgaagucucuaggacccu

SEQ ID NO: 722296 - RNA, 19 nt, Artificial Sequence
  Description of Artificial Sequence: Synthetic oligonucleotide
agucgaccuugccaaucuu

SEQ ID NO: 722297 - RNA, 19 nt, Artificial Sequence
  Description of Artificial Sequence: Synthetic oligonucleotide
uugccugacguaggacaaa

SEQ ID NO: 722298 - RNA, 19 nt, Artificial Sequence
  Description of Artificial Sequence: Synthetic oligonucleotide
guugcaagggaagccaauu

SEQ ID NO: 722299 - RNA, 19 nt, Artificial Sequence
  Description of Artificial Sequence: Synthetic oligonucleotide
ggcagggcgccuccgcugc

SEQ ID NO: 722300 - RNA, 19 nt, Artificial Sequence
  Description of Artificial Sequence: Synthetic oligonucleotide
accccugcuuaagcucagg

SEQ ID NO: 722301 - RNA, 19 nt, Artificial Sequence
  Description of Artificial Sequence: Synthetic oligonucleotide
gcuugauuagagacacgca

SEQ ID NO: 722302 - RNA, 19 nt, Artificial Sequence
  Description of Artificial Sequence: Synthetic oligonucleotide
cccgugcgugaacaugucg

SEQ ID NO: 722303 - RNA, 19 nt, Artificial Sequence
  Description of Artificial Sequence: Synthetic oligonucleotide
gcgaagaacuugauaaagu

SEQ ID NO: 722304 - RNA, 19 nt, Artificial Sequence
  Description of Artificial Sequence: Synthetic oligonucleotide
cuccccugcgcgagccgag

SEQ ID NO: 722305 - RNA, 19 nt, Artificial Sequence
  Description of Artificial Sequence: Synthetic oligonucleotide
agggcgccuccgcugcuca

SEQ ID NO: 722306 - RNA, 19 nt, Artificial Sequence
  Description of Artificial Sequence: Synthetic oligonucleotide
cagucgaccuugccaaucu

SEQ ID NO: 722307 - RNA, 19 nt, Artificial Sequence
  Description of Artificial Sequence: Synthetic oligonucleotide
cguaggacaaagcugugua

SEQ ID NO: 722308 - RNA, 19 nt, Artificial Sequence
  Description of Artificial Sequence: Synthetic oligonucleotide
ugcuuggcgugcggguccu

SEQ ID NO: 722309 - RNA, 19 nt, Artificial Sequence
  Description of Artificial Sequence: Synthetic oligonucleotide
gcagagcacacaucggagu

SEQ ID NO: 722310 - RNA, 19 nt, Artificial Sequence
  Description of Artificial Sequence: Synthetic oligonucleotide
ggcuggcgagcucucgccc

SEQ ID NO: 722311 - RNA, 19 nt, Artificial Sequence
  Description of Artificial Sequence: Synthetic oligonucleotide
ucucgcccgggccgcgagu

SEQ ID NO: 722312 - RNA, 19 nt, Artificial Sequence
  Description of Artificial Sequence: Synthetic oligonucleotide
uggcgagcucucgcccggg

SEQ ID NO: 722313 - RNA, 19 nt, Artificial Sequence
  Description of Artificial Sequence: Synthetic oligonucleotide
gagcucucgcccgggccgc

SEQ ID NO: 722314 - RNA, 19 nt, Artificial Sequence
  Description of Artificial Sequence: Synthetic oligonucleotide
guggucgccuugagaaaca

SEQ ID NO: 722315 - RNA, 19 nt, Artificial Sequence
  Description of Artificial Sequence: Synthetic oligonucleotide
agucccgcuuucccuugua

SEQ ID NO: 722316 - RNA, 19 nt, Artificial Sequence
  Description of Artificial Sequence: Synthetic oligonucleotide
cucucgcccgggccgcgag

SEQ ID NO: 722317 - RNA, 19 nt, Artificial Sequence
  Description of Artificial Sequence: Synthetic oligonucleotide
ccguguacaggugcuuggc

SEQ ID NO: 722318 - RNA, 19 nt, Artificial Sequence
  Description of Artificial Sequence: Synthetic oligonucleotide
ccagcgacgggaggaggcg

SEQ ID NO: 722319 - RNA, 19 nt, Artificial Sequence
  Description of Artificial Sequence: Synthetic oligonucleotide
ggguugaguucaccugcuc

SEQ ID NO: 722320 - RNA, 19 nt, Artificial Sequence
  Description of Artificial Sequence: Synthetic oligonucleotide
cucgcccgggccgcgaguc

SEQ ID NO: 722321 - RNA, 19 nt, Artificial Sequence
  Description of Artificial Sequence: Synthetic oligonucleotide
ccugcgcgagccgagcagc

SEQ ID NO: 722322 - RNA, 19 nt, Artificial Sequence
  Description of Artificial Sequence: Synthetic oligonucleotide
gagcagaguuggauagccu

SEQ ID NO: 722323 - RNA, 19 nt, Artificial Sequence
  Description of Artificial Sequence: Synthetic oligonucleotide
ggguggauugccacugaaa

SEQ ID NO: 722324 - RNA, 19 nt, Artificial Sequence
  Description of Artificial Sequence: Synthetic oligonucleotide
cguagugugugguggcuga

SEQ ID NO: 722325 - RNA, 19 nt, Artificial Sequence
  Description of Artificial Sequence: Synthetic oligonucleotide
gggugggguauccccgcac

SEQ ID NO: 722326 - RNA, 19 nt, Artificial Sequence
  Description of Artificial Sequence: Synthetic oligonucleotide
gcgcgaagaacaugacgaa

SEQ ID NO: 722327 - RNA, 19 nt, Artificial Sequence
  Description of Artificial Sequence: Synthetic oligonucleotide
guagugugugguggcugaa

SEQ ID NO: 722328 - RNA, 19 nt, Artificial Sequence
  Description of Artificial Sequence: Synthetic oligonucleotide
ggggccaagagaguucagu

SEQ ID NO: 722329 - RNA, 19 nt, Artificial Sequence
  Description of Artificial Sequence: Synthetic oligonucleotide
ggaggcguccugggcgcgg

SEQ ID NO: 722330 - RNA, 19 nt, Artificial Sequence
  Description of Artificial Sequence: Synthetic oligonucleotide
gcugcuaaaaggacugcuu

SEQ ID NO: 722331 - RNA, 19 nt, Artificial Sequence
  Description of Artificial Sequence: Synthetic oligonucleotide
gcgugcggguccugcucgg

SEQ ID NO: 722332 - RNA, 19 nt, Artificial Sequence
  Description of Artificial Sequence: Synthetic oligonucleotide
ccacaguggaaacauggau

SEQ ID NO: 722333 - RNA, 19 nt, Artificial Sequence
  Description of Artificial Sequence: Synthetic oligonucleotide
agcucucgcccgggccgcg

SEQ ID NO: 722334 - RNA, 19 nt, Artificial Sequence
  Description of Artificial Sequence: Synthetic oligonucleotide
cccugcgcgagccgagcag

SEQ ID NO: 722335 - RNA, 19 nt, Artificial Sequence
  Description of Artificial Sequence: Synthetic oligonucleotide
cauugugcucacccacuuu

SEQ ID NO: 722336 - RNA, 19 nt, Artificial Sequence
  Description of Artificial Sequence: Synthetic oligonucleotide
ccguagugugugguggcug

SEQ ID NO: 722337 - RNA, 19 nt, Artificial Sequence
  Description of Artificial Sequence: Synthetic oligonucleotide
cgaagucucuaggacccug

SEQ ID NO: 722338 - RNA, 19 nt, Artificial Sequence
  Description of Artificial Sequence: Synthetic oligonucleotide
ggccagcgacgggaggagg

SEQ ID NO: 722339 - RNA, 19 nt, Artificial Sequence
  Description of Artificial Sequence: Synthetic oligonucleotide
gcgugaacaugucggccgu

SEQ ID NO: 722340 - RNA, 19 nt, Artificial Sequence
  Description of Artificial Sequence: Synthetic oligonucleotide
cugcucaugggaggugggu

SEQ ID NO: 722341 - RNA, 19 nt, Artificial Sequence
  Description of Artificial Sequence: Synthetic oligonucleotide
ccagggcgcgaagaacaug

SEQ ID NO: 722342 - RNA, 19 nt, Artificial Sequence
  Description of Artificial Sequence: Synthetic oligonucleotide
gacgaagugcgcggcgcuu

SEQ ID NO: 722343 - RNA, 19 nt, Artificial Sequence
  Description of Artificial Sequence: Synthetic oligonucleotide
cgaagugcgcggcgcuuug

SEQ ID NO: 722344 - RNA, 19 nt, Artificial Sequence
  Description of Artificial Sequence: Synthetic oligonucleotide
ccaagagaguucaguuuau

SEQ ID NO: 722345 - RNA, 19 nt, Artificial Sequence
  Description of Artificial Sequence: Synthetic oligonucleotide
gcgccuccgcugcucagga

SEQ ID NO: 722346 - RNA, 19 nt, Artificial Sequence
  Description of Artificial Sequence: Synthetic oligonucleotide
gggguugaguucaccugcu

SEQ ID NO: 722347 - RNA, 19 nt, Artificial Sequence
  Description of Artificial Sequence: Synthetic oligonucleotide
gccucgcaccgaguacuug

SEQ ID NO: 722348 - RNA, 19 nt, Artificial Sequence
  Description of Artificial Sequence: Synthetic oligonucleotide
ggccuugggugguuccgcu

SEQ ID NO: 722349 - RNA, 19 nt, Artificial Sequence
  Description of Artificial Sequence: Synthetic oligonucleotide
gcuccccugcgcgagccga

SEQ ID NO: 722350 - RNA, 19 nt, Artificial Sequence
  Description of Artificial Sequence: Synthetic oligonucleotide
ccuaggggccaagagaguu

SEQ ID NO: 722351 - RNA, 19 nt, Artificial Sequence
  Description of Artificial Sequence: Synthetic oligonucleotide
cggcgcuuuggaucccgug

SEQ ID NO: 722352 - RNA, 19 nt, Artificial Sequence
  Description of Artificial Sequence: Synthetic oligonucleotide
ggaucccgugcgugaacau

SEQ ID NO: 722353 - RNA, 19 nt, Artificial Sequence
  Description of Artificial Sequence: Synthetic oligonucleotide
cgugaacaugucggccgug

SEQ ID NO: 722354 - RNA, 19 nt, Artificial Sequence
  Description of Artificial Sequence: Synthetic oligonucleotide
ccucugaggguucgacagu

SEQ ID NO: 722355 - RNA, 19 nt, Artificial Sequence
  Description of Artificial Sequence: Synthetic oligonucleotide
gcgacuccacauagucucu

SEQ ID NO: 722356 - RNA, 19 nt, Artificial Sequence
  Description of Artificial Sequence: Synthetic oligonucleotide
cagcgacgggaggaggcgu

SEQ ID NO: 722357 - RNA, 19 nt, Artificial Sequence
  Description of Artificial Sequence: Synthetic oligonucleotide
cgugcggguccugcucggc

SEQ ID NO: 722358 - RNA, 19 nt, Artificial Sequence
  Description of Artificial Sequence: Synthetic oligonucleotide
ggauagccucgcaccgagu

SEQ ID NO: 722359 - RNA, 19 nt, Artificial Sequence
  Description of Artificial Sequence: Synthetic oligonucleotide
ggguauccccgcacacccu

SEQ ID NO: 722360 - RNA, 19 nt, Artificial Sequence
  Description of Artificial Sequence: Synthetic oligonucleotide
ccccugcgcgagccgagca

SEQ ID NO: 722361 - RNA, 19 nt, Artificial Sequence
  Description of Artificial Sequence: Synthetic oligonucleotide
gcuuggcgugcggguccug

SEQ ID NO: 722362 - RNA, 19 nt, Artificial Sequence
  Description of Artificial Sequence: Synthetic oligonucleotide
gcucucgcccgggccgcga

SEQ ID NO: 722363 - RNA, 19 nt, Artificial Sequence
  Description of Artificial Sequence: Synthetic oligonucleotide
gcagggcgccuccgcugcu

SEQ ID NO: 722364 - RNA, 19 nt, Artificial Sequence
  Description of Artificial Sequence: Synthetic oligonucleotide
cgacgggaggaggcguccu

SEQ ID NO: 722365 - RNA, 19 nt, Artificial Sequence
  Description of Artificial Sequence: Synthetic oligonucleotide
aauggaauugaauaccacc

SEQ ID NO: 722366 - RNA, 19 nt, Artificial Sequence
  Description of Artificial Sequence: Synthetic oligonucleotide
ugagaugacaacaucagcc

SEQ ID NO: 722367 - RNA, 19 nt, Artificial Sequence
  Description of Artificial Sequence: Synthetic oligonucleotide
uauauuuguaguuggaugc

SEQ ID NO: 722368 - RNA, 19 nt, Artificial Sequence
  Description of Artificial Sequence: Synthetic oligonucleotide
aauaacuugacacuucggu

SEQ ID NO: 722369 - RNA, 19 nt, Artificial Sequence
  Description of Artificial Sequence: Synthetic oligonucleotide
uauaagauguuucuuauaa

SEQ ID NO: 722370 - RNA, 19 nt, Artificial Sequence
  Description of Artificial Sequence: Synthetic oligonucleotide
gauuaugcuuuccagaucc

SEQ ID NO: 722371 - RNA, 19 nt, Artificial Sequence
  Description of Artificial Sequence: Synthetic oligonucleotide
uguguaaccaucauaacgu

SEQ ID NO: 722372 - RNA, 19 nt, Artificial Sequence
  Description of Artificial Sequence: Synthetic oligonucleotide
ucuuguguucauuuuaugg

SEQ ID NO: 722373 - RNA, 19 nt, Artificial Sequence
  Description of Artificial Sequence: Synthetic oligonucleotide
auaauaucuggucucuugc

SEQ ID NO: 722374 - RNA, 19 nt, Artificial Sequence
  Description of Artificial Sequence: Synthetic oligonucleotide
gaaauugaguccuaagucc

SEQ ID NO: 722375 - RNA, 19 nt, Artificial Sequence
  Description of Artificial Sequence: Synthetic oligonucleotide
ugacuuaucucagagaggg

SEQ ID NO: 722376 - RNA, 19 nt, Artificial Sequence
  Description of Artificial Sequence: Synthetic oligonucleotide
uuuccauuaaggcugagca

SEQ ID NO: 722377 - RNA, 19 nt, Artificial Sequence
  Description of Artificial Sequence: Synthetic oligonucleotide
aauuaguucaguagcauuc

SEQ ID NO: 722378 - RNA, 19 nt, Artificial Sequence
  Description of Artificial Sequence: Synthetic oligonucleotide
aaauauaucugggacaucu

SEQ ID NO: 722379 - RNA, 19 nt, Artificial Sequence
  Description of Artificial Sequence: Synthetic oligonucleotide
aauaccaccacaucagcca

SEQ ID NO: 722380 - RNA, 19 nt, Artificial Sequence
  Description of Artificial Sequence: Synthetic oligonucleotide
ucugugaucaggaaugagc

SEQ ID NO: 722381 - RNA, 19 nt, Artificial Sequence
  Description of Artificial Sequence: Synthetic oligonucleotide
acagguuuguggcagaugg

SEQ ID NO: 722382 - RNA, 19 nt, Artificial Sequence
  Description of Artificial Sequence: Synthetic oligonucleotide
aauaucuggucucuugcag

SEQ ID NO: 722383 - RNA, 19 nt, Artificial Sequence
  Description of Artificial Sequence: Synthetic oligonucleotide
uaaaacaaguaucuugugu

SEQ ID NO: 722384 - RNA, 19 nt, Artificial Sequence
  Description of Artificial Sequence: Synthetic oligonucleotide
uccuaagugacuuaucuca

SEQ ID NO: 722385 - RNA, 19 nt, Artificial Sequence
  Description of Artificial Sequence: Synthetic oligonucleotide
ugaaaauauaucugggaca

SEQ ID NO: 722386 - RNA, 19 nt, Artificial Sequence
  Description of Artificial Sequence: Synthetic oligonucleotide
cagagagucauuaauuugc

SEQ ID NO: 722387 - RNA, 19 nt, Artificial Sequence
  Description of Artificial Sequence: Synthetic oligonucleotide
uaugggauacaugagugcg

SEQ ID NO: 722388 - RNA, 19 nt, Artificial Sequence
  Description of Artificial Sequence: Synthetic oligonucleotide
auaacuugacacuucgguc

SEQ ID NO: 722389 - RNA, 19 nt, Artificial Sequence
  Description of Artificial Sequence: Synthetic oligonucleotide
gagacgaggaaauugaguc

SEQ ID NO: 722390 - RNA, 19 nt, Artificial Sequence
  Description of Artificial Sequence: Synthetic oligonucleotide
uauaauaucuggucucuug

SEQ ID NO: 722391 - RNA, 19 nt, Artificial Sequence
  Description of Artificial Sequence: Synthetic oligonucleotide
ucucugaucagguaaauau

SEQ ID NO: 722392 - RNA, 19 nt, Artificial Sequence
  Description of Artificial Sequence: Synthetic oligonucleotide
ugaaucugcucacaucagg

SEQ ID NO: 722393 - RNA, 19 nt, Artificial Sequence
  Description of Artificial Sequence: Synthetic oligonucleotide
gaaucaugggaauaccugc

SEQ ID NO: 722394 - RNA, 19 nt, Artificial Sequence
  Description of Artificial Sequence: Synthetic oligonucleotide
uauuaauaccuucacuuaa

SEQ ID NO: 722395 - RNA, 19 nt, Artificial Sequence
  Description of Artificial Sequence: Synthetic oligonucleotide
aaucaugggaauaccugcc

SEQ ID NO: 722396 - RNA, 19 nt, Artificial Sequence
  Description of Artificial Sequence: Synthetic oligonucleotide
uccuaaguccuuuagcugc

SEQ ID NO: 722397 - RNA, 19 nt, Artificial Sequence
  Description of Artificial Sequence: Synthetic oligonucleotide
aacggauucaaccggaaau

SEQ ID NO: 722398 - RNA, 19 nt, Artificial Sequence
  Description of Artificial Sequence: Synthetic oligonucleotide
agugcgguuauacaacagg

SEQ ID NO: 722399 - RNA, 19 nt, Artificial Sequence
  Description of Artificial Sequence: Synthetic oligonucleotide
ucuuuacaccaacaaacag

SEQ ID NO: 722400 - RNA, 19 nt, Artificial Sequence
  Description of Artificial Sequence: Synthetic oligonucleotide
auaugggauacaugagugc

SEQ ID NO: 722401 - RNA, 19 nt, Artificial Sequence
  Description of Artificial Sequence: Synthetic oligonucleotide
agauuaauuaaaugcaaau

SEQ ID NO: 722402 - RNA, 19 nt, Artificial Sequence
  Description of Artificial Sequence: Synthetic oligonucleotide
ucuuucuaggcccuguggc

SEQ ID NO: 722403 - RNA, 19 nt, Artificial Sequence
  Description of Artificial Sequence: Synthetic oligonucleotide
agauuuguaccaaauaaag

SEQ ID NO: 722404 - RNA, 19 nt, Artificial Sequence
  Description of Artificial Sequence: Synthetic oligonucleotide
cugaauuuaccauguaggc

SEQ ID NO: 722405 - RNA, 19 nt, Artificial Sequence
  Description of Artificial Sequence: Synthetic oligonucleotide
guaucugccauguuugucc

SEQ ID NO: 722406 - RNA, 19 nt, Artificial Sequence
  Description of Artificial Sequence: Synthetic oligonucleotide
aggaaauugaguccuaagu

SEQ ID NO: 722407 - RNA, 19 nt, Artificial Sequence
  Description of Artificial Sequence: Synthetic oligonucleotide
uaaacguuucuccaaggac

SEQ ID NO: 722408 - RNA, 19 nt, Artificial Sequence
  Description of Artificial Sequence: Synthetic oligonucleotide
ugacacuucggucugauua

SEQ ID NO: 722409 - RNA, 19 nt, Artificial Sequence
  Description of Artificial Sequence: Synthetic oligonucleotide
cauaugggauacaugagug

SEQ ID NO: 722410 - RNA, 19 nt, Artificial Sequence
  Description of Artificial Sequence: Synthetic oligonucleotide
agacgaggaaauugagucc

SEQ ID NO: 722411 - RNA, 19 nt, Artificial Sequence
  Description of Artificial Sequence: Synthetic oligonucleotide
cuuuacaccaacaaacaga

SEQ ID NO: 722412 - RNA, 19 nt, Artificial Sequence
  Description of Artificial Sequence: Synthetic oligonucleotide
acauaugggauacaugagu

SEQ ID NO: 722413 - RNA, 19 nt, Artificial Sequence
  Description of Artificial Sequence: Synthetic oligonucleotide
ugagaaaugauuccauauu

SEQ ID NO: 722414 - RNA, 19 nt, Artificial Sequence
  Description of Artificial Sequence: Synthetic oligonucleotide
gggaauaccugccagaccc

SEQ ID NO: 722415 - RNA, 19 nt, Artificial Sequence
  Description of Artificial Sequence: Synthetic oligonucleotide
auuuccauuaaggcugagc

SEQ ID NO: 722416 - RNA, 19 nt, Artificial Sequence
  Description of Artificial Sequence: Synthetic oligonucleotide
ucuccuacaugugaugccg

SEQ ID NO: 722417 - RNA, 19 nt, Artificial Sequence
  Description of Artificial Sequence: Synthetic oligonucleotide
gaaggcuccgaugauaacc

SEQ ID NO: 722418 - RNA, 19 nt, Artificial Sequence
  Description of Artificial Sequence: Synthetic oligonucleotide
gaucagguaaauaugggca

SEQ ID NO: 722419 - RNA, 19 nt, Artificial Sequence
  Description of Artificial Sequence: Synthetic oligonucleotide
cauaacgucucuaggaauc

SEQ ID NO: 722420 - RNA, 19 nt, Artificial Sequence
  Description of Artificial Sequence: Synthetic oligonucleotide
agccacuucaccuuauaag

SEQ ID NO: 722421 - RNA, 19 nt, Artificial Sequence
  Description of Artificial Sequence: Synthetic oligonucleotide
caagagcuagauuuugugc

SEQ ID NO: 722422 - RNA, 19 nt, Artificial Sequence
  Description of Artificial Sequence: Synthetic oligonucleotide
gaugagaggacuucacuca

SEQ ID NO: 722423 - RNA, 19 nt, Artificial Sequence
  Description of Artificial Sequence: Synthetic oligonucleotide
aaauggaauugaauaccac

SEQ ID NO: 722424 - RNA, 19 nt, Artificial Sequence
  Description of Artificial Sequence: Synthetic oligonucleotide
auuaaggcugagcauccuc

SEQ ID NO: 722425 - RNA, 19 nt, Artificial Sequence
  Description of Artificial Sequence: Synthetic oligonucleotide
cuuaaaacuccugugccag

SEQ ID NO: 722426 - RNA, 19 nt, Artificial Sequence
  Description of Artificial Sequence: Synthetic oligonucleotide
aaccggaaauucaaugugg

SEQ ID NO: 722427 - RNA, 19 nt, Artificial Sequence
  Description of Artificial Sequence: Synthetic oligonucleotide
ugugaguguuugaagcugc

SEQ ID NO: 722428 - RNA, 19 nt, Artificial Sequence
  Description of Artificial Sequence: Synthetic oligonucleotide
uccgaugauaaccuggcaa

SEQ ID NO: 722429 - RNA, 19 nt, Artificial Sequence
  Description of Artificial Sequence: Synthetic oligonucleotide
cuuauuaauaccuucacuu

SEQ ID NO: 722430 - RNA, 19 nt, Artificial Sequence
  Description of Artificial Sequence: Synthetic oligonucleotide
aaauugaguccuaaguccu

SEQ ID NO: 722431 - RNA, 19 nt, Artificial Sequence
  Description of Artificial Sequence: Synthetic oligonucleotide
acauguguaaccaucauaa

SEQ ID NO: 722432 - RNA, 19 nt, Artificial Sequence
  Description of Artificial Sequence: Synthetic oligonucleotide
agucuccuacaugugaugc

SEQ ID NO: 722433 - RNA, 19 nt, Artificial Sequence
  Description of Artificial Sequence: Synthetic oligonucleotide
uccauuaaggcugagcauc

SEQ ID NO: 722434 - RNA, 19 nt, Artificial Sequence
  Description of Artificial Sequence: Synthetic oligonucleotide
agagcuagauuuugugcuc

SEQ ID NO: 722435 - RNA, 19 nt, Artificial Sequence
  Description of Artificial Sequence: Synthetic oligonucleotide
ugaauaccaccacaucagc

SEQ ID NO: 722436 - RNA, 19 nt, Artificial Sequence
  Description of Artificial Sequence: Synthetic oligonucleotide
ugcgguuauacaacaggcc

SEQ ID NO: 722437 - RNA, 19 nt, Artificial Sequence
  Description of Artificial Sequence: Synthetic oligonucleotide
ugugacuuagccccaucug

SEQ ID NO: 722438 - RNA, 19 nt, Artificial Sequence
  Description of Artificial Sequence: Synthetic oligonucleotide
gagaaaugauuccauauua

SEQ ID NO: 722439 - RNA, 19 nt, Artificial Sequence
  Description of Artificial Sequence: Synthetic oligonucleotide
cugaucagguaaauauggg

SEQ ID NO: 722440 - RNA, 19 nt, Artificial Sequence
  Description of Artificial Sequence: Synthetic oligonucleotide
auaaaccaagucuuuggga

SEQ ID NO: 722441 - RNA, 19 nt, Artificial Sequence
  Description of Artificial Sequence: Synthetic oligonucleotide
uaaaacuccugugccagag

SEQ ID NO: 722442 - RNA, 19 nt, Artificial Sequence
  Description of Artificial Sequence: Synthetic oligonucleotide
gaauucaggcaccauguca

SEQ ID NO: 722443 - RNA, 19 nt, Artificial Sequence
  Description of Artificial Sequence: Synthetic oligonucleotide
uuguaccaaauaaagguuu

SEQ ID NO: 722444 - RNA, 19 nt, Artificial Sequence
  Description of Artificial Sequence: Synthetic oligonucleotide
gaauacagauacucagcug

SEQ ID NO: 722445 - RNA, 19 nt, Artificial Sequence
  Description of Artificial Sequence: Synthetic oligonucleotide
gaugauaaccuggcaaccc

SEQ ID NO: 722446 - RNA, 19 nt, Artificial Sequence
  Description of Artificial Sequence: Synthetic oligonucleotide
acuuaaaacuccugugcca

SEQ ID NO: 722447 - RNA, 19 nt, Artificial Sequence
  Description of Artificial Sequence: Synthetic oligonucleotide
aucauaacgucucuaggaa

SEQ ID NO: 722448 - RNA, 19 nt, Artificial Sequence
  Description of Artificial Sequence: Synthetic oligonucleotide
uaauaucuggucucuugca

SEQ ID NO: 722449 - RNA, 19 nt, Artificial Sequence
  Description of Artificial Sequence: Synthetic oligonucleotide
caggaaaugagccacuuca

SEQ ID NO: 722450 - RNA, 19 nt, Artificial Sequence
  Description of Artificial Sequence: Synthetic oligonucleotide
auccuaagugacuuaucuc

SEQ ID NO: 722451 - RNA, 19 nt, Artificial Sequence
  Description of Artificial Sequence: Synthetic oligonucleotide
caucauaacgucucuagga

SEQ ID NO: 722452 - RNA, 19 nt, Artificial Sequence
  Description of Artificial Sequence: Synthetic oligonucleotide
ggaaauugaguccuaaguc

SEQ ID NO: 722453 - RNA, 19 nt, Artificial Sequence
  Description of Artificial Sequence: Synthetic oligonucleotide
ugagcagagaccugaauuu

SEQ ID NO: 722454 - RNA, 19 nt, Artificial Sequence
  Description of Artificial Sequence: Synthetic oligonucleotide
aaugcaaaugaaacucugu

SEQ ID NO: 722455 - RNA, 19 nt, Artificial Sequence
  Description of Artificial Sequence: Synthetic oligonucleotide
gaagugagaaaugauucca

SEQ ID NO: 722456 - RNA, 19 nt, Artificial Sequence
  Description of Artificial Sequence: Synthetic oligonucleotide
gcaaguuugugacuuagcc

SEQ ID NO: 722457 - RNA, 19 nt, Artificial Sequence
  Description of Artificial Sequence: Synthetic oligonucleotide
gaaaugagccacuucaccu

SEQ ID NO: 722458 - RNA, 19 nt, Artificial Sequence
  Description of Artificial Sequence: Synthetic oligonucleotide
auugcuacuccaaagaauu

SEQ ID NO: 722459 - RNA, 19 nt, Artificial Sequence
  Description of Artificial Sequence: Synthetic oligonucleotide
gaaaagugcuaaagcagcc

SEQ ID NO: 722460 - RNA, 19 nt, Artificial Sequence
  Description of Artificial Sequence: Synthetic oligonucleotide
uugcaaguuucuuuaagau

SEQ ID NO: 722461 - RNA, 19 nt, Artificial Sequence
  Description of Artificial Sequence: Synthetic oligonucleotide
uuguccgaauuacagcugu

SEQ ID NO: 722462 - RNA, 19 nt, Artificial Sequence
  Description of Artificial Sequence: Synthetic oligonucleotide
accggaaauucaauguggc

SEQ ID NO: 722463 - RNA, 19 nt, Artificial Sequence
  Description of Artificial Sequence: Synthetic oligonucleotide
ugcuaaaagaaaagugcua

SEQ ID NO: 722464 - RNA, 19 nt, Artificial Sequence
  Description of Artificial Sequence: Synthetic oligonucleotide
agcuuggcuacaagaaucc

SEQ ID NO: 722465 - RNA, 19 nt, Artificial Sequence
  Description of Artificial Sequence: Synthetic oligonucleotide
ucugauccucuuucuaggc

SEQ ID NO: 722466 - RNA, 19 nt, Artificial Sequence
  Description of Artificial Sequence: Synthetic oligonucleotide
auuuuauggaugagaggac

SEQ ID NO: 722467 - RNA, 19 nt, Artificial Sequence
  Description of Artificial Sequence: Synthetic oligonucleotide
accccuuauuaauaccuuc

SEQ ID NO: 722468 - RNA, 19 nt, Artificial Sequence
  Description of Artificial Sequence: Synthetic oligonucleotide
cucagagaggguauauuug

SEQ ID NO: 722469 - RNA, 19 nt, Artificial Sequence
  Description of Artificial Sequence: Synthetic oligonucleotide
cuguaaacguuucuccaag

SEQ ID NO: 722470 - RNA, 19 nt, Artificial Sequence
  Description of Artificial Sequence: Synthetic oligonucleotide
aaaccugaugggaaaauaa

SEQ ID NO: 722471 - RNA, 19 nt, Artificial Sequence
  Description of Artificial Sequence: Synthetic oligonucleotide
gucugauuaugcuuuccag

SEQ ID NO: 722472 - RNA, 19 nt, Artificial Sequence
  Description of Artificial Sequence: Synthetic oligonucleotide
ugucagcuaugacaagcag

SEQ ID NO: 722473 - RNA, 19 nt, Artificial Sequence
  Description of Artificial Sequence: Synthetic oligonucleotide
ugggcuauuuugugcuugg

SEQ ID NO: 722474 - RNA, 19 nt, Artificial Sequence
  Description of Artificial Sequence: Synthetic oligonucleotide
gaaaauauaucugggacau

SEQ ID NO: 722475 - RNA, 19 nt, Artificial Sequence
  Description of Artificial Sequence: Synthetic oligonucleotide
gaauaccaccacaucagcc

SEQ ID NO: 722476 - RNA, 19 nt, Artificial Sequence
  Description of Artificial Sequence: Synthetic oligonucleotide
auaucuggucucuugcaga

SEQ ID NO: 722477 - RNA, 19 nt, Artificial Sequence
  Description of Artificial Sequence: Synthetic oligonucleotide
augagugcgguuauacaac

SEQ ID NO: 722478 - RNA, 19 nt, Artificial Sequence
  Description of Artificial Sequence: Synthetic oligonucleotide
uuuauggaugagaggacuu

SEQ ID NO: 722479 - RNA, 19 nt, Artificial Sequence
  Description of Artificial Sequence: Synthetic oligonucleotide
ugagugcgguuauacaaca

SEQ ID NO: 722480 - RNA, 19 nt, Artificial Sequence
  Description of Artificial Sequence: Synthetic oligonucleotide
caaccggaaauucaaugug

SEQ ID NO: 722481 - RNA, 19 nt, Artificial Sequence
  Description of Artificial Sequence: Synthetic oligonucleotide
ugaucaggaaugagcuuca

SEQ ID NO: 722482 - RNA, 19 nt, Artificial Sequence
  Description of Artificial Sequence: Synthetic oligonucleotide
uacaugagugcgguuauac

SEQ ID NO: 722483 - RNA, 19 nt, Artificial Sequence
  Description of Artificial Sequence: Synthetic oligonucleotide
aaaauauaucugggacauc

SEQ ID NO: 722484 - RNA, 19 nt, Artificial Sequence
  Description of Artificial Sequence: Synthetic oligonucleotide
ugcaaguuugugacuuagc

SEQ ID NO: 722485 - RNA, 19 nt, Artificial Sequence
  Description of Artificial Sequence: Synthetic oligonucleotide
cuacaugugaugccgagga

SEQ ID NO: 722486 - RNA, 19 nt, Artificial Sequence
  Description of Artificial Sequence: Synthetic oligonucleotide
ugacuuagccccaucuguc

SEQ ID NO: 722487 - RNA, 19 nt, Artificial Sequence
  Description of Artificial Sequence: Synthetic oligonucleotide
aggaacuuuccaauggaag

SEQ ID NO: 722488 - RNA, 19 nt, Artificial Sequence
  Description of Artificial Sequence: Synthetic oligonucleotide
uccgaauuacagcuguuua

SEQ ID NO: 722489 - RNA, 19 nt, Artificial Sequence
  Description of Artificial Sequence: Synthetic oligonucleotide
uuauaagauguuucuuaua

SEQ ID NO: 722490 - RNA, 19 nt, Artificial Sequence
  Description of Artificial Sequence: Synthetic oligonucleotide
guaaacguuucuccaagga

SEQ ID NO: 722491 - RNA, 19 nt, Artificial Sequence
  Description of Artificial Sequence: Synthetic oligonucleotide
agagaccugaauuuaccau

SEQ ID NO: 722492 - RNA, 19 nt, Artificial Sequence
  Description of Artificial Sequence: Synthetic oligonucleotide
cacauaugggauacaugag

SEQ ID NO: 722493 - RNA, 19 nt, Artificial Sequence
  Description of Artificial Sequence: Synthetic oligonucleotide
aaacggauucaaccggaaa

SEQ ID NO: 722494 - RNA, 19 nt, Artificial Sequence
  Description of Artificial Sequence: Synthetic oligonucleotide
uauuuugugcuugggcaug

SEQ ID NO: 722495 - RNA, 19 nt, Artificial Sequence
  Description of Artificial Sequence: Synthetic oligonucleotide
ucuuagaauuccucugcuc

SEQ ID NO: 722496 - RNA, 19 nt, Artificial Sequence
  Description of Artificial Sequence: Synthetic oligonucleotide
gagucauuaauuugcuaaa

SEQ ID NO: 722497 - RNA, 19 nt, Artificial Sequence
  Description of Artificial Sequence: Synthetic oligonucleotide
uucugccuuaggcugcaag

SEQ ID NO: 722498 - RNA, 19 nt, Artificial Sequence
  Description of Artificial Sequence: Synthetic oligonucleotide
ucuuugucaugcucccacc

SEQ ID NO: 722499 - RNA, 19 nt, Artificial Sequence
  Description of Artificial Sequence: Synthetic oligonucleotide
cagcuuccaacauugcuac

SEQ ID NO: 722500 - RNA, 19 nt, Artificial Sequence
  Description of Artificial Sequence: Synthetic oligonucleotide
gcuaaagcagcccuuugcc

SEQ ID NO: 722501 - RNA, 19 nt, Artificial Sequence
  Description of Artificial Sequence: Synthetic oligonucleotide
aaggcuccgaugauaaccu

SEQ ID NO: 722502 - RNA, 19 nt, Artificial Sequence
  Description of Artificial Sequence: Synthetic oligonucleotide
ugauuaugcuuuccagauc

SEQ ID NO: 722503 - RNA, 19 nt, Artificial Sequence
  Description of Artificial Sequence: Synthetic oligonucleotide
aacgucucuaggaaucugu

SEQ ID NO: 722504 - RNA, 19 nt, Artificial Sequence
  Description of Artificial Sequence: Synthetic oligonucleotide
uccuacaugugaugccgag

SEQ ID NO: 722505 - RNA, 19 nt, Artificial Sequence
  Description of Artificial Sequence: Synthetic oligonucleotide
gucagcuaugacaagcagc

SEQ ID NO: 722506 - RNA, 19 nt, Artificial Sequence
  Description of Artificial Sequence: Synthetic oligonucleotide
acauugcuacuccaaagaa

SEQ ID NO: 722507 - RNA, 19 nt, Artificial Sequence
  Description of Artificial Sequence: Synthetic oligonucleotide
guauuuaauuugaguuggg

SEQ ID NO: 722508 - RNA, 19 nt, Artificial Sequence
  Description of Artificial Sequence: Synthetic oligonucleotide
ucauaacgucucuaggaau

SEQ ID NO: 722509 - RNA, 19 nt, Artificial Sequence
  Description of Artificial Sequence: Synthetic oligonucleotide
cacaucaggaaaccugaug

SEQ ID NO: 722510 - RNA, 19 nt, Artificial Sequence
  Description of Artificial Sequence: Synthetic oligonucleotide
ugaagaagauuuguaccaa

SEQ ID NO: 722511 - RNA, 19 nt, Artificial Sequence
  Description of Artificial Sequence: Synthetic oligonucleotide
augcacaguacucggaaau

SEQ ID NO: 722512 - RNA, 19 nt, Artificial Sequence
  Description of Artificial Sequence: Synthetic oligonucleotide
gaagaagauuuguaccaaa

SEQ ID NO: 722513 - RNA, 19 nt, Artificial Sequence
  Description of Artificial Sequence: Synthetic oligonucleotide
gcccaauuaguucaguagc

SEQ ID NO: 722514 - RNA, 19 nt, Artificial Sequence
  Description of Artificial Sequence: Synthetic oligonucleotide
aaccugaugggaaaauaaa

SEQ ID NO: 722515 - RNA, 19 nt, Artificial Sequence
  Description of Artificial Sequence: Synthetic oligonucleotide
acaaguaucuuguguucau

SEQ ID NO: 722516 - RNA, 19 nt, Artificial Sequence
  Description of Artificial Sequence: Synthetic oligonucleotide
gaggacauguguaaccauc

SEQ ID NO: 722517 - RNA, 19 nt, Artificial Sequence
  Description of Artificial Sequence: Synthetic oligonucleotide
agaccccuuauuaauaccu

SEQ ID NO: 722518 - RNA, 19 nt, Artificial Sequence
  Description of Artificial Sequence: Synthetic oligonucleotide
ggaugagaggacuucacuc

SEQ ID NO: 722519 - RNA, 19 nt, Artificial Sequence
  Description of Artificial Sequence: Synthetic oligonucleotide
uuaaaacuccugugccaga

SEQ ID NO: 722520 - RNA, 19 nt, Artificial Sequence
  Description of Artificial Sequence: Synthetic oligonucleotide
ugggauacaugagugcggu

SEQ ID NO: 722521 - RNA, 19 nt, Artificial Sequence
  Description of Artificial Sequence: Synthetic oligonucleotide
ggaaauagucuucuuuaca

SEQ ID NO: 722522 - RNA, 19 nt, Artificial Sequence
  Description of Artificial Sequence: Synthetic oligonucleotide
guugugagcagagaccuga

SEQ ID NO: 722523 - RNA, 19 nt, Artificial Sequence
  Description of Artificial Sequence: Synthetic oligonucleotide
acaugagugcgguuauaca

SEQ ID NO: 722524 - RNA, 19 nt, Artificial Sequence
  Description of Artificial Sequence: Synthetic oligonucleotide
ugaugccgaggacaugugu

SEQ ID NO: 722525 - RNA, 19 nt, Artificial Sequence
  Description of Artificial Sequence: Synthetic oligonucleotide
ugucaugcucccaccugug

SEQ ID NO: 722526 - RNA, 19 nt, Artificial Sequence
  Description of Artificial Sequence: Synthetic oligonucleotide
ggcuauuuugugcuugggc

SEQ ID NO: 722527 - RNA, 19 nt, Artificial Sequence
  Description of Artificial Sequence: Synthetic oligonucleotide
agaaggcuccgaugauaac

SEQ ID NO: 722528 - RNA, 19 nt, Artificial Sequence
  Description of Artificial Sequence: Synthetic oligonucleotide
aucugucacaaaucuuccu

SEQ ID NO: 722529 - RNA, 19 nt, Artificial Sequence
  Description of Artificial Sequence: Synthetic oligonucleotide
cagaccccuuauuaauacc

SEQ ID NO: 722530 - RNA, 19 nt, Artificial Sequence
  Description of Artificial Sequence: Synthetic oligonucleotide
uuacaccaacaaacagagc

SEQ ID NO: 722531 - RNA, 19 nt, Artificial Sequence
  Description of Artificial Sequence: Synthetic oligonucleotide
ugccauguuuguccgaauu

SEQ ID NO: 722532 - RNA, 19 nt, Artificial Sequence
  Description of Artificial Sequence: Synthetic oligonucleotide
uguaucugccauguuuguc

SEQ ID NO: 722533 - RNA, 19 nt, Artificial Sequence
  Description of Artificial Sequence: Synthetic oligonucleotide
ggaucuuugucaugcuccc

SEQ ID NO: 722534 - RNA, 19 nt, Artificial Sequence
  Description of Artificial Sequence: Synthetic oligonucleotide
cauguuuguccgaauuaca

SEQ ID NO: 722535 - RNA, 19 nt, Artificial Sequence
  Description of Artificial Sequence: Synthetic oligonucleotide
ugucggcagaaagaaagaa

SEQ ID NO: 722536 - RNA, 19 nt, Artificial Sequence
  Description of Artificial Sequence: Synthetic oligonucleotide
uccugugccagagagucau

SEQ ID NO: 722537 - RNA, 19 nt, Artificial Sequence
  Description of Artificial Sequence: Synthetic oligonucleotide
gcgguuauacaacaggcca

SEQ ID NO: 722538 - RNA, 19 nt, Artificial Sequence
  Description of Artificial Sequence: Synthetic oligonucleotide
agucauuaauuugcuaaaa

SEQ ID NO: 722539 - RNA, 19 nt, Artificial Sequence
  Description of Artificial Sequence: Synthetic oligonucleotide
auauuucaggauaaaccaa

SEQ ID NO: 722540 - RNA, 19 nt, Artificial Sequence
  Description of Artificial Sequence: Synthetic oligonucleotide
augggauacaugagugcgg

SEQ ID NO: 722541 - RNA, 19 nt, Artificial Sequence
  Description of Artificial Sequence: Synthetic oligonucleotide
auaacgucucuaggaaucu

SEQ ID NO: 722542 - RNA, 19 nt, Artificial Sequence
  Description of Artificial Sequence: Synthetic oligonucleotide
ccgaugauaaccuggcaac

SEQ ID NO: 722543 - RNA, 19 nt, Artificial Sequence
  Description of Artificial Sequence: Synthetic oligonucleotide
ggccaugcgaugugcaagg

SEQ ID NO: 722544 - RNA, 19 nt, Artificial Sequence
  Description of Artificial Sequence: Synthetic oligonucleotide
auuuaccauguaggcugcc

SEQ ID NO: 722545 - RNA, 19 nt, Artificial Sequence
  Description of Artificial Sequence: Synthetic oligonucleotide
agccgccacagguuugugg

SEQ ID NO: 722546 - RNA, 19 nt, Artificial Sequence
  Description of Artificial Sequence: Synthetic oligonucleotide
uacaugugaugccgaggac

SEQ ID NO: 722547 - RNA, 19 nt, Artificial Sequence
  Description of Artificial Sequence: Synthetic oligonucleotide
uccuuaagugggcuauuuu

SEQ ID NO: 722548 - RNA, 19 nt, Artificial Sequence
  Description of Artificial Sequence: Synthetic oligonucleotide
aggacauguguaaccauca

SEQ ID NO: 722549 - RNA, 19 nt, Artificial Sequence
  Description of Artificial Sequence: Synthetic oligonucleotide
ccuaagugacuuaucucag

SEQ ID NO: 722550 - RNA, 19 nt, Artificial Sequence
  Description of Artificial Sequence: Synthetic oligonucleotide
ugaagccgccacagguuug

SEQ ID NO: 722551 - RNA, 19 nt, Artificial Sequence
  Description of Artificial Sequence: Synthetic oligonucleotide
ccagagagucauuaauuug

SEQ ID NO: 722552 - RNA, 19 nt, Artificial Sequence
  Description of Artificial Sequence: Synthetic oligonucleotide
gaugccgaggacaugugua

SEQ ID NO: 722553 - RNA, 19 nt, Artificial Sequence
  Description of Artificial Sequence: Synthetic oligonucleotide
gugacuuagccccaucugu

SEQ ID NO: 722554 - RNA, 19 nt, Artificial Sequence
  Description of Artificial Sequence: Synthetic oligonucleotide
uuagccccaucugucacaa

SEQ ID NO: 722555 - RNA, 19 nt, Artificial Sequence
  Description of Artificial Sequence: Synthetic oligonucleotide
aguccuuuagcugcauuaa

SEQ ID NO: 722556 - RNA, 19 nt, Artificial Sequence
  Description of Artificial Sequence: Synthetic oligonucleotide
ugugaucaggaaugagcuu

SEQ ID NO: 722557 - RNA, 19 nt, Artificial Sequence
  Description of Artificial Sequence: Synthetic oligonucleotide
augccgaggacauguguaa

SEQ ID NO: 722558 - RNA, 19 nt, Artificial Sequence
  Description of Artificial Sequence: Synthetic oligonucleotide
auaccugccagaccccuua

SEQ ID NO: 722559 - RNA, 19 nt, Artificial Sequence
  Description of Artificial Sequence: Synthetic oligonucleotide
uggcuacaagaauccuaag

SEQ ID NO: 722560 - RNA, 19 nt, Artificial Sequence
  Description of Artificial Sequence: Synthetic oligonucleotide
uaucucagagaggguauau

SEQ ID NO: 722561 - RNA, 19 nt, Artificial Sequence
  Description of Artificial Sequence: Synthetic oligonucleotide
guaaagcuguucaggugug

SEQ ID NO: 722562 - RNA, 19 nt, Artificial Sequence
  Description of Artificial Sequence: Synthetic oligonucleotide
uuauaauaucuggucucuu

SEQ ID NO: 722563 - RNA, 19 nt, Artificial Sequence
  Description of Artificial Sequence: Synthetic oligonucleotide
acggauucaaccggaaauu

SEQ ID NO: 722564 - RNA, 19 nt, Artificial Sequence
  Description of Artificial Sequence: Synthetic oligonucleotide
caccuuauaagauguuucu

SEQ ID NO: 722565 - RNA, 19 nt, Artificial Sequence
  Description of Artificial Sequence: Synthetic oligonucleotide
gguuauacaacaggccaca

SEQ ID NO: 722566 - RNA, 19 nt, Artificial Sequence
  Description of Artificial Sequence: Synthetic oligonucleotide
gguaacagccacaguacac

SEQ ID NO: 722567 - RNA, 19 nt, Artificial Sequence
  Description of Artificial Sequence: Synthetic oligonucleotide
ccugaugggaaaauaaaua

SEQ ID NO: 722568 - RNA, 19 nt, Artificial Sequence
  Description of Artificial Sequence: Synthetic oligonucleotide
gagugcgguuauacaacag

SEQ ID NO: 722569 - RNA, 19 nt, Artificial Sequence
  Description of Artificial Sequence: Synthetic oligonucleotide
cacgagacaugaaagaauu

SEQ ID NO: 722570 - RNA, 19 nt, Artificial Sequence
  Description of Artificial Sequence: Synthetic oligonucleotide
aauugaguccuaaguccuu

SEQ ID NO: 722571 - RNA, 19 nt, Artificial Sequence
  Description of Artificial Sequence: Synthetic oligonucleotide
ugcacaguacucggaaaua

SEQ ID NO: 722572 - RNA, 19 nt, Artificial Sequence
  Description of Artificial Sequence: Synthetic oligonucleotide
gacacuucggucugauuau

SEQ ID NO: 722573 - RNA, 19 nt, Artificial Sequence
  Description of Artificial Sequence: Synthetic oligonucleotide
auggguuggucaggguuuc

SEQ ID NO: 722574 - RNA, 19 nt, Artificial Sequence
  Description of Artificial Sequence: Synthetic oligonucleotide
auugaguccuaaguccuuu

SEQ ID NO: 722575 - RNA, 19 nt, Artificial Sequence
  Description of Artificial Sequence: Synthetic oligonucleotide
ugccuacagcagcuuugag

SEQ ID NO: 722576 - RNA, 19 nt, Artificial Sequence
  Description of Artificial Sequence: Synthetic oligonucleotide
auguuaaaacaaguaucuu

SEQ ID NO: 722577 - RNA, 19 nt, Artificial Sequence
  Description of Artificial Sequence: Synthetic oligonucleotide
uggagaucugaagccgcca

SEQ ID NO: 722578 - RNA, 19 nt, Artificial Sequence
  Description of Artificial Sequence: Synthetic oligonucleotide
ggagaucugaagccgccac

SEQ ID NO: 722579 - RNA, 19 nt, Artificial Sequence
  Description of Artificial Sequence: Synthetic oligonucleotide
aaccaucauaacgucucua

SEQ ID NO: 722580 - RNA, 19 nt, Artificial Sequence
  Description of Artificial Sequence: Synthetic oligonucleotide
ccauguuuguccgaauuac

SEQ ID NO: 722581 - RNA, 19 nt, Artificial Sequence
  Description of Artificial Sequence: Synthetic oligonucleotide
ccagaccccuuauuaauac

SEQ ID NO: 722582 - RNA, 19 nt, Artificial Sequence
  Description of Artificial Sequence: Synthetic oligonucleotide
acaucagccacgagacaug

SEQ ID NO: 722583 - RNA, 19 nt, Artificial Sequence
  Description of Artificial Sequence: Synthetic oligonucleotide
cuguucagguguggaauac

SEQ ID NO: 722584 - RNA, 19 nt, Artificial Sequence
  Description of Artificial Sequence: Synthetic oligonucleotide
uggcccuuugaggacacaa

SEQ ID NO: 722585 - RNA, 19 nt, Artificial Sequence
  Description of Artificial Sequence: Synthetic oligonucleotide
caguacucggaaauagucu

SEQ ID NO: 722586 - RNA, 19 nt, Artificial Sequence
  Description of Artificial Sequence: Synthetic oligonucleotide
accuuauaagauguuucuu

SEQ ID NO: 722587 - RNA, 19 nt, Artificial Sequence
  Description of Artificial Sequence: Synthetic oligonucleotide
ugccauagugucggcagaa

SEQ ID NO: 722588 - RNA, 19 nt, Artificial Sequence
  Description of Artificial Sequence: Synthetic oligonucleotide
gugucagcuaugacaagca

SEQ ID NO: 722589 - RNA, 19 nt, Artificial Sequence
  Description of Artificial Sequence: Synthetic oligonucleotide
cccuuauuaauaccuucac

SEQ ID NO: 722590 - RNA, 19 nt, Artificial Sequence
  Description of Artificial Sequence: Synthetic oligonucleotide
guugggaaggaagcaucac

SEQ ID NO: 722591 - RNA, 19 nt, Artificial Sequence
  Description of Artificial Sequence: Synthetic oligonucleotide
ugcucacaucaggaaaccu

SEQ ID NO: 722592 - RNA, 19 nt, Artificial Sequence
  Description of Artificial Sequence: Synthetic oligonucleotide
acaacaggccacauauuuu

SEQ ID NO: 722593 - RNA, 19 nt, Artificial Sequence
  Description of Artificial Sequence: Synthetic oligonucleotide
cuuaucucagagaggguau

SEQ ID NO: 722594 - RNA, 19 nt, Artificial Sequence
  Description of Artificial Sequence: Synthetic oligonucleotide
cuauuuugugcuugggcau

SEQ ID NO: 722595 - RNA, 19 nt, Artificial Sequence
  Description of Artificial Sequence: Synthetic oligonucleotide
agguagaaacucagccaag

SEQ ID NO: 722596 - RNA, 19 nt, Artificial Sequence
  Description of Artificial Sequence: Synthetic oligonucleotide
uguccgaauuacagcuguu

SEQ ID NO: 722597 - RNA, 19 nt, Artificial Sequence
  Description of Artificial Sequence: Synthetic oligonucleotide
ggguuucuuguccagcauc

SEQ ID NO: 722598 - RNA, 19 nt, Artificial Sequence
  Description of Artificial Sequence: Synthetic oligonucleotide
cauucugauccucuuucua

SEQ ID NO: 722599 - RNA, 19 nt, Artificial Sequence
  Description of Artificial Sequence: Synthetic oligonucleotide
ggauucaaccggaaauuca

SEQ ID NO: 722600 - RNA, 19 nt, Artificial Sequence
  Description of Artificial Sequence: Synthetic oligonucleotide
gcuccgaugauaaccuggc

SEQ ID NO: 722601 - RNA, 19 nt, Artificial Sequence
  Description of Artificial Sequence: Synthetic oligonucleotide
caucagccaugcacaguac

SEQ ID NO: 722602 - RNA, 19 nt, Artificial Sequence
  Description of Artificial Sequence: Synthetic oligonucleotide
cuugggcaugaaucugcuc

SEQ ID NO: 722603 - RNA, 19 nt, Artificial Sequence
  Description of Artificial Sequence: Synthetic oligonucleotide
acacuucggucugauuaug

SEQ ID NO: 722604 - RNA, 19 nt, Artificial Sequence
  Description of Artificial Sequence: Synthetic oligonucleotide
ucggucugauuaugcuuuc

SEQ ID NO: 722605 - RNA, 19 nt, Artificial Sequence
  Description of Artificial Sequence: Synthetic oligonucleotide
cccaauuaguucaguagca

SEQ ID NO: 722606 - RNA, 19 nt, Artificial Sequence
  Description of Artificial Sequence: Synthetic oligonucleotide
auucaaccggaaauucaau

SEQ ID NO: 722607 - RNA, 19 nt, Artificial Sequence
  Description of Artificial Sequence: Synthetic oligonucleotide
caauuaguucaguagcauu

SEQ ID NO: 722608 - RNA, 19 nt, Artificial Sequence
  Description of Artificial Sequence: Synthetic oligonucleotide
ggguaaguagccccaaugu

SEQ ID NO: 722609 - RNA, 19 nt, Artificial Sequence
  Description of Artificial Sequence: Synthetic oligonucleotide
ccccuuauuaauaccuuca

SEQ ID NO: 722610 - RNA, 19 nt, Artificial Sequence
  Description of Artificial Sequence: Synthetic oligonucleotide
ugccgaggacauguguaac

SEQ ID NO: 722611 - RNA, 19 nt, Artificial Sequence
  Description of Artificial Sequence: Synthetic oligonucleotide
ccuacaugugaugccgagg

SEQ ID NO: 722612 - RNA, 19 nt, Artificial Sequence
  Description of Artificial Sequence: Synthetic oligonucleotide
aauaccugccagaccccuu

SEQ ID NO: 722613 - RNA, 19 nt, Artificial Sequence
  Description of Artificial Sequence: Synthetic oligonucleotide
ugcugaucaucagcuccac

SEQ ID NO: 722614 - RNA, 19 nt, Artificial Sequence
  Description of Artificial Sequence: Synthetic oligonucleotide
cuuugagauggcugcccaa

SEQ ID NO: 722615 - RNA, 19 nt, Artificial Sequence
  Description of Artificial Sequence: Synthetic oligonucleotide
gugucggcagaaagaaaga

SEQ ID NO: 722616 - RNA, 19 nt, Artificial Sequence
  Description of Artificial Sequence: Synthetic oligonucleotide
agcuuccaacauugcuacu

SEQ ID NO: 722617 - RNA, 19 nt, Artificial Sequence
  Description of Artificial Sequence: Synthetic oligonucleotide
cgguuauacaacaggccac

SEQ ID NO: 722618 - RNA, 19 nt, Artificial Sequence
  Description of Artificial Sequence: Synthetic oligonucleotide
gcuuugagauggcugccca

SEQ ID NO: 722619 - RNA, 19 nt, Artificial Sequence
  Description of Artificial Sequence: Synthetic oligonucleotide
aggcuccgaugauaaccug

SEQ ID NO: 722620 - RNA, 19 nt, Artificial Sequence
  Description of Artificial Sequence: Synthetic oligonucleotide
uugacacuucggucugauu

SEQ ID NO: 722621 - RNA, 19 nt, Artificial Sequence
  Description of Artificial Sequence: Synthetic oligonucleotide
gcaacccagguagaaacuc

SEQ ID NO: 722622 - RNA, 19 nt, Artificial Sequence
  Description of Artificial Sequence: Synthetic oligonucleotide
ggcccuuugaggacacaag

SEQ ID NO: 722623 - RNA, 19 nt, Artificial Sequence
  Description of Artificial Sequence: Synthetic oligonucleotide
gcagggauuggagaucuga

SEQ ID NO: 722624 - RNA, 19 nt, Artificial Sequence
  Description of Artificial Sequence: Synthetic oligonucleotide
ugcgaugugcaagggucuu

SEQ ID NO: 722625 - RNA, 19 nt, Artificial Sequence
  Description of Artificial Sequence: Synthetic oligonucleotide
aucugccauguuuguccga

SEQ ID NO: 722626 - RNA, 19 nt, Artificial Sequence
  Description of Artificial Sequence: Synthetic oligonucleotide
gaagccgccacagguuugu

SEQ ID NO: 722627 - RNA, 19 nt, Artificial Sequence
  Description of Artificial Sequence: Synthetic oligonucleotide
cacggacagggcugcaaca

SEQ ID NO: 722628 - RNA, 19 nt, Artificial Sequence
  Description of Artificial Sequence: Synthetic oligonucleotide
ggguauauuuguaguugga

SEQ ID NO: 722629 - RNA, 19 nt, Artificial Sequence
  Description of Artificial Sequence: Synthetic oligonucleotide
gccacgagacaugaaagaa

SEQ ID NO: 722630 - RNA, 19 nt, Artificial Sequence
  Description of Artificial Sequence: Synthetic oligonucleotide
gguuuguggcagauggcuc

SEQ ID NO: 722631 - RNA, 19 nt, Artificial Sequence
  Description of Artificial Sequence: Synthetic oligonucleotide
cuccuacaugugaugccga

SEQ ID NO: 722632 - RNA, 19 nt, Artificial Sequence
  Description of Artificial Sequence: Synthetic oligonucleotide
ggaauaccugccagacccc

SEQ ID NO: 722633 - RNA, 19 nt, Artificial Sequence
  Description of Artificial Sequence: Synthetic oligonucleotide
ccccaauguaagacugaag

SEQ ID NO: 722634 - RNA, 19 nt, Artificial Sequence
  Description of Artificial Sequence: Synthetic oligonucleotide
cucuaggaaucuguauuua

SEQ ID NO: 722635 - RNA, 19 nt, Artificial Sequence
  Description of Artificial Sequence: Synthetic oligonucleotide
guaguuggaugcaaauauu

SEQ ID NO: 722636 - RNA, 19 nt, Artificial Sequence
  Description of Artificial Sequence: Synthetic oligonucleotide
gugaugccgaggacaugug

SEQ ID NO: 722637 - RNA, 19 nt, Artificial Sequence
  Description of Artificial Sequence: Synthetic oligonucleotide
cgaugauaaccuggcaacc

SEQ ID NO: 722638 - RNA, 19 nt, Artificial Sequence
  Description of Artificial Sequence: Synthetic oligonucleotide
acgucucuaggaaucugua

SEQ ID NO: 722639 - RNA, 19 nt, Artificial Sequence
  Description of Artificial Sequence: Synthetic oligonucleotide
gcuguucagguguggaaua

SEQ ID NO: 722640 - RNA, 19 nt, Artificial Sequence
  Description of Artificial Sequence: Synthetic oligonucleotide
acgagacaugaaagaauuu

SEQ ID NO: 722641 - RNA, 19 nt, Artificial Sequence
  Description of Artificial Sequence: Synthetic oligonucleotide
cuccgaugauaaccuggca

SEQ ID NO: 722642 - RNA, 19 nt, Artificial Sequence
  Description of Artificial Sequence: Synthetic oligonucleotide
ccaauguaagacugaagau

SEQ ID NO: 722643 - RNA, 19 nt, Artificial Sequence
  Description of Artificial Sequence: Synthetic oligonucleotide
cugggaucaagagcuagau

SEQ ID NO: 722644 - RNA, 19 nt, Artificial Sequence
  Description of Artificial Sequence: Synthetic oligonucleotide
caccacauaugggauacau

SEQ ID NO: 722645 - RNA, 19 nt, Artificial Sequence
  Description of Artificial Sequence: Synthetic oligonucleotide
uggguuggucaggguuucu

SEQ ID NO: 722646 - RNA, 19 nt, Artificial Sequence
  Description of Artificial Sequence: Synthetic oligonucleotide
guccgaauuacagcuguuu

SEQ ID NO: 722647 - RNA, 19 nt, Artificial Sequence
  Description of Artificial Sequence: Synthetic oligonucleotide
gggacaucuguaaacguuu

SEQ ID NO: 722648 - RNA, 19 nt, Artificial Sequence
  Description of Artificial Sequence: Synthetic oligonucleotide
cugaagccgccacagguuu

SEQ ID NO: 722649 - RNA, 19 nt, Artificial Sequence
  Description of Artificial Sequence: Synthetic oligonucleotide
gcuacuccaaagaauucau

SEQ ID NO: 722650 - RNA, 19 nt, Artificial Sequence
  Description of Artificial Sequence: Synthetic oligonucleotide
ccgaggacauguguaacca

SEQ ID NO: 722651 - RNA, 19 nt, Artificial Sequence
  Description of Artificial Sequence: Synthetic oligonucleotide
gccaugcgaugugcaaggg

SEQ ID NO: 722652 - RNA, 19 nt, Artificial Sequence
  Description of Artificial Sequence: Synthetic oligonucleotide
ccgaauuacagcuguuuau

SEQ ID NO: 722653 - RNA, 19 nt, Artificial Sequence
  Description of Artificial Sequence: Synthetic oligonucleotide
gacuuaucucagagagggu

SEQ ID NO: 722654 - RNA, 19 nt, Artificial Sequence
  Description of Artificial Sequence: Synthetic oligonucleotide
gaccccuuauuaauaccuu

SEQ ID NO: 722655 - RNA, 19 nt, Artificial Sequence
  Description of Artificial Sequence: Synthetic oligonucleotide
cggauucaaccggaaauuc

SEQ ID NO: 722656 - RNA, 19 nt, Artificial Sequence
  Description of Artificial Sequence: Synthetic oligonucleotide
ccacgagacaugaaagaau

SEQ ID NO: 722657 - RNA, 19 nt, Artificial Sequence
  Description of Artificial Sequence: Synthetic oligonucleotide
gccagaccccuuauuaaua

SEQ ID NO: 722658 - RNA, 19 nt, Artificial Sequence
  Description of Artificial Sequence: Synthetic oligonucleotide
cucagccaagugugagugu

SEQ ID NO: 722659 - RNA, 19 nt, Artificial Sequence
  Description of Artificial Sequence: Synthetic oligonucleotide
uagccccaucugucacaaa

SEQ ID NO: 722660 - RNA, 19 nt, Artificial Sequence
  Description of Artificial Sequence: Synthetic oligonucleotide
gccaugcacaguacucgga

SEQ ID NO: 722661 - RNA, 19 nt, Artificial Sequence
  Description of Artificial Sequence: Synthetic oligonucleotide
ccaauuaguucaguagcau

SEQ ID NO: 722662 - RNA, 19 nt, Artificial Sequence
  Description of Artificial Sequence: Synthetic oligonucleotide
gcaguuuggcugccauagu

SEQ ID NO: 722663 - RNA, 19 nt, Artificial Sequence
  Description of Artificial Sequence: Synthetic oligonucleotide
cuaaguccuuuagcugcau

SEQ ID NO: 722664 - RNA, 19 nt, Artificial Sequence
  Description of Artificial Sequence: Synthetic oligonucleotide
ccaugcgaugugcaagggu

SEQ ID NO: 722665 - RNA, 19 nt, Artificial Sequence
  Description of Artificial Sequence: Synthetic oligonucleotide
cgaggaaauugaguccuaa

SEQ ID NO: 722666 - RNA, 19 nt, Artificial Sequence
  Description of Artificial Sequence: Synthetic oligonucleotide
cugccauguuuguccgaau

SEQ ID NO: 722667 - RNA, 19 nt, Artificial Sequence
  Description of Artificial Sequence: Synthetic oligonucleotide
gggauacaugagugcgguu

SEQ ID NO: 722668 - RNA, 19 nt, Artificial Sequence
  Description of Artificial Sequence: Synthetic oligonucleotide
cgaggacauguguaaccau

SEQ ID NO: 722669 - RNA, 19 nt, Artificial Sequence
  Description of Artificial Sequence: Synthetic oligonucleotide
aauaaugggaaccaccugc

SEQ ID NO: 722670 - RNA, 19 nt, Artificial Sequence
  Description of Artificial Sequence: Synthetic oligonucleotide
uuaaaugacaauuauguac

SEQ ID NO: 722671 - RNA, 19 nt, Artificial Sequence
  Description of Artificial Sequence: Synthetic oligonucleotide
auuauguacaaccacgcgg

SEQ ID NO: 722672 - RNA, 19 nt, Artificial Sequence
  Description of Artificial Sequence: Synthetic oligonucleotide
gauagcuacacacuggccg

SEQ ID NO: 722673 - RNA, 19 nt, Artificial Sequence
  Description of Artificial Sequence: Synthetic oligonucleotide
ucgaacucgguauagauag

SEQ ID NO: 722674 - RNA, 19 nt, Artificial Sequence
  Description of Artificial Sequence: Synthetic oligonucleotide
uauauauauauauauacuu

SEQ ID NO: 722675 - RNA, 19 nt, Artificial Sequence
  Description of Artificial Sequence: Synthetic oligonucleotide
aacaaaacuuggcccaagc

SEQ ID NO: 722676 - RNA, 19 nt, Artificial Sequence
  Description of Artificial Sequence: Synthetic oligonucleotide
ugcaaaaucauugaccucc

SEQ ID NO: 722677 - RNA, 19 nt, Artificial Sequence
  Description of Artificial Sequence: Synthetic oligonucleotide
aauuauguacaaccacgcg

SEQ ID NO: 722678 - RNA, 19 nt, Artificial Sequence
  Description of Artificial Sequence: Synthetic oligonucleotide
aauuccaagucacccgggc

SEQ ID NO: 722679 - RNA, 19 nt, Artificial Sequence
  Description of Artificial Sequence: Synthetic oligonucleotide
ucuuucacgaacuucacgu

SEQ ID NO: 722680 - RNA, 19 nt, Artificial Sequence
  Description of Artificial Sequence: Synthetic oligonucleotide
uauauauauauauacuuuu

SEQ ID NO: 722681 - RNA, 19 nt, Artificial Sequence
  Description of Artificial Sequence: Synthetic oligonucleotide
aaagugcaagaucuugugg

SEQ ID NO: 722682 - RNA, 19 nt, Artificial Sequence
  Description of Artificial Sequence: Synthetic oligonucleotide
uguacaaccacgcgggaag

SEQ ID NO: 722683 - RNA, 19 nt, Artificial Sequence
  Description of Artificial Sequence: Synthetic oligonucleotide
ucugauaagagcccauacc

SEQ ID NO: 722684 - RNA, 19 nt, Artificial Sequence
  Description of Artificial Sequence: Synthetic oligonucleotide
ugaguacuuagccagcucc

SEQ ID NO: 722685 - RNA, 19 nt, Artificial Sequence
  Description of Artificial Sequence: Synthetic oligonucleotide
cagcuuaucgaauaucugg

SEQ ID NO: 722686 - RNA, 19 nt, Artificial Sequence
  Description of Artificial Sequence: Synthetic oligonucleotide
uugugagucguucuuagca

SEQ ID NO: 722687 - RNA, 19 nt, Artificial Sequence
  Description of Artificial Sequence: Synthetic oligonucleotide
aacuucacguauuugucca

SEQ ID NO: 722688 - RNA, 19 nt, Artificial Sequence
  Description of Artificial Sequence: Synthetic oligonucleotide
uuaucgaauaucuggggca

SEQ ID NO: 722689 - RNA, 19 nt, Artificial Sequence
  Description of Artificial Sequence: Synthetic oligonucleotide
agcauuugccaauaauggg

SEQ ID NO: 722690 - RNA, 19 nt, Artificial Sequence
  Description of Artificial Sequence: Synthetic oligonucleotide
uuugguaggucucuuggga

SEQ ID NO: 722691 - RNA, 19 nt, Artificial Sequence
  Description of Artificial Sequence: Synthetic oligonucleotide
auuaauguccugauccagc

SEQ ID NO: 722692 - RNA, 19 nt, Artificial Sequence
  Description of Artificial Sequence: Synthetic oligonucleotide
cuuaucgaauaucuggggc

SEQ ID NO: 722693 - RNA, 19 nt, Artificial Sequence
  Description of Artificial Sequence: Synthetic oligonucleotide
uuccaagucacccgggcgg

SEQ ID NO: 722694 - RNA, 19 nt, Artificial Sequence
  Description of Artificial Sequence: Synthetic oligonucleotide
ucguucuuagcauccacgg

SEQ ID NO: 722695 - RNA, 19 nt, Artificial Sequence
  Description of Artificial Sequence: Synthetic oligonucleotide
caagugggucccuagaggg

SEQ ID NO: 722696 - RNA, 19 nt, Artificial Sequence
  Description of Artificial Sequence: Synthetic oligonucleotide
gaagcugcacgaaugauug

SEQ ID NO: 722697 - RNA, 19 nt, Artificial Sequence
  Description of Artificial Sequence: Synthetic oligonucleotide
aguugcuuggcauaagccu

SEQ ID NO: 722698 - RNA, 19 nt, Artificial Sequence
  Description of Artificial Sequence: Synthetic oligonucleotide
guugaagcguugcagcugg

SEQ ID NO: 722699 - RNA, 19 nt, Artificial Sequence
  Description of Artificial Sequence: Synthetic oligonucleotide
auagauagggguguccugg

SEQ ID NO: 722700 - RNA, 19 nt, Artificial Sequence
  Description of Artificial Sequence: Synthetic oligonucleotide
aagugguagauagcuacac

SEQ ID NO: 722701 - RNA, 19 nt, Artificial Sequence
  Description of Artificial Sequence: Synthetic oligonucleotide
gaacucgguauagauaggg

SEQ ID NO: 722702 - RNA, 19 nt, Artificial Sequence
  Description of Artificial Sequence: Synthetic oligonucleotide
uucgaagugguagauagcu

SEQ ID NO: 722703 - RNA, 19 nt, Artificial Sequence
  Description of Artificial Sequence: Synthetic oligonucleotide
aaugcggggcucuaagcug

SEQ ID NO: 722704 - RNA, 19 nt, Artificial Sequence
  Description of Artificial Sequence: Synthetic oligonucleotide
acugaaaucuucggugacc

SEQ ID NO: 722705 - RNA, 19 nt, Artificial Sequence
  Description of Artificial Sequence: Synthetic oligonucleotide
ucuccugugaguacuuagc

SEQ ID NO: 722706 - RNA, 19 nt, Artificial Sequence
  Description of Artificial Sequence: Synthetic oligonucleotide
uucccaaaaggccagcgcu

SEQ ID NO: 722707 - RNA, 19 nt, Artificial Sequence
  Description of Artificial Sequence: Synthetic oligonucleotide
ugagucguucuuagcaucc

SEQ ID NO: 722708 - RNA, 19 nt, Artificial Sequence
  Description of Artificial Sequence: Synthetic oligonucleotide
cuggccugcaaaaucauug

SEQ ID NO: 722709 - RNA, 19 nt, Artificial Sequence
  Description of Artificial Sequence: Synthetic oligonucleotide
uccagacauacccggaugc

SEQ ID NO: 722710 - RNA, 19 nt, Artificial Sequence
  Description of Artificial Sequence: Synthetic oligonucleotide
uacggcuggaggcugcucg

SEQ ID NO: 722711 - RNA, 19 nt, Artificial Sequence
  Description of Artificial Sequence: Synthetic oligonucleotide
cugacauggagaugguucc

SEQ ID NO: 722712 - RNA, 19 nt, Artificial Sequence
  Description of Artificial Sequence: Synthetic oligonucleotide
uccgcggccaccuucauac

SEQ ID NO: 722713 - RNA, 19 nt, Artificial Sequence
  Description of Artificial Sequence: Synthetic oligonucleotide
agcuuaucgaauaucuggg

SEQ ID NO: 722714 - RNA, 19 nt, Artificial Sequence
  Description of Artificial Sequence: Synthetic oligonucleotide
ugacucggagguaugaggu

SEQ ID NO: 722715 - RNA, 19 nt, Artificial Sequence
  Description of Artificial Sequence: Synthetic oligonucleotide
ucaugacuuggcuaaaguc

SEQ ID NO: 722716 - RNA, 19 nt, Artificial Sequence
  Description of Artificial Sequence: Synthetic oligonucleotide
cucgguauagauaggggug

SEQ ID NO: 722717 - RNA, 19 nt, Artificial Sequence
  Description of Artificial Sequence: Synthetic oligonucleotide
acucgguauagauaggggu

SEQ ID NO: 722718 - RNA, 19 nt, Artificial Sequence
  Description of Artificial Sequence: Synthetic oligonucleotide
uaugaggugggcacauagc

SEQ ID NO: 722719 - RNA, 19 nt, Artificial Sequence
  Description of Artificial Sequence: Synthetic oligonucleotide
cacgaaugauuguugcugg

SEQ ID NO: 722720 - RNA, 19 nt, Artificial Sequence
  Description of Artificial Sequence: Synthetic oligonucleotide
ucaguugagugugacucgg

SEQ ID NO: 722721 - RNA, 19 nt, Artificial Sequence
  Description of Artificial Sequence: Synthetic oligonucleotide
gguagauagcuacacacug

SEQ ID NO: 722722 - RNA, 19 nt, Artificial Sequence
  Description of Artificial Sequence: Synthetic oligonucleotide
auauauauauauauacuuu

SEQ ID NO: 722723 - RNA, 19 nt, Artificial Sequence
  Description of Artificial Sequence: Synthetic oligonucleotide
guaugaggugggcacauag

SEQ ID NO: 722724 - RNA, 19 nt, Artificial Sequence
  Description of Artificial Sequence: Synthetic oligonucleotide
gaucaggcggccuggagug

SEQ ID NO: 722725 - RNA, 19 nt, Artificial Sequence
  Description of Artificial Sequence: Synthetic oligonucleotide
ugguagauagcuacacacu

SEQ ID NO: 722726 - RNA, 19 nt, Artificial Sequence
  Description of Artificial Sequence: Synthetic oligonucleotide
guagauagcuacacacugg

SEQ ID NO: 722727 - RNA, 19 nt, Artificial Sequence
  Description of Artificial Sequence: Synthetic oligonucleotide
gugacucggagguaugagg

SEQ ID NO: 722728 - RNA, 19 nt, Artificial Sequence
  Description of Artificial Sequence: Synthetic oligonucleotide
uuuucccaaaaggccagcg

SEQ ID NO: 722729 - RNA, 19 nt, Artificial Sequence
  Description of Artificial Sequence: Synthetic oligonucleotide
uccgaaggcacucgguuca

SEQ ID NO: 722730 - RNA, 19 nt, Artificial Sequence
  Description of Artificial Sequence: Synthetic oligonucleotide
aacucgguauagauagggg

SEQ ID NO: 722731 - RNA, 19 nt, Artificial Sequence
  Description of Artificial Sequence: Synthetic oligonucleotide
ugcgcguucuuucacgaac

SEQ ID NO: 722732 - RNA, 19 nt, Artificial Sequence
  Description of Artificial Sequence: Synthetic oligonucleotide
auagcuacacacuggccga

SEQ ID NO: 722733 - RNA, 19 nt, Artificial Sequence
  Description of Artificial Sequence: Synthetic oligonucleotide
acuuggcccaagccgagcg

SEQ ID NO: 722734 - RNA, 19 nt, Artificial Sequence
  Description of Artificial Sequence: Synthetic oligonucleotide
acggccuuccuggaaaugc

SEQ ID NO: 722735 - RNA, 19 nt, Artificial Sequence
  Description of Artificial Sequence: Synthetic oligonucleotide
ugguaggucucuugggaag

SEQ ID NO: 722736 - RNA, 19 nt, Artificial Sequence
  Description of Artificial Sequence: Synthetic oligonucleotide
agucguucuuagcauccac

SEQ ID NO: 722737 - RNA, 19 nt, Artificial Sequence
  Description of Artificial Sequence: Synthetic oligonucleotide
uucuuagcauccacggacu

SEQ ID NO: 722738 - RNA, 19 nt, Artificial Sequence
  Description of Artificial Sequence: Synthetic oligonucleotide
agauagggguguccuggcc

SEQ ID NO: 722739 - RNA, 19 nt, Artificial Sequence
  Description of Artificial Sequence: Synthetic oligonucleotide
auaaagugcaagaucuugu

SEQ ID NO: 722740 - RNA, 19 nt, Artificial Sequence
  Description of Artificial Sequence: Synthetic oligonucleotide
acucggagguaugaggugg

SEQ ID NO: 722741 - RNA, 19 nt, Artificial Sequence
  Description of Artificial Sequence: Synthetic oligonucleotide
gaaaggucuuaaaugacaa

SEQ ID NO: 722742 - RNA, 19 nt, Artificial Sequence
  Description of Artificial Sequence: Synthetic oligonucleotide
auaagagcccauacccagc

SEQ ID NO: 722743 - RNA, 19 nt, Artificial Sequence
  Description of Artificial Sequence: Synthetic oligonucleotide
ugugagucguucuuagcau

SEQ ID NO: 722744 - RNA, 19 nt, Artificial Sequence
  Description of Artificial Sequence: Synthetic oligonucleotide
uccuuauuauccugggauc

SEQ ID NO: 722745 - RNA, 19 nt, Artificial Sequence
  Description of Artificial Sequence: Synthetic oligonucleotide
ggaauaaagugcaagaucu

SEQ ID NO: 722746 - RNA, 19 nt, Artificial Sequence
  Description of Artificial Sequence: Synthetic oligonucleotide
uacccggaugcccagacuc

SEQ ID NO: 722747 - RNA, 19 nt, Artificial Sequence
  Description of Artificial Sequence: Synthetic oligonucleotide
uucacguauuuguccaaca

SEQ ID NO: 722748 - RNA, 19 nt, Artificial Sequence
  Description of Artificial Sequence: Synthetic oligonucleotide
ucgguuacugaggacccgg

SEQ ID NO: 722749 - RNA, 19 nt, Artificial Sequence
  Description of Artificial Sequence: Synthetic oligonucleotide
uugccaauaaugggaacca

SEQ ID NO: 722750 - RNA, 19 nt, Artificial Sequence
  Description of Artificial Sequence: Synthetic oligonucleotide
ucgaauaucuggggcaucu

SEQ ID NO: 722751 - RNA, 19 nt, Artificial Sequence
  Description of Artificial Sequence: Synthetic oligonucleotide
uccacuauuguugcuacua

SEQ ID NO: 722752 - RNA, 19 nt, Artificial Sequence
  Description of Artificial Sequence: Synthetic oligonucleotide
aaacuuccgcuugcuaguc

SEQ ID NO: 722753 - RNA, 19 nt, Artificial Sequence
  Description of Artificial Sequence: Synthetic oligonucleotide
ugacgacucaggcuauccc

SEQ ID NO: 722754 - RNA, 19 nt, Artificial Sequence
  Description of Artificial Sequence: Synthetic oligonucleotide
uucauacccuccaagcauu

SEQ ID NO: 722755 - RNA, 19 nt, Artificial Sequence
  Description of Artificial Sequence: Synthetic oligonucleotide
auaagccugcuccaccucu

SEQ ID NO: 722756 - RNA, 19 nt, Artificial Sequence
  Description of Artificial Sequence: Synthetic oligonucleotide
gucguucuuagcauccacg

SEQ ID NO: 722757 - RNA, 19 nt, Artificial Sequence
  Description of Artificial Sequence: Synthetic oligonucleotide
ugcacgaaugauuguugcu

SEQ ID NO: 722758 - RNA, 19 nt, Artificial Sequence
  Description of Artificial Sequence: Synthetic oligonucleotide
ugugacucggagguaugag

SEQ ID NO: 722759 - RNA, 19 nt, Artificial Sequence
  Description of Artificial Sequence: Synthetic oligonucleotide
cauuaauguccugauccag

SEQ ID NO: 722760 - RNA, 19 nt, Artificial Sequence
  Description of Artificial Sequence: Synthetic oligonucleotide
ggauccuucgaagugguag

SEQ ID NO: 722761 - RNA, 19 nt, Artificial Sequence
  Description of Artificial Sequence: Synthetic oligonucleotide
gcugaacuugacuucgggg

SEQ ID NO: 722762 - RNA, 19 nt, Artificial Sequence
  Description of Artificial Sequence: Synthetic oligonucleotide
agcguugcagcugggcugc

SEQ ID NO: 722763 - RNA, 19 nt, Artificial Sequence
  Description of Artificial Sequence: Synthetic oligonucleotide
acaacucggugccccaauc

SEQ ID NO: 722764 - RNA, 19 nt, Artificial Sequence
  Description of Artificial Sequence: Synthetic oligonucleotide
cucugauaagagcccauac

SEQ ID NO: 722765 - RNA, 19 nt, Artificial Sequence
  Description of Artificial Sequence: Synthetic oligonucleotide
gaguugcuuggcauaagcc

SEQ ID NO: 722766 - RNA, 19 nt, Artificial Sequence
  Description of Artificial Sequence: Synthetic oligonucleotide
cuugugagucguucuuagc

SEQ ID NO: 722767 - RNA, 19 nt, Artificial Sequence
  Description of Artificial Sequence: Synthetic oligonucleotide
aggcuauccccucgguuac

SEQ ID NO: 722768 - RNA, 19 nt, Artificial Sequence
  Description of Artificial Sequence: Synthetic oligonucleotide
aacuuggcccaagccgagc

SEQ ID NO: 722769 - RNA, 19 nt, Artificial Sequence
  Description of Artificial Sequence: Synthetic oligonucleotide
ugugaguacuuagccagcu

SEQ ID NO: 722770 - RNA, 19 nt, Artificial Sequence
  Description of Artificial Sequence: Synthetic oligonucleotide
gcuuaucgaauaucugggg

SEQ ID NO: 722771 - RNA, 19 nt, Artificial Sequence
  Description of Artificial Sequence: Synthetic oligonucleotide
uuauccugggauccacuau

SEQ ID NO: 722772 - RNA, 19 nt, Artificial Sequence
  Description of Artificial Sequence: Synthetic oligonucleotide
caaccaagccucauacuuc

SEQ ID NO: 722773 - RNA, 19 nt, Artificial Sequence
  Description of Artificial Sequence: Synthetic oligonucleotide
ucggugaccaccgucuugu

SEQ ID NO: 722774 - RNA, 19 nt, Artificial Sequence
  Description of Artificial Sequence: Synthetic oligonucleotide
ucgguauagauaggggugu

SEQ ID NO: 722775 - RNA, 19 nt, Artificial Sequence
  Description of Artificial Sequence: Synthetic oligonucleotide
cucugcgcguucuuucacg

SEQ ID NO: 722776 - RNA, 19 nt, Artificial Sequence
  Description of Artificial Sequence: Synthetic oligonucleotide
ucugcgcguucuuucacga

SEQ ID NO: 722777 - RNA, 19 nt, Artificial Sequence
  Description of Artificial Sequence: Synthetic oligonucleotide
agcauccacggacuccgcg

SEQ ID NO: 722778 - RNA, 19 nt, Artificial Sequence
  Description of Artificial Sequence: Synthetic oligonucleotide
uugcuagucuccaacuguu

SEQ ID NO: 722779 - RNA, 19 nt, Artificial Sequence
  Description of Artificial Sequence: Synthetic oligonucleotide
aggcacucgguucaugacu

SEQ ID NO: 722780 - RNA, 19 nt, Artificial Sequence
  Description of Artificial Sequence: Synthetic oligonucleotide
caauaaugggaaccaccug

SEQ ID NO: 722781 - RNA, 19 nt, Artificial Sequence
  Description of Artificial Sequence: Synthetic oligonucleotide
uauguacaaccacgcggga

SEQ ID NO: 722782 - RNA, 19 nt, Artificial Sequence
  Description of Artificial Sequence: Synthetic oligonucleotide
cacuggauccuucgaagug

SEQ ID NO: 722783 - RNA, 19 nt, Artificial Sequence
  Description of Artificial Sequence: Synthetic oligonucleotide
uccccucgguuacugagga

SEQ ID NO: 722784 - RNA, 19 nt, Artificial Sequence
  Description of Artificial Sequence: Synthetic oligonucleotide
caacucggugccccaaucc

SEQ ID NO: 722785 - RNA, 19 nt, Artificial Sequence
  Description of Artificial Sequence: Synthetic oligonucleotide
ucaucgaacucgguauaga

SEQ ID NO: 722786 - RNA, 19 nt, Artificial Sequence
  Description of Artificial Sequence: Synthetic oligonucleotide
cacacuggccgauagggga

SEQ ID NO: 722787 - RNA, 19 nt, Artificial Sequence
  Description of Artificial Sequence: Synthetic oligonucleotide
cuacacacuggccgauagg

SEQ ID NO: 722788 - RNA, 19 nt, Artificial Sequence
  Description of Artificial Sequence: Synthetic oligonucleotide
ggcaggaauaaagugcaag

SEQ ID NO: 722789 - RNA, 19 nt, Artificial Sequence
  Description of Artificial Sequence: Synthetic oligonucleotide
cagacauacccggaugccc

SEQ ID NO: 722790 - RNA, 19 nt, Artificial Sequence
  Description of Artificial Sequence: Synthetic oligonucleotide
cuggagucgcuuucucugc

SEQ ID NO: 722791 - RNA, 19 nt, Artificial Sequence
  Description of Artificial Sequence: Synthetic oligonucleotide
cugggcugcguacucauuc

SEQ ID NO: 722792 - RNA, 19 nt, Artificial Sequence
  Description of Artificial Sequence: Synthetic oligonucleotide
gcuagucuccaacuguuug

SEQ ID NO: 722793 - RNA, 19 nt, Artificial Sequence
  Description of Artificial Sequence: Synthetic oligonucleotide
ugacccguguccauccauc

SEQ ID NO: 722794 - RNA, 19 nt, Artificial Sequence
  Description of Artificial Sequence: Synthetic oligonucleotide
ucgcuuucucugcugcucu

SEQ ID NO: 722795 - RNA, 19 nt, Artificial Sequence
  Description of Artificial Sequence: Synthetic oligonucleotide
cucggagguaugagguggg

SEQ ID NO: 722796 - RNA, 19 nt, Artificial Sequence
  Description of Artificial Sequence: Synthetic oligonucleotide
gacucggagguaugaggug

SEQ ID NO: 722797 - RNA, 19 nt, Artificial Sequence
  Description of Artificial Sequence: Synthetic oligonucleotide
uccaagucacccgggcggg

SEQ ID NO: 722798 - RNA, 19 nt, Artificial Sequence
  Description of Artificial Sequence: Synthetic oligonucleotide
aacuuccgcuugcuagucu

SEQ ID NO: 722799 - RNA, 19 nt, Artificial Sequence
  Description of Artificial Sequence: Synthetic oligonucleotide
gcugcguacucauucuugc

SEQ ID NO: 722800 - RNA, 19 nt, Artificial Sequence
  Description of Artificial Sequence: Synthetic oligonucleotide
uggccgauaggggaugcag

SEQ ID NO: 722801 - RNA, 19 nt, Artificial Sequence
  Description of Artificial Sequence: Synthetic oligonucleotide
gacuucggggucaucuuug

SEQ ID NO: 722802 - RNA, 19 nt, Artificial Sequence
  Description of Artificial Sequence: Synthetic oligonucleotide
ccuuauuauccugggaucc

SEQ ID NO: 722803 - RNA, 19 nt, Artificial Sequence
  Description of Artificial Sequence: Synthetic oligonucleotide
gacauacccggaugcccag

SEQ ID NO: 722804 - RNA, 19 nt, Artificial Sequence
  Description of Artificial Sequence: Synthetic oligonucleotide
gcacgaaugauuguugcug

SEQ ID NO: 722805 - RNA, 19 nt, Artificial Sequence
  Description of Artificial Sequence: Synthetic oligonucleotide
gauagggguguccuggccu

SEQ ID NO: 722806 - RNA, 19 nt, Artificial Sequence
  Description of Artificial Sequence: Synthetic oligonucleotide
aacccugacuuguguaguu

SEQ ID NO: 722807 - RNA, 19 nt, Artificial Sequence
  Description of Artificial Sequence: Synthetic oligonucleotide
acccguguccauccaucac

SEQ ID NO: 722808 - RNA, 19 nt, Artificial Sequence
  Description of Artificial Sequence: Synthetic oligonucleotide
agaagugcgccuggucgcg

SEQ ID NO: 722809 - RNA, 19 nt, Artificial Sequence
  Description of Artificial Sequence: Synthetic oligonucleotide
cuccuuauuauccugggau

SEQ ID NO: 722810 - RNA, 19 nt, Artificial Sequence
  Description of Artificial Sequence: Synthetic oligonucleotide
ccuagagggugacaggcgg

SEQ ID NO: 722811 - RNA, 19 nt, Artificial Sequence
  Description of Artificial Sequence: Synthetic oligonucleotide
uggagucgcuuucucugcu

SEQ ID NO: 722812 - RNA, 19 nt, Artificial Sequence
  Description of Artificial Sequence: Synthetic oligonucleotide
cucaucgaacucgguauag

SEQ ID NO: 722813 - RNA, 19 nt, Artificial Sequence
  Description of Artificial Sequence: Synthetic oligonucleotide
aaacuuggcccaagccgag

SEQ ID NO: 722814 - RNA, 19 nt, Artificial Sequence
  Description of Artificial Sequence: Synthetic oligonucleotide
cuucacguauuuguccaac

SEQ ID NO: 722815 - RNA, 19 nt, Artificial Sequence
  Description of Artificial Sequence: Synthetic oligonucleotide
agacauacccggaugccca

SEQ ID NO: 722816 - RNA, 19 nt, Artificial Sequence
  Description of Artificial Sequence: Synthetic oligonucleotide
gugagucguucuuagcauc

SEQ ID NO: 722817 - RNA, 19 nt, Artificial Sequence
  Description of Artificial Sequence: Synthetic oligonucleotide
ggggcucuaagcuggcagg

SEQ ID NO: 722818 - RNA, 19 nt, Artificial Sequence
  Description of Artificial Sequence: Synthetic oligonucleotide
ugugagccgcuuucucagc

SEQ ID NO: 722819 - RNA, 19 nt, Artificial Sequence
  Description of Artificial Sequence: Synthetic oligonucleotide
gccaauaaugggaaccacc

SEQ ID NO: 722820 - RNA, 19 nt, Artificial Sequence
  Description of Artificial Sequence: Synthetic oligonucleotide
uccgccaugugguuccgaa

SEQ ID NO: 722821 - RNA, 19 nt, Artificial Sequence
  Description of Artificial Sequence: Synthetic oligonucleotide
ugacauggagaugguuccc

SEQ ID NO: 722822 - RNA, 19 nt, Artificial Sequence
  Description of Artificial Sequence: Synthetic oligonucleotide
cuccagacauacccggaug

SEQ ID NO: 722823 - RNA, 19 nt, Artificial Sequence
  Description of Artificial Sequence: Synthetic oligonucleotide
acaaccacgcgggaaggca

SEQ ID NO: 722824 - RNA, 19 nt, Artificial Sequence
  Description of Artificial Sequence: Synthetic oligonucleotide
caggcuauccccucgguua

SEQ ID NO: 722825 - RNA, 19 nt, Artificial Sequence
  Description of Artificial Sequence: Synthetic oligonucleotide
uugaagcguugcagcuggg

SEQ ID NO: 722826 - RNA, 19 nt, Artificial Sequence
  Description of Artificial Sequence: Synthetic oligonucleotide
gaacuugacuucgggguca

SEQ ID NO: 722827 - RNA, 19 nt, Artificial Sequence
  Description of Artificial Sequence: Synthetic oligonucleotide
cuuggcccaagccgagcgg

SEQ ID NO: 722828 - RNA, 19 nt, Artificial Sequence
  Description of Artificial Sequence: Synthetic oligonucleotide
ucccacaacucggugcccc

SEQ ID NO: 722829 - RNA, 19 nt, Artificial Sequence
  Description of Artificial Sequence: Synthetic oligonucleotide
ucccaaaaggccagcgcuu

SEQ ID NO: 722830 - RNA, 19 nt, Artificial Sequence
  Description of Artificial Sequence: Synthetic oligonucleotide
gcuacacacuggccgauag

SEQ ID NO: 722831 - RNA, 19 nt, Artificial Sequence
  Description of Artificial Sequence: Synthetic oligonucleotide
caaccacgcgggaaggcac

SEQ ID NO: 722832 - RNA, 19 nt, Artificial Sequence
  Description of Artificial Sequence: Synthetic oligonucleotide
aagcugcacgaaugauugu

SEQ ID NO: 722833 - RNA, 19 nt, Artificial Sequence
  Description of Artificial Sequence: Synthetic oligonucleotide
uugacuucggggucaucuu

SEQ ID NO: 722834 - RNA, 19 nt, Artificial Sequence
  Description of Artificial Sequence: Synthetic oligonucleotide
ggcguuuucucauacacau

SEQ ID NO: 722835 - RNA, 19 nt, Artificial Sequence
  Description of Artificial Sequence: Synthetic oligonucleotide
cuugcuagucuccaacugu

SEQ ID NO: 722836 - RNA, 19 nt, Artificial Sequence
  Description of Artificial Sequence: Synthetic oligonucleotide
aucugcggcguuuucucau

SEQ ID NO: 722837 - RNA, 19 nt, Artificial Sequence
  Description of Artificial Sequence: Synthetic oligonucleotide
gaguacuuagccagcucca

SEQ ID NO: 722838 - RNA, 19 nt, Artificial Sequence
  Description of Artificial Sequence: Synthetic oligonucleotide
gcggcguuuucucauacac

SEQ ID NO: 722839 - RNA, 19 nt, Artificial Sequence
  Description of Artificial Sequence: Synthetic oligonucleotide
caaacuuccgcuugcuagu

SEQ ID NO: 722840 - RNA, 19 nt, Artificial Sequence
  Description of Artificial Sequence: Synthetic oligonucleotide
ugcuguccgaaggcacucg

SEQ ID NO: 722841 - RNA, 19 nt, Artificial Sequence
  Description of Artificial Sequence: Synthetic oligonucleotide
caagucacccgggcgggcg

SEQ ID NO: 722842 - RNA, 19 nt, Artificial Sequence
  Description of Artificial Sequence: Synthetic oligonucleotide
aagugcgccuggucgcggu

SEQ ID NO: 722843 - RNA, 19 nt, Artificial Sequence
  Description of Artificial Sequence: Synthetic oligonucleotide
gugacgacucaggcuaucc

SEQ ID NO: 722844 - RNA, 19 nt, Artificial Sequence
  Description of Artificial Sequence: Synthetic oligonucleotide
cuugacuucggggucaucu

SEQ ID NO: 722845 - RNA, 19 nt, Artificial Sequence
  Description of Artificial Sequence: Synthetic oligonucleotide
ucgcgguugaagcguugca

SEQ ID NO: 722846 - RNA, 19 nt, Artificial Sequence
  Description of Artificial Sequence: Synthetic oligonucleotide
gcaguucagccucugauaa

SEQ ID NO: 722847 - RNA, 19 nt, Artificial Sequence
  Description of Artificial Sequence: Synthetic oligonucleotide
cuucauacccuccaagcau

SEQ ID NO: 722848 - RNA, 19 nt, Artificial Sequence
  Description of Artificial Sequence: Synthetic oligonucleotide
auagggguguccuggccuu

SEQ ID NO: 722849 - RNA, 19 nt, Artificial Sequence
  Description of Artificial Sequence: Synthetic oligonucleotide
gacccguguccauccauca

SEQ ID NO: 722850 - RNA, 19 nt, Artificial Sequence
  Description of Artificial Sequence: Synthetic oligonucleotide
aagucacccgggcgggcga

SEQ ID NO: 722851 - RNA, 19 nt, Artificial Sequence
  Description of Artificial Sequence: Synthetic oligonucleotide
gcugcuaucugguggggca

SEQ ID NO: 722852 - RNA, 19 nt, Artificial Sequence
  Description of Artificial Sequence: Synthetic oligonucleotide
aagugggucccuagagggu

SEQ ID NO: 722853 - RNA, 19 nt, Artificial Sequence
  Description of Artificial Sequence: Synthetic oligonucleotide
ccccaauccaugcucgucc

SEQ ID NO: 722854 - RNA, 19 nt, Artificial Sequence
  Description of Artificial Sequence: Synthetic oligonucleotide
ugccaauaaugggaaccac

SEQ ID NO: 722855 - RNA, 19 nt, Artificial Sequence
  Description of Artificial Sequence: Synthetic oligonucleotide
ucugcggcguuuucucaua

SEQ ID NO: 722856 - RNA, 19 nt, Artificial Sequence
  Description of Artificial Sequence: Synthetic oligonucleotide
ggcacaagugggucccuag

SEQ ID NO: 722857 - RNA, 19 nt, Artificial Sequence
  Description of Artificial Sequence: Synthetic oligonucleotide
cucagccaaaagccacaag

SEQ ID NO: 722858 - RNA, 19 nt, Artificial Sequence
  Description of Artificial Sequence: Synthetic oligonucleotide
ccggcagucucucucaaac

SEQ ID NO: 722859 - RNA, 19 nt, Artificial Sequence
  Description of Artificial Sequence: Synthetic oligonucleotide
augauuguugcuggcugaa

SEQ ID NO: 722860 - RNA, 19 nt, Artificial Sequence
  Description of Artificial Sequence: Synthetic oligonucleotide
ccaauaaugggaaccaccu

SEQ ID NO: 722861 - RNA, 19 nt, Artificial Sequence
  Description of Artificial Sequence: Synthetic oligonucleotide
gugaguacuuagccagcuc

SEQ ID NO: 722862 - RNA, 19 nt, Artificial Sequence
  Description of Artificial Sequence: Synthetic oligonucleotide
auguacaaccacgcgggaa

SEQ ID NO: 722863 - RNA, 19 nt, Artificial Sequence
  Description of Artificial Sequence: Synthetic oligonucleotide
cuuucacgaacuucacgua

SEQ ID NO: 722864 - RNA, 19 nt, Artificial Sequence
  Description of Artificial Sequence: Synthetic oligonucleotide
cauaagccugcuccaccuc

SEQ ID NO: 722865 - RNA, 19 nt, Artificial Sequence
  Description of Artificial Sequence: Synthetic oligonucleotide
guccggggugcccaggcug

SEQ ID NO: 722866 - RNA, 19 nt, Artificial Sequence
  Description of Artificial Sequence: Synthetic oligonucleotide
gcuguccgaaggcacucgg

SEQ ID NO: 722867 - RNA, 19 nt, Artificial Sequence
  Description of Artificial Sequence: Synthetic oligonucleotide
gguugaagcguugcagcug

SEQ ID NO: 722868 - RNA, 19 nt, Artificial Sequence
  Description of Artificial Sequence: Synthetic oligonucleotide
cgcgggaaggcacaagugg

SEQ ID NO: 722869 - RNA, 19 nt, Artificial Sequence
  Description of Artificial Sequence: Synthetic oligonucleotide
gucgcgguugaagcguugc

SEQ ID NO: 722870 - RNA, 19 nt, Artificial Sequence
  Description of Artificial Sequence: Synthetic oligonucleotide
gcuacuacugcugcuaucu

SEQ ID NO: 722871 - RNA, 19 nt, Artificial Sequence
  Description of Artificial Sequence: Synthetic oligonucleotide
cucgguuacugaggacccg

SEQ ID NO: 722872 - RNA, 19 nt, Artificial Sequence
  Description of Artificial Sequence: Synthetic oligonucleotide
caucgaacucgguauagau

SEQ ID NO: 722873 - RNA, 19 nt, Artificial Sequence
  Description of Artificial Sequence: Synthetic oligonucleotide
gaagugcgccuggucgcgg

SEQ ID NO: 722874 - RNA, 19 nt, Artificial Sequence
  Description of Artificial Sequence: Synthetic oligonucleotide
cacgaacuucacguauuug

SEQ ID NO: 722875 - RNA, 19 nt, Artificial Sequence
  Description of Artificial Sequence: Synthetic oligonucleotide
auacccggaugcccagacu

SEQ ID NO: 722876 - RNA, 19 nt, Artificial Sequence
  Description of Artificial Sequence: Synthetic oligonucleotide
cauacccuccaagcauuug

SEQ ID NO: 722877 - RNA, 19 nt, Artificial Sequence
  Description of Artificial Sequence: Synthetic oligonucleotide
aaccacgcgggaaggcaca

SEQ ID NO: 722878 - RNA, 19 nt, Artificial Sequence
  Description of Artificial Sequence: Synthetic oligonucleotide
ucguccugccgccggggac

SEQ ID NO: 722879 - RNA, 19 nt, Artificial Sequence
  Description of Artificial Sequence: Synthetic oligonucleotide
ucggagguaugaggugggc

SEQ ID NO: 722880 - RNA, 19 nt, Artificial Sequence
  Description of Artificial Sequence: Synthetic oligonucleotide
aacuugacuucggggucau

SEQ ID NO: 722881 - RNA, 19 nt, Artificial Sequence
  Description of Artificial Sequence: Synthetic oligonucleotide
uguuuccgccugacccgug

SEQ ID NO: 722882 - RNA, 19 nt, Artificial Sequence
  Description of Artificial Sequence: Synthetic oligonucleotide
cugcuaucugguggggcag

SEQ ID NO: 722883 - RNA, 19 nt, Artificial Sequence
  Description of Artificial Sequence: Synthetic oligonucleotide
ggccgauaggggaugcagg

SEQ ID NO: 722884 - RNA, 19 nt, Artificial Sequence
  Description of Artificial Sequence: Synthetic oligonucleotide
uggcccaagccgagcggca

SEQ ID NO: 722885 - RNA, 19 nt, Artificial Sequence
  Description of Artificial Sequence: Synthetic oligonucleotide
guuccgaaggugggcuugc

SEQ ID NO: 722886 - RNA, 19 nt, Artificial Sequence
  Description of Artificial Sequence: Synthetic oligonucleotide
uccuucgaagugguagaua

SEQ ID NO: 722887 - RNA, 19 nt, Artificial Sequence
  Description of Artificial Sequence: Synthetic oligonucleotide
ggagucgcuuucucugcug

SEQ ID NO: 722888 - RNA, 19 nt, Artificial Sequence
  Description of Artificial Sequence: Synthetic oligonucleotide
gagucguucuuagcaucca

SEQ ID NO: 722889 - RNA, 19 nt, Artificial Sequence
  Description of Artificial Sequence: Synthetic oligonucleotide
ugccccaauccaugcucgu

SEQ ID NO: 722890 - RNA, 19 nt, Artificial Sequence
  Description of Artificial Sequence: Synthetic oligonucleotide
gacuccgcggccaccuuca

SEQ ID NO: 722891 - RNA, 19 nt, Artificial Sequence
  Description of Artificial Sequence: Synthetic oligonucleotide
gggcucuaagcuggcaggg

SEQ ID NO: 722892 - RNA, 19 nt, Artificial Sequence
  Description of Artificial Sequence: Synthetic oligonucleotide
ugcggggcucuaagcuggc

SEQ ID NO: 722893 - RNA, 19 nt, Artificial Sequence
  Description of Artificial Sequence: Synthetic oligonucleotide
ugcuaucugguggggcagu

SEQ ID NO: 722894 - RNA, 19 nt, Artificial Sequence
  Description of Artificial Sequence: Synthetic oligonucleotide
cccuagagggugacaggcg

SEQ ID NO: 722895 - RNA, 19 nt, Artificial Sequence
  Description of Artificial Sequence: Synthetic oligonucleotide
gccacccuccaccaaacuc

SEQ ID NO: 722896 - RNA, 19 nt, Artificial Sequence
  Description of Artificial Sequence: Synthetic oligonucleotide
caugcucguccugccgccg

SEQ ID NO: 722897 - RNA, 19 nt, Artificial Sequence
  Description of Artificial Sequence: Synthetic oligonucleotide
cugcggcguuuucucauac

SEQ ID NO: 722898 - RNA, 19 nt, Artificial Sequence
  Description of Artificial Sequence: Synthetic oligonucleotide
ucacccgggcgggcgaacc

SEQ ID NO: 722899 - RNA, 19 nt, Artificial Sequence
  Description of Artificial Sequence: Synthetic oligonucleotide
ggcugcguacucauucuug

SEQ ID NO: 722900 - RNA, 19 nt, Artificial Sequence
  Description of Artificial Sequence: Synthetic oligonucleotide
gauaggggaugcaggcucu

SEQ ID NO: 722901 - RNA, 19 nt, Artificial Sequence
  Description of Artificial Sequence: Synthetic oligonucleotide
ggaucaggcggccuggagu

SEQ ID NO: 722902 - RNA, 19 nt, Artificial Sequence
  Description of Artificial Sequence: Synthetic oligonucleotide
auccuucgaagugguagau

SEQ ID NO: 722903 - RNA, 19 nt, Artificial Sequence
  Description of Artificial Sequence: Synthetic oligonucleotide
cgauaggggaugcaggcuc

SEQ ID NO: 722904 - RNA, 19 nt, Artificial Sequence
  Description of Artificial Sequence: Synthetic oligonucleotide
acugaggacccggcuuuca

SEQ ID NO: 722905 - RNA, 19 nt, Artificial Sequence
  Description of Artificial Sequence: Synthetic oligonucleotide
acggacuccgcggccaccu

SEQ ID NO: 722906 - RNA, 19 nt, Artificial Sequence
  Description of Artificial Sequence: Synthetic oligonucleotide
caucugcggcguuuucuca

SEQ ID NO: 722907 - RNA, 19 nt, Artificial Sequence
  Description of Artificial Sequence: Synthetic oligonucleotide
cauugaccuccuggagaag

SEQ ID NO: 722908 - RNA, 19 nt, Artificial Sequence
  Description of Artificial Sequence: Synthetic oligonucleotide
cucggcguucauccauguc

SEQ ID NO: 722909 - RNA, 19 nt, Artificial Sequence
  Description of Artificial Sequence: Synthetic oligonucleotide
ccagacauacccggaugcc

SEQ ID NO: 722910 - RNA, 19 nt, Artificial Sequence
  Description of Artificial Sequence: Synthetic oligonucleotide
uggucgcgguugaagcguu

SEQ ID NO: 722911 - RNA, 19 nt, Artificial Sequence
  Description of Artificial Sequence: Synthetic oligonucleotide
gccugacccguguccaucc

SEQ ID NO: 722912 - RNA, 19 nt, Artificial Sequence
  Description of Artificial Sequence: Synthetic oligonucleotide
gugugacucggagguauga

SEQ ID NO: 722913 - RNA, 19 nt, Artificial Sequence
  Description of Artificial Sequence: Synthetic oligonucleotide
guaguucgaugaggacuug

SEQ ID NO: 722914 - RNA, 19 nt, Artificial Sequence
  Description of Artificial Sequence: Synthetic oligonucleotide
gcuauccccucgguuacug

SEQ ID NO: 722915 - RNA, 19 nt, Artificial Sequence
  Description of Artificial Sequence: Synthetic oligonucleotide
cugagcccgacggccuucc

SEQ ID NO: 722916 - RNA, 19 nt, Artificial Sequence
  Description of Artificial Sequence: Synthetic oligonucleotide
gcaacucccgguuccucuc

SEQ ID NO: 722917 - RNA, 19 nt, Artificial Sequence
  Description of Artificial Sequence: Synthetic oligonucleotide
guuuccgccugacccgugu

SEQ ID NO: 722918 - RNA, 19 nt, Artificial Sequence
  Description of Artificial Sequence: Synthetic oligonucleotide
cucccuguuuccgccugac

SEQ ID NO: 722919 - RNA, 19 nt, Artificial Sequence
  Description of Artificial Sequence: Synthetic oligonucleotide
ccgcuugcuagucuccaac

SEQ ID NO: 722920 - RNA, 19 nt, Artificial Sequence
  Description of Artificial Sequence: Synthetic oligonucleotide
cgguucaugacuuggcuaa

SEQ ID NO: 722921 - RNA, 19 nt, Artificial Sequence
  Description of Artificial Sequence: Synthetic oligonucleotide
ccaugcucguccugccgcc

SEQ ID NO: 722922 - RNA, 19 nt, Artificial Sequence
  Description of Artificial Sequence: Synthetic oligonucleotide
cgaacucgguauagauagg

SEQ ID NO: 722923 - RNA, 19 nt, Artificial Sequence
  Description of Artificial Sequence: Synthetic oligonucleotide
cgccuugguggcauuaaug

SEQ ID NO: 722924 - RNA, 19 nt, Artificial Sequence
  Description of Artificial Sequence: Synthetic oligonucleotide
ggguucaguugagugugac

SEQ ID NO: 722925 - RNA, 19 nt, Artificial Sequence
  Description of Artificial Sequence: Synthetic oligonucleotide
cacccgggcgggcgaaccc

SEQ ID NO: 722926 - RNA, 19 nt, Artificial Sequence
  Description of Artificial Sequence: Synthetic oligonucleotide
ugagcccgacggccuuccu

SEQ ID NO: 722927 - RNA, 19 nt, Artificial Sequence
  Description of Artificial Sequence: Synthetic oligonucleotide
ccugacuuguguaguucga

SEQ ID NO: 722928 - RNA, 19 nt, Artificial Sequence
  Description of Artificial Sequence: Synthetic oligonucleotide
gguuacugaggacccggcu

SEQ ID NO: 722929 - RNA, 19 nt, Artificial Sequence
  Description of Artificial Sequence: Synthetic oligonucleotide
gcguucuuucacgaacuuc

SEQ ID NO: 722930 - RNA, 19 nt, Artificial Sequence
  Description of Artificial Sequence: Synthetic oligonucleotide
ggcucggcguucauccaug

SEQ ID NO: 722931 - RNA, 19 nt, Artificial Sequence
  Description of Artificial Sequence: Synthetic oligonucleotide
ccucccggcagucucucuc

SEQ ID NO: 722932 - RNA, 19 nt, Artificial Sequence
  Description of Artificial Sequence: Synthetic oligonucleotide
agugcgccuggucgcgguu

SEQ ID NO: 722933 - RNA, 19 nt, Artificial Sequence
  Description of Artificial Sequence: Synthetic oligonucleotide
ggcguucauccauguccug

SEQ ID NO: 722934 - RNA, 19 nt, Artificial Sequence
  Description of Artificial Sequence: Synthetic oligonucleotide
ggacuccgcggccaccuuc

SEQ ID NO: 722935 - RNA, 19 nt, Artificial Sequence
  Description of Artificial Sequence: Synthetic oligonucleotide
gcgaacccugacuugugua

SEQ ID NO: 722936 - RNA, 19 nt, Artificial Sequence
  Description of Artificial Sequence: Synthetic oligonucleotide
ccgccaugugguuccgaag

SEQ ID NO: 722937 - RNA, 19 nt, Artificial Sequence
  Description of Artificial Sequence: Synthetic oligonucleotide
uuccgccaugugguuccga

SEQ ID NO: 722938 - RNA, 19 nt, Artificial Sequence
  Description of Artificial Sequence: Synthetic oligonucleotide
cugcaacucccgguuccuc

SEQ ID NO: 722939 - RNA, 19 nt, Artificial Sequence
  Description of Artificial Sequence: Synthetic oligonucleotide
acccgggcgggcgaacccu

SEQ ID NO: 722940 - RNA, 19 nt, Artificial Sequence
  Description of Artificial Sequence: Synthetic oligonucleotide
ggcccaagccgagcggcag

SEQ ID NO: 722941 - RNA, 19 nt, Artificial Sequence
  Description of Artificial Sequence: Synthetic oligonucleotide
cuguccgaaggcacucggu

SEQ ID NO: 722942 - RNA, 19 nt, Artificial Sequence
  Description of Artificial Sequence: Synthetic oligonucleotide
uagggguguccuggccuuc

SEQ ID NO: 722943 - RNA, 19 nt, Artificial Sequence
  Description of Artificial Sequence: Synthetic oligonucleotide
ccaauccaugcucguccug

SEQ ID NO: 722944 - RNA, 19 nt, Artificial Sequence
  Description of Artificial Sequence: Synthetic oligonucleotide
aucaggcggccuggaguga

SEQ ID NO: 722945 - RNA, 19 nt, Artificial Sequence
  Description of Artificial Sequence: Synthetic oligonucleotide
gcgggcgaacccugacuug

SEQ ID NO: 722946 - RNA, 19 nt, Artificial Sequence
  Description of Artificial Sequence: Synthetic oligonucleotide
cugcgcguucuuucacgaa

SEQ ID NO: 722947 - RNA, 19 nt, Artificial Sequence
  Description of Artificial Sequence: Synthetic oligonucleotide
gcguuuucucauacacauc

SEQ ID NO: 722948 - RNA, 19 nt, Artificial Sequence
  Description of Artificial Sequence: Synthetic oligonucleotide
ggcuccggaguugcuuggc

SEQ ID NO: 722949 - RNA, 19 nt, Artificial Sequence
  Description of Artificial Sequence: Synthetic oligonucleotide
gcuccagacauacccggau

SEQ ID NO: 722950 - RNA, 19 nt, Artificial Sequence
  Description of Artificial Sequence: Synthetic oligonucleotide
cgguuacugaggacccggc

SEQ ID NO: 722951 - RNA, 19 nt, Artificial Sequence
  Description of Artificial Sequence: Synthetic oligonucleotide
accacgcgggaaggcacaa

SEQ ID NO: 722952 - RNA, 19 nt, Artificial Sequence
  Description of Artificial Sequence: Synthetic oligonucleotide
aggcacaagugggucccua

SEQ ID NO: 722953 - RNA, 19 nt, Artificial Sequence
  Description of Artificial Sequence: Synthetic oligonucleotide
ggcgaacccugacuugugu

SEQ ID NO: 722954 - RNA, 19 nt, Artificial Sequence
  Description of Artificial Sequence: Synthetic oligonucleotide
gguucaugacuuggcuaaa

SEQ ID NO: 722955 - RNA, 19 nt, Artificial Sequence
  Description of Artificial Sequence: Synthetic oligonucleotide
cuacggcuggaggcugcuc

SEQ ID NO: 722956 - RNA, 19 nt, Artificial Sequence
  Description of Artificial Sequence: Synthetic oligonucleotide
ccgacggccuuccuggaaa

SEQ ID NO: 722957 - RNA, 19 nt, Artificial Sequence
  Description of Artificial Sequence: Synthetic oligonucleotide
ggcgggcgaacccugacuu

SEQ ID NO: 722958 - RNA, 19 nt, Artificial Sequence
  Description of Artificial Sequence: Synthetic oligonucleotide
cacugcguguggcguucca

SEQ ID NO: 722959 - RNA, 19 nt, Artificial Sequence
  Description of Artificial Sequence: Synthetic oligonucleotide
gggacgccaccaccuccug

SEQ ID NO: 722960 - RNA, 19 nt, Artificial Sequence
  Description of Artificial Sequence: Synthetic oligonucleotide
agucacccgggcgggcgaa

SEQ ID NO: 722961 - RNA, 19 nt, Artificial Sequence
  Description of Artificial Sequence: Synthetic oligonucleotide
gggcgaacccugacuugug

SEQ ID NO: 722962 - RNA, 19 nt, Artificial Sequence
  Description of Artificial Sequence: Synthetic oligonucleotide
cacaacucggugccccaau

SEQ ID NO: 722963 - RNA, 19 nt, Artificial Sequence
  Description of Artificial Sequence: Synthetic oligonucleotide
cuggccgauaggggaugca

SEQ ID NO: 722964 - RNA, 19 nt, Artificial Sequence
  Description of Artificial Sequence: Synthetic oligonucleotide
cuguuuccgccugacccgu

SEQ ID NO: 722965 - RNA, 19 nt, Artificial Sequence
  Description of Artificial Sequence: Synthetic oligonucleotide
cgaauaucuggggcaucug

SEQ ID NO: 722966 - RNA, 19 nt, Artificial Sequence
  Description of Artificial Sequence: Synthetic oligonucleotide
gcggccuggagugacgacu

SEQ ID NO: 722967 - RNA, 19 nt, Artificial Sequence
  Description of Artificial Sequence: Synthetic oligonucleotide
gcaguccggggugcccagg

SEQ ID NO: 722968 - RNA, 19 nt, Artificial Sequence
  Description of Artificial Sequence: Synthetic oligonucleotide
ggucgcgguugaagcguug

SEQ ID NO: 722969 - RNA, 19 nt, Artificial Sequence
  Description of Artificial Sequence: Synthetic oligonucleotide
gcgcguucuuucacgaacu

SEQ ID NO: 722970 - RNA, 19 nt, Artificial Sequence
  Description of Artificial Sequence: Synthetic oligonucleotide
cuccgcggccaccuucaua

SEQ ID NO: 722971 - RNA, 19 nt, Artificial Sequence
  Description of Artificial Sequence: Synthetic oligonucleotide
guucccucacuggauccuu

SEQ ID NO: 722972 - RNA, 19 nt, Artificial Sequence
  Description of Artificial Sequence: Synthetic oligonucleotide
gacccggcuuucagcuucu

SEQ ID NO: 722973 - RNA, 19 nt, Artificial Sequence
  Description of Artificial Sequence: Synthetic oligonucleotide
gucacccgggcgggcgaac

SEQ ID NO: 722974 - RNA, 19 nt, Artificial Sequence
  Description of Artificial Sequence: Synthetic oligonucleotide
ccaagucacccgggcgggc

SEQ ID NO: 722975 - RNA, 19 nt, Artificial Sequence
  Description of Artificial Sequence: Synthetic oligonucleotide
cuucggugaccaccgucuu

SEQ ID NO: 722976 - RNA, 19 nt, Artificial Sequence
  Description of Artificial Sequence: Synthetic oligonucleotide
cccacaacucggugcccca

SEQ ID NO: 722977 - RNA, 19 nt, Artificial Sequence
  Description of Artificial Sequence: Synthetic oligonucleotide
ccggaguugcuuggcauaa

SEQ ID NO: 722978 - RNA, 19 nt, Artificial Sequence
  Description of Artificial Sequence: Synthetic oligonucleotide
ggcucuaagcuggcagggu

SEQ ID NO: 722979 - RNA, 19 nt, Artificial Sequence
  Description of Artificial Sequence: Synthetic oligonucleotide
cccaauccaugcucguccu

SEQ ID NO: 722980 - RNA, 19 nt, Artificial Sequence
  Description of Artificial Sequence: Synthetic oligonucleotide
ccacggacuccgcggccac

SEQ ID NO: 722981 - RNA, 19 nt, Artificial Sequence
  Description of Artificial Sequence: Synthetic oligonucleotide
gggcgggcgaacccugacu

SEQ ID NO: 722982 - RNA, 19 nt, Artificial Sequence
  Description of Artificial Sequence: Synthetic oligonucleotide
cggagguaugaggugggca

SEQ ID NO: 722983 - RNA, 19 nt, Artificial Sequence
  Description of Artificial Sequence: Synthetic oligonucleotide
ccgcggccaccuucauacc

SEQ ID NO: 722984 - RNA, 19 nt, Artificial Sequence
  Description of Artificial Sequence: Synthetic oligonucleotide
ccacgcgggaaggcacaag

SEQ ID NO: 722985 - RNA, 19 nt, Artificial Sequence
  Description of Artificial Sequence: Synthetic oligonucleotide
cggaguugcuuggcauaag

SEQ ID NO: 722986 - RNA, 19 nt, Artificial Sequence
  Description of Artificial Sequence: Synthetic oligonucleotide
gggcaggaauaaagugcaa

SEQ ID NO: 722987 - RNA, 19 nt, Artificial Sequence
  Description of Artificial Sequence: Synthetic oligonucleotide
cggcguucauccauguccu

SEQ ID NO: 722988 - RNA, 19 nt, Artificial Sequence
  Description of Artificial Sequence: Synthetic oligonucleotide
ccugacccguguccaucca

SEQ ID NO: 722989 - RNA, 19 nt, Artificial Sequence
  Description of Artificial Sequence: Synthetic oligonucleotide
gccggggacgccaccaccu

SEQ ID NO: 722990 - RNA, 19 nt, Artificial Sequence
  Description of Artificial Sequence: Synthetic oligonucleotide
gcucggcguucauccaugu

SEQ ID NO: 722991 - RNA, 19 nt, Artificial Sequence
  Description of Artificial Sequence: Synthetic oligonucleotide
cgcuugcuagucuccaacu

SEQ ID NO: 722992 - RNA, 19 nt, Artificial Sequence
  Description of Artificial Sequence: Synthetic oligonucleotide
gggcugcguacucauucuu

SEQ ID NO: 722993 - RNA, 19 nt, Artificial Sequence
  Description of Artificial Sequence: Synthetic oligonucleotide
ccccaggcggguggcucgg

SEQ ID NO: 722994 - RNA, 19 nt, Artificial Sequence
  Description of Artificial Sequence: Synthetic oligonucleotide
gcguugcagcugggcugcg

SEQ ID NO: 722995 - RNA, 19 nt, Artificial Sequence
  Description of Artificial Sequence: Synthetic oligonucleotide
cccggcagucucucucaaa

SEQ ID NO: 722996 - RNA, 19 nt, Artificial Sequence
  Description of Artificial Sequence: Synthetic oligonucleotide
cgggcgggcgaacccugac

SEQ ID NO: 722997 - RNA, 19 nt, Artificial Sequence
  Description of Artificial Sequence: Synthetic oligonucleotide
cgccugacccguguccauc

SEQ ID NO: 722998 - RNA, 19 nt, Artificial Sequence
  Description of Artificial Sequence: Synthetic oligonucleotide
ccgauaggggaugcaggcu

SEQ ID NO: 722999 - RNA, 19 nt, Artificial Sequence
  Description of Artificial Sequence: Synthetic oligonucleotide
gcccgacggccuuccugga

SEQ ID NO: 723000 - RNA, 19 nt, Artificial Sequence
  Description of Artificial Sequence: Synthetic oligonucleotide
cccgacggccuuccuggaa

SEQ ID NO: 723001 - RNA, 19 nt, Artificial Sequence
  Description of Artificial Sequence: Synthetic oligonucleotide
cgggcgaacccugacuugu

SEQ ID NO: 723002 - RNA, 19 nt, Artificial Sequence
  Description of Artificial Sequence: Synthetic oligonucleotide
cccagggcggugugcccaa

SEQ ID NO: 723003 - RNA, 19 nt, Artificial Sequence
  Description of Artificial Sequence: Synthetic oligonucleotide
gccgagcggcaggaagaaa

SEQ ID NO: 723004 - RNA, 19 nt, Artificial Sequence
  Description of Artificial Sequence: Synthetic oligonucleotide
gucucccaucugcggcguu

SEQ ID NO: 723005 - RNA, 19 nt, Artificial Sequence
  Description of Artificial Sequence: Synthetic oligonucleotide
gggguguccuggccuucuu

SEQ ID NO: 723006 - RNA, 19 nt, Artificial Sequence
  Description of Artificial Sequence: Synthetic oligonucleotide
ccgccuugguggcauuaau

SEQ ID NO: 723007 - RNA, 19 nt, Artificial Sequence
  Description of Artificial Sequence: Synthetic oligonucleotide
ccaagccgagcggcaggaa

SEQ ID NO: 723008 - RNA, 19 nt, Artificial Sequence
  Description of Artificial Sequence: Synthetic oligonucleotide
cgcguucuuucacgaacuu

SEQ ID NO: 723009 - RNA, 19 nt, Artificial Sequence
  Description of Artificial Sequence: Synthetic oligonucleotide
cgacggccuuccuggaaau

SEQ ID NO: 723010 - RNA, 19 nt, Artificial Sequence
  Description of Artificial Sequence: Synthetic oligonucleotide
ccgccugacccguguccau

SEQ ID NO: 723011 - RNA, 19 nt, Artificial Sequence
  Description of Artificial Sequence: Synthetic oligonucleotide
ccgaaggcacucgguucau

SEQ ID NO: 723012 - RNA, 19 nt, Artificial Sequence
  Description of Artificial Sequence: Synthetic oligonucleotide
cggguggcucggcguucau

SEQ ID NO: 723013 - RNA, 19 nt, Artificial Sequence
  Description of Artificial Sequence: Synthetic oligonucleotide
aaaaccucgcuccacaugc

SEQ ID NO: 723014 - RNA, 19 nt, Artificial Sequence
  Description of Artificial Sequence: Synthetic oligonucleotide
aacgcuauggccuacauga

SEQ ID NO: 723015 - RNA, 19 nt, Artificial Sequence
  Description of Artificial Sequence: Synthetic oligonucleotide
aggaugauagccuaguccc

SEQ ID NO: 723016 - RNA, 19 nt, Artificial Sequence
  Description of Artificial Sequence: Synthetic oligonucleotide
uacaugaacaccgugaugg

SEQ ID NO: 723017 - RNA, 19 nt, Artificial Sequence
  Description of Artificial Sequence: Synthetic oligonucleotide
ugguucaagaaaauggagg

SEQ ID NO: 723018 - RNA, 19 nt, Artificial Sequence
  Description of Artificial Sequence: Synthetic oligonucleotide
auuaccagcaggcauugcc

SEQ ID NO: 723019 - RNA, 19 nt, Artificial Sequence
  Description of Artificial Sequence: Synthetic oligonucleotide
cuaaggaaggaaaaggccg

SEQ ID NO: 723020 - RNA, 19 nt, Artificial Sequence
  Description of Artificial Sequence: Synthetic oligonucleotide
uuaaagagccuauggagag

SEQ ID NO: 723021 - RNA, 19 nt, Artificial Sequence
  Description of Artificial Sequence: Synthetic oligonucleotide
uuccgagugacacacauug

SEQ ID NO: 723022 - RNA, 19 nt, Artificial Sequence
  Description of Artificial Sequence: Synthetic oligonucleotide
ugcuaaauugcaauguucu

SEQ ID NO: 723023 - RNA, 19 nt, Artificial Sequence
  Description of Artificial Sequence: Synthetic oligonucleotide
cauauuacugucccuaugc

SEQ ID NO: 723024 - RNA, 19 nt, Artificial Sequence
  Description of Artificial Sequence: Synthetic oligonucleotide
agacaaaggaugcuggaac

SEQ ID NO: 723025 - RNA, 19 nt, Artificial Sequence
  Description of Artificial Sequence: Synthetic oligonucleotide
aauuuacuaaagacaaagg

SEQ ID NO: 723026 - RNA, 19 nt, Artificial Sequence
  Description of Artificial Sequence: Synthetic oligonucleotide
auggaggcuaaguuggucc

SEQ ID NO: 723027 - RNA, 19 nt, Artificial Sequence
  Description of Artificial Sequence: Synthetic oligonucleotide
aauggaggaaucaaggaug

SEQ ID NO: 723028 - RNA, 19 nt, Artificial Sequence
  Description of Artificial Sequence: Synthetic oligonucleotide
ugacauuugagcuguagug

SEQ ID NO: 723029 - RNA, 19 nt, Artificial Sequence
  Description of Artificial Sequence: Synthetic oligonucleotide
uccccaauaauccuguccc

SEQ ID NO: 723030 - RNA, 19 nt, Artificial Sequence
  Description of Artificial Sequence: Synthetic oligonucleotide
cucgucaagaggcaaaugg

SEQ ID NO: 723031 - RNA, 19 nt, Artificial Sequence
  Description of Artificial Sequence: Synthetic oligonucleotide
uacuaaagacaaaggaugc

SEQ ID NO: 723032 - RNA, 19 nt, Artificial Sequence
  Description of Artificial Sequence: Synthetic oligonucleotide
aaacuggacaccucagguc

SEQ ID NO: 723033 - RNA, 19 nt, Artificial Sequence
  Description of Artificial Sequence: Synthetic oligonucleotide
ucaagcugcauuaaguguc

SEQ ID NO: 723034 - RNA, 19 nt, Artificial Sequence
  Description of Artificial Sequence: Synthetic oligonucleotide
aaauaucauuucugcuccc

SEQ ID NO: 723035 - RNA, 19 nt, Artificial Sequence
  Description of Artificial Sequence: Synthetic oligonucleotide
aguuccagcccagagauac

SEQ ID NO: 723036 - RNA, 19 nt, Artificial Sequence
  Description of Artificial Sequence: Synthetic oligonucleotide
ugaaugacugagcaacugc

SEQ ID NO: 723037 - RNA, 19 nt, Artificial Sequence
  Description of Artificial Sequence: Synthetic oligonucleotide
cagaauggaggaaucaagg

SEQ ID NO: 723038 - RNA, 19 nt, Artificial Sequence
  Description of Artificial Sequence: Synthetic oligonucleotide
gaugcuggaaccuagggaa

SEQ ID NO: 723039 - RNA, 19 nt, Artificial Sequence
  Description of Artificial Sequence: Synthetic oligonucleotide
auagccuagucccuaguac

SEQ ID NO: 723040 - RNA, 19 nt, Artificial Sequence
  Description of Artificial Sequence: Synthetic oligonucleotide
aacaccgugaugguucccc

SEQ ID NO: 723041 - RNA, 19 nt, Artificial Sequence
  Description of Artificial Sequence: Synthetic oligonucleotide
acugaauuuacuaaagaca

SEQ ID NO: 723042 - RNA, 19 nt, Artificial Sequence
  Description of Artificial Sequence: Synthetic oligonucleotide
acugucaauaaaucugcuc

SEQ ID NO: 723043 - RNA, 19 nt, Artificial Sequence
  Description of Artificial Sequence: Synthetic oligonucleotide
uguagugcuaaauugcaau

SEQ ID NO: 723044 - RNA, 19 nt, Artificial Sequence
  Description of Artificial Sequence: Synthetic oligonucleotide
cauuaagugucccacaauc

SEQ ID NO: 723045 - RNA, 19 nt, Artificial Sequence
  Description of Artificial Sequence: Synthetic oligonucleotide
aaucugcucagaccauuac

SEQ ID NO: 723046 - RNA, 19 nt, Artificial Sequence
  Description of Artificial Sequence: Synthetic oligonucleotide
cgugagaggaucuagaugg

SEQ ID NO: 723047 - RNA, 19 nt, Artificial Sequence
  Description of Artificial Sequence: Synthetic oligonucleotide
gguucaagaaaauggaggc

SEQ ID NO: 723048 - RNA, 19 nt, Artificial Sequence
  Description of Artificial Sequence: Synthetic oligonucleotide
cugucaauaaaucugcuca

SEQ ID NO: 723049 - RNA, 19 nt, Artificial Sequence
  Description of Artificial Sequence: Synthetic oligonucleotide
uuguauucacuguagccgc

SEQ ID NO: 723050 - RNA, 19 nt, Artificial Sequence
  Description of Artificial Sequence: Synthetic oligonucleotide
auaguuccagcccagagau

SEQ ID NO: 723051 - RNA, 19 nt, Artificial Sequence
  Description of Artificial Sequence: Synthetic oligonucleotide
aacucccaaccccucauuc

SEQ ID NO: 723052 - RNA, 19 nt, Artificial Sequence
  Description of Artificial Sequence: Synthetic oligonucleotide
accacuguauucucagugg

SEQ ID NO: 723053 - RNA, 19 nt, Artificial Sequence
  Description of Artificial Sequence: Synthetic oligonucleotide
agcuguagugcuaaauugc

SEQ ID NO: 723054 - RNA, 19 nt, Artificial Sequence
  Description of Artificial Sequence: Synthetic oligonucleotide
cucugaaugacugagcaac

SEQ ID NO: 723055 - RNA, 19 nt, Artificial Sequence
  Description of Artificial Sequence: Synthetic oligonucleotide
uacacuugaggcaacuccu

SEQ ID NO: 723056 - RNA, 19 nt, Artificial Sequence
  Description of Artificial Sequence: Synthetic oligonucleotide
uuccccaaaaccucgcucc

SEQ ID NO: 723057 - RNA, 19 nt, Artificial Sequence
  Description of Artificial Sequence: Synthetic oligonucleotide
cuuaaagagccuauggaga

SEQ ID NO: 723058 - RNA, 19 nt, Artificial Sequence
  Description of Artificial Sequence: Synthetic oligonucleotide
gacauuugagcuguagugc

SEQ ID NO: 723059 - RNA, 19 nt, Artificial Sequence
  Description of Artificial Sequence: Synthetic oligonucleotide
aggcuuaaagagccuaugg

SEQ ID NO: 723060 - RNA, 19 nt, Artificial Sequence
  Description of Artificial Sequence: Synthetic oligonucleotide
uaaauugcaauguucucuu

SEQ ID NO: 723061 - RNA, 19 nt, Artificial Sequence
  Description of Artificial Sequence: Synthetic oligonucleotide
auggccuacaugaacaccg

SEQ ID NO: 723062 - RNA, 19 nt, Artificial Sequence
  Description of Artificial Sequence: Synthetic oligonucleotide
cuaugcuaggcaacggagg

SEQ ID NO: 723063 - RNA, 19 nt, Artificial Sequence
  Description of Artificial Sequence: Synthetic oligonucleotide
guacacuugaggcaacucc

SEQ ID NO: 723064 - RNA, 19 nt, Artificial Sequence
  Description of Artificial Sequence: Synthetic oligonucleotide
gauaguuccagcccagaga

SEQ ID NO: 723065 - RNA, 19 nt, Artificial Sequence
  Description of Artificial Sequence: Synthetic oligonucleotide
augaacaccgugaugguuc

SEQ ID NO: 723066 - RNA, 19 nt, Artificial Sequence
  Description of Artificial Sequence: Synthetic oligonucleotide
agaauggaggaaucaagga

SEQ ID NO: 723067 - RNA, 19 nt, Artificial Sequence
  Description of Artificial Sequence: Synthetic oligonucleotide
gacgcaucggccugagucg

SEQ ID NO: 723068 - RNA, 19 nt, Artificial Sequence
  Description of Artificial Sequence: Synthetic oligonucleotide
aggagcgccucccaacucc

SEQ ID NO: 723069 - RNA, 19 nt, Artificial Sequence
  Description of Artificial Sequence: Synthetic oligonucleotide
ucgucaagaggcaaaugga

SEQ ID NO: 723070 - RNA, 19 nt, Artificial Sequence
  Description of Artificial Sequence: Synthetic oligonucleotide
aaucaaggaugauagccua

SEQ ID NO: 723071 - RNA, 19 nt, Artificial Sequence
  Description of Artificial Sequence: Synthetic oligonucleotide
acauuugagcuguagugcu

SEQ ID NO: 723072 - RNA, 19 nt, Artificial Sequence
  Description of Artificial Sequence: Synthetic oligonucleotide
uuaccagcaggcauugcca

SEQ ID NO: 723073 - RNA, 19 nt, Artificial Sequence
  Description of Artificial Sequence: Synthetic oligonucleotide
gaccauuacaguugcuuug

SEQ ID NO: 723074 - RNA, 19 nt, Artificial Sequence
  Description of Artificial Sequence: Synthetic oligonucleotide
guagugcuaaauugcaaug

SEQ ID NO: 723075 - RNA, 19 nt, Artificial Sequence
  Description of Artificial Sequence: Synthetic oligonucleotide
augaagacauggccagggc

SEQ ID NO: 723076 - RNA, 19 nt, Artificial Sequence
  Description of Artificial Sequence: Synthetic oligonucleotide
cuucaugcccuuuauucac

SEQ ID NO: 723077 - RNA, 19 nt, Artificial Sequence
  Description of Artificial Sequence: Synthetic oligonucleotide
gaucuagauggccaggauc

SEQ ID NO: 723078 - RNA, 19 nt, Artificial Sequence
  Description of Artificial Sequence: Synthetic oligonucleotide
aaugggaacagggucaguu

SEQ ID NO: 723079 - RNA, 19 nt, Artificial Sequence
  Description of Artificial Sequence: Synthetic oligonucleotide
accgugaugguuccccuac

SEQ ID NO: 723080 - RNA, 19 nt, Artificial Sequence
  Description of Artificial Sequence: Synthetic oligonucleotide
aaacgcuauggccuacaug

SEQ ID NO: 723081 - RNA, 19 nt, Artificial Sequence
  Description of Artificial Sequence: Synthetic oligonucleotide
gcuauugagaggcugcucc

SEQ ID NO: 723082 - RNA, 19 nt, Artificial Sequence
  Description of Artificial Sequence: Synthetic oligonucleotide
ucuugaugcaagaggccca

SEQ ID NO: 723083 - RNA, 19 nt, Artificial Sequence
  Description of Artificial Sequence: Synthetic oligonucleotide
ugcuuuguauccuggcuca

SEQ ID NO: 723084 - RNA, 19 nt, Artificial Sequence
  Description of Artificial Sequence: Synthetic oligonucleotide
uccagauuccgagugacac

SEQ ID NO: 723085 - RNA, 19 nt, Artificial Sequence
  Description of Artificial Sequence: Synthetic oligonucleotide
uggauuaccagcaggcauu

SEQ ID NO: 723086 - RNA, 19 nt, Artificial Sequence
  Description of Artificial Sequence: Synthetic oligonucleotide
cucuugaugcaagaggccc

SEQ ID NO: 723087 - RNA, 19 nt, Artificial Sequence
  Description of Artificial Sequence: Synthetic oligonucleotide
ucaagaaaauggaggcuaa

SEQ ID NO: 723088 - RNA, 19 nt, Artificial Sequence
  Description of Artificial Sequence: Synthetic oligonucleotide
uggcccacccuagauaugg

SEQ ID NO: 723089 - RNA, 19 nt, Artificial Sequence
  Description of Artificial Sequence: Synthetic oligonucleotide
agagccuauggagagaaca

SEQ ID NO: 723090 - RNA, 19 nt, Artificial Sequence
  Description of Artificial Sequence: Synthetic oligonucleotide
uauuacugucccuaugcua

SEQ ID NO: 723091 - RNA, 19 nt, Artificial Sequence
  Description of Artificial Sequence: Synthetic oligonucleotide
ucugaaugacugagcaacu

SEQ ID NO: 723092 - RNA, 19 nt, Artificial Sequence
  Description of Artificial Sequence: Synthetic oligonucleotide
ucacgugagaggaucuaga

SEQ ID NO: 723093 - RNA, 19 nt, Artificial Sequence
  Description of Artificial Sequence: Synthetic oligonucleotide
gauccggagcuuuggcugg

SEQ ID NO: 723094 - RNA, 19 nt, Artificial Sequence
  Description of Artificial Sequence: Synthetic oligonucleotide
acauggacaugagagaaga

SEQ ID NO: 723095 - RNA, 19 nt, Artificial Sequence
  Description of Artificial Sequence: Synthetic oligonucleotide
caagcugcauuaagugucc

SEQ ID NO: 723096 - RNA, 19 nt, Artificial Sequence
  Description of Artificial Sequence: Synthetic oligonucleotide
uggcuuaacacugaauuua

SEQ ID NO: 723097 - RNA, 19 nt, Artificial Sequence
  Description of Artificial Sequence: Synthetic oligonucleotide
uguucucuucccauccaga

SEQ ID NO: 723098 - RNA, 19 nt, Artificial Sequence
  Description of Artificial Sequence: Synthetic oligonucleotide
gaaaugggaacagggucag

SEQ ID NO: 723099 - RNA, 19 nt, Artificial Sequence
  Description of Artificial Sequence: Synthetic oligonucleotide
uaugucgcuccagacagca

SEQ ID NO: 723100 - RNA, 19 nt, Artificial Sequence
  Description of Artificial Sequence: Synthetic oligonucleotide
cugacuuccuaagaucugc

SEQ ID NO: 723101 - RNA, 19 nt, Artificial Sequence
  Description of Artificial Sequence: Synthetic oligonucleotide
ucaaggaugauagccuagu

SEQ ID NO: 723102 - RNA, 19 nt, Artificial Sequence
  Description of Artificial Sequence: Synthetic oligonucleotide
cucagaccauuacaguugc

SEQ ID NO: 723103 - RNA, 19 nt, Artificial Sequence
  Description of Artificial Sequence: Synthetic oligonucleotide
gcucuaaggaaggaaaagg

SEQ ID NO: 723104 - RNA, 19 nt, Artificial Sequence
  Description of Artificial Sequence: Synthetic oligonucleotide
agucguggcaccaucaugu

SEQ ID NO: 723105 - RNA, 19 nt, Artificial Sequence
  Description of Artificial Sequence: Synthetic oligonucleotide
gacccuaaagcaauagcac

SEQ ID NO: 723106 - RNA, 19 nt, Artificial Sequence
  Description of Artificial Sequence: Synthetic oligonucleotide
ggucaagcugcauuaagug

SEQ ID NO: 723107 - RNA, 19 nt, Artificial Sequence
  Description of Artificial Sequence: Synthetic oligonucleotide
aacggaggaucagagcuug

SEQ ID NO: 723108 - RNA, 19 nt, Artificial Sequence
  Description of Artificial Sequence: Synthetic oligonucleotide
uauggacagccaugaaggc

SEQ ID NO: 723109 - RNA, 19 nt, Artificial Sequence
  Description of Artificial Sequence: Synthetic oligonucleotide
cacacauugagaaacgcua

SEQ ID NO: 723110 - RNA, 19 nt, Artificial Sequence
  Description of Artificial Sequence: Synthetic oligonucleotide
auggauuaccagcaggcau

SEQ ID NO: 723111 - RNA, 19 nt, Artificial Sequence
  Description of Artificial Sequence: Synthetic oligonucleotide
uugccuaugucgcuccaga

SEQ ID NO: 723112 - RNA, 19 nt, Artificial Sequence
  Description of Artificial Sequence: Synthetic oligonucleotide
acuguagccgcaacaagag

SEQ ID NO: 723113 - RNA, 19 nt, Artificial Sequence
  Description of Artificial Sequence: Synthetic oligonucleotide
uucacgugagaggaucuag

SEQ ID NO: 723114 - RNA, 19 nt, Artificial Sequence
  Description of Artificial Sequence: Synthetic oligonucleotide
auucacuguagccgcaaca

SEQ ID NO: 723115 - RNA, 19 nt, Artificial Sequence
  Description of Artificial Sequence: Synthetic oligonucleotide
guagccacccacucagugc

SEQ ID NO: 723116 - RNA, 19 nt, Artificial Sequence
  Description of Artificial Sequence: Synthetic oligonucleotide
ugaacaccgugaugguucc

SEQ ID NO: 723117 - RNA, 19 nt, Artificial Sequence
  Description of Artificial Sequence: Synthetic oligonucleotide
ccuaugucgcuccagacag

SEQ ID NO: 723118 - RNA, 19 nt, Artificial Sequence
  Description of Artificial Sequence: Synthetic oligonucleotide
cagauuccgagugacacac

SEQ ID NO: 723119 - RNA, 19 nt, Artificial Sequence
  Description of Artificial Sequence: Synthetic oligonucleotide
ugccgaagauccuuccaag

SEQ ID NO: 723120 - RNA, 19 nt, Artificial Sequence
  Description of Artificial Sequence: Synthetic oligonucleotide
aggaggagcgccucccaac

SEQ ID NO: 723121 - RNA, 19 nt, Artificial Sequence
  Description of Artificial Sequence: Synthetic oligonucleotide
gagccuauggagagaacag

SEQ ID NO: 723122 - RNA, 19 nt, Artificial Sequence
  Description of Artificial Sequence: Synthetic oligonucleotide
aggagugggcucaaauccc

SEQ ID NO: 723123 - RNA, 19 nt, Artificial Sequence
  Description of Artificial Sequence: Synthetic oligonucleotide
guuucuaccccggagguga

SEQ ID NO: 723124 - RNA, 19 nt, Artificial Sequence
  Description of Artificial Sequence: Synthetic oligonucleotide
uguucagggucagagaguu

SEQ ID NO: 723125 - RNA, 19 nt, Artificial Sequence
  Description of Artificial Sequence: Synthetic oligonucleotide
acgugagaggaucuagaug

SEQ ID NO: 723126 - RNA, 19 nt, Artificial Sequence
  Description of Artificial Sequence: Synthetic oligonucleotide
uggaggcuaaguugguccc

SEQ ID NO: 723127 - RNA, 19 nt, Artificial Sequence
  Description of Artificial Sequence: Synthetic oligonucleotide
aaggaugcuggaaccuagg

SEQ ID NO: 723128 - RNA, 19 nt, Artificial Sequence
  Description of Artificial Sequence: Synthetic oligonucleotide
ccuuguauucacuguagcc

SEQ ID NO: 723129 - RNA, 19 nt, Artificial Sequence
  Description of Artificial Sequence: Synthetic oligonucleotide
uggagugacauggucccag

SEQ ID NO: 723130 - RNA, 19 nt, Artificial Sequence
  Description of Artificial Sequence: Synthetic oligonucleotide
acuaaagacaaaggaugcu

SEQ ID NO: 723131 - RNA, 19 nt, Artificial Sequence
  Description of Artificial Sequence: Synthetic oligonucleotide
ugagaggaucuagauggcc

SEQ ID NO: 723132 - RNA, 19 nt, Artificial Sequence
  Description of Artificial Sequence: Synthetic oligonucleotide
aggaaggaaaaggccgccc

SEQ ID NO: 723133 - RNA, 19 nt, Artificial Sequence
  Description of Artificial Sequence: Synthetic oligonucleotide
aggucaaccccagggaggg

SEQ ID NO: 723134 - RNA, 19 nt, Artificial Sequence
  Description of Artificial Sequence: Synthetic oligonucleotide
caugagagaagauugcagu

SEQ ID NO: 723135 - RNA, 19 nt, Artificial Sequence
  Description of Artificial Sequence: Synthetic oligonucleotide
cucugcagaacugaccuug

SEQ ID NO: 723136 - RNA, 19 nt, Artificial Sequence
  Description of Artificial Sequence: Synthetic oligonucleotide
aggucagcagguaugaaga

SEQ ID NO: 723137 - RNA, 19 nt, Artificial Sequence
  Description of Artificial Sequence: Synthetic oligonucleotide
auacagugguucaagaaaa

SEQ ID NO: 723138 - RNA, 19 nt, Artificial Sequence
  Description of Artificial Sequence: Synthetic oligonucleotide
uaccagcaggcauugccag

SEQ ID NO: 723139 - RNA, 19 nt, Artificial Sequence
  Description of Artificial Sequence: Synthetic oligonucleotide
ucccuaccugccaacaggu

SEQ ID NO: 723140 - RNA, 19 nt, Artificial Sequence
  Description of Artificial Sequence: Synthetic oligonucleotide
gaaucaaggaugauagccu

SEQ ID NO: 723141 - RNA, 19 nt, Artificial Sequence
  Description of Artificial Sequence: Synthetic oligonucleotide
ugucccuaugcuaggcaac

SEQ ID NO: 723142 - RNA, 19 nt, Artificial Sequence
  Description of Artificial Sequence: Synthetic oligonucleotide
aagcugcauuaaguguccc

SEQ ID NO: 723143 - RNA, 19 nt, Artificial Sequence
  Description of Artificial Sequence: Synthetic oligonucleotide
aguacacuugaggcaacuc

SEQ ID NO: 723144 - RNA, 19 nt, Artificial Sequence
  Description of Artificial Sequence: Synthetic oligonucleotide
uauggccuacaugaacacc

SEQ ID NO: 723145 - RNA, 19 nt, Artificial Sequence
  Description of Artificial Sequence: Synthetic oligonucleotide
cagggucgcucuaaggaag

SEQ ID NO: 723146 - RNA, 19 nt, Artificial Sequence
  Description of Artificial Sequence: Synthetic oligonucleotide
gaucucuccucugaaugac

SEQ ID NO: 723147 - RNA, 19 nt, Artificial Sequence
  Description of Artificial Sequence: Synthetic oligonucleotide
ggauccggagcuuuggcug

SEQ ID NO: 723148 - RNA, 19 nt, Artificial Sequence
  Description of Artificial Sequence: Synthetic oligonucleotide
ugcuaggcaacggaggauc

SEQ ID NO: 723149 - RNA, 19 nt, Artificial Sequence
  Description of Artificial Sequence: Synthetic oligonucleotide
ucgcucuaaggaaggaaaa

SEQ ID NO: 723150 - RNA, 19 nt, Artificial Sequence
  Description of Artificial Sequence: Synthetic oligonucleotide
gucccuaugcuaggcaacg

SEQ ID NO: 723151 - RNA, 19 nt, Artificial Sequence
  Description of Artificial Sequence: Synthetic oligonucleotide
cuaaguugguccccaauaa

SEQ ID NO: 723152 - RNA, 19 nt, Artificial Sequence
  Description of Artificial Sequence: Synthetic oligonucleotide
ugcaagaggcccaggcccu

SEQ ID NO: 723153 - RNA, 19 nt, Artificial Sequence
  Description of Artificial Sequence: Synthetic oligonucleotide
agagauacaggggaacaau

SEQ ID NO: 723154 - RNA, 19 nt, Artificial Sequence
  Description of Artificial Sequence: Synthetic oligonucleotide
uaggcaacggaggaucaga

SEQ ID NO: 723155 - RNA, 19 nt, Artificial Sequence
  Description of Artificial Sequence: Synthetic oligonucleotide
uuugccuaugucgcuccag

SEQ ID NO: 723156 - RNA, 19 nt, Artificial Sequence
  Description of Artificial Sequence: Synthetic oligonucleotide
gaggcuuaaagagccuaug

SEQ ID NO: 723157 - RNA, 19 nt, Artificial Sequence
  Description of Artificial Sequence: Synthetic oligonucleotide
uggugggacccuaaagcaa

SEQ ID NO: 723158 - RNA, 19 nt, Artificial Sequence
  Description of Artificial Sequence: Synthetic oligonucleotide
gagucguggcaccaucaug

SEQ ID NO: 723159 - RNA, 19 nt, Artificial Sequence
  Description of Artificial Sequence: Synthetic oligonucleotide
cagaacugaccuugggcac

SEQ ID NO: 723160 - RNA, 19 nt, Artificial Sequence
  Description of Artificial Sequence: Synthetic oligonucleotide
acucccaaccccucauucu

SEQ ID NO: 723161 - RNA, 19 nt, Artificial Sequence
  Description of Artificial Sequence: Synthetic oligonucleotide
ggcuuaaagagccuaugga

SEQ ID NO: 723162 - RNA, 19 nt, Artificial Sequence
  Description of Artificial Sequence: Synthetic oligonucleotide
uucuuccaagccucagucu

SEQ ID NO: 723163 - RNA, 19 nt, Artificial Sequence
  Description of Artificial Sequence: Synthetic oligonucleotide
ggacccuaaagcaauagca

SEQ ID NO: 723164 - RNA, 19 nt, Artificial Sequence
  Description of Artificial Sequence: Synthetic oligonucleotide
caaaaccucgcuccacaug

SEQ ID NO: 723165 - RNA, 19 nt, Artificial Sequence
  Description of Artificial Sequence: Synthetic oligonucleotide
uaaagagccuauggagaga

SEQ ID NO: 723166 - RNA, 19 nt, Artificial Sequence
  Description of Artificial Sequence: Synthetic oligonucleotide
gaugguuccccuacagaca

SEQ ID NO: 723167 - RNA, 19 nt, Artificial Sequence
  Description of Artificial Sequence: Synthetic oligonucleotide
caucaucacacagugcauc

SEQ ID NO: 723168 - RNA, 19 nt, Artificial Sequence
  Description of Artificial Sequence: Synthetic oligonucleotide
gauagccuagucccuagua

SEQ ID NO: 723169 - RNA, 19 nt, Artificial Sequence
  Description of Artificial Sequence: Synthetic oligonucleotide
cuuuguauccuggcucaag

SEQ ID NO: 723170 - RNA, 19 nt, Artificial Sequence
  Description of Artificial Sequence: Synthetic oligonucleotide
acaaaggaugcuggaaccu

SEQ ID NO: 723171 - RNA, 19 nt, Artificial Sequence
  Description of Artificial Sequence: Synthetic oligonucleotide
ugagucguggcaccaucau

SEQ ID NO: 723172 - RNA, 19 nt, Artificial Sequence
  Description of Artificial Sequence: Synthetic oligonucleotide
agccuagucccuaguacac

SEQ ID NO: 723173 - RNA, 19 nt, Artificial Sequence
  Description of Artificial Sequence: Synthetic oligonucleotide
ccgagugacacacauugag

SEQ ID NO: 723174 - RNA, 19 nt, Artificial Sequence
  Description of Artificial Sequence: Synthetic oligonucleotide
agcugcauuaaguguccca

SEQ ID NO: 723175 - RNA, 19 nt, Artificial Sequence
  Description of Artificial Sequence: Synthetic oligonucleotide
guagccgcaacaagaggcc

SEQ ID NO: 723176 - RNA, 19 nt, Artificial Sequence
  Description of Artificial Sequence: Synthetic oligonucleotide
cugaaugacugagcaacug

SEQ ID NO: 723177 - RNA, 19 nt, Artificial Sequence
  Description of Artificial Sequence: Synthetic oligonucleotide
auggcagcgucuguucagg

SEQ ID NO: 723178 - RNA, 19 nt, Artificial Sequence
  Description of Artificial Sequence: Synthetic oligonucleotide
ggugggaauacagugguuc

SEQ ID NO: 723179 - RNA, 19 nt, Artificial Sequence
  Description of Artificial Sequence: Synthetic oligonucleotide
uucucuucccauccagauu

SEQ ID NO: 723180 - RNA, 19 nt, Artificial Sequence
  Description of Artificial Sequence: Synthetic oligonucleotide
cuguagccgcaacaagagg

SEQ ID NO: 723181 - RNA, 19 nt, Artificial Sequence
  Description of Artificial Sequence: Synthetic oligonucleotide
ugggacccuaaagcaauag

SEQ ID NO: 723182 - RNA, 19 nt, Artificial Sequence
  Description of Artificial Sequence: Synthetic oligonucleotide
ggaaauggcaggaagggaa

SEQ ID NO: 723183 - RNA, 19 nt, Artificial Sequence
  Description of Artificial Sequence: Synthetic oligonucleotide
accccggaggugaacaugg

SEQ ID NO: 723184 - RNA, 19 nt, Artificial Sequence
  Description of Artificial Sequence: Synthetic oligonucleotide
ccuaugcuaggcaacggag

SEQ ID NO: 723185 - RNA, 19 nt, Artificial Sequence
  Description of Artificial Sequence: Synthetic oligonucleotide
uccgagugacacacauuga

SEQ ID NO: 723186 - RNA, 19 nt, Artificial Sequence
  Description of Artificial Sequence: Synthetic oligonucleotide
ugggcucaaaucccagaaa

SEQ ID NO: 723187 - RNA, 19 nt, Artificial Sequence
  Description of Artificial Sequence: Synthetic oligonucleotide
ugggcagucuaggacuuug

SEQ ID NO: 723188 - RNA, 19 nt, Artificial Sequence
  Description of Artificial Sequence: Synthetic oligonucleotide
gaggaucuagauggccagg

SEQ ID NO: 723189 - RNA, 19 nt, Artificial Sequence
  Description of Artificial Sequence: Synthetic oligonucleotide
uguccgucagggucgcucu

SEQ ID NO: 723190 - RNA, 19 nt, Artificial Sequence
  Description of Artificial Sequence: Synthetic oligonucleotide
cuacaugaacaccgugaug

SEQ ID NO: 723191 - RNA, 19 nt, Artificial Sequence
  Description of Artificial Sequence: Synthetic oligonucleotide
ccuauggagagaacagaag

SEQ ID NO: 723192 - RNA, 19 nt, Artificial Sequence
  Description of Artificial Sequence: Synthetic oligonucleotide
agccgcaacaagaggcccc

SEQ ID NO: 723193 - RNA, 19 nt, Artificial Sequence
  Description of Artificial Sequence: Synthetic oligonucleotide
gccgaagauccuuccaagg

SEQ ID NO: 723194 - RNA, 19 nt, Artificial Sequence
  Description of Artificial Sequence: Synthetic oligonucleotide
uuuugccuaugucgcucca

SEQ ID NO: 723195 - RNA, 19 nt, Artificial Sequence
  Description of Artificial Sequence: Synthetic oligonucleotide
agauauggggugauggcaa

SEQ ID NO: 723196 - RNA, 19 nt, Artificial Sequence
  Description of Artificial Sequence: Synthetic oligonucleotide
cguggugggacccuaaagc

SEQ ID NO: 723197 - RNA, 19 nt, Artificial Sequence
  Description of Artificial Sequence: Synthetic oligonucleotide
ggaaaaggccgccccaggc

SEQ ID NO: 723198 - RNA, 19 nt, Artificial Sequence
  Description of Artificial Sequence: Synthetic oligonucleotide
ccgaagauccuuccaaggc

SEQ ID NO: 723199 - RNA, 19 nt, Artificial Sequence
  Description of Artificial Sequence: Synthetic oligonucleotide
uacuucuaucuggagugac

SEQ ID NO: 723200 - RNA, 19 nt, Artificial Sequence
  Description of Artificial Sequence: Synthetic oligonucleotide
gaaaggagugggcucaaau

SEQ ID NO: 723201 - RNA, 19 nt, Artificial Sequence
  Description of Artificial Sequence: Synthetic oligonucleotide
aggaucuagauggccagga

SEQ ID NO: 723202 - RNA, 19 nt, Artificial Sequence
  Description of Artificial Sequence: Synthetic oligonucleotide
auggaggaaucaaggauga

SEQ ID NO: 723203 - RNA, 19 nt, Artificial Sequence
  Description of Artificial Sequence: Synthetic oligonucleotide
gcuauggccuacaugaaca

SEQ ID NO: 723204 - RNA, 19 nt, Artificial Sequence
  Description of Artificial Sequence: Synthetic oligonucleotide
cuuccccaaaaccucgcuc

SEQ ID NO: 723205 - RNA, 19 nt, Artificial Sequence
  Description of Artificial Sequence: Synthetic oligonucleotide
agaacugaccuugggcacu

SEQ ID NO: 723206 - RNA, 19 nt, Artificial Sequence
  Description of Artificial Sequence: Synthetic oligonucleotide
cagccaugaaggcucuccc

SEQ ID NO: 723207 - RNA, 19 nt, Artificial Sequence
  Description of Artificial Sequence: Synthetic oligonucleotide
ugguggacgcaucggccug

SEQ ID NO: 723208 - RNA, 19 nt, Artificial Sequence
  Description of Artificial Sequence: Synthetic oligonucleotide
gugacauuugagcuguagu

SEQ ID NO: 723209 - RNA, 19 nt, Artificial Sequence
  Description of Artificial Sequence: Synthetic oligonucleotide
ccacuguauucucaguggg

SEQ ID NO: 723210 - RNA, 19 nt, Artificial Sequence
  Description of Artificial Sequence: Synthetic oligonucleotide
gcugcauuaagugucccac

SEQ ID NO: 723211 - RNA, 19 nt, Artificial Sequence
  Description of Artificial Sequence: Synthetic oligonucleotide
ugcccucuugaugcaagag

SEQ ID NO: 723212 - RNA, 19 nt, Artificial Sequence
  Description of Artificial Sequence: Synthetic oligonucleotide
gggacccuaaagcaauagc

SEQ ID NO: 723213 - RNA, 19 nt, Artificial Sequence
  Description of Artificial Sequence: Synthetic oligonucleotide
uggccuacaugaacaccgu

SEQ ID NO: 723214 - RNA, 19 nt, Artificial Sequence
  Description of Artificial Sequence: Synthetic oligonucleotide
ugccucgucaagaggcaaa

SEQ ID NO: 723215 - RNA, 19 nt, Artificial Sequence
  Description of Artificial Sequence: Synthetic oligonucleotide
gucaagcugcauuaagugu

SEQ ID NO: 723216 - RNA, 19 nt, Artificial Sequence
  Description of Artificial Sequence: Synthetic oligonucleotide
ggaauacagugguucaaga

SEQ ID NO: 723217 - RNA, 19 nt, Artificial Sequence
  Description of Artificial Sequence: Synthetic oligonucleotide
gcuaaauugcaauguucuc

SEQ ID NO: 723218 - RNA, 19 nt, Artificial Sequence
  Description of Artificial Sequence: Synthetic oligonucleotide
uagcaccuuaggcucccug

SEQ ID NO: 723219 - RNA, 19 nt, Artificial Sequence
  Description of Artificial Sequence: Synthetic oligonucleotide
ugccuaugucgcuccagac

SEQ ID NO: 723220 - RNA, 19 nt, Artificial Sequence
  Description of Artificial Sequence: Synthetic oligonucleotide
aagagccuauggagagaac

SEQ ID NO: 723221 - RNA, 19 nt, Artificial Sequence
  Description of Artificial Sequence: Synthetic oligonucleotide
uggcagcgucuguucaggg

SEQ ID NO: 723222 - RNA, 19 nt, Artificial Sequence
  Description of Artificial Sequence: Synthetic oligonucleotide
gucgcucuaaggaaggaaa

SEQ ID NO: 723223 - RNA, 19 nt, Artificial Sequence
  Description of Artificial Sequence: Synthetic oligonucleotide
gaaccucugcagaacugac

SEQ ID NO: 723224 - RNA, 19 nt, Artificial Sequence
  Description of Artificial Sequence: Synthetic oligonucleotide
aggacggagccccuuccca

SEQ ID NO: 723225 - RNA, 19 nt, Artificial Sequence
  Description of Artificial Sequence: Synthetic oligonucleotide
cuaguacacuugaggcaac

SEQ ID NO: 723226 - RNA, 19 nt, Artificial Sequence
  Description of Artificial Sequence: Synthetic oligonucleotide
cuaugucgcuccagacagc

SEQ ID NO: 723227 - RNA, 19 nt, Artificial Sequence
  Description of Artificial Sequence: Synthetic oligonucleotide
ugcaggacggagccccuuc

SEQ ID NO: 723228 - RNA, 19 nt, Artificial Sequence
  Description of Artificial Sequence: Synthetic oligonucleotide
ggugacauuugagcuguag

SEQ ID NO: 723229 - RNA, 19 nt, Artificial Sequence
  Description of Artificial Sequence: Synthetic oligonucleotide
caccuuaggcucccugccc

SEQ ID NO: 723230 - RNA, 19 nt, Artificial Sequence
  Description of Artificial Sequence: Synthetic oligonucleotide
gugaugguuccccuacaga

SEQ ID NO: 723231 - RNA, 19 nt, Artificial Sequence
  Description of Artificial Sequence: Synthetic oligonucleotide
agggucgcucuaaggaagg

SEQ ID NO: 723232 - RNA, 19 nt, Artificial Sequence
  Description of Artificial Sequence: Synthetic oligonucleotide
agugggcaggugggaauac

SEQ ID NO: 723233 - RNA, 19 nt, Artificial Sequence
  Description of Artificial Sequence: Synthetic oligonucleotide
ccacaaucucagauggccc

SEQ ID NO: 723234 - RNA, 19 nt, Artificial Sequence
  Description of Artificial Sequence: Synthetic oligonucleotide
aggcauugccaggguaugg

SEQ ID NO: 723235 - RNA, 19 nt, Artificial Sequence
  Description of Artificial Sequence: Synthetic oligonucleotide
agaaacgcuauggccuaca

SEQ ID NO: 723236 - RNA, 19 nt, Artificial Sequence
  Description of Artificial Sequence: Synthetic oligonucleotide
aguuucuaccccggaggug

SEQ ID NO: 723237 - RNA, 19 nt, Artificial Sequence
  Description of Artificial Sequence: Synthetic oligonucleotide
cuaggcaacggaggaucag

SEQ ID NO: 723238 - RNA, 19 nt, Artificial Sequence
  Description of Artificial Sequence: Synthetic oligonucleotide
cgucaagaggcaaauggac

SEQ ID NO: 723239 - RNA, 19 nt, Artificial Sequence
  Description of Artificial Sequence: Synthetic oligonucleotide
aggcaacggaggaucagag

SEQ ID NO: 723240 - RNA, 19 nt, Artificial Sequence
  Description of Artificial Sequence: Synthetic oligonucleotide
cauuacaguugcuuuguau

SEQ ID NO: 723241 - RNA, 19 nt, Artificial Sequence
  Description of Artificial Sequence: Synthetic oligonucleotide
gguggacucauauuacugu

SEQ ID NO: 723242 - RNA, 19 nt, Artificial Sequence
  Description of Artificial Sequence: Synthetic oligonucleotide
aucggccugagucguggca

SEQ ID NO: 723243 - RNA, 19 nt, Artificial Sequence
  Description of Artificial Sequence: Synthetic oligonucleotide
ggcagccuaggacagggac

SEQ ID NO: 723244 - RNA, 19 nt, Artificial Sequence
  Description of Artificial Sequence: Synthetic oligonucleotide
cuguagugcuaaauugcaa

SEQ ID NO: 723245 - RNA, 19 nt, Artificial Sequence
  Description of Artificial Sequence: Synthetic oligonucleotide
uaccccggaggugaacaug

SEQ ID NO: 723246 - RNA, 19 nt, Artificial Sequence
  Description of Artificial Sequence: Synthetic oligonucleotide
uccccuccacuggacagcc

SEQ ID NO: 723247 - RNA, 19 nt, Artificial Sequence
  Description of Artificial Sequence: Synthetic oligonucleotide
gacggagccccuucccauc

SEQ ID NO: 723248 - RNA, 19 nt, Artificial Sequence
  Description of Artificial Sequence: Synthetic oligonucleotide
ggaaccucugcagaacuga

SEQ ID NO: 723249 - RNA, 19 nt, Artificial Sequence
  Description of Artificial Sequence: Synthetic oligonucleotide
gcaaauggacagccaaaca

SEQ ID NO: 723250 - RNA, 19 nt, Artificial Sequence
  Description of Artificial Sequence: Synthetic oligonucleotide
cugagucguggcaccauca

SEQ ID NO: 723251 - RNA, 19 nt, Artificial Sequence
  Description of Artificial Sequence: Synthetic oligonucleotide
cugucccuaugcuaggcaa

SEQ ID NO: 723252 - RNA, 19 nt, Artificial Sequence
  Description of Artificial Sequence: Synthetic oligonucleotide
gcaccuuaggcucccugcc

SEQ ID NO: 723253 - RNA, 19 nt, Artificial Sequence
  Description of Artificial Sequence: Synthetic oligonucleotide
ggcaacggaggaucagagc

SEQ ID NO: 723254 - RNA, 19 nt, Artificial Sequence
  Description of Artificial Sequence: Synthetic oligonucleotide
cuggaaccuagggaaggug

SEQ ID NO: 723255 - RNA, 19 nt, Artificial Sequence
  Description of Artificial Sequence: Synthetic oligonucleotide
auaaaucugcucagaccau

SEQ ID NO: 723256 - RNA, 19 nt, Artificial Sequence
  Description of Artificial Sequence: Synthetic oligonucleotide
caggacggagccccuuccc

SEQ ID NO: 723257 - RNA, 19 nt, Artificial Sequence
  Description of Artificial Sequence: Synthetic oligonucleotide
gccuacaugaacaccguga

SEQ ID NO: 723258 - RNA, 19 nt, Artificial Sequence
  Description of Artificial Sequence: Synthetic oligonucleotide
gugguggacucauauuacu

SEQ ID NO: 723259 - RNA, 19 nt, Artificial Sequence
  Description of Artificial Sequence: Synthetic oligonucleotide
ccacccuagauauggggug

SEQ ID NO: 723260 - RNA, 19 nt, Artificial Sequence
  Description of Artificial Sequence: Synthetic oligonucleotide
agggauaguuccagcccag

SEQ ID NO: 723261 - RNA, 19 nt, Artificial Sequence
  Description of Artificial Sequence: Synthetic oligonucleotide
ccccuucccaucaucacac

SEQ ID NO: 723262 - RNA, 19 nt, Artificial Sequence
  Description of Artificial Sequence: Synthetic oligonucleotide
aaaccucgcuccacaugca

SEQ ID NO: 723263 - RNA, 19 nt, Artificial Sequence
  Description of Artificial Sequence: Synthetic oligonucleotide
gugagaggaucuagauggc

SEQ ID NO: 723264 - RNA, 19 nt, Artificial Sequence
  Description of Artificial Sequence: Synthetic oligonucleotide
gccuaugucgcuccagaca

SEQ ID NO: 723265 - RNA, 19 nt, Artificial Sequence
  Description of Artificial Sequence: Synthetic oligonucleotide
gauuaccagcaggcauugc

SEQ ID NO: 723266 - RNA, 19 nt, Artificial Sequence
  Description of Artificial Sequence: Synthetic oligonucleotide
uuucuaccccggaggugaa

SEQ ID NO: 723267 - RNA, 19 nt, Artificial Sequence
  Description of Artificial Sequence: Synthetic oligonucleotide
cuaaagcaauagcaccuua

SEQ ID NO: 723268 - RNA, 19 nt, Artificial Sequence
  Description of Artificial Sequence: Synthetic oligonucleotide
aaaugggaacagggucagu

SEQ ID NO: 723269 - RNA, 19 nt, Artificial Sequence
  Description of Artificial Sequence: Synthetic oligonucleotide
ccuaccccaggucaacccc

SEQ ID NO: 723270 - RNA, 19 nt, Artificial Sequence
  Description of Artificial Sequence: Synthetic oligonucleotide
gacucauauuacugucccu

SEQ ID NO: 723271 - RNA, 19 nt, Artificial Sequence
  Description of Artificial Sequence: Synthetic oligonucleotide
aggugaacauggacaugag

SEQ ID NO: 723272 - RNA, 19 nt, Artificial Sequence
  Description of Artificial Sequence: Synthetic oligonucleotide
accuagggaaggugggguu

SEQ ID NO: 723273 - RNA, 19 nt, Artificial Sequence
  Description of Artificial Sequence: Synthetic oligonucleotide
ccuaguacacuugaggcaa

SEQ ID NO: 723274 - RNA, 19 nt, Artificial Sequence
  Description of Artificial Sequence: Synthetic oligonucleotide
agcaggcauugccagggua

SEQ ID NO: 723275 - RNA, 19 nt, Artificial Sequence
  Description of Artificial Sequence: Synthetic oligonucleotide
agcgccucccaacucccaa

SEQ ID NO: 723276 - RNA, 19 nt, Artificial Sequence
  Description of Artificial Sequence: Synthetic oligonucleotide
gucgcuccagacagcauca

SEQ ID NO: 723277 - RNA, 19 nt, Artificial Sequence
  Description of Artificial Sequence: Synthetic oligonucleotide
gggcucaaaucccagaaau

SEQ ID NO: 723278 - RNA, 19 nt, Artificial Sequence
  Description of Artificial Sequence: Synthetic oligonucleotide
gcaucggccugagucgugg

SEQ ID NO: 723279 - RNA, 19 nt, Artificial Sequence
  Description of Artificial Sequence: Synthetic oligonucleotide
uccgucagggucgcucuaa

SEQ ID NO: 723280 - RNA, 19 nt, Artificial Sequence
  Description of Artificial Sequence: Synthetic oligonucleotide
cgcuuguccgucagggucg

SEQ ID NO: 723281 - RNA, 19 nt, Artificial Sequence
  Description of Artificial Sequence: Synthetic oligonucleotide
ccuaggacagggacagcug

SEQ ID NO: 723282 - RNA, 19 nt, Artificial Sequence
  Description of Artificial Sequence: Synthetic oligonucleotide
caucggccugagucguggc

SEQ ID NO: 723283 - RNA, 19 nt, Artificial Sequence
  Description of Artificial Sequence: Synthetic oligonucleotide
gagaaacgcuauggccuac

SEQ ID NO: 723284 - RNA, 19 nt, Artificial Sequence
  Description of Artificial Sequence: Synthetic oligonucleotide
cagagauacaggggaacaa

SEQ ID NO: 723285 - RNA, 19 nt, Artificial Sequence
  Description of Artificial Sequence: Synthetic oligonucleotide
gaaacgcuauggccuacau

SEQ ID NO: 723286 - RNA, 19 nt, Artificial Sequence
  Description of Artificial Sequence: Synthetic oligonucleotide
gucguggcaccaucauguc

SEQ ID NO: 723287 - RNA, 19 nt, Artificial Sequence
  Description of Artificial Sequence: Synthetic oligonucleotide
gaggagcgccucccaacuc

SEQ ID NO: 723288 - RNA, 19 nt, Artificial Sequence
  Description of Artificial Sequence: Synthetic oligonucleotide
uaguuccagcccagagaua

SEQ ID NO: 723289 - RNA, 19 nt, Artificial Sequence
  Description of Artificial Sequence: Synthetic oligonucleotide
aggacagggacagcugcua

SEQ ID NO: 723290 - RNA, 19 nt, Artificial Sequence
  Description of Artificial Sequence: Synthetic oligonucleotide
cccuaaagcaauagcaccu

SEQ ID NO: 723291 - RNA, 19 nt, Artificial Sequence
  Description of Artificial Sequence: Synthetic oligonucleotide
cacgugagaggaucuagau

SEQ ID NO: 723292 - RNA, 19 nt, Artificial Sequence
  Description of Artificial Sequence: Synthetic oligonucleotide
cuggaaccucugcagaacu

SEQ ID NO: 723293 - RNA, 19 nt, Artificial Sequence
  Description of Artificial Sequence: Synthetic oligonucleotide
gccaacagguugccuggcc

SEQ ID NO: 723294 - RNA, 19 nt, Artificial Sequence
  Description of Artificial Sequence: Synthetic oligonucleotide
auccagauuccgagugaca

SEQ ID NO: 723295 - RNA, 19 nt, Artificial Sequence
  Description of Artificial Sequence: Synthetic oligonucleotide
guuccccuacagacagaag

SEQ ID NO: 723296 - RNA, 19 nt, Artificial Sequence
  Description of Artificial Sequence: Synthetic oligonucleotide
ggccuacaugaacaccgug

SEQ ID NO: 723297 - RNA, 19 nt, Artificial Sequence
  Description of Artificial Sequence: Synthetic oligonucleotide
cacccuagauaugggguga

SEQ ID NO: 723298 - RNA, 19 nt, Artificial Sequence
  Description of Artificial Sequence: Synthetic oligonucleotide
gucuuuugccuaugucgcu

SEQ ID NO: 723299 - RNA, 19 nt, Artificial Sequence
  Description of Artificial Sequence: Synthetic oligonucleotide
ccccaauaauccugucccc

SEQ ID NO: 723300 - RNA, 19 nt, Artificial Sequence
  Description of Artificial Sequence: Synthetic oligonucleotide
agagaagauugcagucuuu

SEQ ID NO: 723301 - RNA, 19 nt, Artificial Sequence
  Description of Artificial Sequence: Synthetic oligonucleotide
cagcgucuguucaggguca

SEQ ID NO: 723302 - RNA, 19 nt, Artificial Sequence
  Description of Artificial Sequence: Synthetic oligonucleotide
uggaggaaucaaggaugau

SEQ ID NO: 723303 - RNA, 19 nt, Artificial Sequence
  Description of Artificial Sequence: Synthetic oligonucleotide
gaacaccgugaugguuccc

SEQ ID NO: 723304 - RNA, 19 nt, Artificial Sequence
  Description of Artificial Sequence: Synthetic oligonucleotide
ggagugggcucaaauccca

SEQ ID NO: 723305 - RNA, 19 nt, Artificial Sequence
  Description of Artificial Sequence: Synthetic oligonucleotide
uucuaccccggaggugaac

SEQ ID NO: 723306 - RNA, 19 nt, Artificial Sequence
  Description of Artificial Sequence: Synthetic oligonucleotide
ggagggagguuuaggugac

SEQ ID NO: 723307 - RNA, 19 nt, Artificial Sequence
  Description of Artificial Sequence: Synthetic oligonucleotide
gccuucacgugagaggauc

SEQ ID NO: 723308 - RNA, 19 nt, Artificial Sequence
  Description of Artificial Sequence: Synthetic oligonucleotide
guauucucagugggcaggu

SEQ ID NO: 723309 - RNA, 19 nt, Artificial Sequence
  Description of Artificial Sequence: Synthetic oligonucleotide
acgcaucggccugagucgu

SEQ ID NO: 723310 - RNA, 19 nt, Artificial Sequence
  Description of Artificial Sequence: Synthetic oligonucleotide
auuccgagugacacacauu

SEQ ID NO: 723311 - RNA, 19 nt, Artificial Sequence
  Description of Artificial Sequence: Synthetic oligonucleotide
cacugucaauaaaucugcu

SEQ ID NO: 723312 - RNA, 19 nt, Artificial Sequence
  Description of Artificial Sequence: Synthetic oligonucleotide
cgcuauggccuacaugaac

SEQ ID NO: 723313 - RNA, 19 nt, Artificial Sequence
  Description of Artificial Sequence: Synthetic oligonucleotide
ggaggugaacauggacaug

SEQ ID NO: 723314 - RNA, 19 nt, Artificial Sequence
  Description of Artificial Sequence: Synthetic oligonucleotide
ggcccgaucucuccucuga

SEQ ID NO: 723315 - RNA, 19 nt, Artificial Sequence
  Description of Artificial Sequence: Synthetic oligonucleotide
ccguggugggacccuaaag

SEQ ID NO: 723316 - RNA, 19 nt, Artificial Sequence
  Description of Artificial Sequence: Synthetic oligonucleotide
ggucaguuucuaccccgga

SEQ ID NO: 723317 - RNA, 19 nt, Artificial Sequence
  Description of Artificial Sequence: Synthetic oligonucleotide
uggacgcaucggccugagu

SEQ ID NO: 723318 - RNA, 19 nt, Artificial Sequence
  Description of Artificial Sequence: Synthetic oligonucleotide
cccuaugcuaggcaacgga

SEQ ID NO: 723319 - RNA, 19 nt, Artificial Sequence
  Description of Artificial Sequence: Synthetic oligonucleotide
ggaggagcgccucccaacu

SEQ ID NO: 723320 - RNA, 19 nt, Artificial Sequence
  Description of Artificial Sequence: Synthetic oligonucleotide
ggugggacccuaaagcaau

SEQ ID NO: 723321 - RNA, 19 nt, Artificial Sequence
  Description of Artificial Sequence: Synthetic oligonucleotide
aggggucaagcugcauuaa

SEQ ID NO: 723322 - RNA, 19 nt, Artificial Sequence
  Description of Artificial Sequence: Synthetic oligonucleotide
ucgcuccagacagcaucac

SEQ ID NO: 723323 - RNA, 19 nt, Artificial Sequence
  Description of Artificial Sequence: Synthetic oligonucleotide
ggagcgccucccaacuccc

SEQ ID NO: 723324 - RNA, 19 nt, Artificial Sequence
  Description of Artificial Sequence: Synthetic oligonucleotide
ggucgcucuaaggaaggaa

SEQ ID NO: 723325 - RNA, 19 nt, Artificial Sequence
  Description of Artificial Sequence: Synthetic oligonucleotide
acccuagauauggggugau

SEQ ID NO: 723326 - RNA, 19 nt, Artificial Sequence
  Description of Artificial Sequence: Synthetic oligonucleotide
cuucacgugagaggaucua

SEQ ID NO: 723327 - RNA, 19 nt, Artificial Sequence
  Description of Artificial Sequence: Synthetic oligonucleotide
agauuccgagugacacaca

SEQ ID NO: 723328 - RNA, 19 nt, Artificial Sequence
  Description of Artificial Sequence: Synthetic oligonucleotide
cgaucucuccucugaauga

SEQ ID NO: 723329 - RNA, 19 nt, Artificial Sequence
  Description of Artificial Sequence: Synthetic oligonucleotide
caggaggagcgccucccaa

SEQ ID NO: 723330 - RNA, 19 nt, Artificial Sequence
  Description of Artificial Sequence: Synthetic oligonucleotide
ccccuacagacagaagcug

SEQ ID NO: 723331 - RNA, 19 nt, Artificial Sequence
  Description of Artificial Sequence: Synthetic oligonucleotide
ccuggagagaccacuguau

SEQ ID NO: 723332 - RNA, 19 nt, Artificial Sequence
  Description of Artificial Sequence: Synthetic oligonucleotide
ccauccagauuccgaguga

SEQ ID NO: 723333 - RNA, 19 nt, Artificial Sequence
  Description of Artificial Sequence: Synthetic oligonucleotide
gcuaggcaacggaggauca

SEQ ID NO: 723334 - RNA, 19 nt, Artificial Sequence
  Description of Artificial Sequence: Synthetic oligonucleotide
ggcagcgucuguucagggu

SEQ ID NO: 723335 - RNA, 19 nt, Artificial Sequence
  Description of Artificial Sequence: Synthetic oligonucleotide
acgcuauggccuacaugaa

SEQ ID NO: 723336 - RNA, 19 nt, Artificial Sequence
  Description of Artificial Sequence: Synthetic oligonucleotide
gcauuaagugucccacaau

SEQ ID NO: 723337 - RNA, 19 nt, Artificial Sequence
  Description of Artificial Sequence: Synthetic oligonucleotide
ccgucagggucgcucuaag

SEQ ID NO: 723338 - RNA, 19 nt, Artificial Sequence
  Description of Artificial Sequence: Synthetic oligonucleotide
gcgccucccaacucccaac

SEQ ID NO: 723339 - RNA, 19 nt, Artificial Sequence
  Description of Artificial Sequence: Synthetic oligonucleotide
ccaagccucagucuucacu

SEQ ID NO: 723340 - RNA, 19 nt, Artificial Sequence
  Description of Artificial Sequence: Synthetic oligonucleotide
ggaucuagauggccaggau

SEQ ID NO: 723341 - RNA, 19 nt, Artificial Sequence
  Description of Artificial Sequence: Synthetic oligonucleotide
gcuuaacacugaauuuacu

SEQ ID NO: 723342 - RNA, 19 nt, Artificial Sequence
  Description of Artificial Sequence: Synthetic oligonucleotide
caccgugaugguuccccua

SEQ ID NO: 723343 - RNA, 19 nt, Artificial Sequence
  Description of Artificial Sequence: Synthetic oligonucleotide
gggauaguuccagcccaga

SEQ ID NO: 723344 - RNA, 19 nt, Artificial Sequence
  Description of Artificial Sequence: Synthetic oligonucleotide
gcuuguccgucagggucgc

SEQ ID NO: 723345 - RNA, 19 nt, Artificial Sequence
  Description of Artificial Sequence: Synthetic oligonucleotide
acggaggaucagagcuuga

SEQ ID NO: 723346 - RNA, 19 nt, Artificial Sequence
  Description of Artificial Sequence: Synthetic oligonucleotide
cuuaggcucccugcccucu

SEQ ID NO: 723347 - RNA, 19 nt, Artificial Sequence
  Description of Artificial Sequence: Synthetic oligonucleotide
ggcuaaguugguccccaau

SEQ ID NO: 723348 - RNA, 19 nt, Artificial Sequence
  Description of Artificial Sequence: Synthetic oligonucleotide
ggaccagcucuacuucuau

SEQ ID NO: 723349 - RNA, 19 nt, Artificial Sequence
  Description of Artificial Sequence: Synthetic oligonucleotide
cccaacucccaaccccuca

SEQ ID NO: 723350 - RNA, 19 nt, Artificial Sequence
  Description of Artificial Sequence: Synthetic oligonucleotide
gugggacccuaaagcaaua

SEQ ID NO: 723351 - RNA, 19 nt, Artificial Sequence
  Description of Artificial Sequence: Synthetic oligonucleotide
gguggacgcaucggccuga

SEQ ID NO: 723352 - RNA, 19 nt, Artificial Sequence
  Description of Artificial Sequence: Synthetic oligonucleotide
ccucgucaagaggcaaaug

SEQ ID NO: 723353 - RNA, 19 nt, Artificial Sequence
  Description of Artificial Sequence: Synthetic oligonucleotide
ggguauggacagccaugaa

SEQ ID NO: 723354 - RNA, 19 nt, Artificial Sequence
  Description of Artificial Sequence: Synthetic oligonucleotide
cccuagauauggggugaug

SEQ ID NO: 723355 - RNA, 19 nt, Artificial Sequence
  Description of Artificial Sequence: Synthetic oligonucleotide
gggcccgaucucuccucug

SEQ ID NO: 723356 - RNA, 19 nt, Artificial Sequence
  Description of Artificial Sequence: Synthetic oligonucleotide
ccugcccguggugggaccc

SEQ ID NO: 723357 - RNA, 19 nt, Artificial Sequence
  Description of Artificial Sequence: Synthetic oligonucleotide
augucgcuccagacagcau

SEQ ID NO: 723358 - RNA, 19 nt, Artificial Sequence
  Description of Artificial Sequence: Synthetic oligonucleotide
gggaccagcucuacuucua

SEQ ID NO: 723359 - RNA, 19 nt, Artificial Sequence
  Description of Artificial Sequence: Synthetic oligonucleotide
cugccucgucaagaggcaa

SEQ ID NO: 723360 - RNA, 19 nt, Artificial Sequence
  Description of Artificial Sequence: Synthetic oligonucleotide
ggacggagccccuucccau

SEQ ID NO: 723361 - RNA, 19 nt, Artificial Sequence
  Description of Artificial Sequence: Synthetic oligonucleotide
ggacuucaugcccuuuauu

SEQ ID NO: 723362 - RNA, 19 nt, Artificial Sequence
  Description of Artificial Sequence: Synthetic oligonucleotide
cuaccccggaggugaacau

SEQ ID NO: 723363 - RNA, 19 nt, Artificial Sequence
  Description of Artificial Sequence: Synthetic oligonucleotide
cccaggccuggagagacca

SEQ ID NO: 723364 - RNA, 19 nt, Artificial Sequence
  Description of Artificial Sequence: Synthetic oligonucleotide
gggucgcucuaaggaagga

SEQ ID NO: 723365 - RNA, 19 nt, Artificial Sequence
  Description of Artificial Sequence: Synthetic oligonucleotide
cggaggugaacauggacau

SEQ ID NO: 723366 - RNA, 19 nt, Artificial Sequence
  Description of Artificial Sequence: Synthetic oligonucleotide
gcuuuguauccuggcucaa

SEQ ID NO: 723367 - RNA, 19 nt, Artificial Sequence
  Description of Artificial Sequence: Synthetic oligonucleotide
caacucccaaccccucauu

SEQ ID NO: 723368 - RNA, 19 nt, Artificial Sequence
  Description of Artificial Sequence: Synthetic oligonucleotide
guccgucagggucgcucua

SEQ ID NO: 723369 - RNA, 19 nt, Artificial Sequence
  Description of Artificial Sequence: Synthetic oligonucleotide
ggccugagucguggcacca

SEQ ID NO: 723370 - RNA, 19 nt, Artificial Sequence
  Description of Artificial Sequence: Synthetic oligonucleotide
gccuagucccuaguacacu

SEQ ID NO: 723371 - RNA, 19 nt, Artificial Sequence
  Description of Artificial Sequence: Synthetic oligonucleotide
gccucgucaagaggcaaau

SEQ ID NO: 723372 - RNA, 19 nt, Artificial Sequence
  Description of Artificial Sequence: Synthetic oligonucleotide
ccgugaugguuccccuaca

SEQ ID NO: 723373 - RNA, 19 nt, Artificial Sequence
  Description of Artificial Sequence: Synthetic oligonucleotide
cggaggaucagagcuugaa

SEQ ID NO: 723374 - RNA, 19 nt, Artificial Sequence
  Description of Artificial Sequence: Synthetic oligonucleotide
ggggcccgaucucuccucu

SEQ ID NO: 723375 - RNA, 19 nt, Artificial Sequence
  Description of Artificial Sequence: Synthetic oligonucleotide
cagcugcuauugagaggcu

SEQ ID NO: 723376 - RNA, 19 nt, Artificial Sequence
  Description of Artificial Sequence: Synthetic oligonucleotide
cccguggugggacccuaaa

SEQ ID NO: 723377 - RNA, 19 nt, Artificial Sequence
  Description of Artificial Sequence: Synthetic oligonucleotide
cgcaucggccugagucgug

SEQ ID NO: 723378 - RNA, 19 nt, Artificial Sequence
  Description of Artificial Sequence: Synthetic oligonucleotide
caacugcagcaggggucaa

SEQ ID NO: 723379 - RNA, 19 nt, Artificial Sequence
  Description of Artificial Sequence: Synthetic oligonucleotide
cugggcagucuaggacuuu

SEQ ID NO: 723380 - RNA, 19 nt, Artificial Sequence
  Description of Artificial Sequence: Synthetic oligonucleotide
ccugcaggacggagccccu

SEQ ID NO: 723381 - RNA, 19 nt, Artificial Sequence
  Description of Artificial Sequence: Synthetic oligonucleotide
cuuguccgucagggucgcu

SEQ ID NO: 723382 - RNA, 19 nt, Artificial Sequence
  Description of Artificial Sequence: Synthetic oligonucleotide
ggccuucacgugagaggau

SEQ ID NO: 723383 - RNA, 19 nt, Artificial Sequence
  Description of Artificial Sequence: Synthetic oligonucleotide
ccccaaagguggggcccga

SEQ ID NO: 723384 - RNA, 19 nt, Artificial Sequence
  Description of Artificial Sequence: Synthetic oligonucleotide
cggagccccuucccaucau

SEQ ID NO: 723385 - RNA, 19 nt, Artificial Sequence
  Description of Artificial Sequence: Synthetic oligonucleotide
aaaggguuaaaugugaggc

SEQ ID NO: 723386 - RNA, 19 nt, Artificial Sequence
  Description of Artificial Sequence: Synthetic oligonucleotide
aaucacguuauuuacagag

SEQ ID NO: 723387 - RNA, 19 nt, Artificial Sequence
  Description of Artificial Sequence: Synthetic oligonucleotide
uuaggcauaauucucagag

SEQ ID NO: 723388 - RNA, 19 nt, Artificial Sequence
  Description of Artificial Sequence: Synthetic oligonucleotide
uaacuugacaaaaggaugg

SEQ ID NO: 723389 - RNA, 19 nt, Artificial Sequence
  Description of Artificial Sequence: Synthetic oligonucleotide
uucucuauugugcacaccg

SEQ ID NO: 723390 - RNA, 19 nt, Artificial Sequence
  Description of Artificial Sequence: Synthetic oligonucleotide
acuauuauaugauacuguc

SEQ ID NO: 723391 - RNA, 19 nt, Artificial Sequence
  Description of Artificial Sequence: Synthetic oligonucleotide
uggauuuuaaaccuggucu

SEQ ID NO: 723392 - RNA, 19 nt, Artificial Sequence
  Description of Artificial Sequence: Synthetic oligonucleotide
uuuaacuugacaaaaggau

SEQ ID NO: 723393 - RNA, 19 nt, Artificial Sequence
  Description of Artificial Sequence: Synthetic oligonucleotide
uuaaucacguuauuuacag

SEQ ID NO: 723394 - RNA, 19 nt, Artificial Sequence
  Description of Artificial Sequence: Synthetic oligonucleotide
uuaaaugugaggcaccacc

SEQ ID NO: 723395 - RNA, 19 nt, Artificial Sequence
  Description of Artificial Sequence: Synthetic oligonucleotide
acauccaguacccaggccc

SEQ ID NO: 723396 - RNA, 19 nt, Artificial Sequence
  Description of Artificial Sequence: Synthetic oligonucleotide
uuaacuugacaaaaggaug

SEQ ID NO: 723397 - RNA, 19 nt, Artificial Sequence
  Description of Artificial Sequence: Synthetic oligonucleotide
caagguauagguaaagugc

SEQ ID NO: 723398 - RNA, 19 nt, Artificial Sequence
  Description of Artificial Sequence: Synthetic oligonucleotide
uaguauucaaugaugaacu

SEQ ID NO: 723399 - RNA, 19 nt, Artificial Sequence
  Description of Artificial Sequence: Synthetic oligonucleotide
gauuuuaaccaugaugugg

SEQ ID NO: 723400 - RNA, 19 nt, Artificial Sequence
  Description of Artificial Sequence: Synthetic oligonucleotide
ucacguuauuuacagaggg

SEQ ID NO: 723401 - RNA, 19 nt, Artificial Sequence
  Description of Artificial Sequence: Synthetic oligonucleotide
uuuuaacuugacaaaagga

SEQ ID NO: 723402 - RNA, 19 nt, Artificial Sequence
  Description of Artificial Sequence: Synthetic oligonucleotide
ucugacuauuauaugauac

SEQ ID NO: 723403 - RNA, 19 nt, Artificial Sequence
  Description of Artificial Sequence: Synthetic oligonucleotide
agacauaccaucccaggcc

SEQ ID NO: 723404 - RNA, 19 nt, Artificial Sequence
  Description of Artificial Sequence: Synthetic oligonucleotide
uuaaccaugauguggugag

SEQ ID NO: 723405 - RNA, 19 nt, Artificial Sequence
  Description of Artificial Sequence: Synthetic oligonucleotide
auagcgugggucucgaacc

SEQ ID NO: 723406 - RNA, 19 nt, Artificial Sequence
  Description of Artificial Sequence: Synthetic oligonucleotide
acguuauuuacagaggggc

SEQ ID NO: 723407 - RNA, 19 nt, Artificial Sequence
  Description of Artificial Sequence: Synthetic oligonucleotide
auaauguauacauuacugu

SEQ ID NO: 723408 - RNA, 19 nt, Artificial Sequence
  Description of Artificial Sequence: Synthetic oligonucleotide
ucuuagauggacuucagua

SEQ ID NO: 723409 - RNA, 19 nt, Artificial Sequence
  Description of Artificial Sequence: Synthetic oligonucleotide
acagacacggauugcaugg

SEQ ID NO: 723410 - RNA, 19 nt, Artificial Sequence
  Description of Artificial Sequence: Synthetic oligonucleotide
cuuacagccaggaaagccc

SEQ ID NO: 723411 - RNA, 19 nt, Artificial Sequence
  Description of Artificial Sequence: Synthetic oligonucleotide
acaagguauagguaaagug

SEQ ID NO: 723412 - RNA, 19 nt, Artificial Sequence
  Description of Artificial Sequence: Synthetic oligonucleotide
aucuguaucacggacagag

SEQ ID NO: 723413 - RNA, 19 nt, Artificial Sequence
  Description of Artificial Sequence: Synthetic oligonucleotide
uuacagaggggccaaagca

SEQ ID NO: 723414 - RNA, 19 nt, Artificial Sequence
  Description of Artificial Sequence: Synthetic oligonucleotide
uguacagcuggcaaauuca

SEQ ID NO: 723415 - RNA, 19 nt, Artificial Sequence
  Description of Artificial Sequence: Synthetic oligonucleotide
ugaaauagcggcagguaca

SEQ ID NO: 723416 - RNA, 19 nt, Artificial Sequence
  Description of Artificial Sequence: Synthetic oligonucleotide
gaaauccugagacaccugc

SEQ ID NO: 723417 - RNA, 19 nt, Artificial Sequence
  Description of Artificial Sequence: Synthetic oligonucleotide
cacaccgugaugcugaugc

SEQ ID NO: 723418 - RNA, 19 nt, Artificial Sequence
  Description of Artificial Sequence: Synthetic oligonucleotide
uaaccagugauugucauga

SEQ ID NO: 723419 - RNA, 19 nt, Artificial Sequence
  Description of Artificial Sequence: Synthetic oligonucleotide
acgaaucucauguacagcu

SEQ ID NO: 723420 - RNA, 19 nt, Artificial Sequence
  Description of Artificial Sequence: Synthetic oligonucleotide
agggcauaaacuccacugc

SEQ ID NO: 723421 - RNA, 19 nt, Artificial Sequence
  Description of Artificial Sequence: Synthetic oligonucleotide
cuuagauggacuucaguac

SEQ ID NO: 723422 - RNA, 19 nt, Artificial Sequence
  Description of Artificial Sequence: Synthetic oligonucleotide
auggcaggcgaauuugugc

SEQ ID NO: 723423 - RNA, 19 nt, Artificial Sequence
  Description of Artificial Sequence: Synthetic oligonucleotide
gaacgaaucucauguacag

SEQ ID NO: 723424 - RNA, 19 nt, Artificial Sequence
  Description of Artificial Sequence: Synthetic oligonucleotide
ucuguuuagucaacugucc

SEQ ID NO: 723425 - RNA, 19 nt, Artificial Sequence
  Description of Artificial Sequence: Synthetic oligonucleotide
uuauaugauacugucuuac

SEQ ID NO: 723426 - RNA, 19 nt, Artificial Sequence
  Description of Artificial Sequence: Synthetic oligonucleotide
gacggaagcuguuauuccg

SEQ ID NO: 723427 - RNA, 19 nt, Artificial Sequence
  Description of Artificial Sequence: Synthetic oligonucleotide
aggcauaauucucagaggu

SEQ ID NO: 723428 - RNA, 19 nt, Artificial Sequence
  Description of Artificial Sequence: Synthetic oligonucleotide
gaagcuguuauuccgugac

SEQ ID NO: 723429 - RNA, 19 nt, Artificial Sequence
  Description of Artificial Sequence: Synthetic oligonucleotide
agauacacagccuguacug

SEQ ID NO: 723430 - RNA, 19 nt, Artificial Sequence
  Description of Artificial Sequence: Synthetic oligonucleotide
aacgaaucucauguacagc

SEQ ID NO: 723431 - RNA, 19 nt, Artificial Sequence
  Description of Artificial Sequence: Synthetic oligonucleotide
uucucuauagcgugggucu

SEQ ID NO: 723432 - RNA, 19 nt, Artificial Sequence
  Description of Artificial Sequence: Synthetic oligonucleotide
uauagcgugggucucgaac

SEQ ID NO: 723433 - RNA, 19 nt, Artificial Sequence
  Description of Artificial Sequence: Synthetic oligonucleotide
cucgucuccagguacaggc

SEQ ID NO: 723434 - RNA, 19 nt, Artificial Sequence
  Description of Artificial Sequence: Synthetic oligonucleotide
cuugacaaaaggauggaca

SEQ ID NO: 723435 - RNA, 19 nt, Artificial Sequence
  Description of Artificial Sequence: Synthetic oligonucleotide
uuucuuauggauugcccga

SEQ ID NO: 723436 - RNA, 19 nt, Artificial Sequence
  Description of Artificial Sequence: Synthetic oligonucleotide
gaaucaagcauacaaggua

SEQ ID NO: 723437 - RNA, 19 nt, Artificial Sequence
  Description of Artificial Sequence: Synthetic oligonucleotide
uacauuucgacggaagcug

SEQ ID NO: 723438 - RNA, 19 nt, Artificial Sequence
  Description of Artificial Sequence: Synthetic oligonucleotide
agguguuucacagucccgc

SEQ ID NO: 723439 - RNA, 19 nt, Artificial Sequence
  Description of Artificial Sequence: Synthetic oligonucleotide
ugucggguacaucugcggg

SEQ ID NO: 723440 - RNA, 19 nt, Artificial Sequence
  Description of Artificial Sequence: Synthetic oligonucleotide
cuguuauuccgugacaggg

SEQ ID NO: 723441 - RNA, 19 nt, Artificial Sequence
  Description of Artificial Sequence: Synthetic oligonucleotide
aaucaagcauacaagguau

SEQ ID NO: 723442 - RNA, 19 nt, Artificial Sequence
  Description of Artificial Sequence: Synthetic oligonucleotide
ugugguuuguaagugguac

SEQ ID NO: 723443 - RNA, 19 nt, Artificial Sequence
  Description of Artificial Sequence: Synthetic oligonucleotide
gagacauaccaucccaggc

SEQ ID NO: 723444 - RNA, 19 nt, Artificial Sequence
  Description of Artificial Sequence: Synthetic oligonucleotide
cacagaaucaagcauacaa

SEQ ID NO: 723445 - RNA, 19 nt, Artificial Sequence
  Description of Artificial Sequence: Synthetic oligonucleotide
acagaaucaagcauacaag

SEQ ID NO: 723446 - RNA, 19 nt, Artificial Sequence
  Description of Artificial Sequence: Synthetic oligonucleotide
ugauguuguaguauucaau

SEQ ID NO: 723447 - RNA, 19 nt, Artificial Sequence
  Description of Artificial Sequence: Synthetic oligonucleotide
uacaaaaccauggaacgaa

SEQ ID NO: 723448 - RNA, 19 nt, Artificial Sequence
  Description of Artificial Sequence: Synthetic oligonucleotide
uucaguacuccucuuccgu

SEQ ID NO: 723449 - RNA, 19 nt, Artificial Sequence
  Description of Artificial Sequence: Synthetic oligonucleotide
uuuaaccaugaugugguga

SEQ ID NO: 723450 - RNA, 19 nt, Artificial Sequence
  Description of Artificial Sequence: Synthetic oligonucleotide
aggacugugguuuguaagu

SEQ ID NO: 723451 - RNA, 19 nt, Artificial Sequence
  Description of Artificial Sequence: Synthetic oligonucleotide
uguuauuccgugacagggu

SEQ ID NO: 723452 - RNA, 19 nt, Artificial Sequence
  Description of Artificial Sequence: Synthetic oligonucleotide
caugggauguaccugggug

SEQ ID NO: 723453 - RNA, 19 nt, Artificial Sequence
  Description of Artificial Sequence: Synthetic oligonucleotide
agguacauuuaagaaccgc

SEQ ID NO: 723454 - RNA, 19 nt, Artificial Sequence
  Description of Artificial Sequence: Synthetic oligonucleotide
gaacuugaaauagcggcag

SEQ ID NO: 723455 - RNA, 19 nt, Artificial Sequence
  Description of Artificial Sequence: Synthetic oligonucleotide
ugugcuguguguucauuca

SEQ ID NO: 723456 - RNA, 19 nt, Artificial Sequence
  Description of Artificial Sequence: Synthetic oligonucleotide
aggcccguaaggcaaugcc

SEQ ID NO: 723457 - RNA, 19 nt, Artificial Sequence
  Description of Artificial Sequence: Synthetic oligonucleotide
aaucugacuauuauaugau

SEQ ID NO: 723458 - RNA, 19 nt, Artificial Sequence
  Description of Artificial Sequence: Synthetic oligonucleotide
aaccgcuaaacuccuggug

SEQ ID NO: 723459 - RNA, 19 nt, Artificial Sequence
  Description of Artificial Sequence: Synthetic oligonucleotide
gacaaauggcuccacagaa

SEQ ID NO: 723460 - RNA, 19 nt, Artificial Sequence
  Description of Artificial Sequence: Synthetic oligonucleotide
gauuaaagcuguggcaggc

SEQ ID NO: 723461 - RNA, 19 nt, Artificial Sequence
  Description of Artificial Sequence: Synthetic oligonucleotide
agauggacuucaguacucc

SEQ ID NO: 723462 - RNA, 19 nt, Artificial Sequence
  Description of Artificial Sequence: Synthetic oligonucleotide
cauguauugcugaggcucc

SEQ ID NO: 723463 - RNA, 19 nt, Artificial Sequence
  Description of Artificial Sequence: Synthetic oligonucleotide
uuucgcucccucuugauuu

SEQ ID NO: 723464 - RNA, 19 nt, Artificial Sequence
  Description of Artificial Sequence: Synthetic oligonucleotide
aaugugaggcaccaccaua

SEQ ID NO: 723465 - RNA, 19 nt, Artificial Sequence
  Description of Artificial Sequence: Synthetic oligonucleotide
cucgcauacacuguugccc

SEQ ID NO: 723466 - RNA, 19 nt, Artificial Sequence
  Description of Artificial Sequence: Synthetic oligonucleotide
cauggaacgaaucucaugu

SEQ ID NO: 723467 - RNA, 19 nt, Artificial Sequence
  Description of Artificial Sequence: Synthetic oligonucleotide
auguacuuuccaccacagc

SEQ ID NO: 723468 - RNA, 19 nt, Artificial Sequence
  Description of Artificial Sequence: Synthetic oligonucleotide
agauuuuaaccaugaugug

SEQ ID NO: 723469 - RNA, 19 nt, Artificial Sequence
  Description of Artificial Sequence: Synthetic oligonucleotide
aguacccaggcccguaagg

SEQ ID NO: 723470 - RNA, 19 nt, Artificial Sequence
  Description of Artificial Sequence: Synthetic oligonucleotide
auguauacauuacuguauu

SEQ ID NO: 723471 - RNA, 19 nt, Artificial Sequence
  Description of Artificial Sequence: Synthetic oligonucleotide
uauuccgugacaggguccc

SEQ ID NO: 723472 - RNA, 19 nt, Artificial Sequence
  Description of Artificial Sequence: Synthetic oligonucleotide
gaggucgcacgccucaggg

SEQ ID NO: 723473 - RNA, 19 nt, Artificial Sequence
  Description of Artificial Sequence: Synthetic oligonucleotide
uccucgcauacacuguugc

SEQ ID NO: 723474 - RNA, 19 nt, Artificial Sequence
  Description of Artificial Sequence: Synthetic oligonucleotide
uuuaggcauaauucucaga

SEQ ID NO: 723475 - RNA, 19 nt, Artificial Sequence
  Description of Artificial Sequence: Synthetic oligonucleotide
agcuguuauuccgugacag

SEQ ID NO: 723476 - RNA, 19 nt, Artificial Sequence
  Description of Artificial Sequence: Synthetic oligonucleotide
gauugcccgauuaaagcug

SEQ ID NO: 723477 - RNA, 19 nt, Artificial Sequence
  Description of Artificial Sequence: Synthetic oligonucleotide
ugggucucgaacccaccgg

SEQ ID NO: 723478 - RNA, 19 nt, Artificial Sequence
  Description of Artificial Sequence: Synthetic oligonucleotide
uuuagucaacuguccauaa

SEQ ID NO: 723479 - RNA, 19 nt, Artificial Sequence
  Description of Artificial Sequence: Synthetic oligonucleotide
ugucuuacucuggugauuc

SEQ ID NO: 723480 - RNA, 19 nt, Artificial Sequence
  Description of Artificial Sequence: Synthetic oligonucleotide
ccaccauacaaaaccaugg

SEQ ID NO: 723481 - RNA, 19 nt, Artificial Sequence
  Description of Artificial Sequence: Synthetic oligonucleotide
cuggauuuuaaaccugguc

SEQ ID NO: 723482 - RNA, 19 nt, Artificial Sequence
  Description of Artificial Sequence: Synthetic oligonucleotide
guuauuccgugacaggguc

SEQ ID NO: 723483 - RNA, 19 nt, Artificial Sequence
  Description of Artificial Sequence: Synthetic oligonucleotide
cacuguugcccucagcagc

SEQ ID NO: 723484 - RNA, 19 nt, Artificial Sequence
  Description of Artificial Sequence: Synthetic oligonucleotide
uuauuccgugacagggucc

SEQ ID NO: 723485 - RNA, 19 nt, Artificial Sequence
  Description of Artificial Sequence: Synthetic oligonucleotide
uacaagguauagguaaagu

SEQ ID NO: 723486 - RNA, 19 nt, Artificial Sequence
  Description of Artificial Sequence: Synthetic oligonucleotide
cuggugauucuguuuaguc

SEQ ID NO: 723487 - RNA, 19 nt, Artificial Sequence
  Description of Artificial Sequence: Synthetic oligonucleotide
aucacguuauuuacagagg

SEQ ID NO: 723488 - RNA, 19 nt, Artificial Sequence
  Description of Artificial Sequence: Synthetic oligonucleotide
ugcccgauuaaagcugugg

SEQ ID NO: 723489 - RNA, 19 nt, Artificial Sequence
  Description of Artificial Sequence: Synthetic oligonucleotide
gucuaaagcagaaggcugc

SEQ ID NO: 723490 - RNA, 19 nt, Artificial Sequence
  Description of Artificial Sequence: Synthetic oligonucleotide
uauagguaaagugcccaac

SEQ ID NO: 723491 - RNA, 19 nt, Artificial Sequence
  Description of Artificial Sequence: Synthetic oligonucleotide
cucuauugugcacaccgug

SEQ ID NO: 723492 - RNA, 19 nt, Artificial Sequence
  Description of Artificial Sequence: Synthetic oligonucleotide
uucacccacagacacggau

SEQ ID NO: 723493 - RNA, 19 nt, Artificial Sequence
  Description of Artificial Sequence: Synthetic oligonucleotide
gauugcaugggauguaccu

SEQ ID NO: 723494 - RNA, 19 nt, Artificial Sequence
  Description of Artificial Sequence: Synthetic oligonucleotide
ugagcaccauuagugagca

SEQ ID NO: 723495 - RNA, 19 nt, Artificial Sequence
  Description of Artificial Sequence: Synthetic oligonucleotide
acagccuguacuggaacac

SEQ ID NO: 723496 - RNA, 19 nt, Artificial Sequence
  Description of Artificial Sequence: Synthetic oligonucleotide
aggcgcucaagguuuaaug

SEQ ID NO: 723497 - RNA, 19 nt, Artificial Sequence
  Description of Artificial Sequence: Synthetic oligonucleotide
ucugagaccgguggcagca

SEQ ID NO: 723498 - RNA, 19 nt, Artificial Sequence
  Description of Artificial Sequence: Synthetic oligonucleotide
ucgucuccagguacaggcg

SEQ ID NO: 723499 - RNA, 19 nt, Artificial Sequence
  Description of Artificial Sequence: Synthetic oligonucleotide
caaaaccauggaacgaauc

SEQ ID NO: 723500 - RNA, 19 nt, Artificial Sequence
  Description of Artificial Sequence: Synthetic oligonucleotide
ucauguacagcuggcaaau

SEQ ID NO: 723501 - RNA, 19 nt, Artificial Sequence
  Description of Artificial Sequence: Synthetic oligonucleotide
ucgacggaagcuguuauuc

SEQ ID NO: 723502 - RNA, 19 nt, Artificial Sequence
  Description of Artificial Sequence: Synthetic oligonucleotide
auuauaugauacugucuua

SEQ ID NO: 723503 - RNA, 19 nt, Artificial Sequence
  Description of Artificial Sequence: Synthetic oligonucleotide
ucgcauacacuguugcccu

SEQ ID NO: 723504 - RNA, 19 nt, Artificial Sequence
  Description of Artificial Sequence: Synthetic oligonucleotide
auacaagguauagguaaag

SEQ ID NO: 723505 - RNA, 19 nt, Artificial Sequence
  Description of Artificial Sequence: Synthetic oligonucleotide
gaacccaccgggaaucugc

SEQ ID NO: 723506 - RNA, 19 nt, Artificial Sequence
  Description of Artificial Sequence: Synthetic oligonucleotide
cuggucugagcagagauuc

SEQ ID NO: 723507 - RNA, 19 nt, Artificial Sequence
  Description of Artificial Sequence: Synthetic oligonucleotide
cagguaaccagugauuguc

SEQ ID NO: 723508 - RNA, 19 nt, Artificial Sequence
  Description of Artificial Sequence: Synthetic oligonucleotide
uguaaacaccacagggcau

SEQ ID NO: 723509 - RNA, 19 nt, Artificial Sequence
  Description of Artificial Sequence: Synthetic oligonucleotide
auugcaugggauguaccug

SEQ ID NO: 723510 - RNA, 19 nt, Artificial Sequence
  Description of Artificial Sequence: Synthetic oligonucleotide
uguauacauuacuguauuu

SEQ ID NO: 723511 - RNA, 19 nt, Artificial Sequence
  Description of Artificial Sequence: Synthetic oligonucleotide
agguaaagugcccaacuuu

SEQ ID NO: 723512 - RNA, 19 nt, Artificial Sequence
  Description of Artificial Sequence: Synthetic oligonucleotide
uguccauaauguauacauu

SEQ ID NO: 723513 - RNA, 19 nt, Artificial Sequence
  Description of Artificial Sequence: Synthetic oligonucleotide
ucgcucugugaucugccag

SEQ ID NO: 723514 - RNA, 19 nt, Artificial Sequence
  Description of Artificial Sequence: Synthetic oligonucleotide
accaccauacaaaaccaug

SEQ ID NO: 723515 - RNA, 19 nt, Artificial Sequence
  Description of Artificial Sequence: Synthetic oligonucleotide
auuuuaaaccuggucucca

SEQ ID NO: 723516 - RNA, 19 nt, Artificial Sequence
  Description of Artificial Sequence: Synthetic oligonucleotide
guacuggaacacuucagga

SEQ ID NO: 723517 - RNA, 19 nt, Artificial Sequence
  Description of Artificial Sequence: Synthetic oligonucleotide
aagugcccaacuuucuguu

SEQ ID NO: 723518 - RNA, 19 nt, Artificial Sequence
  Description of Artificial Sequence: Synthetic oligonucleotide
aagcuguuauuccgugaca

SEQ ID NO: 723519 - RNA, 19 nt, Artificial Sequence
  Description of Artificial Sequence: Synthetic oligonucleotide
uuucgacggaagcuguuau

SEQ ID NO: 723520 - RNA, 19 nt, Artificial Sequence
  Description of Artificial Sequence: Synthetic oligonucleotide
uucaacugggagcauucuu

SEQ ID NO: 723521 - RNA, 19 nt, Artificial Sequence
  Description of Artificial Sequence: Synthetic oligonucleotide
gcugaaaggguuaaaugug

SEQ ID NO: 723522 - RNA, 19 nt, Artificial Sequence
  Description of Artificial Sequence: Synthetic oligonucleotide
uccguuucgcucccucuug

SEQ ID NO: 723523 - RNA, 19 nt, Artificial Sequence
  Description of Artificial Sequence: Synthetic oligonucleotide
gguaaagugcccaacuuuc

SEQ ID NO: 723524 - RNA, 19 nt, Artificial Sequence
  Description of Artificial Sequence: Synthetic oligonucleotide
ugugaggcaccaccauaca

SEQ ID NO: 723525 - RNA, 19 nt, Artificial Sequence
  Description of Artificial Sequence: Synthetic oligonucleotide
cuucucuauagcguggguc

SEQ ID NO: 723526 - RNA, 19 nt, Artificial Sequence
  Description of Artificial Sequence: Synthetic oligonucleotide
uccaacuggccaccucaag

SEQ ID NO: 723527 - RNA, 19 nt, Artificial Sequence
  Description of Artificial Sequence: Synthetic oligonucleotide
gcagguagcacaccucggg

SEQ ID NO: 723528 - RNA, 19 nt, Artificial Sequence
  Description of Artificial Sequence: Synthetic oligonucleotide
ugcccaacuuucuguuuag

SEQ ID NO: 723529 - RNA, 19 nt, Artificial Sequence
  Description of Artificial Sequence: Synthetic oligonucleotide
aguauucaaugaugaacuu

SEQ ID NO: 723530 - RNA, 19 nt, Artificial Sequence
  Description of Artificial Sequence: Synthetic oligonucleotide
uguauugcugaggcuccag

SEQ ID NO: 723531 - RNA, 19 nt, Artificial Sequence
  Description of Artificial Sequence: Synthetic oligonucleotide
uuccgugacaggguccccg

SEQ ID NO: 723532 - RNA, 19 nt, Artificial Sequence
  Description of Artificial Sequence: Synthetic oligonucleotide
gugucggguacaucugcgg

SEQ ID NO: 723533 - RNA, 19 nt, Artificial Sequence
  Description of Artificial Sequence: Synthetic oligonucleotide
gucuucucuauagcguggg

SEQ ID NO: 723534 - RNA, 19 nt, Artificial Sequence
  Description of Artificial Sequence: Synthetic oligonucleotide
uccgugacaggguccccgg

SEQ ID NO: 723535 - RNA, 19 nt, Artificial Sequence
  Description of Artificial Sequence: Synthetic oligonucleotide
acacucggauuccagccug

SEQ ID NO: 723536 - RNA, 19 nt, Artificial Sequence
  Description of Artificial Sequence: Synthetic oligonucleotide
uguaccugggugucgggua

SEQ ID NO: 723537 - RNA, 19 nt, Artificial Sequence
  Description of Artificial Sequence: Synthetic oligonucleotide
agaggggccaaagcacucg

SEQ ID NO: 723538 - RNA, 19 nt, Artificial Sequence
  Description of Artificial Sequence: Synthetic oligonucleotide
ccuacauuucgacggaagc

SEQ ID NO: 723539 - RNA, 19 nt, Artificial Sequence
  Description of Artificial Sequence: Synthetic oligonucleotide
uaaccaugauguggugagg

SEQ ID NO: 723540 - RNA, 19 nt, Artificial Sequence
  Description of Artificial Sequence: Synthetic oligonucleotide
cugacuauuauaugauacu

SEQ ID NO: 723541 - RNA, 19 nt, Artificial Sequence
  Description of Artificial Sequence: Synthetic oligonucleotide
ccgauuaaagcuguggcag

SEQ ID NO: 723542 - RNA, 19 nt, Artificial Sequence
  Description of Artificial Sequence: Synthetic oligonucleotide
gauguaccugggugucggg

SEQ ID NO: 723543 - RNA, 19 nt, Artificial Sequence
  Description of Artificial Sequence: Synthetic oligonucleotide
gauuccggaaagggcgggg

SEQ ID NO: 723544 - RNA, 19 nt, Artificial Sequence
  Description of Artificial Sequence: Synthetic oligonucleotide
acuguauuuuaaucacguu

SEQ ID NO: 723545 - RNA, 19 nt, Artificial Sequence
  Description of Artificial Sequence: Synthetic oligonucleotide
guacagcuggcaaauucag

SEQ ID NO: 723546 - RNA, 19 nt, Artificial Sequence
  Description of Artificial Sequence: Synthetic oligonucleotide
gcuguuauuccgugacagg

SEQ ID NO: 723547 - RNA, 19 nt, Artificial Sequence
  Description of Artificial Sequence: Synthetic oligonucleotide
aucugacuauuauaugaua

SEQ ID NO: 723548 - RNA, 19 nt, Artificial Sequence
  Description of Artificial Sequence: Synthetic oligonucleotide
cacaccucgggacugguca

SEQ ID NO: 723549 - RNA, 19 nt, Artificial Sequence
  Description of Artificial Sequence: Synthetic oligonucleotide
cucuauagcgugggucucg

SEQ ID NO: 723550 - RNA, 19 nt, Artificial Sequence
  Description of Artificial Sequence: Synthetic oligonucleotide
ucucagagguuuugcuuuc

SEQ ID NO: 723551 - RNA, 19 nt, Artificial Sequence
  Description of Artificial Sequence: Synthetic oligonucleotide
cuguuuagucaacugucca

SEQ ID NO: 723552 - RNA, 19 nt, Artificial Sequence
  Description of Artificial Sequence: Synthetic oligonucleotide
gacauaccaucccaggccu

SEQ ID NO: 723553 - RNA, 19 nt, Artificial Sequence
  Description of Artificial Sequence: Synthetic oligonucleotide
acuuuggucacuggccuga

SEQ ID NO: 723554 - RNA, 19 nt, Artificial Sequence
  Description of Artificial Sequence: Synthetic oligonucleotide
ucuauagcgugggucucga

SEQ ID NO: 723555 - RNA, 19 nt, Artificial Sequence
  Description of Artificial Sequence: Synthetic oligonucleotide
aagggagucuaaagcagaa

SEQ ID NO: 723556 - RNA, 19 nt, Artificial Sequence
  Description of Artificial Sequence: Synthetic oligonucleotide
ucaguacuccucuuccguu

SEQ ID NO: 723557 - RNA, 19 nt, Artificial Sequence
  Description of Artificial Sequence: Synthetic oligonucleotide
cucauguacagcuggcaaa

SEQ ID NO: 723558 - RNA, 19 nt, Artificial Sequence
  Description of Artificial Sequence: Synthetic oligonucleotide
ggcagguaaccagugauug

SEQ ID NO: 723559 - RNA, 19 nt, Artificial Sequence
  Description of Artificial Sequence: Synthetic oligonucleotide
ggauguaccugggugucgg

SEQ ID NO: 723560 - RNA, 19 nt, Artificial Sequence
  Description of Artificial Sequence: Synthetic oligonucleotide
gggucucgaacccaccggg

SEQ ID NO: 723561 - RNA, 19 nt, Artificial Sequence
  Description of Artificial Sequence: Synthetic oligonucleotide
caccauacaaaaccaugga

SEQ ID NO: 723562 - RNA, 19 nt, Artificial Sequence
  Description of Artificial Sequence: Synthetic oligonucleotide
ugaccuccagauguccuug

SEQ ID NO: 723563 - RNA, 19 nt, Artificial Sequence
  Description of Artificial Sequence: Synthetic oligonucleotide
gugguuuguaagugguaca

SEQ ID NO: 723564 - RNA, 19 nt, Artificial Sequence
  Description of Artificial Sequence: Synthetic oligonucleotide
guauagguaaagugcccaa

SEQ ID NO: 723565 - RNA, 19 nt, Artificial Sequence
  Description of Artificial Sequence: Synthetic oligonucleotide
gguauagguaaagugccca

SEQ ID NO: 723566 - RNA, 19 nt, Artificial Sequence
  Description of Artificial Sequence: Synthetic oligonucleotide
uggcuaccaugucaaggac

SEQ ID NO: 723567 - RNA, 19 nt, Artificial Sequence
  Description of Artificial Sequence: Synthetic oligonucleotide
ucgggacuggucaguaauc

SEQ ID NO: 723568 - RNA, 19 nt, Artificial Sequence
  Description of Artificial Sequence: Synthetic oligonucleotide
guacauuuaagaaccgcua

SEQ ID NO: 723569 - RNA, 19 nt, Artificial Sequence
  Description of Artificial Sequence: Synthetic oligonucleotide
gcccgauuaaagcuguggc

SEQ ID NO: 723570 - RNA, 19 nt, Artificial Sequence
  Description of Artificial Sequence: Synthetic oligonucleotide
aagcccuucugagaccggu

SEQ ID NO: 723571 - RNA, 19 nt, Artificial Sequence
  Description of Artificial Sequence: Synthetic oligonucleotide
uucuuauggauugcccgau

SEQ ID NO: 723572 - RNA, 19 nt, Artificial Sequence
  Description of Artificial Sequence: Synthetic oligonucleotide
uccggaaagggcggggaug

SEQ ID NO: 723573 - RNA, 19 nt, Artificial Sequence
  Description of Artificial Sequence: Synthetic oligonucleotide
accauguauugcugaggcu

SEQ ID NO: 723574 - RNA, 19 nt, Artificial Sequence
  Description of Artificial Sequence: Synthetic oligonucleotide
ucuuauggauugcccgauu

SEQ ID NO: 723575 - RNA, 19 nt, Artificial Sequence
  Description of Artificial Sequence: Synthetic oligonucleotide
cuuacucuggugauucugu

SEQ ID NO: 723576 - RNA, 19 nt, Artificial Sequence
  Description of Artificial Sequence: Synthetic oligonucleotide
agcuagcuagcagagcacu

SEQ ID NO: 723577 - RNA, 19 nt, Artificial Sequence
  Description of Artificial Sequence: Synthetic oligonucleotide
uuacucuggugauucuguu

SEQ ID NO: 723578 - RNA, 19 nt, Artificial Sequence
  Description of Artificial Sequence: Synthetic oligonucleotide
gguacauuuaagaaccgcu

SEQ ID NO: 723579 - RNA, 19 nt, Artificial Sequence
  Description of Artificial Sequence: Synthetic oligonucleotide
ggaacgaaucucauguaca

SEQ ID NO: 723580 - RNA, 19 nt, Artificial Sequence
  Description of Artificial Sequence: Synthetic oligonucleotide
aucucauguacagcuggca

SEQ ID NO: 723581 - RNA, 19 nt, Artificial Sequence
  Description of Artificial Sequence: Synthetic oligonucleotide
cguuauuuacagaggggcc

SEQ ID NO: 723582 - RNA, 19 nt, Artificial Sequence
  Description of Artificial Sequence: Synthetic oligonucleotide
gcggggaugaggucgcacg

SEQ ID NO: 723583 - RNA, 19 nt, Artificial Sequence
  Description of Artificial Sequence: Synthetic oligonucleotide
cgcucaagguuuaaugugc

SEQ ID NO: 723584 - RNA, 19 nt, Artificial Sequence
  Description of Artificial Sequence: Synthetic oligonucleotide
gcgcucaagguuuaaugug

SEQ ID NO: 723585 - RNA, 19 nt, Artificial Sequence
  Description of Artificial Sequence: Synthetic oligonucleotide
agcacugguaauguacuuu

SEQ ID NO: 723586 - RNA, 19 nt, Artificial Sequence
  Description of Artificial Sequence: Synthetic oligonucleotide
auugcccgauuaaagcugu

SEQ ID NO: 723587 - RNA, 19 nt, Artificial Sequence
  Description of Artificial Sequence: Synthetic oligonucleotide
accgggaaucugcuggccu

SEQ ID NO: 723588 - RNA, 19 nt, Artificial Sequence
  Description of Artificial Sequence: Synthetic oligonucleotide
acaccucgggacuggucag

SEQ ID NO: 723589 - RNA, 19 nt, Artificial Sequence
  Description of Artificial Sequence: Synthetic oligonucleotide
gcacccugccuacauuucg

SEQ ID NO: 723590 - RNA, 19 nt, Artificial Sequence
  Description of Artificial Sequence: Synthetic oligonucleotide
gguuaaaugugaggcacca

SEQ ID NO: 723591 - RNA, 19 nt, Artificial Sequence
  Description of Artificial Sequence: Synthetic oligonucleotide
gcggcagguacauuuaaga

SEQ ID NO: 723592 - RNA, 19 nt, Artificial Sequence
  Description of Artificial Sequence: Synthetic oligonucleotide
cacucggauuccagccugg

SEQ ID NO: 723593 - RNA, 19 nt, Artificial Sequence
  Description of Artificial Sequence: Synthetic oligonucleotide
auuucgacggaagcuguua

SEQ ID NO: 723594 - RNA, 19 nt, Artificial Sequence
  Description of Artificial Sequence: Synthetic oligonucleotide
uucgacggaagcuguuauu

SEQ ID NO: 723595 - RNA, 19 nt, Artificial Sequence
  Description of Artificial Sequence: Synthetic oligonucleotide
agcggcagguacauuuaag

SEQ ID NO: 723596 - RNA, 19 nt, Artificial Sequence
  Description of Artificial Sequence: Synthetic oligonucleotide
ucacagccccaggaaaaca

SEQ ID NO: 723597 - RNA, 19 nt, Artificial Sequence
  Description of Artificial Sequence: Synthetic oligonucleotide
ugccuggcaauaggguuug

SEQ ID NO: 723598 - RNA, 19 nt, Artificial Sequence
  Description of Artificial Sequence: Synthetic oligonucleotide
gacacggacuggcucgcuc

SEQ ID NO: 723599 - RNA, 19 nt, Artificial Sequence
  Description of Artificial Sequence: Synthetic oligonucleotide
ggauugcccgauuaaagcu

SEQ ID NO: 723600 - RNA, 19 nt, Artificial Sequence
  Description of Artificial Sequence: Synthetic oligonucleotide
cagacacggauugcauggg

SEQ ID NO: 723601 - RNA, 19 nt, Artificial Sequence
  Description of Artificial Sequence: Synthetic oligonucleotide
cagucuggucugagcagag

SEQ ID NO: 723602 - RNA, 19 nt, Artificial Sequence
  Description of Artificial Sequence: Synthetic oligonucleotide
auggaacgaaucucaugua

SEQ ID NO: 723603 - RNA, 19 nt, Artificial Sequence
  Description of Artificial Sequence: Synthetic oligonucleotide
cagcuagcuagcagagcac

SEQ ID NO: 723604 - RNA, 19 nt, Artificial Sequence
  Description of Artificial Sequence: Synthetic oligonucleotide
agucccgcugccucuuaga

SEQ ID NO: 723605 - RNA, 19 nt, Artificial Sequence
  Description of Artificial Sequence: Synthetic oligonucleotide
uggccugauguuguaguau

SEQ ID NO: 723606 - RNA, 19 nt, Artificial Sequence
  Description of Artificial Sequence: Synthetic oligonucleotide
acccacagacacggauugc

SEQ ID NO: 723607 - RNA, 19 nt, Artificial Sequence
  Description of Artificial Sequence: Synthetic oligonucleotide
gaaauagcggcagguacau

SEQ ID NO: 723608 - RNA, 19 nt, Artificial Sequence
  Description of Artificial Sequence: Synthetic oligonucleotide
gaugcacacagguuccuuu

SEQ ID NO: 723609 - RNA, 19 nt, Artificial Sequence
  Description of Artificial Sequence: Synthetic oligonucleotide
gugcccaacuuucuguuua

SEQ ID NO: 723610 - RNA, 19 nt, Artificial Sequence
  Description of Artificial Sequence: Synthetic oligonucleotide
acauuucgacggaagcugu

SEQ ID NO: 723611 - RNA, 19 nt, Artificial Sequence
  Description of Artificial Sequence: Synthetic oligonucleotide
cacagggcauaaacuccac

SEQ ID NO: 723612 - RNA, 19 nt, Artificial Sequence
  Description of Artificial Sequence: Synthetic oligonucleotide
auucaacugggagcauucu

SEQ ID NO: 723613 - RNA, 19 nt, Artificial Sequence
  Description of Artificial Sequence: Synthetic oligonucleotide
cagauacacagccuguacu

SEQ ID NO: 723614 - RNA, 19 nt, Artificial Sequence
  Description of Artificial Sequence: Synthetic oligonucleotide
acaaaaccauggaacgaau

SEQ ID NO: 723615 - RNA, 19 nt, Artificial Sequence
  Description of Artificial Sequence: Synthetic oligonucleotide
cuacauuucgacggaagcu

SEQ ID NO: 723616 - RNA, 19 nt, Artificial Sequence
  Description of Artificial Sequence: Synthetic oligonucleotide
agguaaccagugauuguca

SEQ ID NO: 723617 - RNA, 19 nt, Artificial Sequence
  Description of Artificial Sequence: Synthetic oligonucleotide
acucgucuccagguacagg

SEQ ID NO: 723618 - RNA, 19 nt, Artificial Sequence
  Description of Artificial Sequence: Synthetic oligonucleotide
cgauuaaagcuguggcagg

SEQ ID NO: 723619 - RNA, 19 nt, Artificial Sequence
  Description of Artificial Sequence: Synthetic oligonucleotide
ggacugugguuuguaagug

SEQ ID NO: 723620 - RNA, 19 nt, Artificial Sequence
  Description of Artificial Sequence: Synthetic oligonucleotide
ucucuauagcgugggucuc

SEQ ID NO: 723621 - RNA, 19 nt, Artificial Sequence
  Description of Artificial Sequence: Synthetic oligonucleotide
cuggugcuucagacacucg

SEQ ID NO: 723622 - RNA, 19 nt, Artificial Sequence
  Description of Artificial Sequence: Synthetic oligonucleotide
agcacccugccuacauuuc

SEQ ID NO: 723623 - RNA, 19 nt, Artificial Sequence
  Description of Artificial Sequence: Synthetic oligonucleotide
ggauggacaauguuugaau

SEQ ID NO: 723624 - RNA, 19 nt, Artificial Sequence
  Description of Artificial Sequence: Synthetic oligonucleotide
auguaccugggugucgggu

SEQ ID NO: 723625 - RNA, 19 nt, Artificial Sequence
  Description of Artificial Sequence: Synthetic oligonucleotide
ccauggaacgaaucucaug

SEQ ID NO: 723626 - RNA, 19 nt, Artificial Sequence
  Description of Artificial Sequence: Synthetic oligonucleotide
agugcccaacuuucuguuu

SEQ ID NO: 723627 - RNA, 19 nt, Artificial Sequence
  Description of Artificial Sequence: Synthetic oligonucleotide
ccgcuaaacuccugguggg

SEQ ID NO: 723628 - RNA, 19 nt, Artificial Sequence
  Description of Artificial Sequence: Synthetic oligonucleotide
ucacaauggcaggcgaauu

SEQ ID NO: 723629 - RNA, 19 nt, Artificial Sequence
  Description of Artificial Sequence: Synthetic oligonucleotide
auuccgugacagggucccc

SEQ ID NO: 723630 - RNA, 19 nt, Artificial Sequence
  Description of Artificial Sequence: Synthetic oligonucleotide
uauuuacagaggggccaaa

SEQ ID NO: 723631 - RNA, 19 nt, Artificial Sequence
  Description of Artificial Sequence: Synthetic oligonucleotide
ggaagcuguuauuccguga

SEQ ID NO: 723632 - RNA, 19 nt, Artificial Sequence
  Description of Artificial Sequence: Synthetic oligonucleotide
cacagcuagcuagcagagc

SEQ ID NO: 723633 - RNA, 19 nt, Artificial Sequence
  Description of Artificial Sequence: Synthetic oligonucleotide
caguacccaggcccguaag

SEQ ID NO: 723634 - RNA, 19 nt, Artificial Sequence
  Description of Artificial Sequence: Synthetic oligonucleotide
cacccugccuacauuucga

SEQ ID NO: 723635 - RNA, 19 nt, Artificial Sequence
  Description of Artificial Sequence: Synthetic oligonucleotide
ggcgcucaagguuuaaugu

SEQ ID NO: 723636 - RNA, 19 nt, Artificial Sequence
  Description of Artificial Sequence: Synthetic oligonucleotide
ggguuaaaugugaggcacc

SEQ ID NO: 723637 - RNA, 19 nt, Artificial Sequence
  Description of Artificial Sequence: Synthetic oligonucleotide
gcccguaaggcaaugccug

SEQ ID NO: 723638 - RNA, 19 nt, Artificial Sequence
  Description of Artificial Sequence: Synthetic oligonucleotide
gccucuuagauggacuuca

SEQ ID NO: 723639 - RNA, 19 nt, Artificial Sequence
  Description of Artificial Sequence: Synthetic oligonucleotide
ggcaggcgaauuugugcag

SEQ ID NO: 723640 - RNA, 19 nt, Artificial Sequence
  Description of Artificial Sequence: Synthetic oligonucleotide
aggucgcacgccucagggu

SEQ ID NO: 723641 - RNA, 19 nt, Artificial Sequence
  Description of Artificial Sequence: Synthetic oligonucleotide
gggaguaaccugaagauuu

SEQ ID NO: 723642 - RNA, 19 nt, Artificial Sequence
  Description of Artificial Sequence: Synthetic oligonucleotide
ccucgcauacacuguugcc

SEQ ID NO: 723643 - RNA, 19 nt, Artificial Sequence
  Description of Artificial Sequence: Synthetic oligonucleotide
gccuacauuucgacggaag

SEQ ID NO: 723644 - RNA, 19 nt, Artificial Sequence
  Description of Artificial Sequence: Synthetic oligonucleotide
cccgauuaaagcuguggca

SEQ ID NO: 723645 - RNA, 19 nt, Artificial Sequence
  Description of Artificial Sequence: Synthetic oligonucleotide
cccugccuacauuucgacg

SEQ ID NO: 723646 - RNA, 19 nt, Artificial Sequence
  Description of Artificial Sequence: Synthetic oligonucleotide
ggaacacuucaggaucccc

SEQ ID NO: 723647 - RNA, 19 nt, Artificial Sequence
  Description of Artificial Sequence: Synthetic oligonucleotide
guaaagugcccaacuuucu

SEQ ID NO: 723648 - RNA, 19 nt, Artificial Sequence
  Description of Artificial Sequence: Synthetic oligonucleotide
ggcauaccauguauugcug

SEQ ID NO: 723649 - RNA, 19 nt, Artificial Sequence
  Description of Artificial Sequence: Synthetic oligonucleotide
cuuuggucacuggccugag

SEQ ID NO: 723650 - RNA, 19 nt, Artificial Sequence
  Description of Artificial Sequence: Synthetic oligonucleotide
cccguaaggcaaugccugg

SEQ ID NO: 723651 - RNA, 19 nt, Artificial Sequence
  Description of Artificial Sequence: Synthetic oligonucleotide
ccugauguuguaguauuca

SEQ ID NO: 723652 - RNA, 19 nt, Artificial Sequence
  Description of Artificial Sequence: Synthetic oligonucleotide
caccauuagugagcagcac

SEQ ID NO: 723653 - RNA, 19 nt, Artificial Sequence
  Description of Artificial Sequence: Synthetic oligonucleotide
ccauaauguauacauuacu

SEQ ID NO: 723654 - RNA, 19 nt, Artificial Sequence
  Description of Artificial Sequence: Synthetic oligonucleotide
ggauugcaugggauguacc

SEQ ID NO: 723655 - RNA, 19 nt, Artificial Sequence
  Description of Artificial Sequence: Synthetic oligonucleotide
agcuagcagagcacuggcu

SEQ ID NO: 723656 - RNA, 19 nt, Artificial Sequence
  Description of Artificial Sequence: Synthetic oligonucleotide
cugagacaaauggcuccac

SEQ ID NO: 723657 - RNA, 19 nt, Artificial Sequence
  Description of Artificial Sequence: Synthetic oligonucleotide
ucgaacccaccgggaaucu

SEQ ID NO: 723658 - RNA, 19 nt, Artificial Sequence
  Description of Artificial Sequence: Synthetic oligonucleotide
accggcacagggacacauc

SEQ ID NO: 723659 - RNA, 19 nt, Artificial Sequence
  Description of Artificial Sequence: Synthetic oligonucleotide
accauggaacgaaucucau

SEQ ID NO: 723660 - RNA, 19 nt, Artificial Sequence
  Description of Artificial Sequence: Synthetic oligonucleotide
ggcgaauuugugcaguuuu

SEQ ID NO: 723661 - RNA, 19 nt, Artificial Sequence
  Description of Artificial Sequence: Synthetic oligonucleotide
aaauagcggcagguacauu

SEQ ID NO: 723662 - RNA, 19 nt, Artificial Sequence
  Description of Artificial Sequence: Synthetic oligonucleotide
cgaaucucauguacagcug

SEQ ID NO: 723663 - RNA, 19 nt, Artificial Sequence
  Description of Artificial Sequence: Synthetic oligonucleotide
ccucuuagauggacuucag

SEQ ID NO: 723664 - RNA, 19 nt, Artificial Sequence
  Description of Artificial Sequence: Synthetic oligonucleotide
cucuuagauggacuucagu

SEQ ID NO: 723665 - RNA, 19 nt, Artificial Sequence
  Description of Artificial Sequence: Synthetic oligonucleotide
ugccuacauuucgacggaa

SEQ ID NO: 723666 - RNA, 19 nt, Artificial Sequence
  Description of Artificial Sequence: Synthetic oligonucleotide
gcuaaacuccuggugggga

SEQ ID NO: 723667 - RNA, 19 nt, Artificial Sequence
  Description of Artificial Sequence: Synthetic oligonucleotide
ggacaauguuugaaucuga

SEQ ID NO: 723668 - RNA, 19 nt, Artificial Sequence
  Description of Artificial Sequence: Synthetic oligonucleotide
gacagcccugagacauacc

SEQ ID NO: 723669 - RNA, 19 nt, Artificial Sequence
  Description of Artificial Sequence: Synthetic oligonucleotide
aggggccaaagcacucguc

SEQ ID NO: 723670 - RNA, 19 nt, Artificial Sequence
  Description of Artificial Sequence: Synthetic oligonucleotide
gguugacccagguguuuca

SEQ ID NO: 723671 - RNA, 19 nt, Artificial Sequence
  Description of Artificial Sequence: Synthetic oligonucleotide
gggauguaccugggugucg

SEQ ID NO: 723672 - RNA, 19 nt, Artificial Sequence
  Description of Artificial Sequence: Synthetic oligonucleotide
cucaagcacugguaaugua

SEQ ID NO: 723673 - RNA, 19 nt, Artificial Sequence
  Description of Artificial Sequence: Synthetic oligonucleotide
gcuagcuagcagagcacug

SEQ ID NO: 723674 - RNA, 19 nt, Artificial Sequence
  Description of Artificial Sequence: Synthetic oligonucleotide
caggcccguaaggcaaugc

SEQ ID NO: 723675 - RNA, 19 nt, Artificial Sequence
  Description of Artificial Sequence: Synthetic oligonucleotide
ggacagcccugagacauac

SEQ ID NO: 723676 - RNA, 19 nt, Artificial Sequence
  Description of Artificial Sequence: Synthetic oligonucleotide
cacggauugcaugggaugu

SEQ ID NO: 723677 - RNA, 19 nt, Artificial Sequence
  Description of Artificial Sequence: Synthetic oligonucleotide
ccgggaaucugcuggccug

SEQ ID NO: 723678 - RNA, 19 nt, Artificial Sequence
  Description of Artificial Sequence: Synthetic oligonucleotide
ucgcacgccucaggguuga

SEQ ID NO: 723679 - RNA, 19 nt, Artificial Sequence
  Description of Artificial Sequence: Synthetic oligonucleotide
uucauucaacugggagcau

SEQ ID NO: 723680 - RNA, 19 nt, Artificial Sequence
  Description of Artificial Sequence: Synthetic oligonucleotide
gcauacacuguugcccuca

SEQ ID NO: 723681 - RNA, 19 nt, Artificial Sequence
  Description of Artificial Sequence: Synthetic oligonucleotide
ccaccgggaaucugcuggc

SEQ ID NO: 723682 - RNA, 19 nt, Artificial Sequence
  Description of Artificial Sequence: Synthetic oligonucleotide
gucgcacgccucaggguug

SEQ ID NO: 723683 - RNA, 19 nt, Artificial Sequence
  Description of Artificial Sequence: Synthetic oligonucleotide
caccgggaaucugcuggcc

SEQ ID NO: 723684 - RNA, 19 nt, Artificial Sequence
  Description of Artificial Sequence: Synthetic oligonucleotide
gugguacaagugagggaca

SEQ ID NO: 723685 - RNA, 19 nt, Artificial Sequence
  Description of Artificial Sequence: Synthetic oligonucleotide
aggcgaauuugugcaguuu

SEQ ID NO: 723686 - RNA, 19 nt, Artificial Sequence
  Description of Artificial Sequence: Synthetic oligonucleotide
cccuucugagaccgguggc

SEQ ID NO: 723687 - RNA, 19 nt, Artificial Sequence
  Description of Artificial Sequence: Synthetic oligonucleotide
gguccccgguucccgcugg

SEQ ID NO: 723688 - RNA, 19 nt, Artificial Sequence
  Description of Artificial Sequence: Synthetic oligonucleotide
acggauugcaugggaugua

SEQ ID NO: 723689 - RNA, 19 nt, Artificial Sequence
  Description of Artificial Sequence: Synthetic oligonucleotide
ccgugaugcugaugcacac

SEQ ID NO: 723690 - RNA, 19 nt, Artificial Sequence
  Description of Artificial Sequence: Synthetic oligonucleotide
ccguaaggcaaugccuggc

SEQ ID NO: 723691 - RNA, 19 nt, Artificial Sequence
  Description of Artificial Sequence: Synthetic oligonucleotide
ggucgcacgccucaggguu

SEQ ID NO: 723692 - RNA, 19 nt, Artificial Sequence
  Description of Artificial Sequence: Synthetic oligonucleotide
ccuucugagaccgguggca

SEQ ID NO: 723693 - RNA, 19 nt, Artificial Sequence
  Description of Artificial Sequence: Synthetic oligonucleotide
gcagguaaccagugauugu

SEQ ID NO: 723694 - RNA, 19 nt, Artificial Sequence
  Description of Artificial Sequence: Synthetic oligonucleotide
acggacuggcucgcucugu

SEQ ID NO: 723695 - RNA, 19 nt, Artificial Sequence
  Description of Artificial Sequence: Synthetic oligonucleotide
cugagaccgguggcagcac

SEQ ID NO: 723696 - RNA, 19 nt, Artificial Sequence
  Description of Artificial Sequence: Synthetic oligonucleotide
cauuagugagcagcacccu

SEQ ID NO: 723697 - RNA, 19 nt, Artificial Sequence
  Description of Artificial Sequence: Synthetic oligonucleotide
ggacuggcucgcucuguga

SEQ ID NO: 723698 - RNA, 19 nt, Artificial Sequence
  Description of Artificial Sequence: Synthetic oligonucleotide
cucggauuccagccuggcu

SEQ ID NO: 723699 - RNA, 19 nt, Artificial Sequence
  Description of Artificial Sequence: Synthetic oligonucleotide
accugggugucggguacau

SEQ ID NO: 723700 - RNA, 19 nt, Artificial Sequence
  Description of Artificial Sequence: Synthetic oligonucleotide
cauuucgacggaagcuguu

SEQ ID NO: 723701 - RNA, 19 nt, Artificial Sequence
  Description of Artificial Sequence: Synthetic oligonucleotide
cuauagcgugggucucgaa

SEQ ID NO: 723702 - RNA, 19 nt, Artificial Sequence
  Description of Artificial Sequence: Synthetic oligonucleotide
cgcuaaacuccuggugggg

SEQ ID NO: 723703 - RNA, 19 nt, Artificial Sequence
  Description of Artificial Sequence: Synthetic oligonucleotide
gagaccgguggcagcacau

SEQ ID NO: 723704 - RNA, 19 nt, Artificial Sequence
  Description of Artificial Sequence: Synthetic oligonucleotide
guccccgguucccgcuggc

SEQ ID NO: 723705 - RNA, 19 nt, Artificial Sequence
  Description of Artificial Sequence: Synthetic oligonucleotide
acagucccgcugccucuua

SEQ ID NO: 723706 - RNA, 19 nt, Artificial Sequence
  Description of Artificial Sequence: Synthetic oligonucleotide
caccucaagcacugguaau

SEQ ID NO: 723707 - RNA, 19 nt, Artificial Sequence
  Description of Artificial Sequence: Synthetic oligonucleotide
ggcccguaaggcaaugccu

SEQ ID NO: 723708 - RNA, 19 nt, Artificial Sequence
  Description of Artificial Sequence: Synthetic oligonucleotide
caggcgaauuugugcaguu

SEQ ID NO: 723709 - RNA, 19 nt, Artificial Sequence
  Description of Artificial Sequence: Synthetic oligonucleotide
ggaaggcaaccaucuguau

SEQ ID NO: 723710 - RNA, 19 nt, Artificial Sequence
  Description of Artificial Sequence: Synthetic oligonucleotide
ggcgcagguagcacaccuc

SEQ ID NO: 723711 - RNA, 19 nt, Artificial Sequence
  Description of Artificial Sequence: Synthetic oligonucleotide
ggaguaaccugaagauuuu

SEQ ID NO: 723712 - RNA, 19 nt, Artificial Sequence
  Description of Artificial Sequence: Synthetic oligonucleotide
ggggacugccuggugaccu

SEQ ID NO: 723713 - RNA, 19 nt, Artificial Sequence
  Description of Artificial Sequence: Synthetic oligonucleotide
gcaggcgaauuugugcagu

SEQ ID NO: 723714 - RNA, 19 nt, Artificial Sequence
  Description of Artificial Sequence: Synthetic oligonucleotide
ccguuucgcucccucuuga

SEQ ID NO: 723715 - RNA, 19 nt, Artificial Sequence
  Description of Artificial Sequence: Synthetic oligonucleotide
ccucaagcacugguaaugu

SEQ ID NO: 723716 - RNA, 19 nt, Artificial Sequence
  Description of Artificial Sequence: Synthetic oligonucleotide
ccaguacccaggcccguaa

SEQ ID NO: 723717 - RNA, 19 nt, Artificial Sequence
  Description of Artificial Sequence: Synthetic oligonucleotide
gcacaccgugaugcugaug

SEQ ID NO: 723718 - RNA, 19 nt, Artificial Sequence
  Description of Artificial Sequence: Synthetic oligonucleotide
ccaggcccguaaggcaaug

SEQ ID NO: 723719 - RNA, 19 nt, Artificial Sequence
  Description of Artificial Sequence: Synthetic oligonucleotide
ccucgggacuggucaguaa

SEQ ID NO: 723720 - RNA, 19 nt, Artificial Sequence
  Description of Artificial Sequence: Synthetic oligonucleotide
caccucgggacuggucagu

SEQ ID NO: 723721 - RNA, 19 nt, Artificial Sequence
  Description of Artificial Sequence: Synthetic oligonucleotide
cggguacaucugcggggcc

SEQ ID NO: 723722 - RNA, 19 nt, Artificial Sequence
  Description of Artificial Sequence: Synthetic oligonucleotide
ccgugacaggguccccggu

SEQ ID NO: 723723 - RNA, 19 nt, Artificial Sequence
  Description of Artificial Sequence: Synthetic oligonucleotide
cgcacgccucaggguugac

SEQ ID NO: 723724 - RNA, 19 nt, Artificial Sequence
  Description of Artificial Sequence: Synthetic oligonucleotide
aaucgggcauacuugaucc

SEQ ID NO: 723725 - RNA, 19 nt, Artificial Sequence
  Description of Artificial Sequence: Synthetic oligonucleotide
aaacuauuaauccauaaaa

SEQ ID NO: 723726 - RNA, 19 nt, Artificial Sequence
  Description of Artificial Sequence: Synthetic oligonucleotide
uuugaaauucuaucuaggg

SEQ ID NO: 723727 - RNA, 19 nt, Artificial Sequence
  Description of Artificial Sequence: Synthetic oligonucleotide
cauauuuguagauaacucg

SEQ ID NO: 723728 - RNA, 19 nt, Artificial Sequence
  Description of Artificial Sequence: Synthetic oligonucleotide
ugagguacaauuuucaggu

SEQ ID NO: 723729 - RNA, 19 nt, Artificial Sequence
  Description of Artificial Sequence: Synthetic oligonucleotide
uauaugauuuccaaaguac

SEQ ID NO: 723730 - RNA, 19 nt, Artificial Sequence
  Description of Artificial Sequence: Synthetic oligonucleotide
auagucuacaucuaaagca

SEQ ID NO: 723731 - RNA, 19 nt, Artificial Sequence
  Description of Artificial Sequence: Synthetic oligonucleotide
ucuuauguuaucuucaaaa

SEQ ID NO: 723732 - RNA, 19 nt, Artificial Sequence
  Description of Artificial Sequence: Synthetic oligonucleotide
ucuaucgauaucaccaagg

SEQ ID NO: 723733 - RNA, 19 nt, Artificial Sequence
  Description of Artificial Sequence: Synthetic oligonucleotide
aaaacugauccauaccuug

SEQ ID NO: 723734 - RNA, 19 nt, Artificial Sequence
  Description of Artificial Sequence: Synthetic oligonucleotide
auggcuaauucauagauug

SEQ ID NO: 723735 - RNA, 19 nt, Artificial Sequence
  Description of Artificial Sequence: Synthetic oligonucleotide
uuguagauaacucguaccc

SEQ ID NO: 723736 - RNA, 19 nt, Artificial Sequence
  Description of Artificial Sequence: Synthetic oligonucleotide
uguaguuccaguucgauau

SEQ ID NO: 723737 - RNA, 19 nt, Artificial Sequence
  Description of Artificial Sequence: Synthetic oligonucleotide
auuuguagauaacucguac

SEQ ID NO: 723738 - RNA, 19 nt, Artificial Sequence
  Description of Artificial Sequence: Synthetic oligonucleotide
aguuguuauggcucggucc

SEQ ID NO: 723739 - RNA, 19 nt, Artificial Sequence
  Description of Artificial Sequence: Synthetic oligonucleotide
ucgaaguugauauaggagu

SEQ ID NO: 723740 - RNA, 19 nt, Artificial Sequence
  Description of Artificial Sequence: Synthetic oligonucleotide
ucucaaaaucaauauauga

SEQ ID NO: 723741 - RNA, 19 nt, Artificial Sequence
  Description of Artificial Sequence: Synthetic oligonucleotide
aaaucgggcauacuugauc

SEQ ID NO: 723742 - RNA, 19 nt, Artificial Sequence
  Description of Artificial Sequence: Synthetic oligonucleotide
aauggugcgggcccgcucc

SEQ ID NO: 723743 - RNA, 19 nt, Artificial Sequence
  Description of Artificial Sequence: Synthetic oligonucleotide
aaguugauauaggagugcc

SEQ ID NO: 723744 - RNA, 19 nt, Artificial Sequence
  Description of Artificial Sequence: Synthetic oligonucleotide
auguacguguauuuguacc

SEQ ID NO: 723745 - RNA, 19 nt, Artificial Sequence
  Description of Artificial Sequence: Synthetic oligonucleotide
ucuggcauaucuaagcgug

SEQ ID NO: 723746 - RNA, 19 nt, Artificial Sequence
  Description of Artificial Sequence: Synthetic oligonucleotide
uaaacuauuaauccauaaa

SEQ ID NO: 723747 - RNA, 19 nt, Artificial Sequence
  Description of Artificial Sequence: Synthetic oligonucleotide
aaacauucagaagucaaag

SEQ ID NO: 723748 - RNA, 19 nt, Artificial Sequence
  Description of Artificial Sequence: Synthetic oligonucleotide
cuaauucauagauugcccg

SEQ ID NO: 723749 - RNA, 19 nt, Artificial Sequence
  Description of Artificial Sequence: Synthetic oligonucleotide
gauauuucgggcaugguug

SEQ ID NO: 723750 - RNA, 19 nt, Artificial Sequence
  Description of Artificial Sequence: Synthetic oligonucleotide
ucugucguauuucaaacug

SEQ ID NO: 723751 - RNA, 19 nt, Artificial Sequence
  Description of Artificial Sequence: Synthetic oligonucleotide
uuuucguagcuuguaaucg

SEQ ID NO: 723752 - RNA, 19 nt, Artificial Sequence
  Description of Artificial Sequence: Synthetic oligonucleotide
uuugaauuuccuuuagacu

SEQ ID NO: 723753 - RNA, 19 nt, Artificial Sequence
  Description of Artificial Sequence: Synthetic oligonucleotide
uuuguagauaacucguacc

SEQ ID NO: 723754 - RNA, 19 nt, Artificial Sequence
  Description of Artificial Sequence: Synthetic oligonucleotide
aaauucucgaagcuguagu

SEQ ID NO: 723755 - RNA, 19 nt, Artificial Sequence
  Description of Artificial Sequence: Synthetic oligonucleotide
cuucauacuggaaucuucg

SEQ ID NO: 723756 - RNA, 19 nt, Artificial Sequence
  Description of Artificial Sequence: Synthetic oligonucleotide
aucauaguauucuucccac

SEQ ID NO: 723757 - RNA, 19 nt, Artificial Sequence
  Description of Artificial Sequence: Synthetic oligonucleotide
ugauagaccugucuugucc

SEQ ID NO: 723758 - RNA, 19 nt, Artificial Sequence
  Description of Artificial Sequence: Synthetic oligonucleotide
ucuaucuagggcauauuug

SEQ ID NO: 723759 - RNA, 19 nt, Artificial Sequence
  Description of Artificial Sequence: Synthetic oligonucleotide
auaacuuguucuuuggaca

SEQ ID NO: 723760 - RNA, 19 nt, Artificial Sequence
  Description of Artificial Sequence: Synthetic oligonucleotide
uucgauauagccuuugaau

SEQ ID NO: 723761 - RNA, 19 nt, Artificial Sequence
  Description of Artificial Sequence: Synthetic oligonucleotide
uauggaaguccccaaagcu

SEQ ID NO: 723762 - RNA, 19 nt, Artificial Sequence
  Description of Artificial Sequence: Synthetic oligonucleotide
ugcauuuagccacacuucc

SEQ ID NO: 723763 - RNA, 19 nt, Artificial Sequence
  Description of Artificial Sequence: Synthetic oligonucleotide
ucaaucucaaaaucaauau

SEQ ID NO: 723764 - RNA, 19 nt, Artificial Sequence
  Description of Artificial Sequence: Synthetic oligonucleotide
cauaguauucuucccaccc

SEQ ID NO: 723765 - RNA, 19 nt, Artificial Sequence
  Description of Artificial Sequence: Synthetic oligonucleotide
cuugcaugggcaaaguaag

SEQ ID NO: 723766 - RNA, 19 nt, Artificial Sequence
  Description of Artificial Sequence: Synthetic oligonucleotide
aaucaaaccaugcaucgua

SEQ ID NO: 723767 - RNA, 19 nt, Artificial Sequence
  Description of Artificial Sequence: Synthetic oligonucleotide
uccgacaucugucaaauuc

SEQ ID NO: 723768 - RNA, 19 nt, Artificial Sequence
  Description of Artificial Sequence: Synthetic oligonucleotide
ugucguauuucaaacugug

SEQ ID NO: 723769 - RNA, 19 nt, Artificial Sequence
  Description of Artificial Sequence: Synthetic oligonucleotide
aagcgcagguaaucaaacc

SEQ ID NO: 723770 - RNA, 19 nt, Artificial Sequence
  Description of Artificial Sequence: Synthetic oligonucleotide
guagacuuuccuugcaugg

SEQ ID NO: 723771 - RNA, 19 nt, Artificial Sequence
  Description of Artificial Sequence: Synthetic oligonucleotide
ucgauaucaccaaggauug

SEQ ID NO: 723772 - RNA, 19 nt, Artificial Sequence
  Description of Artificial Sequence: Synthetic oligonucleotide
guuguuauggcucgguccc

SEQ ID NO: 723773 - RNA, 19 nt, Artificial Sequence
  Description of Artificial Sequence: Synthetic oligonucleotide
ucucauaaagcuuccgaca

SEQ ID NO: 723774 - RNA, 19 nt, Artificial Sequence
  Description of Artificial Sequence: Synthetic oligonucleotide
uaauauuccgauagucuac

SEQ ID NO: 723775 - RNA, 19 nt, Artificial Sequence
  Description of Artificial Sequence: Synthetic oligonucleotide
uuguaucucagcucgaagu

SEQ ID NO: 723776 - RNA, 19 nt, Artificial Sequence
  Description of Artificial Sequence: Synthetic oligonucleotide
uugagguuaggcugguugg

SEQ ID NO: 723777 - RNA, 19 nt, Artificial Sequence
  Description of Artificial Sequence: Synthetic oligonucleotide
uuagcaaaggccacauaca

SEQ ID NO: 723778 - RNA, 19 nt, Artificial Sequence
  Description of Artificial Sequence: Synthetic oligonucleotide
aucuagggcauauuuguag

SEQ ID NO: 723779 - RNA, 19 nt, Artificial Sequence
  Description of Artificial Sequence: Synthetic oligonucleotide
uguggauuagccuucacuu

SEQ ID NO: 723780 - RNA, 19 nt, Artificial Sequence
  Description of Artificial Sequence: Synthetic oligonucleotide
ugauggcuaauucauagau

SEQ ID NO: 723781 - RNA, 19 nt, Artificial Sequence
  Description of Artificial Sequence: Synthetic oligonucleotide
auucauagauugcccgugc

SEQ ID NO: 723782 - RNA, 19 nt, Artificial Sequence
  Description of Artificial Sequence: Synthetic oligonucleotide
ucaauauaugauuuccaaa

SEQ ID NO: 723783 - RNA, 19 nt, Artificial Sequence
  Description of Artificial Sequence: Synthetic oligonucleotide
ucgauauagccuuugaaua

SEQ ID NO: 723784 - RNA, 19 nt, Artificial Sequence
  Description of Artificial Sequence: Synthetic oligonucleotide
ucuucaauaccccuccggu

SEQ ID NO: 723785 - RNA, 19 nt, Artificial Sequence
  Description of Artificial Sequence: Synthetic oligonucleotide
ugaggauaacucaaacuga

SEQ ID NO: 723786 - RNA, 19 nt, Artificial Sequence
  Description of Artificial Sequence: Synthetic oligonucleotide
aagauuucguguucuuuca

SEQ ID NO: 723787 - RNA, 19 nt, Artificial Sequence
  Description of Artificial Sequence: Synthetic oligonucleotide
aacucguacccuuucaaau

SEQ ID NO: 723788 - RNA, 19 nt, Artificial Sequence
  Description of Artificial Sequence: Synthetic oligonucleotide
aguuacuaaucacaguccu

SEQ ID NO: 723789 - RNA, 19 nt, Artificial Sequence
  Description of Artificial Sequence: Synthetic oligonucleotide
aucgauaucaccaaggauu

SEQ ID NO: 723790 - RNA, 19 nt, Artificial Sequence
  Description of Artificial Sequence: Synthetic oligonucleotide
aucaauauaugauuuccaa

SEQ ID NO: 723791 - RNA, 19 nt, Artificial Sequence
  Description of Artificial Sequence: Synthetic oligonucleotide
gaggauaacucaaacugag

SEQ ID NO: 723792 - RNA, 19 nt, Artificial Sequence
  Description of Artificial Sequence: Synthetic oligonucleotide
uaguauucuucccacccag

SEQ ID NO: 723793 - RNA, 19 nt, Artificial Sequence
  Description of Artificial Sequence: Synthetic oligonucleotide
ucugauacgguuccaaauu

SEQ ID NO: 723794 - RNA, 19 nt, Artificial Sequence
  Description of Artificial Sequence: Synthetic oligonucleotide
ucaaaucgggcauacuuga

SEQ ID NO: 723795 - RNA, 19 nt, Artificial Sequence
  Description of Artificial Sequence: Synthetic oligonucleotide
uuuguaucucagcucgaag

SEQ ID NO: 723796 - RNA, 19 nt, Artificial Sequence
  Description of Artificial Sequence: Synthetic oligonucleotide
cauaucuaagcguggcugg

SEQ ID NO: 723797 - RNA, 19 nt, Artificial Sequence
  Description of Artificial Sequence: Synthetic oligonucleotide
guaauuguguggauuagcc

SEQ ID NO: 723798 - RNA, 19 nt, Artificial Sequence
  Description of Artificial Sequence: Synthetic oligonucleotide
aauauuccgauagucuaca

SEQ ID NO: 723799 - RNA, 19 nt, Artificial Sequence
  Description of Artificial Sequence: Synthetic oligonucleotide
cucguauauggaucgagcc

SEQ ID NO: 723800 - RNA, 19 nt, Artificial Sequence
  Description of Artificial Sequence: Synthetic oligonucleotide
uaaucauaguauucuuccc

SEQ ID NO: 723801 - RNA, 19 nt, Artificial Sequence
  Description of Artificial Sequence: Synthetic oligonucleotide
cucgaaguugauauaggag

SEQ ID NO: 723802 - RNA, 19 nt, Artificial Sequence
  Description of Artificial Sequence: Synthetic oligonucleotide
aaaaccucgccaggauucc

SEQ ID NO: 723803 - RNA, 19 nt, Artificial Sequence
  Description of Artificial Sequence: Synthetic oligonucleotide
uaucucagcucgaaguuga

SEQ ID NO: 723804 - RNA, 19 nt, Artificial Sequence
  Description of Artificial Sequence: Synthetic oligonucleotide
ucugcaaacuugauccaug

SEQ ID NO: 723805 - RNA, 19 nt, Artificial Sequence
  Description of Artificial Sequence: Synthetic oligonucleotide
ugcucaaucucaaaaucaa

SEQ ID NO: 723806 - RNA, 19 nt, Artificial Sequence
  Description of Artificial Sequence: Synthetic oligonucleotide
gaagucaaaguucuaaacu

SEQ ID NO: 723807 - RNA, 19 nt, Artificial Sequence
  Description of Artificial Sequence: Synthetic oligonucleotide
uuaguuccaaagacgcuug

SEQ ID NO: 723808 - RNA, 19 nt, Artificial Sequence
  Description of Artificial Sequence: Synthetic oligonucleotide
ucuagggcauauuuguaga

SEQ ID NO: 723809 - RNA, 19 nt, Artificial Sequence
  Description of Artificial Sequence: Synthetic oligonucleotide
uuacuaaucacaguccuau

SEQ ID NO: 723810 - RNA, 19 nt, Artificial Sequence
  Description of Artificial Sequence: Synthetic oligonucleotide
auugucgguaaagauuucg

SEQ ID NO: 723811 - RNA, 19 nt, Artificial Sequence
  Description of Artificial Sequence: Synthetic oligonucleotide
uauggaucgagcccuuuga

SEQ ID NO: 723812 - RNA, 19 nt, Artificial Sequence
  Description of Artificial Sequence: Synthetic oligonucleotide
aacugguugacucguggca

SEQ ID NO: 723813 - RNA, 19 nt, Artificial Sequence
  Description of Artificial Sequence: Synthetic oligonucleotide
caugcaucguaauugugug

SEQ ID NO: 723814 - RNA, 19 nt, Artificial Sequence
  Description of Artificial Sequence: Synthetic oligonucleotide
aaucaauauaugauuucca

SEQ ID NO: 723815 - RNA, 19 nt, Artificial Sequence
  Description of Artificial Sequence: Synthetic oligonucleotide
uuauccaguuacuaaucac

SEQ ID NO: 723816 - RNA, 19 nt, Artificial Sequence
  Description of Artificial Sequence: Synthetic oligonucleotide
auagagugcauaguugauc

SEQ ID NO: 723817 - RNA, 19 nt, Artificial Sequence
  Description of Artificial Sequence: Synthetic oligonucleotide
cauaccuugacaugcugug

SEQ ID NO: 723818 - RNA, 19 nt, Artificial Sequence
  Description of Artificial Sequence: Synthetic oligonucleotide
cucggucccagauauuucg

SEQ ID NO: 723819 - RNA, 19 nt, Artificial Sequence
  Description of Artificial Sequence: Synthetic oligonucleotide
auauuuguagauaacucgu

SEQ ID NO: 723820 - RNA, 19 nt, Artificial Sequence
  Description of Artificial Sequence: Synthetic oligonucleotide
acgaagcguucauaaaugg

SEQ ID NO: 723821 - RNA, 19 nt, Artificial Sequence
  Description of Artificial Sequence: Synthetic oligonucleotide
aaguaccucuggcauaucu

SEQ ID NO: 723822 - RNA, 19 nt, Artificial Sequence
  Description of Artificial Sequence: Synthetic oligonucleotide
agcgcagguaaucaaacca

SEQ ID NO: 723823 - RNA, 19 nt, Artificial Sequence
  Description of Artificial Sequence: Synthetic oligonucleotide
agguaaucaaaccaugcau

SEQ ID NO: 723824 - RNA, 19 nt, Artificial Sequence
  Description of Artificial Sequence: Synthetic oligonucleotide
ugucgguaaagauuucgug

SEQ ID NO: 723825 - RNA, 19 nt, Artificial Sequence
  Description of Artificial Sequence: Synthetic oligonucleotide
uugauauaggagugccagg

SEQ ID NO: 723826 - RNA, 19 nt, Artificial Sequence
  Description of Artificial Sequence: Synthetic oligonucleotide
uuaucuggauccuguucgg

SEQ ID NO: 723827 - RNA, 19 nt, Artificial Sequence
  Description of Artificial Sequence: Synthetic oligonucleotide
auauaggagugccaggccu

SEQ ID NO: 723828 - RNA, 19 nt, Artificial Sequence
  Description of Artificial Sequence: Synthetic oligonucleotide
ugauacgguuccaaauuca

SEQ ID NO: 723829 - RNA, 19 nt, Artificial Sequence
  Description of Artificial Sequence: Synthetic oligonucleotide
uauuccgauagucuacauc

SEQ ID NO: 723830 - RNA, 19 nt, Artificial Sequence
  Description of Artificial Sequence: Synthetic oligonucleotide
acuaaucacaguccuauuu

SEQ ID NO: 723831 - RNA, 19 nt, Artificial Sequence
  Description of Artificial Sequence: Synthetic oligonucleotide
uauaggagugccaggccug

SEQ ID NO: 723832 - RNA, 19 nt, Artificial Sequence
  Description of Artificial Sequence: Synthetic oligonucleotide
ucgggcaugguugacuugg

SEQ ID NO: 723833 - RNA, 19 nt, Artificial Sequence
  Description of Artificial Sequence: Synthetic oligonucleotide
uacuugauccaguucuuca

SEQ ID NO: 723834 - RNA, 19 nt, Artificial Sequence
  Description of Artificial Sequence: Synthetic oligonucleotide
ucuucauacuggaaucuuc

SEQ ID NO: 723835 - RNA, 19 nt, Artificial Sequence
  Description of Artificial Sequence: Synthetic oligonucleotide
agcaacauaagucucucuu

SEQ ID NO: 723836 - RNA, 19 nt, Artificial Sequence
  Description of Artificial Sequence: Synthetic oligonucleotide
ucaucguuuuauuugccuc

SEQ ID NO: 723837 - RNA, 19 nt, Artificial Sequence
  Description of Artificial Sequence: Synthetic oligonucleotide
uuggcgguucuucauuucc

SEQ ID NO: 723838 - RNA, 19 nt, Artificial Sequence
  Description of Artificial Sequence: Synthetic oligonucleotide
agacuucccgcacaguguc

SEQ ID NO: 723839 - RNA, 19 nt, Artificial Sequence
  Description of Artificial Sequence: Synthetic oligonucleotide
agauauuucgggcaugguu

SEQ ID NO: 723840 - RNA, 19 nt, Artificial Sequence
  Description of Artificial Sequence: Synthetic oligonucleotide
guagcuuguaaucguuuag

SEQ ID NO: 723841 - RNA, 19 nt, Artificial Sequence
  Description of Artificial Sequence: Synthetic oligonucleotide
cuauggaaguccccaaagc

SEQ ID NO: 723842 - RNA, 19 nt, Artificial Sequence
  Description of Artificial Sequence: Synthetic oligonucleotide
uguaucucagcucgaaguu

SEQ ID NO: 723843 - RNA, 19 nt, Artificial Sequence
  Description of Artificial Sequence: Synthetic oligonucleotide
cacgcucguauauggaucg

SEQ ID NO: 723844 - RNA, 19 nt, Artificial Sequence
  Description of Artificial Sequence: Synthetic oligonucleotide
ugauccauaccuugacaug

SEQ ID NO: 723845 - RNA, 19 nt, Artificial Sequence
  Description of Artificial Sequence: Synthetic oligonucleotide
uauuuguagauaacucgua

SEQ ID NO: 723846 - RNA, 19 nt, Artificial Sequence
  Description of Artificial Sequence: Synthetic oligonucleotide
uuggacauuugccuaugga

SEQ ID NO: 723847 - RNA, 19 nt, Artificial Sequence
  Description of Artificial Sequence: Synthetic oligonucleotide
uaauuguguggauuagccu

SEQ ID NO: 723848 - RNA, 19 nt, Artificial Sequence
  Description of Artificial Sequence: Synthetic oligonucleotide
caaauuuagcaaaggccac

SEQ ID NO: 723849 - RNA, 19 nt, Artificial Sequence
  Description of Artificial Sequence: Synthetic oligonucleotide
auuaguuccaaagacgcuu

SEQ ID NO: 723850 - RNA, 19 nt, Artificial Sequence
  Description of Artificial Sequence: Synthetic oligonucleotide
gauugcccgugcucuaucg

SEQ ID NO: 723851 - RNA, 19 nt, Artificial Sequence
  Description of Artificial Sequence: Synthetic oligonucleotide
caguuacuaaucacagucc

SEQ ID NO: 723852 - RNA, 19 nt, Artificial Sequence
  Description of Artificial Sequence: Synthetic oligonucleotide
uugucgguaaagauuucgu

SEQ ID NO: 723853 - RNA, 19 nt, Artificial Sequence
  Description of Artificial Sequence: Synthetic oligonucleotide
aguaagcaugcuucucuuc

SEQ ID NO: 723854 - RNA, 19 nt, Artificial Sequence
  Description of Artificial Sequence: Synthetic oligonucleotide
gcugauggcuaauucauag

SEQ ID NO: 723855 - RNA, 19 nt, Artificial Sequence
  Description of Artificial Sequence: Synthetic oligonucleotide
guaagcaugcuucucuuca

SEQ ID NO: 723856 - RNA, 19 nt, Artificial Sequence
  Description of Artificial Sequence: Synthetic oligonucleotide
ggauuaguuccaaagacgc

SEQ ID NO: 723857 - RNA, 19 nt, Artificial Sequence
  Description of Artificial Sequence: Synthetic oligonucleotide
uuucguagcuuguaaucgu

SEQ ID NO: 723858 - RNA, 19 nt, Artificial Sequence
  Description of Artificial Sequence: Synthetic oligonucleotide
ugcaugggcaaaguaagca

SEQ ID NO: 723859 - RNA, 19 nt, Artificial Sequence
  Description of Artificial Sequence: Synthetic oligonucleotide
ucuaaacuauuaauccaua

SEQ ID NO: 723860 - RNA, 19 nt, Artificial Sequence
  Description of Artificial Sequence: Synthetic oligonucleotide
cacgaagcguucauaaaug

SEQ ID NO: 723861 - RNA, 19 nt, Artificial Sequence
  Description of Artificial Sequence: Synthetic oligonucleotide
uaacuuguucuuuggacau

SEQ ID NO: 723862 - RNA, 19 nt, Artificial Sequence
  Description of Artificial Sequence: Synthetic oligonucleotide
auaucuaagcguggcuggc

SEQ ID NO: 723863 - RNA, 19 nt, Artificial Sequence
  Description of Artificial Sequence: Synthetic oligonucleotide
ucauaguauucuucccacc

SEQ ID NO: 723864 - RNA, 19 nt, Artificial Sequence
  Description of Artificial Sequence: Synthetic oligonucleotide
ucgguaaagauuucguguu

SEQ ID NO: 723865 - RNA, 19 nt, Artificial Sequence
  Description of Artificial Sequence: Synthetic oligonucleotide
ggcaugguugacuuggcgg

SEQ ID NO: 723866 - RNA, 19 nt, Artificial Sequence
  Description of Artificial Sequence: Synthetic oligonucleotide
aguguaauauuccgauagu

SEQ ID NO: 723867 - RNA, 19 nt, Artificial Sequence
  Description of Artificial Sequence: Synthetic oligonucleotide
cucaacugcucucucguag

SEQ ID NO: 723868 - RNA, 19 nt, Artificial Sequence
  Description of Artificial Sequence: Synthetic oligonucleotide
ucaacugcucucucguaga

SEQ ID NO: 723869 - RNA, 19 nt, Artificial Sequence
  Description of Artificial Sequence: Synthetic oligonucleotide
ugugcguauuuuauccagu

SEQ ID NO: 723870 - RNA, 19 nt, Artificial Sequence
  Description of Artificial Sequence: Synthetic oligonucleotide
uaccagaacugguugacuc

SEQ ID NO: 723871 - RNA, 19 nt, Artificial Sequence
  Description of Artificial Sequence: Synthetic oligonucleotide
auauggaucgagcccuuug

SEQ ID NO: 723872 - RNA, 19 nt, Artificial Sequence
  Description of Artificial Sequence: Synthetic oligonucleotide
auaguauucuucccaccca

SEQ ID NO: 723873 - RNA, 19 nt, Artificial Sequence
  Description of Artificial Sequence: Synthetic oligonucleotide
gauaacucguacccuuuca

SEQ ID NO: 723874 - RNA, 19 nt, Artificial Sequence
  Description of Artificial Sequence: Synthetic oligonucleotide
acauaagucucucuucuuu

SEQ ID NO: 723875 - RNA, 19 nt, Artificial Sequence
  Description of Artificial Sequence: Synthetic oligonucleotide
uaucgauaucaccaaggau

SEQ ID NO: 723876 - RNA, 19 nt, Artificial Sequence
  Description of Artificial Sequence: Synthetic oligonucleotide
auuugccuauggaaguccc

SEQ ID NO: 723877 - RNA, 19 nt, Artificial Sequence
  Description of Artificial Sequence: Synthetic oligonucleotide
aggauaacucaaacugagc

SEQ ID NO: 723878 - RNA, 19 nt, Artificial Sequence
  Description of Artificial Sequence: Synthetic oligonucleotide
uuugccuauggaagucccc

SEQ ID NO: 723879 - RNA, 19 nt, Artificial Sequence
  Description of Artificial Sequence: Synthetic oligonucleotide
uucugucguauuucaaacu

SEQ ID NO: 723880 - RNA, 19 nt, Artificial Sequence
  Description of Artificial Sequence: Synthetic oligonucleotide
aaauggugcgggcccgcuc

SEQ ID NO: 723881 - RNA, 19 nt, Artificial Sequence
  Description of Artificial Sequence: Synthetic oligonucleotide
agauuucguguucuuucag

SEQ ID NO: 723882 - RNA, 19 nt, Artificial Sequence
  Description of Artificial Sequence: Synthetic oligonucleotide
cauccagcgcucaaacacc

SEQ ID NO: 723883 - RNA, 19 nt, Artificial Sequence
  Description of Artificial Sequence: Synthetic oligonucleotide
gggauuaguuccaaagacg

SEQ ID NO: 723884 - RNA, 19 nt, Artificial Sequence
  Description of Artificial Sequence: Synthetic oligonucleotide
auugugcguauuuuaucca

SEQ ID NO: 723885 - RNA, 19 nt, Artificial Sequence
  Description of Artificial Sequence: Synthetic oligonucleotide
uggcuaauucauagauugc

SEQ ID NO: 723886 - RNA, 19 nt, Artificial Sequence
  Description of Artificial Sequence: Synthetic oligonucleotide
acaucuaaagcacgcucgu

SEQ ID NO: 723887 - RNA, 19 nt, Artificial Sequence
  Description of Artificial Sequence: Synthetic oligonucleotide
uguagauaacucguacccu

SEQ ID NO: 723888 - RNA, 19 nt, Artificial Sequence
  Description of Artificial Sequence: Synthetic oligonucleotide
uguaccagaacugguugac

SEQ ID NO: 723889 - RNA, 19 nt, Artificial Sequence
  Description of Artificial Sequence: Synthetic oligonucleotide
uauagccuuugaauaacuu

SEQ ID NO: 723890 - RNA, 19 nt, Artificial Sequence
  Description of Artificial Sequence: Synthetic oligonucleotide
aguuccaguucgauauagc

SEQ ID NO: 723891 - RNA, 19 nt, Artificial Sequence
  Description of Artificial Sequence: Synthetic oligonucleotide
aaguaagcaugcuucucuu

SEQ ID NO: 723892 - RNA, 19 nt, Artificial Sequence
  Description of Artificial Sequence: Synthetic oligonucleotide
augcaucguaauugugugg

SEQ ID NO: 723893 - RNA, 19 nt, Artificial Sequence
  Description of Artificial Sequence: Synthetic oligonucleotide
cuaucgauaucaccaagga

SEQ ID NO: 723894 - RNA, 19 nt, Artificial Sequence
  Description of Artificial Sequence: Synthetic oligonucleotide
uauucuucccacccagcau

SEQ ID NO: 723895 - RNA, 19 nt, Artificial Sequence
  Description of Artificial Sequence: Synthetic oligonucleotide
caagcgcagguaaucaaac

SEQ ID NO: 723896 - RNA, 19 nt, Artificial Sequence
  Description of Artificial Sequence: Synthetic oligonucleotide
cauguacguguauuuguac

SEQ ID NO: 723897 - RNA, 19 nt, Artificial Sequence
  Description of Artificial Sequence: Synthetic oligonucleotide
agccagaguguaauauucc

SEQ ID NO: 723898 - RNA, 19 nt, Artificial Sequence
  Description of Artificial Sequence: Synthetic oligonucleotide
ugacucguggcagaguugu

SEQ ID NO: 723899 - RNA, 19 nt, Artificial Sequence
  Description of Artificial Sequence: Synthetic oligonucleotide
uagcuuguaaucguuuagu

SEQ ID NO: 723900 - RNA, 19 nt, Artificial Sequence
  Description of Artificial Sequence: Synthetic oligonucleotide
auuucagccagaguguaau

SEQ ID NO: 723901 - RNA, 19 nt, Artificial Sequence
  Description of Artificial Sequence: Synthetic oligonucleotide
uugcccaacaucuccucca

SEQ ID NO: 723902 - RNA, 19 nt, Artificial Sequence
  Description of Artificial Sequence: Synthetic oligonucleotide
accuugacaugcuguguuc

SEQ ID NO: 723903 - RNA, 19 nt, Artificial Sequence
  Description of Artificial Sequence: Synthetic oligonucleotide
ugaagcaauugucgguaaa

SEQ ID NO: 723904 - RNA, 19 nt, Artificial Sequence
  Description of Artificial Sequence: Synthetic oligonucleotide
uagauguagcgcuuccagu

SEQ ID NO: 723905 - RNA, 19 nt, Artificial Sequence
  Description of Artificial Sequence: Synthetic oligonucleotide
aguauucuucccacccagc

SEQ ID NO: 723906 - RNA, 19 nt, Artificial Sequence
  Description of Artificial Sequence: Synthetic oligonucleotide
uaacucguacccuuucaaa

SEQ ID NO: 723907 - RNA, 19 nt, Artificial Sequence
  Description of Artificial Sequence: Synthetic oligonucleotide
uugcaugggcaaaguaagc

SEQ ID NO: 723908 - RNA, 19 nt, Artificial Sequence
  Description of Artificial Sequence: Synthetic oligonucleotide
aguucgauauagccuuuga

SEQ ID NO: 723909 - RNA, 19 nt, Artificial Sequence
  Description of Artificial Sequence: Synthetic oligonucleotide
uaccuugacaugcuguguu

SEQ ID NO: 723910 - RNA, 19 nt, Artificial Sequence
  Description of Artificial Sequence: Synthetic oligonucleotide
uaccucuggcauaucuaag

SEQ ID NO: 723911 - RNA, 19 nt, Artificial Sequence
  Description of Artificial Sequence: Synthetic oligonucleotide
uccuugucugauacgguuc

SEQ ID NO: 723912 - RNA, 19 nt, Artificial Sequence
  Description of Artificial Sequence: Synthetic oligonucleotide
uugccuauggaagucccca

SEQ ID NO: 723913 - RNA, 19 nt, Artificial Sequence
  Description of Artificial Sequence: Synthetic oligonucleotide
cucguacccuuucaaauuc

SEQ ID NO: 723914 - RNA, 19 nt, Artificial Sequence
  Description of Artificial Sequence: Synthetic oligonucleotide
aucuaagcguggcuggcug

SEQ ID NO: 723915 - RNA, 19 nt, Artificial Sequence
  Description of Artificial Sequence: Synthetic oligonucleotide
acugugcauaauauaacca

SEQ ID NO: 723916 - RNA, 19 nt, Artificial Sequence
  Description of Artificial Sequence: Synthetic oligonucleotide
gguaaucaaaccaugcauc

SEQ ID NO: 723917 - RNA, 19 nt, Artificial Sequence
  Description of Artificial Sequence: Synthetic oligonucleotide
gucgguaaagauuucgugu

SEQ ID NO: 723918 - RNA, 19 nt, Artificial Sequence
  Description of Artificial Sequence: Synthetic oligonucleotide
gcagaguuguuauggcucg

SEQ ID NO: 723919 - RNA, 19 nt, Artificial Sequence
  Description of Artificial Sequence: Synthetic oligonucleotide
ucgggcauacuugauccag

SEQ ID NO: 723920 - RNA, 19 nt, Artificial Sequence
  Description of Artificial Sequence: Synthetic oligonucleotide
agguuaggcugguuggcag

SEQ ID NO: 723921 - RNA, 19 nt, Artificial Sequence
  Description of Artificial Sequence: Synthetic oligonucleotide
cagcucgaaguugauauag

SEQ ID NO: 723922 - RNA, 19 nt, Artificial Sequence
  Description of Artificial Sequence: Synthetic oligonucleotide
uauuucagccagaguguaa

SEQ ID NO: 723923 - RNA, 19 nt, Artificial Sequence
  Description of Artificial Sequence: Synthetic oligonucleotide
uguucguccauaugcucau

SEQ ID NO: 723924 - RNA, 19 nt, Artificial Sequence
  Description of Artificial Sequence: Synthetic oligonucleotide
uacguguauuuguaccaga

SEQ ID NO: 723925 - RNA, 19 nt, Artificial Sequence
  Description of Artificial Sequence: Synthetic oligonucleotide
ucagccagaguguaauauu

SEQ ID NO: 723926 - RNA, 19 nt, Artificial Sequence
  Description of Artificial Sequence: Synthetic oligonucleotide
caauugucgguaaagauuu

SEQ ID NO: 723927 - RNA, 19 nt, Artificial Sequence
  Description of Artificial Sequence: Synthetic oligonucleotide
guguaauauuccgauaguc

SEQ ID NO: 723928 - RNA, 19 nt, Artificial Sequence
  Description of Artificial Sequence: Synthetic oligonucleotide
auaggagugccaggccugc

SEQ ID NO: 723929 - RNA, 19 nt, Artificial Sequence
  Description of Artificial Sequence: Synthetic oligonucleotide
acucguacccuuucaaauu

SEQ ID NO: 723930 - RNA, 19 nt, Artificial Sequence
  Description of Artificial Sequence: Synthetic oligonucleotide
cauaaauggugcgggcccg

SEQ ID NO: 723931 - RNA, 19 nt, Artificial Sequence
  Description of Artificial Sequence: Synthetic oligonucleotide
uaucuagggcauauuugua

SEQ ID NO: 723932 - RNA, 19 nt, Artificial Sequence
  Description of Artificial Sequence: Synthetic oligonucleotide
agacgcuugauagaccugu

SEQ ID NO: 723933 - RNA, 19 nt, Artificial Sequence
  Description of Artificial Sequence: Synthetic oligonucleotide
uuauggcucggucccagau

SEQ ID NO: 723934 - RNA, 19 nt, Artificial Sequence
  Description of Artificial Sequence: Synthetic oligonucleotide
ugcguauuuuauccaguua

SEQ ID NO: 723935 - RNA, 19 nt, Artificial Sequence
  Description of Artificial Sequence: Synthetic oligonucleotide
uguuauggcucggucccag

SEQ ID NO: 723936 - RNA, 19 nt, Artificial Sequence
  Description of Artificial Sequence: Synthetic oligonucleotide
augggcggcacauuggcaa

SEQ ID NO: 723937 - RNA, 19 nt, Artificial Sequence
  Description of Artificial Sequence: Synthetic oligonucleotide
agcuuguaaucguuuaguu

SEQ ID NO: 723938 - RNA, 19 nt, Artificial Sequence
  Description of Artificial Sequence: Synthetic oligonucleotide
agcacgcucguauauggau

SEQ ID NO: 723939 - RNA, 19 nt, Artificial Sequence
  Description of Artificial Sequence: Synthetic oligonucleotide
cucuaucgauaucaccaag

SEQ ID NO: 723940 - RNA, 19 nt, Artificial Sequence
  Description of Artificial Sequence: Synthetic oligonucleotide
aauugucgguaaagauuuc

SEQ ID NO: 723941 - RNA, 19 nt, Artificial Sequence
  Description of Artificial Sequence: Synthetic oligonucleotide
auacgguuccaaauucauc

SEQ ID NO: 723942 - RNA, 19 nt, Artificial Sequence
  Description of Artificial Sequence: Synthetic oligonucleotide
uucguagcuuguaaucguu

SEQ ID NO: 723943 - RNA, 19 nt, Artificial Sequence
  Description of Artificial Sequence: Synthetic oligonucleotide
uggcgguucuucauuucca

SEQ ID NO: 723944 - RNA, 19 nt, Artificial Sequence
  Description of Artificial Sequence: Synthetic oligonucleotide
ucaaaccaugcaucguaau

SEQ ID NO: 723945 - RNA, 19 nt, Artificial Sequence
  Description of Artificial Sequence: Synthetic oligonucleotide
agauugcccgugcucuauc

SEQ ID NO: 723946 - RNA, 19 nt, Artificial Sequence
  Description of Artificial Sequence: Synthetic oligonucleotide
guaccucuggcauaucuaa

SEQ ID NO: 723947 - RNA, 19 nt, Artificial Sequence
  Description of Artificial Sequence: Synthetic oligonucleotide
aauaccccuccggucacca

SEQ ID NO: 723948 - RNA, 19 nt, Artificial Sequence
  Description of Artificial Sequence: Synthetic oligonucleotide
guucgauauagccuuugaa

SEQ ID NO: 723949 - RNA, 19 nt, Artificial Sequence
  Description of Artificial Sequence: Synthetic oligonucleotide
cuggcaugaguuugucuac

SEQ ID NO: 723950 - RNA, 19 nt, Artificial Sequence
  Description of Artificial Sequence: Synthetic oligonucleotide
uugacucguggcagaguug

SEQ ID NO: 723951 - RNA, 19 nt, Artificial Sequence
  Description of Artificial Sequence: Synthetic oligonucleotide
uguagcgcuuccagugccu

SEQ ID NO: 723952 - RNA, 19 nt, Artificial Sequence
  Description of Artificial Sequence: Synthetic oligonucleotide
ucccauugugcguauuuua

SEQ ID NO: 723953 - RNA, 19 nt, Artificial Sequence
  Description of Artificial Sequence: Synthetic oligonucleotide
uauggcucggucccagaua

SEQ ID NO: 723954 - RNA, 19 nt, Artificial Sequence
  Description of Artificial Sequence: Synthetic oligonucleotide
ucuaagcguggcuggcuga

SEQ ID NO: 723955 - RNA, 19 nt, Artificial Sequence
  Description of Artificial Sequence: Synthetic oligonucleotide
gauuagccuucacuucuuc

SEQ ID NO: 723956 - RNA, 19 nt, Artificial Sequence
  Description of Artificial Sequence: Synthetic oligonucleotide
ggucccagauauuucgggc

SEQ ID NO: 723957 - RNA, 19 nt, Artificial Sequence
  Description of Artificial Sequence: Synthetic oligonucleotide
guaucucagcucgaaguug

SEQ ID NO: 723958 - RNA, 19 nt, Artificial Sequence
  Description of Artificial Sequence: Synthetic oligonucleotide
ucguacccuuucaaauucu

SEQ ID NO: 723959 - RNA, 19 nt, Artificial Sequence
  Description of Artificial Sequence: Synthetic oligonucleotide
agcucgaaguugauauagg

SEQ ID NO: 723960 - RNA, 19 nt, Artificial Sequence
  Description of Artificial Sequence: Synthetic oligonucleotide
agaguguaauauuccgaua

SEQ ID NO: 723961 - RNA, 19 nt, Artificial Sequence
  Description of Artificial Sequence: Synthetic oligonucleotide
gcauaucuaagcguggcug

SEQ ID NO: 723962 - RNA, 19 nt, Artificial Sequence
  Description of Artificial Sequence: Synthetic oligonucleotide
ccagagauagauguagcgc

SEQ ID NO: 723963 - RNA, 19 nt, Artificial Sequence
  Description of Artificial Sequence: Synthetic oligonucleotide
acuugauccaugagguaca

SEQ ID NO: 723964 - RNA, 19 nt, Artificial Sequence
  Description of Artificial Sequence: Synthetic oligonucleotide
uccauccagcgcucaaaca

SEQ ID NO: 723965 - RNA, 19 nt, Artificial Sequence
  Description of Artificial Sequence: Synthetic oligonucleotide
guugacuuggcgguucuuc

SEQ ID NO: 723966 - RNA, 19 nt, Artificial Sequence
  Description of Artificial Sequence: Synthetic oligonucleotide
gugcucuaucgauaucacc

SEQ ID NO: 723967 - RNA, 19 nt, Artificial Sequence
  Description of Artificial Sequence: Synthetic oligonucleotide
acgcuugauagaccugucu

SEQ ID NO: 723968 - RNA, 19 nt, Artificial Sequence
  Description of Artificial Sequence: Synthetic oligonucleotide
uagggcauauuuguagaua

SEQ ID NO: 723969 - RNA, 19 nt, Artificial Sequence
  Description of Artificial Sequence: Synthetic oligonucleotide
aacugcucucucguagacu

SEQ ID NO: 723970 - RNA, 19 nt, Artificial Sequence
  Description of Artificial Sequence: Synthetic oligonucleotide
guaaucguuuaguucuucu

SEQ ID NO: 723971 - RNA, 19 nt, Artificial Sequence
  Description of Artificial Sequence: Synthetic oligonucleotide
uaucuaagcguggcuggcu

SEQ ID NO: 723972 - RNA, 19 nt, Artificial Sequence
  Description of Artificial Sequence: Synthetic oligonucleotide
cugauggcuaauucauaga

SEQ ID NO: 723973 - RNA, 19 nt, Artificial Sequence
  Description of Artificial Sequence: Synthetic oligonucleotide
ucguagcuuguaaucguuu

SEQ ID NO: 723974 - RNA, 19 nt, Artificial Sequence
  Description of Artificial Sequence: Synthetic oligonucleotide
aucgagcccuuugaauuuc

SEQ ID NO: 723975 - RNA, 19 nt, Artificial Sequence
  Description of Artificial Sequence: Synthetic oligonucleotide
cagaguguaauauuccgau

SEQ ID NO: 723976 - RNA, 19 nt, Artificial Sequence
  Description of Artificial Sequence: Synthetic oligonucleotide
cuccauguacguguauuug

SEQ ID NO: 723977 - RNA, 19 nt, Artificial Sequence
  Description of Artificial Sequence: Synthetic oligonucleotide
agaguuguuauggcucggu

SEQ ID NO: 723978 - RNA, 19 nt, Artificial Sequence
  Description of Artificial Sequence: Synthetic oligonucleotide
agcacgaagcguucauaaa

SEQ ID NO: 723979 - RNA, 19 nt, Artificial Sequence
  Description of Artificial Sequence: Synthetic oligonucleotide
uugcccgugcucuaucgau

SEQ ID NO: 723980 - RNA, 19 nt, Artificial Sequence
  Description of Artificial Sequence: Synthetic oligonucleotide
cuucaaaaccucgccagga

SEQ ID NO: 723981 - RNA, 19 nt, Artificial Sequence
  Description of Artificial Sequence: Synthetic oligonucleotide
gaccugucuuguccuauca

SEQ ID NO: 723982 - RNA, 19 nt, Artificial Sequence
  Description of Artificial Sequence: Synthetic oligonucleotide
ccuccggucaccaaacuuc

SEQ ID NO: 723983 - RNA, 19 nt, Artificial Sequence
  Description of Artificial Sequence: Synthetic oligonucleotide
auugcccgugcucuaucga

SEQ ID NO: 723984 - RNA, 19 nt, Artificial Sequence
  Description of Artificial Sequence: Synthetic oligonucleotide
ucagcucgaaguugauaua

SEQ ID NO: 723985 - RNA, 19 nt, Artificial Sequence
  Description of Artificial Sequence: Synthetic oligonucleotide
acccgcaacauugcccaac

SEQ ID NO: 723986 - RNA, 19 nt, Artificial Sequence
  Description of Artificial Sequence: Synthetic oligonucleotide
ccagauauuucgggcaugg

SEQ ID NO: 723987 - RNA, 19 nt, Artificial Sequence
  Description of Artificial Sequence: Synthetic oligonucleotide
cucgaagcuguaguuccag

SEQ ID NO: 723988 - RNA, 19 nt, Artificial Sequence
  Description of Artificial Sequence: Synthetic oligonucleotide
gguacaauuuucaggucca

SEQ ID NO: 723989 - RNA, 19 nt, Artificial Sequence
  Description of Artificial Sequence: Synthetic oligonucleotide
gagguacaauuuucagguc

SEQ ID NO: 723990 - RNA, 19 nt, Artificial Sequence
  Description of Artificial Sequence: Synthetic oligonucleotide
cucauaaagcuuccgacau

SEQ ID NO: 723991 - RNA, 19 nt, Artificial Sequence
  Description of Artificial Sequence: Synthetic oligonucleotide
caucguuuuauuugccucu

SEQ ID NO: 723992 - RNA, 19 nt, Artificial Sequence
  Description of Artificial Sequence: Synthetic oligonucleotide
ccuuugaauaacuuguucu

SEQ ID NO: 723993 - RNA, 19 nt, Artificial Sequence
  Description of Artificial Sequence: Synthetic oligonucleotide
auggaucgagcccuuugaa

SEQ ID NO: 723994 - RNA, 19 nt, Artificial Sequence
  Description of Artificial Sequence: Synthetic oligonucleotide
cuaaucacaguccuauuuu

SEQ ID NO: 723995 - RNA, 19 nt, Artificial Sequence
  Description of Artificial Sequence: Synthetic oligonucleotide
aguugauauaggagugcca

SEQ ID NO: 723996 - RNA, 19 nt, Artificial Sequence
  Description of Artificial Sequence: Synthetic oligonucleotide
cauagauugcccgugcucu

SEQ ID NO: 723997 - RNA, 19 nt, Artificial Sequence
  Description of Artificial Sequence: Synthetic oligonucleotide
uccuugcaugggcaaagua

SEQ ID NO: 723998 - RNA, 19 nt, Artificial Sequence
  Description of Artificial Sequence: Synthetic oligonucleotide
cguucauaaauggugcggg

SEQ ID NO: 723999 - RNA, 19 nt, Artificial Sequence
  Description of Artificial Sequence: Synthetic oligonucleotide
uucgcuugcucacgaugau

SEQ ID NO: 724000 - RNA, 19 nt, Artificial Sequence
  Description of Artificial Sequence: Synthetic oligonucleotide
cccaucgucggccuggacc

SEQ ID NO: 724001 - RNA, 19 nt, Artificial Sequence
  Description of Artificial Sequence: Synthetic oligonucleotide
ugaccuuuucuggcaugag

SEQ ID NO: 724002 - RNA, 19 nt, Artificial Sequence
  Description of Artificial Sequence: Synthetic oligonucleotide
gaccuuuucuggcaugagu

SEQ ID NO: 724003 - RNA, 19 nt, Artificial Sequence
  Description of Artificial Sequence: Synthetic oligonucleotide
cuuuggacauuugccuaug

SEQ ID NO: 724004 - RNA, 19 nt, Artificial Sequence
  Description of Artificial Sequence: Synthetic oligonucleotide
gguuaggcugguuggcagc

SEQ ID NO: 724005 - RNA, 19 nt, Artificial Sequence
  Description of Artificial Sequence: Synthetic oligonucleotide
guugacucguggcagaguu

SEQ ID NO: 724006 - RNA, 19 nt, Artificial Sequence
  Description of Artificial Sequence: Synthetic oligonucleotide
uggcaugaguuugucuacu

SEQ ID NO: 724007 - RNA, 19 nt, Artificial Sequence
  Description of Artificial Sequence: Synthetic oligonucleotide
aaauucuaucuagggcaua

SEQ ID NO: 724008 - RNA, 19 nt, Artificial Sequence
  Description of Artificial Sequence: Synthetic oligonucleotide
ggcagaguuguuauggcuc

SEQ ID NO: 724009 - RNA, 19 nt, Artificial Sequence
  Description of Artificial Sequence: Synthetic oligonucleotide
gauacgguuccaaauucau

SEQ ID NO: 724010 - RNA, 19 nt, Artificial Sequence
  Description of Artificial Sequence: Synthetic oligonucleotide
cuuuccaccaagcgcaggu

SEQ ID NO: 724011 - RNA, 19 nt, Artificial Sequence
  Description of Artificial Sequence: Synthetic oligonucleotide
uacuaaucacaguccuauu

SEQ ID NO: 724012 - RNA, 19 nt, Artificial Sequence
  Description of Artificial Sequence: Synthetic oligonucleotide
auaccuugacaugcugugu

SEQ ID NO: 724013 - RNA, 19 nt, Artificial Sequence
  Description of Artificial Sequence: Synthetic oligonucleotide
aagacgcuugauagaccug

SEQ ID NO: 724014 - RNA, 19 nt, Artificial Sequence
  Description of Artificial Sequence: Synthetic oligonucleotide
gcaucggacccaucgucgg

SEQ ID NO: 724015 - RNA, 19 nt, Artificial Sequence
  Description of Artificial Sequence: Synthetic oligonucleotide
ucguggcagaguuguuaug

SEQ ID NO: 724016 - RNA, 19 nt, Artificial Sequence
  Description of Artificial Sequence: Synthetic oligonucleotide
cuugauagaccugucuugu

SEQ ID NO: 724017 - RNA, 19 nt, Artificial Sequence
  Description of Artificial Sequence: Synthetic oligonucleotide
cagcacgaagcguucauaa

SEQ ID NO: 724018 - RNA, 19 nt, Artificial Sequence
  Description of Artificial Sequence: Synthetic oligonucleotide
auauuccgauagucuacau

SEQ ID NO: 724019 - RNA, 19 nt, Artificial Sequence
  Description of Artificial Sequence: Synthetic oligonucleotide
ccuugcaugggcaaaguaa

SEQ ID NO: 724020 - RNA, 19 nt, Artificial Sequence
  Description of Artificial Sequence: Synthetic oligonucleotide
cagcaucggacccaucguc

SEQ ID NO: 724021 - RNA, 19 nt, Artificial Sequence
  Description of Artificial Sequence: Synthetic oligonucleotide
gaaauucuaucuagggcau

SEQ ID NO: 724022 - RNA, 19 nt, Artificial Sequence
  Description of Artificial Sequence: Synthetic oligonucleotide
auagauugcccgugcucua

SEQ ID NO: 724023 - RNA, 19 nt, Artificial Sequence
  Description of Artificial Sequence: Synthetic oligonucleotide
uggccauugccagaaguuu

SEQ ID NO: 724024 - RNA, 19 nt, Artificial Sequence
  Description of Artificial Sequence: Synthetic oligonucleotide
cucaaagaugguauaguuu

SEQ ID NO: 724025 - RNA, 19 nt, Artificial Sequence
  Description of Artificial Sequence: Synthetic oligonucleotide
agggugcaccagcacgaag

SEQ ID NO: 724026 - RNA, 19 nt, Artificial Sequence
  Description of Artificial Sequence: Synthetic oligonucleotide
guguucgcugaagcaauug

SEQ ID NO: 724027 - RNA, 19 nt, Artificial Sequence
  Description of Artificial Sequence: Synthetic oligonucleotide
ugcccgugcucuaucgaua

SEQ ID NO: 724028 - RNA, 19 nt, Artificial Sequence
  Description of Artificial Sequence: Synthetic oligonucleotide
aaaccucgccaggauucca

SEQ ID NO: 724029 - RNA, 19 nt, Artificial Sequence
  Description of Artificial Sequence: Synthetic oligonucleotide
gccuuugaauaacuuguuc

SEQ ID NO: 724030 - RNA, 19 nt, Artificial Sequence
  Description of Artificial Sequence: Synthetic oligonucleotide
uucccauugugcguauuuu

SEQ ID NO: 724031 - RNA, 19 nt, Artificial Sequence
  Description of Artificial Sequence: Synthetic oligonucleotide
gauuaguuccaaagacgcu

SEQ ID NO: 724032 - RNA, 19 nt, Artificial Sequence
  Description of Artificial Sequence: Synthetic oligonucleotide
gcacccgcaacauugccca

SEQ ID NO: 724033 - RNA, 19 nt, Artificial Sequence
  Description of Artificial Sequence: Synthetic oligonucleotide
guuaggcugguuggcagca

SEQ ID NO: 724034 - RNA, 19 nt, Artificial Sequence
  Description of Artificial Sequence: Synthetic oligonucleotide
gggcaugguugacuuggcg

SEQ ID NO: 724035 - RNA, 19 nt, Artificial Sequence
  Description of Artificial Sequence: Synthetic oligonucleotide
guuacuaaucacaguccua

SEQ ID NO: 724036 - RNA, 19 nt, Artificial Sequence
  Description of Artificial Sequence: Synthetic oligonucleotide
aagcacgcucguauaugga

SEQ ID NO: 724037 - RNA, 19 nt, Artificial Sequence
  Description of Artificial Sequence: Synthetic oligonucleotide
ccgggcacccgcaacauug

SEQ ID NO: 724038 - RNA, 19 nt, Artificial Sequence
  Description of Artificial Sequence: Synthetic oligonucleotide
uagauugcccgugcucuau

SEQ ID NO: 724039 - RNA, 19 nt, Artificial Sequence
  Description of Artificial Sequence: Synthetic oligonucleotide
uucgggcaugguugacuug

SEQ ID NO: 724040 - RNA, 19 nt, Artificial Sequence
  Description of Artificial Sequence: Synthetic oligonucleotide
caaaccaugcaucguaauu

SEQ ID NO: 724041 - RNA, 19 nt, Artificial Sequence
  Description of Artificial Sequence: Synthetic oligonucleotide
gucucuaauucugcaaacu

SEQ ID NO: 724042 - RNA, 19 nt, Artificial Sequence
  Description of Artificial Sequence: Synthetic oligonucleotide
gaucgagcccuuugaauuu

SEQ ID NO: 724043 - RNA, 19 nt, Artificial Sequence
  Description of Artificial Sequence: Synthetic oligonucleotide
gguaaagauuucguguucu

SEQ ID NO: 724044 - RNA, 19 nt, Artificial Sequence
  Description of Artificial Sequence: Synthetic oligonucleotide
cucguagacuuuccuugca

SEQ ID NO: 724045 - RNA, 19 nt, Artificial Sequence
  Description of Artificial Sequence: Synthetic oligonucleotide
ccagaguguaauauuccga

SEQ ID NO: 724046 - RNA, 19 nt, Artificial Sequence
  Description of Artificial Sequence: Synthetic oligonucleotide
cgcaacauugcccaacauc

SEQ ID NO: 724047 - RNA, 19 nt, Artificial Sequence
  Description of Artificial Sequence: Synthetic oligonucleotide
ggacccaucgucggccugg

SEQ ID NO: 724048 - RNA, 19 nt, Artificial Sequence
  Description of Artificial Sequence: Synthetic oligonucleotide
cguagacuuuccuugcaug

SEQ ID NO: 724049 - RNA, 19 nt, Artificial Sequence
  Description of Artificial Sequence: Synthetic oligonucleotide
cugucguauuucaaacugu

SEQ ID NO: 724050 - RNA, 19 nt, Artificial Sequence
  Description of Artificial Sequence: Synthetic oligonucleotide
cucgccaggauuccagcaa

SEQ ID NO: 724051 - RNA, 19 nt, Artificial Sequence
  Description of Artificial Sequence: Synthetic oligonucleotide
auaaagcuuccgacaucug

SEQ ID NO: 724052 - RNA, 19 nt, Artificial Sequence
  Description of Artificial Sequence: Synthetic oligonucleotide
accaugcaucguaauugug

SEQ ID NO: 724053 - RNA, 19 nt, Artificial Sequence
  Description of Artificial Sequence: Synthetic oligonucleotide
auccagcgcucaaacaccu

SEQ ID NO: 724054 - RNA, 19 nt, Artificial Sequence
  Description of Artificial Sequence: Synthetic oligonucleotide
ggcaugaguuugucuacuc

SEQ ID NO: 724055 - RNA, 19 nt, Artificial Sequence
  Description of Artificial Sequence: Synthetic oligonucleotide
gcacgaagcguucauaaau

SEQ ID NO: 724056 - RNA, 19 nt, Artificial Sequence
  Description of Artificial Sequence: Synthetic oligonucleotide
uauauggaucgagcccuuu

SEQ ID NO: 724057 - RNA, 19 nt, Artificial Sequence
  Description of Artificial Sequence: Synthetic oligonucleotide
ggcacccgcaacauugccc

SEQ ID NO: 724058 - RNA, 19 nt, Artificial Sequence
  Description of Artificial Sequence: Synthetic oligonucleotide
guuauggcucggucccaga

SEQ ID NO: 724059 - RNA, 19 nt, Artificial Sequence
  Description of Artificial Sequence: Synthetic oligonucleotide
aggccacauacagguguuc

SEQ ID NO: 724060 - RNA, 19 nt, Artificial Sequence
  Description of Artificial Sequence: Synthetic oligonucleotide
gaugggcggcacauuggca

SEQ ID NO: 724061 - RNA, 19 nt, Artificial Sequence
  Description of Artificial Sequence: Synthetic oligonucleotide
gcaauugucgguaaagauu

SEQ ID NO: 724062 - RNA, 19 nt, Artificial Sequence
  Description of Artificial Sequence: Synthetic oligonucleotide
gccaaacaacuccuuccug

SEQ ID NO: 724063 - RNA, 19 nt, Artificial Sequence
  Description of Artificial Sequence: Synthetic oligonucleotide
cccugaggauaacucaaac

SEQ ID NO: 724064 - RNA, 19 nt, Artificial Sequence
  Description of Artificial Sequence: Synthetic oligonucleotide
gggaugggcggcacauugg

SEQ ID NO: 724065 - RNA, 19 nt, Artificial Sequence
  Description of Artificial Sequence: Synthetic oligonucleotide
gugcguauuuuauccaguu

SEQ ID NO: 724066 - RNA, 19 nt, Artificial Sequence
  Description of Artificial Sequence: Synthetic oligonucleotide
cgcagguaaucaaaccaug

SEQ ID NO: 724067 - RNA, 19 nt, Artificial Sequence
  Description of Artificial Sequence: Synthetic oligonucleotide
ccgugcucuaucgauauca

SEQ ID NO: 724068 - RNA, 19 nt, Artificial Sequence
  Description of Artificial Sequence: Synthetic oligonucleotide
ccauguacguguauuugua

SEQ ID NO: 724069 - RNA, 19 nt, Artificial Sequence
  Description of Artificial Sequence: Synthetic oligonucleotide
ccaagcgcagguaaucaaa

SEQ ID NO: 724070 - RNA, 19 nt, Artificial Sequence
  Description of Artificial Sequence: Synthetic oligonucleotide
guagcgcuuccagugccuc

SEQ ID NO: 724071 - RNA, 19 nt, Artificial Sequence
  Description of Artificial Sequence: Synthetic oligonucleotide
ccagcaacauaagucucuc

SEQ ID NO: 724072 - RNA, 19 nt, Artificial Sequence
  Description of Artificial Sequence: Synthetic oligonucleotide
gcaugaguuugucuacucu

SEQ ID NO: 724073 - RNA, 19 nt, Artificial Sequence
  Description of Artificial Sequence: Synthetic oligonucleotide
uccggucaccaaacuucuu

SEQ ID NO: 724074 - RNA, 19 nt, Artificial Sequence
  Description of Artificial Sequence: Synthetic oligonucleotide
cuccggucaccaaacuucu

SEQ ID NO: 724075 - RNA, 19 nt, Artificial Sequence
  Description of Artificial Sequence: Synthetic oligonucleotide
acccaucgucggccuggac

SEQ ID NO: 724076 - RNA, 19 nt, Artificial Sequence
  Description of Artificial Sequence: Synthetic oligonucleotide
uuccgacaucugucaaauu

SEQ ID NO: 724077 - RNA, 19 nt, Artificial Sequence
  Description of Artificial Sequence: Synthetic oligonucleotide
cuucccauugugcguauuu

SEQ ID NO: 724078 - RNA, 19 nt, Artificial Sequence
  Description of Artificial Sequence: Synthetic oligonucleotide
gcacgcucguauauggauc

SEQ ID NO: 724079 - RNA, 19 nt, Artificial Sequence
  Description of Artificial Sequence: Synthetic oligonucleotide
cuugucugauacgguucca

SEQ ID NO: 724080 - RNA, 19 nt, Artificial Sequence
  Description of Artificial Sequence: Synthetic oligonucleotide
cgugcucuaucgauaucac

SEQ ID NO: 724081 - RNA, 19 nt, Artificial Sequence
  Description of Artificial Sequence: Synthetic oligonucleotide
caucguaauuguguggauu

SEQ ID NO: 724082 - RNA, 19 nt, Artificial Sequence
  Description of Artificial Sequence: Synthetic oligonucleotide
gccuauggaaguccccaaa

SEQ ID NO: 724083 - RNA, 19 nt, Artificial Sequence
  Description of Artificial Sequence: Synthetic oligonucleotide
caaaucgggcauacuugau

SEQ ID NO: 724084 - RNA, 19 nt, Artificial Sequence
  Description of Artificial Sequence: Synthetic oligonucleotide
ucuucccauugugcguauu

SEQ ID NO: 724085 - RNA, 19 nt, Artificial Sequence
  Description of Artificial Sequence: Synthetic oligonucleotide
caucuaaagcacgcucgua

SEQ ID NO: 724086 - RNA, 19 nt, Artificial Sequence
  Description of Artificial Sequence: Synthetic oligonucleotide
auaccccuccggucaccaa

SEQ ID NO: 724087 - RNA, 19 nt, Artificial Sequence
  Description of Artificial Sequence: Synthetic oligonucleotide
gggcacccgcaacauugcc

SEQ ID NO: 724088 - RNA, 19 nt, Artificial Sequence
  Description of Artificial Sequence: Synthetic oligonucleotide
guaccagaacugguugacu

SEQ ID NO: 724089 - RNA, 19 nt, Artificial Sequence
  Description of Artificial Sequence: Synthetic oligonucleotide
ccaaaguaccucuggcaua

SEQ ID NO: 724090 - RNA, 19 nt, Artificial Sequence
  Description of Artificial Sequence: Synthetic oligonucleotide
guucguccauaugcucauc

SEQ ID NO: 724091 - RNA, 19 nt, Artificial Sequence
  Description of Artificial Sequence: Synthetic oligonucleotide
aucgucggccuggaccuuu

SEQ ID NO: 724092 - RNA, 19 nt, Artificial Sequence
  Description of Artificial Sequence: Synthetic oligonucleotide
acgcucguauauggaucga

SEQ ID NO: 724093 - RNA, 19 nt, Artificial Sequence
  Description of Artificial Sequence: Synthetic oligonucleotide
cgcucguauauggaucgag

SEQ ID NO: 724094 - RNA, 19 nt, Artificial Sequence
  Description of Artificial Sequence: Synthetic oligonucleotide
cccgcaacauugcccaaca

SEQ ID NO: 724095 - RNA, 19 nt, Artificial Sequence
  Description of Artificial Sequence: Synthetic oligonucleotide
gacccaucgucggccugga

SEQ ID NO: 724096 - RNA, 19 nt, Artificial Sequence
  Description of Artificial Sequence: Synthetic oligonucleotide
cccagauauuucgggcaug

SEQ ID NO: 724097 - RNA, 19 nt, Artificial Sequence
  Description of Artificial Sequence: Synthetic oligonucleotide
cgaagcguucauaaauggu

SEQ ID NO: 724098 - RNA, 19 nt, Artificial Sequence
  Description of Artificial Sequence: Synthetic oligonucleotide
gcucggucccagauauuuc

SEQ ID NO: 724099 - RNA, 19 nt, Artificial Sequence
  Description of Artificial Sequence: Synthetic oligonucleotide
gcgcagguaaucaaaccau

SEQ ID NO: 724100 - RNA, 19 nt, Artificial Sequence
  Description of Artificial Sequence: Synthetic oligonucleotide
cgggcacccgcaacauugc

SEQ ID NO: 724101 - RNA, 19 nt, Artificial Sequence
  Description of Artificial Sequence: Synthetic oligonucleotide
ggcugauggcuaauucaua

SEQ ID NO: 724102 - RNA, 19 nt, Artificial Sequence
  Description of Artificial Sequence: Synthetic oligonucleotide
guauauggaucgagcccuu

SEQ ID NO: 724103 - RNA, 19 nt, Artificial Sequence
  Description of Artificial Sequence: Synthetic oligonucleotide
gccauuccauccagcgcuc

SEQ ID NO: 724104 - RNA, 19 nt, Artificial Sequence
  Description of Artificial Sequence: Synthetic oligonucleotide
cgcuugauagaccugucuu

SEQ ID NO: 724105 - RNA, 19 nt, Artificial Sequence
  Description of Artificial Sequence: Synthetic oligonucleotide
cacccgcaacauugcccaa

SEQ ID NO: 724106 - RNA, 19 nt, Artificial Sequence
  Description of Artificial Sequence: Synthetic oligonucleotide
cgggcauacuugauccagu

SEQ ID NO: 724107 - RNA, 19 nt, Artificial Sequence
  Description of Artificial Sequence: Synthetic oligonucleotide
ccgcacagugucagcuucu

SEQ ID NO: 724108 - RNA, 19 nt, Artificial Sequence
  Description of Artificial Sequence: Synthetic oligonucleotide
cccuccggucaccaaacuu

SEQ ID NO: 724109 - RNA, 19 nt, Artificial Sequence
  Description of Artificial Sequence: Synthetic oligonucleotide
cggacccaucgucggccug

SEQ ID NO: 724110 - RNA, 19 nt, Artificial Sequence
  Description of Artificial Sequence: Synthetic oligonucleotide
ccaguucgauauagccuuu

SEQ ID NO: 724111 - RNA, 19 nt, Artificial Sequence
  Description of Artificial Sequence: Synthetic oligonucleotide
cgauaucaccaaggauugu

SEQ ID NO: 724112 - RNA, 19 nt, Artificial Sequence
  Description of Artificial Sequence: Synthetic oligonucleotide
ccgcaacauugcccaacau

SEQ ID NO: 724113 - RNA, 19 nt, Artificial Sequence
  Description of Artificial Sequence: Synthetic oligonucleotide
uuauacauaauucaggucu

SEQ ID NO: 724114 - RNA, 19 nt, Artificial Sequence
  Description of Artificial Sequence: Synthetic oligonucleotide
uuugauaucagauuaaacu

SEQ ID NO: 724115 - RNA, 19 nt, Artificial Sequence
  Description of Artificial Sequence: Synthetic oligonucleotide
uuguuuaucgcacaaaggg

SEQ ID NO: 724116 - RNA, 19 nt, Artificial Sequence
  Description of Artificial Sequence: Synthetic oligonucleotide
aaugccguggcauuuaagg

SEQ ID NO: 724117 - RNA, 19 nt, Artificial Sequence
  Description of Artificial Sequence: Synthetic oligonucleotide
aaaucgaaagucaacauuc

SEQ ID NO: 724118 - RNA, 19 nt, Artificial Sequence
  Description of Artificial Sequence: Synthetic oligonucleotide
acuaagaaagcagaaaagc

SEQ ID NO: 724119 - RNA, 19 nt, Artificial Sequence
  Description of Artificial Sequence: Synthetic oligonucleotide
uuuuguuuaucgcacaaag

SEQ ID NO: 724120 - RNA, 19 nt, Artificial Sequence
  Description of Artificial Sequence: Synthetic oligonucleotide
uaacacgccaggaagaacg

SEQ ID NO: 724121 - RNA, 19 nt, Artificial Sequence
  Description of Artificial Sequence: Synthetic oligonucleotide
uguaaauuuaaagaggaga

SEQ ID NO: 724122 - RNA, 19 nt, Artificial Sequence
  Description of Artificial Sequence: Synthetic oligonucleotide
aguuauacauaauucaggu

SEQ ID NO: 724123 - RNA, 19 nt, Artificial Sequence
  Description of Artificial Sequence: Synthetic oligonucleotide
aaaggguuuagucacacau

SEQ ID NO: 724124 - RNA, 19 nt, Artificial Sequence
  Description of Artificial Sequence: Synthetic oligonucleotide
uuuguuuaucgcacaaagg

SEQ ID NO: 724125 - RNA, 19 nt, Artificial Sequence
  Description of Artificial Sequence: Synthetic oligonucleotide
aaaguuaccaugaguuacc

SEQ ID NO: 724126 - RNA, 19 nt, Artificial Sequence
  Description of Artificial Sequence: Synthetic oligonucleotide
ucaaaaucaagacuucaga

SEQ ID NO: 724127 - RNA, 19 nt, Artificial Sequence
  Description of Artificial Sequence: Synthetic oligonucleotide
ucacaaguugcuaaucagg

SEQ ID NO: 724128 - RNA, 19 nt, Artificial Sequence
  Description of Artificial Sequence: Synthetic oligonucleotide
agcaucucacccuaagucc

SEQ ID NO: 724129 - RNA, 19 nt, Artificial Sequence
  Description of Artificial Sequence: Synthetic oligonucleotide
uguaagacucuucauugag

SEQ ID NO: 724130 - RNA, 19 nt, Artificial Sequence
  Description of Artificial Sequence: Synthetic oligonucleotide
aaguagaacaccuugcuuu

SEQ ID NO: 724131 - RNA, 19 nt, Artificial Sequence
  Description of Artificial Sequence: Synthetic oligonucleotide
aagggauauaauguggagg

SEQ ID NO: 724132 - RNA, 19 nt, Artificial Sequence
  Description of Artificial Sequence: Synthetic oligonucleotide
cuuguuuagacaugucugg

SEQ ID NO: 724133 - RNA, 19 nt, Artificial Sequence
  Description of Artificial Sequence: Synthetic oligonucleotide
gagauaacacgccaggaag

SEQ ID NO: 724134 - RNA, 19 nt, Artificial Sequence
  Description of Artificial Sequence: Synthetic oligonucleotide
uacuaagaaagcagaaaag

SEQ ID NO: 724135 - RNA, 19 nt, Artificial Sequence
  Description of Artificial Sequence: Synthetic oligonucleotide
aauaagaccucaaccacag

SEQ ID NO: 724136 - RNA, 19 nt, Artificial Sequence
  Description of Artificial Sequence: Synthetic oligonucleotide
acaacuuuacaacagaauu

SEQ ID NO: 724137 - RNA, 19 nt, Artificial Sequence
  Description of Artificial Sequence: Synthetic oligonucleotide
gacugagaaauucagcgcc

SEQ ID NO: 724138 - RNA, 19 nt, Artificial Sequence
  Description of Artificial Sequence: Synthetic oligonucleotide
aaaaucgaaagucaacauu

SEQ ID NO: 724139 - RNA, 19 nt, Artificial Sequence
  Description of Artificial Sequence: Synthetic oligonucleotide
aaagggauauaauguggag

SEQ ID NO: 724140 - RNA, 19 nt, Artificial Sequence
  Description of Artificial Sequence: Synthetic oligonucleotide
uaagggaccagucugaguu

SEQ ID NO: 724141 - RNA, 19 nt, Artificial Sequence
  Description of Artificial Sequence: Synthetic oligonucleotide
cauacugaucaauaagacc

SEQ ID NO: 724142 - RNA, 19 nt, Artificial Sequence
  Description of Artificial Sequence: Synthetic oligonucleotide
aucacaaagcacgacagac

SEQ ID NO: 724143 - RNA, 19 nt, Artificial Sequence
  Description of Artificial Sequence: Synthetic oligonucleotide
gagauuaucccugaguagc

SEQ ID NO: 724144 - RNA, 19 nt, Artificial Sequence
  Description of Artificial Sequence: Synthetic oligonucleotide
ucaguaagagcuuugcuaa

SEQ ID NO: 724145 - RNA, 19 nt, Artificial Sequence
  Description of Artificial Sequence: Synthetic oligonucleotide
ucaauaagaccucaaccac

SEQ ID NO: 724146 - RNA, 19 nt, Artificial Sequence
  Description of Artificial Sequence: Synthetic oligonucleotide
auuaguucucucccucucc

SEQ ID NO: 724147 - RNA, 19 nt, Artificial Sequence
  Description of Artificial Sequence: Synthetic oligonucleotide
gaugcuggagauaacacgc

SEQ ID NO: 724148 - RNA, 19 nt, Artificial Sequence
  Description of Artificial Sequence: Synthetic oligonucleotide
aucacaacggacucucuac

SEQ ID NO: 724149 - RNA, 19 nt, Artificial Sequence
  Description of Artificial Sequence: Synthetic oligonucleotide
aguuaccaaacucagggug

SEQ ID NO: 724150 - RNA, 19 nt, Artificial Sequence
  Description of Artificial Sequence: Synthetic oligonucleotide
ucuacggcuacauggaaug

SEQ ID NO: 724151 - RNA, 19 nt, Artificial Sequence
  Description of Artificial Sequence: Synthetic oligonucleotide
aucagauuaaacuuucuaa

SEQ ID NO: 724152 - RNA, 19 nt, Artificial Sequence
  Description of Artificial Sequence: Synthetic oligonucleotide
uggauacuaagaaagcaga

SEQ ID NO: 724153 - RNA, 19 nt, Artificial Sequence
  Description of Artificial Sequence: Synthetic oligonucleotide
uguuuaucgcacaaaggga

SEQ ID NO: 724154 - RNA, 19 nt, Artificial Sequence
  Description of Artificial Sequence: Synthetic oligonucleotide
aguacgucauugcagaugu

SEQ ID NO: 724155 - RNA, 19 nt, Artificial Sequence
  Description of Artificial Sequence: Synthetic oligonucleotide
aacuaagcuggaugaguac

SEQ ID NO: 724156 - RNA, 19 nt, Artificial Sequence
  Description of Artificial Sequence: Synthetic oligonucleotide
gauauaauguggaggauac

SEQ ID NO: 724157 - RNA, 19 nt, Artificial Sequence
  Description of Artificial Sequence: Synthetic oligonucleotide
ugaucaauaagaccucaac

SEQ ID NO: 724158 - RNA, 19 nt, Artificial Sequence
  Description of Artificial Sequence: Synthetic oligonucleotide
uuuauugucuccagaugca

SEQ ID NO: 724159 - RNA, 19 nt, Artificial Sequence
  Description of Artificial Sequence: Synthetic oligonucleotide
agauauuuguccaacagcu

SEQ ID NO: 724160 - RNA, 19 nt, Artificial Sequence
  Description of Artificial Sequence: Synthetic oligonucleotide
ucugacguccacaaaguga

SEQ ID NO: 724161 - RNA, 19 nt, Artificial Sequence
  Description of Artificial Sequence: Synthetic oligonucleotide
ucgaaagucaacauucgau

SEQ ID NO: 724162 - RNA, 19 nt, Artificial Sequence
  Description of Artificial Sequence: Synthetic oligonucleotide
gagaaauucagcgccaggc

SEQ ID NO: 724163 - RNA, 19 nt, Artificial Sequence
  Description of Artificial Sequence: Synthetic oligonucleotide
aggggugauacugugagac

SEQ ID NO: 724164 - RNA, 19 nt, Artificial Sequence
  Description of Artificial Sequence: Synthetic oligonucleotide
uagacuuaggcugugaaaa

SEQ ID NO: 724165 - RNA, 19 nt, Artificial Sequence
  Description of Artificial Sequence: Synthetic oligonucleotide
uuuguccauggucauuccg

SEQ ID NO: 724166 - RNA, 19 nt, Artificial Sequence
  Description of Artificial Sequence: Synthetic oligonucleotide
caugaguuaccaaacucag

SEQ ID NO: 724167 - RNA, 19 nt, Artificial Sequence
  Description of Artificial Sequence: Synthetic oligonucleotide
ugugguaugagcgggaccu

SEQ ID NO: 724168 - RNA, 19 nt, Artificial Sequence
  Description of Artificial Sequence: Synthetic oligonucleotide
cagucugaguuucagauac

SEQ ID NO: 724169 - RNA, 19 nt, Artificial Sequence
  Description of Artificial Sequence: Synthetic oligonucleotide
cacaaagggauauaaugug

SEQ ID NO: 724170 - RNA, 19 nt, Artificial Sequence
  Description of Artificial Sequence: Synthetic oligonucleotide
ucucauuucagcagaugga

SEQ ID NO: 724171 - RNA, 19 nt, Artificial Sequence
  Description of Artificial Sequence: Synthetic oligonucleotide
uccaguacgucauugcaga

SEQ ID NO: 724172 - RNA, 19 nt, Artificial Sequence
  Description of Artificial Sequence: Synthetic oligonucleotide
ugaguuucagauacaaaua

SEQ ID NO: 724173 - RNA, 19 nt, Artificial Sequence
  Description of Artificial Sequence: Synthetic oligonucleotide
aacaagcauuaucagggcu

SEQ ID NO: 724174 - RNA, 19 nt, Artificial Sequence
  Description of Artificial Sequence: Synthetic oligonucleotide
aaucgaaagucaacauucg

SEQ ID NO: 724175 - RNA, 19 nt, Artificial Sequence
  Description of Artificial Sequence: Synthetic oligonucleotide
aguuuagaaucucauagua

SEQ ID NO: 724176 - RNA, 19 nt, Artificial Sequence
  Description of Artificial Sequence: Synthetic oligonucleotide
uuugcuagacuuaggcugu

SEQ ID NO: 724177 - RNA, 19 nt, Artificial Sequence
  Description of Artificial Sequence: Synthetic oligonucleotide
ugagauuaucccugaguag

SEQ ID NO: 724178 - RNA, 19 nt, Artificial Sequence
  Description of Artificial Sequence: Synthetic oligonucleotide
aucaguaagagcuuugcua

SEQ ID NO: 724179 - RNA, 19 nt, Artificial Sequence
  Description of Artificial Sequence: Synthetic oligonucleotide
acaacggacucucuacaac

SEQ ID NO: 724180 - RNA, 19 nt, Artificial Sequence
  Description of Artificial Sequence: Synthetic oligonucleotide
agcauugggaaugagauau

SEQ ID NO: 724181 - RNA, 19 nt, Artificial Sequence
  Description of Artificial Sequence: Synthetic oligonucleotide
cagacauuaguucucuccc

SEQ ID NO: 724182 - RNA, 19 nt, Artificial Sequence
  Description of Artificial Sequence: Synthetic oligonucleotide
uaaguuacaaaaccccaua

SEQ ID NO: 724183 - RNA, 19 nt, Artificial Sequence
  Description of Artificial Sequence: Synthetic oligonucleotide
agugagauuaucccugagu

SEQ ID NO: 724184 - RNA, 19 nt, Artificial Sequence
  Description of Artificial Sequence: Synthetic oligonucleotide
uguccaugcaacuucccug

SEQ ID NO: 724185 - RNA, 19 nt, Artificial Sequence
  Description of Artificial Sequence: Synthetic oligonucleotide
uguucgaugcuggagauaa

SEQ ID NO: 724186 - RNA, 19 nt, Artificial Sequence
  Description of Artificial Sequence: Synthetic oligonucleotide
acauggaaugucaagguag

SEQ ID NO: 724187 - RNA, 19 nt, Artificial Sequence
  Description of Artificial Sequence: Synthetic oligonucleotide
ucuaucuucucacgguacu

SEQ ID NO: 724188 - RNA, 19 nt, Artificial Sequence
  Description of Artificial Sequence: Synthetic oligonucleotide
ugagaaauucagcgccagg

SEQ ID NO: 724189 - RNA, 19 nt, Artificial Sequence
  Description of Artificial Sequence: Synthetic oligonucleotide
gauaucagauuaaacuuuc

SEQ ID NO: 724190 - RNA, 19 nt, Artificial Sequence
  Description of Artificial Sequence: Synthetic oligonucleotide
aaaggcgcuuccgggaagc

SEQ ID NO: 724191 - RNA, 19 nt, Artificial Sequence
  Description of Artificial Sequence: Synthetic oligonucleotide
gaugaguacacugggaaga

SEQ ID NO: 724192 - RNA, 19 nt, Artificial Sequence
  Description of Artificial Sequence: Synthetic oligonucleotide
aagcacgacagacauuagu

SEQ ID NO: 724193 - RNA, 19 nt, Artificial Sequence
  Description of Artificial Sequence: Synthetic oligonucleotide
aguccugacaucacaacgg

SEQ ID NO: 724194 - RNA, 19 nt, Artificial Sequence
  Description of Artificial Sequence: Synthetic oligonucleotide
agugacuauuuugauauca

SEQ ID NO: 724195 - RNA, 19 nt, Artificial Sequence
  Description of Artificial Sequence: Synthetic oligonucleotide
acaaguugcuaaucaggag

SEQ ID NO: 724196 - RNA, 19 nt, Artificial Sequence
  Description of Artificial Sequence: Synthetic oligonucleotide
cacagauggacucuacggc

SEQ ID NO: 724197 - RNA, 19 nt, Artificial Sequence
  Description of Artificial Sequence: Synthetic oligonucleotide
uauacauaauucaggucua

SEQ ID NO: 724198 - RNA, 19 nt, Artificial Sequence
  Description of Artificial Sequence: Synthetic oligonucleotide
ucgaauuggguguguaggc

SEQ ID NO: 724199 - RNA, 19 nt, Artificial Sequence
  Description of Artificial Sequence: Synthetic oligonucleotide
gacuucagaaaugccgugg

SEQ ID NO: 724200 - RNA, 19 nt, Artificial Sequence
  Description of Artificial Sequence: Synthetic oligonucleotide
aguuacaaaaccccauaau

SEQ ID NO: 724201 - RNA, 19 nt, Artificial Sequence
  Description of Artificial Sequence: Synthetic oligonucleotide
cuggagauaacacgccagg

SEQ ID NO: 724202 - RNA, 19 nt, Artificial Sequence
  Description of Artificial Sequence: Synthetic oligonucleotide
augccguggcauuuaaggg

SEQ ID NO: 724203 - RNA, 19 nt, Artificial Sequence
  Description of Artificial Sequence: Synthetic oligonucleotide
auaccuaaaauagucuccu

SEQ ID NO: 724204 - RNA, 19 nt, Artificial Sequence
  Description of Artificial Sequence: Synthetic oligonucleotide
aaucaagacuucagaaaug

SEQ ID NO: 724205 - RNA, 19 nt, Artificial Sequence
  Description of Artificial Sequence: Synthetic oligonucleotide
gaagacugagaaauucagc

SEQ ID NO: 724206 - RNA, 19 nt, Artificial Sequence
  Description of Artificial Sequence: Synthetic oligonucleotide
ugccguggcauuuaaggga

SEQ ID NO: 724207 - RNA, 19 nt, Artificial Sequence
  Description of Artificial Sequence: Synthetic oligonucleotide
cuuacuaauuucaaaggcu

SEQ ID NO: 724208 - RNA, 19 nt, Artificial Sequence
  Description of Artificial Sequence: Synthetic oligonucleotide
cucauuucagcagauggac

SEQ ID NO: 724209 - RNA, 19 nt, Artificial Sequence
  Description of Artificial Sequence: Synthetic oligonucleotide
uuagucacacaugugguau

SEQ ID NO: 724210 - RNA, 19 nt, Artificial Sequence
  Description of Artificial Sequence: Synthetic oligonucleotide
ugugagacucauaggccug

SEQ ID NO: 724211 - RNA, 19 nt, Artificial Sequence
  Description of Artificial Sequence: Synthetic oligonucleotide
ccuaccacauucuuguagg

SEQ ID NO: 724212 - RNA, 19 nt, Artificial Sequence
  Description of Artificial Sequence: Synthetic oligonucleotide
guuaccaaacucagggugc

SEQ ID NO: 724213 - RNA, 19 nt, Artificial Sequence
  Description of Artificial Sequence: Synthetic oligonucleotide
uuuaagggaccagucugag

SEQ ID NO: 724214 - RNA, 19 nt, Artificial Sequence
  Description of Artificial Sequence: Synthetic oligonucleotide
acaagcauuaucagggcug

SEQ ID NO: 724215 - RNA, 19 nt, Artificial Sequence
  Description of Artificial Sequence: Synthetic oligonucleotide
gugagauuaucccugagua

SEQ ID NO: 724216 - RNA, 19 nt, Artificial Sequence
  Description of Artificial Sequence: Synthetic oligonucleotide
gacauuaguucucucccuc

SEQ ID NO: 724217 - RNA, 19 nt, Artificial Sequence
  Description of Artificial Sequence: Synthetic oligonucleotide
ucacaacggacucucuaca

SEQ ID NO: 724218 - RNA, 19 nt, Artificial Sequence
  Description of Artificial Sequence: Synthetic oligonucleotide
agucgaauuggguguguag

SEQ ID NO: 724219 - RNA, 19 nt, Artificial Sequence
  Description of Artificial Sequence: Synthetic oligonucleotide
cacacagauggacucuacg

SEQ ID NO: 724220 - RNA, 19 nt, Artificial Sequence
  Description of Artificial Sequence: Synthetic oligonucleotide
uaguguccaugcaacuucc

SEQ ID NO: 724221 - RNA, 19 nt, Artificial Sequence
  Description of Artificial Sequence: Synthetic oligonucleotide
aguuugacacagugguuug

SEQ ID NO: 724222 - RNA, 19 nt, Artificial Sequence
  Description of Artificial Sequence: Synthetic oligonucleotide
aagugagauuaucccugag

SEQ ID NO: 724223 - RNA, 19 nt, Artificial Sequence
  Description of Artificial Sequence: Synthetic oligonucleotide
ugaguagcugcaugaucag

SEQ ID NO: 724224 - RNA, 19 nt, Artificial Sequence
  Description of Artificial Sequence: Synthetic oligonucleotide
ucgaugcuggagauaacac

SEQ ID NO: 724225 - RNA, 19 nt, Artificial Sequence
  Description of Artificial Sequence: Synthetic oligonucleotide
cuguguagcauugggaaug

SEQ ID NO: 724226 - RNA, 19 nt, Artificial Sequence
  Description of Artificial Sequence: Synthetic oligonucleotide
uaccaugaguuaccaaacu

SEQ ID NO: 724227 - RNA, 19 nt, Artificial Sequence
  Description of Artificial Sequence: Synthetic oligonucleotide
gauacggagugacagcaaa

SEQ ID NO: 724228 - RNA, 19 nt, Artificial Sequence
  Description of Artificial Sequence: Synthetic oligonucleotide
augugguaugagcgggacc

SEQ ID NO: 724229 - RNA, 19 nt, Artificial Sequence
  Description of Artificial Sequence: Synthetic oligonucleotide
acuaagcuggaugaguaca

SEQ ID NO: 724230 - RNA, 19 nt, Artificial Sequence
  Description of Artificial Sequence: Synthetic oligonucleotide
uuuaucgcacaaagggaua

SEQ ID NO: 724231 - RNA, 19 nt, Artificial Sequence
  Description of Artificial Sequence: Synthetic oligonucleotide
aaggguuuagucacacaug

SEQ ID NO: 724232 - RNA, 19 nt, Artificial Sequence
  Description of Artificial Sequence: Synthetic oligonucleotide
augaguacacugggaagac

SEQ ID NO: 724233 - RNA, 19 nt, Artificial Sequence
  Description of Artificial Sequence: Synthetic oligonucleotide
aguaagagcuuugcuaagu

SEQ ID NO: 724234 - RNA, 19 nt, Artificial Sequence
  Description of Artificial Sequence: Synthetic oligonucleotide
agguagaggggugauacug

SEQ ID NO: 724235 - RNA, 19 nt, Artificial Sequence
  Description of Artificial Sequence: Synthetic oligonucleotide
cuguagcgagcaaaggcgc

SEQ ID NO: 724236 - RNA, 19 nt, Artificial Sequence
  Description of Artificial Sequence: Synthetic oligonucleotide
uuaccaaacucagggugcc

SEQ ID NO: 724237 - RNA, 19 nt, Artificial Sequence
  Description of Artificial Sequence: Synthetic oligonucleotide
guaagacucuucauugagc

SEQ ID NO: 724238 - RNA, 19 nt, Artificial Sequence
  Description of Artificial Sequence: Synthetic oligonucleotide
uaagagcuuugcuaaguua

SEQ ID NO: 724239 - RNA, 19 nt, Artificial Sequence
  Description of Artificial Sequence: Synthetic oligonucleotide
cagugguuuguuuauuguc

SEQ ID NO: 724240 - RNA, 19 nt, Artificial Sequence
  Description of Artificial Sequence: Synthetic oligonucleotide
uacugaucaauaagaccuc

SEQ ID NO: 724241 - RNA, 19 nt, Artificial Sequence
  Description of Artificial Sequence: Synthetic oligonucleotide
uaucuucucacgguacucu

SEQ ID NO: 724242 - RNA, 19 nt, Artificial Sequence
  Description of Artificial Sequence: Synthetic oligonucleotide
gaaugucaagguagagggg

SEQ ID NO: 724243 - RNA, 19 nt, Artificial Sequence
  Description of Artificial Sequence: Synthetic oligonucleotide
caacagcccauacugauca

SEQ ID NO: 724244 - RNA, 19 nt, Artificial Sequence
  Description of Artificial Sequence: Synthetic oligonucleotide
cauggauacuaagaaagca

SEQ ID NO: 724245 - RNA, 19 nt, Artificial Sequence
  Description of Artificial Sequence: Synthetic oligonucleotide
acauuaguucucucccucu

SEQ ID NO: 724246 - RNA, 19 nt, Artificial Sequence
  Description of Artificial Sequence: Synthetic oligonucleotide
agcauuaucagggcuggcu

SEQ ID NO: 724247 - RNA, 19 nt, Artificial Sequence
  Description of Artificial Sequence: Synthetic oligonucleotide
gcuaaucaggagcacacug

SEQ ID NO: 724248 - RNA, 19 nt, Artificial Sequence
  Description of Artificial Sequence: Synthetic oligonucleotide
ucacaggcgcuaacaagca

SEQ ID NO: 724249 - RNA, 19 nt, Artificial Sequence
  Description of Artificial Sequence: Synthetic oligonucleotide
guacacugggaagaccugg

SEQ ID NO: 724250 - RNA, 19 nt, Artificial Sequence
  Description of Artificial Sequence: Synthetic oligonucleotide
guagaggggugauacugug

SEQ ID NO: 724251 - RNA, 19 nt, Artificial Sequence
  Description of Artificial Sequence: Synthetic oligonucleotide
auauaauguggaggauacg

SEQ ID NO: 724252 - RNA, 19 nt, Artificial Sequence
  Description of Artificial Sequence: Synthetic oligonucleotide
uguagcgagcaaaggcgcu

SEQ ID NO: 724253 - RNA, 19 nt, Artificial Sequence
  Description of Artificial Sequence: Synthetic oligonucleotide
gaugcaaccucagaaagau

SEQ ID NO: 724254 - RNA, 19 nt, Artificial Sequence
  Description of Artificial Sequence: Synthetic oligonucleotide
agcaaaggcgcuuccggga

SEQ ID NO: 724255 - RNA, 19 nt, Artificial Sequence
  Description of Artificial Sequence: Synthetic oligonucleotide
uaaaggguuuagucacaca

SEQ ID NO: 724256 - RNA, 19 nt, Artificial Sequence
  Description of Artificial Sequence: Synthetic oligonucleotide
uuaucgcacaaagggauau

SEQ ID NO: 724257 - RNA, 19 nt, Artificial Sequence
  Description of Artificial Sequence: Synthetic oligonucleotide
auaacacgccaggaagaac

SEQ ID NO: 724258 - RNA, 19 nt, Artificial Sequence
  Description of Artificial Sequence: Synthetic oligonucleotide
uggcauuuaagggaccagu

SEQ ID NO: 724259 - RNA, 19 nt, Artificial Sequence
  Description of Artificial Sequence: Synthetic oligonucleotide
auaauguggaggauacgga

SEQ ID NO: 724260 - RNA, 19 nt, Artificial Sequence
  Description of Artificial Sequence: Synthetic oligonucleotide
uguaguguccaugcaacuu

SEQ ID NO: 724261 - RNA, 19 nt, Artificial Sequence
  Description of Artificial Sequence: Synthetic oligonucleotide
uuauugucuccagaugcaa

SEQ ID NO: 724262 - RNA, 19 nt, Artificial Sequence
  Description of Artificial Sequence: Synthetic oligonucleotide
cuaccacauucuuguaggc

SEQ ID NO: 724263 - RNA, 19 nt, Artificial Sequence
  Description of Artificial Sequence: Synthetic oligonucleotide
agaacggcgggcaccuacc

SEQ ID NO: 724264 - RNA, 19 nt, Artificial Sequence
  Description of Artificial Sequence: Synthetic oligonucleotide
ggaugaguacacugggaag

SEQ ID NO: 724265 - RNA, 19 nt, Artificial Sequence
  Description of Artificial Sequence: Synthetic oligonucleotide
uuguaguguccaugcaacu

SEQ ID NO: 724266 - RNA, 19 nt, Artificial Sequence
  Description of Artificial Sequence: Synthetic oligonucleotide
uuaagggaccagucugagu

SEQ ID NO: 724267 - RNA, 19 nt, Artificial Sequence
  Description of Artificial Sequence: Synthetic oligonucleotide
aauucagcgccaggccaag

SEQ ID NO: 724268 - RNA, 19 nt, Artificial Sequence
  Description of Artificial Sequence: Synthetic oligonucleotide
gauaacacgccaggaagaa

SEQ ID NO: 724269 - RNA, 19 nt, Artificial Sequence
  Description of Artificial Sequence: Synthetic oligonucleotide
agcacgacagacauuaguu

SEQ ID NO: 724270 - RNA, 19 nt, Artificial Sequence
  Description of Artificial Sequence: Synthetic oligonucleotide
cauggucauuccguggagg

SEQ ID NO: 724271 - RNA, 19 nt, Artificial Sequence
  Description of Artificial Sequence: Synthetic oligonucleotide
ucagggugccaauggcgag

SEQ ID NO: 724272 - RNA, 19 nt, Artificial Sequence
  Description of Artificial Sequence: Synthetic oligonucleotide
agacuucagaaaugccgug

SEQ ID NO: 724273 - RNA, 19 nt, Artificial Sequence
  Description of Artificial Sequence: Synthetic oligonucleotide
agauaacacgccaggaaga

SEQ ID NO: 724274 - RNA, 19 nt, Artificial Sequence
  Description of Artificial Sequence: Synthetic oligonucleotide
caauuaucagccaaagaau

SEQ ID NO: 724275 - RNA, 19 nt, Artificial Sequence
  Description of Artificial Sequence: Synthetic oligonucleotide
aagcauuaucagggcuggc

SEQ ID NO: 724276 - RNA, 19 nt, Artificial Sequence
  Description of Artificial Sequence: Synthetic oligonucleotide
ggcgcuaacaagcauuauc

SEQ ID NO: 724277 - RNA, 19 nt, Artificial Sequence
  Description of Artificial Sequence: Synthetic oligonucleotide
ugcaacuucccuggguuac

SEQ ID NO: 724278 - RNA, 19 nt, Artificial Sequence
  Description of Artificial Sequence: Synthetic oligonucleotide
cagccauaucaucguagcg

SEQ ID NO: 724279 - RNA, 19 nt, Artificial Sequence
  Description of Artificial Sequence: Synthetic oligonucleotide
agcgagcaaaggcgcuucc

SEQ ID NO: 724280 - RNA, 19 nt, Artificial Sequence
  Description of Artificial Sequence: Synthetic oligonucleotide
guaaaggguuuagucacac

SEQ ID NO: 724281 - RNA, 19 nt, Artificial Sequence
  Description of Artificial Sequence: Synthetic oligonucleotide
augcuggagauaacacgcc

SEQ ID NO: 724282 - RNA, 19 nt, Artificial Sequence
  Description of Artificial Sequence: Synthetic oligonucleotide
aguucaugucccuguucug

SEQ ID NO: 724283 - RNA, 19 nt, Artificial Sequence
  Description of Artificial Sequence: Synthetic oligonucleotide
cauugcagauguccugcag

SEQ ID NO: 724284 - RNA, 19 nt, Artificial Sequence
  Description of Artificial Sequence: Synthetic oligonucleotide
uguguagcauugggaauga

SEQ ID NO: 724285 - RNA, 19 nt, Artificial Sequence
  Description of Artificial Sequence: Synthetic oligonucleotide
gacucuacggcuacaugga

SEQ ID NO: 724286 - RNA, 19 nt, Artificial Sequence
  Description of Artificial Sequence: Synthetic oligonucleotide
gguuacagggucuuguuua

SEQ ID NO: 724287 - RNA, 19 nt, Artificial Sequence
  Description of Artificial Sequence: Synthetic oligonucleotide
aguugcuaaucaggagcac

SEQ ID NO: 724288 - RNA, 19 nt, Artificial Sequence
  Description of Artificial Sequence: Synthetic oligonucleotide
ggcuacauggaaugucaag

SEQ ID NO: 724289 - RNA, 19 nt, Artificial Sequence
  Description of Artificial Sequence: Synthetic oligonucleotide
uaagcuggaugaguacacu

SEQ ID NO: 724290 - RNA, 19 nt, Artificial Sequence
  Description of Artificial Sequence: Synthetic oligonucleotide
aaaugccguggcauuuaag

SEQ ID NO: 724291 - RNA, 19 nt, Artificial Sequence
  Description of Artificial Sequence: Synthetic oligonucleotide
ccaugaguuaccaaacuca

SEQ ID NO: 724292 - RNA, 19 nt, Artificial Sequence
  Description of Artificial Sequence: Synthetic oligonucleotide
aucgcacaaagggauauaa

SEQ ID NO: 724293 - RNA, 19 nt, Artificial Sequence
  Description of Artificial Sequence: Synthetic oligonucleotide
cuagacuuaggcugugaaa

SEQ ID NO: 724294 - RNA, 19 nt, Artificial Sequence
  Description of Artificial Sequence: Synthetic oligonucleotide
uggagaguucaugucccug

SEQ ID NO: 724295 - RNA, 19 nt, Artificial Sequence
  Description of Artificial Sequence: Synthetic oligonucleotide
guuuaucgcacaaagggau

SEQ ID NO: 724296 - RNA, 19 nt, Artificial Sequence
  Description of Artificial Sequence: Synthetic oligonucleotide
ggagauaacacgccaggaa

SEQ ID NO: 724297 - RNA, 19 nt, Artificial Sequence
  Description of Artificial Sequence: Synthetic oligonucleotide
uacauaauucaggucuauu

SEQ ID NO: 724298 - RNA, 19 nt, Artificial Sequence
  Description of Artificial Sequence: Synthetic oligonucleotide
caguacgucauugcagaug

SEQ ID NO: 724299 - RNA, 19 nt, Artificial Sequence
  Description of Artificial Sequence: Synthetic oligonucleotide
uaucuguggucaugaacuu

SEQ ID NO: 724300 - RNA, 19 nt, Artificial Sequence
  Description of Artificial Sequence: Synthetic oligonucleotide
cgaugcuggagauaacacg

SEQ ID NO: 724301 - RNA, 19 nt, Artificial Sequence
  Description of Artificial Sequence: Synthetic oligonucleotide
gauacaaauaccagcuguu

SEQ ID NO: 724302 - RNA, 19 nt, Artificial Sequence
  Description of Artificial Sequence: Synthetic oligonucleotide
agauuaucccugaguagcu

SEQ ID NO: 724303 - RNA, 19 nt, Artificial Sequence
  Description of Artificial Sequence: Synthetic oligonucleotide
gcgcuaacaagcauuauca

SEQ ID NO: 724304 - RNA, 19 nt, Artificial Sequence
  Description of Artificial Sequence: Synthetic oligonucleotide
cuguuacagccuucauagc

SEQ ID NO: 724305 - RNA, 19 nt, Artificial Sequence
  Description of Artificial Sequence: Synthetic oligonucleotide
acacgccaggaagaacggc

SEQ ID NO: 724306 - RNA, 19 nt, Artificial Sequence
  Description of Artificial Sequence: Synthetic oligonucleotide
aaagcacgacagacauuag

SEQ ID NO: 724307 - RNA, 19 nt, Artificial Sequence
  Description of Artificial Sequence: Synthetic oligonucleotide
agaucuguuuucacaaguu

SEQ ID NO: 724308 - RNA, 19 nt, Artificial Sequence
  Description of Artificial Sequence: Synthetic oligonucleotide
auuccguggaggacuguag

SEQ ID NO: 724309 - RNA, 19 nt, Artificial Sequence
  Description of Artificial Sequence: Synthetic oligonucleotide
cuaucuucucacgguacuc

SEQ ID NO: 724310 - RNA, 19 nt, Artificial Sequence
  Description of Artificial Sequence: Synthetic oligonucleotide
aaccucagaaagauaccua

SEQ ID NO: 724311 - RNA, 19 nt, Artificial Sequence
  Description of Artificial Sequence: Synthetic oligonucleotide
gaaaugccguggcauuuaa

SEQ ID NO: 724312 - RNA, 19 nt, Artificial Sequence
  Description of Artificial Sequence: Synthetic oligonucleotide
aguuaccaugaguuaccaa

SEQ ID NO: 724313 - RNA, 19 nt, Artificial Sequence
  Description of Artificial Sequence: Synthetic oligonucleotide
guccugacaucacaacgga

SEQ ID NO: 724314 - RNA, 19 nt, Artificial Sequence
  Description of Artificial Sequence: Synthetic oligonucleotide
ucaugucccuguucuguua

SEQ ID NO: 724315 - RNA, 19 nt, Artificial Sequence
  Description of Artificial Sequence: Synthetic oligonucleotide
uggguuacagggucuuguu

SEQ ID NO: 724316 - RNA, 19 nt, Artificial Sequence
  Description of Artificial Sequence: Synthetic oligonucleotide
ggauauaauguggaggaua

SEQ ID NO: 724317 - RNA, 19 nt, Artificial Sequence
  Description of Artificial Sequence: Synthetic oligonucleotide
uuguacuuucagugacuau

SEQ ID NO: 724318 - RNA, 19 nt, Artificial Sequence
  Description of Artificial Sequence: Synthetic oligonucleotide
caacggacucucuacaacu

SEQ ID NO: 724319 - RNA, 19 nt, Artificial Sequence
  Description of Artificial Sequence: Synthetic oligonucleotide
cuacccggcucaggaaucg

SEQ ID NO: 724320 - RNA, 19 nt, Artificial Sequence
  Description of Artificial Sequence: Synthetic oligonucleotide
cugaucaauaagaccucaa

SEQ ID NO: 724321 - RNA, 19 nt, Artificial Sequence
  Description of Artificial Sequence: Synthetic oligonucleotide
gggaagaccuggucacagg

SEQ ID NO: 724322 - RNA, 19 nt, Artificial Sequence
  Description of Artificial Sequence: Synthetic oligonucleotide
acgccaggaagaacggcgg

SEQ ID NO: 724323 - RNA, 19 nt, Artificial Sequence
  Description of Artificial Sequence: Synthetic oligonucleotide
auacauaauucaggucuau

SEQ ID NO: 724324 - RNA, 19 nt, Artificial Sequence
  Description of Artificial Sequence: Synthetic oligonucleotide
cuauuguaguguccaugca

SEQ ID NO: 724325 - RNA, 19 nt, Artificial Sequence
  Description of Artificial Sequence: Synthetic oligonucleotide
ugcagauaucuguggucau

SEQ ID NO: 724326 - RNA, 19 nt, Artificial Sequence
  Description of Artificial Sequence: Synthetic oligonucleotide
gggugauacugugagacuc

SEQ ID NO: 724327 - RNA, 19 nt, Artificial Sequence
  Description of Artificial Sequence: Synthetic oligonucleotide
accaaacucagggugccaa

SEQ ID NO: 724328 - RNA, 19 nt, Artificial Sequence
  Description of Artificial Sequence: Synthetic oligonucleotide
aacggacucucuacaacuu

SEQ ID NO: 724329 - RNA, 19 nt, Artificial Sequence
  Description of Artificial Sequence: Synthetic oligonucleotide
aagucgaauugggugugua

SEQ ID NO: 724330 - RNA, 19 nt, Artificial Sequence
  Description of Artificial Sequence: Synthetic oligonucleotide
gcuggagauaacacgccag

SEQ ID NO: 724331 - RNA, 19 nt, Artificial Sequence
  Description of Artificial Sequence: Synthetic oligonucleotide
acccggcucaggaaucggc

SEQ ID NO: 724332 - RNA, 19 nt, Artificial Sequence
  Description of Artificial Sequence: Synthetic oligonucleotide
aacagcccauacugaucaa

SEQ ID NO: 724333 - RNA, 19 nt, Artificial Sequence
  Description of Artificial Sequence: Synthetic oligonucleotide
ucucacccuaaguccugac

SEQ ID NO: 724334 - RNA, 19 nt, Artificial Sequence
  Description of Artificial Sequence: Synthetic oligonucleotide
acggacucucuacaacuuu

SEQ ID NO: 724335 - RNA, 19 nt, Artificial Sequence
  Description of Artificial Sequence: Synthetic oligonucleotide
aaucagugcaugaguucuu

SEQ ID NO: 724336 - RNA, 19 nt, Artificial Sequence
  Description of Artificial Sequence: Synthetic oligonucleotide
uggucauuccguggaggac

SEQ ID NO: 724337 - RNA, 19 nt, Artificial Sequence
  Description of Artificial Sequence: Synthetic oligonucleotide
acucuacggcuacauggaa

SEQ ID NO: 724338 - RNA, 19 nt, Artificial Sequence
  Description of Artificial Sequence: Synthetic oligonucleotide
gcgggcaccuaccacauuc

SEQ ID NO: 724339 - RNA, 19 nt, Artificial Sequence
  Description of Artificial Sequence: Synthetic oligonucleotide
gcacgacagacauuaguuc

SEQ ID NO: 724340 - RNA, 19 nt, Artificial Sequence
  Description of Artificial Sequence: Synthetic oligonucleotide
caaaggcgcuuccgggaag

SEQ ID NO: 724341 - RNA, 19 nt, Artificial Sequence
  Description of Artificial Sequence: Synthetic oligonucleotide
auggacucuacggcuacau

SEQ ID NO: 724342 - RNA, 19 nt, Artificial Sequence
  Description of Artificial Sequence: Synthetic oligonucleotide
cacaacggacucucuacaa

SEQ ID NO: 724343 - RNA, 19 nt, Artificial Sequence
  Description of Artificial Sequence: Synthetic oligonucleotide
gccguuuuggccaggcugc

SEQ ID NO: 724344 - RNA, 19 nt, Artificial Sequence
  Description of Artificial Sequence: Synthetic oligonucleotide
ggcauuuaagggaccaguc

SEQ ID NO: 724345 - RNA, 19 nt, Artificial Sequence
  Description of Artificial Sequence: Synthetic oligonucleotide
gaccggagcugcaguggcg

SEQ ID NO: 724346 - RNA, 19 nt, Artificial Sequence
  Description of Artificial Sequence: Synthetic oligonucleotide
gucauuccguggaggacug

SEQ ID NO: 724347 - RNA, 19 nt, Artificial Sequence
  Description of Artificial Sequence: Synthetic oligonucleotide
caugcaacuucccuggguu

SEQ ID NO: 724348 - RNA, 19 nt, Artificial Sequence
  Description of Artificial Sequence: Synthetic oligonucleotide
aucagugcaugaguucuuu

SEQ ID NO: 724349 - RNA, 19 nt, Artificial Sequence
  Description of Artificial Sequence: Synthetic oligonucleotide
guaagagcuuugcuaaguu

SEQ ID NO: 724350 - RNA, 19 nt, Artificial Sequence
  Description of Artificial Sequence: Synthetic oligonucleotide
ggauacuaagaaagcagaa

SEQ ID NO: 724351 - RNA, 19 nt, Artificial Sequence
  Description of Artificial Sequence: Synthetic oligonucleotide
gaggggugauacugugaga

SEQ ID NO: 724352 - RNA, 19 nt, Artificial Sequence
  Description of Artificial Sequence: Synthetic oligonucleotide
uaucgcacaaagggauaua

SEQ ID NO: 724353 - RNA, 19 nt, Artificial Sequence
  Description of Artificial Sequence: Synthetic oligonucleotide
guagcugcaugaucagggu

SEQ ID NO: 724354 - RNA, 19 nt, Artificial Sequence
  Description of Artificial Sequence: Synthetic oligonucleotide
gcaaaguuaccaugaguua

SEQ ID NO: 724355 - RNA, 19 nt, Artificial Sequence
  Description of Artificial Sequence: Synthetic oligonucleotide
gcauuuaagggaccagucu

SEQ ID NO: 724356 - RNA, 19 nt, Artificial Sequence
  Description of Artificial Sequence: Synthetic oligonucleotide
cagcccaauuaucagccaa

SEQ ID NO: 724357 - RNA, 19 nt, Artificial Sequence
  Description of Artificial Sequence: Synthetic oligonucleotide
caggcgcuaacaagcauua

SEQ ID NO: 724358 - RNA, 19 nt, Artificial Sequence
  Description of Artificial Sequence: Synthetic oligonucleotide
ccuaaguccugacaucaca

SEQ ID NO: 724359 - RNA, 19 nt, Artificial Sequence
  Description of Artificial Sequence: Synthetic oligonucleotide
uagcgagcaaaggcgcuuc

SEQ ID NO: 724360 - RNA, 19 nt, Artificial Sequence
  Description of Artificial Sequence: Synthetic oligonucleotide
augcaacuucccuggguua

SEQ ID NO: 724361 - RNA, 19 nt, Artificial Sequence
  Description of Artificial Sequence: Synthetic oligonucleotide
acaugugguaugagcggga

SEQ ID NO: 724362 - RNA, 19 nt, Artificial Sequence
  Description of Artificial Sequence: Synthetic oligonucleotide
gcgacugcgucuuccccag

SEQ ID NO: 724363 - RNA, 19 nt, Artificial Sequence
  Description of Artificial Sequence: Synthetic oligonucleotide
gaacggcgggcaccuacca

SEQ ID NO: 724364 - RNA, 19 nt, Artificial Sequence
  Description of Artificial Sequence: Synthetic oligonucleotide
ugguaugagcgggaccuuu

SEQ ID NO: 724365 - RNA, 19 nt, Artificial Sequence
  Description of Artificial Sequence: Synthetic oligonucleotide
uugcuagacuuaggcugug

SEQ ID NO: 724366 - RNA, 19 nt, Artificial Sequence
  Description of Artificial Sequence: Synthetic oligonucleotide
ggaacuaagcuggaugagu

SEQ ID NO: 724367 - RNA, 19 nt, Artificial Sequence
  Description of Artificial Sequence: Synthetic oligonucleotide
aucucacccuaaguccuga

SEQ ID NO: 724368 - RNA, 19 nt, Artificial Sequence
  Description of Artificial Sequence: Synthetic oligonucleotide
aggcgcuuccgggaagcuc

SEQ ID NO: 724369 - RNA, 19 nt, Artificial Sequence
  Description of Artificial Sequence: Synthetic oligonucleotide
uguuuaucccagggaccau

SEQ ID NO: 724370 - RNA, 19 nt, Artificial Sequence
  Description of Artificial Sequence: Synthetic oligonucleotide
ggcgacugcgucuucccca

SEQ ID NO: 724371 - RNA, 19 nt, Artificial Sequence
  Description of Artificial Sequence: Synthetic oligonucleotide
cucaaccacaggcaaaguu

SEQ ID NO: 724372 - RNA, 19 nt, Artificial Sequence
  Description of Artificial Sequence: Synthetic oligonucleotide
acgguacucuuugcccauc

SEQ ID NO: 724373 - RNA, 19 nt, Artificial Sequence
  Description of Artificial Sequence: Synthetic oligonucleotide
ggucauuccguggaggacu

SEQ ID NO: 724374 - RNA, 19 nt, Artificial Sequence
  Description of Artificial Sequence: Synthetic oligonucleotide
guacuuucagugacuauuu

SEQ ID NO: 724375 - RNA, 19 nt, Artificial Sequence
  Description of Artificial Sequence: Synthetic oligonucleotide
cucuacggcuacauggaau

SEQ ID NO: 724376 - RNA, 19 nt, Artificial Sequence
  Description of Artificial Sequence: Synthetic oligonucleotide
ggcgaccggagcugcagug

SEQ ID NO: 724377 - RNA, 19 nt, Artificial Sequence
  Description of Artificial Sequence: Synthetic oligonucleotide
gcgagcaaaggcgcuuccg

SEQ ID NO: 724378 - RNA, 19 nt, Artificial Sequence
  Description of Artificial Sequence: Synthetic oligonucleotide
ggcaacagcccauacugau

SEQ ID NO: 724379 - RNA, 19 nt, Artificial Sequence
  Description of Artificial Sequence: Synthetic oligonucleotide
cauuccguggaggacugua

SEQ ID NO: 724380 - RNA, 19 nt, Artificial Sequence
  Description of Artificial Sequence: Synthetic oligonucleotide
ggagaguuuagaaucucau

SEQ ID NO: 724381 - RNA, 19 nt, Artificial Sequence
  Description of Artificial Sequence: Synthetic oligonucleotide
cauugggaaugagauauuu

SEQ ID NO: 724382 - RNA, 19 nt, Artificial Sequence
  Description of Artificial Sequence: Synthetic oligonucleotide
gcaaaggcgcuuccgggaa

SEQ ID NO: 724383 - RNA, 19 nt, Artificial Sequence
  Description of Artificial Sequence: Synthetic oligonucleotide
gcaacagcccauacugauc

SEQ ID NO: 724384 - RNA, 19 nt, Artificial Sequence
  Description of Artificial Sequence: Synthetic oligonucleotide
gcgaccggagcugcagugg

SEQ ID NO: 724385 - RNA, 19 nt, Artificial Sequence
  Description of Artificial Sequence: Synthetic oligonucleotide
ccauggucauuccguggag

SEQ ID NO: 724386 - RNA, 19 nt, Artificial Sequence
  Description of Artificial Sequence: Synthetic oligonucleotide
aggcugcauuucuuucuua

SEQ ID NO: 724387 - RNA, 19 nt, Artificial Sequence
  Description of Artificial Sequence: Synthetic oligonucleotide
gccucuaucuucucacggu

SEQ ID NO: 724388 - RNA, 19 nt, Artificial Sequence
  Description of Artificial Sequence: Synthetic oligonucleotide
gagggcggcgacugcgucu

SEQ ID NO: 724389 - RNA, 19 nt, Artificial Sequence
  Description of Artificial Sequence: Synthetic oligonucleotide
ccugguuuucugacgucca

SEQ ID NO: 724390 - RNA, 19 nt, Artificial Sequence
  Description of Artificial Sequence: Synthetic oligonucleotide
guucgaugcuggagauaac

SEQ ID NO: 724391 - RNA, 19 nt, Artificial Sequence
  Description of Artificial Sequence: Synthetic oligonucleotide
ucauuccguggaggacugu

SEQ ID NO: 724392 - RNA, 19 nt, Artificial Sequence
  Description of Artificial Sequence: Synthetic oligonucleotide
cgaaagucaacauucgauu

SEQ ID NO: 724393 - RNA, 19 nt, Artificial Sequence
  Description of Artificial Sequence: Synthetic oligonucleotide
gacucuucauugagcguau

SEQ ID NO: 724394 - RNA, 19 nt, Artificial Sequence
  Description of Artificial Sequence: Synthetic oligonucleotide
gcggcgacugcgucuuccc

SEQ ID NO: 724395 - RNA, 19 nt, Artificial Sequence
  Description of Artificial Sequence: Synthetic oligonucleotide
ggagcacacugcuguagua

SEQ ID NO: 724396 - RNA, 19 nt, Artificial Sequence
  Description of Artificial Sequence: Synthetic oligonucleotide
gcaucucacccuaaguccu

SEQ ID NO: 724397 - RNA, 19 nt, Artificial Sequence
  Description of Artificial Sequence: Synthetic oligonucleotide
auucagcgccaggccaagu

SEQ ID NO: 724398 - RNA, 19 nt, Artificial Sequence
  Description of Artificial Sequence: Synthetic oligonucleotide
gcuguguagcauugggaau

SEQ ID NO: 724399 - RNA, 19 nt, Artificial Sequence
  Description of Artificial Sequence: Synthetic oligonucleotide
cgaccggagcugcaguggc

SEQ ID NO: 724400 - RNA, 19 nt, Artificial Sequence
  Description of Artificial Sequence: Synthetic oligonucleotide
gcuacccggcucaggaauc

SEQ ID NO: 724401 - RNA, 19 nt, Artificial Sequence
  Description of Artificial Sequence: Synthetic oligonucleotide
ggggugauacugugagacu

SEQ ID NO: 724402 - RNA, 19 nt, Artificial Sequence
  Description of Artificial Sequence: Synthetic oligonucleotide
gucaagguagaggggugau

SEQ ID NO: 724403 - RNA, 19 nt, Artificial Sequence
  Description of Artificial Sequence: Synthetic oligonucleotide
gcaacuucccuggguuaca

SEQ ID NO: 724404 - RNA, 19 nt, Artificial Sequence
  Description of Artificial Sequence: Synthetic oligonucleotide
guacgucauugcagauguc

SEQ ID NO: 724405 - RNA, 19 nt, Artificial Sequence
  Description of Artificial Sequence: Synthetic oligonucleotide
aggcgcuaacaagcauuau

SEQ ID NO: 724406 - RNA, 19 nt, Artificial Sequence
  Description of Artificial Sequence: Synthetic oligonucleotide
ggauacggagugacagcaa

SEQ ID NO: 724407 - RNA, 19 nt, Artificial Sequence
  Description of Artificial Sequence: Synthetic oligonucleotide
ggguuacagggucuuguuu

SEQ ID NO: 724408 - RNA, 19 nt, Artificial Sequence
  Description of Artificial Sequence: Synthetic oligonucleotide
ggcggcuacccggcucagg

SEQ ID NO: 724409 - RNA, 19 nt, Artificial Sequence
  Description of Artificial Sequence: Synthetic oligonucleotide
cuguucgaugcuggagaua

SEQ ID NO: 724410 - RNA, 19 nt, Artificial Sequence
  Description of Artificial Sequence: Synthetic oligonucleotide
cacaggcgcuaacaagcau

SEQ ID NO: 724411 - RNA, 19 nt, Artificial Sequence
  Description of Artificial Sequence: Synthetic oligonucleotide
caagucgaauugggugugu

SEQ ID NO: 724412 - RNA, 19 nt, Artificial Sequence
  Description of Artificial Sequence: Synthetic oligonucleotide
gguaagccugcugggaguu

SEQ ID NO: 724413 - RNA, 19 nt, Artificial Sequence
  Description of Artificial Sequence: Synthetic oligonucleotide
gguaugagcgggaccuuuu

SEQ ID NO: 724414 - RNA, 19 nt, Artificial Sequence
  Description of Artificial Sequence: Synthetic oligonucleotide
ggaguuugacacagugguu

SEQ ID NO: 724415 - RNA, 19 nt, Artificial Sequence
  Description of Artificial Sequence: Synthetic oligonucleotide
ccaugcaacuucccugggu

SEQ ID NO: 724416 - RNA, 19 nt, Artificial Sequence
  Description of Artificial Sequence: Synthetic oligonucleotide
cggcgacugcgucuucccc

SEQ ID NO: 724417 - RNA, 19 nt, Artificial Sequence
  Description of Artificial Sequence: Synthetic oligonucleotide
guaagccugcugggaguuu

SEQ ID NO: 724418 - RNA, 19 nt, Artificial Sequence
  Description of Artificial Sequence: Synthetic oligonucleotide
ccaguacgucauugcagau

SEQ ID NO: 724419 - RNA, 19 nt, Artificial Sequence
  Description of Artificial Sequence: Synthetic oligonucleotide
cggcuacccggcucaggaa

SEQ ID NO: 724420 - RNA, 19 nt, Artificial Sequence
  Description of Artificial Sequence: Synthetic oligonucleotide
ggcgggcaccuaccacauu

SEQ ID NO: 724421 - RNA, 19 nt, Artificial Sequence
  Description of Artificial Sequence: Synthetic oligonucleotide
cggcgggcaccuaccacau

SEQ ID NO: 724422 - RNA, 19 nt, Artificial Sequence
  Description of Artificial Sequence: Synthetic oligonucleotide
cggcggcuacccggcucag

SEQ ID NO: 724423 - RNA, 19 nt, Artificial Sequence
  Description of Artificial Sequence: Synthetic oligonucleotide
cggcgaccggagcugcagu

SEQ ID NO: 724424 - RNA, 19 nt, Artificial Sequence
  Description of Artificial Sequence: Synthetic oligonucleotide
ucauuuaugaaauuaaugg

SEQ ID NO: 724425 - RNA, 19 nt, Artificial Sequence
  Description of Artificial Sequence: Synthetic oligonucleotide
uuuaguagagacaacaccc

SEQ ID NO: 724426 - RNA, 19 nt, Artificial Sequence
  Description of Artificial Sequence: Synthetic oligonucleotide
aaguauaaguucuacauug

SEQ ID NO: 724427 - RNA, 19 nt, Artificial Sequence
  Description of Artificial Sequence: Synthetic oligonucleotide
ucuagcuuaacuaaaagcu

SEQ ID NO: 724428 - RNA, 19 nt, Artificial Sequence
  Description of Artificial Sequence: Synthetic oligonucleotide
aguuuuaguaccucaaccc

SEQ ID NO: 724429 - RNA, 19 nt, Artificial Sequence
  Description of Artificial Sequence: Synthetic oligonucleotide
cuuguuaacacuuuucucc

SEQ ID NO: 724430 - RNA, 19 nt, Artificial Sequence
  Description of Artificial Sequence: Synthetic oligonucleotide
agaacgaaaggguaguucc

SEQ ID NO: 724431 - RNA, 19 nt, Artificial Sequence
  Description of Artificial Sequence: Synthetic oligonucleotide
uaaauauugagggagaagc

SEQ ID NO: 724432 - RNA, 19 nt, Artificial Sequence
  Description of Artificial Sequence: Synthetic oligonucleotide
guuaugagaaaauauguag

SEQ ID NO: 724433 - RNA, 19 nt, Artificial Sequence
  Description of Artificial Sequence: Synthetic oligonucleotide
ugaucuaaaucccaggaag

SEQ ID NO: 724434 - RNA, 19 nt, Artificial Sequence
  Description of Artificial Sequence: Synthetic oligonucleotide
accauuaacaaccgaauac

SEQ ID NO: 724435 - RNA, 19 nt, Artificial Sequence
  Description of Artificial Sequence: Synthetic oligonucleotide
ugaugugcaacaaacaaca

SEQ ID NO: 724436 - RNA, 19 nt, Artificial Sequence
  Description of Artificial Sequence: Synthetic oligonucleotide
agagaaugugaucaaaccg

SEQ ID NO: 724437 - RNA, 19 nt, Artificial Sequence
  Description of Artificial Sequence: Synthetic oligonucleotide
uuagccaagaucuuggcug

SEQ ID NO: 724438 - RNA, 19 nt, Artificial Sequence
  Description of Artificial Sequence: Synthetic oligonucleotide
aauaaucaguacaacuccc

SEQ ID NO: 724439 - RNA, 19 nt, Artificial Sequence
  Description of Artificial Sequence: Synthetic oligonucleotide
uguacuuuccaugauaagc

SEQ ID NO: 724440 - RNA, 19 nt, Artificial Sequence
  Description of Artificial Sequence: Synthetic oligonucleotide
uucguuaaugguaaguggc

SEQ ID NO: 724441 - RNA, 19 nt, Artificial Sequence
  Description of Artificial Sequence: Synthetic oligonucleotide
acaacuuagguuugauugc

SEQ ID NO: 724442 - RNA, 19 nt, Artificial Sequence
  Description of Artificial Sequence: Synthetic oligonucleotide
uguaguuuaagucaucaua

SEQ ID NO: 724443 - RNA, 19 nt, Artificial Sequence
  Description of Artificial Sequence: Synthetic oligonucleotide
aaggcuuaacaaucgcagc

SEQ ID NO: 724444 - RNA, 19 nt, Artificial Sequence
  Description of Artificial Sequence: Synthetic oligonucleotide
aguugugaccacaagaagc

SEQ ID NO: 724445 - RNA, 19 nt, Artificial Sequence
  Description of Artificial Sequence: Synthetic oligonucleotide
  modified_base (2)..(2): a, c, u, g, unknown or other
gnaaccaucagcaucacca

SEQ ID NO: 724446 - RNA, 19 nt, Artificial Sequence
  Description of Artificial Sequence: Synthetic oligonucleotide
auuagucaaugacaauugc

SEQ ID NO: 724447 - RNA, 19 nt, Artificial Sequence
  Description of Artificial Sequence: Synthetic oligonucleotide
  modified_base (14)..(14): a, c, u, g, unknown or other
ucuuggacugacunuuggg

SEQ ID NO: 724448 - RNA, 19 nt, Artificial Sequence
  Description of Artificial Sequence: Synthetic oligonucleotide
ucuugcaucaccuuggaau

SEQ ID NO: 724449 - RNA, 19 nt, Artificial Sequence
  Description of Artificial Sequence: Synthetic oligonucleotide
aaggguaguuccaagcucc

SEQ ID NO: 724450 - RNA, 19 nt, Artificial Sequence
  Description of Artificial Sequence: Synthetic oligonucleotide
uucuagcuuaacuaaaagc

SEQ ID NO: 724451 - RNA, 19 nt, Artificial Sequence
  Description of Artificial Sequence: Synthetic oligonucleotide
cacuuaagcaacuacuugc

SEQ ID NO: 724452 - RNA, 19 nt, Artificial Sequence
  Description of Artificial Sequence: Synthetic oligonucleotide
uuucguuaaugguaagugg

SEQ ID NO: 724453 - RNA, 19 nt, Artificial Sequence
  Description of Artificial Sequence: Synthetic oligonucleotide
aguaggucaagucuugauc

SEQ ID NO: 724454 - RNA, 19 nt, Artificial Sequence
  Description of Artificial Sequence: Synthetic oligonucleotide
uuagagaaugugaucaaac

SEQ ID NO: 724455 - RNA, 19 nt, Artificial Sequence
  Description of Artificial Sequence: Synthetic oligonucleotide
uguaacacgggcuuuuccc

SEQ ID NO: 724456 - RNA, 19 nt, Artificial Sequence
  Description of Artificial Sequence: Synthetic oligonucleotide
  modified_base (13)..(13): a, c, u, g, unknown or other
cuuggacugacunuugggg

SEQ ID NO: 724457 - RNA, 19 nt, Artificial Sequence
  Description of Artificial Sequence: Synthetic oligonucleotide
cuguuaaccucuuaaagug

SEQ ID NO: 724458 - RNA, 19 nt, Artificial Sequence
  Description of Artificial Sequence: Synthetic oligonucleotide
agaagcuuagccaagaucu

SEQ ID NO: 724459 - RNA, 19 nt, Artificial Sequence
  Description of Artificial Sequence: Synthetic oligonucleotide
aagaacuucgcccaaccga

SEQ ID NO: 724460 - RNA, 19 nt, Artificial Sequence
  Description of Artificial Sequence: Synthetic oligonucleotide
ugacgaagauugaugaucc

SEQ ID NO: 724461 - RNA, 19 nt, Artificial Sequence
  Description of Artificial Sequence: Synthetic oligonucleotide
aagugacgaagauugauga

SEQ ID NO: 724462 - RNA, 19 nt, Artificial Sequence
  Description of Artificial Sequence: Synthetic oligonucleotide
aucaguauaauguguaagu

SEQ ID NO: 724463 - RNA, 19 nt, Artificial Sequence
  Description of Artificial Sequence: Synthetic oligonucleotide
uguuucgucaaucacccgu

SEQ ID NO: 724464 - RNA, 19 nt, Artificial Sequence
  Description of Artificial Sequence: Synthetic oligonucleotide
gauguuucgucaaucaccc

SEQ ID NO: 724465 - RNA, 19 nt, Artificial Sequence
  Description of Artificial Sequence: Synthetic oligonucleotide
gauuuggugagacauguuc

SEQ ID NO: 724466 - RNA, 19 nt, Artificial Sequence
  Description of Artificial Sequence: Synthetic oligonucleotide
ugaugauccuuucauaauc

SEQ ID NO: 724467 - RNA, 19 nt, Artificial Sequence
  Description of Artificial Sequence: Synthetic oligonucleotide
uugagggagaagcuuagcc

SEQ ID NO: 724468 - RNA, 19 nt, Artificial Sequence
  Description of Artificial Sequence: Synthetic oligonucleotide
uguuaugagaaaauaugua

SEQ ID NO: 724469 - RNA, 19 nt, Artificial Sequence
  Description of Artificial Sequence: Synthetic oligonucleotide
aacucuguuaaccucuuaa

SEQ ID NO: 724470 - RNA, 19 nt, Artificial Sequence
  Description of Artificial Sequence: Synthetic oligonucleotide
  modified_base (8)..(8): a, c, u, g, unknown or other
aagcaugnaaccaucagca

SEQ ID NO: 724471 - RNA, 19 nt, Artificial Sequence
  Description of Artificial Sequence: Synthetic oligonucleotide
gaaggcuuaacaaucgcag

SEQ ID NO: 724472 - RNA, 19 nt, Artificial Sequence
  Description of Artificial Sequence: Synthetic oligonucleotide
aagaccuaaccucacuucu

SEQ ID NO: 724473 - RNA, 19 nt, Artificial Sequence
  Description of Artificial Sequence: Synthetic oligonucleotide
aguaaguaugguuggagcu

SEQ ID NO: 724474 - RNA, 19 nt, Artificial Sequence
  Description of Artificial Sequence: Synthetic oligonucleotide
  modified_base (9)..(9): a, c, u, g, unknown or other
caagcaugnaaccaucagc

SEQ ID NO: 724475 - RNA, 19 nt, Artificial Sequence
  Description of Artificial Sequence: Synthetic oligonucleotide
aguaccucaaccccuaaca

SEQ ID NO: 724476 - RNA, 19 nt, Artificial Sequence
  Description of Artificial Sequence: Synthetic oligonucleotide
aaagugacgaagauugaug

SEQ ID NO: 724477 - RNA, 19 nt, Artificial Sequence
  Description of Artificial Sequence: Synthetic oligonucleotide
acaucaguaaguaugguug

SEQ ID NO: 724478 - RNA, 19 nt, Artificial Sequence
  Description of Artificial Sequence: Synthetic oligonucleotide
caaagauggcuauacauuc

SEQ ID NO: 724479 - RNA, 19 nt, Artificial Sequence
  Description of Artificial Sequence: Synthetic oligonucleotide
uuguuaacacuuuucuccc

SEQ ID NO: 724480 - RNA, 19 nt, Artificial Sequence
  Description of Artificial Sequence: Synthetic oligonucleotide
uauucuagcuuaacuaaaa

SEQ ID NO: 724481 - RNA, 19 nt, Artificial Sequence
  Description of Artificial Sequence: Synthetic oligonucleotide
uuuuaguaccucaaccccu

SEQ ID NO: 724482 - RNA, 19 nt, Artificial Sequence
  Description of Artificial Sequence: Synthetic oligonucleotide
uuaaccucuuaaagugacg

SEQ ID NO: 724483 - RNA, 19 nt, Artificial Sequence
  Description of Artificial Sequence: Synthetic oligonucleotide
aaucaguacaacucccaga

SEQ ID NO: 724484 - RNA, 19 nt, Artificial Sequence
  Description of Artificial Sequence: Synthetic oligonucleotide
agagacaacacccuucaga

SEQ ID NO: 724485 - RNA, 19 nt, Artificial Sequence
  Description of Artificial Sequence: Synthetic oligonucleotide
caagcaaacucuguuaacc

SEQ ID NO: 724486 - RNA, 19 nt, Artificial Sequence
  Description of Artificial Sequence: Synthetic oligonucleotide
aaaaguccuucaccguuuc

SEQ ID NO: 724487 - RNA, 19 nt, Artificial Sequence
  Description of Artificial Sequence: Synthetic oligonucleotide
ugggugaugugcaacaaac

SEQ ID NO: 724488 - RNA, 19 nt, Artificial Sequence
  Description of Artificial Sequence: Synthetic oligonucleotide
aucuaaaucccaggaaggc

SEQ ID NO: 724489 - RNA, 19 nt, Artificial Sequence
  Description of Artificial Sequence: Synthetic oligonucleotide
gaugagaacgaaaggguag

SEQ ID NO: 724490 - RNA, 19 nt, Artificial Sequence
  Description of Artificial Sequence: Synthetic oligonucleotide
uuaggaucaacaucaguaa

SEQ ID NO: 724491 - RNA, 19 nt, Artificial Sequence
  Description of Artificial Sequence: Synthetic oligonucleotide
gacacuugagucucccugg

SEQ ID NO: 724492 - RNA, 19 nt, Artificial Sequence
  Description of Artificial Sequence: Synthetic oligonucleotide
agcuauguagcgugugacc

SEQ ID NO: 724493 - RNA, 19 nt, Artificial Sequence
  Description of Artificial Sequence: Synthetic oligonucleotide
ugacagguuauucagcaaa

SEQ ID NO: 724494 - RNA, 19 nt, Artificial Sequence
  Description of Artificial Sequence: Synthetic oligonucleotide
ugacacuugagucucccug

SEQ ID NO: 724495 - RNA, 19 nt, Artificial Sequence
  Description of Artificial Sequence: Synthetic oligonucleotide
aauuaggaucaacaucagu

SEQ ID NO: 724496 - RNA, 19 nt, Artificial Sequence
  Description of Artificial Sequence: Synthetic oligonucleotide
uuuagcccuuuuaauaaac

SEQ ID NO: 724497 - RNA, 19 nt, Artificial Sequence
  Description of Artificial Sequence: Synthetic oligonucleotide
uagcccuuuuaauaaacag

SEQ ID NO: 724498 - RNA, 19 nt, Artificial Sequence
  Description of Artificial Sequence: Synthetic oligonucleotide
aagcaaacucuguuaaccu

SEQ ID NO: 724499 - RNA, 19 nt, Artificial Sequence
  Description of Artificial Sequence: Synthetic oligonucleotide
uguguaaguauucuagcuu

SEQ ID NO: 724500 - RNA, 19 nt, Artificial Sequence
  Description of Artificial Sequence: Synthetic oligonucleotide
aagauugaugauccuuuca

SEQ ID NO: 724501 - RNA, 19 nt, Artificial Sequence
  Description of Artificial Sequence: Synthetic oligonucleotide
uaacaaucgcagcauuucc

SEQ ID NO: 724502 - RNA, 19 nt, Artificial Sequence
  Description of Artificial Sequence: Synthetic oligonucleotide
gaggacauagucuggagca

SEQ ID NO: 724503 - RNA, 19 nt, Artificial Sequence
  Description of Artificial Sequence: Synthetic oligonucleotide
ucaggagacucuuuuauau

SEQ ID NO: 724504 - RNA, 19 nt, Artificial Sequence
  Description of Artificial Sequence: Synthetic oligonucleotide
uuaguagagacaacacccu

SEQ ID NO: 724505 - RNA, 19 nt, Artificial Sequence
  Description of Artificial Sequence: Synthetic oligonucleotide
agcuuguuaacacuuuucu

SEQ ID NO: 724506 - RNA, 19 nt, Artificial Sequence
  Description of Artificial Sequence: Synthetic oligonucleotide
uagcuuaacuaaaagcuau

SEQ ID NO: 724507 - RNA, 19 nt, Artificial Sequence
  Description of Artificial Sequence: Synthetic oligonucleotide
aaucgcagcauuuccugca

SEQ ID NO: 724508 - RNA, 19 nt, Artificial Sequence
  Description of Artificial Sequence: Synthetic oligonucleotide
ucgucaaucacccguuuga

SEQ ID NO: 724509 - RNA, 19 nt, Artificial Sequence
  Description of Artificial Sequence: Synthetic oligonucleotide
aagcaaguuacauucucau

SEQ ID NO: 724510 - RNA, 19 nt, Artificial Sequence
  Description of Artificial Sequence: Synthetic oligonucleotide
ugucaauguaacacgggcu

SEQ ID NO: 724511 - RNA, 19 nt, Artificial Sequence
  Description of Artificial Sequence: Synthetic oligonucleotide
caguguucuagccucagcc

SEQ ID NO: 724512 - RNA, 19 nt, Artificial Sequence
  Description of Artificial Sequence: Synthetic oligonucleotide
auauguagagcgccagggg

SEQ ID NO: 724513 - RNA, 19 nt, Artificial Sequence
  Description of Artificial Sequence: Synthetic oligonucleotide
aguguuuccuguguuagag

SEQ ID NO: 724514 - RNA, 19 nt, Artificial Sequence
  Description of Artificial Sequence: Synthetic oligonucleotide
guuucguuaaugguaagug

SEQ ID NO: 724515 - RNA, 19 nt, Artificial Sequence
  Description of Artificial Sequence: Synthetic oligonucleotide
aagauggcuauacauucaa

SEQ ID NO: 724516 - RNA, 19 nt, Artificial Sequence
  Description of Artificial Sequence: Synthetic oligonucleotide
uguuaaccucuuaaaguga

SEQ ID NO: 724517 - RNA, 19 nt, Artificial Sequence
  Description of Artificial Sequence: Synthetic oligonucleotide
agcaaacucuguuaaccuc

SEQ ID NO: 724518 - RNA, 19 nt, Artificial Sequence
  Description of Artificial Sequence: Synthetic oligonucleotide
aaguuacauucucaucgag

SEQ ID NO: 724519 - RNA, 19 nt, Artificial Sequence
  Description of Artificial Sequence: Synthetic oligonucleotide
guuggagcuauguagcgug

SEQ ID NO: 724520 - RNA, 19 nt, Artificial Sequence
  Description of Artificial Sequence: Synthetic oligonucleotide
uuacauucucaucgaguag

SEQ ID NO: 724521 - RNA, 19 nt, Artificial Sequence
  Description of Artificial Sequence: Synthetic oligonucleotide
ugauaccucauacuuuagu

SEQ ID NO: 724522 - RNA, 19 nt, Artificial Sequence
  Description of Artificial Sequence: Synthetic oligonucleotide
aaucacccguuugaugagc

SEQ ID NO: 724523 - RNA, 19 nt, Artificial Sequence
  Description of Artificial Sequence: Synthetic oligonucleotide
aauauugagggagaagcuu

SEQ ID NO: 724524 - RNA, 19 nt, Artificial Sequence
  Description of Artificial Sequence: Synthetic oligonucleotide
cacuauccgauccuggagg

SEQ ID NO: 724525 - RNA, 19 nt, Artificial Sequence
  Description of Artificial Sequence: Synthetic oligonucleotide
auaaucaggagacucuuuu

SEQ ID NO: 724526 - RNA, 19 nt, Artificial Sequence
  Description of Artificial Sequence: Synthetic oligonucleotide
aguggcaacaacuuagguu

SEQ ID NO: 724527 - RNA, 19 nt, Artificial Sequence
  Description of Artificial Sequence: Synthetic oligonucleotide
gaagaacuucgcccaaccg

SEQ ID NO: 724528 - RNA, 19 nt, Artificial Sequence
  Description of Artificial Sequence: Synthetic oligonucleotide
ucguuaaugguaaguggca

SEQ ID NO: 724529 - RNA, 19 nt, Artificial Sequence
  Description of Artificial Sequence: Synthetic oligonucleotide
uuucuguccuucaagcaaa

SEQ ID NO: 724530 - RNA, 19 nt, Artificial Sequence
  Description of Artificial Sequence: Synthetic oligonucleotide
auuuuaugauuagucaaug

SEQ ID NO: 724531 - RNA, 19 nt, Artificial Sequence
  Description of Artificial Sequence: Synthetic oligonucleotide
ggucuaaauauugagggag

SEQ ID NO: 724532 - RNA, 19 nt, Artificial Sequence
  Description of Artificial Sequence: Synthetic oligonucleotide
uuuggcucaaacagugagu

SEQ ID NO: 724533 - RNA, 19 nt, Artificial Sequence
  Description of Artificial Sequence: Synthetic oligonucleotide
auguaacacgggcuuuucc

SEQ ID NO: 724534 - RNA, 19 nt, Artificial Sequence
  Description of Artificial Sequence: Synthetic oligonucleotide
uugaucuaaaucccaggaa

SEQ ID NO: 724535 - RNA, 19 nt, Artificial Sequence
  Description of Artificial Sequence: Synthetic oligonucleotide
agcaaguuacauucucauc

SEQ ID NO: 724536 - RNA, 19 nt, Artificial Sequence
  Description of Artificial Sequence: Synthetic oligonucleotide
uaucugagcuuguuaacac

SEQ ID NO: 724537 - RNA, 19 nt, Artificial Sequence
  Description of Artificial Sequence: Synthetic oligonucleotide
acaaucgcagcauuuccug

SEQ ID NO: 724538 - RNA, 19 nt, Artificial Sequence
  Description of Artificial Sequence: Synthetic oligonucleotide
caguaaguaugguuggagc

SEQ ID NO: 724539 - RNA, 19 nt, Artificial Sequence
  Description of Artificial Sequence: Synthetic oligonucleotide
uuaugaaauuaauggcuuc

SEQ ID NO: 724540 - RNA, 19 nt, Artificial Sequence
  Description of Artificial Sequence: Synthetic oligonucleotide
aggguuugaccacaacuuc

SEQ ID NO: 724541 - RNA, 19 nt, Artificial Sequence
  Description of Artificial Sequence: Synthetic oligonucleotide
cuugcccaguuuuaguacc

SEQ ID NO: 724542 - RNA, 19 nt, Artificial Sequence
  Description of Artificial Sequence: Synthetic oligonucleotide
uuuugauaccucauacuuu

SEQ ID NO: 724543 - RNA, 19 nt, Artificial Sequence
  Description of Artificial Sequence: Synthetic oligonucleotide
guaguuuaagucaucauaa

SEQ ID NO: 724544 - RNA, 19 nt, Artificial Sequence
  Description of Artificial Sequence: Synthetic oligonucleotide
aaauauugagggagaagcu

SEQ ID NO: 724545 - RNA, 19 nt, Artificial Sequence
  Description of Artificial Sequence: Synthetic oligonucleotide
ucuaaaucccaggaaggca

SEQ ID NO: 724546 - RNA, 19 nt, Artificial Sequence
  Description of Artificial Sequence: Synthetic oligonucleotide
uauccgauccuggagggag

SEQ ID NO: 724547 - RNA, 19 nt, Artificial Sequence
  Description of Artificial Sequence: Synthetic oligonucleotide
aucaccuuggaauuaggau

SEQ ID NO: 724548 - RNA, 19 nt, Artificial Sequence
  Description of Artificial Sequence: Synthetic oligonucleotide
augagcuuauuguuaugag

SEQ ID NO: 724549 - RNA, 19 nt, Artificial Sequence
  Description of Artificial Sequence: Synthetic oligonucleotide
ugauuugguuuugauaccu

SEQ ID NO: 724550 - RNA, 19 nt, Artificial Sequence
  Description of Artificial Sequence: Synthetic oligonucleotide
uuuaguaccucaaccccua

SEQ ID NO: 724551 - RNA, 19 nt, Artificial Sequence
  Description of Artificial Sequence: Synthetic oligonucleotide
gucacgguggaugaggcgg

SEQ ID NO: 724552 - RNA, 19 nt, Artificial Sequence
  Description of Artificial Sequence: Synthetic oligonucleotide
uucucacgaucauuuauga

SEQ ID NO: 724553 - RNA, 19 nt, Artificial Sequence
  Description of Artificial Sequence: Synthetic oligonucleotide
auaauguguaaguauucua

SEQ ID NO: 724554 - RNA, 19 nt, Artificial Sequence
  Description of Artificial Sequence: Synthetic oligonucleotide
agcaucaccagcccuccuc

SEQ ID NO: 724555 - RNA, 19 nt, Artificial Sequence
  Description of Artificial Sequence: Synthetic oligonucleotide
aagaucaguauaaugugua

SEQ ID NO: 724556 - RNA, 19 nt, Artificial Sequence
  Description of Artificial Sequence: Synthetic oligonucleotide
uucucaucgaguaggucaa

SEQ ID NO: 724557 - RNA, 19 nt, Artificial Sequence
  Description of Artificial Sequence: Synthetic oligonucleotide
ucaaugacaauugccacuu

SEQ ID NO: 724558 - RNA, 19 nt, Artificial Sequence
  Description of Artificial Sequence: Synthetic oligonucleotide
ugcacuauccgauccugga

SEQ ID NO: 724559 - RNA, 19 nt, Artificial Sequence
  Description of Artificial Sequence: Synthetic oligonucleotide
cuacuugcuacacaggcca

SEQ ID NO: 724560 - RNA, 19 nt, Artificial Sequence
  Description of Artificial Sequence: Synthetic oligonucleotide
acauagucuggagcaauac

SEQ ID NO: 724561 - RNA, 19 nt, Artificial Sequence
  Description of Artificial Sequence: Synthetic oligonucleotide
guagagacaacacccuuca

SEQ ID NO: 724562 - RNA, 19 nt, Artificial Sequence
  Description of Artificial Sequence: Synthetic oligonucleotide
gaaaauauguagagcgcca

SEQ ID NO: 724563 - RNA, 19 nt, Artificial Sequence
  Description of Artificial Sequence: Synthetic oligonucleotide
gauugcaguacaucuguaa

SEQ ID NO: 724564 - RNA, 19 nt, Artificial Sequence
  Description of Artificial Sequence: Synthetic oligonucleotide
guaacacgggcuuuucccc

SEQ ID NO: 724565 - RNA, 19 nt, Artificial Sequence
  Description of Artificial Sequence: Synthetic oligonucleotide
uauguagcgugugaccuca

SEQ ID NO: 724566 - RNA, 19 nt, Artificial Sequence
  Description of Artificial Sequence: Synthetic oligonucleotide
uccuuaaucuucugcacua

SEQ ID NO: 724567 - RNA, 19 nt, Artificial Sequence
  Description of Artificial Sequence: Synthetic oligonucleotide
uaaaaguccuucaccguuu

SEQ ID NO: 724568 - RNA, 19 nt, Artificial Sequence
  Description of Artificial Sequence: Synthetic oligonucleotide
  modified_base (3)..(3): a, c, u, g, unknown or other
ugnaaccaucagcaucacc

SEQ ID NO: 724569 - RNA, 19 nt, Artificial Sequence
  Description of Artificial Sequence: Synthetic oligonucleotide
aaagauggcuauacauuca

SEQ ID NO: 724570 - RNA, 19 nt, Artificial Sequence
  Description of Artificial Sequence: Synthetic oligonucleotide
ugcaucaccuuggaauuag

SEQ ID NO: 724571 - RNA, 19 nt, Artificial Sequence
  Description of Artificial Sequence: Synthetic oligonucleotide
aaccccuaacaggagcugg

SEQ ID NO: 724572 - RNA, 19 nt, Artificial Sequence
  Description of Artificial Sequence: Synthetic oligonucleotide
gaagauugaugauccuuuc

SEQ ID NO: 724573 - RNA, 19 nt, Artificial Sequence
  Description of Artificial Sequence: Synthetic oligonucleotide
guuaaccucuuaaagugac

SEQ ID NO: 724574 - RNA, 19 nt, Artificial Sequence
  Description of Artificial Sequence: Synthetic oligonucleotide
agcuuagccaagaucuugg

SEQ ID NO: 724575 - RNA, 19 nt, Artificial Sequence
  Description of Artificial Sequence: Synthetic oligonucleotide
aguuccaagcuccaauaau

SEQ ID NO: 724576 - RNA, 19 nt, Artificial Sequence
  Description of Artificial Sequence: Synthetic oligonucleotide
acaguugugaccacaagaa

SEQ ID NO: 724577 - RNA, 19 nt, Artificial Sequence
  Description of Artificial Sequence: Synthetic oligonucleotide
uugcaguacaucuguaaau

SEQ ID NO: 724578 - RNA, 19 nt, Artificial Sequence
  Description of Artificial Sequence: Synthetic oligonucleotide
ucaagcaaacucuguuaac

SEQ ID NO: 724579 - RNA, 19 nt, Artificial Sequence
  Description of Artificial Sequence: Synthetic oligonucleotide
uguuagagaaugugaucaa

SEQ ID NO: 724580 - RNA, 19 nt, Artificial Sequence
  Description of Artificial Sequence: Synthetic oligonucleotide
caaaccgcugcuucaggag

SEQ ID NO: 724581 - RNA, 19 nt, Artificial Sequence
  Description of Artificial Sequence: Synthetic oligonucleotide
aauuacaaucauagcugca

SEQ ID NO: 724582 - RNA, 19 nt, Artificial Sequence
  Description of Artificial Sequence: Synthetic oligonucleotide
ucuuaaagugacgaagauu

SEQ ID NO: 724583 - RNA, 19 nt, Artificial Sequence
  Description of Artificial Sequence: Synthetic oligonucleotide
uuaagccugggcuguguug

SEQ ID NO: 724584 - RNA, 19 nt, Artificial Sequence
  Description of Artificial Sequence: Synthetic oligonucleotide
gugacgaagauugaugauc

SEQ ID NO: 724585 - RNA, 19 nt, Artificial Sequence
  Description of Artificial Sequence: Synthetic oligonucleotide
uuccuagggucacaggggu

SEQ ID NO: 724586 - RNA, 19 nt, Artificial Sequence
  Description of Artificial Sequence: Synthetic oligonucleotide
aaguggcaacaacuuaggu

SEQ ID NO: 724587 - RNA, 19 nt, Artificial Sequence
  Description of Artificial Sequence: Synthetic oligonucleotide
ucacuuaguucugaaggcu

SEQ ID NO: 724588 - RNA, 19 nt, Artificial Sequence
  Description of Artificial Sequence: Synthetic oligonucleotide
uccacuugcccaguuuuag

SEQ ID NO: 724589 - RNA, 19 nt, Artificial Sequence
  Description of Artificial Sequence: Synthetic oligonucleotide
acucuguuaaccucuuaaa

SEQ ID NO: 724590 - RNA, 19 nt, Artificial Sequence
  Description of Artificial Sequence: Synthetic oligonucleotide
aguuucguuaaugguaagu

SEQ ID NO: 724591 - RNA, 19 nt, Artificial Sequence
  Description of Artificial Sequence: Synthetic oligonucleotide
aguuacauucucaucgagu

SEQ ID NO: 724592 - RNA, 19 nt, Artificial Sequence
  Description of Artificial Sequence: Synthetic oligonucleotide
aguaccgucacugcugaca

SEQ ID NO: 724593 - RNA, 19 nt, Artificial Sequence
  Description of Artificial Sequence: Synthetic oligonucleotide
uggcaagaggcucagugua

SEQ ID NO: 724594 - RNA, 19 nt, Artificial Sequence
  Description of Artificial Sequence: Synthetic oligonucleotide
caauugccacuuaagcaac

SEQ ID NO: 724595 - RNA, 19 nt, Artificial Sequence
  Description of Artificial Sequence: Synthetic oligonucleotide
agaucaguauaauguguaa

SEQ ID NO: 724596 - RNA, 19 nt, Artificial Sequence
  Description of Artificial Sequence: Synthetic oligonucleotide
caccuuggaauuaggauca

SEQ ID NO: 724597 - RNA, 19 nt, Artificial Sequence
  Description of Artificial Sequence: Synthetic oligonucleotide
cugaaggcuuaacaaucgc

SEQ ID NO: 724598 - RNA, 19 nt, Artificial Sequence
  Description of Artificial Sequence: Synthetic oligonucleotide
auaaucaguacaacuccca

SEQ ID NO: 724599 - RNA, 19 nt, Artificial Sequence
  Description of Artificial Sequence: Synthetic oligonucleotide
aaccucuuaaagugacgaa

SEQ ID NO: 724600 - RNA, 19 nt, Artificial Sequence
  Description of Artificial Sequence: Synthetic oligonucleotide
gagacauguucucacccca

SEQ ID NO: 724601 - RNA, 19 nt, Artificial Sequence
  Description of Artificial Sequence: Synthetic oligonucleotide
gacacuauuaggaaagaau

SEQ ID NO: 724602 - RNA, 19 nt, Artificial Sequence
  Description of Artificial Sequence: Synthetic oligonucleotide
agcuaugauuuauaauuua

SEQ ID NO: 724603 - RNA, 19 nt, Artificial Sequence
  Description of Artificial Sequence: Synthetic oligonucleotide
guaucugagcuuguuaaca

SEQ ID NO: 724604 - RNA, 19 nt, Artificial Sequence
  Description of Artificial Sequence: Synthetic oligonucleotide
aacgaaaggguaguuccaa

SEQ ID NO: 724605 - RNA, 19 nt, Artificial Sequence
  Description of Artificial Sequence: Synthetic oligonucleotide
aucaaaccgcugcuucagg

SEQ ID NO: 724606 - RNA, 19 nt, Artificial Sequence
  Description of Artificial Sequence: Synthetic oligonucleotide
aagcuaugauuuauaauuu

SEQ ID NO: 724607 - RNA, 19 nt, Artificial Sequence
  Description of Artificial Sequence: Synthetic oligonucleotide
acgaaaggguaguuccaag

SEQ ID NO: 724608 - RNA, 19 nt, Artificial Sequence
  Description of Artificial Sequence: Synthetic oligonucleotide
accaccauuaacaaccgaa

SEQ ID NO: 724609 - RNA, 19 nt, Artificial Sequence
  Description of Artificial Sequence: Synthetic oligonucleotide
aucugagcuuguuaacacu

SEQ ID NO: 724610 - RNA, 19 nt, Artificial Sequence
  Description of Artificial Sequence: Synthetic oligonucleotide
aguaugguuggagcuaugu

SEQ ID NO: 724611 - RNA, 19 nt, Artificial Sequence
  Description of Artificial Sequence: Synthetic oligonucleotide
gaauuaggaucaacaucag

SEQ ID NO: 724612 - RNA, 19 nt, Artificial Sequence
  Description of Artificial Sequence: Synthetic oligonucleotide
uguuaacacuuuucucccu

SEQ ID NO: 724613 - RNA, 19 nt, Artificial Sequence
  Description of Artificial Sequence: Synthetic oligonucleotide
cuagcuuaacuaaaagcua

SEQ ID NO: 724614 - RNA, 19 nt, Artificial Sequence
  Description of Artificial Sequence: Synthetic oligonucleotide
caagcuccaauaaucagua

SEQ ID NO: 724615 - RNA, 19 nt, Artificial Sequence
  Description of Artificial Sequence: Synthetic oligonucleotide
uuuaauaaacaggggcguu

SEQ ID NO: 724616 - RNA, 19 nt, Artificial Sequence
  Description of Artificial Sequence: Synthetic oligonucleotide
aguauaaguucuacauuga

SEQ ID NO: 724617 - RNA, 19 nt, Artificial Sequence
  Description of Artificial Sequence: Synthetic oligonucleotide
uucgcccaaccgaucuugg

SEQ ID NO: 724618 - RNA, 19 nt, Artificial Sequence
  Description of Artificial Sequence: Synthetic oligonucleotide
caaucgcagcauuuccugc

SEQ ID NO: 724619 - RNA, 19 nt, Artificial Sequence
  Description of Artificial Sequence: Synthetic oligonucleotide
uaaguaugguuggagcuau

SEQ ID NO: 724620 - RNA, 19 nt, Artificial Sequence
  Description of Artificial Sequence: Synthetic oligonucleotide
gucacagacacacauacuu

SEQ ID NO: 724621 - RNA, 19 nt, Artificial Sequence
  Description of Artificial Sequence: Synthetic oligonucleotide
augagaacgaaaggguagu

SEQ ID NO: 724622 - RNA, 19 nt, Artificial Sequence
  Description of Artificial Sequence: Synthetic oligonucleotide
uaguaccucaaccccuaac

SEQ ID NO: 724623 - RNA, 19 nt, Artificial Sequence
  Description of Artificial Sequence: Synthetic oligonucleotide
ucgucacgguggaugaggc

SEQ ID NO: 724624 - RNA, 19 nt, Artificial Sequence
  Description of Artificial Sequence: Synthetic oligonucleotide
  modified_base (19)..(19): a, c, u, g, unknown or other
accgaucuuggacugacun

SEQ ID NO: 724625 - RNA, 19 nt, Artificial Sequence
  Description of Artificial Sequence: Synthetic oligonucleotide
accgcuggauguuucguca

SEQ ID NO: 724626 - RNA, 19 nt, Artificial Sequence
  Description of Artificial Sequence: Synthetic oligonucleotide
caguugugaccacaagaag

SEQ ID NO: 724627 - RNA, 19 nt, Artificial Sequence
  Description of Artificial Sequence: Synthetic oligonucleotide
uugggugaugugcaacaaa

SEQ ID NO: 724628 - RNA, 19 nt, Artificial Sequence
  Description of Artificial Sequence: Synthetic oligonucleotide
  modified_base (6)..(6): a, c, u, g, unknown or other
gcaugnaaccaucagcauc

SEQ ID NO: 724629 - RNA, 19 nt, Artificial Sequence
  Description of Artificial Sequence: Synthetic oligonucleotide
cagucuccccgccaaaagc

SEQ ID NO: 724630 - RNA, 19 nt, Artificial Sequence
  Description of Artificial Sequence: Synthetic oligonucleotide
  modified_base (7)..(7): a, c, u, g, unknown or other
agcaugnaaccaucagcau

SEQ ID NO: 724631 - RNA, 19 nt, Artificial Sequence
  Description of Artificial Sequence: Synthetic oligonucleotide
aucgcagcauuuccugcag

SEQ ID NO: 724632 - RNA, 19 nt, Artificial Sequence
  Description of Artificial Sequence: Synthetic oligonucleotide
ucucacgaucauuuaugaa

SEQ ID NO: 724633 - RNA, 19 nt, Artificial Sequence
  Description of Artificial Sequence: Synthetic oligonucleotide
agaacuucgcccaaccgau

SEQ ID NO: 724634 - RNA, 19 nt, Artificial Sequence
  Description of Artificial Sequence: Synthetic oligonucleotide
agugacgaagauugaugau

SEQ ID NO: 724635 - RNA, 19 nt, Artificial Sequence
  Description of Artificial Sequence: Synthetic oligonucleotide
auauugagggagaagcuua

SEQ ID NO: 724636 - RNA, 19 nt, Artificial Sequence
  Description of Artificial Sequence: Synthetic oligonucleotide
cauagucuggagcaauaca

SEQ ID NO: 724637 - RNA, 19 nt, Artificial Sequence
  Description of Artificial Sequence: Synthetic oligonucleotide
cuguacuuuccaugauaag

SEQ ID NO: 724638 - RNA, 19 nt, Artificial Sequence
  Description of Artificial Sequence: Synthetic oligonucleotide
caaucacccguuugaugag

SEQ ID NO: 724639 - RNA, 19 nt, Artificial Sequence
  Description of Artificial Sequence: Synthetic oligonucleotide
auccuccuaguaccgucac

SEQ ID NO: 724640 - RNA, 19 nt, Artificial Sequence
  Description of Artificial Sequence: Synthetic oligonucleotide
ggcggauguauccacuugc

SEQ ID NO: 724641 - RNA, 19 nt, Artificial Sequence
  Description of Artificial Sequence: Synthetic oligonucleotide
uagagacaacacccuucag

SEQ ID NO: 724642 - RNA, 19 nt, Artificial Sequence
  Description of Artificial Sequence: Synthetic oligonucleotide
ugugacuccaccgcuggau

SEQ ID NO: 724643 - RNA, 19 nt, Artificial Sequence
  Description of Artificial Sequence: Synthetic oligonucleotide
auccccgugaagcugggau

SEQ ID NO: 724644 - RNA, 19 nt, Artificial Sequence
  Description of Artificial Sequence: Synthetic oligonucleotide
uugcccaguuuuaguaccu

SEQ ID NO: 724645 - RNA, 19 nt, Artificial Sequence
  Description of Artificial Sequence: Synthetic oligonucleotide
gucaaugacaauugccacu

SEQ ID NO: 724646 - RNA, 19 nt, Artificial Sequence
  Description of Artificial Sequence: Synthetic oligonucleotide
uguagcgugugaccucauc

SEQ ID NO: 724647 - RNA, 19 nt, Artificial Sequence
  Description of Artificial Sequence: Synthetic oligonucleotide
agaccuaaccucacuucuc

SEQ ID NO: 724648 - RNA, 19 nt, Artificial Sequence
  Description of Artificial Sequence: Synthetic oligonucleotide
cuaaccucacuucuccaga

SEQ ID NO: 724649 - RNA, 19 nt, Artificial Sequence
  Description of Artificial Sequence: Synthetic oligonucleotide
uguugacacuugagucucc

SEQ ID NO: 724650 - RNA, 19 nt, Artificial Sequence
  Description of Artificial Sequence: Synthetic oligonucleotide
cugcacuauccgauccugg

SEQ ID NO: 724651 - RNA, 19 nt, Artificial Sequence
  Description of Artificial Sequence: Synthetic oligonucleotide
cuauguagcgugugaccuc

SEQ ID NO: 724652 - RNA, 19 nt, Artificial Sequence
  Description of Artificial Sequence: Synthetic oligonucleotide
agcuuaacuaaaagcuaug

SEQ ID NO: 724653 - RNA, 19 nt, Artificial Sequence
  Description of Artificial Sequence: Synthetic oligonucleotide
uccgagacaccaccauuaa

SEQ ID NO: 724654 - RNA, 19 nt, Artificial Sequence
  Description of Artificial Sequence: Synthetic oligonucleotide
caucaccuuggaauuagga

SEQ ID NO: 724655 - RNA, 19 nt, Artificial Sequence
  Description of Artificial Sequence: Synthetic oligonucleotide
agcgugugaccucaucagu

SEQ ID NO: 724656 - RNA, 19 nt, Artificial Sequence
  Description of Artificial Sequence: Synthetic oligonucleotide
gcuauacauucaauaaagc

SEQ ID NO: 724657 - RNA, 19 nt, Artificial Sequence
  Description of Artificial Sequence: Synthetic oligonucleotide
aggggcguugaugagaaaa

SEQ ID NO: 724658 - RNA, 19 nt, Artificial Sequence
  Description of Artificial Sequence: Synthetic oligonucleotide
acgaagauugaugauccuu

SEQ ID NO: 724659 - RNA, 19 nt, Artificial Sequence
  Description of Artificial Sequence: Synthetic oligonucleotide
ucuccgagacaccaccauu

SEQ ID NO: 724660 - RNA, 19 nt, Artificial Sequence
  Description of Artificial Sequence: Synthetic oligonucleotide
uacagguccuggucuaaau

SEQ ID NO: 724661 - RNA, 19 nt, Artificial Sequence
  Description of Artificial Sequence: Synthetic oligonucleotide
gguaucugagcuuguuaac

SEQ ID NO: 724662 - RNA, 19 nt, Artificial Sequence
  Description of Artificial Sequence: Synthetic oligonucleotide
cccgccaaaagcuauuuuc

SEQ ID NO: 724663 - RNA, 19 nt, Artificial Sequence
  Description of Artificial Sequence: Synthetic oligonucleotide
auguuucgucaaucacccg

SEQ ID NO: 724664 - RNA, 19 nt, Artificial Sequence
  Description of Artificial Sequence: Synthetic oligonucleotide
ugauugcaguacaucugua

SEQ ID NO: 724665 - RNA, 19 nt, Artificial Sequence
  Description of Artificial Sequence: Synthetic oligonucleotide
ugacuccaccgcuggaugu

SEQ ID NO: 724666 - RNA, 19 nt, Artificial Sequence
  Description of Artificial Sequence: Synthetic oligonucleotide
accguuuccuuaaucuucu

SEQ ID NO: 724667 - RNA, 19 nt, Artificial Sequence
  Description of Artificial Sequence: Synthetic oligonucleotide
agucuccccgccaaaagcu

SEQ ID NO: 724668 - RNA, 19 nt, Artificial Sequence
  Description of Artificial Sequence: Synthetic oligonucleotide
gucuaaauauugagggaga

SEQ ID NO: 724669 - RNA, 19 nt, Artificial Sequence
  Description of Artificial Sequence: Synthetic oligonucleotide
gugacuccaccgcuggaug

SEQ ID NO: 724670 - RNA, 19 nt, Artificial Sequence
  Description of Artificial Sequence: Synthetic oligonucleotide
  modified_base (4)..(4): a, c, u, g, unknown or other
augnaaccaucagcaucac

SEQ ID NO: 724671 - RNA, 19 nt, Artificial Sequence
  Description of Artificial Sequence: Synthetic oligonucleotide
agucuugaucuaaauccca

SEQ ID NO: 724672 - RNA, 19 nt, Artificial Sequence
  Description of Artificial Sequence: Synthetic oligonucleotide
guuagagaaugugaucaaa

SEQ ID NO: 724673 - RNA, 19 nt, Artificial Sequence
  Description of Artificial Sequence: Synthetic oligonucleotide
uuggagcuauguagcgugu

SEQ ID NO: 724674 - RNA, 19 nt, Artificial Sequence
  Description of Artificial Sequence: Synthetic oligonucleotide
cuuuagcccuuuuaauaaa

SEQ ID NO: 724675 - RNA, 19 nt, Artificial Sequence
  Description of Artificial Sequence: Synthetic oligonucleotide
guuggucuccgagacacca

SEQ ID NO: 724676 - RNA, 19 nt, Artificial Sequence
  Description of Artificial Sequence: Synthetic oligonucleotide
gucaauguaacacgggcuu

SEQ ID NO: 724677 - RNA, 19 nt, Artificial Sequence
  Description of Artificial Sequence: Synthetic oligonucleotide
caacuuagguuugauugca

SEQ ID NO: 724678 - RNA, 19 nt, Artificial Sequence
  Description of Artificial Sequence: Synthetic oligonucleotide
cgaaaggguaguuccaagc

SEQ ID NO: 724679 - RNA, 19 nt, Artificial Sequence
  Description of Artificial Sequence: Synthetic oligonucleotide
cauugaaauuuugugcaaa

SEQ ID NO: 724680 - RNA, 19 nt, Artificial Sequence
  Description of Artificial Sequence: Synthetic oligonucleotide
guaaguaugguuggagcua

SEQ ID NO: 724681 - RNA, 19 nt, Artificial Sequence
  Description of Artificial Sequence: Synthetic oligonucleotide
cuaguaccgucacugcuga

SEQ ID NO: 724682 - RNA, 19 nt, Artificial Sequence
  Description of Artificial Sequence: Synthetic oligonucleotide
gaacgaaaggguaguucca

SEQ ID NO: 724683 - RNA, 19 nt, Artificial Sequence
  Description of Artificial Sequence: Synthetic oligonucleotide
agcgauggcuccccaccag

SEQ ID NO: 724684 - RNA, 19 nt, Artificial Sequence
  Description of Artificial Sequence: Synthetic oligonucleotide
ugccugugacuccaccgcu

SEQ ID NO: 724685 - RNA, 19 nt, Artificial Sequence
  Description of Artificial Sequence: Synthetic oligonucleotide
ugggacaguugugaccaca

SEQ ID NO: 724686 - RNA, 19 nt, Artificial Sequence
  Description of Artificial Sequence: Synthetic oligonucleotide
aggcggauguauccacuug

SEQ ID NO: 724687 - RNA, 19 nt, Artificial Sequence
  Description of Artificial Sequence: Synthetic oligonucleotide
caaccgaucuuggacugac

SEQ ID NO: 724688 - RNA, 19 nt, Artificial Sequence
  Description of Artificial Sequence: Synthetic oligonucleotide
uggagcuauguagcgugug

SEQ ID NO: 724689 - RNA, 19 nt, Artificial Sequence
  Description of Artificial Sequence: Synthetic oligonucleotide
acaccaccauuaacaaccg

SEQ ID NO: 724690 - RNA, 19 nt, Artificial Sequence
  Description of Artificial Sequence: Synthetic oligonucleotide
uucuugcaucaccuuggaa

SEQ ID NO: 724691 - RNA, 19 nt, Artificial Sequence
  Description of Artificial Sequence: Synthetic oligonucleotide
uuaguaccucaaccccuaa

SEQ ID NO: 724692 - RNA, 19 nt, Artificial Sequence
  Description of Artificial Sequence: Synthetic oligonucleotide
guaccgucacugcugacaa

SEQ ID NO: 724693 - RNA, 19 nt, Artificial Sequence
  Description of Artificial Sequence: Synthetic oligonucleotide
accccuaacaggagcuggg

SEQ ID NO: 724694 - RNA, 19 nt, Artificial Sequence
  Description of Artificial Sequence: Synthetic oligonucleotide
gcuuaacuaaaagcuauga

SEQ ID NO: 724695 - RNA, 19 nt, Artificial Sequence
  Description of Artificial Sequence: Synthetic oligonucleotide
uguuaagccugggcugugu

SEQ ID NO: 724696 - RNA, 19 nt, Artificial Sequence
  Description of Artificial Sequence: Synthetic oligonucleotide
cuucgcccaaccgaucuug

SEQ ID NO: 724697 - RNA, 19 nt, Artificial Sequence
  Description of Artificial Sequence: Synthetic oligonucleotide
cuucaccguuuccuuaauc

SEQ ID NO: 724698 - RNA, 19 nt, Artificial Sequence
  Description of Artificial Sequence: Synthetic oligonucleotide
ccuccuaguaccgucacug

SEQ ID NO: 724699 - RNA, 19 nt, Artificial Sequence
  Description of Artificial Sequence: Synthetic oligonucleotide
uccgauccuggagggaggc

SEQ ID NO: 724700 - RNA, 19 nt, Artificial Sequence
  Description of Artificial Sequence: Synthetic oligonucleotide
uccuccuaguaccgucacu

SEQ ID NO: 724701 - RNA, 19 nt, Artificial Sequence
  Description of Artificial Sequence: Synthetic oligonucleotide
gguuugauugcaguacauc

SEQ ID NO: 724702 - RNA, 19 nt, Artificial Sequence
  Description of Artificial Sequence: Synthetic oligonucleotide
cuugcaucaccuuggaauu

SEQ ID NO: 724703 - RNA, 19 nt, Artificial Sequence
  Description of Artificial Sequence: Synthetic oligonucleotide
gcuguguugacacuugagu

SEQ ID NO: 724704 - RNA, 19 nt, Artificial Sequence
  Description of Artificial Sequence: Synthetic oligonucleotide
gguuuugauaccucauacu

SEQ ID NO: 724705 - RNA, 19 nt, Artificial Sequence
  Description of Artificial Sequence: Synthetic oligonucleotide
cauccuccuaguaccguca

SEQ ID NO: 724706 - RNA, 19 nt, Artificial Sequence
  Description of Artificial Sequence: Synthetic oligonucleotide
uacuugcuacacaggccaa

SEQ ID NO: 724707 - RNA, 19 nt, Artificial Sequence
  Description of Artificial Sequence: Synthetic oligonucleotide
acaaccgaauacagguccu

SEQ ID NO: 724708 - RNA, 19 nt, Artificial Sequence
  Description of Artificial Sequence: Synthetic oligonucleotide
acauucucaucgaguaggu

SEQ ID NO: 724709 - RNA, 19 nt, Artificial Sequence
  Description of Artificial Sequence: Synthetic oligonucleotide
uuuucccacugcaguguuu

SEQ ID NO: 724710 - RNA, 19 nt, Artificial Sequence
  Description of Artificial Sequence: Synthetic oligonucleotide
auugccacuuaagcaacua

SEQ ID NO: 724711 - RNA, 19 nt, Artificial Sequence
  Description of Artificial Sequence: Synthetic oligonucleotide
ccguuugaugagcuuauug

SEQ ID NO: 724712 - RNA, 19 nt, Artificial Sequence
  Description of Artificial Sequence: Synthetic oligonucleotide
caggguuugaccacaacuu

SEQ ID NO: 724713 - RNA, 19 nt, Artificial Sequence
  Description of Artificial Sequence: Synthetic oligonucleotide
acuuaguucugaaggcuua

SEQ ID NO: 724714 - RNA, 19 nt, Artificial Sequence
  Description of Artificial Sequence: Synthetic oligonucleotide
ucgcccaaccgaucuugga

SEQ ID NO: 724715 - RNA, 19 nt, Artificial Sequence
  Description of Artificial Sequence: Synthetic oligonucleotide
caccgcuggauguuucguc

SEQ ID NO: 724716 - RNA, 19 nt, Artificial Sequence
  Description of Artificial Sequence: Synthetic oligonucleotide
agucuacauccuccuagua

SEQ ID NO: 724717 - RNA, 19 nt, Artificial Sequence
  Description of Artificial Sequence: Synthetic oligonucleotide
uccuagggucacagggguc

SEQ ID NO: 724718 - RNA, 19 nt, Artificial Sequence
  Description of Artificial Sequence: Synthetic oligonucleotide
aauugacagugaagugcau

SEQ ID NO: 724719 - RNA, 19 nt, Artificial Sequence
  Description of Artificial Sequence: Synthetic oligonucleotide
gguaguuccaagcuccaau

SEQ ID NO: 724720 - RNA, 19 nt, Artificial Sequence
  Description of Artificial Sequence: Synthetic oligonucleotide
agaagcucucagugguauu

SEQ ID NO: 724721 - RNA, 19 nt, Artificial Sequence
  Description of Artificial Sequence: Synthetic oligonucleotide
uccccgugaagcugggauu

SEQ ID NO: 724722 - RNA, 19 nt, Artificial Sequence
  Description of Artificial Sequence: Synthetic oligonucleotide
ucauugccugugacuccac

SEQ ID NO: 724723 - RNA, 19 nt, Artificial Sequence
  Description of Artificial Sequence: Synthetic oligonucleotide
acacauacuuugggugaug

SEQ ID NO: 724724 - RNA, 19 nt, Artificial Sequence
  Description of Artificial Sequence: Synthetic oligonucleotide
cugggauuuggugagacau

SEQ ID NO: 724725 - RNA, 19 nt, Artificial Sequence
  Description of Artificial Sequence: Synthetic oligonucleotide
acuugcuacacaggccaau

SEQ ID NO: 724726 - RNA, 19 nt, Artificial Sequence
  Description of Artificial Sequence: Synthetic oligonucleotide
aucagucuccccgccaaaa

SEQ ID NO: 724727 - RNA, 19 nt, Artificial Sequence
  Description of Artificial Sequence: Synthetic oligonucleotide
cacaacagacugucacaga

SEQ ID NO: 724728 - RNA, 19 nt, Artificial Sequence
  Description of Artificial Sequence: Synthetic oligonucleotide
cauucucaucgaguagguc

SEQ ID NO: 724729 - RNA, 19 nt, Artificial Sequence
  Description of Artificial Sequence: Synthetic oligonucleotide
ggcaagaggcucaguguag

SEQ ID NO: 724730 - RNA, 19 nt, Artificial Sequence
  Description of Artificial Sequence: Synthetic oligonucleotide
ucccuggcacauccccgug

SEQ ID NO: 724731 - RNA, 19 nt, Artificial Sequence
  Description of Artificial Sequence: Synthetic oligonucleotide
auccgauccuggagggagg

SEQ ID NO: 724732 - RNA, 19 nt, Artificial Sequence
  Description of Artificial Sequence: Synthetic oligonucleotide
ccagagucucgucacggug

SEQ ID NO: 724733 - RNA, 19 nt, Artificial Sequence
  Description of Artificial Sequence: Synthetic oligonucleotide
ggcugcaugaugagaacga

SEQ ID NO: 724734 - RNA, 19 nt, Artificial Sequence
  Description of Artificial Sequence: Synthetic oligonucleotide
uagagcgccaggggcuucu

SEQ ID NO: 724735 - RNA, 19 nt, Artificial Sequence
  Description of Artificial Sequence: Synthetic oligonucleotide
gcuauguagcgugugaccu

SEQ ID NO: 724736 - RNA, 19 nt, Artificial Sequence
  Description of Artificial Sequence: Synthetic oligonucleotide
caucaccagcccuccucug

SEQ ID NO: 724737 - RNA, 19 nt, Artificial Sequence
  Description of Artificial Sequence: Synthetic oligonucleotide
uugcaucaccuuggaauua

SEQ ID NO: 724738 - RNA, 19 nt, Artificial Sequence
  Description of Artificial Sequence: Synthetic oligonucleotide
ugcccaguuuuaguaccuc

SEQ ID NO: 724739 - RNA, 19 nt, Artificial Sequence
  Description of Artificial Sequence: Synthetic oligonucleotide
gacgaagauugaugauccu

SEQ ID NO: 724740 - RNA, 19 nt, Artificial Sequence
  Description of Artificial Sequence: Synthetic oligonucleotide
auacagguccuggucuaaa

SEQ ID NO: 724741 - RNA, 19 nt, Artificial Sequence
  Description of Artificial Sequence: Synthetic oligonucleotide
acuucgcccaaccgaucuu

SEQ ID NO: 724742 - RNA, 19 nt, Artificial Sequence
  Description of Artificial Sequence: Synthetic oligonucleotide
gcggauguauccacuugcc

SEQ ID NO: 724743 - RNA, 19 nt, Artificial Sequence
  Description of Artificial Sequence: Synthetic oligonucleotide
caaccccuaacaggagcug

SEQ ID NO: 724744 - RNA, 19 nt, Artificial Sequence
  Description of Artificial Sequence: Synthetic oligonucleotide
ucacccguuugaugagcuu

SEQ ID NO: 724745 - RNA, 19 nt, Artificial Sequence
  Description of Artificial Sequence: Synthetic oligonucleotide
cagacacuauuaggaaaga

SEQ ID NO: 724746 - RNA, 19 nt, Artificial Sequence
  Description of Artificial Sequence: Synthetic oligonucleotide
acccguuugaugagcuuau

SEQ ID NO: 724747 - RNA, 19 nt, Artificial Sequence
  Description of Artificial Sequence: Synthetic oligonucleotide
cacccguuugaugagcuua

SEQ ID NO: 724748 - RNA, 19 nt, Artificial Sequence
  Description of Artificial Sequence: Synthetic oligonucleotide
gaacuucgcccaaccgauc

SEQ ID NO: 724749 - RNA, 19 nt, Artificial Sequence
  Description of Artificial Sequence: Synthetic oligonucleotide
gcgugugaccucaucaguc

SEQ ID NO: 724750 - RNA, 19 nt, Artificial Sequence
  Description of Artificial Sequence: Synthetic oligonucleotide
gcccaguuuuaguaccuca

SEQ ID NO: 724751 - RNA, 19 nt, Artificial Sequence
  Description of Artificial Sequence: Synthetic oligonucleotide
cuccaccgcuggauguuuc

SEQ ID NO: 724752 - RNA, 19 nt, Artificial Sequence
  Description of Artificial Sequence: Synthetic oligonucleotide
uaguaccgucacugcugac

SEQ ID NO: 724753 - RNA, 19 nt, Artificial Sequence
  Description of Artificial Sequence: Synthetic oligonucleotide
cccaaccgaucuuggacug

SEQ ID NO: 724754 - RNA, 19 nt, Artificial Sequence
  Description of Artificial Sequence: Synthetic oligonucleotide
cacauacuuugggugaugu

SEQ ID NO: 724755 - RNA, 19 nt, Artificial Sequence
  Description of Artificial Sequence: Synthetic oligonucleotide
caacaacuuagguuugauu

SEQ ID NO: 724756 - RNA, 19 nt, Artificial Sequence
  Description of Artificial Sequence: Synthetic oligonucleotide
cggauguauccacuugccc

SEQ ID NO: 724757 - RNA, 19 nt, Artificial Sequence
  Description of Artificial Sequence: Synthetic oligonucleotide
ggagcaauacaggguuuga

SEQ ID NO: 724758 - RNA, 19 nt, Artificial Sequence
  Description of Artificial Sequence: Synthetic oligonucleotide
uaccgucacugcugacaaa

SEQ ID NO: 724759 - RNA, 19 nt, Artificial Sequence
  Description of Artificial Sequence: Synthetic oligonucleotide
gggguaucugagcuuguua

SEQ ID NO: 724760 - RNA, 19 nt, Artificial Sequence
  Description of Artificial Sequence: Synthetic oligonucleotide
guuucgucaaucacccguu

SEQ ID NO: 724761 - RNA, 19 nt, Artificial Sequence
  Description of Artificial Sequence: Synthetic oligonucleotide
ccgugaagcugggauuugg

SEQ ID NO: 724762 - RNA, 19 nt, Artificial Sequence
  Description of Artificial Sequence: Synthetic oligonucleotide
ggucaagucuugaucuaaa

SEQ ID NO: 724763 - RNA, 19 nt, Artificial Sequence
  Description of Artificial Sequence: Synthetic oligonucleotide
gguguuaagccugggcugu

SEQ ID NO: 724764 - RNA, 19 nt, Artificial Sequence
  Description of Artificial Sequence: Synthetic oligonucleotide
guguuaagccugggcugug

SEQ ID NO: 724765 - RNA, 19 nt, Artificial Sequence
  Description of Artificial Sequence: Synthetic oligonucleotide
caguagaggacagguguua

SEQ ID NO: 724766 - RNA, 19 nt, Artificial Sequence
  Description of Artificial Sequence: Synthetic oligonucleotide
gaagcuuagccaagaucuu

SEQ ID NO: 724767 - RNA, 19 nt, Artificial Sequence
  Description of Artificial Sequence: Synthetic oligonucleotide
gcugggauuuggugagaca

SEQ ID NO: 724768 - RNA, 19 nt, Artificial Sequence
  Description of Artificial Sequence: Synthetic oligonucleotide
guuaagccugggcuguguu

SEQ ID NO: 724769 - RNA, 19 nt, Artificial Sequence
  Description of Artificial Sequence: Synthetic oligonucleotide
cagcgauggcuccccacca

SEQ ID NO: 724770 - RNA, 19 nt, Artificial Sequence
  Description of Artificial Sequence: Synthetic oligonucleotide
gccaaugauuugguuuuga

SEQ ID NO: 724771 - RNA, 19 nt, Artificial Sequence
  Description of Artificial Sequence: Synthetic oligonucleotide
ccgccaaaagcuauuuucu

SEQ ID NO: 724772 - RNA, 19 nt, Artificial Sequence
  Description of Artificial Sequence: Synthetic oligonucleotide
caccaccauuaacaaccga

SEQ ID NO: 724773 - RNA, 19 nt, Artificial Sequence
  Description of Artificial Sequence: Synthetic oligonucleotide
cacagucuacauccuccua

SEQ ID NO: 724774 - RNA, 19 nt, Artificial Sequence
  Description of Artificial Sequence: Synthetic oligonucleotide
gguuggagcuauguagcgu

SEQ ID NO: 724775 - RNA, 19 nt, Artificial Sequence
  Description of Artificial Sequence: Synthetic oligonucleotide
acuccaccgcuggauguuu

SEQ ID NO: 724776 - RNA, 19 nt, Artificial Sequence
  Description of Artificial Sequence: Synthetic oligonucleotide
ccgucacugcugacaaaug

SEQ ID NO: 724777 - RNA, 19 nt, Artificial Sequence
  Description of Artificial Sequence: Synthetic oligonucleotide
cgaagauugaugauccuuu

SEQ ID NO: 724778 - RNA, 19 nt, Artificial Sequence
  Description of Artificial Sequence: Synthetic oligonucleotide
ccaccauuaacaaccgaau

SEQ ID NO: 724779 - RNA, 19 nt, Artificial Sequence
  Description of Artificial Sequence: Synthetic oligonucleotide
ccaaugauuugguuuugau

SEQ ID NO: 724780 - RNA, 19 nt, Artificial Sequence
  Description of Artificial Sequence: Synthetic oligonucleotide
gccacuuaagcaacuacuu

SEQ ID NO: 724781 - RNA, 19 nt, Artificial Sequence
  Description of Artificial Sequence: Synthetic oligonucleotide
gcuacacaggccaaugauu

SEQ ID NO: 724782 - RNA, 19 nt, Artificial Sequence
  Description of Artificial Sequence: Synthetic oligonucleotide
ggagacucuuuuauauuuu

SEQ ID NO: 724783 - RNA, 19 nt, Artificial Sequence
  Description of Artificial Sequence: Synthetic oligonucleotide
ggacauagucuggagcaau

SEQ ID NO: 724784 - RNA, 19 nt, Artificial Sequence
  Description of Artificial Sequence: Synthetic oligonucleotide
ccguuuccuuaaucuucug

SEQ ID NO: 724785 - RNA, 19 nt, Artificial Sequence
  Description of Artificial Sequence: Synthetic oligonucleotide
ccccgaguuccuaggguca

SEQ ID NO: 724786 - RNA, 19 nt, Artificial Sequence
  Description of Artificial Sequence: Synthetic oligonucleotide
cccgaguuccuagggucac

SEQ ID NO: 724787 - RNA, 19 nt, Artificial Sequence
  Description of Artificial Sequence: Synthetic oligonucleotide
gcgauggcuccccaccagu

SEQ ID NO: 724788 - RNA, 19 nt, Artificial Sequence
  Description of Artificial Sequence: Synthetic oligonucleotide
  modified_base (18)..(18): a, c, u, g, unknown or other
ccgaucuuggacugacunu

SEQ ID NO: 724789 - RNA, 19 nt, Artificial Sequence
  Description of Artificial Sequence: Synthetic oligonucleotide
cuccccgccaaaagcuauu

SEQ ID NO: 724790 - RNA, 19 nt, Artificial Sequence
  Description of Artificial Sequence: Synthetic oligonucleotide
auguagcgugugaccucau

SEQ ID NO: 724791 - RNA, 19 nt, Artificial Sequence
  Description of Artificial Sequence: Synthetic oligonucleotide
cccgugaagcugggauuug

SEQ ID NO: 724792 - RNA, 19 nt, Artificial Sequence
  Description of Artificial Sequence: Synthetic oligonucleotide
ccgcuggauguuucgucaa

SEQ ID NO: 724793 - RNA, 19 nt, Artificial Sequence
  Description of Artificial Sequence: Synthetic oligonucleotide
caggggcguugaugagaaa

SEQ ID NO: 724794 - RNA, 19 nt, Artificial Sequence
  Description of Artificial Sequence: Synthetic oligonucleotide
gagucucgucacgguggau

SEQ ID NO: 724795 - RNA, 19 nt, Artificial Sequence
  Description of Artificial Sequence: Synthetic oligonucleotide
ccgaguuccuagggucaca

SEQ ID NO: 724796 - RNA, 19 nt, Artificial Sequence
  Description of Artificial Sequence: Synthetic oligonucleotide
ccuucaccguuuccuuaau

SEQ ID NO: 724797 - RNA, 19 nt, Artificial Sequence
  Description of Artificial Sequence: Synthetic oligonucleotide
ccccgccaaaagcuauuuu

SEQ ID NO: 724798 - RNA, 19 nt, Artificial Sequence
  Description of Artificial Sequence: Synthetic oligonucleotide
cccguuugaugagcuuauu

SEQ ID NO: 724799 - RNA, 19 nt, Artificial Sequence
  Description of Artificial Sequence: Synthetic oligonucleotide
aacaaguuguggcaaagcc

SEQ ID NO: 724800 - RNA, 19 nt, Artificial Sequence
  Description of Artificial Sequence: Synthetic oligonucleotide
aaagaaaguggaaacaagc

SEQ ID NO: 724801 - RNA, 19 nt, Artificial Sequence
  Description of Artificial Sequence: Synthetic oligonucleotide
uuuacaugggccaaauuag

SEQ ID NO: 724802 - RNA, 19 nt, Artificial Sequence
  Description of Artificial Sequence: Synthetic oligonucleotide
aguuuaguuacauacagca

SEQ ID NO: 724803 - RNA, 19 nt, Artificial Sequence
  Description of Artificial Sequence: Synthetic oligonucleotide
aagauuuuaacauguguga

SEQ ID NO: 724804 - RNA, 19 nt, Artificial Sequence
  Description of Artificial Sequence: Synthetic oligonucleotide
aagaaaguggaaacaagcc

SEQ ID NO: 724805 - RNA, 19 nt, Artificial Sequence
  Description of Artificial Sequence: Synthetic oligonucleotide
aacgcuucccacuucaaag

SEQ ID NO: 724806 - RNA, 19 nt, Artificial Sequence
  Description of Artificial Sequence: Synthetic oligonucleotide
acggacaguacauaguccc

SEQ ID NO: 724807 - RNA, 19 nt, Artificial Sequence
  Description of Artificial Sequence: Synthetic oligonucleotide
aaauuagcugauuucagaa

SEQ ID NO: 724808 - RNA, 19 nt, Artificial Sequence
  Description of Artificial Sequence: Synthetic oligonucleotide
acagaguccguacauauuc

SEQ ID NO: 724809 - RNA, 19 nt, Artificial Sequence
  Description of Artificial Sequence: Synthetic oligonucleotide
auaagcacaagguacucuc

SEQ ID NO: 724810 - RNA, 19 nt, Artificial Sequence
  Description of Artificial Sequence: Synthetic oligonucleotide
ucuacaugcagucuugcug

SEQ ID NO: 724811 - RNA, 19 nt, Artificial Sequence
  Description of Artificial Sequence: Synthetic oligonucleotide
uaugauacaaaugccaaga

SEQ ID NO: 724812 - RNA, 19 nt, Artificial Sequence
  Description of Artificial Sequence: Synthetic oligonucleotide
ucugagguugagcauaugc

SEQ ID NO: 724813 - RNA, 19 nt, Artificial Sequence
  Description of Artificial Sequence: Synthetic oligonucleotide
auuuacaugggccaaauua

SEQ ID NO: 724814 - RNA, 19 nt, Artificial Sequence
  Description of Artificial Sequence: Synthetic oligonucleotide
uuugcgcccauucaccucg

SEQ ID NO: 724815 - RNA, 19 nt, Artificial Sequence
  Description of Artificial Sequence: Synthetic oligonucleotide
aagaaacucuaaaaucagc

SEQ ID NO: 724816 - RNA, 19 nt, Artificial Sequence
  Description of Artificial Sequence: Synthetic oligonucleotide
auuucagaaguucggacag

SEQ ID NO: 724817 - RNA, 19 nt, Artificial Sequence
  Description of Artificial Sequence: Synthetic oligonucleotide
acucuaaugaauuagucuu

SEQ ID NO: 724818 - RNA, 19 nt, Artificial Sequence
  Description of Artificial Sequence: Synthetic oligonucleotide
uuaguuacauacagcagcu

SEQ ID NO: 724819 - RNA, 19 nt, Artificial Sequence
  Description of Artificial Sequence: Synthetic oligonucleotide
ugcuauaaucaaaaggcac

SEQ ID NO: 724820 - RNA, 19 nt, Artificial Sequence
  Description of Artificial Sequence: Synthetic oligonucleotide
aacggcaagagcuugcaga

SEQ ID NO: 724821 - RNA, 19 nt, Artificial Sequence
  Description of Artificial Sequence: Synthetic oligonucleotide
aguauuguuccuuacacua

SEQ ID NO: 724822 - RNA, 19 nt, Artificial Sequence
  Description of Artificial Sequence: Synthetic oligonucleotide
ugaucgaugccccaggagu

SEQ ID NO: 724823 - RNA, 19 nt, Artificial Sequence
  Description of Artificial Sequence: Synthetic oligonucleotide
cugagguugagcauaugcg

SEQ ID NO: 724824 - RNA, 19 nt, Artificial Sequence
  Description of Artificial Sequence: Synthetic oligonucleotide
acacggacaguacauaguc

SEQ ID NO: 724825 - RNA, 19 nt, Artificial Sequence
  Description of Artificial Sequence: Synthetic oligonucleotide
aagccauugcucuguggcc

SEQ ID NO: 724826 - RNA, 19 nt, Artificial Sequence
  Description of Artificial Sequence: Synthetic oligonucleotide
agaucuuaagagcugggug

SEQ ID NO: 724827 - RNA, 19 nt, Artificial Sequence
  Description of Artificial Sequence: Synthetic oligonucleotide
uguuccuuacacuaucaca

SEQ ID NO: 724828 - RNA, 19 nt, Artificial Sequence
  Description of Artificial Sequence: Synthetic oligonucleotide
ucuaaugaauuagucuucc

SEQ ID NO: 724829 - RNA, 19 nt, Artificial Sequence
  Description of Artificial Sequence: Synthetic oligonucleotide
ucgggcuucucuauuauca

SEQ ID NO: 724830 - RNA, 19 nt, Artificial Sequence
  Description of Artificial Sequence: Synthetic oligonucleotide
gcagaaucaaaccuggcgg

SEQ ID NO: 724831 - RNA, 19 nt, Artificial Sequence
  Description of Artificial Sequence: Synthetic oligonucleotide
gauuaagguggucguaucc

SEQ ID NO: 724832 - RNA, 19 nt, Artificial Sequence
  Description of Artificial Sequence: Synthetic oligonucleotide
agaaacucuaaaaucagcu

SEQ ID NO: 724833 - RNA, 19 nt, Artificial Sequence
  Description of Artificial Sequence: Synthetic oligonucleotide
gcugguucgauuaaggugg

SEQ ID NO: 724834 - RNA, 19 nt, Artificial Sequence
  Description of Artificial Sequence: Synthetic oligonucleotide
aaguauuguuccuuacacu

SEQ ID NO: 724835 - RNA, 19 nt, Artificial Sequence
  Description of Artificial Sequence: Synthetic oligonucleotide
aaucaaaccuggcggacga

SEQ ID NO: 724836 - RNA, 19 nt, Artificial Sequence
  Description of Artificial Sequence: Synthetic oligonucleotide
ugagguugagcauaugcgu

SEQ ID NO: 724837 - RNA, 19 nt, Artificial Sequence
  Description of Artificial Sequence: Synthetic oligonucleotide
uuacaugggccaaauuagc

SEQ ID NO: 724838 - RNA, 19 nt, Artificial Sequence
  Description of Artificial Sequence: Synthetic oligonucleotide
gaugccguaacuauuagaa

SEQ ID NO: 724839 - RNA, 19 nt, Artificial Sequence
  Description of Artificial Sequence: Synthetic oligonucleotide
aaucuacaugcagucuugc

SEQ ID NO: 724840 - RNA, 19 nt, Artificial Sequence
  Description of Artificial Sequence: Synthetic oligonucleotide
uuagaauuccuauuuccau

SEQ ID NO: 724841 - RNA, 19 nt, Artificial Sequence
  Description of Artificial Sequence: Synthetic oligonucleotide
acaaaugccaagaggcagc

SEQ ID NO: 724842 - RNA, 19 nt, Artificial Sequence
  Description of Artificial Sequence: Synthetic oligonucleotide
acggcaauagcaaucacuc

SEQ ID NO: 724843 - RNA, 19 nt, Artificial Sequence
  Description of Artificial Sequence: Synthetic oligonucleotide
caauguauggaaagcuggc

SEQ ID NO: 724844 - RNA, 19 nt, Artificial Sequence
  Description of Artificial Sequence: Synthetic oligonucleotide
ugccguaacuauuagaauu

SEQ ID NO: 724845 - RNA, 19 nt, Artificial Sequence
  Description of Artificial Sequence: Synthetic oligonucleotide
aaauccaaccuacuauuua

SEQ ID NO: 724846 - RNA, 19 nt, Artificial Sequence
  Description of Artificial Sequence: Synthetic oligonucleotide
cuaacccucuccaugaauc

SEQ ID NO: 724847 - RNA, 19 nt, Artificial Sequence
  Description of Artificial Sequence: Synthetic oligonucleotide
acauuuugauccugaaucu

SEQ ID NO: 724848 - RNA, 19 nt, Artificial Sequence
  Description of Artificial Sequence: Synthetic oligonucleotide
aaugccaaggcagucuugu

SEQ ID NO: 724849 - RNA, 19 nt, Artificial Sequence
  Description of Artificial Sequence: Synthetic oligonucleotide
agcuugcagaggcuaaccc

SEQ ID NO: 724850 - RNA, 19 nt, Artificial Sequence
  Description of Artificial Sequence: Synthetic oligonucleotide
uaagguggucguauccagg

SEQ ID NO: 724851 - RNA, 19 nt, Artificial Sequence
  Description of Artificial Sequence: Synthetic oligonucleotide
gacuugagaagggaaaccc

SEQ ID NO: 724852 - RNA, 19 nt, Artificial Sequence
  Description of Artificial Sequence: Synthetic oligonucleotide
gacgacaugguguuggguc

SEQ ID NO: 724853 - RNA, 19 nt, Artificial Sequence
  Description of Artificial Sequence: Synthetic oligonucleotide
uacucuuugacaguaugac

SEQ ID NO: 724854 - RNA, 19 nt, Artificial Sequence
  Description of Artificial Sequence: Synthetic oligonucleotide
aauuccuauuuccaugcuu

SEQ ID NO: 724855 - RNA, 19 nt, Artificial Sequence
  Description of Artificial Sequence: Synthetic oligonucleotide
gagacuaugacaggcagca

SEQ ID NO: 724856 - RNA, 19 nt, Artificial Sequence
  Description of Artificial Sequence: Synthetic oligonucleotide
gguucgauuaagguggucg

SEQ ID NO: 724857 - RNA, 19 nt, Artificial Sequence
  Description of Artificial Sequence: Synthetic oligonucleotide
uacaugggccaaauuagcu

SEQ ID NO: 724858 - RNA, 19 nt, Artificial Sequence
  Description of Artificial Sequence: Synthetic oligonucleotide
cucgugaagccuuuacccg

SEQ ID NO: 724859 - RNA, 19 nt, Artificial Sequence
  Description of Artificial Sequence: Synthetic oligonucleotide
cauuggugggcuuggauac

SEQ ID NO: 724860 - RNA, 19 nt, Artificial Sequence
  Description of Artificial Sequence: Synthetic oligonucleotide
aucuguucggaacacacaa

SEQ ID NO: 724861 - RNA, 19 nt, Artificial Sequence
  Description of Artificial Sequence: Synthetic oligonucleotide
gacaguacauaguccccgg

SEQ ID NO: 724862 - RNA, 19 nt, Artificial Sequence
  Description of Artificial Sequence: Synthetic oligonucleotide
uuaucacuagaaucucccc

SEQ ID NO: 724863 - RNA, 19 nt, Artificial Sequence
  Description of Artificial Sequence: Synthetic oligonucleotide
ugagggucaaagauuuuaa

SEQ ID NO: 724864 - RNA, 19 nt, Artificial Sequence
  Description of Artificial Sequence: Synthetic oligonucleotide
accgccaauguauggaaag

SEQ ID NO: 724865 - RNA, 19 nt, Artificial Sequence
  Description of Artificial Sequence: Synthetic oligonucleotide
gaucuuaagagcugggugu

SEQ ID NO: 724866 - RNA, 19 nt, Artificial Sequence
  Description of Artificial Sequence: Synthetic oligonucleotide
gaaucaaaccuggcggacg

SEQ ID NO: 724867 - RNA, 19 nt, Artificial Sequence
  Description of Artificial Sequence: Synthetic oligonucleotide
gcuauaaucaaaaggcacc

SEQ ID NO: 724868 - RNA, 19 nt, Artificial Sequence
  Description of Artificial Sequence: Synthetic oligonucleotide
acggcaagagcuugcagag

SEQ ID NO: 724869 - RNA, 19 nt, Artificial Sequence
  Description of Artificial Sequence: Synthetic oligonucleotide
caggaaucaucccaacccg

SEQ ID NO: 724870 - RNA, 19 nt, Artificial Sequence
  Description of Artificial Sequence: Synthetic oligonucleotide
uuguagaaccggcgguugg

SEQ ID NO: 724871 - RNA, 19 nt, Artificial Sequence
  Description of Artificial Sequence: Synthetic oligonucleotide
ugacucaaaccuuuguaau

SEQ ID NO: 724872 - RNA, 19 nt, Artificial Sequence
  Description of Artificial Sequence: Synthetic oligonucleotide
aagaucuuaagagcugggu

SEQ ID NO: 724873 - RNA, 19 nt, Artificial Sequence
  Description of Artificial Sequence: Synthetic oligonucleotide
acgcuucccacuucaaagg

SEQ ID NO: 724874 - RNA, 19 nt, Artificial Sequence
  Description of Artificial Sequence: Synthetic oligonucleotide
uguagaaccggcgguuggg

SEQ ID NO: 724875 - RNA, 19 nt, Artificial Sequence
  Description of Artificial Sequence: Synthetic oligonucleotide
caguuuaguuacauacagc

SEQ ID NO: 724876 - RNA, 19 nt, Artificial Sequence
  Description of Artificial Sequence: Synthetic oligonucleotide
aacugucuggaguuuacuu

SEQ ID NO: 724877 - RNA, 19 nt, Artificial Sequence
  Description of Artificial Sequence: Synthetic oligonucleotide
caaauuagcugauuucaga

SEQ ID NO: 724878 - RNA, 19 nt, Artificial Sequence
  Description of Artificial Sequence: Synthetic oligonucleotide
ucgugaagccuuuacccgc

SEQ ID NO: 724879 - RNA, 19 nt, Artificial Sequence
  Description of Artificial Sequence: Synthetic oligonucleotide
gaaucaucccaacccggcc

SEQ ID NO: 724880 - RNA, 19 nt, Artificial Sequence
  Description of Artificial Sequence: Synthetic oligonucleotide
uucggacagaacugucugg

SEQ ID NO: 724881 - RNA, 19 nt, Artificial Sequence
  Description of Artificial Sequence: Synthetic oligonucleotide
uugaucgaugccccaggag

SEQ ID NO: 724882 - RNA, 19 nt, Artificial Sequence
  Description of Artificial Sequence: Synthetic oligonucleotide
gucguauccagguagugga

SEQ ID NO: 724883 - RNA, 19 nt, Artificial Sequence
  Description of Artificial Sequence: Synthetic oligonucleotide
gggaaaagcccuuugcgcc

SEQ ID NO: 724884 - RNA, 19 nt, Artificial Sequence
  Description of Artificial Sequence: Synthetic oligonucleotide
uaacccucuccaugaaucc

SEQ ID NO: 724885 - RNA, 19 nt, Artificial Sequence
  Description of Artificial Sequence: Synthetic oligonucleotide
uuggguccggggaugggcg

SEQ ID NO: 724886 - RNA, 19 nt, Artificial Sequence
  Description of Artificial Sequence: Synthetic oligonucleotide
ucugggaugccguaacuau

SEQ ID NO: 724887 - RNA, 19 nt, Artificial Sequence
  Description of Artificial Sequence: Synthetic oligonucleotide
caacucuaaugaauuaguc

SEQ ID NO: 724888 - RNA, 19 nt, Artificial Sequence
  Description of Artificial Sequence: Synthetic oligonucleotide
cuugcaugugagagaacgc

SEQ ID NO: 724889 - RNA, 19 nt, Artificial Sequence
  Description of Artificial Sequence: Synthetic oligonucleotide
uuugauccugaaucuacau

SEQ ID NO: 724890 - RNA, 19 nt, Artificial Sequence
  Description of Artificial Sequence: Synthetic oligonucleotide
agaaucaaaccuggcggac

SEQ ID NO: 724891 - RNA, 19 nt, Artificial Sequence
  Description of Artificial Sequence: Synthetic oligonucleotide
uagcugauuucagaaacca

SEQ ID NO: 724892 - RNA, 19 nt, Artificial Sequence
  Description of Artificial Sequence: Synthetic oligonucleotide
ugacaguaugacuaugaua

SEQ ID NO: 724893 - RNA, 19 nt, Artificial Sequence
  Description of Artificial Sequence: Synthetic oligonucleotide
aggugggcgaagccgagcg

SEQ ID NO: 724894 - RNA, 19 nt, Artificial Sequence
  Description of Artificial Sequence: Synthetic oligonucleotide
guucggacagaacugucug

SEQ ID NO: 724895 - RNA, 19 nt, Artificial Sequence
  Description of Artificial Sequence: Synthetic oligonucleotide
ggucaaagauuuuaacaug

SEQ ID NO: 724896 - RNA, 19 nt, Artificial Sequence
  Description of Artificial Sequence: Synthetic oligonucleotide
guuuaguuacauacagcag

SEQ ID NO: 724897 - RNA, 19 nt, Artificial Sequence
  Description of Artificial Sequence: Synthetic oligonucleotide
cucuaaugaauuagucuuc

SEQ ID NO: 724898 - RNA, 19 nt, Artificial Sequence
  Description of Artificial Sequence: Synthetic oligonucleotide
gacuuucacaaugucacca

SEQ ID NO: 724899 - RNA, 19 nt, Artificial Sequence
  Description of Artificial Sequence: Synthetic oligonucleotide
ggcaagagcuugcagaggc

SEQ ID NO: 724900 - RNA, 19 nt, Artificial Sequence
  Description of Artificial Sequence: Synthetic oligonucleotide
acauaaggaacaggaauca

SEQ ID NO: 724901 - RNA, 19 nt, Artificial Sequence
  Description of Artificial Sequence: Synthetic oligonucleotide
ugggaugccguaacuauua

SEQ ID NO: 724902 - RNA, 19 nt, Artificial Sequence
  Description of Artificial Sequence: Synthetic oligonucleotide
agaaguucggacagaacug

SEQ ID NO: 724903 - RNA, 19 nt, Artificial Sequence
  Description of Artificial Sequence: Synthetic oligonucleotide
uucggaacacacaacucua

SEQ ID NO: 724904 - RNA, 19 nt, Artificial Sequence
  Description of Artificial Sequence: Synthetic oligonucleotide
uuguuccuuacacuaucac

SEQ ID NO: 724905 - RNA, 19 nt, Artificial Sequence
  Description of Artificial Sequence: Synthetic oligonucleotide
gagggucaaagauuuuaac

SEQ ID NO: 724906 - RNA, 19 nt, Artificial Sequence
  Description of Artificial Sequence: Synthetic oligonucleotide
aucauacagaguccguaca

SEQ ID NO: 724907 - RNA, 19 nt, Artificial Sequence
  Description of Artificial Sequence: Synthetic oligonucleotide
agaaccggcgguugggcag

SEQ ID NO: 724908 - RNA, 19 nt, Artificial Sequence
  Description of Artificial Sequence: Synthetic oligonucleotide
agccuuuacccgcugucgg

SEQ ID NO: 724909 - RNA, 19 nt, Artificial Sequence
  Description of Artificial Sequence: Synthetic oligonucleotide
gguggucguauccagguag

SEQ ID NO: 724910 - RNA, 19 nt, Artificial Sequence
  Description of Artificial Sequence: Synthetic oligonucleotide
uacuggcaacuguagguag

SEQ ID NO: 724911 - RNA, 19 nt, Artificial Sequence
  Description of Artificial Sequence: Synthetic oligonucleotide
uguucggaacacacaacuc

SEQ ID NO: 724912 - RNA, 19 nt, Artificial Sequence
  Description of Artificial Sequence: Synthetic oligonucleotide
aaaaucauacagaguccgu

SEQ ID NO: 724913 - RNA, 19 nt, Artificial Sequence
  Description of Artificial Sequence: Synthetic oligonucleotide
gcucgugaagccuuuaccc

SEQ ID NO: 724914 - RNA, 19 nt, Artificial Sequence
  Description of Artificial Sequence: Synthetic oligonucleotide
caugugagagaacgcuucc

SEQ ID NO: 724915 - RNA, 19 nt, Artificial Sequence
  Description of Artificial Sequence: Synthetic oligonucleotide
ucuguucggaacacacaac

SEQ ID NO: 724916 - RNA, 19 nt, Artificial Sequence
  Description of Artificial Sequence: Synthetic oligonucleotide
ggcaacuguagguagagga

SEQ ID NO: 724917 - RNA, 19 nt, Artificial Sequence
  Description of Artificial Sequence: Synthetic oligonucleotide
aagccccuuuaguuaaaug

SEQ ID NO: 724918 - RNA, 19 nt, Artificial Sequence
  Description of Artificial Sequence: Synthetic oligonucleotide
agaguccguacauauucca

SEQ ID NO: 724919 - RNA, 19 nt, Artificial Sequence
  Description of Artificial Sequence: Synthetic oligonucleotide
uucagaaguucggacagaa

SEQ ID NO: 724920 - RNA, 19 nt, Artificial Sequence
  Description of Artificial Sequence: Synthetic oligonucleotide
uuugcaaagacagguccau

SEQ ID NO: 724921 - RNA, 19 nt, Artificial Sequence
  Description of Artificial Sequence: Synthetic oligonucleotide
caaaugugcaggagaccgc

SEQ ID NO: 724922 - RNA, 19 nt, Artificial Sequence
  Description of Artificial Sequence: Synthetic oligonucleotide
ucgaggugggcgaagccga

SEQ ID NO: 724923 - RNA, 19 nt, Artificial Sequence
  Description of Artificial Sequence: Synthetic oligonucleotide
guuguggcaaagccauugc

SEQ ID NO: 724924 - RNA, 19 nt, Artificial Sequence
  Description of Artificial Sequence: Synthetic oligonucleotide
ucgauuaagguggucguau

SEQ ID NO: 724925 - RNA, 19 nt, Artificial Sequence
  Description of Artificial Sequence: Synthetic oligonucleotide
cagaguccguacauauucc

SEQ ID NO: 724926 - RNA, 19 nt, Artificial Sequence
  Description of Artificial Sequence: Synthetic oligonucleotide
aagcccgggaacacugggc

SEQ ID NO: 724927 - RNA, 19 nt, Artificial Sequence
  Description of Artificial Sequence: Synthetic oligonucleotide
aaaccuggcggacgacaug

SEQ ID NO: 724928 - RNA, 19 nt, Artificial Sequence
  Description of Artificial Sequence: Synthetic oligonucleotide
ucggacacggacaguacau

SEQ ID NO: 724929 - RNA, 19 nt, Artificial Sequence
  Description of Artificial Sequence: Synthetic oligonucleotide
guucggaacacacaacucu

SEQ ID NO: 724930 - RNA, 19 nt, Artificial Sequence
  Description of Artificial Sequence: Synthetic oligonucleotide
guuuaugggacauuuugau

SEQ ID NO: 724931 - RNA, 19 nt, Artificial Sequence
  Description of Artificial Sequence: Synthetic oligonucleotide
aguaugacuaugauacaaa

SEQ ID NO: 724932 - RNA, 19 nt, Artificial Sequence
  Description of Artificial Sequence: Synthetic oligonucleotide
ugcgagacacgcgaguucu

SEQ ID NO: 724933 - RNA, 19 nt, Artificial Sequence
  Description of Artificial Sequence: Synthetic oligonucleotide
augguguuggguccgggga

SEQ ID NO: 724934 - RNA, 19 nt, Artificial Sequence
  Description of Artificial Sequence: Synthetic oligonucleotide
aaaauccaaccuacuauuu

SEQ ID NO: 724935 - RNA, 19 nt, Artificial Sequence
  Description of Artificial Sequence: Synthetic oligonucleotide
gucgaggugggcgaagccg

SEQ ID NO: 724936 - RNA, 19 nt, Artificial Sequence
  Description of Artificial Sequence: Synthetic oligonucleotide
ggugcugagacagaacccc

SEQ ID NO: 724937 - RNA, 19 nt, Artificial Sequence
  Description of Artificial Sequence: Synthetic oligonucleotide
ugcaggagaccgccaaugu

SEQ ID NO: 724938 - RNA, 19 nt, Artificial Sequence
  Description of Artificial Sequence: Synthetic oligonucleotide
uucucggacacggacagua

SEQ ID NO: 724939 - RNA, 19 nt, Artificial Sequence
  Description of Artificial Sequence: Synthetic oligonucleotide
cugcuauaaucaaaaggca

SEQ ID NO: 724940 - RNA, 19 nt, Artificial Sequence
  Description of Artificial Sequence: Synthetic oligonucleotide
cauguaccaggcagagcgg

SEQ ID NO: 724941 - RNA, 19 nt, Artificial Sequence
  Description of Artificial Sequence: Synthetic oligonucleotide
cacggacaguacauagucc

SEQ ID NO: 724942 - RNA, 19 nt, Artificial Sequence
  Description of Artificial Sequence: Synthetic oligonucleotide
auaugcgugagcagguucu

SEQ ID NO: 724943 - RNA, 19 nt, Artificial Sequence
  Description of Artificial Sequence: Synthetic oligonucleotide
aaguucggacagaacuguc

SEQ ID NO: 724944 - RNA, 19 nt, Artificial Sequence
  Description of Artificial Sequence: Synthetic oligonucleotide
auuggugggcuuggauacc

SEQ ID NO: 724945 - RNA, 19 nt, Artificial Sequence
  Description of Artificial Sequence: Synthetic oligonucleotide
agcgguagcagaggccgcc

SEQ ID NO: 724946 - RNA, 19 nt, Artificial Sequence
  Description of Artificial Sequence: Synthetic oligonucleotide
agcaacggcaagagcuugc

SEQ ID NO: 724947 - RNA, 19 nt, Artificial Sequence
  Description of Artificial Sequence: Synthetic oligonucleotide
gaccucgaggagcaaucag

SEQ ID NO: 724948 - RNA, 19 nt, Artificial Sequence
  Description of Artificial Sequence: Synthetic oligonucleotide
ccaaauuagcugauuucag

SEQ ID NO: 724949 - RNA, 19 nt, Artificial Sequence
  Description of Artificial Sequence: Synthetic oligonucleotide
gaagagcaagcccgggaac

SEQ ID NO: 724950 - RNA, 19 nt, Artificial Sequence
  Description of Artificial Sequence: Synthetic oligonucleotide
aucuuaagagcugggugug

SEQ ID NO: 724951 - RNA, 19 nt, Artificial Sequence
  Description of Artificial Sequence: Synthetic oligonucleotide
uggaggcauuccaaaugug

SEQ ID NO: 724952 - RNA, 19 nt, Artificial Sequence
  Description of Artificial Sequence: Synthetic oligonucleotide
caaguuguggcaaagccau

SEQ ID NO: 724953 - RNA, 19 nt, Artificial Sequence
  Description of Artificial Sequence: Synthetic oligonucleotide
uuccuuacacuaucacaaa

SEQ ID NO: 724954 - RNA, 19 nt, Artificial Sequence
  Description of Artificial Sequence: Synthetic oligonucleotide
cagucuugcuggucaacag

SEQ ID NO: 724955 - RNA, 19 nt, Artificial Sequence
  Description of Artificial Sequence: Synthetic oligonucleotide
ggaguugaugauguagugc

SEQ ID NO: 724956 - RNA, 19 nt, Artificial Sequence
  Description of Artificial Sequence: Synthetic oligonucleotide
gguugaucgaugccccagg

SEQ ID NO: 724957 - RNA, 19 nt, Artificial Sequence
  Description of Artificial Sequence: Synthetic oligonucleotide
acaguaugacuaugauaca

SEQ ID NO: 724958 - RNA, 19 nt, Artificial Sequence
  Description of Artificial Sequence: Synthetic oligonucleotide
cuccuggcgagacacuggc

SEQ ID NO: 724959 - RNA, 19 nt, Artificial Sequence
  Description of Artificial Sequence: Synthetic oligonucleotide
agcaaucacucguugucau

SEQ ID NO: 724960 - RNA, 19 nt, Artificial Sequence
  Description of Artificial Sequence: Synthetic oligonucleotide
acacacaacucuaaugaau

SEQ ID NO: 724961 - RNA, 19 nt, Artificial Sequence
  Description of Artificial Sequence: Synthetic oligonucleotide
cagaaucaaaccuggcgga

SEQ ID NO: 724962 - RNA, 19 nt, Artificial Sequence
  Description of Artificial Sequence: Synthetic oligonucleotide
ggacaguacauaguccccg

SEQ ID NO: 724963 - RNA, 19 nt, Artificial Sequence
  Description of Artificial Sequence: Synthetic oligonucleotide
ggucguauccagguagugg

SEQ ID NO: 724964 - RNA, 19 nt, Artificial Sequence
  Description of Artificial Sequence: Synthetic oligonucleotide
ggaaaagcccuuugcgccc

SEQ ID NO: 724965 - RNA, 19 nt, Artificial Sequence
  Description of Artificial Sequence: Synthetic oligonucleotide
gcuacucuuugacaguaug

SEQ ID NO: 724966 - RNA, 19 nt, Artificial Sequence
  Description of Artificial Sequence: Synthetic oligonucleotide
gagaccgccaauguaugga

SEQ ID NO: 724967 - RNA, 19 nt, Artificial Sequence
  Description of Artificial Sequence: Synthetic oligonucleotide
aguucggacagaacugucu

SEQ ID NO: 724968 - RNA, 19 nt, Artificial Sequence
  Description of Artificial Sequence: Synthetic oligonucleotide
accucgccuucccacuggc

SEQ ID NO: 724969 - RNA, 19 nt, Artificial Sequence
  Description of Artificial Sequence: Synthetic oligonucleotide
ucucgccugcucgugaagc

SEQ ID NO: 724970 - RNA, 19 nt, Artificial Sequence
  Description of Artificial Sequence: Synthetic oligonucleotide
cauguggcgaagaccucac

SEQ ID NO: 724971 - RNA, 19 nt, Artificial Sequence
  Description of Artificial Sequence: Synthetic oligonucleotide
auuguuccuuacacuauca

SEQ ID NO: 724972 - RNA, 19 nt, Artificial Sequence
  Description of Artificial Sequence: Synthetic oligonucleotide
caagcccgggaacacuggg

SEQ ID NO: 724973 - RNA, 19 nt, Artificial Sequence
  Description of Artificial Sequence: Synthetic oligonucleotide
ggugugacuugcaugugag

SEQ ID NO: 724974 - RNA, 19 nt, Artificial Sequence
  Description of Artificial Sequence: Synthetic oligonucleotide
gugggcuuggauacccugg

SEQ ID NO: 724975 - RNA, 19 nt, Artificial Sequence
  Description of Artificial Sequence: Synthetic oligonucleotide
uacagaguccguacauauu

SEQ ID NO: 724976 - RNA, 19 nt, Artificial Sequence
  Description of Artificial Sequence: Synthetic oligonucleotide
uuccuauuuccaugcuuuc

SEQ ID NO: 724977 - RNA, 19 nt, Artificial Sequence
  Description of Artificial Sequence: Synthetic oligonucleotide
ccuggcgagacacuggccc

SEQ ID NO: 724978 - RNA, 19 nt, Artificial Sequence
  Description of Artificial Sequence: Synthetic oligonucleotide
cacggugugacuugcaugu

SEQ ID NO: 724979 - RNA, 19 nt, Artificial Sequence
  Description of Artificial Sequence: Synthetic oligonucleotide
guaugacuaugauacaaau

SEQ ID NO: 724980 - RNA, 19 nt, Artificial Sequence
  Description of Artificial Sequence: Synthetic oligonucleotide
ucaccucgccuucccacug

SEQ ID NO: 724981 - RNA, 19 nt, Artificial Sequence
  Description of Artificial Sequence: Synthetic oligonucleotide
uggcaaagccauugcucug

SEQ ID NO: 724982 - RNA, 19 nt, Artificial Sequence
  Description of Artificial Sequence: Synthetic oligonucleotide
uuacuuccucugucguccc

SEQ ID NO: 724983 - RNA, 19 nt, Artificial Sequence
  Description of Artificial Sequence: Synthetic oligonucleotide
acucguugucaucuggguu

SEQ ID NO: 724984 - RNA, 19 nt, Artificial Sequence
  Description of Artificial Sequence: Synthetic oligonucleotide
cucgccugcucgugaagcc

SEQ ID NO: 724985 - RNA, 19 nt, Artificial Sequence
  Description of Artificial Sequence: Synthetic oligonucleotide
agaccgccaauguauggaa

SEQ ID NO: 724986 - RNA, 19 nt, Artificial Sequence
  Description of Artificial Sequence: Synthetic oligonucleotide
caguaugacuaugauacaa

SEQ ID NO: 724987 - RNA, 19 nt, Artificial Sequence
  Description of Artificial Sequence: Synthetic oligonucleotide
cuguucggaacacacaacu

SEQ ID NO: 724988 - RNA, 19 nt, Artificial Sequence
  Description of Artificial Sequence: Synthetic oligonucleotide
uuucagaaguucggacaga

SEQ ID NO: 724989 - RNA, 19 nt, Artificial Sequence
  Description of Artificial Sequence: Synthetic oligonucleotide
gaacgcuucccacuucaaa

SEQ ID NO: 724990 - RNA, 19 nt, Artificial Sequence
  Description of Artificial Sequence: Synthetic oligonucleotide
agcacggugugacuugcau

SEQ ID NO: 724991 - RNA, 19 nt, Artificial Sequence
  Description of Artificial Sequence: Synthetic oligonucleotide
agguacucucuucuggauu

SEQ ID NO: 724992 - RNA, 19 nt, Artificial Sequence
  Description of Artificial Sequence: Synthetic oligonucleotide
cuggcgagacacuggcccc

SEQ ID NO: 724993 - RNA, 19 nt, Artificial Sequence
  Description of Artificial Sequence: Synthetic oligonucleotide
gguccauucuguguggaug

SEQ ID NO: 724994 - RNA, 19 nt, Artificial Sequence
  Description of Artificial Sequence: Synthetic oligonucleotide
cuuguuccgggcacuccac

SEQ ID NO: 724995 - RNA, 19 nt, Artificial Sequence
  Description of Artificial Sequence: Synthetic oligonucleotide
acuguagguagaggaguug

SEQ ID NO: 724996 - RNA, 19 nt, Artificial Sequence
  Description of Artificial Sequence: Synthetic oligonucleotide
gacggcaauagcaaucacu

SEQ ID NO: 724997 - RNA, 19 nt, Artificial Sequence
  Description of Artificial Sequence: Synthetic oligonucleotide
gucauaagcacaagguacu

SEQ ID NO: 724998 - RNA, 19 nt, Artificial Sequence
  Description of Artificial Sequence: Synthetic oligonucleotide
gcuucucuauuaucacuag

SEQ ID NO: 724999 - RNA, 19 nt, Artificial Sequence
  Description of Artificial Sequence: Synthetic oligonucleotide
uaugcgugagcagguucug

SEQ ID NO: 725000 - RNA, 19 nt, Artificial Sequence
  Description of Artificial Sequence: Synthetic oligonucleotide
ggagaccgccaauguaugg

SEQ ID NO: 725001 - RNA, 19 nt, Artificial Sequence
  Description of Artificial Sequence: Synthetic oligonucleotide
gaaguucggacagaacugu

SEQ ID NO: 725002 - RNA, 19 nt, Artificial Sequence
  Description of Artificial Sequence: Synthetic oligonucleotide
gaaccggcgguugggcagg

SEQ ID NO: 725003 - RNA, 19 nt, Artificial Sequence
  Description of Artificial Sequence: Synthetic oligonucleotide
gguaguggaucuuguagaa

SEQ ID NO: 725004 - RNA, 19 nt, Artificial Sequence
  Description of Artificial Sequence: Synthetic oligonucleotide
ggccaaauuagcugauuuc

SEQ ID NO: 725005 - RNA, 19 nt, Artificial Sequence
  Description of Artificial Sequence: Synthetic oligonucleotide
uuccgggcacuccaccacu

SEQ ID NO: 725006 - RNA, 19 nt, Artificial Sequence
  Description of Artificial Sequence: Synthetic oligonucleotide
uccagcgacuucuguccug

SEQ ID NO: 725007 - RNA, 19 nt, Artificial Sequence
  Description of Artificial Sequence: Synthetic oligonucleotide
uucgggcuucucuauuauc

SEQ ID NO: 725008 - RNA, 19 nt, Artificial Sequence
  Description of Artificial Sequence: Synthetic oligonucleotide
guugaucgaugccccagga

SEQ ID NO: 725009 - RNA, 19 nt, Artificial Sequence
  Description of Artificial Sequence: Synthetic oligonucleotide
gaggaagggccucucggaa

SEQ ID NO: 725010 - RNA, 19 nt, Artificial Sequence
  Description of Artificial Sequence: Synthetic oligonucleotide
agcgacuucuguccuggaa

SEQ ID NO: 725011 - RNA, 19 nt, Artificial Sequence
  Description of Artificial Sequence: Synthetic oligonucleotide
cucugucgucccaagaaaa

SEQ ID NO: 725012 - RNA, 19 nt, Artificial Sequence
  Description of Artificial Sequence: Synthetic oligonucleotide
guucgauuaagguggucgu

SEQ ID NO: 725013 - RNA, 19 nt, Artificial Sequence
  Description of Artificial Sequence: Synthetic oligonucleotide
ucguauccagguaguggau

SEQ ID NO: 725014 - RNA, 19 nt, Artificial Sequence
  Description of Artificial Sequence: Synthetic oligonucleotide
ugcucucgccugcucguga

SEQ ID NO: 725015 - RNA, 19 nt, Artificial Sequence
  Description of Artificial Sequence: Synthetic oligonucleotide
gccguaacuauuagaauuc

SEQ ID NO: 725016 - RNA, 19 nt, Artificial Sequence
  Description of Artificial Sequence: Synthetic oligonucleotide
uucgauuaagguggucgua

SEQ ID NO: 725017 - RNA, 19 nt, Artificial Sequence
  Description of Artificial Sequence: Synthetic oligonucleotide
uacaugcagucuugcuggu

SEQ ID NO: 725018 - RNA, 19 nt, Artificial Sequence
  Description of Artificial Sequence: Synthetic oligonucleotide
uuggauacccugggcgcug

SEQ ID NO: 725019 - RNA, 19 nt, Artificial Sequence
  Description of Artificial Sequence: Synthetic oligonucleotide
ggaguacuggcaacuguag

SEQ ID NO: 725020 - RNA, 19 nt, Artificial Sequence
  Description of Artificial Sequence: Synthetic oligonucleotide
cucguugucaucuggguuu

SEQ ID NO: 725021 - RNA, 19 nt, Artificial Sequence
  Description of Artificial Sequence: Synthetic oligonucleotide
caaucacucguugucaucu

SEQ ID NO: 725022 - RNA, 19 nt, Artificial Sequence
  Description of Artificial Sequence: Synthetic oligonucleotide
ggacuaggaacaugccaug

SEQ ID NO: 725023 - RNA, 19 nt, Artificial Sequence
  Description of Artificial Sequence: Synthetic oligonucleotide
auguaccaggcagagcggu

SEQ ID NO: 725024 - RNA, 19 nt, Artificial Sequence
  Description of Artificial Sequence: Synthetic oligonucleotide
uuuacccgcugucggcuuu

SEQ ID NO: 725025 - RNA, 19 nt, Artificial Sequence
  Description of Artificial Sequence: Synthetic oligonucleotide
guuccgggcacuccaccac

SEQ ID NO: 725026 - RNA, 19 nt, Artificial Sequence
  Description of Artificial Sequence: Synthetic oligonucleotide
gcugccugcacaagcaagc

SEQ ID NO: 725027 - RNA, 19 nt, Artificial Sequence
  Description of Artificial Sequence: Synthetic oligonucleotide
uggcggacgacaugguguu

SEQ ID NO: 725028 - RNA, 19 nt, Artificial Sequence
  Description of Artificial Sequence: Synthetic oligonucleotide
ggcgcugguucgauuaagg

SEQ ID NO: 725029 - RNA, 19 nt, Artificial Sequence
  Description of Artificial Sequence: Synthetic oligonucleotide
acuggcaacuguagguaga

SEQ ID NO: 725030 - RNA, 19 nt, Artificial Sequence
  Description of Artificial Sequence: Synthetic oligonucleotide
gcggacgacaugguguugg

SEQ ID NO: 725031 - RNA, 19 nt, Artificial Sequence
  Description of Artificial Sequence: Synthetic oligonucleotide
uggucguauccagguagug

SEQ ID NO: 725032 - RNA, 19 nt, Artificial Sequence
  Description of Artificial Sequence: Synthetic oligonucleotide
aucaaaccuggcggacgac

SEQ ID NO: 725033 - RNA, 19 nt, Artificial Sequence
  Description of Artificial Sequence: Synthetic oligonucleotide
guggauggcaaaggguuga

SEQ ID NO: 725034 - RNA, 19 nt, Artificial Sequence
  Description of Artificial Sequence: Synthetic oligonucleotide
cucggacacggacaguaca

SEQ ID NO: 725035 - RNA, 19 nt, Artificial Sequence
  Description of Artificial Sequence: Synthetic oligonucleotide
gagagaacgcuucccacuu

SEQ ID NO: 725036 - RNA, 19 nt, Artificial Sequence
  Description of Artificial Sequence: Synthetic oligonucleotide
ggagacuaugacaggcagc

SEQ ID NO: 725037 - RNA, 19 nt, Artificial Sequence
  Description of Artificial Sequence: Synthetic oligonucleotide
gaucgaugccccaggagua

SEQ ID NO: 725038 - RNA, 19 nt, Artificial Sequence
  Description of Artificial Sequence: Synthetic oligonucleotide
accaaacuccagguuuaug

SEQ ID NO: 725039 - RNA, 19 nt, Artificial Sequence
  Description of Artificial Sequence: Synthetic oligonucleotide
ucgggcuucucagcugccc

SEQ ID NO: 725040 - RNA, 19 nt, Artificial Sequence
  Description of Artificial Sequence: Synthetic oligonucleotide
gguugagcauaugcgugag

SEQ ID NO: 725041 - RNA, 19 nt, Artificial Sequence
  Description of Artificial Sequence: Synthetic oligonucleotide
cuggcggacgacauggugu

SEQ ID NO: 725042 - RNA, 19 nt, Artificial Sequence
  Description of Artificial Sequence: Synthetic oligonucleotide
aggagaccgccaauguaug

SEQ ID NO: 725043 - RNA, 19 nt, Artificial Sequence
  Description of Artificial Sequence: Synthetic oligonucleotide
uggagacgggucugagccu

SEQ ID NO: 725044 - RNA, 19 nt, Artificial Sequence
  Description of Artificial Sequence: Synthetic oligonucleotide
ggaugccguaacuauuaga

SEQ ID NO: 725045 - RNA, 19 nt, Artificial Sequence
  Description of Artificial Sequence: Synthetic oligonucleotide
gaauuccuauuuccaugcu

SEQ ID NO: 725046 - RNA, 19 nt, Artificial Sequence
  Description of Artificial Sequence: Synthetic oligonucleotide
cccuuugcgcccauucacc

SEQ ID NO: 725047 - RNA, 19 nt, Artificial Sequence
  Description of Artificial Sequence: Synthetic oligonucleotide
caccgggccgccucacagg

SEQ ID NO: 725048 - RNA, 19 nt, Artificial Sequence
  Description of Artificial Sequence: Synthetic oligonucleotide
gacacggacaguacauagu

SEQ ID NO: 725049 - RNA, 19 nt, Artificial Sequence
  Description of Artificial Sequence: Synthetic oligonucleotide
gcacggugugacuugcaug

SEQ ID NO: 725050 - RNA, 19 nt, Artificial Sequence
  Description of Artificial Sequence: Synthetic oligonucleotide
uuacccgcugucggcuuug

SEQ ID NO: 725051 - RNA, 19 nt, Artificial Sequence
  Description of Artificial Sequence: Synthetic oligonucleotide
caccucgccuucccacugg

SEQ ID NO: 725052 - RNA, 19 nt, Artificial Sequence
  Description of Artificial Sequence: Synthetic oligonucleotide
guguuggguccggggaugg

SEQ ID NO: 725053 - RNA, 19 nt, Artificial Sequence
  Description of Artificial Sequence: Synthetic oligonucleotide
ugggcgcugguucgauuaa

SEQ ID NO: 725054 - RNA, 19 nt, Artificial Sequence
  Description of Artificial Sequence: Synthetic oligonucleotide
ucgccuucccacuggccau

SEQ ID NO: 725055 - RNA, 19 nt, Artificial Sequence
  Description of Artificial Sequence: Synthetic oligonucleotide
agcugauuucagaaaccaa

SEQ ID NO: 725056 - RNA, 19 nt, Artificial Sequence
  Description of Artificial Sequence: Synthetic oligonucleotide
cgaggagcaaucagagggc

SEQ ID NO: 725057 - RNA, 19 nt, Artificial Sequence
  Description of Artificial Sequence: Synthetic oligonucleotide
ccagcgacuucuguccugg

SEQ ID NO: 725058 - RNA, 19 nt, Artificial Sequence
  Description of Artificial Sequence: Synthetic oligonucleotide
gccuuuacccgcugucggc

SEQ ID NO: 725059 - RNA, 19 nt, Artificial Sequence
  Description of Artificial Sequence: Synthetic oligonucleotide
gugugacuugcaugugaga

SEQ ID NO: 725060 - RNA, 19 nt, Artificial Sequence
  Description of Artificial Sequence: Synthetic oligonucleotide
agccgagcgguagcagagg

SEQ ID NO: 725061 - RNA, 19 nt, Artificial Sequence
  Description of Artificial Sequence: Synthetic oligonucleotide
ggcaaaggguugaucgaug

SEQ ID NO: 725062 - RNA, 19 nt, Artificial Sequence
  Description of Artificial Sequence: Synthetic oligonucleotide
uggcgagacacuggcccca

SEQ ID NO: 725063 - RNA, 19 nt, Artificial Sequence
  Description of Artificial Sequence: Synthetic oligonucleotide
caacuguagguagaggagu

SEQ ID NO: 725064 - RNA, 19 nt, Artificial Sequence
  Description of Artificial Sequence: Synthetic oligonucleotide
cccacuucaaaggagacua

SEQ ID NO: 725065 - RNA, 19 nt, Artificial Sequence
  Description of Artificial Sequence: Synthetic oligonucleotide
cuuaagagcuggguguggu

SEQ ID NO: 725066 - RNA, 19 nt, Artificial Sequence
  Description of Artificial Sequence: Synthetic oligonucleotide
auguggcgaagaccucaca

SEQ ID NO: 725067 - RNA, 19 nt, Artificial Sequence
  Description of Artificial Sequence: Synthetic oligonucleotide
gaggugggcgaagccgagc

SEQ ID NO: 725068 - RNA, 19 nt, Artificial Sequence
  Description of Artificial Sequence: Synthetic oligonucleotide
ccguaacuauuagaauucc

SEQ ID NO: 725069 - RNA, 19 nt, Artificial Sequence
  Description of Artificial Sequence: Synthetic oligonucleotide
cauaagcacaagguacucu

SEQ ID NO: 725070 - RNA, 19 nt, Artificial Sequence
  Description of Artificial Sequence: Synthetic oligonucleotide
uggauggcaaaggguugau

SEQ ID NO: 725071 - RNA, 19 nt, Artificial Sequence
  Description of Artificial Sequence: Synthetic oligonucleotide
acccgcugucggcuuuggg

SEQ ID NO: 725072 - RNA, 19 nt, Artificial Sequence
  Description of Artificial Sequence: Synthetic oligonucleotide
gcaaucacucguugucauc

SEQ ID NO: 725073 - RNA, 19 nt, Artificial Sequence
  Description of Artificial Sequence: Synthetic oligonucleotide
gguagaggagucccggacu

SEQ ID NO: 725074 - RNA, 19 nt, Artificial Sequence
  Description of Artificial Sequence: Synthetic oligonucleotide
ugggcgaagccgagcggua

SEQ ID NO: 725075 - RNA, 19 nt, Artificial Sequence
  Description of Artificial Sequence: Synthetic oligonucleotide
gucggcuuuggggccgagg

SEQ ID NO: 725076 - RNA, 19 nt, Artificial Sequence
  Description of Artificial Sequence: Synthetic oligonucleotide
ggugggcgaagccgagcgg

SEQ ID NO: 725077 - RNA, 19 nt, Artificial Sequence
  Description of Artificial Sequence: Synthetic oligonucleotide
gcaccgggccgccucacag

SEQ ID NO: 725078 - RNA, 19 nt, Artificial Sequence
  Description of Artificial Sequence: Synthetic oligonucleotide
gggacauuuugauccugaa

SEQ ID NO: 725079 - RNA, 19 nt, Artificial Sequence
  Description of Artificial Sequence: Synthetic oligonucleotide
ggagacgggucugagccuc

SEQ ID NO: 725080 - RNA, 19 nt, Artificial Sequence
  Description of Artificial Sequence: Synthetic oligonucleotide
uacccgcugucggcuuugg

SEQ ID NO: 725081 - RNA, 19 nt, Artificial Sequence
  Description of Artificial Sequence: Synthetic oligonucleotide
ccgccaauguauggaaagc

SEQ ID NO: 725082 - RNA, 19 nt, Artificial Sequence
  Description of Artificial Sequence: Synthetic oligonucleotide
cggacaguacauagucccc

SEQ ID NO: 725083 - RNA, 19 nt, Artificial Sequence
  Description of Artificial Sequence: Synthetic oligonucleotide
ggcgucugcugcucucgcc

SEQ ID NO: 725084 - RNA, 19 nt, Artificial Sequence
  Description of Artificial Sequence: Synthetic oligonucleotide
ccggacuaggaacaugcca

SEQ ID NO: 725085 - RNA, 19 nt, Artificial Sequence
  Description of Artificial Sequence: Synthetic oligonucleotide
aaguuguggcaaagccauu

SEQ ID NO: 725086 - RNA, 19 nt, Artificial Sequence
  Description of Artificial Sequence: Synthetic oligonucleotide
ccggcgguugggcagggag

SEQ ID NO: 725087 - RNA, 19 nt, Artificial Sequence
  Description of Artificial Sequence: Synthetic oligonucleotide
cccugcucucagaaauggc

SEQ ID NO: 725088 - RNA, 19 nt, Artificial Sequence
  Description of Artificial Sequence: Synthetic oligonucleotide
gcaccaagccccuuuaguu

SEQ ID NO: 725089 - RNA, 19 nt, Artificial Sequence
  Description of Artificial Sequence: Synthetic oligonucleotide
acggugugacuugcaugug

SEQ ID NO: 725090 - RNA, 19 nt, Artificial Sequence
  Description of Artificial Sequence: Synthetic oligonucleotide
gaccgccaauguauggaaa

SEQ ID NO: 725091 - RNA, 19 nt, Artificial Sequence
  Description of Artificial Sequence: Synthetic oligonucleotide
gucccggacuaggaacaug

SEQ ID NO: 725092 - RNA, 19 nt, Artificial Sequence
  Description of Artificial Sequence: Synthetic oligonucleotide
ggaguuguggucugagguu

SEQ ID NO: 725093 - RNA, 19 nt, Artificial Sequence
  Description of Artificial Sequence: Synthetic oligonucleotide
gcaagcccgggaacacugg

SEQ ID NO: 725094 - RNA, 19 nt, Artificial Sequence
  Description of Artificial Sequence: Synthetic oligonucleotide
ccguacauauuccacauuu

SEQ ID NO: 725095 - RNA, 19 nt, Artificial Sequence
  Description of Artificial Sequence: Synthetic oligonucleotide
ccgagcgguagcagaggcc

SEQ ID NO: 725096 - RNA, 19 nt, Artificial Sequence
  Description of Artificial Sequence: Synthetic oligonucleotide
cuuggauacccugggcgcu

SEQ ID NO: 725097 - RNA, 19 nt, Artificial Sequence
  Description of Artificial Sequence: Synthetic oligonucleotide
gcaacggcaagagcuugca

SEQ ID NO: 725098 - RNA, 19 nt, Artificial Sequence
  Description of Artificial Sequence: Synthetic oligonucleotide
cccggacuaggaacaugcc

SEQ ID NO: 725099 - RNA, 19 nt, Artificial Sequence
  Description of Artificial Sequence: Synthetic oligonucleotide
gcaggagaccgccaaugua

SEQ ID NO: 725100 - RNA, 19 nt, Artificial Sequence
  Description of Artificial Sequence: Synthetic oligonucleotide
cgggccgccucacaggaag

SEQ ID NO: 725101 - RNA, 19 nt, Artificial Sequence
  Description of Artificial Sequence: Synthetic oligonucleotide
ccccauguaccaggcagag

SEQ ID NO: 725102 - RNA, 19 nt, Artificial Sequence
  Description of Artificial Sequence: Synthetic oligonucleotide
cugggaugccguaacuauu

SEQ ID NO: 725103 - RNA, 19 nt, Artificial Sequence
  Description of Artificial Sequence: Synthetic oligonucleotide
ggacggcaauagcaaucac

SEQ ID NO: 725104 - RNA, 19 nt, Artificial Sequence
  Description of Artificial Sequence: Synthetic oligonucleotide
gggcgaagccgagcgguag

SEQ ID NO: 725105 - RNA, 19 nt, Artificial Sequence
  Description of Artificial Sequence: Synthetic oligonucleotide
ccaggaguacuggcaacug

SEQ ID NO: 725106 - RNA, 19 nt, Artificial Sequence
  Description of Artificial Sequence: Synthetic oligonucleotide
cugcucucgccugcucgug

SEQ ID NO: 725107 - RNA, 19 nt, Artificial Sequence
  Description of Artificial Sequence: Synthetic oligonucleotide
guggucguauccagguagu

SEQ ID NO: 725108 - RNA, 19 nt, Artificial Sequence
  Description of Artificial Sequence: Synthetic oligonucleotide
cggccauccuuguuccggg

SEQ ID NO: 725109 - RNA, 19 nt, Artificial Sequence
  Description of Artificial Sequence: Synthetic oligonucleotide
gggcgcugguucgauuaag

SEQ ID NO: 725110 - RNA, 19 nt, Artificial Sequence
  Description of Artificial Sequence: Synthetic oligonucleotide
ccucugucgucccaagaaa

SEQ ID NO: 725111 - RNA, 19 nt, Artificial Sequence
  Description of Artificial Sequence: Synthetic oligonucleotide
ggcgaagaccucacaagcu

SEQ ID NO: 725112 - RNA, 19 nt, Artificial Sequence
  Description of Artificial Sequence: Synthetic oligonucleotide
cguaacuauuagaauuccu

SEQ ID NO: 725113 - RNA, 19 nt, Artificial Sequence
  Description of Artificial Sequence: Synthetic oligonucleotide
cauuuacaugggccaaauu

SEQ ID NO: 725114 - RNA, 19 nt, Artificial Sequence
  Description of Artificial Sequence: Synthetic oligonucleotide
cugguucgauuaagguggu

SEQ ID NO: 725115 - RNA, 19 nt, Artificial Sequence
  Description of Artificial Sequence: Synthetic oligonucleotide
gcuaacccucuccaugaau

SEQ ID NO: 725116 - RNA, 19 nt, Artificial Sequence
  Description of Artificial Sequence: Synthetic oligonucleotide
cagcacggugugacuugca

SEQ ID NO: 725117 - RNA, 19 nt, Artificial Sequence
  Description of Artificial Sequence: Synthetic oligonucleotide
gcgcugguucgauuaaggu

SEQ ID NO: 725118 - RNA, 19 nt, Artificial Sequence
  Description of Artificial Sequence: Synthetic oligonucleotide
ugucggcuuuggggccgag

SEQ ID NO: 725119 - RNA, 19 nt, Artificial Sequence
  Description of Artificial Sequence: Synthetic oligonucleotide
cagggacggcaauagcaau

SEQ ID NO: 725120 - RNA, 19 nt, Artificial Sequence
  Description of Artificial Sequence: Synthetic oligonucleotide
gcucucgccugcucgugaa

SEQ ID NO: 725121 - RNA, 19 nt, Artificial Sequence
  Description of Artificial Sequence: Synthetic oligonucleotide
cgaugccccaggaguacug

SEQ ID NO: 725122 - RNA, 19 nt, Artificial Sequence
  Description of Artificial Sequence: Synthetic oligonucleotide
ggcuaacccucuccaugaa

SEQ ID NO: 725123 - RNA, 19 nt, Artificial Sequence
  Description of Artificial Sequence: Synthetic oligonucleotide
cuuuacccgcugucggcuu

SEQ ID NO: 725124 - RNA, 19 nt, Artificial Sequence
  Description of Artificial Sequence: Synthetic oligonucleotide
cagcgacuucuguccugga

SEQ ID NO: 725125 - RNA, 19 nt, Artificial Sequence
  Description of Artificial Sequence: Synthetic oligonucleotide
caccgcccgccugcaccgg

SEQ ID NO: 725126 - RNA, 19 nt, Artificial Sequence
  Description of Artificial Sequence: Synthetic oligonucleotide
cugcaccgggccgccucac

SEQ ID NO: 725127 - RNA, 19 nt, Artificial Sequence
  Description of Artificial Sequence: Synthetic oligonucleotide
gcaagagcuugcagaggcu

SEQ ID NO: 725128 - RNA, 19 nt, Artificial Sequence
  Description of Artificial Sequence: Synthetic oligonucleotide
ggcggacgacaugguguug

SEQ ID NO: 725129 - RNA, 19 nt, Artificial Sequence
  Description of Artificial Sequence: Synthetic oligonucleotide
cccacuggccauuuauauu

SEQ ID NO: 725130 - RNA, 19 nt, Artificial Sequence
  Description of Artificial Sequence: Synthetic oligonucleotide
ccuuuacccgcugucggcu

SEQ ID NO: 725131 - RNA, 19 nt, Artificial Sequence
  Description of Artificial Sequence: Synthetic oligonucleotide
cugggucgaggugggcgaa

SEQ ID NO: 725132 - RNA, 19 nt, Artificial Sequence
  Description of Artificial Sequence: Synthetic oligonucleotide
gcccggcgcccagggaugg

SEQ ID NO: 725133 - RNA, 19 nt, Artificial Sequence
  Description of Artificial Sequence: Synthetic oligonucleotide
ggacgacaugguguugggu

SEQ ID NO: 725134 - RNA, 19 nt, Artificial Sequence
  Description of Artificial Sequence: Synthetic oligonucleotide
cugucggcuuuggggccga

SEQ ID NO: 725135 - RNA, 19 nt, Artificial Sequence
  Description of Artificial Sequence: Synthetic oligonucleotide
cgccaauguauggaaagcu

SEQ ID NO: 725136 - RNA, 19 nt, Artificial Sequence
  Description of Artificial Sequence: Synthetic oligonucleotide
guucucggacacggacagu

SEQ ID NO: 725137 - RNA, 19 nt, Artificial Sequence
  Description of Artificial Sequence: Synthetic oligonucleotide
gcccgggaacacugggcaa

SEQ ID NO: 725138 - RNA, 19 nt, Artificial Sequence
  Description of Artificial Sequence: Synthetic oligonucleotide
ccugcaccgggccgccuca

SEQ ID NO: 725139 - RNA, 19 nt, Artificial Sequence
  Description of Artificial Sequence: Synthetic oligonucleotide
gggccgccucacaggaaga

SEQ ID NO: 725140 - RNA, 19 nt, Artificial Sequence
  Description of Artificial Sequence: Synthetic oligonucleotide
cggcgucugcugcucucgc

SEQ ID NO: 725141 - RNA, 19 nt, Artificial Sequence
  Description of Artificial Sequence: Synthetic oligonucleotide
cgguagcagaggccgccuc

SEQ ID NO: 725142 - RNA, 19 nt, Artificial Sequence
  Description of Artificial Sequence: Synthetic oligonucleotide
ccgggcacuccaccacugu

SEQ ID NO: 725143 - RNA, 19 nt, Artificial Sequence
  Description of Artificial Sequence: Synthetic oligonucleotide
cccggcgcccagggauggc

SEQ ID NO: 725144 - RNA, 19 nt, Artificial Sequence
  Description of Artificial Sequence: Synthetic oligonucleotide
cggcgguugggcagggagu

SEQ ID NO: 725145 - RNA, 19 nt, Artificial Sequence
  Description of Artificial Sequence: Synthetic oligonucleotide
ccccauuggugggcuugga

SEQ ID NO: 725146 - RNA, 19 nt, Artificial Sequence
  Description of Artificial Sequence: Synthetic oligonucleotide
ccgggccgccucacaggaa

SEQ ID NO: 725147 - RNA, 19 nt, Artificial Sequence
  Description of Artificial Sequence: Synthetic oligonucleotide
gccugcucgugaagccuuu

SEQ ID NO: 725148 - RNA, 19 nt, Artificial Sequence
  Description of Artificial Sequence: Synthetic oligonucleotide
ccgccaccgcccgccugca

SEQ ID NO: 725149 - RNA, 19 nt, Artificial Sequence
  Description of Artificial Sequence: Synthetic oligonucleotide
uguaaguuaagucaaaacc

SEQ ID NO: 725150 - RNA, 19 nt, Artificial Sequence
  Description of Artificial Sequence: Synthetic oligonucleotide
aauguauccaaccauugac

SEQ ID NO: 725151 - RNA, 19 nt, Artificial Sequence
  Description of Artificial Sequence: Synthetic oligonucleotide
aaaguacucagauauaaca

SEQ ID NO: 725152 - RNA, 19 nt, Artificial Sequence
  Description of Artificial Sequence: Synthetic oligonucleotide
uccaaugaaagaaugaaug

SEQ ID NO: 725153 - RNA, 19 nt, Artificial Sequence
  Description of Artificial Sequence: Synthetic oligonucleotide
uaaguuaagucaaaacccg

SEQ ID NO: 725154 - RNA, 19 nt, Artificial Sequence
  Description of Artificial Sequence: Synthetic oligonucleotide
ugugauuucagcauucagc

SEQ ID NO: 725155 - RNA, 19 nt, Artificial Sequence
  Description of Artificial Sequence: Synthetic oligonucleotide
uguguuuggauccuuggcg

SEQ ID NO: 725156 - RNA, 19 nt, Artificial Sequence
  Description of Artificial Sequence: Synthetic oligonucleotide
aaugcgaaugauuggcugg

SEQ ID NO: 725157 - RNA, 19 nt, Artificial Sequence
  Description of Artificial Sequence: Synthetic oligonucleotide
gauaauagaggucccaggc

SEQ ID NO: 725158 - RNA, 19 nt, Artificial Sequence
  Description of Artificial Sequence: Synthetic oligonucleotide
aacacgugauaauagaggu

SEQ ID NO: 725159 - RNA, 19 nt, Artificial Sequence
  Description of Artificial Sequence: Synthetic oligonucleotide
uuuuccgaagagaaguagg

SEQ ID NO: 725160 - RNA, 19 nt, Artificial Sequence
  Description of Artificial Sequence: Synthetic oligonucleotide
uucgccaaguucuacaccg

SEQ ID NO: 725161 - RNA, 19 nt, Artificial Sequence
  Description of Artificial Sequence: Synthetic oligonucleotide
aaauguuugugaugaguuc

SEQ ID NO: 725162 - RNA, 19 nt, Artificial Sequence
  Description of Artificial Sequence: Synthetic oligonucleotide
caaggugucgucaugagag

SEQ ID NO: 725163 - RNA, 19 nt, Artificial Sequence
  Description of Artificial Sequence: Synthetic oligonucleotide
aaaccaaccuggaauauac

SEQ ID NO: 725164 - RNA, 19 nt, Artificial Sequence
  Description of Artificial Sequence: Synthetic oligonucleotide
guaaguuaagucaaaaccc

SEQ ID NO: 725165 - RNA, 19 nt, Artificial Sequence
  Description of Artificial Sequence: Synthetic oligonucleotide
uauaacauggugucuagac

SEQ ID NO: 725166 - RNA, 19 nt, Artificial Sequence
  Description of Artificial Sequence: Synthetic oligonucleotide
uuugugaugaguucucuug

SEQ ID NO: 725167 - RNA, 19 nt, Artificial Sequence
  Description of Artificial Sequence: Synthetic oligonucleotide
aaagcaguccccgaagucg

SEQ ID NO: 725168 - RNA, 19 nt, Artificial Sequence
  Description of Artificial Sequence: Synthetic oligonucleotide
gacgugaugacuugcaaag

SEQ ID NO: 725169 - RNA, 19 nt, Artificial Sequence
  Description of Artificial Sequence: Synthetic oligonucleotide
accuguaaccuccauagcg

SEQ ID NO: 725170 - RNA, 19 nt, Artificial Sequence
  Description of Artificial Sequence: Synthetic oligonucleotide
acguguuuucacuuuauac

SEQ ID NO: 725171 - RNA, 19 nt, Artificial Sequence
  Description of Artificial Sequence: Synthetic oligonucleotide
auacguuccuggcacagcc

SEQ ID NO: 725172 - RNA, 19 nt, Artificial Sequence
  Description of Artificial Sequence: Synthetic oligonucleotide
aacacggcaggaauggugc

SEQ ID NO: 725173 - RNA, 19 nt, Artificial Sequence
  Description of Artificial Sequence: Synthetic oligonucleotide
uuaguuacccauuuucugu

SEQ ID NO: 725174 - RNA, 19 nt, Artificial Sequence
  Description of Artificial Sequence: Synthetic oligonucleotide
gaccaguaagcuuaucucg

SEQ ID NO: 725175 - RNA, 19 nt, Artificial Sequence
  Description of Artificial Sequence: Synthetic oligonucleotide
ucugaacacgugauaauag

SEQ ID NO: 725176 - RNA, 19 nt, Artificial Sequence
  Description of Artificial Sequence: Synthetic oligonucleotide
uuguucauaauucccgacc

SEQ ID NO: 725177 - RNA, 19 nt, Artificial Sequence
  Description of Artificial Sequence: Synthetic oligonucleotide
auagcguuggucaacauuc

SEQ ID NO: 725178 - RNA, 19 nt, Artificial Sequence
  Description of Artificial Sequence: Synthetic oligonucleotide
ucuauaguugccauccaga

SEQ ID NO: 725179 - RNA, 19 nt, Artificial Sequence
  Description of Artificial Sequence: Synthetic oligonucleotide
agaaaucccgaccaguaag

SEQ ID NO: 725180 - RNA, 19 nt, Artificial Sequence
  Description of Artificial Sequence: Synthetic oligonucleotide
acugcguaucucuggaugc

SEQ ID NO: 725181 - RNA, 19 nt, Artificial Sequence
  Description of Artificial Sequence: Synthetic oligonucleotide
aaacaacacacucaucccu

SEQ ID NO: 725182 - RNA, 19 nt, Artificial Sequence
  Description of Artificial Sequence: Synthetic oligonucleotide
uucuuaguuacccauuuuc

SEQ ID NO: 725183 - RNA, 19 nt, Artificial Sequence
  Description of Artificial Sequence: Synthetic oligonucleotide
ugacaugacggcuaaggag

SEQ ID NO: 725184 - RNA, 19 nt, Artificial Sequence
  Description of Artificial Sequence: Synthetic oligonucleotide
ugguucuucggucaaacca

SEQ ID NO: 725185 - RNA, 19 nt, Artificial Sequence
  Description of Artificial Sequence: Synthetic oligonucleotide
cacgugauaauagaggucc

SEQ ID NO: 725186 - RNA, 19 nt, Artificial Sequence
  Description of Artificial Sequence: Synthetic oligonucleotide
ugauaauagaggucccagg

SEQ ID NO: 725187 - RNA, 19 nt, Artificial Sequence
  Description of Artificial Sequence: Synthetic oligonucleotide
gaacacgugauaauagagg

SEQ ID NO: 725188 - RNA, 19 nt, Artificial Sequence
  Description of Artificial Sequence: Synthetic oligonucleotide
gacaugacggcuaaggagc

SEQ ID NO: 725189 - RNA, 19 nt, Artificial Sequence
  Description of Artificial Sequence: Synthetic oligonucleotide
ucuuaguuacccauuuucu

SEQ ID NO: 725190 - RNA, 19 nt, Artificial Sequence
  Description of Artificial Sequence: Synthetic oligonucleotide
ucaacuuuaggaccuuggc

SEQ ID NO: 725191 - RNA, 19 nt, Artificial Sequence
  Description of Artificial Sequence: Synthetic oligonucleotide
uguucauaauucccgaccu

SEQ ID NO: 725192 - RNA, 19 nt, Artificial Sequence
  Description of Artificial Sequence: Synthetic oligonucleotide
aauggauucuggcaccgug

SEQ ID NO: 725193 - RNA, 19 nt, Artificial Sequence
  Description of Artificial Sequence: Synthetic oligonucleotide
gacugaaugcgaaugauug

SEQ ID NO: 725194 - RNA, 19 nt, Artificial Sequence
  Description of Artificial Sequence: Synthetic oligonucleotide
uccaguucagcaaaggguc

SEQ ID NO: 725195 - RNA, 19 nt, Artificial Sequence
  Description of Artificial Sequence: Synthetic oligonucleotide
gucgucaugagagaaaucc

SEQ ID NO: 725196 - RNA, 19 nt, Artificial Sequence
  Description of Artificial Sequence: Synthetic oligonucleotide
ggucauagcaaccucaaag

SEQ ID NO: 725197 - RNA, 19 nt, Artificial Sequence
  Description of Artificial Sequence: Synthetic oligonucleotide
uguuagucuaaauggaauc

SEQ ID NO: 725198 - RNA, 19 nt, Artificial Sequence
  Description of Artificial Sequence: Synthetic oligonucleotide
uuuucuuaugggcugguuc

SEQ ID NO: 725199 - RNA, 19 nt, Artificial Sequence
  Description of Artificial Sequence: Synthetic oligonucleotide
gaugacugcguaucucugg

SEQ ID NO: 725200 - RNA, 19 nt, Artificial Sequence
  Description of Artificial Sequence: Synthetic oligonucleotide
augagagaaaucccgacca

SEQ ID NO: 725201 - RNA, 19 nt, Artificial Sequence
  Description of Artificial Sequence: Synthetic oligonucleotide
cuuaguuacccauuuucug

SEQ ID NO: 725202 - RNA, 19 nt, Artificial Sequence
  Description of Artificial Sequence: Synthetic oligonucleotide
gauuucauguacuuuccuc

SEQ ID NO: 725203 - RNA, 19 nt, Artificial Sequence
  Description of Artificial Sequence: Synthetic oligonucleotide
aaugauuggcugguugggg

SEQ ID NO: 725204 - RNA, 19 nt, Artificial Sequence
  Description of Artificial Sequence: Synthetic oligonucleotide
uucugguuucaccaaacca

SEQ ID NO: 725205 - RNA, 19 nt, Artificial Sequence
  Description of Artificial Sequence: Synthetic oligonucleotide
acugaaugcgaaugauugg

SEQ ID NO: 725206 - RNA, 19 nt, Artificial Sequence
  Description of Artificial Sequence: Synthetic oligonucleotide
auaauucccgaccugucug

SEQ ID NO: 725207 - RNA, 19 nt, Artificial Sequence
  Description of Artificial Sequence: Synthetic oligonucleotide
uguuuaaggcuucugguuu

SEQ ID NO: 725208 - RNA, 19 nt, Artificial Sequence
  Description of Artificial Sequence: Synthetic oligonucleotide
uauaguugguucuucgguc

SEQ ID NO: 725209 - RNA, 19 nt, Artificial Sequence
  Description of Artificial Sequence: Synthetic oligonucleotide
caugagagaaaucccgacc

SEQ ID NO: 725210 - RNA, 19 nt, Artificial Sequence
  Description of Artificial Sequence: Synthetic oligonucleotide
ucuucggucaaaccacacc

SEQ ID NO: 725211 - RNA, 19 nt, Artificial Sequence
  Description of Artificial Sequence: Synthetic oligonucleotide
uacaccguccaaaauuucu

SEQ ID NO: 725212 - RNA, 19 nt, Artificial Sequence
  Description of Artificial Sequence: Synthetic oligonucleotide
cugaaugcgaaugauuggc

SEQ ID NO: 725213 - RNA, 19 nt, Artificial Sequence
  Description of Artificial Sequence: Synthetic oligonucleotide
ggaaacauacugcagcucc

SEQ ID NO: 725214 - RNA, 19 nt, Artificial Sequence
  Description of Artificial Sequence: Synthetic oligonucleotide
guuguugaccgcaugcucg

SEQ ID NO: 725215 - RNA, 19 nt, Artificial Sequence
  Description of Artificial Sequence: Synthetic oligonucleotide
cuauaguugccauccagac

SEQ ID NO: 725216 - RNA, 19 nt, Artificial Sequence
  Description of Artificial Sequence: Synthetic oligonucleotide
uaauagaggucccaggcuu

SEQ ID NO: 725217 - RNA, 19 nt, Artificial Sequence
  Description of Artificial Sequence: Synthetic oligonucleotide
ucuacaccguccaaaauuu

SEQ ID NO: 725218 - RNA, 19 nt, Artificial Sequence
  Description of Artificial Sequence: Synthetic oligonucleotide
aaaccuccccuccugggag

SEQ ID NO: 725219 - RNA, 19 nt, Artificial Sequence
  Description of Artificial Sequence: Synthetic oligonucleotide
gaaugcgaaugauuggcug

SEQ ID NO: 725220 - RNA, 19 nt, Artificial Sequence
  Description of Artificial Sequence: Synthetic oligonucleotide
aagcaugaugcgaugcucg

SEQ ID NO: 725221 - RNA, 19 nt, Artificial Sequence
  Description of Artificial Sequence: Synthetic oligonucleotide
guaaccuccauagcguugg

SEQ ID NO: 725222 - RNA, 19 nt, Artificial Sequence
  Description of Artificial Sequence: Synthetic oligonucleotide
uguauccaaccauugacau

SEQ ID NO: 725223 - RNA, 19 nt, Artificial Sequence
  Description of Artificial Sequence: Synthetic oligonucleotide
gauggacugaaugcgaaug

SEQ ID NO: 725224 - RNA, 19 nt, Artificial Sequence
  Description of Artificial Sequence: Synthetic oligonucleotide
ucgaugugcaggaucuucc

SEQ ID NO: 725225 - RNA, 19 nt, Artificial Sequence
  Description of Artificial Sequence: Synthetic oligonucleotide
uggccuuucagcaggaaaa

SEQ ID NO: 725226 - RNA, 19 nt, Artificial Sequence
  Description of Artificial Sequence: Synthetic oligonucleotide
uaauucccgaccugucugg

SEQ ID NO: 725227 - RNA, 19 nt, Artificial Sequence
  Description of Artificial Sequence: Synthetic oligonucleotide
uguccuuauguucccgaag

SEQ ID NO: 725228 - RNA, 19 nt, Artificial Sequence
  Description of Artificial Sequence: Synthetic oligonucleotide
guccuuauguucccgaagc

SEQ ID NO: 725229 - RNA, 19 nt, Artificial Sequence
  Description of Artificial Sequence: Synthetic oligonucleotide
auaauagaggucccaggcu

SEQ ID NO: 725230 - RNA, 19 nt, Artificial Sequence
  Description of Artificial Sequence: Synthetic oligonucleotide
aaguacucagauauaacau

SEQ ID NO: 725231 - RNA, 19 nt, Artificial Sequence
  Description of Artificial Sequence: Synthetic oligonucleotide
ucucgaacccuguuaauaa

SEQ ID NO: 725232 - RNA, 19 nt, Artificial Sequence
  Description of Artificial Sequence: Synthetic oligonucleotide
caucccucacugaacacgg

SEQ ID NO: 725233 - RNA, 19 nt, Artificial Sequence
  Description of Artificial Sequence: Synthetic oligonucleotide
caugaugcgaugcucgaug

SEQ ID NO: 725234 - RNA, 19 nt, Artificial Sequence
  Description of Artificial Sequence: Synthetic oligonucleotide
uuuguucauaauucccgac

SEQ ID NO: 725235 - RNA, 19 nt, Artificial Sequence
  Description of Artificial Sequence: Synthetic oligonucleotide
auaguugguucuucgguca

SEQ ID NO: 725236 - RNA, 19 nt, Artificial Sequence
  Description of Artificial Sequence: Synthetic oligonucleotide
gaaugauuggcugguuggg

SEQ ID NO: 725237 - RNA, 19 nt, Artificial Sequence
  Description of Artificial Sequence: Synthetic oligonucleotide
uaggagguuggcucaaacc

SEQ ID NO: 725238 - RNA, 19 nt, Artificial Sequence
  Description of Artificial Sequence: Synthetic oligonucleotide
ucgucaugagagaaauccc

SEQ ID NO: 725239 - RNA, 19 nt, Artificial Sequence
  Description of Artificial Sequence: Synthetic oligonucleotide
gacugcguaucucuggaug

SEQ ID NO: 725240 - RNA, 19 nt, Artificial Sequence
  Description of Artificial Sequence: Synthetic oligonucleotide
gguauuuguguccauuagc

SEQ ID NO: 725241 - RNA, 19 nt, Artificial Sequence
  Description of Artificial Sequence: Synthetic oligonucleotide
ucccuguuuucuuaugggc

SEQ ID NO: 725242 - RNA, 19 nt, Artificial Sequence
  Description of Artificial Sequence: Synthetic oligonucleotide
gacguugcuugcuugauaa

SEQ ID NO: 725243 - RNA, 19 nt, Artificial Sequence
  Description of Artificial Sequence: Synthetic oligonucleotide
uuaagucaaaacccguauu

SEQ ID NO: 725244 - RNA, 19 nt, Artificial Sequence
  Description of Artificial Sequence: Synthetic oligonucleotide
uauuuguguccauuagccu

SEQ ID NO: 725245 - RNA, 19 nt, Artificial Sequence
  Description of Artificial Sequence: Synthetic oligonucleotide
auuucuuaguuacccauuu

SEQ ID NO: 725246 - RNA, 19 nt, Artificial Sequence
  Description of Artificial Sequence: Synthetic oligonucleotide
ggcacaugagaauuugggg

SEQ ID NO: 725247 - RNA, 19 nt, Artificial Sequence
  Description of Artificial Sequence: Synthetic oligonucleotide
ugaaugcgaaugauuggcu

SEQ ID NO: 725248 - RNA, 19 nt, Artificial Sequence
  Description of Artificial Sequence: Synthetic oligonucleotide
gguauaguugguucuucgg

SEQ ID NO: 725249 - RNA, 19 nt, Artificial Sequence
  Description of Artificial Sequence: Synthetic oligonucleotide
gaugagggcgugcagcgug

SEQ ID NO: 725250 - RNA, 19 nt, Artificial Sequence
  Description of Artificial Sequence: Synthetic oligonucleotide
ugugagcugggguaacugc

SEQ ID NO: 725251 - RNA, 19 nt, Artificial Sequence
  Description of Artificial Sequence: Synthetic oligonucleotide
uguaaccuccauagcguug

SEQ ID NO: 725252 - RNA, 19 nt, Artificial Sequence
  Description of Artificial Sequence: Synthetic oligonucleotide
acucaucccucacugaaca

SEQ ID NO: 725253 - RNA, 19 nt, Artificial Sequence
  Description of Artificial Sequence: Synthetic oligonucleotide
ucggucaaaccacaccucu

SEQ ID NO: 725254 - RNA, 19 nt, Artificial Sequence
  Description of Artificial Sequence: Synthetic oligonucleotide
guguuuggauccuuggcgc

SEQ ID NO: 725255 - RNA, 19 nt, Artificial Sequence
  Description of Artificial Sequence: Synthetic oligonucleotide
uuguuuaaggcuucugguu

SEQ ID NO: 725256 - RNA, 19 nt, Artificial Sequence
  Description of Artificial Sequence: Synthetic oligonucleotide
gaugcgaugcucgauguuc

SEQ ID NO: 725257 - RNA, 19 nt, Artificial Sequence
  Description of Artificial Sequence: Synthetic oligonucleotide
caucuccaaugaaagaaug

SEQ ID NO: 725258 - RNA, 19 nt, Artificial Sequence
  Description of Artificial Sequence: Synthetic oligonucleotide
gaugacuugcaaagacggg

SEQ ID NO: 725259 - RNA, 19 nt, Artificial Sequence
  Description of Artificial Sequence: Synthetic oligonucleotide
gaaaguacucagauauaac

SEQ ID NO: 725260 - RNA, 19 nt, Artificial Sequence
  Description of Artificial Sequence: Synthetic oligonucleotide
caauucaaggucccggcac

SEQ ID NO: 725261 - RNA, 19 nt, Artificial Sequence
  Description of Artificial Sequence: Synthetic oligonucleotide
uucccgaccugucuggugu

SEQ ID NO: 725262 - RNA, 19 nt, Artificial Sequence
  Description of Artificial Sequence: Synthetic oligonucleotide
uagucuaaauggaaucuuu

SEQ ID NO: 725263 - RNA, 19 nt, Artificial Sequence
  Description of Artificial Sequence: Synthetic oligonucleotide
gguuccggucaccagaagg

SEQ ID NO: 725264 - RNA, 19 nt, Artificial Sequence
  Description of Artificial Sequence: Synthetic oligonucleotide
gagucagguggucauaguc

SEQ ID NO: 725265 - RNA, 19 nt, Artificial Sequence
  Description of Artificial Sequence: Synthetic oligonucleotide
cuuugugauuucagcauuc

SEQ ID NO: 725266 - RNA, 19 nt, Artificial Sequence
  Description of Artificial Sequence: Synthetic oligonucleotide
acgggauggacugaaugcg

SEQ ID NO: 725267 - RNA, 19 nt, Artificial Sequence
  Description of Artificial Sequence: Synthetic oligonucleotide
gugauaauagaggucccag

SEQ ID NO: 725268 - RNA, 19 nt, Artificial Sequence
  Description of Artificial Sequence: Synthetic oligonucleotide
uuggacgugaugacuugca

SEQ ID NO: 725269 - RNA, 19 nt, Artificial Sequence
  Description of Artificial Sequence: Synthetic oligonucleotide
cacaacagcacuugccuuc

SEQ ID NO: 725270 - RNA, 19 nt, Artificial Sequence
  Description of Artificial Sequence: Synthetic oligonucleotide
uuugugauuucagcauuca

SEQ ID NO: 725271 - RNA, 19 nt, Artificial Sequence
  Description of Artificial Sequence: Synthetic oligonucleotide
ugucuagacguguuuucac

SEQ ID NO: 725272 - RNA, 19 nt, Artificial Sequence
  Description of Artificial Sequence: Synthetic oligonucleotide
uuuguuuauuuaguuggau

SEQ ID NO: 725273 - RNA, 19 nt, Artificial Sequence
  Description of Artificial Sequence: Synthetic oligonucleotide
gguuggaacguccaaggug

SEQ ID NO: 725274 - RNA, 19 nt, Artificial Sequence
  Description of Artificial Sequence: Synthetic oligonucleotide
caaccuggaauauacagua

SEQ ID NO: 725275 - RNA, 19 nt, Artificial Sequence
  Description of Artificial Sequence: Synthetic oligonucleotide
gaacccuguuaauaaucug

SEQ ID NO: 725276 - RNA, 19 nt, Artificial Sequence
  Description of Artificial Sequence: Synthetic oligonucleotide
augcucgaacaccuccacc

SEQ ID NO: 725277 - RNA, 19 nt, Artificial Sequence
  Description of Artificial Sequence: Synthetic oligonucleotide
augacggcuaaggagcggg

SEQ ID NO: 725278 - RNA, 19 nt, Artificial Sequence
  Description of Artificial Sequence: Synthetic oligonucleotide
aaacucgugcccauugcug

SEQ ID NO: 725279 - RNA, 19 nt, Artificial Sequence
  Description of Artificial Sequence: Synthetic oligonucleotide
uagucugccagguuccggu

SEQ ID NO: 725280 - RNA, 19 nt, Artificial Sequence
  Description of Artificial Sequence: Synthetic oligonucleotide
gcaaagacgggauggacug

SEQ ID NO: 725281 - RNA, 19 nt, Artificial Sequence
  Description of Artificial Sequence: Synthetic oligonucleotide
gagucuguccucguucggg

SEQ ID NO: 725282 - RNA, 19 nt, Artificial Sequence
  Description of Artificial Sequence: Synthetic oligonucleotide
aaguucuacaccguccaaa

SEQ ID NO: 725283 - RNA, 19 nt, Artificial Sequence
  Description of Artificial Sequence: Synthetic oligonucleotide
ugguucgccaaguucuaca

SEQ ID NO: 725284 - RNA, 19 nt, Artificial Sequence
  Description of Artificial Sequence: Synthetic oligonucleotide
agcgggaugacugcguauc

SEQ ID NO: 725285 - RNA, 19 nt, Artificial Sequence
  Description of Artificial Sequence: Synthetic oligonucleotide
acacucaucccucacugaa

SEQ ID NO: 725286 - RNA, 19 nt, Artificial Sequence
  Description of Artificial Sequence: Synthetic oligonucleotide
cagcaaauguuugugauga

SEQ ID NO: 725287 - RNA, 19 nt, Artificial Sequence
  Description of Artificial Sequence: Synthetic oligonucleotide
gacaccagccaauguagca

SEQ ID NO: 725288 - RNA, 19 nt, Artificial Sequence
  Description of Artificial Sequence: Synthetic oligonucleotide
cugaacacgugauaauaga

SEQ ID NO: 725289 - RNA, 19 nt, Artificial Sequence
  Description of Artificial Sequence: Synthetic oligonucleotide
ucauacguuccuggcacag

SEQ ID NO: 725290 - RNA, 19 nt, Artificial Sequence
  Description of Artificial Sequence: Synthetic oligonucleotide
uguuuggauccuuggcgca

SEQ ID NO: 725291 - RNA, 19 nt, Artificial Sequence
  Description of Artificial Sequence: Synthetic oligonucleotide
ggucauacguuccuggcac

SEQ ID NO: 725292 - RNA, 19 nt, Artificial Sequence
  Description of Artificial Sequence: Synthetic oligonucleotide
uuagucuaaauggaaucuu

SEQ ID NO: 725293 - RNA, 19 nt, Artificial Sequence
  Description of Artificial Sequence: Synthetic oligonucleotide
uguggaucggcaccuccac

SEQ ID NO: 725294 - RNA, 19 nt, Artificial Sequence
  Description of Artificial Sequence: Synthetic oligonucleotide
aaggugucgucaugagaga

SEQ ID NO: 725295 - RNA, 19 nt, Artificial Sequence
  Description of Artificial Sequence: Synthetic oligonucleotide
cacaccucugagcuggggc

SEQ ID NO: 725296 - RNA, 19 nt, Artificial Sequence
  Description of Artificial Sequence: Synthetic oligonucleotide
aaucccgaccaguaagcuu

SEQ ID NO: 725297 - RNA, 19 nt, Artificial Sequence
  Description of Artificial Sequence: Synthetic oligonucleotide
cuuuaguccacuggaagca

SEQ ID NO: 725298 - RNA, 19 nt, Artificial Sequence
  Description of Artificial Sequence: Synthetic oligonucleotide
uggaacguccaaggugucg

SEQ ID NO: 725299 - RNA, 19 nt, Artificial Sequence
  Description of Artificial Sequence: Synthetic oligonucleotide
aacccguauuucuuaguua

SEQ ID NO: 725300 - RNA, 19 nt, Artificial Sequence
  Description of Artificial Sequence: Synthetic oligonucleotide
uagacguguuuucacuuua

SEQ ID NO: 725301 - RNA, 19 nt, Artificial Sequence
  Description of Artificial Sequence: Synthetic oligonucleotide
ggguauaguugguucuucg

SEQ ID NO: 725302 - RNA, 19 nt, Artificial Sequence
  Description of Artificial Sequence: Synthetic oligonucleotide
auggauucuggcaccgugg

SEQ ID NO: 725303 - RNA, 19 nt, Artificial Sequence
  Description of Artificial Sequence: Synthetic oligonucleotide
aaaucccgaccaguaagcu

SEQ ID NO: 725304 - RNA, 19 nt, Artificial Sequence
  Description of Artificial Sequence: Synthetic oligonucleotide
accguccaaaauuucuacu

SEQ ID NO: 725305 - RNA, 19 nt, Artificial Sequence
  Description of Artificial Sequence: Synthetic oligonucleotide
agcggguauaguugguucu

SEQ ID NO: 725306 - RNA, 19 nt, Artificial Sequence
  Description of Artificial Sequence: Synthetic oligonucleotide
uucgaagcaugaugcgaug

SEQ ID NO: 725307 - RNA, 19 nt, Artificial Sequence
  Description of Artificial Sequence: Synthetic oligonucleotide
ucgaagcaugaugcgaugc

SEQ ID NO: 725308 - RNA, 19 nt, Artificial Sequence
  Description of Artificial Sequence: Synthetic oligonucleotide
uugguucuucggucaaacc

SEQ ID NO: 725309 - RNA, 19 nt, Artificial Sequence
  Description of Artificial Sequence: Synthetic oligonucleotide
guucauaauucccgaccug

SEQ ID NO: 725310 - RNA, 19 nt, Artificial Sequence
  Description of Artificial Sequence: Synthetic oligonucleotide
uggacagcgggaugacugc

SEQ ID NO: 725311 - RNA, 19 nt, Artificial Sequence
  Description of Artificial Sequence: Synthetic oligonucleotide
uuucuuaguuacccauuuu

SEQ ID NO: 725312 - RNA, 19 nt, Artificial Sequence
  Description of Artificial Sequence: Synthetic oligonucleotide
guuggaacguccaaggugu

SEQ ID NO: 725313 - RNA, 19 nt, Artificial Sequence
  Description of Artificial Sequence: Synthetic oligonucleotide
cgucaugagagaaaucccg

SEQ ID NO: 725314 - RNA, 19 nt, Artificial Sequence
  Description of Artificial Sequence: Synthetic oligonucleotide
auguuugugaugaguucuc

SEQ ID NO: 725315 - RNA, 19 nt, Artificial Sequence
  Description of Artificial Sequence: Synthetic oligonucleotide
ugugcaggaucuucccgcu

SEQ ID NO: 725316 - RNA, 19 nt, Artificial Sequence
  Description of Artificial Sequence: Synthetic oligonucleotide
guauaguugguucuucggu

SEQ ID NO: 725317 - RNA, 19 nt, Artificial Sequence
  Description of Artificial Sequence: Synthetic oligonucleotide
cucaaaccaaccuggaaua

SEQ ID NO: 725318 - RNA, 19 nt, Artificial Sequence
  Description of Artificial Sequence: Synthetic oligonucleotide
ccuaaaauguauccaacca

SEQ ID NO: 725319 - RNA, 19 nt, Artificial Sequence
  Description of Artificial Sequence: Synthetic oligonucleotide
auucgaagcaugaugcgau

SEQ ID NO: 725320 - RNA, 19 nt, Artificial Sequence
  Description of Artificial Sequence: Synthetic oligonucleotide
augaugcgaugcucgaugu

SEQ ID NO: 725321 - RNA, 19 nt, Artificial Sequence
  Description of Artificial Sequence: Synthetic oligonucleotide
gacuugcaaagacgggaug

SEQ ID NO: 725322 - RNA, 19 nt, Artificial Sequence
  Description of Artificial Sequence: Synthetic oligonucleotide
caguaagcuuaucucgaac

SEQ ID NO: 725323 - RNA, 19 nt, Artificial Sequence
  Description of Artificial Sequence: Synthetic oligonucleotide
caccguccaaaauuucuac

SEQ ID NO: 725324 - RNA, 19 nt, Artificial Sequence
  Description of Artificial Sequence: Synthetic oligonucleotide
caaauguuugugaugaguu

SEQ ID NO: 725325 - RNA, 19 nt, Artificial Sequence
  Description of Artificial Sequence: Synthetic oligonucleotide
uuuaguccacuggaagcac

SEQ ID NO: 725326 - RNA, 19 nt, Artificial Sequence
  Description of Artificial Sequence: Synthetic oligonucleotide
agcaaauguuugugaugag

SEQ ID NO: 725327 - RNA, 19 nt, Artificial Sequence
  Description of Artificial Sequence: Synthetic oligonucleotide
ucuuaugggcugguucgcc

SEQ ID NO: 725328 - RNA, 19 nt, Artificial Sequence
  Description of Artificial Sequence: Synthetic oligonucleotide
uguuugugaugaguucucu

SEQ ID NO: 725329 - RNA, 19 nt, Artificial Sequence
  Description of Artificial Sequence: Synthetic oligonucleotide
auagaggucccaggcuugg

SEQ ID NO: 725330 - RNA, 19 nt, Artificial Sequence
  Description of Artificial Sequence: Synthetic oligonucleotide
ugguuggggucauacguuc

SEQ ID NO: 725331 - RNA, 19 nt, Artificial Sequence
  Description of Artificial Sequence: Synthetic oligonucleotide
guuaagucaaaacccguau

SEQ ID NO: 725332 - RNA, 19 nt, Artificial Sequence
  Description of Artificial Sequence: Synthetic oligonucleotide
uuggcgcaccugcucacag

SEQ ID NO: 725333 - RNA, 19 nt, Artificial Sequence
  Description of Artificial Sequence: Synthetic oligonucleotide
acacgugauaauagagguc

SEQ ID NO: 725334 - RNA, 19 nt, Artificial Sequence
  Description of Artificial Sequence: Synthetic oligonucleotide
uccggucaccagaagggac

SEQ ID NO: 725335 - RNA, 19 nt, Artificial Sequence
  Description of Artificial Sequence: Synthetic oligonucleotide
cuucggucaaaccacaccu

SEQ ID NO: 725336 - RNA, 19 nt, Artificial Sequence
  Description of Artificial Sequence: Synthetic oligonucleotide
ugauuucagcauucagcaa

SEQ ID NO: 725337 - RNA, 19 nt, Artificial Sequence
  Description of Artificial Sequence: Synthetic oligonucleotide
agucuguccucguucggga

SEQ ID NO: 725338 - RNA, 19 nt, Artificial Sequence
  Description of Artificial Sequence: Synthetic oligonucleotide
guuagucuaaauggaaucu

SEQ ID NO: 725339 - RNA, 19 nt, Artificial Sequence
  Description of Artificial Sequence: Synthetic oligonucleotide
uucggucaaaccacaccuc

SEQ ID NO: 725340 - RNA, 19 nt, Artificial Sequence
  Description of Artificial Sequence: Synthetic oligonucleotide
uucuucggucaaaccacac

SEQ ID NO: 725341 - RNA, 19 nt, Artificial Sequence
  Description of Artificial Sequence: Synthetic oligonucleotide
aggugguucuauaguugcc

SEQ ID NO: 725342 - RNA, 19 nt, Artificial Sequence
  Description of Artificial Sequence: Synthetic oligonucleotide
uggacgugaugacuugcaa

SEQ ID NO: 725343 - RNA, 19 nt, Artificial Sequence
  Description of Artificial Sequence: Synthetic oligonucleotide
cagcacuugccuucugagc

SEQ ID NO: 725344 - RNA, 19 nt, Artificial Sequence
  Description of Artificial Sequence: Synthetic oligonucleotide
accaguaagcuuaucucga

SEQ ID NO: 725345 - RNA, 19 nt, Artificial Sequence
  Description of Artificial Sequence: Synthetic oligonucleotide
aguuaagucaaaacccgua

SEQ ID NO: 725346 - RNA, 19 nt, Artificial Sequence
  Description of Artificial Sequence: Synthetic oligonucleotide
ccguccaaaauuucuacug

SEQ ID NO: 725347 - RNA, 19 nt, Artificial Sequence
  Description of Artificial Sequence: Synthetic oligonucleotide
gguucuucggucaaaccac

SEQ ID NO: 725348 - RNA, 19 nt, Artificial Sequence
  Description of Artificial Sequence: Synthetic oligonucleotide
cuaggagguuggcucaaac

SEQ ID NO: 725349 - RNA, 19 nt, Artificial Sequence
  Description of Artificial Sequence: Synthetic oligonucleotide
uggaugggugucugucucc

SEQ ID NO: 725350 - RNA, 19 nt, Artificial Sequence
  Description of Artificial Sequence: Synthetic oligonucleotide
uuccgaagagaaguagggu

SEQ ID NO: 725351 - RNA, 19 nt, Artificial Sequence
  Description of Artificial Sequence: Synthetic oligonucleotide
ggucaaaccacaccucuga

SEQ ID NO: 725352 - RNA, 19 nt, Artificial Sequence
  Description of Artificial Sequence: Synthetic oligonucleotide
aacguccaaggugucguca

SEQ ID NO: 725353 - RNA, 19 nt, Artificial Sequence
  Description of Artificial Sequence: Synthetic oligonucleotide
gagaaaucccgaccaguaa

SEQ ID NO: 725354 - RNA, 19 nt, Artificial Sequence
  Description of Artificial Sequence: Synthetic oligonucleotide
aucccgaccaguaagcuua

SEQ ID NO: 725355 - RNA, 19 nt, Artificial Sequence
  Description of Artificial Sequence: Synthetic oligonucleotide
aucggcaccuccacaacag

SEQ ID NO: 725356 - RNA, 19 nt, Artificial Sequence
  Description of Artificial Sequence: Synthetic oligonucleotide
cuuggacgugaugacuugc

SEQ ID NO: 725357 - RNA, 19 nt, Artificial Sequence
  Description of Artificial Sequence: Synthetic oligonucleotide
ccaggccuaaaauguaucc

SEQ ID NO: 725358 - RNA, 19 nt, Artificial Sequence
  Description of Artificial Sequence: Synthetic oligonucleotide
agagaaaucccgaccagua

SEQ ID NO: 725359 - RNA, 19 nt, Artificial Sequence
  Description of Artificial Sequence: Synthetic oligonucleotide
acgugauaauagagguccc

SEQ ID NO: 725360 - RNA, 19 nt, Artificial Sequence
  Description of Artificial Sequence: Synthetic oligonucleotide
ugcagaguaggagucuguc

SEQ ID NO: 725361 - RNA, 19 nt, Artificial Sequence
  Description of Artificial Sequence: Synthetic oligonucleotide
cacucaucccucacugaac

SEQ ID NO: 725362 - RNA, 19 nt, Artificial Sequence
  Description of Artificial Sequence: Synthetic oligonucleotide
ugucauuuauuggcacaga

SEQ ID NO: 725363 - RNA, 19 nt, Artificial Sequence
  Description of Artificial Sequence: Synthetic oligonucleotide
ugcgaugcucgauguucag

SEQ ID NO: 725364 - RNA, 19 nt, Artificial Sequence
  Description of Artificial Sequence: Synthetic oligonucleotide
uucuuaugggcugguucgc

SEQ ID NO: 725365 - RNA, 19 nt, Artificial Sequence
  Description of Artificial Sequence: Synthetic oligonucleotide
aucucgaacccuguuaaua

SEQ ID NO: 725366 - RNA, 19 nt, Artificial Sequence
  Description of Artificial Sequence: Synthetic oligonucleotide
gaccgcuuguugccuuugg

SEQ ID NO: 725367 - RNA, 19 nt, Artificial Sequence
  Description of Artificial Sequence: Synthetic oligonucleotide
cauccugccgcagaucuuc

SEQ ID NO: 725368 - RNA, 19 nt, Artificial Sequence
  Description of Artificial Sequence: Synthetic oligonucleotide
uagcguuggucaacauucu

SEQ ID NO: 725369 - RNA, 19 nt, Artificial Sequence
  Description of Artificial Sequence: Synthetic oligonucleotide
guucgccaaguucuacacc

SEQ ID NO: 725370 - RNA, 19 nt, Artificial Sequence
  Description of Artificial Sequence: Synthetic oligonucleotide
acggcuaaggagcggguau

SEQ ID NO: 725371 - RNA, 19 nt, Artificial Sequence
  Description of Artificial Sequence: Synthetic oligonucleotide
auauaacauggugucuaga

SEQ ID NO: 725372 - RNA, 19 nt, Artificial Sequence
  Description of Artificial Sequence: Synthetic oligonucleotide
caugcucgaacaccuccac

SEQ ID NO: 725373 - RNA, 19 nt, Artificial Sequence
  Description of Artificial Sequence: Synthetic oligonucleotide
gguucgccaaguucuacac

SEQ ID NO: 725374 - RNA, 19 nt, Artificial Sequence
  Description of Artificial Sequence: Synthetic oligonucleotide
acaugacggcuaaggagcg

SEQ ID NO: 725375 - RNA, 19 nt, Artificial Sequence
  Description of Artificial Sequence: Synthetic oligonucleotide
ucggcaccuccacaacagc

SEQ ID NO: 725376 - RNA, 19 nt, Artificial Sequence
  Description of Artificial Sequence: Synthetic oligonucleotide
cuaaggagcggguauaguu

SEQ ID NO: 725377 - RNA, 19 nt, Artificial Sequence
  Description of Artificial Sequence: Synthetic oligonucleotide
uuaggaccuuggcuuuagu

SEQ ID NO: 725378 - RNA, 19 nt, Artificial Sequence
  Description of Artificial Sequence: Synthetic oligonucleotide
gacguguuuucacuuuaua

SEQ ID NO: 725379 - RNA, 19 nt, Artificial Sequence
  Description of Artificial Sequence: Synthetic oligonucleotide
cugggguaacugcuuggag

SEQ ID NO: 725380 - RNA, 19 nt, Artificial Sequence
  Description of Artificial Sequence: Synthetic oligonucleotide
ugucgucaugagagaaauc

SEQ ID NO: 725381 - RNA, 19 nt, Artificial Sequence
  Description of Artificial Sequence: Synthetic oligonucleotide
agcguguucaccaggccga

SEQ ID NO: 725382 - RNA, 19 nt, Artificial Sequence
  Description of Artificial Sequence: Synthetic oligonucleotide
agagucagguggucauagu

SEQ ID NO: 725383 - RNA, 19 nt, Artificial Sequence
  Description of Artificial Sequence: Synthetic oligonucleotide
cauacguuccuggcacagc

SEQ ID NO: 725384 - RNA, 19 nt, Artificial Sequence
  Description of Artificial Sequence: Synthetic oligonucleotide
auucccgaccugucuggug

SEQ ID NO: 725385 - RNA, 19 nt, Artificial Sequence
  Description of Artificial Sequence: Synthetic oligonucleotide
cgugaugacuugcaaagac

SEQ ID NO: 725386 - RNA, 19 nt, Artificial Sequence
  Description of Artificial Sequence: Synthetic oligonucleotide
acguugcuugcuugauaag

SEQ ID NO: 725387 - RNA, 19 nt, Artificial Sequence
  Description of Artificial Sequence: Synthetic oligonucleotide
augcgaaugauuggcuggu

SEQ ID NO: 725388 - RNA, 19 nt, Artificial Sequence
  Description of Artificial Sequence: Synthetic oligonucleotide
cauaauucccgaccugucu

SEQ ID NO: 725389 - RNA, 19 nt, Artificial Sequence
  Description of Artificial Sequence: Synthetic oligonucleotide
caggagcguguucaccagg

SEQ ID NO: 725390 - RNA, 19 nt, Artificial Sequence
  Description of Artificial Sequence: Synthetic oligonucleotide
ggugguucuauaguugcca

SEQ ID NO: 725391 - RNA, 19 nt, Artificial Sequence
  Description of Artificial Sequence: Synthetic oligonucleotide
ggugucuagacguguuuuc

SEQ ID NO: 725392 - RNA, 19 nt, Artificial Sequence
  Description of Artificial Sequence: Synthetic oligonucleotide
gcucaaaccaaccuggaau

SEQ ID NO: 725393 - RNA, 19 nt, Artificial Sequence
  Description of Artificial Sequence: Synthetic oligonucleotide
gcaucacacgcucauccug

SEQ ID NO: 725394 - RNA, 19 nt, Artificial Sequence
  Description of Artificial Sequence: Synthetic oligonucleotide
acccuguuaauaaucugaa

SEQ ID NO: 725395 - RNA, 19 nt, Artificial Sequence
  Description of Artificial Sequence: Synthetic oligonucleotide
uggugucuagacguguuuu

SEQ ID NO: 725396 - RNA, 19 nt, Artificial Sequence
  Description of Artificial Sequence: Synthetic oligonucleotide
cacuuccaucacugugugg

SEQ ID NO: 725397 - RNA, 19 nt, Artificial Sequence
  Description of Artificial Sequence: Synthetic oligonucleotide
cuacaccguccaaaauuuc

SEQ ID NO: 725398 - RNA, 19 nt, Artificial Sequence
  Description of Artificial Sequence: Synthetic oligonucleotide
cucccgguagucccggaug

SEQ ID NO: 725399 - RNA, 19 nt, Artificial Sequence
  Description of Artificial Sequence: Synthetic oligonucleotide
guuuggauccuuggcgcac

SEQ ID NO: 725400 - RNA, 19 nt, Artificial Sequence
  Description of Artificial Sequence: Synthetic oligonucleotide
caggccuaaaauguaucca

SEQ ID NO: 725401 - RNA, 19 nt, Artificial Sequence
  Description of Artificial Sequence: Synthetic oligonucleotide
agguucucaugggacguug

SEQ ID NO: 725402 - RNA, 19 nt, Artificial Sequence
  Description of Artificial Sequence: Synthetic oligonucleotide
caccuggguuggaacgucc

SEQ ID NO: 725403 - RNA, 19 nt, Artificial Sequence
  Description of Artificial Sequence: Synthetic oligonucleotide
accguggucccuguuuucu

SEQ ID NO: 725404 - RNA, 19 nt, Artificial Sequence
  Description of Artificial Sequence: Synthetic oligonucleotide
cgaguugguggacagcggg

SEQ ID NO: 725405 - RNA, 19 nt, Artificial Sequence
  Description of Artificial Sequence: Synthetic oligonucleotide
caugacggcuaaggagcgg

SEQ ID NO: 725406 - RNA, 19 nt, Artificial Sequence
  Description of Artificial Sequence: Synthetic oligonucleotide
cuccaaugaaagaaugaau

SEQ ID NO: 725407 - RNA, 19 nt, Artificial Sequence
  Description of Artificial Sequence: Synthetic oligonucleotide
gcugguuggggucauacgu

SEQ ID NO: 725408 - RNA, 19 nt, Artificial Sequence
  Description of Artificial Sequence: Synthetic oligonucleotide
ugacggcuaaggagcgggu

SEQ ID NO: 725409 - RNA, 19 nt, Artificial Sequence
  Description of Artificial Sequence: Synthetic oligonucleotide
gguguggaucggcaccucc

SEQ ID NO: 725410 - RNA, 19 nt, Artificial Sequence
  Description of Artificial Sequence: Synthetic oligonucleotide
ggacgugaugacuugcaaa

SEQ ID NO: 725411 - RNA, 19 nt, Artificial Sequence
  Description of Artificial Sequence: Synthetic oligonucleotide
acaccguccaaaauuucua

SEQ ID NO: 725412 - RNA, 19 nt, Artificial Sequence
  Description of Artificial Sequence: Synthetic oligonucleotide
acagcgggaugacugcgua

SEQ ID NO: 725413 - RNA, 19 nt, Artificial Sequence
  Description of Artificial Sequence: Synthetic oligonucleotide
cauuagccuccaguucagc

SEQ ID NO: 725414 - RNA, 19 nt, Artificial Sequence
  Description of Artificial Sequence: Synthetic oligonucleotide
ugacugcguaucucuggau

SEQ ID NO: 725415 - RNA, 19 nt, Artificial Sequence
  Description of Artificial Sequence: Synthetic oligonucleotide
ccaaguucuacaccgucca

SEQ ID NO: 725416 - RNA, 19 nt, Artificial Sequence
  Description of Artificial Sequence: Synthetic oligonucleotide
augcgaugcucgauguuca

SEQ ID NO: 725417 - RNA, 19 nt, Artificial Sequence
  Description of Artificial Sequence: Synthetic oligonucleotide
acgugaugacuugcaaaga

SEQ ID NO: 725418 - RNA, 19 nt, Artificial Sequence
  Description of Artificial Sequence: Synthetic oligonucleotide
uuggaacguccaagguguc

SEQ ID NO: 725419 - RNA, 19 nt, Artificial Sequence
  Description of Artificial Sequence: Synthetic oligonucleotide
aggugucgucaugagagaa

SEQ ID NO: 725420 - RNA, 19 nt, Artificial Sequence
  Description of Artificial Sequence: Synthetic oligonucleotide
cgaccaguaagcuuaucuc

SEQ ID NO: 725421 - RNA, 19 nt, Artificial Sequence
  Description of Artificial Sequence: Synthetic oligonucleotide
ggagucuguccucguucgg

SEQ ID NO: 725422 - RNA, 19 nt, Artificial Sequence
  Description of Artificial Sequence: Synthetic oligonucleotide
aucccucacugaacacggc

SEQ ID NO: 725423 - RNA, 19 nt, Artificial Sequence
  Description of Artificial Sequence: Synthetic oligonucleotide
caggucguccccagcugug

SEQ ID NO: 725424 - RNA, 19 nt, Artificial Sequence
  Description of Artificial Sequence: Synthetic oligonucleotide
guucuucggucaaaccaca

SEQ ID NO: 725425 - RNA, 19 nt, Artificial Sequence
  Description of Artificial Sequence: Synthetic oligonucleotide
agccaugacgcuguccuua

SEQ ID NO: 725426 - RNA, 19 nt, Artificial Sequence
  Description of Artificial Sequence: Synthetic oligonucleotide
caaaccaaccuggaauaua

SEQ ID NO: 725427 - RNA, 19 nt, Artificial Sequence
  Description of Artificial Sequence: Synthetic oligonucleotide
ggagccauucgaagcauga

SEQ ID NO: 725428 - RNA, 19 nt, Artificial Sequence
  Description of Artificial Sequence: Synthetic oligonucleotide
ugcuguagucugccagguu

SEQ ID NO: 725429 - RNA, 19 nt, Artificial Sequence
  Description of Artificial Sequence: Synthetic oligonucleotide
gucauacguuccuggcaca

SEQ ID NO: 725430 - RNA, 19 nt, Artificial Sequence
  Description of Artificial Sequence: Synthetic oligonucleotide
guuugugaugaguucucuu

SEQ ID NO: 725431 - RNA, 19 nt, Artificial Sequence
  Description of Artificial Sequence: Synthetic oligonucleotide
ucccgaccugucuggugug

SEQ ID NO: 725432 - RNA, 19 nt, Artificial Sequence
  Description of Artificial Sequence: Synthetic oligonucleotide
cuguccuuauguucccgaa

SEQ ID NO: 725433 - RNA, 19 nt, Artificial Sequence
  Description of Artificial Sequence: Synthetic oligonucleotide
gcgaugcucgauguucagg

SEQ ID NO: 725434 - RNA, 19 nt, Artificial Sequence
  Description of Artificial Sequence: Synthetic oligonucleotide
ccggcacaugagaauuugg

SEQ ID NO: 725435 - RNA, 19 nt, Artificial Sequence
  Description of Artificial Sequence: Synthetic oligonucleotide
cgaugcucgauguucagga

SEQ ID NO: 725436 - RNA, 19 nt, Artificial Sequence
  Description of Artificial Sequence: Synthetic oligonucleotide
gcaaauguuugugaugagu

SEQ ID NO: 725437 - RNA, 19 nt, Artificial Sequence
  Description of Artificial Sequence: Synthetic oligonucleotide
cauagcguuggucaacauu

SEQ ID NO: 725438 - RNA, 19 nt, Artificial Sequence
  Description of Artificial Sequence: Synthetic oligonucleotide
cauugacaugacggcuaag

SEQ ID NO: 725439 - RNA, 19 nt, Artificial Sequence
  Description of Artificial Sequence: Synthetic oligonucleotide
uucuacugacuggccugca

SEQ ID NO: 725440 - RNA, 19 nt, Artificial Sequence
  Description of Artificial Sequence: Synthetic oligonucleotide
caucagcgucagcuuccgg

SEQ ID NO: 725441 - RNA, 19 nt, Artificial Sequence
  Description of Artificial Sequence: Synthetic oligonucleotide
cacacucaucccucacuga

SEQ ID NO: 725442 - RNA, 19 nt, Artificial Sequence
  Description of Artificial Sequence: Synthetic oligonucleotide
gguuggcucaaaccaaccu

SEQ ID NO: 725443 - RNA, 19 nt, Artificial Sequence
  Description of Artificial Sequence: Synthetic oligonucleotide
gugucgucaugagagaaau

SEQ ID NO: 725444 - RNA, 19 nt, Artificial Sequence
  Description of Artificial Sequence: Synthetic oligonucleotide
ggacagcgggaugacugcg

SEQ ID NO: 725445 - RNA, 19 nt, Artificial Sequence
  Description of Artificial Sequence: Synthetic oligonucleotide
auucaaggucccggcacau

SEQ ID NO: 725446 - RNA, 19 nt, Artificial Sequence
  Description of Artificial Sequence: Synthetic oligonucleotide
ugcaggcccuguguuugga

SEQ ID NO: 725447 - RNA, 19 nt, Artificial Sequence
  Description of Artificial Sequence: Synthetic oligonucleotide
cugguucgccaaguucuac

SEQ ID NO: 725448 - RNA, 19 nt, Artificial Sequence
  Description of Artificial Sequence: Synthetic oligonucleotide
gguuggggucauacguucc

SEQ ID NO: 725449 - RNA, 19 nt, Artificial Sequence
  Description of Artificial Sequence: Synthetic oligonucleotide
guggaucggcaccuccaca

SEQ ID NO: 725450 - RNA, 19 nt, Artificial Sequence
  Description of Artificial Sequence: Synthetic oligonucleotide
aagacgggauggacugaau

SEQ ID NO: 725451 - RNA, 19 nt, Artificial Sequence
  Description of Artificial Sequence: Synthetic oligonucleotide
ccaaccuggaauauacagu

SEQ ID NO: 725452 - RNA, 19 nt, Artificial Sequence
  Description of Artificial Sequence: Synthetic oligonucleotide
cguaucucuggaugcugag

SEQ ID NO: 725453 - RNA, 19 nt, Artificial Sequence
  Description of Artificial Sequence: Synthetic oligonucleotide
cccaggccuaaaauguauc

SEQ ID NO: 725454 - RNA, 19 nt, Artificial Sequence
  Description of Artificial Sequence: Synthetic oligonucleotide
gugguucuauaguugccau

SEQ ID NO: 725455 - RNA, 19 nt, Artificial Sequence
  Description of Artificial Sequence: Synthetic oligonucleotide
caccaagguucaaaagccu

SEQ ID NO: 725456 - RNA, 19 nt, Artificial Sequence
  Description of Artificial Sequence: Synthetic oligonucleotide
accuggguuggaacgucca

SEQ ID NO: 725457 - RNA, 19 nt, Artificial Sequence
  Description of Artificial Sequence: Synthetic oligonucleotide
gcuugauaagcagcuccac

SEQ ID NO: 725458 - RNA, 19 nt, Artificial Sequence
  Description of Artificial Sequence: Synthetic oligonucleotide
uguugaccgcaugcucgaa

SEQ ID NO: 725459 - RNA, 19 nt, Artificial Sequence
  Description of Artificial Sequence: Synthetic oligonucleotide
ucccgaccaguaagcuuau

SEQ ID NO: 725460 - RNA, 19 nt, Artificial Sequence
  Description of Artificial Sequence: Synthetic oligonucleotide
caaguucuacaccguccaa

SEQ ID NO: 725461 - RNA, 19 nt, Artificial Sequence
  Description of Artificial Sequence: Synthetic oligonucleotide
ggugucgucaugagagaaa

SEQ ID NO: 725462 - RNA, 19 nt, Artificial Sequence
  Description of Artificial Sequence: Synthetic oligonucleotide
cucgaacccuguuaauaau

SEQ ID NO: 725463 - RNA, 19 nt, Artificial Sequence
  Description of Artificial Sequence: Synthetic oligonucleotide
gacggcuaaggagcgggua

SEQ ID NO: 725464 - RNA, 19 nt, Artificial Sequence
  Description of Artificial Sequence: Synthetic oligonucleotide
augagggcgugcagcgugu

SEQ ID NO: 725465 - RNA, 19 nt, Artificial Sequence
  Description of Artificial Sequence: Synthetic oligonucleotide
ugcgaaugauuggcugguu

SEQ ID NO: 725466 - RNA, 19 nt, Artificial Sequence
  Description of Artificial Sequence: Synthetic oligonucleotide
ccgaccaguaagcuuaucu

SEQ ID NO: 725467 - RNA, 19 nt, Artificial Sequence
  Description of Artificial Sequence: Synthetic oligonucleotide
gggaaacauacugcagcuc

SEQ ID NO: 725468 - RNA, 19 nt, Artificial Sequence
  Description of Artificial Sequence: Synthetic oligonucleotide
cauugcugcccaucagcgu

SEQ ID NO: 725469 - RNA, 19 nt, Artificial Sequence
  Description of Artificial Sequence: Synthetic oligonucleotide
gcaugcucgaacaccucca

SEQ ID NO: 725470 - RNA, 19 nt, Artificial Sequence
  Description of Artificial Sequence: Synthetic oligonucleotide
aggcccgaguugguggaca

SEQ ID NO: 725471 - RNA, 19 nt, Artificial Sequence
  Description of Artificial Sequence: Synthetic oligonucleotide
ccaaggugucgucaugaga

SEQ ID NO: 725472 - RNA, 19 nt, Artificial Sequence
  Description of Artificial Sequence: Synthetic oligonucleotide
caaagacgggauggacuga

SEQ ID NO: 725473 - RNA, 19 nt, Artificial Sequence
  Description of Artificial Sequence: Synthetic oligonucleotide
guaggagucuguccucguu

SEQ ID NO: 725474 - RNA, 19 nt, Artificial Sequence
  Description of Artificial Sequence: Synthetic oligonucleotide
gccaggucguccccagcug

SEQ ID NO: 725475 - RNA, 19 nt, Artificial Sequence
  Description of Artificial Sequence: Synthetic oligonucleotide
gacagcgggaugacugcgu

SEQ ID NO: 725476 - RNA, 19 nt, Artificial Sequence
  Description of Artificial Sequence: Synthetic oligonucleotide
ccaguaagcuuaucucgaa

SEQ ID NO: 725477 - RNA, 19 nt, Artificial Sequence
  Description of Artificial Sequence: Synthetic oligonucleotide
cuuggcgcaccugcucaca

SEQ ID NO: 725478 - RNA, 19 nt, Artificial Sequence
  Description of Artificial Sequence: Synthetic oligonucleotide
ggacguugcuugcuugaua

SEQ ID NO: 725479 - RNA, 19 nt, Artificial Sequence
  Description of Artificial Sequence: Synthetic oligonucleotide
gggaugugagcugggguaa

SEQ ID NO: 725480 - RNA, 19 nt, Artificial Sequence
  Description of Artificial Sequence: Synthetic oligonucleotide
cccggcacaugagaauuug

SEQ ID NO: 725481 - RNA, 19 nt, Artificial Sequence
  Description of Artificial Sequence: Synthetic oligonucleotide
gcguaucucuggaugcuga

SEQ ID NO: 725482 - RNA, 19 nt, Artificial Sequence
  Description of Artificial Sequence: Synthetic oligonucleotide
cgaacccuguuaauaaucu

SEQ ID NO: 725483 - RNA, 19 nt, Artificial Sequence
  Description of Artificial Sequence: Synthetic oligonucleotide
guaacugcuuggagauccu

SEQ ID NO: 725484 - RNA, 19 nt, Artificial Sequence
  Description of Artificial Sequence: Synthetic oligonucleotide
cagcagcuaggagguuggc

SEQ ID NO: 725485 - RNA, 19 nt, Artificial Sequence
  Description of Artificial Sequence: Synthetic oligonucleotide
ugguguggaucggcaccuc

SEQ ID NO: 725486 - RNA, 19 nt, Artificial Sequence
  Description of Artificial Sequence: Synthetic oligonucleotide
ccuuggcgcaccugcucac

SEQ ID NO: 725487 - RNA, 19 nt, Artificial Sequence
  Description of Artificial Sequence: Synthetic oligonucleotide
cgugauaauagagguccca

SEQ ID NO: 725488 - RNA, 19 nt, Artificial Sequence
  Description of Artificial Sequence: Synthetic oligonucleotide
uguccucguucgggaccgc

SEQ ID NO: 725489 - RNA, 19 nt, Artificial Sequence
  Description of Artificial Sequence: Synthetic oligonucleotide
ccugucugguguggaucgg

SEQ ID NO: 725490 - RNA, 19 nt, Artificial Sequence
  Description of Artificial Sequence: Synthetic oligonucleotide
cugcguaucucuggaugcu

SEQ ID NO: 725491 - RNA, 19 nt, Artificial Sequence
  Description of Artificial Sequence: Synthetic oligonucleotide
gucccggaugagggcgugc

SEQ ID NO: 725492 - RNA, 19 nt, Artificial Sequence
  Description of Artificial Sequence: Synthetic oligonucleotide
ccagccaaugaggcccgag

SEQ ID NO: 725493 - RNA, 19 nt, Artificial Sequence
  Description of Artificial Sequence: Synthetic oligonucleotide
gcuuaucucgaacccuguu

SEQ ID NO: 725494 - RNA, 19 nt, Artificial Sequence
  Description of Artificial Sequence: Synthetic oligonucleotide
ccuugacauuuccugauuu

SEQ ID NO: 725495 - RNA, 19 nt, Artificial Sequence
  Description of Artificial Sequence: Synthetic oligonucleotide
acuugccuucugagccccu

SEQ ID NO: 725496 - RNA, 19 nt, Artificial Sequence
  Description of Artificial Sequence: Synthetic oligonucleotide
ggccucugcuuggacguga

SEQ ID NO: 725497 - RNA, 19 nt, Artificial Sequence
  Description of Artificial Sequence: Synthetic oligonucleotide
ggguaacugcuuggagauc

SEQ ID NO: 725498 - RNA, 19 nt, Artificial Sequence
  Description of Artificial Sequence: Synthetic oligonucleotide
gagguucucaugggacguu

SEQ ID NO: 725499 - RNA, 19 nt, Artificial Sequence
  Description of Artificial Sequence: Synthetic oligonucleotide
cccggaugagggcgugcag

SEQ ID NO: 725500 - RNA, 19 nt, Artificial Sequence
  Description of Artificial Sequence: Synthetic oligonucleotide
cucguucgggaccgcuugu

SEQ ID NO: 725501 - RNA, 19 nt, Artificial Sequence
  Description of Artificial Sequence: Synthetic oligonucleotide
ggagcggguauaguugguu

SEQ ID NO: 725502 - RNA, 19 nt, Artificial Sequence
  Description of Artificial Sequence: Synthetic oligonucleotide
gcugguucgccaaguucua

SEQ ID NO: 725503 - RNA, 19 nt, Artificial Sequence
  Description of Artificial Sequence: Synthetic oligonucleotide
gcuaaggagcggguauagu

SEQ ID NO: 725504 - RNA, 19 nt, Artificial Sequence
  Description of Artificial Sequence: Synthetic oligonucleotide
cggguauaguugguucuuc

SEQ ID NO: 725505 - RNA, 19 nt, Artificial Sequence
  Description of Artificial Sequence: Synthetic oligonucleotide
gcgggaugacugcguaucu

SEQ ID NO: 725506 - RNA, 19 nt, Artificial Sequence
  Description of Artificial Sequence: Synthetic oligonucleotide
cgggaugacugcguaucuc

SEQ ID NO: 725507 - RNA, 19 nt, Artificial Sequence
  Description of Artificial Sequence: Synthetic oligonucleotide
cccuguuaauaaucugaau

SEQ ID NO: 725508 - RNA, 19 nt, Artificial Sequence
  Description of Artificial Sequence: Synthetic oligonucleotide
gcuaggagguuggcucaaa

SEQ ID NO: 725509 - RNA, 19 nt, Artificial Sequence
  Description of Artificial Sequence: Synthetic oligonucleotide
cagcgggaugacugcguau

SEQ ID NO: 725510 - RNA, 19 nt, Artificial Sequence
  Description of Artificial Sequence: Synthetic oligonucleotide
guccucguucgggaccgcu

SEQ ID NO: 725511 - RNA, 19 nt, Artificial Sequence
  Description of Artificial Sequence: Synthetic oligonucleotide
ccaggucguccccagcugu

SEQ ID NO: 725512 - RNA, 19 nt, Artificial Sequence
  Description of Artificial Sequence: Synthetic oligonucleotide
gcgugcagcgugucacagu

SEQ ID NO: 725513 - RNA, 19 nt, Artificial Sequence
  Description of Artificial Sequence: Synthetic oligonucleotide
gcggguauaguugguucuu

SEQ ID NO: 725514 - RNA, 19 nt, Artificial Sequence
  Description of Artificial Sequence: Synthetic oligonucleotide
gcguguucaccaggccgaa

SEQ ID NO: 725515 - RNA, 19 nt, Artificial Sequence
  Description of Artificial Sequence: Synthetic oligonucleotide
cccgaccaguaagcuuauc

SEQ ID NO: 725516 - RNA, 19 nt, Artificial Sequence
  Description of Artificial Sequence: Synthetic oligonucleotide
ccauagcguuggucaacau

SEQ ID NO: 725517 - RNA, 19 nt, Artificial Sequence
  Description of Artificial Sequence: Synthetic oligonucleotide
cggcuaaggagcggguaua

SEQ ID NO: 725518 - RNA, 19 nt, Artificial Sequence
  Description of Artificial Sequence: Synthetic oligonucleotide
gcgcaccugcucacaggau

SEQ ID NO: 725519 - RNA, 19 nt, Artificial Sequence
  Description of Artificial Sequence: Synthetic oligonucleotide
uucucuaucaccuucaugc

SEQ ID NO: 725520 - RNA, 19 nt, Artificial Sequence
  Description of Artificial Sequence: Synthetic oligonucleotide
aauaagacuagcuaaagaa

SEQ ID NO: 725521 - RNA, 19 nt, Artificial Sequence
  Description of Artificial Sequence: Synthetic oligonucleotide
gauacuaucagauaccuga

SEQ ID NO: 725522 - RNA, 19 nt, Artificial Sequence
  Description of Artificial Sequence: Synthetic oligonucleotide
ugcaauuuaagaauaagac

SEQ ID NO: 725523 - RNA, 19 nt, Artificial Sequence
  Description of Artificial Sequence: Synthetic oligonucleotide
ugaaguuaaaccaauuucu

SEQ ID NO: 725524 - RNA, 19 nt, Artificial Sequence
  Description of Artificial Sequence: Synthetic oligonucleotide
uuaaauggugcucaaagcu

SEQ ID NO: 725525 - RNA, 19 nt, Artificial Sequence
  Description of Artificial Sequence: Synthetic oligonucleotide
uauacaauugcaagaaucu

SEQ ID NO: 725526 - RNA, 19 nt, Artificial Sequence
  Description of Artificial Sequence: Synthetic oligonucleotide
uucguuuagugucugaucc

SEQ ID NO: 725527 - RNA, 19 nt, Artificial Sequence
  Description of Artificial Sequence: Synthetic oligonucleotide
uuuaagaauaagacuagcu

SEQ ID NO: 725528 - RNA, 19 nt, Artificial Sequence
  Description of Artificial Sequence: Synthetic oligonucleotide
aaaaugugcauggaacagc

SEQ ID NO: 725529 - RNA, 19 nt, Artificial Sequence
  Description of Artificial Sequence: Synthetic oligonucleotide
gaugcggcgauugagagcg

SEQ ID NO: 725530 - RNA, 19 nt, Artificial Sequence
  Description of Artificial Sequence: Synthetic oligonucleotide
uguggaauguuucagucug

SEQ ID NO: 725531 - RNA, 19 nt, Artificial Sequence
  Description of Artificial Sequence: Synthetic oligonucleotide
aaggauuggacuccgccac

SEQ ID NO: 725532 - RNA, 19 nt, Artificial Sequence
  Description of Artificial Sequence: Synthetic oligonucleotide
aaauauuuggucaugaauu

SEQ ID NO: 725533 - RNA, 19 nt, Artificial Sequence
  Description of Artificial Sequence: Synthetic oligonucleotide
gaaucuaaagaacagagua

SEQ ID NO: 725534 - RNA, 19 nt, Artificial Sequence
  Description of Artificial Sequence: Synthetic oligonucleotide
caacuuacgagcuaccucc

SEQ ID NO: 725535 - RNA, 19 nt, Artificial Sequence
  Description of Artificial Sequence: Synthetic oligonucleotide
aaugcaauuuaagaauaag

SEQ ID NO: 725536 - RNA, 19 nt, Artificial Sequence
  Description of Artificial Sequence: Synthetic oligonucleotide
aaaauaaugugcagccuac

SEQ ID NO: 725537 - RNA, 19 nt, Artificial Sequence
  Description of Artificial Sequence: Synthetic oligonucleotide
agcaacuacacucagugug

SEQ ID NO: 725538 - RNA, 19 nt, Artificial Sequence
  Description of Artificial Sequence: Synthetic oligonucleotide
auauacaauugcaagaauc

SEQ ID NO: 725539 - RNA, 19 nt, Artificial Sequence
  Description of Artificial Sequence: Synthetic oligonucleotide
uucguugcccaacaguugg

SEQ ID NO: 725540 - RNA, 19 nt, Artificial Sequence
  Description of Artificial Sequence: Synthetic oligonucleotide
ugaguaugucacuagacca

SEQ ID NO: 725541 - RNA, 19 nt, Artificial Sequence
  Description of Artificial Sequence: Synthetic oligonucleotide
uucagaauacuuuucagau

SEQ ID NO: 725542 - RNA, 19 nt, Artificial Sequence
  Description of Artificial Sequence: Synthetic oligonucleotide
ucagccuuaagcaacuaca

SEQ ID NO: 725543 - RNA, 19 nt, Artificial Sequence
  Description of Artificial Sequence: Synthetic oligonucleotide
gugauauuaucacauauac

SEQ ID NO: 725544 - RNA, 19 nt, Artificial Sequence
  Description of Artificial Sequence: Synthetic oligonucleotide
uuuauucaauugcaguuug

SEQ ID NO: 725545 - RNA, 19 nt, Artificial Sequence
  Description of Artificial Sequence: Synthetic oligonucleotide
ugacuaauucccaggaacc

SEQ ID NO: 725546 - RNA, 19 nt, Artificial Sequence
  Description of Artificial Sequence: Synthetic oligonucleotide
auuuaagaauaagacuagc

SEQ ID NO: 725547 - RNA, 19 nt, Artificial Sequence
  Description of Artificial Sequence: Synthetic oligonucleotide
aggaugaccaacuuacgag

SEQ ID NO: 725548 - RNA, 19 nt, Artificial Sequence
  Description of Artificial Sequence: Synthetic oligonucleotide
uucagauaagcuagaagca

SEQ ID NO: 725549 - RNA, 19 nt, Artificial Sequence
  Description of Artificial Sequence: Synthetic oligonucleotide
aagugauauuaucacauau

SEQ ID NO: 725550 - RNA, 19 nt, Artificial Sequence
  Description of Artificial Sequence: Synthetic oligonucleotide
cuuaaauggugcucaaagc

SEQ ID NO: 725551 - RNA, 19 nt, Artificial Sequence
  Description of Artificial Sequence: Synthetic oligonucleotide
gaauguuucagucugagau

SEQ ID NO: 725552 - RNA, 19 nt, Artificial Sequence
  Description of Artificial Sequence: Synthetic oligonucleotide
cuugacuucccauacuagc

SEQ ID NO: 725553 - RNA, 19 nt, Artificial Sequence
  Description of Artificial Sequence: Synthetic oligonucleotide
uggaguaagacacuugcuc

SEQ ID NO: 725554 - RNA, 19 nt, Artificial Sequence
  Description of Artificial Sequence: Synthetic oligonucleotide
ugauauuaucacauauaca

SEQ ID NO: 725555 - RNA, 19 nt, Artificial Sequence
  Description of Artificial Sequence: Synthetic oligonucleotide
uauacaguuaaguucguuu

SEQ ID NO: 725556 - RNA, 19 nt, Artificial Sequence
  Description of Artificial Sequence: Synthetic oligonucleotide
gaaaggauuggacuccgcc

SEQ ID NO: 725557 - RNA, 19 nt, Artificial Sequence
  Description of Artificial Sequence: Synthetic oligonucleotide
aagucaagcuuccauuugu

SEQ ID NO: 725558 - RNA, 19 nt, Artificial Sequence
  Description of Artificial Sequence: Synthetic oligonucleotide
uuaagcucggacaccuccg

SEQ ID NO: 725559 - RNA, 19 nt, Artificial Sequence
  Description of Artificial Sequence: Synthetic oligonucleotide
aaagucaagcuuccauuug

SEQ ID NO: 725560 - RNA, 19 nt, Artificial Sequence
  Description of Artificial Sequence: Synthetic oligonucleotide
aagcuuaauuucuucuuca

SEQ ID NO: 725561 - RNA, 19 nt, Artificial Sequence
  Description of Artificial Sequence: Synthetic oligonucleotide
uuuccaguaagguggagac

SEQ ID NO: 725562 - RNA, 19 nt, Artificial Sequence
  Description of Artificial Sequence: Synthetic oligonucleotide
uuauuagugucauucccga

SEQ ID NO: 725563 - RNA, 19 nt, Artificial Sequence
  Description of Artificial Sequence: Synthetic oligonucleotide
gaugguaacuuagaaagca

SEQ ID NO: 725564 - RNA, 19 nt, Artificial Sequence
  Description of Artificial Sequence: Synthetic oligonucleotide
uuaaguucguuuagugucu

SEQ ID NO: 725565 - RNA, 19 nt, Artificial Sequence
  Description of Artificial Sequence: Synthetic oligonucleotide
acgagcuaccuccucauac

SEQ ID NO: 725566 - RNA, 19 nt, Artificial Sequence
  Description of Artificial Sequence: Synthetic oligonucleotide
aaggaaaaugugcauggaa

SEQ ID NO: 725567 - RNA, 19 nt, Artificial Sequence
  Description of Artificial Sequence: Synthetic oligonucleotide
gacuagcuaaagaagcugg

SEQ ID NO: 725568 - RNA, 19 nt, Artificial Sequence
  Description of Artificial Sequence: Synthetic oligonucleotide
ugagaugguaacuuagaaa

SEQ ID NO: 725569 - RNA, 19 nt, Artificial Sequence
  Description of Artificial Sequence: Synthetic oligonucleotide
ggaacuucuuacaagagag

SEQ ID NO: 725570 - RNA, 19 nt, Artificial Sequence
  Description of Artificial Sequence: Synthetic oligonucleotide
uccaguaagguggagacac

SEQ ID NO: 725571 - RNA, 19 nt, Artificial Sequence
  Description of Artificial Sequence: Synthetic oligonucleotide
gaauaagacuagcuaaaga

SEQ ID NO: 725572 - RNA, 19 nt, Artificial Sequence
  Description of Artificial Sequence: Synthetic oligonucleotide
cuuaagcucggacaccucc

SEQ ID NO: 725573 - RNA, 19 nt, Artificial Sequence
  Description of Artificial Sequence: Synthetic oligonucleotide
aaauggugcucaaagcuug

SEQ ID NO: 725574 - RNA, 19 nt, Artificial Sequence
  Description of Artificial Sequence: Synthetic oligonucleotide
uuaugugcuuggcauuucc

SEQ ID NO: 725575 - RNA, 19 nt, Artificial Sequence
  Description of Artificial Sequence: Synthetic oligonucleotide
uugguauuaguauggucug

SEQ ID NO: 725576 - RNA, 19 nt, Artificial Sequence
  Description of Artificial Sequence: Synthetic oligonucleotide
ucuaaagaacagaguaggu

SEQ ID NO: 725577 - RNA, 19 nt, Artificial Sequence
  Description of Artificial Sequence: Synthetic oligonucleotide
aagcuugccugauacaaaa

SEQ ID NO: 725578 - RNA, 19 nt, Artificial Sequence
  Description of Artificial Sequence: Synthetic oligonucleotide
aguugguauuaguaugguc

SEQ ID NO: 725579 - RNA, 19 nt, Artificial Sequence
  Description of Artificial Sequence: Synthetic oligonucleotide
uguggggcugacuaauucc

SEQ ID NO: 725580 - RNA, 19 nt, Artificial Sequence
  Description of Artificial Sequence: Synthetic oligonucleotide
acaguugguauuaguaugg

SEQ ID NO: 725581 - RNA, 19 nt, Artificial Sequence
  Description of Artificial Sequence: Synthetic oligonucleotide
uucccgaaggaauucaagu

SEQ ID NO: 725582 - RNA, 19 nt, Artificial Sequence
  Description of Artificial Sequence: Synthetic oligonucleotide
uuauucaauugcaguuugc

SEQ ID NO: 725583 - RNA, 19 nt, Artificial Sequence
  Description of Artificial Sequence: Synthetic oligonucleotide
ugauuuucagguggaauug

SEQ ID NO: 725584 - RNA, 19 nt, Artificial Sequence
  Description of Artificial Sequence: Synthetic oligonucleotide
aggaaguuuguucugcaca

SEQ ID NO: 725585 - RNA, 19 nt, Artificial Sequence
  Description of Artificial Sequence: Synthetic oligonucleotide
gauguaagcccacauucuc

SEQ ID NO: 725586 - RNA, 19 nt, Artificial Sequence
  Description of Artificial Sequence: Synthetic oligonucleotide
ucuggagucgaguucgugu

SEQ ID NO: 725587 - RNA, 19 nt, Artificial Sequence
  Description of Artificial Sequence: Synthetic oligonucleotide
augucacuagaccacagca

SEQ ID NO: 725588 - RNA, 19 nt, Artificial Sequence
  Description of Artificial Sequence: Synthetic oligonucleotide
aacaggacucuucugguuu

SEQ ID NO: 725589 - RNA, 19 nt, Artificial Sequence
  Description of Artificial Sequence: Synthetic oligonucleotide
aaagugauauuaucacaua

SEQ ID NO: 725590 - RNA, 19 nt, Artificial Sequence
  Description of Artificial Sequence: Synthetic oligonucleotide
guugguauuaguauggucu

SEQ ID NO: 725591 - RNA, 19 nt, Artificial Sequence
  Description of Artificial Sequence: Synthetic oligonucleotide
acuacacucagugugaaau

SEQ ID NO: 725592 - RNA, 19 nt, Artificial Sequence
  Description of Artificial Sequence: Synthetic oligonucleotide
ugccugauacaaaauauuu

SEQ ID NO: 725593 - RNA, 19 nt, Artificial Sequence
  Description of Artificial Sequence: Synthetic oligonucleotide
aggaacuucuuacaagaga

SEQ ID NO: 725594 - RNA, 19 nt, Artificial Sequence
  Description of Artificial Sequence: Synthetic oligonucleotide
cagaauacuccacauccag

SEQ ID NO: 725595 - RNA, 19 nt, Artificial Sequence
  Description of Artificial Sequence: Synthetic oligonucleotide
aauuuuagcucugggugga

SEQ ID NO: 725596 - RNA, 19 nt, Artificial Sequence
  Description of Artificial Sequence: Synthetic oligonucleotide
gacuucccauacuagcccg

SEQ ID NO: 725597 - RNA, 19 nt, Artificial Sequence
  Description of Artificial Sequence: Synthetic oligonucleotide
caggucgccacacuuaagc

SEQ ID NO: 725598 - RNA, 19 nt, Artificial Sequence
  Description of Artificial Sequence: Synthetic oligonucleotide
ucccauaacuuccccaaca

SEQ ID NO: 725599 - RNA, 19 nt, Artificial Sequence
  Description of Artificial Sequence: Synthetic oligonucleotide
aauggugcucaaagcuugc

SEQ ID NO: 725600 - RNA, 19 nt, Artificial Sequence
  Description of Artificial Sequence: Synthetic oligonucleotide
acaagaggaacuucuuaca

SEQ ID NO: 725601 - RNA, 19 nt, Artificial Sequence
  Description of Artificial Sequence: Synthetic oligonucleotide
gucgccacacuuaagcucg

SEQ ID NO: 725602 - RNA, 19 nt, Artificial Sequence
  Description of Artificial Sequence: Synthetic oligonucleotide
agauaccugagccugugcu

SEQ ID NO: 725603 - RNA, 19 nt, Artificial Sequence
  Description of Artificial Sequence: Synthetic oligonucleotide
ugaaauucccugccuauuu

SEQ ID NO: 725604 - RNA, 19 nt, Artificial Sequence
  Description of Artificial Sequence: Synthetic oligonucleotide
acugaguaugucacuagac

SEQ ID NO: 725605 - RNA, 19 nt, Artificial Sequence
  Description of Artificial Sequence: Synthetic oligonucleotide
ggaauaaaugcaauuuaag

SEQ ID NO: 725606 - RNA, 19 nt, Artificial Sequence
  Description of Artificial Sequence: Synthetic oligonucleotide
gucaugaauucauuaugug

SEQ ID NO: 725607 - RNA, 19 nt, Artificial Sequence
  Description of Artificial Sequence: Synthetic oligonucleotide
agaugguaacuuagaaagc

SEQ ID NO: 725608 - RNA, 19 nt, Artificial Sequence
  Description of Artificial Sequence: Synthetic oligonucleotide
aaucuagcuauggcuugac

SEQ ID NO: 725609 - RNA, 19 nt, Artificial Sequence
  Description of Artificial Sequence: Synthetic oligonucleotide
caguuaaguucguuuagug

SEQ ID NO: 725610 - RNA, 19 nt, Artificial Sequence
  Description of Artificial Sequence: Synthetic oligonucleotide
auacuagcccguuuuaaau

SEQ ID NO: 725611 - RNA, 19 nt, Artificial Sequence
  Description of Artificial Sequence: Synthetic oligonucleotide
agcucggacaccuccgcac

SEQ ID NO: 725612 - RNA, 19 nt, Artificial Sequence
  Description of Artificial Sequence: Synthetic oligonucleotide
auacuuucggucagccucc

SEQ ID NO: 725613 - RNA, 19 nt, Artificial Sequence
  Description of Artificial Sequence: Synthetic oligonucleotide
ucacuagaccacagcaggc

SEQ ID NO: 725614 - RNA, 19 nt, Artificial Sequence
  Description of Artificial Sequence: Synthetic oligonucleotide
aggaucuacuggaagacag

SEQ ID NO: 725615 - RNA, 19 nt, Artificial Sequence
  Description of Artificial Sequence: Synthetic oligonucleotide
ugugaaauucccugccuau

SEQ ID NO: 725616 - RNA, 19 nt, Artificial Sequence
  Description of Artificial Sequence: Synthetic oligonucleotide
aucaggccaaucuagcuau

SEQ ID NO: 725617 - RNA, 19 nt, Artificial Sequence
  Description of Artificial Sequence: Synthetic oligonucleotide
acacucagugugaaauucc

SEQ ID NO: 725618 - RNA, 19 nt, Artificial Sequence
  Description of Artificial Sequence: Synthetic oligonucleotide
gccuuaagcaacuacacuc

SEQ ID NO: 725619 - RNA, 19 nt, Artificial Sequence
  Description of Artificial Sequence: Synthetic oligonucleotide
ucccgaaggaauucaaguc

SEQ ID NO: 725620 - RNA, 19 nt, Artificial Sequence
  Description of Artificial Sequence: Synthetic oligonucleotide
uggaguguggagccgacuc

SEQ ID NO: 725621 - RNA, 19 nt, Artificial Sequence
  Description of Artificial Sequence: Synthetic oligonucleotide
uggaugcggcgauugagag

SEQ ID NO: 725622 - RNA, 19 nt, Artificial Sequence
  Description of Artificial Sequence: Synthetic oligonucleotide
ugacuucagguuguuagug

SEQ ID NO: 725623 - RNA, 19 nt, Artificial Sequence
  Description of Artificial Sequence: Synthetic oligonucleotide
uuugaccaaaauguagaaa

SEQ ID NO: 725624 - RNA, 19 nt, Artificial Sequence
  Description of Artificial Sequence: Synthetic oligonucleotide
acucucuggagucgaguuc

SEQ ID NO: 725625 - RNA, 19 nt, Artificial Sequence
  Description of Artificial Sequence: Synthetic oligonucleotide
gaguaugucacuagaccac

SEQ ID NO: 725626 - RNA, 19 nt, Artificial Sequence
  Description of Artificial Sequence: Synthetic oligonucleotide
ucgauugucuucuccaguu

SEQ ID NO: 725627 - RNA, 19 nt, Artificial Sequence
  Description of Artificial Sequence: Synthetic oligonucleotide
uguaagcccacauucucuu

SEQ ID NO: 725628 - RNA, 19 nt, Artificial Sequence
  Description of Artificial Sequence: Synthetic oligonucleotide
uugaggccggccauggcgc

SEQ ID NO: 725629 - RNA, 19 nt, Artificial Sequence
  Description of Artificial Sequence: Synthetic oligonucleotide
ugucauucccgaaggaauu

SEQ ID NO: 725630 - RNA, 19 nt, Artificial Sequence
  Description of Artificial Sequence: Synthetic oligonucleotide
aaacuuaaauggugcucaa

SEQ ID NO: 725631 - RNA, 19 nt, Artificial Sequence
  Description of Artificial Sequence: Synthetic oligonucleotide
acuagcccguuuuaaauuu

SEQ ID NO: 725632 - RNA, 19 nt, Artificial Sequence
  Description of Artificial Sequence: Synthetic oligonucleotide
aaauaaugugcagccuaca

SEQ ID NO: 725633 - RNA, 19 nt, Artificial Sequence
  Description of Artificial Sequence: Synthetic oligonucleotide
guagugugaugcuuaauaa

SEQ ID NO: 725634 - RNA, 19 nt, Artificial Sequence
  Description of Artificial Sequence: Synthetic oligonucleotide
ugguauuaguauggucugg

SEQ ID NO: 725635 - RNA, 19 nt, Artificial Sequence
  Description of Artificial Sequence: Synthetic oligonucleotide
uaagcucggacaccuccgc

SEQ ID NO: 725636 - RNA, 19 nt, Artificial Sequence
  Description of Artificial Sequence: Synthetic oligonucleotide
aaaguguggggcugacuaa

SEQ ID NO: 725637 - RNA, 19 nt, Artificial Sequence
  Description of Artificial Sequence: Synthetic oligonucleotide
caucgauugucuucuccag

SEQ ID NO: 725638 - RNA, 19 nt, Artificial Sequence
  Description of Artificial Sequence: Synthetic oligonucleotide
agaaucuaaagaacagagu

SEQ ID NO: 725639 - RNA, 19 nt, Artificial Sequence
  Description of Artificial Sequence: Synthetic oligonucleotide
agugauauuaucacauaua

SEQ ID NO: 725640 - RNA, 19 nt, Artificial Sequence
  Description of Artificial Sequence: Synthetic oligonucleotide
agcuggugccauuugaaaa

SEQ ID NO: 725641 - RNA, 19 nt, Artificial Sequence
  Description of Artificial Sequence: Synthetic oligonucleotide
agaguagguuuauucaauu

SEQ ID NO: 725642 - RNA, 19 nt, Artificial Sequence
  Description of Artificial Sequence: Synthetic oligonucleotide
uauauacaguuaaguucgu

SEQ ID NO: 725643 - RNA, 19 nt, Artificial Sequence
  Description of Artificial Sequence: Synthetic oligonucleotide
aagcaacuacacucagugu

SEQ ID NO: 725644 - RNA, 19 nt, Artificial Sequence
  Description of Artificial Sequence: Synthetic oligonucleotide
agacagaugggcaaucacu

SEQ ID NO: 725645 - RNA, 19 nt, Artificial Sequence
  Description of Artificial Sequence: Synthetic oligonucleotide
cuacagaauacuccacauc

SEQ ID NO: 725646 - RNA, 19 nt, Artificial Sequence
  Description of Artificial Sequence: Synthetic oligonucleotide
ucccauacuagcccguuuu

SEQ ID NO: 725647 - RNA, 19 nt, Artificial Sequence
  Description of Artificial Sequence: Synthetic oligonucleotide
gaucaggccaaucuagcua

SEQ ID NO: 725648 - RNA, 19 nt, Artificial Sequence
  Description of Artificial Sequence: Synthetic oligonucleotide
ccagauacuaucagauacc

SEQ ID NO: 725649 - RNA, 19 nt, Artificial Sequence
  Description of Artificial Sequence: Synthetic oligonucleotide
acacuuaagcucggacacc

SEQ ID NO: 725650 - RNA, 19 nt, Artificial Sequence
  Description of Artificial Sequence: Synthetic oligonucleotide
uacuagcccguuuuaaauu

SEQ ID NO: 725651 - RNA, 19 nt, Artificial Sequence
  Description of Artificial Sequence: Synthetic oligonucleotide
uuuggaguggaaggaaaau

SEQ ID NO: 725652 - RNA, 19 nt, Artificial Sequence
  Description of Artificial Sequence: Synthetic oligonucleotide
cuggagucgaguucguguc

SEQ ID NO: 725653 - RNA, 19 nt, Artificial Sequence
  Description of Artificial Sequence: Synthetic oligonucleotide
gcuucagauaagcuagaag

SEQ ID NO: 725654 - RNA, 19 nt, Artificial Sequence
  Description of Artificial Sequence: Synthetic oligonucleotide
cauacuagcccguuuuaaa

SEQ ID NO: 725655 - RNA, 19 nt, Artificial Sequence
  Description of Artificial Sequence: Synthetic oligonucleotide
uacuuuucagaugcagccu

SEQ ID NO: 725656 - RNA, 19 nt, Artificial Sequence
  Description of Artificial Sequence: Synthetic oligonucleotide
aaggaucuacuggaagaca

SEQ ID NO: 725657 - RNA, 19 nt, Artificial Sequence
  Description of Artificial Sequence: Synthetic oligonucleotide
acuuacgagcuaccuccuc

SEQ ID NO: 725658 - RNA, 19 nt, Artificial Sequence
  Description of Artificial Sequence: Synthetic oligonucleotide
uagaccacagcaggcaagu

SEQ ID NO: 725659 - RNA, 19 nt, Artificial Sequence
  Description of Artificial Sequence: Synthetic oligonucleotide
ugucugauccagugucuga

SEQ ID NO: 725660 - RNA, 19 nt, Artificial Sequence
  Description of Artificial Sequence: Synthetic oligonucleotide
agcgaguugaggccggcca

SEQ ID NO: 725661 - RNA, 19 nt, Artificial Sequence
  Description of Artificial Sequence: Synthetic oligonucleotide
aguucguuuagugucugau

SEQ ID NO: 725662 - RNA, 19 nt, Artificial Sequence
  Description of Artificial Sequence: Synthetic oligonucleotide
gguggaauuguaaacuuga

SEQ ID NO: 725663 - RNA, 19 nt, Artificial Sequence
  Description of Artificial Sequence: Synthetic oligonucleotide
cucagccuuaagcaacuac

SEQ ID NO: 725664 - RNA, 19 nt, Artificial Sequence
  Description of Artificial Sequence: Synthetic oligonucleotide
ucauacuuucggucagccu

SEQ ID NO: 725665 - RNA, 19 nt, Artificial Sequence
  Description of Artificial Sequence: Synthetic oligonucleotide
aaguucguuuagugucuga

SEQ ID NO: 725666 - RNA, 19 nt, Artificial Sequence
  Description of Artificial Sequence: Synthetic oligonucleotide
guucguuuagugucugauc

SEQ ID NO: 725667 - RNA, 19 nt, Artificial Sequence
  Description of Artificial Sequence: Synthetic oligonucleotide
uuucucgcgccgcucgcgc

SEQ ID NO: 725668 - RNA, 19 nt, Artificial Sequence
  Description of Artificial Sequence: Synthetic oligonucleotide
uauuagugucauucccgaa

SEQ ID NO: 725669 - RNA, 19 nt, Artificial Sequence
  Description of Artificial Sequence: Synthetic oligonucleotide
uggcgagucgcuccugagc

SEQ ID NO: 725670 - RNA, 19 nt, Artificial Sequence
  Description of Artificial Sequence: Synthetic oligonucleotide
gacuaauucccaggaacca

SEQ ID NO: 725671 - RNA, 19 nt, Artificial Sequence
  Description of Artificial Sequence: Synthetic oligonucleotide
aacuacacucagugugaaa

SEQ ID NO: 725672 - RNA, 19 nt, Artificial Sequence
  Description of Artificial Sequence: Synthetic oligonucleotide
uugagagcggccacaucuc

SEQ ID NO: 725673 - RNA, 19 nt, Artificial Sequence
  Description of Artificial Sequence: Synthetic oligonucleotide
ggcgagucgcuccugagcc

SEQ ID NO: 725674 - RNA, 19 nt, Artificial Sequence
  Description of Artificial Sequence: Synthetic oligonucleotide
ggcucuacugaguauguca

SEQ ID NO: 725675 - RNA, 19 nt, Artificial Sequence
  Description of Artificial Sequence: Synthetic oligonucleotide
cauggcucgguucucuauc

SEQ ID NO: 725676 - RNA, 19 nt, Artificial Sequence
  Description of Artificial Sequence: Synthetic oligonucleotide
guucgugucagaacaggac

SEQ ID NO: 725677 - RNA, 19 nt, Artificial Sequence
  Description of Artificial Sequence: Synthetic oligonucleotide
agagaccuuucguugccca

SEQ ID NO: 725678 - RNA, 19 nt, Artificial Sequence
  Description of Artificial Sequence: Synthetic oligonucleotide
auuaugugcuuggcauuuc

SEQ ID NO: 725679 - RNA, 19 nt, Artificial Sequence
  Description of Artificial Sequence: Synthetic oligonucleotide
caggaugaccaacuuacga

SEQ ID NO: 725680 - RNA, 19 nt, Artificial Sequence
  Description of Artificial Sequence: Synthetic oligonucleotide
uccagcgaguugaggccgg

SEQ ID NO: 725681 - RNA, 19 nt, Artificial Sequence
  Description of Artificial Sequence: Synthetic oligonucleotide
cucagagaacaauuuugga

SEQ ID NO: 725682 - RNA, 19 nt, Artificial Sequence
  Description of Artificial Sequence: Synthetic oligonucleotide
gccuccagcgaguugaggc

SEQ ID NO: 725683 - RNA, 19 nt, Artificial Sequence
  Description of Artificial Sequence: Synthetic oligonucleotide
uaaguucguuuagugucug

SEQ ID NO: 725684 - RNA, 19 nt, Artificial Sequence
  Description of Artificial Sequence: Synthetic oligonucleotide
acuagaccacagcaggcaa

SEQ ID NO: 725685 - RNA, 19 nt, Artificial Sequence
  Description of Artificial Sequence: Synthetic oligonucleotide
auucccgaaggaauucaag

SEQ ID NO: 725686 - RNA, 19 nt, Artificial Sequence
  Description of Artificial Sequence: Synthetic oligonucleotide
ggaucuugcgcuucaccgc

SEQ ID NO: 725687 - RNA, 19 nt, Artificial Sequence
  Description of Artificial Sequence: Synthetic oligonucleotide
uggacuccgccacuggcuc

SEQ ID NO: 725688 - RNA, 19 nt, Artificial Sequence
  Description of Artificial Sequence: Synthetic oligonucleotide
uggagucgaguucguguca

SEQ ID NO: 725689 - RNA, 19 nt, Artificial Sequence
  Description of Artificial Sequence: Synthetic oligonucleotide
uagugucauucccgaagga

SEQ ID NO: 725690 - RNA, 19 nt, Artificial Sequence
  Description of Artificial Sequence: Synthetic oligonucleotide
gucgaguucgugucagaac

SEQ ID NO: 725691 - RNA, 19 nt, Artificial Sequence
  Description of Artificial Sequence: Synthetic oligonucleotide
auggcucgguucucuauca

SEQ ID NO: 725692 - RNA, 19 nt, Artificial Sequence
  Description of Artificial Sequence: Synthetic oligonucleotide
ucgcgcugcagacccugcg

SEQ ID NO: 725693 - RNA, 19 nt, Artificial Sequence
  Description of Artificial Sequence: Synthetic oligonucleotide
uagcccguuuuaaauuuua

SEQ ID NO: 725694 - RNA, 19 nt, Artificial Sequence
  Description of Artificial Sequence: Synthetic oligonucleotide
agaauacuccacauccagu

SEQ ID NO: 725695 - RNA, 19 nt, Artificial Sequence
  Description of Artificial Sequence: Synthetic oligonucleotide
aggucgccacacuuaagcu

SEQ ID NO: 725696 - RNA, 19 nt, Artificial Sequence
  Description of Artificial Sequence: Synthetic oligonucleotide
uucaccgccuccagcgagu

SEQ ID NO: 725697 - RNA, 19 nt, Artificial Sequence
  Description of Artificial Sequence: Synthetic oligonucleotide
cagcucgcgcugcagaccc

SEQ ID NO: 725698 - RNA, 19 nt, Artificial Sequence
  Description of Artificial Sequence: Synthetic oligonucleotide
auacaauugcaagaaucua

SEQ ID NO: 725699 - RNA, 19 nt, Artificial Sequence
  Description of Artificial Sequence: Synthetic oligonucleotide
agguggaauuguaaacuug

SEQ ID NO: 725700 - RNA, 19 nt, Artificial Sequence
  Description of Artificial Sequence: Synthetic oligonucleotide
auguaagcccacauucucu

SEQ ID NO: 725701 - RNA, 19 nt, Artificial Sequence
  Description of Artificial Sequence: Synthetic oligonucleotide
acuagcuaaagaagcuggu

SEQ ID NO: 725702 - RNA, 19 nt, Artificial Sequence
  Description of Artificial Sequence: Synthetic oligonucleotide
ggaaccaaaugcccucagc

SEQ ID NO: 725703 - RNA, 19 nt, Artificial Sequence
  Description of Artificial Sequence: Synthetic oligonucleotide
cuggaugcggcgauugaga

SEQ ID NO: 725704 - RNA, 19 nt, Artificial Sequence
  Description of Artificial Sequence: Synthetic oligonucleotide
acagaauacuccacaucca

SEQ ID NO: 725705 - RNA, 19 nt, Artificial Sequence
  Description of Artificial Sequence: Synthetic oligonucleotide
gaccuuucguugcccaaca

SEQ ID NO: 725706 - RNA, 19 nt, Artificial Sequence
  Description of Artificial Sequence: Synthetic oligonucleotide
guaugucacuagaccacag

SEQ ID NO: 725707 - RNA, 19 nt, Artificial Sequence
  Description of Artificial Sequence: Synthetic oligonucleotide
ggagagaccuuucguugcc

SEQ ID NO: 725708 - RNA, 19 nt, Artificial Sequence
  Description of Artificial Sequence: Synthetic oligonucleotide
gguggagacacaguaacaa

SEQ ID NO: 725709 - RNA, 19 nt, Artificial Sequence
  Description of Artificial Sequence: Synthetic oligonucleotide
ugcccaacaguugguauua

SEQ ID NO: 725710 - RNA, 19 nt, Artificial Sequence
  Description of Artificial Sequence: Synthetic oligonucleotide
agcccguuuuaaauuuuag

SEQ ID NO: 725711 - RNA, 19 nt, Artificial Sequence
  Description of Artificial Sequence: Synthetic oligonucleotide
caacaguugguauuaguau

SEQ ID NO: 725712 - RNA, 19 nt, Artificial Sequence
  Description of Artificial Sequence: Synthetic oligonucleotide
aucuacuggaagacagaug

SEQ ID NO: 725713 - RNA, 19 nt, Artificial Sequence
  Description of Artificial Sequence: Synthetic oligonucleotide
guggaaaauuccuacuuuu

SEQ ID NO: 725714 - RNA, 19 nt, Artificial Sequence
  Description of Artificial Sequence: Synthetic oligonucleotide
ccuuaagcaacuacacuca

SEQ ID NO: 725715 - RNA, 19 nt, Artificial Sequence
  Description of Artificial Sequence: Synthetic oligonucleotide
cccauaacuuccccaacag

SEQ ID NO: 725716 - RNA, 19 nt, Artificial Sequence
  Description of Artificial Sequence: Synthetic oligonucleotide
ugaggccggccauggcgcg

SEQ ID NO: 725717 - RNA, 19 nt, Artificial Sequence
  Description of Artificial Sequence: Synthetic oligonucleotide
augguaacuuagaaagcaa

SEQ ID NO: 725718 - RNA, 19 nt, Artificial Sequence
  Description of Artificial Sequence: Synthetic oligonucleotide
accuuucguugcccaacag

SEQ ID NO: 725719 - RNA, 19 nt, Artificial Sequence
  Description of Artificial Sequence: Synthetic oligonucleotide
agucgaguucgugucagaa

SEQ ID NO: 725720 - RNA, 19 nt, Artificial Sequence
  Description of Artificial Sequence: Synthetic oligonucleotide
gugugaaauucccugccua

SEQ ID NO: 725721 - RNA, 19 nt, Artificial Sequence
  Description of Artificial Sequence: Synthetic oligonucleotide
augaccaacuuacgagcua

SEQ ID NO: 725722 - RNA, 19 nt, Artificial Sequence
  Description of Artificial Sequence: Synthetic oligonucleotide
gugucugauccagugucug

SEQ ID NO: 725723 - RNA, 19 nt, Artificial Sequence
  Description of Artificial Sequence: Synthetic oligonucleotide
gaucuacuggaagacagau

SEQ ID NO: 725724 - RNA, 19 nt, Artificial Sequence
  Description of Artificial Sequence: Synthetic oligonucleotide
gaugaccaacuuacgagcu

SEQ ID NO: 725725 - RNA, 19 nt, Artificial Sequence
  Description of Artificial Sequence: Synthetic oligonucleotide
ucguugcccaacaguuggu

SEQ ID NO: 725726 - RNA, 19 nt, Artificial Sequence
  Description of Artificial Sequence: Synthetic oligonucleotide
uggagccgacucagcauga

SEQ ID NO: 725727 - RNA, 19 nt, Artificial Sequence
  Description of Artificial Sequence: Synthetic oligonucleotide
aacuuacgagcuaccuccu

SEQ ID NO: 725728 - RNA, 19 nt, Artificial Sequence
  Description of Artificial Sequence: Synthetic oligonucleotide
gagagaccuuucguugccc

SEQ ID NO: 725729 - RNA, 19 nt, Artificial Sequence
  Description of Artificial Sequence: Synthetic oligonucleotide
cuuucucgcgccgcucgcg

SEQ ID NO: 725730 - RNA, 19 nt, Artificial Sequence
  Description of Artificial Sequence: Synthetic oligonucleotide
auauacaguuaaguucguu

SEQ ID NO: 725731 - RNA, 19 nt, Artificial Sequence
  Description of Artificial Sequence: Synthetic oligonucleotide
ggucgccacacuuaagcuc

SEQ ID NO: 725732 - RNA, 19 nt, Artificial Sequence
  Description of Artificial Sequence: Synthetic oligonucleotide
gcuugccugauacaaaaua

SEQ ID NO: 725733 - RNA, 19 nt, Artificial Sequence
  Description of Artificial Sequence: Synthetic oligonucleotide
ugcggcgauugagagcggc

SEQ ID NO: 725734 - RNA, 19 nt, Artificial Sequence
  Description of Artificial Sequence: Synthetic oligonucleotide
gacagaugggcaaucacuu

SEQ ID NO: 725735 - RNA, 19 nt, Artificial Sequence
  Description of Artificial Sequence: Synthetic oligonucleotide
ccaaucuagcuauggcuug

SEQ ID NO: 725736 - RNA, 19 nt, Artificial Sequence
  Description of Artificial Sequence: Synthetic oligonucleotide
ccaacuuacgagcuaccuc

SEQ ID NO: 725737 - RNA, 19 nt, Artificial Sequence
  Description of Artificial Sequence: Synthetic oligonucleotide
ggcugacuaauucccagga

SEQ ID NO: 725738 - RNA, 19 nt, Artificial Sequence
  Description of Artificial Sequence: Synthetic oligonucleotide
ucgccacacuuaagcucgg

SEQ ID NO: 725739 - RNA, 19 nt, Artificial Sequence
  Description of Artificial Sequence: Synthetic oligonucleotide
cacuagaccacagcaggca

SEQ ID NO: 725740 - RNA, 19 nt, Artificial Sequence
  Description of Artificial Sequence: Synthetic oligonucleotide
gcucuacugaguaugucac

SEQ ID NO: 725741 - RNA, 19 nt, Artificial Sequence
  Description of Artificial Sequence: Synthetic oligonucleotide
gaccaacuuacgagcuacc

SEQ ID NO: 725742 - RNA, 19 nt, Artificial Sequence
  Description of Artificial Sequence: Synthetic oligonucleotide
gcucggacaccuccgcacg

SEQ ID NO: 725743 - RNA, 19 nt, Artificial Sequence
  Description of Artificial Sequence: Synthetic oligonucleotide
ccacacuuaagcucggaca

SEQ ID NO: 725744 - RNA, 19 nt, Artificial Sequence
  Description of Artificial Sequence: Synthetic oligonucleotide
gucauucccgaaggaauuc

SEQ ID NO: 725745 - RNA, 19 nt, Artificial Sequence
  Description of Artificial Sequence: Synthetic oligonucleotide
gauaccugagccugugcuu

SEQ ID NO: 725746 - RNA, 19 nt, Artificial Sequence
  Description of Artificial Sequence: Synthetic oligonucleotide
ggaauguuucagucugaga

SEQ ID NO: 725747 - RNA, 19 nt, Artificial Sequence
  Description of Artificial Sequence: Synthetic oligonucleotide
cucccauaacuuccccaac

SEQ ID NO: 725748 - RNA, 19 nt, Artificial Sequence
  Description of Artificial Sequence: Synthetic oligonucleotide
uucccauacuagcccguuu

SEQ ID NO: 725749 - RNA, 19 nt, Artificial Sequence
  Description of Artificial Sequence: Synthetic oligonucleotide
agguuguuagugacauucu

SEQ ID NO: 725750 - RNA, 19 nt, Artificial Sequence
  Description of Artificial Sequence: Synthetic oligonucleotide
uugcuccucagagaacaau

SEQ ID NO: 725751 - RNA, 19 nt, Artificial Sequence
  Description of Artificial Sequence: Synthetic oligonucleotide
gagaccuuucguugcccaa

SEQ ID NO: 725752 - RNA, 19 nt, Artificial Sequence
  Description of Artificial Sequence: Synthetic oligonucleotide
ggaugcggcgauugagagc

SEQ ID NO: 725753 - RNA, 19 nt, Artificial Sequence
  Description of Artificial Sequence: Synthetic oligonucleotide
caaucuagcuauggcuuga

SEQ ID NO: 725754 - RNA, 19 nt, Artificial Sequence
  Description of Artificial Sequence: Synthetic oligonucleotide
acuuaagcucggacaccuc

SEQ ID NO: 725755 - RNA, 19 nt, Artificial Sequence
  Description of Artificial Sequence: Synthetic oligonucleotide
agggugauuuucaggugga

SEQ ID NO: 725756 - RNA, 19 nt, Artificial Sequence
  Description of Artificial Sequence: Synthetic oligonucleotide
gcaacuacacucaguguga

SEQ ID NO: 725757 - RNA, 19 nt, Artificial Sequence
  Description of Artificial Sequence: Synthetic oligonucleotide
guggcgagucgcuccugag

SEQ ID NO: 725758 - RNA, 19 nt, Artificial Sequence
  Description of Artificial Sequence: Synthetic oligonucleotide
cucggacaccuccgcacgc

SEQ ID NO: 725759 - RNA, 19 nt, Artificial Sequence
  Description of Artificial Sequence: Synthetic oligonucleotide
acacucucuggagucgagu

SEQ ID NO: 725760 - RNA, 19 nt, Artificial Sequence
  Description of Artificial Sequence: Synthetic oligonucleotide
cagaguagguuuauucaau

SEQ ID NO: 725761 - RNA, 19 nt, Artificial Sequence
  Description of Artificial Sequence: Synthetic oligonucleotide
gccacacuuaagcucggac

SEQ ID NO: 725762 - RNA, 19 nt, Artificial Sequence
  Description of Artificial Sequence: Synthetic oligonucleotide
ucucgcgccgcucgcgcuc

SEQ ID NO: 725763 - RNA, 19 nt, Artificial Sequence
  Description of Artificial Sequence: Synthetic oligonucleotide
ucggacaccuccgcacgcu

SEQ ID NO: 725764 - RNA, 19 nt, Artificial Sequence
  Description of Artificial Sequence: Synthetic oligonucleotide
uccugguagugugaugcuu

SEQ ID NO: 725765 - RNA, 19 nt, Artificial Sequence
  Description of Artificial Sequence: Synthetic oligonucleotide
cguuuagugucugauccag

SEQ ID NO: 725766 - RNA, 19 nt, Artificial Sequence
  Description of Artificial Sequence: Synthetic oligonucleotide
gcuagaagcagggugauuu

SEQ ID NO: 725767 - RNA, 19 nt, Artificial Sequence
  Description of Artificial Sequence: Synthetic oligonucleotide
agucaagcuuccauuuguu

SEQ ID NO: 725768 - RNA, 19 nt, Artificial Sequence
  Description of Artificial Sequence: Synthetic oligonucleotide
gcugcagacccugcgcgcg

SEQ ID NO: 725769 - RNA, 19 nt, Artificial Sequence
  Description of Artificial Sequence: Synthetic oligonucleotide
agacccugcgcgcgguccu

SEQ ID NO: 725770 - RNA, 19 nt, Artificial Sequence
  Description of Artificial Sequence: Synthetic oligonucleotide
cucuaucaccuucaugccu

SEQ ID NO: 725771 - RNA, 19 nt, Artificial Sequence
  Description of Artificial Sequence: Synthetic oligonucleotide
gccgacucagcaugaucag

SEQ ID NO: 725772 - RNA, 19 nt, Artificial Sequence
  Description of Artificial Sequence: Synthetic oligonucleotide
gcuugaaaguguggggcug

SEQ ID NO: 725773 - RNA, 19 nt, Artificial Sequence
  Description of Artificial Sequence: Synthetic oligonucleotide
aucagauaccugagccugu

SEQ ID NO: 725774 - RNA, 19 nt, Artificial Sequence
  Description of Artificial Sequence: Synthetic oligonucleotide
ggaguguggagccgacuca

SEQ ID NO: 725775 - RNA, 19 nt, Artificial Sequence
  Description of Artificial Sequence: Synthetic oligonucleotide
cacuuaagcucggacaccu

SEQ ID NO: 725776 - RNA, 19 nt, Artificial Sequence
  Description of Artificial Sequence: Synthetic oligonucleotide
cuggaguaagacacuugcu

SEQ ID NO: 725777 - RNA, 19 nt, Artificial Sequence
  Description of Artificial Sequence: Synthetic oligonucleotide
cagacccugcgcgcggucc

SEQ ID NO: 725778 - RNA, 19 nt, Artificial Sequence
  Description of Artificial Sequence: Synthetic oligonucleotide
uggcucuacugaguauguc

SEQ ID NO: 725779 - RNA, 19 nt, Artificial Sequence
  Description of Artificial Sequence: Synthetic oligonucleotide
gcuauggcuugacuuccca

SEQ ID NO: 725780 - RNA, 19 nt, Artificial Sequence
  Description of Artificial Sequence: Synthetic oligonucleotide
ggaucuacuggaagacaga

SEQ ID NO: 725781 - RNA, 19 nt, Artificial Sequence
  Description of Artificial Sequence: Synthetic oligonucleotide
cucgcgcugcagacccugc

SEQ ID NO: 725782 - RNA, 19 nt, Artificial Sequence
  Description of Artificial Sequence: Synthetic oligonucleotide
cucuggagucgaguucgug

SEQ ID NO: 725783 - RNA, 19 nt, Artificial Sequence
  Description of Artificial Sequence: Synthetic oligonucleotide
ccucccauaacuuccccaa

SEQ ID NO: 725784 - RNA, 19 nt, Artificial Sequence
  Description of Artificial Sequence: Synthetic oligonucleotide
cauuaugugcuuggcauuu

SEQ ID NO: 725785 - RNA, 19 nt, Artificial Sequence
  Description of Artificial Sequence: Synthetic oligonucleotide
ggcgauugagagcggccac

SEQ ID NO: 725786 - RNA, 19 nt, Artificial Sequence
  Description of Artificial Sequence: Synthetic oligonucleotide
cgaaggaauucaagucuug

SEQ ID NO: 725787 - RNA, 19 nt, Artificial Sequence
  Description of Artificial Sequence: Synthetic oligonucleotide
gcugacuaauucccaggaa

SEQ ID NO: 725788 - RNA, 19 nt, Artificial Sequence
  Description of Artificial Sequence: Synthetic oligonucleotide
acccugcgcgcgguccucc

SEQ ID NO: 725789 - RNA, 19 nt, Artificial Sequence
  Description of Artificial Sequence: Synthetic oligonucleotide
uacuuucggucagccuccu

SEQ ID NO: 725790 - RNA, 19 nt, Artificial Sequence
  Description of Artificial Sequence: Synthetic oligonucleotide
ccgacucagcaugaucagg

SEQ ID NO: 725791 - RNA, 19 nt, Artificial Sequence
  Description of Artificial Sequence: Synthetic oligonucleotide
gagcuaccuccucauacuu

SEQ ID NO: 725792 - RNA, 19 nt, Artificial Sequence
  Description of Artificial Sequence: Synthetic oligonucleotide
ggaaaggauuggacuccgc

SEQ ID NO: 725793 - RNA, 19 nt, Artificial Sequence
  Description of Artificial Sequence: Synthetic oligonucleotide
cauggcgcgcucgcuccgc

SEQ ID NO: 725794 - RNA, 19 nt, Artificial Sequence
  Description of Artificial Sequence: Synthetic oligonucleotide
agcuaccuccucauacuuu

SEQ ID NO: 725795 - RNA, 19 nt, Artificial Sequence
  Description of Artificial Sequence: Synthetic oligonucleotide
caacuacacucagugugaa

SEQ ID NO: 725796 - RNA, 19 nt, Artificial Sequence
  Description of Artificial Sequence: Synthetic oligonucleotide
ugcagacccugcgcgcggu

SEQ ID NO: 725797 - RNA, 19 nt, Artificial Sequence
  Description of Artificial Sequence: Synthetic oligonucleotide
caauugcaguuugcuaaaa

SEQ ID NO: 725798 - RNA, 19 nt, Artificial Sequence
  Description of Artificial Sequence: Synthetic oligonucleotide
cuauggcuugacuucccau

SEQ ID NO: 725799 - RNA, 19 nt, Artificial Sequence
  Description of Artificial Sequence: Synthetic oligonucleotide
cagcgaguugaggccggcc

SEQ ID NO: 725800 - RNA, 19 nt, Artificial Sequence
  Description of Artificial Sequence: Synthetic oligonucleotide
cuggcucuacugaguaugu

SEQ ID NO: 725801 - RNA, 19 nt, Artificial Sequence
  Description of Artificial Sequence: Synthetic oligonucleotide
ggcaaguccuggaguaaga

SEQ ID NO: 725802 - RNA, 19 nt, Artificial Sequence
  Description of Artificial Sequence: Synthetic oligonucleotide
ccuacagaauacuccacau

SEQ ID NO: 725803 - RNA, 19 nt, Artificial Sequence
  Description of Artificial Sequence: Synthetic oligonucleotide
cuaucaccuucaugccucu

SEQ ID NO: 725804 - RNA, 19 nt, Artificial Sequence
  Description of Artificial Sequence: Synthetic oligonucleotide
gugaaauucccugccuauu

SEQ ID NO: 725805 - RNA, 19 nt, Artificial Sequence
  Description of Artificial Sequence: Synthetic oligonucleotide
gcgagucgcuccugagccc

SEQ ID NO: 725806 - RNA, 19 nt, Artificial Sequence
  Description of Artificial Sequence: Synthetic oligonucleotide
ccuuucguugcccaacagu

SEQ ID NO: 725807 - RNA, 19 nt, Artificial Sequence
  Description of Artificial Sequence: Synthetic oligonucleotide
agucgcuccugagcccggu

SEQ ID NO: 725808 - RNA, 19 nt, Artificial Sequence
  Description of Artificial Sequence: Synthetic oligonucleotide
cuagcccguuuuaaauuuu

SEQ ID NO: 725809 - RNA, 19 nt, Artificial Sequence
  Description of Artificial Sequence: Synthetic oligonucleotide
gcgauugagagcggccaca

SEQ ID NO: 725810 - RNA, 19 nt, Artificial Sequence
  Description of Artificial Sequence: Synthetic oligonucleotide
ccaggucgccacacuuaag

SEQ ID NO: 725811 - RNA, 19 nt, Artificial Sequence
  Description of Artificial Sequence: Synthetic oligonucleotide
caguugguauuaguauggu

SEQ ID NO: 725812 - RNA, 19 nt, Artificial Sequence
  Description of Artificial Sequence: Synthetic oligonucleotide
gcggcgauugagagcggcc

SEQ ID NO: 725813 - RNA, 19 nt, Artificial Sequence
  Description of Artificial Sequence: Synthetic oligonucleotide
cagcuuucucgcgccgcuc

SEQ ID NO: 725814 - RNA, 19 nt, Artificial Sequence
  Description of Artificial Sequence: Synthetic oligonucleotide
gcucgcgcugcagacccug

SEQ ID NO: 725815 - RNA, 19 nt, Artificial Sequence
  Description of Artificial Sequence: Synthetic oligonucleotide
cucgcuccgcugggcuccg

SEQ ID NO: 725816 - RNA, 19 nt, Artificial Sequence
  Description of Artificial Sequence: Synthetic oligonucleotide
ccauaacuuccccaacagu

SEQ ID NO: 725817 - RNA, 19 nt, Artificial Sequence
  Description of Artificial Sequence: Synthetic oligonucleotide
ccgaaggaauucaagucuu

SEQ ID NO: 725818 - RNA, 19 nt, Artificial Sequence
  Description of Artificial Sequence: Synthetic oligonucleotide
gacccugcgcgcgguccuc

SEQ ID NO: 725819 - RNA, 19 nt, Artificial Sequence
  Description of Artificial Sequence: Synthetic oligonucleotide
augcggcgauugagagcgg

SEQ ID NO: 725820 - RNA, 19 nt, Artificial Sequence
  Description of Artificial Sequence: Synthetic oligonucleotide
ccugcgcgcgguccuccgc

SEQ ID NO: 725821 - RNA, 19 nt, Artificial Sequence
  Description of Artificial Sequence: Synthetic oligonucleotide
guggaguguggagccgacu

SEQ ID NO: 725822 - RNA, 19 nt, Artificial Sequence
  Description of Artificial Sequence: Synthetic oligonucleotide
caccuccgcacgcuccucu

SEQ ID NO: 725823 - RNA, 19 nt, Artificial Sequence
  Description of Artificial Sequence: Synthetic oligonucleotide
cccauacuagcccguuuua

SEQ ID NO: 725824 - RNA, 19 nt, Artificial Sequence
  Description of Artificial Sequence: Synthetic oligonucleotide
gcgaguugaggccggccau

SEQ ID NO: 725825 - RNA, 19 nt, Artificial Sequence
  Description of Artificial Sequence: Synthetic oligonucleotide
ccgccuccagcgaguugag

SEQ ID NO: 725826 - RNA, 19 nt, Artificial Sequence
  Description of Artificial Sequence: Synthetic oligonucleotide
gcagacccugcgcgcgguc

SEQ ID NO: 725827 - RNA, 19 nt, Artificial Sequence
  Description of Artificial Sequence: Synthetic oligonucleotide
gcgccgcucgcgcucgcca

SEQ ID NO: 725828 - RNA, 19 nt, Artificial Sequence
  Description of Artificial Sequence: Synthetic oligonucleotide
cggcgauugagagcggcca

SEQ ID NO: 725829 - RNA, 19 nt, Artificial Sequence
  Description of Artificial Sequence: Synthetic oligonucleotide
cgugucagaacaggacucu

SEQ ID NO: 725830 - RNA, 19 nt, Artificial Sequence
  Description of Artificial Sequence: Synthetic oligonucleotide
ccgcacgcuccucugcucu

SEQ ID NO: 725831 - RNA, 19 nt, Artificial Sequence
  Description of Artificial Sequence: Synthetic oligonucleotide
cagggguuucuuggucuuu

SEQ ID NO: 725832 - RNA, 19 nt, Artificial Sequence
  Description of Artificial Sequence: Synthetic oligonucleotide
cgauugagagcggccacau

SEQ ID NO: 725833 - RNA, 19 nt, Artificial Sequence
  Description of Artificial Sequence: Synthetic oligonucleotide
ccucagccuuaagcaacua

SEQ ID NO: 725834 - RNA, 19 nt, Artificial Sequence
  Description of Artificial Sequence: Synthetic oligonucleotide
ccccagccucccauaacuu

SEQ ID NO: 725835 - RNA, 19 nt, Artificial Sequence
  Description of Artificial Sequence: Synthetic oligonucleotide
uuugguuucaccauuucgg

SEQ ID NO: 725836 - RNA, 19 nt, Artificial Sequence
  Description of Artificial Sequence: Synthetic oligonucleotide
uuauauaucucuuaagucu

SEQ ID NO: 725837 - RNA, 19 nt, Artificial Sequence
  Description of Artificial Sequence: Synthetic oligonucleotide
acaaccacgaacuugagag

SEQ ID NO: 725838 - RNA, 19 nt, Artificial Sequence
  Description of Artificial Sequence: Synthetic oligonucleotide
uaauccacgaauuaaacca

SEQ ID NO: 725839 - RNA, 19 nt, Artificial Sequence
  Description of Artificial Sequence: Synthetic oligonucleotide
ucucuauucagaaaucugg

SEQ ID NO: 725840 - RNA, 19 nt, Artificial Sequence
  Description of Artificial Sequence: Synthetic oligonucleotide
uuuucaacaagccagcgcu

SEQ ID NO: 725841 - RNA, 19 nt, Artificial Sequence
  Description of Artificial Sequence: Synthetic oligonucleotide
uguaguugcgucaaugagg

SEQ ID NO: 725842 - RNA, 19 nt, Artificial Sequence
  Description of Artificial Sequence: Synthetic oligonucleotide
auuucggggaucuaagugc

SEQ ID NO: 725843 - RNA, 19 nt, Artificial Sequence
  Description of Artificial Sequence: Synthetic oligonucleotide
aaacauagccaccacaucu

SEQ ID NO: 725844 - RNA, 19 nt, Artificial Sequence
  Description of Artificial Sequence: Synthetic oligonucleotide
uaaacacucuaauaaaugc

SEQ ID NO: 725845 - RNA, 19 nt, Artificial Sequence
  Description of Artificial Sequence: Synthetic oligonucleotide
aauagaauaaauaauuuua

SEQ ID NO: 725846 - RNA, 19 nt, Artificial Sequence
  Description of Artificial Sequence: Synthetic oligonucleotide
aguacaaguauuucugagg

SEQ ID NO: 725847 - RNA, 19 nt, Artificial Sequence
  Description of Artificial Sequence: Synthetic oligonucleotide
gaacuuuucaacaagccag

SEQ ID NO: 725848 - RNA, 19 nt, Artificial Sequence
  Description of Artificial Sequence: Synthetic oligonucleotide
uuugauaagugacaaacau

SEQ ID NO: 725849 - RNA, 19 nt, Artificial Sequence
  Description of Artificial Sequence: Synthetic oligonucleotide
aaggacuuaaugaaaguac

SEQ ID NO: 725850 - RNA, 19 nt, Artificial Sequence
  Description of Artificial Sequence: Synthetic oligonucleotide
uguuugauaagugacaaac

SEQ ID NO: 725851 - RNA, 19 nt, Artificial Sequence
  Description of Artificial Sequence: Synthetic oligonucleotide
cuuaucaugaaaacuaauc

SEQ ID NO: 725852 - RNA, 19 nt, Artificial Sequence
  Description of Artificial Sequence: Synthetic oligonucleotide
ugccuguaaauaaagcugg

SEQ ID NO: 725853 - RNA, 19 nt, Artificial Sequence
  Description of Artificial Sequence: Synthetic oligonucleotide
agcaaguccaucuuggguc

SEQ ID NO: 725854 - RNA, 19 nt, Artificial Sequence
  Description of Artificial Sequence: Synthetic oligonucleotide
aaacgugucacuauuucac

SEQ ID NO: 725855 - RNA, 19 nt, Artificial Sequence
  Description of Artificial Sequence: Synthetic oligonucleotide
cuugaugucaccugguacc

SEQ ID NO: 725856 - RNA, 19 nt, Artificial Sequence
  Description of Artificial Sequence: Synthetic oligonucleotide
ugauggaucacgauccugc

SEQ ID NO: 725857 - RNA, 19 nt, Artificial Sequence
  Description of Artificial Sequence: Synthetic oligonucleotide
uuaguagaaucgaugcuag

SEQ ID NO: 725858 - RNA, 19 nt, Artificial Sequence
  Description of Artificial Sequence: Synthetic oligonucleotide
ugugaguacuuccucaccc

SEQ ID NO: 725859 - RNA, 19 nt, Artificial Sequence
  Description of Artificial Sequence: Synthetic oligonucleotide
guacaaguauuucugaggc

SEQ ID NO: 725860 - RNA, 19 nt, Artificial Sequence
  Description of Artificial Sequence: Synthetic oligonucleotide
ugggcuuacagcaagucca

SEQ ID NO: 725861 - RNA, 19 nt, Artificial Sequence
  Description of Artificial Sequence: Synthetic oligonucleotide
gaugugggcguuuaugucc

SEQ ID NO: 725862 - RNA, 19 nt, Artificial Sequence
  Description of Artificial Sequence: Synthetic oligonucleotide
cuaauccacgaauuaaacc

SEQ ID NO: 725863 - RNA, 19 nt, Artificial Sequence
  Description of Artificial Sequence: Synthetic oligonucleotide
aucacgauccugcaagugg

SEQ ID NO: 725864 - RNA, 19 nt, Artificial Sequence
  Description of Artificial Sequence: Synthetic oligonucleotide
aagcuugcaaaacaucuca

SEQ ID NO: 725865 - RNA, 19 nt, Artificial Sequence
  Description of Artificial Sequence: Synthetic oligonucleotide
agaggcaacauuccacggc

SEQ ID NO: 725866 - RNA, 19 nt, Artificial Sequence
  Description of Artificial Sequence: Synthetic oligonucleotide
uuugccguguagaacacug

SEQ ID NO: 725867 - RNA, 19 nt, Artificial Sequence
  Description of Artificial Sequence: Synthetic oligonucleotide
aguugcgucaaugagguag

SEQ ID NO: 725868 - RNA, 19 nt, Artificial Sequence
  Description of Artificial Sequence: Synthetic oligonucleotide
uucacuuauucucuggccu

SEQ ID NO: 725869 - RNA, 19 nt, Artificial Sequence
  Description of Artificial Sequence: Synthetic oligonucleotide
aggauaauuaucucaagaa

SEQ ID NO: 725870 - RNA, 19 nt, Artificial Sequence
  Description of Artificial Sequence: Synthetic oligonucleotide
ugcuagaucacaauuuaaa

SEQ ID NO: 725871 - RNA, 19 nt, Artificial Sequence
  Description of Artificial Sequence: Synthetic oligonucleotide
cacgaauuaaaccaaaaca

SEQ ID NO: 725872 - RNA, 19 nt, Artificial Sequence
  Description of Artificial Sequence: Synthetic oligonucleotide
cucuuuauuggaacugucg

SEQ ID NO: 725873 - RNA, 19 nt, Artificial Sequence
  Description of Artificial Sequence: Synthetic oligonucleotide
caaguggaugcgaugaucc

SEQ ID NO: 725874 - RNA, 19 nt, Artificial Sequence
  Description of Artificial Sequence: Synthetic oligonucleotide
ugugcuguuugauaaguga

SEQ ID NO: 725875 - RNA, 19 nt, Artificial Sequence
  Description of Artificial Sequence: Synthetic oligonucleotide
uguaaacgcgugcugguag

SEQ ID NO: 725876 - RNA, 19 nt, Artificial Sequence
  Description of Artificial Sequence: Synthetic oligonucleotide
ucuaguugccuuaccgagg

SEQ ID NO: 725877 - RNA, 19 nt, Artificial Sequence
  Description of Artificial Sequence: Synthetic oligonucleotide
uuuaguagaaucgaugcua

SEQ ID NO: 725878 - RNA, 19 nt, Artificial Sequence
  Description of Artificial Sequence: Synthetic oligonucleotide
uguugauagaauucucucu

SEQ ID NO: 725879 - RNA, 19 nt, Artificial Sequence
  Description of Artificial Sequence: Synthetic oligonucleotide
acagaugcucaccugcucg

SEQ ID NO: 725880 - RNA, 19 nt, Artificial Sequence
  Description of Artificial Sequence: Synthetic oligonucleotide
aaguggaugcgaugauccc

SEQ ID NO: 725881 - RNA, 19 nt, Artificial Sequence
  Description of Artificial Sequence: Synthetic oligonucleotide
ugaccaauauacuguagug

SEQ ID NO: 725882 - RNA, 19 nt, Artificial Sequence
  Description of Artificial Sequence: Synthetic oligonucleotide
ucucucauacaaaaguuau

SEQ ID NO: 725883 - RNA, 19 nt, Artificial Sequence
  Description of Artificial Sequence: Synthetic oligonucleotide
uguaacaaccacgaacuug

SEQ ID NO: 725884 - RNA, 19 nt, Artificial Sequence
  Description of Artificial Sequence: Synthetic oligonucleotide
uuaucucaagaacuuuuca

SEQ ID NO: 725885 - RNA, 19 nt, Artificial Sequence
  Description of Artificial Sequence: Synthetic oligonucleotide
acgaauuaaaccaaaacaa

SEQ ID NO: 725886 - RNA, 19 nt, Artificial Sequence
  Description of Artificial Sequence: Synthetic oligonucleotide
aaaggcuacauaaaguaaa

SEQ ID NO: 725887 - RNA, 19 nt, Artificial Sequence
  Description of Artificial Sequence: Synthetic oligonucleotide
cuaguugccuuaccgaggg

SEQ ID NO: 725888 - RNA, 19 nt, Artificial Sequence
  Description of Artificial Sequence: Synthetic oligonucleotide
uggaaucggggcuacauug

SEQ ID NO: 725889 - RNA, 19 nt, Artificial Sequence
  Description of Artificial Sequence: Synthetic oligonucleotide
ucugauucucaagaccugg

SEQ ID NO: 725890 - RNA, 19 nt, Artificial Sequence
  Description of Artificial Sequence: Synthetic oligonucleotide
aaacacucuaauaaaugca

SEQ ID NO: 725891 - RNA, 19 nt, Artificial Sequence
  Description of Artificial Sequence: Synthetic oligonucleotide
accucuaguugccuuaccg

SEQ ID NO: 725892 - RNA, 19 nt, Artificial Sequence
  Description of Artificial Sequence: Synthetic oligonucleotide
aauaacuuaggaaggacuu

SEQ ID NO: 725893 - RNA, 19 nt, Artificial Sequence
  Description of Artificial Sequence: Synthetic oligonucleotide
ucaauuuaguagaaucgau

SEQ ID NO: 725894 - RNA, 19 nt, Artificial Sequence
  Description of Artificial Sequence: Synthetic oligonucleotide
acugcgaaguguuuucauc

SEQ ID NO: 725895 - RNA, 19 nt, Artificial Sequence
  Description of Artificial Sequence: Synthetic oligonucleotide
aaugacagccuggaaucgg

SEQ ID NO: 725896 - RNA, 19 nt, Artificial Sequence
  Description of Artificial Sequence: Synthetic oligonucleotide
ugcauguuggagccuauug

SEQ ID NO: 725897 - RNA, 19 nt, Artificial Sequence
  Description of Artificial Sequence: Synthetic oligonucleotide
aagucugcgucucgggcgg

SEQ ID NO: 725898 - RNA, 19 nt, Artificial Sequence
  Description of Artificial Sequence: Synthetic oligonucleotide
aacgcgugcugguaguguc

SEQ ID NO: 725899 - RNA, 19 nt, Artificial Sequence
  Description of Artificial Sequence: Synthetic oligonucleotide
auaaggucuccccacagga

SEQ ID NO: 725900 - RNA, 19 nt, Artificial Sequence
  Description of Artificial Sequence: Synthetic oligonucleotide
guaacaaccacgaacuuga

SEQ ID NO: 725901 - RNA, 19 nt, Artificial Sequence
  Description of Artificial Sequence: Synthetic oligonucleotide
aaacuaauccacgaauuaa

SEQ ID NO: 725902 - RNA, 19 nt, Artificial Sequence
  Description of Artificial Sequence: Synthetic oligonucleotide
acuaauccacgaauuaaac

SEQ ID NO: 725903 - RNA, 19 nt, Artificial Sequence
  Description of Artificial Sequence: Synthetic oligonucleotide
cuguaguguagcaggaggg

SEQ ID NO: 725904 - RNA, 19 nt, Artificial Sequence
  Description of Artificial Sequence: Synthetic oligonucleotide
gaagcuagaggcugccucc

SEQ ID NO: 725905 - RNA, 19 nt, Artificial Sequence
  Description of Artificial Sequence: Synthetic oligonucleotide
cauuccacggcacauuuug

SEQ ID NO: 725906 - RNA, 19 nt, Artificial Sequence
  Description of Artificial Sequence: Synthetic oligonucleotide
uuguugauagaauucucuc

SEQ ID NO: 725907 - RNA, 19 nt, Artificial Sequence
  Description of Artificial Sequence: Synthetic oligonucleotide
caauauacuguagugggug

SEQ ID NO: 725908 - RNA, 19 nt, Artificial Sequence
  Description of Artificial Sequence: Synthetic oligonucleotide
agcagagacgagcaaacug

SEQ ID NO: 725909 - RNA, 19 nt, Artificial Sequence
  Description of Artificial Sequence: Synthetic oligonucleotide
uaaauaaagcuggaccaca

SEQ ID NO: 725910 - RNA, 19 nt, Artificial Sequence
  Description of Artificial Sequence: Synthetic oligonucleotide
cuuuucaacaagccagcgc

SEQ ID NO: 725911 - RNA, 19 nt, Artificial Sequence
  Description of Artificial Sequence: Synthetic oligonucleotide
cucuaguugccuuaccgag

SEQ ID NO: 725912 - RNA, 19 nt, Artificial Sequence
  Description of Artificial Sequence: Synthetic oligonucleotide
gcagguauuauucuccucc

SEQ ID NO: 725913 - RNA, 19 nt, Artificial Sequence
  Description of Artificial Sequence: Synthetic oligonucleotide
agccacacgacauugggga

SEQ ID NO: 725914 - RNA, 19 nt, Artificial Sequence
  Description of Artificial Sequence: Synthetic oligonucleotide
aaagaagcuugcaaaacau

SEQ ID NO: 725915 - RNA, 19 nt, Artificial Sequence
  Description of Artificial Sequence: Synthetic oligonucleotide
uguuggagccuauugcaca

SEQ ID NO: 725916 - RNA, 19 nt, Artificial Sequence
  Description of Artificial Sequence: Synthetic oligonucleotide
aauaugauagaaggcuuaa

SEQ ID NO: 725917 - RNA, 19 nt, Artificial Sequence
  Description of Artificial Sequence: Synthetic oligonucleotide
gaaacgugucacuauuuca

SEQ ID NO: 725918 - RNA, 19 nt, Artificial Sequence
  Description of Artificial Sequence: Synthetic oligonucleotide
acuguaguugcgucaauga

SEQ ID NO: 725919 - RNA, 19 nt, Artificial Sequence
  Description of Artificial Sequence: Synthetic oligonucleotide
aacuaauccacgaauuaaa

SEQ ID NO: 725920 - RNA, 19 nt, Artificial Sequence
  Description of Artificial Sequence: Synthetic oligonucleotide
aacgugucacuauuucacu

SEQ ID NO: 725921 - RNA, 19 nt, Artificial Sequence
  Description of Artificial Sequence: Synthetic oligonucleotide
aguagaaucgaugcuagau

SEQ ID NO: 725922 - RNA, 19 nt, Artificial Sequence
  Description of Artificial Sequence: Synthetic oligonucleotide
cauuucggggaucuaagug

SEQ ID NO: 725923 - RNA, 19 nt, Artificial Sequence
  Description of Artificial Sequence: Synthetic oligonucleotide
uaguguagcaggaggggug

SEQ ID NO: 725924 - RNA, 19 nt, Artificial Sequence
  Description of Artificial Sequence: Synthetic oligonucleotide
ugaggcuuaucaugaaaac

SEQ ID NO: 725925 - RNA, 19 nt, Artificial Sequence
  Description of Artificial Sequence: Synthetic oligonucleotide
aguggggcagguauuauuc

SEQ ID NO: 725926 - RNA, 19 nt, Artificial Sequence
  Description of Artificial Sequence: Synthetic oligonucleotide
guagaaucgaugcuagauc

SEQ ID NO: 725927 - RNA, 19 nt, Artificial Sequence
  Description of Artificial Sequence: Synthetic oligonucleotide
uccaccuuguaacaaccac

SEQ ID NO: 725928 - RNA, 19 nt, Artificial Sequence
  Description of Artificial Sequence: Synthetic oligonucleotide
ucaauaacuuaggaaggac

SEQ ID NO: 725929 - RNA, 19 nt, Artificial Sequence
  Description of Artificial Sequence: Synthetic oligonucleotide
uccuauuuucugugaauga

SEQ ID NO: 725930 - RNA, 19 nt, Artificial Sequence
  Description of Artificial Sequence: Synthetic oligonucleotide
acucugauucucaagaccu

SEQ ID NO: 725931 - RNA, 19 nt, Artificial Sequence
  Description of Artificial Sequence: Synthetic oligonucleotide
acauaaaguaaaagaagcu

SEQ ID NO: 725932 - RNA, 19 nt, Artificial Sequence
  Description of Artificial Sequence: Synthetic oligonucleotide
ucacccgguggcauggagg

SEQ ID NO: 725933 - RNA, 19 nt, Artificial Sequence
  Description of Artificial Sequence: Synthetic oligonucleotide
aguguagcaggaggggugc

SEQ ID NO: 725934 - RNA, 19 nt, Artificial Sequence
  Description of Artificial Sequence: Synthetic oligonucleotide
uggaugggaaaauaugaua

SEQ ID NO: 725935 - RNA, 19 nt, Artificial Sequence
  Description of Artificial Sequence: Synthetic oligonucleotide
uaacuuaggaaggacuuaa

SEQ ID NO: 725936 - RNA, 19 nt, Artificial Sequence
  Description of Artificial Sequence: Synthetic oligonucleotide
ucucacaauuuuaucuuau

SEQ ID NO: 725937 - RNA, 19 nt, Artificial Sequence
  Description of Artificial Sequence: Synthetic oligonucleotide
gggucuguaguguagcagg

SEQ ID NO: 725938 - RNA, 19 nt, Artificial Sequence
  Description of Artificial Sequence: Synthetic oligonucleotide
auaauuaucucaagaacuu

SEQ ID NO: 725939 - RNA, 19 nt, Artificial Sequence
  Description of Artificial Sequence: Synthetic oligonucleotide
acaaguauuucugaggcuu

SEQ ID NO: 725940 - RNA, 19 nt, Artificial Sequence
  Description of Artificial Sequence: Synthetic oligonucleotide
ucugaggcuuaucaugaaa

SEQ ID NO: 725941 - RNA, 19 nt, Artificial Sequence
  Description of Artificial Sequence: Synthetic oligonucleotide
gagacgagcaaacugcgaa

SEQ ID NO: 725942 - RNA, 19 nt, Artificial Sequence
  Description of Artificial Sequence: Synthetic oligonucleotide
ccuuguaacaaccacgaac

SEQ ID NO: 725943 - RNA, 19 nt, Artificial Sequence
  Description of Artificial Sequence: Synthetic oligonucleotide
uguagaacacugggugugg

SEQ ID NO: 725944 - RNA, 19 nt, Artificial Sequence
  Description of Artificial Sequence: Synthetic oligonucleotide
gugaguacuuccucacccg

SEQ ID NO: 725945 - RNA, 19 nt, Artificial Sequence
  Description of Artificial Sequence: Synthetic oligonucleotide
gaucuaagugcuguuuggc

SEQ ID NO: 725946 - RNA, 19 nt, Artificial Sequence
  Description of Artificial Sequence: Synthetic oligonucleotide
uguugcauuccagacagau

SEQ ID NO: 725947 - RNA, 19 nt, Artificial Sequence
  Description of Artificial Sequence: Synthetic oligonucleotide
gauucucaagaccuggaaa

SEQ ID NO: 725948 - RNA, 19 nt, Artificial Sequence
  Description of Artificial Sequence: Synthetic oligonucleotide
accuauauucccuuucaau

SEQ ID NO: 725949 - RNA, 19 nt, Artificial Sequence
  Description of Artificial Sequence: Synthetic oligonucleotide
ucgaugcuagaucacaauu

SEQ ID NO: 725950 - RNA, 19 nt, Artificial Sequence
  Description of Artificial Sequence: Synthetic oligonucleotide
gaggcaacauuccacggca

SEQ ID NO: 725951 - RNA, 19 nt, Artificial Sequence
  Description of Artificial Sequence: Synthetic oligonucleotide
cacucagucacuguaguug

SEQ ID NO: 725952 - RNA, 19 nt, Artificial Sequence
  Description of Artificial Sequence: Synthetic oligonucleotide
gcuagaucacaauuuaaac

SEQ ID NO: 725953 - RNA, 19 nt, Artificial Sequence
  Description of Artificial Sequence: Synthetic oligonucleotide
gcauaaaauguccagcuca

SEQ ID NO: 725954 - RNA, 19 nt, Artificial Sequence
  Description of Artificial Sequence: Synthetic oligonucleotide
agggugccggaauugcagc

SEQ ID NO: 725955 - RNA, 19 nt, Artificial Sequence
  Description of Artificial Sequence: Synthetic oligonucleotide
cuguaguugcgucaaugag

SEQ ID NO: 725956 - RNA, 19 nt, Artificial Sequence
  Description of Artificial Sequence: Synthetic oligonucleotide
uccacgaauuaaaccaaaa

SEQ ID NO: 725957 - RNA, 19 nt, Artificial Sequence
  Description of Artificial Sequence: Synthetic oligonucleotide
ucuguaaacgcgugcuggu

SEQ ID NO: 725958 - RNA, 19 nt, Artificial Sequence
  Description of Artificial Sequence: Synthetic oligonucleotide
agacgagcaaacugcgaag

SEQ ID NO: 725959 - RNA, 19 nt, Artificial Sequence
  Description of Artificial Sequence: Synthetic oligonucleotide
caaacugcgaaguguuuuc

SEQ ID NO: 725960 - RNA, 19 nt, Artificial Sequence
  Description of Artificial Sequence: Synthetic oligonucleotide
ggaucuaagugcuguuugg

SEQ ID NO: 725961 - RNA, 19 nt, Artificial Sequence
  Description of Artificial Sequence: Synthetic oligonucleotide
uaaucuuccuggucaacau

SEQ ID NO: 725962 - RNA, 19 nt, Artificial Sequence
  Description of Artificial Sequence: Synthetic oligonucleotide
ucucaagaccuggaaagca

SEQ ID NO: 725963 - RNA, 19 nt, Artificial Sequence
  Description of Artificial Sequence: Synthetic oligonucleotide
gcgucaaugagguagccgc

SEQ ID NO: 725964 - RNA, 19 nt, Artificial Sequence
  Description of Artificial Sequence: Synthetic oligonucleotide
aggacuuaaugaaaguaca

SEQ ID NO: 725965 - RNA, 19 nt, Artificial Sequence
  Description of Artificial Sequence: Synthetic oligonucleotide
uccaccuauauucccuuuc

SEQ ID NO: 725966 - RNA, 19 nt, Artificial Sequence
  Description of Artificial Sequence: Synthetic oligonucleotide
cugcucgucacuccugugg

SEQ ID NO: 725967 - RNA, 19 nt, Artificial Sequence
  Description of Artificial Sequence: Synthetic oligonucleotide
uugccguguagaacacugg

SEQ ID NO: 725968 - RNA, 19 nt, Artificial Sequence
  Description of Artificial Sequence: Synthetic oligonucleotide
gaaugacagccuggaaucg

SEQ ID NO: 725969 - RNA, 19 nt, Artificial Sequence
  Description of Artificial Sequence: Synthetic oligonucleotide
uucaccauuucggggaucu

SEQ ID NO: 725970 - RNA, 19 nt, Artificial Sequence
  Description of Artificial Sequence: Synthetic oligonucleotide
aaaugcauguuggagccua

SEQ ID NO: 725971 - RNA, 19 nt, Artificial Sequence
  Description of Artificial Sequence: Synthetic oligonucleotide
aggcuuaucaugaaaacua

SEQ ID NO: 725972 - RNA, 19 nt, Artificial Sequence
  Description of Artificial Sequence: Synthetic oligonucleotide
gaaucggggcuacauugug

SEQ ID NO: 725973 - RNA, 19 nt, Artificial Sequence
  Description of Artificial Sequence: Synthetic oligonucleotide
gugacaaacauagccacca

SEQ ID NO: 725974 - RNA, 19 nt, Artificial Sequence
  Description of Artificial Sequence: Synthetic oligonucleotide
gaaggacuuaaugaaagua

SEQ ID NO: 725975 - RNA, 19 nt, Artificial Sequence
  Description of Artificial Sequence: Synthetic oligonucleotide
uguggaaacgugucacuau

SEQ ID NO: 725976 - RNA, 19 nt, Artificial Sequence
  Description of Artificial Sequence: Synthetic oligonucleotide
aguugccuuaccgagggug

SEQ ID NO: 725977 - RNA, 19 nt, Artificial Sequence
  Description of Artificial Sequence: Synthetic oligonucleotide
ugcgucaaugagguagccg

SEQ ID NO: 725978 - RNA, 19 nt, Artificial Sequence
  Description of Artificial Sequence: Synthetic oligonucleotide
uuuaugucccagaguuuaa

SEQ ID NO: 725979 - RNA, 19 nt, Artificial Sequence
  Description of Artificial Sequence: Synthetic oligonucleotide
agguauuauucuccuccag

SEQ ID NO: 725980 - RNA, 19 nt, Artificial Sequence
  Description of Artificial Sequence: Synthetic oligonucleotide
uacaaguauuucugaggcu

SEQ ID NO: 725981 - RNA, 19 nt, Artificial Sequence
  Description of Artificial Sequence: Synthetic oligonucleotide
augugggcguuuauguccc

SEQ ID NO: 725982 - RNA, 19 nt, Artificial Sequence
  Description of Artificial Sequence: Synthetic oligonucleotide
aaggcuacauaaaguaaaa

SEQ ID NO: 725983 - RNA, 19 nt, Artificial Sequence
  Description of Artificial Sequence: Synthetic oligonucleotide
cugggcuuacagcaagucc

SEQ ID NO: 725984 - RNA, 19 nt, Artificial Sequence
  Description of Artificial Sequence: Synthetic oligonucleotide
acauggaagcuagaggcug

SEQ ID NO: 725985 - RNA, 19 nt, Artificial Sequence
  Description of Artificial Sequence: Synthetic oligonucleotide
agccuauugcacaaaagca

SEQ ID NO: 725986 - RNA, 19 nt, Artificial Sequence
  Description of Artificial Sequence: Synthetic oligonucleotide
ugcuguauucagacguggu

SEQ ID NO: 725987 - RNA, 19 nt, Artificial Sequence
  Description of Artificial Sequence: Synthetic oligonucleotide
uugagagugugguccuugc

SEQ ID NO: 725988 - RNA, 19 nt, Artificial Sequence
  Description of Artificial Sequence: Synthetic oligonucleotide
agucacuguaguugcguca

SEQ ID NO: 725989 - RNA, 19 nt, Artificial Sequence
  Description of Artificial Sequence: Synthetic oligonucleotide
caccuuguaacaaccacga

SEQ ID NO: 725990 - RNA, 19 nt, Artificial Sequence
  Description of Artificial Sequence: Synthetic oligonucleotide
auuggaacugucgucugcu

SEQ ID NO: 725991 - RNA, 19 nt, Artificial Sequence
  Description of Artificial Sequence: Synthetic oligonucleotide
aacugcgaaguguuuucau

SEQ ID NO: 725992 - RNA, 19 nt, Artificial Sequence
  Description of Artificial Sequence: Synthetic oligonucleotide
cugaggcuuaucaugaaaa

SEQ ID NO: 725993 - RNA, 19 nt, Artificial Sequence
  Description of Artificial Sequence: Synthetic oligonucleotide
aauccacgaauuaaaccaa

SEQ ID NO: 725994 - RNA, 19 nt, Artificial Sequence
  Description of Artificial Sequence: Synthetic oligonucleotide
auuuucccgcuuuccuggg

SEQ ID NO: 725995 - RNA, 19 nt, Artificial Sequence
  Description of Artificial Sequence: Synthetic oligonucleotide
ugcucgucacuccuguggu

SEQ ID NO: 725996 - RNA, 19 nt, Artificial Sequence
  Description of Artificial Sequence: Synthetic oligonucleotide
auguuggagccuauugcac

SEQ ID NO: 725997 - RNA, 19 nt, Artificial Sequence
  Description of Artificial Sequence: Synthetic oligonucleotide
auuggggagugaugaaggu

SEQ ID NO: 725998 - RNA, 19 nt, Artificial Sequence
  Description of Artificial Sequence: Synthetic oligonucleotide
aaucgaugcuagaucacaa

SEQ ID NO: 725999 - RNA, 19 nt, Artificial Sequence
  Description of Artificial Sequence: Synthetic oligonucleotide
gagggugccggaauugcag

SEQ ID NO: 726000 - RNA, 19 nt, Artificial Sequence
  Description of Artificial Sequence: Synthetic oligonucleotide
uuuaucuuauaugccugua

SEQ ID NO: 726001 - RNA, 19 nt, Artificial Sequence
  Description of Artificial Sequence: Synthetic oligonucleotide
cacccgguggcauggaggc

SEQ ID NO: 726002 - RNA, 19 nt, Artificial Sequence
  Description of Artificial Sequence: Synthetic oligonucleotide
aaacugcgaaguguuuuca

SEQ ID NO: 726003 - RNA, 19 nt, Artificial Sequence
  Description of Artificial Sequence: Synthetic oligonucleotide
guguagaacacugggugug

SEQ ID NO: 726004 - RNA, 19 nt, Artificial Sequence
  Description of Artificial Sequence: Synthetic oligonucleotide
ugggucuguaguguagcag

SEQ ID NO: 726005 - RNA, 19 nt, Artificial Sequence
  Description of Artificial Sequence: Synthetic oligonucleotide
guauuauucuccuccagau

SEQ ID NO: 726006 - RNA, 19 nt, Artificial Sequence
  Description of Artificial Sequence: Synthetic oligonucleotide
uacuguaguggguggcucu

SEQ ID NO: 726007 - RNA, 19 nt, Artificial Sequence
  Description of Artificial Sequence: Synthetic oligonucleotide
augacagccuggaaucggg

SEQ ID NO: 726008 - RNA, 19 nt, Artificial Sequence
  Description of Artificial Sequence: Synthetic oligonucleotide
gcuguauucagacguggug

SEQ ID NO: 726009 - RNA, 19 nt, Artificial Sequence
  Description of Artificial Sequence: Synthetic oligonucleotide
guugcgucaaugagguagc

SEQ ID NO: 726010 - RNA, 19 nt, Artificial Sequence
  Description of Artificial Sequence: Synthetic oligonucleotide
guaguugcgucaaugaggu

SEQ ID NO: 726011 - RNA, 19 nt, Artificial Sequence
  Description of Artificial Sequence: Synthetic oligonucleotide
caccacaucuugcuagcag

SEQ ID NO: 726012 - RNA, 19 nt, Artificial Sequence
  Description of Artificial Sequence: Synthetic oligonucleotide
ggaaacgugucacuauuuc

SEQ ID NO: 726013 - RNA, 19 nt, Artificial Sequence
  Description of Artificial Sequence: Synthetic oligonucleotide
accauuucggggaucuaag

SEQ ID NO: 726014 - RNA, 19 nt, Artificial Sequence
  Description of Artificial Sequence: Synthetic oligonucleotide
aggcuacauaaaguaaaag

SEQ ID NO: 726015 - RNA, 19 nt, Artificial Sequence
  Description of Artificial Sequence: Synthetic oligonucleotide
guauucagacguggugugg

SEQ ID NO: 726016 - RNA, 19 nt, Artificial Sequence
  Description of Artificial Sequence: Synthetic oligonucleotide
ugcauuccagacagaugcu

SEQ ID NO: 726017 - RNA, 19 nt, Artificial Sequence
  Description of Artificial Sequence: Synthetic oligonucleotide
cagccacacgacauugggg

SEQ ID NO: 726018 - RNA, 19 nt, Artificial Sequence
  Description of Artificial Sequence: Synthetic oligonucleotide
ugcgaugaucccuccuuac

SEQ ID NO: 726019 - RNA, 19 nt, Artificial Sequence
  Description of Artificial Sequence: Synthetic oligonucleotide
uuuaaucuuccuggucaac

SEQ ID NO: 726020 - RNA, 19 nt, Artificial Sequence
  Description of Artificial Sequence: Synthetic oligonucleotide
auauucccuuucaauuuag

SEQ ID NO: 726021 - RNA, 19 nt, Artificial Sequence
  Description of Artificial Sequence: Synthetic oligonucleotide
auacuguaguggguggcuc

SEQ ID NO: 726022 - RNA, 19 nt, Artificial Sequence
  Description of Artificial Sequence: Synthetic oligonucleotide
auuuugccguguagaacac

SEQ ID NO: 726023 - RNA, 19 nt, Artificial Sequence
  Description of Artificial Sequence: Synthetic oligonucleotide
ccacgaauuaaaccaaaac

SEQ ID NO: 726024 - RNA, 19 nt, Artificial Sequence
  Description of Artificial Sequence: Synthetic oligonucleotide
cacgaacuugagagugugg

SEQ ID NO: 726025 - RNA, 19 nt, Artificial Sequence
  Description of Artificial Sequence: Synthetic oligonucleotide
guugggaguggauucucuc

SEQ ID NO: 726026 - RNA, 19 nt, Artificial Sequence
  Description of Artificial Sequence: Synthetic oligonucleotide
guugccuuaccgagggugc

SEQ ID NO: 726027 - RNA, 19 nt, Artificial Sequence
  Description of Artificial Sequence: Synthetic oligonucleotide
cucugauucucaagaccug

SEQ ID NO: 726028 - RNA, 19 nt, Artificial Sequence
  Description of Artificial Sequence: Synthetic oligonucleotide
ugggcguuuaugucccaga

SEQ ID NO: 726029 - RNA, 19 nt, Artificial Sequence
  Description of Artificial Sequence: Synthetic oligonucleotide
uggaaacgugucacuauuu

SEQ ID NO: 726030 - RNA, 19 nt, Artificial Sequence
  Description of Artificial Sequence: Synthetic oligonucleotide
guagaacacuggguguggg

SEQ ID NO: 726031 - RNA, 19 nt, Artificial Sequence
  Description of Artificial Sequence: Synthetic oligonucleotide
guugcauuccagacagaug

SEQ ID NO: 726032 - RNA, 19 nt, Artificial Sequence
  Description of Artificial Sequence: Synthetic oligonucleotide
gcucugauggaucacgauc

SEQ ID NO: 726033 - RNA, 19 nt, Artificial Sequence
  Description of Artificial Sequence: Synthetic oligonucleotide
ccguguagaacacugggug

SEQ ID NO: 726034 - RNA, 19 nt, Artificial Sequence
  Description of Artificial Sequence: Synthetic oligonucleotide
agaucacaauuuaaacacu

SEQ ID NO: 726035 - RNA, 19 nt, Artificial Sequence
  Description of Artificial Sequence: Synthetic oligonucleotide
gugcuguauucagacgugg

SEQ ID NO: 726036 - RNA, 19 nt, Artificial Sequence
  Description of Artificial Sequence: Synthetic oligonucleotide
ggcuacauugugaagucug

SEQ ID NO: 726037 - RNA, 19 nt, Artificial Sequence
  Description of Artificial Sequence: Synthetic oligonucleotide
uuaccgagggugccggaau

SEQ ID NO: 726038 - RNA, 19 nt, Artificial Sequence
  Description of Artificial Sequence: Synthetic oligonucleotide
cuugagagugugguccuug

SEQ ID NO: 726039 - RNA, 19 nt, Artificial Sequence
  Description of Artificial Sequence: Synthetic oligonucleotide
cacgauccugcaagugggg

SEQ ID NO: 726040 - RNA, 19 nt, Artificial Sequence
  Description of Artificial Sequence: Synthetic oligonucleotide
cucuauucagaaaucuggu

SEQ ID NO: 726041 - RNA, 19 nt, Artificial Sequence
  Description of Artificial Sequence: Synthetic oligonucleotide
ggaccugaagcagagacga

SEQ ID NO: 726042 - RNA, 19 nt, Artificial Sequence
  Description of Artificial Sequence: Synthetic oligonucleotide
auaacuuaggaaggacuua

SEQ ID NO: 726043 - RNA, 19 nt, Artificial Sequence
  Description of Artificial Sequence: Synthetic oligonucleotide
uaaacgcgugcugguagug

SEQ ID NO: 726044 - RNA, 19 nt, Artificial Sequence
  Description of Artificial Sequence: Synthetic oligonucleotide
aagcagagacgagcaaacu

SEQ ID NO: 726045 - RNA, 19 nt, Artificial Sequence
  Description of Artificial Sequence: Synthetic oligonucleotide
ggaagcuagaggcugccuc

SEQ ID NO: 726046 - RNA, 19 nt, Artificial Sequence
  Description of Artificial Sequence: Synthetic oligonucleotide
acgugucacuauuucacuu

SEQ ID NO: 726047 - RNA, 19 nt, Artificial Sequence
  Description of Artificial Sequence: Synthetic oligonucleotide
gacgugguguggaaacgug

SEQ ID NO: 726048 - RNA, 19 nt, Artificial Sequence
  Description of Artificial Sequence: Synthetic oligonucleotide
uguagcaggaggggugccu

SEQ ID NO: 726049 - RNA, 19 nt, Artificial Sequence
  Description of Artificial Sequence: Synthetic oligonucleotide
ggcacauuuugccguguag

SEQ ID NO: 726050 - RNA, 19 nt, Artificial Sequence
  Description of Artificial Sequence: Synthetic oligonucleotide
cugauucucaagaccugga

SEQ ID NO: 726051 - RNA, 19 nt, Artificial Sequence
  Description of Artificial Sequence: Synthetic oligonucleotide
auaugauagaaggcuuaaa

SEQ ID NO: 726052 - RNA, 19 nt, Artificial Sequence
  Description of Artificial Sequence: Synthetic oligonucleotide
cagacgugguguggaaacg

SEQ ID NO: 726053 - RNA, 19 nt, Artificial Sequence
  Description of Artificial Sequence: Synthetic oligonucleotide
ugcaugguucugucaugac

SEQ ID NO: 726054 - RNA, 19 nt, Artificial Sequence
  Description of Artificial Sequence: Synthetic oligonucleotide
caccaaguggaugcgauga

SEQ ID NO: 726055 - RNA, 19 nt, Artificial Sequence
  Description of Artificial Sequence: Synthetic oligonucleotide
gggcguuuaugucccagag

SEQ ID NO: 726056 - RNA, 19 nt, Artificial Sequence
  Description of Artificial Sequence: Synthetic oligonucleotide
accugcucgucacuccugu

SEQ ID NO: 726057 - RNA, 19 nt, Artificial Sequence
  Description of Artificial Sequence: Synthetic oligonucleotide
gcggcaagugaugugggcg

SEQ ID NO: 726058 - RNA, 19 nt, Artificial Sequence
  Description of Artificial Sequence: Synthetic oligonucleotide
cacacgacauuggggagug

SEQ ID NO: 726059 - RNA, 19 nt, Artificial Sequence
  Description of Artificial Sequence: Synthetic oligonucleotide
uucugaggcuuaucaugaa

SEQ ID NO: 726060 - RNA, 19 nt, Artificial Sequence
  Description of Artificial Sequence: Synthetic oligonucleotide
aacugucgucugcuuuggu

SEQ ID NO: 726061 - RNA, 19 nt, Artificial Sequence
  Description of Artificial Sequence: Synthetic oligonucleotide
auggaucacgauccugcaa

SEQ ID NO: 726062 - RNA, 19 nt, Artificial Sequence
  Description of Artificial Sequence: Synthetic oligonucleotide
agacgugguguggaaacgu

SEQ ID NO: 726063 - RNA, 19 nt, Artificial Sequence
  Description of Artificial Sequence: Synthetic oligonucleotide
acuguaguggguggcucug

SEQ ID NO: 726064 - RNA, 19 nt, Artificial Sequence
  Description of Artificial Sequence: Synthetic oligonucleotide
uucggggaucuaagugcug

SEQ ID NO: 726065 - RNA, 19 nt, Artificial Sequence
  Description of Artificial Sequence: Synthetic oligonucleotide
auucagacgugguguggaa

SEQ ID NO: 726066 - RNA, 19 nt, Artificial Sequence
  Description of Artificial Sequence: Synthetic oligonucleotide
ugguagugucuuguuggga

SEQ ID NO: 726067 - RNA, 19 nt, Artificial Sequence
  Description of Artificial Sequence: Synthetic oligonucleotide
uaaaugcauguuggagccu

SEQ ID NO: 726068 - RNA, 19 nt, Artificial Sequence
  Description of Artificial Sequence: Synthetic oligonucleotide
cuguauucagacguggugu

SEQ ID NO: 726069 - RNA, 19 nt, Artificial Sequence
  Description of Artificial Sequence: Synthetic oligonucleotide
uucagacgugguguggaaa

SEQ ID NO: 726070 - RNA, 19 nt, Artificial Sequence
  Description of Artificial Sequence: Synthetic oligonucleotide
gcguuuaugucccagaguu

SEQ ID NO: 726071 - RNA, 19 nt, Artificial Sequence
  Description of Artificial Sequence: Synthetic oligonucleotide
cauugugaagucugcgucu

SEQ ID NO: 726072 - RNA, 19 nt, Artificial Sequence
  Description of Artificial Sequence: Synthetic oligonucleotide
agcaucggauccacuuccg

SEQ ID NO: 726073 - RNA, 19 nt, Artificial Sequence
  Description of Artificial Sequence: Synthetic oligonucleotide
ugcccaguuuguugauaga

SEQ ID NO: 726074 - RNA, 19 nt, Artificial Sequence
  Description of Artificial Sequence: Synthetic oligonucleotide
gucacuguaguugcgucaa

SEQ ID NO: 726075 - RNA, 19 nt, Artificial Sequence
  Description of Artificial Sequence: Synthetic oligonucleotide
acacucagucacuguaguu

SEQ ID NO: 726076 - RNA, 19 nt, Artificial Sequence
  Description of Artificial Sequence: Synthetic oligonucleotide
accaaguggaugcgaugau

SEQ ID NO: 726077 - RNA, 19 nt, Artificial Sequence
  Description of Artificial Sequence: Synthetic oligonucleotide
acgacauuggggagugaug

SEQ ID NO: 726078 - RNA, 19 nt, Artificial Sequence
  Description of Artificial Sequence: Synthetic oligonucleotide
cggaauugcagccacacga

SEQ ID NO: 726079 - RNA, 19 nt, Artificial Sequence
  Description of Artificial Sequence: Synthetic oligonucleotide
gacgagcaaacugcgaagu

SEQ ID NO: 726080 - RNA, 19 nt, Artificial Sequence
  Description of Artificial Sequence: Synthetic oligonucleotide
ccuauauucccuuucaauu

SEQ ID NO: 726081 - RNA, 19 nt, Artificial Sequence
  Description of Artificial Sequence: Synthetic oligonucleotide
aaugcauguuggagccuau

SEQ ID NO: 726082 - RNA, 19 nt, Artificial Sequence
  Description of Artificial Sequence: Synthetic oligonucleotide
ggggcuacauugugaaguc

SEQ ID NO: 726083 - RNA, 19 nt, Artificial Sequence
  Description of Artificial Sequence: Synthetic oligonucleotide
caucggauccacuuccgcu

SEQ ID NO: 726084 - RNA, 19 nt, Artificial Sequence
  Description of Artificial Sequence: Synthetic oligonucleotide
augcgaugaucccuccuua

SEQ ID NO: 726085 - RNA, 19 nt, Artificial Sequence
  Description of Artificial Sequence: Synthetic oligonucleotide
guaaacgcgugcugguagu

SEQ ID NO: 726086 - RNA, 19 nt, Artificial Sequence
  Description of Artificial Sequence: Synthetic oligonucleotide
guuuggcugagcacgccuc

SEQ ID NO: 726087 - RNA, 19 nt, Artificial Sequence
  Description of Artificial Sequence: Synthetic oligonucleotide
ggcaacauuccacggcaca

SEQ ID NO: 726088 - RNA, 19 nt, Artificial Sequence
  Description of Artificial Sequence: Synthetic oligonucleotide
augcuagaucacaauuuaa

SEQ ID NO: 726089 - RNA, 19 nt, Artificial Sequence
  Description of Artificial Sequence: Synthetic oligonucleotide
ggacuuaaugaaaguacaa

SEQ ID NO: 726090 - RNA, 19 nt, Artificial Sequence
  Description of Artificial Sequence: Synthetic oligonucleotide
ugccggaauugcagccaca

SEQ ID NO: 726091 - RNA, 19 nt, Artificial Sequence
  Description of Artificial Sequence: Synthetic oligonucleotide
accuuguaacaaccacgaa

SEQ ID NO: 726092 - RNA, 19 nt, Artificial Sequence
  Description of Artificial Sequence: Synthetic oligonucleotide
uaccgagggugccggaauu

SEQ ID NO: 726093 - RNA, 19 nt, Artificial Sequence
  Description of Artificial Sequence: Synthetic oligonucleotide
acgugguguggaaacgugu

SEQ ID NO: 726094 - RNA, 19 nt, Artificial Sequence
  Description of Artificial Sequence: Synthetic oligonucleotide
aggcaacauuccacggcac

SEQ ID NO: 726095 - RNA, 19 nt, Artificial Sequence
  Description of Artificial Sequence: Synthetic oligonucleotide
ggaaggacuuaaugaaagu

SEQ ID NO: 726096 - RNA, 19 nt, Artificial Sequence
  Description of Artificial Sequence: Synthetic oligonucleotide
gugggcguuuaugucccag

SEQ ID NO: 726097 - RNA, 19 nt, Artificial Sequence
  Description of Artificial Sequence: Synthetic oligonucleotide
guggaaacgugucacuauu

SEQ ID NO: 726098 - RNA, 19 nt, Artificial Sequence
  Description of Artificial Sequence: Synthetic oligonucleotide
cugagcaucggauccacuu

SEQ ID NO: 726099 - RNA, 19 nt, Artificial Sequence
  Description of Artificial Sequence: Synthetic oligonucleotide
gaccugaagcagagacgag

SEQ ID NO: 726100 - RNA, 19 nt, Artificial Sequence
  Description of Artificial Sequence: Synthetic oligonucleotide
cuuacagcaaguccaucuu

SEQ ID NO: 726101 - RNA, 19 nt, Artificial Sequence
  Description of Artificial Sequence: Synthetic oligonucleotide
gggugccggaauugcagcc

SEQ ID NO: 726102 - RNA, 19 nt, Artificial Sequence
  Description of Artificial Sequence: Synthetic oligonucleotide
auccacgaauuaaaccaaa

SEQ ID NO: 726103 - RNA, 19 nt, Artificial Sequence
  Description of Artificial Sequence: Synthetic oligonucleotide
cuuaagucuucaggaagcu

SEQ ID NO: 726104 - RNA, 19 nt, Artificial Sequence
  Description of Artificial Sequence: Synthetic oligonucleotide
caccucuaguugccuuacc

SEQ ID NO: 726105 - RNA, 19 nt, Artificial Sequence
  Description of Artificial Sequence: Synthetic oligonucleotide
caccauuucggggaucuaa

SEQ ID NO: 726106 - RNA, 19 nt, Artificial Sequence
  Description of Artificial Sequence: Synthetic oligonucleotide
cuguuuggcugagcacgcc

SEQ ID NO: 726107 - RNA, 19 nt, Artificial Sequence
  Description of Artificial Sequence: Synthetic oligonucleotide
gcauuuccaaggauaauua

SEQ ID NO: 726108 - RNA, 19 nt, Artificial Sequence
  Description of Artificial Sequence: Synthetic oligonucleotide
gcaucggauccacuuccgc

SEQ ID NO: 726109 - RNA, 19 nt, Artificial Sequence
  Description of Artificial Sequence: Synthetic oligonucleotide
uggaagcuagaggcugccu

SEQ ID NO: 726110 - RNA, 19 nt, Artificial Sequence
  Description of Artificial Sequence: Synthetic oligonucleotide
guguggaaacgugucacua

SEQ ID NO: 726111 - RNA, 19 nt, Artificial Sequence
  Description of Artificial Sequence: Synthetic oligonucleotide
uaguugccuuaccgagggu

SEQ ID NO: 726112 - RNA, 19 nt, Artificial Sequence
  Description of Artificial Sequence: Synthetic oligonucleotide
gcgaugaauuucuucagau

SEQ ID NO: 726113 - RNA, 19 nt, Artificial Sequence
  Description of Artificial Sequence: Synthetic oligonucleotide
ccucuaguugccuuaccga

SEQ ID NO: 726114 - RNA, 19 nt, Artificial Sequence
  Description of Artificial Sequence: Synthetic oligonucleotide
caccuauauucccuuucaa

SEQ ID NO: 726115 - RNA, 19 nt, Artificial Sequence
  Description of Artificial Sequence: Synthetic oligonucleotide
ugugggcguuuauguccca

SEQ ID NO: 726116 - RNA, 19 nt, Artificial Sequence
  Description of Artificial Sequence: Synthetic oligonucleotide
gccggaauugcagccacac

SEQ ID NO: 726117 - RNA, 19 nt, Artificial Sequence
  Description of Artificial Sequence: Synthetic oligonucleotide
ccaccuauauucccuuuca

SEQ ID NO: 726118 - RNA, 19 nt, Artificial Sequence
  Description of Artificial Sequence: Synthetic oligonucleotide
ccagauacuucaccaggca

SEQ ID NO: 726119 - RNA, 19 nt, Artificial Sequence
  Description of Artificial Sequence: Synthetic oligonucleotide
cuuaccgagggugccggaa

SEQ ID NO: 726120 - RNA, 19 nt, Artificial Sequence
  Description of Artificial Sequence: Synthetic oligonucleotide
gccuauugcacaaaagcau

SEQ ID NO: 726121 - RNA, 19 nt, Artificial Sequence
  Description of Artificial Sequence: Synthetic oligonucleotide
ccaaguggaugcgaugauc

SEQ ID NO: 726122 - RNA, 19 nt, Artificial Sequence
  Description of Artificial Sequence: Synthetic oligonucleotide
agucugcgucucgggcggc

SEQ ID NO: 726123 - RNA, 19 nt, Artificial Sequence
  Description of Artificial Sequence: Synthetic oligonucleotide
gccuuaccgagggugccgg

SEQ ID NO: 726124 - RNA, 19 nt, Artificial Sequence
  Description of Artificial Sequence: Synthetic oligonucleotide
guuucaccauuucggggau

SEQ ID NO: 726125 - RNA, 19 nt, Artificial Sequence
  Description of Artificial Sequence: Synthetic oligonucleotide
guggggcagguauuauucu

SEQ ID NO: 726126 - RNA, 19 nt, Artificial Sequence
  Description of Artificial Sequence: Synthetic oligonucleotide
gguguggaaacgugucacu

SEQ ID NO: 726127 - RNA, 19 nt, Artificial Sequence
  Description of Artificial Sequence: Synthetic oligonucleotide
gcuagaggcugccucccaa

SEQ ID NO: 726128 - RNA, 19 nt, Artificial Sequence
  Description of Artificial Sequence: Synthetic oligonucleotide
cacgacauuggggagugau

SEQ ID NO: 726129 - RNA, 19 nt, Artificial Sequence
  Description of Artificial Sequence: Synthetic oligonucleotide
cuguaaacgcgugcuggua

SEQ ID NO: 726130 - RNA, 19 nt, Artificial Sequence
  Description of Artificial Sequence: Synthetic oligonucleotide
augucaccugguaccucca

SEQ ID NO: 726131 - RNA, 19 nt, Artificial Sequence
  Description of Artificial Sequence: Synthetic oligonucleotide
ggcguuuaugucccagagu

SEQ ID NO: 726132 - RNA, 19 nt, Artificial Sequence
  Description of Artificial Sequence: Synthetic oligonucleotide
uaguugcgucaaugaggua

SEQ ID NO: 726133 - RNA, 19 nt, Artificial Sequence
  Description of Artificial Sequence: Synthetic oligonucleotide
cgugucacuauuucacuua

SEQ ID NO: 726134 - RNA, 19 nt, Artificial Sequence
  Description of Artificial Sequence: Synthetic oligonucleotide
gcgaugaucccuccuuacu

SEQ ID NO: 726135 - RNA, 19 nt, Artificial Sequence
  Description of Artificial Sequence: Synthetic oligonucleotide
ggaucacgauccugcaagu

SEQ ID NO: 726136 - RNA, 19 nt, Artificial Sequence
  Description of Artificial Sequence: Synthetic oligonucleotide
ccgagggugccggaauugc

SEQ ID NO: 726137 - RNA, 19 nt, Artificial Sequence
  Description of Artificial Sequence: Synthetic oligonucleotide
gcaaacugcgaaguguuuu

SEQ ID NO: 726138 - RNA, 19 nt, Artificial Sequence
  Description of Artificial Sequence: Synthetic oligonucleotide
ggaaucggggcuacauugu

SEQ ID NO: 726139 - RNA, 19 nt, Artificial Sequence
  Description of Artificial Sequence: Synthetic oligonucleotide
cgauccugcaaguggggca

SEQ ID NO: 726140 - RNA, 19 nt, Artificial Sequence
  Description of Artificial Sequence: Synthetic oligonucleotide
caugcccaguuuguugaua

SEQ ID NO: 726141 - RNA, 19 nt, Artificial Sequence
  Description of Artificial Sequence: Synthetic oligonucleotide
gcuuaucaugaaaacuaau

SEQ ID NO: 726142 - RNA, 19 nt, Artificial Sequence
  Description of Artificial Sequence: Synthetic oligonucleotide
cuguaguggguggcucuga

SEQ ID NO: 726143 - RNA, 19 nt, Artificial Sequence
  Description of Artificial Sequence: Synthetic oligonucleotide
aggagagauugagcuucuu

SEQ ID NO: 726144 - RNA, 19 nt, Artificial Sequence
  Description of Artificial Sequence: Synthetic oligonucleotide
ccaccucuaguugccuuac

SEQ ID NO: 726145 - RNA, 19 nt, Artificial Sequence
  Description of Artificial Sequence: Synthetic oligonucleotide
ccugcucgucacuccugug

SEQ ID NO: 726146 - RNA, 19 nt, Artificial Sequence
  Description of Artificial Sequence: Synthetic oligonucleotide
gcgugcugguagugucuug

SEQ ID NO: 726147 - RNA, 19 nt, Artificial Sequence
  Description of Artificial Sequence: Synthetic oligonucleotide
gccguguagaacacugggu

SEQ ID NO: 726148 - RNA, 19 nt, Artificial Sequence
  Description of Artificial Sequence: Synthetic oligonucleotide
ccauuucggggaucuaagu

SEQ ID NO: 726149 - RNA, 19 nt, Artificial Sequence
  Description of Artificial Sequence: Synthetic oligonucleotide
ggcuuacagcaaguccauc

SEQ ID NO: 726150 - RNA, 19 nt, Artificial Sequence
  Description of Artificial Sequence: Synthetic oligonucleotide
cguguagaacacugggugu

SEQ ID NO: 726151 - RNA, 19 nt, Artificial Sequence
  Description of Artificial Sequence: Synthetic oligonucleotide
ggggugccuucuugaaucu

SEQ ID NO: 726152 - RNA, 19 nt, Artificial Sequence
  Description of Artificial Sequence: Synthetic oligonucleotide
acacgacauuggggaguga

SEQ ID NO: 726153 - RNA, 19 nt, Artificial Sequence
  Description of Artificial Sequence: Synthetic oligonucleotide
gggugccuucuugaaucuc

SEQ ID NO: 726154 - RNA, 19 nt, Artificial Sequence
  Description of Artificial Sequence: Synthetic oligonucleotide
gcgcugcacuggccaaacc

SEQ ID NO: 726155 - RNA, 19 nt, Artificial Sequence
  Description of Artificial Sequence: Synthetic oligonucleotide
ggggaucuaagugcuguuu

SEQ ID NO: 726156 - RNA, 19 nt, Artificial Sequence
  Description of Artificial Sequence: Synthetic oligonucleotide
gccaccaaguggaugcgau

SEQ ID NO: 726157 - RNA, 19 nt, Artificial Sequence
  Description of Artificial Sequence: Synthetic oligonucleotide
gcucgucacuccuguggua

SEQ ID NO: 726158 - RNA, 19 nt, Artificial Sequence
  Description of Artificial Sequence: Synthetic oligonucleotide
caaguggggcagguauuau

SEQ ID NO: 726159 - RNA, 19 nt, Artificial Sequence
  Description of Artificial Sequence: Synthetic oligonucleotide
gggcuuacagcaaguccau

SEQ ID NO: 726160 - RNA, 19 nt, Artificial Sequence
  Description of Artificial Sequence: Synthetic oligonucleotide
ccacacgacauuggggagu

SEQ ID NO: 726161 - RNA, 19 nt, Artificial Sequence
  Description of Artificial Sequence: Synthetic oligonucleotide
ccaccacaucuugcuagca

SEQ ID NO: 726162 - RNA, 19 nt, Artificial Sequence
  Description of Artificial Sequence: Synthetic oligonucleotide
ccccguaguuugcugcugu

SEQ ID NO: 726163 - RNA, 19 nt, Artificial Sequence
  Description of Artificial Sequence: Synthetic oligonucleotide
ccuuaccgagggugccgga

SEQ ID NO: 726164 - RNA, 19 nt, Artificial Sequence
  Description of Artificial Sequence: Synthetic oligonucleotide
gccuggaaucggggcuaca

SEQ ID NO: 726165 - RNA, 19 nt, Artificial Sequence
  Description of Artificial Sequence: Synthetic oligonucleotide
ccucacccgguggcaugga

SEQ ID NO: 726166 - RNA, 19 nt, Artificial Sequence
  Description of Artificial Sequence: Synthetic oligonucleotide
cggggaucuaagugcuguu

SEQ ID NO: 726167 - RNA, 19 nt, Artificial Sequence
  Description of Artificial Sequence: Synthetic oligonucleotide
aauauauaaccccaagaac

SEQ ID NO: 726168 - RNA, 19 nt, Artificial Sequence
  Description of Artificial Sequence: Synthetic oligonucleotide
uuuuccgugaugcugaugg

SEQ ID NO: 726169 - RNA, 19 nt, Artificial Sequence
  Description of Artificial Sequence: Synthetic oligonucleotide
auagauugagcucaaaccg

SEQ ID NO: 726170 - RNA, 19 nt, Artificial Sequence
  Description of Artificial Sequence: Synthetic oligonucleotide
uaaucaauaaguuuaccug

SEQ ID NO: 726171 - RNA, 19 nt, Artificial Sequence
  Description of Artificial Sequence: Synthetic oligonucleotide
ucugauuuagcuaggaaug

SEQ ID NO: 726172 - RNA, 19 nt, Artificial Sequence
  Description of Artificial Sequence: Synthetic oligonucleotide
aacaaacguugacagaagc

SEQ ID NO: 726173 - RNA, 19 nt, Artificial Sequence
  Description of Artificial Sequence: Synthetic oligonucleotide
uuuauuuaggcguucuucc

SEQ ID NO: 726174 - RNA, 19 nt, Artificial Sequence
  Description of Artificial Sequence: Synthetic oligonucleotide
agaaauacaucaugucagc

SEQ ID NO: 726175 - RNA, 19 nt, Artificial Sequence
  Description of Artificial Sequence: Synthetic oligonucleotide
aguucuacaguacaagaag

SEQ ID NO: 726176 - RNA, 19 nt, Artificial Sequence
  Description of Artificial Sequence: Synthetic oligonucleotide
agcgaucaaagucaggggc

SEQ ID NO: 726177 - RNA, 19 nt, Artificial Sequence
  Description of Artificial Sequence: Synthetic oligonucleotide
auauauaaccccaagaaca

SEQ ID NO: 726178 - RNA, 19 nt, Artificial Sequence
  Description of Artificial Sequence: Synthetic oligonucleotide
uugaauacuggaauggacu

SEQ ID NO: 726179 - RNA, 19 nt, Artificial Sequence
  Description of Artificial Sequence: Synthetic oligonucleotide
uuaagcucuuguuauagug

SEQ ID NO: 726180 - RNA, 19 nt, Artificial Sequence
  Description of Artificial Sequence: Synthetic oligonucleotide
gaacucgugacaccaaucg

SEQ ID NO: 726181 - RNA, 19 nt, Artificial Sequence
  Description of Artificial Sequence: Synthetic oligonucleotide
guaagaaucauagauugag

SEQ ID NO: 726182 - RNA, 19 nt, Artificial Sequence
  Description of Artificial Sequence: Synthetic oligonucleotide
auuuaggcguucuuccucc

SEQ ID NO: 726183 - RNA, 19 nt, Artificial Sequence
  Description of Artificial Sequence: Synthetic oligonucleotide
uuuacauggaauguggaga

SEQ ID NO: 726184 - RNA, 19 nt, Artificial Sequence
  Description of Artificial Sequence: Synthetic oligonucleotide
ugguuuacauggaaugugg

SEQ ID NO: 726185 - RNA, 19 nt, Artificial Sequence
  Description of Artificial Sequence: Synthetic oligonucleotide
gaugcaggaaagcauguag

SEQ ID NO: 726186 - RNA, 19 nt, Artificial Sequence
  Description of Artificial Sequence: Synthetic oligonucleotide
uuuugcacaaggaugcgca

SEQ ID NO: 726187 - RNA, 19 nt, Artificial Sequence
  Description of Artificial Sequence: Synthetic oligonucleotide
uugagaguuuccacuagcg

SEQ ID NO: 726188 - RNA, 19 nt, Artificial Sequence
  Description of Artificial Sequence: Synthetic oligonucleotide
agaucuagacacugguacc

SEQ ID NO: 726189 - RNA, 19 nt, Artificial Sequence
  Description of Artificial Sequence: Synthetic oligonucleotide
ugcuuauugagacaacaca

SEQ ID NO: 726190 - RNA, 19 nt, Artificial Sequence
  Description of Artificial Sequence: Synthetic oligonucleotide
uguuauaguguuaugucau

SEQ ID NO: 726191 - RNA, 19 nt, Artificial Sequence
  Description of Artificial Sequence: Synthetic oligonucleotide
agauaguucugauuuagcu

SEQ ID NO: 726192 - RNA, 19 nt, Artificial Sequence
  Description of Artificial Sequence: Synthetic oligonucleotide
uuguuauaguguuauguca

SEQ ID NO: 726193 - RNA, 19 nt, Artificial Sequence
  Description of Artificial Sequence: Synthetic oligonucleotide
gcuuguaaggguuucaggg

SEQ ID NO: 726194 - RNA, 19 nt, Artificial Sequence
  Description of Artificial Sequence: Synthetic oligonucleotide
uugcagauaguucugauuu

SEQ ID NO: 726195 - RNA, 19 nt, Artificial Sequence
  Description of Artificial Sequence: Synthetic oligonucleotide
cuuguuauaguguuauguc

SEQ ID NO: 726196 - RNA, 19 nt, Artificial Sequence
  Description of Artificial Sequence: Synthetic oligonucleotide
acaaaggggaugcuaacag

SEQ ID NO: 726197 - RNA, 19 nt, Artificial Sequence
  Description of Artificial Sequence: Synthetic oligonucleotide
caagguuauacaugaacag

SEQ ID NO: 726198 - RNA, 19 nt, Artificial Sequence
  Description of Artificial Sequence: Synthetic oligonucleotide
aagaacaacauuacaagau

SEQ ID NO: 726199 - RNA, 19 nt, Artificial Sequence
  Description of Artificial Sequence: Synthetic oligonucleotide
ucaauugugcuccaugaau

SEQ ID NO: 726200 - RNA, 19 nt, Artificial Sequence
  Description of Artificial Sequence: Synthetic oligonucleotide
aaucgcagcauugagaguu

SEQ ID NO: 726201 - RNA, 19 nt, Artificial Sequence
  Description of Artificial Sequence: Synthetic oligonucleotide
auuucaauugugcuccaug

SEQ ID NO: 726202 - RNA, 19 nt, Artificial Sequence
  Description of Artificial Sequence: Synthetic oligonucleotide
cagaucuagacacugguac

SEQ ID NO: 726203 - RNA, 19 nt, Artificial Sequence
  Description of Artificial Sequence: Synthetic oligonucleotide
auagacauugucuccuuug

SEQ ID NO: 726204 - RNA, 19 nt, Artificial Sequence
  Description of Artificial Sequence: Synthetic oligonucleotide
uucguugaauacuggaaug

SEQ ID NO: 726205 - RNA, 19 nt, Artificial Sequence
  Description of Artificial Sequence: Synthetic oligonucleotide
guuauacaugaacagguac

SEQ ID NO: 726206 - RNA, 19 nt, Artificial Sequence
  Description of Artificial Sequence: Synthetic oligonucleotide
ucguugaauacuggaaugg

SEQ ID NO: 726207 - RNA, 19 nt, Artificial Sequence
  Description of Artificial Sequence: Synthetic oligonucleotide
uccacuagcgccagcaucu

SEQ ID NO: 726208 - RNA, 19 nt, Artificial Sequence
  Description of Artificial Sequence: Synthetic oligonucleotide
auaaaggugacgaaaauua

SEQ ID NO: 726209 - RNA, 19 nt, Artificial Sequence
  Description of Artificial Sequence: Synthetic oligonucleotide
ugccaaucuacuuugugcu

SEQ ID NO: 726210 - RNA, 19 nt, Artificial Sequence
  Description of Artificial Sequence: Synthetic oligonucleotide
ucuagucugaguuuauuua

SEQ ID NO: 726211 - RNA, 19 nt, Artificial Sequence
  Description of Artificial Sequence: Synthetic oligonucleotide
ugauucguugaauacugga

SEQ ID NO: 726212 - RNA, 19 nt, Artificial Sequence
  Description of Artificial Sequence: Synthetic oligonucleotide
aaguuuaccugauuuucaa

SEQ ID NO: 726213 - RNA, 19 nt, Artificial Sequence
  Description of Artificial Sequence: Synthetic oligonucleotide
caaaccggcacgaagcuac

SEQ ID NO: 726214 - RNA, 19 nt, Artificial Sequence
  Description of Artificial Sequence: Synthetic oligonucleotide
aacggagccacgugagcac

SEQ ID NO: 726215 - RNA, 19 nt, Artificial Sequence
  Description of Artificial Sequence: Synthetic oligonucleotide
aaaauacucuucgaugaga

SEQ ID NO: 726216 - RNA, 19 nt, Artificial Sequence
  Description of Artificial Sequence: Synthetic oligonucleotide
gucugaguuuauuuaggcg

SEQ ID NO: 726217 - RNA, 19 nt, Artificial Sequence
  Description of Artificial Sequence: Synthetic oligonucleotide
ucuucaagcuuguaagggu

SEQ ID NO: 726218 - RNA, 19 nt, Artificial Sequence
  Description of Artificial Sequence: Synthetic oligonucleotide
cacaagguuauacaugaac

SEQ ID NO: 726219 - RNA, 19 nt, Artificial Sequence
  Description of Artificial Sequence: Synthetic oligonucleotide
uugauaagugcugucauaa

SEQ ID NO: 726220 - RNA, 19 nt, Artificial Sequence
  Description of Artificial Sequence: Synthetic oligonucleotide
caaacguugacagaagcug

SEQ ID NO: 726221 - RNA, 19 nt, Artificial Sequence
  Description of Artificial Sequence: Synthetic oligonucleotide
gaaguauucaugggguucc

SEQ ID NO: 726222 - RNA, 19 nt, Artificial Sequence
  Description of Artificial Sequence: Synthetic oligonucleotide
aaaacagugggcgcuucuc

SEQ ID NO: 726223 - RNA, 19 nt, Artificial Sequence
  Description of Artificial Sequence: Synthetic oligonucleotide
ggaaaauacucuucgauga

SEQ ID NO: 726224 - RNA, 19 nt, Artificial Sequence
  Description of Artificial Sequence: Synthetic oligonucleotide
auucguugaauacuggaau

SEQ ID NO: 726225 - RNA, 19 nt, Artificial Sequence
  Description of Artificial Sequence: Synthetic oligonucleotide
ucuaagaacuccaggugaa

SEQ ID NO: 726226 - RNA, 19 nt, Artificial Sequence
  Description of Artificial Sequence: Synthetic oligonucleotide
agauugagcucaaaccggc

SEQ ID NO: 726227 - RNA, 19 nt, Artificial Sequence
  Description of Artificial Sequence: Synthetic oligonucleotide
auuuugcacaaggaugcgc

SEQ ID NO: 726228 - RNA, 19 nt, Artificial Sequence
  Description of Artificial Sequence: Synthetic oligonucleotide
gauaguucugauuuagcua

SEQ ID NO: 726229 - RNA, 19 nt, Artificial Sequence
  Description of Artificial Sequence: Synthetic oligonucleotide
ugugcuccaugaauaaaac

SEQ ID NO: 726230 - RNA, 19 nt, Artificial Sequence
  Description of Artificial Sequence: Synthetic oligonucleotide
aaggugacgaaaauuaaua

SEQ ID NO: 726231 - RNA, 19 nt, Artificial Sequence
  Description of Artificial Sequence: Synthetic oligonucleotide
uuuagcuaggaaugaagua

SEQ ID NO: 726232 - RNA, 19 nt, Artificial Sequence
  Description of Artificial Sequence: Synthetic oligonucleotide
uugguuuacauggaaugug

SEQ ID NO: 726233 - RNA, 19 nt, Artificial Sequence
  Description of Artificial Sequence: Synthetic oligonucleotide
uauaaaggugacgaaaauu

SEQ ID NO: 726234 - RNA, 19 nt, Artificial Sequence
  Description of Artificial Sequence: Synthetic oligonucleotide
uauuuaggcguucuuccuc

SEQ ID NO: 726235 - RNA, 19 nt, Artificial Sequence
  Description of Artificial Sequence: Synthetic oligonucleotide
uggaacuuaaaaugucagu

SEQ ID NO: 726236 - RNA, 19 nt, Artificial Sequence
  Description of Artificial Sequence: Synthetic oligonucleotide
aggggaugcuaacagcaac

SEQ ID NO: 726237 - RNA, 19 nt, Artificial Sequence
  Description of Artificial Sequence: Synthetic oligonucleotide
uguugauaagugcugucau

SEQ ID NO: 726238 - RNA, 19 nt, Artificial Sequence
  Description of Artificial Sequence: Synthetic oligonucleotide
ugcucauguugauaagugc

SEQ ID NO: 726239 - RNA, 19 nt, Artificial Sequence
  Description of Artificial Sequence: Synthetic oligonucleotide
uuauuuaggcguucuuccu

SEQ ID NO: 726240 - RNA, 19 nt, Artificial Sequence
  Description of Artificial Sequence: Synthetic oligonucleotide
ggauuuugcacaaggaugc

SEQ ID NO: 726241 - RNA, 19 nt, Artificial Sequence
  Description of Artificial Sequence: Synthetic oligonucleotide
acaagucuccuuccucccc

SEQ ID NO: 726242 - RNA, 19 nt, Artificial Sequence
  Description of Artificial Sequence: Synthetic oligonucleotide
auaccaacaaacguugaca

SEQ ID NO: 726243 - RNA, 19 nt, Artificial Sequence
  Description of Artificial Sequence: Synthetic oligonucleotide
aaaggugacgaaaauuaau

SEQ ID NO: 726244 - RNA, 19 nt, Artificial Sequence
  Description of Artificial Sequence: Synthetic oligonucleotide
uggggugugucaaaccagc

SEQ ID NO: 726245 - RNA, 19 nt, Artificial Sequence
  Description of Artificial Sequence: Synthetic oligonucleotide
uacaugaacagguacccuu

SEQ ID NO: 726246 - RNA, 19 nt, Artificial Sequence
  Description of Artificial Sequence: Synthetic oligonucleotide
gaagcugcagaccuggaaa

SEQ ID NO: 726247 - RNA, 19 nt, Artificial Sequence
  Description of Artificial Sequence: Synthetic oligonucleotide
ccaaucgcagcauugagag

SEQ ID NO: 726248 - RNA, 19 nt, Artificial Sequence
  Description of Artificial Sequence: Synthetic oligonucleotide
gacacugguaccccuuaag

SEQ ID NO: 726249 - RNA, 19 nt, Artificial Sequence
  Description of Artificial Sequence: Synthetic oligonucleotide
ugucgcugagcccaguaga

SEQ ID NO: 726250 - RNA, 19 nt, Artificial Sequence
  Description of Artificial Sequence: Synthetic oligonucleotide
uuuugacuguaaauguuuu

SEQ ID NO: 726251 - RNA, 19 nt, Artificial Sequence
  Description of Artificial Sequence: Synthetic oligonucleotide
gccaaaagacaucaaauac

SEQ ID NO: 726252 - RNA, 19 nt, Artificial Sequence
  Description of Artificial Sequence: Synthetic oligonucleotide
uugaaaugcagcacauuuu

SEQ ID NO: 726253 - RNA, 19 nt, Artificial Sequence
  Description of Artificial Sequence: Synthetic oligonucleotide
aguuuaaugccaaucuacu

SEQ ID NO: 726254 - RNA, 19 nt, Artificial Sequence
  Description of Artificial Sequence: Synthetic oligonucleotide
uguggaacgugucguagaa

SEQ ID NO: 726255 - RNA, 19 nt, Artificial Sequence
  Description of Artificial Sequence: Synthetic oligonucleotide
uuucaggggagccuucacu

SEQ ID NO: 726256 - RNA, 19 nt, Artificial Sequence
  Description of Artificial Sequence: Synthetic oligonucleotide
uucacauuuggaacuuaaa

SEQ ID NO: 726257 - RNA, 19 nt, Artificial Sequence
  Description of Artificial Sequence: Synthetic oligonucleotide
uucuagucugaguuuauuu

SEQ ID NO: 726258 - RNA, 19 nt, Artificial Sequence
  Description of Artificial Sequence: Synthetic oligonucleotide
caguacaagaagguaaaac

SEQ ID NO: 726259 - RNA, 19 nt, Artificial Sequence
  Description of Artificial Sequence: Synthetic oligonucleotide
agcucaaaccggcacgaag

SEQ ID NO: 726260 - RNA, 19 nt, Artificial Sequence
  Description of Artificial Sequence: Synthetic oligonucleotide
ugacucaccuucuucugga

SEQ ID NO: 726261 - RNA, 19 nt, Artificial Sequence
  Description of Artificial Sequence: Synthetic oligonucleotide
cugcagaccuggaaaauac

SEQ ID NO: 726262 - RNA, 19 nt, Artificial Sequence
  Description of Artificial Sequence: Synthetic oligonucleotide
ugagaguaggcagcacugg

SEQ ID NO: 726263 - RNA, 19 nt, Artificial Sequence
  Description of Artificial Sequence: Synthetic oligonucleotide
aacaugggauuuugcacaa

SEQ ID NO: 726264 - RNA, 19 nt, Artificial Sequence
  Description of Artificial Sequence: Synthetic oligonucleotide
uuugcugcgccucgguacu

SEQ ID NO: 726265 - RNA, 19 nt, Artificial Sequence
  Description of Artificial Sequence: Synthetic oligonucleotide
gugacgaaaauuaauauau

SEQ ID NO: 726266 - RNA, 19 nt, Artificial Sequence
  Description of Artificial Sequence: Synthetic oligonucleotide
cacaguguaacggagccac

SEQ ID NO: 726267 - RNA, 19 nt, Artificial Sequence
  Description of Artificial Sequence: Synthetic oligonucleotide
ugucgaugcaggaaagcau

SEQ ID NO: 726268 - RNA, 19 nt, Artificial Sequence
  Description of Artificial Sequence: Synthetic oligonucleotide
uuugcaaguaaugcucccu

SEQ ID NO: 726269 - RNA, 19 nt, Artificial Sequence
  Description of Artificial Sequence: Synthetic oligonucleotide
uccugauucguugaauacu

SEQ ID NO: 726270 - RNA, 19 nt, Artificial Sequence
  Description of Artificial Sequence: Synthetic oligonucleotide
cucgugacaccaaucgcag

SEQ ID NO: 726271 - RNA, 19 nt, Artificial Sequence
  Description of Artificial Sequence: Synthetic oligonucleotide
cacaaggaugcgcacagug

SEQ ID NO: 726272 - RNA, 19 nt, Artificial Sequence
  Description of Artificial Sequence: Synthetic oligonucleotide
agguugacaaagauccagg

SEQ ID NO: 726273 - RNA, 19 nt, Artificial Sequence
  Description of Artificial Sequence: Synthetic oligonucleotide
aggugacgaaaauuaauau

SEQ ID NO: 726274 - RNA, 19 nt, Artificial Sequence
  Description of Artificial Sequence: Synthetic oligonucleotide
gauucguugaauacuggaa

SEQ ID NO: 726275 - RNA, 19 nt, Artificial Sequence
  Description of Artificial Sequence: Synthetic oligonucleotide
acaaggaugcgcacagugg

SEQ ID NO: 726276 - RNA, 19 nt, Artificial Sequence
  Description of Artificial Sequence: Synthetic oligonucleotide
uuaugucaucacuugguuu

SEQ ID NO: 726277 - RNA, 19 nt, Artificial Sequence
  Description of Artificial Sequence: Synthetic oligonucleotide
aguguaacggagccacgug

SEQ ID NO: 726278 - RNA, 19 nt, Artificial Sequence
  Description of Artificial Sequence: Synthetic oligonucleotide
aagcugcagaccuggaaaa

SEQ ID NO: 726279 - RNA, 19 nt, Artificial Sequence
  Description of Artificial Sequence: Synthetic oligonucleotide
gguacuucggccugugagc

SEQ ID NO: 726280 - RNA, 19 nt, Artificial Sequence
  Description of Artificial Sequence: Synthetic oligonucleotide
aaacugaaccuuccugauu

SEQ ID NO: 726281 - RNA, 19 nt, Artificial Sequence
  Description of Artificial Sequence: Synthetic oligonucleotide
gauguucaccugccucugg

SEQ ID NO: 726282 - RNA, 19 nt, Artificial Sequence
  Description of Artificial Sequence: Synthetic oligonucleotide
ucacuugguuuacauggaa

SEQ ID NO: 726283 - RNA, 19 nt, Artificial Sequence
  Description of Artificial Sequence: Synthetic oligonucleotide
aagcuaccaaauuucucuu

SEQ ID NO: 726284 - RNA, 19 nt, Artificial Sequence
  Description of Artificial Sequence: Synthetic oligonucleotide
caacaaacguugacagaag

SEQ ID NO: 726285 - RNA, 19 nt, Artificial Sequence
  Description of Artificial Sequence: Synthetic oligonucleotide
cugauucguugaauacugg

SEQ ID NO: 726286 - RNA, 19 nt, Artificial Sequence
  Description of Artificial Sequence: Synthetic oligonucleotide
ugaaccuuccugauucguu

SEQ ID NO: 726287 - RNA, 19 nt, Artificial Sequence
  Description of Artificial Sequence: Synthetic oligonucleotide
agauaaaccugaagaaaga

SEQ ID NO: 726288 - RNA, 19 nt, Artificial Sequence
  Description of Artificial Sequence: Synthetic oligonucleotide
aaaccuccacgcuccgcag

SEQ ID NO: 726289 - RNA, 19 nt, Artificial Sequence
  Description of Artificial Sequence: Synthetic oligonucleotide
aaguguucuccagcccuac

SEQ ID NO: 726290 - RNA, 19 nt, Artificial Sequence
  Description of Artificial Sequence: Synthetic oligonucleotide
uagcuaggaaugaaguauu

SEQ ID NO: 726291 - RNA, 19 nt, Artificial Sequence
  Description of Artificial Sequence: Synthetic oligonucleotide
cacgguguggaacgugucg

SEQ ID NO: 726292 - RNA, 19 nt, Artificial Sequence
  Description of Artificial Sequence: Synthetic oligonucleotide
acucgugacaccaaucgca

SEQ ID NO: 726293 - RNA, 19 nt, Artificial Sequence
  Description of Artificial Sequence: Synthetic oligonucleotide
ucggcuuugcugcgccucg

SEQ ID NO: 726294 - RNA, 19 nt, Artificial Sequence
  Description of Artificial Sequence: Synthetic oligonucleotide
ugcgccucgguacuucggc

SEQ ID NO: 726295 - RNA, 19 nt, Artificial Sequence
  Description of Artificial Sequence: Synthetic oligonucleotide
uagacgugcggcgucagca

SEQ ID NO: 726296 - RNA, 19 nt, Artificial Sequence
  Description of Artificial Sequence: Synthetic oligonucleotide
agaguuuccacuagcgcca

SEQ ID NO: 726297 - RNA, 19 nt, Artificial Sequence
  Description of Artificial Sequence: Synthetic oligonucleotide
ccugauucguugaauacug

SEQ ID NO: 726298 - RNA, 19 nt, Artificial Sequence
  Description of Artificial Sequence: Synthetic oligonucleotide
ccgaagaugauaaacagaa

SEQ ID NO: 726299 - RNA, 19 nt, Artificial Sequence
  Description of Artificial Sequence: Synthetic oligonucleotide
agguuauuuugacuguaaa

SEQ ID NO: 726300 - RNA, 19 nt, Artificial Sequence
  Description of Artificial Sequence: Synthetic oligonucleotide
gguauaggggaauccacac

SEQ ID NO: 726301 - RNA, 19 nt, Artificial Sequence
  Description of Artificial Sequence: Synthetic oligonucleotide
ggucuaagaacuccaggug

SEQ ID NO: 726302 - RNA, 19 nt, Artificial Sequence
  Description of Artificial Sequence: Synthetic oligonucleotide
caauugugcuccaugaaua

SEQ ID NO: 726303 - RNA, 19 nt, Artificial Sequence
  Description of Artificial Sequence: Synthetic oligonucleotide
uggggaacucgugacacca

SEQ ID NO: 726304 - RNA, 19 nt, Artificial Sequence
  Description of Artificial Sequence: Synthetic oligonucleotide
aacgcaggccgcaaaccuc

SEQ ID NO: 726305 - RNA, 19 nt, Artificial Sequence
  Description of Artificial Sequence: Synthetic oligonucleotide
uuagguuauuuugacugua

SEQ ID NO: 726306 - RNA, 19 nt, Artificial Sequence
  Description of Artificial Sequence: Synthetic oligonucleotide
caaggaugcgcacagugga

SEQ ID NO: 726307 - RNA, 19 nt, Artificial Sequence
  Description of Artificial Sequence: Synthetic oligonucleotide
cauguugauaagugcuguc

SEQ ID NO: 726308 - RNA, 19 nt, Artificial Sequence
  Description of Artificial Sequence: Synthetic oligonucleotide
aguuuaccugauuuucaaa

SEQ ID NO: 726309 - RNA, 19 nt, Artificial Sequence
  Description of Artificial Sequence: Synthetic oligonucleotide
uuccacuagcgccagcauc

SEQ ID NO: 726310 - RNA, 19 nt, Artificial Sequence
  Description of Artificial Sequence: Synthetic oligonucleotide
agcggguauaggggaaucc

SEQ ID NO: 726311 - RNA, 19 nt, Artificial Sequence
  Description of Artificial Sequence: Synthetic oligonucleotide
aaagcauguagaaggggua

SEQ ID NO: 726312 - RNA, 19 nt, Artificial Sequence
  Description of Artificial Sequence: Synthetic oligonucleotide
cuccacagucaguggaagg

SEQ ID NO: 726313 - RNA, 19 nt, Artificial Sequence
  Description of Artificial Sequence: Synthetic oligonucleotide
aaaaccgcacugucagguu

SEQ ID NO: 726314 - RNA, 19 nt, Artificial Sequence
  Description of Artificial Sequence: Synthetic oligonucleotide
agauucauccagccagcga

SEQ ID NO: 726315 - RNA, 19 nt, Artificial Sequence
  Description of Artificial Sequence: Synthetic oligonucleotide
cugggaguggcagaucuag

SEQ ID NO: 726316 - RNA, 19 nt, Artificial Sequence
  Description of Artificial Sequence: Synthetic oligonucleotide
ugccccucacuccacaguc

SEQ ID NO: 726317 - RNA, 19 nt, Artificial Sequence
  Description of Artificial Sequence: Synthetic oligonucleotide
acgcaggccgcaaaccucc

SEQ ID NO: 726318 - RNA, 19 nt, Artificial Sequence
  Description of Artificial Sequence: Synthetic oligonucleotide
cacgaggucuaagaacucc

SEQ ID NO: 726319 - RNA, 19 nt, Artificial Sequence
  Description of Artificial Sequence: Synthetic oligonucleotide
uuugcacaaggaugcgcac

SEQ ID NO: 726320 - RNA, 19 nt, Artificial Sequence
  Description of Artificial Sequence: Synthetic oligonucleotide
caaaccuccacgcuccgca

SEQ ID NO: 726321 - RNA, 19 nt, Artificial Sequence
  Description of Artificial Sequence: Synthetic oligonucleotide
gcagauaguucugauuuag

SEQ ID NO: 726322 - RNA, 19 nt, Artificial Sequence
  Description of Artificial Sequence: Synthetic oligonucleotide
augagaguaggcagcacug

SEQ ID NO: 726323 - RNA, 19 nt, Artificial Sequence
  Description of Artificial Sequence: Synthetic oligonucleotide
accccuuaagcucuuguua

SEQ ID NO: 726324 - RNA, 19 nt, Artificial Sequence
  Description of Artificial Sequence: Synthetic oligonucleotide
uucaagcuuguaaggguuu

SEQ ID NO: 726325 - RNA, 19 nt, Artificial Sequence
  Description of Artificial Sequence: Synthetic oligonucleotide
cauaccgccgccugcgcug

SEQ ID NO: 726326 - RNA, 19 nt, Artificial Sequence
  Description of Artificial Sequence: Synthetic oligonucleotide
ucaugucagccacggugug

SEQ ID NO: 726327 - RNA, 19 nt, Artificial Sequence
  Description of Artificial Sequence: Synthetic oligonucleotide
ggugccgaagaugauaaac

SEQ ID NO: 726328 - RNA, 19 nt, Artificial Sequence
  Description of Artificial Sequence: Synthetic oligonucleotide
guacuucggccugugagcc

SEQ ID NO: 726329 - RNA, 19 nt, Artificial Sequence
  Description of Artificial Sequence: Synthetic oligonucleotide
aucccagcggguauagggg

SEQ ID NO: 726330 - RNA, 19 nt, Artificial Sequence
  Description of Artificial Sequence: Synthetic oligonucleotide
gcucaaaccggcacgaagc

SEQ ID NO: 726331 - RNA, 19 nt, Artificial Sequence
  Description of Artificial Sequence: Synthetic oligonucleotide
ucaagcuuguaaggguuuc

SEQ ID NO: 726332 - RNA, 19 nt, Artificial Sequence
  Description of Artificial Sequence: Synthetic oligonucleotide
uggcccacgcagucggagg

SEQ ID NO: 726333 - RNA, 19 nt, Artificial Sequence
  Description of Artificial Sequence: Synthetic oligonucleotide
guaacggagccacgugagc

SEQ ID NO: 726334 - RNA, 19 nt, Artificial Sequence
  Description of Artificial Sequence: Synthetic oligonucleotide
ucgcugagcccaguagacg

SEQ ID NO: 726335 - RNA, 19 nt, Artificial Sequence
  Description of Artificial Sequence: Synthetic oligonucleotide
ugcagauaguucugauuua

SEQ ID NO: 726336 - RNA, 19 nt, Artificial Sequence
  Description of Artificial Sequence: Synthetic oligonucleotide
ggaaagcauguagaagggg

SEQ ID NO: 726337 - RNA, 19 nt, Artificial Sequence
  Description of Artificial Sequence: Synthetic oligonucleotide
caccugagucuccauggcc

SEQ ID NO: 726338 - RNA, 19 nt, Artificial Sequence
  Description of Artificial Sequence: Synthetic oligonucleotide
acaccaaucgcagcauuga

SEQ ID NO: 726339 - RNA, 19 nt, Artificial Sequence
  Description of Artificial Sequence: Synthetic oligonucleotide
caccaaucgcagcauugag

SEQ ID NO: 726340 - RNA, 19 nt, Artificial Sequence
  Description of Artificial Sequence: Synthetic oligonucleotide
uacuucggccugugagccg

SEQ ID NO: 726341 - RNA, 19 nt, Artificial Sequence
  Description of Artificial Sequence: Synthetic oligonucleotide
accaaucgcagcauugaga

SEQ ID NO: 726342 - RNA, 19 nt, Artificial Sequence
  Description of Artificial Sequence: Synthetic oligonucleotide
uaccccuuaagcucuuguu

SEQ ID NO: 726343 - RNA, 19 nt, Artificial Sequence
  Description of Artificial Sequence: Synthetic oligonucleotide
ugaguuuauuuaggcguuc

SEQ ID NO: 726344 - RNA, 19 nt, Artificial Sequence
  Description of Artificial Sequence: Synthetic oligonucleotide
acggagccacgugagcacc

SEQ ID NO: 726345 - RNA, 19 nt, Artificial Sequence
  Description of Artificial Sequence: Synthetic oligonucleotide
gguuauuuugacuguaaau

SEQ ID NO: 726346 - RNA, 19 nt, Artificial Sequence
  Description of Artificial Sequence: Synthetic oligonucleotide
gugcuccaugaauaaaaca

SEQ ID NO: 726347 - RNA, 19 nt, Artificial Sequence
  Description of Artificial Sequence: Synthetic oligonucleotide
uuucuagucugaguuuauu

SEQ ID NO: 726348 - RNA, 19 nt, Artificial Sequence
  Description of Artificial Sequence: Synthetic oligonucleotide
cagauucauccagccagcg

SEQ ID NO: 726349 - RNA, 19 nt, Artificial Sequence
  Description of Artificial Sequence: Synthetic oligonucleotide
cauguagaagggguaccug

SEQ ID NO: 726350 - RNA, 19 nt, Artificial Sequence
  Description of Artificial Sequence: Synthetic oligonucleotide
uuuaggcguucuuccuccu

SEQ ID NO: 726351 - RNA, 19 nt, Artificial Sequence
  Description of Artificial Sequence: Synthetic oligonucleotide
gcuggccgaacgcaggccg

SEQ ID NO: 726352 - RNA, 19 nt, Artificial Sequence
  Description of Artificial Sequence: Synthetic oligonucleotide
acgaagcuaccaaauuucu

SEQ ID NO: 726353 - RNA, 19 nt, Artificial Sequence
  Description of Artificial Sequence: Synthetic oligonucleotide
guagaaggacucuuuuccu

SEQ ID NO: 726354 - RNA, 19 nt, Artificial Sequence
  Description of Artificial Sequence: Synthetic oligonucleotide
cugauuuagcuaggaauga

SEQ ID NO: 726355 - RNA, 19 nt, Artificial Sequence
  Description of Artificial Sequence: Synthetic oligonucleotide
cacgcgcagauacagcuca

SEQ ID NO: 726356 - RNA, 19 nt, Artificial Sequence
  Description of Artificial Sequence: Synthetic oligonucleotide
ucgugacaccaaucgcagc

SEQ ID NO: 726357 - RNA, 19 nt, Artificial Sequence
  Description of Artificial Sequence: Synthetic oligonucleotide
accggcacgaagcuaccaa

SEQ ID NO: 726358 - RNA, 19 nt, Artificial Sequence
  Description of Artificial Sequence: Synthetic oligonucleotide
cacggugucgcugagccca

SEQ ID NO: 726359 - RNA, 19 nt, Artificial Sequence
  Description of Artificial Sequence: Synthetic oligonucleotide
acgcagucggaggagcggg

SEQ ID NO: 726360 - RNA, 19 nt, Artificial Sequence
  Description of Artificial Sequence: Synthetic oligonucleotide
gacucaccuucuucuggac

SEQ ID NO: 726361 - RNA, 19 nt, Artificial Sequence
  Description of Artificial Sequence: Synthetic oligonucleotide
gaacgcaggccgcaaaccu

SEQ ID NO: 726362 - RNA, 19 nt, Artificial Sequence
  Description of Artificial Sequence: Synthetic oligonucleotide
aaccgcacugucagguuga

SEQ ID NO: 726363 - RNA, 19 nt, Artificial Sequence
  Description of Artificial Sequence: Synthetic oligonucleotide
auacaugaacagguacccu

SEQ ID NO: 726364 - RNA, 19 nt, Artificial Sequence
  Description of Artificial Sequence: Synthetic oligonucleotide
agucaguucuacaguacaa

SEQ ID NO: 726365 - RNA, 19 nt, Artificial Sequence
  Description of Artificial Sequence: Synthetic oligonucleotide
ucacgaggucuaagaacuc

SEQ ID NO: 726366 - RNA, 19 nt, Artificial Sequence
  Description of Artificial Sequence: Synthetic oligonucleotide
aguguucuccagcccuacu

SEQ ID NO: 726367 - RNA, 19 nt, Artificial Sequence
  Description of Artificial Sequence: Synthetic oligonucleotide
acgugucguagaaggacuc

SEQ ID NO: 726368 - RNA, 19 nt, Artificial Sequence
  Description of Artificial Sequence: Synthetic oligonucleotide
guguggaacgugucguaga

SEQ ID NO: 726369 - RNA, 19 nt, Artificial Sequence
  Description of Artificial Sequence: Synthetic oligonucleotide
gauugagcucaaaccggca

SEQ ID NO: 726370 - RNA, 19 nt, Artificial Sequence
  Description of Artificial Sequence: Synthetic oligonucleotide
aguauucaugggguuccca

SEQ ID NO: 726371 - RNA, 19 nt, Artificial Sequence
  Description of Artificial Sequence: Synthetic oligonucleotide
guaaagcugaccugccccu

SEQ ID NO: 726372 - RNA, 19 nt, Artificial Sequence
  Description of Artificial Sequence: Synthetic oligonucleotide
uuaggcguucuuccuccuu

SEQ ID NO: 726373 - RNA, 19 nt, Artificial Sequence
  Description of Artificial Sequence: Synthetic oligonucleotide
agcuggccgaacgcaggcc

SEQ ID NO: 726374 - RNA, 19 nt, Artificial Sequence
  Description of Artificial Sequence: Synthetic oligonucleotide
gaagggguaccugaaaauu

SEQ ID NO: 726375 - RNA, 19 nt, Artificial Sequence
  Description of Artificial Sequence: Synthetic oligonucleotide
gcgaucaaagucaggggcc

SEQ ID NO: 726376 - RNA, 19 nt, Artificial Sequence
  Description of Artificial Sequence: Synthetic oligonucleotide
cuugguuuacauggaaugu

SEQ ID NO: 726377 - RNA, 19 nt, Artificial Sequence
  Description of Artificial Sequence: Synthetic oligonucleotide
ggcaauaccaacaaacguu

SEQ ID NO: 726378 - RNA, 19 nt, Artificial Sequence
  Description of Artificial Sequence: Synthetic oligonucleotide
gcugauggcaggguucugc

SEQ ID NO: 726379 - RNA, 19 nt, Artificial Sequence
  Description of Artificial Sequence: Synthetic oligonucleotide
ucaggggagccuucacuuu

SEQ ID NO: 726380 - RNA, 19 nt, Artificial Sequence
  Description of Artificial Sequence: Synthetic oligonucleotide
cacgcagucggaggagcgg

SEQ ID NO: 726381 - RNA, 19 nt, Artificial Sequence
  Description of Artificial Sequence: Synthetic oligonucleotide
cuuaagcucuuguuauagu

SEQ ID NO: 726382 - RNA, 19 nt, Artificial Sequence
  Description of Artificial Sequence: Synthetic oligonucleotide
ggaugcgcacaguggacug

SEQ ID NO: 726383 - RNA, 19 nt, Artificial Sequence
  Description of Artificial Sequence: Synthetic oligonucleotide
guagacgugcggcgucagc

SEQ ID NO: 726384 - RNA, 19 nt, Artificial Sequence
  Description of Artificial Sequence: Synthetic oligonucleotide
gaguuuccacuagcgccag

SEQ ID NO: 726385 - RNA, 19 nt, Artificial Sequence
  Description of Artificial Sequence: Synthetic oligonucleotide
agacaacacaagucuccuu

SEQ ID NO: 726386 - RNA, 19 nt, Artificial Sequence
  Description of Artificial Sequence: Synthetic oligonucleotide
acaguguaacggagccacg

SEQ ID NO: 726387 - RNA, 19 nt, Artificial Sequence
  Description of Artificial Sequence: Synthetic oligonucleotide
agcaucccagcggguauag

SEQ ID NO: 726388 - RNA, 19 nt, Artificial Sequence
  Description of Artificial Sequence: Synthetic oligonucleotide
ucaaaccggcacgaagcua

SEQ ID NO: 726389 - RNA, 19 nt, Artificial Sequence
  Description of Artificial Sequence: Synthetic oligonucleotide
cuggccgaacgcaggccgc

SEQ ID NO: 726390 - RNA, 19 nt, Artificial Sequence
  Description of Artificial Sequence: Synthetic oligonucleotide
ucacggugucgcugagccc

SEQ ID NO: 726391 - RNA, 19 nt, Artificial Sequence
  Description of Artificial Sequence: Synthetic oligonucleotide
gcucauguugauaagugcu

SEQ ID NO: 726392 - RNA, 19 nt, Artificial Sequence
  Description of Artificial Sequence: Synthetic oligonucleotide
gcccaguagacgugcggcg

SEQ ID NO: 726393 - RNA, 19 nt, Artificial Sequence
  Description of Artificial Sequence: Synthetic oligonucleotide
auuuuccgugaugcugaug

SEQ ID NO: 726394 - RNA, 19 nt, Artificial Sequence
  Description of Artificial Sequence: Synthetic oligonucleotide
ucgguacuucggccuguga

SEQ ID NO: 726395 - RNA, 19 nt, Artificial Sequence
  Description of Artificial Sequence: Synthetic oligonucleotide
ggguauaggggaauccaca

SEQ ID NO: 726396 - RNA, 19 nt, Artificial Sequence
  Description of Artificial Sequence: Synthetic oligonucleotide
cugcgccucgguacuucgg

SEQ ID NO: 726397 - RNA, 19 nt, Artificial Sequence
  Description of Artificial Sequence: Synthetic oligonucleotide
cugguaccccuuaagcucu

SEQ ID NO: 726398 - RNA, 19 nt, Artificial Sequence
  Description of Artificial Sequence: Synthetic oligonucleotide
acacaguguaacggagcca

SEQ ID NO: 726399 - RNA, 19 nt, Artificial Sequence
  Description of Artificial Sequence: Synthetic oligonucleotide
gguuuacauggaaugugga

SEQ ID NO: 726400 - RNA, 19 nt, Artificial Sequence
  Description of Artificial Sequence: Synthetic oligonucleotide
gcugcacaagguuauacau

SEQ ID NO: 726401 - RNA, 19 nt, Artificial Sequence
  Description of Artificial Sequence: Synthetic oligonucleotide
aaucuacuuugugcuuauu

SEQ ID NO: 726402 - RNA, 19 nt, Artificial Sequence
  Description of Artificial Sequence: Synthetic oligonucleotide
ggaggagcggggaggcucg

SEQ ID NO: 726403 - RNA, 19 nt, Artificial Sequence
  Description of Artificial Sequence: Synthetic oligonucleotide
gguuauacaugaacaggua

SEQ ID NO: 726404 - RNA, 19 nt, Artificial Sequence
  Description of Artificial Sequence: Synthetic oligonucleotide
aagcaucccagcggguaua

SEQ ID NO: 726405 - RNA, 19 nt, Artificial Sequence
  Description of Artificial Sequence: Synthetic oligonucleotide
cugaguuuauuuaggcguu

SEQ ID NO: 726406 - RNA, 19 nt, Artificial Sequence
  Description of Artificial Sequence: Synthetic oligonucleotide
gcugcgccucgguacuucg

SEQ ID NO: 726407 - RNA, 19 nt, Artificial Sequence
  Description of Artificial Sequence: Synthetic oligonucleotide
ccaagaacacugggagugg

SEQ ID NO: 726408 - RNA, 19 nt, Artificial Sequence
  Description of Artificial Sequence: Synthetic oligonucleotide
ggaacucgugacaccaauc

SEQ ID NO: 726409 - RNA, 19 nt, Artificial Sequence
  Description of Artificial Sequence: Synthetic oligonucleotide
aucauagauugagcucaaa

SEQ ID NO: 726410 - RNA, 19 nt, Artificial Sequence
  Description of Artificial Sequence: Synthetic oligonucleotide
agcucacggugucgcugag

SEQ ID NO: 726411 - RNA, 19 nt, Artificial Sequence
  Description of Artificial Sequence: Synthetic oligonucleotide
cucaaaccggcacgaagcu

SEQ ID NO: 726412 - RNA, 19 nt, Artificial Sequence
  Description of Artificial Sequence: Synthetic oligonucleotide
guaccccuuaagcucuugu

SEQ ID NO: 726413 - RNA, 19 nt, Artificial Sequence
  Description of Artificial Sequence: Synthetic oligonucleotide
caaucuacuuugugcuuau

SEQ ID NO: 726414 - RNA, 19 nt, Artificial Sequence
  Description of Artificial Sequence: Synthetic oligonucleotide
ggcucggcuuugcugcgcc

SEQ ID NO: 726415 - RNA, 19 nt, Artificial Sequence
  Description of Artificial Sequence: Synthetic oligonucleotide
cagauacagcucacggugu

SEQ ID NO: 726416 - RNA, 19 nt, Artificial Sequence
  Description of Artificial Sequence: Synthetic oligonucleotide
ggcguucuuccuccuuggc

SEQ ID NO: 726417 - RNA, 19 nt, Artificial Sequence
  Description of Artificial Sequence: Synthetic oligonucleotide
cucgguacuucggccugug

SEQ ID NO: 726418 - RNA, 19 nt, Artificial Sequence
  Description of Artificial Sequence: Synthetic oligonucleotide
acgcgcagauacagcucac

SEQ ID NO: 726419 - RNA, 19 nt, Artificial Sequence
  Description of Artificial Sequence: Synthetic oligonucleotide
agcucuuguuauaguguua

SEQ ID NO: 726420 - RNA, 19 nt, Artificial Sequence
  Description of Artificial Sequence: Synthetic oligonucleotide
gcggguauaggggaaucca

SEQ ID NO: 726421 - RNA, 19 nt, Artificial Sequence
  Description of Artificial Sequence: Synthetic oligonucleotide
ugcugcgccucgguacuuc

SEQ ID NO: 726422 - RNA, 19 nt, Artificial Sequence
  Description of Artificial Sequence: Synthetic oligonucleotide
ggggugugucaaaccagcc

SEQ ID NO: 726423 - RNA, 19 nt, Artificial Sequence
  Description of Artificial Sequence: Synthetic oligonucleotide
gggguaccugaaaauuuca

SEQ ID NO: 726424 - RNA, 19 nt, Artificial Sequence
  Description of Artificial Sequence: Synthetic oligonucleotide
ccgaacgcaggccgcaaac

SEQ ID NO: 726425 - RNA, 19 nt, Artificial Sequence
  Description of Artificial Sequence: Synthetic oligonucleotide
cggguauaggggaauccac

SEQ ID NO: 726426 - RNA, 19 nt, Artificial Sequence
  Description of Artificial Sequence: Synthetic oligonucleotide
caguguaacggagccacgu

SEQ ID NO: 726427 - RNA, 19 nt, Artificial Sequence
  Description of Artificial Sequence: Synthetic oligonucleotide
agcuccacgcgcagauaca

SEQ ID NO: 726428 - RNA, 19 nt, Artificial Sequence
  Description of Artificial Sequence: Synthetic oligonucleotide
ggguaccugaaaauuucaa

SEQ ID NO: 726429 - RNA, 19 nt, Artificial Sequence
  Description of Artificial Sequence: Synthetic oligonucleotide
ggggaugcuaacagcaacu

SEQ ID NO: 726430 - RNA, 19 nt, Artificial Sequence
  Description of Artificial Sequence: Synthetic oligonucleotide
gaugcgcacaguggacugu

SEQ ID NO: 726431 - RNA, 19 nt, Artificial Sequence
  Description of Artificial Sequence: Synthetic oligonucleotide
cuucgaugagauggggugu

SEQ ID NO: 726432 - RNA, 19 nt, Artificial Sequence
  Description of Artificial Sequence: Synthetic oligonucleotide
ccaaucuacuuugugcuua

SEQ ID NO: 726433 - RNA, 19 nt, Artificial Sequence
  Description of Artificial Sequence: Synthetic oligonucleotide
caguagacgugcggcguca

SEQ ID NO: 726434 - RNA, 19 nt, Artificial Sequence
  Description of Artificial Sequence: Synthetic oligonucleotide
ugguaccccuuaagcucuu

SEQ ID NO: 726435 - RNA, 19 nt, Artificial Sequence
  Description of Artificial Sequence: Synthetic oligonucleotide
cacgcuccgcagcccgcag

SEQ ID NO: 726436 - RNA, 19 nt, Artificial Sequence
  Description of Artificial Sequence: Synthetic oligonucleotide
caagcaucccagcggguau

SEQ ID NO: 726437 - RNA, 19 nt, Artificial Sequence
  Description of Artificial Sequence: Synthetic oligonucleotide
ccaguagacgugcggcguc

SEQ ID NO: 726438 - RNA, 19 nt, Artificial Sequence
  Description of Artificial Sequence: Synthetic oligonucleotide
aucgcagcauugagaguuu

SEQ ID NO: 726439 - RNA, 19 nt, Artificial Sequence
  Description of Artificial Sequence: Synthetic oligonucleotide
gcgccucgguacuucggcc

SEQ ID NO: 726440 - RNA, 19 nt, Artificial Sequence
  Description of Artificial Sequence: Synthetic oligonucleotide
cguugaauacuggaaugga

SEQ ID NO: 726441 - RNA, 19 nt, Artificial Sequence
  Description of Artificial Sequence: Synthetic oligonucleotide
gcagaucuagacacuggua

SEQ ID NO: 726442 - RNA, 19 nt, Artificial Sequence
  Description of Artificial Sequence: Synthetic oligonucleotide
ggcacgaagcuaccaaauu

SEQ ID NO: 726443 - RNA, 19 nt, Artificial Sequence
  Description of Artificial Sequence: Synthetic oligonucleotide
gcaaaccuccacgcuccgc

SEQ ID NO: 726444 - RNA, 19 nt, Artificial Sequence
  Description of Artificial Sequence: Synthetic oligonucleotide
cagcccuacucugacucaa

SEQ ID NO: 726445 - RNA, 19 nt, Artificial Sequence
  Description of Artificial Sequence: Synthetic oligonucleotide
cgaacgcaggccgcaaacc

SEQ ID NO: 726446 - RNA, 19 nt, Artificial Sequence
  Description of Artificial Sequence: Synthetic oligonucleotide
ggaacaccagaaggcaaua

SEQ ID NO: 726447 - RNA, 19 nt, Artificial Sequence
  Description of Artificial Sequence: Synthetic oligonucleotide
caaucgcagcauugagagu

SEQ ID NO: 726448 - RNA, 19 nt, Artificial Sequence
  Description of Artificial Sequence: Synthetic oligonucleotide
ccacgcgcagauacagcuc

SEQ ID NO: 726449 - RNA, 19 nt, Artificial Sequence
  Description of Artificial Sequence: Synthetic oligonucleotide
agcccuacucugacucaaa

SEQ ID NO: 726450 - RNA, 19 nt, Artificial Sequence
  Description of Artificial Sequence: Synthetic oligonucleotide
cauuuuccgugaugcugau

SEQ ID NO: 726451 - RNA, 19 nt, Artificial Sequence
  Description of Artificial Sequence: Synthetic oligonucleotide
gcaucccagcggguauagg

SEQ ID NO: 726452 - RNA, 19 nt, Artificial Sequence
  Description of Artificial Sequence: Synthetic oligonucleotide
caccacugacucaccuucu

SEQ ID NO: 726453 - RNA, 19 nt, Artificial Sequence
  Description of Artificial Sequence: Synthetic oligonucleotide
ccgccugcgcuguuuauaa

SEQ ID NO: 726454 - RNA, 19 nt, Artificial Sequence
  Description of Artificial Sequence: Synthetic oligonucleotide
gacaagcaucccagcgggu

SEQ ID NO: 726455 - RNA, 19 nt, Artificial Sequence
  Description of Artificial Sequence: Synthetic oligonucleotide
ccacgguguggaacguguc

SEQ ID NO: 726456 - RNA, 19 nt, Artificial Sequence
  Description of Artificial Sequence: Synthetic oligonucleotide
ccggcacgaagcuaccaaa

SEQ ID NO: 726457 - RNA, 19 nt, Artificial Sequence
  Description of Artificial Sequence: Synthetic oligonucleotide
cugccccucacuccacagu

SEQ ID NO: 726458 - RNA, 19 nt, Artificial Sequence
  Description of Artificial Sequence: Synthetic oligonucleotide
cggcgucagcaccugaguc

SEQ ID NO: 726459 - RNA, 19 nt, Artificial Sequence
  Description of Artificial Sequence: Synthetic oligonucleotide
cgcaaaccuccacgcuccg

SEQ ID NO: 726460 - RNA, 19 nt, Artificial Sequence
  Description of Artificial Sequence: Synthetic oligonucleotide
uugcugcgccucgguacuu

SEQ ID NO: 726461 - RNA, 19 nt, Artificial Sequence
  Description of Artificial Sequence: Synthetic oligonucleotide
gugcggcgucagcaccuga

SEQ ID NO: 726462 - RNA, 19 nt, Artificial Sequence
  Description of Artificial Sequence: Synthetic oligonucleotide
gccgccugcgcuguuuaua

SEQ ID NO: 726463 - RNA, 19 nt, Artificial Sequence
  Description of Artificial Sequence: Synthetic oligonucleotide
ggggaacucgugacaccaa

SEQ ID NO: 726464 - RNA, 19 nt, Artificial Sequence
  Description of Artificial Sequence: Synthetic oligonucleotide
uaccgccgccugcgcuguu

SEQ ID NO: 726465 - RNA, 19 nt, Artificial Sequence
  Description of Artificial Sequence: Synthetic oligonucleotide
cccaguagacgugcggcgu

SEQ ID NO: 726466 - RNA, 19 nt, Artificial Sequence
  Description of Artificial Sequence: Synthetic oligonucleotide
ccauaccgccgccugcgcu

SEQ ID NO: 726467 - RNA, 19 nt, Artificial Sequence
  Description of Artificial Sequence: Synthetic oligonucleotide
cggcacgaagcuaccaaau

SEQ ID NO: 726468 - RNA, 19 nt, Artificial Sequence
  Description of Artificial Sequence: Synthetic oligonucleotide
cgugucguagaaggacucu

SEQ ID NO: 726469 - RNA, 19 nt, Artificial Sequence
  Description of Artificial Sequence: Synthetic oligonucleotide
ccaugucccugggcuuuga

SEQ ID NO: 726470 - RNA, 19 nt, Artificial Sequence
  Description of Artificial Sequence: Synthetic oligonucleotide
ccucgguacuucggccugu

SEQ ID NO: 726471 - RNA, 19 nt, Artificial Sequence
  Description of Artificial Sequence: Synthetic oligonucleotide
cgccgccugcgcuguuuau

SEQ ID NO: 726472 - RNA, 19 nt, Artificial Sequence
  Description of Artificial Sequence: Synthetic oligonucleotide
aaggauacuagguaaaagg

SEQ ID NO: 726473 - RNA, 19 nt, Artificial Sequence
  Description of Artificial Sequence: Synthetic oligonucleotide
ugagcuaugacauagguca

SEQ ID NO: 726474 - RNA, 19 nt, Artificial Sequence
  Description of Artificial Sequence: Synthetic oligonucleotide
aacacaauacucucaaauc

SEQ ID NO: 726475 - RNA, 19 nt, Artificial Sequence
  Description of Artificial Sequence: Synthetic oligonucleotide
uuacggaugacuuagacac

SEQ ID NO: 726476 - RNA, 19 nt, Artificial Sequence
  Description of Artificial Sequence: Synthetic oligonucleotide
uaugacauaggucaggacu

SEQ ID NO: 726477 - RNA, 19 nt, Artificial Sequence
  Description of Artificial Sequence: Synthetic oligonucleotide
aucaagagguaccugacgc

SEQ ID NO: 726478 - RNA, 19 nt, Artificial Sequence
  Description of Artificial Sequence: Synthetic oligonucleotide
augacuuagacacugaacu

SEQ ID NO: 726479 - RNA, 19 nt, Artificial Sequence
  Description of Artificial Sequence: Synthetic oligonucleotide
aauauagacugaaggaugg

SEQ ID NO: 726480 - RNA, 19 nt, Artificial Sequence
  Description of Artificial Sequence: Synthetic oligonucleotide
uacaguaacaugcuguggc

SEQ ID NO: 726481 - RNA, 19 nt, Artificial Sequence
  Description of Artificial Sequence: Synthetic oligonucleotide
aaacauguaagccaaccga

SEQ ID NO: 726482 - RNA, 19 nt, Artificial Sequence
  Description of Artificial Sequence: Synthetic oligonucleotide
aauccugacaguuuaccug

SEQ ID NO: 726483 - RNA, 19 nt, Artificial Sequence
  Description of Artificial Sequence: Synthetic oligonucleotide
uauggucucacgaggaggg

SEQ ID NO: 726484 - RNA, 19 nt, Artificial Sequence
  Description of Artificial Sequence: Synthetic oligonucleotide
ugcuuuaagacaaccagca

SEQ ID NO: 726485 - RNA, 19 nt, Artificial Sequence
  Description of Artificial Sequence: Synthetic oligonucleotide
uauuaugugcaaaauucca

SEQ ID NO: 726486 - RNA, 19 nt, Artificial Sequence
  Description of Artificial Sequence: Synthetic oligonucleotide
aagagaaagaggcuguacu

SEQ ID NO: 726487 - RNA, 19 nt, Artificial Sequence
  Description of Artificial Sequence: Synthetic oligonucleotide
uauuacaauguauuaugug

SEQ ID NO: 726488 - RNA, 19 nt, Artificial Sequence
  Description of Artificial Sequence: Synthetic oligonucleotide
gucauaaacugucggaugg

SEQ ID NO: 726489 - RNA, 19 nt, Artificial Sequence
  Description of Artificial Sequence: Synthetic oligonucleotide
aaucaagagguaccugacg

SEQ ID NO: 726490 - RNA, 19 nt, Artificial Sequence
  Description of Artificial Sequence: Synthetic oligonucleotide
uguaagccaaccgagaagc

SEQ ID NO: 726491 - RNA, 19 nt, Artificial Sequence
  Description of Artificial Sequence: Synthetic oligonucleotide
uacucucaaauccagcaag

SEQ ID NO: 726492 - RNA, 19 nt, Artificial Sequence
  Description of Artificial Sequence: Synthetic oligonucleotide
aauucaagcaugucacacu

SEQ ID NO: 726493 - RNA, 19 nt, Artificial Sequence
  Description of Artificial Sequence: Synthetic oligonucleotide
ugaugggucuaaaagcucc

SEQ ID NO: 726494 - RNA, 19 nt, Artificial Sequence
  Description of Artificial Sequence: Synthetic oligonucleotide
aggauaaguguccucugcc

SEQ ID NO: 726495 - RNA, 19 nt, Artificial Sequence
  Description of Artificial Sequence: Synthetic oligonucleotide
acuagguaaaaggaccucc

SEQ ID NO: 726496 - RNA, 19 nt, Artificial Sequence
  Description of Artificial Sequence: Synthetic oligonucleotide
agagaaagaggcuguacuc

SEQ ID NO: 726497 - RNA, 19 nt, Artificial Sequence
  Description of Artificial Sequence: Synthetic oligonucleotide
ucaucaacgaagagaaaga

SEQ ID NO: 726498 - RNA, 19 nt, Artificial Sequence
  Description of Artificial Sequence: Synthetic oligonucleotide
ugauguauggucucacgag

SEQ ID NO: 726499 - RNA, 19 nt, Artificial Sequence
  Description of Artificial Sequence: Synthetic oligonucleotide
ucaucuacagaggggaugg

SEQ ID NO: 726500 - RNA, 19 nt, Artificial Sequence
  Description of Artificial Sequence: Synthetic oligonucleotide
aggcuagacuccuagcucc

SEQ ID NO: 726501 - RNA, 19 nt, Artificial Sequence
  Description of Artificial Sequence: Synthetic oligonucleotide
aucuaaaagaugcccuugg

SEQ ID NO: 726502 - RNA, 19 nt, Artificial Sequence
  Description of Artificial Sequence: Synthetic oligonucleotide
aagacaaggauacuaggua

SEQ ID NO: 726503 - RNA, 19 nt, Artificial Sequence
  Description of Artificial Sequence: Synthetic oligonucleotide
aaaucacaccauaaggauc

SEQ ID NO: 726504 - RNA, 19 nt, Artificial Sequence
  Description of Artificial Sequence: Synthetic oligonucleotide
cuaucguucaagcucaaac

SEQ ID NO: 726505 - RNA, 19 nt, Artificial Sequence
  Description of Artificial Sequence: Synthetic oligonucleotide
uagacgaaguggaauaugu

SEQ ID NO: 726506 - RNA, 19 nt, Artificial Sequence
  Description of Artificial Sequence: Synthetic oligonucleotide
uaaacugucggauggucug

SEQ ID NO: 726507 - RNA, 19 nt, Artificial Sequence
  Description of Artificial Sequence: Synthetic oligonucleotide
cauguacucgauuucacug

SEQ ID NO: 726508 - RNA, 19 nt, Artificial Sequence
  Description of Artificial Sequence: Synthetic oligonucleotide
cacagaaucaagagguacc

SEQ ID NO: 726509 - RNA, 19 nt, Artificial Sequence
  Description of Artificial Sequence: Synthetic oligonucleotide
aagucaucuacagagggga

SEQ ID NO: 726510 - RNA, 19 nt, Artificial Sequence
  Description of Artificial Sequence: Synthetic oligonucleotide
uugaccugggucauaaacu

SEQ ID NO: 726511 - RNA, 19 nt, Artificial Sequence
  Description of Artificial Sequence: Synthetic oligonucleotide
ucuaaaagaugcccuuggc

SEQ ID NO: 726512 - RNA, 19 nt, Artificial Sequence
  Description of Artificial Sequence: Synthetic oligonucleotide
gauuauuguacaguauuac

SEQ ID NO: 726513 - RNA, 19 nt, Artificial Sequence
  Description of Artificial Sequence: Synthetic oligonucleotide
caugugacagccagaaggc

SEQ ID NO: 726514 - RNA, 19 nt, Artificial Sequence
  Description of Artificial Sequence: Synthetic oligonucleotide
cuugucaaguaauagccuc

SEQ ID NO: 726515 - RNA, 19 nt, Artificial Sequence
  Description of Artificial Sequence: Synthetic oligonucleotide
uugucaaguaauagccucc

SEQ ID NO: 726516 - RNA, 19 nt, Artificial Sequence
  Description of Artificial Sequence: Synthetic oligonucleotide
ggcaguacaacacaguaug

SEQ ID NO: 726517 - RNA, 19 nt, Artificial Sequence
  Description of Artificial Sequence: Synthetic oligonucleotide
ugaccugggucauaaacug

SEQ ID NO: 726518 - RNA, 19 nt, Artificial Sequence
  Description of Artificial Sequence: Synthetic oligonucleotide
uugaguuguuuccacgagc

SEQ ID NO: 726519 - RNA, 19 nt, Artificial Sequence
  Description of Artificial Sequence: Synthetic oligonucleotide
aaaagaugcccuuggcuaa

SEQ ID NO: 726520 - RNA, 19 nt, Artificial Sequence
  Description of Artificial Sequence: Synthetic oligonucleotide
aaggcaguacaacacagua

SEQ ID NO: 726521 - RNA, 19 nt, Artificial Sequence
  Description of Artificial Sequence: Synthetic oligonucleotide
ggaucagcgacucaauagg

SEQ ID NO: 726522 - RNA, 19 nt, Artificial Sequence
  Description of Artificial Sequence: Synthetic oligonucleotide
aauaguucuugaccugggu

SEQ ID NO: 726523 - RNA, 19 nt, Artificial Sequence
  Description of Artificial Sequence: Synthetic oligonucleotide
uacaauucuccauucugga

SEQ ID NO: 726524 - RNA, 19 nt, Artificial Sequence
  Description of Artificial Sequence: Synthetic oligonucleotide
uacucgauuucacugucca

SEQ ID NO: 726525 - RNA, 19 nt, Artificial Sequence
  Description of Artificial Sequence: Synthetic oligonucleotide
cuagguaaaaggaccuccc

SEQ ID NO: 726526 - RNA, 19 nt, Artificial Sequence
  Description of Artificial Sequence: Synthetic oligonucleotide
uucuaacuauuucaugaac

SEQ ID NO: 726527 - RNA, 19 nt, Artificial Sequence
  Description of Artificial Sequence: Synthetic oligonucleotide
ggacaaauaguucuugacc

SEQ ID NO: 726528 - RNA, 19 nt, Artificial Sequence
  Description of Artificial Sequence: Synthetic oligonucleotide
ucguccgcaccauacaucc

SEQ ID NO: 726529 - RNA, 19 nt, Artificial Sequence
  Description of Artificial Sequence: Synthetic oligonucleotide
aaauuugccaaaacaucca

SEQ ID NO: 726530 - RNA, 19 nt, Artificial Sequence
  Description of Artificial Sequence: Synthetic oligonucleotide
uaccuuaaguguuuccuca

SEQ ID NO: 726531 - RNA, 19 nt, Artificial Sequence
  Description of Artificial Sequence: Synthetic oligonucleotide
ggagauucuaacuauuuca

SEQ ID NO: 726532 - RNA, 19 nt, Artificial Sequence
  Description of Artificial Sequence: Synthetic oligonucleotide
uucgcuuguagacgaagug

SEQ ID NO: 726533 - RNA, 19 nt, Artificial Sequence
  Description of Artificial Sequence: Synthetic oligonucleotide
gacagugcuccauaagcgc

SEQ ID NO: 726534 - RNA, 19 nt, Artificial Sequence
  Description of Artificial Sequence: Synthetic oligonucleotide
aacacaguaugugcugagg

SEQ ID NO: 726535 - RNA, 19 nt, Artificial Sequence
  Description of Artificial Sequence: Synthetic oligonucleotide
agaaggcuagacuccuagc

SEQ ID NO: 726536 - RNA, 19 nt, Artificial Sequence
  Description of Artificial Sequence: Synthetic oligonucleotide
ugugcauccgcuguugacc

SEQ ID NO: 726537 - RNA, 19 nt, Artificial Sequence
  Description of Artificial Sequence: Synthetic oligonucleotide
cuagcucccuuuuggaugc

SEQ ID NO: 726538 - RNA, 19 nt, Artificial Sequence
  Description of Artificial Sequence: Synthetic oligonucleotide
ugacuuagacacugaacug

SEQ ID NO: 726539 - RNA, 19 nt, Artificial Sequence
  Description of Artificial Sequence: Synthetic oligonucleotide
ugcauucaugaguaguccc

SEQ ID NO: 726540 - RNA, 19 nt, Artificial Sequence
  Description of Artificial Sequence: Synthetic oligonucleotide
aaauaguucuugaccuggg

SEQ ID NO: 726541 - RNA, 19 nt, Artificial Sequence
  Description of Artificial Sequence: Synthetic oligonucleotide
gaugcauucaugaguaguc

SEQ ID NO: 726542 - RNA, 19 nt, Artificial Sequence
  Description of Artificial Sequence: Synthetic oligonucleotide
uaccugacgcacugcaucg

SEQ ID NO: 726543 - RNA, 19 nt, Artificial Sequence
  Description of Artificial Sequence: Synthetic oligonucleotide
ugggcacugcaucuaaaag

SEQ ID NO: 726544 - RNA, 19 nt, Artificial Sequence
  Description of Artificial Sequence: Synthetic oligonucleotide
aagaugcauuugugcaugg

SEQ ID NO: 726545 - RNA, 19 nt, Artificial Sequence
  Description of Artificial Sequence: Synthetic oligonucleotide
uggcuaucguucaagcuca

SEQ ID NO: 726546 - RNA, 19 nt, Artificial Sequence
  Description of Artificial Sequence: Synthetic oligonucleotide
aaacugucggauggucugc

SEQ ID NO: 726547 - RNA, 19 nt, Artificial Sequence
  Description of Artificial Sequence: Synthetic oligonucleotide
guggcuaucguucaagcuc

SEQ ID NO: 726548 - RNA, 19 nt, Artificial Sequence
  Description of Artificial Sequence: Synthetic oligonucleotide
auacagaugccugugcauc

SEQ ID NO: 726549 - RNA, 19 nt, Artificial Sequence
  Description of Artificial Sequence: Synthetic oligonucleotide
agugaugggucuaaaagcu

SEQ ID NO: 726550 - RNA, 19 nt, Artificial Sequence
  Description of Artificial Sequence: Synthetic oligonucleotide
uuguagacgaaguggaaua

SEQ ID NO: 726551 - RNA, 19 nt, Artificial Sequence
  Description of Artificial Sequence: Synthetic oligonucleotide
acaaauaguucuugaccug

SEQ ID NO: 726552 - RNA, 19 nt, Artificial Sequence
  Description of Artificial Sequence: Synthetic oligonucleotide
cugcuguugaacccaaggg

SEQ ID NO: 726553 - RNA, 19 nt, Artificial Sequence
  Description of Artificial Sequence: Synthetic oligonucleotide
ugaggguucugguacaaaa

SEQ ID NO: 726554 - RNA, 19 nt, Artificial Sequence
  Description of Artificial Sequence: Synthetic oligonucleotide
acugcaucuaaaagaugcc

SEQ ID NO: 726555 - RNA, 19 nt, Artificial Sequence
  Description of Artificial Sequence: Synthetic oligonucleotide
uggcuaagucagcuuacgg

SEQ ID NO: 726556 - RNA, 19 nt, Artificial Sequence
  Description of Artificial Sequence: Synthetic oligonucleotide
gucuaaaagcuccaucaug

SEQ ID NO: 726557 - RNA, 19 nt, Artificial Sequence
  Description of Artificial Sequence: Synthetic oligonucleotide
ucaugaguagucccaugug

SEQ ID NO: 726558 - RNA, 19 nt, Artificial Sequence
  Description of Artificial Sequence: Synthetic oligonucleotide
uaaaaggaccucccaaaau

SEQ ID NO: 726559 - RNA, 19 nt, Artificial Sequence
  Description of Artificial Sequence: Synthetic oligonucleotide
augcauucaugaguagucc

SEQ ID NO: 726560 - RNA, 19 nt, Artificial Sequence
  Description of Artificial Sequence: Synthetic oligonucleotide
agacaaggauacuagguaa

SEQ ID NO: 726561 - RNA, 19 nt, Artificial Sequence
  Description of Artificial Sequence: Synthetic oligonucleotide
gauuugcuuuaagacaacc

SEQ ID NO: 726562 - RNA, 19 nt, Artificial Sequence
  Description of Artificial Sequence: Synthetic oligonucleotide
auguaagccaaccgagaag

SEQ ID NO: 726563 - RNA, 19 nt, Artificial Sequence
  Description of Artificial Sequence: Synthetic oligonucleotide
ugggucauaaacugucgga

SEQ ID NO: 726564 - RNA, 19 nt, Artificial Sequence
  Description of Artificial Sequence: Synthetic oligonucleotide
gaugacuuagacacugaac

SEQ ID NO: 726565 - RNA, 19 nt, Artificial Sequence
  Description of Artificial Sequence: Synthetic oligonucleotide
gacuuagacacugaacuga

SEQ ID NO: 726566 - RNA, 19 nt, Artificial Sequence
  Description of Artificial Sequence: Synthetic oligonucleotide
accaucaaauacaauucuc

SEQ ID NO: 726567 - RNA, 19 nt, Artificial Sequence
  Description of Artificial Sequence: Synthetic oligonucleotide
cuuggaaggcaacucggag

SEQ ID NO: 726568 - RNA, 19 nt, Artificial Sequence
  Description of Artificial Sequence: Synthetic oligonucleotide
ugaguagucccaugugucu

SEQ ID NO: 726569 - RNA, 19 nt, Artificial Sequence
  Description of Artificial Sequence: Synthetic oligonucleotide
gaucagcgacucaauaggg

SEQ ID NO: 726570 - RNA, 19 nt, Artificial Sequence
  Description of Artificial Sequence: Synthetic oligonucleotide
agucccaugugucuguccu

SEQ ID NO: 726571 - RNA, 19 nt, Artificial Sequence
  Description of Artificial Sequence: Synthetic oligonucleotide
caaaacauccaguuauaga

SEQ ID NO: 726572 - RNA, 19 nt, Artificial Sequence
  Description of Artificial Sequence: Synthetic oligonucleotide
caauucaagcaugucacac

SEQ ID NO: 726573 - RNA, 19 nt, Artificial Sequence
  Description of Artificial Sequence: Synthetic oligonucleotide
uguugaacccaagggaaga

SEQ ID NO: 726574 - RNA, 19 nt, Artificial Sequence
  Description of Artificial Sequence: Synthetic oligonucleotide
uaagcgcuugucaaguaau

SEQ ID NO: 726575 - RNA, 19 nt, Artificial Sequence
  Description of Artificial Sequence: Synthetic oligonucleotide
caugacaguguagaugagc

SEQ ID NO: 726576 - RNA, 19 nt, Artificial Sequence
  Description of Artificial Sequence: Synthetic oligonucleotide
ucaagagguaccugacgca

SEQ ID NO: 726577 - RNA, 19 nt, Artificial Sequence
  Description of Artificial Sequence: Synthetic oligonucleotide
cagccagaaggcuagacuc

SEQ ID NO: 726578 - RNA, 19 nt, Artificial Sequence
  Description of Artificial Sequence: Synthetic oligonucleotide
augaguagucccauguguc

SEQ ID NO: 726579 - RNA, 19 nt, Artificial Sequence
  Description of Artificial Sequence: Synthetic oligonucleotide
accugcaacugcuauaaaa

SEQ ID NO: 726580 - RNA, 19 nt, Artificial Sequence
  Description of Artificial Sequence: Synthetic oligonucleotide
agagguaccugacgcacug

SEQ ID NO: 726581 - RNA, 19 nt, Artificial Sequence
  Description of Artificial Sequence: Synthetic oligonucleotide
uaagccaaccgagaagcug

SEQ ID NO: 726582 - RNA, 19 nt, Artificial Sequence
  Description of Artificial Sequence: Synthetic oligonucleotide
uccuccguggugauguaug

SEQ ID NO: 726583 - RNA, 19 nt, Artificial Sequence
  Description of Artificial Sequence: Synthetic oligonucleotide
caucaacgaagagaaagag

SEQ ID NO: 726584 - RNA, 19 nt, Artificial Sequence
  Description of Artificial Sequence: Synthetic oligonucleotide
cuuacggaugacuuagaca

SEQ ID NO: 726585 - RNA, 19 nt, Artificial Sequence
  Description of Artificial Sequence: Synthetic oligonucleotide
cugggucauaaacugucgg

SEQ ID NO: 726586 - RNA, 19 nt, Artificial Sequence
  Description of Artificial Sequence: Synthetic oligonucleotide
cuugaguuguuuccacgag

SEQ ID NO: 726587 - RNA, 19 nt, Artificial Sequence
  Description of Artificial Sequence: Synthetic oligonucleotide
aggauacuagguaaaagga

SEQ ID NO: 726588 - RNA, 19 nt, Artificial Sequence
  Description of Artificial Sequence: Synthetic oligonucleotide
acacaaaggcucuuuguaa

SEQ ID NO: 726589 - RNA, 19 nt, Artificial Sequence
  Description of Artificial Sequence: Synthetic oligonucleotide
uccacgagccgucagccgu

SEQ ID NO: 726590 - RNA, 19 nt, Artificial Sequence
  Description of Artificial Sequence: Synthetic oligonucleotide
uggcuaagguuaagcagcc

SEQ ID NO: 726591 - RNA, 19 nt, Artificial Sequence
  Description of Artificial Sequence: Synthetic oligonucleotide
auaggucaggacuggcaag

SEQ ID NO: 726592 - RNA, 19 nt, Artificial Sequence
  Description of Artificial Sequence: Synthetic oligonucleotide
auaagcgcuugucaaguaa

SEQ ID NO: 726593 - RNA, 19 nt, Artificial Sequence
  Description of Artificial Sequence: Synthetic oligonucleotide
gaaggcuagacuccuagcu

SEQ ID NO: 726594 - RNA, 19 nt, Artificial Sequence
  Description of Artificial Sequence: Synthetic oligonucleotide
auuugcuuuaagacaacca

SEQ ID NO: 726595 - RNA, 19 nt, Artificial Sequence
  Description of Artificial Sequence: Synthetic oligonucleotide
aaguggaauaugugggguu

SEQ ID NO: 726596 - RNA, 19 nt, Artificial Sequence
  Description of Artificial Sequence: Synthetic oligonucleotide
auuaugugcaaaauuccau

SEQ ID NO: 726597 - RNA, 19 nt, Artificial Sequence
  Description of Artificial Sequence: Synthetic oligonucleotide
accuuaaguguuuccucag

SEQ ID NO: 726598 - RNA, 19 nt, Artificial Sequence
  Description of Artificial Sequence: Synthetic oligonucleotide
acagaaucaagagguaccu

SEQ ID NO: 726599 - RNA, 19 nt, Artificial Sequence
  Description of Artificial Sequence: Synthetic oligonucleotide
guuuccacgagccgucagc

SEQ ID NO: 726600 - RNA, 19 nt, Artificial Sequence
  Description of Artificial Sequence: Synthetic oligonucleotide
cugcaucuaaaagaugccc

SEQ ID NO: 726601 - RNA, 19 nt, Artificial Sequence
  Description of Artificial Sequence: Synthetic oligonucleotide
agaugcauuugugcauggc

SEQ ID NO: 726602 - RNA, 19 nt, Artificial Sequence
  Description of Artificial Sequence: Synthetic oligonucleotide
gauucgcuuguagacgaag

SEQ ID NO: 726603 - RNA, 19 nt, Artificial Sequence
  Description of Artificial Sequence: Synthetic oligonucleotide
ugacgcacugcaucggaca

SEQ ID NO: 726604 - RNA, 19 nt, Artificial Sequence
  Description of Artificial Sequence: Synthetic oligonucleotide
gugauguauggucucacga

SEQ ID NO: 726605 - RNA, 19 nt, Artificial Sequence
  Description of Artificial Sequence: Synthetic oligonucleotide
ggucaugaauuuaaguuug

SEQ ID NO: 726606 - RNA, 19 nt, Artificial Sequence
  Description of Artificial Sequence: Synthetic oligonucleotide
gacgcacugcaucggacag

SEQ ID NO: 726607 - RNA, 19 nt, Artificial Sequence
  Description of Artificial Sequence: Synthetic oligonucleotide
aagucguccgcaccauaca

SEQ ID NO: 726608 - RNA, 19 nt, Artificial Sequence
  Description of Artificial Sequence: Synthetic oligonucleotide
uuuccacgagccgucagcc

SEQ ID NO: 726609 - RNA, 19 nt, Artificial Sequence
  Description of Artificial Sequence: Synthetic oligonucleotide
gaacugagggguccuugag

SEQ ID NO: 726610 - RNA, 19 nt, Artificial Sequence
  Description of Artificial Sequence: Synthetic oligonucleotide
cagcuuacggaugacuuag

SEQ ID NO: 726611 - RNA, 19 nt, Artificial Sequence
  Description of Artificial Sequence: Synthetic oligonucleotide
gagggagugaggucuuccc

SEQ ID NO: 726612 - RNA, 19 nt, Artificial Sequence
  Description of Artificial Sequence: Synthetic oligonucleotide
acggaugacuuagacacug

SEQ ID NO: 726613 - RNA, 19 nt, Artificial Sequence
  Description of Artificial Sequence: Synthetic oligonucleotide
aucagcgacucaauagggg

SEQ ID NO: 726614 - RNA, 19 nt, Artificial Sequence
  Description of Artificial Sequence: Synthetic oligonucleotide
cuuggcuaagucagcuuac

SEQ ID NO: 726615 - RNA, 19 nt, Artificial Sequence
  Description of Artificial Sequence: Synthetic oligonucleotide
ccuuacacaguacaguaac

SEQ ID NO: 726616 - RNA, 19 nt, Artificial Sequence
  Description of Artificial Sequence: Synthetic oligonucleotide
ucuaugagggagugagguc

SEQ ID NO: 726617 - RNA, 19 nt, Artificial Sequence
  Description of Artificial Sequence: Synthetic oligonucleotide
ucccaaaauuugccaaaac

SEQ ID NO: 726618 - RNA, 19 nt, Artificial Sequence
  Description of Artificial Sequence: Synthetic oligonucleotide
gagcuuguaccuuaagugu

SEQ ID NO: 726619 - RNA, 19 nt, Artificial Sequence
  Description of Artificial Sequence: Synthetic oligonucleotide
ggugauguauggucucacg

SEQ ID NO: 726620 - RNA, 19 nt, Artificial Sequence
  Description of Artificial Sequence: Synthetic oligonucleotide
guaccugacgcacugcauc

SEQ ID NO: 726621 - RNA, 19 nt, Artificial Sequence
  Description of Artificial Sequence: Synthetic oligonucleotide
uacauccucccugaguugu

SEQ ID NO: 726622 - RNA, 19 nt, Artificial Sequence
  Description of Artificial Sequence: Synthetic oligonucleotide
aacucggagguaauucuga

SEQ ID NO: 726623 - RNA, 19 nt, Artificial Sequence
  Description of Artificial Sequence: Synthetic oligonucleotide
caugcuguggccaguguca

SEQ ID NO: 726624 - RNA, 19 nt, Artificial Sequence
  Description of Artificial Sequence: Synthetic oligonucleotide
auacuagguaaaaggaccu

SEQ ID NO: 726625 - RNA, 19 nt, Artificial Sequence
  Description of Artificial Sequence: Synthetic oligonucleotide
guaaaaggaccucccaaaa

SEQ ID NO: 726626 - RNA, 19 nt, Artificial Sequence
  Description of Artificial Sequence: Synthetic oligonucleotide
caagaagucguccgcacca

SEQ ID NO: 726627 - RNA, 19 nt, Artificial Sequence
  Description of Artificial Sequence: Synthetic oligonucleotide
guaccuuaaguguuuccuc

SEQ ID NO: 726628 - RNA, 19 nt, Artificial Sequence
  Description of Artificial Sequence: Synthetic oligonucleotide
agccagaaggcuagacucc

SEQ ID NO: 726629 - RNA, 19 nt, Artificial Sequence
  Description of Artificial Sequence: Synthetic oligonucleotide
gcucaaacaugugacagcc

SEQ ID NO: 726630 - RNA, 19 nt, Artificial Sequence
  Description of Artificial Sequence: Synthetic oligonucleotide
agcaagagauuuaucuuca

SEQ ID NO: 726631 - RNA, 19 nt, Artificial Sequence
  Description of Artificial Sequence: Synthetic oligonucleotide
auaaacugucggauggucu

SEQ ID NO: 726632 - RNA, 19 nt, Artificial Sequence
  Description of Artificial Sequence: Synthetic oligonucleotide
caacucggagguaauucug

SEQ ID NO: 726633 - RNA, 19 nt, Artificial Sequence
  Description of Artificial Sequence: Synthetic oligonucleotide
gggacaaauaguucuugac

SEQ ID NO: 726634 - RNA, 19 nt, Artificial Sequence
  Description of Artificial Sequence: Synthetic oligonucleotide
agaggggaugguccgguug

SEQ ID NO: 726635 - RNA, 19 nt, Artificial Sequence
  Description of Artificial Sequence: Synthetic oligonucleotide
ggucauaaacugucggaug

SEQ ID NO: 726636 - RNA, 19 nt, Artificial Sequence
  Description of Artificial Sequence: Synthetic oligonucleotide
cauguaagccaaccgagaa

SEQ ID NO: 726637 - RNA, 19 nt, Artificial Sequence
  Description of Artificial Sequence: Synthetic oligonucleotide
caucuaaaagaugcccuug

SEQ ID NO: 726638 - RNA, 19 nt, Artificial Sequence
  Description of Artificial Sequence: Synthetic oligonucleotide
gaguagucccaugugucug

SEQ ID NO: 726639 - RNA, 19 nt, Artificial Sequence
  Description of Artificial Sequence: Synthetic oligonucleotide
ggauacuagguaaaaggac

SEQ ID NO: 726640 - RNA, 19 nt, Artificial Sequence
  Description of Artificial Sequence: Synthetic oligonucleotide
ggcuaagucagcuuacgga

SEQ ID NO: 726641 - RNA, 19 nt, Artificial Sequence
  Description of Artificial Sequence: Synthetic oligonucleotide
ucauaaacugucggauggu

SEQ ID NO: 726642 - RNA, 19 nt, Artificial Sequence
  Description of Artificial Sequence: Synthetic oligonucleotide
uugccaaaacauccaguua

SEQ ID NO: 726643 - RNA, 19 nt, Artificial Sequence
  Description of Artificial Sequence: Synthetic oligonucleotide
cuaaaagaugcccuuggcu

SEQ ID NO: 726644 - RNA, 19 nt, Artificial Sequence
  Description of Artificial Sequence: Synthetic oligonucleotide
uguagacgaaguggaauau

SEQ ID NO: 726645 - RNA, 19 nt, Artificial Sequence
  Description of Artificial Sequence: Synthetic oligonucleotide
caccaagucagggucgggg

SEQ ID NO: 726646 - RNA, 19 nt, Artificial Sequence
  Description of Artificial Sequence: Synthetic oligonucleotide
gaguuccgagcucugggac

SEQ ID NO: 726647 - RNA, 19 nt, Artificial Sequence
  Description of Artificial Sequence: Synthetic oligonucleotide
gucaucuacagaggggaug

SEQ ID NO: 726648 - RNA, 19 nt, Artificial Sequence
  Description of Artificial Sequence: Synthetic oligonucleotide
aaauccagcaagagauuua

SEQ ID NO: 726649 - RNA, 19 nt, Artificial Sequence
  Description of Artificial Sequence: Synthetic oligonucleotide
cauaaacugucggaugguc

SEQ ID NO: 726650 - RNA, 19 nt, Artificial Sequence
  Description of Artificial Sequence: Synthetic oligonucleotide
gcgcuugucaaguaauagc

SEQ ID NO: 726651 - RNA, 19 nt, Artificial Sequence
  Description of Artificial Sequence: Synthetic oligonucleotide
gguucugguacaaaagaca

SEQ ID NO: 726652 - RNA, 19 nt, Artificial Sequence
  Description of Artificial Sequence: Synthetic oligonucleotide
guagacgaaguggaauaug

SEQ ID NO: 726653 - RNA, 19 nt, Artificial Sequence
  Description of Artificial Sequence: Synthetic oligonucleotide
caagcucaaacaugugaca

SEQ ID NO: 726654 - RNA, 19 nt, Artificial Sequence
  Description of Artificial Sequence: Synthetic oligonucleotide
ugcauacuuauagaauauu

SEQ ID NO: 726655 - RNA, 19 nt, Artificial Sequence
  Description of Artificial Sequence: Synthetic oligonucleotide
caucggacagucuugucaa

SEQ ID NO: 726656 - RNA, 19 nt, Artificial Sequence
  Description of Artificial Sequence: Synthetic oligonucleotide
caguaugugcugaggguuc

SEQ ID NO: 726657 - RNA, 19 nt, Artificial Sequence
  Description of Artificial Sequence: Synthetic oligonucleotide
uuccacgagccgucagccg

SEQ ID NO: 726658 - RNA, 19 nt, Artificial Sequence
  Description of Artificial Sequence: Synthetic oligonucleotide
agcuugcagacccgaagca

SEQ ID NO: 726659 - RNA, 19 nt, Artificial Sequence
  Description of Artificial Sequence: Synthetic oligonucleotide
uugaucuuuugaggauaag

SEQ ID NO: 726660 - RNA, 19 nt, Artificial Sequence
  Description of Artificial Sequence: Synthetic oligonucleotide
guccgcaccauacauccuc

SEQ ID NO: 726661 - RNA, 19 nt, Artificial Sequence
  Description of Artificial Sequence: Synthetic oligonucleotide
uccgaguuccgagcucugg

SEQ ID NO: 726662 - RNA, 19 nt, Artificial Sequence
  Description of Artificial Sequence: Synthetic oligonucleotide
agccguguggaaguccuuc

SEQ ID NO: 726663 - RNA, 19 nt, Artificial Sequence
  Description of Artificial Sequence: Synthetic oligonucleotide
gcaucggacagucuuguca

SEQ ID NO: 726664 - RNA, 19 nt, Artificial Sequence
  Description of Artificial Sequence: Synthetic oligonucleotide
caugaguagucccaugugu

SEQ ID NO: 726665 - RNA, 19 nt, Artificial Sequence
  Description of Artificial Sequence: Synthetic oligonucleotide
auucgcuuguagacgaagu

SEQ ID NO: 726666 - RNA, 19 nt, Artificial Sequence
  Description of Artificial Sequence: Synthetic oligonucleotide
acauguaagccaaccgaga

SEQ ID NO: 726667 - RNA, 19 nt, Artificial Sequence
  Description of Artificial Sequence: Synthetic oligonucleotide
acagugcuccauaagcgcu

SEQ ID NO: 726668 - RNA, 19 nt, Artificial Sequence
  Description of Artificial Sequence: Synthetic oligonucleotide
acugcaucggacagucuug

SEQ ID NO: 726669 - RNA, 19 nt, Artificial Sequence
  Description of Artificial Sequence: Synthetic oligonucleotide
auauagacugaaggaugga

SEQ ID NO: 726670 - RNA, 19 nt, Artificial Sequence
  Description of Artificial Sequence: Synthetic oligonucleotide
cuaugagggagugaggucu

SEQ ID NO: 726671 - RNA, 19 nt, Artificial Sequence
  Description of Artificial Sequence: Synthetic oligonucleotide
acucggagguaauucugaa

SEQ ID NO: 726672 - RNA, 19 nt, Artificial Sequence
  Description of Artificial Sequence: Synthetic oligonucleotide
cgagcucugggacaaauag

SEQ ID NO: 726673 - RNA, 19 nt, Artificial Sequence
  Description of Artificial Sequence: Synthetic oligonucleotide
uacuagguaaaaggaccuc

SEQ ID NO: 726674 - RNA, 19 nt, Artificial Sequence
  Description of Artificial Sequence: Synthetic oligonucleotide
aacugucggauggucugca

SEQ ID NO: 726675 - RNA, 19 nt, Artificial Sequence
  Description of Artificial Sequence: Synthetic oligonucleotide
cugugcauccgcuguugac

SEQ ID NO: 726676 - RNA, 19 nt, Artificial Sequence
  Description of Artificial Sequence: Synthetic oligonucleotide
caacuaccucauuugggca

SEQ ID NO: 726677 - RNA, 19 nt, Artificial Sequence
  Description of Artificial Sequence: Synthetic oligonucleotide
cucacgaggagggucuuuc

SEQ ID NO: 726678 - RNA, 19 nt, Artificial Sequence
  Description of Artificial Sequence: Synthetic oligonucleotide
cuaagguuaagcagccagu

SEQ ID NO: 726679 - RNA, 19 nt, Artificial Sequence
  Description of Artificial Sequence: Synthetic oligonucleotide
ucgcagccuguucuucuug

SEQ ID NO: 726680 - RNA, 19 nt, Artificial Sequence
  Description of Artificial Sequence: Synthetic oligonucleotide
aguaugugcugaggguucu

SEQ ID NO: 726681 - RNA, 19 nt, Artificial Sequence
  Description of Artificial Sequence: Synthetic oligonucleotide
ugauucgcuuguagacgaa

SEQ ID NO: 726682 - RNA, 19 nt, Artificial Sequence
  Description of Artificial Sequence: Synthetic oligonucleotide
caccauacauccucccuga

SEQ ID NO: 726683 - RNA, 19 nt, Artificial Sequence
  Description of Artificial Sequence: Synthetic oligonucleotide
gcuaagucagcuuacggau

SEQ ID NO: 726684 - RNA, 19 nt, Artificial Sequence
  Description of Artificial Sequence: Synthetic oligonucleotide
uccugugcauccgcuguug

SEQ ID NO: 726685 - RNA, 19 nt, Artificial Sequence
  Description of Artificial Sequence: Synthetic oligonucleotide
ccuuaaguguuuccucagc

SEQ ID NO: 726686 - RNA, 19 nt, Artificial Sequence
  Description of Artificial Sequence: Synthetic oligonucleotide
agcuuguaccuuaaguguu

SEQ ID NO: 726687 - RNA, 19 nt, Artificial Sequence
  Description of Artificial Sequence: Synthetic oligonucleotide
cucuaugagggagugaggu

SEQ ID NO: 726688 - RNA, 19 nt, Artificial Sequence
  Description of Artificial Sequence: Synthetic oligonucleotide
caauccugacaguuuaccu

SEQ ID NO: 726689 - RNA, 19 nt, Artificial Sequence
  Description of Artificial Sequence: Synthetic oligonucleotide
agugcuccauaagcgcuug

SEQ ID NO: 726690 - RNA, 19 nt, Artificial Sequence
  Description of Artificial Sequence: Synthetic oligonucleotide
ccuuaaauuucuccgcaca

SEQ ID NO: 726691 - RNA, 19 nt, Artificial Sequence
  Description of Artificial Sequence: Synthetic oligonucleotide
gcuaugacauaggucagga

SEQ ID NO: 726692 - RNA, 19 nt, Artificial Sequence
  Description of Artificial Sequence: Synthetic oligonucleotide
aggggccuccaccuuaaau

SEQ ID NO: 726693 - RNA, 19 nt, Artificial Sequence
  Description of Artificial Sequence: Synthetic oligonucleotide
gugcaaaauuccauugaaa

SEQ ID NO: 726694 - RNA, 19 nt, Artificial Sequence
  Description of Artificial Sequence: Synthetic oligonucleotide
ccaguuauagaagagagau

SEQ ID NO: 726695 - RNA, 19 nt, Artificial Sequence
  Description of Artificial Sequence: Synthetic oligonucleotide
ggauuauuguacaguauua

SEQ ID NO: 726696 - RNA, 19 nt, Artificial Sequence
  Description of Artificial Sequence: Synthetic oligonucleotide
ggcaacucggagguaauuc

SEQ ID NO: 726697 - RNA, 19 nt, Artificial Sequence
  Description of Artificial Sequence: Synthetic oligonucleotide
ccgaguuccgagcucuggg

SEQ ID NO: 726698 - RNA, 19 nt, Artificial Sequence
  Description of Artificial Sequence: Synthetic oligonucleotide
cacaguaugugcugagggu

SEQ ID NO: 726699 - RNA, 19 nt, Artificial Sequence
  Description of Artificial Sequence: Synthetic oligonucleotide
aagcgcuugucaaguaaua

SEQ ID NO: 726700 - RNA, 19 nt, Artificial Sequence
  Description of Artificial Sequence: Synthetic oligonucleotide
cuucugggaucagcgacuc

SEQ ID NO: 726701 - RNA, 19 nt, Artificial Sequence
  Description of Artificial Sequence: Synthetic oligonucleotide
guugaccucuuggaaggca

SEQ ID NO: 726702 - RNA, 19 nt, Artificial Sequence
  Description of Artificial Sequence: Synthetic oligonucleotide
uuuggucuucugggaucag

SEQ ID NO: 726703 - RNA, 19 nt, Artificial Sequence
  Description of Artificial Sequence: Synthetic oligonucleotide
ggcaagaagucguccgcac

SEQ ID NO: 726704 - RNA, 19 nt, Artificial Sequence
  Description of Artificial Sequence: Synthetic oligonucleotide
aggcaguacaacacaguau

SEQ ID NO: 726705 - RNA, 19 nt, Artificial Sequence
  Description of Artificial Sequence: Synthetic oligonucleotide
guuuaccugcaacugcuau

SEQ ID NO: 726706 - RNA, 19 nt, Artificial Sequence
  Description of Artificial Sequence: Synthetic oligonucleotide
uucuccgcacagagcugac

SEQ ID NO: 726707 - RNA, 19 nt, Artificial Sequence
  Description of Artificial Sequence: Synthetic oligonucleotide
ccuccguggugauguaugg

SEQ ID NO: 726708 - RNA, 19 nt, Artificial Sequence
  Description of Artificial Sequence: Synthetic oligonucleotide
gugaugggucuaaaagcuc

SEQ ID NO: 726709 - RNA, 19 nt, Artificial Sequence
  Description of Artificial Sequence: Synthetic oligonucleotide
uuguuuccacgagccguca

SEQ ID NO: 726710 - RNA, 19 nt, Artificial Sequence
  Description of Artificial Sequence: Synthetic oligonucleotide
gguuaagcagccagugauc

SEQ ID NO: 726711 - RNA, 19 nt, Artificial Sequence
  Description of Artificial Sequence: Synthetic oligonucleotide
cuguccaauucaagcaugu

SEQ ID NO: 726712 - RNA, 19 nt, Artificial Sequence
  Description of Artificial Sequence: Synthetic oligonucleotide
ugcaucggacagucuuguc

SEQ ID NO: 726713 - RNA, 19 nt, Artificial Sequence
  Description of Artificial Sequence: Synthetic oligonucleotide
uccgagcucugggacaaau

SEQ ID NO: 726714 - RNA, 19 nt, Artificial Sequence
  Description of Artificial Sequence: Synthetic oligonucleotide
uccgcacagagcugacaua

SEQ ID NO: 726715 - RNA, 19 nt, Artificial Sequence
  Description of Artificial Sequence: Synthetic oligonucleotide
guccgguuggugguccucc

SEQ ID NO: 726716 - RNA, 19 nt, Artificial Sequence
  Description of Artificial Sequence: Synthetic oligonucleotide
gccauguuucaucaacgaa

SEQ ID NO: 726717 - RNA, 19 nt, Artificial Sequence
  Description of Artificial Sequence: Synthetic oligonucleotide
gcaacucggagguaauucu

SEQ ID NO: 726718 - RNA, 19 nt, Artificial Sequence
  Description of Artificial Sequence: Synthetic oligonucleotide
cauaagcgcuugucaagua

SEQ ID NO: 726719 - RNA, 19 nt, Artificial Sequence
  Description of Artificial Sequence: Synthetic oligonucleotide
gccugugcauccuuacaca

SEQ ID NO: 726720 - RNA, 19 nt, Artificial Sequence
  Description of Artificial Sequence: Synthetic oligonucleotide
gugcauccgcuguugaccu

SEQ ID NO: 726721 - RNA, 19 nt, Artificial Sequence
  Description of Artificial Sequence: Synthetic oligonucleotide
gucguccgcaccauacauc

SEQ ID NO: 726722 - RNA, 19 nt, Artificial Sequence
  Description of Artificial Sequence: Synthetic oligonucleotide
gucagggucggggcaaaga

SEQ ID NO: 726723 - RNA, 19 nt, Artificial Sequence
  Description of Artificial Sequence: Synthetic oligonucleotide
gucagcuuacggaugacuu

SEQ ID NO: 726724 - RNA, 19 nt, Artificial Sequence
  Description of Artificial Sequence: Synthetic oligonucleotide
caggauuauuguacaguau

SEQ ID NO: 726725 - RNA, 19 nt, Artificial Sequence
  Description of Artificial Sequence: Synthetic oligonucleotide
agucaucuacagaggggau

SEQ ID NO: 726726 - RNA, 19 nt, Artificial Sequence
  Description of Artificial Sequence: Synthetic oligonucleotide
ggucuaaaagcuccaucau

SEQ ID NO: 726727 - RNA, 19 nt, Artificial Sequence
  Description of Artificial Sequence: Synthetic oligonucleotide
caagucagggucggggcaa

SEQ ID NO: 726728 - RNA, 19 nt, Artificial Sequence
  Description of Artificial Sequence: Synthetic oligonucleotide
cuguggccagugucaagga

SEQ ID NO: 726729 - RNA, 19 nt, Artificial Sequence
  Description of Artificial Sequence: Synthetic oligonucleotide
ccaauucaagcaugucaca

SEQ ID NO: 726730 - RNA, 19 nt, Artificial Sequence
  Description of Artificial Sequence: Synthetic oligonucleotide
ugcauccgcuguugaccuc

SEQ ID NO: 726731 - RNA, 19 nt, Artificial Sequence
  Description of Artificial Sequence: Synthetic oligonucleotide
aguuuaccugcaacugcua

SEQ ID NO: 726732 - RNA, 19 nt, Artificial Sequence
  Description of Artificial Sequence: Synthetic oligonucleotide
guagucccaugugucuguc

SEQ ID NO: 726733 - RNA, 19 nt, Artificial Sequence
  Description of Artificial Sequence: Synthetic oligonucleotide
cauuugggcacugcaucua

SEQ ID NO: 726734 - RNA, 19 nt, Artificial Sequence
  Description of Artificial Sequence: Synthetic oligonucleotide
agcuuacggaugacuuaga

SEQ ID NO: 726735 - RNA, 19 nt, Artificial Sequence
  Description of Artificial Sequence: Synthetic oligonucleotide
cuaccucauuugggcacug

SEQ ID NO: 726736 - RNA, 19 nt, Artificial Sequence
  Description of Artificial Sequence: Synthetic oligonucleotide
agccucgcagccuguucuu

SEQ ID NO: 726737 - RNA, 19 nt, Artificial Sequence
  Description of Artificial Sequence: Synthetic oligonucleotide
gcauuugugcauggccuuc

SEQ ID NO: 726738 - RNA, 19 nt, Artificial Sequence
  Description of Artificial Sequence: Synthetic oligonucleotide
agacccgaagcaggagcau

SEQ ID NO: 726739 - RNA, 19 nt, Artificial Sequence
  Description of Artificial Sequence: Synthetic oligonucleotide
ccgcuugugccacugccuc

SEQ ID NO: 726740 - RNA, 19 nt, Artificial Sequence
  Description of Artificial Sequence: Synthetic oligonucleotide
aggcaacucggagguaauu

SEQ ID NO: 726741 - RNA, 19 nt, Artificial Sequence
  Description of Artificial Sequence: Synthetic oligonucleotide
gcuugucaaguaauagccu

SEQ ID NO: 726742 - RNA, 19 nt, Artificial Sequence
  Description of Artificial Sequence: Synthetic oligonucleotide
guaagccaaccgagaagcu

SEQ ID NO: 726743 - RNA, 19 nt, Artificial Sequence
  Description of Artificial Sequence: Synthetic oligonucleotide
ggagguggcuaucguucaa

SEQ ID NO: 726744 - RNA, 19 nt, Artificial Sequence
  Description of Artificial Sequence: Synthetic oligonucleotide
ccgcaccauacauccuccc

SEQ ID NO: 726745 - RNA, 19 nt, Artificial Sequence
  Description of Artificial Sequence: Synthetic oligonucleotide
gaggccggcugugcagcuc

SEQ ID NO: 726746 - RNA, 19 nt, Artificial Sequence
  Description of Artificial Sequence: Synthetic oligonucleotide
ccacgagccgucagccgug

SEQ ID NO: 726747 - RNA, 19 nt, Artificial Sequence
  Description of Artificial Sequence: Synthetic oligonucleotide
guccgaguuccgagcucug

SEQ ID NO: 726748 - RNA, 19 nt, Artificial Sequence
  Description of Artificial Sequence: Synthetic oligonucleotide
cugcaucggacagucuugu

SEQ ID NO: 726749 - RNA, 19 nt, Artificial Sequence
  Description of Artificial Sequence: Synthetic oligonucleotide
cagugcuccauaagcgcuu

SEQ ID NO: 726750 - RNA, 19 nt, Artificial Sequence
  Description of Artificial Sequence: Synthetic oligonucleotide
cgaguuccgagcucuggga

SEQ ID NO: 726751 - RNA, 19 nt, Artificial Sequence
  Description of Artificial Sequence: Synthetic oligonucleotide
ccgguuggugguccuccgc

SEQ ID NO: 726752 - RNA, 19 nt, Artificial Sequence
  Description of Artificial Sequence: Synthetic oligonucleotide
gcuaucguucaagcucaaa

SEQ ID NO: 726753 - RNA, 19 nt, Artificial Sequence
  Description of Artificial Sequence: Synthetic oligonucleotide
ccgagaagcuggcuaaggu

SEQ ID NO: 726754 - RNA, 19 nt, Artificial Sequence
  Description of Artificial Sequence: Synthetic oligonucleotide
ccguggugauguauggucu

SEQ ID NO: 726755 - RNA, 19 nt, Artificial Sequence
  Description of Artificial Sequence: Synthetic oligonucleotide
ggcuaagguuaagcagcca

SEQ ID NO: 726756 - RNA, 19 nt, Artificial Sequence
  Description of Artificial Sequence: Synthetic oligonucleotide
cccuuuuggaugcauucau

SEQ ID NO: 726757 - RNA, 19 nt, Artificial Sequence
  Description of Artificial Sequence: Synthetic oligonucleotide
ccugugcauccgcuguuga

SEQ ID NO: 726758 - RNA, 19 nt, Artificial Sequence
  Description of Artificial Sequence: Synthetic oligonucleotide
gguaccugacgcacugcau

SEQ ID NO: 726759 - RNA, 19 nt, Artificial Sequence
  Description of Artificial Sequence: Synthetic oligonucleotide
ccgagcucugggacaaaua

SEQ ID NO: 726760 - RNA, 19 nt, Artificial Sequence
  Description of Artificial Sequence: Synthetic oligonucleotide
caucuacagaggggauggu

SEQ ID NO: 726761 - RNA, 19 nt, Artificial Sequence
  Description of Artificial Sequence: Synthetic oligonucleotide
ccgcacaaguugcagguuu

SEQ ID NO: 726762 - RNA, 19 nt, Artificial Sequence
  Description of Artificial Sequence: Synthetic oligonucleotide
ggcuaucguucaagcucaa

SEQ ID NO: 726763 - RNA, 19 nt, Artificial Sequence
  Description of Artificial Sequence: Synthetic oligonucleotide
cacgagccgucagccgugu

SEQ ID NO: 726764 - RNA, 19 nt, Artificial Sequence
  Description of Artificial Sequence: Synthetic oligonucleotide
cagccguguggaaguccuu

SEQ ID NO: 726765 - RNA, 19 nt, Artificial Sequence
  Description of Artificial Sequence: Synthetic oligonucleotide
cguccgcaccauacauccu

SEQ ID NO: 726766 - RNA, 19 nt, Artificial Sequence
  Description of Artificial Sequence: Synthetic oligonucleotide
aaaccaagaacucuugggc

SEQ ID NO: 726767 - RNA, 19 nt, Artificial Sequence
  Description of Artificial Sequence: Synthetic oligonucleotide
aaugaugggauuucgaaag

SEQ ID NO: 726768 - RNA, 19 nt, Artificial Sequence
  Description of Artificial Sequence: Synthetic oligonucleotide
aaaaccaagaacucuuggg

SEQ ID NO: 726769 - RNA, 19 nt, Artificial Sequence
  Description of Artificial Sequence: Synthetic oligonucleotide
gaugcauugggacugaagg

SEQ ID NO: 726770 - RNA, 19 nt, Artificial Sequence
  Description of Artificial Sequence: Synthetic oligonucleotide
aaauuguccaacuucaggu

SEQ ID NO: 726771 - RNA, 19 nt, Artificial Sequence
  Description of Artificial Sequence: Synthetic oligonucleotide
uccacuucggcuauaaagg

SEQ ID NO: 726772 - RNA, 19 nt, Artificial Sequence
  Description of Artificial Sequence: Synthetic oligonucleotide
agcuauacaauguggaggg

SEQ ID NO: 726773 - RNA, 19 nt, Artificial Sequence
  Description of Artificial Sequence: Synthetic oligonucleotide
ucugccgacagaaagcggg

SEQ ID NO: 726774 - RNA, 19 nt, Artificial Sequence
  Description of Artificial Sequence: Synthetic oligonucleotide
aguuguguucuccauuucc

SEQ ID NO: 726775 - RNA, 19 nt, Artificial Sequence
  Description of Artificial Sequence: Synthetic oligonucleotide
uggagcggaauucagacag

SEQ ID NO: 726776 - RNA, 19 nt, Artificial Sequence
  Description of Artificial Sequence: Synthetic oligonucleotide
uccagugaacuccucaucg

SEQ ID NO: 726777 - RNA, 19 nt, Artificial Sequence
  Description of Artificial Sequence: Synthetic oligonucleotide
uauaucuccagugugccgg

SEQ ID NO: 726778 - RNA, 19 nt, Artificial Sequence
  Description of Artificial Sequence: Synthetic oligonucleotide
aagucgaaaucccggaagg

SEQ ID NO: 726779 - RNA, 19 nt, Artificial Sequence
  Description of Artificial Sequence: Synthetic oligonucleotide
aagcuauacaauguggagg

SEQ ID NO: 726780 - RNA, 19 nt, Artificial Sequence
  Description of Artificial Sequence: Synthetic oligonucleotide
uuccacuucggcuauaaag

SEQ ID NO: 726781 - RNA, 19 nt, Artificial Sequence
  Description of Artificial Sequence: Synthetic oligonucleotide
ucaagcuauacaaugugga

SEQ ID NO: 726782 - RNA, 19 nt, Artificial Sequence
  Description of Artificial Sequence: Synthetic oligonucleotide
uguucauuugucuggcacg

SEQ ID NO: 726783 - RNA, 19 nt, Artificial Sequence
  Description of Artificial Sequence: Synthetic oligonucleotide
ugaguuggagaacucaagc

SEQ ID NO: 726784 - RNA, 19 nt, Artificial Sequence
  Description of Artificial Sequence: Synthetic oligonucleotide
uauacaauguggagggcag

SEQ ID NO: 726785 - RNA, 19 nt, Artificial Sequence
  Description of Artificial Sequence: Synthetic oligonucleotide
gaacucaagcuauacaaug

SEQ ID NO: 726786 - RNA, 19 nt, Artificial Sequence
  Description of Artificial Sequence: Synthetic oligonucleotide
ucgaaaucccggaaggccg

SEQ ID NO: 726787 - RNA, 19 nt, Artificial Sequence
  Description of Artificial Sequence: Synthetic oligonucleotide
aacucuagcucccgugccc

SEQ ID NO: 726788 - RNA, 19 nt, Artificial Sequence
  Description of Artificial Sequence: Synthetic oligonucleotide
uggggcaaaccccaaaggg

SEQ ID NO: 726789 - RNA, 19 nt, Artificial Sequence
  Description of Artificial Sequence: Synthetic oligonucleotide
gaaagcguaggcacgaagg

SEQ ID NO: 726790 - RNA, 19 nt, Artificial Sequence
  Description of Artificial Sequence: Synthetic oligonucleotide
gagaacucaagcuauacaa

SEQ ID NO: 726791 - RNA, 19 nt, Artificial Sequence
  Description of Artificial Sequence: Synthetic oligonucleotide
ugugccggaccucagagcc

SEQ ID NO: 726792 - RNA, 19 nt, Artificial Sequence
  Description of Artificial Sequence: Synthetic oligonucleotide
acuucggcuauaaaggccc

SEQ ID NO: 726793 - RNA, 19 nt, Artificial Sequence
  Description of Artificial Sequence: Synthetic oligonucleotide
gaaacagccgaaaagguuc
